United States Patent Application Publication US 2005/0244851 A1 - sequence listing, part 46

SEQ ID NO: 1781955 - DNA, 25 bp, Homo sapien
tgagatcagaggaatagtttcaggc

SEQ ID NO: 1781956 - DNA, 25 bp, Homo sapien
tgtatggcatgtaagaagagagttc

SEQ ID NO: 1781957 - DNA, 25 bp, Homo sapien
tatgacattacaaattggcacgaaa

SEQ ID NO: 1781958 - DNA, 25 bp, Homo sapien
taatagtgatggtgtattccagacc

SEQ ID NO: 1781959 - DNA, 25 bp, Homo sapien
gtgacaaattggagatttggaattt

SEQ ID NO: 1781960 - DNA, 25 bp, Homo sapien
ttccagaccaagtcagtgaaaaatg

SEQ ID NO: 1781961 - DNA, 25 bp, Homo sapien
tatttcaataaagtaacctgctgag

SEQ ID NO: 1781962 - DNA, 25 bp, Homo sapien
aagagctcctagaaatggaaaagac

SEQ ID NO: 1781963 - DNA, 25 bp, Homo sapien
ggtcttcctagtgattagaatccat

SEQ ID NO: 1781964 - DNA, 25 bp, Homo sapien
taggcagtctcacaagtgtcccaga

SEQ ID NO: 1781965 - DNA, 25 bp, Homo sapien
acctgcatggtcttcctagtgatta

SEQ ID NO: 1781966 - DNA, 25 bp, Homo sapien
ttttctctttcagaccccttctcaa

SEQ ID NO: 1781967 - DNA, 25 bp, Homo sapien
aaatcaaagtggctacagtccaaag

SEQ ID NO: 1781968 - DNA, 25 bp, Homo sapien
gcattccacgttcccacgagggctt

SEQ ID NO: 1781969 - DNA, 25 bp, Homo sapien
ttccgacgatgggtcttctctaaat

SEQ ID NO: 1781970 - DNA, 25 bp, Homo sapien
tgtgtgtgctaacaacacgctggta

SEQ ID NO: 1781971 - DNA, 25 bp, Homo sapien
gaagaacatctgaatcctccatggg

SEQ ID NO: 1781972 - DNA, 25 bp, Homo sapien
cctgttgttggcgtttcccttagca

SEQ ID NO: 1781973 - DNA, 25 bp, Homo sapien
cacgctggtacattcgcttttggct

SEQ ID NO: 1781974 - DNA, 25 bp, Homo sapien
cagaggaaagaggtagcatcttggt

SEQ ID NO: 1781975 - DNA, 25 bp, Homo sapien
ggaaagaggtagcatcttggtggca

SEQ ID NO: 1781976 - DNA, 25 bp, Homo sapien
agaggtagcatcttggtggcaccat

SEQ ID NO: 1781977 - DNA, 25 bp, Homo sapien
ctgattcagaggaaagaggtagcat

SEQ ID NO: 1781978 - DNA, 25 bp, Homo sapien
cttgtctagagatatcaaatactat

SEQ ID NO: 1781979 - DNA, 25 bp, Homo sapien
tcttgtctagagatatcaaatacta

SEQ ID NO: 1781980 - DNA, 25 bp, Homo sapien
aagctcttgtctagagatatcaaat

SEQ ID NO: 1781981 - DNA, 25 bp, Homo sapien
gctcttgtctagagatatcaaatac

SEQ ID NO: 1781982 - DNA, 25 bp, Homo sapien
aggttttgaacgtccagggacattg

SEQ ID NO: 1781983 - DNA, 25 bp, Homo sapien
gcttctctgccaatcggggtcggcg

SEQ ID NO: 1781984 - DNA, 25 bp, Homo sapien
ggttctttcgaacatttcaggtctg

SEQ ID NO: 1781985 - DNA, 25 bp, Homo sapien
tttgaacgtccagggacattggact

SEQ ID NO: 1781986 - DNA, 25 bp, Homo sapien
ctgagaggagcagcaaggacagagg

SEQ ID NO: 1781987 - DNA, 25 bp, Homo sapien
gcagcaaggacagaggcagctcaga

SEQ ID NO: 1781988 - DNA, 25 bp, Homo sapien
aggagcagcaaggacagaggcagct

SEQ ID NO: 1781989 - DNA, 25 bp, Homo sapien
ctcagagaggccaggacagggtgtg

SEQ ID NO: 1781990 - DNA, 25 bp, Homo sapien
atctgggtcttggaaagacagcggg

SEQ ID NO: 1781991 - DNA, 25 bp, Homo sapien
tctgggtcttggaaagacagcggga

SEQ ID NO: 1781992 - DNA, 25 bp, Homo sapien
tatctgggtcttggaaagacagcgg

SEQ ID NO: 1781993 - DNA, 25 bp, Homo sapien
tgggtcttggaaagacagcgggatt

SEQ ID NO: 1781994 - DNA, 25 bp, Homo sapien
tgggacgtgccaaacgttgaataaa

SEQ ID NO: 1781995 - DNA, 25 bp, Homo sapien
actaaaacacacgtcttagtatggg

SEQ ID NO: 1781996 - DNA, 25 bp, Homo sapien
tgaataaaagtgaagggcagcagga

SEQ ID NO: 1781997 - DNA, 25 bp, Homo sapien
tcttagtatgggacgtgccaaacgt

SEQ ID NO: 1781998 - DNA, 25 bp, Homo sapien
catattatgaattagagcattagta

SEQ ID NO: 1781999 - DNA, 25 bp, Homo sapien
actctgtttcacctatctgtttggg

SEQ ID NO: 1782000 - DNA, 25 bp, Homo sapien
tgtgtagcaaccatgggtccctgag

SEQ ID NO: 1782001 - DNA, 25 bp, Homo sapien
tcagtaggtaacttcttggttggaa

SEQ ID NO: 1782002 - DNA, 25 bp, Homo sapien
gaagtctcaggagcaggcagtcttg

SEQ ID NO: 1782003 - DNA, 25 bp, Homo sapien
tcaagatttgtgaaataccagaagc

SEQ ID NO: 1782004 - DNA, 25 bp, Homo sapien
cttgctatgagtttgatcagcaccc

SEQ ID NO: 1782005 - DNA, 25 bp, Homo sapien
tgcctgttagtaaactcctggccag

SEQ ID NO: 1782006 - DNA, 25 bp, Homo sapien
caggagagaatgtcaacaataaggg

SEQ ID NO: 1782007 - DNA, 25 bp, Homo sapien
gcatggccagtcatgtcaaacacag

SEQ ID NO: 1782008 - DNA, 25 bp, Homo sapien
taaagaggttatgtgaagtagactc

SEQ ID NO: 1782009 - DNA, 25 bp, Homo sapien
tgaagtagactcaaaaggattggca

SEQ ID NO: 1782010 - DNA, 25 bp, Homo sapien
ggctgattccactgcgggatattta

SEQ ID NO: 1782011 - DNA, 25 bp, Homo sapien
taatcacttctcagagtccagggag

SEQ ID NO: 1782012 - DNA, 25 bp, Homo sapien
gaggtccctgggaaggctgattcca

SEQ ID NO: 1782013 - DNA, 25 bp, Homo sapien
gactgccgcacagtccctttaatca

SEQ ID NO: 1782014 - DNA, 25 bp, Homo sapien
tagaaccagtttgatggccacagct

SEQ ID NO: 1782015 - DNA, 25 bp, Homo sapien
aaccagtttgatggccacagctgct

SEQ ID NO: 1782016 - DNA, 25 bp, Homo sapien
ctgttagaaccagtttgatggccac

SEQ ID NO: 1782017 - DNA, 25 bp, Homo sapien
ttagaaccagtttgatggccacagc

SEQ ID NO: 1782018 - DNA, 25 bp, Homo sapien
tggtaaaacccgctcctgtgcttct

SEQ ID NO: 1782019 - DNA, 25 bp, Homo sapien
tgtcttggtaaaacccgctcctgtg

SEQ ID NO: 1782020 - DNA, 25 bp, Homo sapien
gaataagaacacagtgttgtcttgg

SEQ ID NO: 1782021 - DNA, 25 bp, Homo sapien
cacagtgttgtcttggtaaaacccg

SEQ ID NO: 1782022 - DNA, 25 bp, Homo sapien
cactagggttggtggtccccaagag

SEQ ID NO: 1782023 - DNA, 25 bp, Homo sapien
ggttggtggtccccaagagaggata

SEQ ID NO: 1782024 - DNA, 25 bp, Homo sapien
ggtggtccccaagagaggataaaca

SEQ ID NO: 1782025 - DNA, 25 bp, Homo sapien
tggtggtccccaagagaggataaac

SEQ ID NO: 1782026 - DNA, 25 bp, Homo sapien
tccaaaacagctcagatccctctca

SEQ ID NO: 1782027 - DNA, 25 bp, Homo sapien
tggctacacactgccttcgcaatcg

SEQ ID NO: 1782028 - DNA, 25 bp, Homo sapien
cactgccttcgcaatcgtttgtcag

SEQ ID NO: 1782029 - DNA, 25 bp, Homo sapien
caatcgtttgtcagactgatttcca

SEQ ID NO: 1782030 - DNA, 25 bp, Homo sapien
gcgtctatctgctgacgtgcttctg

SEQ ID NO: 1782031 - DNA, 25 bp, Homo sapien
gaaatcagatggttgagcgtctatc

SEQ ID NO: 1782032 - DNA, 25 bp, Homo sapien
ccactattgtgttttgaccaatgaa

SEQ ID NO: 1782033 - DNA, 25 bp, Homo sapien
tttcctcccactattgtgttttgac

SEQ ID NO: 1782034 - DNA, 25 bp, Homo sapien
tccttcctccttctcgtgataagcc

SEQ ID NO: 1782035 - DNA, 25 bp, Homo sapien
agcccacagctcttttcgtttcgtg

SEQ ID NO: 1782036 - DNA, 25 bp, Homo sapien
cacagctcttttcgtttcgtgggtt

SEQ ID NO: 1782037 - DNA, 25 bp, Homo sapien
taagcccacagctcttttcgtttcg

SEQ ID NO: 1782038 - DNA, 25 bp, Homo sapien
ggctgaggagagtgaggcctcctgt

SEQ ID NO: 1782039 - DNA, 25 bp, Homo sapien
ttaggctgaggagagtgaggcctcc

SEQ ID NO: 1782040 - DNA, 25 bp, Homo sapien
gcctcctgtgcttctttctgctcac

SEQ ID NO: 1782041 - DNA, 25 bp, Homo sapien
ctgaggagagtgaggcctcctgtgc

SEQ ID NO: 1782042 - DNA, 25 bp, Homo sapien
ccaatccatatgggccactctgcct

SEQ ID NO: 1782043 - DNA, 25 bp, Homo sapien
gagctggctctttccaatccatatg

SEQ ID NO: 1782044 - DNA, 25 bp, Homo sapien
aaaccgtagtattttagcctcatca

SEQ ID NO: 1782045 - DNA, 25 bp, Homo sapien
gaacttactactttgctcgaatggg

SEQ ID NO: 1782046 - DNA, 25 bp, Homo sapien
gcatagactgccacaaatgaaagtg

SEQ ID NO: 1782047 - DNA, 25 bp, Homo sapien
taagtatagaccaagtgtagacctc

SEQ ID NO: 1782048 - DNA, 25 bp, Homo sapien
ttttctctggcgtttattctcacac

SEQ ID NO: 1782049 - DNA, 25 bp, Homo sapien
taagtgaacagcctatttggaatcc

SEQ ID NO: 1782050 - DNA, 25 bp, Homo sapien
ttggaatccttatggtccagaatca

SEQ ID NO: 1782051 - DNA, 25 bp, Homo sapien
cacacgtccgtgttacaggcctact

SEQ ID NO: 1782052 - DNA, 25 bp, Homo sapien
ggcctgtgccacagatgcattccat

SEQ ID NO: 1782053 - DNA, 25 bp, Homo sapien
gcatccttagatcttttttgccaca

SEQ ID NO: 1782054 - DNA, 25 bp, Homo sapien
gccacatccttttgctctgactcga

SEQ ID NO: 1782055 - DNA, 25 bp, Homo sapien
tctgactcgaagaggaagccaaccc

SEQ ID NO: 1782056 - DNA, 25 bp, Homo sapien
gcatccagctcttccatcccatcat

SEQ ID NO: 1782057 - DNA, 25 bp, Homo sapien
acaccatcacacaccatgcagccat

SEQ ID NO: 1782058 - DNA, 25 bp, Homo sapien
ccatcatacaccatcacacaccatg

SEQ ID NO: 1782059 - DNA, 25 bp, Homo sapien
tcatacaccatcacacaccatgcag

SEQ ID NO: 1782060 - DNA, 25 bp, Homo sapien
tctagacaatcaaatgaaccatctt

SEQ ID NO: 1782061 - DNA, 25 bp, Homo sapien
ctagacaatcaaatgaaccatcttg

SEQ ID NO: 1782062 - DNA, 25 bp, Homo sapien
ttctagacaatcaaatgaaccatct

SEQ ID NO: 1782063 - DNA, 25 bp, Homo sapien
taaacctggatggtggcagtaggca

SEQ ID NO: 1782064 - DNA, 25 bp, Homo sapien
ggaaacatactctgagcctctgaag

SEQ ID NO: 1782065 - DNA, 25 bp, Homo sapien
cagttgaaacaatgggtctgggcct

SEQ ID NO: 1782066 - DNA, 25 bp, Homo sapien
tccatcccatgcgaggttctgaggc

SEQ ID NO: 1782067 - DNA, 25 bp, Homo sapien
ggggaacactcttcaaaccactctc

SEQ ID NO: 1782068 - DNA, 25 bp, Homo sapien
tggggaacactcttcaaaccactct

SEQ ID NO: 1782069 - DNA, 25 bp, Homo sapien
aaaatcccagctcttgtgtggcaca

SEQ ID NO: 1782070 - DNA, 25 bp, Homo sapien
gagccccacattctgggactctggt

SEQ ID NO: 1782071 - DNA, 25 bp, Homo sapien
cttgtgtggcacattaaagagcccc

SEQ ID NO: 1782072 - DNA, 25 bp, Homo sapien
taaagagccccacattctgggactc

SEQ ID NO: 1782073 - DNA, 25 bp, Homo sapien
caatgggtagcttagaatctggtat

SEQ ID NO: 1782074 - DNA, 25 bp, Homo sapien
gcagcagatggcctctcgtggatct

SEQ ID NO: 1782075 - DNA, 25 bp, Homo sapien
tcgtggatctcacttgcaccgtaca

SEQ ID NO: 1782076 - DNA, 25 bp, Homo sapien
tctggtatccaagaacagtgaccca

SEQ ID NO: 1782077 - DNA, 25 bp, Homo sapien
cagtgtcacactcagtctttgtggc

SEQ ID NO: 1782078 - DNA, 25 bp, Homo sapien
aatgcacatcagtgtcacactcagt

SEQ ID NO: 1782079 - DNA, 25 bp, Homo sapien
tgcacatcagtgtcacactcagtct

SEQ ID NO: 1782080 - DNA, 25 bp, Homo sapien
acatcagtgtcacactcagtctttg

SEQ ID NO: 1782081 - DNA, 25 bp, Homo sapien
ggccacactgtgtattgcgagttaa

SEQ ID NO: 1782082 - DNA, 25 bp, Homo sapien
tatcggtgttcgagccaatgacggc

SEQ ID NO: 1782083 - DNA, 25 bp, Homo sapien
tgcctagcaaaccaaaaccactcag

SEQ ID NO: 1782084 - DNA, 25 bp, Homo sapien
tgactgagcagaccctatcggtgtt

SEQ ID NO: 1782085 - DNA, 25 bp, Homo sapien
aaatgcgaatagtgccctgttggaa

SEQ ID NO: 1782086 - DNA, 25 bp, Homo sapien
ggaaaacactgaccatgacacagag

SEQ ID NO: 1782087 - DNA, 25 bp, Homo sapien
cactgaccatgacacagagattttt

SEQ ID NO: 1782088 - DNA, 25 bp, Homo sapien
cccaaatgcgaatagtgccctgttg

SEQ ID NO: 1782089 - DNA, 25 bp, Homo sapien
cagctgctgcgataaaggagattct

SEQ ID NO: 1782090 - DNA, 25 bp, Homo sapien
cttaaagcttgggtagattcctctc

SEQ ID NO: 1782091 - DNA, 25 bp, Homo sapien
cagaagtggagttgtaccttctccc

SEQ ID NO: 1782092 - DNA, 25 bp, Homo sapien
ttctccccttgagtagttctactta

SEQ ID NO: 1782093 - DNA, 25 bp, Homo sapien
acttcccataggactgcaagaatga

SEQ ID NO: 1782094 - DNA, 25 bp, Homo sapien
ctggtgacttcccataggactgcaa

SEQ ID NO: 1782095 - DNA, 25 bp, Homo sapien
aactggtgacttcccataggactgc

SEQ ID NO: 1782096 - DNA, 25 bp, Homo sapien
ggtgacttcccataggactgcaaga

SEQ ID NO: 1782097 - DNA, 25 bp, Homo sapien
ttattcttgagtcacaacggaagct

SEQ ID NO: 1782098 - DNA, 25 bp, Homo sapien
gaaagtttatagagtcagcaggacc

SEQ ID NO: 1782099 - DNA, 25 bp, Homo sapien
cggaagctacagcttgaattttatt

SEQ ID NO: 1782100 - DNA, 25 bp, Homo sapien
gcattggatttaggagttgaaagtt

SEQ ID NO: 1782101 - DNA, 25 bp, Homo sapien
cttctttatatcttactaggcccat

SEQ ID NO: 1782102 - DNA, 25 bp, Homo sapien
gcttattgtcggcagaaagtccaac

SEQ ID NO: 1782103 - DNA, 25 bp, Homo sapien
cacattgaggtgcttattgtcggca

SEQ ID NO: 1782104 - DNA, 25 bp, Homo sapien
ttgtcggcagaaagtccaactgtgc

SEQ ID NO: 1782105 - DNA, 25 bp, Homo sapien
gtcattcacattgaggtgcttattg

SEQ ID NO: 1782106 - DNA, 25 bp, Homo sapien
tgtggcaagggaacactcggctgtt

SEQ ID NO: 1782107 - DNA, 25 bp, Homo sapien
ttgtgtaagtaatccagccttcacc

SEQ ID NO: 1782108 - DNA, 25 bp, Homo sapien
gctgtttgtctagtcagaaatgccc

SEQ ID NO: 1782109 - DNA, 25 bp, Homo sapien
ttgagacagcaaggctacctgtgac

SEQ ID NO: 1782110 - DNA, 25 bp, Homo sapien
tgggtgcaccattacaccagtggct

SEQ ID NO: 1782111 - DNA, 25 bp, Homo sapien
gaataagcaaggattggagccctct

SEQ ID NO: 1782112 - DNA, 25 bp, Homo sapien
ctgtgtcaggttcagcaaatacggg

SEQ ID NO: 1782113 - DNA, 25 bp, Homo sapien
gaagcactgtgcatgatctccttgc

SEQ ID NO: 1782114 - DNA, 25 bp, Homo sapien
tctgatcatcaataacttgggtcct

SEQ ID NO: 1782115 - DNA, 25 bp, Homo sapien
taatttgaaattctcgatgacatag

SEQ ID NO: 1782116 - DNA, 25 bp, Homo sapien
gaattctccatcaatggcatgagct

SEQ ID NO: 1782117 - DNA, 25 bp, Homo sapien
gaaaactagctctatccaactctaa

SEQ ID NO: 1782118 - DNA, 25 bp, Homo sapien
tcctggattcacaagaggtaccgaa

SEQ ID NO: 1782119 - DNA, 25 bp, Homo sapien
tcttagagagtacagaggcatgtcg

SEQ ID NO: 1782120 - DNA, 25 bp, Homo sapien
gaaacaagcaattaggtccagacag

SEQ ID NO: 1782121 - DNA, 25 bp, Homo sapien
acccagggctgatgtatagagagac

SEQ ID NO: 1782122 - DNA, 25 bp, Homo sapien
ccaagtgcactttcccaagaacgct

SEQ ID NO: 1782123 - DNA, 25 bp, Homo sapien
tcctaaggtaccctcaccaagtgca

SEQ ID NO: 1782124 - DNA, 25 bp, Homo sapien
taatatcaggaacggagtcactgtg

SEQ ID NO: 1782125 - DNA, 25 bp, Homo sapien
ccaactatggtagcatgaggtcaga

SEQ ID NO: 1782126 - DNA, 25 bp, Homo sapien
taagccgattacaaccaaggtagcc

SEQ ID NO: 1782127 - DNA, 25 bp, Homo sapien
ccaagaaaagtgacccgagccccat

SEQ ID NO: 1782128 - DNA, 25 bp, Homo sapien
gattctacacctagaaacagcccta

SEQ ID NO: 1782129 - DNA, 25 bp, Homo sapien
ccagccttctggtgtaacggttcaa

SEQ ID NO: 1782130 - DNA, 25 bp, Homo sapien
tacaagctcccacagatgtatctgg

SEQ ID NO: 1782131 - DNA, 25 bp, Homo sapien
gatgtatctggaatcactattttca

SEQ ID NO: 1782132 - DNA, 25 bp, Homo sapien
cccacagatgtatctggaatcacta

SEQ ID NO: 1782133 - DNA, 25 bp, Homo sapien
acccgtgtacaagctcccacagatg

SEQ ID NO: 1782134 - DNA, 25 bp, Homo sapien
tacaagttattgcaccatttccaca

SEQ ID NO: 1782135 - DNA, 25 bp, Homo sapien
acaagttattgcaccatttccacat

SEQ ID NO: 1782136 - DNA, 25 bp, Homo sapien
ttacaagttattgcaccatttccac

SEQ ID NO: 1782137 - DNA, 25 bp, Homo sapien
caagttattgcaccatttccacatt

SEQ ID NO: 1782138 - DNA, 25 bp, Homo sapien
gaagaaaaacagattgagaaacact

SEQ ID NO: 1782139 - DNA, 25 bp, Homo sapien
tatgaagaaaaacagattgagaaac

SEQ ID NO: 1782140 - DNA, 25 bp, Homo sapien
gaaaaacagattgagaaacacttga

SEQ ID NO: 1782141 - DNA, 25 bp, Homo sapien
agaaaaacagattgagaaacacttg

SEQ ID NO: 1782142 - DNA, 25 bp, Homo sapien
cactaccagcccttgatggtagctg

SEQ ID NO: 1782143 - DNA, 25 bp, Homo sapien
gggatcagggattcctcagtgctca

SEQ ID NO: 1782144 - DNA, 25 bp, Homo sapien
tgctgtttgcctctgagaaagcact

SEQ ID NO: 1782145 - DNA, 25 bp, Homo sapien
tgctcaggataattgtactgctgtt

SEQ ID NO: 1782146 - DNA, 25 bp, Homo sapien
tctcacaaggttggagtcagaggtc

SEQ ID NO: 1782147 - DNA, 25 bp, Homo sapien
gtcacaagttattggccacacaggc

SEQ ID NO: 1782148 - DNA, 25 bp, Homo sapien
caagttggtgctaggaagtcttctc

SEQ ID NO: 1782149 - DNA, 25 bp, Homo sapien
catttcattaagtcacgtggtcaca

SEQ ID NO: 1782150 - DNA, 25 bp, Homo sapien
tgttttatcattagcttgaagcaaa

SEQ ID NO: 1782151 - DNA, 25 bp, Homo sapien
tcattagcttgaagcaaaagaaaat

SEQ ID NO: 1782152 - DNA, 25 bp, Homo sapien
tctaagcttggttcagccgtgacca

SEQ ID NO: 1782153 - DNA, 25 bp, Homo sapien
tagcaatatctaagcttggttcagc

SEQ ID NO: 1782154 - DNA, 25 bp, Homo sapien
ttgcttctactccaccctgcagata

SEQ ID NO: 1782155 - DNA, 25 bp, Homo sapien
ttgtgtgggtgcatagctcagtttc

SEQ ID NO: 1782156 - DNA, 25 bp, Homo sapien
tcactcaggatcttattgataacta

SEQ ID NO: 1782157 - DNA, 25 bp, Homo sapien
ctgccaaagtgttgattgtgtgggt

SEQ ID NO: 1782158 - DNA, 25 bp, Homo sapien
gactgtgctattataagtggtgcct

SEQ ID NO: 1782159 - DNA, 25 bp, Homo sapien
catcacaggcattgactttgacacc

SEQ ID NO: 1782160 - DNA, 25 bp, Homo sapien
gaagcatgagcagctctcccatcac

SEQ ID NO: 1782161 - DNA, 25 bp, Homo sapien
gagtattcaagacattgtaagaagc

SEQ ID NO: 1782162 - DNA, 25 bp, Homo sapien
gacatcgtcatatctgctttgactt

SEQ ID NO: 1782163 - DNA, 25 bp, Homo sapien
ctaagacatcgtcatatctgctttg

SEQ ID NO: 1782164 - DNA, 25 bp, Homo sapien
aagacatcgtcatatctgctttgac

SEQ ID NO: 1782165 - DNA, 25 bp, Homo sapien
catcgtcatatctgctttgacttgt

SEQ ID NO: 1782166 - DNA, 25 bp, Homo sapien
cataacattaccaatcttgggcttc

SEQ ID NO: 1782167 - DNA, 25 bp, Homo sapien
gctcctttacacttgaaactcctgt

SEQ ID NO: 1782168 - DNA, 25 bp, Homo sapien
tgaaactcctgtacccttggccatt

SEQ ID NO: 1782169 - DNA, 25 bp, Homo sapien
tcacagttgcttcaacagtggagaa

SEQ ID NO: 1782170 - DNA, 25 bp, Homo sapien
tccaactttgttcccgcaatacagc

SEQ ID NO: 1782171 - DNA, 25 bp, Homo sapien
tgcactgatctggcggcagaccgga

SEQ ID NO: 1782172 - DNA, 25 bp, Homo sapien
atctggcggcagaccggaggaggca

SEQ ID NO: 1782173 - DNA, 25 bp, Homo sapien
gaaagcacccatggtagaatgagcc

SEQ ID NO: 1782174 - DNA, 25 bp, Homo sapien
aagcacccatggtagaatgagcctg

SEQ ID NO: 1782175 - DNA, 25 bp, Homo sapien
tgtctggtaccaatttcagaaactt

SEQ ID NO: 1782176 - DNA, 25 bp, Homo sapien
gttcctttcttatttaactgatcca

SEQ ID NO: 1782177 - DNA, 25 bp, Homo sapien
tattatggcctgctgaaaatgcctg

SEQ ID NO: 1782178 - DNA, 25 bp, Homo sapien
gaaaatgcctgatagctctctttgt

SEQ ID NO: 1782179 - DNA, 25 bp, Homo sapien
tcaaaatgctaagatggtcctgaag

SEQ ID NO: 1782180 - DNA, 25 bp, Homo sapien
tctccccgtgcggtcagctgccatt

SEQ ID NO: 1782181 - DNA, 25 bp, Homo sapien
cctgaaggtgaaatagacaccttct

SEQ ID NO: 1782182 - DNA, 25 bp, Homo sapien
agcctcctcattttgtcacagtgtt

SEQ ID NO: 1782183 - DNA, 25 bp, Homo sapien
actgtcatcatctgtaggagttgtt

SEQ ID NO: 1782184 - DNA, 25 bp, Homo sapien
tcatcatctgtaggagttgttggct

SEQ ID NO: 1782185 - DNA, 25 bp, Homo sapien
tgtcatcatctgtaggagttgttgg

SEQ ID NO: 1782186 - DNA, 25 bp, Homo sapien
catcatctgtaggagttgttggctc

SEQ ID NO: 1782187 - DNA, 25 bp, Homo sapien
tttggcattgaggttgtctccactc

SEQ ID NO: 1782188 - DNA, 25 bp, Homo sapien
taatttgcaaattcctcactttggc

SEQ ID NO: 1782189 - DNA, 25 bp, Homo sapien
gattccccagaattgccctatagag

SEQ ID NO: 1782190 - DNA, 25 bp, Homo sapien
tcgaaaatacgcattgattccccag

SEQ ID NO: 1782191 - DNA, 25 bp, Homo sapien
atgcactgagacgtgcaaatgtggc

SEQ ID NO: 1782192 - DNA, 25 bp, Homo sapien
ctatgcactgagacgtgcaaatgtg

SEQ ID NO: 1782193 - DNA, 25 bp, Homo sapien
tatgcactgagacgtgcaaatgtgg

SEQ ID NO: 1782194 - DNA, 25 bp, Homo sapien
cgtgcaaatgtggccagtctgaccc

SEQ ID NO: 1782195 - DNA, 25 bp, Homo sapien
aaatgattaccaactgtttgcttga

SEQ ID NO: 1782196 - DNA, 25 bp, Homo sapien
acttccattaaatgattaccaactg

SEQ ID NO: 1782197 - DNA, 25 bp, Homo sapien
attggtgcaagaagtaatgacaagt

SEQ ID NO: 1782198 - DNA, 25 bp, Homo sapien
ggtgcaagaagtaatgacaagtaaa

SEQ ID NO: 1782199 - DNA, 25 bp, Homo sapien
ctgtgcaactcctatgtcagaaaca

SEQ ID NO: 1782200 - DNA, 25 bp, Homo sapien
tcttggcataacaaggacttgagtt

SEQ ID NO: 1782201 - DNA, 25 bp, Homo sapien
gacttgagttatcttgagggatgtc

SEQ ID NO: 1782202 - DNA, 25 bp, Homo sapien
actcctatgtcagaaacaatcttgg

SEQ ID NO: 1782203 - DNA, 25 bp, Homo sapien
tgatagccaataagaaatatgacca

SEQ ID NO: 1782204 - DNA, 25 bp, Homo sapien
taatgaaagtgatagccaataagaa

SEQ ID NO: 1782205 - DNA, 25 bp, Homo sapien
taagaaatatgaccactgagagtgt

SEQ ID NO: 1782206 - DNA, 25 bp, Homo sapien
aataagaaatatgaccactgagagt

SEQ ID NO: 1782207 - DNA, 25 bp, Homo sapien
gtgtaaaacctgacaaaatcacttc

SEQ ID NO: 1782208 - DNA, 25 bp, Homo sapien
aatcacttcttgtgctctaaattgc

SEQ ID NO: 1782209 - DNA, 25 bp, Homo sapien
gacaaaatcacttcttgtgctctaa

SEQ ID NO: 1782210 - DNA, 25 bp, Homo sapien
tcacttcttgtgctctaaattgcat

SEQ ID NO: 1782211 - DNA, 25 bp, Homo sapien
tctttaaatgagtatgtgccaggta

SEQ ID NO: 1782212 - DNA, 25 bp, Homo sapien
gatgctagaaacagcacagtgaccc

SEQ ID NO: 1782213 - DNA, 25 bp, Homo sapien
acagtgacccagtcttcaatggaga

SEQ ID NO: 1782214 - DNA, 25 bp, Homo sapien
taaattgaaggcgatggcatagaac

SEQ ID NO: 1782215 - DNA, 25 bp, Homo sapien
catgccaaatgtggcaagacttttc

SEQ ID NO: 1782216 - DNA, 25 bp, Homo sapien
caccatcgttgttcccattgtacca

SEQ ID NO: 1782217 - DNA, 25 bp, Homo sapien
tagggaacttgagagcaccatcgtt

SEQ ID NO: 1782218 - DNA, 25 bp, Homo sapien
caagacttttcaccgagtcactagg

SEQ ID NO: 1782219 - DNA, 25 bp, Homo sapien
tatgccacgggcactatgtttgccc

SEQ ID NO: 1782220 - DNA, 25 bp, Homo sapien
acacgtaggcagcactatgccacgg

SEQ ID NO: 1782221 - DNA, 25 bp, Homo sapien
gcagcactatgccacgggcactatg

SEQ ID NO: 1782222 - DNA, 25 bp, Homo sapien
taggcagcactatgccacgggcact

SEQ ID NO: 1782223 - DNA, 25 bp, Homo sapien
ctggctctcatgcttgtgaaatgga

SEQ ID NO: 1782224 - DNA, 25 bp, Homo sapien
atctggctctcatgcttgtgaaatg

SEQ ID NO: 1782225 - DNA, 25 bp, Homo sapien
ccatctggctctcatgcttgtgaaa

SEQ ID NO: 1782226 - DNA, 25 bp, Homo sapien
ttccatctggctctcatgcttgtga

SEQ ID NO: 1782227 - DNA, 25 bp, Homo sapien
tcttaaaccagtcactgttgctaac

SEQ ID NO: 1782228 - DNA, 25 bp, Homo sapien
ctttgtactaatattgctaagaggc

SEQ ID NO: 1782229 - DNA, 25 bp, Homo sapien
ggtgccttgcaaatgcctttgtact

SEQ ID NO: 1782230 - DNA, 25 bp, Homo sapien
tgtactaatattgctaagaggcagt

SEQ ID NO: 1782231 - DNA, 25 bp, Homo sapien
tttggctcagatatgcccataaggt

SEQ ID NO: 1782232 - DNA, 25 bp, Homo sapien
cagaggaaagtaaaagtgaatgtgt

SEQ ID NO: 1782233 - DNA, 25 bp, Homo sapien
agaggaaagtaaaagtgaatgtgta

SEQ ID NO: 1782234 - DNA, 25 bp, Homo sapien
tgctcagaccttctatcacaacaag

SEQ ID NO: 1782235 - DNA, 25 bp, Homo sapien
gaatacccaagggattgccagcccg

SEQ ID NO: 1782236 - DNA, 25 bp, Homo sapien
cacaacaagcgcattcctgaggatt

SEQ ID NO: 1782237 - DNA, 25 bp, Homo sapien
ttgcattggtggtgctaatccccgg

SEQ ID NO: 1782238 - DNA, 25 bp, Homo sapien
tccatgattgcactaggtttattgc

SEQ ID NO: 1782239 - DNA, 25 bp, Homo sapien
ttttcctccatgattgcactaggtt

SEQ ID NO: 1782240 - DNA, 25 bp, Homo sapien
tcctccatgattgcactaggtttat

SEQ ID NO: 1782241 - DNA, 25 bp, Homo sapien
gattgcactaggtttattgctccag

SEQ ID NO: 1782242 - DNA, 25 bp, Homo sapien
tgttggtgtttctaggacttcgtca

SEQ ID NO: 1782243 - DNA, 25 bp, Homo sapien
tgtttctaggacttcgtcagtctct

SEQ ID NO: 1782244 - DNA, 25 bp, Homo sapien
tggtgtttctaggacttcgtcagtc

SEQ ID NO: 1782245 - DNA, 25 bp, Homo sapien
gttggtgtttctaggacttcgtcag

SEQ ID NO: 1782246 - DNA, 25 bp, Homo sapien
ttcagctttaatagctcccttcttc

SEQ ID NO: 1782247 - DNA, 25 bp, Homo sapien
ttttcagctttaatagctcccttct

SEQ ID NO: 1782248 - DNA, 25 bp, Homo sapien
tttcagctttaatagctcccttctt

SEQ ID NO: 1782249 - DNA, 25 bp, Homo sapien
cttttcagctttaatagctcccttc

SEQ ID NO: 1782250 - DNA, 25 bp, Homo sapien
ggctaggtcttcactgttactcgtt

SEQ ID NO: 1782251 - DNA, 25 bp, Homo sapien
actgttactcgttgacgtctactca

SEQ ID NO: 1782252 - DNA, 25 bp, Homo sapien
ccaggcacggctaggtcttcactgt

SEQ ID NO: 1782253 - DNA, 25 bp, Homo sapien
atttactccaggcacggctaggtct

SEQ ID NO: 1782254 - DNA, 25 bp, Homo sapien
cttggaaagccggagacatagatca

SEQ ID NO: 1782255 - DNA, 25 bp, Homo sapien
ttggaaagccggagacatagatcac

SEQ ID NO: 1782256 - DNA, 25 bp, Homo sapien
agatgtttacctcctttgggattat

SEQ ID NO: 1782257 - DNA, 25 bp, Homo sapien
tagatgtttacctcctttgggatta

SEQ ID NO: 1782258 - DNA, 25 bp, Homo sapien
caaggcaactatggcagctttacgg

SEQ ID NO: 1782259 - DNA, 25 bp, Homo sapien
tttgggcacaacctagttatacggc

SEQ ID NO: 1782260 - DNA, 25 bp, Homo sapien
tcatgcaggttccaacagtgaggca

SEQ ID NO: 1782261 - DNA, 25 bp, Homo sapien
cggttcaatgaagtacacagtccct

SEQ ID NO: 1782262 - DNA, 25 bp, Homo sapien
agtagaagtcaacgtcttcactggg

SEQ ID NO: 1782263 - DNA, 25 bp, Homo sapien
caataactggcatttactcggagac

SEQ ID NO: 1782264 - DNA, 25 bp, Homo sapien
gaagtcaacgtcttcactgggattt

SEQ ID NO: 1782265 - DNA, 25 bp, Homo sapien
attgccaccaataactggcatttac

SEQ ID NO: 1782266 - DNA, 25 bp, Homo sapien
ttgcttcagtctcttaagggataca

SEQ ID NO: 1782267 - DNA, 25 bp, Homo sapien
tgatatctctctgacaagcatcagc

SEQ ID NO: 1782268 - DNA, 25 bp, Homo sapien
ggatgaacatctcctcgtacatgca

SEQ ID NO: 1782269 - DNA, 25 bp, Homo sapien
agcatcagcaaagtcaccttcagga

SEQ ID NO: 1782270 - DNA, 25 bp, Homo sapien
ctatggtgatatctctctgacaagc

SEQ ID NO: 1782271 - DNA, 25 bp, Homo sapien
gaataggcaccactatgaacagcct

SEQ ID NO: 1782272 - DNA, 25 bp, Homo sapien
cagtttcccagaccagatactcact

SEQ ID NO: 1782273 - DNA, 25 bp, Homo sapien
cactctcctggagagggctagaata

SEQ ID NO: 1782274 - DNA, 25 bp, Homo sapien
tctaatgggacagcctgaggtggct

SEQ ID NO: 1782275 - DNA, 25 bp, Homo sapien
caggttgagaatttgaacagcagca

SEQ ID NO: 1782276 - DNA, 25 bp, Homo sapien
tctccaaaaacagtctagtagcagg

SEQ ID NO: 1782277 - DNA, 25 bp, Homo sapien
tactgcccagatgtaaggacactca

SEQ ID NO: 1782278 - DNA, 25 bp, Homo sapien
ggacactcaatgtttcagcaagcaa

SEQ ID NO: 1782279 - DNA, 25 bp, Homo sapien
ttgtctcatttgacagccctctttg

SEQ ID NO: 1782280 - DNA, 25 bp, Homo sapien
cggtatcttcgtgccttgcccctcc

SEQ ID NO: 1782281 - DNA, 25 bp, Homo sapien
tatgcccagatgattgacaattttc

SEQ ID NO: 1782282 - DNA, 25 bp, Homo sapien
tgcatcactaacgaaaaacaaggac

SEQ ID NO: 1782283 - DNA, 25 bp, Homo sapien
tccaaataagctggcctatatgccc

SEQ ID NO: 1782284 - DNA, 25 bp, Homo sapien
ttctattctacttgcaactggaaac

SEQ ID NO: 1782285 - DNA, 25 bp, Homo sapien
tctatagctgtctaccttctgatgg

SEQ ID NO: 1782286 - DNA, 25 bp, Homo sapien
gatgaacaatctgcctattgactgt

SEQ ID NO: 1782287 - DNA, 25 bp, Homo sapien
tggcaatgcgtgatgaacaatctgc

SEQ ID NO: 1782288 - DNA, 25 bp, Homo sapien
attgactgtctcagcagttgctagc

SEQ ID NO: 1782289 - DNA, 25 bp, Homo sapien
tcaccccatgttgatcctcatctag

SEQ ID NO: 1782290 - DNA, 25 bp, Homo sapien
gtcccccatagcaattttacaagca

SEQ ID NO: 1782291 - DNA, 25 bp, Homo sapien
gatacgttccacatggctattcctc

SEQ ID NO: 1782292 - DNA, 25 bp, Homo sapien
ccctgagttcgaagaagaatttgtc

SEQ ID NO: 1782293 - DNA, 25 bp, Homo sapien
tacaagcaatatagatacgttccac

SEQ ID NO: 1782294 - DNA, 25 bp, Homo sapien
gttcatcatttcctaacagccgaag

SEQ ID NO: 1782295 - DNA, 25 bp, Homo sapien
catcatttcctaacagccgaagcag

SEQ ID NO: 1782296 - DNA, 25 bp, Homo sapien
tcatcatttcctaacagccgaagca

SEQ ID NO: 1782297 - DNA, 25 bp, Homo sapien
ttcatcatttcctaacagccgaagc

SEQ ID NO: 1782298 - DNA, 25 bp, Homo sapien
tctgtagcgtaattttgatgagtcc

SEQ ID NO: 1782299 - DNA, 25 bp, Homo sapien
ttatatttcaagaatgacagactga

SEQ ID NO: 1782300 - DNA, 25 bp, Homo sapien
gatgagtccatcatagacatctctc

SEQ ID NO: 1782301 - DNA, 25 bp, Homo sapien
tgacagactgacagtaggtctggat

SEQ ID NO: 1782302 - DNA, 25 bp, Homo sapien
tttgttgcaaagtctcatgggacgc

SEQ ID NO: 1782303 - DNA, 25 bp, Homo sapien
cattctcactaagtattgcctgatg

SEQ ID NO: 1782304 - DNA, 25 bp, Homo sapien
caatacacgctagccaattttctgt

SEQ ID NO: 1782305 - DNA, 25 bp, Homo sapien
caaatgcctgccatggacacaacaa

SEQ ID NO: 1782306 - DNA, 25 bp, Homo sapien
ggctgctggctctgtttatttaaag

SEQ ID NO: 1782307 - DNA, 25 bp, Homo sapien
tttcctcagtacctgagcatggaga

SEQ ID NO: 1782308 - DNA, 25 bp, Homo sapien
tatgatctttcctcagtacctgagc

SEQ ID NO: 1782309 - DNA, 25 bp, Homo sapien
tttgctgtgtgctcatatgatcttt

SEQ ID NO: 1782310 - DNA, 25 bp, Homo sapien
gtgctcatatgatctttcctcagta

SEQ ID NO: 1782311 - DNA, 25 bp, Homo sapien
cagagataaagtagtgggatatttc

SEQ ID NO: 1782312 - DNA, 25 bp, Homo sapien
tctctatggatgtctttacagagat

SEQ ID NO: 1782313 - DNA, 25 bp, Homo sapien
attctctatggatgtctttacagag

SEQ ID NO: 1782314 - DNA, 25 bp, Homo sapien
gagataaagtagtgggatatttcct

SEQ ID NO: 1782315 - DNA, 25 bp, Homo sapien
ggatctgctgatcttggatataggt

SEQ ID NO: 1782316 - DNA, 25 bp, Homo sapien
ggaaatagcaaattgcaggatctgc

SEQ ID NO: 1782317 - DNA, 25 bp, Homo sapien
aatagcaaattgcaggatctgctga

SEQ ID NO: 1782318 - DNA, 25 bp, Homo sapien
gatcttggatataggtctctctgca

SEQ ID NO: 1782319 - DNA, 25 bp, Homo sapien
cattttgagatgtatttggctctag

SEQ ID NO: 1782320 - DNA, 25 bp, Homo sapien
attttgagatgtatttggctctagt

SEQ ID NO: 1782321 - DNA, 25 bp, Homo sapien
ttttgagatgtatttggctctagtt

SEQ ID NO: 1782322 - DNA, 25 bp, Homo sapien
tggctctagtttggctacattgaga

SEQ ID NO: 1782323 - DNA, 25 bp, Homo sapien
gaagtcatgtgtcttagaaggggaa

SEQ ID NO: 1782324 - DNA, 25 bp, Homo sapien
catgatgcagtggagagatttgaag

SEQ ID NO: 1782325 - DNA, 25 bp, Homo sapien
gcatgatgcagtggagagatttgaa

SEQ ID NO: 1782326 - DNA, 25 bp, Homo sapien
catgtgtcttagaaggggaatctcc

SEQ ID NO: 1782327 - DNA, 25 bp, Homo sapien
gaggccggtgttccatattagcaaa

SEQ ID NO: 1782328 - DNA, 25 bp, Homo sapien
taaaattagccatcatgacccattg

SEQ ID NO: 1782329 - DNA, 25 bp, Homo sapien
ctttcatcacattttagaggccggt

SEQ ID NO: 1782330 - DNA, 25 bp, Homo sapien
ttatactgtatgcatgtgttcccta

SEQ ID NO: 1782331 - DNA, 25 bp, Homo sapien
gcatctcaaccctagaacctttgcc

SEQ ID NO: 1782332 - DNA, 25 bp, Homo sapien
aggtcccaaaacatttgaccgcagg

SEQ ID NO: 1782333 - DNA, 25 bp, Homo sapien
ccaggtcccaaaacatttgaccgca

SEQ ID NO: 1782334 - DNA, 25 bp, Homo sapien
ttgcccaggtcccaaaacatttgac

SEQ ID NO: 1782335 - DNA, 25 bp, Homo sapien
attttgagcgtccttacattaggct

SEQ ID NO: 1782336 - DNA, 25 bp, Homo sapien
gcgtccttacattaggctcctggtg

SEQ ID NO: 1782337 - DNA, 25 bp, Homo sapien
ggtgaatgactgctgatatcatgag

SEQ ID NO: 1782338 - DNA, 25 bp, Homo sapien
gagtattaccaagttcctgagaact

SEQ ID NO: 1782339 - DNA, 25 bp, Homo sapien
gcaacagagcttcgtttcctaggag

SEQ ID NO: 1782340 - DNA, 25 bp, Homo sapien
cctaggagccttcaatctaattaca

SEQ ID NO: 1782341 - DNA, 25 bp, Homo sapien
gacactgatgcaaaagcttacccca

SEQ ID NO: 1782342 - DNA, 25 bp, Homo sapien
caaggctgtaagtgatgcgttgcac

SEQ ID NO: 1782343 - DNA, 25 bp, Homo sapien
catatcagtgacagaattgtcaaca

SEQ ID NO: 1782344 - DNA, 25 bp, Homo sapien
tctatttagaattctgtacatctgg

SEQ ID NO: 1782345 - DNA, 25 bp, Homo sapien
tgtttcctatcatatcagtgacaga

SEQ ID NO: 1782346 - DNA, 25 bp, Homo sapien
tagaattctgtacatctgggtgtat

SEQ ID NO: 1782347 - DNA, 25 bp, Homo sapien
gaaacctcaggggcattccaagcat

SEQ ID NO: 1782348 - DNA, 25 bp, Homo sapien
aaacctcaggggcattccaagcatt

SEQ ID NO: 1782349 - DNA, 25 bp, Homo sapien
aacctcaggggcattccaagcattt

SEQ ID NO: 1782350 - DNA, 25 bp, Homo sapien
ggaccatgccatgaaacatagaggt

SEQ ID NO: 1782351 - DNA, 25 bp, Homo sapien
gatgatgatagggatactgctgatg

SEQ ID NO: 1782352 - DNA, 25 bp, Homo sapien
cagatgatttctgtttaccacagta

SEQ ID NO: 1782353 - DNA, 25 bp, Homo sapien
taccacagtaattggctgttcctag

SEQ ID NO: 1782354 - DNA, 25 bp, Homo sapien
tcacttgtgtccttcaatggccgga

SEQ ID NO: 1782355 - DNA, 25 bp, Homo sapien
cagtgtcagaaatatggcatgtgct

SEQ ID NO: 1782356 - DNA, 25 bp, Homo sapien
tgaaccccgacactgtgagctattg

SEQ ID NO: 1782357 - DNA, 25 bp, Homo sapien
aatggccggactgatgaatttgggc

SEQ ID NO: 1782358 - DNA, 25 bp, Homo sapien
tttccatgtattactgtggccggta

SEQ ID NO: 1782359 - DNA, 25 bp, Homo sapien
gccggtatggaaaatcacactgtcc

SEQ ID NO: 1782360 - DNA, 25 bp, Homo sapien
caggatatctagtcaggaactccaa

SEQ ID NO: 1782361 - DNA, 25 bp, Homo sapien
tccaagatcatcagaaagaatttcc

SEQ ID NO: 1782362 - DNA, 25 bp, Homo sapien
cagcagcagaatctgagctggtgtt

SEQ ID NO: 1782363 - DNA, 25 bp, Homo sapien
tgcagggaagacactcaggctcttc

SEQ ID NO: 1782364 - DNA, 25 bp, Homo sapien
cagcagaatctgagctggtgttgag

SEQ ID NO: 1782365 - DNA, 25 bp, Homo sapien
ttgcagggaagacactcaggctctt

SEQ ID NO: 1782366 - DNA, 25 bp, Homo sapien
tacacaaatgggatgcttcaataat

SEQ ID NO: 1782367 - DNA, 25 bp, Homo sapien
taagtcttagaaacgtatcttccac

SEQ ID NO: 1782368 - DNA, 25 bp, Homo sapien
tttctaaatgcttatgacctggtcc

SEQ ID NO: 1782369 - DNA, 25 bp, Homo sapien
ctggtccaaggaactcgtaagtctt

SEQ ID NO: 1782370 - DNA, 25 bp, Homo sapien
tttctcctctaacatatgaacgtag

SEQ ID NO: 1782371 - DNA, 25 bp, Homo sapien
tttagatccagacttgtaaacaggt

SEQ ID NO: 1782372 - DNA, 25 bp, Homo sapien
gctggctctaattccttctggtgta

SEQ ID NO: 1782373 - DNA, 25 bp, Homo sapien
catatgaacgtagtttccaaaacca

SEQ ID NO: 1782374 - DNA, 25 bp, Homo sapien
atgtatagaagccaggaaaatttcc

SEQ ID NO: 1782375 - DNA, 25 bp, Homo sapien
tacgtgtcatgatcatgagaggcat

SEQ ID NO: 1782376 - DNA, 25 bp, Homo sapien
ggaaaatttccactacgtgtcatga

SEQ ID NO: 1782377 - DNA, 25 bp, Homo sapien
tgtatagaagccaggaaaatttcca

SEQ ID NO: 1782378 - DNA, 25 bp, Homo sapien
aactatttgataattccttctttgc

SEQ ID NO: 1782379 - DNA, 25 bp, Homo sapien
catcttccccataaggagccccgct

SEQ ID NO: 1782380 - DNA, 25 bp, Homo sapien
tcttcctaaatttgtctctcccatc

SEQ ID NO: 1782381 - DNA, 25 bp, Homo sapien
ccacagggaccaaggtaactatttg

SEQ ID NO: 1782382 - DNA, 25 bp, Homo sapien
tctgcacaacgggttgaggtataag

SEQ ID NO: 1782383 - DNA, 25 bp, Homo sapien
gttgaggtataagaatatctctgcc

SEQ ID NO: 1782384 - DNA, 25 bp, Homo sapien
ccactgttgttttcagcacagcttc

SEQ ID NO: 1782385 - DNA, 25 bp, Homo sapien
ctgttgttttcagcacagcttcact

SEQ ID NO: 1782386 - DNA, 25 bp, Homo sapien
tatcgccatctctacaatgaggaca

SEQ ID NO: 1782387 - DNA, 25 bp, Homo sapien
tattctgccttagtatcgccatctc

SEQ ID NO: 1782388 - DNA, 25 bp, Homo sapien
tgaggacaagagtaactgtttcaaa

SEQ ID NO: 1782389 - DNA, 25 bp, Homo sapien
tttcaaagagccatggcaaaccaat

SEQ ID NO: 1782390 - DNA, 25 bp, Homo sapien
actttggtccgatgagcaagagaaa

SEQ ID NO: 1782391 - DNA, 25 bp, Homo sapien
cacaccatcttctagatttgttaga

SEQ ID NO: 1782392 - DNA, 25 bp, Homo sapien
gattccaaactttggtccgatgagc

SEQ ID NO: 1782393 - DNA, 25 bp, Homo sapien
tacacgaagatgagacgtgattcca

SEQ ID NO: 1782394 - DNA, 25 bp, Homo sapien
gccaccatagttctgtagttcttta

SEQ ID NO: 1782395 - DNA, 25 bp, Homo sapien
gttctttaagcaatgttaaaagcat

SEQ ID NO: 1782396 - DNA, 25 bp, Homo sapien
tttgccaccatagttctgtagttct

SEQ ID NO: 1782397 - DNA, 25 bp, Homo sapien
tagttctttaagcaatgttaaaagc

SEQ ID NO: 1782398 - DNA, 25 bp, Homo sapien
gagaaatatcccttagaatcagcct

SEQ ID NO: 1782399 - DNA, 25 bp, Homo sapien
gaatccatccttcagtaactcattg

SEQ ID NO: 1782400 - DNA, 25 bp, Homo sapien
tgtgttaagtagaaagtacatcccc

SEQ ID NO: 1782401 - DNA, 25 bp, Homo sapien
taggtaaggtatctaggaggagaac

SEQ ID NO: 1782402 - DNA, 25 bp, Homo sapien
gcttctagcaataatagctgctcca

SEQ ID NO: 1782403 - DNA, 25 bp, Homo sapien
gtttttgcttctagcaataatagct

SEQ ID NO: 1782404 - DNA, 25 bp, Homo sapien
tctagcaataatagctgctccacag

SEQ ID NO: 1782405 - DNA, 25 bp, Homo sapien
ttgcttctagcaataatagctgctc

SEQ ID NO: 1782406 - DNA, 25 bp, Homo sapien
ttaggcattggttccattccctcat

SEQ ID NO: 1782407 - DNA, 25 bp, Homo sapien
ctggtggccagtaggtggtcttagg

SEQ ID NO: 1782408 - DNA, 25 bp, Homo sapien
tggccagtaggtggtcttaggcatt

SEQ ID NO: 1782409 - DNA, 25 bp, Homo sapien
taggtggtcttaggcattggttcca

SEQ ID NO: 1782410 - DNA, 25 bp, Homo sapien
tcatgagacttaggcctcagggctc

SEQ ID NO: 1782411 - DNA, 25 bp, Homo sapien
gccaagtggcattgcagtagtcgta

SEQ ID NO: 1782412 - DNA, 25 bp, Homo sapien
tgtccagatccctttgcaatgtaac

SEQ ID NO: 1782413 - DNA, 25 bp, Homo sapien
tgccagtgtctagatacaggtaagc

SEQ ID NO: 1782414 - DNA, 25 bp, Homo sapien
tctggctccccaggatagctgagaa

SEQ ID NO: 1782415 - DNA, 25 bp, Homo sapien
tatctttttcaaggcaaaggaattg

SEQ ID NO: 1782416 - DNA, 25 bp, Homo sapien
tgaggcagctcgtttcaatttatgc

SEQ ID NO: 1782417 - DNA, 25 bp, Homo sapien
tagctgagaaacttcactgtccaat

SEQ ID NO: 1782418 - DNA, 25 bp, Homo sapien
ctaaggcacacaagcaattactgct

SEQ ID NO: 1782419 - DNA, 25 bp, Homo sapien
tttattgttctgaattccccctatc

SEQ ID NO: 1782420 - DNA, 25 bp, Homo sapien
cacaagcaattactgctttcaaagg

SEQ ID NO: 1782421 - DNA, 25 bp, Homo sapien
tattgttctgaattccccctatcat

SEQ ID NO: 1782422 - DNA, 25 bp, Homo sapien
caccactcctaagccaaagcataag

SEQ ID NO: 1782423 - DNA, 25 bp, Homo sapien
actgctatggcagtatgcagagtgg

SEQ ID NO: 1782424 - DNA, 25 bp, Homo sapien
agcaactgctatggcagtatgcaga

SEQ ID NO: 1782425 - DNA, 25 bp, Homo sapien
cctcaccactcctaagccaaagcat

SEQ ID NO: 1782426 - DNA, 25 bp, Homo sapien
ctgcaatgagatgagagggaaagag

SEQ ID NO: 1782427 - DNA, 25 bp, Homo sapien
gcaatgagatgagagggaaagagat

SEQ ID NO: 1782428 - DNA, 25 bp, Homo sapien
atgagatgagagggaaagagatcat

SEQ ID NO: 1782429 - DNA, 25 bp, Homo sapien
caatgagatgagagggaaagagatc

SEQ ID NO: 1782430 - DNA, 25 bp, Homo sapien
caacccagcccctggtgacagcagc

SEQ ID NO: 1782431 - DNA, 25 bp, Homo sapien
ccagcccctggtgacagcagcagta

SEQ ID NO: 1782432 - DNA, 25 bp, Homo sapien
tcatccaacccagcccctggtgaca

SEQ ID NO: 1782433 - DNA, 25 bp, Homo sapien
gcccctggtgacagcagcagtagct

SEQ ID NO: 1782434 - DNA, 25 bp, Homo sapien
agcctcagacaggtagccctctgcc

SEQ ID NO: 1782435 - DNA, 25 bp, Homo sapien
caccaattggggcatggttgccact

SEQ ID NO: 1782436 - DNA, 25 bp, Homo sapien
gcacagagtccgtgccaccaattgg

SEQ ID NO: 1782437 - DNA, 25 bp, Homo sapien
caattggggcatggttgccactcac

SEQ ID NO: 1782438 - DNA, 25 bp, Homo sapien
cacagagtccgtgccaccaattggg

SEQ ID NO: 1782439 - DNA, 25 bp, Homo sapien
cttttccctcttaatctgaatccac

SEQ ID NO: 1782440 - DNA, 25 bp, Homo sapien
gcttttccctcttaatctgaatcca

SEQ ID NO: 1782441 - DNA, 25 bp, Homo sapien
ttttccctcttaatctgaatccacc

SEQ ID NO: 1782442 - DNA, 25 bp, Homo sapien
tttccctcttaatctgaatccacca

SEQ ID NO: 1782443 - DNA, 25 bp, Homo sapien
aaaagcctcaatttagcaatttaga

SEQ ID NO: 1782444 - DNA, 25 bp, Homo sapien
caaacaatttgtgcataatatggcc

SEQ ID NO: 1782445 - DNA, 25 bp, Homo sapien
caattgagtatgtgcagtgactccg

SEQ ID NO: 1782446 - DNA, 25 bp, Homo sapien
tatccagcctacttagaatgtataa

SEQ ID NO: 1782447 - DNA, 25 bp, Homo sapien
caaatcgagctctgcattgattttt

SEQ ID NO: 1782448 - DNA, 25 bp, Homo sapien
aaatcgagctctgcattgattttta

SEQ ID NO: 1782449 - DNA, 25 bp, Homo sapien
aatagtcattctccaaatcgagctc

SEQ ID NO: 1782450 - DNA, 25 bp, Homo sapien
gaatgagatagggtgaagttcctcc

SEQ ID NO: 1782451 - DNA, 25 bp, Homo sapien
tattattcttggttagactacctag

SEQ ID NO: 1782452 - DNA, 25 bp, Homo sapien
tggttacaactttcgcatctatgta

SEQ ID NO: 1782453 - DNA, 25 bp, Homo sapien
gtgtcattgtatgcttttggtacca

SEQ ID NO: 1782454 - DNA, 25 bp, Homo sapien
ctcagacaggaacccttccaaatca

SEQ ID NO: 1782455 - DNA, 25 bp, Homo sapien
aatcacatgatgtatcttctgagcc

SEQ ID NO: 1782456 - DNA, 25 bp, Homo sapien
tctgctttaccaacatagaagccct

SEQ ID NO: 1782457 - DNA, 25 bp, Homo sapien
cacatgatgtatcttctgagcccat

SEQ ID NO: 1782458 - DNA, 25 bp, Homo sapien
cagaatggctaatccaaaagctttt

SEQ ID NO: 1782459 - DNA, 25 bp, Homo sapien
catatcgtattgtcaagtttcagaa

SEQ ID NO: 1782460 - DNA, 25 bp, Homo sapien
tgcttgtgggcaactatcctacata

SEQ ID NO: 1782461 - DNA, 25 bp, Homo sapien
tgggcaactatcctacatatcgtat

SEQ ID NO: 1782462 - DNA, 25 bp, Homo sapien
ggccttcctagctattaaatgagtg

SEQ ID NO: 1782463 - DNA, 25 bp, Homo sapien
tcagtaccctcgtctgtaacttcct

SEQ ID NO: 1782464 - DNA, 25 bp, Homo sapien
taacctttccatggacaagccagca

SEQ ID NO: 1782465 - DNA, 25 bp, Homo sapien
tccaccattgaactagaaatggcct

SEQ ID NO: 1782466 - DNA, 25 bp, Homo sapien
caagctgcccagtttatttggtctg

SEQ ID NO: 1782467 - DNA, 25 bp, Homo sapien
tggcatgcacaattaatctctgggt

SEQ ID NO: 1782468 - DNA, 25 bp, Homo sapien
gccaagaacattaaccagtgagtga

SEQ ID NO: 1782469 - DNA, 25 bp, Homo sapien
caggaagccaggttttgatgtcaaa

SEQ ID NO: 1782470 - DNA, 25 bp, Homo sapien
tgtcactttacagtgttcactaccc

SEQ ID NO: 1782471 - DNA, 25 bp, Homo sapien
tacccaatgggcagacaactctttg

SEQ ID NO: 1782472 - DNA, 25 bp, Homo sapien
tctagacttagagatgccacttcca

SEQ ID NO: 1782473 - DNA, 25 bp, Homo sapien
tgtggatctagtccttgtactgtca

SEQ ID NO: 1782474 - DNA, 25 bp, Homo sapien
ctagttcaatgggatctgaaaaata

SEQ ID NO: 1782475 - DNA, 25 bp, Homo sapien
tgcaaatttttctgtacgcctctgg

SEQ ID NO: 1782476 - DNA, 25 bp, Homo sapien
cctctggccacccttgaaacaagca

SEQ ID NO: 1782477 - DNA, 25 bp, Homo sapien
tgcctgcctgatcactttcccaatg

SEQ ID NO: 1782478 - DNA, 25 bp, Homo sapien
tcactttcccaatgagagtcagact

SEQ ID NO: 1782479 - DNA, 25 bp, Homo sapien
taagattcaccaaatgaagcagggt

SEQ ID NO: 1782480 - DNA, 25 bp, Homo sapien
cagtgaatatcagcccctagaacaa

SEQ ID NO: 1782481 - DNA, 25 bp, Homo sapien
gatgtcaagatataccctccctggt

SEQ ID NO: 1782482 - DNA, 25 bp, Homo sapien
tcaagtacattgtaggagccacgaa

SEQ ID NO: 1782483 - DNA, 25 bp, Homo sapien
tctctgaatctaaagtgtcccctct

SEQ ID NO: 1782484 - DNA, 25 bp, Homo sapien
gatagagctaaattttggtctgcca

SEQ ID NO: 1782485 - DNA, 25 bp, Homo sapien
gctgtttgcgtaatatcttttccca

SEQ ID NO: 1782486 - DNA, 25 bp, Homo sapien
agctctcttatgagtgctgtttgcg

SEQ ID NO: 1782487 - DNA, 25 bp, Homo sapien
gaaagtccttctgccattgagtaag

SEQ ID NO: 1782488 - DNA, 25 bp, Homo sapien
tacattcaagctatccgttcaaaag

SEQ ID NO: 1782489 - DNA, 25 bp, Homo sapien
taaaataggatcattacaactgtgc

SEQ ID NO: 1782490 - DNA, 25 bp, Homo sapien
tggctaagcaggaacatagagtctg

SEQ ID NO: 1782491 - DNA, 25 bp, Homo sapien
gctcccttatatcaagaatatcagg

SEQ ID NO: 1782492 - DNA, 25 bp, Homo sapien
ccatagctcccttatatcaagaata

SEQ ID NO: 1782493 - DNA, 25 bp, Homo sapien
gtccatagctcccttatatcaagaa

SEQ ID NO: 1782494 - DNA, 25 bp, Homo sapien
tgatgtccatagctcccttatatca

SEQ ID NO: 1782495 - DNA, 25 bp, Homo sapien
aagggcatgcagaggctaccagtgt

SEQ ID NO: 1782496 - DNA, 25 bp, Homo sapien
cagaagtcccttttattaacctctg

SEQ ID NO: 1782497 - DNA, 25 bp, Homo sapien
gctccagcttttccctacagtcaga

SEQ ID NO: 1782498 - DNA, 25 bp, Homo sapien
tgtgattctcttcggtaagggcatg

SEQ ID NO: 1782499 - DNA, 25 bp, Homo sapien
tggaatggtagagttgggaataaaa

SEQ ID NO: 1782500 - DNA, 25 bp, Homo sapien
tggtagagttgggaataaaagtgaa

SEQ ID NO: 1782501 - DNA, 25 bp, Homo sapien
tcctcaagggcaaatataactgtgg

SEQ ID NO: 1782502 - DNA, 25 bp, Homo sapien
caaatataactgtggaatggtagag

SEQ ID NO: 1782503 - DNA, 25 bp, Homo sapien
acatgttatacagagagacagctcc

SEQ ID NO: 1782504 - DNA, 25 bp, Homo sapien
atgatgtcatcaacacgaagattct

SEQ ID NO: 1782505 - DNA, 25 bp, Homo sapien
gatgtcatcaacacgaagattctta

SEQ ID NO: 1782506 - DNA, 25 bp, Homo sapien
gaaacacatgttatacagagagaca

SEQ ID NO: 1782507 - DNA, 25 bp, Homo sapien
ttgcctgtgagtttcagtctgcatc

SEQ ID NO: 1782508 - DNA, 25 bp, Homo sapien
tgtgagtttcagtctgcatcaagtg

SEQ ID NO: 1782509 - DNA, 25 bp, Homo sapien
gagtttcagtctgcatcaagtgaca

SEQ ID NO: 1782510 - DNA, 25 bp, Homo sapien
cagtctgcatcaagtgacactggtg

SEQ ID NO: 1782511 - DNA, 25 bp, Homo sapien
tgtgtgttatatcctcaccttccag

SEQ ID NO: 1782512 - DNA, 25 bp, Homo sapien
gcttcaatgtgtgttatatcctcac

SEQ ID NO: 1782513 - DNA, 25 bp, Homo sapien
caatgtgtgttatatcctcaccttc

SEQ ID NO: 1782514 - DNA, 25 bp, Homo sapien
aagaggtgattaagtgcttcaatgt

SEQ ID NO: 1782515 - DNA, 25 bp, Homo sapien
ggaaatacttctagccatattctgg

SEQ ID NO: 1782516 - DNA, 25 bp, Homo sapien
cagctcttgtgaaaactctcaggaa

SEQ ID NO: 1782517 - DNA, 25 bp, Homo sapien
gcatgttacaagatctaatatcagc

SEQ ID NO: 1782518 - DNA, 25 bp, Homo sapien
ttctaaaggctagcaaattaaactc

SEQ ID NO: 1782519 - DNA, 25 bp, Homo sapien
ccccataggctttaatcagttgaaa

SEQ ID NO: 1782520 - DNA, 25 bp, Homo sapien
gggccccataggctttaatcagttg

SEQ ID NO: 1782521 - DNA, 25 bp, Homo sapien
acactgggccccataggctttaatc

SEQ ID NO: 1782522 - DNA, 25 bp, Homo sapien
cagttgaaaagttattcaactttca

SEQ ID NO: 1782523 - DNA, 25 bp, Homo sapien
gcacatccacgttctattatgcatg

SEQ ID NO: 1782524 - DNA, 25 bp, Homo sapien
taataagcagaagatcatgtcagcc

SEQ ID NO: 1782525 - DNA, 25 bp, Homo sapien
gaagcatcataagagggtcttccaa

SEQ ID NO: 1782526 - DNA, 25 bp, Homo sapien
caatgtgctatacactgtggtctgt

SEQ ID NO: 1782527 - DNA, 25 bp, Homo sapien
catatggtcaaatatctatcaccgc

SEQ ID NO: 1782528 - DNA, 25 bp, Homo sapien
cctggactttgaatagtccttacac

SEQ ID NO: 1782529 - DNA, 25 bp, Homo sapien
tttgtgtctataaatgtgtctggaa

SEQ ID NO: 1782530 - DNA, 25 bp, Homo sapien
ccttttcattaaagtgtgactaagt

SEQ ID NO: 1782531 - DNA, 25 bp, Homo sapien
gcattggccccaagtaaaggacaaa

SEQ ID NO: 1782532 - DNA, 25 bp, Homo sapien
tcatggcaagctgtacaaataaagc

SEQ ID NO: 1782533 - DNA, 25 bp, Homo sapien
gtcccactgctttactgaagtcctg

SEQ ID NO: 1782534 - DNA, 25 bp, Homo sapien
gaacatgaaaaagtgccaaggagtg

SEQ ID NO: 1782535 - DNA, 25 bp, Homo sapien
gtattctattggcaaggacaacttc

SEQ ID NO: 1782536 - DNA, 25 bp, Homo sapien
cattcactagtagaagtcacatgag

SEQ ID NO: 1782537 - DNA, 25 bp, Homo sapien
tgcaaattaagtgcctggtcttggc

SEQ ID NO: 1782538 - DNA, 25 bp, Homo sapien
gagttgggtgatgctaggcaaacat

SEQ ID NO: 1782539 - DNA, 25 bp, Homo sapien
aaaccatatatttgtgaacgaatga

SEQ ID NO: 1782540 - DNA, 25 bp, Homo sapien
ccatatatttgtgaacgaatgaaac

SEQ ID NO: 1782541 - DNA, 25 bp, Homo sapien
tatttgtgaacgaatgaaactgaat

SEQ ID NO: 1782542 - DNA, 25 bp, Homo sapien
ttgtgaacgaatgaaactgaatact

SEQ ID NO: 1782543 - DNA, 25 bp, Homo sapien
tagacaccagaatcctcacattgga

SEQ ID NO: 1782544 - DNA, 25 bp, Homo sapien
aaagagatgcttggcatagacacca

SEQ ID NO: 1782545 - DNA, 25 bp, Homo sapien
catagacaccagaatcctcacattg

SEQ ID NO: 1782546 - DNA, 25 bp, Homo sapien
gacaccagaatcctcacattggacc

SEQ ID NO: 1782547 - DNA, 25 bp, Homo sapien
cctcgagtcctggtggcaagcgttt

SEQ ID NO: 1782548 - DNA, 25 bp, Homo sapien
tcaaagatagtacccttgagatcat

SEQ ID NO: 1782549 - DNA, 25 bp, Homo sapien
tcctggtggcaagcgtttttctaat

SEQ ID NO: 1782550 - DNA, 25 bp, Homo sapien
tagtgctttcatgccataccagtct

SEQ ID NO: 1782551 - DNA, 25 bp, Homo sapien
gccatggacgttaagcagtttttat

SEQ ID NO: 1782552 - DNA, 25 bp, Homo sapien
aacatcctcagtaattagcttgaac

SEQ ID NO: 1782553 - DNA, 25 bp, Homo sapien
cctcagtaattagcttgaactttct

SEQ ID NO: 1782554 - DNA, 25 bp, Homo sapien
ggacgttaagcagtttttatcctga

SEQ ID NO: 1782555 - DNA, 25 bp, Homo sapien
tcttgacattgacgtgaacttcagg

SEQ ID NO: 1782556 - DNA, 25 bp, Homo sapien
ttgacattgacgtgaacttcaggta

SEQ ID NO: 1782557 - DNA, 25 bp, Homo sapien
tgacgtgaacttcaggtatggtctg

SEQ ID NO: 1782558 - DNA, 25 bp, Homo sapien
cattgacgtgaacttcaggtatggt

SEQ ID NO: 1782559 - DNA, 25 bp, Homo sapien
gttcatatccataagcttttcaaga

SEQ ID NO: 1782560 - DNA, 25 bp, Homo sapien
taaattggcaaatctttttatgacc

SEQ ID NO: 1782561 - DNA, 25 bp, Homo sapien
gtttttcaaagctgcgtgggatcca

SEQ ID NO: 1782562 - DNA, 25 bp, Homo sapien
gctgcgtgggatccatttattaact

SEQ ID NO: 1782563 - DNA, 25 bp, Homo sapien
tctagtgcagaatttttacttctgt

SEQ ID NO: 1782564 - DNA, 25 bp, Homo sapien
gaataatctctatcagtctaactcc

SEQ ID NO: 1782565 - DNA, 25 bp, Homo sapien
cagttcaactctactgctgagctgt

SEQ ID NO: 1782566 - DNA, 25 bp, Homo sapien
ttttctcttcgttattcagattgaa

SEQ ID NO: 1782567 - DNA, 25 bp, Homo sapien
tatgctgaaataatcgctgttctgt

SEQ ID NO: 1782568 - DNA, 25 bp, Homo sapien
ccttcttccttatccaaacatgctg

SEQ ID NO: 1782569 - DNA, 25 bp, Homo sapien
ggagtttaagggctatgctgaaata

SEQ ID NO: 1782570 - DNA, 25 bp, Homo sapien
gtaaccttagcatatccctggagtt

SEQ ID NO: 1782571 - DNA, 25 bp, Homo sapien
caatttccttgtaatctgcacccca

SEQ ID NO: 1782572 - DNA, 25 bp, Homo sapien
tattttgtcacataacataggtctc

SEQ ID NO: 1782573 - DNA, 25 bp, Homo sapien
ttccttgtaatctgcaccccagtgc

SEQ ID NO: 1782574 - DNA, 25 bp, Homo sapien
atattttgtcacataacataggtct

SEQ ID NO: 1782575 - DNA, 25 bp, Homo sapien
gcatattgattctggaaacgctgaa

SEQ ID NO: 1782576 - DNA, 25 bp, Homo sapien
gaaaagtgtgagcttccaatgacaa

SEQ ID NO: 1782577 - DNA, 25 bp, Homo sapien
aatgccaacaggagctgtcttttac

SEQ ID NO: 1782578 - DNA, 25 bp, Homo sapien
gggactatcactgggaacatcatat

SEQ ID NO: 1782579 - DNA, 25 bp, Homo sapien
ttgtaaacattcatgcttgttggaa

SEQ ID NO: 1782580 - DNA, 25 bp, Homo sapien
attcatgcttgttggaatggtcttc

SEQ ID NO: 1782581 - DNA, 25 bp, Homo sapien
gctgcccatatattaatagagggaa

SEQ ID NO: 1782582 - DNA, 25 bp, Homo sapien
gagagggtcctcagtaatcagtaat

SEQ ID NO: 1782583 - DNA, 25 bp, Homo sapien
gtccggtgacgtgacaatcacacag

SEQ ID NO: 1782584 - DNA, 25 bp, Homo sapien
ttatttaaacggttcattgagcagt

SEQ ID NO: 1782585 - DNA, 25 bp, Homo sapien
tgagcagtccggtgacgtgacaatc

SEQ ID NO: 1782586 - DNA, 25 bp, Homo sapien
gttcattgagcagtccggtgacgtg

SEQ ID NO: 1782587 - DNA, 25 bp, Homo sapien
cagcatgcataatttgtagtctgca

SEQ ID NO: 1782588 - DNA, 25 bp, Homo sapien
ttgaggcttaggtcaaatgcaaata

SEQ ID NO: 1782589 - DNA, 25 bp, Homo sapien
aatttgtagtctgcatggaactgac

SEQ ID NO: 1782590 - DNA, 25 bp, Homo sapien
taaagttgaggcttaggtcaaatgc

SEQ ID NO: 1782591 - DNA, 25 bp, Homo sapien
agcatccacatactgaatgtcatta

SEQ ID NO: 1782592 - DNA, 25 bp, Homo sapien
gaatgtcattatacacagcaacagc

SEQ ID NO: 1782593 - DNA, 25 bp, Homo sapien
ttgcttgctaaaggacagatggctg

SEQ ID NO: 1782594 - DNA, 25 bp, Homo sapien
ttacatggagggcacatgaaggagt

SEQ ID NO: 1782595 - DNA, 25 bp, Homo sapien
tcaaaggtcagctcaatcttatatt

SEQ ID NO: 1782596 - DNA, 25 bp, Homo sapien
aaggtcagctcaatcttatatttaa

SEQ ID NO: 1782597 - DNA, 25 bp, Homo sapien
gttcaaaggtcagctcaatcttata

SEQ ID NO: 1782598 - DNA, 25 bp, Homo sapien
ttgttcaaaggtcagctcaatctta

SEQ ID NO: 1782599 - DNA, 25 bp, Homo sapien
aggcaaggacgccaagaccactggc

SEQ ID NO: 1782600 - DNA, 25 bp, Homo sapien
caatggtctggaaaacaaggtctgt

SEQ ID NO: 1782601 - DNA, 25 bp, Homo sapien
caggccaatagagggctgtgccact

SEQ ID NO: 1782602 - DNA, 25 bp, Homo sapien
cttcatgtctgaggcaaggacgcca

SEQ ID NO: 1782603 - DNA, 25 bp, Homo sapien
agaagtatataaaggatggaaaata

SEQ ID NO: 1782604 - DNA, 25 bp, Homo sapien
atggaaaatatagccaggtcctgac

SEQ ID NO: 1782605 - DNA, 25 bp, Homo sapien
aggatggaaaatatagccaggtcct

SEQ ID NO: 1782606 - DNA, 25 bp, Homo sapien
taaaggatggaaaatatagccaggt

SEQ ID NO: 1782607 - DNA, 25 bp, Homo sapien
tgccatatccatagtgatccctgag

SEQ ID NO: 1782608 - DNA, 25 bp, Homo sapien
ttgctgccatatccatagtgatccc

SEQ ID NO: 1782609 - DNA, 25 bp, Homo sapien
aagggtgtgggttgaagatatgttc

SEQ ID NO: 1782610 - DNA, 25 bp, Homo sapien
atccatagtgatccctgagaagttc

SEQ ID NO: 1782611 - DNA, 25 bp, Homo sapien
ggagttccatattcagggtcaggaa

SEQ ID NO: 1782612 - DNA, 25 bp, Homo sapien
agatgatgatcggaagactcggcaa

SEQ ID NO: 1782613 - DNA, 25 bp, Homo sapien
taagctgtctgcaagttgtgaagca

SEQ ID NO: 1782614 - DNA, 25 bp, Homo sapien
gactcggcaagtcggctttaaccta

SEQ ID NO: 1782615 - DNA, 25 bp, Homo sapien
tactcagacaggttcgccttattgg

SEQ ID NO: 1782616 - DNA, 25 bp, Homo sapien
gacttccaggctagcacttgtcagc

SEQ ID NO: 1782617 - DNA, 25 bp, Homo sapien
acttgtcagcctacagagcttggca

SEQ ID NO: 1782618 - DNA, 25 bp, Homo sapien
gccttattggaactaagacatgggc

SEQ ID NO: 1782619 - DNA, 25 bp, Homo sapien
tctagtaagacataacttttccagg

SEQ ID NO: 1782620 - DNA, 25 bp, Homo sapien
tatgtgtgtgaggacattatgtgaa

SEQ ID NO: 1782621 - DNA, 25 bp, Homo sapien
gggccaaatccgatcttcttatgtg

SEQ ID NO: 1782622 - DNA, 25 bp, Homo sapien
actgtcttctagtaagacataactt

SEQ ID NO: 1782623 - DNA, 25 bp, Homo sapien
tgttcgtaattgcattcaccccagg

SEQ ID NO: 1782624 - DNA, 25 bp, Homo sapien
agggaagttcattagcagtggaatc

SEQ ID NO: 1782625 - DNA, 25 bp, Homo sapien
catttgcccatctgttcgtaattgc

SEQ ID NO: 1782626 - DNA, 25 bp, Homo sapien
agtacaaaagggtaatgcactgtcc

SEQ ID NO: 1782627 - DNA, 25 bp, Homo sapien
ccggcaaattttcttccatccagaa

SEQ ID NO: 1782628 - DNA, 25 bp, Homo sapien
tttccggcaaattttcttccatcca

SEQ ID NO: 1782629 - DNA, 25 bp, Homo sapien
tccggcaaattttcttccatccaga

SEQ ID NO: 1782630 - DNA, 25 bp, Homo sapien
ggcaaattttcttccatccagaaac

SEQ ID NO: 1782631 - DNA, 25 bp, Homo sapien
ttgtggcatactcccaatcatggga

SEQ ID NO: 1782632 - DNA, 25 bp, Homo sapien
caaagccctcaaggaggtacacagc

SEQ ID NO: 1782633 - DNA, 25 bp, Homo sapien
cagctccagataatgccttcttaga

SEQ ID NO: 1782634 - DNA, 25 bp, Homo sapien
gatatagaaacctccgtcaaccgag

SEQ ID NO: 1782635 - DNA, 25 bp, Homo sapien
ggaagacacagggtattaaggtgat

SEQ ID NO: 1782636 - DNA, 25 bp, Homo sapien
tgtgcaagatagtggcataagtctg

SEQ ID NO: 1782637 - DNA, 25 bp, Homo sapien
gggttcataagtagcgataataaaa

SEQ ID NO: 1782638 - DNA, 25 bp, Homo sapien
ggcataagtctggaaagtgaagtac

SEQ ID NO: 1782639 - DNA, 25 bp, Homo sapien
ggtggacagcttttcctgtagttca

SEQ ID NO: 1782640 - DNA, 25 bp, Homo sapien
ttttcacagatgtttggtggacagc

SEQ ID NO: 1782641 - DNA, 25 bp, Homo sapien
gggatgcgtttggatctaccatagt

SEQ ID NO: 1782642 - DNA, 25 bp, Homo sapien
agttcatcccttgtatcgcaatcag

SEQ ID NO: 1782643 - DNA, 25 bp, Homo sapien
ttccgaatcaacataccaacaggtg

SEQ ID NO: 1782644 - DNA, 25 bp, Homo sapien
gaacattccgaatcaacataccaac

SEQ ID NO: 1782645 - DNA, 25 bp, Homo sapien
tcaacataccaacaggtgctaattc

SEQ ID NO: 1782646 - DNA, 25 bp, Homo sapien
cttgaacattccgaatcaacatacc

SEQ ID NO: 1782647 - DNA, 25 bp, Homo sapien
gagaattctaccagaattctgtcaa

SEQ ID NO: 1782648 - DNA, 25 bp, Homo sapien
attctgtcaactaaatcggggacta

SEQ ID NO: 1782649 - DNA, 25 bp, Homo sapien
tgtcaactaaatcggggactatttc

SEQ ID NO: 1782650 - DNA, 25 bp, Homo sapien
agaattctaccagaattctgtcaac

SEQ ID NO: 1782651 - DNA, 25 bp, Homo sapien
ggtggcctgagagaatcttctccat

SEQ ID NO: 1782652 - DNA, 25 bp, Homo sapien
ttccaaacacactggtggcctgaga

SEQ ID NO: 1782653 - DNA, 25 bp, Homo sapien
gagaatagtgtctactaatgaacta

SEQ ID NO: 1782654 - DNA, 25 bp, Homo sapien
taatgaactattccaaacacactgg

SEQ ID NO: 1782655 - DNA, 25 bp, Homo sapien
gggccacatggaggtaaataacgca

SEQ ID NO: 1782656 - DNA, 25 bp, Homo sapien
taacgcattctagagaaattagcaa

SEQ ID NO: 1782657 - DNA, 25 bp, Homo sapien
ggaggtaaataacgcattctagaga

SEQ ID NO: 1782658 - DNA, 25 bp, Homo sapien
gagaaattagcaaaaatcacagtgc

SEQ ID NO: 1782659 - DNA, 25 bp, Homo sapien
ataatttttaagagagtagagagtc

SEQ ID NO: 1782660 - DNA, 25 bp, Homo sapien
tgagcactagccttggactggttag

SEQ ID NO: 1782661 - DNA, 25 bp, Homo sapien
caaaaccagtgtgtacatttggctt

SEQ ID NO: 1782662 - DNA, 25 bp, Homo sapien
catttggctttcaccagtctgatga

SEQ ID NO: 1782663 - DNA, 25 bp, Homo sapien
catgagagttgcaattattgctcta

SEQ ID NO: 1782664 - DNA, 25 bp, Homo sapien
atttgctttctcaactcgaagcctt

SEQ ID NO: 1782665 - DNA, 25 bp, Homo sapien
tgctttctcaactcgaagccttctg

SEQ ID NO: 1782666 - DNA, 25 bp, Homo sapien
tctcaactcgaagccttctgcttgt

SEQ ID NO: 1782667 - DNA, 25 bp, Homo sapien
aactcgaagccttctgcttgtagac

SEQ ID NO: 1782668 - DNA, 25 bp, Homo sapien
gtgagaaacacatagtgaaagcttc

SEQ ID NO: 1782669 - DNA, 25 bp, Homo sapien
tctgttaaaccccatagaattgtgc

SEQ ID NO: 1782670 - DNA, 25 bp, Homo sapien
aatctgttatttaaggagaaactgg

SEQ ID NO: 1782671 - DNA, 25 bp, Homo sapien
tttaaaaccctagcacaatctgtta

SEQ ID NO: 1782672 - DNA, 25 bp, Homo sapien
aggtgctgcccaacccctgacaaag

SEQ ID NO: 1782673 - DNA, 25 bp, Homo sapien
tgataagtgggcagtcctcgagcca

SEQ ID NO: 1782674 - DNA, 25 bp, Homo sapien
acaaagggtgaatgataagtgggca

SEQ ID NO: 1782675 - DNA, 25 bp, Homo sapien
cctcgagccagctgttactggacat

SEQ ID NO: 1782676 - DNA, 25 bp, Homo sapien
agcgtctcaactccatactgtattt

SEQ ID NO: 1782677 - DNA, 25 bp, Homo sapien
gtgaagcgtctcaactccatactgt

SEQ ID NO: 1782678 - DNA, 25 bp, Homo sapien
cagtgaagcgtctcaactccatact

SEQ ID NO: 1782679 - DNA, 25 bp, Homo sapien
gaagcgtctcaactccatactgtat

SEQ ID NO: 1782680 - DNA, 25 bp, Homo sapien
taacgtctaggatcttcacctgaaa

SEQ ID NO: 1782681 - DNA, 25 bp, Homo sapien
atattcaagtgtttgggcaaatacc

SEQ ID NO: 1782682 - DNA, 25 bp, Homo sapien
tggagctagatggaccaggttccat

SEQ ID NO: 1782683 - DNA, 25 bp, Homo sapien
cctgctccaagccataggtggagct

SEQ ID NO: 1782684 - DNA, 25 bp, Homo sapien
ctcctgggaactcgactgaaaatgt

SEQ ID NO: 1782685 - DNA, 25 bp, Homo sapien
ttagcctgatttagttatctgaatc

SEQ ID NO: 1782686 - DNA, 25 bp, Homo sapien
gatttagttatctgaatcaaaatga

SEQ ID NO: 1782687 - DNA, 25 bp, Homo sapien
gcatttatcagtctagcagagtgct

SEQ ID NO: 1782688 - DNA, 25 bp, Homo sapien
tgaagtttggcttccgaatgttgtt

SEQ ID NO: 1782689 - DNA, 25 bp, Homo sapien
ttcttcagcgagtcaacactgaact

SEQ ID NO: 1782690 - DNA, 25 bp, Homo sapien
tgaactgtccgctcagctttttgtt

SEQ ID NO: 1782691 - DNA, 25 bp, Homo sapien
gcgagtcaacactgaactgtccgct

SEQ ID NO: 1782692 - DNA, 25 bp, Homo sapien
cagagaattccataatcacataact

SEQ ID NO: 1782693 - DNA, 25 bp, Homo sapien
taccagagaattccataatcacata

SEQ ID NO: 1782694 - DNA, 25 bp, Homo sapien
gttaccagagaattccataatcaca

SEQ ID NO: 1782695 - DNA, 25 bp, Homo sapien
ttagttaccagagaattccataatc

SEQ ID NO: 1782696 - DNA, 25 bp, Homo sapien
caatgccagggccaaaaagagaggc

SEQ ID NO: 1782697 - DNA, 25 bp, Homo sapien
agaagcagatgttgaatttcaaagg

SEQ ID NO: 1782698 - DNA, 25 bp, Homo sapien
tcccgggcaatcaggaatgtggttg

SEQ ID NO: 1782699 - DNA, 25 bp, Homo sapien
ttcttcccgggcaatcaggaatgtg

SEQ ID NO: 1782700 - DNA, 25 bp, Homo sapien
tccctagttgagaggagcaatcctg

SEQ ID NO: 1782701 - DNA, 25 bp, Homo sapien
ttcagcagcaaaacgaggcacatgg

SEQ ID NO: 1782702 - DNA, 25 bp, Homo sapien
tccaaactgaaacagcggagcttcc

SEQ ID NO: 1782703 - DNA, 25 bp, Homo sapien
actgaaaacagttagcgtgcttccc

SEQ ID NO: 1782704 - DNA, 25 bp, Homo sapien
gaatagcccttaatatagcaatgat

SEQ ID NO: 1782705 - DNA, 25 bp, Homo sapien
atccacaagtaaaactttcacgcga

SEQ ID NO: 1782706 - DNA, 25 bp, Homo sapien
aactgaatagcccttaatatagcaa

SEQ ID NO: 1782707 - DNA, 25 bp, Homo sapien
ttcacgcgaagaaagctccaagcac

SEQ ID NO: 1782708 - DNA, 25 bp, Homo sapien
cggtgcaacgtttttggaagacagt

SEQ ID NO: 1782709 - DNA, 25 bp, Homo sapien
tactggcgatgcaaaacggtgcaac

SEQ ID NO: 1782710 - DNA, 25 bp, Homo sapien
tgtgatccaccagtcatgctccttg

SEQ ID NO: 1782711 - DNA, 25 bp, Homo sapien
accactttgtacattggcagtatcg

SEQ ID NO: 1782712 - DNA, 25 bp, Homo sapien
gaattgcaaaataaagtaacaatga

SEQ ID NO: 1782713 - DNA, 25 bp, Homo sapien
aattgcaaaataaagtaacaatgag

SEQ ID NO: 1782714 - DNA, 25 bp, Homo sapien
attgcaaaataaagtaacaatgaga

SEQ ID NO: 1782715 - DNA, 25 bp, Homo sapien
ttgcaaaataaagtaacaatgagat

SEQ ID NO: 1782716 - DNA, 25 bp, Homo sapien
taatattgtaggctctggcaccagt

SEQ ID NO: 1782717 - DNA, 25 bp, Homo sapien
taagacaaggtgttctcagggctgt

SEQ ID NO: 1782718 - DNA, 25 bp, Homo sapien
tatgttccccagtaggtagatgtcc

SEQ ID NO: 1782719 - DNA, 25 bp, Homo sapien
tatagtaaggaattcagtggcggac

SEQ ID NO: 1782720 - DNA, 25 bp, Homo sapien
tgttcgaacacaagatagtccgttg

SEQ ID NO: 1782721 - DNA, 25 bp, Homo sapien
tgacctatagaaccagtgtaaacct

SEQ ID NO: 1782722 - DNA, 25 bp, Homo sapien
tagtccgttgacactaactggcagt

SEQ ID NO: 1782723 - DNA, 25 bp, Homo sapien
gaagagcctgtaagaccatttctac

SEQ ID NO: 1782724 - DNA, 25 bp, Homo sapien
gataaaagtcaatgaaagttatcaa

SEQ ID NO: 1782725 - DNA, 25 bp, Homo sapien
tttatggtttcaaaactccatgctg

SEQ ID NO: 1782726 - DNA, 25 bp, Homo sapien
tccatcacacccaaagttcttgctg

SEQ ID NO: 1782727 - DNA, 25 bp, Homo sapien
tatcttttgtaatgatataaatcaa

SEQ ID NO: 1782728 - DNA, 25 bp, Homo sapien
gaccatccgcgatggagaaggaccc

SEQ ID NO: 1782729 - DNA, 25 bp, Homo sapien
gatgggcttccctgctagaacttcc

SEQ ID NO: 1782730 - DNA, 25 bp, Homo sapien
tgtgctcggtaaaagaggatgacca

SEQ ID NO: 1782731 - DNA, 25 bp, Homo sapien
ttcagtcaagggcacgtgagtagat

SEQ ID NO: 1782732 - DNA, 25 bp, Homo sapien
cagatgattggatgcctccttgcta

SEQ ID NO: 1782733 - DNA, 25 bp, Homo sapien
gacttgatggcctaaacacagaaat

SEQ ID NO: 1782734 - DNA, 25 bp, Homo sapien
tgttcaggctgtcagaacaaaatac

SEQ ID NO: 1782735 - DNA, 25 bp, Homo sapien
tcataattctgaaactggaagtcca

SEQ ID NO: 1782736 - DNA, 25 bp, Homo sapien
ctaaagtgggccttcgatgagagtg

SEQ ID NO: 1782737 - DNA, 25 bp, Homo sapien
gagtggatgagagtgttacagattc

SEQ ID NO: 1782738 - DNA, 25 bp, Homo sapien
tggatgagagtgttacagattctga

SEQ ID NO: 1782739 - DNA, 25 bp, Homo sapien
tgggccttcgatgagagtggatgag

SEQ ID NO: 1782740 - DNA, 25 bp, Homo sapien
ttgagtcagcggtccaagagtctgc

SEQ ID NO: 1782741 - DNA, 25 bp, Homo sapien
tgagatttgctgatccaaggatgat

SEQ ID NO: 1782742 - DNA, 25 bp, Homo sapien
gaggaagccgaagttcaagaattgg

SEQ ID NO: 1782743 - DNA, 25 bp, Homo sapien
cagatcttacccatgagaagtgacc

SEQ ID NO: 1782744 - DNA, 25 bp, Homo sapien
cttgcctgcaatatgggaactatga

SEQ ID NO: 1782745 - DNA, 25 bp, Homo sapien
tccaggtaatggcattgaagaatac

SEQ ID NO: 1782746 - DNA, 25 bp, Homo sapien
tactcataaaactgccatgactggg

SEQ ID NO: 1782747 - DNA, 25 bp, Homo sapien
gaatgttatctgctccaggtatcag

SEQ ID NO: 1782748 - DNA, 25 bp, Homo sapien
tctagaaatcgtatttccaaaatat

SEQ ID NO: 1782749 - DNA, 25 bp, Homo sapien
tatttctagaaatcgtatttccaaa

SEQ ID NO: 1782750 - DNA, 25 bp, Homo sapien
tagaaatcgtatttccaaaatatat

SEQ ID NO: 1782751 - DNA, 25 bp, Homo sapien
attgtatttctagaaatcgtatttc

SEQ ID NO: 1782752 - DNA, 25 bp, Homo sapien
tcaggccatgaaaggttctaagaaa

SEQ ID NO: 1782753 - DNA, 25 bp, Homo sapien
cctgtctgtagtagacctatcaggg

SEQ ID NO: 1782754 - DNA, 25 bp, Homo sapien
agcatccagcaacctgtctgtagta

SEQ ID NO: 1782755 - DNA, 25 bp, Homo sapien
tcccccaaaacactgagacattgag

SEQ ID NO: 1782756 - DNA, 25 bp, Homo sapien
aagccaaattcgcacccaaaaagag

SEQ ID NO: 1782757 - DNA, 25 bp, Homo sapien
tggtggtttgctgccggtctgctcc

SEQ ID NO: 1782758 - DNA, 25 bp, Homo sapien
tctgagatgtatgttcagcagatcg

SEQ ID NO: 1782759 - DNA, 25 bp, Homo sapien
cagtggttggatcgagaagctccaa

SEQ ID NO: 1782760 - DNA, 25 bp, Homo sapien
ttagcatttcctatacgaggcctcg

SEQ ID NO: 1782761 - DNA, 25 bp, Homo sapien
tagcatttcctatacgaggcctcga

SEQ ID NO: 1782762 - DNA, 25 bp, Homo sapien
tttcctatacgaggcctcgaaggca

SEQ ID NO: 1782763 - DNA, 25 bp, Homo sapien
gcatttcctatacgaggcctcgaag

SEQ ID NO: 1782764 - DNA, 25 bp, Homo sapien
catttctggctgcacgaataggagc

SEQ ID NO: 1782765 - DNA, 25 bp, Homo sapien
gctgcacgaataggagcagcaacaa

SEQ ID NO: 1782766 - DNA, 25 bp, Homo sapien
catggcatttctggctgcacgaata

SEQ ID NO: 1782767 - DNA, 25 bp, Homo sapien
ttctggctgcacgaataggagcagc

SEQ ID NO: 1782768 - DNA, 25 bp, Homo sapien
ataattcctcactaggaagcagcac

SEQ ID NO: 1782769 - DNA, 25 bp, Homo sapien
atgaatatattcaggttgtctttga

SEQ ID NO: 1782770 - DNA, 25 bp, Homo sapien
gtctttgaataattcctcactagga

SEQ ID NO: 1782771 - DNA, 25 bp, Homo sapien
tttgaataattcctcactaggaagc

SEQ ID NO: 1782772 - DNA, 25 bp, Homo sapien
aatctcattgatggatttactagta

SEQ ID NO: 1782773 - DNA, 25 bp, Homo sapien
cattgatggatttactagtaatgaa

SEQ ID NO: 1782774 - DNA, 25 bp, Homo sapien
tgatggatttactagtaatgaaaag

SEQ ID NO: 1782775 - DNA, 25 bp, Homo sapien
tggatttactagtaatgaaaagcat

SEQ ID NO: 1782776 - DNA, 25 bp, Homo sapien
cttgtgtgtgcttatccataatata

SEQ ID NO: 1782777 - DNA, 25 bp, Homo sapien
tgagtccattgatacttccccttga

SEQ ID NO: 1782778 - DNA, 25 bp, Homo sapien
aatttttaacatgagtccattgata

SEQ ID NO: 1782779 - DNA, 25 bp, Homo sapien
tgtgtgcttatccataatatatgcc

SEQ ID NO: 1782780 - DNA, 25 bp, Homo sapien
ctgtacaagaaaaaggcttgatatc

SEQ ID NO: 1782781 - DNA, 25 bp, Homo sapien
cctgtacaagaaaaaggcttgatat

SEQ ID NO: 1782782 - DNA, 25 bp, Homo sapien
gcctgtacaagaaaaaggcttgata

SEQ ID NO: 1782783 - DNA, 25 bp, Homo sapien
tgtacaagaaaaaggcttgatatct

SEQ ID NO: 1782784 - DNA, 25 bp, Homo sapien
taataacatcagacaagttgtgccc

SEQ ID NO: 1782785 - DNA, 25 bp, Homo sapien
gattgctgctttggctagtgtgaca

SEQ ID NO: 1782786 - DNA, 25 bp, Homo sapien
tctgctgggctaaagataaaccagt

SEQ ID NO: 1782787 - DNA, 25 bp, Homo sapien
caagctgtaacccatccctgagatg

SEQ ID NO: 1782788 - DNA, 25 bp, Homo sapien
ggctgccagtgccctggtgctccat

SEQ ID NO: 1782789 - DNA, 25 bp, Homo sapien
tttggctgccagtgccctggtgctc

SEQ ID NO: 1782790 - DNA, 25 bp, Homo sapien
tggctgccagtgccctggtgctcca

SEQ ID NO: 1782791 - DNA, 25 bp, Homo sapien
ttggctgccagtgccctggtgctcc

SEQ ID NO: 1782792 - DNA, 25 bp, Homo sapien
tatatctccggttctatctcgtcga

SEQ ID NO: 1782793 - DNA, 25 bp, Homo sapien
tatgatctgtttgagcttgaaacta

SEQ ID NO: 1782794 - DNA, 25 bp, Homo sapien
tctcgtcgatgctgggcgaatgttc

SEQ ID NO: 1782795 - DNA, 25 bp, Homo sapien
aaaagacagagatatctttatgatc

SEQ ID NO: 1782796 - DNA, 25 bp, Homo sapien
tccatacacatgattgaatcaacac

SEQ ID NO: 1782797 - DNA, 25 bp, Homo sapien
tgaacttccatacacatgattgaat

SEQ ID NO: 1782798 - DNA, 25 bp, Homo sapien
gattgaatcaacactctcatccaca

SEQ ID NO: 1782799 - DNA, 25 bp, Homo sapien
tacacatgattgaatcaacactctc

SEQ ID NO: 1782800 - DNA, 25 bp, Homo sapien
gagtcttccctggttgaactctcac

SEQ ID NO: 1782801 - DNA, 25 bp, Homo sapien
tctcactacgctcacatgtgcatgt

SEQ ID NO: 1782802 - DNA, 25 bp, Homo sapien
ccaggttccgcggaatgcttttagt

SEQ ID NO: 1782803 - DNA, 25 bp, Homo sapien
ttctgcccttaaagttgagtcttcc

SEQ ID NO: 1782804 - DNA, 25 bp, Homo sapien
gctcaatgcgtacaccaaagtgaat

SEQ ID NO: 1782805 - DNA, 25 bp, Homo sapien
gaagtaccgtatacatatgacagtc

SEQ ID NO: 1782806 - DNA, 25 bp, Homo sapien
tagttaccagtactgccaaaccatg

SEQ ID NO: 1782807 - DNA, 25 bp, Homo sapien
taggttgactcacatctcaaggatg

SEQ ID NO: 1782808 - DNA, 25 bp, Homo sapien
gcaggctccaactttttactctcag

SEQ ID NO: 1782809 - DNA, 25 bp, Homo sapien
gggcaggctccaactttttactctc

SEQ ID NO: 1782810 - DNA, 25 bp, Homo sapien
caggctccaactttttactctcagc

SEQ ID NO: 1782811 - DNA, 25 bp, Homo sapien
ggcaggctccaactttttactctca

SEQ ID NO: 1782812 - DNA, 25 bp, Homo sapien
cattggagatgtaaagagtaactgc

SEQ ID NO: 1782813 - DNA, 25 bp, Homo sapien
caggtataatgcagaataacagaga

SEQ ID NO: 1782814 - DNA, 25 bp, Homo sapien
gaagattaaatacgcactggtgata

SEQ ID NO: 1782815 - DNA, 25 bp, Homo sapien
gagtaactgccatgggtgtatgaag

SEQ ID NO: 1782816 - DNA, 25 bp, Homo sapien
gatccaatgcctggattcataccag

SEQ ID NO: 1782817 - DNA, 25 bp, Homo sapien
tagtctgggcaactaggttttcgac

SEQ ID NO: 1782818 - DNA, 25 bp, Homo sapien
cttgctggtgatatcccttggacaa

SEQ ID NO: 1782819 - DNA, 25 bp, Homo sapien
taccagtgttatccatccgggcatt

SEQ ID NO: 1782820 - DNA, 25 bp, Homo sapien
ggtggagggctgagctccatcatca

SEQ ID NO: 1782821 - DNA, 25 bp, Homo sapien
aggtggagggctgagctccatcatc

SEQ ID NO: 1782822 - DNA, 25 bp, Homo sapien
tggagggctgagctccatcatcact

SEQ ID NO: 1782823 - DNA, 25 bp, Homo sapien
gtggagggctgagctccatcatcac

SEQ ID NO: 1782824 - DNA, 25 bp, Homo sapien
gttctatacgtgacctctttgcact

SEQ ID NO: 1782825 - DNA, 25 bp, Homo sapien
tctgttctatacgtgacctctttgc

SEQ ID NO: 1782826 - DNA, 25 bp, Homo sapien
ccttctgttctatacgtgacctctt

SEQ ID NO: 1782827 - DNA, 25 bp, Homo sapien
tcttccttctgttctatacgtgacc

SEQ ID NO: 1782828 - DNA, 25 bp, Homo sapien
tgcaatgtgtctaacagttctagca

SEQ ID NO: 1782829 - DNA, 25 bp, Homo sapien
tactgcaatgtgtctaacagttcta

SEQ ID NO: 1782830 - DNA, 25 bp, Homo sapien
acagcatactgcaatgtgtctaaca

SEQ ID NO: 1782831 - DNA, 25 bp, Homo sapien
catactgcaatgtgtctaacagttc

SEQ ID NO: 1782832 - DNA, 25 bp, Homo sapien
caaaacatcgaatataaataacctg

SEQ ID NO: 1782833 - DNA, 25 bp, Homo sapien
caggtatcaactttactaaaccaca

SEQ ID NO: 1782834 - DNA, 25 bp, Homo sapien
gcattgtgttgttttatctcatgac

SEQ ID NO: 1782835 - DNA, 25 bp, Homo sapien
tgcatagcactcgatacttctttga

SEQ ID NO: 1782836 - DNA, 25 bp, Homo sapien
tatccattacatccaaatgtttttc

SEQ ID NO: 1782837 - DNA, 25 bp, Homo sapien
catgtatccattacatccaaatgtt

SEQ ID NO: 1782838 - DNA, 25 bp, Homo sapien
aaggataaaacagcacaaaactcat

SEQ ID NO: 1782839 - DNA, 25 bp, Homo sapien
aaaggataaaacagcacaaaactca

SEQ ID NO: 1782840 - DNA, 25 bp, Homo sapien
tgattaaaagtatttctatattctg

SEQ ID NO: 1782841 - DNA, 25 bp, Homo sapien
ttaaaagtatttctatattctgtca

SEQ ID NO: 1782842 - DNA, 25 bp, Homo sapien
agtagttgattaaaagtatttctat

SEQ ID NO: 1782843 - DNA, 25 bp, Homo sapien
taaaagtatttctatattctgtcat

SEQ ID NO: 1782844 - DNA, 25 bp, Homo sapien
tgggaagtagagtaaacagagttaa

SEQ ID NO: 1782845 - DNA, 25 bp, Homo sapien
taaacagagttaaaacggactgaca

SEQ ID NO: 1782846 - DNA, 25 bp, Homo sapien
aaacagagttaaaacggactgacat

SEQ ID NO: 1782847 - DNA, 25 bp, Homo sapien
cggagtgcacctactggcagaagga

SEQ ID NO: 1782848 - DNA, 25 bp, Homo sapien
tggcaaggtgggctgcaaactgatc

SEQ ID NO: 1782849 - DNA, 25 bp, Homo sapien
gcgccgacaggtaagagcacaggta

SEQ ID NO: 1782850 - DNA, 25 bp, Homo sapien
tagagaagactcacccggagtgcac

SEQ ID NO: 1782851 - DNA, 25 bp, Homo sapien
tcatcaccaacagcgccatgaggag

SEQ ID NO: 1782852 - DNA, 25 bp, Homo sapien
gcttgctgggcaacatcatgctggt

SEQ ID NO: 1782853 - DNA, 25 bp, Homo sapien
cgtgaaaactccagcggactctgct

SEQ ID NO: 1782854 - DNA, 25 bp, Homo sapien
tctgctggaaaggagatcatgccct

SEQ ID NO: 1782855 - DNA, 25 bp, Homo sapien
tccagttccacacaatacaacagga

SEQ ID NO: 1782856 - DNA, 25 bp, Homo sapien
cagttccacacaatacaacaggaac

SEQ ID NO: 1782857 - DNA, 25 bp, Homo sapien
ttccacacaatacaacaggaacttc

SEQ ID NO: 1782858 - DNA, 25 bp, Homo sapien
cctccagttccacacaatacaacag

SEQ ID NO: 1782859 - DNA, 25 bp, Homo sapien
tggcctttctagtccgatctcccat

SEQ ID NO: 1782860 - DNA, 25 bp, Homo sapien
cattctgagtgttccacacgttggc

SEQ ID NO: 1782861 - DNA, 25 bp, Homo sapien
gtgttccacacgttggcctttctag

SEQ ID NO: 1782862 - DNA, 25 bp, Homo sapien
cttaacttagcattctgagtgttcc

SEQ ID NO: 1782863 - DNA, 25 bp, Homo sapien
cacttctacactagtgtagttcagg

SEQ ID NO: 1782864 - DNA, 25 bp, Homo sapien
ccaccacttctacactagtgtagtt

SEQ ID NO: 1782865 - DNA, 25 bp, Homo sapien
tctacactagtgtagttcaggtcta

SEQ ID NO: 1782866 - DNA, 25 bp, Homo sapien
cactagtgtagttcaggtctagcct

SEQ ID NO: 1782867 - DNA, 25 bp, Homo sapien
gttaattcttgacccacattgccag

SEQ ID NO: 1782868 - DNA, 25 bp, Homo sapien
acatccttcatagaagtttttgatg

SEQ ID NO: 1782869 - DNA, 25 bp, Homo sapien
tgtctcaggagatgttatcctggca

SEQ ID NO: 1782870 - DNA, 25 bp, Homo sapien
tgatgtaatttagagacatgtctca

SEQ ID NO: 1782871 - DNA, 25 bp, Homo sapien
ttgtctggatcgcaaatgaagtgca

SEQ ID NO: 1782872 - DNA, 25 bp, Homo sapien
gagtgattggcctgaactgattgta

SEQ ID NO: 1782873 - DNA, 25 bp, Homo sapien
ggaattgaccaatcacagttggagg

SEQ ID NO: 1782874 - DNA, 25 bp, Homo sapien
gcaccccgaggaagaatattcggat

SEQ ID NO: 1782875 - DNA, 25 bp, Homo sapien
ccaggacaataactagttgtaatgc

SEQ ID NO: 1782876 - DNA, 25 bp, Homo sapien
gaaccaggacaataactagttgtaa

SEQ ID NO: 1782877 - DNA, 25 bp, Homo sapien
ggaaccaggacaataactagttgta

SEQ ID NO: 1782878 - DNA, 25 bp, Homo sapien
caggaaccaggacaataactagttg

SEQ ID NO: 1782879 - DNA, 25 bp, Homo sapien
tacatgcagcataaaggtggaaaag

SEQ ID NO: 1782880 - DNA, 25 bp, Homo sapien
tgttttccccaagagatctagcatc

SEQ ID NO: 1782881 - DNA, 25 bp, Homo sapien
tcaaagtgttctggaaccatgcatc

SEQ ID NO: 1782882 - DNA, 25 bp, Homo sapien
gccagaatgctattgccgctagact

SEQ ID NO: 1782883 - DNA, 25 bp, Homo sapien
caagaatccttaccttacaaccagg

SEQ ID NO: 1782884 - DNA, 25 bp, Homo sapien
taactgcagcatgacaataggtaat

SEQ ID NO: 1782885 - DNA, 25 bp, Homo sapien
tacaaccaggcactatattttatag

SEQ ID NO: 1782886 - DNA, 25 bp, Homo sapien
gttttgaaattgtactcactgagta

SEQ ID NO: 1782887 - DNA, 25 bp, Homo sapien
tccattcatctcagaccagtttctg

SEQ ID NO: 1782888 - DNA, 25 bp, Homo sapien
ctagaaccttggcaagtaaggggag

SEQ ID NO: 1782889 - DNA, 25 bp, Homo sapien
accctctaggactgggctagaacct

SEQ ID NO: 1782890 - DNA, 25 bp, Homo sapien
gaaggatctgacatcaccctctagg

SEQ ID NO: 1782891 - DNA, 25 bp, Homo sapien
agcattttggcgcttatgccgcgca

SEQ ID NO: 1782892 - DNA, 25 bp, Homo sapien
tcggcggttagaacccacagaagac

SEQ ID NO: 1782893 - DNA, 25 bp, Homo sapien
gtgcttggctctcggcggttagaac

SEQ ID NO: 1782894 - DNA, 25 bp, Homo sapien
acagaagacccgagcattttggcgc

SEQ ID NO: 1782895 - DNA, 25 bp, Homo sapien
cacgagcgttcagagcaaatgctgc

SEQ ID NO: 1782896 - DNA, 25 bp, Homo sapien
gtagcgcgcacgagcgttcagagca

SEQ ID NO: 1782897 - DNA, 25 bp, Homo sapien
gttcagagcaaatgctgcccactct

SEQ ID NO: 1782898 - DNA, 25 bp, Homo sapien
cgcgcacgagcgttcagagcaaatg

SEQ ID NO: 1782899 - DNA, 25 bp, Homo sapien
cgcgctccaccggcacttccgcttc

SEQ ID NO: 1782900 - DNA, 25 bp, Homo sapien
tcgcgctccaccggcacttccgctt

SEQ ID NO: 1782901 - DNA, 25 bp, Homo sapien
ctactccgaactcaccacttcctac

SEQ ID NO: 1782902 - DNA, 25 bp, Homo sapien
tctactccgaactcaccacttccta

SEQ ID NO: 1782903 - DNA, 25 bp, Homo sapien
ctctactccgaactcaccacttcct

SEQ ID NO: 1782904 - DNA, 25 bp, Homo sapien
gctcctgagccgtcctcagatgatg

SEQ ID NO: 1782905 - DNA, 25 bp, Homo sapien
atgctgtatgctcttgaactgtgcg

SEQ ID NO: 1782906 - DNA, 25 bp, Homo sapien
gctgtatgctcttgaactgtgcggg

SEQ ID NO: 1782907 - DNA, 25 bp, Homo sapien
gccgtcctcagatgatgctgtatgc

SEQ ID NO: 1782908 - DNA, 25 bp, Homo sapien
agtaataagccaccacagggtctcg

SEQ ID NO: 1782909 - DNA, 25 bp, Homo sapien
gtaataagccaccacagggtctcgc

SEQ ID NO: 1782910 - DNA, 25 bp, Homo sapien
caagataggagaagcagtggacacc

SEQ ID NO: 1782911 - DNA, 25 bp, Homo sapien
tgttttgggattcctactgccaggg

SEQ ID NO: 1782912 - DNA, 25 bp, Homo sapien
cctgggtaggctcgaggtcaaagct

SEQ ID NO: 1782913 - DNA, 25 bp, Homo sapien
tgtgtgggccctaaaatgcaactgg

SEQ ID NO: 1782914 - DNA, 25 bp, Homo sapien
ttcctatttgagacaagaagctctt

SEQ ID NO: 1782915 - DNA, 25 bp, Homo sapien
tgagacaagaagctcttgtgtgtac

SEQ ID NO: 1782916 - DNA, 25 bp, Homo sapien
caagaagctcttgtgtgtacacaca

SEQ ID NO: 1782917 - DNA, 25 bp, Homo sapien
tcctatttgagacaagaagctcttg

SEQ ID NO: 1782918 - DNA, 25 bp, Homo sapien
gaaaaaggtgcacattccaagagag

SEQ ID NO: 1782919 - DNA, 25 bp, Homo sapien
tgcagcaaatgtagtcacagcgcct

SEQ ID NO: 1782920 - DNA, 25 bp, Homo sapien
gagtatggcagagataacagtgacc

SEQ ID NO: 1782921 - DNA, 25 bp, Homo sapien
tggtaggtctgaaaaggccttgcac

SEQ ID NO: 1782922 - DNA, 25 bp, Homo sapien
tacagggatcgggaacaggaatttc

SEQ ID NO: 1782923 - DNA, 25 bp, Homo sapien
tttcccagatggtgcaaggtatgcc

SEQ ID NO: 1782924 - DNA, 25 bp, Homo sapien
tgttcctgaccactatgaaactgaa

SEQ ID NO: 1782925 - DNA, 25 bp, Homo sapien
gacgacagtgagtaaggtgtccctg

SEQ ID NO: 1782926 - DNA, 25 bp, Homo sapien
cacttaggggaatctccgagatttt

SEQ ID NO: 1782927 - DNA, 25 bp, Homo sapien
tccactctccacttaggggaatctc

SEQ ID NO: 1782928 - DNA, 25 bp, Homo sapien
ggaatctccgagattttttcactgg

SEQ ID NO: 1782929 - DNA, 25 bp, Homo sapien
actctccacttaggggaatctccga

SEQ ID NO: 1782930 - DNA, 25 bp, Homo sapien
actttgataaaaatttgcgacattc

SEQ ID NO: 1782931 - DNA, 25 bp, Homo sapien
tttgcgacattcaggagttttacta

SEQ ID NO: 1782932 - DNA, 25 bp, Homo sapien
taaaaatttgcgacattcaggagtt

SEQ ID NO: 1782933 - DNA, 25 bp, Homo sapien
tttactatcgatcttcattccagtc

SEQ ID NO: 1782934 - DNA, 25 bp, Homo sapien
tcttgagtaatagcttcattatcac

SEQ ID NO: 1782935 - DNA, 25 bp, Homo sapien
tcttcattgtctgcatacaaaaaca

SEQ ID NO: 1782936 - DNA, 25 bp, Homo sapien
gcataattctccaaatgggcacagc

SEQ ID NO: 1782937 - DNA, 25 bp, Homo sapien
tgtgaaatcgtccagcacgatcttc

SEQ ID NO: 1782938 - DNA, 25 bp, Homo sapien
atgacatctatcaaaagacttgcag

SEQ ID NO: 1782939 - DNA, 25 bp, Homo sapien
gacatctatcaaaagacttgcagta

SEQ ID NO: 1782940 - DNA, 25 bp, Homo sapien
tgacatctatcaaaagacttgcagt

SEQ ID NO: 1782941 - DNA, 25 bp, Homo sapien
cagtagtcacacatatgctgaagtg

SEQ ID NO: 1782942 - DNA, 25 bp, Homo sapien
aaaacttaacaacatacaggattag

SEQ ID NO: 1782943 - DNA, 25 bp, Homo sapien
gatttaaagaacttattacaggcca

SEQ ID NO: 1782944 - DNA, 25 bp, Homo sapien
caaactctaaacctgtgctgtccaa

SEQ ID NO: 1782945 - DNA, 25 bp, Homo sapien
tggtactctccaaagttctactgaa

SEQ ID NO: 1782946 - DNA, 25 bp, Homo sapien
cccaaggcatagttctttactcaaa

SEQ ID NO: 1782947 - DNA, 25 bp, Homo sapien
tctactgaaccactcaaagctttcc

SEQ ID NO: 1782948 - DNA, 25 bp, Homo sapien
tctgacctggcttatgacttactct

SEQ ID NO: 1782949 - DNA, 25 bp, Homo sapien
tagaacataagctcaacgagggcag

SEQ ID NO: 1782950 - DNA, 25 bp, Homo sapien
ccaggctaatgttaggtactgccaa

SEQ ID NO: 1782951 - DNA, 25 bp, Homo sapien
caaggtgtctaagcatagtgccagg

SEQ ID NO: 1782952 - DNA, 25 bp, Homo sapien
ggaagcctatcaataatattggcca

SEQ ID NO: 1782953 - DNA, 25 bp, Homo sapien
gcaggtttagaactgtcaacccata

SEQ ID NO: 1782954 - DNA, 25 bp, Homo sapien
cctagcagagtatacagatacacaa

SEQ ID NO: 1782955 - DNA, 25 bp, Homo sapien
gattacaacaattccaacctaacag

SEQ ID NO: 1782956 - DNA, 25 bp, Homo sapien
tgctgcatcattgctcctagcagag

SEQ ID NO: 1782957 - DNA, 25 bp, Homo sapien
tattaggatgcacatgacgtgagct

SEQ ID NO: 1782958 - DNA, 25 bp, Homo sapien
gacgtgagctgtcccaatattagtg

SEQ ID NO: 1782959 - DNA, 25 bp, Homo sapien
tggaagcattatcactgaagcgatg

SEQ ID NO: 1782960 - DNA, 25 bp, Homo sapien
tgtctcctcatgattacgttcgggt

SEQ ID NO: 1782961 - DNA, 25 bp, Homo sapien
gatgagaatcactgacaactgcaaa

SEQ ID NO: 1782962 - DNA, 25 bp, Homo sapien
acaacagcaaccataggcgggagga

SEQ ID NO: 1782963 - DNA, 25 bp, Homo sapien
tacactgaagcatgactggttagac

SEQ ID NO: 1782964 - DNA, 25 bp, Homo sapien
cctggctagagctatgaaaaatttg

SEQ ID NO: 1782965 - DNA, 25 bp, Homo sapien
taggctctgtaaaagtttgctgtta

SEQ ID NO: 1782966 - DNA, 25 bp, Homo sapien
tgtgctaaagcactgacttttccag

SEQ ID NO: 1782967 - DNA, 25 bp, Homo sapien
tattattaacctatgctccagcaat

SEQ ID NO: 1782968 - DNA, 25 bp, Homo sapien
tcaaaatcctgagcaattagaattg

SEQ ID NO: 1782969 - DNA, 25 bp, Homo sapien
aattatggatgtatgttgccttcca

SEQ ID NO: 1782970 - DNA, 25 bp, Homo sapien
acaattatggatgtatgttgccttc

SEQ ID NO: 1782971 - DNA, 25 bp, Homo sapien
ttatggatgtatgttgccttccatc

SEQ ID NO: 1782972 - DNA, 25 bp, Homo sapien
ttaaacaattatggatgtatgttgc

SEQ ID NO: 1782973 - DNA, 25 bp, Homo sapien
cacttctgctggtgtattagctgga

SEQ ID NO: 1782974 - DNA, 25 bp, Homo sapien
tgttgcttgggtcataagttgaaga

SEQ ID NO: 1782975 - DNA, 25 bp, Homo sapien
cgtgtgcacccggaggaatctgtat

SEQ ID NO: 1782976 - DNA, 25 bp, Homo sapien
tccagtatagttgcctgatggcatg

SEQ ID NO: 1782977 - DNA, 25 bp, Homo sapien
atggaattcaaggaacttgtcatgt

SEQ ID NO: 1782978 - DNA, 25 bp, Homo sapien
ggaattcaaggaacttgtcatgttt

SEQ ID NO: 1782979 - DNA, 25 bp, Homo sapien
aattcaaggaacttgtcatgttttc

SEQ ID NO: 1782980 - DNA, 25 bp, Homo sapien
tcaaggaacttgtcatgttttcatg

SEQ ID NO: 1782981 - DNA, 25 bp, Homo sapien
aaattgtattgaaaagtgcgggatc

SEQ ID NO: 1782982 - DNA, 25 bp, Homo sapien
ggttggatagtattacttgctacac

SEQ ID NO: 1782983 - DNA, 25 bp, Homo sapien
caatggcaggtatagtctgtggagt

SEQ ID NO: 1782984 - DNA, 25 bp, Homo sapien
aaaagtgcgggatcaatggcaggta

SEQ ID NO: 1782985 - DNA, 25 bp, Homo sapien
gaactcatggtaatctcgaactaaa

SEQ ID NO: 1782986 - DNA, 25 bp, Homo sapien
tataatctagcataggcttccatgg

SEQ ID NO: 1782987 - DNA, 25 bp, Homo sapien
tttgttcttcaatatccggtagtgc

SEQ ID NO: 1782988 - DNA, 25 bp, Homo sapien
ttttaaagtcaaacaatcctggctc

SEQ ID NO: 1782989 - DNA, 25 bp, Homo sapien
cttaaaccaatcacttagcctataa

SEQ ID NO: 1782990 - DNA, 25 bp, Homo sapien
aaataaacacaatgcctgatttggg

SEQ ID NO: 1782991 - DNA, 25 bp, Homo sapien
ttaaaccaatcacttagcctataaa

SEQ ID NO: 1782992 - DNA, 25 bp, Homo sapien
caccatttattgaaacgagtatctt

SEQ ID NO: 1782993 - DNA, 25 bp, Homo sapien
ttaggcatcagaaccattttgagtt

SEQ ID NO: 1782994 - DNA, 25 bp, Homo sapien
tggagttcaaatttaggcatcagaa

SEQ ID NO: 1782995 - DNA, 25 bp, Homo sapien
tgtggctgtcctgttacgccagcac

SEQ ID NO: 1782996 - DNA, 25 bp, Homo sapien
taaatgtttggagcgctgaatgtcc

SEQ ID NO: 1782997 - DNA, 25 bp, Homo sapien
gaatgtcccaaatggattacactgg

SEQ ID NO: 1782998 - DNA, 25 bp, Homo sapien
tacaggacctgggaaatgtacctcc

SEQ ID NO: 1782999 - DNA, 25 bp, Homo sapien
aaatcttcactgctaggtcgctacc

SEQ ID NO: 1783000 - DNA, 25 bp, Homo sapien
tacctactggcctgttgagaaggct

SEQ ID NO: 1783001 - DNA, 25 bp, Homo sapien
tgaatctgttcggtgttaaaagacc

SEQ ID NO: 1783002 - DNA, 25 bp, Homo sapien
gaaggctgttgccagacgatttgga

SEQ ID NO: 1783003 - DNA, 25 bp, Homo sapien
ggacacaatattcctagatgacagt

SEQ ID NO: 1783004 - DNA, 25 bp, Homo sapien
ttcacgagatccaccttttttagct

SEQ ID NO: 1783005 - DNA, 25 bp, Homo sapien
atctttacagtttcaaagcatacat

SEQ ID NO: 1783006 - DNA, 25 bp, Homo sapien
ggattttctcttatgctatctttta

SEQ ID NO: 1783007 - DNA, 25 bp, Homo sapien
cactaatctacctctattttcacga

SEQ ID NO: 1783008 - DNA, 25 bp, Homo sapien
aacactgtgcttcaaatacctacct

SEQ ID NO: 1783009 - DNA, 25 bp, Homo sapien
ggtagtgacagtggttataaatgca

SEQ ID NO: 1783010 - DNA, 25 bp, Homo sapien
ctttatcaggtaagttgtcattgac

SEQ ID NO: 1783011 - DNA, 25 bp, Homo sapien
ccaacttgagtggtatatttgtcac

SEQ ID NO: 1783012 - DNA, 25 bp, Homo sapien
ccatttccaaggttgatatatctaa

SEQ ID NO: 1783013 - DNA, 25 bp, Homo sapien
ctggtatactctattatcctttgac

SEQ ID NO: 1783014 - DNA, 25 bp, Homo sapien
tgtcataagagaggatagaacactt

SEQ ID NO: 1783015 - DNA, 25 bp, Homo sapien
cactgcgtgctcagttgacataagc

SEQ ID NO: 1783016 - DNA, 25 bp, Homo sapien
tcactgttgtgaatcagggattacc

SEQ ID NO: 1783017 - DNA, 25 bp, Homo sapien
gattaccgatcccaattttaacaga

SEQ ID NO: 1783018 - DNA, 25 bp, Homo sapien
tacatacgctgtctaggtgaggaaa

SEQ ID NO: 1783019 - DNA, 25 bp, Homo sapien
gacaatttagtcaggtatgctccag

SEQ ID NO: 1783020 - DNA, 25 bp, Homo sapien
agtacttctgagctctagcaaagtc

SEQ ID NO: 1783021 - DNA, 25 bp, Homo sapien
tatttgcagtacttctgagctctag

SEQ ID NO: 1783022 - DNA, 25 bp, Homo sapien
gcatatttgcagtacttctgagctc

SEQ ID NO: 1783023 - DNA, 25 bp, Homo sapien
tcattctctgcctgtcgtcagtaac

SEQ ID NO: 1783024 - DNA, 25 bp, Homo sapien
ccaaaaatacatgggtctgtcatac

SEQ ID NO: 1783025 - DNA, 25 bp, Homo sapien
tgatcctgataggctgaagatagag

SEQ ID NO: 1783026 - DNA, 25 bp, Homo sapien
ctgtgatcctgataggctgaagata

SEQ ID NO: 1783027 - DNA, 25 bp, Homo sapien
gccaaaaatacatgggtctgtcata

SEQ ID NO: 1783028 - DNA, 25 bp, Homo sapien
cattgtcatattcaacaaaaccaag

SEQ ID NO: 1783029 - DNA, 25 bp, Homo sapien
ttgtcatattcaacaaaaccaagtc

SEQ ID NO: 1783030 - DNA, 25 bp, Homo sapien
attgtcatattcaacaaaaccaagt

SEQ ID NO: 1783031 - DNA, 25 bp, Homo sapien
gttgaggctgctgatgaatgcttca

SEQ ID NO: 1783032 - DNA, 25 bp, Homo sapien
tggttgaggctgctgatgaatgctt

SEQ ID NO: 1783033 - DNA, 25 bp, Homo sapien
tgaggctgctgatgaatgcttcaat

SEQ ID NO: 1783034 - DNA, 25 bp, Homo sapien
ggctgctgatgaatgcttcaataaa

SEQ ID NO: 1783035 - DNA, 25 bp, Homo sapien
catcagccctatatactcagagacg

SEQ ID NO: 1783036 - DNA, 25 bp, Homo sapien
gaagcagggttcaatggacattttt

SEQ ID NO: 1783037 - DNA, 25 bp, Homo sapien
ttagggtcttgctaacatcagccct

SEQ ID NO: 1783038 - DNA, 25 bp, Homo sapien
acattttatagaggtgtgttttcat

SEQ ID NO: 1783039 - DNA, 25 bp, Homo sapien
catctgtttgtccaaacattacaga

SEQ ID NO: 1783040 - DNA, 25 bp, Homo sapien
agtaatatcatctgtttgtccaaac

SEQ ID NO: 1783041 - DNA, 25 bp, Homo sapien
taatatcatctgtttgtccaaacat

SEQ ID NO: 1783042 - DNA, 25 bp, Homo sapien
agaatattctggctatctttattaa

SEQ ID NO: 1783043 - DNA, 25 bp, Homo sapien
cacccatagctatccactgtgtgga

SEQ ID NO: 1783044 - DNA, 25 bp, Homo sapien
cagcagcagaggagtaccttaattt

SEQ ID NO: 1783045 - DNA, 25 bp, Homo sapien
gcaggtagtacacagtaagttcata

SEQ ID NO: 1783046 - DNA, 25 bp, Homo sapien
tcttaagtctgaaagtgattctacc

SEQ ID NO: 1783047 - DNA, 25 bp, Homo sapien
taacaggtggccaatccatgggcca

SEQ ID NO: 1783048 - DNA, 25 bp, Homo sapien
tgacccttgtgtttaaagattccca

SEQ ID NO: 1783049 - DNA, 25 bp, Homo sapien
tatttacgtaacaggtggccaatcc

SEQ ID NO: 1783050 - DNA, 25 bp, Homo sapien
ttcctatagaaacacccatattcct

SEQ ID NO: 1783051 - DNA, 25 bp, Homo sapien
tatgaaatgctaccatgcgctaagc

SEQ ID NO: 1783052 - DNA, 25 bp, Homo sapien
tcccaaaaggccattagactaggtg

SEQ ID NO: 1783053 - DNA, 25 bp, Homo sapien
ttcaatcccctcatgcaagaaggcg

SEQ ID NO: 1783054 - DNA, 25 bp, Homo sapien
gcgtttttaagcactgggccacata

SEQ ID NO: 1783055 - DNA, 25 bp, Homo sapien
ataccaggcatatagtagccattca

SEQ ID NO: 1783056 - DNA, 25 bp, Homo sapien
taccaggcatatagtagccattcag

SEQ ID NO: 1783057 - DNA, 25 bp, Homo sapien
accaggcatatagtagccattcagt

SEQ ID NO: 1783058 - DNA, 25 bp, Homo sapien
ccaggcatatagtagccattcagta

SEQ ID NO: 1783059 - DNA, 25 bp, Homo sapien
gcctcttcagtagctgagattagag

SEQ ID NO: 1783060 - DNA, 25 bp, Homo sapien
catgccaggctaatatatatattat

SEQ ID NO: 1783061 - DNA, 25 bp, Homo sapien
ccatgccaggctaatatatatatta

SEQ ID NO: 1783062 - DNA, 25 bp, Homo sapien
tcttcagtagctgagattagaggta

SEQ ID NO: 1783063 - DNA, 25 bp, Homo sapien
aacccagactccctaatgatgtgga

SEQ ID NO: 1783064 - DNA, 25 bp, Homo sapien
ttagtgtccccttggattgctgcag

SEQ ID NO: 1783065 - DNA, 25 bp, Homo sapien
gcattactcaaaccctgcttagtgt

SEQ ID NO: 1783066 - DNA, 25 bp, Homo sapien
tacaatttcaggtcatagatcagtg

SEQ ID NO: 1783067 - DNA, 25 bp, Homo sapien
tctgaacacagacacactggagatc

SEQ ID NO: 1783068 - DNA, 25 bp, Homo sapien
cagacctataggattagggcctcac

SEQ ID NO: 1783069 - DNA, 25 bp, Homo sapien
tactcgagttacctgaattgcccac

SEQ ID NO: 1783070 - DNA, 25 bp, Homo sapien
tgtaaccttaattgcctccctatgg

SEQ ID NO: 1783071 - DNA, 25 bp, Homo sapien
tataagcatggcacaatagaccgtc

SEQ ID NO: 1783072 - DNA, 25 bp, Homo sapien
catgggatgaattaaagcaggcaac

SEQ ID NO: 1783073 - DNA, 25 bp, Homo sapien
gaacttagcatctaatgagggagac

SEQ ID NO: 1783074 - DNA, 25 bp, Homo sapien
caggcaactgatagggttgagagca

SEQ ID NO: 1783075 - DNA, 25 bp, Homo sapien
tgctacttcatgcaacaggtcactg

SEQ ID NO: 1783076 - DNA, 25 bp, Homo sapien
gtcactgagcctgcttgagacatta

SEQ ID NO: 1783077 - DNA, 25 bp, Homo sapien
tggtatgaacacaggctcagcatgt

SEQ ID NO: 1783078 - DNA, 25 bp, Homo sapien
tcagcatgtttgtgaccaactgggt

SEQ ID NO: 1783079 - DNA, 25 bp, Homo sapien
aatgaacctggacctcctgcatggc

SEQ ID NO: 1783080 - DNA, 25 bp, Homo sapien
tgcataggccaggaaatgaacctgg

SEQ ID NO: 1783081 - DNA, 25 bp, Homo sapien
gccaggaaatgaacctggacctcct

SEQ ID NO: 1783082 - DNA, 25 bp, Homo sapien
aggaaatgaacctggacctcctgca

SEQ ID NO: 1783083 - DNA, 25 bp, Homo sapien
tgtcaaaatgtgtgccagggctctc

SEQ ID NO: 1783084 - DNA, 25 bp, Homo sapien
acctttttcactctgtcaaaatgtg

SEQ ID NO: 1783085 - DNA, 25 bp, Homo sapien
tcactctgtcaaaatgtgtgccagg

SEQ ID NO: 1783086 - DNA, 25 bp, Homo sapien
tttcattatgcttgtgggttttttc

SEQ ID NO: 1783087 - DNA, 25 bp, Homo sapien
gagcaactggtctcagagaatgcca

SEQ ID NO: 1783088 - DNA, 25 bp, Homo sapien
gggaagccaaatggatgatccacca

SEQ ID NO: 1783089 - DNA, 25 bp, Homo sapien
gccattttacccatcgtgttccgac

SEQ ID NO: 1783090 - DNA, 25 bp, Homo sapien
tggatgatccaccacctggacaact

SEQ ID NO: 1783091 - DNA, 25 bp, Homo sapien
gatatcaacctttttggtcgctggc

SEQ ID NO: 1783092 - DNA, 25 bp, Homo sapien
tatcacagtcttcataagcctggcc

SEQ ID NO: 1783093 - DNA, 25 bp, Homo sapien
ggtacacagcttctcttggaaacca

SEQ ID NO: 1783094 - DNA, 25 bp, Homo sapien
tcgctggccgttggtccacatagaa

SEQ ID NO: 1783095 - DNA, 25 bp, Homo sapien
actcggccaccaccctaggtacttg

SEQ ID NO: 1783096 - DNA, 25 bp, Homo sapien
tgaggagaccgggccaggcaggggt

SEQ ID NO: 1783097 - DNA, 25 bp, Homo sapien
gcaggggtgcgcgtcgcaggtcctc

SEQ ID NO: 1783098 - DNA, 25 bp, Homo sapien
cgggcgcaggcgactctccccggac

SEQ ID NO: 1783099 - DNA, 25 bp, Homo sapien
cagggcctgcggacgaggaagcagg

SEQ ID NO: 1783100 - DNA, 25 bp, Homo sapien
atgggctttcccgacggcgcaaggt

SEQ ID NO: 1783101 - DNA, 25 bp, Homo sapien
tgaaccctgggcgcggcagcgttca

SEQ ID NO: 1783102 - DNA, 25 bp, Homo sapien
gccgtttctggagagttcatgggct

SEQ ID NO: 1783103 - DNA, 25 bp, Homo sapien
cgcaagatcatcctccaccactttc

SEQ ID NO: 1783104 - DNA, 25 bp, Homo sapien
gttgacattactgcgccgaggtccc

SEQ ID NO: 1783105 - DNA, 25 bp, Homo sapien
gaggtcccctttggccgcaagatca

SEQ ID NO: 1783106 - DNA, 25 bp, Homo sapien
attactgcgccgaggtcccctttgg

SEQ ID NO: 1783107 - DNA, 25 bp, Homo sapien
tccaagcccccaggtgttgattccg

SEQ ID NO: 1783108 - DNA, 25 bp, Homo sapien
gaggagcggtgcctgttactccttg

SEQ ID NO: 1783109 - DNA, 25 bp, Homo sapien
agagcgccttcttggcagggccagg

SEQ ID NO: 1783110 - DNA, 25 bp, Homo sapien
gtgttgattccggagagcgccttct

SEQ ID NO: 1783111 - DNA, 25 bp, Homo sapien
taaagcaaataagaacaggagagga

SEQ ID NO: 1783112 - DNA, 25 bp, Homo sapien
tgaggaacacacatgatatataaag

SEQ ID NO: 1783113 - DNA, 25 bp, Homo sapien
ccacattcgatctgagcgaaacatc

SEQ ID NO: 1783114 - DNA, 25 bp, Homo sapien
ggcagctccacattcgatctgagcg

SEQ ID NO: 1783115 - DNA, 25 bp, Homo sapien
gctggtgtgcctcgtctaaatattc

SEQ ID NO: 1783116 - DNA, 25 bp, Homo sapien
tggtgacaaggcaggtcattcccct

SEQ ID NO: 1783117 - DNA, 25 bp, Homo sapien
cattagtggtcccatcacactgcgg

SEQ ID NO: 1783118 - DNA, 25 bp, Homo sapien
cactgcgggtcacttgagattgtca

SEQ ID NO: 1783119 - DNA, 25 bp, Homo sapien
gcccaacctctaggtctagttcatt

SEQ ID NO: 1783120 - DNA, 25 bp, Homo sapien
gaaagaatagtaagaacagtgccaa

SEQ ID NO: 1783121 - DNA, 25 bp, Homo sapien
caattttgtgtctgcgaaagtctca

SEQ ID NO: 1783122 - DNA, 25 bp, Homo sapien
cagagttggtatgtccccattaaac

SEQ ID NO: 1783123 - DNA, 25 bp, Homo sapien
tctactcccttcctataagtggcag

SEQ ID NO: 1783124 - DNA, 25 bp, Homo sapien
ggaatacctattcaccactctaagg

SEQ ID NO: 1783125 - DNA, 25 bp, Homo sapien
caatgattattcactaagggaaggg

SEQ ID NO: 1783126 - DNA, 25 bp, Homo sapien
caaacatgactcaatgatgggagct

SEQ ID NO: 1783127 - DNA, 25 bp, Homo sapien
ttcctgatccaatgcagccattaaa

SEQ ID NO: 1783128 - DNA, 25 bp, Homo sapien
tcctgatccaatgcagccattaaaa

SEQ ID NO: 1783129 - DNA, 25 bp, Homo sapien
cctgggccccagtcggtgacttcag

SEQ ID NO: 1783130 - DNA, 25 bp, Homo sapien
tcaatttttcaaggtcgaaagagca

SEQ ID NO: 1783131 - DNA, 25 bp, Homo sapien
tagaatgtccatgtcacatacagcc

SEQ ID NO: 1783132 - DNA, 25 bp, Homo sapien
aatattggctatagttcctctgatg

SEQ ID NO: 1783133 - DNA, 25 bp, Homo sapien
gtctatagttcagctcagagatctc

SEQ ID NO: 1783134 - DNA, 25 bp, Homo sapien
aaataacttccaaatcgggatctca

SEQ ID NO: 1783135 - DNA, 25 bp, Homo sapien
gattcatcctctgtgtaaataactt

SEQ ID NO: 1783136 - DNA, 25 bp, Homo sapien
tccaaatcgggatctcaactcctga

SEQ ID NO: 1783137 - DNA, 25 bp, Homo sapien
tactgtgacactgtgtaatgccaat

SEQ ID NO: 1783138 - DNA, 25 bp, Homo sapien
ttcatactgtgacactgtgtaatgc

SEQ ID NO: 1783139 - DNA, 25 bp, Homo sapien
gacactgtgtaatgccaatacacaa

SEQ ID NO: 1783140 - DNA, 25 bp, Homo sapien
tgtgacactgtgtaatgccaataca

SEQ ID NO: 1783141 - DNA, 25 bp, Homo sapien
tgtgcttgttagctcaagttttcca

SEQ ID NO: 1783142 - DNA, 25 bp, Homo sapien
gataagtgtgcttgttagctcaagt

SEQ ID NO: 1783143 - DNA, 25 bp, Homo sapien
gaaaaagatggtagtggcaggataa

SEQ ID NO: 1783144 - DNA, 25 bp, Homo sapien
tggcaggataagtgtgcttgttagc

SEQ ID NO: 1783145 - DNA, 25 bp, Homo sapien
ccagaaagatctatcaatatcctag

SEQ ID NO: 1783146 - DNA, 25 bp, Homo sapien
catcactaccagaaagatctatcaa

SEQ ID NO: 1783147 - DNA, 25 bp, Homo sapien
gatctatcaatatcctagtatgaag

SEQ ID NO: 1783148 - DNA, 25 bp, Homo sapien
tatcctagtatgaaggtaagttttc

SEQ ID NO: 1783149 - DNA, 25 bp, Homo sapien
gcaccacctctgctacccttgcctt

SEQ ID NO: 1783150 - DNA, 25 bp, Homo sapien
acctctgctacccttgcctttacaa

SEQ ID NO: 1783151 - DNA, 25 bp, Homo sapien
tgctacccttgcctttacaatcctt

SEQ ID NO: 1783152 - DNA, 25 bp, Homo sapien
ctctccaagcaccacctctgctacc

SEQ ID NO: 1783153 - DNA, 25 bp, Homo sapien
acaaaatttagtctggctctctcca

SEQ ID NO: 1783154 - DNA, 25 bp, Homo sapien
tggacaaaaccactcggcagttggc

SEQ ID NO: 1783155 - DNA, 25 bp, Homo sapien
agcgtccacatgcaagcctggctgt

SEQ ID NO: 1783156 - DNA, 25 bp, Homo sapien
tcgcacttgagttaaatgataggcc

SEQ ID NO: 1783157 - DNA, 25 bp, Homo sapien
tcagagctaggtttgggatattcca

SEQ ID NO: 1783158 - DNA, 25 bp, Homo sapien
gaattattccaaacaaggcagagct

SEQ ID NO: 1783159 - DNA, 25 bp, Homo sapien
gatacctggtaagcatctgatgtct

SEQ ID NO: 1783160 - DNA, 25 bp, Homo sapien
ttccagaagtcattttgccagtcga

SEQ ID NO: 1783161 - DNA, 25 bp, Homo sapien
tcatattcatagaataatgctaaaa

SEQ ID NO: 1783162 - DNA, 25 bp, Homo sapien
caatcatattcatagaataatgcta

SEQ ID NO: 1783163 - DNA, 25 bp, Homo sapien
tgacaatcatattcatagaataatg

SEQ ID NO: 1783164 - DNA, 25 bp, Homo sapien
tttgttgacaatcatattcatagaa

SEQ ID NO: 1783165 - DNA, 25 bp, Homo sapien
gtgccatggaccacacgaacaggtg

SEQ ID NO: 1783166 - DNA, 25 bp, Homo sapien
ttccaccacctgtaggagtgccatg

SEQ ID NO: 1783167 - DNA, 25 bp, Homo sapien
cacctgtaggagtgccatggaccac

SEQ ID NO: 1783168 - DNA, 25 bp, Homo sapien
aacaggtgggtaacaggagttctca

SEQ ID NO: 1783169 - DNA, 25 bp, Homo sapien
tacatgaactatcaaaagtatatac

SEQ ID NO: 1783170 - DNA, 25 bp, Homo sapien
tgcattacaaacacaccaaaataaa

SEQ ID NO: 1783171 - DNA, 25 bp, Homo sapien
catcaggaggttgttaagaaagaac

SEQ ID NO: 1783172 - DNA, 25 bp, Homo sapien
gtatgtgttcactgattttcgaggc

SEQ ID NO: 1783173 - DNA, 25 bp, Homo sapien
taggccacttctggcactgatacaa

SEQ ID NO: 1783174 - DNA, 25 bp, Homo sapien
tgtggttctcatattacacacaatg

SEQ ID NO: 1783175 - DNA, 25 bp, Homo sapien
ggcagtcaagggcttcttaggccac

SEQ ID NO: 1783176 - DNA, 25 bp, Homo sapien
agaccctggagggagttcctgtggt

SEQ ID NO: 1783177 - DNA, 25 bp, Homo sapien
cttgacagagggtccccaggtctgc

SEQ ID NO: 1783178 - DNA, 25 bp, Homo sapien
ccagttctgctgctgggagcgggat

SEQ ID NO: 1783179 - DNA, 25 bp, Homo sapien
ccaggtctgcacagctggccagttc

SEQ ID NO: 1783180 - DNA, 25 bp, Homo sapien
gctgggagcgggatcaggtaggaac

SEQ ID NO: 1783181 - DNA, 25 bp, Homo sapien
ggtgacagtgggtggtgtagtacta

SEQ ID NO: 1783182 - DNA, 25 bp, Homo sapien
cctttgtttatcgattctgttagta

SEQ ID NO: 1783183 - DNA, 25 bp, Homo sapien
tagtaacaggcatgttagtggtgac

SEQ ID NO: 1783184 - DNA, 25 bp, Homo sapien
gtagtactaggagagtttacagtag

SEQ ID NO: 1783185 - DNA, 25 bp, Homo sapien
caatgatgataatccaggacatgac

SEQ ID NO: 1783186 - DNA, 25 bp, Homo sapien
ggcttcaggcgctaagatgtgagaa

SEQ ID NO: 1783187 - DNA, 25 bp, Homo sapien
taaatagtataggtggttcagagac

SEQ ID NO: 1783188 - DNA, 25 bp, Homo sapien
gaaggcaataggatacagggagaat

SEQ ID NO: 1783189 - DNA, 25 bp, Homo sapien
ttacctcagggtgacgaaggatgtt

SEQ ID NO: 1783190 - DNA, 25 bp, Homo sapien
ggatgttctgaatcactacggatat

SEQ ID NO: 1783191 - DNA, 25 bp, Homo sapien
cttgctctgtacttttacctcaggg

SEQ ID NO: 1783192 - DNA, 25 bp, Homo sapien
ctacggatattctatagataattcc

SEQ ID NO: 1783193 - DNA, 25 bp, Homo sapien
ctgatattaacgacataaaccgtgt

SEQ ID NO: 1783194 - DNA, 25 bp, Homo sapien
taacgacataaaccgtgtagttcca

SEQ ID NO: 1783195 - DNA, 25 bp, Homo sapien
gatattaacgacataaaccgtgtag

SEQ ID NO: 1783196 - DNA, 25 bp, Homo sapien
cgacataaaccgtgtagttccaatt

SEQ ID NO: 1783197 - DNA, 25 bp, Homo sapien
tgactttaatcttgtcctctccagc

SEQ ID NO: 1783198 - DNA, 25 bp, Homo sapien
gcttctcttgactttaatcttgtcc

SEQ ID NO: 1783199 - DNA, 25 bp, Homo sapien
tgtcctctccagcactcaggtgaaa

SEQ ID NO: 1783200 - DNA, 25 bp, Homo sapien
cttggctcatcctcaaggcttctct

SEQ ID NO: 1783201 - DNA, 25 bp, Homo sapien
tgttgttcattggttgcttgtcatt

SEQ ID NO: 1783202 - DNA, 25 bp, Homo sapien
gcttgtcatttggtaggagaaacag

SEQ ID NO: 1783203 - DNA, 25 bp, Homo sapien
tatttggatgtagagggatgaccat

SEQ ID NO: 1783204 - DNA, 25 bp, Homo sapien
tagggaaacatttcggatagaactg

SEQ ID NO: 1783205 - DNA, 25 bp, Homo sapien
ccaaattagtattgttggtagcatt

SEQ ID NO: 1783206 - DNA, 25 bp, Homo sapien
tccaaattagtattgttggtagcat

SEQ ID NO: 1783207 - DNA, 25 bp, Homo sapien
gggttcctccatggcaagacaatga

SEQ ID NO: 1783208 - DNA, 25 bp, Homo sapien
caaggaagaacgtattcagaaggtt

SEQ ID NO: 1783209 - DNA, 25 bp, Homo sapien
aaggttggatagatggccagtagta

SEQ ID NO: 1783210 - DNA, 25 bp, Homo sapien
ccaggcttgtctggacaaggaagaa

SEQ ID NO: 1783211 - DNA, 25 bp, Homo sapien
taatgcctaagaactaccgtgctgc

SEQ ID NO: 1783212 - DNA, 25 bp, Homo sapien
gatacaggcatacacagagattcct

SEQ ID NO: 1783213 - DNA, 25 bp, Homo sapien
tccccaggagtgaatgatacaggca

SEQ ID NO: 1783214 - DNA, 25 bp, Homo sapien
gctgcacgtataaccctgggaaggc

SEQ ID NO: 1783215 - DNA, 25 bp, Homo sapien
tcctctctcaccccagtttgtttct

SEQ ID NO: 1783216 - DNA, 25 bp, Homo sapien
ctctcctctctcaccccagtttgtt

SEQ ID NO: 1783217 - DNA, 25 bp, Homo sapien
ctctctcaccccagtttgtttctcc

SEQ ID NO: 1783218 - DNA, 25 bp, Homo sapien
tctcctctctcaccccagtttgttt

SEQ ID NO: 1783219 - DNA, 25 bp, Homo sapien
gagatatcaacaggtccccagtagg

SEQ ID NO: 1783220 - DNA, 25 bp, Homo sapien
caggtccccagtaggttaccaatgg

SEQ ID NO: 1783221 - DNA, 25 bp, Homo sapien
aacagttggagatatcaacaggtcc

SEQ ID NO: 1783222 - DNA, 25 bp, Homo sapien
ccaatgggttggtagcattgtaaaa

SEQ ID NO: 1783223 - DNA, 25 bp, Homo sapien
tcaagcaagtcactgtctgaactgc

SEQ ID NO: 1783224 - DNA, 25 bp, Homo sapien
tgaggttaagttctgcccatcagca

SEQ ID NO: 1783225 - DNA, 25 bp, Homo sapien
gacctgttccacaatgttggtaata

SEQ ID NO: 1783226 - DNA, 25 bp, Homo sapien
cattagagttgagccaagtgttata

SEQ ID NO: 1783227 - DNA, 25 bp, Homo sapien
taggtctatcttgaaggccaattca

SEQ ID NO: 1783228 - DNA, 25 bp, Homo sapien
aggtctatcttgaaggccaattcat

SEQ ID NO: 1783229 - DNA, 25 bp, Homo sapien
tggaagaccaatgctaaaatttgaa

SEQ ID NO: 1783230 - DNA, 25 bp, Homo sapien
acagggatgatacgctgagagccaa

SEQ ID NO: 1783231 - DNA, 25 bp, Homo sapien
ttgcatttgtccctggtaacaggga

SEQ ID NO: 1783232 - DNA, 25 bp, Homo sapien
ggaaatacgattcattattgcttgg

SEQ ID NO: 1783233 - DNA, 25 bp, Homo sapien
tagaaggtaagctgaccacccctgt

SEQ ID NO: 1783234 - DNA, 25 bp, Homo sapien
ttatgaaagcatacccactctgagc

SEQ ID NO: 1783235 - DNA, 25 bp, Homo sapien
cattcagaccttgccacttcatgga

SEQ ID NO: 1783236 - DNA, 25 bp, Homo sapien
tgcttagctccagtaacccctcttg

SEQ ID NO: 1783237 - DNA, 25 bp, Homo sapien
tccagaagattctaatgttcagttt

SEQ ID NO: 1783238 - DNA, 25 bp, Homo sapien
cagaagattctaatgttcagtttga

SEQ ID NO: 1783239 - DNA, 25 bp, Homo sapien
ccagaagattctaatgttcagtttg

SEQ ID NO: 1783240 - DNA, 25 bp, Homo sapien
aaactgtgctcttctaactaataca

SEQ ID NO: 1783241 - DNA, 25 bp, Homo sapien
gaggcaaaattacagatgccagtgg

SEQ ID NO: 1783242 - DNA, 25 bp, Homo sapien
tcttctaactaatacagaatcttct

SEQ ID NO: 1783243 - DNA, 25 bp, Homo sapien
tggaaaagtccagttttgttgaaga

SEQ ID NO: 1783244 - DNA, 25 bp, Homo sapien
aaaaatgataatatgtgcttagcac

SEQ ID NO: 1783245 - DNA, 25 bp, Homo sapien
tactctgcggatgtgtaaagaccaa

SEQ ID NO: 1783246 - DNA, 25 bp, Homo sapien
aggtcacttgaaatactaatgggaa

SEQ ID NO: 1783247 - DNA, 25 bp, Homo sapien
gcacaattccatcttactctgcgga

SEQ ID NO: 1783248 - DNA, 25 bp, Homo sapien
cagaggtcaccagtgtttgctggca

SEQ ID NO: 1783249 - DNA, 25 bp, Homo sapien
ctgctctcgatcaggttgtacttgt

SEQ ID NO: 1783250 - DNA, 25 bp, Homo sapien
acagaggtcaccagtgtttgctggc

SEQ ID NO: 1783251 - DNA, 25 bp, Homo sapien
taagtcacattgttcaatatgcaat

SEQ ID NO: 1783252 - DNA, 25 bp, Homo sapien
cacattgttcaatatgcaatgatat

SEQ ID NO: 1783253 - DNA, 25 bp, Homo sapien
ttttatataagtcacattgttcaat

SEQ ID NO: 1783254 - DNA, 25 bp, Homo sapien
tatataagtcacattgttcaatatg

SEQ ID NO: 1783255 - DNA, 25 bp, Homo sapien
gcctggccagatatgcttcctaata

SEQ ID NO: 1783256 - DNA, 25 bp, Homo sapien
caatgacagatgcttgcaaatctaa

SEQ ID NO: 1783257 - DNA, 25 bp, Homo sapien
caaatctaagagtgcagggctaaac

SEQ ID NO: 1783258 - DNA, 25 bp, Homo sapien
tatgttggcttgattggccttgaac

SEQ ID NO: 1783259 - DNA, 25 bp, Homo sapien
gccatcacataactcactaaagttt

SEQ ID NO: 1783260 - DNA, 25 bp, Homo sapien
tttccaatactgcacgccatcacat

SEQ ID NO: 1783261 - DNA, 25 bp, Homo sapien
ttcagattctggatagtaatgtttc

SEQ ID NO: 1783262 - DNA, 25 bp, Homo sapien
tccttcagattctggatagtaatgt

SEQ ID NO: 1783263 - DNA, 25 bp, Homo sapien
aaggcacagatgggatgatgcactt

SEQ ID NO: 1783264 - DNA, 25 bp, Homo sapien
aggcacagatgggatgatgcacttc

SEQ ID NO: 1783265 - DNA, 25 bp, Homo sapien
gaaggcacagatgggatgatgcact

SEQ ID NO: 1783266 - DNA, 25 bp, Homo sapien
gaatctctgtgtgcaacacatcctg

SEQ ID NO: 1783267 - DNA, 25 bp, Homo sapien
atctgaatctctgtgtgcaacacat

SEQ ID NO: 1783268 - DNA, 25 bp, Homo sapien
aacacatcctgacgtgttccatcct

SEQ ID NO: 1783269 - DNA, 25 bp, Homo sapien
gcaacacatcctgacgtgttccatc

SEQ ID NO: 1783270 - DNA, 25 bp, Homo sapien
aagtgtgtgaagtggttacacaggc

SEQ ID NO: 1783271 - DNA, 25 bp, Homo sapien
agtgtgtgaagtggttacacaggca

SEQ ID NO: 1783272 - DNA, 25 bp, Homo sapien
gatcaaaaccaccaggactctcaac

SEQ ID NO: 1783273 - DNA, 25 bp, Homo sapien
agatcaaaaccaccaggactctcaa

SEQ ID NO: 1783274 - DNA, 25 bp, Homo sapien
aaaccaccaggactctcaacagaaa

SEQ ID NO: 1783275 - DNA, 25 bp, Homo sapien
caccaggactctcaacagaaattgg

SEQ ID NO: 1783276 - DNA, 25 bp, Homo sapien
caagctttctgcaaaccggtataac

SEQ ID NO: 1783277 - DNA, 25 bp, Homo sapien
tggaagtcgttacacattgtttttc

SEQ ID NO: 1783278 - DNA, 25 bp, Homo sapien
ctggaagtcgttacacattgttttt

SEQ ID NO: 1783279 - DNA, 25 bp, Homo sapien
tctggaagtcgttacacattgtttt

SEQ ID NO: 1783280 - DNA, 25 bp, Homo sapien
ttctggaagtcgttacacattgttt

SEQ ID NO: 1783281 - DNA, 25 bp, Homo sapien
caatatagctgatgaaagtgaggac

SEQ ID NO: 1783282 - DNA, 25 bp, Homo sapien
ctaactgtgaggcacttcttggaag

SEQ ID NO: 1783283 - DNA, 25 bp, Homo sapien
caaaagcaacatatgtcaggagagt

SEQ ID NO: 1783284 - DNA, 25 bp, Homo sapien
aaaatagcagatattccacacccaa

SEQ ID NO: 1783285 - DNA, 25 bp, Homo sapien
caagattttggagggataatccctt

SEQ ID NO: 1783286 - DNA, 25 bp, Homo sapien
ttttggagggataatcccttcgcaa

SEQ ID NO: 1783287 - DNA, 25 bp, Homo sapien
tggagggataatcccttcgcaattt

SEQ ID NO: 1783288 - DNA, 25 bp, Homo sapien
gattttggagggataatcccttcgc

SEQ ID NO: 1783289 - DNA, 25 bp, Homo sapien
ggaacagcagggctgtgctcaggtt

SEQ ID NO: 1783290 - DNA, 25 bp, Homo sapien
aggaagaggagattcaggaacagca

SEQ ID NO: 1783291 - DNA, 25 bp, Homo sapien
ctaggaggaagaggagattcaggaa

SEQ ID NO: 1783292 - DNA, 25 bp, Homo sapien
gaacagcagggctgtgctcaggttc

SEQ ID NO: 1783293 - DNA, 25 bp, Homo sapien
gtacatgtgaattgcttctagcccc

SEQ ID NO: 1783294 - DNA, 25 bp, Homo sapien
caacagcaatgcaaagtccatccac

SEQ ID NO: 1783295 - DNA, 25 bp, Homo sapien
tagccccatccaggtaaaggttgcc

SEQ ID NO: 1783296 - DNA, 25 bp, Homo sapien
gaaatgcaacaggactgcaacagca

SEQ ID NO: 1783297 - DNA, 25 bp, Homo sapien
ctgctcgctagaacaactgacacca

SEQ ID NO: 1783298 - DNA, 25 bp, Homo sapien
tttctgctcgctagaacaactgaca

SEQ ID NO: 1783299 - DNA, 25 bp, Homo sapien
tccatagacttcattgttgtttctg

SEQ ID NO: 1783300 - DNA, 25 bp, Homo sapien
tgtttctgctcgctagaacaactga

SEQ ID NO: 1783301 - DNA, 25 bp, Homo sapien
cagcacaggtcacataaaatatgac

SEQ ID NO: 1783302 - DNA, 25 bp, Homo sapien
cagggtccggttgcttctcttgcca

SEQ ID NO: 1783303 - DNA, 25 bp, Homo sapien
gcaaagaatgcaaaaccccatgtca

SEQ ID NO: 1783304 - DNA, 25 bp, Homo sapien
catgtcatgcccaacagaaaggtca

SEQ ID NO: 1783305 - DNA, 25 bp, Homo sapien
gaaaggtcaagctaaccacactgcg

SEQ ID NO: 1783306 - DNA, 25 bp, Homo sapien
cccaccctagagatttgcggaactt

SEQ ID NO: 1783307 - DNA, 25 bp, Homo sapien
agagtctggcggcattttgatccca

SEQ ID NO: 1783308 - DNA, 25 bp, Homo sapien
cctagagacttacttaatggctttg

SEQ ID NO: 1783309 - DNA, 25 bp, Homo sapien
cggcattttgatcccaccctagaga

SEQ ID NO: 1783310 - DNA, 25 bp, Homo sapien
tatacagttataagtgtacataaaa

SEQ ID NO: 1783311 - DNA, 25 bp, Homo sapien
taaattatacagttataagtgtaca

SEQ ID NO: 1783312 - DNA, 25 bp, Homo sapien
tgagtacccatataattacacatgt

SEQ ID NO: 1783313 - DNA, 25 bp, Homo sapien
ctcttcaaatttatgtgagtaccca

SEQ ID NO: 1783314 - DNA, 25 bp, Homo sapien
tggccacacactctaggtaccactg

SEQ ID NO: 1783315 - DNA, 25 bp, Homo sapien
gatcagttctggagttttggtggga

SEQ ID NO: 1783316 - DNA, 25 bp, Homo sapien
aactggtcaagaactagttacagca

SEQ ID NO: 1783317 - DNA, 25 bp, Homo sapien
gccacacactctaggtaccactgat

SEQ ID NO: 1783318 - DNA, 25 bp, Homo sapien
catcagaaaagaacgaggtcacaga

SEQ ID NO: 1783319 - DNA, 25 bp, Homo sapien
gtattattcgttagagggcctcaca

SEQ ID NO: 1783320 - DNA, 25 bp, Homo sapien
actatgaattgtgacgctatggaac

SEQ ID NO: 1783321 - DNA, 25 bp, Homo sapien
tgttcctaagcattaacccaggtat

SEQ ID NO: 1783322 - DNA, 25 bp, Homo sapien
ctcgtgaaggtccctgtgctccagg

SEQ ID NO: 1783323 - DNA, 25 bp, Homo sapien
aagagttggagagggcactggctgc

SEQ ID NO: 1783324 - DNA, 25 bp, Homo sapien
cgtgaaggtccctgtgctccaggtt

SEQ ID NO: 1783325 - DNA, 25 bp, Homo sapien
ggcactggctgcacactgtcctggc

SEQ ID NO: 1783326 - DNA, 25 bp, Homo sapien
cattctccttcatagcacagtggaa

SEQ ID NO: 1783327 - DNA, 25 bp, Homo sapien
gatgctgccgccactgtttctgaac

SEQ ID NO: 1783328 - DNA, 25 bp, Homo sapien
taaccgaaatctaccacagcagaga

SEQ ID NO: 1783329 - DNA, 25 bp, Homo sapien
ctgagttatctgctaaccgaaatct

SEQ ID NO: 1783330 - DNA, 25 bp, Homo sapien
aaaatgacatcaccctatcaatctg

SEQ ID NO: 1783331 - DNA, 25 bp, Homo sapien
tgcattatttatctggagcatctga

SEQ ID NO: 1783332 - DNA, 25 bp, Homo sapien
gctttaccgggaatatgaactgctc

SEQ ID NO: 1783333 - DNA, 25 bp, Homo sapien
gagaagagactgacatgtaaacaat

SEQ ID NO: 1783334 - DNA, 25 bp, Homo sapien
tcctagattatcagaacttttcttg

SEQ ID NO: 1783335 - DNA, 25 bp, Homo sapien
gatgatattggtagctgtcttactc

SEQ ID NO: 1783336 - DNA, 25 bp, Homo sapien
gttggaaccaatggagcttgaagac

SEQ ID NO: 1783337 - DNA, 25 bp, Homo sapien
gtagagctggatttagatttggatg

SEQ ID NO: 1783338 - DNA, 25 bp, Homo sapien
gagtgatccacttttgttgaaggaa

SEQ ID NO: 1783339 - DNA, 25 bp, Homo sapien
tactcctgatagtcactgagtgtca

SEQ ID NO: 1783340 - DNA, 25 bp, Homo sapien
aatattcttgaatgtagcagagcca

SEQ ID NO: 1783341 - DNA, 25 bp, Homo sapien
tgttctgaaacccacttatgctcta

SEQ ID NO: 1783342 - DNA, 25 bp, Homo sapien
tgtggcttaccatacgaaatattct

SEQ ID NO: 1783343 - DNA, 25 bp, Homo sapien
cagcatgggccagttttgacaagga

SEQ ID NO: 1783344 - DNA, 25 bp, Homo sapien
agcatgggccagttttgacaaggac

SEQ ID NO: 1783345 - DNA, 25 bp, Homo sapien
tcagcatgggccagttttgacaagg

SEQ ID NO: 1783346 - DNA, 25 bp, Homo sapien
tatcaatgacctgatggacagggat

SEQ ID NO: 1783347 - DNA, 25 bp, Homo sapien
cttatcaatgacctgatggacaggg

SEQ ID NO: 1783348 - DNA, 25 bp, Homo sapien
ggacagggatgattgatgtttgatc

SEQ ID NO: 1783349 - DNA, 25 bp, Homo sapien
cagggatgattgatgtttgatctcc

SEQ ID NO: 1783350 - DNA, 25 bp, Homo sapien
aggtgtctgacatgataatattttt

SEQ ID NO: 1783351 - DNA, 25 bp, Homo sapien
gtctgaatgagcattgcaataaccc

SEQ ID NO: 1783352 - DNA, 25 bp, Homo sapien
aatgagcattgcaataacccttgac

SEQ ID NO: 1783353 - DNA, 25 bp, Homo sapien
gctgaaggtgtctgacatgataata

SEQ ID NO: 1783354 - DNA, 25 bp, Homo sapien
ccagatataacgattaggtggagta

SEQ ID NO: 1783355 - DNA, 25 bp, Homo sapien
gtctctaatttgaatgtctcccctg

SEQ ID NO: 1783356 - DNA, 25 bp, Homo sapien
caaatcatagcttctgtggctactg

SEQ ID NO: 1783357 - DNA, 25 bp, Homo sapien
tagggtcttcctcagcattgcttct

SEQ ID NO: 1783358 - DNA, 25 bp, Homo sapien
ttgaaaatgagaatatggtactgca

SEQ ID NO: 1783359 - DNA, 25 bp, Homo sapien
ctttgggtcaaggagtaaacagtct

SEQ ID NO: 1783360 - DNA, 25 bp, Homo sapien
gaaagtaacactggaatgggatttg

SEQ ID NO: 1783361 - DNA, 25 bp, Homo sapien
aatatggtactgcattcacagaaag

SEQ ID NO: 1783362 - DNA, 25 bp, Homo sapien
gatggaacatcaacactaaacttaa

SEQ ID NO: 1783363 - DNA, 25 bp, Homo sapien
tacagcttgcctaatggaaattctc

SEQ ID NO: 1783364 - DNA, 25 bp, Homo sapien
tatacttaatgctttggccctatgc

SEQ ID NO: 1783365 - DNA, 25 bp, Homo sapien
ggccctatgccttgaatagaataag

SEQ ID NO: 1783366 - DNA, 25 bp, Homo sapien
tttagactagctattgcagacccag

SEQ ID NO: 1783367 - DNA, 25 bp, Homo sapien
tccttggaacaaaactctcaatggg

SEQ ID NO: 1783368 - DNA, 25 bp, Homo sapien
tatgcaaggtttgtatgcagcagcc

SEQ ID NO: 1783369 - DNA, 25 bp, Homo sapien
gcagcagcctgatccataaataata

SEQ ID NO: 1783370 - DNA, 25 bp, Homo sapien
tgagaactgcatgcttagaactgac

SEQ ID NO: 1783371 - DNA, 25 bp, Homo sapien
tctaagaaactgcatggactccatc

SEQ ID NO: 1783372 - DNA, 25 bp, Homo sapien
gaactaaatttaggctccccagcta

SEQ ID NO: 1783373 - DNA, 25 bp, Homo sapien
gcatgcactgagaccgatttctaag

SEQ ID NO: 1783374 - DNA, 25 bp, Homo sapien
gaagacctggtttagcagtgaccgt

SEQ ID NO: 1783375 - DNA, 25 bp, Homo sapien
tgtagatgagccttaagcagctgct

SEQ ID NO: 1783376 - DNA, 25 bp, Homo sapien
tattttcttaacatggcttggccag

SEQ ID NO: 1783377 - DNA, 25 bp, Homo sapien
ggtcagcctgcaaatcaaatacgtg

SEQ ID NO: 1783378 - DNA, 25 bp, Homo sapien
aatgcaaacacttgaaaatttcacg

SEQ ID NO: 1783379 - DNA, 25 bp, Homo sapien
ggagggagagagctatttaatgttt

SEQ ID NO: 1783380 - DNA, 25 bp, Homo sapien
gaatataaatgcaaacacttgaaaa

SEQ ID NO: 1783381 - DNA, 25 bp, Homo sapien
tcttatttctctctagggaagcaaa

SEQ ID NO: 1783382 - DNA, 25 bp, Homo sapien
gtagctgtaccaatgcatgggatgg

SEQ ID NO: 1783383 - DNA, 25 bp, Homo sapien
ttctgacggcgttgccacttctgag

SEQ ID NO: 1783384 - DNA, 25 bp, Homo sapien
tgccaactggatacaaccaaggtgt

SEQ ID NO: 1783385 - DNA, 25 bp, Homo sapien
tctgaatatggcaaggtagctgtac

SEQ ID NO: 1783386 - DNA, 25 bp, Homo sapien
tattgtgccacctgactctaacctg

SEQ ID NO: 1783387 - DNA, 25 bp, Homo sapien
tgcagtgtgaaccagatactacaag

SEQ ID NO: 1783388 - DNA, 25 bp, Homo sapien
aatattccactacaggtgccacatg

SEQ ID NO: 1783389 - DNA, 25 bp, Homo sapien
tttattttgcaacccctgagaacca

SEQ ID NO: 1783390 - DNA, 25 bp, Homo sapien
tcacacttttcccaacactgccact

SEQ ID NO: 1783391 - DNA, 25 bp, Homo sapien
cacttttcccaacactgccactcat

SEQ ID NO: 1783392 - DNA, 25 bp, Homo sapien
ttatcatcacacttttcccaacact

SEQ ID NO: 1783393 - DNA, 25 bp, Homo sapien
cttatcatcacacttttcccaacac

SEQ ID NO: 1783394 - DNA, 25 bp, Homo sapien
taaagcatgaagataatgtcattat

SEQ ID NO: 1783395 - DNA, 25 bp, Homo sapien
caaaagtctgttgcctaaatgcagg

SEQ ID NO: 1783396 - DNA, 25 bp, Homo sapien
atgttcacagcggaaacctggctga

SEQ ID NO: 1783397 - DNA, 25 bp, Homo sapien
ccttctcatttctgagagcatgtgc

SEQ ID NO: 1783398 - DNA, 25 bp, Homo sapien
ggatgttcacagcggaaacctggct

SEQ ID NO: 1783399 - DNA, 25 bp, Homo sapien
caccatggtgcagcataagccatac

SEQ ID NO: 1783400 - DNA, 25 bp, Homo sapien
taagccataccacctctggcttttg

SEQ ID NO: 1783401 - DNA, 25 bp, Homo sapien
ctgatggccatgtggttgaacggtt

SEQ ID NO: 1783402 - DNA, 25 bp, Homo sapien
agctctttggcccaatacaccatgg

SEQ ID NO: 1783403 - DNA, 25 bp, Homo sapien
ctataagagtaagagtaagtattgt

SEQ ID NO: 1783404 - DNA, 25 bp, Homo sapien
taagagtaagagtaagtattgtttc

SEQ ID NO: 1783405 - DNA, 25 bp, Homo sapien
ccacagccaagactcgagtttccat

SEQ ID NO: 1783406 - DNA, 25 bp, Homo sapien
agagtaagagtaagtattgtttcct

SEQ ID NO: 1783407 - DNA, 25 bp, Homo sapien
actctagaaagtgtctgatggtgtt

SEQ ID NO: 1783408 - DNA, 25 bp, Homo sapien
gccaactctagaaagtgtctgatgg

SEQ ID NO: 1783409 - DNA, 25 bp, Homo sapien
caactctagaaagtgtctgatggtg

SEQ ID NO: 1783410 - DNA, 25 bp, Homo sapien
ttgccaactctagaaagtgtctgat

SEQ ID NO: 1783411 - DNA, 25 bp, Homo sapien
caggcaccttgtgagggctcttcac

SEQ ID NO: 1783412 - DNA, 25 bp, Homo sapien
tgttacttgcagtgaagctctagca

SEQ ID NO: 1783413 - DNA, 25 bp, Homo sapien
ctggagactgtacctaactcggtgg

SEQ ID NO: 1783414 - DNA, 25 bp, Homo sapien
caaattttggagcagaacggagtgc

SEQ ID NO: 1783415 - DNA, 25 bp, Homo sapien
tcttctccagaattagcctccaata

SEQ ID NO: 1783416 - DNA, 25 bp, Homo sapien
aaatatagccttcaccagcacgaaa

SEQ ID NO: 1783417 - DNA, 25 bp, Homo sapien
ccagcacgaaaatagcaagcttttc

SEQ ID NO: 1783418 - DNA, 25 bp, Homo sapien
tccaatagaacgcaagcttcctctc

SEQ ID NO: 1783419 - DNA, 25 bp, Homo sapien
tctttcccatccgattcaccttttc

SEQ ID NO: 1783420 - DNA, 25 bp, Homo sapien
tcccatccgattcaccttttcctta

SEQ ID NO: 1783421 - DNA, 25 bp, Homo sapien
cctctttcccatccgattcaccttt

SEQ ID NO: 1783422 - DNA, 25 bp, Homo sapien
catccgattcaccttttccttagtt

SEQ ID NO: 1783423 - DNA, 25 bp, Homo sapien
taggtaatcactcaggaactcatcc

SEQ ID NO: 1783424 - DNA, 25 bp, Homo sapien
ctgaaacaaggccagactgtgggct

SEQ ID NO: 1783425 - DNA, 25 bp, Homo sapien
tcataataccaacctggtgagctcc

SEQ ID NO: 1783426 - DNA, 25 bp, Homo sapien
gtgggcttccatgaacatacagttt

SEQ ID NO: 1783427 - DNA, 25 bp, Homo sapien
gaagtatccaatagatctctactct

SEQ ID NO: 1783428 - DNA, 25 bp, Homo sapien
agtgatgttgggctcttctcagtgc

SEQ ID NO: 1783429 - DNA, 25 bp, Homo sapien
tgtttaagattgcagggcaactgtt

SEQ ID NO: 1783430 - DNA, 25 bp, Homo sapien
aatgttgacttgtcacagtactggg

SEQ ID NO: 1783431 - DNA, 25 bp, Homo sapien
atcaaagtgtcctgatacttggttt

SEQ ID NO: 1783432 - DNA, 25 bp, Homo sapien
ggatttctgcagatatttcaaccat

SEQ ID NO: 1783433 - DNA, 25 bp, Homo sapien
tcttttcctgcatatatgtcatcaa

SEQ ID NO: 1783434 - DNA, 25 bp, Homo sapien
tacttggttttgcaaggcagatctg

SEQ ID NO: 1783435 - DNA, 25 bp, Homo sapien
tcagcagtgatgacttcccacagaa

SEQ ID NO: 1783436 - DNA, 25 bp, Homo sapien
cagcagtgatgacttcccacagaac

SEQ ID NO: 1783437 - DNA, 25 bp, Homo sapien
tgtgctcagtagtgcactgtagtgc

SEQ ID NO: 1783438 - DNA, 25 bp, Homo sapien
taagtggttccttattaacgacagc

SEQ ID NO: 1783439 - DNA, 25 bp, Homo sapien
actgtagtgcacaccgagtccctgc

SEQ ID NO: 1783440 - DNA, 25 bp, Homo sapien
catgatcctgcatcttgaggtgctc

SEQ ID NO: 1783441 - DNA, 25 bp, Homo sapien
gaaacgaaagttcaggcctgctgac

SEQ ID NO: 1783442 - DNA, 25 bp, Homo sapien
catgttagaagtttggagaaacgaa

SEQ ID NO: 1783443 - DNA, 25 bp, Homo sapien
tggcaataactgatttatccttcat

SEQ ID NO: 1783444 - DNA, 25 bp, Homo sapien
tgcagatgtcatgttagaagtttgg

SEQ ID NO: 1783445 - DNA, 25 bp, Homo sapien
ggtgaagtttttgtacacacaggca

SEQ ID NO: 1783446 - DNA, 25 bp, Homo sapien
aatctggggctctcatgaggtgaag

SEQ ID NO: 1783447 - DNA, 25 bp, Homo sapien
cagatattcagaagcgagagaagat

SEQ ID NO: 1783448 - DNA, 25 bp, Homo sapien
taacactgtttgaaaaatgaggcaa

SEQ ID NO: 1783449 - DNA, 25 bp, Homo sapien
tgtcaccaggcaagaataaatcagt

SEQ ID NO: 1783450 - DNA, 25 bp, Homo sapien
aaatcagtggcttgtctagtgagca

SEQ ID NO: 1783451 - DNA, 25 bp, Homo sapien
tgcatagatgagaacgtgtgaaacc

SEQ ID NO: 1783452 - DNA, 25 bp, Homo sapien
tgagcactacatgcaggagcacatc

SEQ ID NO: 1783453 - DNA, 25 bp, Homo sapien
tttcatatcgtggaagagattcttc

SEQ ID NO: 1783454 - DNA, 25 bp, Homo sapien
gagattcttcagtgcaatcgcttca

SEQ ID NO: 1783455 - DNA, 25 bp, Homo sapien
tcgtaacatcaaggaaggtgtgatt

SEQ ID NO: 1783456 - DNA, 25 bp, Homo sapien
caatgactctttccaaatcgtaaca

SEQ ID NO: 1783457 - DNA, 25 bp, Homo sapien
acctcgagagatgggcaaccaggaa

SEQ ID NO: 1783458 - DNA, 25 bp, Homo sapien
gacagattctgcagctctatcttgc

SEQ ID NO: 1783459 - DNA, 25 bp, Homo sapien
tgtccatgatcaagcacctcgagag

SEQ ID NO: 1783460 - DNA, 25 bp, Homo sapien
tatagctggaagaaatttacaacct

SEQ ID NO: 1783461 - DNA, 25 bp, Homo sapien
gagattctactgaggcctgagtgac

SEQ ID NO: 1783462 - DNA, 25 bp, Homo sapien
agattctactgaggcctgagtgact

SEQ ID NO: 1783463 - DNA, 25 bp, Homo sapien
aggcctgagtgactcctaggctttg

SEQ ID NO: 1783464 - DNA, 25 bp, Homo sapien
ttagattacatattgcctcatcata

SEQ ID NO: 1783465 - DNA, 25 bp, Homo sapien
gcctcatcataaaacagaggaaagt

SEQ ID NO: 1783466 - DNA, 25 bp, Homo sapien
taaaacagaggaaagtctgctttat

SEQ ID NO: 1783467 - DNA, 25 bp, Homo sapien
catcataaaacagaggaaagtctgc

SEQ ID NO: 1783468 - DNA, 25 bp, Homo sapien
gaggagtcaagggttcttcttcact

SEQ ID NO: 1783469 - DNA, 25 bp, Homo sapien
caggaggagtcaagggttcttcttc

SEQ ID NO: 1783470 - DNA, 25 bp, Homo sapien
agtcaagggttcttcttcactccgg

SEQ ID NO: 1783471 - DNA, 25 bp, Homo sapien
ggagtcaagggttcttcttcactcc

SEQ ID NO: 1783472 - DNA, 25 bp, Homo sapien
taagaattctcccaatctgtctata

SEQ ID NO: 1783473 - DNA, 25 bp, Homo sapien
taaagaaggtcacatacacactggt

SEQ ID NO: 1783474 - DNA, 25 bp, Homo sapien
tacacactggtatggaatacaggag

SEQ ID NO: 1783475 - DNA, 25 bp, Homo sapien
tggaatacaggaggattcctgccct

SEQ ID NO: 1783476 - DNA, 25 bp, Homo sapien
gccatgctttccatcgtcttgcatt

SEQ ID NO: 1783477 - DNA, 25 bp, Homo sapien
cattcacaagtaggaatagaaatag

SEQ ID NO: 1783478 - DNA, 25 bp, Homo sapien
ctgtgcattcacaagtaggaataga

SEQ ID NO: 1783479 - DNA, 25 bp, Homo sapien
gtgggccctggaggcgagccatgct

SEQ ID NO: 1783480 - DNA, 25 bp, Homo sapien
ccaacacttggtgggcactgtgcat

SEQ ID NO: 1783481 - DNA, 25 bp, Homo sapien
gccacagcgccagtattgggttcca

SEQ ID NO: 1783482 - DNA, 25 bp, Homo sapien
ggatttagcaagttagcgccactag

SEQ ID NO: 1783483 - DNA, 25 bp, Homo sapien
tccagtggacaaagaaaaagccttc

SEQ ID NO: 1783484 - DNA, 25 bp, Homo sapien
gacaccatttctcaaggaatcatcc

SEQ ID NO: 1783485 - DNA, 25 bp, Homo sapien
agcttgcaggatggcagtattaaaa

SEQ ID NO: 1783486 - DNA, 25 bp, Homo sapien
aagggaaggccaagtaaccgagcat

SEQ ID NO: 1783487 - DNA, 25 bp, Homo sapien
gtattaaaatacaccagcagacttc

SEQ ID NO: 1783488 - DNA, 25 bp, Homo sapien
gctaattcgaattcctccgccacag

SEQ ID NO: 1783489 - DNA, 25 bp, Homo sapien
tttgattttgctaattcgaattcct

SEQ ID NO: 1783490 - DNA, 25 bp, Homo sapien
ccacagccacgccaaatccaatcaa

SEQ ID NO: 1783491 - DNA, 25 bp, Homo sapien
tccaatcaagctctgtctagcttga

SEQ ID NO: 1783492 - DNA, 25 bp, Homo sapien
gggaaggtaagagccacgcatagct

SEQ ID NO: 1783493 - DNA, 25 bp, Homo sapien
ctgggggaaggtaagagccacgcat

SEQ ID NO: 1783494 - DNA, 25 bp, Homo sapien
gaaggtaagagccacgcatagctct

SEQ ID NO: 1783495 - DNA, 25 bp, Homo sapien
gggggaaggtaagagccacgcatag

SEQ ID NO: 1783496 - DNA, 25 bp, Homo sapien
tgaataggatgttttgcaccaagaa

SEQ ID NO: 1783497 - DNA, 25 bp, Homo sapien
taacagaattgcacagctttggagt

SEQ ID NO: 1783498 - DNA, 25 bp, Homo sapien
catgttgccgtttatggatttgggc

SEQ ID NO: 1783499 - DNA, 25 bp, Homo sapien
aaataacagaattgcacagctttgg

SEQ ID NO: 1783500 - DNA, 25 bp, Homo sapien
atctcccagcatgttgccgtttatg

SEQ ID NO: 1783501 - DNA, 25 bp, Homo sapien
cttgatgctcgtgaaagaaacctca

SEQ ID NO: 1783502 - DNA, 25 bp, Homo sapien
ttgatgctcgtgaaagaaacctcag

SEQ ID NO: 1783503 - DNA, 25 bp, Homo sapien
gggtcacggtgaacaaagctaccat

SEQ ID NO: 1783504 - DNA, 25 bp, Homo sapien
tcatttggtccatagtgattcctac

SEQ ID NO: 1783505 - DNA, 25 bp, Homo sapien
taccctggtccagcttttgggtcac

SEQ ID NO: 1783506 - DNA, 25 bp, Homo sapien
ggtccatagtgattcctaccctggt

SEQ ID NO: 1783507 - DNA, 25 bp, Homo sapien
gatgaggaagttgtccccggcacgc

SEQ ID NO: 1783508 - DNA, 25 bp, Homo sapien
acagacttccctgggaggatgatga

SEQ ID NO: 1783509 - DNA, 25 bp, Homo sapien
ggctacagcgttgaagggcaaagat

SEQ ID NO: 1783510 - DNA, 25 bp, Homo sapien
aacctccgacagacttccctgggag

SEQ ID NO: 1783511 - DNA, 25 bp, Homo sapien
ccacaatgttggctctcactctaga

SEQ ID NO: 1783512 - DNA, 25 bp, Homo sapien
agggattctcatccaagtcatctgg

SEQ ID NO: 1783513 - DNA, 25 bp, Homo sapien
ttagcccatgagacacctttaagag

SEQ ID NO: 1783514 - DNA, 25 bp, Homo sapien
tcccttctgttcaatgacctccagg

SEQ ID NO: 1783515 - DNA, 25 bp, Homo sapien
tatatgcaacaataaaccagcttgg

SEQ ID NO: 1783516 - DNA, 25 bp, Homo sapien
gactttatatgcaacaataaaccag

SEQ ID NO: 1783517 - DNA, 25 bp, Homo sapien
ggctatgcagtagtactgaagaaca

SEQ ID NO: 1783518 - DNA, 25 bp, Homo sapien
caataaaccagcttggctatgcagt

SEQ ID NO: 1783519 - DNA, 25 bp, Homo sapien
gatggtgactggaactaaggctaca

SEQ ID NO: 1783520 - DNA, 25 bp, Homo sapien
tgtagagcttggttatcggccggcc

SEQ ID NO: 1783521 - DNA, 25 bp, Homo sapien
tgtgcgctgctcatggagaagacct

SEQ ID NO: 1783522 - DNA, 25 bp, Homo sapien
taaggctacacagagggtcgcactt

SEQ ID NO: 1783523 - DNA, 25 bp, Homo sapien
caaggacccctatgtgctttctaag

SEQ ID NO: 1783524 - DNA, 25 bp, Homo sapien
gaggtcctcacgctttgcagtcatc

SEQ ID NO: 1783525 - DNA, 25 bp, Homo sapien
taagcagcatgagaagcgaggtcct

SEQ ID NO: 1783526 - DNA, 25 bp, Homo sapien
tgaaacagagcacttcggaagacag

SEQ ID NO: 1783527 - DNA, 25 bp, Homo sapien
cggaagtcccagaagttcggagcaa

SEQ ID NO: 1783528 - DNA, 25 bp, Homo sapien
caccagaaagagatgcgacgctgct

SEQ ID NO: 1783529 - DNA, 25 bp, Homo sapien
gatcagagcgtgaagcaagagcagc

SEQ ID NO: 1783530 - DNA, 25 bp, Homo sapien
acggtatcaccgtccagggagagga

SEQ ID NO: 1783531 - DNA, 25 bp, Homo sapien
gattagtacctttcacagagtcagc

SEQ ID NO: 1783532 - DNA, 25 bp, Homo sapien
tatctaaattggacctagaggctgg

SEQ ID NO: 1783533 - DNA, 25 bp, Homo sapien
catttgcccttactgcagcagagcg

SEQ ID NO: 1783534 - DNA, 25 bp, Homo sapien
cagcagagcgtgtgccaaacctagt

SEQ ID NO: 1783535 - DNA, 25 bp, Homo sapien
gcacaactgtttggttctgggaaac

SEQ ID NO: 1783536 - DNA, 25 bp, Homo sapien
caaatagagcctgagcaaatcggaa

SEQ ID NO: 1783537 - DNA, 25 bp, Homo sapien
caaatcggaaacacagcatcagcac

SEQ ID NO: 1783538 - DNA, 25 bp, Homo sapien
gacaccctggaacatggaagcaacc

SEQ ID NO: 1783539 - DNA, 25 bp, Homo sapien
ttaggaatctgcagtacatctgcat

SEQ ID NO: 1783540 - DNA, 25 bp, Homo sapien
ggtgcttttcccctctcaaagtgca

SEQ ID NO: 1783541 - DNA, 25 bp, Homo sapien
aaattgcccatggaagtaagactac

SEQ ID NO: 1783542 - DNA, 25 bp, Homo sapien
gtaagactactatttgagtttcgct

SEQ ID NO: 1783543 - DNA, 25 bp, Homo sapien
gttgggtttggattcctatttcaga

SEQ ID NO: 1783544 - DNA, 25 bp, Homo sapien
tggttgggtttggattcctatttca

SEQ ID NO: 1783545 - DNA, 25 bp, Homo sapien
tttgcctgtggagactgctggtagg

SEQ ID NO: 1783546 - DNA, 25 bp, Homo sapien
gcctgtggagactgctggtaggaat

SEQ ID NO: 1783547 - DNA, 25 bp, Homo sapien
tgcctgtggagactgctggtaggaa

SEQ ID NO: 1783548 - DNA, 25 bp, Homo sapien
gttttgcctgtggagactgctggta

SEQ ID NO: 1783549 - DNA, 25 bp, Homo sapien
tcagagcttgttggggggcactcac

SEQ ID NO: 1783550 - DNA, 25 bp, Homo sapien
aagtataacatgattaccattgctt

SEQ ID NO: 1783551 - DNA, 25 bp, Homo sapien
aacatttaaaaggtcatgagtgatg

SEQ ID NO: 1783552 - DNA, 25 bp, Homo sapien
taaaaggtcatgagtgatgcaacag

SEQ ID NO: 1783553 - DNA, 25 bp, Homo sapien
gtcatgagtgatgcaacagaaccag

SEQ ID NO: 1783554 - DNA, 25 bp, Homo sapien
aagaggcctaagttacaatctctaa

SEQ ID NO: 1783555 - DNA, 25 bp, Homo sapien
gtattgtgtaaatacagcccatttc

SEQ ID NO: 1783556 - DNA, 25 bp, Homo sapien
taacattaggtataagtaaatgtct

SEQ ID NO: 1783557 - DNA, 25 bp, Homo sapien
aaagtatcatagaataatcagaaat

SEQ ID NO: 1783558 - DNA, 25 bp, Homo sapien
atgtagtgtctataaagctaatttt

SEQ ID NO: 1783559 - DNA, 25 bp, Homo sapien
ttcctgattttgagtccagataaat

SEQ ID NO: 1783560 - DNA, 25 bp, Homo sapien
cccatatcacttcattttaagtaga

SEQ ID NO: 1783561 - DNA, 25 bp, Homo sapien
ttctcccatatcacttcattttaag

SEQ ID NO: 1783562 - DNA, 25 bp, Homo sapien
tataactagttatccccagatggcc

SEQ ID NO: 1783563 - DNA, 25 bp, Homo sapien
tacattatttgataggctgggacag

SEQ ID NO: 1783564 - DNA, 25 bp, Homo sapien
ccagatctgaaaatgtttgggccat

SEQ ID NO: 1783565 - DNA, 25 bp, Homo sapien
aaagtctgcaaatctgagtgctggc

SEQ ID NO: 1783566 - DNA, 25 bp, Homo sapien
ttcatgagggtttatagttggaaac

SEQ ID NO: 1783567 - DNA, 25 bp, Homo sapien
tttttcatgagggtttatagttgga

SEQ ID NO: 1783568 - DNA, 25 bp, Homo sapien
catgagggtttatagttggaaacag

SEQ ID NO: 1783569 - DNA, 25 bp, Homo sapien
ttttcatgagggtttatagttggaa

SEQ ID NO: 1783570 - DNA, 25 bp, Homo sapien
tgataaggattgacaggcactggct

SEQ ID NO: 1783571 - DNA, 25 bp, Homo sapien
cactgcctctgagaattgtccctgg

SEQ ID NO: 1783572 - DNA, 25 bp, Homo sapien
catttgtacccagagtacttgctgg

SEQ ID NO: 1783573 - DNA, 25 bp, Homo sapien
tatgaaggaaagtatgcaggacacc

SEQ ID NO: 1783574 - DNA, 25 bp, Homo sapien
cagccatctgaaaccctgactgaag

SEQ ID NO: 1783575 - DNA, 25 bp, Homo sapien
actaaaccagtagtatgagcaaatc

SEQ ID NO: 1783576 - DNA, 25 bp, Homo sapien
gcttatttgagctacatggcttcat

SEQ ID NO: 1783577 - DNA, 25 bp, Homo sapien
tttgcagtataggatggctgtgtga

SEQ ID NO: 1783578 - DNA, 25 bp, Homo sapien
ttgcacaggcaacagatctgcttct

SEQ ID NO: 1783579 - DNA, 25 bp, Homo sapien
tgcacaggcaacagatctgcttctt

SEQ ID NO: 1783580 - DNA, 25 bp, Homo sapien
ctgttgcacaggcaacagatctgct

SEQ ID NO: 1783581 - DNA, 25 bp, Homo sapien
gttgcacaggcaacagatctgcttc

SEQ ID NO: 1783582 - DNA, 25 bp, Homo sapien
agtagatgcagcgtgcagcctgcaa

SEQ ID NO: 1783583 - DNA, 25 bp, Homo sapien
ttttctgcagtagatgcagcgtgca

SEQ ID NO: 1783584 - DNA, 25 bp, Homo sapien
tgcagcgtgcagcctgcaaagaccc

SEQ ID NO: 1783585 - DNA, 25 bp, Homo sapien
tgcagtagatgcagcgtgcagcctg

SEQ ID NO: 1783586 - DNA, 25 bp, Homo sapien
cctggcagcctggttagtgaggaca

SEQ ID NO: 1783587 - DNA, 25 bp, Homo sapien
tctggctcgggaaatcttccttaac

SEQ ID NO: 1783588 - DNA, 25 bp, Homo sapien
gacatcaattctggctcgggaaatc

SEQ ID NO: 1783589 - DNA, 25 bp, Homo sapien
ggacattgcatcgaccttcatttga

SEQ ID NO: 1783590 - DNA, 25 bp, Homo sapien
ccagggcgctgtcaatctgaggagc

SEQ ID NO: 1783591 - DNA, 25 bp, Homo sapien
agtcctagtgatcgtcctgcggcag

SEQ ID NO: 1783592 - DNA, 25 bp, Homo sapien
gaagacgagtttgcacccagcttgt

SEQ ID NO: 1783593 - DNA, 25 bp, Homo sapien
gagggatgtcctgtctgcaatatac

SEQ ID NO: 1783594 - DNA, 25 bp, Homo sapien
cgctctcaggcgtctttggcggctg

SEQ ID NO: 1783595 - DNA, 25 bp, Homo sapien
cccagtttgctattgtcctaaggca

SEQ ID NO: 1783596 - DNA, 25 bp, Homo sapien
cccagtgcttggaatttacagactc

SEQ ID NO: 1783597 - DNA, 25 bp, Homo sapien
tttacagactctaccacgtcccagt

SEQ ID NO: 1783598 - DNA, 25 bp, Homo sapien
atttctgtttggtgccagctttacc

SEQ ID NO: 1783599 - DNA, 25 bp, Homo sapien
tttacctgcgtagccttcacagcac

SEQ ID NO: 1783600 - DNA, 25 bp, Homo sapien
tggtgccagctttacctgcgtagcc

SEQ ID NO: 1783601 - DNA, 25 bp, Homo sapien
caggggcagaagtgcaccatatttc

SEQ ID NO: 1783602 - DNA, 25 bp, Homo sapien
tctttggagccaattcccttctctt

SEQ ID NO: 1783603 - DNA, 25 bp, Homo sapien
tttggagccaattcccttctcttta

SEQ ID NO: 1783604 - DNA, 25 bp, Homo sapien
tttctttggagccaattcccttctc

SEQ ID NO: 1783605 - DNA, 25 bp, Homo sapien
ttggagccaattcccttctctttac

SEQ ID NO: 1783606 - DNA, 25 bp, Homo sapien
aggccagtgtggaatgattagtcct

SEQ ID NO: 1783607 - DNA, 25 bp, Homo sapien
gtgcacacacaaagattggtccttc

SEQ ID NO: 1783608 - DNA, 25 bp, Homo sapien
cctaatgataagatggtgctctggg

SEQ ID NO: 1783609 - DNA, 25 bp, Homo sapien
gggatgacggttacttgtacagaag

SEQ ID NO: 1783610 - DNA, 25 bp, Homo sapien
ggtagtcattactgctattgatttc

SEQ ID NO: 1783611 - DNA, 25 bp, Homo sapien
tagaattctgctcatgatgcagccg

SEQ ID NO: 1783612 - DNA, 25 bp, Homo sapien
aatgcagtgtggtcagcgcagctgc

SEQ ID NO: 1783613 - DNA, 25 bp, Homo sapien
agcgcagctgcacccgaagtagaat

SEQ ID NO: 1783614 - DNA, 25 bp, Homo sapien
tgcagccgtctgtggatttctttag

SEQ ID NO: 1783615 - DNA, 25 bp, Homo sapien
tctttcttaggagcccgctttgaaa

SEQ ID NO: 1783616 - DNA, 25 bp, Homo sapien
ggagcccgctttgaaatggaatcct

SEQ ID NO: 1783617 - DNA, 25 bp, Homo sapien
cttaggagcccgctttgaaatggaa

SEQ ID NO: 1783618 - DNA, 25 bp, Homo sapien
atttctttcttaggagcccgctttg

SEQ ID NO: 1783619 - DNA, 25 bp, Homo sapien
aatatctcagtggagaagcgacttt

SEQ ID NO: 1783620 - DNA, 25 bp, Homo sapien
cagtggagaagcgactttcttcttg

SEQ ID NO: 1783621 - DNA, 25 bp, Homo sapien
ggagaagcgactttcttcttgaact

SEQ ID NO: 1783622 - DNA, 25 bp, Homo sapien
tctcagtggagaagcgactttcttc

SEQ ID NO: 1783623 - DNA, 25 bp, Homo sapien
tttcttcccctcatggctggatgat

SEQ ID NO: 1783624 - DNA, 25 bp, Homo sapien
atcttttcttcccctcatggctgga

SEQ ID NO: 1783625 - DNA, 25 bp, Homo sapien
tcttttcttcccctcatggctggat

SEQ ID NO: 1783626 - DNA, 25 bp, Homo sapien
cttttcttcccctcatggctggatg

SEQ ID NO: 1783627 - DNA, 25 bp, Homo sapien
gagtcccttataaagtcctgtatta

SEQ ID NO: 1783628 - DNA, 25 bp, Homo sapien
tagttgagtcccttataaagtcctg

SEQ ID NO: 1783629 - DNA, 25 bp, Homo sapien
gttgagtcccttataaagtcctgta

SEQ ID NO: 1783630 - DNA, 25 bp, Homo sapien
tcccttataaagtcctgtattaagc

SEQ ID NO: 1783631 - DNA, 25 bp, Homo sapien
gaataatccctttgagggccctgta

SEQ ID NO: 1783632 - DNA, 25 bp, Homo sapien
taaatgtaggctgttgaataatccc

SEQ ID NO: 1783633 - DNA, 25 bp, Homo sapien
ttaactgcagcacgttgacttcagg

SEQ ID NO: 1783634 - DNA, 25 bp, Homo sapien
tatgcctggatatgcgtcatcagtg

SEQ ID NO: 1783635 - DNA, 25 bp, Homo sapien
gtatttgtagcagtgttatcattct

SEQ ID NO: 1783636 - DNA, 25 bp, Homo sapien
tgtatttgtagcagtgttatcattc

SEQ ID NO: 1783637 - DNA, 25 bp, Homo sapien
ctgtatttgtagcagtgttatcatt

SEQ ID NO: 1783638 - DNA, 25 bp, Homo sapien
tagtgaactagggatgtattttccc

SEQ ID NO: 1783639 - DNA, 25 bp, Homo sapien
tattgtcatggtattttactagtga

SEQ ID NO: 1783640 - DNA, 25 bp, Homo sapien
catcataatactgagactaaaggag

SEQ ID NO: 1783641 - DNA, 25 bp, Homo sapien
tctgtccttgactgggcgtaggata

SEQ ID NO: 1783642 - DNA, 25 bp, Homo sapien
ctaggtggtatctgtgagtgactca

SEQ ID NO: 1783643 - DNA, 25 bp, Homo sapien
gaaccagcaaggacttagaccatcg

SEQ ID NO: 1783644 - DNA, 25 bp, Homo sapien
cagtgtttgagagaggacaaagaac

SEQ ID NO: 1783645 - DNA, 25 bp, Homo sapien
ccgtgtctcagcgatgttgccgaat

SEQ ID NO: 1783646 - DNA, 25 bp, Homo sapien
tgcgacgttttatgtgtttcacagc

SEQ ID NO: 1783647 - DNA, 25 bp, Homo sapien
ggttatgcgacgttttatgtgtttc

SEQ ID NO: 1783648 - DNA, 25 bp, Homo sapien
tattagctatgaattgatttgtact

SEQ ID NO: 1783649 - DNA, 25 bp, Homo sapien
gacgttttatgtgtttcacagcata

SEQ ID NO: 1783650 - DNA, 25 bp, Homo sapien
gctcaagattatgagaatgtgtgat

SEQ ID NO: 1783651 - DNA, 25 bp, Homo sapien
ttgaggctcaagattatgagaatgt

SEQ ID NO: 1783652 - DNA, 25 bp, Homo sapien
gaggctcaagattatgagaatgtgt

SEQ ID NO: 1783653 - DNA, 25 bp, Homo sapien
gaatgtgtgataggaccaaaagcat

SEQ ID NO: 1783654 - DNA, 25 bp, Homo sapien
ggtcattttcgtagtcaagttgtaa

SEQ ID NO: 1783655 - DNA, 25 bp, Homo sapien
ctgttctggttaagacgaaggtcat

SEQ ID NO: 1783656 - DNA, 25 bp, Homo sapien
cattttttcaaaccgatagattcag

SEQ ID NO: 1783657 - DNA, 25 bp, Homo sapien
caaaccgatagattcagttttgctg

SEQ ID NO: 1783658 - DNA, 25 bp, Homo sapien
cttgtttaactctccctctaactgc

SEQ ID NO: 1783659 - DNA, 25 bp, Homo sapien
tgtttagtgcaaagcacaaacatca

SEQ ID NO: 1783660 - DNA, 25 bp, Homo sapien
ctctaactgccacctttttactttg

SEQ ID NO: 1783661 - DNA, 25 bp, Homo sapien
tgcccggatagaatatacgctcttt

SEQ ID NO: 1783662 - DNA, 25 bp, Homo sapien
tcaggaggcctgagtccgtttgtca

SEQ ID NO: 1783663 - DNA, 25 bp, Homo sapien
ggctcccgaagtggggcctgatggt

SEQ ID NO: 1783664 - DNA, 25 bp, Homo sapien
gcccagtcaggtgggcccggagcac

SEQ ID NO: 1783665 - DNA, 25 bp, Homo sapien
tcagaggacgcccagtcaggtgggc

SEQ ID NO: 1783666 - DNA, 25 bp, Homo sapien
ttgcgagctcggtttcctccgggag

SEQ ID NO: 1783667 - DNA, 25 bp, Homo sapien
aattacgctgaggaaagtgcgcccg

SEQ ID NO: 1783668 - DNA, 25 bp, Homo sapien
ggaaactgcgttcaaaattacgctg

SEQ ID NO: 1783669 - DNA, 25 bp, Homo sapien
aagagtcatctttagggaaactgcg

SEQ ID NO: 1783670 - DNA, 25 bp, Homo sapien
tatatgggatgaatatctcggtggc

SEQ ID NO: 1783671 - DNA, 25 bp, Homo sapien
gtaatgaaagttgcccctactgaat

SEQ ID NO: 1783672 - DNA, 25 bp, Homo sapien
gagtcaggagctcctcatactctga

SEQ ID NO: 1783673 - DNA, 25 bp, Homo sapien
tctcggtggcaaggagacagttaga

SEQ ID NO: 1783674 - DNA, 25 bp, Homo sapien
cgccgccgagcgccgtcgttccccg

SEQ ID NO: 1783675 - DNA, 25 bp, Homo sapien
gccgccgagcgccgtcgttccccgc

SEQ ID NO: 1783676 - DNA, 25 bp, Homo sapien
ctttccgcgaaatttgaaactggag

SEQ ID NO: 1783677 - DNA, 25 bp, Homo sapien
aaaacattccgcagttgctggtgaa

SEQ ID NO: 1783678 - DNA, 25 bp, Homo sapien
gggtcgcgccaggtcaaatcttgcg

SEQ ID NO: 1783679 - DNA, 25 bp, Homo sapien
cacagttattgtctttggcccggaa

SEQ ID NO: 1783680 - DNA, 25 bp, Homo sapien
gggtaataatatttgagcctcagga

SEQ ID NO: 1783681 - DNA, 25 bp, Homo sapien
gttgcagatttaacagagagagtct

SEQ ID NO: 1783682 - DNA, 25 bp, Homo sapien
taagatggacatggctggttctgga

SEQ ID NO: 1783683 - DNA, 25 bp, Homo sapien
tggaaacttcatgtacagtgtctcc

SEQ ID NO: 1783684 - DNA, 25 bp, Homo sapien
caacctgcagaatgtttgcctgaag

SEQ ID NO: 1783685 - DNA, 25 bp, Homo sapien
agaacagagatggagaaggccttac

SEQ ID NO: 1783686 - DNA, 25 bp, Homo sapien
aatgacatgactaaggctgcctgag

SEQ ID NO: 1783687 - DNA, 25 bp, Homo sapien
caagtggttcaggtgcaatgacatg

SEQ ID NO: 1783688 - DNA, 25 bp, Homo sapien
ttatttagcaaagggagtctcacac

SEQ ID NO: 1783689 - DNA, 25 bp, Homo sapien
cagtggcagtgtcgtggcctacaca

SEQ ID NO: 1783690 - DNA, 25 bp, Homo sapien
ttatagggcactagagggacctgga

SEQ ID NO: 1783691 - DNA, 25 bp, Homo sapien
gaatcactgggagcagactcatcta

SEQ ID NO: 1783692 - DNA, 25 bp, Homo sapien
ctgtttggaattctttccttgccga

SEQ ID NO: 1783693 - DNA, 25 bp, Homo sapien
cagccattacttatgtactgaaggt

SEQ ID NO: 1783694 - DNA, 25 bp, Homo sapien
caatatgtataattaggctttcaga

SEQ ID NO: 1783695 - DNA, 25 bp, Homo sapien
cgacctgccacccaattgcaagtta

SEQ ID NO: 1783696 - DNA, 25 bp, Homo sapien
ggacggcctcctacttacgctgtaa

SEQ ID NO: 1783697 - DNA, 25 bp, Homo sapien
cagactgtctctcgaaggcatagga

SEQ ID NO: 1783698 - DNA, 25 bp, Homo sapien
taagaagttagtgcctgaccatgaa

SEQ ID NO: 1783699 - DNA, 25 bp, Homo sapien
gattttgcactgcacgggacggcct

SEQ ID NO: 1783700 - DNA, 25 bp, Homo sapien
tggcaatggctttgacaccttcatc

SEQ ID NO: 1783701 - DNA, 25 bp, Homo sapien
tggatattgttctatgtatgttcat

SEQ ID NO: 1783702 - DNA, 25 bp, Homo sapien
acaatctgcaccactctgtctggca

SEQ ID NO: 1783703 - DNA, 25 bp, Homo sapien
caagaaaactgatctcacaatctgc

SEQ ID NO: 1783704 - DNA, 25 bp, Homo sapien
tagatctgaacttgattccctgctc

SEQ ID NO: 1783705 - DNA, 25 bp, Homo sapien
taaagtcaaccaaagcaggaaatgg

SEQ ID NO: 1783706 - DNA, 25 bp, Homo sapien
taatgattcatagcttccccttttg

SEQ ID NO: 1783707 - DNA, 25 bp, Homo sapien
taactcctattttgcacaggcttgg

SEQ ID NO: 1783708 - DNA, 25 bp, Homo sapien
ggcccaattttctaggtgaactgaa

SEQ ID NO: 1783709 - DNA, 25 bp, Homo sapien
ccttccttagcaacccacgtggatg

SEQ ID NO: 1783710 - DNA, 25 bp, Homo sapien
gccaagtcaagcagtaccaccatta

SEQ ID NO: 1783711 - DNA, 25 bp, Homo sapien
cataggtttgcttaagaagctgcca

SEQ ID NO: 1783712 - DNA, 25 bp, Homo sapien
tcacactacaccattacaacaagga

SEQ ID NO: 1783713 - DNA, 25 bp, Homo sapien
caccagtgacaagctggttaatgag

SEQ ID NO: 1783714 - DNA, 25 bp, Homo sapien
gatacacaatcctgacattgacaga

SEQ ID NO: 1783715 - DNA, 25 bp, Homo sapien
taacccagaggactgaatcacatga

SEQ ID NO: 1783716 - DNA, 25 bp, Homo sapien
tgtattctcagataggtagccaaga

SEQ ID NO: 1783717 - DNA, 25 bp, Homo sapien
aagaatgatgcctggtgaggagcca

SEQ ID NO: 1783718 - DNA, 25 bp, Homo sapien
gaaaacacatgtccatgcaaagact

SEQ ID NO: 1783719 - DNA, 25 bp, Homo sapien
gggccacttcagtattgtgcaacaa

SEQ ID NO: 1783720 - DNA, 25 bp, Homo sapien
gaattggaatggtatgcagttgagt

SEQ ID NO: 1783721 - DNA, 25 bp, Homo sapien
ttatgcttcccagggtatgctacat

SEQ ID NO: 1783722 - DNA, 25 bp, Homo sapien
gattacagatcttggaattggaatg

SEQ ID NO: 1783723 - DNA, 25 bp, Homo sapien
gggaactcttcaatcgtctaagatt

SEQ ID NO: 1783724 - DNA, 25 bp, Homo sapien
tcttcttcaccttttagaacatctt

SEQ ID NO: 1783725 - DNA, 25 bp, Homo sapien
cttcttcaccttttagaacatcttt

SEQ ID NO: 1783726 - DNA, 25 bp, Homo sapien
ttcttcaccttttagaacatctttg

SEQ ID NO: 1783727 - DNA, 25 bp, Homo sapien
ttcttcttcaccttttagaacatct

SEQ ID NO: 1783728 - DNA, 25 bp, Homo sapien
gcttttcttggttcgttcaaatatc

SEQ ID NO: 1783729 - DNA, 25 bp, Homo sapien
catcagttagcactttatcatattg

SEQ ID NO: 1783730 - DNA, 25 bp, Homo sapien
cttcatcagttagcactttatcata

SEQ ID NO: 1783731 - DNA, 25 bp, Homo sapien
cagttagcactttatcatattgcat

SEQ ID NO: 1783732 - DNA, 25 bp, Homo sapien
agtcccttcactcttcgggaattat

SEQ ID NO: 1783733 - DNA, 25 bp, Homo sapien
ttcactcttcgggaattatagtttc

SEQ ID NO: 1783734 - DNA, 25 bp, Homo sapien
tcccttcactcttcgggaattatag

SEQ ID NO: 1783735 - DNA, 25 bp, Homo sapien
cccttcactcttcgggaattatagt

SEQ ID NO: 1783736 - DNA, 25 bp, Homo sapien
ccaaccaacaaatccaggaacccag

SEQ ID NO: 1783737 - DNA, 25 bp, Homo sapien
caaccaacaaatccaggaacccagg

SEQ ID NO: 1783738 - DNA, 25 bp, Homo sapien
tatggcaaggtagggcccccaacca

SEQ ID NO: 1783739 - DNA, 25 bp, Homo sapien
actgcttgatggagtccaaagggtt

SEQ ID NO: 1783740 - DNA, 25 bp, Homo sapien
gatgatctgcgctgcactgcttgat

SEQ ID NO: 1783741 - DNA, 25 bp, Homo sapien
atttctctgtgatgatctgcgctgc

SEQ ID NO: 1783742 - DNA, 25 bp, Homo sapien
ttgccgatgatgaggatgccagagt

SEQ ID NO: 1783743 - DNA, 25 bp, Homo sapien
tcatggtgctagagaatcaacgaac

SEQ ID NO: 1783744 - DNA, 25 bp, Homo sapien
gatccaccaggctctcaattgaaag

SEQ ID NO: 1783745 - DNA, 25 bp, Homo sapien
gaggcagtggcatatcaaacagacc

SEQ ID NO: 1783746 - DNA, 25 bp, Homo sapien
tgtccaacagccaagaaagtagggt

SEQ ID NO: 1783747 - DNA, 25 bp, Homo sapien
tgtctggaattggttcctgccggta

SEQ ID NO: 1783748 - DNA, 25 bp, Homo sapien
ctggaattggttcctgccggtagat

SEQ ID NO: 1783749 - DNA, 25 bp, Homo sapien
gtctggaattggttcctgccggtag

SEQ ID NO: 1783750 - DNA, 25 bp, Homo sapien
tctggaattggttcctgccggtaga

SEQ ID NO: 1783751 - DNA, 25 bp, Homo sapien
tcgggaagtgcgcgctgatctccag

SEQ ID NO: 1783752 - DNA, 25 bp, Homo sapien
ccaggtgtggatgcgacctctgagt

SEQ ID NO: 1783753 - DNA, 25 bp, Homo sapien
aagcgggccctgtggctagtgggcg

SEQ ID NO: 1783754 - DNA, 25 bp, Homo sapien
tcctgcgttcgcagggtcccgggac

SEQ ID NO: 1783755 - DNA, 25 bp, Homo sapien
cctggaccggctgggcggcaaggag

SEQ ID NO: 1783756 - DNA, 25 bp, Homo sapien
ccagaggcctggaccggctgggcgg

SEQ ID NO: 1783757 - DNA, 25 bp, Homo sapien
agcgcccgggtgacctgtactggcc

SEQ ID NO: 1783758 - DNA, 25 bp, Homo sapien
gccgggcgcggtttgcggacgctct

SEQ ID NO: 1783759 - DNA, 25 bp, Homo sapien
acacaggatagagcagtaagacagc

SEQ ID NO: 1783760 - DNA, 25 bp, Homo sapien
aggaatttccagctccctccgtagg

SEQ ID NO: 1783761 - DNA, 25 bp, Homo sapien
catttcgatggccttgtagttacac

SEQ ID NO: 1783762 - DNA, 25 bp, Homo sapien
cagatcaatgaacgtcaggaatttc

SEQ ID NO: 1783763 - DNA, 25 bp, Homo sapien
cacaggcacggggtgcggggcgagc

SEQ ID NO: 1783764 - DNA, 25 bp, Homo sapien
caggcacggggtgcggggcgagcag

SEQ ID NO: 1783765 - DNA, 25 bp, Homo sapien
cgcacacacaggcacggggtgcggg

SEQ ID NO: 1783766 - DNA, 25 bp, Homo sapien
cacacacaggcacggggtgcggggc

SEQ ID NO: 1783767 - DNA, 25 bp, Homo sapien
ggggcagccaggccttcacacgcaa

SEQ ID NO: 1783768 - DNA, 25 bp, Homo sapien
gggggcagccaggccttcacacgca

SEQ ID NO: 1783769 - DNA, 25 bp, Homo sapien
gcgggggcagccaggccttcacacg

SEQ ID NO: 1783770 - DNA, 25 bp, Homo sapien
ctgcgggggcagccaggccttcaca

SEQ ID NO: 1783771 - DNA, 25 bp, Homo sapien
acggtgagtggttcagaaggtgccg

SEQ ID NO: 1783772 - DNA, 25 bp, Homo sapien
ccattcaggatcaggtccgatgctt

SEQ ID NO: 1783773 - DNA, 25 bp, Homo sapien
ctcttagaagcagttcggtgtcccc

SEQ ID NO: 1783774 - DNA, 25 bp, Homo sapien
tgaaaagcaccttgagggcgaatgg

SEQ ID NO: 1783775 - DNA, 25 bp, Homo sapien
tgcaacaagttcatcccacggtggg

SEQ ID NO: 1783776 - DNA, 25 bp, Homo sapien
caggcatcacgcatgttcagaggga

SEQ ID NO: 1783777 - DNA, 25 bp, Homo sapien
ttgtcacgggctcctcacttggatg

SEQ ID NO: 1783778 - DNA, 25 bp, Homo sapien
gaaattagtttcaagcagagttgga

SEQ ID NO: 1783779 - DNA, 25 bp, Homo sapien
gcaacattctataccctgtgaagtc

SEQ ID NO: 1783780 - DNA, 25 bp, Homo sapien
tggccactgccacataatcatctgc

SEQ ID NO: 1783781 - DNA, 25 bp, Homo sapien
taagctctgaatctactggaatgac

SEQ ID NO: 1783782 - DNA, 25 bp, Homo sapien
tcctgactcagatcctggtaaactg

SEQ ID NO: 1783783 - DNA, 25 bp, Homo sapien
cctggatgcatagagcctgagattc

SEQ ID NO: 1783784 - DNA, 25 bp, Homo sapien
tgaaaagtcagtgcctggaaagaac

SEQ ID NO: 1783785 - DNA, 25 bp, Homo sapien
tatctgagtgataaattaccttgaa

SEQ ID NO: 1783786 - DNA, 25 bp, Homo sapien
tttcaacataaggacaatacaatca

SEQ ID NO: 1783787 - DNA, 25 bp, Homo sapien
tgtttttcaccttagttgccctgaa

SEQ ID NO: 1783788 - DNA, 25 bp, Homo sapien
tctctgagtcaaacggaaaagaatc

SEQ ID NO: 1783789 - DNA, 25 bp, Homo sapien
gaaaagaatcttatggacgccacct

SEQ ID NO: 1783790 - DNA, 25 bp, Homo sapien
gaaactacaggcctcagtgtacact

SEQ ID NO: 1783791 - DNA, 25 bp, Homo sapien
ggttctctcactccgaagcaatgga

SEQ ID NO: 1783792 - DNA, 25 bp, Homo sapien
cccttttcaactcatcctgttgcct

SEQ ID NO: 1783793 - DNA, 25 bp, Homo sapien
ccccttttcaactcatcctgttgcc

SEQ ID NO: 1783794 - DNA, 25 bp, Homo sapien
tccccttttcaactcatcctgttgc

SEQ ID NO: 1783795 - DNA, 25 bp, Homo sapien
aaaaagcaagggagattctatctga

SEQ ID NO: 1783796 - DNA, 25 bp, Homo sapien
aagcaagggagattctatctgatag

SEQ ID NO: 1783797 - DNA, 25 bp, Homo sapien
agggagattctatctgataggcatt

SEQ ID NO: 1783798 - DNA, 25 bp, Homo sapien
aaagcaagggagattctatctgata

SEQ ID NO: 1783799 - DNA, 25 bp, Homo sapien
tagaaagtaccagcacaagcagggc

SEQ ID NO: 1783800 - DNA, 25 bp, Homo sapien
ggttcagaggatccatttggcagta

SEQ ID NO: 1783801 - DNA, 25 bp, Homo sapien
ggacccacgggttatatccatacat

SEQ ID NO: 1783802 - DNA, 25 bp, Homo sapien
taagaatagagtagaaacactgaca

SEQ ID NO: 1783803 - DNA, 25 bp, Homo sapien
gcaacttgagaaaatgctcacgatg

SEQ ID NO: 1783804 - DNA, 25 bp, Homo sapien
aaatgtatcttacttggtcacaaag

SEQ ID NO: 1783805 - DNA, 25 bp, Homo sapien
tgggttgttacatatccatgagaca

SEQ ID NO: 1783806 - DNA, 25 bp, Homo sapien
tacttggatgctgactgggcaccag

SEQ ID NO: 1783807 - DNA, 25 bp, Homo sapien
gaaatactattgtgaagcatcctgc

SEQ ID NO: 1783808 - DNA, 25 bp, Homo sapien
ttatgtaacaaaatcagaagccgag

SEQ ID NO: 1783809 - DNA, 25 bp, Homo sapien
caactccagtggtgcccaaattatc

SEQ ID NO: 1783810 - DNA, 25 bp, Homo sapien
cacccggcctagtgatgttttaatc

SEQ ID NO: 1783811 - DNA, 25 bp, Homo sapien
tgggattacatcaccgggcatgatg

SEQ ID NO: 1783812 - DNA, 25 bp, Homo sapien
catatttgaatgctactccgtagag

SEQ ID NO: 1783813 - DNA, 25 bp, Homo sapien
gaatgctactccgtagagaaatcaa

SEQ ID NO: 1783814 - DNA, 25 bp, Homo sapien
gatcagttacatatttgaatgctac

SEQ ID NO: 1783815 - DNA, 25 bp, Homo sapien
gctactccgtagagaaatcaatgca

SEQ ID NO: 1783816 - DNA, 25 bp, Homo sapien
aagagtgaactccaacggtacttca

SEQ ID NO: 1783817 - DNA, 25 bp, Homo sapien
tacttcatccccgtgagacagtgac

SEQ ID NO: 1783818 - DNA, 25 bp, Homo sapien
gaaaccagatgagtgaatcccacaa

SEQ ID NO: 1783819 - DNA, 25 bp, Homo sapien
cctgagacatctgaacacccggtag

SEQ ID NO: 1783820 - DNA, 25 bp, Homo sapien
gagaataatcttcattattcttcat

SEQ ID NO: 1783821 - DNA, 25 bp, Homo sapien
gaggagaataatcttcattattctt

SEQ ID NO: 1783822 - DNA, 25 bp, Homo sapien
cagaggagaataatcttcattattc

SEQ ID NO: 1783823 - DNA, 25 bp, Homo sapien
ggagaataatcttcattattcttca

SEQ ID NO: 1783824 - DNA, 25 bp, Homo sapien
ccacttcctcgagtcagaagactgg

SEQ ID NO: 1783825 - DNA, 25 bp, Homo sapien
gactggaaagatcagtcagcacaca

SEQ ID NO: 1783826 - DNA, 25 bp, Homo sapien
cagtcccggagagagatgagcttct

SEQ ID NO: 1783827 - DNA, 25 bp, Homo sapien
gaagactggaaagatcagtcagcac

SEQ ID NO: 1783828 - DNA, 25 bp, Homo sapien
ccaacaggaaaggccaacacagcta

SEQ ID NO: 1783829 - DNA, 25 bp, Homo sapien
caggaaaggccaacacagctaacat

SEQ ID NO: 1783830 - DNA, 25 bp, Homo sapien
aacaggaaaggccaacacagctaac

SEQ ID NO: 1783831 - DNA, 25 bp, Homo sapien
accccaacaggaaaggccaacacag

SEQ ID NO: 1783832 - DNA, 25 bp, Homo sapien
gtctgaaataagagccaagtttctt

SEQ ID NO: 1783833 - DNA, 25 bp, Homo sapien
gaagtctgaaataagagccaagttt

SEQ ID NO: 1783834 - DNA, 25 bp, Homo sapien
aagtctgaaataagagccaagtttc

SEQ ID NO: 1783835 - DNA, 25 bp, Homo sapien
tagaagtctgaaataagagccaagt

SEQ ID NO: 1783836 - DNA, 25 bp, Homo sapien
tctagacccttttgagcagttgcgg

SEQ ID NO: 1783837 - DNA, 25 bp, Homo sapien
taacattagagacagaaagacgaaa

SEQ ID NO: 1783838 - DNA, 25 bp, Homo sapien
tgaagacagagcaccttggaaagga

SEQ ID NO: 1783839 - DNA, 25 bp, Homo sapien
aagctctgaagccacggtgaagaca

SEQ ID NO: 1783840 - DNA, 25 bp, Homo sapien
ctataggacatgataatttctaggg

SEQ ID NO: 1783841 - DNA, 25 bp, Homo sapien
gatcctggttttgcgggtcacattg

SEQ ID NO: 1783842 - DNA, 25 bp, Homo sapien
gttcatgaaaatcaattctaccttt

SEQ ID NO: 1783843 - DNA, 25 bp, Homo sapien
cttatgactatgattatgggaagaa

SEQ ID NO: 1783844 - DNA, 25 bp, Homo sapien
tcaaagcctggttgatttaccagca

SEQ ID NO: 1783845 - DNA, 25 bp, Homo sapien
taagagcaagcactccgttagttgg

SEQ ID NO: 1783846 - DNA, 25 bp, Homo sapien
catctgtcactgatgaaaacgtcat

SEQ ID NO: 1783847 - DNA, 25 bp, Homo sapien
gagccgccatgtccagtccataata

SEQ ID NO: 1783848 - DNA, 25 bp, Homo sapien
tgcatacctaggctctatagatggt

SEQ ID NO: 1783849 - DNA, 25 bp, Homo sapien
ctcactgcagctcgaatctctaggc

SEQ ID NO: 1783850 - DNA, 25 bp, Homo sapien
cacaggcaacggcaacacaattgta

SEQ ID NO: 1783851 - DNA, 25 bp, Homo sapien
tttggtcagctcaggcctcatgtac

SEQ ID NO: 1783852 - DNA, 25 bp, Homo sapien
gggcccagagttagatccatttaga

SEQ ID NO: 1783853 - DNA, 25 bp, Homo sapien
caggtgagatcatcccataaggtga

SEQ ID NO: 1783854 - DNA, 25 bp, Homo sapien
tggtcttatgcctcacacaggtgag

SEQ ID NO: 1783855 - DNA, 25 bp, Homo sapien
tgaccaaaacatgagaatgatggct

SEQ ID NO: 1783856 - DNA, 25 bp, Homo sapien
gaaaccacaccaatcttgccatacg

SEQ ID NO: 1783857 - DNA, 25 bp, Homo sapien
catcccgtgactttaggctgaaacc

SEQ ID NO: 1783858 - DNA, 25 bp, Homo sapien
tgccagcttgcatggatggatccct

SEQ ID NO: 1783859 - DNA, 25 bp, Homo sapien
ggttgtaccctgtgtcatcccgtga

SEQ ID NO: 1783860 - DNA, 25 bp, Homo sapien
taactgatacctgggtcttgccttg

SEQ ID NO: 1783861 - DNA, 25 bp, Homo sapien
ctcaaattttagttaataggctcct

SEQ ID NO: 1783862 - DNA, 25 bp, Homo sapien
gaatacttgctggtcctaactgata

SEQ ID NO: 1783863 - DNA, 25 bp, Homo sapien
aaagagaagtagcagtgacttagaa

SEQ ID NO: 1783864 - DNA, 25 bp, Homo sapien
ttctgttgcagaagggtaatcttta

SEQ ID NO: 1783865 - DNA, 25 bp, Homo sapien
aaagtatgggtgtgagaataagctg

SEQ ID NO: 1783866 - DNA, 25 bp, Homo sapien
gcagaagggtaatctttagaaatat

SEQ ID NO: 1783867 - DNA, 25 bp, Homo sapien
aacagagaaagtatgggtgtgagaa

SEQ ID NO: 1783868 - DNA, 25 bp, Homo sapien
ttttccctagagagcccattgttaa

SEQ ID NO: 1783869 - DNA, 25 bp, Homo sapien
gagactcagtgtgaagctttggtca

SEQ ID NO: 1783870 - DNA, 25 bp, Homo sapien
tgtaatactagaaggtcaggaggcc

SEQ ID NO: 1783871 - DNA, 25 bp, Homo sapien
ggagtcactatctgttaaccacaag

SEQ ID NO: 1783872 - DNA, 25 bp, Homo sapien
ggcactgctgtggataacgtactag

SEQ ID NO: 1783873 - DNA, 25 bp, Homo sapien
gaacaactgataagcaaagccaagg

SEQ ID NO: 1783874 - DNA, 25 bp, Homo sapien
ccctttaaagtgaaatgcaagcact

SEQ ID NO: 1783875 - DNA, 25 bp, Homo sapien
gctgcctgagacatgtaacagggat

SEQ ID NO: 1783876 - DNA, 25 bp, Homo sapien
tacccactatctagagttagcacac

SEQ ID NO: 1783877 - DNA, 25 bp, Homo sapien
tcgtgtacagctccgtttcagggct

SEQ ID NO: 1783878 - DNA, 25 bp, Homo sapien
gaatctatgatgaaagacagctcag

SEQ ID NO: 1783879 - DNA, 25 bp, Homo sapien
tccgaatggtgttctttcaggcaaa

SEQ ID NO: 1783880 - DNA, 25 bp, Homo sapien
taaaattatccagcagcttcgggta

SEQ ID NO: 1783881 - DNA, 25 bp, Homo sapien
ggataaaattatccagcagcttcgg

SEQ ID NO: 1783882 - DNA, 25 bp, Homo sapien
gcagcttcgggtatatcatctctct

SEQ ID NO: 1783883 - DNA, 25 bp, Homo sapien
tatccagcagcttcgggtatatcat

SEQ ID NO: 1783884 - DNA, 25 bp, Homo sapien
tcagcaaagtctctcgtaatgtcag

SEQ ID NO: 1783885 - DNA, 25 bp, Homo sapien
tcacattcaactggaggcagcaact

SEQ ID NO: 1783886 - DNA, 25 bp, Homo sapien
tattgtgcagttcaggcctgttaac

SEQ ID NO: 1783887 - DNA, 25 bp, Homo sapien
tgttaacaataagccaaagtggccg

SEQ ID NO: 1783888 - DNA, 25 bp, Homo sapien
cattttgtatctatagttgcacaga

SEQ ID NO: 1783889 - DNA, 25 bp, Homo sapien
ttaattgctagtctaaaggatcagc

SEQ ID NO: 1783890 - DNA, 25 bp, Homo sapien
aaggatcagcatcatggtttatcca

SEQ ID NO: 1783891 - DNA, 25 bp, Homo sapien
tgcaaaatacacatcagccaccatg

SEQ ID NO: 1783892 - DNA, 25 bp, Homo sapien
cataagtcatgctatctaccaaaag

SEQ ID NO: 1783893 - DNA, 25 bp, Homo sapien
tggagatagcagcaatatcagcagc

SEQ ID NO: 1783894 - DNA, 25 bp, Homo sapien
gcagcacctgaatatacagggtaat

SEQ ID NO: 1783895 - DNA, 25 bp, Homo sapien
tgtttatcccagcacatggagatag

SEQ ID NO: 1783896 - DNA, 25 bp, Homo sapien
caaaaaagacatattagtacgtgcg

SEQ ID NO: 1783897 - DNA, 25 bp, Homo sapien
tgcattcattagaagtgcagcctaa

SEQ ID NO: 1783898 - DNA, 25 bp, Homo sapien
tcattagaagtgcagcctaaggaaa

SEQ ID NO: 1783899 - DNA, 25 bp, Homo sapien
ggttcaggaccctttcaaatgtctg

SEQ ID NO: 1783900 - DNA, 25 bp, Homo sapien
atccggttcaggaccctttcaaatg

SEQ ID NO: 1783901 - DNA, 25 bp, Homo sapien
ctttctgtggagaggcagcctgctt

SEQ ID NO: 1783902 - DNA, 25 bp, Homo sapien
gatacccttctgtacatcgcttgag

SEQ ID NO: 1783903 - DNA, 25 bp, Homo sapien
gaaggcccgtatttcatcaacttgg

SEQ ID NO: 1783904 - DNA, 25 bp, Homo sapien
ccagggttatagtaggcaggtcaca

SEQ ID NO: 1783905 - DNA, 25 bp, Homo sapien
tctgtaatctggaagaggatcctca

SEQ ID NO: 1783906 - DNA, 25 bp, Homo sapien
ttctcatcctgctatgggctgaatg

SEQ ID NO: 1783907 - DNA, 25 bp, Homo sapien
tcaagcatcaaaagctcactgggcc

SEQ ID NO: 1783908 - DNA, 25 bp, Homo sapien
ggctccagagagattacttgttcct

SEQ ID NO: 1783909 - DNA, 25 bp, Homo sapien
ttaactcaggtttgtctctttgcca

SEQ ID NO: 1783910 - DNA, 25 bp, Homo sapien
cacatctagatatcaccaggacagc

SEQ ID NO: 1783911 - DNA, 25 bp, Homo sapien
ctttgtgttcttccaatacccacat

SEQ ID NO: 1783912 - DNA, 25 bp, Homo sapien
ccccagggatgcttgtgagaccaac

SEQ ID NO: 1783913 - DNA, 25 bp, Homo sapien
gatcataggtcatctacttgtgcag

SEQ ID NO: 1783914 - DNA, 25 bp, Homo sapien
cctgctagcataaatagtgaggagc

SEQ ID NO: 1783915 - DNA, 25 bp, Homo sapien
tgaggagcactagccataatatgtg

SEQ ID NO: 1783916 - DNA, 25 bp, Homo sapien
atatggaagtggctggcccctagca

SEQ ID NO: 1783917 - DNA, 25 bp, Homo sapien
taaagccttggattactgtcctaca

SEQ ID NO: 1783918 - DNA, 25 bp, Homo sapien
agcatgcaagtgacccggaaaccac

SEQ ID NO: 1783919 - DNA, 25 bp, Homo sapien
gaaacttgctaagaggctgcagact

SEQ ID NO: 1783920 - DNA, 25 bp, Homo sapien
gaaactatgcaggtaaccatgacga

SEQ ID NO: 1783921 - DNA, 25 bp, Homo sapien
tggcagacttaccaaccaacctgga

SEQ ID NO: 1783922 - DNA, 25 bp, Homo sapien
caacagttagggcaataccagctga

SEQ ID NO: 1783923 - DNA, 25 bp, Homo sapien
ttcatggccagaaccaactgcaggg

SEQ ID NO: 1783924 - DNA, 25 bp, Homo sapien
agtatgccctaagcagttggcctga

SEQ ID NO: 1783925 - DNA, 25 bp, Homo sapien
tgagcatacgccatggaaaacagca

SEQ ID NO: 1783926 - DNA, 25 bp, Homo sapien
tagtacttggtacacagaagtatcc

SEQ ID NO: 1783927 - DNA, 25 bp, Homo sapien
tcgccacctcctagctatgaagaag

SEQ ID NO: 1783928 - DNA, 25 bp, Homo sapien
tcagcagacattaactgagcatacg

SEQ ID NO: 1783929 - DNA, 25 bp, Homo sapien
tcaggccctagatgacctcatgagg

SEQ ID NO: 1783930 - DNA, 25 bp, Homo sapien
agttagatgtccgtgcaaccctgca

SEQ ID NO: 1783931 - DNA, 25 bp, Homo sapien
gaagatccacaagccaccagatgaa

SEQ ID NO: 1783932 - DNA, 25 bp, Homo sapien
tactggcacttacagacgacgtttc

SEQ ID NO: 1783933 - DNA, 25 bp, Homo sapien
gaagtcaatagccaagaatctgcct

SEQ ID NO: 1783934 - DNA, 25 bp, Homo sapien
ggcaggcccactataactacacttg

SEQ ID NO: 1783935 - DNA, 25 bp, Homo sapien
ggtacctcttacatcaatggcacag

SEQ ID NO: 1783936 - DNA, 25 bp, Homo sapien
cagaagtcgtttctcggcaacacga

SEQ ID NO: 1783937 - DNA, 25 bp, Homo sapien
cagggaagccaatttacctgcccca

SEQ ID NO: 1783938 - DNA, 25 bp, Homo sapien
tgaatacctgccagactgtcaccct

SEQ ID NO: 1783939 - DNA, 25 bp, Homo sapien
cacgaactgggaataaggcacatag

SEQ ID NO: 1783940 - DNA, 25 bp, Homo sapien
tgtggatacaacaggagccaagcca

SEQ ID NO: 1783941 - DNA, 25 bp, Homo sapien
caaaagttgattcctcaagcacttc

SEQ ID NO: 1783942 - DNA, 25 bp, Homo sapien
ttggcaaggccatcaaaagttgatt

SEQ ID NO: 1783943 - DNA, 25 bp, Homo sapien
taatataacaattacacggtatttc

SEQ ID NO: 1783944 - DNA, 25 bp, Homo sapien
aattacacggtatttccattggcaa

SEQ ID NO: 1783945 - DNA, 25 bp, Homo sapien
gggcttcctttgtgctgtgacgccc

SEQ ID NO: 1783946 - DNA, 25 bp, Homo sapien
gacgcccatttttaagaatcgccat

SEQ ID NO: 1783947 - DNA, 25 bp, Homo sapien
tgctgtgacgcccatttttaagaat

SEQ ID NO: 1783948 - DNA, 25 bp, Homo sapien
tcctttgtgctgtgacgcccatttt

SEQ ID NO: 1783949 - DNA, 25 bp, Homo sapien
cgaattactcaaagccagtggtgac

SEQ ID NO: 1783950 - DNA, 25 bp, Homo sapien
cagtggtgacaacccaatttcctta

SEQ ID NO: 1783951 - DNA, 25 bp, Homo sapien
gaagacagcttgcatagacaaaacg

SEQ ID NO: 1783952 - DNA, 25 bp, Homo sapien
gggactggatatagtatgaaaacct

SEQ ID NO: 1783953 - DNA, 25 bp, Homo sapien
tgaatgaaccttttcacaggagaat

SEQ ID NO: 1783954 - DNA, 25 bp, Homo sapien
tttcagaagccagccgaaataccaa

SEQ ID NO: 1783955 - DNA, 25 bp, Homo sapien
cttgatctattaagaaaaggctgaa

SEQ ID NO: 1783956 - DNA, 25 bp, Homo sapien
taccaaccacttgatctattaagaa

SEQ ID NO: 1783957 - DNA, 25 bp, Homo sapien
aggtccagctttttgcctcattgtc

SEQ ID NO: 1783958 - DNA, 25 bp, Homo sapien
gttacccttttctgtactgagcaaa

SEQ ID NO: 1783959 - DNA, 25 bp, Homo sapien
tgttctgaatccaacctagtttaat

SEQ ID NO: 1783960 - DNA, 25 bp, Homo sapien
gattcaatgatactgcttcgaacag

SEQ ID NO: 1783961 - DNA, 25 bp, Homo sapien
ccctgttgccgtaagcatgaagtgg

SEQ ID NO: 1783962 - DNA, 25 bp, Homo sapien
tcagaccctgttgccgtaagcatga

SEQ ID NO: 1783963 - DNA, 25 bp, Homo sapien
gaccctgttgccgtaagcatgaagt

SEQ ID NO: 1783964 - DNA, 25 bp, Homo sapien
cctgttgccgtaagcatgaagtggg

SEQ ID NO: 1783965 - DNA, 25 bp, Homo sapien
tattaagcgggcaatgggcactcat

SEQ ID NO: 1783966 - DNA, 25 bp, Homo sapien
ggatggaaaccacaggcagattcag

SEQ ID NO: 1783967 - DNA, 25 bp, Homo sapien
gaacctggttgggagaacattacaa

SEQ ID NO: 1783968 - DNA, 25 bp, Homo sapien
tacaatggtcttaatgtcagggact

SEQ ID NO: 1783969 - DNA, 25 bp, Homo sapien
cttttggaggtaacacagggactgg

SEQ ID NO: 1783970 - DNA, 25 bp, Homo sapien
gagtttcaggctttaaagtgtttga

SEQ ID NO: 1783971 - DNA, 25 bp, Homo sapien
gggctgagcctactgccactttgca

SEQ ID NO: 1783972 - DNA, 25 bp, Homo sapien
ttaaatataagatgttacttgaaga

SEQ ID NO: 1783973 - DNA, 25 bp, Homo sapien
tggtgatggtgtactgcctgtgcac

SEQ ID NO: 1783974 - DNA, 25 bp, Homo sapien
catgcatttggtgatggtgtactgc

SEQ ID NO: 1783975 - DNA, 25 bp, Homo sapien
gcacacatgcatttggtgatggtgt

SEQ ID NO: 1783976 - DNA, 25 bp, Homo sapien
catttggtgatggtgtactgcctgt

SEQ ID NO: 1783977 - DNA, 25 bp, Homo sapien
tctggacatccgggacaagagggtt

SEQ ID NO: 1783978 - DNA, 25 bp, Homo sapien
ctggacatccgggacaagagggttg

SEQ ID NO: 1783979 - DNA, 25 bp, Homo sapien
cttcaacccctttctggacatccgg

SEQ ID NO: 1783980 - DNA, 25 bp, Homo sapien
atgcttcaacccctttctggacatc

SEQ ID NO: 1783981 - DNA, 25 bp, Homo sapien
caagttatgattggcttaggctcaa

SEQ ID NO: 1783982 - DNA, 25 bp, Homo sapien
caaatgccatagtatgaagaaagtc

SEQ ID NO: 1783983 - DNA, 25 bp, Homo sapien
gacccagttgtagccaatgagataa

SEQ ID NO: 1783984 - DNA, 25 bp, Homo sapien
gggagggctccctttctagagtgaa

SEQ ID NO: 1783985 - DNA, 25 bp, Homo sapien
tctgaatgcctcttttattccttca

SEQ ID NO: 1783986 - DNA, 25 bp, Homo sapien
tccttcaggggccacaccaaatgtc

SEQ ID NO: 1783987 - DNA, 25 bp, Homo sapien
atgtcatttccgctatacatcctcc

SEQ ID NO: 1783988 - DNA, 25 bp, Homo sapien
tgaatgcctcttttattccttcagg

SEQ ID NO: 1783989 - DNA, 25 bp, Homo sapien
cactagccattggtccagagggaag

SEQ ID NO: 1783990 - DNA, 25 bp, Homo sapien
aacaaatgctcccttaccagtgata

SEQ ID NO: 1783991 - DNA, 25 bp, Homo sapien
tggatgatgtgctcggtctatgatg

SEQ ID NO: 1783992 - DNA, 25 bp, Homo sapien
ttcattatcctaggcagaacagggt

SEQ ID NO: 1783993 - DNA, 25 bp, Homo sapien
gataggcgctagtctcagtaacagc

SEQ ID NO: 1783994 - DNA, 25 bp, Homo sapien
taagagagacaaataccccaggacc

SEQ ID NO: 1783995 - DNA, 25 bp, Homo sapien
gggcatatccgcagccatgatgtcg

SEQ ID NO: 1783996 - DNA, 25 bp, Homo sapien
tctacaaccacacgcaacctgggat

SEQ ID NO: 1783997 - DNA, 25 bp, Homo sapien
tgttttgccaactatactctactaa

SEQ ID NO: 1783998 - DNA, 25 bp, Homo sapien
gactttggatagtggtaggactttc

SEQ ID NO: 1783999 - DNA, 25 bp, Homo sapien
tctaccttgaatggttattgtaagc

SEQ ID NO: 1784000 - DNA, 25 bp, Homo sapien
taccttccatctaccttgaatggtt

SEQ ID NO: 1784001 - DNA, 25 bp, Homo sapien
aatgcaaaaataactttgagggagg

SEQ ID NO: 1784002 - DNA, 25 bp, Homo sapien
tggggcttcctgcaagcgccaggca

SEQ ID NO: 1784003 - DNA, 25 bp, Homo sapien
gatgccaatcagtttttcacagtgg

SEQ ID NO: 1784004 - DNA, 25 bp, Homo sapien
cactgccccacaagttactggacac

SEQ ID NO: 1784005 - DNA, 25 bp, Homo sapien
cttgtgctggcttggccacacttca

SEQ ID NO: 1784006 - DNA, 25 bp, Homo sapien
tgctggcttggccacacttcatcca

SEQ ID NO: 1784007 - DNA, 25 bp, Homo sapien
ctggcttggccacacttcatccacc

SEQ ID NO: 1784008 - DNA, 25 bp, Homo sapien
tgtgctggcttggccacacttcatc

SEQ ID NO: 1784009 - DNA, 25 bp, Homo sapien
ggtaaggcacataaatcctagcatg

SEQ ID NO: 1784010 - DNA, 25 bp, Homo sapien
tttcaatggaacataatcgggcgac

SEQ ID NO: 1784011 - DNA, 25 bp, Homo sapien
gaaaccaatcaataacacgcaggta

SEQ ID NO: 1784012 - DNA, 25 bp, Homo sapien
ccagctgttgtgagattctggctca

SEQ ID NO: 1784013 - DNA, 25 bp, Homo sapien
gagcagtatgctttgggtcttcaaa

SEQ ID NO: 1784014 - DNA, 25 bp, Homo sapien
cagagagcagtatgctttgggtctt

SEQ ID NO: 1784015 - DNA, 25 bp, Homo sapien
cagcagagagcagtatgctttgggt

SEQ ID NO: 1784016 - DNA, 25 bp, Homo sapien
gagagcagtatgctttgggtcttca

SEQ ID NO: 1784017 - DNA, 25 bp, Homo sapien
aatatcatactgtgtgtgcaattct

SEQ ID NO: 1784018 - DNA, 25 bp, Homo sapien
gatatggtagtttagaaattcttcc

SEQ ID NO: 1784019 - DNA, 25 bp, Homo sapien
tcggtcttgaccatagctttggaga

SEQ ID NO: 1784020 - DNA, 25 bp, Homo sapien
tatgcccattacagagaattttgat

SEQ ID NO: 1784021 - DNA, 25 bp, Homo sapien
ggtgcgatgtcctcatctcgattaa

SEQ ID NO: 1784022 - DNA, 25 bp, Homo sapien
taatataaagggcagaaccgtcgtg

SEQ ID NO: 1784023 - DNA, 25 bp, Homo sapien
tatggcggtaagtccgctgctcctg

SEQ ID NO: 1784024 - DNA, 25 bp, Homo sapien
cagagaaggtacatatggcggtaag

SEQ ID NO: 1784025 - DNA, 25 bp, Homo sapien
catcatgtgattgtttatgcaaagt

SEQ ID NO: 1784026 - DNA, 25 bp, Homo sapien
tttggaagaacactatccagtcctt

SEQ ID NO: 1784027 - DNA, 25 bp, Homo sapien
ggatggtgaaccagaactcaggaca

SEQ ID NO: 1784028 - DNA, 25 bp, Homo sapien
gatgctccatggagatagggcctcc

SEQ ID NO: 1784029 - DNA, 25 bp, Homo sapien
tccacatggacatcctctggatgtc

SEQ ID NO: 1784030 - DNA, 25 bp, Homo sapien
ctttaccacatggtcgtaaagctcc

SEQ ID NO: 1784031 - DNA, 25 bp, Homo sapien
ttaccacatggtcgtaaagctcctc

SEQ ID NO: 1784032 - DNA, 25 bp, Homo sapien
tttaccacatggtcgtaaagctcct

SEQ ID NO: 1784033 - DNA, 25 bp, Homo sapien
gttttaaacatctgtggcatccctg

SEQ ID NO: 1784034 - DNA, 25 bp, Homo sapien
gacaggccatcagaaagtacatagt

SEQ ID NO: 1784035 - DNA, 25 bp, Homo sapien
taattgtgcagcctccctacttgac

SEQ ID NO: 1784036 - DNA, 25 bp, Homo sapien
tatgagtgcaaagtaacaagaccgt

SEQ ID NO: 1784037 - DNA, 25 bp, Homo sapien
tgaggactatgtggtatttcccatg

SEQ ID NO: 1784038 - DNA, 25 bp, Homo sapien
tgtgtctctttggaacgtggactga

SEQ ID NO: 1784039 - DNA, 25 bp, Homo sapien
tcttgggggtctataatgaggacta

SEQ ID NO: 1784040 - DNA, 25 bp, Homo sapien
catgcagagaatgagtaatgcttca

SEQ ID NO: 1784041 - DNA, 25 bp, Homo sapien
taagagcttcccacaaatggacagg

SEQ ID NO: 1784042 - DNA, 25 bp, Homo sapien
cataatgggacatgacgtgagggcc

SEQ ID NO: 1784043 - DNA, 25 bp, Homo sapien
aatagattcagatgcggagggccac

SEQ ID NO: 1784044 - DNA, 25 bp, Homo sapien
gttagagtcccagcaaaacagccag

SEQ ID NO: 1784045 - DNA, 25 bp, Homo sapien
tggagggtccggttaacagactaca

SEQ ID NO: 1784046 - DNA, 25 bp, Homo sapien
tagagttactcttcacacagcaagg

SEQ ID NO: 1784047 - DNA, 25 bp, Homo sapien
gactacaatctgcagccacacaatg

SEQ ID NO: 1784048 - DNA, 25 bp, Homo sapien
tgcaccgtagttctggcaagagtcc

SEQ ID NO: 1784049 - DNA, 25 bp, Homo sapien
tatcccttagagttgtttatgacta

SEQ ID NO: 1784050 - DNA, 25 bp, Homo sapien
tttgtgcaagtgatccagaatgagt

SEQ ID NO: 1784051 - DNA, 25 bp, Homo sapien
atggtaactaaaattctcaagcctt

SEQ ID NO: 1784052 - DNA, 25 bp, Homo sapien
tactactatttgttgagaagcatct

SEQ ID NO: 1784053 - DNA, 25 bp, Homo sapien
accactagggtgcagagacaacaga

SEQ ID NO: 1784054 - DNA, 25 bp, Homo sapien
ttgtttaaaaccactagggtgcaga

SEQ ID NO: 1784055 - DNA, 25 bp, Homo sapien
catttggggaaatgagatttggaat

SEQ ID NO: 1784056 - DNA, 25 bp, Homo sapien
gttattcagtgaacacatttgggga

SEQ ID NO: 1784057 - DNA, 25 bp, Homo sapien
cacacttggctttggtcagtgtgga

SEQ ID NO: 1784058 - DNA, 25 bp, Homo sapien
cccctagatccaaaactcaagactg

SEQ ID NO: 1784059 - DNA, 25 bp, Homo sapien
cctagatccaaaactcaagactgca

SEQ ID NO: 1784060 - DNA, 25 bp, Homo sapien
ctcccctagatccaaaactcaagac

SEQ ID NO: 1784061 - DNA, 25 bp, Homo sapien
ctcttattaaagtctatcttagaaa

SEQ ID NO: 1784062 - DNA, 25 bp, Homo sapien
gttaccattgaactaagtgtaagag

SEQ ID NO: 1784063 - DNA, 25 bp, Homo sapien
atctaaaacccactgttgcaatttc

SEQ ID NO: 1784064 - DNA, 25 bp, Homo sapien
ttgcttgcatctaaaacccactgtt

SEQ ID NO: 1784065 - DNA, 25 bp, Homo sapien
aactttatcagcttcagttggcaat

SEQ ID NO: 1784066 - DNA, 25 bp, Homo sapien
cagtctgtgaggtttctgctacaac

SEQ ID NO: 1784067 - DNA, 25 bp, Homo sapien
tggcaaggagcgcagtctgtgaggt

SEQ ID NO: 1784068 - DNA, 25 bp, Homo sapien
tctgctacaactttatcagcttcag

SEQ ID NO: 1784069 - DNA, 25 bp, Homo sapien
tctgtcaaggagagagtcatagacc

SEQ ID NO: 1784070 - DNA, 25 bp, Homo sapien
cctggagaagaccactaagctccct

SEQ ID NO: 1784071 - DNA, 25 bp, Homo sapien
cctcacagtcagttgatcacctctg

SEQ ID NO: 1784072 - DNA, 25 bp, Homo sapien
gagagtcatagacccagaagttctt

SEQ ID NO: 1784073 - DNA, 25 bp, Homo sapien
tatgtagtactcctgtttatctctg

SEQ ID NO: 1784074 - DNA, 25 bp, Homo sapien
agattatgtccccttggtgaattaa

SEQ ID NO: 1784075 - DNA, 25 bp, Homo sapien
gcctatgtttcctggcagttctatc

SEQ ID NO: 1784076 - DNA, 25 bp, Homo sapien
tcattttactcttagcccagctgtg

SEQ ID NO: 1784077 - DNA, 25 bp, Homo sapien
agaagggattggtgtcctatctttg

SEQ ID NO: 1784078 - DNA, 25 bp, Homo sapien
gggattggtgtcctatctttggcct

SEQ ID NO: 1784079 - DNA, 25 bp, Homo sapien
aagggattggtgtcctatctttggc

SEQ ID NO: 1784080 - DNA, 25 bp, Homo sapien
agggattggtgtcctatctttggcc

SEQ ID NO: 1784081 - DNA, 25 bp, Homo sapien
cagagtggccctttttgtcttgcca

SEQ ID NO: 1784082 - DNA, 25 bp, Homo sapien
ggcagagtggccctttttgtcttgc

SEQ ID NO: 1784083 - DNA, 25 bp, Homo sapien
gcagagtggccctttttgtcttgcc

SEQ ID NO: 1784084 - DNA, 25 bp, Homo sapien
agagtggccctttttgtcttgccat

SEQ ID NO: 1784085 - DNA, 25 bp, Homo sapien
tgttgatggtgtatcatcaacgagg

SEQ ID NO: 1784086 - DNA, 25 bp, Homo sapien
ggtgtatcatcaacgaggtcaccac

SEQ ID NO: 1784087 - DNA, 25 bp, Homo sapien
gatggtgtatcatcaacgaggtcac

SEQ ID NO: 1784088 - DNA, 25 bp, Homo sapien
ttgatggtgtatcatcaacgaggtc

SEQ ID NO: 1784089 - DNA, 25 bp, Homo sapien
ctttgagtgcccaaggggcagactt

SEQ ID NO: 1784090 - DNA, 25 bp, Homo sapien
ctccttcgtggcaaatttccagatc

SEQ ID NO: 1784091 - DNA, 25 bp, Homo sapien
tccttcgtggcaaatttccagatct

SEQ ID NO: 1784092 - DNA, 25 bp, Homo sapien
tgggcctggtatcaatgcgcaaatc

SEQ ID NO: 1784093 - DNA, 25 bp, Homo sapien
tgttgggcctggtatcaatgcgcaa

SEQ ID NO: 1784094 - DNA, 25 bp, Homo sapien
ttttgttgggcctggtatcaatgcg

SEQ ID NO: 1784095 - DNA, 25 bp, Homo sapien
ggcctggtatcaatgcgcaaatctg

SEQ ID NO: 1784096 - DNA, 25 bp, Homo sapien
ccacacatggttacagtatgggaca

SEQ ID NO: 1784097 - DNA, 25 bp, Homo sapien
ctggacaaccacacatggttacagt

SEQ ID NO: 1784098 - DNA, 25 bp, Homo sapien
cacatggttacagtatgggacattc

SEQ ID NO: 1784099 - DNA, 25 bp, Homo sapien
tggacaaccacacatggttacagta

SEQ ID NO: 1784100 - DNA, 25 bp, Homo sapien
ctctgatcttcagatgtgacattga

SEQ ID NO: 1784101 - DNA, 25 bp, Homo sapien
agttacatgatgcacccagcacacc

SEQ ID NO: 1784102 - DNA, 25 bp, Homo sapien
gccagttacatgatgcacccagcac

SEQ ID NO: 1784103 - DNA, 25 bp, Homo sapien
cagttacatgatgcacccagcacac

SEQ ID NO: 1784104 - DNA, 25 bp, Homo sapien
ccagttacatgatgcacccagcaca

SEQ ID NO: 1784105 - DNA, 25 bp, Homo sapien
ttttctgtgtatcccagatatagtt

SEQ ID NO: 1784106 - DNA, 25 bp, Homo sapien
taagatggttgtagacccaaagaag

SEQ ID NO: 1784107 - DNA, 25 bp, Homo sapien
tatcccagatatagttgttcagaac

SEQ ID NO: 1784108 - DNA, 25 bp, Homo sapien
gaagttcattaagatggttgtagac

SEQ ID NO: 1784109 - DNA, 25 bp, Homo sapien
aaatggagctctttataggagatcc

SEQ ID NO: 1784110 - DNA, 25 bp, Homo sapien
gactgttgccggcagtaattctctt

SEQ ID NO: 1784111 - DNA, 25 bp, Homo sapien
tctctgcatagactgttgccggcag

SEQ ID NO: 1784112 - DNA, 25 bp, Homo sapien
gatcctgtgtgaaggctaaaagaag

SEQ ID NO: 1784113 - DNA, 25 bp, Homo sapien
tctagcagaatggtagtaagacctc

SEQ ID NO: 1784114 - DNA, 25 bp, Homo sapien
catagaaagtggagatctgggtgac

SEQ ID NO: 1784115 - DNA, 25 bp, Homo sapien
gaggtccctttagctaactaaggca

SEQ ID NO: 1784116 - DNA, 25 bp, Homo sapien
tcagactttccgtgacagccactgg

SEQ ID NO: 1784117 - DNA, 25 bp, Homo sapien
caatcactacatgtctgtgctggcg

SEQ ID NO: 1784118 - DNA, 25 bp, Homo sapien
gcacagcttggataagattacgtgc

SEQ ID NO: 1784119 - DNA, 25 bp, Homo sapien
tacatacactttggacaggttttgc

SEQ ID NO: 1784120 - DNA, 25 bp, Homo sapien
tctgtgctggcgctttttccacctt

SEQ ID NO: 1784121 - DNA, 25 bp, Homo sapien
cactcactgtgcgttatttgtctga

SEQ ID NO: 1784122 - DNA, 25 bp, Homo sapien
ctgattccattgagctcctggcagg

SEQ ID NO: 1784123 - DNA, 25 bp, Homo sapien
tgattgtgtcagaggaaagagccag

SEQ ID NO: 1784124 - DNA, 25 bp, Homo sapien
gggatgtctagaatgctgtgattgt

SEQ ID NO: 1784125 - DNA, 25 bp, Homo sapien
ctctctagtggttttcaggtcatcc

SEQ ID NO: 1784126 - DNA, 25 bp, Homo sapien
caaatgactgtcaaatcaatcaagt

SEQ ID NO: 1784127 - DNA, 25 bp, Homo sapien
tcaagtcaagtgtaagcaggtactt

SEQ ID NO: 1784128 - DNA, 25 bp, Homo sapien
caggtcatcctctcatagaagtagt

SEQ ID NO: 1784129 - DNA, 25 bp, Homo sapien
gatggtcctaggtacataaacttaa

SEQ ID NO: 1784130 - DNA, 25 bp, Homo sapien
actagatggtcctaggtacataaac

SEQ ID NO: 1784131 - DNA, 25 bp, Homo sapien
tagatggtcctaggtacataaactt

SEQ ID NO: 1784132 - DNA, 25 bp, Homo sapien
ctaactagatggtcctaggtacata

SEQ ID NO: 1784133 - DNA, 25 bp, Homo sapien
ggcacaaaacatctgtctttgtgga

SEQ ID NO: 1784134 - DNA, 25 bp, Homo sapien
tggcacaaaacatctgtctttgtgg

SEQ ID NO: 1784135 - DNA, 25 bp, Homo sapien
ttggcacaaaacatctgtctttgtg

SEQ ID NO: 1784136 - DNA, 25 bp, Homo sapien
gcacaaaacatctgtctttgtggaa

SEQ ID NO: 1784137 - DNA, 25 bp, Homo sapien
tgtgacccctcttgtaaatgaggat

SEQ ID NO: 1784138 - DNA, 25 bp, Homo sapien
gaggccagcagtttgtgacccctct

SEQ ID NO: 1784139 - DNA, 25 bp, Homo sapien
ctaacagaacttgataggtagaagt

SEQ ID NO: 1784140 - DNA, 25 bp, Homo sapien
aaattccacgatgtaggcctaacag

SEQ ID NO: 1784141 - DNA, 25 bp, Homo sapien
gggataactgatactctattctaaa

SEQ ID NO: 1784142 - DNA, 25 bp, Homo sapien
gttccagatcttaaaatatttccta

SEQ ID NO: 1784143 - DNA, 25 bp, Homo sapien
ctgatactctattctaaaccattgt

SEQ ID NO: 1784144 - DNA, 25 bp, Homo sapien
gcccagccaagggataactgatact

SEQ ID NO: 1784145 - DNA, 25 bp, Homo sapien
gaaatgacctgcacgggtagctgga

SEQ ID NO: 1784146 - DNA, 25 bp, Homo sapien
tctgaaaaagatccgcggagtgccc

SEQ ID NO: 1784147 - DNA, 25 bp, Homo sapien
caaagatggttcagcgactggctcc

SEQ ID NO: 1784148 - DNA, 25 bp, Homo sapien
gcaggatacacttttgggaccagag

SEQ ID NO: 1784149 - DNA, 25 bp, Homo sapien
cagcacatgtgtcttgaacctcagc

SEQ ID NO: 1784150 - DNA, 25 bp, Homo sapien
ggcaagaaggtacaacacgccttcg

SEQ ID NO: 1784151 - DNA, 25 bp, Homo sapien
tccaaagcgttctcctgcagatggg

SEQ ID NO: 1784152 - DNA, 25 bp, Homo sapien
cctctcctgtggagaagctatcagg

SEQ ID NO: 1784153 - DNA, 25 bp, Homo sapien
ggtggaatgtgggtaacgtgctctg

SEQ ID NO: 1784154 - DNA, 25 bp, Homo sapien
tttggttttcatggctaaggaactg

SEQ ID NO: 1784155 - DNA, 25 bp, Homo sapien
ttttcatggctaaggaactggcaga

SEQ ID NO: 1784156 - DNA, 25 bp, Homo sapien
aaagtccttctcagaaatcctatga

SEQ ID NO: 1784157 - DNA, 25 bp, Homo sapien
tagggcttacaataggaaggactcc

SEQ ID NO: 1784158 - DNA, 25 bp, Homo sapien
cagaagcctggactagtggaaagca

SEQ ID NO: 1784159 - DNA, 25 bp, Homo sapien
gcagaacaaaatatgggactccaca

SEQ ID NO: 1784160 - DNA, 25 bp, Homo sapien
gaaggacttgtatgtactggaccag

SEQ ID NO: 1784161 - DNA, 25 bp, Homo sapien
agattaaaccacaagcagtttgttt

SEQ ID NO: 1784162 - DNA, 25 bp, Homo sapien
cagattaaaccacaagcagtttgtt

SEQ ID NO: 1784163 - DNA, 25 bp, Homo sapien
gattaaaccacaagcagtttgttta

SEQ ID NO: 1784164 - DNA, 25 bp, Homo sapien
ttaggcttttctttctcttcttcca

SEQ ID NO: 1784165 - DNA, 25 bp, Homo sapien
aggcttttctttctcttcttccata

SEQ ID NO: 1784166 - DNA, 25 bp, Homo sapien
ggcttttctttctcttcttccatac

SEQ ID NO: 1784167 - DNA, 25 bp, Homo sapien
taggcttttctttctcttcttccat

SEQ ID NO: 1784168 - DNA, 25 bp, Homo sapien
tagctcttgcgtttagacttggatc

SEQ ID NO: 1784169 - DNA, 25 bp, Homo sapien
ataaaaatccaaggtccaattctgg

SEQ ID NO: 1784170 - DNA, 25 bp, Homo sapien
aatggcggctcaatctagctcttgc

SEQ ID NO: 1784171 - DNA, 25 bp, Homo sapien
tgctgatgccaccaagttcctttga

SEQ ID NO: 1784172 - DNA, 25 bp, Homo sapien
aaaagccttactctatatatgcccc

SEQ ID NO: 1784173 - DNA, 25 bp, Homo sapien
aaatggtgctcatttgaggcaactg

SEQ ID NO: 1784174 - DNA, 25 bp, Homo sapien
aggtccccatggtggcctaggttca

SEQ ID NO: 1784175 - DNA, 25 bp, Homo sapien
caagagatgcaatacactcaggctt

SEQ ID NO: 1784176 - DNA, 25 bp, Homo sapien
ttcagggtggctttgtctttattag

SEQ ID NO: 1784177 - DNA, 25 bp, Homo sapien
cagggtggctttgtctttattagtc

SEQ ID NO: 1784178 - DNA, 25 bp, Homo sapien
ggctttgtctttattagtcagcatt

SEQ ID NO: 1784179 - DNA, 25 bp, Homo sapien
gtctttattagtcagcatttgcatc

SEQ ID NO: 1784180 - DNA, 25 bp, Homo sapien
tttgttgatctctctcaacattggg

SEQ ID NO: 1784181 - DNA, 25 bp, Homo sapien
caacattgggcaatcaatacttata

SEQ ID NO: 1784182 - DNA, 25 bp, Homo sapien
taattttggagtgaatggttttata

SEQ ID NO: 1784183 - DNA, 25 bp, Homo sapien
tgttgatctctctcaacattgggca

SEQ ID NO: 1784184 - DNA, 25 bp, Homo sapien
tgcgcaccaggggagcccacgctga

SEQ ID NO: 1784185 - DNA, 25 bp, Homo sapien
caggggagcccacgctgagccgcag

SEQ ID NO: 1784186 - DNA, 25 bp, Homo sapien
agcccacgctgagccgcagccccag

SEQ ID NO: 1784187 - DNA, 25 bp, Homo sapien
tctgcgcccagcctcgccaccccat

SEQ ID NO: 1784188 - DNA, 25 bp, Homo sapien
agttaaacctgcgtctaagcagctg

SEQ ID NO: 1784189 - DNA, 25 bp, Homo sapien
cgtctaagcagctgcggcggggcta

SEQ ID NO: 1784190 - DNA, 25 bp, Homo sapien
ttgttgccgtgtctgatcttcgagg

SEQ ID NO: 1784191 - DNA, 25 bp, Homo sapien
cacttgttgccgtgtctgatcttcg

SEQ ID NO: 1784192 - DNA, 25 bp, Homo sapien
acttgttgccgtgtctgatcttcga

SEQ ID NO: 1784193 - DNA, 25 bp, Homo sapien
cttgttgccgtgtctgatcttcgag

SEQ ID NO: 1784194 - DNA, 25 bp, Homo sapien
accagaggaatcaaagcacttctct

SEQ ID NO: 1784195 - DNA, 25 bp, Homo sapien
tatgagagtccttataggataggga

SEQ ID NO: 1784196 - DNA, 25 bp, Homo sapien
ggatagggagaaagataaaagactg

SEQ ID NO: 1784197 - DNA, 25 bp, Homo sapien
gactgtttcttccaccagaggaatc

SEQ ID NO: 1784198 - DNA, 25 bp, Homo sapien
gattcgtattgccaaatagcagctg

SEQ ID NO: 1784199 - DNA, 25 bp, Homo sapien
aatagcagctgatccaaatgcacag

SEQ ID NO: 1784200 - DNA, 25 bp, Homo sapien
ccctggatttcagtgattcgtattg

SEQ ID NO: 1784201 - DNA, 25 bp, Homo sapien
tcaaaataactctggacccctggat

SEQ ID NO: 1784202 - DNA, 25 bp, Homo sapien
gaaatatcagatcactgtccactgc

SEQ ID NO: 1784203 - DNA, 25 bp, Homo sapien
cgtttgcagctatgatacctgagtc

SEQ ID NO: 1784204 - DNA, 25 bp, Homo sapien
tatgatacctgagtccgctggccat

SEQ ID NO: 1784205 - DNA, 25 bp, Homo sapien
tattccaccgcttgttaatctcctt

SEQ ID NO: 1784206 - DNA, 25 bp, Homo sapien
gttcactatactgaaggagaagctc

SEQ ID NO: 1784207 - DNA, 25 bp, Homo sapien
aacattggagaacaacggacttttg

SEQ ID NO: 1784208 - DNA, 25 bp, Homo sapien
cactatactgaaggagaagctccac

SEQ ID NO: 1784209 - DNA, 25 bp, Homo sapien
cattggagaacaacggacttttgag

SEQ ID NO: 1784210 - DNA, 25 bp, Homo sapien
cttcgtgtggcaactttacacacat

SEQ ID NO: 1784211 - DNA, 25 bp, Homo sapien
tcttcgtgtggcaactttacacaca

SEQ ID NO: 1784212 - DNA, 25 bp, Homo sapien
ctgtgaatgtgaacattggaagtaa

SEQ ID NO: 1784213 - DNA, 25 bp, Homo sapien
gatcatcatgatggcgcgagatgca

SEQ ID NO: 1784214 - DNA, 25 bp, Homo sapien
ttagtgcggacagctgcgaggatca

SEQ ID NO: 1784215 - DNA, 25 bp, Homo sapien
tgaacattggaagtaaataatggca

SEQ ID NO: 1784216 - DNA, 25 bp, Homo sapien
cgttaatggattgtagggcatttcc

SEQ ID NO: 1784217 - DNA, 25 bp, Homo sapien
tatccgtggcgttaatggattgtag

SEQ ID NO: 1784218 - DNA, 25 bp, Homo sapien
cctgccatatccgtggcgttaatgg

SEQ ID NO: 1784219 - DNA, 25 bp, Homo sapien
ttaatggattgtagggcatttcctg

SEQ ID NO: 1784220 - DNA, 25 bp, Homo sapien
tgcataatcaaaaaatttccgtccc

SEQ ID NO: 1784221 - DNA, 25 bp, Homo sapien
tattccaaagagagctcccccaaga

SEQ ID NO: 1784222 - DNA, 25 bp, Homo sapien
ccccaagatgtgctgcataatcaaa

SEQ ID NO: 1784223 - DNA, 25 bp, Homo sapien
gtgctgcataatcaaaaaatttccg

SEQ ID NO: 1784224 - DNA, 25 bp, Homo sapien
ccatgatcactctagggccgatgtc

SEQ ID NO: 1784225 - DNA, 25 bp, Homo sapien
caggcgggaacgtagccatgatcac

SEQ ID NO: 1784226 - DNA, 25 bp, Homo sapien
ggctctccggcaggacaagacaggt

SEQ ID NO: 1784227 - DNA, 25 bp, Homo sapien
caagacaggtgcaccggtactgtgc

SEQ ID NO: 1784228 - DNA, 25 bp, Homo sapien
catacatttggtcaacaatcatgaa

SEQ ID NO: 1784229 - DNA, 25 bp, Homo sapien
gacatacatttggtcaacaatcatg

SEQ ID NO: 1784230 - DNA, 25 bp, Homo sapien
agccacagtgagatagataccattt

SEQ ID NO: 1784231 - DNA, 25 bp, Homo sapien
acatttggtcaacaatcatgaaaaa

SEQ ID NO: 1784232 - DNA, 25 bp, Homo sapien
ggagagatgattgcctcctaaatat

SEQ ID NO: 1784233 - DNA, 25 bp, Homo sapien
aatttcaattctatagttacataag

SEQ ID NO: 1784234 - DNA, 25 bp, Homo sapien
aaataatctactccttgagatttcc

SEQ ID NO: 1784235 - DNA, 25 bp, Homo sapien
caggtgtcaacttctgtagatgtca

SEQ ID NO: 1784236 - DNA, 25 bp, Homo sapien
tatgctgctgggcaagccaagttgc

SEQ ID NO: 1784237 - DNA, 25 bp, Homo sapien
acaggaggtttcaaggcagagtttc

SEQ ID NO: 1784238 - DNA, 25 bp, Homo sapien
gatcagtctttacatataggcacag

SEQ ID NO: 1784239 - DNA, 25 bp, Homo sapien
tttgtaattacactggaaccactgg

SEQ ID NO: 1784240 - DNA, 25 bp, Homo sapien
aaaggcaatgaaaggtgttattctg

SEQ ID NO: 1784241 - DNA, 25 bp, Homo sapien
tgtctggatctacagctggagctcc

SEQ ID NO: 1784242 - DNA, 25 bp, Homo sapien
taagaactatgctatttgaactgac

SEQ ID NO: 1784243 - DNA, 25 bp, Homo sapien
ttaagattgcccctttccactgtcc

SEQ ID NO: 1784244 - DNA, 25 bp, Homo sapien
gcttgaagaacacctaaaagagatg

SEQ ID NO: 1784245 - DNA, 25 bp, Homo sapien
tattatcagtggttgaccgtcccta

SEQ ID NO: 1784246 - DNA, 25 bp, Homo sapien
tgatctggattggtccttgcaggca

SEQ ID NO: 1784247 - DNA, 25 bp, Homo sapien
tagggcaaaagactaagactcaggc

SEQ ID NO: 1784248 - DNA, 25 bp, Homo sapien
acatatgtgtttcagacagaaatct

SEQ ID NO: 1784249 - DNA, 25 bp, Homo sapien
tgacacaccaattttaagtggtaaa

SEQ ID NO: 1784250 - DNA, 25 bp, Homo sapien
atatgtgtttcagacagaaatctgc

SEQ ID NO: 1784251 - DNA, 25 bp, Homo sapien
gctgacacaccaattttaagtggta

SEQ ID NO: 1784252 - DNA, 25 bp, Homo sapien
tctgggcttgctgtttggctgtagc

SEQ ID NO: 1784253 - DNA, 25 bp, Homo sapien
gggcttgctgtttggctgtagccac

SEQ ID NO: 1784254 - DNA, 25 bp, Homo sapien
ggcttgctgtttggctgtagccacc

SEQ ID NO: 1784255 - DNA, 25 bp, Homo sapien
tgggcttgctgtttggctgtagcca

SEQ ID NO: 1784256 - DNA, 25 bp, Homo sapien
aaattcacgggagcgctcagggaag

SEQ ID NO: 1784257 - DNA, 25 bp, Homo sapien
actggccagctcaaattcacgggag

SEQ ID NO: 1784258 - DNA, 25 bp, Homo sapien
ctcagggaagatgccgaagagaagt

SEQ ID NO: 1784259 - DNA, 25 bp, Homo sapien
cagctcaaattcacgggagcgctca

SEQ ID NO: 1784260 - DNA, 25 bp, Homo sapien
gccgttccagtttgcccctccacat

SEQ ID NO: 1784261 - DNA, 25 bp, Homo sapien
agcgagtgacatgcaccttcgaggg

SEQ ID NO: 1784262 - DNA, 25 bp, Homo sapien
tgtgctccatcaggccgttccagtt

SEQ ID NO: 1784263 - DNA, 25 bp, Homo sapien
ggtggctgaggctctagatgcttga

SEQ ID NO: 1784264 - DNA, 25 bp, Homo sapien
cattcccgcagatttgctctttgca

SEQ ID NO: 1784265 - DNA, 25 bp, Homo sapien
taaagcatcctaagcaaatagagag

SEQ ID NO: 1784266 - DNA, 25 bp, Homo sapien
caaaactgtggtgtcgaggtgtaaa

SEQ ID NO: 1784267 - DNA, 25 bp, Homo sapien
gagctttcacaccattcccgcagat

SEQ ID NO: 1784268 - DNA, 25 bp, Homo sapien
gaccctgcacccagaatgggtatct

SEQ ID NO: 1784269 - DNA, 25 bp, Homo sapien
tcaagacaggtttaccaggaccctg

SEQ ID NO: 1784270 - DNA, 25 bp, Homo sapien
gacaggtttaccaggaccctgcacc

SEQ ID NO: 1784271 - DNA, 25 bp, Homo sapien
aagacaggtttaccaggaccctgca

SEQ ID NO: 1784272 - DNA, 25 bp, Homo sapien
ctattaagtcaatttcatggcacat

SEQ ID NO: 1784273 - DNA, 25 bp, Homo sapien
tttcctattaagtcaatttcatggc

SEQ ID NO: 1784274 - DNA, 25 bp, Homo sapien
tttttcctattaagtcaatttcatg

SEQ ID NO: 1784275 - DNA, 25 bp, Homo sapien
tcctattaagtcaatttcatggcac

SEQ ID NO: 1784276 - DNA, 25 bp, Homo sapien
tctttgttcaccctgcttggtcggg

SEQ ID NO: 1784277 - DNA, 25 bp, Homo sapien
ggctgatgtaatcaatgtcctgatc

SEQ ID NO: 1784278 - DNA, 25 bp, Homo sapien
gacacattgatgaagaccctctctt

SEQ ID NO: 1784279 - DNA, 25 bp, Homo sapien
taaggactgaggaagtggttccatg

SEQ ID NO: 1784280 - DNA, 25 bp, Homo sapien
gtcgtggattactgagcaggccctc

SEQ ID NO: 1784281 - DNA, 25 bp, Homo sapien
gatttgcagttctggacggtttcca

SEQ ID NO: 1784282 - DNA, 25 bp, Homo sapien
tagcccaatgataggcccagaggtg

SEQ ID NO: 1784283 - DNA, 25 bp, Homo sapien
gtgaattggcaccaccgagaggacg

SEQ ID NO: 1784284 - DNA, 25 bp, Homo sapien
tggactggggcacagttccctccat

SEQ ID NO: 1784285 - DNA, 25 bp, Homo sapien
taacctatcgaaaatctgtcctaaa

SEQ ID NO: 1784286 - DNA, 25 bp, Homo sapien
ccctcttcagtaattaacctatcga

SEQ ID NO: 1784287 - DNA, 25 bp, Homo sapien
tgtcctaaatgtttggactggggca

SEQ ID NO: 1784288 - DNA, 25 bp, Homo sapien
attttgaacacaacactggaaaggg

SEQ ID NO: 1784289 - DNA, 25 bp, Homo sapien
atttgttggttctgtcatttgagcg

SEQ ID NO: 1784290 - DNA, 25 bp, Homo sapien
ctggaaagggtatccacagcaggaa

SEQ ID NO: 1784291 - DNA, 25 bp, Homo sapien
acagccctctgggcgcactgtgtgc

SEQ ID NO: 1784292 - DNA, 25 bp, Homo sapien
ttcggaaaaaggaatgtcagaaatc

SEQ ID NO: 1784293 - DNA, 25 bp, Homo sapien
cggaaaaaggaatgtcagaaatctt

SEQ ID NO: 1784294 - DNA, 25 bp, Homo sapien
gaaaaaggaatgtcagaaatcttga

SEQ ID NO: 1784295 - DNA, 25 bp, Homo sapien
aaaggaatgtcagaaatcttgaaca

SEQ ID NO: 1784296 - DNA, 25 bp, Homo sapien
agtgtatccctggatatcgggctga

SEQ ID NO: 1784297 - DNA, 25 bp, Homo sapien
tatccctggatatcgggctgaggaa

SEQ ID NO: 1784298 - DNA, 25 bp, Homo sapien
gaagcagtggaaatgttaaagacct

SEQ ID NO: 1784299 - DNA, 25 bp, Homo sapien
tgttaaagaccttctacaaacaaga

SEQ ID NO: 1784300 - DNA, 25 bp, Homo sapien
ccaagggaggcaagagcggtcagac

SEQ ID NO: 1784301 - DNA, 25 bp, Homo sapien
gggcagctgtgacgggactggctgg

SEQ ID NO: 1784302 - DNA, 25 bp, Homo sapien
tctgagtgtgcgagtggagtggagg

SEQ ID NO: 1784303 - DNA, 25 bp, Homo sapien
aggcaagagcggtcagacagagcag

SEQ ID NO: 1784304 - DNA, 25 bp, Homo sapien
aatattgcctctgctgacctaccaa

SEQ ID NO: 1784305 - DNA, 25 bp, Homo sapien
ggttgtggctctgttctaaatattg

SEQ ID NO: 1784306 - DNA, 25 bp, Homo sapien
tggctgtcagaatgaacgatttggt

SEQ ID NO: 1784307 - DNA, 25 bp, Homo sapien
aaatcccgctggttgtatatggctg

SEQ ID NO: 1784308 - DNA, 25 bp, Homo sapien
tatctcacaggtaaatgagccctac

SEQ ID NO: 1784309 - DNA, 25 bp, Homo sapien
gtgattcacccatgtagccccttgg

SEQ ID NO: 1784310 - DNA, 25 bp, Homo sapien
caagagctagcagagtacatgtgta

SEQ ID NO: 1784311 - DNA, 25 bp, Homo sapien
tacttgcgtaagtccacataattgg

SEQ ID NO: 1784312 - DNA, 25 bp, Homo sapien
tgctgggggagttcagccactgtca

SEQ ID NO: 1784313 - DNA, 25 bp, Homo sapien
ctgctgggggagttcagccactgtc

SEQ ID NO: 1784314 - DNA, 25 bp, Homo sapien
gggagttcagccactgtcagggcct

SEQ ID NO: 1784315 - DNA, 25 bp, Homo sapien
tgggggagttcagccactgtcaggg

SEQ ID NO: 1784316 - DNA, 25 bp, Homo sapien
ggtttggacatgaagcattttctcc

SEQ ID NO: 1784317 - DNA, 25 bp, Homo sapien
gcctctgttagatagaggccatact

SEQ ID NO: 1784318 - DNA, 25 bp, Homo sapien
gcagcctctgttagatagaggccat

SEQ ID NO: 1784319 - DNA, 25 bp, Homo sapien
ctctgttagatagaggccatactgg

SEQ ID NO: 1784320 - DNA, 25 bp, Homo sapien
acgtttttagtcctgcggatgggat

SEQ ID NO: 1784321 - DNA, 25 bp, Homo sapien
cagtggcatcctgatactgttggta

SEQ ID NO: 1784322 - DNA, 25 bp, Homo sapien
gatactgttggtactctgataccag

SEQ ID NO: 1784323 - DNA, 25 bp, Homo sapien
tactgatgaaagtggtggacgtttt

SEQ ID NO: 1784324 - DNA, 25 bp, Homo sapien
cccatttcctcagtccactcctcag

SEQ ID NO: 1784325 - DNA, 25 bp, Homo sapien
cccccatttcctcagtccactcctc

SEQ ID NO: 1784326 - DNA, 25 bp, Homo sapien
catttcctcagtccactcctcagac

SEQ ID NO: 1784327 - DNA, 25 bp, Homo sapien
tacgcccccatttcctcagtccact

SEQ ID NO: 1784328 - DNA, 25 bp, Homo sapien
tataataattgccatagctacactg

SEQ ID NO: 1784329 - DNA, 25 bp, Homo sapien
tgtctatattaaccaaacctcggga

SEQ ID NO: 1784330 - DNA, 25 bp, Homo sapien
tcttcaagccttttgaacttgcata

SEQ ID NO: 1784331 - DNA, 25 bp, Homo sapien
tagtagcctatggtgcatttgtcta

SEQ ID NO: 1784332 - DNA, 25 bp, Homo sapien
gataaagcagctgatcggtgaagtg

SEQ ID NO: 1784333 - DNA, 25 bp, Homo sapien
gaatctggcccttggtaggtgctcc

SEQ ID NO: 1784334 - DNA, 25 bp, Homo sapien
aacaaatgaataagtggagccaggt

SEQ ID NO: 1784335 - DNA, 25 bp, Homo sapien
catgcgctagtgagagatatataca

SEQ ID NO: 1784336 - DNA, 25 bp, Homo sapien
tcctcaacaatgacgttatttgtcc

SEQ ID NO: 1784337 - DNA, 25 bp, Homo sapien
ctcagcatggcaggctcggccattc

SEQ ID NO: 1784338 - DNA, 25 bp, Homo sapien
tattccgatcgctcatatttgctct

SEQ ID NO: 1784339 - DNA, 25 bp, Homo sapien
ttaaaatattccgatcgctcatatt

SEQ ID NO: 1784340 - DNA, 25 bp, Homo sapien
aaatagtatctgatcttggtctttc

SEQ ID NO: 1784341 - DNA, 25 bp, Homo sapien
ttaaatagtatctgatcttggtctt

SEQ ID NO: 1784342 - DNA, 25 bp, Homo sapien
atagtatctgatcttggtctttccc

SEQ ID NO: 1784343 - DNA, 25 bp, Homo sapien
tagtatctgatcttggtctttcccc

SEQ ID NO: 1784344 - DNA, 25 bp, Homo sapien
agcttccgagatcgggggacattca

SEQ ID NO: 1784345 - DNA, 25 bp, Homo sapien
acattcagggtggtatggaggtaga

SEQ ID NO: 1784346 - DNA, 25 bp, Homo sapien
attcagggtggtatggaggtagaca

SEQ ID NO: 1784347 - DNA, 25 bp, Homo sapien
ttagcttccgagatcgggggacatt

SEQ ID NO: 1784348 - DNA, 25 bp, Homo sapien
aagcccaggtccgttcagaaatagc

SEQ ID NO: 1784349 - DNA, 25 bp, Homo sapien
gaacaactggctttactgcctcgaa

SEQ ID NO: 1784350 - DNA, 25 bp, Homo sapien
tagctcccgagtgccttttcattag

SEQ ID NO: 1784351 - DNA, 25 bp, Homo sapien
gggcgtggactacagcaaagcagct

SEQ ID NO: 1784352 - DNA, 25 bp, Homo sapien
gtcccgttctgtgctctcccgaaat

SEQ ID NO: 1784353 - DNA, 25 bp, Homo sapien
caggaaactgtttcttcgtcacctg

SEQ ID NO: 1784354 - DNA, 25 bp, Homo sapien
caaacgtgactttccgcagagactg

SEQ ID NO: 1784355 - DNA, 25 bp, Homo sapien
ctggcccagatgacccagcaagagc

SEQ ID NO: 1784356 - DNA, 25 bp, Homo sapien
ttttgtggcgtttcagaaaattcca

SEQ ID NO: 1784357 - DNA, 25 bp, Homo sapien
gcccaggaagatgcatttctttttg

SEQ ID NO: 1784358 - DNA, 25 bp, Homo sapien
ccgtgcccaggaagatgcatttctt

SEQ ID NO: 1784359 - DNA, 25 bp, Homo sapien
gtgcccaggaagatgcatttctttt

SEQ ID NO: 1784360 - DNA, 25 bp, Homo sapien
tattgaatgcccaaacttctctgcg

SEQ ID NO: 1784361 - DNA, 25 bp, Homo sapien
tgaatgcccaaacttctctgcgcat

SEQ ID NO: 1784362 - DNA, 25 bp, Homo sapien
ctattgaatgcccaaacttctctgc

SEQ ID NO: 1784363 - DNA, 25 bp, Homo sapien
cccactattgaatgcccaaacttct

SEQ ID NO: 1784364 - DNA, 25 bp, Homo sapien
tgtcgtcgtgcttgggcaatgtatt

SEQ ID NO: 1784365 - DNA, 25 bp, Homo sapien
tcaaaatgatattgtcgtcgtgctt

SEQ ID NO: 1784366 - DNA, 25 bp, Homo sapien
aatgatattgtcgtcgtgcttgggc

SEQ ID NO: 1784367 - DNA, 25 bp, Homo sapien
tattgtcgtcgtgcttgggcaatgt

SEQ ID NO: 1784368 - DNA, 25 bp, Homo sapien
ctgtgaggctctcggaattcagttg

SEQ ID NO: 1784369 - DNA, 25 bp, Homo sapien
agctgtgaggctctcggaattcagt

SEQ ID NO: 1784370 - DNA, 25 bp, Homo sapien
ctctcagtgttggaagcatggacag

SEQ ID NO: 1784371 - DNA, 25 bp, Homo sapien
cctctctcagtgttggaagcatgga

SEQ ID NO: 1784372 - DNA, 25 bp, Homo sapien
ccatatttctagcttgtttgaaggc

SEQ ID NO: 1784373 - DNA, 25 bp, Homo sapien
cccatatttctagcttgtttgaagg

SEQ ID NO: 1784374 - DNA, 25 bp, Homo sapien
ttcagatcctcccatatttctagct

SEQ ID NO: 1784375 - DNA, 25 bp, Homo sapien
ttattatcttcagatcctcccatat

SEQ ID NO: 1784376 - DNA, 25 bp, Homo sapien
tcacagagaaaagaaaagcatttgg

SEQ ID NO: 1784377 - DNA, 25 bp, Homo sapien
cacagagaaaagaaaagcatttggt

SEQ ID NO: 1784378 - DNA, 25 bp, Homo sapien
cttcacagagaaaagaaaagcattt

SEQ ID NO: 1784379 - DNA, 25 bp, Homo sapien
acagagaaaagaaaagcatttggta

SEQ ID NO: 1784380 - DNA, 25 bp, Homo sapien
tacagccacagtacttcttgtgaaa

SEQ ID NO: 1784381 - DNA, 25 bp, Homo sapien
tatatccaccaattatgtttaactg

SEQ ID NO: 1784382 - DNA, 25 bp, Homo sapien
cattatccaggtaaatatatccacc

SEQ ID NO: 1784383 - DNA, 25 bp, Homo sapien
tggacccgcaaaagaacaaccagca

SEQ ID NO: 1784384 - DNA, 25 bp, Homo sapien
aagtaggtgctgaatacttgataaa

SEQ ID NO: 1784385 - DNA, 25 bp, Homo sapien
taatgacagtgatcaattctgtcag

SEQ ID NO: 1784386 - DNA, 25 bp, Homo sapien
cacagcttgtttaatgacagtgatc

SEQ ID NO: 1784387 - DNA, 25 bp, Homo sapien
aaccttctgcacagcttgtttaatg

SEQ ID NO: 1784388 - DNA, 25 bp, Homo sapien
atgacagtgatcaattctgtcaggc

SEQ ID NO: 1784389 - DNA, 25 bp, Homo sapien
gtcagaaaagtcaaagaaaaatgcc

SEQ ID NO: 1784390 - DNA, 25 bp, Homo sapien
tcagaaaagtcaaagaaaaatgcct

SEQ ID NO: 1784391 - DNA, 25 bp, Homo sapien
cagaaaagtcaaagaaaaatgcctt

SEQ ID NO: 1784392 - DNA, 25 bp, Homo sapien
gcactgctaatggagtttcttcatc

SEQ ID NO: 1784393 - DNA, 25 bp, Homo sapien
tcatctggcatcatataatggcata

SEQ ID NO: 1784394 - DNA, 25 bp, Homo sapien
gctgctcaacgagatttctgatttc

SEQ ID NO: 1784395 - DNA, 25 bp, Homo sapien
caagaagaagacttatgctgctcaa

SEQ ID NO: 1784396 - DNA, 25 bp, Homo sapien
gtctgagactctatgtgtcctttca

SEQ ID NO: 1784397 - DNA, 25 bp, Homo sapien
tttatcagtaagagattttatcagg

SEQ ID NO: 1784398 - DNA, 25 bp, Homo sapien
ttttatcaggatatgtgtgtgtctt

SEQ ID NO: 1784399 - DNA, 25 bp, Homo sapien
tggtgcaaccatagcacaccacgga

SEQ ID NO: 1784400 - DNA, 25 bp, Homo sapien
taagtctatgttctatcaacaataa

SEQ ID NO: 1784401 - DNA, 25 bp, Homo sapien
ctaagtctatgttctatcaacaata

SEQ ID NO: 1784402 - DNA, 25 bp, Homo sapien
agtctatgttctatcaacaataaaa

SEQ ID NO: 1784403 - DNA, 25 bp, Homo sapien
aagtctatgttctatcaacaataaa

SEQ ID NO: 1784404 - DNA, 25 bp, Homo sapien
gaagtttaatagtggtaatgtctcg

SEQ ID NO: 1784405 - DNA, 25 bp, Homo sapien
taatgtctcgaggagaaagtccaca

SEQ ID NO: 1784406 - DNA, 25 bp, Homo sapien
ctttccaacatgtctctagtttcat

SEQ ID NO: 1784407 - DNA, 25 bp, Homo sapien
caacatgtctctagtttcattgaga

SEQ ID NO: 1784408 - DNA, 25 bp, Homo sapien
cagtttgagtaggaaatcttatcta

SEQ ID NO: 1784409 - DNA, 25 bp, Homo sapien
gctgagttaccctaagaaatccctg

SEQ ID NO: 1784410 - DNA, 25 bp, Homo sapien
aatagtctcaagtacattcaacata

SEQ ID NO: 1784411 - DNA, 25 bp, Homo sapien
ttataccgaccatgttgttcaagaa

SEQ ID NO: 1784412 - DNA, 25 bp, Homo sapien
cagccatattgtctagaagtctact

SEQ ID NO: 1784413 - DNA, 25 bp, Homo sapien
gcaggtcctgttcagtaggtcgaaa

SEQ ID NO: 1784414 - DNA, 25 bp, Homo sapien
tgtctagaagtctactaaaacctcg

SEQ ID NO: 1784415 - DNA, 25 bp, Homo sapien
gtaggtcgaaagaactcagccatat

SEQ ID NO: 1784416 - DNA, 25 bp, Homo sapien
taatggaataacattagagaatgca

SEQ ID NO: 1784417 - DNA, 25 bp, Homo sapien
agtacttcaatatagtggcaaagtt

SEQ ID NO: 1784418 - DNA, 25 bp, Homo sapien
tgcagtaatggaataacattagaga

SEQ ID NO: 1784419 - DNA, 25 bp, Homo sapien
tacttcaatatagtggcaaagtttc

SEQ ID NO: 1784420 - DNA, 25 bp, Homo sapien
tacagaagtgagctatcatacctga

SEQ ID NO: 1784421 - DNA, 25 bp, Homo sapien
gaacaactggctttaccacttgacc

SEQ ID NO: 1784422 - DNA, 25 bp, Homo sapien
tgtgtcttagtctcctcacctggaa

SEQ ID NO: 1784423 - DNA, 25 bp, Homo sapien
caaaattggtcttctcctagcctta

SEQ ID NO: 1784424 - DNA, 25 bp, Homo sapien
ccagtgttctcagatgacagccata

SEQ ID NO: 1784425 - DNA, 25 bp, Homo sapien
tgcactgtattgtcccagcacatag

SEQ ID NO: 1784426 - DNA, 25 bp, Homo sapien
gtgctgaagctagggtgtacaacca

SEQ ID NO: 1784427 - DNA, 25 bp, Homo sapien
aaggtcttgtgtacagtggacatcc

SEQ ID NO: 1784428 - DNA, 25 bp, Homo sapien
caaatatgggcattatccctggcac

SEQ ID NO: 1784429 - DNA, 25 bp, Homo sapien
tagagttgggcatttcagtttttgc

SEQ ID NO: 1784430 - DNA, 25 bp, Homo sapien
tatatcatgagttccctagagttgg

SEQ ID NO: 1784431 - DNA, 25 bp, Homo sapien
gtgaaccacaccattatctatcagg

SEQ ID NO: 1784432 - DNA, 25 bp, Homo sapien
tattggaattatcttagctaaaggc

SEQ ID NO: 1784433 - DNA, 25 bp, Homo sapien
ttggaattatcttagctaaaggcag

SEQ ID NO: 1784434 - DNA, 25 bp, Homo sapien
taggtgtttcactgcaaactgaatg

SEQ ID NO: 1784435 - DNA, 25 bp, Homo sapien
ggatctgtccgtttactattggaat

SEQ ID NO: 1784436 - DNA, 25 bp, Homo sapien
caagttacactaagaagatgtcagc

SEQ ID NO: 1784437 - DNA, 25 bp, Homo sapien
tccaagtttgcacatgactcagaaa

SEQ ID NO: 1784438 - DNA, 25 bp, Homo sapien
gcttaggccatagggtctcttctca

SEQ ID NO: 1784439 - DNA, 25 bp, Homo sapien
agatgtcagctttatgcttaggcca

SEQ ID NO: 1784440 - DNA, 25 bp, Homo sapien
ctcagtgctctccacgttcccaaga

SEQ ID NO: 1784441 - DNA, 25 bp, Homo sapien
tgatgacaccacagtgaaaggagga

SEQ ID NO: 1784442 - DNA, 25 bp, Homo sapien
gtgggaaaatgtgcatgtgaaggac

SEQ ID NO: 1784443 - DNA, 25 bp, Homo sapien
gaaacgaactcttagtctcagtgct

SEQ ID NO: 1784444 - DNA, 25 bp, Homo sapien
tgctggaagctgacataacacggtt

SEQ ID NO: 1784445 - DNA, 25 bp, Homo sapien
catgaacagtagcagacaggtccac

SEQ ID NO: 1784446 - DNA, 25 bp, Homo sapien
tccatgatagaaaaggttgacagcc

SEQ ID NO: 1784447 - DNA, 25 bp, Homo sapien
caccagtctgtgaaagggtccatga

SEQ ID NO: 1784448 - DNA, 25 bp, Homo sapien
tgctgaggggtactaaaagcttcat

SEQ ID NO: 1784449 - DNA, 25 bp, Homo sapien
catacacattagcagcaaagtcttt

SEQ ID NO: 1784450 - DNA, 25 bp, Homo sapien
taaaagcttcatacacattagcagc

SEQ ID NO: 1784451 - DNA, 25 bp, Homo sapien
gggtactaaaagcttcatacacatt

SEQ ID NO: 1784452 - DNA, 25 bp, Homo sapien
caggcattttgataacaaactgtta

SEQ ID NO: 1784453 - DNA, 25 bp, Homo sapien
caaactgttactctaagtataggtg

SEQ ID NO: 1784454 - DNA, 25 bp, Homo sapien
tataggtgatttacccagtgtattt

SEQ ID NO: 1784455 - DNA, 25 bp, Homo sapien
tatcaggcattttgataacaaactg

SEQ ID NO: 1784456 - DNA, 25 bp, Homo sapien
tttagtcagtttggaacaaatgtcc

SEQ ID NO: 1784457 - DNA, 25 bp, Homo sapien
tacagcagtctagggaacattataa

SEQ ID NO: 1784458 - DNA, 25 bp, Homo sapien
gcccacaaaaactggtctgttgatg

SEQ ID NO: 1784459 - DNA, 25 bp, Homo sapien
gctggagaaaagtctgattcacttc

SEQ ID NO: 1784460 - DNA, 25 bp, Homo sapien
catcatagttgttggaattcactat

SEQ ID NO: 1784461 - DNA, 25 bp, Homo sapien
gcaaagaacatagttcatcatagtt

SEQ ID NO: 1784462 - DNA, 25 bp, Homo sapien
tagcctctaaaccaatatgtaactt

SEQ ID NO: 1784463 - DNA, 25 bp, Homo sapien
tgagtaaacagcatcaacacaattt

SEQ ID NO: 1784464 - DNA, 25 bp, Homo sapien
gttacgctggaggaacataaaacaa

SEQ ID NO: 1784465 - DNA, 25 bp, Homo sapien
tgaaacttaaactagcatgctctct

SEQ ID NO: 1784466 - DNA, 25 bp, Homo sapien
gcaccaagtacacgaccaattaaaa

SEQ ID NO: 1784467 - DNA, 25 bp, Homo sapien
tactgttcagctacatgttacgctg

SEQ ID NO: 1784468 - DNA, 25 bp, Homo sapien
aggtgtctatggtgagggctatggc

SEQ ID NO: 1784469 - DNA, 25 bp, Homo sapien
tgtctatggtgagggctatggctcc

SEQ ID NO: 1784470 - DNA, 25 bp, Homo sapien
tgggctcagaggtgtctatggtgag

SEQ ID NO: 1784471 - DNA, 25 bp, Homo sapien
cagaggtgtctatggtgagggctat

SEQ ID NO: 1784472 - DNA, 25 bp, Homo sapien
tcaaaattgacctggtagctggcca

SEQ ID NO: 1784473 - DNA, 25 bp, Homo sapien
cactcaggactttgtggtctcaaaa

SEQ ID NO: 1784474 - DNA, 25 bp, Homo sapien
gcatagatgttcttgccacccagga

SEQ ID NO: 1784475 - DNA, 25 bp, Homo sapien
tgtcccagcgagactgacagcagtc

SEQ ID NO: 1784476 - DNA, 25 bp, Homo sapien
tgaccacaccctgtagatctttttg

SEQ ID NO: 1784477 - DNA, 25 bp, Homo sapien
ccaaatctaccactgaagggacctt

SEQ ID NO: 1784478 - DNA, 25 bp, Homo sapien
cctggaggtccaatatgacatttag

SEQ ID NO: 1784479 - DNA, 25 bp, Homo sapien
ggtgagaataccacataagcccagt

SEQ ID NO: 1784480 - DNA, 25 bp, Homo sapien
ttgtcctgcttagaaggttttcagg

SEQ ID NO: 1784481 - DNA, 25 bp, Homo sapien
tatcaggtgtctataattgtagcac

SEQ ID NO: 1784482 - DNA, 25 bp, Homo sapien
aaccattttaactctccagtgcact

SEQ ID NO: 1784483 - DNA, 25 bp, Homo sapien
taaggctaggaactatcaggtgtct

SEQ ID NO: 1784484 - DNA, 25 bp, Homo sapien
ggctgatgctgcaagttatgtctaa

SEQ ID NO: 1784485 - DNA, 25 bp, Homo sapien
gcagactctggtttcagagccactt

SEQ ID NO: 1784486 - DNA, 25 bp, Homo sapien
gaatttgcttagtatagtaagacta

SEQ ID NO: 1784487 - DNA, 25 bp, Homo sapien
caaaataaccctagaatatgtaggg

SEQ ID NO: 1784488 - DNA, 25 bp, Homo sapien
ggaacgctgagtagatacttgggca

SEQ ID NO: 1784489 - DNA, 25 bp, Homo sapien
aaaactgggagccatcacttcaatt

SEQ ID NO: 1784490 - DNA, 25 bp, Homo sapien
ttcctgggcccacaaagggcacaaa

SEQ ID NO: 1784491 - DNA, 25 bp, Homo sapien
tcttgatacttaaaacagcagtgtg

SEQ ID NO: 1784492 - DNA, 25 bp, Homo sapien
cagcagtgtgtccaggtactccttc

SEQ ID NO: 1784493 - DNA, 25 bp, Homo sapien
tcctattgcttcctggtatgttcaa

SEQ ID NO: 1784494 - DNA, 25 bp, Homo sapien
gcttcctggtatgttcaaggctgcc

SEQ ID NO: 1784495 - DNA, 25 bp, Homo sapien
ttgctgcccagccaatgtcaccctt

SEQ ID NO: 1784496 - DNA, 25 bp, Homo sapien
tcttttccttcatcgcagccttttc

SEQ ID NO: 1784497 - DNA, 25 bp, Homo sapien
gccagagctctatgagttagtgaac

SEQ ID NO: 1784498 - DNA, 25 bp, Homo sapien
caccggatcaatactggaacagcac

SEQ ID NO: 1784499 - DNA, 25 bp, Homo sapien
tgacggaggagcaccggatcaatac

SEQ ID NO: 1784500 - DNA, 25 bp, Homo sapien
gttcattccataagcggcaatttcc

SEQ ID NO: 1784501 - DNA, 25 bp, Homo sapien
taggcttactacactccagtctagg

SEQ ID NO: 1784502 - DNA, 25 bp, Homo sapien
tatcctgctgagatgaatgtctatc

SEQ ID NO: 1784503 - DNA, 25 bp, Homo sapien
cctttggccacattctggtagcttc

SEQ ID NO: 1784504 - DNA, 25 bp, Homo sapien
caaaaaatctggaatgatcatagga

SEQ ID NO: 1784505 - DNA, 25 bp, Homo sapien
tccttctagtacagagtgcctttca

SEQ ID NO: 1784506 - DNA, 25 bp, Homo sapien
tgtctttgaagcttaggatgttgcc

SEQ ID NO: 1784507 - DNA, 25 bp, Homo sapien
ggtctctgctgggtccaagaattaa

SEQ ID NO: 1784508 - DNA, 25 bp, Homo sapien
aaattacacctccattctgttaggg

SEQ ID NO: 1784509 - DNA, 25 bp, Homo sapien
taagtgcttctgctggatgaacagg

SEQ ID NO: 1784510 - DNA, 25 bp, Homo sapien
aatatgtggtttcctgcctaagtgc

SEQ ID NO: 1784511 - DNA, 25 bp, Homo sapien
ggagtgttttccgtgcccagcttcg

SEQ ID NO: 1784512 - DNA, 25 bp, Homo sapien
cgcgtttcgcacttccgggtgtcga

SEQ ID NO: 1784513 - DNA, 25 bp, Homo sapien
cacttctaaccagggctgtgaaaac

SEQ ID NO: 1784514 - DNA, 25 bp, Homo sapien
tccctcagccataagggccactgga

SEQ ID NO: 1784515 - DNA, 25 bp, Homo sapien
cagccctatctcagttctgtcagtt

SEQ ID NO: 1784516 - DNA, 25 bp, Homo sapien
cctcttgaggacctgacctcttccc

SEQ ID NO: 1784517 - DNA, 25 bp, Homo sapien
gaacttttgggcttatgagtgtagg

SEQ ID NO: 1784518 - DNA, 25 bp, Homo sapien
tgaaggcaagtgattcactagggac

SEQ ID NO: 1784519 - DNA, 25 bp, Homo sapien
gagtgttagcctcagcaattgctgc

SEQ ID NO: 1784520 - DNA, 25 bp, Homo sapien
gactctaactctctcattgaaggca

SEQ ID NO: 1784521 - DNA, 25 bp, Homo sapien
gcgccgcgacccggaggcagcgaga

SEQ ID NO: 1784522 - DNA, 25 bp, Homo sapien
cgcgccgcgacccggaggcagcgag

SEQ ID NO: 1784523 - DNA, 25 bp, Homo sapien
gaggtcgctctgtgagcggccgcgg

SEQ ID NO: 1784524 - DNA, 25 bp, Homo sapien
ccgcctgcccggccggatcgaccgg

SEQ ID NO: 1784525 - DNA, 25 bp, Homo sapien
cggcccctgctcgaggacgacgaga

SEQ ID NO: 1784526 - DNA, 25 bp, Homo sapien
ctcgaggacgacgagaggtcgctct

SEQ ID NO: 1784527 - DNA, 25 bp, Homo sapien
tgagccggagatgtggacccggagc

SEQ ID NO: 1784528 - DNA, 25 bp, Homo sapien
ctgagccggagatgtggacccggag

SEQ ID NO: 1784529 - DNA, 25 bp, Homo sapien
gagccggagatgtggacccggagcg

SEQ ID NO: 1784530 - DNA, 25 bp, Homo sapien
gccggagatgtggacccggagcggg

SEQ ID NO: 1784531 - DNA, 25 bp, Homo sapien
gcagccgagagggagcgctccctac

SEQ ID NO: 1784532 - DNA, 25 bp, Homo sapien
ccaagccgtcgcctgcttttagcat

SEQ ID NO: 1784533 - DNA, 25 bp, Homo sapien
gagggaccaaagtcgcgccgaagac

SEQ ID NO: 1784534 - DNA, 25 bp, Homo sapien
gccgaagaccgagaatgttcctctt

SEQ ID NO: 1784535 - DNA, 25 bp, Homo sapien
aatgaagcctgaccggcggtcaggc

SEQ ID NO: 1784536 - DNA, 25 bp, Homo sapien
catcagctgctatggtaacttggta

SEQ ID NO: 1784537 - DNA, 25 bp, Homo sapien
taagaatcagataggagatgcccct

SEQ ID NO: 1784538 - DNA, 25 bp, Homo sapien
ctgacttaacaggtgaagccaattt

SEQ ID NO: 1784539 - DNA, 25 bp, Homo sapien
tgagtatctgatcaaaggcaacaaa

SEQ ID NO: 1784540 - DNA, 25 bp, Homo sapien
ttccccaggtaaacacaaggcaaga

SEQ ID NO: 1784541 - DNA, 25 bp, Homo sapien
taaaggtggcttcacacaataggtc

SEQ ID NO: 1784542 - DNA, 25 bp, Homo sapien
tggtttcggctccagtgagtatctg

SEQ ID NO: 1784543 - DNA, 25 bp, Homo sapien
gctggtgtgtggaattggattccaa

SEQ ID NO: 1784544 - DNA, 25 bp, Homo sapien
ctctgtccaacaaaacggatatagc

SEQ ID NO: 1784545 - DNA, 25 bp, Homo sapien
tatagctggtgtcaggaatggctac

SEQ ID NO: 1784546 - DNA, 25 bp, Homo sapien
tgcaagaatacaccccagtggtctc

SEQ ID NO: 1784547 - DNA, 25 bp, Homo sapien
tccctccatagctgcttagcagctg

SEQ ID NO: 1784548 - DNA, 25 bp, Homo sapien
acaaggcaggtttttcagcaccaga

SEQ ID NO: 1784549 - DNA, 25 bp, Homo sapien
ccatagctgcttagcagctgctgag

SEQ ID NO: 1784550 - DNA, 25 bp, Homo sapien
caggtttttcagcaccagaaatttc

SEQ ID NO: 1784551 - DNA, 25 bp, Homo sapien
gggagacagtctatactcacatgaa

SEQ ID NO: 1784552 - DNA, 25 bp, Homo sapien
tactcaaagtgaactcgaagagagg

SEQ ID NO: 1784553 - DNA, 25 bp, Homo sapien
ggatgaggcaccattgagattacaa

SEQ ID NO: 1784554 - DNA, 25 bp, Homo sapien
tcaggtgactacaaatactcccaag

SEQ ID NO: 1784555 - DNA, 25 bp, Homo sapien
gccctgctaaattggtttaccgaga

SEQ ID NO: 1784556 - DNA, 25 bp, Homo sapien
caaagattatttgagtgaccaagct

SEQ ID NO: 1784557 - DNA, 25 bp, Homo sapien
gacctcttagactggcagtgacaaa

SEQ ID NO: 1784558 - DNA, 25 bp, Homo sapien
tgggcacttcctcgtaaaatacagt

SEQ ID NO: 1784559 - DNA, 25 bp, Homo sapien
ttcaggcaaggtggcgtcctacatt

SEQ ID NO: 1784560 - DNA, 25 bp, Homo sapien
caggctcgacgtaaatgtgcagaca

SEQ ID NO: 1784561 - DNA, 25 bp, Homo sapien
taaaattaagctcggcaggctcgac

SEQ ID NO: 1784562 - DNA, 25 bp, Homo sapien
caaaggatatgtactgggaagacca

SEQ ID NO: 1784563 - DNA, 25 bp, Homo sapien
catctaattataagggtaaataaca

SEQ ID NO: 1784564 - DNA, 25 bp, Homo sapien
cagaagatccactgcagcaaaattc

SEQ ID NO: 1784565 - DNA, 25 bp, Homo sapien
cctataatacaagcagtgtcagaaa

SEQ ID NO: 1784566 - DNA, 25 bp, Homo sapien
taactgctagggtccttctctcatc

SEQ ID NO: 1784567 - DNA, 25 bp, Homo sapien
gagtgatccgtatttgtcatgcagc

SEQ ID NO: 1784568 - DNA, 25 bp, Homo sapien
ggacttgagtgatccgtatttgtca

SEQ ID NO: 1784569 - DNA, 25 bp, Homo sapien
ccttcccgccattcctcctgtttca

SEQ ID NO: 1784570 - DNA, 25 bp, Homo sapien
gatccgtatttgtcatgcagcaata

SEQ ID NO: 1784571 - DNA, 25 bp, Homo sapien
gcagacagggatataggcaacttca

SEQ ID NO: 1784572 - DNA, 25 bp, Homo sapien
tgccagtgggtaaaagagcctcaac

SEQ ID NO: 1784573 - DNA, 25 bp, Homo sapien
tgatgcctggcacctattatagtag

SEQ ID NO: 1784574 - DNA, 25 bp, Homo sapien
ctgtttggcacagcacagtagtgga

SEQ ID NO: 1784575 - DNA, 25 bp, Homo sapien
ttcctccatattcttgctgcctcat

SEQ ID NO: 1784576 - DNA, 25 bp, Homo sapien
tctttcttagatcttcagatataac

SEQ ID NO: 1784577 - DNA, 25 bp, Homo sapien
tctgctcctgtaacaagctgtggaa

SEQ ID NO: 1784578 - DNA, 25 bp, Homo sapien
ggaaacacataacccctggctggga

SEQ ID NO: 1784579 - DNA, 25 bp, Homo sapien
cacatgtcagtgcagcattgggatc

SEQ ID NO: 1784580 - DNA, 25 bp, Homo sapien
gaacttgatgacactctccttggcc

SEQ ID NO: 1784581 - DNA, 25 bp, Homo sapien
catggctttatcgatgagatggaca

SEQ ID NO: 1784582 - DNA, 25 bp, Homo sapien
tgaccaaatcaagggaatggcccct

SEQ ID NO: 1784583 - DNA, 25 bp, Homo sapien
cgaccggaaagaggatgagtgacca

SEQ ID NO: 1784584 - DNA, 25 bp, Homo sapien
tattagtcgatgtgaatagcgcccc

SEQ ID NO: 1784585 - DNA, 25 bp, Homo sapien
gaagctagctgaccatttcgatgaa

SEQ ID NO: 1784586 - DNA, 25 bp, Homo sapien
gctgatgccttagttccaggagcca

SEQ ID NO: 1784587 - DNA, 25 bp, Homo sapien
cacgtgggtccctaaatactggatc

SEQ ID NO: 1784588 - DNA, 25 bp, Homo sapien
gatgcgcagctcctatgtagtaatg

SEQ ID NO: 1784589 - DNA, 25 bp, Homo sapien
gctggcacactgagcatacttcatg

SEQ ID NO: 1784590 - DNA, 25 bp, Homo sapien
tatctccaaggatgacaaacagcca

SEQ ID NO: 1784591 - DNA, 25 bp, Homo sapien
gagacaccgccaggaaatttatatc

SEQ ID NO: 1784592 - DNA, 25 bp, Homo sapien
gactgagcctatcaagtgggtactt

SEQ ID NO: 1784593 - DNA, 25 bp, Homo sapien
cgaggcgagttctgtagcctggcag

SEQ ID NO: 1784594 - DNA, 25 bp, Homo sapien
caggagtggcgaggcgagttctgta

SEQ ID NO: 1784595 - DNA, 25 bp, Homo sapien
gcgaggcgagttctgtagcctggca

SEQ ID NO: 1784596 - DNA, 25 bp, Homo sapien
tggcgaggcgagttctgtagcctgg

SEQ ID NO: 1784597 - DNA, 25 bp, Homo sapien
tcctgaagcttgaaacagcacaaaa

SEQ ID NO: 1784598 - DNA, 25 bp, Homo sapien
tagtcggtgtaattatgtgccttca

SEQ ID NO: 1784599 - DNA, 25 bp, Homo sapien
taacccagtcacatttagatggcca

SEQ ID NO: 1784600 - DNA, 25 bp, Homo sapien
tagcgttcacctgaaactgcaccaa

SEQ ID NO: 1784601 - DNA, 25 bp, Homo sapien
ttttaggttcgcgaagtgcttccaa

SEQ ID NO: 1784602 - DNA, 25 bp, Homo sapien
ttccaaagcaagcctgcttgcgatg

SEQ ID NO: 1784603 - DNA, 25 bp, Homo sapien
gttgttcattgttctggtcaacaga

SEQ ID NO: 1784604 - DNA, 25 bp, Homo sapien
taatttctccctaataacaatgtgg

SEQ ID NO: 1784605 - DNA, 25 bp, Homo sapien
gagggaaactccaaagcagctcgag

SEQ ID NO: 1784606 - DNA, 25 bp, Homo sapien
gacagcttgactaaaatccagaggg

SEQ ID NO: 1784607 - DNA, 25 bp, Homo sapien
tccagagggccaaagttcaatgatt

SEQ ID NO: 1784608 - DNA, 25 bp, Homo sapien
ctcgagtctcgatgcacaaattgct

SEQ ID NO: 1784609 - DNA, 25 bp, Homo sapien
taatatgatgtaaggtagagttctc

SEQ ID NO: 1784610 - DNA, 25 bp, Homo sapien
tcacatagatatctagttgccctag

SEQ ID NO: 1784611 - DNA, 25 bp, Homo sapien
tatgatgtaaggtagagttctcact

SEQ ID NO: 1784612 - DNA, 25 bp, Homo sapien
acatagatatctagttgccctagca

SEQ ID NO: 1784613 - DNA, 25 bp, Homo sapien
ggtattgtcatcaacccagtaagaa

SEQ ID NO: 1784614 - DNA, 25 bp, Homo sapien
ccgaagaactttcatgtgtatggag

SEQ ID NO: 1784615 - DNA, 25 bp, Homo sapien
tacaaaatctgtggcttccgtacag

SEQ ID NO: 1784616 - DNA, 25 bp, Homo sapien
tctcagtagacaggtttgactcaga

SEQ ID NO: 1784617 - DNA, 25 bp, Homo sapien
tttattgaaagtatggagagcagct

SEQ ID NO: 1784618 - DNA, 25 bp, Homo sapien
ccagtagtaagcagtattgtcaata

SEQ ID NO: 1784619 - DNA, 25 bp, Homo sapien
gcagctttactgctaggcctaccag

SEQ ID NO: 1784620 - DNA, 25 bp, Homo sapien
taatacaaggtctgtgggtaccagg

SEQ ID NO: 1784621 - DNA, 25 bp, Homo sapien
caggcgttcatgtcccggcctgtgc

SEQ ID NO: 1784622 - DNA, 25 bp, Homo sapien
agacttccaggcgttcatgtcccgg

SEQ ID NO: 1784623 - DNA, 25 bp, Homo sapien
tcatgtcccggcctgtgccgagcgg

SEQ ID NO: 1784624 - DNA, 25 bp, Homo sapien
ccagccagacttccaggcgttcatg

SEQ ID NO: 1784625 - DNA, 25 bp, Homo sapien
tccagcgatcaagcggctcctttgg

SEQ ID NO: 1784626 - DNA, 25 bp, Homo sapien
gcggctcctttggtccttcgatcat

SEQ ID NO: 1784627 - DNA, 25 bp, Homo sapien
gatcaagcggctcctttggtccttc

SEQ ID NO: 1784628 - DNA, 25 bp, Homo sapien
gccaggtccagcgatcaagcggctc

SEQ ID NO: 1784629 - DNA, 25 bp, Homo sapien
agcgtggacaccgaggtctggccca

SEQ ID NO: 1784630 - DNA, 25 bp, Homo sapien
acagcgtggacaccgaggtctggcc

SEQ ID NO: 1784631 - DNA, 25 bp, Homo sapien
gcgtggacaccgaggtctggcccat

SEQ ID NO: 1784632 - DNA, 25 bp, Homo sapien
gggacagcgtggacaccgaggtctg

SEQ ID NO: 1784633 - DNA, 25 bp, Homo sapien
gaggcatcgcgcacagaaaaatgga

SEQ ID NO: 1784634 - DNA, 25 bp, Homo sapien
gtttctggctccgaaataatttgga

SEQ ID NO: 1784635 - DNA, 25 bp, Homo sapien
gttcggaagccaagcgtaaatacag

SEQ ID NO: 1784636 - DNA, 25 bp, Homo sapien
aaaacactgtaatacgcaaatggcg

SEQ ID NO: 1784637 - DNA, 25 bp, Homo sapien
gggctagttattaagtattcagcgt

SEQ ID NO: 1784638 - DNA, 25 bp, Homo sapien
catttgaaacaattacgcatttcgg

SEQ ID NO: 1784639 - DNA, 25 bp, Homo sapien
tgccaggataaggcgatcagcgctt

SEQ ID NO: 1784640 - DNA, 25 bp, Homo sapien
tattcagcgtctgccaggataaggc

SEQ ID NO: 1784641 - DNA, 25 bp, Homo sapien
tgtactaagacgtagggagtctcac

SEQ ID NO: 1784642 - DNA, 25 bp, Homo sapien
ggatttagagacactggataccacg

SEQ ID NO: 1784643 - DNA, 25 bp, Homo sapien
ttaagtataacaccgttccgtgaga

SEQ ID NO: 1784644 - DNA, 25 bp, Homo sapien
cagggaaacagggtagctctaacgg

SEQ ID NO: 1784645 - DNA, 25 bp, Homo sapien
tgcaaatcactctaccaagatgaaa

SEQ ID NO: 1784646 - DNA, 25 bp, Homo sapien
gatataacttcacacctactaagat

SEQ ID NO: 1784647 - DNA, 25 bp, Homo sapien
gatttggatctagtatacaaagaac

SEQ ID NO: 1784648 - DNA, 25 bp, Homo sapien
catgtacctgacaagggatttggat

SEQ ID NO: 1784649 - DNA, 25 bp, Homo sapien
catgtatattgggatcaaacaagga

SEQ ID NO: 1784650 - DNA, 25 bp, Homo sapien
tggagagagaagttacagataagcg

SEQ ID NO: 1784651 - DNA, 25 bp, Homo sapien
catgaacccgtgtttgcccaggtag

SEQ ID NO: 1784652 - DNA, 25 bp, Homo sapien
caaacaaggaagtacgggagtggca

SEQ ID NO: 1784653 - DNA, 25 bp, Homo sapien
agtttgctatagaagctttgtccag

SEQ ID NO: 1784654 - DNA, 25 bp, Homo sapien
gattttaccaatggtggatagtttc

SEQ ID NO: 1784655 - DNA, 25 bp, Homo sapien
tctctaaatttgtcgctggtcttct

SEQ ID NO: 1784656 - DNA, 25 bp, Homo sapien
tgaagggaggtgtttgggaacctgc

SEQ ID NO: 1784657 - DNA, 25 bp, Homo sapien
cccatcttctaacaagttatgatac

SEQ ID NO: 1784658 - DNA, 25 bp, Homo sapien
tatcccatcttctaacaagttatga

SEQ ID NO: 1784659 - DNA, 25 bp, Homo sapien
tcttctaacaagttatgatactcat

SEQ ID NO: 1784660 - DNA, 25 bp, Homo sapien
atttcatttcaaatacggattaatt

SEQ ID NO: 1784661 - DNA, 25 bp, Homo sapien
ggtaacgtgaagagccagattctcc

SEQ ID NO: 1784662 - DNA, 25 bp, Homo sapien
ttcgtacgttacgtctggagccctg

SEQ ID NO: 1784663 - DNA, 25 bp, Homo sapien
gtacgttacgtctggagccctgctc

SEQ ID NO: 1784664 - DNA, 25 bp, Homo sapien
gccctgctcccatcttgggtagtct

SEQ ID NO: 1784665 - DNA, 25 bp, Homo sapien
ttccagatggttagggcattccaaa

SEQ ID NO: 1784666 - DNA, 25 bp, Homo sapien
ggctgggtacaaggaggctaagacc

SEQ ID NO: 1784667 - DNA, 25 bp, Homo sapien
gaggctgggtacaaggaggctaaga

SEQ ID NO: 1784668 - DNA, 25 bp, Homo sapien
ccagatggttagggcattccaaatc

SEQ ID NO: 1784669 - DNA, 25 bp, Homo sapien
tccgatagcctgaaacataccaggt

SEQ ID NO: 1784670 - DNA, 25 bp, Homo sapien
ctttccattatggatcccggaggat

SEQ ID NO: 1784671 - DNA, 25 bp, Homo sapien
gatcctgtgtcattaatcgaggctg

SEQ ID NO: 1784672 - DNA, 25 bp, Homo sapien
tgtctgtaatctctgctcgggcacc

SEQ ID NO: 1784673 - DNA, 25 bp, Homo sapien
cattcatgcttgactgggctctgag

SEQ ID NO: 1784674 - DNA, 25 bp, Homo sapien
gagagaactcttatcaacggcagga

SEQ ID NO: 1784675 - DNA, 25 bp, Homo sapien
gagattcacggctgttctgccctaa

SEQ ID NO: 1784676 - DNA, 25 bp, Homo sapien
tgcagcctcctacggattgtaaaag

SEQ ID NO: 1784677 - DNA, 25 bp, Homo sapien
tgatcaggcaattccttaagcactc

SEQ ID NO: 1784678 - DNA, 25 bp, Homo sapien
tccccttcttatcagctcctctcta

SEQ ID NO: 1784679 - DNA, 25 bp, Homo sapien
gctcctctctactttgtcgtgtgga

SEQ ID NO: 1784680 - DNA, 25 bp, Homo sapien
cgtgtggatatcttcctttctaata

SEQ ID NO: 1784681 - DNA, 25 bp, Homo sapien
cagggcagcagagtccctcgttcat

SEQ ID NO: 1784682 - DNA, 25 bp, Homo sapien
taactgctactctatgttcagggaa

SEQ ID NO: 1784683 - DNA, 25 bp, Homo sapien
tcagaaacagaatggcgagaggaat

SEQ ID NO: 1784684 - DNA, 25 bp, Homo sapien
taattatccaatatcccagggcagc

SEQ ID NO: 1784685 - DNA, 25 bp, Homo sapien
ccctgggaaccaaatacaccctgca

SEQ ID NO: 1784686 - DNA, 25 bp, Homo sapien
aaagagctagaaaatcctctgtctt

SEQ ID NO: 1784687 - DNA, 25 bp, Homo sapien
aaatttagattcatgtttcagtccc

SEQ ID NO: 1784688 - DNA, 25 bp, Homo sapien
tgcactgtttcaccggtttattcaa

SEQ ID NO: 1784689 - DNA, 25 bp, Homo sapien
tcaaagttaactgttacatctccat

SEQ ID NO: 1784690 - DNA, 25 bp, Homo sapien
tttcaaagttaactgttacatctcc

SEQ ID NO: 1784691 - DNA, 25 bp, Homo sapien
tgaattttcaaagttaactgttaca

SEQ ID NO: 1784692 - DNA, 25 bp, Homo sapien
attttcaaagttaactgttacatct

SEQ ID NO: 1784693 - DNA, 25 bp, Homo sapien
ggtgttttttcagatacagagccat

SEQ ID NO: 1784694 - DNA, 25 bp, Homo sapien
ttactacattttcctctcgggtaga

SEQ ID NO: 1784695 - DNA, 25 bp, Homo sapien
ggtagattcctctccgatgggtatc

SEQ ID NO: 1784696 - DNA, 25 bp, Homo sapien
gatacagagccattaccttcttcag

SEQ ID NO: 1784697 - DNA, 25 bp, Homo sapien
accagcagagaaagatgttcagatt

SEQ ID NO: 1784698 - DNA, 25 bp, Homo sapien
ctttcattatgatcctgagacaaag

SEQ ID NO: 1784699 - DNA, 25 bp, Homo sapien
taaccagcagagaaagatgttcaga

SEQ ID NO: 1784700 - DNA, 25 bp, Homo sapien
tcattatgatcctgagacaaagctc

SEQ ID NO: 1784701 - DNA, 25 bp, Homo sapien
gctgcatggaggcatctagaatctc

SEQ ID NO: 1784702 - DNA, 25 bp, Homo sapien
aaagattcctttctatgctgcatgg

SEQ ID NO: 1784703 - DNA, 25 bp, Homo sapien
gaacggttatgaacttccacagagg

SEQ ID NO: 1784704 - DNA, 25 bp, Homo sapien
gaggttcctacgcatcacagcagtg

SEQ ID NO: 1784705 - DNA, 25 bp, Homo sapien
gatgtctggccagtccagtgacgaa

SEQ ID NO: 1784706 - DNA, 25 bp, Homo sapien
tatacctagcgcttctccttgtggc

SEQ ID NO: 1784707 - DNA, 25 bp, Homo sapien
gattcttggatgtgagaaggctgcc

SEQ ID NO: 1784708 - DNA, 25 bp, Homo sapien
tgacgaataccctgcacggaccagg

SEQ ID NO: 1784709 - DNA, 25 bp, Homo sapien
caattgcccgtttgcattctggtct

SEQ ID NO: 1784710 - DNA, 25 bp, Homo sapien
tgctcaggccttctacggtacttcg

SEQ ID NO: 1784711 - DNA, 25 bp, Homo sapien
cggtacttcgcatcttgcactacaa

SEQ ID NO: 1784712 - DNA, 25 bp, Homo sapien
tgagaaccaatgttggccctcactg

SEQ ID NO: 1784713 - DNA, 25 bp, Homo sapien
gcaatgcggtctggaaaacaagctg

SEQ ID NO: 1784714 - DNA, 25 bp, Homo sapien
cattctggcttgataaggacgctag

SEQ ID NO: 1784715 - DNA, 25 bp, Homo sapien
caagctgtttcccatacttccaggc

SEQ ID NO: 1784716 - DNA, 25 bp, Homo sapien
gacgctagcctttccagcaatgcgg

SEQ ID NO: 1784717 - DNA, 25 bp, Homo sapien
tggctccttagagaatacgtccgct

SEQ ID NO: 1784718 - DNA, 25 bp, Homo sapien
cttcgaacgctaccaactatgtgtg

SEQ ID NO: 1784719 - DNA, 25 bp, Homo sapien
ggcaatgacaagacctactagggag

SEQ ID NO: 1784720 - DNA, 25 bp, Homo sapien
taagcccaatagtgtcatccatagt

SEQ ID NO: 1784721 - DNA, 25 bp, Homo sapien
atgcctggccttttcaaatactgtc

SEQ ID NO: 1784722 - DNA, 25 bp, Homo sapien
ccctttcggaggcacaggtgatttt

SEQ ID NO: 1784723 - DNA, 25 bp, Homo sapien
tctcgggtcgtgtttcggcttgctg

SEQ ID NO: 1784724 - DNA, 25 bp, Homo sapien
agcagtggcccctttcggaggcaca

SEQ ID NO: 1784725 - DNA, 25 bp, Homo sapien
tttgggtctaggcttaggaggagca

SEQ ID NO: 1784726 - DNA, 25 bp, Homo sapien
ctttgggacgagatgaggtggatga

SEQ ID NO: 1784727 - DNA, 25 bp, Homo sapien
gctgatgctttagagccagttgttt

SEQ ID NO: 1784728 - DNA, 25 bp, Homo sapien
ggcgaagctgatgctttagagccag

SEQ ID NO: 1784729 - DNA, 25 bp, Homo sapien
aagtggatggcgaagctgatgcttt

SEQ ID NO: 1784730 - DNA, 25 bp, Homo sapien
tgtccctgctttgctagaaactgtc

SEQ ID NO: 1784731 - DNA, 25 bp, Homo sapien
caggtgagaagttattggctgcttg

SEQ ID NO: 1784732 - DNA, 25 bp, Homo sapien
gacaggtgagaagttattggctgct

SEQ ID NO: 1784733 - DNA, 25 bp, Homo sapien
ggtgagaagttattggctgcttgtc

SEQ ID NO: 1784734 - DNA, 25 bp, Homo sapien
caacgctgacgaggacaactggagt

SEQ ID NO: 1784735 - DNA, 25 bp, Homo sapien
tctcctttcaggtcggatgtgccag

SEQ ID NO: 1784736 - DNA, 25 bp, Homo sapien
tcgtcggctcttcagcccaaagaag

SEQ ID NO: 1784737 - DNA, 25 bp, Homo sapien
tagagagtggttctgttcgtcggct

SEQ ID NO: 1784738 - DNA, 25 bp, Homo sapien
cctgggaaggattgcttgagcctgg

SEQ ID NO: 1784739 - DNA, 25 bp, Homo sapien
ctgtagtcccagcttgagcctggga

SEQ ID NO: 1784740 - DNA, 25 bp, Homo sapien
tgtagtcccagcttgagcctgggaa

SEQ ID NO: 1784741 - DNA, 25 bp, Homo sapien
gagcctgggaaatcgagactgcagt

SEQ ID NO: 1784742 - DNA, 25 bp, Homo sapien
tctgaggcactaaaggattctgaag

SEQ ID NO: 1784743 - DNA, 25 bp, Homo sapien
cattggcttggtattccctgtggcc

SEQ ID NO: 1784744 - DNA, 25 bp, Homo sapien
tcatcatcggtgtacaagataggcc

SEQ ID NO: 1784745 - DNA, 25 bp, Homo sapien
cccaggagtcagtagctgaggcact

SEQ ID NO: 1784746 - DNA, 25 bp, Homo sapien
tctctaagttatattaggttgatgc

SEQ ID NO: 1784747 - DNA, 25 bp, Homo sapien
gcctactatcttacttattgtggaa

SEQ ID NO: 1784748 - DNA, 25 bp, Homo sapien
tcactaatatagtaataacttgcca

SEQ ID NO: 1784749 - DNA, 25 bp, Homo sapien
tgaatccctcccatgttatccagca

SEQ ID NO: 1784750 - DNA, 25 bp, Homo sapien
tactcagacgccatcctggcagagt

SEQ ID NO: 1784751 - DNA, 25 bp, Homo sapien
gaagtatcacttcatcgtttggaaa

SEQ ID NO: 1784752 - DNA, 25 bp, Homo sapien
attgggacaccatgaaaaaacttag

SEQ ID NO: 1784753 - DNA, 25 bp, Homo sapien
tgctgagagggtggatcatagaaat

SEQ ID NO: 1784754 - DNA, 25 bp, Homo sapien
ccggcgtattttacttgccaaagca

SEQ ID NO: 1784755 - DNA, 25 bp, Homo sapien
tcttcttcagatgtacgctgcaaga

SEQ ID NO: 1784756 - DNA, 25 bp, Homo sapien
tccaatttgttgtcggatttcctgc

SEQ ID NO: 1784757 - DNA, 25 bp, Homo sapien
tgatagcaagagtatccctccggcg

SEQ ID NO: 1784758 - DNA, 25 bp, Homo sapien
gctctaattcttcagttgtgggcct

SEQ ID NO: 1784759 - DNA, 25 bp, Homo sapien
taattcttcagttgtgggcctctgg

SEQ ID NO: 1784760 - DNA, 25 bp, Homo sapien
tctaattcttcagttgtgggcctct

SEQ ID NO: 1784761 - DNA, 25 bp, Homo sapien
ctttgctctaattcttcagttgtgg

SEQ ID NO: 1784762 - DNA, 25 bp, Homo sapien
gcctcccttggctgtacaatagtgg

SEQ ID NO: 1784763 - DNA, 25 bp, Homo sapien
tgcagcacttaagatcaacacgcgg

SEQ ID NO: 1784764 - DNA, 25 bp, Homo sapien
caagagcaatctatgtggaagaacc

SEQ ID NO: 1784765 - DNA, 25 bp, Homo sapien
ccaagacacaaacgggctgagtaga

SEQ ID NO: 1784766 - DNA, 25 bp, Homo sapien
gttgcttacttgaggaacatctctc

SEQ ID NO: 1784767 - DNA, 25 bp, Homo sapien
tagtgattcaccaagtagtacgatt

SEQ ID NO: 1784768 - DNA, 25 bp, Homo sapien
agtacgattttatgctgcccaacag

SEQ ID NO: 1784769 - DNA, 25 bp, Homo sapien
gcttcttggataccgatgcttatga

SEQ ID NO: 1784770 - DNA, 25 bp, Homo sapien
cacaggagtgcccatattctaatga

SEQ ID NO: 1784771 - DNA, 25 bp, Homo sapien
taatgaaagccctctattgctgatc

SEQ ID NO: 1784772 - DNA, 25 bp, Homo sapien
agaaaagtgtatcaggccacgatca

SEQ ID NO: 1784773 - DNA, 25 bp, Homo sapien
tctggatctggccttcgtgtgaaaa

SEQ ID NO: 1784774 - DNA, 25 bp, Homo sapien
tttctgctgagtctgcgtttaagtt

SEQ ID NO: 1784775 - DNA, 25 bp, Homo sapien
tctgctgagtctgcgtttaagttcc

SEQ ID NO: 1784776 - DNA, 25 bp, Homo sapien
tgcgtttaagttccatttttgcttc

SEQ ID NO: 1784777 - DNA, 25 bp, Homo sapien
ctgctgagtctgcgtttaagttcca

SEQ ID NO: 1784778 - DNA, 25 bp, Homo sapien
aaaattagcacaacacacaatcaga

SEQ ID NO: 1784779 - DNA, 25 bp, Homo sapien
ggaaatacatgcattgaaatgttaa

SEQ ID NO: 1784780 - DNA, 25 bp, Homo sapien
tcagaaacatcactcatagcatgtg

SEQ ID NO: 1784781 - DNA, 25 bp, Homo sapien
tctaatcaagcgagattaattttca

SEQ ID NO: 1784782 - DNA, 25 bp, Homo sapien
tctacatactcgttaaatcgcagga

SEQ ID NO: 1784783 - DNA, 25 bp, Homo sapien
ctgccactgtgggtctcaggctgag

SEQ ID NO: 1784784 - DNA, 25 bp, Homo sapien
tcggcggtcatagtcaggagaatcc

SEQ ID NO: 1784785 - DNA, 25 bp, Homo sapien
cgcaggatccttcgagcttgtagct

SEQ ID NO: 1784786 - DNA, 25 bp, Homo sapien
aatcagaggcagaaaactgttgtaa

SEQ ID NO: 1784787 - DNA, 25 bp, Homo sapien
ctgggatgacttaagtaggggggat

SEQ ID NO: 1784788 - DNA, 25 bp, Homo sapien
atatttggtaagatctcgtcccctg

SEQ ID NO: 1784789 - DNA, 25 bp, Homo sapien
aaactgttgtaatatttggtaagat

SEQ ID NO: 1784790 - DNA, 25 bp, Homo sapien
caaagattgtatggcccacatagcc

SEQ ID NO: 1784791 - DNA, 25 bp, Homo sapien
aaagtgtgccagtctcgacgaagat

SEQ ID NO: 1784792 - DNA, 25 bp, Homo sapien
cctcctcatccaggtatgaaagcag

SEQ ID NO: 1784793 - DNA, 25 bp, Homo sapien
tttctaagagtaaggataaatcctg

SEQ ID NO: 1784794 - DNA, 25 bp, Homo sapien
tgtggcatgtttaagcaaaagtact

SEQ ID NO: 1784795 - DNA, 25 bp, Homo sapien
gagtcagcacagagcatgattaaat

SEQ ID NO: 1784796 - DNA, 25 bp, Homo sapien
tatagcacgagtttattcaatacca

SEQ ID NO: 1784797 - DNA, 25 bp, Homo sapien
caaacggttggcacgaatctttgcc

SEQ ID NO: 1784798 - DNA, 25 bp, Homo sapien
caaaaggcacttcggtggagtggta

SEQ ID NO: 1784799 - DNA, 25 bp, Homo sapien
cattcataatgaacgaaaggcaaag

SEQ ID NO: 1784800 - DNA, 25 bp, Homo sapien
tcggtggagtggtatccaaatgccc

SEQ ID NO: 1784801 - DNA, 25 bp, Homo sapien
tgcaacatacataactggaatatat

SEQ ID NO: 1784802 - DNA, 25 bp, Homo sapien
gagaaatatgtgtgagcctgagtcc

SEQ ID NO: 1784803 - DNA, 25 bp, Homo sapien
gtttctatggagaacctgtgactag

SEQ ID NO: 1784804 - DNA, 25 bp, Homo sapien
gaactgtgacaataatgcttgctac

SEQ ID NO: 1784805 - DNA, 25 bp, Homo sapien
cagatatattcctcagcccctgtag

SEQ ID NO: 1784806 - DNA, 25 bp, Homo sapien
cctcaacactcctttcaatgctata

SEQ ID NO: 1784807 - DNA, 25 bp, Homo sapien
cctttcaatgctatatttaagtcca

SEQ ID NO: 1784808 - DNA, 25 bp, Homo sapien
tctgcaatacacgagcctttccctc

SEQ ID NO: 1784809 - DNA, 25 bp, Homo sapien
tgcaatacacgagcctttccctcaa

SEQ ID NO: 1784810 - DNA, 25 bp, Homo sapien
gtctctagctctctctcataactaa

SEQ ID NO: 1784811 - DNA, 25 bp, Homo sapien
ctgaggcctgtctctagctctctct

SEQ ID NO: 1784812 - DNA, 25 bp, Homo sapien
gaaaaaaagccctgaggcctgtctc

SEQ ID NO: 1784813 - DNA, 25 bp, Homo sapien
cattttaggaaagggaacagacaga

SEQ ID NO: 1784814 - DNA, 25 bp, Homo sapien
tctgtgcttttaaattcatttagtt

SEQ ID NO: 1784815 - DNA, 25 bp, Homo sapien
ttctgtgcttttaaattcatttagt

SEQ ID NO: 1784816 - DNA, 25 bp, Homo sapien
tgtgcttttaaattcatttagttct

SEQ ID NO: 1784817 - DNA, 25 bp, Homo sapien
ctgtgcttttaaattcatttagttc

SEQ ID NO: 1784818 - DNA, 25 bp, Homo sapien
cttgtaaactgtcgactctcttcat

SEQ ID NO: 1784819 - DNA, 25 bp, Homo sapien
gtcgactctcttcatgaacttccat

SEQ ID NO: 1784820 - DNA, 25 bp, Homo sapien
taaactgtcgactctcttcatgaac

SEQ ID NO: 1784821 - DNA, 25 bp, Homo sapien
actgtcgactctcttcatgaacttc

SEQ ID NO: 1784822 - DNA, 25 bp, Homo sapien
catcatcaccgggactgcaggaaca

SEQ ID NO: 1784823 - DNA, 25 bp, Homo sapien
cgggactgcaggaacagtggcacca

SEQ ID NO: 1784824 - DNA, 25 bp, Homo sapien
cttaggggatcaatatttgttaccg

SEQ ID NO: 1784825 - DNA, 25 bp, Homo sapien
tggctgtagcttaggggatcaatat

SEQ ID NO: 1784826 - DNA, 25 bp, Homo sapien
tatattgtgacatgctcccagcaca

SEQ ID NO: 1784827 - DNA, 25 bp, Homo sapien
ttatattgtgacatgctcccagcac

SEQ ID NO: 1784828 - DNA, 25 bp, Homo sapien
atattgtgacatgctcccagcacac

SEQ ID NO: 1784829 - DNA, 25 bp, Homo sapien
taaaggtatgttaagatgcccaatc

SEQ ID NO: 1784830 - DNA, 25 bp, Homo sapien
agtagtgagtagactaggcatgctc

SEQ ID NO: 1784831 - DNA, 25 bp, Homo sapien
gaatataaacctctcgaccacatga

SEQ ID NO: 1784832 - DNA, 25 bp, Homo sapien
ggcatgctcttaaactgtagatctg

SEQ ID NO: 1784833 - DNA, 25 bp, Homo sapien
gaggagtcagcccatttattaacca

SEQ ID NO: 1784834 - DNA, 25 bp, Homo sapien
cagaagtgggtccttccattgtaca

SEQ ID NO: 1784835 - DNA, 25 bp, Homo sapien
gacaatgtctcatgctaataagagg

SEQ ID NO: 1784836 - DNA, 25 bp, Homo sapien
caagagaggctggtactaagagtac

SEQ ID NO: 1784837 - DNA, 25 bp, Homo sapien
cctaaggatactgaagccttttgtc

SEQ ID NO: 1784838 - DNA, 25 bp, Homo sapien
ttttcagaactttcctgagactcca

SEQ ID NO: 1784839 - DNA, 25 bp, Homo sapien
ataaatagatttactgtgccctaag

SEQ ID NO: 1784840 - DNA, 25 bp, Homo sapien
gccttttgtccaccctcttttcaga

SEQ ID NO: 1784841 - DNA, 25 bp, Homo sapien
cagtttgttatttctcggtattttg

SEQ ID NO: 1784842 - DNA, 25 bp, Homo sapien
tatttctcggtagtttgcattcatt

SEQ ID NO: 1784843 - DNA, 25 bp, Homo sapien
aaggtaggagaagttcagctttacg

SEQ ID NO: 1784844 - DNA, 25 bp, Homo sapien
gaagttcagctttacgtcttgagaa

SEQ ID NO: 1784845 - DNA, 25 bp, Homo sapien
catggatcgcagtacacagtgagtt

SEQ ID NO: 1784846 - DNA, 25 bp, Homo sapien
gatagattgcccagattcggtaaaa

SEQ ID NO: 1784847 - DNA, 25 bp, Homo sapien
cagtctagattgcattggaaggtca

SEQ ID NO: 1784848 - DNA, 25 bp, Homo sapien
gaaggtgaccaattgataccgtgcg

SEQ ID NO: 1784849 - DNA, 25 bp, Homo sapien
tcaccacaagttaaacggaaacaca

SEQ ID NO: 1784850 - DNA, 25 bp, Homo sapien
ccagtgcaatatcaggttttcagga

SEQ ID NO: 1784851 - DNA, 25 bp, Homo sapien
tcccccaaagatgatcagtctctgt

SEQ ID NO: 1784852 - DNA, 25 bp, Homo sapien
tttgcttgttggagccatctgggcc

SEQ ID NO: 1784853 - DNA, 25 bp, Homo sapien
tcttatcctgtgaaggctggtacac

SEQ ID NO: 1784854 - DNA, 25 bp, Homo sapien
tgactccatggaaaatagcaacaca

SEQ ID NO: 1784855 - DNA, 25 bp, Homo sapien
tctgatgaagaatatccacggtgtc

SEQ ID NO: 1784856 - DNA, 25 bp, Homo sapien
tatttctggcaactggattcactgg

SEQ ID NO: 1784857 - DNA, 25 bp, Homo sapien
gctttttatagtaggccaactggca

SEQ ID NO: 1784858 - DNA, 25 bp, Homo sapien
taattgcaggctgtaaaactggacc

SEQ ID NO: 1784859 - DNA, 25 bp, Homo sapien
ttttttaatgccaacgcagccctga

SEQ ID NO: 1784860 - DNA, 25 bp, Homo sapien
aggtgataccaacctcccagggagg

SEQ ID NO: 1784861 - DNA, 25 bp, Homo sapien
tttattgactctgcgttactcggcc

SEQ ID NO: 1784862 - DNA, 25 bp, Homo sapien
cctgagggtagagtggcattctgcc

SEQ ID NO: 1784863 - DNA, 25 bp, Homo sapien
tttctgaaggcgagttagccctgca

SEQ ID NO: 1784864 - DNA, 25 bp, Homo sapien
ccccgagttggcaagtggcacaaat

SEQ ID NO: 1784865 - DNA, 25 bp, Homo sapien
cctgtgtaatacgtagaactagatc

SEQ ID NO: 1784866 - DNA, 25 bp, Homo sapien
tacatagtctttctttcaggttaca

SEQ ID NO: 1784867 - DNA, 25 bp, Homo sapien
tcaggttacaatagtggaatacaag

SEQ ID NO: 1784868 - DNA, 25 bp, Homo sapien
taaacaatgttctaaggcacttgga

SEQ ID NO: 1784869 - DNA, 25 bp, Homo sapien
ggctgagcactatccaaatataaga

SEQ ID NO: 1784870 - DNA, 25 bp, Homo sapien
tcaagaccttacatacaaagaggtg

SEQ ID NO: 1784871 - DNA, 25 bp, Homo sapien
agagcagtaattctttagacagaca

SEQ ID NO: 1784872 - DNA, 25 bp, Homo sapien
gtaccaggccttacatgtctcaaga

SEQ ID NO: 1784873 - DNA, 25 bp, Homo sapien
ggtcttctgtctaggataccagcaa

SEQ ID NO: 1784874 - DNA, 25 bp, Homo sapien
ttccccttacatctttgaccttgtc

SEQ ID NO: 1784875 - DNA, 25 bp, Homo sapien
tctaggataccagcaagcacgttgc

SEQ ID NO: 1784876 - DNA, 25 bp, Homo sapien
tggttccaatcctccggtcttctgt

SEQ ID NO: 1784877 - DNA, 25 bp, Homo sapien
tataaggattgaaaactggttccga

SEQ ID NO: 1784878 - DNA, 25 bp, Homo sapien
gatgcagtttgaatcaggtataaca

SEQ ID NO: 1784879 - DNA, 25 bp, Homo sapien
gtgaatttggagaccctctaacgat

SEQ ID NO: 1784880 - DNA, 25 bp, Homo sapien
ggttgaagtagattcttcccagaag

SEQ ID NO: 1784881 - DNA, 25 bp, Homo sapien
cttcaaatcaggttcacttcatgag

SEQ ID NO: 1784882 - DNA, 25 bp, Homo sapien
tcagggggcacgagctttgcttcaa

SEQ ID NO: 1784883 - DNA, 25 bp, Homo sapien
ggttcacttcatgagaatctgtttg

SEQ ID NO: 1784884 - DNA, 25 bp, Homo sapien
gggcacgagctttgcttcaaatcag

SEQ ID NO: 1784885 - DNA, 25 bp, Homo sapien
ctcactgcattgtacttcaggacga

SEQ ID NO: 1784886 - DNA, 25 bp, Homo sapien
gatcgtttcctgaaacaggaccttc

SEQ ID NO: 1784887 - DNA, 25 bp, Homo sapien
cattgtacttcaggacgatcgtttc

SEQ ID NO: 1784888 - DNA, 25 bp, Homo sapien
tcaggacgatcgtttcctgaaacag

SEQ ID NO: 1784889 - DNA, 25 bp, Homo sapien
gagctactgtcgttttctcagctga

SEQ ID NO: 1784890 - DNA, 25 bp, Homo sapien
gcttctagtaagcatttgatgaacg

SEQ ID NO: 1784891 - DNA, 25 bp, Homo sapien
ttctcagctgaatgtagttattcac

SEQ ID NO: 1784892 - DNA, 25 bp, Homo sapien
tatgaagtacttggacctgtgcttg

SEQ ID NO: 1784893 - DNA, 25 bp, Homo sapien
tgtggacgaaccttttatagctccc

SEQ ID NO: 1784894 - DNA, 25 bp, Homo sapien
tgcttgtggacgaaccttttatagc

SEQ ID NO: 1784895 - DNA, 25 bp, Homo sapien
tttctgcttgtggacgaacctttta

SEQ ID NO: 1784896 - DNA, 25 bp, Homo sapien
ccttaacgttgaggcgccacagagg

SEQ ID NO: 1784897 - DNA, 25 bp, Homo sapien
gatgacaccctcgaagtccggcggg

SEQ ID NO: 1784898 - DNA, 25 bp, Homo sapien
aaggccgcttctgtaggcctcacca

SEQ ID NO: 1784899 - DNA, 25 bp, Homo sapien
accaaggtccagctgaaggccgctt

SEQ ID NO: 1784900 - DNA, 25 bp, Homo sapien
gtggaaacggaccaatcgccgagga

SEQ ID NO: 1784901 - DNA, 25 bp, Homo sapien
tttgtgtgggcaatagaaccctctg

SEQ ID NO: 1784902 - DNA, 25 bp, Homo sapien
tctgctgctaaaggatctcgttggc

SEQ ID NO: 1784903 - DNA, 25 bp, Homo sapien
gctccggtggaccaagtgaaaagac

SEQ ID NO: 1784904 - DNA, 25 bp, Homo sapien
accctctggggtgcactctcatctg

SEQ ID NO: 1784905 - DNA, 25 bp, Homo sapien
gcaaagttccctgagctaaccaagg

SEQ ID NO: 1784906 - DNA, 25 bp, Homo sapien
gaaaagctaaacgtggcccatgtcc

SEQ ID NO: 1784907 - DNA, 25 bp, Homo sapien
gagtacagctttccaagtaggaggc

SEQ ID NO: 1784908 - DNA, 25 bp, Homo sapien
tgtacagcttcaaaaccagagtgct

SEQ ID NO: 1784909 - DNA, 25 bp, Homo sapien
tctgaaggcccagatggttccttca

SEQ ID NO: 1784910 - DNA, 25 bp, Homo sapien
tcctgttgtgtgcactgaaggtact

SEQ ID NO: 1784911 - DNA, 25 bp, Homo sapien
aggtagtcatagtcgtcatcaaaga

SEQ ID NO: 1784912 - DNA, 25 bp, Homo sapien
tagtcgtcatcaaagaacactccat

SEQ ID NO: 1784913 - DNA, 25 bp, Homo sapien
taaggtcacggaggcatacaacatg

SEQ ID NO: 1784914 - DNA, 25 bp, Homo sapien
tgttactgttgacacctgccaccag

SEQ ID NO: 1784915 - DNA, 25 bp, Homo sapien
tgccaccagagaagacgtgacctat

SEQ ID NO: 1784916 - DNA, 25 bp, Homo sapien
tgaaaagtgctgtctaacatggcca

SEQ ID NO: 1784917 - DNA, 25 bp, Homo sapien
tataacgagaccacatgaagacaga

SEQ ID NO: 1784918 - DNA, 25 bp, Homo sapien
cagcagactggagtgaggcctctat

SEQ ID NO: 1784919 - DNA, 25 bp, Homo sapien
gaatgatcaccggtaaccttcggaa

SEQ ID NO: 1784920 - DNA, 25 bp, Homo sapien
taggaatgagccattcaacagcctc

SEQ ID NO: 1784921 - DNA, 25 bp, Homo sapien
ggagctgctttatttaacaatccaa

SEQ ID NO: 1784922 - DNA, 25 bp, Homo sapien
gagctgctttatttaacaatccaac

SEQ ID NO: 1784923 - DNA, 25 bp, Homo sapien
aagcaaacactgatgaaggcaactt

SEQ ID NO: 1784924 - DNA, 25 bp, Homo sapien
caaacactgatgaaggcaacttaat

SEQ ID NO: 1784925 - DNA, 25 bp, Homo sapien
aacagcaagtgttgcaatcctagtc

SEQ ID NO: 1784926 - DNA, 25 bp, Homo sapien
caaggctaaatcaggaggaagtgga

SEQ ID NO: 1784927 - DNA, 25 bp, Homo sapien
taaggacctatgatagcaagagtct

SEQ ID NO: 1784928 - DNA, 25 bp, Homo sapien
gaaatagaggcagcaatagcctacc

SEQ ID NO: 1784929 - DNA, 25 bp, Homo sapien
cctgttgccttattggcctgaagaa

SEQ ID NO: 1784930 - DNA, 25 bp, Homo sapien
tcaggatcaaaatccagtcgaggtc

SEQ ID NO: 1784931 - DNA, 25 bp, Homo sapien
tcaaaatcatcatcaagagctgcaa

SEQ ID NO: 1784932 - DNA, 25 bp, Homo sapien
catcaagagctgcaacaatgtcagg

SEQ ID NO: 1784933 - DNA, 25 bp, Homo sapien
tatggttaccatcccactgaagcag

SEQ ID NO: 1784934 - DNA, 25 bp, Homo sapien
tcaatctggtttggtaggaaaagca

SEQ ID NO: 1784935 - DNA, 25 bp, Homo sapien
ctgaagcagtaacacttaggtcatc

SEQ ID NO: 1784936 - DNA, 25 bp, Homo sapien
ggtctcttccaactgtaacgttcta

SEQ ID NO: 1784937 - DNA, 25 bp, Homo sapien
tagtcatcattgctatctcccttct

SEQ ID NO: 1784938 - DNA, 25 bp, Homo sapien
ttccgggcacagacatacagtcttc

SEQ ID NO: 1784939 - DNA, 25 bp, Homo sapien
tccagaacaagtgatctgctatagc

SEQ ID NO: 1784940 - DNA, 25 bp, Homo sapien
ggcctgcagagtcatagtcatcatt

SEQ ID NO: 1784941 - DNA, 25 bp, Homo sapien
gtcatcgaatactccgtgaagcgac

SEQ ID NO: 1784942 - DNA, 25 bp, Homo sapien
actccgtgaagcgactctttgtttc

SEQ ID NO: 1784943 - DNA, 25 bp, Homo sapien
tcatgtagggtcagctgttcatttc

SEQ ID NO: 1784944 - DNA, 25 bp, Homo sapien
tcaaacctctcatcatgtagggtca

SEQ ID NO: 1784945 - DNA, 25 bp, Homo sapien
gatacccttctgctttatgctggct

SEQ ID NO: 1784946 - DNA, 25 bp, Homo sapien
caacctgggctaaagctgacaggta

SEQ ID NO: 1784947 - DNA, 25 bp, Homo sapien
tattacagctacttttggttaccca

SEQ ID NO: 1784948 - DNA, 25 bp, Homo sapien
ctcctggtgtaagcgtgtgatgtaa

SEQ ID NO: 1784949 - DNA, 25 bp, Homo sapien
cagcttggagaacaaaatgctaggc

SEQ ID NO: 1784950 - DNA, 25 bp, Homo sapien
tgctaggcagcacagattacgtcag

SEQ ID NO: 1784951 - DNA, 25 bp, Homo sapien
gattcacctggatggcaactattcc

SEQ ID NO: 1784952 - DNA, 25 bp, Homo sapien
taagaacgtttgatcagccaactcc

SEQ ID NO: 1784953 - DNA, 25 bp, Homo sapien
tttatagtagtcattcaaaacttcc

SEQ ID NO: 1784954 - DNA, 25 bp, Homo sapien
aaacttcctgtaagcgattgctgtc

SEQ ID NO: 1784955 - DNA, 25 bp, Homo sapien
tgtccacttgaatagaaccttccaa

SEQ ID NO: 1784956 - DNA, 25 bp, Homo sapien
tctgcattatccagagctccaattt

SEQ ID NO: 1784957 - DNA, 25 bp, Homo sapien
tcaatatgtattttgactaggttaa

SEQ ID NO: 1784958 - DNA, 25 bp, Homo sapien
caatatgtattttgactaggttaat

SEQ ID NO: 1784959 - DNA, 25 bp, Homo sapien
aattcagttatactatagacctttc

SEQ ID NO: 1784960 - DNA, 25 bp, Homo sapien
ctcaattcagttatactatagacct

SEQ ID NO: 1784961 - DNA, 25 bp, Homo sapien
cactcggctgataggaaggtaacat

SEQ ID NO: 1784962 - DNA, 25 bp, Homo sapien
tccagctggagagacaaattcttgt

SEQ ID NO: 1784963 - DNA, 25 bp, Homo sapien
tgcacatattccagtgacccatccg

SEQ ID NO: 1784964 - DNA, 25 bp, Homo sapien
ggtcagttccgctaatccagctgga

SEQ ID NO: 1784965 - DNA, 25 bp, Homo sapien
ttcaaggactacagtaatcatttct

SEQ ID NO: 1784966 - DNA, 25 bp, Homo sapien
ttcaagggtattcaattttacacaa

SEQ ID NO: 1784967 - DNA, 25 bp, Homo sapien
actatcataaagtgaatatacttac

SEQ ID NO: 1784968 - DNA, 25 bp, Homo sapien
ccagcctaaagttgatatactttaa

SEQ ID NO: 1784969 - DNA, 25 bp, Homo sapien
aattactatcataaagtgaatatac

SEQ ID NO: 1784970 - DNA, 25 bp, Homo sapien
gcacccagcctaaagttgatatact

SEQ ID NO: 1784971 - DNA, 25 bp, Homo sapien
tcatagtgcaaaataacactggagt

SEQ ID NO: 1784972 - DNA, 25 bp, Homo sapien
acaactcagtattggaatattactc

SEQ ID NO: 1784973 - DNA, 25 bp, Homo sapien
ttacaactcagtattggaatattac

SEQ ID NO: 1784974 - DNA, 25 bp, Homo sapien
cactggagtctctgatcaatgtttt

SEQ ID NO: 1784975 - DNA, 25 bp, Homo sapien
taagctgtggatggttatataaatt

SEQ ID NO: 1784976 - DNA, 25 bp, Homo sapien
gatacttgataagctgtggatggtt

SEQ ID NO: 1784977 - DNA, 25 bp, Homo sapien
gataagctgtggatggttatataaa

SEQ ID NO: 1784978 - DNA, 25 bp, Homo sapien
cttgataagctgtggatggttatat

SEQ ID NO: 1784979 - DNA, 25 bp, Homo sapien
gaagatcactgccattaatcatctg

SEQ ID NO: 1784980 - DNA, 25 bp, Homo sapien
gacattgagaggtattcctgtttta

SEQ ID NO: 1784981 - DNA, 25 bp, Homo sapien
gaacgtggctgagttgatactttag

SEQ ID NO: 1784982 - DNA, 25 bp, Homo sapien
tagaagatattcgaatttgtttggg

SEQ ID NO: 1784983 - DNA, 25 bp, Homo sapien
ctatagctttagaccctcaacattc

SEQ ID NO: 1784984 - DNA, 25 bp, Homo sapien
gctttagaccctcaacattcttctt

SEQ ID NO: 1784985 - DNA, 25 bp, Homo sapien
tttctccagtttaaatgctaatttg

SEQ ID NO: 1784986 - DNA, 25 bp, Homo sapien
ccagtttaaatgctaatttgttagc

SEQ ID NO: 1784987 - DNA, 25 bp, Homo sapien
gatgaggagcccctaataaagtgcc

SEQ ID NO: 1784988 - DNA, 25 bp, Homo sapien
aagtgccttgccctgtatgctccac

SEQ ID NO: 1784989 - DNA, 25 bp, Homo sapien
tttacttcagagcaaatgtaagctt

SEQ ID NO: 1784990 - DNA, 25 bp, Homo sapien
cctcttatctgccagtaaaaatggc

SEQ ID NO: 1784991 - DNA, 25 bp, Homo sapien
caggccacttttctatttacagcaa

SEQ ID NO: 1784992 - DNA, 25 bp, Homo sapien
taaatcccaaaagcaagtcatccag

SEQ ID NO: 1784993 - DNA, 25 bp, Homo sapien
gaaaacttagcttcctaacagtgga

SEQ ID NO: 1784994 - DNA, 25 bp, Homo sapien
tcaaaattgagtttaaccaggccac

SEQ ID NO: 1784995 - DNA, 25 bp, Homo sapien
aactgatgttgaaaagacaaactcc

SEQ ID NO: 1784996 - DNA, 25 bp, Homo sapien
tgaatggttccaagcattaactgat

SEQ ID NO: 1784997 - DNA, 25 bp, Homo sapien
ggttccaagcattaactgatgttga

SEQ ID NO: 1784998 - DNA, 25 bp, Homo sapien
gatgttgaaaagacaaactccccag

SEQ ID NO: 1784999 - DNA, 25 bp, Homo sapien
tgttcctaactcagagcaacagtgt

SEQ ID NO: 1785000 - DNA, 25 bp, Homo sapien
ttctgttcctaactcagagcaacag

SEQ ID NO: 1785001 - DNA, 25 bp, Homo sapien
cctaactcagagcaacagtgttcac

SEQ ID NO: 1785002 - DNA, 25 bp, Homo sapien
aaaaatggttctgccccagccattc

SEQ ID NO: 1785003 - DNA, 25 bp, Homo sapien
gacatctaaacatgggttcttgtaa

SEQ ID NO: 1785004 - DNA, 25 bp, Homo sapien
catctaaacatgggttcttgtaaac

SEQ ID NO: 1785005 - DNA, 25 bp, Homo sapien
acatctaaacatgggttcttgtaaa

SEQ ID NO: 1785006 - DNA, 25 bp, Homo sapien
tgacatctaaacatgggttcttgta

SEQ ID NO: 1785007 - DNA, 25 bp, Homo sapien
acacaaaaaagctgaaggtggaggc

SEQ ID NO: 1785008 - DNA, 25 bp, Homo sapien
ttccacagacttcacagggaaacaa

SEQ ID NO: 1785009 - DNA, 25 bp, Homo sapien
cttccacagacttcacagggaaaca

SEQ ID NO: 1785010 - DNA, 25 bp, Homo sapien
tcttccacagacttcacagggaaac

SEQ ID NO: 1785011 - DNA, 25 bp, Homo sapien
cacagacttcacagggaaacaattc

SEQ ID NO: 1785012 - DNA, 25 bp, Homo sapien
tcttacatattggtccatgcctttc

SEQ ID NO: 1785013 - DNA, 25 bp, Homo sapien
agtttcttacatattggtccatgcc

SEQ ID NO: 1785014 - DNA, 25 bp, Homo sapien
ggattgtggagtcttcttcacagta

SEQ ID NO: 1785015 - DNA, 25 bp, Homo sapien
cttggattgtggagtcttcttcaca

SEQ ID NO: 1785016 - DNA, 25 bp, Homo sapien
gggtcggccttctttaatggctagc

SEQ ID NO: 1785017 - DNA, 25 bp, Homo sapien
tgctgatcggattgcattaataaag

SEQ ID NO: 1785018 - DNA, 25 bp, Homo sapien
tagcatacactgctttgctgatcgg

SEQ ID NO: 1785019 - DNA, 25 bp, Homo sapien
ggattgcattaataaagtcttcatg

SEQ ID NO: 1785020 - DNA, 25 bp, Homo sapien
gactcggcgagaagactgatccttg

SEQ ID NO: 1785021 - DNA, 25 bp, Homo sapien
gaaattagtatgtcgctcagctgcg

SEQ ID NO: 1785022 - DNA, 25 bp, Homo sapien
ctgagctggattaaagactcggcga

SEQ ID NO: 1785023 - DNA, 25 bp, Homo sapien
tctggatgccaatttggctgctgtc

SEQ ID NO: 1785024 - DNA, 25 bp, Homo sapien
ctccaaaagtgtcatgccaatcgta

SEQ ID NO: 1785025 - DNA, 25 bp, Homo sapien
caaaagtgtcatgccaatcgtatca

SEQ ID NO: 1785026 - DNA, 25 bp, Homo sapien
gtcatgccaatcgtatcaactggaa

SEQ ID NO: 1785027 - DNA, 25 bp, Homo sapien
gtgtcatgccaatcgtatcaactgg

SEQ ID NO: 1785028 - DNA, 25 bp, Homo sapien
ccaaagtggtgaagctggcacaaag

SEQ ID NO: 1785029 - DNA, 25 bp, Homo sapien
caaaggaaacaaatacggctgttca

SEQ ID NO: 1785030 - DNA, 25 bp, Homo sapien
ttctgtgttcgcaatcaccactcag

SEQ ID NO: 1785031 - DNA, 25 bp, Homo sapien
aagcttcactattagacaaggcccc

SEQ ID NO: 1785032 - DNA, 25 bp, Homo sapien
tgggacttcattcgtggccaccagg

SEQ ID NO: 1785033 - DNA, 25 bp, Homo sapien
cttggttgggacttcattcgtggcc

SEQ ID NO: 1785034 - DNA, 25 bp, Homo sapien
gttgggacttcattcgtggccacca

SEQ ID NO: 1785035 - DNA, 25 bp, Homo sapien
gacttggttgggacttcattcgtgg

SEQ ID NO: 1785036 - DNA, 25 bp, Homo sapien
ttagagcttttgcagactaccagtg

SEQ ID NO: 1785037 - DNA, 25 bp, Homo sapien
gactaccagtgaatcccaaacccaa

SEQ ID NO: 1785038 - DNA, 25 bp, Homo sapien
caaacccaacagtgatctcctctga

SEQ ID NO: 1785039 - DNA, 25 bp, Homo sapien
tgagagatgaaatgcgtgctttgac

SEQ ID NO: 1785040 - DNA, 25 bp, Homo sapien
tatgcattgtgggaatacctgaagg

SEQ ID NO: 1785041 - DNA, 25 bp, Homo sapien
ggatgaaacacagtgggccaacata

SEQ ID NO: 1785042 - DNA, 25 bp, Homo sapien
ggacctgtgggacactgtcaaactg

SEQ ID NO: 1785043 - DNA, 25 bp, Homo sapien
caaaccaggaatgttcaataagatc

SEQ ID NO: 1785044 - DNA, 25 bp, Homo sapien
ctccagaagcagggtccatagctaa

SEQ ID NO: 1785045 - DNA, 25 bp, Homo sapien
ctaaatccttgtctgagttttgctc

SEQ ID NO: 1785046 - DNA, 25 bp, Homo sapien
atccttgtctgagttttgctccaga

SEQ ID NO: 1785047 - DNA, 25 bp, Homo sapien
ttactaaatccttgtctgagttttg

SEQ ID NO: 1785048 - DNA, 25 bp, Homo sapien
tacttgttctaagtgatgcttcaag

SEQ ID NO: 1785049 - DNA, 25 bp, Homo sapien
cattctcgggtacgcaaccatccag

SEQ ID NO: 1785050 - DNA, 25 bp, Homo sapien
cccttaggtggcattctcgggtacg

SEQ ID NO: 1785051 - DNA, 25 bp, Homo sapien
gaagaatcaagggtgtaaaaacaga

SEQ ID NO: 1785052 - DNA, 25 bp, Homo sapien
agctccacctgtgtcaacaacatga

SEQ ID NO: 1785053 - DNA, 25 bp, Homo sapien
cattaaattcacagcactaagagct

SEQ ID NO: 1785054 - DNA, 25 bp, Homo sapien
tcaagacagaaaacacttccggctc

SEQ ID NO: 1785055 - DNA, 25 bp, Homo sapien
taagatggaagcttgtatgcgtcca

SEQ ID NO: 1785056 - DNA, 25 bp, Homo sapien
agactaaactggttgtcagttacat

SEQ ID NO: 1785057 - DNA, 25 bp, Homo sapien
gaaagactaaactggttgtcagtta

SEQ ID NO: 1785058 - DNA, 25 bp, Homo sapien
aagactaaactggttgtcagttaca

SEQ ID NO: 1785059 - DNA, 25 bp, Homo sapien
gatttggaaaacgagactgggacta

SEQ ID NO: 1785060 - DNA, 25 bp, Homo sapien
taaataactttatgtggcactgcct

SEQ ID NO: 1785061 - DNA, 25 bp, Homo sapien
cctgagtgttcatgctttgtaccaa

SEQ ID NO: 1785062 - DNA, 25 bp, Homo sapien
gaacgcgtgttctgtaatcaaactg

SEQ ID NO: 1785063 - DNA, 25 bp, Homo sapien
caggccgaaggctaactaggagaat

SEQ ID NO: 1785064 - DNA, 25 bp, Homo sapien
gtagctttatggcacctgtaggact

SEQ ID NO: 1785065 - DNA, 25 bp, Homo sapien
gactgacttctaggaaggctgtcca

SEQ ID NO: 1785066 - DNA, 25 bp, Homo sapien
tgtaggactagttcatgccaggccc

SEQ ID NO: 1785067 - DNA, 25 bp, Homo sapien
tgtcacgtctaatgtggctgctgcc

SEQ ID NO: 1785068 - DNA, 25 bp, Homo sapien
caagaggacacgctaagaacgatca

SEQ ID NO: 1785069 - DNA, 25 bp, Homo sapien
gctgctgcctcgtgtcacatctgaa

SEQ ID NO: 1785070 - DNA, 25 bp, Homo sapien
taaatacgtctatgcggaaccctcc

SEQ ID NO: 1785071 - DNA, 25 bp, Homo sapien
actctgctgtgattgtactcatcac

SEQ ID NO: 1785072 - DNA, 25 bp, Homo sapien
gggcatttatgggatgttcgtgcat

SEQ ID NO: 1785073 - DNA, 25 bp, Homo sapien
gctgtgattgtactcatcactgcca

SEQ ID NO: 1785074 - DNA, 25 bp, Homo sapien
agggcatttatgggatgttcgtgca

SEQ ID NO: 1785075 - DNA, 25 bp, Homo sapien
tagcagaggcaaatgttttaccaga

SEQ ID NO: 1785076 - DNA, 25 bp, Homo sapien
ggcccttgagatcactttccttgct

SEQ ID NO: 1785077 - DNA, 25 bp, Homo sapien
taaatttgacaggagatctgcctcc

SEQ ID NO: 1785078 - DNA, 25 bp, Homo sapien
taccagatatgttgccactgtataa

SEQ ID NO: 1785079 - DNA, 25 bp, Homo sapien
accggatagttcttttctaagctca

SEQ ID NO: 1785080 - DNA, 25 bp, Homo sapien
cttttctaagctcagctctttcttg

SEQ ID NO: 1785081 - DNA, 25 bp, Homo sapien
ttctaagctcagctctttcttgaaa

SEQ ID NO: 1785082 - DNA, 25 bp, Homo sapien
ctaagctcagctctttcttgaaata

SEQ ID NO: 1785083 - DNA, 25 bp, Homo sapien
ttgcaaaatctgaaatgtctgccgt

SEQ ID NO: 1785084 - DNA, 25 bp, Homo sapien
aatctgaaatgtctgccgtctcctc

SEQ ID NO: 1785085 - DNA, 25 bp, Homo sapien
caaaatctgaaatgtctgccgtctc

SEQ ID NO: 1785086 - DNA, 25 bp, Homo sapien
tctgaaatgtctgccgtctcctcac

SEQ ID NO: 1785087 - DNA, 25 bp, Homo sapien
tgatgctttagtattacagactgta

SEQ ID NO: 1785088 - DNA, 25 bp, Homo sapien
taatgggactagacagtaactgttt

SEQ ID NO: 1785089 - DNA, 25 bp, Homo sapien
gcactttcgtctcttatggaaaata

SEQ ID NO: 1785090 - DNA, 25 bp, Homo sapien
agtctgttccaagtaataatgggac

SEQ ID NO: 1785091 - DNA, 25 bp, Homo sapien
gacccgattcttacaacctggcgct

SEQ ID NO: 1785092 - DNA, 25 bp, Homo sapien
ggcgttcgcgcctatctggtatgag

SEQ ID NO: 1785093 - DNA, 25 bp, Homo sapien
gctgccagaggcgttcgcgcctatc

SEQ ID NO: 1785094 - DNA, 25 bp, Homo sapien
agggtgtgcctttgccgcgccgcct

SEQ ID NO: 1785095 - DNA, 25 bp, Homo sapien
aaaatcagtgttgtatcaggtggac

SEQ ID NO: 1785096 - DNA, 25 bp, Homo sapien
aatggttcagtggtcctctggtcac

SEQ ID NO: 1785097 - DNA, 25 bp, Homo sapien
tgcttttagagacacgcaggcgtgc

SEQ ID NO: 1785098 - DNA, 25 bp, Homo sapien
tctctccagggcatataattcatca

SEQ ID NO: 1785099 - DNA, 25 bp, Homo sapien
tgatatgcattgtattccttaaaag

SEQ ID NO: 1785100 - DNA, 25 bp, Homo sapien
ataatgttgatatgcattgtattcc

SEQ ID NO: 1785101 - DNA, 25 bp, Homo sapien
gatatgcattgtattccttaaaaga

SEQ ID NO: 1785102 - DNA, 25 bp, Homo sapien
tgttgatatgcattgtattccttaa

SEQ ID NO: 1785103 - DNA, 25 bp, Homo sapien
accagctaacatcataatgacagga

SEQ ID NO: 1785104 - DNA, 25 bp, Homo sapien
gctgcatcaattaacaggcaaaaca

SEQ ID NO: 1785105 - DNA, 25 bp, Homo sapien
gatactaggaagaagctgcatcaat

SEQ ID NO: 1785106 - DNA, 25 bp, Homo sapien
tactaggaagaagctgcatcaatta

SEQ ID NO: 1785107 - DNA, 25 bp, Homo sapien
cttcactaagacccaaaactttgct

SEQ ID NO: 1785108 - DNA, 25 bp, Homo sapien
cactaagacccaaaactttgctaag

SEQ ID NO: 1785109 - DNA, 25 bp, Homo sapien
agagatggaccagcacaagggccat

SEQ ID NO: 1785110 - DNA, 25 bp, Homo sapien
aagacccaaaactttgctaaggatg

SEQ ID NO: 1785111 - DNA, 25 bp, Homo sapien
ttatatctctgacaactgtggctcc

SEQ ID NO: 1785112 - DNA, 25 bp, Homo sapien
tatatctctgacaactgtggctcca

SEQ ID NO: 1785113 - DNA, 25 bp, Homo sapien
ctgtggctccagatctggagatgag

SEQ ID NO: 1785114 - DNA, 25 bp, Homo sapien
taggttgcacagatagactgtcctg

SEQ ID NO: 1785115 - DNA, 25 bp, Homo sapien
tggaagagactgacttgctaacgtc

SEQ ID NO: 1785116 - DNA, 25 bp, Homo sapien
tgaagtgaaatgagaggctcccttt

SEQ ID NO: 1785117 - DNA, 25 bp, Homo sapien
tcctggtggaacttggtaggttgca

SEQ ID NO: 1785118 - DNA, 25 bp, Homo sapien
gtccgcgggccaggcgaggtagcct

SEQ ID NO: 1785119 - DNA, 25 bp, Homo sapien
tttctccgtcgtctgcagctcttcg

SEQ ID NO: 1785120 - DNA, 25 bp, Homo sapien
ccggcggccacctttgtgcggcttg

SEQ ID NO: 1785121 - DNA, 25 bp, Homo sapien
gatggcggtcggtgcttgggacacc

SEQ ID NO: 1785122 - DNA, 25 bp, Homo sapien
gctccaacccgtgccgcaggtgccc

SEQ ID NO: 1785123 - DNA, 25 bp, Homo sapien
tccaacccgtgccgcaggtgcccac

SEQ ID NO: 1785124 - DNA, 25 bp, Homo sapien
cgggggctccaacccgtgccgcagg

SEQ ID NO: 1785125 - DNA, 25 bp, Homo sapien
gggctccaacccgtgccgcaggtgc

SEQ ID NO: 1785126 - DNA, 25 bp, Homo sapien
cacgggctccggactccagaacttt

SEQ ID NO: 1785127 - DNA, 25 bp, Homo sapien
actacacaaagggtctggtacaaat

SEQ ID NO: 1785128 - DNA, 25 bp, Homo sapien
acaaagggtctggtacaaatggctc

SEQ ID NO: 1785129 - DNA, 25 bp, Homo sapien
atggctctttgaagcgctatctgtg

SEQ ID NO: 1785130 - DNA, 25 bp, Homo sapien
tctgtgatctgtgttagctcagaat

SEQ ID NO: 1785131 - DNA, 25 bp, Homo sapien
catagccacgataactttcctttcc

SEQ ID NO: 1785132 - DNA, 25 bp, Homo sapien
gcgaatacctttgtgaatggaaatt

SEQ ID NO: 1785133 - DNA, 25 bp, Homo sapien
cagtgtgtaggttggaactcatagc

SEQ ID NO: 1785134 - DNA, 25 bp, Homo sapien
ggttgtaattccatcgctgaaagcg

SEQ ID NO: 1785135 - DNA, 25 bp, Homo sapien
cggcgagcgtttgagaagagggcat

SEQ ID NO: 1785136 - DNA, 25 bp, Homo sapien
caggactcctgagaactgtgctggt

SEQ ID NO: 1785137 - DNA, 25 bp, Homo sapien
tggtggagaggtcctagagccggcg

SEQ ID NO: 1785138 - DNA, 25 bp, Homo sapien
cctagagccggcgagcgtttgagaa

SEQ ID NO: 1785139 - DNA, 25 bp, Homo sapien
tcccagcgtttctccggtttgccaa

SEQ ID NO: 1785140 - DNA, 25 bp, Homo sapien
ttgccaatcctcttaagtattcctg

SEQ ID NO: 1785141 - DNA, 25 bp, Homo sapien
ttccgcgtacagaagtgcttgcccg

SEQ ID NO: 1785142 - DNA, 25 bp, Homo sapien
agtattcctgtctccaaaggaccgg

SEQ ID NO: 1785143 - DNA, 25 bp, Homo sapien
gcccgaggagaactgagactctgcc

SEQ ID NO: 1785144 - DNA, 25 bp, Homo sapien
gacaagcccgaggagaactgagact

SEQ ID NO: 1785145 - DNA, 25 bp, Homo sapien
cgccagccgacaagcccgaggagaa

SEQ ID NO: 1785146 - DNA, 25 bp, Homo sapien
cttgtggaccgccagccgacaagcc

SEQ ID NO: 1785147 - DNA, 25 bp, Homo sapien
gcgactcgtactgctcctacatggg

SEQ ID NO: 1785148 - DNA, 25 bp, Homo sapien
tctcaactacttcgccattgcggag

SEQ ID NO: 1785149 - DNA, 25 bp, Homo sapien
tgcagtccaagtacatcggcacggg

SEQ ID NO: 1785150 - DNA, 25 bp, Homo sapien
tggtgaaccaacaccgcgactcgta

SEQ ID NO: 1785151 - DNA, 25 bp, Homo sapien
gggaaagcggcgagatgactgaccg

SEQ ID NO: 1785152 - DNA, 25 bp, Homo sapien
gcggcgagatgactgaccgctacac

SEQ ID NO: 1785153 - DNA, 25 bp, Homo sapien
agcgaaggggaaagcggcgagatga

SEQ ID NO: 1785154 - DNA, 25 bp, Homo sapien
gaaagcggcgagatgactgaccgct

SEQ ID NO: 1785155 - DNA, 25 bp, Homo sapien
cgccattcttctgcgacggcgcgga

SEQ ID NO: 1785156 - DNA, 25 bp, Homo sapien
tctcctgtaaaacgctagagcggcg

SEQ ID NO: 1785157 - DNA, 25 bp, Homo sapien
agcttccgcgcggtggcttcactct

SEQ ID NO: 1785158 - DNA, 25 bp, Homo sapien
tagagcggcgagttgttacctgcgt

SEQ ID NO: 1785159 - DNA, 25 bp, Homo sapien
aatgcccatcattgagagagtggac

SEQ ID NO: 1785160 - DNA, 25 bp, Homo sapien
gttataacgaagtttaaacagcaga

SEQ ID NO: 1785161 - DNA, 25 bp, Homo sapien
aaacaactattgtgcatggatacac

SEQ ID NO: 1785162 - DNA, 25 bp, Homo sapien
tacatctcccacaagtatgcctggc

SEQ ID NO: 1785163 - DNA, 25 bp, Homo sapien
tcctgccgtcagatatcaaagcaag

SEQ ID NO: 1785164 - DNA, 25 bp, Homo sapien
cacagaacggtggtagcataatgtc

SEQ ID NO: 1785165 - DNA, 25 bp, Homo sapien
tattcttctaatctggctctgagca

SEQ ID NO: 1785166 - DNA, 25 bp, Homo sapien
tgaggatatcaacagtgcttagtgg

SEQ ID NO: 1785167 - DNA, 25 bp, Homo sapien
cttcatccatttcatccccttgagg

SEQ ID NO: 1785168 - DNA, 25 bp, Homo sapien
ttggggctgagatctggctttcttc

SEQ ID NO: 1785169 - DNA, 25 bp, Homo sapien
tttggggctgagatctggctttctt

SEQ ID NO: 1785170 - DNA, 25 bp, Homo sapien
catccatttcatccccttgaggctg

SEQ ID NO: 1785171 - DNA, 25 bp, Homo sapien
catttctggtaaactcctttttgca

SEQ ID NO: 1785172 - DNA, 25 bp, Homo sapien
aatactcatttctggtaaactcctt

SEQ ID NO: 1785173 - DNA, 25 bp, Homo sapien
tctggtaaactcctttttgcaccat

SEQ ID NO: 1785174 - DNA, 25 bp, Homo sapien
atactcatttctggtaaactccttt

SEQ ID NO: 1785175 - DNA, 25 bp, Homo sapien
tgcggtcacacggaggccgagcacc

SEQ ID NO: 1785176 - DNA, 25 bp, Homo sapien
ctgcggtcacacggaggccgagcac

SEQ ID NO: 1785177 - DNA, 25 bp, Homo sapien
agtcggcctcaacacccgccgggct

SEQ ID NO: 1785178 - DNA, 25 bp, Homo sapien
agaaccctgccgaccaacctctctc

SEQ ID NO: 1785179 - DNA, 25 bp, Homo sapien
ggaccctcgaggacgcgggcgagga

SEQ ID NO: 1785180 - DNA, 25 bp, Homo sapien
accctcgaggacgcgggcgaggagc

SEQ ID NO: 1785181 - DNA, 25 bp, Homo sapien
cctgggaccctcgaggacgcgggcg

SEQ ID NO: 1785182 - DNA, 25 bp, Homo sapien
tgggaccctcgaggacgcgggcgag

SEQ ID NO: 1785183 - DNA, 25 bp, Homo sapien
atttgcagtccggtgcgttgccgcg

SEQ ID NO: 1785184 - DNA, 25 bp, Homo sapien
tctgagcgtgggtgtggctgcggaa

SEQ ID NO: 1785185 - DNA, 25 bp, Homo sapien
atccccgctgcgctggtgacatttg

SEQ ID NO: 1785186 - DNA, 25 bp, Homo sapien
agtgggatgtttgccgcccaagaca

SEQ ID NO: 1785187 - DNA, 25 bp, Homo sapien
cgcttaggaagcgaccacagctggg

SEQ ID NO: 1785188 - DNA, 25 bp, Homo sapien
cgcagcgatggagaaggaaacctgt

SEQ ID NO: 1785189 - DNA, 25 bp, Homo sapien
agagtgcgaaccgagaagcccctct

SEQ ID NO: 1785190 - DNA, 25 bp, Homo sapien
agaaggaaacctgttgcgcgactcc

SEQ ID NO: 1785191 - DNA, 25 bp, Homo sapien
cctccccgatctctccgcgcacggg

SEQ ID NO: 1785192 - DNA, 25 bp, Homo sapien
cgcgggtcccgagcctagacagtgc

SEQ ID NO: 1785193 - DNA, 25 bp, Homo sapien
ccgcgggtcccgagcctagacagtg

SEQ ID NO: 1785194 - DNA, 25 bp, Homo sapien
tccgcgcacggggaaaatagtcagg

SEQ ID NO: 1785195 - DNA, 25 bp, Homo sapien
agatctcagctggtgtcagcggagt

SEQ ID NO: 1785196 - DNA, 25 bp, Homo sapien
gaaacaagtgcgtgagaaccacagg

SEQ ID NO: 1785197 - DNA, 25 bp, Homo sapien
cacaggaagtaatacagatctcagc

SEQ ID NO: 1785198 - DNA, 25 bp, Homo sapien
tctgctgagaaacggctgaaacaag

SEQ ID NO: 1785199 - DNA, 25 bp, Homo sapien
taaagcctagcattacagcaaggac

SEQ ID NO: 1785200 - DNA, 25 bp, Homo sapien
tataatctacagactacacactgga

SEQ ID NO: 1785201 - DNA, 25 bp, Homo sapien
gggtgccagagtttagccttctttg

SEQ ID NO: 1785202 - DNA, 25 bp, Homo sapien
tgttctgggtctggatagccacagc

SEQ ID NO: 1785203 - DNA, 25 bp, Homo sapien
tgctgtcccacggttcccatgactt

SEQ ID NO: 1785204 - DNA, 25 bp, Homo sapien
ctcctctgctgtcccacggttccca

SEQ ID NO: 1785205 - DNA, 25 bp, Homo sapien
cacggttcccatgacttctggataa

SEQ ID NO: 1785206 - DNA, 25 bp, Homo sapien
ctaaggctccggtgctcctctgctg

SEQ ID NO: 1785207 - DNA, 25 bp, Homo sapien
cataagcaacgtgaaccaaacagtt

SEQ ID NO: 1785208 - DNA, 25 bp, Homo sapien
taacatgtctgaagacagcgcttct

SEQ ID NO: 1785209 - DNA, 25 bp, Homo sapien
gactgtggtcatacttacggtgagg

SEQ ID NO: 1785210 - DNA, 25 bp, Homo sapien
aatacagtgtgctaaataggagtcc

SEQ ID NO: 1785211 - DNA, 25 bp, Homo sapien
tcaagaggatcagcataagaagagc

SEQ ID NO: 1785212 - DNA, 25 bp, Homo sapien
gcttcaacagcactagcaccttggg

SEQ ID NO: 1785213 - DNA, 25 bp, Homo sapien
gggcttatctgctctgggaacactg

SEQ ID NO: 1785214 - DNA, 25 bp, Homo sapien
caagaagtggtgtcggtctctctac

SEQ ID NO: 1785215 - DNA, 25 bp, Homo sapien
tggcaagcaaagacattcgagaagc

SEQ ID NO: 1785216 - DNA, 25 bp, Homo sapien
caaggaaggaaaaacgaatctcagt

SEQ ID NO: 1785217 - DNA, 25 bp, Homo sapien
taactttctgcgtgtgtctgcagcc

SEQ ID NO: 1785218 - DNA, 25 bp, Homo sapien
tagaatcaagcccactccgtaaagc

SEQ ID NO: 1785219 - DNA, 25 bp, Homo sapien
gacagtcttctcactccctttagag

SEQ ID NO: 1785220 - DNA, 25 bp, Homo sapien
cactgacagtcttctcactcccttt

SEQ ID NO: 1785221 - DNA, 25 bp, Homo sapien
acagtcttctcactccctttagaga

SEQ ID NO: 1785222 - DNA, 25 bp, Homo sapien
ctgacagtcttctcactccctttag

SEQ ID NO: 1785223 - DNA, 25 bp, Homo sapien
tatgtatcctgcttatcctagacag

SEQ ID NO: 1785224 - DNA, 25 bp, Homo sapien
tgctctgtattgctctcctacagcc

SEQ ID NO: 1785225 - DNA, 25 bp, Homo sapien
ctattgggggaaatcatctcatcac

SEQ ID NO: 1785226 - DNA, 25 bp, Homo sapien
tgggacactagggatcatttgtatg

SEQ ID NO: 1785227 - DNA, 25 bp, Homo sapien
cgtcggccagcaagttctcggaaaa

SEQ ID NO: 1785228 - DNA, 25 bp, Homo sapien
gatgtggtccgtctcgaacacgatg

SEQ ID NO: 1785229 - DNA, 25 bp, Homo sapien
gatgtctcggtacagggactccagg

SEQ ID NO: 1785230 - DNA, 25 bp, Homo sapien
caagaagagctcgtgtacgtcgcgg

SEQ ID NO: 1785231 - DNA, 25 bp, Homo sapien
gaagaatcatcggacggtatcaact

SEQ ID NO: 1785232 - DNA, 25 bp, Homo sapien
tctgtcaagacggtaagagtgcaag

SEQ ID NO: 1785233 - DNA, 25 bp, Homo sapien
gaggaattgcatagcgtagaccgga

SEQ ID NO: 1785234 - DNA, 25 bp, Homo sapien
tgtctaccgccataaccaatgcaga

SEQ ID NO: 1785235 - DNA, 25 bp, Homo sapien
tacgccacactgagatggttcccaa

SEQ ID NO: 1785236 - DNA, 25 bp, Homo sapien
gatgtggcagcctcagtagctagta

SEQ ID NO: 1785237 - DNA, 25 bp, Homo sapien
ctaagagttgacacagaggaaggcc

SEQ ID NO: 1785238 - DNA, 25 bp, Homo sapien
aaaccaaggttcagtcagacagcta

SEQ ID NO: 1785239 - DNA, 25 bp, Homo sapien
tctcttggtggcactagaacacaat

SEQ ID NO: 1785240 - DNA, 25 bp, Homo sapien
cctggataccgatgcatactagatg

SEQ ID NO: 1785241 - DNA, 25 bp, Homo sapien
gatgagcacctttcctagttaggac

SEQ ID NO: 1785242 - DNA, 25 bp, Homo sapien
ctttggtgaataggccaggacgtgc

SEQ ID NO: 1785243 - DNA, 25 bp, Homo sapien
gctgcagttggagatacttcgcata

SEQ ID NO: 1785244 - DNA, 25 bp, Homo sapien
tctagtatataaggacatcttgccc

SEQ ID NO: 1785245 - DNA, 25 bp, Homo sapien
tttcaactccgctatcaaaaggaag

SEQ ID NO: 1785246 - DNA, 25 bp, Homo sapien
gaactttatatgttagagcctgaac

SEQ ID NO: 1785247 - DNA, 25 bp, Homo sapien
ttcagactgaccgttctcctgcatg

SEQ ID NO: 1785248 - DNA, 25 bp, Homo sapien
cccaagcagtctttctccagtccca

SEQ ID NO: 1785249 - DNA, 25 bp, Homo sapien
agactgaccgttctcctgcatgatc

SEQ ID NO: 1785250 - DNA, 25 bp, Homo sapien
ttcccaagcagtctttctccagtcc

SEQ ID NO: 1785251 - DNA, 25 bp, Homo sapien
gctgagaggcacttcaggcccaagc

SEQ ID NO: 1785252 - DNA, 25 bp, Homo sapien
aggcccaagcagcagtcgacctgca

SEQ ID NO: 1785253 - DNA, 25 bp, Homo sapien
gtcttcaacgcttgtaggaaaagaa

SEQ ID NO: 1785254 - DNA, 25 bp, Homo sapien
gcagcagtcgacctgcagggtcagc

SEQ ID NO: 1785255 - DNA, 25 bp, Homo sapien
tggcaattactttgatctatcacct

SEQ ID NO: 1785256 - DNA, 25 bp, Homo sapien
gttgctctattggactaccgtgaag

SEQ ID NO: 1785257 - DNA, 25 bp, Homo sapien
ggtggtaatacctccgctgaatgac

SEQ ID NO: 1785258 - DNA, 25 bp, Homo sapien
tgaccctagggcgaaggtacagaaa

SEQ ID NO: 1785259 - DNA, 25 bp, Homo sapien
agcacccctccttctaagcgccagg

SEQ ID NO: 1785260 - DNA, 25 bp, Homo sapien
ccacacagcattgtaagctgtcaga

SEQ ID NO: 1785261 - DNA, 25 bp, Homo sapien
agaggcctgctcctgtgtcctgacc

SEQ ID NO: 1785262 - DNA, 25 bp, Homo sapien
tttgccacacagcattgtaagctgt

SEQ ID NO: 1785263 - DNA, 25 bp, Homo sapien
tcttagagaactgcccctgcgagag

SEQ ID NO: 1785264 - DNA, 25 bp, Homo sapien
ggctctcctactgggtcacattgta

SEQ ID NO: 1785265 - DNA, 25 bp, Homo sapien
tcaggatagtaaccgggagaatcac

SEQ ID NO: 1785266 - DNA, 25 bp, Homo sapien
ggagtttccgccaactcttagagaa

SEQ ID NO: 1785267 - DNA, 25 bp, Homo sapien
tgggatctggcagccacacgactgt

SEQ ID NO: 1785268 - DNA, 25 bp, Homo sapien
tgagctgggatctggcagccacacg

SEQ ID NO: 1785269 - DNA, 25 bp, Homo sapien
tgttgtggagtggtaggggcctgtg

SEQ ID NO: 1785270 - DNA, 25 bp, Homo sapien
tggcagccacacgactgtccggcca

SEQ ID NO: 1785271 - DNA, 25 bp, Homo sapien
ctttgtagaaatgcgcgtgtcggct

SEQ ID NO: 1785272 - DNA, 25 bp, Homo sapien
cagtcttggatgcagcgcagtggcc

SEQ ID NO: 1785273 - DNA, 25 bp, Homo sapien
tttcaaggaatgaggtgcacgggca

SEQ ID NO: 1785274 - DNA, 25 bp, Homo sapien
cccgctaccctacgatgcaatgaga

SEQ ID NO: 1785275 - DNA, 25 bp, Homo sapien
tcgaacccacgcggacatatgtcca

SEQ ID NO: 1785276 - DNA, 25 bp, Homo sapien
gaacccacgcggacatatgtccatt

SEQ ID NO: 1785277 - DNA, 25 bp, Homo sapien
gggttcgaacccacgcggacatatg

SEQ ID NO: 1785278 - DNA, 25 bp, Homo sapien
cggacatatgtccattggatcttaa

SEQ ID NO: 1785279 - DNA, 25 bp, Homo sapien
taatgtctcgtgcaagttgtatcag

SEQ ID NO: 1785280 - DNA, 25 bp, Homo sapien
aacttaaccagtaggtgtcactgcg

SEQ ID NO: 1785281 - DNA, 25 bp, Homo sapien
tgtcactgcgtaaatacattggtag

SEQ ID NO: 1785282 - DNA, 25 bp, Homo sapien
tactggctgacatagatatagcctg

SEQ ID NO: 1785283 - DNA, 25 bp, Homo sapien
tgcatgctcagcctcagatgcatca

SEQ ID NO: 1785284 - DNA, 25 bp, Homo sapien
ccatgaggacttagggacccacggg

SEQ ID NO: 1785285 - DNA, 25 bp, Homo sapien
tgaggacttagggacccacgggcca

SEQ ID NO: 1785286 - DNA, 25 bp, Homo sapien
tcacatcggtagcatcctgtgcacc

SEQ ID NO: 1785287 - DNA, 25 bp, Homo sapien
agaagccaagtgtttggatcctgcc

SEQ ID NO: 1785288 - DNA, 25 bp, Homo sapien
gatcctgccagtgatccagtggttg

SEQ ID NO: 1785289 - DNA, 25 bp, Homo sapien
tgagaagccaagtgtttggatcctg

SEQ ID NO: 1785290 - DNA, 25 bp, Homo sapien
ccagtgatccagtggttgcattcat

SEQ ID NO: 1785291 - DNA, 25 bp, Homo sapien
cacacaaacgcacatctgttataga

SEQ ID NO: 1785292 - DNA, 25 bp, Homo sapien
tatagagcctgttccaagcttgaga

SEQ ID NO: 1785293 - DNA, 25 bp, Homo sapien
gcttgagaggttgaccaaaaaatat

SEQ ID NO: 1785294 - DNA, 25 bp, Homo sapien
tctgttttccaatatgcacacacaa

SEQ ID NO: 1785295 - DNA, 25 bp, Homo sapien
actttgttccggaagatcagcccca

SEQ ID NO: 1785296 - DNA, 25 bp, Homo sapien
cgcgtcgggaacttggcgccccaag

SEQ ID NO: 1785297 - DNA, 25 bp, Homo sapien
acgttcccgggtcagcgtctgccgg

SEQ ID NO: 1785298 - DNA, 25 bp, Homo sapien
atgagaagggtgcagatcagcgcca

SEQ ID NO: 1785299 - DNA, 25 bp, Homo sapien
gtgattccccaatcggcttctggag

SEQ ID NO: 1785300 - DNA, 25 bp, Homo sapien
cagtcaaagcgcaaacctggaaggg

SEQ ID NO: 1785301 - DNA, 25 bp, Homo sapien
ccacaactttgtgcgcgagagaggc

SEQ ID NO: 1785302 - DNA, 25 bp, Homo sapien
tccctgctccgaggaaaaacgactc

SEQ ID NO: 1785303 - DNA, 25 bp, Homo sapien
taggagtttgacacggagtaaccgc

SEQ ID NO: 1785304 - DNA, 25 bp, Homo sapien
gagaaattgacacccgactgaaaac

SEQ ID NO: 1785305 - DNA, 25 bp, Homo sapien
gctggccaagggctcctctaggagt

SEQ ID NO: 1785306 - DNA, 25 bp, Homo sapien
cttggagaagcagacacgaaccgaa

SEQ ID NO: 1785307 - DNA, 25 bp, Homo sapien
agggagcttggcgatcgcgccacac

SEQ ID NO: 1785308 - DNA, 25 bp, Homo sapien
cgctgccagggagcttggcgatcgc

SEQ ID NO: 1785309 - DNA, 25 bp, Homo sapien
gagcttggcgatcgcgccacactct

SEQ ID NO: 1785310 - DNA, 25 bp, Homo sapien
tgccagggagcttggcgatcgcgcc

SEQ ID NO: 1785311 - DNA, 25 bp, Homo sapien
gttgcagcaagagatccccagagtc

SEQ ID NO: 1785312 - DNA, 25 bp, Homo sapien
aagagatccccagagtccggaaaag

SEQ ID NO: 1785313 - DNA, 25 bp, Homo sapien
gcaagagatccccagagtccggaaa

SEQ ID NO: 1785314 - DNA, 25 bp, Homo sapien
cagcaagagatccccagagtccgga

SEQ ID NO: 1785315 - DNA, 25 bp, Homo sapien
cttgccagagtttcaagataatcca

SEQ ID NO: 1785316 - DNA, 25 bp, Homo sapien
acttcctacgatggttcagcttgac

SEQ ID NO: 1785317 - DNA, 25 bp, Homo sapien
ttctaaggctttcaacttcctacga

SEQ ID NO: 1785318 - DNA, 25 bp, Homo sapien
gccagagtttcaagataatccaaaa

SEQ ID NO: 1785319 - DNA, 25 bp, Homo sapien
tgaattcgttctgcccattgtcagg

SEQ ID NO: 1785320 - DNA, 25 bp, Homo sapien
cagatctggacttaatgatatcact

SEQ ID NO: 1785321 - DNA, 25 bp, Homo sapien
gatatcactgaattcgttctgccca

SEQ ID NO: 1785322 - DNA, 25 bp, Homo sapien
cattgtcaggactggcttcatgttc

SEQ ID NO: 1785323 - DNA, 25 bp, Homo sapien
gctatttgaccataacatccttttg

SEQ ID NO: 1785324 - DNA, 25 bp, Homo sapien
tactttgggaaataatgatctaacc

SEQ ID NO: 1785325 - DNA, 25 bp, Homo sapien
gttacctctactgagatcatgtatg

SEQ ID NO: 1785326 - DNA, 25 bp, Homo sapien
tatgtattgcctagggaaaaactct

SEQ ID NO: 1785327 - DNA, 25 bp, Homo sapien
ttatgccagccttttggattgtcca

SEQ ID NO: 1785328 - DNA, 25 bp, Homo sapien
gtccaaactcgaggatttggagagc

SEQ ID NO: 1785329 - DNA, 25 bp, Homo sapien
tggattgtccaaactcgaggatttg

SEQ ID NO: 1785330 - DNA, 25 bp, Homo sapien
gccttttggattgtccaaactcgag

SEQ ID NO: 1785331 - DNA, 25 bp, Homo sapien
gcatagacatgaataaaccatctct

SEQ ID NO: 1785332 - DNA, 25 bp, Homo sapien
cagcatcacattagactactcttta

SEQ ID NO: 1785333 - DNA, 25 bp, Homo sapien
tgaagctgaaattactaatagagga

SEQ ID NO: 1785334 - DNA, 25 bp, Homo sapien
tagaggatggcattatcttcacagc

SEQ ID NO: 1785335 - DNA, 25 bp, Homo sapien
tccatgctccacgtggcttctagag

SEQ ID NO: 1785336 - DNA, 25 bp, Homo sapien
ggaaagtactcaagactccagctgc

SEQ ID NO: 1785337 - DNA, 25 bp, Homo sapien
tctaactgtgacagccacccaaagg

SEQ ID NO: 1785338 - DNA, 25 bp, Homo sapien
tctagagcaccactcagaagagcaa

SEQ ID NO: 1785339 - DNA, 25 bp, Homo sapien
tctgaatgcggaatgaggagcaaag

SEQ ID NO: 1785340 - DNA, 25 bp, Homo sapien
aatctggtctgaatgcggaatgagg

SEQ ID NO: 1785341 - DNA, 25 bp, Homo sapien
caattaggttgagttggtgatgcaa

SEQ ID NO: 1785342 - DNA, 25 bp, Homo sapien
aatccgatggcaggagattgcagct

SEQ ID NO: 1785343 - DNA, 25 bp, Homo sapien
aatgggacgcttaaattcagatgac

SEQ ID NO: 1785344 - DNA, 25 bp, Homo sapien
gaaggatcatcaatgtttacaccca

SEQ ID NO: 1785345 - DNA, 25 bp, Homo sapien
gcagtgagccatgctagtaccgaaa

SEQ ID NO: 1785346 - DNA, 25 bp, Homo sapien
ggctgccaccataaacaatgacctg

SEQ ID NO: 1785347 - DNA, 25 bp, Homo sapien
ggtattgaagtttctggattcctct

SEQ ID NO: 1785348 - DNA, 25 bp, Homo sapien
ttagggcaagagtaggcaaagtcag

SEQ ID NO: 1785349 - DNA, 25 bp, Homo sapien
tagatgtggtattgaagtttctgga

SEQ ID NO: 1785350 - DNA, 25 bp, Homo sapien
tttcttagggcaagagtaggcaaag

SEQ ID NO: 1785351 - DNA, 25 bp, Homo sapien
tctgcacacgtgtatttattgagca

SEQ ID NO: 1785352 - DNA, 25 bp, Homo sapien
caggctcacacttgtggaaagcaat

SEQ ID NO: 1785353 - DNA, 25 bp, Homo sapien
cttctgcacacgtgtatttattgag

SEQ ID NO: 1785354 - DNA, 25 bp, Homo sapien
ggctcacacttgtggaaagcaatga

SEQ ID NO: 1785355 - DNA, 25 bp, Homo sapien
cctgagagaccatatgaagcggagc

SEQ ID NO: 1785356 - DNA, 25 bp, Homo sapien
ttctttggtacacccctggagcctc

SEQ ID NO: 1785357 - DNA, 25 bp, Homo sapien
gaatccactatggtgacttcagcca

SEQ ID NO: 1785358 - DNA, 25 bp, Homo sapien
gaatataatatccagcctcagcaag

SEQ ID NO: 1785359 - DNA, 25 bp, Homo sapien
ggggaaagtctgcaaactggagcca

SEQ ID NO: 1785360 - DNA, 25 bp, Homo sapien
ggaaagtctgcaaactggagccagg

SEQ ID NO: 1785361 - DNA, 25 bp, Homo sapien
gaaagtctgcaaactggagccaggg

SEQ ID NO: 1785362 - DNA, 25 bp, Homo sapien
aaaggggaaagtctgcaaactggag

SEQ ID NO: 1785363 - DNA, 25 bp, Homo sapien
aagaggtcagcatccaggtcctggg

SEQ ID NO: 1785364 - DNA, 25 bp, Homo sapien
ctgaagaggtcagcatccaggtcct

SEQ ID NO: 1785365 - DNA, 25 bp, Homo sapien
agcatccaggtcctgggtctgggct

SEQ ID NO: 1785366 - DNA, 25 bp, Homo sapien
cagcatccaggtcctgggtctgggc

SEQ ID NO: 1785367 - DNA, 25 bp, Homo sapien
caagttgtcacgatgtctgagcaca

SEQ ID NO: 1785368 - DNA, 25 bp, Homo sapien
aagttgtcacgatgtctgagcacag

SEQ ID NO: 1785369 - DNA, 25 bp, Homo sapien
aacaagttgtcacgatgtctgagca

SEQ ID NO: 1785370 - DNA, 25 bp, Homo sapien
tcaacaagttgtcacgatgtctgag

SEQ ID NO: 1785371 - DNA, 25 bp, Homo sapien
catgaaggaggttcgctggccaacc

SEQ ID NO: 1785372 - DNA, 25 bp, Homo sapien
tttttgtgctagactttcagctaca

SEQ ID NO: 1785373 - DNA, 25 bp, Homo sapien
ccaacccaagagcagctttttgtgc

SEQ ID NO: 1785374 - DNA, 25 bp, Homo sapien
aggaggttcgctggccaacccaaga

SEQ ID NO: 1785375 - DNA, 25 bp, Homo sapien
atcttcaacctgaatgcgaaagctc

SEQ ID NO: 1785376 - DNA, 25 bp, Homo sapien
cccagtattaaatgaggcacatgct

SEQ ID NO: 1785377 - DNA, 25 bp, Homo sapien
cttcaacctgaatgcgaaagctcag

SEQ ID NO: 1785378 - DNA, 25 bp, Homo sapien
tcccagtattaaatgaggcacatgc

SEQ ID NO: 1785379 - DNA, 25 bp, Homo sapien
aataactttgggcatattgtggtaa

SEQ ID NO: 1785380 - DNA, 25 bp, Homo sapien
tcatttgcttggagttagaggctca

SEQ ID NO: 1785381 - DNA, 25 bp, Homo sapien
actgagaactactccagggtagtga

SEQ ID NO: 1785382 - DNA, 25 bp, Homo sapien
caaacatccatccaaggtaaacaaa

SEQ ID NO: 1785383 - DNA, 25 bp, Homo sapien
caaaatctacttcaggtgggtgtca

SEQ ID NO: 1785384 - DNA, 25 bp, Homo sapien
gacacaatcgtgaacaagacaacct

SEQ ID NO: 1785385 - DNA, 25 bp, Homo sapien
tacagaacaggcaccgtacaaggca

SEQ ID NO: 1785386 - DNA, 25 bp, Homo sapien
gtacaaggcactatggacacaatcg

SEQ ID NO: 1785387 - DNA, 25 bp, Homo sapien
agcagccttcgaactgcacactggg

SEQ ID NO: 1785388 - DNA, 25 bp, Homo sapien
aaagcagccttcgaactgcacactg

SEQ ID NO: 1785389 - DNA, 25 bp, Homo sapien
cacctacatctgcttagatgatgag

SEQ ID NO: 1785390 - DNA, 25 bp, Homo sapien
tgggatgtcctgtgttattttgggt

SEQ ID NO: 1785391 - DNA, 25 bp, Homo sapien
tggtaatcgcttgcaagcctggaga

SEQ ID NO: 1785392 - DNA, 25 bp, Homo sapien
aatccaatctgcactttttccaatg

SEQ ID NO: 1785393 - DNA, 25 bp, Homo sapien
ttccaatgaaacgtggtggctgcca

SEQ ID NO: 1785394 - DNA, 25 bp, Homo sapien
aagcctggagagctacatgccctgg

SEQ ID NO: 1785395 - DNA, 25 bp, Homo sapien
gaagcacctggtgccctctaagtag

SEQ ID NO: 1785396 - DNA, 25 bp, Homo sapien
tcaaaatactggagcaggagcgagg

SEQ ID NO: 1785397 - DNA, 25 bp, Homo sapien
gaatggccctccaaccaagtcttga

SEQ ID NO: 1785398 - DNA, 25 bp, Homo sapien
aagagcccattatcaacagactagg

SEQ ID NO: 1785399 - DNA, 25 bp, Homo sapien
tgaagaccatgcaatgacctcagct

SEQ ID NO: 1785400 - DNA, 25 bp, Homo sapien
ccttcactaagtgcctgagcaggaa

SEQ ID NO: 1785401 - DNA, 25 bp, Homo sapien
caggaaatttctaccctggcatgga

SEQ ID NO: 1785402 - DNA, 25 bp, Homo sapien
tttaagacaagtgctcctggaggtc

SEQ ID NO: 1785403 - DNA, 25 bp, Homo sapien
tacaaagaaacaggtccgaccaggc

SEQ ID NO: 1785404 - DNA, 25 bp, Homo sapien
caactgagttgggacctagacgctg

SEQ ID NO: 1785405 - DNA, 25 bp, Homo sapien
tcttgagagggaagatgtaaggccc

SEQ ID NO: 1785406 - DNA, 25 bp, Homo sapien
tgttaggtcgctataccaatggaca

SEQ ID NO: 1785407 - DNA, 25 bp, Homo sapien
ataataggcactggcgaagtggcag

SEQ ID NO: 1785408 - DNA, 25 bp, Homo sapien
ataggcactggcgaagtggcagaga

SEQ ID NO: 1785409 - DNA, 25 bp, Homo sapien
taggcactggcgaagtggcagagaa

SEQ ID NO: 1785410 - DNA, 25 bp, Homo sapien
gcactggcgaagtggcagagaaaaa

SEQ ID NO: 1785411 - DNA, 25 bp, Homo sapien
aacgcaggtagaggggccgggcaca

SEQ ID NO: 1785412 - DNA, 25 bp, Homo sapien
atttttgtcctggagtgaagatttt

SEQ ID NO: 1785413 - DNA, 25 bp, Homo sapien
aatttttgtcctggagtgaagattt

SEQ ID NO: 1785414 - DNA, 25 bp, Homo sapien
gaatttttgtcctggagtgaagatt

SEQ ID NO: 1785415 - DNA, 25 bp, Homo sapien
ttactatcacggagccacagaggac

SEQ ID NO: 1785416 - DNA, 25 bp, Homo sapien
ggacttacccctcatgacatgcagt

SEQ ID NO: 1785417 - DNA, 25 bp, Homo sapien
gatgggattccatcctgtgaccaga

SEQ ID NO: 1785418 - DNA, 25 bp, Homo sapien
gacatgcagttggatggtgccataa

SEQ ID NO: 1785419 - DNA, 25 bp, Homo sapien
catcagcaatggtgagcaggagaca

SEQ ID NO: 1785420 - DNA, 25 bp, Homo sapien
ccagtctttctgctggtaactcctc

SEQ ID NO: 1785421 - DNA, 25 bp, Homo sapien
tgccaatcatcagcaatggtgagca

SEQ ID NO: 1785422 - DNA, 25 bp, Homo sapien
cagtctttctgctggtaactcctct

SEQ ID NO: 1785423 - DNA, 25 bp, Homo sapien
gggaacagggaaaacgtggtgatga

SEQ ID NO: 1785424 - DNA, 25 bp, Homo sapien
tacagcacagtaccttccaaagcca

SEQ ID NO: 1785425 - DNA, 25 bp, Homo sapien
cctacagcacagtaccttccaaagc

SEQ ID NO: 1785426 - DNA, 25 bp, Homo sapien
ggaacagggaaaacgtggtgatgac

SEQ ID NO: 1785427 - DNA, 25 bp, Homo sapien
aaggcacaagtgtggcccaacaagc

SEQ ID NO: 1785428 - DNA, 25 bp, Homo sapien
aaaaggcacaagtgtggcccaacaa

SEQ ID NO: 1785429 - DNA, 25 bp, Homo sapien
gaggcccttgagtgtgcattaatgc

SEQ ID NO: 1785430 - DNA, 25 bp, Homo sapien
ttaatgcaagaagaatcccagccag

SEQ ID NO: 1785431 - DNA, 25 bp, Homo sapien
gcccgcagggcagtgagctattcct

SEQ ID NO: 1785432 - DNA, 25 bp, Homo sapien
gcctgccataaagataatgatcctg

SEQ ID NO: 1785433 - DNA, 25 bp, Homo sapien
gatcctgatatccagactagcctga

SEQ ID NO: 1785434 - DNA, 25 bp, Homo sapien
gcttcttcataataacctggcctgc

SEQ ID NO: 1785435 - DNA, 25 bp, Homo sapien
gaatgacagtataaggtttatggtc

SEQ ID NO: 1785436 - DNA, 25 bp, Homo sapien
tctagaatgacagtataaggtttat

SEQ ID NO: 1785437 - DNA, 25 bp, Homo sapien
ggtttatggtcaatcttgtaaccca

SEQ ID NO: 1785438 - DNA, 25 bp, Homo sapien
cctctagaatgacagtataaggttt

SEQ ID NO: 1785439 - DNA, 25 bp, Homo sapien
ttcttctgtacgtcattgtgttcat

SEQ ID NO: 1785440 - DNA, 25 bp, Homo sapien
ctttgaaaatcgagcatttatccat

SEQ ID NO: 1785441 - DNA, 25 bp, Homo sapien
gaatgcggcatctgaaccatcgaag

SEQ ID NO: 1785442 - DNA, 25 bp, Homo sapien
tgcggcatctgaaccatcgaagttt

SEQ ID NO: 1785443 - DNA, 25 bp, Homo sapien
catctgaaccatcgaagtttttgaa

SEQ ID NO: 1785444 - DNA, 25 bp, Homo sapien
tcagaatgcggcatctgaaccatcg

SEQ ID NO: 1785445 - DNA, 25 bp, Homo sapien
caccctggcataagcccacccttcc

SEQ ID NO: 1785446 - DNA, 25 bp, Homo sapien
ccaccctggcataagcccacccttc

SEQ ID NO: 1785447 - DNA, 25 bp, Homo sapien
ttcccaccctggcataagcccaccc

SEQ ID NO: 1785448 - DNA, 25 bp, Homo sapien
tggaaaaggagccattataccaaaa

SEQ ID NO: 1785449 - DNA, 25 bp, Homo sapien
taccaaaaagatgcttgcacatgca

SEQ ID NO: 1785450 - DNA, 25 bp, Homo sapien
caaaaaagatgcttgcacactcatg

SEQ ID NO: 1785451 - DNA, 25 bp, Homo sapien
ccaaatgcccatcagaggtaggcat

SEQ ID NO: 1785452 - DNA, 25 bp, Homo sapien
caggtcatagggtgaccgatgagca

SEQ ID NO: 1785453 - DNA, 25 bp, Homo sapien
catagggtgaccgatgagcaatttc

SEQ ID NO: 1785454 - DNA, 25 bp, Homo sapien
atagggtgaccgatgagcaatttct

SEQ ID NO: 1785455 - DNA, 25 bp, Homo sapien
gtcatagggtgaccgatgagcaatt

SEQ ID NO: 1785456 - DNA, 25 bp, Homo sapien
ctgtgaacatatcattgatgggtgg

SEQ ID NO: 1785457 - DNA, 25 bp, Homo sapien
ttccatctttgaggtctgtgaacat

SEQ ID NO: 1785458 - DNA, 25 bp, Homo sapien
catctttgaggtctgtgaacatatc

SEQ ID NO: 1785459 - DNA, 25 bp, Homo sapien
catatcattgatgggtggtttccca

SEQ ID NO: 1785460 - DNA, 25 bp, Homo sapien
tgtctccagactctactgttcaaaa

SEQ ID NO: 1785461 - DNA, 25 bp, Homo sapien
aactcttaaatgtgtttgtctccag

SEQ ID NO: 1785462 - DNA, 25 bp, Homo sapien
cactgggtcatcaagtatcagcaat

SEQ ID NO: 1785463 - DNA, 25 bp, Homo sapien
aaatgttgttgtatcaaagcactca

SEQ ID NO: 1785464 - DNA, 25 bp, Homo sapien
tatttaaggcatgtacccttgtgga

SEQ ID NO: 1785465 - DNA, 25 bp, Homo sapien
ggcatgtacccttgtggaaccacgt

SEQ ID NO: 1785466 - DNA, 25 bp, Homo sapien
ctctgttgacgttatttaaggcatg

SEQ ID NO: 1785467 - DNA, 25 bp, Homo sapien
gatgtaaaacctgcagcactctgtt

SEQ ID NO: 1785468 - DNA, 25 bp, Homo sapien
tggacagcagtataagtgagagata

SEQ ID NO: 1785469 - DNA, 25 bp, Homo sapien
gaatcaggtaagcttaaatctcaaa

SEQ ID NO: 1785470 - DNA, 25 bp, Homo sapien
aaagcacatgactgtttcttcactc

SEQ ID NO: 1785471 - DNA, 25 bp, Homo sapien
gccaatgcatcaagcagttggtgag

SEQ ID NO: 1785472 - DNA, 25 bp, Homo sapien
cagtttgtgatttccatccacaatg

SEQ ID NO: 1785473 - DNA, 25 bp, Homo sapien
tgtcagttccccctatattcactaa

SEQ ID NO: 1785474 - DNA, 25 bp, Homo sapien
caaagtcagtttgtgatttccatcc

SEQ ID NO: 1785475 - DNA, 25 bp, Homo sapien
agtaaccccaaagtcagtttgtgat

SEQ ID NO: 1785476 - DNA, 25 bp, Homo sapien
tggtacttggttacggcagccttaa

SEQ ID NO: 1785477 - DNA, 25 bp, Homo sapien
gttatcacaggccaaggaactgcaa

SEQ ID NO: 1785478 - DNA, 25 bp, Homo sapien
gagaacaccacgtcaacactggagc

SEQ ID NO: 1785479 - DNA, 25 bp, Homo sapien
tctctattaaaaagtgattggaaat

SEQ ID NO: 1785480 - DNA, 25 bp, Homo sapien
cattaaaggcgagtccatctgtcca

SEQ ID NO: 1785481 - DNA, 25 bp, Homo sapien
ggatcttctcactgttcgtctgctg

SEQ ID NO: 1785482 - DNA, 25 bp, Homo sapien
ctggtggtctgacgcacccagctga

SEQ ID NO: 1785483 - DNA, 25 bp, Homo sapien
tgcaggtccgacatgacatccttca

SEQ ID NO: 1785484 - DNA, 25 bp, Homo sapien
tcttgggcctcgtcttttatataat

SEQ ID NO: 1785485 - DNA, 25 bp, Homo sapien
taatctgcaatgtcagctcaagcgt

SEQ ID NO: 1785486 - DNA, 25 bp, Homo sapien
gaagtctactggctattcttgggcc

SEQ ID NO: 1785487 - DNA, 25 bp, Homo sapien
ctcacatgtcggcaatttcatatgg

SEQ ID NO: 1785488 - DNA, 25 bp, Homo sapien
actttatcccagctgaagagatcag

SEQ ID NO: 1785489 - DNA, 25 bp, Homo sapien
acaactttatcccagctgaagagat

SEQ ID NO: 1785490 - DNA, 25 bp, Homo sapien
tttatcccagctgaagagatcaggt

SEQ ID NO: 1785491 - DNA, 25 bp, Homo sapien
tttgacaactttatcccagctgaag

SEQ ID NO: 1785492 - DNA, 25 bp, Homo sapien
ccttgctgaaggcatgttcaagtct

SEQ ID NO: 1785493 - DNA, 25 bp, Homo sapien
ttgctgaaggcatgttcaagtctct

SEQ ID NO: 1785494 - DNA, 25 bp, Homo sapien
cccaaataagtttgagccttgctga

SEQ ID NO: 1785495 - DNA, 25 bp, Homo sapien
agccttgctgaaggcatgttcaagt

SEQ ID NO: 1785496 - DNA, 25 bp, Homo sapien
tgggagtgtctctacctcacggatg

SEQ ID NO: 1785497 - DNA, 25 bp, Homo sapien
gaggtagcacctcaaacaaagatgt

SEQ ID NO: 1785498 - DNA, 25 bp, Homo sapien
tgtatattaattgcctcttcttcac

SEQ ID NO: 1785499 - DNA, 25 bp, Homo sapien
cacggatggcgtctatggtgacttg

SEQ ID NO: 1785500 - DNA, 25 bp, Homo sapien
gctgtccagatccatgtcaacctca

SEQ ID NO: 1785501 - DNA, 25 bp, Homo sapien
ttcctccaacgcaatctgatagctg

SEQ ID NO: 1785502 - DNA, 25 bp, Homo sapien
tgacagtgctgggagtttcagctcg

SEQ ID NO: 1785503 - DNA, 25 bp, Homo sapien
tcagcagaaagcaaccaggtcagca

SEQ ID NO: 1785504 - DNA, 25 bp, Homo sapien
catctagcattcagcagggtcatct

SEQ ID NO: 1785505 - DNA, 25 bp, Homo sapien
caaattcttcttcgtctgacagagt

SEQ ID NO: 1785506 - DNA, 25 bp, Homo sapien
tgtgttatcagttggttgcctgcct

SEQ ID NO: 1785507 - DNA, 25 bp, Homo sapien
gctctggtgtgcagtcagttccatc

SEQ ID NO: 1785508 - DNA, 25 bp, Homo sapien
taatcatctcgctttcacagacatg

SEQ ID NO: 1785509 - DNA, 25 bp, Homo sapien
aacaaagatcatgcagaattccagc

SEQ ID NO: 1785510 - DNA, 25 bp, Homo sapien
gaattccagcaatattacccgtaga

SEQ ID NO: 1785511 - DNA, 25 bp, Homo sapien
tactagagctcaactgtgcaaagca

SEQ ID NO: 1785512 - DNA, 25 bp, Homo sapien
tctgggcaccggagatacagggcaa

SEQ ID NO: 1785513 - DNA, 25 bp, Homo sapien
gatacagggcaagggaagacaccct

SEQ ID NO: 1785514 - DNA, 25 bp, Homo sapien
tacagggcaagggaagacacccttg

SEQ ID NO: 1785515 - DNA, 25 bp, Homo sapien
tcaaatatacattctgggcaccgga

SEQ ID NO: 1785516 - DNA, 25 bp, Homo sapien
cacagcattattcctacaagccttt

SEQ ID NO: 1785517 - DNA, 25 bp, Homo sapien
acacagcattattcctacaagcctt

SEQ ID NO: 1785518 - DNA, 25 bp, Homo sapien
aacacagcattattcctacaagcct

SEQ ID NO: 1785519 - DNA, 25 bp, Homo sapien
gaacacagcattattcctacaagcc

SEQ ID NO: 1785520 - DNA, 25 bp, Homo sapien
catcttctgaatgcgctcctctgtg

SEQ ID NO: 1785521 - DNA, 25 bp, Homo sapien
acatcatcatccagggggcaagttt

SEQ ID NO: 1785522 - DNA, 25 bp, Homo sapien
tctgcagttccatcagcacatcgtg

SEQ ID NO: 1785523 - DNA, 25 bp, Homo sapien
cctctgtgagtgttaaccaggcgga

SEQ ID NO: 1785524 - DNA, 25 bp, Homo sapien
tgttcagcctcaagatcactttgca

SEQ ID NO: 1785525 - DNA, 25 bp, Homo sapien
ccaccatgtgagttagtgaatttac

SEQ ID NO: 1785526 - DNA, 25 bp, Homo sapien
acaatgaccaccatgtgagttagtg

SEQ ID NO: 1785527 - DNA, 25 bp, Homo sapien
tcagcctcaagatcactttgcaaac

SEQ ID NO: 1785528 - DNA, 25 bp, Homo sapien
gatttcttgtaacctattccagcgt

SEQ ID NO: 1785529 - DNA, 25 bp, Homo sapien
caacggcatactgctgtccagcgct

SEQ ID NO: 1785530 - DNA, 25 bp, Homo sapien
aataattcctgccacaatatattga

SEQ ID NO: 1785531 - DNA, 25 bp, Homo sapien
cagcgttcttcagtccaacggcata

SEQ ID NO: 1785532 - DNA, 25 bp, Homo sapien
agccagacgtcgaacactgacactt

SEQ ID NO: 1785533 - DNA, 25 bp, Homo sapien
cactgacacttagttccttttggtc

SEQ ID NO: 1785534 - DNA, 25 bp, Homo sapien
tcggttaaccaagctttcaacaagc

SEQ ID NO: 1785535 - DNA, 25 bp, Homo sapien
gacgtcgaacactgacacttagttc

SEQ ID NO: 1785536 - DNA, 25 bp, Homo sapien
acagatgctgacaaccccatcactt

SEQ ID NO: 1785537 - DNA, 25 bp, Homo sapien
agatgctgacaaccccatcacttac

SEQ ID NO: 1785538 - DNA, 25 bp, Homo sapien
cagatgctgacaaccccatcactta

SEQ ID NO: 1785539 - DNA, 25 bp, Homo sapien
tcctggccaatctcactcagctgat

SEQ ID NO: 1785540 - DNA, 25 bp, Homo sapien
gctgatccaatgtttgacgcttcat

SEQ ID NO: 1785541 - DNA, 25 bp, Homo sapien
tatcaagtaattgtcccacatcctg

SEQ ID NO: 1785542 - DNA, 25 bp, Homo sapien
gaatcccatctttgagtcagttcct

SEQ ID NO: 1785543 - DNA, 25 bp, Homo sapien
attgcttgttctcttacacgaacag

SEQ ID NO: 1785544 - DNA, 25 bp, Homo sapien
ttgttctcttacacgaacagtctcc

SEQ ID NO: 1785545 - DNA, 25 bp, Homo sapien
tcttagcttcaatatccacatggat

SEQ ID NO: 1785546 - DNA, 25 bp, Homo sapien
caaaaggtccttctgaggaatctga

SEQ ID NO: 1785547 - DNA, 25 bp, Homo sapien
ctgtttgaagattcagaggtgacca

SEQ ID NO: 1785548 - DNA, 25 bp, Homo sapien
tgtttgaagattcagaggtgaccat

SEQ ID NO: 1785549 - DNA, 25 bp, Homo sapien
caacagctctgcacttatagcatca

SEQ ID NO: 1785550 - DNA, 25 bp, Homo sapien
tttcatttcggaagtgtcttgcatc

SEQ ID NO: 1785551 - DNA, 25 bp, Homo sapien
ttttcatttcggaagtgtcttgcat

SEQ ID NO: 1785552 - DNA, 25 bp, Homo sapien
tttttcatttcggaagtgtcttgca

SEQ ID NO: 1785553 - DNA, 25 bp, Homo sapien
gtttaattcatctgctctggggatt

SEQ ID NO: 1785554 - DNA, 25 bp, Homo sapien
catttgctccacaaggatttgtcca

SEQ ID NO: 1785555 - DNA, 25 bp, Homo sapien
cccatttgctccacaaggatttgtc

SEQ ID NO: 1785556 - DNA, 25 bp, Homo sapien
tggtttaattcatctgctctgggga

SEQ ID NO: 1785557 - DNA, 25 bp, Homo sapien
ctatgcagacatgaaaaacaagcaa

SEQ ID NO: 1785558 - DNA, 25 bp, Homo sapien
tgcagacatgaaaaacaagcaaaca

SEQ ID NO: 1785559 - DNA, 25 bp, Homo sapien
tatgcagacatgaaaaacaagcaaa

SEQ ID NO: 1785560 - DNA, 25 bp, Homo sapien
cagacatgaaaaacaagcaaacagt

SEQ ID NO: 1785561 - DNA, 25 bp, Homo sapien
tcaagctcatcaagctgcttgaaat

SEQ ID NO: 1785562 - DNA, 25 bp, Homo sapien
aaggactgccgggaagattcagaaa

SEQ ID NO: 1785563 - DNA, 25 bp, Homo sapien
caagcttggcaaggactgccgggaa

SEQ ID NO: 1785564 - DNA, 25 bp, Homo sapien
gaatccttcaagcttggcaaggact

SEQ ID NO: 1785565 - DNA, 25 bp, Homo sapien
gatgttgttgacgatcctctacagc

SEQ ID NO: 1785566 - DNA, 25 bp, Homo sapien
ggccaagaagatttgtcaattcccg

SEQ ID NO: 1785567 - DNA, 25 bp, Homo sapien
gaagccccgctggacaaaatctggg

SEQ ID NO: 1785568 - DNA, 25 bp, Homo sapien
gtacagcttggtagcggcccagaaa

SEQ ID NO: 1785569 - DNA, 25 bp, Homo sapien
tttccagatatgcatgtccaggttg

SEQ ID NO: 1785570 - DNA, 25 bp, Homo sapien
ggcaagatcattaaggacattcaga

SEQ ID NO: 1785571 - DNA, 25 bp, Homo sapien
aatgtttccagatatgcatgtccag

SEQ ID NO: 1785572 - DNA, 25 bp, Homo sapien
ccttggcaagatcattaaggacatt

SEQ ID NO: 1785573 - DNA, 25 bp, Homo sapien
tgcaggtttctgattctcaaggatt

SEQ ID NO: 1785574 - DNA, 25 bp, Homo sapien
tgtagatctttggaaaccaagacct

SEQ ID NO: 1785575 - DNA, 25 bp, Homo sapien
tctgagtgtgagagcaatttcctca

SEQ ID NO: 1785576 - DNA, 25 bp, Homo sapien
tttttctacatcaggatgaacattt

SEQ ID NO: 1785577 - DNA, 25 bp, Homo sapien
aacttaaactcccagtggcctctgg

SEQ ID NO: 1785578 - DNA, 25 bp, Homo sapien
aaacttaaactcccagtggcctctg

SEQ ID NO: 1785579 - DNA, 25 bp, Homo sapien
taaactcccagtggcctctggattt

SEQ ID NO: 1785580 - DNA, 25 bp, Homo sapien
cttaaactcccagtggcctctggat

SEQ ID NO: 1785581 - DNA, 25 bp, Homo sapien
gccacttaggataaccaggctttag

SEQ ID NO: 1785582 - DNA, 25 bp, Homo sapien
aaagtactctcaaaacctggttctg

SEQ ID NO: 1785583 - DNA, 25 bp, Homo sapien
ggaagaggcatgactacacaggtgt

SEQ ID NO: 1785584 - DNA, 25 bp, Homo sapien
tccagattccgggtcagagcaagtc

SEQ ID NO: 1785585 - DNA, 25 bp, Homo sapien
acttctcaatgactgttgaatcggc

SEQ ID NO: 1785586 - DNA, 25 bp, Homo sapien
gagcactggtctaactgcctctgta

SEQ ID NO: 1785587 - DNA, 25 bp, Homo sapien
agaagtctttcacgccatccatcca

SEQ ID NO: 1785588 - DNA, 25 bp, Homo sapien
tagacctgcgtcgtctccttgggca

SEQ ID NO: 1785589 - DNA, 25 bp, Homo sapien
gcaactggaccacttcgaagattag

SEQ ID NO: 1785590 - DNA, 25 bp, Homo sapien
aagtttctccagttgagtttggtag

SEQ ID NO: 1785591 - DNA, 25 bp, Homo sapien
acttcgaagattagtctctatttcc

SEQ ID NO: 1785592 - DNA, 25 bp, Homo sapien
cctagtcttgtctgcacccaagttt

SEQ ID NO: 1785593 - DNA, 25 bp, Homo sapien
tgcaatagtctggaaatgctctaga

SEQ ID NO: 1785594 - DNA, 25 bp, Homo sapien
aatgccttcatgcttggaaaatcat

SEQ ID NO: 1785595 - DNA, 25 bp, Homo sapien
gccatcagattatagcacattgaga

SEQ ID NO: 1785596 - DNA, 25 bp, Homo sapien
catgtggttacctccttcctgagga

SEQ ID NO: 1785597 - DNA, 25 bp, Homo sapien
ttcttcctcggcctgggtcatccat

SEQ ID NO: 1785598 - DNA, 25 bp, Homo sapien
ctttcttcaggttcgcagctttttc

SEQ ID NO: 1785599 - DNA, 25 bp, Homo sapien
agctcttctggtgacttgtactcaa

SEQ ID NO: 1785600 - DNA, 25 bp, Homo sapien
tcttgactttcagacaacctacttt

SEQ ID NO: 1785601 - DNA, 25 bp, Homo sapien
ctgctctaatgaaacgtcagtgttc

SEQ ID NO: 1785602 - DNA, 25 bp, Homo sapien
gtgttcatatgtgccgtatgtatta

SEQ ID NO: 1785603 - DNA, 25 bp, Homo sapien
aatgaaacgtcagtgttcatatgtg

SEQ ID NO: 1785604 - DNA, 25 bp, Homo sapien
agtgttcatatgtgccgtatgtatt

SEQ ID NO: 1785605 - DNA, 25 bp, Homo sapien
agacgtcaactcctggccaccagag

SEQ ID NO: 1785606 - DNA, 25 bp, Homo sapien
ggcaccttggcagctaataacttga

SEQ ID NO: 1785607 - DNA, 25 bp, Homo sapien
tctagcgtgtggcactttcctcgaa

SEQ ID NO: 1785608 - DNA, 25 bp, Homo sapien
taattctccagcacaacattcagct

SEQ ID NO: 1785609 - DNA, 25 bp, Homo sapien
gcagttcaatccaacaagaccagac

SEQ ID NO: 1785610 - DNA, 25 bp, Homo sapien
gacagcatccgtcttctcaggcagg

SEQ ID NO: 1785611 - DNA, 25 bp, Homo sapien
tttaaccaggtagtttcaagatcca

SEQ ID NO: 1785612 - DNA, 25 bp, Homo sapien
tcaagatccaaatagtgaagcagtt

SEQ ID NO: 1785613 - DNA, 25 bp, Homo sapien
gaatctgggtgcgattatctgccgg

SEQ ID NO: 1785614 - DNA, 25 bp, Homo sapien
gagtctggccaagctctcgaatctg

SEQ ID NO: 1785615 - DNA, 25 bp, Homo sapien
tatctgccgggtggcgcagaacaga

SEQ ID NO: 1785616 - DNA, 25 bp, Homo sapien
tcatatcggctgttgaaagcctcca

SEQ ID NO: 1785617 - DNA, 25 bp, Homo sapien
tcagtcaggtatgtggtgagctgtt

SEQ ID NO: 1785618 - DNA, 25 bp, Homo sapien
ttggaaagcatctatcctgtcagtc

SEQ ID NO: 1785619 - DNA, 25 bp, Homo sapien
caagctctcttgcaagacttgaagc

SEQ ID NO: 1785620 - DNA, 25 bp, Homo sapien
cctgtcagtcaggtatgtggtgagc

SEQ ID NO: 1785621 - DNA, 25 bp, Homo sapien
tcctctggcagtcctactctctggg

SEQ ID NO: 1785622 - DNA, 25 bp, Homo sapien
ctgtagcacatccatctgacttcct

SEQ ID NO: 1785623 - DNA, 25 bp, Homo sapien
gggttagctcatgggctgagatctc

SEQ ID NO: 1785624 - DNA, 25 bp, Homo sapien
gagaacgcatatttcttctcaactc

SEQ ID NO: 1785625 - DNA, 25 bp, Homo sapien
gaagttctgctttcacgccatccag

SEQ ID NO: 1785626 - DNA, 25 bp, Homo sapien
ggaactttgtggacacctctcggag

SEQ ID NO: 1785627 - DNA, 25 bp, Homo sapien
gggtctacgtccttcacatccagaa

SEQ ID NO: 1785628 - DNA, 25 bp, Homo sapien
catgcgctgctcgaagttagctggc

SEQ ID NO: 1785629 - DNA, 25 bp, Homo sapien
ggtcattgtaaagaaccttcaggga

SEQ ID NO: 1785630 - DNA, 25 bp, Homo sapien
gctgctcatccatcccttttgggtt

SEQ ID NO: 1785631 - DNA, 25 bp, Homo sapien
aatatgtcttcctgttttaatcaca

SEQ ID NO: 1785632 - DNA, 25 bp, Homo sapien
tccacttcaagtttgacttcactca

SEQ ID NO: 1785633 - DNA, 25 bp, Homo sapien
accaattcagtttcagtagcagaaa

SEQ ID NO: 1785634 - DNA, 25 bp, Homo sapien
ttccgggccaactgtgatgctcttt

SEQ ID NO: 1785635 - DNA, 25 bp, Homo sapien
aaagccattcagagagagaagcagc

SEQ ID NO: 1785636 - DNA, 25 bp, Homo sapien
tcttcattttccgggccaactgtga

SEQ ID NO: 1785637 - DNA, 25 bp, Homo sapien
gatcacgcttttcatgagctttttt

SEQ ID NO: 1785638 - DNA, 25 bp, Homo sapien
cactgctcatggcatgatcacgctt

SEQ ID NO: 1785639 - DNA, 25 bp, Homo sapien
gctcatggcatgatcacgcttttca

SEQ ID NO: 1785640 - DNA, 25 bp, Homo sapien
ggcatgatcacgcttttcatgagct

SEQ ID NO: 1785641 - DNA, 25 bp, Homo sapien
tcttctaaaataggctcactgccct

SEQ ID NO: 1785642 - DNA, 25 bp, Homo sapien
gcgttaaggacgcagagcctctctt

SEQ ID NO: 1785643 - DNA, 25 bp, Homo sapien
gtattgcaccaatcttcagtccagg

SEQ ID NO: 1785644 - DNA, 25 bp, Homo sapien
tcaatcaagttttgcagggcagcac

SEQ ID NO: 1785645 - DNA, 25 bp, Homo sapien
tagagcttcagcttgataaagccag

SEQ ID NO: 1785646 - DNA, 25 bp, Homo sapien
taaagccaggtacttatgtgagcca

SEQ ID NO: 1785647 - DNA, 25 bp, Homo sapien
ttatgtgagccacgttcccatcaaa

SEQ ID NO: 1785648 - DNA, 25 bp, Homo sapien
tcaatttcatccaatagagcttcag

SEQ ID NO: 1785649 - DNA, 25 bp, Homo sapien
ggcatcatccagctcagatactaaa

SEQ ID NO: 1785650 - DNA, 25 bp, Homo sapien
actttggttctacaagctccctgct

SEQ ID NO: 1785651 - DNA, 25 bp, Homo sapien
tgcttgagcttccacgggcattcat

SEQ ID NO: 1785652 - DNA, 25 bp, Homo sapien
caaaataagggcttgatcgcggaca

SEQ ID NO: 1785653 - DNA, 25 bp, Homo sapien
gaccaaacattggtataatggttcc

SEQ ID NO: 1785654 - DNA, 25 bp, Homo sapien
cagagaaaggcacaccagtttcaaa

SEQ ID NO: 1785655 - DNA, 25 bp, Homo sapien
aaatgtttcagtggtgaccaaacat

SEQ ID NO: 1785656 - DNA, 25 bp, Homo sapien
gaaaggcacaccagtttcaaatgtt

SEQ ID NO: 1785657 - DNA, 25 bp, Homo sapien
catcttcatcactggattccaagtg

SEQ ID NO: 1785658 - DNA, 25 bp, Homo sapien
tcactggattccaagtgtttttcca

SEQ ID NO: 1785659 - DNA, 25 bp, Homo sapien
cttcatcactggattccaagtgttt

SEQ ID NO: 1785660 - DNA, 25 bp, Homo sapien
cactggattccaagtgtttttccac

SEQ ID NO: 1785661 - DNA, 25 bp, Homo sapien
ccataggttgatgtaacatttcttc

SEQ ID NO: 1785662 - DNA, 25 bp, Homo sapien
tcaatctgggcactctcctcatcca

SEQ ID NO: 1785663 - DNA, 25 bp, Homo sapien
taataattgcaaacggatcttttct

SEQ ID NO: 1785664 - DNA, 25 bp, Homo sapien
aattttgttgtatctagtatgcaaa

SEQ ID NO: 1785665 - DNA, 25 bp, Homo sapien
tgacagaccttgcatttaaagcttt

SEQ ID NO: 1785666 - DNA, 25 bp, Homo sapien
gactgaagactttgtatgtcgttat

SEQ ID NO: 1785667 - DNA, 25 bp, Homo sapien
ttcttcgatgaaggaatgacatgat

SEQ ID NO: 1785668 - DNA, 25 bp, Homo sapien
tcctaaacagtttcttcgatgaagg

SEQ ID NO: 1785669 - DNA, 25 bp, Homo sapien
gataatctgtaggaagaagtgatga

SEQ ID NO: 1785670 - DNA, 25 bp, Homo sapien
taaatagcagtgttgagctctggaa

SEQ ID NO: 1785671 - DNA, 25 bp, Homo sapien
ctaattccagaagcaagttgaccca

SEQ ID NO: 1785672 - DNA, 25 bp, Homo sapien
gctctggaacattaagcgataattc

SEQ ID NO: 1785673 - DNA, 25 bp, Homo sapien
caatagtagcatttgtacagaacac

SEQ ID NO: 1785674 - DNA, 25 bp, Homo sapien
aacattctctataggtaatgaggca

SEQ ID NO: 1785675 - DNA, 25 bp, Homo sapien
catgaaaggcttcagtaacattctc

SEQ ID NO: 1785676 - DNA, 25 bp, Homo sapien
gagaggaatgcactatcaaatccat

SEQ ID NO: 1785677 - DNA, 25 bp, Homo sapien
cagctgagtaagtgtatctctgatc

SEQ ID NO: 1785678 - DNA, 25 bp, Homo sapien
tgcattcagctgagtaagtgtatct

SEQ ID NO: 1785679 - DNA, 25 bp, Homo sapien
tctctgatctgaatggcttcaggtc

SEQ ID NO: 1785680 - DNA, 25 bp, Homo sapien
tgagtaagtgtatctctgatctgaa

SEQ ID NO: 1785681 - DNA, 25 bp, Homo sapien
gatcagcttgcgttctcagctggga

SEQ ID NO: 1785682 - DNA, 25 bp, Homo sapien
catgggagagccgaggaactggaga

SEQ ID NO: 1785683 - DNA, 25 bp, Homo sapien
gaactggagatcagcttgcgttctc

SEQ ID NO: 1785684 - DNA, 25 bp, Homo sapien
gctgctgcatgctgcatgggagagc

SEQ ID NO: 1785685 - DNA, 25 bp, Homo sapien
tcattaaggtcacaatggaactgtc

SEQ ID NO: 1785686 - DNA, 25 bp, Homo sapien
gctgatgtatcctggctttctctaa

SEQ ID NO: 1785687 - DNA, 25 bp, Homo sapien
tggagcacaggtatcaaccagtaat

SEQ ID NO: 1785688 - DNA, 25 bp, Homo sapien
cagcctctgttatccactgtgtgag

SEQ ID NO: 1785689 - DNA, 25 bp, Homo sapien
tgcaacaattgcatcccagcgttgg

SEQ ID NO: 1785690 - DNA, 25 bp, Homo sapien
atccccagttcggtttagtgctgca

SEQ ID NO: 1785691 - DNA, 25 bp, Homo sapien
ggctgcctatccttcacttctgcaa

SEQ ID NO: 1785692 - DNA, 25 bp, Homo sapien
atctgcctgggagagtttctgcaca

SEQ ID NO: 1785693 - DNA, 25 bp, Homo sapien
gatcttatgggacctcattttccaa

SEQ ID NO: 1785694 - DNA, 25 bp, Homo sapien
ccaataaaggtctaggagataaatc

SEQ ID NO: 1785695 - DNA, 25 bp, Homo sapien
catgcaaactgaatagcatgacata

SEQ ID NO: 1785696 - DNA, 25 bp, Homo sapien
aatcatttcaagctaagaccctcca

SEQ ID NO: 1785697 - DNA, 25 bp, Homo sapien
aacagaagaaacaattgctcactaa

SEQ ID NO: 1785698 - DNA, 25 bp, Homo sapien
gcaaatacttaactacaggcactca

SEQ ID NO: 1785699 - DNA, 25 bp, Homo sapien
ccaactactcagaagactagggtga

SEQ ID NO: 1785700 - DNA, 25 bp, Homo sapien
ttgctcactaaggaataacccactg

SEQ ID NO: 1785701 - DNA, 25 bp, Homo sapien
tacttcatcacctgcttactttctc

SEQ ID NO: 1785702 - DNA, 25 bp, Homo sapien
tctcatctagctgatgcctgtactt

SEQ ID NO: 1785703 - DNA, 25 bp, Homo sapien
ctttgttaaccaacagataatctca

SEQ ID NO: 1785704 - DNA, 25 bp, Homo sapien
aattcggtggttgatctcttttgca

SEQ ID NO: 1785705 - DNA, 25 bp, Homo sapien
tttgcactcctgtgcacaaacgggc

SEQ ID NO: 1785706 - DNA, 25 bp, Homo sapien
taagaagcttaagctcatgctaaca

SEQ ID NO: 1785707 - DNA, 25 bp, Homo sapien
gtgagcacatgccttctgtgtgtat

SEQ ID NO: 1785708 - DNA, 25 bp, Homo sapien
cactgtctcttaaccgggtcatata

SEQ ID NO: 1785709 - DNA, 25 bp, Homo sapien
cagttctattcagccatttgagttt

SEQ ID NO: 1785710 - DNA, 25 bp, Homo sapien
agttctattcagccatttgagtttt

SEQ ID NO: 1785711 - DNA, 25 bp, Homo sapien
cctcccaggtataggcaattctcgt

SEQ ID NO: 1785712 - DNA, 25 bp, Homo sapien
ctggggtccagtggtgtgactgcag

SEQ ID NO: 1785713 - DNA, 25 bp, Homo sapien
acctcccaggtataggcaattctcg

SEQ ID NO: 1785714 - DNA, 25 bp, Homo sapien
ggtccagtggtgtgactgcagctca

SEQ ID NO: 1785715 - DNA, 25 bp, Homo sapien
gaaacttccattgactaaggtggga

SEQ ID NO: 1785716 - DNA, 25 bp, Homo sapien
cagtgactcaacaggcagtgattcc

SEQ ID NO: 1785717 - DNA, 25 bp, Homo sapien
ggtccagaccagagatacacatgtg

SEQ ID NO: 1785718 - DNA, 25 bp, Homo sapien
gattcccaatcagagagaccagatc

SEQ ID NO: 1785719 - DNA, 25 bp, Homo sapien
tgcattccttcagggtggtaggcac

SEQ ID NO: 1785720 - DNA, 25 bp, Homo sapien
aacagaactgggctcctggatgcat

SEQ ID NO: 1785721 - DNA, 25 bp, Homo sapien
ctgtgaaacagaactgggctcctgg

SEQ ID NO: 1785722 - DNA, 25 bp, Homo sapien
gggtggtaggcacctctctgcaaat

SEQ ID NO: 1785723 - DNA, 25 bp, Homo sapien
gaattaaaacactgcgtaggaggag

SEQ ID NO: 1785724 - DNA, 25 bp, Homo sapien
agattagcttcaggtctcaggccta

SEQ ID NO: 1785725 - DNA, 25 bp, Homo sapien
tgagccatccacctaatggaagttg

SEQ ID NO: 1785726 - DNA, 25 bp, Homo sapien
gaaacttgatcaggccccaggtact

SEQ ID NO: 1785727 - DNA, 25 bp, Homo sapien
gatgatactagcaccaccttttgga

SEQ ID NO: 1785728 - DNA, 25 bp, Homo sapien
ggtcgattaataccagccagtcggc

SEQ ID NO: 1785729 - DNA, 25 bp, Homo sapien
tgaacaggaatatctgacgcagatg

SEQ ID NO: 1785730 - DNA, 25 bp, Homo sapien
tccgaagtacgatgagactgaacag

SEQ ID NO: 1785731 - DNA, 25 bp, Homo sapien
gatggcgctgttctaagtcagcctt

SEQ ID NO: 1785732 - DNA, 25 bp, Homo sapien
ctgaggatggcgctgttctaagtca

SEQ ID NO: 1785733 - DNA, 25 bp, Homo sapien
tctgtaattgctgttctcatatctg

SEQ ID NO: 1785734 - DNA, 25 bp, Homo sapien
gctgttctcatatctgaactggaag

SEQ ID NO: 1785735 - DNA, 25 bp, Homo sapien
gacatcaagcgagagtaaatatcac

SEQ ID NO: 1785736 - DNA, 25 bp, Homo sapien
gctgttcaggccttaagttatactt

SEQ ID NO: 1785737 - DNA, 25 bp, Homo sapien
aaagctatcaacaaggctgttcagg

SEQ ID NO: 1785738 - DNA, 25 bp, Homo sapien
ggaagagaggccaaatctatcataa

SEQ ID NO: 1785739 - DNA, 25 bp, Homo sapien
ttagctcaacgccatgctgggtgcc

SEQ ID NO: 1785740 - DNA, 25 bp, Homo sapien
tatggtcatcccactgaagactgtc

SEQ ID NO: 1785741 - DNA, 25 bp, Homo sapien
gaaatttgtttggtgagtggatccc

SEQ ID NO: 1785742 - DNA, 25 bp, Homo sapien
gatcccgtcgggcttgctgaagaat

SEQ ID NO: 1785743 - DNA, 25 bp, Homo sapien
cgccatgacgataccatctccagga

SEQ ID NO: 1785744 - DNA, 25 bp, Homo sapien
aggagtttctgcaggacgttatcga

SEQ ID NO: 1785745 - DNA, 25 bp, Homo sapien
gagattgatccatgatgtttttaag

SEQ ID NO: 1785746 - DNA, 25 bp, Homo sapien
cattccttgtgtcatcactcccata

SEQ ID NO: 1785747 - DNA, 25 bp, Homo sapien
cctgcctgagttatgatatccttac

SEQ ID NO: 1785748 - DNA, 25 bp, Homo sapien
cctgagttatgatatccttactaaa

SEQ ID NO: 1785749 - DNA, 25 bp, Homo sapien
gagttatgatatccttactaaatcc

SEQ ID NO: 1785750 - DNA, 25 bp, Homo sapien
gcctgagttatgatatccttactaa

SEQ ID NO: 1785751 - DNA, 25 bp, Homo sapien
tatagccttttgttctaatattggg

SEQ ID NO: 1785752 - DNA, 25 bp, Homo sapien
taatgctatctcttaaggttaaagc

SEQ ID NO: 1785753 - DNA, 25 bp, Homo sapien
cattgactcacatttaacattaggt

SEQ ID NO: 1785754 - DNA, 25 bp, Homo sapien
tgcaacataactcccataacacttg

SEQ ID NO: 1785755 - DNA, 25 bp, Homo sapien
atagttttcgtatctttccacccat

SEQ ID NO: 1785756 - DNA, 25 bp, Homo sapien
ctttttataccttcatattcctgag

SEQ ID NO: 1785757 - DNA, 25 bp, Homo sapien
tatagttttcgtatctttccaccca

SEQ ID NO: 1785758 - DNA, 25 bp, Homo sapien
actttttataccttcatattcctga

SEQ ID NO: 1785759 - DNA, 25 bp, Homo sapien
cagtatccttgttatgagttcgtaa

SEQ ID NO: 1785760 - DNA, 25 bp, Homo sapien
tcgtaaaaggtcaataatcctcttc

SEQ ID NO: 1785761 - DNA, 25 bp, Homo sapien
tccatcccagttcagtatccttgtt

SEQ ID NO: 1785762 - DNA, 25 bp, Homo sapien
aatcctcttcaaacaatgattaatc

SEQ ID NO: 1785763 - DNA, 25 bp, Homo sapien
tcagttcaaatttcctcgcctggaa

SEQ ID NO: 1785764 - DNA, 25 bp, Homo sapien
cagttcaaatttcctcgcctggaat

SEQ ID NO: 1785765 - DNA, 25 bp, Homo sapien
aatcagttcaaatttcctcgcctgg

SEQ ID NO: 1785766 - DNA, 25 bp, Homo sapien
agaatcagttcaaatttcctcgcct

SEQ ID NO: 1785767 - DNA, 25 bp, Homo sapien
tgaaagtaacaatatgacagcacgg

SEQ ID NO: 1785768 - DNA, 25 bp, Homo sapien
aaagtaacaatatgacagcacggct

SEQ ID NO: 1785769 - DNA, 25 bp, Homo sapien
agtaacaatatgacagcacggctcc

SEQ ID NO: 1785770 - DNA, 25 bp, Homo sapien
taacaatatgacagcacggctccat

SEQ ID NO: 1785771 - DNA, 25 bp, Homo sapien
agcctccaaggcgttctgtctgtca

SEQ ID NO: 1785772 - DNA, 25 bp, Homo sapien
gaagagcattctcccgatgagaggc

SEQ ID NO: 1785773 - DNA, 25 bp, Homo sapien
tggccaagatactatcctgaagagc

SEQ ID NO: 1785774 - DNA, 25 bp, Homo sapien
ttccagatctctgcgagaggcctgc

SEQ ID NO: 1785775 - DNA, 25 bp, Homo sapien
tcccggtcactggacaatgatttgt

SEQ ID NO: 1785776 - DNA, 25 bp, Homo sapien
aaacacagacaaacgccacagagaa

SEQ ID NO: 1785777 - DNA, 25 bp, Homo sapien
tgagcatgctcgtttccaggaaagc

SEQ ID NO: 1785778 - DNA, 25 bp, Homo sapien
gaagagcaacgatcatttcctcccg

SEQ ID NO: 1785779 - DNA, 25 bp, Homo sapien
taagcgatgcaacaaaaccacaact

SEQ ID NO: 1785780 - DNA, 25 bp, Homo sapien
tctgcagagacgttctcaccacagc

SEQ ID NO: 1785781 - DNA, 25 bp, Homo sapien
tacagagcttctgataccgaggaga

SEQ ID NO: 1785782 - DNA, 25 bp, Homo sapien
gccatcctttgtaagcgatgcaaca

SEQ ID NO: 1785783 - DNA, 25 bp, Homo sapien
attgtccaaggagagcagggttctc

SEQ ID NO: 1785784 - DNA, 25 bp, Homo sapien
cattgccctggatcacttcaggatt

SEQ ID NO: 1785785 - DNA, 25 bp, Homo sapien
tctccattgccctggatcacttcag

SEQ ID NO: 1785786 - DNA, 25 bp, Homo sapien
cacttcaggatttaattgtccaagg

SEQ ID NO: 1785787 - DNA, 25 bp, Homo sapien
gagacattgcaggtttcgttccaca

SEQ ID NO: 1785788 - DNA, 25 bp, Homo sapien
tcagaaagctatttgtccagaacac

SEQ ID NO: 1785789 - DNA, 25 bp, Homo sapien
tataggagtagacattgggacagcc

SEQ ID NO: 1785790 - DNA, 25 bp, Homo sapien
gatgctttacatgcatacaggcgta

SEQ ID NO: 1785791 - DNA, 25 bp, Homo sapien
gaaagagtttttgcagtatggacat

SEQ ID NO: 1785792 - DNA, 25 bp, Homo sapien
taagttcagttgttagatacaaaac

SEQ ID NO: 1785793 - DNA, 25 bp, Homo sapien
tatcccagatatcaggaaacttagc

SEQ ID NO: 1785794 - DNA, 25 bp, Homo sapien
ttagtaactcaaaaatgcaaacatt

SEQ ID NO: 1785795 - DNA, 25 bp, Homo sapien
cccacattatggaggataatccgct

SEQ ID NO: 1785796 - DNA, 25 bp, Homo sapien
gccatctgctagtaggattcccttt

SEQ ID NO: 1785797 - DNA, 25 bp, Homo sapien
aacagagaatgaggcccgataactt

SEQ ID NO: 1785798 - DNA, 25 bp, Homo sapien
tgcaaaggcttgacaaatccaaaat

SEQ ID NO: 1785799 - DNA, 25 bp, Homo sapien
tgtgtgtgccactgtcccagcttgg

SEQ ID NO: 1785800 - DNA, 25 bp, Homo sapien
cccctgtagaaaccatgggtctagg

SEQ ID NO: 1785801 - DNA, 25 bp, Homo sapien
agggacccaaaatggcgaggaaatg

SEQ ID NO: 1785802 - DNA, 25 bp, Homo sapien
ccagcaaagcacatagagaggtcgt

SEQ ID NO: 1785803 - DNA, 25 bp, Homo sapien
ttattttggctctgatctttgttct

SEQ ID NO: 1785804 - DNA, 25 bp, Homo sapien
ttagattgtttattcatgatatttc

SEQ ID NO: 1785805 - DNA, 25 bp, Homo sapien
ttcttgtttaccaccatgaatctca

SEQ ID NO: 1785806 - DNA, 25 bp, Homo sapien
tgatttggtagccactcttttcact

SEQ ID NO: 1785807 - DNA, 25 bp, Homo sapien
tggtagccactcttttcactcttgt

SEQ ID NO: 1785808 - DNA, 25 bp, Homo sapien
tgaatctcattcaacacctccccac

SEQ ID NO: 1785809 - DNA, 25 bp, Homo sapien
tgagctgttgactacccagtacctt

SEQ ID NO: 1785810 - DNA, 25 bp, Homo sapien
tttctgatagagacatgagctgttg

SEQ ID NO: 1785811 - DNA, 25 bp, Homo sapien
tcagaaatataatctacccagggaa

SEQ ID NO: 1785812 - DNA, 25 bp, Homo sapien
catgcaccggtaggttttccaggac

SEQ ID NO: 1785813 - DNA, 25 bp, Homo sapien
aaacagtatctaaggactataagta

SEQ ID NO: 1785814 - DNA, 25 bp, Homo sapien
gcaaagtatcgttttatgacgtgaa

SEQ ID NO: 1785815 - DNA, 25 bp, Homo sapien
taaattgaactaagaggaaagccca

SEQ ID NO: 1785816 - DNA, 25 bp, Homo sapien
tcacctgtatgtttgccaccttgtc

SEQ ID NO: 1785817 - DNA, 25 bp, Homo sapien
gatattagggtaaactgctcgtcct

SEQ ID NO: 1785818 - DNA, 25 bp, Homo sapien
gaaagtgctgccctcttgtgaaatg

SEQ ID NO: 1785819 - DNA, 25 bp, Homo sapien
caaagttgtatgtgtttcccctgag

SEQ ID NO: 1785820 - DNA, 25 bp, Homo sapien
taaggatcccaagttaccctgcaga

SEQ ID NO: 1785821 - DNA, 25 bp, Homo sapien
gagagctgagtgtctagaatgaaac

SEQ ID NO: 1785822 - DNA, 25 bp, Homo sapien
tacctattccaaaaagggtggcatc

SEQ ID NO: 1785823 - DNA, 25 bp, Homo sapien
tatttgaaagctaatgctactggag

SEQ ID NO: 1785824 - DNA, 25 bp, Homo sapien
taatacagcaataatggcgacctgg

SEQ ID NO: 1785825 - DNA, 25 bp, Homo sapien
gatggcagcttctttcgaagaaaga

SEQ ID NO: 1785826 - DNA, 25 bp, Homo sapien
cagatcatcaaaagaatatgggatc

SEQ ID NO: 1785827 - DNA, 25 bp, Homo sapien
gaaagagtacaaaactcagtggatc

SEQ ID NO: 1785828 - DNA, 25 bp, Homo sapien
actcagtggatccatattcaaaaac

SEQ ID NO: 1785829 - DNA, 25 bp, Homo sapien
ccagggccccaagcttagagtttgg

SEQ ID NO: 1785830 - DNA, 25 bp, Homo sapien
ctaatgacctgcaggccacaactgt

SEQ ID NO: 1785831 - DNA, 25 bp, Homo sapien
tagctgtgttccacgaggctggcat

SEQ ID NO: 1785832 - DNA, 25 bp, Homo sapien
catggacttcggagttcgcaaggaa

SEQ ID NO: 1785833 - DNA, 25 bp, Homo sapien
tgcccttgagctatggtccatcagc

SEQ ID NO: 1785834 - DNA, 25 bp, Homo sapien
aagccttgcccttgagctatggtcc

SEQ ID NO: 1785835 - DNA, 25 bp, Homo sapien
ttgagctatggtccatcagcagcag

SEQ ID NO: 1785836 - DNA, 25 bp, Homo sapien
cagcagcggcagcttgcgctgggac

SEQ ID NO: 1785837 - DNA, 25 bp, Homo sapien
acttctaaacaccgtatcttttctg

SEQ ID NO: 1785838 - DNA, 25 bp, Homo sapien
cttcagacaacagcgtttaacttct

SEQ ID NO: 1785839 - DNA, 25 bp, Homo sapien
gacaacagcgtttaacttctaaaca

SEQ ID NO: 1785840 - DNA, 25 bp, Homo sapien
cttctaaacaccgtatcttttctgg

SEQ ID NO: 1785841 - DNA, 25 bp, Homo sapien
agcccttgaagcctacatctttccg

SEQ ID NO: 1785842 - DNA, 25 bp, Homo sapien
gaagcctacatctttccggcaaact

SEQ ID NO: 1785843 - DNA, 25 bp, Homo sapien
agtagcccttgaagcctacatcttt

SEQ ID NO: 1785844 - DNA, 25 bp, Homo sapien
ccttgaagcctacatctttccggca

SEQ ID NO: 1785845 - DNA, 25 bp, Homo sapien
tttgtcagcagttcccgtaagttga

SEQ ID NO: 1785846 - DNA, 25 bp, Homo sapien
tcagcagttcccgtaagttgaagtt

SEQ ID NO: 1785847 - DNA, 25 bp, Homo sapien
cagttcccgtaagttgaagttcaga

SEQ ID NO: 1785848 - DNA, 25 bp, Homo sapien
gcagttcccgtaagttgaagttcag

SEQ ID NO: 1785849 - DNA, 25 bp, Homo sapien
gcctgtttccgtcaatgcttttaaa

SEQ ID NO: 1785850 - DNA, 25 bp, Homo sapien
cagtcgatgttgaagcatagtagcc

SEQ ID NO: 1785851 - DNA, 25 bp, Homo sapien
gggcatcaatttctgcctggatgtc

SEQ ID NO: 1785852 - DNA, 25 bp, Homo sapien
tccatctttggttcatatcatccag

SEQ ID NO: 1785853 - DNA, 25 bp, Homo sapien
cttctcagcgctggcctccaaatgg

SEQ ID NO: 1785854 - DNA, 25 bp, Homo sapien
aatggtcatactggagctgtaaggc

SEQ ID NO: 1785855 - DNA, 25 bp, Homo sapien
tggaacatctcctccaataggcatt

SEQ ID NO: 1785856 - DNA, 25 bp, Homo sapien
tacaatggtcatactggagctgtaa

SEQ ID NO: 1785857 - DNA, 25 bp, Homo sapien
tcctttaggagatgtgtgcattcgt

SEQ ID NO: 1785858 - DNA, 25 bp, Homo sapien
ccacaaaaagggactactgtatgaa

SEQ ID NO: 1785859 - DNA, 25 bp, Homo sapien
ctagtcacaagggttcaaaaagcaa

SEQ ID NO: 1785860 - DNA, 25 bp, Homo sapien
catattcctgcttcgagtagaaaga

SEQ ID NO: 1785861 - DNA, 25 bp, Homo sapien
gcctgcagtgctctaagatagagca

SEQ ID NO: 1785862 - DNA, 25 bp, Homo sapien
gcagtgctctaagatagagcaaaac

SEQ ID NO: 1785863 - DNA, 25 bp, Homo sapien
attacctaaaggcttaggtctcaag

SEQ ID NO: 1785864 - DNA, 25 bp, Homo sapien
cattacctaaaggcttaggtctcaa

SEQ ID NO: 1785865 - DNA, 25 bp, Homo sapien
tatgctggttcatattaggcactca

SEQ ID NO: 1785866 - DNA, 25 bp, Homo sapien
ccaaacattgcaggctctgtggcct

SEQ ID NO: 1785867 - DNA, 25 bp, Homo sapien
taagtgcttactacatcactccagg

SEQ ID NO: 1785868 - DNA, 25 bp, Homo sapien
tagcaccttggcctataatcccaca

SEQ ID NO: 1785869 - DNA, 25 bp, Homo sapien
cagtgcctggggcatttacactacg

SEQ ID NO: 1785870 - DNA, 25 bp, Homo sapien
ggatgccaatctgtgaatcactcat

SEQ ID NO: 1785871 - DNA, 25 bp, Homo sapien
gcctggggcatttacactacggaag

SEQ ID NO: 1785872 - DNA, 25 bp, Homo sapien
tggggcatttacactacggaaggaa

SEQ ID NO: 1785873 - DNA, 25 bp, Homo sapien
gaaaatgtggaacctcaggaggcca

SEQ ID NO: 1785874 - DNA, 25 bp, Homo sapien
catttcatacaaagtaggtctgtgg

SEQ ID NO: 1785875 - DNA, 25 bp, Homo sapien
gaaagcagcatggagcaactctgca

SEQ ID NO: 1785876 - DNA, 25 bp, Homo sapien
caactctgcagtagaaggaagtagt

SEQ ID NO: 1785877 - DNA, 25 bp, Homo sapien
tctcctttaactcccgtctcagggc

SEQ ID NO: 1785878 - DNA, 25 bp, Homo sapien
caggggcctcaattggctgatcagc

SEQ ID NO: 1785879 - DNA, 25 bp, Homo sapien
cagcattcaggacagaatattcttt

SEQ ID NO: 1785880 - DNA, 25 bp, Homo sapien
tcgggcctggtcgacagcattcagg

SEQ ID NO: 1785881 - DNA, 25 bp, Homo sapien
ctgactttccaggtcctctgtagga

SEQ ID NO: 1785882 - DNA, 25 bp, Homo sapien
ggctgtctactgactccccaaaata

SEQ ID NO: 1785883 - DNA, 25 bp, Homo sapien
catacccctaagactagctcaggaa

SEQ ID NO: 1785884 - DNA, 25 bp, Homo sapien
gctgttctgctaaggattctgtccc

SEQ ID NO: 1785885 - DNA, 25 bp, Homo sapien
tacacacgtgtaaacgattgccatc

SEQ ID NO: 1785886 - DNA, 25 bp, Homo sapien
caatcgatgggcttactcagctggc

SEQ ID NO: 1785887 - DNA, 25 bp, Homo sapien
tctccctcggtgttaggaaatcagt

SEQ ID NO: 1785888 - DNA, 25 bp, Homo sapien
tattgtcgtggtctataggcctgaa

SEQ ID NO: 1785889 - DNA, 25 bp, Homo sapien
tctgagtttctccaatgccttgtcc

SEQ ID NO: 1785890 - DNA, 25 bp, Homo sapien
gatcctgcagcgagtcaatgagtaa

SEQ ID NO: 1785891 - DNA, 25 bp, Homo sapien
agactgtttgcgcatggctttggca

SEQ ID NO: 1785892 - DNA, 25 bp, Homo sapien
tcatgtcagcgtccaggtcatccat

SEQ ID NO: 1785893 - DNA, 25 bp, Homo sapien
tagaatataacttcaagacaggctt

SEQ ID NO: 1785894 - DNA, 25 bp, Homo sapien
taatgtttccctatataagccacag

SEQ ID NO: 1785895 - DNA, 25 bp, Homo sapien
tatggcaatgaggagtctttctatc

SEQ ID NO: 1785896 - DNA, 25 bp, Homo sapien
tatggtcaggtgttatatggcaatg

SEQ ID NO: 1785897 - DNA, 25 bp, Homo sapien
caagtggagacagctgactggataa

SEQ ID NO: 1785898 - DNA, 25 bp, Homo sapien
taaaagtttccatcgcatattaagg

SEQ ID NO: 1785899 - DNA, 25 bp, Homo sapien
catctttagagagggatgcaggtca

SEQ ID NO: 1785900 - DNA, 25 bp, Homo sapien
catctagctggcgagacatctttag

SEQ ID NO: 1785901 - DNA, 25 bp, Homo sapien
agaaaatgctgagaggatggtccaa

SEQ ID NO: 1785902 - DNA, 25 bp, Homo sapien
gatggtccaaaatctctgtgggctt

SEQ ID NO: 1785903 - DNA, 25 bp, Homo sapien
cctgaagctgtttaaggcgatcatc

SEQ ID NO: 1785904 - DNA, 25 bp, Homo sapien
gaagctgtttaaggcgatcatccac

SEQ ID NO: 1785905 - DNA, 25 bp, Homo sapien
gaagccagcaagatacacgttaaag

SEQ ID NO: 1785906 - DNA, 25 bp, Homo sapien
gtgacagccagtaaataaacggtcg

SEQ ID NO: 1785907 - DNA, 25 bp, Homo sapien
gatcctcacgtagccagttgtcacc

SEQ ID NO: 1785908 - DNA, 25 bp, Homo sapien
taaacggtcgagctcagatgtgatc

SEQ ID NO: 1785909 - DNA, 25 bp, Homo sapien
gaaatggatctttgccacggcagct

SEQ ID NO: 1785910 - DNA, 25 bp, Homo sapien
ttattatgtgaaatggatctttgcc

SEQ ID NO: 1785911 - DNA, 25 bp, Homo sapien
gcactttattatgtgaaatggatct

SEQ ID NO: 1785912 - DNA, 25 bp, Homo sapien
tatgtgaaatggatctttgccacgg

SEQ ID NO: 1785913 - DNA, 25 bp, Homo sapien
ggccatcatagcttattgtctgtct

SEQ ID NO: 1785914 - DNA, 25 bp, Homo sapien
taaacacacctatatccctaatctg

SEQ ID NO: 1785915 - DNA, 25 bp, Homo sapien
gcctcttaagttatcaataaaacat

SEQ ID NO: 1785916 - DNA, 25 bp, Homo sapien
tcttggtatcataaaggagaattaa

SEQ ID NO: 1785917 - DNA, 25 bp, Homo sapien
gagttcggtcattttaggatggtcc

SEQ ID NO: 1785918 - DNA, 25 bp, Homo sapien
gtcattttaggatggtcccaacagg

SEQ ID NO: 1785919 - DNA, 25 bp, Homo sapien
gaaagagttcggtcattttaggatg

SEQ ID NO: 1785920 - DNA, 25 bp, Homo sapien
caagggattgaaagagttcggtcat

SEQ ID NO: 1785921 - DNA, 25 bp, Homo sapien
tcttcggattttgattgctgtacgg

SEQ ID NO: 1785922 - DNA, 25 bp, Homo sapien
cggtaggcagaaaaacgtacattat

SEQ ID NO: 1785923 - DNA, 25 bp, Homo sapien
ctttttgtagtcttcggattttgat

SEQ ID NO: 1785924 - DNA, 25 bp, Homo sapien
tgctgtacggtaggcagaaaaacgt

SEQ ID NO: 1785925 - DNA, 25 bp, Homo sapien
cttcatgtgtacaacatctatggta

SEQ ID NO: 1785926 - DNA, 25 bp, Homo sapien
acaacatctatggtaggcatggctg

SEQ ID NO: 1785927 - DNA, 25 bp, Homo sapien
catgtgtacaacatctatggtaggc

SEQ ID NO: 1785928 - DNA, 25 bp, Homo sapien
acatactgatggctttactaaaagg

SEQ ID NO: 1785929 - DNA, 25 bp, Homo sapien
tgagacacatatcaacacagagtgg

SEQ ID NO: 1785930 - DNA, 25 bp, Homo sapien
caagtccatcataagttgttgtcag

SEQ ID NO: 1785931 - DNA, 25 bp, Homo sapien
gacattgagcaaccaattgagacac

SEQ ID NO: 1785932 - DNA, 25 bp, Homo sapien
gagtggaacgttgaccaggtcctta

SEQ ID NO: 1785933 - DNA, 25 bp, Homo sapien
catattctataggactgaatggagt

SEQ ID NO: 1785934 - DNA, 25 bp, Homo sapien
cctaagtattctatgaatttagcaa

SEQ ID NO: 1785935 - DNA, 25 bp, Homo sapien
aatggagttcctaagtattctatga

SEQ ID NO: 1785936 - DNA, 25 bp, Homo sapien
tctataggactgaatggagttccta

SEQ ID NO: 1785937 - DNA, 25 bp, Homo sapien
gacatatattaacagggtgtttggc

SEQ ID NO: 1785938 - DNA, 25 bp, Homo sapien
cacacagcttgaagccactttgcac

SEQ ID NO: 1785939 - DNA, 25 bp, Homo sapien
ggtgtttggccaaggctagaagaac

SEQ ID NO: 1785940 - DNA, 25 bp, Homo sapien
acacagcttgaagccactttgcaca

SEQ ID NO: 1785941 - DNA, 25 bp, Homo sapien
gcactctaatttttccagttcgacc

SEQ ID NO: 1785942 - DNA, 25 bp, Homo sapien
gactctgcactctaatttttccagt

SEQ ID NO: 1785943 - DNA, 25 bp, Homo sapien
tctgcactctaatttttccagttcg

SEQ ID NO: 1785944 - DNA, 25 bp, Homo sapien
cagactctgcactctaatttttcca

SEQ ID NO: 1785945 - DNA, 25 bp, Homo sapien
cttccaagagacctttggagagaga

SEQ ID NO: 1785946 - DNA, 25 bp, Homo sapien
cctttggagagagacattaatccaa

SEQ ID NO: 1785947 - DNA, 25 bp, Homo sapien
ccaagagacctttggagagagacat

SEQ ID NO: 1785948 - DNA, 25 bp, Homo sapien
acctttggagagagacattaatcca

SEQ ID NO: 1785949 - DNA, 25 bp, Homo sapien
tctggatggcatcatgaagtaacag

SEQ ID NO: 1785950 - DNA, 25 bp, Homo sapien
cacatttctgttggccctgcaactt

SEQ ID NO: 1785951 - DNA, 25 bp, Homo sapien
cagctgcgaacactaggctcaatat

SEQ ID NO: 1785952 - DNA, 25 bp, Homo sapien
gctgctacttcacctagctgccggg

SEQ ID NO: 1785953 - DNA, 25 bp, Homo sapien
gctagtgttgttgcttcataatctt

SEQ ID NO: 1785954 - DNA, 25 bp, Homo sapien
tttaaactgtagctagtgttgttgc

SEQ ID NO: 1785955 - DNA, 25 bp, Homo sapien
aactgtagctagtgttgttgcttca

SEQ ID NO: 1785956 - DNA, 25 bp, Homo sapien
tgtagctagtgttgttgcttcataa

SEQ ID NO: 1785957 - DNA, 25 bp, Homo sapien
ctataaactctttcacacttatttc

SEQ ID NO: 1785958 - DNA, 25 bp, Homo sapien
tctataaactctttcacacttattt

SEQ ID NO: 1785959 - DNA, 25 bp, Homo sapien
ccatggactgtggttccaaatgcat

SEQ ID NO: 1785960 - DNA, 25 bp, Homo sapien
gaacccgacaattggacattcttta

SEQ ID NO: 1785961 - DNA, 25 bp, Homo sapien
cactcgatgtaaaactgggagccaa

SEQ ID NO: 1785962 - DNA, 25 bp, Homo sapien
gatgttttgcagtctccgctgctgc

SEQ ID NO: 1785963 - DNA, 25 bp, Homo sapien
gtctgccaggctaatgctcactcta

SEQ ID NO: 1785964 - DNA, 25 bp, Homo sapien
ggaagtcatctattaccctagctgt

SEQ ID NO: 1785965 - DNA, 25 bp, Homo sapien
tctattaccctagctgtctgccagg

SEQ ID NO: 1785966 - DNA, 25 bp, Homo sapien
cttccactggaagtcatctattacc

SEQ ID NO: 1785967 - DNA, 25 bp, Homo sapien
tgaccttttgctgttcgacccgaaa

SEQ ID NO: 1785968 - DNA, 25 bp, Homo sapien
ccattgggtaatgtaatttgtgacc

SEQ ID NO: 1785969 - DNA, 25 bp, Homo sapien
ggtatacaatattccaccattgggt

SEQ ID NO: 1785970 - DNA, 25 bp, Homo sapien
caactctggcagacatcatagttaa

SEQ ID NO: 1785971 - DNA, 25 bp, Homo sapien
caaactagtcctatgtaaagctcag

SEQ ID NO: 1785972 - DNA, 25 bp, Homo sapien
gacattgacaatgaatctacccttg

SEQ ID NO: 1785973 - DNA, 25 bp, Homo sapien
caaactacctttctatcctggctaa

SEQ ID NO: 1785974 - DNA, 25 bp, Homo sapien
tgaatcaatcccgaagctcccatga

SEQ ID NO: 1785975 - DNA, 25 bp, Homo sapien
gccatggataggatgcaatcagtaa

SEQ ID NO: 1785976 - DNA, 25 bp, Homo sapien
cattagcagaattaccaaggagtca

SEQ ID NO: 1785977 - DNA, 25 bp, Homo sapien
tgcactggacctactggtaaaacga

SEQ ID NO: 1785978 - DNA, 25 bp, Homo sapien
aaaacgatgtaaggagagcaggagc

SEQ ID NO: 1785979 - DNA, 25 bp, Homo sapien
taggcatgacagcacgtgcctgcag

SEQ ID NO: 1785980 - DNA, 25 bp, Homo sapien
ggtgtatataacacgtttggtataa

SEQ ID NO: 1785981 - DNA, 25 bp, Homo sapien
gatttaaatggtgtatataacacgt

SEQ ID NO: 1785982 - DNA, 25 bp, Homo sapien
aaaaagctaggcatgacagcacgtg

SEQ ID NO: 1785983 - DNA, 25 bp, Homo sapien
taagtaaactcacactaagcctttg

SEQ ID NO: 1785984 - DNA, 25 bp, Homo sapien
taagcctttgatggactccaaccaa

SEQ ID NO: 1785985 - DNA, 25 bp, Homo sapien
caagggtaacaggttagcataggac

SEQ ID NO: 1785986 - DNA, 25 bp, Homo sapien
gaacagattttgcagatcccattag

SEQ ID NO: 1785987 - DNA, 25 bp, Homo sapien
gcaatggttatcacaactgcagata

SEQ ID NO: 1785988 - DNA, 25 bp, Homo sapien
tagaaatgcataaagaggacccgtg

SEQ ID NO: 1785989 - DNA, 25 bp, Homo sapien
tacttaataagcaatggactccagc

SEQ ID NO: 1785990 - DNA, 25 bp, Homo sapien
catatccaggtcttcaattcacagc

SEQ ID NO: 1785991 - DNA, 25 bp, Homo sapien
aattagtcatagagccgatgctggc

SEQ ID NO: 1785992 - DNA, 25 bp, Homo sapien
aaagagcagggccacattggtgctc

SEQ ID NO: 1785993 - DNA, 25 bp, Homo sapien
ccatacctagttcatttccccaata

SEQ ID NO: 1785994 - DNA, 25 bp, Homo sapien
tggctacacacaagccagcatatat

SEQ ID NO: 1785995 - DNA, 25 bp, Homo sapien
ggcaataagaactcatcactaaata

SEQ ID NO: 1785996 - DNA, 25 bp, Homo sapien
caataagaactcatcactaaatata

SEQ ID NO: 1785997 - DNA, 25 bp, Homo sapien
ttggcaataagaactcatcactaaa

SEQ ID NO: 1785998 - DNA, 25 bp, Homo sapien
ataagaactcatcactaaatatatc

SEQ ID NO: 1785999 - DNA, 25 bp, Homo sapien
caagtcgagggtgtttggcaaagta

SEQ ID NO: 1786000 - DNA, 25 bp, Homo sapien
ggcaaagtacttcttcgacctgaac

SEQ ID NO: 1786001 - DNA, 25 bp, Homo sapien
tgaagtctcgtacatcttccccaga

SEQ ID NO: 1786002 - DNA, 25 bp, Homo sapien
cttcaagaactgtctggacaggcag

SEQ ID NO: 1786003 - DNA, 25 bp, Homo sapien
gtcaatactatttccacgtcactgt

SEQ ID NO: 1786004 - DNA, 25 bp, Homo sapien
catatgccacgaacttcaaatagaa

SEQ ID NO: 1786005 - DNA, 25 bp, Homo sapien
attcaagtgtagcaaaacatatgcc

SEQ ID NO: 1786006 - DNA, 25 bp, Homo sapien
gactggttcttgctaacttaatcca

SEQ ID NO: 1786007 - DNA, 25 bp, Homo sapien
ctagttccaaccctagctttttgag

SEQ ID NO: 1786008 - DNA, 25 bp, Homo sapien
ggttgatgcctgcacagcaaagact

SEQ ID NO: 1786009 - DNA, 25 bp, Homo sapien
ctaggaagaattcccaagtctccat

SEQ ID NO: 1786010 - DNA, 25 bp, Homo sapien
gggatgtcatatactgcctaggaag

SEQ ID NO: 1786011 - DNA, 25 bp, Homo sapien
tggccacatactgatgagtgtgata

SEQ ID NO: 1786012 - DNA, 25 bp, Homo sapien
ccacatactgatgagtgtgatagga

SEQ ID NO: 1786013 - DNA, 25 bp, Homo sapien
gctctggccacatactgatgagtgt

SEQ ID NO: 1786014 - DNA, 25 bp, Homo sapien
tctggccacatactgatgagtgtga

SEQ ID NO: 1786015 - DNA, 25 bp, Homo sapien
gttctattcttgaatgggtgtcatc

SEQ ID NO: 1786016 - DNA, 25 bp, Homo sapien
tgttctattcttgaatgggtgtcat

SEQ ID NO: 1786017 - DNA, 25 bp, Homo sapien
gtcatcatgaaacagttgaggagat

SEQ ID NO: 1786018 - DNA, 25 bp, Homo sapien
catgaaacagttgaggagattgtga

SEQ ID NO: 1786019 - DNA, 25 bp, Homo sapien
gtggtggagctgctatcagtgagaa

SEQ ID NO: 1786020 - DNA, 25 bp, Homo sapien
ggtggagctgctatcagtgagaaaa

SEQ ID NO: 1786021 - DNA, 25 bp, Homo sapien
tggtggagctgctatcagtgagaaa

SEQ ID NO: 1786022 - DNA, 25 bp, Homo sapien
tgggtcagaggtgctaaatgcagat

SEQ ID NO: 1786023 - DNA, 25 bp, Homo sapien
tatatctaagtatgtgtgggtcaga

SEQ ID NO: 1786024 - DNA, 25 bp, Homo sapien
tactttacagattcccatcagatcc

SEQ ID NO: 1786025 - DNA, 25 bp, Homo sapien
gctgagaaagttccacaaccaagtg

SEQ ID NO: 1786026 - DNA, 25 bp, Homo sapien
gaacatgaggtaccagatcagggac

SEQ ID NO: 1786027 - DNA, 25 bp, Homo sapien
gatttgcaaactgcaatgcctgtgt

SEQ ID NO: 1786028 - DNA, 25 bp, Homo sapien
gatcagggacattaaacatcaatcg

SEQ ID NO: 1786029 - DNA, 25 bp, Homo sapien
catcaatcgtatgtcttgggctaaa

SEQ ID NO: 1786030 - DNA, 25 bp, Homo sapien
taaagtatcacaagcaatctgccag

SEQ ID NO: 1786031 - DNA, 25 bp, Homo sapien
tacacaatgcaaagtcagcgatgcc

SEQ ID NO: 1786032 - DNA, 25 bp, Homo sapien
tggataggacaaatggacaaagcgt

SEQ ID NO: 1786033 - DNA, 25 bp, Homo sapien
caatgagctgcagtgaattacacaa

SEQ ID NO: 1786034 - DNA, 25 bp, Homo sapien
ggactctcctccgagtgtttggcaa

SEQ ID NO: 1786035 - DNA, 25 bp, Homo sapien
tgacttcaggatctgagctgggctc

SEQ ID NO: 1786036 - DNA, 25 bp, Homo sapien
caggtcagcaatgatcctctccagt

SEQ ID NO: 1786037 - DNA, 25 bp, Homo sapien
ctggatgagggcgtgctcgtcttcc

SEQ ID NO: 1786038 - DNA, 25 bp, Homo sapien
ggagcccccttcggaggtgctggtc

SEQ ID NO: 1786039 - DNA, 25 bp, Homo sapien
agcccccttcggaggtgctggtcct

SEQ ID NO: 1786040 - DNA, 25 bp, Homo sapien
gagcccccttcggaggtgctggtcc

SEQ ID NO: 1786041 - DNA, 25 bp, Homo sapien
tataatcgactctggcggtgaaccg

SEQ ID NO: 1786042 - DNA, 25 bp, Homo sapien
gctataagttctgaatcctcagacg

SEQ ID NO: 1786043 - DNA, 25 bp, Homo sapien
ttctgctataagttctgaatcctca

SEQ ID NO: 1786044 - DNA, 25 bp, Homo sapien
tgtgatggggagatataatcgactc

SEQ ID NO: 1786045 - DNA, 25 bp, Homo sapien
taaaatctgcatcctagcctccagc

SEQ ID NO: 1786046 - DNA, 25 bp, Homo sapien
ctaaaatctgcatcctagcctccag

SEQ ID NO: 1786047 - DNA, 25 bp, Homo sapien
ctcccagggcagtggacagatggcc

SEQ ID NO: 1786048 - DNA, 25 bp, Homo sapien
tgacgctgaattctacacaccctac

SEQ ID NO: 1786049 - DNA, 25 bp, Homo sapien
ggcctggggaggtgtgacgctgaat

SEQ ID NO: 1786050 - DNA, 25 bp, Homo sapien
tggaccatcatctcccagggcagtg

SEQ ID NO: 1786051 - DNA, 25 bp, Homo sapien
tttagtaggtcctgaccagcattaa

SEQ ID NO: 1786052 - DNA, 25 bp, Homo sapien
taggtcctgaccagcattaagaaag

SEQ ID NO: 1786053 - DNA, 25 bp, Homo sapien
tcctgaccagcattaagaaagaaaa

SEQ ID NO: 1786054 - DNA, 25 bp, Homo sapien
tagtaggtcctgaccagcattaaga

SEQ ID NO: 1786055 - DNA, 25 bp, Homo sapien
tttccaaattgtgggattgagaggc

SEQ ID NO: 1786056 - DNA, 25 bp, Homo sapien
gaagtaagccttccattgaacagcc

SEQ ID NO: 1786057 - DNA, 25 bp, Homo sapien
gattgagaggccctgaagtaagcct

SEQ ID NO: 1786058 - DNA, 25 bp, Homo sapien
ttgaacagcctcacccaaattctga

SEQ ID NO: 1786059 - DNA, 25 bp, Homo sapien
cccgccctcaccatggataattaaa

SEQ ID NO: 1786060 - DNA, 25 bp, Homo sapien
tggaaccacattcagaggttaaagc

SEQ ID NO: 1786061 - DNA, 25 bp, Homo sapien
tatgctgccagactcatttatcaac

SEQ ID NO: 1786062 - DNA, 25 bp, Homo sapien
ggacaccttgaagaatccacttggt

SEQ ID NO: 1786063 - DNA, 25 bp, Homo sapien
cattgattcgggaatcagattcagg

SEQ ID NO: 1786064 - DNA, 25 bp, Homo sapien
ccggaggcatctggatcaagcgagt

SEQ ID NO: 1786065 - DNA, 25 bp, Homo sapien
cgagtagctcagtgcagaatgctga

SEQ ID NO: 1786066 - DNA, 25 bp, Homo sapien
gggaaacaccattgattcgggaatc

SEQ ID NO: 1786067 - DNA, 25 bp, Homo sapien
tccgtgagatccgtgctggtgtcgt

SEQ ID NO: 1786068 - DNA, 25 bp, Homo sapien
tgctccatgacctccgtgagatccg

SEQ ID NO: 1786069 - DNA, 25 bp, Homo sapien
gcagcaagatggaaacgtgctgtga

SEQ ID NO: 1786070 - DNA, 25 bp, Homo sapien
tggaaacgtgctgtgaatctgctcc

SEQ ID NO: 1786071 - DNA, 25 bp, Homo sapien
aaggcgaagggccgcatgcagaaaa

SEQ ID NO: 1786072 - DNA, 25 bp, Homo sapien
aaagggaaggaacacgtgcagctgt

SEQ ID NO: 1786073 - DNA, 25 bp, Homo sapien
cgaagggccgcatgcagaaaaagag

SEQ ID NO: 1786074 - DNA, 25 bp, Homo sapien
tatcttaaggaagaaggcgaagggc

SEQ ID NO: 1786075 - DNA, 25 bp, Homo sapien
tctaaggagatgacagacaagggta

SEQ ID NO: 1786076 - DNA, 25 bp, Homo sapien
tgagagctcagccaaaattgcaagg

SEQ ID NO: 1786077 - DNA, 25 bp, Homo sapien
caagggtaaaataagaggctatgct

SEQ ID NO: 1786078 - DNA, 25 bp, Homo sapien
cacaggatcctaatctatgatgact

SEQ ID NO: 1786079 - DNA, 25 bp, Homo sapien
cctgataattgataatctctttttc

SEQ ID NO: 1786080 - DNA, 25 bp, Homo sapien
gataattgataatctctttttcatc

SEQ ID NO: 1786081 - DNA, 25 bp, Homo sapien
taattgataatctctttttcatcat

SEQ ID NO: 1786082 - DNA, 25 bp, Homo sapien
ctgataattgataatctctttttca

SEQ ID NO: 1786083 - DNA, 25 bp, Homo sapien
tcaatgaacagctaacaagatcccc

SEQ ID NO: 1786084 - DNA, 25 bp, Homo sapien
agggctccataaaccactctctgaa

SEQ ID NO: 1786085 - DNA, 25 bp, Homo sapien
taaacattaaggaatctcagggctc

SEQ ID NO: 1786086 - DNA, 25 bp, Homo sapien
tatacttgcctttaaagtgaggcca

SEQ ID NO: 1786087 - DNA, 25 bp, Homo sapien
tgtgcatagttaacactatgaaaac

SEQ ID NO: 1786088 - DNA, 25 bp, Homo sapien
catggatgtgcttgaattcttgaaa

SEQ ID NO: 1786089 - DNA, 25 bp, Homo sapien
gacatgactagtaatgctcattcag

SEQ ID NO: 1786090 - DNA, 25 bp, Homo sapien
ctcattcagaaaactatgactatta

SEQ ID NO: 1786091 - DNA, 25 bp, Homo sapien
gatagccaccttaagtagacatttg

SEQ ID NO: 1786092 - DNA, 25 bp, Homo sapien
gataatctgcttactctaggttggg

SEQ ID NO: 1786093 - DNA, 25 bp, Homo sapien
gagagagcagtggtggtcaaatcta

SEQ ID NO: 1786094 - DNA, 25 bp, Homo sapien
tctagagtgactttatgtagcacat

SEQ ID NO: 1786095 - DNA, 25 bp, Homo sapien
tctgctgaaggtaccaatggtgagc

SEQ ID NO: 1786096 - DNA, 25 bp, Homo sapien
taaagttaaatgtcccaggtcagag

SEQ ID NO: 1786097 - DNA, 25 bp, Homo sapien
cccaagggtgtttagtggtgccagt

SEQ ID NO: 1786098 - DNA, 25 bp, Homo sapien
caaggcaggaatcataacccaaggg

SEQ ID NO: 1786099 - DNA, 25 bp, Homo sapien
tcaacatcgtgggccaaggagccat

SEQ ID NO: 1786100 - DNA, 25 bp, Homo sapien
gaaacattggttggccggatgaata

SEQ ID NO: 1786101 - DNA, 25 bp, Homo sapien
atggaacttggaattggcatttgct

SEQ ID NO: 1786102 - DNA, 25 bp, Homo sapien
ctgaaaagggcaacactgtacgtca

SEQ ID NO: 1786103 - DNA, 25 bp, Homo sapien
tctttcagtagaacacacagtcagc

SEQ ID NO: 1786104 - DNA, 25 bp, Homo sapien
ctttcagtagaacacacagtcagca

SEQ ID NO: 1786105 - DNA, 25 bp, Homo sapien
tttcagtagaacacacagtcagcac

SEQ ID NO: 1786106 - DNA, 25 bp, Homo sapien
gaaaatatgctcaagtgggcaacct

SEQ ID NO: 1786107 - DNA, 25 bp, Homo sapien
tattacggttatccaagtggtcagc

SEQ ID NO: 1786108 - DNA, 25 bp, Homo sapien
aagttaaacggcatacacagggctg

SEQ ID NO: 1786109 - DNA, 25 bp, Homo sapien
tcagcaaagaagtaagtgggcaacg

SEQ ID NO: 1786110 - DNA, 25 bp, Homo sapien
ctgtgattagttctttaccacatat

SEQ ID NO: 1786111 - DNA, 25 bp, Homo sapien
tatgtaaccagattagatgatagtc

SEQ ID NO: 1786112 - DNA, 25 bp, Homo sapien
taaccagattagatgatagtctgtg

SEQ ID NO: 1786113 - DNA, 25 bp, Homo sapien
tacaatatgtaaccagattagatga

SEQ ID NO: 1786114 - DNA, 25 bp, Homo sapien
tacgcggcttcttctctgtgagcac

SEQ ID NO: 1786115 - DNA, 25 bp, Homo sapien
tttaaatgcagtcccattgtgggtt

SEQ ID NO: 1786116 - DNA, 25 bp, Homo sapien
gagagtgagctcttatgttgcttcc

SEQ ID NO: 1786117 - DNA, 25 bp, Homo sapien
ttcttactgtgtccttacgcggctt

SEQ ID NO: 1786118 - DNA, 25 bp, Homo sapien
tttgcctctaatggactcaaacttc

SEQ ID NO: 1786119 - DNA, 25 bp, Homo sapien
gggtctctctgacattgtgcctgtg

SEQ ID NO: 1786120 - DNA, 25 bp, Homo sapien
aagaagccagttgccagaatgtttc

SEQ ID NO: 1786121 - DNA, 25 bp, Homo sapien
gaggtttctgcatatattcccagtg

SEQ ID NO: 1786122 - DNA, 25 bp, Homo sapien
gcctgtgagccacatatagccctca

SEQ ID NO: 1786123 - DNA, 25 bp, Homo sapien
ggagcagcatccactgcatctttct

SEQ ID NO: 1786124 - DNA, 25 bp, Homo sapien
tcacttacatcttcttcactcctga

SEQ ID NO: 1786125 - DNA, 25 bp, Homo sapien
ctttcttggtgcctggccactcact

SEQ ID NO: 1786126 - DNA, 25 bp, Homo sapien
cagcatccactgcatctttcttggt

SEQ ID NO: 1786127 - DNA, 25 bp, Homo sapien
gaggttgaggtgtccctttgattgt

SEQ ID NO: 1786128 - DNA, 25 bp, Homo sapien
cctttgattgtcaggcttatcagaa

SEQ ID NO: 1786129 - DNA, 25 bp, Homo sapien
tttgattgtcaggcttatcagaatc

SEQ ID NO: 1786130 - DNA, 25 bp, Homo sapien
aggttgaggtgtccctttgattgtc

SEQ ID NO: 1786131 - DNA, 25 bp, Homo sapien
tccttgttgagataaggattcataa

SEQ ID NO: 1786132 - DNA, 25 bp, Homo sapien
cttgttgagataaggattcataatg

SEQ ID NO: 1786133 - DNA, 25 bp, Homo sapien
cctccttgttgagataaggattcat

SEQ ID NO: 1786134 - DNA, 25 bp, Homo sapien
gtcctccttgttgagataaggattc

SEQ ID NO: 1786135 - DNA, 25 bp, Homo sapien
atttctacagtgtgtcaccccaccc

SEQ ID NO: 1786136 - DNA, 25 bp, Homo sapien
catttctacagtgtgtcaccccacc

SEQ ID NO: 1786137 - DNA, 25 bp, Homo sapien
tttctacagtgtgtcaccccaccct

SEQ ID NO: 1786138 - DNA, 25 bp, Homo sapien
gatgttgggcacactctcagccaca

SEQ ID NO: 1786139 - DNA, 25 bp, Homo sapien
gtggtgaagcaacatgtctgggaac

SEQ ID NO: 1786140 - DNA, 25 bp, Homo sapien
ttcctcctgagatgtctgccctaca

SEQ ID NO: 1786141 - DNA, 25 bp, Homo sapien
gatgtctgccctacataaaagctgg

SEQ ID NO: 1786142 - DNA, 25 bp, Homo sapien
gctctgttctgccttcctctcctac

SEQ ID NO: 1786143 - DNA, 25 bp, Homo sapien
cagtgctctgttctgccttcctctc

SEQ ID NO: 1786144 - DNA, 25 bp, Homo sapien
gtgctctgttctgccttcctctcct

SEQ ID NO: 1786145 - DNA, 25 bp, Homo sapien
agtgctctgttctgccttcctctcc

SEQ ID NO: 1786146 - DNA, 25 bp, Homo sapien
ggaggatgggggattgatctccaaa

SEQ ID NO: 1786147 - DNA, 25 bp, Homo sapien
ggtcccccgatccaagtcatggcaa

SEQ ID NO: 1786148 - DNA, 25 bp, Homo sapien
aagtcatggcaacaaatttcatgca

SEQ ID NO: 1786149 - DNA, 25 bp, Homo sapien
gatgggggattgatctccaaaggga

SEQ ID NO: 1786150 - DNA, 25 bp, Homo sapien
gaccattagtctgtcactgaatact

SEQ ID NO: 1786151 - DNA, 25 bp, Homo sapien
aatagaccattagtctgtcactgaa

SEQ ID NO: 1786152 - DNA, 25 bp, Homo sapien
ttaatagaccattagtctgtcactg

SEQ ID NO: 1786153 - DNA, 25 bp, Homo sapien
cattagtctgtcactgaatactaag

SEQ ID NO: 1786154 - DNA, 25 bp, Homo sapien
ggaaggaaattcacagggttaatca

SEQ ID NO: 1786155 - DNA, 25 bp, Homo sapien
cagtgggagagcttctgagccaggg

SEQ ID NO: 1786156 - DNA, 25 bp, Homo sapien
atcagttaaggccgggcagggcctt

SEQ ID NO: 1786157 - DNA, 25 bp, Homo sapien
tgagccaggggaaggaaattcacag

SEQ ID NO: 1786158 - DNA, 25 bp, Homo sapien
cctcatatagcttttccttagtctg

SEQ ID NO: 1786159 - DNA, 25 bp, Homo sapien
gaagttaagatctaggtgccatcag

SEQ ID NO: 1786160 - DNA, 25 bp, Homo sapien
ggacaccagtgctactaaactagaa

SEQ ID NO: 1786161 - DNA, 25 bp, Homo sapien
ccttagtctgtgaatagaaagaaag

SEQ ID NO: 1786162 - DNA, 25 bp, Homo sapien
gtccttaggaatcatgcccactggt

SEQ ID NO: 1786163 - DNA, 25 bp, Homo sapien
tggtccttaggaatcatgcccactg

SEQ ID NO: 1786164 - DNA, 25 bp, Homo sapien
ctggtccttaggaatcatgcccact

SEQ ID NO: 1786165 - DNA, 25 bp, Homo sapien
ggtccttaggaatcatgcccactgg

SEQ ID NO: 1786166 - DNA, 25 bp, Homo sapien
gggatttctaggcagagctgtcagt

SEQ ID NO: 1786167 - DNA, 25 bp, Homo sapien
ggatttctaggcagagctgtcagtg

SEQ ID NO: 1786168 - DNA, 25 bp, Homo sapien
tatccctccggaggatctgctcaga

SEQ ID NO: 1786169 - DNA, 25 bp, Homo sapien
caaacgtttgctcgattcaggcccg

SEQ ID NO: 1786170 - DNA, 25 bp, Homo sapien
tattatgtggctcaccctcatctcc

SEQ ID NO: 1786171 - DNA, 25 bp, Homo sapien
tagctctgaggcctcaaccacaagt

SEQ ID NO: 1786172 - DNA, 25 bp, Homo sapien
atcaggggcaatgtcagccagcttc

SEQ ID NO: 1786173 - DNA, 25 bp, Homo sapien
gcccattggagtgggacccgtttca

SEQ ID NO: 1786174 - DNA, 25 bp, Homo sapien
cattggagtgggacccgtttcaggt

SEQ ID NO: 1786175 - DNA, 25 bp, Homo sapien
cctctcctttcatgttgccatcagg

SEQ ID NO: 1786176 - DNA, 25 bp, Homo sapien
taagcccatgggtgttatctacatg

SEQ ID NO: 1786177 - DNA, 25 bp, Homo sapien
atgggtgttatctacatgcaggcac

SEQ ID NO: 1786178 - DNA, 25 bp, Homo sapien
gcccatgggtgttatctacatgcag

SEQ ID NO: 1786179 - DNA, 25 bp, Homo sapien
tttctttaagcccatgggtgttatc

SEQ ID NO: 1786180 - DNA, 25 bp, Homo sapien
tcagagtccacacttagcaaggaca

SEQ ID NO: 1786181 - DNA, 25 bp, Homo sapien
cacttagcaaggacaagtaatgaac

SEQ ID NO: 1786182 - DNA, 25 bp, Homo sapien
cctcagagccatgccggctcgaatt

SEQ ID NO: 1786183 - DNA, 25 bp, Homo sapien
caagtaatgaacaagatgatccctc

SEQ ID NO: 1786184 - DNA, 25 bp, Homo sapien
cgggatgtaacttctcaatgtcctt

SEQ ID NO: 1786185 - DNA, 25 bp, Homo sapien
gttgcgggatgtaacttctcaatgt

SEQ ID NO: 1786186 - DNA, 25 bp, Homo sapien
tgagttgcgggatgtaacttctcaa

SEQ ID NO: 1786187 - DNA, 25 bp, Homo sapien
tgtcctttcttctccgcccaacttc

SEQ ID NO: 1786188 - DNA, 25 bp, Homo sapien
ccatttcatgccagttagactggtg

SEQ ID NO: 1786189 - DNA, 25 bp, Homo sapien
ttagactggtgatcattaaaacatc

SEQ ID NO: 1786190 - DNA, 25 bp, Homo sapien
gactggtgatcattaaaacatcagg

SEQ ID NO: 1786191 - DNA, 25 bp, Homo sapien
agttagactggtgatcattaaaaca

SEQ ID NO: 1786192 - DNA, 25 bp, Homo sapien
catttatactacaaagcagatctac

SEQ ID NO: 1786193 - DNA, 25 bp, Homo sapien
cgggtgcaccagaagagtatggaca

SEQ ID NO: 1786194 - DNA, 25 bp, Homo sapien
taaaaacgggtgcaccagaagagta

SEQ ID NO: 1786195 - DNA, 25 bp, Homo sapien
gagtatggacagtgtttggatttca

SEQ ID NO: 1786196 - DNA, 25 bp, Homo sapien
caccagaagagtatggacagtgttt

SEQ ID NO: 1786197 - DNA, 25 bp, Homo sapien
ccgtgatgagagttatcaggaagat

SEQ ID NO: 1786198 - DNA, 25 bp, Homo sapien
tgagagttatcaggaagatgttcat

SEQ ID NO: 1786199 - DNA, 25 bp, Homo sapien
atgagagttatcaggaagatgttca

SEQ ID NO: 1786200 - DNA, 25 bp, Homo sapien
ggctttctcgcccttatgactcttt

SEQ ID NO: 1786201 - DNA, 25 bp, Homo sapien
actgcttaatttcacggctttctcg

SEQ ID NO: 1786202 - DNA, 25 bp, Homo sapien
gacgaacaattcagcactgcttaat

SEQ ID NO: 1786203 - DNA, 25 bp, Homo sapien
tccacgtgccaggatcctttgacga

SEQ ID NO: 1786204 - DNA, 25 bp, Homo sapien
agaggggagtgagaatcaagacagt

SEQ ID NO: 1786205 - DNA, 25 bp, Homo sapien
caagaaggaaccaagtacagacacc

SEQ ID NO: 1786206 - DNA, 25 bp, Homo sapien
gggaacattcccatgaagcgtggat

SEQ ID NO: 1786207 - DNA, 25 bp, Homo sapien
aaatttggagaaaagcgactccagt

SEQ ID NO: 1786208 - DNA, 25 bp, Homo sapien
ttcattcagtcgttctccaccttca

SEQ ID NO: 1786209 - DNA, 25 bp, Homo sapien
caggaaaggcaacattgtggcttca

SEQ ID NO: 1786210 - DNA, 25 bp, Homo sapien
gaagacctctttccgatatggtgtg

SEQ ID NO: 1786211 - DNA, 25 bp, Homo sapien
caagtctgttgccagagggaacaca

SEQ ID NO: 1786212 - DNA, 25 bp, Homo sapien
gaacacaattctgggtacagacgaa

SEQ ID NO: 1786213 - DNA, 25 bp, Homo sapien
tgaacagggctagaaggccaaggac

SEQ ID NO: 1786214 - DNA, 25 bp, Homo sapien
tcctgcaaacgaggcagaaagccat

SEQ ID NO: 1786215 - DNA, 25 bp, Homo sapien
gaaagccatctaagtctgatcgcac

SEQ ID NO: 1786216 - DNA, 25 bp, Homo sapien
ttccagtattactgaaaatggtcct

SEQ ID NO: 1786217 - DNA, 25 bp, Homo sapien
tcgcacaacgagcagcttgggaggc

SEQ ID NO: 1786218 - DNA, 25 bp, Homo sapien
taaagctgacaatagtgaatttttc

SEQ ID NO: 1786219 - DNA, 25 bp, Homo sapien
tgattctcctatttaaagctgacaa

SEQ ID NO: 1786220 - DNA, 25 bp, Homo sapien
cagccctgtctatgattctcctatt

SEQ ID NO: 1786221 - DNA, 25 bp, Homo sapien
cctatttaaagctgacaatagtgaa

SEQ ID NO: 1786222 - DNA, 25 bp, Homo sapien
cagtgaagtctgcagagacagctct

SEQ ID NO: 1786223 - DNA, 25 bp, Homo sapien
tgcccccagaaacagtgaagtctgc

SEQ ID NO: 1786224 - DNA, 25 bp, Homo sapien
cccagaaacagtgaagtctgcagag

SEQ ID NO: 1786225 - DNA, 25 bp, Homo sapien
cagagacagctcttcctcagaaggc

SEQ ID NO: 1786226 - DNA, 25 bp, Homo sapien
cagtttttacactcagtttgttctt

SEQ ID NO: 1786227 - DNA, 25 bp, Homo sapien
tcagtttttacactcagtttgttct

SEQ ID NO: 1786228 - DNA, 25 bp, Homo sapien
cctgcacagaggagctaggagctac

SEQ ID NO: 1786229 - DNA, 25 bp, Homo sapien
tgaagggcacttgccaactccaagt

SEQ ID NO: 1786230 - DNA, 25 bp, Homo sapien
tccaagtaaaggagtgtgccagtct

SEQ ID NO: 1786231 - DNA, 25 bp, Homo sapien
gagattttgaatctgatgccccaaa

SEQ ID NO: 1786232 - DNA, 25 bp, Homo sapien
aagtcccctccagccatgaggaaac

SEQ ID NO: 1786233 - DNA, 25 bp, Homo sapien
gtcccctccagccatgaggaaacag

SEQ ID NO: 1786234 - DNA, 25 bp, Homo sapien
cccctccagccatgaggaaacagca

SEQ ID NO: 1786235 - DNA, 25 bp, Homo sapien
ctacgaccagaagtcccctccagcc

SEQ ID NO: 1786236 - DNA, 25 bp, Homo sapien
tcttggcttctgactgaaatcaaca

SEQ ID NO: 1786237 - DNA, 25 bp, Homo sapien
cttggcttctgactgaaatcaacat

SEQ ID NO: 1786238 - DNA, 25 bp, Homo sapien
ctcttggcttctgactgaaatcaac

SEQ ID NO: 1786239 - DNA, 25 bp, Homo sapien
caccctcttcatcgcaatatttttt

SEQ ID NO: 1786240 - DNA, 25 bp, Homo sapien
gagtttctgaagcacaccctcttca

SEQ ID NO: 1786241 - DNA, 25 bp, Homo sapien
tgaagcacaccctcttcatcgcaat

SEQ ID NO: 1786242 - DNA, 25 bp, Homo sapien
gcacaccctcttcatcgcaatattt

SEQ ID NO: 1786243 - DNA, 25 bp, Homo sapien
ataggcgtataggacatgacttcct

SEQ ID NO: 1786244 - DNA, 25 bp, Homo sapien
aaacaataggcgtataggacatgac

SEQ ID NO: 1786245 - DNA, 25 bp, Homo sapien
aacaataggcgtataggacatgact

SEQ ID NO: 1786246 - DNA, 25 bp, Homo sapien
caataggcgtataggacatgacttc

SEQ ID NO: 1786247 - DNA, 25 bp, Homo sapien
tgcccctggtttactctggagcaga

SEQ ID NO: 1786248 - DNA, 25 bp, Homo sapien
aatgccctggattgagatagagccc

SEQ ID NO: 1786249 - DNA, 25 bp, Homo sapien
ctggtttactctggagcagaggaga

SEQ ID NO: 1786250 - DNA, 25 bp, Homo sapien
cccctggtttactctggagcagagg

SEQ ID NO: 1786251 - DNA, 25 bp, Homo sapien
gacagctaactctataaggaaaggg

SEQ ID NO: 1786252 - DNA, 25 bp, Homo sapien
aaggaaagggatgtctgggagcagc

SEQ ID NO: 1786253 - DNA, 25 bp, Homo sapien
ggttctgaggtgaattacactcaag

SEQ ID NO: 1786254 - DNA, 25 bp, Homo sapien
tctgttgactgaaggatcttattag

SEQ ID NO: 1786255 - DNA, 25 bp, Homo sapien
ttgatgtgtctaccaacatatgacg

SEQ ID NO: 1786256 - DNA, 25 bp, Homo sapien
tgtctaccaacatatgacgaatgtg

SEQ ID NO: 1786257 - DNA, 25 bp, Homo sapien
ctaaatgttgatgtgtctaccaaca

SEQ ID NO: 1786258 - DNA, 25 bp, Homo sapien
acatatgacgaatgtgtttcagcac

SEQ ID NO: 1786259 - DNA, 25 bp, Homo sapien
tgatctgagtttttagtatcccctt

SEQ ID NO: 1786260 - DNA, 25 bp, Homo sapien
gctttctgtatcactctactcacca

SEQ ID NO: 1786261 - DNA, 25 bp, Homo sapien
attgatctgagtttttagtatcccc

SEQ ID NO: 1786262 - DNA, 25 bp, Homo sapien
ctctagctttctgtatcactctact

SEQ ID NO: 1786263 - DNA, 25 bp, Homo sapien
tggatgccatgaccatctccactgg

SEQ ID NO: 1786264 - DNA, 25 bp, Homo sapien
atccttgaatgcaggatctatgcat

SEQ ID NO: 1786265 - DNA, 25 bp, Homo sapien
catggatgccatgaccatctccact

SEQ ID NO: 1786266 - DNA, 25 bp, Homo sapien
gcaggatctatgcatcctgggtgtt

SEQ ID NO: 1786267 - DNA, 25 bp, Homo sapien
tcccaccaagattcgaactcggatt

SEQ ID NO: 1786268 - DNA, 25 bp, Homo sapien
caccaagattcgaactcggattgct

SEQ ID NO: 1786269 - DNA, 25 bp, Homo sapien
ccaagattcgaactcggattgctgg

SEQ ID NO: 1786270 - DNA, 25 bp, Homo sapien
caagattcgaactcggattgctgga

SEQ ID NO: 1786271 - DNA, 25 bp, Homo sapien
gatggtttctactagttgggaaaga

SEQ ID NO: 1786272 - DNA, 25 bp, Homo sapien
tgttcaccatattcaaggatggttt

SEQ ID NO: 1786273 - DNA, 25 bp, Homo sapien
gaggggtggatcctagaagccaatt

SEQ ID NO: 1786274 - DNA, 25 bp, Homo sapien
aaagaggggtggatcctagaagcca

SEQ ID NO: 1786275 - DNA, 25 bp, Homo sapien
tacctcatttggactagatccactc

SEQ ID NO: 1786276 - DNA, 25 bp, Homo sapien
tctcgtggatggagataatcacctc

SEQ ID NO: 1786277 - DNA, 25 bp, Homo sapien
cgattatgtaccagcaaatggattt

SEQ ID NO: 1786278 - DNA, 25 bp, Homo sapien
ataatcacctccagctgacccataa

SEQ ID NO: 1786279 - DNA, 25 bp, Homo sapien
ccgagggctcagttagcaggcttgt

SEQ ID NO: 1786280 - DNA, 25 bp, Homo sapien
agttccctgcatcggcttgcgccat

SEQ ID NO: 1786281 - DNA, 25 bp, Homo sapien
tccgcaggattggagaccagccccg

SEQ ID NO: 1786282 - DNA, 25 bp, Homo sapien
gagaccagccccgagggctcagtta

SEQ ID NO: 1786283 - DNA, 25 bp, Homo sapien
ttcccattggcacgcaggtccacag

SEQ ID NO: 1786284 - DNA, 25 bp, Homo sapien
gttcccattggcacgcaggtccaca

SEQ ID NO: 1786285 - DNA, 25 bp, Homo sapien
ctcccaatctcaactatacacatca

SEQ ID NO: 1786286 - DNA, 25 bp, Homo sapien
cccaatctcaactatacacatcagt

SEQ ID NO: 1786287 - DNA, 25 bp, Homo sapien
catcagtgtaagagtcagcggggtt

SEQ ID NO: 1786288 - DNA, 25 bp, Homo sapien
gtcagcggggttccggcagatgcag

SEQ ID NO: 1786289 - DNA, 25 bp, Homo sapien
taatttcacaagatatgaggcccag

SEQ ID NO: 1786290 - DNA, 25 bp, Homo sapien
gcagcgatcacctagaacagagcat

SEQ ID NO: 1786291 - DNA, 25 bp, Homo sapien
caaacagtacatgtggagacactca

SEQ ID NO: 1786292 - DNA, 25 bp, Homo sapien
ccagaaggaatatgagcgtgcacta

SEQ ID NO: 1786293 - DNA, 25 bp, Homo sapien
tcttcagaaagttttgcacattagc

SEQ ID NO: 1786294 - DNA, 25 bp, Homo sapien
catagacttcgggtagtgttagcat

SEQ ID NO: 1786295 - DNA, 25 bp, Homo sapien
tagtgttagcatagttcccttggac

SEQ ID NO: 1786296 - DNA, 25 bp, Homo sapien
tagcatagttcccttggactttgtg

SEQ ID NO: 1786297 - DNA, 25 bp, Homo sapien
cctgaggtattgttagcagctccat

SEQ ID NO: 1786298 - DNA, 25 bp, Homo sapien
tcctgaggtattgttagcagctcca

SEQ ID NO: 1786299 - DNA, 25 bp, Homo sapien
tttagacaaacaccgagagaaatca

SEQ ID NO: 1786300 - DNA, 25 bp, Homo sapien
ttctttagacaaacaccgagagaaa

SEQ ID NO: 1786301 - DNA, 25 bp, Homo sapien
tctttagacaaacaccgagagaaat

SEQ ID NO: 1786302 - DNA, 25 bp, Homo sapien
ttttctttagacaaacaccgagaga

SEQ ID NO: 1786303 - DNA, 25 bp, Homo sapien
ggtggctgtgagctccggtgttgca

SEQ ID NO: 1786304 - DNA, 25 bp, Homo sapien
tgcaagaggagcacgtgtccctgca

SEQ ID NO: 1786305 - DNA, 25 bp, Homo sapien
gaggagcacgtgtccctgcattcac

SEQ ID NO: 1786306 - DNA, 25 bp, Homo sapien
tgtgagctccggtgttgcaagagga

SEQ ID NO: 1786307 - DNA, 25 bp, Homo sapien
cacgtgacaggatctaaacaggttg

SEQ ID NO: 1786308 - DNA, 25 bp, Homo sapien
cgttgacccaattgccagactcctt

SEQ ID NO: 1786309 - DNA, 25 bp, Homo sapien
tttttgctgccgttgacccaattgc

SEQ ID NO: 1786310 - DNA, 25 bp, Homo sapien
tctctgtgcgtctccttcaaacgtg

SEQ ID NO: 1786311 - DNA, 25 bp, Homo sapien
caaccaaataccttccttactcagt

SEQ ID NO: 1786312 - DNA, 25 bp, Homo sapien
gacgcaacatcaggagacaaggagg

SEQ ID NO: 1786313 - DNA, 25 bp, Homo sapien
ctgtgacaaccaaataccttcctta

SEQ ID NO: 1786314 - DNA, 25 bp, Homo sapien
tttaaatttaggctttcctgacgca

SEQ ID NO: 1786315 - DNA, 25 bp, Homo sapien
tcctactgggctgtgcgtaattcca

SEQ ID NO: 1786316 - DNA, 25 bp, Homo sapien
tccacaatgtatacctgcaatggcc

SEQ ID NO: 1786317 - DNA, 25 bp, Homo sapien
tgcaatggcccactgggttttaaac

SEQ ID NO: 1786318 - DNA, 25 bp, Homo sapien
aaacactggtgcatggcatcgtgga

SEQ ID NO: 1786319 - DNA, 25 bp, Homo sapien
tgtgcacattggccagaacacattt

SEQ ID NO: 1786320 - DNA, 25 bp, Homo sapien
tgcacattggccagaacacatttac

SEQ ID NO: 1786321 - DNA, 25 bp, Homo sapien
catttgcagggctgtgcacattggc

SEQ ID NO: 1786322 - DNA, 25 bp, Homo sapien
tcatgaggcatttgcagggctgtgc

SEQ ID NO: 1786323 - DNA, 25 bp, Homo sapien
tcattgtggatccactcctgctctg

SEQ ID NO: 1786324 - DNA, 25 bp, Homo sapien
tggatggttaagtttctgtgccctg

SEQ ID NO: 1786325 - DNA, 25 bp, Homo sapien
gctgtatttggttctagacttaggg

SEQ ID NO: 1786326 - DNA, 25 bp, Homo sapien
tgactactcttatccctgtggatgg

SEQ ID NO: 1786327 - DNA, 25 bp, Homo sapien
ccccagcccctgtccccatatcttc

SEQ ID NO: 1786328 - DNA, 25 bp, Homo sapien
ctgagtgccactccatggccccagt

SEQ ID NO: 1786329 - DNA, 25 bp, Homo sapien
tgagtgccactccatggccccagtt

SEQ ID NO: 1786330 - DNA, 25 bp, Homo sapien
cagcccctgtccccatatcttccat

SEQ ID NO: 1786331 - DNA, 25 bp, Homo sapien
ttttagtgcctgtttatggtggaac

SEQ ID NO: 1786332 - DNA, 25 bp, Homo sapien
tttatggtggaacttgttagcatgc

SEQ ID NO: 1786333 - DNA, 25 bp, Homo sapien
cctgtttatggtggaacttgttagc

SEQ ID NO: 1786334 - DNA, 25 bp, Homo sapien
ggtggaacttgttagcatgcttaaa

SEQ ID NO: 1786335 - DNA, 25 bp, Homo sapien
gagccttggtgaattatttctgcac

SEQ ID NO: 1786336 - DNA, 25 bp, Homo sapien
tgagccttggtgaattatttctgca

SEQ ID NO: 1786337 - DNA, 25 bp, Homo sapien
agccttggtgaattatttctgcaca

SEQ ID NO: 1786338 - DNA, 25 bp, Homo sapien
agcgccagctccttatctgtgacct

SEQ ID NO: 1786339 - DNA, 25 bp, Homo sapien
cagcgccagctccttatctgtgacc

SEQ ID NO: 1786340 - DNA, 25 bp, Homo sapien
tcacaatcaatgattccagctgtct

SEQ ID NO: 1786341 - DNA, 25 bp, Homo sapien
tggaagcgccgatatcacaatcaat

SEQ ID NO: 1786342 - DNA, 25 bp, Homo sapien
tgtctgcaacaccaaagtgggtgat

SEQ ID NO: 1786343 - DNA, 25 bp, Homo sapien
ttaagaaaatctggaagcgccgata

SEQ ID NO: 1786344 - DNA, 25 bp, Homo sapien
cagagttgaggtagaatgccaatac

SEQ ID NO: 1786345 - DNA, 25 bp, Homo sapien
aggaagaggccagaccagaatcagg

SEQ ID NO: 1786346 - DNA, 25 bp, Homo sapien
aataccgccattggcctgcacagct

SEQ ID NO: 1786347 - DNA, 25 bp, Homo sapien
tcaggcttagtggtctgggtacaga

SEQ ID NO: 1786348 - DNA, 25 bp, Homo sapien
tgcaccttgtctccttgatagcctc

SEQ ID NO: 1786349 - DNA, 25 bp, Homo sapien
cttcagggtcggcagcatggaaatg

SEQ ID NO: 1786350 - DNA, 25 bp, Homo sapien
tcctcattccattcgttgccttcag

SEQ ID NO: 1786351 - DNA, 25 bp, Homo sapien
gcatggaaatgcaccttgtctcctt

SEQ ID NO: 1786352 - DNA, 25 bp, Homo sapien
tgcagctggcaagacaactgagctg

SEQ ID NO: 1786353 - DNA, 25 bp, Homo sapien
gtgcagctggcaagacaactgagct

SEQ ID NO: 1786354 - DNA, 25 bp, Homo sapien
gcagctggcaagacaactgagctgt

SEQ ID NO: 1786355 - DNA, 25 bp, Homo sapien
agtgcagctggcaagacaactgagc

SEQ ID NO: 1786356 - DNA, 25 bp, Homo sapien
cagagtactaaaggtctcattgaga

SEQ ID NO: 1786357 - DNA, 25 bp, Homo sapien
gagtactggttaatctgcttgacca

SEQ ID NO: 1786358 - DNA, 25 bp, Homo sapien
ttaacgggagtactggttaatctgc

SEQ ID NO: 1786359 - DNA, 25 bp, Homo sapien
tgcttgaccagagtactaaaggtct

SEQ ID NO: 1786360 - DNA, 25 bp, Homo sapien
tattggctctactcgggcattgtcc

SEQ ID NO: 1786361 - DNA, 25 bp, Homo sapien
ggcattgtccataactagcccttgt

SEQ ID NO: 1786362 - DNA, 25 bp, Homo sapien
tagcccttgttaattcttcattcaa

SEQ ID NO: 1786363 - DNA, 25 bp, Homo sapien
ctccaggttacttgagtttgaagac

SEQ ID NO: 1786364 - DNA, 25 bp, Homo sapien
ctgggagtcggtggtgatgccattc

SEQ ID NO: 1786365 - DNA, 25 bp, Homo sapien
tggcgtaagtcaggctcaagaagca

SEQ ID NO: 1786366 - DNA, 25 bp, Homo sapien
gagcacagtacaaccaaagccagtc

SEQ ID NO: 1786367 - DNA, 25 bp, Homo sapien
tcaagaagcatatgactgtgtccag

SEQ ID NO: 1786368 - DNA, 25 bp, Homo sapien
ttaatatttgaagcccactgctgag

SEQ ID NO: 1786369 - DNA, 25 bp, Homo sapien
tgacacctaatccagatcaaggccc

SEQ ID NO: 1786370 - DNA, 25 bp, Homo sapien
tcttgtgaggagctaacatggctgg

SEQ ID NO: 1786371 - DNA, 25 bp, Homo sapien
caaaggacaggttgactcttgtgag

SEQ ID NO: 1786372 - DNA, 25 bp, Homo sapien
tgcttccagagcaggtccaaataag

SEQ ID NO: 1786373 - DNA, 25 bp, Homo sapien
tcaggtccaggtggattcagcacaa

SEQ ID NO: 1786374 - DNA, 25 bp, Homo sapien
tgtggaacacgtccatccagatctg

SEQ ID NO: 1786375 - DNA, 25 bp, Homo sapien
cacaagtgactgtggattcagcaca

SEQ ID NO: 1786376 - DNA, 25 bp, Homo sapien
tggctcacagacatataaactggag

SEQ ID NO: 1786377 - DNA, 25 bp, Homo sapien
tcctggctcacagacatataaactg

SEQ ID NO: 1786378 - DNA, 25 bp, Homo sapien
gaagacaacatctctgccttcagac

SEQ ID NO: 1786379 - DNA, 25 bp, Homo sapien
ctctggaattgtgaaaatgaagaca

SEQ ID NO: 1786380 - DNA, 25 bp, Homo sapien
tcaccttctatggtgcaagcagaag

SEQ ID NO: 1786381 - DNA, 25 bp, Homo sapien
tcagcctttccatggagtgtaaaac

SEQ ID NO: 1786382 - DNA, 25 bp, Homo sapien
gagtaggacgtttgatctcaccttc

SEQ ID NO: 1786383 - DNA, 25 bp, Homo sapien
tccttgggtctaaagagatcatgca

SEQ ID NO: 1786384 - DNA, 25 bp, Homo sapien
caaagagctgccttatttgagttca

SEQ ID NO: 1786385 - DNA, 25 bp, Homo sapien
atttgcgcctgatacatcacatggg

SEQ ID NO: 1786386 - DNA, 25 bp, Homo sapien
taacctctcatttgcgcctgataca

SEQ ID NO: 1786387 - DNA, 25 bp, Homo sapien
cagctgcacgggtaccctgctgtaa

SEQ ID NO: 1786388 - DNA, 25 bp, Homo sapien
ggtgagagaacagactcagacccga

SEQ ID NO: 1786389 - DNA, 25 bp, Homo sapien
ttaggggcattatacaggtgagaga

SEQ ID NO: 1786390 - DNA, 25 bp, Homo sapien
aggggcattatacaggtgagagaac

SEQ ID NO: 1786391 - DNA, 25 bp, Homo sapien
gagagaacagactcagacccgaaca

SEQ ID NO: 1786392 - DNA, 25 bp, Homo sapien
gacattaattatgtggcatccttcc

SEQ ID NO: 1786393 - DNA, 25 bp, Homo sapien
tgtaaatggctggacagtatgcaac

SEQ ID NO: 1786394 - DNA, 25 bp, Homo sapien
caaattcttgatgtctggagatatg

SEQ ID NO: 1786395 - DNA, 25 bp, Homo sapien
gcaacaaggccctctaaacactcag

SEQ ID NO: 1786396 - DNA, 25 bp, Homo sapien
cattttcctgcgattgaatgtcaga

SEQ ID NO: 1786397 - DNA, 25 bp, Homo sapien
atgtcagaatcaagaattccagtgt

SEQ ID NO: 1786398 - DNA, 25 bp, Homo sapien
cagaatcaagaattccagtgtagct

SEQ ID NO: 1786399 - DNA, 25 bp, Homo sapien
actcctacattttcctgcgattgaa

SEQ ID NO: 1786400 - DNA, 25 bp, Homo sapien
gtacatgtactttattgcaagacca

SEQ ID NO: 1786401 - DNA, 25 bp, Homo sapien
tgtactttattgcaagaccaaattt

SEQ ID NO: 1786402 - DNA, 25 bp, Homo sapien
tgcattctttattctgtacatgtac

SEQ ID NO: 1786403 - DNA, 25 bp, Homo sapien
actttattgcaagaccaaatttcat

SEQ ID NO: 1786404 - DNA, 25 bp, Homo sapien
gatcagttgccaaagaatctaggaa

SEQ ID NO: 1786405 - DNA, 25 bp, Homo sapien
gaagaaggtctcattatctccatga

SEQ ID NO: 1786406 - DNA, 25 bp, Homo sapien
gctcatcaccctaggttctacagga

SEQ ID NO: 1786407 - DNA, 25 bp, Homo sapien
cctgcaggagtttctatagcgagac

SEQ ID NO: 1786408 - DNA, 25 bp, Homo sapien
cttctgttttcctaattgctttccg

SEQ ID NO: 1786409 - DNA, 25 bp, Homo sapien
tcagcagctcttctatctgtgatcc

SEQ ID NO: 1786410 - DNA, 25 bp, Homo sapien
gctttccgttccttcccatcagcag

SEQ ID NO: 1786411 - DNA, 25 bp, Homo sapien
gggccaaagccttcaagttgccttc

SEQ ID NO: 1786412 - DNA, 25 bp, Homo sapien
cactttaggacaaagttgaagggca

SEQ ID NO: 1786413 - DNA, 25 bp, Homo sapien
taagtctgagttcagcagactctgg

SEQ ID NO: 1786414 - DNA, 25 bp, Homo sapien
aagaaacgcatcacctgagtgccca

SEQ ID NO: 1786415 - DNA, 25 bp, Homo sapien
tgaagggcagtccaaagaaacgcat

SEQ ID NO: 1786416 - DNA, 25 bp, Homo sapien
ctaagttttttgctctgatgctggc

SEQ ID NO: 1786417 - DNA, 25 bp, Homo sapien
ccaggtgtgagaagtcttagtacca

SEQ ID NO: 1786418 - DNA, 25 bp, Homo sapien
ttccaacaccatcaccaatttgagt

SEQ ID NO: 1786419 - DNA, 25 bp, Homo sapien
ttagtaccattgttggtcccaggac

SEQ ID NO: 1786420 - DNA, 25 bp, Homo sapien
tgtggtaaggctgacaggtcaagat

SEQ ID NO: 1786421 - DNA, 25 bp, Homo sapien
tggtaaggctgacaggtcaagattg

SEQ ID NO: 1786422 - DNA, 25 bp, Homo sapien
ggctgacaggtcaagattgactgac

SEQ ID NO: 1786423 - DNA, 25 bp, Homo sapien
aaggctgacaggtcaagattgactg

SEQ ID NO: 1786424 - DNA, 25 bp, Homo sapien
gataagagctgtcttaggagattgt

SEQ ID NO: 1786425 - DNA, 25 bp, Homo sapien
taagagctgtcttaggagattgtac

SEQ ID NO: 1786426 - DNA, 25 bp, Homo sapien
ataagagctgtcttaggagattgta

SEQ ID NO: 1786427 - DNA, 25 bp, Homo sapien
tttccgcacatccagtcctcagctt

SEQ ID NO: 1786428 - DNA, 25 bp, Homo sapien
tggtttccgcacatccagtcctcag

SEQ ID NO: 1786429 - DNA, 25 bp, Homo sapien
gtttccgcacatccagtcctcagct

SEQ ID NO: 1786430 - DNA, 25 bp, Homo sapien
ctggtttccgcacatccagtcctca

SEQ ID NO: 1786431 - DNA, 25 bp, Homo sapien
cagctccgggtcttgggtgatctcc

SEQ ID NO: 1786432 - DNA, 25 bp, Homo sapien
gtttcacaattagaaggcggctgtc

SEQ ID NO: 1786433 - DNA, 25 bp, Homo sapien
acttggttaagatagggagcgctcc

SEQ ID NO: 1786434 - DNA, 25 bp, Homo sapien
gaactggacgatcgcctggcttaga

SEQ ID NO: 1786435 - DNA, 25 bp, Homo sapien
gaataaaccgactcacatgccactg

SEQ ID NO: 1786436 - DNA, 25 bp, Homo sapien
ttgggaagcacacaacataggcagc

SEQ ID NO: 1786437 - DNA, 25 bp, Homo sapien
cataggcagcacagtggagcacaag

SEQ ID NO: 1786438 - DNA, 25 bp, Homo sapien
gaatgagaactttcaccggagtctg

SEQ ID NO: 1786439 - DNA, 25 bp, Homo sapien
cactggatccctagagtggcggttg

SEQ ID NO: 1786440 - DNA, 25 bp, Homo sapien
ctggatccctagagtggcggttgtc

SEQ ID NO: 1786441 - DNA, 25 bp, Homo sapien
gatccctagagtggcggttgtccac

SEQ ID NO: 1786442 - DNA, 25 bp, Homo sapien
ctaccactggatccctagagtggcg

SEQ ID NO: 1786443 - DNA, 25 bp, Homo sapien
tgcctcaccacaattaatcacaatg

SEQ ID NO: 1786444 - DNA, 25 bp, Homo sapien
ctatgtgtgtagacagatgtattgc

SEQ ID NO: 1786445 - DNA, 25 bp, Homo sapien
tacaagtcctacactttggttagac

SEQ ID NO: 1786446 - DNA, 25 bp, Homo sapien
taggaccagattgtttggctttcac

SEQ ID NO: 1786447 - DNA, 25 bp, Homo sapien
cctttttatatgttgatgaagttca

SEQ ID NO: 1786448 - DNA, 25 bp, Homo sapien
tatattctagatagtggactcttat

SEQ ID NO: 1786449 - DNA, 25 bp, Homo sapien
agttgtccccgcaccatgcattgac

SEQ ID NO: 1786450 - DNA, 25 bp, Homo sapien
tatcaaatacgtgtgattggcaaac

SEQ ID NO: 1786451 - DNA, 25 bp, Homo sapien
gttgtacaataatctccacaattta

SEQ ID NO: 1786452 - DNA, 25 bp, Homo sapien
cactgtgttgtacaataatctccac

SEQ ID NO: 1786453 - DNA, 25 bp, Homo sapien
aattcagtatttttggtgcattcac

SEQ ID NO: 1786454 - DNA, 25 bp, Homo sapien
gtgcattcactgtgttgtacaataa

SEQ ID NO: 1786455 - DNA, 25 bp, Homo sapien
ggaagtgtggaactagcattctgcc

SEQ ID NO: 1786456 - DNA, 25 bp, Homo sapien
tatgtcggatgagccaattgcatgc

SEQ ID NO: 1786457 - DNA, 25 bp, Homo sapien
ggataatctcactggatatgtcgga

SEQ ID NO: 1786458 - DNA, 25 bp, Homo sapien
tatagagagtatctgtagagtagcc

SEQ ID NO: 1786459 - DNA, 25 bp, Homo sapien
ccttagtacagttgaaaaacagagc

SEQ ID NO: 1786460 - DNA, 25 bp, Homo sapien
catttgtccctgagagtactccacg

SEQ ID NO: 1786461 - DNA, 25 bp, Homo sapien
tactccacgattactaggttcttga

SEQ ID NO: 1786462 - DNA, 25 bp, Homo sapien
gcaatcaggcagaggcgttccttaa

SEQ ID NO: 1786463 - DNA, 25 bp, Homo sapien
catttccgagttaatttcccatagg

SEQ ID NO: 1786464 - DNA, 25 bp, Homo sapien
gcaaagggcttgactattaaatgtt

SEQ ID NO: 1786465 - DNA, 25 bp, Homo sapien
cctcatttaggtttgaattgggcgt

SEQ ID NO: 1786466 - DNA, 25 bp, Homo sapien
acaatcatgtagaaacctgtcttgg

SEQ ID NO: 1786467 - DNA, 25 bp, Homo sapien
gccgggcagtttgaggccgcggccg

SEQ ID NO: 1786468 - DNA, 25 bp, Homo sapien
ggccgggaccgaggcgctggcgctg

SEQ ID NO: 1786469 - DNA, 25 bp, Homo sapien
cgtccgggcgccctgagagggcgtc

SEQ ID NO: 1786470 - DNA, 25 bp, Homo sapien
gaaaggcggctgaccccggtccatg

SEQ ID NO: 1786471 - DNA, 25 bp, Homo sapien
actagcggcgcgaacaagtcatgct

SEQ ID NO: 1786472 - DNA, 25 bp, Homo sapien
atcaccaaaggtcgagcaagggcgc

SEQ ID NO: 1786473 - DNA, 25 bp, Homo sapien
taagtcacgggacttgggcacgctg

SEQ ID NO: 1786474 - DNA, 25 bp, Homo sapien
tcgaacagggtttggtagcaccgcc

SEQ ID NO: 1786475 - DNA, 25 bp, Homo sapien
gctggagaggcttcagaaaacttac

SEQ ID NO: 1786476 - DNA, 25 bp, Homo sapien
tggctggagaggcttcagaaaactt

SEQ ID NO: 1786477 - DNA, 25 bp, Homo sapien
catggctggagaggcttcagaaaac

SEQ ID NO: 1786478 - DNA, 25 bp, Homo sapien
gcatggctggagaggcttcagaaaa

SEQ ID NO: 1786479 - DNA, 25 bp, Homo sapien
cataaatacagcttgtgggtgttgg

SEQ ID NO: 1786480 - DNA, 25 bp, Homo sapien
ccctaacaatgttgggaggtacata

SEQ ID NO: 1786481 - DNA, 25 bp, Homo sapien
cccactattatatgttgatgccgta

SEQ ID NO: 1786482 - DNA, 25 bp, Homo sapien
tctatagtgagccaataaagtgaca

SEQ ID NO: 1786483 - DNA, 25 bp, Homo sapien
agtcttgacaagttcaaaatctgca

SEQ ID NO: 1786484 - DNA, 25 bp, Homo sapien
gagtcttgacaagttcaaaatctgc

SEQ ID NO: 1786485 - DNA, 25 bp, Homo sapien
atcaagccaattgtccaggaccagc

SEQ ID NO: 1786486 - DNA, 25 bp, Homo sapien
acatcaagccaattgtccaggacca

SEQ ID NO: 1786487 - DNA, 25 bp, Homo sapien
caagccaattgtccaggaccagcat

SEQ ID NO: 1786488 - DNA, 25 bp, Homo sapien
ctgacatcaagccaattgtccagga

SEQ ID NO: 1786489 - DNA, 25 bp, Homo sapien
ctgaccagaggaactgagagactat

SEQ ID NO: 1786490 - DNA, 25 bp, Homo sapien
gaccagaggaactgagagactatca

SEQ ID NO: 1786491 - DNA, 25 bp, Homo sapien
ggctgagacccatgggaaaggcctg

SEQ ID NO: 1786492 - DNA, 25 bp, Homo sapien
gcactgaccagaggaactgagagac

SEQ ID NO: 1786493 - DNA, 25 bp, Homo sapien
cctgcctgtccattcccctagaccc

SEQ ID NO: 1786494 - DNA, 25 bp, Homo sapien
ctgcctgtccattcccctagaccca

SEQ ID NO: 1786495 - DNA, 25 bp, Homo sapien
tgcctgtccattcccctagacccac

SEQ ID NO: 1786496 - DNA, 25 bp, Homo sapien
tctgaaagctggcacagttatcaca

SEQ ID NO: 1786497 - DNA, 25 bp, Homo sapien
acagtctaccttctttctcaactgg

SEQ ID NO: 1786498 - DNA, 25 bp, Homo sapien
gcagattgtataaaaggcatttcac

SEQ ID NO: 1786499 - DNA, 25 bp, Homo sapien
tcaactggttaaggcagatattctc

SEQ ID NO: 1786500 - DNA, 25 bp, Homo sapien
ccctttattccatgagtgctcaata

SEQ ID NO: 1786501 - DNA, 25 bp, Homo sapien
aaaaaccctttattccatgagtgct

SEQ ID NO: 1786502 - DNA, 25 bp, Homo sapien
ctgatagctgactatgggattggag

SEQ ID NO: 1786503 - DNA, 25 bp, Homo sapien
aaaccctttattccatgagtgctca

SEQ ID NO: 1786504 - DNA, 25 bp, Homo sapien
tgaggagaccatgcaatgtcatcag

SEQ ID NO: 1786505 - DNA, 25 bp, Homo sapien
gtaagcttcccatctagacaaggtt

SEQ ID NO: 1786506 - DNA, 25 bp, Homo sapien
cagtgatctgtactccacggcatag

SEQ ID NO: 1786507 - DNA, 25 bp, Homo sapien
cctaggcactcttgagttgggaagc

SEQ ID NO: 1786508 - DNA, 25 bp, Homo sapien
caacttggcaaggtgttaggagcaa

SEQ ID NO: 1786509 - DNA, 25 bp, Homo sapien
tctctggagtataaattgcacagtc

SEQ ID NO: 1786510 - DNA, 25 bp, Homo sapien
ttgaactctgactgggtcttagcat

SEQ ID NO: 1786511 - DNA, 25 bp, Homo sapien
tcactggctgtgacatatactaagc

SEQ ID NO: 1786512 - DNA, 25 bp, Homo sapien
gactaccggcgtgagtcatcacacc

SEQ ID NO: 1786513 - DNA, 25 bp, Homo sapien
aggactaccggcgtgagtcatcaca

SEQ ID NO: 1786514 - DNA, 25 bp, Homo sapien
tgttgaccaggttatactgacattt

SEQ ID NO: 1786515 - DNA, 25 bp, Homo sapien
tatgttgaccaggttatactgacat

SEQ ID NO: 1786516 - DNA, 25 bp, Homo sapien
cctccaccagaggggtcattaaaga

SEQ ID NO: 1786517 - DNA, 25 bp, Homo sapien
ctccaccagaggggtcattaaagac

SEQ ID NO: 1786518 - DNA, 25 bp, Homo sapien
cagtactcatatatgcgtgcaggga

SEQ ID NO: 1786519 - DNA, 25 bp, Homo sapien
cagcagtattattccagagtcctcc

SEQ ID NO: 1786520 - DNA, 25 bp, Homo sapien
cagggagaatactgggtatagccca

SEQ ID NO: 1786521 - DNA, 25 bp, Homo sapien
acagaaccaaatatgagcccagcag

SEQ ID NO: 1786522 - DNA, 25 bp, Homo sapien
ctctctctgtggtatcactctcctg

SEQ ID NO: 1786523 - DNA, 25 bp, Homo sapien
tcaacctagggaatctgctggaatc

SEQ ID NO: 1786524 - DNA, 25 bp, Homo sapien
cactgtccagaaaaccattgtttca

SEQ ID NO: 1786525 - DNA, 25 bp, Homo sapien
cagcatgataaatccattcttgttt

SEQ ID NO: 1786526 - DNA, 25 bp, Homo sapien
aaggattgctttcagtattcaggct

SEQ ID NO: 1786527 - DNA, 25 bp, Homo sapien
ctaaggattgctttcagtattcagg

SEQ ID NO: 1786528 - DNA, 25 bp, Homo sapien
taaggattgctttcagtattcaggc

SEQ ID NO: 1786529 - DNA, 25 bp, Homo sapien
gctaaggattgctttcagtattcag

SEQ ID NO: 1786530 - DNA, 25 bp, Homo sapien
tccctgcgaagcacatgacctgatt

SEQ ID NO: 1786531 - DNA, 25 bp, Homo sapien
gcccattatccaatagttattcttc

SEQ ID NO: 1786532 - DNA, 25 bp, Homo sapien
tgcgaagcacatgacctgattcctt

SEQ ID NO: 1786533 - DNA, 25 bp, Homo sapien
atgtccctgcgaagcacatgacctg

SEQ ID NO: 1786534 - DNA, 25 bp, Homo sapien
tcatcatctccacagctaccaccta

SEQ ID NO: 1786535 - DNA, 25 bp, Homo sapien
gcatctagactctgaccacttttca

SEQ ID NO: 1786536 - DNA, 25 bp, Homo sapien
gctaccacctagtccctgacataat

SEQ ID NO: 1786537 - DNA, 25 bp, Homo sapien
acatctaatccaccagccaatcaag

SEQ ID NO: 1786538 - DNA, 25 bp, Homo sapien
actgaatcacataagaatgaaagat

SEQ ID NO: 1786539 - DNA, 25 bp, Homo sapien
gaatcacataagaatgaaagatgaa

SEQ ID NO: 1786540 - DNA, 25 bp, Homo sapien
gatgaagtaaagttttgatacggtg

SEQ ID NO: 1786541 - DNA, 25 bp, Homo sapien
agttttgatacggtgtacttcaagg

SEQ ID NO: 1786542 - DNA, 25 bp, Homo sapien
tcttgggtgaaggtctaatctggca

SEQ ID NO: 1786543 - DNA, 25 bp, Homo sapien
tgcgggctgtaattgaaactcaact

SEQ ID NO: 1786544 - DNA, 25 bp, Homo sapien
gaatgttgtactccaggcctgtgaa

SEQ ID NO: 1786545 - DNA, 25 bp, Homo sapien
cacatggtgtttccctgtgcggaca

SEQ ID NO: 1786546 - DNA, 25 bp, Homo sapien
cttggcagggagcaaactcaacctt

SEQ ID NO: 1786547 - DNA, 25 bp, Homo sapien
tgcacaaatactgtccaccaaaggg

SEQ ID NO: 1786548 - DNA, 25 bp, Homo sapien
gctctgctccgaaaccacaaagtgg

SEQ ID NO: 1786549 - DNA, 25 bp, Homo sapien
tatggctcacaacagagcagagtca

SEQ ID NO: 1786550 - DNA, 25 bp, Homo sapien
aatttatactcattacgtgccaggc

SEQ ID NO: 1786551 - DNA, 25 bp, Homo sapien
gtagataaagcacctaatttaggct

SEQ ID NO: 1786552 - DNA, 25 bp, Homo sapien
gctttgcatgtgtacccttcctgaa

SEQ ID NO: 1786553 - DNA, 25 bp, Homo sapien
gagatacacctggtaacatgaggga

SEQ ID NO: 1786554 - DNA, 25 bp, Homo sapien
agcttcaaagggcaaactcccaaga

SEQ ID NO: 1786555 - DNA, 25 bp, Homo sapien
gggcaaactcccaagatgtgtacct

SEQ ID NO: 1786556 - DNA, 25 bp, Homo sapien
aactcccaagatgtgtaccttccag

SEQ ID NO: 1786557 - DNA, 25 bp, Homo sapien
caagatgtgtaccttccagcagctt

SEQ ID NO: 1786558 - DNA, 25 bp, Homo sapien
cacacagttctgattactgaccctt

SEQ ID NO: 1786559 - DNA, 25 bp, Homo sapien
tgctcaaatttccttagaaatcgtt

SEQ ID NO: 1786560 - DNA, 25 bp, Homo sapien
gttctgattactgacccttccagtg

SEQ ID NO: 1786561 - DNA, 25 bp, Homo sapien
attaacatttactgcatcatgtccc

SEQ ID NO: 1786562 - DNA, 25 bp, Homo sapien
gccgcaattgttagagtagtcccag

SEQ ID NO: 1786563 - DNA, 25 bp, Homo sapien
caatgcaagctatcctgtcaggtgg

SEQ ID NO: 1786564 - DNA, 25 bp, Homo sapien
catcttcgaagagtaaaggtcccca

SEQ ID NO: 1786565 - DNA, 25 bp, Homo sapien
tatgtgacctgagctgaataagcca

SEQ ID NO: 1786566 - DNA, 25 bp, Homo sapien
tttgggaaaccttgcagtcacacga

SEQ ID NO: 1786567 - DNA, 25 bp, Homo sapien
tagcaagtaaacagtggagcccagg

SEQ ID NO: 1786568 - DNA, 25 bp, Homo sapien
gaagggccttcagtatctttagcac

SEQ ID NO: 1786569 - DNA, 25 bp, Homo sapien
catagatctcagttttggaagggcc

SEQ ID NO: 1786570 - DNA, 25 bp, Homo sapien
ttggctggaaaagggtattcacaca

SEQ ID NO: 1786571 - DNA, 25 bp, Homo sapien
cacagccaaagagagttatatatgc

SEQ ID NO: 1786572 - DNA, 25 bp, Homo sapien
caggaaagactttatggtgttaagt

SEQ ID NO: 1786573 - DNA, 25 bp, Homo sapien
tcactcgggccctacagagtcagga

SEQ ID NO: 1786574 - DNA, 25 bp, Homo sapien
gatgttatctcacctgacaggattg

SEQ ID NO: 1786575 - DNA, 25 bp, Homo sapien
tcatcaatggatggacacttacatt

SEQ ID NO: 1786576 - DNA, 25 bp, Homo sapien
cagaaatagaactgctggattgtgt

SEQ ID NO: 1786577 - DNA, 25 bp, Homo sapien
cagttagcatggtgtctttcaggta

SEQ ID NO: 1786578 - DNA, 25 bp, Homo sapien
tagtagcaaatgtgggctttaagga

SEQ ID NO: 1786579 - DNA, 25 bp, Homo sapien
tataatgtgatatccagactggatc

SEQ ID NO: 1786580 - DNA, 25 bp, Homo sapien
agaatgagaattagagaatgatggg

SEQ ID NO: 1786581 - DNA, 25 bp, Homo sapien
tgtaattggatttactgcttttaag

SEQ ID NO: 1786582 - DNA, 25 bp, Homo sapien
caactgccaaacatgagcatgaggc

SEQ ID NO: 1786583 - DNA, 25 bp, Homo sapien
caaatcacctgtagaatcttgggaa

SEQ ID NO: 1786584 - DNA, 25 bp, Homo sapien
aagtgctacagcaatgaccctccca

SEQ ID NO: 1786585 - DNA, 25 bp, Homo sapien
tgcagaccagatagcctaccaactg

SEQ ID NO: 1786586 - DNA, 25 bp, Homo sapien
tacaacactgaataggatactactc

SEQ ID NO: 1786587 - DNA, 25 bp, Homo sapien
ctggcattgggagtacaacactgaa

SEQ ID NO: 1786588 - DNA, 25 bp, Homo sapien
tgaataggatactactcctgcccat

SEQ ID NO: 1786589 - DNA, 25 bp, Homo sapien
tggcattgggagtacaacactgaat

SEQ ID NO: 1786590 - DNA, 25 bp, Homo sapien
tcagaaccactctttgacattgtac

SEQ ID NO: 1786591 - DNA, 25 bp, Homo sapien
taattacattcgaattcagaaccac

SEQ ID NO: 1786592 - DNA, 25 bp, Homo sapien
ctctttgacattgtacagtttgact

SEQ ID NO: 1786593 - DNA, 25 bp, Homo sapien
ctttggagccagattaattacattc

SEQ ID NO: 1786594 - DNA, 25 bp, Homo sapien
cctgcggtgtttgtctcgagcgtcc

SEQ ID NO: 1786595 - DNA, 25 bp, Homo sapien
gggagtccgtcgtcacgctccttgg

SEQ ID NO: 1786596 - DNA, 25 bp, Homo sapien
cgatcccggactagcgaacttcgga

SEQ ID NO: 1786597 - DNA, 25 bp, Homo sapien
aacacactaggatccgggagtccgt

SEQ ID NO: 1786598 - DNA, 25 bp, Homo sapien
aggctcggagaaccagcttgggtag

SEQ ID NO: 1786599 - DNA, 25 bp, Homo sapien
tcaagaggctcggagaaccagcttg

SEQ ID NO: 1786600 - DNA, 25 bp, Homo sapien
ctcggagaaccagcttgggtaggcg

SEQ ID NO: 1786601 - DNA, 25 bp, Homo sapien
caagaggctcggagaaccagcttgg

SEQ ID NO: 1786602 - DNA, 25 bp, Homo sapien
aatgcgtgcccgtgatctgctgggt

SEQ ID NO: 1786603 - DNA, 25 bp, Homo sapien
tgttcggtgggtggcgaatgcgtgc

SEQ ID NO: 1786604 - DNA, 25 bp, Homo sapien
tggcgaatgcgtgcccgtgatctgc

SEQ ID NO: 1786605 - DNA, 25 bp, Homo sapien
tgggtggcgaatgcgtgcccgtgat

SEQ ID NO: 1786606 - DNA, 25 bp, Homo sapien
catctaataggtggatgaactcagt

SEQ ID NO: 1786607 - DNA, 25 bp, Homo sapien
tcattctgatttgcggaatgtcatt

SEQ ID NO: 1786608 - DNA, 25 bp, Homo sapien
gcggaatgtcattagatcactagca

SEQ ID NO: 1786609 - DNA, 25 bp, Homo sapien
tcaggggtgaacaggtgtctcacag

SEQ ID NO: 1786610 - DNA, 25 bp, Homo sapien
gaacatatcatgttcagagtaaata

SEQ ID NO: 1786611 - DNA, 25 bp, Homo sapien
tatcatgttcagagtaaatatgtcc

SEQ ID NO: 1786612 - DNA, 25 bp, Homo sapien
gaagctgaacatatcatgttcagag

SEQ ID NO: 1786613 - DNA, 25 bp, Homo sapien
aatgaagctgaacatatcatgttca

SEQ ID NO: 1786614 - DNA, 25 bp, Homo sapien
tcaatgcaatcagaatcatttttac

SEQ ID NO: 1786615 - DNA, 25 bp, Homo sapien
cactcaatgcaatcagaatcatttt

SEQ ID NO: 1786616 - DNA, 25 bp, Homo sapien
tcactcaatgcaatcagaatcattt

SEQ ID NO: 1786617 - DNA, 25 bp, Homo sapien
ctcaatgcaatcagaatcattttta

SEQ ID NO: 1786618 - DNA, 25 bp, Homo sapien
gaaactggtctagattggtattttg

SEQ ID NO: 1786619 - DNA, 25 bp, Homo sapien
tattacatgtccttgaaatgtgcac

SEQ ID NO: 1786620 - DNA, 25 bp, Homo sapien
tatagccagcagtcactttagaaat

SEQ ID NO: 1786621 - DNA, 25 bp, Homo sapien
aatgactttaatataccaggttaca

SEQ ID NO: 1786622 - DNA, 25 bp, Homo sapien
taatgactatgaataagtgggcagg

SEQ ID NO: 1786623 - DNA, 25 bp, Homo sapien
tgtcagagcctcatcttggaactgg

SEQ ID NO: 1786624 - DNA, 25 bp, Homo sapien
gccccaactgctggtgggtcttgga

SEQ ID NO: 1786625 - DNA, 25 bp, Homo sapien
tctcagtgagccctaaagaacgacg

SEQ ID NO: 1786626 - DNA, 25 bp, Homo sapien
ctacgcattcctccactccctccat

SEQ ID NO: 1786627 - DNA, 25 bp, Homo sapien
gacatacctgagtacctgagtcggg

SEQ ID NO: 1786628 - DNA, 25 bp, Homo sapien
tcggcttgcagacgcctcagctcta

SEQ ID NO: 1786629 - DNA, 25 bp, Homo sapien
gctctaatccagacggtgcaaggat

SEQ ID NO: 1786630 - DNA, 25 bp, Homo sapien
tctgtttggaggacatggacttgag

SEQ ID NO: 1786631 - DNA, 25 bp, Homo sapien
tttctcaaggtgagagtcgacgaaa

SEQ ID NO: 1786632 - DNA, 25 bp, Homo sapien
tccttttctcaaggtgagagtcgac

SEQ ID NO: 1786633 - DNA, 25 bp, Homo sapien
ggacagaggcgccaaatctcagccg

SEQ ID NO: 1786634 - DNA, 25 bp, Homo sapien
ctcaaggtgagagtcgacgaaaagg

SEQ ID NO: 1786635 - DNA, 25 bp, Homo sapien
caccttgcaccgcttgtgcaggtat

SEQ ID NO: 1786636 - DNA, 25 bp, Homo sapien
tcatcaccttgcaccgcttgtgcag

SEQ ID NO: 1786637 - DNA, 25 bp, Homo sapien
caccgcttgtgcaggtatatatcca

SEQ ID NO: 1786638 - DNA, 25 bp, Homo sapien
cttgcaccgcttgtgcaggtatata

SEQ ID NO: 1786639 - DNA, 25 bp, Homo sapien
gttaacagttgccttgtccgtttca

SEQ ID NO: 1786640 - DNA, 25 bp, Homo sapien
tcatttcggcacatcctgatatcgg

SEQ ID NO: 1786641 - DNA, 25 bp, Homo sapien
cacatcctgatatcggctgcaggaa

SEQ ID NO: 1786642 - DNA, 25 bp, Homo sapien
gccttgtccgtttcatttcggcaca

SEQ ID NO: 1786643 - DNA, 25 bp, Homo sapien
agtggtgcccctcgccaacaatggt

SEQ ID NO: 1786644 - DNA, 25 bp, Homo sapien
taaattgatcaagagtacagtggaa

SEQ ID NO: 1786645 - DNA, 25 bp, Homo sapien
aacaatggtcgtccaaggcctttgc

SEQ ID NO: 1786646 - DNA, 25 bp, Homo sapien
ccggtagtgcatcaaggtaaattga

SEQ ID NO: 1786647 - DNA, 25 bp, Homo sapien
tttccatcatcgacctcatcgtggt

SEQ ID NO: 1786648 - DNA, 25 bp, Homo sapien
gcctcatcttcagcgtgctgtccac

SEQ ID NO: 1786649 - DNA, 25 bp, Homo sapien
cgggaaggcactgtctttgcgcctg

SEQ ID NO: 1786650 - DNA, 25 bp, Homo sapien
tgtctttgcgcctgcacatgtgtgt

SEQ ID NO: 1786651 - DNA, 25 bp, Homo sapien
ggactctcttctggatggagatcgt

SEQ ID NO: 1786652 - DNA, 25 bp, Homo sapien
gctgtccaccatcgagcagtatgcc

SEQ ID NO: 1786653 - DNA, 25 bp, Homo sapien
gcgtctacaacttcctcgagcgtcc

SEQ ID NO: 1786654 - DNA, 25 bp, Homo sapien
ttcagcgtgctgtccaccatcgagc

SEQ ID NO: 1786655 - DNA, 25 bp, Homo sapien
cctcatcgtcctggtctgcctcatc

SEQ ID NO: 1786656 - DNA, 25 bp, Homo sapien
cgtttaccacttcgccgtcttcctc

SEQ ID NO: 1786657 - DNA, 25 bp, Homo sapien
ccaccggctggaaatgcttcgttta

SEQ ID NO: 1786658 - DNA, 25 bp, Homo sapien
gacgacgctcctgccagcaacactt

SEQ ID NO: 1786659 - DNA, 25 bp, Homo sapien
gacgctcctgccagcaacactttcc

SEQ ID NO: 1786660 - DNA, 25 bp, Homo sapien
caccgagcgctgagacgacgctcct

SEQ ID NO: 1786661 - DNA, 25 bp, Homo sapien
accgagcgctgagacgacgctcctg

SEQ ID NO: 1786662 - DNA, 25 bp, Homo sapien
caaagtgtcagaagggacaaccctc

SEQ ID NO: 1786663 - DNA, 25 bp, Homo sapien
tatccaacgtgtggaacatggcctc

SEQ ID NO: 1786664 - DNA, 25 bp, Homo sapien
caggttctgcacttgaatggctaca

SEQ ID NO: 1786665 - DNA, 25 bp, Homo sapien
gaccgggtccgcgttgatcttatcc

SEQ ID NO: 1786666 - DNA, 25 bp, Homo sapien
gcaatgcctgggtgggcagtactga

SEQ ID NO: 1786667 - DNA, 25 bp, Homo sapien
ggaaatgaggataaaaggcaatgcc

SEQ ID NO: 1786668 - DNA, 25 bp, Homo sapien
cactataattgtaaggaaatgagga

SEQ ID NO: 1786669 - DNA, 25 bp, Homo sapien
cagtactgagaagggtaaactccgt

SEQ ID NO: 1786670 - DNA, 25 bp, Homo sapien
ccaaggaagtgcctgtaggccagta

SEQ ID NO: 1786671 - DNA, 25 bp, Homo sapien
tgctcagacgacagagacaaccctg

SEQ ID NO: 1786672 - DNA, 25 bp, Homo sapien
taagccctaagttgccaatatccag

SEQ ID NO: 1786673 - DNA, 25 bp, Homo sapien
agagatgaaggtcacgagaggcccc

SEQ ID NO: 1786674 - DNA, 25 bp, Homo sapien
ggaagtgcatgagaacaccaggaga

SEQ ID NO: 1786675 - DNA, 25 bp, Homo sapien
gtactgagcctacctagaacattca

SEQ ID NO: 1786676 - DNA, 25 bp, Homo sapien
gaagatgggtaaaagcaagcttcct

SEQ ID NO: 1786677 - DNA, 25 bp, Homo sapien
tacaagtaattatggccagggaagt

SEQ ID NO: 1786678 - DNA, 25 bp, Homo sapien
ttgcaaaggtgtcgctttctaacac

SEQ ID NO: 1786679 - DNA, 25 bp, Homo sapien
cttgcaaaggtgtcgctttctaaca

SEQ ID NO: 1786680 - DNA, 25 bp, Homo sapien
ccttgcaaaggtgtcgctttctaac

SEQ ID NO: 1786681 - DNA, 25 bp, Homo sapien
cagtgaaagactcattgaatttgca

SEQ ID NO: 1786682 - DNA, 25 bp, Homo sapien
ttaaaatttcaatccaagagttgat

SEQ ID NO: 1786683 - DNA, 25 bp, Homo sapien
catttaaaatttcaatccaagagtt

SEQ ID NO: 1786684 - DNA, 25 bp, Homo sapien
cactcagtgaaagactcattgaatt

SEQ ID NO: 1786685 - DNA, 25 bp, Homo sapien
acttgcactgaatgggtagtaatca

SEQ ID NO: 1786686 - DNA, 25 bp, Homo sapien
cacttgcactgaatgggtagtaatc

SEQ ID NO: 1786687 - DNA, 25 bp, Homo sapien
ctcacttgcactgaatgggtagtaa

SEQ ID NO: 1786688 - DNA, 25 bp, Homo sapien
cttgcactgaatgggtagtaatcat

SEQ ID NO: 1786689 - DNA, 25 bp, Homo sapien
tctaatgtaggcacagattcgtgac

SEQ ID NO: 1786690 - DNA, 25 bp, Homo sapien
cattctgagacgaaaagacttccag

SEQ ID NO: 1786691 - DNA, 25 bp, Homo sapien
gattcgtgactctgaatttgaggga

SEQ ID NO: 1786692 - DNA, 25 bp, Homo sapien
tcaataaccctgtgagttctcaggc

SEQ ID NO: 1786693 - DNA, 25 bp, Homo sapien
tctgactagagggataaaaagccag

SEQ ID NO: 1786694 - DNA, 25 bp, Homo sapien
ctgactagagggataaaaagccagg

SEQ ID NO: 1786695 - DNA, 25 bp, Homo sapien
ccctctctagatttgtccaaggtca

SEQ ID NO: 1786696 - DNA, 25 bp, Homo sapien
ctaccctctctagatttgtccaagg

SEQ ID NO: 1786697 - DNA, 25 bp, Homo sapien
taccctctctagatttgtccaaggt

SEQ ID NO: 1786698 - DNA, 25 bp, Homo sapien
cctctctagatttgtccaaggtcat

SEQ ID NO: 1786699 - DNA, 25 bp, Homo sapien
caaacctatagtgaagaattctgaa

SEQ ID NO: 1786700 - DNA, 25 bp, Homo sapien
ctgaaagccttccaagccccatttt

SEQ ID NO: 1786701 - DNA, 25 bp, Homo sapien
gaaagccttccaagccccattttca

SEQ ID NO: 1786702 - DNA, 25 bp, Homo sapien
taaaattatgggttgtcactggggc

SEQ ID NO: 1786703 - DNA, 25 bp, Homo sapien
tttattggtgacaatctgccagtgc

SEQ ID NO: 1786704 - DNA, 25 bp, Homo sapien
tattggtgacaatctgccagtgcat

SEQ ID NO: 1786705 - DNA, 25 bp, Homo sapien
ttattggtgacaatctgccagtgca

SEQ ID NO: 1786706 - DNA, 25 bp, Homo sapien
caccaacgaggcttggatcctctct

SEQ ID NO: 1786707 - DNA, 25 bp, Homo sapien
accaacgaggcttggatcctctctg

SEQ ID NO: 1786708 - DNA, 25 bp, Homo sapien
accccatcccacaccaacgaggctt

SEQ ID NO: 1786709 - DNA, 25 bp, Homo sapien
ccactccaccgtgggtgtgggaaat

SEQ ID NO: 1786710 - DNA, 25 bp, Homo sapien
gtgtaaggctatgtttgggcacatg

SEQ ID NO: 1786711 - DNA, 25 bp, Homo sapien
tttagctgttcccactccaccgtgg

SEQ ID NO: 1786712 - DNA, 25 bp, Homo sapien
tcagtaggaatgtgtaaggctatgt

SEQ ID NO: 1786713 - DNA, 25 bp, Homo sapien
tgccagcaacaaggctgctccagga

SEQ ID NO: 1786714 - DNA, 25 bp, Homo sapien
tcactgccagcaacaaggctgctcc

SEQ ID NO: 1786715 - DNA, 25 bp, Homo sapien
gccagcaacaaggctgctccaggac

SEQ ID NO: 1786716 - DNA, 25 bp, Homo sapien
actgccagcaacaaggctgctccag

SEQ ID NO: 1786717 - DNA, 25 bp, Homo sapien
tcctttcctcaaatatcaaggaatt

SEQ ID NO: 1786718 - DNA, 25 bp, Homo sapien
tagatcatggtgtttggaccaatga

SEQ ID NO: 1786719 - DNA, 25 bp, Homo sapien
caatgacatctactggcatcctggt

SEQ ID NO: 1786720 - DNA, 25 bp, Homo sapien
caacaataacaggaatctgcactag

SEQ ID NO: 1786721 - DNA, 25 bp, Homo sapien
tccttgcctacactagcccaaggga

SEQ ID NO: 1786722 - DNA, 25 bp, Homo sapien
tagtggagagggagctctacttcct

SEQ ID NO: 1786723 - DNA, 25 bp, Homo sapien
tacactagcccaagggaggaaagac

SEQ ID NO: 1786724 - DNA, 25 bp, Homo sapien
cggcctcctcactttcccatagtgg

SEQ ID NO: 1786725 - DNA, 25 bp, Homo sapien
gagtcagaaagcctgctagtgtcct

SEQ ID NO: 1786726 - DNA, 25 bp, Homo sapien
tccaagcacacattgagtaaaacag

SEQ ID NO: 1786727 - DNA, 25 bp, Homo sapien
gagtaaaacagatacccatactcca

SEQ ID NO: 1786728 - DNA, 25 bp, Homo sapien
agcctgctagtgtccttgatccaag

SEQ ID NO: 1786729 - DNA, 25 bp, Homo sapien
cagtaagccctctcagatgtgcatc

SEQ ID NO: 1786730 - DNA, 25 bp, Homo sapien
atgcagtaagccctctcagatgtgc

SEQ ID NO: 1786731 - DNA, 25 bp, Homo sapien
tcagatgtgcatcacagcctctgac

SEQ ID NO: 1786732 - DNA, 25 bp, Homo sapien
ctcagatgtgcatcacagcctctga

SEQ ID NO: 1786733 - DNA, 25 bp, Homo sapien
atagttatttagtgacagcaaggct

SEQ ID NO: 1786734 - DNA, 25 bp, Homo sapien
ggctttcccatctgacatggcattt

SEQ ID NO: 1786735 - DNA, 25 bp, Homo sapien
acagcaaggctttcccatctgacat

SEQ ID NO: 1786736 - DNA, 25 bp, Homo sapien
tcccatctgacatggcattttgcat

SEQ ID NO: 1786737 - DNA, 25 bp, Homo sapien
gaaagtcatgtagccaattattatc

SEQ ID NO: 1786738 - DNA, 25 bp, Homo sapien
catgtagccaattattatcagaaaa

SEQ ID NO: 1786739 - DNA, 25 bp, Homo sapien
tttgcactttctctagcttgtagag

SEQ ID NO: 1786740 - DNA, 25 bp, Homo sapien
ctagcttgtagagacctggtgttca

SEQ ID NO: 1786741 - DNA, 25 bp, Homo sapien
tttaattgccccctcatctgtgttc

SEQ ID NO: 1786742 - DNA, 25 bp, Homo sapien
gcaattttaattgccccctcatctg

SEQ ID NO: 1786743 - DNA, 25 bp, Homo sapien
tgggcaattttaattgccccctcat

SEQ ID NO: 1786744 - DNA, 25 bp, Homo sapien
cctcatctgtgttccctaagcgcat

SEQ ID NO: 1786745 - DNA, 25 bp, Homo sapien
gaactttagaactggtccaaatcac

SEQ ID NO: 1786746 - DNA, 25 bp, Homo sapien
aatcacaaagaccacagcaccctgg

SEQ ID NO: 1786747 - DNA, 25 bp, Homo sapien
tagaactggtccaaatcacaaagac

SEQ ID NO: 1786748 - DNA, 25 bp, Homo sapien
tcttgtgaactttagaactggtcca

SEQ ID NO: 1786749 - DNA, 25 bp, Homo sapien
gaattgctgtactgctgattgtatc

SEQ ID NO: 1786750 - DNA, 25 bp, Homo sapien
ctggaggcacagttgggtattggat

SEQ ID NO: 1786751 - DNA, 25 bp, Homo sapien
tgtatcatgagcttctagcctagag

SEQ ID NO: 1786752 - DNA, 25 bp, Homo sapien
tcagaattcatgaagaacaccaaga

SEQ ID NO: 1786753 - DNA, 25 bp, Homo sapien
ttgatccttgttggtataagatgcc

SEQ ID NO: 1786754 - DNA, 25 bp, Homo sapien
acaattttggtcaacgtttgatcct

SEQ ID NO: 1786755 - DNA, 25 bp, Homo sapien
ttggtataagatgcctccctaaagg

SEQ ID NO: 1786756 - DNA, 25 bp, Homo sapien
tcagtcttcattaagattaattcaa

SEQ ID NO: 1786757 - DNA, 25 bp, Homo sapien
aagcctctctcggagtttgcgcaag

SEQ ID NO: 1786758 - DNA, 25 bp, Homo sapien
tcagaatgggcgatacagaggcctt

SEQ ID NO: 1786759 - DNA, 25 bp, Homo sapien
aatgagtgagaactcgcccacgacg

SEQ ID NO: 1786760 - DNA, 25 bp, Homo sapien
tttgcgcaagagtcggtcaaagctc

SEQ ID NO: 1786761 - DNA, 25 bp, Homo sapien
gctgtcctttatccactgatatctc

SEQ ID NO: 1786762 - DNA, 25 bp, Homo sapien
gaagacataagcatcggcttgggtg

SEQ ID NO: 1786763 - DNA, 25 bp, Homo sapien
catgtttaggaggtaggaagacata

SEQ ID NO: 1786764 - DNA, 25 bp, Homo sapien
cgaataattctccagatcaagacat

SEQ ID NO: 1786765 - DNA, 25 bp, Homo sapien
taatatgcccaacagcatgaaggaa

SEQ ID NO: 1786766 - DNA, 25 bp, Homo sapien
taaagaggaaattagtaatatgccc

SEQ ID NO: 1786767 - DNA, 25 bp, Homo sapien
cagcaggactattcaaaatagttac

SEQ ID NO: 1786768 - DNA, 25 bp, Homo sapien
taggtaaatggataagcaagttgag

SEQ ID NO: 1786769 - DNA, 25 bp, Homo sapien
taagtcccacaagtgatgttaaacg

SEQ ID NO: 1786770 - DNA, 25 bp, Homo sapien
tgggacatgggcaataacaacgtaa

SEQ ID NO: 1786771 - DNA, 25 bp, Homo sapien
gaatcaaaagtcagggagaaataga

SEQ ID NO: 1786772 - DNA, 25 bp, Homo sapien
aataattgtcatagctagtaagcca

SEQ ID NO: 1786773 - DNA, 25 bp, Homo sapien
gataagtcatcaaatctcagtgagc

SEQ ID NO: 1786774 - DNA, 25 bp, Homo sapien
taggtaagtggctctggataagtca

SEQ ID NO: 1786775 - DNA, 25 bp, Homo sapien
tggtaccctacttacacaggagagt

SEQ ID NO: 1786776 - DNA, 25 bp, Homo sapien
gcgtgcagttgccacaccaggtggt

SEQ ID NO: 1786777 - DNA, 25 bp, Homo sapien
gtgtccttgactggacatggccatt

SEQ ID NO: 1786778 - DNA, 25 bp, Homo sapien
tcccccatggctgattttgagcaaa

SEQ ID NO: 1786779 - DNA, 25 bp, Homo sapien
tcaaagtgtccttgactggacatgg

SEQ ID NO: 1786780 - DNA, 25 bp, Homo sapien
caaacatcttattcccccatggctg

SEQ ID NO: 1786781 - DNA, 25 bp, Homo sapien
tctagtgaagcttccaattaacagc

SEQ ID NO: 1786782 - DNA, 25 bp, Homo sapien
ccttttggaatatgaactccatgca

SEQ ID NO: 1786783 - DNA, 25 bp, Homo sapien
tatgaactccatgcatcatctagtg

SEQ ID NO: 1786784 - DNA, 25 bp, Homo sapien
gcagccaattttcaaccttttggaa

SEQ ID NO: 1786785 - DNA, 25 bp, Homo sapien
tctttgatgtactcagtatgacttg

SEQ ID NO: 1786786 - DNA, 25 bp, Homo sapien
tgcttttatggatcttcagctgttc

SEQ ID NO: 1786787 - DNA, 25 bp, Homo sapien
tctagttgttgccagtcatctttga

SEQ ID NO: 1786788 - DNA, 25 bp, Homo sapien
ctcctctagttgttgccagtcatct

SEQ ID NO: 1786789 - DNA, 25 bp, Homo sapien
ttatgatgccatgccaagcagaaga

SEQ ID NO: 1786790 - DNA, 25 bp, Homo sapien
tatgatgccatgccaagcagaagac

SEQ ID NO: 1786791 - DNA, 25 bp, Homo sapien
tcctgagttatacaggtgtgcccaa

SEQ ID NO: 1786792 - DNA, 25 bp, Homo sapien
taagactcatatgctgccttgtgga

SEQ ID NO: 1786793 - DNA, 25 bp, Homo sapien
tattaacagtagcagagggaaacag

SEQ ID NO: 1786794 - DNA, 25 bp, Homo sapien
tgtgaggaagactcagcccaatgct

SEQ ID NO: 1786795 - DNA, 25 bp, Homo sapien
tgcccaggctgagtggaatggtgca

SEQ ID NO: 1786796 - DNA, 25 bp, Homo sapien
cccaggctgagtggaatggtgcagt

SEQ ID NO: 1786797 - DNA, 25 bp, Homo sapien
ggctgagtggaatggtgcagtctcg

SEQ ID NO: 1786798 - DNA, 25 bp, Homo sapien
caggctgagtggaatggtgcagtct

SEQ ID NO: 1786799 - DNA, 25 bp, Homo sapien
tagtaatcctctcaatctcacccat

SEQ ID NO: 1786800 - DNA, 25 bp, Homo sapien
aatctcacccatcagtagagccttc

SEQ ID NO: 1786801 - DNA, 25 bp, Homo sapien
gcagtcatacttagtaatcctctca

SEQ ID NO: 1786802 - DNA, 25 bp, Homo sapien
ggctcaagcagtcatacttagtaat

SEQ ID NO: 1786803 - DNA, 25 bp, Homo sapien
gcttggcagatgtccccacttctct

SEQ ID NO: 1786804 - DNA, 25 bp, Homo sapien
gatacaggtcctacagaaacggtcc

SEQ ID NO: 1786805 - DNA, 25 bp, Homo sapien
aacggtcctgattagctttcctagg

SEQ ID NO: 1786806 - DNA, 25 bp, Homo sapien
taggatataggaaaccatgctgacc

SEQ ID NO: 1786807 - DNA, 25 bp, Homo sapien
ttcagtagatttcatagcgagatgt

SEQ ID NO: 1786808 - DNA, 25 bp, Homo sapien
gtagatttcatagcgagatgtagcc

SEQ ID NO: 1786809 - DNA, 25 bp, Homo sapien
tttcatagcgagatgtagccccttc

SEQ ID NO: 1786810 - DNA, 25 bp, Homo sapien
cacctctctgtggtcgtctctcacc

SEQ ID NO: 1786811 - DNA, 25 bp, Homo sapien
agccacaggctcatagtgcccatta

SEQ ID NO: 1786812 - DNA, 25 bp, Homo sapien
cattagttagcagctgtgatttgta

SEQ ID NO: 1786813 - DNA, 25 bp, Homo sapien
gtgcccattagttagcagctgtgat

SEQ ID NO: 1786814 - DNA, 25 bp, Homo sapien
taaccaggggtcattgcaacaacca

SEQ ID NO: 1786815 - DNA, 25 bp, Homo sapien
agggccgtgtgttacaccttgtgga

SEQ ID NO: 1786816 - DNA, 25 bp, Homo sapien
gctgcctactgagggccgtgtgtta

SEQ ID NO: 1786817 - DNA, 25 bp, Homo sapien
tctcatgtaaacacggctgcctact

SEQ ID NO: 1786818 - DNA, 25 bp, Homo sapien
ctgtctcatgtaaacacggctgcct

SEQ ID NO: 1786819 - DNA, 25 bp, Homo sapien
cgttaatccttgctgactcctcact

SEQ ID NO: 1786820 - DNA, 25 bp, Homo sapien
agcttggtcaaacgccctgggattc

SEQ ID NO: 1786821 - DNA, 25 bp, Homo sapien
tccataattccacggtctgtagctt

SEQ ID NO: 1786822 - DNA, 25 bp, Homo sapien
tagcttgctcgttaatccttgctga

SEQ ID NO: 1786823 - DNA, 25 bp, Homo sapien
ttttagatttgtaattcctcttcat

SEQ ID NO: 1786824 - DNA, 25 bp, Homo sapien
ctctcaactggatatcactagagct

SEQ ID NO: 1786825 - DNA, 25 bp, Homo sapien
caacctctcaactggatatcactag

SEQ ID NO: 1786826 - DNA, 25 bp, Homo sapien
tggcaacctctcaactggatatcac

SEQ ID NO: 1786827 - DNA, 25 bp, Homo sapien
gccctggcaacctctcaactggata

SEQ ID NO: 1786828 - DNA, 25 bp, Homo sapien
ctgagccatagtaaaaccctcctac

SEQ ID NO: 1786829 - DNA, 25 bp, Homo sapien
aagtctctttcctgagccatagtaa

SEQ ID NO: 1786830 - DNA, 25 bp, Homo sapien
ctccaggattccctcagaggcccct

SEQ ID NO: 1786831 - DNA, 25 bp, Homo sapien
taacaagtctctttcctgagccata

SEQ ID NO: 1786832 - DNA, 25 bp, Homo sapien
tgaaatgcaggaacgtggaggatta

SEQ ID NO: 1786833 - DNA, 25 bp, Homo sapien
gattattggacaaaactgaaaagga

SEQ ID NO: 1786834 - DNA, 25 bp, Homo sapien
tggccacaggcaggaatacataccc

SEQ ID NO: 1786835 - DNA, 25 bp, Homo sapien
gcaggaatacataccctgataaaag

SEQ ID NO: 1786836 - DNA, 25 bp, Homo sapien
tatccataagggaggtatttatgtg

SEQ ID NO: 1786837 - DNA, 25 bp, Homo sapien
gaggtatttatgtgtatccataagg

SEQ ID NO: 1786838 - DNA, 25 bp, Homo sapien
tctggacacagtcttggaacactga

SEQ ID NO: 1786839 - DNA, 25 bp, Homo sapien
gtatctggacacagtcttggaacac

SEQ ID NO: 1786840 - DNA, 25 bp, Homo sapien
tgtattccacagatagaggcccaag

SEQ ID NO: 1786841 - DNA, 25 bp, Homo sapien
taagactcaggcaaatagacagaca

SEQ ID NO: 1786842 - DNA, 25 bp, Homo sapien
cattcctggatcagatgtgtgacta

SEQ ID NO: 1786843 - DNA, 25 bp, Homo sapien
gcacccctgggttttcatcacctgt

SEQ ID NO: 1786844 - DNA, 25 bp, Homo sapien
caagtgtctggagtgaatcctgctg

SEQ ID NO: 1786845 - DNA, 25 bp, Homo sapien
cactcgccaagtgtctggagtgaat

SEQ ID NO: 1786846 - DNA, 25 bp, Homo sapien
tcgccaagtgtctggagtgaatcct

SEQ ID NO: 1786847 - DNA, 25 bp, Homo sapien
ggtcactcgccaagtgtctggagtg

SEQ ID NO: 1786848 - DNA, 25 bp, Homo sapien
aaatgacctgacctctggagactgc

SEQ ID NO: 1786849 - DNA, 25 bp, Homo sapien
tggaaccgatgttgccagaactcag

SEQ ID NO: 1786850 - DNA, 25 bp, Homo sapien
gattcctcgtgttagtgtccagcct

SEQ ID NO: 1786851 - DNA, 25 bp, Homo sapien
gagactgcagctttatcgtgattcc

SEQ ID NO: 1786852 - DNA, 25 bp, Homo sapien
gcttcatctgtgtgataatcagatt

SEQ ID NO: 1786853 - DNA, 25 bp, Homo sapien
ctattgaatagttactctcagagct

SEQ ID NO: 1786854 - DNA, 25 bp, Homo sapien
gagcttcatctgtgtgataatcaga

SEQ ID NO: 1786855 - DNA, 25 bp, Homo sapien
agagcttcatctgtgtgataatcag

SEQ ID NO: 1786856 - DNA, 25 bp, Homo sapien
ctgaccctaaatcgcccatcgaaat

SEQ ID NO: 1786857 - DNA, 25 bp, Homo sapien
ttgcttgtattgcatcaaagaagaa

SEQ ID NO: 1786858 - DNA, 25 bp, Homo sapien
catttgcttgtattgcatcaaagaa

SEQ ID NO: 1786859 - DNA, 25 bp, Homo sapien
ctgaccttatgtccactgaccctaa

SEQ ID NO: 1786860 - DNA, 25 bp, Homo sapien
cctgccctattgaggatgaaggata

SEQ ID NO: 1786861 - DNA, 25 bp, Homo sapien
gataacatgcccacagtagtgtctg

SEQ ID NO: 1786862 - DNA, 25 bp, Homo sapien
ggataacatgcccacagtagtgtct

SEQ ID NO: 1786863 - DNA, 25 bp, Homo sapien
gccactggcatagcctgccctattg

SEQ ID NO: 1786864 - DNA, 25 bp, Homo sapien
gaaaaatgtatcctacattcacaat

SEQ ID NO: 1786865 - DNA, 25 bp, Homo sapien
gctggggaggcaatagaaaaatgta

SEQ ID NO: 1786866 - DNA, 25 bp, Homo sapien
tgcttgctggggaggcaatagaaaa

SEQ ID NO: 1786867 - DNA, 25 bp, Homo sapien
tcacaatctttaaggaatctatgat

SEQ ID NO: 1786868 - DNA, 25 bp, Homo sapien
caaacagcccagtatagctcataga

SEQ ID NO: 1786869 - DNA, 25 bp, Homo sapien
gagggcatgagacaagcacattcca

SEQ ID NO: 1786870 - DNA, 25 bp, Homo sapien
gactccttccctgatgatacaagaa

SEQ ID NO: 1786871 - DNA, 25 bp, Homo sapien
ccatggccgtggtgagctatagctc

SEQ ID NO: 1786872 - DNA, 25 bp, Homo sapien
tttccttatgcctcaacgactgctg

SEQ ID NO: 1786873 - DNA, 25 bp, Homo sapien
atttccttatgcctcaacgactgct

SEQ ID NO: 1786874 - DNA, 25 bp, Homo sapien
ccttatgcctcaacgactgctgagt

SEQ ID NO: 1786875 - DNA, 25 bp, Homo sapien
tatgcctcaacgactgctgagtcat

SEQ ID NO: 1786876 - DNA, 25 bp, Homo sapien
ttgatttttcagtagtgccccctga

SEQ ID NO: 1786877 - DNA, 25 bp, Homo sapien
attgatttttcagtagtgccccctg

SEQ ID NO: 1786878 - DNA, 25 bp, Homo sapien
ctaaccatgcctgactctgtctagc

SEQ ID NO: 1786879 - DNA, 25 bp, Homo sapien
taaccatgcctgactctgtctagct

SEQ ID NO: 1786880 - DNA, 25 bp, Homo sapien
ccatgcctgactctgtctagcttct

SEQ ID NO: 1786881 - DNA, 25 bp, Homo sapien
aaccatgcctgactctgtctagctt

SEQ ID NO: 1786882 - DNA, 25 bp, Homo sapien
caactagagcttggaatttagatga

SEQ ID NO: 1786883 - DNA, 25 bp, Homo sapien
cctctaccgcttcgctgtatgtatt

SEQ ID NO: 1786884 - DNA, 25 bp, Homo sapien
gaaaaacatcttcaactagagcttg

SEQ ID NO: 1786885 - DNA, 25 bp, Homo sapien
aaataggagtggtccctctaccgct

SEQ ID NO: 1786886 - DNA, 25 bp, Homo sapien
tattaaagagtatccttcagctgtt

SEQ ID NO: 1786887 - DNA, 25 bp, Homo sapien
taacttgacaagatgttgcacttaa

SEQ ID NO: 1786888 - DNA, 25 bp, Homo sapien
taggccataaggtttactacagtat

SEQ ID NO: 1786889 - DNA, 25 bp, Homo sapien
ctacagtattagcaacacatgggaa

SEQ ID NO: 1786890 - DNA, 25 bp, Homo sapien
gaggaaagcatgtggtataacctgg

SEQ ID NO: 1786891 - DNA, 25 bp, Homo sapien
gccctggcaccattgtcaagcctgg

SEQ ID NO: 1786892 - DNA, 25 bp, Homo sapien
tggtttaggacttctctctgggatc

SEQ ID NO: 1786893 - DNA, 25 bp, Homo sapien
tggtataacctggatccaaatgcct

SEQ ID NO: 1786894 - DNA, 25 bp, Homo sapien
ctgccaagcaggtttgcaagaatgg

SEQ ID NO: 1786895 - DNA, 25 bp, Homo sapien
ctactgccaagcaggtttgcaagaa

SEQ ID NO: 1786896 - DNA, 25 bp, Homo sapien
caagcaggtttgcaagaatggtatt

SEQ ID NO: 1786897 - DNA, 25 bp, Homo sapien
ggtattgtgttagatataagctcca

SEQ ID NO: 1786898 - DNA, 25 bp, Homo sapien
ctgtgaatttcaaaaaccctgcaat

SEQ ID NO: 1786899 - DNA, 25 bp, Homo sapien
gtgaatttcaaaaaccctgcaatca

SEQ ID NO: 1786900 - DNA, 25 bp, Homo sapien
tgtgaatttcaaaaaccctgcaatc

SEQ ID NO: 1786901 - DNA, 25 bp, Homo sapien
tgaatttcaaaaaccctgcaatcat

SEQ ID NO: 1786902 - DNA, 25 bp, Homo sapien
tactgtcctggacatagttttcttc

SEQ ID NO: 1786903 - DNA, 25 bp, Homo sapien
tagttttcttctaagctttcattgc

SEQ ID NO: 1786904 - DNA, 25 bp, Homo sapien
cttactgtcctggacatagttttct

SEQ ID NO: 1786905 - DNA, 25 bp, Homo sapien
ctgtcctggacatagttttcttcta

SEQ ID NO: 1786906 - DNA, 25 bp, Homo sapien
cagcagcttgctgccgtcgatgggc

SEQ ID NO: 1786907 - DNA, 25 bp, Homo sapien
cccatgtgccatggcatagatggca

SEQ ID NO: 1786908 - DNA, 25 bp, Homo sapien
ttcatggcatcgcagaggcccacgt

SEQ ID NO: 1786909 - DNA, 25 bp, Homo sapien
gatactccaatgaatgaggacttga

SEQ ID NO: 1786910 - DNA, 25 bp, Homo sapien
tttctttaggttcctgggcttgcag

SEQ ID NO: 1786911 - DNA, 25 bp, Homo sapien
tctgagaggtttctgctggccaagt

SEQ ID NO: 1786912 - DNA, 25 bp, Homo sapien
tctgctggccaagtgtaatttcttt

SEQ ID NO: 1786913 - DNA, 25 bp, Homo sapien
ctggtgctggcaaggtctgagaggt

SEQ ID NO: 1786914 - DNA, 25 bp, Homo sapien
agctctttaaccaggtgtaatattc

SEQ ID NO: 1786915 - DNA, 25 bp, Homo sapien
gctctttaaccaggtgtaatattca

SEQ ID NO: 1786916 - DNA, 25 bp, Homo sapien
tctttaaccaggtgtaatattcaaa

SEQ ID NO: 1786917 - DNA, 25 bp, Homo sapien
ctctttaaccaggtgtaatattcaa

SEQ ID NO: 1786918 - DNA, 25 bp, Homo sapien
tgtaatcatcaatgttcagcactcc

SEQ ID NO: 1786919 - DNA, 25 bp, Homo sapien
tctggccctttaagcaaggctcact

SEQ ID NO: 1786920 - DNA, 25 bp, Homo sapien
ccaggttccaacgtgcacatagtca

SEQ ID NO: 1786921 - DNA, 25 bp, Homo sapien
cacatagtcatagcgattagcttca

SEQ ID NO: 1786922 - DNA, 25 bp, Homo sapien
actgccaccaaagacatgtcagcct

SEQ ID NO: 1786923 - DNA, 25 bp, Homo sapien
cctgttctgcccaatagcccatgat

SEQ ID NO: 1786924 - DNA, 25 bp, Homo sapien
cccatgattcacagcatttctccat

SEQ ID NO: 1786925 - DNA, 25 bp, Homo sapien
tgccaccaaagacatgtcagccttg

SEQ ID NO: 1786926 - DNA, 25 bp, Homo sapien
accatcccaagtcacaagctttgca

SEQ ID NO: 1786927 - DNA, 25 bp, Homo sapien
ctcatcttgcacatattcattctct

SEQ ID NO: 1786928 - DNA, 25 bp, Homo sapien
tcattctctttgcaggccgtgcaaa

SEQ ID NO: 1786929 - DNA, 25 bp, Homo sapien
agctttgcaggtgaactcatcttgc

SEQ ID NO: 1786930 - DNA, 25 bp, Homo sapien
cattggcacggactatgcccttgct

SEQ ID NO: 1786931 - DNA, 25 bp, Homo sapien
tggtaacacccacaacacattggca

SEQ ID NO: 1786932 - DNA, 25 bp, Homo sapien
tgacatggcatcaagcaagtggtaa

SEQ ID NO: 1786933 - DNA, 25 bp, Homo sapien
catttcataactaccgctaccatgg

SEQ ID NO: 1786934 - DNA, 25 bp, Homo sapien
tgcatgcggacaacatcagaggtgg

SEQ ID NO: 1786935 - DNA, 25 bp, Homo sapien
ctcaagatagcgcacaggaatgggc

SEQ ID NO: 1786936 - DNA, 25 bp, Homo sapien
taaagcagagtagcacatcgcagag

SEQ ID NO: 1786937 - DNA, 25 bp, Homo sapien
catggtgaacgcgatatatttggcc

SEQ ID NO: 1786938 - DNA, 25 bp, Homo sapien
gaagctactttcaccatggtcagaa

SEQ ID NO: 1786939 - DNA, 25 bp, Homo sapien
tcccatgcgaaagggtaagttactg

SEQ ID NO: 1786940 - DNA, 25 bp, Homo sapien
gttactggcagaaccgaagcttccg

SEQ ID NO: 1786941 - DNA, 25 bp, Homo sapien
gaagcttccgcttctaggcaagaat

SEQ ID NO: 1786942 - DNA, 25 bp, Homo sapien
taacaaatggatcctctaacagagc

SEQ ID NO: 1786943 - DNA, 25 bp, Homo sapien
tgtgaactcatgagcattggcatgg

SEQ ID NO: 1786944 - DNA, 25 bp, Homo sapien
cctgtgggttgagggaattcagtca

SEQ ID NO: 1786945 - DNA, 25 bp, Homo sapien
tagactcaccatgcgtgctcacgaa

SEQ ID NO: 1786946 - DNA, 25 bp, Homo sapien
gagatctgtggccatttccaatgtt

SEQ ID NO: 1786947 - DNA, 25 bp, Homo sapien
tctgtggccatttccaatgttttct

SEQ ID NO: 1786948 - DNA, 25 bp, Homo sapien
ccatttccaatgttttcttgggtga

SEQ ID NO: 1786949 - DNA, 25 bp, Homo sapien
tcttgggtgactgcttttctctgct

SEQ ID NO: 1786950 - DNA, 25 bp, Homo sapien
caatcctaaatgcagggcttatttt

SEQ ID NO: 1786951 - DNA, 25 bp, Homo sapien
catgtgccgacggacattggctggt

SEQ ID NO: 1786952 - DNA, 25 bp, Homo sapien
tggctggtgggcgagaattctggct

SEQ ID NO: 1786953 - DNA, 25 bp, Homo sapien
agctgcacatgtgccgacggacatt

SEQ ID NO: 1786954 - DNA, 25 bp, Homo sapien
ctggtgggcgagaattctggctgcc

SEQ ID NO: 1786955 - DNA, 25 bp, Homo sapien
ctggagttctcataattcaccctga

SEQ ID NO: 1786956 - DNA, 25 bp, Homo sapien
ggagttctcataattcaccctgaga

SEQ ID NO: 1786957 - DNA, 25 bp, Homo sapien
tggagttctcataattcaccctgag

SEQ ID NO: 1786958 - DNA, 25 bp, Homo sapien
ctgtggtccatagataatctgaaag

SEQ ID NO: 1786959 - DNA, 25 bp, Homo sapien
tgtggtccatagataatctgaaagg

SEQ ID NO: 1786960 - DNA, 25 bp, Homo sapien
ggttcagaccatgacacagacttgc

SEQ ID NO: 1786961 - DNA, 25 bp, Homo sapien
agaggcggtgccacatatgctgtcc

SEQ ID NO: 1786962 - DNA, 25 bp, Homo sapien
taccaggcgggctaaagcgaatcgg

SEQ ID NO: 1786963 - DNA, 25 bp, Homo sapien
tggttgcaggccgtctcattggtct

SEQ ID NO: 1786964 - DNA, 25 bp, Homo sapien
aggcggagtggtcgccgcgcttggc

SEQ ID NO: 1786965 - DNA, 25 bp, Homo sapien
gtcgccgcgcttggcacgcgcctgt

SEQ ID NO: 1786966 - DNA, 25 bp, Homo sapien
acggcagaggcggagtggtcgccgc

SEQ ID NO: 1786967 - DNA, 25 bp, Homo sapien
aggggggtctcctctgcggtcaggt

SEQ ID NO: 1786968 - DNA, 25 bp, Homo sapien
ggagctggtccatcagcgatttctg

SEQ ID NO: 1786969 - DNA, 25 bp, Homo sapien
caccgcgtgaaaatccgggatcgcg

SEQ ID NO: 1786970 - DNA, 25 bp, Homo sapien
gggcctgccagcaccgcgtgaaaat

SEQ ID NO: 1786971 - DNA, 25 bp, Homo sapien
ccgggatcgcggtactgaagttgct

SEQ ID NO: 1786972 - DNA, 25 bp, Homo sapien
atctgcaggtgctgcggaggtggcg

SEQ ID NO: 1786973 - DNA, 25 bp, Homo sapien
tcgtcgtcgtccgcgggcggggaga

SEQ ID NO: 1786974 - DNA, 25 bp, Homo sapien
tctgcaggtgctgcggaggtggcgg

SEQ ID NO: 1786975 - DNA, 25 bp, Homo sapien
agagctttgcttgtagtcccgcaga

SEQ ID NO: 1786976 - DNA, 25 bp, Homo sapien
gtgcagagcaccgactcggacacgg

SEQ ID NO: 1786977 - DNA, 25 bp, Homo sapien
aggcgtcagcgcaggcgaatcatcc

SEQ ID NO: 1786978 - DNA, 25 bp, Homo sapien
cagaatgacagaggcgtaggatacg

SEQ ID NO: 1786979 - DNA, 25 bp, Homo sapien
gtaattcaagaatccgaatcctggc

SEQ ID NO: 1786980 - DNA, 25 bp, Homo sapien
cccagagaaggcttcgagtaattca

SEQ ID NO: 1786981 - DNA, 25 bp, Homo sapien
gcacaattgtgcaaaagaggacatt

SEQ ID NO: 1786982 - DNA, 25 bp, Homo sapien
tgcttttctatgtggacccttcccc

SEQ ID NO: 1786983 - DNA, 25 bp, Homo sapien
tccgaatgccatcaggtgaactcat

SEQ ID NO: 1786984 - DNA, 25 bp, Homo sapien
catgatccgactggcatgtccacgt

SEQ ID NO: 1786985 - DNA, 25 bp, Homo sapien
cagctcactccgaatgccatcaggt

SEQ ID NO: 1786986 - DNA, 25 bp, Homo sapien
ggtgaactcatgatccgactggcat

SEQ ID NO: 1786987 - DNA, 25 bp, Homo sapien
tcccatcatccgtttgggatgggtc

SEQ ID NO: 1786988 - DNA, 25 bp, Homo sapien
atgaggagtctgtcagcccagcggg

SEQ ID NO: 1786989 - DNA, 25 bp, Homo sapien
catcatcccatcatccgtttgggat

SEQ ID NO: 1786990 - DNA, 25 bp, Homo sapien
catcatccgtttgggatgggtctgg

SEQ ID NO: 1786991 - DNA, 25 bp, Homo sapien
tctcaaagctggcactggatgggtt

SEQ ID NO: 1786992 - DNA, 25 bp, Homo sapien
tgtagcacgcctgatgaagcacttt

SEQ ID NO: 1786993 - DNA, 25 bp, Homo sapien
taaataaagggaatctgcagagcag

SEQ ID NO: 1786994 - DNA, 25 bp, Homo sapien
ttgcagtggatgaagagagacccct

SEQ ID NO: 1786995 - DNA, 25 bp, Homo sapien
tacatcaaggtgaagagtttcggcc

SEQ ID NO: 1786996 - DNA, 25 bp, Homo sapien
tattcaaaccgtcaaagagcttctg

SEQ ID NO: 1786997 - DNA, 25 bp, Homo sapien
gaaggtcaatggaaagcccgcttgg

SEQ ID NO: 1786998 - DNA, 25 bp, Homo sapien
gatcgcacatatacaaggacacagg

SEQ ID NO: 1786999 - DNA, 25 bp, Homo sapien
ctggctgggctcaatggactctgca

SEQ ID NO: 1787000 - DNA, 25 bp, Homo sapien
aggacgctgtcttccatacccagca

SEQ ID NO: 1787001 - DNA, 25 bp, Homo sapien
tctggctgggctcaatggactctgc

SEQ ID NO: 1787002 - DNA, 25 bp, Homo sapien
cttcagaggacgctgtcttccatac

SEQ ID NO: 1787003 - DNA, 25 bp, Homo sapien
ctccaactcttggtaactggttttg

SEQ ID NO: 1787004 - DNA, 25 bp, Homo sapien
ctctccctcatatttctccaactct

SEQ ID NO: 1787005 - DNA, 25 bp, Homo sapien
cagcccaacccatcagtggtggctt

SEQ ID NO: 1787006 - DNA, 25 bp, Homo sapien
cacagcaactgcaggtagttggccc

SEQ ID NO: 1787007 - DNA, 25 bp, Homo sapien
tcccagtgtctaaggctctctgcct

SEQ ID NO: 1787008 - DNA, 25 bp, Homo sapien
cagcattctggtttagcaatgtggt

SEQ ID NO: 1787009 - DNA, 25 bp, Homo sapien
ctggatttgggcctgagttctgttc

SEQ ID NO: 1787010 - DNA, 25 bp, Homo sapien
ggatttgggcctgagttctgttctc

SEQ ID NO: 1787011 - DNA, 25 bp, Homo sapien
tccattctggatttgggcctgagtt

SEQ ID NO: 1787012 - DNA, 25 bp, Homo sapien
cattctggatttgggcctgagttct

SEQ ID NO: 1787013 - DNA, 25 bp, Homo sapien
ggaaggctctgaatagcaccagagc

SEQ ID NO: 1787014 - DNA, 25 bp, Homo sapien
agggaaggctctgaatagcaccaga

SEQ ID NO: 1787015 - DNA, 25 bp, Homo sapien
ggctctgaatagcaccagagctggc

SEQ ID NO: 1787016 - DNA, 25 bp, Homo sapien
ctggccactctcacctttgtgttcc

SEQ ID NO: 1787017 - DNA, 25 bp, Homo sapien
ttctatctctacctctctgaaaaca

SEQ ID NO: 1787018 - DNA, 25 bp, Homo sapien
tttttgtcttatccagctccctttg

SEQ ID NO: 1787019 - DNA, 25 bp, Homo sapien
tccgagcagcttattctggcatctg

SEQ ID NO: 1787020 - DNA, 25 bp, Homo sapien
ctgagctgcccttctttctatctct

SEQ ID NO: 1787021 - DNA, 25 bp, Homo sapien
cagtgttctgtataggacaggaaag

SEQ ID NO: 1787022 - DNA, 25 bp, Homo sapien
gtgttctgtataggacaggaaagac

SEQ ID NO: 1787023 - DNA, 25 bp, Homo sapien
tgtattcagtgttctgtataggaca

SEQ ID NO: 1787024 - DNA, 25 bp, Homo sapien
tattcagtgttctgtataggacagg

SEQ ID NO: 1787025 - DNA, 25 bp, Homo sapien
ttctgaagggcaaagtcactggagc

SEQ ID NO: 1787026 - DNA, 25 bp, Homo sapien
tgggctttcccattgagacaaactg

SEQ ID NO: 1787027 - DNA, 25 bp, Homo sapien
catctaaatgattcccctgtttcca

SEQ ID NO: 1787028 - DNA, 25 bp, Homo sapien
ccagcattagcctctatggcagcca

SEQ ID NO: 1787029 - DNA, 25 bp, Homo sapien
actcttcttcagaggatgaccacca

SEQ ID NO: 1787030 - DNA, 25 bp, Homo sapien
tcagaggatgaccaccagtctgcat

SEQ ID NO: 1787031 - DNA, 25 bp, Homo sapien
tcttcttcagaggatgaccaccagt

SEQ ID NO: 1787032 - DNA, 25 bp, Homo sapien
tcttcagaggatgaccaccagtctg

SEQ ID NO: 1787033 - DNA, 25 bp, Homo sapien
tctgacactgagtggctatgaggga

SEQ ID NO: 1787034 - DNA, 25 bp, Homo sapien
aatccgcattctgacactgagtggc

SEQ ID NO: 1787035 - DNA, 25 bp, Homo sapien
acacaatccgcattctgacactgag

SEQ ID NO: 1787036 - DNA, 25 bp, Homo sapien
aagataaacacacaatccgcattct

SEQ ID NO: 1787037 - DNA, 25 bp, Homo sapien
gctttgcgagaagagtaccttactc

SEQ ID NO: 1787038 - DNA, 25 bp, Homo sapien
ttaatgctttgcgagaagagtacct

SEQ ID NO: 1787039 - DNA, 25 bp, Homo sapien
ctgatttaatgctttgcgagaagag

SEQ ID NO: 1787040 - DNA, 25 bp, Homo sapien
atgctttgcgagaagagtaccttac

SEQ ID NO: 1787041 - DNA, 25 bp, Homo sapien
cctgtttgtacttataattgtactg

SEQ ID NO: 1787042 - DNA, 25 bp, Homo sapien
caaagcttaactcttcacatagtgc

SEQ ID NO: 1787043 - DNA, 25 bp, Homo sapien
tagtgcttcccgaacctgtttgtac

SEQ ID NO: 1787044 - DNA, 25 bp, Homo sapien
tcttcacatagtgcttcccgaacct

SEQ ID NO: 1787045 - DNA, 25 bp, Homo sapien
ggaggtcatcttgggttgcatggaa

SEQ ID NO: 1787046 - DNA, 25 bp, Homo sapien
aggtcatcttgggttgcatggaaaa

SEQ ID NO: 1787047 - DNA, 25 bp, Homo sapien
ggtcatcttgggttgcatggaaaat

SEQ ID NO: 1787048 - DNA, 25 bp, Homo sapien
gaggtcatcttgggttgcatggaaa

SEQ ID NO: 1787049 - DNA, 25 bp, Homo sapien
cagatacagctgtgcttgtagccag

SEQ ID NO: 1787050 - DNA, 25 bp, Homo sapien
gtgcttgtagccagactccaaacct

SEQ ID NO: 1787051 - DNA, 25 bp, Homo sapien
tacagctgtgcttgtagccagactc

SEQ ID NO: 1787052 - DNA, 25 bp, Homo sapien
gatacagctgtgcttgtagccagac

SEQ ID NO: 1787053 - DNA, 25 bp, Homo sapien
ggaccccacatgtatttccagcagg

SEQ ID NO: 1787054 - DNA, 25 bp, Homo sapien
gatgcaaagggacagccttttccca

SEQ ID NO: 1787055 - DNA, 25 bp, Homo sapien
agcagggagagggtgttctcatcac

SEQ ID NO: 1787056 - DNA, 25 bp, Homo sapien
aatctgggtgtccatggtagcatcc

SEQ ID NO: 1787057 - DNA, 25 bp, Homo sapien
ttattgcaggtaagattcttcaata

SEQ ID NO: 1787058 - DNA, 25 bp, Homo sapien
caatactcataagcttctgcacctc

SEQ ID NO: 1787059 - DNA, 25 bp, Homo sapien
tgcaggtaagattcttcaatactca

SEQ ID NO: 1787060 - DNA, 25 bp, Homo sapien
aatactcataagcttctgcacctca

SEQ ID NO: 1787061 - DNA, 25 bp, Homo sapien
tcaggtttgtcaaagcctttgacaa

SEQ ID NO: 1787062 - DNA, 25 bp, Homo sapien
catgattgtgtatttggaaaacccc

SEQ ID NO: 1787063 - DNA, 25 bp, Homo sapien
caggtttgtcaaagcctttgacaaa

SEQ ID NO: 1787064 - DNA, 25 bp, Homo sapien
attgtgtatttggaaaaccccatcg

SEQ ID NO: 1787065 - DNA, 25 bp, Homo sapien
gctctgcaaagattggctagagtca

SEQ ID NO: 1787066 - DNA, 25 bp, Homo sapien
ctctgcaaagattggctagagtcag

SEQ ID NO: 1787067 - DNA, 25 bp, Homo sapien
tgacgccgcctgaccggtcacagga

SEQ ID NO: 1787068 - DNA, 25 bp, Homo sapien
aggaggcgccgaggtcgctgagccc

SEQ ID NO: 1787069 - DNA, 25 bp, Homo sapien
tgtcgggcgcgcctcgactccgagt

SEQ ID NO: 1787070 - DNA, 25 bp, Homo sapien
cctggagcctttatgggccccggag

SEQ ID NO: 1787071 - DNA, 25 bp, Homo sapien
ggcgctggggcggcggccgccccca

SEQ ID NO: 1787072 - DNA, 25 bp, Homo sapien
ctcgggcgctggggcggcggccgcc

SEQ ID NO: 1787073 - DNA, 25 bp, Homo sapien
tcgggcgctggggcggcggccgccc

SEQ ID NO: 1787074 - DNA, 25 bp, Homo sapien
gctggggcggcggccgcccccaggc

SEQ ID NO: 1787075 - DNA, 25 bp, Homo sapien
gagaagagctggtggacgtagcgct

SEQ ID NO: 1787076 - DNA, 25 bp, Homo sapien
accccgatggtggcccggtagtgct

SEQ ID NO: 1787077 - DNA, 25 bp, Homo sapien
cccagttgaggaccttgagggcgaa

SEQ ID NO: 1787078 - DNA, 25 bp, Homo sapien
ctgcaggcgcaccagagtcctgctg

SEQ ID NO: 1787079 - DNA, 25 bp, Homo sapien
gggctctggagtgggaaactcgcgg

SEQ ID NO: 1787080 - DNA, 25 bp, Homo sapien
aaggtacccaggcagacgagttcag

SEQ ID NO: 1787081 - DNA, 25 bp, Homo sapien
aggcagacgagttcaggcagaaaag

SEQ ID NO: 1787082 - DNA, 25 bp, Homo sapien
agtgggaaactcgcggccgcgctta

SEQ ID NO: 1787083 - DNA, 25 bp, Homo sapien
ctcccttcaggagagcgagctctgg

SEQ ID NO: 1787084 - DNA, 25 bp, Homo sapien
gagtccagccgaccgcgtccatcgc

SEQ ID NO: 1787085 - DNA, 25 bp, Homo sapien
catctcgcccttggattgggcctct

SEQ ID NO: 1787086 - DNA, 25 bp, Homo sapien
gtccatcgcatctcgcccttggatt

SEQ ID NO: 1787087 - DNA, 25 bp, Homo sapien
gtcactaactaggagtgcagcttcg

SEQ ID NO: 1787088 - DNA, 25 bp, Homo sapien
tgcagcttcgggttaagtcacccaa

SEQ ID NO: 1787089 - DNA, 25 bp, Homo sapien
tcggcttccgatgagagcaaagtat

SEQ ID NO: 1787090 - DNA, 25 bp, Homo sapien
tcttcacggagtgtctgtcctcggc

SEQ ID NO: 1787091 - DNA, 25 bp, Homo sapien
gccttgacctctcctagggtcaagt

SEQ ID NO: 1787092 - DNA, 25 bp, Homo sapien
catgcgatcctccagtctaggcctt

SEQ ID NO: 1787093 - DNA, 25 bp, Homo sapien
tcatctttaaaacgcccactcccaa

SEQ ID NO: 1787094 - DNA, 25 bp, Homo sapien
tctatgaactttccaatagttaaca

SEQ ID NO: 1787095 - DNA, 25 bp, Homo sapien
cagctatgctgcagattcctggaga

SEQ ID NO: 1787096 - DNA, 25 bp, Homo sapien
tgtgcaacggcaggaagtgtttcga

SEQ ID NO: 1787097 - DNA, 25 bp, Homo sapien
gaccgtcacatggtaaggcaacctt

SEQ ID NO: 1787098 - DNA, 25 bp, Homo sapien
aggtcaatcacccttgtaagcaagg

SEQ ID NO: 1787099 - DNA, 25 bp, Homo sapien
tgcagcaaggcaatcaggatccaca

SEQ ID NO: 1787100 - DNA, 25 bp, Homo sapien
catgaaggctaaagtatactagacc

SEQ ID NO: 1787101 - DNA, 25 bp, Homo sapien
ctttggcccaaaggagagttactca

SEQ ID NO: 1787102 - DNA, 25 bp, Homo sapien
aatcactcagtcaatacatgaaggc

SEQ ID NO: 1787103 - DNA, 25 bp, Homo sapien
acagcttccttgtagtatactcggg

SEQ ID NO: 1787104 - DNA, 25 bp, Homo sapien
ggctactgtccttgttctggtcaca

SEQ ID NO: 1787105 - DNA, 25 bp, Homo sapien
gaggtttcaaaccatccggcaaagc

SEQ ID NO: 1787106 - DNA, 25 bp, Homo sapien
gcagaattggtccacctgggaagga

SEQ ID NO: 1787107 - DNA, 25 bp, Homo sapien
gaacacgtctggtttactgctaagg

SEQ ID NO: 1787108 - DNA, 25 bp, Homo sapien
tagagcaaatcacccaataggcata

SEQ ID NO: 1787109 - DNA, 25 bp, Homo sapien
gagtgtccagaagaacacgcctgta

SEQ ID NO: 1787110 - DNA, 25 bp, Homo sapien
tagcttaggagtgtacatttctgcc

SEQ ID NO: 1787111 - DNA, 25 bp, Homo sapien
tctgctctcaaggtctcttgatcta

SEQ ID NO: 1787112 - DNA, 25 bp, Homo sapien
tctcaaggtctcttgatctagctta

SEQ ID NO: 1787113 - DNA, 25 bp, Homo sapien
caaggtctcttgatctagcttaatt

SEQ ID NO: 1787114 - DNA, 25 bp, Homo sapien
gtccacatcgttttcttcattagga

SEQ ID NO: 1787115 - DNA, 25 bp, Homo sapien
gttaagttacagagccactagcagg

SEQ ID NO: 1787116 - DNA, 25 bp, Homo sapien
tcttcagagctgaggcacacacaag

SEQ ID NO: 1787117 - DNA, 25 bp, Homo sapien
gggaagactcccagctaacatgaca

SEQ ID NO: 1787118 - DNA, 25 bp, Homo sapien
cattttcaaataagtgcaggcgccc

SEQ ID NO: 1787119 - DNA, 25 bp, Homo sapien
cacttaggccctcagttatgaacat

SEQ ID NO: 1787120 - DNA, 25 bp, Homo sapien
gccttcgtggctaatagaatctaaa

SEQ ID NO: 1787121 - DNA, 25 bp, Homo sapien
aaaagcgaggatgcaataaggtggc

SEQ ID NO: 1787122 - DNA, 25 bp, Homo sapien
gacccttagataaaaccacacatga

SEQ ID NO: 1787123 - DNA, 25 bp, Homo sapien
gagattctcccgctttgacctacca

SEQ ID NO: 1787124 - DNA, 25 bp, Homo sapien
caaatttggtcaaggtctcattttg

SEQ ID NO: 1787125 - DNA, 25 bp, Homo sapien
gtgttgggattagatcttgccaagc

SEQ ID NO: 1787126 - DNA, 25 bp, Homo sapien
gttgggattagatcttgccaagcct

SEQ ID NO: 1787127 - DNA, 25 bp, Homo sapien
tttcagaaactacttaggataagct

SEQ ID NO: 1787128 - DNA, 25 bp, Homo sapien
ggcaatgaaagtgtaatattcctga

SEQ ID NO: 1787129 - DNA, 25 bp, Homo sapien
cagaaaatctggtgctatgtagata

SEQ ID NO: 1787130 - DNA, 25 bp, Homo sapien
tctaacatttgaggttaagcaccat

SEQ ID NO: 1787131 - DNA, 25 bp, Homo sapien
gagcataaactgaaatcccacatcc

SEQ ID NO: 1787132 - DNA, 25 bp, Homo sapien
tgcagagggacgcaagagcataaac

SEQ ID NO: 1787133 - DNA, 25 bp, Homo sapien
gacgcaagagcataaactgaaatcc

SEQ ID NO: 1787134 - DNA, 25 bp, Homo sapien
catccccgtggaggaacttggagtt

SEQ ID NO: 1787135 - DNA, 25 bp, Homo sapien
tggaggccatggcagaagccgatct

SEQ ID NO: 1787136 - DNA, 25 bp, Homo sapien
tgcgccgagttgatacgatgcacct

SEQ ID NO: 1787137 - DNA, 25 bp, Homo sapien
gatttatccgatccgtgcgccgagt

SEQ ID NO: 1787138 - DNA, 25 bp, Homo sapien
ctctgagcaaagagcctgcgggcgc

SEQ ID NO: 1787139 - DNA, 25 bp, Homo sapien
catcaggaggaccaagaatcacgca

SEQ ID NO: 1787140 - DNA, 25 bp, Homo sapien
gttcctcactatcatcaggaggacc

SEQ ID NO: 1787141 - DNA, 25 bp, Homo sapien
cagtgcacactcacatcgcttttaa

SEQ ID NO: 1787142 - DNA, 25 bp, Homo sapien
gaccaagaatcacgcattctcccat

SEQ ID NO: 1787143 - DNA, 25 bp, Homo sapien
aacattctgtgagatacttctctct

SEQ ID NO: 1787144 - DNA, 25 bp, Homo sapien
ttgtattccagcttcgggttcataa

SEQ ID NO: 1787145 - DNA, 25 bp, Homo sapien
gcagtttggctagcactatgttatg

SEQ ID NO: 1787146 - DNA, 25 bp, Homo sapien
tccagcttcgggttcataaacattc

SEQ ID NO: 1787147 - DNA, 25 bp, Homo sapien
tgcatcccacttttctgaatttatg

SEQ ID NO: 1787148 - DNA, 25 bp, Homo sapien
agattgtacattactgccaaaagga

SEQ ID NO: 1787149 - DNA, 25 bp, Homo sapien
tcttttgttcagtagaaccagattg

SEQ ID NO: 1787150 - DNA, 25 bp, Homo sapien
ttgcctgcatcccacttttctgaat

SEQ ID NO: 1787151 - DNA, 25 bp, Homo sapien
ggtgatgccacacctcttcatctgt

SEQ ID NO: 1787152 - DNA, 25 bp, Homo sapien
catgtaaacctcagattcccgttga

SEQ ID NO: 1787153 - DNA, 25 bp, Homo sapien
gaattcctacatcctgttcaagaag

SEQ ID NO: 1787154 - DNA, 25 bp, Homo sapien
tagccatgtaaacctcagattcccg

SEQ ID NO: 1787155 - DNA, 25 bp, Homo sapien
aggacaatcctgagcacatgattag

SEQ ID NO: 1787156 - DNA, 25 bp, Homo sapien
aattacggacctcttcacgaatttg

SEQ ID NO: 1787157 - DNA, 25 bp, Homo sapien
aaaatatcttgtggacgtttccagg

SEQ ID NO: 1787158 - DNA, 25 bp, Homo sapien
caaggatggtggtaactcaatcttt

SEQ ID NO: 1787159 - DNA, 25 bp, Homo sapien
aggatggtggtaactcaatctttcc

SEQ ID NO: 1787160 - DNA, 25 bp, Homo sapien
tttcaaggatggtggtaactcaatc

SEQ ID NO: 1787161 - DNA, 25 bp, Homo sapien
aataagtcaaacgtgatttcatttt

SEQ ID NO: 1787162 - DNA, 25 bp, Homo sapien
gctgaaaataagtcaaacgtgattt

SEQ ID NO: 1787163 - DNA, 25 bp, Homo sapien
gaaaataagtcaaacgtgatttcat

SEQ ID NO: 1787164 - DNA, 25 bp, Homo sapien
ctgaaaataagtcaaacgtgatttc

SEQ ID NO: 1787165 - DNA, 25 bp, Homo sapien
cagagagtatatgtgttcccagggc

SEQ ID NO: 1787166 - DNA, 25 bp, Homo sapien
gctcaaaattcctccattgaagatc

SEQ ID NO: 1787167 - DNA, 25 bp, Homo sapien
cacactgcatagatttcactgataa

SEQ ID NO: 1787168 - DNA, 25 bp, Homo sapien
tttccatagctattgaacaaaggca

SEQ ID NO: 1787169 - DNA, 25 bp, Homo sapien
ccaccatgccaggacaagtatattt

SEQ ID NO: 1787170 - DNA, 25 bp, Homo sapien
tgagtttttatgcacacgaaaatgg

SEQ ID NO: 1787171 - DNA, 25 bp, Homo sapien
gtttttatgcacacgaaaatggact

SEQ ID NO: 1787172 - DNA, 25 bp, Homo sapien
ctcatgagtttttatgcacacgaaa

SEQ ID NO: 1787173 - DNA, 25 bp, Homo sapien
ttagacaaaagcattggccacagtt

SEQ ID NO: 1787174 - DNA, 25 bp, Homo sapien
caatatttgccagcttgataatagc

SEQ ID NO: 1787175 - DNA, 25 bp, Homo sapien
ttcataagttgtagctggaagcaat

SEQ ID NO: 1787176 - DNA, 25 bp, Homo sapien
tatttgccagcttgataatagcttt

SEQ ID NO: 1787177 - DNA, 25 bp, Homo sapien
tttattcatgtgagtgatagtgtca

SEQ ID NO: 1787178 - DNA, 25 bp, Homo sapien
ttttttattcatgtgagtgatagtg

SEQ ID NO: 1787179 - DNA, 25 bp, Homo sapien
tattcatgtgagtgatagtgtcatt

SEQ ID NO: 1787180 - DNA, 25 bp, Homo sapien
tcatgtgagtgatagtgtcattaca

SEQ ID NO: 1787181 - DNA, 25 bp, Homo sapien
tctggtaaccatcctgtgagcgcat

SEQ ID NO: 1787182 - DNA, 25 bp, Homo sapien
gcgcatgaataaccgtgaactcccc

SEQ ID NO: 1787183 - DNA, 25 bp, Homo sapien
accatcctgtgagcgcatgaataac

SEQ ID NO: 1787184 - DNA, 25 bp, Homo sapien
tgtgagcgcatgaataaccgtgaac

SEQ ID NO: 1787185 - DNA, 25 bp, Homo sapien
ttgctttcagagctggcctcatctg

SEQ ID NO: 1787186 - DNA, 25 bp, Homo sapien
gctttcagagctggcctcatctgac

SEQ ID NO: 1787187 - DNA, 25 bp, Homo sapien
taaactcaggcaatatttctttcag

SEQ ID NO: 1787188 - DNA, 25 bp, Homo sapien
attttgctttcagagctggcctcat

SEQ ID NO: 1787189 - DNA, 25 bp, Homo sapien
tggaactttgtcgcttttctcagga

SEQ ID NO: 1787190 - DNA, 25 bp, Homo sapien
ttggaactttgtcgcttttctcagg

SEQ ID NO: 1787191 - DNA, 25 bp, Homo sapien
ctttggaactttgtcgcttttctca

SEQ ID NO: 1787192 - DNA, 25 bp, Homo sapien
tttggaactttgtcgcttttctcag

SEQ ID NO: 1787193 - DNA, 25 bp, Homo sapien
aatctgatagggactgcacagagta

SEQ ID NO: 1787194 - DNA, 25 bp, Homo sapien
actgcacagagtactgcacttctga

SEQ ID NO: 1787195 - DNA, 25 bp, Homo sapien
gagtactgcacttctgatgagggtc

SEQ ID NO: 1787196 - DNA, 25 bp, Homo sapien
gagggtcttgaaccatgaagtgaga

SEQ ID NO: 1787197 - DNA, 25 bp, Homo sapien
taaatgtcgcatatacgaccatatg

SEQ ID NO: 1787198 - DNA, 25 bp, Homo sapien
catatacgaccatatgagaggtctg

SEQ ID NO: 1787199 - DNA, 25 bp, Homo sapien
agaggtgtaaatgtcgcatatacga

SEQ ID NO: 1787200 - DNA, 25 bp, Homo sapien
tgagaggtctgtattgcagaagaac

SEQ ID NO: 1787201 - DNA, 25 bp, Homo sapien
ttttgacgaatgagtttccagggag

SEQ ID NO: 1787202 - DNA, 25 bp, Homo sapien
cacaggatggctacagatgtgggaa

SEQ ID NO: 1787203 - DNA, 25 bp, Homo sapien
gacaagacctacttctagtcaccag

SEQ ID NO: 1787204 - DNA, 25 bp, Homo sapien
ctctaagtttctcagcagaatctgc

SEQ ID NO: 1787205 - DNA, 25 bp, Homo sapien
tgaaatctcaaggaaccgttcaggc

SEQ ID NO: 1787206 - DNA, 25 bp, Homo sapien
gaaatctcaaggaaccgttcaggct

SEQ ID NO: 1787207 - DNA, 25 bp, Homo sapien
gtaaatggagtcattctataattca

SEQ ID NO: 1787208 - DNA, 25 bp, Homo sapien
aaatctcaaggaaccgttcaggctt

SEQ ID NO: 1787209 - DNA, 25 bp, Homo sapien
tttgttatttgactcaagtctgtct

SEQ ID NO: 1787210 - DNA, 25 bp, Homo sapien
tcagatcctggaggtattcctttct

SEQ ID NO: 1787211 - DNA, 25 bp, Homo sapien
cagtttcactgacggaaggtaaatc

SEQ ID NO: 1787212 - DNA, 25 bp, Homo sapien
cttaattaaggagcgcacaaaatgc

SEQ ID NO: 1787213 - DNA, 25 bp, Homo sapien
tccaagtataacttgtgaagcagta

SEQ ID NO: 1787214 - DNA, 25 bp, Homo sapien
ccaagtataacttgtgaagcagtat

SEQ ID NO: 1787215 - DNA, 25 bp, Homo sapien
ttccaagtataacttgtgaagcagt

SEQ ID NO: 1787216 - DNA, 25 bp, Homo sapien
cacccaatccaaagtctgtttgttc

SEQ ID NO: 1787217 - DNA, 25 bp, Homo sapien
catcacccaatccaaagtctgtttg

SEQ ID NO: 1787218 - DNA, 25 bp, Homo sapien
tctctttccaagtttaatccatcac

SEQ ID NO: 1787219 - DNA, 25 bp, Homo sapien
tgtggtctggctgactatctctctt

SEQ ID NO: 1787220 - DNA, 25 bp, Homo sapien
tcttcaaaatctaaccatatttctt

SEQ ID NO: 1787221 - DNA, 25 bp, Homo sapien
tctttagaaacactattatttgttg

SEQ ID NO: 1787222 - DNA, 25 bp, Homo sapien
tattatttgttgttggaagttcttc

SEQ ID NO: 1787223 - DNA, 25 bp, Homo sapien
tgttgttggaagttcttcctgtgac

SEQ ID NO: 1787224 - DNA, 25 bp, Homo sapien
gaacttggcttgtggaaaatatata

SEQ ID NO: 1787225 - DNA, 25 bp, Homo sapien
gcaatatgaacttggcttgtggaaa

SEQ ID NO: 1787226 - DNA, 25 bp, Homo sapien
tgaaagttaaggcaatatgaacttg

SEQ ID NO: 1787227 - DNA, 25 bp, Homo sapien
ttttgaaagttaaggcaatatgaac

SEQ ID NO: 1787228 - DNA, 25 bp, Homo sapien
tactgctcatggaggtgtgggatta

SEQ ID NO: 1787229 - DNA, 25 bp, Homo sapien
tgctcatggaggtgtgggattatca

SEQ ID NO: 1787230 - DNA, 25 bp, Homo sapien
ctccaactctgcgtactgctcatgg

SEQ ID NO: 1787231 - DNA, 25 bp, Homo sapien
tctgcgtactgctcatggaggtgtg

SEQ ID NO: 1787232 - DNA, 25 bp, Homo sapien
cccagcgtaccaatgcagaaaagca

SEQ ID NO: 1787233 - DNA, 25 bp, Homo sapien
ccagtagttcaataggttttagact

SEQ ID NO: 1787234 - DNA, 25 bp, Homo sapien
ggttttagactatctacaaatagat

SEQ ID NO: 1787235 - DNA, 25 bp, Homo sapien
agtaggacactcgttcttctgagaa

SEQ ID NO: 1787236 - DNA, 25 bp, Homo sapien
tccaagaaaacgtttcagctgtgag

SEQ ID NO: 1787237 - DNA, 25 bp, Homo sapien
caagaaaacgtttcagctgtgagaa

SEQ ID NO: 1787238 - DNA, 25 bp, Homo sapien
tttccaagaaaacgtttcagctgtg

SEQ ID NO: 1787239 - DNA, 25 bp, Homo sapien
atttccaagaaaacgtttcagctgt

SEQ ID NO: 1787240 - DNA, 25 bp, Homo sapien
ggcagacgaaccactgtagccttgg

SEQ ID NO: 1787241 - DNA, 25 bp, Homo sapien
acaggcagacgaaccactgtagcct

SEQ ID NO: 1787242 - DNA, 25 bp, Homo sapien
ccaacaggcagacgaaccactgtag

SEQ ID NO: 1787243 - DNA, 25 bp, Homo sapien
cagacgaaccactgtagccttggta

SEQ ID NO: 1787244 - DNA, 25 bp, Homo sapien
accaggttgtcgtatcgtgagagca

SEQ ID NO: 1787245 - DNA, 25 bp, Homo sapien
tgcactctataagaaccctacggga

SEQ ID NO: 1787246 - DNA, 25 bp, Homo sapien
ggctaaataccaaacttctctgcag

SEQ ID NO: 1787247 - DNA, 25 bp, Homo sapien
tgccggatgataaccgagtgcttcc

SEQ ID NO: 1787248 - DNA, 25 bp, Homo sapien
agtacaacgtgttcatccccaatga

SEQ ID NO: 1787249 - DNA, 25 bp, Homo sapien
tgcagatgtgtatggagtgtcctac

SEQ ID NO: 1787250 - DNA, 25 bp, Homo sapien
tggttcaaagttgggcagtacaacg

SEQ ID NO: 1787251 - DNA, 25 bp, Homo sapien
tgcgttgaagagtagcatgtgtctc

SEQ ID NO: 1787252 - DNA, 25 bp, Homo sapien
acagggtagtgagctgtttgcagat

SEQ ID NO: 1787253 - DNA, 25 bp, Homo sapien
caaagctgcagagagtttaccctta

SEQ ID NO: 1787254 - DNA, 25 bp, Homo sapien
gctttcataatcaacagagactgtt

SEQ ID NO: 1787255 - DNA, 25 bp, Homo sapien
gactgttccgtaaatcggcagctct

SEQ ID NO: 1787256 - DNA, 25 bp, Homo sapien
actcctgcttcagctatgagtttgc

SEQ ID NO: 1787257 - DNA, 25 bp, Homo sapien
ccagcatccaagaggttatagaaaa

SEQ ID NO: 1787258 - DNA, 25 bp, Homo sapien
agctatgagtttgctttctgtgtcc

SEQ ID NO: 1787259 - DNA, 25 bp, Homo sapien
gtgtccttggtacctcggccagcat

SEQ ID NO: 1787260 - DNA, 25 bp, Homo sapien
tgagtaactccaagtccaaaaccat

SEQ ID NO: 1787261 - DNA, 25 bp, Homo sapien
tccaaaaccatagcccggaatgcaa

SEQ ID NO: 1787262 - DNA, 25 bp, Homo sapien
tcattaaacgccataaggaaagatg

SEQ ID NO: 1787263 - DNA, 25 bp, Homo sapien
ggaggaattgagtaactccaagtcc

SEQ ID NO: 1787264 - DNA, 25 bp, Homo sapien
aactaggaattccttgattaaatat

SEQ ID NO: 1787265 - DNA, 25 bp, Homo sapien
ttaaatatatacaattcatgggtac

SEQ ID NO: 1787266 - DNA, 25 bp, Homo sapien
aggaattccttgattaaatatatac

SEQ ID NO: 1787267 - DNA, 25 bp, Homo sapien
ctaggaattccttgattaaatatat

SEQ ID NO: 1787268 - DNA, 25 bp, Homo sapien
caatatttaacgtccagccattcca

SEQ ID NO: 1787269 - DNA, 25 bp, Homo sapien
cataagcaatctaacgtaagttcct

SEQ ID NO: 1787270 - DNA, 25 bp, Homo sapien
ctggtattctggctttcataagcaa

SEQ ID NO: 1787271 - DNA, 25 bp, Homo sapien
tactctttatcacttgtgggcatac

SEQ ID NO: 1787272 - DNA, 25 bp, Homo sapien
ttttataaatgtttggacaatcata

SEQ ID NO: 1787273 - DNA, 25 bp, Homo sapien
cattttataaatgtttggacaatca

SEQ ID NO: 1787274 - DNA, 25 bp, Homo sapien
tttataaatgtttggacaatcatac

SEQ ID NO: 1787275 - DNA, 25 bp, Homo sapien
tcattttataaatgtttggacaatc

SEQ ID NO: 1787276 - DNA, 25 bp, Homo sapien
ctgcaacactgatattttcttttgt

SEQ ID NO: 1787277 - DNA, 25 bp, Homo sapien
tgcaacactgatattttcttttgtg

SEQ ID NO: 1787278 - DNA, 25 bp, Homo sapien
gcaacactgatattttcttttgtgt

SEQ ID NO: 1787279 - DNA, 25 bp, Homo sapien
aatacagcccaaactttttgaagag

SEQ ID NO: 1787280 - DNA, 25 bp, Homo sapien
atacagcccaaactttttgaagagt

SEQ ID NO: 1787281 - DNA, 25 bp, Homo sapien
ccaatacagcccaaactttttgaag

SEQ ID NO: 1787282 - DNA, 25 bp, Homo sapien
ttccaatacagcccaaactttttga

SEQ ID NO: 1787283 - DNA, 25 bp, Homo sapien
gaaactgcatactgttctaaattca

SEQ ID NO: 1787284 - DNA, 25 bp, Homo sapien
gagagaaactgcatactgttctaaa

SEQ ID NO: 1787285 - DNA, 25 bp, Homo sapien
taagagagaaactgcatactgttct

SEQ ID NO: 1787286 - DNA, 25 bp, Homo sapien
cttaagagagaaactgcatactgtt

SEQ ID NO: 1787287 - DNA, 25 bp, Homo sapien
aatctgcaaaagcaatcttagtttc

SEQ ID NO: 1787288 - DNA, 25 bp, Homo sapien
cttcatcttgatagcatggataaga

SEQ ID NO: 1787289 - DNA, 25 bp, Homo sapien
gataagtcacagtataatctgcaaa

SEQ ID NO: 1787290 - DNA, 25 bp, Homo sapien
ggataagattccaaagacttgcact

SEQ ID NO: 1787291 - DNA, 25 bp, Homo sapien
taacaatgtgtaggatacagattgg

SEQ ID NO: 1787292 - DNA, 25 bp, Homo sapien
tgtgtaggatacagattggaagtgt

SEQ ID NO: 1787293 - DNA, 25 bp, Homo sapien
tattaacaatgtgtaggatacagat

SEQ ID NO: 1787294 - DNA, 25 bp, Homo sapien
caatgtgtaggatacagattggaag

SEQ ID NO: 1787295 - DNA, 25 bp, Homo sapien
ttttggaacacctttggcacttgct

SEQ ID NO: 1787296 - DNA, 25 bp, Homo sapien
ggaacacctttggcacttgctccat

SEQ ID NO: 1787297 - DNA, 25 bp, Homo sapien
ttggaacacctttggcacttgctcc

SEQ ID NO: 1787298 - DNA, 25 bp, Homo sapien
tttggaacacctttggcacttgctc

SEQ ID NO: 1787299 - DNA, 25 bp, Homo sapien
aatgcttccgccacaaaagtgtatc

SEQ ID NO: 1787300 - DNA, 25 bp, Homo sapien
gaagaaccgatgagacgcagtttcc

SEQ ID NO: 1787301 - DNA, 25 bp, Homo sapien
cagtttccatcgtgaggctgctaca

SEQ ID NO: 1787302 - DNA, 25 bp, Homo sapien
caaaggaattgcatggagagtctcg

SEQ ID NO: 1787303 - DNA, 25 bp, Homo sapien
ctgtattgtagcaggttgtggtgtt

SEQ ID NO: 1787304 - DNA, 25 bp, Homo sapien
gcaggttgtggtgttagaactttaa

SEQ ID NO: 1787305 - DNA, 25 bp, Homo sapien
tattgtagcaggttgtggtgttaga

SEQ ID NO: 1787306 - DNA, 25 bp, Homo sapien
tgtagcaggttgtggtgttagaact

SEQ ID NO: 1787307 - DNA, 25 bp, Homo sapien
atgcatctggtttggatgtgcgtac

SEQ ID NO: 1787308 - DNA, 25 bp, Homo sapien
ctgggagctcaaacctttctcactc

SEQ ID NO: 1787309 - DNA, 25 bp, Homo sapien
tgggagctcaaacctttctcactct

SEQ ID NO: 1787310 - DNA, 25 bp, Homo sapien
gggagctcaaacctttctcactctt

SEQ ID NO: 1787311 - DNA, 25 bp, Homo sapien
gacatgcaaatgctatacttgtaat

SEQ ID NO: 1787312 - DNA, 25 bp, Homo sapien
ggctcatataataggaaagtaaatt

SEQ ID NO: 1787313 - DNA, 25 bp, Homo sapien
atcctgttcataaaggtacacttac

SEQ ID NO: 1787314 - DNA, 25 bp, Homo sapien
gattttcggagcctaatttgacatg

SEQ ID NO: 1787315 - DNA, 25 bp, Homo sapien
tagtgggtgtactggtagtttcctc

SEQ ID NO: 1787316 - DNA, 25 bp, Homo sapien
ttgcacttacagctctacccttggg

SEQ ID NO: 1787317 - DNA, 25 bp, Homo sapien
tgctctttcttggatgcagagtgaa

SEQ ID NO: 1787318 - DNA, 25 bp, Homo sapien
gggtagaccaatgtcttgtattgca

SEQ ID NO: 1787319 - DNA, 25 bp, Homo sapien
gaggccaactgttatacaacaccga

SEQ ID NO: 1787320 - DNA, 25 bp, Homo sapien
ggctttcagtgagaggccaactgtt

SEQ ID NO: 1787321 - DNA, 25 bp, Homo sapien
gaacaaatgtcagctggctttcagt

SEQ ID NO: 1787322 - DNA, 25 bp, Homo sapien
caccgaacactgtataatatacttg

SEQ ID NO: 1787323 - DNA, 25 bp, Homo sapien
ttgacatctcccactagtgctagag

SEQ ID NO: 1787324 - DNA, 25 bp, Homo sapien
gctagagatgcaatgatgagaccga

SEQ ID NO: 1787325 - DNA, 25 bp, Homo sapien
tgcccaatgagagaggaacctcaga

SEQ ID NO: 1787326 - DNA, 25 bp, Homo sapien
tgagaccgaggaagaacacatccct

SEQ ID NO: 1787327 - DNA, 25 bp, Homo sapien
gtcactggtgtggcatgttcatgca

SEQ ID NO: 1787328 - DNA, 25 bp, Homo sapien
aggtcactggtgtggcatgttcatg

SEQ ID NO: 1787329 - DNA, 25 bp, Homo sapien
ggtcactggtgtggcatgttcatgc

SEQ ID NO: 1787330 - DNA, 25 bp, Homo sapien
tcactggtgtggcatgttcatgcat

SEQ ID NO: 1787331 - DNA, 25 bp, Homo sapien
ctaagttaattaactcctcgtgtct

SEQ ID NO: 1787332 - DNA, 25 bp, Homo sapien
taactcctcgtgtctttcaccataa

SEQ ID NO: 1787333 - DNA, 25 bp, Homo sapien
aattaactcctcgtgtctttcacca

SEQ ID NO: 1787334 - DNA, 25 bp, Homo sapien
gttaattaactcctcgtgtctttca

SEQ ID NO: 1787335 - DNA, 25 bp, Homo sapien
tttttgtccctcactaatagtgtgg

SEQ ID NO: 1787336 - DNA, 25 bp, Homo sapien
atttttgtccctcactaatagtgtg

SEQ ID NO: 1787337 - DNA, 25 bp, Homo sapien
gatttttgtccctcactaatagtgt

SEQ ID NO: 1787338 - DNA, 25 bp, Homo sapien
tcttgttgagggtgaacagtggata

SEQ ID NO: 1787339 - DNA, 25 bp, Homo sapien
ctcaaaatccagtagggtttatttg

SEQ ID NO: 1787340 - DNA, 25 bp, Homo sapien
atttgggtcttcttgttgagggtga

SEQ ID NO: 1787341 - DNA, 25 bp, Homo sapien
tcttcttgttgagggtgaacagtgg

SEQ ID NO: 1787342 - DNA, 25 bp, Homo sapien
catggctcggatttcatctgccctt

SEQ ID NO: 1787343 - DNA, 25 bp, Homo sapien
tctgattcattgtgttcagtgacca

SEQ ID NO: 1787344 - DNA, 25 bp, Homo sapien
aattctgattcattgtgttcagtga

SEQ ID NO: 1787345 - DNA, 25 bp, Homo sapien
caaataattctgattcattgtgttc

SEQ ID NO: 1787346 - DNA, 25 bp, Homo sapien
ttaatgaacccgctaaggtaatgca

SEQ ID NO: 1787347 - DNA, 25 bp, Homo sapien
gatataggcggactctcagcatcag

SEQ ID NO: 1787348 - DNA, 25 bp, Homo sapien
ggtaatgcaaacgagcctgagaagc

SEQ ID NO: 1787349 - DNA, 25 bp, Homo sapien
agtttggctttcagatataggcgga

SEQ ID NO: 1787350 - DNA, 25 bp, Homo sapien
gttttccttccgtgtgctctgctcg

SEQ ID NO: 1787351 - DNA, 25 bp, Homo sapien
ttggttcttttacgccacgtgcagc

SEQ ID NO: 1787352 - DNA, 25 bp, Homo sapien
ctttcgctactcgtggattttgcca

SEQ ID NO: 1787353 - DNA, 25 bp, Homo sapien
gattttgccacatccctcaagcctt

SEQ ID NO: 1787354 - DNA, 25 bp, Homo sapien
ggagatcgtgtacgaggtcctgttt

SEQ ID NO: 1787355 - DNA, 25 bp, Homo sapien
taaattctagtgcttttcgaataag

SEQ ID NO: 1787356 - DNA, 25 bp, Homo sapien
tcgaataagtcgtggagatgtttcc

SEQ ID NO: 1787357 - DNA, 25 bp, Homo sapien
ccaaaattgttggagatcgtgtacg

SEQ ID NO: 1787358 - DNA, 25 bp, Homo sapien
cattgcctgctgctgattcaattca

SEQ ID NO: 1787359 - DNA, 25 bp, Homo sapien
tttcgaatgctaaggactctggtcc

SEQ ID NO: 1787360 - DNA, 25 bp, Homo sapien
ggtcctatgctgtcgaaactgatga

SEQ ID NO: 1787361 - DNA, 25 bp, Homo sapien
aacttcaaccgctcttcttggtcaa

SEQ ID NO: 1787362 - DNA, 25 bp, Homo sapien
agacaggacttaccactaggaacca

SEQ ID NO: 1787363 - DNA, 25 bp, Homo sapien
caggacttaccactaggaaccacca

SEQ ID NO: 1787364 - DNA, 25 bp, Homo sapien
gacaggacttaccactaggaaccac

SEQ ID NO: 1787365 - DNA, 25 bp, Homo sapien
ttgaggatagaagatcttggcgttg

SEQ ID NO: 1787366 - DNA, 25 bp, Homo sapien
tgttgaggatagaagatcttggcgt

SEQ ID NO: 1787367 - DNA, 25 bp, Homo sapien
tatttgttgaggatagaagatcttg

SEQ ID NO: 1787368 - DNA, 25 bp, Homo sapien
tttgttgaggatagaagatcttggc

SEQ ID NO: 1787369 - DNA, 25 bp, Homo sapien
gaacatatttggttaactccagtga

SEQ ID NO: 1787370 - DNA, 25 bp, Homo sapien
catgaggcgccggtacttaagagat

SEQ ID NO: 1787371 - DNA, 25 bp, Homo sapien
tgcaggccaccagactgaaaaatta

SEQ ID NO: 1787372 - DNA, 25 bp, Homo sapien
tatggcatcggaaactcacaatgtt

SEQ ID NO: 1787373 - DNA, 25 bp, Homo sapien
taaatgcacatgcagggtaagtgcc

SEQ ID NO: 1787374 - DNA, 25 bp, Homo sapien
gaacatgccttgctgttagtggaaa

SEQ ID NO: 1787375 - DNA, 25 bp, Homo sapien
taagactaggcacggttacacaaat

SEQ ID NO: 1787376 - DNA, 25 bp, Homo sapien
gaagatctctctaataagtgaccct

SEQ ID NO: 1787377 - DNA, 25 bp, Homo sapien
cttcatggcggcttcctgagcagag

SEQ ID NO: 1787378 - DNA, 25 bp, Homo sapien
ttgaaattagagcatcttaaactcg

SEQ ID NO: 1787379 - DNA, 25 bp, Homo sapien
tcagttggcccaatatcttatcagc

SEQ ID NO: 1787380 - DNA, 25 bp, Homo sapien
ggcagttaaagatcattacaaataa

SEQ ID NO: 1787381 - DNA, 25 bp, Homo sapien
tagagcatcttaaactcgaatggct

SEQ ID NO: 1787382 - DNA, 25 bp, Homo sapien
gagttattaataagcccaatgtctc

SEQ ID NO: 1787383 - DNA, 25 bp, Homo sapien
gtctcttgcaaagtaactgtgctca

SEQ ID NO: 1787384 - DNA, 25 bp, Homo sapien
taagcccaatgtctcttgcaaagta

SEQ ID NO: 1787385 - DNA, 25 bp, Homo sapien
acaatttatgagttattaataagcc

SEQ ID NO: 1787386 - DNA, 25 bp, Homo sapien
tttaccctgtccttacgcccacaca

SEQ ID NO: 1787387 - DNA, 25 bp, Homo sapien
ttaccctgtccttacgcccacacat

SEQ ID NO: 1787388 - DNA, 25 bp, Homo sapien
tatgttcccagaaagaaaaaaatga

SEQ ID NO: 1787389 - DNA, 25 bp, Homo sapien
gatgtcgaaaattttctgtcgggct

SEQ ID NO: 1787390 - DNA, 25 bp, Homo sapien
ctgtactcttcccggatgtcgaaaa

SEQ ID NO: 1787391 - DNA, 25 bp, Homo sapien
cttcccggatgtcgaaaattttctg

SEQ ID NO: 1787392 - DNA, 25 bp, Homo sapien
cccggatgtcgaaaattttctgtcg

SEQ ID NO: 1787393 - DNA, 25 bp, Homo sapien
ggcagttaaagatcattacaaatag

SEQ ID NO: 1787394 - DNA, 25 bp, Homo sapien
ttgaaattagagcatcttaaactca

SEQ ID NO: 1787395 - DNA, 25 bp, Homo sapien
tgaaattagagcatcttaaactcaa

SEQ ID NO: 1787396 - DNA, 25 bp, Homo sapien
tcccttggctgaaagttaactgctg

SEQ ID NO: 1787397 - DNA, 25 bp, Homo sapien
tggtatgagatactgctcccttggc

SEQ ID NO: 1787398 - DNA, 25 bp, Homo sapien
tgagtccactaaggcttcactgcat

SEQ ID NO: 1787399 - DNA, 25 bp, Homo sapien
tggcagcccactccacttggtatga

SEQ ID NO: 1787400 - DNA, 25 bp, Homo sapien
cgatgtacttgcagaaagcaggaca

SEQ ID NO: 1787401 - DNA, 25 bp, Homo sapien
caaacccacctaagaggctcaggaa

SEQ ID NO: 1787402 - DNA, 25 bp, Homo sapien
cacacagagcatatggaactcagag

SEQ ID NO: 1787403 - DNA, 25 bp, Homo sapien
taagtgtaagcaagaagggaaccaa

SEQ ID NO: 1787404 - DNA, 25 bp, Homo sapien
tggagccccagccaatatatgattt

SEQ ID NO: 1787405 - DNA, 25 bp, Homo sapien
ggagccccagccaatatatgatttc

SEQ ID NO: 1787406 - DNA, 25 bp, Homo sapien
gagccccagccaatatatgatttcc

SEQ ID NO: 1787407 - DNA, 25 bp, Homo sapien
ctggagccccagccaatatatgatt

SEQ ID NO: 1787408 - DNA, 25 bp, Homo sapien
gatgacgattcctgagagtccttgc

SEQ ID NO: 1787409 - DNA, 25 bp, Homo sapien
gtaagagtctgtgcggcctcgcagc

SEQ ID NO: 1787410 - DNA, 25 bp, Homo sapien
tgcgccctcatcgttgcgtaagagt

SEQ ID NO: 1787411 - DNA, 25 bp, Homo sapien
ccagatgtgcgggtcttttccggac

SEQ ID NO: 1787412 - DNA, 25 bp, Homo sapien
tgaagacctttggaaagatccttaa

SEQ ID NO: 1787413 - DNA, 25 bp, Homo sapien
tatatcaaaattgaagacctttgga

SEQ ID NO: 1787414 - DNA, 25 bp, Homo sapien
aattgaagacctttggaaagatcct

SEQ ID NO: 1787415 - DNA, 25 bp, Homo sapien
gttgcttatatcaaaattgaagacc

SEQ ID NO: 1787416 - DNA, 25 bp, Homo sapien
tgacatgaatctttgctcccttctt

SEQ ID NO: 1787417 - DNA, 25 bp, Homo sapien
tcatggaatatttctgatctaatag

SEQ ID NO: 1787418 - DNA, 25 bp, Homo sapien
gtgacatgaatctttgctcccttct

SEQ ID NO: 1787419 - DNA, 25 bp, Homo sapien
tggaatatttctgatctaatagccc

SEQ ID NO: 1787420 - DNA, 25 bp, Homo sapien
tctcaaggttttagacagaccaggt

SEQ ID NO: 1787421 - DNA, 25 bp, Homo sapien
cactagtagaagtttgatggccacg

SEQ ID NO: 1787422 - DNA, 25 bp, Homo sapien
cactcggaggctggactaaatgacc

SEQ ID NO: 1787423 - DNA, 25 bp, Homo sapien
tggccacgtgatagggatgctgcaa

SEQ ID NO: 1787424 - DNA, 25 bp, Homo sapien
tgggcattgagtggagtaggatcct

SEQ ID NO: 1787425 - DNA, 25 bp, Homo sapien
tctatgatgaggtttcttggagtgg

SEQ ID NO: 1787426 - DNA, 25 bp, Homo sapien
tgcatagggtgacccaaagcttggt

SEQ ID NO: 1787427 - DNA, 25 bp, Homo sapien
gggattcttgattctgcatagggtg

SEQ ID NO: 1787428 - DNA, 25 bp, Homo sapien
agtcactcatagaaggggctgtaac

SEQ ID NO: 1787429 - DNA, 25 bp, Homo sapien
tcactcatagaaggggctgtaacat

SEQ ID NO: 1787430 - DNA, 25 bp, Homo sapien
ctcatagaaggggctgtaacatcat

SEQ ID NO: 1787431 - DNA, 25 bp, Homo sapien
catagaaggggctgtaacatcatca

SEQ ID NO: 1787432 - DNA, 25 bp, Homo sapien
gatgtattttctttcgcatgcaagt

SEQ ID NO: 1787433 - DNA, 25 bp, Homo sapien
cattatggacaccttctgagcttcc

SEQ ID NO: 1787434 - DNA, 25 bp, Homo sapien
atactcacgtgaggaaatgttctga

SEQ ID NO: 1787435 - DNA, 25 bp, Homo sapien
tcttgcatggctctttgatgtattt

SEQ ID NO: 1787436 - DNA, 25 bp, Homo sapien
tagattcaaaacacgaataccctgg

SEQ ID NO: 1787437 - DNA, 25 bp, Homo sapien
gattcaaaacacgaataccctggca

SEQ ID NO: 1787438 - DNA, 25 bp, Homo sapien
atggggcactgtgacaacacactgt

SEQ ID NO: 1787439 - DNA, 25 bp, Homo sapien
tcatggggcactgtgacaacacact

SEQ ID NO: 1787440 - DNA, 25 bp, Homo sapien
tttttgaaggcacgctaaaacagaa

SEQ ID NO: 1787441 - DNA, 25 bp, Homo sapien
ttttgaaggcacgctaaaacagaat

SEQ ID NO: 1787442 - DNA, 25 bp, Homo sapien
ctttttgaaggcacgctaaaacaga

SEQ ID NO: 1787443 - DNA, 25 bp, Homo sapien
gcagtttggaatttgcgaggctggg

SEQ ID NO: 1787444 - DNA, 25 bp, Homo sapien
gacgcaaggatgtcctaatccctgc

SEQ ID NO: 1787445 - DNA, 25 bp, Homo sapien
gctgagagacccatgacgcaaggat

SEQ ID NO: 1787446 - DNA, 25 bp, Homo sapien
ctcctcctcaagtgcagcgcagcca

SEQ ID NO: 1787447 - DNA, 25 bp, Homo sapien
tgcattagcatatcatccgcctggt

SEQ ID NO: 1787448 - DNA, 25 bp, Homo sapien
tggaaacccgagtcaaaaggatagc

SEQ ID NO: 1787449 - DNA, 25 bp, Homo sapien
ccctccacgtggcagagcgtatttt

SEQ ID NO: 1787450 - DNA, 25 bp, Homo sapien
gctgtgtgcttctcgacaaaaatgg

SEQ ID NO: 1787451 - DNA, 25 bp, Homo sapien
gttgtttggaacactccaggcttgg

SEQ ID NO: 1787452 - DNA, 25 bp, Homo sapien
gtactgcttagcaacagctctacag

SEQ ID NO: 1787453 - DNA, 25 bp, Homo sapien
tagacactgcctgtagtactgctta

SEQ ID NO: 1787454 - DNA, 25 bp, Homo sapien
cattcagcaagagctccacaggtaa

SEQ ID NO: 1787455 - DNA, 25 bp, Homo sapien
tctagtgtggtactctgataggaac

SEQ ID NO: 1787456 - DNA, 25 bp, Homo sapien
ccacagctctagtgtggtactctga

SEQ ID NO: 1787457 - DNA, 25 bp, Homo sapien
gataggaacaagagccttttgggaa

SEQ ID NO: 1787458 - DNA, 25 bp, Homo sapien
gggctgtggattcctgaacagagct

SEQ ID NO: 1787459 - DNA, 25 bp, Homo sapien
ccttctctgaactgtgcacacatct

SEQ ID NO: 1787460 - DNA, 25 bp, Homo sapien
agaccttctctgaactgtgcacaca

SEQ ID NO: 1787461 - DNA, 25 bp, Homo sapien
gaccttctctgaactgtgcacacat

SEQ ID NO: 1787462 - DNA, 25 bp, Homo sapien
cagaccttctctgaactgtgcacac

SEQ ID NO: 1787463 - DNA, 25 bp, Homo sapien
gaagaaagctttgctaattctcccg

SEQ ID NO: 1787464 - DNA, 25 bp, Homo sapien
ttagatcctcgatggaactctccca

SEQ ID NO: 1787465 - DNA, 25 bp, Homo sapien
ttcctcctctaagtttccactagct

SEQ ID NO: 1787466 - DNA, 25 bp, Homo sapien
gctaggcctaaacaagggtttgctg

SEQ ID NO: 1787467 - DNA, 25 bp, Homo sapien
gagatgtcaccaattgcgtttcctt

SEQ ID NO: 1787468 - DNA, 25 bp, Homo sapien
gtcaccaattgcgtttcctttcctc

SEQ ID NO: 1787469 - DNA, 25 bp, Homo sapien
gatgtcaccaattgcgtttcctttc

SEQ ID NO: 1787470 - DNA, 25 bp, Homo sapien
gagagatgtcaccaattgcgtttcc

SEQ ID NO: 1787471 - DNA, 25 bp, Homo sapien
tgactgcctggagtcgttctgctgg

SEQ ID NO: 1787472 - DNA, 25 bp, Homo sapien
gaaagcctggttgctgtggcacatg

SEQ ID NO: 1787473 - DNA, 25 bp, Homo sapien
ggctggaaatgataccctgtgggta

SEQ ID NO: 1787474 - DNA, 25 bp, Homo sapien
ggtatggtgctctgttctgcattaa

SEQ ID NO: 1787475 - DNA, 25 bp, Homo sapien
gaagaaaggagcctcagagacagag

SEQ ID NO: 1787476 - DNA, 25 bp, Homo sapien
aagaagaaaggagcctcagagacag

SEQ ID NO: 1787477 - DNA, 25 bp, Homo sapien
agtgaaaggttgaagaatcttccag

SEQ ID NO: 1787478 - DNA, 25 bp, Homo sapien
tcagtgaaaggttgaagaatcttcc

SEQ ID NO: 1787479 - DNA, 25 bp, Homo sapien
tggccaagtgttaaccctgcctggg

SEQ ID NO: 1787480 - DNA, 25 bp, Homo sapien
taatggatccgatgcatagctggcc

SEQ ID NO: 1787481 - DNA, 25 bp, Homo sapien
gaaaatgtggtgtcaccattgtaat

SEQ ID NO: 1787482 - DNA, 25 bp, Homo sapien
ttcccatggaccaggcatactgcat

SEQ ID NO: 1787483 - DNA, 25 bp, Homo sapien
gggaagatgacgctagagctggcag

SEQ ID NO: 1787484 - DNA, 25 bp, Homo sapien
ggaagatgacgctagagctggcagc

SEQ ID NO: 1787485 - DNA, 25 bp, Homo sapien
cagttcatacttccctttgtgtctt

SEQ ID NO: 1787486 - DNA, 25 bp, Homo sapien
agccttccctcttctagactggatg

SEQ ID NO: 1787487 - DNA, 25 bp, Homo sapien
tctctttagccttccctcttctaga

SEQ ID NO: 1787488 - DNA, 25 bp, Homo sapien
cagtaattcagcatttccagtgaca

SEQ ID NO: 1787489 - DNA, 25 bp, Homo sapien
ggttgagatggtgcaataaagatca

SEQ ID NO: 1787490 - DNA, 25 bp, Homo sapien
gttgcatccacctcaccctcactgt

SEQ ID NO: 1787491 - DNA, 25 bp, Homo sapien
ctcactgtacttctgatgaggtggt

SEQ ID NO: 1787492 - DNA, 25 bp, Homo sapien
gatctctcataaaagctccagttgc

SEQ ID NO: 1787493 - DNA, 25 bp, Homo sapien
gaatgtagtacagacactacagctg

SEQ ID NO: 1787494 - DNA, 25 bp, Homo sapien
aatggaatggtccaaatttaccagg

SEQ ID NO: 1787495 - DNA, 25 bp, Homo sapien
tgtctccaaatatgccacaactacc

SEQ ID NO: 1787496 - DNA, 25 bp, Homo sapien
gacactacagctgccataaaatgga

SEQ ID NO: 1787497 - DNA, 25 bp, Homo sapien
tgctttcccattctaggcaccaggt

SEQ ID NO: 1787498 - DNA, 25 bp, Homo sapien
agcccaatgccggtatattcagcca

SEQ ID NO: 1787499 - DNA, 25 bp, Homo sapien
tcattaatatcagcaagcccaatgc

SEQ ID NO: 1787500 - DNA, 25 bp, Homo sapien
gccattggctctcctaccatggtag

SEQ ID NO: 1787501 - DNA, 25 bp, Homo sapien
tgggttgccccaaattgtaatctta

SEQ ID NO: 1787502 - DNA, 25 bp, Homo sapien
cacacggtaagctcaaaatttgcca

SEQ ID NO: 1787503 - DNA, 25 bp, Homo sapien
catggctggaccatacaatgattgc

SEQ ID NO: 1787504 - DNA, 25 bp, Homo sapien
gcaaccagaaggtaatccacacggt

SEQ ID NO: 1787505 - DNA, 25 bp, Homo sapien
cttgatccgactaagggctctcgga

SEQ ID NO: 1787506 - DNA, 25 bp, Homo sapien
ttgatccgactaagggctctcggag

SEQ ID NO: 1787507 - DNA, 25 bp, Homo sapien
gatccgactaagggctctcggagca

SEQ ID NO: 1787508 - DNA, 25 bp, Homo sapien
tgatccgactaagggctctcggagc

SEQ ID NO: 1787509 - DNA, 25 bp, Homo sapien
tggtaaaatttagctccatgcacat

SEQ ID NO: 1787510 - DNA, 25 bp, Homo sapien
cgtgctcgttattatgaatattgtt

SEQ ID NO: 1787511 - DNA, 25 bp, Homo sapien
tgaatattgttggtaaaatttagct

SEQ ID NO: 1787512 - DNA, 25 bp, Homo sapien
tgctcgttattatgaatattgttgg

SEQ ID NO: 1787513 - DNA, 25 bp, Homo sapien
taggctaatgattctccaagaggac

SEQ ID NO: 1787514 - DNA, 25 bp, Homo sapien
aacactttggcctttcattactgag

SEQ ID NO: 1787515 - DNA, 25 bp, Homo sapien
ggcaccgaggctgatgattctgaaa

SEQ ID NO: 1787516 - DNA, 25 bp, Homo sapien
tataaggaatacctcgcttacaccc

SEQ ID NO: 1787517 - DNA, 25 bp, Homo sapien
ttctctggaactgctagtataatac

SEQ ID NO: 1787518 - DNA, 25 bp, Homo sapien
tttgagacagattccttgacgaggg

SEQ ID NO: 1787519 - DNA, 25 bp, Homo sapien
tctccgttctttgaaagtttgtcca

SEQ ID NO: 1787520 - DNA, 25 bp, Homo sapien
ccttgacgagggaatatgggttgta

SEQ ID NO: 1787521 - DNA, 25 bp, Homo sapien
caaagtgtcctgtgaggatacagtc

SEQ ID NO: 1787522 - DNA, 25 bp, Homo sapien
gtctctcaaagtgtcctgtgaggat

SEQ ID NO: 1787523 - DNA, 25 bp, Homo sapien
ggatacagtctatgtagacatccat

SEQ ID NO: 1787524 - DNA, 25 bp, Homo sapien
gtgaggatacagtctatgtagacat

SEQ ID NO: 1787525 - DNA, 25 bp, Homo sapien
gcactaagcgtccttctgtccagat

SEQ ID NO: 1787526 - DNA, 25 bp, Homo sapien
tgtgcagttgggtgacacccttcct

SEQ ID NO: 1787527 - DNA, 25 bp, Homo sapien
ctgtccagatggtgcactcttttct

SEQ ID NO: 1787528 - DNA, 25 bp, Homo sapien
gggcccacttggcactaagcgtcct

SEQ ID NO: 1787529 - DNA, 25 bp, Homo sapien
aaatatcataaaccgagtggcttaa

SEQ ID NO: 1787530 - DNA, 25 bp, Homo sapien
tatcataaaccgagtggcttaaaca

SEQ ID NO: 1787531 - DNA, 25 bp, Homo sapien
tctgagaaaccgttttttgtgtgct

SEQ ID NO: 1787532 - DNA, 25 bp, Homo sapien
ttctgagaaaccgttttttgtgtgc

SEQ ID NO: 1787533 - DNA, 25 bp, Homo sapien
gcctgttagtgacacagtgttcctt

SEQ ID NO: 1787534 - DNA, 25 bp, Homo sapien
gctttgatgccagtgtttacccgtc

SEQ ID NO: 1787535 - DNA, 25 bp, Homo sapien
tgtgccgggcatgttgatggctcca

SEQ ID NO: 1787536 - DNA, 25 bp, Homo sapien
ccaccagcacttgacctactttgaa

SEQ ID NO: 1787537 - DNA, 25 bp, Homo sapien
tctggtccactgtgtaggcattcat

SEQ ID NO: 1787538 - DNA, 25 bp, Homo sapien
gaaaggattatgtattgtcagaaca

SEQ ID NO: 1787539 - DNA, 25 bp, Homo sapien
atcctctcctaaagtagaagagaaa

SEQ ID NO: 1787540 - DNA, 25 bp, Homo sapien
catcaggggagagggacttggcatc

SEQ ID NO: 1787541 - DNA, 25 bp, Homo sapien
gttccaggaggtttatatgaggacc

SEQ ID NO: 1787542 - DNA, 25 bp, Homo sapien
tggttgctaggtccaagtgctctga

SEQ ID NO: 1787543 - DNA, 25 bp, Homo sapien
tctgtccgctttgtatgtcctctgg

SEQ ID NO: 1787544 - DNA, 25 bp, Homo sapien
tgctctgtgagcgttctctgtccgc

SEQ ID NO: 1787545 - DNA, 25 bp, Homo sapien
cataaggagggtcttctaggctgac

SEQ ID NO: 1787546 - DNA, 25 bp, Homo sapien
cctgactgaatttcatatgatgatc

SEQ ID NO: 1787547 - DNA, 25 bp, Homo sapien
taggagagcataaggagggtcttct

SEQ ID NO: 1787548 - DNA, 25 bp, Homo sapien
tctaggctgacctgactgaatttca

SEQ ID NO: 1787549 - DNA, 25 bp, Homo sapien
gcacaggcattagccagagcatggt

SEQ ID NO: 1787550 - DNA, 25 bp, Homo sapien
tgggaatcggatcaacaacaggctt

SEQ ID NO: 1787551 - DNA, 25 bp, Homo sapien
caggcctctgaatgcgtggacatga

SEQ ID NO: 1787552 - DNA, 25 bp, Homo sapien
ggctttgtacctctctggcaagctg

SEQ ID NO: 1787553 - DNA, 25 bp, Homo sapien
aactgcacactgattgtccagggca

SEQ ID NO: 1787554 - DNA, 25 bp, Homo sapien
ggctgtcagacaactgcacactgat

SEQ ID NO: 1787555 - DNA, 25 bp, Homo sapien
aattcatcaggctgaagaatagatg

SEQ ID NO: 1787556 - DNA, 25 bp, Homo sapien
ttcatcaggctgaagaatagatggc

SEQ ID NO: 1787557 - DNA, 25 bp, Homo sapien
cttttaccctctagcattacaccct

SEQ ID NO: 1787558 - DNA, 25 bp, Homo sapien
attatctccctccattagcctatca

SEQ ID NO: 1787559 - DNA, 25 bp, Homo sapien
tctccctccattagcctatcagcat

SEQ ID NO: 1787560 - DNA, 25 bp, Homo sapien
tccttttaccctctagcattacacc

SEQ ID NO: 1787561 - DNA, 25 bp, Homo sapien
aagagattccggtccaagccagtgg

SEQ ID NO: 1787562 - DNA, 25 bp, Homo sapien
gagacgggaaattccaaatattgta

SEQ ID NO: 1787563 - DNA, 25 bp, Homo sapien
ggagagagacgggaaattccaaata

SEQ ID NO: 1787564 - DNA, 25 bp, Homo sapien
atgagaagagattccggtccaagcc

SEQ ID NO: 1787565 - DNA, 25 bp, Homo sapien
gtgtggatttgctgaacggaaacca

SEQ ID NO: 1787566 - DNA, 25 bp, Homo sapien
tggaaatttgctgtaagaggattgc

SEQ ID NO: 1787567 - DNA, 25 bp, Homo sapien
tttgctgtaagaggattgctggtgt

SEQ ID NO: 1787568 - DNA, 25 bp, Homo sapien
tgtggatttgctgaacggaaaccat

SEQ ID NO: 1787569 - DNA, 25 bp, Homo sapien
aattcagaggcttaaatgttaatgg

SEQ ID NO: 1787570 - DNA, 25 bp, Homo sapien
tttcaatggtgttgataagttgttc

SEQ ID NO: 1787571 - DNA, 25 bp, Homo sapien
aatggtgttgataagttgttctgag

SEQ ID NO: 1787572 - DNA, 25 bp, Homo sapien
tctgagtaagataagaaagtgtgtt

SEQ ID NO: 1787573 - DNA, 25 bp, Homo sapien
acacgcatgctggtcagggagctca

SEQ ID NO: 1787574 - DNA, 25 bp, Homo sapien
ggtccagcactgttatccaaccatg

SEQ ID NO: 1787575 - DNA, 25 bp, Homo sapien
agagagaggcactcgtgggccaaca

SEQ ID NO: 1787576 - DNA, 25 bp, Homo sapien
gccaacaccttttttaggtccagca

SEQ ID NO: 1787577 - DNA, 25 bp, Homo sapien
ctctccgaaaattagagcctttaca

SEQ ID NO: 1787578 - DNA, 25 bp, Homo sapien
gggttgagggtcactccgatcccat

SEQ ID NO: 1787579 - DNA, 25 bp, Homo sapien
tcccatctacatgggttccacttca

SEQ ID NO: 1787580 - DNA, 25 bp, Homo sapien
atttctgttctctccgaaaattaga

SEQ ID NO: 1787581 - DNA, 25 bp, Homo sapien
gatggcatctggcgctaaggacaaa

SEQ ID NO: 1787582 - DNA, 25 bp, Homo sapien
atgatgacatttccaagaagtgatg

SEQ ID NO: 1787583 - DNA, 25 bp, Homo sapien
ttttgccacagggatcttattctcc

SEQ ID NO: 1787584 - DNA, 25 bp, Homo sapien
gacatttccaagaagtgatggcatc

SEQ ID NO: 1787585 - DNA, 25 bp, Homo sapien
ctggagttagtagtgtgttgcaacc

SEQ ID NO: 1787586 - DNA, 25 bp, Homo sapien
tggagttagtagtgtgttgcaacct

SEQ ID NO: 1787587 - DNA, 25 bp, Homo sapien
ggctggagttagtagtgtgttgcaa

SEQ ID NO: 1787588 - DNA, 25 bp, Homo sapien
gctggagttagtagtgtgttgcaac

SEQ ID NO: 1787589 - DNA, 25 bp, Homo sapien
ttggtgaaagttggccctgaactgc

SEQ ID NO: 1787590 - DNA, 25 bp, Homo sapien
cttggtcagggctagcgtcagtctt

SEQ ID NO: 1787591 - DNA, 25 bp, Homo sapien
cagggctagcgtcagtcttccctgc

SEQ ID NO: 1787592 - DNA, 25 bp, Homo sapien
tgctcccttggtgaaagttggccct

SEQ ID NO: 1787593 - DNA, 25 bp, Homo sapien
cacacttgcacctaacatttcaact

SEQ ID NO: 1787594 - DNA, 25 bp, Homo sapien
gctccccacacttgcacctaacatt

SEQ ID NO: 1787595 - DNA, 25 bp, Homo sapien
agctccccacacttgcacctaacat

SEQ ID NO: 1787596 - DNA, 25 bp, Homo sapien
tgcacctaacatttcaacttttctc

SEQ ID NO: 1787597 - DNA, 25 bp, Homo sapien
ggacttatccgaaaatccaaatggc

SEQ ID NO: 1787598 - DNA, 25 bp, Homo sapien
aatggccaaaaccaacaatggccca

SEQ ID NO: 1787599 - DNA, 25 bp, Homo sapien
tgtgctcagagacacggggacttat

SEQ ID NO: 1787600 - DNA, 25 bp, Homo sapien
tctgtgctcagagacacggggactt

SEQ ID NO: 1787601 - DNA, 25 bp, Homo sapien
gcattcaaaagcagtcagcgaacca

SEQ ID NO: 1787602 - DNA, 25 bp, Homo sapien
cctattggttgagttaaccagcatt

SEQ ID NO: 1787603 - DNA, 25 bp, Homo sapien
tcagcgaaccaactacgactgggcc

SEQ ID NO: 1787604 - DNA, 25 bp, Homo sapien
catcccaggacgatgtcttgcattt

SEQ ID NO: 1787605 - DNA, 25 bp, Homo sapien
cagtcgagttgccagagtatgcagc

SEQ ID NO: 1787606 - DNA, 25 bp, Homo sapien
ttgatgctttctcgccgttaatggg

SEQ ID NO: 1787607 - DNA, 25 bp, Homo sapien
tgttgacgactaacaagcagcagga

SEQ ID NO: 1787608 - DNA, 25 bp, Homo sapien
tctcttgcagctggcatagtaaaaa

SEQ ID NO: 1787609 - DNA, 25 bp, Homo sapien
gagcccggctgcgttcctcaggcgc

SEQ ID NO: 1787610 - DNA, 25 bp, Homo sapien
tgacagggcgcctcggcacacggca

SEQ ID NO: 1787611 - DNA, 25 bp, Homo sapien
gcggcagccgcggttacagcgcggg

SEQ ID NO: 1787612 - DNA, 25 bp, Homo sapien
acacggcaccaacgcccgcccggag

SEQ ID NO: 1787613 - DNA, 25 bp, Homo sapien
ccgccaccgtcgccgctgcgtccat

SEQ ID NO: 1787614 - DNA, 25 bp, Homo sapien
cttcgaccgcggaaacggaggagtg

SEQ ID NO: 1787615 - DNA, 25 bp, Homo sapien
ggaagcaaaagataatccgaacagg

SEQ ID NO: 1787616 - DNA, 25 bp, Homo sapien
gaaatactgcgacgacaagagcggc

SEQ ID NO: 1787617 - DNA, 25 bp, Homo sapien
gccgcaagaaacctgggcggcgacc

SEQ ID NO: 1787618 - DNA, 25 bp, Homo sapien
accttcctgatgttgaatttcctca

SEQ ID NO: 1787619 - DNA, 25 bp, Homo sapien
gtcaggccgtccagcaccttcctga

SEQ ID NO: 1787620 - DNA, 25 bp, Homo sapien
gactggagcgtttcctggatctccg

SEQ ID NO: 1787621 - DNA, 25 bp, Homo sapien
gctcccggttcccaggcggatgctg

SEQ ID NO: 1787622 - DNA, 25 bp, Homo sapien
ccccaatttttcaatgacggtgtcg

SEQ ID NO: 1787623 - DNA, 25 bp, Homo sapien
aatttttcaatgacggtgtcgcggg

SEQ ID NO: 1787624 - DNA, 25 bp, Homo sapien
ccaatttttcaatgacggtgtcgcg

SEQ ID NO: 1787625 - DNA, 25 bp, Homo sapien
ttttcaatgacggtgtcgcggggct

SEQ ID NO: 1787626 - DNA, 25 bp, Homo sapien
gatgctaacgcaagtacttctaagg

SEQ ID NO: 1787627 - DNA, 25 bp, Homo sapien
cattcccatgtaaagcccgagtagc

SEQ ID NO: 1787628 - DNA, 25 bp, Homo sapien
accttgaactgattgctgcatgtgc

SEQ ID NO: 1787629 - DNA, 25 bp, Homo sapien
cagtgtcagaatacgattaaaggtc

SEQ ID NO: 1787630 - DNA, 25 bp, Homo sapien
ccaaggcagcaagcgaaattttaaa

SEQ ID NO: 1787631 - DNA, 25 bp, Homo sapien
tagaggcgttagaatttagaaccac

SEQ ID NO: 1787632 - DNA, 25 bp, Homo sapien
tgacatcacagcaaccaaggcagca

SEQ ID NO: 1787633 - DNA, 25 bp, Homo sapien
tagaaccactaccactgatgcaaaa

SEQ ID NO: 1787634 - DNA, 25 bp, Homo sapien
cagggctgagggttgatagggaaat

SEQ ID NO: 1787635 - DNA, 25 bp, Homo sapien
ctgagggttgatagggaaatccatg

SEQ ID NO: 1787636 - DNA, 25 bp, Homo sapien
ggttgatagggaaatccatggcgaa

SEQ ID NO: 1787637 - DNA, 25 bp, Homo sapien
ttgatagggaaatccatggcgaaca

SEQ ID NO: 1787638 - DNA, 25 bp, Homo sapien
gagtcgtctgtactgttctcactaa

SEQ ID NO: 1787639 - DNA, 25 bp, Homo sapien
tctacacggacatgccaaaaacaac

SEQ ID NO: 1787640 - DNA, 25 bp, Homo sapien
gtatatatctaatcacaccaacagg

SEQ ID NO: 1787641 - DNA, 25 bp, Homo sapien
tctttggaactaatcagcaacacag

SEQ ID NO: 1787642 - DNA, 25 bp, Homo sapien
tgggcccgcagtcagtgataaagtc

SEQ ID NO: 1787643 - DNA, 25 bp, Homo sapien
tgtaactgaggaatagccggaggct

SEQ ID NO: 1787644 - DNA, 25 bp, Homo sapien
taaagtctgagagtatcgctcctgg

SEQ ID NO: 1787645 - DNA, 25 bp, Homo sapien
gcctcccggctgtgaaagtgattct

SEQ ID NO: 1787646 - DNA, 25 bp, Homo sapien
tgatcctaattaccctccatgttcg

SEQ ID NO: 1787647 - DNA, 25 bp, Homo sapien
cattaaggggaaacaaatcagagct

SEQ ID NO: 1787648 - DNA, 25 bp, Homo sapien
gagcttcttgtactaatgatcctaa

SEQ ID NO: 1787649 - DNA, 25 bp, Homo sapien
tacacagacttgtgtggcaagaaaa

SEQ ID NO: 1787650 - DNA, 25 bp, Homo sapien
cattaaggagtttatggtatttgtt

SEQ ID NO: 1787651 - DNA, 25 bp, Homo sapien
aattccattaaggagtttatggtat

SEQ ID NO: 1787652 - DNA, 25 bp, Homo sapien
attccattaaggagtttatggtatt

SEQ ID NO: 1787653 - DNA, 25 bp, Homo sapien
tccattaaggagtttatggtatttg

SEQ ID NO: 1787654 - DNA, 25 bp, Homo sapien
cagctccactgtcatgctggcaata

SEQ ID NO: 1787655 - DNA, 25 bp, Homo sapien
ctcattaatcaggaactggagctgg

SEQ ID NO: 1787656 - DNA, 25 bp, Homo sapien
acattctactcctggacgaccaaag

SEQ ID NO: 1787657 - DNA, 25 bp, Homo sapien
gcaataacattctactcctggacga

SEQ ID NO: 1787658 - DNA, 25 bp, Homo sapien
aaggtgtcatcagccaaggcactca

SEQ ID NO: 1787659 - DNA, 25 bp, Homo sapien
ggcctcttctgacgtaaattccata

SEQ ID NO: 1787660 - DNA, 25 bp, Homo sapien
tttctctgcaaaatttaagcgaatg

SEQ ID NO: 1787661 - DNA, 25 bp, Homo sapien
gcgaatgtagtatggcaggcctctt

SEQ ID NO: 1787662 - DNA, 25 bp, Homo sapien
ccatcagcaggtgagttcaacattg

SEQ ID NO: 1787663 - DNA, 25 bp, Homo sapien
gaaatgacttagcaagccagaagac

SEQ ID NO: 1787664 - DNA, 25 bp, Homo sapien
tatgttctaagaagcccatcagcag

SEQ ID NO: 1787665 - DNA, 25 bp, Homo sapien
tagagggcagttatcatgaacggag

SEQ ID NO: 1787666 - DNA, 25 bp, Homo sapien
ccccagtacccaagaatgtgacagt

SEQ ID NO: 1787667 - DNA, 25 bp, Homo sapien
tgtgctgccctcctcaattatatgg

SEQ ID NO: 1787668 - DNA, 25 bp, Homo sapien
tactatcggcaaatttgtccctgtg

SEQ ID NO: 1787669 - DNA, 25 bp, Homo sapien
tctggcaattggcataataagctac

SEQ ID NO: 1787670 - DNA, 25 bp, Homo sapien
tagctgctgatcaacccacgacttg

SEQ ID NO: 1787671 - DNA, 25 bp, Homo sapien
ctcagtttctatgggagcaaagaac

SEQ ID NO: 1787672 - DNA, 25 bp, Homo sapien
ggtgatatgtgtttcctagagctgc

SEQ ID NO: 1787673 - DNA, 25 bp, Homo sapien
caaggctcaccaatatcaaggaaga

SEQ ID NO: 1787674 - DNA, 25 bp, Homo sapien
taagtgctcacctgcttgttaggcc

SEQ ID NO: 1787675 - DNA, 25 bp, Homo sapien
gaaaaatccagtctcttaagtgctc

SEQ ID NO: 1787676 - DNA, 25 bp, Homo sapien
cactctgagccttttgacaggaaaa

SEQ ID NO: 1787677 - DNA, 25 bp, Homo sapien
tactgcccaagaaacttccgaaatg

SEQ ID NO: 1787678 - DNA, 25 bp, Homo sapien
catacctcatggcttcccgtggcta

SEQ ID NO: 1787679 - DNA, 25 bp, Homo sapien
ttccgcttccgggtgaggcaacgcc

SEQ ID NO: 1787680 - DNA, 25 bp, Homo sapien
ttggcgtaggcacccaaaggaatct

SEQ ID NO: 1787681 - DNA, 25 bp, Homo sapien
tatctgggctgaaatgcaccgtccc

SEQ ID NO: 1787682 - DNA, 25 bp, Homo sapien
tcaattttcatcaggcatgctgtct

SEQ ID NO: 1787683 - DNA, 25 bp, Homo sapien
tgagataatcgtggtttttttcata

SEQ ID NO: 1787684 - DNA, 25 bp, Homo sapien
aattttcatcaggcatgctgtcttg

SEQ ID NO: 1787685 - DNA, 25 bp, Homo sapien
caattttcatcaggcatgctgtctt

SEQ ID NO: 1787686 - DNA, 25 bp, Homo sapien
ctgaatggttttgaataggttttct

SEQ ID NO: 1787687 - DNA, 25 bp, Homo sapien
tccgacacgcctcagcgtatcatgt

SEQ ID NO: 1787688 - DNA, 25 bp, Homo sapien
tatttgttcttgactacccacccag

SEQ ID NO: 1787689 - DNA, 25 bp, Homo sapien
catgaagtagacctttcttgcctta

SEQ ID NO: 1787690 - DNA, 25 bp, Homo sapien
cacccagcaatgtctaactacaggt

SEQ ID NO: 1787691 - DNA, 25 bp, Homo sapien
ctgttgctatctctgctgacaagga

SEQ ID NO: 1787692 - DNA, 25 bp, Homo sapien
catacttctttcagctaaggttcta

SEQ ID NO: 1787693 - DNA, 25 bp, Homo sapien
ttggtactcagtaccaaagtgctgg

SEQ ID NO: 1787694 - DNA, 25 bp, Homo sapien
tacatttctactaattggatgtgtt

SEQ ID NO: 1787695 - DNA, 25 bp, Homo sapien
gaaaggcagatggcaaaatgtaacc

SEQ ID NO: 1787696 - DNA, 25 bp, Homo sapien
ggaaaggcagatggcaaaatgtaac

SEQ ID NO: 1787697 - DNA, 25 bp, Homo sapien
ctggaaaggcagatggcaaaatgta

SEQ ID NO: 1787698 - DNA, 25 bp, Homo sapien
tggaaaggcagatggcaaaatgtaa

SEQ ID NO: 1787699 - DNA, 25 bp, Homo sapien
cataatgacgtagcctgagagtgtg

SEQ ID NO: 1787700 - DNA, 25 bp, Homo sapien
tcgttcagtgcccacatagagccac

SEQ ID NO: 1787701 - DNA, 25 bp, Homo sapien
gagtgtgaaggactccacattgaca

SEQ ID NO: 1787702 - DNA, 25 bp, Homo sapien
tatgtatattacctcgttcagtgcc

SEQ ID NO: 1787703 - DNA, 25 bp, Homo sapien
aggtcctgggtgagatttagatgac

SEQ ID NO: 1787704 - DNA, 25 bp, Homo sapien
cattggattatcacttatatggacc

SEQ ID NO: 1787705 - DNA, 25 bp, Homo sapien
cacttatatggaccacaggtcctgg

SEQ ID NO: 1787706 - DNA, 25 bp, Homo sapien
ctttccctcgtccattggattatca

SEQ ID NO: 1787707 - DNA, 25 bp, Homo sapien
taaaatttgtgcatttaatatataa

SEQ ID NO: 1787708 - DNA, 25 bp, Homo sapien
ctaaaatttgtgcatttaatatata

SEQ ID NO: 1787709 - DNA, 25 bp, Homo sapien
tactaaaatttgtgcatttaatata

SEQ ID NO: 1787710 - DNA, 25 bp, Homo sapien
aatactaaaatttgtgcatttaata

SEQ ID NO: 1787711 - DNA, 25 bp, Homo sapien
aaactcctgcacaaaatccagaggt

SEQ ID NO: 1787712 - DNA, 25 bp, Homo sapien
cagtgttaaacaatatatcagctca

SEQ ID NO: 1787713 - DNA, 25 bp, Homo sapien
cctggttaaactcctgcacaaaatc

SEQ ID NO: 1787714 - DNA, 25 bp, Homo sapien
tgctataattatgacctaactccaa

SEQ ID NO: 1787715 - DNA, 25 bp, Homo sapien
ctttcctaggcaatctgagatacat

SEQ ID NO: 1787716 - DNA, 25 bp, Homo sapien
ttctttcctaggcaatctgagatac

SEQ ID NO: 1787717 - DNA, 25 bp, Homo sapien
tcctaggcaatctgagatacataca

SEQ ID NO: 1787718 - DNA, 25 bp, Homo sapien
gagatacatacaccttttggaaaaa

SEQ ID NO: 1787719 - DNA, 25 bp, Homo sapien
tggttaagtctacccagttcctcta

SEQ ID NO: 1787720 - DNA, 25 bp, Homo sapien
gcagctggagggactaactatcaaa

SEQ ID NO: 1787721 - DNA, 25 bp, Homo sapien
cacaaactatgtacgctgcccacag

SEQ ID NO: 1787722 - DNA, 25 bp, Homo sapien
tctaaattcagtgttgcttcctggt

SEQ ID NO: 1787723 - DNA, 25 bp, Homo sapien
tactgttccagattcaaagccaatc

SEQ ID NO: 1787724 - DNA, 25 bp, Homo sapien
tctgtagtcggctttctttgatttg

SEQ ID NO: 1787725 - DNA, 25 bp, Homo sapien
ttgatttgaggtcccataaaactac

SEQ ID NO: 1787726 - DNA, 25 bp, Homo sapien
catcatatgtgtatctgtagtcggc

SEQ ID NO: 1787727 - DNA, 25 bp, Homo sapien
catgtggagtgattgtctgtactgg

SEQ ID NO: 1787728 - DNA, 25 bp, Homo sapien
cattccatatagtcaaggtgccatc

SEQ ID NO: 1787729 - DNA, 25 bp, Homo sapien
ttagcaggggaccttacattccata

SEQ ID NO: 1787730 - DNA, 25 bp, Homo sapien
tctgtactggtttagcaggggacct

SEQ ID NO: 1787731 - DNA, 25 bp, Homo sapien
catatccttcgcctttaaatcatgg

SEQ ID NO: 1787732 - DNA, 25 bp, Homo sapien
cttgtttgagtatgctctgtggagt

SEQ ID NO: 1787733 - DNA, 25 bp, Homo sapien
tccttcgcctttaaatcatggtctt

SEQ ID NO: 1787734 - DNA, 25 bp, Homo sapien
atggtcttgtttgagtatgctctgt

SEQ ID NO: 1787735 - DNA, 25 bp, Homo sapien
tcacataggggagggatgtttcaga

SEQ ID NO: 1787736 - DNA, 25 bp, Homo sapien
ctgggagctcacataggggagggat

SEQ ID NO: 1787737 - DNA, 25 bp, Homo sapien
cataggggagggatgtttcagaata

SEQ ID NO: 1787738 - DNA, 25 bp, Homo sapien
gctcacataggggagggatgtttca

SEQ ID NO: 1787739 - DNA, 25 bp, Homo sapien
aagtgatattggcagccggcgccag

SEQ ID NO: 1787740 - DNA, 25 bp, Homo sapien
gcacgtgttcacctaccaagggtaa

SEQ ID NO: 1787741 - DNA, 25 bp, Homo sapien
cccaggcatgggcagtaagtaacaa

SEQ ID NO: 1787742 - DNA, 25 bp, Homo sapien
tgttaactgaatgcaagcgccaggg

SEQ ID NO: 1787743 - DNA, 25 bp, Homo sapien
tattctagataggttgtgccaattt

SEQ ID NO: 1787744 - DNA, 25 bp, Homo sapien
tgacaaacattgtttggcatatagt

SEQ ID NO: 1787745 - DNA, 25 bp, Homo sapien
ggcatatagtatatctgggtaaagt

SEQ ID NO: 1787746 - DNA, 25 bp, Homo sapien
gttctatcagcagcgtaagaccgta

SEQ ID NO: 1787747 - DNA, 25 bp, Homo sapien
ccagatctagtcgttttgaattcca

SEQ ID NO: 1787748 - DNA, 25 bp, Homo sapien
gaattccaccttgaggataggtttg

SEQ ID NO: 1787749 - DNA, 25 bp, Homo sapien
agtcgttttgaattccaccttgagg

SEQ ID NO: 1787750 - DNA, 25 bp, Homo sapien
cttgaggataggtttgcatggttct

SEQ ID NO: 1787751 - DNA, 25 bp, Homo sapien
aatatagctattgttggaatatatc

SEQ ID NO: 1787752 - DNA, 25 bp, Homo sapien
taatctattgttggaatatagctat

SEQ ID NO: 1787753 - DNA, 25 bp, Homo sapien
tatatctgttggatctcaacaaacc

SEQ ID NO: 1787754 - DNA, 25 bp, Homo sapien
atatatctgttggatctcaacaaac

SEQ ID NO: 1787755 - DNA, 25 bp, Homo sapien
caactaatgtctgacattttatcca

SEQ ID NO: 1787756 - DNA, 25 bp, Homo sapien
cacaaagaagtcagataactatgct

SEQ ID NO: 1787757 - DNA, 25 bp, Homo sapien
tacaggtcacacaatgaaggatgca

SEQ ID NO: 1787758 - DNA, 25 bp, Homo sapien
cagatgatacacctcttagagttca

SEQ ID NO: 1787759 - DNA, 25 bp, Homo sapien
tattattggaggacctaacctggcc

SEQ ID NO: 1787760 - DNA, 25 bp, Homo sapien
gaatttgcctttgcctcagagttaa

SEQ ID NO: 1787761 - DNA, 25 bp, Homo sapien
cctggccaatgaggctagagtatct

SEQ ID NO: 1787762 - DNA, 25 bp, Homo sapien
gaagaaaatgtagaagaccctgaga

SEQ ID NO: 1787763 - DNA, 25 bp, Homo sapien
cttagtggcttaggttgtagacgtc

SEQ ID NO: 1787764 - DNA, 25 bp, Homo sapien
caagaggagtacagcttagccaggt

SEQ ID NO: 1787765 - DNA, 25 bp, Homo sapien
tctgcacatttggttgaatagtcac

SEQ ID NO: 1787766 - DNA, 25 bp, Homo sapien
tgtaatccatgtcagccatgtctgt

SEQ ID NO: 1787767 - DNA, 25 bp, Homo sapien
tccataggcctcagtatattgtgtt

SEQ ID NO: 1787768 - DNA, 25 bp, Homo sapien
taatgctggtttcgtataatgagtc

SEQ ID NO: 1787769 - DNA, 25 bp, Homo sapien
aaactcagcactgaatatgtccagg

SEQ ID NO: 1787770 - DNA, 25 bp, Homo sapien
aagtcaatcttggtaggctgtatgt

SEQ ID NO: 1787771 - DNA, 25 bp, Homo sapien
agtatcatatgacaaacctcctgat

SEQ ID NO: 1787772 - DNA, 25 bp, Homo sapien
acagtatcatatgacaaacctcctg

SEQ ID NO: 1787773 - DNA, 25 bp, Homo sapien
agcaaggtcttcttcctacagtatc

SEQ ID NO: 1787774 - DNA, 25 bp, Homo sapien
cactgttaagcaaggtcttcttcct

SEQ ID NO: 1787775 - DNA, 25 bp, Homo sapien
gaaaatcaacaattgaatagtccat

SEQ ID NO: 1787776 - DNA, 25 bp, Homo sapien
atggtgtttcacacagcgttagaaa

SEQ ID NO: 1787777 - DNA, 25 bp, Homo sapien
ttcacacagcgttagaaaatcaaca

SEQ ID NO: 1787778 - DNA, 25 bp, Homo sapien
caattgaatagtccatttctagcac

SEQ ID NO: 1787779 - DNA, 25 bp, Homo sapien
caaccacagcatatggttcttgaaa

SEQ ID NO: 1787780 - DNA, 25 bp, Homo sapien
tactaaatccttttctagaagaaca

SEQ ID NO: 1787781 - DNA, 25 bp, Homo sapien
tgcaaggtctataagtactaaatcc

SEQ ID NO: 1787782 - DNA, 25 bp, Homo sapien
cattttgtgcaaggtctataagtac

SEQ ID NO: 1787783 - DNA, 25 bp, Homo sapien
tgtctagctccaacagaataaagtg

SEQ ID NO: 1787784 - DNA, 25 bp, Homo sapien
taaggtccacaggacaatccgcaaa

SEQ ID NO: 1787785 - DNA, 25 bp, Homo sapien
aataaagtgcaggaataaggtccac

SEQ ID NO: 1787786 - DNA, 25 bp, Homo sapien
gactcatgtatactcaaagggtagg

SEQ ID NO: 1787787 - DNA, 25 bp, Homo sapien
ggtaactttgagcacccaagcccca

SEQ ID NO: 1787788 - DNA, 25 bp, Homo sapien
caagccccaattacctccgttgatg

SEQ ID NO: 1787789 - DNA, 25 bp, Homo sapien
actttgagcacccaagccccaatta

SEQ ID NO: 1787790 - DNA, 25 bp, Homo sapien
aattacctccgttgatgggccattc

SEQ ID NO: 1787791 - DNA, 25 bp, Homo sapien
tcccagaacttaactgacccatcag

SEQ ID NO: 1787792 - DNA, 25 bp, Homo sapien
atcccagaacttaactgacccatca

SEQ ID NO: 1787793 - DNA, 25 bp, Homo sapien
ccagaacttaactgacccatcagca

SEQ ID NO: 1787794 - DNA, 25 bp, Homo sapien
gaacttaactgacccatcagcatgc

SEQ ID NO: 1787795 - DNA, 25 bp, Homo sapien
gacaccaggagatgatctgaatggc

SEQ ID NO: 1787796 - DNA, 25 bp, Homo sapien
gcattctactttctggacaccagga

SEQ ID NO: 1787797 - DNA, 25 bp, Homo sapien
tgaaactccagcgatgcacagcatt

SEQ ID NO: 1787798 - DNA, 25 bp, Homo sapien
tacaatgtctgtgtttggcctgtca

SEQ ID NO: 1787799 - DNA, 25 bp, Homo sapien
ggtggctgctcaccctccggagttt

SEQ ID NO: 1787800 - DNA, 25 bp, Homo sapien
tggaccctcccacgggtgttggcaa

SEQ ID NO: 1787801 - DNA, 25 bp, Homo sapien
caaggtacattatcacgaagcccat

SEQ ID NO: 1787802 - DNA, 25 bp, Homo sapien
gaagcccatcagatgaactgctact

SEQ ID NO: 1787803 - DNA, 25 bp, Homo sapien
tatcaggctggcctttaactttaac

SEQ ID NO: 1787804 - DNA, 25 bp, Homo sapien
ctatcaggctggcctttaactttaa

SEQ ID NO: 1787805 - DNA, 25 bp, Homo sapien
gagaagcggcagtccaaggattaag

SEQ ID NO: 1787806 - DNA, 25 bp, Homo sapien
ggagaagcggcagtccaaggattaa

SEQ ID NO: 1787807 - DNA, 25 bp, Homo sapien
cataggaagaattgactgccaggct

SEQ ID NO: 1787808 - DNA, 25 bp, Homo sapien
tctgtttgataacctggagactgtt

SEQ ID NO: 1787809 - DNA, 25 bp, Homo sapien
tatttgttgtggtggttctccaccc

SEQ ID NO: 1787810 - DNA, 25 bp, Homo sapien
caaaccaactgaataactagttctg

SEQ ID NO: 1787811 - DNA, 25 bp, Homo sapien
caaataaacagtcaatttcgtctga

SEQ ID NO: 1787812 - DNA, 25 bp, Homo sapien
tatttaggagaggatatactgactt

SEQ ID NO: 1787813 - DNA, 25 bp, Homo sapien
gaaatactgcatgcatacccaaagt

SEQ ID NO: 1787814 - DNA, 25 bp, Homo sapien
cccaaagtaagttattcagaatgaa

SEQ ID NO: 1787815 - DNA, 25 bp, Homo sapien
aaatctgcggatgttcaagtcctca

SEQ ID NO: 1787816 - DNA, 25 bp, Homo sapien
tgttagtttgatgtacagttgtccc

SEQ ID NO: 1787817 - DNA, 25 bp, Homo sapien
gaaagaagactatctcagactgtag

SEQ ID NO: 1787818 - DNA, 25 bp, Homo sapien
cagagggctaactgtacagctgcaa

SEQ ID NO: 1787819 - DNA, 25 bp, Homo sapien
aaccatagcaatgccattgcaattg

SEQ ID NO: 1787820 - DNA, 25 bp, Homo sapien
tcaaccatagcaatgccattgcaat

SEQ ID NO: 1787821 - DNA, 25 bp, Homo sapien
agtcaaccatagcaatgccattgca

SEQ ID NO: 1787822 - DNA, 25 bp, Homo sapien
catagcaatgccattgcaattgcca

SEQ ID NO: 1787823 - DNA, 25 bp, Homo sapien
tccgataaggatcattagagccata

SEQ ID NO: 1787824 - DNA, 25 bp, Homo sapien
ctgtcgagatttacgaggagatcgg

SEQ ID NO: 1787825 - DNA, 25 bp, Homo sapien
ctcctgaaggctgtcgagatttacg

SEQ ID NO: 1787826 - DNA, 25 bp, Homo sapien
gggttctctccgataaggatcatta

SEQ ID NO: 1787827 - DNA, 25 bp, Homo sapien
ctaaagctcagaattttcttttctt

SEQ ID NO: 1787828 - DNA, 25 bp, Homo sapien
cagtttatatatacagactaaatca

SEQ ID NO: 1787829 - DNA, 25 bp, Homo sapien
gtttatatatacagactaaatcagg

SEQ ID NO: 1787830 - DNA, 25 bp, Homo sapien
tggcagtttatatatacagactaaa

SEQ ID NO: 1787831 - DNA, 25 bp, Homo sapien
ttttggcagtttatatatacagact

SEQ ID NO: 1787832 - DNA, 25 bp, Homo sapien
tgcaataaaatcctagaatattaaa

SEQ ID NO: 1787833 - DNA, 25 bp, Homo sapien
gtgcaataaaatcctagaatattaa

SEQ ID NO: 1787834 - DNA, 25 bp, Homo sapien
tctttctcaatgtgcaataaaatcc

SEQ ID NO: 1787835 - DNA, 25 bp, Homo sapien
ggttctttctcaatgtgcaataaaa

SEQ ID NO: 1787836 - DNA, 25 bp, Homo sapien
caatgaaaaggagcaaaaccttaca

SEQ ID NO: 1787837 - DNA, 25 bp, Homo sapien
tatacaaatattcctgtcattatat

SEQ ID NO: 1787838 - DNA, 25 bp, Homo sapien
ataattatacaaatattcctgtcat

SEQ ID NO: 1787839 - DNA, 25 bp, Homo sapien
caaacaatgaaaaggagcaaaacct

SEQ ID NO: 1787840 - DNA, 25 bp, Homo sapien
catgcaagaagtcacaatcagcaca

SEQ ID NO: 1787841 - DNA, 25 bp, Homo sapien
cagaatataagctagaaaggccgca

SEQ ID NO: 1787842 - DNA, 25 bp, Homo sapien
ggccgcacatgcaagaagtcacaat

SEQ ID NO: 1787843 - DNA, 25 bp, Homo sapien
tagaaaggccgcacatgcaagaagt

SEQ ID NO: 1787844 - DNA, 25 bp, Homo sapien
gatatagttatcattcttaaaaagg

SEQ ID NO: 1787845 - DNA, 25 bp, Homo sapien
atatagttatcattcttaaaaaggc

SEQ ID NO: 1787846 - DNA, 25 bp, Homo sapien
tgatatagttatcattcttaaaaag

SEQ ID NO: 1787847 - DNA, 25 bp, Homo sapien
tatgatatagttatcattcttaaaa

SEQ ID NO: 1787848 - DNA, 25 bp, Homo sapien
tttgcagcgatcctctggaacaaca

SEQ ID NO: 1787849 - DNA, 25 bp, Homo sapien
gttggagatttgcagcgatcctctg

SEQ ID NO: 1787850 - DNA, 25 bp, Homo sapien
gatttgcagcgatcctctggaacaa

SEQ ID NO: 1787851 - DNA, 25 bp, Homo sapien
gagatttgcagcgatcctctggaac

SEQ ID NO: 1787852 - DNA, 25 bp, Homo sapien
tcctgatatggagaaaccgacataa

SEQ ID NO: 1787853 - DNA, 25 bp, Homo sapien
ttcaaagggctagatgtatccactt

SEQ ID NO: 1787854 - DNA, 25 bp, Homo sapien
gacaaatgcatttaccgattttggg

SEQ ID NO: 1787855 - DNA, 25 bp, Homo sapien
agtctggcccaggataaaaaggaat

SEQ ID NO: 1787856 - DNA, 25 bp, Homo sapien
catcatctgaattgtgtggtgatga

SEQ ID NO: 1787857 - DNA, 25 bp, Homo sapien
tcatcatctgaattgtgtggtgatg

SEQ ID NO: 1787858 - DNA, 25 bp, Homo sapien
catctgaattgtgtggtgatgaaga

SEQ ID NO: 1787859 - DNA, 25 bp, Homo sapien
tttttgttcatcatctgaattgtgt

SEQ ID NO: 1787860 - DNA, 25 bp, Homo sapien
cattggctaccatcttggaaaactt

SEQ ID NO: 1787861 - DNA, 25 bp, Homo sapien
ttggctaccatcttggaaaactttc

SEQ ID NO: 1787862 - DNA, 25 bp, Homo sapien
ctatatcattggctaccatcttgga

SEQ ID NO: 1787863 - DNA, 25 bp, Homo sapien
atcattggctaccatcttggaaaac

SEQ ID NO: 1787864 - DNA, 25 bp, Homo sapien
gattattgtgtagatagaacagggc

SEQ ID NO: 1787865 - DNA, 25 bp, Homo sapien
aacatagcacagtgtttaagaggac

SEQ ID NO: 1787866 - DNA, 25 bp, Homo sapien
ttgagtgatgggtaccaagatggca

SEQ ID NO: 1787867 - DNA, 25 bp, Homo sapien
caagatggcatccatgatctggctc

SEQ ID NO: 1787868 - DNA, 25 bp, Homo sapien
tagcagtacagaaaaactatggatt

SEQ ID NO: 1787869 - DNA, 25 bp, Homo sapien
caggcaaaacaaattaccatatgca

SEQ ID NO: 1787870 - DNA, 25 bp, Homo sapien
gattcatacattaaccaagatatgc

SEQ ID NO: 1787871 - DNA, 25 bp, Homo sapien
tttataaggtatacacaggcaaaac

SEQ ID NO: 1787872 - DNA, 25 bp, Homo sapien
ttacccagctagctcgtttcactgt

SEQ ID NO: 1787873 - DNA, 25 bp, Homo sapien
gctcgtttcactgtacttatcaaga

SEQ ID NO: 1787874 - DNA, 25 bp, Homo sapien
tagctcgtttcactgtacttatcaa

SEQ ID NO: 1787875 - DNA, 25 bp, Homo sapien
cagctagctcgtttcactgtactta

SEQ ID NO: 1787876 - DNA, 25 bp, Homo sapien
gcgcctggccgtgtatctttcaatt

SEQ ID NO: 1787877 - DNA, 25 bp, Homo sapien
acgggaacgtgctctgtcgcagaaa

SEQ ID NO: 1787878 - DNA, 25 bp, Homo sapien
taaggcctaaagttgaacttctggc

SEQ ID NO: 1787879 - DNA, 25 bp, Homo sapien
gaaagcctgctgttcaatgcctgga

SEQ ID NO: 1787880 - DNA, 25 bp, Homo sapien
ctagcaaatattccagtcatgccag

SEQ ID NO: 1787881 - DNA, 25 bp, Homo sapien
tgtccagagacttctagaacttctt

SEQ ID NO: 1787882 - DNA, 25 bp, Homo sapien
cagttcctcctctctagcaaatatt

SEQ ID NO: 1787883 - DNA, 25 bp, Homo sapien
taggttctgatactgcagctccact

SEQ ID NO: 1787884 - DNA, 25 bp, Homo sapien
cttgagatcattggtttaaaacagt

SEQ ID NO: 1787885 - DNA, 25 bp, Homo sapien
taagacaaagacttgagatcattgg

SEQ ID NO: 1787886 - DNA, 25 bp, Homo sapien
aaacagttccaatgcaagcatttaa

SEQ ID NO: 1787887 - DNA, 25 bp, Homo sapien
ttctaacttaagacaaagacttgag

SEQ ID NO: 1787888 - DNA, 25 bp, Homo sapien
attcctgctgaaactgaatgtccat

SEQ ID NO: 1787889 - DNA, 25 bp, Homo sapien
aattcctgctgaaactgaatgtcca

SEQ ID NO: 1787890 - DNA, 25 bp, Homo sapien
ctaattcctgctgaaactgaatgtc

SEQ ID NO: 1787891 - DNA, 25 bp, Homo sapien
taattcctgctgaaactgaatgtcc

SEQ ID NO: 1787892 - DNA, 25 bp, Homo sapien
aatcaatccctgtcccatttccggg

SEQ ID NO: 1787893 - DNA, 25 bp, Homo sapien
caaaaccagcgagagactttgtaca

SEQ ID NO: 1787894 - DNA, 25 bp, Homo sapien
taatgcccatagtcagaagcaacat

SEQ ID NO: 1787895 - DNA, 25 bp, Homo sapien
catttccgggaataaccaaggctct

SEQ ID NO: 1787896 - DNA, 25 bp, Homo sapien
agaaatccagtcatacatgacttcc

SEQ ID NO: 1787897 - DNA, 25 bp, Homo sapien
cctgctagtccataagggcgccatg

SEQ ID NO: 1787898 - DNA, 25 bp, Homo sapien
cgccatgtaaacaaagagaaatcca

SEQ ID NO: 1787899 - DNA, 25 bp, Homo sapien
gctagtccataagggcgccatgtaa

SEQ ID NO: 1787900 - DNA, 25 bp, Homo sapien
cattatacaatatctgactcaacca

SEQ ID NO: 1787901 - DNA, 25 bp, Homo sapien
gactcaaccactccttgatataagt

SEQ ID NO: 1787902 - DNA, 25 bp, Homo sapien
ttaatttctagcttataggccaaac

SEQ ID NO: 1787903 - DNA, 25 bp, Homo sapien
tacggtatttacataagatgcaaac

SEQ ID NO: 1787904 - DNA, 25 bp, Homo sapien
tatttcttaggctcacaggaaaggg

SEQ ID NO: 1787905 - DNA, 25 bp, Homo sapien
tttattactaaatctagatgccgag

SEQ ID NO: 1787906 - DNA, 25 bp, Homo sapien
tgcctggctattctggatgtttgta

SEQ ID NO: 1787907 - DNA, 25 bp, Homo sapien
tcttcatagctactgggttcattct

SEQ ID NO: 1787908 - DNA, 25 bp, Homo sapien
ctaaatcaggctttaggtcagtagg

SEQ ID NO: 1787909 - DNA, 25 bp, Homo sapien
taggtcagtaggtaagcttaacttc

SEQ ID NO: 1787910 - DNA, 25 bp, Homo sapien
tcaggctttaggtcagtaggtaagc

SEQ ID NO: 1787911 - DNA, 25 bp, Homo sapien
cagtaggtaagcttaacttccttga

SEQ ID NO: 1787912 - DNA, 25 bp, Homo sapien
tcagcataactgaagtaagataatg

SEQ ID NO: 1787913 - DNA, 25 bp, Homo sapien
accacatgctttctatcagcataac

SEQ ID NO: 1787914 - DNA, 25 bp, Homo sapien
gaccaacacctaagtttgtatgatg

SEQ ID NO: 1787915 - DNA, 25 bp, Homo sapien
tgtatgatgcatagcaaacatagtc

SEQ ID NO: 1787916 - DNA, 25 bp, Homo sapien
aacatctggcagtttgaacctatca

SEQ ID NO: 1787917 - DNA, 25 bp, Homo sapien
caatatagttggagttattccccat

SEQ ID NO: 1787918 - DNA, 25 bp, Homo sapien
caacatctggcagtttgaacctatc

SEQ ID NO: 1787919 - DNA, 25 bp, Homo sapien
tttgaacctatcaatatagttggag

SEQ ID NO: 1787920 - DNA, 25 bp, Homo sapien
gcgttgttccaacccatagacaagg

SEQ ID NO: 1787921 - DNA, 25 bp, Homo sapien
ccgtgatcggctaaaggagttatcc

SEQ ID NO: 1787922 - DNA, 25 bp, Homo sapien
tgttacacttgaactccgtgatcgg

SEQ ID NO: 1787923 - DNA, 25 bp, Homo sapien
cacttggagacacaattactggctg

SEQ ID NO: 1787924 - DNA, 25 bp, Homo sapien
gccattctcaagattgcacctttta

SEQ ID NO: 1787925 - DNA, 25 bp, Homo sapien
ttctcaagattgcaccttttaacct

SEQ ID NO: 1787926 - DNA, 25 bp, Homo sapien
cattctcaagattgcaccttttaac

SEQ ID NO: 1787927 - DNA, 25 bp, Homo sapien
tcaagattgcaccttttaacctcaa

SEQ ID NO: 1787928 - DNA, 25 bp, Homo sapien
tctccacgaagcacaaacgaggtct

SEQ ID NO: 1787929 - DNA, 25 bp, Homo sapien
tctccagggttcatacgcaggtggt

SEQ ID NO: 1787930 - DNA, 25 bp, Homo sapien
tcaggaacattgtgctctctccagg

SEQ ID NO: 1787931 - DNA, 25 bp, Homo sapien
caggcaaggcagatactgttactca

SEQ ID NO: 1787932 - DNA, 25 bp, Homo sapien
caggtctcttgactataagtaagtc

SEQ ID NO: 1787933 - DNA, 25 bp, Homo sapien
gcagaacgttctggctatccgcata

SEQ ID NO: 1787934 - DNA, 25 bp, Homo sapien
caacagaggtcttaaacttggcaaa

SEQ ID NO: 1787935 - DNA, 25 bp, Homo sapien
tgtccattgttggtaaagcagaacg

SEQ ID NO: 1787936 - DNA, 25 bp, Homo sapien
tctgaagaaattacagtaatatttt

SEQ ID NO: 1787937 - DNA, 25 bp, Homo sapien
ctctgaagaaattacagtaatattt

SEQ ID NO: 1787938 - DNA, 25 bp, Homo sapien
ctgaagaaattacagtaatattttt

SEQ ID NO: 1787939 - DNA, 25 bp, Homo sapien
tgaaagcttagtcacgtgtacgtgc

SEQ ID NO: 1787940 - DNA, 25 bp, Homo sapien
gctgaatagcacgtatggtatactc

SEQ ID NO: 1787941 - DNA, 25 bp, Homo sapien
cttctggcttctacaagtatgagca

SEQ ID NO: 1787942 - DNA, 25 bp, Homo sapien
cagtctggttgttgggatcaagcac

SEQ ID NO: 1787943 - DNA, 25 bp, Homo sapien
ctctgtcaagagattgtgcaccacc

SEQ ID NO: 1787944 - DNA, 25 bp, Homo sapien
aaagaatcccctgtttggtgcttca

SEQ ID NO: 1787945 - DNA, 25 bp, Homo sapien
tgtcaagagattgtgcaccacctcc

SEQ ID NO: 1787946 - DNA, 25 bp, Homo sapien
taaagaatcccctgtttggtgcttc

SEQ ID NO: 1787947 - DNA, 25 bp, Homo sapien
ggaacacccataagacctgtgttga

SEQ ID NO: 1787948 - DNA, 25 bp, Homo sapien
aatactgacaatgggaccagaaacc

SEQ ID NO: 1787949 - DNA, 25 bp, Homo sapien
gaaaccaaggaatgcggatggcctc

SEQ ID NO: 1787950 - DNA, 25 bp, Homo sapien
tacatctagtgagtttggtaacctg

SEQ ID NO: 1787951 - DNA, 25 bp, Homo sapien
gctaattcaccaacaactccagatg

SEQ ID NO: 1787952 - DNA, 25 bp, Homo sapien
gactctgcacttgataacatggccg

SEQ ID NO: 1787953 - DNA, 25 bp, Homo sapien
tttacgccttcaatgccaccagggc

SEQ ID NO: 1787954 - DNA, 25 bp, Homo sapien
gaatatgctgtgcaaggctccttga

SEQ ID NO: 1787955 - DNA, 25 bp, Homo sapien
aactggtaccacttcttatctttgt

SEQ ID NO: 1787956 - DNA, 25 bp, Homo sapien
ggaaagaacagtattcagtgacgaa

SEQ ID NO: 1787957 - DNA, 25 bp, Homo sapien
ggctgaagttggacttattggattc

SEQ ID NO: 1787958 - DNA, 25 bp, Homo sapien
tcagtgacgaacatccctttaacgt

SEQ ID NO: 1787959 - DNA, 25 bp, Homo sapien
agttggacttattggattctggttg

SEQ ID NO: 1787960 - DNA, 25 bp, Homo sapien
cacgtgtgacctgtttaattcccaa

SEQ ID NO: 1787961 - DNA, 25 bp, Homo sapien
gacttattgcctctgccctaaacag

SEQ ID NO: 1787962 - DNA, 25 bp, Homo sapien
cactgatggcagataaaacggcaca

SEQ ID NO: 1787963 - DNA, 25 bp, Homo sapien
tcagtgttaagagagggaaagtcca

SEQ ID NO: 1787964 - DNA, 25 bp, Homo sapien
ctgaaatcgtggcttgctggtgact

SEQ ID NO: 1787965 - DNA, 25 bp, Homo sapien
tccacatagatagggaaccaaccag

SEQ ID NO: 1787966 - DNA, 25 bp, Homo sapien
catggaaactcccagaatgatgagc

SEQ ID NO: 1787967 - DNA, 25 bp, Homo sapien
gaagtattctcctcaccacaatgga

SEQ ID NO: 1787968 - DNA, 25 bp, Homo sapien
gcttcagaggaacctacaattaaga

SEQ ID NO: 1787969 - DNA, 25 bp, Homo sapien
cactcacatatctacatgaaatcgc

SEQ ID NO: 1787970 - DNA, 25 bp, Homo sapien
taagcaaaacatacatggaagatag

SEQ ID NO: 1787971 - DNA, 25 bp, Homo sapien
agatagaactcagggtaaaactttg

SEQ ID NO: 1787972 - DNA, 25 bp, Homo sapien
tctcgatatgagataccagtatttc

SEQ ID NO: 1787973 - DNA, 25 bp, Homo sapien
gtatcacttggtttaaactgagcaa

SEQ ID NO: 1787974 - DNA, 25 bp, Homo sapien
aaacaatagttaaggtaggcatcca

SEQ ID NO: 1787975 - DNA, 25 bp, Homo sapien
cagcaaactgaagctattgagaaag

SEQ ID NO: 1787976 - DNA, 25 bp, Homo sapien
gagcccttcagcataaagagacatt

SEQ ID NO: 1787977 - DNA, 25 bp, Homo sapien
gagaccacttacatgtagccctgga

SEQ ID NO: 1787978 - DNA, 25 bp, Homo sapien
tatcatgtggaatagaggtcacacc

SEQ ID NO: 1787979 - DNA, 25 bp, Homo sapien
gagatagttactgggactgagcaag

SEQ ID NO: 1787980 - DNA, 25 bp, Homo sapien
gataaacaccctagtgaagcagcag

SEQ ID NO: 1787981 - DNA, 25 bp, Homo sapien
gatcttgaaagctaaaacacctggc

SEQ ID NO: 1787982 - DNA, 25 bp, Homo sapien
tggcccaagggttcaaacgtcagag

SEQ ID NO: 1787983 - DNA, 25 bp, Homo sapien
tgttaagataccaatcctcgggccc

SEQ ID NO: 1787984 - DNA, 25 bp, Homo sapien
tctaatgattttcagacgttattac

SEQ ID NO: 1787985 - DNA, 25 bp, Homo sapien
tgctgatcctgatataagacttgct

SEQ ID NO: 1787986 - DNA, 25 bp, Homo sapien
ttgctatttgttcttccttattcaa

SEQ ID NO: 1787987 - DNA, 25 bp, Homo sapien
ttcacagagcttctaaacgactaag

SEQ ID NO: 1787988 - DNA, 25 bp, Homo sapien
caataactaatgatcacctgtgtgc

SEQ ID NO: 1787989 - DNA, 25 bp, Homo sapien
gagcacaacgtaggcaaaacacctg

SEQ ID NO: 1787990 - DNA, 25 bp, Homo sapien
tctgggtcacttatttgcataggaa

SEQ ID NO: 1787991 - DNA, 25 bp, Homo sapien
tgttaaaccagaccaagtctctgga

SEQ ID NO: 1787992 - DNA, 25 bp, Homo sapien
aagatcaataccagctgcaggtccc

SEQ ID NO: 1787993 - DNA, 25 bp, Homo sapien
ttccgtgctggaaaacacccacaca

SEQ ID NO: 1787994 - DNA, 25 bp, Homo sapien
taggtggtgccaagatcaataccag

SEQ ID NO: 1787995 - DNA, 25 bp, Homo sapien
aacacccacacaaaagtaggtggtg

SEQ ID NO: 1787996 - DNA, 25 bp, Homo sapien
acacgcactccctgaccaggcgagc

SEQ ID NO: 1787997 - DNA, 25 bp, Homo sapien
gacacgcactccctgaccaggcgag

SEQ ID NO: 1787998 - DNA, 25 bp, Homo sapien
cacgcactccctgaccaggcgagcg

SEQ ID NO: 1787999 - DNA, 25 bp, Homo sapien
tgacacgcactccctgaccaggcga

SEQ ID NO: 1788000 - DNA, 25 bp, Homo sapien
tgccctggtctggaccgcgggccct

SEQ ID NO: 1788001 - DNA, 25 bp, Homo sapien
cgcctgggtcgccgtgggcgccggg

SEQ ID NO: 1788002 - DNA, 25 bp, Homo sapien
ctgacgcccggtgggggttgcctgt

SEQ ID NO: 1788003 - DNA, 25 bp, Homo sapien
cctgggtcgccgtgggcgccgggtg

SEQ ID NO: 1788004 - DNA, 25 bp, Homo sapien
catgaaggcgttgaagagcgcctcc

SEQ ID NO: 1788005 - DNA, 25 bp, Homo sapien
atgaaggcgttgaagagcgcctcca

SEQ ID NO: 1788006 - DNA, 25 bp, Homo sapien
ttcatgaaggcgttgaagagcgcct

SEQ ID NO: 1788007 - DNA, 25 bp, Homo sapien
ggttcatgaaggcgttgaagagcgc

SEQ ID NO: 1788008 - DNA, 25 bp, Homo sapien
gttggacttgggctcgggcggcttg

SEQ ID NO: 1788009 - DNA, 25 bp, Homo sapien
cgggcggcttgaaagagtcgggcag

SEQ ID NO: 1788010 - DNA, 25 bp, Homo sapien
ggcatggtctggtgcacgttggcca

SEQ ID NO: 1788011 - DNA, 25 bp, Homo sapien
gcatggtctggtgcacgttggccat

SEQ ID NO: 1788012 - DNA, 25 bp, Homo sapien
agtcagggctcctgcggtgcctgcc

SEQ ID NO: 1788013 - DNA, 25 bp, Homo sapien
ctggagaggaatgagctcgaacgtg

SEQ ID NO: 1788014 - DNA, 25 bp, Homo sapien
tgagctcgaacgtgctgtggagtca

SEQ ID NO: 1788015 - DNA, 25 bp, Homo sapien
cctgcggtgcctgcctcagtactga

SEQ ID NO: 1788016 - DNA, 25 bp, Homo sapien
atgtcttcgccatctcccgagctgc

SEQ ID NO: 1788017 - DNA, 25 bp, Homo sapien
gatgtcttcgccatctcccgagctg

SEQ ID NO: 1788018 - DNA, 25 bp, Homo sapien
gtcttcgccatctcccgagctgctg

SEQ ID NO: 1788019 - DNA, 25 bp, Homo sapien
aagatgtcttcgccatctcccgagc

SEQ ID NO: 1788020 - DNA, 25 bp, Homo sapien
gctgcactggtggattggctataac

SEQ ID NO: 1788021 - DNA, 25 bp, Homo sapien
attggctataacattcatctgagac

SEQ ID NO: 1788022 - DNA, 25 bp, Homo sapien
ggtggattggctataacattcatct

SEQ ID NO: 1788023 - DNA, 25 bp, Homo sapien
cactggtggattggctataacattc

SEQ ID NO: 1788024 - DNA, 25 bp, Homo sapien
cctggcaaaacgagtgtcaagcctt

SEQ ID NO: 1788025 - DNA, 25 bp, Homo sapien
ctggcaaaacgagtgtcaagccttg

SEQ ID NO: 1788026 - DNA, 25 bp, Homo sapien
tcctggcaaaacgagtgtcaagcct

SEQ ID NO: 1788027 - DNA, 25 bp, Homo sapien
ttcctggcaaaacgagtgtcaagcc

SEQ ID NO: 1788028 - DNA, 25 bp, Homo sapien
tgccaccatgacgcctccttgtggg

SEQ ID NO: 1788029 - DNA, 25 bp, Homo sapien
tggtcgcatctgtcgctgctggttg

SEQ ID NO: 1788030 - DNA, 25 bp, Homo sapien
gcagttgctgtggtcgcatctgtcg

SEQ ID NO: 1788031 - DNA, 25 bp, Homo sapien
tgctgtggtcgcatctgtcgctgct

SEQ ID NO: 1788032 - DNA, 25 bp, Homo sapien
cctgctccagtgttggtaactggct

SEQ ID NO: 1788033 - DNA, 25 bp, Homo sapien
gctccagtgttggtaactggctacg

SEQ ID NO: 1788034 - DNA, 25 bp, Homo sapien
tcctgctccagtgttggtaactggc

SEQ ID NO: 1788035 - DNA, 25 bp, Homo sapien
ccagtgttggtaactggctacgcag

SEQ ID NO: 1788036 - DNA, 25 bp, Homo sapien
tctcatctcgagagtgataggtgcc

SEQ ID NO: 1788037 - DNA, 25 bp, Homo sapien
agtgataggtgccacggttaaggaa

SEQ ID NO: 1788038 - DNA, 25 bp, Homo sapien
ttggctgtccttgttctcaattcct

SEQ ID NO: 1788039 - DNA, 25 bp, Homo sapien
tgccacggttaaggaaaggatctga

SEQ ID NO: 1788040 - DNA, 25 bp, Homo sapien
tgcggtgcaagggtcactagctgcc

SEQ ID NO: 1788041 - DNA, 25 bp, Homo sapien
gggtcactagctgcccatgcttagt

SEQ ID NO: 1788042 - DNA, 25 bp, Homo sapien
ggtgcaagggtcactagctgcccat

SEQ ID NO: 1788043 - DNA, 25 bp, Homo sapien
actagctgcccatgcttagtccact

SEQ ID NO: 1788044 - DNA, 25 bp, Homo sapien
cttccaggtagtctgggaaatggtc

SEQ ID NO: 1788045 - DNA, 25 bp, Homo sapien
ttccaggtagtctgggaaatggtcc

SEQ ID NO: 1788046 - DNA, 25 bp, Homo sapien
gacagcaagatgtaagacaagtctt

SEQ ID NO: 1788047 - DNA, 25 bp, Homo sapien
tgggcaaattaaagtcgaggagaaa

SEQ ID NO: 1788048 - DNA, 25 bp, Homo sapien
gatttaaattctaggaacagctgcc

SEQ ID NO: 1788049 - DNA, 25 bp, Homo sapien
cagtacagaaagtatcgtaatatca

SEQ ID NO: 1788050 - DNA, 25 bp, Homo sapien
gcacaatcacaattcttataaaaac

SEQ ID NO: 1788051 - DNA, 25 bp, Homo sapien
tcatttttcacatgtaccaatgcta

SEQ ID NO: 1788052 - DNA, 25 bp, Homo sapien
aaagtaacattagtactacatatat

SEQ ID NO: 1788053 - DNA, 25 bp, Homo sapien
ttttcacatgtaccaatgctataaa

SEQ ID NO: 1788054 - DNA, 25 bp, Homo sapien
tcatcagcccaaaaggaaaccttga

SEQ ID NO: 1788055 - DNA, 25 bp, Homo sapien
tctaaaaagcgccatggctcacagg

SEQ ID NO: 1788056 - DNA, 25 bp, Homo sapien
gggagtgcaaaccttgttgaacctc

SEQ ID NO: 1788057 - DNA, 25 bp, Homo sapien
tcacaggctctgcaccctagaggat

SEQ ID NO: 1788058 - DNA, 25 bp, Homo sapien
agaaccccgtgatagtctgtcgtca

SEQ ID NO: 1788059 - DNA, 25 bp, Homo sapien
tcaaatgagtttgaaaggggtgaag

SEQ ID NO: 1788060 - DNA, 25 bp, Homo sapien
ggagcaagtggagctatgagggcgg

SEQ ID NO: 1788061 - DNA, 25 bp, Homo sapien
ggtggagcaagtggagctatgaggg

SEQ ID NO: 1788062 - DNA, 25 bp, Homo sapien
tggagcaagtggagctatgagggcg

SEQ ID NO: 1788063 - DNA, 25 bp, Homo sapien
tctgcgatgattcacacatggccat

SEQ ID NO: 1788064 - DNA, 25 bp, Homo sapien
tgtctggttccacgagaatgtgcat

SEQ ID NO: 1788065 - DNA, 25 bp, Homo sapien
gacttggcatgtctgcgatgattca

SEQ ID NO: 1788066 - DNA, 25 bp, Homo sapien
agctgacagcctagatcttgctgtg

SEQ ID NO: 1788067 - DNA, 25 bp, Homo sapien
tcagttgaccataaagccaccatta

SEQ ID NO: 1788068 - DNA, 25 bp, Homo sapien
agattttaaggaaaggctagcccag

SEQ ID NO: 1788069 - DNA, 25 bp, Homo sapien
tagcccagtcagatgtgtatagagg

SEQ ID NO: 1788070 - DNA, 25 bp, Homo sapien
taatggctttccttagatgtgttcc

SEQ ID NO: 1788071 - DNA, 25 bp, Homo sapien
gaggctgagtctaccctagcatggt

SEQ ID NO: 1788072 - DNA, 25 bp, Homo sapien
aattagccaggcctaccttctggta

SEQ ID NO: 1788073 - DNA, 25 bp, Homo sapien
taaatggctctttagtgtctgctgc

SEQ ID NO: 1788074 - DNA, 25 bp, Homo sapien
gatgacatcaactttcaatgtgccc

SEQ ID NO: 1788075 - DNA, 25 bp, Homo sapien
acgggcttggaaagagccttctcca

SEQ ID NO: 1788076 - DNA, 25 bp, Homo sapien
actgcacaacctcctacatggacgg

SEQ ID NO: 1788077 - DNA, 25 bp, Homo sapien
tacatggacgggcttggaaagagcc

SEQ ID NO: 1788078 - DNA, 25 bp, Homo sapien
caacctcctacatggacgggcttgg

SEQ ID NO: 1788079 - DNA, 25 bp, Homo sapien
catttgctgccagagggtttttcct

SEQ ID NO: 1788080 - DNA, 25 bp, Homo sapien
tcaatgcctgctaccaatttatggg

SEQ ID NO: 1788081 - DNA, 25 bp, Homo sapien
ttctatgactaacaactcttttaag

SEQ ID NO: 1788082 - DNA, 25 bp, Homo sapien
aaagtgttgaatctgctgaaaatat

SEQ ID NO: 1788083 - DNA, 25 bp, Homo sapien
gatttcattctagaggctactacgc

SEQ ID NO: 1788084 - DNA, 25 bp, Homo sapien
aggtcatacccagcatccagatttg

SEQ ID NO: 1788085 - DNA, 25 bp, Homo sapien
aactagaggtcattggaggtcatac

SEQ ID NO: 1788086 - DNA, 25 bp, Homo sapien
taaagttacacagctggttcatgac

SEQ ID NO: 1788087 - DNA, 25 bp, Homo sapien
tccccagcctgtgctgtgctgtgca

SEQ ID NO: 1788088 - DNA, 25 bp, Homo sapien
ccagcctgtgctgtgctgtgcaaca

SEQ ID NO: 1788089 - DNA, 25 bp, Homo sapien
cttcgaatcacagtccccagcctgt

SEQ ID NO: 1788090 - DNA, 25 bp, Homo sapien
cagcctgtgctgtgctgtgcaacat

SEQ ID NO: 1788091 - DNA, 25 bp, Homo sapien
gcgtccgcgcgttgacccattttaa

SEQ ID NO: 1788092 - DNA, 25 bp, Homo sapien
gtgccccctcgcgtccgcgcgttga

SEQ ID NO: 1788093 - DNA, 25 bp, Homo sapien
tcgcgtccgcgcgttgacccatttt

SEQ ID NO: 1788094 - DNA, 25 bp, Homo sapien
cctcgcgtccgcgcgttgacccatt

SEQ ID NO: 1788095 - DNA, 25 bp, Homo sapien
gccgggtcagcgctgcgcagtgccg

SEQ ID NO: 1788096 - DNA, 25 bp, Homo sapien
agtgccgcccgcgagttttcccagc

SEQ ID NO: 1788097 - DNA, 25 bp, Homo sapien
tgcgcgccgcatctcgcgctctggc

SEQ ID NO: 1788098 - DNA, 25 bp, Homo sapien
cagccgggacggtccggcggctgcg

SEQ ID NO: 1788099 - DNA, 25 bp, Homo sapien
gaacaagcagcaaagtgaattcccc

SEQ ID NO: 1788100 - DNA, 25 bp, Homo sapien
aagcagcaaagtgaattccccaagc

SEQ ID NO: 1788101 - DNA, 25 bp, Homo sapien
aagcgaacaagcagcaaagtgaatt

SEQ ID NO: 1788102 - DNA, 25 bp, Homo sapien
caagcagcaaagtgaattccccaag

SEQ ID NO: 1788103 - DNA, 25 bp, Homo sapien
cagcgcccaaatggcacgggcggca

SEQ ID NO: 1788104 - DNA, 25 bp, Homo sapien
ctccaaggggaaaagggtatcgcag

SEQ ID NO: 1788105 - DNA, 25 bp, Homo sapien
cgagcaccttcccagcgcccaaatg

SEQ ID NO: 1788106 - DNA, 25 bp, Homo sapien
gcggcaccagttcttggaactttta

SEQ ID NO: 1788107 - DNA, 25 bp, Homo sapien
tccaggtcatcgtagccgttatcca

SEQ ID NO: 1788108 - DNA, 25 bp, Homo sapien
cactcgtaaactatgttggtgcaca

SEQ ID NO: 1788109 - DNA, 25 bp, Homo sapien
gaaggactccgcgtactgcggaagc

SEQ ID NO: 1788110 - DNA, 25 bp, Homo sapien
tgcagcgctttgagccactcgtaaa

SEQ ID NO: 1788111 - DNA, 25 bp, Homo sapien
ccaggtccgggtccccgatctgctt

SEQ ID NO: 1788112 - DNA, 25 bp, Homo sapien
cccgatggcatccaggtccgggtcc

SEQ ID NO: 1788113 - DNA, 25 bp, Homo sapien
tccgggtccccgatctgcttgcaca

SEQ ID NO: 1788114 - DNA, 25 bp, Homo sapien
ggtccgggtccccgatctgcttgca

SEQ ID NO: 1788115 - DNA, 25 bp, Homo sapien
cctccaggatacggcggcggtgcgc

SEQ ID NO: 1788116 - DNA, 25 bp, Homo sapien
ctccaggatacggcggcggtgcgcg

SEQ ID NO: 1788117 - DNA, 25 bp, Homo sapien
ccggctgcggctcaagcgtgaagta

SEQ ID NO: 1788118 - DNA, 25 bp, Homo sapien
tggccgcgagagtccccgcgggtgc

SEQ ID NO: 1788119 - DNA, 25 bp, Homo sapien
gggcggtcgtgtggccgcgagagtc

SEQ ID NO: 1788120 - DNA, 25 bp, Homo sapien
gctcaagcgtgaagtagaggccggc

SEQ ID NO: 1788121 - DNA, 25 bp, Homo sapien
gtttggggtagctcaccagctccct

SEQ ID NO: 1788122 - DNA, 25 bp, Homo sapien
ttcagtttggggtagctcaccagct

SEQ ID NO: 1788123 - DNA, 25 bp, Homo sapien
agtttggggtagctcaccagctccc

SEQ ID NO: 1788124 - DNA, 25 bp, Homo sapien
cagtttggggtagctcaccagctcc

SEQ ID NO: 1788125 - DNA, 25 bp, Homo sapien
cggacgagcttatccctgatcatga

SEQ ID NO: 1788126 - DNA, 25 bp, Homo sapien
gagcttatccctgatcatgatcttc

SEQ ID NO: 1788127 - DNA, 25 bp, Homo sapien
gtggatgccgtcacggacgagctta

SEQ ID NO: 1788128 - DNA, 25 bp, Homo sapien
ccgtcacggacgagcttatccctga

SEQ ID NO: 1788129 - DNA, 25 bp, Homo sapien
agacaccaggaaggacgaaataatg

SEQ ID NO: 1788130 - DNA, 25 bp, Homo sapien
acaccaggaaggacgaaataatggg

SEQ ID NO: 1788131 - DNA, 25 bp, Homo sapien
gacaccaggaaggacgaaataatgg

SEQ ID NO: 1788132 - DNA, 25 bp, Homo sapien
attcaccttcaagccatctaaaatt

SEQ ID NO: 1788133 - DNA, 25 bp, Homo sapien
gagactcactctccctatcttgata

SEQ ID NO: 1788134 - DNA, 25 bp, Homo sapien
ctttggcataattcaccttcaagcc

SEQ ID NO: 1788135 - DNA, 25 bp, Homo sapien
tcacaggcatcattgatgcaaatga

SEQ ID NO: 1788136 - DNA, 25 bp, Homo sapien
catcaaacttggtttcaaagttgtg

SEQ ID NO: 1788137 - DNA, 25 bp, Homo sapien
aaccttagttctgtcatctcatcaa

SEQ ID NO: 1788138 - DNA, 25 bp, Homo sapien
tcctccggctgtaaccttagttctg

SEQ ID NO: 1788139 - DNA, 25 bp, Homo sapien
caaagttgtgggtgatccctgtctg

SEQ ID NO: 1788140 - DNA, 25 bp, Homo sapien
cacactcagatatactccagattct

SEQ ID NO: 1788141 - DNA, 25 bp, Homo sapien
ttcacactcagatatactccagatt

SEQ ID NO: 1788142 - DNA, 25 bp, Homo sapien
cactcagatatactccagattctct

SEQ ID NO: 1788143 - DNA, 25 bp, Homo sapien
cagatatactccagattctctcatc

SEQ ID NO: 1788144 - DNA, 25 bp, Homo sapien
tcaaacacccctatcattaggaata

SEQ ID NO: 1788145 - DNA, 25 bp, Homo sapien
cttctgtacacagctgacacatggc

SEQ ID NO: 1788146 - DNA, 25 bp, Homo sapien
tgacacatggccactacgatggaag

SEQ ID NO: 1788147 - DNA, 25 bp, Homo sapien
agcagacccttctgtacacagctga

SEQ ID NO: 1788148 - DNA, 25 bp, Homo sapien
cacaagcgggaaaagttacagtcat

SEQ ID NO: 1788149 - DNA, 25 bp, Homo sapien
caacaatgccaagtcacaagcggga

SEQ ID NO: 1788150 - DNA, 25 bp, Homo sapien
cagtaacaacaatgccaagtcacaa

SEQ ID NO: 1788151 - DNA, 25 bp, Homo sapien
tgccaagtcacaagcgggaaaagtt

SEQ ID NO: 1788152 - DNA, 25 bp, Homo sapien
tgactgtgatttaaattcggccttt

SEQ ID NO: 1788153 - DNA, 25 bp, Homo sapien
ttagaaggccgatgactgtgattta

SEQ ID NO: 1788154 - DNA, 25 bp, Homo sapien
tgtgatttaaattcggcctttccat

SEQ ID NO: 1788155 - DNA, 25 bp, Homo sapien
tttagaaggccgatgactgtgattt

SEQ ID NO: 1788156 - DNA, 25 bp, Homo sapien
tgctggctttcttggttgtgctttt

SEQ ID NO: 1788157 - DNA, 25 bp, Homo sapien
tcttcttgtacgtgaacacatcaac

SEQ ID NO: 1788158 - DNA, 25 bp, Homo sapien
caccatgaaaccatctagctttcca

SEQ ID NO: 1788159 - DNA, 25 bp, Homo sapien
tagtttggagattgatgtcaccacc

SEQ ID NO: 1788160 - DNA, 25 bp, Homo sapien
aatcttgacaagtaaaacgtccctg

SEQ ID NO: 1788161 - DNA, 25 bp, Homo sapien
tgctcttccgaggtaaatcttgaca

SEQ ID NO: 1788162 - DNA, 25 bp, Homo sapien
ctttgtgctgcgcacacaccatgct

SEQ ID NO: 1788163 - DNA, 25 bp, Homo sapien
cctgcacatgggcagtgcttgtgtg

SEQ ID NO: 1788164 - DNA, 25 bp, Homo sapien
ccttcccaacccaaggcctgaccat

SEQ ID NO: 1788165 - DNA, 25 bp, Homo sapien
aaggcctgaccatggctgcactgct

SEQ ID NO: 1788166 - DNA, 25 bp, Homo sapien
tgaccatggctgcactgctttcatt

SEQ ID NO: 1788167 - DNA, 25 bp, Homo sapien
cttcccaacccaaggcctgaccatg

SEQ ID NO: 1788168 - DNA, 25 bp, Homo sapien
tctgttttgcactgtgatatctgac

SEQ ID NO: 1788169 - DNA, 25 bp, Homo sapien
cactgtgatatctgacggttttgag

SEQ ID NO: 1788170 - DNA, 25 bp, Homo sapien
tgtaagaggtcctaagataacttct

SEQ ID NO: 1788171 - DNA, 25 bp, Homo sapien
ttttgcactgtgatatctgacggtt

SEQ ID NO: 1788172 - DNA, 25 bp, Homo sapien
ttcccacgctacacgtctgcttgtc

SEQ ID NO: 1788173 - DNA, 25 bp, Homo sapien
aggagcttgctctcccttaaacgtt

SEQ ID NO: 1788174 - DNA, 25 bp, Homo sapien
cacgctacacgtctgcttgtctttt

SEQ ID NO: 1788175 - DNA, 25 bp, Homo sapien
tcattacctttaaaagagaggagct

SEQ ID NO: 1788176 - DNA, 25 bp, Homo sapien
tcattttccatttacttgaatttca

SEQ ID NO: 1788177 - DNA, 25 bp, Homo sapien
tccatttacttgaatttcaaaagac

SEQ ID NO: 1788178 - DNA, 25 bp, Homo sapien
cattttccatttacttgaatttcaa

SEQ ID NO: 1788179 - DNA, 25 bp, Homo sapien
ttccatttacttgaatttcaaaaga

SEQ ID NO: 1788180 - DNA, 25 bp, Homo sapien
tcttaaaaatcatcctgcgccagtc

SEQ ID NO: 1788181 - DNA, 25 bp, Homo sapien
tgttttaagatgataggccaccaga

SEQ ID NO: 1788182 - DNA, 25 bp, Homo sapien
gcgccagtcttcacttgtccctgaa

SEQ ID NO: 1788183 - DNA, 25 bp, Homo sapien
tggacccctgagtcactgaatggaa

SEQ ID NO: 1788184 - DNA, 25 bp, Homo sapien
tagttaaaaatcacactcgcatggt

SEQ ID NO: 1788185 - DNA, 25 bp, Homo sapien
tttaagagcatcacaatcaagaact

SEQ ID NO: 1788186 - DNA, 25 bp, Homo sapien
tcgcatggtaagtgcttagaatttc

SEQ ID NO: 1788187 - DNA, 25 bp, Homo sapien
ctgccaccttaacattcagattggg

SEQ ID NO: 1788188 - DNA, 25 bp, Homo sapien
gcttataaagtcatctgaataaccc

SEQ ID NO: 1788189 - DNA, 25 bp, Homo sapien
agaccatggctaactgctttaaaag

SEQ ID NO: 1788190 - DNA, 25 bp, Homo sapien
ctcaagacactgaccttgtccaaat

SEQ ID NO: 1788191 - DNA, 25 bp, Homo sapien
ttagaccatggctaactgctttaaa

SEQ ID NO: 1788192 - DNA, 25 bp, Homo sapien
cattaagtactctaggatgccagcc

SEQ ID NO: 1788193 - DNA, 25 bp, Homo sapien
ctgtgatgacttcggccaattcatt

SEQ ID NO: 1788194 - DNA, 25 bp, Homo sapien
actctaggatgccagccattgggac

SEQ ID NO: 1788195 - DNA, 25 bp, Homo sapien
cggccaattcattaagtactctagg

SEQ ID NO: 1788196 - DNA, 25 bp, Homo sapien
agttatgactcaaatgccttagcca

SEQ ID NO: 1788197 - DNA, 25 bp, Homo sapien
aaacaattgacagcctcaggagcca

SEQ ID NO: 1788198 - DNA, 25 bp, Homo sapien
gaaaataaaactaccagcatccagg

SEQ ID NO: 1788199 - DNA, 25 bp, Homo sapien
tgcagtactacttgggagctctaaa

SEQ ID NO: 1788200 - DNA, 25 bp, Homo sapien
gaaaattttgctatgaccctccaga

SEQ ID NO: 1788201 - DNA, 25 bp, Homo sapien
cacggatgcgacacctggaaatgag

SEQ ID NO: 1788202 - DNA, 25 bp, Homo sapien
catgacggtgccgatgggaacttac

SEQ ID NO: 1788203 - DNA, 25 bp, Homo sapien
gaaattgctcgtatgctcccagttg

SEQ ID NO: 1788204 - DNA, 25 bp, Homo sapien
tcaagcaggtgctttccagtccctg

SEQ ID NO: 1788205 - DNA, 25 bp, Homo sapien
cagtccctggtatatctggtttttc

SEQ ID NO: 1788206 - DNA, 25 bp, Homo sapien
gattcttcccagaagatgctatcgg

SEQ ID NO: 1788207 - DNA, 25 bp, Homo sapien
tagaaaagagtttgccgatccacca

SEQ ID NO: 1788208 - DNA, 25 bp, Homo sapien
atttttcaaccccctgtgcaagaga

SEQ ID NO: 1788209 - DNA, 25 bp, Homo sapien
ttatttttcaaccccctgtgcaaga

SEQ ID NO: 1788210 - DNA, 25 bp, Homo sapien
tatttttcaaccccctgtgcaagag

SEQ ID NO: 1788211 - DNA, 25 bp, Homo sapien
tttttcaaccccctgtgcaagagac

SEQ ID NO: 1788212 - DNA, 25 bp, Homo sapien
tggctttagcaacccgaatagtatc

SEQ ID NO: 1788213 - DNA, 25 bp, Homo sapien
tattgaagagcggacatatgtttgc

SEQ ID NO: 1788214 - DNA, 25 bp, Homo sapien
tagatgcaatgttccacccttcatg

SEQ ID NO: 1788215 - DNA, 25 bp, Homo sapien
tactgtaagcacaagatgtcagctg

SEQ ID NO: 1788216 - DNA, 25 bp, Homo sapien
cagaatcacacaagagaaggcgaca

SEQ ID NO: 1788217 - DNA, 25 bp, Homo sapien
gcactctgcgtctaatgaacacgga

SEQ ID NO: 1788218 - DNA, 25 bp, Homo sapien
gactggtgactgtgttaagcatgca

SEQ ID NO: 1788219 - DNA, 25 bp, Homo sapien
gattcagggctgtaggaaccatagc

SEQ ID NO: 1788220 - DNA, 25 bp, Homo sapien
gatatgtggtccttacatttgattc

SEQ ID NO: 1788221 - DNA, 25 bp, Homo sapien
cctgcttcttgatatgtggtcctta

SEQ ID NO: 1788222 - DNA, 25 bp, Homo sapien
tttgattctgcattaagtttagtcc

SEQ ID NO: 1788223 - DNA, 25 bp, Homo sapien
acatttgattctgcattaagtttag

SEQ ID NO: 1788224 - DNA, 25 bp, Homo sapien
cataagttgattgtgctgtcaaata

SEQ ID NO: 1788225 - DNA, 25 bp, Homo sapien
tatggttggctatcataagttgatt

SEQ ID NO: 1788226 - DNA, 25 bp, Homo sapien
tggctatcataagttgattgtgctg

SEQ ID NO: 1788227 - DNA, 25 bp, Homo sapien
tacaattaagttatggttggctatc

SEQ ID NO: 1788228 - DNA, 25 bp, Homo sapien
tcgtcgttgcaccaacaccggtcat

SEQ ID NO: 1788229 - DNA, 25 bp, Homo sapien
tacaacgtcgcctggcatggcaatt

SEQ ID NO: 1788230 - DNA, 25 bp, Homo sapien
cctggcatggcaattgctctcagga

SEQ ID NO: 1788231 - DNA, 25 bp, Homo sapien
tgctctcaggagtgtcgtcgttgca

SEQ ID NO: 1788232 - DNA, 25 bp, Homo sapien
gaaacccacagattcacaggacaaa

SEQ ID NO: 1788233 - DNA, 25 bp, Homo sapien
aggacaaaaacccattgactagacg

SEQ ID NO: 1788234 - DNA, 25 bp, Homo sapien
attgactagacgcactcctcctgta

SEQ ID NO: 1788235 - DNA, 25 bp, Homo sapien
ccacagattcacaggacaaaaaccc

SEQ ID NO: 1788236 - DNA, 25 bp, Homo sapien
aggcggagccacggaggacagaggg

SEQ ID NO: 1788237 - DNA, 25 bp, Homo sapien
gaggcggagccacggaggacagagg

SEQ ID NO: 1788238 - DNA, 25 bp, Homo sapien
ggcggagccacggaggacagaggga

SEQ ID NO: 1788239 - DNA, 25 bp, Homo sapien
cacagaccgatagagacttggtgga

SEQ ID NO: 1788240 - DNA, 25 bp, Homo sapien
aggacacagaccgatagagacttgg

SEQ ID NO: 1788241 - DNA, 25 bp, Homo sapien
ggagaggacacagaccgatagagac

SEQ ID NO: 1788242 - DNA, 25 bp, Homo sapien
gaccgatagagacttggtggatgaa

SEQ ID NO: 1788243 - DNA, 25 bp, Homo sapien
tccccagacaaaattagcagctcct

SEQ ID NO: 1788244 - DNA, 25 bp, Homo sapien
ggcctatcagctcatctttctacag

SEQ ID NO: 1788245 - DNA, 25 bp, Homo sapien
tgttcactctgtgtcagatgccacc

SEQ ID NO: 1788246 - DNA, 25 bp, Homo sapien
tcaggcttttctcgatctccccaga

SEQ ID NO: 1788247 - DNA, 25 bp, Homo sapien
cactgtgatgccaagaacagtgtca

SEQ ID NO: 1788248 - DNA, 25 bp, Homo sapien
tccggggaccaaacaacaacattca

SEQ ID NO: 1788249 - DNA, 25 bp, Homo sapien
cacaagggctacacgtggctccggg

SEQ ID NO: 1788250 - DNA, 25 bp, Homo sapien
aacagtgtcattgctcattcccaca

SEQ ID NO: 1788251 - DNA, 25 bp, Homo sapien
ctttatgattgcctatttgcaattt

SEQ ID NO: 1788252 - DNA, 25 bp, Homo sapien
tgcctatttgcaatttgctatattc

SEQ ID NO: 1788253 - DNA, 25 bp, Homo sapien
tgctatattccaaatttttccctac

SEQ ID NO: 1788254 - DNA, 25 bp, Homo sapien
tatttgcaatttgctatattccaaa

SEQ ID NO: 1788255 - DNA, 25 bp, Homo sapien
tggtgagagagactctgaagacaac

SEQ ID NO: 1788256 - DNA, 25 bp, Homo sapien
tctttgggaatgtcaggctccagct

SEQ ID NO: 1788257 - DNA, 25 bp, Homo sapien
cctatctttgggaatgtcaggctcc

SEQ ID NO: 1788258 - DNA, 25 bp, Homo sapien
ttgggaatgtcaggctccagctggt

SEQ ID NO: 1788259 - DNA, 25 bp, Homo sapien
ggagcaaaacgcacactccaggtgg

SEQ ID NO: 1788260 - DNA, 25 bp, Homo sapien
aaaacgcacactccaggtggctgag

SEQ ID NO: 1788261 - DNA, 25 bp, Homo sapien
ctggaggagcaaaacgcacactcca

SEQ ID NO: 1788262 - DNA, 25 bp, Homo sapien
cctgtgttctttggggcactgccac

SEQ ID NO: 1788263 - DNA, 25 bp, Homo sapien
tgaaacatgagtccctcctggcact

SEQ ID NO: 1788264 - DNA, 25 bp, Homo sapien
ctcaggcctgggatatgtatgcgga

SEQ ID NO: 1788265 - DNA, 25 bp, Homo sapien
cactaaatatgagcagactgattcc

SEQ ID NO: 1788266 - DNA, 25 bp, Homo sapien
caggattcatgtaaaccctccagga

SEQ ID NO: 1788267 - DNA, 25 bp, Homo sapien
ttaacggtgcctctagcagtaagaa

SEQ ID NO: 1788268 - DNA, 25 bp, Homo sapien
agactatacagctgatctaaatggc

SEQ ID NO: 1788269 - DNA, 25 bp, Homo sapien
tccagtaaactcttggtggacccaa

SEQ ID NO: 1788270 - DNA, 25 bp, Homo sapien
gccaccacaattagccaatgcctta

SEQ ID NO: 1788271 - DNA, 25 bp, Homo sapien
aggatattcttgacacagccccaca

SEQ ID NO: 1788272 - DNA, 25 bp, Homo sapien
tacaacaggatattcttgacacagc

SEQ ID NO: 1788273 - DNA, 25 bp, Homo sapien
ggtgctacaacaggatattcttgac

SEQ ID NO: 1788274 - DNA, 25 bp, Homo sapien
ggaagaggtgctacaacaggatatt

SEQ ID NO: 1788275 - DNA, 25 bp, Homo sapien
agctgctgtgcacaagagtgagaat

SEQ ID NO: 1788276 - DNA, 25 bp, Homo sapien
tgagaatgaacctgtaagtcctcat

SEQ ID NO: 1788277 - DNA, 25 bp, Homo sapien
tgctgtgcacaagagtgagaatgaa

SEQ ID NO: 1788278 - DNA, 25 bp, Homo sapien
tgcacaagagtgagaatgaacctgt

SEQ ID NO: 1788279 - DNA, 25 bp, Homo sapien
tccaaataaaggtcaattgctccat

SEQ ID NO: 1788280 - DNA, 25 bp, Homo sapien
gacttcaccgtagccaatgaagccc

SEQ ID NO: 1788281 - DNA, 25 bp, Homo sapien
tgatgagggtcctttgacttcaccg

SEQ ID NO: 1788282 - DNA, 25 bp, Homo sapien
cccaaattgagctccccagcaagtg

SEQ ID NO: 1788283 - DNA, 25 bp, Homo sapien
ggaagtctccccactaacaggatca

SEQ ID NO: 1788284 - DNA, 25 bp, Homo sapien
tgaagtcaagacctacagacctggg

SEQ ID NO: 1788285 - DNA, 25 bp, Homo sapien
tattcagtgagcgatgcctctcaag

SEQ ID NO: 1788286 - DNA, 25 bp, Homo sapien
ttcagagtgacatcttgccagggca

SEQ ID NO: 1788287 - DNA, 25 bp, Homo sapien
ttctagcagaagaatggttgtaagg

SEQ ID NO: 1788288 - DNA, 25 bp, Homo sapien
tttctagcagaagaatggttgtaag

SEQ ID NO: 1788289 - DNA, 25 bp, Homo sapien
tctatttctagcagaagaatggttg

SEQ ID NO: 1788290 - DNA, 25 bp, Homo sapien
tatttctagcagaagaatggttgta

SEQ ID NO: 1788291 - DNA, 25 bp, Homo sapien
gatgcagccaaaagagtaccaagca

SEQ ID NO: 1788292 - DNA, 25 bp, Homo sapien
tatgtttcttgatgacttgcagatg

SEQ ID NO: 1788293 - DNA, 25 bp, Homo sapien
tgacttgcagatgcagccaaaagag

SEQ ID NO: 1788294 - DNA, 25 bp, Homo sapien
aaaagagtaccaagcacatttctcc

SEQ ID NO: 1788295 - DNA, 25 bp, Homo sapien
tttcattcattgagcatacatccct

SEQ ID NO: 1788296 - DNA, 25 bp, Homo sapien
gcgatctcacttcactacaaactct

SEQ ID NO: 1788297 - DNA, 25 bp, Homo sapien
cattcattgagcatacatccctttt

SEQ ID NO: 1788298 - DNA, 25 bp, Homo sapien
cactatgcccagcttgtttatactt

SEQ ID NO: 1788299 - DNA, 25 bp, Homo sapien
taaaccctgtacactggagctcact

SEQ ID NO: 1788300 - DNA, 25 bp, Homo sapien
ggagctcactgcttactcacaggca

SEQ ID NO: 1788301 - DNA, 25 bp, Homo sapien
taatttctcagactacttagcggag

SEQ ID NO: 1788302 - DNA, 25 bp, Homo sapien
ttacatcaggatagcagcagcagcg

SEQ ID NO: 1788303 - DNA, 25 bp, Homo sapien
aaattttcaatcgaggtagaacgcg

SEQ ID NO: 1788304 - DNA, 25 bp, Homo sapien
gccacatcttaacgcggccagagca

SEQ ID NO: 1788305 - DNA, 25 bp, Homo sapien
gaacgcgaagggaagtagccacatc

SEQ ID NO: 1788306 - DNA, 25 bp, Homo sapien
ttcaatcgaggtagaacgcgaaggg

SEQ ID NO: 1788307 - DNA, 25 bp, Homo sapien
gaaatgattacgtgcatgcagaaga

SEQ ID NO: 1788308 - DNA, 25 bp, Homo sapien
tctttttgttgtagtacatgtagcc

SEQ ID NO: 1788309 - DNA, 25 bp, Homo sapien
ccaattatgcacatggtgtagaggg

SEQ ID NO: 1788310 - DNA, 25 bp, Homo sapien
tggcaggtgtcaaagtggatctttt

SEQ ID NO: 1788311 - DNA, 25 bp, Homo sapien
tctgcttattcctgtccaggtccat

SEQ ID NO: 1788312 - DNA, 25 bp, Homo sapien
ctgcttattcctgtccaggtccatt

SEQ ID NO: 1788313 - DNA, 25 bp, Homo sapien
tgcttattcctgtccaggtccattt

SEQ ID NO: 1788314 - DNA, 25 bp, Homo sapien
ctgcacacgcaggacagaccccttt

SEQ ID NO: 1788315 - DNA, 25 bp, Homo sapien
aaagactgcacacgcaggacagacc

SEQ ID NO: 1788316 - DNA, 25 bp, Homo sapien
caaagactgcacacgcaggacagac

SEQ ID NO: 1788317 - DNA, 25 bp, Homo sapien
cacttattagtggatcagaatcgca

SEQ ID NO: 1788318 - DNA, 25 bp, Homo sapien
tgcattgtagagaccacaggaccac

SEQ ID NO: 1788319 - DNA, 25 bp, Homo sapien
taaaaggtgtttgctacaagtagtc

SEQ ID NO: 1788320 - DNA, 25 bp, Homo sapien
tccaactgagtgtaacgatcacctg

SEQ ID NO: 1788321 - DNA, 25 bp, Homo sapien
cggaaaaaacatggagctaggtgac

SEQ ID NO: 1788322 - DNA, 25 bp, Homo sapien
tacaagaacattgagggttaggcct

SEQ ID NO: 1788323 - DNA, 25 bp, Homo sapien
tgggaagtctaagccagcagatttg

SEQ ID NO: 1788324 - DNA, 25 bp, Homo sapien
tcagcccataacatgagtggagcgg

SEQ ID NO: 1788325 - DNA, 25 bp, Homo sapien
tctgtgataaccatatgtgcccatt

SEQ ID NO: 1788326 - DNA, 25 bp, Homo sapien
gtgataaccatatgtgcccattttc

SEQ ID NO: 1788327 - DNA, 25 bp, Homo sapien
ctgtgataaccatatgtgcccattt

SEQ ID NO: 1788328 - DNA, 25 bp, Homo sapien
tttctgtgataaccatatgtgccca

SEQ ID NO: 1788329 - DNA, 25 bp, Homo sapien
tatagtcatcctgtaatagcgtggg

SEQ ID NO: 1788330 - DNA, 25 bp, Homo sapien
aaatggatcactgtcccaaaaggag

SEQ ID NO: 1788331 - DNA, 25 bp, Homo sapien
cagtattctggcaaaacaacacaca

SEQ ID NO: 1788332 - DNA, 25 bp, Homo sapien
tacttcttgaaggtagcggcataat

SEQ ID NO: 1788333 - DNA, 25 bp, Homo sapien
ttgtgcagaaaacataagtatatac

SEQ ID NO: 1788334 - DNA, 25 bp, Homo sapien
tatatataacatgggagaggctggt

SEQ ID NO: 1788335 - DNA, 25 bp, Homo sapien
cactgtaagactgaaatttgaaacg

SEQ ID NO: 1788336 - DNA, 25 bp, Homo sapien
ctagattaggaaataaccgatgtcc

SEQ ID NO: 1788337 - DNA, 25 bp, Homo sapien
aggatctcagtttgcccctccgggt

SEQ ID NO: 1788338 - DNA, 25 bp, Homo sapien
gtcaggtgatctcccgaggaaacca

SEQ ID NO: 1788339 - DNA, 25 bp, Homo sapien
ctcttaaactggcaggtggcccaca

SEQ ID NO: 1788340 - DNA, 25 bp, Homo sapien
gatccagggctttagtagcgcagag

SEQ ID NO: 1788341 - DNA, 25 bp, Homo sapien
gaatcctgtgagctatataaaaatc

SEQ ID NO: 1788342 - DNA, 25 bp, Homo sapien
ctagtaaataggcagacagctctat

SEQ ID NO: 1788343 - DNA, 25 bp, Homo sapien
tagcatttactatgtctcaggaact

SEQ ID NO: 1788344 - DNA, 25 bp, Homo sapien
tacagatgtgatgtctaagactcag

SEQ ID NO: 1788345 - DNA, 25 bp, Homo sapien
tataaattatggctctgttacccca

SEQ ID NO: 1788346 - DNA, 25 bp, Homo sapien
tgctgtggtgcatacaacttttcct

SEQ ID NO: 1788347 - DNA, 25 bp, Homo sapien
caaatgttttgtagagtgctgcaac

SEQ ID NO: 1788348 - DNA, 25 bp, Homo sapien
tgtcacccagtaaggtttctcaaag

SEQ ID NO: 1788349 - DNA, 25 bp, Homo sapien
tagcagttccgacgtccctaggtaa

SEQ ID NO: 1788350 - DNA, 25 bp, Homo sapien
tcttggtgataatgtcctctgcagg

SEQ ID NO: 1788351 - DNA, 25 bp, Homo sapien
ctctgcaggctaggtggaaatttct

SEQ ID NO: 1788352 - DNA, 25 bp, Homo sapien
aaatggttcattcctcatacagagc

SEQ ID NO: 1788353 - DNA, 25 bp, Homo sapien
tcttctctgtacgttaagggctggg

SEQ ID NO: 1788354 - DNA, 25 bp, Homo sapien
tgttacgcagcctaagaaacgagat

SEQ ID NO: 1788355 - DNA, 25 bp, Homo sapien
ggagcaatccatttttgaacagctg

SEQ ID NO: 1788356 - DNA, 25 bp, Homo sapien
taaagataccttcaggctgggcgca

SEQ ID NO: 1788357 - DNA, 25 bp, Homo sapien
tatgcacatactacacacggagaga

SEQ ID NO: 1788358 - DNA, 25 bp, Homo sapien
gcagggctgctcgttgatctactcc

SEQ ID NO: 1788359 - DNA, 25 bp, Homo sapien
gatgtcaaaagtgaactcatcagcc

SEQ ID NO: 1788360 - DNA, 25 bp, Homo sapien
gcatgtgaatttgccgagcctcttc

SEQ ID NO: 1788361 - DNA, 25 bp, Homo sapien
gaagcatagcaagcttaaattccaa

SEQ ID NO: 1788362 - DNA, 25 bp, Homo sapien
taatccactatcaagtatactcatt

SEQ ID NO: 1788363 - DNA, 25 bp, Homo sapien
tgttttaatccactatcaagtatac

SEQ ID NO: 1788364 - DNA, 25 bp, Homo sapien
tacttttattagaatagtactgtaa

SEQ ID NO: 1788365 - DNA, 25 bp, Homo sapien
tggatcccacataaaactcaggctc

SEQ ID NO: 1788366 - DNA, 25 bp, Homo sapien
taattcagccaaatcctccacaaac

SEQ ID NO: 1788367 - DNA, 25 bp, Homo sapien
tctgagaaccaagagtgtggatgct

SEQ ID NO: 1788368 - DNA, 25 bp, Homo sapien
ccatggagattgtaataattcagcc

SEQ ID NO: 1788369 - DNA, 25 bp, Homo sapien
tgtacatagcttcacaatacacctt

SEQ ID NO: 1788370 - DNA, 25 bp, Homo sapien
gaatgtgttcacctgtgtacatagc

SEQ ID NO: 1788371 - DNA, 25 bp, Homo sapien
ttcgttccattgaaggtgtatgaga

SEQ ID NO: 1788372 - DNA, 25 bp, Homo sapien
cagaatggtttagttcgttccattg

SEQ ID NO: 1788373 - DNA, 25 bp, Homo sapien
tggtcgtagccttcagaggtttccc

SEQ ID NO: 1788374 - DNA, 25 bp, Homo sapien
tttgattctggagcaaagccgtgag

SEQ ID NO: 1788375 - DNA, 25 bp, Homo sapien
tttgttggctgcctttgtgactgtc

SEQ ID NO: 1788376 - DNA, 25 bp, Homo sapien
gccgtgagagcttttgttggctgcc

SEQ ID NO: 1788377 - DNA, 25 bp, Homo sapien
gcctttttcagtttcgtagcaacca

SEQ ID NO: 1788378 - DNA, 25 bp, Homo sapien
tatctagacattgcactaggctcta

SEQ ID NO: 1788379 - DNA, 25 bp, Homo sapien
tactgcagggtaacttgcccaatca

SEQ ID NO: 1788380 - DNA, 25 bp, Homo sapien
aagccactaacaagtatactgcagg

SEQ ID NO: 1788381 - DNA, 25 bp, Homo sapien
gtgtgccaggggctgaagcttttat

SEQ ID NO: 1788382 - DNA, 25 bp, Homo sapien
tacacagactgtatattccattggg

SEQ ID NO: 1788383 - DNA, 25 bp, Homo sapien
gtttgtgagatgtacgtaacttcgt

SEQ ID NO: 1788384 - DNA, 25 bp, Homo sapien
aacttcgtacttgaataattccttg

SEQ ID NO: 1788385 - DNA, 25 bp, Homo sapien
aattttcatctctagcaagtcctag

SEQ ID NO: 1788386 - DNA, 25 bp, Homo sapien
gaaaagctctcacatggtatttcct

SEQ ID NO: 1788387 - DNA, 25 bp, Homo sapien
taaggcgaaaagtgcctacttgctg

SEQ ID NO: 1788388 - DNA, 25 bp, Homo sapien
tctcctggcattatgaaatattaac

SEQ ID NO: 1788389 - DNA, 25 bp, Homo sapien
atattggcagaaatggggcccaaga

SEQ ID NO: 1788390 - DNA, 25 bp, Homo sapien
tggcagaaatggggcccaagaaatt

SEQ ID NO: 1788391 - DNA, 25 bp, Homo sapien
gcagaaatggggcccaagaaattta

SEQ ID NO: 1788392 - DNA, 25 bp, Homo sapien
attggcagaaatggggcccaagaaa

SEQ ID NO: 1788393 - DNA, 25 bp, Homo sapien
tgagagcaccctgagtgaaaagttt

SEQ ID NO: 1788394 - DNA, 25 bp, Homo sapien
tgagtgaaaagtttgccctaggcat

SEQ ID NO: 1788395 - DNA, 25 bp, Homo sapien
cattagccggcagccacaaaaatgc

SEQ ID NO: 1788396 - DNA, 25 bp, Homo sapien
ccactgtttcattagccggcagcca

SEQ ID NO: 1788397 - DNA, 25 bp, Homo sapien
agtgtacaatatctaaggacctcat

SEQ ID NO: 1788398 - DNA, 25 bp, Homo sapien
ttatccaagtgtacaatatctaagg

SEQ ID NO: 1788399 - DNA, 25 bp, Homo sapien
tctgaagcattatccaagtgtacaa

SEQ ID NO: 1788400 - DNA, 25 bp, Homo sapien
ttacttctgaagcattatccaagtg

SEQ ID NO: 1788401 - DNA, 25 bp, Homo sapien
cctgtttaaagacgtgcaatggagt

SEQ ID NO: 1788402 - DNA, 25 bp, Homo sapien
gaagacaaacggaacacatagggag

SEQ ID NO: 1788403 - DNA, 25 bp, Homo sapien
tccatgcggagattagagtgatgca

SEQ ID NO: 1788404 - DNA, 25 bp, Homo sapien
caaagaatgccaagggtttccagca

SEQ ID NO: 1788405 - DNA, 25 bp, Homo sapien
atatctgtcccaagttcacatgagg

SEQ ID NO: 1788406 - DNA, 25 bp, Homo sapien
aggggcatcccctcagagattctac

SEQ ID NO: 1788407 - DNA, 25 bp, Homo sapien
tgtcacagaataacagctgctgtca

SEQ ID NO: 1788408 - DNA, 25 bp, Homo sapien
gagccagaaaggaatatctgtccca

SEQ ID NO: 1788409 - DNA, 25 bp, Homo sapien
cctatctgaaacgatgacatggatg

SEQ ID NO: 1788410 - DNA, 25 bp, Homo sapien
cttgggtcctatctgaaacgatgac

SEQ ID NO: 1788411 - DNA, 25 bp, Homo sapien
gaaacgatgacatggatgttatcta

SEQ ID NO: 1788412 - DNA, 25 bp, Homo sapien
catggatgttatctataaatgtctg

SEQ ID NO: 1788413 - DNA, 25 bp, Homo sapien
tatgatgtcaggttcatcgtgaaag

SEQ ID NO: 1788414 - DNA, 25 bp, Homo sapien
tcaggttcatcgtgaaaggtcagac

SEQ ID NO: 1788415 - DNA, 25 bp, Homo sapien
ccaagatactatgatgtcaggttca

SEQ ID NO: 1788416 - DNA, 25 bp, Homo sapien
ggatggacaccaagatactatgatg

SEQ ID NO: 1788417 - DNA, 25 bp, Homo sapien
aaatacctctagttatatacagtgg

SEQ ID NO: 1788418 - DNA, 25 bp, Homo sapien
tatataataggatctttcctcccag

SEQ ID NO: 1788419 - DNA, 25 bp, Homo sapien
gaaataagcccaacagaatcacatg

SEQ ID NO: 1788420 - DNA, 25 bp, Homo sapien
catggatagaatgctactgtgccct

SEQ ID NO: 1788421 - DNA, 25 bp, Homo sapien
cgggcttctcggtcctcatacaaaa

SEQ ID NO: 1788422 - DNA, 25 bp, Homo sapien
gcagcaatgactactcggccaaatg

SEQ ID NO: 1788423 - DNA, 25 bp, Homo sapien
gtcctgagcaaacaccctaagaatg

SEQ ID NO: 1788424 - DNA, 25 bp, Homo sapien
tcattgcccacgcaacaacgggctt

SEQ ID NO: 1788425 - DNA, 25 bp, Homo sapien
gagtccacgggcactaagcttaagg

SEQ ID NO: 1788426 - DNA, 25 bp, Homo sapien
taaggcatcagcctgcgcagataaa

SEQ ID NO: 1788427 - DNA, 25 bp, Homo sapien
tatccctattgcttgcgcagaagca

SEQ ID NO: 1788428 - DNA, 25 bp, Homo sapien
gcagaagcagttgtgaaatcgcagc

SEQ ID NO: 1788429 - DNA, 25 bp, Homo sapien
aggaaacgtattacacgctcatcaa

SEQ ID NO: 1788430 - DNA, 25 bp, Homo sapien
ctgtccaccaaggaggcgtcttggt

SEQ ID NO: 1788431 - DNA, 25 bp, Homo sapien
tcatcaatctccgttccaccttgga

SEQ ID NO: 1788432 - DNA, 25 bp, Homo sapien
gcgtcttggtggatgcaaaggaaac

SEQ ID NO: 1788433 - DNA, 25 bp, Homo sapien
tgaattcccctggcaaatgtgtcat

SEQ ID NO: 1788434 - DNA, 25 bp, Homo sapien
ctcgccttggacagtctccctcact

SEQ ID NO: 1788435 - DNA, 25 bp, Homo sapien
tcgccttggacagtctccctcactc

SEQ ID NO: 1788436 - DNA, 25 bp, Homo sapien
ctcctcgccttggacagtctccctc

SEQ ID NO: 1788437 - DNA, 25 bp, Homo sapien
ctgcgatgctctatcttgggctcac

SEQ ID NO: 1788438 - DNA, 25 bp, Homo sapien
ctctcatttgctcggctttcaagga

SEQ ID NO: 1788439 - DNA, 25 bp, Homo sapien
cagtgtaacggaatcaagcctttca

SEQ ID NO: 1788440 - DNA, 25 bp, Homo sapien
tccctgtgttgaagtgccatgtgct

SEQ ID NO: 1788441 - DNA, 25 bp, Homo sapien
gatttggaggtatatgattggcagc

SEQ ID NO: 1788442 - DNA, 25 bp, Homo sapien
gagcctttcgactcattgcagggag

SEQ ID NO: 1788443 - DNA, 25 bp, Homo sapien
gctgagaagtaaagagggcaccgct

SEQ ID NO: 1788444 - DNA, 25 bp, Homo sapien
gagttttccatgagccctgagtcct

SEQ ID NO: 1788445 - DNA, 25 bp, Homo sapien
tatctggcatgacagagctccaccg

SEQ ID NO: 1788446 - DNA, 25 bp, Homo sapien
gactgctagattgaaggataatgcc

SEQ ID NO: 1788447 - DNA, 25 bp, Homo sapien
tgaactcctaaaaggtggactgcta

SEQ ID NO: 1788448 - DNA, 25 bp, Homo sapien
ggtgtatgctcagggtgaactccta

SEQ ID NO: 1788449 - DNA, 25 bp, Homo sapien
gctcaaagcagacaatcaggaactg

SEQ ID NO: 1788450 - DNA, 25 bp, Homo sapien
ggcctctggcctacattgtcagctt

SEQ ID NO: 1788451 - DNA, 25 bp, Homo sapien
tgccctaggagccatgctaccaact

SEQ ID NO: 1788452 - DNA, 25 bp, Homo sapien
ttgtcagcttctctagttttgaggc

SEQ ID NO: 1788453 - DNA, 25 bp, Homo sapien
gaggctttcagaattggaccaagtc

SEQ ID NO: 1788454 - DNA, 25 bp, Homo sapien
ctctggttattaagaattttccttg

SEQ ID NO: 1788455 - DNA, 25 bp, Homo sapien
agtcttgcactgaggatagttttaa

SEQ ID NO: 1788456 - DNA, 25 bp, Homo sapien
agaattttccttgatactttcccag

SEQ ID NO: 1788457 - DNA, 25 bp, Homo sapien
ctgaggatagttttaaccctctggt

SEQ ID NO: 1788458 - DNA, 25 bp, Homo sapien
cagttggaatacagtgccatccttg

SEQ ID NO: 1788459 - DNA, 25 bp, Homo sapien
cccttgtgggtagtgggctgttctc

SEQ ID NO: 1788460 - DNA, 25 bp, Homo sapien
tgttctcagcccagcgaatgaggat

SEQ ID NO: 1788461 - DNA, 25 bp, Homo sapien
tatattttaacatggctgtcaaggc

SEQ ID NO: 1788462 - DNA, 25 bp, Homo sapien
tttcttcacatacacaagctacaac

SEQ ID NO: 1788463 - DNA, 25 bp, Homo sapien
tacaacaacagctgtgaccacgtct

SEQ ID NO: 1788464 - DNA, 25 bp, Homo sapien
ctcccagtaataagctggccatgaa

SEQ ID NO: 1788465 - DNA, 25 bp, Homo sapien
ttttgcataaccctagtgcctggca

SEQ ID NO: 1788466 - DNA, 25 bp, Homo sapien
tccctgaagcaatgaagataaaaca

SEQ ID NO: 1788467 - DNA, 25 bp, Homo sapien
gcaatgaagataaaacaccacttac

SEQ ID NO: 1788468 - DNA, 25 bp, Homo sapien
caacactccctgaagcaatgaagat

SEQ ID NO: 1788469 - DNA, 25 bp, Homo sapien
cagacaaatcaacactccctgaagc

SEQ ID NO: 1788470 - DNA, 25 bp, Homo sapien
ttgaagtagtaccttgtaccagagc

SEQ ID NO: 1788471 - DNA, 25 bp, Homo sapien
tatcatttccaaagttcgcttatgc

SEQ ID NO: 1788472 - DNA, 25 bp, Homo sapien
ggttctcacaggcaattcacatgca

SEQ ID NO: 1788473 - DNA, 25 bp, Homo sapien
tgtaccagagcaaaacgaacactta

SEQ ID NO: 1788474 - DNA, 25 bp, Homo sapien
gggtacagggtgagggtggtcatac

SEQ ID NO: 1788475 - DNA, 25 bp, Homo sapien
cagggtgagggtggtcataccaggt

SEQ ID NO: 1788476 - DNA, 25 bp, Homo sapien
ccaggtcggggccaaatgtgagtta

SEQ ID NO: 1788477 - DNA, 25 bp, Homo sapien
gtgagggtggtcataccaggtcggg

SEQ ID NO: 1788478 - DNA, 25 bp, Homo sapien
aggtttccactgtgcccattaggaa

SEQ ID NO: 1788479 - DNA, 25 bp, Homo sapien
gacctgtctggtatagaaagggcat

SEQ ID NO: 1788480 - DNA, 25 bp, Homo sapien
cgcagtgcggtagacacattttgat

SEQ ID NO: 1788481 - DNA, 25 bp, Homo sapien
tctctcgtttgcatttctgtgtact

SEQ ID NO: 1788482 - DNA, 25 bp, Homo sapien
tgtgtacttgagttgctcatttgtg

SEQ ID NO: 1788483 - DNA, 25 bp, Homo sapien
tcaagcaccgatttggcattcatct

SEQ ID NO: 1788484 - DNA, 25 bp, Homo sapien
gatggcaattttgggaaattctgag

SEQ ID NO: 1788485 - DNA, 25 bp, Homo sapien
ctgagtcctcaagcaccgatttggc

SEQ ID NO: 1788486 - DNA, 25 bp, Homo sapien
tttttggactgattaatcagcgtgc

SEQ ID NO: 1788487 - DNA, 25 bp, Homo sapien
gacagaatttctgagagtcgaatgg

SEQ ID NO: 1788488 - DNA, 25 bp, Homo sapien
cctgacagaatttctgagagtcgaa

SEQ ID NO: 1788489 - DNA, 25 bp, Homo sapien
ttcctgacagaatttctgagagtcg

SEQ ID NO: 1788490 - DNA, 25 bp, Homo sapien
atttttcctgacagaatttctgaga

SEQ ID NO: 1788491 - DNA, 25 bp, Homo sapien
taaatagaacactaggctggatgct

SEQ ID NO: 1788492 - DNA, 25 bp, Homo sapien
gatgttgggcataagcataactcta

SEQ ID NO: 1788493 - DNA, 25 bp, Homo sapien
tgtactgcacttaaacttgggtgcc

SEQ ID NO: 1788494 - DNA, 25 bp, Homo sapien
cttgggtgcccaaagatgtattagt

SEQ ID NO: 1788495 - DNA, 25 bp, Homo sapien
tgcacatgtaccctaaaacttaaag

SEQ ID NO: 1788496 - DNA, 25 bp, Homo sapien
aggaattatagaattcaaacagtgc

SEQ ID NO: 1788497 - DNA, 25 bp, Homo sapien
aataaggaattatagaattcaaaca

SEQ ID NO: 1788498 - DNA, 25 bp, Homo sapien
taaggaattatagaattcaaacagt

SEQ ID NO: 1788499 - DNA, 25 bp, Homo sapien
atgaactccttgatggcggcaccca

SEQ ID NO: 1788500 - DNA, 25 bp, Homo sapien
ccacaacagacttggataggtgaca

SEQ ID NO: 1788501 - DNA, 25 bp, Homo sapien
aaggaattgacgcatttggttacca

SEQ ID NO: 1788502 - DNA, 25 bp, Homo sapien
tgatcactgtagttgcgggatacct

SEQ ID NO: 1788503 - DNA, 25 bp, Homo sapien
cagactggtagatcagaaataaatc

SEQ ID NO: 1788504 - DNA, 25 bp, Homo sapien
tcagaaataaatcacagatgtcaca

SEQ ID NO: 1788505 - DNA, 25 bp, Homo sapien
agactggtagatcagaaataaatca

SEQ ID NO: 1788506 - DNA, 25 bp, Homo sapien
gaaataaatcacagatgtcacacat

SEQ ID NO: 1788507 - DNA, 25 bp, Homo sapien
taaaggtagctttggtgcaagcctc

SEQ ID NO: 1788508 - DNA, 25 bp, Homo sapien
gcataattttacaacgtgaaatgct

SEQ ID NO: 1788509 - DNA, 25 bp, Homo sapien
gacttgggctcatttgactgcctgg

SEQ ID NO: 1788510 - DNA, 25 bp, Homo sapien
tggacagcggctgtttagaacagag

SEQ ID NO: 1788511 - DNA, 25 bp, Homo sapien
catgggatcgcatgactgggcccac

SEQ ID NO: 1788512 - DNA, 25 bp, Homo sapien
tttattactctcacatcccatggga

SEQ ID NO: 1788513 - DNA, 25 bp, Homo sapien
ctgggcccacgtatctttccaaaag

SEQ ID NO: 1788514 - DNA, 25 bp, Homo sapien
tgagcagaactaggctcttcacgtt

SEQ ID NO: 1788515 - DNA, 25 bp, Homo sapien
gaacttcatacaacctgggttcatg

SEQ ID NO: 1788516 - DNA, 25 bp, Homo sapien
tcttttagtgatgggcattcacaca

SEQ ID NO: 1788517 - DNA, 25 bp, Homo sapien
gttcatggacaccacgccacagaaa

SEQ ID NO: 1788518 - DNA, 25 bp, Homo sapien
caggtatctgtagccatggagttag

SEQ ID NO: 1788519 - DNA, 25 bp, Homo sapien
gggtcccatgctcgtccatcagcat

SEQ ID NO: 1788520 - DNA, 25 bp, Homo sapien
catcagcatgttgattcatgtacgt

SEQ ID NO: 1788521 - DNA, 25 bp, Homo sapien
catgtacgtttcctgaggttcatgt

SEQ ID NO: 1788522 - DNA, 25 bp, Homo sapien
gagaattctcagtaaacacggtcac

SEQ ID NO: 1788523 - DNA, 25 bp, Homo sapien
aaaatgtctgtgataaaaccaggag

SEQ ID NO: 1788524 - DNA, 25 bp, Homo sapien
tccaacacttgtttcaaggacttca

SEQ ID NO: 1788525 - DNA, 25 bp, Homo sapien
taatattgcctctgaagtaatgaaa

SEQ ID NO: 1788526 - DNA, 25 bp, Homo sapien
ctctgagtttcatggccctttaata

SEQ ID NO: 1788527 - DNA, 25 bp, Homo sapien
gagaggttccatgttaatatcacac

SEQ ID NO: 1788528 - DNA, 25 bp, Homo sapien
tgcgtacatcaacgtcaaaagcgtg

SEQ ID NO: 1788529 - DNA, 25 bp, Homo sapien
tcctttgagcactgccttctatggg

SEQ ID NO: 1788530 - DNA, 25 bp, Homo sapien
tgtgacctcaaatcctaagatctga

SEQ ID NO: 1788531 - DNA, 25 bp, Homo sapien
cagttcagctaatctgggtctgcca

SEQ ID NO: 1788532 - DNA, 25 bp, Homo sapien
tatcaaagcccaaagtagtccatgc

SEQ ID NO: 1788533 - DNA, 25 bp, Homo sapien
taagctggaactttgcaggcaagcc

SEQ ID NO: 1788534 - DNA, 25 bp, Homo sapien
gaaagacagaaagatgcctgacctg

SEQ ID NO: 1788535 - DNA, 25 bp, Homo sapien
cagcttcctggcactttgacatttc

SEQ ID NO: 1788536 - DNA, 25 bp, Homo sapien
gaccatatgttctagaaacttgcta

SEQ ID NO: 1788537 - DNA, 25 bp, Homo sapien
tcagcaggaagttcagtggaatttc

SEQ ID NO: 1788538 - DNA, 25 bp, Homo sapien
tcttggaaaccaacggaatgcagca

SEQ ID NO: 1788539 - DNA, 25 bp, Homo sapien
tcagataaatatgagctgtgcatgg

SEQ ID NO: 1788540 - DNA, 25 bp, Homo sapien
ctgagagggagttgcgacaaaagtt

SEQ ID NO: 1788541 - DNA, 25 bp, Homo sapien
cctgtaccatactgtagaaactgta

SEQ ID NO: 1788542 - DNA, 25 bp, Homo sapien
gtatttgaagatccttagggtcaga

SEQ ID NO: 1788543 - DNA, 25 bp, Homo sapien
agttctagagttttaagcagcggag

SEQ ID NO: 1788544 - DNA, 25 bp, Homo sapien
tcataaaaaggcagatggatactct

SEQ ID NO: 1788545 - DNA, 25 bp, Homo sapien
aacaattctgttaggtatgagccaa

SEQ ID NO: 1788546 - DNA, 25 bp, Homo sapien
caggtttctacagaactgaggctgg

SEQ ID NO: 1788547 - DNA, 25 bp, Homo sapien
caatgatacagtgataggagacctc

SEQ ID NO: 1788548 - DNA, 25 bp, Homo sapien
cagtaattcccataaggctgtggga

SEQ ID NO: 1788549 - DNA, 25 bp, Homo sapien
tgtcattatggctgttacccctgag

SEQ ID NO: 1788550 - DNA, 25 bp, Homo sapien
caattcagctgtgcacaataccgat

SEQ ID NO: 1788551 - DNA, 25 bp, Homo sapien
gacacggtgaagcagttgaatggca

SEQ ID NO: 1788552 - DNA, 25 bp, Homo sapien
tgccaaacactgtcagacgaacctg

SEQ ID NO: 1788553 - DNA, 25 bp, Homo sapien
tatgctggcagctatccttcctttg

SEQ ID NO: 1788554 - DNA, 25 bp, Homo sapien
tgcattgcagaagtggattgtccat

SEQ ID NO: 1788555 - DNA, 25 bp, Homo sapien
ttcttctgaaccacagttcctgtca

SEQ ID NO: 1788556 - DNA, 25 bp, Homo sapien
tctgaaccacagttcctgtcatgtg

SEQ ID NO: 1788557 - DNA, 25 bp, Homo sapien
gtttaattttgtatgcgtacatgtc

SEQ ID NO: 1788558 - DNA, 25 bp, Homo sapien
ctcttcttctgaaccacagttcctg

SEQ ID NO: 1788559 - DNA, 25 bp, Homo sapien
tagagttagattcctccagactttc

SEQ ID NO: 1788560 - DNA, 25 bp, Homo sapien
cacagcagctgttatacttgatgag

SEQ ID NO: 1788561 - DNA, 25 bp, Homo sapien
gctcaaggacagtgctagagttaga

SEQ ID NO: 1788562 - DNA, 25 bp, Homo sapien
gacagatggactactactacttcag

SEQ ID NO: 1788563 - DNA, 25 bp, Homo sapien
tctttagttgatggtgtcactccac

SEQ ID NO: 1788564 - DNA, 25 bp, Homo sapien
ggcgccatgctcgtaggaactttga

SEQ ID NO: 1788565 - DNA, 25 bp, Homo sapien
tgaccctttgagctaccctcgaaga

SEQ ID NO: 1788566 - DNA, 25 bp, Homo sapien
gaagattggctgtatggcgccatgc

SEQ ID NO: 1788567 - DNA, 25 bp, Homo sapien
ttcttagtctagctaacggcttgtc

SEQ ID NO: 1788568 - DNA, 25 bp, Homo sapien
catgattcattctcgataggatgta

SEQ ID NO: 1788569 - DNA, 25 bp, Homo sapien
tgatttaacctccttattagtggta

SEQ ID NO: 1788570 - DNA, 25 bp, Homo sapien
agagtttgagaagacttgctattac

SEQ ID NO: 1788571 - DNA, 25 bp, Homo sapien
ctgcctgatctttttcggcagacct

SEQ ID NO: 1788572 - DNA, 25 bp, Homo sapien
tctttttcggcagacctagaatctt

SEQ ID NO: 1788573 - DNA, 25 bp, Homo sapien
gatctttttcggcagacctagaatc

SEQ ID NO: 1788574 - DNA, 25 bp, Homo sapien
cctgatctttttcggcagacctaga

SEQ ID NO: 1788575 - DNA, 25 bp, Homo sapien
tcagggctgccctttcagactgcaa

SEQ ID NO: 1788576 - DNA, 25 bp, Homo sapien
gattaaaaacttgctcccagctgca

SEQ ID NO: 1788577 - DNA, 25 bp, Homo sapien
ggatcagcctgcacaaagcatttgg

SEQ ID NO: 1788578 - DNA, 25 bp, Homo sapien
cagtaggcaatttggaaacagctca

SEQ ID NO: 1788579 - DNA, 25 bp, Homo sapien
ggtacggcttcgtggtacggcctca

SEQ ID NO: 1788580 - DNA, 25 bp, Homo sapien
catggaggcctggacgtgtagcttt

SEQ ID NO: 1788581 - DNA, 25 bp, Homo sapien
taagtggtagggctgcttaggcaca

SEQ ID NO: 1788582 - DNA, 25 bp, Homo sapien
tacggcctcatgatatgctaagtgg

SEQ ID NO: 1788583 - DNA, 25 bp, Homo sapien
gaatgagaccgtcacctgcgtggct

SEQ ID NO: 1788584 - DNA, 25 bp, Homo sapien
tcacctgcgtggctcttctcgaagt

SEQ ID NO: 1788585 - DNA, 25 bp, Homo sapien
tcttctcgaagtcagctccaccatc

SEQ ID NO: 1788586 - DNA, 25 bp, Homo sapien
ttccagctgctaaattcattcttca

SEQ ID NO: 1788587 - DNA, 25 bp, Homo sapien
ccgttgggacctaaactggacagag

SEQ ID NO: 1788588 - DNA, 25 bp, Homo sapien
tttcttgaataggtggcagccacac

SEQ ID NO: 1788589 - DNA, 25 bp, Homo sapien
tccatggtctctcaatgatttgccc

SEQ ID NO: 1788590 - DNA, 25 bp, Homo sapien
cagaggaggcacatgtagattggca

SEQ ID NO: 1788591 - DNA, 25 bp, Homo sapien
agtggccagctctaatggaaggaca

SEQ ID NO: 1788592 - DNA, 25 bp, Homo sapien
catctcattcataggagtggccagc

SEQ ID NO: 1788593 - DNA, 25 bp, Homo sapien
gacttttggctcacaagccagggct

SEQ ID NO: 1788594 - DNA, 25 bp, Homo sapien
tgccttgtacaagctgacagaggta

SEQ ID NO: 1788595 - DNA, 25 bp, Homo sapien
gacatcgccagacaaaagtccgtga

SEQ ID NO: 1788596 - DNA, 25 bp, Homo sapien
ttctcccaaggagacgcaagccctg

SEQ ID NO: 1788597 - DNA, 25 bp, Homo sapien
gcttataaacaaatctcctgtcgct

SEQ ID NO: 1788598 - DNA, 25 bp, Homo sapien
ttttccaaagataagtcacagggtc

SEQ ID NO: 1788599 - DNA, 25 bp, Homo sapien
gcaccatcaggtctacaaggtcttg

SEQ ID NO: 1788600 - DNA, 25 bp, Homo sapien
agtgattgtgctatgttccctgacc

SEQ ID NO: 1788601 - DNA, 25 bp, Homo sapien
ggtctcaagtggatgctcaaagcta

SEQ ID NO: 1788602 - DNA, 25 bp, Homo sapien
tagtgcagaggttctttcctccatc

SEQ ID NO: 1788603 - DNA, 25 bp, Homo sapien
cgtgtacaggtagatgtgcatccca

SEQ ID NO: 1788604 - DNA, 25 bp, Homo sapien
cttcagggctatgagcgtgctcagc

SEQ ID NO: 1788605 - DNA, 25 bp, Homo sapien
tgtagcagggaagtctgcgtgtaca

SEQ ID NO: 1788606 - DNA, 25 bp, Homo sapien
aagtaatgtagcagggaagtctgcg

SEQ ID NO: 1788607 - DNA, 25 bp, Homo sapien
taactctaatgcaacacctcgaggg

SEQ ID NO: 1788608 - DNA, 25 bp, Homo sapien
tatgtccttccctagaacatgtgtc

SEQ ID NO: 1788609 - DNA, 25 bp, Homo sapien
caagtgttgagacctccagttacaa

SEQ ID NO: 1788610 - DNA, 25 bp, Homo sapien
tctggaatccgggaatatgtccttc

SEQ ID NO: 1788611 - DNA, 25 bp, Homo sapien
ggaaattaggagcaaggagatggga

SEQ ID NO: 1788612 - DNA, 25 bp, Homo sapien
tgtttttctttatcaagcttgctgt

SEQ ID NO: 1788613 - DNA, 25 bp, Homo sapien
taaatactaaaggacttgaaagtga

SEQ ID NO: 1788614 - DNA, 25 bp, Homo sapien
taagcatgtaatgtactgatatggg

SEQ ID NO: 1788615 - DNA, 25 bp, Homo sapien
actacagtagtgcgccaccaggcta

SEQ ID NO: 1788616 - DNA, 25 bp, Homo sapien
cttgctctctcactctgatgggagt

SEQ ID NO: 1788617 - DNA, 25 bp, Homo sapien
ctctctcactctgatgggagttcag

SEQ ID NO: 1788618 - DNA, 25 bp, Homo sapien
ctacagtagtgcgccaccaggctaa

SEQ ID NO: 1788619 - DNA, 25 bp, Homo sapien
gatatgagcaaagttacctagcagc

SEQ ID NO: 1788620 - DNA, 25 bp, Homo sapien
caccagcgggaactgagccaatgaa

SEQ ID NO: 1788621 - DNA, 25 bp, Homo sapien
tgtcagcacctaaaagtgggtacgc

SEQ ID NO: 1788622 - DNA, 25 bp, Homo sapien
caactgtgagaagctgatggtgtcc

SEQ ID NO: 1788623 - DNA, 25 bp, Homo sapien
ttgcattccaggcttgtccctcaac

SEQ ID NO: 1788624 - DNA, 25 bp, Homo sapien
gattttgcattccaggcttgtccct

SEQ ID NO: 1788625 - DNA, 25 bp, Homo sapien
ctgattttgcattccaggcttgtcc

SEQ ID NO: 1788626 - DNA, 25 bp, Homo sapien
ttccaggcttgtccctcaacctgag

SEQ ID NO: 1788627 - DNA, 25 bp, Homo sapien
aatgtgccccttcacgatgtgttag

SEQ ID NO: 1788628 - DNA, 25 bp, Homo sapien
tgagagaaacgacaaccagctggtt

SEQ ID NO: 1788629 - DNA, 25 bp, Homo sapien
tataacccagattctagcagatgag

SEQ ID NO: 1788630 - DNA, 25 bp, Homo sapien
tcctggctcttcacgtactgtaagt

SEQ ID NO: 1788631 - DNA, 25 bp, Homo sapien
acagagggaaataagcagaggtcca

SEQ ID NO: 1788632 - DNA, 25 bp, Homo sapien
taaaattacacaaagtgcagcagtc

SEQ ID NO: 1788633 - DNA, 25 bp, Homo sapien
taagtaacgggtgcgatcggtgaac

SEQ ID NO: 1788634 - DNA, 25 bp, Homo sapien
cagggctacccaccaatcgcgtggt

SEQ ID NO: 1788635 - DNA, 25 bp, Homo sapien
tgtaagtagagaatggcaacgccag

SEQ ID NO: 1788636 - DNA, 25 bp, Homo sapien
caaaggcttggacgaggtggttctt

SEQ ID NO: 1788637 - DNA, 25 bp, Homo sapien
tggtcatattcaagctacagtcctg

SEQ ID NO: 1788638 - DNA, 25 bp, Homo sapien
cacctggtctctgactggaaaggga

SEQ ID NO: 1788639 - DNA, 25 bp, Homo sapien
tacagagactatccaagtgagtgtg

SEQ ID NO: 1788640 - DNA, 25 bp, Homo sapien
taaaatatcttcaagtgggtgacag

SEQ ID NO: 1788641 - DNA, 25 bp, Homo sapien
taagaagctttagacctacagagac

SEQ ID NO: 1788642 - DNA, 25 bp, Homo sapien
tctgaatcctaggtgagtgggtgct

SEQ ID NO: 1788643 - DNA, 25 bp, Homo sapien
ggaaacaaatgccttggttgatgcg

SEQ ID NO: 1788644 - DNA, 25 bp, Homo sapien
gctctgcggaggctcaatggaaaca

SEQ ID NO: 1788645 - DNA, 25 bp, Homo sapien
aagaccccctgctgtaaattcaaca

SEQ ID NO: 1788646 - DNA, 25 bp, Homo sapien
gatgcgtaacactgactgtgacatg

SEQ ID NO: 1788647 - DNA, 25 bp, Homo sapien
acttggctgctaggtgtgggaatga

SEQ ID NO: 1788648 - DNA, 25 bp, Homo sapien
gaatgaagaggtgcgctgcatgact

SEQ ID NO: 1788649 - DNA, 25 bp, Homo sapien
gtgtgccagacaccgagaccacaca

SEQ ID NO: 1788650 - DNA, 25 bp, Homo sapien
cgctgcatgactcctgggtgtgcca

SEQ ID NO: 1788651 - DNA, 25 bp, Homo sapien
cattatatgttacaggactcctgaa

SEQ ID NO: 1788652 - DNA, 25 bp, Homo sapien
catcatcattgaaggcgtccgtggg

SEQ ID NO: 1788653 - DNA, 25 bp, Homo sapien
tcaaaccctttggaggcaagggcag

SEQ ID NO: 1788654 - DNA, 25 bp, Homo sapien
gggaatgtcgttgacggtgcaccta

SEQ ID NO: 1788655 - DNA, 25 bp, Homo sapien
gaattatttcggtgatagacacgct

SEQ ID NO: 1788656 - DNA, 25 bp, Homo sapien
gatagacacgctgtattttggtcca

SEQ ID NO: 1788657 - DNA, 25 bp, Homo sapien
gacggtttttatcacatagaatgtg

SEQ ID NO: 1788658 - DNA, 25 bp, Homo sapien
tggtccagcaatcagagtcattatt

SEQ ID NO: 1788659 - DNA, 25 bp, Homo sapien
gatgtggacacgcagctttgtgacc

SEQ ID NO: 1788660 - DNA, 25 bp, Homo sapien
tgctgtgtctgaccacgcgtgaggc

SEQ ID NO: 1788661 - DNA, 25 bp, Homo sapien
gcctctgcagatctatcacgtggga

SEQ ID NO: 1788662 - DNA, 25 bp, Homo sapien
cacttgctggctaaggtggacacag

SEQ ID NO: 1788663 - DNA, 25 bp, Homo sapien
tgccaccaaacaggtgtaggaagat

SEQ ID NO: 1788664 - DNA, 25 bp, Homo sapien
accaaacaggtgtaggaagattctg

SEQ ID NO: 1788665 - DNA, 25 bp, Homo sapien
ccaccaaacaggtgtaggaagattc

SEQ ID NO: 1788666 - DNA, 25 bp, Homo sapien
caccaaacaggtgtaggaagattct

SEQ ID NO: 1788667 - DNA, 25 bp, Homo sapien
ccccagctgatggactgagcatgaa

SEQ ID NO: 1788668 - DNA, 25 bp, Homo sapien
atctatgctgcagaacgtccctgac

SEQ ID NO: 1788669 - DNA, 25 bp, Homo sapien
tgtgcaatgatggtttccccagctg

SEQ ID NO: 1788670 - DNA, 25 bp, Homo sapien
aacacacagagttgatcctttcagg

SEQ ID NO: 1788671 - DNA, 25 bp, Homo sapien
aagcttccttaaatctggtgcagct

SEQ ID NO: 1788672 - DNA, 25 bp, Homo sapien
tgtataagcttccttaaatctggtg

SEQ ID NO: 1788673 - DNA, 25 bp, Homo sapien
tgggtattgtataagcttccttaaa

SEQ ID NO: 1788674 - DNA, 25 bp, Homo sapien
tataagcttccttaaatctggtgca

SEQ ID NO: 1788675 - DNA, 25 bp, Homo sapien
acacttcccctggtctaggaggagg

SEQ ID NO: 1788676 - DNA, 25 bp, Homo sapien
gatgggactgggattcacagcctcc

SEQ ID NO: 1788677 - DNA, 25 bp, Homo sapien
caaagattctcctacttgcagaggt

SEQ ID NO: 1788678 - DNA, 25 bp, Homo sapien
tgcaaaggtcgtagagaagcatggc

SEQ ID NO: 1788679 - DNA, 25 bp, Homo sapien
gctccatagtgaagggataaatttc

SEQ ID NO: 1788680 - DNA, 25 bp, Homo sapien
cttgtaaaatgctccatagtgaagg

SEQ ID NO: 1788681 - DNA, 25 bp, Homo sapien
ttgttctgccttgtcaaatgtgtca

SEQ ID NO: 1788682 - DNA, 25 bp, Homo sapien
tgtgtcacttgtgctgctcaagtga

SEQ ID NO: 1788683 - DNA, 25 bp, Homo sapien
gagtgaggccttatagccaagctca

SEQ ID NO: 1788684 - DNA, 25 bp, Homo sapien
agaaaagggagtgaggccttatagc

SEQ ID NO: 1788685 - DNA, 25 bp, Homo sapien
gccttatagccaagctcagtttttt

SEQ ID NO: 1788686 - DNA, 25 bp, Homo sapien
aaaagggagtgaggccttatagcca

SEQ ID NO: 1788687 - DNA, 25 bp, Homo sapien
tggatcctgtatttgagaaacaact

SEQ ID NO: 1788688 - DNA, 25 bp, Homo sapien
ctgtatttgagaaacaactacagtc

SEQ ID NO: 1788689 - DNA, 25 bp, Homo sapien
cctgtatttgagaaacaactacagt

SEQ ID NO: 1788690 - DNA, 25 bp, Homo sapien
cttttggatcctgtatttgagaaac

SEQ ID NO: 1788691 - DNA, 25 bp, Homo sapien
tcatcacagctctaactcccggact

SEQ ID NO: 1788692 - DNA, 25 bp, Homo sapien
acagctctaactcccggactgaagc

SEQ ID NO: 1788693 - DNA, 25 bp, Homo sapien
atcacagctctaactcccggactga

SEQ ID NO: 1788694 - DNA, 25 bp, Homo sapien
cacagctctaactcccggactgaag

SEQ ID NO: 1788695 - DNA, 25 bp, Homo sapien
ttcacattgttcaagagccacacca

SEQ ID NO: 1788696 - DNA, 25 bp, Homo sapien
cacgcacttggatctcttgccagga

SEQ ID NO: 1788697 - DNA, 25 bp, Homo sapien
tgttcaagagccacaccaatcacct

SEQ ID NO: 1788698 - DNA, 25 bp, Homo sapien
acctcgccttggcacgcacttggat

SEQ ID NO: 1788699 - DNA, 25 bp, Homo sapien
ataactactaaaggagagccaagag

SEQ ID NO: 1788700 - DNA, 25 bp, Homo sapien
cactcagtaaagaattctttcatta

SEQ ID NO: 1788701 - DNA, 25 bp, Homo sapien
tcactcagtaaagaattctttcatt

SEQ ID NO: 1788702 - DNA, 25 bp, Homo sapien
tcattaaaataactactaaaggaga

SEQ ID NO: 1788703 - DNA, 25 bp, Homo sapien
aagcagcaggtacttaaaggactga

SEQ ID NO: 1788704 - DNA, 25 bp, Homo sapien
gcagcaggtacttaaaggactgacc

SEQ ID NO: 1788705 - DNA, 25 bp, Homo sapien
agcaggtacttaaaggactgaccaa

SEQ ID NO: 1788706 - DNA, 25 bp, Homo sapien
cagcaggtacttaaaggactgacca

SEQ ID NO: 1788707 - DNA, 25 bp, Homo sapien
gaatgacattgataaatcgccccat

SEQ ID NO: 1788708 - DNA, 25 bp, Homo sapien
tgctctcttgttgccgagcgaggcg

SEQ ID NO: 1788709 - DNA, 25 bp, Homo sapien
ccgagcgaggcgaatgacattgata

SEQ ID NO: 1788710 - DNA, 25 bp, Homo sapien
gacattgataaatcgccccattata

SEQ ID NO: 1788711 - DNA, 25 bp, Homo sapien
gcttcctgggtgtatttctcctacc

SEQ ID NO: 1788712 - DNA, 25 bp, Homo sapien
catctcttggcatcagtgctgcccc

SEQ ID NO: 1788713 - DNA, 25 bp, Homo sapien
gtgctgccccatggctgtacctgct

SEQ ID NO: 1788714 - DNA, 25 bp, Homo sapien
tgtatttctcctaccttcatgctca

SEQ ID NO: 1788715 - DNA, 25 bp, Homo sapien
ctggcagaacccctcacagtcttct

SEQ ID NO: 1788716 - DNA, 25 bp, Homo sapien
tgacagcatggcagaattcccatga

SEQ ID NO: 1788717 - DNA, 25 bp, Homo sapien
ccaagtgacagcatggcagaattcc

SEQ ID NO: 1788718 - DNA, 25 bp, Homo sapien
catggcagaattcccatgatgatcc

SEQ ID NO: 1788719 - DNA, 25 bp, Homo sapien
ggagtgtcactcagcaagtacgcag

SEQ ID NO: 1788720 - DNA, 25 bp, Homo sapien
tgggctttagattaggaggacctgc

SEQ ID NO: 1788721 - DNA, 25 bp, Homo sapien
gaggacctgcgtttgaaccctgcct

SEQ ID NO: 1788722 - DNA, 25 bp, Homo sapien
gaacaaaacggtaccacataggcta

SEQ ID NO: 1788723 - DNA, 25 bp, Homo sapien
gaacctaggccaaatagtttcgcaa

SEQ ID NO: 1788724 - DNA, 25 bp, Homo sapien
tgctgcgtgggcatgttttgaacac

SEQ ID NO: 1788725 - DNA, 25 bp, Homo sapien
tgaacactgttcctataaccaaggc

SEQ ID NO: 1788726 - DNA, 25 bp, Homo sapien
cctggaatttctacaatgaggagag

SEQ ID NO: 1788727 - DNA, 25 bp, Homo sapien
gttttccccatccaatcattgctat

SEQ ID NO: 1788728 - DNA, 25 bp, Homo sapien
gtatctgttggtattggccatttac

SEQ ID NO: 1788729 - DNA, 25 bp, Homo sapien
ttgctattcccacaactactagttc

SEQ ID NO: 1788730 - DNA, 25 bp, Homo sapien
ctagttcaactagtagtgtagttgt

SEQ ID NO: 1788731 - DNA, 25 bp, Homo sapien
actctcttcaaggttgggtgggcca

SEQ ID NO: 1788732 - DNA, 25 bp, Homo sapien
tataaaagctctctgccaggtgcca

SEQ ID NO: 1788733 - DNA, 25 bp, Homo sapien
taactccgggtggataatagacaca

SEQ ID NO: 1788734 - DNA, 25 bp, Homo sapien
catgtcttcttgagccagtaggccc

SEQ ID NO: 1788735 - DNA, 25 bp, Homo sapien
gccttgagaaagattgaacactaga

SEQ ID NO: 1788736 - DNA, 25 bp, Homo sapien
ctcagagtctcgtaaagtgccttgc

SEQ ID NO: 1788737 - DNA, 25 bp, Homo sapien
tgaaacagatgcaaacggacgcttt

SEQ ID NO: 1788738 - DNA, 25 bp, Homo sapien
cggacgctttacttggccttgagaa

SEQ ID NO: 1788739 - DNA, 25 bp, Homo sapien
tataaggggtaccatctgcgggatc

SEQ ID NO: 1788740 - DNA, 25 bp, Homo sapien
agaagtactcccttcttagtataag

SEQ ID NO: 1788741 - DNA, 25 bp, Homo sapien
caaaagtcttctctatgaaagcaga

SEQ ID NO: 1788742 - DNA, 25 bp, Homo sapien
taaaaagaggttatgatcccaacag

SEQ ID NO: 1788743 - DNA, 25 bp, Homo sapien
catggcacccagctttaaaaataat

SEQ ID NO: 1788744 - DNA, 25 bp, Homo sapien
atggcacccagctttaaaaataatc

SEQ ID NO: 1788745 - DNA, 25 bp, Homo sapien
tcttcaaatttcatgaaaagtgaga

SEQ ID NO: 1788746 - DNA, 25 bp, Homo sapien
tcatggcacccagctttaaaaataa

SEQ ID NO: 1788747 - DNA, 25 bp, Homo sapien
tcctttctcatagggagagaggcac

SEQ ID NO: 1788748 - DNA, 25 bp, Homo sapien
cagtccttgaaatattctgatcacc

SEQ ID NO: 1788749 - DNA, 25 bp, Homo sapien
ccttgaaatattctgatcacctctc

SEQ ID NO: 1788750 - DNA, 25 bp, Homo sapien
gtccttgaaatattctgatcacctc

SEQ ID NO: 1788751 - DNA, 25 bp, Homo sapien
cagttactgcatattcattcactga

SEQ ID NO: 1788752 - DNA, 25 bp, Homo sapien
tcagttactgcatattcattcactg

SEQ ID NO: 1788753 - DNA, 25 bp, Homo sapien
tgcttcttcggggaaggcttcagtt

SEQ ID NO: 1788754 - DNA, 25 bp, Homo sapien
cggggaaggcttcagttactgcata

SEQ ID NO: 1788755 - DNA, 25 bp, Homo sapien
agaatgcaaggatgggctctccaca

SEQ ID NO: 1788756 - DNA, 25 bp, Homo sapien
gttcagaaaacctgcttaagaatgc

SEQ ID NO: 1788757 - DNA, 25 bp, Homo sapien
agttcagaaaacctgcttaagaatg

SEQ ID NO: 1788758 - DNA, 25 bp, Homo sapien
gccaaataccagtaaagtcctgttc

SEQ ID NO: 1788759 - DNA, 25 bp, Homo sapien
taccagtaaagtcctgttccaaaga

SEQ ID NO: 1788760 - DNA, 25 bp, Homo sapien
caaataccagtaaagtcctgttcca

SEQ ID NO: 1788761 - DNA, 25 bp, Homo sapien
ctgccaaataccagtaaagtcctgt

SEQ ID NO: 1788762 - DNA, 25 bp, Homo sapien
cctctctgactcagatcgcatgaat

SEQ ID NO: 1788763 - DNA, 25 bp, Homo sapien
gctggccatacgttcaaatggtctc

SEQ ID NO: 1788764 - DNA, 25 bp, Homo sapien
catgaatctgcagcactgatgtaag

SEQ ID NO: 1788765 - DNA, 25 bp, Homo sapien
tgagctgctggccatacgttcaaat

SEQ ID NO: 1788766 - DNA, 25 bp, Homo sapien
ctgggggttgcaacatgaaatacat

SEQ ID NO: 1788767 - DNA, 25 bp, Homo sapien
gaatacgatttccacagagaagacg

SEQ ID NO: 1788768 - DNA, 25 bp, Homo sapien
gaaacaaagttgttcagcaacctga

SEQ ID NO: 1788769 - DNA, 25 bp, Homo sapien
tatgagatactaaatggttaatcgg

SEQ ID NO: 1788770 - DNA, 25 bp, Homo sapien
tggttaatcggatggtcccgatccc

SEQ ID NO: 1788771 - DNA, 25 bp, Homo sapien
tgccccaagttgaaaggagaacctg

SEQ ID NO: 1788772 - DNA, 25 bp, Homo sapien
gccccaagttgaaaggagaacctgc

SEQ ID NO: 1788773 - DNA, 25 bp, Homo sapien
aaccagggaaagcgcatgtaacaag

SEQ ID NO: 1788774 - DNA, 25 bp, Homo sapien
cagggaaagcgcatgtaacaagagg

SEQ ID NO: 1788775 - DNA, 25 bp, Homo sapien
caactaggctgctctgaacgtattg

SEQ ID NO: 1788776 - DNA, 25 bp, Homo sapien
ctgccaactaggctgctctgaacgt

SEQ ID NO: 1788777 - DNA, 25 bp, Homo sapien
ctaggctgctctgaacgtattgttt

SEQ ID NO: 1788778 - DNA, 25 bp, Homo sapien
gccaactaggctgctctgaacgtat

SEQ ID NO: 1788779 - DNA, 25 bp, Homo sapien
tacaaaacttctgaagagccacgag

SEQ ID NO: 1788780 - DNA, 25 bp, Homo sapien
tgaatccctggtgtccaaatatggg

SEQ ID NO: 1788781 - DNA, 25 bp, Homo sapien
ttggcatggtggcaccacccattgg

SEQ ID NO: 1788782 - DNA, 25 bp, Homo sapien
ccttggtggtaggtcattgaatccc

SEQ ID NO: 1788783 - DNA, 25 bp, Homo sapien
ttgcacaggggtcatgctagtgttc

SEQ ID NO: 1788784 - DNA, 25 bp, Homo sapien
gcacaggggtcatgctagtgttctc

SEQ ID NO: 1788785 - DNA, 25 bp, Homo sapien
aaatacatgaaacatttcacaaatt

SEQ ID NO: 1788786 - DNA, 25 bp, Homo sapien
acaggggtcatgctagtgttctctg

SEQ ID NO: 1788787 - DNA, 25 bp, Homo sapien
gcagctgtctcaagacccaagcggc

SEQ ID NO: 1788788 - DNA, 25 bp, Homo sapien
ggaaggtatgtagcaggagtctggg

SEQ ID NO: 1788789 - DNA, 25 bp, Homo sapien
ctccctgcctacattccacccagcc

SEQ ID NO: 1788790 - DNA, 25 bp, Homo sapien
gtctcaagacccaagcggctgcaga

SEQ ID NO: 1788791 - DNA, 25 bp, Homo sapien
taaagatctgatcaatgtctgtttt

SEQ ID NO: 1788792 - DNA, 25 bp, Homo sapien
cttaaagatctgatcaatgtctgtt

SEQ ID NO: 1788793 - DNA, 25 bp, Homo sapien
aagatctgatcaatgtctgttttag

SEQ ID NO: 1788794 - DNA, 25 bp, Homo sapien
atctgatcaatgtctgttttagaac

SEQ ID NO: 1788795 - DNA, 25 bp, Homo sapien
ttccaacccatgcaagcaaccagag

SEQ ID NO: 1788796 - DNA, 25 bp, Homo sapien
tacaggactcttaatggagggtcca

SEQ ID NO: 1788797 - DNA, 25 bp, Homo sapien
gaatcagcttcagggagatctcaaa

SEQ ID NO: 1788798 - DNA, 25 bp, Homo sapien
gcaaccagagacttcagtaatacag

SEQ ID NO: 1788799 - DNA, 25 bp, Homo sapien
attttccaaggcgtagggactattg

SEQ ID NO: 1788800 - DNA, 25 bp, Homo sapien
aagacattaaatgttaacatgccga

SEQ ID NO: 1788801 - DNA, 25 bp, Homo sapien
caaggcgtagggactattggcccag

SEQ ID NO: 1788802 - DNA, 25 bp, Homo sapien
gttaacatgccgatagattctaaat

SEQ ID NO: 1788803 - DNA, 25 bp, Homo sapien
cccgcgggttttcagcttggtgctt

SEQ ID NO: 1788804 - DNA, 25 bp, Homo sapien
ttgttcttgcaaaagccgacagcca

SEQ ID NO: 1788805 - DNA, 25 bp, Homo sapien
tatcattaaatccagggaaactctc

SEQ ID NO: 1788806 - DNA, 25 bp, Homo sapien
tccctcttcagagatcaagttatca

SEQ ID NO: 1788807 - DNA, 25 bp, Homo sapien
catttactctgatttctctaagtga

SEQ ID NO: 1788808 - DNA, 25 bp, Homo sapien
gagacggtaatgagggctcatcgca

SEQ ID NO: 1788809 - DNA, 25 bp, Homo sapien
atcgcacaggcgaatcccagggccg

SEQ ID NO: 1788810 - DNA, 25 bp, Homo sapien
tactctgatttctctaagtgattga

SEQ ID NO: 1788811 - DNA, 25 bp, Homo sapien
cagagatgcgtaaggggcagacctt

SEQ ID NO: 1788812 - DNA, 25 bp, Homo sapien
gcattggttaccgtgaagaaaaatc

SEQ ID NO: 1788813 - DNA, 25 bp, Homo sapien
tttaccatggcaaaggcattggtta

SEQ ID NO: 1788814 - DNA, 25 bp, Homo sapien
caaaggcattggttaccgtgaagaa

SEQ ID NO: 1788815 - DNA, 25 bp, Homo sapien
tctgacagaactgcaaaccaatcgg

SEQ ID NO: 1788816 - DNA, 25 bp, Homo sapien
gaactgcaaaccaatcggagatgtc

SEQ ID NO: 1788817 - DNA, 25 bp, Homo sapien
caatcggagatgtctcactggctgc

SEQ ID NO: 1788818 - DNA, 25 bp, Homo sapien
gcaaaccaatcggagatgtctcact

SEQ ID NO: 1788819 - DNA, 25 bp, Homo sapien
ccaaagaataatgcatccattctgt

SEQ ID NO: 1788820 - DNA, 25 bp, Homo sapien
aatgccttgattgttgatttgttta

SEQ ID NO: 1788821 - DNA, 25 bp, Homo sapien
tatcagaattttggggacaaagcaa

SEQ ID NO: 1788822 - DNA, 25 bp, Homo sapien
cagaaaatgccttgattgttgattt

SEQ ID NO: 1788823 - DNA, 25 bp, Homo sapien
cagagtcctactctctgtgctgaat

SEQ ID NO: 1788824 - DNA, 25 bp, Homo sapien
tagttctggaaggtcggctgctccc

SEQ ID NO: 1788825 - DNA, 25 bp, Homo sapien
ggaaaatgacttccccagtgacggc

SEQ ID NO: 1788826 - DNA, 25 bp, Homo sapien
tgaaccatagttcacacgacagact

SEQ ID NO: 1788827 - DNA, 25 bp, Homo sapien
gatgttgctagtttctggtgcgtca

SEQ ID NO: 1788828 - DNA, 25 bp, Homo sapien
tgttctttaatcctgcccacagctc

SEQ ID NO: 1788829 - DNA, 25 bp, Homo sapien
ggacattcccattgtactccctgag

SEQ ID NO: 1788830 - DNA, 25 bp, Homo sapien
ggtgcgtcactatctttggttgttc

SEQ ID NO: 1788831 - DNA, 25 bp, Homo sapien
accctgtctcagctcgggagaatct

SEQ ID NO: 1788832 - DNA, 25 bp, Homo sapien
gagttcctagaggtacattcccatt

SEQ ID NO: 1788833 - DNA, 25 bp, Homo sapien
cacctctgcttgagcacattgcaca

SEQ ID NO: 1788834 - DNA, 25 bp, Homo sapien
tgttgggtgatgtgttctacagcct

SEQ ID NO: 1788835 - DNA, 25 bp, Homo sapien
cattcctgcctgttgtacaagccag

SEQ ID NO: 1788836 - DNA, 25 bp, Homo sapien
ccagggctgtcctaaggaatgatca

SEQ ID NO: 1788837 - DNA, 25 bp, Homo sapien
taaataagctagtgcaggcaagccc

SEQ ID NO: 1788838 - DNA, 25 bp, Homo sapien
gcctttctgtaacccacagagggca

SEQ ID NO: 1788839 - DNA, 25 bp, Homo sapien
taaggctcccagtgtcgcttgggct

SEQ ID NO: 1788840 - DNA, 25 bp, Homo sapien
tgctccgggacaggacttctaactc

SEQ ID NO: 1788841 - DNA, 25 bp, Homo sapien
gattagaatacctggtaaggctccc

SEQ ID NO: 1788842 - DNA, 25 bp, Homo sapien
ccatgtctgagacgcaaaagcttgt

SEQ ID NO: 1788843 - DNA, 25 bp, Homo sapien
cctcttgaactaaagacagtaatga

SEQ ID NO: 1788844 - DNA, 25 bp, Homo sapien
aaatacaaagaatgcctatttccaa

SEQ ID NO: 1788845 - DNA, 25 bp, Homo sapien
ttgggtggagacgcaagaaagaaaa

SEQ ID NO: 1788846 - DNA, 25 bp, Homo sapien
ttgagggcctaaactgaaacttatg

SEQ ID NO: 1788847 - DNA, 25 bp, Homo sapien
aaacagagggaagaacgtggaagct

SEQ ID NO: 1788848 - DNA, 25 bp, Homo sapien
agcctctctcattgaaaacagcaga

SEQ ID NO: 1788849 - DNA, 25 bp, Homo sapien
tcagcctctctcattgaaaacagca

SEQ ID NO: 1788850 - DNA, 25 bp, Homo sapien
gagggaagaacgtggaagctgctgc

SEQ ID NO: 1788851 - DNA, 25 bp, Homo sapien
cctatgagaatgtccacttggctgt

SEQ ID NO: 1788852 - DNA, 25 bp, Homo sapien
ctatgagaatgtccacttggctgtc

SEQ ID NO: 1788853 - DNA, 25 bp, Homo sapien
tccaaggaaagtgacgtagaagatt

SEQ ID NO: 1788854 - DNA, 25 bp, Homo sapien
caaggaaagtgacgtagaagatttt

SEQ ID NO: 1788855 - DNA, 25 bp, Homo sapien
gtgacgtagaagatttttctagact

SEQ ID NO: 1788856 - DNA, 25 bp, Homo sapien
gaaagtgacgtagaagatttttcta

SEQ ID NO: 1788857 - DNA, 25 bp, Homo sapien
catccaactcattgaaatcgtcctt

SEQ ID NO: 1788858 - DNA, 25 bp, Homo sapien
ctcatccaactcattgaaatcgtcc

SEQ ID NO: 1788859 - DNA, 25 bp, Homo sapien
tcatccaactcattgaaatcgtcct

SEQ ID NO: 1788860 - DNA, 25 bp, Homo sapien
ctgtgacgggaaccaactaactaag

SEQ ID NO: 1788861 - DNA, 25 bp, Homo sapien
aactaactaaggcacgcgactcgtt

SEQ ID NO: 1788862 - DNA, 25 bp, Homo sapien
ttctagcaagtcttggcaggacccg

SEQ ID NO: 1788863 - DNA, 25 bp, Homo sapien
cacgcgactcgttccttctagcaag

SEQ ID NO: 1788864 - DNA, 25 bp, Homo sapien
ttcgctcggcccagaagcaattaaa

SEQ ID NO: 1788865 - DNA, 25 bp, Homo sapien
agcaggaggcaaagtccgcaccact

SEQ ID NO: 1788866 - DNA, 25 bp, Homo sapien
gctgcgcgactgacaactccagaaa

SEQ ID NO: 1788867 - DNA, 25 bp, Homo sapien
cccgctcggcgcagcaacagggtag

SEQ ID NO: 1788868 - DNA, 25 bp, Homo sapien
gccgtgcgtcccagtccccgcggcg

SEQ ID NO: 1788869 - DNA, 25 bp, Homo sapien
ccgcgcgcagcctgcccggatgccg

SEQ ID NO: 1788870 - DNA, 25 bp, Homo sapien
gggcccttcgcaggcgcccgcacct

SEQ ID NO: 1788871 - DNA, 25 bp, Homo sapien
gcggcgtcaccgagccgcgcccccg

SEQ ID NO: 1788872 - DNA, 25 bp, Homo sapien
cagcacccggcttgggctccggttc

SEQ ID NO: 1788873 - DNA, 25 bp, Homo sapien
caggatacccatcacgtcggtccag

SEQ ID NO: 1788874 - DNA, 25 bp, Homo sapien
cacgtcggtccagagtcgggagaac

SEQ ID NO: 1788875 - DNA, 25 bp, Homo sapien
catcacgtcggtccagagtcgggag

SEQ ID NO: 1788876 - DNA, 25 bp, Homo sapien
gatacccatcacgtcggtccagagt

SEQ ID NO: 1788877 - DNA, 25 bp, Homo sapien
cctgtatttactgagatccatgact

SEQ ID NO: 1788878 - DNA, 25 bp, Homo sapien
atgcaaaatgtgtcctaatgaactc

SEQ ID NO: 1788879 - DNA, 25 bp, Homo sapien
ggtgcttaactgtgcatggactgaa

SEQ ID NO: 1788880 - DNA, 25 bp, Homo sapien
tgaactcaaacaaccatcctgtatt

SEQ ID NO: 1788881 - DNA, 25 bp, Homo sapien
gctgatccttgggagccatcggtga

SEQ ID NO: 1788882 - DNA, 25 bp, Homo sapien
atctgctttcacttgctcattggtc

SEQ ID NO: 1788883 - DNA, 25 bp, Homo sapien
agtccttgagcaactctcgccctgg

SEQ ID NO: 1788884 - DNA, 25 bp, Homo sapien
tcggtgacctacagtccttgagcaa

SEQ ID NO: 1788885 - DNA, 25 bp, Homo sapien
tctcgaactcctgagctcaacgatc

SEQ ID NO: 1788886 - DNA, 25 bp, Homo sapien
tcgaactcctgagctcaacgatcca

SEQ ID NO: 1788887 - DNA, 25 bp, Homo sapien
aggcacgagctaccctgcccggcta

SEQ ID NO: 1788888 - DNA, 25 bp, Homo sapien
ggtttcatcatgttgtgcaagctgg

SEQ ID NO: 1788889 - DNA, 25 bp, Homo sapien
ggagggctgcgtgtcatcacatcct

SEQ ID NO: 1788890 - DNA, 25 bp, Homo sapien
gggcaggagggctgcgtgtcatcac

SEQ ID NO: 1788891 - DNA, 25 bp, Homo sapien
ggcaggagggctgcgtgtcatcaca

SEQ ID NO: 1788892 - DNA, 25 bp, Homo sapien
cactcgaggcctccgaggggtgtcc

SEQ ID NO: 1788893 - DNA, 25 bp, Homo sapien
ggcactcgaggcctccgaggggtgt

SEQ ID NO: 1788894 - DNA, 25 bp, Homo sapien
caggcactcgaggcctccgaggggt

SEQ ID NO: 1788895 - DNA, 25 bp, Homo sapien
ccaggcactcgaggcctccgagggg

SEQ ID NO: 1788896 - DNA, 25 bp, Homo sapien
tgggcttgcggtagaccccgcagcc

SEQ ID NO: 1788897 - DNA, 25 bp, Homo sapien
gctgggcttgcggtagaccccgcag

SEQ ID NO: 1788898 - DNA, 25 bp, Homo sapien
tgaggctgggcttgcggtagacccc

SEQ ID NO: 1788899 - DNA, 25 bp, Homo sapien
gtagaccccgcagccctgaacgact

SEQ ID NO: 1788900 - DNA, 25 bp, Homo sapien
gaacagccagtatggtagagtggtt

SEQ ID NO: 1788901 - DNA, 25 bp, Homo sapien
gtgtcttggagagaggtatctgcct

SEQ ID NO: 1788902 - DNA, 25 bp, Homo sapien
ttttgtcatggaaagggaacagcca

SEQ ID NO: 1788903 - DNA, 25 bp, Homo sapien
gctaggctctgaccttaagaaagtt

SEQ ID NO: 1788904 - DNA, 25 bp, Homo sapien
tttaggaccaccatgaacccagagg

SEQ ID NO: 1788905 - DNA, 25 bp, Homo sapien
taaactcaagtcagatctgtaccca

SEQ ID NO: 1788906 - DNA, 25 bp, Homo sapien
ccaagaactggcaggtacttcacca

SEQ ID NO: 1788907 - DNA, 25 bp, Homo sapien
tagaattaactgtcctccaagaact

SEQ ID NO: 1788908 - DNA, 25 bp, Homo sapien
taaaaaagctgcaacgaattcacat

SEQ ID NO: 1788909 - DNA, 25 bp, Homo sapien
tcattctcctaacccagttactgtg

SEQ ID NO: 1788910 - DNA, 25 bp, Homo sapien
ggttacaatgtaaacttgacagtca

SEQ ID NO: 1788911 - DNA, 25 bp, Homo sapien
gtcacattctacacagggttacaat

SEQ ID NO: 1788912 - DNA, 25 bp, Homo sapien
gaactctgttgcgttcatcctatac

SEQ ID NO: 1788913 - DNA, 25 bp, Homo sapien
aacttttcttgttccggcacatgtg

SEQ ID NO: 1788914 - DNA, 25 bp, Homo sapien
ccagcttgtgaatgtcaggtatagg

SEQ ID NO: 1788915 - DNA, 25 bp, Homo sapien
aatccgatttagagaatgtcagtcc

SEQ ID NO: 1788916 - DNA, 25 bp, Homo sapien
acacccaaaacctgccagcacccat

SEQ ID NO: 1788917 - DNA, 25 bp, Homo sapien
ccacgtcgtcgtcgttctgcagaca

SEQ ID NO: 1788918 - DNA, 25 bp, Homo sapien
cactgactgtaataactaatctcaa

SEQ ID NO: 1788919 - DNA, 25 bp, Homo sapien
tttctgaggtatcactcccagtgtt

SEQ ID NO: 1788920 - DNA, 25 bp, Homo sapien
tgtcatcacttcctgccacgtcgtc

SEQ ID NO: 1788921 - DNA, 25 bp, Homo sapien
caaacaaaggcggtcaggtcagtcc

SEQ ID NO: 1788922 - DNA, 25 bp, Homo sapien
tggacaaacaaaggcggtcaggtca

SEQ ID NO: 1788923 - DNA, 25 bp, Homo sapien
acaaaggcggtcaggtcagtccacc

SEQ ID NO: 1788924 - DNA, 25 bp, Homo sapien
gtggacaaacaaaggcggtcaggtc

SEQ ID NO: 1788925 - DNA, 25 bp, Homo sapien
ctctcgcacacgtcggagaaacagg

SEQ ID NO: 1788926 - DNA, 25 bp, Homo sapien
taatctgcatactgctgcgccaggt

SEQ ID NO: 1788927 - DNA, 25 bp, Homo sapien
tgcgccaggtcatcgatgtttccca

SEQ ID NO: 1788928 - DNA, 25 bp, Homo sapien
tcatcgatgtttcccagtgaaccgt

SEQ ID NO: 1788929 - DNA, 25 bp, Homo sapien
aattcttgcacctttgatgggaact

SEQ ID NO: 1788930 - DNA, 25 bp, Homo sapien
tcttctgcggttttggaacagagca

SEQ ID NO: 1788931 - DNA, 25 bp, Homo sapien
gggaactaattaagctcatgtggtg

SEQ ID NO: 1788932 - DNA, 25 bp, Homo sapien
acagagcacgccaaattagccccat

SEQ ID NO: 1788933 - DNA, 25 bp, Homo sapien
cagcagggaaggcatattgtttact

SEQ ID NO: 1788934 - DNA, 25 bp, Homo sapien
aagttgtgccaaccaagcagccagc

SEQ ID NO: 1788935 - DNA, 25 bp, Homo sapien
gcagggaaggcatattgtttacttg

SEQ ID NO: 1788936 - DNA, 25 bp, Homo sapien
ctgaagttgtgccaaccaagcagcc

SEQ ID NO: 1788937 - DNA, 25 bp, Homo sapien
tcaaccaggtcagtcttccctgtgc

SEQ ID NO: 1788938 - DNA, 25 bp, Homo sapien
acggtccacacctccctcaaccagg

SEQ ID NO: 1788939 - DNA, 25 bp, Homo sapien
tccctcaaccaggtcagtcttccct

SEQ ID NO: 1788940 - DNA, 25 bp, Homo sapien
acacctccctcaaccaggtcagtct

SEQ ID NO: 1788941 - DNA, 25 bp, Homo sapien
atggtgaccttgtagactgagctgg

SEQ ID NO: 1788942 - DNA, 25 bp, Homo sapien
caatggtgaccttgtagactgagct

SEQ ID NO: 1788943 - DNA, 25 bp, Homo sapien
aacaatggtgaccttgtagactgag

SEQ ID NO: 1788944 - DNA, 25 bp, Homo sapien
gtgaccttgtagactgagctgggca

SEQ ID NO: 1788945 - DNA, 25 bp, Homo sapien
caggataactcaggatagtgtgcgg

SEQ ID NO: 1788946 - DNA, 25 bp, Homo sapien
gggcttcagcaggataactcaggat

SEQ ID NO: 1788947 - DNA, 25 bp, Homo sapien
gatagtgtgcggcacagttctcatt

SEQ ID NO: 1788948 - DNA, 25 bp, Homo sapien
ttagagaaacaacggggcttcagca

SEQ ID NO: 1788949 - DNA, 25 bp, Homo sapien
gcaaggcagataaagtaccgtaccc

SEQ ID NO: 1788950 - DNA, 25 bp, Homo sapien
tatgcacaggtctcagaatggccag

SEQ ID NO: 1788951 - DNA, 25 bp, Homo sapien
gaaatcatgtctctgctgttgcaca

SEQ ID NO: 1788952 - DNA, 25 bp, Homo sapien
tggcagtactttaggtagcaaggca

SEQ ID NO: 1788953 - DNA, 25 bp, Homo sapien
cccttggagcgcctgattctctctg

SEQ ID NO: 1788954 - DNA, 25 bp, Homo sapien
tgcccggccgccttttatgtctgtc

SEQ ID NO: 1788955 - DNA, 25 bp, Homo sapien
tgtcacagatgtgtgagcaaagctt

SEQ ID NO: 1788956 - DNA, 25 bp, Homo sapien
ccgccttttatgtctgtcacagatg

SEQ ID NO: 1788957 - DNA, 25 bp, Homo sapien
ccggccgccttttatgtctgtcaca

SEQ ID NO: 1788958 - DNA, 25 bp, Homo sapien
ccttgatggatgtaggcttgaagtg

SEQ ID NO: 1788959 - DNA, 25 bp, Homo sapien
ttttctaaagccctggacagacttg

SEQ ID NO: 1788960 - DNA, 25 bp, Homo sapien
ggcagttaaccaaatgccttgatgg

SEQ ID NO: 1788961 - DNA, 25 bp, Homo sapien
gaagtgtgggatctcctttaccgcc

SEQ ID NO: 1788962 - DNA, 25 bp, Homo sapien
gccgttaattaggtaacacttgtga

SEQ ID NO: 1788963 - DNA, 25 bp, Homo sapien
catagcacacatgtcgtccaggatc

SEQ ID NO: 1788964 - DNA, 25 bp, Homo sapien
gaagggttttgcgacacatagcaca

SEQ ID NO: 1788965 - DNA, 25 bp, Homo sapien
gtcagacattgtgccgttaattagg

SEQ ID NO: 1788966 - DNA, 25 bp, Homo sapien
tctcaagacctagcgaagtgcctgg

SEQ ID NO: 1788967 - DNA, 25 bp, Homo sapien
taaagttgggagcaatatgccacgt

SEQ ID NO: 1788968 - DNA, 25 bp, Homo sapien
ggaatactgcaccacgctatctgta

SEQ ID NO: 1788969 - DNA, 25 bp, Homo sapien
tatgccacgtgacaatgccagaatg

SEQ ID NO: 1788970 - DNA, 25 bp, Homo sapien
gaaaacggatggtctgtagcagagc

SEQ ID NO: 1788971 - DNA, 25 bp, Homo sapien
gcagagcagataaaagcagcgagtc

SEQ ID NO: 1788972 - DNA, 25 bp, Homo sapien
ggacggcatccccaatactacatgg

SEQ ID NO: 1788973 - DNA, 25 bp, Homo sapien
gcagcgagtctgaacacaatgattg

SEQ ID NO: 1788974 - DNA, 25 bp, Homo sapien
tcacatgcctgcttggaccccgcat

SEQ ID NO: 1788975 - DNA, 25 bp, Homo sapien
ctcacatgcctgcttggaccccgca

SEQ ID NO: 1788976 - DNA, 25 bp, Homo sapien
gctcacatgcctgcttggaccccgc

SEQ ID NO: 1788977 - DNA, 25 bp, Homo sapien
aaagtggcacactgacgtatacacg

SEQ ID NO: 1788978 - DNA, 25 bp, Homo sapien
gatcactgactactaatatgggagg

SEQ ID NO: 1788979 - DNA, 25 bp, Homo sapien
aattaaattcacacggatcactgac

SEQ ID NO: 1788980 - DNA, 25 bp, Homo sapien
cagggtcatgttcattcatccacag

SEQ ID NO: 1788981 - DNA, 25 bp, Homo sapien
caaaaaaccacacacggatagatat

SEQ ID NO: 1788982 - DNA, 25 bp, Homo sapien
aaccacacacggatagatatcatat

SEQ ID NO: 1788983 - DNA, 25 bp, Homo sapien
gctccagaatcaattgcaagccaat

SEQ ID NO: 1788984 - DNA, 25 bp, Homo sapien
taaaaagctccagaatcaattgcaa

SEQ ID NO: 1788985 - DNA, 25 bp, Homo sapien
tgaagtctggcctggttttcagtgc

SEQ ID NO: 1788986 - DNA, 25 bp, Homo sapien
ctgaagtctggcctggttttcagtg

SEQ ID NO: 1788987 - DNA, 25 bp, Homo sapien
gaagtctggcctggttttcagtgct

SEQ ID NO: 1788988 - DNA, 25 bp, Homo sapien
gttactgagcccataagtcaacgag

SEQ ID NO: 1788989 - DNA, 25 bp, Homo sapien
gcatttcaactctaagccacaggta

SEQ ID NO: 1788990 - DNA, 25 bp, Homo sapien
ggcacatgacatctgggtaactctg

SEQ ID NO: 1788991 - DNA, 25 bp, Homo sapien
aacactccttctgttcgggcaccag

SEQ ID NO: 1788992 - DNA, 25 bp, Homo sapien
gcaattttactgcatgggatgtgta

SEQ ID NO: 1788993 - DNA, 25 bp, Homo sapien
ttttggattgcagagttacactagg

SEQ ID NO: 1788994 - DNA, 25 bp, Homo sapien
atttaagatctacaacctagataca

SEQ ID NO: 1788995 - DNA, 25 bp, Homo sapien
cagaatgttgtaatgtttaatcact

SEQ ID NO: 1788996 - DNA, 25 bp, Homo sapien
tgtctcagacgaaccagccgtccca

SEQ ID NO: 1788997 - DNA, 25 bp, Homo sapien
agcagtcaacacatggactagtgca

SEQ ID NO: 1788998 - DNA, 25 bp, Homo sapien
ccagcagtcaacacatggactagtg

SEQ ID NO: 1788999 - DNA, 25 bp, Homo sapien
agccgtcccactagatgagctccag

SEQ ID NO: 1789000 - DNA, 25 bp, Homo sapien
ctactgatgcatgcaattaatggaa

SEQ ID NO: 1789001 - DNA, 25 bp, Homo sapien
gccacatgctactactgatgcatgc

SEQ ID NO: 1789002 - DNA, 25 bp, Homo sapien
aaaatgccacatgctactactgatg

SEQ ID NO: 1789003 - DNA, 25 bp, Homo sapien
catgcaattaatggaaggacccaag

SEQ ID NO: 1789004 - DNA, 25 bp, Homo sapien
cagaggcgatcggatgcttagccac

SEQ ID NO: 1789005 - DNA, 25 bp, Homo sapien
cagctcagtgccaagttctcctcct

SEQ ID NO: 1789006 - DNA, 25 bp, Homo sapien
tggaaaaagccagaggcgatcggat

SEQ ID NO: 1789007 - DNA, 25 bp, Homo sapien
cgatcggatgcttagccacatgcag

SEQ ID NO: 1789008 - DNA, 25 bp, Homo sapien
cacgttcctcctcccttaatgctgc

SEQ ID NO: 1789009 - DNA, 25 bp, Homo sapien
ggagaggaagaataccaggcgccca

SEQ ID NO: 1789010 - DNA, 25 bp, Homo sapien
ccacccagggcagaattagatcctg

SEQ ID NO: 1789011 - DNA, 25 bp, Homo sapien
ctgccaaggctgcaagccaaatgaa

SEQ ID NO: 1789012 - DNA, 25 bp, Homo sapien
caggacgtttgttttatcaagggca

SEQ ID NO: 1789013 - DNA, 25 bp, Homo sapien
gcaatgccgtcttgtgcccagagct

SEQ ID NO: 1789014 - DNA, 25 bp, Homo sapien
caagggcagcttactgatgttgagc

SEQ ID NO: 1789015 - DNA, 25 bp, Homo sapien
gaactatagttcatgaccacgccca

SEQ ID NO: 1789016 - DNA, 25 bp, Homo sapien
tggacatttctggtgcttacagacc

SEQ ID NO: 1789017 - DNA, 25 bp, Homo sapien
tctaccaaacagtatatggacaatg

SEQ ID NO: 1789018 - DNA, 25 bp, Homo sapien
tcagcctcacatagagaaatttaca

SEQ ID NO: 1789019 - DNA, 25 bp, Homo sapien
aggctcaggtgcagttaacaaaggg

SEQ ID NO: 1789020 - DNA, 25 bp, Homo sapien
ttgctgccgctgttcatgacagaca

SEQ ID NO: 1789021 - DNA, 25 bp, Homo sapien
tcattgctgccgctgttcatgacag

SEQ ID NO: 1789022 - DNA, 25 bp, Homo sapien
catatttctgtaccaaacttgatac

SEQ ID NO: 1789023 - DNA, 25 bp, Homo sapien
gacatatttctgtaccaaacttgat

SEQ ID NO: 1789024 - DNA, 25 bp, Homo sapien
tataaacagttatcacagtggcgta

SEQ ID NO: 1789025 - DNA, 25 bp, Homo sapien
gagaaatgggttttaatggacaaga

SEQ ID NO: 1789026 - DNA, 25 bp, Homo sapien
gactgtagacaagcggccagaaaga

SEQ ID NO: 1789027 - DNA, 25 bp, Homo sapien
tgtgctgggatgagtacatctgaga

SEQ ID NO: 1789028 - DNA, 25 bp, Homo sapien
agtgacgtggggctagcatcgggtt

SEQ ID NO: 1789029 - DNA, 25 bp, Homo sapien
acgtggggctagcatcgggtttctc

SEQ ID NO: 1789030 - DNA, 25 bp, Homo sapien
tgggaccgcagctgaagtgacgtgg

SEQ ID NO: 1789031 - DNA, 25 bp, Homo sapien
gggaccgcagctgaagtgacgtggg

SEQ ID NO: 1789032 - DNA, 25 bp, Homo sapien
ctacgagagaagattcgtatagtca

SEQ ID NO: 1789033 - DNA, 25 bp, Homo sapien
cgagagaagattcgtatagtcagtg

SEQ ID NO: 1789034 - DNA, 25 bp, Homo sapien
agattcgtatagtcagtgtggtcag

SEQ ID NO: 1789035 - DNA, 25 bp, Homo sapien
gagaagattcgtatagtcagtgtgg

SEQ ID NO: 1789036 - DNA, 25 bp, Homo sapien
tccacttctggggttgacacggcgc

SEQ ID NO: 1789037 - DNA, 25 bp, Homo sapien
cggcgctacagaagccaagcgactc

SEQ ID NO: 1789038 - DNA, 25 bp, Homo sapien
gttgacacggcgctacagaagccaa

SEQ ID NO: 1789039 - DNA, 25 bp, Homo sapien
acttctggggttgacacggcgctac

SEQ ID NO: 1789040 - DNA, 25 bp, Homo sapien
catgatcgcctgtttgatttccgtc

SEQ ID NO: 1789041 - DNA, 25 bp, Homo sapien
tttgatttccgtcagcatggaccta

SEQ ID NO: 1789042 - DNA, 25 bp, Homo sapien
gcacatgatcgcctgtttgatttcc

SEQ ID NO: 1789043 - DNA, 25 bp, Homo sapien
tgtttgatttccgtcagcatggacc

SEQ ID NO: 1789044 - DNA, 25 bp, Homo sapien
gacatcgcataactccatagtacat

SEQ ID NO: 1789045 - DNA, 25 bp, Homo sapien
aatgacatcgcataactccatagta

SEQ ID NO: 1789046 - DNA, 25 bp, Homo sapien
ggaaaatgacatcgcataactccat

SEQ ID NO: 1789047 - DNA, 25 bp, Homo sapien
catcgcataactccatagtacatac

SEQ ID NO: 1789048 - DNA, 25 bp, Homo sapien
caggaaacgctagggatcatttgcc

SEQ ID NO: 1789049 - DNA, 25 bp, Homo sapien
cattcactgttgttttaaggtcacc

SEQ ID NO: 1789050 - DNA, 25 bp, Homo sapien
cataaaattagcttccatgagagca

SEQ ID NO: 1789051 - DNA, 25 bp, Homo sapien
taaggtcacctaccaaaatgaggtg

SEQ ID NO: 1789052 - DNA, 25 bp, Homo sapien
tttgttaacctcagaggaggccatc

SEQ ID NO: 1789053 - DNA, 25 bp, Homo sapien
aagaatgactctccacaattgaggg

SEQ ID NO: 1789054 - DNA, 25 bp, Homo sapien
agaagtactacccagcctaactaag

SEQ ID NO: 1789055 - DNA, 25 bp, Homo sapien
aagagccatgccacattttactaag

SEQ ID NO: 1789056 - DNA, 25 bp, Homo sapien
tacaaccggtagttggtcagcaaac

SEQ ID NO: 1789057 - DNA, 25 bp, Homo sapien
tatgcccctgccttcaaacgtaagc

SEQ ID NO: 1789058 - DNA, 25 bp, Homo sapien
tgctgcacgaggaaatgagtggcac

SEQ ID NO: 1789059 - DNA, 25 bp, Homo sapien
tttagccttgggacctactgccttc

SEQ ID NO: 1789060 - DNA, 25 bp, Homo sapien
gagctggtaaggaagacaacctgga

SEQ ID NO: 1789061 - DNA, 25 bp, Homo sapien
gatagaaaggtcaagtggcttgccc

SEQ ID NO: 1789062 - DNA, 25 bp, Homo sapien
gcctcagggctcatgactatgttgg

SEQ ID NO: 1789063 - DNA, 25 bp, Homo sapien
ggaagtatacaagtggctcaagcca

SEQ ID NO: 1789064 - DNA, 25 bp, Homo sapien
tttttattcacaccgtcagtctggg

SEQ ID NO: 1789065 - DNA, 25 bp, Homo sapien
tccagtcctgggaacaatccatttg

SEQ ID NO: 1789066 - DNA, 25 bp, Homo sapien
acacatgttgggtcacgagtaagcc

SEQ ID NO: 1789067 - DNA, 25 bp, Homo sapien
tctagggagacttgaaccagactat

SEQ ID NO: 1789068 - DNA, 25 bp, Homo sapien
aaggcggactgataattccacagca

SEQ ID NO: 1789069 - DNA, 25 bp, Homo sapien
tctggtctacttccaaaggcggact

SEQ ID NO: 1789070 - DNA, 25 bp, Homo sapien
cttccaaaggcggactgataattcc

SEQ ID NO: 1789071 - DNA, 25 bp, Homo sapien
tctacttccaaaggcggactgataa

SEQ ID NO: 1789072 - DNA, 25 bp, Homo sapien
cacctgctggaaatgattcagacac

SEQ ID NO: 1789073 - DNA, 25 bp, Homo sapien
tgacgatgaaatgacctctacccac

SEQ ID NO: 1789074 - DNA, 25 bp, Homo sapien
ctttccaaggtcaccgtgacgatga

SEQ ID NO: 1789075 - DNA, 25 bp, Homo sapien
cagcacctgctggaaatgattcaga

SEQ ID NO: 1789076 - DNA, 25 bp, Homo sapien
tgccctacttctcccaacgggcagc

SEQ ID NO: 1789077 - DNA, 25 bp, Homo sapien
caacgggcagcatggacacgcggca

SEQ ID NO: 1789078 - DNA, 25 bp, Homo sapien
gcagcatggacacgcggcagccctg

SEQ ID NO: 1789079 - DNA, 25 bp, Homo sapien
tacttctcccaacgggcagcatgga

SEQ ID NO: 1789080 - DNA, 25 bp, Homo sapien
tctcgctgccacagcacagtgacca

SEQ ID NO: 1789081 - DNA, 25 bp, Homo sapien
gcacagtgaccaacaacccctccag

SEQ ID NO: 1789082 - DNA, 25 bp, Homo sapien
gccaaggctggaggcactgcgggca

SEQ ID NO: 1789083 - DNA, 25 bp, Homo sapien
gctggaggcactgcgggcatggagg

SEQ ID NO: 1789084 - DNA, 25 bp, Homo sapien
gaacctcctccttgcgtttccatgg

SEQ ID NO: 1789085 - DNA, 25 bp, Homo sapien
tgctggccacgcaggccgttgtgca

SEQ ID NO: 1789086 - DNA, 25 bp, Homo sapien
aagaggctccattcaagaacctcct

SEQ ID NO: 1789087 - DNA, 25 bp, Homo sapien
aagcaggtcaggactttctcagtgg

SEQ ID NO: 1789088 - DNA, 25 bp, Homo sapien
gataataaagctctatgccactgga

SEQ ID NO: 1789089 - DNA, 25 bp, Homo sapien
gacatggcgcataccttccaggagt

SEQ ID NO: 1789090 - DNA, 25 bp, Homo sapien
tgagtaaactgcacacgacatggcg

SEQ ID NO: 1789091 - DNA, 25 bp, Homo sapien
tagtcaagctagttgcctcccatgt

SEQ ID NO: 1789092 - DNA, 25 bp, Homo sapien
gactatccaagtgcaggagcgatgt

SEQ ID NO: 1789093 - DNA, 25 bp, Homo sapien
caccaactggtgacttgtaccgaaa

SEQ ID NO: 1789094 - DNA, 25 bp, Homo sapien
ggtcactggcagaaacttaaagagt

SEQ ID NO: 1789095 - DNA, 25 bp, Homo sapien
ccatggtctggttgtgtctgggcca

SEQ ID NO: 1789096 - DNA, 25 bp, Homo sapien
actgagatgggagtgatgacatgcc

SEQ ID NO: 1789097 - DNA, 25 bp, Homo sapien
cctgaggtccaatcgtgctgggcaa

SEQ ID NO: 1789098 - DNA, 25 bp, Homo sapien
gatcctcgtaagaccatagagtagg

SEQ ID NO: 1789099 - DNA, 25 bp, Homo sapien
ctgctttacagtggagatcctcgta

SEQ ID NO: 1789100 - DNA, 25 bp, Homo sapien
agctggatctgctctttggactcat

SEQ ID NO: 1789101 - DNA, 25 bp, Homo sapien
ggatctgctctttggactcatcttt

SEQ ID NO: 1789102 - DNA, 25 bp, Homo sapien
ctggatctgctctttggactcatct

SEQ ID NO: 1789103 - DNA, 25 bp, Homo sapien
gtaaaaagtatggtaacttcagcat

SEQ ID NO: 1789104 - DNA, 25 bp, Homo sapien
tctgagtttgatttatgaagagggt

SEQ ID NO: 1789105 - DNA, 25 bp, Homo sapien
tgagtttgatttatgaagagggttc

SEQ ID NO: 1789106 - DNA, 25 bp, Homo sapien
cttctgagtttgatttatgaagagg

SEQ ID NO: 1789107 - DNA, 25 bp, Homo sapien
ctacagagctgtcttctgagtttga

SEQ ID NO: 1789108 - DNA, 25 bp, Homo sapien
aatattccaccatattggatgtgcc

SEQ ID NO: 1789109 - DNA, 25 bp, Homo sapien
gaccccaggatttttatagcagcag

SEQ ID NO: 1789110 - DNA, 25 bp, Homo sapien
aaggacattattagggacacagacc

SEQ ID NO: 1789111 - DNA, 25 bp, Homo sapien
cgtagagaatattcagtcatgggaa

SEQ ID NO: 1789112 - DNA, 25 bp, Homo sapien
gaagttctgccagaaatacttattt

SEQ ID NO: 1789113 - DNA, 25 bp, Homo sapien
tctggttctttcggaagttctgcca

SEQ ID NO: 1789114 - DNA, 25 bp, Homo sapien
ttctggttctttcggaagttctgcc

SEQ ID NO: 1789115 - DNA, 25 bp, Homo sapien
cggaagttctgccagaaatacttat

SEQ ID NO: 1789116 - DNA, 25 bp, Homo sapien
cgctgggtgaatacaaaaaactggg

SEQ ID NO: 1789117 - DNA, 25 bp, Homo sapien
tttgaatcacaagtgacgctgggtg

SEQ ID NO: 1789118 - DNA, 25 bp, Homo sapien
caagtggaatgttgccaaggaaccc

SEQ ID NO: 1789119 - DNA, 25 bp, Homo sapien
caaggaacccaggtgtgctgtgacg

SEQ ID NO: 1789120 - DNA, 25 bp, Homo sapien
taggaaaccatttcaggcacggctg

SEQ ID NO: 1789121 - DNA, 25 bp, Homo sapien
gcaatggtgcctctggtcagcgtgt

SEQ ID NO: 1789122 - DNA, 25 bp, Homo sapien
tttaccagcttccaatatcgttagg

SEQ ID NO: 1789123 - DNA, 25 bp, Homo sapien
tattgcctctggtatatctgagcca

SEQ ID NO: 1789124 - DNA, 25 bp, Homo sapien
gaaaatcaacttccaactcgcacct

SEQ ID NO: 1789125 - DNA, 25 bp, Homo sapien
ccatataggtctgtatctgaaagta

SEQ ID NO: 1789126 - DNA, 25 bp, Homo sapien
catgaagcatgttgagttaatcaga

SEQ ID NO: 1789127 - DNA, 25 bp, Homo sapien
ttattgtcataaattggtttccaaa

SEQ ID NO: 1789128 - DNA, 25 bp, Homo sapien
tgaccatcatcattagctgaatccg

SEQ ID NO: 1789129 - DNA, 25 bp, Homo sapien
gcaagtgcttcctcaattgtgatca

SEQ ID NO: 1789130 - DNA, 25 bp, Homo sapien
tatttcactggcaacataaccaacg

SEQ ID NO: 1789131 - DNA, 25 bp, Homo sapien
gctcctcatcgctcatcgttatttc

SEQ ID NO: 1789132 - DNA, 25 bp, Homo sapien
cgttggagttcaacggcatgatctt

SEQ ID NO: 1789133 - DNA, 25 bp, Homo sapien
tcgcccacgttggagttcaacggca

SEQ ID NO: 1789134 - DNA, 25 bp, Homo sapien
actggtattttggtatggattgcac

SEQ ID NO: 1789135 - DNA, 25 bp, Homo sapien
cccacgttggagttcaacggcatga

SEQ ID NO: 1789136 - DNA, 25 bp, Homo sapien
ggctgttctaggtattctgtggttc

SEQ ID NO: 1789137 - DNA, 25 bp, Homo sapien
tctaggtattctgtggttcaataca

SEQ ID NO: 1789138 - DNA, 25 bp, Homo sapien
taggtattctgtggttcaatacaaa

SEQ ID NO: 1789139 - DNA, 25 bp, Homo sapien
ttggctgttctaggtattctgtggt

SEQ ID NO: 1789140 - DNA, 25 bp, Homo sapien
attgtggcaaagcagaccaggctga

SEQ ID NO: 1789141 - DNA, 25 bp, Homo sapien
tcttgccccaagaacgctggattag

SEQ ID NO: 1789142 - DNA, 25 bp, Homo sapien
taaaaagtggtgcagtcggctggac

SEQ ID NO: 1789143 - DNA, 25 bp, Homo sapien
tctctccaggagtaaatgtcttgct

SEQ ID NO: 1789144 - DNA, 25 bp, Homo sapien
cagccaggccaaaggcttgaagccg

SEQ ID NO: 1789145 - DNA, 25 bp, Homo sapien
tgtagctgcttctgcaaccacgcag

SEQ ID NO: 1789146 - DNA, 25 bp, Homo sapien
gacaatagttgtgctctcaatgagc

SEQ ID NO: 1789147 - DNA, 25 bp, Homo sapien
cacctcttactgagttgacttctga

SEQ ID NO: 1789148 - DNA, 25 bp, Homo sapien
tttttcccaatatgatgacgcccgc

SEQ ID NO: 1789149 - DNA, 25 bp, Homo sapien
taaagaaggtagatcctctccacgg

SEQ ID NO: 1789150 - DNA, 25 bp, Homo sapien
caaagcagctcatttaggcaccagt

SEQ ID NO: 1789151 - DNA, 25 bp, Homo sapien
ggtacgtcctatcacaccctctgag

SEQ ID NO: 1789152 - DNA, 25 bp, Homo sapien
accccagcatcccgggtagcttgga

SEQ ID NO: 1789153 - DNA, 25 bp, Homo sapien
gatcccaccccagcatcccgggtag

SEQ ID NO: 1789154 - DNA, 25 bp, Homo sapien
cccaccccagcatcccgggtagctt

SEQ ID NO: 1789155 - DNA, 25 bp, Homo sapien
gcgatcccaccccagcatcccgggt

SEQ ID NO: 1789156 - DNA, 25 bp, Homo sapien
tagtgaaatggggtcaaaccctgaa

SEQ ID NO: 1789157 - DNA, 25 bp, Homo sapien
tggggtcaaaccctgaaacatacac

SEQ ID NO: 1789158 - DNA, 25 bp, Homo sapien
gactacagacattttagtgaaatgg

SEQ ID NO: 1789159 - DNA, 25 bp, Homo sapien
aaatgacagactacagacattttag

SEQ ID NO: 1789160 - DNA, 25 bp, Homo sapien
actgccggtgctgggcctcgtattc

SEQ ID NO: 1789161 - DNA, 25 bp, Homo sapien
gtttgatgagccatcaaacgttggg

SEQ ID NO: 1789162 - DNA, 25 bp, Homo sapien
tgagccatcaaacgttgggtaagaa

SEQ ID NO: 1789163 - DNA, 25 bp, Homo sapien
catctggccagtcagcagggtccag

SEQ ID NO: 1789164 - DNA, 25 bp, Homo sapien
tggcccctgtcccagagaaaagact

SEQ ID NO: 1789165 - DNA, 25 bp, Homo sapien
gacggaacaaaacgggcatttctca

SEQ ID NO: 1789166 - DNA, 25 bp, Homo sapien
tgggcagcttataaccagacggaac

SEQ ID NO: 1789167 - DNA, 25 bp, Homo sapien
gaaacatggtgatcttagggactca

SEQ ID NO: 1789168 - DNA, 25 bp, Homo sapien
ccaaatgggcctgccatgagagtgc

SEQ ID NO: 1789169 - DNA, 25 bp, Homo sapien
tgagagtgccttccgacataacagg

SEQ ID NO: 1789170 - DNA, 25 bp, Homo sapien
gagacgacgtcatcagcactgtagg

SEQ ID NO: 1789171 - DNA, 25 bp, Homo sapien
ctttgatatgtcgaggaaggcctcc

SEQ ID NO: 1789172 - DNA, 25 bp, Homo sapien
agaccctctttgctggggcttgctg

SEQ ID NO: 1789173 - DNA, 25 bp, Homo sapien
gaaagctcttcctcagtgtcaacca

SEQ ID NO: 1789174 - DNA, 25 bp, Homo sapien
ggcttgctggactttctgtgtgcac

SEQ ID NO: 1789175 - DNA, 25 bp, Homo sapien
gggaaggctcccagaccctctttgc

SEQ ID NO: 1789176 - DNA, 25 bp, Homo sapien
catctagacctctgactttgctgct

SEQ ID NO: 1789177 - DNA, 25 bp, Homo sapien
atctagacctctgactttgctgctg

SEQ ID NO: 1789178 - DNA, 25 bp, Homo sapien
tcatctagacctctgactttgctgc

SEQ ID NO: 1789179 - DNA, 25 bp, Homo sapien
catttgcctgtaagtggggaccttc

SEQ ID NO: 1789180 - DNA, 25 bp, Homo sapien
cctccaactcctctagtcactatca

SEQ ID NO: 1789181 - DNA, 25 bp, Homo sapien
acacatttgcctgtaagtggggacc

SEQ ID NO: 1789182 - DNA, 25 bp, Homo sapien
gtaagtggggaccttctctgggtca

SEQ ID NO: 1789183 - DNA, 25 bp, Homo sapien
tttatcaagatactcgatgttgggc

SEQ ID NO: 1789184 - DNA, 25 bp, Homo sapien
tcagggagtcattcaggtatttatc

SEQ ID NO: 1789185 - DNA, 25 bp, Homo sapien
tgggccctttgtgaggacgtaccat

SEQ ID NO: 1789186 - DNA, 25 bp, Homo sapien
caagatactcgatgttgggcccttt

SEQ ID NO: 1789187 - DNA, 25 bp, Homo sapien
ctgtaattccaacggaggcgggcag

SEQ ID NO: 1789188 - DNA, 25 bp, Homo sapien
tcagggatgcgtaggaaccactgtc

SEQ ID NO: 1789189 - DNA, 25 bp, Homo sapien
tgagcatgaggaccgtgtcacaaga

SEQ ID NO: 1789190 - DNA, 25 bp, Homo sapien
caaagtctccatgacgtgggctgca

SEQ ID NO: 1789191 - DNA, 25 bp, Homo sapien
gcataactcgcaagaaaggcataag

SEQ ID NO: 1789192 - DNA, 25 bp, Homo sapien
cgtcacagctcagtatccgaaggag

SEQ ID NO: 1789193 - DNA, 25 bp, Homo sapien
aaaaagggagtgttgtgcatggcca

SEQ ID NO: 1789194 - DNA, 25 bp, Homo sapien
tctggagttacatgatcaggcaggc

SEQ ID NO: 1789195 - DNA, 25 bp, Homo sapien
tccccactcggagagcgtcttcact

SEQ ID NO: 1789196 - DNA, 25 bp, Homo sapien
gggtaattctgaagacgtcctgtac

SEQ ID NO: 1789197 - DNA, 25 bp, Homo sapien
ttctgaagacgtcctgtacctccca

SEQ ID NO: 1789198 - DNA, 25 bp, Homo sapien
aattctgaagacgtcctgtacctcc

SEQ ID NO: 1789199 - DNA, 25 bp, Homo sapien
tctttcccattgaacgcattcagtg

SEQ ID NO: 1789200 - DNA, 25 bp, Homo sapien
tttctttcccattgaacgcattcag

SEQ ID NO: 1789201 - DNA, 25 bp, Homo sapien
ctttctttcccattgaacgcattca

SEQ ID NO: 1789202 - DNA, 25 bp, Homo sapien
tttcccattgaacgcattcagtgac

SEQ ID NO: 1789203 - DNA, 25 bp, Homo sapien
tcttttggaacaagtgcatccttga

SEQ ID NO: 1789204 - DNA, 25 bp, Homo sapien
gcacccggaggagggtggagcctcc

SEQ ID NO: 1789205 - DNA, 25 bp, Homo sapien
catttgccggccaggccactgaatg

SEQ ID NO: 1789206 - DNA, 25 bp, Homo sapien
aatgaggaacctatggggcccgtct

SEQ ID NO: 1789207 - DNA, 25 bp, Homo sapien
taaacgagtgtgcaacacgggtgcg

SEQ ID NO: 1789208 - DNA, 25 bp, Homo sapien
gagtcctctttgcactatggcacga

SEQ ID NO: 1789209 - DNA, 25 bp, Homo sapien
gatataaacaactgatgtcctggcc

SEQ ID NO: 1789210 - DNA, 25 bp, Homo sapien
taaaaatggtgcacgttgtgagtcc

SEQ ID NO: 1789211 - DNA, 25 bp, Homo sapien
tccctccgatgctggccctgtaatt

SEQ ID NO: 1789212 - DNA, 25 bp, Homo sapien
ttaggaggactccagcaggactctc

SEQ ID NO: 1789213 - DNA, 25 bp, Homo sapien
gggcatctgtctcaactacttcctt

SEQ ID NO: 1789214 - DNA, 25 bp, Homo sapien
gcccatcagggcttgctgtttaacg

SEQ ID NO: 1789215 - DNA, 25 bp, Homo sapien
agttaatcaggtaattgctccgagc

SEQ ID NO: 1789216 - DNA, 25 bp, Homo sapien
tctaaatcggcgtagaattaggtcc

SEQ ID NO: 1789217 - DNA, 25 bp, Homo sapien
ttaggtcctaggcacggaaacacac

SEQ ID NO: 1789218 - DNA, 25 bp, Homo sapien
gcccaagaggtttacaaagtgccac

SEQ ID NO: 1789219 - DNA, 25 bp, Homo sapien
gactctgcgagtggagtttaccagc

SEQ ID NO: 1789220 - DNA, 25 bp, Homo sapien
tgtgtaacctcttaaacttcaccga

SEQ ID NO: 1789221 - DNA, 25 bp, Homo sapien
cagtctcatcatccgattgttctct

SEQ ID NO: 1789222 - DNA, 25 bp, Homo sapien
agcttgtgtaacctcttaaacttca

SEQ ID NO: 1789223 - DNA, 25 bp, Homo sapien
tattctcgggttcaggaaagtcagc

SEQ ID NO: 1789224 - DNA, 25 bp, Homo sapien
tgtagcaaacgcttcccaggaggct

SEQ ID NO: 1789225 - DNA, 25 bp, Homo sapien
taaggatctgtcactcagcagttgc

SEQ ID NO: 1789226 - DNA, 25 bp, Homo sapien
ggtgagtccaccctgcgtatcctaa

SEQ ID NO: 1789227 - DNA, 25 bp, Homo sapien
tagttatagtctaccctccacttcc

SEQ ID NO: 1789228 - DNA, 25 bp, Homo sapien
gaagaagcgactgggctaagactag

SEQ ID NO: 1789229 - DNA, 25 bp, Homo sapien
tagtctaccctccacttccaagaag

SEQ ID NO: 1789230 - DNA, 25 bp, Homo sapien
gcgactgggctaagactagaggcac

SEQ ID NO: 1789231 - DNA, 25 bp, Homo sapien
cgtatcatgaccctctttataaacc

SEQ ID NO: 1789232 - DNA, 25 bp, Homo sapien
tcatgaccctctttataaacccagc

SEQ ID NO: 1789233 - DNA, 25 bp, Homo sapien
tttctccgtatcatgaccctcttta

SEQ ID NO: 1789234 - DNA, 25 bp, Homo sapien
tcaccacctttctccgtatcatgac

SEQ ID NO: 1789235 - DNA, 25 bp, Homo sapien
tgaacacacctttgcattcttgcat

SEQ ID NO: 1789236 - DNA, 25 bp, Homo sapien
gggaaaccaacagagtctcttgtga

SEQ ID NO: 1789237 - DNA, 25 bp, Homo sapien
gagtctcttgtgaacacacctttgc

SEQ ID NO: 1789238 - DNA, 25 bp, Homo sapien
caacagagtctcttgtgaacacacc

SEQ ID NO: 1789239 - DNA, 25 bp, Homo sapien
tcttgtgcacgccagagtagagggc

SEQ ID NO: 1789240 - DNA, 25 bp, Homo sapien
catcttcgggaggtttctcaggaga

SEQ ID NO: 1789241 - DNA, 25 bp, Homo sapien
agtagagggcggaccgttcatccag

SEQ ID NO: 1789242 - DNA, 25 bp, Homo sapien
ggaccggcgaattctcaaacacgtg

SEQ ID NO: 1789243 - DNA, 25 bp, Homo sapien
caagagaacccttttagtacagcgg

SEQ ID NO: 1789244 - DNA, 25 bp, Homo sapien
tattgaactcgctgaccgaggtgcg

SEQ ID NO: 1789245 - DNA, 25 bp, Homo sapien
cgccttttctggagggacgctggca

SEQ ID NO: 1789246 - DNA, 25 bp, Homo sapien
caggccgcactagctgggtcaggtt

SEQ ID NO: 1789247 - DNA, 25 bp, Homo sapien
aatgacaaggccgtcctcaggacca

SEQ ID NO: 1789248 - DNA, 25 bp, Homo sapien
tcacagaaatgacaaggccgtcctc

SEQ ID NO: 1789249 - DNA, 25 bp, Homo sapien
cagaaatgacaaggccgtcctcagg

SEQ ID NO: 1789250 - DNA, 25 bp, Homo sapien
aaggccgtcctcaggaccatctttg

SEQ ID NO: 1789251 - DNA, 25 bp, Homo sapien
aaaagccactgagtgaccgccctgt

SEQ ID NO: 1789252 - DNA, 25 bp, Homo sapien
cacggaactgcttatatcttagtga

SEQ ID NO: 1789253 - DNA, 25 bp, Homo sapien
agtttaattgtagattcgggcttca

SEQ ID NO: 1789254 - DNA, 25 bp, Homo sapien
cacacattaatgttacagctaatta

SEQ ID NO: 1789255 - DNA, 25 bp, Homo sapien
ggtaactttcccatcgaactgccca

SEQ ID NO: 1789256 - DNA, 25 bp, Homo sapien
catcctagccaaaaacgctggtaac

SEQ ID NO: 1789257 - DNA, 25 bp, Homo sapien
aagaaaacggttgattcagtgactg

SEQ ID NO: 1789258 - DNA, 25 bp, Homo sapien
caagagaattactcactcaccgctt

SEQ ID NO: 1789259 - DNA, 25 bp, Homo sapien
agcttttcaaacagactttcatttt

SEQ ID NO: 1789260 - DNA, 25 bp, Homo sapien
caccaacagcaagcttttcaaacag

SEQ ID NO: 1789261 - DNA, 25 bp, Homo sapien
tctgacaccaacagcaagcttttca

SEQ ID NO: 1789262 - DNA, 25 bp, Homo sapien
ggctctgacaccaacagcaagcttt

SEQ ID NO: 1789263 - DNA, 25 bp, Homo sapien
tgttagaggatccatgtactcaggc

SEQ ID NO: 1789264 - DNA, 25 bp, Homo sapien
ctcaggcatcctgaaaacccaggtt

SEQ ID NO: 1789265 - DNA, 25 bp, Homo sapien
cattcagtagagataatgaagggat

SEQ ID NO: 1789266 - DNA, 25 bp, Homo sapien
tgaagggatatgtgttagaggatcc

SEQ ID NO: 1789267 - DNA, 25 bp, Homo sapien
ccagtgctgtgagattccctgtctc

SEQ ID NO: 1789268 - DNA, 25 bp, Homo sapien
cctccatgagtccagtgctgtgaga

SEQ ID NO: 1789269 - DNA, 25 bp, Homo sapien
atgagtccagtgctgtgagattccc

SEQ ID NO: 1789270 - DNA, 25 bp, Homo sapien
tgtctccagcacagaacttccccta

SEQ ID NO: 1789271 - DNA, 25 bp, Homo sapien
ccagcagtccccgtttgcaggacat

SEQ ID NO: 1789272 - DNA, 25 bp, Homo sapien
agagggtagggcagaaaaacttcag

SEQ ID NO: 1789273 - DNA, 25 bp, Homo sapien
tctgaatcacaaatacgtggacagg

SEQ ID NO: 1789274 - DNA, 25 bp, Homo sapien
cacatgagtcatgtcgtaaggaaac

SEQ ID NO: 1789275 - DNA, 25 bp, Homo sapien
gcagagagcgattcgtcaagtcaaa

SEQ ID NO: 1789276 - DNA, 25 bp, Homo sapien
tcaagtcaaatcctccaaaactgca

SEQ ID NO: 1789277 - DNA, 25 bp, Homo sapien
tgccaacgtgcagagagcgattcgt

SEQ ID NO: 1789278 - DNA, 25 bp, Homo sapien
cattgggtcagaattattactgcca

SEQ ID NO: 1789279 - DNA, 25 bp, Homo sapien
aaaccattaacatcctagctctcag

SEQ ID NO: 1789280 - DNA, 25 bp, Homo sapien
aaatgttgcaagtattgttggtcgc

SEQ ID NO: 1789281 - DNA, 25 bp, Homo sapien
gacattcctcatggatcttgacgtt

SEQ ID NO: 1789282 - DNA, 25 bp, Homo sapien
tgacgtttttcttgtgttaactcag

SEQ ID NO: 1789283 - DNA, 25 bp, Homo sapien
catcgtctctttcactgatttcacc

SEQ ID NO: 1789284 - DNA, 25 bp, Homo sapien
ttttcccaagagagatgcgagaggc

SEQ ID NO: 1789285 - DNA, 25 bp, Homo sapien
agtaggtgatttgatgacttctttg

SEQ ID NO: 1789286 - DNA, 25 bp, Homo sapien
tgacttctttgtacacaaagtctcc

SEQ ID NO: 1789287 - DNA, 25 bp, Homo sapien
caggcattccatcaaggcccgagtc

SEQ ID NO: 1789288 - DNA, 25 bp, Homo sapien
tgagagaactgcgaagactttctac

SEQ ID NO: 1789289 - DNA, 25 bp, Homo sapien
ctgcgaagactttctacagaacccc

SEQ ID NO: 1789290 - DNA, 25 bp, Homo sapien
gaactgcgaagactttctacagaac

SEQ ID NO: 1789291 - DNA, 25 bp, Homo sapien
gagaactgcgaagactttctacaga

SEQ ID NO: 1789292 - DNA, 25 bp, Homo sapien
cgcagaacgggcctcggtaaggcgg

SEQ ID NO: 1789293 - DNA, 25 bp, Homo sapien
tcggtaaggcggctcttcgtcatcc

SEQ ID NO: 1789294 - DNA, 25 bp, Homo sapien
tgtgcaccctggcacgcccgcagaa

SEQ ID NO: 1789295 - DNA, 25 bp, Homo sapien
atcttccgacttgacgctttcccgg

SEQ ID NO: 1789296 - DNA, 25 bp, Homo sapien
ttccatgaacgtacaaatcaagaat

SEQ ID NO: 1789297 - DNA, 25 bp, Homo sapien
aaagatctttccattaggtacattc

SEQ ID NO: 1789298 - DNA, 25 bp, Homo sapien
gtacattccatgaacgtacaaatca

SEQ ID NO: 1789299 - DNA, 25 bp, Homo sapien
tctttccattaggtacattccatga

SEQ ID NO: 1789300 - DNA, 25 bp, Homo sapien
ccatgggtggcttgctgattatatc

SEQ ID NO: 1789301 - DNA, 25 bp, Homo sapien
cactgagcacgtccacgtagatgaa

SEQ ID NO: 1789302 - DNA, 25 bp, Homo sapien
cgtagatgaacttgaacgtgccgac

SEQ ID NO: 1789303 - DNA, 25 bp, Homo sapien
ttaatccgatccaggagatcctcca

SEQ ID NO: 1789304 - DNA, 25 bp, Homo sapien
ctccagcagcttaaaggtgtccaaa

SEQ ID NO: 1789305 - DNA, 25 bp, Homo sapien
tgtcatactcttgtaacagctccac

SEQ ID NO: 1789306 - DNA, 25 bp, Homo sapien
cactgctgtcaagagaacagctctg

SEQ ID NO: 1789307 - DNA, 25 bp, Homo sapien
ttccgggtccctgatatttaactca

SEQ ID NO: 1789308 - DNA, 25 bp, Homo sapien
tgggatcctgactggtcgctgttac

SEQ ID NO: 1789309 - DNA, 25 bp, Homo sapien
tcctgggatcctgactggtcgctgt

SEQ ID NO: 1789310 - DNA, 25 bp, Homo sapien
cttctcctgggatcctgactggtcg

SEQ ID NO: 1789311 - DNA, 25 bp, Homo sapien
tctcctgggatcctgactggtcgct

SEQ ID NO: 1789312 - DNA, 25 bp, Homo sapien
ctttcgtagcatcctgagtctcggg

SEQ ID NO: 1789313 - DNA, 25 bp, Homo sapien
cactgctttcgtagcatcctgagtc

SEQ ID NO: 1789314 - DNA, 25 bp, Homo sapien
tctcactgctttcgtagcatcctga

SEQ ID NO: 1789315 - DNA, 25 bp, Homo sapien
tgagtctcggggtgagcatccactc

SEQ ID NO: 1789316 - DNA, 25 bp, Homo sapien
aaagcaggttcccagcgactcatgc

SEQ ID NO: 1789317 - DNA, 25 bp, Homo sapien
ttgtcaaagcaggttcccagcgact

SEQ ID NO: 1789318 - DNA, 25 bp, Homo sapien
caggttcccagcgactcatgctgac

SEQ ID NO: 1789319 - DNA, 25 bp, Homo sapien
tcccagcgactcatgctgacattac

SEQ ID NO: 1789320 - DNA, 25 bp, Homo sapien
taaaagacttcaagctgggctcggt

SEQ ID NO: 1789321 - DNA, 25 bp, Homo sapien
tcacagctccggcagatggaaactg

SEQ ID NO: 1789322 - DNA, 25 bp, Homo sapien
cagaggcgtccttgctaaaccgtgt

SEQ ID NO: 1789323 - DNA, 25 bp, Homo sapien
taaaccgtgtttagctccaggaggc

SEQ ID NO: 1789324 - DNA, 25 bp, Homo sapien
acatataacgtagggtctcactgtc

SEQ ID NO: 1789325 - DNA, 25 bp, Homo sapien
ctaagatacaccacatataacgtag

SEQ ID NO: 1789326 - DNA, 25 bp, Homo sapien
caccacatataacgtagggtctcac

SEQ ID NO: 1789327 - DNA, 25 bp, Homo sapien
gatacaccacatataacgtagggtc

SEQ ID NO: 1789328 - DNA, 25 bp, Homo sapien
tctggtccatgttggcggcgacgtc

SEQ ID NO: 1789329 - DNA, 25 bp, Homo sapien
gaagctgcttcacccggatctggtc

SEQ ID NO: 1789330 - DNA, 25 bp, Homo sapien
tcgggctgatccaagtcctctgcgt

SEQ ID NO: 1789331 - DNA, 25 bp, Homo sapien
ctctgcgtatctctgcaccagggct

SEQ ID NO: 1789332 - DNA, 25 bp, Homo sapien
ggtcttggaccataatccctcatgg

SEQ ID NO: 1789333 - DNA, 25 bp, Homo sapien
tagtagcccgtagtcatcagatcaa

SEQ ID NO: 1789334 - DNA, 25 bp, Homo sapien
caagagtaacgatgctggccattcg

SEQ ID NO: 1789335 - DNA, 25 bp, Homo sapien
ccattcgcacgtggcaaagagaagc

SEQ ID NO: 1789336 - DNA, 25 bp, Homo sapien
tgtgtcatcgaggactacttcgcgt

SEQ ID NO: 1789337 - DNA, 25 bp, Homo sapien
gatagaaacgctccatgtgtcatcg

SEQ ID NO: 1789338 - DNA, 25 bp, Homo sapien
tcagaaagcgacaatgcaatgagtg

SEQ ID NO: 1789339 - DNA, 25 bp, Homo sapien
cacaaggttctcgaaggtgttggaa

SEQ ID NO: 1789340 - DNA, 25 bp, Homo sapien
agatttccgtgagtccaccacttgg

SEQ ID NO: 1789341 - DNA, 25 bp, Homo sapien
tgcacccaggagagacgggctttcg

SEQ ID NO: 1789342 - DNA, 25 bp, Homo sapien
ttggctcagtgtgctgaagcccgcg

SEQ ID NO: 1789343 - DNA, 25 bp, Homo sapien
catgggcagaccgatggaaatgagc

SEQ ID NO: 1789344 - DNA, 25 bp, Homo sapien
gagcaagggcactatcagaaatgga

SEQ ID NO: 1789345 - DNA, 25 bp, Homo sapien
gaggatcctcagtcctgtgccaagg

SEQ ID NO: 1789346 - DNA, 25 bp, Homo sapien
caaggtttcacgctgtttggccaca

SEQ ID NO: 1789347 - DNA, 25 bp, Homo sapien
tagagcattcgcagccagttggcat

SEQ ID NO: 1789348 - DNA, 25 bp, Homo sapien
gatattcctgaagcctaccacctgt

SEQ ID NO: 1789349 - DNA, 25 bp, Homo sapien
ctgtccaaatgtcaagccgaggtat

SEQ ID NO: 1789350 - DNA, 25 bp, Homo sapien
ggaagagaagaagcctgtctacagc

SEQ ID NO: 1789351 - DNA, 25 bp, Homo sapien
tgcaaataggctaggccacaacccg

SEQ ID NO: 1789352 - DNA, 25 bp, Homo sapien
tttgtgctttccaaagacaacaatt

SEQ ID NO: 1789353 - DNA, 25 bp, Homo sapien
agccgaactgcctttccaggtttct

SEQ ID NO: 1789354 - DNA, 25 bp, Homo sapien
ctgagccgaactgcctttccaggtt

SEQ ID NO: 1789355 - DNA, 25 bp, Homo sapien
ttcttttgtgctttccaaagacaac

SEQ ID NO: 1789356 - DNA, 25 bp, Homo sapien
agctttgaagtgaaaatcatacaca

SEQ ID NO: 1789357 - DNA, 25 bp, Homo sapien
gctttgaagtgaaaatcatacacaa

SEQ ID NO: 1789358 - DNA, 25 bp, Homo sapien
ctttgaagtgaaaatcatacacaat

SEQ ID NO: 1789359 - DNA, 25 bp, Homo sapien
caagataacttggactcagactatt

SEQ ID NO: 1789360 - DNA, 25 bp, Homo sapien
tactatgtcaggaactgatttccaa

SEQ ID NO: 1789361 - DNA, 25 bp, Homo sapien
tgactaaggcaaggccatgaaacaa

SEQ ID NO: 1789362 - DNA, 25 bp, Homo sapien
gcagcagtgacttggcaagttgacc

SEQ ID NO: 1789363 - DNA, 25 bp, Homo sapien
ggccgtcacacaagtaccctgggat

SEQ ID NO: 1789364 - DNA, 25 bp, Homo sapien
ttacagtatgcagaaggtgacagct

SEQ ID NO: 1789365 - DNA, 25 bp, Homo sapien
tagtcttaactgctgtggccgtcac

SEQ ID NO: 1789366 - DNA, 25 bp, Homo sapien
ccatggttctctgatgagtggtcca

SEQ ID NO: 1789367 - DNA, 25 bp, Homo sapien
ggtcagtgtgctttctgtgggattc

SEQ ID NO: 1789368 - DNA, 25 bp, Homo sapien
cggttttttattccagaagttgctg

SEQ ID NO: 1789369 - DNA, 25 bp, Homo sapien
tccaccatggtgtaccacagccagg

SEQ ID NO: 1789370 - DNA, 25 bp, Homo sapien
gctggctgaggtagcgtgtgggtca

SEQ ID NO: 1789371 - DNA, 25 bp, Homo sapien
ttcccattatgctatgccaccaaaa

SEQ ID NO: 1789372 - DNA, 25 bp, Homo sapien
ttcttcccattatgctatgccacca

SEQ ID NO: 1789373 - DNA, 25 bp, Homo sapien
gctcccggccgatttcttcccatta

SEQ ID NO: 1789374 - DNA, 25 bp, Homo sapien
cccattatgctatgccaccaaaaat

SEQ ID NO: 1789375 - DNA, 25 bp, Homo sapien
cagggacccaattaggtggcatcaa

SEQ ID NO: 1789376 - DNA, 25 bp, Homo sapien
tatgtctacagagatcccaaggaga

SEQ ID NO: 1789377 - DNA, 25 bp, Homo sapien
cagattctcgtctgcgctgtggaca

SEQ ID NO: 1789378 - DNA, 25 bp, Homo sapien
tggcaattactgatcccagagctga

SEQ ID NO: 1789379 - DNA, 25 bp, Homo sapien
tgcgagaacattcagataatcatca

SEQ ID NO: 1789380 - DNA, 25 bp, Homo sapien
taggcctccgtgctgcgagaacatt

SEQ ID NO: 1789381 - DNA, 25 bp, Homo sapien
agaaagtaggcctccgtgctgcgag

SEQ ID NO: 1789382 - DNA, 25 bp, Homo sapien
ccgtgctgcgagaacattcagataa

SEQ ID NO: 1789383 - DNA, 25 bp, Homo sapien
aaaggtcacccatccgccgcgagga

SEQ ID NO: 1789384 - DNA, 25 bp, Homo sapien
cctgcccgtgccaggaaaaggtcac

SEQ ID NO: 1789385 - DNA, 25 bp, Homo sapien
ggagactttcttcggcatggtcccc

SEQ ID NO: 1789386 - DNA, 25 bp, Homo sapien
gaagttgccgggctcaggagacttt

SEQ ID NO: 1789387 - DNA, 25 bp, Homo sapien
ccccatggggccagggatccgcgcc

SEQ ID NO: 1789388 - DNA, 25 bp, Homo sapien
cttccagctgcccaggcccggaggg

SEQ ID NO: 1789389 - DNA, 25 bp, Homo sapien
agctgcccaggcccggaggggcgcc

SEQ ID NO: 1789390 - DNA, 25 bp, Homo sapien
ccagctgcccaggcccggaggggcg

SEQ ID NO: 1789391 - DNA, 25 bp, Homo sapien
ttccagctgcccaggcccggagggg

SEQ ID NO: 1789392 - DNA, 25 bp, Homo sapien
ccgtagtcccggagggagaagcgca

SEQ ID NO: 1789393 - DNA, 25 bp, Homo sapien
ggtcccccgctgagctgatagagga

SEQ ID NO: 1789394 - DNA, 25 bp, Homo sapien
gctgagctgatagaggagggagccc

SEQ ID NO: 1789395 - DNA, 25 bp, Homo sapien
agtactgccgcaggtcgagcaggaa

SEQ ID NO: 1789396 - DNA, 25 bp, Homo sapien
gactgaactgcggtcactaacaatg

SEQ ID NO: 1789397 - DNA, 25 bp, Homo sapien
gcggtcactaacaatgcaacgaaga

SEQ ID NO: 1789398 - DNA, 25 bp, Homo sapien
gcgcgggacgggactgaactgcggt

SEQ ID NO: 1789399 - DNA, 25 bp, Homo sapien
ggacgggactgaactgcggtcacta

SEQ ID NO: 1789400 - DNA, 25 bp, Homo sapien
aacgcgagtgccagcatcgtccttg

SEQ ID NO: 1789401 - DNA, 25 bp, Homo sapien
tcccttggctcgaacgcgagtgcca

SEQ ID NO: 1789402 - DNA, 25 bp, Homo sapien
cagacttgggagggatctgcatcct

SEQ ID NO: 1789403 - DNA, 25 bp, Homo sapien
tggctcgaacgcgagtgccagcatc

SEQ ID NO: 1789404 - DNA, 25 bp, Homo sapien
ttgagaggatgtgtttactaaccac

SEQ ID NO: 1789405 - DNA, 25 bp, Homo sapien
attgagaggatgtgtttactaacca

SEQ ID NO: 1789406 - DNA, 25 bp, Homo sapien
gagaggatgtgtttactaaccacaa

SEQ ID NO: 1789407 - DNA, 25 bp, Homo sapien
gaggatgtgtttactaaccacaagt

SEQ ID NO: 1789408 - DNA, 25 bp, Homo sapien
attgactaggaagaaggactgttca

SEQ ID NO: 1789409 - DNA, 25 bp, Homo sapien
ctgcctttccccaaattgactagga

SEQ ID NO: 1789410 - DNA, 25 bp, Homo sapien
ttgactaggaagaaggactgttcac

SEQ ID NO: 1789411 - DNA, 25 bp, Homo sapien
tgcctttccccaaattgactaggaa

SEQ ID NO: 1789412 - DNA, 25 bp, Homo sapien
taaaggcatcaactgagctagagtc

SEQ ID NO: 1789413 - DNA, 25 bp, Homo sapien
taatgtatttgcttggagcatcagc

SEQ ID NO: 1789414 - DNA, 25 bp, Homo sapien
tccttcttggcatccctccccatat

SEQ ID NO: 1789415 - DNA, 25 bp, Homo sapien
ctcatatgtcataagtggttgtaat

SEQ ID NO: 1789416 - DNA, 25 bp, Homo sapien
tctgcctgacggttctgtttatcca

SEQ ID NO: 1789417 - DNA, 25 bp, Homo sapien
ttattgtcgggtcaccctgcacacc

SEQ ID NO: 1789418 - DNA, 25 bp, Homo sapien
gcattcatgtcaaacagcctttgtg

SEQ ID NO: 1789419 - DNA, 25 bp, Homo sapien
tatccaatgggaaggcattcatgtc

SEQ ID NO: 1789420 - DNA, 25 bp, Homo sapien
tcagaaaatgacaacgatggcctaa

SEQ ID NO: 1789421 - DNA, 25 bp, Homo sapien
tttctagagcaagttctggcggagg

SEQ ID NO: 1789422 - DNA, 25 bp, Homo sapien
caagatttatgtgtgtagcagagca

SEQ ID NO: 1789423 - DNA, 25 bp, Homo sapien
gaaaggagtagctcaccacactgtg

SEQ ID NO: 1789424 - DNA, 25 bp, Homo sapien
accactgcacaaagcaggctcactg

SEQ ID NO: 1789425 - DNA, 25 bp, Homo sapien
tcagttctgtggcttttacgggcca

SEQ ID NO: 1789426 - DNA, 25 bp, Homo sapien
cagttctgtggcttttacgggccat

SEQ ID NO: 1789427 - DNA, 25 bp, Homo sapien
aggctcactgagggaactggaaaac

SEQ ID NO: 1789428 - DNA, 25 bp, Homo sapien
gaagtaaggctctgttgcactcctg

SEQ ID NO: 1789429 - DNA, 25 bp, Homo sapien
taacaccctcagaaaagcggtggga

SEQ ID NO: 1789430 - DNA, 25 bp, Homo sapien
tcaaataccacagcttcgaagagga

SEQ ID NO: 1789431 - DNA, 25 bp, Homo sapien
aacttggccgcacgtgcttggagga

SEQ ID NO: 1789432 - DNA, 25 bp, Homo sapien
gcattctaagcaccacagcagttcc

SEQ ID NO: 1789433 - DNA, 25 bp, Homo sapien
tactttcaggcaagacactgcattc

SEQ ID NO: 1789434 - DNA, 25 bp, Homo sapien
cagggtgctgtttgttgtgatctgc

SEQ ID NO: 1789435 - DNA, 25 bp, Homo sapien
gaccagatgagtcagttccactgtt

SEQ ID NO: 1789436 - DNA, 25 bp, Homo sapien
acaccacaatccccgggccaggctg

SEQ ID NO: 1789437 - DNA, 25 bp, Homo sapien
accacaccacaatccccgggccagg

SEQ ID NO: 1789438 - DNA, 25 bp, Homo sapien
tgctaagaggtgaccacaccacaat

SEQ ID NO: 1789439 - DNA, 25 bp, Homo sapien
ctgctaagaggtgaccacaccacaa

SEQ ID NO: 1789440 - DNA, 25 bp, Homo sapien
tgctgaagttggctccacactcggg

SEQ ID NO: 1789441 - DNA, 25 bp, Homo sapien
tgtcccatgcagctgttagagagct

SEQ ID NO: 1789442 - DNA, 25 bp, Homo sapien
agagcacgcaacacattttcaagag

SEQ ID NO: 1789443 - DNA, 25 bp, Homo sapien
tctatggactgttgggagagcacgc

SEQ ID NO: 1789444 - DNA, 25 bp, Homo sapien
aataaatatacagggatcattcccc

SEQ ID NO: 1789445 - DNA, 25 bp, Homo sapien
caagtcataccatacccatacagta

SEQ ID NO: 1789446 - DNA, 25 bp, Homo sapien
tcatgtcattaagtggtcctctcca

SEQ ID NO: 1789447 - DNA, 25 bp, Homo sapien
tcaacactgtaacaatcatgtctgt

SEQ ID NO: 1789448 - DNA, 25 bp, Homo sapien
gaactgaccagactcataagagagg

SEQ ID NO: 1789449 - DNA, 25 bp, Homo sapien
gagagcagtgttgcctctctccatt

SEQ ID NO: 1789450 - DNA, 25 bp, Homo sapien
ctcactctctgcagctaatggagga

SEQ ID NO: 1789451 - DNA, 25 bp, Homo sapien
ccattccaattaggcaatgtggcag

SEQ ID NO: 1789452 - DNA, 25 bp, Homo sapien
taagaaaagcgaatgtccccaagag

SEQ ID NO: 1789453 - DNA, 25 bp, Homo sapien
tgtactagacacatcccaagctggt

SEQ ID NO: 1789454 - DNA, 25 bp, Homo sapien
gaaaacattcgcctatgagggtgga

SEQ ID NO: 1789455 - DNA, 25 bp, Homo sapien
ggattgaaaccactaacccacaggc

SEQ ID NO: 1789456 - DNA, 25 bp, Homo sapien
catatcccaacgcttctttaattta

SEQ ID NO: 1789457 - DNA, 25 bp, Homo sapien
ccataacaggtggtattaaatccac

SEQ ID NO: 1789458 - DNA, 25 bp, Homo sapien
cattgggggctgaagcttcaacata

SEQ ID NO: 1789459 - DNA, 25 bp, Homo sapien
taatttatatcaagcaaaagccatc

SEQ ID NO: 1789460 - DNA, 25 bp, Homo sapien
gcttacacaacagatatttacttct

SEQ ID NO: 1789461 - DNA, 25 bp, Homo sapien
gatcaaaggcccagcagattcaatt

SEQ ID NO: 1789462 - DNA, 25 bp, Homo sapien
tacttctcatcattctggaggtggg

SEQ ID NO: 1789463 - DNA, 25 bp, Homo sapien
tccaagatcaaaggcccagcagatt

SEQ ID NO: 1789464 - DNA, 25 bp, Homo sapien
gagtttcctgacaagcccatctgca

SEQ ID NO: 1789465 - DNA, 25 bp, Homo sapien
gataatctgaaaacgtaggactgct

SEQ ID NO: 1789466 - DNA, 25 bp, Homo sapien
gagatccccaaacacgagaagtctg

SEQ ID NO: 1789467 - DNA, 25 bp, Homo sapien
tctgctaaggatacagaagactgcc

SEQ ID NO: 1789468 - DNA, 25 bp, Homo sapien
gcatcctaaaattgactttggcaat

SEQ ID NO: 1789469 - DNA, 25 bp, Homo sapien
catcctaaaattgactttggcaatg

SEQ ID NO: 1789470 - DNA, 25 bp, Homo sapien
atcctaaaattgactttggcaatgc

SEQ ID NO: 1789471 - DNA, 25 bp, Homo sapien
tgtatcaggattggtctgtgcgacc

SEQ ID NO: 1789472 - DNA, 25 bp, Homo sapien
gaagacgacctgtcagtgatcccca

SEQ ID NO: 1789473 - DNA, 25 bp, Homo sapien
ttatagcaatgtgtagtatccaggc

SEQ ID NO: 1789474 - DNA, 25 bp, Homo sapien
caaaccatagccaactgagggcact

SEQ ID NO: 1789475 - DNA, 25 bp, Homo sapien
caagtaagtgttggagttcattcca

SEQ ID NO: 1789476 - DNA, 25 bp, Homo sapien
ggtctccaacccataagcagaaaca

SEQ ID NO: 1789477 - DNA, 25 bp, Homo sapien
caccctgaagagatatgttaaagag

SEQ ID NO: 1789478 - DNA, 25 bp, Homo sapien
cctgttgtgctctgtatcctggaaa

SEQ ID NO: 1789479 - DNA, 25 bp, Homo sapien
ccaggatcatgactaatattctcac

SEQ ID NO: 1789480 - DNA, 25 bp, Homo sapien
actgaatcctctcttcgggagttta

SEQ ID NO: 1789481 - DNA, 25 bp, Homo sapien
cctctcttcgggagtttagacgctt

SEQ ID NO: 1789482 - DNA, 25 bp, Homo sapien
aatggcaagccaggatcatgactaa

SEQ ID NO: 1789483 - DNA, 25 bp, Homo sapien
gctgtactcagatcctaagggcttc

SEQ ID NO: 1789484 - DNA, 25 bp, Homo sapien
actgactacactgcaccactgggta

SEQ ID NO: 1789485 - DNA, 25 bp, Homo sapien
aactcaatgtgtgatagtcctgaca

SEQ ID NO: 1789486 - DNA, 25 bp, Homo sapien
tgaccgagctccaaatagaaactga

SEQ ID NO: 1789487 - DNA, 25 bp, Homo sapien
tctgtgctctaagttctgcccttgg

SEQ ID NO: 1789488 - DNA, 25 bp, Homo sapien
ccgagtatctaatgtcatggtgcaa

SEQ ID NO: 1789489 - DNA, 25 bp, Homo sapien
aattgactgtgcattcacgggaagg

SEQ ID NO: 1789490 - DNA, 25 bp, Homo sapien
gggtaagagcacttcaagaccacct

SEQ ID NO: 1789491 - DNA, 25 bp, Homo sapien
ctatgacacgatcatgtggcggcat

SEQ ID NO: 1789492 - DNA, 25 bp, Homo sapien
tgacacgatcatgtggcggcatgtc

SEQ ID NO: 1789493 - DNA, 25 bp, Homo sapien
cggcatgtcgccccgggagtccagg

SEQ ID NO: 1789494 - DNA, 25 bp, Homo sapien
acacgatcatgtggcggcatgtcgc

SEQ ID NO: 1789495 - DNA, 25 bp, Homo sapien
gccatttcccacaggattccggtta

SEQ ID NO: 1789496 - DNA, 25 bp, Homo sapien
cagaagcagccatttcccacaggat

SEQ ID NO: 1789497 - DNA, 25 bp, Homo sapien
cagccatttcccacaggattccggt

SEQ ID NO: 1789498 - DNA, 25 bp, Homo sapien
gaagcagccatttcccacaggattc

SEQ ID NO: 1789499 - DNA, 25 bp, Homo sapien
accatgggccctgttatctcggtta

SEQ ID NO: 1789500 - DNA, 25 bp, Homo sapien
gcagatcaccgtgctcccatggttt

SEQ ID NO: 1789501 - DNA, 25 bp, Homo sapien
tgtgcacataaaggaacaagggtcc

SEQ ID NO: 1789502 - DNA, 25 bp, Homo sapien
gaggctataaatgctttgcccttat

SEQ ID NO: 1789503 - DNA, 25 bp, Homo sapien
tgaggcaggcactgtaaacattacc

SEQ ID NO: 1789504 - DNA, 25 bp, Homo sapien
cacctggggagccaaagatgcaatc

SEQ ID NO: 1789505 - DNA, 25 bp, Homo sapien
gatgcaatcagtataatcgaaggcg

SEQ ID NO: 1789506 - DNA, 25 bp, Homo sapien
aatcgaaggcgcctatccaagaggg

SEQ ID NO: 1789507 - DNA, 25 bp, Homo sapien
ggtccatggtcatccaagtaagtgg

SEQ ID NO: 1789508 - DNA, 25 bp, Homo sapien
cttactaggaggtggtccatggtca

SEQ ID NO: 1789509 - DNA, 25 bp, Homo sapien
tggtcatccaagtaagtggaatttc

SEQ ID NO: 1789510 - DNA, 25 bp, Homo sapien
taggaggtggtccatggtcatccaa

SEQ ID NO: 1789511 - DNA, 25 bp, Homo sapien
tattttgccaagcacaaccccttcc

SEQ ID NO: 1789512 - DNA, 25 bp, Homo sapien
ttgaagtgacagatagagggttgcc

SEQ ID NO: 1789513 - DNA, 25 bp, Homo sapien
caagcacaaccccttcccaagtact

SEQ ID NO: 1789514 - DNA, 25 bp, Homo sapien
ttgccaagcacaaccccttcccaag

SEQ ID NO: 1789515 - DNA, 25 bp, Homo sapien
cctttatccggaagtctgacctcat

SEQ ID NO: 1789516 - DNA, 25 bp, Homo sapien
tatccggaagtctgacctcatcact

SEQ ID NO: 1789517 - DNA, 25 bp, Homo sapien
ggaagtctgacctcatcacttctga

SEQ ID NO: 1789518 - DNA, 25 bp, Homo sapien
gacctttatccggaagtctgacctc

SEQ ID NO: 1789519 - DNA, 25 bp, Homo sapien
gggaaacgtcagcttctcgggtctg

SEQ ID NO: 1789520 - DNA, 25 bp, Homo sapien
tgctgcccgctgcttgcaccaggta

SEQ ID NO: 1789521 - DNA, 25 bp, Homo sapien
caacagaacttatcattgctgctgc

SEQ ID NO: 1789522 - DNA, 25 bp, Homo sapien
cgggtctgtggacactgcacatgat

SEQ ID NO: 1789523 - DNA, 25 bp, Homo sapien
acataccacttcactggtatattct

SEQ ID NO: 1789524 - DNA, 25 bp, Homo sapien
gacataccacttcactggtatattc

SEQ ID NO: 1789525 - DNA, 25 bp, Homo sapien
tgacataccacttcactggtatatt

SEQ ID NO: 1789526 - DNA, 25 bp, Homo sapien
gatgaagttaatttgtagcaaacaa

SEQ ID NO: 1789527 - DNA, 25 bp, Homo sapien
tgaaatcctcataaactacagtctg

SEQ ID NO: 1789528 - DNA, 25 bp, Homo sapien
catattctaaatcaaagaacctgaa

SEQ ID NO: 1789529 - DNA, 25 bp, Homo sapien
taaactacagtctgcacacttctca

SEQ ID NO: 1789530 - DNA, 25 bp, Homo sapien
agcccagatcagttacttttgccca

SEQ ID NO: 1789531 - DNA, 25 bp, Homo sapien
cagatcagttacttttgcccacttt

SEQ ID NO: 1789532 - DNA, 25 bp, Homo sapien
ttgtccattaagtgcacagatgaca

SEQ ID NO: 1789533 - DNA, 25 bp, Homo sapien
gtccattaagtgcacagatgacaag

SEQ ID NO: 1789534 - DNA, 25 bp, Homo sapien
cgtggaagcaatgggctgaatccca

SEQ ID NO: 1789535 - DNA, 25 bp, Homo sapien
agggccagccaattcagacgtggaa

SEQ ID NO: 1789536 - DNA, 25 bp, Homo sapien
gaccaggcctagtgaactgagacaa

SEQ ID NO: 1789537 - DNA, 25 bp, Homo sapien
tctctgaaaaaagggctagaggtgc

SEQ ID NO: 1789538 - DNA, 25 bp, Homo sapien
ggatatgggcctgctcggccttcgt

SEQ ID NO: 1789539 - DNA, 25 bp, Homo sapien
tgctcggccttcgtccttttcttct

SEQ ID NO: 1789540 - DNA, 25 bp, Homo sapien
tgctgttttatgtcctctgataagc

SEQ ID NO: 1789541 - DNA, 25 bp, Homo sapien
taatgctgttttatgtcctctgata

SEQ ID NO: 1789542 - DNA, 25 bp, Homo sapien
tgctcagaggaagtttctctatagc

SEQ ID NO: 1789543 - DNA, 25 bp, Homo sapien
cctgctcagaggaagtttctctata

SEQ ID NO: 1789544 - DNA, 25 bp, Homo sapien
ctcagaggaagtttctctatagctg

SEQ ID NO: 1789545 - DNA, 25 bp, Homo sapien
tcagaggaagtttctctatagctgt

SEQ ID NO: 1789546 - DNA, 25 bp, Homo sapien
catgactgcgactggatgctgaagg

SEQ ID NO: 1789547 - DNA, 25 bp, Homo sapien
tgtgcttccataacccacaaggatg

SEQ ID NO: 1789548 - DNA, 25 bp, Homo sapien
gggagtggcacttcatgactgcgac

SEQ ID NO: 1789549 - DNA, 25 bp, Homo sapien
cctgctctgggtagagatgtatcac

SEQ ID NO: 1789550 - DNA, 25 bp, Homo sapien
ttcctgtggccgatgtcctccttac

SEQ ID NO: 1789551 - DNA, 25 bp, Homo sapien
tcccctctcatgttaaatctgaggt

SEQ ID NO: 1789552 - DNA, 25 bp, Homo sapien
actcccctctcatgttaaatctgag

SEQ ID NO: 1789553 - DNA, 25 bp, Homo sapien
ccactcccctctcatgttaaatctg

SEQ ID NO: 1789554 - DNA, 25 bp, Homo sapien
tactgtgtgcccgaggatgcagtga

SEQ ID NO: 1789555 - DNA, 25 bp, Homo sapien
gaccaatgagtagggacatctggcc

SEQ ID NO: 1789556 - DNA, 25 bp, Homo sapien
tgctgattgtctcctagggatttct

SEQ ID NO: 1789557 - DNA, 25 bp, Homo sapien
tacaaggtgataagggaccaatgag

SEQ ID NO: 1789558 - DNA, 25 bp, Homo sapien
caagtagtcaggtcacaaatcagtc

SEQ ID NO: 1789559 - DNA, 25 bp, Homo sapien
cttatatgctttaatcggtgggctc

SEQ ID NO: 1789560 - DNA, 25 bp, Homo sapien
gagctaattccatcaaacgtcagtg

SEQ ID NO: 1789561 - DNA, 25 bp, Homo sapien
taaaccgctcaactcagattgctgg

SEQ ID NO: 1789562 - DNA, 25 bp, Homo sapien
tgtttaacctcatcttcccgtgaac

SEQ ID NO: 1789563 - DNA, 25 bp, Homo sapien
aacctcatcttcccgtgaacatctg

SEQ ID NO: 1789564 - DNA, 25 bp, Homo sapien
taacctcatcttcccgtgaacatct

SEQ ID NO: 1789565 - DNA, 25 bp, Homo sapien
tttaacctcatcttcccgtgaacat

SEQ ID NO: 1789566 - DNA, 25 bp, Homo sapien
cattgcaatcctcctgaacagaagg

SEQ ID NO: 1789567 - DNA, 25 bp, Homo sapien
gggaggaaatacacagaaccgatct

SEQ ID NO: 1789568 - DNA, 25 bp, Homo sapien
caactctcaaatgacatcctgcgtg

SEQ ID NO: 1789569 - DNA, 25 bp, Homo sapien
ttctatttcccctcattgcaatcct

SEQ ID NO: 1789570 - DNA, 25 bp, Homo sapien
tcttctgctcccagtctcctttcct

SEQ ID NO: 1789571 - DNA, 25 bp, Homo sapien
tgctcccagtctcctttcctccatt

SEQ ID NO: 1789572 - DNA, 25 bp, Homo sapien
catcatctcttctgctcccagtctc

SEQ ID NO: 1789573 - DNA, 25 bp, Homo sapien
ttctgctcccagtctcctttcctcc

SEQ ID NO: 1789574 - DNA, 25 bp, Homo sapien
caccacctggcttgggaaaggtagt

SEQ ID NO: 1789575 - DNA, 25 bp, Homo sapien
ccgacaagattctcagaagcaagac

SEQ ID NO: 1789576 - DNA, 25 bp, Homo sapien
ttaaatccgtgcttctccgacaaga

SEQ ID NO: 1789577 - DNA, 25 bp, Homo sapien
gcctggttttgttgtgaatgtctga

SEQ ID NO: 1789578 - DNA, 25 bp, Homo sapien
atggctggaggctccggtgaccctt

SEQ ID NO: 1789579 - DNA, 25 bp, Homo sapien
tagcccttgtaagcaggaggcagga

SEQ ID NO: 1789580 - DNA, 25 bp, Homo sapien
gggaagcagtcagcgcaacacacgc

SEQ ID NO: 1789581 - DNA, 25 bp, Homo sapien
cctgcgggaagcagtcagcgcaaca

SEQ ID NO: 1789582 - DNA, 25 bp, Homo sapien
ataaatagggttgttcggcagtact

SEQ ID NO: 1789583 - DNA, 25 bp, Homo sapien
tgaggaaatgaacatgtcgagtgaa

SEQ ID NO: 1789584 - DNA, 25 bp, Homo sapien
tgttcggcagtacttatatttttaa

SEQ ID NO: 1789585 - DNA, 25 bp, Homo sapien
gaacatgtcgagtgaataaataggg

SEQ ID NO: 1789586 - DNA, 25 bp, Homo sapien
gccactgggtcagcactaactagca

SEQ ID NO: 1789587 - DNA, 25 bp, Homo sapien
aagtccttggatggctgaaatcttc

SEQ ID NO: 1789588 - DNA, 25 bp, Homo sapien
cactgggtcagcactaactagcaga

SEQ ID NO: 1789589 - DNA, 25 bp, Homo sapien
agggaagtccttggatggctgaaat

SEQ ID NO: 1789590 - DNA, 25 bp, Homo sapien
ttctttgcacttaacttgcacagga

SEQ ID NO: 1789591 - DNA, 25 bp, Homo sapien
cattctttgcacttaacttgcacag

SEQ ID NO: 1789592 - DNA, 25 bp, Homo sapien
tcattctttgcacttaacttgcaca

SEQ ID NO: 1789593 - DNA, 25 bp, Homo sapien
tctttgcacttaacttgcacaggac

SEQ ID NO: 1789594 - DNA, 25 bp, Homo sapien
gctgagagctcgctgtgcataagtc

SEQ ID NO: 1789595 - DNA, 25 bp, Homo sapien
tcgctgtgcataagtccccgggcag

SEQ ID NO: 1789596 - DNA, 25 bp, Homo sapien
ctgtgcataagtccccgggcaggaa

SEQ ID NO: 1789597 - DNA, 25 bp, Homo sapien
agagctcgctgtgcataagtccccg

SEQ ID NO: 1789598 - DNA, 25 bp, Homo sapien
caaacattgagttcgttacaaccca

SEQ ID NO: 1789599 - DNA, 25 bp, Homo sapien
aaacattgagttcgttacaacccat

SEQ ID NO: 1789600 - DNA, 25 bp, Homo sapien
cacaaacattgagttcgttacaacc

SEQ ID NO: 1789601 - DNA, 25 bp, Homo sapien
ttgacggggtctctaatgatgttga

SEQ ID NO: 1789602 - DNA, 25 bp, Homo sapien
tccagtctccaaagcgacggaaaaa

SEQ ID NO: 1789603 - DNA, 25 bp, Homo sapien
ctgcctcatgctgggggtgcggatc

SEQ ID NO: 1789604 - DNA, 25 bp, Homo sapien
ccggttgacggggtctctaatgatg

SEQ ID NO: 1789605 - DNA, 25 bp, Homo sapien
gaaagactgttaacgctctgggtcc

SEQ ID NO: 1789606 - DNA, 25 bp, Homo sapien
gctgaaagaaagacgcgcaactccg

SEQ ID NO: 1789607 - DNA, 25 bp, Homo sapien
tgcaatgacagggttctatcgcgct

SEQ ID NO: 1789608 - DNA, 25 bp, Homo sapien
tgttcattaggatctgggtcacccg

SEQ ID NO: 1789609 - DNA, 25 bp, Homo sapien
aatataacacttgccccaactacca

SEQ ID NO: 1789610 - DNA, 25 bp, Homo sapien
ctctcaagtcacataacaaaggcag

SEQ ID NO: 1789611 - DNA, 25 bp, Homo sapien
tctctacaatctctcaagtcacata

SEQ ID NO: 1789612 - DNA, 25 bp, Homo sapien
caaaggcagttaccagctcttcaaa

SEQ ID NO: 1789613 - DNA, 25 bp, Homo sapien
tagacccttcccgaacacagtgctt

SEQ ID NO: 1789614 - DNA, 25 bp, Homo sapien
tgacctcatctgacatagacccttc

SEQ ID NO: 1789615 - DNA, 25 bp, Homo sapien
gggccttgccaaggatcgatctgat

SEQ ID NO: 1789616 - DNA, 25 bp, Homo sapien
tgagcccccccgagtttctgctgtg

SEQ ID NO: 1789617 - DNA, 25 bp, Homo sapien
tgcttcaaaagcgtgggactcggcc

SEQ ID NO: 1789618 - DNA, 25 bp, Homo sapien
tcctttgaacaagaagacagccttc

SEQ ID NO: 1789619 - DNA, 25 bp, Homo sapien
cagcagactcatttcaggccagcaa

SEQ ID NO: 1789620 - DNA, 25 bp, Homo sapien
gaaatgagcctaagacaactgcctt

SEQ ID NO: 1789621 - DNA, 25 bp, Homo sapien
tccagaatccaacagggccaacatg

SEQ ID NO: 1789622 - DNA, 25 bp, Homo sapien
ctttcatggaagctccaagactgga

SEQ ID NO: 1789623 - DNA, 25 bp, Homo sapien
cattaaatatggtctgtgtgccagg

SEQ ID NO: 1789624 - DNA, 25 bp, Homo sapien
cagccaagccgaataaacagtgtca

SEQ ID NO: 1789625 - DNA, 25 bp, Homo sapien
tcaccatggtgagaagtattgacac

SEQ ID NO: 1789626 - DNA, 25 bp, Homo sapien
taacagcttataagaggcaaatgcc

SEQ ID NO: 1789627 - DNA, 25 bp, Homo sapien
tgtgctggagccagatagtaacagc

SEQ ID NO: 1789628 - DNA, 25 bp, Homo sapien
ccttgacagcagagtatgaattgga

SEQ ID NO: 1789629 - DNA, 25 bp, Homo sapien
gactattatgcagatggtgcccaag

SEQ ID NO: 1789630 - DNA, 25 bp, Homo sapien
gccactaggtctgatggaaggctca

SEQ ID NO: 1789631 - DNA, 25 bp, Homo sapien
gccctggccttgtttagatgtagaa

SEQ ID NO: 1789632 - DNA, 25 bp, Homo sapien
ttagctgatgacctgtgccactagg

SEQ ID NO: 1789633 - DNA, 25 bp, Homo sapien
tagcgaagaggtgaatatccgcctg

SEQ ID NO: 1789634 - DNA, 25 bp, Homo sapien
tcagcaacattggatgaagtggtcc

SEQ ID NO: 1789635 - DNA, 25 bp, Homo sapien
taagggctatgaagggttcagcaac

SEQ ID NO: 1789636 - DNA, 25 bp, Homo sapien
cagtgaaactcttgactagcgaaga

SEQ ID NO: 1789637 - DNA, 25 bp, Homo sapien
tttctggctgccactactggattct

SEQ ID NO: 1789638 - DNA, 25 bp, Homo sapien
ctatttctggctgccactactggat

SEQ ID NO: 1789639 - DNA, 25 bp, Homo sapien
gctgccactactggattctggacca

SEQ ID NO: 1789640 - DNA, 25 bp, Homo sapien
tctggctgccactactggattctgg

SEQ ID NO: 1789641 - DNA, 25 bp, Homo sapien
gccaggacacttctagtctccttga

SEQ ID NO: 1789642 - DNA, 25 bp, Homo sapien
cctcttgttggccaggacacttcta

SEQ ID NO: 1789643 - DNA, 25 bp, Homo sapien
tcttgttggccaggacacttctagt

SEQ ID NO: 1789644 - DNA, 25 bp, Homo sapien
tgttggccaggacacttctagtctc

SEQ ID NO: 1789645 - DNA, 25 bp, Homo sapien
aactctctgtgtctgaaaaaggcca

SEQ ID NO: 1789646 - DNA, 25 bp, Homo sapien
tgaactcagtaagtaggaaactctc

SEQ ID NO: 1789647 - DNA, 25 bp, Homo sapien
aaggccagtggaatgattgtttagc

SEQ ID NO: 1789648 - DNA, 25 bp, Homo sapien
gacaagaagtctgctatgagcctaa

SEQ ID NO: 1789649 - DNA, 25 bp, Homo sapien
gagggatgtaaggagttcccagtaa

SEQ ID NO: 1789650 - DNA, 25 bp, Homo sapien
agagctctgcttcgcctgggtttac

SEQ ID NO: 1789651 - DNA, 25 bp, Homo sapien
tattgggttctctgtaaggcttcat

SEQ ID NO: 1789652 - DNA, 25 bp, Homo sapien
ggaaacgtcaacatacacagagggt

SEQ ID NO: 1789653 - DNA, 25 bp, Homo sapien
cttgaacttcctgtcagatcccgaa

SEQ ID NO: 1789654 - DNA, 25 bp, Homo sapien
taaatgagcaaagttcgggcccact

SEQ ID NO: 1789655 - DNA, 25 bp, Homo sapien
cactgtcaatttggtgagaggcaga

SEQ ID NO: 1789656 - DNA, 25 bp, Homo sapien
actgctgaggttgcatgcccttttt

SEQ ID NO: 1789657 - DNA, 25 bp, Homo sapien
aaaaacaccattcctggtgattctg

SEQ ID NO: 1789658 - DNA, 25 bp, Homo sapien
ttttaaatagtgactctggctaact

SEQ ID NO: 1789659 - DNA, 25 bp, Homo sapien
tttttaaatagtgactctggctaac

SEQ ID NO: 1789660 - DNA, 25 bp, Homo sapien
ctttcatgaacggcagagagagaaa

SEQ ID NO: 1789661 - DNA, 25 bp, Homo sapien
aggttggtatcagacaaacctcagt

SEQ ID NO: 1789662 - DNA, 25 bp, Homo sapien
tacctcttgtgagttgtggagtctt

SEQ ID NO: 1789663 - DNA, 25 bp, Homo sapien
gagaaaaccaccaaggttggtatca

SEQ ID NO: 1789664 - DNA, 25 bp, Homo sapien
gctcctctgtgtatcggcacttgct

SEQ ID NO: 1789665 - DNA, 25 bp, Homo sapien
ttgcttcacccacatgagggcttgc

SEQ ID NO: 1789666 - DNA, 25 bp, Homo sapien
tgtgtatcggcacttgcttcaccca

SEQ ID NO: 1789667 - DNA, 25 bp, Homo sapien
ggcacttgcttcacccacatgaggg

SEQ ID NO: 1789668 - DNA, 25 bp, Homo sapien
aaaaggagacagataggaccatggg

SEQ ID NO: 1789669 - DNA, 25 bp, Homo sapien
gagacagataggaccatgggcttcc

SEQ ID NO: 1789670 - DNA, 25 bp, Homo sapien
ccacatctggcagatggggtccctg

SEQ ID NO: 1789671 - DNA, 25 bp, Homo sapien
aaggagacagataggaccatgggct

SEQ ID NO: 1789672 - DNA, 25 bp, Homo sapien
gccccagtctgcacttccttgctct

SEQ ID NO: 1789673 - DNA, 25 bp, Homo sapien
cctgtgtgcagcctccagaggtgcc

SEQ ID NO: 1789674 - DNA, 25 bp, Homo sapien
tcacccccacaggatgatgacagca

SEQ ID NO: 1789675 - DNA, 25 bp, Homo sapien
aggtgccccagtctgcacttccttg

SEQ ID NO: 1789676 - DNA, 25 bp, Homo sapien
ctgatctacgacttgctcctctggt

SEQ ID NO: 1789677 - DNA, 25 bp, Homo sapien
tgatctacgacttgctcctctggtt

SEQ ID NO: 1789678 - DNA, 25 bp, Homo sapien
tctgggatgctgtccacaaaagtac

SEQ ID NO: 1789679 - DNA, 25 bp, Homo sapien
gagcactcgggatagttttcaagaa

SEQ ID NO: 1789680 - DNA, 25 bp, Homo sapien
aaataacctggggttggagcactcg

SEQ ID NO: 1789681 - DNA, 25 bp, Homo sapien
tgtccacaaaagtacggaatgatgt

SEQ ID NO: 1789682 - DNA, 25 bp, Homo sapien
cacgcccttgaagtaatgaggtaaa

SEQ ID NO: 1789683 - DNA, 25 bp, Homo sapien
tttgtagatactgagcacgcccttg

SEQ ID NO: 1789684 - DNA, 25 bp, Homo sapien
caggaagttttcattcacgttcagc

SEQ ID NO: 1789685 - DNA, 25 bp, Homo sapien
tcaagaatccccacgagcaggaagt

SEQ ID NO: 1789686 - DNA, 25 bp, Homo sapien
cattaagcctttggaacatggtgct

SEQ ID NO: 1789687 - DNA, 25 bp, Homo sapien
ccctggacacagacctctcatggag

SEQ ID NO: 1789688 - DNA, 25 bp, Homo sapien
gaacatgaagctcaagattttggca

SEQ ID NO: 1789689 - DNA, 25 bp, Homo sapien
tttgcaagcccagggaactaactgc

SEQ ID NO: 1789690 - DNA, 25 bp, Homo sapien
tctctgggcaaagaccagtttccct

SEQ ID NO: 1789691 - DNA, 25 bp, Homo sapien
aagtccctgatggtggtagggccac

SEQ ID NO: 1789692 - DNA, 25 bp, Homo sapien
gccaccttgaccttgtgcaacggga

SEQ ID NO: 1789693 - DNA, 25 bp, Homo sapien
ttgaccttgtgcaacgggatccagg

SEQ ID NO: 1789694 - DNA, 25 bp, Homo sapien
tcacacacgtggctcttggtctgag

SEQ ID NO: 1789695 - DNA, 25 bp, Homo sapien
tagtttgccctttatctcagactgt

SEQ ID NO: 1789696 - DNA, 25 bp, Homo sapien
ggatctctcatgagacagccattaa

SEQ ID NO: 1789697 - DNA, 25 bp, Homo sapien
gatctctctcagagcaaatgactga

SEQ ID NO: 1789698 - DNA, 25 bp, Homo sapien
ccctgaaggccgtatagaagtgttt

SEQ ID NO: 1789699 - DNA, 25 bp, Homo sapien
tgttttaaccgctagtccagctgga

SEQ ID NO: 1789700 - DNA, 25 bp, Homo sapien
gccatgaattagtccttccgttaca

SEQ ID NO: 1789701 - DNA, 25 bp, Homo sapien
ctggaccacgtggactggccaagtg

SEQ ID NO: 1789702 - DNA, 25 bp, Homo sapien
cacggaaacttgttgggatagagga

SEQ ID NO: 1789703 - DNA, 25 bp, Homo sapien
tctacaatgagttaagggtcactag

SEQ ID NO: 1789704 - DNA, 25 bp, Homo sapien
gggtcactagatcccttaaatcagt

SEQ ID NO: 1789705 - DNA, 25 bp, Homo sapien
gagaaaacaatatgggtgctaagtc

SEQ ID NO: 1789706 - DNA, 25 bp, Homo sapien
ccccactggaaagacgtcaggtgtt

SEQ ID NO: 1789707 - DNA, 25 bp, Homo sapien
ccagcccagcttagatttttagaca

SEQ ID NO: 1789708 - DNA, 25 bp, Homo sapien
tctgtgtgtattgcctcgtactggc

SEQ ID NO: 1789709 - DNA, 25 bp, Homo sapien
cattattaggatctgagcctgggac

SEQ ID NO: 1789710 - DNA, 25 bp, Homo sapien
gaaggagaggtatgggctaaaatcc

SEQ ID NO: 1789711 - DNA, 25 bp, Homo sapien
cccacaccagcaaccagttgcatgc

SEQ ID NO: 1789712 - DNA, 25 bp, Homo sapien
atgcatgctccactctcctaccaca

SEQ ID NO: 1789713 - DNA, 25 bp, Homo sapien
tgagaaccttcagcgcctgttccca

SEQ ID NO: 1789714 - DNA, 25 bp, Homo sapien
tgtccccgacgggagagctgggtct

SEQ ID NO: 1789715 - DNA, 25 bp, Homo sapien
gggcaggcaatcttaggatcagtct

SEQ ID NO: 1789716 - DNA, 25 bp, Homo sapien
tccagatagtttgggcagaggctcc

SEQ ID NO: 1789717 - DNA, 25 bp, Homo sapien
agtcagagatggagtaccactgggt

SEQ ID NO: 1789718 - DNA, 25 bp, Homo sapien
gcacgcatccgattaggcaaagcag

SEQ ID NO: 1789719 - DNA, 25 bp, Homo sapien
atgaaatgcggttggaggcacgcat

SEQ ID NO: 1789720 - DNA, 25 bp, Homo sapien
ggaggcacgcatccgattaggcaaa

SEQ ID NO: 1789721 - DNA, 25 bp, Homo sapien
gcggttggaggcacgcatccgatta

SEQ ID NO: 1789722 - DNA, 25 bp, Homo sapien
gacccaggtaggcatgtccaggtat

SEQ ID NO: 1789723 - DNA, 25 bp, Homo sapien
ggtatttgtcccagacacgctcggt

SEQ ID NO: 1789724 - DNA, 25 bp, Homo sapien
gctcggtgagtaaccatgctttaca

SEQ ID NO: 1789725 - DNA, 25 bp, Homo sapien
cacccagtgacccaggtaggcatgt

SEQ ID NO: 1789726 - DNA, 25 bp, Homo sapien
tagaatgatctattagggtcctcgg

SEQ ID NO: 1789727 - DNA, 25 bp, Homo sapien
ttctggtgccaagggtggtcagcat

SEQ ID NO: 1789728 - DNA, 25 bp, Homo sapien
cacaggacagtcgagttttaggaga

SEQ ID NO: 1789729 - DNA, 25 bp, Homo sapien
tttaggagaggacggttctggtgcc

SEQ ID NO: 1789730 - DNA, 25 bp, Homo sapien
aacaattgtgttggtctctcctttc

SEQ ID NO: 1789731 - DNA, 25 bp, Homo sapien
aaaacttgactaagttgagcacttg

SEQ ID NO: 1789732 - DNA, 25 bp, Homo sapien
aaacttgactaagttgagcacttga

SEQ ID NO: 1789733 - DNA, 25 bp, Homo sapien
gactttggaacaattgtgttggtct

SEQ ID NO: 1789734 - DNA, 25 bp, Homo sapien
tcaagtccactcagatcagtaggca

SEQ ID NO: 1789735 - DNA, 25 bp, Homo sapien
tcctcatgccacacttcacaaggga

SEQ ID NO: 1789736 - DNA, 25 bp, Homo sapien
gacacggccaagaagtcaagtccac

SEQ ID NO: 1789737 - DNA, 25 bp, Homo sapien
tcagtaggcactagatgggcaattc

SEQ ID NO: 1789738 - DNA, 25 bp, Homo sapien
gttcccagagcttgtattgcttgtg

SEQ ID NO: 1789739 - DNA, 25 bp, Homo sapien
tgtgtctctagactgaagccacctg

SEQ ID NO: 1789740 - DNA, 25 bp, Homo sapien
gagcttgtattgcttgtgccttctg

SEQ ID NO: 1789741 - DNA, 25 bp, Homo sapien
ctagactgaagccacctgatgttcc

SEQ ID NO: 1789742 - DNA, 25 bp, Homo sapien
tgggattcatgagtaacaaagggct

SEQ ID NO: 1789743 - DNA, 25 bp, Homo sapien
ccgtacttatttctggtagactaca

SEQ ID NO: 1789744 - DNA, 25 bp, Homo sapien
gatacttgctgtaactaaactggaa

SEQ ID NO: 1789745 - DNA, 25 bp, Homo sapien
tctccgattcattaaaacccttatg

SEQ ID NO: 1789746 - DNA, 25 bp, Homo sapien
aatgcacagggccttttgaaaatcc

SEQ ID NO: 1789747 - DNA, 25 bp, Homo sapien
aaaatgcacagggccttttgaaaat

SEQ ID NO: 1789748 - DNA, 25 bp, Homo sapien
aaatgcacagggccttttgaaaatc

SEQ ID NO: 1789749 - DNA, 25 bp, Homo sapien
ttttgaaaatcctgcatctcctgac

SEQ ID NO: 1789750 - DNA, 25 bp, Homo sapien
aaaatgcagaaaccgctaggttcct

SEQ ID NO: 1789751 - DNA, 25 bp, Homo sapien
gaaaccgctaggttcctttgatgaa

SEQ ID NO: 1789752 - DNA, 25 bp, Homo sapien
ggaagagaaagtattggtctgtgtg

SEQ ID NO: 1789753 - DNA, 25 bp, Homo sapien
tgtgtggggtaggtcgctgagggcc

SEQ ID NO: 1789754 - DNA, 25 bp, Homo sapien
gtcggtgtactccccagggttggca

SEQ ID NO: 1789755 - DNA, 25 bp, Homo sapien
tgcaccacgctggccgctcccaaaa

SEQ ID NO: 1789756 - DNA, 25 bp, Homo sapien
acgctggccgctcccaaaactgtgt

SEQ ID NO: 1789757 - DNA, 25 bp, Homo sapien
tgtactccccagggttggcaaacgc

SEQ ID NO: 1789758 - DNA, 25 bp, Homo sapien
gtccagcagagattatgtgcaccaa

SEQ ID NO: 1789759 - DNA, 25 bp, Homo sapien
agagattatgtgcaccaaacaaata

SEQ ID NO: 1789760 - DNA, 25 bp, Homo sapien
ctggtccagcagagattatgtgcac

SEQ ID NO: 1789761 - DNA, 25 bp, Homo sapien
cagagattatgtgcaccaaacaaat

SEQ ID NO: 1789762 - DNA, 25 bp, Homo sapien
gatccgagtgtatgcacactccgcg

SEQ ID NO: 1789763 - DNA, 25 bp, Homo sapien
tgtatgcacactccgcgctgaccag

SEQ ID NO: 1789764 - DNA, 25 bp, Homo sapien
gagccctcttcccttaacaatctgc

SEQ ID NO: 1789765 - DNA, 25 bp, Homo sapien
tcctttccttgatccgagtgtatgc

SEQ ID NO: 1789766 - DNA, 25 bp, Homo sapien
ctgctgcattgacatatgtttgaac

SEQ ID NO: 1789767 - DNA, 25 bp, Homo sapien
aagactgggcagtgacaagcacgat

SEQ ID NO: 1789768 - DNA, 25 bp, Homo sapien
taatcttcagtactcctaaaagtcc

SEQ ID NO: 1789769 - DNA, 25 bp, Homo sapien
ttttactgcccaagatctgaacatt

SEQ ID NO: 1789770 - DNA, 25 bp, Homo sapien
gaatgataaatatcactcgccagta

SEQ ID NO: 1789771 - DNA, 25 bp, Homo sapien
atgataaatatcactcgccagtaac

SEQ ID NO: 1789772 - DNA, 25 bp, Homo sapien
tgtgaatgataaatatcactcgcca

SEQ ID NO: 1789773 - DNA, 25 bp, Homo sapien
gtgaatgataaatatcactcgccag

SEQ ID NO: 1789774 - DNA, 25 bp, Homo sapien
tcagggaatccattgaaaagaaggg

SEQ ID NO: 1789775 - DNA, 25 bp, Homo sapien
cattcagggaatccattgaaaagaa

SEQ ID NO: 1789776 - DNA, 25 bp, Homo sapien
ttcagggaatccattgaaaagaagg

SEQ ID NO: 1789777 - DNA, 25 bp, Homo sapien
ggcattcagggaatccattgaaaag

SEQ ID NO: 1789778 - DNA, 25 bp, Homo sapien
tgtactccattcagttactctcgct

SEQ ID NO: 1789779 - DNA, 25 bp, Homo sapien
tactctcgcttccttgttggtagct

SEQ ID NO: 1789780 - DNA, 25 bp, Homo sapien
cgcttccttgttggtagctcagagg

SEQ ID NO: 1789781 - DNA, 25 bp, Homo sapien
cagttactctcgcttccttgttggt

SEQ ID NO: 1789782 - DNA, 25 bp, Homo sapien
ctggaagagaaccggggtcgcacat

SEQ ID NO: 1789783 - DNA, 25 bp, Homo sapien
catccgctggtagaggatctgcaca

SEQ ID NO: 1789784 - DNA, 25 bp, Homo sapien
gcttgctgacgtgagacttaagtcc

SEQ ID NO: 1789785 - DNA, 25 bp, Homo sapien
ccaaacttgcgcttcagcaggtgga

SEQ ID NO: 1789786 - DNA, 25 bp, Homo sapien
gaactgctctttgacgtagtggtaa

SEQ ID NO: 1789787 - DNA, 25 bp, Homo sapien
gagccatctagtgtacccgggaaag

SEQ ID NO: 1789788 - DNA, 25 bp, Homo sapien
cgcaaaaccgggcatctcccaatga

SEQ ID NO: 1789789 - DNA, 25 bp, Homo sapien
tggatgtctcctaccattgaggtaa

SEQ ID NO: 1789790 - DNA, 25 bp, Homo sapien
gacaagatgccttgggatggagcca

SEQ ID NO: 1789791 - DNA, 25 bp, Homo sapien
cctggtctctgaagtggttttgtat

SEQ ID NO: 1789792 - DNA, 25 bp, Homo sapien
gagataccctggtctctgaagtggt

SEQ ID NO: 1789793 - DNA, 25 bp, Homo sapien
tagatccttccagaggagataccct

SEQ ID NO: 1789794 - DNA, 25 bp, Homo sapien
cttctcttagatccttccagaggag

SEQ ID NO: 1789795 - DNA, 25 bp, Homo sapien
ccatcctccttttcgatgtcctaat

SEQ ID NO: 1789796 - DNA, 25 bp, Homo sapien
acctcagcctcggattataggctca

SEQ ID NO: 1789797 - DNA, 25 bp, Homo sapien
cctcagcctcggattataggctcaa

SEQ ID NO: 1789798 - DNA, 25 bp, Homo sapien
ttttcgatgtcctaatctgtcttac

SEQ ID NO: 1789799 - DNA, 25 bp, Homo sapien
cacacatttgctagggctggctcta

SEQ ID NO: 1789800 - DNA, 25 bp, Homo sapien
catattgggtgcaaaagacacagcc

SEQ ID NO: 1789801 - DNA, 25 bp, Homo sapien
gaaatgggactctacctgcacagaa

SEQ ID NO: 1789802 - DNA, 25 bp, Homo sapien
gaggcagaactctacccatgcgggt

SEQ ID NO: 1789803 - DNA, 25 bp, Homo sapien
tgcctaatggtagggccctggtctc

SEQ ID NO: 1789804 - DNA, 25 bp, Homo sapien
tgaatatgattgatagctgttctcc

SEQ ID NO: 1789805 - DNA, 25 bp, Homo sapien
gattgatagctgttctccaggttgc

SEQ ID NO: 1789806 - DNA, 25 bp, Homo sapien
aggttgcttctgaaagtatgcctaa

SEQ ID NO: 1789807 - DNA, 25 bp, Homo sapien
cagattgtgagattgcacagtgtgt

SEQ ID NO: 1789808 - DNA, 25 bp, Homo sapien
ttgcacagtgtgtaaacttatcatc

SEQ ID NO: 1789809 - DNA, 25 bp, Homo sapien
tttcagattgtgagattgcacagtg

SEQ ID NO: 1789810 - DNA, 25 bp, Homo sapien
cagtgtgtaaacttatcatcattct

SEQ ID NO: 1789811 - DNA, 25 bp, Homo sapien
taaaagtacccagataaacttgcag

SEQ ID NO: 1789812 - DNA, 25 bp, Homo sapien
gaatgtttttgaacgaccaattgtc

SEQ ID NO: 1789813 - DNA, 25 bp, Homo sapien
tgatcactgctgaaaagaaatgcct

SEQ ID NO: 1789814 - DNA, 25 bp, Homo sapien
tcccaatgttctgacaagagcagag

SEQ ID NO: 1789815 - DNA, 25 bp, Homo sapien
taaggccctgtaagtaaatccgtca

SEQ ID NO: 1789816 - DNA, 25 bp, Homo sapien
cctgagtaactaaaaccttggaatg

SEQ ID NO: 1789817 - DNA, 25 bp, Homo sapien
taagacagtcaaagatcaactagct

SEQ ID NO: 1789818 - DNA, 25 bp, Homo sapien
tacaagcacttttacggcactcaag

SEQ ID NO: 1789819 - DNA, 25 bp, Homo sapien
tatatgggtgatgaataagttaagg

SEQ ID NO: 1789820 - DNA, 25 bp, Homo sapien
gatgaataagttaaggaatgcttca

SEQ ID NO: 1789821 - DNA, 25 bp, Homo sapien
tcaacaggatggaagaaatatgtca

SEQ ID NO: 1789822 - DNA, 25 bp, Homo sapien
gtcaacaggatggaagaaatatgtc

SEQ ID NO: 1789823 - DNA, 25 bp, Homo sapien
tgacggtagacatgccccgtagatg

SEQ ID NO: 1789824 - DNA, 25 bp, Homo sapien
ttgaagtgctgcatgtctgagaaac

SEQ ID NO: 1789825 - DNA, 25 bp, Homo sapien
gaaacagatcatcgtagacactgag

SEQ ID NO: 1789826 - DNA, 25 bp, Homo sapien
tagagtggtccaggttttgaagtgc

SEQ ID NO: 1789827 - DNA, 25 bp, Homo sapien
cttacttgaaacacctgcgatttct

SEQ ID NO: 1789828 - DNA, 25 bp, Homo sapien
aaacacctgcgatttctgtttcatc

SEQ ID NO: 1789829 - DNA, 25 bp, Homo sapien
cttgaaacacctgcgatttctgttt

SEQ ID NO: 1789830 - DNA, 25 bp, Homo sapien
tacttgaaacacctgcgatttctgt

SEQ ID NO: 1789831 - DNA, 25 bp, Homo sapien
ctgaccatcacaggggttaagtacc

SEQ ID NO: 1789832 - DNA, 25 bp, Homo sapien
tgaccatcacaggggttaagtacct

SEQ ID NO: 1789833 - DNA, 25 bp, Homo sapien
accatcacaggggttaagtacctgg

SEQ ID NO: 1789834 - DNA, 25 bp, Homo sapien
catcacaggggttaagtacctggaa

SEQ ID NO: 1789835 - DNA, 25 bp, Homo sapien
cctggcagttacttctgggtttcag

SEQ ID NO: 1789836 - DNA, 25 bp, Homo sapien
cagtgcaagttataactgaaacagg

SEQ ID NO: 1789837 - DNA, 25 bp, Homo sapien
gaggcctggatttgctgacaacagc

SEQ ID NO: 1789838 - DNA, 25 bp, Homo sapien
caggttagtgttctgaccagtctgg

SEQ ID NO: 1789839 - DNA, 25 bp, Homo sapien
gtggaaaattatatctgcctttggc

SEQ ID NO: 1789840 - DNA, 25 bp, Homo sapien
tagaaatggcctgtccaggatagtg

SEQ ID NO: 1789841 - DNA, 25 bp, Homo sapien
gcctttggcaagtgtatgtttctaa

SEQ ID NO: 1789842 - DNA, 25 bp, Homo sapien
caggatagtgtgctaagctggtgat

SEQ ID NO: 1789843 - DNA, 25 bp, Homo sapien
cgaaaagctccaacttcaaatctgg

SEQ ID NO: 1789844 - DNA, 25 bp, Homo sapien
aaagctccaacttcaaatctggtcc

SEQ ID NO: 1789845 - DNA, 25 bp, Homo sapien
ctaagcgaaaagctccaacttcaaa

SEQ ID NO: 1789846 - DNA, 25 bp, Homo sapien
gctccaacttcaaatctggtcctac

SEQ ID NO: 1789847 - DNA, 25 bp, Homo sapien
agggaaagggggcacattttctgct

SEQ ID NO: 1789848 - DNA, 25 bp, Homo sapien
ggaaagggggcacattttctgctgg

SEQ ID NO: 1789849 - DNA, 25 bp, Homo sapien
gaaagggggcacattttctgctggt

SEQ ID NO: 1789850 - DNA, 25 bp, Homo sapien
gggaaagggggcacattttctgctg

SEQ ID NO: 1789851 - DNA, 25 bp, Homo sapien
tgtctgcgccataccagtttcaggg

SEQ ID NO: 1789852 - DNA, 25 bp, Homo sapien
cttttgaacaccgtcacctgtgggc

SEQ ID NO: 1789853 - DNA, 25 bp, Homo sapien
cagtcccgggagccacatcttcaga

SEQ ID NO: 1789854 - DNA, 25 bp, Homo sapien
tccggagtgtctctcagctctaagt

SEQ ID NO: 1789855 - DNA, 25 bp, Homo sapien
gatatcaggaaaggaaacatgctct

SEQ ID NO: 1789856 - DNA, 25 bp, Homo sapien
tgccagccagcagcaagatatcagg

SEQ ID NO: 1789857 - DNA, 25 bp, Homo sapien
cattggggaactggagggtttcaca

SEQ ID NO: 1789858 - DNA, 25 bp, Homo sapien
catgctcttcagtatacattgggga

SEQ ID NO: 1789859 - DNA, 25 bp, Homo sapien
cctgtgagccttgcagattcgggtc

SEQ ID NO: 1789860 - DNA, 25 bp, Homo sapien
tgctcctgagcaccattacagttgt

SEQ ID NO: 1789861 - DNA, 25 bp, Homo sapien
gacatgaaccattcaagagggagtg

SEQ ID NO: 1789862 - DNA, 25 bp, Homo sapien
ctctgcatcattagaaacacaggct

SEQ ID NO: 1789863 - DNA, 25 bp, Homo sapien
gcatgagttccacaactcctgcagc

SEQ ID NO: 1789864 - DNA, 25 bp, Homo sapien
agcatgagttccacaactcctgcag

SEQ ID NO: 1789865 - DNA, 25 bp, Homo sapien
ctcagcatgagttccacaactcctg

SEQ ID NO: 1789866 - DNA, 25 bp, Homo sapien
ggtcatgaccacttggagggccttt

SEQ ID NO: 1789867 - DNA, 25 bp, Homo sapien
actccaaggtcatgaccacttggag

SEQ ID NO: 1789868 - DNA, 25 bp, Homo sapien
caaggtcatgaccacttggagggcc

SEQ ID NO: 1789869 - DNA, 25 bp, Homo sapien
atgaccacttggagggccttttgcc

SEQ ID NO: 1789870 - DNA, 25 bp, Homo sapien
ttctttaatgactgagagtctggct

SEQ ID NO: 1789871 - DNA, 25 bp, Homo sapien
tcattgtattggcttagttcttaca

SEQ ID NO: 1789872 - DNA, 25 bp, Homo sapien
tctttaatgactgagagtctggctt

SEQ ID NO: 1789873 - DNA, 25 bp, Homo sapien
ttgtattggcttagttcttacaatc

SEQ ID NO: 1789874 - DNA, 25 bp, Homo sapien
tcagtggaagatacatttggctcag

SEQ ID NO: 1789875 - DNA, 25 bp, Homo sapien
cattggccctttgcttgctattaga

SEQ ID NO: 1789876 - DNA, 25 bp, Homo sapien
gtcattggccctttgcttgctatta

SEQ ID NO: 1789877 - DNA, 25 bp, Homo sapien
tattgtcattggccctttgcttgct

SEQ ID NO: 1789878 - DNA, 25 bp, Homo sapien
ggccctttgcttgctattagatttt

SEQ ID NO: 1789879 - DNA, 25 bp, Homo sapien
gagggtcccagtccatgaggacact

SEQ ID NO: 1789880 - DNA, 25 bp, Homo sapien
ccttgggcctgaggacactgctttg

SEQ ID NO: 1789881 - DNA, 25 bp, Homo sapien
ggacactgccttgggcctgaggaca

SEQ ID NO: 1789882 - DNA, 25 bp, Homo sapien
tcttgtgtgaacagagggtcccagt

SEQ ID NO: 1789883 - DNA, 25 bp, Homo sapien
tggagggaaacaagccatccattca

SEQ ID NO: 1789884 - DNA, 25 bp, Homo sapien
ggagggaaacaagccatccattcat

SEQ ID NO: 1789885 - DNA, 25 bp, Homo sapien
ttggagggaaacaagccatccattc

SEQ ID NO: 1789886 - DNA, 25 bp, Homo sapien
cttggagggaaacaagccatccatt

SEQ ID NO: 1789887 - DNA, 25 bp, Homo sapien
gcttgtaacacttggcggccttgga

SEQ ID NO: 1789888 - DNA, 25 bp, Homo sapien
tgagaaacaggactgctattcggac

SEQ ID NO: 1789889 - DNA, 25 bp, Homo sapien
gactgctattcggactactggtgtc

SEQ ID NO: 1789890 - DNA, 25 bp, Homo sapien
taaaatccactgctctatgaagggc

SEQ ID NO: 1789891 - DNA, 25 bp, Homo sapien
ttcttggagtatgttctgcatccag

SEQ ID NO: 1789892 - DNA, 25 bp, Homo sapien
ctaaagtggtttgttcttggagtat

SEQ ID NO: 1789893 - DNA, 25 bp, Homo sapien
aaacttgggcttcctgtatttgtct

SEQ ID NO: 1789894 - DNA, 25 bp, Homo sapien
ggcttcctgtatttgtctaaagtgg

SEQ ID NO: 1789895 - DNA, 25 bp, Homo sapien
ggtcttgatatgtgtttgtgccaca

SEQ ID NO: 1789896 - DNA, 25 bp, Homo sapien
ccacaaaactgtcaaaagatgagga

SEQ ID NO: 1789897 - DNA, 25 bp, Homo sapien
gaatcaggaacacagggttcagcaa

SEQ ID NO: 1789898 - DNA, 25 bp, Homo sapien
cagctgtctgttgacgacaccacaa

SEQ ID NO: 1789899 - DNA, 25 bp, Homo sapien
caactaagagcctgccacaggaggc

SEQ ID NO: 1789900 - DNA, 25 bp, Homo sapien
aactaagagcctgccacaggaggcc

SEQ ID NO: 1789901 - DNA, 25 bp, Homo sapien
tccaactaagagcctgccacaggag

SEQ ID NO: 1789902 - DNA, 25 bp, Homo sapien
actaagagcctgccacaggaggcct

SEQ ID NO: 1789903 - DNA, 25 bp, Homo sapien
taactgctgggctagggtcttgcac

SEQ ID NO: 1789904 - DNA, 25 bp, Homo sapien
tgacaaatcctgtgtttaacttggg

SEQ ID NO: 1789905 - DNA, 25 bp, Homo sapien
cttgggcgagcttcagaaggttctc

SEQ ID NO: 1789906 - DNA, 25 bp, Homo sapien
gaggcaccaccatataccagtttta

SEQ ID NO: 1789907 - DNA, 25 bp, Homo sapien
cacagcagagctggtgtaaccagct

SEQ ID NO: 1789908 - DNA, 25 bp, Homo sapien
gatttactgactgggcggtgctgct

SEQ ID NO: 1789909 - DNA, 25 bp, Homo sapien
cggtgctgctatggttaatgtatgc

SEQ ID NO: 1789910 - DNA, 25 bp, Homo sapien
gctggtcacacccttattgttgtca

SEQ ID NO: 1789911 - DNA, 25 bp, Homo sapien
gcttggcttacttctttcatgaagt

SEQ ID NO: 1789912 - DNA, 25 bp, Homo sapien
gatggttaagtgctgtatttgtgtc

SEQ ID NO: 1789913 - DNA, 25 bp, Homo sapien
gaagtctgcagtcctcggactcagg

SEQ ID NO: 1789914 - DNA, 25 bp, Homo sapien
acactgaagatgcttggcttacttc

SEQ ID NO: 1789915 - DNA, 25 bp, Homo sapien
cacaaagtgacaatgatgacctctg

SEQ ID NO: 1789916 - DNA, 25 bp, Homo sapien
gcaaagtcaagccacaaagtgacaa

SEQ ID NO: 1789917 - DNA, 25 bp, Homo sapien
gccacaaagtgacaatgatgacctc

SEQ ID NO: 1789918 - DNA, 25 bp, Homo sapien
gtcaagccacaaagtgacaatgatg

SEQ ID NO: 1789919 - DNA, 25 bp, Homo sapien
aggcaacgtagcttccctgcagacg

SEQ ID NO: 1789920 - DNA, 25 bp, Homo sapien
ggccctcagggaggcaacgtagctt

SEQ ID NO: 1789921 - DNA, 25 bp, Homo sapien
ctggctatgacggtgctggatcaca

SEQ ID NO: 1789922 - DNA, 25 bp, Homo sapien
ctgcagacgtcctgcgggtgctggg

SEQ ID NO: 1789923 - DNA, 25 bp, Homo sapien
gaaggtgacttcttctagaagacta

SEQ ID NO: 1789924 - DNA, 25 bp, Homo sapien
tagaagactaagctgcagcagcctt

SEQ ID NO: 1789925 - DNA, 25 bp, Homo sapien
ctggtgatgaagcagagagagccag

SEQ ID NO: 1789926 - DNA, 25 bp, Homo sapien
tttttgggccatgaggactggtgat

SEQ ID NO: 1789927 - DNA, 25 bp, Homo sapien
taaaggtgttccactattgctttta

SEQ ID NO: 1789928 - DNA, 25 bp, Homo sapien
ttttttgaacaccagtgatcttcat

SEQ ID NO: 1789929 - DNA, 25 bp, Homo sapien
ggtgttccactattgcttttaatga

SEQ ID NO: 1789930 - DNA, 25 bp, Homo sapien
ttgtaaaggtgttccactattgctt

SEQ ID NO: 1789931 - DNA, 25 bp, Homo sapien
ggaagtcactaccaatacttttcaa

SEQ ID NO: 1789932 - DNA, 25 bp, Homo sapien
gggaagtcactaccaatacttttca

SEQ ID NO: 1789933 - DNA, 25 bp, Homo sapien
catgcctttttcattggcttgagca

SEQ ID NO: 1789934 - DNA, 25 bp, Homo sapien
ccaagatcagcagtttgaaagcttc

SEQ ID NO: 1789935 - DNA, 25 bp, Homo sapien
gttgtctttgaaaacagcagaactg

SEQ ID NO: 1789936 - DNA, 25 bp, Homo sapien
aacaagtacctagactgtgtgccca

SEQ ID NO: 1789937 - DNA, 25 bp, Homo sapien
aaagcaaggaactgcagtttccaat

SEQ ID NO: 1789938 - DNA, 25 bp, Homo sapien
ggaactgcagtttccaatcctcaca

SEQ ID NO: 1789939 - DNA, 25 bp, Homo sapien
gcagtttccaatcctcacagtcatt

SEQ ID NO: 1789940 - DNA, 25 bp, Homo sapien
gtccatgacagctgctgaccaatat

SEQ ID NO: 1789941 - DNA, 25 bp, Homo sapien
aacagcattctcaagtcagaggaga

SEQ ID NO: 1789942 - DNA, 25 bp, Homo sapien
taaacagcattctcaagtcagagga

SEQ ID NO: 1789943 - DNA, 25 bp, Homo sapien
ttaaacagcattctcaagtcagagg

SEQ ID NO: 1789944 - DNA, 25 bp, Homo sapien
cagcattctcaagtcagaggagaga

SEQ ID NO: 1789945 - DNA, 25 bp, Homo sapien
caaggtctggaggatcgaaggaaac

SEQ ID NO: 1789946 - DNA, 25 bp, Homo sapien
gagaatcaattaccaggcctgcacc

SEQ ID NO: 1789947 - DNA, 25 bp, Homo sapien
caactggctacaagggagtgaccac

SEQ ID NO: 1789948 - DNA, 25 bp, Homo sapien
gacaacacctggagtaggacccata

SEQ ID NO: 1789949 - DNA, 25 bp, Homo sapien
cagggacctaggctcctcttgtctc

SEQ ID NO: 1789950 - DNA, 25 bp, Homo sapien
tagttctgctatgaatggcctccat

SEQ ID NO: 1789951 - DNA, 25 bp, Homo sapien
ggctcctcttgtctcgtagttctgc

SEQ ID NO: 1789952 - DNA, 25 bp, Homo sapien
tcttgtctcgtagttctgctatgaa

SEQ ID NO: 1789953 - DNA, 25 bp, Homo sapien
ttgaaactggatcagatggtgttta

SEQ ID NO: 1789954 - DNA, 25 bp, Homo sapien
aactggatcagatggtgtttagatc

SEQ ID NO: 1789955 - DNA, 25 bp, Homo sapien
tagatctttacagcctgtggccctg

SEQ ID NO: 1789956 - DNA, 25 bp, Homo sapien
tggtgtttagatctttacagcctgt

SEQ ID NO: 1789957 - DNA, 25 bp, Homo sapien
gaataaacttagtctcaaatccttc

SEQ ID NO: 1789958 - DNA, 25 bp, Homo sapien
gaggaataaacttagtctcaaatcc

SEQ ID NO: 1789959 - DNA, 25 bp, Homo sapien
aataaacttagtctcaaatccttct

SEQ ID NO: 1789960 - DNA, 25 bp, Homo sapien
tggaggaataaacttagtctcaaat

SEQ ID NO: 1789961 - DNA, 25 bp, Homo sapien
ctgatgatgcagtagccatggaggc

SEQ ID NO: 1789962 - DNA, 25 bp, Homo sapien
gctagtgtcacttaagaatgccctt

SEQ ID NO: 1789963 - DNA, 25 bp, Homo sapien
cactctggcttgtaaaatatgctag

SEQ ID NO: 1789964 - DNA, 25 bp, Homo sapien
gataacacggagatgctatttgcct

SEQ ID NO: 1789965 - DNA, 25 bp, Homo sapien
ctggcgagttaagagccacaatcag

SEQ ID NO: 1789966 - DNA, 25 bp, Homo sapien
gccacaatcagagagtgcgttaagt

SEQ ID NO: 1789967 - DNA, 25 bp, Homo sapien
taagagccacaatcagagagtgcgt

SEQ ID NO: 1789968 - DNA, 25 bp, Homo sapien
atcagagagtgcgttaagtgtttca

SEQ ID NO: 1789969 - DNA, 25 bp, Homo sapien
tatagtgtattagccagggatctcc

SEQ ID NO: 1789970 - DNA, 25 bp, Homo sapien
cattcgggccgtctacagattggat

SEQ ID NO: 1789971 - DNA, 25 bp, Homo sapien
cagagaggccgatggtgtaagtcac

SEQ ID NO: 1789972 - DNA, 25 bp, Homo sapien
cagaagtgctgatgtccaagggaag

SEQ ID NO: 1789973 - DNA, 25 bp, Homo sapien
tcttccctggacaggcaccagactt

SEQ ID NO: 1789974 - DNA, 25 bp, Homo sapien
caggcaccagactttagcaggatga

SEQ ID NO: 1789975 - DNA, 25 bp, Homo sapien
tccctggacaggcaccagactttag

SEQ ID NO: 1789976 - DNA, 25 bp, Homo sapien
tggacaggcaccagactttagcagg

SEQ ID NO: 1789977 - DNA, 25 bp, Homo sapien
tagcaaattgcagtcccaaatatgt

SEQ ID NO: 1789978 - DNA, 25 bp, Homo sapien
agcaaattgcagtcccaaatatgtt

SEQ ID NO: 1789979 - DNA, 25 bp, Homo sapien
gcctgcttttcgaataattacaagt

SEQ ID NO: 1789980 - DNA, 25 bp, Homo sapien
catcttgttgttcaatttggctgta

SEQ ID NO: 1789981 - DNA, 25 bp, Homo sapien
ttccatttccggtgtttggcgtata

SEQ ID NO: 1789982 - DNA, 25 bp, Homo sapien
tttggcgtataagctcctgaaagca

SEQ ID NO: 1789983 - DNA, 25 bp, Homo sapien
tacgtgccctgctgactctgtgcag

SEQ ID NO: 1789984 - DNA, 25 bp, Homo sapien
gctggatcaccacctattgccaggc

SEQ ID NO: 1789985 - DNA, 25 bp, Homo sapien
ctattgccaggcctcctttacgtgc

SEQ ID NO: 1789986 - DNA, 25 bp, Homo sapien
aggcctcctttacgtgccctgctga

SEQ ID NO: 1789987 - DNA, 25 bp, Homo sapien
ttctgggagaggtgttcaaatatat

SEQ ID NO: 1789988 - DNA, 25 bp, Homo sapien
ctttttgacattcaactgaacttgg

SEQ ID NO: 1789989 - DNA, 25 bp, Homo sapien
gagctgagatttcacgacacaaagt

SEQ ID NO: 1789990 - DNA, 25 bp, Homo sapien
gacattcaactgaacttggagccaa

SEQ ID NO: 1789991 - DNA, 25 bp, Homo sapien
cagtttcatccagtaggtatttggc

SEQ ID NO: 1789992 - DNA, 25 bp, Homo sapien
gcccaagttgtgacttgtgctggaa

SEQ ID NO: 1789993 - DNA, 25 bp, Homo sapien
cgccaggtagttaccatggcattca

SEQ ID NO: 1789994 - DNA, 25 bp, Homo sapien
cacactgagcggagggaggtttgtc

SEQ ID NO: 1789995 - DNA, 25 bp, Homo sapien
aggtttgtctcggaccctggatgac

SEQ ID NO: 1789996 - DNA, 25 bp, Homo sapien
aggcaggaaggaggtttagtttgct

SEQ ID NO: 1789997 - DNA, 25 bp, Homo sapien
gcaggaaggaggtttagtttgctgc

SEQ ID NO: 1789998 - DNA, 25 bp, Homo sapien
aggaaggaggtttagtttgctgctt

SEQ ID NO: 1789999 - DNA, 25 bp, Homo sapien
ggcaggaaggaggtttagtttgctg

SEQ ID NO: 1790000 - DNA, 25 bp, Homo sapien
aatcccagggctgtccatagctctg

SEQ ID NO: 1790001 - DNA, 25 bp, Homo sapien
tctgctactttcaatcccagggctg

SEQ ID NO: 1790002 - DNA, 25 bp, Homo sapien
gaatttgaatagactggccttggtc

SEQ ID NO: 1790003 - DNA, 25 bp, Homo sapien
gactgagaatttgaatagactggcc

SEQ ID NO: 1790004 - DNA, 25 bp, Homo sapien
tgcgccttgggatgtccagaagaca

SEQ ID NO: 1790005 - DNA, 25 bp, Homo sapien
catttccgagttgccggcctttggc

SEQ ID NO: 1790006 - DNA, 25 bp, Homo sapien
tccccaggtgcacgtttcaatttca

SEQ ID NO: 1790007 - DNA, 25 bp, Homo sapien
ggactataagtcacttgagggcagg

SEQ ID NO: 1790008 - DNA, 25 bp, Homo sapien
gctacggctaaggttcagatctcct

SEQ ID NO: 1790009 - DNA, 25 bp, Homo sapien
taagccctactgaatctgaatgtca

SEQ ID NO: 1790010 - DNA, 25 bp, Homo sapien
tgtctggcaaactcttagcatcgtg

SEQ ID NO: 1790011 - DNA, 25 bp, Homo sapien
tggtcaccactacatgtgcccaggt

SEQ ID NO: 1790012 - DNA, 25 bp, Homo sapien
gggagggcttacctgagcaggagct

SEQ ID NO: 1790013 - DNA, 25 bp, Homo sapien
gaagagggagggcttacctgagcag

SEQ ID NO: 1790014 - DNA, 25 bp, Homo sapien
gagggagggcttacctgagcaggag

SEQ ID NO: 1790015 - DNA, 25 bp, Homo sapien
aagagggagggcttacctgagcagg

SEQ ID NO: 1790016 - DNA, 25 bp, Homo sapien
tcacacttacgagggggcagtagag

SEQ ID NO: 1790017 - DNA, 25 bp, Homo sapien
tgatgacgttcctaccctcagggag

SEQ ID NO: 1790018 - DNA, 25 bp, Homo sapien
tcagggagctcacacttacgagggg

SEQ ID NO: 1790019 - DNA, 25 bp, Homo sapien
agccacacgggatgatgacgttcct

SEQ ID NO: 1790020 - DNA, 25 bp, Homo sapien
gagcacagaaggcatgagtaagact

SEQ ID NO: 1790021 - DNA, 25 bp, Homo sapien
cacagaaggcatgagtaagacttgc

SEQ ID NO: 1790022 - DNA, 25 bp, Homo sapien
tgagtaagacttgcatcagagaggc

SEQ ID NO: 1790023 - DNA, 25 bp, Homo sapien
gaaggcatgagtaagacttgcatca

SEQ ID NO: 1790024 - DNA, 25 bp, Homo sapien
agctgatgaaagctggctgctatgg

SEQ ID NO: 1790025 - DNA, 25 bp, Homo sapien
cttgaagagctgatgaaagctggct

SEQ ID NO: 1790026 - DNA, 25 bp, Homo sapien
aagctggctgctatggggacagcaa

SEQ ID NO: 1790027 - DNA, 25 bp, Homo sapien
ttaatccttgaagagctgatgaaag

SEQ ID NO: 1790028 - DNA, 25 bp, Homo sapien
gtatggtttgcttaacatggcactt

SEQ ID NO: 1790029 - DNA, 25 bp, Homo sapien
gcttaacatggcacttcttccttga

SEQ ID NO: 1790030 - DNA, 25 bp, Homo sapien
catggcacttcttccttgaagcctt

SEQ ID NO: 1790031 - DNA, 25 bp, Homo sapien
gttcctgcccaattcacctcctatg

SEQ ID NO: 1790032 - DNA, 25 bp, Homo sapien
gcataaactgagacgcattcacttg

SEQ ID NO: 1790033 - DNA, 25 bp, Homo sapien
tgggtcctcgggccaacacaaccta

SEQ ID NO: 1790034 - DNA, 25 bp, Homo sapien
taggcattgccttcagcataaactg

SEQ ID NO: 1790035 - DNA, 25 bp, Homo sapien
acacaacctacagcggcctgcctgt

SEQ ID NO: 1790036 - DNA, 25 bp, Homo sapien
tgcaaacattgttcctgtcaccatc

SEQ ID NO: 1790037 - DNA, 25 bp, Homo sapien
ggctgccatgcaaacattgttcctg

SEQ ID NO: 1790038 - DNA, 25 bp, Homo sapien
caggtggctgccatgcaaacattgt

SEQ ID NO: 1790039 - DNA, 25 bp, Homo sapien
ggtggctgccatgcaaacattgttc

SEQ ID NO: 1790040 - DNA, 25 bp, Homo sapien
ctgttttccgctgtggcttgccttg

SEQ ID NO: 1790041 - DNA, 25 bp, Homo sapien
gtgctgccggtacttcatctgctcc

SEQ ID NO: 1790042 - DNA, 25 bp, Homo sapien
ctgctccctttgatctttgctgttt

SEQ ID NO: 1790043 - DNA, 25 bp, Homo sapien
ccagtgctgccggtacttcatctgc

SEQ ID NO: 1790044 - DNA, 25 bp, Homo sapien
cgccattagagacccgcaaaattgt

SEQ ID NO: 1790045 - DNA, 25 bp, Homo sapien
atttgctttgtagggtcttcgccat

SEQ ID NO: 1790046 - DNA, 25 bp, Homo sapien
tatggaaatatccttaacctcaaac

SEQ ID NO: 1790047 - DNA, 25 bp, Homo sapien
tagggtcttcgccattagagacccg

SEQ ID NO: 1790048 - DNA, 25 bp, Homo sapien
gggtataagtgcagcccccactctg

SEQ ID NO: 1790049 - DNA, 25 bp, Homo sapien
cagctctgggtataagtgcagcccc

SEQ ID NO: 1790050 - DNA, 25 bp, Homo sapien
ggtccagctctgggtataagtgcag

SEQ ID NO: 1790051 - DNA, 25 bp, Homo sapien
tccagctctgggtataagtgcagcc

SEQ ID NO: 1790052 - DNA, 25 bp, Homo sapien
tctaatgctctatgaccttgtgcca

SEQ ID NO: 1790053 - DNA, 25 bp, Homo sapien
tggtcttcttcggttctaatgctct

SEQ ID NO: 1790054 - DNA, 25 bp, Homo sapien
tcggttctaatgctctatgaccttg

SEQ ID NO: 1790055 - DNA, 25 bp, Homo sapien
tcttcttcggttctaatgctctatg

SEQ ID NO: 1790056 - DNA, 25 bp, Homo sapien
tacaccagggtccaggggtcttgtg

SEQ ID NO: 1790057 - DNA, 25 bp, Homo sapien
cctggttactgcagagatgcctata

SEQ ID NO: 1790058 - DNA, 25 bp, Homo sapien
tactgcagagatgcctatagtcgta

SEQ ID NO: 1790059 - DNA, 25 bp, Homo sapien
gttactgcagagatgcctatagtcg

SEQ ID NO: 1790060 - DNA, 25 bp, Homo sapien
gaagccagacattctgtttctaaca

SEQ ID NO: 1790061 - DNA, 25 bp, Homo sapien
agagagaagccagacattctgtttc

SEQ ID NO: 1790062 - DNA, 25 bp, Homo sapien
gagaagccagacattctgtttctaa

SEQ ID NO: 1790063 - DNA, 25 bp, Homo sapien
gagagaagccagacattctgtttct

SEQ ID NO: 1790064 - DNA, 25 bp, Homo sapien
cttcatctaactctaagcccttgtc

SEQ ID NO: 1790065 - DNA, 25 bp, Homo sapien
tcttcatctaactctaagcccttgt

SEQ ID NO: 1790066 - DNA, 25 bp, Homo sapien
aatgaatgggatattgttacaatat

SEQ ID NO: 1790067 - DNA, 25 bp, Homo sapien
atgaatgggatattgttacaatatc

SEQ ID NO: 1790068 - DNA, 25 bp, Homo sapien
tgacttttaatgtatcctctagctc

SEQ ID NO: 1790069 - DNA, 25 bp, Homo sapien
catccctgatatgtggacaagatga

SEQ ID NO: 1790070 - DNA, 25 bp, Homo sapien
gacaagatgacttttaatgtatcct

SEQ ID NO: 1790071 - DNA, 25 bp, Homo sapien
tcatccctgatatgtggacaagatg

SEQ ID NO: 1790072 - DNA, 25 bp, Homo sapien
caggccggtgtgacagttttgacct

SEQ ID NO: 1790073 - DNA, 25 bp, Homo sapien
acccaggccggtgtgacagttttga

SEQ ID NO: 1790074 - DNA, 25 bp, Homo sapien
tttagagcactatggcccagatctc

SEQ ID NO: 1790075 - DNA, 25 bp, Homo sapien
acctgatcggtttagagcactatgg

SEQ ID NO: 1790076 - DNA, 25 bp, Homo sapien
cagatcaaaaacgacggctgggcgg

SEQ ID NO: 1790077 - DNA, 25 bp, Homo sapien
actagggcagccgtctccaccgtcg

SEQ ID NO: 1790078 - DNA, 25 bp, Homo sapien
ggcgtcgccgctccccaatcctcag

SEQ ID NO: 1790079 - DNA, 25 bp, Homo sapien
ctgcagcagatcaaaaacgacggct

SEQ ID NO: 1790080 - DNA, 25 bp, Homo sapien
tccctgactcaaccacaatcgtagg

SEQ ID NO: 1790081 - DNA, 25 bp, Homo sapien
cacatattcatagtagggcttgccc

SEQ ID NO: 1790082 - DNA, 25 bp, Homo sapien
gaggttgatgggaccgaaaaccaga

SEQ ID NO: 1790083 - DNA, 25 bp, Homo sapien
gacactttggtgtacgactgtgcct

SEQ ID NO: 1790084 - DNA, 25 bp, Homo sapien
tgtttcccagtcttagcaataccct

SEQ ID NO: 1790085 - DNA, 25 bp, Homo sapien
ttcccagtcttagcaatacccttag

SEQ ID NO: 1790086 - DNA, 25 bp, Homo sapien
aaaattgtttcccagtcttagcaat

SEQ ID NO: 1790087 - DNA, 25 bp, Homo sapien
agtcttagcaatacccttagctgaa

SEQ ID NO: 1790088 - DNA, 25 bp, Homo sapien
tacagttcagcatgatcattttcct

SEQ ID NO: 1790089 - DNA, 25 bp, Homo sapien
ttctgagtaagcagcgtccttgatt

SEQ ID NO: 1790090 - DNA, 25 bp, Homo sapien
gacatatatagagtgtcagaaccta

SEQ ID NO: 1790091 - DNA, 25 bp, Homo sapien
tcagagacaatctcctttgtacagt

SEQ ID NO: 1790092 - DNA, 25 bp, Homo sapien
gatagtaccctcttagcaatctcta

SEQ ID NO: 1790093 - DNA, 25 bp, Homo sapien
gcataacctcaacgtaggagctgtg

SEQ ID NO: 1790094 - DNA, 25 bp, Homo sapien
gagctgtgggatcattattctggca

SEQ ID NO: 1790095 - DNA, 25 bp, Homo sapien
aaatccaagtgaaacgcataacctc

SEQ ID NO: 1790096 - DNA, 25 bp, Homo sapien
tagctatagtcagcaacagaactca

SEQ ID NO: 1790097 - DNA, 25 bp, Homo sapien
ctcaggtttgaacttgggctcatct

SEQ ID NO: 1790098 - DNA, 25 bp, Homo sapien
tatacttcattgactcccaacacgg

SEQ ID NO: 1790099 - DNA, 25 bp, Homo sapien
ctccttggctcagagtgtgtgaatg

SEQ ID NO: 1790100 - DNA, 25 bp, Homo sapien
gcaaaataggaagaacccttctcta

SEQ ID NO: 1790101 - DNA, 25 bp, Homo sapien
aagatgattccttgaacctagctgc

SEQ ID NO: 1790102 - DNA, 25 bp, Homo sapien
gctgagcgttgtggtacgcatctgt

SEQ ID NO: 1790103 - DNA, 25 bp, Homo sapien
ttacacagataaagtggcacaagtt

SEQ ID NO: 1790104 - DNA, 25 bp, Homo sapien
agcaatggctctgtcatcctttaaa

SEQ ID NO: 1790105 - DNA, 25 bp, Homo sapien
gtcatcctttaaatgtatggcaatg

SEQ ID NO: 1790106 - DNA, 25 bp, Homo sapien
ttgttccacttgcaaaattacagca

SEQ ID NO: 1790107 - DNA, 25 bp, Homo sapien
ttgcaaaattacagcaatggctctg

SEQ ID NO: 1790108 - DNA, 25 bp, Homo sapien
tgttaagagactataaagacatgcc

SEQ ID NO: 1790109 - DNA, 25 bp, Homo sapien
tgcaacaatttggaaggacctcaag

SEQ ID NO: 1790110 - DNA, 25 bp, Homo sapien
gcccatctccaaaggtaacatcacg

SEQ ID NO: 1790111 - DNA, 25 bp, Homo sapien
tactgacaatactaatgctggagag

SEQ ID NO: 1790112 - DNA, 25 bp, Homo sapien
cagcattgcaagtagcagaggaaga

SEQ ID NO: 1790113 - DNA, 25 bp, Homo sapien
tatgcacaggcacatcagaaaaccc

SEQ ID NO: 1790114 - DNA, 25 bp, Homo sapien
catgcacgggatttttatgctagaa

SEQ ID NO: 1790115 - DNA, 25 bp, Homo sapien
gaaatagatcctcacaattacggct

SEQ ID NO: 1790116 - DNA, 25 bp, Homo sapien
tataccgaatgaattgcccagttga

SEQ ID NO: 1790117 - DNA, 25 bp, Homo sapien
tactgatgtatttctggctctaagc

SEQ ID NO: 1790118 - DNA, 25 bp, Homo sapien
cacagaaagtcattcgggcacttaa

SEQ ID NO: 1790119 - DNA, 25 bp, Homo sapien
tctgtgactaagactgacctgctcc

SEQ ID NO: 1790120 - DNA, 25 bp, Homo sapien
caataatcatgtgaggcaggcacct

SEQ ID NO: 1790121 - DNA, 25 bp, Homo sapien
gcaggcacctctatacgagactcag

SEQ ID NO: 1790122 - DNA, 25 bp, Homo sapien
gctaggcactaggtcaaatgactta

SEQ ID NO: 1790123 - DNA, 25 bp, Homo sapien
ccttattccctgagatgcttaatgc

SEQ ID NO: 1790124 - DNA, 25 bp, Homo sapien
taagaaactaatcccacaggagtca

SEQ ID NO: 1790125 - DNA, 25 bp, Homo sapien
tattgtgatggcacattgcaggaca

SEQ ID NO: 1790126 - DNA, 25 bp, Homo sapien
aaaaagtagtgaagacgaagatcca

SEQ ID NO: 1790127 - DNA, 25 bp, Homo sapien
caaacttgcaactacgaaggttaca

SEQ ID NO: 1790128 - DNA, 25 bp, Homo sapien
aattgtagctgttcttggttggccc

SEQ ID NO: 1790129 - DNA, 25 bp, Homo sapien
agtgagctcatctctacgggatact

SEQ ID NO: 1790130 - DNA, 25 bp, Homo sapien
ggttggcccattgccatttttgcag

SEQ ID NO: 1790131 - DNA, 25 bp, Homo sapien
taattaagtaactgcagtgagctca

SEQ ID NO: 1790132 - DNA, 25 bp, Homo sapien
ctctccagtactcttaagtatgttg

SEQ ID NO: 1790133 - DNA, 25 bp, Homo sapien
gattctctccagtactcttaagtat

SEQ ID NO: 1790134 - DNA, 25 bp, Homo sapien
tccagtactcttaagtatgttgtat

SEQ ID NO: 1790135 - DNA, 25 bp, Homo sapien
aaagctgattctctccagtactctt

SEQ ID NO: 1790136 - DNA, 25 bp, Homo sapien
aacaggagctaagtatgataataag

SEQ ID NO: 1790137 - DNA, 25 bp, Homo sapien
caatacattattgttcactgccctc

SEQ ID NO: 1790138 - DNA, 25 bp, Homo sapien
ccaattcactgaatgatgtgtagaa

SEQ ID NO: 1790139 - DNA, 25 bp, Homo sapien
ttttggataatctatcctgtgcata

SEQ ID NO: 1790140 - DNA, 25 bp, Homo sapien
ctgtggttttgtggtaggtactaca

SEQ ID NO: 1790141 - DNA, 25 bp, Homo sapien
acttggcaatttatgtactgtggtt

SEQ ID NO: 1790142 - DNA, 25 bp, Homo sapien
tgtggttttgtggtaggtactacat

SEQ ID NO: 1790143 - DNA, 25 bp, Homo sapien
caatttatgtactgtggttttgtgg

SEQ ID NO: 1790144 - DNA, 25 bp, Homo sapien
gatgtttccaagtgttacagccata

SEQ ID NO: 1790145 - DNA, 25 bp, Homo sapien
tctccaggatgccaaataggacggc

SEQ ID NO: 1790146 - DNA, 25 bp, Homo sapien
gaattggctggcattatcacactgc

SEQ ID NO: 1790147 - DNA, 25 bp, Homo sapien
gatatttaggaacatgcctctggct

SEQ ID NO: 1790148 - DNA, 25 bp, Homo sapien
tcactgtacaccttttcgtgcttgt

SEQ ID NO: 1790149 - DNA, 25 bp, Homo sapien
tgtacaccttttcgtgcttgttgaa

SEQ ID NO: 1790150 - DNA, 25 bp, Homo sapien
tcttcactgtacaccttttcgtgct

SEQ ID NO: 1790151 - DNA, 25 bp, Homo sapien
acaccttttcgtgcttgttgaattc

SEQ ID NO: 1790152 - DNA, 25 bp, Homo sapien
tcccttagggctatcggatttgctg

SEQ ID NO: 1790153 - DNA, 25 bp, Homo sapien
tcttatgtcattaagaatgttgatc

SEQ ID NO: 1790154 - DNA, 25 bp, Homo sapien
aacagttttcccttagatccacctg

SEQ ID NO: 1790155 - DNA, 25 bp, Homo sapien
gggctatcggatttgctgctccttt

SEQ ID NO: 1790156 - DNA, 25 bp, Homo sapien
ttgttccctcaattcaaaatggcag

SEQ ID NO: 1790157 - DNA, 25 bp, Homo sapien
tccttgttccctcaattcaaaatgg

SEQ ID NO: 1790158 - DNA, 25 bp, Homo sapien
gttccctcaattcaaaatggcagtc

SEQ ID NO: 1790159 - DNA, 25 bp, Homo sapien
tccctcaattcaaaatggcagtctg

SEQ ID NO: 1790160 - DNA, 25 bp, Homo sapien
tgcaatgtaacaaagcccctggcta

SEQ ID NO: 1790161 - DNA, 25 bp, Homo sapien
tcatctagactactactgcaaaggc

SEQ ID NO: 1790162 - DNA, 25 bp, Homo sapien
tgagcggcgtgatctttgtgaaaag

SEQ ID NO: 1790163 - DNA, 25 bp, Homo sapien
tcaagacttcttggcttatatacaa

SEQ ID NO: 1790164 - DNA, 25 bp, Homo sapien
aattcattcttaggagcttagtagc

SEQ ID NO: 1790165 - DNA, 25 bp, Homo sapien
tcccaaggtgagtaatctaaattct

SEQ ID NO: 1790166 - DNA, 25 bp, Homo sapien
gatggtaaactttcatactgtctaa

SEQ ID NO: 1790167 - DNA, 25 bp, Homo sapien
tatatgctctataatggctgagcca

SEQ ID NO: 1790168 - DNA, 25 bp, Homo sapien
gaactgattatagaaggaatattgt

SEQ ID NO: 1790169 - DNA, 25 bp, Homo sapien
atttgtacagtaggcaattctaggc

SEQ ID NO: 1790170 - DNA, 25 bp, Homo sapien
tcaggactatttgtacagtaggcaa

SEQ ID NO: 1790171 - DNA, 25 bp, Homo sapien
taggccttagtggaaatagtactca

SEQ ID NO: 1790172 - DNA, 25 bp, Homo sapien
gcaattctaggccttagtggaaata

SEQ ID NO: 1790173 - DNA, 25 bp, Homo sapien
ctggatacaacaacttcaggtactt

SEQ ID NO: 1790174 - DNA, 25 bp, Homo sapien
cctgaaaatcaatttggtggcttcc

SEQ ID NO: 1790175 - DNA, 25 bp, Homo sapien
gtcgcaggtcatgtaaaacctgaaa

SEQ ID NO: 1790176 - DNA, 25 bp, Homo sapien
cagggaatttttgtcgcaggtcatg

SEQ ID NO: 1790177 - DNA, 25 bp, Homo sapien
ggtacagaaagctccatcttgccaa

SEQ ID NO: 1790178 - DNA, 25 bp, Homo sapien
tattatccatactacagatgggtac

SEQ ID NO: 1790179 - DNA, 25 bp, Homo sapien
gccaaaggccacatgactatcagac

SEQ ID NO: 1790180 - DNA, 25 bp, Homo sapien
tactctacaagtcaagtattatcca

SEQ ID NO: 1790181 - DNA, 25 bp, Homo sapien
tgcccatttaggattataacccaag

SEQ ID NO: 1790182 - DNA, 25 bp, Homo sapien
ggagtgagtcacagcacatggcccc

SEQ ID NO: 1790183 - DNA, 25 bp, Homo sapien
aattgggaccttaggcattgtctag

SEQ ID NO: 1790184 - DNA, 25 bp, Homo sapien
gaaagctcatgtctagtaagtacag

SEQ ID NO: 1790185 - DNA, 25 bp, Homo sapien
taaaaggtgataatggtgataaggg

SEQ ID NO: 1790186 - DNA, 25 bp, Homo sapien
gatagattggagagaccaaaactgg

SEQ ID NO: 1790187 - DNA, 25 bp, Homo sapien
ggcaggtagaccaattaaaaggtga

SEQ ID NO: 1790188 - DNA, 25 bp, Homo sapien
tgataagggtgtgaacaaaatgtag

SEQ ID NO: 1790189 - DNA, 25 bp, Homo sapien
tatgaatcagttaccctactggttg

SEQ ID NO: 1790190 - DNA, 25 bp, Homo sapien
tgaatcagttaccctactggttgtt

SEQ ID NO: 1790191 - DNA, 25 bp, Homo sapien
ctatgaatcagttaccctactggtt

SEQ ID NO: 1790192 - DNA, 25 bp, Homo sapien
atgaatcagttaccctactggttgt

SEQ ID NO: 1790193 - DNA, 25 bp, Homo sapien
accaaatataccttatgggctttct

SEQ ID NO: 1790194 - DNA, 25 bp, Homo sapien
taccaaatataccttatgggctttc

SEQ ID NO: 1790195 - DNA, 25 bp, Homo sapien
cagcaggcatccaggttattattat

SEQ ID NO: 1790196 - DNA, 25 bp, Homo sapien
cacagcaggcatccaggttattatt

SEQ ID NO: 1790197 - DNA, 25 bp, Homo sapien
agcaggcatccaggttattattatt

SEQ ID NO: 1790198 - DNA, 25 bp, Homo sapien
agcacagcaggcatccaggttatta

SEQ ID NO: 1790199 - DNA, 25 bp, Homo sapien
tgactacgggacatcagctcatccg

SEQ ID NO: 1790200 - DNA, 25 bp, Homo sapien
tgtcgagttgtaccaccaggagttg

SEQ ID NO: 1790201 - DNA, 25 bp, Homo sapien
tcgtattgggctgagtgactaccac

SEQ ID NO: 1790202 - DNA, 25 bp, Homo sapien
tatgaagagtgtgggctgattccgc

SEQ ID NO: 1790203 - DNA, 25 bp, Homo sapien
tcaaaaccttctgtagagacggagt

SEQ ID NO: 1790204 - DNA, 25 bp, Homo sapien
tttcaaaaccttctgtagagacgga

SEQ ID NO: 1790205 - DNA, 25 bp, Homo sapien
ttcaaaaccttctgtagagacggag

SEQ ID NO: 1790206 - DNA, 25 bp, Homo sapien
caaaaccttctgtagagacggagtc

SEQ ID NO: 1790207 - DNA, 25 bp, Homo sapien
ggtaggctttaatttaagctctcaa

SEQ ID NO: 1790208 - DNA, 25 bp, Homo sapien
caaggttgttagagctgtccgaagg

SEQ ID NO: 1790209 - DNA, 25 bp, Homo sapien
cgaaggctgttaagcaatttgaggg

SEQ ID NO: 1790210 - DNA, 25 bp, Homo sapien
taacctccatcaaggttgttagagc

SEQ ID NO: 1790211 - DNA, 25 bp, Homo sapien
gagatggagcttcccttaacctggg

SEQ ID NO: 1790212 - DNA, 25 bp, Homo sapien
tacgtggactggataacctttggag

SEQ ID NO: 1790213 - DNA, 25 bp, Homo sapien
ttaggacaccaaacgcaagagcaat

SEQ ID NO: 1790214 - DNA, 25 bp, Homo sapien
tcttaagactgggaggaacctacaa

SEQ ID NO: 1790215 - DNA, 25 bp, Homo sapien
gcctagatgcaccaaaagagcctca

SEQ ID NO: 1790216 - DNA, 25 bp, Homo sapien
aacagtgctgcaattgggcccataa

SEQ ID NO: 1790217 - DNA, 25 bp, Homo sapien
tgtctaaatcaggaacaagcctaag

SEQ ID NO: 1790218 - DNA, 25 bp, Homo sapien
tctaggctgtaactttgttgacaac

SEQ ID NO: 1790219 - DNA, 25 bp, Homo sapien
gactgtggtgcactgaaggcaacaa

SEQ ID NO: 1790220 - DNA, 25 bp, Homo sapien
cagatcacgtagagccttgctgacc

SEQ ID NO: 1790221 - DNA, 25 bp, Homo sapien
ggatctatcatagcacagacaggtt

SEQ ID NO: 1790222 - DNA, 25 bp, Homo sapien
tgctgaccatattaaggactctgaa

SEQ ID NO: 1790223 - DNA, 25 bp, Homo sapien
atatgctgcttataaaaaacactca

SEQ ID NO: 1790224 - DNA, 25 bp, Homo sapien
cttgcggagctcacgttaccacggt

SEQ ID NO: 1790225 - DNA, 25 bp, Homo sapien
aataagttgagggtctatgtgtcag

SEQ ID NO: 1790226 - DNA, 25 bp, Homo sapien
aaccagacagggataattccaaata

SEQ ID NO: 1790227 - DNA, 25 bp, Homo sapien
caaatgaataaaggtatttccaaca

SEQ ID NO: 1790228 - DNA, 25 bp, Homo sapien
aagaggcaagatgtgaagagatatt

SEQ ID NO: 1790229 - DNA, 25 bp, Homo sapien
gaattccagaaggagacaacagaga

SEQ ID NO: 1790230 - DNA, 25 bp, Homo sapien
acaacagagagaatagacaagaggc

SEQ ID NO: 1790231 - DNA, 25 bp, Homo sapien
gccaaattccaaacattttaactga

SEQ ID NO: 1790232 - DNA, 25 bp, Homo sapien
gtgcctggccaaattccaaacattt

SEQ ID NO: 1790233 - DNA, 25 bp, Homo sapien
ttagtcatttaaacaaatgccactt

SEQ ID NO: 1790234 - DNA, 25 bp, Homo sapien
ttgttttagtcatttaaacaaatgc

SEQ ID NO: 1790235 - DNA, 25 bp, Homo sapien
cgccttcgagttagattattttcca

SEQ ID NO: 1790236 - DNA, 25 bp, Homo sapien
cttttcaggcgccttcgagttagat

SEQ ID NO: 1790237 - DNA, 25 bp, Homo sapien
agaatttgatcttttcaggcgcctt

SEQ ID NO: 1790238 - DNA, 25 bp, Homo sapien
caagttctctttgaagtcgttccat

SEQ ID NO: 1790239 - DNA, 25 bp, Homo sapien
tggcctactctcatgttcaagcaga

SEQ ID NO: 1790240 - DNA, 25 bp, Homo sapien
tacacttatgttagatggcctactc

SEQ ID NO: 1790241 - DNA, 25 bp, Homo sapien
aataaagaatggagtttggcacaag

SEQ ID NO: 1790242 - DNA, 25 bp, Homo sapien
tctatgtaagtaagatttgcactga

SEQ ID NO: 1790243 - DNA, 25 bp, Homo sapien
tttggttaagcagtcaatgtcaatc

SEQ ID NO: 1790244 - DNA, 25 bp, Homo sapien
tcaatctggagttgtctattacaac

SEQ ID NO: 1790245 - DNA, 25 bp, Homo sapien
gatcaatttctttggttaagcagtc

SEQ ID NO: 1790246 - DNA, 25 bp, Homo sapien
aatgtcaatctggagttgtctatta

SEQ ID NO: 1790247 - DNA, 25 bp, Homo sapien
gttatgaatagcgctggggttaaaa

SEQ ID NO: 1790248 - DNA, 25 bp, Homo sapien
aaagttatgaatagcgctggggtta

SEQ ID NO: 1790249 - DNA, 25 bp, Homo sapien
atgaatagcgctggggttaaaatgt

SEQ ID NO: 1790250 - DNA, 25 bp, Homo sapien
tatgaatagcgctggggttaaaatg

SEQ ID NO: 1790251 - DNA, 25 bp, Homo sapien
ttgggttttggtggcacaggaccta

SEQ ID NO: 1790252 - DNA, 25 bp, Homo sapien
tgggttttggtggcacaggacctac

SEQ ID NO: 1790253 - DNA, 25 bp, Homo sapien
gaaatgtcttagtttggtgtgcata

SEQ ID NO: 1790254 - DNA, 25 bp, Homo sapien
tatataccacggttaagtgttaatc

SEQ ID NO: 1790255 - DNA, 25 bp, Homo sapien
ttaatgcctggatcaaaacacacag

SEQ ID NO: 1790256 - DNA, 25 bp, Homo sapien
gaaggtagaaaactattcacctgga

SEQ ID NO: 1790257 - DNA, 25 bp, Homo sapien
ctaacgagtacacgagcagcaggaa

SEQ ID NO: 1790258 - DNA, 25 bp, Homo sapien
gagggagagggtgcgtgcacatcct

SEQ ID NO: 1790259 - DNA, 25 bp, Homo sapien
agcaggaggtgacagcggtggatga

SEQ ID NO: 1790260 - DNA, 25 bp, Homo sapien
ggatgagggagagggtgcgtgcaca

SEQ ID NO: 1790261 - DNA, 25 bp, Homo sapien
ttcacaaaagaggtggcgggtccgc

SEQ ID NO: 1790262 - DNA, 25 bp, Homo sapien
cttcacaaaagaggtggcgggtccg

SEQ ID NO: 1790263 - DNA, 25 bp, Homo sapien
gaacaccggagtctcctcagctgct

SEQ ID NO: 1790264 - DNA, 25 bp, Homo sapien
ggtgaacaccggagtctcctcagct

SEQ ID NO: 1790265 - DNA, 25 bp, Homo sapien
tgaacaccggagtctcctcagctgc

SEQ ID NO: 1790266 - DNA, 25 bp, Homo sapien
aacaccggagtctcctcagctgctg

SEQ ID NO: 1790267 - DNA, 25 bp, Homo sapien
cgtaggctgttgaaacacatcaatt

SEQ ID NO: 1790268 - DNA, 25 bp, Homo sapien
tctgttccactgattggttgcccac

SEQ ID NO: 1790269 - DNA, 25 bp, Homo sapien
ctgcttcactgacaatccccgtggt

SEQ ID NO: 1790270 - DNA, 25 bp, Homo sapien
cactgattggttgcccaccaaatcg

SEQ ID NO: 1790271 - DNA, 25 bp, Homo sapien
acataccagttacttcatgtataat

SEQ ID NO: 1790272 - DNA, 25 bp, Homo sapien
cataccagttacttcatgtataata

SEQ ID NO: 1790273 - DNA, 25 bp, Homo sapien
cacataccagttacttcatgtataa

SEQ ID NO: 1790274 - DNA, 25 bp, Homo sapien
acacataccagttacttcatgtata

SEQ ID NO: 1790275 - DNA, 25 bp, Homo sapien
tattgcagcatactagtgaggatga

SEQ ID NO: 1790276 - DNA, 25 bp, Homo sapien
tttagggtgtcctgttcagcttcac

SEQ ID NO: 1790277 - DNA, 25 bp, Homo sapien
cctgattcaccacgtgtttgctgac

SEQ ID NO: 1790278 - DNA, 25 bp, Homo sapien
tgtaacactatgagtgctgacctga

SEQ ID NO: 1790279 - DNA, 25 bp, Homo sapien
aaaatatgaggacagagctacacct

SEQ ID NO: 1790280 - DNA, 25 bp, Homo sapien
acatttgcttactgtgtcaaatgcc

SEQ ID NO: 1790281 - DNA, 25 bp, Homo sapien
caaaaattagaatgtgaaaggagaa

SEQ ID NO: 1790282 - DNA, 25 bp, Homo sapien
tgtgtcaaatgccctaatctcactc

SEQ ID NO: 1790283 - DNA, 25 bp, Homo sapien
tgattccttatttctcccaaaacag

SEQ ID NO: 1790284 - DNA, 25 bp, Homo sapien
gaagcagaactgacttcaaggacta

SEQ ID NO: 1790285 - DNA, 25 bp, Homo sapien
aaacagccagcatacaaacttctat

SEQ ID NO: 1790286 - DNA, 25 bp, Homo sapien
ggaaattagatcacaaacaatggtc

SEQ ID NO: 1790287 - DNA, 25 bp, Homo sapien
tcacagcgaattaaggctggatggt

SEQ ID NO: 1790288 - DNA, 25 bp, Homo sapien
ggtgttttgatgatggacctttgat

SEQ ID NO: 1790289 - DNA, 25 bp, Homo sapien
tctttggtgttttgatgatggacct

SEQ ID NO: 1790290 - DNA, 25 bp, Homo sapien
actgttcacagcgaattaaggctgg

SEQ ID NO: 1790291 - DNA, 25 bp, Homo sapien
caaaatcctatgtagcagtgaaact

SEQ ID NO: 1790292 - DNA, 25 bp, Homo sapien
tacacagttaggcagtgggcaacca

SEQ ID NO: 1790293 - DNA, 25 bp, Homo sapien
tagagaagatacagggccatttggc

SEQ ID NO: 1790294 - DNA, 25 bp, Homo sapien
aaactttttcccgatgacagactag

SEQ ID NO: 1790295 - DNA, 25 bp, Homo sapien
gttccttttcttcgtgtatgtagtg

SEQ ID NO: 1790296 - DNA, 25 bp, Homo sapien
cttttcttcgtgtatgtagtgtttc

SEQ ID NO: 1790297 - DNA, 25 bp, Homo sapien
tcttcgtgtatgtagtgtttcactg

SEQ ID NO: 1790298 - DNA, 25 bp, Homo sapien
ttgttccttttcttcgtgtatgtag

SEQ ID NO: 1790299 - DNA, 25 bp, Homo sapien
tgaagttcttccctatccaatggca

SEQ ID NO: 1790300 - DNA, 25 bp, Homo sapien
ggccaagagtaccacagatttctga

SEQ ID NO: 1790301 - DNA, 25 bp, Homo sapien
tggagacacgttcagggaagacaaa

SEQ ID NO: 1790302 - DNA, 25 bp, Homo sapien
cacagagtggagacacgttcaggga

SEQ ID NO: 1790303 - DNA, 25 bp, Homo sapien
gactcgagagatctgtacagtagga

SEQ ID NO: 1790304 - DNA, 25 bp, Homo sapien
gggtatttcgctgcacatttgtaca

SEQ ID NO: 1790305 - DNA, 25 bp, Homo sapien
aaatcacttaaagcagactcgagag

SEQ ID NO: 1790306 - DNA, 25 bp, Homo sapien
gcttaaaaagggacatgatcgtgct

SEQ ID NO: 1790307 - DNA, 25 bp, Homo sapien
ggcaaagtacagaataagtagagga

SEQ ID NO: 1790308 - DNA, 25 bp, Homo sapien
cacacaacattggaactcatgaggg

SEQ ID NO: 1790309 - DNA, 25 bp, Homo sapien
cattggaactcatgagggcaaagta

SEQ ID NO: 1790310 - DNA, 25 bp, Homo sapien
tgtcttcacacaacattggaactca

SEQ ID NO: 1790311 - DNA, 25 bp, Homo sapien
tgtgttgtgtcacccactgctcaag

SEQ ID NO: 1790312 - DNA, 25 bp, Homo sapien
tgggacaccaagcagatgaagctta

SEQ ID NO: 1790313 - DNA, 25 bp, Homo sapien
aagcttaaccttgttgttctgtcag

SEQ ID NO: 1790314 - DNA, 25 bp, Homo sapien
cctgtggaagacaaacactgtgttg

SEQ ID NO: 1790315 - DNA, 25 bp, Homo sapien
aaagggctgtaggtactgctgctgt

SEQ ID NO: 1790316 - DNA, 25 bp, Homo sapien
aaaaagggctgtaggtactgctgct

SEQ ID NO: 1790317 - DNA, 25 bp, Homo sapien
ctgtactttcccaataacaactgct

SEQ ID NO: 1790318 - DNA, 25 bp, Homo sapien
gttgctggttttgagactgtacttt

SEQ ID NO: 1790319 - DNA, 25 bp, Homo sapien
gatactgtcaccaagtcaggattag

SEQ ID NO: 1790320 - DNA, 25 bp, Homo sapien
caaacatttacagtgggtggtagtc

SEQ ID NO: 1790321 - DNA, 25 bp, Homo sapien
aatggactgccccaacagtaaagca

SEQ ID NO: 1790322 - DNA, 25 bp, Homo sapien
tagggctctgacattcatagagatc

SEQ ID NO: 1790323 - DNA, 25 bp, Homo sapien
aaaaataaattgcatcaaacgtaag

SEQ ID NO: 1790324 - DNA, 25 bp, Homo sapien
aataaattgcatcaaacgtaagggc

SEQ ID NO: 1790325 - DNA, 25 bp, Homo sapien
aaataaattgcatcaaacgtaaggg

SEQ ID NO: 1790326 - DNA, 25 bp, Homo sapien
ctgatttatcaatcttcacatagaa

SEQ ID NO: 1790327 - DNA, 25 bp, Homo sapien
agatagtttacccagctaaatcaca

SEQ ID NO: 1790328 - DNA, 25 bp, Homo sapien
tacaaagatagtttacccagctaaa

SEQ ID NO: 1790329 - DNA, 25 bp, Homo sapien
ctgttacaaagatagtttacccagc

SEQ ID NO: 1790330 - DNA, 25 bp, Homo sapien
ccagctaaatcacaaaaccatcaac

SEQ ID NO: 1790331 - DNA, 25 bp, Homo sapien
attttatcttatactgtttacctct

SEQ ID NO: 1790332 - DNA, 25 bp, Homo sapien
agttgtcaggctatcttggctttca

SEQ ID NO: 1790333 - DNA, 25 bp, Homo sapien
ttcggtgtaagaggcctagttgtca

SEQ ID NO: 1790334 - DNA, 25 bp, Homo sapien
gactggttggtgaacagtcagaaca

SEQ ID NO: 1790335 - DNA, 25 bp, Homo sapien
tctttcacttaaggttagaagccac

SEQ ID NO: 1790336 - DNA, 25 bp, Homo sapien
tctgtaaatctcatgaaccaacttc

SEQ ID NO: 1790337 - DNA, 25 bp, Homo sapien
gaaagtcctggagggcatctcgaca

SEQ ID NO: 1790338 - DNA, 25 bp, Homo sapien
tctagagcacagacagcgtatattt

SEQ ID NO: 1790339 - DNA, 25 bp, Homo sapien
taagccttggcctacgggaatgttg

SEQ ID NO: 1790340 - DNA, 25 bp, Homo sapien
gcagcacgggaccttctcccacgtc

SEQ ID NO: 1790341 - DNA, 25 bp, Homo sapien
gggaccttctcccacgtccagagaa

SEQ ID NO: 1790342 - DNA, 25 bp, Homo sapien
acgggaccttctcccacgtccagag

SEQ ID NO: 1790343 - DNA, 25 bp, Homo sapien
agcacgggaccttctcccacgtcca

SEQ ID NO: 1790344 - DNA, 25 bp, Homo sapien
gtcaaagcctactctccacaaagac

SEQ ID NO: 1790345 - DNA, 25 bp, Homo sapien
ccttcacgtcctcgtcaaagcctac

SEQ ID NO: 1790346 - DNA, 25 bp, Homo sapien
tcacgtcctcgtcaaagcctactct

SEQ ID NO: 1790347 - DNA, 25 bp, Homo sapien
gtcctcgtcaaagcctactctccac

SEQ ID NO: 1790348 - DNA, 25 bp, Homo sapien
ggtcttgctgtgagcctcggaatag

SEQ ID NO: 1790349 - DNA, 25 bp, Homo sapien
cttgctgtgagcctcggaatagaaa

SEQ ID NO: 1790350 - DNA, 25 bp, Homo sapien
gagcctcggaatagaaatcacaaga

SEQ ID NO: 1790351 - DNA, 25 bp, Homo sapien
ctgtgagcctcggaatagaaatcac

SEQ ID NO: 1790352 - DNA, 25 bp, Homo sapien
tcgctcttgccccatggagaaaata

SEQ ID NO: 1790353 - DNA, 25 bp, Homo sapien
actgagcacttttgtgggtacagga

SEQ ID NO: 1790354 - DNA, 25 bp, Homo sapien
tacaggacggacacggtctccaaat

SEQ ID NO: 1790355 - DNA, 25 bp, Homo sapien
ggatccaaagttgcagctgacccag

SEQ ID NO: 1790356 - DNA, 25 bp, Homo sapien
tgaaggtctgccagtagtgctttgg

SEQ ID NO: 1790357 - DNA, 25 bp, Homo sapien
ctgtgaaggtctgccagtagtgctt

SEQ ID NO: 1790358 - DNA, 25 bp, Homo sapien
ggtctgccagtagtgctttggtctc

SEQ ID NO: 1790359 - DNA, 25 bp, Homo sapien
aaggtctgccagtagtgctttggtc

SEQ ID NO: 1790360 - DNA, 25 bp, Homo sapien
tgtgtgtggctttgtctgttcacgg

SEQ ID NO: 1790361 - DNA, 25 bp, Homo sapien
gttagcgacactgagcaatcctggg

SEQ ID NO: 1790362 - DNA, 25 bp, Homo sapien
gggtaggttagcgacactgagcaat

SEQ ID NO: 1790363 - DNA, 25 bp, Homo sapien
tttgtctgttcacggcgggatagag

SEQ ID NO: 1790364 - DNA, 25 bp, Homo sapien
tccagagtctgtgagtgcagctggg

SEQ ID NO: 1790365 - DNA, 25 bp, Homo sapien
ataattctgatgagtcagcctcctt

SEQ ID NO: 1790366 - DNA, 25 bp, Homo sapien
tataattctgatgagtcagcctcct

SEQ ID NO: 1790367 - DNA, 25 bp, Homo sapien
cctcactgtgggtgcttagctctgg

SEQ ID NO: 1790368 - DNA, 25 bp, Homo sapien
gcattagggactgtgctctcgccag

SEQ ID NO: 1790369 - DNA, 25 bp, Homo sapien
gccacgaacactgtcctgggtctgg

SEQ ID NO: 1790370 - DNA, 25 bp, Homo sapien
gatgcgctgctagaaaatcccgtgc

SEQ ID NO: 1790371 - DNA, 25 bp, Homo sapien
tcctatttgagaaagcggcagctgt

SEQ ID NO: 1790372 - DNA, 25 bp, Homo sapien
taggaaaacgcttgtgtctgcccat

SEQ ID NO: 1790373 - DNA, 25 bp, Homo sapien
gacaacacggtctcctgtgggagga

SEQ ID NO: 1790374 - DNA, 25 bp, Homo sapien
ggtatcatcaggttagtctcgccaa

SEQ ID NO: 1790375 - DNA, 25 bp, Homo sapien
gactctcgtctgtttccttctgcac

SEQ ID NO: 1790376 - DNA, 25 bp, Homo sapien
agggcctcaaaaccgtgtcaggact

SEQ ID NO: 1790377 - DNA, 25 bp, Homo sapien
tcaaaaccgtgtcaggactctcgtc

SEQ ID NO: 1790378 - DNA, 25 bp, Homo sapien
cgtgtcaggactctcgtctgtttcc

SEQ ID NO: 1790379 - DNA, 25 bp, Homo sapien
gaaaaacatagatgggacaggtaaa

SEQ ID NO: 1790380 - DNA, 25 bp, Homo sapien
tgaaatgttcctagttgcatagctg

SEQ ID NO: 1790381 - DNA, 25 bp, Homo sapien
tagtatatgtctttgtgacagaaaa

SEQ ID NO: 1790382 - DNA, 25 bp, Homo sapien
gctgttaaccatgcttcaaaaataa

SEQ ID NO: 1790383 - DNA, 25 bp, Homo sapien
caagacacgctttctattagagctg

SEQ ID NO: 1790384 - DNA, 25 bp, Homo sapien
gtctccctggttcgatttcctgatg

SEQ ID NO: 1790385 - DNA, 25 bp, Homo sapien
tcctgatgtagaatcattgtgttgc

SEQ ID NO: 1790386 - DNA, 25 bp, Homo sapien
tgcttcctttgagaacaagtttgag

SEQ ID NO: 1790387 - DNA, 25 bp, Homo sapien
taagaattttatcccagcaccctgg

SEQ ID NO: 1790388 - DNA, 25 bp, Homo sapien
actttcagtgtacgcgaccgaggac

SEQ ID NO: 1790389 - DNA, 25 bp, Homo sapien
caagtggtaggagcgctttgtccca

SEQ ID NO: 1790390 - DNA, 25 bp, Homo sapien
tgtagaactgacatcctggccggtg

SEQ ID NO: 1790391 - DNA, 25 bp, Homo sapien
gaattgtgccccagaagtggtagca

SEQ ID NO: 1790392 - DNA, 25 bp, Homo sapien
gaatgaccgagtgaatggctatggc

SEQ ID NO: 1790393 - DNA, 25 bp, Homo sapien
tgggcttaggctgcttgcacacggc

SEQ ID NO: 1790394 - DNA, 25 bp, Homo sapien
tatctgtcttacgtgcggtgtctcc

SEQ ID NO: 1790395 - DNA, 25 bp, Homo sapien
tcaatggtctttgggagactaggga

SEQ ID NO: 1790396 - DNA, 25 bp, Homo sapien
aagggcatgaggtgccttttctaag

SEQ ID NO: 1790397 - DNA, 25 bp, Homo sapien
tctggatcctgaggtatagatggag

SEQ ID NO: 1790398 - DNA, 25 bp, Homo sapien
taagcatgagcatttaaactgtggg

SEQ ID NO: 1790399 - DNA, 25 bp, Homo sapien
caacaacgatttcattcttccagct

SEQ ID NO: 1790400 - DNA, 25 bp, Homo sapien
gaaggccttactttttgctcaagtg

SEQ ID NO: 1790401 - DNA, 25 bp, Homo sapien
tgctcaagtgtgcaataaatagcct

SEQ ID NO: 1790402 - DNA, 25 bp, Homo sapien
gctgtagctaaacttgttgtaaccc

SEQ ID NO: 1790403 - DNA, 25 bp, Homo sapien
cctctgtggtgatggtccgtaccca

SEQ ID NO: 1790404 - DNA, 25 bp, Homo sapien
gtgatggtccgtacccacacgtctg

SEQ ID NO: 1790405 - DNA, 25 bp, Homo sapien
tgtggtgatggtccgtacccacacg

SEQ ID NO: 1790406 - DNA, 25 bp, Homo sapien
ccacacgtctgccatccaccgtctc

SEQ ID NO: 1790407 - DNA, 25 bp, Homo sapien
gggcaggcaagccagggggtcccca

SEQ ID NO: 1790408 - DNA, 25 bp, Homo sapien
gaaaaacaggttacacaaccaatga

SEQ ID NO: 1790409 - DNA, 25 bp, Homo sapien
aacaggttacacaaccaatgatatt

SEQ ID NO: 1790410 - DNA, 25 bp, Homo sapien
caggttacacaaccaatgatattca

SEQ ID NO: 1790411 - DNA, 25 bp, Homo sapien
aaaacaggttacacaaccaatgata

SEQ ID NO: 1790412 - DNA, 25 bp, Homo sapien
cttgttatatcctgtgtctgatggc

SEQ ID NO: 1790413 - DNA, 25 bp, Homo sapien
taatgtgtctagatagggatttcct

SEQ ID NO: 1790414 - DNA, 25 bp, Homo sapien
aagcccagtctcttatttaacccat

SEQ ID NO: 1790415 - DNA, 25 bp, Homo sapien
tgtatcttaactcatattatccaga

SEQ ID NO: 1790416 - DNA, 25 bp, Homo sapien
aaattctaaaagagctgtaacacta

SEQ ID NO: 1790417 - DNA, 25 bp, Homo sapien
tgcaaaaaccggaaagcctactaga

SEQ ID NO: 1790418 - DNA, 25 bp, Homo sapien
ctgcaaaaaccggaaagcctactag

SEQ ID NO: 1790419 - DNA, 25 bp, Homo sapien
gcctactagacaaattctaaaagag

SEQ ID NO: 1790420 - DNA, 25 bp, Homo sapien
gattctgttaccttatgggagttca

SEQ ID NO: 1790421 - DNA, 25 bp, Homo sapien
tgacttggattggagttccatgtac

SEQ ID NO: 1790422 - DNA, 25 bp, Homo sapien
gatttgtgaaacctaaattgaagca

SEQ ID NO: 1790423 - DNA, 25 bp, Homo sapien
ttacctcctcctagaacacatggct

SEQ ID NO: 1790424 - DNA, 25 bp, Homo sapien
tatgggacttagtaatacgtcacac

SEQ ID NO: 1790425 - DNA, 25 bp, Homo sapien
tatatactatagcaccctcagggtg

SEQ ID NO: 1790426 - DNA, 25 bp, Homo sapien
gttattaaccaacagtaaacatgag

SEQ ID NO: 1790427 - DNA, 25 bp, Homo sapien
tagctcctacaatatccgccatggc

SEQ ID NO: 1790428 - DNA, 25 bp, Homo sapien
tccctcttgggagtggattttcttc

SEQ ID NO: 1790429 - DNA, 25 bp, Homo sapien
cagaagcagagtgtagggtgtcttt

SEQ ID NO: 1790430 - DNA, 25 bp, Homo sapien
atgaaagaagcctccacttggaagc

SEQ ID NO: 1790431 - DNA, 25 bp, Homo sapien
tgccttcagtggatttccctcttgg

SEQ ID NO: 1790432 - DNA, 25 bp, Homo sapien
taaagcaggcttgatgccaaaagga

SEQ ID NO: 1790433 - DNA, 25 bp, Homo sapien
tcaccagataataccttttgattcc

SEQ ID NO: 1790434 - DNA, 25 bp, Homo sapien
tattttccagagttagtcatctaca

SEQ ID NO: 1790435 - DNA, 25 bp, Homo sapien
ttttcagtagccgatttcattgtca

SEQ ID NO: 1790436 - DNA, 25 bp, Homo sapien
agccgcggccgggaggtgagggcgg

SEQ ID NO: 1790437 - DNA, 25 bp, Homo sapien
cttggacaacccgggcagagggcag

SEQ ID NO: 1790438 - DNA, 25 bp, Homo sapien
ccgcgggcgggacggagcttcggcg

SEQ ID NO: 1790439 - DNA, 25 bp, Homo sapien
gaggtgagggcggagccggcccgcg

SEQ ID NO: 1790440 - DNA, 25 bp, Homo sapien
ggcgggtagcgccacgaacagcagg

SEQ ID NO: 1790441 - DNA, 25 bp, Homo sapien
agccggagggcgagcgaccccggtg

SEQ ID NO: 1790442 - DNA, 25 bp, Homo sapien
gagggcgagcgaccccggtggagcg

SEQ ID NO: 1790443 - DNA, 25 bp, Homo sapien
cgcccgtcgtcagccagccggaggc

SEQ ID NO: 1790444 - DNA, 25 bp, Homo sapien
cgtgcccttcgcctttgtatttaga

SEQ ID NO: 1790445 - DNA, 25 bp, Homo sapien
gcccttcgcctttgtatttagagtg

SEQ ID NO: 1790446 - DNA, 25 bp, Homo sapien
tcgcctttgtatttagagtgttcat

SEQ ID NO: 1790447 - DNA, 25 bp, Homo sapien
ttcgcctttgtatttagagtgttca

SEQ ID NO: 1790448 - DNA, 25 bp, Homo sapien
tagttacattaattctgatgccgtc

SEQ ID NO: 1790449 - DNA, 25 bp, Homo sapien
cagtgtagttacattaattctgatg

SEQ ID NO: 1790450 - DNA, 25 bp, Homo sapien
gtttagatatgtccccatcatcttt

SEQ ID NO: 1790451 - DNA, 25 bp, Homo sapien
tttcagtgtagttacattaattctg

SEQ ID NO: 1790452 - DNA, 25 bp, Homo sapien
aggtaagtcatttacatacacctgt

SEQ ID NO: 1790453 - DNA, 25 bp, Homo sapien
agtctgacagcttattcgggttaca

SEQ ID NO: 1790454 - DNA, 25 bp, Homo sapien
attcgggttacaccactatttacag

SEQ ID NO: 1790455 - DNA, 25 bp, Homo sapien
cctgtccactctcataggttatgtt

SEQ ID NO: 1790456 - DNA, 25 bp, Homo sapien
aatgcacacagcctagtgactcgtt

SEQ ID NO: 1790457 - DNA, 25 bp, Homo sapien
gaggaagaccttcaaccaacatctg

SEQ ID NO: 1790458 - DNA, 25 bp, Homo sapien
tgtcctctcgatgaagctagttgcc

SEQ ID NO: 1790459 - DNA, 25 bp, Homo sapien
gatggaatgttactgccacaattag

SEQ ID NO: 1790460 - DNA, 25 bp, Homo sapien
ctcaatgggtgagaaaatgcagtca

SEQ ID NO: 1790461 - DNA, 25 bp, Homo sapien
ctaaggtacaggagactcaatgggt

SEQ ID NO: 1790462 - DNA, 25 bp, Homo sapien
gactcaatgggtgagaaaatgcagt

SEQ ID NO: 1790463 - DNA, 25 bp, Homo sapien
tacaggagactcaatgggtgagaaa

SEQ ID NO: 1790464 - DNA, 25 bp, Homo sapien
gtcagcatgtccgtaagcccaaaga

SEQ ID NO: 1790465 - DNA, 25 bp, Homo sapien
cagcaggcgctgtgtcagcatgtcc

SEQ ID NO: 1790466 - DNA, 25 bp, Homo sapien
tccttcgtggaacagcaggcgctgt

SEQ ID NO: 1790467 - DNA, 25 bp, Homo sapien
cccgtgggtctccttcgtggaacag

SEQ ID NO: 1790468 - DNA, 25 bp, Homo sapien
gagaagatgcccaagcagtaagaac

SEQ ID NO: 1790469 - DNA, 25 bp, Homo sapien
tataaagccagccagaagatacagc

SEQ ID NO: 1790470 - DNA, 25 bp, Homo sapien
tcattactattagagagagcaggaa

SEQ ID NO: 1790471 - DNA, 25 bp, Homo sapien
tttctctctggtaatcgataatggg

SEQ ID NO: 1790472 - DNA, 25 bp, Homo sapien
aaccagatgtcataggccactcatg

SEQ ID NO: 1790473 - DNA, 25 bp, Homo sapien
gaactaaaatccttacactgacaat

SEQ ID NO: 1790474 - DNA, 25 bp, Homo sapien
taggccactcatgaactaaaatcct

SEQ ID NO: 1790475 - DNA, 25 bp, Homo sapien
gaaccagatgtcataggccactcat

SEQ ID NO: 1790476 - DNA, 25 bp, Homo sapien
tctactacctcttcttgaatgacaa

SEQ ID NO: 1790477 - DNA, 25 bp, Homo sapien
tctctactacctcttcttgaatgac

SEQ ID NO: 1790478 - DNA, 25 bp, Homo sapien
ctctactacctcttcttgaatgaca

SEQ ID NO: 1790479 - DNA, 25 bp, Homo sapien
atctctactacctcttcttgaatga

SEQ ID NO: 1790480 - DNA, 25 bp, Homo sapien
ccaaagggagggtatagtttgaatg

SEQ ID NO: 1790481 - DNA, 25 bp, Homo sapien
tctcgagaaatagagtagagcatgc

SEQ ID NO: 1790482 - DNA, 25 bp, Homo sapien
ggtaaataaaatgtcactgtctcga

SEQ ID NO: 1790483 - DNA, 25 bp, Homo sapien
tgtctgagtactccccggttcttaa

SEQ ID NO: 1790484 - DNA, 25 bp, Homo sapien
caggtaacttgccaggtaaaacatc

SEQ ID NO: 1790485 - DNA, 25 bp, Homo sapien
tagtggtttgcagtgaactaacact

SEQ ID NO: 1790486 - DNA, 25 bp, Homo sapien
ttccacattcctgataagatactgg

SEQ ID NO: 1790487 - DNA, 25 bp, Homo sapien
tcctgataagatactggctagtggt

SEQ ID NO: 1790488 - DNA, 25 bp, Homo sapien
ggtagcgggtacagaataaacacag

SEQ ID NO: 1790489 - DNA, 25 bp, Homo sapien
caggctgactctaggaagtatattc

SEQ ID NO: 1790490 - DNA, 25 bp, Homo sapien
gatcacacaactagtcagcggcaga

SEQ ID NO: 1790491 - DNA, 25 bp, Homo sapien
agctgaatcactgggcaagatcctg

SEQ ID NO: 1790492 - DNA, 25 bp, Homo sapien
tatgcaagcctgaccttcagtgaga

SEQ ID NO: 1790493 - DNA, 25 bp, Homo sapien
tttaataccaaccatagaccctgct

SEQ ID NO: 1790494 - DNA, 25 bp, Homo sapien
ctattcagattaagtgggtgcccca

SEQ ID NO: 1790495 - DNA, 25 bp, Homo sapien
gatatcgggatactctctgaaccca

SEQ ID NO: 1790496 - DNA, 25 bp, Homo sapien
ttataaacgaaatggagcagagtca

SEQ ID NO: 1790497 - DNA, 25 bp, Homo sapien
tgttttctaactacaaatcaagtga

SEQ ID NO: 1790498 - DNA, 25 bp, Homo sapien
gaaaataattgctaattgacaagag

SEQ ID NO: 1790499 - DNA, 25 bp, Homo sapien
tagaatgtacctcaatgaagttact

SEQ ID NO: 1790500 - DNA, 25 bp, Homo sapien
acaagagattcgttaggctagtcca

SEQ ID NO: 1790501 - DNA, 25 bp, Homo sapien
agaatactgggaaaacgttgctcca

SEQ ID NO: 1790502 - DNA, 25 bp, Homo sapien
tccagaacctacacagatcttttct

SEQ ID NO: 1790503 - DNA, 25 bp, Homo sapien
tactgggaaaacgttgctccagaac

SEQ ID NO: 1790504 - DNA, 25 bp, Homo sapien
ggaaaacgttgctccagaacctaca

SEQ ID NO: 1790505 - DNA, 25 bp, Homo sapien
cctttaagatggttattaccacagc

SEQ ID NO: 1790506 - DNA, 25 bp, Homo sapien
cacctttaagatggttattaccaca

SEQ ID NO: 1790507 - DNA, 25 bp, Homo sapien
taagatggttattaccacagctgct

SEQ ID NO: 1790508 - DNA, 25 bp, Homo sapien
tttaagatggttattaccacagctg

SEQ ID NO: 1790509 - DNA, 25 bp, Homo sapien
cagtaggtgttattttccctcccat

SEQ ID NO: 1790510 - DNA, 25 bp, Homo sapien
cttgatcacaatagctattcaataa

SEQ ID NO: 1790511 - DNA, 25 bp, Homo sapien
tgtcttgatcacaatagctattcaa

SEQ ID NO: 1790512 - DNA, 25 bp, Homo sapien
ctgaatctctccaagaatgtcttga

SEQ ID NO: 1790513 - DNA, 25 bp, Homo sapien
gaatctctccaagaatgtcttgatc

SEQ ID NO: 1790514 - DNA, 25 bp, Homo sapien
gactacagatgggtgccacacgccc

SEQ ID NO: 1790515 - DNA, 25 bp, Homo sapien
tgggactacagatgggtgccacacg

SEQ ID NO: 1790516 - DNA, 25 bp, Homo sapien
ctacagatgggtgccacacgcccag

SEQ ID NO: 1790517 - DNA, 25 bp, Homo sapien
gggactacagatgggtgccacacgc

SEQ ID NO: 1790518 - DNA, 25 bp, Homo sapien
gatctgacgctgtgtccaggtggaa

SEQ ID NO: 1790519 - DNA, 25 bp, Homo sapien
caaagacgtcccaagcaaattaatc

SEQ ID NO: 1790520 - DNA, 25 bp, Homo sapien
ggtgcccaaacgtgaagtactccag

SEQ ID NO: 1790521 - DNA, 25 bp, Homo sapien
aaaaatccccacacacgtattggtg

SEQ ID NO: 1790522 - DNA, 25 bp, Homo sapien
gacgtccactttatccaactgaaga

SEQ ID NO: 1790523 - DNA, 25 bp, Homo sapien
gctgtcacaggtatgacgtccactt

SEQ ID NO: 1790524 - DNA, 25 bp, Homo sapien
tggatataagttgatagctgtcaca

SEQ ID NO: 1790525 - DNA, 25 bp, Homo sapien
caggtatgacgtccactttatccaa

SEQ ID NO: 1790526 - DNA, 25 bp, Homo sapien
aaattatattcaagtggcaaatttg

SEQ ID NO: 1790527 - DNA, 25 bp, Homo sapien
gaggcaacaggctacttcggagtcc

SEQ ID NO: 1790528 - DNA, 25 bp, Homo sapien
ggctacttcggagtccatgatatga

SEQ ID NO: 1790529 - DNA, 25 bp, Homo sapien
caacaggctacttcggagtccatga

SEQ ID NO: 1790530 - DNA, 25 bp, Homo sapien
caggcagtcttagagtttagcaatt

SEQ ID NO: 1790531 - DNA, 25 bp, Homo sapien
ttagcaatttctctagtgtataaac

SEQ ID NO: 1790532 - DNA, 25 bp, Homo sapien
caattttcaggcagtcttagagttt

SEQ ID NO: 1790533 - DNA, 25 bp, Homo sapien
agtttagcaatttctctagtgtata

SEQ ID NO: 1790534 - DNA, 25 bp, Homo sapien
tgcacccggccgagaataaggtaaa

SEQ ID NO: 1790535 - DNA, 25 bp, Homo sapien
actgcacccggccgagaataaggta

SEQ ID NO: 1790536 - DNA, 25 bp, Homo sapien
cactgcacccggccgagaataaggt

SEQ ID NO: 1790537 - DNA, 25 bp, Homo sapien
ctgcacccggccgagaataaggtaa

SEQ ID NO: 1790538 - DNA, 25 bp, Homo sapien
tcatcatatgaatagccagcccttt

SEQ ID NO: 1790539 - DNA, 25 bp, Homo sapien
ggcaccttgaaaagttattggcaca

SEQ ID NO: 1790540 - DNA, 25 bp, Homo sapien
tggtacaggatacaatcaaatcatg

SEQ ID NO: 1790541 - DNA, 25 bp, Homo sapien
ttaatataaaggcacactgtactga

SEQ ID NO: 1790542 - DNA, 25 bp, Homo sapien
aaacagagcctcaggagattgcgga

SEQ ID NO: 1790543 - DNA, 25 bp, Homo sapien
cctctgggtgccagcggataactga

SEQ ID NO: 1790544 - DNA, 25 bp, Homo sapien
gctgtggtcccaagtcttactgaga

SEQ ID NO: 1790545 - DNA, 25 bp, Homo sapien
ccacctggtgttatggtagcttccc

SEQ ID NO: 1790546 - DNA, 25 bp, Homo sapien
tggcggcagcacaagtggcggcatg

SEQ ID NO: 1790547 - DNA, 25 bp, Homo sapien
gagacatggcggcagcacaagtggc

SEQ ID NO: 1790548 - DNA, 25 bp, Homo sapien
ggcagcacaagtggcggcatgtagg

SEQ ID NO: 1790549 - DNA, 25 bp, Homo sapien
gcggcagcacaagtggcggcatgta

SEQ ID NO: 1790550 - DNA, 25 bp, Homo sapien
ctcggcaaaatatgctgggactttt

SEQ ID NO: 1790551 - DNA, 25 bp, Homo sapien
aaatatgctgggacttttcagggat

SEQ ID NO: 1790552 - DNA, 25 bp, Homo sapien
tcggcaaaatatgctgggacttttc

SEQ ID NO: 1790553 - DNA, 25 bp, Homo sapien
tatgctgggacttttcagggatcac

SEQ ID NO: 1790554 - DNA, 25 bp, Homo sapien
gccacccatcaatgttggtgttgac

SEQ ID NO: 1790555 - DNA, 25 bp, Homo sapien
ccgccacccatcaatgttggtgttg

SEQ ID NO: 1790556 - DNA, 25 bp, Homo sapien
tttccgccacccatcaatgttggtg

SEQ ID NO: 1790557 - DNA, 25 bp, Homo sapien
cacccatcaatgttggtgttgacta

SEQ ID NO: 1790558 - DNA, 25 bp, Homo sapien
tctcccgccctcttggtgaggtcag

SEQ ID NO: 1790559 - DNA, 25 bp, Homo sapien
cgccctcttggtgaggtcagtgtct

SEQ ID NO: 1790560 - DNA, 25 bp, Homo sapien
tcttcggcccacacccttaacggca

SEQ ID NO: 1790561 - DNA, 25 bp, Homo sapien
tcggcccacacccttaacggcagtg

SEQ ID NO: 1790562 - DNA, 25 bp, Homo sapien
tagtgtggattctgcataatggtga

SEQ ID NO: 1790563 - DNA, 25 bp, Homo sapien
tgtggattctgcataatggtgatca

SEQ ID NO: 1790564 - DNA, 25 bp, Homo sapien
gtggattctgcataatggtgatcac

SEQ ID NO: 1790565 - DNA, 25 bp, Homo sapien
gtgtggattctgcataatggtgatc

SEQ ID NO: 1790566 - DNA, 25 bp, Homo sapien
acgcagccctctacgggcccgaatc

SEQ ID NO: 1790567 - DNA, 25 bp, Homo sapien
ccagaagtgacgcagccctctacgg

SEQ ID NO: 1790568 - DNA, 25 bp, Homo sapien
tttcagtcgctccaggtcttcacag

SEQ ID NO: 1790569 - DNA, 25 bp, Homo sapien
cgggcccgaatctttttcagtcgct

SEQ ID NO: 1790570 - DNA, 25 bp, Homo sapien
acccacgatgcggccacggcagcct

SEQ ID NO: 1790571 - DNA, 25 bp, Homo sapien
atgcggccacggcagcctgtggtct

SEQ ID NO: 1790572 - DNA, 25 bp, Homo sapien
cacgatgcggccacggcagcctgtg

SEQ ID NO: 1790573 - DNA, 25 bp, Homo sapien
gatgcggccacggcagcctgtggtc

SEQ ID NO: 1790574 - DNA, 25 bp, Homo sapien
ttattaacagacaaggcctacagac

SEQ ID NO: 1790575 - DNA, 25 bp, Homo sapien
tataaactatttattaacagacaag

SEQ ID NO: 1790576 - DNA, 25 bp, Homo sapien
aactatttattaacagacaaggcct

SEQ ID NO: 1790577 - DNA, 25 bp, Homo sapien
tatttattaacagacaaggcctaca

SEQ ID NO: 1790578 - DNA, 25 bp, Homo sapien
ggccattcatactgggattagccaa

SEQ ID NO: 1790579 - DNA, 25 bp, Homo sapien
tgtttgaaaccaatagctacaatgg

SEQ ID NO: 1790580 - DNA, 25 bp, Homo sapien
gattagccaacagaccataagaaag

SEQ ID NO: 1790581 - DNA, 25 bp, Homo sapien
gctacaatggcaaaccatcacgttt

SEQ ID NO: 1790582 - DNA, 25 bp, Homo sapien
tagggatgcgtccttgatggcaatg

SEQ ID NO: 1790583 - DNA, 25 bp, Homo sapien
caactatggaggatttcgagatggc

SEQ ID NO: 1790584 - DNA, 25 bp, Homo sapien
tgactccagaggaaatccgaaatct

SEQ ID NO: 1790585 - DNA, 25 bp, Homo sapien
tgctgcagacattgaaagatacgag

SEQ ID NO: 1790586 - DNA, 25 bp, Homo sapien
gaacttacctagcttttcctctaca

SEQ ID NO: 1790587 - DNA, 25 bp, Homo sapien
ttctcttctgactctgtgatgctta

SEQ ID NO: 1790588 - DNA, 25 bp, Homo sapien
acttacctagcttttcctctacatg

SEQ ID NO: 1790589 - DNA, 25 bp, Homo sapien
cctgaacttacctagcttttcctct

SEQ ID NO: 1790590 - DNA, 25 bp, Homo sapien
tccagccaccatatttattgatgag

SEQ ID NO: 1790591 - DNA, 25 bp, Homo sapien
gcttaatagcttgatattgcatggt

SEQ ID NO: 1790592 - DNA, 25 bp, Homo sapien
cctttaggctcgattttattctcca

SEQ ID NO: 1790593 - DNA, 25 bp, Homo sapien
actccatctgtagtcgccgagggac

SEQ ID NO: 1790594 - DNA, 25 bp, Homo sapien
tgctgtgcagggagaaccaattggt

SEQ ID NO: 1790595 - DNA, 25 bp, Homo sapien
cacttttgcttggtgtggcaacaga

SEQ ID NO: 1790596 - DNA, 25 bp, Homo sapien
tgtgggaagaatcagtctagtcact

SEQ ID NO: 1790597 - DNA, 25 bp, Homo sapien
gaaattatcccactaggtacagtgg

SEQ ID NO: 1790598 - DNA, 25 bp, Homo sapien
gaaagtgagctgtaactatctccag

SEQ ID NO: 1790599 - DNA, 25 bp, Homo sapien
gggaagacgctccttgctaaagcag

SEQ ID NO: 1790600 - DNA, 25 bp, Homo sapien
gaggctattatattcgcaacaggga

SEQ ID NO: 1790601 - DNA, 25 bp, Homo sapien
gagtatgagtcctatgcccttaaag

SEQ ID NO: 1790602 - DNA, 25 bp, Homo sapien
tagttaagggcagtagtgagaagga

SEQ ID NO: 1790603 - DNA, 25 bp, Homo sapien
gagaaggaggggaagaatagaacaa

SEQ ID NO: 1790604 - DNA, 25 bp, Homo sapien
taactcactacattcggaccagcct

SEQ ID NO: 1790605 - DNA, 25 bp, Homo sapien
tagtgagaaggaggggaagaataga

SEQ ID NO: 1790606 - DNA, 25 bp, Homo sapien
tgggaaactatgactctgcgatggt

SEQ ID NO: 1790607 - DNA, 25 bp, Homo sapien
tatgactaccgagcacagtacacag

SEQ ID NO: 1790608 - DNA, 25 bp, Homo sapien
gcatgagcacacatatagagatggg

SEQ ID NO: 1790609 - DNA, 25 bp, Homo sapien
ggctcgtgaatatgcattgctggga

SEQ ID NO: 1790610 - DNA, 25 bp, Homo sapien
agctagtttttacattttagtagag

SEQ ID NO: 1790611 - DNA, 25 bp, Homo sapien
cttggcctactgcaacctctgctac

SEQ ID NO: 1790612 - DNA, 25 bp, Homo sapien
cctactgcaacctctgctaccctgg

SEQ ID NO: 1790613 - DNA, 25 bp, Homo sapien
tggcctactgcaacctctgctaccc

SEQ ID NO: 1790614 - DNA, 25 bp, Homo sapien
cttttgaagtcatatacacttgctt

SEQ ID NO: 1790615 - DNA, 25 bp, Homo sapien
tgaagtcatatacacttgctttact

SEQ ID NO: 1790616 - DNA, 25 bp, Homo sapien
tactgaaatgccttcaggaagatgc

SEQ ID NO: 1790617 - DNA, 25 bp, Homo sapien
aagtcatatacacttgctttactga

SEQ ID NO: 1790618 - DNA, 25 bp, Homo sapien
tcaaattctcggcgagcaggagccg

SEQ ID NO: 1790619 - DNA, 25 bp, Homo sapien
tgggccgccgcaggtgagttttcac

SEQ ID NO: 1790620 - DNA, 25 bp, Homo sapien
tgttgacgattgaactgggcagtac

SEQ ID NO: 1790621 - DNA, 25 bp, Homo sapien
ccgtgagcggagagcaaagtgggct

SEQ ID NO: 1790622 - DNA, 25 bp, Homo sapien
catcataaggcaggccctactgctg

SEQ ID NO: 1790623 - DNA, 25 bp, Homo sapien
gaatacagtgggaggatttttagac

SEQ ID NO: 1790624 - DNA, 25 bp, Homo sapien
tagatatgaataatcagcctgtgtt

SEQ ID NO: 1790625 - DNA, 25 bp, Homo sapien
agttattaccttctgctgttgcaaa

SEQ ID NO: 1790626 - DNA, 25 bp, Homo sapien
tataattcacatcctgaaactaagg

SEQ ID NO: 1790627 - DNA, 25 bp, Homo sapien
aaaggagaaacctggtatctatttg

SEQ ID NO: 1790628 - DNA, 25 bp, Homo sapien
tagagaaattaagccatcgtgttgg

SEQ ID NO: 1790629 - DNA, 25 bp, Homo sapien
gttcctaggctaatgataatctgta

SEQ ID NO: 1790630 - DNA, 25 bp, Homo sapien
cttgtgatctgcccgcctcagcctc

SEQ ID NO: 1790631 - DNA, 25 bp, Homo sapien
actgcagcctccgccaccgcctccc

SEQ ID NO: 1790632 - DNA, 25 bp, Homo sapien
acagttgctcgccaccacacccggg

SEQ ID NO: 1790633 - DNA, 25 bp, Homo sapien
gggttcaagcaattgttccgcctca

SEQ ID NO: 1790634 - DNA, 25 bp, Homo sapien
tcatttcatgagtgttcatccttat

SEQ ID NO: 1790635 - DNA, 25 bp, Homo sapien
gtgttcatccttatttggagcattt

SEQ ID NO: 1790636 - DNA, 25 bp, Homo sapien
atgagtgttcatccttatttggagc

SEQ ID NO: 1790637 - DNA, 25 bp, Homo sapien
ttcatgagtgttcatccttatttgg

SEQ ID NO: 1790638 - DNA, 25 bp, Homo sapien
cagaatgagcagttgattgaattgc

SEQ ID NO: 1790639 - DNA, 25 bp, Homo sapien
taggccttttggtgtggtcccacag

SEQ ID NO: 1790640 - DNA, 25 bp, Homo sapien
catggatttctcaggctttattccg

SEQ ID NO: 1790641 - DNA, 25 bp, Homo sapien
tatcgtaattatgataggtctgggc

SEQ ID NO: 1790642 - DNA, 25 bp, Homo sapien
tgtattatcacttgatacaaaattc

SEQ ID NO: 1790643 - DNA, 25 bp, Homo sapien
tctgggttttagttcttacagcact

SEQ ID NO: 1790644 - DNA, 25 bp, Homo sapien
attatctgggctggtggcgtgcacc

SEQ ID NO: 1790645 - DNA, 25 bp, Homo sapien
tgtagggagacaagatgacaccact

SEQ ID NO: 1790646 - DNA, 25 bp, Homo sapien
gttattaaccaacagtaaacatgag

SEQ ID NO: 1790647 - DNA, 25 bp, Homo sapien
tatgggacttagtaatacgtcacac

SEQ ID NO: 1790648 - DNA, 25 bp, Homo sapien
tatatactatagcaccctcagggtg

SEQ ID NO: 1790649 - DNA, 25 bp, Homo sapien
tagctcctacaatatccgccatggc

SEQ ID NO: 1790650 - DNA, 25 bp, Homo sapien
atgaaagaagcctccacttggaagc

SEQ ID NO: 1790651 - DNA, 25 bp, Homo sapien
tccctcttgggagtggattttcttc

SEQ ID NO: 1790652 - DNA, 25 bp, Homo sapien
tgccttcagtggatttccctcttgg

SEQ ID NO: 1790653 - DNA, 25 bp, Homo sapien
cagaagcagagtgtagggtgtcttt

SEQ ID NO: 1790654 - DNA, 25 bp, Homo sapien
ttttcagtagccgatttcattgtca

SEQ ID NO: 1790655 - DNA, 25 bp, Homo sapien
tcaccagataataccttttgattcc

SEQ ID NO: 1790656 - DNA, 25 bp, Homo sapien
tattttccagagttagtcatctaca

SEQ ID NO: 1790657 - DNA, 25 bp, Homo sapien
taaagcaggcttgatgccaaaagga

SEQ ID NO: 1790658 - DNA, 25 bp, Homo sapien
gaggtgagggcggagccggcccgcg

SEQ ID NO: 1790659 - DNA, 25 bp, Homo sapien
ccgcgggcgggacggagcttcggcg

SEQ ID NO: 1790660 - DNA, 25 bp, Homo sapien
cttggacaacccgggcagagggcag

SEQ ID NO: 1790661 - DNA, 25 bp, Homo sapien
agccgcggccgggaggtgagggcgg

SEQ ID NO: 1790662 - DNA, 25 bp, Homo sapien
ggcgggtagcgccacgaacagcagg

SEQ ID NO: 1790663 - DNA, 25 bp, Homo sapien
agccggagggcgagcgaccccggtg

SEQ ID NO: 1790664 - DNA, 25 bp, Homo sapien
gagggcgagcgaccccggtggagcg

SEQ ID NO: 1790665 - DNA, 25 bp, Homo sapien
cgcccgtcgtcagccagccggaggc

SEQ ID NO: 1790666 - DNA, 25 bp, Homo sapien
cgtgcccttcgcctttgtatttaga

SEQ ID NO: 1790667 - DNA, 25 bp, Homo sapien
gcccttcgcctttgtatttagagtg

SEQ ID NO: 1790668 - DNA, 25 bp, Homo sapien
ttcgcctttgtatttagagtgttca

SEQ ID NO: 1790669 - DNA, 25 bp, Homo sapien
tcgcctttgtatttagagtgttcat

SEQ ID NO: 1790670 - DNA, 25 bp, Homo sapien
tagttacattaattctgatgccgtc

SEQ ID NO: 1790671 - DNA, 25 bp, Homo sapien
gtttagatatgtccccatcatcttt

SEQ ID NO: 1790672 - DNA, 25 bp, Homo sapien
cagtgtagttacattaattctgatg

SEQ ID NO: 1790673 - DNA, 25 bp, Homo sapien
tttcagtgtagttacattaattctg

SEQ ID NO: 1790674 - DNA, 25 bp, Homo sapien
cctgtccactctcataggttatgtt

SEQ ID NO: 1790675 - DNA, 25 bp, Homo sapien
agtctgacagcttattcgggttaca

SEQ ID NO: 1790676 - DNA, 25 bp, Homo sapien
aggtaagtcatttacatacacctgt

SEQ ID NO: 1790677 - DNA, 25 bp, Homo sapien
attcgggttacaccactatttacag

SEQ ID NO: 1790678 - DNA, 25 bp, Homo sapien
aatgcacacagcctagtgactcgtt

SEQ ID NO: 1790679 - DNA, 25 bp, Homo sapien
gaggaagaccttcaaccaacatctg

SEQ ID NO: 1790680 - DNA, 25 bp, Homo sapien
gatggaatgttactgccacaattag

SEQ ID NO: 1790681 - DNA, 25 bp, Homo sapien
tgtcctctcgatgaagctagttgcc

SEQ ID NO: 1790682 - DNA, 25 bp, Homo sapien
cccgtgggtctccttcgtggaacag

SEQ ID NO: 1790683 - DNA, 25 bp, Homo sapien
cagcaggcgctgtgtcagcatgtcc

SEQ ID NO: 1790684 - DNA, 25 bp, Homo sapien
gtcagcatgtccgtaagcccaaaga

SEQ ID NO: 1790685 - DNA, 25 bp, Homo sapien
tccttcgtggaacagcaggcgctgt

SEQ ID NO: 1790686 - DNA, 25 bp, Homo sapien
tataaagccagccagaagatacagc

SEQ ID NO: 1790687 - DNA, 25 bp, Homo sapien
tttctctctggtaatcgataatggg

SEQ ID NO: 1790688 - DNA, 25 bp, Homo sapien
tcattactattagagagagcaggaa

SEQ ID NO: 1790689 - DNA, 25 bp, Homo sapien
gagaagatgcccaagcagtaagaac

SEQ ID NO: 1790690 - DNA, 25 bp, Homo sapien
aaccagatgtcataggccactcatg

SEQ ID NO: 1790691 - DNA, 25 bp, Homo sapien
gaaccagatgtcataggccactcat

SEQ ID NO: 1790692 - DNA, 25 bp, Homo sapien
gaactaaaatccttacactgacaat

SEQ ID NO: 1790693 - DNA, 25 bp, Homo sapien
taggccactcatgaactaaaatcct

SEQ ID NO: 1790694 - DNA, 25 bp, Homo sapien
tctactacctcttcttgaatgacaa

SEQ ID NO: 1790695 - DNA, 25 bp, Homo sapien
tctctactacctcttcttgaatgac

SEQ ID NO: 1790696 - DNA, 25 bp, Homo sapien
atctctactacctcttcttgaatga

SEQ ID NO: 1790697 - DNA, 25 bp, Homo sapien
ctctactacctcttcttgaatgaca

SEQ ID NO: 1790698 - DNA, 25 bp, Homo sapien
ccaaagggagggtatagtttgaatg

SEQ ID NO: 1790699 - DNA, 25 bp, Homo sapien
tgtctgagtactccccggttcttaa

SEQ ID NO: 1790700 - DNA, 25 bp, Homo sapien
ggtaaataaaatgtcactgtctcga

SEQ ID NO: 1790701 - DNA, 25 bp, Homo sapien
tctcgagaaatagagtagagcatgc

SEQ ID NO: 1790702 - DNA, 25 bp, Homo sapien
caggtaacttgccaggtaaaacatc

SEQ ID NO: 1790703 - DNA, 25 bp, Homo sapien
tagtggtttgcagtgaactaacact

SEQ ID NO: 1790704 - DNA, 25 bp, Homo sapien
ttccacattcctgataagatactgg

SEQ ID NO: 1790705 - DNA, 25 bp, Homo sapien
tcctgataagatactggctagtggt

SEQ ID NO: 1790706 - DNA, 25 bp, Homo sapien
aaccatgaatgcttatgataacacc

SEQ ID NO: 1790707 - DNA, 25 bp, Homo sapien
taaccatgaatgcttatgataacac

SEQ ID NO: 1790708 - DNA, 25 bp, Homo sapien
accatgaatgcttatgataacacca

SEQ ID NO: 1790709 - DNA, 25 bp, Homo sapien
ttaaccatgaatgcttatgataaca

SEQ ID NO: 1790710 - DNA, 25 bp, Homo sapien
tatgcaagcctgaccttcagtgaga

SEQ ID NO: 1790711 - DNA, 25 bp, Homo sapien
gatatcgggatactctctgaaccca

SEQ ID NO: 1790712 - DNA, 25 bp, Homo sapien
tttaataccaaccatagaccctgct

SEQ ID NO: 1790713 - DNA, 25 bp, Homo sapien
ctattcagattaagtgggtgcccca

SEQ ID NO: 1790714 - DNA, 25 bp, Homo sapien
ttataaacgaaatggagcagagtca

SEQ ID NO: 1790715 - DNA, 25 bp, Homo sapien
tagaatgtacctcaatgaagttact

SEQ ID NO: 1790716 - DNA, 25 bp, Homo sapien
acaagagattcgttaggctagtcca

SEQ ID NO: 1790717 - DNA, 25 bp, Homo sapien
tgttttctaactacaaatcaagtga

SEQ ID NO: 1790718 - DNA, 25 bp, Homo sapien
gaaaataattgctaattgacaagag

SEQ ID NO: 1790719 - DNA, 25 bp, Homo sapien
agaatactgggaaaacgttgctcca

SEQ ID NO: 1790720 - DNA, 25 bp, Homo sapien
caccatgatgttcaaaaactgaaag

SEQ ID NO: 1790721 - DNA, 25 bp, Homo sapien
tcctgtaattccaaccaccatgatg

SEQ ID NO: 1790722 - DNA, 25 bp, Homo sapien
taagatggttattaccacagctgct

SEQ ID NO: 1790723 - DNA, 25 bp, Homo sapien
taggccttttggtgtggtcccacag

SEQ ID NO: 1790724 - DNA, 25 bp, Homo sapien
cagaatgagcagttgattgaattgc

SEQ ID NO: 1790725 - DNA, 25 bp, Homo sapien
catggatttctcaggctttattccg

SEQ ID NO: 1790726 - DNA, 25 bp, Homo sapien
tatcgtaattatgataggtctgggc

SEQ ID NO: 1790727 - DNA, 25 bp, Homo sapien
gatacaggtcatactgcattaggac

SEQ ID NO: 1790728 - DNA, 25 bp, Homo sapien
catcttgtggtactggtggttagga

SEQ ID NO: 1790729 - DNA, 25 bp, Homo sapien
taagtgccacacatggtagctcacg

SEQ ID NO: 1790730 - DNA, 25 bp, Homo sapien
gaggtaacttgtcatgtcctgggag

SEQ ID NO: 1790731 - DNA, 25 bp, Homo sapien
tattataggcaacagcgttaccaga

SEQ ID NO: 1790732 - DNA, 25 bp, Homo sapien
taggcaacagcgttaccagatattt

SEQ ID NO: 1790733 - DNA, 25 bp, Homo sapien
agttattataggcaacagcgttacc

SEQ ID NO: 1790734 - DNA, 25 bp, Homo sapien
acagcgttaccagatattttgccac

SEQ ID NO: 1790735 - DNA, 25 bp, Homo sapien
tcggcctcggaggtgcaggtttggc

SEQ ID NO: 1790736 - DNA, 25 bp, Homo sapien
gttggccgcgcccggtgctgcagga

SEQ ID NO: 1790737 - DNA, 25 bp, Homo sapien
cctgtctttctggcggcgtgtctcc

SEQ ID NO: 1790738 - DNA, 25 bp, Homo sapien
aagagccccaggcttttcggcctcg

SEQ ID NO: 1790739 - DNA, 25 bp, Homo sapien
ccagaggtttggactggcgggcaga

SEQ ID NO: 1790740 - DNA, 25 bp, Homo sapien
ccgggcctgacttggctggttgcat

SEQ ID NO: 1790741 - DNA, 25 bp, Homo sapien
gcccatccccgctggcgagggtcca

SEQ ID NO: 1790742 - DNA, 25 bp, Homo sapien
agccggcccgctccgggcctgactt

SEQ ID NO: 1790743 - DNA, 25 bp, Homo sapien
agccaggtcctcacgacccctggga

SEQ ID NO: 1790744 - DNA, 25 bp, Homo sapien
ccaccagggatacttggggttgctg

SEQ ID NO: 1790745 - DNA, 25 bp, Homo sapien
ctggcgtagcgggtgcgctcctcca

SEQ ID NO: 1790746 - DNA, 25 bp, Homo sapien
tgggacggactctggccgcctcagc

SEQ ID NO: 1790747 - DNA, 25 bp, Homo sapien
cgacactgagtggaaggcaaaatgg

SEQ ID NO: 1790748 - DNA, 25 bp, Homo sapien
ctgagtggaaggcaaaatggcggcg

SEQ ID NO: 1790749 - DNA, 25 bp, Homo sapien
gcggcgacactgagtggaaggcaaa

SEQ ID NO: 1790750 - DNA, 25 bp, Homo sapien
gcgacactgagtggaaggcaaaatg

SEQ ID NO: 1790751 - DNA, 25 bp, Homo sapien
taatcaatcggtcctggctcaagca

SEQ ID NO: 1790752 - DNA, 25 bp, Homo sapien
taacgatctccttctacggatgcgg

SEQ ID NO: 1790753 - DNA, 25 bp, Homo sapien
tcccttctgagaacgtagctccgtg

SEQ ID NO: 1790754 - DNA, 25 bp, Homo sapien
gatcttcacaaagggtggaccgtac

SEQ ID NO: 1790755 - DNA, 25 bp, Homo sapien
tgagtaggctgaaactggaccaaga

SEQ ID NO: 1790756 - DNA, 25 bp, Homo sapien
tattgctaaaaacaagccccatttc

SEQ ID NO: 1790757 - DNA, 25 bp, Homo sapien
gaaatcggattctacatctattgct

SEQ ID NO: 1790758 - DNA, 25 bp, Homo sapien
aaacaagccccatttccatgaagca

SEQ ID NO: 1790759 - DNA, 25 bp, Homo sapien
agaccagcctgaccaacatggtgaa

SEQ ID NO: 1790760 - DNA, 25 bp, Homo sapien
tggtgaaaccccatctctactaaaa

SEQ ID NO: 1790761 - DNA, 25 bp, Homo sapien
caggcggatcacctggggtgggaag

SEQ ID NO: 1790762 - DNA, 25 bp, Homo sapien
attagccaggcatattggcacatgc

SEQ ID NO: 1790763 - DNA, 25 bp, Homo sapien
tgaagtgttcacatgtgatactcct

SEQ ID NO: 1790764 - DNA, 25 bp, Homo sapien
tcttgccatcctgttaataggaatg

SEQ ID NO: 1790765 - DNA, 25 bp, Homo sapien
ggaatgatattcctttgtaatgctg

SEQ ID NO: 1790766 - DNA, 25 bp, Homo sapien
tgatactcctaagccacacttccta

SEQ ID NO: 1790767 - DNA, 25 bp, Homo sapien
ctttatggcagggttttagtgtgtg

SEQ ID NO: 1790768 - DNA, 25 bp, Homo sapien
tgaacagccctaattgatacaactt

SEQ ID NO: 1790769 - DNA, 25 bp, Homo sapien
tgtgtgagtgggatccaaaacactc

SEQ ID NO: 1790770 - DNA, 25 bp, Homo sapien
caaaacactcaatcctgtaaaaggg

SEQ ID NO: 1790771 - DNA, 25 bp, Homo sapien
ggtttttgagcagaactctttcagc

SEQ ID NO: 1790772 - DNA, 25 bp, Homo sapien
tcagcttgttagacccaactttgct

SEQ ID NO: 1790773 - DNA, 25 bp, Homo sapien
gcttcacagcatagctgaaagttgc

SEQ ID NO: 1790774 - DNA, 25 bp, Homo sapien
tgacctgagaccttaatgacaaatc

SEQ ID NO: 1790775 - DNA, 25 bp, Homo sapien
tctggtggagatgatttagccggac

SEQ ID NO: 1790776 - DNA, 25 bp, Homo sapien
gccaaacattttgcatagcgcattg

SEQ ID NO: 1790777 - DNA, 25 bp, Homo sapien
catagtgaagtgtgcaagaatgccc

SEQ ID NO: 1790778 - DNA, 25 bp, Homo sapien
agttccaggctcctcctactcagga

SEQ ID NO: 1790779 - DNA, 25 bp, Homo sapien
gctgctgcgtgtccctttctgaggc

SEQ ID NO: 1790780 - DNA, 25 bp, Homo sapien
ccgctgctgcgtgtccctttctgag

SEQ ID NO: 1790781 - DNA, 25 bp, Homo sapien
gtagcctgatcagtcgcgttcccgg

SEQ ID NO: 1790782 - DNA, 25 bp, Homo sapien
ctgcggcccggctcggtagcctgat

SEQ ID NO: 1790783 - DNA, 25 bp, Homo sapien
cagaaccaccttcagcgcgacgacg

SEQ ID NO: 1790784 - DNA, 25 bp, Homo sapien
ggtacagaaccaccttcagcgcgac

SEQ ID NO: 1790785 - DNA, 25 bp, Homo sapien
tacagaaccaccttcagcgcgacga

SEQ ID NO: 1790786 - DNA, 25 bp, Homo sapien
gaaccaccttcagcgcgacgacggt

SEQ ID NO: 1790787 - DNA, 25 bp, Homo sapien
attagctccgagtggctggcgccgc

SEQ ID NO: 1790788 - DNA, 25 bp, Homo sapien
tggcgccgccggatttccaggccat

SEQ ID NO: 1790789 - DNA, 25 bp, Homo sapien
gattgtggattagctccgagtggct

SEQ ID NO: 1790790 - DNA, 25 bp, Homo sapien
tgcggagattgtggattagctccga

SEQ ID NO: 1790791 - DNA, 25 bp, Homo sapien
tcaagtgggacgtccagagagttcc

SEQ ID NO: 1790792 - DNA, 25 bp, Homo sapien
tgacagtcactgctaaccaaatagg

SEQ ID NO: 1790793 - DNA, 25 bp, Homo sapien
ggattatttggacacaagccctgtg

SEQ ID NO: 1790794 - DNA, 25 bp, Homo sapien
caaacgggcaggtgtagacagcata

SEQ ID NO: 1790795 - DNA, 25 bp, Homo sapien
tccaagataacagagcaaataaggg

SEQ ID NO: 1790796 - DNA, 25 bp, Homo sapien
aacacctaggcctacatgtgcatgc

SEQ ID NO: 1790797 - DNA, 25 bp, Homo sapien
taccatgtgaaagatacagtactaa

SEQ ID NO: 1790798 - DNA, 25 bp, Homo sapien
tgttgtctcaaataagcctataaag

SEQ ID NO: 1790799 - DNA, 25 bp, Homo sapien
ttaggtgatccaccttcctcgtcct

SEQ ID NO: 1790800 - DNA, 25 bp, Homo sapien
cttaggtgatccaccttcctcgtcc

SEQ ID NO: 1790801 - DNA, 25 bp, Homo sapien
gtattacaggtatgagccatcatgc

SEQ ID NO: 1790802 - DNA, 25 bp, Homo sapien
ctggtattacaggtatgagccatca

SEQ ID NO: 1790803 - DNA, 25 bp, Homo sapien
gaatccatgtatgggttacattttg

SEQ ID NO: 1790804 - DNA, 25 bp, Homo sapien
actttatctgtcttgatgattccat

SEQ ID NO: 1790805 - DNA, 25 bp, Homo sapien
tgggagcggtctgtagccagcatca

SEQ ID NO: 1790806 - DNA, 25 bp, Homo sapien
ctattgattgtggagaatccatgta

SEQ ID NO: 1790807 - DNA, 25 bp, Homo sapien
tcagcactcggctaatactgtaagt

SEQ ID NO: 1790808 - DNA, 25 bp, Homo sapien
ttgggattatgaaacttgctgagtc

SEQ ID NO: 1790809 - DNA, 25 bp, Homo sapien
caacacgggtggtttgcctgagctc

SEQ ID NO: 1790810 - DNA, 25 bp, Homo sapien
tagtcaacactaaggcccctaaaga

SEQ ID NO: 1790811 - DNA, 25 bp, Homo sapien
caggagaaggagttaaatacaggac

SEQ ID NO: 1790812 - DNA, 25 bp, Homo sapien
ttcaggagaaggagttaaatacagg

SEQ ID NO: 1790813 - DNA, 25 bp, Homo sapien
cttcaggagaaggagttaaatacag

SEQ ID NO: 1790814 - DNA, 25 bp, Homo sapien
aggagaaggagttaaatacaggact

SEQ ID NO: 1790815 - DNA, 25 bp, Homo sapien
gccaaggctcagcagttcagcaaaa

SEQ ID NO: 1790816 - DNA, 25 bp, Homo sapien
tgccaaggctcagcagttcagcaaa

SEQ ID NO: 1790817 - DNA, 25 bp, Homo sapien
ctgccaaggctcagcagttcagcaa

SEQ ID NO: 1790818 - DNA, 25 bp, Homo sapien
gctgactgttatagtgcgtcaaaag

SEQ ID NO: 1790819 - DNA, 25 bp, Homo sapien
aagtttcactgagcggtggtagcag

SEQ ID NO: 1790820 - DNA, 25 bp, Homo sapien
cagccgactgacagaatcctgaggc

SEQ ID NO: 1790821 - DNA, 25 bp, Homo sapien
cgtcaaaagaagatagcatggcagc

SEQ ID NO: 1790822 - DNA, 25 bp, Homo sapien
gtgtggagcactgattgttgcttgg

SEQ ID NO: 1790823 - DNA, 25 bp, Homo sapien
tgtgtggagcactgattgttgcttg

SEQ ID NO: 1790824 - DNA, 25 bp, Homo sapien
atgtgtggagcactgattgttgctt

SEQ ID NO: 1790825 - DNA, 25 bp, Homo sapien
catgtgtggagcactgattgttgct

SEQ ID NO: 1790826 - DNA, 25 bp, Homo sapien
tttagctccttcatgcaactgatca

SEQ ID NO: 1790827 - DNA, 25 bp, Homo sapien
catacgtgcaaaacatgcagtaagg

SEQ ID NO: 1790828 - DNA, 25 bp, Homo sapien
atagaagttctagcgcatatgcatg

SEQ ID NO: 1790829 - DNA, 25 bp, Homo sapien
tccagatcctacatcaagagcttta

SEQ ID NO: 1790830 - DNA, 25 bp, Homo sapien
gttggatcgtccttcctgacattat

SEQ ID NO: 1790831 - DNA, 25 bp, Homo sapien
aagacagaagtgttggatcgtcctt

SEQ ID NO: 1790832 - DNA, 25 bp, Homo sapien
taatgtgatcaattcctatgacttt

SEQ ID NO: 1790833 - DNA, 25 bp, Homo sapien
gctctttaatgtgatcaattcctat

SEQ ID NO: 1790834 - DNA, 25 bp, Homo sapien
aaaaaattggtaagtctgactacat

SEQ ID NO: 1790835 - DNA, 25 bp, Homo sapien
tctggggaatacaactggatattca

SEQ ID NO: 1790836 - DNA, 25 bp, Homo sapien
tataactgcacctttacctcacaca

SEQ ID NO: 1790837 - DNA, 25 bp, Homo sapien
catggtctcagagtatccttaaaaa

SEQ ID NO: 1790838 - DNA, 25 bp, Homo sapien
tcacttgaccttcgtctatctcttg

SEQ ID NO: 1790839 - DNA, 25 bp, Homo sapien
tgtcacttgaccttcgtctatctct

SEQ ID NO: 1790840 - DNA, 25 bp, Homo sapien
tctgtcacttgaccttcgtctatct

SEQ ID NO: 1790841 - DNA, 25 bp, Homo sapien
ttgaccttcgtctatctcttgatct

SEQ ID NO: 1790842 - DNA, 25 bp, Homo sapien
aatatagtgttactcactattggtg

SEQ ID NO: 1790843 - DNA, 25 bp, Homo sapien
acaacaaatatagtgttactcacta

SEQ ID NO: 1790844 - DNA, 25 bp, Homo sapien
tagtgttactcactattggtgctat

SEQ ID NO: 1790845 - DNA, 25 bp, Homo sapien
tgttactcactattggtgctatttg

SEQ ID NO: 1790846 - DNA, 25 bp, Homo sapien
aattcaggaacagttatgccatcag

SEQ ID NO: 1790847 - DNA, 25 bp, Homo sapien
ttctctcaattcaggaacagttatg

SEQ ID NO: 1790848 - DNA, 25 bp, Homo sapien
tgccatcaggacaacaggtaattcc

SEQ ID NO: 1790849 - DNA, 25 bp, Homo sapien
agtaatccagaatagattgaaacac

SEQ ID NO: 1790850 - DNA, 25 bp, Homo sapien
ccttatgggcagcaaactatatgaa

SEQ ID NO: 1790851 - DNA, 25 bp, Homo sapien
cactggagataacggaactgaaaag

SEQ ID NO: 1790852 - DNA, 25 bp, Homo sapien
gcagcagcacctatttaagttaact

SEQ ID NO: 1790853 - DNA, 25 bp, Homo sapien
taaagcatgaaacggcactggagat

SEQ ID NO: 1790854 - DNA, 25 bp, Homo sapien
tcccacatgaatggcatcataaggg

SEQ ID NO: 1790855 - DNA, 25 bp, Homo sapien
cagctcccacatgaatggcatcata

SEQ ID NO: 1790856 - DNA, 25 bp, Homo sapien
gctgcagctcccacatgaatggcat

SEQ ID NO: 1790857 - DNA, 25 bp, Homo sapien
tcttcagcatatcccattcttccat

SEQ ID NO: 1790858 - DNA, 25 bp, Homo sapien
aatactttctcatatctcccataca

SEQ ID NO: 1790859 - DNA, 25 bp, Homo sapien
tatcatatcgctaatttcccagtta

SEQ ID NO: 1790860 - DNA, 25 bp, Homo sapien
catacaccaaatacagccttacata

SEQ ID NO: 1790861 - DNA, 25 bp, Homo sapien
tctagaatacaagctttgtgagaat

SEQ ID NO: 1790862 - DNA, 25 bp, Homo sapien
gatgtctccttgaccactcactgca

SEQ ID NO: 1790863 - DNA, 25 bp, Homo sapien
ccatatatcctactattctttaaga

SEQ ID NO: 1790864 - DNA, 25 bp, Homo sapien
ttctttaagattcagttcaagttcc

SEQ ID NO: 1790865 - DNA, 25 bp, Homo sapien
cgtgtgtgatgtctccttgaccact

SEQ ID NO: 1790866 - DNA, 25 bp, Homo sapien
taactgatctaagcctaccaaaaaa

SEQ ID NO: 1790867 - DNA, 25 bp, Homo sapien
cttctgagcgcaagtgattcatctg

SEQ ID NO: 1790868 - DNA, 25 bp, Homo sapien
caataagcagcaagtcaatgaccag

SEQ ID NO: 1790869 - DNA, 25 bp, Homo sapien
cggatgagactagacagaagaaaca

SEQ ID NO: 1790870 - DNA, 25 bp, Homo sapien
ggcaatatcaatcttcctccgggct

SEQ ID NO: 1790871 - DNA, 25 bp, Homo sapien
ggtttccgcctgcaggaccaacagg

SEQ ID NO: 1790872 - DNA, 25 bp, Homo sapien
catcttgtagcttgtcatactgctc

SEQ ID NO: 1790873 - DNA, 25 bp, Homo sapien
tcctccgggctttaactgatctatt

SEQ ID NO: 1790874 - DNA, 25 bp, Homo sapien
ttatctgttaaaggcacgtatatca

SEQ ID NO: 1790875 - DNA, 25 bp, Homo sapien
tggaccactgcttttctttatctgt

SEQ ID NO: 1790876 - DNA, 25 bp, Homo sapien
ctggaccactgcttttctttatctg

SEQ ID NO: 1790877 - DNA, 25 bp, Homo sapien
tctttatctgttaaaggcacgtata

SEQ ID NO: 1790878 - DNA, 25 bp, Homo sapien
tgtgtggaagaagaaagagcagaag

SEQ ID NO: 1790879 - DNA, 25 bp, Homo sapien
cttgcatgtgtggaagaagaaagag

SEQ ID NO: 1790880 - DNA, 25 bp, Homo sapien
tgtggaagaagaaagagcagaagat

SEQ ID NO: 1790881 - DNA, 25 bp, Homo sapien
tggaagaagaaagagcagaagataa

SEQ ID NO: 1790882 - DNA, 25 bp, Homo sapien
tgtcttaaaatccacaccctttcac

SEQ ID NO: 1790883 - DNA, 25 bp, Homo sapien
aaacagctcttgtagtctaatgtct

SEQ ID NO: 1790884 - DNA, 25 bp, Homo sapien
gacgttataatggaggagcataaag

SEQ ID NO: 1790885 - DNA, 25 bp, Homo sapien
atttctgacgttataatggaggagc

SEQ ID NO: 1790886 - DNA, 25 bp, Homo sapien
aaaagaaaccattcactcagccagg

SEQ ID NO: 1790887 - DNA, 25 bp, Homo sapien
cagctttatcagctccaaaagaaac

SEQ ID NO: 1790888 - DNA, 25 bp, Homo sapien
aaagaaaccattcactcagccaggt

SEQ ID NO: 1790889 - DNA, 25 bp, Homo sapien
agctttatcagctccaaaagaaacc

SEQ ID NO: 1790890 - DNA, 25 bp, Homo sapien
cattagtaggagttacacactaccc

SEQ ID NO: 1790891 - DNA, 25 bp, Homo sapien
aaatacattagtaggagttacacac

SEQ ID NO: 1790892 - DNA, 25 bp, Homo sapien
aagagagaaatacattagtaggagt

SEQ ID NO: 1790893 - DNA, 25 bp, Homo sapien
gagttacacactacccaatttggct

SEQ ID NO: 1790894 - DNA, 25 bp, Homo sapien
tttatactggtcaagctgatgttgc

SEQ ID NO: 1790895 - DNA, 25 bp, Homo sapien
tcctctaccaatttggctctgtgcc

SEQ ID NO: 1790896 - DNA, 25 bp, Homo sapien
agtccaaaacaagctgtgatggtgt

SEQ ID NO: 1790897 - DNA, 25 bp, Homo sapien
gctttgaggactgagatgagcaatc

SEQ ID NO: 1790898 - DNA, 25 bp, Homo sapien
tctatgacaccacatcaaaagcttt

SEQ ID NO: 1790899 - DNA, 25 bp, Homo sapien
ggtggtgttatccaatgcacaaaag

SEQ ID NO: 1790900 - DNA, 25 bp, Homo sapien
tgagtgtttacaggacatcacctgc

SEQ ID NO: 1790901 - DNA, 25 bp, Homo sapien
caaagcagctgattgtatctacaac

SEQ ID NO: 1790902 - DNA, 25 bp, Homo sapien
tgacgactgaagtacggtcctggcc

SEQ ID NO: 1790903 - DNA, 25 bp, Homo sapien
catgcacccagtagaagggctttgc

SEQ ID NO: 1790904 - DNA, 25 bp, Homo sapien
gacttcgcaaaaggaaacaaccaga

SEQ ID NO: 1790905 - DNA, 25 bp, Homo sapien
tgcccacgaaggttctttgccagaa

SEQ ID NO: 1790906 - DNA, 25 bp, Homo sapien
tggcctgagtatggaagcaattaac

SEQ ID NO: 1790907 - DNA, 25 bp, Homo sapien
tctaagaccttacccaagaagaggc

SEQ ID NO: 1790908 - DNA, 25 bp, Homo sapien
taaaatggactagtcctggaccaca

SEQ ID NO: 1790909 - DNA, 25 bp, Homo sapien
taaactctcaagttttgggcaccaa

SEQ ID NO: 1790910 - DNA, 25 bp, Homo sapien
aacacttgcatgaacaatgttaatg

SEQ ID NO: 1790911 - DNA, 25 bp, Homo sapien
ttattgactggaaaagagttgaaac

SEQ ID NO: 1790912 - DNA, 25 bp, Homo sapien
aaagttcagtgggccagggacggtg

SEQ ID NO: 1790913 - DNA, 25 bp, Homo sapien
taaaacacttgcatgaacaatgtta

SEQ ID NO: 1790914 - DNA, 25 bp, Homo sapien
catgtcttttcctaaggctcactaa

SEQ ID NO: 1790915 - DNA, 25 bp, Homo sapien
tcaaatcagctgagtacccaataca

SEQ ID NO: 1790916 - DNA, 25 bp, Homo sapien
cattcttagtagatagcagctactc

SEQ ID NO: 1790917 - DNA, 25 bp, Homo sapien
cttcagttactgatggctgttcaca

SEQ ID NO: 1790918 - DNA, 25 bp, Homo sapien
gaatcggactacctcataaatggga

SEQ ID NO: 1790919 - DNA, 25 bp, Homo sapien
gcaaagcgcgtatcatatagtgacc

SEQ ID NO: 1790920 - DNA, 25 bp, Homo sapien
tcatggttgcatgccgactacgact

SEQ ID NO: 1790921 - DNA, 25 bp, Homo sapien
gaatgtgccatcagctaatgccagg

SEQ ID NO: 1790922 - DNA, 25 bp, Homo sapien
ttttttgagataggcccttacactg

SEQ ID NO: 1790923 - DNA, 25 bp, Homo sapien
gagataggcccttacactgtcaccc

SEQ ID NO: 1790924 - DNA, 25 bp, Homo sapien
tttttgagataggcccttacactgt

SEQ ID NO: 1790925 - DNA, 25 bp, Homo sapien
ttgagataggcccttacactgtcac

SEQ ID NO: 1790926 - DNA, 25 bp, Homo sapien
tcttccgcaggagcttctatcacca

SEQ ID NO: 1790927 - DNA, 25 bp, Homo sapien
gaaacctgacgaggaactgtatcct

SEQ ID NO: 1790928 - DNA, 25 bp, Homo sapien
tgtatcctgcttgatatccagcgtg

SEQ ID NO: 1790929 - DNA, 25 bp, Homo sapien
tgttctcagtcataactgcaggctc

SEQ ID NO: 1790930 - DNA, 25 bp, Homo sapien
aaccagttgaactcgtggaagcaga

SEQ ID NO: 1790931 - DNA, 25 bp, Homo sapien
tgtcagtgacagtgcttcgcgcagc

SEQ ID NO: 1790932 - DNA, 25 bp, Homo sapien
tttgctgcatctgttccaagaggga

SEQ ID NO: 1790933 - DNA, 25 bp, Homo sapien
gatgctcccgcttctcttgactcga

SEQ ID NO: 1790934 - DNA, 25 bp, Homo sapien
gccagcatgcggtgctcctgcccgg

SEQ ID NO: 1790935 - DNA, 25 bp, Homo sapien
ggccagcatgcggtgctcctgcccg

SEQ ID NO: 1790936 - DNA, 25 bp, Homo sapien
tttctcagaaaaggatgcgcctcca

SEQ ID NO: 1790937 - DNA, 25 bp, Homo sapien
ccgtcagtggacatgaaggtaacgc

SEQ ID NO: 1790938 - DNA, 25 bp, Homo sapien
tgcgcctccacttagcaaggctggg

SEQ ID NO: 1790939 - DNA, 25 bp, Homo sapien
tgaccacgccatcgtccagtatgag

SEQ ID NO: 1790940 - DNA, 25 bp, Homo sapien
tgcaatgtatcaagagtggtcacct

SEQ ID NO: 1790941 - DNA, 25 bp, Homo sapien
taggtagcaacattggcccctgtgg

SEQ ID NO: 1790942 - DNA, 25 bp, Homo sapien
gaccccgtcagattagctttccaga

SEQ ID NO: 1790943 - DNA, 25 bp, Homo sapien
ggattgcagtaagccccgaaactca

SEQ ID NO: 1790944 - DNA, 25 bp, Homo sapien
gcacagcggctacagcagctacagc

SEQ ID NO: 1790945 - DNA, 25 bp, Homo sapien
acagcagctacagcctcagccgcgc

SEQ ID NO: 1790946 - DNA, 25 bp, Homo sapien
agcagctacagcctcagccgcgcgc

SEQ ID NO: 1790947 - DNA, 25 bp, Homo sapien
gcggctacagcagctacagcctcag

SEQ ID NO: 1790948 - DNA, 25 bp, Homo sapien
acagcgcaatgcctgacgccatcat

SEQ ID NO: 1790949 - DNA, 25 bp, Homo sapien
ctgatcaacgccgaggccgactcgt

SEQ ID NO: 1790950 - DNA, 25 bp, Homo sapien
tgggccggctatgtctcccgctact

SEQ ID NO: 1790951 - DNA, 25 bp, Homo sapien
tgctggaggagttccgccggcaact

SEQ ID NO: 1790952 - DNA, 25 bp, Homo sapien
cgccgcggccactgttcgcacacac

SEQ ID NO: 1790953 - DNA, 25 bp, Homo sapien
aaggctccaccccgccgcggccact

SEQ ID NO: 1790954 - DNA, 25 bp, Homo sapien
accccgccgcggccactgttcgcac

SEQ ID NO: 1790955 - DNA, 25 bp, Homo sapien
cccgccgcggccactgttcgcacac

SEQ ID NO: 1790956 - DNA, 25 bp, Homo sapien
aaatctgagtgcatgtgacgactgc

SEQ ID NO: 1790957 - DNA, 25 bp, Homo sapien
tatttacaatgtgcgcatccaggca

SEQ ID NO: 1790958 - DNA, 25 bp, Homo sapien
tgatataaccgctagaggcctctct

SEQ ID NO: 1790959 - DNA, 25 bp, Homo sapien
tcacagaagtctagaacgccaaggt

SEQ ID NO: 1790960 - DNA, 25 bp, Homo sapien
gtactgaggttattcacaagctggg

SEQ ID NO: 1790961 - DNA, 25 bp, Homo sapien
cagaattgtggccacatcgttagat

SEQ ID NO: 1790962 - DNA, 25 bp, Homo sapien
catcaccgacctcagtgtcttggga

SEQ ID NO: 1790963 - DNA, 25 bp, Homo sapien
tgtctactaacgtctttgctgcaag

SEQ ID NO: 1790964 - DNA, 25 bp, Homo sapien
taactaccaactgggtggctgtgca

SEQ ID NO: 1790965 - DNA, 25 bp, Homo sapien
tctctttgatcgtgttaactaccaa

SEQ ID NO: 1790966 - DNA, 25 bp, Homo sapien
ctgtgcagacagctcgaatgttgag

SEQ ID NO: 1790967 - DNA, 25 bp, Homo sapien
cgtgttaactaccaactgggtggct

SEQ ID NO: 1790968 - DNA, 25 bp, Homo sapien
tcctggcacactactccagcagctt

SEQ ID NO: 1790969 - DNA, 25 bp, Homo sapien
agagtggtcctggcacactactcca

SEQ ID NO: 1790970 - DNA, 25 bp, Homo sapien
gtcctggcacactactccagcagct

SEQ ID NO: 1790971 - DNA, 25 bp, Homo sapien
gtggtcctggcacactactccagca

SEQ ID NO: 1790972 - DNA, 25 bp, Homo sapien
gcaaatcatcacacgtcatcactgc

SEQ ID NO: 1790973 - DNA, 25 bp, Homo sapien
tccaccaccatcttagcaaagaaag

SEQ ID NO: 1790974 - DNA, 25 bp, Homo sapien
ctgcagcaaatcatcacacgtcatc

SEQ ID NO: 1790975 - DNA, 25 bp, Homo sapien
ttaagctgcagcaaatcatcacacg

SEQ ID NO: 1790976 - DNA, 25 bp, Homo sapien
aagggcaatctagggattttggtat

SEQ ID NO: 1790977 - DNA, 25 bp, Homo sapien
ttaaacccagcataagagaaagtct

SEQ ID NO: 1790978 - DNA, 25 bp, Homo sapien
caactcgagctcaacattcaaaagg

SEQ ID NO: 1790979 - DNA, 25 bp, Homo sapien
ggagggttgcattttaaacccagca

SEQ ID NO: 1790980 - DNA, 25 bp, Homo sapien
taatcctcaaccgtgtggactttta

SEQ ID NO: 1790981 - DNA, 25 bp, Homo sapien
aatcctcaaccgtgtggacttttat

SEQ ID NO: 1790982 - DNA, 25 bp, Homo sapien
taagaaagcattcgtactggtctgg

SEQ ID NO: 1790983 - DNA, 25 bp, Homo sapien
ttggctccaaaatgatagatcctct

SEQ ID NO: 1790984 - DNA, 25 bp, Homo sapien
taaactgctcactaccaccatggag

SEQ ID NO: 1790985 - DNA, 25 bp, Homo sapien
cccgatggccctcctgatgatcatg

SEQ ID NO: 1790986 - DNA, 25 bp, Homo sapien
ggaatgagacaatctccaaggcctt

SEQ ID NO: 1790987 - DNA, 25 bp, Homo sapien
tcatatcacgtgcccctgggaatgc

SEQ ID NO: 1790988 - DNA, 25 bp, Homo sapien
cagcttgttgagaatctctgtggcc

SEQ ID NO: 1790989 - DNA, 25 bp, Homo sapien
ggagaactccctctcaatggccctg

SEQ ID NO: 1790990 - DNA, 25 bp, Homo sapien
gtcaatcggattcttgatggtttca

SEQ ID NO: 1790991 - DNA, 25 bp, Homo sapien
gacacaatcaggcacacagcctaag

SEQ ID NO: 1790992 - DNA, 25 bp, Homo sapien
cattgatccataccaaagctggctc

SEQ ID NO: 1790993 - DNA, 25 bp, Homo sapien
acacagcctaagaggccactgccag

SEQ ID NO: 1790994 - DNA, 25 bp, Homo sapien
ttgtctcacaggtggtcactctctt

SEQ ID NO: 1790995 - DNA, 25 bp, Homo sapien
tgtctcacaggtggtcactctcttt

SEQ ID NO: 1790996 - DNA, 25 bp, Homo sapien
gtctcacaggtggtcactctctttg

SEQ ID NO: 1790997 - DNA, 25 bp, Homo sapien
aagggccctagcatctgagtcacag

SEQ ID NO: 1790998 - DNA, 25 bp, Homo sapien
ggccctagcatctgagtcacaggat

SEQ ID NO: 1790999 - DNA, 25 bp, Homo sapien
gacatgcacttgaattaactggcat

SEQ ID NO: 1791000 - DNA, 25 bp, Homo sapien
ctgggtctgacatgcacttgaatta

SEQ ID NO: 1791001 - DNA, 25 bp, Homo sapien
cagaaggacaaacatctcctgctgg

SEQ ID NO: 1791002 - DNA, 25 bp, Homo sapien
tccatcctagagacggcagaaggac

SEQ ID NO: 1791003 - DNA, 25 bp, Homo sapien
cacccagagagactgaactggtttc

SEQ ID NO: 1791004 - DNA, 25 bp, Homo sapien
gtgttccaaacacccgtgcagaggg

SEQ ID NO: 1791005 - DNA, 25 bp, Homo sapien
cctggcgaatattagaatttctgct

SEQ ID NO: 1791006 - DNA, 25 bp, Homo sapien
agggccaagcctggcgaatattaga

SEQ ID NO: 1791007 - DNA, 25 bp, Homo sapien
caagcctggcgaatattagaatttc

SEQ ID NO: 1791008 - DNA, 25 bp, Homo sapien
gccaagcctggcgaatattagaatt

SEQ ID NO: 1791009 - DNA, 25 bp, Homo sapien
tgtgccaatggccagagaaattcag

SEQ ID NO: 1791010 - DNA, 25 bp, Homo sapien
caggagttcccagaaaacagagggt

SEQ ID NO: 1791011 - DNA, 25 bp, Homo sapien
gagagctgctccttgtgccaagatt

SEQ ID NO: 1791012 - DNA, 25 bp, Homo sapien
gaactgcgtggcagagcccctgtgc

SEQ ID NO: 1791013 - DNA, 25 bp, Homo sapien
cagaaacacctgcattcctaactct

SEQ ID NO: 1791014 - DNA, 25 bp, Homo sapien
gccagaaacacctgcattcctaact

SEQ ID NO: 1791015 - DNA, 25 bp, Homo sapien
tgccagaaacacctgcattcctaac

SEQ ID NO: 1791016 - DNA, 25 bp, Homo sapien
ccagaaacacctgcattcctaactc

SEQ ID NO: 1791017 - DNA, 25 bp, Homo sapien
aggtaaccagctaggacttctggaa

SEQ ID NO: 1791018 - DNA, 25 bp, Homo sapien
ctgtgaaggtaaccagctaggactt

SEQ ID NO: 1791019 - DNA, 25 bp, Homo sapien
gaaggtaaccagctaggacttctgg

SEQ ID NO: 1791020 - DNA, 25 bp, Homo sapien
tgaaggtaaccagctaggacttctg

SEQ ID NO: 1791021 - DNA, 25 bp, Homo sapien
gctgtgagtggatgtagaatttctc

SEQ ID NO: 1791022 - DNA, 25 bp, Homo sapien
ctgtgagtggatgtagaatttctct

SEQ ID NO: 1791023 - DNA, 25 bp, Homo sapien
tgtgagtggatgtagaatttctctg

SEQ ID NO: 1791024 - DNA, 25 bp, Homo sapien
cctggagatctcccaggagggattc

SEQ ID NO: 1791025 - DNA, 25 bp, Homo sapien
cctggtgttggcctccacatcaaga

SEQ ID NO: 1791026 - DNA, 25 bp, Homo sapien
cacgcagctgccattagtccttggg

SEQ ID NO: 1791027 - DNA, 25 bp, Homo sapien
ggatctaccagacaactccagctct

SEQ ID NO: 1791028 - DNA, 25 bp, Homo sapien
tatcctggaccatcgtgatggcctg

SEQ ID NO: 1791029 - DNA, 25 bp, Homo sapien
tctcgtccaattcggagcacagctc

SEQ ID NO: 1791030 - DNA, 25 bp, Homo sapien
cattttgctgatctgatggaaggtc

SEQ ID NO: 1791031 - DNA, 25 bp, Homo sapien
gatggaaggtctcgtccaattcgga

SEQ ID NO: 1791032 - DNA, 25 bp, Homo sapien
ctgtggttcacctccatctctggct

SEQ ID NO: 1791033 - DNA, 25 bp, Homo sapien
gcctccataattaaaggcttcatca

SEQ ID NO: 1791034 - DNA, 25 bp, Homo sapien
tctccttcagggtgcgtggtgtccc

SEQ ID NO: 1791035 - DNA, 25 bp, Homo sapien
gctgcctccttgacatacttgatga

SEQ ID NO: 1791036 - DNA, 25 bp, Homo sapien
ccggacggcctccaagtgaaagtag

SEQ ID NO: 1791037 - DNA, 25 bp, Homo sapien
aggtcagtgtggtcgccccacaggt

SEQ ID NO: 1791038 - DNA, 25 bp, Homo sapien
tggccgtgcgcctcctttgacctct

SEQ ID NO: 1791039 - DNA, 25 bp, Homo sapien
gggaagctggccgtgcgcctccttt

SEQ ID NO: 1791040 - DNA, 25 bp, Homo sapien
ctggccgtgcgcctcctttgacctc

SEQ ID NO: 1791041 - DNA, 25 bp, Homo sapien
aagctggccgtgcgcctcctttgac

SEQ ID NO: 1791042 - DNA, 25 bp, Homo sapien
ggtagccagcgagtcccaaccgagc

SEQ ID NO: 1791043 - DNA, 25 bp, Homo sapien
cacccgggtagccagcgagtcccaa

SEQ ID NO: 1791044 - DNA, 25 bp, Homo sapien
ccgggtagccagcgagtcccaaccg

SEQ ID NO: 1791045 - DNA, 25 bp, Homo sapien
agcgagtcccaaccgagcacctgct

SEQ ID NO: 1791046 - DNA, 25 bp, Homo sapien
cagtgtcgatgtagctagtgttgaa

SEQ ID NO: 1791047 - DNA, 25 bp, Homo sapien
ccagagctcagtgttcaaggcatct

SEQ ID NO: 1791048 - DNA, 25 bp, Homo sapien
gcagtccaagctgcactcggaggcg

SEQ ID NO: 1791049 - DNA, 25 bp, Homo sapien
ccagatttaggctgacactgctgtc

SEQ ID NO: 1791050 - DNA, 25 bp, Homo sapien
gagccctccaaacaccaggtgcctg

SEQ ID NO: 1791051 - DNA, 25 bp, Homo sapien
atggagccctccaaacaccaggtgc

SEQ ID NO: 1791052 - DNA, 25 bp, Homo sapien
ccctccaaacaccaggtgcctggtt

SEQ ID NO: 1791053 - DNA, 25 bp, Homo sapien
ggctgctgtgcttcccgcccagggt

SEQ ID NO: 1791054 - DNA, 25 bp, Homo sapien
tgcagtgcctcgctggtttctgttt

SEQ ID NO: 1791055 - DNA, 25 bp, Homo sapien
tgcctgggttaactccaaccacact

SEQ ID NO: 1791056 - DNA, 25 bp, Homo sapien
cagtgcctcgctggtttctgtttgt

SEQ ID NO: 1791057 - DNA, 25 bp, Homo sapien
ccaatgcctgggttaactccaacca

SEQ ID NO: 1791058 - DNA, 25 bp, Homo sapien
gcccctgagccatagggacctggag

SEQ ID NO: 1791059 - DNA, 25 bp, Homo sapien
agccagagagtgcttcaaggactgc

SEQ ID NO: 1791060 - DNA, 25 bp, Homo sapien
caaggactgcatgaagctctggaga

SEQ ID NO: 1791061 - DNA, 25 bp, Homo sapien
catagagaccaggaggagctgttca

SEQ ID NO: 1791062 - DNA, 25 bp, Homo sapien
tcctcagatgccaagtagaatgaag

SEQ ID NO: 1791063 - DNA, 25 bp, Homo sapien
tccctctgcatggaactctcctcag

SEQ ID NO: 1791064 - DNA, 25 bp, Homo sapien
tggccatggctttaggttgagctgt

SEQ ID NO: 1791065 - DNA, 25 bp, Homo sapien
ggacgatgatgaggcttcaggagct

SEQ ID NO: 1791066 - DNA, 25 bp, Homo sapien
acagcttgggatccacagtcaaggg

SEQ ID NO: 1791067 - DNA, 25 bp, Homo sapien
gcacacagcttgggatccacagtca

SEQ ID NO: 1791068 - DNA, 25 bp, Homo sapien
cacagcttgggatccacagtcaagg

SEQ ID NO: 1791069 - DNA, 25 bp, Homo sapien
cacacagcttgggatccacagtcaa

SEQ ID NO: 1791070 - DNA, 25 bp, Homo sapien
tgctgcttaagtccatgggcaccac

SEQ ID NO: 1791071 - DNA, 25 bp, Homo sapien
acacgggggacctgagctgctgctt

SEQ ID NO: 1791072 - DNA, 25 bp, Homo sapien
ctgggctggaccaggaatgaataag

SEQ ID NO: 1791073 - DNA, 25 bp, Homo sapien
gaacagggacagtcaccttcagagc

SEQ ID NO: 1791074 - DNA, 25 bp, Homo sapien
aataggaaggtcatctcaccccgca

SEQ ID NO: 1791075 - DNA, 25 bp, Homo sapien
ccgcaagacgtctagaggcaaggcc

SEQ ID NO: 1791076 - DNA, 25 bp, Homo sapien
gacacggcagtggatcttggcagct

SEQ ID NO: 1791077 - DNA, 25 bp, Homo sapien
tgtcttgtgagcagaaagccgaagg

SEQ ID NO: 1791078 - DNA, 25 bp, Homo sapien
gggatccctagtgcagcccggcagt

SEQ ID NO: 1791079 - DNA, 25 bp, Homo sapien
aggcttctggaaggacccgtgcgat

SEQ ID NO: 1791080 - DNA, 25 bp, Homo sapien
gctgcagagggcgacgtggagcggg

SEQ ID NO: 1791081 - DNA, 25 bp, Homo sapien
ccagaggctacttatcctccgaggg

SEQ ID NO: 1791082 - DNA, 25 bp, Homo sapien
actgggcttggatctgcgcacagga

SEQ ID NO: 1791083 - DNA, 25 bp, Homo sapien
ctagcccaggctataaccacgtcca

SEQ ID NO: 1791084 - DNA, 25 bp, Homo sapien
tataaccacgtccactcgggatttg

SEQ ID NO: 1791085 - DNA, 25 bp, Homo sapien
tccactcgggatttgggatgaggcc

SEQ ID NO: 1791086 - DNA, 25 bp, Homo sapien
caattgtttagtgtacaatatcttc

SEQ ID NO: 1791087 - DNA, 25 bp, Homo sapien
tgtaataaaatctagccccgggcca

SEQ ID NO: 1791088 - DNA, 25 bp, Homo sapien
cttctgtaataaaatctagccccgg

SEQ ID NO: 1791089 - DNA, 25 bp, Homo sapien
accaattgtttagtgtacaatatct

SEQ ID NO: 1791090 - DNA, 25 bp, Homo sapien
ttcgtcccgaggctctggatctgga

SEQ ID NO: 1791091 - DNA, 25 bp, Homo sapien
aggaaccgcctgtcccttgccgcga

SEQ ID NO: 1791092 - DNA, 25 bp, Homo sapien
cttcctgaaacagtttcgtcccgag

SEQ ID NO: 1791093 - DNA, 25 bp, Homo sapien
cggcgagtccttccgggtcttcctg

SEQ ID NO: 1791094 - DNA, 25 bp, Homo sapien
gatgaaggaggaaccccgtgctcct

SEQ ID NO: 1791095 - DNA, 25 bp, Homo sapien
caaagtccccgcgaggatgaaggag

SEQ ID NO: 1791096 - DNA, 25 bp, Homo sapien
cctccacactgagccggtggcaaag

SEQ ID NO: 1791097 - DNA, 25 bp, Homo sapien
ctcaggacctagtgctgcccgggcg

SEQ ID NO: 1791098 - DNA, 25 bp, Homo sapien
cttgtgtggtagagagtgtgtggga

SEQ ID NO: 1791099 - DNA, 25 bp, Homo sapien
aactaaaggatgtgacttgggtggt

SEQ ID NO: 1791100 - DNA, 25 bp, Homo sapien
tgttggcggaaagttgacaagcaac

SEQ ID NO: 1791101 - DNA, 25 bp, Homo sapien
gaactatgaaccactgctcaactaa

SEQ ID NO: 1791102 - DNA, 25 bp, Homo sapien
gaggtctccaaccacggtaccgcca

SEQ ID NO: 1791103 - DNA, 25 bp, Homo sapien
ttggaaaaactctgtgggcacccag

SEQ ID NO: 1791104 - DNA, 25 bp, Homo sapien
cccaggtgactacacatatttccaa

SEQ ID NO: 1791105 - DNA, 25 bp, Homo sapien
gtaccgccaccttcaggcctctggg

SEQ ID NO: 1791106 - DNA, 25 bp, Homo sapien
tcagagaagtatccacagcacagct

SEQ ID NO: 1791107 - DNA, 25 bp, Homo sapien
tccccaccacctgaatcatctgtca

SEQ ID NO: 1791108 - DNA, 25 bp, Homo sapien
gatgcaatgcacctgctcattacgt

SEQ ID NO: 1791109 - DNA, 25 bp, Homo sapien
gtcactttcctacacctgatgcaat

SEQ ID NO: 1791110 - DNA, 25 bp, Homo sapien
ggagtccttcctgtttagcctgttg

SEQ ID NO: 1791111 - DNA, 25 bp, Homo sapien
tagcctgttgaggacctggagactc

SEQ ID NO: 1791112 - DNA, 25 bp, Homo sapien
ctgttgaggacctggagactccctt

SEQ ID NO: 1791113 - DNA, 25 bp, Homo sapien
gagtccttcctgtttagcctgttga

SEQ ID NO: 1791114 - DNA, 25 bp, Homo sapien
gatgaagcagcgtcctgtgggtttt

SEQ ID NO: 1791115 - DNA, 25 bp, Homo sapien
tcctggtatccttggctctgggatg

SEQ ID NO: 1791116 - DNA, 25 bp, Homo sapien
tgggatgaagcagcgtcctgtgggt

SEQ ID NO: 1791117 - DNA, 25 bp, Homo sapien
ctctgggatgaagcagcgtcctgtg

SEQ ID NO: 1791118 - DNA, 25 bp, Homo sapien
tttctgaagccatcaagcagtatgt

SEQ ID NO: 1791119 - DNA, 25 bp, Homo sapien
gatttctgaagccatcaagcagtat

SEQ ID NO: 1791120 - DNA, 25 bp, Homo sapien
tctgaagccatcaagcagtatgtca

SEQ ID NO: 1791121 - DNA, 25 bp, Homo sapien
gaagccatcaagcagtatgtcactg

SEQ ID NO: 1791122 - DNA, 25 bp, Homo sapien
ttctgcttgggaagttgcatggagg

SEQ ID NO: 1791123 - DNA, 25 bp, Homo sapien
gaggtggcatttcagactgctcttg

SEQ ID NO: 1791124 - DNA, 25 bp, Homo sapien
gggaagttgcatggaggtttcttgg

SEQ ID NO: 1791125 - DNA, 25 bp, Homo sapien
gcttgggaagttgcatggaggtttc

SEQ ID NO: 1791126 - DNA, 25 bp, Homo sapien
aagagtgcaccccaccgtggatggt

SEQ ID NO: 1791127 - DNA, 25 bp, Homo sapien
gaccagccaatcttaataggaggaa

SEQ ID NO: 1791128 - DNA, 25 bp, Homo sapien
taaaccctatcgtatggcaggcact

SEQ ID NO: 1791129 - DNA, 25 bp, Homo sapien
gaaacaaacatctacgtggctgctg

SEQ ID NO: 1791130 - DNA, 25 bp, Homo sapien
catgttacttgccatggctgatctc

SEQ ID NO: 1791131 - DNA, 25 bp, Homo sapien
tgttacttgccatggctgatctcca

SEQ ID NO: 1791132 - DNA, 25 bp, Homo sapien
gggtcccacaattcttctgtcaatt

SEQ ID NO: 1791133 - DNA, 25 bp, Homo sapien
tacttgccatggctgatctccaact

SEQ ID NO: 1791134 - DNA, 25 bp, Homo sapien
gcgcccatggcgcactaggtcctga

SEQ ID NO: 1791135 - DNA, 25 bp, Homo sapien
gtgtggagacgtcacagtcccgctc

SEQ ID NO: 1791136 - DNA, 25 bp, Homo sapien
cgacaaggaaccgtggcaggagaca

SEQ ID NO: 1791137 - DNA, 25 bp, Homo sapien
cctgagtgcccaggatccaacaggg

SEQ ID NO: 1791138 - DNA, 25 bp, Homo sapien
gatgactttcggagacagttcgcat

SEQ ID NO: 1791139 - DNA, 25 bp, Homo sapien
tcgcatatgcggtttcagttttcac

SEQ ID NO: 1791140 - DNA, 25 bp, Homo sapien
gatttcaaccgcagatgactttcgg

SEQ ID NO: 1791141 - DNA, 25 bp, Homo sapien
tataggtgatttctgatttcaaccg

SEQ ID NO: 1791142 - DNA, 25 bp, Homo sapien
aaagcctccctatgtacgggcgcgc

SEQ ID NO: 1791143 - DNA, 25 bp, Homo sapien
gcctggaagatgaatcacctcaagg

SEQ ID NO: 1791144 - DNA, 25 bp, Homo sapien
gagcctggaagatgaatcacctcaa

SEQ ID NO: 1791145 - DNA, 25 bp, Homo sapien
ttaaagcctccctatgtacgggcgc

SEQ ID NO: 1791146 - DNA, 25 bp, Homo sapien
agaaggatcttggtagcggcggctg

SEQ ID NO: 1791147 - DNA, 25 bp, Homo sapien
cagaaggatcttggtagcggcggct

SEQ ID NO: 1791148 - DNA, 25 bp, Homo sapien
gaaggatcttggtagcggcggctgc

SEQ ID NO: 1791149 - DNA, 25 bp, Homo sapien
gagtgtctacaggaaagtgcaggga

SEQ ID NO: 1791150 - DNA, 25 bp, Homo sapien
gtctgtgatcgcgtccctgtggaat

SEQ ID NO: 1791151 - DNA, 25 bp, Homo sapien
cagggaaaaattcaagggcacgcag

SEQ ID NO: 1791152 - DNA, 25 bp, Homo sapien
cgctggagggtttgtgtggtggaga

SEQ ID NO: 1791153 - DNA, 25 bp, Homo sapien
ctctgtaagtatgtccaccacctct

SEQ ID NO: 1791154 - DNA, 25 bp, Homo sapien
tctgtaagtatgtccaccacctctc

SEQ ID NO: 1791155 - DNA, 25 bp, Homo sapien
gaaccgcacaccaccgtggtccagg

SEQ ID NO: 1791156 - DNA, 25 bp, Homo sapien
cacctggccttgaaccgcacaccac

SEQ ID NO: 1791157 - DNA, 25 bp, Homo sapien
tggctccaggatgaaccgttgtcca

SEQ ID NO: 1791158 - DNA, 25 bp, Homo sapien
caggatgaaccgttgtccacattct

SEQ ID NO: 1791159 - DNA, 25 bp, Homo sapien
ccaggatgaaccgttgtccacattc

SEQ ID NO: 1791160 - DNA, 25 bp, Homo sapien
gctccaggatgaaccgttgtccaca

SEQ ID NO: 1791161 - DNA, 25 bp, Homo sapien
ctgtggccctgagttgggttgtgcc

SEQ ID NO: 1791162 - DNA, 25 bp, Homo sapien
tgtggccctgagttgggttgtgcct

SEQ ID NO: 1791163 - DNA, 25 bp, Homo sapien
tgttccaccttatcaattccttgtc

SEQ ID NO: 1791164 - DNA, 25 bp, Homo sapien
gggagcagcacccattgctctgaag

SEQ ID NO: 1791165 - DNA, 25 bp, Homo sapien
atcaattccttgtccagcccagtgg

SEQ ID NO: 1791166 - DNA, 25 bp, Homo sapien
cttatcaattccttgtccagcccag

SEQ ID NO: 1791167 - DNA, 25 bp, Homo sapien
aaggccctctctatgatctgatgtg

SEQ ID NO: 1791168 - DNA, 25 bp, Homo sapien
cctctctatgatctgatgtgaaggc

SEQ ID NO: 1791169 - DNA, 25 bp, Homo sapien
gtagtgatgggtccgcgccctcact

SEQ ID NO: 1791170 - DNA, 25 bp, Homo sapien
gctggtagtgatgggtccgcgccct

SEQ ID NO: 1791171 - DNA, 25 bp, Homo sapien
gatcaagaccgtgctcacaggagcc

SEQ ID NO: 1791172 - DNA, 25 bp, Homo sapien
agacagaagggcgagtttgatcaag

SEQ ID NO: 1791173 - DNA, 25 bp, Homo sapien
gctcacaggagccttttggtatcag

SEQ ID NO: 1791174 - DNA, 25 bp, Homo sapien
caggagccttttggtatcagcttta

SEQ ID NO: 1791175 - DNA, 25 bp, Homo sapien
cagtgaatgagctattgggtccatg

SEQ ID NO: 1791176 - DNA, 25 bp, Homo sapien
caatatcatttgcaagaaagagatc

SEQ ID NO: 1791177 - DNA, 25 bp, Homo sapien
cataatatgttaggtataactgctg

SEQ ID NO: 1791178 - DNA, 25 bp, Homo sapien
caggacacggaaagaatccccagag

SEQ ID NO: 1791179 - DNA, 25 bp, Homo sapien
taacgtgattattttactgacaata

SEQ ID NO: 1791180 - DNA, 25 bp, Homo sapien
ggtagaaatgatcctgcctatatat

SEQ ID NO: 1791181 - DNA, 25 bp, Homo sapien
gatatggtcatttgggtcccacaag

SEQ ID NO: 1791182 - DNA, 25 bp, Homo sapien
cactactggcccaaaaagttatggc

SEQ ID NO: 1791183 - DNA, 25 bp, Homo sapien
acaagtaaagcacccactgtgatct

SEQ ID NO: 1791184 - DNA, 25 bp, Homo sapien
cccttggttcccgtgtcagaaggat

SEQ ID NO: 1791185 - DNA, 25 bp, Homo sapien
cggcctttcgaagacctgggatgac

SEQ ID NO: 1791186 - DNA, 25 bp, Homo sapien
tgggatgactcgctggtcgcggcaa

SEQ ID NO: 1791187 - DNA, 25 bp, Homo sapien
tgtcagaaggatcaaggaaatgcgg

SEQ ID NO: 1791188 - DNA, 25 bp, Homo sapien
ttggcgggtgatgaccaatatctgc

SEQ ID NO: 1791189 - DNA, 25 bp, Homo sapien
ctgggaccatgtgtaaggcagtgta

SEQ ID NO: 1791190 - DNA, 25 bp, Homo sapien
ccatgtgtaaggcagtgtagaatct

SEQ ID NO: 1791191 - DNA, 25 bp, Homo sapien
tgtagaatcttggcgggtgatgacc

SEQ ID NO: 1791192 - DNA, 25 bp, Homo sapien
ttcactgaaacgtgactgcattcca

SEQ ID NO: 1791193 - DNA, 25 bp, Homo sapien
aggttcttcactgaaacgtgactgc

SEQ ID NO: 1791194 - DNA, 25 bp, Homo sapien
gctcccaaaattggctccccatctt

SEQ ID NO: 1791195 - DNA, 25 bp, Homo sapien
catgctcccaaaattggctccccat

SEQ ID NO: 1791196 - DNA, 25 bp, Homo sapien
atgctcccaaaattggctccccatc

SEQ ID NO: 1791197 - DNA, 25 bp, Homo sapien
tgctcccaaaattggctccccatct

SEQ ID NO: 1791198 - DNA, 25 bp, Homo sapien
gacaactaacggctgtcttagcctg

SEQ ID NO: 1791199 - DNA, 25 bp, Homo sapien
taacggctgtcttagcctgcttgtt

SEQ ID NO: 1791200 - DNA, 25 bp, Homo sapien
tgatgataggacaactaacggctgt

SEQ ID NO: 1791201 - DNA, 25 bp, Homo sapien
tagaaaagactgatgataggacaac

SEQ ID NO: 1791202 - DNA, 25 bp, Homo sapien
tgaatatttctgatacaccatggtg

SEQ ID NO: 1791203 - DNA, 25 bp, Homo sapien
cctgtaccttttctagaacgatatg

SEQ ID NO: 1791204 - DNA, 25 bp, Homo sapien
tttctgatacaccatggtgggcagg

SEQ ID NO: 1791205 - DNA, 25 bp, Homo sapien
tcctgtaccttttctagaacgatat

SEQ ID NO: 1791206 - DNA, 25 bp, Homo sapien
cgtggacaggaggcgctgatggttc

SEQ ID NO: 1791207 - DNA, 25 bp, Homo sapien
tggagctccgtggacaggaggcgct

SEQ ID NO: 1791208 - DNA, 25 bp, Homo sapien
tgtagacctggagctccgtggacag

SEQ ID NO: 1791209 - DNA, 25 bp, Homo sapien
tggacaggaggcgctgatggttccc

SEQ ID NO: 1791210 - DNA, 25 bp, Homo sapien
gcacagaaggaacgcggggctggcg

SEQ ID NO: 1791211 - DNA, 25 bp, Homo sapien
gaagcgggaggcacagaaggaacgc

SEQ ID NO: 1791212 - DNA, 25 bp, Homo sapien
tgcagaagcgggaggcacagaagga

SEQ ID NO: 1791213 - DNA, 25 bp, Homo sapien
atcctgcccgggaccagccagacag

SEQ ID NO: 1791214 - DNA, 25 bp, Homo sapien
cgcgacgttcggagggaccgcgacg

SEQ ID NO: 1791215 - DNA, 25 bp, Homo sapien
ttcggggagaccgcgatgttcgttc

SEQ ID NO: 1791216 - DNA, 25 bp, Homo sapien
gatgttcgttcagggagatcgcgcc

SEQ ID NO: 1791217 - DNA, 25 bp, Homo sapien
agaccgcgatgttcgttcagggaga

SEQ ID NO: 1791218 - DNA, 25 bp, Homo sapien
cgttgctcggagagagggcgatgtt

SEQ ID NO: 1791219 - DNA, 25 bp, Homo sapien
gggcgatgttcggagaggccgcgat

SEQ ID NO: 1791220 - DNA, 25 bp, Homo sapien
tcgcgatgttcggtgagatggcaat

SEQ ID NO: 1791221 - DNA, 25 bp, Homo sapien
tcagccgggcatgttcggcgagatc

SEQ ID NO: 1791222 - DNA, 25 bp, Homo sapien
ctgcggggcaagcagcagccgcagg

SEQ ID NO: 1791223 - DNA, 25 bp, Homo sapien
caagcagcagccgcaggaatcagac

SEQ ID NO: 1791224 - DNA, 25 bp, Homo sapien
ggggcaagcagcagccgcaggaatc

SEQ ID NO: 1791225 - DNA, 25 bp, Homo sapien
ggcaagcagcagccgcaggaatcag

SEQ ID NO: 1791226 - DNA, 25 bp, Homo sapien
tgttcgggggcatcgcgccggtgct

SEQ ID NO: 1791227 - DNA, 25 bp, Homo sapien
tgttcggagggatcgcgatgttggg

SEQ ID NO: 1791228 - DNA, 25 bp, Homo sapien
tgttggggtagaacgcgatgttcgg

SEQ ID NO: 1791229 - DNA, 25 bp, Homo sapien
ttcgggggggatcacgatgttcgga

SEQ ID NO: 1791230 - DNA, 25 bp, Homo sapien
gggagatcgcgctggtccacccaga

SEQ ID NO: 1791231 - DNA, 25 bp, Homo sapien
gatattcggggagatcgcgctggtc

SEQ ID NO: 1791232 - DNA, 25 bp, Homo sapien
gcgatattcggggagatcgcgctgg

SEQ ID NO: 1791233 - DNA, 25 bp, Homo sapien
agatcgcgctggtccacccagaagc

SEQ ID NO: 1791234 - DNA, 25 bp, Homo sapien
tgacactccccctggactgcggtgc

SEQ ID NO: 1791235 - DNA, 25 bp, Homo sapien
aggccttgaacttcacaccactgtg

SEQ ID NO: 1791236 - DNA, 25 bp, Homo sapien
aaggaaatccaccacgtctcttagt

SEQ ID NO: 1791237 - DNA, 25 bp, Homo sapien
tgtcaagcagttgccctttaaggaa

SEQ ID NO: 1791238 - DNA, 25 bp, Homo sapien
caccactgtggttcaggtctggact

SEQ ID NO: 1791239 - DNA, 25 bp, Homo sapien
acatcttacaatcccccagtgaaat

SEQ ID NO: 1791240 - DNA, 25 bp, Homo sapien
cacatcttacaatcccccagtgaaa

SEQ ID NO: 1791241 - DNA, 25 bp, Homo sapien
ttcttcaagccacatcttacaatcc

SEQ ID NO: 1791242 - DNA, 25 bp, Homo sapien
aaaattcttcaagccacatcttaca

SEQ ID NO: 1791243 - DNA, 25 bp, Homo sapien
tcatctgccagctagaatgaagcag

SEQ ID NO: 1791244 - DNA, 25 bp, Homo sapien
cagaggaagatgatgagaaggctcc

SEQ ID NO: 1791245 - DNA, 25 bp, Homo sapien
ggaagatgatgagaaggctccaggg

SEQ ID NO: 1791246 - DNA, 25 bp, Homo sapien
gccatggccttgggttgggttgtgc

SEQ ID NO: 1791247 - DNA, 25 bp, Homo sapien
tagttttccccattctacaggctgt

SEQ ID NO: 1791248 - DNA, 25 bp, Homo sapien
tcgagaccaagatttgaagaccatc

SEQ ID NO: 1791249 - DNA, 25 bp, Homo sapien
catcgcccagacagtaagcatgata

SEQ ID NO: 1791250 - DNA, 25 bp, Homo sapien
caaggtggtagcattgctcgagacc

SEQ ID NO: 1791251 - DNA, 25 bp, Homo sapien
ctggtggagaaacgcagttgtctga

SEQ ID NO: 1791252 - DNA, 25 bp, Homo sapien
ccaaagctgaatgcaactcttgggc

SEQ ID NO: 1791253 - DNA, 25 bp, Homo sapien
tagagtactcgagctgttaggttcc

SEQ ID NO: 1791254 - DNA, 25 bp, Homo sapien
ggttcctctgcaatgccaagaccac

SEQ ID NO: 1791255 - DNA, 25 bp, Homo sapien
ctgaacttaggagtgacgatgaagt

SEQ ID NO: 1791256 - DNA, 25 bp, Homo sapien
ttaggagtgacgatgaagtcatagc

SEQ ID NO: 1791257 - DNA, 25 bp, Homo sapien
gatgaagtcatagcaaaggcagtgt

SEQ ID NO: 1791258 - DNA, 25 bp, Homo sapien
tgacgatgaagtcatagcaaaggca

SEQ ID NO: 1791259 - DNA, 25 bp, Homo sapien
aaaaggccttttatccacctgatct

SEQ ID NO: 1791260 - DNA, 25 bp, Homo sapien
ggccttttatccacctgatcttgaa

SEQ ID NO: 1791261 - DNA, 25 bp, Homo sapien
aaggccttttatccacctgatcttg

SEQ ID NO: 1791262 - DNA, 25 bp, Homo sapien
agaaaaggccttttatccacctgat

SEQ ID NO: 1791263 - DNA, 25 bp, Homo sapien
tctccactcgaacgtcaggcagttg

SEQ ID NO: 1791264 - DNA, 25 bp, Homo sapien
aattctccactcgaacgtcaggcag

SEQ ID NO: 1791265 - DNA, 25 bp, Homo sapien
tcaattctccactcgaacgtcaggc

SEQ ID NO: 1791266 - DNA, 25 bp, Homo sapien
ttctccactcgaacgtcaggcagtt

SEQ ID NO: 1791267 - DNA, 25 bp, Homo sapien
tgtcggagtggataaggggccgcat

SEQ ID NO: 1791268 - DNA, 25 bp, Homo sapien
cttgtcggagtggataaggggccgc

SEQ ID NO: 1791269 - DNA, 25 bp, Homo sapien
ttgtcggagtggataaggggccgca

SEQ ID NO: 1791270 - DNA, 25 bp, Homo sapien
tccagttgcaaatggtgctgttcca

SEQ ID NO: 1791271 - DNA, 25 bp, Homo sapien
gcctcatccttgaaagcctcataaa

SEQ ID NO: 1791272 - DNA, 25 bp, Homo sapien
ctacaccaagctggattaagatgct

SEQ ID NO: 1791273 - DNA, 25 bp, Homo sapien
ttaaactagccagactgtctacacc

SEQ ID NO: 1791274 - DNA, 25 bp, Homo sapien
agccaagtttccgtctcccagtgaa

SEQ ID NO: 1791275 - DNA, 25 bp, Homo sapien
tcaagaattcctcaagccaagtttc

SEQ ID NO: 1791276 - DNA, 25 bp, Homo sapien
tttttcccagtgtatcaagaattcc

SEQ ID NO: 1791277 - DNA, 25 bp, Homo sapien
gtttccgtctcccagtgaaatcttc

SEQ ID NO: 1791278 - DNA, 25 bp, Homo sapien
aggagaacccggatcacttttccag

SEQ ID NO: 1791279 - DNA, 25 bp, Homo sapien
catcttcagccttcagaaaggatac

SEQ ID NO: 1791280 - DNA, 25 bp, Homo sapien
caaatgttggtttaaatggtgaagg

SEQ ID NO: 1791281 - DNA, 25 bp, Homo sapien
tggaaactcagtgacacccgcagtt

SEQ ID NO: 1791282 - DNA, 25 bp, Homo sapien
cctcttataaacgagaacctgcaga

SEQ ID NO: 1791283 - DNA, 25 bp, Homo sapien
tcccctgtctagtgatctccagtgt

SEQ ID NO: 1791284 - DNA, 25 bp, Homo sapien
tctgttaagtcacctaggataatgg

SEQ ID NO: 1791285 - DNA, 25 bp, Homo sapien
cagtaaaagcggtacccagtgggtg

SEQ ID NO: 1791286 - DNA, 25 bp, Homo sapien
gaatgtagctcttgtgccttcagtg

SEQ ID NO: 1791287 - DNA, 25 bp, Homo sapien
tctcctgaggctgaatgtagctctt

SEQ ID NO: 1791288 - DNA, 25 bp, Homo sapien
tagctcttgtgccttcagtgccaag

SEQ ID NO: 1791289 - DNA, 25 bp, Homo sapien
tgcatcatcctctcctgaggctgaa

SEQ ID NO: 1791290 - DNA, 25 bp, Homo sapien
gactacctttctcaagggctctgtg

SEQ ID NO: 1791291 - DNA, 25 bp, Homo sapien
ggagctgaacttgcctgccaaagat

SEQ ID NO: 1791292 - DNA, 25 bp, Homo sapien
atgtgtccgacctgcgttcctggct

SEQ ID NO: 1791293 - DNA, 25 bp, Homo sapien
tggtccctctcaaatacccaacgga

SEQ ID NO: 1791294 - DNA, 25 bp, Homo sapien
ctcagttgagatgatgtgtagggca

SEQ ID NO: 1791295 - DNA, 25 bp, Homo sapien
ctctctgaaacgtgactgtattcca

SEQ ID NO: 1791296 - DNA, 25 bp, Homo sapien
cctcagttgagatgatgtgtagggc

SEQ ID NO: 1791297 - DNA, 25 bp, Homo sapien
tcagttgagatgatgtgtagggcag

SEQ ID NO: 1791298 - DNA, 25 bp, Homo sapien
aacacagtggcggaaacgagaccag

SEQ ID NO: 1791299 - DNA, 25 bp, Homo sapien
tctcccggcccgagaaaacacagtg

SEQ ID NO: 1791300 - DNA, 25 bp, Homo sapien
tcgcggaggacggatctttctgacc

SEQ ID NO: 1791301 - DNA, 25 bp, Homo sapien
tgtcgcgtccctgggactgcttctc

SEQ ID NO: 1791302 - DNA, 25 bp, Homo sapien
ctgagggccccacgttgattcattg

SEQ ID NO: 1791303 - DNA, 25 bp, Homo sapien
gttgattcattgcattctggctctg

SEQ ID NO: 1791304 - DNA, 25 bp, Homo sapien
ggtgtcctcggcattccgtcgccag

SEQ ID NO: 1791305 - DNA, 25 bp, Homo sapien
tgtcctcggcattccgtcgccaggt

SEQ ID NO: 1791306 - DNA, 25 bp, Homo sapien
gggtgaccaaagccccacacggctc

SEQ ID NO: 1791307 - DNA, 25 bp, Homo sapien
tcagcgggaagctccgcagtttccc

SEQ ID NO: 1791308 - DNA, 25 bp, Homo sapien
ccacacggctcagcgggaagctccg

SEQ ID NO: 1791309 - DNA, 25 bp, Homo sapien
acggctcagcgggaagctccgcagt

SEQ ID NO: 1791310 - DNA, 25 bp, Homo sapien
ctgaggcgcgcaagagacaaaaatg

SEQ ID NO: 1791311 - DNA, 25 bp, Homo sapien
aatgactttagagcgactccgaccc

SEQ ID NO: 1791312 - DNA, 25 bp, Homo sapien
gaaacgtcaggacttttctccgcgc

SEQ ID NO: 1791313 - DNA, 25 bp, Homo sapien
ttaagacaataaagaagcagcgctc

SEQ ID NO: 1791314 - DNA, 25 bp, Homo sapien
gcggaactgaaacccctcgcaatga

SEQ ID NO: 1791315 - DNA, 25 bp, Homo sapien
tcgcaatgaactttgaggaaaggct

SEQ ID NO: 1791316 - DNA, 25 bp, Homo sapien
tcaagctcggagataataactgtcc

SEQ ID NO: 1791317 - DNA, 25 bp, Homo sapien
gagttctcacgcgtcttccaaaggc

SEQ ID NO: 1791318 - DNA, 25 bp, Homo sapien
tacagtgctactctcaccagcaagg

SEQ ID NO: 1791319 - DNA, 25 bp, Homo sapien
tagtgggaaagcaaacttgttcagc

SEQ ID NO: 1791320 - DNA, 25 bp, Homo sapien
cactactcgggatatatccacagga

SEQ ID NO: 1791321 - DNA, 25 bp, Homo sapien
aatgggcaaagacatgagcagacac

SEQ ID NO: 1791322 - DNA, 25 bp, Homo sapien
gtgtgtgagaagagcctcccatgca

SEQ ID NO: 1791323 - DNA, 25 bp, Homo sapien
tggtgggtcccgggatctgtgtgtg

SEQ ID NO: 1791324 - DNA, 25 bp, Homo sapien
gggtcccgggatctgtgtgtgagaa

SEQ ID NO: 1791325 - DNA, 25 bp, Homo sapien
tgtgtgagaagagcctcccatgcat

SEQ ID NO: 1791326 - DNA, 25 bp, Homo sapien
taggagcctagaaggttctcgcctg

SEQ ID NO: 1791327 - DNA, 25 bp, Homo sapien
tgactgtgcagggacataggagcct

SEQ ID NO: 1791328 - DNA, 25 bp, Homo sapien
tctcgcctgatgcactagagcctct

SEQ ID NO: 1791329 - DNA, 25 bp, Homo sapien
tctgtccaggagaggccacatgaag

SEQ ID NO: 1791330 - DNA, 25 bp, Homo sapien
catgtggggatcaccttcacctggt

SEQ ID NO: 1791331 - DNA, 25 bp, Homo sapien
atcaccttcacctggtggccatcaa

SEQ ID NO: 1791332 - DNA, 25 bp, Homo sapien
ctggtggccatcaatccctagggcc

SEQ ID NO: 1791333 - DNA, 25 bp, Homo sapien
gccatcaatccctagggccctgaag

SEQ ID NO: 1791334 - DNA, 25 bp, Homo sapien
aggcagcttctcctgccccctcctc

SEQ ID NO: 1791335 - DNA, 25 bp, Homo sapien
ccctcctcctctgcaggcagccccc

SEQ ID NO: 1791336 - DNA, 25 bp, Homo sapien
ctcctcctctgcaggcagcccccag

SEQ ID NO: 1791337 - DNA, 25 bp, Homo sapien
tcaggcagcttctcctgccccctcc

SEQ ID NO: 1791338 - DNA, 25 bp, Homo sapien
ccaacatgttagtgaggattgcaga

SEQ ID NO: 1791339 - DNA, 25 bp, Homo sapien
gtaggaaatgcccacatatatcagc

SEQ ID NO: 1791340 - DNA, 25 bp, Homo sapien
ttcttagaacaattgctgaacccgg

SEQ ID NO: 1791341 - DNA, 25 bp, Homo sapien
aaatatacagatctaccactgggac

SEQ ID NO: 1791342 - DNA, 25 bp, Homo sapien
tacaactagggatgctgctagatat

SEQ ID NO: 1791343 - DNA, 25 bp, Homo sapien
agtctatttacaagcagcctggctg

SEQ ID NO: 1791344 - DNA, 25 bp, Homo sapien
tgaccacgctcacttctagtagaag

SEQ ID NO: 1791345 - DNA, 25 bp, Homo sapien
tggtttataacccagtagagaatta

SEQ ID NO: 1791346 - DNA, 25 bp, Homo sapien
ccttggacccatgggagtccttgct

SEQ ID NO: 1791347 - DNA, 25 bp, Homo sapien
cccagagaaagcagctcgggtccca

SEQ ID NO: 1791348 - DNA, 25 bp, Homo sapien
tcccagcagttaaggtggaaggtga

SEQ ID NO: 1791349 - DNA, 25 bp, Homo sapien
tgagatttaggaaaaggccaggccc

SEQ ID NO: 1791350 - DNA, 25 bp, Homo sapien
cagagcaggttcctattcgggaagg

SEQ ID NO: 1791351 - DNA, 25 bp, Homo sapien
tgttgagcttgagagagtttagcca

SEQ ID NO: 1791352 - DNA, 25 bp, Homo sapien
tgagagagtttagccatttcaggcc

SEQ ID NO: 1791353 - DNA, 25 bp, Homo sapien
ttcaggcctgtttcagagcaggttc

SEQ ID NO: 1791354 - DNA, 25 bp, Homo sapien
ctgggtccggagctcgggcgaagcg

SEQ ID NO: 1791355 - DNA, 25 bp, Homo sapien
catcccaggtcttcgaaaggccgtt

SEQ ID NO: 1791356 - DNA, 25 bp, Homo sapien
gatccttctgacacgggaaccaagg

SEQ ID NO: 1791357 - DNA, 25 bp, Homo sapien
ccagcgagtcatcccaggtcttcga

SEQ ID NO: 1791358 - DNA, 25 bp, Homo sapien
gtcggagccccacagattcgagtgg

SEQ ID NO: 1791359 - DNA, 25 bp, Homo sapien
gcgccctcctgtagcggccccaggg

SEQ ID NO: 1791360 - DNA, 25 bp, Homo sapien
cccacagattcgagtgggacggtga

SEQ ID NO: 1791361 - DNA, 25 bp, Homo sapien
gagccccacagattcgagtgggacg

SEQ ID NO: 1791362 - DNA, 25 bp, Homo sapien
ggtccccagcccagcgtagaaacca

SEQ ID NO: 1791363 - DNA, 25 bp, Homo sapien
ttttctccgccccacgacatgcatg

SEQ ID NO: 1791364 - DNA, 25 bp, Homo sapien
acgacatgcatgctccgggtcccca

SEQ ID NO: 1791365 - DNA, 25 bp, Homo sapien
cagcccagcgtagaaaccaggagcc

SEQ ID NO: 1791366 - DNA, 25 bp, Homo sapien
ggaagaggaatccataaagagttca

SEQ ID NO: 1791367 - DNA, 25 bp, Homo sapien
aagaggaatccataaagagttcatt

SEQ ID NO: 1791368 - DNA, 25 bp, Homo sapien
gaagaggaatccataaagagttcat

SEQ ID NO: 1791369 - DNA, 25 bp, Homo sapien
gaggaatccataaagagttcatttc

SEQ ID NO: 1791370 - DNA, 25 bp, Homo sapien
caaatatttcaataagcccagaggg

SEQ ID NO: 1791371 - DNA, 25 bp, Homo sapien
caacagcgagtttgtgccctgagct

SEQ ID NO: 1791372 - DNA, 25 bp, Homo sapien
cagcgagtttgtgccctgagctcct

SEQ ID NO: 1791373 - DNA, 25 bp, Homo sapien
gggtttgccaacagcgagtttgtgc

SEQ ID NO: 1791374 - DNA, 25 bp, Homo sapien
gtactttccagtcttttccagcaga

SEQ ID NO: 1791375 - DNA, 25 bp, Homo sapien
cttggactggtactttccagtcttt

SEQ ID NO: 1791376 - DNA, 25 bp, Homo sapien
ccagtcttttccagcagatggcact

SEQ ID NO: 1791377 - DNA, 25 bp, Homo sapien
tttccagtcttttccagcagatggc

SEQ ID NO: 1791378 - DNA, 25 bp, Homo sapien
gatcctgagcccagtcatagccctg

SEQ ID NO: 1791379 - DNA, 25 bp, Homo sapien
atcctgagcccagtcatagccctgc

SEQ ID NO: 1791380 - DNA, 25 bp, Homo sapien
tcctgagcccagtcatagccctgcc

SEQ ID NO: 1791381 - DNA, 25 bp, Homo sapien
ctgagcccagtcatagccctgccag

SEQ ID NO: 1791382 - DNA, 25 bp, Homo sapien
ggagagtcctttagagtgacaggta

SEQ ID NO: 1791383 - DNA, 25 bp, Homo sapien
agtagtggaggggacgcgaacaggc

SEQ ID NO: 1791384 - DNA, 25 bp, Homo sapien
ctggggaagtagtggaggggacgcg

SEQ ID NO: 1791385 - DNA, 25 bp, Homo sapien
ggaagtagtggaggggacgcgaaca

SEQ ID NO: 1791386 - DNA, 25 bp, Homo sapien
tagtggaggggacgcgaacaggccc

SEQ ID NO: 1791387 - DNA, 25 bp, Homo sapien
caagcgtgtcacaggttgagattct

SEQ ID NO: 1791388 - DNA, 25 bp, Homo sapien
gagattctagggatgaggtcctcaa

SEQ ID NO: 1791389 - DNA, 25 bp, Homo sapien
taatgagcagccttttggccagtct

SEQ ID NO: 1791390 - DNA, 25 bp, Homo sapien
caatgctgtcctcgattttaatgag

SEQ ID NO: 1791391 - DNA, 25 bp, Homo sapien
ctttcagccacgtctatccccatcc

SEQ ID NO: 1791392 - DNA, 25 bp, Homo sapien
ttcagccacgtctatccccatcctg

SEQ ID NO: 1791393 - DNA, 25 bp, Homo sapien
agccacgtctatccccatcctgggc

SEQ ID NO: 1791394 - DNA, 25 bp, Homo sapien
tggcctgaatctggtggccgagagt

SEQ ID NO: 1791395 - DNA, 25 bp, Homo sapien
cattactccttcgaggaccaacaca

SEQ ID NO: 1791396 - DNA, 25 bp, Homo sapien
ctgccattactccttcgaggaccaa

SEQ ID NO: 1791397 - DNA, 25 bp, Homo sapien
tcctcctgccattactccttcgagg

SEQ ID NO: 1791398 - DNA, 25 bp, Homo sapien
ttactccttcgaggaccaacacagt

SEQ ID NO: 1791399 - DNA, 25 bp, Homo sapien
tgtgttattgcaacagtcagagaga

SEQ ID NO: 1791400 - DNA, 25 bp, Homo sapien
cactaccgtggttcagatctgaact

SEQ ID NO: 1791401 - DNA, 25 bp, Homo sapien
tgaccttgaacctcgcactaccgtg

SEQ ID NO: 1791402 - DNA, 25 bp, Homo sapien
tttatccacctgaccttgaacctcg

SEQ ID NO: 1791403 - DNA, 25 bp, Homo sapien
ttccaggcccgtgtgacatttattt

SEQ ID NO: 1791404 - DNA, 25 bp, Homo sapien
ctttccaggcccgtgtgacatttat

SEQ ID NO: 1791405 - DNA, 25 bp, Homo sapien
tttccaggcccgtgtgacatttatt

SEQ ID NO: 1791406 - DNA, 25 bp, Homo sapien
tccaggcccgtgtgacatttatttt

SEQ ID NO: 1791407 - DNA, 25 bp, Homo sapien
tgctacaggaaatcaataattgcct

SEQ ID NO: 1791408 - DNA, 25 bp, Homo sapien
gcctctggccctctcggatttatat

SEQ ID NO: 1791409 - DNA, 25 bp, Homo sapien
tcttgctctcgctgccatatcctgt

SEQ ID NO: 1791410 - DNA, 25 bp, Homo sapien
attgcctccaacctactactgtctg

SEQ ID NO: 1791411 - DNA, 25 bp, Homo sapien
aatgccaagatccactactatgtcc

SEQ ID NO: 1791412 - DNA, 25 bp, Homo sapien
gatccactactatgtccatcacctt

SEQ ID NO: 1791413 - DNA, 25 bp, Homo sapien
atcaccttcccgctcacgagacatc

SEQ ID NO: 1791414 - DNA, 25 bp, Homo sapien
ttcccgctcacgagacatcctggcc

SEQ ID NO: 1791415 - DNA, 25 bp, Homo sapien
ggaagtccataagctagcttttgca

SEQ ID NO: 1791416 - DNA, 25 bp, Homo sapien
ggtgtacttcaacggcatctccagg

SEQ ID NO: 1791417 - DNA, 25 bp, Homo sapien
gcttttgcaatgtcccttggagacc

SEQ ID NO: 1791418 - DNA, 25 bp, Homo sapien
tgctgtcagttacctgcgagctcca

SEQ ID NO: 1791419 - DNA, 25 bp, Homo sapien
tgcctcctgcaacagctaaggccag

SEQ ID NO: 1791420 - DNA, 25 bp, Homo sapien
aaacttgccgatggactcaaacact

SEQ ID NO: 1791421 - DNA, 25 bp, Homo sapien
gatggactcaaacactttggcagcc

SEQ ID NO: 1791422 - DNA, 25 bp, Homo sapien
caggccaaacttgccgatggactca

SEQ ID NO: 1791423 - DNA, 25 bp, Homo sapien
agcatccttattatataagcctgac

SEQ ID NO: 1791424 - DNA, 25 bp, Homo sapien
ggtaatccacagaatcattcaaaga

SEQ ID NO: 1791425 - DNA, 25 bp, Homo sapien
ctggtaatccacagaatcattcaaa

SEQ ID NO: 1791426 - DNA, 25 bp, Homo sapien
gcccagcatccttattatataagcc

SEQ ID NO: 1791427 - DNA, 25 bp, Homo sapien
tgagaaagtgagtcctttccctacc

SEQ ID NO: 1791428 - DNA, 25 bp, Homo sapien
catgggatgagaaagtgagtccttt

SEQ ID NO: 1791429 - DNA, 25 bp, Homo sapien
ggatgagaaagtgagtcctttccct

SEQ ID NO: 1791430 - DNA, 25 bp, Homo sapien
atgggatgagaaagtgagtcctttc

SEQ ID NO: 1791431 - DNA, 25 bp, Homo sapien
tcttgaaggccagatgtgtccagga

SEQ ID NO: 1791432 - DNA, 25 bp, Homo sapien
tcatagtcctctccggtgatggcga

SEQ ID NO: 1791433 - DNA, 25 bp, Homo sapien
tcagtcatgatggacgtcagcacac

SEQ ID NO: 1791434 - DNA, 25 bp, Homo sapien
gaggtggccagttcgttggcaatca

SEQ ID NO: 1791435 - DNA, 25 bp, Homo sapien
ccgccccgccggcaggtaggtgatg

SEQ ID NO: 1791436 - DNA, 25 bp, Homo sapien
agctggtgcgcgatgtcctctgcag

SEQ ID NO: 1791437 - DNA, 25 bp, Homo sapien
tgatgttccgagagcctgagagctg

SEQ ID NO: 1791438 - DNA, 25 bp, Homo sapien
gcctgagagctggtgcgcgatgtcc

SEQ ID NO: 1791439 - DNA, 25 bp, Homo sapien
tggaacaccatggatgttcctgatg

SEQ ID NO: 1791440 - DNA, 25 bp, Homo sapien
tgaggttccatggatggaacaccat

SEQ ID NO: 1791441 - DNA, 25 bp, Homo sapien
ggtgaggttccatggatggaacacc

SEQ ID NO: 1791442 - DNA, 25 bp, Homo sapien
gaacaccatggatgttcctgatgtt

SEQ ID NO: 1791443 - DNA, 25 bp, Homo sapien
tgatgcccgacaactgactgtgtct

SEQ ID NO: 1791444 - DNA, 25 bp, Homo sapien
ctgatgcccgacaactgactgtgtc

SEQ ID NO: 1791445 - DNA, 25 bp, Homo sapien
tctgatgcccgacaactgactgtgt

SEQ ID NO: 1791446 - DNA, 25 bp, Homo sapien
cagctgagtcactttgcacagcctg

SEQ ID NO: 1791447 - DNA, 25 bp, Homo sapien
cttgggaggagccagtgcttctgtt

SEQ ID NO: 1791448 - DNA, 25 bp, Homo sapien
tgggaggagccagtgcttctgttta

SEQ ID NO: 1791449 - DNA, 25 bp, Homo sapien
ggaggagccagtgcttctgtttaag

SEQ ID NO: 1791450 - DNA, 25 bp, Homo sapien
gaggagccagtgcttctgtttaagt

SEQ ID NO: 1791451 - DNA, 25 bp, Homo sapien
tgaggatcgtggagctgtagacccg

SEQ ID NO: 1791452 - DNA, 25 bp, Homo sapien
aggatcgtggagctgtagacccggg

SEQ ID NO: 1791453 - DNA, 25 bp, Homo sapien
ggaggagctggttccgcagttgaag

SEQ ID NO: 1791454 - DNA, 25 bp, Homo sapien
gctggttccgcagttgaagtttgag

SEQ ID NO: 1791455 - DNA, 25 bp, Homo sapien
tgttgctgagtagcattaacggtcc

SEQ ID NO: 1791456 - DNA, 25 bp, Homo sapien
atggttcggggcctactgctcccct

SEQ ID NO: 1791457 - DNA, 25 bp, Homo sapien
tgagtagcattaacggtccccaggg

SEQ ID NO: 1791458 - DNA, 25 bp, Homo sapien
cctttgttgctgagtagcattaacg

SEQ ID NO: 1791459 - DNA, 25 bp, Homo sapien
tccttgctggccgtgagttctctgt

SEQ ID NO: 1791460 - DNA, 25 bp, Homo sapien
gccagcgtcatatagaatagtcact

SEQ ID NO: 1791461 - DNA, 25 bp, Homo sapien
ttgtagagcaacagcaggcaatggc

SEQ ID NO: 1791462 - DNA, 25 bp, Homo sapien
tcaagacatgggtgacgccagcgtc

SEQ ID NO: 1791463 - DNA, 25 bp, Homo sapien
agggtggaggggccaaaaagctgca

SEQ ID NO: 1791464 - DNA, 25 bp, Homo sapien
acgctcagttccgattcgctgctct

SEQ ID NO: 1791465 - DNA, 25 bp, Homo sapien
cagcgggtttcagaggagggaagcc

SEQ ID NO: 1791466 - DNA, 25 bp, Homo sapien
gaagccttctagaaggaccggcgcg

SEQ ID NO: 1791467 - DNA, 25 bp, Homo sapien
gctgctctttttcgccaggtccgct

SEQ ID NO: 1791468 - DNA, 25 bp, Homo sapien
tgagttcggggatggagcctaagcg

SEQ ID NO: 1791469 - DNA, 25 bp, Homo sapien
gagttcggggatggagcctaagcgg

SEQ ID NO: 1791470 - DNA, 25 bp, Homo sapien
ccggtgagttcggggatggagccta

SEQ ID NO: 1791471 - DNA, 25 bp, Homo sapien
gccggtgagttcggggatggagcct

SEQ ID NO: 1791472 - DNA, 25 bp, Homo sapien
tctgctccggactgggaagcagctg

SEQ ID NO: 1791473 - DNA, 25 bp, Homo sapien
agccgccactggatatccctgtgca

SEQ ID NO: 1791474 - DNA, 25 bp, Homo sapien
catgcttttagtggagaggcaaaga

SEQ ID NO: 1791475 - DNA, 25 bp, Homo sapien
gcaggtgtcgctggcggaggcagtg

SEQ ID NO: 1791476 - DNA, 25 bp, Homo sapien
ccaggaagcaagtgtgtggaacctt

SEQ ID NO: 1791477 - DNA, 25 bp, Homo sapien
cacacatttgcagaggttccggaag

SEQ ID NO: 1791478 - DNA, 25 bp, Homo sapien
caggcactagtcagcaagcacacat

SEQ ID NO: 1791479 - DNA, 25 bp, Homo sapien
gaggttccggaagttcttatgctca

SEQ ID NO: 1791480 - DNA, 25 bp, Homo sapien
gctgcccacagggtcagaaggagcc

SEQ ID NO: 1791481 - DNA, 25 bp, Homo sapien
gcagcttcagagcaagttcccacca

SEQ ID NO: 1791482 - DNA, 25 bp, Homo sapien
ctaaaggagcaaagcatgagctggg

SEQ ID NO: 1791483 - DNA, 25 bp, Homo sapien
gagcaagttcccaccatgaggctgc

SEQ ID NO: 1791484 - DNA, 25 bp, Homo sapien
tatgggtgagtgctccatcaaaggg

SEQ ID NO: 1791485 - DNA, 25 bp, Homo sapien
agaggcaaagctgccactcagagca

SEQ ID NO: 1791486 - DNA, 25 bp, Homo sapien
agaatccccagcgtagaaggccagc

SEQ ID NO: 1791487 - DNA, 25 bp, Homo sapien
cagttccctcgcacttatgggtgag

SEQ ID NO: 1791488 - DNA, 25 bp, Homo sapien
acaatgcttctcatgaggtagaaca

SEQ ID NO: 1791489 - DNA, 25 bp, Homo sapien
caatgcttctcatgaggtagaacat

SEQ ID NO: 1791490 - DNA, 25 bp, Homo sapien
catggtagatggagtgcgtctatgc

SEQ ID NO: 1791491 - DNA, 25 bp, Homo sapien
tgcgtctatgcgagaggtgctttgt

SEQ ID NO: 1791492 - DNA, 25 bp, Homo sapien
gcgtctatgcgagaggtgctttgtc

SEQ ID NO: 1791493 - DNA, 25 bp, Homo sapien
ctgagtcttcatggtagatggagtg

SEQ ID NO: 1791494 - DNA, 25 bp, Homo sapien
acggtggtggctgcaaaaggcacgg

SEQ ID NO: 1791495 - DNA, 25 bp, Homo sapien
tggtggctgcaaaaggcacggaggt

SEQ ID NO: 1791496 - DNA, 25 bp, Homo sapien
cacggtggtggctgcaaaaggcacg

SEQ ID NO: 1791497 - DNA, 25 bp, Homo sapien
gtggtggctgcaaaaggcacggagg

SEQ ID NO: 1791498 - DNA, 25 bp, Homo sapien
aagcacagattggtttcctgcccgg

SEQ ID NO: 1791499 - DNA, 25 bp, Homo sapien
caggaaatgccctcggcactttcaa

SEQ ID NO: 1791500 - DNA, 25 bp, Homo sapien
catgaggtttgcctcccaaaggcgt

SEQ ID NO: 1791501 - DNA, 25 bp, Homo sapien
agcaaacacttgtagaatttgttca

SEQ ID NO: 1791502 - DNA, 25 bp, Homo sapien
tttccagtgagagcctgaataggga

SEQ ID NO: 1791503 - DNA, 25 bp, Homo sapien
ccagtgagagcctgaatagggattt

SEQ ID NO: 1791504 - DNA, 25 bp, Homo sapien
tccagtgagagcctgaatagggatt

SEQ ID NO: 1791505 - DNA, 25 bp, Homo sapien
ttccagtgagagcctgaatagggat

SEQ ID NO: 1791506 - DNA, 25 bp, Homo sapien
cgtggcctctagtctcggagacagg

SEQ ID NO: 1791507 - DNA, 25 bp, Homo sapien
tcgccgatgtgtagactccggaagg

SEQ ID NO: 1791508 - DNA, 25 bp, Homo sapien
cgggaaatgtgtgcgcctagacacg

SEQ ID NO: 1791509 - DNA, 25 bp, Homo sapien
cctagacacgggaggtcgccgatgt

SEQ ID NO: 1791510 - DNA, 25 bp, Homo sapien
gcccggcagccgcatgcgaagggct

SEQ ID NO: 1791511 - DNA, 25 bp, Homo sapien
gggaccgcagccttaaagaagccgc

SEQ ID NO: 1791512 - DNA, 25 bp, Homo sapien
cggcgccgctaccacctccggcccg

SEQ ID NO: 1791513 - DNA, 25 bp, Homo sapien
ccgagcctcagtgcggcccggagga

SEQ ID NO: 1791514 - DNA, 25 bp, Homo sapien
cggccgtctcgctgctgcccgtcgc

SEQ ID NO: 1791515 - DNA, 25 bp, Homo sapien
tggaagaaaacccgtgcgccgccgc

SEQ ID NO: 1791516 - DNA, 25 bp, Homo sapien
cgctgctgcccgtcgccaccgacat

SEQ ID NO: 1791517 - DNA, 25 bp, Homo sapien
gccccgccggccgtctcgctgctgc

SEQ ID NO: 1791518 - DNA, 25 bp, Homo sapien
cgccgtggccacgggcgccgagtcc

SEQ ID NO: 1791519 - DNA, 25 bp, Homo sapien
ccgtggccacgggcgccgagtcctc

SEQ ID NO: 1791520 - DNA, 25 bp, Homo sapien
ccgccgtggccacgggcgccgagtc

SEQ ID NO: 1791521 - DNA, 25 bp, Homo sapien
gccgtggccacgggcgccgagtcct

SEQ ID NO: 1791522 - DNA, 25 bp, Homo sapien
gcttccgaagctccttacgatcgta

SEQ ID NO: 1791523 - DNA, 25 bp, Homo sapien
cagccgtagagctgacccagctgct

SEQ ID NO: 1791524 - DNA, 25 bp, Homo sapien
acttttccctgctggtgtcgccgct

SEQ ID NO: 1791525 - DNA, 25 bp, Homo sapien
tgctccacgatccattcctccagca

SEQ ID NO: 1791526 - DNA, 25 bp, Homo sapien
gggagtcagggacatgcgcgccccg

SEQ ID NO: 1791527 - DNA, 25 bp, Homo sapien
ctggagcccgggaaaattactgcgc

SEQ ID NO: 1791528 - DNA, 25 bp, Homo sapien
ctggcacttggtccccgggagtcag

SEQ ID NO: 1791529 - DNA, 25 bp, Homo sapien
cgggaaaattactgcgcgggcacag

SEQ ID NO: 1791530 - DNA, 25 bp, Homo sapien
gcccatcaatgggagtaactgagct

SEQ ID NO: 1791531 - DNA, 25 bp, Homo sapien
ggcttcaacaaagcacaacgtgtgc

SEQ ID NO: 1791532 - DNA, 25 bp, Homo sapien
tgcagggcggaattatggagacacc

SEQ ID NO: 1791533 - DNA, 25 bp, Homo sapien
aaagcggaaagcgttccatctcagg

SEQ ID NO: 1791534 - DNA, 25 bp, Homo sapien
caaatgtatacacgtccctgagact

SEQ ID NO: 1791535 - DNA, 25 bp, Homo sapien
gaccttgggaagtcacgatgtcgtg

SEQ ID NO: 1791536 - DNA, 25 bp, Homo sapien
tgaagctgacagatcccgggatccc

SEQ ID NO: 1791537 - DNA, 25 bp, Homo sapien
tgaccttagtccctggaccttggga

SEQ ID NO: 1791538 - DNA, 25 bp, Homo sapien
tggtaaagcctgtgagttcatctgg

SEQ ID NO: 1791539 - DNA, 25 bp, Homo sapien
taagaaaacgtgtcttcacaacagg

SEQ ID NO: 1791540 - DNA, 25 bp, Homo sapien
tacagaacacccgacattagtggta

SEQ ID NO: 1791541 - DNA, 25 bp, Homo sapien
tatcagtagtcagtaacgagtatgc

SEQ ID NO: 1791542 - DNA, 25 bp, Homo sapien
caaatgtctagctgtttgctacggg

SEQ ID NO: 1791543 - DNA, 25 bp, Homo sapien
aatacttgccacgttaatgacatgc

SEQ ID NO: 1791544 - DNA, 25 bp, Homo sapien
ggtagagctctttctagcttcccaa

SEQ ID NO: 1791545 - DNA, 25 bp, Homo sapien
tatcaggctactcagtgggtagagc

SEQ ID NO: 1791546 - DNA, 25 bp, Homo sapien
tagggtgcgtccttcttgattcaca

SEQ ID NO: 1791547 - DNA, 25 bp, Homo sapien
tcagcagataactcaagcctttggc

SEQ ID NO: 1791548 - DNA, 25 bp, Homo sapien
tattaaatggaggtacaccaccagc

SEQ ID NO: 1791549 - DNA, 25 bp, Homo sapien
tggctgtgtcactttcatgggctaa

SEQ ID NO: 1791550 - DNA, 25 bp, Homo sapien
aatggctgatgataccggagaagtc

SEQ ID NO: 1791551 - DNA, 25 bp, Homo sapien
ggtagtggtaccatcctcatcctca

SEQ ID NO: 1791552 - DNA, 25 bp, Homo sapien
tacgtgttctatccaaagtgccatg

SEQ ID NO: 1791553 - DNA, 25 bp, Homo sapien
gcacagatcttcagtatacggtcca

SEQ ID NO: 1791554 - DNA, 25 bp, Homo sapien
ggttcaaggctggcacatttcacac

SEQ ID NO: 1791555 - DNA, 25 bp, Homo sapien
ggtcagatgggtcatgtgccaatgt

SEQ ID NO: 1791556 - DNA, 25 bp, Homo sapien
gatgggtcatgtgccaatgttgtaa

SEQ ID NO: 1791557 - DNA, 25 bp, Homo sapien
aacaaggttcaaggctggcacattt

SEQ ID NO: 1791558 - DNA, 25 bp, Homo sapien
tattgaaccctgaacttatctggta

SEQ ID NO: 1791559 - DNA, 25 bp, Homo sapien
aaccctgaacttatctggtatttca

SEQ ID NO: 1791560 - DNA, 25 bp, Homo sapien
gaaccctgaacttatctggtatttc

SEQ ID NO: 1791561 - DNA, 25 bp, Homo sapien
ttgaaccctgaacttatctggtatt

SEQ ID NO: 1791562 - DNA, 25 bp, Homo sapien
tgaagaaatgaacttcaaaggctgg

SEQ ID NO: 1791563 - DNA, 25 bp, Homo sapien
aactgaagaaatgaacttcaaaggc

SEQ ID NO: 1791564 - DNA, 25 bp, Homo sapien
aagaaatgaacttcaaaggctggcc

SEQ ID NO: 1791565 - DNA, 25 bp, Homo sapien
ctgaactgaagaaatgaacttcaaa

SEQ ID NO: 1791566 - DNA, 25 bp, Homo sapien
atcgcttaaactcggacagtggagg

SEQ ID NO: 1791567 - DNA, 25 bp, Homo sapien
gaatcgcttaaactcggacagtgga

SEQ ID NO: 1791568 - DNA, 25 bp, Homo sapien
ggagaatcgcttaaactcggacagt

SEQ ID NO: 1791569 - DNA, 25 bp, Homo sapien
gagaatcgcttaaactcggacagtg

SEQ ID NO: 1791570 - DNA, 25 bp, Homo sapien
tgtggctgttggtgccaaggaatcc

SEQ ID NO: 1791571 - DNA, 25 bp, Homo sapien
tgttggtgccaaggaatccacagtt

SEQ ID NO: 1791572 - DNA, 25 bp, Homo sapien
cagggtcaagattccaaactgtggc

SEQ ID NO: 1791573 - DNA, 25 bp, Homo sapien
taaagcattctgtatcagtctgaag

SEQ ID NO: 1791574 - DNA, 25 bp, Homo sapien
caggatgcaagccaagtccatcttc

SEQ ID NO: 1791575 - DNA, 25 bp, Homo sapien
caagtccatcttctcatttccgatc

SEQ ID NO: 1791576 - DNA, 25 bp, Homo sapien
atttccgatctctttcccgtcgtag

SEQ ID NO: 1791577 - DNA, 25 bp, Homo sapien
cagcatttactcattatctgcagga

SEQ ID NO: 1791578 - DNA, 25 bp, Homo sapien
ttcagcccagacagcgaccaagctg

SEQ ID NO: 1791579 - DNA, 25 bp, Homo sapien
agacaggttcttcagcccagacagc

SEQ ID NO: 1791580 - DNA, 25 bp, Homo sapien
gttcttcagcccagacagcgaccaa

SEQ ID NO: 1791581 - DNA, 25 bp, Homo sapien
cagacagcgaccaagctgcagagtg

SEQ ID NO: 1791582 - DNA, 25 bp, Homo sapien
ctcgggatctatagaggtgcagcaa

SEQ ID NO: 1791583 - DNA, 25 bp, Homo sapien
cagccagttcccaaactcgggatct

SEQ ID NO: 1791584 - DNA, 25 bp, Homo sapien
gggcagagacaatccttgtaacctt

SEQ ID NO: 1791585 - DNA, 25 bp, Homo sapien
aatccttgtaaccttctccagtcct

SEQ ID NO: 1791586 - DNA, 25 bp, Homo sapien
ccacctccagggagtgactgcggtg

SEQ ID NO: 1791587 - DNA, 25 bp, Homo sapien
tccatgcaagacaggtgccctctgg

SEQ ID NO: 1791588 - DNA, 25 bp, Homo sapien
taacttcctagaccaacgacagtgg

SEQ ID NO: 1791589 - DNA, 25 bp, Homo sapien
gtggctagaaagtccagctgttccc

SEQ ID NO: 1791590 - DNA, 25 bp, Homo sapien
gattgcctccacattggaaaacagg

SEQ ID NO: 1791591 - DNA, 25 bp, Homo sapien
ggccagattgcctccacattggaaa

SEQ ID NO: 1791592 - DNA, 25 bp, Homo sapien
ggaaaacaggaggtgctttctctcc

SEQ ID NO: 1791593 - DNA, 25 bp, Homo sapien
cattggaaaacaggaggtgctttct

SEQ ID NO: 1791594 - DNA, 25 bp, Homo sapien
gccaggggcacacaaagccgggcat

SEQ ID NO: 1791595 - DNA, 25 bp, Homo sapien
ggcaggggcacacaaagccgggcat

SEQ ID NO: 1791596 - DNA, 25 bp, Homo sapien
aagggcaggggcacacaaagccggg

SEQ ID NO: 1791597 - DNA, 25 bp, Homo sapien
ccctcctccaccgtgacgggcaggg

SEQ ID NO: 1791598 - DNA, 25 bp, Homo sapien
tcccctccctggagaggatggtcac

SEQ ID NO: 1791599 - DNA, 25 bp, Homo sapien
caaggggcagctctcccctccctgg

SEQ ID NO: 1791600 - DNA, 25 bp, Homo sapien
agcaaggggcagctctcccctccct

SEQ ID NO: 1791601 - DNA, 25 bp, Homo sapien
tcagcaaggggcagctctcccctcc

SEQ ID NO: 1791602 - DNA, 25 bp, Homo sapien
tgctggcacctccattgcaaacaag

SEQ ID NO: 1791603 - DNA, 25 bp, Homo sapien
ggcacctccattgcaaacaagaccg

SEQ ID NO: 1791604 - DNA, 25 bp, Homo sapien
ccattgcaaacaagaccgtcaagaa

SEQ ID NO: 1791605 - DNA, 25 bp, Homo sapien
caagaccgtcaagaaaaccatcttc

SEQ ID NO: 1791606 - DNA, 25 bp, Homo sapien
aggaggtgtgggcttgatctgggaa

SEQ ID NO: 1791607 - DNA, 25 bp, Homo sapien
ccaggcagtgcctcttccgtgggac

SEQ ID NO: 1791608 - DNA, 25 bp, Homo sapien
gaggcaaggaggtgtgggcttgatc

SEQ ID NO: 1791609 - DNA, 25 bp, Homo sapien
gcaaggaggtgtgggcttgatctgg

SEQ ID NO: 1791610 - DNA, 25 bp, Homo sapien
ctaagaacggcaagggtgccaatga

SEQ ID NO: 1791611 - DNA, 25 bp, Homo sapien
gaacggcaagggtgccaatgagaaa

SEQ ID NO: 1791612 - DNA, 25 bp, Homo sapien
caagggtgccaatgagaaagggaca

SEQ ID NO: 1791613 - DNA, 25 bp, Homo sapien
gggtgccaatgagaaagggacaaac

SEQ ID NO: 1791614 - DNA, 25 bp, Homo sapien
ccagctcctggttgagaggagccag

SEQ ID NO: 1791615 - DNA, 25 bp, Homo sapien
ttgctgctgacaagacacgggcctg

SEQ ID NO: 1791616 - DNA, 25 bp, Homo sapien
ctgcagggctgtcccggcggcaaag

SEQ ID NO: 1791617 - DNA, 25 bp, Homo sapien
caaaggagcggcaaagtcggccgaa

SEQ ID NO: 1791618 - DNA, 25 bp, Homo sapien
gatatgggccatcaagcatgaaaag

SEQ ID NO: 1791619 - DNA, 25 bp, Homo sapien
taaaagaccattgctgatatgggcc

SEQ ID NO: 1791620 - DNA, 25 bp, Homo sapien
aattgtgaatcccatcgcaaggcct

SEQ ID NO: 1791621 - DNA, 25 bp, Homo sapien
cactgcacttggagtataaaagacc

SEQ ID NO: 1791622 - DNA, 25 bp, Homo sapien
cctgagaagatgatacggaaaagcc

SEQ ID NO: 1791623 - DNA, 25 bp, Homo sapien
tccagtacgggcaggtgcacagaag

SEQ ID NO: 1791624 - DNA, 25 bp, Homo sapien
caatggccaaatatgtccagtacgg

SEQ ID NO: 1791625 - DNA, 25 bp, Homo sapien
tgatacggaaaagccgcttggaaga

SEQ ID NO: 1791626 - DNA, 25 bp, Homo sapien
tctctgatagaagatggtccacatc

SEQ ID NO: 1791627 - DNA, 25 bp, Homo sapien
gaacaccatgcggaagctacaggct

SEQ ID NO: 1791628 - DNA, 25 bp, Homo sapien
gaagcccgttctagccaattcttgg

SEQ ID NO: 1791629 - DNA, 25 bp, Homo sapien
ttggagagaagacggttcccctgca

SEQ ID NO: 1791630 - DNA, 25 bp, Homo sapien
tcggcaggttggtcctcgtaagacg

SEQ ID NO: 1791631 - DNA, 25 bp, Homo sapien
gcaaggacaatcttctaagccgtgg

SEQ ID NO: 1791632 - DNA, 25 bp, Homo sapien
ccccgtgacgagaaagtcggcaggt

SEQ ID NO: 1791633 - DNA, 25 bp, Homo sapien
taagccgtggcataaacgaggacac

SEQ ID NO: 1791634 - DNA, 25 bp, Homo sapien
gaccatcctcatgccccgtgtagaa

SEQ ID NO: 1791635 - DNA, 25 bp, Homo sapien
gaacaggagtggcattgtctcacaa

SEQ ID NO: 1791636 - DNA, 25 bp, Homo sapien
tctggggcactgacgcagatgcaaa

SEQ ID NO: 1791637 - DNA, 25 bp, Homo sapien
gagagctcccggcagggaccatcct

SEQ ID NO: 1791638 - DNA, 25 bp, Homo sapien
ttcaaaatagggatggcaacgtaac

SEQ ID NO: 1791639 - DNA, 25 bp, Homo sapien
taacacgggattaaactcctgtgca

SEQ ID NO: 1791640 - DNA, 25 bp, Homo sapien
cgggattaaactcctgtgcaaattg

SEQ ID NO: 1791641 - DNA, 25 bp, Homo sapien
gatggcaacgtaacacgggattaaa

SEQ ID NO: 1791642 - DNA, 25 bp, Homo sapien
tctaggagacatagcttggcagctt

SEQ ID NO: 1791643 - DNA, 25 bp, Homo sapien
tggaaatgactgtggctaacagctc

SEQ ID NO: 1791644 - DNA, 25 bp, Homo sapien
aaatgactgtggctaacagctctca

SEQ ID NO: 1791645 - DNA, 25 bp, Homo sapien
tcatggtctccaagctctaggagac

SEQ ID NO: 1791646 - DNA, 25 bp, Homo sapien
gagtccgcagagtgcaaggcactgt

SEQ ID NO: 1791647 - DNA, 25 bp, Homo sapien
tctttcttgtcgtacatttgttgag

SEQ ID NO: 1791648 - DNA, 25 bp, Homo sapien
tgtgtgtcagccacagtgaggccct

SEQ ID NO: 1791649 - DNA, 25 bp, Homo sapien
ggggacgggctgtctaaacacagct

SEQ ID NO: 1791650 - DNA, 25 bp, Homo sapien
tagtgagaggccctcctgttggtac

SEQ ID NO: 1791651 - DNA, 25 bp, Homo sapien
ttagtgagaggccctcctgttggta

SEQ ID NO: 1791652 - DNA, 25 bp, Homo sapien
attagtgagaggccctcctgttggt

SEQ ID NO: 1791653 - DNA, 25 bp, Homo sapien
caagaagatcatcaatgtcaatttc

SEQ ID NO: 1791654 - DNA, 25 bp, Homo sapien
atcaagaagatcatcaatgtcaatt

SEQ ID NO: 1791655 - DNA, 25 bp, Homo sapien
tcaatttctacctctggcatttctt

SEQ ID NO: 1791656 - DNA, 25 bp, Homo sapien
tcaagaagatcatcaatgtcaattt

SEQ ID NO: 1791657 - DNA, 25 bp, Homo sapien
gggctggagaaagttatacccataa

SEQ ID NO: 1791658 - DNA, 25 bp, Homo sapien
cccataaggcgctttgaaaatggac

SEQ ID NO: 1791659 - DNA, 25 bp, Homo sapien
agcagaatcagctgtttctcccaag

SEQ ID NO: 1791660 - DNA, 25 bp, Homo sapien
tggactatagtcaagggctgcttta

SEQ ID NO: 1791661 - DNA, 25 bp, Homo sapien
ctctgttggtttgtagcagtctaca

SEQ ID NO: 1791662 - DNA, 25 bp, Homo sapien
tgttggtttgtagcagtctacaaga

SEQ ID NO: 1791663 - DNA, 25 bp, Homo sapien
tggtttgtagcagtctacaagagct

SEQ ID NO: 1791664 - DNA, 25 bp, Homo sapien
gtttgtagcagtctacaagagcttc

SEQ ID NO: 1791665 - DNA, 25 bp, Homo sapien
gaggcgggagaattggttgaactca

SEQ ID NO: 1791666 - DNA, 25 bp, Homo sapien
aggccgaggcgggtgaatacctgag

SEQ ID NO: 1791667 - DNA, 25 bp, Homo sapien
cgggcgtggtgacgcacgtctgtaa

SEQ ID NO: 1791668 - DNA, 25 bp, Homo sapien
agccgggcgtggtgacgcacgtctg

SEQ ID NO: 1791669 - DNA, 25 bp, Homo sapien
gacttcaaaacatctgacggatctt

SEQ ID NO: 1791670 - DNA, 25 bp, Homo sapien
taaagctcaaataggtaactagtcc

SEQ ID NO: 1791671 - DNA, 25 bp, Homo sapien
gactgcaagatgtaatcaaagctgg

SEQ ID NO: 1791672 - DNA, 25 bp, Homo sapien
cagacacttgtaaaagcatgctttc

SEQ ID NO: 1791673 - DNA, 25 bp, Homo sapien
tcatttctccattcctagaaatggg

SEQ ID NO: 1791674 - DNA, 25 bp, Homo sapien
tcctcccatgtaacttgtacgtata

SEQ ID NO: 1791675 - DNA, 25 bp, Homo sapien
agcctcctcccatgtaacttgtacg

SEQ ID NO: 1791676 - DNA, 25 bp, Homo sapien
cccatgtaacttgtacgtatattgg

SEQ ID NO: 1791677 - DNA, 25 bp, Homo sapien
gtaacttgtacgtatattggacatg

SEQ ID NO: 1791678 - DNA, 25 bp, Homo sapien
gggtgctcagtcgagtaagttaaaa

SEQ ID NO: 1791679 - DNA, 25 bp, Homo sapien
tgctcctttgaggaaatcacctctg

SEQ ID NO: 1791680 - DNA, 25 bp, Homo sapien
gaaacttggcagtatcacttgcaca

SEQ ID NO: 1791681 - DNA, 25 bp, Homo sapien
ggctcttggctcctattactcaaaa

SEQ ID NO: 1791682 - DNA, 25 bp, Homo sapien
tcttcttctgcggagggctcagttt

SEQ ID NO: 1791683 - DNA, 25 bp, Homo sapien
ttcctcatgcctcttatccgagaaa

SEQ ID NO: 1791684 - DNA, 25 bp, Homo sapien
gcctcttatccgagaaagcagctct

SEQ ID NO: 1791685 - DNA, 25 bp, Homo sapien
ttcttctgcggagggctcagtttcc

SEQ ID NO: 1791686 - DNA, 25 bp, Homo sapien
ccaaagagctggtaactgagagggc

SEQ ID NO: 1791687 - DNA, 25 bp, Homo sapien
tcagggtgcacaattagggccagga

SEQ ID NO: 1791688 - DNA, 25 bp, Homo sapien
gaaaacacatgtgctgggacctcca

SEQ ID NO: 1791689 - DNA, 25 bp, Homo sapien
tactcggtggaaagcagacaattca

SEQ ID NO: 1791690 - DNA, 25 bp, Homo sapien
accacctgatctgaagatgcctgag

SEQ ID NO: 1791691 - DNA, 25 bp, Homo sapien
agctcctttgctttcaccacctgat

SEQ ID NO: 1791692 - DNA, 25 bp, Homo sapien
tgaaatgaaacgaggtgaggtgctt

SEQ ID NO: 1791693 - DNA, 25 bp, Homo sapien
gccaggattacatgcctagaaatcc

SEQ ID NO: 1791694 - DNA, 25 bp, Homo sapien
cagagccacccttgtagatcaagag

SEQ ID NO: 1791695 - DNA, 25 bp, Homo sapien
ggcatcgtgggcaagcttcatccat

SEQ ID NO: 1791696 - DNA, 25 bp, Homo sapien
ctcaggcaatgcaacagaagcgtct

SEQ ID NO: 1791697 - DNA, 25 bp, Homo sapien
aaaaacctggaatgcggcatcgtgg

SEQ ID NO: 1791698 - DNA, 25 bp, Homo sapien
gggaagcatcctctatctcttctgc

SEQ ID NO: 1791699 - DNA, 25 bp, Homo sapien
tgctaattgatttggaggaagggtc

SEQ ID NO: 1791700 - DNA, 25 bp, Homo sapien
tattataggagggaacatcacttcc

SEQ ID NO: 1791701 - DNA, 25 bp, Homo sapien
tccataaggtctggaggaccgggaa

SEQ ID NO: 1791702 - DNA, 25 bp, Homo sapien
tgtggcatcctgttcgtgcggcacc

SEQ ID NO: 1791703 - DNA, 25 bp, Homo sapien
tgtgcatgcagcatcttgtgcgtgt

SEQ ID NO: 1791704 - DNA, 25 bp, Homo sapien
tgcatgcggcatgctgttcatgccc

SEQ ID NO: 1791705 - DNA, 25 bp, Homo sapien
tgtgcacaaagcatcctgtgcatgt

SEQ ID NO: 1791706 - DNA, 25 bp, Homo sapien
atcaaattgcaaaacgtcccacccg

SEQ ID NO: 1791707 - DNA, 25 bp, Homo sapien
gaagaagcaggtcattctcaagttc

SEQ ID NO: 1791708 - DNA, 25 bp, Homo sapien
tctcaagttctgatcgctggtctga

SEQ ID NO: 1791709 - DNA, 25 bp, Homo sapien
tgaaggcctttcatcgtactcgaca

SEQ ID NO: 1791710 - DNA, 25 bp, Homo sapien
gtcacagcaagtcgagcttccagaa

SEQ ID NO: 1791711 - DNA, 25 bp, Homo sapien
ctggagtcacagcaagtcgagcttc

SEQ ID NO: 1791712 - DNA, 25 bp, Homo sapien
atgtcctgagccaaaggctttttgc

SEQ ID NO: 1791713 - DNA, 25 bp, Homo sapien
tgcaccaagccacccgatgtcctga

SEQ ID NO: 1791714 - DNA, 25 bp, Homo sapien
tgtgtcagggtgaaactcaaactct

SEQ ID NO: 1791715 - DNA, 25 bp, Homo sapien
gcttccgtgggatactgctggtcaa

SEQ ID NO: 1791716 - DNA, 25 bp, Homo sapien
tgcaataaacctgtggcagccggct

SEQ ID NO: 1791717 - DNA, 25 bp, Homo sapien
gacacccggtaattgcagtctgcag

SEQ ID NO: 1791718 - DNA, 25 bp, Homo sapien
aaggtgggctccctcccagtagtgg

SEQ ID NO: 1791719 - DNA, 25 bp, Homo sapien
tagatgacttctaagggcattccag

SEQ ID NO: 1791720 - DNA, 25 bp, Homo sapien
gagtctactggtgggctttctccaa

SEQ ID NO: 1791721 - DNA, 25 bp, Homo sapien
tccctggtaactgaggagagtctac

SEQ ID NO: 1791722 - DNA, 25 bp, Homo sapien
gagtccccagtgatctatagagttg

SEQ ID NO: 1791723 - DNA, 25 bp, Homo sapien
ttctgaaccggataccttgaatgat

SEQ ID NO: 1791724 - DNA, 25 bp, Homo sapien
aggatgagtccccagtgatctatag

SEQ ID NO: 1791725 - DNA, 25 bp, Homo sapien
acagtctgagctggtgatagattct

SEQ ID NO: 1791726 - DNA, 25 bp, Homo sapien
aggtgtttggcaaatgctcgtggaa

SEQ ID NO: 1791727 - DNA, 25 bp, Homo sapien
ttggcaaatgctcgtggaattgagg

SEQ ID NO: 1791728 - DNA, 25 bp, Homo sapien
ccaagaggaaccacagtgtagccat

SEQ ID NO: 1791729 - DNA, 25 bp, Homo sapien
aatgctcgtggaattgaggtcttgg

SEQ ID NO: 1791730 - DNA, 25 bp, Homo sapien
gacctttggcgaacttctagaagtc

SEQ ID NO: 1791731 - DNA, 25 bp, Homo sapien
attatatcactgaactggggttgag

SEQ ID NO: 1791732 - DNA, 25 bp, Homo sapien
gttgaggagacctttggcgaacttc

SEQ ID NO: 1791733 - DNA, 25 bp, Homo sapien
gaggagacctttggcgaacttctag

SEQ ID NO: 1791734 - DNA, 25 bp, Homo sapien
tccattcacgtctgctttcttgtat

SEQ ID NO: 1791735 - DNA, 25 bp, Homo sapien
tttccattcacgtctgctttcttgt

SEQ ID NO: 1791736 - DNA, 25 bp, Homo sapien
ttccattcacgtctgctttcttgta

SEQ ID NO: 1791737 - DNA, 25 bp, Homo sapien
attttccattcacgtctgctttctt

SEQ ID NO: 1791738 - DNA, 25 bp, Homo sapien
tttatagtcaaattccaacgtcttc

SEQ ID NO: 1791739 - DNA, 25 bp, Homo sapien
tcctttatagtcaaattccaacgtc

SEQ ID NO: 1791740 - DNA, 25 bp, Homo sapien
aaattccaacgtcttctcagtgctc

SEQ ID NO: 1791741 - DNA, 25 bp, Homo sapien
tagtcaaattccaacgtcttctcag

SEQ ID NO: 1791742 - DNA, 25 bp, Homo sapien
caggagtggagaatgccgggagata

SEQ ID NO: 1791743 - DNA, 25 bp, Homo sapien
tgcacacttcccacaccggttttta

SEQ ID NO: 1791744 - DNA, 25 bp, Homo sapien
ggagtctgacgtcacaggcgtgcac

SEQ ID NO: 1791745 - DNA, 25 bp, Homo sapien
agatagaaggaatgcagacacaggt

SEQ ID NO: 1791746 - DNA, 25 bp, Homo sapien
gcatttttaaagatccacacaacca

SEQ ID NO: 1791747 - DNA, 25 bp, Homo sapien
ttctgtcggcatttttaaagatcca

SEQ ID NO: 1791748 - DNA, 25 bp, Homo sapien
accaaaatgcagagaatggctacca

SEQ ID NO: 1791749 - DNA, 25 bp, Homo sapien
gaatggctaccaagatgggagtcag

SEQ ID NO: 1791750 - DNA, 25 bp, Homo sapien
caggggcgagcttcggccctggttc

SEQ ID NO: 1791751 - DNA, 25 bp, Homo sapien
ggcgagcttcggccctggttctagg

SEQ ID NO: 1791752 - DNA, 25 bp, Homo sapien
aagtcttcatccacccaggggcgag

SEQ ID NO: 1791753 - DNA, 25 bp, Homo sapien
cttttaagtcttcatccacccaggg

SEQ ID NO: 1791754 - DNA, 25 bp, Homo sapien
tccattaactttactctgatccacg

SEQ ID NO: 1791755 - DNA, 25 bp, Homo sapien
tccaatttactagcaaaccctgttg

SEQ ID NO: 1791756 - DNA, 25 bp, Homo sapien
taactttactctgatccacgccttc

SEQ ID NO: 1791757 - DNA, 25 bp, Homo sapien
gatagcttccagtctccaactctcc

SEQ ID NO: 1791758 - DNA, 25 bp, Homo sapien
gtgtaaaattgtaaacctctgacga

SEQ ID NO: 1791759 - DNA, 25 bp, Homo sapien
ccatggaccactctttttcagagca

SEQ ID NO: 1791760 - DNA, 25 bp, Homo sapien
gattccatggaccactctttttcag

SEQ ID NO: 1791761 - DNA, 25 bp, Homo sapien
gtaaacctctgacgattttcctgtg

SEQ ID NO: 1791762 - DNA, 25 bp, Homo sapien
gatgcaacagaagggtcaatcactg

SEQ ID NO: 1791763 - DNA, 25 bp, Homo sapien
gctcattatcagtagttgaagatct

SEQ ID NO: 1791764 - DNA, 25 bp, Homo sapien
gaaagttctgcaagctcattatcag

SEQ ID NO: 1791765 - DNA, 25 bp, Homo sapien
gcaacagaagggtcaatcactggag

SEQ ID NO: 1791766 - DNA, 25 bp, Homo sapien
cttctgattcttgccattcatcagc

SEQ ID NO: 1791767 - DNA, 25 bp, Homo sapien
tctgattcttgccattcatcagcat

SEQ ID NO: 1791768 - DNA, 25 bp, Homo sapien
tcttctgattcttgccattcatcag

SEQ ID NO: 1791769 - DNA, 25 bp, Homo sapien
tttcttctgattcttgccattcatc

SEQ ID NO: 1791770 - DNA, 25 bp, Homo sapien
ttccttctcaggatagtggttatga

SEQ ID NO: 1791771 - DNA, 25 bp, Homo sapien
attcctgagacctcttaaccatttc

SEQ ID NO: 1791772 - DNA, 25 bp, Homo sapien
tcataaaattcctgagacctcttaa

SEQ ID NO: 1791773 - DNA, 25 bp, Homo sapien
ctcaggatagtggttatgagagaag

SEQ ID NO: 1791774 - DNA, 25 bp, Homo sapien
tatcaatgacttccattgggacttg

SEQ ID NO: 1791775 - DNA, 25 bp, Homo sapien
acattatcaatgacttccattggga

SEQ ID NO: 1791776 - DNA, 25 bp, Homo sapien
cattgggacttgctcattacttatg

SEQ ID NO: 1791777 - DNA, 25 bp, Homo sapien
gacttccattgggacttgctcatta

SEQ ID NO: 1791778 - DNA, 25 bp, Homo sapien
agaaagaaggtgtatctcctccaat

SEQ ID NO: 1791779 - DNA, 25 bp, Homo sapien
ccagtaaggtgactaacatttccaa

SEQ ID NO: 1791780 - DNA, 25 bp, Homo sapien
cattgttggagtcacaccagtaagg

SEQ ID NO: 1791781 - DNA, 25 bp, Homo sapien
cagcatcatggtgtgtaatataaga

SEQ ID NO: 1791782 - DNA, 25 bp, Homo sapien
tgtgtgagccccactcggggctgtt

SEQ ID NO: 1791783 - DNA, 25 bp, Homo sapien
gtgtgagccccactcggggctgttc

SEQ ID NO: 1791784 - DNA, 25 bp, Homo sapien
ctgtgtgagccccactcggggctgt

SEQ ID NO: 1791785 - DNA, 25 bp, Homo sapien
aatcttgtgcttcacgtctgggtcc

SEQ ID NO: 1791786 - DNA, 25 bp, Homo sapien
ggtctgtgacccagcgatgtcccat

SEQ ID NO: 1791787 - DNA, 25 bp, Homo sapien
tccttcacaaccacgaaggtccagg

SEQ ID NO: 1791788 - DNA, 25 bp, Homo sapien
ctcctcaatgatctttcgaatcttg

SEQ ID NO: 1791789 - DNA, 25 bp, Homo sapien
cagctagcaggatgccacaagcgat

SEQ ID NO: 1791790 - DNA, 25 bp, Homo sapien
cactgatctcattgtagtagtggac

SEQ ID NO: 1791791 - DNA, 25 bp, Homo sapien
catttgcggcgaaaccatgtacttg

SEQ ID NO: 1791792 - DNA, 25 bp, Homo sapien
caagtactctttaatccagttggtt

SEQ ID NO: 1791793 - DNA, 25 bp, Homo sapien
atcaggtggcggtgcctcgcagtct

SEQ ID NO: 1791794 - DNA, 25 bp, Homo sapien
gcttgctgcaggcttcgctgcttct

SEQ ID NO: 1791795 - DNA, 25 bp, Homo sapien
tcgcagtctgatgccgcatggtgat

SEQ ID NO: 1791796 - DNA, 25 bp, Homo sapien
aggaccctcaatcaggtggcggtgc

SEQ ID NO: 1791797 - DNA, 25 bp, Homo sapien
tctacaagacatgcatggcgcgctt

SEQ ID NO: 1791798 - DNA, 25 bp, Homo sapien
catactggagatgcgggcttcatgg

SEQ ID NO: 1791799 - DNA, 25 bp, Homo sapien
tgagatgctgatgcccgttgatagg

SEQ ID NO: 1791800 - DNA, 25 bp, Homo sapien
ctatgactacagagccaaccatgga

SEQ ID NO: 1791801 - DNA, 25 bp, Homo sapien
accctcagtcgagggccacagttga

SEQ ID NO: 1791802 - DNA, 25 bp, Homo sapien
tcgagggccacagttgagaggagtg

SEQ ID NO: 1791803 - DNA, 25 bp, Homo sapien
ggtagtgacagtcaccagacctgca

SEQ ID NO: 1791804 - DNA, 25 bp, Homo sapien
ggagcaccctcagtcgagggccaca

SEQ ID NO: 1791805 - DNA, 25 bp, Homo sapien
tctggtccagaggtttgcgcttgag

SEQ ID NO: 1791806 - DNA, 25 bp, Homo sapien
gatctggtccagaggtttgcgcttg

SEQ ID NO: 1791807 - DNA, 25 bp, Homo sapien
gtccagaggtttgcgcttgaggtca

SEQ ID NO: 1791808 - DNA, 25 bp, Homo sapien
catgatctggtccagaggtttgcgc

SEQ ID NO: 1791809 - DNA, 25 bp, Homo sapien
taattgtctcggagggtttccaggc

SEQ ID NO: 1791810 - DNA, 25 bp, Homo sapien
caaagtagagtcttcaggtgagtcc

SEQ ID NO: 1791811 - DNA, 25 bp, Homo sapien
cataagacagtactccagcgctggg

SEQ ID NO: 1791812 - DNA, 25 bp, Homo sapien
tgctttaacagaccaccagatgagg

SEQ ID NO: 1791813 - DNA, 25 bp, Homo sapien
gtcaaggctgaaggtctagaccagg

SEQ ID NO: 1791814 - DNA, 25 bp, Homo sapien
agtttggcgtttcagggcaaggtca

SEQ ID NO: 1791815 - DNA, 25 bp, Homo sapien
aacagccctgggactgatgagctca

SEQ ID NO: 1791816 - DNA, 25 bp, Homo sapien
tactaacatctaagtggagggacag

SEQ ID NO: 1791817 - DNA, 25 bp, Homo sapien
ctccatcaccacagagactcaattc

SEQ ID NO: 1791818 - DNA, 25 bp, Homo sapien
tcctcctgctacttcaactccatca

SEQ ID NO: 1791819 - DNA, 25 bp, Homo sapien
tggggtcctcctgctacttcaactc

SEQ ID NO: 1791820 - DNA, 25 bp, Homo sapien
tccatcaccacagagactcaattcc

SEQ ID NO: 1791821 - DNA, 25 bp, Homo sapien
ggctggatccaagacagtgtggaat

SEQ ID NO: 1791822 - DNA, 25 bp, Homo sapien
tgcttgctagttaagtgatttatac

SEQ ID NO: 1791823 - DNA, 25 bp, Homo sapien
tggtggccctgatgtttgcttgcta

SEQ ID NO: 1791824 - DNA, 25 bp, Homo sapien
ccaggctggatccaagacagtgtgg

SEQ ID NO: 1791825 - DNA, 25 bp, Homo sapien
gcctcctgcccgcccattctctccc

SEQ ID NO: 1791826 - DNA, 25 bp, Homo sapien
ctctctgcctcctgcccgcccattc

SEQ ID NO: 1791827 - DNA, 25 bp, Homo sapien
tctctctgcctcctgcccgcccatt

SEQ ID NO: 1791828 - DNA, 25 bp, Homo sapien
tctgcctcctgcccgcccattctct

SEQ ID NO: 1791829 - DNA, 25 bp, Homo sapien
ggtaccccagttggctgagctgatc

SEQ ID NO: 1791830 - DNA, 25 bp, Homo sapien
ccctgctgaagtctgatgggagaat

SEQ ID NO: 1791831 - DNA, 25 bp, Homo sapien
tgacaaagtgacataacgcttggcc

SEQ ID NO: 1791832 - DNA, 25 bp, Homo sapien
gcgtcataggcagggagcccaagat

SEQ ID NO: 1791833 - DNA, 25 bp, Homo sapien
gagtctagcagaaggcttggtccaa

SEQ ID NO: 1791834 - DNA, 25 bp, Homo sapien
ggagttccctaatgccctgctaaag

SEQ ID NO: 1791835 - DNA, 25 bp, Homo sapien
tctgtatttacacgatctggaagac

SEQ ID NO: 1791836 - DNA, 25 bp, Homo sapien
tgacatctttcagagggctaggaaa

SEQ ID NO: 1791837 - DNA, 25 bp, Homo sapien
catctttcggaaagctggagttccc

SEQ ID NO: 1791838 - DNA, 25 bp, Homo sapien
gggctctccgtgtttcctgagatct

SEQ ID NO: 1791839 - DNA, 25 bp, Homo sapien
cctgagatctcaaacccaagcgttt

SEQ ID NO: 1791840 - DNA, 25 bp, Homo sapien
tttgagcgtccgcacgagaagcccc

SEQ ID NO: 1791841 - DNA, 25 bp, Homo sapien
tggctcttccggctttgagcgtccg

SEQ ID NO: 1791842 - DNA, 25 bp, Homo sapien
cgccctcaagggtgtgctgcccttt

SEQ ID NO: 1791843 - DNA, 25 bp, Homo sapien
ccgccctcaagggtgtgctgccctt

SEQ ID NO: 1791844 - DNA, 25 bp, Homo sapien
ttcccgccctcaagggtgtgctgcc

SEQ ID NO: 1791845 - DNA, 25 bp, Homo sapien
tcccgccctcaagggtgtgctgccc

SEQ ID NO: 1791846 - DNA, 25 bp, Homo sapien
cagcaactaaggcccttacgggtag

SEQ ID NO: 1791847 - DNA, 25 bp, Homo sapien
agccatcttctctgattcgcctggg

SEQ ID NO: 1791848 - DNA, 25 bp, Homo sapien
ccttacgggtagggctggtgatcca

SEQ ID NO: 1791849 - DNA, 25 bp, Homo sapien
atttctgactgtctaccagcaacta

SEQ ID NO: 1791850 - DNA, 25 bp, Homo sapien
tctggtggggagtccaatcctgagc

SEQ ID NO: 1791851 - DNA, 25 bp, Homo sapien
gagtccaatcctgagcgggggacac

SEQ ID NO: 1791852 - DNA, 25 bp, Homo sapien
agtccaatcctgagcgggggacaca

SEQ ID NO: 1791853 - DNA, 25 bp, Homo sapien
tgttgcctctggtggggagtccaat

SEQ ID NO: 1791854 - DNA, 25 bp, Homo sapien
cccactggtgggcttatatcagcca

SEQ ID NO: 1791855 - DNA, 25 bp, Homo sapien
ttcatggccaagttggcgaggatga

SEQ ID NO: 1791856 - DNA, 25 bp, Homo sapien
gcttctaccacactgagatgggcaa

SEQ ID NO: 1791857 - DNA, 25 bp, Homo sapien
caacacggcctaaggccttcctgta

SEQ ID NO: 1791858 - DNA, 25 bp, Homo sapien
ggtcctgctgctcccctagatgccc

SEQ ID NO: 1791859 - DNA, 25 bp, Homo sapien
tcaaggttggcccatggcctggtcc

SEQ ID NO: 1791860 - DNA, 25 bp, Homo sapien
ccaggggtggagatgcaagggatga

SEQ ID NO: 1791861 - DNA, 25 bp, Homo sapien
cctagatgccctccaggggtggaga

SEQ ID NO: 1791862 - DNA, 25 bp, Homo sapien
atgaactgctgaccccagcactggg

SEQ ID NO: 1791863 - DNA, 25 bp, Homo sapien
ttggcagcatgaattgctccaaaga

SEQ ID NO: 1791864 - DNA, 25 bp, Homo sapien
atttcttatgcatgaactgctgacc

SEQ ID NO: 1791865 - DNA, 25 bp, Homo sapien
gaattgctccaaagaatcctgattt

SEQ ID NO: 1791866 - DNA, 25 bp, Homo sapien
caagactgagtgcacacgtttccat

SEQ ID NO: 1791867 - DNA, 25 bp, Homo sapien
tggatcaggttgtctgtagccccaa

SEQ ID NO: 1791868 - DNA, 25 bp, Homo sapien
tctgcagatgtcgaggttggattta

SEQ ID NO: 1791869 - DNA, 25 bp, Homo sapien
gtttaagttataccacgaatcctca

SEQ ID NO: 1791870 - DNA, 25 bp, Homo sapien
cattataattccagtcgaccccgtg

SEQ ID NO: 1791871 - DNA, 25 bp, Homo sapien
gtccgctgcggtttccctcactgag

SEQ ID NO: 1791872 - DNA, 25 bp, Homo sapien
ctcactgagattgcagacagctgct

SEQ ID NO: 1791873 - DNA, 25 bp, Homo sapien
tagttaggctctatgccgccattat

SEQ ID NO: 1791874 - DNA, 25 bp, Homo sapien
cgaatcctaggtttataagctttag

SEQ ID NO: 1791875 - DNA, 25 bp, Homo sapien
tataagctttagagctgaatcatgg

SEQ ID NO: 1791876 - DNA, 25 bp, Homo sapien
ggaaataacactgcagggatgcttt

SEQ ID NO: 1791877 - DNA, 25 bp, Homo sapien
cactgcagggatgctttagccccag

SEQ ID NO: 1791878 - DNA, 25 bp, Homo sapien
tgaagggacattccaggatttagtg

SEQ ID NO: 1791879 - DNA, 25 bp, Homo sapien
tccaggatttagtgtacctcctaaa

SEQ ID NO: 1791880 - DNA, 25 bp, Homo sapien
tagtgtacctcctaaatccacaacc

SEQ ID NO: 1791881 - DNA, 25 bp, Homo sapien
tccacaaccactatatgctgctgtt

SEQ ID NO: 1791882 - DNA, 25 bp, Homo sapien
cttgaaggcatagctgttgtgccaa

SEQ ID NO: 1791883 - DNA, 25 bp, Homo sapien
tgatataaggatagaacactcttga

SEQ ID NO: 1791884 - DNA, 25 bp, Homo sapien
gctgctggtctgatataaggataga

SEQ ID NO: 1791885 - DNA, 25 bp, Homo sapien
aggcatagctgttgtgccaacttac

SEQ ID NO: 1791886 - DNA, 25 bp, Homo sapien
gaatccttccactgaatatttgtac

SEQ ID NO: 1791887 - DNA, 25 bp, Homo sapien
taggaatccttccactgaatatttg

SEQ ID NO: 1791888 - DNA, 25 bp, Homo sapien
ttaggaatccttccactgaatattt

SEQ ID NO: 1791889 - DNA, 25 bp, Homo sapien
ggaatccttccactgaatatttgta

SEQ ID NO: 1791890 - DNA, 25 bp, Homo sapien
ctaagttaacgcgtaattctccctg

SEQ ID NO: 1791891 - DNA, 25 bp, Homo sapien
gaaacatctgtgagcagtactaagt

SEQ ID NO: 1791892 - DNA, 25 bp, Homo sapien
gttaacgcgtaattctccctgataa

SEQ ID NO: 1791893 - DNA, 25 bp, Homo sapien
gcagtactaagttaacgcgtaattc

SEQ ID NO: 1791894 - DNA, 25 bp, Homo sapien
ctttgcatggctaggtatgttgaaa

SEQ ID NO: 1791895 - DNA, 25 bp, Homo sapien
catggctaggtatgttgaaatttgt

SEQ ID NO: 1791896 - DNA, 25 bp, Homo sapien
tttgtaatgattggttgtccctgag

SEQ ID NO: 1791897 - DNA, 25 bp, Homo sapien
cagcattgctaccagccaagaatga

SEQ ID NO: 1791898 - DNA, 25 bp, Homo sapien
gaagatttccgtcaagtattctgag

SEQ ID NO: 1791899 - DNA, 25 bp, Homo sapien
gagtgaagatttccgtcaagtattc

SEQ ID NO: 1791900 - DNA, 25 bp, Homo sapien
tccgtcaagtattctgagacatagt

SEQ ID NO: 1791901 - DNA, 25 bp, Homo sapien
atgaatgagtgaagatttccgtcaa

SEQ ID NO: 1791902 - DNA, 25 bp, Homo sapien
tccgctgggtttaatgagacgaagg

SEQ ID NO: 1791903 - DNA, 25 bp, Homo sapien
ccagagtggagacgatgcttgcaag

SEQ ID NO: 1791904 - DNA, 25 bp, Homo sapien
gaggaaccccagagcagactgcagg

SEQ ID NO: 1791905 - DNA, 25 bp, Homo sapien
gaattccagtgctatgaggtctggg

SEQ ID NO: 1791906 - DNA, 25 bp, Homo sapien
agcactgcctcattctggatttctg

SEQ ID NO: 1791907 - DNA, 25 bp, Homo sapien
aagcactgcctcattctggatttct

SEQ ID NO: 1791908 - DNA, 25 bp, Homo sapien
agaagcactgcctcattctggattt

SEQ ID NO: 1791909 - DNA, 25 bp, Homo sapien
gaagcactgcctcattctggatttc

SEQ ID NO: 1791910 - DNA, 25 bp, Homo sapien
ttactgacacgaaaagctgccttgg

SEQ ID NO: 1791911 - DNA, 25 bp, Homo sapien
ccagcggcttggtagcttttgacca

SEQ ID NO: 1791912 - DNA, 25 bp, Homo sapien
tccatcaggtctgggcaggtgaaat

SEQ ID NO: 1791913 - DNA, 25 bp, Homo sapien
gagacaccggaaaatgtgctgatgc

SEQ ID NO: 1791914 - DNA, 25 bp, Homo sapien
cgaacatagcgccacgggtactgct

SEQ ID NO: 1791915 - DNA, 25 bp, Homo sapien
cgtctaagctagtgcagcacgaaca

SEQ ID NO: 1791916 - DNA, 25 bp, Homo sapien
cacgggtactgctttgttggcaaag

SEQ ID NO: 1791917 - DNA, 25 bp, Homo sapien
tagtgcagcacgaacatagcgccac

SEQ ID NO: 1791918 - DNA, 25 bp, Homo sapien
aatcaataccagcagccactgaagg

SEQ ID NO: 1791919 - DNA, 25 bp, Homo sapien
tgaaggtcattgaacacgggcatgg

SEQ ID NO: 1791920 - DNA, 25 bp, Homo sapien
cacgggcatggcaatatctaagtgt

SEQ ID NO: 1791921 - DNA, 25 bp, Homo sapien
tggaaatcaataccagcagccactg

SEQ ID NO: 1791922 - DNA, 25 bp, Homo sapien
gtgcatatgtctgaagagaagcagc

SEQ ID NO: 1791923 - DNA, 25 bp, Homo sapien
tgcatatgtctgaagagaagcagct

SEQ ID NO: 1791924 - DNA, 25 bp, Homo sapien
ctgttggaaagccttggtgtgatga

SEQ ID NO: 1791925 - DNA, 25 bp, Homo sapien
tgttggaaagccttggtgtgatgaa

SEQ ID NO: 1791926 - DNA, 25 bp, Homo sapien
aggtaatcctaccagtcctgcacgg

SEQ ID NO: 1791927 - DNA, 25 bp, Homo sapien
tcctgtttccagaacgttcgcatgc

SEQ ID NO: 1791928 - DNA, 25 bp, Homo sapien
cctcgtactccagccaaaggaaagt

SEQ ID NO: 1791929 - DNA, 25 bp, Homo sapien
tgtttagtctcccttagcctgccca

SEQ ID NO: 1791930 - DNA, 25 bp, Homo sapien
tcatccacttcgcacagaggaattg

SEQ ID NO: 1791931 - DNA, 25 bp, Homo sapien
gcagatcggaggctaggaaagtccc

SEQ ID NO: 1791932 - DNA, 25 bp, Homo sapien
caggctccactcagtctagttgcaa

SEQ ID NO: 1791933 - DNA, 25 bp, Homo sapien
cagaggaattgattctcggaaccag

SEQ ID NO: 1791934 - DNA, 25 bp, Homo sapien
tctccctcctctaggagagtgcctt

SEQ ID NO: 1791935 - DNA, 25 bp, Homo sapien
ctcctctaggagagtgccttcctgg

SEQ ID NO: 1791936 - DNA, 25 bp, Homo sapien
tcctctaggagagtgccttcctgga

SEQ ID NO: 1791937 - DNA, 25 bp, Homo sapien
gatggtaacaatccccacggagtct

SEQ ID NO: 1791938 - DNA, 25 bp, Homo sapien
ggagtctttccacaaataggtaaca

SEQ ID NO: 1791939 - DNA, 25 bp, Homo sapien
tattgaaggtccactcgatagagag

SEQ ID NO: 1791940 - DNA, 25 bp, Homo sapien
gaatcctctgcggtcttgccagtga

SEQ ID NO: 1791941 - DNA, 25 bp, Homo sapien
agacttgcgaatgattgtgtgagga

SEQ ID NO: 1791942 - DNA, 25 bp, Homo sapien
tacgtattcctggtagacttgcgaa

SEQ ID NO: 1791943 - DNA, 25 bp, Homo sapien
tgcttgcatttctccgtctacgtat

SEQ ID NO: 1791944 - DNA, 25 bp, Homo sapien
gcagagatttccagaaggcactaag

SEQ ID NO: 1791945 - DNA, 25 bp, Homo sapien
catggcctctaagtgccacatggaa

SEQ ID NO: 1791946 - DNA, 25 bp, Homo sapien
gatgacatggccttagtttgcccta

SEQ ID NO: 1791947 - DNA, 25 bp, Homo sapien
gaaaatgcagtctaactttctcagt

SEQ ID NO: 1791948 - DNA, 25 bp, Homo sapien
tcacccagagtgagagctgatcctt

SEQ ID NO: 1791949 - DNA, 25 bp, Homo sapien
ggctcttcatcagcagatctggcaa

SEQ ID NO: 1791950 - DNA, 25 bp, Homo sapien
tgtcttggttagagccgcctgggaa

SEQ ID NO: 1791951 - DNA, 25 bp, Homo sapien
gcagcgtctgcacagtagcttgcag

SEQ ID NO: 1791952 - DNA, 25 bp, Homo sapien
ggaagaggagaggctcttcatcagc

SEQ ID NO: 1791953 - DNA, 25 bp, Homo sapien
gcggcgctcgcaggtcgggcgggga

SEQ ID NO: 1791954 - DNA, 25 bp, Homo sapien
gacggcttcgcatgcccgggcggcg

SEQ ID NO: 1791955 - DNA, 25 bp, Homo sapien
gggagggacggcttcgcatgcccgg

SEQ ID NO: 1791956 - DNA, 25 bp, Homo sapien
gagggacggcttcgcatgcccgggc

SEQ ID NO: 1791957 - DNA, 25 bp, Homo sapien
cagaaactcctctgcgcgctgatgt

SEQ ID NO: 1791958 - DNA, 25 bp, Homo sapien
cctgaaaagcgcatctgcagaacgg

SEQ ID NO: 1791959 - DNA, 25 bp, Homo sapien
aagcggtggctacaactcccgggtg

SEQ ID NO: 1791960 - DNA, 25 bp, Homo sapien
tttaccccgtgacggaagagccaca

SEQ ID NO: 1791961 - DNA, 25 bp, Homo sapien
tccgaggagcggaatgaattgacca

SEQ ID NO: 1791962 - DNA, 25 bp, Homo sapien
tagagcgttcccaagcttccggctt

SEQ ID NO: 1791963 - DNA, 25 bp, Homo sapien
gatccagctcattgtttccgaggag

SEQ ID NO: 1791964 - DNA, 25 bp, Homo sapien
gagcgccgttctcccagttagagcg

SEQ ID NO: 1791965 - DNA, 25 bp, Homo sapien
ctgcgggtggtacaaagggcgcctt

SEQ ID NO: 1791966 - DNA, 25 bp, Homo sapien
gcgggtggtacaaagggcgccttga

SEQ ID NO: 1791967 - DNA, 25 bp, Homo sapien
tggtacaaagggcgccttgaggacc

SEQ ID NO: 1791968 - DNA, 25 bp, Homo sapien
tacaaagggcgccttgaggaccaga

SEQ ID NO: 1791969 - DNA, 25 bp, Homo sapien
cccacactcggtgatttcgaaaata

SEQ ID NO: 1791970 - DNA, 25 bp, Homo sapien
caaacacccacactcggtgatttcg

SEQ ID NO: 1791971 - DNA, 25 bp, Homo sapien
aaaatacgtgcagtagcctcggcca

SEQ ID NO: 1791972 - DNA, 25 bp, Homo sapien
gatttcgaaaatacgtgcagtagcc

SEQ ID NO: 1791973 - DNA, 25 bp, Homo sapien
ctaaaccaactctcagtctgagatg

SEQ ID NO: 1791974 - DNA, 25 bp, Homo sapien
atagttctgtatccaatctgttcaa

SEQ ID NO: 1791975 - DNA, 25 bp, Homo sapien
ctcagtctgagatggtcctcgcggg

SEQ ID NO: 1791976 - DNA, 25 bp, Homo sapien
atatagttctgtatccaatctgttc

SEQ ID NO: 1791977 - DNA, 25 bp, Homo sapien
tggtggcttagaattgggacctcaa

SEQ ID NO: 1791978 - DNA, 25 bp, Homo sapien
ctgagagagtcaaacatcaacccgt

SEQ ID NO: 1791979 - DNA, 25 bp, Homo sapien
catcaacccgttacttttctctctg

SEQ ID NO: 1791980 - DNA, 25 bp, Homo sapien
ctttagtcaggtggtttggtggctt

SEQ ID NO: 1791981 - DNA, 25 bp, Homo sapien
tgctttgccctttagcagaggactt

SEQ ID NO: 1791982 - DNA, 25 bp, Homo sapien
tttgccctttagcagaggacttggg

SEQ ID NO: 1791983 - DNA, 25 bp, Homo sapien
acttggggggctgctacacaaggat

SEQ ID NO: 1791984 - DNA, 25 bp, Homo sapien
tgttgactgtggactgctactgatg

SEQ ID NO: 1791985 - DNA, 25 bp, Homo sapien
aagctggtgcccctaattcagggtg

SEQ ID NO: 1791986 - DNA, 25 bp, Homo sapien
taagcctgtattcggtgacagtcac

SEQ ID NO: 1791987 - DNA, 25 bp, Homo sapien
tgccaccaaggacgagcagaatcgg

SEQ ID NO: 1791988 - DNA, 25 bp, Homo sapien
taacttctttgaactacagcctgaa

SEQ ID NO: 1791989 - DNA, 25 bp, Homo sapien
tcatcttcaaagcacaccatatgtg

SEQ ID NO: 1791990 - DNA, 25 bp, Homo sapien
gacagtccagagctatgtataaact

SEQ ID NO: 1791991 - DNA, 25 bp, Homo sapien
agagaagagaaccttggttaaatca

SEQ ID NO: 1791992 - DNA, 25 bp, Homo sapien
gagaaccttggttaaatcacagttc

SEQ ID NO: 1791993 - DNA, 25 bp, Homo sapien
ttcctggaccaccaatcaaagggag

SEQ ID NO: 1791994 - DNA, 25 bp, Homo sapien
tattggtcaggaattatcctaggca

SEQ ID NO: 1791995 - DNA, 25 bp, Homo sapien
accttaccgatcacatctccatgga

SEQ ID NO: 1791996 - DNA, 25 bp, Homo sapien
gaaactgtctctcttgtattggtca

SEQ ID NO: 1791997 - DNA, 25 bp, Homo sapien
taatttcagagaggtgatacaatcc

SEQ ID NO: 1791998 - DNA, 25 bp, Homo sapien
ggtaattcggtcattcattcggagg

SEQ ID NO: 1791999 - DNA, 25 bp, Homo sapien
gacctacaggatagcataaaatctg

SEQ ID NO: 1792000 - DNA, 25 bp, Homo sapien
gatttgccaatgtgttactgatgac

SEQ ID NO: 1792001 - DNA, 25 bp, Homo sapien
tcaaaccatgaagtcgcaaaggcat

SEQ ID NO: 1792002 - DNA, 25 bp, Homo sapien
ttcaaaccatgaagtcgcaaaggca

SEQ ID NO: 1792003 - DNA, 25 bp, Homo sapien
tttgaatccctctgtgctatggagg

SEQ ID NO: 1792004 - DNA, 25 bp, Homo sapien
ctgagctctgctgaggttataggtt

SEQ ID NO: 1792005 - DNA, 25 bp, Homo sapien
ggttataggttatccagagctttat

SEQ ID NO: 1792006 - DNA, 25 bp, Homo sapien
cagagttggtctaatgctttgaatc

SEQ ID NO: 1792007 - DNA, 25 bp, Homo sapien
gactagtggtgataagctatcatca

SEQ ID NO: 1792008 - DNA, 25 bp, Homo sapien
gctacttcttggtacaacagaaaac

SEQ ID NO: 1792009 - DNA, 25 bp, Homo sapien
gctatcatcaccactgtaccaatca

SEQ ID NO: 1792010 - DNA, 25 bp, Homo sapien
cctcatatccggtctgcttattcct

SEQ ID NO: 1792011 - DNA, 25 bp, Homo sapien
tctttagacgtttcctctccagaag

SEQ ID NO: 1792012 - DNA, 25 bp, Homo sapien
aaacaacccttgccaaatgaaatct

SEQ ID NO: 1792013 - DNA, 25 bp, Homo sapien
atctttagacgtttcctctccagaa

SEQ ID NO: 1792014 - DNA, 25 bp, Homo sapien
acaacccttgccaaatgaaatcttc

SEQ ID NO: 1792015 - DNA, 25 bp, Homo sapien
ttctcaactttcttcggcagccgga

SEQ ID NO: 1792016 - DNA, 25 bp, Homo sapien
catcaggatcactgttctcaacttt

SEQ ID NO: 1792017 - DNA, 25 bp, Homo sapien
ttcggcagccggaaagagataaaca

SEQ ID NO: 1792018 - DNA, 25 bp, Homo sapien
tcaggatcactgttctcaactttct

SEQ ID NO: 1792019 - DNA, 25 bp, Homo sapien
tcccctcttgcacaaatactgaagg

SEQ ID NO: 1792020 - DNA, 25 bp, Homo sapien
cctccagttggaataagtgggtgtg

SEQ ID NO: 1792021 - DNA, 25 bp, Homo sapien
gagtgacagtgtttacatagagccc

SEQ ID NO: 1792022 - DNA, 25 bp, Homo sapien
cccgatggccatagagggagtgaca

SEQ ID NO: 1792023 - DNA, 25 bp, Homo sapien
cctcaagaatgtgtcattgacatac

SEQ ID NO: 1792024 - DNA, 25 bp, Homo sapien
caggatacttaacacaaacaacaga

SEQ ID NO: 1792025 - DNA, 25 bp, Homo sapien
aagtggcctcaacaagcttctgcgc

SEQ ID NO: 1792026 - DNA, 25 bp, Homo sapien
ggagaagtgaaacctcaagaatgtg

SEQ ID NO: 1792027 - DNA, 25 bp, Homo sapien
gaaggcaatgataacatcagatgtg

SEQ ID NO: 1792028 - DNA, 25 bp, Homo sapien
tgtggttgaaggcaatgataacatc

SEQ ID NO: 1792029 - DNA, 25 bp, Homo sapien
ggttgaaggcaatgataacatcaga

SEQ ID NO: 1792030 - DNA, 25 bp, Homo sapien
gataacatcagatgtgatttcagtg

SEQ ID NO: 1792031 - DNA, 25 bp, Homo sapien
tggcaaggccatgcgatccaaacac

SEQ ID NO: 1792032 - DNA, 25 bp, Homo sapien
gcacggtaaacaggtcgctgcagcc

SEQ ID NO: 1792033 - DNA, 25 bp, Homo sapien
taaggcgttattactgcatccagct

SEQ ID NO: 1792034 - DNA, 25 bp, Homo sapien
cacatgacaaacgtgtgggtctggc

SEQ ID NO: 1792035 - DNA, 25 bp, Homo sapien
gggctcgagtgttgaggatgtggga

SEQ ID NO: 1792036 - DNA, 25 bp, Homo sapien
cctgcaatgggagtcccttgttggg

SEQ ID NO: 1792037 - DNA, 25 bp, Homo sapien
gcaaggttgcctgcaatgggagtcc

SEQ ID NO: 1792038 - DNA, 25 bp, Homo sapien
gttgcctgcaatgggagtcccttgt

SEQ ID NO: 1792039 - DNA, 25 bp, Homo sapien
cagccaaactggatttcaagtatga

SEQ ID NO: 1792040 - DNA, 25 bp, Homo sapien
tttcctcatcagagacaccagccaa

SEQ ID NO: 1792041 - DNA, 25 bp, Homo sapien
caagtatgaaattcgtacaaggtgc

SEQ ID NO: 1792042 - DNA, 25 bp, Homo sapien
ctgttgttgaagtgaggccgactgt

SEQ ID NO: 1792043 - DNA, 25 bp, Homo sapien
ttcaggcaattttagtctggctaat

SEQ ID NO: 1792044 - DNA, 25 bp, Homo sapien
gttcaggcaattttagtctggctaa

SEQ ID NO: 1792045 - DNA, 25 bp, Homo sapien
taaagagatgattgaagactgggca

SEQ ID NO: 1792046 - DNA, 25 bp, Homo sapien
tctgctggtatggaacctttgaaat

SEQ ID NO: 1792047 - DNA, 25 bp, Homo sapien
tgacatcttcctacagaaccacaag

SEQ ID NO: 1792048 - DNA, 25 bp, Homo sapien
ccctggtaaatgagaatgtaacttt

SEQ ID NO: 1792049 - DNA, 25 bp, Homo sapien
aatcccctgtgaaatagtctatggc

SEQ ID NO: 1792050 - DNA, 25 bp, Homo sapien
tcacacttgctaggaaaaggctgcc

SEQ ID NO: 1792051 - DNA, 25 bp, Homo sapien
aaaatggatgattcagccaggtgca

SEQ ID NO: 1792052 - DNA, 25 bp, Homo sapien
gctttaaagagagcactgtgggcag

SEQ ID NO: 1792053 - DNA, 25 bp, Homo sapien
ggatgcacaggccagcaatactgag

SEQ ID NO: 1792054 - DNA, 25 bp, Homo sapien
ggttgctcccagacgtaaagtgtgc

SEQ ID NO: 1792055 - DNA, 25 bp, Homo sapien
actcggataagtctcaggatgcaca

SEQ ID NO: 1792056 - DNA, 25 bp, Homo sapien
gatgacactgttgccctccgattag

SEQ ID NO: 1792057 - DNA, 25 bp, Homo sapien
gccagggcaatatccatagatattc

SEQ ID NO: 1792058 - DNA, 25 bp, Homo sapien
gggcaatatccatagatattcactc

SEQ ID NO: 1792059 - DNA, 25 bp, Homo sapien
cagggcaatatccatagatattcac

SEQ ID NO: 1792060 - DNA, 25 bp, Homo sapien
ttcttaagggccagggcaatatcca

SEQ ID NO: 1792061 - DNA, 25 bp, Homo sapien
gatttattcatccacacgttccaca

SEQ ID NO: 1792062 - DNA, 25 bp, Homo sapien
gtgatttattcatccacacgttcca

SEQ ID NO: 1792063 - DNA, 25 bp, Homo sapien
catccacacgttccacagcaccaca

SEQ ID NO: 1792064 - DNA, 25 bp, Homo sapien
attcatccacacgttccacagcacc

SEQ ID NO: 1792065 - DNA, 25 bp, Homo sapien
gataccagatacttccagaatctgg

SEQ ID NO: 1792066 - DNA, 25 bp, Homo sapien
catggtaagttgactgtgagctttt

SEQ ID NO: 1792067 - DNA, 25 bp, Homo sapien
agaatctgggctagatttcatggta

SEQ ID NO: 1792068 - DNA, 25 bp, Homo sapien
taagatgtgttacactgataccaga

SEQ ID NO: 1792069 - DNA, 25 bp, Homo sapien
cccacagactcttctcatcagtctt

SEQ ID NO: 1792070 - DNA, 25 bp, Homo sapien
ccacagactcttctcatcagtcttc

SEQ ID NO: 1792071 - DNA, 25 bp, Homo sapien
tgtgcctaatgtagacatgaaaact

SEQ ID NO: 1792072 - DNA, 25 bp, Homo sapien
cataacttttatgacggtgtgttgt

SEQ ID NO: 1792073 - DNA, 25 bp, Homo sapien
tcacatagagtcagtactatccatg

SEQ ID NO: 1792074 - DNA, 25 bp, Homo sapien
tcgaaaaatgtgacttacagagtac

SEQ ID NO: 1792075 - DNA, 25 bp, Homo sapien
ctttatgtatgttaatctgcagtac

SEQ ID NO: 1792076 - DNA, 25 bp, Homo sapien
aatgggtcatgtgcgattacacttg

SEQ ID NO: 1792077 - DNA, 25 bp, Homo sapien
ggtcatgtgcgattacacttgattc

SEQ ID NO: 1792078 - DNA, 25 bp, Homo sapien
tctgcagtacgcattttctttaatt

SEQ ID NO: 1792079 - DNA, 25 bp, Homo sapien
ggtgagcctgacctataacacaggt

SEQ ID NO: 1792080 - DNA, 25 bp, Homo sapien
taaaggcaaggctctaacccattgt

SEQ ID NO: 1792081 - DNA, 25 bp, Homo sapien
cataggccactgaaagtatcatggg

SEQ ID NO: 1792082 - DNA, 25 bp, Homo sapien
taatgaataagtcagctccagacca

SEQ ID NO: 1792083 - DNA, 25 bp, Homo sapien
tgacacttgtctcgaggtgtaggaa

SEQ ID NO: 1792084 - DNA, 25 bp, Homo sapien
tgtgtactctaaagtgaccccatga

SEQ ID NO: 1792085 - DNA, 25 bp, Homo sapien
gtctgaatgaacctacaataactgg

SEQ ID NO: 1792086 - DNA, 25 bp, Homo sapien
tcagcaggtcagcatttcatgtcaa

SEQ ID NO: 1792087 - DNA, 25 bp, Homo sapien
taacacaatgaagtacaatggcccc

SEQ ID NO: 1792088 - DNA, 25 bp, Homo sapien
gatcctgccggatgtaagcccatca

SEQ ID NO: 1792089 - DNA, 25 bp, Homo sapien
tggccacatcagatcaaaagaaggg

SEQ ID NO: 1792090 - DNA, 25 bp, Homo sapien
tggtgcacatggacaagggaacctc

SEQ ID NO: 1792091 - DNA, 25 bp, Homo sapien
tattatcagggaccccttggcccaa

SEQ ID NO: 1792092 - DNA, 25 bp, Homo sapien
ggctgtgcaagagctagtcctcatc

SEQ ID NO: 1792093 - DNA, 25 bp, Homo sapien
agggaccaccaccagctcttgactg

SEQ ID NO: 1792094 - DNA, 25 bp, Homo sapien
tgatctcttagagcatcctggtctc

SEQ ID NO: 1792095 - DNA, 25 bp, Homo sapien
cctgaattgcaattccatcttggct

SEQ ID NO: 1792096 - DNA, 25 bp, Homo sapien
catcttggctcggtcggataagaag

SEQ ID NO: 1792097 - DNA, 25 bp, Homo sapien
gccctttgaggagagcttcgattcc

SEQ ID NO: 1792098 - DNA, 25 bp, Homo sapien
gagagcttcgattcctccatcctct

SEQ ID NO: 1792099 - DNA, 25 bp, Homo sapien
gatattactatcatccctacttgag

SEQ ID NO: 1792100 - DNA, 25 bp, Homo sapien
ctctgtatgctataataatttccgg

SEQ ID NO: 1792101 - DNA, 25 bp, Homo sapien
aaactggcatttgaacctagacagt

SEQ ID NO: 1792102 - DNA, 25 bp, Homo sapien
gcccagccaggcactatttgaaaca

SEQ ID NO: 1792103 - DNA, 25 bp, Homo sapien
tagagagagagggaagtacccaaac

SEQ ID NO: 1792104 - DNA, 25 bp, Homo sapien
tatacaagctataacccccatcctc

SEQ ID NO: 1792105 - DNA, 25 bp, Homo sapien
ttccgaattgtttagagagagaggg

SEQ ID NO: 1792106 - DNA, 25 bp, Homo sapien
ccccatcctcaaagtttccgaattg

SEQ ID NO: 1792107 - DNA, 25 bp, Homo sapien
agtgaggatttgtttacaagctctt

SEQ ID NO: 1792108 - DNA, 25 bp, Homo sapien
ctgaagtgaggatttgtttacaagc

SEQ ID NO: 1792109 - DNA, 25 bp, Homo sapien
ccttatggaagtactgaagtgagga

SEQ ID NO: 1792110 - DNA, 25 bp, Homo sapien
tggaagtactgaagtgaggatttgt

SEQ ID NO: 1792111 - DNA, 25 bp, Homo sapien
tatggatcagacataagatatctgt

SEQ ID NO: 1792112 - DNA, 25 bp, Homo sapien
taacgaattatgctgctctaagagt

SEQ ID NO: 1792113 - DNA, 25 bp, Homo sapien
tcataatgactattggttatcagcc

SEQ ID NO: 1792114 - DNA, 25 bp, Homo sapien
aatggtaaacctaacgaattatgct

SEQ ID NO: 1792115 - DNA, 25 bp, Homo sapien
tgggcagagctgcttgggcggtaac

SEQ ID NO: 1792116 - DNA, 25 bp, Homo sapien
ggtaaccatgactctgttcctgcct

SEQ ID NO: 1792117 - DNA, 25 bp, Homo sapien
aaaggtgtggttatagtaaatcaca

SEQ ID NO: 1792118 - DNA, 25 bp, Homo sapien
tgcctcatcgcttggactgggtcct

SEQ ID NO: 1792119 - DNA, 25 bp, Homo sapien
ctgcatgtatcagtcttctctggtc

SEQ ID NO: 1792120 - DNA, 25 bp, Homo sapien
gcatgtatcagtcttctctggtctc

SEQ ID NO: 1792121 - DNA, 25 bp, Homo sapien
tgcatgtatcagtcttctctggtct

SEQ ID NO: 1792122 - DNA, 25 bp, Homo sapien
ctgcaacaacgcccctttattaaag

SEQ ID NO: 1792123 - DNA, 25 bp, Homo sapien
actctggggtaatgccgtcccctca

SEQ ID NO: 1792124 - DNA, 25 bp, Homo sapien
ccactctggggtaatgccgtcccct

SEQ ID NO: 1792125 - DNA, 25 bp, Homo sapien
atgtttactgcaacaacgccccttt

SEQ ID NO: 1792126 - DNA, 25 bp, Homo sapien
caggtccccggctgatgcaatgtca

SEQ ID NO: 1792127 - DNA, 25 bp, Homo sapien
tgagctaattcagtttcttgccagg

SEQ ID NO: 1792128 - DNA, 25 bp, Homo sapien
tgcaatgtcacactaactccagaat

SEQ ID NO: 1792129 - DNA, 25 bp, Homo sapien
ccttcgtttgaaccagctgagctaa

SEQ ID NO: 1792130 - DNA, 25 bp, Homo sapien
gaggcttgcaaaggaatttctcatc

SEQ ID NO: 1792131 - DNA, 25 bp, Homo sapien
gctagttgaggcaccttgctgaact

SEQ ID NO: 1792132 - DNA, 25 bp, Homo sapien
cctgagctagttgaggcaccttgct

SEQ ID NO: 1792133 - DNA, 25 bp, Homo sapien
agcaaggcctgagctagttgaggca

SEQ ID NO: 1792134 - DNA, 25 bp, Homo sapien
tgtgcagccaggcaacagctcaaaa

SEQ ID NO: 1792135 - DNA, 25 bp, Homo sapien
cacaaccaggaagttcgcattccat

SEQ ID NO: 1792136 - DNA, 25 bp, Homo sapien
ttactccctgcaagcacgggttaca

SEQ ID NO: 1792137 - DNA, 25 bp, Homo sapien
tgcaagcacgggttacacaaccagg

SEQ ID NO: 1792138 - DNA, 25 bp, Homo sapien
ggaatcaaggcgcagaagagcagca

SEQ ID NO: 1792139 - DNA, 25 bp, Homo sapien
ggcctggggagggataatacattca

SEQ ID NO: 1792140 - DNA, 25 bp, Homo sapien
taaattaaccaatggatagcgcatg

SEQ ID NO: 1792141 - DNA, 25 bp, Homo sapien
taaccaatggatagcgcatgaggcc

SEQ ID NO: 1792142 - DNA, 25 bp, Homo sapien
atacattcacatactagcaggaagg

SEQ ID NO: 1792143 - DNA, 25 bp, Homo sapien
catccgcggtttctgctttagcaaa

SEQ ID NO: 1792144 - DNA, 25 bp, Homo sapien
attgggtcctatgggacagtcattt

SEQ ID NO: 1792145 - DNA, 25 bp, Homo sapien
ttattagttcatccgcggtttctgc

SEQ ID NO: 1792146 - DNA, 25 bp, Homo sapien
caacttgtgtaagtaaagacctctc

SEQ ID NO: 1792147 - DNA, 25 bp, Homo sapien
gctttgaagtgacagcgggggccat

SEQ ID NO: 1792148 - DNA, 25 bp, Homo sapien
cagctttgaagtgacagcgggggcc

SEQ ID NO: 1792149 - DNA, 25 bp, Homo sapien
acagctttgaagtgacagcgggggc

SEQ ID NO: 1792150 - DNA, 25 bp, Homo sapien
aaagtgacagtcctgaaggacagct

SEQ ID NO: 1792151 - DNA, 25 bp, Homo sapien
atttctgagagattccatgtatgtt

SEQ ID NO: 1792152 - DNA, 25 bp, Homo sapien
tttctgagagattccatgtatgtta

SEQ ID NO: 1792153 - DNA, 25 bp, Homo sapien
tgtgcagcgccttccgtagaaatat

SEQ ID NO: 1792154 - DNA, 25 bp, Homo sapien
gctccactcaggcttaagcacatcg

SEQ ID NO: 1792155 - DNA, 25 bp, Homo sapien
acagcctttgctagtctgtgcagcg

SEQ ID NO: 1792156 - DNA, 25 bp, Homo sapien
ggcttaagcacatcgtctgccttca

SEQ ID NO: 1792157 - DNA, 25 bp, Homo sapien
ggatgtggaactttggttacagctg

SEQ ID NO: 1792158 - DNA, 25 bp, Homo sapien
cagctgatggcacttcaagacgcaa

SEQ ID NO: 1792159 - DNA, 25 bp, Homo sapien
ttgagggcaggaacgcctggctgtc

SEQ ID NO: 1792160 - DNA, 25 bp, Homo sapien
acgcctggctgtcgtcttgggatgt

SEQ ID NO: 1792161 - DNA, 25 bp, Homo sapien
gagtctgcgatcgtcttgggtgccc

SEQ ID NO: 1792162 - DNA, 25 bp, Homo sapien
gaaactaaggtcattctgctgccga

SEQ ID NO: 1792163 - DNA, 25 bp, Homo sapien
gacgggtcggtcactatcagagagc

SEQ ID NO: 1792164 - DNA, 25 bp, Homo sapien
tcctggttaaacaagcccatgtggc

SEQ ID NO: 1792165 - DNA, 25 bp, Homo sapien
caaacattaaaagcgaagtcggtct

SEQ ID NO: 1792166 - DNA, 25 bp, Homo sapien
ctgcatggcaaacattaaaagcgaa

SEQ ID NO: 1792167 - DNA, 25 bp, Homo sapien
tggcaaacattaaaagcgaagtcgg

SEQ ID NO: 1792168 - DNA, 25 bp, Homo sapien
catggcaaacattaaaagcgaagtc

SEQ ID NO: 1792169 - DNA, 25 bp, Homo sapien
atagggtgagatgcttattcaaaat

SEQ ID NO: 1792170 - DNA, 25 bp, Homo sapien
aatagataaataaagagccaactaa

SEQ ID NO: 1792171 - DNA, 25 bp, Homo sapien
ggtgagatgcttattcaaaatagat

SEQ ID NO: 1792172 - DNA, 25 bp, Homo sapien
gggtgagatgcttattcaaaataga

SEQ ID NO: 1792173 - DNA, 25 bp, Homo sapien
actaggagcagaggacggaagagcc

SEQ ID NO: 1792174 - DNA, 25 bp, Homo sapien
aaatgactaggagcagaggacggaa

SEQ ID NO: 1792175 - DNA, 25 bp, Homo sapien
taggagcagaggacggaagagccac

SEQ ID NO: 1792176 - DNA, 25 bp, Homo sapien
gcagaggacggaagagccacggctg

SEQ ID NO: 1792177 - DNA, 25 bp, Homo sapien
ctgcctcagccttctaagcggctgg

SEQ ID NO: 1792178 - DNA, 25 bp, Homo sapien
gcctcagccttctaagcggctggga

SEQ ID NO: 1792179 - DNA, 25 bp, Homo sapien
tcagccttctaagcggctgggacta

SEQ ID NO: 1792180 - DNA, 25 bp, Homo sapien
caggcatgcaccaccatacccagct

SEQ ID NO: 1792181 - DNA, 25 bp, Homo sapien
tgtgtcatgcctactccctgttcgc

SEQ ID NO: 1792182 - DNA, 25 bp, Homo sapien
ccatggttggaggcttcctgagacc

SEQ ID NO: 1792183 - DNA, 25 bp, Homo sapien
ccacgttctctcctgacatgtgtca

SEQ ID NO: 1792184 - DNA, 25 bp, Homo sapien
gaatggcctaatatagttactgtgg

SEQ ID NO: 1792185 - DNA, 25 bp, Homo sapien
cctctctagctaagaggcgagggct

SEQ ID NO: 1792186 - DNA, 25 bp, Homo sapien
agtgtagactctgcaacctcatgga

SEQ ID NO: 1792187 - DNA, 25 bp, Homo sapien
ggcactgtgctttagtgttcccagc

SEQ ID NO: 1792188 - DNA, 25 bp, Homo sapien
gcgagggctgtacagaatcttgacc

SEQ ID NO: 1792189 - DNA, 25 bp, Homo sapien
tacagtacgtactcaaacagtgttc

SEQ ID NO: 1792190 - DNA, 25 bp, Homo sapien
taaatgacttgaaactgtaaccctc

SEQ ID NO: 1792191 - DNA, 25 bp, Homo sapien
tattaactggaaaaggctggaagtc

SEQ ID NO: 1792192 - DNA, 25 bp, Homo sapien
tgttcatttggtggataacaaggcc

SEQ ID NO: 1792193 - DNA, 25 bp, Homo sapien
tcagggcagacgcattcgatcagct

SEQ ID NO: 1792194 - DNA, 25 bp, Homo sapien
tgagcaccatgctactttcaagtaa

SEQ ID NO: 1792195 - DNA, 25 bp, Homo sapien
catacaaagaggttcaggagctgtg

SEQ ID NO: 1792196 - DNA, 25 bp, Homo sapien
agtctctatatacctcgtcccacag

SEQ ID NO: 1792197 - DNA, 25 bp, Homo sapien
ggcaacacttgacgcatctgaaaat

SEQ ID NO: 1792198 - DNA, 25 bp, Homo sapien
cattataatcagaggactactggtg

SEQ ID NO: 1792199 - DNA, 25 bp, Homo sapien
aatgtggctataatccttaaagtgg

SEQ ID NO: 1792200 - DNA, 25 bp, Homo sapien
gccaggtaaggaagcagacagacac

SEQ ID NO: 1792201 - DNA, 25 bp, Homo sapien
ctgtggcatgagtgagttaaagtca

SEQ ID NO: 1792202 - DNA, 25 bp, Homo sapien
tccttttggctgtagcatggagaca

SEQ ID NO: 1792203 - DNA, 25 bp, Homo sapien
gtgaggtaaaaccaagccagggcca

SEQ ID NO: 1792204 - DNA, 25 bp, Homo sapien
tggactggacttcttcaagccaaga

SEQ ID NO: 1792205 - DNA, 25 bp, Homo sapien
caatgagaaggatgccttaaacact

SEQ ID NO: 1792206 - DNA, 25 bp, Homo sapien
cttaaacactcctgtcctttccaag

SEQ ID NO: 1792207 - DNA, 25 bp, Homo sapien
gatgccttaaacactcctgtccttt

SEQ ID NO: 1792208 - DNA, 25 bp, Homo sapien
catctttaattatgcccagtgcatc

SEQ ID NO: 1792209 - DNA, 25 bp, Homo sapien
attgaagtggtagatatcctgtatg

SEQ ID NO: 1792210 - DNA, 25 bp, Homo sapien
ggtccctgatgcagtcaaggtaatc

SEQ ID NO: 1792211 - DNA, 25 bp, Homo sapien
tggtccctgatgcagtcaaggtaat

SEQ ID NO: 1792212 - DNA, 25 bp, Homo sapien
ctattgaagtggtagatatcctgta

SEQ ID NO: 1792213 - DNA, 25 bp, Homo sapien
ccaagatgggtaggactgagtttgc

SEQ ID NO: 1792214 - DNA, 25 bp, Homo sapien
aaaattctgatgttctggccccacc

SEQ ID NO: 1792215 - DNA, 25 bp, Homo sapien
gaatttctgaaggtaggatccagct

SEQ ID NO: 1792216 - DNA, 25 bp, Homo sapien
caggtgattccagtgggtagcccag

SEQ ID NO: 1792217 - DNA, 25 bp, Homo sapien
taatgactcaacataggtatactga

SEQ ID NO: 1792218 - DNA, 25 bp, Homo sapien
aaatcagacattcaatatggaggaa

SEQ ID NO: 1792219 - DNA, 25 bp, Homo sapien
tctcctaagaaacaattgaatgtct

SEQ ID NO: 1792220 - DNA, 25 bp, Homo sapien
ggtttgcagtaaaacacgctgttgg

SEQ ID NO: 1792221 - DNA, 25 bp, Homo sapien
gaagcttttctgacccctgatgcga

SEQ ID NO: 1792222 - DNA, 25 bp, Homo sapien
agagagattcgaggatgcggcccct

SEQ ID NO: 1792223 - DNA, 25 bp, Homo sapien
cctgatgcgaactttgaggcaggaa

SEQ ID NO: 1792224 - DNA, 25 bp, Homo sapien
cttgagctcaggtcccttagttggg

SEQ ID NO: 1792225 - DNA, 25 bp, Homo sapien
tagagaatcatgttttccctggagt

SEQ ID NO: 1792226 - DNA, 25 bp, Homo sapien
cgtggccagccttcttaactagttc

SEQ ID NO: 1792227 - DNA, 25 bp, Homo sapien
gatctttctgaagcgctgggtagtg

SEQ ID NO: 1792228 - DNA, 25 bp, Homo sapien
tgtaagtattatgccctgttagcct

SEQ ID NO: 1792229 - DNA, 25 bp, Homo sapien
tggacacaaaacactctgctatggc

SEQ ID NO: 1792230 - DNA, 25 bp, Homo sapien
cttggacacaaaacactctgctatg

SEQ ID NO: 1792231 - DNA, 25 bp, Homo sapien
gacacaaaacactctgctatggcca

SEQ ID NO: 1792232 - DNA, 25 bp, Homo sapien
acacaaaacactctgctatggccac

SEQ ID NO: 1792233 - DNA, 25 bp, Homo sapien
aaaacatagattgctgggttactga

SEQ ID NO: 1792234 - DNA, 25 bp, Homo sapien
cagaattacctggagggactgttaa

SEQ ID NO: 1792235 - DNA, 25 bp, Homo sapien
tgtagtaggtcttagagtagggcct

SEQ ID NO: 1792236 - DNA, 25 bp, Homo sapien
tccaaagaagccgaacctctattct

SEQ ID NO: 1792237 - DNA, 25 bp, Homo sapien
gatagttagtgcaatactgggtata

SEQ ID NO: 1792238 - DNA, 25 bp, Homo sapien
tggatagttagtgcaatactgggta

SEQ ID NO: 1792239 - DNA, 25 bp, Homo sapien
cttggatagttagtgcaatactggg

SEQ ID NO: 1792240 - DNA, 25 bp, Homo sapien
gttagtgcaatactgggtataaatg

SEQ ID NO: 1792241 - DNA, 25 bp, Homo sapien
ctctgaattagggtgtgaggcaagc

SEQ ID NO: 1792242 - DNA, 25 bp, Homo sapien
ctgtgatttctctgaattagggtgt

SEQ ID NO: 1792243 - DNA, 25 bp, Homo sapien
ggtttagaaccatgggatttagctg

SEQ ID NO: 1792244 - DNA, 25 bp, Homo sapien
gggcatcctgcaatcgcctgatgtt

SEQ ID NO: 1792245 - DNA, 25 bp, Homo sapien
agagtttcctgacgctccctgaaga

SEQ ID NO: 1792246 - DNA, 25 bp, Homo sapien
ccctgaagaatttggccagtatctt

SEQ ID NO: 1792247 - DNA, 25 bp, Homo sapien
tttcaagagataggaccccagaggc

SEQ ID NO: 1792248 - DNA, 25 bp, Homo sapien
gagatgatacttgagaatccgctga

SEQ ID NO: 1792249 - DNA, 25 bp, Homo sapien
taaccggaccgcgtgctcgtgtttc

SEQ ID NO: 1792250 - DNA, 25 bp, Homo sapien
gactcgctgcattgtgtctatagca

SEQ ID NO: 1792251 - DNA, 25 bp, Homo sapien
tagcatcaagcaccacatcatagcc

SEQ ID NO: 1792252 - DNA, 25 bp, Homo sapien
tcattgatatgccaggcgactcgct

SEQ ID NO: 1792253 - DNA, 25 bp, Homo sapien
gtcactacacctgcaaccctgccgg

SEQ ID NO: 1792254 - DNA, 25 bp, Homo sapien
tcactacacctgcaaccctgccggg

SEQ ID NO: 1792255 - DNA, 25 bp, Homo sapien
cactacacctgcaaccctgccgggc

SEQ ID NO: 1792256 - DNA, 25 bp, Homo sapien
actacacctgcaaccctgccgggca

SEQ ID NO: 1792257 - DNA, 25 bp, Homo sapien
gattacaggcatgaaccatcactcc

SEQ ID NO: 1792258 - DNA, 25 bp, Homo sapien
ggagtgcaatggcatccacctcccg

SEQ ID NO: 1792259 - DNA, 25 bp, Homo sapien
agggattacaggcatgaaccatcac

SEQ ID NO: 1792260 - DNA, 25 bp, Homo sapien
gagtgcaatggcatccacctcccgg

SEQ ID NO: 1792261 - DNA, 25 bp, Homo sapien
cagaaatggagtattagtttgagcc

SEQ ID NO: 1792262 - DNA, 25 bp, Homo sapien
gaaaatattcacaagcaccgtttaa

SEQ ID NO: 1792263 - DNA, 25 bp, Homo sapien
gagccagagtctgatttagtaatga

SEQ ID NO: 1792264 - DNA, 25 bp, Homo sapien
cttcagaatatcaagcagcttcaca

SEQ ID NO: 1792265 - DNA, 25 bp, Homo sapien
cggaaggttccctcaagcaccagtt

SEQ ID NO: 1792266 - DNA, 25 bp, Homo sapien
tgtcgaagaggaagagcgtccgctc

SEQ ID NO: 1792267 - DNA, 25 bp, Homo sapien
cttcttcgtgatgagcagcagcttg

SEQ ID NO: 1792268 - DNA, 25 bp, Homo sapien
cagttccccgtagctggtcaggtct

SEQ ID NO: 1792269 - DNA, 25 bp, Homo sapien
gctcttttggaatcacctccacaag

SEQ ID NO: 1792270 - DNA, 25 bp, Homo sapien
tggaatcacctccacaagcatgagg

SEQ ID NO: 1792271 - DNA, 25 bp, Homo sapien
gacgctgaagctgagcggctctttt

SEQ ID NO: 1792272 - DNA, 25 bp, Homo sapien
ttcttgtagtggaagacgctgaagc

SEQ ID NO: 1792273 - DNA, 25 bp, Homo sapien
gccagaacgctctcaaaaagccaca

SEQ ID NO: 1792274 - DNA, 25 bp, Homo sapien
aaatgaccatgtggccagaacgctc

SEQ ID NO: 1792275 - DNA, 25 bp, Homo sapien
cacatggtacacagcactcatcatt

SEQ ID NO: 1792276 - DNA, 25 bp, Homo sapien
ctgatgagatgggaaatgaccatgt

SEQ ID NO: 1792277 - DNA, 25 bp, Homo sapien
gacgagatgtagacagtcagacaac

SEQ ID NO: 1792278 - DNA, 25 bp, Homo sapien
ctgccaagacgagatgtagacagtc

SEQ ID NO: 1792279 - DNA, 25 bp, Homo sapien
agtcagacaacttgattccaccacc

SEQ ID NO: 1792280 - DNA, 25 bp, Homo sapien
gatgtagacagtcagacaacttgat

SEQ ID NO: 1792281 - DNA, 25 bp, Homo sapien
tggaatcttggctgcatggttctcc

SEQ ID NO: 1792282 - DNA, 25 bp, Homo sapien
agaatcagtctctttaggtgcagaa

SEQ ID NO: 1792283 - DNA, 25 bp, Homo sapien
ttggctgcatggttctccagaatca

SEQ ID NO: 1792284 - DNA, 25 bp, Homo sapien
gaacccagaggcgtttgtcttgctg

SEQ ID NO: 1792285 - DNA, 25 bp, Homo sapien
caaatgattcttgtatctctctccc

SEQ ID NO: 1792286 - DNA, 25 bp, Homo sapien
gattcttgtatctctctcccatttc

SEQ ID NO: 1792287 - DNA, 25 bp, Homo sapien
ttgtatctctctcccatttcactgt

SEQ ID NO: 1792288 - DNA, 25 bp, Homo sapien
gtatctctctcccatttcactgtgc

SEQ ID NO: 1792289 - DNA, 25 bp, Homo sapien
gcgtgccatcatgccgggtgctaac

SEQ ID NO: 1792290 - DNA, 25 bp, Homo sapien
cgtgccatcatgccgggtgctaact

SEQ ID NO: 1792291 - DNA, 25 bp, Homo sapien
atcatgccgggtgctaacttttata

SEQ ID NO: 1792292 - DNA, 25 bp, Homo sapien
gccatcatgccgggtgctaactttt

SEQ ID NO: 1792293 - DNA, 25 bp, Homo sapien
tccactcaacgcaattgaacacttt

SEQ ID NO: 1792294 - DNA, 25 bp, Homo sapien
gatgatgagactacacctttaccaa

SEQ ID NO: 1792295 - DNA, 25 bp, Homo sapien
cattccctatcctttaagactgagg

SEQ ID NO: 1792296 - DNA, 25 bp, Homo sapien
tccacaacacctgggttatactctg

SEQ ID NO: 1792297 - DNA, 25 bp, Homo sapien
tgtgaacgcgtccagattcctcaga

SEQ ID NO: 1792298 - DNA, 25 bp, Homo sapien
tttcccagtgtgaacgcgtccagat

SEQ ID NO: 1792299 - DNA, 25 bp, Homo sapien
gcagtaatttcccagtgtgaacgcg

SEQ ID NO: 1792300 - DNA, 25 bp, Homo sapien
cttgtccccaaagttacactctcag

SEQ ID NO: 1792301 - DNA, 25 bp, Homo sapien
gaaagtagagctgtaattccaattg

SEQ ID NO: 1792302 - DNA, 25 bp, Homo sapien
aagtagagctgtaattccaattgct

SEQ ID NO: 1792303 - DNA, 25 bp, Homo sapien
ccaaatctcaacacagatcttatcc

SEQ ID NO: 1792304 - DNA, 25 bp, Homo sapien
gagaaagtagagctgtaattccaat

SEQ ID NO: 1792305 - DNA, 25 bp, Homo sapien
tggcatccatttcaaggattgcttg

SEQ ID NO: 1792306 - DNA, 25 bp, Homo sapien
ccatttcaaggattgcttgcttggc

SEQ ID NO: 1792307 - DNA, 25 bp, Homo sapien
gcatccatttcaaggattgcttgct

SEQ ID NO: 1792308 - DNA, 25 bp, Homo sapien
gaatggcatccatttcaaggattgc

SEQ ID NO: 1792309 - DNA, 25 bp, Homo sapien
catttctcgggtctgttggatgcga

SEQ ID NO: 1792310 - DNA, 25 bp, Homo sapien
ctgggcatcatttctcgggtctgtt

SEQ ID NO: 1792311 - DNA, 25 bp, Homo sapien
ctagcactccgctggggagctctgg

SEQ ID NO: 1792312 - DNA, 25 bp, Homo sapien
tctgttggatgcgagatgggagcct

SEQ ID NO: 1792313 - DNA, 25 bp, Homo sapien
tatggagcagaaccttctttagagc

SEQ ID NO: 1792314 - DNA, 25 bp, Homo sapien
ttcttctcagccgatatggagcaga

SEQ ID NO: 1792315 - DNA, 25 bp, Homo sapien
gaaccttctttagagccgaacagtg

SEQ ID NO: 1792316 - DNA, 25 bp, Homo sapien
gtgctttcgtccctccctcaggact

SEQ ID NO: 1792317 - DNA, 25 bp, Homo sapien
cttcaaaactttatgtgaccgtgag

SEQ ID NO: 1792318 - DNA, 25 bp, Homo sapien
caaaactttatgtgaccgtgaggaa

SEQ ID NO: 1792319 - DNA, 25 bp, Homo sapien
tcaaaactttatgtgaccgtgagga

SEQ ID NO: 1792320 - DNA, 25 bp, Homo sapien
gtcttcaaaactttatgtgaccgtg

SEQ ID NO: 1792321 - DNA, 25 bp, Homo sapien
aataaggattcaatatgcaactttg

SEQ ID NO: 1792322 - DNA, 25 bp, Homo sapien
taaggattcaatatgcaactttgta

SEQ ID NO: 1792323 - DNA, 25 bp, Homo sapien
taaaataaggattcaatatgcaact

SEQ ID NO: 1792324 - DNA, 25 bp, Homo sapien
aaggattcaatatgcaactttgtat

SEQ ID NO: 1792325 - DNA, 25 bp, Homo sapien
gggcccctcgcccttgtgaatgaag

SEQ ID NO: 1792326 - DNA, 25 bp, Homo sapien
gcagcagaaccatattcttagaagg

SEQ ID NO: 1792327 - DNA, 25 bp, Homo sapien
catattcttagaagggggcccctcg

SEQ ID NO: 1792328 - DNA, 25 bp, Homo sapien
tcgcccttgtgaatgaaggctcgcg

SEQ ID NO: 1792329 - DNA, 25 bp, Homo sapien
gaaaccctttttgcgtaagatgtca

SEQ ID NO: 1792330 - DNA, 25 bp, Homo sapien
aaaccctttttgcgtaagatgtcat

SEQ ID NO: 1792331 - DNA, 25 bp, Homo sapien
cattaaactcgccttcgtgatcctc

SEQ ID NO: 1792332 - DNA, 25 bp, Homo sapien
tcctcattaaactcgccttcgtgat

SEQ ID NO: 1792333 - DNA, 25 bp, Homo sapien
ctcctcattaaactcgccttcgtga

SEQ ID NO: 1792334 - DNA, 25 bp, Homo sapien
taaactcgccttcgtgatcctccag

SEQ ID NO: 1792335 - DNA, 25 bp, Homo sapien
caggtaaacaaatatcgtgggcaga

SEQ ID NO: 1792336 - DNA, 25 bp, Homo sapien
cactgaggtgctgatttatcagggc

SEQ ID NO: 1792337 - DNA, 25 bp, Homo sapien
acaagccctcgccagctttggtaac

SEQ ID NO: 1792338 - DNA, 25 bp, Homo sapien
tccttccaggtaaacaaatatcgtg

SEQ ID NO: 1792339 - DNA, 25 bp, Homo sapien
aggttcatgccgccaaacactcaga

SEQ ID NO: 1792340 - DNA, 25 bp, Homo sapien
gttcatgccgccaaacactcagagg

SEQ ID NO: 1792341 - DNA, 25 bp, Homo sapien
tgtcaggttcatgccgccaaacact

SEQ ID NO: 1792342 - DNA, 25 bp, Homo sapien
catctcttgtcaggttcatgccgcc

SEQ ID NO: 1792343 - DNA, 25 bp, Homo sapien
gagagcaacacgtcttcaatcggct

SEQ ID NO: 1792344 - DNA, 25 bp, Homo sapien
gccgcactgaggagagcaacacgtc

SEQ ID NO: 1792345 - DNA, 25 bp, Homo sapien
ccaggtctgtcgtaattgctccaga

SEQ ID NO: 1792346 - DNA, 25 bp, Homo sapien
ttcggcatgggatagcagctgtagc

SEQ ID NO: 1792347 - DNA, 25 bp, Homo sapien
ggaagatggaaacatatcaactgaa

SEQ ID NO: 1792348 - DNA, 25 bp, Homo sapien
gaggaagatggaaacatatcaactg

SEQ ID NO: 1792349 - DNA, 25 bp, Homo sapien
ctgaggaagatggaaacatatcaac

SEQ ID NO: 1792350 - DNA, 25 bp, Homo sapien
gatggaaacatatcaactgaatcac

SEQ ID NO: 1792351 - DNA, 25 bp, Homo sapien
gctggggagatccttcctctctaga

SEQ ID NO: 1792352 - DNA, 25 bp, Homo sapien
tggggagatccttcctctctagaaa

SEQ ID NO: 1792353 - DNA, 25 bp, Homo sapien
ctggggagatccttcctctctagaa

SEQ ID NO: 1792354 - DNA, 25 bp, Homo sapien
ggggagatccttcctctctagaaac

SEQ ID NO: 1792355 - DNA, 25 bp, Homo sapien
tttctgagagctccacccgctcgaa

SEQ ID NO: 1792356 - DNA, 25 bp, Homo sapien
cacgctgatcatggtagaactgcta

SEQ ID NO: 1792357 - DNA, 25 bp, Homo sapien
ctgatctggtgatcggtccagatgt

SEQ ID NO: 1792358 - DNA, 25 bp, Homo sapien
tggtgatcggtccagatgtttctga

SEQ ID NO: 1792359 - DNA, 25 bp, Homo sapien
ccgtcggctgggaaacaaggcttgc

SEQ ID NO: 1792360 - DNA, 25 bp, Homo sapien
gctgcaagggcgactagaagtgcta

SEQ ID NO: 1792361 - DNA, 25 bp, Homo sapien
cctgacaatcctgtgaccagagctg

SEQ ID NO: 1792362 - DNA, 25 bp, Homo sapien
tgaggaggaaaatgacggcacgaac

SEQ ID NO: 1792363 - DNA, 25 bp, Homo sapien
ctgttttggggctgttctgcagttc

SEQ ID NO: 1792364 - DNA, 25 bp, Homo sapien
tgcagttccctagttctgtcactag

SEQ ID NO: 1792365 - DNA, 25 bp, Homo sapien
gggcatgtgttgctctccccagcac

SEQ ID NO: 1792366 - DNA, 25 bp, Homo sapien
tctgtcactagttcctatttcagga

SEQ ID NO: 1792367 - DNA, 25 bp, Homo sapien
tcttcccgcttagcaaccattagtt

SEQ ID NO: 1792368 - DNA, 25 bp, Homo sapien
catggtctatgtcatcaatagtcaa

SEQ ID NO: 1792369 - DNA, 25 bp, Homo sapien
cctctttgtgaaggctaactctggg

SEQ ID NO: 1792370 - DNA, 25 bp, Homo sapien
aactgatgttatcatagacatggtc

SEQ ID NO: 1792371 - DNA, 25 bp, Homo sapien
gtttgtgcgtaaagagagcccttac

SEQ ID NO: 1792372 - DNA, 25 bp, Homo sapien
gagggtgccatctgtttgtgcgtaa

SEQ ID NO: 1792373 - DNA, 25 bp, Homo sapien
ggtgccatctgtttgtgcgtaaaga

SEQ ID NO: 1792374 - DNA, 25 bp, Homo sapien
tctgtttgtgcgtaaagagagccct

SEQ ID NO: 1792375 - DNA, 25 bp, Homo sapien
tcttgggaaacaaatggcctcaggc

SEQ ID NO: 1792376 - DNA, 25 bp, Homo sapien
ggcatagacaagttaccactgggag

SEQ ID NO: 1792377 - DNA, 25 bp, Homo sapien
ttgctcacaggaaacgctgccagga

SEQ ID NO: 1792378 - DNA, 25 bp, Homo sapien
taatcttctgactgtactgccgagc

SEQ ID NO: 1792379 - DNA, 25 bp, Homo sapien
ccaggtctttgtgcatggatttctg

SEQ ID NO: 1792380 - DNA, 25 bp, Homo sapien
gccaggtctttgtgcatggatttct

SEQ ID NO: 1792381 - DNA, 25 bp, Homo sapien
caggtctttgtgcatggatttctga

SEQ ID NO: 1792382 - DNA, 25 bp, Homo sapien
agccaggtctttgtgcatggatttc

SEQ ID NO: 1792383 - DNA, 25 bp, Homo sapien
atctgaaatctgaaaaccgctctcc

SEQ ID NO: 1792384 - DNA, 25 bp, Homo sapien
tgaaatctgaaaaccgctctcccct

SEQ ID NO: 1792385 - DNA, 25 bp, Homo sapien
aggtgtgtccgttttaaggacatct

SEQ ID NO: 1792386 - DNA, 25 bp, Homo sapien
atctgaaaaccgctctcccctctta

SEQ ID NO: 1792387 - DNA, 25 bp, Homo sapien
acaaagcttgagtgtcagtgttctc

SEQ ID NO: 1792388 - DNA, 25 bp, Homo sapien
tgacaaagcttgagtgtcagtgttc

SEQ ID NO: 1792389 - DNA, 25 bp, Homo sapien
tttgagatgacaaagcttgagtgtc

SEQ ID NO: 1792390 - DNA, 25 bp, Homo sapien
aaagcttgagtgtcagtgttctcac

SEQ ID NO: 1792391 - DNA, 25 bp, Homo sapien
tgagcatctcattcccatagtcctg

SEQ ID NO: 1792392 - DNA, 25 bp, Homo sapien
aaaaaagtctaaccatgagcatctc

SEQ ID NO: 1792393 - DNA, 25 bp, Homo sapien
cagagatcagtgttaaattttggcc

SEQ ID NO: 1792394 - DNA, 25 bp, Homo sapien
tccacaaaggagtctaactaaagca

SEQ ID NO: 1792395 - DNA, 25 bp, Homo sapien
agaaaaggagtcatcatgtcaactg

SEQ ID NO: 1792396 - DNA, 25 bp, Homo sapien
gtcatcatgtcaactgacggaaagc

SEQ ID NO: 1792397 - DNA, 25 bp, Homo sapien
agtcatcatgtcaactgacggaaag

SEQ ID NO: 1792398 - DNA, 25 bp, Homo sapien
aaaggagtcatcatgtcaactgacg

SEQ ID NO: 1792399 - DNA, 25 bp, Homo sapien
acggagaagtctggagaatcggtcc

SEQ ID NO: 1792400 - DNA, 25 bp, Homo sapien
gaatcggtccattcgattacgacgt

SEQ ID NO: 1792401 - DNA, 25 bp, Homo sapien
tggagaatcggtccattcgattacg

SEQ ID NO: 1792402 - DNA, 25 bp, Homo sapien
agtctggagaatcggtccattcgat

SEQ ID NO: 1792403 - DNA, 25 bp, Homo sapien
gctcgagagtttcggcaggtgaata

SEQ ID NO: 1792404 - DNA, 25 bp, Homo sapien
ataaggtgctcctccttccgcacag

SEQ ID NO: 1792405 - DNA, 25 bp, Homo sapien
tcaataaagatgctcgagagtttcg

SEQ ID NO: 1792406 - DNA, 25 bp, Homo sapien
ttccgcacagcaccgagagcaagct

SEQ ID NO: 1792407 - DNA, 25 bp, Homo sapien
gggcctggagaccccggctagagag

SEQ ID NO: 1792408 - DNA, 25 bp, Homo sapien
ggcctggagaccccggctagagagt

SEQ ID NO: 1792409 - DNA, 25 bp, Homo sapien
tggttgggtgatttataggcagaaa

SEQ ID NO: 1792410 - DNA, 25 bp, Homo sapien
ctggttgggtgatttataggcagaa

SEQ ID NO: 1792411 - DNA, 25 bp, Homo sapien
gggtgatttataggcagaaatctga

SEQ ID NO: 1792412 - DNA, 25 bp, Homo sapien
gttgggtgatttataggcagaaatc

SEQ ID NO: 1792413 - DNA, 25 bp, Homo sapien
gtttagacagaaagtggtctcaata

SEQ ID NO: 1792414 - DNA, 25 bp, Homo sapien
tagaggacctagcatggtttagaca

SEQ ID NO: 1792415 - DNA, 25 bp, Homo sapien
tacattttgttcaactccctataga

SEQ ID NO: 1792416 - DNA, 25 bp, Homo sapien
gttcaactccctatagaggacctag

SEQ ID NO: 1792417 - DNA, 25 bp, Homo sapien
ctcaagccattctcacatacagtat

SEQ ID NO: 1792418 - DNA, 25 bp, Homo sapien
gcagatggtctgctcaagccattct

SEQ ID NO: 1792419 - DNA, 25 bp, Homo sapien
tgaaaggcagatggtctgctcaagc

SEQ ID NO: 1792420 - DNA, 25 bp, Homo sapien
cacatacagtatagccctgagcctg

SEQ ID NO: 1792421 - DNA, 25 bp, Homo sapien
ctttaatatagtcattagttagcag

SEQ ID NO: 1792422 - DNA, 25 bp, Homo sapien
tttaatatagtcattagttagcaga

SEQ ID NO: 1792423 - DNA, 25 bp, Homo sapien
ttaatatagtcattagttagcagac

SEQ ID NO: 1792424 - DNA, 25 bp, Homo sapien
caagctgcggacaattgcctgggag

SEQ ID NO: 1792425 - DNA, 25 bp, Homo sapien
tacaatctggtcatacaactgggaa

SEQ ID NO: 1792426 - DNA, 25 bp, Homo sapien
tcagtgccctgttgatgcgagtcag

SEQ ID NO: 1792427 - DNA, 25 bp, Homo sapien
caaacgtgggatatcttgacctcaa

SEQ ID NO: 1792428 - DNA, 25 bp, Homo sapien
aaacacctcatcagtatctgtaacg

SEQ ID NO: 1792429 - DNA, 25 bp, Homo sapien
tatctgtaacgttttatgagcaaaa

SEQ ID NO: 1792430 - DNA, 25 bp, Homo sapien
attcaagcagttattatgaagaacc

SEQ ID NO: 1792431 - DNA, 25 bp, Homo sapien
aagttgattcaagcagttattatga

SEQ ID NO: 1792432 - DNA, 25 bp, Homo sapien
aagaaagtatattttacacctctgg

SEQ ID NO: 1792433 - DNA, 25 bp, Homo sapien
aaagaaagtatattttacacctctg

SEQ ID NO: 1792434 - DNA, 25 bp, Homo sapien
tgaagacactcagcatgagaaaata

SEQ ID NO: 1792435 - DNA, 25 bp, Homo sapien
atgtgctacagtacaatccgggctg

SEQ ID NO: 1792436 - DNA, 25 bp, Homo sapien
agacactcagcatgagaaaatatac

SEQ ID NO: 1792437 - DNA, 25 bp, Homo sapien
ctacagtacaatccgggctgcatcg

SEQ ID NO: 1792438 - DNA, 25 bp, Homo sapien
tacaggtaaagggttctgcgtacag

SEQ ID NO: 1792439 - DNA, 25 bp, Homo sapien
aatgggcacctcagactgcagtcca

SEQ ID NO: 1792440 - DNA, 25 bp, Homo sapien
tgagcagctcgttctctaggccttg

SEQ ID NO: 1792441 - DNA, 25 bp, Homo sapien
caggttatggccatcgtgttaaaag

SEQ ID NO: 1792442 - DNA, 25 bp, Homo sapien
aagtgctttgtctgattttagctca

SEQ ID NO: 1792443 - DNA, 25 bp, Homo sapien
ctttgtatcgattagaaacaggcac

SEQ ID NO: 1792444 - DNA, 25 bp, Homo sapien
cacaaaatggtctggtgggatttca

SEQ ID NO: 1792445 - DNA, 25 bp, Homo sapien
tcatttgaagagttaagtggttccc

SEQ ID NO: 1792446 - DNA, 25 bp, Homo sapien
cagcacctagtaaccaaagatttca

SEQ ID NO: 1792447 - DNA, 25 bp, Homo sapien
aaatagattcttgccctattcctgc

SEQ ID NO: 1792448 - DNA, 25 bp, Homo sapien
tagtttaggaaatagattcttgccc

SEQ ID NO: 1792449 - DNA, 25 bp, Homo sapien
taaaaggtgttatttattagtcagc

SEQ ID NO: 1792450 - DNA, 25 bp, Homo sapien
taagatacccacttacgtgcagtga

SEQ ID NO: 1792451 - DNA, 25 bp, Homo sapien
taaaatgagaatacaaaggccaccg

SEQ ID NO: 1792452 - DNA, 25 bp, Homo sapien
gaaaatgcgaaacagctttcctggg

SEQ ID NO: 1792453 - DNA, 25 bp, Homo sapien
aaagtcatgcaacaagacactggcg

SEQ ID NO: 1792454 - DNA, 25 bp, Homo sapien
aagggtaggtatgatagctcatgcc

SEQ ID NO: 1792455 - DNA, 25 bp, Homo sapien
tataggttgtgcaatcatattttgc

SEQ ID NO: 1792456 - DNA, 25 bp, Homo sapien
tttacagttatataggttgtgcaat

SEQ ID NO: 1792457 - DNA, 25 bp, Homo sapien
cattgaaaaaaagggtaggtatgat

SEQ ID NO: 1792458 - DNA, 25 bp, Homo sapien
gcgacagcgtagacaatagaaagtg

SEQ ID NO: 1792459 - DNA, 25 bp, Homo sapien
caatctcagatgtgtgttgtagaag

SEQ ID NO: 1792460 - DNA, 25 bp, Homo sapien
tgtagaaggatcacagcagcgacag

SEQ ID NO: 1792461 - DNA, 25 bp, Homo sapien
gaattaggagagtggcaatctcaga

SEQ ID NO: 1792462 - DNA, 25 bp, Homo sapien
tacagagggctgaccataagttcca

SEQ ID NO: 1792463 - DNA, 25 bp, Homo sapien
gattggttttccattagccgagcac

SEQ ID NO: 1792464 - DNA, 25 bp, Homo sapien
cccaagtgagggtcagattgttaac

SEQ ID NO: 1792465 - DNA, 25 bp, Homo sapien
cagtcccaggttgattgaggataca

SEQ ID NO: 1792466 - DNA, 25 bp, Homo sapien
tggtaagctgtaccagacagagggt

SEQ ID NO: 1792467 - DNA, 25 bp, Homo sapien
ccggcggccgtgacgtgcggagggc

SEQ ID NO: 1792468 - DNA, 25 bp, Homo sapien
ggcgcgggacggctggttctcaggg

SEQ ID NO: 1792469 - DNA, 25 bp, Homo sapien
gatgtcacggctttgggcactttgg

SEQ ID NO: 1792470 - DNA, 25 bp, Homo sapien
ctgctagcgcgacagggcacacgga

SEQ ID NO: 1792471 - DNA, 25 bp, Homo sapien
caggacgagcggcagacgcgtgccc

SEQ ID NO: 1792472 - DNA, 25 bp, Homo sapien
ccgccgccgctgctagcgcgacagg

SEQ ID NO: 1792473 - DNA, 25 bp, Homo sapien
ggacgagcggcagacgcgtgcccat

SEQ ID NO: 1792474 - DNA, 25 bp, Homo sapien
tgcggccgccgctgtccaagcaggc

SEQ ID NO: 1792475 - DNA, 25 bp, Homo sapien
gctgtccaagcaggccctcccggcc

SEQ ID NO: 1792476 - DNA, 25 bp, Homo sapien
cctgcggccgccgctgtccaagcag

SEQ ID NO: 1792477 - DNA, 25 bp, Homo sapien
cggccgccgctgtccaagcaggccc

SEQ ID NO: 1792478 - DNA, 25 bp, Homo sapien
ctgacgatggagtcccgcgccgcgg

SEQ ID NO: 1792479 - DNA, 25 bp, Homo sapien
cgcgggcgttcggccgccggggctg

SEQ ID NO: 1792480 - DNA, 25 bp, Homo sapien
tggagtcccgcgccgcgggcgttcg

SEQ ID NO: 1792481 - DNA, 25 bp, Homo sapien
cgcgccgcgggcgttcggccgccgg

SEQ ID NO: 1792482 - DNA, 25 bp, Homo sapien
ggcccccctaatgagttggcaccaa

SEQ ID NO: 1792483 - DNA, 25 bp, Homo sapien
tgcgggcccggtcgggtactggatc

SEQ ID NO: 1792484 - DNA, 25 bp, Homo sapien
tgagttggcaccaaacactcgcagc

SEQ ID NO: 1792485 - DNA, 25 bp, Homo sapien
ggccgcagtgcccaagcccgcgttt

SEQ ID NO: 1792486 - DNA, 25 bp, Homo sapien
ccgctaggcgcccattggagatgcc

SEQ ID NO: 1792487 - DNA, 25 bp, Homo sapien
taggcgcccattggagatgcccacg

SEQ ID NO: 1792488 - DNA, 25 bp, Homo sapien
gagccgggcgtgcggtccatgccgc

SEQ ID NO: 1792489 - DNA, 25 bp, Homo sapien
ggtccatgccgctaggcgcccattg

SEQ ID NO: 1792490 - DNA, 25 bp, Homo sapien
ttaccgtctgggtcgcgcccggcgc

SEQ ID NO: 1792491 - DNA, 25 bp, Homo sapien
ccggcgcgattgcatcagagccggc

SEQ ID NO: 1792492 - DNA, 25 bp, Homo sapien
gcccggcgcgattgcatcagagccg

SEQ ID NO: 1792493 - DNA, 25 bp, Homo sapien
gtcgcgcccggcgcgattgcatcag

SEQ ID NO: 1792494 - DNA, 25 bp, Homo sapien
ccgggaaaagcggacgtcagccaca

SEQ ID NO: 1792495 - DNA, 25 bp, Homo sapien
ggaaaagcggacgtcagccacagac

SEQ ID NO: 1792496 - DNA, 25 bp, Homo sapien
gaagggcgcacaacaccagggagct

SEQ ID NO: 1792497 - DNA, 25 bp, Homo sapien
acaacaccagggagcttcgcgcggg

SEQ ID NO: 1792498 - DNA, 25 bp, Homo sapien
tccaggtaattctgagacactaagt

SEQ ID NO: 1792499 - DNA, 25 bp, Homo sapien
gacactaagtggaaatacggcccag

SEQ ID NO: 1792500 - DNA, 25 bp, Homo sapien
caggtatactacagtggctctttcc

SEQ ID NO: 1792501 - DNA, 25 bp, Homo sapien
ggcatttcatttactagcgtggaca

SEQ ID NO: 1792502 - DNA, 25 bp, Homo sapien
gcactgcacctaacaaaaatgcggg

SEQ ID NO: 1792503 - DNA, 25 bp, Homo sapien
tgagtgactgcagaggctaccttcg

SEQ ID NO: 1792504 - DNA, 25 bp, Homo sapien
gctcagattcacaaccaggaccagt

SEQ ID NO: 1792505 - DNA, 25 bp, Homo sapien
gataaagctacttcattcccaggga

SEQ ID NO: 1792506 - DNA, 25 bp, Homo sapien
aacatagtctgcacctgtacctcct

SEQ ID NO: 1792507 - DNA, 25 bp, Homo sapien
tgtacctcctaaatgcccagcagca

SEQ ID NO: 1792508 - DNA, 25 bp, Homo sapien
ggagacccactttgataacactatc

SEQ ID NO: 1792509 - DNA, 25 bp, Homo sapien
gagaatccacaacatagtctgcacc

SEQ ID NO: 1792510 - DNA, 25 bp, Homo sapien
gtcgagacaggataaattccaggtc

SEQ ID NO: 1792511 - DNA, 25 bp, Homo sapien
gaagtgtcgagacaggataaattcc

SEQ ID NO: 1792512 - DNA, 25 bp, Homo sapien
gacaagaagtgtcgagacaggataa

SEQ ID NO: 1792513 - DNA, 25 bp, Homo sapien
tgttggacaagaagtgtcgagacag

SEQ ID NO: 1792514 - DNA, 25 bp, Homo sapien
ggtaggcggcgtaacaatgaaatca

SEQ ID NO: 1792515 - DNA, 25 bp, Homo sapien
taactagaccacagaaggacgcact

SEQ ID NO: 1792516 - DNA, 25 bp, Homo sapien
tcccaaaaccctgagtatgggtcca

SEQ ID NO: 1792517 - DNA, 25 bp, Homo sapien
taacacaaggtaaaatgcggcaatc

SEQ ID NO: 1792518 - DNA, 25 bp, Homo sapien
gataattgcaagaaccggcttgaag

SEQ ID NO: 1792519 - DNA, 25 bp, Homo sapien
tcttgcaataaacttagaacttctt

SEQ ID NO: 1792520 - DNA, 25 bp, Homo sapien
ctggataattgcaagaaccggcttg

SEQ ID NO: 1792521 - DNA, 25 bp, Homo sapien
taattgcaagaaccggcttgaaggc

SEQ ID NO: 1792522 - DNA, 25 bp, Homo sapien
tcagccaaattctggttgatttcct

SEQ ID NO: 1792523 - DNA, 25 bp, Homo sapien
cctcagccaaattctggttgatttc

SEQ ID NO: 1792524 - DNA, 25 bp, Homo sapien
ctcagccaaattctggttgatttcc

SEQ ID NO: 1792525 - DNA, 25 bp, Homo sapien
ggagggaggcaaatgtgagtgatgt

SEQ ID NO: 1792526 - DNA, 25 bp, Homo sapien
agggaggcaaatgtgagtgatgttc

SEQ ID NO: 1792527 - DNA, 25 bp, Homo sapien
gggaggcaaatgtgagtgatgttca

SEQ ID NO: 1792528 - DNA, 25 bp, Homo sapien
ggaggcaaatgtgagtgatgttcag

SEQ ID NO: 1792529 - DNA, 25 bp, Homo sapien
catgacgtccaagcagtcacagagg

SEQ ID NO: 1792530 - DNA, 25 bp, Homo sapien
ggccctcgggttatctggacctcaa

SEQ ID NO: 1792531 - DNA, 25 bp, Homo sapien
ggtttagatagacaaaggacacttc

SEQ ID NO: 1792532 - DNA, 25 bp, Homo sapien
gaagcattccaatctggcccagcta

SEQ ID NO: 1792533 - DNA, 25 bp, Homo sapien
ttctcagagatctgaagggcaaggc

SEQ ID NO: 1792534 - DNA, 25 bp, Homo sapien
tgttgctaaacaagttctcagagat

SEQ ID NO: 1792535 - DNA, 25 bp, Homo sapien
tcaaggcattgaggactttgttgct

SEQ ID NO: 1792536 - DNA, 25 bp, Homo sapien
aggccatgtactctggtatcttcat

SEQ ID NO: 1792537 - DNA, 25 bp, Homo sapien
ggcttcacttcgcaactccagggag

SEQ ID NO: 1792538 - DNA, 25 bp, Homo sapien
tggccctgacattgggtgttccggt

SEQ ID NO: 1792539 - DNA, 25 bp, Homo sapien
gagctcctttcaatggaccccaatg

SEQ ID NO: 1792540 - DNA, 25 bp, Homo sapien
tgttccggttctgccaatataccag

SEQ ID NO: 1792541 - DNA, 25 bp, Homo sapien
atgggcatcccctcgcaccagcttc

SEQ ID NO: 1792542 - DNA, 25 bp, Homo sapien
cagcttccccaggtttatgtctgtt

SEQ ID NO: 1792543 - DNA, 25 bp, Homo sapien
accagcttccccaggtttatgtctg

SEQ ID NO: 1792544 - DNA, 25 bp, Homo sapien
cttccccaggtttatgtctgttact

SEQ ID NO: 1792545 - DNA, 25 bp, Homo sapien
gaagttcaattacagctttggcaac

SEQ ID NO: 1792546 - DNA, 25 bp, Homo sapien
ttacagctttggcaacaggtgaaac

SEQ ID NO: 1792547 - DNA, 25 bp, Homo sapien
caattacagctttggcaacaggtga

SEQ ID NO: 1792548 - DNA, 25 bp, Homo sapien
tttttcaagaagttcaattacagct

SEQ ID NO: 1792549 - DNA, 25 bp, Homo sapien
tttctctggaacaggcattgtagag

SEQ ID NO: 1792550 - DNA, 25 bp, Homo sapien
agcagcttccaaagacccatgggcc

SEQ ID NO: 1792551 - DNA, 25 bp, Homo sapien
ggacccttttctctggaacaggcat

SEQ ID NO: 1792552 - DNA, 25 bp, Homo sapien
gagcagcttccaaagacccatgggc

SEQ ID NO: 1792553 - DNA, 25 bp, Homo sapien
cttgctttgaagctggcgtgttttc

SEQ ID NO: 1792554 - DNA, 25 bp, Homo sapien
ttgctttgaagctggcgtgttttcc

SEQ ID NO: 1792555 - DNA, 25 bp, Homo sapien
ctgttctaacagaagccttcaagat

SEQ ID NO: 1792556 - DNA, 25 bp, Homo sapien
agcacttagcttatacatttctaga

SEQ ID NO: 1792557 - DNA, 25 bp, Homo sapien
cagaagccttcaagatgtatgtttc

SEQ ID NO: 1792558 - DNA, 25 bp, Homo sapien
aagcacttagcttatacatttctag

SEQ ID NO: 1792559 - DNA, 25 bp, Homo sapien
ggatatactttaatgactcatcaaa

SEQ ID NO: 1792560 - DNA, 25 bp, Homo sapien
aatggatatactttaatgactcatc

SEQ ID NO: 1792561 - DNA, 25 bp, Homo sapien
gggaatggatatactttaatgactc

SEQ ID NO: 1792562 - DNA, 25 bp, Homo sapien
ggaatggatatactttaatgactca

SEQ ID NO: 1792563 - DNA, 25 bp, Homo sapien
aagatcaaggacagatccaagtccc

SEQ ID NO: 1792564 - DNA, 25 bp, Homo sapien
aaggacagatccaagtcccctgaca

SEQ ID NO: 1792565 - DNA, 25 bp, Homo sapien
aggacagatccaagtcccctgacag

SEQ ID NO: 1792566 - DNA, 25 bp, Homo sapien
cagggtagtcacttcagcatacata

SEQ ID NO: 1792567 - DNA, 25 bp, Homo sapien
tttgttccaagctgctgacaaggat

SEQ ID NO: 1792568 - DNA, 25 bp, Homo sapien
aaacacgcacatcttgatctgaggc

SEQ ID NO: 1792569 - DNA, 25 bp, Homo sapien
gtcaaatgagttctacacaatccca

SEQ ID NO: 1792570 - DNA, 25 bp, Homo sapien
caagtaaggggaatctcttctggct

SEQ ID NO: 1792571 - DNA, 25 bp, Homo sapien
ttctggcttaggtgagcctaggacc

SEQ ID NO: 1792572 - DNA, 25 bp, Homo sapien
tagttcctggttgtatccaagtaag

SEQ ID NO: 1792573 - DNA, 25 bp, Homo sapien
gaagtcatgggagcagttgagaaca

SEQ ID NO: 1792574 - DNA, 25 bp, Homo sapien
gtagggggcacttcactgtgggagc

SEQ ID NO: 1792575 - DNA, 25 bp, Homo sapien
tgctagaggccagtagggggcactt

SEQ ID NO: 1792576 - DNA, 25 bp, Homo sapien
cagtagggggcacttcactgtggga

SEQ ID NO: 1792577 - DNA, 25 bp, Homo sapien
tagaggccagtagggggcacttcac

SEQ ID NO: 1792578 - DNA, 25 bp, Homo sapien
tgccatcaaatagcaggaccaatcc

SEQ ID NO: 1792579 - DNA, 25 bp, Homo sapien
catcaaatagcaggaccaatcctac

SEQ ID NO: 1792580 - DNA, 25 bp, Homo sapien
ggataccttggcaaaatgccatcaa

SEQ ID NO: 1792581 - DNA, 25 bp, Homo sapien
ggtgtggtcttgagtattcctggat

SEQ ID NO: 1792582 - DNA, 25 bp, Homo sapien
tgggccggctcctgctggacccggg

SEQ ID NO: 1792583 - DNA, 25 bp, Homo sapien
aggaacccactctgggccggctcct

SEQ ID NO: 1792584 - DNA, 25 bp, Homo sapien
gcctcagtccttctacgaactggaa

SEQ ID NO: 1792585 - DNA, 25 bp, Homo sapien
gagggcctgggtgtgctccaaggct

SEQ ID NO: 1792586 - DNA, 25 bp, Homo sapien
ttagggataaaagctgcccctgtcc

SEQ ID NO: 1792587 - DNA, 25 bp, Homo sapien
taaaaagagccattagggccacagc

SEQ ID NO: 1792588 - DNA, 25 bp, Homo sapien
caacctcaagtatggtcctggtgga

SEQ ID NO: 1792589 - DNA, 25 bp, Homo sapien
tgatcggtcaattctggcaggagct

SEQ ID NO: 1792590 - DNA, 25 bp, Homo sapien
ttaaaagatggccattcttctaatg

SEQ ID NO: 1792591 - DNA, 25 bp, Homo sapien
taaaagatggccattcttctaatga

SEQ ID NO: 1792592 - DNA, 25 bp, Homo sapien
aagatggccattcttctaatgataa

SEQ ID NO: 1792593 - DNA, 25 bp, Homo sapien
aaagatggccattcttctaatgata

SEQ ID NO: 1792594 - DNA, 25 bp, Homo sapien
atcctgggatcacagtccaacgagg

SEQ ID NO: 1792595 - DNA, 25 bp, Homo sapien
tctcatccgaaaccgtggacgggtc

SEQ ID NO: 1792596 - DNA, 25 bp, Homo sapien
tacgatctgggcctgggtaatatcc

SEQ ID NO: 1792597 - DNA, 25 bp, Homo sapien
ctccattgggaggttgtctacgatc

SEQ ID NO: 1792598 - DNA, 25 bp, Homo sapien
tccaccaaaatgtattcttggagag

SEQ ID NO: 1792599 - DNA, 25 bp, Homo sapien
tattcttggagagccacacccaacc

SEQ ID NO: 1792600 - DNA, 25 bp, Homo sapien
cctcaatgagtccaccaaaatgtat

SEQ ID NO: 1792601 - DNA, 25 bp, Homo sapien
ttcttggagagccacacccaacctt

SEQ ID NO: 1792602 - DNA, 25 bp, Homo sapien
ggataatttattacacagcacaaga

SEQ ID NO: 1792603 - DNA, 25 bp, Homo sapien
caagataacatacacagtccccagg

SEQ ID NO: 1792604 - DNA, 25 bp, Homo sapien
tcaaatgggcctaacactgtgtgtg

SEQ ID NO: 1792605 - DNA, 25 bp, Homo sapien
gctaatctactaccaaatctctgac

SEQ ID NO: 1792606 - DNA, 25 bp, Homo sapien
agccatctccttccactactgacca

SEQ ID NO: 1792607 - DNA, 25 bp, Homo sapien
ttcaagcagtgaagtctccaccgcc

SEQ ID NO: 1792608 - DNA, 25 bp, Homo sapien
gtttcaagcagtgaagtctccaccg

SEQ ID NO: 1792609 - DNA, 25 bp, Homo sapien
tgaagtttcaagcagtgaagtctcc

SEQ ID NO: 1792610 - DNA, 25 bp, Homo sapien
tggataatgggggtggggccaattc

SEQ ID NO: 1792611 - DNA, 25 bp, Homo sapien
ctggataatgggggtggggccaatt

SEQ ID NO: 1792612 - DNA, 25 bp, Homo sapien
aaagatcctagaattgtgtccaggt

SEQ ID NO: 1792613 - DNA, 25 bp, Homo sapien
tcctagaattgtgtccaggtggaag

SEQ ID NO: 1792614 - DNA, 25 bp, Homo sapien
gatcctagaattgtgtccaggtgga

SEQ ID NO: 1792615 - DNA, 25 bp, Homo sapien
aagatcctagaattgtgtccaggtg

SEQ ID NO: 1792616 - DNA, 25 bp, Homo sapien
tgatcctttaacctttctagcacgg

SEQ ID NO: 1792617 - DNA, 25 bp, Homo sapien
tggcaaggacatccacagcttttgg

SEQ ID NO: 1792618 - DNA, 25 bp, Homo sapien
tctagcacggacaaacgtactttgg

SEQ ID NO: 1792619 - DNA, 25 bp, Homo sapien
aagcaatccaatctccttggcaagg

SEQ ID NO: 1792620 - DNA, 25 bp, Homo sapien
ctacgagggataagcaccccacgtc

SEQ ID NO: 1792621 - DNA, 25 bp, Homo sapien
acgagggataagcaccccacgtcct

SEQ ID NO: 1792622 - DNA, 25 bp, Homo sapien
tacgagggataagcaccccacgtcc

SEQ ID NO: 1792623 - DNA, 25 bp, Homo sapien
tggacaggatagaagtctggtctga

SEQ ID NO: 1792624 - DNA, 25 bp, Homo sapien
cagttgtctttccagcacagtccaa

SEQ ID NO: 1792625 - DNA, 25 bp, Homo sapien
ttgaactgcagcctgtataagacag

SEQ ID NO: 1792626 - DNA, 25 bp, Homo sapien
tgcagcctgtataagacagttgtct

SEQ ID NO: 1792627 - DNA, 25 bp, Homo sapien
aagacagttgtctttccagcacagt

SEQ ID NO: 1792628 - DNA, 25 bp, Homo sapien
atttctgaaagagacaatgagttcc

SEQ ID NO: 1792629 - DNA, 25 bp, Homo sapien
gttcctcaagtcttgtttgttagca

SEQ ID NO: 1792630 - DNA, 25 bp, Homo sapien
agcaactataagtacagggactcct

SEQ ID NO: 1792631 - DNA, 25 bp, Homo sapien
acagagtccacaacaaatacaatgc

SEQ ID NO: 1792632 - DNA, 25 bp, Homo sapien
ccaaggagctgatgagctcagttca

SEQ ID NO: 1792633 - DNA, 25 bp, Homo sapien
caaggagctgatgagctcagttcac

SEQ ID NO: 1792634 - DNA, 25 bp, Homo sapien
ttcctttaggccatctcctatgatt

SEQ ID NO: 1792635 - DNA, 25 bp, Homo sapien
cctttaggccatctcctatgattgc

SEQ ID NO: 1792636 - DNA, 25 bp, Homo sapien
tcctttaggccatctcctatgattg

SEQ ID NO: 1792637 - DNA, 25 bp, Homo sapien
cttcctttaggccatctcctatgat

SEQ ID NO: 1792638 - DNA, 25 bp, Homo sapien
tccacacagatataatagatattga

SEQ ID NO: 1792639 - DNA, 25 bp, Homo sapien
cacagatataatagatattgatatt

SEQ ID NO: 1792640 - DNA, 25 bp, Homo sapien
agaaaacctactccacacagatata

SEQ ID NO: 1792641 - DNA, 25 bp, Homo sapien
gatataatagatattgatattcatc

SEQ ID NO: 1792642 - DNA, 25 bp, Homo sapien
atcttccacaaggcaacagagttgg

SEQ ID NO: 1792643 - DNA, 25 bp, Homo sapien
gacattcaggtgtgcggtcagagcc

SEQ ID NO: 1792644 - DNA, 25 bp, Homo sapien
acaagcccgatggtgactgtgctct

SEQ ID NO: 1792645 - DNA, 25 bp, Homo sapien
gcctcaagcaggcaaaggagttgac

SEQ ID NO: 1792646 - DNA, 25 bp, Homo sapien
caaacgtcggtccttgggaaggctg

SEQ ID NO: 1792647 - DNA, 25 bp, Homo sapien
acctgggcatatccaccacccgcgg

SEQ ID NO: 1792648 - DNA, 25 bp, Homo sapien
ggggatgacctgggcatatccacca

SEQ ID NO: 1792649 - DNA, 25 bp, Homo sapien
tgggcatatccaccacccgcggctc

SEQ ID NO: 1792650 - DNA, 25 bp, Homo sapien
atgacctgggcatatccaccacccg

SEQ ID NO: 1792651 - DNA, 25 bp, Homo sapien
tatctatgctgccgaggcacgcact

SEQ ID NO: 1792652 - DNA, 25 bp, Homo sapien
agtatctatgctgccgaggcacgca

SEQ ID NO: 1792653 - DNA, 25 bp, Homo sapien
agttttagtatctatgctgccgagg

SEQ ID NO: 1792654 - DNA, 25 bp, Homo sapien
ttagtatctatgctgccgaggcacg

SEQ ID NO: 1792655 - DNA, 25 bp, Homo sapien
ctgtggggtagagaagaaccttgac

SEQ ID NO: 1792656 - DNA, 25 bp, Homo sapien
gtggggtagagaagaaccttgacaa

SEQ ID NO: 1792657 - DNA, 25 bp, Homo sapien
tgtggggtagagaagaaccttgaca

SEQ ID NO: 1792658 - DNA, 25 bp, Homo sapien
tggggtagagaagaaccttgacaaa

SEQ ID NO: 1792659 - DNA, 25 bp, Homo sapien
cagatagccgtaaacacagagggag

SEQ ID NO: 1792660 - DNA, 25 bp, Homo sapien
aagaaaggcccgcaactcgccacag

SEQ ID NO: 1792661 - DNA, 25 bp, Homo sapien
caactgaaccagatagccgtaaaca

SEQ ID NO: 1792662 - DNA, 25 bp, Homo sapien
cacagccaactgaaccagatagccg

SEQ ID NO: 1792663 - DNA, 25 bp, Homo sapien
tatcaccaaattgctttttgaaagg

SEQ ID NO: 1792664 - DNA, 25 bp, Homo sapien
caaattgctttttgaaagggatgaa

SEQ ID NO: 1792665 - DNA, 25 bp, Homo sapien
caccaaattgctttttgaaagggat

SEQ ID NO: 1792666 - DNA, 25 bp, Homo sapien
tcaccaaattgctttttgaaaggga

SEQ ID NO: 1792667 - DNA, 25 bp, Homo sapien
gttttcatgaagaatcctcgtgtcg

SEQ ID NO: 1792668 - DNA, 25 bp, Homo sapien
tggcggcagccagcaagttattggc

SEQ ID NO: 1792669 - DNA, 25 bp, Homo sapien
agaatcctcgtgtcgatggcggcag

SEQ ID NO: 1792670 - DNA, 25 bp, Homo sapien
gccagcaagttattggcagcggtga

SEQ ID NO: 1792671 - DNA, 25 bp, Homo sapien
tgacaccattcactaaaggaaccag

SEQ ID NO: 1792672 - DNA, 25 bp, Homo sapien
ctaaaggaaccagccgattatacag

SEQ ID NO: 1792673 - DNA, 25 bp, Homo sapien
cattcactaaaggaaccagccgatt

SEQ ID NO: 1792674 - DNA, 25 bp, Homo sapien
ttttagccgagcaagctgaatttct

SEQ ID NO: 1792675 - DNA, 25 bp, Homo sapien
ctcttctgtcagtgtgctcggatca

SEQ ID NO: 1792676 - DNA, 25 bp, Homo sapien
tagatgggtcgatgtcgagacgggc

SEQ ID NO: 1792677 - DNA, 25 bp, Homo sapien
tctgccacgtgatggtagatgggtc

SEQ ID NO: 1792678 - DNA, 25 bp, Homo sapien
tcgatgtcgagacgggcaaatttac

SEQ ID NO: 1792679 - DNA, 25 bp, Homo sapien
tctgtgtttccctgcccgatggtta

SEQ ID NO: 1792680 - DNA, 25 bp, Homo sapien
tgcccgatggttatttttcgtagaa

SEQ ID NO: 1792681 - DNA, 25 bp, Homo sapien
ttttcgtagaaatcggtcatttgta

SEQ ID NO: 1792682 - DNA, 25 bp, Homo sapien
tagaaatcggtcatttgtatccaat

SEQ ID NO: 1792683 - DNA, 25 bp, Homo sapien
tctcgctggccactgcgatgtcaaa

SEQ ID NO: 1792684 - DNA, 25 bp, Homo sapien
gctggccactgcgatgtcaaactgc

SEQ ID NO: 1792685 - DNA, 25 bp, Homo sapien
tggccactgcgatgtcaaactgcgc

SEQ ID NO: 1792686 - DNA, 25 bp, Homo sapien
gatctcgctggccactgcgatgtca

SEQ ID NO: 1792687 - DNA, 25 bp, Homo sapien
ggctgcccgcttttgtcactggcca

SEQ ID NO: 1792688 - DNA, 25 bp, Homo sapien
tgccttcatgtctgcgaggctgtcc

SEQ ID NO: 1792689 - DNA, 25 bp, Homo sapien
ccagccgtgccttcatgtctgcgag

SEQ ID NO: 1792690 - DNA, 25 bp, Homo sapien
tctgcgaggctgtccgtcagggcca

SEQ ID NO: 1792691 - DNA, 25 bp, Homo sapien
agaacgaggaccgtccactccctga

SEQ ID NO: 1792692 - DNA, 25 bp, Homo sapien
tccctgaagcttccgagttggaaac

SEQ ID NO: 1792693 - DNA, 25 bp, Homo sapien
aagcttccgagttggaaacactcac

SEQ ID NO: 1792694 - DNA, 25 bp, Homo sapien
aacgaggaccgtccactccctgaag

SEQ ID NO: 1792695 - DNA, 25 bp, Homo sapien
aaagcagcacttttatagcaacctg

SEQ ID NO: 1792696 - DNA, 25 bp, Homo sapien
gcagctgaaaaacaatccggacact

SEQ ID NO: 1792697 - DNA, 25 bp, Homo sapien
cataggctgcgacatacgttgatct

SEQ ID NO: 1792698 - DNA, 25 bp, Homo sapien
tcaccagtgtgcattttaagttcca

SEQ ID NO: 1792699 - DNA, 25 bp, Homo sapien
tcccaaccaaataaactgattcaaa

SEQ ID NO: 1792700 - DNA, 25 bp, Homo sapien
ttcccaaccaaataaactgattcaa

SEQ ID NO: 1792701 - DNA, 25 bp, Homo sapien
caaccaaataaactgattcaaaaca

SEQ ID NO: 1792702 - DNA, 25 bp, Homo sapien
cttcccaaccaaataaactgattca

SEQ ID NO: 1792703 - DNA, 25 bp, Homo sapien
atggtgtttatgagattttccataa

SEQ ID NO: 1792704 - DNA, 25 bp, Homo sapien
ttatgagattttccataaaacaaat

SEQ ID NO: 1792705 - DNA, 25 bp, Homo sapien
attttcataatcagaggctttactc

SEQ ID NO: 1792706 - DNA, 25 bp, Homo sapien
gtattttcataatcagaggctttac

SEQ ID NO: 1792707 - DNA, 25 bp, Homo sapien
ttggttttattgcatctttcatcaa

SEQ ID NO: 1792708 - DNA, 25 bp, Homo sapien
tggttttattgcatctttcatcaaa

SEQ ID NO: 1792709 - DNA, 25 bp, Homo sapien
gcacagcaacaaagacttggtgtct

SEQ ID NO: 1792710 - DNA, 25 bp, Homo sapien
gagggcacagcaacaaagacttggt

SEQ ID NO: 1792711 - DNA, 25 bp, Homo sapien
gggcacagcaacaaagacttggtgt

SEQ ID NO: 1792712 - DNA, 25 bp, Homo sapien
agggcacagcaacaaagacttggtg

SEQ ID NO: 1792713 - DNA, 25 bp, Homo sapien
ggcagctgtgtcaaactctgctgag

SEQ ID NO: 1792714 - DNA, 25 bp, Homo sapien
agggcagctgtgtcaaactctgctg

SEQ ID NO: 1792715 - DNA, 25 bp, Homo sapien
cagctgtgtcaaactctgctgagct

SEQ ID NO: 1792716 - DNA, 25 bp, Homo sapien
gggcagctgtgtcaaactctgctga

SEQ ID NO: 1792717 - DNA, 25 bp, Homo sapien
gagttgccgtgagcaatgttagcaa

SEQ ID NO: 1792718 - DNA, 25 bp, Homo sapien
gcccgcatgcacgaacacaggtgtc

SEQ ID NO: 1792719 - DNA, 25 bp, Homo sapien
aaaagggcccgcatgcacgaacaca

SEQ ID NO: 1792720 - DNA, 25 bp, Homo sapien
agccaacactgaagagttgccgtga

SEQ ID NO: 1792721 - DNA, 25 bp, Homo sapien
accgaaggagcaaagtacatgagag

SEQ ID NO: 1792722 - DNA, 25 bp, Homo sapien
agcctcctcgtccattagctctaca

SEQ ID NO: 1792723 - DNA, 25 bp, Homo sapien
gcagcgatcaattgagcaaatccac

SEQ ID NO: 1792724 - DNA, 25 bp, Homo sapien
cttgcagtggatttgctaccgaagg

SEQ ID NO: 1792725 - DNA, 25 bp, Homo sapien
taccaagtcctttcgagagggaagc

SEQ ID NO: 1792726 - DNA, 25 bp, Homo sapien
cagagggctcgtttgctttgcatac

SEQ ID NO: 1792727 - DNA, 25 bp, Homo sapien
tgaaaacacactaccagtcagggct

SEQ ID NO: 1792728 - DNA, 25 bp, Homo sapien
cccacttacggcatcttagactaga

SEQ ID NO: 1792729 - DNA, 25 bp, Homo sapien
aagagggctactttacacaaaagcg

SEQ ID NO: 1792730 - DNA, 25 bp, Homo sapien
aggacaagggccgaacagacagcga

SEQ ID NO: 1792731 - DNA, 25 bp, Homo sapien
ggacgaatgagcttcggcaccaagc

SEQ ID NO: 1792732 - DNA, 25 bp, Homo sapien
actttacacaaaagcgtggaaagag

SEQ ID NO: 1792733 - DNA, 25 bp, Homo sapien
gaagagatgatggttttggaagaac

SEQ ID NO: 1792734 - DNA, 25 bp, Homo sapien
cttagatctatggaggccagctggc

SEQ ID NO: 1792735 - DNA, 25 bp, Homo sapien
gcactcgccttggatgctgcagagc

SEQ ID NO: 1792736 - DNA, 25 bp, Homo sapien
cagctggcccttttcatagggctgg

SEQ ID NO: 1792737 - DNA, 25 bp, Homo sapien
tgcaccgtgtagaaagacagaaacc

SEQ ID NO: 1792738 - DNA, 25 bp, Homo sapien
tattatcctgacaggcgaaggttcc

SEQ ID NO: 1792739 - DNA, 25 bp, Homo sapien
gacttctaacagcttactattccca

SEQ ID NO: 1792740 - DNA, 25 bp, Homo sapien
tatttaatgaacatactagccatac

SEQ ID NO: 1792741 - DNA, 25 bp, Homo sapien
tggcaaagagcaattcaaaaccagg

SEQ ID NO: 1792742 - DNA, 25 bp, Homo sapien
caaaaccaggcaattggagcctgaa

SEQ ID NO: 1792743 - DNA, 25 bp, Homo sapien
taatatgcgtggctactcagaagaa

SEQ ID NO: 1792744 - DNA, 25 bp, Homo sapien
tattatagcggaaaatgacacatga

SEQ ID NO: 1792745 - DNA, 25 bp, Homo sapien
actgcacttcatgcctagaacaagc

SEQ ID NO: 1792746 - DNA, 25 bp, Homo sapien
tctgaaggcttatcctataggtaaa

SEQ ID NO: 1792747 - DNA, 25 bp, Homo sapien
aaagatccttggcatcgtacagtgg

SEQ ID NO: 1792748 - DNA, 25 bp, Homo sapien
tctatttgtgccacagtccatgcct

SEQ ID NO: 1792749 - DNA, 25 bp, Homo sapien
tgttccaacatcatttaatcagtat

SEQ ID NO: 1792750 - DNA, 25 bp, Homo sapien
tttaatcagtatcccatccattcac

SEQ ID NO: 1792751 - DNA, 25 bp, Homo sapien
caacaacaaactctatggtttatgt

SEQ ID NO: 1792752 - DNA, 25 bp, Homo sapien
tatattgtgatacaaagctctatgg

SEQ ID NO: 1792753 - DNA, 25 bp, Homo sapien
gacacttgtcagctacagtcacatg

SEQ ID NO: 1792754 - DNA, 25 bp, Homo sapien
tacagtcctggcaaaatcattcagg

SEQ ID NO: 1792755 - DNA, 25 bp, Homo sapien
gggagggagccctgttagataacaa

SEQ ID NO: 1792756 - DNA, 25 bp, Homo sapien
cgtttgctctctgcctcgaatgtaa

SEQ ID NO: 1792757 - DNA, 25 bp, Homo sapien
gaaggatcgtaagctccagacactg

SEQ ID NO: 1792758 - DNA, 25 bp, Homo sapien
caagatctatgtgcaggaatccagg

SEQ ID NO: 1792759 - DNA, 25 bp, Homo sapien
gacagcagaaatcggtacttacggc

SEQ ID NO: 1792760 - DNA, 25 bp, Homo sapien
tgctttcacactaggccggctgtgg

SEQ ID NO: 1792761 - DNA, 25 bp, Homo sapien
cagcgcccaggagaacatgtcagat

SEQ ID NO: 1792762 - DNA, 25 bp, Homo sapien
ataaaggaaatgagccctcagggct

SEQ ID NO: 1792763 - DNA, 25 bp, Homo sapien
agcagtgcactcatcggctcaggca

SEQ ID NO: 1792764 - DNA, 25 bp, Homo sapien
tcagatcaatgacagcggtaagagt

SEQ ID NO: 1792765 - DNA, 25 bp, Homo sapien
tgcttaacctgtgtaaacaataaaa

SEQ ID NO: 1792766 - DNA, 25 bp, Homo sapien
agtttcaaaaaccatgcagtaactt

SEQ ID NO: 1792767 - DNA, 25 bp, Homo sapien
caacccgccacacgagatcaggtgt

SEQ ID NO: 1792768 - DNA, 25 bp, Homo sapien
tgcctggccctggacaatagtttta

SEQ ID NO: 1792769 - DNA, 25 bp, Homo sapien
agttcagcccttctcgactggaggc

SEQ ID NO: 1792770 - DNA, 25 bp, Homo sapien
cgccgacagcttgcagtggctcacg

SEQ ID NO: 1792771 - DNA, 25 bp, Homo sapien
tgtaaatggcatctagcaaggatgc

SEQ ID NO: 1792772 - DNA, 25 bp, Homo sapien
caaggaataatccacccaaggtctc

SEQ ID NO: 1792773 - DNA, 25 bp, Homo sapien
ttaacatgacaaagatgggaaagat

SEQ ID NO: 1792774 - DNA, 25 bp, Homo sapien
tttaacatgacaaagatgggaaaga

SEQ ID NO: 1792775 - DNA, 25 bp, Homo sapien
ttttaacatgacaaagatgggaaag

SEQ ID NO: 1792776 - DNA, 25 bp, Homo sapien
tgattcaaacttaaacccgtaatca

SEQ ID NO: 1792777 - DNA, 25 bp, Homo sapien
taatactcttattgtgcaagcacag

SEQ ID NO: 1792778 - DNA, 25 bp, Homo sapien
cacagaagctgctagatagtgattc

SEQ ID NO: 1792779 - DNA, 25 bp, Homo sapien
atagtgattctatagcatggtttga

SEQ ID NO: 1792780 - DNA, 25 bp, Homo sapien
tcctaacgcagtacctggcacaagc

SEQ ID NO: 1792781 - DNA, 25 bp, Homo sapien
ctttcgggcaaagttggctactcct

SEQ ID NO: 1792782 - DNA, 25 bp, Homo sapien
gcgggaccacgccttattcatctgg

SEQ ID NO: 1792783 - DNA, 25 bp, Homo sapien
tcaatgcgcccgtgtagtcaccatg

SEQ ID NO: 1792784 - DNA, 25 bp, Homo sapien
gatccccaggtgagatgattgtcca

SEQ ID NO: 1792785 - DNA, 25 bp, Homo sapien
tttcaagatagcgaggcactgggtc

SEQ ID NO: 1792786 - DNA, 25 bp, Homo sapien
tatgaccaggacaccgatcggaact

SEQ ID NO: 1792787 - DNA, 25 bp, Homo sapien
ctgcaggttagcacacggacgggac

SEQ ID NO: 1792788 - DNA, 25 bp, Homo sapien
gtgaccagccagtgaagcttttctt

SEQ ID NO: 1792789 - DNA, 25 bp, Homo sapien
tgaagcttttcttcatacagatggg

SEQ ID NO: 1792790 - DNA, 25 bp, Homo sapien
gatggggattttcaactttgtaatc

SEQ ID NO: 1792791 - DNA, 25 bp, Homo sapien
caggcgttgagccaaggtgaccagc

SEQ ID NO: 1792792 - DNA, 25 bp, Homo sapien
cacaaaggtgaactgatttccccat

SEQ ID NO: 1792793 - DNA, 25 bp, Homo sapien
ccaacacaaaggtgaactgatttcc

SEQ ID NO: 1792794 - DNA, 25 bp, Homo sapien
ttaccaacacaaaggtgaactgatt

SEQ ID NO: 1792795 - DNA, 25 bp, Homo sapien
tgtttaccaacacaaaggtgaactg

SEQ ID NO: 1792796 - DNA, 25 bp, Homo sapien
ctgtggggaagcaagtggaatatgt

SEQ ID NO: 1792797 - DNA, 25 bp, Homo sapien
tggggaagcaagtggaatatgtgct

SEQ ID NO: 1792798 - DNA, 25 bp, Homo sapien
gaagcaagtggaatatgtgctatta

SEQ ID NO: 1792799 - DNA, 25 bp, Homo sapien
gcaagtggaatatgtgctattatct

SEQ ID NO: 1792800 - DNA, 25 bp, Homo sapien
catgcatcttcagagctcgcaccgt

SEQ ID NO: 1792801 - DNA, 25 bp, Homo sapien
ttgccactaacacaaccacgttggg

SEQ ID NO: 1792802 - DNA, 25 bp, Homo sapien
gaagctcggcacttgatgttgaaga

SEQ ID NO: 1792803 - DNA, 25 bp, Homo sapien
cacgttgggcaccaagccggaagct

SEQ ID NO: 1792804 - DNA, 25 bp, Homo sapien
tgcagcatcagtgaaccgaaaaact

SEQ ID NO: 1792805 - DNA, 25 bp, Homo sapien
ttcgttcagggacaagagcctctaa

SEQ ID NO: 1792806 - DNA, 25 bp, Homo sapien
caaagctcttagaaacaatccagta

SEQ ID NO: 1792807 - DNA, 25 bp, Homo sapien
tatggttatacaatcttggcctgag

SEQ ID NO: 1792808 - DNA, 25 bp, Homo sapien
gatctgaagttctcggctctctgct

SEQ ID NO: 1792809 - DNA, 25 bp, Homo sapien
gctttacagcgtttcatgatggcaa

SEQ ID NO: 1792810 - DNA, 25 bp, Homo sapien
gctctgcatggtggacatagtagga

SEQ ID NO: 1792811 - DNA, 25 bp, Homo sapien
gacattgtccatattccctaagcct

SEQ ID NO: 1792812 - DNA, 25 bp, Homo sapien
tcttaagaggaacaccagccgttac

SEQ ID NO: 1792813 - DNA, 25 bp, Homo sapien
attctttcttaagaggaacaccagc

SEQ ID NO: 1792814 - DNA, 25 bp, Homo sapien
tctttcttaagaggaacaccagccg

SEQ ID NO: 1792815 - DNA, 25 bp, Homo sapien
ttcttaagaggaacaccagccgtta

SEQ ID NO: 1792816 - DNA, 25 bp, Homo sapien
ctggcaggatttgctacatcttttt

SEQ ID NO: 1792817 - DNA, 25 bp, Homo sapien
aatttgcttctggaggttacagcag

SEQ ID NO: 1792818 - DNA, 25 bp, Homo sapien
tggaggttacagcagccgtctgcca

SEQ ID NO: 1792819 - DNA, 25 bp, Homo sapien
tgcttctggaggttacagcagccgt

SEQ ID NO: 1792820 - DNA, 25 bp, Homo sapien
tctggaggttacagcagccgtctgc

SEQ ID NO: 1792821 - DNA, 25 bp, Homo sapien
gagccaagtccaccgatccttttcc

SEQ ID NO: 1792822 - DNA, 25 bp, Homo sapien
aaggcaccagcccgctttgcaagct

SEQ ID NO: 1792823 - DNA, 25 bp, Homo sapien
catcatacaggaactggaatcggct

SEQ ID NO: 1792824 - DNA, 25 bp, Homo sapien
ggcttcttttactcgcagcctctct

SEQ ID NO: 1792825 - DNA, 25 bp, Homo sapien
gaaagaatagcacacaagatgccat

SEQ ID NO: 1792826 - DNA, 25 bp, Homo sapien
agatgccattagtcttgtactgaat

SEQ ID NO: 1792827 - DNA, 25 bp, Homo sapien
cacacaagatgccattagtcttgta

SEQ ID NO: 1792828 - DNA, 25 bp, Homo sapien
gaatagcacacaagatgccattagt

SEQ ID NO: 1792829 - DNA, 25 bp, Homo sapien
taaatcatctccggtgttttccttc

SEQ ID NO: 1792830 - DNA, 25 bp, Homo sapien
aatcatctccggtgttttccttcca

SEQ ID NO: 1792831 - DNA, 25 bp, Homo sapien
ctaaatcatctccggtgttttcctt

SEQ ID NO: 1792832 - DNA, 25 bp, Homo sapien
tagttgcaaatgctccaagtccatg

SEQ ID NO: 1792833 - DNA, 25 bp, Homo sapien
caacaactggtgtaggttccagctg

SEQ ID NO: 1792834 - DNA, 25 bp, Homo sapien
gagagcgtgaagttcagaagtcagc

SEQ ID NO: 1792835 - DNA, 25 bp, Homo sapien
catgtaaaggatagttctcacaccc

SEQ ID NO: 1792836 - DNA, 25 bp, Homo sapien
gtgccgacgtccacgagcctgctca

SEQ ID NO: 1792837 - DNA, 25 bp, Homo sapien
gcaatggtccttatcttgtccacaa

SEQ ID NO: 1792838 - DNA, 25 bp, Homo sapien
caatggtccttatcttgtccacaat

SEQ ID NO: 1792839 - DNA, 25 bp, Homo sapien
aatggtccttatcttgtccacaatt

SEQ ID NO: 1792840 - DNA, 25 bp, Homo sapien
acaccaaagtaggagggacactcga

SEQ ID NO: 1792841 - DNA, 25 bp, Homo sapien
ggacactcgaggcatacggtccttt

SEQ ID NO: 1792842 - DNA, 25 bp, Homo sapien
gaggcatacggtccttttggtgaag

SEQ ID NO: 1792843 - DNA, 25 bp, Homo sapien
caccaaagtaggagggacactcgag

SEQ ID NO: 1792844 - DNA, 25 bp, Homo sapien
tcactgataggtaagatgaagtccc

SEQ ID NO: 1792845 - DNA, 25 bp, Homo sapien
gcacaccttttttgtcaggttggtg

SEQ ID NO: 1792846 - DNA, 25 bp, Homo sapien
ggtctttgccatgcagatgggcaaa

SEQ ID NO: 1792847 - DNA, 25 bp, Homo sapien
ccttggcacaccttttttgtcaggt

SEQ ID NO: 1792848 - DNA, 25 bp, Homo sapien
gcaatgcagaatggggagggttttt

SEQ ID NO: 1792849 - DNA, 25 bp, Homo sapien
cacagcaatgcagaatggggagggt

SEQ ID NO: 1792850 - DNA, 25 bp, Homo sapien
gagggtttttggaaaatgtgactca

SEQ ID NO: 1792851 - DNA, 25 bp, Homo sapien
cagcaatgcagaatggggagggttt

SEQ ID NO: 1792852 - DNA, 25 bp, Homo sapien
ttatgactctaaggaccctgaacac

SEQ ID NO: 1792853 - DNA, 25 bp, Homo sapien
actctaaggaccctgaacacatgat

SEQ ID NO: 1792854 - DNA, 25 bp, Homo sapien
tgactctaaggaccctgaacacatg

SEQ ID NO: 1792855 - DNA, 25 bp, Homo sapien
tatgactctaaggaccctgaacaca

SEQ ID NO: 1792856 - DNA, 25 bp, Homo sapien
agtgtgtagagatcagattcaagtt

SEQ ID NO: 1792857 - DNA, 25 bp, Homo sapien
tgtgtagagatcagattcaagttcc

SEQ ID NO: 1792858 - DNA, 25 bp, Homo sapien
cagattcaagttccatgagatggtc

SEQ ID NO: 1792859 - DNA, 25 bp, Homo sapien
tccatgagatggtcttcaagatcct

SEQ ID NO: 1792860 - DNA, 25 bp, Homo sapien
atggacttgcttgggttgggattct

SEQ ID NO: 1792861 - DNA, 25 bp, Homo sapien
ttaaggatggacttgcttgggttgg

SEQ ID NO: 1792862 - DNA, 25 bp, Homo sapien
ggatggacttgcttgggttgggatt

SEQ ID NO: 1792863 - DNA, 25 bp, Homo sapien
ggacttgcttgggttgggattctcc

SEQ ID NO: 1792864 - DNA, 25 bp, Homo sapien
gtaaatatttagaagcgaaatctgg

SEQ ID NO: 1792865 - DNA, 25 bp, Homo sapien
taaatatttagaagcgaaatctgga

SEQ ID NO: 1792866 - DNA, 25 bp, Homo sapien
tagaagcgaaatctggagcggaaaa

SEQ ID NO: 1792867 - DNA, 25 bp, Homo sapien
gaagcgaaatctggagcggaaaaaa

SEQ ID NO: 1792868 - DNA, 25 bp, Homo sapien
ccagcatttgtagcgggtgacatca

SEQ ID NO: 1792869 - DNA, 25 bp, Homo sapien
gagtccagccaagcgatgatgtcag

SEQ ID NO: 1792870 - DNA, 25 bp, Homo sapien
actgatgccccaaacacgctccagc

SEQ ID NO: 1792871 - DNA, 25 bp, Homo sapien
tttgtagcgggtgacatcactgatg

SEQ ID NO: 1792872 - DNA, 25 bp, Homo sapien
ctaagaacaggtgatggtgatgatg

SEQ ID NO: 1792873 - DNA, 25 bp, Homo sapien
tgatggtgatgatgatgatgacgca

SEQ ID NO: 1792874 - DNA, 25 bp, Homo sapien
atggtgatgatgatgatgacgcagc

SEQ ID NO: 1792875 - DNA, 25 bp, Homo sapien
ggtgatggtgatgatgatgatgacg

SEQ ID NO: 1792876 - DNA, 25 bp, Homo sapien
catgttgataacactccggagaggg

SEQ ID NO: 1792877 - DNA, 25 bp, Homo sapien
ccgggaatgtcagagtctgctgcaa

SEQ ID NO: 1792878 - DNA, 25 bp, Homo sapien
taaagtaatgacgtagagagcactg

SEQ ID NO: 1792879 - DNA, 25 bp, Homo sapien
gggactcgtgcacttcggatgaact

SEQ ID NO: 1792880 - DNA, 25 bp, Homo sapien
tatctttactaggagggcaagttcc

SEQ ID NO: 1792881 - DNA, 25 bp, Homo sapien
gactatagaatcagcacaaaggcca

SEQ ID NO: 1792882 - DNA, 25 bp, Homo sapien
ggaaaatctccacaaggcacaatag

SEQ ID NO: 1792883 - DNA, 25 bp, Homo sapien
acccgaggtcgggagcttgagaaca

SEQ ID NO: 1792884 - DNA, 25 bp, Homo sapien
caagattcagttagaaggcaggcac

SEQ ID NO: 1792885 - DNA, 25 bp, Homo sapien
tccagcaagcctacaattaccagag

SEQ ID NO: 1792886 - DNA, 25 bp, Homo sapien
gatttcagcgaagaacatgagcagg

SEQ ID NO: 1792887 - DNA, 25 bp, Homo sapien
ggtctctcaggccttaaagcagtct

SEQ ID NO: 1792888 - DNA, 25 bp, Homo sapien
taacttgtgtgcctctctagcctgt

SEQ ID NO: 1792889 - DNA, 25 bp, Homo sapien
ggagagaactctagcacctggactc

SEQ ID NO: 1792890 - DNA, 25 bp, Homo sapien
aactctgcaagtgcaaggtccaggc

SEQ ID NO: 1792891 - DNA, 25 bp, Homo sapien
aatgaggcatttgcgtggttgcaca

SEQ ID NO: 1792892 - DNA, 25 bp, Homo sapien
tgttgcttaaagacgggtacattct

SEQ ID NO: 1792893 - DNA, 25 bp, Homo sapien
tcatacagtgtacttgcaaacctag

SEQ ID NO: 1792894 - DNA, 25 bp, Homo sapien
gaattactgaaatggttaccttgca

SEQ ID NO: 1792895 - DNA, 25 bp, Homo sapien
tatgtcctgttcgtgaaacggcccc

SEQ ID NO: 1792896 - DNA, 25 bp, Homo sapien
aataccagaggcctatattgttctg

SEQ ID NO: 1792897 - DNA, 25 bp, Homo sapien
gaattcaggactaccctgtgacgta

SEQ ID NO: 1792898 - DNA, 25 bp, Homo sapien
taggtgatccactccagataccagc

SEQ ID NO: 1792899 - DNA, 25 bp, Homo sapien
tgaaactcggctggccaagactggc

SEQ ID NO: 1792900 - DNA, 25 bp, Homo sapien
cgcagctgcctagaccttgcttgct

SEQ ID NO: 1792901 - DNA, 25 bp, Homo sapien
tcattcggtagtccctttaaggaga

SEQ ID NO: 1792902 - DNA, 25 bp, Homo sapien
tggacagtgctttcactcagccgat

SEQ ID NO: 1792903 - DNA, 25 bp, Homo sapien
gcttgttatcaaaggcgcagctgcc

SEQ ID NO: 1792904 - DNA, 25 bp, Homo sapien
tcaaatgagatgaaggaccctagtt

SEQ ID NO: 1792905 - DNA, 25 bp, Homo sapien
caatatattatggagtcatttcaaa

SEQ ID NO: 1792906 - DNA, 25 bp, Homo sapien
tgcctggattaaaggagagttgtaa

SEQ ID NO: 1792907 - DNA, 25 bp, Homo sapien
tataactacagcatgagtataacaa

SEQ ID NO: 1792908 - DNA, 25 bp, Homo sapien
cggtgcccggaagacacgcgtgcca

SEQ ID NO: 1792909 - DNA, 25 bp, Homo sapien
gcagttccgggccaaatatccacat

SEQ ID NO: 1792910 - DNA, 25 bp, Homo sapien
gaagacacgcgtgccaggcttggct

SEQ ID NO: 1792911 - DNA, 25 bp, Homo sapien
ggcttgctgacccatgtgagcagtt

SEQ ID NO: 1792912 - DNA, 25 bp, Homo sapien
tctgtacagagagaatagtcatata

SEQ ID NO: 1792913 - DNA, 25 bp, Homo sapien
tacaaaggctgaaatacctgggctt

SEQ ID NO: 1792914 - DNA, 25 bp, Homo sapien
tctgatggatggctgatatacagcg

SEQ ID NO: 1792915 - DNA, 25 bp, Homo sapien
tcctacagttcatgatctgaagcag

SEQ ID NO: 1792916 - DNA, 25 bp, Homo sapien
caggatctaaacctggccaggccgg

SEQ ID NO: 1792917 - DNA, 25 bp, Homo sapien
ttagctgcagtggatcggaacatga

SEQ ID NO: 1792918 - DNA, 25 bp, Homo sapien
ctatctgctgatgaaaggcgatgca

SEQ ID NO: 1792919 - DNA, 25 bp, Homo sapien
gcgatgcaggatttgtgcggttcct

SEQ ID NO: 1792920 - DNA, 25 bp, Homo sapien
gactcgaggtttccctcttcaccag

SEQ ID NO: 1792921 - DNA, 25 bp, Homo sapien
cagtcgtgactcgaggtttccctct

SEQ ID NO: 1792922 - DNA, 25 bp, Homo sapien
tccactgcctttcagtcgtgactcg

SEQ ID NO: 1792923 - DNA, 25 bp, Homo sapien
tgcctttcagtcgtgactcgaggtt

SEQ ID NO: 1792924 - DNA, 25 bp, Homo sapien
tgcacccagtcgcttggaggagaca

SEQ ID NO: 1792925 - DNA, 25 bp, Homo sapien
tctcccgagggttaatgccatatca

SEQ ID NO: 1792926 - DNA, 25 bp, Homo sapien
caagaacaccttgcatgagatgagg

SEQ ID NO: 1792927 - DNA, 25 bp, Homo sapien
tatcatgtagaacctccacaggccc

SEQ ID NO: 1792928 - DNA, 25 bp, Homo sapien
gcacccagtcgcatggaacgatgct

SEQ ID NO: 1792929 - DNA, 25 bp, Homo sapien
ccagtcgcatggaacgatgctgcac

SEQ ID NO: 1792930 - DNA, 25 bp, Homo sapien
cacccagtcgcatggaacgatgctg

SEQ ID NO: 1792931 - DNA, 25 bp, Homo sapien
cccagtcgcatggaacgatgctgca

SEQ ID NO: 1792932 - DNA, 25 bp, Homo sapien
tgtgctttaatagtgagtgtttcat

SEQ ID NO: 1792933 - DNA, 25 bp, Homo sapien
gagtgtttcatacaaaccatgccca

SEQ ID NO: 1792934 - DNA, 25 bp, Homo sapien
accatgcccatggagcaatatgcac

SEQ ID NO: 1792935 - DNA, 25 bp, Homo sapien
caaaccatgcccatggagcaatatg

SEQ ID NO: 1792936 - DNA, 25 bp, Homo sapien
cggtatcaagatctatgtcataaaa

SEQ ID NO: 1792937 - DNA, 25 bp, Homo sapien
gtttcggtatcaagatctatgtcat

SEQ ID NO: 1792938 - DNA, 25 bp, Homo sapien
aaagcagggccgggtgggcagtcct

SEQ ID NO: 1792939 - DNA, 25 bp, Homo sapien
ttcggtatcaagatctatgtcataa

SEQ ID NO: 1792940 - DNA, 25 bp, Homo sapien
ctgcatcgggtcctgtgagagcctt

SEQ ID NO: 1792941 - DNA, 25 bp, Homo sapien
tgcatcgggtcctgtgagagccttg

SEQ ID NO: 1792942 - DNA, 25 bp, Homo sapien
gatgggagaatcaaacacacttatt

SEQ ID NO: 1792943 - DNA, 25 bp, Homo sapien
aatactgtccaagagagatgggaga

SEQ ID NO: 1792944 - DNA, 25 bp, Homo sapien
caaaagctggaaaaatactgtccaa

SEQ ID NO: 1792945 - DNA, 25 bp, Homo sapien
tggaaaaatactgtccaagagagat

SEQ ID NO: 1792946 - DNA, 25 bp, Homo sapien
ctcgtaccccggtaggcggcagaca

SEQ ID NO: 1792947 - DNA, 25 bp, Homo sapien
tgtctgccgcctaccggggtacgag

SEQ ID NO: 1792948 - DNA, 25 bp, Homo sapien
cggccaagatgccgaggaggagatg

SEQ ID NO: 1792949 - DNA, 25 bp, Homo sapien
ccaagatgccgaggaggagatggct

SEQ ID NO: 1792950 - DNA, 25 bp, Homo sapien
ctgagggcggccaagatgccgagga

SEQ ID NO: 1792951 - DNA, 25 bp, Homo sapien
tgagggcggccaagatgccgaggag

SEQ ID NO: 1792952 - DNA, 25 bp, Homo sapien
tcggcacaagtacgattgttgcaca

SEQ ID NO: 1792953 - DNA, 25 bp, Homo sapien
agcgatctcggcacaagtacgattg

SEQ ID NO: 1792954 - DNA, 25 bp, Homo sapien
gatctcggcacaagtacgattgttg

SEQ ID NO: 1792955 - DNA, 25 bp, Homo sapien
gcacaagtacgattgttgcacatca

SEQ ID NO: 1792956 - DNA, 25 bp, Homo sapien
ggtgactgtgatggccagttgggca

SEQ ID NO: 1792957 - DNA, 25 bp, Homo sapien
ttttcttcgctgcacagcctggcac

SEQ ID NO: 1792958 - DNA, 25 bp, Homo sapien
actgtgatggccagttgggcagctc

SEQ ID NO: 1792959 - DNA, 25 bp, Homo sapien
tttcttcgctgcacagcctggcact

SEQ ID NO: 1792960 - DNA, 25 bp, Homo sapien
aacagaaaatgtgcacacgagctgt

SEQ ID NO: 1792961 - DNA, 25 bp, Homo sapien
aggaagatgccagatggctgttttt

SEQ ID NO: 1792962 - DNA, 25 bp, Homo sapien
ttaaaggaagatgccagatggctgt

SEQ ID NO: 1792963 - DNA, 25 bp, Homo sapien
tttttaaaggaagatgccagatggc

SEQ ID NO: 1792964 - DNA, 25 bp, Homo sapien
tctgctgaaatcctgcgagttggcc

SEQ ID NO: 1792965 - DNA, 25 bp, Homo sapien
gaaggacttatcttttaggcctaga

SEQ ID NO: 1792966 - DNA, 25 bp, Homo sapien
tcccacagatcactgagaggtctgg

SEQ ID NO: 1792967 - DNA, 25 bp, Homo sapien
gagggaacgaggagcttcaaatact

SEQ ID NO: 1792968 - DNA, 25 bp, Homo sapien
agtttaagaatagctttctcctctg

SEQ ID NO: 1792969 - DNA, 25 bp, Homo sapien
cctctggtgttaaaccgttaacatg

SEQ ID NO: 1792970 - DNA, 25 bp, Homo sapien
ccatgtttgagtagtttaagaatag

SEQ ID NO: 1792971 - DNA, 25 bp, Homo sapien
tgttatagctctagagtttgaggcc

SEQ ID NO: 1792972 - DNA, 25 bp, Homo sapien
aacttgagagtggaaaatgttacct

SEQ ID NO: 1792973 - DNA, 25 bp, Homo sapien
tctccaactgcagcaaaaaggcaaa

SEQ ID NO: 1792974 - DNA, 25 bp, Homo sapien
gtggaggtccttttgccgaacacca

SEQ ID NO: 1792975 - DNA, 25 bp, Homo sapien
tccagcattgcataacagacatttt

SEQ ID NO: 1792976 - DNA, 25 bp, Homo sapien
gaaactggtgtcaggtaacactcct

SEQ ID NO: 1792977 - DNA, 25 bp, Homo sapien
tagagatccccgacagtcagaagat

SEQ ID NO: 1792978 - DNA, 25 bp, Homo sapien
tgaggagttacctctagagcgcaga

SEQ ID NO: 1792979 - DNA, 25 bp, Homo sapien
gtcagaagatttcccgcttgatcag

SEQ ID NO: 1792980 - DNA, 25 bp, Homo sapien
cgctggaaaatagttttggatacac

SEQ ID NO: 1792981 - DNA, 25 bp, Homo sapien
gtaagagcaacttcactggcgctgg

SEQ ID NO: 1792982 - DNA, 25 bp, Homo sapien
aagtttaatggccatcgagactcat

SEQ ID NO: 1792983 - DNA, 25 bp, Homo sapien
actcattccttggtggaaactagca

SEQ ID NO: 1792984 - DNA, 25 bp, Homo sapien
gggttgaataaacagatgacattca

SEQ ID NO: 1792985 - DNA, 25 bp, Homo sapien
agggttgaataaacagatgacattc

SEQ ID NO: 1792986 - DNA, 25 bp, Homo sapien
ggttgaataaacagatgacattcat

SEQ ID NO: 1792987 - DNA, 25 bp, Homo sapien
tttggtgtccaactccatgaagaca

SEQ ID NO: 1792988 - DNA, 25 bp, Homo sapien
tgttctgaaccccagagagcgcttg

SEQ ID NO: 1792989 - DNA, 25 bp, Homo sapien
gtctccgctgtttgtctggtacatg

SEQ ID NO: 1792990 - DNA, 25 bp, Homo sapien
aagtatcacttctcatatagttggc

SEQ ID NO: 1792991 - DNA, 25 bp, Homo sapien
gcatacagcttcatcccaacctgga

SEQ ID NO: 1792992 - DNA, 25 bp, Homo sapien
atacagcttcatcccaacctggaca

SEQ ID NO: 1792993 - DNA, 25 bp, Homo sapien
tctgcatacagcttcatcccaacct

SEQ ID NO: 1792994 - DNA, 25 bp, Homo sapien
tgcatacagcttcatcccaacctgg

SEQ ID NO: 1792995 - DNA, 25 bp, Homo sapien
tcacctgctacagaagtggcttctt

SEQ ID NO: 1792996 - DNA, 25 bp, Homo sapien
gagctttcgaattcccaccatacag

SEQ ID NO: 1792997 - DNA, 25 bp, Homo sapien
tctagtccaagaaccctcagagcct

SEQ ID NO: 1792998 - DNA, 25 bp, Homo sapien
tacagcttggttggctctagtccaa

SEQ ID NO: 1792999 - DNA, 25 bp, Homo sapien
ttgacaccaatgtagtgactaaggg

SEQ ID NO: 1793000 - DNA, 25 bp, Homo sapien
tgtagtgactaagggaagcaagaaa

SEQ ID NO: 1793001 - DNA, 25 bp, Homo sapien
gtctgacattgacaccaatgtagtg

SEQ ID NO: 1793002 - DNA, 25 bp, Homo sapien
caccaatgtagtgactaagggaagc

SEQ ID NO: 1793003 - DNA, 25 bp, Homo sapien
ctggagaggacgtccgtgtcctctt

SEQ ID NO: 1793004 - DNA, 25 bp, Homo sapien
cttggccttagagcatgtattctca

SEQ ID NO: 1793005 - DNA, 25 bp, Homo sapien
tggactcttggccttagagcatgta

SEQ ID NO: 1793006 - DNA, 25 bp, Homo sapien
gaggacgtccgtgtcctcttggact

SEQ ID NO: 1793007 - DNA, 25 bp, Homo sapien
tgggcagagccctgatttttgccgt

SEQ ID NO: 1793008 - DNA, 25 bp, Homo sapien
aaggctcaattgtactcttgctgcc

SEQ ID NO: 1793009 - DNA, 25 bp, Homo sapien
ggcagagccctgatttttgccgtgg

SEQ ID NO: 1793010 - DNA, 25 bp, Homo sapien
gctcaattgtactcttgctgcctct

SEQ ID NO: 1793011 - DNA, 25 bp, Homo sapien
tgggctgttgtagagaaacatctgt

SEQ ID NO: 1793012 - DNA, 25 bp, Homo sapien
ggagcctctgaagcaccgtgtgtag

SEQ ID NO: 1793013 - DNA, 25 bp, Homo sapien
tgtgtaggccaatcccctgtctctg

SEQ ID NO: 1793014 - DNA, 25 bp, Homo sapien
ccttaggaccagctgggaacagctt

SEQ ID NO: 1793015 - DNA, 25 bp, Homo sapien
ccaagtccttcttatcatgtgcaga

SEQ ID NO: 1793016 - DNA, 25 bp, Homo sapien
gaggacttttgctgagatatgcgaa

SEQ ID NO: 1793017 - DNA, 25 bp, Homo sapien
aaaactgtaagtcaggacctccgtg

SEQ ID NO: 1793018 - DNA, 25 bp, Homo sapien
gacctccgtgtgattctcacccaag

SEQ ID NO: 1793019 - DNA, 25 bp, Homo sapien
tgtgcataggcatttatcaatcatg

SEQ ID NO: 1793020 - DNA, 25 bp, Homo sapien
caatcatgcctaaaccttccaggag

SEQ ID NO: 1793021 - DNA, 25 bp, Homo sapien
atgggtccagagataaacgacttca

SEQ ID NO: 1793022 - DNA, 25 bp, Homo sapien
agataaacgacttcaggtgtgacca

SEQ ID NO: 1793023 - DNA, 25 bp, Homo sapien
catttcaagtgagcattctgagcga

SEQ ID NO: 1793024 - DNA, 25 bp, Homo sapien
gtcctggccacattcgtgcacactg

SEQ ID NO: 1793025 - DNA, 25 bp, Homo sapien
cctggccacattcgtgcacactggt

SEQ ID NO: 1793026 - DNA, 25 bp, Homo sapien
cattctgagcgaaaagcatgtgtcc

SEQ ID NO: 1793027 - DNA, 25 bp, Homo sapien
ctggcggttccagcatggattctgt

SEQ ID NO: 1793028 - DNA, 25 bp, Homo sapien
tgctggcctggcggttccagcatgg

SEQ ID NO: 1793029 - DNA, 25 bp, Homo sapien
ggcctggcggttccagcatggattc

SEQ ID NO: 1793030 - DNA, 25 bp, Homo sapien
cctggcggttccagcatggattctg

SEQ ID NO: 1793031 - DNA, 25 bp, Homo sapien
cataagaacttgggaacccaatcct

SEQ ID NO: 1793032 - DNA, 25 bp, Homo sapien
tgggaacccaatcctttgttccatc

SEQ ID NO: 1793033 - DNA, 25 bp, Homo sapien
ggttgacatcttgcccttttgtctt

SEQ ID NO: 1793034 - DNA, 25 bp, Homo sapien
tggtcctgggttgacatcttgccct

SEQ ID NO: 1793035 - DNA, 25 bp, Homo sapien
cctgggttgacatcttgcccttttg

SEQ ID NO: 1793036 - DNA, 25 bp, Homo sapien
ggtcctgggttgacatcttgccctt

SEQ ID NO: 1793037 - DNA, 25 bp, Homo sapien
agagaggtgtcggtgggtgggctgc

SEQ ID NO: 1793038 - DNA, 25 bp, Homo sapien
tgtaatcccaggctgcgtaggagct

SEQ ID NO: 1793039 - DNA, 25 bp, Homo sapien
ccaggctgcgtaggagctccgatgt

SEQ ID NO: 1793040 - DNA, 25 bp, Homo sapien
ctccgatgtgatggacgctgctgtg

SEQ ID NO: 1793041 - DNA, 25 bp, Homo sapien
cctcaatctgtttgagaacaaaacc

SEQ ID NO: 1793042 - DNA, 25 bp, Homo sapien
ggtgaggaacctcaatctgtttgag

SEQ ID NO: 1793043 - DNA, 25 bp, Homo sapien
aatggacaatatccagtttgaggaa

SEQ ID NO: 1793044 - DNA, 25 bp, Homo sapien
tgaggaattgtgttggaagctccca

SEQ ID NO: 1793045 - DNA, 25 bp, Homo sapien
gcctgtgatgggattctcttccgca

SEQ ID NO: 1793046 - DNA, 25 bp, Homo sapien
gatgggattctcttccgcaaacaca

SEQ ID NO: 1793047 - DNA, 25 bp, Homo sapien
tgtgatgggattctcttccgcaaac

SEQ ID NO: 1793048 - DNA, 25 bp, Homo sapien
tgggattctcttccgcaaacacagg

SEQ ID NO: 1793049 - DNA, 25 bp, Homo sapien
aatgtctttgtaaagacaaggaagt

SEQ ID NO: 1793050 - DNA, 25 bp, Homo sapien
tccaggaatgtctttgtaaagacaa

SEQ ID NO: 1793051 - DNA, 25 bp, Homo sapien
attggtttttattccaggaatgtct

SEQ ID NO: 1793052 - DNA, 25 bp, Homo sapien
ttattccaggaatgtctttgtaaag

SEQ ID NO: 1793053 - DNA, 25 bp, Homo sapien
tggctatgcactgccattccagtgg

SEQ ID NO: 1793054 - DNA, 25 bp, Homo sapien
actggccttcccatagataactgac

SEQ ID NO: 1793055 - DNA, 25 bp, Homo sapien
gtgtaactgcacctttgatttgtgg

SEQ ID NO: 1793056 - DNA, 25 bp, Homo sapien
taaggctggctacttggagtgtcac

SEQ ID NO: 1793057 - DNA, 25 bp, Homo sapien
tgataaattcatctagccactgctt

SEQ ID NO: 1793058 - DNA, 25 bp, Homo sapien
ttctgctcatttttgataaattcat

SEQ ID NO: 1793059 - DNA, 25 bp, Homo sapien
catttttgataaattcatctagcca

SEQ ID NO: 1793060 - DNA, 25 bp, Homo sapien
ccttctgctcatttttgataaattc

SEQ ID NO: 1793061 - DNA, 25 bp, Homo sapien
ttctcagacagcttccagaggagcc

SEQ ID NO: 1793062 - DNA, 25 bp, Homo sapien
cagggaagtcatttggctcaggccc

SEQ ID NO: 1793063 - DNA, 25 bp, Homo sapien
ttcttggaaagttgactgactgccc

SEQ ID NO: 1793064 - DNA, 25 bp, Homo sapien
ttagccagggatgagcacatactcc

SEQ ID NO: 1793065 - DNA, 25 bp, Homo sapien
tatgtgattattctcctccttgaaa

SEQ ID NO: 1793066 - DNA, 25 bp, Homo sapien
atgtgattattctcctccttgaaac

SEQ ID NO: 1793067 - DNA, 25 bp, Homo sapien
gtattatatgtgattattctcctcc

SEQ ID NO: 1793068 - DNA, 25 bp, Homo sapien
ttatatgtgattattctcctccttg

SEQ ID NO: 1793069 - DNA, 25 bp, Homo sapien
tcacccttggttgacatctgtgtta

SEQ ID NO: 1793070 - DNA, 25 bp, Homo sapien
ggcatctaattgtttgcttctgctg

SEQ ID NO: 1793071 - DNA, 25 bp, Homo sapien
cgtggtttactatagcaatttcacc

SEQ ID NO: 1793072 - DNA, 25 bp, Homo sapien
cagattgggttagacgtttggcatc

SEQ ID NO: 1793073 - DNA, 25 bp, Homo sapien
tgaggccaacggcaagatctggaga

SEQ ID NO: 1793074 - DNA, 25 bp, Homo sapien
tagctgtattgctcaatcctttcct

SEQ ID NO: 1793075 - DNA, 25 bp, Homo sapien
cattgtggtgaataggaatgaggcc

SEQ ID NO: 1793076 - DNA, 25 bp, Homo sapien
gatgttgaaacccctggtcccagct

SEQ ID NO: 1793077 - DNA, 25 bp, Homo sapien
taacctgggaatacggtcccactgc

SEQ ID NO: 1793078 - DNA, 25 bp, Homo sapien
cataacctgggaatacggtcccact

SEQ ID NO: 1793079 - DNA, 25 bp, Homo sapien
tgggaatacggtcccactgcaaaca

SEQ ID NO: 1793080 - DNA, 25 bp, Homo sapien
cctgggaatacggtcccactgcaaa

SEQ ID NO: 1793081 - DNA, 25 bp, Homo sapien
gtcattctaactttagtgtgtatgc

SEQ ID NO: 1793082 - DNA, 25 bp, Homo sapien
tctaactttagtgtgtatgctgtca

SEQ ID NO: 1793083 - DNA, 25 bp, Homo sapien
tgtcattctaactttagtgtgtatg

SEQ ID NO: 1793084 - DNA, 25 bp, Homo sapien
ttctaactttagtgtgtatgctgtc

SEQ ID NO: 1793085 - DNA, 25 bp, Homo sapien
cttggctgcctctaatcctgagagg

SEQ ID NO: 1793086 - DNA, 25 bp, Homo sapien
tcttggctgcctctaatcctgagag

SEQ ID NO: 1793087 - DNA, 25 bp, Homo sapien
ggctgcctctaatcctgagaggctg

SEQ ID NO: 1793088 - DNA, 25 bp, Homo sapien
cctcttggctgcctctaatcctgag

SEQ ID NO: 1793089 - DNA, 25 bp, Homo sapien
tctagaaatccggtagcgtgtcccc

SEQ ID NO: 1793090 - DNA, 25 bp, Homo sapien
gtgcacagatgaacgcagtagccca

SEQ ID NO: 1793091 - DNA, 25 bp, Homo sapien
aacaccttcagagtgattccttagt

SEQ ID NO: 1793092 - DNA, 25 bp, Homo sapien
aattctagaaatccggtagcgtgtc

SEQ ID NO: 1793093 - DNA, 25 bp, Homo sapien
gtccaccatttcatttttgtgccct

SEQ ID NO: 1793094 - DNA, 25 bp, Homo sapien
catttcatttttgtgccctctatag

SEQ ID NO: 1793095 - DNA, 25 bp, Homo sapien
ttagtttgtaatgttgggccttgta

SEQ ID NO: 1793096 - DNA, 25 bp, Homo sapien
taatgttgggccttgtatttttgtc

SEQ ID NO: 1793097 - DNA, 25 bp, Homo sapien
cgactttcagctcgcccaggagcga

SEQ ID NO: 1793098 - DNA, 25 bp, Homo sapien
aggagcgagtccgagtccccatttg

SEQ ID NO: 1793099 - DNA, 25 bp, Homo sapien
ctccccattagcaggagaaaggcaa

SEQ ID NO: 1793100 - DNA, 25 bp, Homo sapien
cctgcagattgtgtttaactccaaa

SEQ ID NO: 1793101 - DNA, 25 bp, Homo sapien
gagcaaaaagcctgccggggacact

SEQ ID NO: 1793102 - DNA, 25 bp, Homo sapien
tcccgtttctaacagggcgactaga

SEQ ID NO: 1793103 - DNA, 25 bp, Homo sapien
gcgcctcccgtttctaacagggcga

SEQ ID NO: 1793104 - DNA, 25 bp, Homo sapien
tctaacagggcgactagagctgcgg

SEQ ID NO: 1793105 - DNA, 25 bp, Homo sapien
gaaggagacgcgctcgcggcaaact

SEQ ID NO: 1793106 - DNA, 25 bp, Homo sapien
ctgcgaatgaaggagacgcgctcgc

SEQ ID NO: 1793107 - DNA, 25 bp, Homo sapien
aaggagacgcgctcgcggcaaactc

SEQ ID NO: 1793108 - DNA, 25 bp, Homo sapien
aatgaaggagacgcgctcgcggcaa

SEQ ID NO: 1793109 - DNA, 25 bp, Homo sapien
cgagagcgccttccttcgccgccag

SEQ ID NO: 1793110 - DNA, 25 bp, Homo sapien
gggcaagagccaaaagacgcgcgcc

SEQ ID NO: 1793111 - DNA, 25 bp, Homo sapien
tcctccgcacttctcccgcgcctag

SEQ ID NO: 1793112 - DNA, 25 bp, Homo sapien
tcgccgccagccgactgcgaacgcg

SEQ ID NO: 1793113 - DNA, 25 bp, Homo sapien
gcggtggtgtctggcgccgcctcgg

SEQ ID NO: 1793114 - DNA, 25 bp, Homo sapien
gcgtggagctcccctcgggcggctg

SEQ ID NO: 1793115 - DNA, 25 bp, Homo sapien
tccgggctgcgctgctcggtggagc

SEQ ID NO: 1793116 - DNA, 25 bp, Homo sapien
ctgcgctgctcggtggagctcccgg

SEQ ID NO: 1793117 - DNA, 25 bp, Homo sapien
aagcctccaaagaggggttcgcact

SEQ ID NO: 1793118 - DNA, 25 bp, Homo sapien
ctggagacccgcgacaaagatgcaa

SEQ ID NO: 1793119 - DNA, 25 bp, Homo sapien
agacccgcgacaaagatgcaagccc

SEQ ID NO: 1793120 - DNA, 25 bp, Homo sapien
cggcgcgaaagaccctgaaaagcct

SEQ ID NO: 1793121 - DNA, 25 bp, Homo sapien
ccaccggaagagtgcgcagaaaggc

SEQ ID NO: 1793122 - DNA, 25 bp, Homo sapien
tattattgcgcatggcgcagtcgcc

SEQ ID NO: 1793123 - DNA, 25 bp, Homo sapien
cagggcgcgggttttattattgcgc

SEQ ID NO: 1793124 - DNA, 25 bp, Homo sapien
cagaaaggctcagccgccgtgggca

SEQ ID NO: 1793125 - DNA, 25 bp, Homo sapien
gactttccgcatctcggagctccgg

SEQ ID NO: 1793126 - DNA, 25 bp, Homo sapien
ttttcctggctctgagcgagctaca

SEQ ID NO: 1793127 - DNA, 25 bp, Homo sapien
tgccgcaggaggactgggtaccaaa

SEQ ID NO: 1793128 - DNA, 25 bp, Homo sapien
tgtgtttggccaactgagtctgcag

SEQ ID NO: 1793129 - DNA, 25 bp, Homo sapien
cactgaccccatcctttgagaactt

SEQ ID NO: 1793130 - DNA, 25 bp, Homo sapien
tcgttacactgaccccatcctttga

SEQ ID NO: 1793131 - DNA, 25 bp, Homo sapien
tgaccccatcctttgagaacttcta

SEQ ID NO: 1793132 - DNA, 25 bp, Homo sapien
ttacactgaccccatcctttgagaa

SEQ ID NO: 1793133 - DNA, 25 bp, Homo sapien
aatcttcccgcaccctgcagttgtg

SEQ ID NO: 1793134 - DNA, 25 bp, Homo sapien
taatcttcccgcaccctgcagttgt

SEQ ID NO: 1793135 - DNA, 25 bp, Homo sapien
caccagcattcaggtcatctaatct

SEQ ID NO: 1793136 - DNA, 25 bp, Homo sapien
ttcaggtcatctaatcttcccgcac

SEQ ID NO: 1793137 - DNA, 25 bp, Homo sapien
tcttctattcgagtacatctttatg

SEQ ID NO: 1793138 - DNA, 25 bp, Homo sapien
tctgttttaatgcacgagggtcaaa

SEQ ID NO: 1793139 - DNA, 25 bp, Homo sapien
taatgcacgagggtcaaacacatcc

SEQ ID NO: 1793140 - DNA, 25 bp, Homo sapien
aatttaccagtcagacaacggactc

SEQ ID NO: 1793141 - DNA, 25 bp, Homo sapien
ggtgatgtagtcactttgaggccat

SEQ ID NO: 1793142 - DNA, 25 bp, Homo sapien
tggtgatgtagtcactttgaggcca

SEQ ID NO: 1793143 - DNA, 25 bp, Homo sapien
cgacgggctgcaacttatcctcttt

SEQ ID NO: 1793144 - DNA, 25 bp, Homo sapien
ctgcagctcttaacatcgacgggct

SEQ ID NO: 1793145 - DNA, 25 bp, Homo sapien
aaagccggcagtggctctctattgc

SEQ ID NO: 1793146 - DNA, 25 bp, Homo sapien
gttcattgtcaaaagccggcagtgg

SEQ ID NO: 1793147 - DNA, 25 bp, Homo sapien
cggtggctcatgcctgtaatcccag

SEQ ID NO: 1793148 - DNA, 25 bp, Homo sapien
aaaacaggtggatcacctgaggtca

SEQ ID NO: 1793149 - DNA, 25 bp, Homo sapien
gtcaggattttgagaccagcctggc

SEQ ID NO: 1793150 - DNA, 25 bp, Homo sapien
aaaaacttgactttctggccaggca

SEQ ID NO: 1793151 - DNA, 25 bp, Homo sapien
catagccactatcggggccttcagt

SEQ ID NO: 1793152 - DNA, 25 bp, Homo sapien
cactatcggggccttcagtgttgat

SEQ ID NO: 1793153 - DNA, 25 bp, Homo sapien
tctccatagccactatcggggcctt

SEQ ID NO: 1793154 - DNA, 25 bp, Homo sapien
ccactatcggggccttcagtgttga

SEQ ID NO: 1793155 - DNA, 25 bp, Homo sapien
tcaaatgcctgtagtcaaatgatct

SEQ ID NO: 1793156 - DNA, 25 bp, Homo sapien
gggaataccaggtccaccatgagcc

SEQ ID NO: 1793157 - DNA, 25 bp, Homo sapien
catgctcacctctagtcctctcttc

SEQ ID NO: 1793158 - DNA, 25 bp, Homo sapien
gacaggggtcttggtatcttgtcca

SEQ ID NO: 1793159 - DNA, 25 bp, Homo sapien
acatgagcatgtttaagtccacaaa

SEQ ID NO: 1793160 - DNA, 25 bp, Homo sapien
ccacaaatggctgggtacatgctca

SEQ ID NO: 1793161 - DNA, 25 bp, Homo sapien
tgtttaagtccacaaatggctgggt

SEQ ID NO: 1793162 - DNA, 25 bp, Homo sapien
aatggctgggtacatgctcagctgg

SEQ ID NO: 1793163 - DNA, 25 bp, Homo sapien
cactgtcggattggtgcctcttgtc

SEQ ID NO: 1793164 - DNA, 25 bp, Homo sapien
tctgagcactgtcggattggtgcct

SEQ ID NO: 1793165 - DNA, 25 bp, Homo sapien
ctgtcggattggtgcctcttgtcca

SEQ ID NO: 1793166 - DNA, 25 bp, Homo sapien
tcagtatctctgagcactgtcggat

SEQ ID NO: 1793167 - DNA, 25 bp, Homo sapien
caaagactcagcacaaatttctcta

SEQ ID NO: 1793168 - DNA, 25 bp, Homo sapien
aaatttctctatgccacctttcctg

SEQ ID NO: 1793169 - DNA, 25 bp, Homo sapien
tctttctctcgtgcatctccattct

SEQ ID NO: 1793170 - DNA, 25 bp, Homo sapien
ctttctctcgtgcatctccattctg

SEQ ID NO: 1793171 - DNA, 25 bp, Homo sapien
gaacgtgtagcagaccagcaagaaa

SEQ ID NO: 1793172 - DNA, 25 bp, Homo sapien
tgactgaacagaagaagaacgtgta

SEQ ID NO: 1793173 - DNA, 25 bp, Homo sapien
tgcatttcttagaggacacccaagg

SEQ ID NO: 1793174 - DNA, 25 bp, Homo sapien
gccatgacaccgcactacgtgaaaa

SEQ ID NO: 1793175 - DNA, 25 bp, Homo sapien
gccagatattcacttgctaaaaatg

SEQ ID NO: 1793176 - DNA, 25 bp, Homo sapien
tcatgccagatattcacttgctaaa

SEQ ID NO: 1793177 - DNA, 25 bp, Homo sapien
attcatgccagatattcacttgcta

SEQ ID NO: 1793178 - DNA, 25 bp, Homo sapien
catgccagatattcacttgctaaaa

SEQ ID NO: 1793179 - DNA, 25 bp, Homo sapien
cagaggtttgggattcatcagcaca

SEQ ID NO: 1793180 - DNA, 25 bp, Homo sapien
ccccaagctggagagtgcattgaca

SEQ ID NO: 1793181 - DNA, 25 bp, Homo sapien
caagacaatgaagtagaggcatcct

SEQ ID NO: 1793182 - DNA, 25 bp, Homo sapien
catgcttggatattgagccccagcc

SEQ ID NO: 1793183 - DNA, 25 bp, Homo sapien
tgatcagcccacatttagacagagc

SEQ ID NO: 1793184 - DNA, 25 bp, Homo sapien
gcccacatttagacagagctgctga

SEQ ID NO: 1793185 - DNA, 25 bp, Homo sapien
tcagcccacatttagacagagctgc

SEQ ID NO: 1793186 - DNA, 25 bp, Homo sapien
tttgatcagcccacatttagacaga

SEQ ID NO: 1793187 - DNA, 25 bp, Homo sapien
agaagaaactgcttcggcatatttg

SEQ ID NO: 1793188 - DNA, 25 bp, Homo sapien
ggtgggtggatcatttgcagtcagg

SEQ ID NO: 1793189 - DNA, 25 bp, Homo sapien
gaccaacctggccaacatggtaaaa

SEQ ID NO: 1793190 - DNA, 25 bp, Homo sapien
aggtgggtggatcatttgcagtcag

SEQ ID NO: 1793191 - DNA, 25 bp, Homo sapien
agttcgagaccaacctggccaacat

SEQ ID NO: 1793192 - DNA, 25 bp, Homo sapien
ttaaactccagggacaccatcaagc

SEQ ID NO: 1793193 - DNA, 25 bp, Homo sapien
tctcgaatgcaaacctctcgccttt

SEQ ID NO: 1793194 - DNA, 25 bp, Homo sapien
tctctcgaatgcaaacctctcgcct

SEQ ID NO: 1793195 - DNA, 25 bp, Homo sapien
gcctctctcgaatgcaaacctctcg

SEQ ID NO: 1793196 - DNA, 25 bp, Homo sapien
aaaagcctagaaacctggagaccat

SEQ ID NO: 1793197 - DNA, 25 bp, Homo sapien
ctcgttggaaaagcctagaaacctg

SEQ ID NO: 1793198 - DNA, 25 bp, Homo sapien
gcaaagaattagcatcctcgttgga

SEQ ID NO: 1793199 - DNA, 25 bp, Homo sapien
aattagcatcctcgttggaaaagcc

SEQ ID NO: 1793200 - DNA, 25 bp, Homo sapien
gacctgaactctctcgagctctgag

SEQ ID NO: 1793201 - DNA, 25 bp, Homo sapien
cacattcgggactcagtcaagaggg

SEQ ID NO: 1793202 - DNA, 25 bp, Homo sapien
aggggcaacttaccctgctttgacg

SEQ ID NO: 1793203 - DNA, 25 bp, Homo sapien
gagctctaaccttctctgactcaga

SEQ ID NO: 1793204 - DNA, 25 bp, Homo sapien
cagccataaccatgctagtcatcat

SEQ ID NO: 1793205 - DNA, 25 bp, Homo sapien
cttctaaacacgaaagtgtatcaaa

SEQ ID NO: 1793206 - DNA, 25 bp, Homo sapien
cacgaaagtgtatcaaaacacaaca

SEQ ID NO: 1793207 - DNA, 25 bp, Homo sapien
aatgccagccataaccatgctagtc

SEQ ID NO: 1793208 - DNA, 25 bp, Homo sapien
tttctgaagcccactaggcagaggg

SEQ ID NO: 1793209 - DNA, 25 bp, Homo sapien
ctggctgcagcattcaagatagaag

SEQ ID NO: 1793210 - DNA, 25 bp, Homo sapien
gcccactaggcagagggttccactg

SEQ ID NO: 1793211 - DNA, 25 bp, Homo sapien
gctgcagcattcaagatagaaggca

SEQ ID NO: 1793212 - DNA, 25 bp, Homo sapien
tctcacattgcttatggaaacccca

SEQ ID NO: 1793213 - DNA, 25 bp, Homo sapien
aaccccaaaggactggccactacag

SEQ ID NO: 1793214 - DNA, 25 bp, Homo sapien
taaatactagacagagagtttctcg

SEQ ID NO: 1793215 - DNA, 25 bp, Homo sapien
caaagatcggcatttatcaaaccgg

SEQ ID NO: 1793216 - DNA, 25 bp, Homo sapien
tgtgtatcagtgagcccacccatca

SEQ ID NO: 1793217 - DNA, 25 bp, Homo sapien
gcatctcagctgcaggctagagtgc

SEQ ID NO: 1793218 - DNA, 25 bp, Homo sapien
tcagatcctcaggttgcgagggcaa

SEQ ID NO: 1793219 - DNA, 25 bp, Homo sapien
cccgacagtcatgctttccaagaag

SEQ ID NO: 1793220 - DNA, 25 bp, Homo sapien
tttgatcaaatcaaggtccacgtgc

SEQ ID NO: 1793221 - DNA, 25 bp, Homo sapien
catacaacgtcttggttagagtcca

SEQ ID NO: 1793222 - DNA, 25 bp, Homo sapien
gagtccaagctcctctcagctatgg

SEQ ID NO: 1793223 - DNA, 25 bp, Homo sapien
cagccattttatgagacttggtcca

SEQ ID NO: 1793224 - DNA, 25 bp, Homo sapien
aacagaatactcagattacatttcc

SEQ ID NO: 1793225 - DNA, 25 bp, Homo sapien
taaacagaatactcagattacattt

SEQ ID NO: 1793226 - DNA, 25 bp, Homo sapien
tattaaacagaatactcagattaca

SEQ ID NO: 1793227 - DNA, 25 bp, Homo sapien
acagaatactcagattacatttcca

SEQ ID NO: 1793228 - DNA, 25 bp, Homo sapien
gggattgttggcttcaaaatgccca

SEQ ID NO: 1793229 - DNA, 25 bp, Homo sapien
ggattgttggcttcaaaatgcccat

SEQ ID NO: 1793230 - DNA, 25 bp, Homo sapien
ctgaaataataccactgtagtttaa

SEQ ID NO: 1793231 - DNA, 25 bp, Homo sapien
aataataccactgtagtttaatact

SEQ ID NO: 1793232 - DNA, 25 bp, Homo sapien
gaaataataccactgtagtttaata

SEQ ID NO: 1793233 - DNA, 25 bp, Homo sapien
taataccactgtagtttaatactta

SEQ ID NO: 1793234 - DNA, 25 bp, Homo sapien
gggttcaagacacgcaatccagaag

SEQ ID NO: 1793235 - DNA, 25 bp, Homo sapien
gctaaattgatttcacctggctgtt

SEQ ID NO: 1793236 - DNA, 25 bp, Homo sapien
tccagaagccttaagttgtgctaaa

SEQ ID NO: 1793237 - DNA, 25 bp, Homo sapien
tgacttagaccctgaacgctgaagg

SEQ ID NO: 1793238 - DNA, 25 bp, Homo sapien
cgccattgatggtggacagctgacc

SEQ ID NO: 1793239 - DNA, 25 bp, Homo sapien
tcagctacgccattgatggtggaca

SEQ ID NO: 1793240 - DNA, 25 bp, Homo sapien
tccttgaccgttcagggctcctttc

SEQ ID NO: 1793241 - DNA, 25 bp, Homo sapien
tcatcttgctcagctacgccattga

SEQ ID NO: 1793242 - DNA, 25 bp, Homo sapien
accaccaggcagtatgacagagtat

SEQ ID NO: 1793243 - DNA, 25 bp, Homo sapien
agagtattttctgctgagtccaaag

SEQ ID NO: 1793244 - DNA, 25 bp, Homo sapien
tccagttcctggaggggcggcttac

SEQ ID NO: 1793245 - DNA, 25 bp, Homo sapien
gagtccaaagtttgttgcaagtgct

SEQ ID NO: 1793246 - DNA, 25 bp, Homo sapien
tccagacaagcagttgggacaaagc

SEQ ID NO: 1793247 - DNA, 25 bp, Homo sapien
ttgcaatgcgcctatcagaaagagt

SEQ ID NO: 1793248 - DNA, 25 bp, Homo sapien
gttgtacaagtatagcaggctcctc

SEQ ID NO: 1793249 - DNA, 25 bp, Homo sapien
tctctagagggagagataatgactc

SEQ ID NO: 1793250 - DNA, 25 bp, Homo sapien
aacacgcagcacatcatagtttaag

SEQ ID NO: 1793251 - DNA, 25 bp, Homo sapien
cacatcatagtttaagcaaagaggg

SEQ ID NO: 1793252 - DNA, 25 bp, Homo sapien
cagcacatcatagtttaagcaaaga

SEQ ID NO: 1793253 - DNA, 25 bp, Homo sapien
ctataaaacacgcagcacatcatag

SEQ ID NO: 1793254 - DNA, 25 bp, Homo sapien
taaccattcctcgaagatctctagg

SEQ ID NO: 1793255 - DNA, 25 bp, Homo sapien
actgtgtccaaacggtcactcttca

SEQ ID NO: 1793256 - DNA, 25 bp, Homo sapien
caagagacttactgggccacatgct

SEQ ID NO: 1793257 - DNA, 25 bp, Homo sapien
taaatggaacaacgagctcaaggtc

SEQ ID NO: 1793258 - DNA, 25 bp, Homo sapien
agaccctgctgtagagtttagacaa

SEQ ID NO: 1793259 - DNA, 25 bp, Homo sapien
caggaccaaattccactgtgggcca

SEQ ID NO: 1793260 - DNA, 25 bp, Homo sapien
tcctcccagggaccaaaatgggtca

SEQ ID NO: 1793261 - DNA, 25 bp, Homo sapien
ggtgtcccaaatcctacaggtcagt

SEQ ID NO: 1793262 - DNA, 25 bp, Homo sapien
tcctttaaatggaccttgagcgcgt

SEQ ID NO: 1793263 - DNA, 25 bp, Homo sapien
ctttaaatggaccttgagcgcgtgt

SEQ ID NO: 1793264 - DNA, 25 bp, Homo sapien
ttaaatggaccttgagcgcgtgttt

SEQ ID NO: 1793265 - DNA, 25 bp, Homo sapien
ttcaaccaagtgtgcagcttcggga

SEQ ID NO: 1793266 - DNA, 25 bp, Homo sapien
tgaggtagccttggagctggtctct

SEQ ID NO: 1793267 - DNA, 25 bp, Homo sapien
ctctgaggtagccttggagctggtc

SEQ ID NO: 1793268 - DNA, 25 bp, Homo sapien
gaggtagccttggagctggtctctg

SEQ ID NO: 1793269 - DNA, 25 bp, Homo sapien
tctgaggtagccttggagctggtct

SEQ ID NO: 1793270 - DNA, 25 bp, Homo sapien
ggcagagcaatagatcatgtggcaa

SEQ ID NO: 1793271 - DNA, 25 bp, Homo sapien
catgtggcaagttgtagactctctc

SEQ ID NO: 1793272 - DNA, 25 bp, Homo sapien
tcactgtccaatgcaggagactttc

SEQ ID NO: 1793273 - DNA, 25 bp, Homo sapien
tttttagaggaagacatcaccaccc

SEQ ID NO: 1793274 - DNA, 25 bp, Homo sapien
gagtgtcctggctgtgcaaatcatg

SEQ ID NO: 1793275 - DNA, 25 bp, Homo sapien
tctaacactgggacaagcaacagct

SEQ ID NO: 1793276 - DNA, 25 bp, Homo sapien
aacacaaggctatcatctggtgcca

SEQ ID NO: 1793277 - DNA, 25 bp, Homo sapien
taataagtcccttccccagagatgt

SEQ ID NO: 1793278 - DNA, 25 bp, Homo sapien
ccagagtgagcaacgtgaaaaccgc

SEQ ID NO: 1793279 - DNA, 25 bp, Homo sapien
gatattgcctggaagctgactccca

SEQ ID NO: 1793280 - DNA, 25 bp, Homo sapien
gaatgatgggccttgtcctgactca

SEQ ID NO: 1793281 - DNA, 25 bp, Homo sapien
cacgtagttgcactttttgggcacc

SEQ ID NO: 1793282 - DNA, 25 bp, Homo sapien
tccccagataattataggcggaccc

SEQ ID NO: 1793283 - DNA, 25 bp, Homo sapien
tacaggagatcagcttagcgggtcc

SEQ ID NO: 1793284 - DNA, 25 bp, Homo sapien
tcggagctgccgcagcgaaaagcag

SEQ ID NO: 1793285 - DNA, 25 bp, Homo sapien
aagcagagcgcggatgcatttcccc

SEQ ID NO: 1793286 - DNA, 25 bp, Homo sapien
ctgtgatggtgatggtccccagcat

SEQ ID NO: 1793287 - DNA, 25 bp, Homo sapien
gacatatttctattcagtcggctgc

SEQ ID NO: 1793288 - DNA, 25 bp, Homo sapien
catatttctattcagtcggctgctg

SEQ ID NO: 1793289 - DNA, 25 bp, Homo sapien
tgacatatttctattcagtcggctg

SEQ ID NO: 1793290 - DNA, 25 bp, Homo sapien
tatttctattcagtcggctgctgtt

SEQ ID NO: 1793291 - DNA, 25 bp, Homo sapien
gaaatgcaaacttgttcctaagtag

SEQ ID NO: 1793292 - DNA, 25 bp, Homo sapien
caggcctcctaaaataacatagtac

SEQ ID NO: 1793293 - DNA, 25 bp, Homo sapien
agataactacaataaccttctatag

SEQ ID NO: 1793294 - DNA, 25 bp, Homo sapien
cctaagtagttcctacaaaatgcca

SEQ ID NO: 1793295 - DNA, 25 bp, Homo sapien
gatcccttaaacatctgggcaggca

SEQ ID NO: 1793296 - DNA, 25 bp, Homo sapien
tccatagcagatgtgaaacacccat

SEQ ID NO: 1793297 - DNA, 25 bp, Homo sapien
catcttcacaacgagaaagaggtct

SEQ ID NO: 1793298 - DNA, 25 bp, Homo sapien
gaacgttggaggattgattcttccc

SEQ ID NO: 1793299 - DNA, 25 bp, Homo sapien
tggagcccgaattcacaggcacctc

SEQ ID NO: 1793300 - DNA, 25 bp, Homo sapien
gggtggagacacctaatcacatgct

SEQ ID NO: 1793301 - DNA, 25 bp, Homo sapien
tgtagacacttcaaagcgcaggaaa

SEQ ID NO: 1793302 - DNA, 25 bp, Homo sapien
tgacagggctttcgacatcaaccat

SEQ ID NO: 1793303 - DNA, 25 bp, Homo sapien
ggacagatggacaccgcgtgcaata

SEQ ID NO: 1793304 - DNA, 25 bp, Homo sapien
tgagtaacctatggccgggtgcagc

SEQ ID NO: 1793305 - DNA, 25 bp, Homo sapien
ggacacaacatcacctctgcaggat

SEQ ID NO: 1793306 - DNA, 25 bp, Homo sapien
gaaaagcccaattctacagtggaga

SEQ ID NO: 1793307 - DNA, 25 bp, Homo sapien
tgcagagtttactccaccagggcat

SEQ ID NO: 1793308 - DNA, 25 bp, Homo sapien
tccaccagggcatggcgcgcgcagc

SEQ ID NO: 1793309 - DNA, 25 bp, Homo sapien
caacagccgcccgtgaggcccagcg

SEQ ID NO: 1793310 - DNA, 25 bp, Homo sapien
acagccgcccgtgaggcccagcgcg

SEQ ID NO: 1793311 - DNA, 25 bp, Homo sapien
atctcgggccggtcctaagggacag

SEQ ID NO: 1793312 - DNA, 25 bp, Homo sapien
tccgccatcgctgcggggcgaactg

SEQ ID NO: 1793313 - DNA, 25 bp, Homo sapien
tcgggattccgtgtccgccatcgct

SEQ ID NO: 1793314 - DNA, 25 bp, Homo sapien
cagttggtggccctcgggattccgt

SEQ ID NO: 1793315 - DNA, 25 bp, Homo sapien
ccccgactcccctttcaagccagag

SEQ ID NO: 1793316 - DNA, 25 bp, Homo sapien
tttcaagccagagtcttcggggagg

SEQ ID NO: 1793317 - DNA, 25 bp, Homo sapien
cagccatgtccattccaaccccccg

SEQ ID NO: 1793318 - DNA, 25 bp, Homo sapien
catgtccattccaaccccccgactc

SEQ ID NO: 1793319 - DNA, 25 bp, Homo sapien
gggcaacttcgctaaatcctggtga

SEQ ID NO: 1793320 - DNA, 25 bp, Homo sapien
gaagcctagaccgtactttccagcc

SEQ ID NO: 1793321 - DNA, 25 bp, Homo sapien
cttggaacccgcattgaagcctaga

SEQ ID NO: 1793322 - DNA, 25 bp, Homo sapien
tgaccccaaaacacatgcgatcgtg

SEQ ID NO: 1793323 - DNA, 25 bp, Homo sapien
acagctattgatagttcagtacagc

SEQ ID NO: 1793324 - DNA, 25 bp, Homo sapien
gaacagctattgatagttcagtaca

SEQ ID NO: 1793325 - DNA, 25 bp, Homo sapien
ctttatatagagtaagtgagttatg

SEQ ID NO: 1793326 - DNA, 25 bp, Homo sapien
taagtgagttatgagttgaacacat

SEQ ID NO: 1793327 - DNA, 25 bp, Homo sapien
gagtcaacgaggtagtgcatcttct

SEQ ID NO: 1793328 - DNA, 25 bp, Homo sapien
tgtcaccacgatggcacattactcg

SEQ ID NO: 1793329 - DNA, 25 bp, Homo sapien
cattctatgtggtaactaagtccga

SEQ ID NO: 1793330 - DNA, 25 bp, Homo sapien
agtagtcacggcacctctaagagtg

SEQ ID NO: 1793331 - DNA, 25 bp, Homo sapien
taaatccaatatcattagcctggga

SEQ ID NO: 1793332 - DNA, 25 bp, Homo sapien
gattatttcgggtgtctcctcctgc

SEQ ID NO: 1793333 - DNA, 25 bp, Homo sapien
tctgtgatgtcgtgaacaaccgctg

SEQ ID NO: 1793334 - DNA, 25 bp, Homo sapien
actcagtgggttgtgttagctcttc

SEQ ID NO: 1793335 - DNA, 25 bp, Homo sapien
tggggtccttgtggtcgccagcccc

SEQ ID NO: 1793336 - DNA, 25 bp, Homo sapien
gggtccttgtggtcgccagcccctg

SEQ ID NO: 1793337 - DNA, 25 bp, Homo sapien
gctggggtccttgtggtcgccagcc

SEQ ID NO: 1793338 - DNA, 25 bp, Homo sapien
ccttgtggtcgccagcccctgctgc

SEQ ID NO: 1793339 - DNA, 25 bp, Homo sapien
aactggtctttttgcgccagccggc

SEQ ID NO: 1793340 - DNA, 25 bp, Homo sapien
tcaaacacttctgtcgccaacggag

SEQ ID NO: 1793341 - DNA, 25 bp, Homo sapien
ggcggtcagtttctcggaggcaacc

SEQ ID NO: 1793342 - DNA, 25 bp, Homo sapien
cacgggactagtcggagattctgca

SEQ ID NO: 1793343 - DNA, 25 bp, Homo sapien
ccatttcaaccaattcttcagctgg

SEQ ID NO: 1793344 - DNA, 25 bp, Homo sapien
tcttccacctccgttttctgctctt

SEQ ID NO: 1793345 - DNA, 25 bp, Homo sapien
ttttctgctcttcggttctctcctc

SEQ ID NO: 1793346 - DNA, 25 bp, Homo sapien
tggcacagaccctgctgtttcttcc

SEQ ID NO: 1793347 - DNA, 25 bp, Homo sapien
ctgtgtagggtcctctccggaaaca

SEQ ID NO: 1793348 - DNA, 25 bp, Homo sapien
tgatgacagcatttccacctcactc

SEQ ID NO: 1793349 - DNA, 25 bp, Homo sapien
tgtagggtcctctccggaaacacac

SEQ ID NO: 1793350 - DNA, 25 bp, Homo sapien
ccacctcactcacaacgccttcggg

SEQ ID NO: 1793351 - DNA, 25 bp, Homo sapien
gcttctttagtggacttccctgcac

SEQ ID NO: 1793352 - DNA, 25 bp, Homo sapien
ccagaaagcttttttaagccagtgc

SEQ ID NO: 1793353 - DNA, 25 bp, Homo sapien
ttttaagccagtgctggtaaaaagc

SEQ ID NO: 1793354 - DNA, 25 bp, Homo sapien
ccagtgctggtaaaaagcttcttta

SEQ ID NO: 1793355 - DNA, 25 bp, Homo sapien
ggaatgttctacaccagacccagct

SEQ ID NO: 1793356 - DNA, 25 bp, Homo sapien
tctcggtggaagacaaggtagcgct

SEQ ID NO: 1793357 - DNA, 25 bp, Homo sapien
tcttcaataatggtagctgccctcg

SEQ ID NO: 1793358 - DNA, 25 bp, Homo sapien
taaatgactcccaggtggaaacgcc

SEQ ID NO: 1793359 - DNA, 25 bp, Homo sapien
cggttccttcttcggcacccaatgg

SEQ ID NO: 1793360 - DNA, 25 bp, Homo sapien
gctcttctatgtcaggtacgccacc

SEQ ID NO: 1793361 - DNA, 25 bp, Homo sapien
tcagcagcagatgcttcggttcctt

SEQ ID NO: 1793362 - DNA, 25 bp, Homo sapien
gcacaggctgaagcacatcttctgg

SEQ ID NO: 1793363 - DNA, 25 bp, Homo sapien
gatgcgacctcattctcctcatgga

SEQ ID NO: 1793364 - DNA, 25 bp, Homo sapien
tgtgcctggtgcgtcaaagtcggct

SEQ ID NO: 1793365 - DNA, 25 bp, Homo sapien
cacattcactgtctggaggagctgc

SEQ ID NO: 1793366 - DNA, 25 bp, Homo sapien
gaccttttcccgactgactgttatg

SEQ ID NO: 1793367 - DNA, 25 bp, Homo sapien
ttccagaactaaatgtgcacctgca

SEQ ID NO: 1793368 - DNA, 25 bp, Homo sapien
ctggatgagcggcaaagtcttcatt

SEQ ID NO: 1793369 - DNA, 25 bp, Homo sapien
tcttccagaactaaatgtgcacctg

SEQ ID NO: 1793370 - DNA, 25 bp, Homo sapien
ggatgagcggcaaagtcttcatttt

SEQ ID NO: 1793371 - DNA, 25 bp, Homo sapien
tactatcactggtgtcgattttgcc

SEQ ID NO: 1793372 - DNA, 25 bp, Homo sapien
taagcctttcttggtagtagcagat

SEQ ID NO: 1793373 - DNA, 25 bp, Homo sapien
tctccttccaggtcggaacttaagc

SEQ ID NO: 1793374 - DNA, 25 bp, Homo sapien
gattttgcctgacagtcgggccctg

SEQ ID NO: 1793375 - DNA, 25 bp, Homo sapien
gctgtctggatgatgttttggacaa

SEQ ID NO: 1793376 - DNA, 25 bp, Homo sapien
gatgatgttttggacaagtttactg

SEQ ID NO: 1793377 - DNA, 25 bp, Homo sapien
gtacaaactggtcaacggctgtctg

SEQ ID NO: 1793378 - DNA, 25 bp, Homo sapien
actggtcaacggctgtctggatgat

SEQ ID NO: 1793379 - DNA, 25 bp, Homo sapien
tcagaatgtgcttgtcccactgcgg

SEQ ID NO: 1793380 - DNA, 25 bp, Homo sapien
gaaccttctacctcaacagtcatgg

SEQ ID NO: 1793381 - DNA, 25 bp, Homo sapien
gggactctttggttaagcctcctga

SEQ ID NO: 1793382 - DNA, 25 bp, Homo sapien
taactcagacgtcaacatttcggtg

SEQ ID NO: 1793383 - DNA, 25 bp, Homo sapien
tgctcccgattccttatgtaacaaa

SEQ ID NO: 1793384 - DNA, 25 bp, Homo sapien
tgtaacaaatttgccatctattggc

SEQ ID NO: 1793385 - DNA, 25 bp, Homo sapien
gaagtcgttcttttcataacatcga

SEQ ID NO: 1793386 - DNA, 25 bp, Homo sapien
caactgaaggttctacacgaaggca

SEQ ID NO: 1793387 - DNA, 25 bp, Homo sapien
aggtattgccaactccagttccagg

SEQ ID NO: 1793388 - DNA, 25 bp, Homo sapien
ggaatgttacatctaggaggctctg

SEQ ID NO: 1793389 - DNA, 25 bp, Homo sapien
gaaatgttaaatggctctagctcct

SEQ ID NO: 1793390 - DNA, 25 bp, Homo sapien
tataactgaggcttaaagctcccca

SEQ ID NO: 1793391 - DNA, 25 bp, Homo sapien
ggaaagctatctcggccatggcttc

SEQ ID NO: 1793392 - DNA, 25 bp, Homo sapien
ccaggcttcctggtatctaataaaa

SEQ ID NO: 1793393 - DNA, 25 bp, Homo sapien
ttctaatgtggtacacatatgtccc

SEQ ID NO: 1793394 - DNA, 25 bp, Homo sapien
tgtaatgactacatcagaaagttct

SEQ ID NO: 1793395 - DNA, 25 bp, Homo sapien
caaaacccttaatgtaggctgaggc

SEQ ID NO: 1793396 - DNA, 25 bp, Homo sapien
taaagcagctactcatggaatcgca

SEQ ID NO: 1793397 - DNA, 25 bp, Homo sapien
cagagagaggcaactcatgggtacc

SEQ ID NO: 1793398 - DNA, 25 bp, Homo sapien
ttctcaacggacatagatacagagc

SEQ ID NO: 1793399 - DNA, 25 bp, Homo sapien
gttcattaatcttccgttaggccaa

SEQ ID NO: 1793400 - DNA, 25 bp, Homo sapien
caaaacaggagccagaagtaaggac

SEQ ID NO: 1793401 - DNA, 25 bp, Homo sapien
tttgtctacccaaagagatacagga

SEQ ID NO: 1793402 - DNA, 25 bp, Homo sapien
taggccaataaaagaagggcctcac

SEQ ID NO: 1793403 - DNA, 25 bp, Homo sapien
gaatcctctggaatgaagtgcgcat

SEQ ID NO: 1793404 - DNA, 25 bp, Homo sapien
ttctcttaaacagggggcactcgct

SEQ ID NO: 1793405 - DNA, 25 bp, Homo sapien
gcaccaagcagggtaagcgtcagaa

SEQ ID NO: 1793406 - DNA, 25 bp, Homo sapien
ggcactcgctaagttctgcaccaag

SEQ ID NO: 1793407 - DNA, 25 bp, Homo sapien
tccctgtaggaacttggaaaagctg

SEQ ID NO: 1793408 - DNA, 25 bp, Homo sapien
gaaaagctgggcaagtcccgtggca

SEQ ID NO: 1793409 - DNA, 25 bp, Homo sapien
ttggaaaagctgggcaagtcccgtg

SEQ ID NO: 1793410 - DNA, 25 bp, Homo sapien
cttggaaaagctgggcaagtcccgt

SEQ ID NO: 1793411 - DNA, 25 bp, Homo sapien
gctgcttcggcggcaaggccgcgag

SEQ ID NO: 1793412 - DNA, 25 bp, Homo sapien
tgctgcttcggcggcaaggccgcga

SEQ ID NO: 1793413 - DNA, 25 bp, Homo sapien
ggtgcgtaatccttccgacgcctcg

SEQ ID NO: 1793414 - DNA, 25 bp, Homo sapien
tcaggtgcgtaatccttccgacgcc

SEQ ID NO: 1793415 - DNA, 25 bp, Homo sapien
tctgtgcacgctacaggaatctgta

SEQ ID NO: 1793416 - DNA, 25 bp, Homo sapien
tgttctcttaacaaacatgcgttgc

SEQ ID NO: 1793417 - DNA, 25 bp, Homo sapien
gctcaactcatctgcaaggtaaagg

SEQ ID NO: 1793418 - DNA, 25 bp, Homo sapien
acagaaacatcttacgccgctcaac

SEQ ID NO: 1793419 - DNA, 25 bp, Homo sapien
tgatattccagtgacagcggtgcag

SEQ ID NO: 1793420 - DNA, 25 bp, Homo sapien
ctatgcctcgagagaatgagcagca

SEQ ID NO: 1793421 - DNA, 25 bp, Homo sapien
tagcatgccttgaaaccagagtatc

SEQ ID NO: 1793422 - DNA, 25 bp, Homo sapien
ggaattagtcatcagtacctgcagg

SEQ ID NO: 1793423 - DNA, 25 bp, Homo sapien
ggtggctactcagcacacatggcta

SEQ ID NO: 1793424 - DNA, 25 bp, Homo sapien
catacagtgtgtaagggacggacca

SEQ ID NO: 1793425 - DNA, 25 bp, Homo sapien
tttactgaggtactgtgctacggcc

SEQ ID NO: 1793426 - DNA, 25 bp, Homo sapien
gttcagtaacatgcccgaagccata

SEQ ID NO: 1793427 - DNA, 25 bp, Homo sapien
ttagaacttatgatgggctgctcta

SEQ ID NO: 1793428 - DNA, 25 bp, Homo sapien
taatctgggaagcatgcagcattgt

SEQ ID NO: 1793429 - DNA, 25 bp, Homo sapien
gtaaagatgacacatagggcccctg

SEQ ID NO: 1793430 - DNA, 25 bp, Homo sapien
caatatcaaacaaaacgtggacttt

SEQ ID NO: 1793431 - DNA, 25 bp, Homo sapien
taaagtaagtacattcaccactggc

SEQ ID NO: 1793432 - DNA, 25 bp, Homo sapien
ggtcctcagaccagttgcatcagca

SEQ ID NO: 1793433 - DNA, 25 bp, Homo sapien
tataaaatagggtggctcctcagtg

SEQ ID NO: 1793434 - DNA, 25 bp, Homo sapien
taaccttgggcgaatcactgaacct

SEQ ID NO: 1793435 - DNA, 25 bp, Homo sapien
tgtgaagcctctcctggttttttct

SEQ ID NO: 1793436 - DNA, 25 bp, Homo sapien
taatctgcatgctcgacgcgtacat

SEQ ID NO: 1793437 - DNA, 25 bp, Homo sapien
ttaatctgcatgctcgacgcgtaca

SEQ ID NO: 1793438 - DNA, 25 bp, Homo sapien
gtctgcaactgaggatacccacctg

SEQ ID NO: 1793439 - DNA, 25 bp, Homo sapien
ctgggtggcattttttatctgtcca

SEQ ID NO: 1793440 - DNA, 25 bp, Homo sapien
agtggtcagctgtttcatggctgag

SEQ ID NO: 1793441 - DNA, 25 bp, Homo sapien
gaattactgaagtcaagtctgcaac

SEQ ID NO: 1793442 - DNA, 25 bp, Homo sapien
taaaagctttatacagttgaggtat

SEQ ID NO: 1793443 - DNA, 25 bp, Homo sapien
aaaagctttatacagttgaggtatt

SEQ ID NO: 1793444 - DNA, 25 bp, Homo sapien
tcagtggactccatcaacacagttt

SEQ ID NO: 1793445 - DNA, 25 bp, Homo sapien
tagacaccgatttgacagtccaact

SEQ ID NO: 1793446 - DNA, 25 bp, Homo sapien
aactgtctggtcaaacatgaaaagc

SEQ ID NO: 1793447 - DNA, 25 bp, Homo sapien
gataacagaggtgtaattagacacc

SEQ ID NO: 1793448 - DNA, 25 bp, Homo sapien
tctctgttaagattgggtaatgtcc

SEQ ID NO: 1793449 - DNA, 25 bp, Homo sapien
taagtctagtgagacaaattctctt

SEQ ID NO: 1793450 - DNA, 25 bp, Homo sapien
tcttttaaggtaagtctagtgagac

SEQ ID NO: 1793451 - DNA, 25 bp, Homo sapien
tagaaataggattctaggtagacag

SEQ ID NO: 1793452 - DNA, 25 bp, Homo sapien
ttccgatgagatttattgaatcctg

SEQ ID NO: 1793453 - DNA, 25 bp, Homo sapien
ctaactggctttccgatgagattta

SEQ ID NO: 1793454 - DNA, 25 bp, Homo sapien
gctgcagtcagaggtaaggatataa

SEQ ID NO: 1793455 - DNA, 25 bp, Homo sapien
ccaaagggcacctgactgtgagtca

SEQ ID NO: 1793456 - DNA, 25 bp, Homo sapien
caaatgcattcgtagttttagaccc

SEQ ID NO: 1793457 - DNA, 25 bp, Homo sapien
tagagtctgcctaatgagagctaag

SEQ ID NO: 1793458 - DNA, 25 bp, Homo sapien
cataatcggattcagagggcctcct

SEQ ID NO: 1793459 - DNA, 25 bp, Homo sapien
gaggcctttaaccatctgatgctta

SEQ ID NO: 1793460 - DNA, 25 bp, Homo sapien
gaaaaagagtcatggaaactcaggg

SEQ ID NO: 1793461 - DNA, 25 bp, Homo sapien
gaatctgcctgtacaagagtagtta

SEQ ID NO: 1793462 - DNA, 25 bp, Homo sapien
caatctgtgcttgagatactaccag

SEQ ID NO: 1793463 - DNA, 25 bp, Homo sapien
tccagtcacccatgtgatgccttaa

SEQ ID NO: 1793464 - DNA, 25 bp, Homo sapien
agacgtgagtcattgggccttgcca

SEQ ID NO: 1793465 - DNA, 25 bp, Homo sapien
ggcttggccagtaccacatgatggt

SEQ ID NO: 1793466 - DNA, 25 bp, Homo sapien
tatagccagatcttccactcggtca

SEQ ID NO: 1793467 - DNA, 25 bp, Homo sapien
cattcttagtgcagatgggcttggc

SEQ ID NO: 1793468 - DNA, 25 bp, Homo sapien
gttctgtctgtgaacgaggtaaagt

SEQ ID NO: 1793469 - DNA, 25 bp, Homo sapien
gagtgacccacaaaccaaatctgtt

SEQ ID NO: 1793470 - DNA, 25 bp, Homo sapien
gtatcaacggaaacatttgttccaa

SEQ ID NO: 1793471 - DNA, 25 bp, Homo sapien
caggtgaagagaccactaaaagcat

SEQ ID NO: 1793472 - DNA, 25 bp, Homo sapien
gaccactaaaagcatccaggaccag

SEQ ID NO: 1793473 - DNA, 25 bp, Homo sapien
accgccattgtcatcccgtcccgtt

SEQ ID NO: 1793474 - DNA, 25 bp, Homo sapien
gctgacaccccaccttcctcccgga

SEQ ID NO: 1793475 - DNA, 25 bp, Homo sapien
ggtggctggcctggcgggggctgac

SEQ ID NO: 1793476 - DNA, 25 bp, Homo sapien
ccctcccggatggggtggctggcct

SEQ ID NO: 1793477 - DNA, 25 bp, Homo sapien
gaaactttatttggtgcccgatcaa

SEQ ID NO: 1793478 - DNA, 25 bp, Homo sapien
actagaggagcggatatggaagcga

SEQ ID NO: 1793479 - DNA, 25 bp, Homo sapien
atatggaagcgagcgaaagccggaa

SEQ ID NO: 1793480 - DNA, 25 bp, Homo sapien
ggcaaacagtggctcgccagaagac

SEQ ID NO: 1793481 - DNA, 25 bp, Homo sapien
gatcccggccgcaaagctcggctgt

SEQ ID NO: 1793482 - DNA, 25 bp, Homo sapien
aaacagaggcggtaccgccgcgaag

SEQ ID NO: 1793483 - DNA, 25 bp, Homo sapien
gttcaatcgccgcagaaacagaggc

SEQ ID NO: 1793484 - DNA, 25 bp, Homo sapien
aaagctcggctgttcaatcgccgca

SEQ ID NO: 1793485 - DNA, 25 bp, Homo sapien
gtcctgtcctgagagagacgccggg

SEQ ID NO: 1793486 - DNA, 25 bp, Homo sapien
cgaggcccggctttccgcaaaagtg

SEQ ID NO: 1793487 - DNA, 25 bp, Homo sapien
agccagtccgcgaaacccgcaaagg

SEQ ID NO: 1793488 - DNA, 25 bp, Homo sapien
ttagtccccacaggctcccggcgag

SEQ ID NO: 1793489 - DNA, 25 bp, Homo sapien
ggcggcgggactcgaacgcagccca

SEQ ID NO: 1793490 - DNA, 25 bp, Homo sapien
attcacttttatgtcgatgcaatgt

SEQ ID NO: 1793491 - DNA, 25 bp, Homo sapien
cgatgcaatgtatcaataaccttag

SEQ ID NO: 1793492 - DNA, 25 bp, Homo sapien
caataaccttagttaagatctgtgg

SEQ ID NO: 1793493 - DNA, 25 bp, Homo sapien
ccttagttaagatctgtggtattct

SEQ ID NO: 1793494 - DNA, 25 bp, Homo sapien
ctaggtactgattccatatatcagt

SEQ ID NO: 1793495 - DNA, 25 bp, Homo sapien
gattccatatatcagtatcaacaaa

SEQ ID NO: 1793496 - DNA, 25 bp, Homo sapien
gggataaatggtttatctgtttgca

SEQ ID NO: 1793497 - DNA, 25 bp, Homo sapien
gtttgcaattcattccgtaatttag

SEQ ID NO: 1793498 - DNA, 25 bp, Homo sapien
acaaccacggtgagtagaaccatct

SEQ ID NO: 1793499 - DNA, 25 bp, Homo sapien
tgtaacattctaccaacaaccacgg

SEQ ID NO: 1793500 - DNA, 25 bp, Homo sapien
cacggtgagtagaaccatcttgatt

SEQ ID NO: 1793501 - DNA, 25 bp, Homo sapien
cattctaccaacaaccacggtgagt

SEQ ID NO: 1793502 - DNA, 25 bp, Homo sapien
ctctggataattgcttcatgaattc

SEQ ID NO: 1793503 - DNA, 25 bp, Homo sapien
aattgcttcatgaattcttcgatac

SEQ ID NO: 1793504 - DNA, 25 bp, Homo sapien
ggataattgcttcatgaattcttcg

SEQ ID NO: 1793505 - DNA, 25 bp, Homo sapien
gataattgcttcatgaattcttcga

SEQ ID NO: 1793506 - DNA, 25 bp, Homo sapien
tatcaattgttgcaggtgagtacat

SEQ ID NO: 1793507 - DNA, 25 bp, Homo sapien
ctaggtcttcaatagttcttatcaa

SEQ ID NO: 1793508 - DNA, 25 bp, Homo sapien
gatggattcctgtgacccatagaaa

SEQ ID NO: 1793509 - DNA, 25 bp, Homo sapien
tacatcaaagtaatcgattggtgga

SEQ ID NO: 1793510 - DNA, 25 bp, Homo sapien
gtacaaaatattcacccttcttctg

SEQ ID NO: 1793511 - DNA, 25 bp, Homo sapien
aaactccattatgtagcgggatggg

SEQ ID NO: 1793512 - DNA, 25 bp, Homo sapien
tctgaatagccaacaaaactccatt

SEQ ID NO: 1793513 - DNA, 25 bp, Homo sapien
gacattgctaaaaaactactaaata

SEQ ID NO: 1793514 - DNA, 25 bp, Homo sapien
cataaaaatgaacctcagtagccag

SEQ ID NO: 1793515 - DNA, 25 bp, Homo sapien
caatatacactctagtagcagaagc

SEQ ID NO: 1793516 - DNA, 25 bp, Homo sapien
gagagagacagatcacacttatttc

SEQ ID NO: 1793517 - DNA, 25 bp, Homo sapien
gttcagaggacaacaagaagtcggc

SEQ ID NO: 1793518 - DNA, 25 bp, Homo sapien
ggctgcagaccaacctgaatttcag

SEQ ID NO: 1793519 - DNA, 25 bp, Homo sapien
tcagcatataagtcaggtgcaacct

SEQ ID NO: 1793520 - DNA, 25 bp, Homo sapien
ttaaatgtgccttctgtagttcagc

SEQ ID NO: 1793521 - DNA, 25 bp, Homo sapien
ggcattgcacagtactcatgaggca

SEQ ID NO: 1793522 - DNA, 25 bp, Homo sapien
aaatcatccagtgcacgtagatggg

SEQ ID NO: 1793523 - DNA, 25 bp, Homo sapien
cagctatccccaaaacagtgtagtg

SEQ ID NO: 1793524 - DNA, 25 bp, Homo sapien
taagatgcgcattttcctagagcta

SEQ ID NO: 1793525 - DNA, 25 bp, Homo sapien
cgccaggcgactcaattcacgtgct

SEQ ID NO: 1793526 - DNA, 25 bp, Homo sapien
cgacccgagcccgggggcgcgctcg

SEQ ID NO: 1793527 - DNA, 25 bp, Homo sapien
tcgggcgctggcgaagcggcaccca

SEQ ID NO: 1793528 - DNA, 25 bp, Homo sapien
aagcggcacccagcgcgatatggct

SEQ ID NO: 1793529 - DNA, 25 bp, Homo sapien
tggcgaagcggcacccagcgcgata

SEQ ID NO: 1793530 - DNA, 25 bp, Homo sapien
agcgcgatatggctggtgcagtcca

SEQ ID NO: 1793531 - DNA, 25 bp, Homo sapien
tattagaagaattccgatggcacgt

SEQ ID NO: 1793532 - DNA, 25 bp, Homo sapien
gcacgttggagaatccaactcatgt

SEQ ID NO: 1793533 - DNA, 25 bp, Homo sapien
gctgctgaatattagaagaattccg

SEQ ID NO: 1793534 - DNA, 25 bp, Homo sapien
catgttttgaatccactacatcccc

SEQ ID NO: 1793535 - DNA, 25 bp, Homo sapien
aagtctgggccccattcaagagttg

SEQ ID NO: 1793536 - DNA, 25 bp, Homo sapien
gccccattcaagagttggaactggc

SEQ ID NO: 1793537 - DNA, 25 bp, Homo sapien
gggcaaaagtctgggccccattcaa

SEQ ID NO: 1793538 - DNA, 25 bp, Homo sapien
cactgggcaaaagtctgggccccat

SEQ ID NO: 1793539 - DNA, 25 bp, Homo sapien
gctgccacaaagtagccactctgaa

SEQ ID NO: 1793540 - DNA, 25 bp, Homo sapien
gccacaaagtagccactctgaaatg

SEQ ID NO: 1793541 - DNA, 25 bp, Homo sapien
tgccacaaagtagccactctgaaat

SEQ ID NO: 1793542 - DNA, 25 bp, Homo sapien
gtgctgccacaaagtagccactctg

SEQ ID NO: 1793543 - DNA, 25 bp, Homo sapien
cctcaatttaataaagagagtaaca

SEQ ID NO: 1793544 - DNA, 25 bp, Homo sapien
taataaagagagtaacaggaggcag

SEQ ID NO: 1793545 - DNA, 25 bp, Homo sapien
tttaataaagagagtaacaggaggc

SEQ ID NO: 1793546 - DNA, 25 bp, Homo sapien
aatttaataaagagagtaacaggag

SEQ ID NO: 1793547 - DNA, 25 bp, Homo sapien
cttacatcataataacctctgaaca

SEQ ID NO: 1793548 - DNA, 25 bp, Homo sapien
atgatcaagattagaggtggttgtc

SEQ ID NO: 1793549 - DNA, 25 bp, Homo sapien
aaacttacatcataataacctctga

SEQ ID NO: 1793550 - DNA, 25 bp, Homo sapien
gaagatgatcaagattagaggtggt

SEQ ID NO: 1793551 - DNA, 25 bp, Homo sapien
cttagcatttgtgggaaaagttttg

SEQ ID NO: 1793552 - DNA, 25 bp, Homo sapien
tagcatttgtgggaaaagttttgga

SEQ ID NO: 1793553 - DNA, 25 bp, Homo sapien
atataaagaagagtgttaaacgatc

SEQ ID NO: 1793554 - DNA, 25 bp, Homo sapien
tataaagaagagtgttaaacgatct

SEQ ID NO: 1793555 - DNA, 25 bp, Homo sapien
ataaagaagagtgttaaacgatctt

SEQ ID NO: 1793556 - DNA, 25 bp, Homo sapien
cttccgaaagatgatcgtaagtttc

SEQ ID NO: 1793557 - DNA, 25 bp, Homo sapien
tggtttaactgctcccgcgtgaccg

SEQ ID NO: 1793558 - DNA, 25 bp, Homo sapien
gactgagcacattcaaatttgacca

SEQ ID NO: 1793559 - DNA, 25 bp, Homo sapien
cacattccgatagtggtttaactgc

SEQ ID NO: 1793560 - DNA, 25 bp, Homo sapien
ttcgagcattttgagccacattccg

SEQ ID NO: 1793561 - DNA, 25 bp, Homo sapien
tagaaagcatcttggatcggaggtc

SEQ ID NO: 1793562 - DNA, 25 bp, Homo sapien
ctggttctccttgattgcagcgtga

SEQ ID NO: 1793563 - DNA, 25 bp, Homo sapien
gacaggagacttctttagaaagcat

SEQ ID NO: 1793564 - DNA, 25 bp, Homo sapien
agatgattttctggcattgttttcc

SEQ ID NO: 1793565 - DNA, 25 bp, Homo sapien
cacgcagttgagtcagaaattcctc

SEQ ID NO: 1793566 - DNA, 25 bp, Homo sapien
gagtcagaaattcctcatgtttcct

SEQ ID NO: 1793567 - DNA, 25 bp, Homo sapien
tctgatgccttgtcattcctctcat

SEQ ID NO: 1793568 - DNA, 25 bp, Homo sapien
tctggatccaagcagtcacgcagtt

SEQ ID NO: 1793569 - DNA, 25 bp, Homo sapien
tttcacgaattcattttctttgcgc

SEQ ID NO: 1793570 - DNA, 25 bp, Homo sapien
ataacaatttgtcctttcacgaatt

SEQ ID NO: 1793571 - DNA, 25 bp, Homo sapien
cattttctttgcgcaggtctctaag

SEQ ID NO: 1793572 - DNA, 25 bp, Homo sapien
aacaatttgtcctttcacgaattca

SEQ ID NO: 1793573 - DNA, 25 bp, Homo sapien
ttccatctcatggacatttatagtc

SEQ ID NO: 1793574 - DNA, 25 bp, Homo sapien
tccatctcatggacatttatagtct

SEQ ID NO: 1793575 - DNA, 25 bp, Homo sapien
ctcttcagtacaggaggcagctttt

SEQ ID NO: 1793576 - DNA, 25 bp, Homo sapien
tgtggcttgagcttaattccttcaa

SEQ ID NO: 1793577 - DNA, 25 bp, Homo sapien
caaacaggtagtctcatacattgct

SEQ ID NO: 1793578 - DNA, 25 bp, Homo sapien
tcccatttaaatgcacgagtctgca

SEQ ID NO: 1793579 - DNA, 25 bp, Homo sapien
tagatacacatgagatcaaattgcc

SEQ ID NO: 1793580 - DNA, 25 bp, Homo sapien
gtagacaactcaactggcagccaac

SEQ ID NO: 1793581 - DNA, 25 bp, Homo sapien
gatgcagagggtcgactgcacagtc

SEQ ID NO: 1793582 - DNA, 25 bp, Homo sapien
tgtgtggttagaaaattgaggtcct

SEQ ID NO: 1793583 - DNA, 25 bp, Homo sapien
gaggtcctaaattcaatgatgctgg

SEQ ID NO: 1793584 - DNA, 25 bp, Homo sapien
ccctaaggagggctgcgattttctc

SEQ ID NO: 1793585 - DNA, 25 bp, Homo sapien
tctccctaaatgagaagtactggct

SEQ ID NO: 1793586 - DNA, 25 bp, Homo sapien
gtcatgctcaatctgcccctaagga

SEQ ID NO: 1793587 - DNA, 25 bp, Homo sapien
gactgcatcctgactggccttcaaa

SEQ ID NO: 1793588 - DNA, 25 bp, Homo sapien
taagatgtctgtaaacagccatgac

SEQ ID NO: 1793589 - DNA, 25 bp, Homo sapien
tgttcttaagatgtctgtaaacagc

SEQ ID NO: 1793590 - DNA, 25 bp, Homo sapien
cttaagatgtctgtaaacagccatg

SEQ ID NO: 1793591 - DNA, 25 bp, Homo sapien
gatgtctgtaaacagccatgaccca

SEQ ID NO: 1793592 - DNA, 25 bp, Homo sapien
aatttggacacgaagaccgacatgc

SEQ ID NO: 1793593 - DNA, 25 bp, Homo sapien
ccagaactgtgaggcaagaactttc

SEQ ID NO: 1793594 - DNA, 25 bp, Homo sapien
tacaacaaagaatgcaatgcctgag

SEQ ID NO: 1793595 - DNA, 25 bp, Homo sapien
gatgaagtgaaaacgaggtccctaa

SEQ ID NO: 1793596 - DNA, 25 bp, Homo sapien
tccaggtgtgtcagctgaccctgaa

SEQ ID NO: 1793597 - DNA, 25 bp, Homo sapien
ttcaacaagctcagatatttgggct

SEQ ID NO: 1793598 - DNA, 25 bp, Homo sapien
tttcccaactgttcaacaagctcag

SEQ ID NO: 1793599 - DNA, 25 bp, Homo sapien
agttgtctcgcaaaacacctccaga

SEQ ID NO: 1793600 - DNA, 25 bp, Homo sapien
gttcggcagccatctggtccaactt

SEQ ID NO: 1793601 - DNA, 25 bp, Homo sapien
tctcaagacgaaccagctgctctgt

SEQ ID NO: 1793602 - DNA, 25 bp, Homo sapien
gtccagccgcatgtcaaagccaagt

SEQ ID NO: 1793603 - DNA, 25 bp, Homo sapien
tgttcgagctaaaaccacgtccagc

SEQ ID NO: 1793604 - DNA, 25 bp, Homo sapien
tctgcaagttcctgatggtaagatg

SEQ ID NO: 1793605 - DNA, 25 bp, Homo sapien
cagtttggctttgagctcggtgtgc

SEQ ID NO: 1793606 - DNA, 25 bp, Homo sapien
caagtctcgacacgtgttcagctct

SEQ ID NO: 1793607 - DNA, 25 bp, Homo sapien
cttcagttcattggtgtcggccagt

SEQ ID NO: 1793608 - DNA, 25 bp, Homo sapien
cattgacagtaaccagcaaaaagca

SEQ ID NO: 1793609 - DNA, 25 bp, Homo sapien
gacagtaaccagcaaaaagcaacaa

SEQ ID NO: 1793610 - DNA, 25 bp, Homo sapien
ttgcataaaacattgacagtaacca

SEQ ID NO: 1793611 - DNA, 25 bp, Homo sapien
cataaaacattgacagtaaccagca

SEQ ID NO: 1793612 - DNA, 25 bp, Homo sapien
gaatataggaactgtctccccagtt

SEQ ID NO: 1793613 - DNA, 25 bp, Homo sapien
tgctctgccttcgttagaagttgaa

SEQ ID NO: 1793614 - DNA, 25 bp, Homo sapien
agttctggtgaccttctccactgga

SEQ ID NO: 1793615 - DNA, 25 bp, Homo sapien
gaagttgaacaccttgaatatagga

SEQ ID NO: 1793616 - DNA, 25 bp, Homo sapien
agagcattgtctgcaaagagccagg

SEQ ID NO: 1793617 - DNA, 25 bp, Homo sapien
tgcttgtctgtttccagattcggaa

SEQ ID NO: 1793618 - DNA, 25 bp, Homo sapien
gatgttattgtccactgtacttgcg

SEQ ID NO: 1793619 - DNA, 25 bp, Homo sapien
acttgcgatttgcacacctgctgag

SEQ ID NO: 1793620 - DNA, 25 bp, Homo sapien
ttctccaaggaagtacacttcaact

SEQ ID NO: 1793621 - DNA, 25 bp, Homo sapien
ccttgtattcagatgtgtccttctc

SEQ ID NO: 1793622 - DNA, 25 bp, Homo sapien
caaagatgtcagaggggatgagtgc

SEQ ID NO: 1793623 - DNA, 25 bp, Homo sapien
gtcagaggggatgagtgcctctggc

SEQ ID NO: 1793624 - DNA, 25 bp, Homo sapien
aaagatgtcagaggggatgagtgcc

SEQ ID NO: 1793625 - DNA, 25 bp, Homo sapien
gatgtcagaggggatgagtgcctct

SEQ ID NO: 1793626 - DNA, 25 bp, Homo sapien
tccaaaggccctttattctctctaa

SEQ ID NO: 1793627 - DNA, 25 bp, Homo sapien
gccctttattctctctaacaaagta

SEQ ID NO: 1793628 - DNA, 25 bp, Homo sapien
caaaggccctttattctctctaaca

SEQ ID NO: 1793629 - DNA, 25 bp, Homo sapien
agtgtccaaaggccctttattctct

SEQ ID NO: 1793630 - DNA, 25 bp, Homo sapien
acattctccaactattagctgtctt

SEQ ID NO: 1793631 - DNA, 25 bp, Homo sapien
tgacattctccaactattagctgtc

SEQ ID NO: 1793632 - DNA, 25 bp, Homo sapien
gacattctccaactattagctgtct

SEQ ID NO: 1793633 - DNA, 25 bp, Homo sapien
gttgatgacatgtggagactactgt

SEQ ID NO: 1793634 - DNA, 25 bp, Homo sapien
cagagattgaaatctctccctacgg

SEQ ID NO: 1793635 - DNA, 25 bp, Homo sapien
ctccctacggttgggcatagagtgc

SEQ ID NO: 1793636 - DNA, 25 bp, Homo sapien
gactactgtcagagattgaaatctc

SEQ ID NO: 1793637 - DNA, 25 bp, Homo sapien
ttcctctgagaagctgtcccaagat

SEQ ID NO: 1793638 - DNA, 25 bp, Homo sapien
gaggagtggtgtcttcctctgagaa

SEQ ID NO: 1793639 - DNA, 25 bp, Homo sapien
gtggggaggagtggtgtcttcctct

SEQ ID NO: 1793640 - DNA, 25 bp, Homo sapien
ggggaggagtggtgtcttcctctga

SEQ ID NO: 1793641 - DNA, 25 bp, Homo sapien
gtgagtctgggaggtgaacagctgc

SEQ ID NO: 1793642 - DNA, 25 bp, Homo sapien
cagtgagtctgggaggtgaacagct

SEQ ID NO: 1793643 - DNA, 25 bp, Homo sapien
gagtctgggaggtgaacagctgcaa

SEQ ID NO: 1793644 - DNA, 25 bp, Homo sapien
tgagtctgggaggtgaacagctgca

SEQ ID NO: 1793645 - DNA, 25 bp, Homo sapien
cttctccagttggtctctggatttg

SEQ ID NO: 1793646 - DNA, 25 bp, Homo sapien
ctggatttgtttagatcttcaatgg

SEQ ID NO: 1793647 - DNA, 25 bp, Homo sapien
ctctggatttgtttagatcttcaat

SEQ ID NO: 1793648 - DNA, 25 bp, Homo sapien
gatttgtttagatcttcaatggctt

SEQ ID NO: 1793649 - DNA, 25 bp, Homo sapien
gttctgacttgacagacatgagctt

SEQ ID NO: 1793650 - DNA, 25 bp, Homo sapien
gacagacatgagctttttctcagct

SEQ ID NO: 1793651 - DNA, 25 bp, Homo sapien
tccttagcctcatgttctgtggtat

SEQ ID NO: 1793652 - DNA, 25 bp, Homo sapien
ctggttaccacttctatcatgtttc

SEQ ID NO: 1793653 - DNA, 25 bp, Homo sapien
gggttgtgcccatggatggtaaaca

SEQ ID NO: 1793654 - DNA, 25 bp, Homo sapien
ggtggggttgtgcccatggatggta

SEQ ID NO: 1793655 - DNA, 25 bp, Homo sapien
tggggttgtgcccatggatggtaaa

SEQ ID NO: 1793656 - DNA, 25 bp, Homo sapien
ggttgtgcccatggatggtaaacat

SEQ ID NO: 1793657 - DNA, 25 bp, Homo sapien
gatttcataatcaggaagagcaagg

SEQ ID NO: 1793658 - DNA, 25 bp, Homo sapien
tcacgttcaagcctagcatctgcga

SEQ ID NO: 1793659 - DNA, 25 bp, Homo sapien
aagagcaaggctggtcacgttcaag

SEQ ID NO: 1793660 - DNA, 25 bp, Homo sapien
ttcaagcctagcatctgcgacacca

SEQ ID NO: 1793661 - DNA, 25 bp, Homo sapien
tcttgcccagtagtcacatctttga

SEQ ID NO: 1793662 - DNA, 25 bp, Homo sapien
tgtgaatggaccaatctttcaagac

SEQ ID NO: 1793663 - DNA, 25 bp, Homo sapien
gctgatgtgaatggaccaatctttc

SEQ ID NO: 1793664 - DNA, 25 bp, Homo sapien
ggcacaggtaacaaagtgatgctga

SEQ ID NO: 1793665 - DNA, 25 bp, Homo sapien
ggcaagtttcttacaggacctgaga

SEQ ID NO: 1793666 - DNA, 25 bp, Homo sapien
tctcctaatgttcgggtgcaccaga

SEQ ID NO: 1793667 - DNA, 25 bp, Homo sapien
caatctaactcatgcaatctggtgg

SEQ ID NO: 1793668 - DNA, 25 bp, Homo sapien
gacattaactcacgatggcagggtt

SEQ ID NO: 1793669 - DNA, 25 bp, Homo sapien
ggaccagggaaacgcaaaggctcaa

SEQ ID NO: 1793670 - DNA, 25 bp, Homo sapien
ccttaatatctaggctggctccaga

SEQ ID NO: 1793671 - DNA, 25 bp, Homo sapien
gttagtcctgacaggccacgtgtca

SEQ ID NO: 1793672 - DNA, 25 bp, Homo sapien
ctccagatggaacgaggatgggcaa

SEQ ID NO: 1793673 - DNA, 25 bp, Homo sapien
tctagatgagagaaccaatgcccag

SEQ ID NO: 1793674 - DNA, 25 bp, Homo sapien
gaatggcatagaggtccccactgta

SEQ ID NO: 1793675 - DNA, 25 bp, Homo sapien
tccaacagtctatcccagagggagg

SEQ ID NO: 1793676 - DNA, 25 bp, Homo sapien
tatcagactcctatgcagaatggca

SEQ ID NO: 1793677 - DNA, 25 bp, Homo sapien
tcctttatgacaccccttgattcct

SEQ ID NO: 1793678 - DNA, 25 bp, Homo sapien
ctcctttatgacaccccttgattcc

SEQ ID NO: 1793679 - DNA, 25 bp, Homo sapien
cctttatgacaccccttgattcctt

SEQ ID NO: 1793680 - DNA, 25 bp, Homo sapien
gaggctctgcgattatttctctgac

SEQ ID NO: 1793681 - DNA, 25 bp, Homo sapien
tctctgactgcttggaaccttagaa

SEQ ID NO: 1793682 - DNA, 25 bp, Homo sapien
cacaatcaaaaggattggtatcaga

SEQ ID NO: 1793683 - DNA, 25 bp, Homo sapien
ggtagctacagaatataattcacaa

SEQ ID NO: 1793684 - DNA, 25 bp, Homo sapien
ctcgttctcaattcaggaagaagaa

SEQ ID NO: 1793685 - DNA, 25 bp, Homo sapien
cgttctcaattcaggaagaagaaca

SEQ ID NO: 1793686 - DNA, 25 bp, Homo sapien
agaagaacaagttcttttagaggtg

SEQ ID NO: 1793687 - DNA, 25 bp, Homo sapien
attcaggaagaagaacaagttcttt

SEQ ID NO: 1793688 - DNA, 25 bp, Homo sapien
tcccgtacttttgtcgtggatctaa

SEQ ID NO: 1793689 - DNA, 25 bp, Homo sapien
tttgtcgtggatctaaatttgcctc

SEQ ID NO: 1793690 - DNA, 25 bp, Homo sapien
aaatttgcctccaacaaatcttccg

SEQ ID NO: 1793691 - DNA, 25 bp, Homo sapien
tttgcctccaacaaatcttccgtgt

SEQ ID NO: 1793692 - DNA, 25 bp, Homo sapien
tggtccatagcagaacctgcagacg

SEQ ID NO: 1793693 - DNA, 25 bp, Homo sapien
tccttaaatctatggcggcttcacc

SEQ ID NO: 1793694 - DNA, 25 bp, Homo sapien
ggcttcaccagtttccggcatcaat

SEQ ID NO: 1793695 - DNA, 25 bp, Homo sapien
cagacggtaacctggcaaattggtc

SEQ ID NO: 1793696 - DNA, 25 bp, Homo sapien
aggtgctggccttcccttctggaga

SEQ ID NO: 1793697 - DNA, 25 bp, Homo sapien
gccttggaatctgcaggcaggtgct

SEQ ID NO: 1793698 - DNA, 25 bp, Homo sapien
gtaactcattaccacctccacctgt

SEQ ID NO: 1793699 - DNA, 25 bp, Homo sapien
acctccacctgtgccttggaatctg

SEQ ID NO: 1793700 - DNA, 25 bp, Homo sapien
aatgcagcgagtgagggtgccaagt

SEQ ID NO: 1793701 - DNA, 25 bp, Homo sapien
taaatgcagcgagtgagggtgccaa

SEQ ID NO: 1793702 - DNA, 25 bp, Homo sapien
aaatgcagcgagtgagggtgccaag

SEQ ID NO: 1793703 - DNA, 25 bp, Homo sapien
ctaaatgcagcgagtgagggtgcca

SEQ ID NO: 1793704 - DNA, 25 bp, Homo sapien
ctgctaggacttgttgatgttcttt

SEQ ID NO: 1793705 - DNA, 25 bp, Homo sapien
tctgctaggattttggtgaatatat

SEQ ID NO: 1793706 - DNA, 25 bp, Homo sapien
tttatcagatagcagtttctctggt

SEQ ID NO: 1793707 - DNA, 25 bp, Homo sapien
gacagggtgcagataagggatctcc

SEQ ID NO: 1793708 - DNA, 25 bp, Homo sapien
ccgattaatcatcctcaccgtgtta

SEQ ID NO: 1793709 - DNA, 25 bp, Homo sapien
tgttcccgattaatcatcctcaccg

SEQ ID NO: 1793710 - DNA, 25 bp, Homo sapien
gattatgttcccgattaatcatcct

SEQ ID NO: 1793711 - DNA, 25 bp, Homo sapien
accagattatgttcccgattaatca

SEQ ID NO: 1793712 - DNA, 25 bp, Homo sapien
gctgtgatctgggtgattcaggcta

SEQ ID NO: 1793713 - DNA, 25 bp, Homo sapien
tgtctgggttgttcaagcaaaatcc

SEQ ID NO: 1793714 - DNA, 25 bp, Homo sapien
tatctgccaccccagatgatagcag

SEQ ID NO: 1793715 - DNA, 25 bp, Homo sapien
tcaggttccaacctttttgtgatac

SEQ ID NO: 1793716 - DNA, 25 bp, Homo sapien
cttatgctatagaatgggcaggaga

SEQ ID NO: 1793717 - DNA, 25 bp, Homo sapien
ctttcgagcctgttaaagagcttct

SEQ ID NO: 1793718 - DNA, 25 bp, Homo sapien
gcatggacctttcgagcctgttaaa

SEQ ID NO: 1793719 - DNA, 25 bp, Homo sapien
caggagaaaggagcatggacctttc

SEQ ID NO: 1793720 - DNA, 25 bp, Homo sapien
cccggagaatgtgaagagatctttg

SEQ ID NO: 1793721 - DNA, 25 bp, Homo sapien
agtgctgtgctgatatttggtaccg

SEQ ID NO: 1793722 - DNA, 25 bp, Homo sapien
tatttggtaccgcagtcccggagaa

SEQ ID NO: 1793723 - DNA, 25 bp, Homo sapien
aagttcagattaaaatctacatcct

SEQ ID NO: 1793724 - DNA, 25 bp, Homo sapien
gtaagaatggaaatacagcagagaa

SEQ ID NO: 1793725 - DNA, 25 bp, Homo sapien
gaatggaaatacagcagagaagtaa

SEQ ID NO: 1793726 - DNA, 25 bp, Homo sapien
aagaatggaaatacagcagagaagt

SEQ ID NO: 1793727 - DNA, 25 bp, Homo sapien
ctgtaagaatggaaatacagcagag

SEQ ID NO: 1793728 - DNA, 25 bp, Homo sapien
gagtagggagcatcaaacttgccaa

SEQ ID NO: 1793729 - DNA, 25 bp, Homo sapien
gactaaatcctatttggactgaaaa

SEQ ID NO: 1793730 - DNA, 25 bp, Homo sapien
catttatacggttggagcatcttca

SEQ ID NO: 1793731 - DNA, 25 bp, Homo sapien
aaagcaatacgtctcaggcctggca

SEQ ID NO: 1793732 - DNA, 25 bp, Homo sapien
ttctcccactgcctaatatgcggaa

SEQ ID NO: 1793733 - DNA, 25 bp, Homo sapien
cccactgcctaatatgcggaagaag

SEQ ID NO: 1793734 - DNA, 25 bp, Homo sapien
ctaatatgcggaagaagaaaagaac

SEQ ID NO: 1793735 - DNA, 25 bp, Homo sapien
cactgcctaatatgcggaagaagaa

SEQ ID NO: 1793736 - DNA, 25 bp, Homo sapien
aaaaggactgatccctcgttcaggg

SEQ ID NO: 1793737 - DNA, 25 bp, Homo sapien
tattccgtgctcactccaaaaggac

SEQ ID NO: 1793738 - DNA, 25 bp, Homo sapien
ctgaatattccgtgctcactccaaa

SEQ ID NO: 1793739 - DNA, 25 bp, Homo sapien
ccaaaaggactgatccctcgttcag

SEQ ID NO: 1793740 - DNA, 25 bp, Homo sapien
ctgagattcctagcaggtgaattat

SEQ ID NO: 1793741 - DNA, 25 bp, Homo sapien
gatgttaccatctgtaataactctg

SEQ ID NO: 1793742 - DNA, 25 bp, Homo sapien
tcctagcaggtgaattatgaaaaag

SEQ ID NO: 1793743 - DNA, 25 bp, Homo sapien
tgaaaaagatccataaattggcatc

SEQ ID NO: 1793744 - DNA, 25 bp, Homo sapien
ccagggctaaggaccaggatgccta

SEQ ID NO: 1793745 - DNA, 25 bp, Homo sapien
cagcagatggtcagccccggggggt

SEQ ID NO: 1793746 - DNA, 25 bp, Homo sapien
gggctaaggaccaggatgcctagcc

SEQ ID NO: 1793747 - DNA, 25 bp, Homo sapien
agtgccagggctaaggaccaggatg

SEQ ID NO: 1793748 - DNA, 25 bp, Homo sapien
ttcttgtacttgatcacccttctca

SEQ ID NO: 1793749 - DNA, 25 bp, Homo sapien
cacaaagaagatggaacttgacgtg

SEQ ID NO: 1793750 - DNA, 25 bp, Homo sapien
gatggaacttgacgtggattgtgtc

SEQ ID NO: 1793751 - DNA, 25 bp, Homo sapien
tgacgtggattgtgtccacttcttt

SEQ ID NO: 1793752 - DNA, 25 bp, Homo sapien
aagcttatggtttctgagcaagcac

SEQ ID NO: 1793753 - DNA, 25 bp, Homo sapien
tgggagactagtgatcaggaccatc

SEQ ID NO: 1793754 - DNA, 25 bp, Homo sapien
gggaccatctcatttggacacctga

SEQ ID NO: 1793755 - DNA, 25 bp, Homo sapien
caggaccatcctacttaaatgagaa

SEQ ID NO: 1793756 - DNA, 25 bp, Homo sapien
gaagcggaagcatttcttccctata

SEQ ID NO: 1793757 - DNA, 25 bp, Homo sapien
cacagtgggacatcacaagtgccca

SEQ ID NO: 1793758 - DNA, 25 bp, Homo sapien
cagtaagaagcggaagcatttcttc

SEQ ID NO: 1793759 - DNA, 25 bp, Homo sapien
taagaagcggaagcatttcttccct

SEQ ID NO: 1793760 - DNA, 25 bp, Homo sapien
cccgccgtcccactaaacatactgt

SEQ ID NO: 1793761 - DNA, 25 bp, Homo sapien
ctgtacaaattaccagtcaccaact

SEQ ID NO: 1793762 - DNA, 25 bp, Homo sapien
caaatctgggactgaggaaccaaat

SEQ ID NO: 1793763 - DNA, 25 bp, Homo sapien
agtattatgagaacattgacccaaa

SEQ ID NO: 1793764 - DNA, 25 bp, Homo sapien
tgattctcaagtcccgtatcttcaa

SEQ ID NO: 1793765 - DNA, 25 bp, Homo sapien
aaaggtcttgttttactgttagcat

SEQ ID NO: 1793766 - DNA, 25 bp, Homo sapien
gagacttctacttcaagaaaatcaa

SEQ ID NO: 1793767 - DNA, 25 bp, Homo sapien
tgttagcattcgagaagagacttct

SEQ ID NO: 1793768 - DNA, 25 bp, Homo sapien
tatcttgggcaccataaaattctat

SEQ ID NO: 1793769 - DNA, 25 bp, Homo sapien
attctatttcttcccgcagtagcag

SEQ ID NO: 1793770 - DNA, 25 bp, Homo sapien
ctgcatcatcatagtcgattttatc

SEQ ID NO: 1793771 - DNA, 25 bp, Homo sapien
tcttcccgcagtagcaggctgatgt

SEQ ID NO: 1793772 - DNA, 25 bp, Homo sapien
aaatgaaggaacaagatatgcactt

SEQ ID NO: 1793773 - DNA, 25 bp, Homo sapien
tgaaggaacaagatatgcacttgag

SEQ ID NO: 1793774 - DNA, 25 bp, Homo sapien
aaggaacaagatatgcacttgagga

SEQ ID NO: 1793775 - DNA, 25 bp, Homo sapien
aatgaaggaacaagatatgcacttg

SEQ ID NO: 1793776 - DNA, 25 bp, Homo sapien
aatggtattggatgagatattaaga

SEQ ID NO: 1793777 - DNA, 25 bp, Homo sapien
cagcatgctagtagagagcgatgta

SEQ ID NO: 1793778 - DNA, 25 bp, Homo sapien
aacatccttagccataaatccatga

SEQ ID NO: 1793779 - DNA, 25 bp, Homo sapien
taccttcttgaaagtaacatcctta

SEQ ID NO: 1793780 - DNA, 25 bp, Homo sapien
tgattcgtcttagaaaggcacctgg

SEQ ID NO: 1793781 - DNA, 25 bp, Homo sapien
tcccatcagctgtaagcttaagtca

SEQ ID NO: 1793782 - DNA, 25 bp, Homo sapien
tagctgaacttgtgagtgaatgttg

SEQ ID NO: 1793783 - DNA, 25 bp, Homo sapien
gcttaagtcaggagtcttgttcatt

SEQ ID NO: 1793784 - DNA, 25 bp, Homo sapien
gagactatatcttcattgcgaggac

SEQ ID NO: 1793785 - DNA, 25 bp, Homo sapien
tacagggtcgacatggaactaatgc

SEQ ID NO: 1793786 - DNA, 25 bp, Homo sapien
taaacgacacgtgtggctgacagat

SEQ ID NO: 1793787 - DNA, 25 bp, Homo sapien
gaagcacttgaaatgtagccagcgt

SEQ ID NO: 1793788 - DNA, 25 bp, Homo sapien
tgtatagacaaaatcccgtatcacc

SEQ ID NO: 1793789 - DNA, 25 bp, Homo sapien
tgaaatcgttggaattatgcctgcc

SEQ ID NO: 1793790 - DNA, 25 bp, Homo sapien
tcttctaagcaaaatagctttccca

SEQ ID NO: 1793791 - DNA, 25 bp, Homo sapien
cgtatcacctttaccgcttggaaag

SEQ ID NO: 1793792 - DNA, 25 bp, Homo sapien
gggtaactgcggttcataatttagc

SEQ ID NO: 1793793 - DNA, 25 bp, Homo sapien
acatttgcatggcaacttgctgttt

SEQ ID NO: 1793794 - DNA, 25 bp, Homo sapien
gtgtaactacatgaacaccggcggc

SEQ ID NO: 1793795 - DNA, 25 bp, Homo sapien
caacaggttatactgggaaaagtag

SEQ ID NO: 1793796 - DNA, 25 bp, Homo sapien
tttccaattttagtgagcagatgtg

SEQ ID NO: 1793797 - DNA, 25 bp, Homo sapien
cagttgcctttgatttacacttaac

SEQ ID NO: 1793798 - DNA, 25 bp, Homo sapien
tatgggaaagagcatggatgtggcg

SEQ ID NO: 1793799 - DNA, 25 bp, Homo sapien
atggaaggtgtatttaacgtttcag

SEQ ID NO: 1793800 - DNA, 25 bp, Homo sapien
tctccagcattctcttccaaactca

SEQ ID NO: 1793801 - DNA, 25 bp, Homo sapien
tcaaagttagcccaagaagttcagt

SEQ ID NO: 1793802 - DNA, 25 bp, Homo sapien
tcagtaaaggcagttttcttaacca

SEQ ID NO: 1793803 - DNA, 25 bp, Homo sapien
tctctccagcattctcttccaaact

SEQ ID NO: 1793804 - DNA, 25 bp, Homo sapien
tctctgaacagaggcattgccatgc

SEQ ID NO: 1793805 - DNA, 25 bp, Homo sapien
ccgattgcaccaggaaaccagactt

SEQ ID NO: 1793806 - DNA, 25 bp, Homo sapien
gaaatgtaatactcctccacttcgt

SEQ ID NO: 1793807 - DNA, 25 bp, Homo sapien
cattctagggatgtgtttccagctg

SEQ ID NO: 1793808 - DNA, 25 bp, Homo sapien
ggaggctggaaagtaccctatgctt

SEQ ID NO: 1793809 - DNA, 25 bp, Homo sapien
gaagcagccagtaggcagggcactt

SEQ ID NO: 1793810 - DNA, 25 bp, Homo sapien
ggagacttgctgtctgctcacaggg

SEQ ID NO: 1793811 - DNA, 25 bp, Homo sapien
gggctactgcacagcgctggatgaa

SEQ ID NO: 1793812 - DNA, 25 bp, Homo sapien
aatgctaaagctacagagagagaaa

SEQ ID NO: 1793813 - DNA, 25 bp, Homo sapien
caaaatgctaaagctacagagagag

SEQ ID NO: 1793814 - DNA, 25 bp, Homo sapien
aaatgctaaagctacagagagagaa

SEQ ID NO: 1793815 - DNA, 25 bp, Homo sapien
aaaatgctaaagctacagagagaga

SEQ ID NO: 1793816 - DNA, 25 bp, Homo sapien
tcaggtcacgaaccaaagctttggc

SEQ ID NO: 1793817 - DNA, 25 bp, Homo sapien
tatgttacattgtcggtctggtcca

SEQ ID NO: 1793818 - DNA, 25 bp, Homo sapien
gcatttctgcatgtctatcctttag

SEQ ID NO: 1793819 - DNA, 25 bp, Homo sapien
tagtcctacaactcgatcttctcgg

SEQ ID NO: 1793820 - DNA, 25 bp, Homo sapien
gggccggctttctctaatgtgctgc

SEQ ID NO: 1793821 - DNA, 25 bp, Homo sapien
tacttgtcgtcgctgctggatagag

SEQ ID NO: 1793822 - DNA, 25 bp, Homo sapien
acgaggatctgctaaaggtggccca

SEQ ID NO: 1793823 - DNA, 25 bp, Homo sapien
aataaacgcgaaagacggatccagg

SEQ ID NO: 1793824 - DNA, 25 bp, Homo sapien
agcacagcccgaggttagaggcgac

SEQ ID NO: 1793825 - DNA, 25 bp, Homo sapien
caactttaagtactggtctcccgag

SEQ ID NO: 1793826 - DNA, 25 bp, Homo sapien
acccgacgggagcaagtgcagtccc

SEQ ID NO: 1793827 - DNA, 25 bp, Homo sapien
gactgttgccttgccctgacattgg

SEQ ID NO: 1793828 - DNA, 25 bp, Homo sapien
gaaggctcagaaaccggcgggccac

SEQ ID NO: 1793829 - DNA, 25 bp, Homo sapien
cgggcagggtgcagaccgtgtcccc

SEQ ID NO: 1793830 - DNA, 25 bp, Homo sapien
gtccgtggccgcgggcagggtgcag

SEQ ID NO: 1793831 - DNA, 25 bp, Homo sapien
ggtccgtggccgcgggcagggtgca

SEQ ID NO: 1793832 - DNA, 25 bp, Homo sapien
tctgatgcagtagggccatcccaga

SEQ ID NO: 1793833 - DNA, 25 bp, Homo sapien
agctcgttcccttggatctgatgca

SEQ ID NO: 1793834 - DNA, 25 bp, Homo sapien
gggctccagctcgttcccttggatc

SEQ ID NO: 1793835 - DNA, 25 bp, Homo sapien
ccttggatctgatgcagtagggcca

SEQ ID NO: 1793836 - DNA, 25 bp, Homo sapien
ggtagttgtacacggcgggcttgct

SEQ ID NO: 1793837 - DNA, 25 bp, Homo sapien
cggccgcggcgttgaactcgtaggc

SEQ ID NO: 1793838 - DNA, 25 bp, Homo sapien
tgtccaggtacacctcgcccagggg

SEQ ID NO: 1793839 - DNA, 25 bp, Homo sapien
ctgaccgtagacctgcgcgttggcg

SEQ ID NO: 1793840 - DNA, 25 bp, Homo sapien
gttggagccgaacgccgcagcctca

SEQ ID NO: 1793841 - DNA, 25 bp, Homo sapien
tcagcgggctcggagacacgctgtt

SEQ ID NO: 1793842 - DNA, 25 bp, Homo sapien
gctcgttctccaggtagtagggcac

SEQ ID NO: 1793843 - DNA, 25 bp, Homo sapien
tgcaggaaaggcgacagctgcggcg

SEQ ID NO: 1793844 - DNA, 25 bp, Homo sapien
agaatgccggcgggccggcctcgcg

SEQ ID NO: 1793845 - DNA, 25 bp, Homo sapien
ctgtagaatgccggcgggccggcct

SEQ ID NO: 1793846 - DNA, 25 bp, Homo sapien
atgccggcgggccggcctcgcgcac

SEQ ID NO: 1793847 - DNA, 25 bp, Homo sapien
gtagaatgccggcgggccggcctcg

SEQ ID NO: 1793848 - DNA, 25 bp, Homo sapien
tgcccggcgagagaacttgactctg

SEQ ID NO: 1793849 - DNA, 25 bp, Homo sapien
aacttgactctgaacgcagcgcggg

SEQ ID NO: 1793850 - DNA, 25 bp, Homo sapien
ctgcccggcgagagaacttgactct

SEQ ID NO: 1793851 - DNA, 25 bp, Homo sapien
cccggcgagagaacttgactctgaa

SEQ ID NO: 1793852 - DNA, 25 bp, Homo sapien
ccgtgtttatttgcctggaggtgtt

SEQ ID NO: 1793853 - DNA, 25 bp, Homo sapien
cctctcgcacggacggtaagtgggt

SEQ ID NO: 1793854 - DNA, 25 bp, Homo sapien
agcccgggctttcgggtctgcctct

SEQ ID NO: 1793855 - DNA, 25 bp, Homo sapien
tttcgggtctgcctctcgcacggac

SEQ ID NO: 1793856 - DNA, 25 bp, Homo sapien
cttcgccattgaagtcacaaagtgg

SEQ ID NO: 1793857 - DNA, 25 bp, Homo sapien
tctccccgggtgggacaggcttgtc

SEQ ID NO: 1793858 - DNA, 25 bp, Homo sapien
cacaaagtggtctcctgtgtcctgg

SEQ ID NO: 1793859 - DNA, 25 bp, Homo sapien
acagtggctgcgaggcgcagaccct

SEQ ID NO: 1793860 - DNA, 25 bp, Homo sapien
atgtggcgccctgaagcttccaaac

SEQ ID NO: 1793861 - DNA, 25 bp, Homo sapien
tagggacaccagtccggataccagt

SEQ ID NO: 1793862 - DNA, 25 bp, Homo sapien
cagttgggaaatgcctaattcagga

SEQ ID NO: 1793863 - DNA, 25 bp, Homo sapien
ggtccacggcttacaaggcagaaag

SEQ ID NO: 1793864 - DNA, 25 bp, Homo sapien
ttcagtatcctctggggccaaactg

SEQ ID NO: 1793865 - DNA, 25 bp, Homo sapien
taaagacagcttggatctgcgtggc

SEQ ID NO: 1793866 - DNA, 25 bp, Homo sapien
ctctaaatttctccaaggcggctga

SEQ ID NO: 1793867 - DNA, 25 bp, Homo sapien
caaggcggctgaagatgcacactga

SEQ ID NO: 1793868 - DNA, 25 bp, Homo sapien
caatgctaaatgacgtgaccttcac

SEQ ID NO: 1793869 - DNA, 25 bp, Homo sapien
acatccagtgggacactcgggagga

SEQ ID NO: 1793870 - DNA, 25 bp, Homo sapien
ttgctgggacatgtgacaatctttc

SEQ ID NO: 1793871 - DNA, 25 bp, Homo sapien
gggaggacagtccacatgacagcac

SEQ ID NO: 1793872 - DNA, 25 bp, Homo sapien
tctttatgataacctggtaagccag

SEQ ID NO: 1793873 - DNA, 25 bp, Homo sapien
catatggttctaaacaagtgtagcc

SEQ ID NO: 1793874 - DNA, 25 bp, Homo sapien
gaaagaaacacacttagcacgctgc

SEQ ID NO: 1793875 - DNA, 25 bp, Homo sapien
taagccaggctgcagacaaatgttg

SEQ ID NO: 1793876 - DNA, 25 bp, Homo sapien
gctgcacgcagccaaatttgaagtt

SEQ ID NO: 1793877 - DNA, 25 bp, Homo sapien
tatagtactcaattcccttccgaag

SEQ ID NO: 1793878 - DNA, 25 bp, Homo sapien
tccagacccgtagagaattcccata

SEQ ID NO: 1793879 - DNA, 25 bp, Homo sapien
taaacaaatatagggacattccaga

SEQ ID NO: 1793880 - DNA, 25 bp, Homo sapien
cacagcgtcatgaggcgtgcagctt

SEQ ID NO: 1793881 - DNA, 25 bp, Homo sapien
ctggcacagcgtcatgaggcgtgca

SEQ ID NO: 1793882 - DNA, 25 bp, Homo sapien
actccctggcacagcgtcatgaggc

SEQ ID NO: 1793883 - DNA, 25 bp, Homo sapien
gcgtcatgaggcgtgcagctttcat

SEQ ID NO: 1793884 - DNA, 25 bp, Homo sapien
caaccacgtattggagagccccagt

SEQ ID NO: 1793885 - DNA, 25 bp, Homo sapien
gaatcccttgtgcagcatgccatct

SEQ ID NO: 1793886 - DNA, 25 bp, Homo sapien
cacaagcccgctgtaaccatgaatc

SEQ ID NO: 1793887 - DNA, 25 bp, Homo sapien
tctgatttctttacaaacccaacca

SEQ ID NO: 1793888 - DNA, 25 bp, Homo sapien
tctgtcaccctgacatgatctcagc

SEQ ID NO: 1793889 - DNA, 25 bp, Homo sapien
tctgtacctcaagacaccagggatg

SEQ ID NO: 1793890 - DNA, 25 bp, Homo sapien
tcagcctaaattgcttttcaccagg

SEQ ID NO: 1793891 - DNA, 25 bp, Homo sapien
caggatatctcatggtactattccc

SEQ ID NO: 1793892 - DNA, 25 bp, Homo sapien
actgccttttctttggatcataaac

SEQ ID NO: 1793893 - DNA, 25 bp, Homo sapien
cttgtcgtttcatgtatctgtgacc

SEQ ID NO: 1793894 - DNA, 25 bp, Homo sapien
ttgtcgtttcatgtatctgtgacca

SEQ ID NO: 1793895 - DNA, 25 bp, Homo sapien
tgtcgtttcatgtatctgtgaccac

SEQ ID NO: 1793896 - DNA, 25 bp, Homo sapien
ggtactggccaatctttctctgcca

SEQ ID NO: 1793897 - DNA, 25 bp, Homo sapien
ccctggcgtcgattatctgaatttg

SEQ ID NO: 1793898 - DNA, 25 bp, Homo sapien
ttctctgccaccctggcgtcgatta

SEQ ID NO: 1793899 - DNA, 25 bp, Homo sapien
tcccttgtcattggtactggccaat

SEQ ID NO: 1793900 - DNA, 25 bp, Homo sapien
cagtagcgagtctccttggcagatt

SEQ ID NO: 1793901 - DNA, 25 bp, Homo sapien
acaggaccagactccataatggtag

SEQ ID NO: 1793902 - DNA, 25 bp, Homo sapien
ctgcacagtagcgagtctccttggc

SEQ ID NO: 1793903 - DNA, 25 bp, Homo sapien
ggtagcctgaagcatagtcattgca

SEQ ID NO: 1793904 - DNA, 25 bp, Homo sapien
ctcataggatcaaaaatagaagtcg

SEQ ID NO: 1793905 - DNA, 25 bp, Homo sapien
ggatcaaaaatagaagtcgttttca

SEQ ID NO: 1793906 - DNA, 25 bp, Homo sapien
aaatagaagtcgttttcaacacact

SEQ ID NO: 1793907 - DNA, 25 bp, Homo sapien
gaagtcgttttcaacacactattac

SEQ ID NO: 1793908 - DNA, 25 bp, Homo sapien
gccacagctgttaaaggagctatcc

SEQ ID NO: 1793909 - DNA, 25 bp, Homo sapien
gttaaaggagctatccagggtgctg

SEQ ID NO: 1793910 - DNA, 25 bp, Homo sapien
ttctaaggcctggtggatcaggctc

SEQ ID NO: 1793911 - DNA, 25 bp, Homo sapien
tgaagctttctaaggcctggtggat

SEQ ID NO: 1793912 - DNA, 25 bp, Homo sapien
gaaaatgcatttaaggagatagact

SEQ ID NO: 1793913 - DNA, 25 bp, Homo sapien
caatggaaataactaactccccagt

SEQ ID NO: 1793914 - DNA, 25 bp, Homo sapien
cagctctggaaacgtcagagccaga

SEQ ID NO: 1793915 - DNA, 25 bp, Homo sapien
gactcaatagagctatgcaacagct

SEQ ID NO: 1793916 - DNA, 25 bp, Homo sapien
tttcaagacctctgaaagcttcagc

SEQ ID NO: 1793917 - DNA, 25 bp, Homo sapien
gccatggtttttcaagacctctgaa

SEQ ID NO: 1793918 - DNA, 25 bp, Homo sapien
tttgttgccatggtttttcaagacc

SEQ ID NO: 1793919 - DNA, 25 bp, Homo sapien
ccttcaaaggcatttgttgccatgg

SEQ ID NO: 1793920 - DNA, 25 bp, Homo sapien
ctacagtttgaagtgagcccaaaat

SEQ ID NO: 1793921 - DNA, 25 bp, Homo sapien
tctgcggaacagaaaagtactctga

SEQ ID NO: 1793922 - DNA, 25 bp, Homo sapien
caggttaaaggacaatgctcatcta

SEQ ID NO: 1793923 - DNA, 25 bp, Homo sapien
tgattaagccaatctgcggaacaga

SEQ ID NO: 1793924 - DNA, 25 bp, Homo sapien
caggtacccaaaccgcaggtgaaca

SEQ ID NO: 1793925 - DNA, 25 bp, Homo sapien
taaaaatttcaagccgacaccagcc

SEQ ID NO: 1793926 - DNA, 25 bp, Homo sapien
cacctggtaggatataaggagacac

SEQ ID NO: 1793927 - DNA, 25 bp, Homo sapien
tatccattgcatggtaacagcccca

SEQ ID NO: 1793928 - DNA, 25 bp, Homo sapien
ggtaccagtaccatcctattcaaca

SEQ ID NO: 1793929 - DNA, 25 bp, Homo sapien
tggtaccagtaccatcctattcaac

SEQ ID NO: 1793930 - DNA, 25 bp, Homo sapien
cttcagataccccagcaaagaacag

SEQ ID NO: 1793931 - DNA, 25 bp, Homo sapien
cagtgtgtaatgttccccaccctgt

SEQ ID NO: 1793932 - DNA, 25 bp, Homo sapien
gtaatgttccccaccctgtgtccaa

SEQ ID NO: 1793933 - DNA, 25 bp, Homo sapien
cccagtgtgtaatgttccccaccct

SEQ ID NO: 1793934 - DNA, 25 bp, Homo sapien
agtgtgtaatgttccccaccctgtg

SEQ ID NO: 1793935 - DNA, 25 bp, Homo sapien
gaggtctatgtctccttgtcgtctg

SEQ ID NO: 1793936 - DNA, 25 bp, Homo sapien
tcttgatgtcccagattggtgatct

SEQ ID NO: 1793937 - DNA, 25 bp, Homo sapien
cccagattggtgatctttttactgc

SEQ ID NO: 1793938 - DNA, 25 bp, Homo sapien
ttacctaaatgttgtagcagctgca

SEQ ID NO: 1793939 - DNA, 25 bp, Homo sapien
ggcacagcttcttcgttatttgctg

SEQ ID NO: 1793940 - DNA, 25 bp, Homo sapien
gatgatctggagcatttcatagttc

SEQ ID NO: 1793941 - DNA, 25 bp, Homo sapien
ttaactcaaactagcgtagatgatc

SEQ ID NO: 1793942 - DNA, 25 bp, Homo sapien
catagttcttatggttgggcacagc

SEQ ID NO: 1793943 - DNA, 25 bp, Homo sapien
gaagttttcaacagctttgccaaat

SEQ ID NO: 1793944 - DNA, 25 bp, Homo sapien
gtgaagaagttttcaacagctttgc

SEQ ID NO: 1793945 - DNA, 25 bp, Homo sapien
aagaagttttcaacagctttgccaa

SEQ ID NO: 1793946 - DNA, 25 bp, Homo sapien
gaagaagttttcaacagctttgcca

SEQ ID NO: 1793947 - DNA, 25 bp, Homo sapien
aacagaaggacccacattcagcttt

SEQ ID NO: 1793948 - DNA, 25 bp, Homo sapien
ctgcagcaacagaaggacccacatt

SEQ ID NO: 1793949 - DNA, 25 bp, Homo sapien
cagcaacagaaggacccacattcag

SEQ ID NO: 1793950 - DNA, 25 bp, Homo sapien
gcaacagaaggacccacattcagct

SEQ ID NO: 1793951 - DNA, 25 bp, Homo sapien
ttcgtagcatttacggagccggcag

SEQ ID NO: 1793952 - DNA, 25 bp, Homo sapien
agcatttacggagccggcaggcctg

SEQ ID NO: 1793953 - DNA, 25 bp, Homo sapien
tcattcccacttcgtagcatttacg

SEQ ID NO: 1793954 - DNA, 25 bp, Homo sapien
cacttcgtagcatttacggagccgg

SEQ ID NO: 1793955 - DNA, 25 bp, Homo sapien
cataatctccattcttggtctttcc

SEQ ID NO: 1793956 - DNA, 25 bp, Homo sapien
catcataatctccattcttggtctt

SEQ ID NO: 1793957 - DNA, 25 bp, Homo sapien
aatctccattcttggtctttcctct

SEQ ID NO: 1793958 - DNA, 25 bp, Homo sapien
tcatcataatctccattcttggtct

SEQ ID NO: 1793959 - DNA, 25 bp, Homo sapien
aacctccacctcctgggttcaagca

SEQ ID NO: 1793960 - DNA, 25 bp, Homo sapien
caatggtgccatcttaactcactgt

SEQ ID NO: 1793961 - DNA, 25 bp, Homo sapien
attacaggcgctccccgccatgcct

SEQ ID NO: 1793962 - DNA, 25 bp, Homo sapien
gctgctctggaacttctgatctcaa

SEQ ID NO: 1793963 - DNA, 25 bp, Homo sapien
gctctcaccagctaagctaaccgtc

SEQ ID NO: 1793964 - DNA, 25 bp, Homo sapien
tggtgttattagcagcacgctctca

SEQ ID NO: 1793965 - DNA, 25 bp, Homo sapien
gatagaaaccacgaccttggtgtta

SEQ ID NO: 1793966 - DNA, 25 bp, Homo sapien
gccctgtaatgggatagaaaccacg

SEQ ID NO: 1793967 - DNA, 25 bp, Homo sapien
gaaggtgtcccatcctttatagtca

SEQ ID NO: 1793968 - DNA, 25 bp, Homo sapien
aaggtgtcccatcctttatagtcag

SEQ ID NO: 1793969 - DNA, 25 bp, Homo sapien
ggtgtcccatcctttatagtcagac

SEQ ID NO: 1793970 - DNA, 25 bp, Homo sapien
tgtcccatcctttatagtcagacat

SEQ ID NO: 1793971 - DNA, 25 bp, Homo sapien
tgaggtccattcacagacctgtgtg

SEQ ID NO: 1793972 - DNA, 25 bp, Homo sapien
tccattcacagacctgtgtgttctg

SEQ ID NO: 1793973 - DNA, 25 bp, Homo sapien
gagcataatgaggtccattcacaga

SEQ ID NO: 1793974 - DNA, 25 bp, Homo sapien
taatgaggtccattcacagacctgt

SEQ ID NO: 1793975 - DNA, 25 bp, Homo sapien
aactcagcaatgagggaagggagca

SEQ ID NO: 1793976 - DNA, 25 bp, Homo sapien
gagggaagggagcagctgcaacagc

SEQ ID NO: 1793977 - DNA, 25 bp, Homo sapien
tggcaaactcagcaatgagggaagg

SEQ ID NO: 1793978 - DNA, 25 bp, Homo sapien
ctgctgtggcaaactcagcaatgag

SEQ ID NO: 1793979 - DNA, 25 bp, Homo sapien
agtttttctttcctgtgccattcat

SEQ ID NO: 1793980 - DNA, 25 bp, Homo sapien
ctcctctgttcttgtagtttttctt

SEQ ID NO: 1793981 - DNA, 25 bp, Homo sapien
gtagtttttctttcctgtgccattc

SEQ ID NO: 1793982 - DNA, 25 bp, Homo sapien
ttgtagtttttctttcctgtgccat

SEQ ID NO: 1793983 - DNA, 25 bp, Homo sapien
ttggctttggaacaacaaaatacga

SEQ ID NO: 1793984 - DNA, 25 bp, Homo sapien
tcatgagcgggcttggccaaaggtt

SEQ ID NO: 1793985 - DNA, 25 bp, Homo sapien
tctgccaggttggtcagtaagccca

SEQ ID NO: 1793986 - DNA, 25 bp, Homo sapien
gggctcagcatccaacaaggcactg

SEQ ID NO: 1793987 - DNA, 25 bp, Homo sapien
tcttagagcgtttgatcatgagcgg

SEQ ID NO: 1793988 - DNA, 25 bp, Homo sapien
ttaaaagctgcgcttcgcattctta

SEQ ID NO: 1793989 - DNA, 25 bp, Homo sapien
taaaagctgcgcttcgcattcttac

SEQ ID NO: 1793990 - DNA, 25 bp, Homo sapien
caattacataacatgttattgcttc

SEQ ID NO: 1793991 - DNA, 25 bp, Homo sapien
cctggaaaattacagtgtattgata

SEQ ID NO: 1793992 - DNA, 25 bp, Homo sapien
gacatcacaacaagttcttgaaaag

SEQ ID NO: 1793993 - DNA, 25 bp, Homo sapien
gttttaccatgtagtgtccacccta

SEQ ID NO: 1793994 - DNA, 25 bp, Homo sapien
tgctaaagtcctcagagcgcatggc

SEQ ID NO: 1793995 - DNA, 25 bp, Homo sapien
ttgcagatagagttgaagcctgcta

SEQ ID NO: 1793996 - DNA, 25 bp, Homo sapien
gagttgaagcctgctaaagtcctca

SEQ ID NO: 1793997 - DNA, 25 bp, Homo sapien
cagagcgcatggctccatatttctc

SEQ ID NO: 1793998 - DNA, 25 bp, Homo sapien
agctgctttccttgcgtttcaccag

SEQ ID NO: 1793999 - DNA, 25 bp, Homo sapien
tttccttgcgtttcaccagagcttc

SEQ ID NO: 1794000 - DNA, 25 bp, Homo sapien
tgctttccttgcgtttcaccagagc

SEQ ID NO: 1794001 - DNA, 25 bp, Homo sapien
gctgctttccttgcgtttcaccaga

SEQ ID NO: 1794002 - DNA, 25 bp, Homo sapien
tgattcagtcctgcaagatactctg

SEQ ID NO: 1794003 - DNA, 25 bp, Homo sapien
actctggaccaaggactagtttttg

SEQ ID NO: 1794004 - DNA, 25 bp, Homo sapien
tgtcttagaccacagttgattcagt

SEQ ID NO: 1794005 - DNA, 25 bp, Homo sapien
ggaagtcaggcgtctcattaggaga

SEQ ID NO: 1794006 - DNA, 25 bp, Homo sapien
ttgagaatgtaagcctgtcccagga

SEQ ID NO: 1794007 - DNA, 25 bp, Homo sapien
ttggctcgcaaccagcactgaggct

SEQ ID NO: 1794008 - DNA, 25 bp, Homo sapien
cattaggccaggagtcgaccttgag

SEQ ID NO: 1794009 - DNA, 25 bp, Homo sapien
gatagaaaaagatgtgtgccgcacc

SEQ ID NO: 1794010 - DNA, 25 bp, Homo sapien
tcccaccagcctgaaggtgtgcctg

SEQ ID NO: 1794011 - DNA, 25 bp, Homo sapien
gtcttctccattgacatggttccag

SEQ ID NO: 1794012 - DNA, 25 bp, Homo sapien
gatcagctcgcccagtgtagggaga

SEQ ID NO: 1794013 - DNA, 25 bp, Homo sapien
tgcctgcgagaggaaatgctccatc

SEQ ID NO: 1794014 - DNA, 25 bp, Homo sapien
tactgttgccaaggttgcctcctgt

SEQ ID NO: 1794015 - DNA, 25 bp, Homo sapien
gccaaggttgcctcctgttcagatc

SEQ ID NO: 1794016 - DNA, 25 bp, Homo sapien
tgctgtctgctacaagaagacaggt

SEQ ID NO: 1794017 - DNA, 25 bp, Homo sapien
tattcctactgttgccaaggttgcc

SEQ ID NO: 1794018 - DNA, 25 bp, Homo sapien
ctagaaggcagaagcccagcaaaga

SEQ ID NO: 1794019 - DNA, 25 bp, Homo sapien
tagaaggcagaagcccagcaaagag

SEQ ID NO: 1794020 - DNA, 25 bp, Homo sapien
agaaggcagaagcccagcaaagagt

SEQ ID NO: 1794021 - DNA, 25 bp, Homo sapien
agagccatggtaagggcctttccgg

SEQ ID NO: 1794022 - DNA, 25 bp, Homo sapien
tacgacagaaagacagagatgctgc

SEQ ID NO: 1794023 - DNA, 25 bp, Homo sapien
cgacagaaagacagagatgctgcag

SEQ ID NO: 1794024 - DNA, 25 bp, Homo sapien
acagaaagacagagatgctgcagtc

SEQ ID NO: 1794025 - DNA, 25 bp, Homo sapien
ctacgacagaaagacagagatgctg

SEQ ID NO: 1794026 - DNA, 25 bp, Homo sapien
aagttgcaatagaaagacagagatg

SEQ ID NO: 1794027 - DNA, 25 bp, Homo sapien
ggaagttgcaatagaaagacagaga

SEQ ID NO: 1794028 - DNA, 25 bp, Homo sapien
gaagttgcaatagaaagacagagat

SEQ ID NO: 1794029 - DNA, 25 bp, Homo sapien
tattggccctcctgtgaaattgtgt

SEQ ID NO: 1794030 - DNA, 25 bp, Homo sapien
tttactgagtgttcaacaggacgca

SEQ ID NO: 1794031 - DNA, 25 bp, Homo sapien
aacttcactttctatcaaggtggca

SEQ ID NO: 1794032 - DNA, 25 bp, Homo sapien
aaggtggcattcatacttattggcc

SEQ ID NO: 1794033 - DNA, 25 bp, Homo sapien
acacccaggatcacacatatatcca

SEQ ID NO: 1794034 - DNA, 25 bp, Homo sapien
gctggaaatctaagcttcaggaagc

SEQ ID NO: 1794035 - DNA, 25 bp, Homo sapien
gtcctattcacaaggtaaccttgaa

SEQ ID NO: 1794036 - DNA, 25 bp, Homo sapien
gaaggtgacaagctggaaatctaag

SEQ ID NO: 1794037 - DNA, 25 bp, Homo sapien
tgtctgtgcgcctcatcttcaggga

SEQ ID NO: 1794038 - DNA, 25 bp, Homo sapien
gagagttggtggaaacaaagcaaca

SEQ ID NO: 1794039 - DNA, 25 bp, Homo sapien
aagcaacaggcaaaatccatagtca

SEQ ID NO: 1794040 - DNA, 25 bp, Homo sapien
gagaatctttcaagatggaccaggc

SEQ ID NO: 1794041 - DNA, 25 bp, Homo sapien
gagttacccaaatcaggtcagtatt

SEQ ID NO: 1794042 - DNA, 25 bp, Homo sapien
gaatttccaactaccagtgtctaag

SEQ ID NO: 1794043 - DNA, 25 bp, Homo sapien
ggaaattaacttactgtctgtacag

SEQ ID NO: 1794044 - DNA, 25 bp, Homo sapien
agttcaggaacatgaggctattcaa

SEQ ID NO: 1794045 - DNA, 25 bp, Homo sapien
tccagtggagttttagcaaagtgaa

SEQ ID NO: 1794046 - DNA, 25 bp, Homo sapien
gatggtagcatctttaaagattttc

SEQ ID NO: 1794047 - DNA, 25 bp, Homo sapien
tttccattctccattactgcttttc

SEQ ID NO: 1794048 - DNA, 25 bp, Homo sapien
tgaacacgatttaaagtttgaactc

SEQ ID NO: 1794049 - DNA, 25 bp, Homo sapien
gatcatggagggtcaaatccacaaa

SEQ ID NO: 1794050 - DNA, 25 bp, Homo sapien
ctgatcatggagggtcaaatccaca

SEQ ID NO: 1794051 - DNA, 25 bp, Homo sapien
tgatcatggagggtcaaatccacaa

SEQ ID NO: 1794052 - DNA, 25 bp, Homo sapien
tcatggagggtcaaatccacaaagc

SEQ ID NO: 1794053 - DNA, 25 bp, Homo sapien
gccagacgagaccaatcatcaggat

SEQ ID NO: 1794054 - DNA, 25 bp, Homo sapien
taggagcaaacagtagcttccctgg

SEQ ID NO: 1794055 - DNA, 25 bp, Homo sapien
tcatcaggatctctagccaggcaca

SEQ ID NO: 1794056 - DNA, 25 bp, Homo sapien
gccaggcacattctagaaggtggac

SEQ ID NO: 1794057 - DNA, 25 bp, Homo sapien
ttatgggaaagataagagtctttgc

SEQ ID NO: 1794058 - DNA, 25 bp, Homo sapien
ttgaaattccaaatggcgaaatttg

SEQ ID NO: 1794059 - DNA, 25 bp, Homo sapien
taacctgtagagagaccttaaggat

SEQ ID NO: 1794060 - DNA, 25 bp, Homo sapien
ccaaatggcgaaatttggaatttca

SEQ ID NO: 1794061 - DNA, 25 bp, Homo sapien
tcttcatgtgaatcaaaaacacacg

SEQ ID NO: 1794062 - DNA, 25 bp, Homo sapien
aacacacgtggatgaattcaactca

SEQ ID NO: 1794063 - DNA, 25 bp, Homo sapien
tctgcaaagaatttacctgaagttt

SEQ ID NO: 1794064 - DNA, 25 bp, Homo sapien
gatgaattcaactcatttcagaact

SEQ ID NO: 1794065 - DNA, 25 bp, Homo sapien
tacttatgcagcagataatggatca

SEQ ID NO: 1794066 - DNA, 25 bp, Homo sapien
gatagggtaaaattcaatccttcca

SEQ ID NO: 1794067 - DNA, 25 bp, Homo sapien
catgatcttgatattagatagggta

SEQ ID NO: 1794068 - DNA, 25 bp, Homo sapien
ggaatcaagagtcatgatcttgata

SEQ ID NO: 1794069 - DNA, 25 bp, Homo sapien
taagaatgtgtaatatcggccccca

SEQ ID NO: 1794070 - DNA, 25 bp, Homo sapien
aatgtgtaatatcggcccccactct

SEQ ID NO: 1794071 - DNA, 25 bp, Homo sapien
ttctttaagaatgtgtaatatcggc

SEQ ID NO: 1794072 - DNA, 25 bp, Homo sapien
tctttaagaatgtgtaatatcggcc

SEQ ID NO: 1794073 - DNA, 25 bp, Homo sapien
tttatggtttttgatctaacattta

SEQ ID NO: 1794074 - DNA, 25 bp, Homo sapien
tggtttttgatctaacatttaagtc

SEQ ID NO: 1794075 - DNA, 25 bp, Homo sapien
tcaaatgagtagattgcaaagattt

SEQ ID NO: 1794076 - DNA, 25 bp, Homo sapien
tttgtcaaatgagtagattgcaaag

SEQ ID NO: 1794077 - DNA, 25 bp, Homo sapien
tcttccaatagattatgtactctca

SEQ ID NO: 1794078 - DNA, 25 bp, Homo sapien
aatagattatgtactctcagataac

SEQ ID NO: 1794079 - DNA, 25 bp, Homo sapien
ccaatagattatgtactctcagata

SEQ ID NO: 1794080 - DNA, 25 bp, Homo sapien
ttccaatagattatgtactctcaga

SEQ ID NO: 1794081 - DNA, 25 bp, Homo sapien
ccaggttcgtcaattaaagattcca

SEQ ID NO: 1794082 - DNA, 25 bp, Homo sapien
tcactccacaggttccaaagtcttt

SEQ ID NO: 1794083 - DNA, 25 bp, Homo sapien
tcaatggccaagtgcacggtgccag

SEQ ID NO: 1794084 - DNA, 25 bp, Homo sapien
cagtcctgagactaagacttggcag

SEQ ID NO: 1794085 - DNA, 25 bp, Homo sapien
aggtcattatgcattgtggtcaggg

SEQ ID NO: 1794086 - DNA, 25 bp, Homo sapien
gtctactgaggtcattatgcattgt

SEQ ID NO: 1794087 - DNA, 25 bp, Homo sapien
gcaaaggaactcttcagtgtctact

SEQ ID NO: 1794088 - DNA, 25 bp, Homo sapien
ttttcaaagtctagccaaaatattc

SEQ ID NO: 1794089 - DNA, 25 bp, Homo sapien
gaagctctatagaagcacagcagga

SEQ ID NO: 1794090 - DNA, 25 bp, Homo sapien
caggtgcaagacacaggaaaagttc

SEQ ID NO: 1794091 - DNA, 25 bp, Homo sapien
gaaaatctggatgcatggaagctct

SEQ ID NO: 1794092 - DNA, 25 bp, Homo sapien
gaatttcaagaggtatgctgcccaa

SEQ ID NO: 1794093 - DNA, 25 bp, Homo sapien
tgcggaaccgagatgatgtagccag

SEQ ID NO: 1794094 - DNA, 25 bp, Homo sapien
cacacaaactcctctccctgcagat

SEQ ID NO: 1794095 - DNA, 25 bp, Homo sapien
gccagcagcatgtcgaagatctcca

SEQ ID NO: 1794096 - DNA, 25 bp, Homo sapien
gcagattcatcatgcggaaccgaga

SEQ ID NO: 1794097 - DNA, 25 bp, Homo sapien
tgtgagctttaggtcccagaggctg

SEQ ID NO: 1794098 - DNA, 25 bp, Homo sapien
gatacccaatgtgagctttaggtcc

SEQ ID NO: 1794099 - DNA, 25 bp, Homo sapien
ggagctgctgtaccgctgataccca

SEQ ID NO: 1794100 - DNA, 25 bp, Homo sapien
tgtaccgctgatacccaatgtgagc

SEQ ID NO: 1794101 - DNA, 25 bp, Homo sapien
ttaaactgggtccatacattattca

SEQ ID NO: 1794102 - DNA, 25 bp, Homo sapien
aactgggtccatacattattcaaac

SEQ ID NO: 1794103 - DNA, 25 bp, Homo sapien
tgggtccatacattattcaaactta

SEQ ID NO: 1794104 - DNA, 25 bp, Homo sapien
cttttaaactgggtccatacattat

SEQ ID NO: 1794105 - DNA, 25 bp, Homo sapien
gtctgcaaaagcagccacgggccct

SEQ ID NO: 1794106 - DNA, 25 bp, Homo sapien
tcgggccttagtgggattagacagg

SEQ ID NO: 1794107 - DNA, 25 bp, Homo sapien
attagacagggcactttctgaacca

SEQ ID NO: 1794108 - DNA, 25 bp, Homo sapien
tagtgggattagacagggcactttc

SEQ ID NO: 1794109 - DNA, 25 bp, Homo sapien
gccttagtgggattagacagggcac

SEQ ID NO: 1794110 - DNA, 25 bp, Homo sapien
tgcttgaggtggcggtctcttggtt

SEQ ID NO: 1794111 - DNA, 25 bp, Homo sapien
tctcttggttcttggagcttgaaca

SEQ ID NO: 1794112 - DNA, 25 bp, Homo sapien
acctgcttgaggtggcggtctcttg

SEQ ID NO: 1794113 - DNA, 25 bp, Homo sapien
ttgaggtggcggtctcttggttctt

SEQ ID NO: 1794114 - DNA, 25 bp, Homo sapien
tatgtgcatttttgcacgtgagatg

SEQ ID NO: 1794115 - DNA, 25 bp, Homo sapien
tcatccatgcagtcagcggtaaggg

SEQ ID NO: 1794116 - DNA, 25 bp, Homo sapien
tgttataaactctgcctgccaatgc

SEQ ID NO: 1794117 - DNA, 25 bp, Homo sapien
gcggtaagggcttcagtgcatccta

SEQ ID NO: 1794118 - DNA, 25 bp, Homo sapien
taactggtaaagatctgtactccgg

SEQ ID NO: 1794119 - DNA, 25 bp, Homo sapien
tcgggtatgggagaaacatctacac

SEQ ID NO: 1794120 - DNA, 25 bp, Homo sapien
cagaatggtcgggatcttggtttcc

SEQ ID NO: 1794121 - DNA, 25 bp, Homo sapien
taatcacagcgccttgcagggagga

SEQ ID NO: 1794122 - DNA, 25 bp, Homo sapien
cacgtagcagtttgtaggtcgggta

SEQ ID NO: 1794123 - DNA, 25 bp, Homo sapien
ggactcggtggatatggtccttctc

SEQ ID NO: 1794124 - DNA, 25 bp, Homo sapien
tctgtgatcttgtccaggactcggt

SEQ ID NO: 1794125 - DNA, 25 bp, Homo sapien
gtccaggactcggtggatatggtcc

SEQ ID NO: 1794126 - DNA, 25 bp, Homo sapien
gatcttgtccaggactcggtggata

SEQ ID NO: 1794127 - DNA, 25 bp, Homo sapien
ctgctgcagggtcaggcctgccttg

SEQ ID NO: 1794128 - DNA, 25 bp, Homo sapien
gcagggtcaggcctgccttggccat

SEQ ID NO: 1794129 - DNA, 25 bp, Homo sapien
gctgcagggtcaggcctgccttggc

SEQ ID NO: 1794130 - DNA, 25 bp, Homo sapien
ctcatgtgcctgatgtgggagagga

SEQ ID NO: 1794131 - DNA, 25 bp, Homo sapien
gggcaccacgttcttgcacttcatg

SEQ ID NO: 1794132 - DNA, 25 bp, Homo sapien
aagtggctttggtccgtctcctcca

SEQ ID NO: 1794133 - DNA, 25 bp, Homo sapien
caaggaatgcgatgaagtagagccc

SEQ ID NO: 1794134 - DNA, 25 bp, Homo sapien
cctccacggctagtgggcgcatgta

SEQ ID NO: 1794135 - DNA, 25 bp, Homo sapien
ttgttcagccctcaaaaggcatggg

SEQ ID NO: 1794136 - DNA, 25 bp, Homo sapien
taactggaacccatgaccggaaagc

SEQ ID NO: 1794137 - DNA, 25 bp, Homo sapien
ttatctgaaccgtgtgggagccagg

SEQ ID NO: 1794138 - DNA, 25 bp, Homo sapien
gattatctctaaaccaccaagggca

SEQ ID NO: 1794139 - DNA, 25 bp, Homo sapien
gaattgaggccagttctgcctgacc

SEQ ID NO: 1794140 - DNA, 25 bp, Homo sapien
gagaggctttagcattcagactcac

SEQ ID NO: 1794141 - DNA, 25 bp, Homo sapien
ttgttgataaggaagccgaaactct

SEQ ID NO: 1794142 - DNA, 25 bp, Homo sapien
tttgggccaggcattaaaaaacagc

SEQ ID NO: 1794143 - DNA, 25 bp, Homo sapien
cctagcagcgcactgaatctgggaa

SEQ ID NO: 1794144 - DNA, 25 bp, Homo sapien
cctagcgtctgccactttggagtgc

SEQ ID NO: 1794145 - DNA, 25 bp, Homo sapien
ggctcttggcaaacggcctagcgtc

SEQ ID NO: 1794146 - DNA, 25 bp, Homo sapien
gttgcaggtccgcagaaaggcctag

SEQ ID NO: 1794147 - DNA, 25 bp, Homo sapien
gatgggatcccgggggcattgttaa

SEQ ID NO: 1794148 - DNA, 25 bp, Homo sapien
tgggatcccgggggcattgttaagc

SEQ ID NO: 1794149 - DNA, 25 bp, Homo sapien
tgatgggatcccgggggcattgtta

SEQ ID NO: 1794150 - DNA, 25 bp, Homo sapien
cttgatgggatcccgggggcattgt

SEQ ID NO: 1794151 - DNA, 25 bp, Homo sapien
tagtttggctggtgataaaccttgc

SEQ ID NO: 1794152 - DNA, 25 bp, Homo sapien
cataggtggtttcccagagctcggt

SEQ ID NO: 1794153 - DNA, 25 bp, Homo sapien
tgttcgtttcctggttgggcgcctg

SEQ ID NO: 1794154 - DNA, 25 bp, Homo sapien
ctccggcaaggagagcacataggtg

SEQ ID NO: 1794155 - DNA, 25 bp, Homo sapien
cttccctgaaaacacgttcgtgaca

SEQ ID NO: 1794156 - DNA, 25 bp, Homo sapien
cctgaaaacacgttcgtgacatcca

SEQ ID NO: 1794157 - DNA, 25 bp, Homo sapien
cgttcgtgacatccatccatgaaga

SEQ ID NO: 1794158 - DNA, 25 bp, Homo sapien
aacacgttcgtgacatccatccatg

SEQ ID NO: 1794159 - DNA, 25 bp, Homo sapien
ctctctccagttggccatgatagca

SEQ ID NO: 1794160 - DNA, 25 bp, Homo sapien
ggccctttaactctctccagttggc

SEQ ID NO: 1794161 - DNA, 25 bp, Homo sapien
ttaactctctccagttggccatgat

SEQ ID NO: 1794162 - DNA, 25 bp, Homo sapien
tccagttggccatgatagcaagcag

SEQ ID NO: 1794163 - DNA, 25 bp, Homo sapien
caagcagctgccaacttcgacagca

SEQ ID NO: 1794164 - DNA, 25 bp, Homo sapien
caacttcgacagcaattccaggcag

SEQ ID NO: 1794165 - DNA, 25 bp, Homo sapien
cagctcaggcttaaatcctgccgga

SEQ ID NO: 1794166 - DNA, 25 bp, Homo sapien
cctgccggacacattcttggagctg

SEQ ID NO: 1794167 - DNA, 25 bp, Homo sapien
taaaatatgcaccaagaatccactg

SEQ ID NO: 1794168 - DNA, 25 bp, Homo sapien
caagaatccactggaggctaccaca

SEQ ID NO: 1794169 - DNA, 25 bp, Homo sapien
gagagaaccctcactcagatgaata

SEQ ID NO: 1794170 - DNA, 25 bp, Homo sapien
gctaccacagacaggcctaaatttg

SEQ ID NO: 1794171 - DNA, 25 bp, Homo sapien
gattgattggccaatttagcaaggg

SEQ ID NO: 1794172 - DNA, 25 bp, Homo sapien
agggccacgccagacgcagatgatg

SEQ ID NO: 1794173 - DNA, 25 bp, Homo sapien
gagtgcaaacattgaacccatgagg

SEQ ID NO: 1794174 - DNA, 25 bp, Homo sapien
ggtcgtggctcttccccagatgatt

SEQ ID NO: 1794175 - DNA, 25 bp, Homo sapien
caaaggggtgtagaacatccatttc

SEQ ID NO: 1794176 - DNA, 25 bp, Homo sapien
ccccaaaggggtgtagaacatccat

SEQ ID NO: 1794177 - DNA, 25 bp, Homo sapien
aaggggtgtagaacatccatttcca

SEQ ID NO: 1794178 - DNA, 25 bp, Homo sapien
cccaaaggggtgtagaacatccatt

SEQ ID NO: 1794179 - DNA, 25 bp, Homo sapien
tccatagtcaatcaaatctcctgaa

SEQ ID NO: 1794180 - DNA, 25 bp, Homo sapien
tttcattattaagcaggcactgatc

SEQ ID NO: 1794181 - DNA, 25 bp, Homo sapien
ttagacatagaagaccccaggtgat

SEQ ID NO: 1794182 - DNA, 25 bp, Homo sapien
gaagctggaacattagtgtatatta

SEQ ID NO: 1794183 - DNA, 25 bp, Homo sapien
aggacttcagtagaccatctgggca

SEQ ID NO: 1794184 - DNA, 25 bp, Homo sapien
cttcagtagaccatctgggcagctt

SEQ ID NO: 1794185 - DNA, 25 bp, Homo sapien
gactcatgaattctgggcccttggc

SEQ ID NO: 1794186 - DNA, 25 bp, Homo sapien
caaagttccccggactcatgaattc

SEQ ID NO: 1794187 - DNA, 25 bp, Homo sapien
tggcatggccctttagcttccagga

SEQ ID NO: 1794188 - DNA, 25 bp, Homo sapien
tccgacactggagttatctgagtaa

SEQ ID NO: 1794189 - DNA, 25 bp, Homo sapien
tgcagaggcaaaaagcagcgtccct

SEQ ID NO: 1794190 - DNA, 25 bp, Homo sapien
tcttctctcaggtccacaaaaggtg

SEQ ID NO: 1794191 - DNA, 25 bp, Homo sapien
cttgttcgtacagctttggaacccg

SEQ ID NO: 1794192 - DNA, 25 bp, Homo sapien
aacccgctaatgtcagggcctgatg

SEQ ID NO: 1794193 - DNA, 25 bp, Homo sapien
tctgtagacagactccactgctatt

SEQ ID NO: 1794194 - DNA, 25 bp, Homo sapien
gctattccttgttcgtacagctttg

SEQ ID NO: 1794195 - DNA, 25 bp, Homo sapien
ggatgcaagttcaggattctcttct

SEQ ID NO: 1794196 - DNA, 25 bp, Homo sapien
taggatgcaagttcaggattctctt

SEQ ID NO: 1794197 - DNA, 25 bp, Homo sapien
tttaggatgcaagttcaggattctc

SEQ ID NO: 1794198 - DNA, 25 bp, Homo sapien
atattttaggatgcaagttcaggat

SEQ ID NO: 1794199 - DNA, 25 bp, Homo sapien
caatggttttagagctgaggccacc

SEQ ID NO: 1794200 - DNA, 25 bp, Homo sapien
taaccgtaccactctgctgaagggc

SEQ ID NO: 1794201 - DNA, 25 bp, Homo sapien
acccctaagggtatgagtcggcaca

SEQ ID NO: 1794202 - DNA, 25 bp, Homo sapien
accagtgggtagtcaacaagttgcc

SEQ ID NO: 1794203 - DNA, 25 bp, Homo sapien
ctgttgctatttgaggtaggccttc

SEQ ID NO: 1794204 - DNA, 25 bp, Homo sapien
ctctgttgctatttgaggtaggcct

SEQ ID NO: 1794205 - DNA, 25 bp, Homo sapien
gttgctatttgaggtaggccttcct

SEQ ID NO: 1794206 - DNA, 25 bp, Homo sapien
tctctgttgctatttgaggtaggcc

SEQ ID NO: 1794207 - DNA, 25 bp, Homo sapien
caaagcattcaaagagcctcagcac

SEQ ID NO: 1794208 - DNA, 25 bp, Homo sapien
agcattcaaagagcctcagcacaga

SEQ ID NO: 1794209 - DNA, 25 bp, Homo sapien
ttcaaagcattcaaagagcctcagc

SEQ ID NO: 1794210 - DNA, 25 bp, Homo sapien
ttattcaaagcattcaaagagcctc

SEQ ID NO: 1794211 - DNA, 25 bp, Homo sapien
gaagataatgacgagcatccgcaga

SEQ ID NO: 1794212 - DNA, 25 bp, Homo sapien
gaaggcatcgtttcttagggcagca

SEQ ID NO: 1794213 - DNA, 25 bp, Homo sapien
taaatcgttacagggagctccctag

SEQ ID NO: 1794214 - DNA, 25 bp, Homo sapien
tgactggccgaaacactgaaagagg

SEQ ID NO: 1794215 - DNA, 25 bp, Homo sapien
tttccgggcacttggcaagctcact

SEQ ID NO: 1794216 - DNA, 25 bp, Homo sapien
tgccttctttgttgtcggtgtggtg

SEQ ID NO: 1794217 - DNA, 25 bp, Homo sapien
actctggaacccgcagcagccagtg

SEQ ID NO: 1794218 - DNA, 25 bp, Homo sapien
ctcactcccgcagttagcagtgctt

SEQ ID NO: 1794219 - DNA, 25 bp, Homo sapien
ttgattacaattggtggcaccactg

SEQ ID NO: 1794220 - DNA, 25 bp, Homo sapien
ttggagtctcaaaatggcaagtcct

SEQ ID NO: 1794221 - DNA, 25 bp, Homo sapien
ggcaccactgccatttgattcatgg

SEQ ID NO: 1794222 - DNA, 25 bp, Homo sapien
taagacaggtaatcgatcagtgaat

SEQ ID NO: 1794223 - DNA, 25 bp, Homo sapien
catgacttaggttgacctatatctg

SEQ ID NO: 1794224 - DNA, 25 bp, Homo sapien
accctttcctcatacattggaagag

SEQ ID NO: 1794225 - DNA, 25 bp, Homo sapien
tcagtccacaccctttcctcataca

SEQ ID NO: 1794226 - DNA, 25 bp, Homo sapien
gatgaaaattgtccatgacttaggt

SEQ ID NO: 1794227 - DNA, 25 bp, Homo sapien
cagtccacatagcaggtacctcctt

SEQ ID NO: 1794228 - DNA, 25 bp, Homo sapien
tcattgcaaacagccacgaggcaag

SEQ ID NO: 1794229 - DNA, 25 bp, Homo sapien
gccacgaggcaagtgtagtctctca

SEQ ID NO: 1794230 - DNA, 25 bp, Homo sapien
cctctgtcagcagtccacatagcag

SEQ ID NO: 1794231 - DNA, 25 bp, Homo sapien
attttcattagtagcttgtctttat

SEQ ID NO: 1794232 - DNA, 25 bp, Homo sapien
taattttcattagtagcttgtcttt

SEQ ID NO: 1794233 - DNA, 25 bp, Homo sapien
ttttcattagtagcttgtctttatt

SEQ ID NO: 1794234 - DNA, 25 bp, Homo sapien
aattttcattagtagcttgtcttta

SEQ ID NO: 1794235 - DNA, 25 bp, Homo sapien
gaattatgcccaccatagtatggac

SEQ ID NO: 1794236 - DNA, 25 bp, Homo sapien
tatgggccaagaattttaacactgt

SEQ ID NO: 1794237 - DNA, 25 bp, Homo sapien
tcagtggctaatcacatagatataa

SEQ ID NO: 1794238 - DNA, 25 bp, Homo sapien
catgtgtttctaccatgaaaagcca

SEQ ID NO: 1794239 - DNA, 25 bp, Homo sapien
ctaagccgcttctgggtggtggtcc

SEQ ID NO: 1794240 - DNA, 25 bp, Homo sapien
gaaggtttgcggcagttgtgccacc

SEQ ID NO: 1794241 - DNA, 25 bp, Homo sapien
aaggtttgcggcagttgtgccaccc

SEQ ID NO: 1794242 - DNA, 25 bp, Homo sapien
tcaagctaagccgcttctgggtggt

SEQ ID NO: 1794243 - DNA, 25 bp, Homo sapien
gctaaacttacccagacatgtgacg

SEQ ID NO: 1794244 - DNA, 25 bp, Homo sapien
acatgtgacgtctgcaagtatctaa

SEQ ID NO: 1794245 - DNA, 25 bp, Homo sapien
aaggtcaagtgcctgtgatacacac

SEQ ID NO: 1794246 - DNA, 25 bp, Homo sapien
tgtgaaagaaccataagctgcaggg

SEQ ID NO: 1794247 - DNA, 25 bp, Homo sapien
tgtgctcagactccaaagcgcgtgt

SEQ ID NO: 1794248 - DNA, 25 bp, Homo sapien
tccttttccctgttagagagaagac

SEQ ID NO: 1794249 - DNA, 25 bp, Homo sapien
tgattccaatgaccatgctacgggt

SEQ ID NO: 1794250 - DNA, 25 bp, Homo sapien
gggctaaggttgaggcttgtccatc

SEQ ID NO: 1794251 - DNA, 25 bp, Homo sapien
tgcacactctgaaggttttagctgg

SEQ ID NO: 1794252 - DNA, 25 bp, Homo sapien
gttttgttgtgcctgtgtacagcca

SEQ ID NO: 1794253 - DNA, 25 bp, Homo sapien
gcttctcagctgttggcaatgcaat

SEQ ID NO: 1794254 - DNA, 25 bp, Homo sapien
gttttcaagtagacagcccaaatgt

SEQ ID NO: 1794255 - DNA, 25 bp, Homo sapien
gtgccaccacgccctgtaaattttg

SEQ ID NO: 1794256 - DNA, 25 bp, Homo sapien
tgtgccaccacgccctgtaaatttt

SEQ ID NO: 1794257 - DNA, 25 bp, Homo sapien
cgcagactccacctcctgggtacaa

SEQ ID NO: 1794258 - DNA, 25 bp, Homo sapien
caccgcagactccacctcctgggta

SEQ ID NO: 1794259 - DNA, 25 bp, Homo sapien
aggcttattggaatcttggtcagaa

SEQ ID NO: 1794260 - DNA, 25 bp, Homo sapien
gaaggcttattggaatcttggtcag

SEQ ID NO: 1794261 - DNA, 25 bp, Homo sapien
tattggaatcttggtcagaatatga

SEQ ID NO: 1794262 - DNA, 25 bp, Homo sapien
gcttattggaatcttggtcagaata

SEQ ID NO: 1794263 - DNA, 25 bp, Homo sapien
tacagtgtgtaatgttcaagtcagg

SEQ ID NO: 1794264 - DNA, 25 bp, Homo sapien
atcgtgggtggcctgctttatttta

SEQ ID NO: 1794265 - DNA, 25 bp, Homo sapien
tacatatttctggtgtatagtgtga

SEQ ID NO: 1794266 - DNA, 25 bp, Homo sapien
cttctttgcggtagagacattcaga

SEQ ID NO: 1794267 - DNA, 25 bp, Homo sapien
caaaataggattgctaattgttgcc

SEQ ID NO: 1794268 - DNA, 25 bp, Homo sapien
caagtagatgtcgttacaaaatagg

SEQ ID NO: 1794269 - DNA, 25 bp, Homo sapien
taattgttgcctagtgaaacaaatg

SEQ ID NO: 1794270 - DNA, 25 bp, Homo sapien
tttactttcaagtagatgtcgttac

SEQ ID NO: 1794271 - DNA, 25 bp, Homo sapien
ccctaccgctagaggcaggtagtaa

SEQ ID NO: 1794272 - DNA, 25 bp, Homo sapien
taaaagtagacagcaattcacctag

SEQ ID NO: 1794273 - DNA, 25 bp, Homo sapien
tcctaggtaggatagcaatcattta

SEQ ID NO: 1794274 - DNA, 25 bp, Homo sapien
ctcacaagcacaagagggattaaac

SEQ ID NO: 1794275 - DNA, 25 bp, Homo sapien
aacattgtgagagcccactctgagg

SEQ ID NO: 1794276 - DNA, 25 bp, Homo sapien
cacacagagcgggaagagtttttcg

SEQ ID NO: 1794277 - DNA, 25 bp, Homo sapien
tgaaatcatagttgccgctctggtg

SEQ ID NO: 1794278 - DNA, 25 bp, Homo sapien
caaaggatgaatagagccatctcac

SEQ ID NO: 1794279 - DNA, 25 bp, Homo sapien
aagcccccattcttgtggcccagga

SEQ ID NO: 1794280 - DNA, 25 bp, Homo sapien
tccagagttcgtacatgaaaatgca

SEQ ID NO: 1794281 - DNA, 25 bp, Homo sapien
aatgcaagttagcttccaatcagca

SEQ ID NO: 1794282 - DNA, 25 bp, Homo sapien
tcactggctcccacaatagttagga

SEQ ID NO: 1794283 - DNA, 25 bp, Homo sapien
cagttctctttagctgctacttcag

SEQ ID NO: 1794284 - DNA, 25 bp, Homo sapien
ttgctcctgcggttctgtctgtcca

SEQ ID NO: 1794285 - DNA, 25 bp, Homo sapien
ttgccagcggccacctctttctgat

SEQ ID NO: 1794286 - DNA, 25 bp, Homo sapien
tccctgtggctcctaggtcttcctt

SEQ ID NO: 1794287 - DNA, 25 bp, Homo sapien
tcaatgaccaccgtctggcagcgct

SEQ ID NO: 1794288 - DNA, 25 bp, Homo sapien
atgaccaccgtctggcagcgctgga

SEQ ID NO: 1794289 - DNA, 25 bp, Homo sapien
ggtcaatgaccaccgtctggcagcg

SEQ ID NO: 1794290 - DNA, 25 bp, Homo sapien
aggtcaatgaccaccgtctggcagc

SEQ ID NO: 1794291 - DNA, 25 bp, Homo sapien
aaatagttatctccccgattagctc

SEQ ID NO: 1794292 - DNA, 25 bp, Homo sapien
gcacagcaaatagttatctccccga

SEQ ID NO: 1794293 - DNA, 25 bp, Homo sapien
ttggtaatctcctacagcacagcaa

SEQ ID NO: 1794294 - DNA, 25 bp, Homo sapien
tctcctacagcacagcaaatagtta

SEQ ID NO: 1794295 - DNA, 25 bp, Homo sapien
ccagatggccctttcggagcaggaa

SEQ ID NO: 1794296 - DNA, 25 bp, Homo sapien
gagtcgctggctcccgaagtgaaac

SEQ ID NO: 1794297 - DNA, 25 bp, Homo sapien
taagccttaggcactcgtgatgaca

SEQ ID NO: 1794298 - DNA, 25 bp, Homo sapien
gacagtgtattccaaacgcagagct

SEQ ID NO: 1794299 - DNA, 25 bp, Homo sapien
caaatagaacaatgggcacaggacc

SEQ ID NO: 1794300 - DNA, 25 bp, Homo sapien
gctctaagtagagaaggtggtcgcc

SEQ ID NO: 1794301 - DNA, 25 bp, Homo sapien
aaataattgcatgcggaggagcctg

SEQ ID NO: 1794302 - DNA, 25 bp, Homo sapien
tcccaactaggtttgacaatgaggc

SEQ ID NO: 1794303 - DNA, 25 bp, Homo sapien
gacaggctggctaactgctgctata

SEQ ID NO: 1794304 - DNA, 25 bp, Homo sapien
gggtcctgcacctcaaagttagttg

SEQ ID NO: 1794305 - DNA, 25 bp, Homo sapien
gggttccggcagtgccacctgaaga

SEQ ID NO: 1794306 - DNA, 25 bp, Homo sapien
tggcccaaatatgaaccaggagagg

SEQ ID NO: 1794307 - DNA, 25 bp, Homo sapien
catataactaatgaagtttacaagc

SEQ ID NO: 1794308 - DNA, 25 bp, Homo sapien
tcatataactaatgaagtttacaag

SEQ ID NO: 1794309 - DNA, 25 bp, Homo sapien
tttcatataactaatgaagtttaca

SEQ ID NO: 1794310 - DNA, 25 bp, Homo sapien
ttcatataactaatgaagtttacaa

SEQ ID NO: 1794311 - DNA, 25 bp, Homo sapien
gcttaccttcacaagatcaaatgag

SEQ ID NO: 1794312 - DNA, 25 bp, Homo sapien
tgagagaaagtgcattcaggctgat

SEQ ID NO: 1794313 - DNA, 25 bp, Homo sapien
tacagcttccaatattcccagaggg

SEQ ID NO: 1794314 - DNA, 25 bp, Homo sapien
cattcaggctgataggattgcagac

SEQ ID NO: 1794315 - DNA, 25 bp, Homo sapien
gcactggccagacttagtggctcac

SEQ ID NO: 1794316 - DNA, 25 bp, Homo sapien
tgggtataatagctgcccctcctac

SEQ ID NO: 1794317 - DNA, 25 bp, Homo sapien
tagcttttgtacttacccctgagac

SEQ ID NO: 1794318 - DNA, 25 bp, Homo sapien
gaacattaatactgtgcagcactgg

SEQ ID NO: 1794319 - DNA, 25 bp, Homo sapien
cccatcaatgtagactggagaaata

SEQ ID NO: 1794320 - DNA, 25 bp, Homo sapien
gtgatttatttgatgcagcattatc

SEQ ID NO: 1794321 - DNA, 25 bp, Homo sapien
catggaatactaggctgccatataa

SEQ ID NO: 1794322 - DNA, 25 bp, Homo sapien
atgtagactggagaaataaaatctg

SEQ ID NO: 1794323 - DNA, 25 bp, Homo sapien
ttgtattcacgtcatttggttgtgg

SEQ ID NO: 1794324 - DNA, 25 bp, Homo sapien
tgttttcccctttgtattcacgtca

SEQ ID NO: 1794325 - DNA, 25 bp, Homo sapien
tgggaagaaattcaatctgcatttg

SEQ ID NO: 1794326 - DNA, 25 bp, Homo sapien
gaagaaattcaatctgcatttgtct

SEQ ID NO: 1794327 - DNA, 25 bp, Homo sapien
ccagtttccttgtgtagaggtctca

SEQ ID NO: 1794328 - DNA, 25 bp, Homo sapien
ccaagtgacttcttattcacgagga

SEQ ID NO: 1794329 - DNA, 25 bp, Homo sapien
tcacgaggatcttagaccagtttcc

SEQ ID NO: 1794330 - DNA, 25 bp, Homo sapien
ggtttagaatctatcctccaagtga

SEQ ID NO: 1794331 - DNA, 25 bp, Homo sapien
tctttgtagacacgctggcactggg

SEQ ID NO: 1794332 - DNA, 25 bp, Homo sapien
tttttataaatcgatatgagcactg

SEQ ID NO: 1794333 - DNA, 25 bp, Homo sapien
atgagcactgtctttgtagacacgc

SEQ ID NO: 1794334 - DNA, 25 bp, Homo sapien
gaagcactttttataaatcgatatg

SEQ ID NO: 1794335 - DNA, 25 bp, Homo sapien
aagtcctagttgattcaggcccata

SEQ ID NO: 1794336 - DNA, 25 bp, Homo sapien
tgtgcaaataaaagtcctagttgat

SEQ ID NO: 1794337 - DNA, 25 bp, Homo sapien
tcctagttgattcaggcccatacat

SEQ ID NO: 1794338 - DNA, 25 bp, Homo sapien
aataaaagtcctagttgattcaggc

SEQ ID NO: 1794339 - DNA, 25 bp, Homo sapien
acagcagaaatgaaccattgattcc

SEQ ID NO: 1794340 - DNA, 25 bp, Homo sapien
gaggcatagtgctctcttccaatgt

SEQ ID NO: 1794341 - DNA, 25 bp, Homo sapien
tcccttttacagcagaaatgaacca

SEQ ID NO: 1794342 - DNA, 25 bp, Homo sapien
tcaaatgaccagtgaggcatagtgc

SEQ ID NO: 1794343 - DNA, 25 bp, Homo sapien
tcaactgtgatgactaattgccaca

SEQ ID NO: 1794344 - DNA, 25 bp, Homo sapien
catcaactgtgatgactaattgcca

SEQ ID NO: 1794345 - DNA, 25 bp, Homo sapien
atcaactgtgatgactaattgccac

SEQ ID NO: 1794346 - DNA, 25 bp, Homo sapien
caactgtgatgactaattgccacat

SEQ ID NO: 1794347 - DNA, 25 bp, Homo sapien
agtcgtcagtcctgatgagtattac

SEQ ID NO: 1794348 - DNA, 25 bp, Homo sapien
caactgctactgcatttaatggagt

SEQ ID NO: 1794349 - DNA, 25 bp, Homo sapien
tactgcatttaatggagtcgtcagt

SEQ ID NO: 1794350 - DNA, 25 bp, Homo sapien
gatgagtattactggactttgctgg

SEQ ID NO: 1794351 - DNA, 25 bp, Homo sapien
ttcctgggctaatgccgggtagccc

SEQ ID NO: 1794352 - DNA, 25 bp, Homo sapien
tctccctgtgtactgctatgcttca

SEQ ID NO: 1794353 - DNA, 25 bp, Homo sapien
tcaagttgtaaccacaattttgccc

SEQ ID NO: 1794354 - DNA, 25 bp, Homo sapien
tggaagctggtttaggtccttcctg

SEQ ID NO: 1794355 - DNA, 25 bp, Homo sapien
ggatatcgccaatgtgatgcagagg

SEQ ID NO: 1794356 - DNA, 25 bp, Homo sapien
ggcttcgtgcttccggagggaccat

SEQ ID NO: 1794357 - DNA, 25 bp, Homo sapien
cggtgtcctcgggatatcgccaatg

SEQ ID NO: 1794358 - DNA, 25 bp, Homo sapien
tgtgctgcctccagtgaagagtctc

SEQ ID NO: 1794359 - DNA, 25 bp, Homo sapien
tctccttcgtgctcccgcagtatcc

SEQ ID NO: 1794360 - DNA, 25 bp, Homo sapien
tcttgggaatagtgagtttattgat

SEQ ID NO: 1794361 - DNA, 25 bp, Homo sapien
ccgcagtatcctgcacctattaaaa

SEQ ID NO: 1794362 - DNA, 25 bp, Homo sapien
ttattgatgttctggatctgcctct

SEQ ID NO: 1794363 - DNA, 25 bp, Homo sapien
aggaggtagggaagcctgcgagcct

SEQ ID NO: 1794364 - DNA, 25 bp, Homo sapien
tcccggtataaaggctcgctgagcg

SEQ ID NO: 1794365 - DNA, 25 bp, Homo sapien
tcgctgagcgggtgggtcacagcac

SEQ ID NO: 1794366 - DNA, 25 bp, Homo sapien
tttgcagctgcggagaaacgcccaa

SEQ ID NO: 1794367 - DNA, 25 bp, Homo sapien
ccggcagggtggattgattctatga

SEQ ID NO: 1794368 - DNA, 25 bp, Homo sapien
caggcccaacttttggaggtagcaa

SEQ ID NO: 1794369 - DNA, 25 bp, Homo sapien
gtgagctgagccattctgatctgtt

SEQ ID NO: 1794370 - DNA, 25 bp, Homo sapien
gagtggcaagcctggaaatctggac

SEQ ID NO: 1794371 - DNA, 25 bp, Homo sapien
ttgtcaggaaaataagtccctctgt

SEQ ID NO: 1794372 - DNA, 25 bp, Homo sapien
tgtcaacagactattgattccacta

SEQ ID NO: 1794373 - DNA, 25 bp, Homo sapien
aggaaaataagtccctctgtcctcg

SEQ ID NO: 1794374 - DNA, 25 bp, Homo sapien
tctgtcctcgtttgtcctttctccc

SEQ ID NO: 1794375 - DNA, 25 bp, Homo sapien
tggcagcagcaacttgccgagctct

SEQ ID NO: 1794376 - DNA, 25 bp, Homo sapien
ggattgcacttgcaatggtgcttac

SEQ ID NO: 1794377 - DNA, 25 bp, Homo sapien
cagcaacttgccgagctctggattg

SEQ ID NO: 1794378 - DNA, 25 bp, Homo sapien
aacttgccgagctctggattgcact

SEQ ID NO: 1794379 - DNA, 25 bp, Homo sapien
cagtagttttacagaggctggctga

SEQ ID NO: 1794380 - DNA, 25 bp, Homo sapien
aggcctagcctctgagcaagggcag

SEQ ID NO: 1794381 - DNA, 25 bp, Homo sapien
ctccagcggcaacggcagtagtttt

SEQ ID NO: 1794382 - DNA, 25 bp, Homo sapien
ggtgaaatttgcattctgccagtgc

SEQ ID NO: 1794383 - DNA, 25 bp, Homo sapien
cttggcttctacattcaatcagctg

SEQ ID NO: 1794384 - DNA, 25 bp, Homo sapien
tctacattcaatcagctgctcagtc

SEQ ID NO: 1794385 - DNA, 25 bp, Homo sapien
cttctacattcaatcagctgctcag

SEQ ID NO: 1794386 - DNA, 25 bp, Homo sapien
tctttcttggcttctacattcaatc

SEQ ID NO: 1794387 - DNA, 25 bp, Homo sapien
gaacaccaaggattggcagcgacac

SEQ ID NO: 1794388 - DNA, 25 bp, Homo sapien
cacacgaggagaatgtagaatgtca

SEQ ID NO: 1794389 - DNA, 25 bp, Homo sapien
tagaatgtcatgtgacaacggaggc

SEQ ID NO: 1794390 - DNA, 25 bp, Homo sapien
gcagattggagtgatgggtccacaa

SEQ ID NO: 1794391 - DNA, 25 bp, Homo sapien
aaaaggtcagtgttccatcaaatac

SEQ ID NO: 1794392 - DNA, 25 bp, Homo sapien
tcctcatagaagtcagttcataaag

SEQ ID NO: 1794393 - DNA, 25 bp, Homo sapien
ataaagtctggaaaaggtcagtgtt

SEQ ID NO: 1794394 - DNA, 25 bp, Homo sapien
tagaagtcagttcataaagtctgga

SEQ ID NO: 1794395 - DNA, 25 bp, Homo sapien
gaaatactaaatagagttaggtaga

SEQ ID NO: 1794396 - DNA, 25 bp, Homo sapien
atatataaggataagcagtaagaaa

SEQ ID NO: 1794397 - DNA, 25 bp, Homo sapien
gatactgtctaaacatatagagact

SEQ ID NO: 1794398 - DNA, 25 bp, Homo sapien
tctgcattgctcatatctaagagtc

SEQ ID NO: 1794399 - DNA, 25 bp, Homo sapien
gttctttgccaactgatttccttct

SEQ ID NO: 1794400 - DNA, 25 bp, Homo sapien
tcacctgcccagattctttctgtgc

SEQ ID NO: 1794401 - DNA, 25 bp, Homo sapien
catgaggattcacattcagatcacc

SEQ ID NO: 1794402 - DNA, 25 bp, Homo sapien
cctctcaaataattggaatgttgga

SEQ ID NO: 1794403 - DNA, 25 bp, Homo sapien
ccgtgacatcaaggcagctggtaga

SEQ ID NO: 1794404 - DNA, 25 bp, Homo sapien
ttccacatggcactgtgtttttcag

SEQ ID NO: 1794405 - DNA, 25 bp, Homo sapien
catggcactgtgtttttcagtccca

SEQ ID NO: 1794406 - DNA, 25 bp, Homo sapien
tggcactgtgtttttcagtcccatc

SEQ ID NO: 1794407 - DNA, 25 bp, Homo sapien
cactgtgtttttcagtcccatccat

SEQ ID NO: 1794408 - DNA, 25 bp, Homo sapien
tgattctatctctttgtagtacagc

SEQ ID NO: 1794409 - DNA, 25 bp, Homo sapien
taatttttacacaacccctcatata

SEQ ID NO: 1794410 - DNA, 25 bp, Homo sapien
aacccctcatatacttgtgttcgca

SEQ ID NO: 1794411 - DNA, 25 bp, Homo sapien
ccagtatgtcgaaaaaaagcagttt

SEQ ID NO: 1794412 - DNA, 25 bp, Homo sapien
catggactccctaaacttgttgtgt

SEQ ID NO: 1794413 - DNA, 25 bp, Homo sapien
tctggccatggactccctaaacttg

SEQ ID NO: 1794414 - DNA, 25 bp, Homo sapien
cctaaacttgttgtgttattagcca

SEQ ID NO: 1794415 - DNA, 25 bp, Homo sapien
aagttttctggccatggactcccta

SEQ ID NO: 1794416 - DNA, 25 bp, Homo sapien
gataaagcagctctcacaatctttg

SEQ ID NO: 1794417 - DNA, 25 bp, Homo sapien
ttttttatctcagtcagctggagtc

SEQ ID NO: 1794418 - DNA, 25 bp, Homo sapien
catccgataaagcagctctcacaat

SEQ ID NO: 1794419 - DNA, 25 bp, Homo sapien
gtcagctggagtctatgagtccaag

SEQ ID NO: 1794420 - DNA, 25 bp, Homo sapien
caatttctgctgtagttaatggaga

SEQ ID NO: 1794421 - DNA, 25 bp, Homo sapien
tttctgctgtagttaatggagaggc

SEQ ID NO: 1794422 - DNA, 25 bp, Homo sapien
aatttctgctgtagttaatggagag

SEQ ID NO: 1794423 - DNA, 25 bp, Homo sapien
tacaatttctgctgtagttaatgga

SEQ ID NO: 1794424 - DNA, 25 bp, Homo sapien
ctgcttaacttctcatctggtggtg

SEQ ID NO: 1794425 - DNA, 25 bp, Homo sapien
tgcttaacttctcatctggtggtgg

SEQ ID NO: 1794426 - DNA, 25 bp, Homo sapien
aaagaacagcaagtactagtcaagc

SEQ ID NO: 1794427 - DNA, 25 bp, Homo sapien
tctgatcttgagaaacaaaggacag

SEQ ID NO: 1794428 - DNA, 25 bp, Homo sapien
ggtaaagctacagtcgaaaacctgc

SEQ ID NO: 1794429 - DNA, 25 bp, Homo sapien
tagctactggagaggagttgagacc

SEQ ID NO: 1794430 - DNA, 25 bp, Homo sapien
aatatagatcaatcccaagttggac

SEQ ID NO: 1794431 - DNA, 25 bp, Homo sapien
tcctaagaggcaagacaaagtaaac

SEQ ID NO: 1794432 - DNA, 25 bp, Homo sapien
taaattacaagtcatcctaagaggc

SEQ ID NO: 1794433 - DNA, 25 bp, Homo sapien
aggatctactccctaagcttaatgg

SEQ ID NO: 1794434 - DNA, 25 bp, Homo sapien
tgttcaccaaagcaggccatgaagt

SEQ ID NO: 1794435 - DNA, 25 bp, Homo sapien
gacttcactgatccaagtggccaca

SEQ ID NO: 1794436 - DNA, 25 bp, Homo sapien
caacaatgtgctcaatgcagtagtc

SEQ ID NO: 1794437 - DNA, 25 bp, Homo sapien
tataataatttaaacagccgaggag

SEQ ID NO: 1794438 - DNA, 25 bp, Homo sapien
ctccaagtaccagcccgattgccat

SEQ ID NO: 1794439 - DNA, 25 bp, Homo sapien
caggctgaggttgcttcgacgttca

SEQ ID NO: 1794440 - DNA, 25 bp, Homo sapien
cacagccactgtggcggtaaaatcc

SEQ ID NO: 1794441 - DNA, 25 bp, Homo sapien
tagatctcctgcttgaactccactg

SEQ ID NO: 1794442 - DNA, 25 bp, Homo sapien
gccgtgggtgtaagaagacctagat

SEQ ID NO: 1794443 - DNA, 25 bp, Homo sapien
cacaggaagtggtggacattgcaga

SEQ ID NO: 1794444 - DNA, 25 bp, Homo sapien
gaccagtagtcaggacggctcagac

SEQ ID NO: 1794445 - DNA, 25 bp, Homo sapien
tcgaagactgttactggaccagtag

SEQ ID NO: 1794446 - DNA, 25 bp, Homo sapien
tgttgaaaggcccactcgaagactg

SEQ ID NO: 1794447 - DNA, 25 bp, Homo sapien
gccatgccctcaaaattctgtttag

SEQ ID NO: 1794448 - DNA, 25 bp, Homo sapien
catgagttatttgggccatgccctc

SEQ ID NO: 1794449 - DNA, 25 bp, Homo sapien
ccatgtttcaacttggaactcatga

SEQ ID NO: 1794450 - DNA, 25 bp, Homo sapien
gtttcaacttggaactcatgagtta

SEQ ID NO: 1794451 - DNA, 25 bp, Homo sapien
ggattgtaatccacaaatatctgaa

SEQ ID NO: 1794452 - DNA, 25 bp, Homo sapien
aaaaatctaagattgtaaaatgtca

SEQ ID NO: 1794453 - DNA, 25 bp, Homo sapien
aaatgtcaatatgattcacttgtca

SEQ ID NO: 1794454 - DNA, 25 bp, Homo sapien
ttggaagtaaatgaggattgtaatc

SEQ ID NO: 1794455 - DNA, 25 bp, Homo sapien
cagctacttggggcactaagatggg

SEQ ID NO: 1794456 - DNA, 25 bp, Homo sapien
aattcaacccggtgtggtagtgcac

SEQ ID NO: 1794457 - DNA, 25 bp, Homo sapien
cccgcctgggcgacggatcaagacc

SEQ ID NO: 1794458 - DNA, 25 bp, Homo sapien
atcatgctactgcaactcccgcctg

SEQ ID NO: 1794459 - DNA, 25 bp, Homo sapien
tgagattcgtagagaagcaaaccag

SEQ ID NO: 1794460 - DNA, 25 bp, Homo sapien
ttctaacaatgtaacgacaacggtg

SEQ ID NO: 1794461 - DNA, 25 bp, Homo sapien
tcccttgaaaccttacttggctgct

SEQ ID NO: 1794462 - DNA, 25 bp, Homo sapien
taaaaatccaagattggccaggcta

SEQ ID NO: 1794463 - DNA, 25 bp, Homo sapien
atttatttttatttcacaatccaca

SEQ ID NO: 1794464 - DNA, 25 bp, Homo sapien
tatttcacaatccacaaaacatttc

SEQ ID NO: 1794465 - DNA, 25 bp, Homo sapien
ttgaataaaacttgacataaattta

SEQ ID NO: 1794466 - DNA, 25 bp, Homo sapien
tatttttatttcacaatccacaaaa

SEQ ID NO: 1794467 - DNA, 25 bp, Homo sapien
aattttataatttcttgactccttg

SEQ ID NO: 1794468 - DNA, 25 bp, Homo sapien
attttaataagctcaaattctatag

SEQ ID NO: 1794469 - DNA, 25 bp, Homo sapien
ttttaataagctcaaattctatagt

SEQ ID NO: 1794470 - DNA, 25 bp, Homo sapien
taatttcttgactccttgcttttta

SEQ ID NO: 1794471 - DNA, 25 bp, Homo sapien
atctgatacggaatgctctgatcca

SEQ ID NO: 1794472 - DNA, 25 bp, Homo sapien
gaatgctctgatccagtcccacatg

SEQ ID NO: 1794473 - DNA, 25 bp, Homo sapien
agtcccacatggctagtatagcagg

SEQ ID NO: 1794474 - DNA, 25 bp, Homo sapien
ggctagtatagcaggcttggtctcc

SEQ ID NO: 1794475 - DNA, 25 bp, Homo sapien
tcatcctaccacgaaatgttcctga

SEQ ID NO: 1794476 - DNA, 25 bp, Homo sapien
tctgcagtctgagttttgactctgc

SEQ ID NO: 1794477 - DNA, 25 bp, Homo sapien
taactgcggccaatttcatcctacc

SEQ ID NO: 1794478 - DNA, 25 bp, Homo sapien
tcctgaattgtgtggcagctgtacc

SEQ ID NO: 1794479 - DNA, 25 bp, Homo sapien
atgacatttcctccatcgccagaca

SEQ ID NO: 1794480 - DNA, 25 bp, Homo sapien
aatgacatttcctccatcgccagac

SEQ ID NO: 1794481 - DNA, 25 bp, Homo sapien
ttcctccatcgccagacacttttag

SEQ ID NO: 1794482 - DNA, 25 bp, Homo sapien
acatttcctccatcgccagacactt

SEQ ID NO: 1794483 - DNA, 25 bp, Homo sapien
ctgtggctgcagtgcctttagggtg

SEQ ID NO: 1794484 - DNA, 25 bp, Homo sapien
tgtggctgcagtgcctttagggtgt

SEQ ID NO: 1794485 - DNA, 25 bp, Homo sapien
ttctcttcaagtgggttgtgaggcc

SEQ ID NO: 1794486 - DNA, 25 bp, Homo sapien
tgctgtgaccctccggatttaccgg

SEQ ID NO: 1794487 - DNA, 25 bp, Homo sapien
taccgggacggttgagcaatgtgta

SEQ ID NO: 1794488 - DNA, 25 bp, Homo sapien
tgttgttgagatgcatcctaacggg

SEQ ID NO: 1794489 - DNA, 25 bp, Homo sapien
ggaaaagaagctggatccattgctg

SEQ ID NO: 1794490 - DNA, 25 bp, Homo sapien
gccggtctgtccaattggtgaacaa

SEQ ID NO: 1794491 - DNA, 25 bp, Homo sapien
gatccattgctgacacaattgcaga

SEQ ID NO: 1794492 - DNA, 25 bp, Homo sapien
ttgatgctcctcgagtcccctccag

SEQ ID NO: 1794493 - DNA, 25 bp, Homo sapien
tgagggtcacagacaaatgactgct

SEQ ID NO: 1794494 - DNA, 25 bp, Homo sapien
agttgacagctctgacttaagccag

SEQ ID NO: 1794495 - DNA, 25 bp, Homo sapien
ggaaatttgtttcccagttgacagc

SEQ ID NO: 1794496 - DNA, 25 bp, Homo sapien
cagcaaagcaacttaattgagggtc

SEQ ID NO: 1794497 - DNA, 25 bp, Homo sapien
tggctaagggttggctgttactgcc

SEQ ID NO: 1794498 - DNA, 25 bp, Homo sapien
ggctccaccagttctctgcccttag

SEQ ID NO: 1794499 - DNA, 25 bp, Homo sapien
aagagaaaggctccaccagttctct

SEQ ID NO: 1794500 - DNA, 25 bp, Homo sapien
tctgcccttagcaatggctaagggt

SEQ ID NO: 1794501 - DNA, 25 bp, Homo sapien
ccccggagctgactgttctggtttg

SEQ ID NO: 1794502 - DNA, 25 bp, Homo sapien
gagctgactgttctggtttgttttg

SEQ ID NO: 1794503 - DNA, 25 bp, Homo sapien
tggagctgtcttaggtgctgaagtc

SEQ ID NO: 1794504 - DNA, 25 bp, Homo sapien
ctcccccggagctgactgttctggt

SEQ ID NO: 1794505 - DNA, 25 bp, Homo sapien
tgagaagagtcaggagcacaaggag

SEQ ID NO: 1794506 - DNA, 25 bp, Homo sapien
gagtcaggagcacaaggagctgggc

SEQ ID NO: 1794507 - DNA, 25 bp, Homo sapien
gccctgtaaagaggccatgccgaag

SEQ ID NO: 1794508 - DNA, 25 bp, Homo sapien
ccctgtaaagaggccatgccgaagt

SEQ ID NO: 1794509 - DNA, 25 bp, Homo sapien
gggaaagttacacgagaataataca

SEQ ID NO: 1794510 - DNA, 25 bp, Homo sapien
tggggaaagttacacgagaataata

SEQ ID NO: 1794511 - DNA, 25 bp, Homo sapien
ggaaagttacacgagaataatacat

SEQ ID NO: 1794512 - DNA, 25 bp, Homo sapien
tgatcaggttcatttgctccctcaa

SEQ ID NO: 1794513 - DNA, 25 bp, Homo sapien
tcaggttcatttgctccctcaaagg

SEQ ID NO: 1794514 - DNA, 25 bp, Homo sapien
caggttcatttgctccctcaaaggg

SEQ ID NO: 1794515 - DNA, 25 bp, Homo sapien
ggttcatttgctccctcaaagggta

SEQ ID NO: 1794516 - DNA, 25 bp, Homo sapien
gtgtcattttcagctaatgcatttt

SEQ ID NO: 1794517 - DNA, 25 bp, Homo sapien
ctggatacatcataatagggtgtgt

SEQ ID NO: 1794518 - DNA, 25 bp, Homo sapien
tacatcataatagggtgtgtcattt

SEQ ID NO: 1794519 - DNA, 25 bp, Homo sapien
tcagctaatgcattttgcaacatgt

SEQ ID NO: 1794520 - DNA, 25 bp, Homo sapien
gagactcaaggtactttttggcaga

SEQ ID NO: 1794521 - DNA, 25 bp, Homo sapien
gacccaagagtttactgaagtcact

SEQ ID NO: 1794522 - DNA, 25 bp, Homo sapien
ctaacacgttttcccataagagact

SEQ ID NO: 1794523 - DNA, 25 bp, Homo sapien
ttttggcagaaagttgacccaagag

SEQ ID NO: 1794524 - DNA, 25 bp, Homo sapien
tagttgtcagtgaagactgcatctg

SEQ ID NO: 1794525 - DNA, 25 bp, Homo sapien
tctgagtgacgtttgactggtacag

SEQ ID NO: 1794526 - DNA, 25 bp, Homo sapien
catttgttttctaaggcgggtatag

SEQ ID NO: 1794527 - DNA, 25 bp, Homo sapien
actgcatctgagtgacgtttgactg

SEQ ID NO: 1794528 - DNA, 25 bp, Homo sapien
tggaaagtcgggagattctccctca

SEQ ID NO: 1794529 - DNA, 25 bp, Homo sapien
actcttctggaaagtcgggagattc

SEQ ID NO: 1794530 - DNA, 25 bp, Homo sapien
ctggaaagtcgggagattctccctc

SEQ ID NO: 1794531 - DNA, 25 bp, Homo sapien
cttctggaaagtcgggagattctcc

SEQ ID NO: 1794532 - DNA, 25 bp, Homo sapien
tcagctttgctccaaaggtcttttt

SEQ ID NO: 1794533 - DNA, 25 bp, Homo sapien
atcagctttgctccaaaggtctttt

SEQ ID NO: 1794534 - DNA, 25 bp, Homo sapien
ttctctgagatgtctataaaagata

SEQ ID NO: 1794535 - DNA, 25 bp, Homo sapien
tctctgagatgtctataaaagataa

SEQ ID NO: 1794536 - DNA, 25 bp, Homo sapien
tctcctgaatagttaagtacactct

SEQ ID NO: 1794537 - DNA, 25 bp, Homo sapien
agggaagtttcagtgtcagaagcag

SEQ ID NO: 1794538 - DNA, 25 bp, Homo sapien
gtcgttctccttaactgaaagacta

SEQ ID NO: 1794539 - DNA, 25 bp, Homo sapien
tacttaacacaagcagaaagggaag

SEQ ID NO: 1794540 - DNA, 25 bp, Homo sapien
tctgcaatcataagcaaggtcttta

SEQ ID NO: 1794541 - DNA, 25 bp, Homo sapien
cagaaggaagctcatatgaccaaag

SEQ ID NO: 1794542 - DNA, 25 bp, Homo sapien
gaaaaatagttgtgtctccaaatgt

SEQ ID NO: 1794543 - DNA, 25 bp, Homo sapien
ggaagctcatatgaccaaagcaata

SEQ ID NO: 1794544 - DNA, 25 bp, Homo sapien
ctttgacatgcaatgggaagtaata

SEQ ID NO: 1794545 - DNA, 25 bp, Homo sapien
cctgaactttgacatgcaatgggaa

SEQ ID NO: 1794546 - DNA, 25 bp, Homo sapien
gaactttgacatgcaatgggaagta

SEQ ID NO: 1794547 - DNA, 25 bp, Homo sapien
catgcaatgggaagtaataagttaa

SEQ ID NO: 1794548 - DNA, 25 bp, Homo sapien
cagtaaactatcaaatactctccat

SEQ ID NO: 1794549 - DNA, 25 bp, Homo sapien
taaactatcaaatactctccattag

SEQ ID NO: 1794550 - DNA, 25 bp, Homo sapien
tatcaaatactctccattaggcaaa

SEQ ID NO: 1794551 - DNA, 25 bp, Homo sapien
aactatcaaatactctccattaggc

SEQ ID NO: 1794552 - DNA, 25 bp, Homo sapien
gaatttaacaatatgtagggaatgt

SEQ ID NO: 1794553 - DNA, 25 bp, Homo sapien
caatatgtagggaatgttaattatg

SEQ ID NO: 1794554 - DNA, 25 bp, Homo sapien
tctgaatttaacaatatgtagggaa

SEQ ID NO: 1794555 - DNA, 25 bp, Homo sapien
taacaatatgtagggaatgttaatt

SEQ ID NO: 1794556 - DNA, 25 bp, Homo sapien
agctcaaatgttggaaaggagccag

SEQ ID NO: 1794557 - DNA, 25 bp, Homo sapien
gctcaaatgttggaaaggagccaga

SEQ ID NO: 1794558 - DNA, 25 bp, Homo sapien
gtaactgtttctccaattcccacac

SEQ ID NO: 1794559 - DNA, 25 bp, Homo sapien
aacatttctgctatagtgaagtgtc

SEQ ID NO: 1794560 - DNA, 25 bp, Homo sapien
tttcagagatcttagtgtggcctgt

SEQ ID NO: 1794561 - DNA, 25 bp, Homo sapien
tttctgctatagtgaagtgtctgga

SEQ ID NO: 1794562 - DNA, 25 bp, Homo sapien
ttccccctcagtcttctcaaagacc

SEQ ID NO: 1794563 - DNA, 25 bp, Homo sapien
aagagcatggcaaaaggggcagttg

SEQ ID NO: 1794564 - DNA, 25 bp, Homo sapien
gagcatggcaaaaggggcagttgct

SEQ ID NO: 1794565 - DNA, 25 bp, Homo sapien
agagcatggcaaaaggggcagttgc

SEQ ID NO: 1794566 - DNA, 25 bp, Homo sapien
ctgctctctggagcttgcaggtata

SEQ ID NO: 1794567 - DNA, 25 bp, Homo sapien
tatagatgaaggagaggctggtgtc

SEQ ID NO: 1794568 - DNA, 25 bp, Homo sapien
tctggagcttgcaggtatagatgaa

SEQ ID NO: 1794569 - DNA, 25 bp, Homo sapien
gaagattcctgggaatcacatttgc

SEQ ID NO: 1794570 - DNA, 25 bp, Homo sapien
gatacaatacagaggtaacagggcc

SEQ ID NO: 1794571 - DNA, 25 bp, Homo sapien
tcacaggcatggcagtagaacccca

SEQ ID NO: 1794572 - DNA, 25 bp, Homo sapien
gcaaaaaattaggagcaggtccaga

SEQ ID NO: 1794573 - DNA, 25 bp, Homo sapien
tatgtcaccatagcaggcctacaca

SEQ ID NO: 1794574 - DNA, 25 bp, Homo sapien
gacacaaaaacatatccattggaat

SEQ ID NO: 1794575 - DNA, 25 bp, Homo sapien
ctaaaagacagttgggttacagata

SEQ ID NO: 1794576 - DNA, 25 bp, Homo sapien
aagacagttgggttacagataatga

SEQ ID NO: 1794577 - DNA, 25 bp, Homo sapien
aagcatttcagtaatacccccagac

SEQ ID NO: 1794578 - DNA, 25 bp, Homo sapien
ttggtagctatttacatctctctca

SEQ ID NO: 1794579 - DNA, 25 bp, Homo sapien
ctcctttgccttttgatatctgtgc

SEQ ID NO: 1794580 - DNA, 25 bp, Homo sapien
ctgctcagacttgtcaattctcctt

SEQ ID NO: 1794581 - DNA, 25 bp, Homo sapien
tctcatttctacacctaaaatttgc

SEQ ID NO: 1794582 - DNA, 25 bp, Homo sapien
tcaggagagagtaataggacttctc

SEQ ID NO: 1794583 - DNA, 25 bp, Homo sapien
cttcaggatccattagaatctttat

SEQ ID NO: 1794584 - DNA, 25 bp, Homo sapien
ctgatcctgaacttcaggatccatt

SEQ ID NO: 1794585 - DNA, 25 bp, Homo sapien
gaaactttctgctgatcctgaactt

SEQ ID NO: 1794586 - DNA, 25 bp, Homo sapien
cccctctactccaccactatccctc

SEQ ID NO: 1794587 - DNA, 25 bp, Homo sapien
acccctctactccaccactatccct

SEQ ID NO: 1794588 - DNA, 25 bp, Homo sapien
ccctctactccaccactatccctct

SEQ ID NO: 1794589 - DNA, 25 bp, Homo sapien
acacccctctactccaccactatcc

SEQ ID NO: 1794590 - DNA, 25 bp, Homo sapien
tcaaagctaagctggaagtgagcgt

SEQ ID NO: 1794591 - DNA, 25 bp, Homo sapien
gaacacgtggtaatcaacttcgcag

SEQ ID NO: 1794592 - DNA, 25 bp, Homo sapien
agtttctaagttcctgcatgctgga

SEQ ID NO: 1794593 - DNA, 25 bp, Homo sapien
gtacattgagatcccatgcatgcac

SEQ ID NO: 1794594 - DNA, 25 bp, Homo sapien
cctgtgtgatagagcattgcgggca

SEQ ID NO: 1794595 - DNA, 25 bp, Homo sapien
gaaaatgacacctgtgtgatagagc

SEQ ID NO: 1794596 - DNA, 25 bp, Homo sapien
cacctgtgtgatagagcattgcggg

SEQ ID NO: 1794597 - DNA, 25 bp, Homo sapien
tgacacctgtgtgatagagcattgc

SEQ ID NO: 1794598 - DNA, 25 bp, Homo sapien
tttctaagacaatcttcaacgtaag

SEQ ID NO: 1794599 - DNA, 25 bp, Homo sapien
gacaatcttcaacgtaagtactcat

SEQ ID NO: 1794600 - DNA, 25 bp, Homo sapien
ccagattctaaacttgtgacagcct

SEQ ID NO: 1794601 - DNA, 25 bp, Homo sapien
agggccagattctaaacttgtgaca

SEQ ID NO: 1794602 - DNA, 25 bp, Homo sapien
ctgtcattgtcattgagaagtagct

SEQ ID NO: 1794603 - DNA, 25 bp, Homo sapien
gagaagtagcttacaatcaaacagc

SEQ ID NO: 1794604 - DNA, 25 bp, Homo sapien
tttcaccaaagctccctcttctctc

SEQ ID NO: 1794605 - DNA, 25 bp, Homo sapien
cattgattcctgcttcatcatattt

SEQ ID NO: 1794606 - DNA, 25 bp, Homo sapien
tgagcatcatgagtcgctgatgaag

SEQ ID NO: 1794607 - DNA, 25 bp, Homo sapien
catctagtcactgcgccaagaatgg

SEQ ID NO: 1794608 - DNA, 25 bp, Homo sapien
taaatgtgctccatctagtcactgc

SEQ ID NO: 1794609 - DNA, 25 bp, Homo sapien
tgtccagtagccaagctaaatgtgc

SEQ ID NO: 1794610 - DNA, 25 bp, Homo sapien
ctgctgagtcgccagatgaatcctc

SEQ ID NO: 1794611 - DNA, 25 bp, Homo sapien
tggtgcttcccaatagatcacaaag

SEQ ID NO: 1794612 - DNA, 25 bp, Homo sapien
gaaagtcttgatgtgaggttgcaga

SEQ ID NO: 1794613 - DNA, 25 bp, Homo sapien
tagcactgtaagcacagatggccca

SEQ ID NO: 1794614 - DNA, 25 bp, Homo sapien
gatgttctccgggtctcatgtttga

SEQ ID NO: 1794615 - DNA, 25 bp, Homo sapien
tcaccccgtagaactagttgccaaa

SEQ ID NO: 1794616 - DNA, 25 bp, Homo sapien
gtagaactagttgccaaactcacca

SEQ ID NO: 1794617 - DNA, 25 bp, Homo sapien
cccgtagaactagttgccaaactca

SEQ ID NO: 1794618 - DNA, 25 bp, Homo sapien
actgatcaccccgtagaactagttg

SEQ ID NO: 1794619 - DNA, 25 bp, Homo sapien
taagtgccagtaggctcgatggcat

SEQ ID NO: 1794620 - DNA, 25 bp, Homo sapien
ctaagtgccagtaggctcgatggca

SEQ ID NO: 1794621 - DNA, 25 bp, Homo sapien
gctaagtgccagtaggctcgatggc

SEQ ID NO: 1794622 - DNA, 25 bp, Homo sapien
cattgcagtacacactgatgcactc

SEQ ID NO: 1794623 - DNA, 25 bp, Homo sapien
gggcacatacttgccacctgtggtc

SEQ ID NO: 1794624 - DNA, 25 bp, Homo sapien
ggggcacatacttgccacctgtggt

SEQ ID NO: 1794625 - DNA, 25 bp, Homo sapien
ggcacatacttgccacctgtggtct

SEQ ID NO: 1794626 - DNA, 25 bp, Homo sapien
agccgtaagatctgcacgaaggagc

SEQ ID NO: 1794627 - DNA, 25 bp, Homo sapien
ctcacaatgtccagtaccgaatcca

SEQ ID NO: 1794628 - DNA, 25 bp, Homo sapien
cgcaccttctgcgtagtgcccattg

SEQ ID NO: 1794629 - DNA, 25 bp, Homo sapien
aagatgaagttgtccagccgtaaga

SEQ ID NO: 1794630 - DNA, 25 bp, Homo sapien
tagggctccacccccatgtctgaca

SEQ ID NO: 1794631 - DNA, 25 bp, Homo sapien
ttagggctccacccccatgtctgac

SEQ ID NO: 1794632 - DNA, 25 bp, Homo sapien
agggctccacccccatgtctgacac

SEQ ID NO: 1794633 - DNA, 25 bp, Homo sapien
gcagacgttatggagagtttcatta

SEQ ID NO: 1794634 - DNA, 25 bp, Homo sapien
aagcagacgttatggagagtttcat

SEQ ID NO: 1794635 - DNA, 25 bp, Homo sapien
cagacgttatggagagtttcattat

SEQ ID NO: 1794636 - DNA, 25 bp, Homo sapien
tgaagcagacgttatggagagtttc

SEQ ID NO: 1794637 - DNA, 25 bp, Homo sapien
ttatggcggcagacaccaagtggtt

SEQ ID NO: 1794638 - DNA, 25 bp, Homo sapien
tatggcggcagacaccaagtggttc

SEQ ID NO: 1794639 - DNA, 25 bp, Homo sapien
gaagcctaggcaggtagtgacccca

SEQ ID NO: 1794640 - DNA, 25 bp, Homo sapien
gtgagctcaggcactatgagggcct

SEQ ID NO: 1794641 - DNA, 25 bp, Homo sapien
tcaggcactatgagggcctggtagt

SEQ ID NO: 1794642 - DNA, 25 bp, Homo sapien
agcagggtgaagacaggcataaaga

SEQ ID NO: 1794643 - DNA, 25 bp, Homo sapien
acaggcataaagaagtgcaggtagg

SEQ ID NO: 1794644 - DNA, 25 bp, Homo sapien
gtggccatggcaggggtctcaggga

SEQ ID NO: 1794645 - DNA, 25 bp, Homo sapien
taggtagtggccatggcaggggtct

SEQ ID NO: 1794646 - DNA, 25 bp, Homo sapien
ggccatggcaggggtctcagggaac

SEQ ID NO: 1794647 - DNA, 25 bp, Homo sapien
tagtggccatggcaggggtctcagg

SEQ ID NO: 1794648 - DNA, 25 bp, Homo sapien
gaaaggctttgcaccgaaacatgac

SEQ ID NO: 1794649 - DNA, 25 bp, Homo sapien
catgtagtccgtgaacactgtggcc

SEQ ID NO: 1794650 - DNA, 25 bp, Homo sapien
tggtattactggtaccgggacacca

SEQ ID NO: 1794651 - DNA, 25 bp, Homo sapien
tgcccatgtgccagtgcagaaaggc

SEQ ID NO: 1794652 - DNA, 25 bp, Homo sapien
aacattatgaatatagaacatgtca

SEQ ID NO: 1794653 - DNA, 25 bp, Homo sapien
cagtctcatgaatacgaacattatg

SEQ ID NO: 1794654 - DNA, 25 bp, Homo sapien
tagaacatgtcataagcaagggtca

SEQ ID NO: 1794655 - DNA, 25 bp, Homo sapien
gaatatagaacatgtcataagcaag

SEQ ID NO: 1794656 - DNA, 25 bp, Homo sapien
taacatctggattattaaccccttc

SEQ ID NO: 1794657 - DNA, 25 bp, Homo sapien
aacatctggattattaaccccttct

SEQ ID NO: 1794658 - DNA, 25 bp, Homo sapien
catctggattattaaccccttcttt

SEQ ID NO: 1794659 - DNA, 25 bp, Homo sapien
cttaacatctggattattaacccct

SEQ ID NO: 1794660 - DNA, 25 bp, Homo sapien
tccagcagtcaatttacagacagca

SEQ ID NO: 1794661 - DNA, 25 bp, Homo sapien
gctgtccactggagtttcgcctcca

SEQ ID NO: 1794662 - DNA, 25 bp, Homo sapien
ccaggtatggcacgtattgttttta

SEQ ID NO: 1794663 - DNA, 25 bp, Homo sapien
gttccttcttcagctatcggctcct

SEQ ID NO: 1794664 - DNA, 25 bp, Homo sapien
tgagagctcaatggctgattcacag

SEQ ID NO: 1794665 - DNA, 25 bp, Homo sapien
gctcaatggctgattcacagttcat

SEQ ID NO: 1794666 - DNA, 25 bp, Homo sapien
attttctgagagctcaatggctgat

SEQ ID NO: 1794667 - DNA, 25 bp, Homo sapien
tctgagagctcaatggctgattcac

SEQ ID NO: 1794668 - DNA, 25 bp, Homo sapien
tatcccttgagattttatcttcagt

SEQ ID NO: 1794669 - DNA, 25 bp, Homo sapien
tggagtcagcgtgcgaggcatctac

SEQ ID NO: 1794670 - DNA, 25 bp, Homo sapien
ccttagactcttgctggtattcttg

SEQ ID NO: 1794671 - DNA, 25 bp, Homo sapien
tactaagattgctaacactgatatt

SEQ ID NO: 1794672 - DNA, 25 bp, Homo sapien
gaagcaggcatccagtgcacgtgcc

SEQ ID NO: 1794673 - DNA, 25 bp, Homo sapien
aaactcctccggcagatccggcttg

SEQ ID NO: 1794674 - DNA, 25 bp, Homo sapien
gaagcctagaaaactcctccggcag

SEQ ID NO: 1794675 - DNA, 25 bp, Homo sapien
tactctgtaggggaagaagcctaga

SEQ ID NO: 1794676 - DNA, 25 bp, Homo sapien
tcaagcgctgatcacgcggcaccac

SEQ ID NO: 1794677 - DNA, 25 bp, Homo sapien
atgttatttgtaagatctgtttttc

SEQ ID NO: 1794678 - DNA, 25 bp, Homo sapien
gttatttgtaagatctgtttttcca

SEQ ID NO: 1794679 - DNA, 25 bp, Homo sapien
ttaagtgcgcttgcaacataaattc

SEQ ID NO: 1794680 - DNA, 25 bp, Homo sapien
cttaagtgcgcttgcaacataaatt

SEQ ID NO: 1794681 - DNA, 25 bp, Homo sapien
cagccaaaggcagtttccccgattt

SEQ ID NO: 1794682 - DNA, 25 bp, Homo sapien
gatttttcgcggtcccagccttgct

SEQ ID NO: 1794683 - DNA, 25 bp, Homo sapien
cgggagatcgcgctcgcggttatct

SEQ ID NO: 1794684 - DNA, 25 bp, Homo sapien
cactcccgccaaatggagagacacc

SEQ ID NO: 1794685 - DNA, 25 bp, Homo sapien
cggcagcggttcctgggtccgggag

SEQ ID NO: 1794686 - DNA, 25 bp, Homo sapien
tgggtgtcggggggaagccagaaga

SEQ ID NO: 1794687 - DNA, 25 bp, Homo sapien
ccacccacgccgaccgtggactcca

SEQ ID NO: 1794688 - DNA, 25 bp, Homo sapien
ccacgccgaccgtggactccagccc

SEQ ID NO: 1794689 - DNA, 25 bp, Homo sapien
cctcgaccctcggatagtgagtgag

SEQ ID NO: 1794690 - DNA, 25 bp, Homo sapien
gagatacaggtctgtgaagcaggca

SEQ ID NO: 1794691 - DNA, 25 bp, Homo sapien
tccacgtcggctggcatgagccggc

SEQ ID NO: 1794692 - DNA, 25 bp, Homo sapien
ccagctggcgccttttaagagatac

SEQ ID NO: 1794693 - DNA, 25 bp, Homo sapien
gccacagcccgccaaggcgcctgcg

SEQ ID NO: 1794694 - DNA, 25 bp, Homo sapien
aaaatcgcgggggactccagtgcgc

SEQ ID NO: 1794695 - DNA, 25 bp, Homo sapien
tgcgcaggcgccgacccgccaactc

SEQ ID NO: 1794696 - DNA, 25 bp, Homo sapien
gagatgcagccgcaggtctcctgct

SEQ ID NO: 1794697 - DNA, 25 bp, Homo sapien
aaaaacccaggggagcgtagctgca

SEQ ID NO: 1794698 - DNA, 25 bp, Homo sapien
gcgcttgcaaggaagaagtgcctcg

SEQ ID NO: 1794699 - DNA, 25 bp, Homo sapien
gctgcacactcagtaaacttaacgt

SEQ ID NO: 1794700 - DNA, 25 bp, Homo sapien
gaaaatacaaataaacgcgcttgca

SEQ ID NO: 1794701 - DNA, 25 bp, Homo sapien
tgcagaaaggcaccagagggaaaca

SEQ ID NO: 1794702 - DNA, 25 bp, Homo sapien
ctaacggtactgaaaactgactaca

SEQ ID NO: 1794703 - DNA, 25 bp, Homo sapien
aactcactccgaggctgcagaaagg

SEQ ID NO: 1794704 - DNA, 25 bp, Homo sapien
gttcacatcccgttgcttcactggg

SEQ ID NO: 1794705 - DNA, 25 bp, Homo sapien
gaagcacgaccattgtacactgaaa

SEQ ID NO: 1794706 - DNA, 25 bp, Homo sapien
gggcactcgaatctccgcttactag

SEQ ID NO: 1794707 - DNA, 25 bp, Homo sapien
tcccacaggatctggcttctgccta

SEQ ID NO: 1794708 - DNA, 25 bp, Homo sapien
tgagaattaactcacactgagaagc

SEQ ID NO: 1794709 - DNA, 25 bp, Homo sapien
gtctcttcggaagctaacaccatgc

SEQ ID NO: 1794710 - DNA, 25 bp, Homo sapien
gacaacgtttagagacagttaccac

SEQ ID NO: 1794711 - DNA, 25 bp, Homo sapien
tatcctggtacatagaagtaactcc

SEQ ID NO: 1794712 - DNA, 25 bp, Homo sapien
gaacaagttactgctagacctctca

SEQ ID NO: 1794713 - DNA, 25 bp, Homo sapien
caaggtagtaaatgcactgctttat

SEQ ID NO: 1794714 - DNA, 25 bp, Homo sapien
tcacaaggtagtaaatgcactgctt

SEQ ID NO: 1794715 - DNA, 25 bp, Homo sapien
ggtagtaaatgcactgctttattct

SEQ ID NO: 1794716 - DNA, 25 bp, Homo sapien
ttcttcacaaggtagtaaatgcact

SEQ ID NO: 1794717 - DNA, 25 bp, Homo sapien
aagccctagtcaacaagtgccagct

SEQ ID NO: 1794718 - DNA, 25 bp, Homo sapien
ggtgaaagtacccttactctcttga

SEQ ID NO: 1794719 - DNA, 25 bp, Homo sapien
taacacagttggaggtaatatgcat

SEQ ID NO: 1794720 - DNA, 25 bp, Homo sapien
tcttgaaaaacgttgagttaacaca

SEQ ID NO: 1794721 - DNA, 25 bp, Homo sapien
tacagatggtcctcgatttacattg

SEQ ID NO: 1794722 - DNA, 25 bp, Homo sapien
tgtactatttcgattccctactctt

SEQ ID NO: 1794723 - DNA, 25 bp, Homo sapien
tacagtcctgtactatttcgattcc

SEQ ID NO: 1794724 - DNA, 25 bp, Homo sapien
taaaagtaggcagaatagtatcaag

SEQ ID NO: 1794725 - DNA, 25 bp, Homo sapien
tgctgctaggctctttaaactcaga

SEQ ID NO: 1794726 - DNA, 25 bp, Homo sapien
gcaatattaccccagcctactgagg

SEQ ID NO: 1794727 - DNA, 25 bp, Homo sapien
tataatgacttctgccttgtgtgac

SEQ ID NO: 1794728 - DNA, 25 bp, Homo sapien
cctactgaggtaaggcataagcccc

SEQ ID NO: 1794729 - DNA, 25 bp, Homo sapien
tagacatgcatctgccagcattggg

SEQ ID NO: 1794730 - DNA, 25 bp, Homo sapien
tctggaggccccgactcagtgcatg

SEQ ID NO: 1794731 - DNA, 25 bp, Homo sapien
tcgactgccctgcactgcggctctg

SEQ ID NO: 1794732 - DNA, 25 bp, Homo sapien
agactgacgacttgcgcggctgtga

SEQ ID NO: 1794733 - DNA, 25 bp, Homo sapien
ctgcagcggaccctcgactgccctg

SEQ ID NO: 1794734 - DNA, 25 bp, Homo sapien
tgaaagcaagtaaatgacgcggcag

SEQ ID NO: 1794735 - DNA, 25 bp, Homo sapien
gttgctgtaacacggaatcactcca

SEQ ID NO: 1794736 - DNA, 25 bp, Homo sapien
gaaataccacttagtagacgctgcc

SEQ ID NO: 1794737 - DNA, 25 bp, Homo sapien
aataaatgtcggtattgctggcacc

SEQ ID NO: 1794738 - DNA, 25 bp, Homo sapien
gaactcaactgagagatataccatg

SEQ ID NO: 1794739 - DNA, 25 bp, Homo sapien
tacttaaattgcttatgcacttggg

SEQ ID NO: 1794740 - DNA, 25 bp, Homo sapien
tactgtttcctcattggtatataac

SEQ ID NO: 1794741 - DNA, 25 bp, Homo sapien
ttccatggttaagataaattcaaag

SEQ ID NO: 1794742 - DNA, 25 bp, Homo sapien
tgtttacattgacagtttacaacca

SEQ ID NO: 1794743 - DNA, 25 bp, Homo sapien
tgcctatagatagaagcctatcaaa

SEQ ID NO: 1794744 - DNA, 25 bp, Homo sapien
tttctgaccaatgggtttgttctcc

SEQ ID NO: 1794745 - DNA, 25 bp, Homo sapien
gtcttagacagaaaatgcctataga

SEQ ID NO: 1794746 - DNA, 25 bp, Homo sapien
aaataaagggaagtgcagtaaaatg

SEQ ID NO: 1794747 - DNA, 25 bp, Homo sapien
cagtatctgcgaaaaactaaataaa

SEQ ID NO: 1794748 - DNA, 25 bp, Homo sapien
acacaggatcgccacaagccttcaa

SEQ ID NO: 1794749 - DNA, 25 bp, Homo sapien
cacagagtgagcacacgctattgga

SEQ ID NO: 1794750 - DNA, 25 bp, Homo sapien
tcatcaattaagaattaattaagtc

SEQ ID NO: 1794751 - DNA, 25 bp, Homo sapien
tatgggaatagcaggtcagtggaac

SEQ ID NO: 1794752 - DNA, 25 bp, Homo sapien
aaagatatgggaatagcaggtcagt

SEQ ID NO: 1794753 - DNA, 25 bp, Homo sapien
ggaacagtcagtatacacactatag

SEQ ID NO: 1794754 - DNA, 25 bp, Homo sapien
aaacacccagtaagacatgctataa

SEQ ID NO: 1794755 - DNA, 25 bp, Homo sapien
agcctgtccttgaatctttgaaatc

SEQ ID NO: 1794756 - DNA, 25 bp, Homo sapien
ttagcccttaacagcagagtcagcc

SEQ ID NO: 1794757 - DNA, 25 bp, Homo sapien
taaattactgcagtttctacatcag

SEQ ID NO: 1794758 - DNA, 25 bp, Homo sapien
gcacagttacttccagtatgccaca

SEQ ID NO: 1794759 - DNA, 25 bp, Homo sapien
cagttacttccagtatgccacactc

SEQ ID NO: 1794760 - DNA, 25 bp, Homo sapien
tacttccagtatgccacactctgca

SEQ ID NO: 1794761 - DNA, 25 bp, Homo sapien
ctgcacagttacttccagtatgcca

SEQ ID NO: 1794762 - DNA, 25 bp, Homo sapien
ttcagatgctgtctatcatctttct

SEQ ID NO: 1794763 - DNA, 25 bp, Homo sapien
cagatgctgtctatcatctttctga

SEQ ID NO: 1794764 - DNA, 25 bp, Homo sapien
tttcagatgctgtctatcatctttc

SEQ ID NO: 1794765 - DNA, 25 bp, Homo sapien
tcagatgctgtctatcatctttctg

SEQ ID NO: 1794766 - DNA, 25 bp, Homo sapien
ttgttatatttagaggaagaggccc

SEQ ID NO: 1794767 - DNA, 25 bp, Homo sapien
gatgcttcccctattgtcaatgttg

SEQ ID NO: 1794768 - DNA, 25 bp, Homo sapien
aacaaacaggttcttgatgcttccc

SEQ ID NO: 1794769 - DNA, 25 bp, Homo sapien
gcaacttgttgaaacagccagaaaa

SEQ ID NO: 1794770 - DNA, 25 bp, Homo sapien
ctcttttactccatcaatgcaccag

SEQ ID NO: 1794771 - DNA, 25 bp, Homo sapien
taacattgaccccaaaaatctgctg

SEQ ID NO: 1794772 - DNA, 25 bp, Homo sapien
tcacttaacattgaccccaaaaatc

SEQ ID NO: 1794773 - DNA, 25 bp, Homo sapien
ctgctctagtatttttgtcggttcc

SEQ ID NO: 1794774 - DNA, 25 bp, Homo sapien
gattagattcctccacatgtagaga

SEQ ID NO: 1794775 - DNA, 25 bp, Homo sapien
gaaaaaacattcgaggatctgccca

SEQ ID NO: 1794776 - DNA, 25 bp, Homo sapien
taggccaggcctcagttgacaactg

SEQ ID NO: 1794777 - DNA, 25 bp, Homo sapien
gacattgacagcgttactcactcac

SEQ ID NO: 1794778 - DNA, 25 bp, Homo sapien
tctgccatttgcctgccaaacttgt

SEQ ID NO: 1794779 - DNA, 25 bp, Homo sapien
cctagtattctgaggtacatttctg

SEQ ID NO: 1794780 - DNA, 25 bp, Homo sapien
tctgagaatttagagcataattaac

SEQ ID NO: 1794781 - DNA, 25 bp, Homo sapien
taccagaacatttagatcacattta

SEQ ID NO: 1794782 - DNA, 25 bp, Homo sapien
caggaggcttgacacatgtgagctc

SEQ ID NO: 1794783 - DNA, 25 bp, Homo sapien
gctaaagtgtgagtaacaacagaga

SEQ ID NO: 1794784 - DNA, 25 bp, Homo sapien
catgtgagctcttactgaatgtgaa

SEQ ID NO: 1794785 - DNA, 25 bp, Homo sapien
gaagtttaatgactggctgggagta

SEQ ID NO: 1794786 - DNA, 25 bp, Homo sapien
gcaataaaagtctgccgggagaccc

SEQ ID NO: 1794787 - DNA, 25 bp, Homo sapien
cctcagcaataaaagtctgccggga

SEQ ID NO: 1794788 - DNA, 25 bp, Homo sapien
gaaggccatctactcactgagcagg

SEQ ID NO: 1794789 - DNA, 25 bp, Homo sapien
tgagccaacttactggagtcccagt

SEQ ID NO: 1794790 - DNA, 25 bp, Homo sapien
gggcttgtttggtagcctatcagat

SEQ ID NO: 1794791 - DNA, 25 bp, Homo sapien
gttagtggtctattaaagtctccca

SEQ ID NO: 1794792 - DNA, 25 bp, Homo sapien
tgtagaattgcgatattttcctgtt

SEQ ID NO: 1794793 - DNA, 25 bp, Homo sapien
gttccatgtgttgatcaataaaatg

SEQ ID NO: 1794794 - DNA, 25 bp, Homo sapien
tccatagttgggactaacagcccac

SEQ ID NO: 1794795 - DNA, 25 bp, Homo sapien
gccaaaactatctgtgattacatgt

SEQ ID NO: 1794796 - DNA, 25 bp, Homo sapien
ctgctataggccctagccaaaacta

SEQ ID NO: 1794797 - DNA, 25 bp, Homo sapien
caagcgttccatgcactgctatagg

SEQ ID NO: 1794798 - DNA, 25 bp, Homo sapien
cggtgttagcaaggcaattatacct

SEQ ID NO: 1794799 - DNA, 25 bp, Homo sapien
tcaagagcccctgtacggtgttagc

SEQ ID NO: 1794800 - DNA, 25 bp, Homo sapien
gttaagccatgttgagccaagccga

SEQ ID NO: 1794801 - DNA, 25 bp, Homo sapien
tccacctacaagaaggacagctctg

SEQ ID NO: 1794802 - DNA, 25 bp, Homo sapien
ttgcttgggcaaggatgagtaagtg

SEQ ID NO: 1794803 - DNA, 25 bp, Homo sapien
gcttgggcaaggatgagtaagtgtc

SEQ ID NO: 1794804 - DNA, 25 bp, Homo sapien
tgggcaaggatgagtaagtgtccca

SEQ ID NO: 1794805 - DNA, 25 bp, Homo sapien
ttgggcaaggatgagtaagtgtccc

SEQ ID NO: 1794806 - DNA, 25 bp, Homo sapien
atcaggtaactaatagggttgttca

SEQ ID NO: 1794807 - DNA, 25 bp, Homo sapien
tatcaggtaactaatagggttgttc

SEQ ID NO: 1794808 - DNA, 25 bp, Homo sapien
tcaggtaactaatagggttgttcat

SEQ ID NO: 1794809 - DNA, 25 bp, Homo sapien
caggcaggaacaccttgatgaccat

SEQ ID NO: 1794810 - DNA, 25 bp, Homo sapien
ccaggcaggaacaccttgatgacca

SEQ ID NO: 1794811 - DNA, 25 bp, Homo sapien
tcatcctcaagtgaagcctgccatt

SEQ ID NO: 1794812 - DNA, 25 bp, Homo sapien
tgccattgataagccctttcccaga

SEQ ID NO: 1794813 - DNA, 25 bp, Homo sapien
tcccagacacagagatcacagtcat

SEQ ID NO: 1794814 - DNA, 25 bp, Homo sapien
tggaggtcccagtctaaaaaccagc

SEQ ID NO: 1794815 - DNA, 25 bp, Homo sapien
cagaattgcaaacattcaggtaagg

SEQ ID NO: 1794816 - DNA, 25 bp, Homo sapien
aaatctcagaattgcaaacattcag

SEQ ID NO: 1794817 - DNA, 25 bp, Homo sapien
tcaaatctcagaattgcaaacattc

SEQ ID NO: 1794818 - DNA, 25 bp, Homo sapien
tctcagaattgcaaacattcaggta

SEQ ID NO: 1794819 - DNA, 25 bp, Homo sapien
tgaaaccaccttccttactaagcag

SEQ ID NO: 1794820 - DNA, 25 bp, Homo sapien
ttccttactaagcagaagtgccttc

SEQ ID NO: 1794821 - DNA, 25 bp, Homo sapien
tactaagcagaagtgccttctctgc

SEQ ID NO: 1794822 - DNA, 25 bp, Homo sapien
ttggcattataatgaaaccaccttc

SEQ ID NO: 1794823 - DNA, 25 bp, Homo sapien
tgccagctggattggctgcgacaga

SEQ ID NO: 1794824 - DNA, 25 bp, Homo sapien
gactacgtgcaagtgtctctccagg

SEQ ID NO: 1794825 - DNA, 25 bp, Homo sapien
tgtagggcaagcaaccaggaaagac

SEQ ID NO: 1794826 - DNA, 25 bp, Homo sapien
cagacaagcagtcctatgtagggca

SEQ ID NO: 1794827 - DNA, 25 bp, Homo sapien
tgtagaagcccaataataggtctga

SEQ ID NO: 1794828 - DNA, 25 bp, Homo sapien
tctaggccctgaacctttgtttctg

SEQ ID NO: 1794829 - DNA, 25 bp, Homo sapien
ttgtttctgtcctaaggtcacactg

SEQ ID NO: 1794830 - DNA, 25 bp, Homo sapien
ttggccatattctcagtgtggcttc

SEQ ID NO: 1794831 - DNA, 25 bp, Homo sapien
tatatgtcttctttcaatatgctct

SEQ ID NO: 1794832 - DNA, 25 bp, Homo sapien
gcttcttgtctaatattcacaaata

SEQ ID NO: 1794833 - DNA, 25 bp, Homo sapien
aatatatgtcttctttcaatatgct

SEQ ID NO: 1794834 - DNA, 25 bp, Homo sapien
ttgaaagcttcttgtctaatattca

SEQ ID NO: 1794835 - DNA, 25 bp, Homo sapien
agtttttacccagttactgcctctg

SEQ ID NO: 1794836 - DNA, 25 bp, Homo sapien
gtttttacccagttactgcctctga

SEQ ID NO: 1794837 - DNA, 25 bp, Homo sapien
tcagacacttgcgtagttgctacaa

SEQ ID NO: 1794838 - DNA, 25 bp, Homo sapien
tttcagacacttgcgtagttgctac

SEQ ID NO: 1794839 - DNA, 25 bp, Homo sapien
cagacacttgcgtagttgctacaac

SEQ ID NO: 1794840 - DNA, 25 bp, Homo sapien
atttttcagacacttgcgtagttgc

SEQ ID NO: 1794841 - DNA, 25 bp, Homo sapien
tcaccaccggatcaacttcgacaaa

SEQ ID NO: 1794842 - DNA, 25 bp, Homo sapien
gaaagttggtatgaagcattaccac

SEQ ID NO: 1794843 - DNA, 25 bp, Homo sapien
tgctggtggtctgcatcaccaccgg

SEQ ID NO: 1794844 - DNA, 25 bp, Homo sapien
tggactttggtcagtgaacagacac

SEQ ID NO: 1794845 - DNA, 25 bp, Homo sapien
tgctggaccagatattgagaccacg

SEQ ID NO: 1794846 - DNA, 25 bp, Homo sapien
gatattgagaccacgcactctgtga

SEQ ID NO: 1794847 - DNA, 25 bp, Homo sapien
ggaccagatattgagaccacgcact

SEQ ID NO: 1794848 - DNA, 25 bp, Homo sapien
aggctgctggaccagatattgagac

SEQ ID NO: 1794849 - DNA, 25 bp, Homo sapien
ggatagatttgcgaaactggcatca

SEQ ID NO: 1794850 - DNA, 25 bp, Homo sapien
catgtcctggaggtttagagccagc

SEQ ID NO: 1794851 - DNA, 25 bp, Homo sapien
tgagtagcatactgtaccacattga

SEQ ID NO: 1794852 - DNA, 25 bp, Homo sapien
ccaggagaggattcttatccaggat

SEQ ID NO: 1794853 - DNA, 25 bp, Homo sapien
gtgatattgtcgatgactgtaatcc

SEQ ID NO: 1794854 - DNA, 25 bp, Homo sapien
cataagtgatattgtcgatgactgt

SEQ ID NO: 1794855 - DNA, 25 bp, Homo sapien
aataggcaacataagtgatattgtc

SEQ ID NO: 1794856 - DNA, 25 bp, Homo sapien
caacataagtgatattgtcgatgac

SEQ ID NO: 1794857 - DNA, 25 bp, Homo sapien
tggatctagtccattgttttcatag

SEQ ID NO: 1794858 - DNA, 25 bp, Homo sapien
ttcatagaactgtgctccttctgac

SEQ ID NO: 1794859 - DNA, 25 bp, Homo sapien
aattctgtaattttggatctagtcc

SEQ ID NO: 1794860 - DNA, 25 bp, Homo sapien
ggctgcattgcctagaattctgtaa

SEQ ID NO: 1794861 - DNA, 25 bp, Homo sapien
gtggaatcacggcagccatcctgtc

SEQ ID NO: 1794862 - DNA, 25 bp, Homo sapien
aacagcactttctctcgtggaatca

SEQ ID NO: 1794863 - DNA, 25 bp, Homo sapien
tggtctttgctatctcctgtgttct

SEQ ID NO: 1794864 - DNA, 25 bp, Homo sapien
gccctttgatgcgtacctgccttca

SEQ ID NO: 1794865 - DNA, 25 bp, Homo sapien
catttataagtatggactctggcca

SEQ ID NO: 1794866 - DNA, 25 bp, Homo sapien
tgcctgaggcgcagaatggaatctc

SEQ ID NO: 1794867 - DNA, 25 bp, Homo sapien
tctggccactagacagtagtcatgc

SEQ ID NO: 1794868 - DNA, 25 bp, Homo sapien
gatggaggtccaatcgtcagattca

SEQ ID NO: 1794869 - DNA, 25 bp, Homo sapien
caagggaatcaaggaggtctcttcg

SEQ ID NO: 1794870 - DNA, 25 bp, Homo sapien
gaatcaaggaggtctcttcgcttgg

SEQ ID NO: 1794871 - DNA, 25 bp, Homo sapien
tgcaatcttagtggcatgtccaagg

SEQ ID NO: 1794872 - DNA, 25 bp, Homo sapien
cctaatatgggagtattctgcaatc

SEQ ID NO: 1794873 - DNA, 25 bp, Homo sapien
tctttgaggaagcattcaatttgcc

SEQ ID NO: 1794874 - DNA, 25 bp, Homo sapien
gatgataacggtaaactctctgagc

SEQ ID NO: 1794875 - DNA, 25 bp, Homo sapien
tctgagcaataagatgaaattcatc

SEQ ID NO: 1794876 - DNA, 25 bp, Homo sapien
ttcatcaaatgacttctgcttttct

SEQ ID NO: 1794877 - DNA, 25 bp, Homo sapien
tcacaccacgacaaaaagcagagcc

SEQ ID NO: 1794878 - DNA, 25 bp, Homo sapien
acaccacgacaaaaagcagagcctc

SEQ ID NO: 1794879 - DNA, 25 bp, Homo sapien
atccatcacaccacgacaaaaagca

SEQ ID NO: 1794880 - DNA, 25 bp, Homo sapien
catcacaccacgacaaaaagcagag

SEQ ID NO: 1794881 - DNA, 25 bp, Homo sapien
gatcagacaagatcagccacattca

SEQ ID NO: 1794882 - DNA, 25 bp, Homo sapien
tcagacaagatcagccacattcatg

SEQ ID NO: 1794883 - DNA, 25 bp, Homo sapien
gagatcagacaagatcagccacatt

SEQ ID NO: 1794884 - DNA, 25 bp, Homo sapien
cacattcatggtggtatggccgtac

SEQ ID NO: 1794885 - DNA, 25 bp, Homo sapien
cttctgtgagtttctttgcatccat

SEQ ID NO: 1794886 - DNA, 25 bp, Homo sapien
gaacgctgcttggtctaccatcctc

SEQ ID NO: 1794887 - DNA, 25 bp, Homo sapien
tggtgaacgctgcttggtctaccat

SEQ ID NO: 1794888 - DNA, 25 bp, Homo sapien
accaaatgcagaagtggtgaacgct

SEQ ID NO: 1794889 - DNA, 25 bp, Homo sapien
gtgaacgctgcttggtctaccatcc

SEQ ID NO: 1794890 - DNA, 25 bp, Homo sapien
tcgtgggtgcaggtcacagcttgca

SEQ ID NO: 1794891 - DNA, 25 bp, Homo sapien
ggtcagcacgaagtcagacccatcg

SEQ ID NO: 1794892 - DNA, 25 bp, Homo sapien
gctccactagcagaacagaactgtt

SEQ ID NO: 1794893 - DNA, 25 bp, Homo sapien
acagcttgcaagcaagcaagctcca

SEQ ID NO: 1794894 - DNA, 25 bp, Homo sapien
cactccacgggcctaggcttctcac

SEQ ID NO: 1794895 - DNA, 25 bp, Homo sapien
ctaggcttctcacgtgtgctccaca

SEQ ID NO: 1794896 - DNA, 25 bp, Homo sapien
ggcttctcacgtgtgctccacatct

SEQ ID NO: 1794897 - DNA, 25 bp, Homo sapien
actccacgggcctaggcttctcacg

SEQ ID NO: 1794898 - DNA, 25 bp, Homo sapien
acaggtcctggtacaccagggccat

SEQ ID NO: 1794899 - DNA, 25 bp, Homo sapien
aacaggtcctggtacaccagggcca

SEQ ID NO: 1794900 - DNA, 25 bp, Homo sapien
tggatgcagaccaccagtcttcgaa

SEQ ID NO: 1794901 - DNA, 25 bp, Homo sapien
tggcaactatttgttgacgtacaaa

SEQ ID NO: 1794902 - DNA, 25 bp, Homo sapien
caccagtcttcgaattagagctcct

SEQ ID NO: 1794903 - DNA, 25 bp, Homo sapien
tactgttcagtctttgggagcaacc

SEQ ID NO: 1794904 - DNA, 25 bp, Homo sapien
aaccagggcacatcacttttctcag

SEQ ID NO: 1794905 - DNA, 25 bp, Homo sapien
tcttaatttttaggacagctttgaa

SEQ ID NO: 1794906 - DNA, 25 bp, Homo sapien
gacagctttgaaattgagcaaccag

SEQ ID NO: 1794907 - DNA, 25 bp, Homo sapien
aattgagcaaccagggcacatcact

SEQ ID NO: 1794908 - DNA, 25 bp, Homo sapien
atcatgaatattatgcacaaatgct

SEQ ID NO: 1794909 - DNA, 25 bp, Homo sapien
aatattatgcacaaatgcttttact

SEQ ID NO: 1794910 - DNA, 25 bp, Homo sapien
tcatgaatattatgcacaaatgctt

SEQ ID NO: 1794911 - DNA, 25 bp, Homo sapien
cttataatcatgaatattatgcaca

SEQ ID NO: 1794912 - DNA, 25 bp, Homo sapien
ctgttctttcagagtgaagtttgtt

SEQ ID NO: 1794913 - DNA, 25 bp, Homo sapien
agtttctgttctttcagagtgaagt

SEQ ID NO: 1794914 - DNA, 25 bp, Homo sapien
ttctgttctttcagagtgaagtttg

SEQ ID NO: 1794915 - DNA, 25 bp, Homo sapien
tcaagctttgtcacaggccttttca

SEQ ID NO: 1794916 - DNA, 25 bp, Homo sapien
gtgatggtaaaagcacaggtgtagc

SEQ ID NO: 1794917 - DNA, 25 bp, Homo sapien
caaacacagttagggcgtctaccac

SEQ ID NO: 1794918 - DNA, 25 bp, Homo sapien
ttagggcgtctaccaccatgtggat

SEQ ID NO: 1794919 - DNA, 25 bp, Homo sapien
acttcacaactgagtattggatgat

SEQ ID NO: 1794920 - DNA, 25 bp, Homo sapien
tggatttcataatacggtacttcac

SEQ ID NO: 1794921 - DNA, 25 bp, Homo sapien
tatttaatggttttaccaatatctc

SEQ ID NO: 1794922 - DNA, 25 bp, Homo sapien
tgtgttaattctgttgtcactatga

SEQ ID NO: 1794923 - DNA, 25 bp, Homo sapien
tagaaaaccggagaactgattagga

SEQ ID NO: 1794924 - DNA, 25 bp, Homo sapien
aataatatagaaaaccggagaactg

SEQ ID NO: 1794925 - DNA, 25 bp, Homo sapien
tatagaaaaccggagaactgattag

SEQ ID NO: 1794926 - DNA, 25 bp, Homo sapien
gcaggcaggtaagatattccatata

SEQ ID NO: 1794927 - DNA, 25 bp, Homo sapien
cactgatggccaattgttttgacag

SEQ ID NO: 1794928 - DNA, 25 bp, Homo sapien
tatagcttctacttcatgggcatct

SEQ ID NO: 1794929 - DNA, 25 bp, Homo sapien
tatataggatatgttgagatgggag

SEQ ID NO: 1794930 - DNA, 25 bp, Homo sapien
ggtataaagctgtggttgggtccac

SEQ ID NO: 1794931 - DNA, 25 bp, Homo sapien
tgatcaaggtcattcggtttaagcg

SEQ ID NO: 1794932 - DNA, 25 bp, Homo sapien
tagggattatgtaagaatcgaagcc

SEQ ID NO: 1794933 - DNA, 25 bp, Homo sapien
tgggagaattactcgattgtcaact

SEQ ID NO: 1794934 - DNA, 25 bp, Homo sapien
gggagtttagaatcctcaatcttta

SEQ ID NO: 1794935 - DNA, 25 bp, Homo sapien
agtttagaatcctcaatctttaact

SEQ ID NO: 1794936 - DNA, 25 bp, Homo sapien
ttactgcaggggagtttagaatcct

SEQ ID NO: 1794937 - DNA, 25 bp, Homo sapien
tgcaggggagtttagaatcctcaat

SEQ ID NO: 1794938 - DNA, 25 bp, Homo sapien
cataggctagaataagggctacagc

SEQ ID NO: 1794939 - DNA, 25 bp, Homo sapien
taacataagggatcaggttcgtctc

SEQ ID NO: 1794940 - DNA, 25 bp, Homo sapien
taagtgcattagtaggtggacggct

SEQ ID NO: 1794941 - DNA, 25 bp, Homo sapien
tgttggccgttaatcatacagctag

SEQ ID NO: 1794942 - DNA, 25 bp, Homo sapien
taaaccccgccagagatagtgaaag

SEQ ID NO: 1794943 - DNA, 25 bp, Homo sapien
taaatgcctgttggaggccagcatc

SEQ ID NO: 1794944 - DNA, 25 bp, Homo sapien
tgtctacaaagtgccagtaccaggc

SEQ ID NO: 1794945 - DNA, 25 bp, Homo sapien
aaaatgaaatcatgtggctaggccg

SEQ ID NO: 1794946 - DNA, 25 bp, Homo sapien
tgtactattttgtgctaaaagagta

SEQ ID NO: 1794947 - DNA, 25 bp, Homo sapien
accaaagctaattgattggaaatca

SEQ ID NO: 1794948 - DNA, 25 bp, Homo sapien
aaatcaattgtactattttgtgcta

SEQ ID NO: 1794949 - DNA, 25 bp, Homo sapien
caattgtactattttgtgctaaaag

SEQ ID NO: 1794950 - DNA, 25 bp, Homo sapien
tatagatgttaagttgtaggagtca

SEQ ID NO: 1794951 - DNA, 25 bp, Homo sapien
ggtagagcctattgggtgaaaccca

SEQ ID NO: 1794952 - DNA, 25 bp, Homo sapien
gtggctactaggaaaaatttcatgg

SEQ ID NO: 1794953 - DNA, 25 bp, Homo sapien
ctagtaagagtgtcagtaaggtgtc

SEQ ID NO: 1794954 - DNA, 25 bp, Homo sapien
ataatctatcataatttaatgagtc

SEQ ID NO: 1794955 - DNA, 25 bp, Homo sapien
tattttgacttaaactaattatcaa

SEQ ID NO: 1794956 - DNA, 25 bp, Homo sapien
ttataatctatcataatttaatgag

SEQ ID NO: 1794957 - DNA, 25 bp, Homo sapien
aatctatcataatttaatgagtcga

SEQ ID NO: 1794958 - DNA, 25 bp, Homo sapien
gactaaacctacagcggcttcacag

SEQ ID NO: 1794959 - DNA, 25 bp, Homo sapien
ccataggtactggaggacataacca

SEQ ID NO: 1794960 - DNA, 25 bp, Homo sapien
aatagggacgatatcaggtgggatc

SEQ ID NO: 1794961 - DNA, 25 bp, Homo sapien
tgccttctaggcataatagggacga

SEQ ID NO: 1794962 - DNA, 25 bp, Homo sapien
tgagaatagctaccataacgagtgc

SEQ ID NO: 1794963 - DNA, 25 bp, Homo sapien
cttctacgtgggcttcagggagtca

SEQ ID NO: 1794964 - DNA, 25 bp, Homo sapien
tgctacgagcaaaggtaaggatcct

SEQ ID NO: 1794965 - DNA, 25 bp, Homo sapien
gagtgagccatatcattccgtagcc

SEQ ID NO: 1794966 - DNA, 25 bp, Homo sapien
acagggaacatgctaatcttgtctg

SEQ ID NO: 1794967 - DNA, 25 bp, Homo sapien
cacagggaacatgctaatcttgtct

SEQ ID NO: 1794968 - DNA, 25 bp, Homo sapien
acaaatttacatgtcatgcttgcac

SEQ ID NO: 1794969 - DNA, 25 bp, Homo sapien
tacatgtcatgcttgcacagggaac

SEQ ID NO: 1794970 - DNA, 25 bp, Homo sapien
gttcatggtggtctgtgctattcct

SEQ ID NO: 1794971 - DNA, 25 bp, Homo sapien
tagttcatggtggtctgtgctattc

SEQ ID NO: 1794972 - DNA, 25 bp, Homo sapien
ttagttcatggtggtctgtgctatt

SEQ ID NO: 1794973 - DNA, 25 bp, Homo sapien
agttcatggtggtctgtgctattcc

SEQ ID NO: 1794974 - DNA, 25 bp, Homo sapien
cattgccaaatgcatcataatgagt

SEQ ID NO: 1794975 - DNA, 25 bp, Homo sapien
gtcttggtcatggtttccaatggca

SEQ ID NO: 1794976 - DNA, 25 bp, Homo sapien
caaggtcttggtcatggtttccaat

SEQ ID NO: 1794977 - DNA, 25 bp, Homo sapien
ttacaaggtcttggtcatggtttcc

SEQ ID NO: 1794978 - DNA, 25 bp, Homo sapien
ccttttacagttgaagggactggat

SEQ ID NO: 1794979 - DNA, 25 bp, Homo sapien
gaagggactggatgttcagcatgtt

SEQ ID NO: 1794980 - DNA, 25 bp, Homo sapien
gtaatggcttccatctgtcaccttc

SEQ ID NO: 1794981 - DNA, 25 bp, Homo sapien
aatggcttccatctgtcaccttcag

SEQ ID NO: 1794982 - DNA, 25 bp, Homo sapien
gccattaacagtaggcttcagtgta

SEQ ID NO: 1794983 - DNA, 25 bp, Homo sapien
ttagacaagattcaggcaaaattta

SEQ ID NO: 1794984 - DNA, 25 bp, Homo sapien
cagagcagtagttaatgctgccatt

SEQ ID NO: 1794985 - DNA, 25 bp, Homo sapien
gtaggcttcagtgtaattaatggta

SEQ ID NO: 1794986 - DNA, 25 bp, Homo sapien
gaagtagatgctattctttctccct

SEQ ID NO: 1794987 - DNA, 25 bp, Homo sapien
gacatcaagttttcaaccacattaa

SEQ ID NO: 1794988 - DNA, 25 bp, Homo sapien
tattctttctccctaaatagcgagt

SEQ ID NO: 1794989 - DNA, 25 bp, Homo sapien
taatcaagtaaagtcgttgacatca

SEQ ID NO: 1794990 - DNA, 25 bp, Homo sapien
tattggacttggtatccctacaaag

SEQ ID NO: 1794991 - DNA, 25 bp, Homo sapien
taaagctaatccctgtcctttgggc

SEQ ID NO: 1794992 - DNA, 25 bp, Homo sapien
aggaagaaaactgccacctctattg

SEQ ID NO: 1794993 - DNA, 25 bp, Homo sapien
cctttgggcctccttgatgatcagt

SEQ ID NO: 1794994 - DNA, 25 bp, Homo sapien
ctatgatgacagctttgaggatagg

SEQ ID NO: 1794995 - DNA, 25 bp, Homo sapien
tatgatgacagctttgaggataggg

SEQ ID NO: 1794996 - DNA, 25 bp, Homo sapien
gcatttatagcggtcatcactgttt

SEQ ID NO: 1794997 - DNA, 25 bp, Homo sapien
ttctgacagttgatagtgtacatct

SEQ ID NO: 1794998 - DNA, 25 bp, Homo sapien
atcactgtttctgcacaggcttttc

SEQ ID NO: 1794999 - DNA, 25 bp, Homo sapien
cagttgatagtgtacatctaatcca

SEQ ID NO: 1795000 - DNA, 25 bp, Homo sapien
tgaggcccacactccatagttatct

SEQ ID NO: 1795001 - DNA, 25 bp, Homo sapien
agctaaggtcttagtccaagttgag

SEQ ID NO: 1795002 - DNA, 25 bp, Homo sapien
atagagctaaggtcttagtccaagt

SEQ ID NO: 1795003 - DNA, 25 bp, Homo sapien
actccatagttatctccagtgacac

SEQ ID NO: 1795004 - DNA, 25 bp, Homo sapien
actcagattcttttcatctgcaatt

SEQ ID NO: 1795005 - DNA, 25 bp, Homo sapien
ttcatctgcaatttcccctaattct

SEQ ID NO: 1795006 - DNA, 25 bp, Homo sapien
cttttcatctgcaatttcccctaat

SEQ ID NO: 1795007 - DNA, 25 bp, Homo sapien
ttcttttcatctgcaatttccccta

SEQ ID NO: 1795008 - DNA, 25 bp, Homo sapien
tacaccacgttggattcaggcttcc

SEQ ID NO: 1795009 - DNA, 25 bp, Homo sapien
tcagagggacctcatggtttacaag

SEQ ID NO: 1795010 - DNA, 25 bp, Homo sapien
tctctgggctatgtgcaaattctgg

SEQ ID NO: 1795011 - DNA, 25 bp, Homo sapien
gaacaaaaggcttcgcagaaccaaa

SEQ ID NO: 1795012 - DNA, 25 bp, Homo sapien
ggggtcccacacagatgggacgcgg

SEQ ID NO: 1795013 - DNA, 25 bp, Homo sapien
tcccacacagatgggacgcggctta

SEQ ID NO: 1795014 - DNA, 25 bp, Homo sapien
ggtcccacacagatgggacgcggct

SEQ ID NO: 1795015 - DNA, 25 bp, Homo sapien
cccacacagatgggacgcggcttag

SEQ ID NO: 1795016 - DNA, 25 bp, Homo sapien
tcctttgagctcagaggagtatttt

SEQ ID NO: 1795017 - DNA, 25 bp, Homo sapien
gcatacaatattgtgacagatcaca

SEQ ID NO: 1795018 - DNA, 25 bp, Homo sapien
tgcaaacttagtgcaggcatacaat

SEQ ID NO: 1795019 - DNA, 25 bp, Homo sapien
tatcttccagtgagttttcaggatg

SEQ ID NO: 1795020 - DNA, 25 bp, Homo sapien
cgtttgctcctagctcaccatgaat

SEQ ID NO: 1795021 - DNA, 25 bp, Homo sapien
cagcttataattccctgtacttgcc

SEQ ID NO: 1795022 - DNA, 25 bp, Homo sapien
tcctcaacagcttataattccctgt

SEQ ID NO: 1795023 - DNA, 25 bp, Homo sapien
ccatgaatcctcaacagcttataat

SEQ ID NO: 1795024 - DNA, 25 bp, Homo sapien
ttgggaacaacagcgatcctttatt

SEQ ID NO: 1795025 - DNA, 25 bp, Homo sapien
ctgttgggaacaacagcgatccttt

SEQ ID NO: 1795026 - DNA, 25 bp, Homo sapien
ggaacaacagcgatcctttattttc

SEQ ID NO: 1795027 - DNA, 25 bp, Homo sapien
acaacagcgatcctttattttctga

SEQ ID NO: 1795028 - DNA, 25 bp, Homo sapien
aaagcgatccaaggagtaggtctct

SEQ ID NO: 1795029 - DNA, 25 bp, Homo sapien
gatccaaggagtaggtctcttcact

SEQ ID NO: 1795030 - DNA, 25 bp, Homo sapien
tgggcactcttctgtgcaaacacat

SEQ ID NO: 1795031 - DNA, 25 bp, Homo sapien
gtggattttgcgcaaagcgatccaa

SEQ ID NO: 1795032 - DNA, 25 bp, Homo sapien
cgctgcaggaggggagcgtgggcca

SEQ ID NO: 1795033 - DNA, 25 bp, Homo sapien
gctgcaggaggggagcgtgggccat

SEQ ID NO: 1795034 - DNA, 25 bp, Homo sapien
ttagtagttcacagaggctcatcac

SEQ ID NO: 1795035 - DNA, 25 bp, Homo sapien
cttagtagttcacagaggctcatca

SEQ ID NO: 1795036 - DNA, 25 bp, Homo sapien
tcctctgcgtatagccccctcccac

SEQ ID NO: 1795037 - DNA, 25 bp, Homo sapien
tctcctctgcgtatagccccctccc

SEQ ID NO: 1795038 - DNA, 25 bp, Homo sapien
ctcctctgcgtatagccccctccca

SEQ ID NO: 1795039 - DNA, 25 bp, Homo sapien
aggagcgtcaggcggaggggaccga

SEQ ID NO: 1795040 - DNA, 25 bp, Homo sapien
ggggaccgagctgagcatctgacat

SEQ ID NO: 1795041 - DNA, 25 bp, Homo sapien
cggaggggaccgagctgagcatctg

SEQ ID NO: 1795042 - DNA, 25 bp, Homo sapien
gaggggaccgagctgagcatctgac

SEQ ID NO: 1795043 - DNA, 25 bp, Homo sapien
gcctcagccgcttcctttcgccgct

SEQ ID NO: 1795044 - DNA, 25 bp, Homo sapien
gggcgggcaccgctgtgcgaggtag

SEQ ID NO: 1795045 - DNA, 25 bp, Homo sapien
gctgtgcgaggtagccaggagcacc

SEQ ID NO: 1795046 - DNA, 25 bp, Homo sapien
acttttcgggttccaagcgcctcag

SEQ ID NO: 1795047 - DNA, 25 bp, Homo sapien
ccatctaagtgggacaagttgaccc

SEQ ID NO: 1795048 - DNA, 25 bp, Homo sapien
gccatgatcgtgatggccgtgatca

SEQ ID NO: 1795049 - DNA, 25 bp, Homo sapien
catgggtcggacaggttgccatcta

SEQ ID NO: 1795050 - DNA, 25 bp, Homo sapien
ggagcaacttgagtacgccaaggca

SEQ ID NO: 1795051 - DNA, 25 bp, Homo sapien
actctgccaaatataccgggaacat

SEQ ID NO: 1795052 - DNA, 25 bp, Homo sapien
tccacactctgccaaatataccggg

SEQ ID NO: 1795053 - DNA, 25 bp, Homo sapien
gcttccacactctgccaaatatacc

SEQ ID NO: 1795054 - DNA, 25 bp, Homo sapien
cacactctgccaaatataccgggaa

SEQ ID NO: 1795055 - DNA, 25 bp, Homo sapien
tattggctctctctgtattgcaaag

SEQ ID NO: 1795056 - DNA, 25 bp, Homo sapien
ctattggctctctctgtattgcaaa

SEQ ID NO: 1795057 - DNA, 25 bp, Homo sapien
ttggctctctctgtattgcaaagca

SEQ ID NO: 1795058 - DNA, 25 bp, Homo sapien
attggctctctctgtattgcaaagc

SEQ ID NO: 1795059 - DNA, 25 bp, Homo sapien
cagctatgactacacactgtgcctt

SEQ ID NO: 1795060 - DNA, 25 bp, Homo sapien
agctatgactacacactgtgccttt

SEQ ID NO: 1795061 - DNA, 25 bp, Homo sapien
gaaagctagtgttggataccatctc

SEQ ID NO: 1795062 - DNA, 25 bp, Homo sapien
aagctagtgttggataccatctcac

SEQ ID NO: 1795063 - DNA, 25 bp, Homo sapien
cagacctgggggtatgaaagctagt

SEQ ID NO: 1795064 - DNA, 25 bp, Homo sapien
acctgggggtatgaaagctagtgtt

SEQ ID NO: 1795065 - DNA, 25 bp, Homo sapien
ccacgttgattctcatttttatccc

SEQ ID NO: 1795066 - DNA, 25 bp, Homo sapien
cattcccacgttgattctcattttt

SEQ ID NO: 1795067 - DNA, 25 bp, Homo sapien
acgttgattctcatttttatccctc

SEQ ID NO: 1795068 - DNA, 25 bp, Homo sapien
tcccacgttgattctcatttttatc

SEQ ID NO: 1795069 - DNA, 25 bp, Homo sapien
ttccctccaataagaataaaccata

SEQ ID NO: 1795070 - DNA, 25 bp, Homo sapien
cacattcttaggagatttccctcca

SEQ ID NO: 1795071 - DNA, 25 bp, Homo sapien
tcatctcacattcttaggagatttc

SEQ ID NO: 1795072 - DNA, 25 bp, Homo sapien
taccttcccagctcttgttatctta

SEQ ID NO: 1795073 - DNA, 25 bp, Homo sapien
ggggaagttgctttctcagaaccat

SEQ ID NO: 1795074 - DNA, 25 bp, Homo sapien
gagcaaggggaagttgctttctcag

SEQ ID NO: 1795075 - DNA, 25 bp, Homo sapien
cagacagagcaaggggaagttgctt

SEQ ID NO: 1795076 - DNA, 25 bp, Homo sapien
ctttcagacagagcaaggggaagtt

SEQ ID NO: 1795077 - DNA, 25 bp, Homo sapien
tccacatcctctcgctcttttgtcc

SEQ ID NO: 1795078 - DNA, 25 bp, Homo sapien
tcccccgatgacaaaccatgagtat

SEQ ID NO: 1795079 - DNA, 25 bp, Homo sapien
catcctctcgctcttttgtcctctc

SEQ ID NO: 1795080 - DNA, 25 bp, Homo sapien
ggtcccccgatgacaaaccatgagt

SEQ ID NO: 1795081 - DNA, 25 bp, Homo sapien
ttaattatttgaattgtggtgatcg

SEQ ID NO: 1795082 - DNA, 25 bp, Homo sapien
tgaattgtggtgatcgtgtctcagt

SEQ ID NO: 1795083 - DNA, 25 bp, Homo sapien
ttatttgaattgtggtgatcgtgtc

SEQ ID NO: 1795084 - DNA, 25 bp, Homo sapien
gtggtgatcgtgtctcagttcagaa

SEQ ID NO: 1795085 - DNA, 25 bp, Homo sapien
ccatgcctactgctttgtactgtgc

SEQ ID NO: 1795086 - DNA, 25 bp, Homo sapien
tccatgcctactgctttgtactgtg

SEQ ID NO: 1795087 - DNA, 25 bp, Homo sapien
tgactcatcatacttccaacctttc

SEQ ID NO: 1795088 - DNA, 25 bp, Homo sapien
aggcttattttagcactaagtattt

SEQ ID NO: 1795089 - DNA, 25 bp, Homo sapien
cactaagtatttccaatgtatgttt

SEQ ID NO: 1795090 - DNA, 25 bp, Homo sapien
tttctgactcatcatacttccaacc

SEQ ID NO: 1795091 - DNA, 25 bp, Homo sapien
ctgatctggtctgcaatacttgcag

SEQ ID NO: 1795092 - DNA, 25 bp, Homo sapien
tacttgcagaagctgcattactgcc

SEQ ID NO: 1795093 - DNA, 25 bp, Homo sapien
gtctgcaatacttgcagaagctgca

SEQ ID NO: 1795094 - DNA, 25 bp, Homo sapien
cattactgccagaaaagctccacat

SEQ ID NO: 1795095 - DNA, 25 bp, Homo sapien
agaagagtgagaatcagtaaaagac

SEQ ID NO: 1795096 - DNA, 25 bp, Homo sapien
ggaagaagagtgagaatcagtaaaa

SEQ ID NO: 1795097 - DNA, 25 bp, Homo sapien
gaagaagagtgagaatcagtaaaag

SEQ ID NO: 1795098 - DNA, 25 bp, Homo sapien
gaagagtgagaatcagtaaaagaca

SEQ ID NO: 1795099 - DNA, 25 bp, Homo sapien
tcgatcaacactcatggtgcagagg

SEQ ID NO: 1795100 - DNA, 25 bp, Homo sapien
cagggtactggtggctaaggcatct

SEQ ID NO: 1795101 - DNA, 25 bp, Homo sapien
cactatcttgcaaaggatggttcca

SEQ ID NO: 1795102 - DNA, 25 bp, Homo sapien
tacggaaatctaaggccttgacagg

SEQ ID NO: 1795103 - DNA, 25 bp, Homo sapien
cacacggtaatgatgagcactggca

SEQ ID NO: 1795104 - DNA, 25 bp, Homo sapien
taacctagagcaatgcagaagtgcc

SEQ ID NO: 1795105 - DNA, 25 bp, Homo sapien
agtccagcagacgatgaacacagcc

SEQ ID NO: 1795106 - DNA, 25 bp, Homo sapien
gatcatcagtccatagcacacggta

SEQ ID NO: 1795107 - DNA, 25 bp, Homo sapien
taaactcctagtttagcacaaagcc

SEQ ID NO: 1795108 - DNA, 25 bp, Homo sapien
gaaaatgaaaaggattctagatcag

SEQ ID NO: 1795109 - DNA, 25 bp, Homo sapien
ttttgcatagaagtaaaggccataa

SEQ ID NO: 1795110 - DNA, 25 bp, Homo sapien
tctaacactagaaccacaatttgct

SEQ ID NO: 1795111 - DNA, 25 bp, Homo sapien
ataagaggggtattgcagcaacatc

SEQ ID NO: 1795112 - DNA, 25 bp, Homo sapien
gaaccagagcaagactggcttttga

SEQ ID NO: 1795113 - DNA, 25 bp, Homo sapien
aatcacagaaccagagcaagactgg

SEQ ID NO: 1795114 - DNA, 25 bp, Homo sapien
ccagagcaagactggcttttgagaa

SEQ ID NO: 1795115 - DNA, 25 bp, Homo sapien
gaccacagtgggcaaggcactcacc

SEQ ID NO: 1795116 - DNA, 25 bp, Homo sapien
tttctgtgaatatcttgcatccatg

SEQ ID NO: 1795117 - DNA, 25 bp, Homo sapien
gaatatcttgcatccatgaccacag

SEQ ID NO: 1795118 - DNA, 25 bp, Homo sapien
catgaccacagtgggcaaggcactc

SEQ ID NO: 1795119 - DNA, 25 bp, Homo sapien
attttatccttagctgaggactagg

SEQ ID NO: 1795120 - DNA, 25 bp, Homo sapien
aaaggagaaagagtcagtactttat

SEQ ID NO: 1795121 - DNA, 25 bp, Homo sapien
gagtcagtactttataatggccatt

SEQ ID NO: 1795122 - DNA, 25 bp, Homo sapien
tttatccttagctgaggactaggca

SEQ ID NO: 1795123 - DNA, 25 bp, Homo sapien
aagacagggaaggtataggtaggca

SEQ ID NO: 1795124 - DNA, 25 bp, Homo sapien
ggagcagtatttccacgaaggcagg

SEQ ID NO: 1795125 - DNA, 25 bp, Homo sapien
gatagctgggaggtcatatctgaca

SEQ ID NO: 1795126 - DNA, 25 bp, Homo sapien
caagaggtccttgcagtggtccagg

SEQ ID NO: 1795127 - DNA, 25 bp, Homo sapien
caggagaaatgctccaccagacggg

SEQ ID NO: 1795128 - DNA, 25 bp, Homo sapien
caatagccatactgatgtgaaaatg

SEQ ID NO: 1795129 - DNA, 25 bp, Homo sapien
ctatctggctgtacaatagccatac

SEQ ID NO: 1795130 - DNA, 25 bp, Homo sapien
aaatgccgaatttggaagggagtca

SEQ ID NO: 1795131 - DNA, 25 bp, Homo sapien
gaagggagtcaagggcagtgtcggg

SEQ ID NO: 1795132 - DNA, 25 bp, Homo sapien
cgatgaagataaggcctaattggat

SEQ ID NO: 1795133 - DNA, 25 bp, Homo sapien
ttagttacttggaacagaactcctc

SEQ ID NO: 1795134 - DNA, 25 bp, Homo sapien
tgaagataaggcctaattggatgta

SEQ ID NO: 1795135 - DNA, 25 bp, Homo sapien
gataaggcctaattggatgtatttt

SEQ ID NO: 1795136 - DNA, 25 bp, Homo sapien
ggaaggtttgatattggatctctga

SEQ ID NO: 1795137 - DNA, 25 bp, Homo sapien
gaaggtttgatattggatctctgat

SEQ ID NO: 1795138 - DNA, 25 bp, Homo sapien
tgggaaggtttgatattggatctct

SEQ ID NO: 1795139 - DNA, 25 bp, Homo sapien
gggaaggtttgatattggatctctg

SEQ ID NO: 1795140 - DNA, 25 bp, Homo sapien
ctgtatggaaattgcctcagtggac

SEQ ID NO: 1795141 - DNA, 25 bp, Homo sapien
tggaaattgcctcagtggacagttg

SEQ ID NO: 1795142 - DNA, 25 bp, Homo sapien
tgtatggaaattgcctcagtggaca

SEQ ID NO: 1795143 - DNA, 25 bp, Homo sapien
tatggaaattgcctcagtggacagt

SEQ ID NO: 1795144 - DNA, 25 bp, Homo sapien
cttgataactgccaaatcgccactc

SEQ ID NO: 1795145 - DNA, 25 bp, Homo sapien
tgataactgccaaatcgccactcca

SEQ ID NO: 1795146 - DNA, 25 bp, Homo sapien
ttgataactgccaaatcgccactcc

SEQ ID NO: 1795147 - DNA, 25 bp, Homo sapien
agaaagaacctaggtagggattgct

SEQ ID NO: 1795148 - DNA, 25 bp, Homo sapien
ttgtagatatctagtattcttggga

SEQ ID NO: 1795149 - DNA, 25 bp, Homo sapien
tataaatattggataatgtgacaaa

SEQ ID NO: 1795150 - DNA, 25 bp, Homo sapien
cctaggtagggattgctagattttg

SEQ ID NO: 1795151 - DNA, 25 bp, Homo sapien
ttacacttcaagggacttaggtata

SEQ ID NO: 1795152 - DNA, 25 bp, Homo sapien
cacttcaagggacttaggtatagaa

SEQ ID NO: 1795153 - DNA, 25 bp, Homo sapien
tacacttcaagggacttaggtatag

SEQ ID NO: 1795154 - DNA, 25 bp, Homo sapien
acacttcaagggacttaggtataga

SEQ ID NO: 1795155 - DNA, 25 bp, Homo sapien
ctctgaacacaatctaatttgctta

SEQ ID NO: 1795156 - DNA, 25 bp, Homo sapien
tctgaacacaatctaatttgcttat

SEQ ID NO: 1795157 - DNA, 25 bp, Homo sapien
tatttcgttcctgaagtgtattgtc

SEQ ID NO: 1795158 - DNA, 25 bp, Homo sapien
tttgcttatttcgttcctgaagtgt

SEQ ID NO: 1795159 - DNA, 25 bp, Homo sapien
ttctacaagaagctggtagagcgtg

SEQ ID NO: 1795160 - DNA, 25 bp, Homo sapien
cagtgtccttttcatgtaggcaaaa

SEQ ID NO: 1795161 - DNA, 25 bp, Homo sapien
taacatctgaattatctcagtgtcc

SEQ ID NO: 1795162 - DNA, 25 bp, Homo sapien
gggtcattccctctgattccctaat

SEQ ID NO: 1795163 - DNA, 25 bp, Homo sapien
ctaacacttgtctatagagcttctc

SEQ ID NO: 1795164 - DNA, 25 bp, Homo sapien
tttcctaacacttgtctatagagct

SEQ ID NO: 1795165 - DNA, 25 bp, Homo sapien
tcctaacacttgtctatagagcttc

SEQ ID NO: 1795166 - DNA, 25 bp, Homo sapien
acatttcctaacacttgtctataga

SEQ ID NO: 1795167 - DNA, 25 bp, Homo sapien
tagcccttggtatgctcacagttga

SEQ ID NO: 1795168 - DNA, 25 bp, Homo sapien
tagattcatgcctaactgggactga

SEQ ID NO: 1795169 - DNA, 25 bp, Homo sapien
taagcaacccttaagccatgggatg

SEQ ID NO: 1795170 - DNA, 25 bp, Homo sapien
gaagggatcccttaagcaaccataa

SEQ ID NO: 1795171 - DNA, 25 bp, Homo sapien
gctggccctggagtctgaatggtgt

SEQ ID NO: 1795172 - DNA, 25 bp, Homo sapien
gccctggagtctgaatggtgtaatc

SEQ ID NO: 1795173 - DNA, 25 bp, Homo sapien
ctaacagaagctggccctggagtct

SEQ ID NO: 1795174 - DNA, 25 bp, Homo sapien
tggccctggagtctgaatggtgtaa

SEQ ID NO: 1795175 - DNA, 25 bp, Homo sapien
caagagttgagtcaatagatggagg

SEQ ID NO: 1795176 - DNA, 25 bp, Homo sapien
tgaacaagagttgagtcaatagatg

SEQ ID NO: 1795177 - DNA, 25 bp, Homo sapien
tggaggttgaaaggtgagggataaa

SEQ ID NO: 1795178 - DNA, 25 bp, Homo sapien
caatagatggaggttgaaaggtgag

SEQ ID NO: 1795179 - DNA, 25 bp, Homo sapien
ttagggcaacggagcagtttctgct

SEQ ID NO: 1795180 - DNA, 25 bp, Homo sapien
agggcaacggagcagtttctgcttc

SEQ ID NO: 1795181 - DNA, 25 bp, Homo sapien
cagtttctgcttccagattttctag

SEQ ID NO: 1795182 - DNA, 25 bp, Homo sapien
ggcaacggagcagtttctgcttcca

SEQ ID NO: 1795183 - DNA, 25 bp, Homo sapien
gaaggtcggaatggcatgagaccct

SEQ ID NO: 1795184 - DNA, 25 bp, Homo sapien
taaaagcaggcactttcctagagaa

SEQ ID NO: 1795185 - DNA, 25 bp, Homo sapien
tcctagagaattagagcctcctaca

SEQ ID NO: 1795186 - DNA, 25 bp, Homo sapien
cacatacatggtggcttctaagctt

SEQ ID NO: 1795187 - DNA, 25 bp, Homo sapien
tcttgcacaaactggactcctcggt

SEQ ID NO: 1795188 - DNA, 25 bp, Homo sapien
aaagactcggaccttccattcaagg

SEQ ID NO: 1795189 - DNA, 25 bp, Homo sapien
gggagcctgcagtatggagaaacca

SEQ ID NO: 1795190 - DNA, 25 bp, Homo sapien
tcaaggtgctttgatcagaggtagc

SEQ ID NO: 1795191 - DNA, 25 bp, Homo sapien
ccaagccttttatatagccttttca

SEQ ID NO: 1795192 - DNA, 25 bp, Homo sapien
cttttatatagccttttcaagttgg

SEQ ID NO: 1795193 - DNA, 25 bp, Homo sapien
aagccttttatatagccttttcaag

SEQ ID NO: 1795194 - DNA, 25 bp, Homo sapien
tatatagccttttcaagttggccag

SEQ ID NO: 1795195 - DNA, 25 bp, Homo sapien
gatgctgcgccagtgcaggaagagg

SEQ ID NO: 1795196 - DNA, 25 bp, Homo sapien
tgtggggatgctgcgccagtgcagg

SEQ ID NO: 1795197 - DNA, 25 bp, Homo sapien
cactgtctgtggggatgctgcgcca

SEQ ID NO: 1795198 - DNA, 25 bp, Homo sapien
gccagttttcaccactctccccatg

SEQ ID NO: 1795199 - DNA, 25 bp, Homo sapien
caggggccttaagtgtctttcactc

SEQ ID NO: 1795200 - DNA, 25 bp, Homo sapien
gaaaatatattaaccgaccactgac

SEQ ID NO: 1795201 - DNA, 25 bp, Homo sapien
aaaatatattaaccgaccactgact

SEQ ID NO: 1795202 - DNA, 25 bp, Homo sapien
gccttaagtgtctttcactctgatt

SEQ ID NO: 1795203 - DNA, 25 bp, Homo sapien
gacccaaggaacatagtggacaagg

SEQ ID NO: 1795204 - DNA, 25 bp, Homo sapien
aaagctggtgatgaatggaaagcct

SEQ ID NO: 1795205 - DNA, 25 bp, Homo sapien
gggcagagcttcatgtaacatatct

SEQ ID NO: 1795206 - DNA, 25 bp, Homo sapien
tgttgtgtggagatagaagtgaccc

SEQ ID NO: 1795207 - DNA, 25 bp, Homo sapien
tactgtgctctcatcctgtgtcagc

SEQ ID NO: 1795208 - DNA, 25 bp, Homo sapien
gaaaccaggagttttaatcgccata

SEQ ID NO: 1795209 - DNA, 25 bp, Homo sapien
caaatgccgtaaaatagaaaccagg

SEQ ID NO: 1795210 - DNA, 25 bp, Homo sapien
tgcctcgtggaaagagcaaatgccg

SEQ ID NO: 1795211 - DNA, 25 bp, Homo sapien
agctctgaaagtacagtggcccatc

SEQ ID NO: 1795212 - DNA, 25 bp, Homo sapien
aaatgcagcattcttgttgggccac

SEQ ID NO: 1795213 - DNA, 25 bp, Homo sapien
gatagcctagggaatttcacaggtg

SEQ ID NO: 1795214 - DNA, 25 bp, Homo sapien
tgaaagtacagtggcccatcttggg

SEQ ID NO: 1795215 - DNA, 25 bp, Homo sapien
cacccaccatctctgggcctcgcct

SEQ ID NO: 1795216 - DNA, 25 bp, Homo sapien
cccaccatctctgggcctcgcctct

SEQ ID NO: 1795217 - DNA, 25 bp, Homo sapien
ccatctctgggcctcgcctctatgt

SEQ ID NO: 1795218 - DNA, 25 bp, Homo sapien
caccatctctgggcctcgcctctat

SEQ ID NO: 1795219 - DNA, 25 bp, Homo sapien
agagaacgcacccaattttaattct

SEQ ID NO: 1795220 - DNA, 25 bp, Homo sapien
ttctaccctgattctaccctgatgc

SEQ ID NO: 1795221 - DNA, 25 bp, Homo sapien
ttaattctaccctgattctaccctg

SEQ ID NO: 1795222 - DNA, 25 bp, Homo sapien
gcacccaattttaattctaccctga

SEQ ID NO: 1795223 - DNA, 25 bp, Homo sapien
cacgctgcaggggaagataaccctg

SEQ ID NO: 1795224 - DNA, 25 bp, Homo sapien
aagatgcaaggaaaaggcacgctgc

SEQ ID NO: 1795225 - DNA, 25 bp, Homo sapien
atgcaaggaaaaggcacgctgcagg

SEQ ID NO: 1795226 - DNA, 25 bp, Homo sapien
aaagatgcaaggaaaaggcacgctg

SEQ ID NO: 1795227 - DNA, 25 bp, Homo sapien
tctcacgatgagtcggaggaggata

SEQ ID NO: 1795228 - DNA, 25 bp, Homo sapien
gatatcgtgtaaagatctgggccat

SEQ ID NO: 1795229 - DNA, 25 bp, Homo sapien
ttgcaggttttctcacgatgagtcg

SEQ ID NO: 1795230 - DNA, 25 bp, Homo sapien
cggaggaggatatcgtgtaaagatc

SEQ ID NO: 1795231 - DNA, 25 bp, Homo sapien
cactctgtcacataaatcaggataa

SEQ ID NO: 1795232 - DNA, 25 bp, Homo sapien
tgcctttcactctgtcacataaatc

SEQ ID NO: 1795233 - DNA, 25 bp, Homo sapien
gataatactttacctaccaaatcag

SEQ ID NO: 1795234 - DNA, 25 bp, Homo sapien
taaatcaggataatactttacctac

SEQ ID NO: 1795235 - DNA, 25 bp, Homo sapien
gcattttcagcaggttcccttgcgt

SEQ ID NO: 1795236 - DNA, 25 bp, Homo sapien
tccggggtgccttccttgggatcag

SEQ ID NO: 1795237 - DNA, 25 bp, Homo sapien
ggttcccttgcgtcagaagcccagg

SEQ ID NO: 1795238 - DNA, 25 bp, Homo sapien
tttgtgtacgttgagtgtggctttt

SEQ ID NO: 1795239 - DNA, 25 bp, Homo sapien
gctgctgtgataatgtcttgctgaa

SEQ ID NO: 1795240 - DNA, 25 bp, Homo sapien
cctgtgtttgtggactttgtataaa

SEQ ID NO: 1795241 - DNA, 25 bp, Homo sapien
ctgctgtgataatgtcttgctgaat

SEQ ID NO: 1795242 - DNA, 25 bp, Homo sapien
tgcctgtgtttgtggactttgtata

SEQ ID NO: 1795243 - DNA, 25 bp, Homo sapien
tagctctgacttctggcttaagaat

SEQ ID NO: 1795244 - DNA, 25 bp, Homo sapien
tctgccacgaggataacaagcattt

SEQ ID NO: 1795245 - DNA, 25 bp, Homo sapien
tacttgtcgacgatcaagacttctg

SEQ ID NO: 1795246 - DNA, 25 bp, Homo sapien
gacttctggcttaagaataacgcac

SEQ ID NO: 1795247 - DNA, 25 bp, Homo sapien
tacttggcgtctcattctcccggac

SEQ ID NO: 1795248 - DNA, 25 bp, Homo sapien
tgcatccatacgtctggagccttgg

SEQ ID NO: 1795249 - DNA, 25 bp, Homo sapien
ggctcagctctttgtagcacagcag

SEQ ID NO: 1795250 - DNA, 25 bp, Homo sapien
ggatcggaggatctctactttcaag

SEQ ID NO: 1795251 - DNA, 25 bp, Homo sapien
tctgggtggtcaaaacccaacaaga

SEQ ID NO: 1795252 - DNA, 25 bp, Homo sapien
ttatcctcatgaaatgtatgcacag

SEQ ID NO: 1795253 - DNA, 25 bp, Homo sapien
gcccacagcatatttagactcagaa

SEQ ID NO: 1795254 - DNA, 25 bp, Homo sapien
tggaatctgcttgcccaaaagggct

SEQ ID NO: 1795255 - DNA, 25 bp, Homo sapien
cgatccacgtaagaatgctggtccc

SEQ ID NO: 1795256 - DNA, 25 bp, Homo sapien
gagatgacgatccacgtaagaatgc

SEQ ID NO: 1795257 - DNA, 25 bp, Homo sapien
tgacgatccacgtaagaatgctggt

SEQ ID NO: 1795258 - DNA, 25 bp, Homo sapien
gatgacgatccacgtaagaatgctg

SEQ ID NO: 1795259 - DNA, 25 bp, Homo sapien
tgtgaggatgccaagttggaaaggg

SEQ ID NO: 1795260 - DNA, 25 bp, Homo sapien
ggatgtgaggatgccaagttggaaa

SEQ ID NO: 1795261 - DNA, 25 bp, Homo sapien
gaggatgccaagttggaaagggcag

SEQ ID NO: 1795262 - DNA, 25 bp, Homo sapien
tggatgtgaggatgccaagttggaa

SEQ ID NO: 1795263 - DNA, 25 bp, Homo sapien
tcaacacaaattaattagttttatc

SEQ ID NO: 1795264 - DNA, 25 bp, Homo sapien
aagttatcaacatgggccgggtaca

SEQ ID NO: 1795265 - DNA, 25 bp, Homo sapien
catatagacttaaactaccaggtaa

SEQ ID NO: 1795266 - DNA, 25 bp, Homo sapien
taccaggtaagtatttgtcattcac

SEQ ID NO: 1795267 - DNA, 25 bp, Homo sapien
gaaacatagcatcttcacatataga

SEQ ID NO: 1795268 - DNA, 25 bp, Homo sapien
ggtattcgtgctccggcatattgag

SEQ ID NO: 1795269 - DNA, 25 bp, Homo sapien
gctccggcatattgagcactcctat

SEQ ID NO: 1795270 - DNA, 25 bp, Homo sapien
gatggtagttggtattcgtgctccg

SEQ ID NO: 1795271 - DNA, 25 bp, Homo sapien
tgagcactcctataccgggaagaat

SEQ ID NO: 1795272 - DNA, 25 bp, Homo sapien
ttaccgtgcctaaaggatgattcat

SEQ ID NO: 1795273 - DNA, 25 bp, Homo sapien
ttgtgcaagtctcttcttaccgtgc

SEQ ID NO: 1795274 - DNA, 25 bp, Homo sapien
ctcttcttaccgtgcctaaaggatg

SEQ ID NO: 1795275 - DNA, 25 bp, Homo sapien
tgtttccgattctttgatcatccag

SEQ ID NO: 1795276 - DNA, 25 bp, Homo sapien
ctggaacactggcaaaatgaagggt

SEQ ID NO: 1795277 - DNA, 25 bp, Homo sapien
catgctgattggattcggagaaaac

SEQ ID NO: 1795278 - DNA, 25 bp, Homo sapien
gaagcagagcccatttagaaggaac

SEQ ID NO: 1795279 - DNA, 25 bp, Homo sapien
tctaagacctgagagtgaagcctca

SEQ ID NO: 1795280 - DNA, 25 bp, Homo sapien
tgtggtggctaacagtcagaaaccc

SEQ ID NO: 1795281 - DNA, 25 bp, Homo sapien
caattttggacttcaaggtgaccca

SEQ ID NO: 1795282 - DNA, 25 bp, Homo sapien
tccagcgtggttatggtgtctccaa

SEQ ID NO: 1795283 - DNA, 25 bp, Homo sapien
gaaagtgaatactcaaccaacctgg

SEQ ID NO: 1795284 - DNA, 25 bp, Homo sapien
gcgtcctaagcttgccaggaagccc

SEQ ID NO: 1795285 - DNA, 25 bp, Homo sapien
tgggcacctccgttccacttgacct

SEQ ID NO: 1795286 - DNA, 25 bp, Homo sapien
ttccacttgaccttttccacctgta

SEQ ID NO: 1795287 - DNA, 25 bp, Homo sapien
tctctccttgcagggggagcacgcg

SEQ ID NO: 1795288 - DNA, 25 bp, Homo sapien
gcatggtggattggttaaattggca

SEQ ID NO: 1795289 - DNA, 25 bp, Homo sapien
agcatggtggattggttaaattggc

SEQ ID NO: 1795290 - DNA, 25 bp, Homo sapien
acaagcatggtggattggttaaatt

SEQ ID NO: 1795291 - DNA, 25 bp, Homo sapien
caagcatggtggattggttaaattg

SEQ ID NO: 1795292 - DNA, 25 bp, Homo sapien
ctatttccagggcctgccactgtta

SEQ ID NO: 1795293 - DNA, 25 bp, Homo sapien
tatttccagggcctgccactgttaa

SEQ ID NO: 1795294 - DNA, 25 bp, Homo sapien
ttccagggcctgccactgttaattc

SEQ ID NO: 1795295 - DNA, 25 bp, Homo sapien
tttccagggcctgccactgttaatt

SEQ ID NO: 1795296 - DNA, 25 bp, Homo sapien
gactgtgcacctagttgatgaccac

SEQ ID NO: 1795297 - DNA, 25 bp, Homo sapien
ttaattccatcacagttgcaggctc

SEQ ID NO: 1795298 - DNA, 25 bp, Homo sapien
ctcatctgtttgcagggcctaccct

SEQ ID NO: 1795299 - DNA, 25 bp, Homo sapien
ttaattccatcacagttgcaggctg

SEQ ID NO: 1795300 - DNA, 25 bp, Homo sapien
tcagtgtcaggttccgttttcttac

SEQ ID NO: 1795301 - DNA, 25 bp, Homo sapien
caggttccgttttcttactcatatc

SEQ ID NO: 1795302 - DNA, 25 bp, Homo sapien
tactcatatctaaacttcctgtcac

SEQ ID NO: 1795303 - DNA, 25 bp, Homo sapien
ccttttaactcagtgtcaggttccg

SEQ ID NO: 1795304 - DNA, 25 bp, Homo sapien
taacgtggcaagtatctgatttctc

SEQ ID NO: 1795305 - DNA, 25 bp, Homo sapien
gacagtctcagtatagatcagttgg

SEQ ID NO: 1795306 - DNA, 25 bp, Homo sapien
aacacattttgatagggcttatttc

SEQ ID NO: 1795307 - DNA, 25 bp, Homo sapien
cagaggtttaagtgtaggcctgtta

SEQ ID NO: 1795308 - DNA, 25 bp, Homo sapien
aattcagaggatcttaggtgctggc

SEQ ID NO: 1795309 - DNA, 25 bp, Homo sapien
taggtgctggcttgtggagacaaaa

SEQ ID NO: 1795310 - DNA, 25 bp, Homo sapien
gatagaatgtgaagacacgcgctag

SEQ ID NO: 1795311 - DNA, 25 bp, Homo sapien
gctagaaatcgcagtcctggccaga

SEQ ID NO: 1795312 - DNA, 25 bp, Homo sapien
tagtcactgtgctatacaatagatc

SEQ ID NO: 1795313 - DNA, 25 bp, Homo sapien
gtcactgtgctatacaatagatctc

SEQ ID NO: 1795314 - DNA, 25 bp, Homo sapien
tatagtcactgtgctatacaataga

SEQ ID NO: 1795315 - DNA, 25 bp, Homo sapien
tcactgtgctatacaatagatctct

SEQ ID NO: 1795316 - DNA, 25 bp, Homo sapien
gagacagggacttcctagccttggg

SEQ ID NO: 1795317 - DNA, 25 bp, Homo sapien
taagattacacatctagagacaggg

SEQ ID NO: 1795318 - DNA, 25 bp, Homo sapien
taactgtaggttaagcatctggcac

SEQ ID NO: 1795319 - DNA, 25 bp, Homo sapien
taactggactggaccgattaggatc

SEQ ID NO: 1795320 - DNA, 25 bp, Homo sapien
gttgaagcttgtctatacatgccgg

SEQ ID NO: 1795321 - DNA, 25 bp, Homo sapien
gcttgtctatacatgccggtgggta

SEQ ID NO: 1795322 - DNA, 25 bp, Homo sapien
tgccggtgggtagggaggacagcaa

SEQ ID NO: 1795323 - DNA, 25 bp, Homo sapien
ctgagttgaagcttgtctatacatg

SEQ ID NO: 1795324 - DNA, 25 bp, Homo sapien
catctttgtagtgaatgatgggagg

SEQ ID NO: 1795325 - DNA, 25 bp, Homo sapien
tgttcgctgcctctcttccgtcata

SEQ ID NO: 1795326 - DNA, 25 bp, Homo sapien
gcagagcaggacgttcttctgtgat

SEQ ID NO: 1795327 - DNA, 25 bp, Homo sapien
tccgtcataaggacggaagccccag

SEQ ID NO: 1795328 - DNA, 25 bp, Homo sapien
tcaacactgtacaccatagataact

SEQ ID NO: 1795329 - DNA, 25 bp, Homo sapien
tccgttcctgacagccaacaacgag

SEQ ID NO: 1795330 - DNA, 25 bp, Homo sapien
gataactttccgttcctgacagcca

SEQ ID NO: 1795331 - DNA, 25 bp, Homo sapien
cagccaacaacgagaaagtttactt

SEQ ID NO: 1795332 - DNA, 25 bp, Homo sapien
gtctcttctatttcacactgccagt

SEQ ID NO: 1795333 - DNA, 25 bp, Homo sapien
aggtctcttctatttcacactgcca

SEQ ID NO: 1795334 - DNA, 25 bp, Homo sapien
tcttctatttcacactgccagttgc

SEQ ID NO: 1795335 - DNA, 25 bp, Homo sapien
tcaggtctcttctatttcacactgc

SEQ ID NO: 1795336 - DNA, 25 bp, Homo sapien
tgacacagtactggagaaccagggc

SEQ ID NO: 1795337 - DNA, 25 bp, Homo sapien
gtttgttcaaattagggccctggca

SEQ ID NO: 1795338 - DNA, 25 bp, Homo sapien
tcagcgcgtctgttttgggtaaagg

SEQ ID NO: 1795339 - DNA, 25 bp, Homo sapien
tgggtgggccgttcctcattctgaa

SEQ ID NO: 1795340 - DNA, 25 bp, Homo sapien
ttgccaaggcaagagggtgaataga

SEQ ID NO: 1795341 - DNA, 25 bp, Homo sapien
tgggacttgtgcctccttagggttg

SEQ ID NO: 1795342 - DNA, 25 bp, Homo sapien
gttctggctaacataactggctgca

SEQ ID NO: 1795343 - DNA, 25 bp, Homo sapien
tgcatcttggcataatccctgaagt

SEQ ID NO: 1795344 - DNA, 25 bp, Homo sapien
tgtttccagtaaggacagtggtgac

SEQ ID NO: 1795345 - DNA, 25 bp, Homo sapien
ttaaagctggtatcccctcgggctc

SEQ ID NO: 1795346 - DNA, 25 bp, Homo sapien
ggacctgtttagctttcatgtggaa

SEQ ID NO: 1795347 - DNA, 25 bp, Homo sapien
gaaataggtgacataagccagactc

SEQ ID NO: 1795348 - DNA, 25 bp, Homo sapien
cctttccagggtgcggattgtggca

SEQ ID NO: 1795349 - DNA, 25 bp, Homo sapien
catggaacccgtgaccaagtggagc

SEQ ID NO: 1795350 - DNA, 25 bp, Homo sapien
tgtgcgctcctatctctcgtacctg

SEQ ID NO: 1795351 - DNA, 25 bp, Homo sapien
caaacaagtggtggactggactaga

SEQ ID NO: 1795352 - DNA, 25 bp, Homo sapien
cccaaacttaacagcttgaaacgat

SEQ ID NO: 1795353 - DNA, 25 bp, Homo sapien
ccaggagtggcttaactggacagtt

SEQ ID NO: 1795354 - DNA, 25 bp, Homo sapien
gtaagtctatggcaatgaacaaaac

SEQ ID NO: 1795355 - DNA, 25 bp, Homo sapien
gaatctattaacatatagtgcttga

SEQ ID NO: 1795356 - DNA, 25 bp, Homo sapien
tcctttctgtcattatcatcaccac

SEQ ID NO: 1795357 - DNA, 25 bp, Homo sapien
tgtcattatcatcaccaccagtacc

SEQ ID NO: 1795358 - DNA, 25 bp, Homo sapien
ctgtcattatcatcaccaccagtac

SEQ ID NO: 1795359 - DNA, 25 bp, Homo sapien
cattcctttctgtcattatcatcac

SEQ ID NO: 1795360 - DNA, 25 bp, Homo sapien
ttcttcaaaaggatctggtcctacc

SEQ ID NO: 1795361 - DNA, 25 bp, Homo sapien
aggaacacaaagaggagctctgcag

SEQ ID NO: 1795362 - DNA, 25 bp, Homo sapien
tgggtgccctggacactaagtgcct

SEQ ID NO: 1795363 - DNA, 25 bp, Homo sapien
gaaagcgagcctggttgatcattta

SEQ ID NO: 1795364 - DNA, 25 bp, Homo sapien
gaagggtcttgccatgaaagcgagc

SEQ ID NO: 1795365 - DNA, 25 bp, Homo sapien
ttaaagaccatctgggaaacttgtc

SEQ ID NO: 1795366 - DNA, 25 bp, Homo sapien
tcttaaaacaccagcatgcaatttg

SEQ ID NO: 1795367 - DNA, 25 bp, Homo sapien
tgtgtgatgaaggtgttcctcagag

SEQ ID NO: 1795368 - DNA, 25 bp, Homo sapien
gtttgtgtgatgaaggtgttcctca

SEQ ID NO: 1795369 - DNA, 25 bp, Homo sapien
tgtgatgaaggtgttcctcagagaa

SEQ ID NO: 1795370 - DNA, 25 bp, Homo sapien
gtgatgaaggtgttcctcagagaac

SEQ ID NO: 1795371 - DNA, 25 bp, Homo sapien
tctttgctatagtaaggccatcctc

SEQ ID NO: 1795372 - DNA, 25 bp, Homo sapien
tgatcactttctgcatcagagtcct

SEQ ID NO: 1795373 - DNA, 25 bp, Homo sapien
ttgctatagtaaggccatcctcaag

SEQ ID NO: 1795374 - DNA, 25 bp, Homo sapien
catctcgttctgatcactttctgca

SEQ ID NO: 1795375 - DNA, 25 bp, Homo sapien
caggacaacgtcatcctgaaaagac

SEQ ID NO: 1795376 - DNA, 25 bp, Homo sapien
cttgtcttcaggacaacgtcatcct

SEQ ID NO: 1795377 - DNA, 25 bp, Homo sapien
tccactgctgtaataccactgtgta

SEQ ID NO: 1795378 - DNA, 25 bp, Homo sapien
tttgtttcttccaatatccaggctt

SEQ ID NO: 1795379 - DNA, 25 bp, Homo sapien
ggtgtgttcattccctcaaccctca

SEQ ID NO: 1795380 - DNA, 25 bp, Homo sapien
gtgtgttcattccctcaaccctcat

SEQ ID NO: 1795381 - DNA, 25 bp, Homo sapien
aggtgtgttcattccctcaaccctc

SEQ ID NO: 1795382 - DNA, 25 bp, Homo sapien
caggtgtgttcattccctcaaccct

SEQ ID NO: 1795383 - DNA, 25 bp, Homo sapien
ctccggatgacactgtagagaccac

SEQ ID NO: 1795384 - DNA, 25 bp, Homo sapien
ccatcctttagctccggatgacact

SEQ ID NO: 1795385 - DNA, 25 bp, Homo sapien
gggctgaagcgtagctccccaaagc

SEQ ID NO: 1795386 - DNA, 25 bp, Homo sapien
cactgaatgtggtgcttgtgggaca

SEQ ID NO: 1795387 - DNA, 25 bp, Homo sapien
tcacagaattggactaaaaatagcc

SEQ ID NO: 1795388 - DNA, 25 bp, Homo sapien
ctgcgttaggcaaggaaagaggacc

SEQ ID NO: 1795389 - DNA, 25 bp, Homo sapien
ggcaaggaaagaggacctctgtctt

SEQ ID NO: 1795390 - DNA, 25 bp, Homo sapien
cgttaggcaaggaaagaggacctct

SEQ ID NO: 1795391 - DNA, 25 bp, Homo sapien
taggcaaggaaagaggacctctgtc

SEQ ID NO: 1795392 - DNA, 25 bp, Homo sapien
tgtggggaccagtgaatggatgagg

SEQ ID NO: 1795393 - DNA, 25 bp, Homo sapien
ggaccagtgaatggatgaggagcaa

SEQ ID NO: 1795394 - DNA, 25 bp, Homo sapien
aacttgtggggaccagtgaatggat

SEQ ID NO: 1795395 - DNA, 25 bp, Homo sapien
tggggaccagtgaatggatgaggag

SEQ ID NO: 1795396 - DNA, 25 bp, Homo sapien
actgctgcatgcaaatcttctttac

SEQ ID NO: 1795397 - DNA, 25 bp, Homo sapien
atgaactgctgcatgcaaatcttct

SEQ ID NO: 1795398 - DNA, 25 bp, Homo sapien
cttgccatcgatcttaatgaactgc

SEQ ID NO: 1795399 - DNA, 25 bp, Homo sapien
tgccatcgatcttaatgaactgctg

SEQ ID NO: 1795400 - DNA, 25 bp, Homo sapien
ggtagcggacggtgcaagcatcatg

SEQ ID NO: 1795401 - DNA, 25 bp, Homo sapien
cagggtaggttgtatcagttcaaac

SEQ ID NO: 1795402 - DNA, 25 bp, Homo sapien
gcggacggtgcaagcatcatgagtc

SEQ ID NO: 1795403 - DNA, 25 bp, Homo sapien
tcagggtagcggacggtgcaagcat

SEQ ID NO: 1795404 - DNA, 25 bp, Homo sapien
cgatgaaatcaatactcttgccagt

SEQ ID NO: 1795405 - DNA, 25 bp, Homo sapien
tcgaactcgatgaaatcaatactct

SEQ ID NO: 1795406 - DNA, 25 bp, Homo sapien
actcgatgaaatcaatactcttgcc

SEQ ID NO: 1795407 - DNA, 25 bp, Homo sapien
gtgtcgaactcgatgaaatcaatac

SEQ ID NO: 1795408 - DNA, 25 bp, Homo sapien
ttctctcagttgatgatcacaccaa

SEQ ID NO: 1795409 - DNA, 25 bp, Homo sapien
gcttctctcagttgatgatcacacc

SEQ ID NO: 1795410 - DNA, 25 bp, Homo sapien
cttctctcagttgatgatcacacca

SEQ ID NO: 1795411 - DNA, 25 bp, Homo sapien
gatatcctgtccttgggaaagagaa

SEQ ID NO: 1795412 - DNA, 25 bp, Homo sapien
gggaccacttcacccactgcttggt

SEQ ID NO: 1795413 - DNA, 25 bp, Homo sapien
ccacttcacccactgcttggtttgg

SEQ ID NO: 1795414 - DNA, 25 bp, Homo sapien
cagcgatggtgaggcggatatcctg

SEQ ID NO: 1795415 - DNA, 25 bp, Homo sapien
tgtcatccacactgacaacagagtc

SEQ ID NO: 1795416 - DNA, 25 bp, Homo sapien
gttgctatgagtttagaaacttcca

SEQ ID NO: 1795417 - DNA, 25 bp, Homo sapien
tccacactgacaacagagtcatctt

SEQ ID NO: 1795418 - DNA, 25 bp, Homo sapien
tggtagttgctatgagtttagaaac

SEQ ID NO: 1795419 - DNA, 25 bp, Homo sapien
gttgaagtttattgctaatttagta

SEQ ID NO: 1795420 - DNA, 25 bp, Homo sapien
aagttgaagtttattgctaatttag

SEQ ID NO: 1795421 - DNA, 25 bp, Homo sapien
agttgaagtttattgctaatttagt

SEQ ID NO: 1795422 - DNA, 25 bp, Homo sapien
tagaaccttggactgtactaggccc

SEQ ID NO: 1795423 - DNA, 25 bp, Homo sapien
gccatggtctcctagcacctgggct

SEQ ID NO: 1795424 - DNA, 25 bp, Homo sapien
tgtgccatggtctcctagcacctgg

SEQ ID NO: 1795425 - DNA, 25 bp, Homo sapien
gtttgtatcagccatagaaccttgg

SEQ ID NO: 1795426 - DNA, 25 bp, Homo sapien
tcgttctcgactgggctcattccac

SEQ ID NO: 1795427 - DNA, 25 bp, Homo sapien
cctcctgactttgtgtctcgttctc

SEQ ID NO: 1795428 - DNA, 25 bp, Homo sapien
agccactggaatatgctgctccttc

SEQ ID NO: 1795429 - DNA, 25 bp, Homo sapien
gatggccatacaatgcccagccact

SEQ ID NO: 1795430 - DNA, 25 bp, Homo sapien
agcagtgtgtcctgaagccgcatgc

SEQ ID NO: 1795431 - DNA, 25 bp, Homo sapien
gaactcatggccatcggtacttgga

SEQ ID NO: 1795432 - DNA, 25 bp, Homo sapien
ctgttgtccgtaataaaagcgtcca

SEQ ID NO: 1795433 - DNA, 25 bp, Homo sapien
cactgagtgctcaacagcctggttc

SEQ ID NO: 1795434 - DNA, 25 bp, Homo sapien
attttatcaggccagttgactggca

SEQ ID NO: 1795435 - DNA, 25 bp, Homo sapien
tacatgattttatcaggccagttga

SEQ ID NO: 1795436 - DNA, 25 bp, Homo sapien
ttttatcaggccagttgactggcaa

SEQ ID NO: 1795437 - DNA, 25 bp, Homo sapien
atgattttatcaggccagttgactg

SEQ ID NO: 1795438 - DNA, 25 bp, Homo sapien
ttgcagaatgtgattcaggctcccc

SEQ ID NO: 1795439 - DNA, 25 bp, Homo sapien
cagaatgtgattcaggctccccttt

SEQ ID NO: 1795440 - DNA, 25 bp, Homo sapien
ccatttgattcttgattagtgatat

SEQ ID NO: 1795441 - DNA, 25 bp, Homo sapien
attagtgatataggtggaggcagaa

SEQ ID NO: 1795442 - DNA, 25 bp, Homo sapien
tcaaaactcgagactagcaacataa

SEQ ID NO: 1795443 - DNA, 25 bp, Homo sapien
aaagaaatgagaagcagtgtttttc

SEQ ID NO: 1795444 - DNA, 25 bp, Homo sapien
gccagggcttttggctattgctaca

SEQ ID NO: 1795445 - DNA, 25 bp, Homo sapien
cttcttttggcaagcagacaccaaa

SEQ ID NO: 1795446 - DNA, 25 bp, Homo sapien
tggtaagcgctgaagctgttactca

SEQ ID NO: 1795447 - DNA, 25 bp, Homo sapien
cccagatggtaagcgctgaagctgt

SEQ ID NO: 1795448 - DNA, 25 bp, Homo sapien
ccaatttcccagatggtaagcgctg

SEQ ID NO: 1795449 - DNA, 25 bp, Homo sapien
gctgaagctgttactcaactctgga

SEQ ID NO: 1795450 - DNA, 25 bp, Homo sapien
ggttaaagcctcacaaggagactcg

SEQ ID NO: 1795451 - DNA, 25 bp, Homo sapien
tggagtcctggttctttctgccgag

SEQ ID NO: 1795452 - DNA, 25 bp, Homo sapien
ggctggacaccctcgatatggagtc

SEQ ID NO: 1795453 - DNA, 25 bp, Homo sapien
tattagctccatagaactgaatttg

SEQ ID NO: 1795454 - DNA, 25 bp, Homo sapien
ccacttaataggagcatgagtgttt

SEQ ID NO: 1795455 - DNA, 25 bp, Homo sapien
ggctgttgcgctcaggaataactgc

SEQ ID NO: 1795456 - DNA, 25 bp, Homo sapien
caacaaaggttagatggtgagccag

SEQ ID NO: 1795457 - DNA, 25 bp, Homo sapien
cagcttggatgatggaatccgagag

SEQ ID NO: 1795458 - DNA, 25 bp, Homo sapien
gagagatgccatgatcaggagcatt

SEQ ID NO: 1795459 - DNA, 25 bp, Homo sapien
cttccttgctttgtagagagatgcc

SEQ ID NO: 1795460 - DNA, 25 bp, Homo sapien
ccttccttgctttgtagagagatgc

SEQ ID NO: 1795461 - DNA, 25 bp, Homo sapien
ttccttgctttgtagagagatgcca

SEQ ID NO: 1795462 - DNA, 25 bp, Homo sapien
ttcaacgggcttcccagaatggagg

SEQ ID NO: 1795463 - DNA, 25 bp, Homo sapien
ataattctagcgcattgagaggctg

SEQ ID NO: 1795464 - DNA, 25 bp, Homo sapien
tccaggtaaaaacaagagcagggcc

SEQ ID NO: 1795465 - DNA, 25 bp, Homo sapien
gcttaaaagcctggccaaaggcaca

SEQ ID NO: 1795466 - DNA, 25 bp, Homo sapien
ctctctgccaatggcttcagcacct

SEQ ID NO: 1795467 - DNA, 25 bp, Homo sapien
cctcctctctgccaatggcttcagc

SEQ ID NO: 1795468 - DNA, 25 bp, Homo sapien
tcagcacctggacctcctcagactt

SEQ ID NO: 1795469 - DNA, 25 bp, Homo sapien
cagcacctggacctcctcagacttc

SEQ ID NO: 1795470 - DNA, 25 bp, Homo sapien
gctgaaggtgtcgttttccaaagcc

SEQ ID NO: 1795471 - DNA, 25 bp, Homo sapien
ttccttcagacatagtagcagctag

SEQ ID NO: 1795472 - DNA, 25 bp, Homo sapien
ccacttcagccagactgttgagtct

SEQ ID NO: 1795473 - DNA, 25 bp, Homo sapien
tgagtctgcgcgtccttgttcctgc

SEQ ID NO: 1795474 - DNA, 25 bp, Homo sapien
gcgtgactcattataatatgggcag

SEQ ID NO: 1795475 - DNA, 25 bp, Homo sapien
cagtgggtttactgatggtgcagca

SEQ ID NO: 1795476 - DNA, 25 bp, Homo sapien
ttactgatggtgcagcatgccgtac

SEQ ID NO: 1795477 - DNA, 25 bp, Homo sapien
cgatactgcgtgactcattataata

SEQ ID NO: 1795478 - DNA, 25 bp, Homo sapien
aacttaaaatgaacatcatcaatca

SEQ ID NO: 1795479 - DNA, 25 bp, Homo sapien
gaaaatattcagtcgcatcatgtac

SEQ ID NO: 1795480 - DNA, 25 bp, Homo sapien
tacttgtactattggtaagaactta

SEQ ID NO: 1795481 - DNA, 25 bp, Homo sapien
caatcatggaatccacaaataagct

SEQ ID NO: 1795482 - DNA, 25 bp, Homo sapien
cccgcgccccgcggacgcgggagtg

SEQ ID NO: 1795483 - DNA, 25 bp, Homo sapien
ccccgcggacgcgggagtgagcgct

SEQ ID NO: 1795484 - DNA, 25 bp, Homo sapien
gcgccccgcggacgcgggagtgagc

SEQ ID NO: 1795485 - DNA, 25 bp, Homo sapien
cgccccgcggacgcgggagtgagcg

SEQ ID NO: 1795486 - DNA, 25 bp, Homo sapien
gggccagagcgtcgccgcccgtagg

SEQ ID NO: 1795487 - DNA, 25 bp, Homo sapien
ctggggccagagcgtcgccgcccgt

SEQ ID NO: 1795488 - DNA, 25 bp, Homo sapien
tcgccgcccgtaggcccggctgggc

SEQ ID NO: 1795489 - DNA, 25 bp, Homo sapien
cccggctgggctccgctgccctcgc

SEQ ID NO: 1795490 - DNA, 25 bp, Homo sapien
ccctggcgactggaccgtgcgagcc

SEQ ID NO: 1795491 - DNA, 25 bp, Homo sapien
gcggcatccaatatggcggactcga

SEQ ID NO: 1795492 - DNA, 25 bp, Homo sapien
ggccgcgcggaaaccatcgagcgcg

SEQ ID NO: 1795493 - DNA, 25 bp, Homo sapien
caatatggcggactcgagtcgggcc

SEQ ID NO: 1795494 - DNA, 25 bp, Homo sapien
cagccccgctcggcgaagacagagg

SEQ ID NO: 1795495 - DNA, 25 bp, Homo sapien
cccgctcggcgaagacagaggagga

SEQ ID NO: 1795496 - DNA, 25 bp, Homo sapien
gaaccagccccgctcggcgaagaca

SEQ ID NO: 1795497 - DNA, 25 bp, Homo sapien
gccccgctcggcgaagacagaggag

SEQ ID NO: 1795498 - DNA, 25 bp, Homo sapien
cgccgttctagggaacagaggcgct

SEQ ID NO: 1795499 - DNA, 25 bp, Homo sapien
gggagcgccgttctagggaacagag

SEQ ID NO: 1795500 - DNA, 25 bp, Homo sapien
cgttctagggaacagaggcgctgcc

SEQ ID NO: 1795501 - DNA, 25 bp, Homo sapien
tctctgccccgctccgtttcggtcc

SEQ ID NO: 1795502 - DNA, 25 bp, Homo sapien
gggcggagtggaagggcacgcgctg

SEQ ID NO: 1795503 - DNA, 25 bp, Homo sapien
gagtggaagggcacgcgctggcggg

SEQ ID NO: 1795504 - DNA, 25 bp, Homo sapien
aagggcacgcgctggcggggaaggg

SEQ ID NO: 1795505 - DNA, 25 bp, Homo sapien
ctcggggcggagtggaagggcacgc

SEQ ID NO: 1795506 - DNA, 25 bp, Homo sapien
tggcgggagagcgggccgctgcgac

SEQ ID NO: 1795507 - DNA, 25 bp, Homo sapien
ctggcgggagagcgggccgctgcga

SEQ ID NO: 1795508 - DNA, 25 bp, Homo sapien
tggggagagcgagacgcgggctgct

SEQ ID NO: 1795509 - DNA, 25 bp, Homo sapien
agacgcgggctgctgcgtggccgcg

SEQ ID NO: 1795510 - DNA, 25 bp, Homo sapien
gcgagacgcgggctgctgcgtggcc

SEQ ID NO: 1795511 - DNA, 25 bp, Homo sapien
ggggagagcgagacgcgggctgctg

SEQ ID NO: 1795512 - DNA, 25 bp, Homo sapien
ggcggaagaggcggcggccactgca

SEQ ID NO: 1795513 - DNA, 25 bp, Homo sapien
ttgtcgctgcggaggccccgagccc

SEQ ID NO: 1795514 - DNA, 25 bp, Homo sapien
cccgagcccggcggcggaagaggcg

SEQ ID NO: 1795515 - DNA, 25 bp, Homo sapien
gttgtcgctgcggaggccccgagcc

SEQ ID NO: 1795516 - DNA, 25 bp, Homo sapien
gctattgaaggtcttcacggcctcc

SEQ ID NO: 1795517 - DNA, 25 bp, Homo sapien
ctcgctattgaaggtcttcacggcc

SEQ ID NO: 1795518 - DNA, 25 bp, Homo sapien
cgctattgaaggtcttcacggcctc

SEQ ID NO: 1795519 - DNA, 25 bp, Homo sapien
tcgctattgaaggtcttcacggcct

SEQ ID NO: 1795520 - DNA, 25 bp, Homo sapien
gaaatgggagagtgctacatacact

SEQ ID NO: 1795521 - DNA, 25 bp, Homo sapien
aagctaactccactttgaaacacgg

SEQ ID NO: 1795522 - DNA, 25 bp, Homo sapien
tactgtgaccaaccatagtgcacta

SEQ ID NO: 1795523 - DNA, 25 bp, Homo sapien
tgggactaagacaaacctcaagttc

SEQ ID NO: 1795524 - DNA, 25 bp, Homo sapien
agtaattgcactctatagcctcgaa

SEQ ID NO: 1795525 - DNA, 25 bp, Homo sapien
ttcagtctggaaaaacctgagcctt

SEQ ID NO: 1795526 - DNA, 25 bp, Homo sapien
cgtggtgacctgtcaacagcgagta

SEQ ID NO: 1795527 - DNA, 25 bp, Homo sapien
tctgattcagggtcgcactgttgcc

SEQ ID NO: 1795528 - DNA, 25 bp, Homo sapien
cagcaggatcattaaaggccgggag

SEQ ID NO: 1795529 - DNA, 25 bp, Homo sapien
cacagcaggatcattaaaggccggg

SEQ ID NO: 1795530 - DNA, 25 bp, Homo sapien
caggatcattaaaggccgggagttc

SEQ ID NO: 1795531 - DNA, 25 bp, Homo sapien
gcaggatcattaaaggccgggagtt

SEQ ID NO: 1795532 - DNA, 25 bp, Homo sapien
tcttgtgtccatgctgctggaaaag

SEQ ID NO: 1795533 - DNA, 25 bp, Homo sapien
ttcttgtgtccatgctgctggaaaa

SEQ ID NO: 1795534 - DNA, 25 bp, Homo sapien
agtctgtacaagcaggagtagaggc

SEQ ID NO: 1795535 - DNA, 25 bp, Homo sapien
aaagaatcacaacaacataggctcc

SEQ ID NO: 1795536 - DNA, 25 bp, Homo sapien
cctaggccgcgatacatgttcatta

SEQ ID NO: 1795537 - DNA, 25 bp, Homo sapien
tagtccctagcaaagaagcaatgct

SEQ ID NO: 1795538 - DNA, 25 bp, Homo sapien
caatgctggagtcagtaatgcctgc

SEQ ID NO: 1795539 - DNA, 25 bp, Homo sapien
aacgaaccctactgtgtttgactgg

SEQ ID NO: 1795540 - DNA, 25 bp, Homo sapien
ccagggttcttgctgtcgaagacaa

SEQ ID NO: 1795541 - DNA, 25 bp, Homo sapien
aattcatggctttttagataaacgg

SEQ ID NO: 1795542 - DNA, 25 bp, Homo sapien
tcgaagacaaacttggaaagaggga

SEQ ID NO: 1795543 - DNA, 25 bp, Homo sapien
cagccgcacggttctatattttaag

SEQ ID NO: 1795544 - DNA, 25 bp, Homo sapien
tgcactattggatctcttacctaaa

SEQ ID NO: 1795545 - DNA, 25 bp, Homo sapien
cgaagaatatacaaagaggcccaca

SEQ ID NO: 1795546 - DNA, 25 bp, Homo sapien
gactggagattccactcataagaga

SEQ ID NO: 1795547 - DNA, 25 bp, Homo sapien
caggccaaaaggagatgttacagac

SEQ ID NO: 1795548 - DNA, 25 bp, Homo sapien
tgagggtagccactagaaactgaga

SEQ ID NO: 1795549 - DNA, 25 bp, Homo sapien
tgggaccaatggctactaggacatg

SEQ ID NO: 1795550 - DNA, 25 bp, Homo sapien
gaatgaatttggaagagggcccgaa

SEQ ID NO: 1795551 - DNA, 25 bp, Homo sapien
caatggtcctttaagcccttgagag

SEQ ID NO: 1795552 - DNA, 25 bp, Homo sapien
gaattctactatgaccttaaagggc

SEQ ID NO: 1795553 - DNA, 25 bp, Homo sapien
cacacccctggagagcatatttatg

SEQ ID NO: 1795554 - DNA, 25 bp, Homo sapien
tacaaggttgctggttctatgatca

SEQ ID NO: 1795555 - DNA, 25 bp, Homo sapien
cccagtgttctctacaggtttccat

SEQ ID NO: 1795556 - DNA, 25 bp, Homo sapien
tacatgctgcgaaggcttgggctct

SEQ ID NO: 1795557 - DNA, 25 bp, Homo sapien
ggctacatgctgcgaaggcttgggc

SEQ ID NO: 1795558 - DNA, 25 bp, Homo sapien
ttgggctctccagctacccagtgtt

SEQ ID NO: 1795559 - DNA, 25 bp, Homo sapien
tcctttgcctgctgattccatctct

SEQ ID NO: 1795560 - DNA, 25 bp, Homo sapien
tttgcctgctgattccatctctatg

SEQ ID NO: 1795561 - DNA, 25 bp, Homo sapien
ctttgcctgctgattccatctctat

SEQ ID NO: 1795562 - DNA, 25 bp, Homo sapien
cctttgcctgctgattccatctcta

SEQ ID NO: 1795563 - DNA, 25 bp, Homo sapien
tactgaactaatgtgaacccagcac

SEQ ID NO: 1795564 - DNA, 25 bp, Homo sapien
tcagaagcactctgtcatcatgtag

SEQ ID NO: 1795565 - DNA, 25 bp, Homo sapien
ccttggcttctagggatcttgctga

SEQ ID NO: 1795566 - DNA, 25 bp, Homo sapien
taggtgttctatacagttcactacc

SEQ ID NO: 1795567 - DNA, 25 bp, Homo sapien
taatgttaccacattactacagtgc

SEQ ID NO: 1795568 - DNA, 25 bp, Homo sapien
tctgtgtcaaactcacagggaattt

SEQ ID NO: 1795569 - DNA, 25 bp, Homo sapien
ggtatgcccgtcttctcaccaagtt

SEQ ID NO: 1795570 - DNA, 25 bp, Homo sapien
gctttagaaaatctaccggtatgcc

SEQ ID NO: 1795571 - DNA, 25 bp, Homo sapien
ggtttatagtcattcagggaataca

SEQ ID NO: 1795572 - DNA, 25 bp, Homo sapien
cattttcgctttcgaaatgggtggt

SEQ ID NO: 1795573 - DNA, 25 bp, Homo sapien
aatgggtggtttatagtcattcagg

SEQ ID NO: 1795574 - DNA, 25 bp, Homo sapien
ttgggtcattttcgctttcgaaatg

SEQ ID NO: 1795575 - DNA, 25 bp, Homo sapien
tctcaacactctgtaccacatgttt

SEQ ID NO: 1795576 - DNA, 25 bp, Homo sapien
acttctcaacactctgtaccacatg

SEQ ID NO: 1795577 - DNA, 25 bp, Homo sapien
tcaacactctgtaccacatgtttat

SEQ ID NO: 1795578 - DNA, 25 bp, Homo sapien
aaacttctcaacactctgtaccaca

SEQ ID NO: 1795579 - DNA, 25 bp, Homo sapien
agtttatgggaataccatttattct

SEQ ID NO: 1795580 - DNA, 25 bp, Homo sapien
tggtagtttatgggaataccattta

SEQ ID NO: 1795581 - DNA, 25 bp, Homo sapien
tagtttatgggaataccatttattc

SEQ ID NO: 1795582 - DNA, 25 bp, Homo sapien
ttctggaaagtgctaatgatgttat

SEQ ID NO: 1795583 - DNA, 25 bp, Homo sapien
ttgtcatccccagggcaacgatata

SEQ ID NO: 1795584 - DNA, 25 bp, Homo sapien
ttgtcgcacaatggagtcaataaca

SEQ ID NO: 1795585 - DNA, 25 bp, Homo sapien
ttcttgaccaaactgatgtcgggat

SEQ ID NO: 1795586 - DNA, 25 bp, Homo sapien
taaagagtctcaacattgcccatcc

SEQ ID NO: 1795587 - DNA, 25 bp, Homo sapien
tgccactggcaagcagacttttgac

SEQ ID NO: 1795588 - DNA, 25 bp, Homo sapien
tcttcttgatatgcccctgaactgc

SEQ ID NO: 1795589 - DNA, 25 bp, Homo sapien
tctggccctcagaacgatgaatcat

SEQ ID NO: 1795590 - DNA, 25 bp, Homo sapien
cggaatcccggctgccatatccaaa

SEQ ID NO: 1795591 - DNA, 25 bp, Homo sapien
gcagtggtagtgctggccaaaacag

SEQ ID NO: 1795592 - DNA, 25 bp, Homo sapien
ggagtattgctcatagcagtggtag

SEQ ID NO: 1795593 - DNA, 25 bp, Homo sapien
tgtgacaactggaggcggaatcccg

SEQ ID NO: 1795594 - DNA, 25 bp, Homo sapien
caaataaatatgtaagtaagtaact

SEQ ID NO: 1795595 - DNA, 25 bp, Homo sapien
cacaccccccaaataaatatgtaag

SEQ ID NO: 1795596 - DNA, 25 bp, Homo sapien
taaatatgtaagtaagtaactaaga

SEQ ID NO: 1795597 - DNA, 25 bp, Homo sapien
ataaatatgtaagtaagtaactaag

SEQ ID NO: 1795598 - DNA, 25 bp, Homo sapien
tatttgttatctgagatacccacgg

SEQ ID NO: 1795599 - DNA, 25 bp, Homo sapien
tacccacggatcaggtaagccttgg

SEQ ID NO: 1795600 - DNA, 25 bp, Homo sapien
gatctgagctacagccgcaagtgta

SEQ ID NO: 1795601 - DNA, 25 bp, Homo sapien
cattggccggagtaacaggtgtcac

SEQ ID NO: 1795602 - DNA, 25 bp, Homo sapien
tgtaaggtttgtattaattgttgaa

SEQ ID NO: 1795603 - DNA, 25 bp, Homo sapien
ctgtaaggtttgtattaattgttga

SEQ ID NO: 1795604 - DNA, 25 bp, Homo sapien
tgaacaacaagaccagcatctaggg

SEQ ID NO: 1795605 - DNA, 25 bp, Homo sapien
gaacaacaagaccagcatctagggc

SEQ ID NO: 1795606 - DNA, 25 bp, Homo sapien
tccctgttctaagggagtaagagtg

SEQ ID NO: 1795607 - DNA, 25 bp, Homo sapien
ctgcagctgtaagttgtgccgtaag

SEQ ID NO: 1795608 - DNA, 25 bp, Homo sapien
cttgttaaaggagactccctgttct

SEQ ID NO: 1795609 - DNA, 25 bp, Homo sapien
taagttgtgccgtaagagcttgcaa

SEQ ID NO: 1795610 - DNA, 25 bp, Homo sapien
gctcagagtcttccccaaaatcaaa

SEQ ID NO: 1795611 - DNA, 25 bp, Homo sapien
tttgggttcttcactatgctcagag

SEQ ID NO: 1795612 - DNA, 25 bp, Homo sapien
ggttcttcactatgctcagagtctt

SEQ ID NO: 1795613 - DNA, 25 bp, Homo sapien
cctttttgggttcttcactatgctc

SEQ ID NO: 1795614 - DNA, 25 bp, Homo sapien
gtctgagatgttctaggttttgctg

SEQ ID NO: 1795615 - DNA, 25 bp, Homo sapien
tgttcacagattctgaaacgtgaga

SEQ ID NO: 1795616 - DNA, 25 bp, Homo sapien
gttgtagttgttctgctatctgatg

SEQ ID NO: 1795617 - DNA, 25 bp, Homo sapien
aaatggaattgttcacagattctga

SEQ ID NO: 1795618 - DNA, 25 bp, Homo sapien
tctgcattctaaatctctcataggt

SEQ ID NO: 1795619 - DNA, 25 bp, Homo sapien
ggcagtcagttaaatgaatctagat

SEQ ID NO: 1795620 - DNA, 25 bp, Homo sapien
cagagaacagctccataaaaggaag

SEQ ID NO: 1795621 - DNA, 25 bp, Homo sapien
acacagcaaacatcacaattacatg

SEQ ID NO: 1795622 - DNA, 25 bp, Homo sapien
tcaagaaaatgctgctgactactcc

SEQ ID NO: 1795623 - DNA, 25 bp, Homo sapien
catccaaattgacttcaggttcaag

SEQ ID NO: 1795624 - DNA, 25 bp, Homo sapien
tgatggtgacgctgaatgctctgac

SEQ ID NO: 1795625 - DNA, 25 bp, Homo sapien
ggttccttcctgactatcctgagga

SEQ ID NO: 1795626 - DNA, 25 bp, Homo sapien
tattgacgatgggagcattaatgcc

SEQ ID NO: 1795627 - DNA, 25 bp, Homo sapien
ggaaaaatatattcagggcactgct

SEQ ID NO: 1795628 - DNA, 25 bp, Homo sapien
tgggccccattagaagaagtaatgt

SEQ ID NO: 1795629 - DNA, 25 bp, Homo sapien
gacaagcttggcctaataggtgaaa

SEQ ID NO: 1795630 - DNA, 25 bp, Homo sapien
gttcttgatcttgagcgaaccgcca

SEQ ID NO: 1795631 - DNA, 25 bp, Homo sapien
aacgagatcgtgaatgtgttcttga

SEQ ID NO: 1795632 - DNA, 25 bp, Homo sapien
cttgaacgagatcgtgaatgtgttc

SEQ ID NO: 1795633 - DNA, 25 bp, Homo sapien
tgagcgaaccgccactttcttagct

SEQ ID NO: 1795634 - DNA, 25 bp, Homo sapien
tgtgtttacgctttctagagccaga

SEQ ID NO: 1795635 - DNA, 25 bp, Homo sapien
tttagatctaattggaggtaatccc

SEQ ID NO: 1795636 - DNA, 25 bp, Homo sapien
gaatacgaccgtgatgatttcctct

SEQ ID NO: 1795637 - DNA, 25 bp, Homo sapien
ttctttctcttgagcgggagcgtga

SEQ ID NO: 1795638 - DNA, 25 bp, Homo sapien
tattatcaggttgacactagctctc

SEQ ID NO: 1795639 - DNA, 25 bp, Homo sapien
acttagtaagaagatggctattgcc

SEQ ID NO: 1795640 - DNA, 25 bp, Homo sapien
gatagccaaggcctacaagaactcc

SEQ ID NO: 1795641 - DNA, 25 bp, Homo sapien
tagatgtataccatcaccctaaggg

SEQ ID NO: 1795642 - DNA, 25 bp, Homo sapien
cacgtatttactgcggcactactca

SEQ ID NO: 1795643 - DNA, 25 bp, Homo sapien
taaaaactatgtaaacagcacacgt

SEQ ID NO: 1795644 - DNA, 25 bp, Homo sapien
ataaattccacagttaaaaactatg

SEQ ID NO: 1795645 - DNA, 25 bp, Homo sapien
taacagacctgcactttgtacacaa

SEQ ID NO: 1795646 - DNA, 25 bp, Homo sapien
tgttctaaaatccatgctaaagacc

SEQ ID NO: 1795647 - DNA, 25 bp, Homo sapien
tgcagaagggacacttgattcctgg

SEQ ID NO: 1795648 - DNA, 25 bp, Homo sapien
ggttctgcatattccagctgcctta

SEQ ID NO: 1795649 - DNA, 25 bp, Homo sapien
taatgattcttgtcatcccatgcag

SEQ ID NO: 1795650 - DNA, 25 bp, Homo sapien
tgtacagttcatgcctccacgaatg

SEQ ID NO: 1795651 - DNA, 25 bp, Homo sapien
tagccccacatgaaggtacccttgg

SEQ ID NO: 1795652 - DNA, 25 bp, Homo sapien
cacttagctaacacagagtccctgg

SEQ ID NO: 1795653 - DNA, 25 bp, Homo sapien
gagtgccctaggcttttcaaccagg

SEQ ID NO: 1795654 - DNA, 25 bp, Homo sapien
cttcaaacaggttggttaagtcttg

SEQ ID NO: 1795655 - DNA, 25 bp, Homo sapien
tccacttgcccaacccagagagtag

SEQ ID NO: 1795656 - DNA, 25 bp, Homo sapien
cttgcccaacccagagagtagtact

SEQ ID NO: 1795657 - DNA, 25 bp, Homo sapien
cccaacccagagagtagtactacat

SEQ ID NO: 1795658 - DNA, 25 bp, Homo sapien
ggccatactgattttcttacctaac

SEQ ID NO: 1795659 - DNA, 25 bp, Homo sapien
tagcaattcgctggccatactgatt

SEQ ID NO: 1795660 - DNA, 25 bp, Homo sapien
actgattttcttacctaacatttgc

SEQ ID NO: 1795661 - DNA, 25 bp, Homo sapien
cgctggccatactgattttcttacc

SEQ ID NO: 1795662 - DNA, 25 bp, Homo sapien
gaagagctcgaaatgcatcttgtcg

SEQ ID NO: 1795663 - DNA, 25 bp, Homo sapien
tttatatgatccagaactgagtttc

SEQ ID NO: 1795664 - DNA, 25 bp, Homo sapien
taatgaccttggacccaattttata

SEQ ID NO: 1795665 - DNA, 25 bp, Homo sapien
catcttgtcgatgaaccatgcagac

SEQ ID NO: 1795666 - DNA, 25 bp, Homo sapien
caagttccaatccaccaaatctcac

SEQ ID NO: 1795667 - DNA, 25 bp, Homo sapien
ccaagttccaatccaccaaatctca

SEQ ID NO: 1795668 - DNA, 25 bp, Homo sapien
gctgctcttaagacactcctgggct

SEQ ID NO: 1795669 - DNA, 25 bp, Homo sapien
tccagaggagactagggacacttta

SEQ ID NO: 1795670 - DNA, 25 bp, Homo sapien
tagtgcagtccagttccaaagaaaa

SEQ ID NO: 1795671 - DNA, 25 bp, Homo sapien
gggaccatagaagcataccatcaca

SEQ ID NO: 1795672 - DNA, 25 bp, Homo sapien
tgatcaatcatgcctccttctgcaa

SEQ ID NO: 1795673 - DNA, 25 bp, Homo sapien
tcaatcatgcctccttctgcaaaac

SEQ ID NO: 1795674 - DNA, 25 bp, Homo sapien
acatcccagaattgtttgtattctg

SEQ ID NO: 1795675 - DNA, 25 bp, Homo sapien
cacatcccagaattgtttgtattct

SEQ ID NO: 1795676 - DNA, 25 bp, Homo sapien
tctgattaggatactatggagttca

SEQ ID NO: 1795677 - DNA, 25 bp, Homo sapien
cactctagatttctgcccagattaa

SEQ ID NO: 1795678 - DNA, 25 bp, Homo sapien
taagatatatccacaaccgtaggtg

SEQ ID NO: 1795679 - DNA, 25 bp, Homo sapien
taaatccttcatctaccttggcaca

SEQ ID NO: 1795680 - DNA, 25 bp, Homo sapien
ctaaacaaaatagttgaaattgatt

SEQ ID NO: 1795681 - DNA, 25 bp, Homo sapien
tgtctccttttcaactggagttggg

SEQ ID NO: 1795682 - DNA, 25 bp, Homo sapien
tgagttgtctggaccgtctctttaa

SEQ ID NO: 1795683 - DNA, 25 bp, Homo sapien
ttttcaactggagttgggctctgag

SEQ ID NO: 1795684 - DNA, 25 bp, Homo sapien
gaccgtctctttaacaggttctgag

SEQ ID NO: 1795685 - DNA, 25 bp, Homo sapien
acatagcaacaggaggagggaaaac

SEQ ID NO: 1795686 - DNA, 25 bp, Homo sapien
caacatagcaacaggaggagggaaa

SEQ ID NO: 1795687 - DNA, 25 bp, Homo sapien
gcaacatagcaacaggaggagggaa

SEQ ID NO: 1795688 - DNA, 25 bp, Homo sapien
ctgcaacatagcaacaggaggaggg

SEQ ID NO: 1795689 - DNA, 25 bp, Homo sapien
aaactaactgtaggcacggctggcg

SEQ ID NO: 1795690 - DNA, 25 bp, Homo sapien
ggaaccggcatcgacacaggaaatg

SEQ ID NO: 1795691 - DNA, 25 bp, Homo sapien
tggagggattggactgaatccagga

SEQ ID NO: 1795692 - DNA, 25 bp, Homo sapien
caggaaatgctggtgggactaaact

SEQ ID NO: 1795693 - DNA, 25 bp, Homo sapien
ggctggagcacagtggtgtgatctt

SEQ ID NO: 1795694 - DNA, 25 bp, Homo sapien
gacaaagtaattgctctgttaccca

SEQ ID NO: 1795695 - DNA, 25 bp, Homo sapien
cagtggtgtgatcttggctcactgc

SEQ ID NO: 1795696 - DNA, 25 bp, Homo sapien
ttggtactactggtggaatcgtagg

SEQ ID NO: 1795697 - DNA, 25 bp, Homo sapien
ggtggcacaacaggtgggggaactg

SEQ ID NO: 1795698 - DNA, 25 bp, Homo sapien
gttggtactactggtggaatcgtag

SEQ ID NO: 1795699 - DNA, 25 bp, Homo sapien
gaatcgtagggggtggcacaacagg

SEQ ID NO: 1795700 - DNA, 25 bp, Homo sapien
gctatgtaaacactgaaagggagaa

SEQ ID NO: 1795701 - DNA, 25 bp, Homo sapien
ctatgtaaacactgaaagggagaaa

SEQ ID NO: 1795702 - DNA, 25 bp, Homo sapien
ggaaaatgaattagataatcaaaag

SEQ ID NO: 1795703 - DNA, 25 bp, Homo sapien
aaagctatgtaaacactgaaaggga

SEQ ID NO: 1795704 - DNA, 25 bp, Homo sapien
taacaaggctaccaaatccaacatc

SEQ ID NO: 1795705 - DNA, 25 bp, Homo sapien
attgctggcaacagaaccgcctggt

SEQ ID NO: 1795706 - DNA, 25 bp, Homo sapien
caggctctgcctgtttagttggagc

SEQ ID NO: 1795707 - DNA, 25 bp, Homo sapien
tccggtgtcatggataatgacggct

SEQ ID NO: 1795708 - DNA, 25 bp, Homo sapien
gcatctgtagattgaagtggttaca

SEQ ID NO: 1795709 - DNA, 25 bp, Homo sapien
atgccaccccagaattaaacaccaa

SEQ ID NO: 1795710 - DNA, 25 bp, Homo sapien
aaaaagtgcgacatttcagcatctg

SEQ ID NO: 1795711 - DNA, 25 bp, Homo sapien
caaacgcatgccaccccagaattaa

SEQ ID NO: 1795712 - DNA, 25 bp, Homo sapien
cttctagagctagctggataatacc

SEQ ID NO: 1795713 - DNA, 25 bp, Homo sapien
cacactgaagtagtcccaataggac

SEQ ID NO: 1795714 - DNA, 25 bp, Homo sapien
taagttcccgatagaagttactcac

SEQ ID NO: 1795715 - DNA, 25 bp, Homo sapien
tcaaggtcaagtgcctctaaaccat

SEQ ID NO: 1795716 - DNA, 25 bp, Homo sapien
gatgatctatacctggcctcacaag

SEQ ID NO: 1795717 - DNA, 25 bp, Homo sapien
ttttggaccaccatagaccggtaga

SEQ ID NO: 1795718 - DNA, 25 bp, Homo sapien
ggaaacattagatggccggacccca

SEQ ID NO: 1795719 - DNA, 25 bp, Homo sapien
taccatctagtggaggccgtccagg

SEQ ID NO: 1795720 - DNA, 25 bp, Homo sapien
tgaacaactatggtccagtcagcca

SEQ ID NO: 1795721 - DNA, 25 bp, Homo sapien
taattctggcagacaaaagtgaaca

SEQ ID NO: 1795722 - DNA, 25 bp, Homo sapien
tccataggaagtctctgacaagctg

SEQ ID NO: 1795723 - DNA, 25 bp, Homo sapien
tctgcagcagcctaaagatatggat

SEQ ID NO: 1795724 - DNA, 25 bp, Homo sapien
caaacaaataagttttattggcatc

SEQ ID NO: 1795725 - DNA, 25 bp, Homo sapien
tcaaacaaataagttttattggcat

SEQ ID NO: 1795726 - DNA, 25 bp, Homo sapien
aaacaaataagttttattggcatct

SEQ ID NO: 1795727 - DNA, 25 bp, Homo sapien
aacaaataagttttattggcatcta

SEQ ID NO: 1795728 - DNA, 25 bp, Homo sapien
taagcacatgctaataataattcaa

SEQ ID NO: 1795729 - DNA, 25 bp, Homo sapien
gttatgatagaaagcttttgcaaaa

SEQ ID NO: 1795730 - DNA, 25 bp, Homo sapien
ccacatagttcattgttgttatgat

SEQ ID NO: 1795731 - DNA, 25 bp, Homo sapien
aataagcacatgctaataataattc

SEQ ID NO: 1795732 - DNA, 25 bp, Homo sapien
tctaggtcatcagaggtaggcaaga

SEQ ID NO: 1795733 - DNA, 25 bp, Homo sapien
taacttcaggcacgtgaccagtgag

SEQ ID NO: 1795734 - DNA, 25 bp, Homo sapien
tacccagagccctacaaaacacatg

SEQ ID NO: 1795735 - DNA, 25 bp, Homo sapien
cccaacagtgataagaagcttggca

SEQ ID NO: 1795736 - DNA, 25 bp, Homo sapien
ctgtggctataaacatatggctggt

SEQ ID NO: 1795737 - DNA, 25 bp, Homo sapien
cataggaaaaggagatagcccgata

SEQ ID NO: 1795738 - DNA, 25 bp, Homo sapien
caatttagtggttaactgtggctat

SEQ ID NO: 1795739 - DNA, 25 bp, Homo sapien
tacattgcctaatatctggtgagcc

SEQ ID NO: 1795740 - DNA, 25 bp, Homo sapien
tgtaaattatccactgccgctaagg

SEQ ID NO: 1795741 - DNA, 25 bp, Homo sapien
tcatgacatgctgtggattaaacct

SEQ ID NO: 1795742 - DNA, 25 bp, Homo sapien
gaagctgccaaaaccaaatcctaaa

SEQ ID NO: 1795743 - DNA, 25 bp, Homo sapien
gataaacacgttctccaatgtgtgg

SEQ ID NO: 1795744 - DNA, 25 bp, Homo sapien
tgatagtcacatcacactagggaga

SEQ ID NO: 1795745 - DNA, 25 bp, Homo sapien
tgacccttggtatgaccgcagcgat

SEQ ID NO: 1795746 - DNA, 25 bp, Homo sapien
taaccgatgtcctcataagcagaag

SEQ ID NO: 1795747 - DNA, 25 bp, Homo sapien
gctgtgtaaccaaccataggcatct

SEQ ID NO: 1795748 - DNA, 25 bp, Homo sapien
gatgtgagacttatgcagagaaaga

SEQ ID NO: 1795749 - DNA, 25 bp, Homo sapien
taatttgtatgtgagctccctcggc

SEQ ID NO: 1795750 - DNA, 25 bp, Homo sapien
tatagaatacgcatatgcacgcatg

SEQ ID NO: 1795751 - DNA, 25 bp, Homo sapien
tggagatgatcctcgctggaaagaa

SEQ ID NO: 1795752 - DNA, 25 bp, Homo sapien
tctcagccatgggtacatctgctct

SEQ ID NO: 1795753 - DNA, 25 bp, Homo sapien
ggccaatagcggacacatgcctgtc

SEQ ID NO: 1795754 - DNA, 25 bp, Homo sapien
gcagatggtctaaacaaagtagcta

SEQ ID NO: 1795755 - DNA, 25 bp, Homo sapien
caagcgactaagagcaatgggtact

SEQ ID NO: 1795756 - DNA, 25 bp, Homo sapien
gatgctacgctctctcttcacctag

SEQ ID NO: 1795757 - DNA, 25 bp, Homo sapien
tttcaagagctttacatgtactcag

SEQ ID NO: 1795758 - DNA, 25 bp, Homo sapien
tggcaacgtaagctccagatgctac

SEQ ID NO: 1795759 - DNA, 25 bp, Homo sapien
gaaaaatgatttgccctcaattcaa

SEQ ID NO: 1795760 - DNA, 25 bp, Homo sapien
caatgataaacatgtggtaacacac

SEQ ID NO: 1795761 - DNA, 25 bp, Homo sapien
tatgttgatgtgtaagcacgaagac

SEQ ID NO: 1795762 - DNA, 25 bp, Homo sapien
caaccctcaggcatctatatttgag

SEQ ID NO: 1795763 - DNA, 25 bp, Homo sapien
gaaacttggaactcttataatccga

SEQ ID NO: 1795764 - DNA, 25 bp, Homo sapien
ttcatagtatgaaaaggaactcagt

SEQ ID NO: 1795765 - DNA, 25 bp, Homo sapien
tacctgtttatattgcaacaaatca

SEQ ID NO: 1795766 - DNA, 25 bp, Homo sapien
caggtcaacatagcaataacgtagt

SEQ ID NO: 1795767 - DNA, 25 bp, Homo sapien
taaagtatacagtgaactcaacagg

SEQ ID NO: 1795768 - DNA, 25 bp, Homo sapien
caccaagtactgaagcacttggcta

SEQ ID NO: 1795769 - DNA, 25 bp, Homo sapien
tccttgaaggcggtaacacttacag

SEQ ID NO: 1795770 - DNA, 25 bp, Homo sapien
catcgcccaccacctttctaagttc

SEQ ID NO: 1795771 - DNA, 25 bp, Homo sapien
cattctttagtatcttccccatcgc

SEQ ID NO: 1795772 - DNA, 25 bp, Homo sapien
ttctcttcatatggagcatttcgca

SEQ ID NO: 1795773 - DNA, 25 bp, Homo sapien
ttttctcttcatatggagcatttcg

SEQ ID NO: 1795774 - DNA, 25 bp, Homo sapien
tcttttctcttcatatggagcattt

SEQ ID NO: 1795775 - DNA, 25 bp, Homo sapien
tctcttcatatggagcatttcgcac

SEQ ID NO: 1795776 - DNA, 25 bp, Homo sapien
cccacacaagggcactatggagcaa

SEQ ID NO: 1795777 - DNA, 25 bp, Homo sapien
aagtgtataccccacacaagggcac

SEQ ID NO: 1795778 - DNA, 25 bp, Homo sapien
caagggcactatggagcaaacccat

SEQ ID NO: 1795779 - DNA, 25 bp, Homo sapien
ggagcaaacccattaatgagtctct

SEQ ID NO: 1795780 - DNA, 25 bp, Homo sapien
aatttgacaaggaaagctcttggtt

SEQ ID NO: 1795781 - DNA, 25 bp, Homo sapien
atttgacaaggaaagctcttggttt

SEQ ID NO: 1795782 - DNA, 25 bp, Homo sapien
ggcctcttctgtagggtgattccac

SEQ ID NO: 1795783 - DNA, 25 bp, Homo sapien
gcggtgcgctctgtccaaaagtgtg

SEQ ID NO: 1795784 - DNA, 25 bp, Homo sapien
ctcttctgtagggtgattccacggg

SEQ ID NO: 1795785 - DNA, 25 bp, Homo sapien
gggcggtgcgctctgtccaaaagtg

SEQ ID NO: 1795786 - DNA, 25 bp, Homo sapien
taatacaggtatccatggtccacac

SEQ ID NO: 1795787 - DNA, 25 bp, Homo sapien
acctggattgctgggtaaagatgca

SEQ ID NO: 1795788 - DNA, 25 bp, Homo sapien
ctctattaggtcttgggaagggctc

SEQ ID NO: 1795789 - DNA, 25 bp, Homo sapien
gattaaacatatacaccacaggctg

SEQ ID NO: 1795790 - DNA, 25 bp, Homo sapien
ggacttggagttcctgaccattcag

SEQ ID NO: 1795791 - DNA, 25 bp, Homo sapien
cagtaaagaatttgcccctcatgag

SEQ ID NO: 1795792 - DNA, 25 bp, Homo sapien
cagttaaaggtagacttcgctctcg

SEQ ID NO: 1795793 - DNA, 25 bp, Homo sapien
cgctctcgtgaaaatgtgcgtgtga

SEQ ID NO: 1795794 - DNA, 25 bp, Homo sapien
aagaaaagtaactatgttatccaat

SEQ ID NO: 1795795 - DNA, 25 bp, Homo sapien
tgtggctacaaactacagaatgctc

SEQ ID NO: 1795796 - DNA, 25 bp, Homo sapien
catgaattttcagcttagcaactag

SEQ ID NO: 1795797 - DNA, 25 bp, Homo sapien
caactagtctaggtaatgattaact

SEQ ID NO: 1795798 - DNA, 25 bp, Homo sapien
tgcagcacacgactgcattcagcat

SEQ ID NO: 1795799 - DNA, 25 bp, Homo sapien
cactcaggggtatccacggctgcat

SEQ ID NO: 1795800 - DNA, 25 bp, Homo sapien
gggtatccacggctgcattcagcat

SEQ ID NO: 1795801 - DNA, 25 bp, Homo sapien
cgactgcattcagcatcacactcag

SEQ ID NO: 1795802 - DNA, 25 bp, Homo sapien
caaaactggcttcataggttcccaa

SEQ ID NO: 1795803 - DNA, 25 bp, Homo sapien
tattcactgagagctaggcatggtc

SEQ ID NO: 1795804 - DNA, 25 bp, Homo sapien
aattagctcatggatatacacagcc

SEQ ID NO: 1795805 - DNA, 25 bp, Homo sapien
taaaggactccacaataattagtgc

SEQ ID NO: 1795806 - DNA, 25 bp, Homo sapien
tgtaattactgtgaactagaaaatc

SEQ ID NO: 1795807 - DNA, 25 bp, Homo sapien
cacactgttagcctcatctctgtaa

SEQ ID NO: 1795808 - DNA, 25 bp, Homo sapien
ctgctgtcagctctgcactagatgc

SEQ ID NO: 1795809 - DNA, 25 bp, Homo sapien
tgctgtcagctctgcactagatgct

SEQ ID NO: 1795810 - DNA, 25 bp, Homo sapien
ttcccctgagggtgcactaggagtg

SEQ ID NO: 1795811 - DNA, 25 bp, Homo sapien
ctgccctttgcttaatccactcatg

SEQ ID NO: 1795812 - DNA, 25 bp, Homo sapien
cactcatgattatccccagctgagt

SEQ ID NO: 1795813 - DNA, 25 bp, Homo sapien
taatccactcatgattatccccagc

SEQ ID NO: 1795814 - DNA, 25 bp, Homo sapien
cttaactccctcgtcctcgagtggc

SEQ ID NO: 1795815 - DNA, 25 bp, Homo sapien
taaaaccagtgtagtgtcatgcaca

SEQ ID NO: 1795816 - DNA, 25 bp, Homo sapien
ttattgaaggaatgcctagaaggct

SEQ ID NO: 1795817 - DNA, 25 bp, Homo sapien
tattgaaggaatgcctagaaggctg

SEQ ID NO: 1795818 - DNA, 25 bp, Homo sapien
cacaggcacccgaaaattattgaag

SEQ ID NO: 1795819 - DNA, 25 bp, Homo sapien
ggcagaggatccctttttaacagct

SEQ ID NO: 1795820 - DNA, 25 bp, Homo sapien
ccattaatcggtagtttgagtagca

SEQ ID NO: 1795821 - DNA, 25 bp, Homo sapien
tccaccccaggtagacataggtcca

SEQ ID NO: 1795822 - DNA, 25 bp, Homo sapien
gaatgatgacaagttcactggcctg

SEQ ID NO: 1795823 - DNA, 25 bp, Homo sapien
cctggttctcagctgtcctcagtgt

SEQ ID NO: 1795824 - DNA, 25 bp, Homo sapien
gggcagacctgcagcccctggttct

SEQ ID NO: 1795825 - DNA, 25 bp, Homo sapien
cagggcagacctgcagcccctggtt

SEQ ID NO: 1795826 - DNA, 25 bp, Homo sapien
tcctcagtgtcccttgctccccacc

SEQ ID NO: 1795827 - DNA, 25 bp, Homo sapien
tgacaaacctccacaagcgatggtg

SEQ ID NO: 1795828 - DNA, 25 bp, Homo sapien
gaagctcaaacctacgccctatggt

SEQ ID NO: 1795829 - DNA, 25 bp, Homo sapien
tcaggtgcacgtcgcttatttcaag

SEQ ID NO: 1795830 - DNA, 25 bp, Homo sapien
caagatttgcccttcagtgatggaa

SEQ ID NO: 1795831 - DNA, 25 bp, Homo sapien
taaaaatgagactgttaacccactc

SEQ ID NO: 1795832 - DNA, 25 bp, Homo sapien
ttaactctgaaaagatagactcatt

SEQ ID NO: 1795833 - DNA, 25 bp, Homo sapien
ggtcactacaaccacttaagtggct

SEQ ID NO: 1795834 - DNA, 25 bp, Homo sapien
taatgaggtgtgcttttactgagcc

SEQ ID NO: 1795835 - DNA, 25 bp, Homo sapien
gggaaatcatctcgaaagggcctga

SEQ ID NO: 1795836 - DNA, 25 bp, Homo sapien
aaagggctcctttgcacccatgacc

SEQ ID NO: 1795837 - DNA, 25 bp, Homo sapien
tcaaatggaaggaaccgtctgcaag

SEQ ID NO: 1795838 - DNA, 25 bp, Homo sapien
taagatgaactcaacccggcaaagg

SEQ ID NO: 1795839 - DNA, 25 bp, Homo sapien
gacccctggaatatctaggacagga

SEQ ID NO: 1795840 - DNA, 25 bp, Homo sapien
agcccaagggacaagtgacccctgg

SEQ ID NO: 1795841 - DNA, 25 bp, Homo sapien
tgacatgacttagtcaaggaaatga

SEQ ID NO: 1795842 - DNA, 25 bp, Homo sapien
gccactcacttttctgggatgccag

SEQ ID NO: 1795843 - DNA, 25 bp, Homo sapien
tgcactttgacaccctgacactttg

SEQ ID NO: 1795844 - DNA, 25 bp, Homo sapien
tctgcactttgacaccctgacactt

SEQ ID NO: 1795845 - DNA, 25 bp, Homo sapien
tttgacaccctgacactttgacact

SEQ ID NO: 1795846 - DNA, 25 bp, Homo sapien
gacaccctgacactttgacactggc

SEQ ID NO: 1795847 - DNA, 25 bp, Homo sapien
gagccatttccataagtgttttctg

SEQ ID NO: 1795848 - DNA, 25 bp, Homo sapien
tgtttttagacacttatggcggcaa

SEQ ID NO: 1795849 - DNA, 25 bp, Homo sapien
acatcatttggcgtgaataatccaa

SEQ ID NO: 1795850 - DNA, 25 bp, Homo sapien
tacatgaactttgggaccatgatgg

SEQ ID NO: 1795851 - DNA, 25 bp, Homo sapien
gatgaaggcgtgtgattaagaagcc

SEQ ID NO: 1795852 - DNA, 25 bp, Homo sapien
gccctgccagtaatcagcaaagctg

SEQ ID NO: 1795853 - DNA, 25 bp, Homo sapien
tccacatgagtgatttgttccagca

SEQ ID NO: 1795854 - DNA, 25 bp, Homo sapien
tgaaggtcttatcagagctgccctg

SEQ ID NO: 1795855 - DNA, 25 bp, Homo sapien
caggtatgaccatctcaagctgtgg

SEQ ID NO: 1795856 - DNA, 25 bp, Homo sapien
ttcagcttggagttgagaaccaggt

SEQ ID NO: 1795857 - DNA, 25 bp, Homo sapien
aaaaagaaggccatccagtgctacc

SEQ ID NO: 1795858 - DNA, 25 bp, Homo sapien
gactaaaaggcttcagtggagcacg

SEQ ID NO: 1795859 - DNA, 25 bp, Homo sapien
gatccgatgtgatgcacattagaac

SEQ ID NO: 1795860 - DNA, 25 bp, Homo sapien
gaactttgaagcacgtctgtctcat

SEQ ID NO: 1795861 - DNA, 25 bp, Homo sapien
taacgcttccttaaacaagatccga

SEQ ID NO: 1795862 - DNA, 25 bp, Homo sapien
gaagctgccaggacttcattcatca

SEQ ID NO: 1795863 - DNA, 25 bp, Homo sapien
catcactggtactggatgagctaca

SEQ ID NO: 1795864 - DNA, 25 bp, Homo sapien
tttcaagagaccacagactacagca

SEQ ID NO: 1795865 - DNA, 25 bp, Homo sapien
ttggtaataacaggacagggaggct

SEQ ID NO: 1795866 - DNA, 25 bp, Homo sapien
ggtaatacaggaaggcatgcttgca

SEQ ID NO: 1795867 - DNA, 25 bp, Homo sapien
aattcttttggtttgatagaaatag

SEQ ID NO: 1795868 - DNA, 25 bp, Homo sapien
aggtgaaacgggtcacttctcatgt

SEQ ID NO: 1795869 - DNA, 25 bp, Homo sapien
ggtgaaacgggtcacttctcatgtt

SEQ ID NO: 1795870 - DNA, 25 bp, Homo sapien
gaattcttttggtttgatagaaata

SEQ ID NO: 1795871 - DNA, 25 bp, Homo sapien
gagaatttccaaacagcgacagaag

SEQ ID NO: 1795872 - DNA, 25 bp, Homo sapien
cctaggaccttcagcagacataatg

SEQ ID NO: 1795873 - DNA, 25 bp, Homo sapien
cccttgccacagttaatgcttcaga

SEQ ID NO: 1795874 - DNA, 25 bp, Homo sapien
gaaacctcatttggtagcatgccag

SEQ ID NO: 1795875 - DNA, 25 bp, Homo sapien
cccgaggtggaattcttgggctaca

SEQ ID NO: 1795876 - DNA, 25 bp, Homo sapien
cagatacctggcgtctcagaagagg

SEQ ID NO: 1795877 - DNA, 25 bp, Homo sapien
ttttgtctagtcgatgcagcccaag

SEQ ID NO: 1795878 - DNA, 25 bp, Homo sapien
tagaacatatgtcccatgagcaaca

SEQ ID NO: 1795879 - DNA, 25 bp, Homo sapien
tatatgttcctggacaattgtccct

SEQ ID NO: 1795880 - DNA, 25 bp, Homo sapien
ttatagatgcgaaccatggtgcctg

SEQ ID NO: 1795881 - DNA, 25 bp, Homo sapien
caatatttcttcacgtattttaagc

SEQ ID NO: 1795882 - DNA, 25 bp, Homo sapien
tgggactaccggagcgtgttgccac

SEQ ID NO: 1795883 - DNA, 25 bp, Homo sapien
gaacggagcctcctttgggatggca

SEQ ID NO: 1795884 - DNA, 25 bp, Homo sapien
tcagctttctgagtacggattccag

SEQ ID NO: 1795885 - DNA, 25 bp, Homo sapien
ggctctctgacgtgcagtatgcaat

SEQ ID NO: 1795886 - DNA, 25 bp, Homo sapien
tgtcactcattcgtactgtaaggct

SEQ ID NO: 1795887 - DNA, 25 bp, Homo sapien
ctgaagacgaaagacttcatattct

SEQ ID NO: 1795888 - DNA, 25 bp, Homo sapien
cttcgaagctccgttatcttccaag

SEQ ID NO: 1795889 - DNA, 25 bp, Homo sapien
gaagacgaaagacttcatattctgc

SEQ ID NO: 1795890 - DNA, 25 bp, Homo sapien
tcgaagctccgttatcttccaagtc

SEQ ID NO: 1795891 - DNA, 25 bp, Homo sapien
gattcaaatcagcaagtcaccctgg

SEQ ID NO: 1795892 - DNA, 25 bp, Homo sapien
gagagctcttaggtatgtccccaaa

SEQ ID NO: 1795893 - DNA, 25 bp, Homo sapien
gtacctagggaaacacgctggctgc

SEQ ID NO: 1795894 - DNA, 25 bp, Homo sapien
catggatggtagacaagacggcagc

SEQ ID NO: 1795895 - DNA, 25 bp, Homo sapien
catgggcctcatagactcacagact

SEQ ID NO: 1795896 - DNA, 25 bp, Homo sapien
catggacccatggaaaaacaggagc

SEQ ID NO: 1795897 - DNA, 25 bp, Homo sapien
tccacaagagggatacctgaggctg

SEQ ID NO: 1795898 - DNA, 25 bp, Homo sapien
tgccactgagtgctagactgacgag

SEQ ID NO: 1795899 - DNA, 25 bp, Homo sapien
ggacaggcggggcattgaagggagc

SEQ ID NO: 1795900 - DNA, 25 bp, Homo sapien
agaggacaggcggggcattgaaggg

SEQ ID NO: 1795901 - DNA, 25 bp, Homo sapien
gaggacaggcggggcattgaaggga

SEQ ID NO: 1795902 - DNA, 25 bp, Homo sapien
gacaggcggggcattgaagggagca

SEQ ID NO: 1795903 - DNA, 25 bp, Homo sapien
gactgtgtgctcttggagatcggaa

SEQ ID NO: 1795904 - DNA, 25 bp, Homo sapien
cagaggacaggttcaaagtctatgc

SEQ ID NO: 1795905 - DNA, 25 bp, Homo sapien
cagtgaagcgattagatggcatgag

SEQ ID NO: 1795906 - DNA, 25 bp, Homo sapien
aagtctatgcagaagaaacctggac

SEQ ID NO: 1795907 - DNA, 25 bp, Homo sapien
tctgtccaaacacaaccaccaagag

SEQ ID NO: 1795908 - DNA, 25 bp, Homo sapien
tgtgatcagcacatcagactgtgtc

SEQ ID NO: 1795909 - DNA, 25 bp, Homo sapien
tcaggccgctctgatgatggtgctg

SEQ ID NO: 1795910 - DNA, 25 bp, Homo sapien
caagagggctcaggccgctctgatg

SEQ ID NO: 1795911 - DNA, 25 bp, Homo sapien
gcctgccacaaacgtgtgaagtcca

SEQ ID NO: 1795912 - DNA, 25 bp, Homo sapien
aagctgcctgccacaaacgtgtgaa

SEQ ID NO: 1795913 - DNA, 25 bp, Homo sapien
cctgccacaaacgtgtgaagtccac

SEQ ID NO: 1795914 - DNA, 25 bp, Homo sapien
gctgcctgccacaaacgtgtgaagt

SEQ ID NO: 1795915 - DNA, 25 bp, Homo sapien
tatggtcccgtggaagcaccttgaa

SEQ ID NO: 1795916 - DNA, 25 bp, Homo sapien
tccaggaagtgagttgatatctcca

SEQ ID NO: 1795917 - DNA, 25 bp, Homo sapien
gagccataaagattaaagtccagga

SEQ ID NO: 1795918 - DNA, 25 bp, Homo sapien
gatttggaagaagctccaggcttgc

SEQ ID NO: 1795919 - DNA, 25 bp, Homo sapien
tgtcattgcccttcaggattggtgt

SEQ ID NO: 1795920 - DNA, 25 bp, Homo sapien
gaaaatgcttagcttggcaaccaac

SEQ ID NO: 1795921 - DNA, 25 bp, Homo sapien
cacaggccttagcaaaagtctagga

SEQ ID NO: 1795922 - DNA, 25 bp, Homo sapien
aactccaatgacaagcacaggcttt

SEQ ID NO: 1795923 - DNA, 25 bp, Homo sapien
cacttctcaagaccaagctaaatgc

SEQ ID NO: 1795924 - DNA, 25 bp, Homo sapien
gctaaatgccatactcttaacatga

SEQ ID NO: 1795925 - DNA, 25 bp, Homo sapien
gccatactcttaacatgacactaga

SEQ ID NO: 1795926 - DNA, 25 bp, Homo sapien
taacatgacactagaggctgggcgc

SEQ ID NO: 1795927 - DNA, 25 bp, Homo sapien
gcatttctactgcttaattccccat

SEQ ID NO: 1795928 - DNA, 25 bp, Homo sapien
gaagattgcacaggctcaagtccag

SEQ ID NO: 1795929 - DNA, 25 bp, Homo sapien
gcaatggttacttttactaactgca

SEQ ID NO: 1795930 - DNA, 25 bp, Homo sapien
ccatcatggtaacaggctactacac

SEQ ID NO: 1795931 - DNA, 25 bp, Homo sapien
taagaccaagaggtgagagtcaaca

SEQ ID NO: 1795932 - DNA, 25 bp, Homo sapien
aaccagaagggaattacagaagaat

SEQ ID NO: 1795933 - DNA, 25 bp, Homo sapien
aacttgacagaaggctaaggaacca

SEQ ID NO: 1795934 - DNA, 25 bp, Homo sapien
caaatttctaccccttgcaaagaca

SEQ ID NO: 1795935 - DNA, 25 bp, Homo sapien
aactataacgggacttggagtagtg

SEQ ID NO: 1795936 - DNA, 25 bp, Homo sapien
tagtgggggattgactaggttagta

SEQ ID NO: 1795937 - DNA, 25 bp, Homo sapien
actataacgggacttggagtagtgg

SEQ ID NO: 1795938 - DNA, 25 bp, Homo sapien
ttgactaggttagtaagaaagacaa

SEQ ID NO: 1795939 - DNA, 25 bp, Homo sapien
aaatacaatgatctaccccatctca

SEQ ID NO: 1795940 - DNA, 25 bp, Homo sapien
aatacaatgatctaccccatctcag

SEQ ID NO: 1795941 - DNA, 25 bp, Homo sapien
aaaatacaatgatctaccccatctc

SEQ ID NO: 1795942 - DNA, 25 bp, Homo sapien
atacaatgatctaccccatctcagg

SEQ ID NO: 1795943 - DNA, 25 bp, Homo sapien
cctactgccaaggactgggtgaagt

SEQ ID NO: 1795944 - DNA, 25 bp, Homo sapien
cattgtcaggtgaaccagtgtgcaa

SEQ ID NO: 1795945 - DNA, 25 bp, Homo sapien
agtgtgcaagcccacagtacgcagc

SEQ ID NO: 1795946 - DNA, 25 bp, Homo sapien
tagtcaatctagaagcctactgcca

SEQ ID NO: 1795947 - DNA, 25 bp, Homo sapien
ggaggacacttagtgtaatcattca

SEQ ID NO: 1795948 - DNA, 25 bp, Homo sapien
acagaggaatgtggaggacacttag

SEQ ID NO: 1795949 - DNA, 25 bp, Homo sapien
attcatccagaatgagctggctgaa

SEQ ID NO: 1795950 - DNA, 25 bp, Homo sapien
tccagaatgagctggctgaaggtat

SEQ ID NO: 1795951 - DNA, 25 bp, Homo sapien
aaagtttcacaaagctagagtctat

SEQ ID NO: 1795952 - DNA, 25 bp, Homo sapien
gccagaactttggatgtagccagta

SEQ ID NO: 1795953 - DNA, 25 bp, Homo sapien
tctcggggtctgttcgttaataaga

SEQ ID NO: 1795954 - DNA, 25 bp, Homo sapien
gagtctatatacacatccacaaact

SEQ ID NO: 1795955 - DNA, 25 bp, Homo sapien
ggatagacccatctgcggcaaggaa

SEQ ID NO: 1795956 - DNA, 25 bp, Homo sapien
gtctttgaattcagcgggactcctt

SEQ ID NO: 1795957 - DNA, 25 bp, Homo sapien
tggtcgtctttgaattcagcgggac

SEQ ID NO: 1795958 - DNA, 25 bp, Homo sapien
atgaatggatagacccatctgcggc

SEQ ID NO: 1795959 - DNA, 25 bp, Homo sapien
gcgggggctggatcggggacagcaa

SEQ ID NO: 1795960 - DNA, 25 bp, Homo sapien
agggcgggggctggatcggggacag

SEQ ID NO: 1795961 - DNA, 25 bp, Homo sapien
tggatcggggacagcaaacagaacg

SEQ ID NO: 1795962 - DNA, 25 bp, Homo sapien
ggctggatcggggacagcaaacaga

SEQ ID NO: 1795963 - DNA, 25 bp, Homo sapien
aggaaaccctccgggtgggcagatg

SEQ ID NO: 1795964 - DNA, 25 bp, Homo sapien
tccatgtagtgtggcatttacagca

SEQ ID NO: 1795965 - DNA, 25 bp, Homo sapien
tcttcatttgcctttagcctgggct

SEQ ID NO: 1795966 - DNA, 25 bp, Homo sapien
agaaaactagaatcgtctgcctctg

SEQ ID NO: 1795967 - DNA, 25 bp, Homo sapien
tgattggatgagtcagattcccaaa

SEQ ID NO: 1795968 - DNA, 25 bp, Homo sapien
gaggttagtggtcagtaggctttac

SEQ ID NO: 1795969 - DNA, 25 bp, Homo sapien
cacagcacatttaacaagcacgcaa

SEQ ID NO: 1795970 - DNA, 25 bp, Homo sapien
ggtcttgggagcaacacagcacatt

SEQ ID NO: 1795971 - DNA, 25 bp, Homo sapien
caagcacgcaaagtgagtccatgaa

SEQ ID NO: 1795972 - DNA, 25 bp, Homo sapien
cagtaagaccgtggcctaaattaca

SEQ ID NO: 1795973 - DNA, 25 bp, Homo sapien
cagttgcatcagtaagaccgtggcc

SEQ ID NO: 1795974 - DNA, 25 bp, Homo sapien
taagaacagttgcatcagtaagacc

SEQ ID NO: 1795975 - DNA, 25 bp, Homo sapien
ctaaattaagaacagttgcatcagt

SEQ ID NO: 1795976 - DNA, 25 bp, Homo sapien
caggatgactcagaactcagggagc

SEQ ID NO: 1795977 - DNA, 25 bp, Homo sapien
gagtaggcaacacctctggagacct

SEQ ID NO: 1795978 - DNA, 25 bp, Homo sapien
catctttgtacagttcccggaggga

SEQ ID NO: 1795979 - DNA, 25 bp, Homo sapien
tccccagcgttttgatgagcactcg

SEQ ID NO: 1795980 - DNA, 25 bp, Homo sapien
gatcgctgccaatcgcatgtgtgga

SEQ ID NO: 1795981 - DNA, 25 bp, Homo sapien
gggaggatccctgcacatctgtatt

SEQ ID NO: 1795982 - DNA, 25 bp, Homo sapien
tccatcagagcgactgtcaaagtag

SEQ ID NO: 1795983 - DNA, 25 bp, Homo sapien
tgagtgactcgctgctggactcggc

SEQ ID NO: 1795984 - DNA, 25 bp, Homo sapien
gcacacgtagtatttgcagatgttt

SEQ ID NO: 1795985 - DNA, 25 bp, Homo sapien
cttgtggtaacgaaggcatgatgcc

SEQ ID NO: 1795986 - DNA, 25 bp, Homo sapien
cagggctccaactgttcgataaggg

SEQ ID NO: 1795987 - DNA, 25 bp, Homo sapien
taattgagagggcactggacattgc

SEQ ID NO: 1795988 - DNA, 25 bp, Homo sapien
gggtcgttgacactggacgttcttg

SEQ ID NO: 1795989 - DNA, 25 bp, Homo sapien
gcctttgccgttcaccccgatgctg

SEQ ID NO: 1795990 - DNA, 25 bp, Homo sapien
gccttgccgttcaccccggtgctgg

SEQ ID NO: 1795991 - DNA, 25 bp, Homo sapien
agtccctaccaagcgctggtcttgg

SEQ ID NO: 1795992 - DNA, 25 bp, Homo sapien
ctgaacatacctaggggactttgcc

SEQ ID NO: 1795993 - DNA, 25 bp, Homo sapien
tgaacatacctaggggactttgcca

SEQ ID NO: 1795994 - DNA, 25 bp, Homo sapien
gaagcaaaataacatcccggtcaga

SEQ ID NO: 1795995 - DNA, 25 bp, Homo sapien
aagcaaaataacatcccggtcagac

SEQ ID NO: 1795996 - DNA, 25 bp, Homo sapien
tctttcttgggatgctctggaacag

SEQ ID NO: 1795997 - DNA, 25 bp, Homo sapien
tggaaaaggtagacatctccaaagg

SEQ ID NO: 1795998 - DNA, 25 bp, Homo sapien
tctggaacagactgcactatgctgt

SEQ ID NO: 1795999 - DNA, 25 bp, Homo sapien
gggcactgctctgatccatggaatt

SEQ ID NO: 1796000 - DNA, 25 bp, Homo sapien
tttgcaaaaagggatgcacaagcag

SEQ ID NO: 1796001 - DNA, 25 bp, Homo sapien
cagcagtgacccagttttctagatc

SEQ ID NO: 1796002 - DNA, 25 bp, Homo sapien
aaagggatgcacaagcagagtgtac

SEQ ID NO: 1796003 - DNA, 25 bp, Homo sapien
caagcagagtgtacagcagtgaccc

SEQ ID NO: 1796004 - DNA, 25 bp, Homo sapien
ttcctgttctttgggtcgctcacca

SEQ ID NO: 1796005 - DNA, 25 bp, Homo sapien
cctgttctttgggtcgctcaccacg

SEQ ID NO: 1796006 - DNA, 25 bp, Homo sapien
tctttgggtcgctcaccacggacag

SEQ ID NO: 1796007 - DNA, 25 bp, Homo sapien
tgttctttgggtcgctcaccacgga

SEQ ID NO: 1796008 - DNA, 25 bp, Homo sapien
caggctggcgttgtccctgagagca

SEQ ID NO: 1796009 - DNA, 25 bp, Homo sapien
gaaataccaccaagatgacagcatg

SEQ ID NO: 1796010 - DNA, 25 bp, Homo sapien
agtatatacatagagccgccaaagg

SEQ ID NO: 1796011 - DNA, 25 bp, Homo sapien
tatgaatatggaaccgcagcagaga

SEQ ID NO: 1796012 - DNA, 25 bp, Homo sapien
cttcaagacagaggcattgctttcc

SEQ ID NO: 1796013 - DNA, 25 bp, Homo sapien
gaaaaatgcaagaacctgctcacta

SEQ ID NO: 1796014 - DNA, 25 bp, Homo sapien
acacagatcccctcgtggtaactca

SEQ ID NO: 1796015 - DNA, 25 bp, Homo sapien
tctatagtgaatcacccggattccc

SEQ ID NO: 1796016 - DNA, 25 bp, Homo sapien
tattcatgtaagatccccgacttgt

SEQ ID NO: 1796017 - DNA, 25 bp, Homo sapien
acacagactcgtgaggatgagatgc

SEQ ID NO: 1796018 - DNA, 25 bp, Homo sapien
gcctgaggacttctgtgaccaatcc

SEQ ID NO: 1796019 - DNA, 25 bp, Homo sapien
ggcagctcgacctgctctgctgaga

SEQ ID NO: 1796020 - DNA, 25 bp, Homo sapien
gctctgaacactctgagacactcgg

SEQ ID NO: 1796021 - DNA, 25 bp, Homo sapien
tcatctcaggatagacaggctgtgg

SEQ ID NO: 1796022 - DNA, 25 bp, Homo sapien
caagctgggcatcccttcgactacg

SEQ ID NO: 1796023 - DNA, 25 bp, Homo sapien
aagacctgaaaactccaagctgggc

SEQ ID NO: 1796024 - DNA, 25 bp, Homo sapien
cagccggtatgttacaactgcgata

SEQ ID NO: 1796025 - DNA, 25 bp, Homo sapien
tacaactgcgatagtgcctttttat

SEQ ID NO: 1796026 - DNA, 25 bp, Homo sapien
cgtatgtagctcagccggtatgtta

SEQ ID NO: 1796027 - DNA, 25 bp, Homo sapien
tctccacccacgtacttcgaagaaa

SEQ ID NO: 1796028 - DNA, 25 bp, Homo sapien
aatgaaagctgcatcatcctgcccc

SEQ ID NO: 1796029 - DNA, 25 bp, Homo sapien
caaaggcgatctggcgtgtggatgg

SEQ ID NO: 1796030 - DNA, 25 bp, Homo sapien
gtccacattggacatgctcaaatga

SEQ ID NO: 1796031 - DNA, 25 bp, Homo sapien
gatggcggtgtgatctggtccacat

SEQ ID NO: 1796032 - DNA, 25 bp, Homo sapien
caaaagggcgatcaaggacagcgcc

SEQ ID NO: 1796033 - DNA, 25 bp, Homo sapien
taaacccttcatgacagtcgagaag

SEQ ID NO: 1796034 - DNA, 25 bp, Homo sapien
gcagggcacatttgtgcacagcaca

SEQ ID NO: 1796035 - DNA, 25 bp, Homo sapien
caaagccatggatgacagcagtggc

SEQ ID NO: 1796036 - DNA, 25 bp, Homo sapien
tccccaccttgtaggctggccagat

SEQ ID NO: 1796037 - DNA, 25 bp, Homo sapien
gctggcggctgcaaggagactcttt

SEQ ID NO: 1796038 - DNA, 25 bp, Homo sapien
agcgcatcctgaacagatccatgtg

SEQ ID NO: 1796039 - DNA, 25 bp, Homo sapien
agacaagatgcccagcctgccgagg

SEQ ID NO: 1796040 - DNA, 25 bp, Homo sapien
tccggagagcagagtcatctctaga

SEQ ID NO: 1796041 - DNA, 25 bp, Homo sapien
tgagttatagaaggtctcttctcct

SEQ ID NO: 1796042 - DNA, 25 bp, Homo sapien
tgtgtccagcccttttaacgaagaa

SEQ ID NO: 1796043 - DNA, 25 bp, Homo sapien
tcttgtttctccctcgctgggtcag

SEQ ID NO: 1796044 - DNA, 25 bp, Homo sapien
ccatggctgccacttgaatcaaata

SEQ ID NO: 1796045 - DNA, 25 bp, Homo sapien
gagttactggagttttgaggtagct

SEQ ID NO: 1796046 - DNA, 25 bp, Homo sapien
ctcactggagttactggagttttga

SEQ ID NO: 1796047 - DNA, 25 bp, Homo sapien
gagttttgaggtagctgagttccag

SEQ ID NO: 1796048 - DNA, 25 bp, Homo sapien
gattttgaattagggtgactcactg

SEQ ID NO: 1796049 - DNA, 25 bp, Homo sapien
cactgttgggctgttatatgatgca

SEQ ID NO: 1796050 - DNA, 25 bp, Homo sapien
tggcaagccaaagtgtcctctaaaa

SEQ ID NO: 1796051 - DNA, 25 bp, Homo sapien
catccagacgttcgttatgaaaagc

SEQ ID NO: 1796052 - DNA, 25 bp, Homo sapien
tgcttttggatcaaatggcttgtaa

SEQ ID NO: 1796053 - DNA, 25 bp, Homo sapien
gcttttggatcaaatggcttgtaat

SEQ ID NO: 1796054 - DNA, 25 bp, Homo sapien
cttttggatcaaatggcttgtaatt

SEQ ID NO: 1796055 - DNA, 25 bp, Homo sapien
tggatttcccatgcattgtctcggg

SEQ ID NO: 1796056 - DNA, 25 bp, Homo sapien
tgtgctctggcttgatccctacagt

SEQ ID NO: 1796057 - DNA, 25 bp, Homo sapien
agtaactccgtgattgtcctgaaag

SEQ ID NO: 1796058 - DNA, 25 bp, Homo sapien
gggaacaccgtctactgttgaacca

SEQ ID NO: 1796059 - DNA, 25 bp, Homo sapien
gtcatctactaattttcgaagctgt

SEQ ID NO: 1796060 - DNA, 25 bp, Homo sapien
tgtaggccataatggctgggttcca

SEQ ID NO: 1796061 - DNA, 25 bp, Homo sapien
tatattcatatggtgcagggatgca

SEQ ID NO: 1796062 - DNA, 25 bp, Homo sapien
cagggatgcaatactcaacattgtc

SEQ ID NO: 1796063 - DNA, 25 bp, Homo sapien
cgtgagctgcacgtcataaacattt

SEQ ID NO: 1796064 - DNA, 25 bp, Homo sapien
catttagtggaaagacttctatttc

SEQ ID NO: 1796065 - DNA, 25 bp, Homo sapien
acactcccagtcttcgtgagctgca

SEQ ID NO: 1796066 - DNA, 25 bp, Homo sapien
cagtcttcgtgagctgcacgtcata

SEQ ID NO: 1796067 - DNA, 25 bp, Homo sapien
atacgccaggccatcgggaagaacg

SEQ ID NO: 1796068 - DNA, 25 bp, Homo sapien
gaacgtcgcttataaatatccggct

SEQ ID NO: 1796069 - DNA, 25 bp, Homo sapien
aatatccggctgagatgctgacgct

SEQ ID NO: 1796070 - DNA, 25 bp, Homo sapien
catccacctgcgctgtaactgcaaa

SEQ ID NO: 1796071 - DNA, 25 bp, Homo sapien
ttttgtgtccggaggccgggcaatc

SEQ ID NO: 1796072 - DNA, 25 bp, Homo sapien
gggcaatcagagtgagtccgacgct

SEQ ID NO: 1796073 - DNA, 25 bp, Homo sapien
tgcttaaggtcaagatcagacacag

SEQ ID NO: 1796074 - DNA, 25 bp, Homo sapien
acagcttccccatttaaggtcatga

SEQ ID NO: 1796075 - DNA, 25 bp, Homo sapien
ttaagaaggaagacagaacaaagcc

SEQ ID NO: 1796076 - DNA, 25 bp, Homo sapien
taagaaggaagacagaacaaagcct

SEQ ID NO: 1796077 - DNA, 25 bp, Homo sapien
gaaggaagacagaacaaagccttac

SEQ ID NO: 1796078 - DNA, 25 bp, Homo sapien
aagaaggaagacagaacaaagcctt

SEQ ID NO: 1796079 - DNA, 25 bp, Homo sapien
gcttcccagtgtaagcgatttgcca

SEQ ID NO: 1796080 - DNA, 25 bp, Homo sapien
gcacgggcccagcaataaacgaggt

SEQ ID NO: 1796081 - DNA, 25 bp, Homo sapien
catcacaggcatagtggagtgaagc

SEQ ID NO: 1796082 - DNA, 25 bp, Homo sapien
cgatttgccaaatggaacatggtgt

SEQ ID NO: 1796083 - DNA, 25 bp, Homo sapien
tggtaagcctgtgttggatttacat

SEQ ID NO: 1796084 - DNA, 25 bp, Homo sapien
taagcctgtgttggatttacatcgt

SEQ ID NO: 1796085 - DNA, 25 bp, Homo sapien
gtaagcctgtgttggatttacatcg

SEQ ID NO: 1796086 - DNA, 25 bp, Homo sapien
ggtaagcctgtgttggatttacatc

SEQ ID NO: 1796087 - DNA, 25 bp, Homo sapien
ctgcagcgctgagatcaaacacaaa

SEQ ID NO: 1796088 - DNA, 25 bp, Homo sapien
gcgctgagatcaaacacaaaccctt

SEQ ID NO: 1796089 - DNA, 25 bp, Homo sapien
tgagatcaaacacaaacccttctag

SEQ ID NO: 1796090 - DNA, 25 bp, Homo sapien
caaacacaaacccttctagaaactg

SEQ ID NO: 1796091 - DNA, 25 bp, Homo sapien
ccacactttagtggagacggcttcc

SEQ ID NO: 1796092 - DNA, 25 bp, Homo sapien
caggatgttaatccatctacctcac

SEQ ID NO: 1796093 - DNA, 25 bp, Homo sapien
tcctctttgccatggggtgtcccct

SEQ ID NO: 1796094 - DNA, 25 bp, Homo sapien
tgaggaccacactttagtggagacg

SEQ ID NO: 1796095 - DNA, 25 bp, Homo sapien
caactgtgttgggagcggaactaac

SEQ ID NO: 1796096 - DNA, 25 bp, Homo sapien
tacaactcgtcagctgcatacccaa

SEQ ID NO: 1796097 - DNA, 25 bp, Homo sapien
caaaatgagcctgacggtattggta

SEQ ID NO: 1796098 - DNA, 25 bp, Homo sapien
gtatctgccaccgtgagcttcccaa

SEQ ID NO: 1796099 - DNA, 25 bp, Homo sapien
cgtgcttcaatatgcggactgagga

SEQ ID NO: 1796100 - DNA, 25 bp, Homo sapien
taatactctcatatccaaagggtcc

SEQ ID NO: 1796101 - DNA, 25 bp, Homo sapien
tcagccacaatgaggacgcagcgtt

SEQ ID NO: 1796102 - DNA, 25 bp, Homo sapien
cagtcaccgcatcggaaaaagccgt

SEQ ID NO: 1796103 - DNA, 25 bp, Homo sapien
gacaggtagggaagagttcccctgc

SEQ ID NO: 1796104 - DNA, 25 bp, Homo sapien
caggtagggaagagttcccctgcct

SEQ ID NO: 1796105 - DNA, 25 bp, Homo sapien
cagctcctgattgtaaggacaggta

SEQ ID NO: 1796106 - DNA, 25 bp, Homo sapien
gcagctcctgattgtaaggacaggt

SEQ ID NO: 1796107 - DNA, 25 bp, Homo sapien
tgttaaagggacatcctgggtacca

SEQ ID NO: 1796108 - DNA, 25 bp, Homo sapien
aagtcactggcaaccccagatcctt

SEQ ID NO: 1796109 - DNA, 25 bp, Homo sapien
ctggcccattagcaccactgtcagc

SEQ ID NO: 1796110 - DNA, 25 bp, Homo sapien
tgggaaacctgatccagagtgccat

SEQ ID NO: 1796111 - DNA, 25 bp, Homo sapien
tgtctgactccttttcagacctgtt

SEQ ID NO: 1796112 - DNA, 25 bp, Homo sapien
aacctgatccagagtgccatctgtc

SEQ ID NO: 1796113 - DNA, 25 bp, Homo sapien
tgtgatatcagggacgttgctgaaa

SEQ ID NO: 1796114 - DNA, 25 bp, Homo sapien
ggccagcgaaggcagctgagcattt

SEQ ID NO: 1796115 - DNA, 25 bp, Homo sapien
aaaataacttgcatcctgggacata

SEQ ID NO: 1796116 - DNA, 25 bp, Homo sapien
gatgctctaggatccactgcttcat

SEQ ID NO: 1796117 - DNA, 25 bp, Homo sapien
cattagatatgatattgggttccca

SEQ ID NO: 1796118 - DNA, 25 bp, Homo sapien
acagcagcaccggtgattgggggaa

SEQ ID NO: 1796119 - DNA, 25 bp, Homo sapien
ctccacagcagcaccggtgattggg

SEQ ID NO: 1796120 - DNA, 25 bp, Homo sapien
tcctccacagcagcaccggtgattg

SEQ ID NO: 1796121 - DNA, 25 bp, Homo sapien
agcagcaccggtgattgggggaagc

SEQ ID NO: 1796122 - DNA, 25 bp, Homo sapien
tcacatctaagtcggctgttgggag

SEQ ID NO: 1796123 - DNA, 25 bp, Homo sapien
gagatgtgtaagacacacgttgtct

SEQ ID NO: 1796124 - DNA, 25 bp, Homo sapien
ttcaaagaaacctgctccctctggg

SEQ ID NO: 1796125 - DNA, 25 bp, Homo sapien
tccctctgggagaacggatcacatc

SEQ ID NO: 1796126 - DNA, 25 bp, Homo sapien
caaatggcctttgagactccaacaa

SEQ ID NO: 1796127 - DNA, 25 bp, Homo sapien
agatcaaatggcctttgagactcca

SEQ ID NO: 1796128 - DNA, 25 bp, Homo sapien
agcacagtcatttcaaacaagtcca

SEQ ID NO: 1796129 - DNA, 25 bp, Homo sapien
aagtccacaaacttgcctccaagtc

SEQ ID NO: 1796130 - DNA, 25 bp, Homo sapien
tactggacacacagcttacaggtga

SEQ ID NO: 1796131 - DNA, 25 bp, Homo sapien
ctggaggtgagttcagcagcccctg

SEQ ID NO: 1796132 - DNA, 25 bp, Homo sapien
agcagcccctgttgcctactggaca

SEQ ID NO: 1796133 - DNA, 25 bp, Homo sapien
gtgagttcagcagcccctgttgcct

SEQ ID NO: 1796134 - DNA, 25 bp, Homo sapien
gcttaggacgatcaagcagctcgcc

SEQ ID NO: 1796135 - DNA, 25 bp, Homo sapien
gcctcctcttgatgacagtttgtga

SEQ ID NO: 1796136 - DNA, 25 bp, Homo sapien
tctaacctgggttcagtgcaatact

SEQ ID NO: 1796137 - DNA, 25 bp, Homo sapien
cctctttgacggtctttgaaggaca

SEQ ID NO: 1796138 - DNA, 25 bp, Homo sapien
aattacagagtcattgcctagggct

SEQ ID NO: 1796139 - DNA, 25 bp, Homo sapien
tagggctaaccctctgcagtcaagg

SEQ ID NO: 1796140 - DNA, 25 bp, Homo sapien
tctccattgtcacatcagctgttag

SEQ ID NO: 1796141 - DNA, 25 bp, Homo sapien
gttagatgtatctttggacctgaaa

SEQ ID NO: 1796142 - DNA, 25 bp, Homo sapien
ggcctctccctgatagtatccgctg

SEQ ID NO: 1796143 - DNA, 25 bp, Homo sapien
agggcaccaagtgtctccgtctgtg

SEQ ID NO: 1796144 - DNA, 25 bp, Homo sapien
caagggcaccaagtgtctccgtctg

SEQ ID NO: 1796145 - DNA, 25 bp, Homo sapien
tggaaaataatgcacgggcctctcc

SEQ ID NO: 1796146 - DNA, 25 bp, Homo sapien
ctgcacagtgcagtgatctgctcag

SEQ ID NO: 1796147 - DNA, 25 bp, Homo sapien
gccgttggcctgactgtcgttaaaa

SEQ ID NO: 1796148 - DNA, 25 bp, Homo sapien
cacagtgcagtgatctgctcagcac

SEQ ID NO: 1796149 - DNA, 25 bp, Homo sapien
tgactgtcgttaaaactcctgcaca

SEQ ID NO: 1796150 - DNA, 25 bp, Homo sapien
gaggaggatcctgattctcccgcgg

SEQ ID NO: 1796151 - DNA, 25 bp, Homo sapien
ggatcctgattctcccgcggtcctt

SEQ ID NO: 1796152 - DNA, 25 bp, Homo sapien
ttgcggaggcggtctgcatcagaca

SEQ ID NO: 1796153 - DNA, 25 bp, Homo sapien
atgactttgcggaggcggtctgcat

SEQ ID NO: 1796154 - DNA, 25 bp, Homo sapien
cctctgcttaggtaagtgtcttggt

SEQ ID NO: 1796155 - DNA, 25 bp, Homo sapien
tcattccctctgcttaggtaagtgt

SEQ ID NO: 1796156 - DNA, 25 bp, Homo sapien
ctttacagctcgatcattccctctg

SEQ ID NO: 1796157 - DNA, 25 bp, Homo sapien
tttacagctcgatcattccctctgc

SEQ ID NO: 1796158 - DNA, 25 bp, Homo sapien
ggctccaagtataattcaaagaggc

SEQ ID NO: 1796159 - DNA, 25 bp, Homo sapien
ctccaagtataattcaaagaggcag

SEQ ID NO: 1796160 - DNA, 25 bp, Homo sapien
agtggctccaagtataattcaaaga

SEQ ID NO: 1796161 - DNA, 25 bp, Homo sapien
ctgaagtggctccaagtataattca

SEQ ID NO: 1796162 - DNA, 25 bp, Homo sapien
gatcactggacagaaggaaggtgat

SEQ ID NO: 1796163 - DNA, 25 bp, Homo sapien
tgtggatcactggacagaaggaagg

SEQ ID NO: 1796164 - DNA, 25 bp, Homo sapien
atcactggacagaaggaaggtgatt

SEQ ID NO: 1796165 - DNA, 25 bp, Homo sapien
tggatcactggacagaaggaaggtg

SEQ ID NO: 1796166 - DNA, 25 bp, Homo sapien
tagggtgttaaagtcagatgatgct

SEQ ID NO: 1796167 - DNA, 25 bp, Homo sapien
tctagggtgttaaagtcagatgatg

SEQ ID NO: 1796168 - DNA, 25 bp, Homo sapien
gtttctagggtgttaaagtcagatg

SEQ ID NO: 1796169 - DNA, 25 bp, Homo sapien
ggtgttaaagtcagatgatgctgaa

SEQ ID NO: 1796170 - DNA, 25 bp, Homo sapien
gcacagaatccactgtacagtttaa

SEQ ID NO: 1796171 - DNA, 25 bp, Homo sapien
actgtacagtttaaagtggtccgcg

SEQ ID NO: 1796172 - DNA, 25 bp, Homo sapien
ctgtacagtttaaagtggtccgcgt

SEQ ID NO: 1796173 - DNA, 25 bp, Homo sapien
tgtacagtttaaagtggtccgcgta

SEQ ID NO: 1796174 - DNA, 25 bp, Homo sapien
taggactccagcgtggaggaatgct

SEQ ID NO: 1796175 - DNA, 25 bp, Homo sapien
cttgagcactctctgaaccggcttg

SEQ ID NO: 1796176 - DNA, 25 bp, Homo sapien
agcagcgggtacttgagcactctct

SEQ ID NO: 1796177 - DNA, 25 bp, Homo sapien
ttccgggcgtccagaaaagccttga

SEQ ID NO: 1796178 - DNA, 25 bp, Homo sapien
tgtgcaggccctcgcccggaggtgc

SEQ ID NO: 1796179 - DNA, 25 bp, Homo sapien
tgaaacctaagattaaccatcgcag

SEQ ID NO: 1796180 - DNA, 25 bp, Homo sapien
tcgcagaactgaaaagtgacttagg

SEQ ID NO: 1796181 - DNA, 25 bp, Homo sapien
tgacttaggacgtgccactaggcgg

SEQ ID NO: 1796182 - DNA, 25 bp, Homo sapien
tgttttagattctatccaacagtaa

SEQ ID NO: 1796183 - DNA, 25 bp, Homo sapien
agattcaactcaggattccagacca

SEQ ID NO: 1796184 - DNA, 25 bp, Homo sapien
gaatggagtcaagattcaactcagg

SEQ ID NO: 1796185 - DNA, 25 bp, Homo sapien
ccaacagtaataatgaatggagtca

SEQ ID NO: 1796186 - DNA, 25 bp, Homo sapien
tcattgatgtggctcgctactttct

SEQ ID NO: 1796187 - DNA, 25 bp, Homo sapien
ggtcaaacacggtcccataatcctc

SEQ ID NO: 1796188 - DNA, 25 bp, Homo sapien
tgttccgctctgctcagctactagc

SEQ ID NO: 1796189 - DNA, 25 bp, Homo sapien
tgtggctcgctactttctccattgc

SEQ ID NO: 1796190 - DNA, 25 bp, Homo sapien
taggctcccagggtgcagatgtctc

SEQ ID NO: 1796191 - DNA, 25 bp, Homo sapien
gcactaggctcccagggtgcagatg

SEQ ID NO: 1796192 - DNA, 25 bp, Homo sapien
ggctcccagggtgcagatgtctcac

SEQ ID NO: 1796193 - DNA, 25 bp, Homo sapien
cacatgcactaggctcccagggtgc

SEQ ID NO: 1796194 - DNA, 25 bp, Homo sapien
tcctaacagggcagcctatctagaa

SEQ ID NO: 1796195 - DNA, 25 bp, Homo sapien
caatgtgaacgtgacataaggttat

SEQ ID NO: 1796196 - DNA, 25 bp, Homo sapien
ctccaggaaagtcctaacagggcag

SEQ ID NO: 1796197 - DNA, 25 bp, Homo sapien
attagacacattgttatcaagaaaa

SEQ ID NO: 1796198 - DNA, 25 bp, Homo sapien
tcccctgggatctagtacatccatc

SEQ ID NO: 1796199 - DNA, 25 bp, Homo sapien
ccctgggatctagtacatccatcac

SEQ ID NO: 1796200 - DNA, 25 bp, Homo sapien
cccctgggatctagtacatccatca

SEQ ID NO: 1796201 - DNA, 25 bp, Homo sapien
atgtaggtgagacatgccttgtgac

SEQ ID NO: 1796202 - DNA, 25 bp, Homo sapien
ccttgtgaccaactcagtttccata

SEQ ID NO: 1796203 - DNA, 25 bp, Homo sapien
tgtaggtgagacatgccttgtgacc

SEQ ID NO: 1796204 - DNA, 25 bp, Homo sapien
gtaggtgagacatgccttgtgacca

SEQ ID NO: 1796205 - DNA, 25 bp, Homo sapien
agagacagaaatggattcaaccagg

SEQ ID NO: 1796206 - DNA, 25 bp, Homo sapien
gtagagtgcatcagaagctctccca

SEQ ID NO: 1796207 - DNA, 25 bp, Homo sapien
caaatactgtgagctcaaggtcctt

SEQ ID NO: 1796208 - DNA, 25 bp, Homo sapien
ggaaaccgtagagtgcatcagaagc

SEQ ID NO: 1796209 - DNA, 25 bp, Homo sapien
tctttataaaccagtatgacggctc

SEQ ID NO: 1796210 - DNA, 25 bp, Homo sapien
tttctttataaaccagtatgacggc

SEQ ID NO: 1796211 - DNA, 25 bp, Homo sapien
aaaccagtatgacggctctcttaaa

SEQ ID NO: 1796212 - DNA, 25 bp, Homo sapien
tataaaccagtatgacggctctctt

SEQ ID NO: 1796213 - DNA, 25 bp, Homo sapien
ccaagtcagtagagttgtgtgcagg

SEQ ID NO: 1796214 - DNA, 25 bp, Homo sapien
tcaaccagcggaatttaaatgggtc

SEQ ID NO: 1796215 - DNA, 25 bp, Homo sapien
taaatgggtccaagtcagtagagtt

SEQ ID NO: 1796216 - DNA, 25 bp, Homo sapien
ccagtctgacttgaagcgcggagat

SEQ ID NO: 1796217 - DNA, 25 bp, Homo sapien
tgcaacacaactgaaagatggtttc

SEQ ID NO: 1796218 - DNA, 25 bp, Homo sapien
ggccgtccttctatttctgacttcg

SEQ ID NO: 1796219 - DNA, 25 bp, Homo sapien
tctgacttcgtatggatcagttccc

SEQ ID NO: 1796220 - DNA, 25 bp, Homo sapien
ggatcagttcccatatggaattatt

SEQ ID NO: 1796221 - DNA, 25 bp, Homo sapien
gtgcttccattccacgcccgcctgt

SEQ ID NO: 1796222 - DNA, 25 bp, Homo sapien
tgtgttcctgtgccttgcacctgct

SEQ ID NO: 1796223 - DNA, 25 bp, Homo sapien
cagcagaagtgtccacagtgttcat

SEQ ID NO: 1796224 - DNA, 25 bp, Homo sapien
gaagtgtccacagtgttcatcgtgc

SEQ ID NO: 1796225 - DNA, 25 bp, Homo sapien
gaggtaccaggcgatccttacacgt

SEQ ID NO: 1796226 - DNA, 25 bp, Homo sapien
tatgtgacgcctgaagttctccctc

SEQ ID NO: 1796227 - DNA, 25 bp, Homo sapien
gaacgaatcaccttaacaatgttgg

SEQ ID NO: 1796228 - DNA, 25 bp, Homo sapien
ctaatttggccgaaacaggaactcg

SEQ ID NO: 1796229 - DNA, 25 bp, Homo sapien
ggtgacggatctgcgccttgagcaa

SEQ ID NO: 1796230 - DNA, 25 bp, Homo sapien
tcgatgtctttagtagggctgccct

SEQ ID NO: 1796231 - DNA, 25 bp, Homo sapien
tgtcggcaaaatctgccaagccggg

SEQ ID NO: 1796232 - DNA, 25 bp, Homo sapien
tgaacgtctgggtcctcggaaatcc

SEQ ID NO: 1796233 - DNA, 25 bp, Homo sapien
ctatgattttccgtggctctctgtt

SEQ ID NO: 1796234 - DNA, 25 bp, Homo sapien
atgattttccgtggctctctgtttc

SEQ ID NO: 1796235 - DNA, 25 bp, Homo sapien
ccgtggctctctgtttcataaaaac

SEQ ID NO: 1796236 - DNA, 25 bp, Homo sapien
ttccgtggctctctgtttcataaaa

SEQ ID NO: 1796237 - DNA, 25 bp, Homo sapien
aactattaatcacgacttccccagc

SEQ ID NO: 1796238 - DNA, 25 bp, Homo sapien
catctaggtttctgatccacaataa

SEQ ID NO: 1796239 - DNA, 25 bp, Homo sapien
ggaatttaacccatatctggattga

SEQ ID NO: 1796240 - DNA, 25 bp, Homo sapien
tacctgctcaaagtggatataaact

SEQ ID NO: 1796241 - DNA, 25 bp, Homo sapien
gaggatgacgcagagaattacagac

SEQ ID NO: 1796242 - DNA, 25 bp, Homo sapien
gttagagttggcagacatagaccct

SEQ ID NO: 1796243 - DNA, 25 bp, Homo sapien
gagcagcctaccagatgtcgatttg

SEQ ID NO: 1796244 - DNA, 25 bp, Homo sapien
caaatgccaatgaccagatgtgact

SEQ ID NO: 1796245 - DNA, 25 bp, Homo sapien
aatgcttgctttctaccgagttgcc

SEQ ID NO: 1796246 - DNA, 25 bp, Homo sapien
ggacaagacttcactgccaatgagg

SEQ ID NO: 1796247 - DNA, 25 bp, Homo sapien
gcttaaacataagcgcagcctggag

SEQ ID NO: 1796248 - DNA, 25 bp, Homo sapien
tacacttagttcaggcctgtgacgg

SEQ ID NO: 1796249 - DNA, 25 bp, Homo sapien
tgatacagcccaagatagagcagcc

SEQ ID NO: 1796250 - DNA, 25 bp, Homo sapien
atgtcattagagaacaggtgcagcc

SEQ ID NO: 1796251 - DNA, 25 bp, Homo sapien
tgcctagagatgaaaccgaagtacg

SEQ ID NO: 1796252 - DNA, 25 bp, Homo sapien
tttgcttacaacgaaggtggacgtg

SEQ ID NO: 1796253 - DNA, 25 bp, Homo sapien
gggacaggctcattgattgtttaaa

SEQ ID NO: 1796254 - DNA, 25 bp, Homo sapien
gctgtagctgacctgaaaccttcgg

SEQ ID NO: 1796255 - DNA, 25 bp, Homo sapien
tcccacaagcgcgtcaggctgtgtg

SEQ ID NO: 1796256 - DNA, 25 bp, Homo sapien
taaatagggaggtgcaagctctcag

SEQ ID NO: 1796257 - DNA, 25 bp, Homo sapien
tactgttccaccatagaatcttcac

SEQ ID NO: 1796258 - DNA, 25 bp, Homo sapien
ccgcttggcacattctcagcatgcg

SEQ ID NO: 1796259 - DNA, 25 bp, Homo sapien
cctgctggacttcacaagaaggctg

SEQ ID NO: 1796260 - DNA, 25 bp, Homo sapien
agtcactgttcataactactgttcc

SEQ ID NO: 1796261 - DNA, 25 bp, Homo sapien
gggaaaccaagcatccggaggcact

SEQ ID NO: 1796262 - DNA, 25 bp, Homo sapien
aagttgtaacctcgaggcccgtgat

SEQ ID NO: 1796263 - DNA, 25 bp, Homo sapien
ggtgcctatagcctgcaagatgcca

SEQ ID NO: 1796264 - DNA, 25 bp, Homo sapien
gctccgttgttttacccgacagtga

SEQ ID NO: 1796265 - DNA, 25 bp, Homo sapien
gctgtatccagcagggactcaggct

SEQ ID NO: 1796266 - DNA, 25 bp, Homo sapien
gactgtgtgatactttcccaagcaa

SEQ ID NO: 1796267 - DNA, 25 bp, Homo sapien
tggtcattcttaactgtgagcgaga

SEQ ID NO: 1796268 - DNA, 25 bp, Homo sapien
ccaagcaactaggattgttccccaa

SEQ ID NO: 1796269 - DNA, 25 bp, Homo sapien
tgctccccactctaacctctagcat

SEQ ID NO: 1796270 - DNA, 25 bp, Homo sapien
ggttgttagtgcagacataagcttt

SEQ ID NO: 1796271 - DNA, 25 bp, Homo sapien
cggctgctccccactctaacctcta

SEQ ID NO: 1796272 - DNA, 25 bp, Homo sapien
ttgttagtgcagacataagctttgt

SEQ ID NO: 1796273 - DNA, 25 bp, Homo sapien
cctggcttgtttcgctggtcgccat

SEQ ID NO: 1796274 - DNA, 25 bp, Homo sapien
cgtcctggcttgtttcgctggtcgc

SEQ ID NO: 1796275 - DNA, 25 bp, Homo sapien
ctccagcgtcctggcttgtttcgct

SEQ ID NO: 1796276 - DNA, 25 bp, Homo sapien
cagcgtcctggcttgtttcgctggt

SEQ ID NO: 1796277 - DNA, 25 bp, Homo sapien
acctcacagggtcatcccgcatcct

SEQ ID NO: 1796278 - DNA, 25 bp, Homo sapien
cctcacagggtcatcccgcatcctt

SEQ ID NO: 1796279 - DNA, 25 bp, Homo sapien
taacaatgatggctgtcagaattct

SEQ ID NO: 1796280 - DNA, 25 bp, Homo sapien
tctgtgcagtagagaaccaaataac

SEQ ID NO: 1796281 - DNA, 25 bp, Homo sapien
tcctgatgtttaacaatgatggctg

SEQ ID NO: 1796282 - DNA, 25 bp, Homo sapien
tttctgtgcagtagagaaccaaata

SEQ ID NO: 1796283 - DNA, 25 bp, Homo sapien
tgtaccacgtacagtccatccagag

SEQ ID NO: 1796284 - DNA, 25 bp, Homo sapien
gagaccccagataaggccaggatga

SEQ ID NO: 1796285 - DNA, 25 bp, Homo sapien
tccgatatagatagctcctccaggt

SEQ ID NO: 1796286 - DNA, 25 bp, Homo sapien
tacaggaggtgcagaaaatcatgcc

SEQ ID NO: 1796287 - DNA, 25 bp, Homo sapien
ggcacccaaaagttccatttcatat

SEQ ID NO: 1796288 - DNA, 25 bp, Homo sapien
tagggaaagttaagcataattctga

SEQ ID NO: 1796289 - DNA, 25 bp, Homo sapien
ttgtagggaaagttaagcataattc

SEQ ID NO: 1796290 - DNA, 25 bp, Homo sapien
tcccatttggcacccaaaagttcca

SEQ ID NO: 1796291 - DNA, 25 bp, Homo sapien
cgagaaatcattaagttgttaagac

SEQ ID NO: 1796292 - DNA, 25 bp, Homo sapien
taagttgttaagactgcaagcagcg

SEQ ID NO: 1796293 - DNA, 25 bp, Homo sapien
gcagcgaagcagctatcacagaatt

SEQ ID NO: 1796294 - DNA, 25 bp, Homo sapien
cctccgttgcccacgattcgagaaa

SEQ ID NO: 1796295 - DNA, 25 bp, Homo sapien
tgcgctctcagcacgccgggaattt

SEQ ID NO: 1796296 - DNA, 25 bp, Homo sapien
gggaatttcctgtccgcggtcatcg

SEQ ID NO: 1796297 - DNA, 25 bp, Homo sapien
cttctcgcggcaggacttagcgcat

SEQ ID NO: 1796298 - DNA, 25 bp, Homo sapien
caggacttagcgcatgcgctctcag

SEQ ID NO: 1796299 - DNA, 25 bp, Homo sapien
tgatacttgagtgtggccagtgaga

SEQ ID NO: 1796300 - DNA, 25 bp, Homo sapien
gggcattgtcaaatgacctcacctc

SEQ ID NO: 1796301 - DNA, 25 bp, Homo sapien
gcttatgtttacacctagattcgta

SEQ ID NO: 1796302 - DNA, 25 bp, Homo sapien
tctctctgtactttgctgtctgact

SEQ ID NO: 1796303 - DNA, 25 bp, Homo sapien
gaataaaagctccagggcacacgaa

SEQ ID NO: 1796304 - DNA, 25 bp, Homo sapien
ctccagggcacacgaatgtctttca

SEQ ID NO: 1796305 - DNA, 25 bp, Homo sapien
cagaaagcagagctagttaacctgg

SEQ ID NO: 1796306 - DNA, 25 bp, Homo sapien
gctagttaacctggaataaaagctc

SEQ ID NO: 1796307 - DNA, 25 bp, Homo sapien
acagagccgctacaaagaggaacca

SEQ ID NO: 1796308 - DNA, 25 bp, Homo sapien
agggagaacacagagccgctacaaa

SEQ ID NO: 1796309 - DNA, 25 bp, Homo sapien
agccgctacaaagaggaaccaagac

SEQ ID NO: 1796310 - DNA, 25 bp, Homo sapien
ggagaacacagagccgctacaaaga

SEQ ID NO: 1796311 - DNA, 25 bp, Homo sapien
caattgattgatgaccatgatatga

SEQ ID NO: 1796312 - DNA, 25 bp, Homo sapien
gcagaagtcgatgaaaccaattgat

SEQ ID NO: 1796313 - DNA, 25 bp, Homo sapien
catgggcagcagaagtcgatgaaac

SEQ ID NO: 1796314 - DNA, 25 bp, Homo sapien
cgatgaaaccaattgattgatgacc

SEQ ID NO: 1796315 - DNA, 25 bp, Homo sapien
gagcatagatgtagattcggagcat

SEQ ID NO: 1796316 - DNA, 25 bp, Homo sapien
gagagcatagatgtagattcggagc

SEQ ID NO: 1796317 - DNA, 25 bp, Homo sapien
agagcatagatgtagattcggagca

SEQ ID NO: 1796318 - DNA, 25 bp, Homo sapien
gtgagagcatagatgtagattcgga

SEQ ID NO: 1796319 - DNA, 25 bp, Homo sapien
ggagaacaaggtagtcataaccaaa

SEQ ID NO: 1796320 - DNA, 25 bp, Homo sapien
caggatagtggataccccatgcgga

SEQ ID NO: 1796321 - DNA, 25 bp, Homo sapien
acagtggacactaagacttcctgga

SEQ ID NO: 1796322 - DNA, 25 bp, Homo sapien
gcatgcagcgagagtgtagtgccca

SEQ ID NO: 1796323 - DNA, 25 bp, Homo sapien
ccatgcggacagcacgttggactga

SEQ ID NO: 1796324 - DNA, 25 bp, Homo sapien
tcagatttttaggactttgcaccaa

SEQ ID NO: 1796325 - DNA, 25 bp, Homo sapien
gatactccaatccactaaaatgtcc

SEQ ID NO: 1796326 - DNA, 25 bp, Homo sapien
gagttcctggaacctacactccact

SEQ ID NO: 1796327 - DNA, 25 bp, Homo sapien
taaaatgtccatcgagtgccagttg

SEQ ID NO: 1796328 - DNA, 25 bp, Homo sapien
tcagcttcacggagcaggcagacac

SEQ ID NO: 1796329 - DNA, 25 bp, Homo sapien
cacttggcttggattctctgccctg

SEQ ID NO: 1796330 - DNA, 25 bp, Homo sapien
gagtaagccaggcaaactgcttgtg

SEQ ID NO: 1796331 - DNA, 25 bp, Homo sapien
tttgtgacaagaagttctccatact

SEQ ID NO: 1796332 - DNA, 25 bp, Homo sapien
tcacaaatgccgagaagagtaagcc

SEQ ID NO: 1796333 - DNA, 25 bp, Homo sapien
cagaggagagacgagatcatttcat

SEQ ID NO: 1796334 - DNA, 25 bp, Homo sapien
cacacccacccagaggagagacgag

SEQ ID NO: 1796335 - DNA, 25 bp, Homo sapien
acccacccagaggagagacgagatc

SEQ ID NO: 1796336 - DNA, 25 bp, Homo sapien
cacccagaggagagacgagatcatt

SEQ ID NO: 1796337 - DNA, 25 bp, Homo sapien
tgactcctgctgacatatggcctag

SEQ ID NO: 1796338 - DNA, 25 bp, Homo sapien
tctgcagccacagaatccggttcct

SEQ ID NO: 1796339 - DNA, 25 bp, Homo sapien
aaatgaggtgcttccaacccatcct

SEQ ID NO: 1796340 - DNA, 25 bp, Homo sapien
acctccttgctccattttgcttctt

SEQ ID NO: 1796341 - DNA, 25 bp, Homo sapien
taaggagagcatgccacatggacga

SEQ ID NO: 1796342 - DNA, 25 bp, Homo sapien
tacaaatgcagtgaggcacagaccc

SEQ ID NO: 1796343 - DNA, 25 bp, Homo sapien
cacgagcaaggtgttctgaaggtca

SEQ ID NO: 1796344 - DNA, 25 bp, Homo sapien
ccggatggttctgggttcacgagca

SEQ ID NO: 1796345 - DNA, 25 bp, Homo sapien
aggtggcctccgactctgcgcggac

SEQ ID NO: 1796346 - DNA, 25 bp, Homo sapien
ccgctgagcatggagggtcctgtcc

SEQ ID NO: 1796347 - DNA, 25 bp, Homo sapien
cattgccaccgctgagcatggaggg

SEQ ID NO: 1796348 - DNA, 25 bp, Homo sapien
gtcctgtcccggaggtggcctccga

SEQ ID NO: 1796349 - DNA, 25 bp, Homo sapien
tctctttaagtgaccatttccccat

SEQ ID NO: 1796350 - DNA, 25 bp, Homo sapien
tgcccaagaaaagccgtaaggcaat

SEQ ID NO: 1796351 - DNA, 25 bp, Homo sapien
tcagcaatgaaaatccctccattct

SEQ ID NO: 1796352 - DNA, 25 bp, Homo sapien
ttttttccacataccaccatattgg

SEQ ID NO: 1796353 - DNA, 25 bp, Homo sapien
agaaattcctcgagagctgctccct

SEQ ID NO: 1796354 - DNA, 25 bp, Homo sapien
aattagaaattcctcgagagctgct

SEQ ID NO: 1796355 - DNA, 25 bp, Homo sapien
tcatgaggcatgtcagtgtggtgat

SEQ ID NO: 1796356 - DNA, 25 bp, Homo sapien
aggtcatgaggcatgtcagtgtggt

SEQ ID NO: 1796357 - DNA, 25 bp, Homo sapien
aaaattgattctcctcctattttca

SEQ ID NO: 1796358 - DNA, 25 bp, Homo sapien
aaattgattctcctcctattttcat

SEQ ID NO: 1796359 - DNA, 25 bp, Homo sapien
gcgttgtaagcttccaaatagagaa

SEQ ID NO: 1796360 - DNA, 25 bp, Homo sapien
gaagccagacctctaatacccgctg

SEQ ID NO: 1796361 - DNA, 25 bp, Homo sapien
ggcctccccagctgcgttgtaagct

SEQ ID NO: 1796362 - DNA, 25 bp, Homo sapien
tcagccattgcacatgtacctgtgg

SEQ ID NO: 1796363 - DNA, 25 bp, Homo sapien
ctattaaatcaaatggatgtacttc

SEQ ID NO: 1796364 - DNA, 25 bp, Homo sapien
gtacttcatcgtgtgagtgctggga

SEQ ID NO: 1796365 - DNA, 25 bp, Homo sapien
agtgctgggagccttcccctgcggc

SEQ ID NO: 1796366 - DNA, 25 bp, Homo sapien
cccctgcggcatgcagtgatgtggc

SEQ ID NO: 1796367 - DNA, 25 bp, Homo sapien
accagatgactgatgctctcttttc

SEQ ID NO: 1796368 - DNA, 25 bp, Homo sapien
aagagttacatcctcagtgaaggtg

SEQ ID NO: 1796369 - DNA, 25 bp, Homo sapien
agcaccagatgactgatgctctctt

SEQ ID NO: 1796370 - DNA, 25 bp, Homo sapien
tctcgctcaagagttacatcctcag

SEQ ID NO: 1796371 - DNA, 25 bp, Homo sapien
catgtgcactgatgttgtaagattt

SEQ ID NO: 1796372 - DNA, 25 bp, Homo sapien
ggtgacaaactgtaaaatgggttga

SEQ ID NO: 1796373 - DNA, 25 bp, Homo sapien
gctcatgtgtaagccctagaacctg

SEQ ID NO: 1796374 - DNA, 25 bp, Homo sapien
ccccgtgatgtaattaggtgacaaa

SEQ ID NO: 1796375 - DNA, 25 bp, Homo sapien
aacacagcgaaagggaccccgtgat

SEQ ID NO: 1796376 - DNA, 25 bp, Homo sapien
gccttgggatccactccattttctg

SEQ ID NO: 1796377 - DNA, 25 bp, Homo sapien
gccaagagcacaatgtaccactggg

SEQ ID NO: 1796378 - DNA, 25 bp, Homo sapien
cagaaaagccaaaacgtctggccaa

SEQ ID NO: 1796379 - DNA, 25 bp, Homo sapien
ggtcttgcagttgcatgaaccagca

SEQ ID NO: 1796380 - DNA, 25 bp, Homo sapien
tgaccgactagacccaaattacaga

SEQ ID NO: 1796381 - DNA, 25 bp, Homo sapien
catccataagacagggttgaccgac

SEQ ID NO: 1796382 - DNA, 25 bp, Homo sapien
tgagggcattggacttctacaaggc

SEQ ID NO: 1796383 - DNA, 25 bp, Homo sapien
tgaccactaggttacagcatcctga

SEQ ID NO: 1796384 - DNA, 25 bp, Homo sapien
tggatcccgaatggctaactggata

SEQ ID NO: 1796385 - DNA, 25 bp, Homo sapien
gatggatcccgaatggctaactgga

SEQ ID NO: 1796386 - DNA, 25 bp, Homo sapien
tcccgaatggctaactggatataaa

SEQ ID NO: 1796387 - DNA, 25 bp, Homo sapien
ccgaatggctaactggatataaact

SEQ ID NO: 1796388 - DNA, 25 bp, Homo sapien
ggagataacaatacagacactatac

SEQ ID NO: 1796389 - DNA, 25 bp, Homo sapien
aagataaggcaaaaagtcagtgaaa

SEQ ID NO: 1796390 - DNA, 25 bp, Homo sapien
gaaagaaatcataaagataaggcaa

SEQ ID NO: 1796391 - DNA, 25 bp, Homo sapien
tctccaatattaagaatgaaatagg

SEQ ID NO: 1796392 - DNA, 25 bp, Homo sapien
tcaagtccgtaagttgcacctctag

SEQ ID NO: 1796393 - DNA, 25 bp, Homo sapien
agtccgtaagttgcacctctagaaa

SEQ ID NO: 1796394 - DNA, 25 bp, Homo sapien
aggaagatctcaagtccgtaagttg

SEQ ID NO: 1796395 - DNA, 25 bp, Homo sapien
gatctcaagtccgtaagttgcacct

SEQ ID NO: 1796396 - DNA, 25 bp, Homo sapien
gcaaattcacccacctacagtaagg

SEQ ID NO: 1796397 - DNA, 25 bp, Homo sapien
catgcatttgacgacagggaacaaa

SEQ ID NO: 1796398 - DNA, 25 bp, Homo sapien
atcgagtgccaagacccatgctggg

SEQ ID NO: 1796399 - DNA, 25 bp, Homo sapien
tgatgaagccccataggaaggcctg

SEQ ID NO: 1796400 - DNA, 25 bp, Homo sapien
aattagtactctcaacccatcaaag

SEQ ID NO: 1796401 - DNA, 25 bp, Homo sapien
ggatacaattagtactctcaaccca

SEQ ID NO: 1796402 - DNA, 25 bp, Homo sapien
gtactctcaacccatcaaagatgct

SEQ ID NO: 1796403 - DNA, 25 bp, Homo sapien
ctaggatacaattagtactctcaac

SEQ ID NO: 1796404 - DNA, 25 bp, Homo sapien
gctgggcctgaacattgtgaactcc

SEQ ID NO: 1796405 - DNA, 25 bp, Homo sapien
caaagagttgctccagttcagcccc

SEQ ID NO: 1796406 - DNA, 25 bp, Homo sapien
taggctttcttgacttcgaatcaag

SEQ ID NO: 1796407 - DNA, 25 bp, Homo sapien
gatccataatcagtgcagacatctc

SEQ ID NO: 1796408 - DNA, 25 bp, Homo sapien
gagaaggaggtatcttgggtctccc

SEQ ID NO: 1796409 - DNA, 25 bp, Homo sapien
ccttcagtgtacagtagtagtcatc

SEQ ID NO: 1796410 - DNA, 25 bp, Homo sapien
tagtcatcattgacgtgacagcagc

SEQ ID NO: 1796411 - DNA, 25 bp, Homo sapien
agttaaatagtggtgccttcagtgt

SEQ ID NO: 1796412 - DNA, 25 bp, Homo sapien
gcctttgcagagtccttagcagtcc

SEQ ID NO: 1796413 - DNA, 25 bp, Homo sapien
gctctctgttgtccttaaccactga

SEQ ID NO: 1796414 - DNA, 25 bp, Homo sapien
taaaaagtctaaacgcactgtgccg

SEQ ID NO: 1796415 - DNA, 25 bp, Homo sapien
ctaaaggttatgtttgccgctgctc

SEQ ID NO: 1796416 - DNA, 25 bp, Homo sapien
gaatgtgaccaaaaccatcaggctc

SEQ ID NO: 1796417 - DNA, 25 bp, Homo sapien
ggttgagaactagatgaacaagccc

SEQ ID NO: 1796418 - DNA, 25 bp, Homo sapien
gggaaagctgtcactggactccatt

SEQ ID NO: 1796419 - DNA, 25 bp, Homo sapien
cactgtgtccttcagggatctggca

SEQ ID NO: 1796420 - DNA, 25 bp, Homo sapien
tgggaaacatgtacaacgctctggc

SEQ ID NO: 1796421 - DNA, 25 bp, Homo sapien
aaatcattgccctcggagagtgaca

SEQ ID NO: 1796422 - DNA, 25 bp, Homo sapien
tctgggtgtttagccttagtatgca

SEQ ID NO: 1796423 - DNA, 25 bp, Homo sapien
tctgaccttcagcactttagctgga

SEQ ID NO: 1796424 - DNA, 25 bp, Homo sapien
caaatgtaggcaagtcggcagtgca

SEQ ID NO: 1796425 - DNA, 25 bp, Homo sapien
tgttactctcaaagcacaagatagg

SEQ ID NO: 1796426 - DNA, 25 bp, Homo sapien
tcgtctggagaaggcaagctaattt

SEQ ID NO: 1796427 - DNA, 25 bp, Homo sapien
cctggattggccttgagtcttacaa

SEQ ID NO: 1796428 - DNA, 25 bp, Homo sapien
tcatttcttgatgccctacatcaca

SEQ ID NO: 1796429 - DNA, 25 bp, Homo sapien
atgggtcagccgtggcttcactcat

SEQ ID NO: 1796430 - DNA, 25 bp, Homo sapien
tacatcacagccttgcatccattcc

SEQ ID NO: 1796431 - DNA, 25 bp, Homo sapien
tcagtctgctcaacactccccaatc

SEQ ID NO: 1796432 - DNA, 25 bp, Homo sapien
tcactgcccttttgtggcttgggat

SEQ ID NO: 1796433 - DNA, 25 bp, Homo sapien
tcaaacatccggctccctgttatct

SEQ ID NO: 1796434 - DNA, 25 bp, Homo sapien
tcctggtgccctggatttctcactg

SEQ ID NO: 1796435 - DNA, 25 bp, Homo sapien
gcccttttgtggcttgggattccag

SEQ ID NO: 1796436 - DNA, 25 bp, Homo sapien
caggtgtacactttttcggattcca

SEQ ID NO: 1796437 - DNA, 25 bp, Homo sapien
gacttagcactcctcggagcacact

SEQ ID NO: 1796438 - DNA, 25 bp, Homo sapien
tcctcagcgtggtaagttgacctcc

SEQ ID NO: 1796439 - DNA, 25 bp, Homo sapien
ggtgcagagattagtctttccatct

SEQ ID NO: 1796440 - DNA, 25 bp, Homo sapien
aatgaatattattgacctgatggac

SEQ ID NO: 1796441 - DNA, 25 bp, Homo sapien
ttccaaagagggcattagtatccat

SEQ ID NO: 1796442 - DNA, 25 bp, Homo sapien
atattattgacctgatggaccacaa

SEQ ID NO: 1796443 - DNA, 25 bp, Homo sapien
attgtatgaaaacacatttggagag

SEQ ID NO: 1796444 - DNA, 25 bp, Homo sapien
cccatggtggatgcaggaagcctta

SEQ ID NO: 1796445 - DNA, 25 bp, Homo sapien
ggaagctgagctctacacaagtaag

SEQ ID NO: 1796446 - DNA, 25 bp, Homo sapien
gatggaaattcagcgccaagggacc

SEQ ID NO: 1796447 - DNA, 25 bp, Homo sapien
ggcgaagaccattccccagtcaaga

SEQ ID NO: 1796448 - DNA, 25 bp, Homo sapien
cagacaagccctgttagctgggagg

SEQ ID NO: 1796449 - DNA, 25 bp, Homo sapien
tgattgtggcatcccctggcgtgtt

SEQ ID NO: 1796450 - DNA, 25 bp, Homo sapien
gctttgactgcggaagatctccctt

SEQ ID NO: 1796451 - DNA, 25 bp, Homo sapien
ggtcactgagcacgcgcatctgatt

SEQ ID NO: 1796452 - DNA, 25 bp, Homo sapien
cacctgtatttgtatctctgtgtcc

SEQ ID NO: 1796453 - DNA, 25 bp, Homo sapien
cactaactggtcaccatcctgttga

SEQ ID NO: 1796454 - DNA, 25 bp, Homo sapien
cgagagtggtgtcactaactggtca

SEQ ID NO: 1796455 - DNA, 25 bp, Homo sapien
tctctttcttgataatccgagagtg

SEQ ID NO: 1796456 - DNA, 25 bp, Homo sapien
gagccagtggagatgcagctaagcc

SEQ ID NO: 1796457 - DNA, 25 bp, Homo sapien
cactggccacgtgtagagaaagaat

SEQ ID NO: 1796458 - DNA, 25 bp, Homo sapien
tcccgagagcttgtgcactggccac

SEQ ID NO: 1796459 - DNA, 25 bp, Homo sapien
gccagtggagatgcagctaagcctc

SEQ ID NO: 1796460 - DNA, 25 bp, Homo sapien
tctttaccagggaaatagagccctg

SEQ ID NO: 1796461 - DNA, 25 bp, Homo sapien
aaggaatgggtgcatttctttacca

SEQ ID NO: 1796462 - DNA, 25 bp, Homo sapien
ccagggaaatagagccctgggtcca

SEQ ID NO: 1796463 - DNA, 25 bp, Homo sapien
tcctcttctgcttgcctttccacaa

SEQ ID NO: 1796464 - DNA, 25 bp, Homo sapien
ttaggtgactctgagagctgctagg

SEQ ID NO: 1796465 - DNA, 25 bp, Homo sapien
tttaggaaggtctgttaggtgactc

SEQ ID NO: 1796466 - DNA, 25 bp, Homo sapien
gcttctgtactagcgggacagcagc

SEQ ID NO: 1796467 - DNA, 25 bp, Homo sapien
gccacttgaacaggatgtaagtatg

SEQ ID NO: 1796468 - DNA, 25 bp, Homo sapien
tgaatataccattccttagggcaca

SEQ ID NO: 1796469 - DNA, 25 bp, Homo sapien
gaatataccattccttagggcacag

SEQ ID NO: 1796470 - DNA, 25 bp, Homo sapien
ttgaatataccattccttagggcac

SEQ ID NO: 1796471 - DNA, 25 bp, Homo sapien
cttgaatataccattccttagggca

SEQ ID NO: 1796472 - DNA, 25 bp, Homo sapien
cctagtgttatgtcctgagctaggt

SEQ ID NO: 1796473 - DNA, 25 bp, Homo sapien
ataacatcctagtgttatgtcctga

SEQ ID NO: 1796474 - DNA, 25 bp, Homo sapien
catcctagtgttatgtcctgagcta

SEQ ID NO: 1796475 - DNA, 25 bp, Homo sapien
tagtgttatgtcctgagctaggttc

SEQ ID NO: 1796476 - DNA, 25 bp, Homo sapien
gctgagttggaataatactgccaca

SEQ ID NO: 1796477 - DNA, 25 bp, Homo sapien
aactgctgagttggaataatactgc

SEQ ID NO: 1796478 - DNA, 25 bp, Homo sapien
tgctgagttggaataatactgccac

SEQ ID NO: 1796479 - DNA, 25 bp, Homo sapien
actctggggtcagcataagcttatg

SEQ ID NO: 1796480 - DNA, 25 bp, Homo sapien
ttaacatcagtccaatagagatgtc

SEQ ID NO: 1796481 - DNA, 25 bp, Homo sapien
aacaacttgacattaacatcagtcc

SEQ ID NO: 1796482 - DNA, 25 bp, Homo sapien
ctcagtaccagatttcaatgaagca

SEQ ID NO: 1796483 - DNA, 25 bp, Homo sapien
cagtaccagatttcaatgaagcaca

SEQ ID NO: 1796484 - DNA, 25 bp, Homo sapien
ggctgcttcccggttgcttggtgac

SEQ ID NO: 1796485 - DNA, 25 bp, Homo sapien
cttcccggttgcttggtgactgtgg

SEQ ID NO: 1796486 - DNA, 25 bp, Homo sapien
agatggctgcttcccggttgcttgg

SEQ ID NO: 1796487 - DNA, 25 bp, Homo sapien
tgcttcccggttgcttggtgactgt

SEQ ID NO: 1796488 - DNA, 25 bp, Homo sapien
attccactttccagtgaccccaatt

SEQ ID NO: 1796489 - DNA, 25 bp, Homo sapien
cattccactttccagtgaccccaat

SEQ ID NO: 1796490 - DNA, 25 bp, Homo sapien
tcattgcatatgacatgctgacccc

SEQ ID NO: 1796491 - DNA, 25 bp, Homo sapien
gcatatgacatgctgaccccaggga

SEQ ID NO: 1796492 - DNA, 25 bp, Homo sapien
gaatacggcattgtgcaagaaatca

SEQ ID NO: 1796493 - DNA, 25 bp, Homo sapien
aaaacatatcttccacatgtatctg

SEQ ID NO: 1796494 - DNA, 25 bp, Homo sapien
agcaccaaggtgcacttttcatgtg

SEQ ID NO: 1796495 - DNA, 25 bp, Homo sapien
tgtgcaagtcactttgcgctgcgtg

SEQ ID NO: 1796496 - DNA, 25 bp, Homo sapien
aataagaccatacactttcaagtag

SEQ ID NO: 1796497 - DNA, 25 bp, Homo sapien
tagtaattcagcgtgtaatgtcaca

SEQ ID NO: 1796498 - DNA, 25 bp, Homo sapien
gaccagtaacgctcacaaattcaca

SEQ ID NO: 1796499 - DNA, 25 bp, Homo sapien
taatgtctgggatttaagagctagc

SEQ ID NO: 1796500 - DNA, 25 bp, Homo sapien
tcaaaatcgaccagtaacgctcaca

SEQ ID NO: 1796501 - DNA, 25 bp, Homo sapien
gctagctgcttagcaacaccgcttt

SEQ ID NO: 1796502 - DNA, 25 bp, Homo sapien
tgaagtccctaactacaactgtaga

SEQ ID NO: 1796503 - DNA, 25 bp, Homo sapien
taggcaacatgtagctgggtcattg

SEQ ID NO: 1796504 - DNA, 25 bp, Homo sapien
actgtgagagtggtgctgaagtccc

SEQ ID NO: 1796505 - DNA, 25 bp, Homo sapien
gctctgaagcctactttgtctgata

SEQ ID NO: 1796506 - DNA, 25 bp, Homo sapien
acgtgcacgcacacatcatcttctt

SEQ ID NO: 1796507 - DNA, 25 bp, Homo sapien
gtgcacgcacacatcatcttctttg

SEQ ID NO: 1796508 - DNA, 25 bp, Homo sapien
cacgcacacatcatcttctttggtt

SEQ ID NO: 1796509 - DNA, 25 bp, Homo sapien
tgcacgcacacatcatcttctttgg

SEQ ID NO: 1796510 - DNA, 25 bp, Homo sapien
ggaagcgaggttgagaggcagtgaa

SEQ ID NO: 1796511 - DNA, 25 bp, Homo sapien
gacagaagaagtgaaaggattcaag

SEQ ID NO: 1796512 - DNA, 25 bp, Homo sapien
gaatgtgggttgaatcactaaacca

SEQ ID NO: 1796513 - DNA, 25 bp, Homo sapien
atcactaaaccaggggcaagaaggg

SEQ ID NO: 1796514 - DNA, 25 bp, Homo sapien
ccctggtagtttggactgagtgcca

SEQ ID NO: 1796515 - DNA, 25 bp, Homo sapien
agaaacgtgagtaaaatatgtcttt

SEQ ID NO: 1796516 - DNA, 25 bp, Homo sapien
tatgacctaataatgacatgccctg

SEQ ID NO: 1796517 - DNA, 25 bp, Homo sapien
aattaagctgtaagacactccaggg

SEQ ID NO: 1796518 - DNA, 25 bp, Homo sapien
tagatgcctgtaggattccccaaag

SEQ ID NO: 1796519 - DNA, 25 bp, Homo sapien
gactgataaccttgatgagaggaga

SEQ ID NO: 1796520 - DNA, 25 bp, Homo sapien
caatgagaggtgaattctctgtggg

SEQ ID NO: 1796521 - DNA, 25 bp, Homo sapien
tgaatacagagtgaactggaggact

SEQ ID NO: 1796522 - DNA, 25 bp, Homo sapien
taatggaatctctgcgtggacggtg

SEQ ID NO: 1796523 - DNA, 25 bp, Homo sapien
aaaactgaccttgtagttgaaagat

SEQ ID NO: 1796524 - DNA, 25 bp, Homo sapien
agatatgcgattgtgtcattaccaa

SEQ ID NO: 1796525 - DNA, 25 bp, Homo sapien
tggacggtgttgaaacttaaagcac

SEQ ID NO: 1796526 - DNA, 25 bp, Homo sapien
aaacccactcccctgagaagacaga

SEQ ID NO: 1796527 - DNA, 25 bp, Homo sapien
gctgcttgaaggagcaaacccactc

SEQ ID NO: 1796528 - DNA, 25 bp, Homo sapien
aggagcaaacccactcccctgagaa

SEQ ID NO: 1796529 - DNA, 25 bp, Homo sapien
ttgctgcttgaaggagcaaacccac

SEQ ID NO: 1796530 - DNA, 25 bp, Homo sapien
gaaaatggagcaccaagactgatgt

SEQ ID NO: 1796531 - DNA, 25 bp, Homo sapien
caagactgatgttgcacgaaatgcc

SEQ ID NO: 1796532 - DNA, 25 bp, Homo sapien
aattctccaagaaaatggagcacca

SEQ ID NO: 1796533 - DNA, 25 bp, Homo sapien
tgttgcacgaaatgccaaaattttg

SEQ ID NO: 1796534 - DNA, 25 bp, Homo sapien
taacgcgtgtatgggaagggctctt

SEQ ID NO: 1796535 - DNA, 25 bp, Homo sapien
cccactccttcttttggctcttcct

SEQ ID NO: 1796536 - DNA, 25 bp, Homo sapien
tatgggaagggctcttgcttcctgt

SEQ ID NO: 1796537 - DNA, 25 bp, Homo sapien
cgtgtatgggaagggctcttgcttc

SEQ ID NO: 1796538 - DNA, 25 bp, Homo sapien
ccctcttttagcaaatggctgtgca

SEQ ID NO: 1796539 - DNA, 25 bp, Homo sapien
tagagggcccagcaagacaccgctc

SEQ ID NO: 1796540 - DNA, 25 bp, Homo sapien
gcccagcaagacaccgctcactact

SEQ ID NO: 1796541 - DNA, 25 bp, Homo sapien
cccctcttttagcaaatggctgtgc

SEQ ID NO: 1796542 - DNA, 25 bp, Homo sapien
ggctgtataaccatagctcataaac

SEQ ID NO: 1796543 - DNA, 25 bp, Homo sapien
gtataaccatagctcataaacatgc

SEQ ID NO: 1796544 - DNA, 25 bp, Homo sapien
cgaggctgtataaccatagctcata

SEQ ID NO: 1796545 - DNA, 25 bp, Homo sapien
tcacgaggctgtataaccatagctc

SEQ ID NO: 1796546 - DNA, 25 bp, Homo sapien
gttgcaagagaaagtctgaccaagc

SEQ ID NO: 1796547 - DNA, 25 bp, Homo sapien
gagaaagtctgaccaagccggtcat

SEQ ID NO: 1796548 - DNA, 25 bp, Homo sapien
tccaagggcaaaagagttgcaagag

SEQ ID NO: 1796549 - DNA, 25 bp, Homo sapien
ggtgagcttccaagggcaaaagagt

SEQ ID NO: 1796550 - DNA, 25 bp, Homo sapien
ctctggtcatggcattcgccataca

SEQ ID NO: 1796551 - DNA, 25 bp, Homo sapien
gacttaactctttgtagagaaggac

SEQ ID NO: 1796552 - DNA, 25 bp, Homo sapien
catggcattcgccatacaagctgca

SEQ ID NO: 1796553 - DNA, 25 bp, Homo sapien
ttaactctttgtagagaaggacaca

SEQ ID NO: 1796554 - DNA, 25 bp, Homo sapien
ctgggaacacctagacctgacttcc

SEQ ID NO: 1796555 - DNA, 25 bp, Homo sapien
tctctgtgcctctatcaatattctt

SEQ ID NO: 1796556 - DNA, 25 bp, Homo sapien
tagacctgacttccctgcccaggtt

SEQ ID NO: 1796557 - DNA, 25 bp, Homo sapien
tttcctagtacaagagtgccccggc

SEQ ID NO: 1796558 - DNA, 25 bp, Homo sapien
gcagtatttgatatgccgggaacat

SEQ ID NO: 1796559 - DNA, 25 bp, Homo sapien
cacagtcgcaagcaaactttaactc

SEQ ID NO: 1796560 - DNA, 25 bp, Homo sapien
gttgctccgtttacctacacagtcg

SEQ ID NO: 1796561 - DNA, 25 bp, Homo sapien
gatttaggcaaagtgagctgcagta

SEQ ID NO: 1796562 - DNA, 25 bp, Homo sapien
tcattatagccgctacccaatcaga

SEQ ID NO: 1796563 - DNA, 25 bp, Homo sapien
gccgctacccaatcagatcgtatag

SEQ ID NO: 1796564 - DNA, 25 bp, Homo sapien
ttatagccgctacccaatcagatcg

SEQ ID NO: 1796565 - DNA, 25 bp, Homo sapien
cccaatcagatcgtatagcaaacac

SEQ ID NO: 1796566 - DNA, 25 bp, Homo sapien
ccaaagcgcttggtgttagggctgc

SEQ ID NO: 1796567 - DNA, 25 bp, Homo sapien
tctaccaaagcgcttggtgttaggg

SEQ ID NO: 1796568 - DNA, 25 bp, Homo sapien
tcaatctaccaaagcgcttggtgtt

SEQ ID NO: 1796569 - DNA, 25 bp, Homo sapien
aaagcgcttggtgttagggctgctc

SEQ ID NO: 1796570 - DNA, 25 bp, Homo sapien
ggagagagcttcctcgcagtgaggg

SEQ ID NO: 1796571 - DNA, 25 bp, Homo sapien
agatgtcttgctccagcacgggctc

SEQ ID NO: 1796572 - DNA, 25 bp, Homo sapien
cactgggtgaatgtgtcaaaggaga

SEQ ID NO: 1796573 - DNA, 25 bp, Homo sapien
tccttgcactgggtgaatgtgtcaa

SEQ ID NO: 1796574 - DNA, 25 bp, Homo sapien
ctagcatacagagagttcacgaagt

SEQ ID NO: 1796575 - DNA, 25 bp, Homo sapien
tcatacgtagaagtgggctgccagt

SEQ ID NO: 1796576 - DNA, 25 bp, Homo sapien
tgtggcgcgtgtggcagccaattca

SEQ ID NO: 1796577 - DNA, 25 bp, Homo sapien
ttcacgaagtagctgactgtggcgc

SEQ ID NO: 1796578 - DNA, 25 bp, Homo sapien
tacagcgattataggagccatctcc

SEQ ID NO: 1796579 - DNA, 25 bp, Homo sapien
gaaataggcaaagtgcattagtaca

SEQ ID NO: 1796580 - DNA, 25 bp, Homo sapien
caaaagccagttgtgtacccaggaa

SEQ ID NO: 1796581 - DNA, 25 bp, Homo sapien
tcttaagggctgaaccaaaagccag

SEQ ID NO: 1796582 - DNA, 25 bp, Homo sapien
caggaatctcctgtcccactgaagg

SEQ ID NO: 1796583 - DNA, 25 bp, Homo sapien
ggaatcccttgataacactcccttg

SEQ ID NO: 1796584 - DNA, 25 bp, Homo sapien
ccactgaaggatagcaggcgtttcc

SEQ ID NO: 1796585 - DNA, 25 bp, Homo sapien
tcttgaggtcccaaagtacggtcca

SEQ ID NO: 1796586 - DNA, 25 bp, Homo sapien
tctttgtcactgtaatgaaaactgc

SEQ ID NO: 1796587 - DNA, 25 bp, Homo sapien
gaaaatgacttagatttctgttggg

SEQ ID NO: 1796588 - DNA, 25 bp, Homo sapien
ttctgttgggtagatggatttttgg

SEQ ID NO: 1796589 - DNA, 25 bp, Homo sapien
gtgcaattttctttaacatagtggg

SEQ ID NO: 1796590 - DNA, 25 bp, Homo sapien
aatcgtagcaatgtttttgaaacca

SEQ ID NO: 1796591 - DNA, 25 bp, Homo sapien
cttttttgcaggcacggcttggcat

SEQ ID NO: 1796592 - DNA, 25 bp, Homo sapien
tcttcgaatacagatagtgctttct

SEQ ID NO: 1796593 - DNA, 25 bp, Homo sapien
cactactgacatcaaaagggccact

SEQ ID NO: 1796594 - DNA, 25 bp, Homo sapien
gcttcacataggagcaaaagccctt

SEQ ID NO: 1796595 - DNA, 25 bp, Homo sapien
cataggagcaaaagcccttcttgct

SEQ ID NO: 1796596 - DNA, 25 bp, Homo sapien
ctgcttcacataggagcaaaagccc

SEQ ID NO: 1796597 - DNA, 25 bp, Homo sapien
ttcacataggagcaaaagcccttct

SEQ ID NO: 1796598 - DNA, 25 bp, Homo sapien
gggagatacgcatctgcgagacatg

SEQ ID NO: 1796599 - DNA, 25 bp, Homo sapien
atcggaggaccacttggtgtatgcc

SEQ ID NO: 1796600 - DNA, 25 bp, Homo sapien
gcgagacatgctgacttgctgattc

SEQ ID NO: 1796601 - DNA, 25 bp, Homo sapien
tgctgattcatctatggaattcaaa

SEQ ID NO: 1796602 - DNA, 25 bp, Homo sapien
gactcacactggagatgtaggaaag

SEQ ID NO: 1796603 - DNA, 25 bp, Homo sapien
ctcacactggagatgtaggaaagga

SEQ ID NO: 1796604 - DNA, 25 bp, Homo sapien
tcacactggagatgtaggaaaggag

SEQ ID NO: 1796605 - DNA, 25 bp, Homo sapien
acactggagatgtaggaaaggagaa

SEQ ID NO: 1796606 - DNA, 25 bp, Homo sapien
ggctttcactgaaacctcatttctg

SEQ ID NO: 1796607 - DNA, 25 bp, Homo sapien
ctaccagtatcctgggagccaactg

SEQ ID NO: 1796608 - DNA, 25 bp, Homo sapien
tctgggattcttattgttggtgtgc

SEQ ID NO: 1796609 - DNA, 25 bp, Homo sapien
tcatgttgcagcttccctccagtgt

SEQ ID NO: 1796610 - DNA, 25 bp, Homo sapien
gccgagactgtcttccaatacttga

SEQ ID NO: 1796611 - DNA, 25 bp, Homo sapien
tatgcaatttccagggattgactcc

SEQ ID NO: 1796612 - DNA, 25 bp, Homo sapien
agactttggccatagaattgatcag

SEQ ID NO: 1796613 - DNA, 25 bp, Homo sapien
gctagcttcctgaatgccgagactg

SEQ ID NO: 1796614 - DNA, 25 bp, Homo sapien
aatctattgcatgggtcttcctggg

SEQ ID NO: 1796615 - DNA, 25 bp, Homo sapien
aaatagtgaagagtaccaccatgcc

SEQ ID NO: 1796616 - DNA, 25 bp, Homo sapien
gagtgtgctgctattccttgacagt

SEQ ID NO: 1796617 - DNA, 25 bp, Homo sapien
ttctaagttgagtcccaggaatcta

SEQ ID NO: 1796618 - DNA, 25 bp, Homo sapien
caagcatttcttgaactgatttaaa

SEQ ID NO: 1796619 - DNA, 25 bp, Homo sapien
tcaagcatttcttgaactgatttaa

SEQ ID NO: 1796620 - DNA, 25 bp, Homo sapien
attcaagcatttcttgaactgattt

SEQ ID NO: 1796621 - DNA, 25 bp, Homo sapien
agcatttcttgaactgatttaaaat

SEQ ID NO: 1796622 - DNA, 25 bp, Homo sapien
tttcaggtccctggtggtactggta

SEQ ID NO: 1796623 - DNA, 25 bp, Homo sapien
gatggatatggccaaagacagaaat

SEQ ID NO: 1796624 - DNA, 25 bp, Homo sapien
tactggtaccattctgagaacatgg

SEQ ID NO: 1796625 - DNA, 25 bp, Homo sapien
tggatatggccaaagacagaaatct

SEQ ID NO: 1796626 - DNA, 25 bp, Homo sapien
tcttcttggctacggcagaccttga

SEQ ID NO: 1796627 - DNA, 25 bp, Homo sapien
ggtccctatacctttcaatactctg

SEQ ID NO: 1796628 - DNA, 25 bp, Homo sapien
aagcccagtgccttccaacctgagt

SEQ ID NO: 1796629 - DNA, 25 bp, Homo sapien
gagtctgcttttgcgggtccctggt

SEQ ID NO: 1796630 - DNA, 25 bp, Homo sapien
ttcaccagctgaaaggtcgtgttca

SEQ ID NO: 1796631 - DNA, 25 bp, Homo sapien
aggtcgtgttcatgcaaagatcttc

SEQ ID NO: 1796632 - DNA, 25 bp, Homo sapien
agttttgagagctgagcggctcttc

SEQ ID NO: 1796633 - DNA, 25 bp, Homo sapien
aggtatctacatgacagcagttttg

SEQ ID NO: 1796634 - DNA, 25 bp, Homo sapien
ttctggtggggattctttatggaag

SEQ ID NO: 1796635 - DNA, 25 bp, Homo sapien
gtgtctctctgattgagggcttaga

SEQ ID NO: 1796636 - DNA, 25 bp, Homo sapien
ctctctgattgagggcttagaaaga

SEQ ID NO: 1796637 - DNA, 25 bp, Homo sapien
agagtgtctctctgattgagggctt

SEQ ID NO: 1796638 - DNA, 25 bp, Homo sapien
cctttccaagtggttcacctcgcat

SEQ ID NO: 1796639 - DNA, 25 bp, Homo sapien
gatcctttccaagtggttcacctcg

SEQ ID NO: 1796640 - DNA, 25 bp, Homo sapien
atcctttccaagtggttcacctcgc

SEQ ID NO: 1796641 - DNA, 25 bp, Homo sapien
tcctttccaagtggttcacctcgca

SEQ ID NO: 1796642 - DNA, 25 bp, Homo sapien
tgacacagcgactgcaaactgtctc

SEQ ID NO: 1796643 - DNA, 25 bp, Homo sapien
aatatccccggtgcccctagactgt

SEQ ID NO: 1796644 - DNA, 25 bp, Homo sapien
tgctgacacagcgactgcaaactgt

SEQ ID NO: 1796645 - DNA, 25 bp, Homo sapien
tctgagctttcttccgacagcgtca

SEQ ID NO: 1796646 - DNA, 25 bp, Homo sapien
gctctgggacgtcgttgttgatgca

SEQ ID NO: 1796647 - DNA, 25 bp, Homo sapien
tgatttgccaaaagcctgtgtttct

SEQ ID NO: 1796648 - DNA, 25 bp, Homo sapien
tgccttgggcccatgatttgccaaa

SEQ ID NO: 1796649 - DNA, 25 bp, Homo sapien
tctgggacgtcgttgttgatgcagt

SEQ ID NO: 1796650 - DNA, 25 bp, Homo sapien
ctatgacaggaagagatgagaagac

SEQ ID NO: 1796651 - DNA, 25 bp, Homo sapien
agagatgagaagactttgacttttg

SEQ ID NO: 1796652 - DNA, 25 bp, Homo sapien
tgacaggaagagatgagaagacttt

SEQ ID NO: 1796653 - DNA, 25 bp, Homo sapien
caggaagagatgagaagactttgac

SEQ ID NO: 1796654 - DNA, 25 bp, Homo sapien
cagatcagcttcaagctgaataaag

SEQ ID NO: 1796655 - DNA, 25 bp, Homo sapien
ccacgtgcttgagtctggactggac

SEQ ID NO: 1796656 - DNA, 25 bp, Homo sapien
aagtaaagaatgacccacgtgcttg

SEQ ID NO: 1796657 - DNA, 25 bp, Homo sapien
gaatgacccacgtgcttgagtctgg

SEQ ID NO: 1796658 - DNA, 25 bp, Homo sapien
taggagaacaagtggcaaccaggtc

SEQ ID NO: 1796659 - DNA, 25 bp, Homo sapien
caactgttagggtcgaatgttctca

SEQ ID NO: 1796660 - DNA, 25 bp, Homo sapien
gcttatatgtaccaactgctgcctg

SEQ ID NO: 1796661 - DNA, 25 bp, Homo sapien
tccaagatgcgtagcaggtacaagt

SEQ ID NO: 1796662 - DNA, 25 bp, Homo sapien
taaaccgtgctttatctgggagcag

SEQ ID NO: 1796663 - DNA, 25 bp, Homo sapien
tcagggagagatatgcaaatgttca

SEQ ID NO: 1796664 - DNA, 25 bp, Homo sapien
tttaggaacatatccaagcagagat

SEQ ID NO: 1796665 - DNA, 25 bp, Homo sapien
gataaaggcgtcttactgtactcat

SEQ ID NO: 1796666 - DNA, 25 bp, Homo sapien
cactccaaatcctgagtggtatcat

SEQ ID NO: 1796667 - DNA, 25 bp, Homo sapien
tgagtggtatcattgtaggtacagc

SEQ ID NO: 1796668 - DNA, 25 bp, Homo sapien
aatgcttgctgagcccactccaaat

SEQ ID NO: 1796669 - DNA, 25 bp, Homo sapien
ttgagcttgcctatgatcacaatgg

SEQ ID NO: 1796670 - DNA, 25 bp, Homo sapien
atacagttgctcttgcaaagagatt

SEQ ID NO: 1796671 - DNA, 25 bp, Homo sapien
gggtaggattcacccagaaaataca

SEQ ID NO: 1796672 - DNA, 25 bp, Homo sapien
gttgctcttgcaaagagatttggtt

SEQ ID NO: 1796673 - DNA, 25 bp, Homo sapien
tatgttcggtctgaagctaggggta

SEQ ID NO: 1796674 - DNA, 25 bp, Homo sapien
tatcagctttaacggtgcatttctt

SEQ ID NO: 1796675 - DNA, 25 bp, Homo sapien
tttatcagctttaacggtgcatttc

SEQ ID NO: 1796676 - DNA, 25 bp, Homo sapien
tcttttatcagctttaacggtgcat

SEQ ID NO: 1796677 - DNA, 25 bp, Homo sapien
cagctttaacggtgcatttcttcct

SEQ ID NO: 1796678 - DNA, 25 bp, Homo sapien
caggatctcggcaggcatggtacat

SEQ ID NO: 1796679 - DNA, 25 bp, Homo sapien
gacagaggaacccataaaccacact

SEQ ID NO: 1796680 - DNA, 25 bp, Homo sapien
cactcagcaatctggacaggccatt

SEQ ID NO: 1796681 - DNA, 25 bp, Homo sapien
gagctgggcagacactaacaatgac

SEQ ID NO: 1796682 - DNA, 25 bp, Homo sapien
actggcattcccactaaatcccctt

SEQ ID NO: 1796683 - DNA, 25 bp, Homo sapien
caaacactggcattcccactaaatc

SEQ ID NO: 1796684 - DNA, 25 bp, Homo sapien
tcaaacactggcattcccactaaat

SEQ ID NO: 1796685 - DNA, 25 bp, Homo sapien
aacactggcattcccactaaatccc

SEQ ID NO: 1796686 - DNA, 25 bp, Homo sapien
tcaggtaaaggggatccatgttcaa

SEQ ID NO: 1796687 - DNA, 25 bp, Homo sapien
cctgccatctctattagcaattctg

SEQ ID NO: 1796688 - DNA, 25 bp, Homo sapien
aattctgcttgttgcggctgtggct

SEQ ID NO: 1796689 - DNA, 25 bp, Homo sapien
tggcttccttctgcatgcggacctc

SEQ ID NO: 1796690 - DNA, 25 bp, Homo sapien
aactgatgccttccattaacagctc

SEQ ID NO: 1796691 - DNA, 25 bp, Homo sapien
cagagatcccaatatgatactagag

SEQ ID NO: 1796692 - DNA, 25 bp, Homo sapien
caggtttagcgatcatatgtctcaa

SEQ ID NO: 1796693 - DNA, 25 bp, Homo sapien
agagctggttgaatagtactggaca

SEQ ID NO: 1796694 - DNA, 25 bp, Homo sapien
caaaggaaaaatgaacgctacaggt

SEQ ID NO: 1796695 - DNA, 25 bp, Homo sapien
taaagttcctgggaagacgggctga

SEQ ID NO: 1796696 - DNA, 25 bp, Homo sapien
agccaggatgaagctgaccttgcca

SEQ ID NO: 1796697 - DNA, 25 bp, Homo sapien
tcctggaggagacgaatttgcatgt

SEQ ID NO: 1796698 - DNA, 25 bp, Homo sapien
gtaagctccgctgtgtcctggataa

SEQ ID NO: 1796699 - DNA, 25 bp, Homo sapien
cttgcagagctggtcatgagccgct

SEQ ID NO: 1796700 - DNA, 25 bp, Homo sapien
tcctcttctctacagtgacccggtt

SEQ ID NO: 1796701 - DNA, 25 bp, Homo sapien
tcttctctacagtgacccggttcac

SEQ ID NO: 1796702 - DNA, 25 bp, Homo sapien
tcatgagccgctggcattttcctct

SEQ ID NO: 1796703 - DNA, 25 bp, Homo sapien
tcatggaagaccttcctcaaggggg

SEQ ID NO: 1796704 - DNA, 25 bp, Homo sapien
gaggatggccaaacccgctactctc

SEQ ID NO: 1796705 - DNA, 25 bp, Homo sapien
tatgcgagtgtgaccctttccaggg

SEQ ID NO: 1796706 - DNA, 25 bp, Homo sapien
gtgctctgggaaaaatatgcgagtg

SEQ ID NO: 1796707 - DNA, 25 bp, Homo sapien
ggttgacctttgtattcctgactga

SEQ ID NO: 1796708 - DNA, 25 bp, Homo sapien
tcctgactgagtcttgtcctgatat

SEQ ID NO: 1796709 - DNA, 25 bp, Homo sapien
tcagaggacagcgtgcgctaacagc

SEQ ID NO: 1796710 - DNA, 25 bp, Homo sapien
tcttggacctgtggcaatgccttct

SEQ ID NO: 1796711 - DNA, 25 bp, Homo sapien
ccagtgagtacaaaaatatgggcca

SEQ ID NO: 1796712 - DNA, 25 bp, Homo sapien
tgagaagaagtaaaaccaatgtccc

SEQ ID NO: 1796713 - DNA, 25 bp, Homo sapien
cacttgaatgatgctgtgcagaaca

SEQ ID NO: 1796714 - DNA, 25 bp, Homo sapien
caagtgtagcccagacatctgagta

SEQ ID NO: 1796715 - DNA, 25 bp, Homo sapien
gaagagctcgctgcttataatcgca

SEQ ID NO: 1796716 - DNA, 25 bp, Homo sapien
catgtgctctctgacaaaagaacag

SEQ ID NO: 1796717 - DNA, 25 bp, Homo sapien
tgtgtgatgacttgactgctccctg

SEQ ID NO: 1796718 - DNA, 25 bp, Homo sapien
gcttataatcgcatagtttttggca

SEQ ID NO: 1796719 - DNA, 25 bp, Homo sapien
gaattacacggaaagttacatggca

SEQ ID NO: 1796720 - DNA, 25 bp, Homo sapien
gaagagttatcatggccccaagtga

SEQ ID NO: 1796721 - DNA, 25 bp, Homo sapien
gactgagcaataatgagtgaagcat

SEQ ID NO: 1796722 - DNA, 25 bp, Homo sapien
agcaaggtggttgagggaattacac

SEQ ID NO: 1796723 - DNA, 25 bp, Homo sapien
aaagagcagccggcctcagtcactt

SEQ ID NO: 1796724 - DNA, 25 bp, Homo sapien
gaggccaatttggataatagcagag

SEQ ID NO: 1796725 - DNA, 25 bp, Homo sapien
taatagcagagccaccttgttcctt

SEQ ID NO: 1796726 - DNA, 25 bp, Homo sapien
tcacttcctccggtggatgccagag

SEQ ID NO: 1796727 - DNA, 25 bp, Homo sapien
cagttaggctaatcacacgtgtata

SEQ ID NO: 1796728 - DNA, 25 bp, Homo sapien
cagtggccagttaggctaatcacac

SEQ ID NO: 1796729 - DNA, 25 bp, Homo sapien
cacacgtgtatattccccggggata

SEQ ID NO: 1796730 - DNA, 25 bp, Homo sapien
tggccagttaggctaatcacacgtg

SEQ ID NO: 1796731 - DNA, 25 bp, Homo sapien
ctgtggtttgtcgttcagtttttgg

SEQ ID NO: 1796732 - DNA, 25 bp, Homo sapien
aggacccactgaggatttccagtcc

SEQ ID NO: 1796733 - DNA, 25 bp, Homo sapien
tccagtccgagctcggaatctgtgg

SEQ ID NO: 1796734 - DNA, 25 bp, Homo sapien
tgaggatttccagtccgagctcgga

SEQ ID NO: 1796735 - DNA, 25 bp, Homo sapien
tgaactcagcggaagctggggaccg

SEQ ID NO: 1796736 - DNA, 25 bp, Homo sapien
tggatgaatctgtggatgtggtatc

SEQ ID NO: 1796737 - DNA, 25 bp, Homo sapien
tgaatctgtggatgtggtatccaca

SEQ ID NO: 1796738 - DNA, 25 bp, Homo sapien
gaccgagtattgctgtggaggataa

SEQ ID NO: 1796739 - DNA, 25 bp, Homo sapien
taccttagggggctaaggagagaca

SEQ ID NO: 1796740 - DNA, 25 bp, Homo sapien
ggaggtaaactgtccactgtgagag

SEQ ID NO: 1796741 - DNA, 25 bp, Homo sapien
acaaggctgcaaggggccccaaaag

SEQ ID NO: 1796742 - DNA, 25 bp, Homo sapien
ctgtgagagggggataccttagggg

SEQ ID NO: 1796743 - DNA, 25 bp, Homo sapien
tctggcaggtgttaacatcatggca

SEQ ID NO: 1796744 - DNA, 25 bp, Homo sapien
ctaatagagattgatgcaggcaggg

SEQ ID NO: 1796745 - DNA, 25 bp, Homo sapien
ggttgactactgattggagactgaa

SEQ ID NO: 1796746 - DNA, 25 bp, Homo sapien
gcatcagcaacaaggcagctctgag

SEQ ID NO: 1796747 - DNA, 25 bp, Homo sapien
gaccgagagctttcaggcaagcaag

SEQ ID NO: 1796748 - DNA, 25 bp, Homo sapien
gaggctgttcttcctttatgcagac

SEQ ID NO: 1796749 - DNA, 25 bp, Homo sapien
gcagaagctgctcgttgatgataga

SEQ ID NO: 1796750 - DNA, 25 bp, Homo sapien
gaccaaatttctgaccgagagcttt

SEQ ID NO: 1796751 - DNA, 25 bp, Homo sapien
gaaagtgctagaacagatcattccc

SEQ ID NO: 1796752 - DNA, 25 bp, Homo sapien
tgaagaagcagagtgagtaggagta

SEQ ID NO: 1796753 - DNA, 25 bp, Homo sapien
cttgccacctcgagccatgagctga

SEQ ID NO: 1796754 - DNA, 25 bp, Homo sapien
acctcgagccatgagctgaactgaa

SEQ ID NO: 1796755 - DNA, 25 bp, Homo sapien
agtgcattcttgaaggtgtaatttc

SEQ ID NO: 1796756 - DNA, 25 bp, Homo sapien
acagctgaaggatcattactttttc

SEQ ID NO: 1796757 - DNA, 25 bp, Homo sapien
acagtgcattcttgaaggtgtaatt

SEQ ID NO: 1796758 - DNA, 25 bp, Homo sapien
cagctgaaggatcattactttttcc

SEQ ID NO: 1796759 - DNA, 25 bp, Homo sapien
gaccagccaggagcaagacttgaaa

SEQ ID NO: 1796760 - DNA, 25 bp, Homo sapien
cagccaggagcaagacttgaaatcc

SEQ ID NO: 1796761 - DNA, 25 bp, Homo sapien
tggaccagccaggagcaagacttga

SEQ ID NO: 1796762 - DNA, 25 bp, Homo sapien
caggagcaagacttgaaatcctctt

SEQ ID NO: 1796763 - DNA, 25 bp, Homo sapien
gcactcctggtattggtttcttaga

SEQ ID NO: 1796764 - DNA, 25 bp, Homo sapien
ttccatctagcctaaagccatttgc

SEQ ID NO: 1796765 - DNA, 25 bp, Homo sapien
tcctgatccaattccatctagccta

SEQ ID NO: 1796766 - DNA, 25 bp, Homo sapien
tcttagatcttcctaagagcttctt

SEQ ID NO: 1796767 - DNA, 25 bp, Homo sapien
tccttctatgctgtgctaccccttc

SEQ ID NO: 1796768 - DNA, 25 bp, Homo sapien
cctccttctatgctgtgctacccct

SEQ ID NO: 1796769 - DNA, 25 bp, Homo sapien
ccccttcccaaaggcagtaagcagg

SEQ ID NO: 1796770 - DNA, 25 bp, Homo sapien
gtaagcaggggattccccagatgac

SEQ ID NO: 1796771 - DNA, 25 bp, Homo sapien
cattcactgttaagtgcagcttcct

SEQ ID NO: 1796772 - DNA, 25 bp, Homo sapien
ttcactgttaagtgcagcttccttc

SEQ ID NO: 1796773 - DNA, 25 bp, Homo sapien
ctggagacattcactgttaagtgca

SEQ ID NO: 1796774 - DNA, 25 bp, Homo sapien
gagacattcactgttaagtgcagct

SEQ ID NO: 1796775 - DNA, 25 bp, Homo sapien
tccagtccaacatgcttgcaacatg

SEQ ID NO: 1796776 - DNA, 25 bp, Homo sapien
catgttgaatcattcagggaagaaa

SEQ ID NO: 1796777 - DNA, 25 bp, Homo sapien
catgctaatggtattctccagtcca

SEQ ID NO: 1796778 - DNA, 25 bp, Homo sapien
atccaatctgaaatttgacagttat

SEQ ID NO: 1796779 - DNA, 25 bp, Homo sapien
tggtttgcaacgctacaagtaactt

SEQ ID NO: 1796780 - DNA, 25 bp, Homo sapien
ttgcctcttcaagcctgttctgttg

SEQ ID NO: 1796781 - DNA, 25 bp, Homo sapien
gctacaagtaacttccggcccttgc

SEQ ID NO: 1796782 - DNA, 25 bp, Homo sapien
tcttcaagcctgttctgttgatcat

SEQ ID NO: 1796783 - DNA, 25 bp, Homo sapien
gcaacaaggatagtcgccaggttcc

SEQ ID NO: 1796784 - DNA, 25 bp, Homo sapien
gagtcaacacgccaacccaaagttg

SEQ ID NO: 1796785 - DNA, 25 bp, Homo sapien
ccaaagttgtgccttgaagttggct

SEQ ID NO: 1796786 - DNA, 25 bp, Homo sapien
gctccgtgggtagaaaccgacgtca

SEQ ID NO: 1796787 - DNA, 25 bp, Homo sapien
ctgttctgttgcaggcaaggtcaat

SEQ ID NO: 1796788 - DNA, 25 bp, Homo sapien
taaggaatcaagttgggagcgcctg

SEQ ID NO: 1796789 - DNA, 25 bp, Homo sapien
ggtcagagcgctggtaatctccaag

SEQ ID NO: 1796790 - DNA, 25 bp, Homo sapien
gcctgcctggcgtttctctaggtca

SEQ ID NO: 1796791 - DNA, 25 bp, Homo sapien
ttgctcttctccgtttggtatttga

SEQ ID NO: 1796792 - DNA, 25 bp, Homo sapien
tgctcttctccgtttggtatttgac

SEQ ID NO: 1796793 - DNA, 25 bp, Homo sapien
ttattgctcttctccgtttggtatt

SEQ ID NO: 1796794 - DNA, 25 bp, Homo sapien
tattgctcttctccgtttggtattt

SEQ ID NO: 1796795 - DNA, 25 bp, Homo sapien
caggcttcccgtttcctctgagata

SEQ ID NO: 1796796 - DNA, 25 bp, Homo sapien
tgtctgctcacaagggtgcaggcat

SEQ ID NO: 1796797 - DNA, 25 bp, Homo sapien
ctgctcacaagggtgcaggcatcta

SEQ ID NO: 1796798 - DNA, 25 bp, Homo sapien
caggcatctaggaacaggcttcccg

SEQ ID NO: 1796799 - DNA, 25 bp, Homo sapien
gaaggcttgggactttcagaatcaa

SEQ ID NO: 1796800 - DNA, 25 bp, Homo sapien
cactcagctcgtgctctgacacagg

SEQ ID NO: 1796801 - DNA, 25 bp, Homo sapien
tatttgtcatattctcctcagagag

SEQ ID NO: 1796802 - DNA, 25 bp, Homo sapien
acaagcatctctcgtttccactcag

SEQ ID NO: 1796803 - DNA, 25 bp, Homo sapien
gctcaatccgtagctgtcccctggt

SEQ ID NO: 1796804 - DNA, 25 bp, Homo sapien
ctcaatccgtagctgtcccctggtt

SEQ ID NO: 1796805 - DNA, 25 bp, Homo sapien
tccagtcttgtgccccagcctgcat

SEQ ID NO: 1796806 - DNA, 25 bp, Homo sapien
attccgtatccctctgctctctcca

SEQ ID NO: 1796807 - DNA, 25 bp, Homo sapien
ctctccagtcttgtgccccagcctg

SEQ ID NO: 1796808 - DNA, 25 bp, Homo sapien
gctctctccagtcttgtgccccagc

SEQ ID NO: 1796809 - DNA, 25 bp, Homo sapien
taacgacatcccattctgatccttc

SEQ ID NO: 1796810 - DNA, 25 bp, Homo sapien
aacgacatcccattctgatccttct

SEQ ID NO: 1796811 - DNA, 25 bp, Homo sapien
ctaacgacatcccattctgatcctt

SEQ ID NO: 1796812 - DNA, 25 bp, Homo sapien
cagagcgagatttccccgtgtgttg

SEQ ID NO: 1796813 - DNA, 25 bp, Homo sapien
caagataactcttggctgcccagag

SEQ ID NO: 1796814 - DNA, 25 bp, Homo sapien
tgacagtgaacacatcagcgcacag

SEQ ID NO: 1796815 - DNA, 25 bp, Homo sapien
gcacagcacttgctgacatcgagga

SEQ ID NO: 1796816 - DNA, 25 bp, Homo sapien
ttggagattgggcaagaaagcacac

SEQ ID NO: 1796817 - DNA, 25 bp, Homo sapien
cagggacatgcaggtgtgacacgaa

SEQ ID NO: 1796818 - DNA, 25 bp, Homo sapien
tagtagcctcgatgctgaaagcagg

SEQ ID NO: 1796819 - DNA, 25 bp, Homo sapien
gacaccaagataggaactgctgctt

SEQ ID NO: 1796820 - DNA, 25 bp, Homo sapien
gtattgctgtatgcccttcactctg

SEQ ID NO: 1796821 - DNA, 25 bp, Homo sapien
tgctgtatgcccttcactctgggga

SEQ ID NO: 1796822 - DNA, 25 bp, Homo sapien
ttgtattgctgtatgcccttcactc

SEQ ID NO: 1796823 - DNA, 25 bp, Homo sapien
ctgtatgcccttcactctggggaaa

SEQ ID NO: 1796824 - DNA, 25 bp, Homo sapien
tgtcgctgacgcagtggtacaagtg

SEQ ID NO: 1796825 - DNA, 25 bp, Homo sapien
cagtgccgtcctgtcgctgacgcag

SEQ ID NO: 1796826 - DNA, 25 bp, Homo sapien
gtcagaggtgactagctgagctgca

SEQ ID NO: 1796827 - DNA, 25 bp, Homo sapien
ggagcacagtgcaatggttgccatg

SEQ ID NO: 1796828 - DNA, 25 bp, Homo sapien
ggaagaatcccattgttggatctgg

SEQ ID NO: 1796829 - DNA, 25 bp, Homo sapien
ggtcgtgtgattgctgtctacttgt

SEQ ID NO: 1796830 - DNA, 25 bp, Homo sapien
ttcctggttgtcaagtgtggttttg

SEQ ID NO: 1796831 - DNA, 25 bp, Homo sapien
ccattgttggatctggctggctctg

SEQ ID NO: 1796832 - DNA, 25 bp, Homo sapien
ctgttcccacagcattgtattcttt

SEQ ID NO: 1796833 - DNA, 25 bp, Homo sapien
gtctgccagaggccgtggcaagcct

SEQ ID NO: 1796834 - DNA, 25 bp, Homo sapien
aggccgtggcaagcctctgtgtgcc

SEQ ID NO: 1796835 - DNA, 25 bp, Homo sapien
gttcccacagcattgtattctttct

SEQ ID NO: 1796836 - DNA, 25 bp, Homo sapien
gatgcctgagaatgataaccaaagc

SEQ ID NO: 1796837 - DNA, 25 bp, Homo sapien
ttcttcctcaccacagtgcgctgcc

SEQ ID NO: 1796838 - DNA, 25 bp, Homo sapien
cctgagaatgataaccaaagctctt

SEQ ID NO: 1796839 - DNA, 25 bp, Homo sapien
tgagggatgcctgagaatgataacc

SEQ ID NO: 1796840 - DNA, 25 bp, Homo sapien
gcacatctgccaaagcccacatgtt

SEQ ID NO: 1796841 - DNA, 25 bp, Homo sapien
ccagaggagcaccactgtgatgacc

SEQ ID NO: 1796842 - DNA, 25 bp, Homo sapien
tctgagtagaatctgaccaggatct

SEQ ID NO: 1796843 - DNA, 25 bp, Homo sapien
tctgccttccaagtcacatgtgagt

SEQ ID NO: 1796844 - DNA, 25 bp, Homo sapien
tgcaaatgtggttgggcattctcgg

SEQ ID NO: 1796845 - DNA, 25 bp, Homo sapien
agggaaagcttgaacgaaggaagca

SEQ ID NO: 1796846 - DNA, 25 bp, Homo sapien
aagcaaggcatgatgcatgtggtgt

SEQ ID NO: 1796847 - DNA, 25 bp, Homo sapien
tagggaagtgctgtaaaggtggctg

SEQ ID NO: 1796848 - DNA, 25 bp, Homo sapien
tgtgagcttggtgtctttctggtcc

SEQ ID NO: 1796849 - DNA, 25 bp, Homo sapien
ttttgtgagcttggtgtctttctgg

SEQ ID NO: 1796850 - DNA, 25 bp, Homo sapien
gtgtgttttgtgagcttggtgtctt

SEQ ID NO: 1796851 - DNA, 25 bp, Homo sapien
tgagcttggtgtctttctggtccat

SEQ ID NO: 1796852 - DNA, 25 bp, Homo sapien
ctccaccccaggtaatgacctgttt

SEQ ID NO: 1796853 - DNA, 25 bp, Homo sapien
tctccaccccaggtaatgacctgtt

SEQ ID NO: 1796854 - DNA, 25 bp, Homo sapien
ctctccaccccaggtaatgacctgt

SEQ ID NO: 1796855 - DNA, 25 bp, Homo sapien
gagcctagaccagagccagcttgaa

SEQ ID NO: 1796856 - DNA, 25 bp, Homo sapien
ctcgattgtcagagcctagaccaga

SEQ ID NO: 1796857 - DNA, 25 bp, Homo sapien
ccagagccagcttgaagcttcagcc

SEQ ID NO: 1796858 - DNA, 25 bp, Homo sapien
gagccagcttgaagcttcagcccct

SEQ ID NO: 1796859 - DNA, 25 bp, Homo sapien
cctcagcttatcaattcaaatcatc

SEQ ID NO: 1796860 - DNA, 25 bp, Homo sapien
aacaactttaacatgctcttaactg

SEQ ID NO: 1796861 - DNA, 25 bp, Homo sapien
taactgtcattcctcacagaacctc

SEQ ID NO: 1796862 - DNA, 25 bp, Homo sapien
aactttaacatgctcttaactgtca

SEQ ID NO: 1796863 - DNA, 25 bp, Homo sapien
ctgtgatgattcctatgatctcagc

SEQ ID NO: 1796864 - DNA, 25 bp, Homo sapien
gatttcccaaactcttactctcagg

SEQ ID NO: 1796865 - DNA, 25 bp, Homo sapien
tatgatctcagccttggttctctca

SEQ ID NO: 1796866 - DNA, 25 bp, Homo sapien
ctttttgagctgatttcccaaactc

SEQ ID NO: 1796867 - DNA, 25 bp, Homo sapien
tcatccacgtcaaggcttctggcag

SEQ ID NO: 1796868 - DNA, 25 bp, Homo sapien
gcagagagggatgcgtctgttcttc

SEQ ID NO: 1796869 - DNA, 25 bp, Homo sapien
gcctcatccacgtcaaggcttctgg

SEQ ID NO: 1796870 - DNA, 25 bp, Homo sapien
gaaagcctcatccacgtcaaggctt

SEQ ID NO: 1796871 - DNA, 25 bp, Homo sapien
cctcccttgtggaccacgccttggt

SEQ ID NO: 1796872 - DNA, 25 bp, Homo sapien
ccccttcgcccttctcaatgttctc

SEQ ID NO: 1796873 - DNA, 25 bp, Homo sapien
tgggggttcggccagatgtattgga

SEQ ID NO: 1796874 - DNA, 25 bp, Homo sapien
gtcaggtctgccctgttcctacaca

SEQ ID NO: 1796875 - DNA, 25 bp, Homo sapien
ctggagctctgatgtctgctgtaac

SEQ ID NO: 1796876 - DNA, 25 bp, Homo sapien
agctccttctggagctctgatgtct

SEQ ID NO: 1796877 - DNA, 25 bp, Homo sapien
tctggagctctgatgtctgctgtaa

SEQ ID NO: 1796878 - DNA, 25 bp, Homo sapien
ctaagctccttctggagctctgatg

SEQ ID NO: 1796879 - DNA, 25 bp, Homo sapien
tttacatcccacttcattgtaaacg

SEQ ID NO: 1796880 - DNA, 25 bp, Homo sapien
tcaacattgctacttcagtgagaag

SEQ ID NO: 1796881 - DNA, 25 bp, Homo sapien
tacatcccacttcattgtaaacgtt

SEQ ID NO: 1796882 - DNA, 25 bp, Homo sapien
tttctttcaacattgctacttcagt

SEQ ID NO: 1796883 - DNA, 25 bp, Homo sapien
ggagagagattcactgcctggggga

SEQ ID NO: 1796884 - DNA, 25 bp, Homo sapien
cacagggagagagattcactgcctg

SEQ ID NO: 1796885 - DNA, 25 bp, Homo sapien
gagagattcactgcctgggggacaa

SEQ ID NO: 1796886 - DNA, 25 bp, Homo sapien
gcacagggagagagattcactgcct

SEQ ID NO: 1796887 - DNA, 25 bp, Homo sapien
cagaacaaggctagcttgcaaggcc

SEQ ID NO: 1796888 - DNA, 25 bp, Homo sapien
tcctgtggaggatctcaggacctgc

SEQ ID NO: 1796889 - DNA, 25 bp, Homo sapien
agcctgcttcgcgtttcctgtggag

SEQ ID NO: 1796890 - DNA, 25 bp, Homo sapien
ggtcggcacatagtcgttggcagaa

SEQ ID NO: 1796891 - DNA, 25 bp, Homo sapien
atggaggatttgcctgtatgagtgt

SEQ ID NO: 1796892 - DNA, 25 bp, Homo sapien
tccttttcctgcagtacttcaactg

SEQ ID NO: 1796893 - DNA, 25 bp, Homo sapien
agtacttcaactggacaggattgca

SEQ ID NO: 1796894 - DNA, 25 bp, Homo sapien
taacaaaagtatggtagtcacactg

SEQ ID NO: 1796895 - DNA, 25 bp, Homo sapien
cccttccccaccaaggtgctcaaga

SEQ ID NO: 1796896 - DNA, 25 bp, Homo sapien
gaatttctgcatcttctttaaagtc

SEQ ID NO: 1796897 - DNA, 25 bp, Homo sapien
ctgcatcttctttaaagtccttaaa

SEQ ID NO: 1796898 - DNA, 25 bp, Homo sapien
ttccccaccaaggtgctcaagaatt

SEQ ID NO: 1796899 - DNA, 25 bp, Homo sapien
tcaacacaatgaagaaggagaggct

SEQ ID NO: 1796900 - DNA, 25 bp, Homo sapien
ctaaatatcaacacaatgaagaagg

SEQ ID NO: 1796901 - DNA, 25 bp, Homo sapien
cacaatgaagaaggagaggctcaac

SEQ ID NO: 1796902 - DNA, 25 bp, Homo sapien
atgaagaaggagaggctcaacccac

SEQ ID NO: 1796903 - DNA, 25 bp, Homo sapien
gataacagagcacagctatgagcat

SEQ ID NO: 1796904 - DNA, 25 bp, Homo sapien
ttgataacagagcacagctatgagc

SEQ ID NO: 1796905 - DNA, 25 bp, Homo sapien
caattgataacagagcacagctatg

SEQ ID NO: 1796906 - DNA, 25 bp, Homo sapien
ttgcaattgataacagagcacagct

SEQ ID NO: 1796907 - DNA, 25 bp, Homo sapien
ttgcctttctcagtattagtgggtt

SEQ ID NO: 1796908 - DNA, 25 bp, Homo sapien
gcctttctcagtattagtgggttaa

SEQ ID NO: 1796909 - DNA, 25 bp, Homo sapien
atttctccattttgtagaatccaac

SEQ ID NO: 1796910 - DNA, 25 bp, Homo sapien
ttctccattttgtagaatccaacat

SEQ ID NO: 1796911 - DNA, 25 bp, Homo sapien
tcaagtcctcggaaacaccattctg

SEQ ID NO: 1796912 - DNA, 25 bp, Homo sapien
aagtgcctgcagcttgccgatctag

SEQ ID NO: 1796913 - DNA, 25 bp, Homo sapien
tacgatggagatgtgtcaagtcctc

SEQ ID NO: 1796914 - DNA, 25 bp, Homo sapien
tctgttgtggttggctcactgagtg

SEQ ID NO: 1796915 - DNA, 25 bp, Homo sapien
tggagtccaggtgcaaagggatctt

SEQ ID NO: 1796916 - DNA, 25 bp, Homo sapien
cctgggaatccaggttcaaacaagg

SEQ ID NO: 1796917 - DNA, 25 bp, Homo sapien
acaaggttcagtgtctgacttcctg

SEQ ID NO: 1796918 - DNA, 25 bp, Homo sapien
gcagtcgctaataagtggagtccag

SEQ ID NO: 1796919 - DNA, 25 bp, Homo sapien
gggaccctggaagataggctgagaa

SEQ ID NO: 1796920 - DNA, 25 bp, Homo sapien
gaccctggaagataggctgagaaaa

SEQ ID NO: 1796921 - DNA, 25 bp, Homo sapien
ccctggaagataggctgagaaaagg

SEQ ID NO: 1796922 - DNA, 25 bp, Homo sapien
gctgagaaaaggtgtgcaggatcat

SEQ ID NO: 1796923 - DNA, 25 bp, Homo sapien
gaatgcaagcaatcattttgttggc

SEQ ID NO: 1796924 - DNA, 25 bp, Homo sapien
tatttgttggagtgaaggtaagcat

SEQ ID NO: 1796925 - DNA, 25 bp, Homo sapien
tgaaatatgctaaacttgcaggaac

SEQ ID NO: 1796926 - DNA, 25 bp, Homo sapien
gcaggaacggcacatatgaatgcaa

SEQ ID NO: 1796927 - DNA, 25 bp, Homo sapien
ggtacattgacataagccgccagct

SEQ ID NO: 1796928 - DNA, 25 bp, Homo sapien
agctgttgccacctccatctgaatg

SEQ ID NO: 1796929 - DNA, 25 bp, Homo sapien
gctataaatcaatgggcgattgcct

SEQ ID NO: 1796930 - DNA, 25 bp, Homo sapien
caatttaattccagcgtctcccctg

SEQ ID NO: 1796931 - DNA, 25 bp, Homo sapien
caggcaaggagggcaggttgccttc

SEQ ID NO: 1796932 - DNA, 25 bp, Homo sapien
aaggagggcaggttgccttcacctg

SEQ ID NO: 1796933 - DNA, 25 bp, Homo sapien
ggcaaggagggcaggttgccttcac

SEQ ID NO: 1796934 - DNA, 25 bp, Homo sapien
caaggagggcaggttgccttcacct

SEQ ID NO: 1796935 - DNA, 25 bp, Homo sapien
gtctcagtttgtgggtactcacttt

SEQ ID NO: 1796936 - DNA, 25 bp, Homo sapien
tttgtagtctcagtttgtgggtact

SEQ ID NO: 1796937 - DNA, 25 bp, Homo sapien
tttgtagtctcagtttgtgggtacc

SEQ ID NO: 1796938 - DNA, 25 bp, Homo sapien
tagtctcagtttgtgggtacccact

SEQ ID NO: 1796939 - DNA, 25 bp, Homo sapien
ttccaaaagccaaaactcgatgatt

SEQ ID NO: 1796940 - DNA, 25 bp, Homo sapien
ctatgggagaagtaatttccaaaag

SEQ ID NO: 1796941 - DNA, 25 bp, Homo sapien
tttccaaaagccaaaactcgatgat

SEQ ID NO: 1796942 - DNA, 25 bp, Homo sapien
tgggagaagtaatttccaaaagcca

SEQ ID NO: 1796943 - DNA, 25 bp, Homo sapien
tgtctcttcctttcaggagtgtgct

SEQ ID NO: 1796944 - DNA, 25 bp, Homo sapien
tcttcctttcaggagtgtgctctct

SEQ ID NO: 1796945 - DNA, 25 bp, Homo sapien
tctctggaggccctttgctccctct

SEQ ID NO: 1796946 - DNA, 25 bp, Homo sapien
tcactgatgttgcttcactgagatt

SEQ ID NO: 1796947 - DNA, 25 bp, Homo sapien
tttgcttgcattattgactgttctg

SEQ ID NO: 1796948 - DNA, 25 bp, Homo sapien
tgcattattgactgttctgatcatt

SEQ ID NO: 1796949 - DNA, 25 bp, Homo sapien
gcttgcattattgactgttctgatc

SEQ ID NO: 1796950 - DNA, 25 bp, Homo sapien
gcattattgactgttctgatcattt

SEQ ID NO: 1796951 - DNA, 25 bp, Homo sapien
cagagccgatatttcaccctggatg

SEQ ID NO: 1796952 - DNA, 25 bp, Homo sapien
cttcccagctaacggagagtctgcg

SEQ ID NO: 1796953 - DNA, 25 bp, Homo sapien
tatttctgttgttgaataaccggca

SEQ ID NO: 1796954 - DNA, 25 bp, Homo sapien
gaataaccggcacagggctagagcc

SEQ ID NO: 1796955 - DNA, 25 bp, Homo sapien
ccagggaataagctgtaaagtgtca

SEQ ID NO: 1796956 - DNA, 25 bp, Homo sapien
tccagctgcggacctctaagatcat

SEQ ID NO: 1796957 - DNA, 25 bp, Homo sapien
taaatcagtgtgacaccagggaata

SEQ ID NO: 1796958 - DNA, 25 bp, Homo sapien
aaaaggatctattagtgtggtccag

SEQ ID NO: 1796959 - DNA, 25 bp, Homo sapien
tttgacagtctgtcccttgagtgag

SEQ ID NO: 1796960 - DNA, 25 bp, Homo sapien
ggcggcaagacagcatggggctgca

SEQ ID NO: 1796961 - DNA, 25 bp, Homo sapien
tgcaaactttgacagtctgtccctt

SEQ ID NO: 1796962 - DNA, 25 bp, Homo sapien
gacagtctgtcccttgagtgagagc

SEQ ID NO: 1796963 - DNA, 25 bp, Homo sapien
ctgaatgactgttatagacacaggg

SEQ ID NO: 1796964 - DNA, 25 bp, Homo sapien
gactgttatagacacaggggattta

SEQ ID NO: 1796965 - DNA, 25 bp, Homo sapien
tgactgttatagacacaggggattt

SEQ ID NO: 1796966 - DNA, 25 bp, Homo sapien
tgttatagacacaggggatttatct

SEQ ID NO: 1796967 - DNA, 25 bp, Homo sapien
gtttgcagggcatgcgttattgcct

SEQ ID NO: 1796968 - DNA, 25 bp, Homo sapien
tttgcagggcatgcgttattgcctt

SEQ ID NO: 1796969 - DNA, 25 bp, Homo sapien
tcctgatggaactgagcttcactaa

SEQ ID NO: 1796970 - DNA, 25 bp, Homo sapien
catcctgatggaactgagcttcact

SEQ ID NO: 1796971 - DNA, 25 bp, Homo sapien
gcaggtgataagcatcctgatggaa

SEQ ID NO: 1796972 - DNA, 25 bp, Homo sapien
tcttgagttgctgcaggtgataagc

SEQ ID NO: 1796973 - DNA, 25 bp, Homo sapien
taagttaccatctggaatagaatcc

SEQ ID NO: 1796974 - DNA, 25 bp, Homo sapien
gaatccaatagtgatccaccaatgg

SEQ ID NO: 1796975 - DNA, 25 bp, Homo sapien
gtgatccaccaatggacaatttttg

SEQ ID NO: 1796976 - DNA, 25 bp, Homo sapien
tctcccttcactaagttaccatctg

SEQ ID NO: 1796977 - DNA, 25 bp, Homo sapien
ggttttcgtcaatcttattgagagg

SEQ ID NO: 1796978 - DNA, 25 bp, Homo sapien
cagcattgccgtgagatgacgtaac

SEQ ID NO: 1796979 - DNA, 25 bp, Homo sapien
taactccagcgctgagcttaggcca

SEQ ID NO: 1796980 - DNA, 25 bp, Homo sapien
gatgtggataaggaatacgtaaccc

SEQ ID NO: 1796981 - DNA, 25 bp, Homo sapien
gaatgcccctcttgccgtgtagctg

SEQ ID NO: 1796982 - DNA, 25 bp, Homo sapien
catgaaataaaaaaccggcgctgac

SEQ ID NO: 1796983 - DNA, 25 bp, Homo sapien
ggtaccagcgctgttctgaattcag

SEQ ID NO: 1796984 - DNA, 25 bp, Homo sapien
tcggcgccgaggctacatgatctgc

SEQ ID NO: 1796985 - DNA, 25 bp, Homo sapien
cagccaatggcttctaagcaccgca

SEQ ID NO: 1796986 - DNA, 25 bp, Homo sapien
cacaggacagtaaacatggcagcca

SEQ ID NO: 1796987 - DNA, 25 bp, Homo sapien
catggcagccaatggcttctaagca

SEQ ID NO: 1796988 - DNA, 25 bp, Homo sapien
cctggtccacaggacagtaaacatg

SEQ ID NO: 1796989 - DNA, 25 bp, Homo sapien
actcttcctgaccatcaccccgaaa

SEQ ID NO: 1796990 - DNA, 25 bp, Homo sapien
gacgacatcttcacgccttcacgtg

SEQ ID NO: 1796991 - DNA, 25 bp, Homo sapien
catcttctgtaaccagatccccaga

SEQ ID NO: 1796992 - DNA, 25 bp, Homo sapien
taaccagatccccagacgacatctt

SEQ ID NO: 1796993 - DNA, 25 bp, Homo sapien
tctttattcaaattcacaacgctac

SEQ ID NO: 1796994 - DNA, 25 bp, Homo sapien
tttctttattcaaattcacaacgct

SEQ ID NO: 1796995 - DNA, 25 bp, Homo sapien
atttctttattcaaattcacaacgc

SEQ ID NO: 1796996 - DNA, 25 bp, Homo sapien
ttctttattcaaattcacaacgcta

SEQ ID NO: 1796997 - DNA, 25 bp, Homo sapien
ccctcctttgtgttgcttcccatac

SEQ ID NO: 1796998 - DNA, 25 bp, Homo sapien
ttccctcctttgtgttgcttcccat

SEQ ID NO: 1796999 - DNA, 25 bp, Homo sapien
tccctcctttgtgttgcttcccata

SEQ ID NO: 1797000 - DNA, 25 bp, Homo sapien
cctcctttgtgttgcttcccatact

SEQ ID NO: 1797001 - DNA, 25 bp, Homo sapien
gcactcatgacgatggactctacgt

SEQ ID NO: 1797002 - DNA, 25 bp, Homo sapien
tgtacgttctggtagttaacaggct

SEQ ID NO: 1797003 - DNA, 25 bp, Homo sapien
catgcccaaacatgggtttagaagc

SEQ ID NO: 1797004 - DNA, 25 bp, Homo sapien
gccaaggggcggtcaccatttctca

SEQ ID NO: 1797005 - DNA, 25 bp, Homo sapien
tccggacaggcctacgagagcctga

SEQ ID NO: 1797006 - DNA, 25 bp, Homo sapien
agagcctgaggaataggcccctgtg

SEQ ID NO: 1797007 - DNA, 25 bp, Homo sapien
atactggaattcttccggacaggcc

SEQ ID NO: 1797008 - DNA, 25 bp, Homo sapien
cacagcggtgccctcctggatttgt

SEQ ID NO: 1797009 - DNA, 25 bp, Homo sapien
catgatccatgtgcccgcacatcca

SEQ ID NO: 1797010 - DNA, 25 bp, Homo sapien
atgtgcccgcacatccagccaggac

SEQ ID NO: 1797011 - DNA, 25 bp, Homo sapien
tgcccgcacatccagccaggacata

SEQ ID NO: 1797012 - DNA, 25 bp, Homo sapien
tccatgtgcccgcacatccagccag

SEQ ID NO: 1797013 - DNA, 25 bp, Homo sapien
gctttgggaatcgaagtacagtagg

SEQ ID NO: 1797014 - DNA, 25 bp, Homo sapien
tggtagagccagctacatgccgggc

SEQ ID NO: 1797015 - DNA, 25 bp, Homo sapien
cagtggttaacaatttagagctgcc

SEQ ID NO: 1797016 - DNA, 25 bp, Homo sapien
tgttagtggacgtctgcagtgtctg

SEQ ID NO: 1797017 - DNA, 25 bp, Homo sapien
gaaagcatgttgaataggtcctgga

SEQ ID NO: 1797018 - DNA, 25 bp, Homo sapien
tcaaagtcgggaagtagatctaaag

SEQ ID NO: 1797019 - DNA, 25 bp, Homo sapien
catatgtaaatagcggtaatcctgt

SEQ ID NO: 1797020 - DNA, 25 bp, Homo sapien
taaaggacaaccagtctgtaagtgt

SEQ ID NO: 1797021 - DNA, 25 bp, Homo sapien
aaataggagggatactaaagcccat

SEQ ID NO: 1797022 - DNA, 25 bp, Homo sapien
caaataggagggatactaaagccca

SEQ ID NO: 1797023 - DNA, 25 bp, Homo sapien
tgcccaggtacagccacctcttcct

SEQ ID NO: 1797024 - DNA, 25 bp, Homo sapien
tctgcccaggtacagccacctcttc

SEQ ID NO: 1797025 - DNA, 25 bp, Homo sapien
gatctgcccaggtacagccacctct

SEQ ID NO: 1797026 - DNA, 25 bp, Homo sapien
tggatctgcccaggtacagccacct

SEQ ID NO: 1797027 - DNA, 25 bp, Homo sapien
gaatctttaagatgagccacaagaa

SEQ ID NO: 1797028 - DNA, 25 bp, Homo sapien
tgcccaagtttccagcctttggccg

SEQ ID NO: 1797029 - DNA, 25 bp, Homo sapien
ccacaagaattgctgcccaagtttc

SEQ ID NO: 1797030 - DNA, 25 bp, Homo sapien
cctttggccggaggactctgaggtc

SEQ ID NO: 1797031 - DNA, 25 bp, Homo sapien
ctccatgctgtagatatcaaatcgt

SEQ ID NO: 1797032 - DNA, 25 bp, Homo sapien
tgctgtagatatcaaatcgtttggg

SEQ ID NO: 1797033 - DNA, 25 bp, Homo sapien
tggactccaggtctccaagagcctg

SEQ ID NO: 1797034 - DNA, 25 bp, Homo sapien
tgtcagacacacatgcccactaatg

SEQ ID NO: 1797035 - DNA, 25 bp, Homo sapien
cactagagtagacaatatcaacttt

SEQ ID NO: 1797036 - DNA, 25 bp, Homo sapien
gacaatatcaactttggagctctcc

SEQ ID NO: 1797037 - DNA, 25 bp, Homo sapien
cttctgcataatcatggttgctgcg

SEQ ID NO: 1797038 - DNA, 25 bp, Homo sapien
taatcatggttgctgcgtgcccact

SEQ ID NO: 1797039 - DNA, 25 bp, Homo sapien
aaggagtaagcgatgggccctcagt

SEQ ID NO: 1797040 - DNA, 25 bp, Homo sapien
cagtgacctcccggtaccaagattt

SEQ ID NO: 1797041 - DNA, 25 bp, Homo sapien
gagctgaagacaatgtggctgaatg

SEQ ID NO: 1797042 - DNA, 25 bp, Homo sapien
tgaatgaaatcaagcatctgagcca

SEQ ID NO: 1797043 - DNA, 25 bp, Homo sapien
cctgtgaagtggtctggctgggcct

SEQ ID NO: 1797044 - DNA, 25 bp, Homo sapien
cagtgtagacctgcaaacatttact

SEQ ID NO: 1797045 - DNA, 25 bp, Homo sapien
gcttttacagtgtagacctgcaaac

SEQ ID NO: 1797046 - DNA, 25 bp, Homo sapien
gaattttgaggtttcctgtgaagtg

SEQ ID NO: 1797047 - DNA, 25 bp, Homo sapien
aacggactaaggacttgtaactgct

SEQ ID NO: 1797048 - DNA, 25 bp, Homo sapien
gactaaggacttgtaactgctttgt

SEQ ID NO: 1797049 - DNA, 25 bp, Homo sapien
tcaacggactaaggacttgtaactg

SEQ ID NO: 1797050 - DNA, 25 bp, Homo sapien
caaacttcaacggactaaggacttg

SEQ ID NO: 1797051 - DNA, 25 bp, Homo sapien
cgcccttgacaacactgctgaaatg

SEQ ID NO: 1797052 - DNA, 25 bp, Homo sapien
acgaggttttgtctgaatccccttg

SEQ ID NO: 1797053 - DNA, 25 bp, Homo sapien
gctacacctactgtaaggcaaaggg

SEQ ID NO: 1797054 - DNA, 25 bp, Homo sapien
tcggtgggatgacaacgcccttgac

SEQ ID NO: 1797055 - DNA, 25 bp, Homo sapien
cgttgacgtccagaaatgatgtctt

SEQ ID NO: 1797056 - DNA, 25 bp, Homo sapien
tagaccttcaggtcaagattggccg

SEQ ID NO: 1797057 - DNA, 25 bp, Homo sapien
cttggacatgcacgtagaccttcag

SEQ ID NO: 1797058 - DNA, 25 bp, Homo sapien
caagattggccgttgacgtccagaa

SEQ ID NO: 1797059 - DNA, 25 bp, Homo sapien
tctggcaaattgacccattgctgct

SEQ ID NO: 1797060 - DNA, 25 bp, Homo sapien
aagtctggcaaattgacccattgct

SEQ ID NO: 1797061 - DNA, 25 bp, Homo sapien
tcttgaatgcaggatcaatcctttt

SEQ ID NO: 1797062 - DNA, 25 bp, Homo sapien
tcattcttgaatgcaggatcaatcc

SEQ ID NO: 1797063 - DNA, 25 bp, Homo sapien
gcgccctgtgttgccgtgtggctgt

SEQ ID NO: 1797064 - DNA, 25 bp, Homo sapien
ttgtctttgtcagtattcacgtttg

SEQ ID NO: 1797065 - DNA, 25 bp, Homo sapien
gatgccagctcagtcaccatctccc

SEQ ID NO: 1797066 - DNA, 25 bp, Homo sapien
agtgcgccctgtgttgccgtgtggc

SEQ ID NO: 1797067 - DNA, 25 bp, Homo sapien
cacaggattcttcggggcttgtgcc

SEQ ID NO: 1797068 - DNA, 25 bp, Homo sapien
cgagtcgccggccttggagggggca

SEQ ID NO: 1797069 - DNA, 25 bp, Homo sapien
gtcgccaccgcacaggattcttcgg

SEQ ID NO: 1797070 - DNA, 25 bp, Homo sapien
cctctctccatcaccgtcgccaccg

SEQ ID NO: 1797071 - DNA, 25 bp, Homo sapien
ttaggtgggttgaatgcccttcctg

SEQ ID NO: 1797072 - DNA, 25 bp, Homo sapien
agtggagccgcacgtgtgtttgtta

SEQ ID NO: 1797073 - DNA, 25 bp, Homo sapien
gccgcacgtgtgtttgttaggtggg

SEQ ID NO: 1797074 - DNA, 25 bp, Homo sapien
ttgttaggtgggttgaatgcccttc

SEQ ID NO: 1797075 - DNA, 25 bp, Homo sapien
agcatctcttcccgccactgtgtct

SEQ ID NO: 1797076 - DNA, 25 bp, Homo sapien
tggcaaatatagtcaaggacgatga

SEQ ID NO: 1797077 - DNA, 25 bp, Homo sapien
aactggcaaatatagtcaaggacga

SEQ ID NO: 1797078 - DNA, 25 bp, Homo sapien
gaaaactggcaaatatagtcaagga

SEQ ID NO: 1797079 - DNA, 25 bp, Homo sapien
gtgggatgtccaatagaggcatcag

SEQ ID NO: 1797080 - DNA, 25 bp, Homo sapien
gtgtgggatgtccaatagaggcatc

SEQ ID NO: 1797081 - DNA, 25 bp, Homo sapien
tctttgtgtgggatgtccaatagag

SEQ ID NO: 1797082 - DNA, 25 bp, Homo sapien
ttgttctttgtgtgggatgtccaat

SEQ ID NO: 1797083 - DNA, 25 bp, Homo sapien
atcaccacatctgtagttcactggg

SEQ ID NO: 1797084 - DNA, 25 bp, Homo sapien
gtgactcttggatatcaccacatct

SEQ ID NO: 1797085 - DNA, 25 bp, Homo sapien
gtgtgctttggctgagattttgctg

SEQ ID NO: 1797086 - DNA, 25 bp, Homo sapien
tcagtagtcgcttgtgtgctttggc

SEQ ID NO: 1797087 - DNA, 25 bp, Homo sapien
ggtgctcctttctgcaacatcagtg

SEQ ID NO: 1797088 - DNA, 25 bp, Homo sapien
tgagaggtcctgattcacggtgctc

SEQ ID NO: 1797089 - DNA, 25 bp, Homo sapien
tctgaaccccatgaggcatgcgtgg

SEQ ID NO: 1797090 - DNA, 25 bp, Homo sapien
ggaaggcagtgttggaatttttagc

SEQ ID NO: 1797091 - DNA, 25 bp, Homo sapien
cagcccagtagggcatccaatccag

SEQ ID NO: 1797092 - DNA, 25 bp, Homo sapien
cccagtagggcatccaatccaggaa

SEQ ID NO: 1797093 - DNA, 25 bp, Homo sapien
gaggctgctggcgcccctgcaccat

SEQ ID NO: 1797094 - DNA, 25 bp, Homo sapien
atccaatccaggaatcccttgctgg

SEQ ID NO: 1797095 - DNA, 25 bp, Homo sapien
tcgtggcccgttctaccaaactggc

SEQ ID NO: 1797096 - DNA, 25 bp, Homo sapien
ttcaccacacgttctctctcagccc

SEQ ID NO: 1797097 - DNA, 25 bp, Homo sapien
ccaacaggggaagtgaaggaataca

SEQ ID NO: 1797098 - DNA, 25 bp, Homo sapien
tgctgctgccggggttccttcacca

SEQ ID NO: 1797099 - DNA, 25 bp, Homo sapien
ggtgtctgtctctttacaccagtag

SEQ ID NO: 1797100 - DNA, 25 bp, Homo sapien
gtaaatcagtgttggaacaaacaga

SEQ ID NO: 1797101 - DNA, 25 bp, Homo sapien
tacaccagtagctcaggttaatagg

SEQ ID NO: 1797102 - DNA, 25 bp, Homo sapien
ctcaggttaataggcccctgagcta

SEQ ID NO: 1797103 - DNA, 25 bp, Homo sapien
tcatgccctggaccccttccgttga

SEQ ID NO: 1797104 - DNA, 25 bp, Homo sapien
ttgagaaggttctttcttatcatgc

SEQ ID NO: 1797105 - DNA, 25 bp, Homo sapien
gcctttgagaaggttctttcttatc

SEQ ID NO: 1797106 - DNA, 25 bp, Homo sapien
cctttgagaaggttctttcttatca

SEQ ID NO: 1797107 - DNA, 25 bp, Homo sapien
cgcagggacaaactatccacttcat

SEQ ID NO: 1797108 - DNA, 25 bp, Homo sapien
cagggacaaactatccacttcatag

SEQ ID NO: 1797109 - DNA, 25 bp, Homo sapien
ccacttcatagattcatagcccatg

SEQ ID NO: 1797110 - DNA, 25 bp, Homo sapien
cttcatagattcatagcccatgcac

SEQ ID NO: 1797111 - DNA, 25 bp, Homo sapien
tcttcccttgagtttgatccctgat

SEQ ID NO: 1797112 - DNA, 25 bp, Homo sapien
gtcttgattctgttccccggtgtgg

SEQ ID NO: 1797113 - DNA, 25 bp, Homo sapien
gagtttgatccctgatccagcccca

SEQ ID NO: 1797114 - DNA, 25 bp, Homo sapien
gcattttccgtaaccatagtcttga

SEQ ID NO: 1797115 - DNA, 25 bp, Homo sapien
tctggagaattattcagagggcttg

SEQ ID NO: 1797116 - DNA, 25 bp, Homo sapien
ggaacttccacaagttatgttgaga

SEQ ID NO: 1797117 - DNA, 25 bp, Homo sapien
tgttgagagttgattctggagaatt

SEQ ID NO: 1797118 - DNA, 25 bp, Homo sapien
attcagagggcttgacacgtgttcc

SEQ ID NO: 1797119 - DNA, 25 bp, Homo sapien
aactgtgtgaggctgtttaagagaa

SEQ ID NO: 1797120 - DNA, 25 bp, Homo sapien
tgggtttggccggagaagcataact

SEQ ID NO: 1797121 - DNA, 25 bp, Homo sapien
tcacccagggaggccttgcaaaggg

SEQ ID NO: 1797122 - DNA, 25 bp, Homo sapien
aatgtaggtgccgacagcatcagcc

SEQ ID NO: 1797123 - DNA, 25 bp, Homo sapien
aattgagtagaacgattcacgttac

SEQ ID NO: 1797124 - DNA, 25 bp, Homo sapien
taaacggccgtgcaccattagaatc

SEQ ID NO: 1797125 - DNA, 25 bp, Homo sapien
tactcaatgtagagggtaggtctat

SEQ ID NO: 1797126 - DNA, 25 bp, Homo sapien
gtaggtctattacagcttctctgcc

SEQ ID NO: 1797127 - DNA, 25 bp, Homo sapien
cataaagacccaggacggtgaggct

SEQ ID NO: 1797128 - DNA, 25 bp, Homo sapien
cacgaggtggaccaagttctgtcct

SEQ ID NO: 1797129 - DNA, 25 bp, Homo sapien
tctgtcctggcttaaggttgggaac

SEQ ID NO: 1797130 - DNA, 25 bp, Homo sapien
taggcatagtaagtaaaccagctgc

SEQ ID NO: 1797131 - DNA, 25 bp, Homo sapien
ggtgatccgtcgttaggcagtgaaa

SEQ ID NO: 1797132 - DNA, 25 bp, Homo sapien
ctgggccaggtgatccgtcgttagg

SEQ ID NO: 1797133 - DNA, 25 bp, Homo sapien
ccgtcgttaggcagtgaaacgcttc

SEQ ID NO: 1797134 - DNA, 25 bp, Homo sapien
gccaggtgatccgtcgttaggcagt

SEQ ID NO: 1797135 - DNA, 25 bp, Homo sapien
ccctgcgcgcaggtcccgtggatct

SEQ ID NO: 1797136 - DNA, 25 bp, Homo sapien
tggagccctgcgcgcaggtcccgtg

SEQ ID NO: 1797137 - DNA, 25 bp, Homo sapien
gagccctgcgcgcaggtcccgtgga

SEQ ID NO: 1797138 - DNA, 25 bp, Homo sapien
agccctgcgcgcaggtcccgtggat

SEQ ID NO: 1797139 - DNA, 25 bp, Homo sapien
tcaggacgccttagagatgcactgc

SEQ ID NO: 1797140 - DNA, 25 bp, Homo sapien
ataagtgtgggaccaaatccagaaa

SEQ ID NO: 1797141 - DNA, 25 bp, Homo sapien
attcagacacacaggcgatgacgcc

SEQ ID NO: 1797142 - DNA, 25 bp, Homo sapien
actgctaccaccacgaagaaatttg

SEQ ID NO: 1797143 - DNA, 25 bp, Homo sapien
acttgggtgggaggttcatacagca

SEQ ID NO: 1797144 - DNA, 25 bp, Homo sapien
gaagcaaatctgtgatgagcggact

SEQ ID NO: 1797145 - DNA, 25 bp, Homo sapien
gagacttccgaaaccatgatcatga

SEQ ID NO: 1797146 - DNA, 25 bp, Homo sapien
ttatttagtagacccgggtgcgagc

SEQ ID NO: 1797147 - DNA, 25 bp, Homo sapien
tctggttcttctcccctatattggg

SEQ ID NO: 1797148 - DNA, 25 bp, Homo sapien
ccttccccagagaacgctcagagaa

SEQ ID NO: 1797149 - DNA, 25 bp, Homo sapien
ggacaaacgccagaaccatgagcaa

SEQ ID NO: 1797150 - DNA, 25 bp, Homo sapien
ggcaagcagaccctgactgtgcatc

SEQ ID NO: 1797151 - DNA, 25 bp, Homo sapien
ggtgtcactattgctttggaacagg

SEQ ID NO: 1797152 - DNA, 25 bp, Homo sapien
ctattgctttggaacagggaaagaa

SEQ ID NO: 1797153 - DNA, 25 bp, Homo sapien
tcactattgctttggaacagggaaa

SEQ ID NO: 1797154 - DNA, 25 bp, Homo sapien
cctgggtggtgtcactattgctttg

SEQ ID NO: 1797155 - DNA, 25 bp, Homo sapien
ggagcccagggtgcgagttctccca

SEQ ID NO: 1797156 - DNA, 25 bp, Homo sapien
atcctctccggggtgttcccattca

SEQ ID NO: 1797157 - DNA, 25 bp, Homo sapien
cagcatcctctccggggtgttccca

SEQ ID NO: 1797158 - DNA, 25 bp, Homo sapien
gcatcctctccggggtgttcccatt

SEQ ID NO: 1797159 - DNA, 25 bp, Homo sapien
ctctccggggtgttcccattcactt

SEQ ID NO: 1797160 - DNA, 25 bp, Homo sapien
tccattcgctccaccaacagcacaa

SEQ ID NO: 1797161 - DNA, 25 bp, Homo sapien
tctttacattccattcgctccacca

SEQ ID NO: 1797162 - DNA, 25 bp, Homo sapien
aatctagacttagtcatccctggag

SEQ ID NO: 1797163 - DNA, 25 bp, Homo sapien
ctagaatctagacttagtcatccct

SEQ ID NO: 1797164 - DNA, 25 bp, Homo sapien
gcaccaatttgtccagccattgcag

SEQ ID NO: 1797165 - DNA, 25 bp, Homo sapien
cagtttgactaatgttgctcatctc

SEQ ID NO: 1797166 - DNA, 25 bp, Homo sapien
caaatgacttctacgtttctcaggt

SEQ ID NO: 1797167 - DNA, 25 bp, Homo sapien
tctgagcagtcagtgactgtggtag

SEQ ID NO: 1797168 - DNA, 25 bp, Homo sapien
ttttccaaaacgtagcagccctgca

SEQ ID NO: 1797169 - DNA, 25 bp, Homo sapien
tttccaaaacgtagcagccctgcat

SEQ ID NO: 1797170 - DNA, 25 bp, Homo sapien
ttccaaaacgtagcagccctgcatc

SEQ ID NO: 1797171 - DNA, 25 bp, Homo sapien
tccaaaacgtagcagccctgcatcc

SEQ ID NO: 1797172 - DNA, 25 bp, Homo sapien
caggtgtggagacctcctggctcta

SEQ ID NO: 1797173 - DNA, 25 bp, Homo sapien
tgtggagacctcctggctctagccc

SEQ ID NO: 1797174 - DNA, 25 bp, Homo sapien
ggtgtggagacctcctggctctagc

SEQ ID NO: 1797175 - DNA, 25 bp, Homo sapien
agcaggtgtggagacctcctggctc

SEQ ID NO: 1797176 - DNA, 25 bp, Homo sapien
cctgggcgctttacatcggtggcct

SEQ ID NO: 1797177 - DNA, 25 bp, Homo sapien
cagtggcttcctgggcgctttacat

SEQ ID NO: 1797178 - DNA, 25 bp, Homo sapien
ctctgcgagcggcttttgcagccag

SEQ ID NO: 1797179 - DNA, 25 bp, Homo sapien
ctgcgagcggcttttgcagccagtg

SEQ ID NO: 1797180 - DNA, 25 bp, Homo sapien
gagtgccacagtaccggacctggga

SEQ ID NO: 1797181 - DNA, 25 bp, Homo sapien
gaattcctggacttcagatgacgtc

SEQ ID NO: 1797182 - DNA, 25 bp, Homo sapien
agatgacgtctgatttcccggagtg

SEQ ID NO: 1797183 - DNA, 25 bp, Homo sapien
gacctgggacgatgaggttccttca

SEQ ID NO: 1797184 - DNA, 25 bp, Homo sapien
aatagttgcggtctggaagcgcaga

SEQ ID NO: 1797185 - DNA, 25 bp, Homo sapien
ccaatagttgcggtctggaagcgca

SEQ ID NO: 1797186 - DNA, 25 bp, Homo sapien
gcaccaatagttgcggtctggaagc

SEQ ID NO: 1797187 - DNA, 25 bp, Homo sapien
aagcaccaatagttgcggtctggaa

SEQ ID NO: 1797188 - DNA, 25 bp, Homo sapien
tattagccggatgtcttttggcaca

SEQ ID NO: 1797189 - DNA, 25 bp, Homo sapien
catagacagcacacaagttaatgtc

SEQ ID NO: 1797190 - DNA, 25 bp, Homo sapien
tctcccacatatggggcatattagc

SEQ ID NO: 1797191 - DNA, 25 bp, Homo sapien
cagcacacaagttaatgtcttcagc

SEQ ID NO: 1797192 - DNA, 25 bp, Homo sapien
ttgatagtgtgatgcccttggctgc

SEQ ID NO: 1797193 - DNA, 25 bp, Homo sapien
taatatagctccttgatgtgtggct

SEQ ID NO: 1797194 - DNA, 25 bp, Homo sapien
caaattcagttgcttgggacctgcg

SEQ ID NO: 1797195 - DNA, 25 bp, Homo sapien
ggacctgcgactgtaatctcggaga

SEQ ID NO: 1797196 - DNA, 25 bp, Homo sapien
agccaagtttcatctgtattagtgg

SEQ ID NO: 1797197 - DNA, 25 bp, Homo sapien
tcatctgtattagtggtggtggtga

SEQ ID NO: 1797198 - DNA, 25 bp, Homo sapien
tgaagccaagtttcatctgtattag

SEQ ID NO: 1797199 - DNA, 25 bp, Homo sapien
gtttcatctgtattagtggtggtgg

SEQ ID NO: 1797200 - DNA, 25 bp, Homo sapien
tacacacgctcgaatagttgtcagt

SEQ ID NO: 1797201 - DNA, 25 bp, Homo sapien
gatcgtgccacacaaataagcctcg

SEQ ID NO: 1797202 - DNA, 25 bp, Homo sapien
tctccggagccgctaaaagtcttgt

SEQ ID NO: 1797203 - DNA, 25 bp, Homo sapien
tcgaatgccctttgccgagcaggca

SEQ ID NO: 1797204 - DNA, 25 bp, Homo sapien
gatttagaataggagcaatgagtat

SEQ ID NO: 1797205 - DNA, 25 bp, Homo sapien
taagtcggtcatagatcttcaggct

SEQ ID NO: 1797206 - DNA, 25 bp, Homo sapien
caatgagtatttcacgaaagcctgg

SEQ ID NO: 1797207 - DNA, 25 bp, Homo sapien
gaaatagatgcacattcgcctccag

SEQ ID NO: 1797208 - DNA, 25 bp, Homo sapien
cttaggcactagaaagcgtttcatg

SEQ ID NO: 1797209 - DNA, 25 bp, Homo sapien
tgagcactgccacgatgagaatggt

SEQ ID NO: 1797210 - DNA, 25 bp, Homo sapien
cgatgggcctaggagcttgtactta

SEQ ID NO: 1797211 - DNA, 25 bp, Homo sapien
tctccaagcatggatccgtgcaatg

SEQ ID NO: 1797212 - DNA, 25 bp, Homo sapien
tcaaaccaggtaggagtgcttggcg

SEQ ID NO: 1797213 - DNA, 25 bp, Homo sapien
tcctccctgaacatggcagagcaga

SEQ ID NO: 1797214 - DNA, 25 bp, Homo sapien
tcactgaacggagatagatacatgg

SEQ ID NO: 1797215 - DNA, 25 bp, Homo sapien
tgtcattatccagccatgaacatgg

SEQ ID NO: 1797216 - DNA, 25 bp, Homo sapien
gcaggagggagccactatctttccc

SEQ ID NO: 1797217 - DNA, 25 bp, Homo sapien
tgcaggagggagccactatctttcc

SEQ ID NO: 1797218 - DNA, 25 bp, Homo sapien
tgcagtcctgaagggtcttatagga

SEQ ID NO: 1797219 - DNA, 25 bp, Homo sapien
ggtcttataggactgacccaagata

SEQ ID NO: 1797220 - DNA, 25 bp, Homo sapien
tcctgaagggtcttataggactgac

SEQ ID NO: 1797221 - DNA, 25 bp, Homo sapien
ctttctgcagtcctgaagggtctta

SEQ ID NO: 1797222 - DNA, 25 bp, Homo sapien
taatccagcccctggcggagtcggc

SEQ ID NO: 1797223 - DNA, 25 bp, Homo sapien
ccctggcggagtcggccacactgtg

SEQ ID NO: 1797224 - DNA, 25 bp, Homo sapien
caagctagcttgactctgtgtcact

SEQ ID NO: 1797225 - DNA, 25 bp, Homo sapien
ctgttgaaccgcgtgcagatgtgta

SEQ ID NO: 1797226 - DNA, 25 bp, Homo sapien
ggtcgacaccacctagctctggagg

SEQ ID NO: 1797227 - DNA, 25 bp, Homo sapien
tcattcatgcgctggccaggaacac

SEQ ID NO: 1797228 - DNA, 25 bp, Homo sapien
ggaacactccgctggaacactgtga

SEQ ID NO: 1797229 - DNA, 25 bp, Homo sapien
tcctgagagacgctggcatatgcca

SEQ ID NO: 1797230 - DNA, 25 bp, Homo sapien
gaaatgaaggttagccccggtcaga

SEQ ID NO: 1797231 - DNA, 25 bp, Homo sapien
tgcacccgccccaaagagaatgttt

SEQ ID NO: 1797232 - DNA, 25 bp, Homo sapien
caaagttgtctattggcctcagagg

SEQ ID NO: 1797233 - DNA, 25 bp, Homo sapien
cctcagaggttacaaggagccgacg

SEQ ID NO: 1797234 - DNA, 25 bp, Homo sapien
agcgcggcggcgcttccaccctcct

SEQ ID NO: 1797235 - DNA, 25 bp, Homo sapien
accctccttgagagccgcctcggag

SEQ ID NO: 1797236 - DNA, 25 bp, Homo sapien
tcggagccgccgctcttggcgctgt

SEQ ID NO: 1797237 - DNA, 25 bp, Homo sapien
gaggaagaggatgccgccgctgccg

SEQ ID NO: 1797238 - DNA, 25 bp, Homo sapien
ggcagcgctgccatagtaattatta

SEQ ID NO: 1797239 - DNA, 25 bp, Homo sapien
cttcgccaacggttttcagtttgtg

SEQ ID NO: 1797240 - DNA, 25 bp, Homo sapien
catgttgcggctgctccatgtcggg

SEQ ID NO: 1797241 - DNA, 25 bp, Homo sapien
tgttgatcaaagcaaggcccagcgc

SEQ ID NO: 1797242 - DNA, 25 bp, Homo sapien
ggtacccttcgtgggagttctgcag

SEQ ID NO: 1797243 - DNA, 25 bp, Homo sapien
gctcatcgccgggtgactcctttgt

SEQ ID NO: 1797244 - DNA, 25 bp, Homo sapien
cagcggcgtactgggcgcccatgtc

SEQ ID NO: 1797245 - DNA, 25 bp, Homo sapien
ggctgtagcccggataatggttgca

SEQ ID NO: 1797246 - DNA, 25 bp, Homo sapien
caagagggaacgtgctgtggctaaa

SEQ ID NO: 1797247 - DNA, 25 bp, Homo sapien
agaaccgatcgggtggctcttcgcc

SEQ ID NO: 1797248 - DNA, 25 bp, Homo sapien
aaagcacattgtgggcgctcccaga

SEQ ID NO: 1797249 - DNA, 25 bp, Homo sapien
gccgggagagcctatttgttacaaa

SEQ ID NO: 1797250 - DNA, 25 bp, Homo sapien
tacaatattgcacctccatgtcgtt

SEQ ID NO: 1797251 - DNA, 25 bp, Homo sapien
agcccgcaccgagtgtctctgaatg

SEQ ID NO: 1797252 - DNA, 25 bp, Homo sapien
tattattcctaccagcaaacgttcg

SEQ ID NO: 1797253 - DNA, 25 bp, Homo sapien
taaggaacgaatcgatgtattttac

SEQ ID NO: 1797254 - DNA, 25 bp, Homo sapien
cacatagcctgcctgttgaaggtga

SEQ ID NO: 1797255 - DNA, 25 bp, Homo sapien
aattgatccggaacgtgctcctttc

SEQ ID NO: 1797256 - DNA, 25 bp, Homo sapien
aggtgactccctgcaagcagcccgt

SEQ ID NO: 1797257 - DNA, 25 bp, Homo sapien
agcagcccgtaagcccaataatgga

SEQ ID NO: 1797258 - DNA, 25 bp, Homo sapien
caaggtaaggatgtgctagtcccta

SEQ ID NO: 1797259 - DNA, 25 bp, Homo sapien
gactaaatatagacaagcagagcca

SEQ ID NO: 1797260 - DNA, 25 bp, Homo sapien
gtaaaagtgtccaagtgtgatctgc

SEQ ID NO: 1797261 - DNA, 25 bp, Homo sapien
cataaacctaagtgatagctgtctt

SEQ ID NO: 1797262 - DNA, 25 bp, Homo sapien
cctcaaactctatgaggattacccc

SEQ ID NO: 1797263 - DNA, 25 bp, Homo sapien
caaagagatcctcaaactctatgag

SEQ ID NO: 1797264 - DNA, 25 bp, Homo sapien
gttagaattgagaggaagtaatgta

SEQ ID NO: 1797265 - DNA, 25 bp, Homo sapien
ctctatgaggattaccccaaagtta

SEQ ID NO: 1797266 - DNA, 25 bp, Homo sapien
caccaggaggaccactctccacttg

SEQ ID NO: 1797267 - DNA, 25 bp, Homo sapien
accaggaggaccactctccacttgg

SEQ ID NO: 1797268 - DNA, 25 bp, Homo sapien
gacatttctgctgcctcctctgcac

SEQ ID NO: 1797269 - DNA, 25 bp, Homo sapien
accctgacatttctgctgcctcctc

SEQ ID NO: 1797270 - DNA, 25 bp, Homo sapien
cctgacatttctgctgcctcctctg

SEQ ID NO: 1797271 - DNA, 25 bp, Homo sapien
tgacatttctgctgcctcctctgca

SEQ ID NO: 1797272 - DNA, 25 bp, Homo sapien
acggtggtagggagcaacgacccag

SEQ ID NO: 1797273 - DNA, 25 bp, Homo sapien
gagcaacgacccagataatggtagg

SEQ ID NO: 1797274 - DNA, 25 bp, Homo sapien
tagggagcaacgacccagataatgg

SEQ ID NO: 1797275 - DNA, 25 bp, Homo sapien
tatgcaatgacccagacggtggtag

SEQ ID NO: 1797276 - DNA, 25 bp, Homo sapien
cctcggactcatggatttctggact

SEQ ID NO: 1797277 - DNA, 25 bp, Homo sapien
ggctgctgactagttcacggccacc

SEQ ID NO: 1797278 - DNA, 25 bp, Homo sapien
tggactcgtaaaccccagcgaatct

SEQ ID NO: 1797279 - DNA, 25 bp, Homo sapien
aaatgacctaacagccaccgtgtgc

SEQ ID NO: 1797280 - DNA, 25 bp, Homo sapien
gcaggaccgcttacgtgaaatttaa

SEQ ID NO: 1797281 - DNA, 25 bp, Homo sapien
gatgggttaggcacagtcagcttta

SEQ ID NO: 1797282 - DNA, 25 bp, Homo sapien
ttcccaccgcaaacaggcatgagca

SEQ ID NO: 1797283 - DNA, 25 bp, Homo sapien
tatgccacttggaaacagtctcagc

SEQ ID NO: 1797284 - DNA, 25 bp, Homo sapien
tgaatgatacattactactgaaatt

SEQ ID NO: 1797285 - DNA, 25 bp, Homo sapien
gatgaatgatacattactactgaaa

SEQ ID NO: 1797286 - DNA, 25 bp, Homo sapien
atgaatgatacattactactgaaat

SEQ ID NO: 1797287 - DNA, 25 bp, Homo sapien
gaatgatacattactactgaaattc

SEQ ID NO: 1797288 - DNA, 25 bp, Homo sapien
tcaatggtttctatgacccctggaa

SEQ ID NO: 1797289 - DNA, 25 bp, Homo sapien
tcatgatacgttgatatgattaggc

SEQ ID NO: 1797290 - DNA, 25 bp, Homo sapien
gttctcgtgattgtgttagttctca

SEQ ID NO: 1797291 - DNA, 25 bp, Homo sapien
cataccaggcaattcaacgttacaa

SEQ ID NO: 1797292 - DNA, 25 bp, Homo sapien
gaggcaaagtgtctccaccagattt

SEQ ID NO: 1797293 - DNA, 25 bp, Homo sapien
tattagctaaacatccaagggttgg

SEQ ID NO: 1797294 - DNA, 25 bp, Homo sapien
tctaacttggcctactgagtaagct

SEQ ID NO: 1797295 - DNA, 25 bp, Homo sapien
tactacatccctgaaaaactagggc

SEQ ID NO: 1797296 - DNA, 25 bp, Homo sapien
cagagagagcatactcctataggca

SEQ ID NO: 1797297 - DNA, 25 bp, Homo sapien
aaaagctgacactcggacaacatcc

SEQ ID NO: 1797298 - DNA, 25 bp, Homo sapien
aattttcttgtaggccctctgagag

SEQ ID NO: 1797299 - DNA, 25 bp, Homo sapien
tcaaacagaccactttactctcggg

SEQ ID NO: 1797300 - DNA, 25 bp, Homo sapien
tttccgacaccacgtgatccgctgg

SEQ ID NO: 1797301 - DNA, 25 bp, Homo sapien
cttcttgcttaaggcgtttccgaca

SEQ ID NO: 1797302 - DNA, 25 bp, Homo sapien
tcccagcttcctgttagctgagatg

SEQ ID NO: 1797303 - DNA, 25 bp, Homo sapien
tcttccactccatagatctgaactt

SEQ ID NO: 1797304 - DNA, 25 bp, Homo sapien
gacacctggattacagcctctacga

SEQ ID NO: 1797305 - DNA, 25 bp, Homo sapien
tctacgaccccaagcagagtatggc

SEQ ID NO: 1797306 - DNA, 25 bp, Homo sapien
agatatgaattctacagccaccagg

SEQ ID NO: 1797307 - DNA, 25 bp, Homo sapien
cagagacccctgaggaaacctgtgt

SEQ ID NO: 1797308 - DNA, 25 bp, Homo sapien
ggaaacacattacctcagaggccat

SEQ ID NO: 1797309 - DNA, 25 bp, Homo sapien
taagcagaggtataagaaggtcctt

SEQ ID NO: 1797310 - DNA, 25 bp, Homo sapien
tataaatactataggacagaggctt

SEQ ID NO: 1797311 - DNA, 25 bp, Homo sapien
aaagtcgagcttgtcccatcaaggg

SEQ ID NO: 1797312 - DNA, 25 bp, Homo sapien
ccaacttctgacacccaatggacaa

SEQ ID NO: 1797313 - DNA, 25 bp, Homo sapien
cttctgacacccaatggacaaccat

SEQ ID NO: 1797314 - DNA, 25 bp, Homo sapien
tccttatagccccaacttctgacac

SEQ ID NO: 1797315 - DNA, 25 bp, Homo sapien
ttccttatagccccaacttctgaca

SEQ ID NO: 1797316 - DNA, 25 bp, Homo sapien
ctgtaaacggaagacgcacttccag

SEQ ID NO: 1797317 - DNA, 25 bp, Homo sapien
tgtaaacggaagacgcacttccagc

SEQ ID NO: 1797318 - DNA, 25 bp, Homo sapien
aagccgatgcctgagcacacaactc

SEQ ID NO: 1797319 - DNA, 25 bp, Homo sapien
atttctagaacactctgtacccagc

SEQ ID NO: 1797320 - DNA, 25 bp, Homo sapien
ttctagaacactctgtacccagcac

SEQ ID NO: 1797321 - DNA, 25 bp, Homo sapien
atgcaccaccaagccgatgcctgag

SEQ ID NO: 1797322 - DNA, 25 bp, Homo sapien
atctctgccagcaggaaatctcccc

SEQ ID NO: 1797323 - DNA, 25 bp, Homo sapien
caatctgtgggaccccccatctctg

SEQ ID NO: 1797324 - DNA, 25 bp, Homo sapien
agcaggaaatctcccctccaaccat

SEQ ID NO: 1797325 - DNA, 25 bp, Homo sapien
caagtcaatctgtgggaccccccat

SEQ ID NO: 1797326 - DNA, 25 bp, Homo sapien
acatgccagtggcaccacccagaag

SEQ ID NO: 1797327 - DNA, 25 bp, Homo sapien
acagaggttccccaccacatgccag

SEQ ID NO: 1797328 - DNA, 25 bp, Homo sapien
cacacttcagagctgctgtacacac

SEQ ID NO: 1797329 - DNA, 25 bp, Homo sapien
cacccagaagccactgtgggacaca

SEQ ID NO: 1797330 - DNA, 25 bp, Homo sapien
tgctgctgagggtactgcattccgg

SEQ ID NO: 1797331 - DNA, 25 bp, Homo sapien
tactgcccatgccatacaactgagg

SEQ ID NO: 1797332 - DNA, 25 bp, Homo sapien
tgccaattggataccgctgtgggcc

SEQ ID NO: 1797333 - DNA, 25 bp, Homo sapien
taggaacctcctgggtacggactgc

SEQ ID NO: 1797334 - DNA, 25 bp, Homo sapien
taaagcagaaaatccgtgcaatgcc

SEQ ID NO: 1797335 - DNA, 25 bp, Homo sapien
tcttaggtggacagcaaaaggcaaa

SEQ ID NO: 1797336 - DNA, 25 bp, Homo sapien
ttaacatcaatcttaggtggacagc

SEQ ID NO: 1797337 - DNA, 25 bp, Homo sapien
catcaatcttaggtggacagcaaaa

SEQ ID NO: 1797338 - DNA, 25 bp, Homo sapien
gcccttctaccaaacaggtattctg

SEQ ID NO: 1797339 - DNA, 25 bp, Homo sapien
tatgacacagtgcacctatcaaata

SEQ ID NO: 1797340 - DNA, 25 bp, Homo sapien
catctgttataacctgctgcaaatt

SEQ ID NO: 1797341 - DNA, 25 bp, Homo sapien
taacctgctgcaaatttatgacaca

SEQ ID NO: 1797342 - DNA, 25 bp, Homo sapien
gcagtaaaacgtgcagcagcatcag

SEQ ID NO: 1797343 - DNA, 25 bp, Homo sapien
caagccctgttgtgggttaccgacg

SEQ ID NO: 1797344 - DNA, 25 bp, Homo sapien
tgcccctcaacgaaagatgtctggt

SEQ ID NO: 1797345 - DNA, 25 bp, Homo sapien
gactaggtttaccactgctagaggg

SEQ ID NO: 1797346 - DNA, 25 bp, Homo sapien
tgccgtggtcctctggagcaaagcc

SEQ ID NO: 1797347 - DNA, 25 bp, Homo sapien
tgtgcgcactactcagcatatctct

SEQ ID NO: 1797348 - DNA, 25 bp, Homo sapien
tttgcagagtgtccctgccgtggtc

SEQ ID NO: 1797349 - DNA, 25 bp, Homo sapien
ttacggctgtcttggtatttcccca

SEQ ID NO: 1797350 - DNA, 25 bp, Homo sapien
tatagtccatagatcttgacccagc

SEQ ID NO: 1797351 - DNA, 25 bp, Homo sapien
gagttcacccacttagggctaccag

SEQ ID NO: 1797352 - DNA, 25 bp, Homo sapien
tcaggtgttcccagagtatagtcca

SEQ ID NO: 1797353 - DNA, 25 bp, Homo sapien
agtacctggtacgtgtctgctccca

SEQ ID NO: 1797354 - DNA, 25 bp, Homo sapien
ctgagagtcaacgatgagttagtta

SEQ ID NO: 1797355 - DNA, 25 bp, Homo sapien
agtccatggaaaacggggactcagt

SEQ ID NO: 1797356 - DNA, 25 bp, Homo sapien
gactcagttaaaacacgtaacaggc

SEQ ID NO: 1797357 - DNA, 25 bp, Homo sapien
aggcccgtcccccagtcagcctcca

SEQ ID NO: 1797358 - DNA, 25 bp, Homo sapien
gccacagcaggcgagtccatggaaa

SEQ ID NO: 1797359 - DNA, 25 bp, Homo sapien
tacctgcagacgtgtgttaataact

SEQ ID NO: 1797360 - DNA, 25 bp, Homo sapien
catttacaacactaggatcatcttc

SEQ ID NO: 1797361 - DNA, 25 bp, Homo sapien
tcgtctatctcagctggactctcct

SEQ ID NO: 1797362 - DNA, 25 bp, Homo sapien
ggatgttctctacagacccagacct

SEQ ID NO: 1797363 - DNA, 25 bp, Homo sapien
cttttcatccttttaggcacttatg

SEQ ID NO: 1797364 - DNA, 25 bp, Homo sapien
ttaaaaattactatgcgttcagtgc

SEQ ID NO: 1797365 - DNA, 25 bp, Homo sapien
aattactatgcgttcagtgcaaggg

SEQ ID NO: 1797366 - DNA, 25 bp, Homo sapien
tttaggcacttatgtcttaaaagtg

SEQ ID NO: 1797367 - DNA, 25 bp, Homo sapien
cagttggacagttccagcttcaaga

SEQ ID NO: 1797368 - DNA, 25 bp, Homo sapien
acaggccaggtctgaaatagcacaa

SEQ ID NO: 1797369 - DNA, 25 bp, Homo sapien
tccatgttacgttgggcaggcccag

SEQ ID NO: 1797370 - DNA, 25 bp, Homo sapien
gtctaactcactgtccaaaagtggg

SEQ ID NO: 1797371 - DNA, 25 bp, Homo sapien
aactaaatttgtgaaggctattaca

SEQ ID NO: 1797372 - DNA, 25 bp, Homo sapien
cagggaggtttcgttatgctgccca

SEQ ID NO: 1797373 - DNA, 25 bp, Homo sapien
ccacttcaaccgctcaagcttgaga

SEQ ID NO: 1797374 - DNA, 25 bp, Homo sapien
ccgctcaagcttgagactacaggtg

SEQ ID NO: 1797375 - DNA, 25 bp, Homo sapien
gcaattccgttcgttccttagtgcc

SEQ ID NO: 1797376 - DNA, 25 bp, Homo sapien
tggcaattccgttcgttccttagtg

SEQ ID NO: 1797377 - DNA, 25 bp, Homo sapien
cctggcaattccgttcgttccttag

SEQ ID NO: 1797378 - DNA, 25 bp, Homo sapien
ggcaattccgttcgttccttagtgc

SEQ ID NO: 1797379 - DNA, 25 bp, Homo sapien
gagaatccagagtcatccaagtctc

SEQ ID NO: 1797380 - DNA, 25 bp, Homo sapien
cttccatccaaccttgagaatccag

SEQ ID NO: 1797381 - DNA, 25 bp, Homo sapien
tatccacaaccaatacaatcatttc

SEQ ID NO: 1797382 - DNA, 25 bp, Homo sapien
tcaagtatccacaaccaatacaatc

SEQ ID NO: 1797383 - DNA, 25 bp, Homo sapien
gaaagcttatttgatcggtagagga

SEQ ID NO: 1797384 - DNA, 25 bp, Homo sapien
cagcaactcgtttcggacattaaaa

SEQ ID NO: 1797385 - DNA, 25 bp, Homo sapien
caatgacaaggtgcataactgacgt

SEQ ID NO: 1797386 - DNA, 25 bp, Homo sapien
taactgacgtgaatacagcaactcg

SEQ ID NO: 1797387 - DNA, 25 bp, Homo sapien
catgtcctcgcccttataaaaagta

SEQ ID NO: 1797388 - DNA, 25 bp, Homo sapien
tactaaaagggtgaagaaaagcatg

SEQ ID NO: 1797389 - DNA, 25 bp, Homo sapien
gcatgcctgcaagtctactaaaagg

SEQ ID NO: 1797390 - DNA, 25 bp, Homo sapien
taggtcactgagacttcctgaaaac

SEQ ID NO: 1797391 - DNA, 25 bp, Homo sapien
tcggaatggctactccctggcaaag

SEQ ID NO: 1797392 - DNA, 25 bp, Homo sapien
tgaacaaaccggaccatcggaatgg

SEQ ID NO: 1797393 - DNA, 25 bp, Homo sapien
tcagggagatcagtaatgcctcaat

SEQ ID NO: 1797394 - DNA, 25 bp, Homo sapien
ccctggtgtgtagggaactcactca

SEQ ID NO: 1797395 - DNA, 25 bp, Homo sapien
taatccagggtgtttcggagctaga

SEQ ID NO: 1797396 - DNA, 25 bp, Homo sapien
caggtcatgagtgggcacttcggcc

SEQ ID NO: 1797397 - DNA, 25 bp, Homo sapien
ggcctgctaccacagtatgaacgca

SEQ ID NO: 1797398 - DNA, 25 bp, Homo sapien
tgtggatcaggaggcgctctccagc

SEQ ID NO: 1797399 - DNA, 25 bp, Homo sapien
ttctttccatgtggcatctccagag

SEQ ID NO: 1797400 - DNA, 25 bp, Homo sapien
tgtttctttccatgtggcatctcca

SEQ ID NO: 1797401 - DNA, 25 bp, Homo sapien
aatgtttctttccatgtggcatctc

SEQ ID NO: 1797402 - DNA, 25 bp, Homo sapien
gtttctttccatgtggcatctccag

SEQ ID NO: 1797403 - DNA, 25 bp, Homo sapien
gaaaacatacttaatacgcgcagct

SEQ ID NO: 1797404 - DNA, 25 bp, Homo sapien
taaacaacagcacaacacggcagta

SEQ ID NO: 1797405 - DNA, 25 bp, Homo sapien
ttaaacagcagctcactgaaaaggc

SEQ ID NO: 1797406 - DNA, 25 bp, Homo sapien
tgttcagtgcctggtaggtaccacg

SEQ ID NO: 1797407 - DNA, 25 bp, Homo sapien
tgctcacactaagatgtctccctct

SEQ ID NO: 1797408 - DNA, 25 bp, Homo sapien
aaacgactggtcatttgctcacact

SEQ ID NO: 1797409 - DNA, 25 bp, Homo sapien
tagtaagcttttgcctctaacacaa

SEQ ID NO: 1797410 - DNA, 25 bp, Homo sapien
ttgacccgctctactaaacgactgg

SEQ ID NO: 1797411 - DNA, 25 bp, Homo sapien
tcagaataaatgagggtcccgcgat

SEQ ID NO: 1797412 - DNA, 25 bp, Homo sapien
tatcagaataaatgagggtcccgcg

SEQ ID NO: 1797413 - DNA, 25 bp, Homo sapien
gaataaatgagggtcccgcgattct

SEQ ID NO: 1797414 - DNA, 25 bp, Homo sapien
ataaatgagggtcccgcgattctgg

SEQ ID NO: 1797415 - DNA, 25 bp, Homo sapien
gtcaaaaccttgaacacagaggaca

SEQ ID NO: 1797416 - DNA, 25 bp, Homo sapien
aaaacatttctagttgcagtctaat

SEQ ID NO: 1797417 - DNA, 25 bp, Homo sapien
tagagtaatggctgtcaaatgtttt

SEQ ID NO: 1797418 - DNA, 25 bp, Homo sapien
caaatgttttgacgccaactcggag

SEQ ID NO: 1797419 - DNA, 25 bp, Homo sapien
tgtagttttatgctcaagtgcccta

SEQ ID NO: 1797420 - DNA, 25 bp, Homo sapien
cttcctgaggatccaatcgagagta

SEQ ID NO: 1797421 - DNA, 25 bp, Homo sapien
cgagagtattcgataccacagatct

SEQ ID NO: 1797422 - DNA, 25 bp, Homo sapien
tgtacacaaaattaacacgcaagtg

SEQ ID NO: 1797423 - DNA, 25 bp, Homo sapien
aaaaactgctggcccatggaagtcc

SEQ ID NO: 1797424 - DNA, 25 bp, Homo sapien
actgaatggtacactaacagcagca

SEQ ID NO: 1797425 - DNA, 25 bp, Homo sapien
gcacggtgtccttggccaaaaactg

SEQ ID NO: 1797426 - DNA, 25 bp, Homo sapien
aatggtacactaacagcagcacggt

SEQ ID NO: 1797427 - DNA, 25 bp, Homo sapien
tgaggaaacctgtaacagcacagag

SEQ ID NO: 1797428 - DNA, 25 bp, Homo sapien
tgtaacagcacagaggggctctccc

SEQ ID NO: 1797429 - DNA, 25 bp, Homo sapien
agtgccaaccaactggacccggtca

SEQ ID NO: 1797430 - DNA, 25 bp, Homo sapien
caaccaactggacccggtcagctgt

SEQ ID NO: 1797431 - DNA, 25 bp, Homo sapien
tgctggcagtaaccactcacacctt

SEQ ID NO: 1797432 - DNA, 25 bp, Homo sapien
ctgcggctggtacctctgctgggac

SEQ ID NO: 1797433 - DNA, 25 bp, Homo sapien
gcagtaaccactcacaccttgctgt

SEQ ID NO: 1797434 - DNA, 25 bp, Homo sapien
gactgggacggcagatactgcgcct

SEQ ID NO: 1797435 - DNA, 25 bp, Homo sapien
cactcactacttcttttcatgtcac

SEQ ID NO: 1797436 - DNA, 25 bp, Homo sapien
actacttcttttcatgtcactcatg

SEQ ID NO: 1797437 - DNA, 25 bp, Homo sapien
tcatgtcactcatgagtgacagtct

SEQ ID NO: 1797438 - DNA, 25 bp, Homo sapien
cttcttttcatgtcactcatgagtg

SEQ ID NO: 1797439 - DNA, 25 bp, Homo sapien
gaggaaaaagtcgatgctacatgtg

SEQ ID NO: 1797440 - DNA, 25 bp, Homo sapien
tgggtctcgaatcctagctgttgtt

SEQ ID NO: 1797441 - DNA, 25 bp, Homo sapien
aaaacaagattgtactgggtctcga

SEQ ID NO: 1797442 - DNA, 25 bp, Homo sapien
taagtcatacggaaagggactccaa

SEQ ID NO: 1797443 - DNA, 25 bp, Homo sapien
aactccagataccagccttgctcat

SEQ ID NO: 1797444 - DNA, 25 bp, Homo sapien
tatcaaaactccagataccagcctt

SEQ ID NO: 1797445 - DNA, 25 bp, Homo sapien
actttatcaaaactccagataccag

SEQ ID NO: 1797446 - DNA, 25 bp, Homo sapien
tcaaaactccagataccagccttgc

SEQ ID NO: 1797447 - DNA, 25 bp, Homo sapien
aaaaagacaatatatcatgaggcta

SEQ ID NO: 1797448 - DNA, 25 bp, Homo sapien
taacaaggataattacagttcagtc

SEQ ID NO: 1797449 - DNA, 25 bp, Homo sapien
tcaaagctcgaaaagtacagatacc

SEQ ID NO: 1797450 - DNA, 25 bp, Homo sapien
tagaatgtgagtttcatttgatact

SEQ ID NO: 1797451 - DNA, 25 bp, Homo sapien
cagttcacggcatctcttttaaaaa

SEQ ID NO: 1797452 - DNA, 25 bp, Homo sapien
tttccaaatgattgcccatgtgcca

SEQ ID NO: 1797453 - DNA, 25 bp, Homo sapien
tgtgccaagtacttccagttcacgg

SEQ ID NO: 1797454 - DNA, 25 bp, Homo sapien
tactatgtggattatgatggatatt

SEQ ID NO: 1797455 - DNA, 25 bp, Homo sapien
caatcagagtctaggaataggcctt

SEQ ID NO: 1797456 - DNA, 25 bp, Homo sapien
gccactaagtgacccagaagttgtc

SEQ ID NO: 1797457 - DNA, 25 bp, Homo sapien
gaagccccaagtcaacaatcagagt

SEQ ID NO: 1797458 - DNA, 25 bp, Homo sapien
tccctcagcaatggttcaaagcctg

SEQ ID NO: 1797459 - DNA, 25 bp, Homo sapien
aatgagcctcgatgatacttttaac

SEQ ID NO: 1797460 - DNA, 25 bp, Homo sapien
gaattagtgaatatataatgagcct

SEQ ID NO: 1797461 - DNA, 25 bp, Homo sapien
aacttcatccctcaataccaatggg

SEQ ID NO: 1797462 - DNA, 25 bp, Homo sapien
aggagcagggtatcagagaggaaga

SEQ ID NO: 1797463 - DNA, 25 bp, Homo sapien
cagctgctcgggtcccatgggccat

SEQ ID NO: 1797464 - DNA, 25 bp, Homo sapien
ctgttcagctgctcgggtcccatgg

SEQ ID NO: 1797465 - DNA, 25 bp, Homo sapien
gttcagctgctcgggtcccatgggc

SEQ ID NO: 1797466 - DNA, 25 bp, Homo sapien
tcagctgctcgggtcccatgggcca

SEQ ID NO: 1797467 - DNA, 25 bp, Homo sapien
ctccctgcaagcactgcctcccggt

SEQ ID NO: 1797468 - DNA, 25 bp, Homo sapien
gctgtagtgcagtgggcgcaatctc

SEQ ID NO: 1797469 - DNA, 25 bp, Homo sapien
cctgcaagcactgcctcccggtttc

SEQ ID NO: 1797470 - DNA, 25 bp, Homo sapien
ggctccctgcaagcactgcctcccg

SEQ ID NO: 1797471 - DNA, 25 bp, Homo sapien
tctttatgttacgagtcaaaggtta

SEQ ID NO: 1797472 - DNA, 25 bp, Homo sapien
agtttagcgtagtagtaattacaca

SEQ ID NO: 1797473 - DNA, 25 bp, Homo sapien
accttctttatgttacgagtcaaag

SEQ ID NO: 1797474 - DNA, 25 bp, Homo sapien
aggcaatggaaatgaggtttcccct

SEQ ID NO: 1797475 - DNA, 25 bp, Homo sapien
taaaataagcaacacagactaacag

SEQ ID NO: 1797476 - DNA, 25 bp, Homo sapien
agttcaaaataattagatgccacca

SEQ ID NO: 1797477 - DNA, 25 bp, Homo sapien
gactaacagactatgaaagctatca

SEQ ID NO: 1797478 - DNA, 25 bp, Homo sapien
gatgccaccaaaatctcaaatacta

SEQ ID NO: 1797479 - DNA, 25 bp, Homo sapien
tgccagcagagggtgacaattaagc

SEQ ID NO: 1797480 - DNA, 25 bp, Homo sapien
cagattctagatttccacttgtcac

SEQ ID NO: 1797481 - DNA, 25 bp, Homo sapien
tgcaggttcctttccataaacagca

SEQ ID NO: 1797482 - DNA, 25 bp, Homo sapien
ggctgaaagattatgaccactctcc

SEQ ID NO: 1797483 - DNA, 25 bp, Homo sapien
tcttgctgtattaagttcaagtctt

SEQ ID NO: 1797484 - DNA, 25 bp, Homo sapien
ttgagatctagttccatagccttcc

SEQ ID NO: 1797485 - DNA, 25 bp, Homo sapien
tctttcttgctgtattaagttcaag

SEQ ID NO: 1797486 - DNA, 25 bp, Homo sapien
gccagaggaggttgagatctagttc

SEQ ID NO: 1797487 - DNA, 25 bp, Homo sapien
ttacatttccaaatcagcacaataa

SEQ ID NO: 1797488 - DNA, 25 bp, Homo sapien
catttccaaatcagcacaataatgt

SEQ ID NO: 1797489 - DNA, 25 bp, Homo sapien
acatttccaaatcagcacaataatg

SEQ ID NO: 1797490 - DNA, 25 bp, Homo sapien
tacatttccaaatcagcacaataat

SEQ ID NO: 1797491 - DNA, 25 bp, Homo sapien
tgatgtctacactctgcaacagaga

SEQ ID NO: 1797492 - DNA, 25 bp, Homo sapien
gacttatccaggactacagagctcc

SEQ ID NO: 1797493 - DNA, 25 bp, Homo sapien
tgaaatagacttatccaggactaca

SEQ ID NO: 1797494 - DNA, 25 bp, Homo sapien
ccgcataaaaccttccaactgatgt

SEQ ID NO: 1797495 - DNA, 25 bp, Homo sapien
gtctggcctcaaatttcaaactacc

SEQ ID NO: 1797496 - DNA, 25 bp, Homo sapien
tggcctcaaatttcaaactaccttc

SEQ ID NO: 1797497 - DNA, 25 bp, Homo sapien
gcgtctggcctcaaatttcaaacta

SEQ ID NO: 1797498 - DNA, 25 bp, Homo sapien
accgcgtctggcctcaaatttcaaa

SEQ ID NO: 1797499 - DNA, 25 bp, Homo sapien
tataaatagaaaccccaatcaccat

SEQ ID NO: 1797500 - DNA, 25 bp, Homo sapien
gaaggcaaattaagtagatatgaac

SEQ ID NO: 1797501 - DNA, 25 bp, Homo sapien
tagccactactcttataaatagaaa

SEQ ID NO: 1797502 - DNA, 25 bp, Homo sapien
gagcatcaacatgataccccatata

SEQ ID NO: 1797503 - DNA, 25 bp, Homo sapien
ggtatggtacgcatgtcaaatgtca

SEQ ID NO: 1797504 - DNA, 25 bp, Homo sapien
gcttaccaagctgcgaactatctgc

SEQ ID NO: 1797505 - DNA, 25 bp, Homo sapien
tatctgctacagaaagtttagcagc

SEQ ID NO: 1797506 - DNA, 25 bp, Homo sapien
gacagtagacatcctgtggtcatca

SEQ ID NO: 1797507 - DNA, 25 bp, Homo sapien
gaggcattcttgtcatcgtcattac

SEQ ID NO: 1797508 - DNA, 25 bp, Homo sapien
cagactattagagccgtaacagagt

SEQ ID NO: 1797509 - DNA, 25 bp, Homo sapien
aaatacagcttcatgggctctccag

SEQ ID NO: 1797510 - DNA, 25 bp, Homo sapien
ccagccaagttagaggactacagta

SEQ ID NO: 1797511 - DNA, 25 bp, Homo sapien
ccaatattagaggtcgtgaaagcta

SEQ ID NO: 1797512 - DNA, 25 bp, Homo sapien
gcgaagacaatgttcaggataacta

SEQ ID NO: 1797513 - DNA, 25 bp, Homo sapien
cattccactgtgtctttagcttaaa

SEQ ID NO: 1797514 - DNA, 25 bp, Homo sapien
cagggaaatgctgtacgactaagag

SEQ ID NO: 1797515 - DNA, 25 bp, Homo sapien
tggttttgaaacgatgcagatgata

SEQ ID NO: 1797516 - DNA, 25 bp, Homo sapien
taataaacagcttaagtcttcagca

SEQ ID NO: 1797517 - DNA, 25 bp, Homo sapien
taaggtatgcctgtagctgttctgg

SEQ ID NO: 1797518 - DNA, 25 bp, Homo sapien
tccccaagacatcaaaatgcatctg

SEQ ID NO: 1797519 - DNA, 25 bp, Homo sapien
ggagacagacataccttcctgcttc

SEQ ID NO: 1797520 - DNA, 25 bp, Homo sapien
tcacagaggtcactggaagagctgc

SEQ ID NO: 1797521 - DNA, 25 bp, Homo sapien
tgtaagctctgctctaggtggctct

SEQ ID NO: 1797522 - DNA, 25 bp, Homo sapien
tattttaacgggaactgagtatgtc

SEQ ID NO: 1797523 - DNA, 25 bp, Homo sapien
tgttattcacggaaaattgaaggct

SEQ ID NO: 1797524 - DNA, 25 bp, Homo sapien
taaaatagaatgcacgcacggcatg

SEQ ID NO: 1797525 - DNA, 25 bp, Homo sapien
cacacagtaacaattttccgctaaa

SEQ ID NO: 1797526 - DNA, 25 bp, Homo sapien
ttttggctcaggtagaaccttctct

SEQ ID NO: 1797527 - DNA, 25 bp, Homo sapien
agcagtttctagtgtccattaacta

SEQ ID NO: 1797528 - DNA, 25 bp, Homo sapien
gcagtttctagtgtccattaactaa

SEQ ID NO: 1797529 - DNA, 25 bp, Homo sapien
cacaaagtagttcagaccacaggca

SEQ ID NO: 1797530 - DNA, 25 bp, Homo sapien
cagtttctagtgtccattaactaat

SEQ ID NO: 1797531 - DNA, 25 bp, Homo sapien
tagcatgttaaagcaaggttccctg

SEQ ID NO: 1797532 - DNA, 25 bp, Homo sapien
ctgctaggatccaaatgtacaagaa

SEQ ID NO: 1797533 - DNA, 25 bp, Homo sapien
tatgccatacatacctatatcccca

SEQ ID NO: 1797534 - DNA, 25 bp, Homo sapien
tcctggtgctcaacgtggtaaccca

SEQ ID NO: 1797535 - DNA, 25 bp, Homo sapien
catttaggcatgctggctaaagaaa

SEQ ID NO: 1797536 - DNA, 25 bp, Homo sapien
attccagcacttgggcgggcggcag

SEQ ID NO: 1797537 - DNA, 25 bp, Homo sapien
caagatactgtgtcttaattgagga

SEQ ID NO: 1797538 - DNA, 25 bp, Homo sapien
taattgaggatgtcaacatttaggc

SEQ ID NO: 1797539 - DNA, 25 bp, Homo sapien
aatggatgcagaagaacctcagtgg

SEQ ID NO: 1797540 - DNA, 25 bp, Homo sapien
gacacttgtgaatgtggcaggcact

SEQ ID NO: 1797541 - DNA, 25 bp, Homo sapien
tttagacaagagtcagccgcctgtt

SEQ ID NO: 1797542 - DNA, 25 bp, Homo sapien
tctacaccaggtgttcacaaaaggg

SEQ ID NO: 1797543 - DNA, 25 bp, Homo sapien
aattaagagtgactgcagacctgca

SEQ ID NO: 1797544 - DNA, 25 bp, Homo sapien
gggcagccgtccattctagcacttg

SEQ ID NO: 1797545 - DNA, 25 bp, Homo sapien
tactaacaggagcatgacacggctg

SEQ ID NO: 1797546 - DNA, 25 bp, Homo sapien
tgcccagctagtaattttcccagag

SEQ ID NO: 1797547 - DNA, 25 bp, Homo sapien
tccgagtggaaattatgggccagcc

SEQ ID NO: 1797548 - DNA, 25 bp, Homo sapien
tgagagtcatgaaaagccctaggct

SEQ ID NO: 1797549 - DNA, 25 bp, Homo sapien
tgaggaaatagaacaggcgcggctt

SEQ ID NO: 1797550 - DNA, 25 bp, Homo sapien
gaatgagtacggttggtcctcccta

SEQ ID NO: 1797551 - DNA, 25 bp, Homo sapien
gctgcacccttctttctggagtaag

SEQ ID NO: 1797552 - DNA, 25 bp, Homo sapien
tggagtaagctgtgtctgtctccgc

SEQ ID NO: 1797553 - DNA, 25 bp, Homo sapien
gtctgtctccgcaaaagctcaggga

SEQ ID NO: 1797554 - DNA, 25 bp, Homo sapien
tttctggagtaagctgtgtctgtct

SEQ ID NO: 1797555 - DNA, 25 bp, Homo sapien
ctgcccgcgcaacgcagcggacccg

SEQ ID NO: 1797556 - DNA, 25 bp, Homo sapien
caacgcagcggacccgggagaggac

SEQ ID NO: 1797557 - DNA, 25 bp, Homo sapien
ccgctgctggcggggcccaaggctg

SEQ ID NO: 1797558 - DNA, 25 bp, Homo sapien
aggaccccgcgccagccagcaagcc

SEQ ID NO: 1797559 - DNA, 25 bp, Homo sapien
gtcttcaaatactcccagtactgct

SEQ ID NO: 1797560 - DNA, 25 bp, Homo sapien
gtactgctaaggaccaccaggcttc

SEQ ID NO: 1797561 - DNA, 25 bp, Homo sapien
tcccagtactgctaaggaccaccag

SEQ ID NO: 1797562 - DNA, 25 bp, Homo sapien
aatactcccagtactgctaaggacc

SEQ ID NO: 1797563 - DNA, 25 bp, Homo sapien
tcagcaacacgtatcttccaatgtt

SEQ ID NO: 1797564 - DNA, 25 bp, Homo sapien
gaaactaacttgtattcagcaacac

SEQ ID NO: 1797565 - DNA, 25 bp, Homo sapien
taaaagtaagacagcgttatcaaca

SEQ ID NO: 1797566 - DNA, 25 bp, Homo sapien
gcactgaaacaaatcttacgtacca

SEQ ID NO: 1797567 - DNA, 25 bp, Homo sapien
gaggtgcttacagatgcttggttaa

SEQ ID NO: 1797568 - DNA, 25 bp, Homo sapien
aggtcacgtgtgacctaagaggaga

SEQ ID NO: 1797569 - DNA, 25 bp, Homo sapien
taaagctcaaggacagtggctacat

SEQ ID NO: 1797570 - DNA, 25 bp, Homo sapien
cccaggtgaggcgttaagagtccag

SEQ ID NO: 1797571 - DNA, 25 bp, Homo sapien
tctgcgttatgttttcaaggaacaa

SEQ ID NO: 1797572 - DNA, 25 bp, Homo sapien
tgttccatgtgatgcttctcactga

SEQ ID NO: 1797573 - DNA, 25 bp, Homo sapien
aactctgccagtatctaagaaaaag

SEQ ID NO: 1797574 - DNA, 25 bp, Homo sapien
tgctgctgtaaagttcatatactgc

SEQ ID NO: 1797575 - DNA, 25 bp, Homo sapien
cacagtgagaaacgggcaatgacct

SEQ ID NO: 1797576 - DNA, 25 bp, Homo sapien
tgaccttggagcacagcttaaaaag

SEQ ID NO: 1797577 - DNA, 25 bp, Homo sapien
cataatccgtgctgcatcatcacag

SEQ ID NO: 1797578 - DNA, 25 bp, Homo sapien
gcaatgaccttggagcacagcttaa

SEQ ID NO: 1797579 - DNA, 25 bp, Homo sapien
tctcgctaactttgatgaatgaagc

SEQ ID NO: 1797580 - DNA, 25 bp, Homo sapien
ccgttgctggctcgggtgactaggg

SEQ ID NO: 1797581 - DNA, 25 bp, Homo sapien
attttgaatccttcactcgactggt

SEQ ID NO: 1797582 - DNA, 25 bp, Homo sapien
gagtgagcagcagcgcagtttactg

SEQ ID NO: 1797583 - DNA, 25 bp, Homo sapien
tcatcttgcttccttatggtccatg

SEQ ID NO: 1797584 - DNA, 25 bp, Homo sapien
tttcatcttgcttccttatggtcca

SEQ ID NO: 1797585 - DNA, 25 bp, Homo sapien
gttttcatcttgcttccttatggtc

SEQ ID NO: 1797586 - DNA, 25 bp, Homo sapien
catcttgcttccttatggtccatga

SEQ ID NO: 1797587 - DNA, 25 bp, Homo sapien
ctgccatgattacacagatgtttat

SEQ ID NO: 1797588 - DNA, 25 bp, Homo sapien
tgccatgattacacagatgtttatg

SEQ ID NO: 1797589 - DNA, 25 bp, Homo sapien
catatcaacatgaggaagtccccag

SEQ ID NO: 1797590 - DNA, 25 bp, Homo sapien
agcaaccaggcttagacttcaccca

SEQ ID NO: 1797591 - DNA, 25 bp, Homo sapien
aaagaaatgcctacctgtccacatg

SEQ ID NO: 1797592 - DNA, 25 bp, Homo sapien
cctccaagcagaacacgaccagtgt

SEQ ID NO: 1797593 - DNA, 25 bp, Homo sapien
gagtcacagcctgaaagaatctcaa

SEQ ID NO: 1797594 - DNA, 25 bp, Homo sapien
tcaaaatggtctagagtatatggaa

SEQ ID NO: 1797595 - DNA, 25 bp, Homo sapien
aaatgtagctgaccttaagagtcac

SEQ ID NO: 1797596 - DNA, 25 bp, Homo sapien
tattatcaatttcaagcattttgag

SEQ ID NO: 1797597 - DNA, 25 bp, Homo sapien
ggatggcccagatcaggttgcccat

SEQ ID NO: 1797598 - DNA, 25 bp, Homo sapien
aggggatggcccagatcaggttgcc

SEQ ID NO: 1797599 - DNA, 25 bp, Homo sapien
ggaaccgttgagaattggaggcaga

SEQ ID NO: 1797600 - DNA, 25 bp, Homo sapien
gggaaccgttgagaattggaggcag

SEQ ID NO: 1797601 - DNA, 25 bp, Homo sapien
ggttgccctagagtctcatcaagac

SEQ ID NO: 1797602 - DNA, 25 bp, Homo sapien
agaatactccgtcccatctggttgc

SEQ ID NO: 1797603 - DNA, 25 bp, Homo sapien
gacatttcagaatactccgtcccat

SEQ ID NO: 1797604 - DNA, 25 bp, Homo sapien
catctggttgccctagagtctcatc

SEQ ID NO: 1797605 - DNA, 25 bp, Homo sapien
gcagggtttttgcacagacatgaga

SEQ ID NO: 1797606 - DNA, 25 bp, Homo sapien
tcaggtttactaggacaaattcacc

SEQ ID NO: 1797607 - DNA, 25 bp, Homo sapien
taagagaaaacatcccgaaagctat

SEQ ID NO: 1797608 - DNA, 25 bp, Homo sapien
ggtgtttcccatagaccacatccat

SEQ ID NO: 1797609 - DNA, 25 bp, Homo sapien
tgtcccaggcgaaaataaaatctct

SEQ ID NO: 1797610 - DNA, 25 bp, Homo sapien
gataagcccagtcagaaaaccaggt

SEQ ID NO: 1797611 - DNA, 25 bp, Homo sapien
caagtgtactcagatcatgtcccag

SEQ ID NO: 1797612 - DNA, 25 bp, Homo sapien
ccatgtaaggctgtccgggatgtac

SEQ ID NO: 1797613 - DNA, 25 bp, Homo sapien
tactatcacctagtttagggccaac

SEQ ID NO: 1797614 - DNA, 25 bp, Homo sapien
tgacttgcacgccattaccaccttg

SEQ ID NO: 1797615 - DNA, 25 bp, Homo sapien
tactgtctctgtagctgatggctgc

SEQ ID NO: 1797616 - DNA, 25 bp, Homo sapien
cttaaaggccaagcacagaggaatg

SEQ ID NO: 1797617 - DNA, 25 bp, Homo sapien
tggagccctcataactgccttatcg

SEQ ID NO: 1797618 - DNA, 25 bp, Homo sapien
cagttagcctccagtataccatata

SEQ ID NO: 1797619 - DNA, 25 bp, Homo sapien
tcttcaacatggactaactcatgtc

SEQ ID NO: 1797620 - DNA, 25 bp, Homo sapien
tattcaccaaaggtagccctaatcc

SEQ ID NO: 1797621 - DNA, 25 bp, Homo sapien
agttcaaaacttcatgccggcaggg

SEQ ID NO: 1797622 - DNA, 25 bp, Homo sapien
ccttaggcagcactagagcggcaaa

SEQ ID NO: 1797623 - DNA, 25 bp, Homo sapien
gaaatacttggctcgtgacagatcc

SEQ ID NO: 1797624 - DNA, 25 bp, Homo sapien
tgaggtctcaacttcagggcacagc

SEQ ID NO: 1797625 - DNA, 25 bp, Homo sapien
aatacatgctgcgttttaagttcca

SEQ ID NO: 1797626 - DNA, 25 bp, Homo sapien
atgtacaaagtcaaggcactgatct

SEQ ID NO: 1797627 - DNA, 25 bp, Homo sapien
caggtttatacgctgagtcaccaaa

SEQ ID NO: 1797628 - DNA, 25 bp, Homo sapien
catgatacccaaaggttttgtgtgt

SEQ ID NO: 1797629 - DNA, 25 bp, Homo sapien
tctgtcatacatctataaagcctag

SEQ ID NO: 1797630 - DNA, 25 bp, Homo sapien
aaatttggaattcagatgatcaccc

SEQ ID NO: 1797631 - DNA, 25 bp, Homo sapien
aactctattgcacatggtaactctg

SEQ ID NO: 1797632 - DNA, 25 bp, Homo sapien
aattcaatggtgttggtatcacccc

SEQ ID NO: 1797633 - DNA, 25 bp, Homo sapien
ccagctgctcttcaaaatactgagt

SEQ ID NO: 1797634 - DNA, 25 bp, Homo sapien
tctgatgccctcgagtcagattagc

SEQ ID NO: 1797635 - DNA, 25 bp, Homo sapien
gtctttcccagtctgatgccctcga

SEQ ID NO: 1797636 - DNA, 25 bp, Homo sapien
cctcgagtcagattagccagctgct

SEQ ID NO: 1797637 - DNA, 25 bp, Homo sapien
tcagtagctacgacgtgcagggcat

SEQ ID NO: 1797638 - DNA, 25 bp, Homo sapien
tgcagggcattgtgtgaaaaatgct

SEQ ID NO: 1797639 - DNA, 25 bp, Homo sapien
gaaaaatgctggattaaaagacacg

SEQ ID NO: 1797640 - DNA, 25 bp, Homo sapien
taaaagacacgtggcatcaaatgtc

SEQ ID NO: 1797641 - DNA, 25 bp, Homo sapien
aatctgcccaagctcaaaactccgg

SEQ ID NO: 1797642 - DNA, 25 bp, Homo sapien
gacagaatgacagcaaacgcagggt

SEQ ID NO: 1797643 - DNA, 25 bp, Homo sapien
cagcacctgggaaactctgaagtca

SEQ ID NO: 1797644 - DNA, 25 bp, Homo sapien
cgcagggttatacggtaagtcagca

SEQ ID NO: 1797645 - DNA, 25 bp, Homo sapien
tccattttagagatgtttaggctct

SEQ ID NO: 1797646 - DNA, 25 bp, Homo sapien
ctaactacaggtttgttttcagatg

SEQ ID NO: 1797647 - DNA, 25 bp, Homo sapien
tactcatggattgtcctaactacag

SEQ ID NO: 1797648 - DNA, 25 bp, Homo sapien
ttagaatttcaactagcactgctca

SEQ ID NO: 1797649 - DNA, 25 bp, Homo sapien
tgggcgggagattccgggccgctgt

SEQ ID NO: 1797650 - DNA, 25 bp, Homo sapien
caagagtaaaagcgcagccgaggag

SEQ ID NO: 1797651 - DNA, 25 bp, Homo sapien
ccgcgcaggcatccgggcagggacg

SEQ ID NO: 1797652 - DNA, 25 bp, Homo sapien
cagggcaagcgctaaaagtttccgg

SEQ ID NO: 1797653 - DNA, 25 bp, Homo sapien
agctcggcttcttccgtgggcgcgg

SEQ ID NO: 1797654 - DNA, 25 bp, Homo sapien
ttctcccttcggaggagctcggctt

SEQ ID NO: 1797655 - DNA, 25 bp, Homo sapien
cgtggaatcactggttctcccttcg

SEQ ID NO: 1797656 - DNA, 25 bp, Homo sapien
gcagggttaattccgcccgctgcct

SEQ ID NO: 1797657 - DNA, 25 bp, Homo sapien
cctgttcagtcaggctgaggacgcg

SEQ ID NO: 1797658 - DNA, 25 bp, Homo sapien
aaaggctcatctgtgcgcggcgcgg

SEQ ID NO: 1797659 - DNA, 25 bp, Homo sapien
ccgtcggaggagtccgagcctgttc

SEQ ID NO: 1797660 - DNA, 25 bp, Homo sapien
tcaggctgaggacgcggttgttttc

SEQ ID NO: 1797661 - DNA, 25 bp, Homo sapien
agctgtgtcagcagaaactttagaa

SEQ ID NO: 1797662 - DNA, 25 bp, Homo sapien
tagaaaacacgctgtgcgagcggcc

SEQ ID NO: 1797663 - DNA, 25 bp, Homo sapien
tggccgcgccggctcatgtgtacgc

SEQ ID NO: 1797664 - DNA, 25 bp, Homo sapien
aactttagaaaacacgctgtgcgag

SEQ ID NO: 1797665 - DNA, 25 bp, Homo sapien
cagttaacaacaatgatcaaggtca

SEQ ID NO: 1797666 - DNA, 25 bp, Homo sapien
gctcttcctgttaggaagcgccgga

SEQ ID NO: 1797667 - DNA, 25 bp, Homo sapien
tgctctacagatagtaaccaatcag

SEQ ID NO: 1797668 - DNA, 25 bp, Homo sapien
aaattcagtattcacaaagctaggg

SEQ ID NO: 1797669 - DNA, 25 bp, Homo sapien
tccactggtgcagtcaaggttcact

SEQ ID NO: 1797670 - DNA, 25 bp, Homo sapien
aatgtagtctcaaggatgaaaagcc

SEQ ID NO: 1797671 - DNA, 25 bp, Homo sapien
aaatcagaactgcagccaatggtga

SEQ ID NO: 1797672 - DNA, 25 bp, Homo sapien
gaaatcgtctgtacaagcgcagtca

SEQ ID NO: 1797673 - DNA, 25 bp, Homo sapien
tgcactgtgctaagaagcctgactc

SEQ ID NO: 1797674 - DNA, 25 bp, Homo sapien
tgggtgttaacagagagggactaac

SEQ ID NO: 1797675 - DNA, 25 bp, Homo sapien
gaaaacgactcaccaatgaaaagga

SEQ ID NO: 1797676 - DNA, 25 bp, Homo sapien
caagaatgttctaccgtcctactag

SEQ ID NO: 1797677 - DNA, 25 bp, Homo sapien
aacatggaaaagacgagtcttttgg

SEQ ID NO: 1797678 - DNA, 25 bp, Homo sapien
agtcttttggctacaccacagaaag

SEQ ID NO: 1797679 - DNA, 25 bp, Homo sapien
catggaaaagacgagtcttttggct

SEQ ID NO: 1797680 - DNA, 25 bp, Homo sapien
ctgaacatggaaaagacgagtcttt

SEQ ID NO: 1797681 - DNA, 25 bp, Homo sapien
cctgaaagctagacagctctgagat

SEQ ID NO: 1797682 - DNA, 25 bp, Homo sapien
gccacttgtcagcatactcctctag

SEQ ID NO: 1797683 - DNA, 25 bp, Homo sapien
aagactggccccgagaagaaggcag

SEQ ID NO: 1797684 - DNA, 25 bp, Homo sapien
taggtctctgaggattcatgaggct

SEQ ID NO: 1797685 - DNA, 25 bp, Homo sapien
tgacagaccacatgacggctgaagg

SEQ ID NO: 1797686 - DNA, 25 bp, Homo sapien
cggctgaaggacatggcttgctgaa

SEQ ID NO: 1797687 - DNA, 25 bp, Homo sapien
actgcaggagaagcatatgggttgc

SEQ ID NO: 1797688 - DNA, 25 bp, Homo sapien
tatctcccttgattgggccaacaag

SEQ ID NO: 1797689 - DNA, 25 bp, Homo sapien
taacacaagtgcctaaaaggattcc

SEQ ID NO: 1797690 - DNA, 25 bp, Homo sapien
gacaaggccctttccattaactcac

SEQ ID NO: 1797691 - DNA, 25 bp, Homo sapien
gacataatagccaacgttctcctcc

SEQ ID NO: 1797692 - DNA, 25 bp, Homo sapien
tactctgatgagacccatgtttcac

SEQ ID NO: 1797693 - DNA, 25 bp, Homo sapien
aggcatggcctagaattgagagttc

SEQ ID NO: 1797694 - DNA, 25 bp, Homo sapien
aacctctttgagtctagccacagaa

SEQ ID NO: 1797695 - DNA, 25 bp, Homo sapien
tgcatcctccgaggccaagacttca

SEQ ID NO: 1797696 - DNA, 25 bp, Homo sapien
aggctgcatcctccgaggccaagac

SEQ ID NO: 1797697 - DNA, 25 bp, Homo sapien
agtccaaaggctgcatcctccgagg

SEQ ID NO: 1797698 - DNA, 25 bp, Homo sapien
caaaggctgcatcctccgaggccaa

SEQ ID NO: 1797699 - DNA, 25 bp, Homo sapien
tcaatccggttgtaactggacggta

SEQ ID NO: 1797700 - DNA, 25 bp, Homo sapien
caatccggttgtaactggacggtag

SEQ ID NO: 1797701 - DNA, 25 bp, Homo sapien
caagagggtgccatgtgttaccaca

SEQ ID NO: 1797702 - DNA, 25 bp, Homo sapien
taaggtaattctggccgagcacagt

SEQ ID NO: 1797703 - DNA, 25 bp, Homo sapien
catgatagttttgcgagactgcaca

SEQ ID NO: 1797704 - DNA, 25 bp, Homo sapien
tcatcactaaaaggagcggcgacat

SEQ ID NO: 1797705 - DNA, 25 bp, Homo sapien
ttcaccatcactaaggcagggcaaa

SEQ ID NO: 1797706 - DNA, 25 bp, Homo sapien
tgggacagccgcgatgctgtcaatg

SEQ ID NO: 1797707 - DNA, 25 bp, Homo sapien
catcactaaggcagggcaaacattt

SEQ ID NO: 1797708 - DNA, 25 bp, Homo sapien
cagccgcgatgctgtcaatgaatct

SEQ ID NO: 1797709 - DNA, 25 bp, Homo sapien
tacatgtgcatgtcccaaatgaaca

SEQ ID NO: 1797710 - DNA, 25 bp, Homo sapien
ccccagagatacatggagtcaatca

SEQ ID NO: 1797711 - DNA, 25 bp, Homo sapien
ggcaagtcctgaaacacgcctctaa

SEQ ID NO: 1797712 - DNA, 25 bp, Homo sapien
ttttcagacacatagcacgtgaggc

SEQ ID NO: 1797713 - DNA, 25 bp, Homo sapien
tgcaaaaattgacatggcttgggaa

SEQ ID NO: 1797714 - DNA, 25 bp, Homo sapien
gcatattccaacatattggctcttt

SEQ ID NO: 1797715 - DNA, 25 bp, Homo sapien
acttgcaaaaattgacatggcttgg

SEQ ID NO: 1797716 - DNA, 25 bp, Homo sapien
ttgacattctcaactgacttgcaaa

SEQ ID NO: 1797717 - DNA, 25 bp, Homo sapien
gagagacaccccacaactgagagtg

SEQ ID NO: 1797718 - DNA, 25 bp, Homo sapien
tgatgatatacaaagtggacctcct

SEQ ID NO: 1797719 - DNA, 25 bp, Homo sapien
ggccacaggcgttgttattcttgga

SEQ ID NO: 1797720 - DNA, 25 bp, Homo sapien
tattcttggactgtagcagcattca

SEQ ID NO: 1797721 - DNA, 25 bp, Homo sapien
gtggcagttcagacaggccttgctc

SEQ ID NO: 1797722 - DNA, 25 bp, Homo sapien
tgagtggcagttcagacaggccttg

SEQ ID NO: 1797723 - DNA, 25 bp, Homo sapien
aaactgagtggcagttcagacaggc

SEQ ID NO: 1797724 - DNA, 25 bp, Homo sapien
actgagtggcagttcagacaggcct

SEQ ID NO: 1797725 - DNA, 25 bp, Homo sapien
gatcctgttactcaagaatcatctg

SEQ ID NO: 1797726 - DNA, 25 bp, Homo sapien
tacctaagagtgtggtgcacgagga

SEQ ID NO: 1797727 - DNA, 25 bp, Homo sapien
tgcacgaggactgtaccaactgcct

SEQ ID NO: 1797728 - DNA, 25 bp, Homo sapien
caagaagtctagcattcaaacattc

SEQ ID NO: 1797729 - DNA, 25 bp, Homo sapien
gttactagtccttccatgagcctca

SEQ ID NO: 1797730 - DNA, 25 bp, Homo sapien
aacagtgacatctagtaagtaggcc

SEQ ID NO: 1797731 - DNA, 25 bp, Homo sapien
tcctcagacatagaacaaaaagccc

SEQ ID NO: 1797732 - DNA, 25 bp, Homo sapien
tgacaatcacccctgtaacagtgac

SEQ ID NO: 1797733 - DNA, 25 bp, Homo sapien
tgcaaagagctaagtcaaatctcct

SEQ ID NO: 1797734 - DNA, 25 bp, Homo sapien
tgatcaccccagaccacgtggtatt

SEQ ID NO: 1797735 - DNA, 25 bp, Homo sapien
tctcattgaaacatctaggcaaggt

SEQ ID NO: 1797736 - DNA, 25 bp, Homo sapien
catatcgctggtcaggtgctaccca

SEQ ID NO: 1797737 - DNA, 25 bp, Homo sapien
gaagtggcagcgtagatgctgatta

SEQ ID NO: 1797738 - DNA, 25 bp, Homo sapien
aatacacttcctcttgacacgctgc

SEQ ID NO: 1797739 - DNA, 25 bp, Homo sapien
gctgattaagcaacaagcagtgaaa

SEQ ID NO: 1797740 - DNA, 25 bp, Homo sapien
tgccctgccaggaacaatacacttc

SEQ ID NO: 1797741 - DNA, 25 bp, Homo sapien
cagcggtctctttagtactggtatc

SEQ ID NO: 1797742 - DNA, 25 bp, Homo sapien
actggtatctagacagggagttggc

SEQ ID NO: 1797743 - DNA, 25 bp, Homo sapien
tgtccaggtaattgcaattaagtca

SEQ ID NO: 1797744 - DNA, 25 bp, Homo sapien
agaactgtttttatcgactgatgga

SEQ ID NO: 1797745 - DNA, 25 bp, Homo sapien
gagaggcgctatgctatataattta

SEQ ID NO: 1797746 - DNA, 25 bp, Homo sapien
aatcttaaaaagttgcgcacatgtc

SEQ ID NO: 1797747 - DNA, 25 bp, Homo sapien
cgtgtttgcatacaaacagagacta

SEQ ID NO: 1797748 - DNA, 25 bp, Homo sapien
ggcactagaccttgggattttacat

SEQ ID NO: 1797749 - DNA, 25 bp, Homo sapien
accttgcagggttgacatgtggagc

SEQ ID NO: 1797750 - DNA, 25 bp, Homo sapien
ccacaactgcgagatgtcaagcagg

SEQ ID NO: 1797751 - DNA, 25 bp, Homo sapien
tccatgtgctccgtaccattctaag

SEQ ID NO: 1797752 - DNA, 25 bp, Homo sapien
tgctgcagataagtaatgtaactct

SEQ ID NO: 1797753 - DNA, 25 bp, Homo sapien
catagcatggccttttgataataac

SEQ ID NO: 1797754 - DNA, 25 bp, Homo sapien
taccactgcttcaggtacaggtagc

SEQ ID NO: 1797755 - DNA, 25 bp, Homo sapien
gctggcaactttgtggaataggacc

SEQ ID NO: 1797756 - DNA, 25 bp, Homo sapien
gcctgtgcccggaataactcctcaa

SEQ ID NO: 1797757 - DNA, 25 bp, Homo sapien
agattaacttatgcccactcgaagg

SEQ ID NO: 1797758 - DNA, 25 bp, Homo sapien
cagatttgggaggattttcacttcc

SEQ ID NO: 1797759 - DNA, 25 bp, Homo sapien
taaagattatatgagcatgcaggct

SEQ ID NO: 1797760 - DNA, 25 bp, Homo sapien
cctaacaggtatagactggtgctga

SEQ ID NO: 1797761 - DNA, 25 bp, Homo sapien
ggagggcatgctcatttcggcacag

SEQ ID NO: 1797762 - DNA, 25 bp, Homo sapien
ggacaatccacaaaggcacaaaggg

SEQ ID NO: 1797763 - DNA, 25 bp, Homo sapien
cacaggcggcacttgggatgcccag

SEQ ID NO: 1797764 - DNA, 25 bp, Homo sapien
taaaggatactctaggacagctggt

SEQ ID NO: 1797765 - DNA, 25 bp, Homo sapien
gcatccccgttgcaatgactggact

SEQ ID NO: 1797766 - DNA, 25 bp, Homo sapien
gcaatgtgccaacgagttctcaagg

SEQ ID NO: 1797767 - DNA, 25 bp, Homo sapien
tggactcccagatcactgaccgagc

SEQ ID NO: 1797768 - DNA, 25 bp, Homo sapien
gtgctcagtgcatccccgttgcaat

SEQ ID NO: 1797769 - DNA, 25 bp, Homo sapien
gcctgcatcactggtgtgcccccca

SEQ ID NO: 1797770 - DNA, 25 bp, Homo sapien
agcctgcatcactggtgtgcccccc

SEQ ID NO: 1797771 - DNA, 25 bp, Homo sapien
cctgcatcactggtgtgccccccat

SEQ ID NO: 1797772 - DNA, 25 bp, Homo sapien
gactgcgccgggttgctctgatccc

SEQ ID NO: 1797773 - DNA, 25 bp, Homo sapien
tctgatccccttggctgctcgtgga

SEQ ID NO: 1797774 - DNA, 25 bp, Homo sapien
tgcttcctacaggagagccaacagg

SEQ ID NO: 1797775 - DNA, 25 bp, Homo sapien
attgggccagatcgagactggttgc

SEQ ID NO: 1797776 - DNA, 25 bp, Homo sapien
tccataatggtgaacgtaacatcgt

SEQ ID NO: 1797777 - DNA, 25 bp, Homo sapien
taagaatcaacaagcactgagtgct

SEQ ID NO: 1797778 - DNA, 25 bp, Homo sapien
ggctagctctagcagtcctaccgaa

SEQ ID NO: 1797779 - DNA, 25 bp, Homo sapien
gagtgctccgcatgtacctgtctca

SEQ ID NO: 1797780 - DNA, 25 bp, Homo sapien
tataacataatgcacgctggataac

SEQ ID NO: 1797781 - DNA, 25 bp, Homo sapien
tggactcaagccatggactactccc

SEQ ID NO: 1797782 - DNA, 25 bp, Homo sapien
ttgagtggccctcggcttagctgtg

SEQ ID NO: 1797783 - DNA, 25 bp, Homo sapien
aaacctgtcatgagctttgagtaaa

SEQ ID NO: 1797784 - DNA, 25 bp, Homo sapien
ccctttctagaactcatgctttttg

SEQ ID NO: 1797785 - DNA, 25 bp, Homo sapien
cagtgctgccaaacagttcttttcc

SEQ ID NO: 1797786 - DNA, 25 bp, Homo sapien
tatttaatccaatacgtgccaccct

SEQ ID NO: 1797787 - DNA, 25 bp, Homo sapien
gagctctaaatacaccccagtgctg

SEQ ID NO: 1797788 - DNA, 25 bp, Homo sapien
gcttttattctgctaataactaacc

SEQ ID NO: 1797789 - DNA, 25 bp, Homo sapien
agcagcatggatccgattagcagtt

SEQ ID NO: 1797790 - DNA, 25 bp, Homo sapien
tgctaataactaaccacagttgcag

SEQ ID NO: 1797791 - DNA, 25 bp, Homo sapien
tgcagcagcatggatccgattagca

SEQ ID NO: 1797792 - DNA, 25 bp, Homo sapien
ttgcaattttgtatagtcgtttccc

SEQ ID NO: 1797793 - DNA, 25 bp, Homo sapien
cttgcaattttgtatagtcgtttcc

SEQ ID NO: 1797794 - DNA, 25 bp, Homo sapien
tgcaattttgtatagtcgtttcccc

SEQ ID NO: 1797795 - DNA, 25 bp, Homo sapien
tgctgagttcatcccacccaagaac

SEQ ID NO: 1797796 - DNA, 25 bp, Homo sapien
tcaaggagaactcatgactgctgag

SEQ ID NO: 1797797 - DNA, 25 bp, Homo sapien
gaactttagtatcaacctgtccaac

SEQ ID NO: 1797798 - DNA, 25 bp, Homo sapien
tttattcctaagcacgtagtcttcc

SEQ ID NO: 1797799 - DNA, 25 bp, Homo sapien
taaaaatccattcttagcccagtga

SEQ ID NO: 1797800 - DNA, 25 bp, Homo sapien
gcttacggtgtcttttgtagcggaa

SEQ ID NO: 1797801 - DNA, 25 bp, Homo sapien
gtggctccccaagtattccaacaca

SEQ ID NO: 1797802 - DNA, 25 bp, Homo sapien
taacttaatctctttgcacgtggct

SEQ ID NO: 1797803 - DNA, 25 bp, Homo sapien
gattctgactggctcccgggtggct

SEQ ID NO: 1797804 - DNA, 25 bp, Homo sapien
tcctgtggcattggtgactggctca

SEQ ID NO: 1797805 - DNA, 25 bp, Homo sapien
tgactggctcaaggcgggatgggaa

SEQ ID NO: 1797806 - DNA, 25 bp, Homo sapien
atgggaactggattctgactggctc

SEQ ID NO: 1797807 - DNA, 25 bp, Homo sapien
taggtaagcaaactcacgtacgcct

SEQ ID NO: 1797808 - DNA, 25 bp, Homo sapien
taaaggtcaagagcactggcagatg

SEQ ID NO: 1797809 - DNA, 25 bp, Homo sapien
tcctgagaataagggaagtcacacc

SEQ ID NO: 1797810 - DNA, 25 bp, Homo sapien
ttctgggactggcactaactagctc

SEQ ID NO: 1797811 - DNA, 25 bp, Homo sapien
taaaaaccatgaactattccattat

SEQ ID NO: 1797812 - DNA, 25 bp, Homo sapien
tgagaacttgccaaaaatggaggtt

SEQ ID NO: 1797813 - DNA, 25 bp, Homo sapien
ctcaaggtatggtcctcaaaccact

SEQ ID NO: 1797814 - DNA, 25 bp, Homo sapien
cacctcaaaaacctattattgtact

SEQ ID NO: 1797815 - DNA, 25 bp, Homo sapien
cctccaatgcctttggtggcctaat

SEQ ID NO: 1797816 - DNA, 25 bp, Homo sapien
tgccatatgaggtctacagagaggt

SEQ ID NO: 1797817 - DNA, 25 bp, Homo sapien
cagtattttaaggttatctgaactg

SEQ ID NO: 1797818 - DNA, 25 bp, Homo sapien
gcaaggtgatttagtaacatttctg

SEQ ID NO: 1797819 - DNA, 25 bp, Homo sapien
gcaggggatgaacaccgagggccat

SEQ ID NO: 1797820 - DNA, 25 bp, Homo sapien
tcggttgtcttgtgctttgacaggg

SEQ ID NO: 1797821 - DNA, 25 bp, Homo sapien
cagcctgctgccgacatgggggtcc

SEQ ID NO: 1797822 - DNA, 25 bp, Homo sapien
tcttgtgctttgacagggtgtgaga

SEQ ID NO: 1797823 - DNA, 25 bp, Homo sapien
caataaagattttctagttcggttg

SEQ ID NO: 1797824 - DNA, 25 bp, Homo sapien
tggaacttggtgactaattagtttg

SEQ ID NO: 1797825 - DNA, 25 bp, Homo sapien
caaggatggcttccgaatttttggc

SEQ ID NO: 1797826 - DNA, 25 bp, Homo sapien
ccatgaatttacctaagatccagat

SEQ ID NO: 1797827 - DNA, 25 bp, Homo sapien
agacaacggtttttcactgagacag

SEQ ID NO: 1797828 - DNA, 25 bp, Homo sapien
acatggatcttgtttagcctccaat

SEQ ID NO: 1797829 - DNA, 25 bp, Homo sapien
tagcctccaatcgtgtattcttttc

SEQ ID NO: 1797830 - DNA, 25 bp, Homo sapien
cttcatgggacacaacaaattctgc

SEQ ID NO: 1797831 - DNA, 25 bp, Homo sapien
gggacacaacaaattctgcaatgta

SEQ ID NO: 1797832 - DNA, 25 bp, Homo sapien
gactctgttagtgctatcttccatg

SEQ ID NO: 1797833 - DNA, 25 bp, Homo sapien
tggaaagatccactaatgggaggca

SEQ ID NO: 1797834 - DNA, 25 bp, Homo sapien
ggtgtgcctagaaggccacttgcct

SEQ ID NO: 1797835 - DNA, 25 bp, Homo sapien
gctgatgtgcacctgttctgtatga

SEQ ID NO: 1797836 - DNA, 25 bp, Homo sapien
taagcaaatcataacctttctgagc

SEQ ID NO: 1797837 - DNA, 25 bp, Homo sapien
tgtaaataaatggactgcagtgggt

SEQ ID NO: 1797838 - DNA, 25 bp, Homo sapien
gggtattgaatacagcttgctgtgt

SEQ ID NO: 1797839 - DNA, 25 bp, Homo sapien
cacagtcccggatcctgtgaggatc

SEQ ID NO: 1797840 - DNA, 25 bp, Homo sapien
gaatggaaggcgtagattgtggtct

SEQ ID NO: 1797841 - DNA, 25 bp, Homo sapien
tagattgtggtcttgtttgcgtcat

SEQ ID NO: 1797842 - DNA, 25 bp, Homo sapien
catctaacggcagtggactgggaat

SEQ ID NO: 1797843 - DNA, 25 bp, Homo sapien
gccagcatcatctaacggcagtgga

SEQ ID NO: 1797844 - DNA, 25 bp, Homo sapien
ttaaaagagcttcctgaaatcttgt

SEQ ID NO: 1797845 - DNA, 25 bp, Homo sapien
acgttaccaggtgaaggctctagct

SEQ ID NO: 1797846 - DNA, 25 bp, Homo sapien
tctttatgcatcactggaaggccag

SEQ ID NO: 1797847 - DNA, 25 bp, Homo sapien
ccaggcaaatggaagcgagttcata

SEQ ID NO: 1797848 - DNA, 25 bp, Homo sapien
tactcattaggacaaagaggacccc

SEQ ID NO: 1797849 - DNA, 25 bp, Homo sapien
cttgagttactctgctgaaagctac

SEQ ID NO: 1797850 - DNA, 25 bp, Homo sapien
ctgtctgttgaggtccatactgagc

SEQ ID NO: 1797851 - DNA, 25 bp, Homo sapien
tgaaagctactgattccagcatgca

SEQ ID NO: 1797852 - DNA, 25 bp, Homo sapien
gctcatctgtggaccgtaagtccca

SEQ ID NO: 1797853 - DNA, 25 bp, Homo sapien
tttctacaacttgctgccatgcatt

SEQ ID NO: 1797854 - DNA, 25 bp, Homo sapien
atcttgaaggactagcacattaaga

SEQ ID NO: 1797855 - DNA, 25 bp, Homo sapien
catgcattttggagaagctttggtt

SEQ ID NO: 1797856 - DNA, 25 bp, Homo sapien
ttgaaggactagcacattaagaaaa

SEQ ID NO: 1797857 - DNA, 25 bp, Homo sapien
gagaactactgctgacctgatgcgg

SEQ ID NO: 1797858 - DNA, 25 bp, Homo sapien
cagctcagggttttgacggtgatca

SEQ ID NO: 1797859 - DNA, 25 bp, Homo sapien
tgatgcggcacctcggagagaaact

SEQ ID NO: 1797860 - DNA, 25 bp, Homo sapien
tcctgtctccgaagagtcacactgg

SEQ ID NO: 1797861 - DNA, 25 bp, Homo sapien
cagaacacaagataataactcgctt

SEQ ID NO: 1797862 - DNA, 25 bp, Homo sapien
ccattggtagcactgaaactgttta

SEQ ID NO: 1797863 - DNA, 25 bp, Homo sapien
gtactatacatcagaaagatgcgat

SEQ ID NO: 1797864 - DNA, 25 bp, Homo sapien
taagatctttcggaaaaacatcttc

SEQ ID NO: 1797865 - DNA, 25 bp, Homo sapien
tgagacacatataatgaatgaaggg

SEQ ID NO: 1797866 - DNA, 25 bp, Homo sapien
cacaactcttgacatctagaccttg

SEQ ID NO: 1797867 - DNA, 25 bp, Homo sapien
gcctttgttgaacttatgagacaca

SEQ ID NO: 1797868 - DNA, 25 bp, Homo sapien
gactgcagggcctacaaggtaccca

SEQ ID NO: 1797869 - DNA, 25 bp, Homo sapien
ttgcagccaagtccaaggacccaca

SEQ ID NO: 1797870 - DNA, 25 bp, Homo sapien
tggtcttgcagccaagtccaaggac

SEQ ID NO: 1797871 - DNA, 25 bp, Homo sapien
ggtcttgcagccaagtccaaggacc

SEQ ID NO: 1797872 - DNA, 25 bp, Homo sapien
tcttgcagccaagtccaaggaccca

SEQ ID NO: 1797873 - DNA, 25 bp, Homo sapien
agcttgcactgggcaccccactata

SEQ ID NO: 1797874 - DNA, 25 bp, Homo sapien
actgggcaccccactatacgctggg

SEQ ID NO: 1797875 - DNA, 25 bp, Homo sapien
tagcttgcactgggcaccccactat

SEQ ID NO: 1797876 - DNA, 25 bp, Homo sapien
ttgcactgggcaccccactatacgc

SEQ ID NO: 1797877 - DNA, 25 bp, Homo sapien
ccatgcatctggttgttggcactga

SEQ ID NO: 1797878 - DNA, 25 bp, Homo sapien
gaactgggggtcatgctgctcatat

SEQ ID NO: 1797879 - DNA, 25 bp, Homo sapien
cacatggctggcttggcccttgtcc

SEQ ID NO: 1797880 - DNA, 25 bp, Homo sapien
gttcacagttggcattggcggcccc

SEQ ID NO: 1797881 - DNA, 25 bp, Homo sapien
ttgtgctgagttcgcagcagcctgc

SEQ ID NO: 1797882 - DNA, 25 bp, Homo sapien
tttgtgctgagttcgcagcagcctg

SEQ ID NO: 1797883 - DNA, 25 bp, Homo sapien
ctttgtgctgagttcgcagcagcct

SEQ ID NO: 1797884 - DNA, 25 bp, Homo sapien
gtgctgagttcgcagcagcctgcat

SEQ ID NO: 1797885 - DNA, 25 bp, Homo sapien
tggtcacgggtagacacacagcgta

SEQ ID NO: 1797886 - DNA, 25 bp, Homo sapien
acgtggtcacgggtagacacacagc

SEQ ID NO: 1797887 - DNA, 25 bp, Homo sapien
acgggtagacacacagcgtacctgc

SEQ ID NO: 1797888 - DNA, 25 bp, Homo sapien
tgcccggggcgtgctcctgggtggc

SEQ ID NO: 1797889 - DNA, 25 bp, Homo sapien
tgaccccagggaacaatgcagctat

SEQ ID NO: 1797890 - DNA, 25 bp, Homo sapien
gcacgcgtagctttgtaaccacaca

SEQ ID NO: 1797891 - DNA, 25 bp, Homo sapien
gcaaggctttggaatggtctacgca

SEQ ID NO: 1797892 - DNA, 25 bp, Homo sapien
cagaaaatgcctccaacgaaagggt

SEQ ID NO: 1797893 - DNA, 25 bp, Homo sapien
gaagaaaacatggggcgtccgccag

SEQ ID NO: 1797894 - DNA, 25 bp, Homo sapien
cccagactggctgggataagcaggc

SEQ ID NO: 1797895 - DNA, 25 bp, Homo sapien
gagcctgagagttgccatagttggg

SEQ ID NO: 1797896 - DNA, 25 bp, Homo sapien
gctgggataagcaggcgacctaatg

SEQ ID NO: 1797897 - DNA, 25 bp, Homo sapien
tctgttaggtgtttcgctttcttgg

SEQ ID NO: 1797898 - DNA, 25 bp, Homo sapien
tttgggtgttcctttcgcggccaga

SEQ ID NO: 1797899 - DNA, 25 bp, Homo sapien
ccccttggagatggattttctgtta

SEQ ID NO: 1797900 - DNA, 25 bp, Homo sapien
gcggccagacggcacgatcgttaac

SEQ ID NO: 1797901 - DNA, 25 bp, Homo sapien
taacctaaacatggtgacagaacct

SEQ ID NO: 1797902 - DNA, 25 bp, Homo sapien
caaacatgattaagtctgcccagga

SEQ ID NO: 1797903 - DNA, 25 bp, Homo sapien
tatttgttggtccacatttagggcc

SEQ ID NO: 1797904 - DNA, 25 bp, Homo sapien
taaacaaagctaggtgatagttccc

SEQ ID NO: 1797905 - DNA, 25 bp, Homo sapien
tctgggtgacgctcacgagtggctt

SEQ ID NO: 1797906 - DNA, 25 bp, Homo sapien
gagttgaggctcccgcgccttggcc

SEQ ID NO: 1797907 - DNA, 25 bp, Homo sapien
tggggcacctcatggtctccggtcc

SEQ ID NO: 1797908 - DNA, 25 bp, Homo sapien
gtacagcggctgtcgaaaatctctg

SEQ ID NO: 1797909 - DNA, 25 bp, Homo sapien
taatgacgcctagtgatgggtgcgc

SEQ ID NO: 1797910 - DNA, 25 bp, Homo sapien
gggctgctaatgacgcctagtgatg

SEQ ID NO: 1797911 - DNA, 25 bp, Homo sapien
gctggttctcgctgtgacgatccca

SEQ ID NO: 1797912 - DNA, 25 bp, Homo sapien
gatgggtgcgctttaatgctggttc

SEQ ID NO: 1797913 - DNA, 25 bp, Homo sapien
tagagcaaaataagaagcgagagtg

SEQ ID NO: 1797914 - DNA, 25 bp, Homo sapien
gaattaaccaggtaaggagaagaga

SEQ ID NO: 1797915 - DNA, 25 bp, Homo sapien
aggagcaatggcattaaaatatgtt

SEQ ID NO: 1797916 - DNA, 25 bp, Homo sapien
tggttctctgggtttggtctttatc

SEQ ID NO: 1797917 - DNA, 25 bp, Homo sapien
caaggaagggatgacgtcccctcca

SEQ ID NO: 1797918 - DNA, 25 bp, Homo sapien
aaggaagggatgacgtcccctccat

SEQ ID NO: 1797919 - DNA, 25 bp, Homo sapien
aggaagggatgacgtcccctccatc

SEQ ID NO: 1797920 - DNA, 25 bp, Homo sapien
taagtatgggagaggaatgagcaca

SEQ ID NO: 1797921 - DNA, 25 bp, Homo sapien
cagcgagtgcgaagttgcgaccaca

SEQ ID NO: 1797922 - DNA, 25 bp, Homo sapien
caacagcgggccaagactaaaaaca

SEQ ID NO: 1797923 - DNA, 25 bp, Homo sapien
aaagtcaaacaaccagggcagcgag

SEQ ID NO: 1797924 - DNA, 25 bp, Homo sapien
tcggaatgagcatcacgcagtgcac

SEQ ID NO: 1797925 - DNA, 25 bp, Homo sapien
taccacccttgagttatgttcggaa

SEQ ID NO: 1797926 - DNA, 25 bp, Homo sapien
aaatggagaccctgtgagtgaagcc

SEQ ID NO: 1797927 - DNA, 25 bp, Homo sapien
tattgggaaaatgagtgcgagtgcc

SEQ ID NO: 1797928 - DNA, 25 bp, Homo sapien
tcatgtctgttacaaaggacagctg

SEQ ID NO: 1797929 - DNA, 25 bp, Homo sapien
catgtctgttacaaaggacagctgt

SEQ ID NO: 1797930 - DNA, 25 bp, Homo sapien
cagggggcctgcgggcttcatgtct

SEQ ID NO: 1797931 - DNA, 25 bp, Homo sapien
ggcctgcgggcttcatgtctgttac

SEQ ID NO: 1797932 - DNA, 25 bp, Homo sapien
cctaggaggagtctgtggctcacaa

SEQ ID NO: 1797933 - DNA, 25 bp, Homo sapien
tgaaaatacaatgcccgagaccaca

SEQ ID NO: 1797934 - DNA, 25 bp, Homo sapien
cagcgtggtgttgctaacctaggag

SEQ ID NO: 1797935 - DNA, 25 bp, Homo sapien
ggtttcgaggcgacctcagcagcag

SEQ ID NO: 1797936 - DNA, 25 bp, Homo sapien
gaaatgggcattactttagcctgca

SEQ ID NO: 1797937 - DNA, 25 bp, Homo sapien
aaaagttcaaacgtggaccatctgc

SEQ ID NO: 1797938 - DNA, 25 bp, Homo sapien
gaataccccttggagttcattaaga

SEQ ID NO: 1797939 - DNA, 25 bp, Homo sapien
gatggcttggaaagaacactgttag

SEQ ID NO: 1797940 - DNA, 25 bp, Homo sapien
agctgttcaccatggcgggcgccat

SEQ ID NO: 1797941 - DNA, 25 bp, Homo sapien
tcatcaggctagagctgttgttcat

SEQ ID NO: 1797942 - DNA, 25 bp, Homo sapien
tagggcggcgcctgcgtgttcatca

SEQ ID NO: 1797943 - DNA, 25 bp, Homo sapien
gaagccataagtccactctggttca

SEQ ID NO: 1797944 - DNA, 25 bp, Homo sapien
gcactcaacgcagcatcaggaaggg

SEQ ID NO: 1797945 - DNA, 25 bp, Homo sapien
ggaatgtcacccttcaattaggtcc

SEQ ID NO: 1797946 - DNA, 25 bp, Homo sapien
gttccgccggacacagggacatgaa

SEQ ID NO: 1797947 - DNA, 25 bp, Homo sapien
tgttacctgggccagcactggttag

SEQ ID NO: 1797948 - DNA, 25 bp, Homo sapien
ggtaaacagctaatgccccacaaag

SEQ ID NO: 1797949 - DNA, 25 bp, Homo sapien
gctaggttagcagaaggactcactt

SEQ ID NO: 1797950 - DNA, 25 bp, Homo sapien
tactggcagggcattaacgggacac

SEQ ID NO: 1797951 - DNA, 25 bp, Homo sapien
tagagtagcgtctggtgaggcaaac

SEQ ID NO: 1797952 - DNA, 25 bp, Homo sapien
ggggccagcgagtaccctggaggcc

SEQ ID NO: 1797953 - DNA, 25 bp, Homo sapien
gaggaccctccatggcacagagtgg

SEQ ID NO: 1797954 - DNA, 25 bp, Homo sapien
cgggaggaccctccatggcacagag

SEQ ID NO: 1797955 - DNA, 25 bp, Homo sapien
tggggccagcgagtaccctggaggc

SEQ ID NO: 1797956 - DNA, 25 bp, Homo sapien
gaatcactgaaacgagccatatgcc

SEQ ID NO: 1797957 - DNA, 25 bp, Homo sapien
gaaggaccacgactattacaaggac

SEQ ID NO: 1797958 - DNA, 25 bp, Homo sapien
tgtgggtcaaggtcctaaggcagct

SEQ ID NO: 1797959 - DNA, 25 bp, Homo sapien
tacaaggacgtgttaaatcaaggca

SEQ ID NO: 1797960 - DNA, 25 bp, Homo sapien
agagatattacaccgcgaagaccgc

SEQ ID NO: 1797961 - DNA, 25 bp, Homo sapien
tatgtatgcgagtccacatgtcctg

SEQ ID NO: 1797962 - DNA, 25 bp, Homo sapien
tcagagcgggttcaaaggaatgaca

SEQ ID NO: 1797963 - DNA, 25 bp, Homo sapien
gaagaccgccttgttcaaagcagtg

SEQ ID NO: 1797964 - DNA, 25 bp, Homo sapien
ttggattcaccaggagacatcatat

SEQ ID NO: 1797965 - DNA, 25 bp, Homo sapien
tttgacttgctctcgggctgtggag

SEQ ID NO: 1797966 - DNA, 25 bp, Homo sapien
cttctttgccgtctgctttgagagg

SEQ ID NO: 1797967 - DNA, 25 bp, Homo sapien
ttgctctcgggctgtggagtgcctt

SEQ ID NO: 1797968 - DNA, 25 bp, Homo sapien
ggctgagaaataccctgagagctgt

SEQ ID NO: 1797969 - DNA, 25 bp, Homo sapien
gaaataccctgagagctgtagctat

SEQ ID NO: 1797970 - DNA, 25 bp, Homo sapien
ggctgctaatgctatcactttcatc

SEQ ID NO: 1797971 - DNA, 25 bp, Homo sapien
ctgggctgctaatgctatcactttc

SEQ ID NO: 1797972 - DNA, 25 bp, Homo sapien
ttcaggaatgcttttcctattaaaa

SEQ ID NO: 1797973 - DNA, 25 bp, Homo sapien
acttgagagcattactgattcagga

SEQ ID NO: 1797974 - DNA, 25 bp, Homo sapien
tgaattctacctgttaacttgagag

SEQ ID NO: 1797975 - DNA, 25 bp, Homo sapien
acttttgagaagttatctgaattct

SEQ ID NO: 1797976 - DNA, 25 bp, Homo sapien
gacagtaggcaaacaaactcgccct

SEQ ID NO: 1797977 - DNA, 25 bp, Homo sapien
tactgctgtgaaactttgtggaggc

SEQ ID NO: 1797978 - DNA, 25 bp, Homo sapien
tatggttcgcatactgggcaggcaa

SEQ ID NO: 1797979 - DNA, 25 bp, Homo sapien
tagtaccgcctcagtgttgcaaaaa

SEQ ID NO: 1797980 - DNA, 25 bp, Homo sapien
gataagacaaataaaggcaatcatt

SEQ ID NO: 1797981 - DNA, 25 bp, Homo sapien
agtaaaacaacttccctcttgcatt

SEQ ID NO: 1797982 - DNA, 25 bp, Homo sapien
aaattgctccaattagctcaaccaa

SEQ ID NO: 1797983 - DNA, 25 bp, Homo sapien
gctcaaccaatatcctgtttgtaag

SEQ ID NO: 1797984 - DNA, 25 bp, Homo sapien
tcttgcccacggcaggcagacttga

SEQ ID NO: 1797985 - DNA, 25 bp, Homo sapien
tctttgacgcagacgtagagtcgga

SEQ ID NO: 1797986 - DNA, 25 bp, Homo sapien
cagacgtagagtcggaacaggtcca

SEQ ID NO: 1797987 - DNA, 25 bp, Homo sapien
tatcggtcgacccagagctttctct

SEQ ID NO: 1797988 - DNA, 25 bp, Homo sapien
ccactgtaagaacttatccacaatg

SEQ ID NO: 1797989 - DNA, 25 bp, Homo sapien
aagccactgtaagaacttatccaca

SEQ ID NO: 1797990 - DNA, 25 bp, Homo sapien
taagaacttatccacaatgcttcct

SEQ ID NO: 1797991 - DNA, 25 bp, Homo sapien
ctgtaagaacttatccacaatgctt

SEQ ID NO: 1797992 - DNA, 25 bp, Homo sapien
tgctttttcagggagctcgctgcac

SEQ ID NO: 1797993 - DNA, 25 bp, Homo sapien
tttaggttggttgccagctcacgcc

SEQ ID NO: 1797994 - DNA, 25 bp, Homo sapien
actgcttgaggtgccaacgtttagg

SEQ ID NO: 1797995 - DNA, 25 bp, Homo sapien
tccccacgttcgatcttgcactcaa

SEQ ID NO: 1797996 - DNA, 25 bp, Homo sapien
ctgactgtgaaaccaccttcccgga

SEQ ID NO: 1797997 - DNA, 25 bp, Homo sapien
tgactgtgaaaccaccttcccggaa

SEQ ID NO: 1797998 - DNA, 25 bp, Homo sapien
ggccatatcccagatttaattctct

SEQ ID NO: 1797999 - DNA, 25 bp, Homo sapien
cagtgggcgtccaattaaataaaca

SEQ ID NO: 1798000 - DNA, 25 bp, Homo sapien
ccttaacactgccagtgggcgtcca

SEQ ID NO: 1798001 - DNA, 25 bp, Homo sapien
taattctctcatcccttaacactgc

SEQ ID NO: 1798002 - DNA, 25 bp, Homo sapien
gagaagaatgtataccaggagtcca

SEQ ID NO: 1798003 - DNA, 25 bp, Homo sapien
gctggctgttaagagaacaggccct

SEQ ID NO: 1798004 - DNA, 25 bp, Homo sapien
ttaaaatgataatgttgccataaaa

SEQ ID NO: 1798005 - DNA, 25 bp, Homo sapien
tccatttgcaatccaagctcttttg

SEQ ID NO: 1798006 - DNA, 25 bp, Homo sapien
cctaatgatgggactggaatcggag

SEQ ID NO: 1798007 - DNA, 25 bp, Homo sapien
ttctgaagaccagggtgcctctgcc

SEQ ID NO: 1798008 - DNA, 25 bp, Homo sapien
tgggtggcagtgaatcgagaggctt

SEQ ID NO: 1798009 - DNA, 25 bp, Homo sapien
tgcgacccccagacgcctgtgtgtg

SEQ ID NO: 1798010 - DNA, 25 bp, Homo sapien
ggtcacctggaacctctgccatgga

SEQ ID NO: 1798011 - DNA, 25 bp, Homo sapien
cattggagtcatctggccgtgaggg

SEQ ID NO: 1798012 - DNA, 25 bp, Homo sapien
gggccttgcaaggatcccgagttag

SEQ ID NO: 1798013 - DNA, 25 bp, Homo sapien
tgtgggccttgcaaggatcccgagt

SEQ ID NO: 1798014 - DNA, 25 bp, Homo sapien
ttgttgggctcatagggcatcctgc

SEQ ID NO: 1798015 - DNA, 25 bp, Homo sapien
tctgagaatgggtcgtgcacactga

SEQ ID NO: 1798016 - DNA, 25 bp, Homo sapien
gaaggatgaatcactcacatctgag

SEQ ID NO: 1798017 - DNA, 25 bp, Homo sapien
catggagttccgtttcgggaaggat

SEQ ID NO: 1798018 - DNA, 25 bp, Homo sapien
tccatagggaaactgctggcgctgc

SEQ ID NO: 1798019 - DNA, 25 bp, Homo sapien
tcggtcgtaactggctccataggga

SEQ ID NO: 1798020 - DNA, 25 bp, Homo sapien
caggttagacattgctccggaggga

SEQ ID NO: 1798021 - DNA, 25 bp, Homo sapien
gtcataaagggctcgctgcttccag

SEQ ID NO: 1798022 - DNA, 25 bp, Homo sapien
gctggtgccctccatacggcggctg

SEQ ID NO: 1798023 - DNA, 25 bp, Homo sapien
atactgctgcccataaggttcatgc

SEQ ID NO: 1798024 - DNA, 25 bp, Homo sapien
tggtgccctccatacggcggctgtc

SEQ ID NO: 1798025 - DNA, 25 bp, Homo sapien
gcctggatactgctgcccataaggt

SEQ ID NO: 1798026 - DNA, 25 bp, Homo sapien
gaaagacaaatcatcctgatgtgct

SEQ ID NO: 1798027 - DNA, 25 bp, Homo sapien
cagaaagacaaatcatcctgatgtg

SEQ ID NO: 1798028 - DNA, 25 bp, Homo sapien
cacagaaagacaaatcatcctgatg

SEQ ID NO: 1798029 - DNA, 25 bp, Homo sapien
tcacagaaagacaaatcatcctgat

SEQ ID NO: 1798030 - DNA, 25 bp, Homo sapien
gacatataaggctgacgctggctga

SEQ ID NO: 1798031 - DNA, 25 bp, Homo sapien
cccatcatctgaggcgggattccgt

SEQ ID NO: 1798032 - DNA, 25 bp, Homo sapien
catgttgtacatgtcgccctcgtgg

SEQ ID NO: 1798033 - DNA, 25 bp, Homo sapien
gggtaccatcatatcgtctgtgcgg

SEQ ID NO: 1798034 - DNA, 25 bp, Homo sapien
tgctaggttgtccaagggtggtctc

SEQ ID NO: 1798035 - DNA, 25 bp, Homo sapien
tgtgtacttccagatagtccagacc

SEQ ID NO: 1798036 - DNA, 25 bp, Homo sapien
tcttggcccaagtctaccagtgcat

SEQ ID NO: 1798037 - DNA, 25 bp, Homo sapien
attcgattgacatggttcttggccc

SEQ ID NO: 1798038 - DNA, 25 bp, Homo sapien
gctgtcatcatacagaagaatatta

SEQ ID NO: 1798039 - DNA, 25 bp, Homo sapien
agggacatcatcacacgccacgcct

SEQ ID NO: 1798040 - DNA, 25 bp, Homo sapien
gattgaaagtagcaacagtgctgtc

SEQ ID NO: 1798041 - DNA, 25 bp, Homo sapien
taatagtgtccaaagcccacgtact

SEQ ID NO: 1798042 - DNA, 25 bp, Homo sapien
cgtctgccaaggactggctgtcatc

SEQ ID NO: 1798043 - DNA, 25 bp, Homo sapien
gactaaaagttcgagaaatccagac

SEQ ID NO: 1798044 - DNA, 25 bp, Homo sapien
tctttcccagaatcgtctgccaagg

SEQ ID NO: 1798045 - DNA, 25 bp, Homo sapien
caggcattttctaaagtactcgact

SEQ ID NO: 1798046 - DNA, 25 bp, Homo sapien
tcgtcttcctcgtcgtcatcaatac

SEQ ID NO: 1798047 - DNA, 25 bp, Homo sapien
tcctcgtcttcctcgtcgtcatcaa

SEQ ID NO: 1798048 - DNA, 25 bp, Homo sapien
ctcctcgtcttcctcgtcgtcatca

SEQ ID NO: 1798049 - DNA, 25 bp, Homo sapien
ctcgtcttcctcgtcgtcatcaata

SEQ ID NO: 1798050 - DNA, 25 bp, Homo sapien
tccagcagcttgatgttccggtgac

SEQ ID NO: 1798051 - DNA, 25 bp, Homo sapien
catggacatttctcgacagactggg

SEQ ID NO: 1798052 - DNA, 25 bp, Homo sapien
tgccaggcacgaatgacaagctacg

SEQ ID NO: 1798053 - DNA, 25 bp, Homo sapien
tttctcataggtctgcggtgctcgc

SEQ ID NO: 1798054 - DNA, 25 bp, Homo sapien
caattggtaaatagtgaatggggca

SEQ ID NO: 1798055 - DNA, 25 bp, Homo sapien
tctaatcttcactcacacatgcttg

SEQ ID NO: 1798056 - DNA, 25 bp, Homo sapien
aaaacagccagttatatgtgaccct

SEQ ID NO: 1798057 - DNA, 25 bp, Homo sapien
tcctacgctggataaacaagaacag

SEQ ID NO: 1798058 - DNA, 25 bp, Homo sapien
gcagtttccggatcgttgtcaggta

SEQ ID NO: 1798059 - DNA, 25 bp, Homo sapien
tatatacatcacagcccataggcag

SEQ ID NO: 1798060 - DNA, 25 bp, Homo sapien
tgtcacgtggaaggtcaaacgccga

SEQ ID NO: 1798061 - DNA, 25 bp, Homo sapien
tgaatgcactagacagcaactttgg

SEQ ID NO: 1798062 - DNA, 25 bp, Homo sapien
tgttgcccaacggtcagactctgcg

SEQ ID NO: 1798063 - DNA, 25 bp, Homo sapien
gatctcacctcaagtgggtcagcag

SEQ ID NO: 1798064 - DNA, 25 bp, Homo sapien
tgaaccgacacaatgtatgcgaggg

SEQ ID NO: 1798065 - DNA, 25 bp, Homo sapien
ggtagaggtccactaacagcataat

SEQ ID NO: 1798066 - DNA, 25 bp, Homo sapien
gcttaactagtctttgaacaggcca

SEQ ID NO: 1798067 - DNA, 25 bp, Homo sapien
tagctattgctgagcagacgccgcc

SEQ ID NO: 1798068 - DNA, 25 bp, Homo sapien
gacgccgcccagtatctcttatgtg

SEQ ID NO: 1798069 - DNA, 25 bp, Homo sapien
gattcaactttatagcaccattcca

SEQ ID NO: 1798070 - DNA, 25 bp, Homo sapien
tggaagactagaacataattgaaac

SEQ ID NO: 1798071 - DNA, 25 bp, Homo sapien
tatttctataattgtctgacatgga

SEQ ID NO: 1798072 - DNA, 25 bp, Homo sapien
ctagaacataattgaaacagggtca

SEQ ID NO: 1798073 - DNA, 25 bp, Homo sapien
gactagaacataattgaaacagggt

SEQ ID NO: 1798074 - DNA, 25 bp, Homo sapien
cttgactacggcctttgtacaggtg

SEQ ID NO: 1798075 - DNA, 25 bp, Homo sapien
cctttgtacaggtgcagtcagttcc

SEQ ID NO: 1798076 - DNA, 25 bp, Homo sapien
acatcaggactcaccagcgtgctgg

SEQ ID NO: 1798077 - DNA, 25 bp, Homo sapien
tcctgcatttctaagggctgatggt

SEQ ID NO: 1798078 - DNA, 25 bp, Homo sapien
tggcactttagaggatgacatgact

SEQ ID NO: 1798079 - DNA, 25 bp, Homo sapien
gacatgacttggatcatcataaaac

SEQ ID NO: 1798080 - DNA, 25 bp, Homo sapien
caaaccaggaccagaaagcaagggt

SEQ ID NO: 1798081 - DNA, 25 bp, Homo sapien
ttaggacacacttgacggttgcccc

SEQ ID NO: 1798082 - DNA, 25 bp, Homo sapien
agctctgcagcatgttttcaggaat

SEQ ID NO: 1798083 - DNA, 25 bp, Homo sapien
gttgtttcccaaagctctgcagcat

SEQ ID NO: 1798084 - DNA, 25 bp, Homo sapien
gtttcccaaagctctgcagcatgtt

SEQ ID NO: 1798085 - DNA, 25 bp, Homo sapien
aaagctctgcagcatgttttcagga

SEQ ID NO: 1798086 - DNA, 25 bp, Homo sapien
taagtacctggctcaaggccgtgga

SEQ ID NO: 1798087 - DNA, 25 bp, Homo sapien
ctctcctcccatgaggacatcttaa

SEQ ID NO: 1798088 - DNA, 25 bp, Homo sapien
ctcccatgaggacatcttaattttg

SEQ ID NO: 1798089 - DNA, 25 bp, Homo sapien
tcaaataatttaagtacctggctca

SEQ ID NO: 1798090 - DNA, 25 bp, Homo sapien
ctcttgcctgaaggaagcgcttttg

SEQ ID NO: 1798091 - DNA, 25 bp, Homo sapien
caggaggcaactcgacaaatgctgt

SEQ ID NO: 1798092 - DNA, 25 bp, Homo sapien
gaggcaactcgacaaatgctgtggc

SEQ ID NO: 1798093 - DNA, 25 bp, Homo sapien
gaaggaagcgcttttgtttggtgaa

SEQ ID NO: 1798094 - DNA, 25 bp, Homo sapien
gctctggagacaccatgacagcaaa

SEQ ID NO: 1798095 - DNA, 25 bp, Homo sapien
gattgctgactgaaccagtgcactg

SEQ ID NO: 1798096 - DNA, 25 bp, Homo sapien
ccaggaacatgggcagattgctgac

SEQ ID NO: 1798097 - DNA, 25 bp, Homo sapien
ttacaggaataacttccttatgtgg

SEQ ID NO: 1798098 - DNA, 25 bp, Homo sapien
ttgaccaggctggtgtggaatgcct

SEQ ID NO: 1798099 - DNA, 25 bp, Homo sapien
gttgaccaggctggtgtggaatgcc

SEQ ID NO: 1798100 - DNA, 25 bp, Homo sapien
accaggctggtgtggaatgcctgac

SEQ ID NO: 1798101 - DNA, 25 bp, Homo sapien
cctcggcctcctgaagtgcttggat

SEQ ID NO: 1798102 - DNA, 25 bp, Homo sapien
aggcatcccgtgtgtccctcagtga

SEQ ID NO: 1798103 - DNA, 25 bp, Homo sapien
tccaagatgattcggacagctgtct

SEQ ID NO: 1798104 - DNA, 25 bp, Homo sapien
tcatttacaccctgagctctaggct

SEQ ID NO: 1798105 - DNA, 25 bp, Homo sapien
gctctaggctcatgggcccagttga

SEQ ID NO: 1798106 - DNA, 25 bp, Homo sapien
gcttgctagcggtcaacgttgccgg

SEQ ID NO: 1798107 - DNA, 25 bp, Homo sapien
tcccagcggaagaccaagcttgcta

SEQ ID NO: 1798108 - DNA, 25 bp, Homo sapien
tcaggaaactcatgccctccggtga

SEQ ID NO: 1798109 - DNA, 25 bp, Homo sapien
gacaaatagcagagagaccgcctta

SEQ ID NO: 1798110 - DNA, 25 bp, Homo sapien
aggtgttgttaatcttaaagctcat

SEQ ID NO: 1798111 - DNA, 25 bp, Homo sapien
cttacagaaggtgttgttaatctta

SEQ ID NO: 1798112 - DNA, 25 bp, Homo sapien
agagtggtcaagtagcagggaggcc

SEQ ID NO: 1798113 - DNA, 25 bp, Homo sapien
tcatcttcatactaggaatagccag

SEQ ID NO: 1798114 - DNA, 25 bp, Homo sapien
cagttaccctagaaaccctattgag

SEQ ID NO: 1798115 - DNA, 25 bp, Homo sapien
gaatagccagaatacaaactcgagg

SEQ ID NO: 1798116 - DNA, 25 bp, Homo sapien
tcaaattcaggagagggcgtaaacc

SEQ ID NO: 1798117 - DNA, 25 bp, Homo sapien
tatgatggtaaaacgagaagcttcc

SEQ ID NO: 1798118 - DNA, 25 bp, Homo sapien
tactatcctaagatcaggcccagca

SEQ ID NO: 1798119 - DNA, 25 bp, Homo sapien
tgaagtctagagagtgtgccgccag

SEQ ID NO: 1798120 - DNA, 25 bp, Homo sapien
ttcctcgggagccacttctgcggcg

SEQ ID NO: 1798121 - DNA, 25 bp, Homo sapien
tcaggagcctctcggcgagagccgg

SEQ ID NO: 1798122 - DNA, 25 bp, Homo sapien
ctcccaggagagagcgctggcgact

SEQ ID NO: 1798123 - DNA, 25 bp, Homo sapien
caaccacgcacgtttttctgtcagg

SEQ ID NO: 1798124 - DNA, 25 bp, Homo sapien
caactttgccgaggacacccaggtt

SEQ ID NO: 1798125 - DNA, 25 bp, Homo sapien
ggcgacaactttgccgaggacaccc

SEQ ID NO: 1798126 - DNA, 25 bp, Homo sapien
ccggctcggcgacaactttgccgag

SEQ ID NO: 1798127 - DNA, 25 bp, Homo sapien
tcggcgacaactttgccgaggacac

SEQ ID NO: 1798128 - DNA, 25 bp, Homo sapien
cgtcaggtagaagacgcccgtctgc

SEQ ID NO: 1798129 - DNA, 25 bp, Homo sapien
gatcctcccgttacagaagaacttg

SEQ ID NO: 1798130 - DNA, 25 bp, Homo sapien
aagagtccgctagtgaccaggatga

SEQ ID NO: 1798131 - DNA, 25 bp, Homo sapien
ggctgtactcgcagtctttcatggg

SEQ ID NO: 1798132 - DNA, 25 bp, Homo sapien
ttctagaaaacgaaagcagcccgag

SEQ ID NO: 1798133 - DNA, 25 bp, Homo sapien
tgggtcccatccgccacctggattg

SEQ ID NO: 1798134 - DNA, 25 bp, Homo sapien
aagcccagcccagaacggcgttctt

SEQ ID NO: 1798135 - DNA, 25 bp, Homo sapien
ggagcgcagactggcattatataac

SEQ ID NO: 1798136 - DNA, 25 bp, Homo sapien
tgctgggtccccaaactcggtagag

SEQ ID NO: 1798137 - DNA, 25 bp, Homo sapien
gatgccctatatgttgtcagcaagg

SEQ ID NO: 1798138 - DNA, 25 bp, Homo sapien
cagttccatgtatccctgacttagg

SEQ ID NO: 1798139 - DNA, 25 bp, Homo sapien
tgacttaggaatctatcgcacccca

SEQ ID NO: 1798140 - DNA, 25 bp, Homo sapien
aatccagagtgagcatgtaggaggc

SEQ ID NO: 1798141 - DNA, 25 bp, Homo sapien
gagaatgcaatgatctatccagggc

SEQ ID NO: 1798142 - DNA, 25 bp, Homo sapien
taggcagccgacactttgaaacctg

SEQ ID NO: 1798143 - DNA, 25 bp, Homo sapien
gtttagaaacctcatggcaaataag

SEQ ID NO: 1798144 - DNA, 25 bp, Homo sapien
cctttcattagttggcaggaggaca

SEQ ID NO: 1798145 - DNA, 25 bp, Homo sapien
caggaggacagttgctactggccaa

SEQ ID NO: 1798146 - DNA, 25 bp, Homo sapien
tcctgaaaacggtgaagacttgcat

SEQ ID NO: 1798147 - DNA, 25 bp, Homo sapien
tttaattgagcctacccaacaggag

SEQ ID NO: 1798148 - DNA, 25 bp, Homo sapien
ccttaacaacctgctagtgaggact

SEQ ID NO: 1798149 - DNA, 25 bp, Homo sapien
gcatcatactaggatgggcctcttg

SEQ ID NO: 1798150 - DNA, 25 bp, Homo sapien
aatagcagctaataaaatcccggcg

SEQ ID NO: 1798151 - DNA, 25 bp, Homo sapien
ttgcctagttgaagcaacaaccatg

SEQ ID NO: 1798152 - DNA, 25 bp, Homo sapien
aaatagaggaccacataactagagg

SEQ ID NO: 1798153 - DNA, 25 bp, Homo sapien
tcaaaatagaggaccacataactag

SEQ ID NO: 1798154 - DNA, 25 bp, Homo sapien
tagaggaccacataactagaggaag

SEQ ID NO: 1798155 - DNA, 25 bp, Homo sapien
aacaatcaaaatagaggaccacata

SEQ ID NO: 1798156 - DNA, 25 bp, Homo sapien
tgacgacatcgcatagacagccttg

SEQ ID NO: 1798157 - DNA, 25 bp, Homo sapien
cttaatagctgcaaagagggtgagc

SEQ ID NO: 1798158 - DNA, 25 bp, Homo sapien
ttctgggatggtggcttcaaaaaca

SEQ ID NO: 1798159 - DNA, 25 bp, Homo sapien
tctggatagcactgcagtcggctcc

SEQ ID NO: 1798160 - DNA, 25 bp, Homo sapien
cagtcaagccccagatctaagcaga

SEQ ID NO: 1798161 - DNA, 25 bp, Homo sapien
tgtagaatgcggagacccagtcaag

SEQ ID NO: 1798162 - DNA, 25 bp, Homo sapien
tttcaagtgtctgagccccaggaac

SEQ ID NO: 1798163 - DNA, 25 bp, Homo sapien
gagaatgtccccacgttttcaagtg

SEQ ID NO: 1798164 - DNA, 25 bp, Homo sapien
tatgggtgcacgaactggctgcaac

SEQ ID NO: 1798165 - DNA, 25 bp, Homo sapien
ggcacacgagatgaagggccgcttc

SEQ ID NO: 1798166 - DNA, 25 bp, Homo sapien
ctctcctgctcaaagaagcattctg

SEQ ID NO: 1798167 - DNA, 25 bp, Homo sapien
atgaagggccgcttctgccaagcaa

SEQ ID NO: 1798168 - DNA, 25 bp, Homo sapien
cagactagcaatcagcaggtgtgca

SEQ ID NO: 1798169 - DNA, 25 bp, Homo sapien
ggtgcgcatttcactactgcagttg

SEQ ID NO: 1798170 - DNA, 25 bp, Homo sapien
tgctgtgacctcagcagatgcgcat

SEQ ID NO: 1798171 - DNA, 25 bp, Homo sapien
catctcacttgctgtgacccagcag

SEQ ID NO: 1798172 - DNA, 25 bp, Homo sapien
gacatcacatgttcaagaatagcca

SEQ ID NO: 1798173 - DNA, 25 bp, Homo sapien
gtcctccaggattccaagctctgaa

SEQ ID NO: 1798174 - DNA, 25 bp, Homo sapien
tagccaaacagatacacggatccct

SEQ ID NO: 1798175 - DNA, 25 bp, Homo sapien
cctggtgggaaagtgatgagctaat

SEQ ID NO: 1798176 - DNA, 25 bp, Homo sapien
tgtgttttagggctgtccccagtcg

SEQ ID NO: 1798177 - DNA, 25 bp, Homo sapien
gcgtatcatgagcaaaacctctgtg

SEQ ID NO: 1798178 - DNA, 25 bp, Homo sapien
ccccagtcgtctgctgtggtgaaga

SEQ ID NO: 1798179 - DNA, 25 bp, Homo sapien
tccatatgtaaatcttcagtggcgt

SEQ ID NO: 1798180 - DNA, 25 bp, Homo sapien
cttttcctgatgtcaggtctggatg

SEQ ID NO: 1798181 - DNA, 25 bp, Homo sapien
gatgtcaggtctggatgtgtcccct

SEQ ID NO: 1798182 - DNA, 25 bp, Homo sapien
cctgatgtcaggtctggatgtgtcc

SEQ ID NO: 1798183 - DNA, 25 bp, Homo sapien
tgtcccctggagtcagtgcagccat

SEQ ID NO: 1798184 - DNA, 25 bp, Homo sapien
gaaaactcatttccgccgacatggg

SEQ ID NO: 1798185 - DNA, 25 bp, Homo sapien
atgaaaactcatttccgccgacatg

SEQ ID NO: 1798186 - DNA, 25 bp, Homo sapien
aaatgaaaactcatttccgccgaca

SEQ ID NO: 1798187 - DNA, 25 bp, Homo sapien
atttccgccgacatggggatcccac

SEQ ID NO: 1798188 - DNA, 25 bp, Homo sapien
tcatcatcccttgaagggaaggaat

SEQ ID NO: 1798189 - DNA, 25 bp, Homo sapien
aaggtgctgaatgtggaaaaccgtg

SEQ ID NO: 1798190 - DNA, 25 bp, Homo sapien
tgaatgtggaaaaccgtgactcact

SEQ ID NO: 1798191 - DNA, 25 bp, Homo sapien
atcccttgaagggaaggaatcaaag

SEQ ID NO: 1798192 - DNA, 25 bp, Homo sapien
gacttgcaggttccagtcatttcaa

SEQ ID NO: 1798193 - DNA, 25 bp, Homo sapien
gctgactcagacttgcaggttccag

SEQ ID NO: 1798194 - DNA, 25 bp, Homo sapien
cagacttgcaggttccagtcatttc

SEQ ID NO: 1798195 - DNA, 25 bp, Homo sapien
gactcagacttgcaggttccagtca

SEQ ID NO: 1798196 - DNA, 25 bp, Homo sapien
ccttgtgtcccgtatacactctggc

SEQ ID NO: 1798197 - DNA, 25 bp, Homo sapien
accttgtgtcccgtatacactctgg

SEQ ID NO: 1798198 - DNA, 25 bp, Homo sapien
tcaccttgtgtcccgtatacactct

SEQ ID NO: 1798199 - DNA, 25 bp, Homo sapien
cttgtgtcccgtatacactctggca

SEQ ID NO: 1798200 - DNA, 25 bp, Homo sapien
ctggatccaaaaacataaaaatggg

SEQ ID NO: 1798201 - DNA, 25 bp, Homo sapien
tggatccaaaaacataaaaatgggc

SEQ ID NO: 1798202 - DNA, 25 bp, Homo sapien
cacgccggggatttcagcgcagaag

SEQ ID NO: 1798203 - DNA, 25 bp, Homo sapien
cgctcttgggcggtgagatgctgta

SEQ ID NO: 1798204 - DNA, 25 bp, Homo sapien
cagggacagtgctccttttggaaca

SEQ ID NO: 1798205 - DNA, 25 bp, Homo sapien
tcccacttgatcagcagggacagtg

SEQ ID NO: 1798206 - DNA, 25 bp, Homo sapien
cactgtgctcggtttcatgcccaaa

SEQ ID NO: 1798207 - DNA, 25 bp, Homo sapien
gctagggcacatgacaaggttctca

SEQ ID NO: 1798208 - DNA, 25 bp, Homo sapien
caagaaatagagtgatcgtgccagc

SEQ ID NO: 1798209 - DNA, 25 bp, Homo sapien
aacacgttcattagacacaggcaca

SEQ ID NO: 1798210 - DNA, 25 bp, Homo sapien
gacactcgtcaaggccgataaaggc

SEQ ID NO: 1798211 - DNA, 25 bp, Homo sapien
ggtttgcccaggactctgcaggtag

SEQ ID NO: 1798212 - DNA, 25 bp, Homo sapien
caggacaaaacagtcccgtggaggg

SEQ ID NO: 1798213 - DNA, 25 bp, Homo sapien
cactcggtcctgatgctattaccaa

SEQ ID NO: 1798214 - DNA, 25 bp, Homo sapien
ttatgaacatcccacaatttgctta

SEQ ID NO: 1798215 - DNA, 25 bp, Homo sapien
ttcagtggcatttgctataaccaca

SEQ ID NO: 1798216 - DNA, 25 bp, Homo sapien
aactcattgatgaacatgtgagctg

SEQ ID NO: 1798217 - DNA, 25 bp, Homo sapien
aaacttgtacacatgaagcagtcac

SEQ ID NO: 1798218 - DNA, 25 bp, Homo sapien
cagacttgggccacctttggcaggg

SEQ ID NO: 1798219 - DNA, 25 bp, Homo sapien
gggcaaaacagcacgtaacctcgtg

SEQ ID NO: 1798220 - DNA, 25 bp, Homo sapien
gcaaaacagcacgtaacctcgtgcc

SEQ ID NO: 1798221 - DNA, 25 bp, Homo sapien
aaaacagcacgtaacctcgtgccct

SEQ ID NO: 1798222 - DNA, 25 bp, Homo sapien
cacacaccgtgagggaccattggtc

SEQ ID NO: 1798223 - DNA, 25 bp, Homo sapien
tgagacggaggcaagacaaatgaac

SEQ ID NO: 1798224 - DNA, 25 bp, Homo sapien
gagatgtttcactttcagaccagac

SEQ ID NO: 1798225 - DNA, 25 bp, Homo sapien
tcatctatttctggcgcatcttggc

SEQ ID NO: 1798226 - DNA, 25 bp, Homo sapien
gttctggccccagcgatgactttgc

SEQ ID NO: 1798227 - DNA, 25 bp, Homo sapien
catgtagcgagtccaatctgttgaa

SEQ ID NO: 1798228 - DNA, 25 bp, Homo sapien
caatctgttgaaaaggttctggccc

SEQ ID NO: 1798229 - DNA, 25 bp, Homo sapien
tgggtcagcaccatgtagcgagtcc

SEQ ID NO: 1798230 - DNA, 25 bp, Homo sapien
tctcatcacatcatccgggctgaag

SEQ ID NO: 1798231 - DNA, 25 bp, Homo sapien
attacaatgtccccgaaatggcccg

SEQ ID NO: 1798232 - DNA, 25 bp, Homo sapien
ccttctaacaagagccgcttgtatc

SEQ ID NO: 1798233 - DNA, 25 bp, Homo sapien
cttctaacaagagccgcttgtatcc

SEQ ID NO: 1798234 - DNA, 25 bp, Homo sapien
tccttctaacaagagccgcttgtat

SEQ ID NO: 1798235 - DNA, 25 bp, Homo sapien
ccgccttggccttccgaaggggctg

SEQ ID NO: 1798236 - DNA, 25 bp, Homo sapien
acctggctaatatttatttatttat

SEQ ID NO: 1798237 - DNA, 25 bp, Homo sapien
tggaactataggcgcatgcaccaca

SEQ ID NO: 1798238 - DNA, 25 bp, Homo sapien
gctggaactataggcgcatgcacca

SEQ ID NO: 1798239 - DNA, 25 bp, Homo sapien
gcagtctcaacttcatgggctcaag

SEQ ID NO: 1798240 - DNA, 25 bp, Homo sapien
gagtacaggtgcacaccgccatgct

SEQ ID NO: 1798241 - DNA, 25 bp, Homo sapien
gtacaggtgcacaccgccatgcttg

SEQ ID NO: 1798242 - DNA, 25 bp, Homo sapien
tgcttggctaattttttacattttg

SEQ ID NO: 1798243 - DNA, 25 bp, Homo sapien
tgccagtcaggaaaaggaagccttc

SEQ ID NO: 1798244 - DNA, 25 bp, Homo sapien
tctcgagcacatgcatgctttatgc

SEQ ID NO: 1798245 - DNA, 25 bp, Homo sapien
ttgctgcttgctatgccaattgctg

SEQ ID NO: 1798246 - DNA, 25 bp, Homo sapien
gctatgccaattgctgtggctgcca

SEQ ID NO: 1798247 - DNA, 25 bp, Homo sapien
tttagtcaaactcaatgagatactg

SEQ ID NO: 1798248 - DNA, 25 bp, Homo sapien
gaactcctgccacagtttagtcaaa

SEQ ID NO: 1798249 - DNA, 25 bp, Homo sapien
agatactgtttacggtggtggccac

SEQ ID NO: 1798250 - DNA, 25 bp, Homo sapien
tggtggttagaagcgtgaactcctg

SEQ ID NO: 1798251 - DNA, 25 bp, Homo sapien
gccagcatcacagcaagccacaggg

SEQ ID NO: 1798252 - DNA, 25 bp, Homo sapien
ccagggagaggtaagccagcatcac

SEQ ID NO: 1798253 - DNA, 25 bp, Homo sapien
agccagcatcacagcaagccacagg

SEQ ID NO: 1798254 - DNA, 25 bp, Homo sapien
gagaggtaagccagcatcacagcaa

SEQ ID NO: 1798255 - DNA, 25 bp, Homo sapien
taccgaagacgactgaccggttgct

SEQ ID NO: 1798256 - DNA, 25 bp, Homo sapien
tgggttcatgagctggagacaatct

SEQ ID NO: 1798257 - DNA, 25 bp, Homo sapien
ggaagccaccataacatgtgtgtgt

SEQ ID NO: 1798258 - DNA, 25 bp, Homo sapien
tgtatagactttactggccaaagac

SEQ ID NO: 1798259 - DNA, 25 bp, Homo sapien
cgcgccagtcccatcaaatcaaagt

SEQ ID NO: 1798260 - DNA, 25 bp, Homo sapien
gctgagtccctcatgagtcctgtta

SEQ ID NO: 1798261 - DNA, 25 bp, Homo sapien
tgcccaccgtagtcaaagctgagtc

SEQ ID NO: 1798262 - DNA, 25 bp, Homo sapien
tcgggaaaatgtgaacgctgcaggc

SEQ ID NO: 1798263 - DNA, 25 bp, Homo sapien
gatgctggaattgccctgtgaagac

SEQ ID NO: 1798264 - DNA, 25 bp, Homo sapien
tgaagacccgctgtgcagtgcaaat

SEQ ID NO: 1798265 - DNA, 25 bp, Homo sapien
ttaaccgacgcgaaaccgctttgca

SEQ ID NO: 1798266 - DNA, 25 bp, Homo sapien
tctcatcgaaggcagcattaaccga

SEQ ID NO: 1798267 - DNA, 25 bp, Homo sapien
tcagtgagactccaaatgccaccca

SEQ ID NO: 1798268 - DNA, 25 bp, Homo sapien
gcagaatggatcagctgacctgcac

SEQ ID NO: 1798269 - DNA, 25 bp, Homo sapien
tgagtcacccagcagaatggatcag

SEQ ID NO: 1798270 - DNA, 25 bp, Homo sapien
taggaccgcgctggaactgagtcac

SEQ ID NO: 1798271 - DNA, 25 bp, Homo sapien
cgttccagttcattacttcgcattt

SEQ ID NO: 1798272 - DNA, 25 bp, Homo sapien
agttcattacttcgcatttcgagca

SEQ ID NO: 1798273 - DNA, 25 bp, Homo sapien
ttcgcatttcgagcatgttgttcat

SEQ ID NO: 1798274 - DNA, 25 bp, Homo sapien
cattacttcgcatttcgagcatgtt

SEQ ID NO: 1798275 - DNA, 25 bp, Homo sapien
taacacagtgcagaacgtggctctg

SEQ ID NO: 1798276 - DNA, 25 bp, Homo sapien
tgtgtgtgtggctcacgcatgaact

SEQ ID NO: 1798277 - DNA, 25 bp, Homo sapien
cgcatgaactgtgagccacggacta

SEQ ID NO: 1798278 - DNA, 25 bp, Homo sapien
ggctatgtggccgtaagctaaggaa

SEQ ID NO: 1798279 - DNA, 25 bp, Homo sapien
ggtgaataatctggctgtccacact

SEQ ID NO: 1798280 - DNA, 25 bp, Homo sapien
cctggtccagcggttggtgaataat

SEQ ID NO: 1798281 - DNA, 25 bp, Homo sapien
tgggttcccacagtcgctgaagtag

SEQ ID NO: 1798282 - DNA, 25 bp, Homo sapien
cacgtgtgtcagtccattcagagaa

SEQ ID NO: 1798283 - DNA, 25 bp, Homo sapien
cagcttgcagcgatagaagagaacg

SEQ ID NO: 1798284 - DNA, 25 bp, Homo sapien
cagcgatagaagagaacgttggcct

SEQ ID NO: 1798285 - DNA, 25 bp, Homo sapien
ttgcagcgatagaagagaacgttgg

SEQ ID NO: 1798286 - DNA, 25 bp, Homo sapien
tagaagagaacgttggccttaccta

SEQ ID NO: 1798287 - DNA, 25 bp, Homo sapien
cagtctggtagtaacgccttagtga

SEQ ID NO: 1798288 - DNA, 25 bp, Homo sapien
caaagtcgctcattgatggattgcc

SEQ ID NO: 1798289 - DNA, 25 bp, Homo sapien
ctattctgcgtgaaggtgccttgtc

SEQ ID NO: 1798290 - DNA, 25 bp, Homo sapien
acaagctcggagtcttgggtgacaa

SEQ ID NO: 1798291 - DNA, 25 bp, Homo sapien
atcggcggcttcatcaggcgtggct

SEQ ID NO: 1798292 - DNA, 25 bp, Homo sapien
tatttgcctttccagatcggcggct

SEQ ID NO: 1798293 - DNA, 25 bp, Homo sapien
aagaagaacaggatgccagcgactg

SEQ ID NO: 1798294 - DNA, 25 bp, Homo sapien
gattttcaccgccaggtacggacag

SEQ ID NO: 1798295 - DNA, 25 bp, Homo sapien
gaaagggcagcaacctacaactgta

SEQ ID NO: 1798296 - DNA, 25 bp, Homo sapien
caagaaagctgcctaagatgtaact

SEQ ID NO: 1798297 - DNA, 25 bp, Homo sapien
aactggtcatgctccaaggattgca

SEQ ID NO: 1798298 - DNA, 25 bp, Homo sapien
caatcctggcctggataaacaagaa

SEQ ID NO: 1798299 - DNA, 25 bp, Homo sapien
gcaagtcaaatcagtgggtcaaaac

SEQ ID NO: 1798300 - DNA, 25 bp, Homo sapien
tacagtacacaaagcgactgcgcag

SEQ ID NO: 1798301 - DNA, 25 bp, Homo sapien
tctttgatgcgggaaaagcccagca

SEQ ID NO: 1798302 - DNA, 25 bp, Homo sapien
tatggacaactagtatacagtacac

SEQ ID NO: 1798303 - DNA, 25 bp, Homo sapien
gtctgtcaaaggtctctcctaaaaa

SEQ ID NO: 1798304 - DNA, 25 bp, Homo sapien
ccagtctgtcaaaggtctctcctaa

SEQ ID NO: 1798305 - DNA, 25 bp, Homo sapien
gtcaaaggtctctcctaaaaacatg

SEQ ID NO: 1798306 - DNA, 25 bp, Homo sapien
aaggtctctcctaaaaacatgagaa

SEQ ID NO: 1798307 - DNA, 25 bp, Homo sapien
aaaatcaactgtgcactttctgtcc

SEQ ID NO: 1798308 - DNA, 25 bp, Homo sapien
ctgccgaatgtgaaaatcaactgtg

SEQ ID NO: 1798309 - DNA, 25 bp, Homo sapien
ctctgccgaatgtgaaaatcaactg

SEQ ID NO: 1798310 - DNA, 25 bp, Homo sapien
aatcaactgtgcactttctgtccat

SEQ ID NO: 1798311 - DNA, 25 bp, Homo sapien
agagtaattatcagccatttctggg

SEQ ID NO: 1798312 - DNA, 25 bp, Homo sapien
tcagagtaattatcagccatttctg

SEQ ID NO: 1798313 - DNA, 25 bp, Homo sapien
gagtaattatcagccatttctggga

SEQ ID NO: 1798314 - DNA, 25 bp, Homo sapien
taattatcagccatttctgggaatg

SEQ ID NO: 1798315 - DNA, 25 bp, Homo sapien
ttccagggacctcccgcttggtgtc

SEQ ID NO: 1798316 - DNA, 25 bp, Homo sapien
tgatttccagggacctcccgcttgg

SEQ ID NO: 1798317 - DNA, 25 bp, Homo sapien
ggtgtccagcccgccagagtgtcat

SEQ ID NO: 1798318 - DNA, 25 bp, Homo sapien
agggacctcccgcttggtgtccagc

SEQ ID NO: 1798319 - DNA, 25 bp, Homo sapien
cctcccaccctgaatttggatttgg

SEQ ID NO: 1798320 - DNA, 25 bp, Homo sapien
ggatttggatgcacgtgaaaatctg

SEQ ID NO: 1798321 - DNA, 25 bp, Homo sapien
atttggatttggatgcacgtgaaaa

SEQ ID NO: 1798322 - DNA, 25 bp, Homo sapien
atttggatgcacgtgaaaatctgag

SEQ ID NO: 1798323 - DNA, 25 bp, Homo sapien
agttccacatgactggaaaagcctc

SEQ ID NO: 1798324 - DNA, 25 bp, Homo sapien
tccacatgactggaaaagcctcagg

SEQ ID NO: 1798325 - DNA, 25 bp, Homo sapien
catggtggaaggcaaagagaagcag

SEQ ID NO: 1798326 - DNA, 25 bp, Homo sapien
aaatttacaatcatggtggaaggca

SEQ ID NO: 1798327 - DNA, 25 bp, Homo sapien
tgtgggcaaaaattaggggagctgg

SEQ ID NO: 1798328 - DNA, 25 bp, Homo sapien
ctgtgggcaaaaattaggggagctg

SEQ ID NO: 1798329 - DNA, 25 bp, Homo sapien
atctagtgttacccttgcaaccagc

SEQ ID NO: 1798330 - DNA, 25 bp, Homo sapien
ctcctgccttaaacctggaaaggct

SEQ ID NO: 1798331 - DNA, 25 bp, Homo sapien
aaggctagggtgttacttgttactg

SEQ ID NO: 1798332 - DNA, 25 bp, Homo sapien
ttgttactgctagccttgccctcat

SEQ ID NO: 1798333 - DNA, 25 bp, Homo sapien
cctggaaaggctagggtgttacttg

SEQ ID NO: 1798334 - DNA, 25 bp, Homo sapien
tgggaccccggcctccttcgttgca

SEQ ID NO: 1798335 - DNA, 25 bp, Homo sapien
tgcacacgtgcaggggccacgtgac

SEQ ID NO: 1798336 - DNA, 25 bp, Homo sapien
cccggcctccttcgttgcacacgtg

SEQ ID NO: 1798337 - DNA, 25 bp, Homo sapien
cctccttcgttgcacacgtgcaggg

SEQ ID NO: 1798338 - DNA, 25 bp, Homo sapien
aaaggctgcaatgggaggcgcgagg

SEQ ID NO: 1798339 - DNA, 25 bp, Homo sapien
gtttcacggtctggccattgatgat

SEQ ID NO: 1798340 - DNA, 25 bp, Homo sapien
cagtatttaagtttcacggtctggc

SEQ ID NO: 1798341 - DNA, 25 bp, Homo sapien
tcttgcaggtgaaacagtatttaag

SEQ ID NO: 1798342 - DNA, 25 bp, Homo sapien
tgcagtgacaacaggcgcttgccaa

SEQ ID NO: 1798343 - DNA, 25 bp, Homo sapien
tagggcccagccttacagctgcaga

SEQ ID NO: 1798344 - DNA, 25 bp, Homo sapien
cgtctccgggaagaatacagatcct

SEQ ID NO: 1798345 - DNA, 25 bp, Homo sapien
tccctagcctgtcctggcggaagtt

SEQ ID NO: 1798346 - DNA, 25 bp, Homo sapien
tagacggttcccccagagatattta

SEQ ID NO: 1798347 - DNA, 25 bp, Homo sapien
cagcttaaattgtccccaagatagg

SEQ ID NO: 1798348 - DNA, 25 bp, Homo sapien
ccaagataggtgtggaatggacact

SEQ ID NO: 1798349 - DNA, 25 bp, Homo sapien
gctgtgctccttcagcttaaattgt

SEQ ID NO: 1798350 - DNA, 25 bp, Homo sapien
ctgtgggcaatgggagggaacaaat

SEQ ID NO: 1798351 - DNA, 25 bp, Homo sapien
tgtgggcaatgggagggaacaaatg

SEQ ID NO: 1798352 - DNA, 25 bp, Homo sapien
gcctattatagcctggtggctccta

SEQ ID NO: 1798353 - DNA, 25 bp, Homo sapien
ccaccgtgactttgatttaccagaa

SEQ ID NO: 1798354 - DNA, 25 bp, Homo sapien
gagtgcacaggagaggatcatactg

SEQ ID NO: 1798355 - DNA, 25 bp, Homo sapien
taggttcacggctggtagagtgcac

SEQ ID NO: 1798356 - DNA, 25 bp, Homo sapien
agttttatatagcaaattaccagaa

SEQ ID NO: 1798357 - DNA, 25 bp, Homo sapien
gatactagacatcctaatttgttcc

SEQ ID NO: 1798358 - DNA, 25 bp, Homo sapien
ttatctcgcgatttttgtgggtcag

SEQ ID NO: 1798359 - DNA, 25 bp, Homo sapien
tgacggactttcaaacaacatgaac

SEQ ID NO: 1798360 - DNA, 25 bp, Homo sapien
cagccactccataagtgcttctgga

SEQ ID NO: 1798361 - DNA, 25 bp, Homo sapien
gagatggctggattcctcacctgac

SEQ ID NO: 1798362 - DNA, 25 bp, Homo sapien
cacatagcagccactccataagtgc

SEQ ID NO: 1798363 - DNA, 25 bp, Homo sapien
cacttgcttcacaaagcgttccaca

SEQ ID NO: 1798364 - DNA, 25 bp, Homo sapien
gctcagctgggttataacagatggt

SEQ ID NO: 1798365 - DNA, 25 bp, Homo sapien
ttgctaacttcatgataatcctggg

SEQ ID NO: 1798366 - DNA, 25 bp, Homo sapien
aaagcctttataggctggtgaccac

SEQ ID NO: 1798367 - DNA, 25 bp, Homo sapien
gaaaatgcccggtctgaggcataga

SEQ ID NO: 1798368 - DNA, 25 bp, Homo sapien
cagggccgaccaggcagtgattctg

SEQ ID NO: 1798369 - DNA, 25 bp, Homo sapien
cttgataccaggcagagaagcggct

SEQ ID NO: 1798370 - DNA, 25 bp, Homo sapien
gcctggtgagagaatgctggcccct

SEQ ID NO: 1798371 - DNA, 25 bp, Homo sapien
tctgattacgaattggctgcccagg

SEQ ID NO: 1798372 - DNA, 25 bp, Homo sapien
tttgcactgggcactgacactgcag

SEQ ID NO: 1798373 - DNA, 25 bp, Homo sapien
tgagctagagacataagcctggcag

SEQ ID NO: 1798374 - DNA, 25 bp, Homo sapien
ggacggagccggtcaaaaagatgca

SEQ ID NO: 1798375 - DNA, 25 bp, Homo sapien
cacaaacagggaaagtcagatgaac

SEQ ID NO: 1798376 - DNA, 25 bp, Homo sapien
cagaaagagagactccggaaggcaa

SEQ ID NO: 1798377 - DNA, 25 bp, Homo sapien
tcttgaagcttacccaactgtgggc

SEQ ID NO: 1798378 - DNA, 25 bp, Homo sapien
caaccctggtcagagctatgaagga

SEQ ID NO: 1798379 - DNA, 25 bp, Homo sapien
tgtgggcagagacatcggccactcg

SEQ ID NO: 1798380 - DNA, 25 bp, Homo sapien
gatacagcaagaggagcatcaaatt

SEQ ID NO: 1798381 - DNA, 25 bp, Homo sapien
ctcacatccaggtggtcagcaggag

SEQ ID NO: 1798382 - DNA, 25 bp, Homo sapien
tgtgtctgcagaaccgagtgctctg

SEQ ID NO: 1798383 - DNA, 25 bp, Homo sapien
tctctgggtggttcctaatgctgct

SEQ ID NO: 1798384 - DNA, 25 bp, Homo sapien
ggagccgctgtcacatcttcctgga

SEQ ID NO: 1798385 - DNA, 25 bp, Homo sapien
cctgctttccaaaattgggtgaatt

SEQ ID NO: 1798386 - DNA, 25 bp, Homo sapien
agtgtgcactgcagaggccggcatt

SEQ ID NO: 1798387 - DNA, 25 bp, Homo sapien
ctcggcctccccataaatcctgttt

SEQ ID NO: 1798388 - DNA, 25 bp, Homo sapien
caagtgtgcactgcagaggccggca

SEQ ID NO: 1798389 - DNA, 25 bp, Homo sapien
ccagggacagtggtgatcaaaccgt

SEQ ID NO: 1798390 - DNA, 25 bp, Homo sapien
cagggacagtggtgatcaaaccgtt

SEQ ID NO: 1798391 - DNA, 25 bp, Homo sapien
ttcttttccccacacagttgcctac

SEQ ID NO: 1798392 - DNA, 25 bp, Homo sapien
cagaaaagacagagataaaataaac

SEQ ID NO: 1798393 - DNA, 25 bp, Homo sapien
tagtttcttttccccacacagttgc

SEQ ID NO: 1798394 - DNA, 25 bp, Homo sapien
gacagagataaaataaacatataaa

SEQ ID NO: 1798395 - DNA, 25 bp, Homo sapien
cgtgggtgataacgaatgcaaatat

SEQ ID NO: 1798396 - DNA, 25 bp, Homo sapien
gaatgacgtgggtgataacgaatgc

SEQ ID NO: 1798397 - DNA, 25 bp, Homo sapien
gaagaatgacgtgggtgataacgaa

SEQ ID NO: 1798398 - DNA, 25 bp, Homo sapien
ggtgataacgaatgcaaatataaag

SEQ ID NO: 1798399 - DNA, 25 bp, Homo sapien
tccatcttagggtagcggtgccagg

SEQ ID NO: 1798400 - DNA, 25 bp, Homo sapien
catttgtggtttgagcaccgcggcc

SEQ ID NO: 1798401 - DNA, 25 bp, Homo sapien
gatgtactcctaacgtgagcctgag

SEQ ID NO: 1798402 - DNA, 25 bp, Homo sapien
caacggtatgtgagcgagcacgaca

SEQ ID NO: 1798403 - DNA, 25 bp, Homo sapien
tccttaagggcatttaggaatcctg

SEQ ID NO: 1798404 - DNA, 25 bp, Homo sapien
aagggcatttaggaatcctgtttgc

SEQ ID NO: 1798405 - DNA, 25 bp, Homo sapien
cttaagggcatttaggaatcctgtt

SEQ ID NO: 1798406 - DNA, 25 bp, Homo sapien
tgtccttaagggcatttaggaatcc

SEQ ID NO: 1798407 - DNA, 25 bp, Homo sapien
gccaggatgcaacccacacgtgggc

SEQ ID NO: 1798408 - DNA, 25 bp, Homo sapien
ccaggatgcaacccacacgtgggca

SEQ ID NO: 1798409 - DNA, 25 bp, Homo sapien
caggatgcaacccacacgtgggcat

SEQ ID NO: 1798410 - DNA, 25 bp, Homo sapien
taggacctgcatgcggtcagcaggc

SEQ ID NO: 1798411 - DNA, 25 bp, Homo sapien
ctggaggtgcgggtgtggcctgcgt

SEQ ID NO: 1798412 - DNA, 25 bp, Homo sapien
tggcctgcgtctgggtttttaggac

SEQ ID NO: 1798413 - DNA, 25 bp, Homo sapien
ttctttcaggctctacgccctggct

SEQ ID NO: 1798414 - DNA, 25 bp, Homo sapien
tgccaaggtgtcttagatggttgtc

SEQ ID NO: 1798415 - DNA, 25 bp, Homo sapien
gaagctactcggttcctttctccta

SEQ ID NO: 1798416 - DNA, 25 bp, Homo sapien
agttctgctgggttttatgtgggcc

SEQ ID NO: 1798417 - DNA, 25 bp, Homo sapien
cccagtccgggcttacttacagtag

SEQ ID NO: 1798418 - DNA, 25 bp, Homo sapien
gtcacagtcatctagggcctcctct

SEQ ID NO: 1798419 - DNA, 25 bp, Homo sapien
gcattctgtcacagtcatctagggc

SEQ ID NO: 1798420 - DNA, 25 bp, Homo sapien
ttctgtcacagtcatctagggcctc

SEQ ID NO: 1798421 - DNA, 25 bp, Homo sapien
ctgtcacagtcatctagggcctcct

SEQ ID NO: 1798422 - DNA, 25 bp, Homo sapien
gggagggctgatggtgcagactggg

SEQ ID NO: 1798423 - DNA, 25 bp, Homo sapien
ggctgatggtgcagactgggaaggg

SEQ ID NO: 1798424 - DNA, 25 bp, Homo sapien
gagggctgatggtgcagactgggaa

SEQ ID NO: 1798425 - DNA, 25 bp, Homo sapien
agggctgatggtgcagactgggaag

SEQ ID NO: 1798426 - DNA, 25 bp, Homo sapien
gagaaccgactatggactctgagcc

SEQ ID NO: 1798427 - DNA, 25 bp, Homo sapien
catggtacggggcagccgctccatg

SEQ ID NO: 1798428 - DNA, 25 bp, Homo sapien
ggagggagaaccgactatggactct

SEQ ID NO: 1798429 - DNA, 25 bp, Homo sapien
cggagggagggagaaccgactatgg

SEQ ID NO: 1798430 - DNA, 25 bp, Homo sapien
aagacctgtgctgccttcgtgattt

SEQ ID NO: 1798431 - DNA, 25 bp, Homo sapien
ggtatcaggatggacaagttggaaa

SEQ ID NO: 1798432 - DNA, 25 bp, Homo sapien
cgtgattttcccgttgtggtgtcct

SEQ ID NO: 1798433 - DNA, 25 bp, Homo sapien
ggatcagcaggtatcaggatggaca

SEQ ID NO: 1798434 - DNA, 25 bp, Homo sapien
ctcatcgggaggcatcatagccagc

SEQ ID NO: 1798435 - DNA, 25 bp, Homo sapien
tcgggaggcatcatagccagcggat

SEQ ID NO: 1798436 - DNA, 25 bp, Homo sapien
gcatcatagccagcggatatagaat

SEQ ID NO: 1798437 - DNA, 25 bp, Homo sapien
ggaggcatcatagccagcggatata

SEQ ID NO: 1798438 - DNA, 25 bp, Homo sapien
ggcatcctgatcaggaagcacactg

SEQ ID NO: 1798439 - DNA, 25 bp, Homo sapien
ggacgacatattgactcgcacatca

SEQ ID NO: 1798440 - DNA, 25 bp, Homo sapien
caatcacagactctaattttggctt

SEQ ID NO: 1798441 - DNA, 25 bp, Homo sapien
tgtggagccagcgactgtggcatcc

SEQ ID NO: 1798442 - DNA, 25 bp, Homo sapien
gcctctctctcacccggccttgcct

SEQ ID NO: 1798443 - DNA, 25 bp, Homo sapien
tctctcacccggccttgccttgctt

SEQ ID NO: 1798444 - DNA, 25 bp, Homo sapien
ctctctctcacccggccttgccttg

SEQ ID NO: 1798445 - DNA, 25 bp, Homo sapien
ctctcacccggccttgccttgcttc

SEQ ID NO: 1798446 - DNA, 25 bp, Homo sapien
tgatgcgagtcaaggaggcaagcgg

SEQ ID NO: 1798447 - DNA, 25 bp, Homo sapien
gagggaccgcgcaagaagtggatgt

SEQ ID NO: 1798448 - DNA, 25 bp, Homo sapien
aggaggcaagcggaagtgagggacc

SEQ ID NO: 1798449 - DNA, 25 bp, Homo sapien
ccgcgcaagaagtggatgtgatgga

SEQ ID NO: 1798450 - DNA, 25 bp, Homo sapien
aggccaacgatggaccagacagaga

SEQ ID NO: 1798451 - DNA, 25 bp, Homo sapien
atcaagtaggtgtggaatcctgaga

SEQ ID NO: 1798452 - DNA, 25 bp, Homo sapien
tctggttggagctgatcaagtaggt

SEQ ID NO: 1798453 - DNA, 25 bp, Homo sapien
aatcctgagaggccaacgatggacc

SEQ ID NO: 1798454 - DNA, 25 bp, Homo sapien
ctccatctgtattaagtgcaggcag

SEQ ID NO: 1798455 - DNA, 25 bp, Homo sapien
tccatctgtattaagtgcaggcaga

SEQ ID NO: 1798456 - DNA, 25 bp, Homo sapien
ctgtattaagtgcaggcagataatc

SEQ ID NO: 1798457 - DNA, 25 bp, Homo sapien
catctgtattaagtgcaggcagata

SEQ ID NO: 1798458 - DNA, 25 bp, Homo sapien
gaaaaggaaagtcagtaacaagcaa

SEQ ID NO: 1798459 - DNA, 25 bp, Homo sapien
cacagttgaggtgagctggaccatg

SEQ ID NO: 1798460 - DNA, 25 bp, Homo sapien
tatcttccacaccaacgcacagttg

SEQ ID NO: 1798461 - DNA, 25 bp, Homo sapien
catgagaggctcataaagaatgcaa

SEQ ID NO: 1798462 - DNA, 25 bp, Homo sapien
acacagcagttggtaaagatatttc

SEQ ID NO: 1798463 - DNA, 25 bp, Homo sapien
cgtagctgtagggattgtaattttc

SEQ ID NO: 1798464 - DNA, 25 bp, Homo sapien
acagggcaacacagcagttggtaaa

SEQ ID NO: 1798465 - DNA, 25 bp, Homo sapien
aaagatatttccgtagctgtaggga

SEQ ID NO: 1798466 - DNA, 25 bp, Homo sapien
gattcaataaaggtcagctactgcc

SEQ ID NO: 1798467 - DNA, 25 bp, Homo sapien
tctgttgaagagcacgatgcgtcct

SEQ ID NO: 1798468 - DNA, 25 bp, Homo sapien
agtatcaacgactgcggcccatgtg

SEQ ID NO: 1798469 - DNA, 25 bp, Homo sapien
ccatagaatgggatataacggtgcc

SEQ ID NO: 1798470 - DNA, 25 bp, Homo sapien
aaaaaatcaagcgttctcggccagc

SEQ ID NO: 1798471 - DNA, 25 bp, Homo sapien
cagcttagacctactcttgggcggc

SEQ ID NO: 1798472 - DNA, 25 bp, Homo sapien
tgaagcatatgccagccaaggaacg

SEQ ID NO: 1798473 - DNA, 25 bp, Homo sapien
tttaatgtagcagctgggctcccag

SEQ ID NO: 1798474 - DNA, 25 bp, Homo sapien
acaggcccacctcaggcaacttaga

SEQ ID NO: 1798475 - DNA, 25 bp, Homo sapien
aaaagccagagatgcagcagcacta

SEQ ID NO: 1798476 - DNA, 25 bp, Homo sapien
agcactatctcaggttccgcgtcgg

SEQ ID NO: 1798477 - DNA, 25 bp, Homo sapien
gcaggaagagagtgaataaaaagcc

SEQ ID NO: 1798478 - DNA, 25 bp, Homo sapien
gatgtaccctcttctgtcgatcagg

SEQ ID NO: 1798479 - DNA, 25 bp, Homo sapien
gccccgtacatggtgatgccattgg

SEQ ID NO: 1798480 - DNA, 25 bp, Homo sapien
gcgtgtcgggctggatgtaccctct

SEQ ID NO: 1798481 - DNA, 25 bp, Homo sapien
tctgtgactgcgtggccccgtacat

SEQ ID NO: 1798482 - DNA, 25 bp, Homo sapien
tcagtggccatacgcttcctgggct

SEQ ID NO: 1798483 - DNA, 25 bp, Homo sapien
cacacaagcaaaagggaagccctcg

SEQ ID NO: 1798484 - DNA, 25 bp, Homo sapien
tagtttaacgccttgcctcctgtct

SEQ ID NO: 1798485 - DNA, 25 bp, Homo sapien
cctgtctgagcgcagtagtcatggg

SEQ ID NO: 1798486 - DNA, 25 bp, Homo sapien
tgtttttgtaccgaacagctcccag

SEQ ID NO: 1798487 - DNA, 25 bp, Homo sapien
gttcacttctttatacccaacagtg

SEQ ID NO: 1798488 - DNA, 25 bp, Homo sapien
cgaacagctcccaggtgcatgtgag

SEQ ID NO: 1798489 - DNA, 25 bp, Homo sapien
gctgtgacgctggagtgtttttgta

SEQ ID NO: 1798490 - DNA, 25 bp, Homo sapien
attggtacgcgtatttctcatggcc

SEQ ID NO: 1798491 - DNA, 25 bp, Homo sapien
cctggaaattaattggtacgcgtat

SEQ ID NO: 1798492 - DNA, 25 bp, Homo sapien
catttgtccgtgttttgacaattcc

SEQ ID NO: 1798493 - DNA, 25 bp, Homo sapien
tgacaattcctggaaattaattggt

SEQ ID NO: 1798494 - DNA, 25 bp, Homo sapien
ttagcgacggtgctgcaggctttcc

SEQ ID NO: 1798495 - DNA, 25 bp, Homo sapien
ggtgccctggatgtctatcactgca

SEQ ID NO: 1798496 - DNA, 25 bp, Homo sapien
ctgcatcagagaccggaaaaccgtt

SEQ ID NO: 1798497 - DNA, 25 bp, Homo sapien
gaagacgacggattgcttggcaact

SEQ ID NO: 1798498 - DNA, 25 bp, Homo sapien
tcctagttttacatccagggtggag

SEQ ID NO: 1798499 - DNA, 25 bp, Homo sapien
tgtcactacatcaaagagaactcct

SEQ ID NO: 1798500 - DNA, 25 bp, Homo sapien
ggcacttgcctacagtgtctgatgg

SEQ ID NO: 1798501 - DNA, 25 bp, Homo sapien
caccatggccataacttcaaggaac

SEQ ID NO: 1798502 - DNA, 25 bp, Homo sapien
gctgttccctcttggattgagtaga

SEQ ID NO: 1798503 - DNA, 25 bp, Homo sapien
gaccctgaaggtcgatgttcggccc

SEQ ID NO: 1798504 - DNA, 25 bp, Homo sapien
ctgttgatgagacacaatgggctca

SEQ ID NO: 1798505 - DNA, 25 bp, Homo sapien
cattgctaggagatgctccctgtcc

SEQ ID NO: 1798506 - DNA, 25 bp, Homo sapien
tcatgttccgtttagcgccagctct

SEQ ID NO: 1798507 - DNA, 25 bp, Homo sapien
tgtgagcacggtccctaaaccacag

SEQ ID NO: 1798508 - DNA, 25 bp, Homo sapien
cagaaaggcctgttcgccaggtgcc

SEQ ID NO: 1798509 - DNA, 25 bp, Homo sapien
tgaatggccggtaaatgtacagtcc

SEQ ID NO: 1798510 - DNA, 25 bp, Homo sapien
tgaaaaaaccgagtgtacagatgct

SEQ ID NO: 1798511 - DNA, 25 bp, Homo sapien
tactgcccaaatgaagtgtcggcat

SEQ ID NO: 1798512 - DNA, 25 bp, Homo sapien
cactgtgacagctgatttactgccc

SEQ ID NO: 1798513 - DNA, 25 bp, Homo sapien
taccctagctgacgtcttgtctgaa

SEQ ID NO: 1798514 - DNA, 25 bp, Homo sapien
gttatgtttgaattgatctaaccag

SEQ ID NO: 1798515 - DNA, 25 bp, Homo sapien
ccaagaagccgttggttatgtttga

SEQ ID NO: 1798516 - DNA, 25 bp, Homo sapien
tgaattgatctaaccagttatataa

SEQ ID NO: 1798517 - DNA, 25 bp, Homo sapien
caccaagaagccgttggttatgttt

SEQ ID NO: 1798518 - DNA, 25 bp, Homo sapien
tccaccagtagagggagacatcacc

SEQ ID NO: 1798519 - DNA, 25 bp, Homo sapien
atcaccgctcgctttttctctctta

SEQ ID NO: 1798520 - DNA, 25 bp, Homo sapien
ttacaatttggtggctgtgcataca

SEQ ID NO: 1798521 - DNA, 25 bp, Homo sapien
cttccaccagtagagggagacatca

SEQ ID NO: 1798522 - DNA, 25 bp, Homo sapien
tcagaagagagcactggcgtggaca

SEQ ID NO: 1798523 - DNA, 25 bp, Homo sapien
cgtgcctagcccgtaagccatttaa

SEQ ID NO: 1798524 - DNA, 25 bp, Homo sapien
tccaagggcgatgggttcataaacc

SEQ ID NO: 1798525 - DNA, 25 bp, Homo sapien
taagtctagctatgggtgtttcccc

SEQ ID NO: 1798526 - DNA, 25 bp, Homo sapien
aagagctcctgcacacccacgagaa

SEQ ID NO: 1798527 - DNA, 25 bp, Homo sapien
ttctcggataaggtggctgtcggca

SEQ ID NO: 1798528 - DNA, 25 bp, Homo sapien
cagagttgggtgcaccttcggagac

SEQ ID NO: 1798529 - DNA, 25 bp, Homo sapien
tgtcggcagtggtcggttaagctcc

SEQ ID NO: 1798530 - DNA, 25 bp, Homo sapien
tggtgctctgaatgcactggtcttg

SEQ ID NO: 1798531 - DNA, 25 bp, Homo sapien
tctgaatgcactggtcttggtcgca

SEQ ID NO: 1798532 - DNA, 25 bp, Homo sapien
ctgcaaaacgaatttggtgctctga

SEQ ID NO: 1798533 - DNA, 25 bp, Homo sapien
caaaacgaatttggtgctctgaatg

SEQ ID NO: 1798534 - DNA, 25 bp, Homo sapien
atcacgtccgcgagcgtggcctcgg

SEQ ID NO: 1798535 - DNA, 25 bp, Homo sapien
cttcccgggcaggtgcagctcgtcg

SEQ ID NO: 1798536 - DNA, 25 bp, Homo sapien
cacagagtcctcatgcagggagtcc

SEQ ID NO: 1798537 - DNA, 25 bp, Homo sapien
cgtcaggaactggtggcccatgtgc

SEQ ID NO: 1798538 - DNA, 25 bp, Homo sapien
agaagccttccgtgtgtctgtcaca

SEQ ID NO: 1798539 - DNA, 25 bp, Homo sapien
tctccaccgtggcattggctgggaa

SEQ ID NO: 1798540 - DNA, 25 bp, Homo sapien
catgcagatccacacctggtcggtt

SEQ ID NO: 1798541 - DNA, 25 bp, Homo sapien
tgcagtctggccacaagcgtcagaa

SEQ ID NO: 1798542 - DNA, 25 bp, Homo sapien
tccttggaaatagcaacaccactgt

SEQ ID NO: 1798543 - DNA, 25 bp, Homo sapien
tcattttattggctgtccacgggaa

SEQ ID NO: 1798544 - DNA, 25 bp, Homo sapien
tctcaacacgagacctcatcgagcg

SEQ ID NO: 1798545 - DNA, 25 bp, Homo sapien
tcatcgagcggccaaacagaaggtg

SEQ ID NO: 1798546 - DNA, 25 bp, Homo sapien
gctattaaggataaccgtacgcaga

SEQ ID NO: 1798547 - DNA, 25 bp, Homo sapien
ggaaaacttgcctcttatctaagaa

SEQ ID NO: 1798548 - DNA, 25 bp, Homo sapien
cctcgctagggacatttcaagaaaa

SEQ ID NO: 1798549 - DNA, 25 bp, Homo sapien
ctgcaaacgtagagcaaattccact

SEQ ID NO: 1798550 - DNA, 25 bp, Homo sapien
ttccgatcaactgttgcacggcaaa

SEQ ID NO: 1798551 - DNA, 25 bp, Homo sapien
tgatctcagcttagactgtaagccg

SEQ ID NO: 1798552 - DNA, 25 bp, Homo sapien
ggatgatgacctacatgatctcagc

SEQ ID NO: 1798553 - DNA, 25 bp, Homo sapien
tgagtgacacgttaacacagaagga

SEQ ID NO: 1798554 - DNA, 25 bp, Homo sapien
taggacctcaagttgcacttctggg

SEQ ID NO: 1798555 - DNA, 25 bp, Homo sapien
tcatatggttataaggagcaaggcc

SEQ ID NO: 1798556 - DNA, 25 bp, Homo sapien
gatggctcgaagacatcacagtgca

SEQ ID NO: 1798557 - DNA, 25 bp, Homo sapien
tagcgtggacaaggagaatccctgt

SEQ ID NO: 1798558 - DNA, 25 bp, Homo sapien
ctttgggctcacaggtagcgtggac

SEQ ID NO: 1798559 - DNA, 25 bp, Homo sapien
gccacagctagaaggaaccattcaa

SEQ ID NO: 1798560 - DNA, 25 bp, Homo sapien
cacatatatgttcgtgggaaatgca

SEQ ID NO: 1798561 - DNA, 25 bp, Homo sapien
caaaattcccagtcccctattggat

SEQ ID NO: 1798562 - DNA, 25 bp, Homo sapien
tcctgacaaacagaagtgggcgccc

SEQ ID NO: 1798563 - DNA, 25 bp, Homo sapien
gcataacgcaactgctgggccaatt

SEQ ID NO: 1798564 - DNA, 25 bp, Homo sapien
tgagtcagacaagaaggcctaggcc

SEQ ID NO: 1798565 - DNA, 25 bp, Homo sapien
tctgcagaacggagtgacaggtcac

SEQ ID NO: 1798566 - DNA, 25 bp, Homo sapien
tcagttcagccttcaagtgccggga

SEQ ID NO: 1798567 - DNA, 25 bp, Homo sapien
gaacccagaaagcatgtctccttgg

SEQ ID NO: 1798568 - DNA, 25 bp, Homo sapien
ggcatcttgaaacatcgagggcaag

SEQ ID NO: 1798569 - DNA, 25 bp, Homo sapien
ggctctattatcaggaccatggaca

SEQ ID NO: 1798570 - DNA, 25 bp, Homo sapien
aacttaagaccctaagccgaggctg

SEQ ID NO: 1798571 - DNA, 25 bp, Homo sapien
ccccttctcgagcactgacgatccc

SEQ ID NO: 1798572 - DNA, 25 bp, Homo sapien
ttctcgagcactgacgatccccggt

SEQ ID NO: 1798573 - DNA, 25 bp, Homo sapien
acgatccccggtggtgcagaagcct

SEQ ID NO: 1798574 - DNA, 25 bp, Homo sapien
agcactgacgatccccggtggtgca

SEQ ID NO: 1798575 - DNA, 25 bp, Homo sapien
tctgctcccctcttagaaaaagcac

SEQ ID NO: 1798576 - DNA, 25 bp, Homo sapien
gctcccctcttagaaaaagcaccat

SEQ ID NO: 1798577 - DNA, 25 bp, Homo sapien
aaagctcttctgctcccctcttaga

SEQ ID NO: 1798578 - DNA, 25 bp, Homo sapien
agaaaaagctcttctgctcccctct

SEQ ID NO: 1798579 - DNA, 25 bp, Homo sapien
aactctccacgtgggattcccaggg

SEQ ID NO: 1798580 - DNA, 25 bp, Homo sapien
gcttatcctccccatcgtggtcagg

SEQ ID NO: 1798581 - DNA, 25 bp, Homo sapien
cttcttgtgggttatatgggcactc

SEQ ID NO: 1798582 - DNA, 25 bp, Homo sapien
gccccatggcggagattgctcagtc

SEQ ID NO: 1798583 - DNA, 25 bp, Homo sapien
tctggaggagatctgatctggccaa

SEQ ID NO: 1798584 - DNA, 25 bp, Homo sapien
tcagaaaggactaagttctcaacct

SEQ ID NO: 1798585 - DNA, 25 bp, Homo sapien
tattcctgggcttaggctaagctaa

SEQ ID NO: 1798586 - DNA, 25 bp, Homo sapien
tcccattcagcaggaccttggcttt

SEQ ID NO: 1798587 - DNA, 25 bp, Homo sapien
ccatggatgagcaagaagcggccac

SEQ ID NO: 1798588 - DNA, 25 bp, Homo sapien
cttgcttcgcttttcctctccatgg

SEQ ID NO: 1798589 - DNA, 25 bp, Homo sapien
cctctccatggatgagcaagaagcg

SEQ ID NO: 1798590 - DNA, 25 bp, Homo sapien
gaagcggccaccagttagcctgttt

SEQ ID NO: 1798591 - DNA, 25 bp, Homo sapien
aagactccgataagcctcgcgatcc

SEQ ID NO: 1798592 - DNA, 25 bp, Homo sapien
ttcagctcgtcaatccaggccaagc

SEQ ID NO: 1798593 - DNA, 25 bp, Homo sapien
cagagttcagctcgtcaatccaggc

SEQ ID NO: 1798594 - DNA, 25 bp, Homo sapien
aagcctcgcgatccgtggacccagg

SEQ ID NO: 1798595 - DNA, 25 bp, Homo sapien
tggcacctttgccagattgtgcatg

SEQ ID NO: 1798596 - DNA, 25 bp, Homo sapien
ttgccagattgtgcatgagctggtg

SEQ ID NO: 1798597 - DNA, 25 bp, Homo sapien
cctttgccagattgtgcatgagctg

SEQ ID NO: 1798598 - DNA, 25 bp, Homo sapien
cacctttgccagattgtgcatgagc

SEQ ID NO: 1798599 - DNA, 25 bp, Homo sapien
tctgtggtcatttgggatgctggtt

SEQ ID NO: 1798600 - DNA, 25 bp, Homo sapien
catctgtggtcatttgggatgctgg

SEQ ID NO: 1798601 - DNA, 25 bp, Homo sapien
gctggttgcttagggctccctctgg

SEQ ID NO: 1798602 - DNA, 25 bp, Homo sapien
ctggttgcttagggctccctctggg

SEQ ID NO: 1798603 - DNA, 25 bp, Homo sapien
tcctgcctatccttaaggcgaggaa

SEQ ID NO: 1798604 - DNA, 25 bp, Homo sapien
gattcatccgcctcctgcctatcct

SEQ ID NO: 1798605 - DNA, 25 bp, Homo sapien
ccttaaggcgaggaaagacagagaa

SEQ ID NO: 1798606 - DNA, 25 bp, Homo sapien
tacgcgagctccgattcatccgcct

SEQ ID NO: 1798607 - DNA, 25 bp, Homo sapien
tgcttaccacccgttgttggtgtca

SEQ ID NO: 1798608 - DNA, 25 bp, Homo sapien
tcctgacagactctcttctgaatgc

SEQ ID NO: 1798609 - DNA, 25 bp, Homo sapien
cagactctcttctgaatgcttacca

SEQ ID NO: 1798610 - DNA, 25 bp, Homo sapien
tctgaatgcttaccacccgttgttg

SEQ ID NO: 1798611 - DNA, 25 bp, Homo sapien
ggcaaaggtcgaagtcgatttctga

SEQ ID NO: 1798612 - DNA, 25 bp, Homo sapien
aggtcgaagtcgatttctgacacat

SEQ ID NO: 1798613 - DNA, 25 bp, Homo sapien
agatgcgaaggcaaaggtcgaagtc

SEQ ID NO: 1798614 - DNA, 25 bp, Homo sapien
cgaaggcaaaggtcgaagtcgattt

SEQ ID NO: 1798615 - DNA, 25 bp, Homo sapien
tgttgcggagaacagataacatcat

SEQ ID NO: 1798616 - DNA, 25 bp, Homo sapien
catgatgtcatatttgttgcggaga

SEQ ID NO: 1798617 - DNA, 25 bp, Homo sapien
aatttatacactggagtacaaaagc

SEQ ID NO: 1798618 - DNA, 25 bp, Homo sapien
tatacactggagtacaaaagcccat

SEQ ID NO: 1798619 - DNA, 25 bp, Homo sapien
ggcaagccggcaagaagaaatagcc

SEQ ID NO: 1798620 - DNA, 25 bp, Homo sapien
aaggcaagccggcaagaagaaatag

SEQ ID NO: 1798621 - DNA, 25 bp, Homo sapien
aaggaggtgtgaaggcaagccggca

SEQ ID NO: 1798622 - DNA, 25 bp, Homo sapien
aggtgtgaaggcaagccggcaagaa

SEQ ID NO: 1798623 - DNA, 25 bp, Homo sapien
tccgattagactgccatccatcaga

SEQ ID NO: 1798624 - DNA, 25 bp, Homo sapien
taggaaacctagttgggctccaagc

SEQ ID NO: 1798625 - DNA, 25 bp, Homo sapien
cagactgagatctccaataggaaac

SEQ ID NO: 1798626 - DNA, 25 bp, Homo sapien
ataggaaacctagttgggctccaag

SEQ ID NO: 1798627 - DNA, 25 bp, Homo sapien
gcttccctgactggcattcccagca

SEQ ID NO: 1798628 - DNA, 25 bp, Homo sapien
gcctttggtgattgggctcctgctt

SEQ ID NO: 1798629 - DNA, 25 bp, Homo sapien
tcctgcttccctgactggcattccc

SEQ ID NO: 1798630 - DNA, 25 bp, Homo sapien
gacttggcctttggtgattgggctc

SEQ ID NO: 1798631 - DNA, 25 bp, Homo sapien
agtgctattactgctggaggccaag

SEQ ID NO: 1798632 - DNA, 25 bp, Homo sapien
gagatttccgagttagcagtgctat

SEQ ID NO: 1798633 - DNA, 25 bp, Homo sapien
cagtgctattactgctggaggccaa

SEQ ID NO: 1798634 - DNA, 25 bp, Homo sapien
ggcagcagcagagatttccgagtta

SEQ ID NO: 1798635 - DNA, 25 bp, Homo sapien
ctggatggtttgccattccccattt

SEQ ID NO: 1798636 - DNA, 25 bp, Homo sapien
gatggtttgccattccccattttag

SEQ ID NO: 1798637 - DNA, 25 bp, Homo sapien
gcaggaggaattcactggatggttt

SEQ ID NO: 1798638 - DNA, 25 bp, Homo sapien
ggatggtttgccattccccatttta

SEQ ID NO: 1798639 - DNA, 25 bp, Homo sapien
caatgaagtaagcagggacggagca

SEQ ID NO: 1798640 - DNA, 25 bp, Homo sapien
aaatcacaggccacgccaagagtca

SEQ ID NO: 1798641 - DNA, 25 bp, Homo sapien
taattgccacaacatcctgttgagg

SEQ ID NO: 1798642 - DNA, 25 bp, Homo sapien
gtcacccctggacgctcagaaggaa

SEQ ID NO: 1798643 - DNA, 25 bp, Homo sapien
taggtgagcagtcccatttgaagac

SEQ ID NO: 1798644 - DNA, 25 bp, Homo sapien
gatggacactacctgactattaggg

SEQ ID NO: 1798645 - DNA, 25 bp, Homo sapien
ccaaatattctgctactgagtgtga

SEQ ID NO: 1798646 - DNA, 25 bp, Homo sapien
tattagggtcacaactgtagaaggc

SEQ ID NO: 1798647 - DNA, 25 bp, Homo sapien
taagctagaactgcaagaatctgac

SEQ ID NO: 1798648 - DNA, 25 bp, Homo sapien
accaggcattgtcctaggtgctatg

SEQ ID NO: 1798649 - DNA, 25 bp, Homo sapien
catgatgtcaaagtattcaatggca

SEQ ID NO: 1798650 - DNA, 25 bp, Homo sapien
gaatctgacagatgctcactcaaaa

SEQ ID NO: 1798651 - DNA, 25 bp, Homo sapien
tactcgcctttatggaatgcagcca

SEQ ID NO: 1798652 - DNA, 25 bp, Homo sapien
tgtggcaagttccagatggcgcagc

SEQ ID NO: 1798653 - DNA, 25 bp, Homo sapien
caaaagtgactgtcgagaagcccca

SEQ ID NO: 1798654 - DNA, 25 bp, Homo sapien
tacagagattacacagtaggagcac

SEQ ID NO: 1798655 - DNA, 25 bp, Homo sapien
tgtcggccgagcctcccatttaccg

SEQ ID NO: 1798656 - DNA, 25 bp, Homo sapien
gctcggcgctttccgtgcatgaggc

SEQ ID NO: 1798657 - DNA, 25 bp, Homo sapien
ggagcggagcgatggcttcctgggc

SEQ ID NO: 1798658 - DNA, 25 bp, Homo sapien
cacagagccgctcggggtagccgaa

SEQ ID NO: 1798659 - DNA, 25 bp, Homo sapien
cgagtctcgacgctcaggcccagcc

SEQ ID NO: 1798660 - DNA, 25 bp, Homo sapien
tcccgcgccgcggatggtgattctg

SEQ ID NO: 1798661 - DNA, 25 bp, Homo sapien
cgcctcggccccgagtctcgacgct

SEQ ID NO: 1798662 - DNA, 25 bp, Homo sapien
cgggacggccggctcgtctcccgcg

SEQ ID NO: 1798663 - DNA, 25 bp, Homo sapien
tattgatttcctagggttttggagc

SEQ ID NO: 1798664 - DNA, 25 bp, Homo sapien
ggacattgaatacgctttacatact

SEQ ID NO: 1798665 - DNA, 25 bp, Homo sapien
cagacagctcaacctattgtaacca

SEQ ID NO: 1798666 - DNA, 25 bp, Homo sapien
gatctcagtaacctaacgggtattg

SEQ ID NO: 1798667 - DNA, 25 bp, Homo sapien
gaaattgtcttcaaactatttaagc

SEQ ID NO: 1798668 - DNA, 25 bp, Homo sapien
aaattgtcttcaaactatttaagct

SEQ ID NO: 1798669 - DNA, 25 bp, Homo sapien
tgaaattgtcttcaaactatttaag

SEQ ID NO: 1798670 - DNA, 25 bp, Homo sapien
ttttgccaggatcctttgtgccttc

SEQ ID NO: 1798671 - DNA, 25 bp, Homo sapien
cagaattttgccaggatcctttgtg

SEQ ID NO: 1798672 - DNA, 25 bp, Homo sapien
gaattttgccaggatcctttgtgcc

SEQ ID NO: 1798673 - DNA, 25 bp, Homo sapien
cctttgtgccttccagctgatcctt

SEQ ID NO: 1798674 - DNA, 25 bp, Homo sapien
caccggatagtaagggaaccagaca

SEQ ID NO: 1798675 - DNA, 25 bp, Homo sapien
tcaaatgccctaagatacacgtgct

SEQ ID NO: 1798676 - DNA, 25 bp, Homo sapien
ggaagaatgtgtcaccagcaaagca

SEQ ID NO: 1798677 - DNA, 25 bp, Homo sapien
caaaggttctggaactagcctagag

SEQ ID NO: 1798678 - DNA, 25 bp, Homo sapien
tctctctggtattgctgtcaatggc

SEQ ID NO: 1798679 - DNA, 25 bp, Homo sapien
aaaagagaggagtatgaccatacac

SEQ ID NO: 1798680 - DNA, 25 bp, Homo sapien
atatctgttattctgtctgccccac

SEQ ID NO: 1798681 - DNA, 25 bp, Homo sapien
tgtcaatggctaactggctgaggtg

SEQ ID NO: 1798682 - DNA, 25 bp, Homo sapien
cttcattaaccgtcagttcattatt

SEQ ID NO: 1798683 - DNA, 25 bp, Homo sapien
ctccttcattaaccgtcagttcatt

SEQ ID NO: 1798684 - DNA, 25 bp, Homo sapien
ccttcattaaccgtcagttcattat

SEQ ID NO: 1798685 - DNA, 25 bp, Homo sapien
tcattaaccgtcagttcattatttc

SEQ ID NO: 1798686 - DNA, 25 bp, Homo sapien
aacgtagtctgtgggaaccagccct

SEQ ID NO: 1798687 - DNA, 25 bp, Homo sapien
tatggctcagaatatgtggtctgtc

SEQ ID NO: 1798688 - DNA, 25 bp, Homo sapien
ggtgctgagttcaaccacgtcctta

SEQ ID NO: 1798689 - DNA, 25 bp, Homo sapien
tccattgtggtctcagggcagacac

SEQ ID NO: 1798690 - DNA, 25 bp, Homo sapien
cagtctatagatgtccctaagtgga

SEQ ID NO: 1798691 - DNA, 25 bp, Homo sapien
ctgagagagaatcaaggaaggcttg

SEQ ID NO: 1798692 - DNA, 25 bp, Homo sapien
caagaaaattgatcttttccatcac

SEQ ID NO: 1798693 - DNA, 25 bp, Homo sapien
agccgacgaactggcctgagctgtg

SEQ ID NO: 1798694 - DNA, 25 bp, Homo sapien
gtgattgttgctggcagccgacgaa

SEQ ID NO: 1798695 - DNA, 25 bp, Homo sapien
tctgttttccgtaaagccagccaca

SEQ ID NO: 1798696 - DNA, 25 bp, Homo sapien
caagccttcacaaatacgctctgtt

SEQ ID NO: 1798697 - DNA, 25 bp, Homo sapien
tcacaagccttcacaaatacgctct

SEQ ID NO: 1798698 - DNA, 25 bp, Homo sapien
caaatacgctctgttttccgtaaag

SEQ ID NO: 1798699 - DNA, 25 bp, Homo sapien
gcatgtatttttgaaaggttcctga

SEQ ID NO: 1798700 - DNA, 25 bp, Homo sapien
gactttcgacacaaccaatctgagc

SEQ ID NO: 1798701 - DNA, 25 bp, Homo sapien
catgcaagtcatacagccagagaaa

SEQ ID NO: 1798702 - DNA, 25 bp, Homo sapien
ggtgcccagtgaacaagagtgaaaa

SEQ ID NO: 1798703 - DNA, 25 bp, Homo sapien
taaaaccagcacattcatggcagga

SEQ ID NO: 1798704 - DNA, 25 bp, Homo sapien
cagaacagactgagaatggccacga

SEQ ID NO: 1798705 - DNA, 25 bp, Homo sapien
tgggggagacggacacgcacaccca

SEQ ID NO: 1798706 - DNA, 25 bp, Homo sapien
aacagactgagaatggccacgaggg

SEQ ID NO: 1798707 - DNA, 25 bp, Homo sapien
gggggagacggacacgcacacccat

SEQ ID NO: 1798708 - DNA, 25 bp, Homo sapien
agttgttgggagtgtttgtgtttct

SEQ ID NO: 1798709 - DNA, 25 bp, Homo sapien
ggccgaaggcagtgtcccagttgtt

SEQ ID NO: 1798710 - DNA, 25 bp, Homo sapien
tttggaggcactccaggctgaccag

SEQ ID NO: 1798711 - DNA, 25 bp, Homo sapien
ccagatttggaggcactccaggctg

SEQ ID NO: 1798712 - DNA, 25 bp, Homo sapien
taaagaattacttcatccccatgtg

SEQ ID NO: 1798713 - DNA, 25 bp, Homo sapien
gattgtttgtaaccagcttttgctg

SEQ ID NO: 1798714 - DNA, 25 bp, Homo sapien
ctgttactgctgattaatatcttgc

SEQ ID NO: 1798715 - DNA, 25 bp, Homo sapien
aatatcttgctaatcataggttatg

SEQ ID NO: 1798716 - DNA, 25 bp, Homo sapien
gtaactacctactgggcaaatcaat

SEQ ID NO: 1798717 - DNA, 25 bp, Homo sapien
gcaacttaaagagggctatcagatt

SEQ ID NO: 1798718 - DNA, 25 bp, Homo sapien
tggatgttaagagtaaaggctgtgt

SEQ ID NO: 1798719 - DNA, 25 bp, Homo sapien
tgcaaaagacaaatcagaagcaact

SEQ ID NO: 1798720 - DNA, 25 bp, Homo sapien
gactctgaatccttaaagtaggaag

SEQ ID NO: 1798721 - DNA, 25 bp, Homo sapien
gaactagcacgactgtttcctcgct

SEQ ID NO: 1798722 - DNA, 25 bp, Homo sapien
ggaagaggatttgggcccatcccag

SEQ ID NO: 1798723 - DNA, 25 bp, Homo sapien
gccgcctgcatcagctgactctgaa

SEQ ID NO: 1798724 - DNA, 25 bp, Homo sapien
ctgaaacacgtgctttggcgcctga

SEQ ID NO: 1798725 - DNA, 25 bp, Homo sapien
ccacaaagggatatgagggctacat

SEQ ID NO: 1798726 - DNA, 25 bp, Homo sapien
cggaccacgtttttaggcacaggag

SEQ ID NO: 1798727 - DNA, 25 bp, Homo sapien
ggaacactcgatgcgtctctctggg

SEQ ID NO: 1798728 - DNA, 25 bp, Homo sapien
agatcgcaccactgcacttcagcct

SEQ ID NO: 1798729 - DNA, 25 bp, Homo sapien
ctgggtgacagagcgagacgcctgt

SEQ ID NO: 1798730 - DNA, 25 bp, Homo sapien
ggtgacagagcgagacgcctgtctc

SEQ ID NO: 1798731 - DNA, 25 bp, Homo sapien
gggacgttggggttgcagtgaacca

SEQ ID NO: 1798732 - DNA, 25 bp, Homo sapien
taaatgttcatcagtcttaagactt

SEQ ID NO: 1798733 - DNA, 25 bp, Homo sapien
gttcatcagtcttaagactttcctt

SEQ ID NO: 1798734 - DNA, 25 bp, Homo sapien
ctaatcatgaatataaatgttcatc

SEQ ID NO: 1798735 - DNA, 25 bp, Homo sapien
atataaatgttcatcagtcttaaga

SEQ ID NO: 1798736 - DNA, 25 bp, Homo sapien
tgttccgtgccaggtttcgcaaatc

SEQ ID NO: 1798737 - DNA, 25 bp, Homo sapien
tccgtgccaggtttcgcaaatccag

SEQ ID NO: 1798738 - DNA, 25 bp, Homo sapien
tagttgtttggccaacaaatactgt

SEQ ID NO: 1798739 - DNA, 25 bp, Homo sapien
agttgtttggccaacaaatactgtt

SEQ ID NO: 1798740 - DNA, 25 bp, Homo sapien
tgctaccacacagtcaaaagtagag

SEQ ID NO: 1798741 - DNA, 25 bp, Homo sapien
gctctttagaccatacattttggag

SEQ ID NO: 1798742 - DNA, 25 bp, Homo sapien
tagaggtaggataaacccacattgg

SEQ ID NO: 1798743 - DNA, 25 bp, Homo sapien
agtaggtgttagctgatattcgatg

SEQ ID NO: 1798744 - DNA, 25 bp, Homo sapien
caaacttaaccaggagacgctcata

SEQ ID NO: 1798745 - DNA, 25 bp, Homo sapien
tacctgtggtttacagatcgattag

SEQ ID NO: 1798746 - DNA, 25 bp, Homo sapien
ccagtcaaagtgcttatacctgtgg

SEQ ID NO: 1798747 - DNA, 25 bp, Homo sapien
aagggattggaatggctgacccaaa

SEQ ID NO: 1798748 - DNA, 25 bp, Homo sapien
taaccaagttgataaaggagagcac

SEQ ID NO: 1798749 - DNA, 25 bp, Homo sapien
cccagtagtgcagccccattttcaa

SEQ ID NO: 1798750 - DNA, 25 bp, Homo sapien
catggatttaaacactgtggagcac

SEQ ID NO: 1798751 - DNA, 25 bp, Homo sapien
gaaccgtgactctctgaagctttaa

SEQ ID NO: 1798752 - DNA, 25 bp, Homo sapien
cgagaggggaattcttacataataa

SEQ ID NO: 1798753 - DNA, 25 bp, Homo sapien
tttctccagtagttgagcgagaggg

SEQ ID NO: 1798754 - DNA, 25 bp, Homo sapien
tgagcgagaggggaattcttacata

SEQ ID NO: 1798755 - DNA, 25 bp, Homo sapien
gcgagaggggaattcttacataata

SEQ ID NO: 1798756 - DNA, 25 bp, Homo sapien
ctcggaaatttaggaactgctggaa

SEQ ID NO: 1798757 - DNA, 25 bp, Homo sapien
gatggcgacacatcctggtcatcca

SEQ ID NO: 1798758 - DNA, 25 bp, Homo sapien
tctctccatgcgcattttgataaat

SEQ ID NO: 1798759 - DNA, 25 bp, Homo sapien
cactttctgagattactggatggcg

SEQ ID NO: 1798760 - DNA, 25 bp, Homo sapien
tttgatgttactgtaaatgacaggt

SEQ ID NO: 1798761 - DNA, 25 bp, Homo sapien
gttttctatgtagatcttttgtaca

SEQ ID NO: 1798762 - DNA, 25 bp, Homo sapien
gtttccagtccatgagacgcagtat

SEQ ID NO: 1798763 - DNA, 25 bp, Homo sapien
ggatatttgatacttttgatgttac

SEQ ID NO: 1798764 - DNA, 25 bp, Homo sapien
taaggtctgatccaatagctactac

SEQ ID NO: 1798765 - DNA, 25 bp, Homo sapien
ttcaaccaaaactcagagtgaaaga

SEQ ID NO: 1798766 - DNA, 25 bp, Homo sapien
ccccacctttaaggtctgatccaat

SEQ ID NO: 1798767 - DNA, 25 bp, Homo sapien
ctggaagtataatgactcctttggc

SEQ ID NO: 1798768 - DNA, 25 bp, Homo sapien
tgtgctcggcccaccctatgcattc

SEQ ID NO: 1798769 - DNA, 25 bp, Homo sapien
ctatgcattctgacctagtgcctca

SEQ ID NO: 1798770 - DNA, 25 bp, Homo sapien
ccaccctatgcattctgacctagtg

SEQ ID NO: 1798771 - DNA, 25 bp, Homo sapien
gctcggcccaccctatgcattctga

SEQ ID NO: 1798772 - DNA, 25 bp, Homo sapien
aatatcatgactcccgccagctcat

SEQ ID NO: 1798773 - DNA, 25 bp, Homo sapien
gttccatggtggaaaatatcatgac

SEQ ID NO: 1798774 - DNA, 25 bp, Homo sapien
agctcatctctctcggccttcctct

SEQ ID NO: 1798775 - DNA, 25 bp, Homo sapien
tcaggtgcctctggttccatggtgg

SEQ ID NO: 1798776 - DNA, 25 bp, Homo sapien
gatgttgcggttagaaagacagtac

SEQ ID NO: 1798777 - DNA, 25 bp, Homo sapien
gctgcggctacactggctgaagcct

SEQ ID NO: 1798778 - DNA, 25 bp, Homo sapien
aagacagtacttctatgtacaaatg

SEQ ID NO: 1798779 - DNA, 25 bp, Homo sapien
tctgatttgagtttcggctgcggct

SEQ ID NO: 1798780 - DNA, 25 bp, Homo sapien
ccgtgcagcgcttccagtgctcctg

SEQ ID NO: 1798781 - DNA, 25 bp, Homo sapien
ccttcacgccgtcatccatggcctt

SEQ ID NO: 1798782 - DNA, 25 bp, Homo sapien
gtgcagcgcttccagtgctcctgcc

SEQ ID NO: 1798783 - DNA, 25 bp, Homo sapien
gcccgtgcagcgcttccagtgctcc

SEQ ID NO: 1798784 - DNA, 25 bp, Homo sapien
taagggagttaaaggcatctgcgca

SEQ ID NO: 1798785 - DNA, 25 bp, Homo sapien
cagtgcagtcgcagcatttcagggc

SEQ ID NO: 1798786 - DNA, 25 bp, Homo sapien
cattagccctacagctggatacggg

SEQ ID NO: 1798787 - DNA, 25 bp, Homo sapien
cagaaagccgtgactgacagcgaca

SEQ ID NO: 1798788 - DNA, 25 bp, Homo sapien
ccactggaactgaacactgtggcca

SEQ ID NO: 1798789 - DNA, 25 bp, Homo sapien
ggcctttcctatcttctgatattcc

SEQ ID NO: 1798790 - DNA, 25 bp, Homo sapien
ctgcaaggcctttcctatcttctga

SEQ ID NO: 1798791 - DNA, 25 bp, Homo sapien
caaggcctttcctatcttctgatat

SEQ ID NO: 1798792 - DNA, 25 bp, Homo sapien
tcttttgataggaaccctggttcac

SEQ ID NO: 1798793 - DNA, 25 bp, Homo sapien
ggattgggtaactgtttctagagct

SEQ ID NO: 1798794 - DNA, 25 bp, Homo sapien
tggaccttacgattggtgccaggga

SEQ ID NO: 1798795 - DNA, 25 bp, Homo sapien
cactgtggtgggacgtggaccttac

SEQ ID NO: 1798796 - DNA, 25 bp, Homo sapien
ccacgagactggcaatttcttcata

SEQ ID NO: 1798797 - DNA, 25 bp, Homo sapien
cgagactggcaatttcttcataagt

SEQ ID NO: 1798798 - DNA, 25 bp, Homo sapien
tctgccacgagactggcaatttctt

SEQ ID NO: 1798799 - DNA, 25 bp, Homo sapien
ctgttctgccacgagactggcaatt

SEQ ID NO: 1798800 - DNA, 25 bp, Homo sapien
gagaggctaagcaatggtccataca

SEQ ID NO: 1798801 - DNA, 25 bp, Homo sapien
tagaatcccctgatggctaagaaca

SEQ ID NO: 1798802 - DNA, 25 bp, Homo sapien
tagctatgacaaggacctaccctgt

SEQ ID NO: 1798803 - DNA, 25 bp, Homo sapien
taccactgcagattaacagataagg

SEQ ID NO: 1798804 - DNA, 25 bp, Homo sapien
gcatgtgctacactaaattattgag

SEQ ID NO: 1798805 - DNA, 25 bp, Homo sapien
attgagtgttaagcattcagatcac

SEQ ID NO: 1798806 - DNA, 25 bp, Homo sapien
caagactgccatactttgaatcata

SEQ ID NO: 1798807 - DNA, 25 bp, Homo sapien
gatacaagctgattgttactggcag

SEQ ID NO: 1798808 - DNA, 25 bp, Homo sapien
catcaggaaatggagatctttcttt

SEQ ID NO: 1798809 - DNA, 25 bp, Homo sapien
ctcgtgattacattccatcaggaaa

SEQ ID NO: 1798810 - DNA, 25 bp, Homo sapien
gaaaacctttatactcgtgattaca

SEQ ID NO: 1798811 - DNA, 25 bp, Homo sapien
gagtgccaatgatgtcagggaagca

SEQ ID NO: 1798812 - DNA, 25 bp, Homo sapien
catataaaaccaatactgactactg

SEQ ID NO: 1798813 - DNA, 25 bp, Homo sapien
aatactgactactgcgcacatctgc

SEQ ID NO: 1798814 - DNA, 25 bp, Homo sapien
aaaccaatactgactactgcgcaca

SEQ ID NO: 1798815 - DNA, 25 bp, Homo sapien
ctataaatgtctacgatcaggttac

SEQ ID NO: 1798816 - DNA, 25 bp, Homo sapien
ttacttgttgcaactagtttgtcac

SEQ ID NO: 1798817 - DNA, 25 bp, Homo sapien
cgcgtaagacatgatgctgactctc

SEQ ID NO: 1798818 - DNA, 25 bp, Homo sapien
cttgcaacgcgtaagacatgatgct

SEQ ID NO: 1798819 - DNA, 25 bp, Homo sapien
tgttgcaactagtttgtcactttct

SEQ ID NO: 1798820 - DNA, 25 bp, Homo sapien
tctctgctcagttacaattaatcat

SEQ ID NO: 1798821 - DNA, 25 bp, Homo sapien
taatcatcaacctgacctaatctgg

SEQ ID NO: 1798822 - DNA, 25 bp, Homo sapien
ttttcaaatgacaacacctggtttc

SEQ ID NO: 1798823 - DNA, 25 bp, Homo sapien
cctgacctaatctggttggctgctg

SEQ ID NO: 1798824 - DNA, 25 bp, Homo sapien
caggcggatgacactgttgtaatca

SEQ ID NO: 1798825 - DNA, 25 bp, Homo sapien
cgtttcgtaaaattgcacttgctgc

SEQ ID NO: 1798826 - DNA, 25 bp, Homo sapien
catagatccggttactgtgaaagtg

SEQ ID NO: 1798827 - DNA, 25 bp, Homo sapien
cttgctgctccaggtacaggcggat

SEQ ID NO: 1798828 - DNA, 25 bp, Homo sapien
tcaagcacatgcgaaaggcacgtgg

SEQ ID NO: 1798829 - DNA, 25 bp, Homo sapien
taacccagtgttatccaaaaagcaa

SEQ ID NO: 1798830 - DNA, 25 bp, Homo sapien
ttgcaactagcatccaagacccctg

SEQ ID NO: 1798831 - DNA, 25 bp, Homo sapien
tccatggcgcactgtgaaaacctca

SEQ ID NO: 1798832 - DNA, 25 bp, Homo sapien
caatggcaccaactgacgggaaaag

SEQ ID NO: 1798833 - DNA, 25 bp, Homo sapien
aatccacaatggcaccaactgacgg

SEQ ID NO: 1798834 - DNA, 25 bp, Homo sapien
ccaactgacgggaaaagtgtgcatt

SEQ ID NO: 1798835 - DNA, 25 bp, Homo sapien
aagtgtgcatttaaagagcataggg

SEQ ID NO: 1798836 - DNA, 25 bp, Homo sapien
gatgctaaacatccagcacgagggc

SEQ ID NO: 1798837 - DNA, 25 bp, Homo sapien
gaatcccctgaaggttgtgtcgccc

SEQ ID NO: 1798838 - DNA, 25 bp, Homo sapien
ctttcctggaggagtatgagcttcc

SEQ ID NO: 1798839 - DNA, 25 bp, Homo sapien
cctgtgaagctaacgaggcgctgca

SEQ ID NO: 1798840 - DNA, 25 bp, Homo sapien
catcactggaaagcggctgagggcc

SEQ ID NO: 1798841 - DNA, 25 bp, Homo sapien
ggaaagcggctgagggcctgcctca

SEQ ID NO: 1798842 - DNA, 25 bp, Homo sapien
cactggaaagcggctgagggcctgc

SEQ ID NO: 1798843 - DNA, 25 bp, Homo sapien
ctggaaagcggctgagggcctgcct

SEQ ID NO: 1798844 - DNA, 25 bp, Homo sapien
taattatctgacactgggtaagaac

SEQ ID NO: 1798845 - DNA, 25 bp, Homo sapien
agtcaggagaaagcacgcggcattc

SEQ ID NO: 1798846 - DNA, 25 bp, Homo sapien
taactgacgcatttagggtggctaa

SEQ ID NO: 1798847 - DNA, 25 bp, Homo sapien
gcattctcttcaaggcccgttctgt

SEQ ID NO: 1798848 - DNA, 25 bp, Homo sapien
actgtggcagtgaaaggcgtaacga

SEQ ID NO: 1798849 - DNA, 25 bp, Homo sapien
taagcacttgagctgtaactgtggc

SEQ ID NO: 1798850 - DNA, 25 bp, Homo sapien
cctcaatgacaggagccccagagga

SEQ ID NO: 1798851 - DNA, 25 bp, Homo sapien
gaagtgtaagcacttgagctgtaac

SEQ ID NO: 1798852 - DNA, 25 bp, Homo sapien
cagcagcgcttctcatcacggtgga

SEQ ID NO: 1798853 - DNA, 25 bp, Homo sapien
caagccaagcagtgtgccgtggcca

SEQ ID NO: 1798854 - DNA, 25 bp, Homo sapien
ttgctgatgacaccaactggccatg

SEQ ID NO: 1798855 - DNA, 25 bp, Homo sapien
gaaagcactggtcctcacataagag

SEQ ID NO: 1798856 - DNA, 25 bp, Homo sapien
tcgagctgacggtgtgccaaggtcc

SEQ ID NO: 1798857 - DNA, 25 bp, Homo sapien
ccgttaagtgaagcgctggaagtgc

SEQ ID NO: 1798858 - DNA, 25 bp, Homo sapien
caaggtcctgttttgctttatgccg

SEQ ID NO: 1798859 - DNA, 25 bp, Homo sapien
gctgccagtgttgagttcgagctga

SEQ ID NO: 1798860 - DNA, 25 bp, Homo sapien
gcataaacattgttctatgggattt

SEQ ID NO: 1798861 - DNA, 25 bp, Homo sapien
cgtgatattgaagaacaagatgttc

SEQ ID NO: 1798862 - DNA, 25 bp, Homo sapien
tggcttctacatgctcttacattcg

SEQ ID NO: 1798863 - DNA, 25 bp, Homo sapien
catttcccgtaattattaggtcaga

SEQ ID NO: 1798864 - DNA, 25 bp, Homo sapien
cagcagctggaataaaaagtactta

SEQ ID NO: 1798865 - DNA, 25 bp, Homo sapien
tcagcagctggaataaaaagtactt

SEQ ID NO: 1798866 - DNA, 25 bp, Homo sapien
acagtcggctaccacgctctgagga

SEQ ID NO: 1798867 - DNA, 25 bp, Homo sapien
ggttatgatacgcttcccggaccgc

SEQ ID NO: 1798868 - DNA, 25 bp, Homo sapien
cttggcaactcccaggtggttatga

SEQ ID NO: 1798869 - DNA, 25 bp, Homo sapien
caaatatccgagagtcagacactgg

SEQ ID NO: 1798870 - DNA, 25 bp, Homo sapien
tatatgccatgttgccacttgaagg

SEQ ID NO: 1798871 - DNA, 25 bp, Homo sapien
tacagctcttctgtggtacctacag

SEQ ID NO: 1798872 - DNA, 25 bp, Homo sapien
gtgcatgtgactccccggagaagga

SEQ ID NO: 1798873 - DNA, 25 bp, Homo sapien
acgtatctaagaaccaaatggtgca

SEQ ID NO: 1798874 - DNA, 25 bp, Homo sapien
gctgtactgggccaagctgtttgtc

SEQ ID NO: 1798875 - DNA, 25 bp, Homo sapien
tactgggccaagctgtttgtctctg

SEQ ID NO: 1798876 - DNA, 25 bp, Homo sapien
gtctctgggacttgtcctagaaagg

SEQ ID NO: 1798877 - DNA, 25 bp, Homo sapien
gccaagctgtttgtctctgggactt

SEQ ID NO: 1798878 - DNA, 25 bp, Homo sapien
gggttctagcgcccaggcttggcct

SEQ ID NO: 1798879 - DNA, 25 bp, Homo sapien
gtgtggcccggccttctggcgcggg

SEQ ID NO: 1798880 - DNA, 25 bp, Homo sapien
cgtgtacgctggagtgtgtggcccg

SEQ ID NO: 1798881 - DNA, 25 bp, Homo sapien
tggacaccggcacgtgtccgcgcgt

SEQ ID NO: 1798882 - DNA, 25 bp, Homo sapien
agtttcactttgcgccgccgctccc

SEQ ID NO: 1798883 - DNA, 25 bp, Homo sapien
agagtttcactttgcgccgccgctc

SEQ ID NO: 1798884 - DNA, 25 bp, Homo sapien
gagtttcactttgcgccgccgctcc

SEQ ID NO: 1798885 - DNA, 25 bp, Homo sapien
ccgagggcgcgctgcccgcgacagc

SEQ ID NO: 1798886 - DNA, 25 bp, Homo sapien
ccacgtcctcccgagggcgcgctgc

SEQ ID NO: 1798887 - DNA, 25 bp, Homo sapien
acgtcctcccgagggcgcgctgccc

SEQ ID NO: 1798888 - DNA, 25 bp, Homo sapien
gggccacgtcctcccgagggcgcgc

SEQ ID NO: 1798889 - DNA, 25 bp, Homo sapien
cgcctccagcagcacgctacagtcc

SEQ ID NO: 1798890 - DNA, 25 bp, Homo sapien
agcagcacgctacagtccccctcgg

SEQ ID NO: 1798891 - DNA, 25 bp, Homo sapien
cagccgcagccctttgctcagggcc

SEQ ID NO: 1798892 - DNA, 25 bp, Homo sapien
agcagccgcagccctttgctcaggg

SEQ ID NO: 1798893 - DNA, 25 bp, Homo sapien
cctcgaacagcaggcagtcgtcgcg

SEQ ID NO: 1798894 - DNA, 25 bp, Homo sapien
tcgaacagcaggcagtcgtcgcggc

SEQ ID NO: 1798895 - DNA, 25 bp, Homo sapien
ccaccgtgccggcctcgaacagcag

SEQ ID NO: 1798896 - DNA, 25 bp, Homo sapien
gtgccggcctcgaacagcaggcagt

SEQ ID NO: 1798897 - DNA, 25 bp, Homo sapien
tcgaccaagtatttacgtgggacaa

SEQ ID NO: 1798898 - DNA, 25 bp, Homo sapien
ctaagacagcataaaggtcatggta

SEQ ID NO: 1798899 - DNA, 25 bp, Homo sapien
aagctgccatcagcggtttctccag

SEQ ID NO: 1798900 - DNA, 25 bp, Homo sapien
accgatgcttctcgaccaagtattt

SEQ ID NO: 1798901 - DNA, 25 bp, Homo sapien
cataggtgaaattcgctggcttggc

SEQ ID NO: 1798902 - DNA, 25 bp, Homo sapien
gtgaaattcgctggcttggcaggat

SEQ ID NO: 1798903 - DNA, 25 bp, Homo sapien
gaagtccataggtgaaattcgctgg

SEQ ID NO: 1798904 - DNA, 25 bp, Homo sapien
ggcttctgaagtccataggtgaaat

SEQ ID NO: 1798905 - DNA, 25 bp, Homo sapien
taggaataccggcaagctgttacag

SEQ ID NO: 1798906 - DNA, 25 bp, Homo sapien
gctgttacagctggacgcctagtgg

SEQ ID NO: 1798907 - DNA, 25 bp, Homo sapien
tgagatcacgtactaaagcccatag

SEQ ID NO: 1798908 - DNA, 25 bp, Homo sapien
cgataccaggaagccacgcattgaa

SEQ ID NO: 1798909 - DNA, 25 bp, Homo sapien
ctttctctgaccgactgaagtcatc

SEQ ID NO: 1798910 - DNA, 25 bp, Homo sapien
tttctctgaccgactgaagtcatca

SEQ ID NO: 1798911 - DNA, 25 bp, Homo sapien
ttctctgaccgactgaagtcatcac

SEQ ID NO: 1798912 - DNA, 25 bp, Homo sapien
gaagacccctcgctcccctggaagc

SEQ ID NO: 1798913 - DNA, 25 bp, Homo sapien
caggaagacccctcgctcccctgga

SEQ ID NO: 1798914 - DNA, 25 bp, Homo sapien
aagacccctcgctcccctggaagca

SEQ ID NO: 1798915 - DNA, 25 bp, Homo sapien
ccaggaagacccctcgctcccctgg

SEQ ID NO: 1798916 - DNA, 25 bp, Homo sapien
ccaacagtgaccatgtgcaaatggc

SEQ ID NO: 1798917 - DNA, 25 bp, Homo sapien
ccatgtgcaaatggccgtgctgggc

SEQ ID NO: 1798918 - DNA, 25 bp, Homo sapien
cagtgaccatgtgcaaatggccgtg

SEQ ID NO: 1798919 - DNA, 25 bp, Homo sapien
gaccatgtgcaaatggccgtgctgg

SEQ ID NO: 1798920 - DNA, 25 bp, Homo sapien
tggccccagaatcttaatcacatca

SEQ ID NO: 1798921 - DNA, 25 bp, Homo sapien
catcatcgccaggattcccaaactg

SEQ ID NO: 1798922 - DNA, 25 bp, Homo sapien
gattcccaaactgcatgccgaggtg

SEQ ID NO: 1798923 - DNA, 25 bp, Homo sapien
actcctggaccataagctgttgtgc

SEQ ID NO: 1798924 - DNA, 25 bp, Homo sapien
gagagggctagagtcactaagagct

SEQ ID NO: 1798925 - DNA, 25 bp, Homo sapien
gaagattttttgattccacacagcc

SEQ ID NO: 1798926 - DNA, 25 bp, Homo sapien
tttttctccggccacattcagcaac

SEQ ID NO: 1798927 - DNA, 25 bp, Homo sapien
cacattcagcaacacaagtgcatgc

SEQ ID NO: 1798928 - DNA, 25 bp, Homo sapien
tgggcggctcacgaggtcagaagat

SEQ ID NO: 1798929 - DNA, 25 bp, Homo sapien
cgagaccagcctggccaacatgatg

SEQ ID NO: 1798930 - DNA, 25 bp, Homo sapien
ccaacatgatgaaaccccgtcccta

SEQ ID NO: 1798931 - DNA, 25 bp, Homo sapien
tggccaacatgatgaaaccccgtcc

SEQ ID NO: 1798932 - DNA, 25 bp, Homo sapien
gtatgcctccttgtgctacatgaga

SEQ ID NO: 1798933 - DNA, 25 bp, Homo sapien
tcagcaaagggtctagatgcccact

SEQ ID NO: 1798934 - DNA, 25 bp, Homo sapien
attcacacatactcctctagaagcc

SEQ ID NO: 1798935 - DNA, 25 bp, Homo sapien
tctagaagccatgtggtgcgaccca

SEQ ID NO: 1798936 - DNA, 25 bp, Homo sapien
tattactctaccttgctgtccctgt

SEQ ID NO: 1798937 - DNA, 25 bp, Homo sapien
ccatcccaaggaaagctgcgtgcct

SEQ ID NO: 1798938 - DNA, 25 bp, Homo sapien
tgtccacgggtatcatccactagag

SEQ ID NO: 1798939 - DNA, 25 bp, Homo sapien
ccactagaggctacatcctggagat

SEQ ID NO: 1798940 - DNA, 25 bp, Homo sapien
tgttcattcacacccggcttgccaa

SEQ ID NO: 1798941 - DNA, 25 bp, Homo sapien
aaagacaatagctcggcccacaaac

SEQ ID NO: 1798942 - DNA, 25 bp, Homo sapien
gcatcagcgagcgtctcctgctcat

SEQ ID NO: 1798943 - DNA, 25 bp, Homo sapien
atcacagaaggcatcagcgagcgtc

SEQ ID NO: 1798944 - DNA, 25 bp, Homo sapien
ccaggcagccgtacgcgtccgtgag

SEQ ID NO: 1798945 - DNA, 25 bp, Homo sapien
gtccgtgagcttgccatactgtcct

SEQ ID NO: 1798946 - DNA, 25 bp, Homo sapien
gtgagcttgccatactgtcctttaa

SEQ ID NO: 1798947 - DNA, 25 bp, Homo sapien
cgtacgcgtccgtgagcttgccata

SEQ ID NO: 1798948 - DNA, 25 bp, Homo sapien
agagagagaagagcggtcaaacaga

SEQ ID NO: 1798949 - DNA, 25 bp, Homo sapien
gcaaaactctatctcggagaaaaaa

SEQ ID NO: 1798950 - DNA, 25 bp, Homo sapien
actgaggccccttccgacacagagg

SEQ ID NO: 1798951 - DNA, 25 bp, Homo sapien
aagagcggtcaaacagaatgcctgc

SEQ ID NO: 1798952 - DNA, 25 bp, Homo sapien
agcaggtcccgaggcataaagaaac

SEQ ID NO: 1798953 - DNA, 25 bp, Homo sapien
gagcaggtcccgaggcataaagaaa

SEQ ID NO: 1798954 - DNA, 25 bp, Homo sapien
tggcagctttaaacatcctcagtct

SEQ ID NO: 1798955 - DNA, 25 bp, Homo sapien
aacgtaaccgtgcttttctggcagc

SEQ ID NO: 1798956 - DNA, 25 bp, Homo sapien
gaaatgatcactgtaatcgtcacag

SEQ ID NO: 1798957 - DNA, 25 bp, Homo sapien
gaattcagacaacccatacagccat

SEQ ID NO: 1798958 - DNA, 25 bp, Homo sapien
gggatttcctgcaacttcaggaaga

SEQ ID NO: 1798959 - DNA, 25 bp, Homo sapien
catcaccatggaaggcaagggccac

SEQ ID NO: 1798960 - DNA, 25 bp, Homo sapien
gccacagggatttcctgcaacttca

SEQ ID NO: 1798961 - DNA, 25 bp, Homo sapien
aagggccacagggatttcctgcaac

SEQ ID NO: 1798962 - DNA, 25 bp, Homo sapien
aacaagttcctaagtgagtcccatg

SEQ ID NO: 1798963 - DNA, 25 bp, Homo sapien
ttcctaagtgagtcccatgcaggtg

SEQ ID NO: 1798964 - DNA, 25 bp, Homo sapien
ttaacaagttcctaagtgagtccca

SEQ ID NO: 1798965 - DNA, 25 bp, Homo sapien
aagttcctaagtgagtcccatgcag

SEQ ID NO: 1798966 - DNA, 25 bp, Homo sapien
tagtctcaatgtcccctccaggtaa

SEQ ID NO: 1798967 - DNA, 25 bp, Homo sapien
tcccaggaggatgcgccaatagtct

SEQ ID NO: 1798968 - DNA, 25 bp, Homo sapien
caatttgttatcaggccaggaaagc

SEQ ID NO: 1798969 - DNA, 25 bp, Homo sapien
ttggagtcatgatacgtggcttgca

SEQ ID NO: 1798970 - DNA, 25 bp, Homo sapien
caaagtcattggatcacagccgctc

SEQ ID NO: 1798971 - DNA, 25 bp, Homo sapien
ctaacaatacttcaggcttcgggcc

SEQ ID NO: 1798972 - DNA, 25 bp, Homo sapien
aaatgctaccaagacgacctcggac

SEQ ID NO: 1798973 - DNA, 25 bp, Homo sapien
catcctctggaagaacacgagcgtc

SEQ ID NO: 1798974 - DNA, 25 bp, Homo sapien
aattctgcccacagatgtgcagcct

SEQ ID NO: 1798975 - DNA, 25 bp, Homo sapien
ttctgcccacagatgtgcagcctgt

SEQ ID NO: 1798976 - DNA, 25 bp, Homo sapien
gtgcagcctgtcaccaacaccagga

SEQ ID NO: 1798977 - DNA, 25 bp, Homo sapien
tggaattctgcccacagatgtgcag

SEQ ID NO: 1798978 - DNA, 25 bp, Homo sapien
cagtggcagtgattttgtagatttc

SEQ ID NO: 1798979 - DNA, 25 bp, Homo sapien
tctgcgtgcggacagtcaggtcaaa

SEQ ID NO: 1798980 - DNA, 25 bp, Homo sapien
tttcttcaaagctatgaggcgttcc

SEQ ID NO: 1798981 - DNA, 25 bp, Homo sapien
gagacccatcgtttggccatgagaa

SEQ ID NO: 1798982 - DNA, 25 bp, Homo sapien
gggtggtgcaagtggaggtcaaggc

SEQ ID NO: 1798983 - DNA, 25 bp, Homo sapien
tgggtcctaactctccagaggtgcc

SEQ ID NO: 1798984 - DNA, 25 bp, Homo sapien
tgagagcaggcctgggtcctaactc

SEQ ID NO: 1798985 - DNA, 25 bp, Homo sapien
caaatctacactgaacacattccag

SEQ ID NO: 1798986 - DNA, 25 bp, Homo sapien
ggccagatgaaaacctgtggctgcc

SEQ ID NO: 1798987 - DNA, 25 bp, Homo sapien
ccaaagcaccaaggccagatgaaaa

SEQ ID NO: 1798988 - DNA, 25 bp, Homo sapien
gcccagccttgattcacgtgcattt

SEQ ID NO: 1798989 - DNA, 25 bp, Homo sapien
ggtccccttcttccggcagaaatca

SEQ ID NO: 1798990 - DNA, 25 bp, Homo sapien
gccacagcgctcctctgcttgaaaa

SEQ ID NO: 1798991 - DNA, 25 bp, Homo sapien
tcatcgcaggccccattggtaaaaa

SEQ ID NO: 1798992 - DNA, 25 bp, Homo sapien
ttaaacaatcatgatcaataagtga

SEQ ID NO: 1798993 - DNA, 25 bp, Homo sapien
ttattattaaacaatcatgatcaat

SEQ ID NO: 1798994 - DNA, 25 bp, Homo sapien
catattaaatatgggaacagttatt

SEQ ID NO: 1798995 - DNA, 25 bp, Homo sapien
gcgcacggtgcagcatttcgggtca

SEQ ID NO: 1798996 - DNA, 25 bp, Homo sapien
tgctgcctggacagcgagtgtggct

SEQ ID NO: 1798997 - DNA, 25 bp, Homo sapien
gcagcatttcgggtcagcgaatgca

SEQ ID NO: 1798998 - DNA, 25 bp, Homo sapien
cacggtgcagcatttcgggtcagcg

SEQ ID NO: 1798999 - DNA, 25 bp, Homo sapien
ctggtgctgcctcaagggcacgtgc

SEQ ID NO: 1799000 - DNA, 25 bp, Homo sapien
ggtgctgcctcaagggcacgtgcaa

SEQ ID NO: 1799001 - DNA, 25 bp, Homo sapien
tgcctcaagggcacgtgcaacagct

SEQ ID NO: 1799002 - DNA, 25 bp, Homo sapien
caagggcacgtgcaacagctggttc

SEQ ID NO: 1799003 - DNA, 25 bp, Homo sapien
gcagatgatcttcagcagccagtca

SEQ ID NO: 1799004 - DNA, 25 bp, Homo sapien
ctgctctgtctccacgaagttggac

SEQ ID NO: 1799005 - DNA, 25 bp, Homo sapien
tgtgcgctcacagctaacgcgagag

SEQ ID NO: 1799006 - DNA, 25 bp, Homo sapien
cgtcgttcacgccacgggtgtggaa

SEQ ID NO: 1799007 - DNA, 25 bp, Homo sapien
cagtcaaagacttcatgacgaagat

SEQ ID NO: 1799008 - DNA, 25 bp, Homo sapien
atttacataatagcctcgttgatat

SEQ ID NO: 1799009 - DNA, 25 bp, Homo sapien
tacataatagcctcgttgatatcca

SEQ ID NO: 1799010 - DNA, 25 bp, Homo sapien
atagcctcgttgatatccacagtgc

SEQ ID NO: 1799011 - DNA, 25 bp, Homo sapien
gaagagaggaatcaaactatccctg

SEQ ID NO: 1799012 - DNA, 25 bp, Homo sapien
gatccacaatcctcaaactaataag

SEQ ID NO: 1799013 - DNA, 25 bp, Homo sapien
ccttaacctgataaacagcttcggc

SEQ ID NO: 1799014 - DNA, 25 bp, Homo sapien
aaacagcttcggcaaagtctcagaa

SEQ ID NO: 1799015 - DNA, 25 bp, Homo sapien
tgggtccctgatccagtacgactgg

SEQ ID NO: 1799016 - DNA, 25 bp, Homo sapien
gaggcaatgtcaacagcatcgggct

SEQ ID NO: 1799017 - DNA, 25 bp, Homo sapien
taagtgtgttgttttcggccaccca

SEQ ID NO: 1799018 - DNA, 25 bp, Homo sapien
tctgagctctaacaagcaggctggc

SEQ ID NO: 1799019 - DNA, 25 bp, Homo sapien
tgctgaaggcccacgtggacagccc

SEQ ID NO: 1799020 - DNA, 25 bp, Homo sapien
ggtctccgatggatgggccagccca

SEQ ID NO: 1799021 - DNA, 25 bp, Homo sapien
tagccaggctgtccggggtctccga

SEQ ID NO: 1799022 - DNA, 25 bp, Homo sapien
ctggactcagcgctgggaagtgaca

SEQ ID NO: 1799023 - DNA, 25 bp, Homo sapien
tctacaggagcacgttaaaggtctc

SEQ ID NO: 1799024 - DNA, 25 bp, Homo sapien
gaggccacgctgtgctaccagaatg

SEQ ID NO: 1799025 - DNA, 25 bp, Homo sapien
tatggagagctcatgacaccgtccc

SEQ ID NO: 1799026 - DNA, 25 bp, Homo sapien
tttggcttggaggaatgctgacccc

SEQ ID NO: 1799027 - DNA, 25 bp, Homo sapien
acagccgcctgtgtgcacgctccac

SEQ ID NO: 1799028 - DNA, 25 bp, Homo sapien
tttgtttgccagacgatgaccgcac

SEQ ID NO: 1799029 - DNA, 25 bp, Homo sapien
tcatttgtttgccagacgatgaccg

SEQ ID NO: 1799030 - DNA, 25 bp, Homo sapien
gtttgccagacgatgaccgcacagc

SEQ ID NO: 1799031 - DNA, 25 bp, Homo sapien
gagccagtctgctcctggtccggtc

SEQ ID NO: 1799032 - DNA, 25 bp, Homo sapien
ggagccagtctgctcctggtccggt

SEQ ID NO: 1799033 - DNA, 25 bp, Homo sapien
cacagggagccagtctgctcctggt

SEQ ID NO: 1799034 - DNA, 25 bp, Homo sapien
agggagccagtctgctcctggtccg

SEQ ID NO: 1799035 - DNA, 25 bp, Homo sapien
gaggctgagatgctatctacacatg

SEQ ID NO: 1799036 - DNA, 25 bp, Homo sapien
tcagcagagccaaaaagactcaagg

SEQ ID NO: 1799037 - DNA, 25 bp, Homo sapien
tctggcttcctgagaattaattcct

SEQ ID NO: 1799038 - DNA, 25 bp, Homo sapien
taattcctaagaagccgatccgcct

SEQ ID NO: 1799039 - DNA, 25 bp, Homo sapien
ccaatgcccacgatctatttaggct

SEQ ID NO: 1799040 - DNA, 25 bp, Homo sapien
tatttaggctgaggaatgtctccct

SEQ ID NO: 1799041 - DNA, 25 bp, Homo sapien
agtgactcacgcctacggtcccacc

SEQ ID NO: 1799042 - DNA, 25 bp, Homo sapien
gactgccccaagtgctaacaatgcc

SEQ ID NO: 1799043 - DNA, 25 bp, Homo sapien
agtcattctgcagtggaggacctga

SEQ ID NO: 1799044 - DNA, 25 bp, Homo sapien
gaggacctgaaaattagagccactg

SEQ ID NO: 1799045 - DNA, 25 bp, Homo sapien
gcgagatcacgctcagatcacacag

SEQ ID NO: 1799046 - DNA, 25 bp, Homo sapien
caggagcctggtatctacattgtca

SEQ ID NO: 1799047 - DNA, 25 bp, Homo sapien
caggcggcgacacttatcagatgcg

SEQ ID NO: 1799048 - DNA, 25 bp, Homo sapien
ggcctccaatgacgctggagtgcaa

SEQ ID NO: 1799049 - DNA, 25 bp, Homo sapien
gacaagaagtacgatcctgagcgcc

SEQ ID NO: 1799050 - DNA, 25 bp, Homo sapien
agatgcggggcctttatctgcgcaa

SEQ ID NO: 1799051 - DNA, 25 bp, Homo sapien
ctctcgccaggtactgggcgggcat

SEQ ID NO: 1799052 - DNA, 25 bp, Homo sapien
tctgctcccccatccggcaatgcgc

SEQ ID NO: 1799053 - DNA, 25 bp, Homo sapien
aatgaagggcggacggtggactccg

SEQ ID NO: 1799054 - DNA, 25 bp, Homo sapien
cggacggtggactccggcgtcctct

SEQ ID NO: 1799055 - DNA, 25 bp, Homo sapien
cagccagaatgaagggcggacggtg

SEQ ID NO: 1799056 - DNA, 25 bp, Homo sapien
cctggctgttcccagaacagcggaa

SEQ ID NO: 1799057 - DNA, 25 bp, Homo sapien
cagaacagcggaacggagcctctga

SEQ ID NO: 1799058 - DNA, 25 bp, Homo sapien
gacactccatcgtccatgtaaatca

SEQ ID NO: 1799059 - DNA, 25 bp, Homo sapien
aaaagatgacactccatcgtccatg

SEQ ID NO: 1799060 - DNA, 25 bp, Homo sapien
tttgatgatgagtggtgtttagagg

SEQ ID NO: 1799061 - DNA, 25 bp, Homo sapien
ctttgatgatgagtggtgtttagag

SEQ ID NO: 1799062 - DNA, 25 bp, Homo sapien
cagttgaagccggtgacggtagacc

SEQ ID NO: 1799063 - DNA, 25 bp, Homo sapien
tgatagtgacagttgaagccggtga

SEQ ID NO: 1799064 - DNA, 25 bp, Homo sapien
gccggtgacggtagaccaccacttc

SEQ ID NO: 1799065 - DNA, 25 bp, Homo sapien
ccggccccctgtgaagatgacttca

SEQ ID NO: 1799066 - DNA, 25 bp, Homo sapien
ttggcaaggcacgtgtctatacagc

SEQ ID NO: 1799067 - DNA, 25 bp, Homo sapien
tcgtgggcaccaattcgactcttgc

SEQ ID NO: 1799068 - DNA, 25 bp, Homo sapien
gcttggcacagataagagcctctca

SEQ ID NO: 1799069 - DNA, 25 bp, Homo sapien
ggaaggtacaaacacacaagcccat

SEQ ID NO: 1799070 - DNA, 25 bp, Homo sapien
ggtgatgacacctaaccagaacccc

SEQ ID NO: 1799071 - DNA, 25 bp, Homo sapien
tccgagtcaacatgccattgggtgt

SEQ ID NO: 1799072 - DNA, 25 bp, Homo sapien
gatgggagacgctgaatcccctggc

SEQ ID NO: 1799073 - DNA, 25 bp, Homo sapien
tgcactatcagtcagcagtccattc

SEQ ID NO: 1799074 - DNA, 25 bp, Homo sapien
caggcctctgtggagtctcagatga

SEQ ID NO: 1799075 - DNA, 25 bp, Homo sapien
ctgtcgaaagcaggggcattggctt

SEQ ID NO: 1799076 - DNA, 25 bp, Homo sapien
ggcctctgtggagtctcagatgatg

SEQ ID NO: 1799077 - DNA, 25 bp, Homo sapien
gggcattggcttccaggcctctgtg

SEQ ID NO: 1799078 - DNA, 25 bp, Homo sapien
taaccagggcatagagatgaagcct

SEQ ID NO: 1799079 - DNA, 25 bp, Homo sapien
gcagctttagattcagggttcaggg

SEQ ID NO: 1799080 - DNA, 25 bp, Homo sapien
caggcttggatggtgtcagacaatc

SEQ ID NO: 1799081 - DNA, 25 bp, Homo sapien
tagatgatcccttattaaccagggc

SEQ ID NO: 1799082 - DNA, 25 bp, Homo sapien
tgtgatttgcagaagagatctaagt

SEQ ID NO: 1799083 - DNA, 25 bp, Homo sapien
cctgtgatttgcagaagagatctaa

SEQ ID NO: 1799084 - DNA, 25 bp, Homo sapien
gatttgcagaagagatctaagtgta

SEQ ID NO: 1799085 - DNA, 25 bp, Homo sapien
ttgcagaagagatctaagtgtaccc

SEQ ID NO: 1799086 - DNA, 25 bp, Homo sapien
caaatcgtggaaaatgagcctgggt

SEQ ID NO: 1799087 - DNA, 25 bp, Homo sapien
gaatcagacaaaggatatgctgcac

SEQ ID NO: 1799088 - DNA, 25 bp, Homo sapien
gagtcatgctttcttagtgccacag

SEQ ID NO: 1799089 - DNA, 25 bp, Homo sapien
gctgccattactactagctagcgta

SEQ ID NO: 1799090 - DNA, 25 bp, Homo sapien
cagaaggttcacgaccacctgctgc

SEQ ID NO: 1799091 - DNA, 25 bp, Homo sapien
tgctgcccgtactgctccttcagaa

SEQ ID NO: 1799092 - DNA, 25 bp, Homo sapien
gaaggttcacgaccacctgctgccc

SEQ ID NO: 1799093 - DNA, 25 bp, Homo sapien
gctgcccgtactgctccttcagaag

SEQ ID NO: 1799094 - DNA, 25 bp, Homo sapien
tgtggagaggacagcctggccttac

SEQ ID NO: 1799095 - DNA, 25 bp, Homo sapien
tcaacgctccaccatggccacctgc

SEQ ID NO: 1799096 - DNA, 25 bp, Homo sapien
ccgcccagcccagctgtggagagga

SEQ ID NO: 1799097 - DNA, 25 bp, Homo sapien
cccagcccagctgtggagaggacag

SEQ ID NO: 1799098 - DNA, 25 bp, Homo sapien
tcactgagcactgccgtgttcactg

SEQ ID NO: 1799099 - DNA, 25 bp, Homo sapien
gaagcctcaggaaacgaaggagggc

SEQ ID NO: 1799100 - DNA, 25 bp, Homo sapien
ctggtcggaatgctggggaagcctc

SEQ ID NO: 1799101 - DNA, 25 bp, Homo sapien
ctcaggaaacgaaggagggctgggc

SEQ ID NO: 1799102 - DNA, 25 bp, Homo sapien
cctggagagatcatactcctgcagg

SEQ ID NO: 1799103 - DNA, 25 bp, Homo sapien
tcctggagagatcatactcctgcag

SEQ ID NO: 1799104 - DNA, 25 bp, Homo sapien
tgcggctaaccaaggtgactcgccg

SEQ ID NO: 1799105 - DNA, 25 bp, Homo sapien
agagcttgacccgtgcggctaacca

SEQ ID NO: 1799106 - DNA, 25 bp, Homo sapien
ccttgcagagcttgacccgtgcggc

SEQ ID NO: 1799107 - DNA, 25 bp, Homo sapien
tgacccgtgcggctaaccaaggtga

SEQ ID NO: 1799108 - DNA, 25 bp, Homo sapien
gtgtcgcccgcgtggcaagaagccc

SEQ ID NO: 1799109 - DNA, 25 bp, Homo sapien
caaaattgatcataggcgtgtcgcc

SEQ ID NO: 1799110 - DNA, 25 bp, Homo sapien
cccgcgtggcaagaagcccagagca

SEQ ID NO: 1799111 - DNA, 25 bp, Homo sapien
tcataggcgtgtcgcccgcgtggca

SEQ ID NO: 1799112 - DNA, 25 bp, Homo sapien
acacatcgaagtcttcccagtgcag

SEQ ID NO: 1799113 - DNA, 25 bp, Homo sapien
tgcagctttaactgtggcctcaaga

SEQ ID NO: 1799114 - DNA, 25 bp, Homo sapien
tttgtgaacacatcgaagtcttccc

SEQ ID NO: 1799115 - DNA, 25 bp, Homo sapien
tcccagtgcagctttaactgtggcc

SEQ ID NO: 1799116 - DNA, 25 bp, Homo sapien
gtggactgacgcttccccccagcag

SEQ ID NO: 1799117 - DNA, 25 bp, Homo sapien
cagaagacgcggcacagtgcgcagc

SEQ ID NO: 1799118 - DNA, 25 bp, Homo sapien
ccccagcagaagacgcggcacagtg

SEQ ID NO: 1799119 - DNA, 25 bp, Homo sapien
acgcggcacagtgcgcagcgagcct

SEQ ID NO: 1799120 - DNA, 25 bp, Homo sapien
caagacagttcatccgcaaagtgcc

SEQ ID NO: 1799121 - DNA, 25 bp, Homo sapien
ctcgagcgcgatgaagctctgcaca

SEQ ID NO: 1799122 - DNA, 25 bp, Homo sapien
gcgcgatgaagctctgcacagtgtt

SEQ ID NO: 1799123 - DNA, 25 bp, Homo sapien
gcacagtgttggttcggtccaggca

SEQ ID NO: 1799124 - DNA, 25 bp, Homo sapien
tctgctgcctgtgaacaccttgctc

SEQ ID NO: 1799125 - DNA, 25 bp, Homo sapien
ggactccacaaagcggtcaacgatg

SEQ ID NO: 1799126 - DNA, 25 bp, Homo sapien
gagaccacatggctttgaaggactc

SEQ ID NO: 1799127 - DNA, 25 bp, Homo sapien
gtcaacgatgggttttgaactcagc

SEQ ID NO: 1799128 - DNA, 25 bp, Homo sapien
ttcgagacatggaccgggctccatc

SEQ ID NO: 1799129 - DNA, 25 bp, Homo sapien
tggactggatggttcgagacatgga

SEQ ID NO: 1799130 - DNA, 25 bp, Homo sapien
atggttcgagacatggaccgggctc

SEQ ID NO: 1799131 - DNA, 25 bp, Homo sapien
tcgccgtagacgtccccaaccagca

SEQ ID NO: 1799132 - DNA, 25 bp, Homo sapien
tcgccctgtctgcggcaggccctac

SEQ ID NO: 1799133 - DNA, 25 bp, Homo sapien
ctcgccctgtctgcggcaggcccta

SEQ ID NO: 1799134 - DNA, 25 bp, Homo sapien
cctcgccctgtctgcggcaggccct

SEQ ID NO: 1799135 - DNA, 25 bp, Homo sapien
agcctgcatgtctgatatgttttgt

SEQ ID NO: 1799136 - DNA, 25 bp, Homo sapien
ccagcctgcatgtctgatatgtttt

SEQ ID NO: 1799137 - DNA, 25 bp, Homo sapien
tccagcctgcatgtctgatatgttt

SEQ ID NO: 1799138 - DNA, 25 bp, Homo sapien
cttccagcctgcatgtctgatatgt

SEQ ID NO: 1799139 - DNA, 25 bp, Homo sapien
tgtcaggaggcataaaaaggcacat

SEQ ID NO: 1799140 - DNA, 25 bp, Homo sapien
cacatttctttgcagttccaaagct

SEQ ID NO: 1799141 - DNA, 25 bp, Homo sapien
acatttctttgcagttccaaagctc

SEQ ID NO: 1799142 - DNA, 25 bp, Homo sapien
gtcaggaggcataaaaaggcacatt

SEQ ID NO: 1799143 - DNA, 25 bp, Homo sapien
gaaatttgtgaattcggactgacgc

SEQ ID NO: 1799144 - DNA, 25 bp, Homo sapien
aatccggatccgcttgaaatttgtg

SEQ ID NO: 1799145 - DNA, 25 bp, Homo sapien
tgctttcctccgttcacgttccagg

SEQ ID NO: 1799146 - DNA, 25 bp, Homo sapien
tccaggtccccatagcaatccggat

SEQ ID NO: 1799147 - DNA, 25 bp, Homo sapien
tgggagtcggtagctcccgagagct

SEQ ID NO: 1799148 - DNA, 25 bp, Homo sapien
ctgggagtcggtagctcccgagagc

SEQ ID NO: 1799149 - DNA, 25 bp, Homo sapien
ttagacattgtgaggagggaagaca

SEQ ID NO: 1799150 - DNA, 25 bp, Homo sapien
catgtcaggttaggtgcaattggat

SEQ ID NO: 1799151 - DNA, 25 bp, Homo sapien
cgatggccactaaagggtcaagcgt

SEQ ID NO: 1799152 - DNA, 25 bp, Homo sapien
tgaaattccacaagacgatggccac

SEQ ID NO: 1799153 - DNA, 25 bp, Homo sapien
ttttgtgactacttaaagcagatta

SEQ ID NO: 1799154 - DNA, 25 bp, Homo sapien
aaaaggtgaggtgtcaacatttgga

SEQ ID NO: 1799155 - DNA, 25 bp, Homo sapien
gctgttcttggtcaatatcaacact

SEQ ID NO: 1799156 - DNA, 25 bp, Homo sapien
atttattcttcagatcctaagttct

SEQ ID NO: 1799157 - DNA, 25 bp, Homo sapien
ggcattgacaatattccctgcgctc

SEQ ID NO: 1799158 - DNA, 25 bp, Homo sapien
cattgacaatattccctgcgctcaa

SEQ ID NO: 1799159 - DNA, 25 bp, Homo sapien
tgacaatattccctgcgctcaattc

SEQ ID NO: 1799160 - DNA, 25 bp, Homo sapien
acaatattccctgcgctcaattcca

SEQ ID NO: 1799161 - DNA, 25 bp, Homo sapien
ctgatgaacgggacatggtatggac

SEQ ID NO: 1799162 - DNA, 25 bp, Homo sapien
tgtgccgaagtcaacagaatgtatc

SEQ ID NO: 1799163 - DNA, 25 bp, Homo sapien
aaagatataaagacagacgcccacc

SEQ ID NO: 1799164 - DNA, 25 bp, Homo sapien
tctatgagagcgtgagatggctttc

SEQ ID NO: 1799165 - DNA, 25 bp, Homo sapien
tatgggcagcatagtcttagtctcc

SEQ ID NO: 1799166 - DNA, 25 bp, Homo sapien
ggaggtcagttcaacgcctgctgcc

SEQ ID NO: 1799167 - DNA, 25 bp, Homo sapien
taagatgaggccaaccacaagctgg

SEQ ID NO: 1799168 - DNA, 25 bp, Homo sapien
gagggacagggacctaaacatcttc

SEQ ID NO: 1799169 - DNA, 25 bp, Homo sapien
gggctgcaagcacatttgttaacat

SEQ ID NO: 1799170 - DNA, 25 bp, Homo sapien
gagtccatagaaacatgggctgcaa

SEQ ID NO: 1799171 - DNA, 25 bp, Homo sapien
tggaaggggtgtaggcggaagcagc

SEQ ID NO: 1799172 - DNA, 25 bp, Homo sapien
tccatagaaacatgggctgcaagca

SEQ ID NO: 1799173 - DNA, 25 bp, Homo sapien
tcttcactgtgtcgatggctacgtc

SEQ ID NO: 1799174 - DNA, 25 bp, Homo sapien
cttcactgtgtcgatggctacgtcc

SEQ ID NO: 1799175 - DNA, 25 bp, Homo sapien
gcccgtcttcactgtgtcgatggct

SEQ ID NO: 1799176 - DNA, 25 bp, Homo sapien
cgtcttcactgtgtcgatggctacg

SEQ ID NO: 1799177 - DNA, 25 bp, Homo sapien
tgtagtcttcattccgctccttcac

SEQ ID NO: 1799178 - DNA, 25 bp, Homo sapien
gtgactacatatgaagcagaagctg

SEQ ID NO: 1799179 - DNA, 25 bp, Homo sapien
cagagtttctgggtgatctccttgt

SEQ ID NO: 1799180 - DNA, 25 bp, Homo sapien
gaactggaagcggatgccgacggcg

SEQ ID NO: 1799181 - DNA, 25 bp, Homo sapien
gacactcaggaattgtacagcaacg

SEQ ID NO: 1799182 - DNA, 25 bp, Homo sapien
tcacttcgggaaagaggtggcctcg

SEQ ID NO: 1799183 - DNA, 25 bp, Homo sapien
tcacatttgggactgagctgagcag

SEQ ID NO: 1799184 - DNA, 25 bp, Homo sapien
tgagtgctcgtgcagcccagtaaaa

SEQ ID NO: 1799185 - DNA, 25 bp, Homo sapien
aagtagctatttttaagtgagaagg

SEQ ID NO: 1799186 - DNA, 25 bp, Homo sapien
caaagtagctatttttaagtgagaa

SEQ ID NO: 1799187 - DNA, 25 bp, Homo sapien
agtagctatttttaagtgagaaggg

SEQ ID NO: 1799188 - DNA, 25 bp, Homo sapien
cccaaagtagctatttttaagtgag

SEQ ID NO: 1799189 - DNA, 25 bp, Homo sapien
taggtccctcaatatttttatggta

SEQ ID NO: 1799190 - DNA, 25 bp, Homo sapien
gaagacttcttcataagtaagatca

SEQ ID NO: 1799191 - DNA, 25 bp, Homo sapien
tcttcataagtaagatcaatgcggt

SEQ ID NO: 1799192 - DNA, 25 bp, Homo sapien
tcaatgcggtagttgaaatcgccac

SEQ ID NO: 1799193 - DNA, 25 bp, Homo sapien
tcttccagtcttggcgtttaacaaa

SEQ ID NO: 1799194 - DNA, 25 bp, Homo sapien
tggctccttcgtgaaagtccttaaa

SEQ ID NO: 1799195 - DNA, 25 bp, Homo sapien
tcgcttgtatcgtaggcggctgagc

SEQ ID NO: 1799196 - DNA, 25 bp, Homo sapien
cttgtaggtgggtccaaagttaatg

SEQ ID NO: 1799197 - DNA, 25 bp, Homo sapien
gcggctgagccaacgtcatacttgt

SEQ ID NO: 1799198 - DNA, 25 bp, Homo sapien
cctctgccgactctcgaacgggcac

SEQ ID NO: 1799199 - DNA, 25 bp, Homo sapien
gccgactctcgaacgggcacggccc

SEQ ID NO: 1799200 - DNA, 25 bp, Homo sapien
tctgccgactctcgaacgggcacgg

SEQ ID NO: 1799201 - DNA, 25 bp, Homo sapien
ctgccgactctcgaacgggcacggc

SEQ ID NO: 1799202 - DNA, 25 bp, Homo sapien
taaggtctgggatgacttttgtgtc

SEQ ID NO: 1799203 - DNA, 25 bp, Homo sapien
ctccctgaaagcacaacttccaaag

SEQ ID NO: 1799204 - DNA, 25 bp, Homo sapien
gactctccctccgtcgcatttctta

SEQ ID NO: 1799205 - DNA, 25 bp, Homo sapien
actgatttatgtagcagcgcctggg

SEQ ID NO: 1799206 - DNA, 25 bp, Homo sapien
tgtcttgctcgtgtccaatttggaa

SEQ ID NO: 1799207 - DNA, 25 bp, Homo sapien
tcctagctgggcatcaacagttgtt

SEQ ID NO: 1799208 - DNA, 25 bp, Homo sapien
gctatgctctcccaaaatgtgtaat

SEQ ID NO: 1799209 - DNA, 25 bp, Homo sapien
gaacactcggactcattctaggccc

SEQ ID NO: 1799210 - DNA, 25 bp, Homo sapien
tgaagccaggcttcggatgctttgg

SEQ ID NO: 1799211 - DNA, 25 bp, Homo sapien
ggaatcccagaaggttggcagcaat

SEQ ID NO: 1799212 - DNA, 25 bp, Homo sapien
cacagtgttgctgccgggtttccag

SEQ ID NO: 1799213 - DNA, 25 bp, Homo sapien
aaaacagtcatgaccatgcctgcag

SEQ ID NO: 1799214 - DNA, 25 bp, Homo sapien
agaatcgagtcaatatccaagaatg

SEQ ID NO: 1799215 - DNA, 25 bp, Homo sapien
acacttccacaatagaggtctgcgc

SEQ ID NO: 1799216 - DNA, 25 bp, Homo sapien
caagaatgcgatcatgacacttcca

SEQ ID NO: 1799217 - DNA, 25 bp, Homo sapien
ggttccattcgagagacccatatag

SEQ ID NO: 1799218 - DNA, 25 bp, Homo sapien
caccaggagaccaggtgtgtctgac

SEQ ID NO: 1799219 - DNA, 25 bp, Homo sapien
ttggtgtcaacatctagatcactgt

SEQ ID NO: 1799220 - DNA, 25 bp, Homo sapien
aggtgtgtctgactttggtgtcaac

SEQ ID NO: 1799221 - DNA, 25 bp, Homo sapien
agggcaccaggagaccaggtgtgtc

SEQ ID NO: 1799222 - DNA, 25 bp, Homo sapien
acgcttgtagctccgcacgaccata

SEQ ID NO: 1799223 - DNA, 25 bp, Homo sapien
tgtgatcagacgcttgtagctccgc

SEQ ID NO: 1799224 - DNA, 25 bp, Homo sapien
atcagacgcttgtagctccgcacga

SEQ ID NO: 1799225 - DNA, 25 bp, Homo sapien
cttgtagctccgcacgaccataata

SEQ ID NO: 1799226 - DNA, 25 bp, Homo sapien
cattttcctgcggagagggagacgc

SEQ ID NO: 1799227 - DNA, 25 bp, Homo sapien
gacatgagagtttaggcagcagcct

SEQ ID NO: 1799228 - DNA, 25 bp, Homo sapien
ttacaaatgaatgcaccagagctat

SEQ ID NO: 1799229 - DNA, 25 bp, Homo sapien
gaaaacgccatggaagtcaggacct

SEQ ID NO: 1799230 - DNA, 25 bp, Homo sapien
ggtaatcctcagtaccaccaaggag

SEQ ID NO: 1799231 - DNA, 25 bp, Homo sapien
ggcaccttaaagatgtatcccagta

SEQ ID NO: 1799232 - DNA, 25 bp, Homo sapien
tcagagggttacttggcactttaca

SEQ ID NO: 1799233 - DNA, 25 bp, Homo sapien
aacaacctgcgaatgtggccaccag

SEQ ID NO: 1799234 - DNA, 25 bp, Homo sapien
tctcttctaaggtcggtgattgaag

SEQ ID NO: 1799235 - DNA, 25 bp, Homo sapien
tttactacaacagtggcatccaggg

SEQ ID NO: 1799236 - DNA, 25 bp, Homo sapien
cgcaggtcctctggaaactcgtttt

SEQ ID NO: 1799237 - DNA, 25 bp, Homo sapien
ctcagtacgcaggtcctctggaaac

SEQ ID NO: 1799238 - DNA, 25 bp, Homo sapien
tgacaagaacaattgtcccataact

SEQ ID NO: 1799239 - DNA, 25 bp, Homo sapien
ctgacaagaacaattgtcccataac

SEQ ID NO: 1799240 - DNA, 25 bp, Homo sapien
gagagccgagtgactgtctgcaaaa

SEQ ID NO: 1799241 - DNA, 25 bp, Homo sapien
tcataccgtccacgtccaggacact

SEQ ID NO: 1799242 - DNA, 25 bp, Homo sapien
ggacactgagagccgagtgactgtc

SEQ ID NO: 1799243 - DNA, 25 bp, Homo sapien
cactgagagccgagtgactgtctgc

SEQ ID NO: 1799244 - DNA, 25 bp, Homo sapien
gaagtcaaagttttcctccagcaaa

SEQ ID NO: 1799245 - DNA, 25 bp, Homo sapien
catgctgtctcgtttccgaatgatc

SEQ ID NO: 1799246 - DNA, 25 bp, Homo sapien
gccagtccttggtcttcggtctaat

SEQ ID NO: 1799247 - DNA, 25 bp, Homo sapien
tgactcatagtccaaacttgtgaag

SEQ ID NO: 1799248 - DNA, 25 bp, Homo sapien
ccaccaagtagtcttcatcgtcttc

SEQ ID NO: 1799249 - DNA, 25 bp, Homo sapien
gaattcatccaccaagtagtcttca

SEQ ID NO: 1799250 - DNA, 25 bp, Homo sapien
aggctgattgaattcatccaccaag

SEQ ID NO: 1799251 - DNA, 25 bp, Homo sapien
atcagagaggtcgtctcccccgagt

SEQ ID NO: 1799252 - DNA, 25 bp, Homo sapien
gattgacagctagaggcatgcctgg

SEQ ID NO: 1799253 - DNA, 25 bp, Homo sapien
gagctgtcctccaactcggggctca

SEQ ID NO: 1799254 - DNA, 25 bp, Homo sapien
aactcggggctcagtgattgacagc

SEQ ID NO: 1799255 - DNA, 25 bp, Homo sapien
tgtcctccaactcggggctcagtga

SEQ ID NO: 1799256 - DNA, 25 bp, Homo sapien
ctgagcacaggaggccgactgtggc

SEQ ID NO: 1799257 - DNA, 25 bp, Homo sapien
acctgctgtaggacagctgaaggct

SEQ ID NO: 1799258 - DNA, 25 bp, Homo sapien
ctgctgtaggacagctgaaggctct

SEQ ID NO: 1799259 - DNA, 25 bp, Homo sapien
gcacaggaggccgactgtggcaggg

SEQ ID NO: 1799260 - DNA, 25 bp, Homo sapien
acacgtgagcgtgtcagacacggat

SEQ ID NO: 1799261 - DNA, 25 bp, Homo sapien
tggcggggcatgagtacaatggtct

SEQ ID NO: 1799262 - DNA, 25 bp, Homo sapien
atggcggggcatgagtacaatggtc

SEQ ID NO: 1799263 - DNA, 25 bp, Homo sapien
tctgttccacacgtgagcgtgtcag

SEQ ID NO: 1799264 - DNA, 25 bp, Homo sapien
gaccgacagagacctgctcggagaa

SEQ ID NO: 1799265 - DNA, 25 bp, Homo sapien
gctcggagaacggtggcggaactcc

SEQ ID NO: 1799266 - DNA, 25 bp, Homo sapien
ggaactccccgacggcttccagctc

SEQ ID NO: 1799267 - DNA, 25 bp, Homo sapien
tctctgcgggggttgaggtggccga

SEQ ID NO: 1799268 - DNA, 25 bp, Homo sapien
tcttgccgtctgcaaaattgaatac

SEQ ID NO: 1799269 - DNA, 25 bp, Homo sapien
ggagatggacgcatctgaagccgac

SEQ ID NO: 1799270 - DNA, 25 bp, Homo sapien
gctcctggtagaagtcttgccgtct

SEQ ID NO: 1799271 - DNA, 25 bp, Homo sapien
aatactgtccatgggtgccggagga

SEQ ID NO: 1799272 - DNA, 25 bp, Homo sapien
gcaaaacccttgggattgaaatgta

SEQ ID NO: 1799273 - DNA, 25 bp, Homo sapien
aagagagatcccacactatcccggg

SEQ ID NO: 1799274 - DNA, 25 bp, Homo sapien
caaaacccttgggattgaaatgtat

SEQ ID NO: 1799275 - DNA, 25 bp, Homo sapien
gatcccacactatcccgggggcaaa

SEQ ID NO: 1799276 - DNA, 25 bp, Homo sapien
tcactactgtaaaacactggcctcc

SEQ ID NO: 1799277 - DNA, 25 bp, Homo sapien
aataaccaggtgaaagccagaaagc

SEQ ID NO: 1799278 - DNA, 25 bp, Homo sapien
ccatggtcccactgagttgttaaaa

SEQ ID NO: 1799279 - DNA, 25 bp, Homo sapien
aagaggccactctttccatggtccc

SEQ ID NO: 1799280 - DNA, 25 bp, Homo sapien
gatctgcttgacattataaggttta

SEQ ID NO: 1799281 - DNA, 25 bp, Homo sapien
tacttattccagtccgagccttggg

SEQ ID NO: 1799282 - DNA, 25 bp, Homo sapien
ggagacaccggattgctgcttctgc

SEQ ID NO: 1799283 - DNA, 25 bp, Homo sapien
gagacaccggattgctgcttctgcc

SEQ ID NO: 1799284 - DNA, 25 bp, Homo sapien
ttccattgtattgatggaccacatt

SEQ ID NO: 1799285 - DNA, 25 bp, Homo sapien
catttatcagctgatggacacttgg

SEQ ID NO: 1799286 - DNA, 25 bp, Homo sapien
acaatattccattgtattgatggac

SEQ ID NO: 1799287 - DNA, 25 bp, Homo sapien
gacacttgggttgttatatccatag

SEQ ID NO: 1799288 - DNA, 25 bp, Homo sapien
cctgggctcatgcagtcttcttacc

SEQ ID NO: 1799289 - DNA, 25 bp, Homo sapien
tcctgggctcatgcagtcttcttac

SEQ ID NO: 1799290 - DNA, 25 bp, Homo sapien
tgggctcatgcagtcttcttacctc

SEQ ID NO: 1799291 - DNA, 25 bp, Homo sapien
ggctcatgcagtcttcttacctcag

SEQ ID NO: 1799292 - DNA, 25 bp, Homo sapien
ccacggcacttagggcttcttcgga

SEQ ID NO: 1799293 - DNA, 25 bp, Homo sapien
gcacttagggcttcttcggaggcac

SEQ ID NO: 1799294 - DNA, 25 bp, Homo sapien
ttcaaggtcccttggggccacggca

SEQ ID NO: 1799295 - DNA, 25 bp, Homo sapien
ccttggggccacggcacttagggct

SEQ ID NO: 1799296 - DNA, 25 bp, Homo sapien
cttctcaaggttggcttcttgatgg

SEQ ID NO: 1799297 - DNA, 25 bp, Homo sapien
tgtggggtctctggtttggctgccc

SEQ ID NO: 1799298 - DNA, 25 bp, Homo sapien
aacacagaccacacgcaaatgggcg

SEQ ID NO: 1799299 - DNA, 25 bp, Homo sapien
caaatgggcggtaccagaacatgtg

SEQ ID NO: 1799300 - DNA, 25 bp, Homo sapien
ctgtgtctgggactcatgaacgtga

SEQ ID NO: 1799301 - DNA, 25 bp, Homo sapien
tgtgccagacagtggactcctcgtt

SEQ ID NO: 1799302 - DNA, 25 bp, Homo sapien
cttgagagcgagagcaaaaaacaat

SEQ ID NO: 1799303 - DNA, 25 bp, Homo sapien
tgagaagcttgagagcgagagcaaa

SEQ ID NO: 1799304 - DNA, 25 bp, Homo sapien
ctttgaagcagtaagcaaggctgag

SEQ ID NO: 1799305 - DNA, 25 bp, Homo sapien
tcatgtctttgaagcagtaagcaag

SEQ ID NO: 1799306 - DNA, 25 bp, Homo sapien
tcaaacggaagatccagatgtgtct

SEQ ID NO: 1799307 - DNA, 25 bp, Homo sapien
ccagatgtgtctacagatgccagtc

SEQ ID NO: 1799308 - DNA, 25 bp, Homo sapien
gaagatccagatgtgtctacagatg

SEQ ID NO: 1799309 - DNA, 25 bp, Homo sapien
gtgtctacagatgccagtctttggg

SEQ ID NO: 1799310 - DNA, 25 bp, Homo sapien
tgagtgtgttcaaggtcagcgagac

SEQ ID NO: 1799311 - DNA, 25 bp, Homo sapien
gagggtccgttactagaacactgag

SEQ ID NO: 1799312 - DNA, 25 bp, Homo sapien
tcagcgagaccatgacgtttgctag

SEQ ID NO: 1799313 - DNA, 25 bp, Homo sapien
caagcgctgtcaagagtgaagccga

SEQ ID NO: 1799314 - DNA, 25 bp, Homo sapien
gagtgtaaataagaagccaataact

SEQ ID NO: 1799315 - DNA, 25 bp, Homo sapien
aggtgggacaaagagtgtaaataag

SEQ ID NO: 1799316 - DNA, 25 bp, Homo sapien
aaataagaagccaataactaggcag

SEQ ID NO: 1799317 - DNA, 25 bp, Homo sapien
ggtgggacaaagagtgtaaataaga

SEQ ID NO: 1799318 - DNA, 25 bp, Homo sapien
tcaaactgttcttccggtgacaggg

SEQ ID NO: 1799319 - DNA, 25 bp, Homo sapien
cccaggaggggcttcgtctgatgct

SEQ ID NO: 1799320 - DNA, 25 bp, Homo sapien
caggaggggcctcaacgcttgtctc

SEQ ID NO: 1799321 - DNA, 25 bp, Homo sapien
taaaatggacagtctgttgctcaaa

SEQ ID NO: 1799322 - DNA, 25 bp, Homo sapien
aggctgcgggggctgacttcttcct

SEQ ID NO: 1799323 - DNA, 25 bp, Homo sapien
ttgtgggaagacggtgcccgcggca

SEQ ID NO: 1799324 - DNA, 25 bp, Homo sapien
tgtgggaagacggtgcccgcggcag

SEQ ID NO: 1799325 - DNA, 25 bp, Homo sapien
cttgtgggaagacggtgcccgcggc

SEQ ID NO: 1799326 - DNA, 25 bp, Homo sapien
gtgggaagacggtgcccgcggcagg

SEQ ID NO: 1799327 - DNA, 25 bp, Homo sapien
tcgctttggtgccatcgctgtcggg

SEQ ID NO: 1799328 - DNA, 25 bp, Homo sapien
cactgggtctatgggatctcttttg

SEQ ID NO: 1799329 - DNA, 25 bp, Homo sapien
ggttcctgagtccaaagggtctgag

SEQ ID NO: 1799330 - DNA, 25 bp, Homo sapien
gctgaagcgccagctgacactgggt

SEQ ID NO: 1799331 - DNA, 25 bp, Homo sapien
caataagaagccctggatggtagca

SEQ ID NO: 1799332 - DNA, 25 bp, Homo sapien
gatgacacttgatcactgctgtgcg

SEQ ID NO: 1799333 - DNA, 25 bp, Homo sapien
tgtgaagtacctaaaccagtctgcg

SEQ ID NO: 1799334 - DNA, 25 bp, Homo sapien
tttcagtagcacaccatggctcagg

SEQ ID NO: 1799335 - DNA, 25 bp, Homo sapien
gataatgcaatggtggatccatgtc

SEQ ID NO: 1799336 - DNA, 25 bp, Homo sapien
tacacttgtccaagcccatagaatg

SEQ ID NO: 1799337 - DNA, 25 bp, Homo sapien
gataaactggtacgtccagacaatg

SEQ ID NO: 1799338 - DNA, 25 bp, Homo sapien
aggcaactaaggtgtctttcagtag

SEQ ID NO: 1799339 - DNA, 25 bp, Homo sapien
ggattaaaggcacctaccacccaca

SEQ ID NO: 1799340 - DNA, 25 bp, Homo sapien
acccagctgagtatttgttactttg

SEQ ID NO: 1799341 - DNA, 25 bp, Homo sapien
ctgcacccagctgagtatttgttac

SEQ ID NO: 1799342 - DNA, 25 bp, Homo sapien
gcacccagctgagtatttgttactt

SEQ ID NO: 1799343 - DNA, 25 bp, Homo sapien
tcatgcaaacatagtgatcatagcg

SEQ ID NO: 1799344 - DNA, 25 bp, Homo sapien
ttcgtgaagctttagccaaagacct

SEQ ID NO: 1799345 - DNA, 25 bp, Homo sapien
gatcatagcgtcaacatggtctgga

SEQ ID NO: 1799346 - DNA, 25 bp, Homo sapien
tgttctcccttcaagcgctgtaaag

SEQ ID NO: 1799347 - DNA, 25 bp, Homo sapien
gaattcaggccgcaagtttaggtcc

SEQ ID NO: 1799348 - DNA, 25 bp, Homo sapien
taacagaggcgactttagaccagga

SEQ ID NO: 1799349 - DNA, 25 bp, Homo sapien
acatggttagcaaaagactgtcctg

SEQ ID NO: 1799350 - DNA, 25 bp, Homo sapien
accagcctcagcgactggagagcaa

SEQ ID NO: 1799351 - DNA, 25 bp, Homo sapien
gcagagtgcgcctgcgccgatacgc

SEQ ID NO: 1799352 - DNA, 25 bp, Homo sapien
atgcagaagcgcctcggcgttgccg

SEQ ID NO: 1799353 - DNA, 25 bp, Homo sapien
cggcgttgccggcagagtgcgcctg

SEQ ID NO: 1799354 - DNA, 25 bp, Homo sapien
cacagatgcagaagcgcctcggcgt

SEQ ID NO: 1799355 - DNA, 25 bp, Homo sapien
cagccgctcggacgctcgccacaca

SEQ ID NO: 1799356 - DNA, 25 bp, Homo sapien
ctttccccagccgctcggacgctcg

SEQ ID NO: 1799357 - DNA, 25 bp, Homo sapien
cccagccgctcggacgctcgccaca

SEQ ID NO: 1799358 - DNA, 25 bp, Homo sapien
tccccagccgctcggacgctcgcca

SEQ ID NO: 1799359 - DNA, 25 bp, Homo sapien
gaaggttcagatgacctgaagaatg

SEQ ID NO: 1799360 - DNA, 25 bp, Homo sapien
agaaggttcagatgacctgaagaat

SEQ ID NO: 1799361 - DNA, 25 bp, Homo sapien
cattctataagcactcctttcaaga

SEQ ID NO: 1799362 - DNA, 25 bp, Homo sapien
aaataaagctgaacaactgagtcac

SEQ ID NO: 1799363 - DNA, 25 bp, Homo sapien
gctggtgatgtacccgctaacccca

SEQ ID NO: 1799364 - DNA, 25 bp, Homo sapien
tgtgctctcatgtgtaaccatgcct

SEQ ID NO: 1799365 - DNA, 25 bp, Homo sapien
tctaagtatcaaaccaaggttgtgg

SEQ ID NO: 1799366 - DNA, 25 bp, Homo sapien
caaacacatgattgtaagacagctt

SEQ ID NO: 1799367 - DNA, 25 bp, Homo sapien
aaacacatgattgtaagacagcttg

SEQ ID NO: 1799368 - DNA, 25 bp, Homo sapien
agacaaacacatgattgtaagacag

SEQ ID NO: 1799369 - DNA, 25 bp, Homo sapien
acacatgattgtaagacagcttgtt

SEQ ID NO: 1799370 - DNA, 25 bp, Homo sapien
tggactcatccaagtacagcagaaa

SEQ ID NO: 1799371 - DNA, 25 bp, Homo sapien
attggactcatccaagtacagcaga

SEQ ID NO: 1799372 - DNA, 25 bp, Homo sapien
actcatccaagtacagcagaaactg

SEQ ID NO: 1799373 - DNA, 25 bp, Homo sapien
ggactcatccaagtacagcagaaac

SEQ ID NO: 1799374 - DNA, 25 bp, Homo sapien
tctgaacaaatgatcatgatccctc

SEQ ID NO: 1799375 - DNA, 25 bp, Homo sapien
gcccaggccgcaatgtattttaatc

SEQ ID NO: 1799376 - DNA, 25 bp, Homo sapien
tgtttttgtagcaacctcggactcc

SEQ ID NO: 1799377 - DNA, 25 bp, Homo sapien
ggcagtagcaatgatcaaggttcac

SEQ ID NO: 1799378 - DNA, 25 bp, Homo sapien
taatgtctaagtccccaccttggca

SEQ ID NO: 1799379 - DNA, 25 bp, Homo sapien
tatgatagatttagagcccctgcac

SEQ ID NO: 1799380 - DNA, 25 bp, Homo sapien
tagaattgttgcaactgagctcccg

SEQ ID NO: 1799381 - DNA, 25 bp, Homo sapien
gcaagcaatgtacgaagttcccagg

SEQ ID NO: 1799382 - DNA, 25 bp, Homo sapien
taacttgctcgggtacaacacagtc

SEQ ID NO: 1799383 - DNA, 25 bp, Homo sapien
acttgcctatcttgagaacagtgtt

SEQ ID NO: 1799384 - DNA, 25 bp, Homo sapien
ttgcctatcttgagaacagtgtttt

SEQ ID NO: 1799385 - DNA, 25 bp, Homo sapien
cagtgttatctttgctgcaaatgaa

SEQ ID NO: 1799386 - DNA, 25 bp, Homo sapien
tatccaataatctcatccatagaca

SEQ ID NO: 1799387 - DNA, 25 bp, Homo sapien
gcgttgttcccataaactttttgca

SEQ ID NO: 1799388 - DNA, 25 bp, Homo sapien
cattcttccacctaagctttgccat

SEQ ID NO: 1799389 - DNA, 25 bp, Homo sapien
ctaagctttgccataaatttgatgt

SEQ ID NO: 1799390 - DNA, 25 bp, Homo sapien
ccatttgtaaactgatttccttggg

SEQ ID NO: 1799391 - DNA, 25 bp, Homo sapien
gaactgtcacggtggaagaccctct

SEQ ID NO: 1799392 - DNA, 25 bp, Homo sapien
gtcttgagggtcatactggtaaagc

SEQ ID NO: 1799393 - DNA, 25 bp, Homo sapien
ccttgctttatgagaggaatgcgca

SEQ ID NO: 1799394 - DNA, 25 bp, Homo sapien
taaaagctgaaccaactgaggagca

SEQ ID NO: 1799395 - DNA, 25 bp, Homo sapien
tgaaagcatcagaccgctggtggac

SEQ ID NO: 1799396 - DNA, 25 bp, Homo sapien
caaaccccgtttgaagagatcagga

SEQ ID NO: 1799397 - DNA, 25 bp, Homo sapien
ggtggactagctacccaatgctctg

SEQ ID NO: 1799398 - DNA, 25 bp, Homo sapien
gagaacgctcctgcaatctaaacag

SEQ ID NO: 1799399 - DNA, 25 bp, Homo sapien
cgcgggactgcgcggcggcgacagt

SEQ ID NO: 1799400 - DNA, 25 bp, Homo sapien
ccgcgggactgcgcggcggcgacag

SEQ ID NO: 1799401 - DNA, 25 bp, Homo sapien
gcgggactgcgcggcggcgacagtg

SEQ ID NO: 1799402 - DNA, 25 bp, Homo sapien
cagcggctcctccgtgcctctccgc

SEQ ID NO: 1799403 - DNA, 25 bp, Homo sapien
tctgcctagtgagatatggcctact

SEQ ID NO: 1799404 - DNA, 25 bp, Homo sapien
tgaaggctgtttttaaactagtctc

SEQ ID NO: 1799405 - DNA, 25 bp, Homo sapien
gctttgtacagattatgaggactga

SEQ ID NO: 1799406 - DNA, 25 bp, Homo sapien
aactagtctcggtaacattaggaat

SEQ ID NO: 1799407 - DNA, 25 bp, Homo sapien
gaaaattctcctggtgctacataca

SEQ ID NO: 1799408 - DNA, 25 bp, Homo sapien
actagagatagtcaaccaaaggaac

SEQ ID NO: 1799409 - DNA, 25 bp, Homo sapien
tgccatcatcagatagtatgtctct

SEQ ID NO: 1799410 - DNA, 25 bp, Homo sapien
catacatttggaagggtggaaaagt

SEQ ID NO: 1799411 - DNA, 25 bp, Homo sapien
caaaccaggccgaacaatgcctcaa

SEQ ID NO: 1799412 - DNA, 25 bp, Homo sapien
tgtacacaaaccaggccgaacaatg

SEQ ID NO: 1799413 - DNA, 25 bp, Homo sapien
ccaggccgaacaatgcctcaaaata

SEQ ID NO: 1799414 - DNA, 25 bp, Homo sapien
tgctatgtacacaaaccaggccgaa

SEQ ID NO: 1799415 - DNA, 25 bp, Homo sapien
catcattaccattaacaaggaccaa

SEQ ID NO: 1799416 - DNA, 25 bp, Homo sapien
gagtagagtttaagctttccaagaa

SEQ ID NO: 1799417 - DNA, 25 bp, Homo sapien
aagtgaaattaaccaatgcggaaag

SEQ ID NO: 1799418 - DNA, 25 bp, Homo sapien
ccaacggatgtagggttactagatg

SEQ ID NO: 1799419 - DNA, 25 bp, Homo sapien
tgcaccagcaccgagaattaccatc

SEQ ID NO: 1799420 - DNA, 25 bp, Homo sapien
gcagctatctggactgagtgcatca

SEQ ID NO: 1799421 - DNA, 25 bp, Homo sapien
tgcattgtgatatctaacagcagct

SEQ ID NO: 1799422 - DNA, 25 bp, Homo sapien
ggctatctgagaggacatacctccc

SEQ ID NO: 1799423 - DNA, 25 bp, Homo sapien
gaatttgtgcctccggttttgtggc

SEQ ID NO: 1799424 - DNA, 25 bp, Homo sapien
tctgaggatctctgacactaccatt

SEQ ID NO: 1799425 - DNA, 25 bp, Homo sapien
caacatggtcctgtaagagcttcct

SEQ ID NO: 1799426 - DNA, 25 bp, Homo sapien
tgccccggcactaacagctcggttt

SEQ ID NO: 1799427 - DNA, 25 bp, Homo sapien
tctgagtctgcactaatgaggtgac

SEQ ID NO: 1799428 - DNA, 25 bp, Homo sapien
ctccgaaaactcttagaatgttctg

SEQ ID NO: 1799429 - DNA, 25 bp, Homo sapien
aaagaatatatctgggttttgccct

SEQ ID NO: 1799430 - DNA, 25 bp, Homo sapien
aatatcctcagaaacttcctgcaag

SEQ ID NO: 1799431 - DNA, 25 bp, Homo sapien
tcagggacacgatgtcagggaatga

SEQ ID NO: 1799432 - DNA, 25 bp, Homo sapien
cttgcagagaaacctgcggaggctg

SEQ ID NO: 1799433 - DNA, 25 bp, Homo sapien
agcttgcagagaaacctgcggaggc

SEQ ID NO: 1799434 - DNA, 25 bp, Homo sapien
gtgccttcagggacacgatgtcagg

SEQ ID NO: 1799435 - DNA, 25 bp, Homo sapien
tgcagggaggggtaacagttcaatt

SEQ ID NO: 1799436 - DNA, 25 bp, Homo sapien
aaaaggataacagaatgcagggagg

SEQ ID NO: 1799437 - DNA, 25 bp, Homo sapien
cagggaggggtaacagttcaattct

SEQ ID NO: 1799438 - DNA, 25 bp, Homo sapien
aatgcagggaggggtaacagttcaa

SEQ ID NO: 1799439 - DNA, 25 bp, Homo sapien
tgcacatgcatcccatgacaccacc

SEQ ID NO: 1799440 - DNA, 25 bp, Homo sapien
ttctctcagactcttccggaatcct

SEQ ID NO: 1799441 - DNA, 25 bp, Homo sapien
tcccatgacaccaccctccagcctt

SEQ ID NO: 1799442 - DNA, 25 bp, Homo sapien
atgcatcccatgacaccaccctcca

SEQ ID NO: 1799443 - DNA, 25 bp, Homo sapien
tatgagtgatgatgacgggtcccag

SEQ ID NO: 1799444 - DNA, 25 bp, Homo sapien
agcaaggtgacatcgcagggtgcca

SEQ ID NO: 1799445 - DNA, 25 bp, Homo sapien
aaccggctgcactcctgaaaagcaa

SEQ ID NO: 1799446 - DNA, 25 bp, Homo sapien
caaatgatgtggcatagagacagct

SEQ ID NO: 1799447 - DNA, 25 bp, Homo sapien
cccagttgtaattagtgcttcagtc

SEQ ID NO: 1799448 - DNA, 25 bp, Homo sapien
caagttactaacaacctgtcgtggc

SEQ ID NO: 1799449 - DNA, 25 bp, Homo sapien
taaatccaaaaatgctaagctgctg

SEQ ID NO: 1799450 - DNA, 25 bp, Homo sapien
aacgttaagtggttggctaggctca

SEQ ID NO: 1799451 - DNA, 25 bp, Homo sapien
tctgtagaacttagaggcatggaga

SEQ ID NO: 1799452 - DNA, 25 bp, Homo sapien
taggcaatctagtagcgtcagggac

SEQ ID NO: 1799453 - DNA, 25 bp, Homo sapien
tccccagatcgatgtttattcaggt

SEQ ID NO: 1799454 - DNA, 25 bp, Homo sapien
tgcggtgctcccaatgttcattcaa

SEQ ID NO: 1799455 - DNA, 25 bp, Homo sapien
aattgtcctgacaaagcagtgaccc

SEQ ID NO: 1799456 - DNA, 25 bp, Homo sapien
gcagtgaccctcctaattatttgga

SEQ ID NO: 1799457 - DNA, 25 bp, Homo sapien
tacagggctttaggcaatgtctggc

SEQ ID NO: 1799458 - DNA, 25 bp, Homo sapien
tgtctataccaacccacggaggaaa

SEQ ID NO: 1799459 - DNA, 25 bp, Homo sapien
caacagtgctaaaggctaaagggag

SEQ ID NO: 1799460 - DNA, 25 bp, Homo sapien
tgcagaaagtgactaaagccaacag

SEQ ID NO: 1799461 - DNA, 25 bp, Homo sapien
tgtggacatgggtgacaagcactct

SEQ ID NO: 1799462 - DNA, 25 bp, Homo sapien
ggaaagacccttcacaatgctctgg

SEQ ID NO: 1799463 - DNA, 25 bp, Homo sapien
ctctgaggcaaaaatgaaggcagcc

SEQ ID NO: 1799464 - DNA, 25 bp, Homo sapien
gtaaatcacctctaattcaggagca

SEQ ID NO: 1799465 - DNA, 25 bp, Homo sapien
caaggaagcctggagtaaatcacct

SEQ ID NO: 1799466 - DNA, 25 bp, Homo sapien
ggccctacagcatctattcacacta

SEQ ID NO: 1799467 - DNA, 25 bp, Homo sapien
gtgagtcctttcaatgacttacccc

SEQ ID NO: 1799468 - DNA, 25 bp, Homo sapien
ttctttaggaggacagttacacctg

SEQ ID NO: 1799469 - DNA, 25 bp, Homo sapien
cagattttcaaacgtagcatttcaa

SEQ ID NO: 1799470 - DNA, 25 bp, Homo sapien
cctgaatcaaagctaccgtttcaaa

SEQ ID NO: 1799471 - DNA, 25 bp, Homo sapien
ggtatgacaaaacctatctcaggca

SEQ ID NO: 1799472 - DNA, 25 bp, Homo sapien
tccagtgaagtgtcgggtaggtccc

SEQ ID NO: 1799473 - DNA, 25 bp, Homo sapien
gcaaaatgacaagatcggaccagat

SEQ ID NO: 1799474 - DNA, 25 bp, Homo sapien
gactgaaacactctagaaacttgga

SEQ ID NO: 1799475 - DNA, 25 bp, Homo sapien
gttaggaccagacagattatttgtg

SEQ ID NO: 1799476 - DNA, 25 bp, Homo sapien
acctcatggtactattgttaggacc

SEQ ID NO: 1799477 - DNA, 25 bp, Homo sapien
ttttgaggcagtgccggcacataat

SEQ ID NO: 1799478 - DNA, 25 bp, Homo sapien
taaccgagggacgtggagcaagtaa

SEQ ID NO: 1799479 - DNA, 25 bp, Homo sapien
gtatttgtgcacctaaacgtggaga

SEQ ID NO: 1799480 - DNA, 25 bp, Homo sapien
caaaatagtatttgtgcacctaaac

SEQ ID NO: 1799481 - DNA, 25 bp, Homo sapien
ccttcaagttcttataccacaaatt

SEQ ID NO: 1799482 - DNA, 25 bp, Homo sapien
gcacctaaacgtggagatactcagc

SEQ ID NO: 1799483 - DNA, 25 bp, Homo sapien
ccacagcaggaattcaggtaggaat

SEQ ID NO: 1799484 - DNA, 25 bp, Homo sapien
gaaggaatgagcaggcctgtactgt

SEQ ID NO: 1799485 - DNA, 25 bp, Homo sapien
ccagcaaaagtgtttccttacgttg

SEQ ID NO: 1799486 - DNA, 25 bp, Homo sapien
tgtcaacatcataaatggccagcaa

SEQ ID NO: 1799487 - DNA, 25 bp, Homo sapien
ggaagtctcctgtgtttctagtaaa

SEQ ID NO: 1799488 - DNA, 25 bp, Homo sapien
ttcctcagggagtgctgaatagccc

SEQ ID NO: 1799489 - DNA, 25 bp, Homo sapien
atcaggcaagtggaggatggtaact

SEQ ID NO: 1799490 - DNA, 25 bp, Homo sapien
ggacaggtgctttcactactttgag

SEQ ID NO: 1799491 - DNA, 25 bp, Homo sapien
ttgcttgaaaccgaaaggcagaggt

SEQ ID NO: 1799492 - DNA, 25 bp, Homo sapien
gcagaggttgcggtgagccaagatc

SEQ ID NO: 1799493 - DNA, 25 bp, Homo sapien
gaagaattgcttgaaaccgaaaggc

SEQ ID NO: 1799494 - DNA, 25 bp, Homo sapien
aggcagaggttgcggtgagccaaga

SEQ ID NO: 1799495 - DNA, 25 bp, Homo sapien
tctttacccgtgcagaccatatgga

SEQ ID NO: 1799496 - DNA, 25 bp, Homo sapien
tctcaagtgtgcacaagaatgagcc

SEQ ID NO: 1799497 - DNA, 25 bp, Homo sapien
tcagattattcacggctgggaggcc

SEQ ID NO: 1799498 - DNA, 25 bp, Homo sapien
tgatgtatttttctccccgggctcc

SEQ ID NO: 1799499 - DNA, 25 bp, Homo sapien
ttcaaaagttcggatgcagagacag

SEQ ID NO: 1799500 - DNA, 25 bp, Homo sapien
caaaccgtgcaaaacagaccagagt

SEQ ID NO: 1799501 - DNA, 25 bp, Homo sapien
tagaggctagaaagaaggccccttc

SEQ ID NO: 1799502 - DNA, 25 bp, Homo sapien
gaagaacgtgctgatcctttggaga

SEQ ID NO: 1799503 - DNA, 25 bp, Homo sapien
gcacaggatgttggaatcgctgcaa

SEQ ID NO: 1799504 - DNA, 25 bp, Homo sapien
caggatgttggaatcgctgcaaagc

SEQ ID NO: 1799505 - DNA, 25 bp, Homo sapien
caaagcacaggcccatgttccactg

SEQ ID NO: 1799506 - DNA, 25 bp, Homo sapien
atgttggaatcgctgcaaagcacag

SEQ ID NO: 1799507 - DNA, 25 bp, Homo sapien
cccggaggttgaaatttatcctctg

SEQ ID NO: 1799508 - DNA, 25 bp, Homo sapien
tccctgcgacagtgactagaggtga

SEQ ID NO: 1799509 - DNA, 25 bp, Homo sapien
tgtggagtactcctgtccctgcgac

SEQ ID NO: 1799510 - DNA, 25 bp, Homo sapien
cagccagccttcctcatagtagcgt

SEQ ID NO: 1799511 - DNA, 25 bp, Homo sapien
cacgatagacgatccatctgggcag

SEQ ID NO: 1799512 - DNA, 25 bp, Homo sapien
tgtagagccaaagcccaacagagtc

SEQ ID NO: 1799513 - DNA, 25 bp, Homo sapien
ggaccactacggagaaagctgcttg

SEQ ID NO: 1799514 - DNA, 25 bp, Homo sapien
gcaggactgtgcacgtatacccaaa

SEQ ID NO: 1799515 - DNA, 25 bp, Homo sapien
tcgttttgggaatctcaggcacagc

SEQ ID NO: 1799516 - DNA, 25 bp, Homo sapien
cacatttagcaaccatgagggcact

SEQ ID NO: 1799517 - DNA, 25 bp, Homo sapien
ggcccaataggtagctccatgcaga

SEQ ID NO: 1799518 - DNA, 25 bp, Homo sapien
taaaatacgatacccactgcccagt

SEQ ID NO: 1799519 - DNA, 25 bp, Homo sapien
taacaagttctctgggtaagcatgg

SEQ ID NO: 1799520 - DNA, 25 bp, Homo sapien
gccagtgtggctaatccaaattgag

SEQ ID NO: 1799521 - DNA, 25 bp, Homo sapien
gagacttgtctaaaactacagtcca

SEQ ID NO: 1799522 - DNA, 25 bp, Homo sapien
tgccttttatccaaggtcctattgg

SEQ ID NO: 1799523 - DNA, 25 bp, Homo sapien
cttcctccaaggagaagtacaaata

SEQ ID NO: 1799524 - DNA, 25 bp, Homo sapien
taatgtacatggctgaccactgccc

SEQ ID NO: 1799525 - DNA, 25 bp, Homo sapien
taactctgacccttagcccagatgg

SEQ ID NO: 1799526 - DNA, 25 bp, Homo sapien
tgaaacggcttagattggcacatgc

SEQ ID NO: 1799527 - DNA, 25 bp, Homo sapien
tgtgagaccccaccttgtgatcgtg

SEQ ID NO: 1799528 - DNA, 25 bp, Homo sapien
aatagatgtggtaggtagactcgtc

SEQ ID NO: 1799529 - DNA, 25 bp, Homo sapien
tagacacaggacagttatgcaacag

SEQ ID NO: 1799530 - DNA, 25 bp, Homo sapien
cagtacaaataacccagagtgtggg

SEQ ID NO: 1799531 - DNA, 25 bp, Homo sapien
gaagtaaaaatagacagccagctcc

SEQ ID NO: 1799532 - DNA, 25 bp, Homo sapien
gatggacacaatctacaaccccaga

SEQ ID NO: 1799533 - DNA, 25 bp, Homo sapien
gattcactaaacaacactctgtgtg

SEQ ID NO: 1799534 - DNA, 25 bp, Homo sapien
ctctgtgtgcatgggttaagtacag

SEQ ID NO: 1799535 - DNA, 25 bp, Homo sapien
gtttcaagtcagattcactaaacaa

SEQ ID NO: 1799536 - DNA, 25 bp, Homo sapien
gaaggcaggcatgtttaccaacaga

SEQ ID NO: 1799537 - DNA, 25 bp, Homo sapien
tgtttggcccagacgcataaggaca

SEQ ID NO: 1799538 - DNA, 25 bp, Homo sapien
catggtacaacaacagagcctggcg

SEQ ID NO: 1799539 - DNA, 25 bp, Homo sapien
tagaatttttggagctggacgggac

SEQ ID NO: 1799540 - DNA, 25 bp, Homo sapien
ggatggaaaacccagaacttcagtg

SEQ ID NO: 1799541 - DNA, 25 bp, Homo sapien
ttctaaacagataccatatggctgc

SEQ ID NO: 1799542 - DNA, 25 bp, Homo sapien
tccagcaatcatctatgaagagact

SEQ ID NO: 1799543 - DNA, 25 bp, Homo sapien
tgagaaccacctgacggaatcaaat

SEQ ID NO: 1799544 - DNA, 25 bp, Homo sapien
gaatgtgcatctcatgtacatggta

SEQ ID NO: 1799545 - DNA, 25 bp, Homo sapien
tccatgcatgtagaagcaaacacgt

SEQ ID NO: 1799546 - DNA, 25 bp, Homo sapien
tgccctagtttgagaccatggctgg

SEQ ID NO: 1799547 - DNA, 25 bp, Homo sapien
tgatagcattgtctgttctgtacct

SEQ ID NO: 1799548 - DNA, 25 bp, Homo sapien
tattattctaattcagaaaccaacc

SEQ ID NO: 1799549 - DNA, 25 bp, Homo sapien
aacatataattaataggagtctgat

SEQ ID NO: 1799550 - DNA, 25 bp, Homo sapien
tgatctgagagttatgaataggttt

SEQ ID NO: 1799551 - DNA, 25 bp, Homo sapien
gactggatgtcctccaaattatttt

SEQ ID NO: 1799552 - DNA, 25 bp, Homo sapien
tacttaaacactatggtatactgcc

SEQ ID NO: 1799553 - DNA, 25 bp, Homo sapien
ctaaagttgttcagctagcaagtgg

SEQ ID NO: 1799554 - DNA, 25 bp, Homo sapien
gctaacactgtgtactagatagaca

SEQ ID NO: 1799555 - DNA, 25 bp, Homo sapien
catatttctaatccaggcagtctgt

SEQ ID NO: 1799556 - DNA, 25 bp, Homo sapien
ccagtttggatgttcctgaccagca

SEQ ID NO: 1799557 - DNA, 25 bp, Homo sapien
gatatacgggactgacagatcgtca

SEQ ID NO: 1799558 - DNA, 25 bp, Homo sapien
cagatcgtcatctaatacttaaggc

SEQ ID NO: 1799559 - DNA, 25 bp, Homo sapien
tacttaaggcctctaccagtttgga

SEQ ID NO: 1799560 - DNA, 25 bp, Homo sapien
catgattcatatgccctttcacagc

SEQ ID NO: 1799561 - DNA, 25 bp, Homo sapien
cacttttgtctcagggaaaagttgc

SEQ ID NO: 1799562 - DNA, 25 bp, Homo sapien
ggaaaaaggcacaccacatgattca

SEQ ID NO: 1799563 - DNA, 25 bp, Homo sapien
tagctgggaacataaggtgcatacc

SEQ ID NO: 1799564 - DNA, 25 bp, Homo sapien
tatcctttgactttctcactgtgca

SEQ ID NO: 1799565 - DNA, 25 bp, Homo sapien
gatctgcaaagaaagtagttcgcat

SEQ ID NO: 1799566 - DNA, 25 bp, Homo sapien
gctacagaccagatatactatgatt

SEQ ID NO: 1799567 - DNA, 25 bp, Homo sapien
catagagaataccaaactgttaatg

SEQ ID NO: 1799568 - DNA, 25 bp, Homo sapien
catattaactctaggaggactgtgc

SEQ ID NO: 1799569 - DNA, 25 bp, Homo sapien
gaaaaacaggctcaactagaactgc

SEQ ID NO: 1799570 - DNA, 25 bp, Homo sapien
ctagaactgcataaatttaggtctg

SEQ ID NO: 1799571 - DNA, 25 bp, Homo sapien
tacactaactcactcgacatcgtat

SEQ ID NO: 1799572 - DNA, 25 bp, Homo sapien
aagctgatctgtattgcagtagaca

SEQ ID NO: 1799573 - DNA, 25 bp, Homo sapien
cagaagtcaggatcttttaacacca

SEQ ID NO: 1799574 - DNA, 25 bp, Homo sapien
ctaaatgaaagctgatctgtattgc

SEQ ID NO: 1799575 - DNA, 25 bp, Homo sapien
tagacattctggtcttcaaggacat

SEQ ID NO: 1799576 - DNA, 25 bp, Homo sapien
gcactcccgcttgctctgcgtgcag

SEQ ID NO: 1799577 - DNA, 25 bp, Homo sapien
aacatcaccacatgcttcgtgccac

SEQ ID NO: 1799578 - DNA, 25 bp, Homo sapien
ccttgccgcctggtgagtaaagcct

SEQ ID NO: 1799579 - DNA, 25 bp, Homo sapien
atgcttcgtgccacccttggccagg

SEQ ID NO: 1799580 - DNA, 25 bp, Homo sapien
gcctgcctgcctatgataaaccaga

SEQ ID NO: 1799581 - DNA, 25 bp, Homo sapien
taggtgccaaggaccgcgattagga

SEQ ID NO: 1799582 - DNA, 25 bp, Homo sapien
gggagcagggcaacaaacccagatt

SEQ ID NO: 1799583 - DNA, 25 bp, Homo sapien
tttacctaagttggcctcgaccgca

SEQ ID NO: 1799584 - DNA, 25 bp, Homo sapien
cccacaggtctgtgctgcttgagga

SEQ ID NO: 1799585 - DNA, 25 bp, Homo sapien
caggtctgtgctgcttgaggaaaag

SEQ ID NO: 1799586 - DNA, 25 bp, Homo sapien
cccccacaggtctgtgctgcttgag

SEQ ID NO: 1799587 - DNA, 25 bp, Homo sapien
cacaggtctgtgctgcttgaggaaa

SEQ ID NO: 1799588 - DNA, 25 bp, Homo sapien
cttgcatggatgtggacactgagaa

SEQ ID NO: 1799589 - DNA, 25 bp, Homo sapien
tgacacggcttcctaacaatgagag

SEQ ID NO: 1799590 - DNA, 25 bp, Homo sapien
taacaatgagagacagtgcgaacat

SEQ ID NO: 1799591 - DNA, 25 bp, Homo sapien
cctaacaatgagagacagtgcgaac

SEQ ID NO: 1799592 - DNA, 25 bp, Homo sapien
cagccccactgacacggcttcctaa

SEQ ID NO: 1799593 - DNA, 25 bp, Homo sapien
cgcggtcgttgaccagctccacaga

SEQ ID NO: 1799594 - DNA, 25 bp, Homo sapien
gtccgcatcgcacgtggccagtttc

SEQ ID NO: 1799595 - DNA, 25 bp, Homo sapien
tgccctcgtactgaatccacacgaa

SEQ ID NO: 1799596 - DNA, 25 bp, Homo sapien
tgaatccacacgaatatgcctccgt

SEQ ID NO: 1799597 - DNA, 25 bp, Homo sapien
tatcaacactggatgcttaggctgc

SEQ ID NO: 1799598 - DNA, 25 bp, Homo sapien
gccgcccctggtgactaatactgta

SEQ ID NO: 1799599 - DNA, 25 bp, Homo sapien
gctatggagatgatagagggcccct

SEQ ID NO: 1799600 - DNA, 25 bp, Homo sapien
aaacttggacagtagagcctgctcc

SEQ ID NO: 1799601 - DNA, 25 bp, Homo sapien
tttggctccttgtccacaaaaccta

SEQ ID NO: 1799602 - DNA, 25 bp, Homo sapien
gatcaatttttataacccttctgtg

SEQ ID NO: 1799603 - DNA, 25 bp, Homo sapien
gaatcctgccctagaatatgatcaa

SEQ ID NO: 1799604 - DNA, 25 bp, Homo sapien
gattttcctcttgttatatgatacc

SEQ ID NO: 1799605 - DNA, 25 bp, Homo sapien
taaaaccgctccacatgtgtccgtg

SEQ ID NO: 1799606 - DNA, 25 bp, Homo sapien
ttatgcacggtgtgaggtaagaatc

SEQ ID NO: 1799607 - DNA, 25 bp, Homo sapien
tggcctgagaattaagaaccctggt

SEQ ID NO: 1799608 - DNA, 25 bp, Homo sapien
tcactggagccgtatcacttatctc

SEQ ID NO: 1799609 - DNA, 25 bp, Homo sapien
tatggatcacgttttctgcatccag

SEQ ID NO: 1799610 - DNA, 25 bp, Homo sapien
tagcttttacacttacgttgcagga

SEQ ID NO: 1799611 - DNA, 25 bp, Homo sapien
tcaaatcagagttaatgccatatca

SEQ ID NO: 1799612 - DNA, 25 bp, Homo sapien
cccaggctgcaaagacttctagagg

SEQ ID NO: 1799613 - DNA, 25 bp, Homo sapien
agggatgactgtatgaacacgggca

SEQ ID NO: 1799614 - DNA, 25 bp, Homo sapien
tacatcatatacgtgtgcttccatg

SEQ ID NO: 1799615 - DNA, 25 bp, Homo sapien
cagtatctgtggaaagtcctggaac

SEQ ID NO: 1799616 - DNA, 25 bp, Homo sapien
tacaaatataccgttttacatcata

SEQ ID NO: 1799617 - DNA, 25 bp, Homo sapien
ctagtaggtgtatgacattgtcttt

SEQ ID NO: 1799618 - DNA, 25 bp, Homo sapien
ttctagtaggtgtatgacattgtct

SEQ ID NO: 1799619 - DNA, 25 bp, Homo sapien
tctagtaggtgtatgacattgtctt

SEQ ID NO: 1799620 - DNA, 25 bp, Homo sapien
tctagttgaactaaagagcttcaga

SEQ ID NO: 1799621 - DNA, 25 bp, Homo sapien
gcaaaaattgataaacaagatctag

SEQ ID NO: 1799622 - DNA, 25 bp, Homo sapien
aaaaacctctgaagacaatctaggc

SEQ ID NO: 1799623 - DNA, 25 bp, Homo sapien
tcaataaagtaaatagacaatctac

SEQ ID NO: 1799624 - DNA, 25 bp, Homo sapien
ccaagttgatttcggatgaccagtg

SEQ ID NO: 1799625 - DNA, 25 bp, Homo sapien
caggacaaacccatctcgataggaa

SEQ ID NO: 1799626 - DNA, 25 bp, Homo sapien
tcaggagtccatatgccacacgtaa

SEQ ID NO: 1799627 - DNA, 25 bp, Homo sapien
taagtgcttgagttccatcatggct

SEQ ID NO: 1799628 - DNA, 25 bp, Homo sapien
aattttttgattcacttccctccag

SEQ ID NO: 1799629 - DNA, 25 bp, Homo sapien
tctttgttgtcttacgatgtagcaa

SEQ ID NO: 1799630 - DNA, 25 bp, Homo sapien
taccatattggtgggaaatgttgtt

SEQ ID NO: 1799631 - DNA, 25 bp, Homo sapien
tggttttaacgtcacacacccacca

SEQ ID NO: 1799632 - DNA, 25 bp, Homo sapien
cacaccatggtgtcaataccctgga

SEQ ID NO: 1799633 - DNA, 25 bp, Homo sapien
gttccacggcagcaggaaaccactc

SEQ ID NO: 1799634 - DNA, 25 bp, Homo sapien
actccctgtggtacgtgcacaccat

SEQ ID NO: 1799635 - DNA, 25 bp, Homo sapien
cttcacgttccacggcagcaggaaa

SEQ ID NO: 1799636 - DNA, 25 bp, Homo sapien
agaggctgcggccacgtacccaatt

SEQ ID NO: 1799637 - DNA, 25 bp, Homo sapien
caaggtctacagactcaaggccagg

SEQ ID NO: 1799638 - DNA, 25 bp, Homo sapien
agctctttcctcacgccaaggtcta

SEQ ID NO: 1799639 - DNA, 25 bp, Homo sapien
caggcaccctgctgcaaccatttta

SEQ ID NO: 1799640 - DNA, 25 bp, Homo sapien
cacaatcagacaaatctagagtgtg

SEQ ID NO: 1799641 - DNA, 25 bp, Homo sapien
taaactcagcaaccctcagactagg

SEQ ID NO: 1799642 - DNA, 25 bp, Homo sapien
tgtttactccaactctagtctagac

SEQ ID NO: 1799643 - DNA, 25 bp, Homo sapien
ggacagcgtgtaaggtggccacact

SEQ ID NO: 1799644 - DNA, 25 bp, Homo sapien
cctgcacccaggaagtaaactgtat

SEQ ID NO: 1799645 - DNA, 25 bp, Homo sapien
tgtattgtagacacctgaatgacat

SEQ ID NO: 1799646 - DNA, 25 bp, Homo sapien
tgaatgacatagcaaaccacagccc

SEQ ID NO: 1799647 - DNA, 25 bp, Homo sapien
taaactgtattgtagacacctgaat

SEQ ID NO: 1799648 - DNA, 25 bp, Homo sapien
tgtgttctaagtgggctggtgctcc

SEQ ID NO: 1799649 - DNA, 25 bp, Homo sapien
caagcaatgatggaagaagttactc

SEQ ID NO: 1799650 - DNA, 25 bp, Homo sapien
tagaattctccgtgctagtgctccc

SEQ ID NO: 1799651 - DNA, 25 bp, Homo sapien
tgtcatgatgtacaacacacaggag

SEQ ID NO: 1799652 - DNA, 25 bp, Homo sapien
tgccgtggcaatccatgacaatcac

SEQ ID NO: 1799653 - DNA, 25 bp, Homo sapien
gacaccgtctgactcgtgcaagagg

SEQ ID NO: 1799654 - DNA, 25 bp, Homo sapien
tcctccaccaggaagatcgggtagt

SEQ ID NO: 1799655 - DNA, 25 bp, Homo sapien
tagtcatctgagtccgtgtcgctct

SEQ ID NO: 1799656 - DNA, 25 bp, Homo sapien
gtgtctgctgctgggaagcataaca

SEQ ID NO: 1799657 - DNA, 25 bp, Homo sapien
gtctgctgctgggaagcataacaca

SEQ ID NO: 1799658 - DNA, 25 bp, Homo sapien
tgtctgctgctgggaagcataacac

SEQ ID NO: 1799659 - DNA, 25 bp, Homo sapien
gaccgtgggagacaagtcatcgtag

SEQ ID NO: 1799660 - DNA, 25 bp, Homo sapien
gtcatcgtagttgttcattaagctg

SEQ ID NO: 1799661 - DNA, 25 bp, Homo sapien
cattaagctgatgtctcccgaggtg

SEQ ID NO: 1799662 - DNA, 25 bp, Homo sapien
ctttcagccctgagcggatgaccgt

SEQ ID NO: 1799663 - DNA, 25 bp, Homo sapien
tacagcacctacttgatggcaccag

SEQ ID NO: 1799664 - DNA, 25 bp, Homo sapien
tcagtcatttcagggaaccttcaga

SEQ ID NO: 1799665 - DNA, 25 bp, Homo sapien
tgcaagctggacaagcatgccttag

SEQ ID NO: 1799666 - DNA, 25 bp, Homo sapien
gaaagacttaaccaccagagaagag

SEQ ID NO: 1799667 - DNA, 25 bp, Homo sapien
ctaggttcttttgcacaggtcgtaa

SEQ ID NO: 1799668 - DNA, 25 bp, Homo sapien
caggtcgtaaattccagtgctggtg

SEQ ID NO: 1799669 - DNA, 25 bp, Homo sapien
tcctctatgagacaagtggctgacc

SEQ ID NO: 1799670 - DNA, 25 bp, Homo sapien
tgtgccgtctccaacagtattctgg

SEQ ID NO: 1799671 - DNA, 25 bp, Homo sapien
catcaatgactgaaaccacctgcct

SEQ ID NO: 1799672 - DNA, 25 bp, Homo sapien
atgaactggcttgggcagaaaattc

SEQ ID NO: 1799673 - DNA, 25 bp, Homo sapien
gtactcaatgaggacgacgtgggca

SEQ ID NO: 1799674 - DNA, 25 bp, Homo sapien
caaatcttatcaggtctgcccacag

SEQ ID NO: 1799675 - DNA, 25 bp, Homo sapien
gaaatctagaactaaagtggcccac

SEQ ID NO: 1799676 - DNA, 25 bp, Homo sapien
gatgacggtgtctcaagcttcttag

SEQ ID NO: 1799677 - DNA, 25 bp, Homo sapien
gggaacacgggactttctcatgaag

SEQ ID NO: 1799678 - DNA, 25 bp, Homo sapien
gctagaattcagtggtccccgggct

SEQ ID NO: 1799679 - DNA, 25 bp, Homo sapien
cccatatattcatgttttagctcat

SEQ ID NO: 1799680 - DNA, 25 bp, Homo sapien
ttccatgagacttgtagaacttcct

SEQ ID NO: 1799681 - DNA, 25 bp, Homo sapien
aaaaacaggtgtttgtcacatgact

SEQ ID NO: 1799682 - DNA, 25 bp, Homo sapien
tagctcatgaatacaaccaatttct

SEQ ID NO: 1799683 - DNA, 25 bp, Homo sapien
tgtagaacttgaccatggcactctt

SEQ ID NO: 1799684 - DNA, 25 bp, Homo sapien
tgcacgagagtgtccagtgtgaaga

SEQ ID NO: 1799685 - DNA, 25 bp, Homo sapien
agtgtgaagatgtgctccccacgaa

SEQ ID NO: 1799686 - DNA, 25 bp, Homo sapien
gggaccattgggaagctcaccaagc

SEQ ID NO: 1799687 - DNA, 25 bp, Homo sapien
gactcaaacataaggtggcctaaag

SEQ ID NO: 1799688 - DNA, 25 bp, Homo sapien
tcatcctccactataactgactcaa

SEQ ID NO: 1799689 - DNA, 25 bp, Homo sapien
ttacgcgctgctgataattcatcct

SEQ ID NO: 1799690 - DNA, 25 bp, Homo sapien
ctcccaggcatacgtctattacgcg

SEQ ID NO: 1799691 - DNA, 25 bp, Homo sapien
ctttgccataataattttaaggctg

SEQ ID NO: 1799692 - DNA, 25 bp, Homo sapien
ttgccataataattttaaggctgtg

SEQ ID NO: 1799693 - DNA, 25 bp, Homo sapien
tttgccataataattttaaggctgt

SEQ ID NO: 1799694 - DNA, 25 bp, Homo sapien
atcaacagcctcgaatcccggtgac

SEQ ID NO: 1799695 - DNA, 25 bp, Homo sapien
tcacgcaaggtgctggcgatggcct

SEQ ID NO: 1799696 - DNA, 25 bp, Homo sapien
cagcttgctgacgtccttgtcctca

SEQ ID NO: 1799697 - DNA, 25 bp, Homo sapien
agggctggtcctgatgccatcaaca

SEQ ID NO: 1799698 - DNA, 25 bp, Homo sapien
aaaacgctactgttccagacagagc

SEQ ID NO: 1799699 - DNA, 25 bp, Homo sapien
ggcaggtcaactaaaaacgctactg

SEQ ID NO: 1799700 - DNA, 25 bp, Homo sapien
gggtaactatgtggtgtagaacagt

SEQ ID NO: 1799701 - DNA, 25 bp, Homo sapien
caatggtaggagcatgtgagaatct

SEQ ID NO: 1799702 - DNA, 25 bp, Homo sapien
tactccaggtagagcgtgtagcacg

SEQ ID NO: 1799703 - DNA, 25 bp, Homo sapien
ccctttgaggatgggcacaagcccg

SEQ ID NO: 1799704 - DNA, 25 bp, Homo sapien
ccatgatgacgaactctggccgcag

SEQ ID NO: 1799705 - DNA, 25 bp, Homo sapien
ggtttgctatctgtccgcgggtcca

SEQ ID NO: 1799706 - DNA, 25 bp, Homo sapien
agcccatgaccacaggagaacaagg

SEQ ID NO: 1799707 - DNA, 25 bp, Homo sapien
ggtgtaaggcgttaacagcccatga

SEQ ID NO: 1799708 - DNA, 25 bp, Homo sapien
aatgtcgtagcttcaaggatgttcc

SEQ ID NO: 1799709 - DNA, 25 bp, Homo sapien
ccccacaggctcacgtttcattagc

SEQ ID NO: 1799710 - DNA, 25 bp, Homo sapien
agattcaagcaagcccagtccttgg

SEQ ID NO: 1799711 - DNA, 25 bp, Homo sapien
gatacgagctgataaacatgaaccg

SEQ ID NO: 1799712 - DNA, 25 bp, Homo sapien
catttggcgtagtcgggtcagattc

SEQ ID NO: 1799713 - DNA, 25 bp, Homo sapien
tattccctgaaaggattgtgcgcaa

SEQ ID NO: 1799714 - DNA, 25 bp, Homo sapien
caattcagtgcatgacataagctcc

SEQ ID NO: 1799715 - DNA, 25 bp, Homo sapien
aagagctgagcaactgcatttggcc

SEQ ID NO: 1799716 - DNA, 25 bp, Homo sapien
cataagctccacatttgcagaggct

SEQ ID NO: 1799717 - DNA, 25 bp, Homo sapien
tcatcagcacgactagcaattcagt

SEQ ID NO: 1799718 - DNA, 25 bp, Homo sapien
ttggcagcccagtcatcactcagct

SEQ ID NO: 1799719 - DNA, 25 bp, Homo sapien
gagcagttgcagctgtcgatcacag

SEQ ID NO: 1799720 - DNA, 25 bp, Homo sapien
ctcagctcaatgtcactggagtctg

SEQ ID NO: 1799721 - DNA, 25 bp, Homo sapien
tcgatcacagtagaaatcaagctgt

SEQ ID NO: 1799722 - DNA, 25 bp, Homo sapien
tgacttgcgggcctcaatgctgatc

SEQ ID NO: 1799723 - DNA, 25 bp, Homo sapien
tctctccgagtcaggctgggcgagc

SEQ ID NO: 1799724 - DNA, 25 bp, Homo sapien
aaaaggaaactctctccgagtcagg

SEQ ID NO: 1799725 - DNA, 25 bp, Homo sapien
cagcttgggtgacttgcgggcctca

SEQ ID NO: 1799726 - DNA, 25 bp, Homo sapien
gacgtgacctgagcaagatagttgt

SEQ ID NO: 1799727 - DNA, 25 bp, Homo sapien
agcagccaagcccacaatcttaaat

SEQ ID NO: 1799728 - DNA, 25 bp, Homo sapien
gccaagcccacaatcttaaatttgg

SEQ ID NO: 1799729 - DNA, 25 bp, Homo sapien
tttggttccccagatattagacgtg

SEQ ID NO: 1799730 - DNA, 25 bp, Homo sapien
tgttccaactgggacaatgagagaa

SEQ ID NO: 1799731 - DNA, 25 bp, Homo sapien
gttccaactgggacaatgagagaag

SEQ ID NO: 1799732 - DNA, 25 bp, Homo sapien
ttgttccaactgggacaatgagaga

SEQ ID NO: 1799733 - DNA, 25 bp, Homo sapien
ttccaactgggacaatgagagaaga

SEQ ID NO: 1799734 - DNA, 25 bp, Homo sapien
tctgggagataaatggtcatctgcc

SEQ ID NO: 1799735 - DNA, 25 bp, Homo sapien
tatagtccatggaaattttccgaac

SEQ ID NO: 1799736 - DNA, 25 bp, Homo sapien
acatttgggttgaagacaggtaaat

SEQ ID NO: 1799737 - DNA, 25 bp, Homo sapien
aagacaggtaaattaatatagtcca

SEQ ID NO: 1799738 - DNA, 25 bp, Homo sapien
gagggaccgtgacaaacacgttgat

SEQ ID NO: 1799739 - DNA, 25 bp, Homo sapien
cttttccaaacccaggtagcagact

SEQ ID NO: 1799740 - DNA, 25 bp, Homo sapien
gactgaaatcctcaacaacttgccg

SEQ ID NO: 1799741 - DNA, 25 bp, Homo sapien
catgatctactgacagagggaccgt

SEQ ID NO: 1799742 - DNA, 25 bp, Homo sapien
aaactgggctctgtgcgcaccacgg

SEQ ID NO: 1799743 - DNA, 25 bp, Homo sapien
gggctctgtgcgcaccacgggaatg

SEQ ID NO: 1799744 - DNA, 25 bp, Homo sapien
actgggctctgtgcgcaccacggga

SEQ ID NO: 1799745 - DNA, 25 bp, Homo sapien
tgggctctgtgcgcaccacgggaat

SEQ ID NO: 1799746 - DNA, 25 bp, Homo sapien
ggcccctgtgcactgagacatgcgg

SEQ ID NO: 1799747 - DNA, 25 bp, Homo sapien
ctgtgcactgagacatgcggttgcg

SEQ ID NO: 1799748 - DNA, 25 bp, Homo sapien
gaccaggcccctgtgcactgagaca

SEQ ID NO: 1799749 - DNA, 25 bp, Homo sapien
cggttgcggtggaagagaggtagtt

SEQ ID NO: 1799750 - DNA, 25 bp, Homo sapien
tgggttcctctagctcagaaacaag

SEQ ID NO: 1799751 - DNA, 25 bp, Homo sapien
ccaagctgaaatgggtggccctcta

SEQ ID NO: 1799752 - DNA, 25 bp, Homo sapien
tatgtccactgcaagaaccagtccc

SEQ ID NO: 1799753 - DNA, 25 bp, Homo sapien
tccagatactggagaagtcacggtc

SEQ ID NO: 1799754 - DNA, 25 bp, Homo sapien
tctgcaggtgttcgtggtctcggtc

SEQ ID NO: 1799755 - DNA, 25 bp, Homo sapien
cacggtacaaggtgggctgttctca

SEQ ID NO: 1799756 - DNA, 25 bp, Homo sapien
ggttggtcaggacatctagctgcac

SEQ ID NO: 1799757 - DNA, 25 bp, Homo sapien
cacctgtccaggattggagtaccgg

SEQ ID NO: 1799758 - DNA, 25 bp, Homo sapien
gggcagcggggatggttcctgggta

SEQ ID NO: 1799759 - DNA, 25 bp, Homo sapien
tgggggcagcggggatggttcctgg

SEQ ID NO: 1799760 - DNA, 25 bp, Homo sapien
gtgggggcagcggggatggttcctg

SEQ ID NO: 1799761 - DNA, 25 bp, Homo sapien
cagcggggatggttcctgggtacgg

SEQ ID NO: 1799762 - DNA, 25 bp, Homo sapien
tcgtcctccgtgaaggccgagttga

SEQ ID NO: 1799763 - DNA, 25 bp, Homo sapien
tcacggttgttcctccgcagggtag

SEQ ID NO: 1799764 - DNA, 25 bp, Homo sapien
gctattgtcggacctctgggcagcc

SEQ ID NO: 1799765 - DNA, 25 bp, Homo sapien
tgctgtcgaaggtggtgatcctctc

SEQ ID NO: 1799766 - DNA, 25 bp, Homo sapien
aagttcttggcggactcctgggtca

SEQ ID NO: 1799767 - DNA, 25 bp, Homo sapien
gaactccatggatgcaaggcgacag

SEQ ID NO: 1799768 - DNA, 25 bp, Homo sapien
gctgtaaactagagcacgtgctgct

SEQ ID NO: 1799769 - DNA, 25 bp, Homo sapien
gcttgttggccatcacgtacacgaa

SEQ ID NO: 1799770 - DNA, 25 bp, Homo sapien
gaagtctagaatgtacgcactgcca

SEQ ID NO: 1799771 - DNA, 25 bp, Homo sapien
gagaacggatactggaagtctagaa

SEQ ID NO: 1799772 - DNA, 25 bp, Homo sapien
gcctgcacggctgagaacggatact

SEQ ID NO: 1799773 - DNA, 25 bp, Homo sapien
gttggccagggcaactgcaaaggcc

SEQ ID NO: 1799774 - DNA, 25 bp, Homo sapien
cctgccgggcttttccagttttgct

SEQ ID NO: 1799775 - DNA, 25 bp, Homo sapien
tatgtctaaaagaatagcaggctct

SEQ ID NO: 1799776 - DNA, 25 bp, Homo sapien
tcttcattctgaagggcccagtaga

SEQ ID NO: 1799777 - DNA, 25 bp, Homo sapien
taaatgacgaccacaggtcagcgcc

SEQ ID NO: 1799778 - DNA, 25 bp, Homo sapien
agcaaatcgcatttctacctggtga

SEQ ID NO: 1799779 - DNA, 25 bp, Homo sapien
gtgagaacacccctgtaaagagcct

SEQ ID NO: 1799780 - DNA, 25 bp, Homo sapien
caagtcacacgctgagtcacattgc

SEQ ID NO: 1799781 - DNA, 25 bp, Homo sapien
tgtgaacctgtgtatacgtgcagtt

SEQ ID NO: 1799782 - DNA, 25 bp, Homo sapien
caaacgatgaaactagtggaggctt

SEQ ID NO: 1799783 - DNA, 25 bp, Homo sapien
gaatgaccatcactgatcctacgga

SEQ ID NO: 1799784 - DNA, 25 bp, Homo sapien
cctacggaactttgacaaacgatga

SEQ ID NO: 1799785 - DNA, 25 bp, Homo sapien
tcctcagcagaggagtgtagccctc

SEQ ID NO: 1799786 - DNA, 25 bp, Homo sapien
tgtaacatggcagagcacactcagg

SEQ ID NO: 1799787 - DNA, 25 bp, Homo sapien
caaacatccgagacagaagcctgtg

SEQ ID NO: 1799788 - DNA, 25 bp, Homo sapien
tttggaacccaacgccagcagatag

SEQ ID NO: 1799789 - DNA, 25 bp, Homo sapien
cacaggttctcacgaggacgaggaa

SEQ ID NO: 1799790 - DNA, 25 bp, Homo sapien
cattaaaacgcatttgggagtcgca

SEQ ID NO: 1799791 - DNA, 25 bp, Homo sapien
ggaactgaggtgcacaagcagtgca

SEQ ID NO: 1799792 - DNA, 25 bp, Homo sapien
catgaacatgctggtggtctagttt

SEQ ID NO: 1799793 - DNA, 25 bp, Homo sapien
gcagtgcacgccactgccgaggtct

SEQ ID NO: 1799794 - DNA, 25 bp, Homo sapien
taaggagattaatccgtctcagtaa

SEQ ID NO: 1799795 - DNA, 25 bp, Homo sapien
gattaatccgtctcagtaataaaga

SEQ ID NO: 1799796 - DNA, 25 bp, Homo sapien
aataaggagattaatccgtctcagt

SEQ ID NO: 1799797 - DNA, 25 bp, Homo sapien
ggagattaatccgtctcagtaataa

SEQ ID NO: 1799798 - DNA, 25 bp, Homo sapien
caagaaatgagccagcacttccaat

SEQ ID NO: 1799799 - DNA, 25 bp, Homo sapien
tgagccagcacttccaatggatggc

SEQ ID NO: 1799800 - DNA, 25 bp, Homo sapien
gggcgccttctttacttgaagcgat

SEQ ID NO: 1799801 - DNA, 25 bp, Homo sapien
tgaagcgatcgctcagacaggaact

SEQ ID NO: 1799802 - DNA, 25 bp, Homo sapien
ggactcagaggaccccatgggctcc

SEQ ID NO: 1799803 - DNA, 25 bp, Homo sapien
gggcgcatgcgtgtggcatgcacat

SEQ ID NO: 1799804 - DNA, 25 bp, Homo sapien
catcactcgagggtgtgtcttctca

SEQ ID NO: 1799805 - DNA, 25 bp, Homo sapien
tgtcttctcatcataggggttgggg

SEQ ID NO: 1799806 - DNA, 25 bp, Homo sapien
tcttggtgtaggatctaactgggca

SEQ ID NO: 1799807 - DNA, 25 bp, Homo sapien
tgcgctccccagagaggtcgtgtga

SEQ ID NO: 1799808 - DNA, 25 bp, Homo sapien
gtgacactcggtgactatgcacggg

SEQ ID NO: 1799809 - DNA, 25 bp, Homo sapien
caagttcccgctgagaacgtgcaga

SEQ ID NO: 1799810 - DNA, 25 bp, Homo sapien
cgctcaggtcgagcgcgctggcttc

SEQ ID NO: 1799811 - DNA, 25 bp, Homo sapien
gcctgcgctcaggtcgagcgcgctg

SEQ ID NO: 1799812 - DNA, 25 bp, Homo sapien
ggcgcctttggcctgacccaggccg

SEQ ID NO: 1799813 - DNA, 25 bp, Homo sapien
tccctcccctgagcggctgccgctg

SEQ ID NO: 1799814 - DNA, 25 bp, Homo sapien
ctctgggctgagagctgagttgtgc

SEQ ID NO: 1799815 - DNA, 25 bp, Homo sapien
tggtcagcaggaccagatgctctga

SEQ ID NO: 1799816 - DNA, 25 bp, Homo sapien
tccccagttttagtggcaactctgg

SEQ ID NO: 1799817 - DNA, 25 bp, Homo sapien
gactcagagggatttgattcagggt

SEQ ID NO: 1799818 - DNA, 25 bp, Homo sapien
cccgccccgtgaagaggcctgagtg

SEQ ID NO: 1799819 - DNA, 25 bp, Homo sapien
ggacccagtgcgctcagggctccgc

SEQ ID NO: 1799820 - DNA, 25 bp, Homo sapien
gcgcgcaggactcggacccagtgcg

SEQ ID NO: 1799821 - DNA, 25 bp, Homo sapien
gcgagcacgcgaggagctggacacg

SEQ ID NO: 1799822 - DNA, 25 bp, Homo sapien
cggtcccgccgctccaccctttgtg

SEQ ID NO: 1799823 - DNA, 25 bp, Homo sapien
aaaggcagggtactcggcgtccatg

SEQ ID NO: 1799824 - DNA, 25 bp, Homo sapien
aggcagggtactcggcgtccatgcc

SEQ ID NO: 1799825 - DNA, 25 bp, Homo sapien
tcaaaggcagggtactcggcgtcca

SEQ ID NO: 1799826 - DNA, 25 bp, Homo sapien
tcatccttgaagggcgtgaggtcct

SEQ ID NO: 1799827 - DNA, 25 bp, Homo sapien
ttgagctcgcggtacgcttcccgca

SEQ ID NO: 1799828 - DNA, 25 bp, Homo sapien
tgagctcgcggtacgcttcccgcag

SEQ ID NO: 1799829 - DNA, 25 bp, Homo sapien
cttgaagggcgtgaggtcctccttg

SEQ ID NO: 1799830 - DNA, 25 bp, Homo sapien
cattaggttttttaacagatgtgag

SEQ ID NO: 1799831 - DNA, 25 bp, Homo sapien
gtgaggataagtgtgacacgccttt

SEQ ID NO: 1799832 - DNA, 25 bp, Homo sapien
tgcgttgctgattagcccgtgggaa

SEQ ID NO: 1799833 - DNA, 25 bp, Homo sapien
cacggtcccgctgcgttgctgatta

SEQ ID NO: 1799834 - DNA, 25 bp, Homo sapien
gcattcccacttctacagaacccag

SEQ ID NO: 1799835 - DNA, 25 bp, Homo sapien
tcaaattgctgtcctgcagcgagag

SEQ ID NO: 1799836 - DNA, 25 bp, Homo sapien
agcaacaccagcatccgcagcaggg

SEQ ID NO: 1799837 - DNA, 25 bp, Homo sapien
acagagatgtgagggaagccagcac

SEQ ID NO: 1799838 - DNA, 25 bp, Homo sapien
gacctggtccttgaggccacaatgc

SEQ ID NO: 1799839 - DNA, 25 bp, Homo sapien
agctgtaaagccatgtccccactag

SEQ ID NO: 1799840 - DNA, 25 bp, Homo sapien
actagatgcactgagcacctcggga

SEQ ID NO: 1799841 - DNA, 25 bp, Homo sapien
tccctgcaatggtaaatggtaagcg

SEQ ID NO: 1799842 - DNA, 25 bp, Homo sapien
ggtgtcaagtctattccttagttta

SEQ ID NO: 1799843 - DNA, 25 bp, Homo sapien
cccaggtgtcaagtctattccttag

SEQ ID NO: 1799844 - DNA, 25 bp, Homo sapien
ttaacccaggtgtcaagtctattcc

SEQ ID NO: 1799845 - DNA, 25 bp, Homo sapien
tcaagtctattccttagtttaagca

SEQ ID NO: 1799846 - DNA, 25 bp, Homo sapien
acacgaggacaaagtggcgcttgga

SEQ ID NO: 1799847 - DNA, 25 bp, Homo sapien
agatgaagaagacgacaaacacgag

SEQ ID NO: 1799848 - DNA, 25 bp, Homo sapien
gacgacaaacacgaggacaaagtgg

SEQ ID NO: 1799849 - DNA, 25 bp, Homo sapien
agagcgtgtagagccgcatgggcgc

SEQ ID NO: 1799850 - DNA, 25 bp, Homo sapien
gaaacaccctgctaggctctcaatg

SEQ ID NO: 1799851 - DNA, 25 bp, Homo sapien
tgctgtgcttcacgacttcccaaca

SEQ ID NO: 1799852 - DNA, 25 bp, Homo sapien
gaaggcattaactatagagactctg

SEQ ID NO: 1799853 - DNA, 25 bp, Homo sapien
gactcacacattacacggagatgac

SEQ ID NO: 1799854 - DNA, 25 bp, Homo sapien
cgcagaagtctggatcactttaggt

SEQ ID NO: 1799855 - DNA, 25 bp, Homo sapien
gtgaaaaattagccgcagaagtctg

SEQ ID NO: 1799856 - DNA, 25 bp, Homo sapien
aaattagccgcagaagtctggatca

SEQ ID NO: 1799857 - DNA, 25 bp, Homo sapien
tagccgcagaagtctggatcacttt

SEQ ID NO: 1799858 - DNA, 25 bp, Homo sapien
gactctaagcggaaccatttctcag

SEQ ID NO: 1799859 - DNA, 25 bp, Homo sapien
gaaatgaacaactgctccctaagag

SEQ ID NO: 1799860 - DNA, 25 bp, Homo sapien
gacctgaggtttataatgcacccca

SEQ ID NO: 1799861 - DNA, 25 bp, Homo sapien
cctgagaagccgcaaggcaagggaa

SEQ ID NO: 1799862 - DNA, 25 bp, Homo sapien
aagatgaactactatcaggaaagcc

SEQ ID NO: 1799863 - DNA, 25 bp, Homo sapien
tctgtcagggtctcaataaaactcc

SEQ ID NO: 1799864 - DNA, 25 bp, Homo sapien
tgttcagtgtcaaagagagactcac

SEQ ID NO: 1799865 - DNA, 25 bp, Homo sapien
ttaccgcagcatcaacctctcagga

SEQ ID NO: 1799866 - DNA, 25 bp, Homo sapien
gtcagccatagttgctgattgtatg

SEQ ID NO: 1799867 - DNA, 25 bp, Homo sapien
tgtagacagtggatttgaaagtatt

SEQ ID NO: 1799868 - DNA, 25 bp, Homo sapien
gattgatccaactcaacaacacatg

SEQ ID NO: 1799869 - DNA, 25 bp, Homo sapien
tgtatgtagacagtggatttgaaag

SEQ ID NO: 1799870 - DNA, 25 bp, Homo sapien
ccatcgactttaacagtcatgggaa

SEQ ID NO: 1799871 - DNA, 25 bp, Homo sapien
ggttccatcttgagctacaccatcg

SEQ ID NO: 1799872 - DNA, 25 bp, Homo sapien
tgagggtccttgtccggttgtgaac

SEQ ID NO: 1799873 - DNA, 25 bp, Homo sapien
gaatgtacatcgtggttccatcttg

SEQ ID NO: 1799874 - DNA, 25 bp, Homo sapien
ggtgagccacaataatctccgcaca

SEQ ID NO: 1799875 - DNA, 25 bp, Homo sapien
tactgagtgtagttcaggtagccaa

SEQ ID NO: 1799876 - DNA, 25 bp, Homo sapien
caaatcccactatcactgtatactg

SEQ ID NO: 1799877 - DNA, 25 bp, Homo sapien
tagccaaggtgagccacaataatct

SEQ ID NO: 1799878 - DNA, 25 bp, Homo sapien
gggttggaaatgacaacgatgtagc

SEQ ID NO: 1799879 - DNA, 25 bp, Homo sapien
tgacaacgatgtagcaagcacaggt

SEQ ID NO: 1799880 - DNA, 25 bp, Homo sapien
aatgacaacgatgtagcaagcacag

SEQ ID NO: 1799881 - DNA, 25 bp, Homo sapien
tggaaatgacaacgatgtagcaagc

SEQ ID NO: 1799882 - DNA, 25 bp, Homo sapien
ccgtgcaggcacaggtgatgtcaat

SEQ ID NO: 1799883 - DNA, 25 bp, Homo sapien
gatgtcaattcccatgcagcacgaa

SEQ ID NO: 1799884 - DNA, 25 bp, Homo sapien
catctgctgagcacaaccttgtcct

SEQ ID NO: 1799885 - DNA, 25 bp, Homo sapien
ctgattaaatctcccatgcgcccat

SEQ ID NO: 1799886 - DNA, 25 bp, Homo sapien
tttggaacaagtgcccacaccatac

SEQ ID NO: 1799887 - DNA, 25 bp, Homo sapien
ctttggaacaagtgcccacaccata

SEQ ID NO: 1799888 - DNA, 25 bp, Homo sapien
tgacatgcgtttgtgccaagggcct

SEQ ID NO: 1799889 - DNA, 25 bp, Homo sapien
gttctaaaatgtgagctgagagcac

SEQ ID NO: 1799890 - DNA, 25 bp, Homo sapien
acatgttctgactctctgggaggcc

SEQ ID NO: 1799891 - DNA, 25 bp, Homo sapien
cagctttcaaatgagaccctgcaca

SEQ ID NO: 1799892 - DNA, 25 bp, Homo sapien
agatttccaaccgggagaaggcagg

SEQ ID NO: 1799893 - DNA, 25 bp, Homo sapien
cagatttccaaccgggagaaggcag

SEQ ID NO: 1799894 - DNA, 25 bp, Homo sapien
ccagatttccaaccgggagaaggca

SEQ ID NO: 1799895 - DNA, 25 bp, Homo sapien
ggctgggatctgctgcggtccatca

SEQ ID NO: 1799896 - DNA, 25 bp, Homo sapien
cagatcaatctccatgtggcttgca

SEQ ID NO: 1799897 - DNA, 25 bp, Homo sapien
tgctgcggtccatcaggcgaatggt

SEQ ID NO: 1799898 - DNA, 25 bp, Homo sapien
ccgaagatcctaactgcataaacca

SEQ ID NO: 1799899 - DNA, 25 bp, Homo sapien
ccaagagaatgtaggagtcttgtaa

SEQ ID NO: 1799900 - DNA, 25 bp, Homo sapien
taacaaaggtcagaggatgcgtttc

SEQ ID NO: 1799901 - DNA, 25 bp, Homo sapien
ccctgaagaaggtgtgttaggccca

SEQ ID NO: 1799902 - DNA, 25 bp, Homo sapien
ttcccggcagcgcaactgctacaga

SEQ ID NO: 1799903 - DNA, 25 bp, Homo sapien
gcgaggaaaacaaggcccacttcca

SEQ ID NO: 1799904 - DNA, 25 bp, Homo sapien
cactcagacgaacccacccaggaca

SEQ ID NO: 1799905 - DNA, 25 bp, Homo sapien
ccagagagccagcactcagacgaac

SEQ ID NO: 1799906 - DNA, 25 bp, Homo sapien
gagagccagcactcagacgaaccca

SEQ ID NO: 1799907 - DNA, 25 bp, Homo sapien
aaggagaaggaacgtaatccctgca

SEQ ID NO: 1799908 - DNA, 25 bp, Homo sapien
ccttgccggcataccaggttgtctt

SEQ ID NO: 1799909 - DNA, 25 bp, Homo sapien
aagccacagctaagacaggttccga

SEQ ID NO: 1799910 - DNA, 25 bp, Homo sapien
caatggtctaggtgccccactaaga

SEQ ID NO: 1799911 - DNA, 25 bp, Homo sapien
ggaaaatttccggagggaatgcgca

SEQ ID NO: 1799912 - DNA, 25 bp, Homo sapien
tccggagggaatgcgcaaacaggca

SEQ ID NO: 1799913 - DNA, 25 bp, Homo sapien
tttccggagggaatgcgcaaacagg

SEQ ID NO: 1799914 - DNA, 25 bp, Homo sapien
aatttccggagggaatgcgcaaaca

SEQ ID NO: 1799915 - DNA, 25 bp, Homo sapien
aggagaacagacatccacttctgct

SEQ ID NO: 1799916 - DNA, 25 bp, Homo sapien
gaggcaggagaacagacatccactt

SEQ ID NO: 1799917 - DNA, 25 bp, Homo sapien
ccacttctgctcgatgccccagtct

SEQ ID NO: 1799918 - DNA, 25 bp, Homo sapien
cattgtaaagtagcagcagaggcag

SEQ ID NO: 1799919 - DNA, 25 bp, Homo sapien
cacaggaacatggactgaaagaggt

SEQ ID NO: 1799920 - DNA, 25 bp, Homo sapien
ctgggagccagctgttgaccaggaa

SEQ ID NO: 1799921 - DNA, 25 bp, Homo sapien
ctggacacgaatcccgtggtacacg

SEQ ID NO: 1799922 - DNA, 25 bp, Homo sapien
gtggtacacgcacagccagaagagc

SEQ ID NO: 1799923 - DNA, 25 bp, Homo sapien
gtttgccatattcctagcgtaacag

SEQ ID NO: 1799924 - DNA, 25 bp, Homo sapien
caatgaagaatttaggcaaatagaa

SEQ ID NO: 1799925 - DNA, 25 bp, Homo sapien
tagcgtaacagaagccaaccacaat

SEQ ID NO: 1799926 - DNA, 25 bp, Homo sapien
gaagccaaccacaatagtccaacaa

SEQ ID NO: 1799927 - DNA, 25 bp, Homo sapien
agtgacttgcctgcctcagcctgtc

SEQ ID NO: 1799928 - DNA, 25 bp, Homo sapien
tcattgcaacctgtgcctcgcaggc

SEQ ID NO: 1799929 - DNA, 25 bp, Homo sapien
ttgcaacctgtgcctcgcaggctca

SEQ ID NO: 1799930 - DNA, 25 bp, Homo sapien
aagtgacttgcctgcctcagcctgt

SEQ ID NO: 1799931 - DNA, 25 bp, Homo sapien
ctgaagtactttcccaacgtcggtg

SEQ ID NO: 1799932 - DNA, 25 bp, Homo sapien
gcctcatggcagtcctgacgtactc

SEQ ID NO: 1799933 - DNA, 25 bp, Homo sapien
atggcagtcctgacgtactcctcca

SEQ ID NO: 1799934 - DNA, 25 bp, Homo sapien
ctggccatggaacccctgctgaagt

SEQ ID NO: 1799935 - DNA, 25 bp, Homo sapien
gatacgactgaggaacccaacaagg

SEQ ID NO: 1799936 - DNA, 25 bp, Homo sapien
ggctaaccagggcatccagggaaat

SEQ ID NO: 1799937 - DNA, 25 bp, Homo sapien
gcatagcagagtgtcccagttgtgg

SEQ ID NO: 1799938 - DNA, 25 bp, Homo sapien
gatagacttcgacatcagggctcca

SEQ ID NO: 1799939 - DNA, 25 bp, Homo sapien
gaaattatttaccatgccacccttg

SEQ ID NO: 1799940 - DNA, 25 bp, Homo sapien
ccttgcgggaactgctttactggac

SEQ ID NO: 1799941 - DNA, 25 bp, Homo sapien
taggactatgtactgcagcaccctg

SEQ ID NO: 1799942 - DNA, 25 bp, Homo sapien
gagggtaggatatcagacagacaat

SEQ ID NO: 1799943 - DNA, 25 bp, Homo sapien
caacaacaacaaaagcaggggttgc

SEQ ID NO: 1799944 - DNA, 25 bp, Homo sapien
catcagtatgatgtattcaggagac

SEQ ID NO: 1799945 - DNA, 25 bp, Homo sapien
caacaacaaaagcaggggttgcaat

SEQ ID NO: 1799946 - DNA, 25 bp, Homo sapien
ccatcaatgctaggaagaaacagca

SEQ ID NO: 1799947 - DNA, 25 bp, Homo sapien
aactccttcctctgaatgactttga

SEQ ID NO: 1799948 - DNA, 25 bp, Homo sapien
ccctttaggtgcaccaagataggaa

SEQ ID NO: 1799949 - DNA, 25 bp, Homo sapien
taccatgtgccccagtagaacagtg

SEQ ID NO: 1799950 - DNA, 25 bp, Homo sapien
aaacttcacactcataccatgtgcc

SEQ ID NO: 1799951 - DNA, 25 bp, Homo sapien
tagaacagtgggtcctaataagcac

SEQ ID NO: 1799952 - DNA, 25 bp, Homo sapien
ctgaggggcgcttgggccccttcca

SEQ ID NO: 1799953 - DNA, 25 bp, Homo sapien
tctgaggggcgcttgggccccttcc

SEQ ID NO: 1799954 - DNA, 25 bp, Homo sapien
gaggcagccttcaggggtgcggctg

SEQ ID NO: 1799955 - DNA, 25 bp, Homo sapien
aggcagccttcaggggtgcggctgg

SEQ ID NO: 1799956 - DNA, 25 bp, Homo sapien
tatgtatagagaaaaacataccaga

SEQ ID NO: 1799957 - DNA, 25 bp, Homo sapien
gagagagcacgtcacacaactttta

SEQ ID NO: 1799958 - DNA, 25 bp, Homo sapien
tagagaaaaacataccagagggcag

SEQ ID NO: 1799959 - DNA, 25 bp, Homo sapien
tattggttattattagcctaacaaa

SEQ ID NO: 1799960 - DNA, 25 bp, Homo sapien
tgaccctcccgacatatcacaggaa

SEQ ID NO: 1799961 - DNA, 25 bp, Homo sapien
tgcagtcagaaaacgttaaatggga

SEQ ID NO: 1799962 - DNA, 25 bp, Homo sapien
aatctgatagcacgatgacatcctg

SEQ ID NO: 1799963 - DNA, 25 bp, Homo sapien
tgtgtgccacccctttgtcctgtgt

SEQ ID NO: 1799964 - DNA, 25 bp, Homo sapien
tataaactacttcctaccaacagtg

SEQ ID NO: 1799965 - DNA, 25 bp, Homo sapien
tatacaatcctaccaagggtccaca

SEQ ID NO: 1799966 - DNA, 25 bp, Homo sapien
cctttttaatggcacgtatgagtac

SEQ ID NO: 1799967 - DNA, 25 bp, Homo sapien
gagctactccgtgaaagtcctattc

SEQ ID NO: 1799968 - DNA, 25 bp, Homo sapien
cattggatcatgtaattcgttaact

SEQ ID NO: 1799969 - DNA, 25 bp, Homo sapien
aactcgatactggtacattggatca

SEQ ID NO: 1799970 - DNA, 25 bp, Homo sapien
aaatttccggtatcaactcgatact

SEQ ID NO: 1799971 - DNA, 25 bp, Homo sapien
ccggtatcaactcgatactggtaca

SEQ ID NO: 1799972 - DNA, 25 bp, Homo sapien
atggctggttctccccgacacctga

SEQ ID NO: 1799973 - DNA, 25 bp, Homo sapien
tgtctccttcagcaacagacgtggg

SEQ ID NO: 1799974 - DNA, 25 bp, Homo sapien
ttcagcaacagacgtgggccctggg

SEQ ID NO: 1799975 - DNA, 25 bp, Homo sapien
cagcgtgtttagcaccgagaaggct

SEQ ID NO: 1799976 - DNA, 25 bp, Homo sapien
atgtgacgtagctcggaacacgccc

SEQ ID NO: 1799977 - DNA, 25 bp, Homo sapien
cacgcccgcactatcaagaacaaga

SEQ ID NO: 1799978 - DNA, 25 bp, Homo sapien
gtacagaatgtacaccgctgccacc

SEQ ID NO: 1799979 - DNA, 25 bp, Homo sapien
ccacataaggcatgtgacgtagctc

SEQ ID NO: 1799980 - DNA, 25 bp, Homo sapien
tgacaagtactacgaaagtcaatgc

SEQ ID NO: 1799981 - DNA, 25 bp, Homo sapien
acaagtactacgaaagtcaatgcag

SEQ ID NO: 1799982 - DNA, 25 bp, Homo sapien
ctaatgacaagtactacgaaagtca

SEQ ID NO: 1799983 - DNA, 25 bp, Homo sapien
aagtactacgaaagtcaatgcagtc

SEQ ID NO: 1799984 - DNA, 25 bp, Homo sapien
tctttggttcagactcccagccggt

SEQ ID NO: 1799985 - DNA, 25 bp, Homo sapien
tatgtaaacatgcacgaaaacggca

SEQ ID NO: 1799986 - DNA, 25 bp, Homo sapien
tgcacagcagcgaaggcaacatctt

SEQ ID NO: 1799987 - DNA, 25 bp, Homo sapien
aatggaaactggactcaagagctcg

SEQ ID NO: 1799988 - DNA, 25 bp, Homo sapien
gtacttgcgccccaaatctcaaata

SEQ ID NO: 1799989 - DNA, 25 bp, Homo sapien
gtcttgtagtacttgcgccccaaat

SEQ ID NO: 1799990 - DNA, 25 bp, Homo sapien
tgcgccccaaatctcaaataaagga

SEQ ID NO: 1799991 - DNA, 25 bp, Homo sapien
aaatctcaaataaaggatggcgatg

SEQ ID NO: 1799992 - DNA, 25 bp, Homo sapien
taactgctgcaatgctaagcaggcg

SEQ ID NO: 1799993 - DNA, 25 bp, Homo sapien
gggcaaatctgagccactaactgct

SEQ ID NO: 1799994 - DNA, 25 bp, Homo sapien
ctcctcttgagaggggcaaatctga

SEQ ID NO: 1799995 - DNA, 25 bp, Homo sapien
tctgagccactaactgctgcaatgc

SEQ ID NO: 1799996 - DNA, 25 bp, Homo sapien
taaataacaggtgaactatggcctc

SEQ ID NO: 1799997 - DNA, 25 bp, Homo sapien
gaacgcggcatctggacacatcagt

SEQ ID NO: 1799998 - DNA, 25 bp, Homo sapien
tacggtgaatcaaggtctctagaca

SEQ ID NO: 1799999 - DNA, 25 bp, Homo sapien
caagcactcttcgaggtcacagtaa

SEQ ID NO: 1800000 - DNA, 25 bp, Homo sapien
catagagggcattcttcgatggaga

SEQ ID NO: 1800001 - DNA, 25 bp, Homo sapien
ggagaatatacaaaggccaaggtgt

SEQ ID NO: 1800002 - DNA, 25 bp, Homo sapien
tagaagttcaacaggccatagaaag

SEQ ID NO: 1800003 - DNA, 25 bp, Homo sapien
gccaaggtgtagagatagaagttca

SEQ ID NO: 1800004 - DNA, 25 bp, Homo sapien
tgggtcgtggatgaacacaggcctc

SEQ ID NO: 1800005 - DNA, 25 bp, Homo sapien
aggttctacatatgctgggccccaa

SEQ ID NO: 1800006 - DNA, 25 bp, Homo sapien
tctgtgggaatgacacaacgcaggt

SEQ ID NO: 1800007 - DNA, 25 bp, Homo sapien
tacagctaaggcaccgaacattgca

SEQ ID NO: 1800008 - DNA, 25 bp, Homo sapien
tcatcatccgagtcattcagcatgg

SEQ ID NO: 1800009 - DNA, 25 bp, Homo sapien
atcatcatccgagtcattcagcatg

SEQ ID NO: 1800010 - DNA, 25 bp, Homo sapien
catcatcatccgagtcattcagcat

SEQ ID NO: 1800011 - DNA, 25 bp, Homo sapien
tggcctggccgttctgcagcggcat

SEQ ID NO: 1800012 - DNA, 25 bp, Homo sapien
tcctccttgtacttggcccggatgg

SEQ ID NO: 1800013 - DNA, 25 bp, Homo sapien
gcccggatggcctggccgttctgca

SEQ ID NO: 1800014 - DNA, 25 bp, Homo sapien
gttctgcagcggcatttcctcatag

SEQ ID NO: 1800015 - DNA, 25 bp, Homo sapien
tatgacacgggttctcgctctgaca

SEQ ID NO: 1800016 - DNA, 25 bp, Homo sapien
tatggagtccctgactgaaaggaac

SEQ ID NO: 1800017 - DNA, 25 bp, Homo sapien
gactttacagaacaggtcgtcccta

SEQ ID NO: 1800018 - DNA, 25 bp, Homo sapien
catttcccagaaaggtagtgtcaga

SEQ ID NO: 1800019 - DNA, 25 bp, Homo sapien
gtgaatggcaccgaagtcagatgag

SEQ ID NO: 1800020 - DNA, 25 bp, Homo sapien
tcagatgagtatccctgtaggtcac

SEQ ID NO: 1800021 - DNA, 25 bp, Homo sapien
tgtaggtcacctgcagcctgcgttg

SEQ ID NO: 1800022 - DNA, 25 bp, Homo sapien
gaaaaaaccaaatgaccgcactgtg

SEQ ID NO: 1800023 - DNA, 25 bp, Homo sapien
cgagtttgttgccaggtgtccgagc

SEQ ID NO: 1800024 - DNA, 25 bp, Homo sapien
tccacacagtacaaaccggaggagg

SEQ ID NO: 1800025 - DNA, 25 bp, Homo sapien
ccaagggaactgcaacaacgtctca

SEQ ID NO: 1800026 - DNA, 25 bp, Homo sapien
tttcgttcagatagctaaagcatgc

SEQ ID NO: 1800027 - DNA, 25 bp, Homo sapien
ttcgcatctgcttcaagagaagaga

SEQ ID NO: 1800028 - DNA, 25 bp, Homo sapien
cttcgcatctgcttcaagagaagag

SEQ ID NO: 1800029 - DNA, 25 bp, Homo sapien
caaagttgaacaggcgctttctctg

SEQ ID NO: 1800030 - DNA, 25 bp, Homo sapien
gcaattcaccgctgattccgagtat

SEQ ID NO: 1800031 - DNA, 25 bp, Homo sapien
ttccgagtattctttctcattcggg

SEQ ID NO: 1800032 - DNA, 25 bp, Homo sapien
gaaagatcactgcaattcaccgctg

SEQ ID NO: 1800033 - DNA, 25 bp, Homo sapien
cttcaagggccagatcaaggctacc

SEQ ID NO: 1800034 - DNA, 25 bp, Homo sapien
cacggcggtgctatgatgacgaaac

SEQ ID NO: 1800035 - DNA, 25 bp, Homo sapien
tgatgttgctgaatggaccacgagg

SEQ ID NO: 1800036 - DNA, 25 bp, Homo sapien
taatgccggctgacagtcgtggtac

SEQ ID NO: 1800037 - DNA, 25 bp, Homo sapien
tcctatggtagcatcaagattgacc

SEQ ID NO: 1800038 - DNA, 25 bp, Homo sapien
gtccccactggcttgatggcgttgg

SEQ ID NO: 1800039 - DNA, 25 bp, Homo sapien
ggcattcgattgaaccacagttgct

SEQ ID NO: 1800040 - DNA, 25 bp, Homo sapien
tcatcctatggtagcatcaagattg

SEQ ID NO: 1800041 - DNA, 25 bp, Homo sapien
ttccctccttagatccaggttccag

SEQ ID NO: 1800042 - DNA, 25 bp, Homo sapien
aggcagaactggcatccctcagtgc

SEQ ID NO: 1800043 - DNA, 25 bp, Homo sapien
ctggtacctgactatgccagcaggg

SEQ ID NO: 1800044 - DNA, 25 bp, Homo sapien
ggctggtacctgactatgccagcag

SEQ ID NO: 1800045 - DNA, 25 bp, Homo sapien
tcatgaaaagctcagcccgttcaat

SEQ ID NO: 1800046 - DNA, 25 bp, Homo sapien
catgaaaagctcagcccgttcaata

SEQ ID NO: 1800047 - DNA, 25 bp, Homo sapien
tacggctcgcagagcctcgtgctac

SEQ ID NO: 1800048 - DNA, 25 bp, Homo sapien
ctcaagaagttctgcgtttgtcgga

SEQ ID NO: 1800049 - DNA, 25 bp, Homo sapien
cagccagccttgtttaaagagctcc

SEQ ID NO: 1800050 - DNA, 25 bp, Homo sapien
taactgtgtcatactccttagaaga

SEQ ID NO: 1800051 - DNA, 25 bp, Homo sapien
tttcgttgacccaggttggaagagc

SEQ ID NO: 1800052 - DNA, 25 bp, Homo sapien
gttgacccaggttggaagagcttca

SEQ ID NO: 1800053 - DNA, 25 bp, Homo sapien
cgttgacccaggttggaagagcttc

SEQ ID NO: 1800054 - DNA, 25 bp, Homo sapien
tcgttgacccaggttggaagagctt

SEQ ID NO: 1800055 - DNA, 25 bp, Homo sapien
ggcctcgcgttctaactccttgaga

SEQ ID NO: 1800056 - DNA, 25 bp, Homo sapien
ctggagaatggcctcgcgttctaac

SEQ ID NO: 1800057 - DNA, 25 bp, Homo sapien
cctcctctgtgttttgaaccgcctg

SEQ ID NO: 1800058 - DNA, 25 bp, Homo sapien
cgcctggtctcggtacaggacctgg

SEQ ID NO: 1800059 - DNA, 25 bp, Homo sapien
ttagttacataaggaggatcatctc

SEQ ID NO: 1800060 - DNA, 25 bp, Homo sapien
agaccttcgttaggacccttctcag

SEQ ID NO: 1800061 - DNA, 25 bp, Homo sapien
taagcaaacagcattggcgacggag

SEQ ID NO: 1800062 - DNA, 25 bp, Homo sapien
taaatgaataacaagagcggcctcc

SEQ ID NO: 1800063 - DNA, 25 bp, Homo sapien
tgaatgattcccacgaagtcggcaa

SEQ ID NO: 1800064 - DNA, 25 bp, Homo sapien
ttggcaaagcggtcaggaaacaggc

SEQ ID NO: 1800065 - DNA, 25 bp, Homo sapien
ggctttggcattcgacatccctgga

SEQ ID NO: 1800066 - DNA, 25 bp, Homo sapien
tcttgacagctaaggcggaacactg

SEQ ID NO: 1800067 - DNA, 25 bp, Homo sapien
gccctcagagttaaagaagatagta

SEQ ID NO: 1800068 - DNA, 25 bp, Homo sapien
gaagatagtattagatggaacacct

SEQ ID NO: 1800069 - DNA, 25 bp, Homo sapien
tattagatggaacacctgaccccag

SEQ ID NO: 1800070 - DNA, 25 bp, Homo sapien
cagccctcagagttaaagaagatag

SEQ ID NO: 1800071 - DNA, 25 bp, Homo sapien
atgggtccccctcaggaacactcgg

SEQ ID NO: 1800072 - DNA, 25 bp, Homo sapien
tctttgtgctcccagtccgtgttct

SEQ ID NO: 1800073 - DNA, 25 bp, Homo sapien
gtgttcttcgctcctttccaccgga

SEQ ID NO: 1800074 - DNA, 25 bp, Homo sapien
actgggcacacacgcggtggctgca

SEQ ID NO: 1800075 - DNA, 25 bp, Homo sapien
agtgagagtgaattatcccattctc

SEQ ID NO: 1800076 - DNA, 25 bp, Homo sapien
attatcccattctcatacactagtt

SEQ ID NO: 1800077 - DNA, 25 bp, Homo sapien
tatcccattctcatacactagttat

SEQ ID NO: 1800078 - DNA, 25 bp, Homo sapien
gagtgagagtgaattatcccattct

SEQ ID NO: 1800079 - DNA, 25 bp, Homo sapien
ctctaactgtgtcgggcagggccac

SEQ ID NO: 1800080 - DNA, 25 bp, Homo sapien
cctctaactgtgtcgggcagggcca

SEQ ID NO: 1800081 - DNA, 25 bp, Homo sapien
gccacacactgagggcccaagcaga

SEQ ID NO: 1800082 - DNA, 25 bp, Homo sapien
gcagggccacacactgagggcccaa

SEQ ID NO: 1800083 - DNA, 25 bp, Homo sapien
gaaatttcttggctcgttcctcata

SEQ ID NO: 1800084 - DNA, 25 bp, Homo sapien
ggaaatttcttggctcgttcctcat

SEQ ID NO: 1800085 - DNA, 25 bp, Homo sapien
ctcgttcctcatagaaccattctcc

SEQ ID NO: 1800086 - DNA, 25 bp, Homo sapien
tcgttcctcatagaaccattctcca

SEQ ID NO: 1800087 - DNA, 25 bp, Homo sapien
gaccaatgttgttttgccaaactga

SEQ ID NO: 1800088 - DNA, 25 bp, Homo sapien
catctacagaaggttgaaaagtgga

SEQ ID NO: 1800089 - DNA, 25 bp, Homo sapien
gactaatcgccttcacataccaaga

SEQ ID NO: 1800090 - DNA, 25 bp, Homo sapien
tcacaggataaggaagaagtctcga

SEQ ID NO: 1800091 - DNA, 25 bp, Homo sapien
tgctgggcactgacaatggacacta

SEQ ID NO: 1800092 - DNA, 25 bp, Homo sapien
ccaaattgccaagagttgcaggtga

SEQ ID NO: 1800093 - DNA, 25 bp, Homo sapien
ggcaccgtgtgtcctctatgagaca

SEQ ID NO: 1800094 - DNA, 25 bp, Homo sapien
catttgtaaggtgcctactcagtgc

SEQ ID NO: 1800095 - DNA, 25 bp, Homo sapien
gctctacttagtttaaatggacctg

SEQ ID NO: 1800096 - DNA, 25 bp, Homo sapien
ggcttacgcctacagtcttagcaat

SEQ ID NO: 1800097 - DNA, 25 bp, Homo sapien
tgctgggaaaacactaccaagacac

SEQ ID NO: 1800098 - DNA, 25 bp, Homo sapien
tggacctgtctaaaaatctctgaga

SEQ ID NO: 1800099 - DNA, 25 bp, Homo sapien
tcaagagcctgtctcaggaagatta

SEQ ID NO: 1800100 - DNA, 25 bp, Homo sapien
agagcctgtctcaggaagattatta

SEQ ID NO: 1800101 - DNA, 25 bp, Homo sapien
gagcctgtctcaggaagattattat

SEQ ID NO: 1800102 - DNA, 25 bp, Homo sapien
caagagcctgtctcaggaagattat

SEQ ID NO: 1800103 - DNA, 25 bp, Homo sapien
tttgccaactcccaaaagagcaggg

SEQ ID NO: 1800104 - DNA, 25 bp, Homo sapien
tataataaaatagggcagcagatgc

SEQ ID NO: 1800105 - DNA, 25 bp, Homo sapien
tttacaaaagcagggtgatgggcca

SEQ ID NO: 1800106 - DNA, 25 bp, Homo sapien
gctttgccagccgtaaggtctctgt

SEQ ID NO: 1800107 - DNA, 25 bp, Homo sapien
cactcaaggccgagggtgactggtt

SEQ ID NO: 1800108 - DNA, 25 bp, Homo sapien
aaaaatgaatataggctctaggagc

SEQ ID NO: 1800109 - DNA, 25 bp, Homo sapien
tctctcattctgttgcttacctttt

SEQ ID NO: 1800110 - DNA, 25 bp, Homo sapien
actggttcaggtttggtgagtacct

SEQ ID NO: 1800111 - DNA, 25 bp, Homo sapien
ctttgccagggacaggaacagctgc

SEQ ID NO: 1800112 - DNA, 25 bp, Homo sapien
ctgccagggcttgtctcaggcacat

SEQ ID NO: 1800113 - DNA, 25 bp, Homo sapien
ccaggtctgaggctgccagggcttg

SEQ ID NO: 1800114 - DNA, 25 bp, Homo sapien
ccgtctttgccagggacaggaacag

SEQ ID NO: 1800115 - DNA, 25 bp, Homo sapien
tggctggcgagtgactttagcaggg

SEQ ID NO: 1800116 - DNA, 25 bp, Homo sapien
ctggcgagtgactttagcagggata

SEQ ID NO: 1800117 - DNA, 25 bp, Homo sapien
tggcgagtgactttagcagggatac

SEQ ID NO: 1800118 - DNA, 25 bp, Homo sapien
gctggcgagtgactttagcagggat

SEQ ID NO: 1800119 - DNA, 25 bp, Homo sapien
tatggcgtggtctgaagtccaggcc

SEQ ID NO: 1800120 - DNA, 25 bp, Homo sapien
tgaggcacagtcaccaaaaagccac

SEQ ID NO: 1800121 - DNA, 25 bp, Homo sapien
ttattgccctgcctacccggtgagg

SEQ ID NO: 1800122 - DNA, 25 bp, Homo sapien
gaggctatcacactaccacctggaa

SEQ ID NO: 1800123 - DNA, 25 bp, Homo sapien
caaatgcataggaagagaccagtcc

SEQ ID NO: 1800124 - DNA, 25 bp, Homo sapien
aagcccgggcactcaactagtagga

SEQ ID NO: 1800125 - DNA, 25 bp, Homo sapien
tctgcgggcggcaatataccacagg

SEQ ID NO: 1800126 - DNA, 25 bp, Homo sapien
tgcgagagatatccatagagggcgt

SEQ ID NO: 1800127 - DNA, 25 bp, Homo sapien
gcttctgataagattgcaagagctg

SEQ ID NO: 1800128 - DNA, 25 bp, Homo sapien
ggttgtgaaccatgcaagccgttag

SEQ ID NO: 1800129 - DNA, 25 bp, Homo sapien
tatttcaccagtatctctaacgcgc

SEQ ID NO: 1800130 - DNA, 25 bp, Homo sapien
tgctgcctaaagtctgggtactccg

SEQ ID NO: 1800131 - DNA, 25 bp, Homo sapien
gtatctatatgagggcgatgctgcc

SEQ ID NO: 1800132 - DNA, 25 bp, Homo sapien
cctgccaggactgcggctgcactgg

SEQ ID NO: 1800133 - DNA, 25 bp, Homo sapien
tgcactggctctcgctgacaggagg

SEQ ID NO: 1800134 - DNA, 25 bp, Homo sapien
gactgcggctgcactggctctcgct

SEQ ID NO: 1800135 - DNA, 25 bp, Homo sapien
agtaggaggaaccacagaaattttg

SEQ ID NO: 1800136 - DNA, 25 bp, Homo sapien
cagaaagggtcgctgatgacacaga

SEQ ID NO: 1800137 - DNA, 25 bp, Homo sapien
ggcgtattgggacataacctcatca

SEQ ID NO: 1800138 - DNA, 25 bp, Homo sapien
cattcaggatgatagcactcaggac

SEQ ID NO: 1800139 - DNA, 25 bp, Homo sapien
tgccatgccaagagtaaagagacct

SEQ ID NO: 1800140 - DNA, 25 bp, Homo sapien
ttccacggacttattaaatcctcta

SEQ ID NO: 1800141 - DNA, 25 bp, Homo sapien
gacttattaaatcctctaaactgac

SEQ ID NO: 1800142 - DNA, 25 bp, Homo sapien
cggacttattaaatcctctaaactg

SEQ ID NO: 1800143 - DNA, 25 bp, Homo sapien
ttttcacgtgggtagcaagagacag

SEQ ID NO: 1800144 - DNA, 25 bp, Homo sapien
ggaacaagcagctttgctgagactt

SEQ ID NO: 1800145 - DNA, 25 bp, Homo sapien
gcaaacacaagggttgatgggtggg

SEQ ID NO: 1800146 - DNA, 25 bp, Homo sapien
cacaagggttgatgggtgggaacaa

SEQ ID NO: 1800147 - DNA, 25 bp, Homo sapien
aaaaggcaaacacaagggttgatgg

SEQ ID NO: 1800148 - DNA, 25 bp, Homo sapien
cctggtggtgacgttgaccgcagtg

SEQ ID NO: 1800149 - DNA, 25 bp, Homo sapien
cctggggcccgtggcgagaagatgc

SEQ ID NO: 1800150 - DNA, 25 bp, Homo sapien
tgtcagactggctccgtctctctgt

SEQ ID NO: 1800151 - DNA, 25 bp, Homo sapien
gacgttgaccgcagtgtcagactgg

SEQ ID NO: 1800152 - DNA, 25 bp, Homo sapien
gggccagccctgcccaaatagaggc

SEQ ID NO: 1800153 - DNA, 25 bp, Homo sapien
cccttgggctttggcgcaggcttga

SEQ ID NO: 1800154 - DNA, 25 bp, Homo sapien
cttgggctttggcgcaggcttgaag

SEQ ID NO: 1800155 - DNA, 25 bp, Homo sapien
gggctttggcgcaggcttgaagcca

SEQ ID NO: 1800156 - DNA, 25 bp, Homo sapien
tgggctttggcgcaggcttgaagcc

SEQ ID NO: 1800157 - DNA, 25 bp, Homo sapien
acagggcccagagacagacaacatc

SEQ ID NO: 1800158 - DNA, 25 bp, Homo sapien
cttctgagtaggaggacacacctgc

SEQ ID NO: 1800159 - DNA, 25 bp, Homo sapien
tgggatagtcatgaacagtcatggg

SEQ ID NO: 1800160 - DNA, 25 bp, Homo sapien
catttggtaaatgcgtgcacgtgcg

SEQ ID NO: 1800161 - DNA, 25 bp, Homo sapien
gatcctcttgattgagaggtttcag

SEQ ID NO: 1800162 - DNA, 25 bp, Homo sapien
gattctgttgcttcaaaatagggtt

SEQ ID NO: 1800163 - DNA, 25 bp, Homo sapien
ggttagtagagcatttgggatcctc

SEQ ID NO: 1800164 - DNA, 25 bp, Homo sapien
agaatatggtactgggtgccggact

SEQ ID NO: 1800165 - DNA, 25 bp, Homo sapien
ctaagcagcaaagggactaagatgg

SEQ ID NO: 1800166 - DNA, 25 bp, Homo sapien
gcttctacgtgtggactggccctga

SEQ ID NO: 1800167 - DNA, 25 bp, Homo sapien
ggtgagaatagacagccctactgaa

SEQ ID NO: 1800168 - DNA, 25 bp, Homo sapien
gggaaggcaacacctttagcaagaa

SEQ ID NO: 1800169 - DNA, 25 bp, Homo sapien
tatacagttagaataatactgtgtg

SEQ ID NO: 1800170 - DNA, 25 bp, Homo sapien
ttatacagttagaataatactgtgt

SEQ ID NO: 1800171 - DNA, 25 bp, Homo sapien
tatcccccaaacaatctactgttta

SEQ ID NO: 1800172 - DNA, 25 bp, Homo sapien
caatctactgtttagttttacctga

SEQ ID NO: 1800173 - DNA, 25 bp, Homo sapien
tacaggtgctgtcaatgctaattaa

SEQ ID NO: 1800174 - DNA, 25 bp, Homo sapien
ctctgtacaggtgctgtcaatgcta

SEQ ID NO: 1800175 - DNA, 25 bp, Homo sapien
ctgtacaggtgctgtcaatgctaat

SEQ ID NO: 1800176 - DNA, 25 bp, Homo sapien
gtacaggtgctgtcaatgctaatta

SEQ ID NO: 1800177 - DNA, 25 bp, Homo sapien
cataggcaaggttcttacaggcctt

SEQ ID NO: 1800178 - DNA, 25 bp, Homo sapien
aattctatttctccagtgacattag

SEQ ID NO: 1800179 - DNA, 25 bp, Homo sapien
tctatttctccagtgacattagcat

SEQ ID NO: 1800180 - DNA, 25 bp, Homo sapien
taggcaaggttcttacaggccttga

SEQ ID NO: 1800181 - DNA, 25 bp, Homo sapien
gggaggatctgtcgggcaacaggta

SEQ ID NO: 1800182 - DNA, 25 bp, Homo sapien
tctgtcgggcaacaggtaggtcttc

SEQ ID NO: 1800183 - DNA, 25 bp, Homo sapien
ggatctgtcgggcaacaggtaggtc

SEQ ID NO: 1800184 - DNA, 25 bp, Homo sapien
tgggaggatctgtcgggcaacaggt

SEQ ID NO: 1800185 - DNA, 25 bp, Homo sapien
ttggactccagtcttgcgctttccc

SEQ ID NO: 1800186 - DNA, 25 bp, Homo sapien
ctcctgaaaggtcgggtccacggtg

SEQ ID NO: 1800187 - DNA, 25 bp, Homo sapien
tccacggtgttcctttggactccag

SEQ ID NO: 1800188 - DNA, 25 bp, Homo sapien
cttcaaggtctcctgaaaggtcggg

SEQ ID NO: 1800189 - DNA, 25 bp, Homo sapien
cacttttcctgtacaaaggctgaca

SEQ ID NO: 1800190 - DNA, 25 bp, Homo sapien
gagtttgaaagcaccatccactgga

SEQ ID NO: 1800191 - DNA, 25 bp, Homo sapien
cactgattgacagagctgcgaagaa

SEQ ID NO: 1800192 - DNA, 25 bp, Homo sapien
gctcgggaggactctgcacaggaat

SEQ ID NO: 1800193 - DNA, 25 bp, Homo sapien
tttacccatctttccaatcgaggaa

SEQ ID NO: 1800194 - DNA, 25 bp, Homo sapien
ctgagacacggtaatttccctcctt

SEQ ID NO: 1800195 - DNA, 25 bp, Homo sapien
gacacggtaatttccctccttcagc

SEQ ID NO: 1800196 - DNA, 25 bp, Homo sapien
tcgaggaacgagatggaataaaaca

SEQ ID NO: 1800197 - DNA, 25 bp, Homo sapien
tcccacaggctgagtccaagatgcg

SEQ ID NO: 1800198 - DNA, 25 bp, Homo sapien
tccaagatgcggatgcagccaggga

SEQ ID NO: 1800199 - DNA, 25 bp, Homo sapien
ctggcgcaggcctccctcccacagg

SEQ ID NO: 1800200 - DNA, 25 bp, Homo sapien
gctgagtccaagatgcggatgcagc

SEQ ID NO: 1800201 - DNA, 25 bp, Homo sapien
ggactgtgttgtgctgtcttcaaag

SEQ ID NO: 1800202 - DNA, 25 bp, Homo sapien
caaagtcccacgtggccagaggaat

SEQ ID NO: 1800203 - DNA, 25 bp, Homo sapien
gaatgatcacttctccaagaaacac

SEQ ID NO: 1800204 - DNA, 25 bp, Homo sapien
aagaaacactctccgggccagcgtg

SEQ ID NO: 1800205 - DNA, 25 bp, Homo sapien
tactctgaggaacgctgtcttcgta

SEQ ID NO: 1800206 - DNA, 25 bp, Homo sapien
tagcccggactgtgagctctccatt

SEQ ID NO: 1800207 - DNA, 25 bp, Homo sapien
tttctgggccgtgaagggagaacca

SEQ ID NO: 1800208 - DNA, 25 bp, Homo sapien
gaagggagaaccagcttagcccgga

SEQ ID NO: 1800209 - DNA, 25 bp, Homo sapien
ccatctggccgcacaggtaaattct

SEQ ID NO: 1800210 - DNA, 25 bp, Homo sapien
taacaaatgagttcaaggtgccatc

SEQ ID NO: 1800211 - DNA, 25 bp, Homo sapien
gcactaccaaacaaagttgaccatg

SEQ ID NO: 1800212 - DNA, 25 bp, Homo sapien
ccatgaagtgatggctgatctgtcc

SEQ ID NO: 1800213 - DNA, 25 bp, Homo sapien
cccttagggccgaattctgcatcag

SEQ ID NO: 1800214 - DNA, 25 bp, Homo sapien
tctgcatcaggtatgaagggcgagc

SEQ ID NO: 1800215 - DNA, 25 bp, Homo sapien
gattagggtttcgagtactccagca

SEQ ID NO: 1800216 - DNA, 25 bp, Homo sapien
catgcgttttactgttggtccaaga

SEQ ID NO: 1800217 - DNA, 25 bp, Homo sapien
tggttcctccaagcaagcggtcgtt

SEQ ID NO: 1800218 - DNA, 25 bp, Homo sapien
ggttacgccactgaagacaaatgag

SEQ ID NO: 1800219 - DNA, 25 bp, Homo sapien
gcttgactgcctcagctgagctggg

SEQ ID NO: 1800220 - DNA, 25 bp, Homo sapien
ggtcgttcattccaaagagggcctg

SEQ ID NO: 1800221 - DNA, 25 bp, Homo sapien
tctgctctgcgaggctctaacagcc

SEQ ID NO: 1800222 - DNA, 25 bp, Homo sapien
tcaccaagggagtggatagttgcac

SEQ ID NO: 1800223 - DNA, 25 bp, Homo sapien
gactgggattcacgcaggcatcctc

SEQ ID NO: 1800224 - DNA, 25 bp, Homo sapien
ggccaaccactgatgacagacgccg

SEQ ID NO: 1800225 - DNA, 25 bp, Homo sapien
tttctgccactggagcttcgatagt

SEQ ID NO: 1800226 - DNA, 25 bp, Homo sapien
tagattggggctggaaaggactttc

SEQ ID NO: 1800227 - DNA, 25 bp, Homo sapien
cttcgatagtgagcatgcatccccg

SEQ ID NO: 1800228 - DNA, 25 bp, Homo sapien
gcaggacaagagtcatgtctgtcca

SEQ ID NO: 1800229 - DNA, 25 bp, Homo sapien
tcaaagaggagataacccaccagag

SEQ ID NO: 1800230 - DNA, 25 bp, Homo sapien
cagatggagactgctcaaggtcaaa

SEQ ID NO: 1800231 - DNA, 25 bp, Homo sapien
aatatacacagataccaataggcgg

SEQ ID NO: 1800232 - DNA, 25 bp, Homo sapien
caataggcggttaagccatgggaca

SEQ ID NO: 1800233 - DNA, 25 bp, Homo sapien
cttctgagctcaagccatccactgc

SEQ ID NO: 1800234 - DNA, 25 bp, Homo sapien
ctgagctcaagccatccactgcagc

SEQ ID NO: 1800235 - DNA, 25 bp, Homo sapien
gagctcaagccatccactgcagcct

SEQ ID NO: 1800236 - DNA, 25 bp, Homo sapien
ttctgagctcaagccatccactgca

SEQ ID NO: 1800237 - DNA, 25 bp, Homo sapien
caagcaggcctgattctcgcgatta

SEQ ID NO: 1800238 - DNA, 25 bp, Homo sapien
tctttagtgctccaagtctaggaac

SEQ ID NO: 1800239 - DNA, 25 bp, Homo sapien
caggtggattccatgccgcagacat

SEQ ID NO: 1800240 - DNA, 25 bp, Homo sapien
cggaaaatgcctgtaaagtctgagt

SEQ ID NO: 1800241 - DNA, 25 bp, Homo sapien
ccatcccaagttgcaagcggaagac

SEQ ID NO: 1800242 - DNA, 25 bp, Homo sapien
taaaactgcccaggttccggcatca

SEQ ID NO: 1800243 - DNA, 25 bp, Homo sapien
tacctgttaagtgaggagagctggc

SEQ ID NO: 1800244 - DNA, 25 bp, Homo sapien
gaggctaggaacagagcccgttact

SEQ ID NO: 1800245 - DNA, 25 bp, Homo sapien
ccaggcggtttctgctgtgaactca

SEQ ID NO: 1800246 - DNA, 25 bp, Homo sapien
tgtgggagagtttcctggcatcctg

SEQ ID NO: 1800247 - DNA, 25 bp, Homo sapien
gagaaagtaagcagcgtttccgctc

SEQ ID NO: 1800248 - DNA, 25 bp, Homo sapien
ttgtatacagctgacacggcctgcc

SEQ ID NO: 1800249 - DNA, 25 bp, Homo sapien
gaggacatggtaagaaggcgacact

SEQ ID NO: 1800250 - DNA, 25 bp, Homo sapien
gacctgcgagtctcaagggccagat

SEQ ID NO: 1800251 - DNA, 25 bp, Homo sapien
tcctggaacttacccaagataggga

SEQ ID NO: 1800252 - DNA, 25 bp, Homo sapien
tgctggtgcccaaggtttcatcggg

SEQ ID NO: 1800253 - DNA, 25 bp, Homo sapien
cattgtcagacctatggaaagcagc

SEQ ID NO: 1800254 - DNA, 25 bp, Homo sapien
tcagcaggtcggaaatggccatcag

SEQ ID NO: 1800255 - DNA, 25 bp, Homo sapien
attattttcatacgccatcagcagg

SEQ ID NO: 1800256 - DNA, 25 bp, Homo sapien
caggcttggaactcgggcatgacta

SEQ ID NO: 1800257 - DNA, 25 bp, Homo sapien
gctgaactgcctttaagtggctcca

SEQ ID NO: 1800258 - DNA, 25 bp, Homo sapien
tgcccgccccttcatgttagggtga

SEQ ID NO: 1800259 - DNA, 25 bp, Homo sapien
taagctgtcatgagaaccatagagc

SEQ ID NO: 1800260 - DNA, 25 bp, Homo sapien
gaacactgctgtagttaagctctgg

SEQ ID NO: 1800261 - DNA, 25 bp, Homo sapien
cagaaaccgaaaatgccgaaaccag

SEQ ID NO: 1800262 - DNA, 25 bp, Homo sapien
ccgggcggacgggagaggcttcatt

SEQ ID NO: 1800263 - DNA, 25 bp, Homo sapien
ggaggcacctgctcgaggtgttggg

SEQ ID NO: 1800264 - DNA, 25 bp, Homo sapien
aaaccagtaagttgcccagtttctg

SEQ ID NO: 1800265 - DNA, 25 bp, Homo sapien
gaatagaggtcaaaatctcagaaga

SEQ ID NO: 1800266 - DNA, 25 bp, Homo sapien
tggatctgcaagtgggagataacag

SEQ ID NO: 1800267 - DNA, 25 bp, Homo sapien
caaagggttgcccaaacagcagtgt

SEQ ID NO: 1800268 - DNA, 25 bp, Homo sapien
gataacaggccctgacaaagggttg

SEQ ID NO: 1800269 - DNA, 25 bp, Homo sapien
caaggttggctgattccatgaatgt

SEQ ID NO: 1800270 - DNA, 25 bp, Homo sapien
aggttggctgattccatgaatgtag

SEQ ID NO: 1800271 - DNA, 25 bp, Homo sapien
ttggctgattccatgaatgtagaac

SEQ ID NO: 1800272 - DNA, 25 bp, Homo sapien
ggttggctgattccatgaatgtaga

SEQ ID NO: 1800273 - DNA, 25 bp, Homo sapien
caggggatgactatccaggtcagct

SEQ ID NO: 1800274 - DNA, 25 bp, Homo sapien
gaaccaggggatgactatccaggtc

SEQ ID NO: 1800275 - DNA, 25 bp, Homo sapien
ccaggggatgactatccaggtcagc

SEQ ID NO: 1800276 - DNA, 25 bp, Homo sapien
taggaaccaggggatgactatccag

SEQ ID NO: 1800277 - DNA, 25 bp, Homo sapien
ggccccacaacatgcatggctggaa

SEQ ID NO: 1800278 - DNA, 25 bp, Homo sapien
caagttctaggatccgatggccaga

SEQ ID NO: 1800279 - DNA, 25 bp, Homo sapien
gaaatcgtgtgtcctctacatggaa

SEQ ID NO: 1800280 - DNA, 25 bp, Homo sapien
aaagccaccgttggagggcatggcc

SEQ ID NO: 1800281 - DNA, 25 bp, Homo sapien
ttgcctattgctaagcccacatgag

SEQ ID NO: 1800282 - DNA, 25 bp, Homo sapien
caggagcaccggatggtccttctct

SEQ ID NO: 1800283 - DNA, 25 bp, Homo sapien
taaagtcctgccaattgctaagcat

SEQ ID NO: 1800284 - DNA, 25 bp, Homo sapien
tgaagatggactcatgcaacacagc

SEQ ID NO: 1800285 - DNA, 25 bp, Homo sapien
gtgtgcaaggcccccaagccttggt

SEQ ID NO: 1800286 - DNA, 25 bp, Homo sapien
gcaaggcccccaagccttggtccat

SEQ ID NO: 1800287 - DNA, 25 bp, Homo sapien
tgcaaggcccccaagccttggtcca

SEQ ID NO: 1800288 - DNA, 25 bp, Homo sapien
tgtgcaaggcccccaagccttggtc

SEQ ID NO: 1800289 - DNA, 25 bp, Homo sapien
tagttggcgtcagagtgttttgccc

SEQ ID NO: 1800290 - DNA, 25 bp, Homo sapien
tccttgtgatggttgtagttggcgt

SEQ ID NO: 1800291 - DNA, 25 bp, Homo sapien
gttgtagttggcgtcagagtgtttt

SEQ ID NO: 1800292 - DNA, 25 bp, Homo sapien
ccttgtgatggttgtagttggcgtc

SEQ ID NO: 1800293 - DNA, 25 bp, Homo sapien
caggctcccaaaggttcctcagccc

SEQ ID NO: 1800294 - DNA, 25 bp, Homo sapien
ccccatgaaggctctcgagcagagg

SEQ ID NO: 1800295 - DNA, 25 bp, Homo sapien
cagaggcctccttctgttaatgtga

SEQ ID NO: 1800296 - DNA, 25 bp, Homo sapien
ggtgtcttcctgggttgccatctga

SEQ ID NO: 1800297 - DNA, 25 bp, Homo sapien
agttcaggaagtgtactggtgccca

SEQ ID NO: 1800298 - DNA, 25 bp, Homo sapien
gagtgtacttgcagaggccatcagg

SEQ ID NO: 1800299 - DNA, 25 bp, Homo sapien
catcaccagggtctcagactctgta

SEQ ID NO: 1800300 - DNA, 25 bp, Homo sapien
cacaggctcaattgacttgtcctca

SEQ ID NO: 1800301 - DNA, 25 bp, Homo sapien
tcattggccgactagagtgcaaaca

SEQ ID NO: 1800302 - DNA, 25 bp, Homo sapien
tatagtagcgtgcaaccagtaagtg

SEQ ID NO: 1800303 - DNA, 25 bp, Homo sapien
tgacggataccacctgaatcaagcg

SEQ ID NO: 1800304 - DNA, 25 bp, Homo sapien
taagtctaacaactacgtcgcacac

SEQ ID NO: 1800305 - DNA, 25 bp, Homo sapien
tgagtggattaatacattgcagact

SEQ ID NO: 1800306 - DNA, 25 bp, Homo sapien
tactggtgatatgaaggcagcattc

SEQ ID NO: 1800307 - DNA, 25 bp, Homo sapien
cattctaacataaacactactggtg

SEQ ID NO: 1800308 - DNA, 25 bp, Homo sapien
ctagccattgagtggattaatacat

SEQ ID NO: 1800309 - DNA, 25 bp, Homo sapien
gagctgacgaccttccgggtacacg

SEQ ID NO: 1800310 - DNA, 25 bp, Homo sapien
ctgagctgacgaccttccgggtaca

SEQ ID NO: 1800311 - DNA, 25 bp, Homo sapien
gcctgagctgacgaccttccgggta

SEQ ID NO: 1800312 - DNA, 25 bp, Homo sapien
ggagcctgagctgacgaccttccgg

SEQ ID NO: 1800313 - DNA, 25 bp, Homo sapien
gactgcgcttccttccgaagaggga

SEQ ID NO: 1800314 - DNA, 25 bp, Homo sapien
gttatgcctcactggaaaccaaccg

SEQ ID NO: 1800315 - DNA, 25 bp, Homo sapien
aaccgcgtccgtgtgactcacttag

SEQ ID NO: 1800316 - DNA, 25 bp, Homo sapien
aagcagatgcgcgttcctgtaggac

SEQ ID NO: 1800317 - DNA, 25 bp, Homo sapien
aagaacgtctgtcttatcgccgtcg

SEQ ID NO: 1800318 - DNA, 25 bp, Homo sapien
gccgtcgaccttaggcatggacacc

SEQ ID NO: 1800319 - DNA, 25 bp, Homo sapien
gtcttatcgccgtcgaccttaggca

SEQ ID NO: 1800320 - DNA, 25 bp, Homo sapien
agcctgctcaggaggcacagccgcg

SEQ ID NO: 1800321 - DNA, 25 bp, Homo sapien
ggaattttgagaccagtatgggcaa

SEQ ID NO: 1800322 - DNA, 25 bp, Homo sapien
tcccagcatttcagggactgagaca

SEQ ID NO: 1800323 - DNA, 25 bp, Homo sapien
taatcccagcatttcagggactgag

SEQ ID NO: 1800324 - DNA, 25 bp, Homo sapien
cccagcatttcagggactgagacag

SEQ ID NO: 1800325 - DNA, 25 bp, Homo sapien
gtgaagagatccacctatgacctca

SEQ ID NO: 1800326 - DNA, 25 bp, Homo sapien
cttcactccgtgaagagatccacct

SEQ ID NO: 1800327 - DNA, 25 bp, Homo sapien
ttcactccgtgaagagatccaccta

SEQ ID NO: 1800328 - DNA, 25 bp, Homo sapien
tccgtgaagagatccacctatgacc

SEQ ID NO: 1800329 - DNA, 25 bp, Homo sapien
gttggagctggaaacggtaattcag

SEQ ID NO: 1800330 - DNA, 25 bp, Homo sapien
ggtaattcagtacacactcccttat

SEQ ID NO: 1800331 - DNA, 25 bp, Homo sapien
cccgggcagtgttcctcgttcttca

SEQ ID NO: 1800332 - DNA, 25 bp, Homo sapien
agaggaagaaactccccgggcagtg

SEQ ID NO: 1800333 - DNA, 25 bp, Homo sapien
caatcttgtgctatgccacctgcca

SEQ ID NO: 1800334 - DNA, 25 bp, Homo sapien
attctggcagcccaatcttgtgcta

SEQ ID NO: 1800335 - DNA, 25 bp, Homo sapien
gcagcccaatcttgtgctatgccac

SEQ ID NO: 1800336 - DNA, 25 bp, Homo sapien
cttgtgctatgccacctgccaacag

SEQ ID NO: 1800337 - DNA, 25 bp, Homo sapien
tgtgccacccctcggaagagcagat

SEQ ID NO: 1800338 - DNA, 25 bp, Homo sapien
ccagacaccggcttcgagtggtttc

SEQ ID NO: 1800339 - DNA, 25 bp, Homo sapien
caagtacttgctggtaaaggcgcta

SEQ ID NO: 1800340 - DNA, 25 bp, Homo sapien
aaaggcgctaacaaaagcgttgctg

SEQ ID NO: 1800341 - DNA, 25 bp, Homo sapien
tgtccgagactcagaattttggttg

SEQ ID NO: 1800342 - DNA, 25 bp, Homo sapien
gatttttaaccagtcttgtccgaga

SEQ ID NO: 1800343 - DNA, 25 bp, Homo sapien
tctttccacttgtaagatttaagtg

SEQ ID NO: 1800344 - DNA, 25 bp, Homo sapien
tattagtttcattgtagaacgattt

SEQ ID NO: 1800345 - DNA, 25 bp, Homo sapien
tatatgtggcacgtctatgtccgga

SEQ ID NO: 1800346 - DNA, 25 bp, Homo sapien
ggtgacaatgaatgcccatcccgga

SEQ ID NO: 1800347 - DNA, 25 bp, Homo sapien
gaatcaactgatcgtggagcactca

SEQ ID NO: 1800348 - DNA, 25 bp, Homo sapien
tcaaagccaggtacgacgatgtcgc

SEQ ID NO: 1800349 - DNA, 25 bp, Homo sapien
acctgataggatgaaaaagtctcac

SEQ ID NO: 1800350 - DNA, 25 bp, Homo sapien
taaacctgataggatgaaaaagtct

SEQ ID NO: 1800351 - DNA, 25 bp, Homo sapien
aatgtaataaacctgataggatgaa

SEQ ID NO: 1800352 - DNA, 25 bp, Homo sapien
taataaacctgataggatgaaaaag

SEQ ID NO: 1800353 - DNA, 25 bp, Homo sapien
tatatacatatataacatacaaata

SEQ ID NO: 1800354 - DNA, 25 bp, Homo sapien
tataaatatatacaaacataaatac

SEQ ID NO: 1800355 - DNA, 25 bp, Homo sapien
tacatatataacatacaaatatatg

SEQ ID NO: 1800356 - DNA, 25 bp, Homo sapien
tatatacaaacataaatacatattt

SEQ ID NO: 1800357 - DNA, 25 bp, Homo sapien
gacagatgccagtttgcgagtggaa

SEQ ID NO: 1800358 - DNA, 25 bp, Homo sapien
gagtgcatatccctaccatgaggag

SEQ ID NO: 1800359 - DNA, 25 bp, Homo sapien
ggagtccaggcatcacggttttaaa

SEQ ID NO: 1800360 - DNA, 25 bp, Homo sapien
gaactaacagggaaggttgctgccc

SEQ ID NO: 1800361 - DNA, 25 bp, Homo sapien
gaaggccctcacgatctttctggaa

SEQ ID NO: 1800362 - DNA, 25 bp, Homo sapien
caagagagacctgaactagcacact

SEQ ID NO: 1800363 - DNA, 25 bp, Homo sapien
caaatggaactctcttggaacctag

SEQ ID NO: 1800364 - DNA, 25 bp, Homo sapien
taaaggcttagacgacaagacgact

SEQ ID NO: 1800365 - DNA, 25 bp, Homo sapien
tattaagctcaattcatctagtagt

SEQ ID NO: 1800366 - DNA, 25 bp, Homo sapien
ggccagtgactgacatagctctaag

SEQ ID NO: 1800367 - DNA, 25 bp, Homo sapien
aagaaggcattgctaaacagaccag

SEQ ID NO: 1800368 - DNA, 25 bp, Homo sapien
gggtcataggaactcttatattaag

SEQ ID NO: 1800369 - DNA, 25 bp, Homo sapien
tgcatatttcagaacccagtggtcc

SEQ ID NO: 1800370 - DNA, 25 bp, Homo sapien
gaacgagtcctagtcaagttgaacc

SEQ ID NO: 1800371 - DNA, 25 bp, Homo sapien
tcatgattaacctcactgccttagg

SEQ ID NO: 1800372 - DNA, 25 bp, Homo sapien
tggaagaccaatctgcagagaacga

SEQ ID NO: 1800373 - DNA, 25 bp, Homo sapien
tggaaaacttactggttcagggcac

SEQ ID NO: 1800374 - DNA, 25 bp, Homo sapien
cattctcgggaaactacatataggg

SEQ ID NO: 1800375 - DNA, 25 bp, Homo sapien
taaggatctgcacaaccaggaattg

SEQ ID NO: 1800376 - DNA, 25 bp, Homo sapien
ccaaaatagtaaaggcatgcccaac

SEQ ID NO: 1800377 - DNA, 25 bp, Homo sapien
taaaagttataatggcggtcatagt

SEQ ID NO: 1800378 - DNA, 25 bp, Homo sapien
tctgtagttcaatagccatggctgt

SEQ ID NO: 1800379 - DNA, 25 bp, Homo sapien
cctgctatggaaaatttgacacatt

SEQ ID NO: 1800380 - DNA, 25 bp, Homo sapien
gaaacataacaactatatcagctag

SEQ ID NO: 1800381 - DNA, 25 bp, Homo sapien
cattgtcgctgtgagaaagcttaga

SEQ ID NO: 1800382 - DNA, 25 bp, Homo sapien
tgaaattgtcattcctggccgggtg

SEQ ID NO: 1800383 - DNA, 25 bp, Homo sapien
taacattcagatggttatgggacca

SEQ ID NO: 1800384 - DNA, 25 bp, Homo sapien
cattaaacactttgcagatgccaga

SEQ ID NO: 1800385 - DNA, 25 bp, Homo sapien
ggccaggagggagtgagatgaccag

SEQ ID NO: 1800386 - DNA, 25 bp, Homo sapien
cttctcagtggaaactgtacaggcc

SEQ ID NO: 1800387 - DNA, 25 bp, Homo sapien
atgaaggagctccaatccatctggc

SEQ ID NO: 1800388 - DNA, 25 bp, Homo sapien
gagggagtgagatgaccaggaggga

SEQ ID NO: 1800389 - DNA, 25 bp, Homo sapien
caagctctaattctaatccagtgaa

SEQ ID NO: 1800390 - DNA, 25 bp, Homo sapien
taaaacatggagacaagaaagtggc

SEQ ID NO: 1800391 - DNA, 25 bp, Homo sapien
cttaaagaactatcaagctctaatt

SEQ ID NO: 1800392 - DNA, 25 bp, Homo sapien
aagtggcacaatatttttcaagtcc

SEQ ID NO: 1800393 - DNA, 25 bp, Homo sapien
gaacaccataacatagcatagccta

SEQ ID NO: 1800394 - DNA, 25 bp, Homo sapien
tctgaggcagggagtatcaagaaat

SEQ ID NO: 1800395 - DNA, 25 bp, Homo sapien
tgtgccctgaatcggagtctgaggc

SEQ ID NO: 1800396 - DNA, 25 bp, Homo sapien
aacccactgaacactgaaaatgaat

SEQ ID NO: 1800397 - DNA, 25 bp, Homo sapien
ctgacgcagccgtgagtgaccaagc

SEQ ID NO: 1800398 - DNA, 25 bp, Homo sapien
tggcctcagcgctgactgatcgcac

SEQ ID NO: 1800399 - DNA, 25 bp, Homo sapien
gccagcgcagccgttaccgggacag

SEQ ID NO: 1800400 - DNA, 25 bp, Homo sapien
agctccaccgaaagcgaggcagtca

SEQ ID NO: 1800401 - DNA, 25 bp, Homo sapien
ctagccaggaacctcgcaaagcgca

SEQ ID NO: 1800402 - DNA, 25 bp, Homo sapien
aagcgcaggcgcacctacctgggtg

SEQ ID NO: 1800403 - DNA, 25 bp, Homo sapien
tgacggtcaagccagccaaggccgc

SEQ ID NO: 1800404 - DNA, 25 bp, Homo sapien
caggcctcaaggatgacggtcaagc

SEQ ID NO: 1800405 - DNA, 25 bp, Homo sapien
gaggtttcggagctagtacattcta

SEQ ID NO: 1800406 - DNA, 25 bp, Homo sapien
caagggtcctccgattgctagcaca

SEQ ID NO: 1800407 - DNA, 25 bp, Homo sapien
ttcaaagcacagaacggtccagatc

SEQ ID NO: 1800408 - DNA, 25 bp, Homo sapien
tggtactaaaaccaaagcgtctgcg

SEQ ID NO: 1800409 - DNA, 25 bp, Homo sapien
tgggagcagcttcctatctggtctc

SEQ ID NO: 1800410 - DNA, 25 bp, Homo sapien
tctcaccagccttattgggagcagc

SEQ ID NO: 1800411 - DNA, 25 bp, Homo sapien
tgcaccacgtcacgtccaatctgtt

SEQ ID NO: 1800412 - DNA, 25 bp, Homo sapien
cttcaaaattgagctgggatcttcc

SEQ ID NO: 1800413 - DNA, 25 bp, Homo sapien
gggaaggtgcttagtgtctgtcaaa

SEQ ID NO: 1800414 - DNA, 25 bp, Homo sapien
tggatcatggaggtgtttttcatga

SEQ ID NO: 1800415 - DNA, 25 bp, Homo sapien
gaagctcttataatactgctcagta

SEQ ID NO: 1800416 - DNA, 25 bp, Homo sapien
tccctacagtaggacaaaagcttca

SEQ ID NO: 1800417 - DNA, 25 bp, Homo sapien
ggccttttctgctacttaactgaag

SEQ ID NO: 1800418 - DNA, 25 bp, Homo sapien
ttaggaacagtgcactagccaccgc

SEQ ID NO: 1800419 - DNA, 25 bp, Homo sapien
gcttcttatgtcacaaggtctctag

SEQ ID NO: 1800420 - DNA, 25 bp, Homo sapien
taactgaaggcagctactcatgccc

SEQ ID NO: 1800421 - DNA, 25 bp, Homo sapien
caacatacgttaggtggttcttcac

SEQ ID NO: 1800422 - DNA, 25 bp, Homo sapien
ttcccataggaatacctaagattct

SEQ ID NO: 1800423 - DNA, 25 bp, Homo sapien
tcttgcgttgactcattcttccctc

SEQ ID NO: 1800424 - DNA, 25 bp, Homo sapien
taattaggtctttggttgttgcttc

SEQ ID NO: 1800425 - DNA, 25 bp, Homo sapien
tctaagcctatatcttcaaatggcc

SEQ ID NO: 1800426 - DNA, 25 bp, Homo sapien
tcttcaaatggccaggcttataaaa

SEQ ID NO: 1800427 - DNA, 25 bp, Homo sapien
tggtctaagcctatatcttcaaatg

SEQ ID NO: 1800428 - DNA, 25 bp, Homo sapien
atggccaggcttataaaatgtcttc

SEQ ID NO: 1800429 - DNA, 25 bp, Homo sapien
tcttgccgaagaattttcacaggtg

SEQ ID NO: 1800430 - DNA, 25 bp, Homo sapien
tgtaaatttgggcatgtagacccaa

SEQ ID NO: 1800431 - DNA, 25 bp, Homo sapien
catccccatagcagagatagtaact

SEQ ID NO: 1800432 - DNA, 25 bp, Homo sapien
tgctgtctgactatccatccccata

SEQ ID NO: 1800433 - DNA, 25 bp, Homo sapien
cactgtatctgcaccattgagttca

SEQ ID NO: 1800434 - DNA, 25 bp, Homo sapien
cataccacagggtgtgtgtctcctt

SEQ ID NO: 1800435 - DNA, 25 bp, Homo sapien
aggagtctactccaccataccacag

SEQ ID NO: 1800436 - DNA, 25 bp, Homo sapien
gagttcagcgtcctcaccacaatga

SEQ ID NO: 1800437 - DNA, 25 bp, Homo sapien
cattccaaggctgttgatactttgt

SEQ ID NO: 1800438 - DNA, 25 bp, Homo sapien
tgtctctcatggtgagtggccattc

SEQ ID NO: 1800439 - DNA, 25 bp, Homo sapien
ggatgtttcataagtcaagactcta

SEQ ID NO: 1800440 - DNA, 25 bp, Homo sapien
cactgaaggctgtaaactccatgtc

SEQ ID NO: 1800441 - DNA, 25 bp, Homo sapien
aaattggtatcagagaagtggggca

SEQ ID NO: 1800442 - DNA, 25 bp, Homo sapien
aatactgatagtgagatatggacaa

SEQ ID NO: 1800443 - DNA, 25 bp, Homo sapien
aaatactgatagtgagatatggaca

SEQ ID NO: 1800444 - DNA, 25 bp, Homo sapien
gactaatataggaaattggtatcag

SEQ ID NO: 1800445 - DNA, 25 bp, Homo sapien
catcatatgaagatgtgctggcttc

SEQ ID NO: 1800446 - DNA, 25 bp, Homo sapien
tcatatgaagatgtgctggcttccc

SEQ ID NO: 1800447 - DNA, 25 bp, Homo sapien
tatgaagatgtgctggcttcccctt

SEQ ID NO: 1800448 - DNA, 25 bp, Homo sapien
ctgccatcatatgaagatgtgctgg

SEQ ID NO: 1800449 - DNA, 25 bp, Homo sapien
gggctaacttctataacatataaag

SEQ ID NO: 1800450 - DNA, 25 bp, Homo sapien
cacgatttcattcttggggctaact

SEQ ID NO: 1800451 - DNA, 25 bp, Homo sapien
ccatgttttggcaaaggacacgatt

SEQ ID NO: 1800452 - DNA, 25 bp, Homo sapien
ttggcaaaggacacgatttcattct

SEQ ID NO: 1800453 - DNA, 25 bp, Homo sapien
tggacccatcgtcacccaagtagtg

SEQ ID NO: 1800454 - DNA, 25 bp, Homo sapien
gcatgcctttgtgaacccatagttt

SEQ ID NO: 1800455 - DNA, 25 bp, Homo sapien
gaattgtacagtggttaaatctggg

SEQ ID NO: 1800456 - DNA, 25 bp, Homo sapien
atctgggattttagtggacccatcg

SEQ ID NO: 1800457 - DNA, 25 bp, Homo sapien
cagagcccattgtgagcaccgtggc

SEQ ID NO: 1800458 - DNA, 25 bp, Homo sapien
gcacagcccgataggagatactcag

SEQ ID NO: 1800459 - DNA, 25 bp, Homo sapien
gcaacgaccctgatgtggaatccaa

SEQ ID NO: 1800460 - DNA, 25 bp, Homo sapien
gatgtgtcgaccctgcagaatgact

SEQ ID NO: 1800461 - DNA, 25 bp, Homo sapien
tcacaaatcaccgagtcagactaga

SEQ ID NO: 1800462 - DNA, 25 bp, Homo sapien
cctgattggtatgagcagggcgaac

SEQ ID NO: 1800463 - DNA, 25 bp, Homo sapien
aaagttcatgccagtctgccagtca

SEQ ID NO: 1800464 - DNA, 25 bp, Homo sapien
tcacttctgatgactccctggagca

SEQ ID NO: 1800465 - DNA, 25 bp, Homo sapien
tattccagggttgcagataagctcc

SEQ ID NO: 1800466 - DNA, 25 bp, Homo sapien
tctgcttactgatgagaaatcccca

SEQ ID NO: 1800467 - DNA, 25 bp, Homo sapien
cctgtcatttgaagcccagaaggac

SEQ ID NO: 1800468 - DNA, 25 bp, Homo sapien
tggccatctgcattggacccaacat

SEQ ID NO: 1800469 - DNA, 25 bp, Homo sapien
ttaaaggaagtctggtttcggcaga

SEQ ID NO: 1800470 - DNA, 25 bp, Homo sapien
taaaggaagtctggtttcggcagaa

SEQ ID NO: 1800471 - DNA, 25 bp, Homo sapien
ggaagtctggtttcggcagaaactc

SEQ ID NO: 1800472 - DNA, 25 bp, Homo sapien
aggaagtctggtttcggcagaaact

SEQ ID NO: 1800473 - DNA, 25 bp, Homo sapien
aaacaatgttgcgatttaagtgccg

SEQ ID NO: 1800474 - DNA, 25 bp, Homo sapien
taagtgccgccttatatgaacatgc

SEQ ID NO: 1800475 - DNA, 25 bp, Homo sapien
aaatgtcagcatggttgtcacatcc

SEQ ID NO: 1800476 - DNA, 25 bp, Homo sapien
ccagtctagtcgtgttagaaacaga

SEQ ID NO: 1800477 - DNA, 25 bp, Homo sapien
taaaacttcacagcatatttcatct

SEQ ID NO: 1800478 - DNA, 25 bp, Homo sapien
tcatcttcttataattaacccaaat

SEQ ID NO: 1800479 - DNA, 25 bp, Homo sapien
gttcataaaacttcacagcatattt

SEQ ID NO: 1800480 - DNA, 25 bp, Homo sapien
tttgttcataaaacttcacagcata

SEQ ID NO: 1800481 - DNA, 25 bp, Homo sapien
tctttgaggagtggatgggtgctct

SEQ ID NO: 1800482 - DNA, 25 bp, Homo sapien
ctctttgaggagtggatgggtgctc

SEQ ID NO: 1800483 - DNA, 25 bp, Homo sapien
aggacgaggaggacagaatcgaggc

SEQ ID NO: 1800484 - DNA, 25 bp, Homo sapien
ggacgaggaggacagaatcgaggcc

SEQ ID NO: 1800485 - DNA, 25 bp, Homo sapien
gggttccctggattcatcaaatgca

SEQ ID NO: 1800486 - DNA, 25 bp, Homo sapien
gcaggaatgaagggccacaatctat

SEQ ID NO: 1800487 - DNA, 25 bp, Homo sapien
gaatgaagggccacaatctatgatg

SEQ ID NO: 1800488 - DNA, 25 bp, Homo sapien
gccacaatctatgatgggctaagca

SEQ ID NO: 1800489 - DNA, 25 bp, Homo sapien
cagttggacatgcaaaatactcggg

SEQ ID NO: 1800490 - DNA, 25 bp, Homo sapien
gaaagcatcgctatttgatcagccc

SEQ ID NO: 1800491 - DNA, 25 bp, Homo sapien
cacatacgcgtgcagtcagaagaat

SEQ ID NO: 1800492 - DNA, 25 bp, Homo sapien
cccatccaggtaggcgtgcattctc

SEQ ID NO: 1800493 - DNA, 25 bp, Homo sapien
cctgctatgtgccttcgaaaagata

SEQ ID NO: 1800494 - DNA, 25 bp, Homo sapien
tatgcggccaacgatacccattttc

SEQ ID NO: 1800495 - DNA, 25 bp, Homo sapien
tactattgaccacattatgcggcca

SEQ ID NO: 1800496 - DNA, 25 bp, Homo sapien
gatctaggttcaaggcttcccgcag

SEQ ID NO: 1800497 - DNA, 25 bp, Homo sapien
tccaagagcctatgaagcaactgtt

SEQ ID NO: 1800498 - DNA, 25 bp, Homo sapien
cattatagcgtaaccctgacccagt

SEQ ID NO: 1800499 - DNA, 25 bp, Homo sapien
gtttcgacaattagcatgcacacat

SEQ ID NO: 1800500 - DNA, 25 bp, Homo sapien
gccaagcgtttttaatgcggttcaa

SEQ ID NO: 1800501 - DNA, 25 bp, Homo sapien
cagaaaacagctatcccgtggaata

SEQ ID NO: 1800502 - DNA, 25 bp, Homo sapien
aagctgcctcgcaagtcacaggtca

SEQ ID NO: 1800503 - DNA, 25 bp, Homo sapien
tttgcttcaacgtgaaggctgcacc

SEQ ID NO: 1800504 - DNA, 25 bp, Homo sapien
gcacctactacgacagctggcatat

SEQ ID NO: 1800505 - DNA, 25 bp, Homo sapien
agactgaagcggtaactgagcctga

SEQ ID NO: 1800506 - DNA, 25 bp, Homo sapien
tgagttcaaactgaagagccggact

SEQ ID NO: 1800507 - DNA, 25 bp, Homo sapien
caaaaggcagatggcgtgaatggca

SEQ ID NO: 1800508 - DNA, 25 bp, Homo sapien
gaaaaattgattgtgaccaggaccc

SEQ ID NO: 1800509 - DNA, 25 bp, Homo sapien
tgtcacatcgtagggtggtccacaa

SEQ ID NO: 1800510 - DNA, 25 bp, Homo sapien
aactgatgccctcctgatgctgtgg

SEQ ID NO: 1800511 - DNA, 25 bp, Homo sapien
ggctggcccacagctttgtgtggtc

SEQ ID NO: 1800512 - DNA, 25 bp, Homo sapien
tctgccttcagcgattctgacttga

SEQ ID NO: 1800513 - DNA, 25 bp, Homo sapien
ccagctgccgcaggtagagtgagtt

SEQ ID NO: 1800514 - DNA, 25 bp, Homo sapien
gcgtcaatgtcaccatgtcatggaa

SEQ ID NO: 1800515 - DNA, 25 bp, Homo sapien
ttccttcctcaaggttcccactgcc

SEQ ID NO: 1800516 - DNA, 25 bp, Homo sapien
ggatagcccacttcagcgtcaatgt

SEQ ID NO: 1800517 - DNA, 25 bp, Homo sapien
ttacataatgtaccccctgtcattt

SEQ ID NO: 1800518 - DNA, 25 bp, Homo sapien
ctgtcatttcgaacctcctccacca

SEQ ID NO: 1800519 - DNA, 25 bp, Homo sapien
cacagtttccactgggactggttct

SEQ ID NO: 1800520 - DNA, 25 bp, Homo sapien
ttccactgggactggttctgcttgc

SEQ ID NO: 1800521 - DNA, 25 bp, Homo sapien
agaaaagttaagaagagcagcctca

SEQ ID NO: 1800522 - DNA, 25 bp, Homo sapien
tcaatgcaggttgctaaagcccagc

SEQ ID NO: 1800523 - DNA, 25 bp, Homo sapien
ccgctagatgccaaaccagtgtgtt

SEQ ID NO: 1800524 - DNA, 25 bp, Homo sapien
tgttctgcaagcacaacccgctaga

SEQ ID NO: 1800525 - DNA, 25 bp, Homo sapien
tgcatggaatctgggcgatgttgac

SEQ ID NO: 1800526 - DNA, 25 bp, Homo sapien
gaaagactggacaagtgccaggtaa

SEQ ID NO: 1800527 - DNA, 25 bp, Homo sapien
aatctgggcgatgttgactgcagaa

SEQ ID NO: 1800528 - DNA, 25 bp, Homo sapien
gacagggacactccttgtctgtacc

SEQ ID NO: 1800529 - DNA, 25 bp, Homo sapien
gatgcgaacttctcaagacagagga

SEQ ID NO: 1800530 - DNA, 25 bp, Homo sapien
cgaacttctcaagacagaggacaca

SEQ ID NO: 1800531 - DNA, 25 bp, Homo sapien
ggcagagctggatgcgaacttctca

SEQ ID NO: 1800532 - DNA, 25 bp, Homo sapien
gagctggatgcgaacttctcaagac

SEQ ID NO: 1800533 - DNA, 25 bp, Homo sapien
gttaactggtctgctggtccgctgg

SEQ ID NO: 1800534 - DNA, 25 bp, Homo sapien
gctgcgttgttccaccgttaactgg

SEQ ID NO: 1800535 - DNA, 25 bp, Homo sapien
tcctgtccgtagcaaaatgagaggc

SEQ ID NO: 1800536 - DNA, 25 bp, Homo sapien
catttagggtcgtgggtcttcaggc

SEQ ID NO: 1800537 - DNA, 25 bp, Homo sapien
agagctcacggccagtggagaaacc

SEQ ID NO: 1800538 - DNA, 25 bp, Homo sapien
gagaaaccaatgtggaatcgaagcc

SEQ ID NO: 1800539 - DNA, 25 bp, Homo sapien
caatgtggaatcgaagccagtgcag

SEQ ID NO: 1800540 - DNA, 25 bp, Homo sapien
gaaagagctcacggccagtggagaa

SEQ ID NO: 1800541 - DNA, 25 bp, Homo sapien
cctgagactctaagctcagctcctg

SEQ ID NO: 1800542 - DNA, 25 bp, Homo sapien
tctgtctggaatggcccacgtgtgt

SEQ ID NO: 1800543 - DNA, 25 bp, Homo sapien
tccactgtgatcctgagactctaag

SEQ ID NO: 1800544 - DNA, 25 bp, Homo sapien
tgttctgcctgctccggtccactgt

SEQ ID NO: 1800545 - DNA, 25 bp, Homo sapien
tctgagcaataatgttggcccagag

SEQ ID NO: 1800546 - DNA, 25 bp, Homo sapien
ctgagcaataatgttggcccagagc

SEQ ID NO: 1800547 - DNA, 25 bp, Homo sapien
ctctgagcaataatgttggcccaga

SEQ ID NO: 1800548 - DNA, 25 bp, Homo sapien
aattgagggcatctgcgctggaccc

SEQ ID NO: 1800549 - DNA, 25 bp, Homo sapien
ttgagggcatctgcgctggacccag

SEQ ID NO: 1800550 - DNA, 25 bp, Homo sapien
tctcttgaattgagggcatctgcgc

SEQ ID NO: 1800551 - DNA, 25 bp, Homo sapien
ttgaattgagggcatctgcgctgga

SEQ ID NO: 1800552 - DNA, 25 bp, Homo sapien
gccaccactttgcagctcgaggcct

SEQ ID NO: 1800553 - DNA, 25 bp, Homo sapien
tgtagttttctacgactgtttcgta

SEQ ID NO: 1800554 - DNA, 25 bp, Homo sapien
gtttcgtacagcacgggctccatgc

SEQ ID NO: 1800555 - DNA, 25 bp, Homo sapien
ccctcgtgtagcctgtttgtagttt

SEQ ID NO: 1800556 - DNA, 25 bp, Homo sapien
aagccatcaggctgtgttggcacag

SEQ ID NO: 1800557 - DNA, 25 bp, Homo sapien
tcggacgattgtgagctcaggctgc

SEQ ID NO: 1800558 - DNA, 25 bp, Homo sapien
gatatgtaataactcaatggccagt

SEQ ID NO: 1800559 - DNA, 25 bp, Homo sapien
cgtatgtgcccagcagtcaccgagg

SEQ ID NO: 1800560 - DNA, 25 bp, Homo sapien
tcaaaaatatgagcacacggaagtt

SEQ ID NO: 1800561 - DNA, 25 bp, Homo sapien
taaagaaaatggaactcggagtcag

SEQ ID NO: 1800562 - DNA, 25 bp, Homo sapien
gatggatggccagtcattaaaatca

SEQ ID NO: 1800563 - DNA, 25 bp, Homo sapien
tctgttctcaacgtggtcatctcaa

SEQ ID NO: 1800564 - DNA, 25 bp, Homo sapien
gaacaccagtgcagtagccaggatg

SEQ ID NO: 1800565 - DNA, 25 bp, Homo sapien
ggccaccgaacaccagtgcagtagc

SEQ ID NO: 1800566 - DNA, 25 bp, Homo sapien
gagaaggaagccacgcatggagagc

SEQ ID NO: 1800567 - DNA, 25 bp, Homo sapien
gaagccacgcatggagagcggccag

SEQ ID NO: 1800568 - DNA, 25 bp, Homo sapien
gtccgtctgttctgcgcgctctgcg

SEQ ID NO: 1800569 - DNA, 25 bp, Homo sapien
gcggcgatcgctcccggccgcacac

SEQ ID NO: 1800570 - DNA, 25 bp, Homo sapien
ggctgggtgcttgcggctggcaggg

SEQ ID NO: 1800571 - DNA, 25 bp, Homo sapien
agtctggggagtgccgaggcgccgc

SEQ ID NO: 1800572 - DNA, 25 bp, Homo sapien
agcgcggccaagagcagcagcgccg

SEQ ID NO: 1800573 - DNA, 25 bp, Homo sapien
ccgcccaggacagccggcgcggcgc

SEQ ID NO: 1800574 - DNA, 25 bp, Homo sapien
cgccgccgaggaggcgacggggagc

SEQ ID NO: 1800575 - DNA, 25 bp, Homo sapien
gggagcagcgcggccaagagcagca

SEQ ID NO: 1800576 - DNA, 25 bp, Homo sapien
agtccgcacgctgaaagtcgccttt

SEQ ID NO: 1800577 - DNA, 25 bp, Homo sapien
cgggacacttagacggctggagcct

SEQ ID NO: 1800578 - DNA, 25 bp, Homo sapien
ggcaaagttaaacgccagcgcgctg

SEQ ID NO: 1800579 - DNA, 25 bp, Homo sapien
tgtgcctgaatctcccgggacactt

SEQ ID NO: 1800580 - DNA, 25 bp, Homo sapien
ccgagaaattctgggcaaagaaagg

SEQ ID NO: 1800581 - DNA, 25 bp, Homo sapien
aattctgggcaaagaaaggcattac

SEQ ID NO: 1800582 - DNA, 25 bp, Homo sapien
tcccgagaaattctgggcaaagaaa

SEQ ID NO: 1800583 - DNA, 25 bp, Homo sapien
gctcccgagaaattctgggcaaaga

SEQ ID NO: 1800584 - DNA, 25 bp, Homo sapien
cctcgttggaatagtatctgacgat

SEQ ID NO: 1800585 - DNA, 25 bp, Homo sapien
cgttggaatagtatctgacgatcat

SEQ ID NO: 1800586 - DNA, 25 bp, Homo sapien
ggaatagtatctgacgatcattgtc

SEQ ID NO: 1800587 - DNA, 25 bp, Homo sapien
tagtatctgacgatcattgtctgct

SEQ ID NO: 1800588 - DNA, 25 bp, Homo sapien
ctaaatagcatcataaaactggtac

SEQ ID NO: 1800589 - DNA, 25 bp, Homo sapien
aggaaggcattctgagcagatcaaa

SEQ ID NO: 1800590 - DNA, 25 bp, Homo sapien
gaaggcattctgagcagatcaaaga

SEQ ID NO: 1800591 - DNA, 25 bp, Homo sapien
aggcattctgagcagatcaaagatg

SEQ ID NO: 1800592 - DNA, 25 bp, Homo sapien
gcattctgagcagatcaaagatgtg

SEQ ID NO: 1800593 - DNA, 25 bp, Homo sapien
tatccatggtggacgaaaataggca

SEQ ID NO: 1800594 - DNA, 25 bp, Homo sapien
catatccatggtggacgaaaatagg

SEQ ID NO: 1800595 - DNA, 25 bp, Homo sapien
caggcatatccatggtggacgaaaa

SEQ ID NO: 1800596 - DNA, 25 bp, Homo sapien
tgtccaggcatatccatggtggacg

SEQ ID NO: 1800597 - DNA, 25 bp, Homo sapien
ttgggctgcgcatcctcatcgacct

SEQ ID NO: 1800598 - DNA, 25 bp, Homo sapien
gcgcatcctcatcgacctctctctt

SEQ ID NO: 1800599 - DNA, 25 bp, Homo sapien
tgcgcatcctcatcgacctctctct

SEQ ID NO: 1800600 - DNA, 25 bp, Homo sapien
accttgggctgcgcatcctcatcga

SEQ ID NO: 1800601 - DNA, 25 bp, Homo sapien
tggacagcagtttcacatgccttgg

SEQ ID NO: 1800602 - DNA, 25 bp, Homo sapien
tagtggacagcagtttcacatgcct

SEQ ID NO: 1800603 - DNA, 25 bp, Homo sapien
gacagcagtttcacatgccttggct

SEQ ID NO: 1800604 - DNA, 25 bp, Homo sapien
tttagtggacagcagtttcacatgc

SEQ ID NO: 1800605 - DNA, 25 bp, Homo sapien
gtatgtctccgcattcaccttgatg

SEQ ID NO: 1800606 - DNA, 25 bp, Homo sapien
tttcagtgacttcccataggcaatg

SEQ ID NO: 1800607 - DNA, 25 bp, Homo sapien
ctcaataaggaaggagtatgtctcc

SEQ ID NO: 1800608 - DNA, 25 bp, Homo sapien
ttgtaatgctccacaggtctactgg

SEQ ID NO: 1800609 - DNA, 25 bp, Homo sapien
caggacggctcactccactgtggtt

SEQ ID NO: 1800610 - DNA, 25 bp, Homo sapien
taagcagcacaaagtacactacccc

SEQ ID NO: 1800611 - DNA, 25 bp, Homo sapien
taaacaggacggctcactccactgt

SEQ ID NO: 1800612 - DNA, 25 bp, Homo sapien
ggacggctcactccactgtggtttt

SEQ ID NO: 1800613 - DNA, 25 bp, Homo sapien
cccttaatgggaaaaccatcaatct

SEQ ID NO: 1800614 - DNA, 25 bp, Homo sapien
aaaccatcaatctcgatccattcac

SEQ ID NO: 1800615 - DNA, 25 bp, Homo sapien
tgtgacggtttcattaaatggtcct

SEQ ID NO: 1800616 - DNA, 25 bp, Homo sapien
tgacggtttcattaaatggtcctgg

SEQ ID NO: 1800617 - DNA, 25 bp, Homo sapien
aaaacatgaatctgacatgaaggag

SEQ ID NO: 1800618 - DNA, 25 bp, Homo sapien
gaaaacatgaatctgacatgaagga

SEQ ID NO: 1800619 - DNA, 25 bp, Homo sapien
tgaaaacatgaatctgacatgaagg

SEQ ID NO: 1800620 - DNA, 25 bp, Homo sapien
tgaagtcagccttaaagagaaggtg

SEQ ID NO: 1800621 - DNA, 25 bp, Homo sapien
cagatctgccctcaggtctaccatg

SEQ ID NO: 1800622 - DNA, 25 bp, Homo sapien
tatcaactttctgaaccaggcactg

SEQ ID NO: 1800623 - DNA, 25 bp, Homo sapien
aaagatgaatcccaccccagatctg

SEQ ID NO: 1800624 - DNA, 25 bp, Homo sapien
tggtgcctcccaaatcacactggcg

SEQ ID NO: 1800625 - DNA, 25 bp, Homo sapien
aggacgccctggcaagatgtgcatg

SEQ ID NO: 1800626 - DNA, 25 bp, Homo sapien
aagctggcacagttcccaaggaccc

SEQ ID NO: 1800627 - DNA, 25 bp, Homo sapien
tgtgccccgcttacagagaagctgg

SEQ ID NO: 1800628 - DNA, 25 bp, Homo sapien
ggccttttgtgcactcctgatgaag

SEQ ID NO: 1800629 - DNA, 25 bp, Homo sapien
caggccttttgtgcactcctgatga

SEQ ID NO: 1800630 - DNA, 25 bp, Homo sapien
cttttgtgcactcctgatgaagaag

SEQ ID NO: 1800631 - DNA, 25 bp, Homo sapien
gccttttgtgcactcctgatgaaga

SEQ ID NO: 1800632 - DNA, 25 bp, Homo sapien
tgccccaccatccccagcaccagcc

SEQ ID NO: 1800633 - DNA, 25 bp, Homo sapien
tccccagcaccagcctccattataa

SEQ ID NO: 1800634 - DNA, 25 bp, Homo sapien
taccccaggcagctgccccaccatc

SEQ ID NO: 1800635 - DNA, 25 bp, Homo sapien
cagctgccccaccatccccagcacc

SEQ ID NO: 1800636 - DNA, 25 bp, Homo sapien
catctacagccttgaagagccgcaa

SEQ ID NO: 1800637 - DNA, 25 bp, Homo sapien
gagccgcaatttgtctggtttgtcc

SEQ ID NO: 1800638 - DNA, 25 bp, Homo sapien
ggtttgtcccactgaccgatctgac

SEQ ID NO: 1800639 - DNA, 25 bp, Homo sapien
gaatgtgaggtttcactccatctac

SEQ ID NO: 1800640 - DNA, 25 bp, Homo sapien
ccccttcagaatgggagccgtgaat

SEQ ID NO: 1800641 - DNA, 25 bp, Homo sapien
tagattcactacctgagtgggtaac

SEQ ID NO: 1800642 - DNA, 25 bp, Homo sapien
cgtgaatgtatcacagagcttacca

SEQ ID NO: 1800643 - DNA, 25 bp, Homo sapien
gattcactacctgagtgggtaaccc

SEQ ID NO: 1800644 - DNA, 25 bp, Homo sapien
ggacaaaccaattctgactcggcaa

SEQ ID NO: 1800645 - DNA, 25 bp, Homo sapien
gagtcaggagtgaagttccaaggac

SEQ ID NO: 1800646 - DNA, 25 bp, Homo sapien
gatggcagttctctgttccaggaca

SEQ ID NO: 1800647 - DNA, 25 bp, Homo sapien
gacaaggagcctggtcacagatggc

SEQ ID NO: 1800648 - DNA, 25 bp, Homo sapien
tcttgtcagtggaacataattcatc

SEQ ID NO: 1800649 - DNA, 25 bp, Homo sapien
cgcaagggcttgttgggcacttcct

SEQ ID NO: 1800650 - DNA, 25 bp, Homo sapien
gagaaaaccccgtgatctgcgtgga

SEQ ID NO: 1800651 - DNA, 25 bp, Homo sapien
cagcctgtcatctgaggaccggaca

SEQ ID NO: 1800652 - DNA, 25 bp, Homo sapien
caggctccgaaatgcatggctgtgc

SEQ ID NO: 1800653 - DNA, 25 bp, Homo sapien
ccgggcttccgtccaagcaagtgct

SEQ ID NO: 1800654 - DNA, 25 bp, Homo sapien
ccttcctcagagttaggagctctca

SEQ ID NO: 1800655 - DNA, 25 bp, Homo sapien
acagagctgcttatccaggctccga

SEQ ID NO: 1800656 - DNA, 25 bp, Homo sapien
gtccattccaacaccgcgaggagaa

SEQ ID NO: 1800657 - DNA, 25 bp, Homo sapien
tgtggcctctctggtataaacggct

SEQ ID NO: 1800658 - DNA, 25 bp, Homo sapien
ggataagtgcgtagacaggcttccc

SEQ ID NO: 1800659 - DNA, 25 bp, Homo sapien
tcattcacggtagcaagtctagtgc

SEQ ID NO: 1800660 - DNA, 25 bp, Homo sapien
agatctgcgggcaccaaagcctggc

SEQ ID NO: 1800661 - DNA, 25 bp, Homo sapien
ccagatctgcgggcaccaaagcctg

SEQ ID NO: 1800662 - DNA, 25 bp, Homo sapien
gatctgcgggcaccaaagcctggct

SEQ ID NO: 1800663 - DNA, 25 bp, Homo sapien
tctgcgggcaccaaagcctggctct

SEQ ID NO: 1800664 - DNA, 25 bp, Homo sapien
gagaccacatacacggattccgagg

SEQ ID NO: 1800665 - DNA, 25 bp, Homo sapien
cagggagaccacatacacggattcc

SEQ ID NO: 1800666 - DNA, 25 bp, Homo sapien
gaaatctttcgctttgttagggcag

SEQ ID NO: 1800667 - DNA, 25 bp, Homo sapien
ggcagccctgtagactggttggctc

SEQ ID NO: 1800668 - DNA, 25 bp, Homo sapien
tgaaatgacaacgagacccagagaa

SEQ ID NO: 1800669 - DNA, 25 bp, Homo sapien
aaaggctttctctcacaacaggttc

SEQ ID NO: 1800670 - DNA, 25 bp, Homo sapien
ctgaaatgacaacgagacccagaga

SEQ ID NO: 1800671 - DNA, 25 bp, Homo sapien
ttctctcacaacaggttctgccctg

SEQ ID NO: 1800672 - DNA, 25 bp, Homo sapien
ttttccagaacaggatccacccagg

SEQ ID NO: 1800673 - DNA, 25 bp, Homo sapien
tgtcgtcaggtacatccaattcgtc

SEQ ID NO: 1800674 - DNA, 25 bp, Homo sapien
taacccggacgctgatgtcgtcagg

SEQ ID NO: 1800675 - DNA, 25 bp, Homo sapien
cacagactgagatgacataacccgg

SEQ ID NO: 1800676 - DNA, 25 bp, Homo sapien
gaatcaggttctcaatcagcacacg

SEQ ID NO: 1800677 - DNA, 25 bp, Homo sapien
tttcaccctgtgaaatacggactgc

SEQ ID NO: 1800678 - DNA, 25 bp, Homo sapien
tcagcacacgcctgttagcgatctg

SEQ ID NO: 1800679 - DNA, 25 bp, Homo sapien
ctgcaaattcatacacagtgtctgg

SEQ ID NO: 1800680 - DNA, 25 bp, Homo sapien
ggtgttctttggaagactgacgtac

SEQ ID NO: 1800681 - DNA, 25 bp, Homo sapien
ctggtgttctttggaagactgacgt

SEQ ID NO: 1800682 - DNA, 25 bp, Homo sapien
cagattctggtgttctttggaagac

SEQ ID NO: 1800683 - DNA, 25 bp, Homo sapien
gattctggtgttctttggaagactg

SEQ ID NO: 1800684 - DNA, 25 bp, Homo sapien
ccattgactggccagacgttcaagt

SEQ ID NO: 1800685 - DNA, 25 bp, Homo sapien
catcccaagatgcagcgacaactgt

SEQ ID NO: 1800686 - DNA, 25 bp, Homo sapien
ttcccctcagtctctggtagcgcat

SEQ ID NO: 1800687 - DNA, 25 bp, Homo sapien
ccagacgttcaagttttcaggagct

SEQ ID NO: 1800688 - DNA, 25 bp, Homo sapien
actagcaatgcacgccaagtcacca

SEQ ID NO: 1800689 - DNA, 25 bp, Homo sapien
gacgaattagaacgtgcattactaa

SEQ ID NO: 1800690 - DNA, 25 bp, Homo sapien
aaaattaatacactagcaatgcacg

SEQ ID NO: 1800691 - DNA, 25 bp, Homo sapien
tgtatgggcaggacgaattagaacg

SEQ ID NO: 1800692 - DNA, 25 bp, Homo sapien
tttggcagatggttggaaggaggaa

SEQ ID NO: 1800693 - DNA, 25 bp, Homo sapien
tgatttggcagatggttggaaggag

SEQ ID NO: 1800694 - DNA, 25 bp, Homo sapien
tggcagatggttggaaggaggaaac

SEQ ID NO: 1800695 - DNA, 25 bp, Homo sapien
gaaatgatttggcagatggttggaa

SEQ ID NO: 1800696 - DNA, 25 bp, Homo sapien
tgttggcatagcgacaatgaaggct

SEQ ID NO: 1800697 - DNA, 25 bp, Homo sapien
tgctccaaatggtttgagagccggg

SEQ ID NO: 1800698 - DNA, 25 bp, Homo sapien
ccaggataggtgagggactttgctc

SEQ ID NO: 1800699 - DNA, 25 bp, Homo sapien
agccggggcgtatgaaagaatgtat

SEQ ID NO: 1800700 - DNA, 25 bp, Homo sapien
gggcgccccaccattagccaatatt

SEQ ID NO: 1800701 - DNA, 25 bp, Homo sapien
tttcccattgtcctccgtgttctgc

SEQ ID NO: 1800702 - DNA, 25 bp, Homo sapien
ttcttcaagtcaagaagaaggtcct

SEQ ID NO: 1800703 - DNA, 25 bp, Homo sapien
tgtcctccgtgttctgctcaacatc

SEQ ID NO: 1800704 - DNA, 25 bp, Homo sapien
ttggcggcctcagggtccgtttctg

SEQ ID NO: 1800705 - DNA, 25 bp, Homo sapien
ctcagggtccgtttctggtcttggg

SEQ ID NO: 1800706 - DNA, 25 bp, Homo sapien
gatttctgtcgactgaagatccagc

SEQ ID NO: 1800707 - DNA, 25 bp, Homo sapien
tgacatgggcgagtcctcccgggaa

SEQ ID NO: 1800708 - DNA, 25 bp, Homo sapien
tccaccaagtcgttgtcattcaagc

SEQ ID NO: 1800709 - DNA, 25 bp, Homo sapien
ctcactgcagtcctgccgggagcaa

SEQ ID NO: 1800710 - DNA, 25 bp, Homo sapien
gagcaaccaccgagtggccgtgtct

SEQ ID NO: 1800711 - DNA, 25 bp, Homo sapien
gaaaagccaggcttatctacgcctt

SEQ ID NO: 1800712 - DNA, 25 bp, Homo sapien
acatggtggaccgtgatggcgcatt

SEQ ID NO: 1800713 - DNA, 25 bp, Homo sapien
ctggacgagagatgagaagagacgg

SEQ ID NO: 1800714 - DNA, 25 bp, Homo sapien
ccccatggggtggagaaagtcttga

SEQ ID NO: 1800715 - DNA, 25 bp, Homo sapien
cttctgtcgcggagaacgctggacg

SEQ ID NO: 1800716 - DNA, 25 bp, Homo sapien
gctcgggagggcacagtcgactgtg

SEQ ID NO: 1800717 - DNA, 25 bp, Homo sapien
ccgcccaatgctgaacctgcttgga

SEQ ID NO: 1800718 - DNA, 25 bp, Homo sapien
ctgagctaagcttagggtgggaatc

SEQ ID NO: 1800719 - DNA, 25 bp, Homo sapien
gcttggagacctcccgttggcagca

SEQ ID NO: 1800720 - DNA, 25 bp, Homo sapien
ggtggcaggaagcggcttctcatcc

SEQ ID NO: 1800721 - DNA, 25 bp, Homo sapien
tggcaggaagcggcttctcatcctc

SEQ ID NO: 1800722 - DNA, 25 bp, Homo sapien
tctcatcctcctcgtctccatggat

SEQ ID NO: 1800723 - DNA, 25 bp, Homo sapien
tcatcctcctcgtctccatggatac

SEQ ID NO: 1800724 - DNA, 25 bp, Homo sapien
ggagaatgaccctccgtgtccgcgt

SEQ ID NO: 1800725 - DNA, 25 bp, Homo sapien
gatgggttccttccgatgcaggctg

SEQ ID NO: 1800726 - DNA, 25 bp, Homo sapien
tgtccgcgtctgtgctctgttgaac

SEQ ID NO: 1800727 - DNA, 25 bp, Homo sapien
gccctgaggatgtgtatctgcccct

SEQ ID NO: 1800728 - DNA, 25 bp, Homo sapien
ggtgtcatccttctgggaacactgg

SEQ ID NO: 1800729 - DNA, 25 bp, Homo sapien
ggcccggccgggtgtcatccttctg

SEQ ID NO: 1800730 - DNA, 25 bp, Homo sapien
ccggccgggtgtcatccttctggga

SEQ ID NO: 1800731 - DNA, 25 bp, Homo sapien
gggtgtcatccttctgggaacactg

SEQ ID NO: 1800732 - DNA, 25 bp, Homo sapien
agctcgccgtgtaagggtccgagga

SEQ ID NO: 1800733 - DNA, 25 bp, Homo sapien
ggagcatccctctggagctcgccgt

SEQ ID NO: 1800734 - DNA, 25 bp, Homo sapien
tcgtcgtcgtagctgccctgggcat

SEQ ID NO: 1800735 - DNA, 25 bp, Homo sapien
cctgggcctcgacttctgtgctgtc

SEQ ID NO: 1800736 - DNA, 25 bp, Homo sapien
cgcatgtccgcgctgggacctgtgg

SEQ ID NO: 1800737 - DNA, 25 bp, Homo sapien
acctgtggtcgccacctgcccctgc

SEQ ID NO: 1800738 - DNA, 25 bp, Homo sapien
gggacctgtggtcgccacctgcccc

SEQ ID NO: 1800739 - DNA, 25 bp, Homo sapien
gcatgtccgcgctgggacctgtggt

SEQ ID NO: 1800740 - DNA, 25 bp, Homo sapien
gccgcttggaaggaggctccgactt

SEQ ID NO: 1800741 - DNA, 25 bp, Homo sapien
gaagacagaaggtcttctttcccgc

SEQ ID NO: 1800742 - DNA, 25 bp, Homo sapien
gtcctcggctgagaccgactgctgg

SEQ ID NO: 1800743 - DNA, 25 bp, Homo sapien
cgtcgtcctcggctgagaccgactg

SEQ ID NO: 1800744 - DNA, 25 bp, Homo sapien
ctgcgaggcggcagtcgggaaggga

SEQ ID NO: 1800745 - DNA, 25 bp, Homo sapien
acaggagccaggctccctccgcgag

SEQ ID NO: 1800746 - DNA, 25 bp, Homo sapien
tggcgaggctcccatcggcgtcttt

SEQ ID NO: 1800747 - DNA, 25 bp, Homo sapien
cggcagtcgggaagggacgtgggag

SEQ ID NO: 1800748 - DNA, 25 bp, Homo sapien
ggtgggtgcccgcgacggggctcac

SEQ ID NO: 1800749 - DNA, 25 bp, Homo sapien
gggtgggtgcccgcgacggggctca

SEQ ID NO: 1800750 - DNA, 25 bp, Homo sapien
gggtggtggagaagtggccaggtgg

SEQ ID NO: 1800751 - DNA, 25 bp, Homo sapien
agaagtggccaggtggggcgcgcgt

SEQ ID NO: 1800752 - DNA, 25 bp, Homo sapien
ggtggggcgcgcgtggtgtactgcg

SEQ ID NO: 1800753 - DNA, 25 bp, Homo sapien
cggggtggtggagaagtggccaggt

SEQ ID NO: 1800754 - DNA, 25 bp, Homo sapien
tcatcctctggcgcaaggacagcat

SEQ ID NO: 1800755 - DNA, 25 bp, Homo sapien
gcaggctgtcgggagagagggttac

SEQ ID NO: 1800756 - DNA, 25 bp, Homo sapien
aagagggtctggcaggctgtcggga

SEQ ID NO: 1800757 - DNA, 25 bp, Homo sapien
tgtcgggagagagggttacggaatc

SEQ ID NO: 1800758 - DNA, 25 bp, Homo sapien
tccttgagggccattgataattctc

SEQ ID NO: 1800759 - DNA, 25 bp, Homo sapien
tctacatttggtctgccattataac

SEQ ID NO: 1800760 - DNA, 25 bp, Homo sapien
tccattactaccaggaaggactttc

SEQ ID NO: 1800761 - DNA, 25 bp, Homo sapien
ccattgataattctctgtccattcg

SEQ ID NO: 1800762 - DNA, 25 bp, Homo sapien
gaatcttggaggtaccttccttctg

SEQ ID NO: 1800763 - DNA, 25 bp, Homo sapien
tactaacccacgatcaaggtccaca

SEQ ID NO: 1800764 - DNA, 25 bp, Homo sapien
tacaatggttcgaccatctcctcct

SEQ ID NO: 1800765 - DNA, 25 bp, Homo sapien
gtttaatccgaagaggatttccatg

SEQ ID NO: 1800766 - DNA, 25 bp, Homo sapien
gccagaggtgtgccatgtcgcccct

SEQ ID NO: 1800767 - DNA, 25 bp, Homo sapien
ttggcttatcttgggcattggccag

SEQ ID NO: 1800768 - DNA, 25 bp, Homo sapien
aattggcttatcttgggcattggcc

SEQ ID NO: 1800769 - DNA, 25 bp, Homo sapien
agaggtgtgccatgtcgcccctgcc

SEQ ID NO: 1800770 - DNA, 25 bp, Homo sapien
catcatcgtcgtgccgttccaaggt

SEQ ID NO: 1800771 - DNA, 25 bp, Homo sapien
tgggatcccattggagctcattatc

SEQ ID NO: 1800772 - DNA, 25 bp, Homo sapien
ttcggactgtggttgttggacgcct

SEQ ID NO: 1800773 - DNA, 25 bp, Homo sapien
ttgtccgcgtagtggttcggactgt

SEQ ID NO: 1800774 - DNA, 25 bp, Homo sapien
tagttagcattagaacaaaggcagt

SEQ ID NO: 1800775 - DNA, 25 bp, Homo sapien
gtgctagtgtgcctggtaagtagtt

SEQ ID NO: 1800776 - DNA, 25 bp, Homo sapien
cctgctctgagttgcggcgtgctag

SEQ ID NO: 1800777 - DNA, 25 bp, Homo sapien
accctgctctgagttgcggcgtgct

SEQ ID NO: 1800778 - DNA, 25 bp, Homo sapien
catgttcaaactgattgggcttatc

SEQ ID NO: 1800779 - DNA, 25 bp, Homo sapien
gcctgatgcaaatctagaatgactt

SEQ ID NO: 1800780 - DNA, 25 bp, Homo sapien
aataacgttgcataagaattccagc

SEQ ID NO: 1800781 - DNA, 25 bp, Homo sapien
gggcttatcatagtcaataacgttg

SEQ ID NO: 1800782 - DNA, 25 bp, Homo sapien
gagcactggcttttaggacatggaa

SEQ ID NO: 1800783 - DNA, 25 bp, Homo sapien
gaaactcagggatatttgcacattg

SEQ ID NO: 1800784 - DNA, 25 bp, Homo sapien
caaggtcatgctacaaattcttgaa

SEQ ID NO: 1800785 - DNA, 25 bp, Homo sapien
ttgcacattgtacagttggtccagc

SEQ ID NO: 1800786 - DNA, 25 bp, Homo sapien
cagtattttctatctggagacccag

SEQ ID NO: 1800787 - DNA, 25 bp, Homo sapien
taacctttaggaatgtcgtcttgct

SEQ ID NO: 1800788 - DNA, 25 bp, Homo sapien
cattccaatgtcaatatacctggga

SEQ ID NO: 1800789 - DNA, 25 bp, Homo sapien
caaatcagttttcaggttcacaccc

SEQ ID NO: 1800790 - DNA, 25 bp, Homo sapien
tgggatccaagacaaattacttctg

SEQ ID NO: 1800791 - DNA, 25 bp, Homo sapien
atatataacgtaggcctcttccgta

SEQ ID NO: 1800792 - DNA, 25 bp, Homo sapien
tcttccgtaggtactgcagtgtcag

SEQ ID NO: 1800793 - DNA, 25 bp, Homo sapien
ggcctcttccgtaggtactgcagtg

SEQ ID NO: 1800794 - DNA, 25 bp, Homo sapien
acgtaggcctcttccgtaggtactg

SEQ ID NO: 1800795 - DNA, 25 bp, Homo sapien
ggagcactgtctatagtcaaatgat

SEQ ID NO: 1800796 - DNA, 25 bp, Homo sapien
gtcaaatgataccttcttacattca

SEQ ID NO: 1800797 - DNA, 25 bp, Homo sapien
gaaaaggagcactgtctatagtcaa

SEQ ID NO: 1800798 - DNA, 25 bp, Homo sapien
tgtctatagtcaaatgataccttct

SEQ ID NO: 1800799 - DNA, 25 bp, Homo sapien
caacaaatcgtttccttccagccag

SEQ ID NO: 1800800 - DNA, 25 bp, Homo sapien
tgggatcaccctcggtgtggtagca

SEQ ID NO: 1800801 - DNA, 25 bp, Homo sapien
gaaaggaactgatggcgccttcctc

SEQ ID NO: 1800802 - DNA, 25 bp, Homo sapien
gtggccttgacgtctcaaattcata

SEQ ID NO: 1800803 - DNA, 25 bp, Homo sapien
ggatatgaaccgatggcctcatgtt

SEQ ID NO: 1800804 - DNA, 25 bp, Homo sapien
gatacatggtcctgggagtaaggca

SEQ ID NO: 1800805 - DNA, 25 bp, Homo sapien
tctcgcctgccaacgctgagagtac

SEQ ID NO: 1800806 - DNA, 25 bp, Homo sapien
tggcctcatgttaccatctcgcctg

SEQ ID NO: 1800807 - DNA, 25 bp, Homo sapien
gctggacggaggctccatcagcctt

SEQ ID NO: 1800808 - DNA, 25 bp, Homo sapien
tcctgctggacggaggctccatcag

SEQ ID NO: 1800809 - DNA, 25 bp, Homo sapien
tggacggaggctccatcagccttga

SEQ ID NO: 1800810 - DNA, 25 bp, Homo sapien
ctgctggacggaggctccatcagcc

SEQ ID NO: 1800811 - DNA, 25 bp, Homo sapien
gatgggtctttatttaggtacgtca

SEQ ID NO: 1800812 - DNA, 25 bp, Homo sapien
cttggaagtgatccagtgcatcagt

SEQ ID NO: 1800813 - DNA, 25 bp, Homo sapien
gaagtgatccagtgcatcagtcaga

SEQ ID NO: 1800814 - DNA, 25 bp, Homo sapien
agtgatccagtgcatcagtcagaga

SEQ ID NO: 1800815 - DNA, 25 bp, Homo sapien
cacaatgacaaatgagtggcaacct

SEQ ID NO: 1800816 - DNA, 25 bp, Homo sapien
aatgagtggcaaccttccacggcca

SEQ ID NO: 1800817 - DNA, 25 bp, Homo sapien
ggctttgtcccagtccacaatgaca

SEQ ID NO: 1800818 - DNA, 25 bp, Homo sapien
gggaggcaggtcactcttcttcagg

SEQ ID NO: 1800819 - DNA, 25 bp, Homo sapien
gaaattttgaattgtgcgaactgca

SEQ ID NO: 1800820 - DNA, 25 bp, Homo sapien
gctctttggatattcttggacacat

SEQ ID NO: 1800821 - DNA, 25 bp, Homo sapien
gagaagatgctctttggatattctt

SEQ ID NO: 1800822 - DNA, 25 bp, Homo sapien
tgtaagatataatagtgggaacacc

SEQ ID NO: 1800823 - DNA, 25 bp, Homo sapien
tggggtcacagaaaaggagttgaca

SEQ ID NO: 1800824 - DNA, 25 bp, Homo sapien
tgggctttaggttctcaatgggcaa

SEQ ID NO: 1800825 - DNA, 25 bp, Homo sapien
gaagtcttcataggatgcactgtaa

SEQ ID NO: 1800826 - DNA, 25 bp, Homo sapien
tactgatgaagcttgagtggaccac

SEQ ID NO: 1800827 - DNA, 25 bp, Homo sapien
tcaatgggcaagtgagttactgatg

SEQ ID NO: 1800828 - DNA, 25 bp, Homo sapien
ccgtagccatgaggattttgtgctt

SEQ ID NO: 1800829 - DNA, 25 bp, Homo sapien
ctgattcggtgacaaatgagaccga

SEQ ID NO: 1800830 - DNA, 25 bp, Homo sapien
agggctgataggtccgtagccatga

SEQ ID NO: 1800831 - DNA, 25 bp, Homo sapien
caaatgagaccgaagggctgatagg

SEQ ID NO: 1800832 - DNA, 25 bp, Homo sapien
ctgggggcctcacaacaagcagagg

SEQ ID NO: 1800833 - DNA, 25 bp, Homo sapien
acacaaaacacacctgctaagggta

SEQ ID NO: 1800834 - DNA, 25 bp, Homo sapien
acaaaacacacctgctaagggtaag

SEQ ID NO: 1800835 - DNA, 25 bp, Homo sapien
cacaaaacacacctgctaagggtaa

SEQ ID NO: 1800836 - DNA, 25 bp, Homo sapien
caaaacacacctgctaagggtaagc

SEQ ID NO: 1800837 - DNA, 25 bp, Homo sapien
gcgcttcacatattgccgtccatgg

SEQ ID NO: 1800838 - DNA, 25 bp, Homo sapien
gaactttcgataccacgtgcgcttc

SEQ ID NO: 1800839 - DNA, 25 bp, Homo sapien
aatgggatccagataggctcaccgc

SEQ ID NO: 1800840 - DNA, 25 bp, Homo sapien
ccatggcagtccgtgtagctgggat

SEQ ID NO: 1800841 - DNA, 25 bp, Homo sapien
ctgtctccaatgctgtagaatgtat

SEQ ID NO: 1800842 - DNA, 25 bp, Homo sapien
tgttcttccatcaaggtgtgaatcc

SEQ ID NO: 1800843 - DNA, 25 bp, Homo sapien
tctacataggactgaggccctgttc

SEQ ID NO: 1800844 - DNA, 25 bp, Homo sapien
acaaattggcaatggtcttcacctc

SEQ ID NO: 1800845 - DNA, 25 bp, Homo sapien
tatggataatgcaggcactagtaac

SEQ ID NO: 1800846 - DNA, 25 bp, Homo sapien
gagtgtgctgaatacccagcagctc

SEQ ID NO: 1800847 - DNA, 25 bp, Homo sapien
cagtcacagggacaccatggaatat

SEQ ID NO: 1800848 - DNA, 25 bp, Homo sapien
ttttctggaaactcaataactgctc

SEQ ID NO: 1800849 - DNA, 25 bp, Homo sapien
gaacccagtgactaagtgtaaagta

SEQ ID NO: 1800850 - DNA, 25 bp, Homo sapien
tctgtagagatcgtccagtccccac

SEQ ID NO: 1800851 - DNA, 25 bp, Homo sapien
tttgtgtgtggttgccatagccctg

SEQ ID NO: 1800852 - DNA, 25 bp, Homo sapien
catgtgtgacacagctaggatggca

SEQ ID NO: 1800853 - DNA, 25 bp, Homo sapien
tcctgacgatactggcgatagtagc

SEQ ID NO: 1800854 - DNA, 25 bp, Homo sapien
cgaagccgatgttcccaaacctgac

SEQ ID NO: 1800855 - DNA, 25 bp, Homo sapien
cctgacaggctcctgacgatactgg

SEQ ID NO: 1800856 - DNA, 25 bp, Homo sapien
tccgaagccgatgttcccaaacctg

SEQ ID NO: 1800857 - DNA, 25 bp, Homo sapien
tttccagggatggagaccccacact

SEQ ID NO: 1800858 - DNA, 25 bp, Homo sapien
agggatggagaccccacactcgtac

SEQ ID NO: 1800859 - DNA, 25 bp, Homo sapien
cactttccagggatggagaccccac

SEQ ID NO: 1800860 - DNA, 25 bp, Homo sapien
tccagggatggagaccccacactcg

SEQ ID NO: 1800861 - DNA, 25 bp, Homo sapien
gcgtgcatatgctattcctggaaat

SEQ ID NO: 1800862 - DNA, 25 bp, Homo sapien
gaatcctgttcattgtccaggccaa

SEQ ID NO: 1800863 - DNA, 25 bp, Homo sapien
acagcccctagtgcgacttagttgg

SEQ ID NO: 1800864 - DNA, 25 bp, Homo sapien
caagcttgcagcatgacggtcctgt

SEQ ID NO: 1800865 - DNA, 25 bp, Homo sapien
gagtaaatttcaagtaggatatatt

SEQ ID NO: 1800866 - DNA, 25 bp, Homo sapien
ttattctagcagtgggtaagtccat

SEQ ID NO: 1800867 - DNA, 25 bp, Homo sapien
tctagcagtgggtaagtccatagag

SEQ ID NO: 1800868 - DNA, 25 bp, Homo sapien
tagcagtgggtaagtccatagagta

SEQ ID NO: 1800869 - DNA, 25 bp, Homo sapien
taatcaatattcttgcagacaagtg

SEQ ID NO: 1800870 - DNA, 25 bp, Homo sapien
caatattcttgcagacaagtgtgga

SEQ ID NO: 1800871 - DNA, 25 bp, Homo sapien
attttaatcaatattcttgcagaca

SEQ ID NO: 1800872 - DNA, 25 bp, Homo sapien
cttgcagacaagtgtggatatgtat

SEQ ID NO: 1800873 - DNA, 25 bp, Homo sapien
tagaagggaagtaagggatggagga

SEQ ID NO: 1800874 - DNA, 25 bp, Homo sapien
gaagggaagtaagggatggaggaga

SEQ ID NO: 1800875 - DNA, 25 bp, Homo sapien
agaagggaagtaagggatggaggag

SEQ ID NO: 1800876 - DNA, 25 bp, Homo sapien
agggaagtaagggatggaggagagg

SEQ ID NO: 1800877 - DNA, 25 bp, Homo sapien
ggtcaaagtgtctgagtctcccatg

SEQ ID NO: 1800878 - DNA, 25 bp, Homo sapien
tgagcacagatgcaggttccaccga

SEQ ID NO: 1800879 - DNA, 25 bp, Homo sapien
actcgagcacgactgaatgttggga

SEQ ID NO: 1800880 - DNA, 25 bp, Homo sapien
ggccaggcactcatcttggcctgag

SEQ ID NO: 1800881 - DNA, 25 bp, Homo sapien
tgccgttctgtagccttctctggtg

SEQ ID NO: 1800882 - DNA, 25 bp, Homo sapien
tgcggaaaaggggcctgactcttag

SEQ ID NO: 1800883 - DNA, 25 bp, Homo sapien
tctttgccgttctgtagccttctct

SEQ ID NO: 1800884 - DNA, 25 bp, Homo sapien
ttctgtagccttctctggtgatacc

SEQ ID NO: 1800885 - DNA, 25 bp, Homo sapien
caaggtcgctgaggccagactgcct

SEQ ID NO: 1800886 - DNA, 25 bp, Homo sapien
gcagacttaagcaaccctgcctgat

SEQ ID NO: 1800887 - DNA, 25 bp, Homo sapien
acagctcagcaaggtcgctgaggcc

SEQ ID NO: 1800888 - DNA, 25 bp, Homo sapien
acttaagcaaccctgcctgatggct

SEQ ID NO: 1800889 - DNA, 25 bp, Homo sapien
cagctgaggccctagattccctata

SEQ ID NO: 1800890 - DNA, 25 bp, Homo sapien
tttgtcccaggagggatatcccaga

SEQ ID NO: 1800891 - DNA, 25 bp, Homo sapien
gattccctatagctgatcccatttc

SEQ ID NO: 1800892 - DNA, 25 bp, Homo sapien
aattcattgtgaatgtttgtcccag

SEQ ID NO: 1800893 - DNA, 25 bp, Homo sapien
aactcccactgcatcttatacatcc

SEQ ID NO: 1800894 - DNA, 25 bp, Homo sapien
tgcacacactccagtacaattgatc

SEQ ID NO: 1800895 - DNA, 25 bp, Homo sapien
ttcttgagcgttttccattcattgc

SEQ ID NO: 1800896 - DNA, 25 bp, Homo sapien
catctctcaagacccatctttccaa

SEQ ID NO: 1800897 - DNA, 25 bp, Homo sapien
tggcagctggccgaggtgcaacctc

SEQ ID NO: 1800898 - DNA, 25 bp, Homo sapien
ctggttaaacttctctggcagctgg

SEQ ID NO: 1800899 - DNA, 25 bp, Homo sapien
tgggcatctcgcctttgctggcctg

SEQ ID NO: 1800900 - DNA, 25 bp, Homo sapien
gccgaggtgcaacctcctgtatctg

SEQ ID NO: 1800901 - DNA, 25 bp, Homo sapien
agtggatggattcaatgcatcacat

SEQ ID NO: 1800902 - DNA, 25 bp, Homo sapien
ctcatgacccaagaccagggccagc

SEQ ID NO: 1800903 - DNA, 25 bp, Homo sapien
ccagcacacgcagcatcttcgtgga

SEQ ID NO: 1800904 - DNA, 25 bp, Homo sapien
cgcagcatcttcgtggaatgaggga

SEQ ID NO: 1800905 - DNA, 25 bp, Homo sapien
cacacgcagcatcttcgtggaatga

SEQ ID NO: 1800906 - DNA, 25 bp, Homo sapien
cacatcagtgctggtctgtcctcac

SEQ ID NO: 1800907 - DNA, 25 bp, Homo sapien
gcacatcagtgctggtctgtcctca

SEQ ID NO: 1800908 - DNA, 25 bp, Homo sapien
ctggcacatcagtgctggtctgtcc

SEQ ID NO: 1800909 - DNA, 25 bp, Homo sapien
ggcacatcagtgctggtctgtcctc

SEQ ID NO: 1800910 - DNA, 25 bp, Homo sapien
gcatggagatccttcgcggtttttc

SEQ ID NO: 1800911 - DNA, 25 bp, Homo sapien
tcccagggacaggagcacctgaatt

SEQ ID NO: 1800912 - DNA, 25 bp, Homo sapien
gaacaaggcggaagcctgatgttgt

SEQ ID NO: 1800913 - DNA, 25 bp, Homo sapien
tccttgctgctttggcccggtgggc

SEQ ID NO: 1800914 - DNA, 25 bp, Homo sapien
tccttctggagtcaaccacatggag

SEQ ID NO: 1800915 - DNA, 25 bp, Homo sapien
gaggccattgggaacgcaataaaga

SEQ ID NO: 1800916 - DNA, 25 bp, Homo sapien
actcccggtgagtgtaaaatgccca

SEQ ID NO: 1800917 - DNA, 25 bp, Homo sapien
tgcagacgtggtctgtccttctgga

SEQ ID NO: 1800918 - DNA, 25 bp, Homo sapien
cgcaggccagtcctagagaggtatg

SEQ ID NO: 1800919 - DNA, 25 bp, Homo sapien
agtggatgttcacgcaggccagtcc

SEQ ID NO: 1800920 - DNA, 25 bp, Homo sapien
tctaggagtggatgttcacgcaggc

SEQ ID NO: 1800921 - DNA, 25 bp, Homo sapien
tgcaccagtttctaggagtggatgt

SEQ ID NO: 1800922 - DNA, 25 bp, Homo sapien
aacacaacgctgagctgccagagaa

SEQ ID NO: 1800923 - DNA, 25 bp, Homo sapien
gatcaaacatccatagaagtccagg

SEQ ID NO: 1800924 - DNA, 25 bp, Homo sapien
ggagtaaatggtctgccattaggaa

SEQ ID NO: 1800925 - DNA, 25 bp, Homo sapien
gagaggccagaaaggtacttccaat

SEQ ID NO: 1800926 - DNA, 25 bp, Homo sapien
ggaagtttcaggtagcagatgctca

SEQ ID NO: 1800927 - DNA, 25 bp, Homo sapien
tgtctctgagacaagccagggaagt

SEQ ID NO: 1800928 - DNA, 25 bp, Homo sapien
gtaaggaccccagcaatcagctttg

SEQ ID NO: 1800929 - DNA, 25 bp, Homo sapien
tgttgtagaaggtggcatggctccc

SEQ ID NO: 1800930 - DNA, 25 bp, Homo sapien
tgtggtcctgctgatcccaaatagt

SEQ ID NO: 1800931 - DNA, 25 bp, Homo sapien
ctgctgatcccaaatagtggtgctt

SEQ ID NO: 1800932 - DNA, 25 bp, Homo sapien
ggtcctgctgatcccaaatagtggt

SEQ ID NO: 1800933 - DNA, 25 bp, Homo sapien
cttgtggtcctgctgatcccaaata

SEQ ID NO: 1800934 - DNA, 25 bp, Homo sapien
catctttatcacctggtgcacattc

SEQ ID NO: 1800935 - DNA, 25 bp, Homo sapien
tctttatcacctggtgcacattcct

SEQ ID NO: 1800936 - DNA, 25 bp, Homo sapien
ttatcacctggtgcacattcctcac

SEQ ID NO: 1800937 - DNA, 25 bp, Homo sapien
cacatctttatcacctggtgcacat

SEQ ID NO: 1800938 - DNA, 25 bp, Homo sapien
accagtagtagggagagtagatctc

SEQ ID NO: 1800939 - DNA, 25 bp, Homo sapien
cgtattgctgtcaaaccgaaggtta

SEQ ID NO: 1800940 - DNA, 25 bp, Homo sapien
tatttaacgttgttcttccatagga

SEQ ID NO: 1800941 - DNA, 25 bp, Homo sapien
gagtcctcagccaaaagagtctcca

SEQ ID NO: 1800942 - DNA, 25 bp, Homo sapien
aagctggcaggcattgggctttact

SEQ ID NO: 1800943 - DNA, 25 bp, Homo sapien
ccatgcaggcaatttccataagaca

SEQ ID NO: 1800944 - DNA, 25 bp, Homo sapien
cttgtttccataagacacatcagtg

SEQ ID NO: 1800945 - DNA, 25 bp, Homo sapien
caggcattgggctttactgccatgc

SEQ ID NO: 1800946 - DNA, 25 bp, Homo sapien
agttgacaagaagggtgttttctgc

SEQ ID NO: 1800947 - DNA, 25 bp, Homo sapien
atgttttcctatggttcgagcagaa

SEQ ID NO: 1800948 - DNA, 25 bp, Homo sapien
tatggttcgagcagaaacttcacat

SEQ ID NO: 1800949 - DNA, 25 bp, Homo sapien
cctggagttgacaagaagggtgttt

SEQ ID NO: 1800950 - DNA, 25 bp, Homo sapien
gcagcacccgcagaagtgcagttac

SEQ ID NO: 1800951 - DNA, 25 bp, Homo sapien
tctactgaggcaagaatgctcatct

SEQ ID NO: 1800952 - DNA, 25 bp, Homo sapien
cacgtatttcttggcggagagcagc

SEQ ID NO: 1800953 - DNA, 25 bp, Homo sapien
tcaaggccggcatctactgaggcaa

SEQ ID NO: 1800954 - DNA, 25 bp, Homo sapien
gaaagcataggccttctgtgttttt

SEQ ID NO: 1800955 - DNA, 25 bp, Homo sapien
tcagaaagcataggccttctgtgtt

SEQ ID NO: 1800956 - DNA, 25 bp, Homo sapien
agtaattctgctggaggaaaggccc

SEQ ID NO: 1800957 - DNA, 25 bp, Homo sapien
tggagtaattctgctggaggaaagg

SEQ ID NO: 1800958 - DNA, 25 bp, Homo sapien
gatgtcagtgttcctccccattatg

SEQ ID NO: 1800959 - DNA, 25 bp, Homo sapien
ctgcccgtggctctgaggctttcag

SEQ ID NO: 1800960 - DNA, 25 bp, Homo sapien
ccactaagctcctgcttcaatttga

SEQ ID NO: 1800961 - DNA, 25 bp, Homo sapien
attatgctggcagcgctggccttga

SEQ ID NO: 1800962 - DNA, 25 bp, Homo sapien
ttggtttgcacaggactgcacgctg

SEQ ID NO: 1800963 - DNA, 25 bp, Homo sapien
ttagcttggatgcaaagacagaaac

SEQ ID NO: 1800964 - DNA, 25 bp, Homo sapien
cagcaccgtcgcaggcttttctgga

SEQ ID NO: 1800965 - DNA, 25 bp, Homo sapien
aacaaagcttcatcatgccacccgg

SEQ ID NO: 1800966 - DNA, 25 bp, Homo sapien
gaaggcgcctgatgtgacttcgcat

SEQ ID NO: 1800967 - DNA, 25 bp, Homo sapien
ccctaaagaggttttgccttctgag

SEQ ID NO: 1800968 - DNA, 25 bp, Homo sapien
gatggccaaaccttgcatgcagcga

SEQ ID NO: 1800969 - DNA, 25 bp, Homo sapien
caaataatgaagcttcgggccgagg

SEQ ID NO: 1800970 - DNA, 25 bp, Homo sapien
tctccaggtgccgtcgtttgcatat

SEQ ID NO: 1800971 - DNA, 25 bp, Homo sapien
tccaggtgccgtcgtttgcatatct

SEQ ID NO: 1800972 - DNA, 25 bp, Homo sapien
tcctctccaggtgccgtcgtttgca

SEQ ID NO: 1800973 - DNA, 25 bp, Homo sapien
ggtgccgtcgtttgcatatctattt

SEQ ID NO: 1800974 - DNA, 25 bp, Homo sapien
ggcacctcgcctccctgaccatact

SEQ ID NO: 1800975 - DNA, 25 bp, Homo sapien
tccagggttctggggcacctcgcct

SEQ ID NO: 1800976 - DNA, 25 bp, Homo sapien
ctttctttaggagccatttcaagcc

SEQ ID NO: 1800977 - DNA, 25 bp, Homo sapien
cccacactttctttaggagccattt

SEQ ID NO: 1800978 - DNA, 25 bp, Homo sapien
agtggcagcctattcagcatctcag

SEQ ID NO: 1800979 - DNA, 25 bp, Homo sapien
gggctgtcaggagtggcatctaggg

SEQ ID NO: 1800980 - DNA, 25 bp, Homo sapien
acatgactccagacagtggcagcct

SEQ ID NO: 1800981 - DNA, 25 bp, Homo sapien
gctctctccatctgtggcttggaat

SEQ ID NO: 1800982 - DNA, 25 bp, Homo sapien
aaagccaaggctacatcttggcatt

SEQ ID NO: 1800983 - DNA, 25 bp, Homo sapien
tagaaaagagtttagccatctgttt

SEQ ID NO: 1800984 - DNA, 25 bp, Homo sapien
ggtatcattctcatcccttggcaat

SEQ ID NO: 1800985 - DNA, 25 bp, Homo sapien
tgtagttccgctgaatggtatcatt

SEQ ID NO: 1800986 - DNA, 25 bp, Homo sapien
tcttgtttgtagttccgctgaatgg

SEQ ID NO: 1800987 - DNA, 25 bp, Homo sapien
tcttccaaggttagggtcgctgctc

SEQ ID NO: 1800988 - DNA, 25 bp, Homo sapien
caaggttagggtcgctgctcagcag

SEQ ID NO: 1800989 - DNA, 25 bp, Homo sapien
tcctcttccaaggttagggtcgctg

SEQ ID NO: 1800990 - DNA, 25 bp, Homo sapien
ctgtcctcttccaaggttagggtcg

SEQ ID NO: 1800991 - DNA, 25 bp, Homo sapien
tgagtgcttctgaatacatgactgt

SEQ ID NO: 1800992 - DNA, 25 bp, Homo sapien
tttgagtgcttctgaatacatgact

SEQ ID NO: 1800993 - DNA, 25 bp, Homo sapien
ttgagtgcttctgaatacatgactg

SEQ ID NO: 1800994 - DNA, 25 bp, Homo sapien
ggccaatgatgtggcaagtccaagg

SEQ ID NO: 1800995 - DNA, 25 bp, Homo sapien
cattgtttgaggaggccatgagtgg

SEQ ID NO: 1800996 - DNA, 25 bp, Homo sapien
ctgctacacaagccaggccaatgat

SEQ ID NO: 1800997 - DNA, 25 bp, Homo sapien
gcctcctgctgctacacaagccagg

SEQ ID NO: 1800998 - DNA, 25 bp, Homo sapien
ttgcttcatccttgcactttcccag

SEQ ID NO: 1800999 - DNA, 25 bp, Homo sapien
ccgtgtccagctaaaagtctgctgg

SEQ ID NO: 1801000 - DNA, 25 bp, Homo sapien
tgcactttcccaggtctttctgttt

SEQ ID NO: 1801001 - DNA, 25 bp, Homo sapien
gggaacaatgaagtctcaaggtatt

SEQ ID NO: 1801002 - DNA, 25 bp, Homo sapien
gccaatggtaggattgtgaatgaga

SEQ ID NO: 1801003 - DNA, 25 bp, Homo sapien
tggtaggattgtgaatgagacagcc

SEQ ID NO: 1801004 - DNA, 25 bp, Homo sapien
gcagaacctctgtatggacagcttt

SEQ ID NO: 1801005 - DNA, 25 bp, Homo sapien
agaacctctgtatggacagctttgc

SEQ ID NO: 1801006 - DNA, 25 bp, Homo sapien
aactaatgacgaagacagttctgcc

SEQ ID NO: 1801007 - DNA, 25 bp, Homo sapien
acagttctgccatactccgttgcct

SEQ ID NO: 1801008 - DNA, 25 bp, Homo sapien
cccagtgaaaactaatgacgaagac

SEQ ID NO: 1801009 - DNA, 25 bp, Homo sapien
agacagttctgccatactccgttgc

SEQ ID NO: 1801010 - DNA, 25 bp, Homo sapien
gaagtccacacaggttcgtatttta

SEQ ID NO: 1801011 - DNA, 25 bp, Homo sapien
gcaaaggctcctaagaaagaagtcc

SEQ ID NO: 1801012 - DNA, 25 bp, Homo sapien
aaggctcctaagaaagaagtccaca

SEQ ID NO: 1801013 - DNA, 25 bp, Homo sapien
ttagcgtgcgtccagtccctggcac

SEQ ID NO: 1801014 - DNA, 25 bp, Homo sapien
tcatgcagaggttactacaggttct

SEQ ID NO: 1801015 - DNA, 25 bp, Homo sapien
aagatatgcgtgcttgagtctcgcc

SEQ ID NO: 1801016 - DNA, 25 bp, Homo sapien
gcaaccacctttacatcatgcagag

SEQ ID NO: 1801017 - DNA, 25 bp, Homo sapien
gcagtacacatttgaactggcaaag

SEQ ID NO: 1801018 - DNA, 25 bp, Homo sapien
tgccaagagaacctgtgaacccatt

SEQ ID NO: 1801019 - DNA, 25 bp, Homo sapien
gaacaagccatgagatgccaagaga

SEQ ID NO: 1801020 - DNA, 25 bp, Homo sapien
cctgtgaacccattgaagaaaatct

SEQ ID NO: 1801021 - DNA, 25 bp, Homo sapien
tcacaggttgatttgcagcaggttt

SEQ ID NO: 1801022 - DNA, 25 bp, Homo sapien
aaggtgagctttgaggcagcaacag

SEQ ID NO: 1801023 - DNA, 25 bp, Homo sapien
gtgagctttgaggcagcaacagcac

SEQ ID NO: 1801024 - DNA, 25 bp, Homo sapien
ggtgagctttgaggcagcaacagca

SEQ ID NO: 1801025 - DNA, 25 bp, Homo sapien
ttaaggtgagctttgaggcagcaac

SEQ ID NO: 1801026 - DNA, 25 bp, Homo sapien
ttcctctcggccctacgctgtcctt

SEQ ID NO: 1801027 - DNA, 25 bp, Homo sapien
agaccattcagccgtgattcctctc

SEQ ID NO: 1801028 - DNA, 25 bp, Homo sapien
cgtgattcctctcggccctacgctg

SEQ ID NO: 1801029 - DNA, 25 bp, Homo sapien
accattcagccgtgattcctctcgg

SEQ ID NO: 1801030 - DNA, 25 bp, Homo sapien
ttaacaaggaggaagaataaggcag

SEQ ID NO: 1801031 - DNA, 25 bp, Homo sapien
tatttcctatgggacttgtcagcat

SEQ ID NO: 1801032 - DNA, 25 bp, Homo sapien
cagcgactgctggtcatgttaaaag

SEQ ID NO: 1801033 - DNA, 25 bp, Homo sapien
tattaggcagaagccgaatcatcca

SEQ ID NO: 1801034 - DNA, 25 bp, Homo sapien
ttcttcacattctgttcactaggat

SEQ ID NO: 1801035 - DNA, 25 bp, Homo sapien
gcatgttccagtttgtatggttgtt

SEQ ID NO: 1801036 - DNA, 25 bp, Homo sapien
atgagcatgttccagtttgtatggt

SEQ ID NO: 1801037 - DNA, 25 bp, Homo sapien
gagcatgttccagtttgtatggttg

SEQ ID NO: 1801038 - DNA, 25 bp, Homo sapien
tccattccagtgcaacagggtgtgt

SEQ ID NO: 1801039 - DNA, 25 bp, Homo sapien
taaggtccttcttatggctcccagg

SEQ ID NO: 1801040 - DNA, 25 bp, Homo sapien
gagatactcgcacttctggtgagaa

SEQ ID NO: 1801041 - DNA, 25 bp, Homo sapien
cattgaacagggaacgggagagcat

SEQ ID NO: 1801042 - DNA, 25 bp, Homo sapien
ctggtgttaacaggcagacaagcat

SEQ ID NO: 1801043 - DNA, 25 bp, Homo sapien
gcttcagactcgagggttcccagtg

SEQ ID NO: 1801044 - DNA, 25 bp, Homo sapien
cggcttcagactcgagggttcccag

SEQ ID NO: 1801045 - DNA, 25 bp, Homo sapien
gagctggtgttaacaggcagacaag

SEQ ID NO: 1801046 - DNA, 25 bp, Homo sapien
tcaaagtcagctgcaaacatcagtg

SEQ ID NO: 1801047 - DNA, 25 bp, Homo sapien
gatacatcgcagctgttggccgtca

SEQ ID NO: 1801048 - DNA, 25 bp, Homo sapien
gaattatacggtggttcacatagcc

SEQ ID NO: 1801049 - DNA, 25 bp, Homo sapien
ttttgtgttccgtcagctgtactgc

SEQ ID NO: 1801050 - DNA, 25 bp, Homo sapien
gaggcctggaatgcccgggatacta

SEQ ID NO: 1801051 - DNA, 25 bp, Homo sapien
caagatgccctgcactgattcgggt

SEQ ID NO: 1801052 - DNA, 25 bp, Homo sapien
gcagcgaagccccttttgccaggtg

SEQ ID NO: 1801053 - DNA, 25 bp, Homo sapien
ggctcttgagcaagtccaccctgca

SEQ ID NO: 1801054 - DNA, 25 bp, Homo sapien
ggcactctcaggctttcatatcgag

SEQ ID NO: 1801055 - DNA, 25 bp, Homo sapien
tgatggagaaaattgccgctctggg

SEQ ID NO: 1801056 - DNA, 25 bp, Homo sapien
gaaggtagacggagctttgctttcc

SEQ ID NO: 1801057 - DNA, 25 bp, Homo sapien
tcacttagaagtgggtccgccagca

SEQ ID NO: 1801058 - DNA, 25 bp, Homo sapien
aagccaggcaaccacgcaaaggtgt

SEQ ID NO: 1801059 - DNA, 25 bp, Homo sapien
aaccacgcaaaggtgttgacagaca

SEQ ID NO: 1801060 - DNA, 25 bp, Homo sapien
ctctctgtgggaggtgccactgtta

SEQ ID NO: 1801061 - DNA, 25 bp, Homo sapien
gttaatcagacctgctaagccaggc

SEQ ID NO: 1801062 - DNA, 25 bp, Homo sapien
cccaggctgcccacctgtcagtcat

SEQ ID NO: 1801063 - DNA, 25 bp, Homo sapien
gttcccaggctgcccacctgtcagt

SEQ ID NO: 1801064 - DNA, 25 bp, Homo sapien
ttcccaggctgcccacctgtcagtc

SEQ ID NO: 1801065 - DNA, 25 bp, Homo sapien
tcccaggctgcccacctgtcagtca

SEQ ID NO: 1801066 - DNA, 25 bp, Homo sapien
tggttctcaccagaatgcctcggct

SEQ ID NO: 1801067 - DNA, 25 bp, Homo sapien
ccaggcccgatgtcggtggttctca

SEQ ID NO: 1801068 - DNA, 25 bp, Homo sapien
gagggtctttttgcttccgaggatc

SEQ ID NO: 1801069 - DNA, 25 bp, Homo sapien
tccgaggatccttgggtcgctcagt

SEQ ID NO: 1801070 - DNA, 25 bp, Homo sapien
agagtttcaggatagttcagcttgg

SEQ ID NO: 1801071 - DNA, 25 bp, Homo sapien
tccacgtgggtttgacagtgtctgg

SEQ ID NO: 1801072 - DNA, 25 bp, Homo sapien
gatagttcagcttggccgttttcct

SEQ ID NO: 1801073 - DNA, 25 bp, Homo sapien
agcttggccgttttcctccacgtgg

SEQ ID NO: 1801074 - DNA, 25 bp, Homo sapien
tcgcctcgcagaactgcacaacagg

SEQ ID NO: 1801075 - DNA, 25 bp, Homo sapien
cttgggaggaaacctcgcctcgcag

SEQ ID NO: 1801076 - DNA, 25 bp, Homo sapien
cgcctcgcagaactgcacaacaggt

SEQ ID NO: 1801077 - DNA, 25 bp, Homo sapien
aggaaacctcgcctcgcagaactgc

SEQ ID NO: 1801078 - DNA, 25 bp, Homo sapien
atctggctgttttgagcaggcccag

SEQ ID NO: 1801079 - DNA, 25 bp, Homo sapien
ctggctgttttgagcaggcccagca

SEQ ID NO: 1801080 - DNA, 25 bp, Homo sapien
tctggctgttttgagcaggcccagc

SEQ ID NO: 1801081 - DNA, 25 bp, Homo sapien
catctggctgttttgagcaggccca

SEQ ID NO: 1801082 - DNA, 25 bp, Homo sapien
acactgtcttccagagaataatccg

SEQ ID NO: 1801083 - DNA, 25 bp, Homo sapien
tcatttgcagagctctgagcttggc

SEQ ID NO: 1801084 - DNA, 25 bp, Homo sapien
ctgacacagtgggaaacaagcttgg

SEQ ID NO: 1801085 - DNA, 25 bp, Homo sapien
ccagagaataatccgggctacgaat

SEQ ID NO: 1801086 - DNA, 25 bp, Homo sapien
gatggctggttaggaacctgacatc

SEQ ID NO: 1801087 - DNA, 25 bp, Homo sapien
gctggttaggaacctgacatcctgg

SEQ ID NO: 1801088 - DNA, 25 bp, Homo sapien
tggctggttaggaacctgacatcct

SEQ ID NO: 1801089 - DNA, 25 bp, Homo sapien
ggctggttaggaacctgacatcctg

SEQ ID NO: 1801090 - DNA, 25 bp, Homo sapien
gctgtaaagtctgaatggggctgtt

SEQ ID NO: 1801091 - DNA, 25 bp, Homo sapien
gtaaagtctgaatggggctgttctg

SEQ ID NO: 1801092 - DNA, 25 bp, Homo sapien
tgttggctgtaaagtctgaatgggg

SEQ ID NO: 1801093 - DNA, 25 bp, Homo sapien
ccaaaggaaacacccttgttggctg

SEQ ID NO: 1801094 - DNA, 25 bp, Homo sapien
caaaataatgaatacaggcaagtgg

SEQ ID NO: 1801095 - DNA, 25 bp, Homo sapien
ggattggttgctgcaaggagtgtcc

SEQ ID NO: 1801096 - DNA, 25 bp, Homo sapien
ctgacggaagaagacggagcttgga

SEQ ID NO: 1801097 - DNA, 25 bp, Homo sapien
ccaaaataatgaatacaggcaagtg

SEQ ID NO: 1801098 - DNA, 25 bp, Homo sapien
cttgctcgctccaactcaaaagcaa

SEQ ID NO: 1801099 - DNA, 25 bp, Homo sapien
tggaaatgatgatgtccttgtattg

SEQ ID NO: 1801100 - DNA, 25 bp, Homo sapien
caagggcacttagcttctcagtctg

SEQ ID NO: 1801101 - DNA, 25 bp, Homo sapien
gatatgaggattggcccttgctcgc

SEQ ID NO: 1801102 - DNA, 25 bp, Homo sapien
cagcacggagcggagagcattttcc

SEQ ID NO: 1801103 - DNA, 25 bp, Homo sapien
cggagcggagagcattttccattca

SEQ ID NO: 1801104 - DNA, 25 bp, Homo sapien
cccgcagcacggagcggagagcatt

SEQ ID NO: 1801105 - DNA, 25 bp, Homo sapien
cacggagcggagagcattttccatt

SEQ ID NO: 1801106 - DNA, 25 bp, Homo sapien
gaaggcaccgaaggaactcacaaag

SEQ ID NO: 1801107 - DNA, 25 bp, Homo sapien
gaactaggctccaattcggagagca

SEQ ID NO: 1801108 - DNA, 25 bp, Homo sapien
tcacaaagtcagcagccgaatcagc

SEQ ID NO: 1801109 - DNA, 25 bp, Homo sapien
tgcctgggactgttaatagcgtctc

SEQ ID NO: 1801110 - DNA, 25 bp, Homo sapien
aaactgacccatgttccaagcatac

SEQ ID NO: 1801111 - DNA, 25 bp, Homo sapien
catagaaaactgacccatgttccaa

SEQ ID NO: 1801112 - DNA, 25 bp, Homo sapien
ctgacccatgttccaagcatacctt

SEQ ID NO: 1801113 - DNA, 25 bp, Homo sapien
agaaaactgacccatgttccaagca

SEQ ID NO: 1801114 - DNA, 25 bp, Homo sapien
gccagaggaggcgtccgaaggccat

SEQ ID NO: 1801115 - DNA, 25 bp, Homo sapien
gttttcaggtactttgacaatctcc

SEQ ID NO: 1801116 - DNA, 25 bp, Homo sapien
aatctcctccgtcacaccttgggtt

SEQ ID NO: 1801117 - DNA, 25 bp, Homo sapien
agaagttttcaggtactttgacaat

SEQ ID NO: 1801118 - DNA, 25 bp, Homo sapien
ggtactttgacaatctcctccgtca

SEQ ID NO: 1801119 - DNA, 25 bp, Homo sapien
gagggatacactgctgagtgaatgc

SEQ ID NO: 1801120 - DNA, 25 bp, Homo sapien
agctccatcagctgcctcagacttg

SEQ ID NO: 1801121 - DNA, 25 bp, Homo sapien
cagctgcctcagacttgtctggaag

SEQ ID NO: 1801122 - DNA, 25 bp, Homo sapien
gcagacgtgggcaattcctgccttg

SEQ ID NO: 1801123 - DNA, 25 bp, Homo sapien
gttatactgacctcaaacaatgggt

SEQ ID NO: 1801124 - DNA, 25 bp, Homo sapien
gtgttatactgacctcaaacaatgg

SEQ ID NO: 1801125 - DNA, 25 bp, Homo sapien
tgttatactgacctcaaacaatggg

SEQ ID NO: 1801126 - DNA, 25 bp, Homo sapien
tatactgacctcaaacaatgggttg

SEQ ID NO: 1801127 - DNA, 25 bp, Homo sapien
tctcctccaagtgaatggccttttg

SEQ ID NO: 1801128 - DNA, 25 bp, Homo sapien
aagtagctgactgccaaagatcccc

SEQ ID NO: 1801129 - DNA, 25 bp, Homo sapien
ggaaaacctccacaagtagctgact

SEQ ID NO: 1801130 - DNA, 25 bp, Homo sapien
cattgatgatgccttggagaccgac

SEQ ID NO: 1801131 - DNA, 25 bp, Homo sapien
gcctttctccagggagagaagggtg

SEQ ID NO: 1801132 - DNA, 25 bp, Homo sapien
ctaccagaagccaacaaagaaaagc

SEQ ID NO: 1801133 - DNA, 25 bp, Homo sapien
agaagggtgaggcagcacaggcaga

SEQ ID NO: 1801134 - DNA, 25 bp, Homo sapien
aacagcctcttggaggggcctttct

SEQ ID NO: 1801135 - DNA, 25 bp, Homo sapien
ccacactggcaagtgcgctgcctcc

SEQ ID NO: 1801136 - DNA, 25 bp, Homo sapien
cacctttgagacagttgccttcagg

SEQ ID NO: 1801137 - DNA, 25 bp, Homo sapien
ctgagtctttcctggccctgaagct

SEQ ID NO: 1801138 - DNA, 25 bp, Homo sapien
tcagcaggggactaaaagcctgtgc

SEQ ID NO: 1801139 - DNA, 25 bp, Homo sapien
gccctgaagctggaagtagaggctt

SEQ ID NO: 1801140 - DNA, 25 bp, Homo sapien
aagctggaagtagaggctttgtgca

SEQ ID NO: 1801141 - DNA, 25 bp, Homo sapien
taagggaggctactgctgtgctcag

SEQ ID NO: 1801142 - DNA, 25 bp, Homo sapien
gaaggctgacatgagtcctgagtga

SEQ ID NO: 1801143 - DNA, 25 bp, Homo sapien
gtaaggaagaacaatgtggaccacc

SEQ ID NO: 1801144 - DNA, 25 bp, Homo sapien
gaagtcgtgattgtctgagggttca

SEQ ID NO: 1801145 - DNA, 25 bp, Homo sapien
ggactactgctacatttggttgaaa

SEQ ID NO: 1801146 - DNA, 25 bp, Homo sapien
ttgactgagaaagctggccgctcgg

SEQ ID NO: 1801147 - DNA, 25 bp, Homo sapien
gctgcacttgactgagaaagctggc

SEQ ID NO: 1801148 - DNA, 25 bp, Homo sapien
aagctggccgctcggactactgcta

SEQ ID NO: 1801149 - DNA, 25 bp, Homo sapien
cagaacatggctcttctatgctatc

SEQ ID NO: 1801150 - DNA, 25 bp, Homo sapien
tctatgctatcgtttttgcatcttg

SEQ ID NO: 1801151 - DNA, 25 bp, Homo sapien
catggctcttctatgctatcgtttt

SEQ ID NO: 1801152 - DNA, 25 bp, Homo sapien
tatgctatcgtttttgcatcttggg

SEQ ID NO: 1801153 - DNA, 25 bp, Homo sapien
aagcgggtcactgtatgctgtgcag

SEQ ID NO: 1801154 - DNA, 25 bp, Homo sapien
agttgtggatcttaagcgggtcact

SEQ ID NO: 1801155 - DNA, 25 bp, Homo sapien
gatcttaagcgggtcactgtatgct

SEQ ID NO: 1801156 - DNA, 25 bp, Homo sapien
tgtggatcttaagcgggtcactgta

SEQ ID NO: 1801157 - DNA, 25 bp, Homo sapien
aattgcccatgtggccgctgccaac

SEQ ID NO: 1801158 - DNA, 25 bp, Homo sapien
cctgcttgatgaagaagggtcagcc

SEQ ID NO: 1801159 - DNA, 25 bp, Homo sapien
ttcctggacttcacaaactcaggag

SEQ ID NO: 1801160 - DNA, 25 bp, Homo sapien
gaggaagcccctgtttgtactgaca

SEQ ID NO: 1801161 - DNA, 25 bp, Homo sapien
aagatgctgccgtgagccctaggtc

SEQ ID NO: 1801162 - DNA, 25 bp, Homo sapien
tggtgagcacagcatatgcgccacc

SEQ ID NO: 1801163 - DNA, 25 bp, Homo sapien
tgcctgagccttcgctgacatctga

SEQ ID NO: 1801164 - DNA, 25 bp, Homo sapien
cagggactgactcccgtggtgagca

SEQ ID NO: 1801165 - DNA, 25 bp, Homo sapien
actgtggtaaagacaagtgaactgt

SEQ ID NO: 1801166 - DNA, 25 bp, Homo sapien
tttctgactgtggtaaagacaagtg

SEQ ID NO: 1801167 - DNA, 25 bp, Homo sapien
tgactgtggtaaagacaagtgaact

SEQ ID NO: 1801168 - DNA, 25 bp, Homo sapien
aaactccagctcctttcagggtcac

SEQ ID NO: 1801169 - DNA, 25 bp, Homo sapien
cacctggggagcctcatggaaactc

SEQ ID NO: 1801170 - DNA, 25 bp, Homo sapien
tcttgctttttacgtggagcgggcg

SEQ ID NO: 1801171 - DNA, 25 bp, Homo sapien
ggaaactcagcgctgagcaccgaga

SEQ ID NO: 1801172 - DNA, 25 bp, Homo sapien
ggaccactcccagggcgctgccagc

SEQ ID NO: 1801173 - DNA, 25 bp, Homo sapien
ctcatcctttacgataagaagaaca

SEQ ID NO: 1801174 - DNA, 25 bp, Homo sapien
catcctttacgataagaagaacatg

SEQ ID NO: 1801175 - DNA, 25 bp, Homo sapien
cctttacgataagaagaacatgaac

SEQ ID NO: 1801176 - DNA, 25 bp, Homo sapien
ttacgataagaagaacatgaacaac

SEQ ID NO: 1801177 - DNA, 25 bp, Homo sapien
agagggtggatttagcaggactcaa

SEQ ID NO: 1801178 - DNA, 25 bp, Homo sapien
ggtggatttagcaggactcaaggat

SEQ ID NO: 1801179 - DNA, 25 bp, Homo sapien
tggatttagcaggactcaaggatgt

SEQ ID NO: 1801180 - DNA, 25 bp, Homo sapien
atttagcaggactcaaggatgtcat

SEQ ID NO: 1801181 - DNA, 25 bp, Homo sapien
gacattgaatgagaagttggctgct

SEQ ID NO: 1801182 - DNA, 25 bp, Homo sapien
ctgggccgatggagaatgacattga

SEQ ID NO: 1801183 - DNA, 25 bp, Homo sapien
gaatgacattgaatgagaagttggc

SEQ ID NO: 1801184 - DNA, 25 bp, Homo sapien
tggagaatgacattgaatgagaagt

SEQ ID NO: 1801185 - DNA, 25 bp, Homo sapien
tgcaggggaggattgggcgttttat

SEQ ID NO: 1801186 - DNA, 25 bp, Homo sapien
ggcgttttatggcacgtgtgagaga

SEQ ID NO: 1801187 - DNA, 25 bp, Homo sapien
caggggaggattgggcgttttatgg

SEQ ID NO: 1801188 - DNA, 25 bp, Homo sapien
gttttatggcacgtgtgagagaccc

SEQ ID NO: 1801189 - DNA, 25 bp, Homo sapien
gcaggattgcgcgtctccaacactg

SEQ ID NO: 1801190 - DNA, 25 bp, Homo sapien
gattgcgcgtctccaacactggagg

SEQ ID NO: 1801191 - DNA, 25 bp, Homo sapien
ggaagcaggattgcgcgtctccaac

SEQ ID NO: 1801192 - DNA, 25 bp, Homo sapien
gggaagcaggattgcgcgtctccaa

SEQ ID NO: 1801193 - DNA, 25 bp, Homo sapien
gagatgcgaggccagcatgtttgcc

SEQ ID NO: 1801194 - DNA, 25 bp, Homo sapien
tgttggcaaactgacgatgggagat

SEQ ID NO: 1801195 - DNA, 25 bp, Homo sapien
gccagcatgtttgcctgagtctggg

SEQ ID NO: 1801196 - DNA, 25 bp, Homo sapien
tgggtatgttggcaaactgacgatg

SEQ ID NO: 1801197 - DNA, 25 bp, Homo sapien
ggagatgcgtgcctacaaatttatc

SEQ ID NO: 1801198 - DNA, 25 bp, Homo sapien
tgggccccatagaagcctttatggt

SEQ ID NO: 1801199 - DNA, 25 bp, Homo sapien
tatcaccaaacaggatgggccccat

SEQ ID NO: 1801200 - DNA, 25 bp, Homo sapien
tcagaaagtatctagtagtgactgg

SEQ ID NO: 1801201 - DNA, 25 bp, Homo sapien
cctgctgtaaatagagggtacgtct

SEQ ID NO: 1801202 - DNA, 25 bp, Homo sapien
tcctgctgtaaatagagggtacgtc

SEQ ID NO: 1801203 - DNA, 25 bp, Homo sapien
tcctcctgctgtaaatagagggtac

SEQ ID NO: 1801204 - DNA, 25 bp, Homo sapien
cagatgaccctcttgcctaattcct

SEQ ID NO: 1801205 - DNA, 25 bp, Homo sapien
tataaaagatggttgagctaaagac

SEQ ID NO: 1801206 - DNA, 25 bp, Homo sapien
gttgtgtgtatcaggaattcattcc

SEQ ID NO: 1801207 - DNA, 25 bp, Homo sapien
cctcttcactgcatagcagtattcc

SEQ ID NO: 1801208 - DNA, 25 bp, Homo sapien
gagaccaggatataactctccaaaa

SEQ ID NO: 1801209 - DNA, 25 bp, Homo sapien
ccatctttctcctataccaagtttc

SEQ ID NO: 1801210 - DNA, 25 bp, Homo sapien
taccatctttctcctataccaagtt

SEQ ID NO: 1801211 - DNA, 25 bp, Homo sapien
aataccatctttctcctataccaag

SEQ ID NO: 1801212 - DNA, 25 bp, Homo sapien
ataccatctttctcctataccaagt

SEQ ID NO: 1801213 - DNA, 25 bp, Homo sapien
ggatcaactaatcctgaaagtccca

SEQ ID NO: 1801214 - DNA, 25 bp, Homo sapien
caggcatgcgtcattgctcctcatc

SEQ ID NO: 1801215 - DNA, 25 bp, Homo sapien
gaaaaggattagtcacgaacatgtt

SEQ ID NO: 1801216 - DNA, 25 bp, Homo sapien
tggccagccacgagtatcaagtgat

SEQ ID NO: 1801217 - DNA, 25 bp, Homo sapien
aatcatgctattgcaacacagtggg

SEQ ID NO: 1801218 - DNA, 25 bp, Homo sapien
tccatggagctggtatcaacccctc

SEQ ID NO: 1801219 - DNA, 25 bp, Homo sapien
cagacagtgcattaggcttagaccc

SEQ ID NO: 1801220 - DNA, 25 bp, Homo sapien
tagaatcagcttaggcctttggcca

SEQ ID NO: 1801221 - DNA, 25 bp, Homo sapien
tggctcacaacccacactagtcatg

SEQ ID NO: 1801222 - DNA, 25 bp, Homo sapien
cccactgtctgataaagtaccctac

SEQ ID NO: 1801223 - DNA, 25 bp, Homo sapien
tgcttgttacaataactaacgttac

SEQ ID NO: 1801224 - DNA, 25 bp, Homo sapien
gtttgacccattgcactggctcaca

SEQ ID NO: 1801225 - DNA, 25 bp, Homo sapien
cagggatggtctttattttgcagtt

SEQ ID NO: 1801226 - DNA, 25 bp, Homo sapien
ttctgagacaaactccttgaacgtg

SEQ ID NO: 1801227 - DNA, 25 bp, Homo sapien
ctctccctttcagcatcaatgtcaa

SEQ ID NO: 1801228 - DNA, 25 bp, Homo sapien
caatgtcaacatgtcagggatggtc

SEQ ID NO: 1801229 - DNA, 25 bp, Homo sapien
cctctctaaggaaggtcgtgactgt

SEQ ID NO: 1801230 - DNA, 25 bp, Homo sapien
agtgcctgccctagtcatagctgtg

SEQ ID NO: 1801231 - DNA, 25 bp, Homo sapien
ctgtttaaatagacgggcaaggtgg

SEQ ID NO: 1801232 - DNA, 25 bp, Homo sapien
tagagacaagagtaccaaagcggtg

SEQ ID NO: 1801233 - DNA, 25 bp, Homo sapien
ggtgagcaactctgtgtacataggt

SEQ ID NO: 1801234 - DNA, 25 bp, Homo sapien
gctccgtctcacagggatctttttg

SEQ ID NO: 1801235 - DNA, 25 bp, Homo sapien
aattgttactacagataatgctggg

SEQ ID NO: 1801236 - DNA, 25 bp, Homo sapien
ctctaggtgactctaacttccctgg

SEQ ID NO: 1801237 - DNA, 25 bp, Homo sapien
taaaggcaaacttcaacagcaaaac

SEQ ID NO: 1801238 - DNA, 25 bp, Homo sapien
taatcctctgcagtgatacttctgg

SEQ ID NO: 1801239 - DNA, 25 bp, Homo sapien
ggtttgctcacctgcacagtaaagg

SEQ ID NO: 1801240 - DNA, 25 bp, Homo sapien
gaaacactcggctttctatagaaaa

SEQ ID NO: 1801241 - DNA, 25 bp, Homo sapien
gatgttgcttagtcacttatttcat

SEQ ID NO: 1801242 - DNA, 25 bp, Homo sapien
tagagtactgcagaatacagtaagc

SEQ ID NO: 1801243 - DNA, 25 bp, Homo sapien
tacagtaagctgctctattgtagca

SEQ ID NO: 1801244 - DNA, 25 bp, Homo sapien
cattttgttattgggcaagtgattg

SEQ ID NO: 1801245 - DNA, 25 bp, Homo sapien
aaattgctgcttgtccaaatcagga

SEQ ID NO: 1801246 - DNA, 25 bp, Homo sapien
ggtttctggatggtacttcatatta

SEQ ID NO: 1801247 - DNA, 25 bp, Homo sapien
agtgctgtggtatggatgtgagcca

SEQ ID NO: 1801248 - DNA, 25 bp, Homo sapien
cttcatattagggaaagactgagag

SEQ ID NO: 1801249 - DNA, 25 bp, Homo sapien
gccaccgcgccagtctagaaaagat

SEQ ID NO: 1801250 - DNA, 25 bp, Homo sapien
ggtgtgcgttaccaaaaaagcagta

SEQ ID NO: 1801251 - DNA, 25 bp, Homo sapien
caagagctcggttgataaaaccagg

SEQ ID NO: 1801252 - DNA, 25 bp, Homo sapien
aaagcagtaacctaactgtggaaca

SEQ ID NO: 1801253 - DNA, 25 bp, Homo sapien
gaacagttcaggatctttagacttg

SEQ ID NO: 1801254 - DNA, 25 bp, Homo sapien
agtggtgtcttactgccaggtcaca

SEQ ID NO: 1801255 - DNA, 25 bp, Homo sapien
ggagtggtgtcttactgccaggtca

SEQ ID NO: 1801256 - DNA, 25 bp, Homo sapien
ctgatagaagtgggagtggtgtctt

SEQ ID NO: 1801257 - DNA, 25 bp, Homo sapien
tgatagaagtgggagtggtgtctta

SEQ ID NO: 1801258 - DNA, 25 bp, Homo sapien
cactggtggccagacatcatcgggt

SEQ ID NO: 1801259 - DNA, 25 bp, Homo sapien
tggaacctcacatcaacgcgcagat

SEQ ID NO: 1801260 - DNA, 25 bp, Homo sapien
tctcaggtaggtgtgccagccgttt

SEQ ID NO: 1801261 - DNA, 25 bp, Homo sapien
tcaccgaggagaagtaccaggaggc

SEQ ID NO: 1801262 - DNA, 25 bp, Homo sapien
caatcgactgtaatctaacttctga

SEQ ID NO: 1801263 - DNA, 25 bp, Homo sapien
tgatgttgcagaggacatcctgagc

SEQ ID NO: 1801264 - DNA, 25 bp, Homo sapien
cattcagtaccctctacagtggcca

SEQ ID NO: 1801265 - DNA, 25 bp, Homo sapien
gctggctggagtaacttgggacaca

SEQ ID NO: 1801266 - DNA, 25 bp, Homo sapien
gagggagaaagatgttggcagctgg

SEQ ID NO: 1801267 - DNA, 25 bp, Homo sapien
ggcaggtgccttctctagcgtcttg

SEQ ID NO: 1801268 - DNA, 25 bp, Homo sapien
ctgctcatctttgagcatgctaacc

SEQ ID NO: 1801269 - DNA, 25 bp, Homo sapien
tctttgagcatgctaaccatggttt

SEQ ID NO: 1801270 - DNA, 25 bp, Homo sapien
gattgggtatcgaagcacacaggtc

SEQ ID NO: 1801271 - DNA, 25 bp, Homo sapien
tagtcctgatactgccaacgatggc

SEQ ID NO: 1801272 - DNA, 25 bp, Homo sapien
tgagtggactttcagggcagaagca

SEQ ID NO: 1801273 - DNA, 25 bp, Homo sapien
gaaaccatgggacacagatacgttg

SEQ ID NO: 1801274 - DNA, 25 bp, Homo sapien
catcaggtatttgtttcatctacac

SEQ ID NO: 1801275 - DNA, 25 bp, Homo sapien
atacaaaatggcacatcaggtattt

SEQ ID NO: 1801276 - DNA, 25 bp, Homo sapien
tacaaaatggcacatcaggtatttg

SEQ ID NO: 1801277 - DNA, 25 bp, Homo sapien
ggcacatcaggtatttgtttcatct

SEQ ID NO: 1801278 - DNA, 25 bp, Homo sapien
cttgctatagcccatttgaaggcag

SEQ ID NO: 1801279 - DNA, 25 bp, Homo sapien
gcctatcctggtcctgctcagctga

SEQ ID NO: 1801280 - DNA, 25 bp, Homo sapien
tcgtggtgaaggtccagggcctatc

SEQ ID NO: 1801281 - DNA, 25 bp, Homo sapien
gagctcaacagtcgccacgatgctg

SEQ ID NO: 1801282 - DNA, 25 bp, Homo sapien
gccgcgggcgtttactcttagcaga

SEQ ID NO: 1801283 - DNA, 25 bp, Homo sapien
tgagggccccttgctaactggaaca

SEQ ID NO: 1801284 - DNA, 25 bp, Homo sapien
tctggagacgcatcgaggagctatt

SEQ ID NO: 1801285 - DNA, 25 bp, Homo sapien
taaacatagaaagtcgctccacctc

SEQ ID NO: 1801286 - DNA, 25 bp, Homo sapien
aggcgtggccgcagtcactcgcccg

SEQ ID NO: 1801287 - DNA, 25 bp, Homo sapien
ttcaggcgtggccgcagtcactcgc

SEQ ID NO: 1801288 - DNA, 25 bp, Homo sapien
ctttcaggcgtggccgcagtcactc

SEQ ID NO: 1801289 - DNA, 25 bp, Homo sapien
cgccgccgaaccccgccaggagagg

SEQ ID NO: 1801290 - DNA, 25 bp, Homo sapien
ccctttatttgtgggtctcgctgcc

SEQ ID NO: 1801291 - DNA, 25 bp, Homo sapien
ggtctcgctgccacaaaatggcgct

SEQ ID NO: 1801292 - DNA, 25 bp, Homo sapien
cctgcgctcccctttatttgtgggt

SEQ ID NO: 1801293 - DNA, 25 bp, Homo sapien
caaaatggcgctgagggaggaaacc

SEQ ID NO: 1801294 - DNA, 25 bp, Homo sapien
tctccaggcagaagccgcgccggcg

SEQ ID NO: 1801295 - DNA, 25 bp, Homo sapien
ctccaggcagaagccgcgccggcgc

SEQ ID NO: 1801296 - DNA, 25 bp, Homo sapien
tccaggcagaagccgcgccggcgcc

SEQ ID NO: 1801297 - DNA, 25 bp, Homo sapien
cgccgggggcggctgcgcatcagcc

SEQ ID NO: 1801298 - DNA, 25 bp, Homo sapien
gccgggggcggctgcgcatcagccc

SEQ ID NO: 1801299 - DNA, 25 bp, Homo sapien
ccgggggcggctgcgcatcagccct

SEQ ID NO: 1801300 - DNA, 25 bp, Homo sapien
ctcgaagcggcggaagtgttccccg

SEQ ID NO: 1801301 - DNA, 25 bp, Homo sapien
aaggtagagcggctcacgagagacc

SEQ ID NO: 1801302 - DNA, 25 bp, Homo sapien
aggaaaaaacgagcgccgccgctca

SEQ ID NO: 1801303 - DNA, 25 bp, Homo sapien
ggcctccgtgagtggccggtctctc

SEQ ID NO: 1801304 - DNA, 25 bp, Homo sapien
gctgaactcgttagtgccgccaggt

SEQ ID NO: 1801305 - DNA, 25 bp, Homo sapien
gagaacttgcgatggatctatgacg

SEQ ID NO: 1801306 - DNA, 25 bp, Homo sapien
cacaagccagctttgcggactgcaa

SEQ ID NO: 1801307 - DNA, 25 bp, Homo sapien
tctcacagggatccaaggtaagact

SEQ ID NO: 1801308 - DNA, 25 bp, Homo sapien
gaatgtaagacaccaatctgcagac

SEQ ID NO: 1801309 - DNA, 25 bp, Homo sapien
cttggcgaacaaatcatagctgaat

SEQ ID NO: 1801310 - DNA, 25 bp, Homo sapien
taattttgcctgtctcacaaagtgc

SEQ ID NO: 1801311 - DNA, 25 bp, Homo sapien
ccatgtgtgattccaagcaagtctt

SEQ ID NO: 1801312 - DNA, 25 bp, Homo sapien
taactcagttccctctgaacggagg

SEQ ID NO: 1801313 - DNA, 25 bp, Homo sapien
gatatgccacaaagttaaatgcgcc

SEQ ID NO: 1801314 - DNA, 25 bp, Homo sapien
tatatctcagaaaatcaggaccacc

SEQ ID NO: 1801315 - DNA, 25 bp, Homo sapien
tccttgaaagtcgatgatatgccac

SEQ ID NO: 1801316 - DNA, 25 bp, Homo sapien
taaagggcattaaaaggactgagaa

SEQ ID NO: 1801317 - DNA, 25 bp, Homo sapien
gataataatcatactgtcctcccga

SEQ ID NO: 1801318 - DNA, 25 bp, Homo sapien
gataaccttggtattctgaaacagg

SEQ ID NO: 1801319 - DNA, 25 bp, Homo sapien
acacttactgcagaattctttggca

SEQ ID NO: 1801320 - DNA, 25 bp, Homo sapien
taactccacatgtctaactacttct

SEQ ID NO: 1801321 - DNA, 25 bp, Homo sapien
tgtaactaccttaacctggtggcag

SEQ ID NO: 1801322 - DNA, 25 bp, Homo sapien
ttttagcatgacacatgcattaggc

SEQ ID NO: 1801323 - DNA, 25 bp, Homo sapien
gcccagtttattatctctgctgcca

SEQ ID NO: 1801324 - DNA, 25 bp, Homo sapien
cactctgtcctatgaagacataaac

SEQ ID NO: 1801325 - DNA, 25 bp, Homo sapien
atacagtctgtttcactgagcaagt

SEQ ID NO: 1801326 - DNA, 25 bp, Homo sapien
ggatacagcaaacagataaaaacct

SEQ ID NO: 1801327 - DNA, 25 bp, Homo sapien
tctgagctaattgtatacagtctgt

SEQ ID NO: 1801328 - DNA, 25 bp, Homo sapien
tgagattcctcaaaaggagataatc

SEQ ID NO: 1801329 - DNA, 25 bp, Homo sapien
caagactacttgatttctcccactt

SEQ ID NO: 1801330 - DNA, 25 bp, Homo sapien
ttcctcaaaaggagataatcttcca

SEQ ID NO: 1801331 - DNA, 25 bp, Homo sapien
gactacttgatttctcccacttgat

SEQ ID NO: 1801332 - DNA, 25 bp, Homo sapien
tgacattgcaacccgtccgccttgg

SEQ ID NO: 1801333 - DNA, 25 bp, Homo sapien
tcctgacattgcaacccgtccgcct

SEQ ID NO: 1801334 - DNA, 25 bp, Homo sapien
gaactcctgacattgcaacccgtcc

SEQ ID NO: 1801335 - DNA, 25 bp, Homo sapien
aactcctgacattgcaacccgtccg

SEQ ID NO: 1801336 - DNA, 25 bp, Homo sapien
tgggaagaggttcttcgttggtcat

SEQ ID NO: 1801337 - DNA, 25 bp, Homo sapien
cttcttgggaagaggttcttcgttg

SEQ ID NO: 1801338 - DNA, 25 bp, Homo sapien
ttgggaagaggttcttcgttggtca

SEQ ID NO: 1801339 - DNA, 25 bp, Homo sapien
tgaacattaagagtagacctggaaa

SEQ ID NO: 1801340 - DNA, 25 bp, Homo sapien
tgaacattaagagtagaccatggga

SEQ ID NO: 1801341 - DNA, 25 bp, Homo sapien
tactggatataagatacaatatctg

SEQ ID NO: 1801342 - DNA, 25 bp, Homo sapien
tggcacactgtacaactccaatgct

SEQ ID NO: 1801343 - DNA, 25 bp, Homo sapien
tgaagtctgtttcactcaatcgaac

SEQ ID NO: 1801344 - DNA, 25 bp, Homo sapien
tcttgccataactttgaagtctgtt

SEQ ID NO: 1801345 - DNA, 25 bp, Homo sapien
agaattaactcatctcttgccataa

SEQ ID NO: 1801346 - DNA, 25 bp, Homo sapien
gaattaactcatctcttgccataac

SEQ ID NO: 1801347 - DNA, 25 bp, Homo sapien
cactttgatatcactgatgttcagg

SEQ ID NO: 1801348 - DNA, 25 bp, Homo sapien
aggttttttctgctgagaacatgcc

SEQ ID NO: 1801349 - DNA, 25 bp, Homo sapien
taactgatcataaaatagtccctca

SEQ ID NO: 1801350 - DNA, 25 bp, Homo sapien
tagtaatactgagcattcttctgga

SEQ ID NO: 1801351 - DNA, 25 bp, Homo sapien
agttaagatctgtgtacttgccctc

SEQ ID NO: 1801352 - DNA, 25 bp, Homo sapien
ggatgttttccctgcgtgcagactc

SEQ ID NO: 1801353 - DNA, 25 bp, Homo sapien
tcagactctcttaggccagttacat

SEQ ID NO: 1801354 - DNA, 25 bp, Homo sapien
cagactctcttaggccagttacatc

SEQ ID NO: 1801355 - DNA, 25 bp, Homo sapien
cttcagactctcttaggccagttac

SEQ ID NO: 1801356 - DNA, 25 bp, Homo sapien
tctcttgttccttggttgctagtcg

SEQ ID NO: 1801357 - DNA, 25 bp, Homo sapien
cttgttccttggttgctagtcgcat

SEQ ID NO: 1801358 - DNA, 25 bp, Homo sapien
tcttgttccttggttgctagtcgca

SEQ ID NO: 1801359 - DNA, 25 bp, Homo sapien
ctcttgttccttggttgctagtcgc

SEQ ID NO: 1801360 - DNA, 25 bp, Homo sapien
atcctcatctgccatatataatctt

SEQ ID NO: 1801361 - DNA, 25 bp, Homo sapien
ttatcctcatctgccatatataatc

SEQ ID NO: 1801362 - DNA, 25 bp, Homo sapien
cctcatctgccatatataatcttga

SEQ ID NO: 1801363 - DNA, 25 bp, Homo sapien
tcctcatctgccatatataatcttg

SEQ ID NO: 1801364 - DNA, 25 bp, Homo sapien
gggccaatcctttcaaccattcgct

SEQ ID NO: 1801365 - DNA, 25 bp, Homo sapien
ccacttgacagttcctctagagcag

SEQ ID NO: 1801366 - DNA, 25 bp, Homo sapien
aacaccaagggtaaatgcagcagct

SEQ ID NO: 1801367 - DNA, 25 bp, Homo sapien
tcttaactgccaaatctaacgaaca

SEQ ID NO: 1801368 - DNA, 25 bp, Homo sapien
taccattgttgatctcagttgggca

SEQ ID NO: 1801369 - DNA, 25 bp, Homo sapien
ctcagttgggcaacgctcggctgct

SEQ ID NO: 1801370 - DNA, 25 bp, Homo sapien
cggctgctggacttgcttgaggtac

SEQ ID NO: 1801371 - DNA, 25 bp, Homo sapien
aaacaagttgatcgctgggtctacc

SEQ ID NO: 1801372 - DNA, 25 bp, Homo sapien
tcttggtgtggaaacgagtacttgg

SEQ ID NO: 1801373 - DNA, 25 bp, Homo sapien
cagctttctcgtagtgggactgtca

SEQ ID NO: 1801374 - DNA, 25 bp, Homo sapien
tgtcccaccacagctttctcgtagt

SEQ ID NO: 1801375 - DNA, 25 bp, Homo sapien
agctggacagtgtaagaatgtggct

SEQ ID NO: 1801376 - DNA, 25 bp, Homo sapien
ctattgaaagttggttctcagcaaa

SEQ ID NO: 1801377 - DNA, 25 bp, Homo sapien
tacacagtgtctctaagtcactatg

SEQ ID NO: 1801378 - DNA, 25 bp, Homo sapien
ggcaaaactgatacacagtgtctct

SEQ ID NO: 1801379 - DNA, 25 bp, Homo sapien
catgaagtccacagtcttattggca

SEQ ID NO: 1801380 - DNA, 25 bp, Homo sapien
agtaaagcgaagacacacacgtgcg

SEQ ID NO: 1801381 - DNA, 25 bp, Homo sapien
gaaatattccagacgggattgcctg

SEQ ID NO: 1801382 - DNA, 25 bp, Homo sapien
aaaatgtcttacttaggccagccca

SEQ ID NO: 1801383 - DNA, 25 bp, Homo sapien
gcacttaaacgttgggacaagctgg

SEQ ID NO: 1801384 - DNA, 25 bp, Homo sapien
aaaactgtcttcttgcaaagtatat

SEQ ID NO: 1801385 - DNA, 25 bp, Homo sapien
tactgcctatgctctcaaaactgtc

SEQ ID NO: 1801386 - DNA, 25 bp, Homo sapien
gatacattaatctgtgacctgactt

SEQ ID NO: 1801387 - DNA, 25 bp, Homo sapien
tacaactaaccttcttactatatga

SEQ ID NO: 1801388 - DNA, 25 bp, Homo sapien
taagaccagtggtcacgtatcacaa

SEQ ID NO: 1801389 - DNA, 25 bp, Homo sapien
tatctgccaatctaggagtgtcaca

SEQ ID NO: 1801390 - DNA, 25 bp, Homo sapien
catcagcactctcaggcgttagcct

SEQ ID NO: 1801391 - DNA, 25 bp, Homo sapien
caacctgggttactactgctcagag

SEQ ID NO: 1801392 - DNA, 25 bp, Homo sapien
cagcagatgcttccccataattacc

SEQ ID NO: 1801393 - DNA, 25 bp, Homo sapien
tatcacagcagatgcttccccataa

SEQ ID NO: 1801394 - DNA, 25 bp, Homo sapien
catacaaacataactatatcacagc

SEQ ID NO: 1801395 - DNA, 25 bp, Homo sapien
atgaagacaaaactctctgtctttg

SEQ ID NO: 1801396 - DNA, 25 bp, Homo sapien
tcgacacttcgccattaactttttc

SEQ ID NO: 1801397 - DNA, 25 bp, Homo sapien
gactgcttttaagctcctcactgta

SEQ ID NO: 1801398 - DNA, 25 bp, Homo sapien
gattctcctggataagcattcgaca

SEQ ID NO: 1801399 - DNA, 25 bp, Homo sapien
gttgtgcaatacgtccctgggacag

SEQ ID NO: 1801400 - DNA, 25 bp, Homo sapien
ctgtgcaaaggagagtcagaccaac

SEQ ID NO: 1801401 - DNA, 25 bp, Homo sapien
actttaatatcgtttataacattga

SEQ ID NO: 1801402 - DNA, 25 bp, Homo sapien
gagtcagaccaactttaatatcgtt

SEQ ID NO: 1801403 - DNA, 25 bp, Homo sapien
aaggagagtcagaccaactttaata

SEQ ID NO: 1801404 - DNA, 25 bp, Homo sapien
tcatcttcggttgtgttgccctccc

SEQ ID NO: 1801405 - DNA, 25 bp, Homo sapien
gcccgtgggagagtctacactttca

SEQ ID NO: 1801406 - DNA, 25 bp, Homo sapien
ggaggacttattaccattccctgga

SEQ ID NO: 1801407 - DNA, 25 bp, Homo sapien
ctggcgggaggagctaccattactt

SEQ ID NO: 1801408 - DNA, 25 bp, Homo sapien
caagccattctgaacgtggcgggaa

SEQ ID NO: 1801409 - DNA, 25 bp, Homo sapien
cattctgaacgtggcgggaacccac

SEQ ID NO: 1801410 - DNA, 25 bp, Homo sapien
tgaacgtggcgggaacccacagttc

SEQ ID NO: 1801411 - DNA, 25 bp, Homo sapien
tggcgggaacccacagttcgattac

SEQ ID NO: 1801412 - DNA, 25 bp, Homo sapien
tacaaaactgaaccctgtacattta

SEQ ID NO: 1801413 - DNA, 25 bp, Homo sapien
tactctaacaagtctgaatggtgca

SEQ ID NO: 1801414 - DNA, 25 bp, Homo sapien
aatggtgcataagtacagtaacagc

SEQ ID NO: 1801415 - DNA, 25 bp, Homo sapien
ggcaaacttggcagtcataaaccca

SEQ ID NO: 1801416 - DNA, 25 bp, Homo sapien
cagtaacagcatgagtacgaatgcc

SEQ ID NO: 1801417 - DNA, 25 bp, Homo sapien
tatttaggtttggtcagtacaggta

SEQ ID NO: 1801418 - DNA, 25 bp, Homo sapien
ctttatttaggtttggtcagtacag

SEQ ID NO: 1801419 - DNA, 25 bp, Homo sapien
tctttatttaggtttggtcagtaca

SEQ ID NO: 1801420 - DNA, 25 bp, Homo sapien
aaccaattagatgcagaagccactc

SEQ ID NO: 1801421 - DNA, 25 bp, Homo sapien
cgagcctcgaggatacatttgccca

SEQ ID NO: 1801422 - DNA, 25 bp, Homo sapien
tcaaggcagactcaacagaaacatg

SEQ ID NO: 1801423 - DNA, 25 bp, Homo sapien
tgtgtaccacagaataagtgctctg

SEQ ID NO: 1801424 - DNA, 25 bp, Homo sapien
catgcagcaaattcctccttggtct

SEQ ID NO: 1801425 - DNA, 25 bp, Homo sapien
cagcaaattcctccttggtctccat

SEQ ID NO: 1801426 - DNA, 25 bp, Homo sapien
gcagcaaattcctccttggtctcca

SEQ ID NO: 1801427 - DNA, 25 bp, Homo sapien
tgcagcaaattcctccttggtctcc

SEQ ID NO: 1801428 - DNA, 25 bp, Homo sapien
tttacagagcgcctgaaaccccagt

SEQ ID NO: 1801429 - DNA, 25 bp, Homo sapien
ggaaaactgttgacggacctggaga

SEQ ID NO: 1801430 - DNA, 25 bp, Homo sapien
tgatgggtccttttgctctcggcgg

SEQ ID NO: 1801431 - DNA, 25 bp, Homo sapien
gaattcaaggaatgcctcccgtggc

SEQ ID NO: 1801432 - DNA, 25 bp, Homo sapien
gctgcctgcaagctaggcaaagctc

SEQ ID NO: 1801433 - DNA, 25 bp, Homo sapien
gcctgcaagctaggcaaagctcctc

SEQ ID NO: 1801434 - DNA, 25 bp, Homo sapien
gcaagctaggcaaagctcctcctcg

SEQ ID NO: 1801435 - DNA, 25 bp, Homo sapien
cctgcgctgcctgcaagctaggcaa

SEQ ID NO: 1801436 - DNA, 25 bp, Homo sapien
ctatgatggtccgcgccgccgagac

SEQ ID NO: 1801437 - DNA, 25 bp, Homo sapien
gcgccgccgagacgatgaccacagg

SEQ ID NO: 1801438 - DNA, 25 bp, Homo sapien
cgccgagacgatgaccacaggatct

SEQ ID NO: 1801439 - DNA, 25 bp, Homo sapien
gacgatgaccacaggatctgagcct

SEQ ID NO: 1801440 - DNA, 25 bp, Homo sapien
tcggcgctcctgccgaagcagcagg

SEQ ID NO: 1801441 - DNA, 25 bp, Homo sapien
agcagcaggcgcctcggactctgcg

SEQ ID NO: 1801442 - DNA, 25 bp, Homo sapien
acaagtccggccctcggcgctcctg

SEQ ID NO: 1801443 - DNA, 25 bp, Homo sapien
cggcttcctccacatacgcccctct

SEQ ID NO: 1801444 - DNA, 25 bp, Homo sapien
cacgaaggagacgaagtcacgactt

SEQ ID NO: 1801445 - DNA, 25 bp, Homo sapien
gacttctagccattgtgtgacagcc

SEQ ID NO: 1801446 - DNA, 25 bp, Homo sapien
tcaagggcgttgaaaaccatgcggc

SEQ ID NO: 1801447 - DNA, 25 bp, Homo sapien
tggatgcgaccccatgcttcccaaa

SEQ ID NO: 1801448 - DNA, 25 bp, Homo sapien
agggacgccgctgtagcccttctat

SEQ ID NO: 1801449 - DNA, 25 bp, Homo sapien
cacaactcgcagcagccgagggctg

SEQ ID NO: 1801450 - DNA, 25 bp, Homo sapien
tgggtgccacaactcgcagcagccg

SEQ ID NO: 1801451 - DNA, 25 bp, Homo sapien
acggcctagggacgccgctgtagcc

SEQ ID NO: 1801452 - DNA, 25 bp, Homo sapien
tttggcaaggccacgcgaggaggca

SEQ ID NO: 1801453 - DNA, 25 bp, Homo sapien
cctctcctcccacacgttcctacac

SEQ ID NO: 1801454 - DNA, 25 bp, Homo sapien
gggagcctcatgaccctgtttggca

SEQ ID NO: 1801455 - DNA, 25 bp, Homo sapien
gccacgcgaggaggcagtgccctct

SEQ ID NO: 1801456 - DNA, 25 bp, Homo sapien
ctacaatagaaaggcggagagcgtg

SEQ ID NO: 1801457 - DNA, 25 bp, Homo sapien
catcacaagcctgcgggtaatacgg

SEQ ID NO: 1801458 - DNA, 25 bp, Homo sapien
aaggcggagagcgtggacatcacaa

SEQ ID NO: 1801459 - DNA, 25 bp, Homo sapien
gagagcgtggacatcacaagcctgc

SEQ ID NO: 1801460 - DNA, 25 bp, Homo sapien
tcagacacatcttccggagccacag

SEQ ID NO: 1801461 - DNA, 25 bp, Homo sapien
agtggccctcttcaagacttctttg

SEQ ID NO: 1801462 - DNA, 25 bp, Homo sapien
acacatcttccggagccacagtggc

SEQ ID NO: 1801463 - DNA, 25 bp, Homo sapien
gagcccaggtcctggacaggaacag

SEQ ID NO: 1801464 - DNA, 25 bp, Homo sapien
ctgccaagacatgtccaaagatgac

SEQ ID NO: 1801465 - DNA, 25 bp, Homo sapien
gctgccaagacatgtccaaagatga

SEQ ID NO: 1801466 - DNA, 25 bp, Homo sapien
tgctgccaagacatgtccaaagatg

SEQ ID NO: 1801467 - DNA, 25 bp, Homo sapien
ctgctgccaagacatgtccaaagat

SEQ ID NO: 1801468 - DNA, 25 bp, Homo sapien
cacccacactggcttgtctaacagg

SEQ ID NO: 1801469 - DNA, 25 bp, Homo sapien
acacagcttttaggcctgacccaca

SEQ ID NO: 1801470 - DNA, 25 bp, Homo sapien
gctggagtctcctatccctattgac

SEQ ID NO: 1801471 - DNA, 25 bp, Homo sapien
tcctatccctattgactggactgca

SEQ ID NO: 1801472 - DNA, 25 bp, Homo sapien
catagacatgagtttctcagtgtga

SEQ ID NO: 1801473 - DNA, 25 bp, Homo sapien
tctcagtgtgaggtcagtgaaagcc

SEQ ID NO: 1801474 - DNA, 25 bp, Homo sapien
ctggcatagacatgagtttctcagt

SEQ ID NO: 1801475 - DNA, 25 bp, Homo sapien
agtgaaagccacctcatcagagagg

SEQ ID NO: 1801476 - DNA, 25 bp, Homo sapien
tatttgttcactgtttggttccagc

SEQ ID NO: 1801477 - DNA, 25 bp, Homo sapien
tagggatcaaggttgtcatttctgt

SEQ ID NO: 1801478 - DNA, 25 bp, Homo sapien
gaagaatacttcacattcaagtagg

SEQ ID NO: 1801479 - DNA, 25 bp, Homo sapien
gttccagctctgctatgcatctgtt

SEQ ID NO: 1801480 - DNA, 25 bp, Homo sapien
ctcctgttctcaagtaagccaagtg

SEQ ID NO: 1801481 - DNA, 25 bp, Homo sapien
cctgttctcaagtaagccaagtgag

SEQ ID NO: 1801482 - DNA, 25 bp, Homo sapien
gttctcaagtaagccaagtgaggag

SEQ ID NO: 1801483 - DNA, 25 bp, Homo sapien
tgttctcaagtaagccaagtgagga

SEQ ID NO: 1801484 - DNA, 25 bp, Homo sapien
tcacagagtatactgtcagtcagtg

SEQ ID NO: 1801485 - DNA, 25 bp, Homo sapien
gaaatgcatctgtaagaccatcaca

SEQ ID NO: 1801486 - DNA, 25 bp, Homo sapien
atacccatatgacagttgtgaaatg

SEQ ID NO: 1801487 - DNA, 25 bp, Homo sapien
tacccatatgacagttgtgaaatgc

SEQ ID NO: 1801488 - DNA, 25 bp, Homo sapien
tctgagatgtcaatggagtgtccaa

SEQ ID NO: 1801489 - DNA, 25 bp, Homo sapien
agtgccctgggtagagacagtgaca

SEQ ID NO: 1801490 - DNA, 25 bp, Homo sapien
tctgcctctccataacacagtttgg

SEQ ID NO: 1801491 - DNA, 25 bp, Homo sapien
tccaaggagttcagtaaggtttcca

SEQ ID NO: 1801492 - DNA, 25 bp, Homo sapien
catgctagtcctatttattttgtcc

SEQ ID NO: 1801493 - DNA, 25 bp, Homo sapien
ctagtcctatttattttgtcctgca

SEQ ID NO: 1801494 - DNA, 25 bp, Homo sapien
gattcctattccatgcatgctagtc

SEQ ID NO: 1801495 - DNA, 25 bp, Homo sapien
tgtctatcttggtctttgaacttct

SEQ ID NO: 1801496 - DNA, 25 bp, Homo sapien
acaagcataagtctgggtctatttc

SEQ ID NO: 1801497 - DNA, 25 bp, Homo sapien
gctactaacaggcaaaatcaaccat

SEQ ID NO: 1801498 - DNA, 25 bp, Homo sapien
tgccactgcaccctgtaaaagctat

SEQ ID NO: 1801499 - DNA, 25 bp, Homo sapien
tgttaaaatcagagcatgtaagtgc

SEQ ID NO: 1801500 - DNA, 25 bp, Homo sapien
cgagttcttttgttaagggtcatca

SEQ ID NO: 1801501 - DNA, 25 bp, Homo sapien
tcagtttatcccaggtgatgttatc

SEQ ID NO: 1801502 - DNA, 25 bp, Homo sapien
gccaaaaggcaggtataccactgaa

SEQ ID NO: 1801503 - DNA, 25 bp, Homo sapien
tatttgagccaataaagaagcatgc

SEQ ID NO: 1801504 - DNA, 25 bp, Homo sapien
gaaagttggagatacaatgccttct

SEQ ID NO: 1801505 - DNA, 25 bp, Homo sapien
tccacatttgaccaagcactgactg

SEQ ID NO: 1801506 - DNA, 25 bp, Homo sapien
tgatagctcaagtcgtccacatttg

SEQ ID NO: 1801507 - DNA, 25 bp, Homo sapien
tcatggtggcctgtgcaatgctctg

SEQ ID NO: 1801508 - DNA, 25 bp, Homo sapien
ctttgtcaaaatggccagctttctg

SEQ ID NO: 1801509 - DNA, 25 bp, Homo sapien
ctgtcctgttctgggacagaactgc

SEQ ID NO: 1801510 - DNA, 25 bp, Homo sapien
ggtacaatctctttgtcaaaatggc

SEQ ID NO: 1801511 - DNA, 25 bp, Homo sapien
tcctgttctgggacagaactgcaac

SEQ ID NO: 1801512 - DNA, 25 bp, Homo sapien
tattagaaaatagcgagtgacccca

SEQ ID NO: 1801513 - DNA, 25 bp, Homo sapien
ggtcatggacgctctggaaccaaga

SEQ ID NO: 1801514 - DNA, 25 bp, Homo sapien
tgaggaaagtagctaccagggacct

SEQ ID NO: 1801515 - DNA, 25 bp, Homo sapien
taatgggtgtccacttctgaggagg

SEQ ID NO: 1801516 - DNA, 25 bp, Homo sapien
atgttgctcccatggcgaggaaact

SEQ ID NO: 1801517 - DNA, 25 bp, Homo sapien
tagcttggacatggcttctatgttg

SEQ ID NO: 1801518 - DNA, 25 bp, Homo sapien
gaaagtaaggctttagcttggacat

SEQ ID NO: 1801519 - DNA, 25 bp, Homo sapien
tcccatggcgaggaaactcatctgt

SEQ ID NO: 1801520 - DNA, 25 bp, Homo sapien
gaattggtcctattcccataatgga

SEQ ID NO: 1801521 - DNA, 25 bp, Homo sapien
cacccacttgggaccaggaaactat

SEQ ID NO: 1801522 - DNA, 25 bp, Homo sapien
tcttcataagaacgacagctgcagc

SEQ ID NO: 1801523 - DNA, 25 bp, Homo sapien
ggaaactatccgtgctaaaggtgta

SEQ ID NO: 1801524 - DNA, 25 bp, Homo sapien
attcatagaaaagaggtctaaactt

SEQ ID NO: 1801525 - DNA, 25 bp, Homo sapien
ctagaggaaagattcatagaaaaga

SEQ ID NO: 1801526 - DNA, 25 bp, Homo sapien
catagaaaagaggtctaaacttggg

SEQ ID NO: 1801527 - DNA, 25 bp, Homo sapien
aggaaagattcatagaaaagaggtc

SEQ ID NO: 1801528 - DNA, 25 bp, Homo sapien
tcaacatcttccagtgaccaacctg

SEQ ID NO: 1801529 - DNA, 25 bp, Homo sapien
aacatcttccagtgaccaacctgct

SEQ ID NO: 1801530 - DNA, 25 bp, Homo sapien
caacatcttccagtgaccaacctgc

SEQ ID NO: 1801531 - DNA, 25 bp, Homo sapien
tctttaactattgcagcagagacag

SEQ ID NO: 1801532 - DNA, 25 bp, Homo sapien
taatgaactcagtcctagtaactag

SEQ ID NO: 1801533 - DNA, 25 bp, Homo sapien
ttctttaactattacccacatggcc

SEQ ID NO: 1801534 - DNA, 25 bp, Homo sapien
ccaacacctagaagatactatctta

SEQ ID NO: 1801535 - DNA, 25 bp, Homo sapien
gaaattcactggtaagctctcaggg

SEQ ID NO: 1801536 - DNA, 25 bp, Homo sapien
gtggcccaaggctatagcccctcct

SEQ ID NO: 1801537 - DNA, 25 bp, Homo sapien
tcacaagaattcgacagccagatgc

SEQ ID NO: 1801538 - DNA, 25 bp, Homo sapien
tgtgtaacagggtcacaagaattcg

SEQ ID NO: 1801539 - DNA, 25 bp, Homo sapien
agatgctccaagagggtggcccaag

SEQ ID NO: 1801540 - DNA, 25 bp, Homo sapien
ttgaggttgttcaaagtttaagcaa

SEQ ID NO: 1801541 - DNA, 25 bp, Homo sapien
tgaggttgttcaaagtttaagcaat

SEQ ID NO: 1801542 - DNA, 25 bp, Homo sapien
tgcaacctagtactttattagttta

SEQ ID NO: 1801543 - DNA, 25 bp, Homo sapien
taacaatgttaaatgcaattgtctt

SEQ ID NO: 1801544 - DNA, 25 bp, Homo sapien
gtcttgtaccttgagttgagtatta

SEQ ID NO: 1801545 - DNA, 25 bp, Homo sapien
taaatgcaattgtcttgtaccttga

SEQ ID NO: 1801546 - DNA, 25 bp, Homo sapien
agtaaagtacaagctgtaaacttgg

SEQ ID NO: 1801547 - DNA, 25 bp, Homo sapien
ttacatccagaaagtaaagatgata

SEQ ID NO: 1801548 - DNA, 25 bp, Homo sapien
attacatccagaaagtaaagatgat

SEQ ID NO: 1801549 - DNA, 25 bp, Homo sapien
gaagatgctgttcactctggagccc

SEQ ID NO: 1801550 - DNA, 25 bp, Homo sapien
aaagatgataaacatggaagttatg

SEQ ID NO: 1801551 - DNA, 25 bp, Homo sapien
tctcgggaacagcttgcgattgcag

SEQ ID NO: 1801552 - DNA, 25 bp, Homo sapien
agagcttttcataatgaggcccagg

SEQ ID NO: 1801553 - DNA, 25 bp, Homo sapien
cacctaatgaaattgtaagcggccg

SEQ ID NO: 1801554 - DNA, 25 bp, Homo sapien
tgagcaatggtaaacctcgagacaa

SEQ ID NO: 1801555 - DNA, 25 bp, Homo sapien
tactttgcagagaatcagatatcac

SEQ ID NO: 1801556 - DNA, 25 bp, Homo sapien
cagatatcaccaaggagagaattca

SEQ ID NO: 1801557 - DNA, 25 bp, Homo sapien
agggaccttaaacgcattgccaaag

SEQ ID NO: 1801558 - DNA, 25 bp, Homo sapien
caactggtgccaatgttattctaac

SEQ ID NO: 1801559 - DNA, 25 bp, Homo sapien
tatccgggttgacagcttcttacag

SEQ ID NO: 1801560 - DNA, 25 bp, Homo sapien
agaaaaagagtaggtccatccgcgc

SEQ ID NO: 1801561 - DNA, 25 bp, Homo sapien
cccaggaaacgccactcgagtgcat

SEQ ID NO: 1801562 - DNA, 25 bp, Homo sapien
cttcttacagtagagttagcccagg

SEQ ID NO: 1801563 - DNA, 25 bp, Homo sapien
ccgcgcgcggcagggttttgagacc

SEQ ID NO: 1801564 - DNA, 25 bp, Homo sapien
gcggcgttggaaacgcgccctccgc

SEQ ID NO: 1801565 - DNA, 25 bp, Homo sapien
ttttgagaccggcaacgcgtggatg

SEQ ID NO: 1801566 - DNA, 25 bp, Homo sapien
gcacgtgcgggccacgcctcgcacc

SEQ ID NO: 1801567 - DNA, 25 bp, Homo sapien
ccagtagctcctgggacatcgctcg

SEQ ID NO: 1801568 - DNA, 25 bp, Homo sapien
gacgtgtatcgctgccgtcaagatg

SEQ ID NO: 1801569 - DNA, 25 bp, Homo sapien
tgggacatcgctcgggtacgctcca

SEQ ID NO: 1801570 - DNA, 25 bp, Homo sapien
ggtgtaagcagaattcgacgtgtat

SEQ ID NO: 1801571 - DNA, 25 bp, Homo sapien
tgcgtctgcgcaacatcgtttgagg

SEQ ID NO: 1801572 - DNA, 25 bp, Homo sapien
ggcgaaggttcaacctcttcccagc

SEQ ID NO: 1801573 - DNA, 25 bp, Homo sapien
tagaatggcccactgcgtctgcgca

SEQ ID NO: 1801574 - DNA, 25 bp, Homo sapien
caacatcgtttgaggcgaaggttca

SEQ ID NO: 1801575 - DNA, 25 bp, Homo sapien
ggcctggagcaaagccggccgatct

SEQ ID NO: 1801576 - DNA, 25 bp, Homo sapien
cagaaccccaactctaacttggaga

SEQ ID NO: 1801577 - DNA, 25 bp, Homo sapien
taaaacgcacgactcgctcagaacc

SEQ ID NO: 1801578 - DNA, 25 bp, Homo sapien
cactaaacctaaaacgcacgactcg

SEQ ID NO: 1801579 - DNA, 25 bp, Homo sapien
gagacgatctcggaaaagcctcgcc

SEQ ID NO: 1801580 - DNA, 25 bp, Homo sapien
tttttcctcacggacgactcagtcg

SEQ ID NO: 1801581 - DNA, 25 bp, Homo sapien
tggctgctgtagatccccaaactct

SEQ ID NO: 1801582 - DNA, 25 bp, Homo sapien
taaagtcagggacaagcctttggct

SEQ ID NO: 1801583 - DNA, 25 bp, Homo sapien
cagggttcctgcaaaccgagaacaa

SEQ ID NO: 1801584 - DNA, 25 bp, Homo sapien
ctgggagaaggggggcaagactaat

SEQ ID NO: 1801585 - DNA, 25 bp, Homo sapien
gcgagctctatttcgatccggcacg

SEQ ID NO: 1801586 - DNA, 25 bp, Homo sapien
tacaaaatagaacccgcacgttcca

SEQ ID NO: 1801587 - DNA, 25 bp, Homo sapien
cacgttccaatgtactgtgcaagcc

SEQ ID NO: 1801588 - DNA, 25 bp, Homo sapien
ctactgtggtcttcgcagtgccgcg

SEQ ID NO: 1801589 - DNA, 25 bp, Homo sapien
ccggctcggagctggttgacagggc

SEQ ID NO: 1801590 - DNA, 25 bp, Homo sapien
tccacttcaggtttcgctgccggct

SEQ ID NO: 1801591 - DNA, 25 bp, Homo sapien
ttcctggctacagataaaagctcca

SEQ ID NO: 1801592 - DNA, 25 bp, Homo sapien
ttctggggcgacagcttcattttcc

SEQ ID NO: 1801593 - DNA, 25 bp, Homo sapien
ttgttgtttgttccagcccctccgc

SEQ ID NO: 1801594 - DNA, 25 bp, Homo sapien
aatgaaaatagtctgtagggtgcac

SEQ ID NO: 1801595 - DNA, 25 bp, Homo sapien
ggtgcactgcccttgtcaatcacaa

SEQ ID NO: 1801596 - DNA, 25 bp, Homo sapien
gtatcctgtccgctactgtaacatc

SEQ ID NO: 1801597 - DNA, 25 bp, Homo sapien
aagtttttagctcacaatctacctt

SEQ ID NO: 1801598 - DNA, 25 bp, Homo sapien
tttaatattgcgagtaaggcagaca

SEQ ID NO: 1801599 - DNA, 25 bp, Homo sapien
acgggccgtagtttgctgacacttg

SEQ ID NO: 1801600 - DNA, 25 bp, Homo sapien
gaagggcccgattcattatgtcaaa

SEQ ID NO: 1801601 - DNA, 25 bp, Homo sapien
cagtgagccgtgataatgccctgca

SEQ ID NO: 1801602 - DNA, 25 bp, Homo sapien
tcaaagagctaatttacacaatatg

SEQ ID NO: 1801603 - DNA, 25 bp, Homo sapien
gcctcctataattaacaagaaaatg

SEQ ID NO: 1801604 - DNA, 25 bp, Homo sapien
taaactcatatattgttcaaagagc

SEQ ID NO: 1801605 - DNA, 25 bp, Homo sapien
tacagaggcacgaacttggctcaca

SEQ ID NO: 1801606 - DNA, 25 bp, Homo sapien
agagtacagaggcacgaacttggct

SEQ ID NO: 1801607 - DNA, 25 bp, Homo sapien
ccactgtgtccagcttcatatggcc

SEQ ID NO: 1801608 - DNA, 25 bp, Homo sapien
tcaagcgacccacccttctcaacct

SEQ ID NO: 1801609 - DNA, 25 bp, Homo sapien
cttgccattctgatgctccacaagt

SEQ ID NO: 1801610 - DNA, 25 bp, Homo sapien
tgatgctgagtccttataactcgca

SEQ ID NO: 1801611 - DNA, 25 bp, Homo sapien
gatgctgagtccttataactcgcaa

SEQ ID NO: 1801612 - DNA, 25 bp, Homo sapien
gctccacaagtgcttctacatgatg

SEQ ID NO: 1801613 - DNA, 25 bp, Homo sapien
atttctggtactataaaggtgcttt

SEQ ID NO: 1801614 - DNA, 25 bp, Homo sapien
tctggtactataaaggtgcttttta

SEQ ID NO: 1801615 - DNA, 25 bp, Homo sapien
catttctggtactataaaggtgctt

SEQ ID NO: 1801616 - DNA, 25 bp, Homo sapien
atctctgtgccagcactcgtcctat

SEQ ID NO: 1801617 - DNA, 25 bp, Homo sapien
gattcccgcctctaagcatctctgt

SEQ ID NO: 1801618 - DNA, 25 bp, Homo sapien
catgaagttgattcccgcctctaag

SEQ ID NO: 1801619 - DNA, 25 bp, Homo sapien
tgtgccagcactcgtcctatactct

SEQ ID NO: 1801620 - DNA, 25 bp, Homo sapien
tgaggctgcctcccacggggttggt

SEQ ID NO: 1801621 - DNA, 25 bp, Homo sapien
gcacgagtaggctgaaaatactttc

SEQ ID NO: 1801622 - DNA, 25 bp, Homo sapien
aaatgtagagatgtcaaggttcagc

SEQ ID NO: 1801623 - DNA, 25 bp, Homo sapien
aaaagattaagtcagcagcacgagt

SEQ ID NO: 1801624 - DNA, 25 bp, Homo sapien
cagcctacaacggtttttcagaaag

SEQ ID NO: 1801625 - DNA, 25 bp, Homo sapien
gtcatggcactttgtagtcgtttca

SEQ ID NO: 1801626 - DNA, 25 bp, Homo sapien
tattcatagattctctgaggttccc

SEQ ID NO: 1801627 - DNA, 25 bp, Homo sapien
tgaggttcccgtagaaccacaccac

SEQ ID NO: 1801628 - DNA, 25 bp, Homo sapien
tagaaccacaccaccttctgtcatg

SEQ ID NO: 1801629 - DNA, 25 bp, Homo sapien
gggcagaacgtagttcttgatttaa

SEQ ID NO: 1801630 - DNA, 25 bp, Homo sapien
taaacaacttctgacttgccctttg

SEQ ID NO: 1801631 - DNA, 25 bp, Homo sapien
ggctgtagtggctgacagatttata

SEQ ID NO: 1801632 - DNA, 25 bp, Homo sapien
ggaggatgaccttaactacaaataa

SEQ ID NO: 1801633 - DNA, 25 bp, Homo sapien
tcttactgttgggaaccaagagtcc

SEQ ID NO: 1801634 - DNA, 25 bp, Homo sapien
cattcactgagatcactcgccatga

SEQ ID NO: 1801635 - DNA, 25 bp, Homo sapien
ctcgccatgaactagacacagtaat

SEQ ID NO: 1801636 - DNA, 25 bp, Homo sapien
cactccgagcagcaaacaactgtca

SEQ ID NO: 1801637 - DNA, 25 bp, Homo sapien
gctccgcggagtcgcccagcgctat

SEQ ID NO: 1801638 - DNA, 25 bp, Homo sapien
tgcagctccgcggagtcgcccagcg

SEQ ID NO: 1801639 - DNA, 25 bp, Homo sapien
ggccgtgcagctccgcggagtcgcc

SEQ ID NO: 1801640 - DNA, 25 bp, Homo sapien
gcggagtcgcccagcgctatcacgt

SEQ ID NO: 1801641 - DNA, 25 bp, Homo sapien
gcagagggaggctctcctcgaactc

SEQ ID NO: 1801642 - DNA, 25 bp, Homo sapien
gaggctctcctcgaactcgtcggcg

SEQ ID NO: 1801643 - DNA, 25 bp, Homo sapien
gcagcagagggaggctctcctcgaa

SEQ ID NO: 1801644 - DNA, 25 bp, Homo sapien
gagggaggctctcctcgaactcgtc

SEQ ID NO: 1801645 - DNA, 25 bp, Homo sapien
acagccgcgaatcccaggctcttca

SEQ ID NO: 1801646 - DNA, 25 bp, Homo sapien
tgtggcctggcaaccgtcccgccac

SEQ ID NO: 1801647 - DNA, 25 bp, Homo sapien
tggaggaaccaaggcaaggagcagc

SEQ ID NO: 1801648 - DNA, 25 bp, Homo sapien
caacaagggacgtggggctcggagt

SEQ ID NO: 1801649 - DNA, 25 bp, Homo sapien
tgtagatctgcaggcggccaaggca

SEQ ID NO: 1801650 - DNA, 25 bp, Homo sapien
tcacactgtagatctgcaggcggcc

SEQ ID NO: 1801651 - DNA, 25 bp, Homo sapien
acactgtagatctgcaggcggccaa

SEQ ID NO: 1801652 - DNA, 25 bp, Homo sapien
cctcacactgtagatctgcaggcgg

SEQ ID NO: 1801653 - DNA, 25 bp, Homo sapien
aaatagcagtcctcgggtgcagaac

SEQ ID NO: 1801654 - DNA, 25 bp, Homo sapien
aaaatagcagtcctcgggtgcagaa

SEQ ID NO: 1801655 - DNA, 25 bp, Homo sapien
cagacaggttagaacgaaggcccgt

SEQ ID NO: 1801656 - DNA, 25 bp, Homo sapien
gaacgaaggcccgtgaactctatgt

SEQ ID NO: 1801657 - DNA, 25 bp, Homo sapien
aaggcccgtgaactctatgtccaga

SEQ ID NO: 1801658 - DNA, 25 bp, Homo sapien
gacaggttagaacgaaggcccgtga

SEQ ID NO: 1801659 - DNA, 25 bp, Homo sapien
caccactcgcaaccggggaggattt

SEQ ID NO: 1801660 - DNA, 25 bp, Homo sapien
atgacatcccatcccggcactatgg

SEQ ID NO: 1801661 - DNA, 25 bp, Homo sapien
aggcatctcattccacgagcaatga

SEQ ID NO: 1801662 - DNA, 25 bp, Homo sapien
ggcactatggcctccgcggcaggac

SEQ ID NO: 1801663 - DNA, 25 bp, Homo sapien
actctgacgggtctttagataccac

SEQ ID NO: 1801664 - DNA, 25 bp, Homo sapien
gtttgcctctccttcaatagcggaa

SEQ ID NO: 1801665 - DNA, 25 bp, Homo sapien
tcaatagcggaaaacacagacaatc

SEQ ID NO: 1801666 - DNA, 25 bp, Homo sapien
gcctctccttcaatagcggaaaaca

SEQ ID NO: 1801667 - DNA, 25 bp, Homo sapien
tctccttcaatagcggaaaacacag

SEQ ID NO: 1801668 - DNA, 25 bp, Homo sapien
gaagcacctatgtttgcagaagctc

SEQ ID NO: 1801669 - DNA, 25 bp, Homo sapien
tgtggaacataggtgggaagcacct

SEQ ID NO: 1801670 - DNA, 25 bp, Homo sapien
agcacctatgtttgcagaagctctt

SEQ ID NO: 1801671 - DNA, 25 bp, Homo sapien
tggaacataggtgggaagcacctat

SEQ ID NO: 1801672 - DNA, 25 bp, Homo sapien
gaattctgagtccaaaatcccaaac

SEQ ID NO: 1801673 - DNA, 25 bp, Homo sapien
ccaaacgttgtagggaagagataga

SEQ ID NO: 1801674 - DNA, 25 bp, Homo sapien
gatagaagttacaagaatgggctat

SEQ ID NO: 1801675 - DNA, 25 bp, Homo sapien
gaagttacaagaatgggctatatac

SEQ ID NO: 1801676 - DNA, 25 bp, Homo sapien
ctgcgaactctccagttcccagtca

SEQ ID NO: 1801677 - DNA, 25 bp, Homo sapien
gatatcgtgtctaattttcttctcc

SEQ ID NO: 1801678 - DNA, 25 bp, Homo sapien
catatatgggattccgtttttgaga

SEQ ID NO: 1801679 - DNA, 25 bp, Homo sapien
ccagttcccagtcaggatatcgtgt

SEQ ID NO: 1801680 - DNA, 25 bp, Homo sapien
ccgccaagcatggatggaggtcacc

SEQ ID NO: 1801681 - DNA, 25 bp, Homo sapien
tcattagggagtggaacatgatgga

SEQ ID NO: 1801682 - DNA, 25 bp, Homo sapien
agctgaagccatccccgccaagcat

SEQ ID NO: 1801683 - DNA, 25 bp, Homo sapien
ccacgggaaatgcagacaacagcaa

SEQ ID NO: 1801684 - DNA, 25 bp, Homo sapien
tgttgctctcgctgtggtcactcct

SEQ ID NO: 1801685 - DNA, 25 bp, Homo sapien
aatgctgttgctctcgctgtggtca

SEQ ID NO: 1801686 - DNA, 25 bp, Homo sapien
caggaatacgaggttttggagactg

SEQ ID NO: 1801687 - DNA, 25 bp, Homo sapien
accccagctctacaggaatacgagg

SEQ ID NO: 1801688 - DNA, 25 bp, Homo sapien
tccaggtgagggtaccagccccaag

SEQ ID NO: 1801689 - DNA, 25 bp, Homo sapien
ctccaggtgagggtaccagccccaa

SEQ ID NO: 1801690 - DNA, 25 bp, Homo sapien
ttggctccaggtgagggtaccagcc

SEQ ID NO: 1801691 - DNA, 25 bp, Homo sapien
caggtgagggtaccagccccaaggc

SEQ ID NO: 1801692 - DNA, 25 bp, Homo sapien
tgatcccaggaagagtcatccagtc

SEQ ID NO: 1801693 - DNA, 25 bp, Homo sapien
gtcacttcgtcaatcaccaccttga

SEQ ID NO: 1801694 - DNA, 25 bp, Homo sapien
gagtcatccagtcgccttccttggc

SEQ ID NO: 1801695 - DNA, 25 bp, Homo sapien
ccttgatttggtctttatccggaga

SEQ ID NO: 1801696 - DNA, 25 bp, Homo sapien
ctcatctttcagcaccgtccagatg

SEQ ID NO: 1801697 - DNA, 25 bp, Homo sapien
tcagcaccgtccagatgttggggag

SEQ ID NO: 1801698 - DNA, 25 bp, Homo sapien
cctcagcaccagttggacctcaaag

SEQ ID NO: 1801699 - DNA, 25 bp, Homo sapien
ccagttggacctcaaaggcctggaa

SEQ ID NO: 1801700 - DNA, 25 bp, Homo sapien
tgaaaagcagggacaaattccctga

SEQ ID NO: 1801701 - DNA, 25 bp, Homo sapien
ctgggttactaggaatgaggcctaa

SEQ ID NO: 1801702 - DNA, 25 bp, Homo sapien
ctgaaaagcagggacaaattccctg

SEQ ID NO: 1801703 - DNA, 25 bp, Homo sapien
tcctgggttactaggaatgaggcct

SEQ ID NO: 1801704 - DNA, 25 bp, Homo sapien
tgggctttcaccagcatttggaaaa

SEQ ID NO: 1801705 - DNA, 25 bp, Homo sapien
tgttctgaagataccaacgatgttg

SEQ ID NO: 1801706 - DNA, 25 bp, Homo sapien
tctctcggtcacaagaggtgttctg

SEQ ID NO: 1801707 - DNA, 25 bp, Homo sapien
aaaccccttgctgagagaagaatat

SEQ ID NO: 1801708 - DNA, 25 bp, Homo sapien
gcagcaggtccatcatcatattatg

SEQ ID NO: 1801709 - DNA, 25 bp, Homo sapien
tggaggtgcagcaggtccatcatca

SEQ ID NO: 1801710 - DNA, 25 bp, Homo sapien
ggtgcagcaggtccatcatcatatt

SEQ ID NO: 1801711 - DNA, 25 bp, Homo sapien
caggtccatcatcatattatgtccc

SEQ ID NO: 1801712 - DNA, 25 bp, Homo sapien
ctttgttacactcttggtatcaatg

SEQ ID NO: 1801713 - DNA, 25 bp, Homo sapien
caggaaataggctgtggatattctg

SEQ ID NO: 1801714 - DNA, 25 bp, Homo sapien
cactcttggtatcaatgagaacagg

SEQ ID NO: 1801715 - DNA, 25 bp, Homo sapien
gctgtggatattctgcttaaattga

SEQ ID NO: 1801716 - DNA, 25 bp, Homo sapien
tcaggacttcatagacttccgaaag

SEQ ID NO: 1801717 - DNA, 25 bp, Homo sapien
tagacttccgaaagattcgacaccc

SEQ ID NO: 1801718 - DNA, 25 bp, Homo sapien
tccgaaagattcgacaccctcggga

SEQ ID NO: 1801719 - DNA, 25 bp, Homo sapien
gattcgacaccctcgggaaattcat

SEQ ID NO: 1801720 - DNA, 25 bp, Homo sapien
tgaaggagacaaggccctgcctgcc

SEQ ID NO: 1801721 - DNA, 25 bp, Homo sapien
cggagagcagagtgaaggagacaag

SEQ ID NO: 1801722 - DNA, 25 bp, Homo sapien
agcagagtgaaggagacaaggccct

SEQ ID NO: 1801723 - DNA, 25 bp, Homo sapien
agagtgaaggagacaaggccctgcc

SEQ ID NO: 1801724 - DNA, 25 bp, Homo sapien
catccctgttccaaacgcctctcgt

SEQ ID NO: 1801725 - DNA, 25 bp, Homo sapien
ttccaaacgcctctcgtgcctcgtc

SEQ ID NO: 1801726 - DNA, 25 bp, Homo sapien
tgttccaaacgcctctcgtgcctcg

SEQ ID NO: 1801727 - DNA, 25 bp, Homo sapien
tccctgttccaaacgcctctcgtgc

SEQ ID NO: 1801728 - DNA, 25 bp, Homo sapien
tggaccgcagcggtacacaggagct

SEQ ID NO: 1801729 - DNA, 25 bp, Homo sapien
caagaagacagctggtaaacgcagt

SEQ ID NO: 1801730 - DNA, 25 bp, Homo sapien
taaacgcagtgtcctagatgctgag

SEQ ID NO: 1801731 - DNA, 25 bp, Homo sapien
cacatgggagcctaggaatgagcag

SEQ ID NO: 1801732 - DNA, 25 bp, Homo sapien
cacctgctcgcgtgaacaatctctg

SEQ ID NO: 1801733 - DNA, 25 bp, Homo sapien
tttctcacacctgctcgcgtgaaca

SEQ ID NO: 1801734 - DNA, 25 bp, Homo sapien
gctcgcgtgaacaatctctggtcca

SEQ ID NO: 1801735 - DNA, 25 bp, Homo sapien
ctctggtccagaattcttggtggga

SEQ ID NO: 1801736 - DNA, 25 bp, Homo sapien
caggaggacagagaattgagcagtc

SEQ ID NO: 1801737 - DNA, 25 bp, Homo sapien
ctgaggcattttccaccaggaggac

SEQ ID NO: 1801738 - DNA, 25 bp, Homo sapien
accaggaggacagagaattgagcag

SEQ ID NO: 1801739 - DNA, 25 bp, Homo sapien
ggaggacagagaattgagcagtcat

SEQ ID NO: 1801740 - DNA, 25 bp, Homo sapien
tgacccacagaggaaggcatcatac

SEQ ID NO: 1801741 - DNA, 25 bp, Homo sapien
cagaggaaggcatcatacgcggctt

SEQ ID NO: 1801742 - DNA, 25 bp, Homo sapien
gcttcgtgggggcactttgtctcaa

SEQ ID NO: 1801743 - DNA, 25 bp, Homo sapien
gaaggcatcatacgcggcttcgtgg

SEQ ID NO: 1801744 - DNA, 25 bp, Homo sapien
tgtagaagcaagtgtgccactttca

SEQ ID NO: 1801745 - DNA, 25 bp, Homo sapien
tctgtagaagcaagtgtgccacttt

SEQ ID NO: 1801746 - DNA, 25 bp, Homo sapien
tcttctgtagaagcaagtgtgccac

SEQ ID NO: 1801747 - DNA, 25 bp, Homo sapien
agaagcaagtgtgccactttcaaaa

SEQ ID NO: 1801748 - DNA, 25 bp, Homo sapien
ctgctggtgatggtttggtgagggt

SEQ ID NO: 1801749 - DNA, 25 bp, Homo sapien
ctggtgatggtttggtgagggtccc

SEQ ID NO: 1801750 - DNA, 25 bp, Homo sapien
gctggtgatggtttggtgagggtcc

SEQ ID NO: 1801751 - DNA, 25 bp, Homo sapien
tggtgatggtttggtgagggtccca

SEQ ID NO: 1801752 - DNA, 25 bp, Homo sapien
taaaagcattctccgtggccacata

SEQ ID NO: 1801753 - DNA, 25 bp, Homo sapien
ggcaagtctaaaagcattctccgtg

SEQ ID NO: 1801754 - DNA, 25 bp, Homo sapien
agcattctccgtggccacatagaag

SEQ ID NO: 1801755 - DNA, 25 bp, Homo sapien
ggctctggttgggtgcttccccagc

SEQ ID NO: 1801756 - DNA, 25 bp, Homo sapien
tgaggttcacttggttcacgtaagg

SEQ ID NO: 1801757 - DNA, 25 bp, Homo sapien
ggttcacgtaaggagccagcacgtc

SEQ ID NO: 1801758 - DNA, 25 bp, Homo sapien
ccccgctcggatgaggttcacttgg

SEQ ID NO: 1801759 - DNA, 25 bp, Homo sapien
taaggagccagcacgtcaaggtact

SEQ ID NO: 1801760 - DNA, 25 bp, Homo sapien
gggcgagggggccaaatgagatcta

SEQ ID NO: 1801761 - DNA, 25 bp, Homo sapien
aaatccctctcacgagtcccagaga

SEQ ID NO: 1801762 - DNA, 25 bp, Homo sapien
tctgaatggggcgagggggccaaat

SEQ ID NO: 1801763 - DNA, 25 bp, Homo sapien
gaccaccgaaatccctctcacgagt

SEQ ID NO: 1801764 - DNA, 25 bp, Homo sapien
gagtcgcctgacatcaaacttgcag

SEQ ID NO: 1801765 - DNA, 25 bp, Homo sapien
caggccaccttttgacgctgaggat

SEQ ID NO: 1801766 - DNA, 25 bp, Homo sapien
gaactggcttcttgtgagtcgcctg

SEQ ID NO: 1801767 - DNA, 25 bp, Homo sapien
tatggtagacttgctgctcgctgac

SEQ ID NO: 1801768 - DNA, 25 bp, Homo sapien
gtggtcagccaggcagcaggatggc

SEQ ID NO: 1801769 - DNA, 25 bp, Homo sapien
caaaacaagtttgctgtggtcagcc

SEQ ID NO: 1801770 - DNA, 25 bp, Homo sapien
ctgccaaaacaagtttgctgtggtc

SEQ ID NO: 1801771 - DNA, 25 bp, Homo sapien
gccaaaacaagtttgctgtggtcag

SEQ ID NO: 1801772 - DNA, 25 bp, Homo sapien
cagttgacgtttggggagtgcctcc

SEQ ID NO: 1801773 - DNA, 25 bp, Homo sapien
gggagatgcacagggtcgggtggtc

SEQ ID NO: 1801774 - DNA, 25 bp, Homo sapien
agtgcctccagtagcggtacaggga

SEQ ID NO: 1801775 - DNA, 25 bp, Homo sapien
cagtagcggtacagggagatgcaca

SEQ ID NO: 1801776 - DNA, 25 bp, Homo sapien
tgaacgcgagaagggcccaggcagt

SEQ ID NO: 1801777 - DNA, 25 bp, Homo sapien
tccaaggatgaacgcgagaagggcc

SEQ ID NO: 1801778 - DNA, 25 bp, Homo sapien
tcttccaaggatgaacgcgagaagg

SEQ ID NO: 1801779 - DNA, 25 bp, Homo sapien
gatcttccaaggatgaacgcgagaa

SEQ ID NO: 1801780 - DNA, 25 bp, Homo sapien
gcatggggacccgagggtggccgca

SEQ ID NO: 1801781 - DNA, 25 bp, Homo sapien
agcatggggacccgagggtggccgc

SEQ ID NO: 1801782 - DNA, 25 bp, Homo sapien
atggggacccgagggtggccgcagg

SEQ ID NO: 1801783 - DNA, 25 bp, Homo sapien
agagcatggggacccgagggtggcc

SEQ ID NO: 1801784 - DNA, 25 bp, Homo sapien
aaagaccaaacagatccatctgcaa

SEQ ID NO: 1801785 - DNA, 25 bp, Homo sapien
tctgatttacacgaacacacccagc

SEQ ID NO: 1801786 - DNA, 25 bp, Homo sapien
gagtgttgacagaatttcacgttca

SEQ ID NO: 1801787 - DNA, 25 bp, Homo sapien
gttcaggacataacagaatttctag

SEQ ID NO: 1801788 - DNA, 25 bp, Homo sapien
tggcgtggccggtcagatcataagt

SEQ ID NO: 1801789 - DNA, 25 bp, Homo sapien
aacagctgctgttccgagtgtggcg

SEQ ID NO: 1801790 - DNA, 25 bp, Homo sapien
cgagtgtggcgtggccggtcagatc

SEQ ID NO: 1801791 - DNA, 25 bp, Homo sapien
ggtcagatcataagtcgcaaaggat

SEQ ID NO: 1801792 - DNA, 25 bp, Homo sapien
gtaaacttgatctacaaagcctggc

SEQ ID NO: 1801793 - DNA, 25 bp, Homo sapien
gctcagaaagtaaacttgatctaca

SEQ ID NO: 1801794 - DNA, 25 bp, Homo sapien
tcagaaagtaaacttgatctacaaa

SEQ ID NO: 1801795 - DNA, 25 bp, Homo sapien
aaagtaaacttgatctacaaagcct

SEQ ID NO: 1801796 - DNA, 25 bp, Homo sapien
gcgagaacgatggaaagcacgtgct

SEQ ID NO: 1801797 - DNA, 25 bp, Homo sapien
atcgagaagagagtgaccagagact

SEQ ID NO: 1801798 - DNA, 25 bp, Homo sapien
cccggcactgtcacggcggatggtg

SEQ ID NO: 1801799 - DNA, 25 bp, Homo sapien
cttgaacaccaacatctaaagggcc

SEQ ID NO: 1801800 - DNA, 25 bp, Homo sapien
gggacactgccacacagcaccaagt

SEQ ID NO: 1801801 - DNA, 25 bp, Homo sapien
ccaggggacactgccacacagcacc

SEQ ID NO: 1801802 - DNA, 25 bp, Homo sapien
acactgccacacagcaccaagtgct

SEQ ID NO: 1801803 - DNA, 25 bp, Homo sapien
gccaggggacactgccacacagcac

SEQ ID NO: 1801804 - DNA, 25 bp, Homo sapien
actcaaatccctgtcgaaaaacaca

SEQ ID NO: 1801805 - DNA, 25 bp, Homo sapien
gagcactggcttgtgaggatactga

SEQ ID NO: 1801806 - DNA, 25 bp, Homo sapien
aggatactgagggcccctgcaggtt

SEQ ID NO: 1801807 - DNA, 25 bp, Homo sapien
ctgagggcccctgcaggttccagaa

SEQ ID NO: 1801808 - DNA, 25 bp, Homo sapien
agcagcatcctcgtaaccccctcag

SEQ ID NO: 1801809 - DNA, 25 bp, Homo sapien
agcatcctcgtaaccccctcagggt

SEQ ID NO: 1801810 - DNA, 25 bp, Homo sapien
cagcatcctcgtaaccccctcaggg

SEQ ID NO: 1801811 - DNA, 25 bp, Homo sapien
gcatcctcgtaaccccctcagggta

SEQ ID NO: 1801812 - DNA, 25 bp, Homo sapien
cagaggagggccgatggctctaacc

SEQ ID NO: 1801813 - DNA, 25 bp, Homo sapien
ccgatggctctaaccgacgtgagga

SEQ ID NO: 1801814 - DNA, 25 bp, Homo sapien
gagaggacgagagtctgcagaccac

SEQ ID NO: 1801815 - DNA, 25 bp, Homo sapien
ctctaaccgacgtgaggaggcgcag

SEQ ID NO: 1801816 - DNA, 25 bp, Homo sapien
tctctacattatgataagcacttga

SEQ ID NO: 1801817 - DNA, 25 bp, Homo sapien
ctctctacattatgataagcacttg

SEQ ID NO: 1801818 - DNA, 25 bp, Homo sapien
ggtgggacacaagagccacatggct

SEQ ID NO: 1801819 - DNA, 25 bp, Homo sapien
gagctggacgagtctcaagatgaca

SEQ ID NO: 1801820 - DNA, 25 bp, Homo sapien
gatgacaggtgggacacaagagcca

SEQ ID NO: 1801821 - DNA, 25 bp, Homo sapien
aactgtggtttcaagagctggacga

SEQ ID NO: 1801822 - DNA, 25 bp, Homo sapien
tcagaaacactattgccagcaggca

SEQ ID NO: 1801823 - DNA, 25 bp, Homo sapien
ttcctcagaaacactattgccagca

SEQ ID NO: 1801824 - DNA, 25 bp, Homo sapien
tcagagcaggctcggcccgcagttc

SEQ ID NO: 1801825 - DNA, 25 bp, Homo sapien
cagagagctctcctactatcttgcg

SEQ ID NO: 1801826 - DNA, 25 bp, Homo sapien
cttgtgctgcccagagaatacttgt

SEQ ID NO: 1801827 - DNA, 25 bp, Homo sapien
aaagcatctttacaagctcacatgt

SEQ ID NO: 1801828 - DNA, 25 bp, Homo sapien
aacaactttatctggcttgtgctgc

SEQ ID NO: 1801829 - DNA, 25 bp, Homo sapien
ttacaagctcacatgtcaaagcctc

SEQ ID NO: 1801830 - DNA, 25 bp, Homo sapien
tgactacgagcacaggtctcagcag

SEQ ID NO: 1801831 - DNA, 25 bp, Homo sapien
ctcagcagcgaggaaggtttgggca

SEQ ID NO: 1801832 - DNA, 25 bp, Homo sapien
cttccaggagttcagaacatcccat

SEQ ID NO: 1801833 - DNA, 25 bp, Homo sapien
gaacatcccatctgactacgagcac

SEQ ID NO: 1801834 - DNA, 25 bp, Homo sapien
gaacaagcagtgaggcaaatttcag

SEQ ID NO: 1801835 - DNA, 25 bp, Homo sapien
acaagcagtgaggcaaatttcagaa

SEQ ID NO: 1801836 - DNA, 25 bp, Homo sapien
tagaacaagcagtgaggcaaatttc

SEQ ID NO: 1801837 - DNA, 25 bp, Homo sapien
ctagaacaagcagtgaggcaaattt

SEQ ID NO: 1801838 - DNA, 25 bp, Homo sapien
aagctttgtggaggttctcagactg

SEQ ID NO: 1801839 - DNA, 25 bp, Homo sapien
acatttgagctcatggtttgtgaat

SEQ ID NO: 1801840 - DNA, 25 bp, Homo sapien
gtgcacatttgagctcatggtttgt

SEQ ID NO: 1801841 - DNA, 25 bp, Homo sapien
gctttgtggaggttctcagactggc

SEQ ID NO: 1801842 - DNA, 25 bp, Homo sapien
tcttttctacagctcctcggagacc

SEQ ID NO: 1801843 - DNA, 25 bp, Homo sapien
gaaaacggctccttatcatcgtgca

SEQ ID NO: 1801844 - DNA, 25 bp, Homo sapien
ggaagcccccagtagcctttctgct

SEQ ID NO: 1801845 - DNA, 25 bp, Homo sapien
tgctcgagcacgtatctcttcttgg

SEQ ID NO: 1801846 - DNA, 25 bp, Homo sapien
ttcagtcctaccaattcagaactca

SEQ ID NO: 1801847 - DNA, 25 bp, Homo sapien
taggtcgtgaggtcgaaaatattca

SEQ ID NO: 1801848 - DNA, 25 bp, Homo sapien
aatattcagtcctaccaattcagaa

SEQ ID NO: 1801849 - DNA, 25 bp, Homo sapien
gagtcccttcctccgacgcttcctc

SEQ ID NO: 1801850 - DNA, 25 bp, Homo sapien
tgaccattcaatgtggagagtcgtc

SEQ ID NO: 1801851 - DNA, 25 bp, Homo sapien
ccttcatgcaaataggccgcctagt

SEQ ID NO: 1801852 - DNA, 25 bp, Homo sapien
cagagggttctggaaccttcatgca

SEQ ID NO: 1801853 - DNA, 25 bp, Homo sapien
tggagagtcgtcaaagtctcccttt

SEQ ID NO: 1801854 - DNA, 25 bp, Homo sapien
acactggctgttctcggagagggct

SEQ ID NO: 1801855 - DNA, 25 bp, Homo sapien
agggctgctcctccgagcggagacc

SEQ ID NO: 1801856 - DNA, 25 bp, Homo sapien
tgctcctccgagcggagaccctgag

SEQ ID NO: 1801857 - DNA, 25 bp, Homo sapien
gagacactggctgttctcggagagg

SEQ ID NO: 1801858 - DNA, 25 bp, Homo sapien
cttctgggccgaccaccctggagtc

SEQ ID NO: 1801859 - DNA, 25 bp, Homo sapien
tctgggccgaccaccctggagtctg

SEQ ID NO: 1801860 - DNA, 25 bp, Homo sapien
ttctgggccgaccaccctggagtct

SEQ ID NO: 1801861 - DNA, 25 bp, Homo sapien
agtcacacgagcacttcgttcccgg

SEQ ID NO: 1801862 - DNA, 25 bp, Homo sapien
tccaagacagtcacacgagcacttc

SEQ ID NO: 1801863 - DNA, 25 bp, Homo sapien
cgcacagtgatacaggggagcttgt

SEQ ID NO: 1801864 - DNA, 25 bp, Homo sapien
cgagcccccgcacagtgatacaggg

SEQ ID NO: 1801865 - DNA, 25 bp, Homo sapien
tccaagaggccacaaggcgtccctg

SEQ ID NO: 1801866 - DNA, 25 bp, Homo sapien
agcgttagggctggtgagggggact

SEQ ID NO: 1801867 - DNA, 25 bp, Homo sapien
aagaggccacaaggcgtccctgagc

SEQ ID NO: 1801868 - DNA, 25 bp, Homo sapien
aaggctccaagaggccacaaggcgt

SEQ ID NO: 1801869 - DNA, 25 bp, Homo sapien
cgcttacacagaggcggctgaacgc

SEQ ID NO: 1801870 - DNA, 25 bp, Homo sapien
tcagaggcctgcatgccgggcctgc

SEQ ID NO: 1801871 - DNA, 25 bp, Homo sapien
catgccgggcctgcatgcattgcgg

SEQ ID NO: 1801872 - DNA, 25 bp, Homo sapien
gacctggtcctcagggcgcttacac

SEQ ID NO: 1801873 - DNA, 25 bp, Homo sapien
tcaaggttccaactccatgcagggc

SEQ ID NO: 1801874 - DNA, 25 bp, Homo sapien
tttcaaggttccaactccatgcagg

SEQ ID NO: 1801875 - DNA, 25 bp, Homo sapien
tcatttcaaggttccaactccatgc

SEQ ID NO: 1801876 - DNA, 25 bp, Homo sapien
caaggttccaactccatgcagggct

SEQ ID NO: 1801877 - DNA, 25 bp, Homo sapien
ggtgtccacatcttcgctgctgcag

SEQ ID NO: 1801878 - DNA, 25 bp, Homo sapien
ttggtccatgatgaaccccgaggtc

SEQ ID NO: 1801879 - DNA, 25 bp, Homo sapien
ggaagactttcagggatccatgtat

SEQ ID NO: 1801880 - DNA, 25 bp, Homo sapien
tccatgtatgggatctgcaggaagg

SEQ ID NO: 1801881 - DNA, 25 bp, Homo sapien
ggccacggcttgatccagtctgagc

SEQ ID NO: 1801882 - DNA, 25 bp, Homo sapien
gcagccggccacggcttgatccagt

SEQ ID NO: 1801883 - DNA, 25 bp, Homo sapien
agccggccacggcttgatccagtct

SEQ ID NO: 1801884 - DNA, 25 bp, Homo sapien
cacggcttgatccagtctgagctgt

SEQ ID NO: 1801885 - DNA, 25 bp, Homo sapien
tcttcattggcacaacaaggagcct

SEQ ID NO: 1801886 - DNA, 25 bp, Homo sapien
gcagcaaggttgtacgttccccatg

SEQ ID NO: 1801887 - DNA, 25 bp, Homo sapien
ttggagccagaaggaccgactgact

SEQ ID NO: 1801888 - DNA, 25 bp, Homo sapien
gacaggaccttcacaccttgagttg

SEQ ID NO: 1801889 - DNA, 25 bp, Homo sapien
tattggtaagtcagtgcccatacat

SEQ ID NO: 1801890 - DNA, 25 bp, Homo sapien
tcagtgcccatacattgctctaatg

SEQ ID NO: 1801891 - DNA, 25 bp, Homo sapien
tgctctaatgaggtgcactcggcat

SEQ ID NO: 1801892 - DNA, 25 bp, Homo sapien
ccatctgctgggctcattattggta

SEQ ID NO: 1801893 - DNA, 25 bp, Homo sapien
cacgactggtcagcattactggcag

SEQ ID NO: 1801894 - DNA, 25 bp, Homo sapien
ttactggcagcatcacagagcatct

SEQ ID NO: 1801895 - DNA, 25 bp, Homo sapien
gatagctcatcctgacagccctcag

SEQ ID NO: 1801896 - DNA, 25 bp, Homo sapien
cagtggcccctggagtggtcagtta

SEQ ID NO: 1801897 - DNA, 25 bp, Homo sapien
caaagtcgcttatgcaaggaagcca

SEQ ID NO: 1801898 - DNA, 25 bp, Homo sapien
ggttccctatgctcaggagcctcat

SEQ ID NO: 1801899 - DNA, 25 bp, Homo sapien
catgccctgggatctctcatggacc

SEQ ID NO: 1801900 - DNA, 25 bp, Homo sapien
tgtaaattcaggacctaatccgagt

SEQ ID NO: 1801901 - DNA, 25 bp, Homo sapien
taagattaggcctttaggacctgat

SEQ ID NO: 1801902 - DNA, 25 bp, Homo sapien
tctgtaaatatgtccagaacaaaac

SEQ ID NO: 1801903 - DNA, 25 bp, Homo sapien
gcctcaggttggaactcttcaggta

SEQ ID NO: 1801904 - DNA, 25 bp, Homo sapien
tagacctgataagactgagaactga

SEQ ID NO: 1801905 - DNA, 25 bp, Homo sapien
tacaattgtctttctggcgccgagg

SEQ ID NO: 1801906 - DNA, 25 bp, Homo sapien
ccgatgtgcattcccgactgaggcg

SEQ ID NO: 1801907 - DNA, 25 bp, Homo sapien
taaaggagtctcatgggcatagcga

SEQ ID NO: 1801908 - DNA, 25 bp, Homo sapien
ccgtcagcagatagaggcccgtgtt

SEQ ID NO: 1801909 - DNA, 25 bp, Homo sapien
ttccaagcacaaactaaaaatgacc

SEQ ID NO: 1801910 - DNA, 25 bp, Homo sapien
tgtgttccaccatttttatccacaa

SEQ ID NO: 1801911 - DNA, 25 bp, Homo sapien
cacatttaggagatacttaagtcat

SEQ ID NO: 1801912 - DNA, 25 bp, Homo sapien
catatgggatgagatgttcttctgt

SEQ ID NO: 1801913 - DNA, 25 bp, Homo sapien
acagtttgcacattgactctcaggc

SEQ ID NO: 1801914 - DNA, 25 bp, Homo sapien
ttaaagttcgaggacagtttgcaca

SEQ ID NO: 1801915 - DNA, 25 bp, Homo sapien
caagatcatcaattaaagttcgagg

SEQ ID NO: 1801916 - DNA, 25 bp, Homo sapien
ccttcacagaatcctgaatgtttgt

SEQ ID NO: 1801917 - DNA, 25 bp, Homo sapien
gctcaagattaagttctgataccca

SEQ ID NO: 1801918 - DNA, 25 bp, Homo sapien
gcctaggtatactcgagagccctcc

SEQ ID NO: 1801919 - DNA, 25 bp, Homo sapien
tcaccgcaagtctcactcagaacag

SEQ ID NO: 1801920 - DNA, 25 bp, Homo sapien
ttccagggcaatgtttaagttccag

SEQ ID NO: 1801921 - DNA, 25 bp, Homo sapien
catattccctgctttaggccatgct

SEQ ID NO: 1801922 - DNA, 25 bp, Homo sapien
ttaggccatgctcggcctgagcaca

SEQ ID NO: 1801923 - DNA, 25 bp, Homo sapien
cctgtgtcactctgcctagacatat

SEQ ID NO: 1801924 - DNA, 25 bp, Homo sapien
ggaagagctgggagttgacgtcggg

SEQ ID NO: 1801925 - DNA, 25 bp, Homo sapien
gaacatgggctcatcaggcctcaca

SEQ ID NO: 1801926 - DNA, 25 bp, Homo sapien
aggccacttcccaagcgttataact

SEQ ID NO: 1801927 - DNA, 25 bp, Homo sapien
cattccgttcttcaccatactcttg

SEQ ID NO: 1801928 - DNA, 25 bp, Homo sapien
aagaacatgggctcatcaggcctca

SEQ ID NO: 1801929 - DNA, 25 bp, Homo sapien
ctgaatgcagaaccttccattaaaa

SEQ ID NO: 1801930 - DNA, 25 bp, Homo sapien
tgaatgcagaaccttccattaaaac

SEQ ID NO: 1801931 - DNA, 25 bp, Homo sapien
tcagtaggaacaaccaccaggtgag

SEQ ID NO: 1801932 - DNA, 25 bp, Homo sapien
gacctgtgaggtgggaatttccaga

SEQ ID NO: 1801933 - DNA, 25 bp, Homo sapien
agggcacaggaccacgggatccttt

SEQ ID NO: 1801934 - DNA, 25 bp, Homo sapien
ttttcttgtttgcaagcagtgttgg

SEQ ID NO: 1801935 - DNA, 25 bp, Homo sapien
caggctctgctctggaacatttatg

SEQ ID NO: 1801936 - DNA, 25 bp, Homo sapien
gctctgctctggaacatttatgctg

SEQ ID NO: 1801937 - DNA, 25 bp, Homo sapien
ctcccacttccaggctctgctctgg

SEQ ID NO: 1801938 - DNA, 25 bp, Homo sapien
cctcccacttccaggctctgctctg

SEQ ID NO: 1801939 - DNA, 25 bp, Homo sapien
cttgctgctgagaacaaagggtagg

SEQ ID NO: 1801940 - DNA, 25 bp, Homo sapien
ttgctgctgagaacaaagggtaggg

SEQ ID NO: 1801941 - DNA, 25 bp, Homo sapien
tgctgctgagaacaaagggtagggg

SEQ ID NO: 1801942 - DNA, 25 bp, Homo sapien
tagtgggtgcactaaactggctgct

SEQ ID NO: 1801943 - DNA, 25 bp, Homo sapien
tggctgctagccagggaaagcacgt

SEQ ID NO: 1801944 - DNA, 25 bp, Homo sapien
ggtggccgagaggattcagctattt

SEQ ID NO: 1801945 - DNA, 25 bp, Homo sapien
tctgccagggaaaatccagaacggg

SEQ ID NO: 1801946 - DNA, 25 bp, Homo sapien
caggccatctggtcataggagctgc

SEQ ID NO: 1801947 - DNA, 25 bp, Homo sapien
ggagctgccactccattgagtagtt

SEQ ID NO: 1801948 - DNA, 25 bp, Homo sapien
tgattggttgctgatacggcaggcc

SEQ ID NO: 1801949 - DNA, 25 bp, Homo sapien
tgaactccagacttagctgcccagg

SEQ ID NO: 1801950 - DNA, 25 bp, Homo sapien
tttctgtccagtacatctgtggccc

SEQ ID NO: 1801951 - DNA, 25 bp, Homo sapien
atttctgtccagtacatctgtggcc

SEQ ID NO: 1801952 - DNA, 25 bp, Homo sapien
gatttctgtccagtacatctgtggc

SEQ ID NO: 1801953 - DNA, 25 bp, Homo sapien
ttctgtccagtacatctgtggccca

SEQ ID NO: 1801954 - DNA, 25 bp, Homo sapien
agcactatgctgggcacagtagagg

SEQ ID NO: 1801955 - DNA, 25 bp, Homo sapien
actatgctgggcacagtagaggtga

SEQ ID NO: 1801956 - DNA, 25 bp, Homo sapien
ctatgctgggcacagtagaggtgac

SEQ ID NO: 1801957 - DNA, 25 bp, Homo sapien
cactatgctgggcacagtagaggtg

SEQ ID NO: 1801958 - DNA, 25 bp, Homo sapien
acttgagactttgaattactgccac

SEQ ID NO: 1801959 - DNA, 25 bp, Homo sapien
tactgccacgaccaagaacaacaga

SEQ ID NO: 1801960 - DNA, 25 bp, Homo sapien
gactttgaattactgccacgaccaa

SEQ ID NO: 1801961 - DNA, 25 bp, Homo sapien
ggtttttgcatacttgagactttga

SEQ ID NO: 1801962 - DNA, 25 bp, Homo sapien
gaagcctcttggacttgctgacctg

SEQ ID NO: 1801963 - DNA, 25 bp, Homo sapien
caacttgaagatggagtgaagcctc

SEQ ID NO: 1801964 - DNA, 25 bp, Homo sapien
caaaggccagcactagtgccggtgc

SEQ ID NO: 1801965 - DNA, 25 bp, Homo sapien
caaggctgccatcttagcgatgaga

SEQ ID NO: 1801966 - DNA, 25 bp, Homo sapien
gagggcaccgactgctgagtagccc

SEQ ID NO: 1801967 - DNA, 25 bp, Homo sapien
ctgaagaggctttaggctgcactgg

SEQ ID NO: 1801968 - DNA, 25 bp, Homo sapien
ctgcactgggaagatcgaatcatga

SEQ ID NO: 1801969 - DNA, 25 bp, Homo sapien
catgagccgtgggtgctcagctaga

SEQ ID NO: 1801970 - DNA, 25 bp, Homo sapien
cagatggaagttaacatttggacct

SEQ ID NO: 1801971 - DNA, 25 bp, Homo sapien
gcggccatccgagtgtcaggacttg

SEQ ID NO: 1801972 - DNA, 25 bp, Homo sapien
gatggtagaacgcagacagaaaagg

SEQ ID NO: 1801973 - DNA, 25 bp, Homo sapien
tgtggctcattcaaaggatggtaga

SEQ ID NO: 1801974 - DNA, 25 bp, Homo sapien
ctgccaccagagactctaacacagt

SEQ ID NO: 1801975 - DNA, 25 bp, Homo sapien
tgttacacgacaggtgatgcccatc

SEQ ID NO: 1801976 - DNA, 25 bp, Homo sapien
gagactctaacacagtaggtcctgt

SEQ ID NO: 1801977 - DNA, 25 bp, Homo sapien
tctttgcaaagggtgttacacgaca

SEQ ID NO: 1801978 - DNA, 25 bp, Homo sapien
agttgacttgactttcaggccatcc

SEQ ID NO: 1801979 - DNA, 25 bp, Homo sapien
cactaggctgcccttagagcacatt

SEQ ID NO: 1801980 - DNA, 25 bp, Homo sapien
cacattgcacgtccccaggagaaaa

SEQ ID NO: 1801981 - DNA, 25 bp, Homo sapien
tccaaaacattggtagcctacccac

SEQ ID NO: 1801982 - DNA, 25 bp, Homo sapien
cctgcgagggtctttctgattctct

SEQ ID NO: 1801983 - DNA, 25 bp, Homo sapien
tggcctgcgagggtctttctgattc

SEQ ID NO: 1801984 - DNA, 25 bp, Homo sapien
gcctgcgagggtctttctgattctc

SEQ ID NO: 1801985 - DNA, 25 bp, Homo sapien
ggcctgcgagggtctttctgattct

SEQ ID NO: 1801986 - DNA, 25 bp, Homo sapien
ggtgatctctcgtctgcgctatcac

SEQ ID NO: 1801987 - DNA, 25 bp, Homo sapien
tgatctctcgtctgcgctatcacta

SEQ ID NO: 1801988 - DNA, 25 bp, Homo sapien
ctctcgtctgcgctatcactatcat

SEQ ID NO: 1801989 - DNA, 25 bp, Homo sapien
gatctctcgtctgcgctatcactat

SEQ ID NO: 1801990 - DNA, 25 bp, Homo sapien
ttttctcgtagcctgaagagcactg

SEQ ID NO: 1801991 - DNA, 25 bp, Homo sapien
cctggctcccagaaaaggaacgctt

SEQ ID NO: 1801992 - DNA, 25 bp, Homo sapien
aagagcactgtgcatggaacacact

SEQ ID NO: 1801993 - DNA, 25 bp, Homo sapien
taaagtttggatgaatgaactccag

SEQ ID NO: 1801994 - DNA, 25 bp, Homo sapien
tgagtggttgggtagcagcagtcct

SEQ ID NO: 1801995 - DNA, 25 bp, Homo sapien
cttgagagaagcttcgcagggtgcg

SEQ ID NO: 1801996 - DNA, 25 bp, Homo sapien
cctgaggtacatgctctggtagatg

SEQ ID NO: 1801997 - DNA, 25 bp, Homo sapien
ggatcagggcggcaaggacatggct

SEQ ID NO: 1801998 - DNA, 25 bp, Homo sapien
tccaaaatccccctagaacagaaga

SEQ ID NO: 1801999 - DNA, 25 bp, Homo sapien
ccgagggccccaaatgctccaaaat

SEQ ID NO: 1802000 - DNA, 25 bp, Homo sapien
aagatgaaggtgcttgtggaagtaa

SEQ ID NO: 1802001 - DNA, 25 bp, Homo sapien
gaaggtgcttgtggaagtaaacttc

SEQ ID NO: 1802002 - DNA, 25 bp, Homo sapien
aatacttggtattcggcccagaagc

SEQ ID NO: 1802003 - DNA, 25 bp, Homo sapien
caaggccaggtaagaagattcagat

SEQ ID NO: 1802004 - DNA, 25 bp, Homo sapien
agattcagatgcagattcacagagc

SEQ ID NO: 1802005 - DNA, 25 bp, Homo sapien
ccgagggcccctgagtgttggcaaa

SEQ ID NO: 1802006 - DNA, 25 bp, Homo sapien
agcaaatctcgcctttttggtgaat

SEQ ID NO: 1802007 - DNA, 25 bp, Homo sapien
tccagcaaatctcgcctttttggtg

SEQ ID NO: 1802008 - DNA, 25 bp, Homo sapien
ccctccagcaaatctcgcctttttg

SEQ ID NO: 1802009 - DNA, 25 bp, Homo sapien
cctccagcaaatctcgcctttttgg

SEQ ID NO: 1802010 - DNA, 25 bp, Homo sapien
gcgcgaggctaacggcgcgcgactg

SEQ ID NO: 1802011 - DNA, 25 bp, Homo sapien
aggtgagcgcggctcgactgggctc

SEQ ID NO: 1802012 - DNA, 25 bp, Homo sapien
ggtcgcgccgccagggcaaaggcgg

SEQ ID NO: 1802013 - DNA, 25 bp, Homo sapien
gcaaaggcggaggtggagacggagc

SEQ ID NO: 1802014 - DNA, 25 bp, Homo sapien
tgcagcaggagcagagagcgctgcg

SEQ ID NO: 1802015 - DNA, 25 bp, Homo sapien
agcaggagcagagagcgctgcgggc

SEQ ID NO: 1802016 - DNA, 25 bp, Homo sapien
caggagcagagagcgctgcgggcgg

SEQ ID NO: 1802017 - DNA, 25 bp, Homo sapien
ctgcagcaggagcagagagcgctgc

SEQ ID NO: 1802018 - DNA, 25 bp, Homo sapien
gaccccggggcagcgacgagcagca

SEQ ID NO: 1802019 - DNA, 25 bp, Homo sapien
ggaccccggggcagcgacgagcagc

SEQ ID NO: 1802020 - DNA, 25 bp, Homo sapien
cgtggaccccggggcagcgacgagc

SEQ ID NO: 1802021 - DNA, 25 bp, Homo sapien
tggaccccggggcagcgacgagcag

SEQ ID NO: 1802022 - DNA, 25 bp, Homo sapien
agtgctccccggctgaatccacagc

SEQ ID NO: 1802023 - DNA, 25 bp, Homo sapien
acagtgctccccggctgaatccaca

SEQ ID NO: 1802024 - DNA, 25 bp, Homo sapien
agacagtgctccccggctgaatcca

SEQ ID NO: 1802025 - DNA, 25 bp, Homo sapien
cagacagtgctccccggctgaatcc

SEQ ID NO: 1802026 - DNA, 25 bp, Homo sapien
cactgaatgataagtgcgtgtcttc

SEQ ID NO: 1802027 - DNA, 25 bp, Homo sapien
tgatggcccgcactggacaatatcc

SEQ ID NO: 1802028 - DNA, 25 bp, Homo sapien
tcttcaagtcgtgcatacaaacagc

SEQ ID NO: 1802029 - DNA, 25 bp, Homo sapien
cacacttccacagatgttgatttta

SEQ ID NO: 1802030 - DNA, 25 bp, Homo sapien
gagagtcctgaaagtatatatgatg

SEQ ID NO: 1802031 - DNA, 25 bp, Homo sapien
catacaaactgctctctccagttga

SEQ ID NO: 1802032 - DNA, 25 bp, Homo sapien
cactctcattgactcatacaaactg

SEQ ID NO: 1802033 - DNA, 25 bp, Homo sapien
agaaagggagccgttactgagagtc

SEQ ID NO: 1802034 - DNA, 25 bp, Homo sapien
tttggatctatttctatgctagctc

SEQ ID NO: 1802035 - DNA, 25 bp, Homo sapien
tcttgtggttgttttgaaggttcac

SEQ ID NO: 1802036 - DNA, 25 bp, Homo sapien
tcttaagttcccatacatatttgga

SEQ ID NO: 1802037 - DNA, 25 bp, Homo sapien
cttctgttcctctgatctgcgggga

SEQ ID NO: 1802038 - DNA, 25 bp, Homo sapien
ctcagtcaggccaccaagtcgcatt

SEQ ID NO: 1802039 - DNA, 25 bp, Homo sapien
caccaggtcgcacctccaagcccaa

SEQ ID NO: 1802040 - DNA, 25 bp, Homo sapien
ttctgcaggcccaccaggtcgcacc

SEQ ID NO: 1802041 - DNA, 25 bp, Homo sapien
tcaggccaccaagtcgcattctgca

SEQ ID NO: 1802042 - DNA, 25 bp, Homo sapien
tgtgcgggtcacgtcctgaaaagga

SEQ ID NO: 1802043 - DNA, 25 bp, Homo sapien
cctacgggtccctcataatgtgcgg

SEQ ID NO: 1802044 - DNA, 25 bp, Homo sapien
tagggtgacccctctgtgtcaagag

SEQ ID NO: 1802045 - DNA, 25 bp, Homo sapien
acaccggcgagaggccgcagagaac

SEQ ID NO: 1802046 - DNA, 25 bp, Homo sapien
agagatctggttgcacttctcaaaa

SEQ ID NO: 1802047 - DNA, 25 bp, Homo sapien
ggttttcccacacaggaaggcaatg

SEQ ID NO: 1802048 - DNA, 25 bp, Homo sapien
tttcccacacaggaaggcaatgctg

SEQ ID NO: 1802049 - DNA, 25 bp, Homo sapien
cagggttttcccacacaggaaggca

SEQ ID NO: 1802050 - DNA, 25 bp, Homo sapien
tcccacacaggaaggcaatgctgct

SEQ ID NO: 1802051 - DNA, 25 bp, Homo sapien
ccccagctgtgcaagtacattgagt

SEQ ID NO: 1802052 - DNA, 25 bp, Homo sapien
atccaaaggaattctaccgccccag

SEQ ID NO: 1802053 - DNA, 25 bp, Homo sapien
aatgttctcttaagcaaatgccagc

SEQ ID NO: 1802054 - DNA, 25 bp, Homo sapien
aattctgagaccaaagcttcataaa

SEQ ID NO: 1802055 - DNA, 25 bp, Homo sapien
ctgcagtggtcctccactcaaagta

SEQ ID NO: 1802056 - DNA, 25 bp, Homo sapien
ctcaaagtagtgcacacattctgtt

SEQ ID NO: 1802057 - DNA, 25 bp, Homo sapien
tccactcaaagtagtgcacacattc

SEQ ID NO: 1802058 - DNA, 25 bp, Homo sapien
ggtcctccactcaaagtagtgcaca

SEQ ID NO: 1802059 - DNA, 25 bp, Homo sapien
acattgcagccagaagtcatcccaa

SEQ ID NO: 1802060 - DNA, 25 bp, Homo sapien
ctggactcacattgcagccagaagt

SEQ ID NO: 1802061 - DNA, 25 bp, Homo sapien
attgcagccagaagtcatcccaagg

SEQ ID NO: 1802062 - DNA, 25 bp, Homo sapien
tcacattgcagccagaagtcatccc

SEQ ID NO: 1802063 - DNA, 25 bp, Homo sapien
tcagcaacgtgacataagaggtaca

SEQ ID NO: 1802064 - DNA, 25 bp, Homo sapien
cccaggagagtatctgtgggactga

SEQ ID NO: 1802065 - DNA, 25 bp, Homo sapien
aagcaactcagatccggccaactgg

SEQ ID NO: 1802066 - DNA, 25 bp, Homo sapien
cagggcaggctttgaaccatgggct

SEQ ID NO: 1802067 - DNA, 25 bp, Homo sapien
tctaccagaatccactgaacaaagt

SEQ ID NO: 1802068 - DNA, 25 bp, Homo sapien
ctgaacaaagtataacaatagtttt

SEQ ID NO: 1802069 - DNA, 25 bp, Homo sapien
gcctctaccagaatccactgaacaa

SEQ ID NO: 1802070 - DNA, 25 bp, Homo sapien
aagcctctaccagaatccactgaac

SEQ ID NO: 1802071 - DNA, 25 bp, Homo sapien
tattacgttccatatatgcagttta

SEQ ID NO: 1802072 - DNA, 25 bp, Homo sapien
tttattacgttccatatatgcagtt

SEQ ID NO: 1802073 - DNA, 25 bp, Homo sapien
tttttttattacgttccatatatgc

SEQ ID NO: 1802074 - DNA, 25 bp, Homo sapien
tttttattacgttccatatatgcag

SEQ ID NO: 1802075 - DNA, 25 bp, Homo sapien
taggcaccactaagcttgatcagag

SEQ ID NO: 1802076 - DNA, 25 bp, Homo sapien
gatcggagtcatccaccaagtaggc

SEQ ID NO: 1802077 - DNA, 25 bp, Homo sapien
gagatcatgcttcctcaactcttca

SEQ ID NO: 1802078 - DNA, 25 bp, Homo sapien
cattgatgaatagagaagtgtccgg

SEQ ID NO: 1802079 - DNA, 25 bp, Homo sapien
gcaagtccgaaactatccaagaggt

SEQ ID NO: 1802080 - DNA, 25 bp, Homo sapien
caaaggcagaatacacagcaagcgc

SEQ ID NO: 1802081 - DNA, 25 bp, Homo sapien
caatcttggtttgagacttagggca

SEQ ID NO: 1802082 - DNA, 25 bp, Homo sapien
caaggaggtaagcacatgatggcaa

SEQ ID NO: 1802083 - DNA, 25 bp, Homo sapien
gtgtcctcttaccaggcaggcggca

SEQ ID NO: 1802084 - DNA, 25 bp, Homo sapien
aacatcaaacgcctggtgtcctctt

SEQ ID NO: 1802085 - DNA, 25 bp, Homo sapien
ctgtccttgcgcaccagcttcagtc

SEQ ID NO: 1802086 - DNA, 25 bp, Homo sapien
gccggggggacaggcccgcagctgt

SEQ ID NO: 1802087 - DNA, 25 bp, Homo sapien
caatgctgcagggactatcccaagc

SEQ ID NO: 1802088 - DNA, 25 bp, Homo sapien
cttgctgaaaaaggatgttcctgca

SEQ ID NO: 1802089 - DNA, 25 bp, Homo sapien
gattaaaaacgccaacagcatcgga

SEQ ID NO: 1802090 - DNA, 25 bp, Homo sapien
caagtacatgtgaagcagcaatgct

SEQ ID NO: 1802091 - DNA, 25 bp, Homo sapien
atatgttgccctgagcattcagcac

SEQ ID NO: 1802092 - DNA, 25 bp, Homo sapien
ttcatatgttgccctgagcattcag

SEQ ID NO: 1802093 - DNA, 25 bp, Homo sapien
tataaagtacatccaaattcatatg

SEQ ID NO: 1802094 - DNA, 25 bp, Homo sapien
agtataaagtacatccaaattcata

SEQ ID NO: 1802095 - DNA, 25 bp, Homo sapien
caaatgtaatagtcaccgcagggct

SEQ ID NO: 1802096 - DNA, 25 bp, Homo sapien
gcctcttccctcacgtaactcagga

SEQ ID NO: 1802097 - DNA, 25 bp, Homo sapien
tgtgaccatcacaaaagtctagctt

SEQ ID NO: 1802098 - DNA, 25 bp, Homo sapien
gctccgacgggcaaacaaatgtaat

SEQ ID NO: 1802099 - DNA, 25 bp, Homo sapien
atcccattatatgtggaggcccctc

SEQ ID NO: 1802100 - DNA, 25 bp, Homo sapien
caccatcccattatatgtggaggcc

SEQ ID NO: 1802101 - DNA, 25 bp, Homo sapien
aacaccatcccattatatgtggagg

SEQ ID NO: 1802102 - DNA, 25 bp, Homo sapien
ccatcccattatatgtggaggcccc

SEQ ID NO: 1802103 - DNA, 25 bp, Homo sapien
gcatggatgggggtttaggggcaga

SEQ ID NO: 1802104 - DNA, 25 bp, Homo sapien
aaagaggggagaaggcatggatggg

SEQ ID NO: 1802105 - DNA, 25 bp, Homo sapien
ctgtgatgagaaagaggggagaagg

SEQ ID NO: 1802106 - DNA, 25 bp, Homo sapien
agaaggcatggatgggggtttaggg

SEQ ID NO: 1802107 - DNA, 25 bp, Homo sapien
cactcgaagagtttacagctgcgct

SEQ ID NO: 1802108 - DNA, 25 bp, Homo sapien
tctcagcagccacactcgaagagtt

SEQ ID NO: 1802109 - DNA, 25 bp, Homo sapien
tacagctgcgctggagatttcatca

SEQ ID NO: 1802110 - DNA, 25 bp, Homo sapien
cgctgggcactcaaggacaagtaag

SEQ ID NO: 1802111 - DNA, 25 bp, Homo sapien
tttaatcacccttaggagacacgac

SEQ ID NO: 1802112 - DNA, 25 bp, Homo sapien
gctttttaatcacccttaggagaca

SEQ ID NO: 1802113 - DNA, 25 bp, Homo sapien
ttttaatcacccttaggagacacga

SEQ ID NO: 1802114 - DNA, 25 bp, Homo sapien
tgcaaccctgacactgagtgaacat

SEQ ID NO: 1802115 - DNA, 25 bp, Homo sapien
tggagtggtgcaaccctgacactga

SEQ ID NO: 1802116 - DNA, 25 bp, Homo sapien
gtggtgcaaccctgacactgagtga

SEQ ID NO: 1802117 - DNA, 25 bp, Homo sapien
ggagtggtgcaaccctgacactgag

SEQ ID NO: 1802118 - DNA, 25 bp, Homo sapien
aatcactaggacatcggcaagcgct

SEQ ID NO: 1802119 - DNA, 25 bp, Homo sapien
tcagtggcacgtggcaatcactagg

SEQ ID NO: 1802120 - DNA, 25 bp, Homo sapien
agacactcaagcttcggccagcaag

SEQ ID NO: 1802121 - DNA, 25 bp, Homo sapien
cagcaagcacctggactcagtggca

SEQ ID NO: 1802122 - DNA, 25 bp, Homo sapien
ctctgtggcaggcatactcagtaat

SEQ ID NO: 1802123 - DNA, 25 bp, Homo sapien
cactcaatttcatagcggcagttgg

SEQ ID NO: 1802124 - DNA, 25 bp, Homo sapien
tgctcgccgctcagagaacaagttt

SEQ ID NO: 1802125 - DNA, 25 bp, Homo sapien
tgaggtctatggagacatcctgctg

SEQ ID NO: 1802126 - DNA, 25 bp, Homo sapien
tgattgtggtatcttcctgctgctt

SEQ ID NO: 1802127 - DNA, 25 bp, Homo sapien
cggagggtctgattgtggtatcttc

SEQ ID NO: 1802128 - DNA, 25 bp, Homo sapien
ctgctttgacttgagaggtatcgct

SEQ ID NO: 1802129 - DNA, 25 bp, Homo sapien
cgctctttttcacttggcaaactgc

SEQ ID NO: 1802130 - DNA, 25 bp, Homo sapien
catccgctgaaaccctgagctgcat

SEQ ID NO: 1802131 - DNA, 25 bp, Homo sapien
caaaatatatcaaggtgaggtctcc

SEQ ID NO: 1802132 - DNA, 25 bp, Homo sapien
ctcaaagtttatgacgctcatccgc

SEQ ID NO: 1802133 - DNA, 25 bp, Homo sapien
cctccaaaatatatcaaggtgaggt

SEQ ID NO: 1802134 - DNA, 25 bp, Homo sapien
gtagcaacccatcctgtaaccaagc

SEQ ID NO: 1802135 - DNA, 25 bp, Homo sapien
tccggaggcttcgagagcatggttc

SEQ ID NO: 1802136 - DNA, 25 bp, Homo sapien
tggttcacatcatgtccagctgcct

SEQ ID NO: 1802137 - DNA, 25 bp, Homo sapien
cacagtgaatcctgtagcaacccat

SEQ ID NO: 1802138 - DNA, 25 bp, Homo sapien
acatagctaaactccgtttcccagc

SEQ ID NO: 1802139 - DNA, 25 bp, Homo sapien
aatttttcctctagacacatagcta

SEQ ID NO: 1802140 - DNA, 25 bp, Homo sapien
tagacacatagctaaactccgtttc

SEQ ID NO: 1802141 - DNA, 25 bp, Homo sapien
cctctagacacatagctaaactccg

SEQ ID NO: 1802142 - DNA, 25 bp, Homo sapien
agtctctcaattccagcaaaagggg

SEQ ID NO: 1802143 - DNA, 25 bp, Homo sapien
cagtctctcaattccagcaaaaggg

SEQ ID NO: 1802144 - DNA, 25 bp, Homo sapien
atccccaagttgccagtctggcacc

SEQ ID NO: 1802145 - DNA, 25 bp, Homo sapien
gacatactaataatctgcaggcaga

SEQ ID NO: 1802146 - DNA, 25 bp, Homo sapien
catgaggcctatggtttctgtccac

SEQ ID NO: 1802147 - DNA, 25 bp, Homo sapien
tgccggtcaactaacagcaacagtg

SEQ ID NO: 1802148 - DNA, 25 bp, Homo sapien
aatcgtcctagtacttttgagctgg

SEQ ID NO: 1802149 - DNA, 25 bp, Homo sapien
caagagcaaatgatatttcaattgt

SEQ ID NO: 1802150 - DNA, 25 bp, Homo sapien
aattataataccagccacagcggca

SEQ ID NO: 1802151 - DNA, 25 bp, Homo sapien
actataattataataccagccacag

SEQ ID NO: 1802152 - DNA, 25 bp, Homo sapien
tgtaatttctatccaatctttaata

SEQ ID NO: 1802153 - DNA, 25 bp, Homo sapien
gaaactgaacaggaccaatgccaac

SEQ ID NO: 1802154 - DNA, 25 bp, Homo sapien
caatgccaactgctccgttaaaaaa

SEQ ID NO: 1802155 - DNA, 25 bp, Homo sapien
gggatctgagttgacacaggcttct

SEQ ID NO: 1802156 - DNA, 25 bp, Homo sapien
gatgcttaaccctaagtcctcgatg

SEQ ID NO: 1802157 - DNA, 25 bp, Homo sapien
gcacaattcaagaggagaaatttaa

SEQ ID NO: 1802158 - DNA, 25 bp, Homo sapien
ctgcacaattcaagaggagaaattt

SEQ ID NO: 1802159 - DNA, 25 bp, Homo sapien
tcaagaggagaaatttaaactccat

SEQ ID NO: 1802160 - DNA, 25 bp, Homo sapien
caattcaagaggagaaatttaaact

SEQ ID NO: 1802161 - DNA, 25 bp, Homo sapien
ttaacacaggcgtattccgtgtccc

SEQ ID NO: 1802162 - DNA, 25 bp, Homo sapien
tccgtgtcccatgtgaagaagtagg

SEQ ID NO: 1802163 - DNA, 25 bp, Homo sapien
atagcgcttcttcccgtcggtggca

SEQ ID NO: 1802164 - DNA, 25 bp, Homo sapien
ggtgcagtcaacctcccctgtgaat

SEQ ID NO: 1802165 - DNA, 25 bp, Homo sapien
aaatgttccatgagcatgtggacta

SEQ ID NO: 1802166 - DNA, 25 bp, Homo sapien
ttccaaaagtactcatgggaaaatg

SEQ ID NO: 1802167 - DNA, 25 bp, Homo sapien
gagcatgtggactaagacccgcatg

SEQ ID NO: 1802168 - DNA, 25 bp, Homo sapien
taagacccgcatggcaaggagggca

SEQ ID NO: 1802169 - DNA, 25 bp, Homo sapien
ctgcagcactctgtgacaaatatta

SEQ ID NO: 1802170 - DNA, 25 bp, Homo sapien
tcgggacaccctcgtgccttgcctt

SEQ ID NO: 1802171 - DNA, 25 bp, Homo sapien
actgcacacactgccgcgtcctcgg

SEQ ID NO: 1802172 - DNA, 25 bp, Homo sapien
cctgcagcactctgtgacaaatatt

SEQ ID NO: 1802173 - DNA, 25 bp, Homo sapien
tggcttgcatacaagtgtgatatta

SEQ ID NO: 1802174 - DNA, 25 bp, Homo sapien
catacaagtgtgatattagttttaa

SEQ ID NO: 1802175 - DNA, 25 bp, Homo sapien
catgaccacaatcatcaccatctga

SEQ ID NO: 1802176 - DNA, 25 bp, Homo sapien
ttcttgccatgaccacaatcatcac

SEQ ID NO: 1802177 - DNA, 25 bp, Homo sapien
tgtgtgccactcaaactcataaaag

SEQ ID NO: 1802178 - DNA, 25 bp, Homo sapien
ctgcctgggagtcaaagaccgtgca

SEQ ID NO: 1802179 - DNA, 25 bp, Homo sapien
acacaggccgcagctgtgtgccact

SEQ ID NO: 1802180 - DNA, 25 bp, Homo sapien
aaagaccgtgcagttctccccttct

SEQ ID NO: 1802181 - DNA, 25 bp, Homo sapien
ttgtctcaactttataggcaccatt

SEQ ID NO: 1802182 - DNA, 25 bp, Homo sapien
tttctttgtgagaggtgataagtca

SEQ ID NO: 1802183 - DNA, 25 bp, Homo sapien
tgtgagaggtgataagtcaaaagaa

SEQ ID NO: 1802184 - DNA, 25 bp, Homo sapien
ttctttgtctcaactttataggcac

SEQ ID NO: 1802185 - DNA, 25 bp, Homo sapien
cagacaccgggccacacacatttat

SEQ ID NO: 1802186 - DNA, 25 bp, Homo sapien
ctcacagacaccgggccacacacat

SEQ ID NO: 1802187 - DNA, 25 bp, Homo sapien
agacaccgggccacacacatttata

SEQ ID NO: 1802188 - DNA, 25 bp, Homo sapien
gctgacaggggctcacagacaccgg

SEQ ID NO: 1802189 - DNA, 25 bp, Homo sapien
tcatttgaactgcagttacgcagaa

SEQ ID NO: 1802190 - DNA, 25 bp, Homo sapien
gaatgcagaaatacgcacagagata

SEQ ID NO: 1802191 - DNA, 25 bp, Homo sapien
gaaatacgcacagagatatctaggc

SEQ ID NO: 1802192 - DNA, 25 bp, Homo sapien
tgcagttacgcagaatgcagaaata

SEQ ID NO: 1802193 - DNA, 25 bp, Homo sapien
cccgtgagcgacgtgaggagtcacc

SEQ ID NO: 1802194 - DNA, 25 bp, Homo sapien
gacgtgaggagtcaccagaaccagg

SEQ ID NO: 1802195 - DNA, 25 bp, Homo sapien
tgaggagtcaccagaaccaggcccg

SEQ ID NO: 1802196 - DNA, 25 bp, Homo sapien
aagggagggcccgtgagcgacgtga

SEQ ID NO: 1802197 - DNA, 25 bp, Homo sapien
ggggcagaagcactccaaggctgcc

SEQ ID NO: 1802198 - DNA, 25 bp, Homo sapien
gcagaagcactccaaggctgccaca

SEQ ID NO: 1802199 - DNA, 25 bp, Homo sapien
ctgaggggcagaagcactccaaggc

SEQ ID NO: 1802200 - DNA, 25 bp, Homo sapien
tgaggggcagaagcactccaaggct

SEQ ID NO: 1802201 - DNA, 25 bp, Homo sapien
taaacacacgtttctctcagcaaag

SEQ ID NO: 1802202 - DNA, 25 bp, Homo sapien
ctgaaataaacacacgtttctctca

SEQ ID NO: 1802203 - DNA, 25 bp, Homo sapien
aacacacgtttctctcagcaaagac

SEQ ID NO: 1802204 - DNA, 25 bp, Homo sapien
gaaataaacacacgtttctctcagc

SEQ ID NO: 1802205 - DNA, 25 bp, Homo sapien
tgtagttcagttggatcatcccatc

SEQ ID NO: 1802206 - DNA, 25 bp, Homo sapien
gcgtctcgatcacagagaaaggtga

SEQ ID NO: 1802207 - DNA, 25 bp, Homo sapien
tttcattgttatagggtgtgccgcc

SEQ ID NO: 1802208 - DNA, 25 bp, Homo sapien
agaaaggtgatgagcgtagctctcg

SEQ ID NO: 1802209 - DNA, 25 bp, Homo sapien
ctggtgtaccaccggaagttgtagg

SEQ ID NO: 1802210 - DNA, 25 bp, Homo sapien
tgtaccaccggaagttgtaggtgga

SEQ ID NO: 1802211 - DNA, 25 bp, Homo sapien
caccggaagttgtaggtggagttat

SEQ ID NO: 1802212 - DNA, 25 bp, Homo sapien
ttccaggggctcctccgggcaggca

SEQ ID NO: 1802213 - DNA, 25 bp, Homo sapien
caggggctcctccgggcaggcatag

SEQ ID NO: 1802214 - DNA, 25 bp, Homo sapien
attccaggggctcctccgggcaggc

SEQ ID NO: 1802215 - DNA, 25 bp, Homo sapien
tccaggggctcctccgggcaggcat

SEQ ID NO: 1802216 - DNA, 25 bp, Homo sapien
gctccagcgtggaggggtcggtcac

SEQ ID NO: 1802217 - DNA, 25 bp, Homo sapien
agaggtcgtactgctccagcgtgga

SEQ ID NO: 1802218 - DNA, 25 bp, Homo sapien
ctggagaggtcgtactgctccagcg

SEQ ID NO: 1802219 - DNA, 25 bp, Homo sapien
tggagaggtcgtactgctccagcgt

SEQ ID NO: 1802220 - DNA, 25 bp, Homo sapien
atcagctcagtcacacgctcaccag

SEQ ID NO: 1802221 - DNA, 25 bp, Homo sapien
cccatcatcagctcagtcacacgct

SEQ ID NO: 1802222 - DNA, 25 bp, Homo sapien
cagcaacacttgcaacctcagcatc

SEQ ID NO: 1802223 - DNA, 25 bp, Homo sapien
gtcacacgctcaccagcaacacttg

SEQ ID NO: 1802224 - DNA, 25 bp, Homo sapien
ttgcagcccggcactggattcagag

SEQ ID NO: 1802225 - DNA, 25 bp, Homo sapien
cagaggccgacacacgttaatgtag

SEQ ID NO: 1802226 - DNA, 25 bp, Homo sapien
catgttcccctgagttgtccatggc

SEQ ID NO: 1802227 - DNA, 25 bp, Homo sapien
ttttcatacttcatctggcaagccg

SEQ ID NO: 1802228 - DNA, 25 bp, Homo sapien
cccagggacgaactgcagcgaatga

SEQ ID NO: 1802229 - DNA, 25 bp, Homo sapien
ggtaaatgttctggcggtgactgca

SEQ ID NO: 1802230 - DNA, 25 bp, Homo sapien
cgtacaacgaccacaggagacgggt

SEQ ID NO: 1802231 - DNA, 25 bp, Homo sapien
cagaagccaatacagatgtccagag

SEQ ID NO: 1802232 - DNA, 25 bp, Homo sapien
ctgtcctcaaccaccgggccggtct

SEQ ID NO: 1802233 - DNA, 25 bp, Homo sapien
caaccaccgggccggtctttgccat

SEQ ID NO: 1802234 - DNA, 25 bp, Homo sapien
tcccaagttactgatggaaaccact

SEQ ID NO: 1802235 - DNA, 25 bp, Homo sapien
cattcccaagttactgatggaaacc

SEQ ID NO: 1802236 - DNA, 25 bp, Homo sapien
gtggtgcaggccgacccattcacgt

SEQ ID NO: 1802237 - DNA, 25 bp, Homo sapien
tgtggtctgtctgccatcgctggtg

SEQ ID NO: 1802238 - DNA, 25 bp, Homo sapien
cgagatggatcctcgtggtatatgt

SEQ ID NO: 1802239 - DNA, 25 bp, Homo sapien
gatcctcgtggtatatgtggtctgt

SEQ ID NO: 1802240 - DNA, 25 bp, Homo sapien
gctccttccacttcacaatgtgctt

SEQ ID NO: 1802241 - DNA, 25 bp, Homo sapien
agtgagtgtatttcctgtgctgcag

SEQ ID NO: 1802242 - DNA, 25 bp, Homo sapien
actgcaaacccctgggagagcggcc

SEQ ID NO: 1802243 - DNA, 25 bp, Homo sapien
ctttagcctgtgaaagttctgtgac

SEQ ID NO: 1802244 - DNA, 25 bp, Homo sapien
cgttgtctgaatgggacaggcagcc

SEQ ID NO: 1802245 - DNA, 25 bp, Homo sapien
atccgtcgttgtctgaatgggacag

SEQ ID NO: 1802246 - DNA, 25 bp, Homo sapien
acacactcccagttgagagaaaaga

SEQ ID NO: 1802247 - DNA, 25 bp, Homo sapien
cgtcgttgtctgaatgggacaggca

SEQ ID NO: 1802248 - DNA, 25 bp, Homo sapien
aggctactgcatttccctaagaaga

SEQ ID NO: 1802249 - DNA, 25 bp, Homo sapien
agctgttaaggctactgcatttccc

SEQ ID NO: 1802250 - DNA, 25 bp, Homo sapien
ctggaagctgttaaggctactgcat

SEQ ID NO: 1802251 - DNA, 25 bp, Homo sapien
tccctaagaagactattgctactcc

SEQ ID NO: 1802252 - DNA, 25 bp, Homo sapien
ggattaagattaaacacaaatccac

SEQ ID NO: 1802253 - DNA, 25 bp, Homo sapien
tgttgggatcccttatagagcaagc

SEQ ID NO: 1802254 - DNA, 25 bp, Homo sapien
tcccaatgccagagacgttatatcc

SEQ ID NO: 1802255 - DNA, 25 bp, Homo sapien
tgcgaactgtttagcggattaagat

SEQ ID NO: 1802256 - DNA, 25 bp, Homo sapien
tcagtttgggtttctgcctcacagc

SEQ ID NO: 1802257 - DNA, 25 bp, Homo sapien
tgtggacagctggaggcttttctca

SEQ ID NO: 1802258 - DNA, 25 bp, Homo sapien
tctcaattccgactggccttgctgg

SEQ ID NO: 1802259 - DNA, 25 bp, Homo sapien
cagagagaggccctttgtaggtcag

SEQ ID NO: 1802260 - DNA, 25 bp, Homo sapien
gaacacaggccaacgcggtttcaaa

SEQ ID NO: 1802261 - DNA, 25 bp, Homo sapien
cggacgataaaagcatcagcggtac

SEQ ID NO: 1802262 - DNA, 25 bp, Homo sapien
agtgtttcggatcccttgcccagag

SEQ ID NO: 1802263 - DNA, 25 bp, Homo sapien
gcccagagtcgatatcttgatgcag

SEQ ID NO: 1802264 - DNA, 25 bp, Homo sapien
tgtgcttaggccagtcaggtcgtac

SEQ ID NO: 1802265 - DNA, 25 bp, Homo sapien
tgtaagggagaggattgcaaacgct

SEQ ID NO: 1802266 - DNA, 25 bp, Homo sapien
tctttctcccatcgacagaggtgtc

SEQ ID NO: 1802267 - DNA, 25 bp, Homo sapien
gaggtgtcaacagccgtccaaggtt

SEQ ID NO: 1802268 - DNA, 25 bp, Homo sapien
tttgggcatgaggaaggcgatgacc

SEQ ID NO: 1802269 - DNA, 25 bp, Homo sapien
catgaggaaggcgatgaccttgagt

SEQ ID NO: 1802270 - DNA, 25 bp, Homo sapien
aaggcgatgaccttgagtcaaatgc

SEQ ID NO: 1802271 - DNA, 25 bp, Homo sapien
cagaataagtggtttgggcatgagg

SEQ ID NO: 1802272 - DNA, 25 bp, Homo sapien
gaagcgctggttcccacacttgtca

SEQ ID NO: 1802273 - DNA, 25 bp, Homo sapien
gatgctcaaagatccattcgccgcg

SEQ ID NO: 1802274 - DNA, 25 bp, Homo sapien
tgagcacactcaaacgtgatcctgg

SEQ ID NO: 1802275 - DNA, 25 bp, Homo sapien
tcaccgttgacatacatgatgctca

SEQ ID NO: 1802276 - DNA, 25 bp, Homo sapien
ccggggacaacatctcattgctggt

SEQ ID NO: 1802277 - DNA, 25 bp, Homo sapien
ggacaacatctcattgctggtctga

SEQ ID NO: 1802278 - DNA, 25 bp, Homo sapien
gggacaacatctcattgctggtctg

SEQ ID NO: 1802279 - DNA, 25 bp, Homo sapien
cggggacaacatctcattgctggtc

SEQ ID NO: 1802280 - DNA, 25 bp, Homo sapien
cttccactctgacaacgggacaggc

SEQ ID NO: 1802281 - DNA, 25 bp, Homo sapien
tccactctgacaacgggacaggctt

SEQ ID NO: 1802282 - DNA, 25 bp, Homo sapien
aacacgtactcacaaccatcctgaa

SEQ ID NO: 1802283 - DNA, 25 bp, Homo sapien
ttctccagataaacacgtactcaca

SEQ ID NO: 1802284 - DNA, 25 bp, Homo sapien
cttcaagaacatggaagaagtgaag

SEQ ID NO: 1802285 - DNA, 25 bp, Homo sapien
agaacatggaagaagtgaagggcaa

SEQ ID NO: 1802286 - DNA, 25 bp, Homo sapien
tcaagaacatggaagaagtgaaggg

SEQ ID NO: 1802287 - DNA, 25 bp, Homo sapien
caagaacatggaagaagtgaagggc

SEQ ID NO: 1802288 - DNA, 25 bp, Homo sapien
taataagtgtattcgccagcgctca

SEQ ID NO: 1802289 - DNA, 25 bp, Homo sapien
tgacatgaggagaccaccttggact

SEQ ID NO: 1802290 - DNA, 25 bp, Homo sapien
ggcagacgtctgaggaaagcttccc

SEQ ID NO: 1802291 - DNA, 25 bp, Homo sapien
tgtgaaatccctgcggttcccgctt

SEQ ID NO: 1802292 - DNA, 25 bp, Homo sapien
gataaaccttatggcaagtgtcccc

SEQ ID NO: 1802293 - DNA, 25 bp, Homo sapien
cataagttagcttctgagtcaggag

SEQ ID NO: 1802294 - DNA, 25 bp, Homo sapien
gatggctgtggagcgctgataaacc

SEQ ID NO: 1802295 - DNA, 25 bp, Homo sapien
cgcggtcacagtagaagaagatggc

SEQ ID NO: 1802296 - DNA, 25 bp, Homo sapien
ctgcgttcgccactcaaacaagtag

SEQ ID NO: 1802297 - DNA, 25 bp, Homo sapien
caagtaggaacaatctgaagtctcc

SEQ ID NO: 1802298 - DNA, 25 bp, Homo sapien
ttcagtcagatcgaaaggtgggcag

SEQ ID NO: 1802299 - DNA, 25 bp, Homo sapien
tgggcaggcatactgcgttcgccac

SEQ ID NO: 1802300 - DNA, 25 bp, Homo sapien
ttgatgaggtagtgctccgggtccc

SEQ ID NO: 1802301 - DNA, 25 bp, Homo sapien
actgtaccttgacagggacgagagg

SEQ ID NO: 1802302 - DNA, 25 bp, Homo sapien
ggccagagacttgcagacattgatg

SEQ ID NO: 1802303 - DNA, 25 bp, Homo sapien
acgagaggtcgaaggagttgccagc

SEQ ID NO: 1802304 - DNA, 25 bp, Homo sapien
ctggcctgtgatacactcactgcaa

SEQ ID NO: 1802305 - DNA, 25 bp, Homo sapien
gctggcctgtgatacactcactgca

SEQ ID NO: 1802306 - DNA, 25 bp, Homo sapien
gtgctggcctgtgatacactcactg

SEQ ID NO: 1802307 - DNA, 25 bp, Homo sapien
tgctggcctgtgatacactcactgc

SEQ ID NO: 1802308 - DNA, 25 bp, Homo sapien
agtgctggcctgtgatacactcaca

SEQ ID NO: 1802309 - DNA, 25 bp, Homo sapien
cagtgccagctttcaatacattcat

SEQ ID NO: 1802310 - DNA, 25 bp, Homo sapien
gctggcctgtgatacactcacagca

SEQ ID NO: 1802311 - DNA, 25 bp, Homo sapien
tgctggcctgtgatacactcacagc

SEQ ID NO: 1802312 - DNA, 25 bp, Homo sapien
gccttcaatacactcactgcaaaca

SEQ ID NO: 1802313 - DNA, 25 bp, Homo sapien
tcaatacactcactgcaaacaccat

SEQ ID NO: 1802314 - DNA, 25 bp, Homo sapien
atcccacgaggaggccctctctcac

SEQ ID NO: 1802315 - DNA, 25 bp, Homo sapien
gtgccagccttcaatacactcactg

SEQ ID NO: 1802316 - DNA, 25 bp, Homo sapien
tggctctcgctgcaggtgaatcgga

SEQ ID NO: 1802317 - DNA, 25 bp, Homo sapien
taccctgccgaggttcacgggcttg

SEQ ID NO: 1802318 - DNA, 25 bp, Homo sapien
gactttttccgaatcccatctggac

SEQ ID NO: 1802319 - DNA, 25 bp, Homo sapien
tctggacataagtcgccatcaacgt

SEQ ID NO: 1802320 - DNA, 25 bp, Homo sapien
aaagggcatgtagtcaaacaacaat

SEQ ID NO: 1802321 - DNA, 25 bp, Homo sapien
aaaagggcatgtagtcaaacaacaa

SEQ ID NO: 1802322 - DNA, 25 bp, Homo sapien
tcccaagctgccgccgtgaagacaa

SEQ ID NO: 1802323 - DNA, 25 bp, Homo sapien
gctgccgccgtgaagacaaaagggc

SEQ ID NO: 1802324 - DNA, 25 bp, Homo sapien
ttctctgaaaaactccacagcatgt

SEQ ID NO: 1802325 - DNA, 25 bp, Homo sapien
aaaactccacagcatgtgacatttc

SEQ ID NO: 1802326 - DNA, 25 bp, Homo sapien
ggaagcttctctgaaaaactccaca

SEQ ID NO: 1802327 - DNA, 25 bp, Homo sapien
atgtgacatttctgtctccatgtgc

SEQ ID NO: 1802328 - DNA, 25 bp, Homo sapien
cgctgatgaacatgggcctggagtt

SEQ ID NO: 1802329 - DNA, 25 bp, Homo sapien
tcatgctcgttgctcttcatgggac

SEQ ID NO: 1802330 - DNA, 25 bp, Homo sapien
cctccacggcgctgatgaacatggg

SEQ ID NO: 1802331 - DNA, 25 bp, Homo sapien
ttggtgacctggcagtcatcatgct

SEQ ID NO: 1802332 - DNA, 25 bp, Homo sapien
accaaccccttctcgctgtaagcag

SEQ ID NO: 1802333 - DNA, 25 bp, Homo sapien
gccctgccacttaaggagctcagat

SEQ ID NO: 1802334 - DNA, 25 bp, Homo sapien
ccacgccaggagggcagttttcatt

SEQ ID NO: 1802335 - DNA, 25 bp, Homo sapien
agatgctcatgtaaaccaacccctt

SEQ ID NO: 1802336 - DNA, 25 bp, Homo sapien
gactgctgcaggagacaaaagcgtc

SEQ ID NO: 1802337 - DNA, 25 bp, Homo sapien
gcaggagacaaaagcgtctcagctt

SEQ ID NO: 1802338 - DNA, 25 bp, Homo sapien
catcctttttgccattagcatgcaa

SEQ ID NO: 1802339 - DNA, 25 bp, Homo sapien
tttttgccattagcatgcaaagaga

SEQ ID NO: 1802340 - DNA, 25 bp, Homo sapien
cacactcttatagctcaggccggat

SEQ ID NO: 1802341 - DNA, 25 bp, Homo sapien
gggacccatccttgtacaccagctg

SEQ ID NO: 1802342 - DNA, 25 bp, Homo sapien
tggccttgcccacgctaatcctggt

SEQ ID NO: 1802343 - DNA, 25 bp, Homo sapien
tcaggcctgcacacgaaactgatca

SEQ ID NO: 1802344 - DNA, 25 bp, Homo sapien
tggtatcggaggcatcatcctcact

SEQ ID NO: 1802345 - DNA, 25 bp, Homo sapien
gggaccatcaataggaactttgcac

SEQ ID NO: 1802346 - DNA, 25 bp, Homo sapien
cagggcactccgtgcatgggattta

SEQ ID NO: 1802347 - DNA, 25 bp, Homo sapien
caatagagcttccattcctcacgga

SEQ ID NO: 1802348 - DNA, 25 bp, Homo sapien
aggcaagaaacaacgcaaaggttat

SEQ ID NO: 1802349 - DNA, 25 bp, Homo sapien
gaaacaacgcaaaggttatcactaa

SEQ ID NO: 1802350 - DNA, 25 bp, Homo sapien
ggcaagaaacaacgcaaaggttatc

SEQ ID NO: 1802351 - DNA, 25 bp, Homo sapien
caagaaacaacgcaaaggttatcac

SEQ ID NO: 1802352 - DNA, 25 bp, Homo sapien
tgtccgctaagcaaggagtactgct

SEQ ID NO: 1802353 - DNA, 25 bp, Homo sapien
agtattggtggtcctgctacccggc

SEQ ID NO: 1802354 - DNA, 25 bp, Homo sapien
tcttacagtgaaacgcgatgagcga

SEQ ID NO: 1802355 - DNA, 25 bp, Homo sapien
tgagcgaggtgtagttgaaatgctt

SEQ ID NO: 1802356 - DNA, 25 bp, Homo sapien
tcacttcatcaggacagacgacagg

SEQ ID NO: 1802357 - DNA, 25 bp, Homo sapien
cttaaaggtgctcgtggaaaggctg

SEQ ID NO: 1802358 - DNA, 25 bp, Homo sapien
agtcgcactcgctggtccttaacag

SEQ ID NO: 1802359 - DNA, 25 bp, Homo sapien
tcccattcgaacacaaagtcgcact

SEQ ID NO: 1802360 - DNA, 25 bp, Homo sapien
accagcaacgcccagggtgaacgca

SEQ ID NO: 1802361 - DNA, 25 bp, Homo sapien
cctgcaccagcaacgcccagggtga

SEQ ID NO: 1802362 - DNA, 25 bp, Homo sapien
ctgcaccagcaacgcccagggtgaa

SEQ ID NO: 1802363 - DNA, 25 bp, Homo sapien
gcaacgcccagggtgaacgcattac

SEQ ID NO: 1802364 - DNA, 25 bp, Homo sapien
tcccaaagctgccacaatcagcaaa

SEQ ID NO: 1802365 - DNA, 25 bp, Homo sapien
gcaaacaactgccttgatcatcttc

SEQ ID NO: 1802366 - DNA, 25 bp, Homo sapien
aactgccttgatcatcttcaaccag

SEQ ID NO: 1802367 - DNA, 25 bp, Homo sapien
tcatcttcaaccaggttggaggaat

SEQ ID NO: 1802368 - DNA, 25 bp, Homo sapien
cagtttcattgattgcagccgtcca

SEQ ID NO: 1802369 - DNA, 25 bp, Homo sapien
ggtgcacaccccaacgctgtaggtg

SEQ ID NO: 1802370 - DNA, 25 bp, Homo sapien
tggagggcaacgatcaccattcacg

SEQ ID NO: 1802371 - DNA, 25 bp, Homo sapien
taaaacgaccgcttcatcctggtgc

SEQ ID NO: 1802372 - DNA, 25 bp, Homo sapien
gaagccccactcgtggtctctgtcg

SEQ ID NO: 1802373 - DNA, 25 bp, Homo sapien
gcttcgccctgctctctatgatgca

SEQ ID NO: 1802374 - DNA, 25 bp, Homo sapien
tctctgtcgtagtccgcagttgtgc

SEQ ID NO: 1802375 - DNA, 25 bp, Homo sapien
gcagttgtgctacaccacagcttcg

SEQ ID NO: 1802376 - DNA, 25 bp, Homo sapien
actgaagacttgtggcctcccaatg

SEQ ID NO: 1802377 - DNA, 25 bp, Homo sapien
gagactccgttgtggacgagggacc

SEQ ID NO: 1802378 - DNA, 25 bp, Homo sapien
tgtttctggacgaatttgcactcca

SEQ ID NO: 1802379 - DNA, 25 bp, Homo sapien
agagcagccgcaggtcgtaggtttt

SEQ ID NO: 1802380 - DNA, 25 bp, Homo sapien
caggattgacactgcgggctgcttc

SEQ ID NO: 1802381 - DNA, 25 bp, Homo sapien
aaaagagccaaccatcgtcaagcag

SEQ ID NO: 1802382 - DNA, 25 bp, Homo sapien
tgcttccaggaacagtcacaactca

SEQ ID NO: 1802383 - DNA, 25 bp, Homo sapien
gcctcacatgggcatagtattccca

SEQ ID NO: 1802384 - DNA, 25 bp, Homo sapien
cccagcttctgcgtgtgaacgagtc

SEQ ID NO: 1802385 - DNA, 25 bp, Homo sapien
gcgtgtgaacgagtcccaggacctg

SEQ ID NO: 1802386 - DNA, 25 bp, Homo sapien
aggacctggacgtcaccagttgtgg

SEQ ID NO: 1802387 - DNA, 25 bp, Homo sapien
aatgctggccctttcagagcagccc

SEQ ID NO: 1802388 - DNA, 25 bp, Homo sapien
tgctccttgaaccaaggaccaggac

SEQ ID NO: 1802389 - DNA, 25 bp, Homo sapien
gctccttgaaccaaggaccaggacc

SEQ ID NO: 1802390 - DNA, 25 bp, Homo sapien
gtctgcccaccgtctttgtacaggt

SEQ ID NO: 1802391 - DNA, 25 bp, Homo sapien
tgtacaggtcaattctatcacggag

SEQ ID NO: 1802392 - DNA, 25 bp, Homo sapien
cctttggagtacgtgacaacaactt

SEQ ID NO: 1802393 - DNA, 25 bp, Homo sapien
tgcggtcttatttccaccacacgga

SEQ ID NO: 1802394 - DNA, 25 bp, Homo sapien
taaatatctccgaggctgaagctct

SEQ ID NO: 1802395 - DNA, 25 bp, Homo sapien
tagggttggtgatggtcccattcac

SEQ ID NO: 1802396 - DNA, 25 bp, Homo sapien
gtaagtgcagctgtcgatatcaaac

SEQ ID NO: 1802397 - DNA, 25 bp, Homo sapien
ccgggagtcccagctgaagtagtaa

SEQ ID NO: 1802398 - DNA, 25 bp, Homo sapien
gcttcacctggcatatgttggctcc

SEQ ID NO: 1802399 - DNA, 25 bp, Homo sapien
ttggctccagagcacgccgggtttc

SEQ ID NO: 1802400 - DNA, 25 bp, Homo sapien
gaagtgctgatcgttgggcttcacc

SEQ ID NO: 1802401 - DNA, 25 bp, Homo sapien
tacaggtagttgtccccattggtcc

SEQ ID NO: 1802402 - DNA, 25 bp, Homo sapien
cgtatcgctcaatccactgtcaaga

SEQ ID NO: 1802403 - DNA, 25 bp, Homo sapien
aatgcttagttctgacacgtatcgc

SEQ ID NO: 1802404 - DNA, 25 bp, Homo sapien
taaatgtggaactttgtgggaagcc

SEQ ID NO: 1802405 - DNA, 25 bp, Homo sapien
taaaagtggtccgagatttcaactg

SEQ ID NO: 1802406 - DNA, 25 bp, Homo sapien
gagttattacatccacacacggttc

SEQ ID NO: 1802407 - DNA, 25 bp, Homo sapien
tctgccctatgtgcgtcctggttga

SEQ ID NO: 1802408 - DNA, 25 bp, Homo sapien
gggcaacacccttattagtgccagt

SEQ ID NO: 1802409 - DNA, 25 bp, Homo sapien
aaaagcagcctttcacgattatgtg

SEQ ID NO: 1802410 - DNA, 25 bp, Homo sapien
ccatcaggtgctgccgtcgtggaga

SEQ ID NO: 1802411 - DNA, 25 bp, Homo sapien
tccatcaggtgctgccgtcgtggag

SEQ ID NO: 1802412 - DNA, 25 bp, Homo sapien
tgctgccgtcgtggagatgcactca

SEQ ID NO: 1802413 - DNA, 25 bp, Homo sapien
gtcgtggagatgcactcagcaccag

SEQ ID NO: 1802414 - DNA, 25 bp, Homo sapien
gagcagcagcttgcaaggctaccct

SEQ ID NO: 1802415 - DNA, 25 bp, Homo sapien
tgatggctgaggcatgtgtaggagc

SEQ ID NO: 1802416 - DNA, 25 bp, Homo sapien
gcagcagcttgcaaggctaccctgg

SEQ ID NO: 1802417 - DNA, 25 bp, Homo sapien
ggctgaggcatgtgtaggagcagca

SEQ ID NO: 1802418 - DNA, 25 bp, Homo sapien
ggtgactttgggaactagtgaataa

SEQ ID NO: 1802419 - DNA, 25 bp, Homo sapien
gggtgactttgggaactagtgaata

SEQ ID NO: 1802420 - DNA, 25 bp, Homo sapien
agggtgactttgggaactagtgaat

SEQ ID NO: 1802421 - DNA, 25 bp, Homo sapien
gtgactttgggaactagtgaataac

SEQ ID NO: 1802422 - DNA, 25 bp, Homo sapien
ctgcgcgatggagcgtgaagactcc

SEQ ID NO: 1802423 - DNA, 25 bp, Homo sapien
gaggtcttatgtgtaaccagacaag

SEQ ID NO: 1802424 - DNA, 25 bp, Homo sapien
aatcctgcagacacaccagcggtgt

SEQ ID NO: 1802425 - DNA, 25 bp, Homo sapien
gaggtaggtttggaatcctgcagac

SEQ ID NO: 1802426 - DNA, 25 bp, Homo sapien
gatgtggggaagcaaaccgcccagc

SEQ ID NO: 1802427 - DNA, 25 bp, Homo sapien
tctcgcttgggagtagctgaagcag

SEQ ID NO: 1802428 - DNA, 25 bp, Homo sapien
cagggtaggagacggacatgtccac

SEQ ID NO: 1802429 - DNA, 25 bp, Homo sapien
caggaatgcagaggcgagagtgcag

SEQ ID NO: 1802430 - DNA, 25 bp, Homo sapien
ggccccacattctcgcttgggagta

SEQ ID NO: 1802431 - DNA, 25 bp, Homo sapien
gtgtggactccttgcatgaactctg

SEQ ID NO: 1802432 - DNA, 25 bp, Homo sapien
taaatctgaagttggcttgggaacc

SEQ ID NO: 1802433 - DNA, 25 bp, Homo sapien
cttgggaaccccttcagtgtgctgt

SEQ ID NO: 1802434 - DNA, 25 bp, Homo sapien
taagtgtaactgcttccagggagct

SEQ ID NO: 1802435 - DNA, 25 bp, Homo sapien
gcacctccggctgatgatactccat

SEQ ID NO: 1802436 - DNA, 25 bp, Homo sapien
ccttggctaatgacaggatacggag

SEQ ID NO: 1802437 - DNA, 25 bp, Homo sapien
gagtgatcaatggaccaatcctgcc

SEQ ID NO: 1802438 - DNA, 25 bp, Homo sapien
tgtgcactgccacacgtgggtgctg

SEQ ID NO: 1802439 - DNA, 25 bp, Homo sapien
tcttcatcgtgcagtaaggtggagg

SEQ ID NO: 1802440 - DNA, 25 bp, Homo sapien
caaactcttcatcgtgcagtaaggt

SEQ ID NO: 1802441 - DNA, 25 bp, Homo sapien
ggaggcctgagaccccatcactgtg

SEQ ID NO: 1802442 - DNA, 25 bp, Homo sapien
tcatcgtgcagtaaggtggaggcct

SEQ ID NO: 1802443 - DNA, 25 bp, Homo sapien
gaaggcattgatgatccagtccccc

SEQ ID NO: 1802444 - DNA, 25 bp, Homo sapien
tgggttgatggcaagttctggaatc

SEQ ID NO: 1802445 - DNA, 25 bp, Homo sapien
ttgatgatccagtcccccactgggt

SEQ ID NO: 1802446 - DNA, 25 bp, Homo sapien
tggaaggaaggcattgatgatccag

SEQ ID NO: 1802447 - DNA, 25 bp, Homo sapien
atgagccagagtttgcaggaatcca

SEQ ID NO: 1802448 - DNA, 25 bp, Homo sapien
tcatcacgagagatcttgttatctt

SEQ ID NO: 1802449 - DNA, 25 bp, Homo sapien
gcacccttaacagctcatcacgaga

SEQ ID NO: 1802450 - DNA, 25 bp, Homo sapien
atcatgcacagcacccttaacagct

SEQ ID NO: 1802451 - DNA, 25 bp, Homo sapien
aaagtctgtgataaagatatggcac

SEQ ID NO: 1802452 - DNA, 25 bp, Homo sapien
tactagactgcaaggaatagtttgc

SEQ ID NO: 1802453 - DNA, 25 bp, Homo sapien
ggtggacaggaggactgtcaagttc

SEQ ID NO: 1802454 - DNA, 25 bp, Homo sapien
gaaatagactgggtgtaccattctg

SEQ ID NO: 1802455 - DNA, 25 bp, Homo sapien
caaggaatagtttgctgtctgtcct

SEQ ID NO: 1802456 - DNA, 25 bp, Homo sapien
atggatgtgtggcattcagcagcag

SEQ ID NO: 1802457 - DNA, 25 bp, Homo sapien
agcagaacagaggaagacgatattt

SEQ ID NO: 1802458 - DNA, 25 bp, Homo sapien
cagaggaagacgatatttataaatg

SEQ ID NO: 1802459 - DNA, 25 bp, Homo sapien
ttctcagactggatggatgtgtggc

SEQ ID NO: 1802460 - DNA, 25 bp, Homo sapien
gattctgaggcttcacaaaaagcag

SEQ ID NO: 1802461 - DNA, 25 bp, Homo sapien
gaaagactgcatgactacgtgaaca

SEQ ID NO: 1802462 - DNA, 25 bp, Homo sapien
ggcagcaggtgcagtctacatccag

SEQ ID NO: 1802463 - DNA, 25 bp, Homo sapien
caccgaactatcgagccaagtcaga

SEQ ID NO: 1802464 - DNA, 25 bp, Homo sapien
tgtcaaacgggaagggcacacatgg

SEQ ID NO: 1802465 - DNA, 25 bp, Homo sapien
gtcaaacgggaagggcacacatggc

SEQ ID NO: 1802466 - DNA, 25 bp, Homo sapien
ctgtcaaacgggaagggcacacatg

SEQ ID NO: 1802467 - DNA, 25 bp, Homo sapien
ggaagaggcaaacacgacatcgaga

SEQ ID NO: 1802468 - DNA, 25 bp, Homo sapien
gaggcaaacacgacatcgagatcgc

SEQ ID NO: 1802469 - DNA, 25 bp, Homo sapien
gaagaggcaaacacgacatcgagat

SEQ ID NO: 1802470 - DNA, 25 bp, Homo sapien
gcaaacacgacatcgagatcgccgt

SEQ ID NO: 1802471 - DNA, 25 bp, Homo sapien
tgtaccaagagaagaggtactggca

SEQ ID NO: 1802472 - DNA, 25 bp, Homo sapien
cagacttggtcttatcctttccgca

SEQ ID NO: 1802473 - DNA, 25 bp, Homo sapien
actggcagtcggcagtctcgtgact

SEQ ID NO: 1802474 - DNA, 25 bp, Homo sapien
gacacacggctgaggtgtaccaaga

SEQ ID NO: 1802475 - DNA, 25 bp, Homo sapien
acaggcctgaacagcacaggacaaa

SEQ ID NO: 1802476 - DNA, 25 bp, Homo sapien
gtgcagctgaggatccctaagtaca

SEQ ID NO: 1802477 - DNA, 25 bp, Homo sapien
cattttgtaatgacgtcaccggaac

SEQ ID NO: 1802478 - DNA, 25 bp, Homo sapien
aacttccagtttcaatcctttcatt

SEQ ID NO: 1802479 - DNA, 25 bp, Homo sapien
tccccgggattctcgctgtcaaagc

SEQ ID NO: 1802480 - DNA, 25 bp, Homo sapien
cgtcgtccccgggattctcgctgtc

SEQ ID NO: 1802481 - DNA, 25 bp, Homo sapien
ctgcccgtcgtccccgggattctcg

SEQ ID NO: 1802482 - DNA, 25 bp, Homo sapien
gggattctcgctgtcaaagcccacc

SEQ ID NO: 1802483 - DNA, 25 bp, Homo sapien
agcaggctgagcaccgcgccgactg

SEQ ID NO: 1802484 - DNA, 25 bp, Homo sapien
gcaggctgagcaccgcgccgactgc

SEQ ID NO: 1802485 - DNA, 25 bp, Homo sapien
ggtcagcttacttatcactgtttcc

SEQ ID NO: 1802486 - DNA, 25 bp, Homo sapien
ctttgagtatttgtaggacacgttg

SEQ ID NO: 1802487 - DNA, 25 bp, Homo sapien
cctacagcaagtggtcagcttactt

SEQ ID NO: 1802488 - DNA, 25 bp, Homo sapien
cacgttggaacttctcctacagcaa

SEQ ID NO: 1802489 - DNA, 25 bp, Homo sapien
gacgagggctggcaacaccttcctg

SEQ ID NO: 1802490 - DNA, 25 bp, Homo sapien
ctggcacgagctggggaagaactgg

SEQ ID NO: 1802491 - DNA, 25 bp, Homo sapien
acgagggctggcaacaccttcctgt

SEQ ID NO: 1802492 - DNA, 25 bp, Homo sapien
tcgtcatggaaggacaccagcttgg

SEQ ID NO: 1802493 - DNA, 25 bp, Homo sapien
cactgacttggtggtaatatggccg

SEQ ID NO: 1802494 - DNA, 25 bp, Homo sapien
tctgtgcgtttctcactgggtggga

SEQ ID NO: 1802495 - DNA, 25 bp, Homo sapien
aagaggtcctcgtcgctgtcgtcat

SEQ ID NO: 1802496 - DNA, 25 bp, Homo sapien
tctgttttgagatgcgtccggcctt

SEQ ID NO: 1802497 - DNA, 25 bp, Homo sapien
taccctatcgggactaaagcagcaa

SEQ ID NO: 1802498 - DNA, 25 bp, Homo sapien
gatgagacctataccccaaatctgg

SEQ ID NO: 1802499 - DNA, 25 bp, Homo sapien
gacaaatgtgctctgtacgcccagg

SEQ ID NO: 1802500 - DNA, 25 bp, Homo sapien
gaaagtgctgcctcataaagggtca

SEQ ID NO: 1802501 - DNA, 25 bp, Homo sapien
agagggctccccatggtcttagcag

SEQ ID NO: 1802502 - DNA, 25 bp, Homo sapien
tgacagcgacattagcaggcagcca

SEQ ID NO: 1802503 - DNA, 25 bp, Homo sapien
caaagttaacacctacgaccaggag

SEQ ID NO: 1802504 - DNA, 25 bp, Homo sapien
tgtcaacaccgaaacagcactaagg

SEQ ID NO: 1802505 - DNA, 25 bp, Homo sapien
tttgcagttagacccaagggccctc

SEQ ID NO: 1802506 - DNA, 25 bp, Homo sapien
aatttcccagtggatggtcacaggc

SEQ ID NO: 1802507 - DNA, 25 bp, Homo sapien
taattgttcctgaagagctgagtcc

SEQ ID NO: 1802508 - DNA, 25 bp, Homo sapien
cgttcaatggctccagtatttcagc

SEQ ID NO: 1802509 - DNA, 25 bp, Homo sapien
tgggaggatagtgtaggaacaggtc

SEQ ID NO: 1802510 - DNA, 25 bp, Homo sapien
aacaggtcagaagtgtccgttcaat

SEQ ID NO: 1802511 - DNA, 25 bp, Homo sapien
ctgcatcaatgctaaggttaacttg

SEQ ID NO: 1802512 - DNA, 25 bp, Homo sapien
caggaaagtgacttcaagcttccag

SEQ ID NO: 1802513 - DNA, 25 bp, Homo sapien
cttcaagcttccagagacggcgctg

SEQ ID NO: 1802514 - DNA, 25 bp, Homo sapien
acacaggaaagtgacttcaagcttc

SEQ ID NO: 1802515 - DNA, 25 bp, Homo sapien
agcttccagagacggcgctgcagga

SEQ ID NO: 1802516 - DNA, 25 bp, Homo sapien
ctggggctgcgcgcggcacttgcgg

SEQ ID NO: 1802517 - DNA, 25 bp, Homo sapien
actggggctgcgcgcggcacttgcg

SEQ ID NO: 1802518 - DNA, 25 bp, Homo sapien
aaaatttgatgcagaaaatccactc

SEQ ID NO: 1802519 - DNA, 25 bp, Homo sapien
gaaaatttgatgcagaaaatccact

SEQ ID NO: 1802520 - DNA, 25 bp, Homo sapien
tgaaaatttgatgcagaaaatccac

SEQ ID NO: 1802521 - DNA, 25 bp, Homo sapien
cagcacacagggcagaccagtcctg

SEQ ID NO: 1802522 - DNA, 25 bp, Homo sapien
ccccaactctgggtgctcaatggac

SEQ ID NO: 1802523 - DNA, 25 bp, Homo sapien
ggtgctcaatggactcaggcctcct

SEQ ID NO: 1802524 - DNA, 25 bp, Homo sapien
aactgagaacaagccgttgccacca

SEQ ID NO: 1802525 - DNA, 25 bp, Homo sapien
gggatgaccagacatcccaggcaat

SEQ ID NO: 1802526 - DNA, 25 bp, Homo sapien
gtgcccacaaccctgacacgagtgt

SEQ ID NO: 1802527 - DNA, 25 bp, Homo sapien
ttgtgcccacaaccctgacacgagt

SEQ ID NO: 1802528 - DNA, 25 bp, Homo sapien
gccctgttgtgcccacaaccctgac

SEQ ID NO: 1802529 - DNA, 25 bp, Homo sapien
tgttgtgcccacaaccctgacacga

SEQ ID NO: 1802530 - DNA, 25 bp, Homo sapien
gctgccacccagaaggctgagcatg

SEQ ID NO: 1802531 - DNA, 25 bp, Homo sapien
caagggggctgccacccagaaggct

SEQ ID NO: 1802532 - DNA, 25 bp, Homo sapien
gggctgccacccagaaggctgagca

SEQ ID NO: 1802533 - DNA, 25 bp, Homo sapien
tgccacccagaaggctgagcatgcc

SEQ ID NO: 1802534 - DNA, 25 bp, Homo sapien
acatctggaaggcaaccaagtagaa

SEQ ID NO: 1802535 - DNA, 25 bp, Homo sapien
caggtgcaatgtctccctcagagat

SEQ ID NO: 1802536 - DNA, 25 bp, Homo sapien
gtctccctcagagatctttgaaaag

SEQ ID NO: 1802537 - DNA, 25 bp, Homo sapien
gaaggcaaccaagtagaaataatct

SEQ ID NO: 1802538 - DNA, 25 bp, Homo sapien
agctgagggcgctctggttccagtc

SEQ ID NO: 1802539 - DNA, 25 bp, Homo sapien
ggcactgtatagttcagctcctccg

SEQ ID NO: 1802540 - DNA, 25 bp, Homo sapien
cagccgacagcaggcataagatgag

SEQ ID NO: 1802541 - DNA, 25 bp, Homo sapien
gtccacttcatagcgcctgcactgg

SEQ ID NO: 1802542 - DNA, 25 bp, Homo sapien
cggccttgggctgtcattaaacgaa

SEQ ID NO: 1802543 - DNA, 25 bp, Homo sapien
tatgccgaacatactgggtggatgt

SEQ ID NO: 1802544 - DNA, 25 bp, Homo sapien
gcatcacacccagtgccagaataga

SEQ ID NO: 1802545 - DNA, 25 bp, Homo sapien
ccagaatagagggagtatgccgaac

SEQ ID NO: 1802546 - DNA, 25 bp, Homo sapien
tcccagttcagcgttcagaagctcc

SEQ ID NO: 1802547 - DNA, 25 bp, Homo sapien
agctccatttgcctataccccccaa

SEQ ID NO: 1802548 - DNA, 25 bp, Homo sapien
aaggctcccagttcagcgttcagaa

SEQ ID NO: 1802549 - DNA, 25 bp, Homo sapien
tctcttacatcttgtcttcccttca

SEQ ID NO: 1802550 - DNA, 25 bp, Homo sapien
tacatcttggggttattggaagccc

SEQ ID NO: 1802551 - DNA, 25 bp, Homo sapien
cagctgccacggacaggcaagctgt

SEQ ID NO: 1802552 - DNA, 25 bp, Homo sapien
acttctgctgcaccccaaggtcccc

SEQ ID NO: 1802553 - DNA, 25 bp, Homo sapien
tgttctaaagcactctcgggcccct

SEQ ID NO: 1802554 - DNA, 25 bp, Homo sapien
tcttgttgggagagtcaaaagccag

SEQ ID NO: 1802555 - DNA, 25 bp, Homo sapien
ggacctcatgatcttagcaccagag

SEQ ID NO: 1802556 - DNA, 25 bp, Homo sapien
cttgttgggagagtcaaaagccagg

SEQ ID NO: 1802557 - DNA, 25 bp, Homo sapien
tcttagcaccagaggagatcctctt

SEQ ID NO: 1802558 - DNA, 25 bp, Homo sapien
gttcatcaaactcggtatccctggg

SEQ ID NO: 1802559 - DNA, 25 bp, Homo sapien
gaactgcgcgggtccacttacagat

SEQ ID NO: 1802560 - DNA, 25 bp, Homo sapien
ccagtcataccacggcaagaggagg

SEQ ID NO: 1802561 - DNA, 25 bp, Homo sapien
tgcaactaaccctcgaacaacatgg

SEQ ID NO: 1802562 - DNA, 25 bp, Homo sapien
agaggtccagcttccaggagtcagc

SEQ ID NO: 1802563 - DNA, 25 bp, Homo sapien
caggactgaaagaggtccagcttcc

SEQ ID NO: 1802564 - DNA, 25 bp, Homo sapien
aagtagccaacaccgagagagccaa

SEQ ID NO: 1802565 - DNA, 25 bp, Homo sapien
gagccaaacaagaagcccgcattca

SEQ ID NO: 1802566 - DNA, 25 bp, Homo sapien
cacagttcccaggagacacagctta

SEQ ID NO: 1802567 - DNA, 25 bp, Homo sapien
atgagcacgcccgacaccgcgttga

SEQ ID NO: 1802568 - DNA, 25 bp, Homo sapien
cagcatggacatgtagttgggcgag

SEQ ID NO: 1802569 - DNA, 25 bp, Homo sapien
tgtagttgggcgagaaggccatgag

SEQ ID NO: 1802570 - DNA, 25 bp, Homo sapien
gccccaccgtgaaggccatctggta

SEQ ID NO: 1802571 - DNA, 25 bp, Homo sapien
accgttcttctggagcccgagccaa

SEQ ID NO: 1802572 - DNA, 25 bp, Homo sapien
gagcccgagccaacaaattctgtga

SEQ ID NO: 1802573 - DNA, 25 bp, Homo sapien
gccatctggtacatgatcgccaccg

SEQ ID NO: 1802574 - DNA, 25 bp, Homo sapien
tgcgaagcactcacagctaatatga

SEQ ID NO: 1802575 - DNA, 25 bp, Homo sapien
taacaccttgtttggactgattctg

SEQ ID NO: 1802576 - DNA, 25 bp, Homo sapien
gagcatctgacttcatgccagcacc

SEQ ID NO: 1802577 - DNA, 25 bp, Homo sapien
taatggctcagggtacacagtcccc

SEQ ID NO: 1802578 - DNA, 25 bp, Homo sapien
atttgcctttctgctggagagatcc

SEQ ID NO: 1802579 - DNA, 25 bp, Homo sapien
tttaaatcagcaggaggcaacttcc

SEQ ID NO: 1802580 - DNA, 25 bp, Homo sapien
tttttgtgataacagccaccgaggg

SEQ ID NO: 1802581 - DNA, 25 bp, Homo sapien
cgatgtggtccattatctttattgc

SEQ ID NO: 1802582 - DNA, 25 bp, Homo sapien
ccattcttttgagcgatgtggtcca

SEQ ID NO: 1802583 - DNA, 25 bp, Homo sapien
gattcagtgatgtgagatacccctt

SEQ ID NO: 1802584 - DNA, 25 bp, Homo sapien
tgagataccccttcctagatttcac

SEQ ID NO: 1802585 - DNA, 25 bp, Homo sapien
gccccagacgaatctgcaccagaac

SEQ ID NO: 1802586 - DNA, 25 bp, Homo sapien
ggtgagccttgccaccaccgtgctt

SEQ ID NO: 1802587 - DNA, 25 bp, Homo sapien
gcggcgtgcggaacaggtctgcaaa

SEQ ID NO: 1802588 - DNA, 25 bp, Homo sapien
gcaaatgaagggctcagcttttcgg

SEQ ID NO: 1802589 - DNA, 25 bp, Homo sapien
tgacatcctcttcgagggaaagcat

SEQ ID NO: 1802590 - DNA, 25 bp, Homo sapien
gatgaaggtgcgcttcctcaggcgc

SEQ ID NO: 1802591 - DNA, 25 bp, Homo sapien
caggatgagcccctgatagagcaca

SEQ ID NO: 1802592 - DNA, 25 bp, Homo sapien
gaaatccaggtagaggttcccgctg

SEQ ID NO: 1802593 - DNA, 25 bp, Homo sapien
agaggttcccgctggtggcgcccat

SEQ ID NO: 1802594 - DNA, 25 bp, Homo sapien
tggcgcccatgtgcaggatgagccc

SEQ ID NO: 1802595 - DNA, 25 bp, Homo sapien
cggcccacgcggtcaatggtgatga

SEQ ID NO: 1802596 - DNA, 25 bp, Homo sapien
tgcccccgccaacaaatttgacatg

SEQ ID NO: 1802597 - DNA, 25 bp, Homo sapien
aaaaatcatgacgaggcaggctgcc

SEQ ID NO: 1802598 - DNA, 25 bp, Homo sapien
tgatgagggctatgaaggcccccgg

SEQ ID NO: 1802599 - DNA, 25 bp, Homo sapien
gcaatggtgattcccattcggccaa

SEQ ID NO: 1802600 - DNA, 25 bp, Homo sapien
gtattgcaatggtgattcccattcg

SEQ ID NO: 1802601 - DNA, 25 bp, Homo sapien
tcaccaggcagatcatttgtattgc

SEQ ID NO: 1802602 - DNA, 25 bp, Homo sapien
ccaggcagatcatttgtattgcaat

SEQ ID NO: 1802603 - DNA, 25 bp, Homo sapien
aaattcagatgtttgcggtacttca

SEQ ID NO: 1802604 - DNA, 25 bp, Homo sapien
cagtccaactctgaaactgcctgga

SEQ ID NO: 1802605 - DNA, 25 bp, Homo sapien
gaggcagggtcagaatggtttacat

SEQ ID NO: 1802606 - DNA, 25 bp, Homo sapien
tctacagcatgtagtgagtctggct

SEQ ID NO: 1802607 - DNA, 25 bp, Homo sapien
actatgaagggggtgattatcccac

SEQ ID NO: 1802608 - DNA, 25 bp, Homo sapien
gaggaacacaccatcactccgaggt

SEQ ID NO: 1802609 - DNA, 25 bp, Homo sapien
caaacaaaatgaggggcaaggcttg

SEQ ID NO: 1802610 - DNA, 25 bp, Homo sapien
tatcccacctatgtcacacagggag

SEQ ID NO: 1802611 - DNA, 25 bp, Homo sapien
ctcaacaaatacgactgagtactca

SEQ ID NO: 1802612 - DNA, 25 bp, Homo sapien
aacaaatacgactgagtactcacac

SEQ ID NO: 1802613 - DNA, 25 bp, Homo sapien
aaatacgactgagtactcacactca

SEQ ID NO: 1802614 - DNA, 25 bp, Homo sapien
caacaaatacgactgagtactcaca

SEQ ID NO: 1802615 - DNA, 25 bp, Homo sapien
ggaagaagtagcgtcactcccgcgg

SEQ ID NO: 1802616 - DNA, 25 bp, Homo sapien
ctggaagaagtagcgtcactcccgc

SEQ ID NO: 1802617 - DNA, 25 bp, Homo sapien
aagaagtagcgtcactcccgcggca

SEQ ID NO: 1802618 - DNA, 25 bp, Homo sapien
agtagcgtcactcccgcggcaagca

SEQ ID NO: 1802619 - DNA, 25 bp, Homo sapien
aaggttctcggcgtccttcatggtc

SEQ ID NO: 1802620 - DNA, 25 bp, Homo sapien
ctcccaaggttctcggcgtccttca

SEQ ID NO: 1802621 - DNA, 25 bp, Homo sapien
ggttctcggcgtccttcatggtctc

SEQ ID NO: 1802622 - DNA, 25 bp, Homo sapien
ttcatggtctctggcaaagcgaccc

SEQ ID NO: 1802623 - DNA, 25 bp, Homo sapien
tactggtatccagacacaaccattc

SEQ ID NO: 1802624 - DNA, 25 bp, Homo sapien
tacaactagtgagctacaaatggtt

SEQ ID NO: 1802625 - DNA, 25 bp, Homo sapien
gaactgttgcaaagttgtacacaga

SEQ ID NO: 1802626 - DNA, 25 bp, Homo sapien
cctgtggccccattcgagcttatag

SEQ ID NO: 1802627 - DNA, 25 bp, Homo sapien
atcgtgttttctttgggctttgctt

SEQ ID NO: 1802628 - DNA, 25 bp, Homo sapien
aatcgtgttttctttgggctttgct

SEQ ID NO: 1802629 - DNA, 25 bp, Homo sapien
tcaggtgcccgagggttctgaggtt

SEQ ID NO: 1802630 - DNA, 25 bp, Homo sapien
caggtgcccgagggttctgaggttt

SEQ ID NO: 1802631 - DNA, 25 bp, Homo sapien
gaaggcgtctaggaatttctgcaga

SEQ ID NO: 1802632 - DNA, 25 bp, Homo sapien
aacacgacatcgccgcaaaacatct

SEQ ID NO: 1802633 - DNA, 25 bp, Homo sapien
agaatacagagaagtgaaggcgtct

SEQ ID NO: 1802634 - DNA, 25 bp, Homo sapien
gaagtgaaggcgtctaggaatttct

SEQ ID NO: 1802635 - DNA, 25 bp, Homo sapien
gctttccctagatcgaatgcacagg

SEQ ID NO: 1802636 - DNA, 25 bp, Homo sapien
taagtacccgataccaatagcacca

SEQ ID NO: 1802637 - DNA, 25 bp, Homo sapien
tactgatcttcaaacgcctttagat

SEQ ID NO: 1802638 - DNA, 25 bp, Homo sapien
cacaggtggaagatagccagggctt

SEQ ID NO: 1802639 - DNA, 25 bp, Homo sapien
cttctagaatcaccaaggagaacca

SEQ ID NO: 1802640 - DNA, 25 bp, Homo sapien
tgatatctcatggttggcacaggca

SEQ ID NO: 1802641 - DNA, 25 bp, Homo sapien
gacatggtttgtgggcagagtttcc

SEQ ID NO: 1802642 - DNA, 25 bp, Homo sapien
cttccctaaaatggccatggtgctt

SEQ ID NO: 1802643 - DNA, 25 bp, Homo sapien
ccgtgatctcaagtccttgtggcca

SEQ ID NO: 1802644 - DNA, 25 bp, Homo sapien
cctgatatactctgaagactggcta

SEQ ID NO: 1802645 - DNA, 25 bp, Homo sapien
tcagctagatcaggccagaagtgtc

SEQ ID NO: 1802646 - DNA, 25 bp, Homo sapien
gaagtgtctataatacaaccacgtg

SEQ ID NO: 1802647 - DNA, 25 bp, Homo sapien
ttagcagattccacccactcttttt

SEQ ID NO: 1802648 - DNA, 25 bp, Homo sapien
tcaagcctttgagcagggctagggc

SEQ ID NO: 1802649 - DNA, 25 bp, Homo sapien
cagacaatatctctgtaccacttgt

SEQ ID NO: 1802650 - DNA, 25 bp, Homo sapien
tgataaaatgcaacgcccagacaat

SEQ ID NO: 1802651 - DNA, 25 bp, Homo sapien
tctcactggaatattgctgcagacg

SEQ ID NO: 1802652 - DNA, 25 bp, Homo sapien
gtttcccgtgaacaccatttctcac

SEQ ID NO: 1802653 - DNA, 25 bp, Homo sapien
tattgctgcagacgtttaaaatgcc

SEQ ID NO: 1802654 - DNA, 25 bp, Homo sapien
acattgccatttagctgtcctgagg

SEQ ID NO: 1802655 - DNA, 25 bp, Homo sapien
gaggactctgccacagagtgcagca

SEQ ID NO: 1802656 - DNA, 25 bp, Homo sapien
catagcccttttcctgtgacaccaa

SEQ ID NO: 1802657 - DNA, 25 bp, Homo sapien
cagcatgggagtagaggacactatc

SEQ ID NO: 1802658 - DNA, 25 bp, Homo sapien
gagcttctcatcaaaagacacaggc

SEQ ID NO: 1802659 - DNA, 25 bp, Homo sapien
aaaacagtttgactccacttcacat

SEQ ID NO: 1802660 - DNA, 25 bp, Homo sapien
ccaaaacagtttgactccacttcac

SEQ ID NO: 1802661 - DNA, 25 bp, Homo sapien
ctccacttcacatcatcagacaaag

SEQ ID NO: 1802662 - DNA, 25 bp, Homo sapien
ccacttcacatcatcagacaaagtg

SEQ ID NO: 1802663 - DNA, 25 bp, Homo sapien
agaatagtataaactcctctgtgca

SEQ ID NO: 1802664 - DNA, 25 bp, Homo sapien
agtataaactcctctgtgcaaataa

SEQ ID NO: 1802665 - DNA, 25 bp, Homo sapien
ggtacaaagaggagtgctagtacca

SEQ ID NO: 1802666 - DNA, 25 bp, Homo sapien
gaggagtgctagtaccattccttct

SEQ ID NO: 1802667 - DNA, 25 bp, Homo sapien
acgcagaatttcatgtgcagacaaa

SEQ ID NO: 1802668 - DNA, 25 bp, Homo sapien
aacgcagaatttcatgtgcagacaa

SEQ ID NO: 1802669 - DNA, 25 bp, Homo sapien
cgcagaatttcatgtgcagacaaac

SEQ ID NO: 1802670 - DNA, 25 bp, Homo sapien
ctttcaggcgtgcttggcttggttg

SEQ ID NO: 1802671 - DNA, 25 bp, Homo sapien
ttggttgctggaggtctggtgctgt

SEQ ID NO: 1802672 - DNA, 25 bp, Homo sapien
tcttaatgtgatattcatctgtttg

SEQ ID NO: 1802673 - DNA, 25 bp, Homo sapien
tggctttcaggcgtgcttggcttgg

SEQ ID NO: 1802674 - DNA, 25 bp, Homo sapien
gaaccaaatttcactggtgtccatg

SEQ ID NO: 1802675 - DNA, 25 bp, Homo sapien
ggaaccaaatttcactggtgtccat

SEQ ID NO: 1802676 - DNA, 25 bp, Homo sapien
cggaaccaaatttcactggtgtcca

SEQ ID NO: 1802677 - DNA, 25 bp, Homo sapien
aagctcagtgtccatcatggtccag

SEQ ID NO: 1802678 - DNA, 25 bp, Homo sapien
caaagctcagtgtccatcatggtcc

SEQ ID NO: 1802679 - DNA, 25 bp, Homo sapien
ctcagtgtccatcatggtccagggg

SEQ ID NO: 1802680 - DNA, 25 bp, Homo sapien
ccaaagctcagtgtccatcatggtc

SEQ ID NO: 1802681 - DNA, 25 bp, Homo sapien
ttacagtcaaagtgggtagttctcg

SEQ ID NO: 1802682 - DNA, 25 bp, Homo sapien
cagtcaaagtgggtagttctcggca

SEQ ID NO: 1802683 - DNA, 25 bp, Homo sapien
tacagtcaaagtgggtagttctcgg

SEQ ID NO: 1802684 - DNA, 25 bp, Homo sapien
acagtcaaagtgggtagttctcggc

SEQ ID NO: 1802685 - DNA, 25 bp, Homo sapien
tgctgactgcattactatgatctca

SEQ ID NO: 1802686 - DNA, 25 bp, Homo sapien
tactatgatctcagagacctaacat

SEQ ID NO: 1802687 - DNA, 25 bp, Homo sapien
caggtaggtttcattgctgactgca

SEQ ID NO: 1802688 - DNA, 25 bp, Homo sapien
tctctaattaaccaggtaggtttca

SEQ ID NO: 1802689 - DNA, 25 bp, Homo sapien
tgaggagactcacaacatggaaaca

SEQ ID NO: 1802690 - DNA, 25 bp, Homo sapien
gctagaagaagcacctgctgcggcc

SEQ ID NO: 1802691 - DNA, 25 bp, Homo sapien
gatttgtcccgtcagacactcggca

SEQ ID NO: 1802692 - DNA, 25 bp, Homo sapien
tatttctcggtttcgcacaaagcca

SEQ ID NO: 1802693 - DNA, 25 bp, Homo sapien
ctcccgcagcctctggaattctgtc

SEQ ID NO: 1802694 - DNA, 25 bp, Homo sapien
ccagaccagaatcctcccgcagcct

SEQ ID NO: 1802695 - DNA, 25 bp, Homo sapien
cagaccagaatcctcccgcagcctc

SEQ ID NO: 1802696 - DNA, 25 bp, Homo sapien
cacccctcagatctttcaatctcct

SEQ ID NO: 1802697 - DNA, 25 bp, Homo sapien
ccccacccctcagatctttcaatct

SEQ ID NO: 1802698 - DNA, 25 bp, Homo sapien
cccacccctcagatctttcaatctc

SEQ ID NO: 1802699 - DNA, 25 bp, Homo sapien
ccacccctcagatctttcaatctcc

SEQ ID NO: 1802700 - DNA, 25 bp, Homo sapien
aaaggcattctcagaccaagctggt

SEQ ID NO: 1802701 - DNA, 25 bp, Homo sapien
gtccacaccggctccctgcagtcca

SEQ ID NO: 1802702 - DNA, 25 bp, Homo sapien
aggcattctcagaccaagctggttt

SEQ ID NO: 1802703 - DNA, 25 bp, Homo sapien
ccaggctttgaccccaccgtccaca

SEQ ID NO: 1802704 - DNA, 25 bp, Homo sapien
tcccaccaccccacaggcctcccca

SEQ ID NO: 1802705 - DNA, 25 bp, Homo sapien
ccagcctgcctcccaccaccccaca

SEQ ID NO: 1802706 - DNA, 25 bp, Homo sapien
ctgcctcccaccaccccacaggcct

SEQ ID NO: 1802707 - DNA, 25 bp, Homo sapien
ccgctgaatcagctcccagcctgcc

SEQ ID NO: 1802708 - DNA, 25 bp, Homo sapien
catcagaaagctttttgccgtctcc

SEQ ID NO: 1802709 - DNA, 25 bp, Homo sapien
acatcagaaagctttttgccgtctc

SEQ ID NO: 1802710 - DNA, 25 bp, Homo sapien
tagctttgagggagagtcacaaata

SEQ ID NO: 1802711 - DNA, 25 bp, Homo sapien
cactcttgtgttaattagctttgag

SEQ ID NO: 1802712 - DNA, 25 bp, Homo sapien
tacagatactaatggtagggatacc

SEQ ID NO: 1802713 - DNA, 25 bp, Homo sapien
tggaactagatggaaatgacttctc

SEQ ID NO: 1802714 - DNA, 25 bp, Homo sapien
tcaagaccagttagacatcatcagc

SEQ ID NO: 1802715 - DNA, 25 bp, Homo sapien
aatttaccccggcattttctggctg

SEQ ID NO: 1802716 - DNA, 25 bp, Homo sapien
caaggtcattacttgtatccctggc

SEQ ID NO: 1802717 - DNA, 25 bp, Homo sapien
catgccactatcttgacacgattgt

SEQ ID NO: 1802718 - DNA, 25 bp, Homo sapien
tgttcaagacctccttctggcaagg

SEQ ID NO: 1802719 - DNA, 25 bp, Homo sapien
ccttggcttctgaacggccccaaag

SEQ ID NO: 1802720 - DNA, 25 bp, Homo sapien
gcagccacctggacatgagatagcc

SEQ ID NO: 1802721 - DNA, 25 bp, Homo sapien
agatagccacctggacacaagacac

SEQ ID NO: 1802722 - DNA, 25 bp, Homo sapien
ctggtatgagacaaccacctggaca

SEQ ID NO: 1802723 - DNA, 25 bp, Homo sapien
acctggacatgaggcagccacctgg

SEQ ID NO: 1802724 - DNA, 25 bp, Homo sapien
cctgaacatgagacaaccacctggt

SEQ ID NO: 1802725 - DNA, 25 bp, Homo sapien
gaacatgagacaaccacctggtatg

SEQ ID NO: 1802726 - DNA, 25 bp, Homo sapien
cagccaccgggtatgagaaaaccac

SEQ ID NO: 1802727 - DNA, 25 bp, Homo sapien
cctggtatgagacagccaccgggta

SEQ ID NO: 1802728 - DNA, 25 bp, Homo sapien
tgaaagacgatgacagcacggcgtt

SEQ ID NO: 1802729 - DNA, 25 bp, Homo sapien
gagatgttaaaacttcaagatgtga

SEQ ID NO: 1802730 - DNA, 25 bp, Homo sapien
tgttagtaaactgaaagacgatgac

SEQ ID NO: 1802731 - DNA, 25 bp, Homo sapien
cgtttgcgaactttaggagatgtta

SEQ ID NO: 1802732 - DNA, 25 bp, Homo sapien
tcatagttgaatgccttttcggtat

SEQ ID NO: 1802733 - DNA, 25 bp, Homo sapien
agaacagatcatgggttctctggtc

SEQ ID NO: 1802734 - DNA, 25 bp, Homo sapien
tatccagaatgagaacagatcatgg

SEQ ID NO: 1802735 - DNA, 25 bp, Homo sapien
tctggtcaggggtttgatgaagcca

SEQ ID NO: 1802736 - DNA, 25 bp, Homo sapien
tcttgaagtccaacccatctgtagc

SEQ ID NO: 1802737 - DNA, 25 bp, Homo sapien
tatcttcagccttacaggtgcacgg

SEQ ID NO: 1802738 - DNA, 25 bp, Homo sapien
caaaattgatcataccctggtgctc

SEQ ID NO: 1802739 - DNA, 25 bp, Homo sapien
gatgatacacagcaggacaaccagt

SEQ ID NO: 1802740 - DNA, 25 bp, Homo sapien
ccgcgcctcggagtgacccgcggac

SEQ ID NO: 1802741 - DNA, 25 bp, Homo sapien
ccctggcgctgtgccggccgcagcc

SEQ ID NO: 1802742 - DNA, 25 bp, Homo sapien
agccggcggcctctctttactccgc

SEQ ID NO: 1802743 - DNA, 25 bp, Homo sapien
gcgccacccgcctcactcgccctgg

SEQ ID NO: 1802744 - DNA, 25 bp, Homo sapien
ccgctgcagcgcctcgtcgaaggag

SEQ ID NO: 1802745 - DNA, 25 bp, Homo sapien
aaaaacacgcgcctctggaagcgcc

SEQ ID NO: 1802746 - DNA, 25 bp, Homo sapien
ttggcccgcggcaccagtagtggtc

SEQ ID NO: 1802747 - DNA, 25 bp, Homo sapien
agaccacgccgacgaagaggaaggc

SEQ ID NO: 1802748 - DNA, 25 bp, Homo sapien
agtgggtccgcgcagctgagagcgc

SEQ ID NO: 1802749 - DNA, 25 bp, Homo sapien
gtgggcctgggcgtagcgccagccg

SEQ ID NO: 1802750 - DNA, 25 bp, Homo sapien
tcgctgacgatggtggagtgggcct

SEQ ID NO: 1802751 - DNA, 25 bp, Homo sapien
gtggcggaggcgctgtcgttggccg

SEQ ID NO: 1802752 - DNA, 25 bp, Homo sapien
agcatcgtcctctcccgccggcttc

SEQ ID NO: 1802753 - DNA, 25 bp, Homo sapien
cggcttgtccgcctgggagccagca

SEQ ID NO: 1802754 - DNA, 25 bp, Homo sapien
tcacacgcggcttgtccgcctggga

SEQ ID NO: 1802755 - DNA, 25 bp, Homo sapien
ttgtccgcctgggagccagcatcgt

SEQ ID NO: 1802756 - DNA, 25 bp, Homo sapien
tgctgccttcaaacgttggttcgcc

SEQ ID NO: 1802757 - DNA, 25 bp, Homo sapien
ctggagaccataagcgaatccggaa

SEQ ID NO: 1802758 - DNA, 25 bp, Homo sapien
tgtccccttgcattttgagtaacca

SEQ ID NO: 1802759 - DNA, 25 bp, Homo sapien
tgagtaaccatttgggcaactggaa

SEQ ID NO: 1802760 - DNA, 25 bp, Homo sapien
ccctggatgggacgttctcgtgcac

SEQ ID NO: 1802761 - DNA, 25 bp, Homo sapien
gcgtctgcctgaaatagctgcccga

SEQ ID NO: 1802762 - DNA, 25 bp, Homo sapien
gaccctggcaggaacgaagtatccg

SEQ ID NO: 1802763 - DNA, 25 bp, Homo sapien
tagagacaactctgtcggcccaaag

SEQ ID NO: 1802764 - DNA, 25 bp, Homo sapien
gcaggggccagctgcgacctctgct

SEQ ID NO: 1802765 - DNA, 25 bp, Homo sapien
gctccgcttccaggtcacttccctc

SEQ ID NO: 1802766 - DNA, 25 bp, Homo sapien
cacgacagaagcgagactaggccca

SEQ ID NO: 1802767 - DNA, 25 bp, Homo sapien
cagaagcgagactaggcccagcagg

SEQ ID NO: 1802768 - DNA, 25 bp, Homo sapien
catccagcgttcagagccagctgca

SEQ ID NO: 1802769 - DNA, 25 bp, Homo sapien
cagctgcaggtggatctaagctggg

SEQ ID NO: 1802770 - DNA, 25 bp, Homo sapien
aggtggatctaagctgggcacacgc

SEQ ID NO: 1802771 - DNA, 25 bp, Homo sapien
tccagcgttcagagccagctgcagg

SEQ ID NO: 1802772 - DNA, 25 bp, Homo sapien
gagacagcagcggaagacactgagc

SEQ ID NO: 1802773 - DNA, 25 bp, Homo sapien
catttcaggcatggcccaaggcagg

SEQ ID NO: 1802774 - DNA, 25 bp, Homo sapien
gcttccaggatgacaagaacaccac

SEQ ID NO: 1802775 - DNA, 25 bp, Homo sapien
ttagtgcatttcaggcatggcccaa

SEQ ID NO: 1802776 - DNA, 25 bp, Homo sapien
tcaggcatggcccaaggcagggctt

SEQ ID NO: 1802777 - DNA, 25 bp, Homo sapien
gttgccaccaaagtctgtgtcctga

SEQ ID NO: 1802778 - DNA, 25 bp, Homo sapien
gccttgatgccatgcgcatgagtca

SEQ ID NO: 1802779 - DNA, 25 bp, Homo sapien
tatcttccccagaggtaagagctgg

SEQ ID NO: 1802780 - DNA, 25 bp, Homo sapien
ggctgggcctgtttatgcatcttcc

SEQ ID NO: 1802781 - DNA, 25 bp, Homo sapien
gctggtcaccttctaggaagccaaa

SEQ ID NO: 1802782 - DNA, 25 bp, Homo sapien
tagtgtctcccacgcaaggtgtcag

SEQ ID NO: 1802783 - DNA, 25 bp, Homo sapien
ggcatgggcattgtagacaaactta

SEQ ID NO: 1802784 - DNA, 25 bp, Homo sapien
ggaagccaaagaatatgactgcagg

SEQ ID NO: 1802785 - DNA, 25 bp, Homo sapien
tctagttaggtcatgaaatcagtgg

SEQ ID NO: 1802786 - DNA, 25 bp, Homo sapien
tcaggtgtccaattgctataaacag

SEQ ID NO: 1802787 - DNA, 25 bp, Homo sapien
tccatggccaaaagcgagtctaagt

SEQ ID NO: 1802788 - DNA, 25 bp, Homo sapien
gaatattatatgctatcaggtgtcc

SEQ ID NO: 1802789 - DNA, 25 bp, Homo sapien
ctgtctgctgcatagcctaaggtga

SEQ ID NO: 1802790 - DNA, 25 bp, Homo sapien
aaggtgaatgctccagtcaggaagc

SEQ ID NO: 1802791 - DNA, 25 bp, Homo sapien
ttgggtgaggtccagcatccacgca

SEQ ID NO: 1802792 - DNA, 25 bp, Homo sapien
cagcatccacgcattgacacagaca

SEQ ID NO: 1802793 - DNA, 25 bp, Homo sapien
accagaacaatattaggccagatat

SEQ ID NO: 1802794 - DNA, 25 bp, Homo sapien
ccatgagtcagagatggattaacca

SEQ ID NO: 1802795 - DNA, 25 bp, Homo sapien
ccagatacagccatgagtcagcaat

SEQ ID NO: 1802796 - DNA, 25 bp, Homo sapien
accagaacaatattaggccagatac

SEQ ID NO: 1802797 - DNA, 25 bp, Homo sapien
tgaatggtacagtcacaagaaccca

SEQ ID NO: 1802798 - DNA, 25 bp, Homo sapien
gaatggtacagtcacaagaacccac

SEQ ID NO: 1802799 - DNA, 25 bp, Homo sapien
gattaaactcagatcttcaattggc

SEQ ID NO: 1802800 - DNA, 25 bp, Homo sapien
caaggctctacccattttgaagcac

SEQ ID NO: 1802801 - DNA, 25 bp, Homo sapien
tattagctaattaattgctgtttgc

SEQ ID NO: 1802802 - DNA, 25 bp, Homo sapien
tcttcaattggctacaggatatggg

SEQ ID NO: 1802803 - DNA, 25 bp, Homo sapien
aaaggatccagcagaaactcacatg

SEQ ID NO: 1802804 - DNA, 25 bp, Homo sapien
gatccagcagaaactcacatgcaaa

SEQ ID NO: 1802805 - DNA, 25 bp, Homo sapien
gcagaaactcacatgcaaaggacag

SEQ ID NO: 1802806 - DNA, 25 bp, Homo sapien
atgaaaggatccagcagaaactcac

SEQ ID NO: 1802807 - DNA, 25 bp, Homo sapien
aagcttgggccctcctttgagtgag

SEQ ID NO: 1802808 - DNA, 25 bp, Homo sapien
tctaagctccttataggctgaacag

SEQ ID NO: 1802809 - DNA, 25 bp, Homo sapien
gaacctatgtctctaaacggtgaac

SEQ ID NO: 1802810 - DNA, 25 bp, Homo sapien
gcacagttccaaattgtagccagca

SEQ ID NO: 1802811 - DNA, 25 bp, Homo sapien
actttgcacagtatagaattctaga

SEQ ID NO: 1802812 - DNA, 25 bp, Homo sapien
tggatctgtggtgtctgccattaat

SEQ ID NO: 1802813 - DNA, 25 bp, Homo sapien
tttatgtagatctggatttctaacc

SEQ ID NO: 1802814 - DNA, 25 bp, Homo sapien
gtttgactacgatataactaggtat

SEQ ID NO: 1802815 - DNA, 25 bp, Homo sapien
tatcacttcatgagtagtatgagta

SEQ ID NO: 1802816 - DNA, 25 bp, Homo sapien
actgtatcacttcatgagtagtatg

SEQ ID NO: 1802817 - DNA, 25 bp, Homo sapien
aaataacactgtatcacttcatgag

SEQ ID NO: 1802818 - DNA, 25 bp, Homo sapien
cacttcatgagtagtatgagtacct

SEQ ID NO: 1802819 - DNA, 25 bp, Homo sapien
cgagggcttctagcatggcattgaa

SEQ ID NO: 1802820 - DNA, 25 bp, Homo sapien
catacttgggatactacgcacttgg

SEQ ID NO: 1802821 - DNA, 25 bp, Homo sapien
tgtgtattagccttgtaccctgcaa

SEQ ID NO: 1802822 - DNA, 25 bp, Homo sapien
acgttaagtagtgccagtcctctgg

SEQ ID NO: 1802823 - DNA, 25 bp, Homo sapien
agtgacgccaacaccaaggcaggat

SEQ ID NO: 1802824 - DNA, 25 bp, Homo sapien
cagggaagtttggtgcaaaggccac

SEQ ID NO: 1802825 - DNA, 25 bp, Homo sapien
caccttgcaggaagcggaagatcac

SEQ ID NO: 1802826 - DNA, 25 bp, Homo sapien
ggaagatcacaaacacagggaagtt

SEQ ID NO: 1802827 - DNA, 25 bp, Homo sapien
cacaatcctcctttgtttcgaacct

SEQ ID NO: 1802828 - DNA, 25 bp, Homo sapien
gaacatttgaatcacgattcccaca

SEQ ID NO: 1802829 - DNA, 25 bp, Homo sapien
gcagcgtgatggctaactggattcc

SEQ ID NO: 1802830 - DNA, 25 bp, Homo sapien
tgtttcgaacctactatttctgtca

SEQ ID NO: 1802831 - DNA, 25 bp, Homo sapien
gagtaatttgatgagaggtatttcc

SEQ ID NO: 1802832 - DNA, 25 bp, Homo sapien
gaggtatttcccattgcacttagca

SEQ ID NO: 1802833 - DNA, 25 bp, Homo sapien
ttcttccgagtaatcagccaacggg

SEQ ID NO: 1802834 - DNA, 25 bp, Homo sapien
caatgcgtctcaggatctgtaatgc

SEQ ID NO: 1802835 - DNA, 25 bp, Homo sapien
taatagagcttcataatcatttctt

SEQ ID NO: 1802836 - DNA, 25 bp, Homo sapien
ctaatagagcttcataatcatttct

SEQ ID NO: 1802837 - DNA, 25 bp, Homo sapien
tttcttctttaatatgtcctatgat

SEQ ID NO: 1802838 - DNA, 25 bp, Homo sapien
ctttaatatgtcctatgatttttcc

SEQ ID NO: 1802839 - DNA, 25 bp, Homo sapien
cctctgatgtcagcaatggaacagg

SEQ ID NO: 1802840 - DNA, 25 bp, Homo sapien
tagggcttctttgaatccaaccaca

SEQ ID NO: 1802841 - DNA, 25 bp, Homo sapien
ttcaaatccattctaaccttctccg

SEQ ID NO: 1802842 - DNA, 25 bp, Homo sapien
acttgttgggtctcctagggcttct

SEQ ID NO: 1802843 - DNA, 25 bp, Homo sapien
ctgctagtgctagctatctcttcaa

SEQ ID NO: 1802844 - DNA, 25 bp, Homo sapien
tttctccctgctagtgctagctatc

SEQ ID NO: 1802845 - DNA, 25 bp, Homo sapien
ggccagccagaaaccttggcaaatg

SEQ ID NO: 1802846 - DNA, 25 bp, Homo sapien
ccagaggccagccagaaaccttggc

SEQ ID NO: 1802847 - DNA, 25 bp, Homo sapien
ccagactaggtgtctaagctaatcc

SEQ ID NO: 1802848 - DNA, 25 bp, Homo sapien
aagctaatcctcgttctacattggg

SEQ ID NO: 1802849 - DNA, 25 bp, Homo sapien
tactgtttgtatgttcagagagcct

SEQ ID NO: 1802850 - DNA, 25 bp, Homo sapien
tcctaggagctcaagccacttcact

SEQ ID NO: 1802851 - DNA, 25 bp, Homo sapien
atacaaaaacgggaggaatgggcag

SEQ ID NO: 1802852 - DNA, 25 bp, Homo sapien
atcccatacaaaaacgggaggaatg

SEQ ID NO: 1802853 - DNA, 25 bp, Homo sapien
tattctctatgagtatatcccatac

SEQ ID NO: 1802854 - DNA, 25 bp, Homo sapien
tctctatgagtatatcccatacaaa

SEQ ID NO: 1802855 - DNA, 25 bp, Homo sapien
gctggtagaattggcaccattcatc

SEQ ID NO: 1802856 - DNA, 25 bp, Homo sapien
tgaaggctttgctggtagaattggc

SEQ ID NO: 1802857 - DNA, 25 bp, Homo sapien
ggctttgctggtagaattggcacca

SEQ ID NO: 1802858 - DNA, 25 bp, Homo sapien
aagatgaaggctttgctggtagaat

SEQ ID NO: 1802859 - DNA, 25 bp, Homo sapien
caattaaaggtgtaggagaacatcc

SEQ ID NO: 1802860 - DNA, 25 bp, Homo sapien
caatatctttcggtgttgaatgaca

SEQ ID NO: 1802861 - DNA, 25 bp, Homo sapien
tctgatgaggcatcccacaagtctg

SEQ ID NO: 1802862 - DNA, 25 bp, Homo sapien
tgctccaaggctgcaatctcattct

SEQ ID NO: 1802863 - DNA, 25 bp, Homo sapien
ccacagtagaatgggcaaggactca

SEQ ID NO: 1802864 - DNA, 25 bp, Homo sapien
ctcaggaccagatgaagaaccaggt

SEQ ID NO: 1802865 - DNA, 25 bp, Homo sapien
gatgtgtagggacaggacagaaacc

SEQ ID NO: 1802866 - DNA, 25 bp, Homo sapien
atcaggcaggaatgaagcagggcca

SEQ ID NO: 1802867 - DNA, 25 bp, Homo sapien
tactgtctccacgaaggagcgcgtt

SEQ ID NO: 1802868 - DNA, 25 bp, Homo sapien
tccacagtcgagaagcacagtaatt

SEQ ID NO: 1802869 - DNA, 25 bp, Homo sapien
tgggtccaaggtctagcaagcagta

SEQ ID NO: 1802870 - DNA, 25 bp, Homo sapien
gagcgcgttcacagagaggagtatt

SEQ ID NO: 1802871 - DNA, 25 bp, Homo sapien
tcctttgtgcggcttaaggcagaac

SEQ ID NO: 1802872 - DNA, 25 bp, Homo sapien
gagattctcttacgtatcagccata

SEQ ID NO: 1802873 - DNA, 25 bp, Homo sapien
tatcagccataagccagtagcacac

SEQ ID NO: 1802874 - DNA, 25 bp, Homo sapien
ggcagaacatttagagatagatgag

SEQ ID NO: 1802875 - DNA, 25 bp, Homo sapien
ttctggttcttgatttgcagaatat

SEQ ID NO: 1802876 - DNA, 25 bp, Homo sapien
tgatttgcagaatattttctgcaca

SEQ ID NO: 1802877 - DNA, 25 bp, Homo sapien
ttttctggttcttgatttgcagaat

SEQ ID NO: 1802878 - DNA, 25 bp, Homo sapien
ctggttcttgatttgcagaatattt

SEQ ID NO: 1802879 - DNA, 25 bp, Homo sapien
ccaaaaccactgtcatctcggaatt

SEQ ID NO: 1802880 - DNA, 25 bp, Homo sapien
agaaccaaaaccactgtcatctcgg

SEQ ID NO: 1802881 - DNA, 25 bp, Homo sapien
aaaccactgtcatctcggaatttcc

SEQ ID NO: 1802882 - DNA, 25 bp, Homo sapien
tgtcatctcggaatttcctccattt

SEQ ID NO: 1802883 - DNA, 25 bp, Homo sapien
ggacagccagggtgacattagcccc

SEQ ID NO: 1802884 - DNA, 25 bp, Homo sapien
tgacattagccccagtcactgagtt

SEQ ID NO: 1802885 - DNA, 25 bp, Homo sapien
agtcccgactacattctcaaagagc

SEQ ID NO: 1802886 - DNA, 25 bp, Homo sapien
gggcaagtcccgactacattctcaa

SEQ ID NO: 1802887 - DNA, 25 bp, Homo sapien
cactagattcctggtaggtgtctcc

SEQ ID NO: 1802888 - DNA, 25 bp, Homo sapien
actcgccagctgagggaactgttcc

SEQ ID NO: 1802889 - DNA, 25 bp, Homo sapien
gaaaccttgtcccactagattcctg

SEQ ID NO: 1802890 - DNA, 25 bp, Homo sapien
agaccacctgtccactcgccagctg

SEQ ID NO: 1802891 - DNA, 25 bp, Homo sapien
tctatgggaacatggtctttaacat

SEQ ID NO: 1802892 - DNA, 25 bp, Homo sapien
acactcctgcccagaacaattctta

SEQ ID NO: 1802893 - DNA, 25 bp, Homo sapien
gcccagaacaattcttatcatcact

SEQ ID NO: 1802894 - DNA, 25 bp, Homo sapien
ctatgggaacatggtctttaacatc

SEQ ID NO: 1802895 - DNA, 25 bp, Homo sapien
ctgtagtacttcggcaatttttgaa

SEQ ID NO: 1802896 - DNA, 25 bp, Homo sapien
tgtagtacttcggcaatttttgaaa

SEQ ID NO: 1802897 - DNA, 25 bp, Homo sapien
ctattcatgggaaaaggtatcgctc

SEQ ID NO: 1802898 - DNA, 25 bp, Homo sapien
tcaaggttaaactgcagaggttagt

SEQ ID NO: 1802899 - DNA, 25 bp, Homo sapien
tgggaaaaggtatcgctcaaggtta

SEQ ID NO: 1802900 - DNA, 25 bp, Homo sapien
ggtatcgctcaaggttaaactgcag

SEQ ID NO: 1802901 - DNA, 25 bp, Homo sapien
gcttgttgcctagtatcgacactct

SEQ ID NO: 1802902 - DNA, 25 bp, Homo sapien
tgatgttccgggtaacactatctgt

SEQ ID NO: 1802903 - DNA, 25 bp, Homo sapien
aacactatctgttcagaggcttgtt

SEQ ID NO: 1802904 - DNA, 25 bp, Homo sapien
cataccttttatgctgtctaaatgg

SEQ ID NO: 1802905 - DNA, 25 bp, Homo sapien
ccgtggtacggaccctttccatgat

SEQ ID NO: 1802906 - DNA, 25 bp, Homo sapien
tcagcaattctaagtgcacactttg

SEQ ID NO: 1802907 - DNA, 25 bp, Homo sapien
accatttacatgcactttatgatat

SEQ ID NO: 1802908 - DNA, 25 bp, Homo sapien
aaagtttccttgtgtctcagtgaag

SEQ ID NO: 1802909 - DNA, 25 bp, Homo sapien
cataagaataagtgtgcatttcctc

SEQ ID NO: 1802910 - DNA, 25 bp, Homo sapien
catttcctcatttggggagttctca

SEQ ID NO: 1802911 - DNA, 25 bp, Homo sapien
gatggattactaacttcctcatctg

SEQ ID NO: 1802912 - DNA, 25 bp, Homo sapien
gttctcaccagatctaaaaaggatg

SEQ ID NO: 1802913 - DNA, 25 bp, Homo sapien
ttagtaagatcaagagagctcctgg

SEQ ID NO: 1802914 - DNA, 25 bp, Homo sapien
gacaagtccttgatacaccactgcg

SEQ ID NO: 1802915 - DNA, 25 bp, Homo sapien
ccacgcccgagatgaaaaagtctat

SEQ ID NO: 1802916 - DNA, 25 bp, Homo sapien
tggtaagaacgcagtgacaaggcat

SEQ ID NO: 1802917 - DNA, 25 bp, Homo sapien
cgtaatgttgttgggtacaattctg

SEQ ID NO: 1802918 - DNA, 25 bp, Homo sapien
gttgggtacaattctgaatttacca

SEQ ID NO: 1802919 - DNA, 25 bp, Homo sapien
ggtacaattctgaatttaccaaata

SEQ ID NO: 1802920 - DNA, 25 bp, Homo sapien
ttgttgggtacaattctgaatttac

SEQ ID NO: 1802921 - DNA, 25 bp, Homo sapien
aaagatgatcagaggtagttctagc

SEQ ID NO: 1802922 - DNA, 25 bp, Homo sapien
gctgctagccgaaagagcagaaatg

SEQ ID NO: 1802923 - DNA, 25 bp, Homo sapien
cacacagacctgaacagagcgaaac

SEQ ID NO: 1802924 - DNA, 25 bp, Homo sapien
tagccacacggctgctagccgaaag

SEQ ID NO: 1802925 - DNA, 25 bp, Homo sapien
taactgaattggctctcaaaactga

SEQ ID NO: 1802926 - DNA, 25 bp, Homo sapien
gaatgtagatgaaggctcttaagaa

SEQ ID NO: 1802927 - DNA, 25 bp, Homo sapien
tcacagcatttaactcagaacccaa

SEQ ID NO: 1802928 - DNA, 25 bp, Homo sapien
gaacccaaagaatgctaattgaaca

SEQ ID NO: 1802929 - DNA, 25 bp, Homo sapien
tctttgctggacagtagcactttct

SEQ ID NO: 1802930 - DNA, 25 bp, Homo sapien
gtgtcttgtctcctggactactctg

SEQ ID NO: 1802931 - DNA, 25 bp, Homo sapien
ctttgctggacagtagcactttctg

SEQ ID NO: 1802932 - DNA, 25 bp, Homo sapien
tcttgtctcctggactactctgtct

SEQ ID NO: 1802933 - DNA, 25 bp, Homo sapien
aaattcggctgtctcccctcgcagt

SEQ ID NO: 1802934 - DNA, 25 bp, Homo sapien
agcagttatcacattctgttgtcgc

SEQ ID NO: 1802935 - DNA, 25 bp, Homo sapien
ttctgttgtcgctgagtttttagaa

SEQ ID NO: 1802936 - DNA, 25 bp, Homo sapien
tgtgggctgcagtcctgaaggtcat

SEQ ID NO: 1802937 - DNA, 25 bp, Homo sapien
tccacctcagggtgaaactgtccag

SEQ ID NO: 1802938 - DNA, 25 bp, Homo sapien
ttgcatatctaccatcagagggacg

SEQ ID NO: 1802939 - DNA, 25 bp, Homo sapien
tgtttctacaatgcaaggccagctc

SEQ ID NO: 1802940 - DNA, 25 bp, Homo sapien
ggatgcggcatcctcttgctttgaa

SEQ ID NO: 1802941 - DNA, 25 bp, Homo sapien
caatgtgcatggtttaaatgctccc

SEQ ID NO: 1802942 - DNA, 25 bp, Homo sapien
ctgtgcttgatgactggcttacaaa

SEQ ID NO: 1802943 - DNA, 25 bp, Homo sapien
caggagcacaggtaatactgaaggt

SEQ ID NO: 1802944 - DNA, 25 bp, Homo sapien
gctggtaaatgcctaacaaccctct

SEQ ID NO: 1802945 - DNA, 25 bp, Homo sapien
tgtcctggtgtctactccgggacca

SEQ ID NO: 1802946 - DNA, 25 bp, Homo sapien
cttacagtggaaagcttgtcctggt

SEQ ID NO: 1802947 - DNA, 25 bp, Homo sapien
tgtctctttgggctcctcactgtag

SEQ ID NO: 1802948 - DNA, 25 bp, Homo sapien
tgtagggatcaacccttcctccagt

SEQ ID NO: 1802949 - DNA, 25 bp, Homo sapien
ctgacactctcacttacctgcccct

SEQ ID NO: 1802950 - DNA, 25 bp, Homo sapien
gggagtcccctctgcgcccgctcac

SEQ ID NO: 1802951 - DNA, 25 bp, Homo sapien
agtcccctctgcgcccgctcactga

SEQ ID NO: 1802952 - DNA, 25 bp, Homo sapien
cactgacactctcacttacctgccc

SEQ ID NO: 1802953 - DNA, 25 bp, Homo sapien
tgactgagttccttcttagggtcca

SEQ ID NO: 1802954 - DNA, 25 bp, Homo sapien
aaggtgttaccgctccaggaagaca

SEQ ID NO: 1802955 - DNA, 25 bp, Homo sapien
tgagtagcaccacggcccctgtata

SEQ ID NO: 1802956 - DNA, 25 bp, Homo sapien
gaagccatcatgttgctcactggag

SEQ ID NO: 1802957 - DNA, 25 bp, Homo sapien
tctcccttaccacagcttcaaaggt

SEQ ID NO: 1802958 - DNA, 25 bp, Homo sapien
cactgtctctggcaaggcaataccc

SEQ ID NO: 1802959 - DNA, 25 bp, Homo sapien
caatacccttggtttcaggcaaaag

SEQ ID NO: 1802960 - DNA, 25 bp, Homo sapien
gcatcacaaggccaccacagatgga

SEQ ID NO: 1802961 - DNA, 25 bp, Homo sapien
ccaccacagatggatgccaggatac

SEQ ID NO: 1802962 - DNA, 25 bp, Homo sapien
gggtgcattgaattttgtacagtac

SEQ ID NO: 1802963 - DNA, 25 bp, Homo sapien
tagggtgcattgaattttgtacagt

SEQ ID NO: 1802964 - DNA, 25 bp, Homo sapien
agggtgcattgaattttgtacagta

SEQ ID NO: 1802965 - DNA, 25 bp, Homo sapien
ttagggtgcattgaattttgtacag

SEQ ID NO: 1802966 - DNA, 25 bp, Homo sapien
tcccagcccatttgtgtccacagag

SEQ ID NO: 1802967 - DNA, 25 bp, Homo sapien
taaggtctgactgcttgtgggatcg

SEQ ID NO: 1802968 - DNA, 25 bp, Homo sapien
catactcttatctagctctggaggg

SEQ ID NO: 1802969 - DNA, 25 bp, Homo sapien
aacagtcgcactgggagagtctgcc

SEQ ID NO: 1802970 - DNA, 25 bp, Homo sapien
ctggggttttcttattcctgccaca

SEQ ID NO: 1802971 - DNA, 25 bp, Homo sapien
tcttattcctgccacatttacagga

SEQ ID NO: 1802972 - DNA, 25 bp, Homo sapien
tcctgccacatttacaggaatgtgg

SEQ ID NO: 1802973 - DNA, 25 bp, Homo sapien
tcaaaggtgagagcgggaaactggg

SEQ ID NO: 1802974 - DNA, 25 bp, Homo sapien
tatacagtattacaacagcgcggca

SEQ ID NO: 1802975 - DNA, 25 bp, Homo sapien
gctttgcaaggaggatcagctcctg

SEQ ID NO: 1802976 - DNA, 25 bp, Homo sapien
cacacgtgcatctctgcaaggcaca

SEQ ID NO: 1802977 - DNA, 25 bp, Homo sapien
aaaatactctggatagattgaggtc

SEQ ID NO: 1802978 - DNA, 25 bp, Homo sapien
cacattgcgaaggtgtgcggaaacc

SEQ ID NO: 1802979 - DNA, 25 bp, Homo sapien
taggagcttagtcccttgaccagat

SEQ ID NO: 1802980 - DNA, 25 bp, Homo sapien
ttttcgcttttgaccacgggcacca

SEQ ID NO: 1802981 - DNA, 25 bp, Homo sapien
tctaggtgtccactaaaggagagcc

SEQ ID NO: 1802982 - DNA, 25 bp, Homo sapien
gcagagccgagaagtcctaggaagt

SEQ ID NO: 1802983 - DNA, 25 bp, Homo sapien
tcaccgactgcttgacttgagccca

SEQ ID NO: 1802984 - DNA, 25 bp, Homo sapien
cacgtgagtctaggattggtgccaa

SEQ ID NO: 1802985 - DNA, 25 bp, Homo sapien
catcagctaacgagggcttgacaca

SEQ ID NO: 1802986 - DNA, 25 bp, Homo sapien
gcagtggcttctgactaatgtggcc

SEQ ID NO: 1802987 - DNA, 25 bp, Homo sapien
gatttttggcacaacttgcgagtgt

SEQ ID NO: 1802988 - DNA, 25 bp, Homo sapien
tgactttaggactggcgcaaaacct

SEQ ID NO: 1802989 - DNA, 25 bp, Homo sapien
tgattccgtcgtcctagagaaacct

SEQ ID NO: 1802990 - DNA, 25 bp, Homo sapien
taagcacatttatatatgatctcag

SEQ ID NO: 1802991 - DNA, 25 bp, Homo sapien
atatggagcattgatagggtttggc

SEQ ID NO: 1802992 - DNA, 25 bp, Homo sapien
tcttgacttgtaatctctataatcc

SEQ ID NO: 1802993 - DNA, 25 bp, Homo sapien
tctctataatcctgataatccccat

SEQ ID NO: 1802994 - DNA, 25 bp, Homo sapien
ccagcagaggatggactgagagcaa

SEQ ID NO: 1802995 - DNA, 25 bp, Homo sapien
cagagccttttagctacacaacgag

SEQ ID NO: 1802996 - DNA, 25 bp, Homo sapien
gacccacctgaaatggtattgacag

SEQ ID NO: 1802997 - DNA, 25 bp, Homo sapien
catcctgcctgggagctagtcttcc

SEQ ID NO: 1802998 - DNA, 25 bp, Homo sapien
ggactgcagtcgtgcctctgactgt

SEQ ID NO: 1802999 - DNA, 25 bp, Homo sapien
ttccaaaccaggtaagaagtctgtg

SEQ ID NO: 1803000 - DNA, 25 bp, Homo sapien
tgcctctgactgttatcccggttcc

SEQ ID NO: 1803001 - DNA, 25 bp, Homo sapien
cacttggacactgggtagaaaagcc

SEQ ID NO: 1803002 - DNA, 25 bp, Homo sapien
caaagtcagatgggagtactgcaac

SEQ ID NO: 1803003 - DNA, 25 bp, Homo sapien
cccaaagtcagatgggagtactgca

SEQ ID NO: 1803004 - DNA, 25 bp, Homo sapien
ccaaagtcagatgggagtactgcaa

SEQ ID NO: 1803005 - DNA, 25 bp, Homo sapien
tgttacagcaaaacggagagggtgc

SEQ ID NO: 1803006 - DNA, 25 bp, Homo sapien
tcttgtgacgtatatccttttggaa

SEQ ID NO: 1803007 - DNA, 25 bp, Homo sapien
tgggtgcccctgcatattgtcccac

SEQ ID NO: 1803008 - DNA, 25 bp, Homo sapien
tcaaaggccctggttatgaccttgt

SEQ ID NO: 1803009 - DNA, 25 bp, Homo sapien
acggatcccaaagtcaggtgggagt

SEQ ID NO: 1803010 - DNA, 25 bp, Homo sapien
cggatcccaaagtcaggtgggagta

SEQ ID NO: 1803011 - DNA, 25 bp, Homo sapien
aacggatcccaaagtcaggtgggag

SEQ ID NO: 1803012 - DNA, 25 bp, Homo sapien
tgaggaacagcaactacaaggcaac

SEQ ID NO: 1803013 - DNA, 25 bp, Homo sapien
cacaagagactagggcaaaggacat

SEQ ID NO: 1803014 - DNA, 25 bp, Homo sapien
caggtgtccaagcatcaaaatggtg

SEQ ID NO: 1803015 - DNA, 25 bp, Homo sapien
aatggtgtccaagtcaagttactgc

SEQ ID NO: 1803016 - DNA, 25 bp, Homo sapien
ttcattgtaaaatgagttatctcag

SEQ ID NO: 1803017 - DNA, 25 bp, Homo sapien
tatgtgtctctttccaatgcagtaa

SEQ ID NO: 1803018 - DNA, 25 bp, Homo sapien
tgtaaaatgagttatctcagtgtcc

SEQ ID NO: 1803019 - DNA, 25 bp, Homo sapien
tctttccaatgcagtaagcttctcc

SEQ ID NO: 1803020 - DNA, 25 bp, Homo sapien
tctatgttagttccacctttcgcag

SEQ ID NO: 1803021 - DNA, 25 bp, Homo sapien
gtacatagagttagaaggctggcct

SEQ ID NO: 1803022 - DNA, 25 bp, Homo sapien
tgatacagcatcgagagacagcaat

SEQ ID NO: 1803023 - DNA, 25 bp, Homo sapien
tgcacgatggttttccatgggtaac

SEQ ID NO: 1803024 - DNA, 25 bp, Homo sapien
tggatcccaatgtcagatgggagta

SEQ ID NO: 1803025 - DNA, 25 bp, Homo sapien
atggatcccaatgtcagatgggagt

SEQ ID NO: 1803026 - DNA, 25 bp, Homo sapien
catggatcccaatgtcagatgggag

SEQ ID NO: 1803027 - DNA, 25 bp, Homo sapien
ggtgggagtactgcaacctgacacg

SEQ ID NO: 1803028 - DNA, 25 bp, Homo sapien
gggagtactgcaacctgacacgatg

SEQ ID NO: 1803029 - DNA, 25 bp, Homo sapien
acagatcccagtgtcaggtgggagt

SEQ ID NO: 1803030 - DNA, 25 bp, Homo sapien
aacagatcccagtgtcaggtgggag

SEQ ID NO: 1803031 - DNA, 25 bp, Homo sapien
agggatcccagtgtcaggtgggagt

SEQ ID NO: 1803032 - DNA, 25 bp, Homo sapien
gggatcccagtgtcaggtgggagta

SEQ ID NO: 1803033 - DNA, 25 bp, Homo sapien
gagggatcccagtgtcaggtgggag

SEQ ID NO: 1803034 - DNA, 25 bp, Homo sapien
ctacctcagtgtcccagccaaaatt

SEQ ID NO: 1803035 - DNA, 25 bp, Homo sapien
cttgttgtaaaacgggctacctcag

SEQ ID NO: 1803036 - DNA, 25 bp, Homo sapien
ttgtaaaacgggctacctcagtgtc

SEQ ID NO: 1803037 - DNA, 25 bp, Homo sapien
ctttccaagccagtaagcttttccg

SEQ ID NO: 1803038 - DNA, 25 bp, Homo sapien
tacacgcttcgatgctgggatgaaa

SEQ ID NO: 1803039 - DNA, 25 bp, Homo sapien
tgatgcagccgccttcaatggtaaa

SEQ ID NO: 1803040 - DNA, 25 bp, Homo sapien
gcaatgctcagacgcagaagggact

SEQ ID NO: 1803041 - DNA, 25 bp, Homo sapien
ggtaaacggatgctcgagtgttgcc

SEQ ID NO: 1803042 - DNA, 25 bp, Homo sapien
gctttgccccctaatgcatttttct

SEQ ID NO: 1803043 - DNA, 25 bp, Homo sapien
tagctgtccgacctcttcagatctc

SEQ ID NO: 1803044 - DNA, 25 bp, Homo sapien
tctctgctgctccgtagctgtccga

SEQ ID NO: 1803045 - DNA, 25 bp, Homo sapien
tcagatctcttagtccaccctgccg

SEQ ID NO: 1803046 - DNA, 25 bp, Homo sapien
gtgctctaaggctcttcagccctag

SEQ ID NO: 1803047 - DNA, 25 bp, Homo sapien
tttgaagggagtgatttctcagtat

SEQ ID NO: 1803048 - DNA, 25 bp, Homo sapien
tggccctgggtctatggagcagtac

SEQ ID NO: 1803049 - DNA, 25 bp, Homo sapien
ggagcagtacatgagctcccagtgc

SEQ ID NO: 1803050 - DNA, 25 bp, Homo sapien
cttgttgtaaaacgggctacctcag

SEQ ID NO: 1803051 - DNA, 25 bp, Homo sapien
ttgtaaaacgggctacctcagtgtc

SEQ ID NO: 1803052 - DNA, 25 bp, Homo sapien
ctacctcagtgtcccagccaaaatt

SEQ ID NO: 1803053 - DNA, 25 bp, Homo sapien
ctttccaagccagtaagcttttccg

SEQ ID NO: 1803054 - DNA, 25 bp, Homo sapien
ggtaaacggatgctcgagtgttgcc

SEQ ID NO: 1803055 - DNA, 25 bp, Homo sapien
tacacgcttcgatgctgggatgaaa

SEQ ID NO: 1803056 - DNA, 25 bp, Homo sapien
gcaatgctcagacgcagaagggact

SEQ ID NO: 1803057 - DNA, 25 bp, Homo sapien
tgatgcagccgccttcaatggtaaa

SEQ ID NO: 1803058 - DNA, 25 bp, Homo sapien
gagggatcccggtgtcaggtgggag

SEQ ID NO: 1803059 - DNA, 25 bp, Homo sapien
cggtgtcaggtgggagtactgcaac

SEQ ID NO: 1803060 - DNA, 25 bp, Homo sapien
cccggtgtcaggtgggagtactgca

SEQ ID NO: 1803061 - DNA, 25 bp, Homo sapien
atcccggtgtcaggtgggagtactg

SEQ ID NO: 1803062 - DNA, 25 bp, Homo sapien
tctctgctgctccgtagctgtccga

SEQ ID NO: 1803063 - DNA, 25 bp, Homo sapien
tcagatctcttagtccaccctgccg

SEQ ID NO: 1803064 - DNA, 25 bp, Homo sapien
tagctgtccgacctcttcagatctc

SEQ ID NO: 1803065 - DNA, 25 bp, Homo sapien
gctttgccccctaatgcatttttct

SEQ ID NO: 1803066 - DNA, 25 bp, Homo sapien
cttggctttcatgatcaacggtcta

SEQ ID NO: 1803067 - DNA, 25 bp, Homo sapien
tctgatgacacttgtacctgtgagg

SEQ ID NO: 1803068 - DNA, 25 bp, Homo sapien
ataggaccgttttctgccccatggc

SEQ ID NO: 1803069 - DNA, 25 bp, Homo sapien
ggaagaagcttttggcgtgcacaca

SEQ ID NO: 1803070 - DNA, 25 bp, Homo sapien
ctttccaagccagtaagcttttccg

SEQ ID NO: 1803071 - DNA, 25 bp, Homo sapien
cttgttgtaaaacgggctacctcag

SEQ ID NO: 1803072 - DNA, 25 bp, Homo sapien
ttgtaaaacgggctacctcagtgtc

SEQ ID NO: 1803073 - DNA, 25 bp, Homo sapien
ctacctcagtgtcccagccaaaatt

SEQ ID NO: 1803074 - DNA, 25 bp, Homo sapien
ggtaaacggatgctcgagtgttgcc

SEQ ID NO: 1803075 - DNA, 25 bp, Homo sapien
tacacgcttcgatgctgggatgaaa

SEQ ID NO: 1803076 - DNA, 25 bp, Homo sapien
gcaatgctcagacgcagaagggact

SEQ ID NO: 1803077 - DNA, 25 bp, Homo sapien
tgatgcagccgccttcaatggtaaa

SEQ ID NO: 1803078 - DNA, 25 bp, Homo sapien
gagggatcccggtgtcaggtgggag

SEQ ID NO: 1803079 - DNA, 25 bp, Homo sapien
cggtgtcaggtgggagtactgcaac

SEQ ID NO: 1803080 - DNA, 25 bp, Homo sapien
cccggtgtcaggtgggagtactgca

SEQ ID NO: 1803081 - DNA, 25 bp, Homo sapien
atcccggtgtcaggtgggagtactg

SEQ ID NO: 1803082 - DNA, 25 bp, Homo sapien
gctttgccccctaatgcatttttct

SEQ ID NO: 1803083 - DNA, 25 bp, Homo sapien
tcagatctcttagtccaccctgccg

SEQ ID NO: 1803084 - DNA, 25 bp, Homo sapien
tctctgctgctccgtagctgtccga

SEQ ID NO: 1803085 - DNA, 25 bp, Homo sapien
tagctgtccgacctcttcagatctc

SEQ ID NO: 1803086 - DNA, 25 bp, Homo sapien
tggccctgggtctatggagcagtac

SEQ ID NO: 1803087 - DNA, 25 bp, Homo sapien
tttgaagggagtgatttctcagtat

SEQ ID NO: 1803088 - DNA, 25 bp, Homo sapien
ggagcagtacatgagctcccagtgc

SEQ ID NO: 1803089 - DNA, 25 bp, Homo sapien
gtgctctaaggctcttcagccctag

SEQ ID NO: 1803090 - DNA, 25 bp, Homo sapien
ctacctcagtgtcccagccaaaatt

SEQ ID NO: 1803091 - DNA, 25 bp, Homo sapien
ttgtaaaacgggctacctcagtgtc

SEQ ID NO: 1803092 - DNA, 25 bp, Homo sapien
cttgttgtaaaacgggctacctcag

SEQ ID NO: 1803093 - DNA, 25 bp, Homo sapien
ctttccaagccagtaagcttttccg

SEQ ID NO: 1803094 - DNA, 25 bp, Homo sapien
tacacgcttcgatgctgggatgaaa

SEQ ID NO: 1803095 - DNA, 25 bp, Homo sapien
gcaatgctcagacgcagaagggact

SEQ ID NO: 1803096 - DNA, 25 bp, Homo sapien
tgatgcagccgccttcaatggtaaa

SEQ ID NO: 1803097 - DNA, 25 bp, Homo sapien
ggtaaacggatgctcgagtgttgcc

SEQ ID NO: 1803098 - DNA, 25 bp, Homo sapien
gagggatcccggtgtcaggtgggag

SEQ ID NO: 1803099 - DNA, 25 bp, Homo sapien
cggtgtcaggtgggagtactgcaac

SEQ ID NO: 1803100 - DNA, 25 bp, Homo sapien
cccggtgtcaggtgggagtactgca

SEQ ID NO: 1803101 - DNA, 25 bp, Homo sapien
atcccggtgtcaggtgggagtactg

SEQ ID NO: 1803102 - DNA, 25 bp, Homo sapien
tctctgctgctccgtagctgtccga

SEQ ID NO: 1803103 - DNA, 25 bp, Homo sapien
gctttgccccctaatgcatttttct

SEQ ID NO: 1803104 - DNA, 25 bp, Homo sapien
tcagatctcttagtccaccctgccg

SEQ ID NO: 1803105 - DNA, 25 bp, Homo sapien
tagctgtccgacctcttcagatctc

SEQ ID NO: 1803106 - DNA, 25 bp, Homo sapien
tacacgcttcgatgctgggatgaaa

SEQ ID NO: 1803107 - DNA, 25 bp, Homo sapien
ggtaaacggatgctcgagtgttgcc

SEQ ID NO: 1803108 - DNA, 25 bp, Homo sapien
gcaatgctcagacgcagaagggact

SEQ ID NO: 1803109 - DNA, 25 bp, Homo sapien
tgatgcagccgccttcaatggtaaa

SEQ ID NO: 1803110 - DNA, 25 bp, Homo sapien
gagggatcccggtgtcaggtgggag

SEQ ID NO: 1803111 - DNA, 25 bp, Homo sapien
cccggtgtcaggtgggagtactgca

SEQ ID NO: 1803112 - DNA, 25 bp, Homo sapien
cggtgtcaggtgggagtactgcaac

SEQ ID NO: 1803113 - DNA, 25 bp, Homo sapien
atcccggtgtcaggtgggagtactg

SEQ ID NO: 1803114 - DNA, 25 bp, Homo sapien
gctttgccccctaatgcatttttct

SEQ ID NO: 1803115 - DNA, 25 bp, Homo sapien
tcagatctcttagtccaccctgccg

SEQ ID NO: 1803116 - DNA, 25 bp, Homo sapien
tagctgtccgacctcttcagatctc

SEQ ID NO: 1803117 - DNA, 25 bp, Homo sapien
tctctgctgctccgtagctgtccga

SEQ ID NO: 1803118 - DNA, 25 bp, Homo sapien
gtgctctaaggctcttcagccctag

SEQ ID NO: 1803119 - DNA, 25 bp, Homo sapien
ggagcagtacatgagctcccagtgc

SEQ ID NO: 1803120 - DNA, 25 bp, Homo sapien
tttgaagggagtgatttctcagtat

SEQ ID NO: 1803121 - DNA, 25 bp, Homo sapien
tggccctgggtctatggagcagtac

SEQ ID NO: 1803122 - DNA, 25 bp, Homo sapien
cttgttgtaaaacgggctacctcag

SEQ ID NO: 1803123 - DNA, 25 bp, Homo sapien
ttgtaaaacgggctacctcagtgtc

SEQ ID NO: 1803124 - DNA, 25 bp, Homo sapien
ctacctcagtgtcccagccaaaatt

SEQ ID NO: 1803125 - DNA, 25 bp, Homo sapien
ctttccaagccagtaagcttttccg

SEQ ID NO: 1803126 - DNA, 25 bp, Homo sapien
ggtaaacggatgctcgagtgttgcc

SEQ ID NO: 1803127 - DNA, 25 bp, Homo sapien
tacacgcttcgatgctgggatgaaa

SEQ ID NO: 1803128 - DNA, 25 bp, Homo sapien
tgatgcagccgccttcaatggtaaa

SEQ ID NO: 1803129 - DNA, 25 bp, Homo sapien
gcaatgctcagacgcagaagggact

SEQ ID NO: 1803130 - DNA, 25 bp, Homo sapien
atcccggtgtcaggtgggagtactg

SEQ ID NO: 1803131 - DNA, 25 bp, Homo sapien
cccggtgtcaggtgggagtactgca

SEQ ID NO: 1803132 - DNA, 25 bp, Homo sapien
cggtgtcaggtgggagtactgcaac

SEQ ID NO: 1803133 - DNA, 25 bp, Homo sapien
gagggatcccggtgtcaggtgggag

SEQ ID NO: 1803134 - DNA, 25 bp, Homo sapien
gctttgccccctaatgcatttttct

SEQ ID NO: 1803135 - DNA, 25 bp, Homo sapien
tcagatctcttagtccaccctgccg

SEQ ID NO: 1803136 - DNA, 25 bp, Homo sapien
tctctgctgctccgtagctgtccga

SEQ ID NO: 1803137 - DNA, 25 bp, Homo sapien
tagctgtccgacctcttcagatctc

SEQ ID NO: 1803138 - DNA, 25 bp, Homo sapien
tggccctgggtctatggagcagtac

SEQ ID NO: 1803139 - DNA, 25 bp, Homo sapien
gtgctctaaggctcttcagccctag

SEQ ID NO: 1803140 - DNA, 25 bp, Homo sapien
tttgaagggagtgatttctcagtat

SEQ ID NO: 1803141 - DNA, 25 bp, Homo sapien
ggagcagtacatgagctcccagtgc

SEQ ID NO: 1803142 - DNA, 25 bp, Homo sapien
cttgttgtaaaacgggctacctcag

SEQ ID NO: 1803143 - DNA, 25 bp, Homo sapien
ttgtaaaacgggctacctcagtgtc

SEQ ID NO: 1803144 - DNA, 25 bp, Homo sapien
ctacctcagtgtcccagccaaaatt

SEQ ID NO: 1803145 - DNA, 25 bp, Homo sapien
ctttccaagccagtaagcttttccg

SEQ ID NO: 1803146 - DNA, 25 bp, Homo sapien
ggtaaacggatgctcgagtgttgcc

SEQ ID NO: 1803147 - DNA, 25 bp, Homo sapien
tacacgcttcgatgctgggatgaaa

SEQ ID NO: 1803148 - DNA, 25 bp, Homo sapien
tgatgcagccgccttcaatggtaaa

SEQ ID NO: 1803149 - DNA, 25 bp, Homo sapien
gcaatgctcagacgcagaagggact

SEQ ID NO: 1803150 - DNA, 25 bp, Homo sapien
gagggatcccggtgtcaggtgggag

SEQ ID NO: 1803151 - DNA, 25 bp, Homo sapien
cccggtgtcaggtgggagtactgca

SEQ ID NO: 1803152 - DNA, 25 bp, Homo sapien
atcccggtgtcaggtgggagtactg

SEQ ID NO: 1803153 - DNA, 25 bp, Homo sapien
cggtgtcaggtgggagtactgcaac

SEQ ID NO: 1803154 - DNA, 25 bp, Homo sapien
tggcttccaggcccgtcatcctgcc

SEQ ID NO: 1803155 - DNA, 25 bp, Homo sapien
tccaggcccgtcatcctgccagaag

SEQ ID NO: 1803156 - DNA, 25 bp, Homo sapien
ttccaggcccgtcatcctgccagaa

SEQ ID NO: 1803157 - DNA, 25 bp, Homo sapien
ccaggcccgtcatcctgccagaagc

SEQ ID NO: 1803158 - DNA, 25 bp, Homo sapien
ccatattcagagcaagaagggtgca

SEQ ID NO: 1803159 - DNA, 25 bp, Homo sapien
ttttgcctcctggaagtacaaggtg

SEQ ID NO: 1803160 - DNA, 25 bp, Homo sapien
cctggtttgctcgtgtcgtcgttcg

SEQ ID NO: 1803161 - DNA, 25 bp, Homo sapien
tcgtcgttcgtcgtggtcaccttgt

SEQ ID NO: 1803162 - DNA, 25 bp, Homo sapien
ggctgtcactcgaggaaaggtagtc

SEQ ID NO: 1803163 - DNA, 25 bp, Homo sapien
tatgtaagatactgcctgagggagg

SEQ ID NO: 1803164 - DNA, 25 bp, Homo sapien
ctcagggtgcagaactcggactttg

SEQ ID NO: 1803165 - DNA, 25 bp, Homo sapien
tctattttaggaggacccaggatga

SEQ ID NO: 1803166 - DNA, 25 bp, Homo sapien
gattctcgtgagctcctgggatgag

SEQ ID NO: 1803167 - DNA, 25 bp, Homo sapien
gctgcccgggaactgccattctagg

SEQ ID NO: 1803168 - DNA, 25 bp, Homo sapien
tctgctgcccgggaactgccattct

SEQ ID NO: 1803169 - DNA, 25 bp, Homo sapien
cccgggaactgccattctaggacag

SEQ ID NO: 1803170 - DNA, 25 bp, Homo sapien
ggaactgccattctaggacagctca

SEQ ID NO: 1803171 - DNA, 25 bp, Homo sapien
aacttcctaggcgaagcacgtccat

SEQ ID NO: 1803172 - DNA, 25 bp, Homo sapien
gaggtagagttcaaccttccatctc

SEQ ID NO: 1803173 - DNA, 25 bp, Homo sapien
ggtagagttcaaccttccatctcac

SEQ ID NO: 1803174 - DNA, 25 bp, Homo sapien
caggaggtgaggtagagttcaacct

SEQ ID NO: 1803175 - DNA, 25 bp, Homo sapien
ggtgaggtagagttcaaccttccat

SEQ ID NO: 1803176 - DNA, 25 bp, Homo sapien
gtgggtgcatagagacttccgctgc

SEQ ID NO: 1803177 - DNA, 25 bp, Homo sapien
agagcagcaaagaggaatgtgttgc

SEQ ID NO: 1803178 - DNA, 25 bp, Homo sapien
tgcatagagacttccgctgcggcat

SEQ ID NO: 1803179 - DNA, 25 bp, Homo sapien
aatgtgttgctcaggtatagacggg

SEQ ID NO: 1803180 - DNA, 25 bp, Homo sapien
catcagcatcgtgaaagcacagagg

SEQ ID NO: 1803181 - DNA, 25 bp, Homo sapien
tccatcagcatcgtgaaagcacaga

SEQ ID NO: 1803182 - DNA, 25 bp, Homo sapien
cttcataatccatcagcatcgtgaa

SEQ ID NO: 1803183 - DNA, 25 bp, Homo sapien
taatccatcagcatcgtgaaagcac

SEQ ID NO: 1803184 - DNA, 25 bp, Homo sapien
gtcccaatcccaggatgttgttgac

SEQ ID NO: 1803185 - DNA, 25 bp, Homo sapien
ccaatcccaggatgttgttgactta

SEQ ID NO: 1803186 - DNA, 25 bp, Homo sapien
caggatgttgttgacttacatgaga

SEQ ID NO: 1803187 - DNA, 25 bp, Homo sapien
aatcccaggatgttgttgacttaca

SEQ ID NO: 1803188 - DNA, 25 bp, Homo sapien
tagaagaaccacttccttatgttcc

SEQ ID NO: 1803189 - DNA, 25 bp, Homo sapien
gaagtagaagaaccacttccttatg

SEQ ID NO: 1803190 - DNA, 25 bp, Homo sapien
agaagtagaagaaccacttccttat

SEQ ID NO: 1803191 - DNA, 25 bp, Homo sapien
gtagaagaaccacttccttatgttc

SEQ ID NO: 1803192 - DNA, 25 bp, Homo sapien
tagaggtgggagatccaagtggaat

SEQ ID NO: 1803193 - DNA, 25 bp, Homo sapien
ctagaggtgggagatccaagtggaa

SEQ ID NO: 1803194 - DNA, 25 bp, Homo sapien
aggtgggagatccaagtggaataaa

SEQ ID NO: 1803195 - DNA, 25 bp, Homo sapien
tgggagatccaagtggaataaatgg

SEQ ID NO: 1803196 - DNA, 25 bp, Homo sapien
tcccagctgcttcttagtgacactg

SEQ ID NO: 1803197 - DNA, 25 bp, Homo sapien
cacattcttctatacttcctgctcc

SEQ ID NO: 1803198 - DNA, 25 bp, Homo sapien
gggtattcacatagtcatccagagg

SEQ ID NO: 1803199 - DNA, 25 bp, Homo sapien
ttcttctatacttcctgctcccagc

SEQ ID NO: 1803200 - DNA, 25 bp, Homo sapien
tgcaggtgaattcttcgtcctcctc

SEQ ID NO: 1803201 - DNA, 25 bp, Homo sapien
gcaggtgaattcttcgtcctcctca

SEQ ID NO: 1803202 - DNA, 25 bp, Homo sapien
caggtgaattcttcgtcctcctcac

SEQ ID NO: 1803203 - DNA, 25 bp, Homo sapien
ctgcaggtgaattcttcgtcctcct

SEQ ID NO: 1803204 - DNA, 25 bp, Homo sapien
agattcctgcgtaggtgcaacgaca

SEQ ID NO: 1803205 - DNA, 25 bp, Homo sapien
cgtaggtgcaacgacaatggaaata

SEQ ID NO: 1803206 - DNA, 25 bp, Homo sapien
cctgcgtaggtgcaacgacaatgga

SEQ ID NO: 1803207 - DNA, 25 bp, Homo sapien
ttcctgcgtaggtgcaacgacaatg

SEQ ID NO: 1803208 - DNA, 25 bp, Homo sapien
attatcacacattgttgctctttac

SEQ ID NO: 1803209 - DNA, 25 bp, Homo sapien
tctctcatcctaatgattatggagg

SEQ ID NO: 1803210 - DNA, 25 bp, Homo sapien
ctctttactgtgatattggaatgcc

SEQ ID NO: 1803211 - DNA, 25 bp, Homo sapien
catcctaatgattatggaggacttc

SEQ ID NO: 1803212 - DNA, 25 bp, Homo sapien
gttttataacacgatagtgccttcc

SEQ ID NO: 1803213 - DNA, 25 bp, Homo sapien
ttcagttttataacacgatagtgcc

SEQ ID NO: 1803214 - DNA, 25 bp, Homo sapien
tataacacgatagtgccttcctcct

SEQ ID NO: 1803215 - DNA, 25 bp, Homo sapien
agaattcagttttataacacgatag

SEQ ID NO: 1803216 - DNA, 25 bp, Homo sapien
cttaatgggagcatacttgatggga

SEQ ID NO: 1803217 - DNA, 25 bp, Homo sapien
cttgatgggatatgcttaatgggag

SEQ ID NO: 1803218 - DNA, 25 bp, Homo sapien
tacctggctaccaacacagtagagg

SEQ ID NO: 1803219 - DNA, 25 bp, Homo sapien
cttgatgggatatacttgatgggaa

SEQ ID NO: 1803220 - DNA, 25 bp, Homo sapien
cagttagacaacgggccctctcctg

SEQ ID NO: 1803221 - DNA, 25 bp, Homo sapien
ctcctgtgtttaaaacagtccggtg

SEQ ID NO: 1803222 - DNA, 25 bp, Homo sapien
gacaacgggccctctcctgtgttta

SEQ ID NO: 1803223 - DNA, 25 bp, Homo sapien
tgtgtttaaaacagtccggtgccca

SEQ ID NO: 1803224 - DNA, 25 bp, Homo sapien
gaagggaagtccacacagtggtcaa

SEQ ID NO: 1803225 - DNA, 25 bp, Homo sapien
gggaagtccacacagtggtcaaagt

SEQ ID NO: 1803226 - DNA, 25 bp, Homo sapien
aagggaagtccacacagtggtcaaa

SEQ ID NO: 1803227 - DNA, 25 bp, Homo sapien
ctgaagggaagtccacacagtggtc

SEQ ID NO: 1803228 - DNA, 25 bp, Homo sapien
tgttttggacatcgtccctctgtag

SEQ ID NO: 1803229 - DNA, 25 bp, Homo sapien
tttggacatcgtccctctgtagttc

SEQ ID NO: 1803230 - DNA, 25 bp, Homo sapien
ttttgttttggacatcgtccctctg

SEQ ID NO: 1803231 - DNA, 25 bp, Homo sapien
gacatcgtccctctgtagttctttc

SEQ ID NO: 1803232 - DNA, 25 bp, Homo sapien
acagagggacaactttacagtagat

SEQ ID NO: 1803233 - DNA, 25 bp, Homo sapien
cagagggacaactttacagtagatg

SEQ ID NO: 1803234 - DNA, 25 bp, Homo sapien
cacagagggacaactttacagtaga

SEQ ID NO: 1803235 - DNA, 25 bp, Homo sapien
gcatttgtgtggtcagattttcaat

SEQ ID NO: 1803236 - DNA, 25 bp, Homo sapien
ggcccctgcggatcgttgtctggat

SEQ ID NO: 1803237 - DNA, 25 bp, Homo sapien
ttttctggatcagtagtatagcacc

SEQ ID NO: 1803238 - DNA, 25 bp, Homo sapien
gattcctgcagtagttctcctccag

SEQ ID NO: 1803239 - DNA, 25 bp, Homo sapien
cactcaagaatgtcgcagtagtcat

SEQ ID NO: 1803240 - DNA, 25 bp, Homo sapien
tattaataacatccctgtgggaagg

SEQ ID NO: 1803241 - DNA, 25 bp, Homo sapien
tccgagaggtgaatacgttactcaa

SEQ ID NO: 1803242 - DNA, 25 bp, Homo sapien
tctggggttttgcttctttccgaga

SEQ ID NO: 1803243 - DNA, 25 bp, Homo sapien
atacgttactcaattattaataaca

SEQ ID NO: 1803244 - DNA, 25 bp, Homo sapien
ggaaggaaggacagagaggaagaag

SEQ ID NO: 1803245 - DNA, 25 bp, Homo sapien
aaggaaggacagagaggaagaagaa

SEQ ID NO: 1803246 - DNA, 25 bp, Homo sapien
ggaaggacagagaggaagaagaaaa

SEQ ID NO: 1803247 - DNA, 25 bp, Homo sapien
ctggacagagtgggaaggaaggaca

SEQ ID NO: 1803248 - DNA, 25 bp, Homo sapien
gccgtcatagttttctccactgcaa

SEQ ID NO: 1803249 - DNA, 25 bp, Homo sapien
cttggaaattttgccgtcatagttt

SEQ ID NO: 1803250 - DNA, 25 bp, Homo sapien
gcattccagtccagacatggtcttg

SEQ ID NO: 1803251 - DNA, 25 bp, Homo sapien
gaatgtatccatgagcgtgtgggct

SEQ ID NO: 1803252 - DNA, 25 bp, Homo sapien
aggtgtacaaattcaatagagctgc

SEQ ID NO: 1803253 - DNA, 25 bp, Homo sapien
tggctcagcctcacttctgcattct

SEQ ID NO: 1803254 - DNA, 25 bp, Homo sapien
taagctagctatttggaatgggagg

SEQ ID NO: 1803255 - DNA, 25 bp, Homo sapien
tagagctgctttccaccgtggaatc

SEQ ID NO: 1803256 - DNA, 25 bp, Homo sapien
gagccagcagcggcttaagcaatcc

SEQ ID NO: 1803257 - DNA, 25 bp, Homo sapien
agccagcagcggcttaagcaatcct

SEQ ID NO: 1803258 - DNA, 25 bp, Homo sapien
tccctctctgattgtaaatgcttac

SEQ ID NO: 1803259 - DNA, 25 bp, Homo sapien
ccagggctgttggatgcactccatg

SEQ ID NO: 1803260 - DNA, 25 bp, Homo sapien
ctggtggccctctgcgtttattcat

SEQ ID NO: 1803261 - DNA, 25 bp, Homo sapien
tggatgcactccatgcctggtggcc

SEQ ID NO: 1803262 - DNA, 25 bp, Homo sapien
gaccttatcattttggccatctgga

SEQ ID NO: 1803263 - DNA, 25 bp, Homo sapien
gcaaattccagttattcaaccacaa

SEQ ID NO: 1803264 - DNA, 25 bp, Homo sapien
gcttcagccctttaggtaactagga

SEQ ID NO: 1803265 - DNA, 25 bp, Homo sapien
tactcatctagtacctaacagagcc

SEQ ID NO: 1803266 - DNA, 25 bp, Homo sapien
gcagctccctatcggggttacgaca

SEQ ID NO: 1803267 - DNA, 25 bp, Homo sapien
ggttacgacagtaattcttcttcag

SEQ ID NO: 1803268 - DNA, 25 bp, Homo sapien
gcagcgggggatgtcacaaagttcc

SEQ ID NO: 1803269 - DNA, 25 bp, Homo sapien
cacaaagttcccagcgcttgttggg

SEQ ID NO: 1803270 - DNA, 25 bp, Homo sapien
ggcttttgctcagcctctcttggaa

SEQ ID NO: 1803271 - DNA, 25 bp, Homo sapien
gaattctcacatacaccaaaggtcc

SEQ ID NO: 1803272 - DNA, 25 bp, Homo sapien
tagcatctatgcctgtgagaccctt

SEQ ID NO: 1803273 - DNA, 25 bp, Homo sapien
tcctacctggtaagtatcaacacgt

SEQ ID NO: 1803274 - DNA, 25 bp, Homo sapien
tctggtgtcctgttatgtgtgtgag

SEQ ID NO: 1803275 - DNA, 25 bp, Homo sapien
gtgtgcccggacacggtaacagcca

SEQ ID NO: 1803276 - DNA, 25 bp, Homo sapien
cccttcagacactggtaggtgggac

SEQ ID NO: 1803277 - DNA, 25 bp, Homo sapien
gtaacagccacattcccgcgatagt

SEQ ID NO: 1803278 - DNA, 25 bp, Homo sapien
cacttggctgttggttgtatggcac

SEQ ID NO: 1803279 - DNA, 25 bp, Homo sapien
cctttttccgtcaggattgcggcag

SEQ ID NO: 1803280 - DNA, 25 bp, Homo sapien
tgggagccaattgttccgtggatac

SEQ ID NO: 1803281 - DNA, 25 bp, Homo sapien
gaggagtcacaggacggtatcttac

SEQ ID NO: 1803282 - DNA, 25 bp, Homo sapien
ccatcaccatggtagcagtcctgga

SEQ ID NO: 1803283 - DNA, 25 bp, Homo sapien
catcaccatggtagcagtcctggac

SEQ ID NO: 1803284 - DNA, 25 bp, Homo sapien
tccatcaccatggtagcagtcctgg

SEQ ID NO: 1803285 - DNA, 25 bp, Homo sapien
tggcttgaagcatgaagcatggctc

SEQ ID NO: 1803286 - DNA, 25 bp, Homo sapien
ggctgatgcccctcttacagtaaaa

SEQ ID NO: 1803287 - DNA, 25 bp, Homo sapien
ctaagagaaatttggtcctaggaag

SEQ ID NO: 1803288 - DNA, 25 bp, Homo sapien
ttggtcctaggaagttggcttgaag

SEQ ID NO: 1803289 - DNA, 25 bp, Homo sapien
cctttatcggcatctggattcctgc

SEQ ID NO: 1803290 - DNA, 25 bp, Homo sapien
aacaccaggggcctttatcggcatc

SEQ ID NO: 1803291 - DNA, 25 bp, Homo sapien
ttctgttcctgagcattttttcagg

SEQ ID NO: 1803292 - DNA, 25 bp, Homo sapien
tttttcaggttgcagtactcccacc

SEQ ID NO: 1803293 - DNA, 25 bp, Homo sapien
ttcggaaggagtctctacatctgga

SEQ ID NO: 1803294 - DNA, 25 bp, Homo sapien
tcttcggaaggagtctctacatctg

SEQ ID NO: 1803295 - DNA, 25 bp, Homo sapien
tcggaaggagtctctacatctggaa

SEQ ID NO: 1803296 - DNA, 25 bp, Homo sapien
cttcttcggaaggagtctctacatc

SEQ ID NO: 1803297 - DNA, 25 bp, Homo sapien
agtaacagtggtcgccctcttgcct

SEQ ID NO: 1803298 - DNA, 25 bp, Homo sapien
agtggtcgccctcttgcctcggtat

SEQ ID NO: 1803299 - DNA, 25 bp, Homo sapien
tgtctctggagtgaaaatgctgtgt

SEQ ID NO: 1803300 - DNA, 25 bp, Homo sapien
cagacccgcccgtggatttgtctct

SEQ ID NO: 1803301 - DNA, 25 bp, Homo sapien
cccccagttcctgacacggagctcc

SEQ ID NO: 1803302 - DNA, 25 bp, Homo sapien
ctgtggtagaataagaaacgtatat

SEQ ID NO: 1803303 - DNA, 25 bp, Homo sapien
tgccccccagttcctgacacggagc

SEQ ID NO: 1803304 - DNA, 25 bp, Homo sapien
cactgtggtagaataagaaacgtat

SEQ ID NO: 1803305 - DNA, 25 bp, Homo sapien
tttatttccatgcattgtgcgccct

SEQ ID NO: 1803306 - DNA, 25 bp, Homo sapien
aacatttatttccatgcattgtgcg

SEQ ID NO: 1803307 - DNA, 25 bp, Homo sapien
ctgtttgctgttgattcagaaacat

SEQ ID NO: 1803308 - DNA, 25 bp, Homo sapien
ccgatgaagcctgtttgctgttgat

SEQ ID NO: 1803309 - DNA, 25 bp, Homo sapien
ccctggacagggagtggtgaccctc

SEQ ID NO: 1803310 - DNA, 25 bp, Homo sapien
ttgatgtgcattgtccctggagggc

SEQ ID NO: 1803311 - DNA, 25 bp, Homo sapien
gccccagcaccaaaggacagtggga

SEQ ID NO: 1803312 - DNA, 25 bp, Homo sapien
ccctgttcaaaaggagctatgaggc

SEQ ID NO: 1803313 - DNA, 25 bp, Homo sapien
agggaccacctacatcaccatcagg

SEQ ID NO: 1803314 - DNA, 25 bp, Homo sapien
cacactgagggacatcacagtagtc

SEQ ID NO: 1803315 - DNA, 25 bp, Homo sapien
tttcttggatttgtcgtgtagcacc

SEQ ID NO: 1803316 - DNA, 25 bp, Homo sapien
ggacatcacagtagtcgtaaagttt

SEQ ID NO: 1803317 - DNA, 25 bp, Homo sapien
tgaattcctaggatggccatctgag

SEQ ID NO: 1803318 - DNA, 25 bp, Homo sapien
caaatgtggccaatagtagggcaga

SEQ ID NO: 1803319 - DNA, 25 bp, Homo sapien
gacatggcagcattcagtgggacca

SEQ ID NO: 1803320 - DNA, 25 bp, Homo sapien
atgcatcccacgctagacatggcag

SEQ ID NO: 1803321 - DNA, 25 bp, Homo sapien
gaggctctagctttctcaagcacga

SEQ ID NO: 1803322 - DNA, 25 bp, Homo sapien
tgatgggaacgcttctcaccaggct

SEQ ID NO: 1803323 - DNA, 25 bp, Homo sapien
tccttctgcatgaaacagtcctcag

SEQ ID NO: 1803324 - DNA, 25 bp, Homo sapien
gcaagaaaatcagtctgggctcaac

SEQ ID NO: 1803325 - DNA, 25 bp, Homo sapien
aggcttcccacaatcaaatgaaggg

SEQ ID NO: 1803326 - DNA, 25 bp, Homo sapien
cttcggctccacttgaggcttccca

SEQ ID NO: 1803327 - DNA, 25 bp, Homo sapien
tgaggcttcccacaatcaaatgaag

SEQ ID NO: 1803328 - DNA, 25 bp, Homo sapien
cttgaggcttcccacaatcaaatga

SEQ ID NO: 1803329 - DNA, 25 bp, Homo sapien
tgttctaagactgacttgccagggc

SEQ ID NO: 1803330 - DNA, 25 bp, Homo sapien
tctaagactgacttgccagggccag

SEQ ID NO: 1803331 - DNA, 25 bp, Homo sapien
gggccaggaatgtgggtgggccaca

SEQ ID NO: 1803332 - DNA, 25 bp, Homo sapien
cttgttctaagactgacttgccagg

SEQ ID NO: 1803333 - DNA, 25 bp, Homo sapien
ttagttaaattgatactttgttctg

SEQ ID NO: 1803334 - DNA, 25 bp, Homo sapien
tagttaaattgatactttgttctgc

SEQ ID NO: 1803335 - DNA, 25 bp, Homo sapien
ttaaattgatactttgttctgctcc

SEQ ID NO: 1803336 - DNA, 25 bp, Homo sapien
gttaaattgatactttgttctgctc

SEQ ID NO: 1803337 - DNA, 25 bp, Homo sapien
ggatatcaaggtgcctccacagaag

SEQ ID NO: 1803338 - DNA, 25 bp, Homo sapien
gcctccacagaagtgcattccaaac

SEQ ID NO: 1803339 - DNA, 25 bp, Homo sapien
acccactctggggatatcaaggtgc

SEQ ID NO: 1803340 - DNA, 25 bp, Homo sapien
ggcagcagtcaacacccactctggg

SEQ ID NO: 1803341 - DNA, 25 bp, Homo sapien
agcaaggcaatatcttttcgtgtgg

SEQ ID NO: 1803342 - DNA, 25 bp, Homo sapien
atttcctgaacatgcggttcgagat

SEQ ID NO: 1803343 - DNA, 25 bp, Homo sapien
aatatcttttcgtgtgggctccaag

SEQ ID NO: 1803344 - DNA, 25 bp, Homo sapien
atgcggttcgagattcacttcttgg

SEQ ID NO: 1803345 - DNA, 25 bp, Homo sapien
gctgggattactttgtcagtgatga

SEQ ID NO: 1803346 - DNA, 25 bp, Homo sapien
ggggatggcagacaagctgggatta

SEQ ID NO: 1803347 - DNA, 25 bp, Homo sapien
acaagctgggattactttgtcagtg

SEQ ID NO: 1803348 - DNA, 25 bp, Homo sapien
caagctgggattactttgtcagtga

SEQ ID NO: 1803349 - DNA, 25 bp, Homo sapien
cagtgatgaaacattcggtccggtc

SEQ ID NO: 1803350 - DNA, 25 bp, Homo sapien
agccagtgatgaaacattcggtccg

SEQ ID NO: 1803351 - DNA, 25 bp, Homo sapien
tgaaacattcggtccggtcagcgac

SEQ ID NO: 1803352 - DNA, 25 bp, Homo sapien
tgatgaaacattcggtccggtcagc

SEQ ID NO: 1803353 - DNA, 25 bp, Homo sapien
tgtgtttaaaaagatgaaagaaatg

SEQ ID NO: 1803354 - DNA, 25 bp, Homo sapien
ctgtgtttaaaaagatgaaagaaat

SEQ ID NO: 1803355 - DNA, 25 bp, Homo sapien
tgtttaaaaagatgaaagaaatggc

SEQ ID NO: 1803356 - DNA, 25 bp, Homo sapien
tttaaaaagatgaaagaaatggcaa

SEQ ID NO: 1803357 - DNA, 25 bp, Homo sapien
cagagttcggtggattggactcttc

SEQ ID NO: 1803358 - DNA, 25 bp, Homo sapien
gagttcggtggattggactcttcca

SEQ ID NO: 1803359 - DNA, 25 bp, Homo sapien
agagttcggtggattggactcttcc

SEQ ID NO: 1803360 - DNA, 25 bp, Homo sapien
ccaagaccccaagaagtgactcctt

SEQ ID NO: 1803361 - DNA, 25 bp, Homo sapien
tgaaacacgaacatagacaccaggc

SEQ ID NO: 1803362 - DNA, 25 bp, Homo sapien
tgtccttctcgaagcaaaccagagg

SEQ ID NO: 1803363 - DNA, 25 bp, Homo sapien
agtgactccttgtaaaatgtatttg

SEQ ID NO: 1803364 - DNA, 25 bp, Homo sapien
atcactccctcaatccaagtaacaa

SEQ ID NO: 1803365 - DNA, 25 bp, Homo sapien
aattatttctcatcactccctcaat

SEQ ID NO: 1803366 - DNA, 25 bp, Homo sapien
ttaattatttctcatcactccctca

SEQ ID NO: 1803367 - DNA, 25 bp, Homo sapien
tcatcactccctcaatccaagtaac

SEQ ID NO: 1803368 - DNA, 25 bp, Homo sapien
tactgccagttatttccagcatgct

SEQ ID NO: 1803369 - DNA, 25 bp, Homo sapien
agtcagtgcgtcactctgtctcccg

SEQ ID NO: 1803370 - DNA, 25 bp, Homo sapien
caaaaaatgccgaggtttggcgtag

SEQ ID NO: 1803371 - DNA, 25 bp, Homo sapien
agcatgctaaatccctacccacgtt

SEQ ID NO: 1803372 - DNA, 25 bp, Homo sapien
caaagagcatgaaaatgttgaagac

SEQ ID NO: 1803373 - DNA, 25 bp, Homo sapien
tgaaaatgttgaagaccaaaaccaa

SEQ ID NO: 1803374 - DNA, 25 bp, Homo sapien
tggtggggtgaacaaagagcatgaa

SEQ ID NO: 1803375 - DNA, 25 bp, Homo sapien
gggtgaacaaagagcatgaaaatgt

SEQ ID NO: 1803376 - DNA, 25 bp, Homo sapien
aggtaaatgcgtggacaacttcttg

SEQ ID NO: 1803377 - DNA, 25 bp, Homo sapien
ggtaaatgcgtggacaacttcttgg

SEQ ID NO: 1803378 - DNA, 25 bp, Homo sapien
taaatgcgtggacaacttcttggct

SEQ ID NO: 1803379 - DNA, 25 bp, Homo sapien
aatgcgtggacaacttcttggctct

SEQ ID NO: 1803380 - DNA, 25 bp, Homo sapien
caataacagaatcggtttgcatgac

SEQ ID NO: 1803381 - DNA, 25 bp, Homo sapien
taacagaatcggtttgcatgactcc

SEQ ID NO: 1803382 - DNA, 25 bp, Homo sapien
tcattcccaataacagaatcggttt

SEQ ID NO: 1803383 - DNA, 25 bp, Homo sapien
gaatcggtttgcatgactccccata

SEQ ID NO: 1803384 - DNA, 25 bp, Homo sapien
gggctcaagtcaagcagtcggtgac

SEQ ID NO: 1803385 - DNA, 25 bp, Homo sapien
gctcaagtcaagcagtcggtgacag

SEQ ID NO: 1803386 - DNA, 25 bp, Homo sapien
tcaagtcaagcagtcggtgacagat

SEQ ID NO: 1803387 - DNA, 25 bp, Homo sapien
caagtcaagcagtcggtgacagatt

SEQ ID NO: 1803388 - DNA, 25 bp, Homo sapien
ttacacatccatggaccggttcact

SEQ ID NO: 1803389 - DNA, 25 bp, Homo sapien
catggaccggttcactccatcatat

SEQ ID NO: 1803390 - DNA, 25 bp, Homo sapien
catcatatacagctctctgctccgt

SEQ ID NO: 1803391 - DNA, 25 bp, Homo sapien
tcactccatcatatacagctctctg

SEQ ID NO: 1803392 - DNA, 25 bp, Homo sapien
tcattctcctgtgaccgtgtgtact

SEQ ID NO: 1803393 - DNA, 25 bp, Homo sapien
atggtaaaacgtgtgcctttgtcct

SEQ ID NO: 1803394 - DNA, 25 bp, Homo sapien
accgtgtgtactgcagactgtttca

SEQ ID NO: 1803395 - DNA, 25 bp, Homo sapien
ctgtgaccgtgtgtactgcagactg

SEQ ID NO: 1803396 - DNA, 25 bp, Homo sapien
cataatctttcacgaagactttctc

SEQ ID NO: 1803397 - DNA, 25 bp, Homo sapien
ataatctttcacgaagactttctcc

SEQ ID NO: 1803398 - DNA, 25 bp, Homo sapien
taatctttcacgaagactttctcct

SEQ ID NO: 1803399 - DNA, 25 bp, Homo sapien
ttttcagtccacattcctataagtg

SEQ ID NO: 1803400 - DNA, 25 bp, Homo sapien
gatgatgtagaaaaacttggcaggc

SEQ ID NO: 1803401 - DNA, 25 bp, Homo sapien
taccctggcatccatctgtggtggc

SEQ ID NO: 1803402 - DNA, 25 bp, Homo sapien
gcctcgtgatgcttttgcctgaaat

SEQ ID NO: 1803403 - DNA, 25 bp, Homo sapien
aaatcacgggtattgccttgccaga

SEQ ID NO: 1803404 - DNA, 25 bp, Homo sapien
tccttgcattcctgggacaattccc

SEQ ID NO: 1803405 - DNA, 25 bp, Homo sapien
agatttttgcacatatgttcatcgg

SEQ ID NO: 1803406 - DNA, 25 bp, Homo sapien
ccttttaatgttctgttggattccg

SEQ ID NO: 1803407 - DNA, 25 bp, Homo sapien
cacacaatgtgtatatgtgagtgta

SEQ ID NO: 1803408 - DNA, 25 bp, Homo sapien
gaacaactacgggagctaaggtcat

SEQ ID NO: 1803409 - DNA, 25 bp, Homo sapien
tgcatttggtccctgtgagtagcct

SEQ ID NO: 1803410 - DNA, 25 bp, Homo sapien
cacgagcagtgatggattattgcca

SEQ ID NO: 1803411 - DNA, 25 bp, Homo sapien
ttccctgtcccacgagcagtgatgg

SEQ ID NO: 1803412 - DNA, 25 bp, Homo sapien
gccactgaaggcagggtgtgccaca

SEQ ID NO: 1803413 - DNA, 25 bp, Homo sapien
actgaaggcagggtgtgccacaaac

SEQ ID NO: 1803414 - DNA, 25 bp, Homo sapien
aaggcagggtgtgccacaaacttgg

SEQ ID NO: 1803415 - DNA, 25 bp, Homo sapien
taccgcaaaggccttgaggagccac

SEQ ID NO: 1803416 - DNA, 25 bp, Homo sapien
ttcctccgggttctccattgtcgaa

SEQ ID NO: 1803417 - DNA, 25 bp, Homo sapien
tcctccgggttctccattgtcgaaa

SEQ ID NO: 1803418 - DNA, 25 bp, Homo sapien
tccgggttctccattgtcgaaactc

SEQ ID NO: 1803419 - DNA, 25 bp, Homo sapien
ctccgggttctccattgtcgaaact

SEQ ID NO: 1803420 - DNA, 25 bp, Homo sapien
tgttcactgttgtattttctctggg

SEQ ID NO: 1803421 - DNA, 25 bp, Homo sapien
attttctctgggttctccgttgtct

SEQ ID NO: 1803422 - DNA, 25 bp, Homo sapien
tctgggttctccgttgtcttttctc

SEQ ID NO: 1803423 - DNA, 25 bp, Homo sapien
tgtcttttctctcggttcaccatca

SEQ ID NO: 1803424 - DNA, 25 bp, Homo sapien
tttctctgggctatctgttctctag

SEQ ID NO: 1803425 - DNA, 25 bp, Homo sapien
ctctgggctatctgttctctaggtt

SEQ ID NO: 1803426 - DNA, 25 bp, Homo sapien
cgtcttttctctgggcgtaccatca

SEQ ID NO: 1803427 - DNA, 25 bp, Homo sapien
tcatttctctgggctatctgttctc

SEQ ID NO: 1803428 - DNA, 25 bp, Homo sapien
tctgggtgcactgccgtattttctc

SEQ ID NO: 1803429 - DNA, 25 bp, Homo sapien
gttgccccatcgtcttttctctgag

SEQ ID NO: 1803430 - DNA, 25 bp, Homo sapien
ttttctctggttgccccatcgtctt

SEQ ID NO: 1803431 - DNA, 25 bp, Homo sapien
ggtgcactgccgtattttctctggg

SEQ ID NO: 1803432 - DNA, 25 bp, Homo sapien
gttgtatattctccgggtccactgt

SEQ ID NO: 1803433 - DNA, 25 bp, Homo sapien
ctgttgtatattctccgggtccact

SEQ ID NO: 1803434 - DNA, 25 bp, Homo sapien
tgttgtatattctccgggtccactg

SEQ ID NO: 1803435 - DNA, 25 bp, Homo sapien
gatgacggcgatgcctgcaatcgaa

SEQ ID NO: 1803436 - DNA, 25 bp, Homo sapien
actgtatccactgaggcagcggaca

SEQ ID NO: 1803437 - DNA, 25 bp, Homo sapien
tgtttgacagaatttgggcaacctc

SEQ ID NO: 1803438 - DNA, 25 bp, Homo sapien
tcagcggctcgttgtgcagtttcta

SEQ ID NO: 1803439 - DNA, 25 bp, Homo sapien
ccaagttgggacgtatgtcagaccc

SEQ ID NO: 1803440 - DNA, 25 bp, Homo sapien
tacctgctggttgagattaaactcc

SEQ ID NO: 1803441 - DNA, 25 bp, Homo sapien
ggaacattccacattagtgagctag

SEQ ID NO: 1803442 - DNA, 25 bp, Homo sapien
gaacctgttctgtccgcccatgtct

SEQ ID NO: 1803443 - DNA, 25 bp, Homo sapien
acaatggagagagctatcagatgcc

SEQ ID NO: 1803444 - DNA, 25 bp, Homo sapien
gagactgtcttggactaatccaggc

SEQ ID NO: 1803445 - DNA, 25 bp, Homo sapien
tcaggtacaacattaaggtcaggct

SEQ ID NO: 1803446 - DNA, 25 bp, Homo sapien
gccaccagctgaataaacggactct

SEQ ID NO: 1803447 - DNA, 25 bp, Homo sapien
cattccagagtgaaaatcatgagca

SEQ ID NO: 1803448 - DNA, 25 bp, Homo sapien
cacgcaagtaaatagaacagcacag

SEQ ID NO: 1803449 - DNA, 25 bp, Homo sapien
tttaagtcacccaatgagattggcc

SEQ ID NO: 1803450 - DNA, 25 bp, Homo sapien
ggacatttgtgtcaacagcacgcaa

SEQ ID NO: 1803451 - DNA, 25 bp, Homo sapien
tttgggttggaaagtggcaactctg

SEQ ID NO: 1803452 - DNA, 25 bp, Homo sapien
ttggaaagtggcaactctggttgct

SEQ ID NO: 1803453 - DNA, 25 bp, Homo sapien
ggttggaaagtggcaactctggttg

SEQ ID NO: 1803454 - DNA, 25 bp, Homo sapien
tgggttggaaagtggcaactctggt

SEQ ID NO: 1803455 - DNA, 25 bp, Homo sapien
ttgttcgggcatggcatcgatgaag

SEQ ID NO: 1803456 - DNA, 25 bp, Homo sapien
gaatctcttgatggaccagggagct

SEQ ID NO: 1803457 - DNA, 25 bp, Homo sapien
ccacctctttcagttgttcgggcat

SEQ ID NO: 1803458 - DNA, 25 bp, Homo sapien
tctcttgatggaccagggagctcag

SEQ ID NO: 1803459 - DNA, 25 bp, Homo sapien
agtcctggaccctgcggctttgctc

SEQ ID NO: 1803460 - DNA, 25 bp, Homo sapien
tgatcctcaatccatcaccatggta

SEQ ID NO: 1803461 - DNA, 25 bp, Homo sapien
gaatgatcctcaatccatcaccatg

SEQ ID NO: 1803462 - DNA, 25 bp, Homo sapien
agtggtggagaatgatcctcaatcc

SEQ ID NO: 1803463 - DNA, 25 bp, Homo sapien
tgtcaccaggcattgcatcaggctg

SEQ ID NO: 1803464 - DNA, 25 bp, Homo sapien
gacccatggtgtaactccaagggtg

SEQ ID NO: 1803465 - DNA, 25 bp, Homo sapien
cccatggtgtaactccaagggtgaa

SEQ ID NO: 1803466 - DNA, 25 bp, Homo sapien
gtcaccaggcattgcatcaggctgc

SEQ ID NO: 1803467 - DNA, 25 bp, Homo sapien
tctgtgcttggaattaggaccacag

SEQ ID NO: 1803468 - DNA, 25 bp, Homo sapien
ggttcaaaaggagtctctgtgcttg

SEQ ID NO: 1803469 - DNA, 25 bp, Homo sapien
ctgtgcttggaattaggaccacagt

SEQ ID NO: 1803470 - DNA, 25 bp, Homo sapien
ctggttcaaaaggagtctctgtgct

SEQ ID NO: 1803471 - DNA, 25 bp, Homo sapien
tagtgcagtaaaatccaccggtgcc

SEQ ID NO: 1803472 - DNA, 25 bp, Homo sapien
tgtgatatggtgaaaaattgcctca

SEQ ID NO: 1803473 - DNA, 25 bp, Homo sapien
tgaaaaattgcctcaatagctctgt

SEQ ID NO: 1803474 - DNA, 25 bp, Homo sapien
atagctctgttcatcaccttggtag

SEQ ID NO: 1803475 - DNA, 25 bp, Homo sapien
atcccagggaattccgcaggacgtt

SEQ ID NO: 1803476 - DNA, 25 bp, Homo sapien
acgttccacccaagaccactgggct

SEQ ID NO: 1803477 - DNA, 25 bp, Homo sapien
attccgcaggacgttccacccaaga

SEQ ID NO: 1803478 - DNA, 25 bp, Homo sapien
cagggaattccgcaggacgttccac

SEQ ID NO: 1803479 - DNA, 25 bp, Homo sapien
gttgcccagcgtggtttcttcttga

SEQ ID NO: 1803480 - DNA, 25 bp, Homo sapien
tgcccagcgtggtttcttcttgagg

SEQ ID NO: 1803481 - DNA, 25 bp, Homo sapien
ttgcccagcgtggtttcttcttgag

SEQ ID NO: 1803482 - DNA, 25 bp, Homo sapien
ctggcaggtgcaaatgtcaggccag

SEQ ID NO: 1803483 - DNA, 25 bp, Homo sapien
ggcaggtgcaaatgtcaggccagca

SEQ ID NO: 1803484 - DNA, 25 bp, Homo sapien
caggtgcaaatgtcaggccagcaat

SEQ ID NO: 1803485 - DNA, 25 bp, Homo sapien
aggtgcaaatgtcaggccagcaatg

SEQ ID NO: 1803486 - DNA, 25 bp, Homo sapien
ttcatggtgatgaaacgagctggcc

SEQ ID NO: 1803487 - DNA, 25 bp, Homo sapien
tgatgaaacgagctggcctggaatg

SEQ ID NO: 1803488 - DNA, 25 bp, Homo sapien
atgaaacgagctggcctggaatggc

SEQ ID NO: 1803489 - DNA, 25 bp, Homo sapien
catggtgatgaaacgagctggcctg

SEQ ID NO: 1803490 - DNA, 25 bp, Homo sapien
atgacgacacgagtaaaccaggcca

SEQ ID NO: 1803491 - DNA, 25 bp, Homo sapien
atgcttccggcaggatgatgagcca

SEQ ID NO: 1803492 - DNA, 25 bp, Homo sapien
gcccacgacgaatgacgacacgagt

SEQ ID NO: 1803493 - DNA, 25 bp, Homo sapien
gacacgagtaaaccaggccactgct

SEQ ID NO: 1803494 - DNA, 25 bp, Homo sapien
gacatttatttctcgcggttttgga

SEQ ID NO: 1803495 - DNA, 25 bp, Homo sapien
ttctttgcttttagacagcccaact

SEQ ID NO: 1803496 - DNA, 25 bp, Homo sapien
ctcgctgcaccctcacatggcatct

SEQ ID NO: 1803497 - DNA, 25 bp, Homo sapien
ttttagacagcccaactcctcgctg

SEQ ID NO: 1803498 - DNA, 25 bp, Homo sapien
gacccttcgcgagctccagaagcat

SEQ ID NO: 1803499 - DNA, 25 bp, Homo sapien
cggagcgcaagcggccttgttcctc

SEQ ID NO: 1803500 - DNA, 25 bp, Homo sapien
aaaagcccagctggcagcgcatggg

SEQ ID NO: 1803501 - DNA, 25 bp, Homo sapien
agcgcatgggcgagcgtcctgcctt

SEQ ID NO: 1803502 - DNA, 25 bp, Homo sapien
ggggttcagccccggagccagcggc

SEQ ID NO: 1803503 - DNA, 25 bp, Homo sapien
tggggttcagccccggagccagcgg

SEQ ID NO: 1803504 - DNA, 25 bp, Homo sapien
ctggggttcagccccggagccagcg

SEQ ID NO: 1803505 - DNA, 25 bp, Homo sapien
gggttcagccccggagccagcggct

SEQ ID NO: 1803506 - DNA, 25 bp, Homo sapien
ttggaagcagaaacgccctcaagcc

SEQ ID NO: 1803507 - DNA, 25 bp, Homo sapien
gggctccccgtgcttgcgcttggaa

SEQ ID NO: 1803508 - DNA, 25 bp, Homo sapien
ctccccgtgcttgcgcttggaagca

SEQ ID NO: 1803509 - DNA, 25 bp, Homo sapien
cccagttctctcaggggctccgacc

SEQ ID NO: 1803510 - DNA, 25 bp, Homo sapien
tagttctacacaaaaccaagcatcg

SEQ ID NO: 1803511 - DNA, 25 bp, Homo sapien
ggaggcgtaacccatcacattgact

SEQ ID NO: 1803512 - DNA, 25 bp, Homo sapien
tccaccgaggatcaaagtgccctac

SEQ ID NO: 1803513 - DNA, 25 bp, Homo sapien
tgccctatgggaagcaacttcttgc

SEQ ID NO: 1803514 - DNA, 25 bp, Homo sapien
tgagcacttaggaaataggagactg

SEQ ID NO: 1803515 - DNA, 25 bp, Homo sapien
gacttatttatactcaagggctgaa

SEQ ID NO: 1803516 - DNA, 25 bp, Homo sapien
ggtgatcctgataagctgtatgaag

SEQ ID NO: 1803517 - DNA, 25 bp, Homo sapien
gctgaagctagtgcccatggagatt

SEQ ID NO: 1803518 - DNA, 25 bp, Homo sapien
ccatccaagtccatccttggccacc

SEQ ID NO: 1803519 - DNA, 25 bp, Homo sapien
tccaagtccatccttggccacctgc

SEQ ID NO: 1803520 - DNA, 25 bp, Homo sapien
atccaagtccatccttggccacctg

SEQ ID NO: 1803521 - DNA, 25 bp, Homo sapien
caagtccatccttggccacctgctt

SEQ ID NO: 1803522 - DNA, 25 bp, Homo sapien
catccgtttttattcctgtgttctc

SEQ ID NO: 1803523 - DNA, 25 bp, Homo sapien
cattccctgccatccgtttttattc

SEQ ID NO: 1803524 - DNA, 25 bp, Homo sapien
ctgtctgtatgcttctatttgaaca

SEQ ID NO: 1803525 - DNA, 25 bp, Homo sapien
ttgaacattcaacccacccgtcaag

SEQ ID NO: 1803526 - DNA, 25 bp, Homo sapien
gtgttgtgggcctctctcaggaggc

SEQ ID NO: 1803527 - DNA, 25 bp, Homo sapien
gaaatgaaggactttttatgcctcc

SEQ ID NO: 1803528 - DNA, 25 bp, Homo sapien
aatggctaccctctcattctcattg

SEQ ID NO: 1803529 - DNA, 25 bp, Homo sapien
cagcctggaacatcagtgaccactt

SEQ ID NO: 1803530 - DNA, 25 bp, Homo sapien
atttgctcctttctcgtaagtaggt

SEQ ID NO: 1803531 - DNA, 25 bp, Homo sapien
tcgtaagtaggtttgcctatcttta

SEQ ID NO: 1803532 - DNA, 25 bp, Homo sapien
aggacaccctgtggccacaggcaag

SEQ ID NO: 1803533 - DNA, 25 bp, Homo sapien
caggcaagtcgtttggagcctgttg

SEQ ID NO: 1803534 - DNA, 25 bp, Homo sapien
gccacaggcaagtcgtttggagcct

SEQ ID NO: 1803535 - DNA, 25 bp, Homo sapien
ccctgtggccacaggcaagtcgttt

SEQ ID NO: 1803536 - DNA, 25 bp, Homo sapien
gccatgtccaatctttcagcaaaat

SEQ ID NO: 1803537 - DNA, 25 bp, Homo sapien
tctgtttctctgaatgccatgtcca

SEQ ID NO: 1803538 - DNA, 25 bp, Homo sapien
ttcatggcaacctcattcttccagt

SEQ ID NO: 1803539 - DNA, 25 bp, Homo sapien
tttgtcattaaaacctctgtttctc

SEQ ID NO: 1803540 - DNA, 25 bp, Homo sapien
cctggcctacgtgagtaaatttggt

SEQ ID NO: 1803541 - DNA, 25 bp, Homo sapien
cagtgagaggctgaatttggaacac

SEQ ID NO: 1803542 - DNA, 25 bp, Homo sapien
gccttgctctggaagtgttcagtga

SEQ ID NO: 1803543 - DNA, 25 bp, Homo sapien
gaacacgtcatagaaattcctggcc

SEQ ID NO: 1803544 - DNA, 25 bp, Homo sapien
gacacatcataccataaacataggg

SEQ ID NO: 1803545 - DNA, 25 bp, Homo sapien
aatgagacacatcataccataaaca

SEQ ID NO: 1803546 - DNA, 25 bp, Homo sapien
caaaatgagacacatcataccataa

SEQ ID NO: 1803547 - DNA, 25 bp, Homo sapien
aaacatagggtatctggattttctc

SEQ ID NO: 1803548 - DNA, 25 bp, Homo sapien
ggtgacaatgtattccctaatttca

SEQ ID NO: 1803549 - DNA, 25 bp, Homo sapien
aaattccaggtgacaatgtattccc

SEQ ID NO: 1803550 - DNA, 25 bp, Homo sapien
ccaggtgacaatgtattccctaatt

SEQ ID NO: 1803551 - DNA, 25 bp, Homo sapien
ttccaggtgacaatgtattccctaa

SEQ ID NO: 1803552 - DNA, 25 bp, Homo sapien
tatttctcacacaatgttcttcttg

SEQ ID NO: 1803553 - DNA, 25 bp, Homo sapien
atatttctcacacaatgttcttctt

SEQ ID NO: 1803554 - DNA, 25 bp, Homo sapien
tttctcacacaatgttcttcttgca

SEQ ID NO: 1803555 - DNA, 25 bp, Homo sapien
tctcacacaatgttcttcttgcaga

SEQ ID NO: 1803556 - DNA, 25 bp, Homo sapien
ctgccaggtcaggacgcgtctgtta

SEQ ID NO: 1803557 - DNA, 25 bp, Homo sapien
tgggacacgtcagaatatttcaggc

SEQ ID NO: 1803558 - DNA, 25 bp, Homo sapien
cccaggaactatgtgagtgtgaggc

SEQ ID NO: 1803559 - DNA, 25 bp, Homo sapien
ttctcaataagagtattcctaggcc

SEQ ID NO: 1803560 - DNA, 25 bp, Homo sapien
agggcccatggcttgtcacgtgaga

SEQ ID NO: 1803561 - DNA, 25 bp, Homo sapien
tagaatgcatttcgaagctgccgtg

SEQ ID NO: 1803562 - DNA, 25 bp, Homo sapien
cgtggttccctaggagcagcacaga

SEQ ID NO: 1803563 - DNA, 25 bp, Homo sapien
ttcagggacggagaccactcagatg

SEQ ID NO: 1803564 - DNA, 25 bp, Homo sapien
cttggagagtactggctggagacaa

SEQ ID NO: 1803565 - DNA, 25 bp, Homo sapien
gaaggtgtattagtacattcctgca

SEQ ID NO: 1803566 - DNA, 25 bp, Homo sapien
ccaggatcattcaccagtataaaag

SEQ ID NO: 1803567 - DNA, 25 bp, Homo sapien
ccgactcctttcagacttggagagt

SEQ ID NO: 1803568 - DNA, 25 bp, Homo sapien
gcggcgagggacaagcctcccagat

SEQ ID NO: 1803569 - DNA, 25 bp, Homo sapien
acggtgggcggcgagggacaagcct

SEQ ID NO: 1803570 - DNA, 25 bp, Homo sapien
caagcctcccagatcggcggcggtg

SEQ ID NO: 1803571 - DNA, 25 bp, Homo sapien
agggacaagcctcccagatcggcgg

SEQ ID NO: 1803572 - DNA, 25 bp, Homo sapien
cccgaagtgcgggagtgactcgact

SEQ ID NO: 1803573 - DNA, 25 bp, Homo sapien
caccggagccccgaagtgcgggagt

SEQ ID NO: 1803574 - DNA, 25 bp, Homo sapien
gagccccgaagtgcgggagtgactc

SEQ ID NO: 1803575 - DNA, 25 bp, Homo sapien
tgcgggagtgactcgactccgcctc

SEQ ID NO: 1803576 - DNA, 25 bp, Homo sapien
ccgtgcacggagccccgcatggccg

SEQ ID NO: 1803577 - DNA, 25 bp, Homo sapien
cggagccccgcatggccgcggcggg

SEQ ID NO: 1803578 - DNA, 25 bp, Homo sapien
cacggagccccgcatggccgcggcg

SEQ ID NO: 1803579 - DNA, 25 bp, Homo sapien
tgcacggagccccgcatggccgcgg

SEQ ID NO: 1803580 - DNA, 25 bp, Homo sapien
tctgactcggtctcgggttccggtg

SEQ ID NO: 1803581 - DNA, 25 bp, Homo sapien
atggcggcggcaggcgtgacggcaa

SEQ ID NO: 1803582 - DNA, 25 bp, Homo sapien
caggcgtgacggcaaaggcgggagg

SEQ ID NO: 1803583 - DNA, 25 bp, Homo sapien
ccgccaagcagcactcgggttctga

SEQ ID NO: 1803584 - DNA, 25 bp, Homo sapien
tgtcttcttgatgtacagaccgacg

SEQ ID NO: 1803585 - DNA, 25 bp, Homo sapien
gtcttcttgatgtacagaccgacgc

SEQ ID NO: 1803586 - DNA, 25 bp, Homo sapien
taagtattgccgagcttcttcaaaa

SEQ ID NO: 1803587 - DNA, 25 bp, Homo sapien
cttcaagaagtaagtattgccgagc

SEQ ID NO: 1803588 - DNA, 25 bp, Homo sapien
ccttcgggtaacaatgctgtcttca

SEQ ID NO: 1803589 - DNA, 25 bp, Homo sapien
tgccttcgggtaacaatgctgtctt

SEQ ID NO: 1803590 - DNA, 25 bp, Homo sapien
ggctcacctcccttatctgaaaatg

SEQ ID NO: 1803591 - DNA, 25 bp, Homo sapien
tctgcactaatacgtctcttaaagg

SEQ ID NO: 1803592 - DNA, 25 bp, Homo sapien
tatggatttgagaccagattcccgg

SEQ ID NO: 1803593 - DNA, 25 bp, Homo sapien
tattacagttctgcaccagaccatg

SEQ ID NO: 1803594 - DNA, 25 bp, Homo sapien
gcttgtcagaaaaacagttagtagt

SEQ ID NO: 1803595 - DNA, 25 bp, Homo sapien
gaaaaacagttagtagttctatcac

SEQ ID NO: 1803596 - DNA, 25 bp, Homo sapien
ttagtagttctatcaccctcatccc

SEQ ID NO: 1803597 - DNA, 25 bp, Homo sapien
gtgcttgtcagaaaaacagttagta

SEQ ID NO: 1803598 - DNA, 25 bp, Homo sapien
ggagtgaatccgagtcccagaagca

SEQ ID NO: 1803599 - DNA, 25 bp, Homo sapien
cctcaagggaaatcacagtcatgtc

SEQ ID NO: 1803600 - DNA, 25 bp, Homo sapien
ccaagtgacctgttggtagctaaca

SEQ ID NO: 1803601 - DNA, 25 bp, Homo sapien
aattacactattagcacctcaaggg

SEQ ID NO: 1803602 - DNA, 25 bp, Homo sapien
caagctgaatctcccaatgtgccct

SEQ ID NO: 1803603 - DNA, 25 bp, Homo sapien
ggtaccataaagattctctgtattt

SEQ ID NO: 1803604 - DNA, 25 bp, Homo sapien
catcggagaagtcttctagatcaga

SEQ ID NO: 1803605 - DNA, 25 bp, Homo sapien
cagattcaggactcttgcaagctga

SEQ ID NO: 1803606 - DNA, 25 bp, Homo sapien
gcgtttcatctgtcgaggtgtgctg

SEQ ID NO: 1803607 - DNA, 25 bp, Homo sapien
tgcgtttcatctgtcgaggtgtgct

SEQ ID NO: 1803608 - DNA, 25 bp, Homo sapien
tttcatctgtcgaggtgtgctgggg

SEQ ID NO: 1803609 - DNA, 25 bp, Homo sapien
cgtttcatctgtcgaggtgtgctgg

SEQ ID NO: 1803610 - DNA, 25 bp, Homo sapien
caaattagaccgactggctggcctc

SEQ ID NO: 1803611 - DNA, 25 bp, Homo sapien
aattagaccgactggctggcctccc

SEQ ID NO: 1803612 - DNA, 25 bp, Homo sapien
tcaaattagaccgactggctggcct

SEQ ID NO: 1803613 - DNA, 25 bp, Homo sapien
ctttcaaattagaccgactggctgg

SEQ ID NO: 1803614 - DNA, 25 bp, Homo sapien
tcagtagatgctacttcactgattc

SEQ ID NO: 1803615 - DNA, 25 bp, Homo sapien
tactaacacgaagcaaatatttatt

SEQ ID NO: 1803616 - DNA, 25 bp, Homo sapien
tgattcagtagatgctacttcactg

SEQ ID NO: 1803617 - DNA, 25 bp, Homo sapien
tttactaacacgaagcaaatattta

SEQ ID NO: 1803618 - DNA, 25 bp, Homo sapien
cagttcacatttccttggacagctt

SEQ ID NO: 1803619 - DNA, 25 bp, Homo sapien
gatgagtccaactctgaccgcagtt

SEQ ID NO: 1803620 - DNA, 25 bp, Homo sapien
agagatcctttgtctgttgcagtga

SEQ ID NO: 1803621 - DNA, 25 bp, Homo sapien
gttaatagtatgactcagagatcct

SEQ ID NO: 1803622 - DNA, 25 bp, Homo sapien
gacagctgccgtgtaagaagtccaa

SEQ ID NO: 1803623 - DNA, 25 bp, Homo sapien
cacagtgaatttgggccagcctcat

SEQ ID NO: 1803624 - DNA, 25 bp, Homo sapien
ctaagaaggcctgcgatttccacct

SEQ ID NO: 1803625 - DNA, 25 bp, Homo sapien
ctgggctagccatgaggaagatcac

SEQ ID NO: 1803626 - DNA, 25 bp, Homo sapien
atgactggcagcgtagagatgccag

SEQ ID NO: 1803627 - DNA, 25 bp, Homo sapien
accagggatgactggcagcgtagag

SEQ ID NO: 1803628 - DNA, 25 bp, Homo sapien
tagagatgccagtagcctgcactcc

SEQ ID NO: 1803629 - DNA, 25 bp, Homo sapien
ttccttgctccctcacagatgcctg

SEQ ID NO: 1803630 - DNA, 25 bp, Homo sapien
acagcatgggagatctgacggacac

SEQ ID NO: 1803631 - DNA, 25 bp, Homo sapien
aacagcatgggagatctgacggaca

SEQ ID NO: 1803632 - DNA, 25 bp, Homo sapien
aatatctgggatggcttgacgggct

SEQ ID NO: 1803633 - DNA, 25 bp, Homo sapien
gggatttcaaacactggccagccaa

SEQ ID NO: 1803634 - DNA, 25 bp, Homo sapien
gttaattgtccgtcctgcatgccag

SEQ ID NO: 1803635 - DNA, 25 bp, Homo sapien
caggtctggctataggcatgggcac

SEQ ID NO: 1803636 - DNA, 25 bp, Homo sapien
acactcatgtatgacattcagaagg

SEQ ID NO: 1803637 - DNA, 25 bp, Homo sapien
gactcggcagagaactaggaaggca

SEQ ID NO: 1803638 - DNA, 25 bp, Homo sapien
gcttaatactcaagagagatggttc

SEQ ID NO: 1803639 - DNA, 25 bp, Homo sapien
gcaggttcgaatgaaggtaaatcca

SEQ ID NO: 1803640 - DNA, 25 bp, Homo sapien
agcagccataaactccaaccagacg

SEQ ID NO: 1803641 - DNA, 25 bp, Homo sapien
ttatatcttcctacttaaatcttca

SEQ ID NO: 1803642 - DNA, 25 bp, Homo sapien
gacgatccgtgttttatatcttcct

SEQ ID NO: 1803643 - DNA, 25 bp, Homo sapien
taaactccaaccagacgatccgtgt

SEQ ID NO: 1803644 - DNA, 25 bp, Homo sapien
gatcctcttcaaaagcgtcaatgtt

SEQ ID NO: 1803645 - DNA, 25 bp, Homo sapien
cctgcagcatgaactggtagtactg

SEQ ID NO: 1803646 - DNA, 25 bp, Homo sapien
ttgcagtcgggcttctccaagtcct

SEQ ID NO: 1803647 - DNA, 25 bp, Homo sapien
cagaacctcctgcagcatgaactgg

SEQ ID NO: 1803648 - DNA, 25 bp, Homo sapien
gatcttcaacactcccagagccatg

SEQ ID NO: 1803649 - DNA, 25 bp, Homo sapien
agagccatgcaaggtccctagcaca

SEQ ID NO: 1803650 - DNA, 25 bp, Homo sapien
tgcctagtcccaccagactacgagt

SEQ ID NO: 1803651 - DNA, 25 bp, Homo sapien
caacacagcaagcttctctgctggc

SEQ ID NO: 1803652 - DNA, 25 bp, Homo sapien
gacaggctcagcttcggtcatggct

SEQ ID NO: 1803653 - DNA, 25 bp, Homo sapien
tgtcacacccctagatatcaaggct

SEQ ID NO: 1803654 - DNA, 25 bp, Homo sapien
ctctagttaatctctgggtgggcct

SEQ ID NO: 1803655 - DNA, 25 bp, Homo sapien
ttcctgacaaccagagaaggctgcg

SEQ ID NO: 1803656 - DNA, 25 bp, Homo sapien
gctcggccaccctgccgtggcttag

SEQ ID NO: 1803657 - DNA, 25 bp, Homo sapien
ggctcggccaccctgccgtggctta

SEQ ID NO: 1803658 - DNA, 25 bp, Homo sapien
ctcgggctcggccaccctgccgtgg

SEQ ID NO: 1803659 - DNA, 25 bp, Homo sapien
cgggctcggccaccctgccgtggct

SEQ ID NO: 1803660 - DNA, 25 bp, Homo sapien
taatcggccttcatctaacagtctt

SEQ ID NO: 1803661 - DNA, 25 bp, Homo sapien
tggacttctaatcggccttcatcta

SEQ ID NO: 1803662 - DNA, 25 bp, Homo sapien
cttctaatcggccttcatctaacag

SEQ ID NO: 1803663 - DNA, 25 bp, Homo sapien
ctatggacttctaatcggccttcat

SEQ ID NO: 1803664 - DNA, 25 bp, Homo sapien
cagggtcctgctctgtttcccaggt

SEQ ID NO: 1803665 - DNA, 25 bp, Homo sapien
ggagtgcaatggcatgatcttggct

SEQ ID NO: 1803666 - DNA, 25 bp, Homo sapien
actacatgtgtacaccaccatgccc

SEQ ID NO: 1803667 - DNA, 25 bp, Homo sapien
tactgcaaccactgcctcccaggtt

SEQ ID NO: 1803668 - DNA, 25 bp, Homo sapien
ccagcttctcatgtaatcaaaatac

SEQ ID NO: 1803669 - DNA, 25 bp, Homo sapien
tcctccccgtatgtaatgagttatt

SEQ ID NO: 1803670 - DNA, 25 bp, Homo sapien
tgctgtagcatttggatccagcttc

SEQ ID NO: 1803671 - DNA, 25 bp, Homo sapien
cgatgcttgaggtaattgctgtagc

SEQ ID NO: 1803672 - DNA, 25 bp, Homo sapien
gctgtcatccgcactagtccaaaat

SEQ ID NO: 1803673 - DNA, 25 bp, Homo sapien
ctgatttcgtcggaagcactgctgt

SEQ ID NO: 1803674 - DNA, 25 bp, Homo sapien
gtccaaaattcagcacagctctcct

SEQ ID NO: 1803675 - DNA, 25 bp, Homo sapien
gatttcgtcggaagcactgctgtca

SEQ ID NO: 1803676 - DNA, 25 bp, Homo sapien
gaaggaaactacgagataagaagtg

SEQ ID NO: 1803677 - DNA, 25 bp, Homo sapien
catgaggaaggaaactacgagataa

SEQ ID NO: 1803678 - DNA, 25 bp, Homo sapien
aggaaactacgagataagaagtgga

SEQ ID NO: 1803679 - DNA, 25 bp, Homo sapien
tgaggaaggaaactacgagataaga

SEQ ID NO: 1803680 - DNA, 25 bp, Homo sapien
ttcagggctcgactgatctctataa

SEQ ID NO: 1803681 - DNA, 25 bp, Homo sapien
tccttcagggctcgactgatctcta

SEQ ID NO: 1803682 - DNA, 25 bp, Homo sapien
gggctcgactgatctctataacaga

SEQ ID NO: 1803683 - DNA, 25 bp, Homo sapien
tcgactgatctctataacagacctc

SEQ ID NO: 1803684 - DNA, 25 bp, Homo sapien
ggggctgaaagcctgaattctgctg

SEQ ID NO: 1803685 - DNA, 25 bp, Homo sapien
aacatccaggaggtctctaactggg

SEQ ID NO: 1803686 - DNA, 25 bp, Homo sapien
gggctgaaagcctgaattctgctgc

SEQ ID NO: 1803687 - DNA, 25 bp, Homo sapien
aggtctctaactggggctgaaagcc

SEQ ID NO: 1803688 - DNA, 25 bp, Homo sapien
agagtgtctggaacaaacatttgca

SEQ ID NO: 1803689 - DNA, 25 bp, Homo sapien
caagagtgtctggaacaaacatttg

SEQ ID NO: 1803690 - DNA, 25 bp, Homo sapien
aagagtgtctggaacaaacatttgc

SEQ ID NO: 1803691 - DNA, 25 bp, Homo sapien
cagataggcatcgatgagtacgtca

SEQ ID NO: 1803692 - DNA, 25 bp, Homo sapien
cgggctcgatcaccgtgcttggtca

SEQ ID NO: 1803693 - DNA, 25 bp, Homo sapien
tgcatgcttctcagggtgtcaacag

SEQ ID NO: 1803694 - DNA, 25 bp, Homo sapien
gctgtcctctgaatcacgggctcga

SEQ ID NO: 1803695 - DNA, 25 bp, Homo sapien
ttgaagtaacactgctgcaaagatg

SEQ ID NO: 1803696 - DNA, 25 bp, Homo sapien
aaagtccttgaagtaacactgctgc

SEQ ID NO: 1803697 - DNA, 25 bp, Homo sapien
taaaagtccttgaagtaacactgct

SEQ ID NO: 1803698 - DNA, 25 bp, Homo sapien
tccttgaagtaacactgctgcaaag

SEQ ID NO: 1803699 - DNA, 25 bp, Homo sapien
gcgcagactgcatgacaactagtaa

SEQ ID NO: 1803700 - DNA, 25 bp, Homo sapien
ctgcaaagctttggcgatgaccggc

SEQ ID NO: 1803701 - DNA, 25 bp, Homo sapien
ctgaattgtgagatgcgcagactgc

SEQ ID NO: 1803702 - DNA, 25 bp, Homo sapien
cataagtccctcaatggactgctgg

SEQ ID NO: 1803703 - DNA, 25 bp, Homo sapien
tacacacgagtgcacacaaggtctc

SEQ ID NO: 1803704 - DNA, 25 bp, Homo sapien
ggcaatccccttactatggttacaa

SEQ ID NO: 1803705 - DNA, 25 bp, Homo sapien
tgccctggctcgagcttttgtcacc

SEQ ID NO: 1803706 - DNA, 25 bp, Homo sapien
ttcttccagcaatccatagagagag

SEQ ID NO: 1803707 - DNA, 25 bp, Homo sapien
gaagatttcgttcatcatcacacag

SEQ ID NO: 1803708 - DNA, 25 bp, Homo sapien
gagacgttgtccagagaagtttttg

SEQ ID NO: 1803709 - DNA, 25 bp, Homo sapien
tagatgacctcctccgatcgtgctg

SEQ ID NO: 1803710 - DNA, 25 bp, Homo sapien
taagtacgggtgcaattccacagag

SEQ ID NO: 1803711 - DNA, 25 bp, Homo sapien
tggtccacgcggtcaatggcattgc

SEQ ID NO: 1803712 - DNA, 25 bp, Homo sapien
tctgatgtgaacatgtggtccacgc

SEQ ID NO: 1803713 - DNA, 25 bp, Homo sapien
ctcggtagtactgttgcaaggtgac

SEQ ID NO: 1803714 - DNA, 25 bp, Homo sapien
ggtgacagattcagattcatcaacc

SEQ ID NO: 1803715 - DNA, 25 bp, Homo sapien
gatgatattcttgattaagctatga

SEQ ID NO: 1803716 - DNA, 25 bp, Homo sapien
gatatacagcagtgatataagatga

SEQ ID NO: 1803717 - DNA, 25 bp, Homo sapien
tgtaccgtgtttcctcttattttga

SEQ ID NO: 1803718 - DNA, 25 bp, Homo sapien
caagcaattactaaattgtaccgtg

SEQ ID NO: 1803719 - DNA, 25 bp, Homo sapien
tccacttccgggcaaagcttatata

SEQ ID NO: 1803720 - DNA, 25 bp, Homo sapien
tttagtcaggacataattcatccac

SEQ ID NO: 1803721 - DNA, 25 bp, Homo sapien
tccccagacatcaaacgaacaactt

SEQ ID NO: 1803722 - DNA, 25 bp, Homo sapien
tatcttctgtctaaactccccagac

SEQ ID NO: 1803723 - DNA, 25 bp, Homo sapien
tgggtcttgtacctctaccactctc

SEQ ID NO: 1803724 - DNA, 25 bp, Homo sapien
ggtcttgtacctctaccactctcac

SEQ ID NO: 1803725 - DNA, 25 bp, Homo sapien
gggtcttgtacctctaccactctca

SEQ ID NO: 1803726 - DNA, 25 bp, Homo sapien
cttgtcaaaggagaacatgagttcc

SEQ ID NO: 1803727 - DNA, 25 bp, Homo sapien
gactttaagaaagtgccccatgcta

SEQ ID NO: 1803728 - DNA, 25 bp, Homo sapien
gagcctcacagacgattcacccatt

SEQ ID NO: 1803729 - DNA, 25 bp, Homo sapien
tagtggagctagtattgagcctcac

SEQ ID NO: 1803730 - DNA, 25 bp, Homo sapien
ctgaaataaaggcaggttcaattgc

SEQ ID NO: 1803731 - DNA, 25 bp, Homo sapien
taaaggcaggttcaattgcttgtag

SEQ ID NO: 1803732 - DNA, 25 bp, Homo sapien
ggttcaattgcttgtagaaaatcaa

SEQ ID NO: 1803733 - DNA, 25 bp, Homo sapien
ggcaggttcaattgcttgtagaaaa

SEQ ID NO: 1803734 - DNA, 25 bp, Homo sapien
gcattcattcatcaaggcttgtaaa

SEQ ID NO: 1803735 - DNA, 25 bp, Homo sapien
attcattcatcaaggcttgtaaact

SEQ ID NO: 1803736 - DNA, 25 bp, Homo sapien
cattcattcatcaaggcttgtaaac

SEQ ID NO: 1803737 - DNA, 25 bp, Homo sapien
gaaatgctgttaacggctgtcttac

SEQ ID NO: 1803738 - DNA, 25 bp, Homo sapien
agaaatgctgttaacggctgtctta

SEQ ID NO: 1803739 - DNA, 25 bp, Homo sapien
tacagtacattcatgacggccacag

SEQ ID NO: 1803740 - DNA, 25 bp, Homo sapien
gaaccaccctatatatgactgtgtg

SEQ ID NO: 1803741 - DNA, 25 bp, Homo sapien
gattatagagatgcttttcacagcc

SEQ ID NO: 1803742 - DNA, 25 bp, Homo sapien
ccacagtgtggccaatgaaaagaac

SEQ ID NO: 1803743 - DNA, 25 bp, Homo sapien
tcactatggcatcgaggtaccttca

SEQ ID NO: 1803744 - DNA, 25 bp, Homo sapien
gttaggagggtcactatggcatcga

SEQ ID NO: 1803745 - DNA, 25 bp, Homo sapien
gagggtcactatggcatcgaggtac

SEQ ID NO: 1803746 - DNA, 25 bp, Homo sapien
cttcataggacgggggctgttccga

SEQ ID NO: 1803747 - DNA, 25 bp, Homo sapien
cgcgtcggaaggcatgctccgagtg

SEQ ID NO: 1803748 - DNA, 25 bp, Homo sapien
tccgcgcgtcggaaggcatgctccg

SEQ ID NO: 1803749 - DNA, 25 bp, Homo sapien
ccgcgcgtcggaaggcatgctccga

SEQ ID NO: 1803750 - DNA, 25 bp, Homo sapien
ggctccgcgcgtcggaaggcatgct

SEQ ID NO: 1803751 - DNA, 25 bp, Homo sapien
gggctgggccgactggcagcaacag

SEQ ID NO: 1803752 - DNA, 25 bp, Homo sapien
tgctgatggatttgggcagcacaga

SEQ ID NO: 1803753 - DNA, 25 bp, Homo sapien
ctgcggaaggccctagagcatcact

SEQ ID NO: 1803754 - DNA, 25 bp, Homo sapien
cacaccctaacactatggttgctgt

SEQ ID NO: 1803755 - DNA, 25 bp, Homo sapien
tctgggccgtgacaacctgcggaag

SEQ ID NO: 1803756 - DNA, 25 bp, Homo sapien
tatccattcgtgttggtcagtgcca

SEQ ID NO: 1803757 - DNA, 25 bp, Homo sapien
gcaaccagaatgaacccataaagag

SEQ ID NO: 1803758 - DNA, 25 bp, Homo sapien
ggcagcggaaaacgcacaggacaga

SEQ ID NO: 1803759 - DNA, 25 bp, Homo sapien
gctgctgtggagaccgtcctctgga

SEQ ID NO: 1803760 - DNA, 25 bp, Homo sapien
aaaggtttctcaagcagtagccaag

SEQ ID NO: 1803761 - DNA, 25 bp, Homo sapien
aatcgatcattttcaggaacgctgg

SEQ ID NO: 1803762 - DNA, 25 bp, Homo sapien
tcgctcctccgtggggcttgagtga

SEQ ID NO: 1803763 - DNA, 25 bp, Homo sapien
gagtgacgactcagggacctaaact

SEQ ID NO: 1803764 - DNA, 25 bp, Homo sapien
ctatggaagccaatcgatcattttc

SEQ ID NO: 1803765 - DNA, 25 bp, Homo sapien
tgattagtgtccgaagttcccaact

SEQ ID NO: 1803766 - DNA, 25 bp, Homo sapien
cttgtggacccacttgaatctcctc

SEQ ID NO: 1803767 - DNA, 25 bp, Homo sapien
ggctgattagtgtccgaagttccca

SEQ ID NO: 1803768 - DNA, 25 bp, Homo sapien
tggacccacttgaatctcctcttgg

SEQ ID NO: 1803769 - DNA, 25 bp, Homo sapien
cgtaagttctttccctcaatgtcta

SEQ ID NO: 1803770 - DNA, 25 bp, Homo sapien
catggagtgcgctagacttgagaca

SEQ ID NO: 1803771 - DNA, 25 bp, Homo sapien
cttgagacaagtgccttctggtcct

SEQ ID NO: 1803772 - DNA, 25 bp, Homo sapien
tattgggctgcttagaaactatcat

SEQ ID NO: 1803773 - DNA, 25 bp, Homo sapien
caccaggcttgtcagtggttgcacc

SEQ ID NO: 1803774 - DNA, 25 bp, Homo sapien
ggttgcaccaaagttgtttcttgct

SEQ ID NO: 1803775 - DNA, 25 bp, Homo sapien
caggcttgtcagtggttgcaccaaa

SEQ ID NO: 1803776 - DNA, 25 bp, Homo sapien
tgtcagtggttgcaccaaagttgtt

SEQ ID NO: 1803777 - DNA, 25 bp, Homo sapien
aggctagagtgtgatggcgcgatct

SEQ ID NO: 1803778 - DNA, 25 bp, Homo sapien
ctctgcctcctgggttcaagcaatt

SEQ ID NO: 1803779 - DNA, 25 bp, Homo sapien
tgcctcctgggttcaagcaattctt

SEQ ID NO: 1803780 - DNA, 25 bp, Homo sapien
cagcccaccgcaacctctgcctcct

SEQ ID NO: 1803781 - DNA, 25 bp, Homo sapien
ggacttaggcgtatcacaaacttga

SEQ ID NO: 1803782 - DNA, 25 bp, Homo sapien
caatcggactgacttctggatagct

SEQ ID NO: 1803783 - DNA, 25 bp, Homo sapien
tcaagccaacgtgcataacattatc

SEQ ID NO: 1803784 - DNA, 25 bp, Homo sapien
tctatgggtcctagtttagaagcag

SEQ ID NO: 1803785 - DNA, 25 bp, Homo sapien
ccccggtgtcgacgctgatgcaggt

SEQ ID NO: 1803786 - DNA, 25 bp, Homo sapien
atcagctccccggtgtcgacgctga

SEQ ID NO: 1803787 - DNA, 25 bp, Homo sapien
agctccccggtgtcgacgctgatgc

SEQ ID NO: 1803788 - DNA, 25 bp, Homo sapien
ctccccggtgtcgacgctgatgcag

SEQ ID NO: 1803789 - DNA, 25 bp, Homo sapien
tatggagctccacaccaaaataccg

SEQ ID NO: 1803790 - DNA, 25 bp, Homo sapien
cttatggtcattaggttgaaatcga

SEQ ID NO: 1803791 - DNA, 25 bp, Homo sapien
caccaaaataccgaaccagattggg

SEQ ID NO: 1803792 - DNA, 25 bp, Homo sapien
atattttcaattcgtctgcagtttc

SEQ ID NO: 1803793 - DNA, 25 bp, Homo sapien
gagaagacctgtgatgtagaacagg

SEQ ID NO: 1803794 - DNA, 25 bp, Homo sapien
gactccattctgtgccctcactgat

SEQ ID NO: 1803795 - DNA, 25 bp, Homo sapien
ggactccattctgtgccctcactga

SEQ ID NO: 1803796 - DNA, 25 bp, Homo sapien
tcctctagtttcagagagaaggcag

SEQ ID NO: 1803797 - DNA, 25 bp, Homo sapien
gaaatgatgtaactcatggagattt

SEQ ID NO: 1803798 - DNA, 25 bp, Homo sapien
tcctgagaattaggcaaagttactg

SEQ ID NO: 1803799 - DNA, 25 bp, Homo sapien
tttaggaggaactcctctagtttca

SEQ ID NO: 1803800 - DNA, 25 bp, Homo sapien
gccatcctgagcactgaatgtgtct

SEQ ID NO: 1803801 - DNA, 25 bp, Homo sapien
cagggctgtccctacaaatacatta

SEQ ID NO: 1803802 - DNA, 25 bp, Homo sapien
gaagctcatgctctacaccacgatg

SEQ ID NO: 1803803 - DNA, 25 bp, Homo sapien
tataatctcagacagggaccaacag

SEQ ID NO: 1803804 - DNA, 25 bp, Homo sapien
ttctaaagtcccctcatcgcagtac

SEQ ID NO: 1803805 - DNA, 25 bp, Homo sapien
gccatgctcatggaggacgttgatc

SEQ ID NO: 1803806 - DNA, 25 bp, Homo sapien
aatgtcacggtggactatgccatgc

SEQ ID NO: 1803807 - DNA, 25 bp, Homo sapien
gacgttgatcgcaatggtgatctgc

SEQ ID NO: 1803808 - DNA, 25 bp, Homo sapien
aacaccattttgtgacagtggacag

SEQ ID NO: 1803809 - DNA, 25 bp, Homo sapien
caaacgtgcaaacaccattttgtga

SEQ ID NO: 1803810 - DNA, 25 bp, Homo sapien
ggagtctcttcctgccacggaacaa

SEQ ID NO: 1803811 - DNA, 25 bp, Homo sapien
ctgcttcagattctaagggagtctc

SEQ ID NO: 1803812 - DNA, 25 bp, Homo sapien
gatgaggtaaggaagatattggcac

SEQ ID NO: 1803813 - DNA, 25 bp, Homo sapien
ttgattaatccagatgaggtaagga

SEQ ID NO: 1803814 - DNA, 25 bp, Homo sapien
ggtgctgttcacttcaccaggcatg

SEQ ID NO: 1803815 - DNA, 25 bp, Homo sapien
gttcacttcaccaggcatggtctgg

SEQ ID NO: 1803816 - DNA, 25 bp, Homo sapien
cctctcctttggcacgagtgatgac

SEQ ID NO: 1803817 - DNA, 25 bp, Homo sapien
cagtcaccatctctatgacaacaca

SEQ ID NO: 1803818 - DNA, 25 bp, Homo sapien
cagactccagatgtcggccgcacgc

SEQ ID NO: 1803819 - DNA, 25 bp, Homo sapien
cacgagtgatgacttcaggtgccat

SEQ ID NO: 1803820 - DNA, 25 bp, Homo sapien
ccttcagggcttaatctttcaggga

SEQ ID NO: 1803821 - DNA, 25 bp, Homo sapien
ttgtgctcatactcatgccaaggcc

SEQ ID NO: 1803822 - DNA, 25 bp, Homo sapien
tgacaaacgaatggtcgaggagctg

SEQ ID NO: 1803823 - DNA, 25 bp, Homo sapien
tttgggtcactctcaaggcagtgag

SEQ ID NO: 1803824 - DNA, 25 bp, Homo sapien
taaaacgcctatatgcactctcagg

SEQ ID NO: 1803825 - DNA, 25 bp, Homo sapien
tgtgtgcttgtgcatacgcgcagta

SEQ ID NO: 1803826 - DNA, 25 bp, Homo sapien
aatgtctccatagctgatcctgctg

SEQ ID NO: 1803827 - DNA, 25 bp, Homo sapien
taagcctgggaactgactaatgaaa

SEQ ID NO: 1803828 - DNA, 25 bp, Homo sapien
tgcagcttctttaacctcgtggcca

SEQ ID NO: 1803829 - DNA, 25 bp, Homo sapien
taaaaacaaggtatgggacgcctga

SEQ ID NO: 1803830 - DNA, 25 bp, Homo sapien
cagaggcgatggtccgtgtacagta

SEQ ID NO: 1803831 - DNA, 25 bp, Homo sapien
tgatgtcacggttctcagtcgcgcg

SEQ ID NO: 1803832 - DNA, 25 bp, Homo sapien
gaactcccaacatgtgataacaagg

SEQ ID NO: 1803833 - DNA, 25 bp, Homo sapien
tgaccatctttagcacacgtgattg

SEQ ID NO: 1803834 - DNA, 25 bp, Homo sapien
tcagcgaggcgatcctaaagagacg

SEQ ID NO: 1803835 - DNA, 25 bp, Homo sapien
ctgacctagcacctaaacatcttgg

SEQ ID NO: 1803836 - DNA, 25 bp, Homo sapien
aaatcaaaaatagatgacaggccta

SEQ ID NO: 1803837 - DNA, 25 bp, Homo sapien
gagagcacaagcaacaaggactaag

SEQ ID NO: 1803838 - DNA, 25 bp, Homo sapien
gaagaatgaatgtggacccttatgt

SEQ ID NO: 1803839 - DNA, 25 bp, Homo sapien
gacaggcctaatgtaagtgctaaaa

SEQ ID NO: 1803840 - DNA, 25 bp, Homo sapien
tgttcacgggagatggatcagcccc

SEQ ID NO: 1803841 - DNA, 25 bp, Homo sapien
gaactagtacgggatggctcagact

SEQ ID NO: 1803842 - DNA, 25 bp, Homo sapien
aaccatgggcaagggtggaacacac

SEQ ID NO: 1803843 - DNA, 25 bp, Homo sapien
ggagcttccttactcgcatctgagg

SEQ ID NO: 1803844 - DNA, 25 bp, Homo sapien
tgccaatgctttcggactccaccat

SEQ ID NO: 1803845 - DNA, 25 bp, Homo sapien
gtagctcctaagtgatgttcacaga

SEQ ID NO: 1803846 - DNA, 25 bp, Homo sapien
ttaggcaagcccatgtgtaacatgc

SEQ ID NO: 1803847 - DNA, 25 bp, Homo sapien
gatgccttaactgacgtagctccta

SEQ ID NO: 1803848 - DNA, 25 bp, Homo sapien
gacgtgacgggccatatcctaggcg

SEQ ID NO: 1803849 - DNA, 25 bp, Homo sapien
gcagggaatttaatggacttcttcc

SEQ ID NO: 1803850 - DNA, 25 bp, Homo sapien
agtgcagggtcatccccagacgtga

SEQ ID NO: 1803851 - DNA, 25 bp, Homo sapien
gcgactcctgcagcttatagaagca

SEQ ID NO: 1803852 - DNA, 25 bp, Homo sapien
cctgcgcccttaatgacacagacaa

SEQ ID NO: 1803853 - DNA, 25 bp, Homo sapien
ccacgggtactcctggacggaagct

SEQ ID NO: 1803854 - DNA, 25 bp, Homo sapien
taatgacacagacaaccacgggtac

SEQ ID NO: 1803855 - DNA, 25 bp, Homo sapien
agacaaccacgggtactcctggacg

SEQ ID NO: 1803856 - DNA, 25 bp, Homo sapien
ctgcacagggcatgaagcaccgtgt

SEQ ID NO: 1803857 - DNA, 25 bp, Homo sapien
cacagggcatgaagcaccgtgtgca

SEQ ID NO: 1803858 - DNA, 25 bp, Homo sapien
cagggcatgaagcaccgtgtgcaga

SEQ ID NO: 1803859 - DNA, 25 bp, Homo sapien
ggcatgaagcaccgtgtgcagagat

SEQ ID NO: 1803860 - DNA, 25 bp, Homo sapien
caggcaggcttgatgggagcgccca

SEQ ID NO: 1803861 - DNA, 25 bp, Homo sapien
cctgagttaactcgctggcggccct

SEQ ID NO: 1803862 - DNA, 25 bp, Homo sapien
caggcttgatgggagcgcccagcac

SEQ ID NO: 1803863 - DNA, 25 bp, Homo sapien
agagcctagggcctgagttaactcg

SEQ ID NO: 1803864 - DNA, 25 bp, Homo sapien
gggaggcagctgccgcggaggtgtg

SEQ ID NO: 1803865 - DNA, 25 bp, Homo sapien
gcagctgccgcggaggtgtgggcag

SEQ ID NO: 1803866 - DNA, 25 bp, Homo sapien
aggcagctgccgcggaggtgtgggc

SEQ ID NO: 1803867 - DNA, 25 bp, Homo sapien
cagctgccgcggaggtgtgggcagc

SEQ ID NO: 1803868 - DNA, 25 bp, Homo sapien
catagaaagggtattttaggctgca

SEQ ID NO: 1803869 - DNA, 25 bp, Homo sapien
gaactttgttctgtgatcatagaaa

SEQ ID NO: 1803870 - DNA, 25 bp, Homo sapien
tgtgagaatggctgtgtggtgagtg

SEQ ID NO: 1803871 - DNA, 25 bp, Homo sapien
catgtgctttagtgggctttggttt

SEQ ID NO: 1803872 - DNA, 25 bp, Homo sapien
tgagtccctgcgaacggctgtgcat

SEQ ID NO: 1803873 - DNA, 25 bp, Homo sapien
gcaggatgatggcacctcaaacccg

SEQ ID NO: 1803874 - DNA, 25 bp, Homo sapien
caaggatgattgtaaagccggcagg

SEQ ID NO: 1803875 - DNA, 25 bp, Homo sapien
cgcttgtgatttgcggccacgggcc

SEQ ID NO: 1803876 - DNA, 25 bp, Homo sapien
catctgcccgctccagagggtgtag

SEQ ID NO: 1803877 - DNA, 25 bp, Homo sapien
caacttctgagcattaggccctgct

SEQ ID NO: 1803878 - DNA, 25 bp, Homo sapien
gagggtgtagttgaaattgcaactt

SEQ ID NO: 1803879 - DNA, 25 bp, Homo sapien
cctatattaaactgggctcccacga

SEQ ID NO: 1803880 - DNA, 25 bp, Homo sapien
agaggggccccttcaggatgaaggc

SEQ ID NO: 1803881 - DNA, 25 bp, Homo sapien
gaggggccccttcaggatgaaggct

SEQ ID NO: 1803882 - DNA, 25 bp, Homo sapien
tcggcgacagagcttttcatgggtc

SEQ ID NO: 1803883 - DNA, 25 bp, Homo sapien
gacagctgggagtgctccctccctg

SEQ ID NO: 1803884 - DNA, 25 bp, Homo sapien
actgagtggagacactcggcgacag

SEQ ID NO: 1803885 - DNA, 25 bp, Homo sapien
ccaggtgaccggtattctcgggcta

SEQ ID NO: 1803886 - DNA, 25 bp, Homo sapien
tcaggagcgggtcttccctgacgct

SEQ ID NO: 1803887 - DNA, 25 bp, Homo sapien
caccgagccccgtgtggcgtctgag

SEQ ID NO: 1803888 - DNA, 25 bp, Homo sapien
gctgttttgggcctcgctggtgctc

SEQ ID NO: 1803889 - DNA, 25 bp, Homo sapien
cctggaccctcgtgaactggctgtt

SEQ ID NO: 1803890 - DNA, 25 bp, Homo sapien
gacgcttcggaccaggcttgttaat

SEQ ID NO: 1803891 - DNA, 25 bp, Homo sapien
acaagtgacgcttcggaccaggctt

SEQ ID NO: 1803892 - DNA, 25 bp, Homo sapien
tgtccaacagcagagtcacgcgaca

SEQ ID NO: 1803893 - DNA, 25 bp, Homo sapien
cagagtcacgcgacaagtgacgctt

SEQ ID NO: 1803894 - DNA, 25 bp, Homo sapien
tggcggtgctgttctctccccgata

SEQ ID NO: 1803895 - DNA, 25 bp, Homo sapien
tctccccgatagtcagtgggaggtc

SEQ ID NO: 1803896 - DNA, 25 bp, Homo sapien
cacaaccaagatgggccacggacat

SEQ ID NO: 1803897 - DNA, 25 bp, Homo sapien
caaaacgggtccacaaccaagatgg

SEQ ID NO: 1803898 - DNA, 25 bp, Homo sapien
cagctgctgctttagtctgtggccc

SEQ ID NO: 1803899 - DNA, 25 bp, Homo sapien
gctgctgctttagtctgtggcccct

SEQ ID NO: 1803900 - DNA, 25 bp, Homo sapien
tgctgctttagtctgtggccccttc

SEQ ID NO: 1803901 - DNA, 25 bp, Homo sapien
ccttcctggctgcagaaccaatcat

SEQ ID NO: 1803902 - DNA, 25 bp, Homo sapien
ccatagtggtttactccacgtgaaa

SEQ ID NO: 1803903 - DNA, 25 bp, Homo sapien
ccagagatgcagaccaggtcatggg

SEQ ID NO: 1803904 - DNA, 25 bp, Homo sapien
caggatgggtcgctcaactagatta

SEQ ID NO: 1803905 - DNA, 25 bp, Homo sapien
aactagattagctccaagcacctgc

SEQ ID NO: 1803906 - DNA, 25 bp, Homo sapien
tgactaactggtaaccctactggga

SEQ ID NO: 1803907 - DNA, 25 bp, Homo sapien
ttcatgaatgactggacgtttgcaa

SEQ ID NO: 1803908 - DNA, 25 bp, Homo sapien
ctactgggaaaccttcatgaatgac

SEQ ID NO: 1803909 - DNA, 25 bp, Homo sapien
gaaaccttcatgaatgactggacgt

SEQ ID NO: 1803910 - DNA, 25 bp, Homo sapien
cctcaaagcagagccagtagtgatc

SEQ ID NO: 1803911 - DNA, 25 bp, Homo sapien
gctgggctgtccgttcagaagagaa

SEQ ID NO: 1803912 - DNA, 25 bp, Homo sapien
ttgtgtcctgacagccgtgaccgtg

SEQ ID NO: 1803913 - DNA, 25 bp, Homo sapien
tcctgctgcttcaagcctgcacggt

SEQ ID NO: 1803914 - DNA, 25 bp, Homo sapien
accgcgggttcataccgactaccat

SEQ ID NO: 1803915 - DNA, 25 bp, Homo sapien
agctcacgggactatggctgcaccg

SEQ ID NO: 1803916 - DNA, 25 bp, Homo sapien
ggaagtgggcagctcacgggactat

SEQ ID NO: 1803917 - DNA, 25 bp, Homo sapien
actatggctgcaccgcgggttcata

SEQ ID NO: 1803918 - DNA, 25 bp, Homo sapien
gatgaggaacccgataatggtgacg

SEQ ID NO: 1803919 - DNA, 25 bp, Homo sapien
gataatggtgacgaccgaggtagca

SEQ ID NO: 1803920 - DNA, 25 bp, Homo sapien
tgacgaccgaggtagcaggcgaacc

SEQ ID NO: 1803921 - DNA, 25 bp, Homo sapien
cattcactgggtttggcaagtgtgc

SEQ ID NO: 1803922 - DNA, 25 bp, Homo sapien
atggcagatacccagtgctgcccgc

SEQ ID NO: 1803923 - DNA, 25 bp, Homo sapien
ccgccaccatgtgaattcatcagct

SEQ ID NO: 1803924 - DNA, 25 bp, Homo sapien
acctgagcctatggcagatacccag

SEQ ID NO: 1803925 - DNA, 25 bp, Homo sapien
cgccatggttttgtcagctctgtag

SEQ ID NO: 1803926 - DNA, 25 bp, Homo sapien
gaggccactgctcattgcagtgcct

SEQ ID NO: 1803927 - DNA, 25 bp, Homo sapien
ctgaaggctttggttgatcttggag

SEQ ID NO: 1803928 - DNA, 25 bp, Homo sapien
tggagtcacacgctgaaccttgcct

SEQ ID NO: 1803929 - DNA, 25 bp, Homo sapien
ctggcatgtgccagggctctgaagg

SEQ ID NO: 1803930 - DNA, 25 bp, Homo sapien
ttcttaaataacacatgatgttggg

SEQ ID NO: 1803931 - DNA, 25 bp, Homo sapien
gatccttctggagtctgtggaattt

SEQ ID NO: 1803932 - DNA, 25 bp, Homo sapien
gaaattcacgaaggtggcattttta

SEQ ID NO: 1803933 - DNA, 25 bp, Homo sapien
tttgcagaaattcacgaaggtggca

SEQ ID NO: 1803934 - DNA, 25 bp, Homo sapien
ttatgcacattctcacaaagcaagg

SEQ ID NO: 1803935 - DNA, 25 bp, Homo sapien
tatgcacattctcacaaagcaagga

SEQ ID NO: 1803936 - DNA, 25 bp, Homo sapien
tgttatgcacattctcacaaagcaa

SEQ ID NO: 1803937 - DNA, 25 bp, Homo sapien
atgcacattctcacaaagcaaggag

SEQ ID NO: 1803938 - DNA, 25 bp, Homo sapien
tggaagtttgggagccttgctcagt

SEQ ID NO: 1803939 - DNA, 25 bp, Homo sapien
aagtttgggagccttgctcagtggg

SEQ ID NO: 1803940 - DNA, 25 bp, Homo sapien
ggaagtttgggagccttgctcagtg

SEQ ID NO: 1803941 - DNA, 25 bp, Homo sapien
ggattcttgctaaagtgcttcctta

SEQ ID NO: 1803942 - DNA, 25 bp, Homo sapien
cacggagcgggaatttaatctcagc

SEQ ID NO: 1803943 - DNA, 25 bp, Homo sapien
ccccagacgggaagagacattcacg

SEQ ID NO: 1803944 - DNA, 25 bp, Homo sapien
gagggagaaggtgagccccacaaca

SEQ ID NO: 1803945 - DNA, 25 bp, Homo sapien
cagagcagggtcatgcacagagatg

SEQ ID NO: 1803946 - DNA, 25 bp, Homo sapien
tacagctaggctttctgaggtgcca

SEQ ID NO: 1803947 - DNA, 25 bp, Homo sapien
ctaggctttctgaggtgccagcgtc

SEQ ID NO: 1803948 - DNA, 25 bp, Homo sapien
aggctttctgaggtgccagcgtctc

SEQ ID NO: 1803949 - DNA, 25 bp, Homo sapien
cctttacagctaggctttctgaggt

SEQ ID NO: 1803950 - DNA, 25 bp, Homo sapien
ctgctgaaatcaccttgctttttgg

SEQ ID NO: 1803951 - DNA, 25 bp, Homo sapien
gggctgctgaaatcaccttgctttt

SEQ ID NO: 1803952 - DNA, 25 bp, Homo sapien
gaacaatgccctgtagaacagatac

SEQ ID NO: 1803953 - DNA, 25 bp, Homo sapien
caatgccctgtagaacagatacggg

SEQ ID NO: 1803954 - DNA, 25 bp, Homo sapien
gggctcccaggacaaggctgcatgt

SEQ ID NO: 1803955 - DNA, 25 bp, Homo sapien
tggtcgggcacggaatgcaccatct

SEQ ID NO: 1803956 - DNA, 25 bp, Homo sapien
cgatccagaactttgcccgtagaag

SEQ ID NO: 1803957 - DNA, 25 bp, Homo sapien
cgcgcgcctacctcaagtatgggaa

SEQ ID NO: 1803958 - DNA, 25 bp, Homo sapien
tccctgccacatccaagctcctgtg

SEQ ID NO: 1803959 - DNA, 25 bp, Homo sapien
gataagaaaagggactggtccaggc

SEQ ID NO: 1803960 - DNA, 25 bp, Homo sapien
gcaggctccacatcagcacgtggtg

SEQ ID NO: 1803961 - DNA, 25 bp, Homo sapien
taggattgttttgctccctgccaca

SEQ ID NO: 1803962 - DNA, 25 bp, Homo sapien
gaaaataggtgccagtttcttgtct

SEQ ID NO: 1803963 - DNA, 25 bp, Homo sapien
cctgaaaataggtgccagtttcttg

SEQ ID NO: 1803964 - DNA, 25 bp, Homo sapien
aataggtgccagtttcttgtcttga

SEQ ID NO: 1803965 - DNA, 25 bp, Homo sapien
aaataggtgccagtttcttgtcttg

SEQ ID NO: 1803966 - DNA, 25 bp, Homo sapien
gacttgccctaatgccaacgctaga

SEQ ID NO: 1803967 - DNA, 25 bp, Homo sapien
gccccagagagcagtgtagagccat

SEQ ID NO: 1803968 - DNA, 25 bp, Homo sapien
catgcctgtgtgacgagccccgagg

SEQ ID NO: 1803969 - DNA, 25 bp, Homo sapien
aacgctagacaatcagcctgcctgc

SEQ ID NO: 1803970 - DNA, 25 bp, Homo sapien
ttgggaaaagataggatcggagcgg

SEQ ID NO: 1803971 - DNA, 25 bp, Homo sapien
ctttgggaaaagataggatcggagc

SEQ ID NO: 1803972 - DNA, 25 bp, Homo sapien
tttgggaaaagataggatcggagcg

SEQ ID NO: 1803973 - DNA, 25 bp, Homo sapien
gggaaaagataggatcggagcggac

SEQ ID NO: 1803974 - DNA, 25 bp, Homo sapien
ctctagaatatccagcacgtgaatc

SEQ ID NO: 1803975 - DNA, 25 bp, Homo sapien
ggagagcctgatcaatgtcaggaag

SEQ ID NO: 1803976 - DNA, 25 bp, Homo sapien
ttcaggggctctagaatatccagca

SEQ ID NO: 1803977 - DNA, 25 bp, Homo sapien
caccttcaggggctctagaatatcc

SEQ ID NO: 1803978 - DNA, 25 bp, Homo sapien
gtcgtgccagagaatcatgatgtgt

SEQ ID NO: 1803979 - DNA, 25 bp, Homo sapien
tgtgcttcccaaacgtcccttccag

SEQ ID NO: 1803980 - DNA, 25 bp, Homo sapien
ttgactctgagcaaaacggcgttgc

SEQ ID NO: 1803981 - DNA, 25 bp, Homo sapien
cacagagtgcctgcagatcgacact

SEQ ID NO: 1803982 - DNA, 25 bp, Homo sapien
agaagttggtctgctcctatctgga

SEQ ID NO: 1803983 - DNA, 25 bp, Homo sapien
ctatctggaagatgggatcagggcc

SEQ ID NO: 1803984 - DNA, 25 bp, Homo sapien
tggtaacaggtcaggaacagcggca

SEQ ID NO: 1803985 - DNA, 25 bp, Homo sapien
aagagggttgggagctccgagttgc

SEQ ID NO: 1803986 - DNA, 25 bp, Homo sapien
gccctaatattgaactggacactga

SEQ ID NO: 1803987 - DNA, 25 bp, Homo sapien
gcatttccgatgtcagctggcttcc

SEQ ID NO: 1803988 - DNA, 25 bp, Homo sapien
caatgctatctgagaccctggttca

SEQ ID NO: 1803989 - DNA, 25 bp, Homo sapien
catgcattgctagtgagggttttac

SEQ ID NO: 1803990 - DNA, 25 bp, Homo sapien
agcagtcccatcgaccaaacgctgt

SEQ ID NO: 1803991 - DNA, 25 bp, Homo sapien
ctggagtgtgtatgcctggctgtct

SEQ ID NO: 1803992 - DNA, 25 bp, Homo sapien
agtcccatcgaccaaacgctgtgct

SEQ ID NO: 1803993 - DNA, 25 bp, Homo sapien
atcgaccaaacgctgtgctggagtg

SEQ ID NO: 1803994 - DNA, 25 bp, Homo sapien
ttagttgccgccctggtggagactt

SEQ ID NO: 1803995 - DNA, 25 bp, Homo sapien
cattcatccgacctgaaggagtgct

SEQ ID NO: 1803996 - DNA, 25 bp, Homo sapien
aatgtagtgtgtgctggacaccagc

SEQ ID NO: 1803997 - DNA, 25 bp, Homo sapien
ctgtacaagttagttgccgccctgg

SEQ ID NO: 1803998 - DNA, 25 bp, Homo sapien
taggccaactgaactctaagggagc

SEQ ID NO: 1803999 - DNA, 25 bp, Homo sapien
aggccaactgaactctaagggagcc

SEQ ID NO: 1804000 - DNA, 25 bp, Homo sapien
ttaggccaactgaactctaagggag

SEQ ID NO: 1804001 - DNA, 25 bp, Homo sapien
tgttagaattgtgtcgtcagctcct

SEQ ID NO: 1804002 - DNA, 25 bp, Homo sapien
tgttctttgcgtcttctgtatttgt

SEQ ID NO: 1804003 - DNA, 25 bp, Homo sapien
tagaattgtgtcgtcagctcctcgc

SEQ ID NO: 1804004 - DNA, 25 bp, Homo sapien
gaattgtgtcgtcagctcctcgctg

SEQ ID NO: 1804005 - DNA, 25 bp, Homo sapien
tccctgcgggtctttaaccagcggc

SEQ ID NO: 1804006 - DNA, 25 bp, Homo sapien
taatgcagggtaacgttgtgcagcc

SEQ ID NO: 1804007 - DNA, 25 bp, Homo sapien
cttgcaggagctctcaggcgcagct

SEQ ID NO: 1804008 - DNA, 25 bp, Homo sapien
tgggaatacgttggcacaaatgaac

SEQ ID NO: 1804009 - DNA, 25 bp, Homo sapien
ccctcaatagtgttatcagttaggc

SEQ ID NO: 1804010 - DNA, 25 bp, Homo sapien
cagttaggctgatgtgaatgacagg

SEQ ID NO: 1804011 - DNA, 25 bp, Homo sapien
tatcagttaggctgatgtgaatgac

SEQ ID NO: 1804012 - DNA, 25 bp, Homo sapien
tttatgccctcaatagtgttatcag

SEQ ID NO: 1804013 - DNA, 25 bp, Homo sapien
gggaccgggggagccatcagacgcc

SEQ ID NO: 1804014 - DNA, 25 bp, Homo sapien
gccatcagacgccatctctgcctcc

SEQ ID NO: 1804015 - DNA, 25 bp, Homo sapien
ggagccatcagacgccatctctgcc

SEQ ID NO: 1804016 - DNA, 25 bp, Homo sapien
ctgcttcagggaggacgtgtcagct

SEQ ID NO: 1804017 - DNA, 25 bp, Homo sapien
tcgggaacgctctttgtcagtgtcg

SEQ ID NO: 1804018 - DNA, 25 bp, Homo sapien
tttctttcgggaacgctctttgtca

SEQ ID NO: 1804019 - DNA, 25 bp, Homo sapien
cagatttctttcgggaacgctcttt

SEQ ID NO: 1804020 - DNA, 25 bp, Homo sapien
gaacgctctttgtcagtgtcgactg

SEQ ID NO: 1804021 - DNA, 25 bp, Homo sapien
taattaatgaagcttttggcaatcc

SEQ ID NO: 1804022 - DNA, 25 bp, Homo sapien
ttcattaattaatgaagcttttggc

SEQ ID NO: 1804023 - DNA, 25 bp, Homo sapien
tgatttcattaattaatgaagcttt

SEQ ID NO: 1804024 - DNA, 25 bp, Homo sapien
attaatgaagcttttggcaatccac

SEQ ID NO: 1804025 - DNA, 25 bp, Homo sapien
ttcatcagcactgtttatgacgtta

SEQ ID NO: 1804026 - DNA, 25 bp, Homo sapien
tgtttatgacgttatcctcatgttc

SEQ ID NO: 1804027 - DNA, 25 bp, Homo sapien
cagctctcacggctcgctggcatct

SEQ ID NO: 1804028 - DNA, 25 bp, Homo sapien
cacctcagctctcacggctcgctgg

SEQ ID NO: 1804029 - DNA, 25 bp, Homo sapien
tcttctgcctctggtcactcgcctt

SEQ ID NO: 1804030 - DNA, 25 bp, Homo sapien
cgccgccgagaatatgtctgccttt

SEQ ID NO: 1804031 - DNA, 25 bp, Homo sapien
ccgccgagaatatgtctgcctttgc

SEQ ID NO: 1804032 - DNA, 25 bp, Homo sapien
tggtcactcgccttggtgggccttc

SEQ ID NO: 1804033 - DNA, 25 bp, Homo sapien
ctttcagcgtttcttagggagcccg

SEQ ID NO: 1804034 - DNA, 25 bp, Homo sapien
aatacaaagagggagccgaccctgc

SEQ ID NO: 1804035 - DNA, 25 bp, Homo sapien
ccgaccctgcaagtgcctttgagga

SEQ ID NO: 1804036 - DNA, 25 bp, Homo sapien
agggagcccgtgcattcagcccgca

SEQ ID NO: 1804037 - DNA, 25 bp, Homo sapien
caggaatccggttggtccgatcaaa

SEQ ID NO: 1804038 - DNA, 25 bp, Homo sapien
tccggttggtccgatcaaagcaaac

SEQ ID NO: 1804039 - DNA, 25 bp, Homo sapien
acactcaggaatccggttggtccga

SEQ ID NO: 1804040 - DNA, 25 bp, Homo sapien
gttggtccgatcaaagcaaacccat

SEQ ID NO: 1804041 - DNA, 25 bp, Homo sapien
caaacgggtggcgaaaagaagagca

SEQ ID NO: 1804042 - DNA, 25 bp, Homo sapien
aaacgggtggcgaaaagaagagcag

SEQ ID NO: 1804043 - DNA, 25 bp, Homo sapien
aacgggtggcgaaaagaagagcaga

SEQ ID NO: 1804044 - DNA, 25 bp, Homo sapien
ccttctgttgtggtagatttgcttc

SEQ ID NO: 1804045 - DNA, 25 bp, Homo sapien
ttcaagttgctcattgcctgaattc

SEQ ID NO: 1804046 - DNA, 25 bp, Homo sapien
ttgatttgaattcagttccttctgt

SEQ ID NO: 1804047 - DNA, 25 bp, Homo sapien
tgcctgaattcaggacagggtagtg

SEQ ID NO: 1804048 - DNA, 25 bp, Homo sapien
ctgtgacagtgttcatgaagccctt

SEQ ID NO: 1804049 - DNA, 25 bp, Homo sapien
tcagaaaccaaagctagaatcaatt

SEQ ID NO: 1804050 - DNA, 25 bp, Homo sapien
agaaaccaaagctagaatcaatttc

SEQ ID NO: 1804051 - DNA, 25 bp, Homo sapien
agtgttcatgaagcccttttcagaa

SEQ ID NO: 1804052 - DNA, 25 bp, Homo sapien
gaaattatcaagattgcttgctaaa

SEQ ID NO: 1804053 - DNA, 25 bp, Homo sapien
gaagttgtcagttttagttctggag

SEQ ID NO: 1804054 - DNA, 25 bp, Homo sapien
agttctggaggatccttggaatgtc

SEQ ID NO: 1804055 - DNA, 25 bp, Homo sapien
gattgcttgctaaagtgacttgtgc

SEQ ID NO: 1804056 - DNA, 25 bp, Homo sapien
tcttatgttctgttggtttggtcat

SEQ ID NO: 1804057 - DNA, 25 bp, Homo sapien
ccgagttcttctttcttatgttctg

SEQ ID NO: 1804058 - DNA, 25 bp, Homo sapien
aggactttcctggactccgagttct

SEQ ID NO: 1804059 - DNA, 25 bp, Homo sapien
caggactttcctggactccgagttc

SEQ ID NO: 1804060 - DNA, 25 bp, Homo sapien
gcccatttcgccagcgggcagctgg

SEQ ID NO: 1804061 - DNA, 25 bp, Homo sapien
gagccacaacgagctgatgtcaaag

SEQ ID NO: 1804062 - DNA, 25 bp, Homo sapien
tgcaccccgcacagcgtcactggcc

SEQ ID NO: 1804063 - DNA, 25 bp, Homo sapien
gagacagggagccacaacgagctga

SEQ ID NO: 1804064 - DNA, 25 bp, Homo sapien
cagtgatactgccaacccaggaggc

SEQ ID NO: 1804065 - DNA, 25 bp, Homo sapien
aaaaaatcctcatggagtcagtgag

SEQ ID NO: 1804066 - DNA, 25 bp, Homo sapien
gcctttatgtcccgcaccggcaggg

SEQ ID NO: 1804067 - DNA, 25 bp, Homo sapien
tggtggcgtcagtcactgcctgtgt

SEQ ID NO: 1804068 - DNA, 25 bp, Homo sapien
tacccaggtgaccagtgtattttcc

SEQ ID NO: 1804069 - DNA, 25 bp, Homo sapien
tccctcgtacccaggtgaccagtgt

SEQ ID NO: 1804070 - DNA, 25 bp, Homo sapien
taattactccctcgtacccaggtga

SEQ ID NO: 1804071 - DNA, 25 bp, Homo sapien
ggtgaccagtgtattttccgtggcc

SEQ ID NO: 1804072 - DNA, 25 bp, Homo sapien
gaagggccgggacggagctccctga

SEQ ID NO: 1804073 - DNA, 25 bp, Homo sapien
gcagccacatcagcattcacagctt

SEQ ID NO: 1804074 - DNA, 25 bp, Homo sapien
cccacggtgacaacagacctgtgac

SEQ ID NO: 1804075 - DNA, 25 bp, Homo sapien
caaagctcacatagaaatggtggac

SEQ ID NO: 1804076 - DNA, 25 bp, Homo sapien
gaaaatctaccgactccaacatggc

SEQ ID NO: 1804077 - DNA, 25 bp, Homo sapien
gggggagcatacccagtgtctacct

SEQ ID NO: 1804078 - DNA, 25 bp, Homo sapien
gggagcatacccagtgtctaccttc

SEQ ID NO: 1804079 - DNA, 25 bp, Homo sapien
ggagcatacccagtgtctaccttca

SEQ ID NO: 1804080 - DNA, 25 bp, Homo sapien
gagcatacccagtgtctaccttcat

SEQ ID NO: 1804081 - DNA, 25 bp, Homo sapien
ttttctgcccccaacaggaggctgc

SEQ ID NO: 1804082 - DNA, 25 bp, Homo sapien
cactggttcgacgtgtagccagggc

SEQ ID NO: 1804083 - DNA, 25 bp, Homo sapien
gctgcgagtggaaccgcgtctgcat

SEQ ID NO: 1804084 - DNA, 25 bp, Homo sapien
catgcacatgaagtgtccgcagccc

SEQ ID NO: 1804085 - DNA, 25 bp, Homo sapien
actgcccggcgtaggctgagctttt

SEQ ID NO: 1804086 - DNA, 25 bp, Homo sapien
aatctagtggaagaattgctggccg

SEQ ID NO: 1804087 - DNA, 25 bp, Homo sapien
gactgagtgtgtgcttctcctcaaa

SEQ ID NO: 1804088 - DNA, 25 bp, Homo sapien
ggttgttcagggacttccacgctct

SEQ ID NO: 1804089 - DNA, 25 bp, Homo sapien
ggcagtggtccactggccggatccc

SEQ ID NO: 1804090 - DNA, 25 bp, Homo sapien
tgagctctgccatgctgtgcaaaca

SEQ ID NO: 1804091 - DNA, 25 bp, Homo sapien
gcttgttgaagtgctctcctgtgag

SEQ ID NO: 1804092 - DNA, 25 bp, Homo sapien
tggccggatccctccatctgcttgt

SEQ ID NO: 1804093 - DNA, 25 bp, Homo sapien
cagtgttcccatgggtatgcaccca

SEQ ID NO: 1804094 - DNA, 25 bp, Homo sapien
catccgtctcatcaggtcaacagct

SEQ ID NO: 1804095 - DNA, 25 bp, Homo sapien
caggaccagtgttcccatgggtatg

SEQ ID NO: 1804096 - DNA, 25 bp, Homo sapien
ggcatcgtgcaagcctggtccatcc

SEQ ID NO: 1804097 - DNA, 25 bp, Homo sapien
ttcattgcctgagaaatgcttacag

SEQ ID NO: 1804098 - DNA, 25 bp, Homo sapien
gatggtgcaattgtgttgacataat

SEQ ID NO: 1804099 - DNA, 25 bp, Homo sapien
tgccgagacgctcctcttcagttct

SEQ ID NO: 1804100 - DNA, 25 bp, Homo sapien
tccaagtccatcaatgatggtgcaa

SEQ ID NO: 1804101 - DNA, 25 bp, Homo sapien
agtcagcaagaagctctgtccttac

SEQ ID NO: 1804102 - DNA, 25 bp, Homo sapien
caagtcagcaagaagctctgtcctt

SEQ ID NO: 1804103 - DNA, 25 bp, Homo sapien
aagtcagcaagaagctctgtcctta

SEQ ID NO: 1804104 - DNA, 25 bp, Homo sapien
gcgctcacatcaaccaccactccca

SEQ ID NO: 1804105 - DNA, 25 bp, Homo sapien
ctcacatcaaccaccactcccagat

SEQ ID NO: 1804106 - DNA, 25 bp, Homo sapien
acatcaaccaccactcccagataca

SEQ ID NO: 1804107 - DNA, 25 bp, Homo sapien
ggcgctcacatcaaccaccactccc

SEQ ID NO: 1804108 - DNA, 25 bp, Homo sapien
cttacagttggttgggaagccctca

SEQ ID NO: 1804109 - DNA, 25 bp, Homo sapien
ttgtaaccaacgcatggcccacgat

SEQ ID NO: 1804110 - DNA, 25 bp, Homo sapien
tcagacccgggctccttagagtatc

SEQ ID NO: 1804111 - DNA, 25 bp, Homo sapien
ccttggcgtgccgttgtcatgagca

SEQ ID NO: 1804112 - DNA, 25 bp, Homo sapien
tcaaaccatcgagtggccctttctg

SEQ ID NO: 1804113 - DNA, 25 bp, Homo sapien
tctgttattcttatgggtaggtgat

SEQ ID NO: 1804114 - DNA, 25 bp, Homo sapien
tcttatgggtaggtgatgagttgct

SEQ ID NO: 1804115 - DNA, 25 bp, Homo sapien
taaggaatcccatatcattctgagg

SEQ ID NO: 1804116 - DNA, 25 bp, Homo sapien
gtcgagtgacgcaggatgaaagccc

SEQ ID NO: 1804117 - DNA, 25 bp, Homo sapien
tgcgatttgagtaaagacgggaccc

SEQ ID NO: 1804118 - DNA, 25 bp, Homo sapien
tccataggcgccgtggaagcaaagc

SEQ ID NO: 1804119 - DNA, 25 bp, Homo sapien
aaagcccacggcatgttctggcaca

SEQ ID NO: 1804120 - DNA, 25 bp, Homo sapien
cgtggctttcaatgcaaatcctgca

SEQ ID NO: 1804121 - DNA, 25 bp, Homo sapien
gcttccccaatagacgtggctttca

SEQ ID NO: 1804122 - DNA, 25 bp, Homo sapien
tccagagctttagctgcttccccaa

SEQ ID NO: 1804123 - DNA, 25 bp, Homo sapien
agcatctgctggacgtctagatggg

SEQ ID NO: 1804124 - DNA, 25 bp, Homo sapien
tcttgtacccgttgagagctgctcc

SEQ ID NO: 1804125 - DNA, 25 bp, Homo sapien
cacgggagagaggacatttcacttc

SEQ ID NO: 1804126 - DNA, 25 bp, Homo sapien
gagatctggcttcatcacgggagag

SEQ ID NO: 1804127 - DNA, 25 bp, Homo sapien
taattacagacggagctgccttcgg

SEQ ID NO: 1804128 - DNA, 25 bp, Homo sapien
tgttttgtgccgcagataggccctt

SEQ ID NO: 1804129 - DNA, 25 bp, Homo sapien
aacccctgatggtgtttagctggcc

SEQ ID NO: 1804130 - DNA, 25 bp, Homo sapien
caaaaatccctctgagatgcttgta

SEQ ID NO: 1804131 - DNA, 25 bp, Homo sapien
tcgaagacaaataaagaaccctcag

SEQ ID NO: 1804132 - DNA, 25 bp, Homo sapien
gatctggctcagacgccaggcttca

SEQ ID NO: 1804133 - DNA, 25 bp, Homo sapien
taagtcacacttggacctcgaaacc

SEQ ID NO: 1804134 - DNA, 25 bp, Homo sapien
aaaggcctacaagcatggtgctccc

SEQ ID NO: 1804135 - DNA, 25 bp, Homo sapien
taaaaatagattgctccaggaacag

SEQ ID NO: 1804136 - DNA, 25 bp, Homo sapien
ctcttgggagccaaagctatgaggc

SEQ ID NO: 1804137 - DNA, 25 bp, Homo sapien
cttgggagccaaagctatgaggcag

SEQ ID NO: 1804138 - DNA, 25 bp, Homo sapien
tcttgggagccaaagctatgaggca

SEQ ID NO: 1804139 - DNA, 25 bp, Homo sapien
ctggggcttctaccccagcattgct

SEQ ID NO: 1804140 - DNA, 25 bp, Homo sapien
gcttctaccccagcattgctcctta

SEQ ID NO: 1804141 - DNA, 25 bp, Homo sapien
ggcacctggggcttctaccccagca

SEQ ID NO: 1804142 - DNA, 25 bp, Homo sapien
gggcttctaccccagcattgctcct

SEQ ID NO: 1804143 - DNA, 25 bp, Homo sapien
tgctcacggcgatgaagttgtgtct

SEQ ID NO: 1804144 - DNA, 25 bp, Homo sapien
cagctgtggacatccctggaagtca

SEQ ID NO: 1804145 - DNA, 25 bp, Homo sapien
gacatccctggaagtcatgctcacg

SEQ ID NO: 1804146 - DNA, 25 bp, Homo sapien
gaagtcatgctcacggcgatgaagt

SEQ ID NO: 1804147 - DNA, 25 bp, Homo sapien
gccactggctagcaaaactctttct

SEQ ID NO: 1804148 - DNA, 25 bp, Homo sapien
ctgagccactggctagcaaaactct

SEQ ID NO: 1804149 - DNA, 25 bp, Homo sapien
tgtccctgaggacaaacttgacgtt

SEQ ID NO: 1804150 - DNA, 25 bp, Homo sapien
gacaaacttgacgttcagttctgtt

SEQ ID NO: 1804151 - DNA, 25 bp, Homo sapien
aaccttggtagttgatgccctcaga

SEQ ID NO: 1804152 - DNA, 25 bp, Homo sapien
aaagtgctgccagatcccaaatgca

SEQ ID NO: 1804153 - DNA, 25 bp, Homo sapien
gatatcaagatggtcaaagaaagca

SEQ ID NO: 1804154 - DNA, 25 bp, Homo sapien
tgatgtaaagatccctccaaccttg

SEQ ID NO: 1804155 - DNA, 25 bp, Homo sapien
tactccaagctgcaagagtcagtga

SEQ ID NO: 1804156 - DNA, 25 bp, Homo sapien
gcttttgttgaccacaaggacctga

SEQ ID NO: 1804157 - DNA, 25 bp, Homo sapien
tcacctggagaggatcgcagcctat

SEQ ID NO: 1804158 - DNA, 25 bp, Homo sapien
tctgcagaagcagttgtcacctcct

SEQ ID NO: 1804159 - DNA, 25 bp, Homo sapien
taaaatcccaatgttaagaagtcat

SEQ ID NO: 1804160 - DNA, 25 bp, Homo sapien
caagccagaaagcatgtcgcctttc

SEQ ID NO: 1804161 - DNA, 25 bp, Homo sapien
ttaaaatcccaatgttaagaagtca

SEQ ID NO: 1804162 - DNA, 25 bp, Homo sapien
aagcaagccagaaagcatgtcgcct

SEQ ID NO: 1804163 - DNA, 25 bp, Homo sapien
cctggtttctgggatgtagaacatt

SEQ ID NO: 1804164 - DNA, 25 bp, Homo sapien
aatccagaggcaacagtgagaagaa

SEQ ID NO: 1804165 - DNA, 25 bp, Homo sapien
ttaatccagaggcaacagtgagaag

SEQ ID NO: 1804166 - DNA, 25 bp, Homo sapien
atgaaatcagtggcaaacaatcctg

SEQ ID NO: 1804167 - DNA, 25 bp, Homo sapien
tctgggtcaccagtgtgggaagagg

SEQ ID NO: 1804168 - DNA, 25 bp, Homo sapien
tgcatgagaatgagtaccctccttc

SEQ ID NO: 1804169 - DNA, 25 bp, Homo sapien
caaatgggaatactggaaagcaacg

SEQ ID NO: 1804170 - DNA, 25 bp, Homo sapien
ggtgactgcattcccccaagttggc

SEQ ID NO: 1804171 - DNA, 25 bp, Homo sapien
agctcctgtatgctggctctcggtt

SEQ ID NO: 1804172 - DNA, 25 bp, Homo sapien
tcagctcgcccaccagtttttctgt

SEQ ID NO: 1804173 - DNA, 25 bp, Homo sapien
tggctctcggtttccattgccttcc

SEQ ID NO: 1804174 - DNA, 25 bp, Homo sapien
tatgctggctctcggtttccattgc

SEQ ID NO: 1804175 - DNA, 25 bp, Homo sapien
ggctgattatcttcccctccagata

SEQ ID NO: 1804176 - DNA, 25 bp, Homo sapien
tcatgccgctctttcctgcttcgga

SEQ ID NO: 1804177 - DNA, 25 bp, Homo sapien
ggtcgccatcttgtccctctctatt

SEQ ID NO: 1804178 - DNA, 25 bp, Homo sapien
gcttcggagactggtcgccatcttg

SEQ ID NO: 1804179 - DNA, 25 bp, Homo sapien
attgaaggttccagttaggtgattt

SEQ ID NO: 1804180 - DNA, 25 bp, Homo sapien
ttgaaggttccagttaggtgatttc

SEQ ID NO: 1804181 - DNA, 25 bp, Homo sapien
agataattgagctagagttagcctt

SEQ ID NO: 1804182 - DNA, 25 bp, Homo sapien
ggcagaatcctggtctcatcttgtt

SEQ ID NO: 1804183 - DNA, 25 bp, Homo sapien
caggcagaatcctggtctcatcttg

SEQ ID NO: 1804184 - DNA, 25 bp, Homo sapien
gcagaatcctggtctcatcttgttt

SEQ ID NO: 1804185 - DNA, 25 bp, Homo sapien
agaggaacccagaggactccgtagt

SEQ ID NO: 1804186 - DNA, 25 bp, Homo sapien
gccacctcaaagttcagtgctgctt

SEQ ID NO: 1804187 - DNA, 25 bp, Homo sapien
acccagaggactccgtagtaggcac

SEQ ID NO: 1804188 - DNA, 25 bp, Homo sapien
ctgcttgagaccaggggacaccctt

SEQ ID NO: 1804189 - DNA, 25 bp, Homo sapien
caatcctgctggtattttcgactag

SEQ ID NO: 1804190 - DNA, 25 bp, Homo sapien
aattggcgtctgcattttaatggag

SEQ ID NO: 1804191 - DNA, 25 bp, Homo sapien
agggaaatgggccctttatgcaggc

SEQ ID NO: 1804192 - DNA, 25 bp, Homo sapien
tattttcgactagatgaggaaggga

SEQ ID NO: 1804193 - DNA, 25 bp, Homo sapien
aagactcataagcatggccttccat

SEQ ID NO: 1804194 - DNA, 25 bp, Homo sapien
caacccatcatgtacccatcatttg

SEQ ID NO: 1804195 - DNA, 25 bp, Homo sapien
cccatcatttgtcatcgaagactca

SEQ ID NO: 1804196 - DNA, 25 bp, Homo sapien
tggccttccatcaactgtgcacctg

SEQ ID NO: 1804197 - DNA, 25 bp, Homo sapien
tagtcacgtgtatcacattgctcgt

SEQ ID NO: 1804198 - DNA, 25 bp, Homo sapien
cattgctcgtgtgcataccacttgc

SEQ ID NO: 1804199 - DNA, 25 bp, Homo sapien
taccacttgcccacacgtggagctg

SEQ ID NO: 1804200 - DNA, 25 bp, Homo sapien
tgtatcctcagcaacgatgcctgca

SEQ ID NO: 1804201 - DNA, 25 bp, Homo sapien
gcatgttagcctcatggcatgatga

SEQ ID NO: 1804202 - DNA, 25 bp, Homo sapien
ttcacacgaaacaggaacaccaagg

SEQ ID NO: 1804203 - DNA, 25 bp, Homo sapien
catgccaagaacatcgcatgttagc

SEQ ID NO: 1804204 - DNA, 25 bp, Homo sapien
atgaagaagcagcacgccctcactc

SEQ ID NO: 1804205 - DNA, 25 bp, Homo sapien
tatgaagtagtattacagagagaca

SEQ ID NO: 1804206 - DNA, 25 bp, Homo sapien
tcctgatagaagtacaaaacaccat

SEQ ID NO: 1804207 - DNA, 25 bp, Homo sapien
tattaatgactgctaagctttcaag

SEQ ID NO: 1804208 - DNA, 25 bp, Homo sapien
catacaataccactggataaccaaa

SEQ ID NO: 1804209 - DNA, 25 bp, Homo sapien
taagagaaagtcatcgtgccattgt

SEQ ID NO: 1804210 - DNA, 25 bp, Homo sapien
caatgcttctggtggtagatgacag

SEQ ID NO: 1804211 - DNA, 25 bp, Homo sapien
tcttgaggaagttgtaaatgcccat

SEQ ID NO: 1804212 - DNA, 25 bp, Homo sapien
cagaggtggtacagtttctcaggat

SEQ ID NO: 1804213 - DNA, 25 bp, Homo sapien
tcaggccagcgattccatttttcct

SEQ ID NO: 1804214 - DNA, 25 bp, Homo sapien
gccttctgagtcaacaccaattgct

SEQ ID NO: 1804215 - DNA, 25 bp, Homo sapien
tgttcattctcaggccagcgattcc

SEQ ID NO: 1804216 - DNA, 25 bp, Homo sapien
tttaagtcctcaaacagaatctcag

SEQ ID NO: 1804217 - DNA, 25 bp, Homo sapien
agcacttgctcctgctcagatctgc

SEQ ID NO: 1804218 - DNA, 25 bp, Homo sapien
tcagatctgctggtgtatttcagca

SEQ ID NO: 1804219 - DNA, 25 bp, Homo sapien
atttcagcaggtttcttgacggcat

SEQ ID NO: 1804220 - DNA, 25 bp, Homo sapien
tgcagcacttgctcctgctcagatc

SEQ ID NO: 1804221 - DNA, 25 bp, Homo sapien
gggtgtcttgatattggaaagaagt

SEQ ID NO: 1804222 - DNA, 25 bp, Homo sapien
aagaagtgacatgaatttgttgttc

SEQ ID NO: 1804223 - DNA, 25 bp, Homo sapien
tcaaagggaagaggtgtggcctgcc

SEQ ID NO: 1804224 - DNA, 25 bp, Homo sapien
tggcctgccactcttcttgaaagcc

SEQ ID NO: 1804225 - DNA, 25 bp, Homo sapien
gatgttcttgtaatacatgggtgca

SEQ ID NO: 1804226 - DNA, 25 bp, Homo sapien
gccgtatttgaacactgacaacgtg

SEQ ID NO: 1804227 - DNA, 25 bp, Homo sapien
tacatgggtgcaagaatttgtgctg

SEQ ID NO: 1804228 - DNA, 25 bp, Homo sapien
ccctctcaactttttgccgtatttg

SEQ ID NO: 1804229 - DNA, 25 bp, Homo sapien
gttcctttggagtatcttgttgtcg

SEQ ID NO: 1804230 - DNA, 25 bp, Homo sapien
tcttgttgtcggtggtttgttgaat

SEQ ID NO: 1804231 - DNA, 25 bp, Homo sapien
tcgccccacactgtgggttcctttg

SEQ ID NO: 1804232 - DNA, 25 bp, Homo sapien
gagtatcttgttgtcggtggtttgt

SEQ ID NO: 1804233 - DNA, 25 bp, Homo sapien
gagcttgaataacatagctcccctg

SEQ ID NO: 1804234 - DNA, 25 bp, Homo sapien
cttgagcttgaataacatagctccc

SEQ ID NO: 1804235 - DNA, 25 bp, Homo sapien
ttgaataacatagctcccctgcctc

SEQ ID NO: 1804236 - DNA, 25 bp, Homo sapien
aataacatagctcccctgcctcttg

SEQ ID NO: 1804237 - DNA, 25 bp, Homo sapien
ccatgtctgcaagtcccctgtcctt

SEQ ID NO: 1804238 - DNA, 25 bp, Homo sapien
tgtggatctttcagctgtcccctgc

SEQ ID NO: 1804239 - DNA, 25 bp, Homo sapien
cggccactccacaggacaacattag

SEQ ID NO: 1804240 - DNA, 25 bp, Homo sapien
caacattagttgcaggtatttcttg

SEQ ID NO: 1804241 - DNA, 25 bp, Homo sapien
ggctcctcctttcggcatgtgttca

SEQ ID NO: 1804242 - DNA, 25 bp, Homo sapien
gcagctcaagataacatctcatcac

SEQ ID NO: 1804243 - DNA, 25 bp, Homo sapien
tttaggagctaacacttctgtgaag

SEQ ID NO: 1804244 - DNA, 25 bp, Homo sapien
ggtgctgcagctcaagataacatct

SEQ ID NO: 1804245 - DNA, 25 bp, Homo sapien
gcacagcttcctttagctacaataa

SEQ ID NO: 1804246 - DNA, 25 bp, Homo sapien
agcacagcttcctttagctacaata

SEQ ID NO: 1804247 - DNA, 25 bp, Homo sapien
cacagcttcctttagctacaataac

SEQ ID NO: 1804248 - DNA, 25 bp, Homo sapien
gagcacagcttcctttagctacaat

SEQ ID NO: 1804249 - DNA, 25 bp, Homo sapien
caatgaggcaatcattttgctcttg

SEQ ID NO: 1804250 - DNA, 25 bp, Homo sapien
aagggaagtccaatgccttccttat

SEQ ID NO: 1804251 - DNA, 25 bp, Homo sapien
tgtccaagatgccctgtctcaaatg

SEQ ID NO: 1804252 - DNA, 25 bp, Homo sapien
taagtcaactgtaattccaatgagg

SEQ ID NO: 1804253 - DNA, 25 bp, Homo sapien
caaatccgtggcctgaagttgagca

SEQ ID NO: 1804254 - DNA, 25 bp, Homo sapien
ggatcaaatccgtggcctgaagttg

SEQ ID NO: 1804255 - DNA, 25 bp, Homo sapien
ccgtggcctgaagttgagcaaccat

SEQ ID NO: 1804256 - DNA, 25 bp, Homo sapien
aagtaggatcaaatccgtggcctga

SEQ ID NO: 1804257 - DNA, 25 bp, Homo sapien
gtctgttgcattcaaagattctgtg

SEQ ID NO: 1804258 - DNA, 25 bp, Homo sapien
tgagagagtgtctgttgcattcaaa

SEQ ID NO: 1804259 - DNA, 25 bp, Homo sapien
gagtgtctgttgcattcaaagattc

SEQ ID NO: 1804260 - DNA, 25 bp, Homo sapien
tgtggctttccgggcaaaacacaaa

SEQ ID NO: 1804261 - DNA, 25 bp, Homo sapien
gtctacacagtgagaggtgatgcta

SEQ ID NO: 1804262 - DNA, 25 bp, Homo sapien
cattccatgtgatacctacatccga

SEQ ID NO: 1804263 - DNA, 25 bp, Homo sapien
gagattcggattcctctgatgttcc

SEQ ID NO: 1804264 - DNA, 25 bp, Homo sapien
caggaaatgtcgatgcaaagtggag

SEQ ID NO: 1804265 - DNA, 25 bp, Homo sapien
gcatacacgtggtaaggcatcctct

SEQ ID NO: 1804266 - DNA, 25 bp, Homo sapien
caaaagcgctcgttacaccagcaga

SEQ ID NO: 1804267 - DNA, 25 bp, Homo sapien
caccagcagatactgagataggcgg

SEQ ID NO: 1804268 - DNA, 25 bp, Homo sapien
gcctaacaggtaccaaaagcgctcg

SEQ ID NO: 1804269 - DNA, 25 bp, Homo sapien
ccataggctctcgagtgttaactat

SEQ ID NO: 1804270 - DNA, 25 bp, Homo sapien
ggctctcgagtgttaactatggctt

SEQ ID NO: 1804271 - DNA, 25 bp, Homo sapien
ctctcgagtgttaactatggctttg

SEQ ID NO: 1804272 - DNA, 25 bp, Homo sapien
taggctctcgagtgttaactatggc

SEQ ID NO: 1804273 - DNA, 25 bp, Homo sapien
tcttcagcacgagcttatgtgcagc

SEQ ID NO: 1804274 - DNA, 25 bp, Homo sapien
cagcacgagcttatgtgcagcatct

SEQ ID NO: 1804275 - DNA, 25 bp, Homo sapien
cgagcttatgtgcagcatcttcctg

SEQ ID NO: 1804276 - DNA, 25 bp, Homo sapien
cacgagcttatgtgcagcatcttcc

SEQ ID NO: 1804277 - DNA, 25 bp, Homo sapien
caaagatgtgggtcactaggtaacc

SEQ ID NO: 1804278 - DNA, 25 bp, Homo sapien
tatcgccccaagattttaggtctgc

SEQ ID NO: 1804279 - DNA, 25 bp, Homo sapien
ccactatcgccccaagattttaggt

SEQ ID NO: 1804280 - DNA, 25 bp, Homo sapien
tgggtcactaggtaaccactatcgc

SEQ ID NO: 1804281 - DNA, 25 bp, Homo sapien
tggccccacccttctggggtagtgc

SEQ ID NO: 1804282 - DNA, 25 bp, Homo sapien
aaccattgctgggctcccaccctct

SEQ ID NO: 1804283 - DNA, 25 bp, Homo sapien
gagcacaaagttccaagagggtagc

SEQ ID NO: 1804284 - DNA, 25 bp, Homo sapien
gcagcctgcctagaaagcgtggccc

SEQ ID NO: 1804285 - DNA, 25 bp, Homo sapien
tctgcccgcttcaacatcactgtcc

SEQ ID NO: 1804286 - DNA, 25 bp, Homo sapien
cagggatgctatgcgaagcccacag

SEQ ID NO: 1804287 - DNA, 25 bp, Homo sapien
tgagaacagggatgctatgcgaagc

SEQ ID NO: 1804288 - DNA, 25 bp, Homo sapien
gatgctatgcgaagcccacagcttg

SEQ ID NO: 1804289 - DNA, 25 bp, Homo sapien
tctggaactctccacttttcactga

SEQ ID NO: 1804290 - DNA, 25 bp, Homo sapien
tccgggattctttcaatgtagtgcg

SEQ ID NO: 1804291 - DNA, 25 bp, Homo sapien
tctgatgatgctcagatagagttgt

SEQ ID NO: 1804292 - DNA, 25 bp, Homo sapien
tgaaaaatgcctgcacaccgatgtc

SEQ ID NO: 1804293 - DNA, 25 bp, Homo sapien
cagcccccatgccatgactgttcac

SEQ ID NO: 1804294 - DNA, 25 bp, Homo sapien
ttacagctgttgacgtgcggccggt

SEQ ID NO: 1804295 - DNA, 25 bp, Homo sapien
tgagcgctcaggcagttctccagtg

SEQ ID NO: 1804296 - DNA, 25 bp, Homo sapien
ggtcggactgaagctctgaaacagc

SEQ ID NO: 1804297 - DNA, 25 bp, Homo sapien
cctgcctttctgtaggtcggactga

SEQ ID NO: 1804298 - DNA, 25 bp, Homo sapien
caacagggatttactttaagcttca

SEQ ID NO: 1804299 - DNA, 25 bp, Homo sapien
tggcgtggcacttttggtaacaggt

SEQ ID NO: 1804300 - DNA, 25 bp, Homo sapien
caccaacagggatttactttaagct

SEQ ID NO: 1804301 - DNA, 25 bp, Homo sapien
aggcattttatgtgatggcgtggca

SEQ ID NO: 1804302 - DNA, 25 bp, Homo sapien
ccctccatggggaaagatgaagcca

SEQ ID NO: 1804303 - DNA, 25 bp, Homo sapien
cagaaaagagagtgtgccgacgttg

SEQ ID NO: 1804304 - DNA, 25 bp, Homo sapien
gaacgtactcgatcctgtatggtca

SEQ ID NO: 1804305 - DNA, 25 bp, Homo sapien
ccgacgttgcgctaacaattgcttt

SEQ ID NO: 1804306 - DNA, 25 bp, Homo sapien
aggaccagggctgagcattaccacc

SEQ ID NO: 1804307 - DNA, 25 bp, Homo sapien
acatatttcccggaggtgcagtcca

SEQ ID NO: 1804308 - DNA, 25 bp, Homo sapien
gcaaacatatttcccggaggtgcag

SEQ ID NO: 1804309 - DNA, 25 bp, Homo sapien
tatttcccggaggtgcagtccaggc

SEQ ID NO: 1804310 - DNA, 25 bp, Homo sapien
caaaattactgggttatcatctgga

SEQ ID NO: 1804311 - DNA, 25 bp, Homo sapien
gctggcttgcctttgttgcaaaatt

SEQ ID NO: 1804312 - DNA, 25 bp, Homo sapien
gacctgtaggttgagataacttgac

SEQ ID NO: 1804313 - DNA, 25 bp, Homo sapien
tgtgggtcaggcatataagcagaac

SEQ ID NO: 1804314 - DNA, 25 bp, Homo sapien
cacgcacccggatgatatttactgg

SEQ ID NO: 1804315 - DNA, 25 bp, Homo sapien
tgtgctaggcaatgtgaccccagcg

SEQ ID NO: 1804316 - DNA, 25 bp, Homo sapien
tggccggccagtttacaagcagaat

SEQ ID NO: 1804317 - DNA, 25 bp, Homo sapien
aaatgccttttagagccaagtgcgg

SEQ ID NO: 1804318 - DNA, 25 bp, Homo sapien
tcacagtagccacacgggtaagcat

SEQ ID NO: 1804319 - DNA, 25 bp, Homo sapien
gtcctcccggaagtggcctttgctc

SEQ ID NO: 1804320 - DNA, 25 bp, Homo sapien
aatgaagggcttccggggtacatga

SEQ ID NO: 1804321 - DNA, 25 bp, Homo sapien
tttcacagtagccacacgggtaagc

SEQ ID NO: 1804322 - DNA, 25 bp, Homo sapien
ccagaaaggagaccaagaaagggat

SEQ ID NO: 1804323 - DNA, 25 bp, Homo sapien
tctcggcattgcaggggccaggctt

SEQ ID NO: 1804324 - DNA, 25 bp, Homo sapien
tatcctcctccctctcggcattgca

SEQ ID NO: 1804325 - DNA, 25 bp, Homo sapien
tggcccttccttgatcgtcttctat

SEQ ID NO: 1804326 - DNA, 25 bp, Homo sapien
ttttctaagaaactgccaccttcca

SEQ ID NO: 1804327 - DNA, 25 bp, Homo sapien
agaaactgccaccttccagactgac

SEQ ID NO: 1804328 - DNA, 25 bp, Homo sapien
ttagaagttttctaagaaactgcca

SEQ ID NO: 1804329 - DNA, 25 bp, Homo sapien
aagaaactgccaccttccagactga

SEQ ID NO: 1804330 - DNA, 25 bp, Homo sapien
cagaatgtcatcttcccgcaagtta

SEQ ID NO: 1804331 - DNA, 25 bp, Homo sapien
gcacgcccatcgctgaggatttcgc

SEQ ID NO: 1804332 - DNA, 25 bp, Homo sapien
gaggatttcgctccttgaccgaatg

SEQ ID NO: 1804333 - DNA, 25 bp, Homo sapien
accgaatggtttggagaacaggtct

SEQ ID NO: 1804334 - DNA, 25 bp, Homo sapien
tttgtaccggtaaagacagcatgtg

SEQ ID NO: 1804335 - DNA, 25 bp, Homo sapien
tattatttcgcatgtccccaagctc

SEQ ID NO: 1804336 - DNA, 25 bp, Homo sapien
tatttgatccctaaacagtatgctg

SEQ ID NO: 1804337 - DNA, 25 bp, Homo sapien
gttggaggaactactcaaagcccta

SEQ ID NO: 1804338 - DNA, 25 bp, Homo sapien
ccttcccagtgagagtcccgccctg

SEQ ID NO: 1804339 - DNA, 25 bp, Homo sapien
accaagcaccttcccatagcccctt

SEQ ID NO: 1804340 - DNA, 25 bp, Homo sapien
ttcccagtgagagtcccgccctgtc

SEQ ID NO: 1804341 - DNA, 25 bp, Homo sapien
tcctcccagtccctcgagtgacacc

SEQ ID NO: 1804342 - DNA, 25 bp, Homo sapien
agaccatgtcctccagggccgttgc

SEQ ID NO: 1804343 - DNA, 25 bp, Homo sapien
ggagaccatgtcctccagggccgtt

SEQ ID NO: 1804344 - DNA, 25 bp, Homo sapien
ccatgtcctccagggccgttgccca

SEQ ID NO: 1804345 - DNA, 25 bp, Homo sapien
ctggagaccatgtcctccagggccg

SEQ ID NO: 1804346 - DNA, 25 bp, Homo sapien
gaatccctagtggttgaagcagaag

SEQ ID NO: 1804347 - DNA, 25 bp, Homo sapien
catgtagaaacagtgatcatcccac

SEQ ID NO: 1804348 - DNA, 25 bp, Homo sapien
gttgttaccaacactgcagcagata

SEQ ID NO: 1804349 - DNA, 25 bp, Homo sapien
ttaaagagacgtaaatgaacctgtc

SEQ ID NO: 1804350 - DNA, 25 bp, Homo sapien
tacccggagagtcacttctttgaag

SEQ ID NO: 1804351 - DNA, 25 bp, Homo sapien
aagcgcacagaggatagtacccgga

SEQ ID NO: 1804352 - DNA, 25 bp, Homo sapien
tattgttctatacctgccaacaccc

SEQ ID NO: 1804353 - DNA, 25 bp, Homo sapien
cacttctttgaagccactctattgt

SEQ ID NO: 1804354 - DNA, 25 bp, Homo sapien
tctagtggcaccagagtgcagccag

SEQ ID NO: 1804355 - DNA, 25 bp, Homo sapien
tccttcatggcccacagtttctagt

SEQ ID NO: 1804356 - DNA, 25 bp, Homo sapien
tcttgggtggccaagtacgaaccca

SEQ ID NO: 1804357 - DNA, 25 bp, Homo sapien
tggccaagtacgaacccaggccagc

SEQ ID NO: 1804358 - DNA, 25 bp, Homo sapien
gacttacaagcgttcaggtgctgcc

SEQ ID NO: 1804359 - DNA, 25 bp, Homo sapien
gccatggtcacagcagtaagccttc

SEQ ID NO: 1804360 - DNA, 25 bp, Homo sapien
ggtgctgccctgtcaagcgctatgg

SEQ ID NO: 1804361 - DNA, 25 bp, Homo sapien
taaaggagtcccagagatgcctagc

SEQ ID NO: 1804362 - DNA, 25 bp, Homo sapien
ctttgcttgacttgtatagtatttt

SEQ ID NO: 1804363 - DNA, 25 bp, Homo sapien
tatgtgttggtgttattttctccat

SEQ ID NO: 1804364 - DNA, 25 bp, Homo sapien
caatttgttgatctgtaaggcccat

SEQ ID NO: 1804365 - DNA, 25 bp, Homo sapien
tctccaatttgttgatctgtaaggc

SEQ ID NO: 1804366 - DNA, 25 bp, Homo sapien
gatatacatcaggtccctaatcaga

SEQ ID NO: 1804367 - DNA, 25 bp, Homo sapien
tgaattgaggtgaccctgtgccctg

SEQ ID NO: 1804368 - DNA, 25 bp, Homo sapien
tgccctggaggaatactggtaagta

SEQ ID NO: 1804369 - DNA, 25 bp, Homo sapien
aagttcagggtcttctatcagggcc

SEQ ID NO: 1804370 - DNA, 25 bp, Homo sapien
ccccactgcattgccgctgccttcc

SEQ ID NO: 1804371 - DNA, 25 bp, Homo sapien
ttccagcgtccacttggcactgttt

SEQ ID NO: 1804372 - DNA, 25 bp, Homo sapien
tccacttggcactgttttgtttcac

SEQ ID NO: 1804373 - DNA, 25 bp, Homo sapien
acgctgcccccactgcattgccgct

SEQ ID NO: 1804374 - DNA, 25 bp, Homo sapien
tcttgtctttccctcgctcaagaac

SEQ ID NO: 1804375 - DNA, 25 bp, Homo sapien
ggtctctcatcacattctgctctgg

SEQ ID NO: 1804376 - DNA, 25 bp, Homo sapien
ctggtctctcatcacattctgctct

SEQ ID NO: 1804377 - DNA, 25 bp, Homo sapien
caagaactccaagtggttccctgtt

SEQ ID NO: 1804378 - DNA, 25 bp, Homo sapien
cagatgtgtcttgaagcaggacccc

SEQ ID NO: 1804379 - DNA, 25 bp, Homo sapien
gctccccacagtctcgtagacagac

SEQ ID NO: 1804380 - DNA, 25 bp, Homo sapien
ccttggtgcgatgtcagaacacaga

SEQ ID NO: 1804381 - DNA, 25 bp, Homo sapien
cagtctcgtagacagaccagccctt

SEQ ID NO: 1804382 - DNA, 25 bp, Homo sapien
gttcaccgagtaggggtgacaccat

SEQ ID NO: 1804383 - DNA, 25 bp, Homo sapien
gtgacaccatgacccagggaggcag

SEQ ID NO: 1804384 - DNA, 25 bp, Homo sapien
tctgttcaccgagtaggggtgacac

SEQ ID NO: 1804385 - DNA, 25 bp, Homo sapien
ttctgttcaccgagtaggggtgaca

SEQ ID NO: 1804386 - DNA, 25 bp, Homo sapien
taaaggcggagatttagaggccagt

SEQ ID NO: 1804387 - DNA, 25 bp, Homo sapien
aggcggagatttagaggccagtttc

SEQ ID NO: 1804388 - DNA, 25 bp, Homo sapien
cagtaaaggcggagatttagaggcc

SEQ ID NO: 1804389 - DNA, 25 bp, Homo sapien
cggagatttagaggccagtttccca

SEQ ID NO: 1804390 - DNA, 25 bp, Homo sapien
ttgaggccgtgagggcagaacaggt

SEQ ID NO: 1804391 - DNA, 25 bp, Homo sapien
gaggccgtgagggcagaacaggtct

SEQ ID NO: 1804392 - DNA, 25 bp, Homo sapien
gttgaggccgtgagggcagaacagg

SEQ ID NO: 1804393 - DNA, 25 bp, Homo sapien
tgttgaggccgtgagggcagaacag

SEQ ID NO: 1804394 - DNA, 25 bp, Homo sapien
tgagtgcgcagtggagagggtggtg

SEQ ID NO: 1804395 - DNA, 25 bp, Homo sapien
acaggtgtcttgaagaccgagcccc

SEQ ID NO: 1804396 - DNA, 25 bp, Homo sapien
cttgaagaccgagccccctactgtt

SEQ ID NO: 1804397 - DNA, 25 bp, Homo sapien
gtgagtgcgcagtggagagggtggt

SEQ ID NO: 1804398 - DNA, 25 bp, Homo sapien
gaaggagctgcttccacgcactcac

SEQ ID NO: 1804399 - DNA, 25 bp, Homo sapien
ggataacagcgggaactaatgcatt

SEQ ID NO: 1804400 - DNA, 25 bp, Homo sapien
ggacccggctcactgtgtgctctga

SEQ ID NO: 1804401 - DNA, 25 bp, Homo sapien
aacagtcctcaggataacagcggga

SEQ ID NO: 1804402 - DNA, 25 bp, Homo sapien
ggatccatcactgagttgcactgtg

SEQ ID NO: 1804403 - DNA, 25 bp, Homo sapien
ctttcgctcttggaaattcccatca

SEQ ID NO: 1804404 - DNA, 25 bp, Homo sapien
ggaaattcccatcagtgaagcgaaa

SEQ ID NO: 1804405 - DNA, 25 bp, Homo sapien
attcccatcagtgaagcgaaaatgg

SEQ ID NO: 1804406 - DNA, 25 bp, Homo sapien
aagcgaaaatgggtgatgacgggca

SEQ ID NO: 1804407 - DNA, 25 bp, Homo sapien
tgcagaattgacacatcccattgcc

SEQ ID NO: 1804408 - DNA, 25 bp, Homo sapien
acatcccattgcctgattgcaccat

SEQ ID NO: 1804409 - DNA, 25 bp, Homo sapien
atttccagtatgctcttgcagaatt

SEQ ID NO: 1804410 - DNA, 25 bp, Homo sapien
tgtgcacctgcactcgggcctttgt

SEQ ID NO: 1804411 - DNA, 25 bp, Homo sapien
tagaatcgtctgttggcttgaatac

SEQ ID NO: 1804412 - DNA, 25 bp, Homo sapien
ggtccttcctgacatccgatgctag

SEQ ID NO: 1804413 - DNA, 25 bp, Homo sapien
caccttcgagtgacaaaggtgtttt

SEQ ID NO: 1804414 - DNA, 25 bp, Homo sapien
ggcttgaatacaccttcgagtgaca

SEQ ID NO: 1804415 - DNA, 25 bp, Homo sapien
gtggtgactgcacccagggtttcgg

SEQ ID NO: 1804416 - DNA, 25 bp, Homo sapien
atcagtggtgactgcacccagggtt

SEQ ID NO: 1804417 - DNA, 25 bp, Homo sapien
tgactgcacccagggtttcggggag

SEQ ID NO: 1804418 - DNA, 25 bp, Homo sapien
cagtggtgactgcacccagggtttc

SEQ ID NO: 1804419 - DNA, 25 bp, Homo sapien
cctgatgctggacccccacctgcag

SEQ ID NO: 1804420 - DNA, 25 bp, Homo sapien
agtaggtggttgcaggctccagcca

SEQ ID NO: 1804421 - DNA, 25 bp, Homo sapien
tttgacttctgatttaagtaggtgg

SEQ ID NO: 1804422 - DNA, 25 bp, Homo sapien
tgatgctggacccccacctgcaggt

SEQ ID NO: 1804423 - DNA, 25 bp, Homo sapien
gaatgcctttgtcagtgacccgaca

SEQ ID NO: 1804424 - DNA, 25 bp, Homo sapien
ttctgctgtcggaggcgaaccagac

SEQ ID NO: 1804425 - DNA, 25 bp, Homo sapien
tcagtgacccgacaagtgccccttg

SEQ ID NO: 1804426 - DNA, 25 bp, Homo sapien
gaccaagatgagaaagccagtgtta

SEQ ID NO: 1804427 - DNA, 25 bp, Homo sapien
atcagttccctgtcccaaaacggat

SEQ ID NO: 1804428 - DNA, 25 bp, Homo sapien
agttgtacaggcctcctcgctaatc

SEQ ID NO: 1804429 - DNA, 25 bp, Homo sapien
cctgctgtgtgcatagctccttctc

SEQ ID NO: 1804430 - DNA, 25 bp, Homo sapien
ttctccataatgttccgcaggttcc

SEQ ID NO: 1804431 - DNA, 25 bp, Homo sapien
aaatgtcctgtcctccaaggtgctc

SEQ ID NO: 1804432 - DNA, 25 bp, Homo sapien
tcgctctgtagctccagatatgtcc

SEQ ID NO: 1804433 - DNA, 25 bp, Homo sapien
ccgtaggaattctgtcccgtctatg

SEQ ID NO: 1804434 - DNA, 25 bp, Homo sapien
tatgccaactggagaatgcctgaac

SEQ ID NO: 1804435 - DNA, 25 bp, Homo sapien
agcaacgggcagtgcaagaaacaga

SEQ ID NO: 1804436 - DNA, 25 bp, Homo sapien
caatctcctcttacaacgtggtcgc

SEQ ID NO: 1804437 - DNA, 25 bp, Homo sapien
tccgctcttcgtcaactcctgcaag

SEQ ID NO: 1804438 - DNA, 25 bp, Homo sapien
gaggaaatcacccactaacactgct

SEQ ID NO: 1804439 - DNA, 25 bp, Homo sapien
tgtaaagattcaagcatcttcttgg

SEQ ID NO: 1804440 - DNA, 25 bp, Homo sapien
aatgtaaagattcaagcatcttctt

SEQ ID NO: 1804441 - DNA, 25 bp, Homo sapien
atgtaaagattcaagcatcttcttg

SEQ ID NO: 1804442 - DNA, 25 bp, Homo sapien
actgcttcagatttggtgttttggg

SEQ ID NO: 1804443 - DNA, 25 bp, Homo sapien
cattgcctgtgttaaatatcctcca

SEQ ID NO: 1804444 - DNA, 25 bp, Homo sapien
cactttggtgagagtgcgtcttata

SEQ ID NO: 1804445 - DNA, 25 bp, Homo sapien
tatccaacgtcctcaactgcttcag

SEQ ID NO: 1804446 - DNA, 25 bp, Homo sapien
ctgtggcgggagttcgtgggctgac

SEQ ID NO: 1804447 - DNA, 25 bp, Homo sapien
tggcgggagttcgtgggctgaccat

SEQ ID NO: 1804448 - DNA, 25 bp, Homo sapien
tgtggcgggagttcgtgggctgacc

SEQ ID NO: 1804449 - DNA, 25 bp, Homo sapien
gtggcgggagttcgtgggctgacca

SEQ ID NO: 1804450 - DNA, 25 bp, Homo sapien
gaagctacactgatggccgcatacc

SEQ ID NO: 1804451 - DNA, 25 bp, Homo sapien
catggccgccaacgtagtgcttgtt

SEQ ID NO: 1804452 - DNA, 25 bp, Homo sapien
aatgttctccaaatagcaggatgtc

SEQ ID NO: 1804453 - DNA, 25 bp, Homo sapien
tgtccatccatgtgagagagaactc

SEQ ID NO: 1804454 - DNA, 25 bp, Homo sapien
tcactgcacagggttgatttcacac

SEQ ID NO: 1804455 - DNA, 25 bp, Homo sapien
ggtggaacttatgcagcgctggctc

SEQ ID NO: 1804456 - DNA, 25 bp, Homo sapien
ccgtgtccttctctatggtagggat

SEQ ID NO: 1804457 - DNA, 25 bp, Homo sapien
tttgatagcgccctaggcctccgtt

SEQ ID NO: 1804458 - DNA, 25 bp, Homo sapien
aaatgtccgtagcatccgcagaggc

SEQ ID NO: 1804459 - DNA, 25 bp, Homo sapien
tcgggcagtgaatgtggatgtttcc

SEQ ID NO: 1804460 - DNA, 25 bp, Homo sapien
acagttcttctcgtggtgaaaggca

SEQ ID NO: 1804461 - DNA, 25 bp, Homo sapien
caagcacatgccacgtactggatta

SEQ ID NO: 1804462 - DNA, 25 bp, Homo sapien
ggatgtttccagtctgctcaatgag

SEQ ID NO: 1804463 - DNA, 25 bp, Homo sapien
gatgggtggatactctgcgctcttc

SEQ ID NO: 1804464 - DNA, 25 bp, Homo sapien
atgggtggatactctgcgctcttca

SEQ ID NO: 1804465 - DNA, 25 bp, Homo sapien
tgggtggatactctgcgctcttcat

SEQ ID NO: 1804466 - DNA, 25 bp, Homo sapien
ctcctcttgggtgtcgagcctgcat

SEQ ID NO: 1804467 - DNA, 25 bp, Homo sapien
cttgggtgtcgagcctgcattcagg

SEQ ID NO: 1804468 - DNA, 25 bp, Homo sapien
cctcatagatcaagttctgctgctg

SEQ ID NO: 1804469 - DNA, 25 bp, Homo sapien
cagagcctcatagatcaagttctgc

SEQ ID NO: 1804470 - DNA, 25 bp, Homo sapien
ctaaaaacagctggcagcatctgag

SEQ ID NO: 1804471 - DNA, 25 bp, Homo sapien
aaaacagctggcagcatctgagcac

SEQ ID NO: 1804472 - DNA, 25 bp, Homo sapien
aaaaacagctggcagcatctgagca

SEQ ID NO: 1804473 - DNA, 25 bp, Homo sapien
taaaaacagctggcagcatctgagc

SEQ ID NO: 1804474 - DNA, 25 bp, Homo sapien
tacatcgaggcacgttggtggagct

SEQ ID NO: 1804475 - DNA, 25 bp, Homo sapien
ctacatcgaggcacgttggtggagc

SEQ ID NO: 1804476 - DNA, 25 bp, Homo sapien
catcgaggcacgttggtggagctgc

SEQ ID NO: 1804477 - DNA, 25 bp, Homo sapien
acatcgaggcacgttggtggagctg

SEQ ID NO: 1804478 - DNA, 25 bp, Homo sapien
tgtccttgcaggatccagagctgaa

SEQ ID NO: 1804479 - DNA, 25 bp, Homo sapien
gcaggatccagagctgaaggccacc

SEQ ID NO: 1804480 - DNA, 25 bp, Homo sapien
tgcaggatccagagctgaaggccac

SEQ ID NO: 1804481 - DNA, 25 bp, Homo sapien
tcagatgtccttgcaggatccagag

SEQ ID NO: 1804482 - DNA, 25 bp, Homo sapien
tactttggtgtctagctgtcgctgg

SEQ ID NO: 1804483 - DNA, 25 bp, Homo sapien
tgtgcgatatcagggcccgtcagtt

SEQ ID NO: 1804484 - DNA, 25 bp, Homo sapien
gatgcgggtgctttcgagtccaaac

SEQ ID NO: 1804485 - DNA, 25 bp, Homo sapien
ttcgggaagccacaaccgtgagtgc

SEQ ID NO: 1804486 - DNA, 25 bp, Homo sapien
tgtcagaaaatgtgacccagagctg

SEQ ID NO: 1804487 - DNA, 25 bp, Homo sapien
agccttgtgggtacagccccaaggg

SEQ ID NO: 1804488 - DNA, 25 bp, Homo sapien
cactgtcagaaaatgtgacccagag

SEQ ID NO: 1804489 - DNA, 25 bp, Homo sapien
ccaagaggatctgtagcagggaagg

SEQ ID NO: 1804490 - DNA, 25 bp, Homo sapien
tcccagtacaatctttctcactgtg

SEQ ID NO: 1804491 - DNA, 25 bp, Homo sapien
ctcttcccagtacaatctttctcac

SEQ ID NO: 1804492 - DNA, 25 bp, Homo sapien
cagtacaatctttctcactgtggga

SEQ ID NO: 1804493 - DNA, 25 bp, Homo sapien
caatctttctcactgtgggaggcat

SEQ ID NO: 1804494 - DNA, 25 bp, Homo sapien
tcttccctcaggggcacctttctct

SEQ ID NO: 1804495 - DNA, 25 bp, Homo sapien
cttcttccctcaggggcacctttct

SEQ ID NO: 1804496 - DNA, 25 bp, Homo sapien
ccctcaggggcacctttctctccat

SEQ ID NO: 1804497 - DNA, 25 bp, Homo sapien
ttccctcaggggcacctttctctcc

SEQ ID NO: 1804498 - DNA, 25 bp, Homo sapien
cgagcctacgggtttctttagacat

SEQ ID NO: 1804499 - DNA, 25 bp, Homo sapien
agcctacgggtttctttagacatga

SEQ ID NO: 1804500 - DNA, 25 bp, Homo sapien
gagcctacgggtttctttagacatg

SEQ ID NO: 1804501 - DNA, 25 bp, Homo sapien
tggagccttccacgcaggttaccat

SEQ ID NO: 1804502 - DNA, 25 bp, Homo sapien
gcctggagccttccacgcaggttac

SEQ ID NO: 1804503 - DNA, 25 bp, Homo sapien
gagccttccacgcaggttaccatct

SEQ ID NO: 1804504 - DNA, 25 bp, Homo sapien
gagcctggagccttccacgcaggtt

SEQ ID NO: 1804505 - DNA, 25 bp, Homo sapien
agctttgtagtagcgtcagcttccc

SEQ ID NO: 1804506 - DNA, 25 bp, Homo sapien
agggaaggagggtgaccgctggcat

SEQ ID NO: 1804507 - DNA, 25 bp, Homo sapien
ctgtgacgccatagctttgtagtag

SEQ ID NO: 1804508 - DNA, 25 bp, Homo sapien
cgccatagctttgtagtagcgtcag

SEQ ID NO: 1804509 - DNA, 25 bp, Homo sapien
gagcttctccaagcctagtggcagg

SEQ ID NO: 1804510 - DNA, 25 bp, Homo sapien
taacagtgactttgaaatcagtact

SEQ ID NO: 1804511 - DNA, 25 bp, Homo sapien
ggcaggtccagttttcgtgcaatgt

SEQ ID NO: 1804512 - DNA, 25 bp, Homo sapien
tgtgatgacatgttaccgaaatcta

SEQ ID NO: 1804513 - DNA, 25 bp, Homo sapien
tggactccttctcgcctctgaatgg

SEQ ID NO: 1804514 - DNA, 25 bp, Homo sapien
catttgtagctggacctcacagcca

SEQ ID NO: 1804515 - DNA, 25 bp, Homo sapien
ccagcctttgattctaagggacaaa

SEQ ID NO: 1804516 - DNA, 25 bp, Homo sapien
gggacaaacctcccatttgtagctg

SEQ ID NO: 1804517 - DNA, 25 bp, Homo sapien
ttcatagacaattttgggtctcctg

SEQ ID NO: 1804518 - DNA, 25 bp, Homo sapien
catagacaattttgggtctcctgta

SEQ ID NO: 1804519 - DNA, 25 bp, Homo sapien
tcatagacaattttgggtctcctgt

SEQ ID NO: 1804520 - DNA, 25 bp, Homo sapien
atagacaattttgggtctcctgtat

SEQ ID NO: 1804521 - DNA, 25 bp, Homo sapien
tgagtgtctggggtaggagagaccg

SEQ ID NO: 1804522 - DNA, 25 bp, Homo sapien
gttccaaacatggagcgagaatgag

SEQ ID NO: 1804523 - DNA, 25 bp, Homo sapien
aacatggagcgagaatgagtgtctg

SEQ ID NO: 1804524 - DNA, 25 bp, Homo sapien
caaacatggagcgagaatgagtgtc

SEQ ID NO: 1804525 - DNA, 25 bp, Homo sapien
ggaatttctcgagtccgatacgcat

SEQ ID NO: 1804526 - DNA, 25 bp, Homo sapien
aacacgccacagtataacttatgcc

SEQ ID NO: 1804527 - DNA, 25 bp, Homo sapien
gcattgtatttagttcccgtcagga

SEQ ID NO: 1804528 - DNA, 25 bp, Homo sapien
tgccccaggatatctaacttcagag

SEQ ID NO: 1804529 - DNA, 25 bp, Homo sapien
cggttgtaatcagcaaatacgtttc

SEQ ID NO: 1804530 - DNA, 25 bp, Homo sapien
gactggagcaactcatcggttgtaa

SEQ ID NO: 1804531 - DNA, 25 bp, Homo sapien
ccgactgtgtagagaatccatggct

SEQ ID NO: 1804532 - DNA, 25 bp, Homo sapien
ttttgacatcgagccgactggagca

SEQ ID NO: 1804533 - DNA, 25 bp, Homo sapien
tcgtctccgttgtggaaccccagag

SEQ ID NO: 1804534 - DNA, 25 bp, Homo sapien
agtgtgatgcgatgccaagaccagg

SEQ ID NO: 1804535 - DNA, 25 bp, Homo sapien
catccttttgctctcgtctccgttg

SEQ ID NO: 1804536 - DNA, 25 bp, Homo sapien
ttgtgtaagatggattaaggcctct

SEQ ID NO: 1804537 - DNA, 25 bp, Homo sapien
tccgtcgaggagaacacagataggt

SEQ ID NO: 1804538 - DNA, 25 bp, Homo sapien
cacagataggtttaaggagaaaggc

SEQ ID NO: 1804539 - DNA, 25 bp, Homo sapien
ccagatccgtcgaggagaacacaga

SEQ ID NO: 1804540 - DNA, 25 bp, Homo sapien
gaacacagataggtttaaggagaaa

SEQ ID NO: 1804541 - DNA, 25 bp, Homo sapien
tagtggagctaatgaagagagagta

SEQ ID NO: 1804542 - DNA, 25 bp, Homo sapien
aagtctccaatggtgagaactttcc

SEQ ID NO: 1804543 - DNA, 25 bp, Homo sapien
gctaatgaagagagagtagtgtcag

SEQ ID NO: 1804544 - DNA, 25 bp, Homo sapien
gagtagtgtcagaaaagtctccaat

SEQ ID NO: 1804545 - DNA, 25 bp, Homo sapien
tgaacagtcactttccggctcttct

SEQ ID NO: 1804546 - DNA, 25 bp, Homo sapien
cttgccacatgccacatagacattc

SEQ ID NO: 1804547 - DNA, 25 bp, Homo sapien
catgccacatagacattctgatttc

SEQ ID NO: 1804548 - DNA, 25 bp, Homo sapien
ctgatttctgaacagtcactttccg

SEQ ID NO: 1804549 - DNA, 25 bp, Homo sapien
cctttgactgtataatgttagctgg

SEQ ID NO: 1804550 - DNA, 25 bp, Homo sapien
tgccttacagtggaaatgaatactt

SEQ ID NO: 1804551 - DNA, 25 bp, Homo sapien
ttcccacagaaagcaaggcgaatgg

SEQ ID NO: 1804552 - DNA, 25 bp, Homo sapien
gaaccttactaaaagcatctggctg

SEQ ID NO: 1804553 - DNA, 25 bp, Homo sapien
tggctcctgtattttaggacacagg

SEQ ID NO: 1804554 - DNA, 25 bp, Homo sapien
ctggctcctgtattttaggacacag

SEQ ID NO: 1804555 - DNA, 25 bp, Homo sapien
caggtccagccaactacgagagggc

SEQ ID NO: 1804556 - DNA, 25 bp, Homo sapien
gccaactacgagagggcttttggcc

SEQ ID NO: 1804557 - DNA, 25 bp, Homo sapien
caattttacatttatccagactgcc

SEQ ID NO: 1804558 - DNA, 25 bp, Homo sapien
cttctctaagcagttgacactgatt

SEQ ID NO: 1804559 - DNA, 25 bp, Homo sapien
gaaatcaattgcagtgacatctcct

SEQ ID NO: 1804560 - DNA, 25 bp, Homo sapien
tgagacttgatagctcactgtggca

SEQ ID NO: 1804561 - DNA, 25 bp, Homo sapien
cttccacagtgttctctgtgatcat

SEQ ID NO: 1804562 - DNA, 25 bp, Homo sapien
tcctgtagaagttcattagcgtaat

SEQ ID NO: 1804563 - DNA, 25 bp, Homo sapien
cattagcgtaataggcgtaatctca

SEQ ID NO: 1804564 - DNA, 25 bp, Homo sapien
agcatgttgaagtttaggtgtttca

SEQ ID NO: 1804565 - DNA, 25 bp, Homo sapien
tagaagttcattagcgtaataggcg

SEQ ID NO: 1804566 - DNA, 25 bp, Homo sapien
tcaaaagccaaacgtgtcagtccga

SEQ ID NO: 1804567 - DNA, 25 bp, Homo sapien
gatggttgcattgcaggtttagaca

SEQ ID NO: 1804568 - DNA, 25 bp, Homo sapien
tcagtccgaggctgtgttgatggtt

SEQ ID NO: 1804569 - DNA, 25 bp, Homo sapien
ggttgcattgcaggtttagacaaag

SEQ ID NO: 1804570 - DNA, 25 bp, Homo sapien
ggttgcatcatgaccgaagcctttc

SEQ ID NO: 1804571 - DNA, 25 bp, Homo sapien
gaaggcctcacaactctgtggccct

SEQ ID NO: 1804572 - DNA, 25 bp, Homo sapien
ggcccttggcatgggtgctctggac

SEQ ID NO: 1804573 - DNA, 25 bp, Homo sapien
agaaagtccatcatcgcccccgaag

SEQ ID NO: 1804574 - DNA, 25 bp, Homo sapien
acaaggaagccttgcccagaagctt

SEQ ID NO: 1804575 - DNA, 25 bp, Homo sapien
caggacagtctggatttgctccagg

SEQ ID NO: 1804576 - DNA, 25 bp, Homo sapien
gagactttaaaatccatgggacaag

SEQ ID NO: 1804577 - DNA, 25 bp, Homo sapien
ccagattaggccagttctgtgcaca

SEQ ID NO: 1804578 - DNA, 25 bp, Homo sapien
taccaggatggcagtgggcaacaat

SEQ ID NO: 1804579 - DNA, 25 bp, Homo sapien
caggtacagcgtttgagcgagaatc

SEQ ID NO: 1804580 - DNA, 25 bp, Homo sapien
cctagggctagggactacgaacaga

SEQ ID NO: 1804581 - DNA, 25 bp, Homo sapien
tctgctggctgatcggaaggatacc

SEQ ID NO: 1804582 - DNA, 25 bp, Homo sapien
ctgcctctaatctgagctacagcaa

SEQ ID NO: 1804583 - DNA, 25 bp, Homo sapien
tgcaacagccagactatttttagta

SEQ ID NO: 1804584 - DNA, 25 bp, Homo sapien
taaaggaagcttgaacagacgaaga

SEQ ID NO: 1804585 - DNA, 25 bp, Homo sapien
taaatccgttaagagtgcgttcatg

SEQ ID NO: 1804586 - DNA, 25 bp, Homo sapien
tgtggacggcgttgtggatgagtga

SEQ ID NO: 1804587 - DNA, 25 bp, Homo sapien
gccacgttcctggtgaaggtagtct

SEQ ID NO: 1804588 - DNA, 25 bp, Homo sapien
atctgagcacgggtttgcagtccca

SEQ ID NO: 1804589 - DNA, 25 bp, Homo sapien
gagcacgggtttgcagtcccaacag

SEQ ID NO: 1804590 - DNA, 25 bp, Homo sapien
tcttcacgggcttcatgtacagatg

SEQ ID NO: 1804591 - DNA, 25 bp, Homo sapien
ccagcaacctgaattctttaacttg

SEQ ID NO: 1804592 - DNA, 25 bp, Homo sapien
acgggcttcatgtacagatgttgac

SEQ ID NO: 1804593 - DNA, 25 bp, Homo sapien
cgtcttcacgggcttcatgtacaga

SEQ ID NO: 1804594 - DNA, 25 bp, Homo sapien
atttagttttaatctccagtacctg

SEQ ID NO: 1804595 - DNA, 25 bp, Homo sapien
tttagttttaatctccagtacctga

SEQ ID NO: 1804596 - DNA, 25 bp, Homo sapien
cagtacctgatttgggctggctgtg

SEQ ID NO: 1804597 - DNA, 25 bp, Homo sapien
atctccagtacctgatttgggctgg

SEQ ID NO: 1804598 - DNA, 25 bp, Homo sapien
tgcaaattggttaataactacagga

SEQ ID NO: 1804599 - DNA, 25 bp, Homo sapien
ggagatctgcaaattggttaataac

SEQ ID NO: 1804600 - DNA, 25 bp, Homo sapien
gatctgcaaattggttaataactac

SEQ ID NO: 1804601 - DNA, 25 bp, Homo sapien
tctgcaaattggttaataactacag

SEQ ID NO: 1804602 - DNA, 25 bp, Homo sapien
ccgttttgcattcccgagacacctt

SEQ ID NO: 1804603 - DNA, 25 bp, Homo sapien
atctcgacgtgctgcctcgctcaga

SEQ ID NO: 1804604 - DNA, 25 bp, Homo sapien
cctcgctcagacaaatggaaccact

SEQ ID NO: 1804605 - DNA, 25 bp, Homo sapien
agtgcttatcttgcttgagctgggt

SEQ ID NO: 1804606 - DNA, 25 bp, Homo sapien
catttggcggtctggtcatgtcagc

SEQ ID NO: 1804607 - DNA, 25 bp, Homo sapien
ttctcccggttgaggtgaagcccac

SEQ ID NO: 1804608 - DNA, 25 bp, Homo sapien
cacacgttgcatttggcggtctggt

SEQ ID NO: 1804609 - DNA, 25 bp, Homo sapien
tctccgaacgtcttctgtggacatc

SEQ ID NO: 1804610 - DNA, 25 bp, Homo sapien
gcctggaacctgtgttgggattcca

SEQ ID NO: 1804611 - DNA, 25 bp, Homo sapien
ggaacctgtgttgggattccatctt

SEQ ID NO: 1804612 - DNA, 25 bp, Homo sapien
cctggaacctgtgttgggattccat

SEQ ID NO: 1804613 - DNA, 25 bp, Homo sapien
gagcctggaacctgtgttgggattc

SEQ ID NO: 1804614 - DNA, 25 bp, Homo sapien
ttgttcccactgcatatgatgttct

SEQ ID NO: 1804615 - DNA, 25 bp, Homo sapien
tcccactgcatatgatgttctttct

SEQ ID NO: 1804616 - DNA, 25 bp, Homo sapien
ttcccatcttcaggggtcaactcaa

SEQ ID NO: 1804617 - DNA, 25 bp, Homo sapien
tcttcaggggtcaactcaaacctca

SEQ ID NO: 1804618 - DNA, 25 bp, Homo sapien
gcaaagaccctctcatctgcagatc

SEQ ID NO: 1804619 - DNA, 25 bp, Homo sapien
gatccacagtcagctacacacactg

SEQ ID NO: 1804620 - DNA, 25 bp, Homo sapien
tctgcagatccacagtcagctacac

SEQ ID NO: 1804621 - DNA, 25 bp, Homo sapien
cttctctgaccagcccattgcaaag

SEQ ID NO: 1804622 - DNA, 25 bp, Homo sapien
catttggcaaccctctgagatgtgg

SEQ ID NO: 1804623 - DNA, 25 bp, Homo sapien
tggcaaccctctgagatgtggcaat

SEQ ID NO: 1804624 - DNA, 25 bp, Homo sapien
ccctctgagatgtggcaattgtctt

SEQ ID NO: 1804625 - DNA, 25 bp, Homo sapien
tgagatgtggcaattgtctttcctc

SEQ ID NO: 1804626 - DNA, 25 bp, Homo sapien
gggcgctccttttgaactggtttga

SEQ ID NO: 1804627 - DNA, 25 bp, Homo sapien
tgagggcgctccttttgaactggtt

SEQ ID NO: 1804628 - DNA, 25 bp, Homo sapien
ctggtgagggcgctccttttgaact

SEQ ID NO: 1804629 - DNA, 25 bp, Homo sapien
gaactggtgagggcgctccttttga

SEQ ID NO: 1804630 - DNA, 25 bp, Homo sapien
gcatagaaatattgcgtaatttttg

SEQ ID NO: 1804631 - DNA, 25 bp, Homo sapien
gaaatattgcgtaatttttgtctcc

SEQ ID NO: 1804632 - DNA, 25 bp, Homo sapien
ctgggtaattttttcgcatagaaat

SEQ ID NO: 1804633 - DNA, 25 bp, Homo sapien
aattttttcgcatagaaatattgcg

SEQ ID NO: 1804634 - DNA, 25 bp, Homo sapien
ctgatgtagctgactgagacaggtc

SEQ ID NO: 1804635 - DNA, 25 bp, Homo sapien
cagaactatggtgccctgatgtagc

SEQ ID NO: 1804636 - DNA, 25 bp, Homo sapien
ctgagacaggtcattatagggtcct

SEQ ID NO: 1804637 - DNA, 25 bp, Homo sapien
gacaggtcattatagggtcctccat

SEQ ID NO: 1804638 - DNA, 25 bp, Homo sapien
tgccttcgcccttccacgttagtga

SEQ ID NO: 1804639 - DNA, 25 bp, Homo sapien
tcttgcttcatcagtatcatttcct

SEQ ID NO: 1804640 - DNA, 25 bp, Homo sapien
tgaagaccctctttccgtctcttga

SEQ ID NO: 1804641 - DNA, 25 bp, Homo sapien
acgttagtgacactgacggctgcag

SEQ ID NO: 1804642 - DNA, 25 bp, Homo sapien
gatattctgttggatcgtcgctttc

SEQ ID NO: 1804643 - DNA, 25 bp, Homo sapien
ctgttggatcgtcgctttcttcccc

SEQ ID NO: 1804644 - DNA, 25 bp, Homo sapien
tattctgttggatcgtcgctttctt

SEQ ID NO: 1804645 - DNA, 25 bp, Homo sapien
cgaggatattctgttggatcgtcgc

SEQ ID NO: 1804646 - DNA, 25 bp, Homo sapien
ttcgtgtaccatttgtggtccttcc

SEQ ID NO: 1804647 - DNA, 25 bp, Homo sapien
cccattcgtgtaccatttgtggtcc

SEQ ID NO: 1804648 - DNA, 25 bp, Homo sapien
cctgtgcagcccattcgtgtaccat

SEQ ID NO: 1804649 - DNA, 25 bp, Homo sapien
tgcagcccattcgtgtaccatttgt

SEQ ID NO: 1804650 - DNA, 25 bp, Homo sapien
tactcggtgctataatctagagtgc

SEQ ID NO: 1804651 - DNA, 25 bp, Homo sapien
taacactaactggtggtgaaattcc

SEQ ID NO: 1804652 - DNA, 25 bp, Homo sapien
taatctagagtgctggtccgtggag

SEQ ID NO: 1804653 - DNA, 25 bp, Homo sapien
cacagcaatcaggacatgagacggg

SEQ ID NO: 1804654 - DNA, 25 bp, Homo sapien
cagctgctggtttttcactgttatc

SEQ ID NO: 1804655 - DNA, 25 bp, Homo sapien
ccgattttctctgttggagtctcct

SEQ ID NO: 1804656 - DNA, 25 bp, Homo sapien
gatgttcctcctccggtgatcactt

SEQ ID NO: 1804657 - DNA, 25 bp, Homo sapien
ttcactgttatccaccccgattttc

SEQ ID NO: 1804658 - DNA, 25 bp, Homo sapien
tcacgctgtatctggtggtggttcc

SEQ ID NO: 1804659 - DNA, 25 bp, Homo sapien
cttttgtagcttcaactgcacaacc

SEQ ID NO: 1804660 - DNA, 25 bp, Homo sapien
ctaaaggagtttccatgtcctcctg

SEQ ID NO: 1804661 - DNA, 25 bp, Homo sapien
tgcacaacccatcacgctgtatctg

SEQ ID NO: 1804662 - DNA, 25 bp, Homo sapien
tatgtggacattgatccagtactga

SEQ ID NO: 1804663 - DNA, 25 bp, Homo sapien
ctatgtggacattgatccagtactg

SEQ ID NO: 1804664 - DNA, 25 bp, Homo sapien
cacgaaaggtatggcaagactatga

SEQ ID NO: 1804665 - DNA, 25 bp, Homo sapien
tgaatgtgctcttaagtaggaccag

SEQ ID NO: 1804666 - DNA, 25 bp, Homo sapien
caaagaacagcgttggagccacgaa

SEQ ID NO: 1804667 - DNA, 25 bp, Homo sapien
gaagatcctgaaattagaaggtgaa

SEQ ID NO: 1804668 - DNA, 25 bp, Homo sapien
agccagagtgatgcacattcagctt

SEQ ID NO: 1804669 - DNA, 25 bp, Homo sapien
taaaatggtatctagctgagctgcc

SEQ ID NO: 1804670 - DNA, 25 bp, Homo sapien
cacagaaatgcgtacgttgagagcc

SEQ ID NO: 1804671 - DNA, 25 bp, Homo sapien
gctttggcgaagagggagaaaccca

SEQ ID NO: 1804672 - DNA, 25 bp, Homo sapien
tgaccttgatcttccttagactggc

SEQ ID NO: 1804673 - DNA, 25 bp, Homo sapien
gactggctgttaatccccaacttgt

SEQ ID NO: 1804674 - DNA, 25 bp, Homo sapien
aacagcttgaaaagcgctgcagcca

SEQ ID NO: 1804675 - DNA, 25 bp, Homo sapien
ccagctgcttgaccaagtggagcca

SEQ ID NO: 1804676 - DNA, 25 bp, Homo sapien
cagatccccttggtgtaggaaataa

SEQ ID NO: 1804677 - DNA, 25 bp, Homo sapien
ggtgcgtctcaagaacagatcccct

SEQ ID NO: 1804678 - DNA, 25 bp, Homo sapien
tcaagaacagatccccttggtgtag

SEQ ID NO: 1804679 - DNA, 25 bp, Homo sapien
tgctgtccaggtgcgtctcaagaac

SEQ ID NO: 1804680 - DNA, 25 bp, Homo sapien
gagcatatgggtcagatttcaaagg

SEQ ID NO: 1804681 - DNA, 25 bp, Homo sapien
agcatatgggtcagatttcaaaggt

SEQ ID NO: 1804682 - DNA, 25 bp, Homo sapien
tagtcagaaggaggaaagagggaag

SEQ ID NO: 1804683 - DNA, 25 bp, Homo sapien
gtagtcagaaggaggaaagagggaa

SEQ ID NO: 1804684 - DNA, 25 bp, Homo sapien
tcagaaggaggaaagagggaaggag

SEQ ID NO: 1804685 - DNA, 25 bp, Homo sapien
ctgtagtcagaaggaggaaagaggg

SEQ ID NO: 1804686 - DNA, 25 bp, Homo sapien
catgactaggcgcagggctgaactg

SEQ ID NO: 1804687 - DNA, 25 bp, Homo sapien
aatgagagctaatgacaccagcagc

SEQ ID NO: 1804688 - DNA, 25 bp, Homo sapien
ggccatgcatctattccacaggaga

SEQ ID NO: 1804689 - DNA, 25 bp, Homo sapien
tgaggtgactccctgcatgactagg

SEQ ID NO: 1804690 - DNA, 25 bp, Homo sapien
taagtagcagcatataccaaggagg

SEQ ID NO: 1804691 - DNA, 25 bp, Homo sapien
gctcctcctgctgtatgacaagaag

SEQ ID NO: 1804692 - DNA, 25 bp, Homo sapien
ttagcgcagcaagagaatgaacttc

SEQ ID NO: 1804693 - DNA, 25 bp, Homo sapien
actttctggccggatcattagcgca

SEQ ID NO: 1804694 - DNA, 25 bp, Homo sapien
caatctggacagtaggatttagtgg

SEQ ID NO: 1804695 - DNA, 25 bp, Homo sapien
tctggacagtaggatttagtggtaa

SEQ ID NO: 1804696 - DNA, 25 bp, Homo sapien
gcaatctggacagtaggatttagtg

SEQ ID NO: 1804697 - DNA, 25 bp, Homo sapien
aaagcaatctggacagtaggattta

SEQ ID NO: 1804698 - DNA, 25 bp, Homo sapien
gtccctggactgagactgcctgttt

SEQ ID NO: 1804699 - DNA, 25 bp, Homo sapien
cgttcttgcgtgtatgtacagggac

SEQ ID NO: 1804700 - DNA, 25 bp, Homo sapien
ggacaaaggagatcctctggtccct

SEQ ID NO: 1804701 - DNA, 25 bp, Homo sapien
ctggataatgtaatatgtgcgttct

SEQ ID NO: 1804702 - DNA, 25 bp, Homo sapien
tggtgcacagccacgaccagaggag

SEQ ID NO: 1804703 - DNA, 25 bp, Homo sapien
aaacccttctgtcactggtgcacag

SEQ ID NO: 1804704 - DNA, 25 bp, Homo sapien
gcacattgtacctccagtggctctg

SEQ ID NO: 1804705 - DNA, 25 bp, Homo sapien
tggtggtctccagtatcatagtaag

SEQ ID NO: 1804706 - DNA, 25 bp, Homo sapien
gccattttgcaacagaaggcgaaaa

SEQ ID NO: 1804707 - DNA, 25 bp, Homo sapien
gcagtccagaaactaaatatgttgg

SEQ ID NO: 1804708 - DNA, 25 bp, Homo sapien
gaagatgcagttttctacggtaata

SEQ ID NO: 1804709 - DNA, 25 bp, Homo sapien
tctacggtaataaggttgattgcca

SEQ ID NO: 1804710 - DNA, 25 bp, Homo sapien
ttccgttgcagcatccaaaccctgg

SEQ ID NO: 1804711 - DNA, 25 bp, Homo sapien
ggttccgttgcagcatccaaaccct

SEQ ID NO: 1804712 - DNA, 25 bp, Homo sapien
gttgcagcatccaaaccctggtctt

SEQ ID NO: 1804713 - DNA, 25 bp, Homo sapien
gggtggttccgttgcagcatccaaa

SEQ ID NO: 1804714 - DNA, 25 bp, Homo sapien
ggagcccctctggtgtaggatcctc

SEQ ID NO: 1804715 - DNA, 25 bp, Homo sapien
gcatgtagccaaaccgagtgattcc

SEQ ID NO: 1804716 - DNA, 25 bp, Homo sapien
tagccaaaccgagtgattcctgagc

SEQ ID NO: 1804717 - DNA, 25 bp, Homo sapien
ggtgtaggatcctcatgagcagcag

SEQ ID NO: 1804718 - DNA, 25 bp, Homo sapien
tttgggaagcgtggcataaactcgc

SEQ ID NO: 1804719 - DNA, 25 bp, Homo sapien
cagatgttgttttgcaatcgcggag

SEQ ID NO: 1804720 - DNA, 25 bp, Homo sapien
gagtttccgggtcagcttcatcaag

SEQ ID NO: 1804721 - DNA, 25 bp, Homo sapien
ccacagtaaacaccttgcgcagatg

SEQ ID NO: 1804722 - DNA, 25 bp, Homo sapien
gcctgaagcttaattatgaccagct

SEQ ID NO: 1804723 - DNA, 25 bp, Homo sapien
cctgaagcttaattatgaccagctg

SEQ ID NO: 1804724 - DNA, 25 bp, Homo sapien
aagcctgaagcttaattatgaccag

SEQ ID NO: 1804725 - DNA, 25 bp, Homo sapien
gaagcttaattatgaccagctgcat

SEQ ID NO: 1804726 - DNA, 25 bp, Homo sapien
cagagttggttcataagtgtgaata

SEQ ID NO: 1804727 - DNA, 25 bp, Homo sapien
gtgtgaataacatcaagaggcttgt

SEQ ID NO: 1804728 - DNA, 25 bp, Homo sapien
cctggcagtagacgatgccaatgaa

SEQ ID NO: 1804729 - DNA, 25 bp, Homo sapien
actggtacgaggcctggcagtagac

SEQ ID NO: 1804730 - DNA, 25 bp, Homo sapien
tccctcttgtgacatgctttttgca

SEQ ID NO: 1804731 - DNA, 25 bp, Homo sapien
cctcttgtgacatgctttttgcatc

SEQ ID NO: 1804732 - DNA, 25 bp, Homo sapien
catccctcttgtgacatgctttttg

SEQ ID NO: 1804733 - DNA, 25 bp, Homo sapien
ccatccctcttgtgacatgcttttt

SEQ ID NO: 1804734 - DNA, 25 bp, Homo sapien
aggcatctcgaaatgtgtgggtccc

SEQ ID NO: 1804735 - DNA, 25 bp, Homo sapien
ctgactttcgagcaggaggtgaggc

SEQ ID NO: 1804736 - DNA, 25 bp, Homo sapien
gtgaggcatctcgaaatgtgtgggt

SEQ ID NO: 1804737 - DNA, 25 bp, Homo sapien
caggaggtgaggcatctcgaaatgt

SEQ ID NO: 1804738 - DNA, 25 bp, Homo sapien
catggagtagattcaatcctggacc

SEQ ID NO: 1804739 - DNA, 25 bp, Homo sapien
ttcccacttcgaagcttccatggag

SEQ ID NO: 1804740 - DNA, 25 bp, Homo sapien
caccaacatctgtgcaattccaagt

SEQ ID NO: 1804741 - DNA, 25 bp, Homo sapien
ccattgtggctgctgtagattcacc

SEQ ID NO: 1804742 - DNA, 25 bp, Homo sapien
gtgaaggccaagaattgtaaatatg

SEQ ID NO: 1804743 - DNA, 25 bp, Homo sapien
tgctttcatcaaggtgaaggccaag

SEQ ID NO: 1804744 - DNA, 25 bp, Homo sapien
gattgctgctttcatcaaggtgaag

SEQ ID NO: 1804745 - DNA, 25 bp, Homo sapien
tccccaagattgctgctttcatcaa

SEQ ID NO: 1804746 - DNA, 25 bp, Homo sapien
cgtgtcatgggcagcgtcccaccat

SEQ ID NO: 1804747 - DNA, 25 bp, Homo sapien
acagtgtctctgtctgcccgaaggg

SEQ ID NO: 1804748 - DNA, 25 bp, Homo sapien
gtttctggcattgaatctaagtcgg

SEQ ID NO: 1804749 - DNA, 25 bp, Homo sapien
atctaagtcgggagctcacagtgag

SEQ ID NO: 1804750 - DNA, 25 bp, Homo sapien
caagctttggtgcaattctgttgcc

SEQ ID NO: 1804751 - DNA, 25 bp, Homo sapien
gtgactgagcttgcccgataaaggt

SEQ ID NO: 1804752 - DNA, 25 bp, Homo sapien
gcctgttagttggtcctgtgaagat

SEQ ID NO: 1804753 - DNA, 25 bp, Homo sapien
gcagctcagtggtcttttgtctaca

SEQ ID NO: 1804754 - DNA, 25 bp, Homo sapien
cttccaaattcagttcaggtcttcc

SEQ ID NO: 1804755 - DNA, 25 bp, Homo sapien
ccttccaaattcagttcaggtcttc

SEQ ID NO: 1804756 - DNA, 25 bp, Homo sapien
attcagttcaggtcttccttctgtg

SEQ ID NO: 1804757 - DNA, 25 bp, Homo sapien
ttgcacatgttttcatttacctatt

SEQ ID NO: 1804758 - DNA, 25 bp, Homo sapien
tgttgcacatgttttcatttaccta

SEQ ID NO: 1804759 - DNA, 25 bp, Homo sapien
tgcacatgttttcatttacctattt

SEQ ID NO: 1804760 - DNA, 25 bp, Homo sapien
gttgcacatgttttcatttacctat

SEQ ID NO: 1804761 - DNA, 25 bp, Homo sapien
ccccatcttgttgtggtagagcctc

SEQ ID NO: 1804762 - DNA, 25 bp, Homo sapien
tgttgtggtagagcctctgtagacc

SEQ ID NO: 1804763 - DNA, 25 bp, Homo sapien
ctgtcctgctggattacagactggg

SEQ ID NO: 1804764 - DNA, 25 bp, Homo sapien
ctgctggattacagactgggcttcc

SEQ ID NO: 1804765 - DNA, 25 bp, Homo sapien
catccctggagcctgttttaattgt

SEQ ID NO: 1804766 - DNA, 25 bp, Homo sapien
gctagctcagcacttataagatacg

SEQ ID NO: 1804767 - DNA, 25 bp, Homo sapien
cctggagcctgttttaattgttcct

SEQ ID NO: 1804768 - DNA, 25 bp, Homo sapien
tttattcgtttgtcctgctgctagc

SEQ ID NO: 1804769 - DNA, 25 bp, Homo sapien
tattgtcctgtgtacttttctgaga

SEQ ID NO: 1804770 - DNA, 25 bp, Homo sapien
attgtcctgtgtacttttctgagac

SEQ ID NO: 1804771 - DNA, 25 bp, Homo sapien
tgtgtagccctctacctctgaagga

SEQ ID NO: 1804772 - DNA, 25 bp, Homo sapien
ttgtgtagccctctacctctgaagg

SEQ ID NO: 1804773 - DNA, 25 bp, Homo sapien
cagttgtgtagccctctacctctga

SEQ ID NO: 1804774 - DNA, 25 bp, Homo sapien
gttgtgtagccctctacctctgaag

SEQ ID NO: 1804775 - DNA, 25 bp, Homo sapien
tgctgcccttgcttaccctgtagag

SEQ ID NO: 1804776 - DNA, 25 bp, Homo sapien
gatggagcccaactattccattgtc

SEQ ID NO: 1804777 - DNA, 25 bp, Homo sapien
cctgtagaggttctttagcatcacg

SEQ ID NO: 1804778 - DNA, 25 bp, Homo sapien
tatggaaacctctcatactcctgtt

SEQ ID NO: 1804779 - DNA, 25 bp, Homo sapien
tacggtgctctccattacccagaca

SEQ ID NO: 1804780 - DNA, 25 bp, Homo sapien
tagctgtaacatagactgaaattgg

SEQ ID NO: 1804781 - DNA, 25 bp, Homo sapien
aaattgtaaagtgtggatacggtgc

SEQ ID NO: 1804782 - DNA, 25 bp, Homo sapien
gaggaggtatcgttgtagctgtaac

SEQ ID NO: 1804783 - DNA, 25 bp, Homo sapien
tgtaaggccttgcatctaagaatga

SEQ ID NO: 1804784 - DNA, 25 bp, Homo sapien
actggaataagggtcagtctaggac

SEQ ID NO: 1804785 - DNA, 25 bp, Homo sapien
ccataggagacttacaaagatgaca

SEQ ID NO: 1804786 - DNA, 25 bp, Homo sapien
tcacgttgttggttgttaggcagaa

SEQ ID NO: 1804787 - DNA, 25 bp, Homo sapien
gtgcttcagggagacctacggtgct

SEQ ID NO: 1804788 - DNA, 25 bp, Homo sapien
ccagatattgccaaccataggaatt

SEQ ID NO: 1804789 - DNA, 25 bp, Homo sapien
tgcagagatcttccagatattgcca

SEQ ID NO: 1804790 - DNA, 25 bp, Homo sapien
taggaattcactgggagtgcttcag

SEQ ID NO: 1804791 - DNA, 25 bp, Homo sapien
tgacaacctgccgtaatctgccttt

SEQ ID NO: 1804792 - DNA, 25 bp, Homo sapien
gttctttgtgacaacctgccgtaat

SEQ ID NO: 1804793 - DNA, 25 bp, Homo sapien
ttgtgacaacctgccgtaatctgcc

SEQ ID NO: 1804794 - DNA, 25 bp, Homo sapien
aacctgccgtaatctgccttttctg

SEQ ID NO: 1804795 - DNA, 25 bp, Homo sapien
ctgcttcacaggagacttccgaaga

SEQ ID NO: 1804796 - DNA, 25 bp, Homo sapien
cacaggagacttccgaagacagaga

SEQ ID NO: 1804797 - DNA, 25 bp, Homo sapien
ttcacaggagacttccgaagacaga

SEQ ID NO: 1804798 - DNA, 25 bp, Homo sapien
caggagacttccgaagacagagaca

SEQ ID NO: 1804799 - DNA, 25 bp, Homo sapien
cctctgctgtggcacttccaagtac

SEQ ID NO: 1804800 - DNA, 25 bp, Homo sapien
gctgtggcacttccaagtacatctg

SEQ ID NO: 1804801 - DNA, 25 bp, Homo sapien
ttccaagtacatctgttcctatggg

SEQ ID NO: 1804802 - DNA, 25 bp, Homo sapien
gcacttccaagtacatctgttccta

SEQ ID NO: 1804803 - DNA, 25 bp, Homo sapien
ttatctaacagaattttctgctatc

SEQ ID NO: 1804804 - DNA, 25 bp, Homo sapien
cttgggtgtgagagtgattccctgt

SEQ ID NO: 1804805 - DNA, 25 bp, Homo sapien
ccttgccagcgagttcctgtgacat

SEQ ID NO: 1804806 - DNA, 25 bp, Homo sapien
tccgcaatgcttggctcgggaggaa

SEQ ID NO: 1804807 - DNA, 25 bp, Homo sapien
acgccctttgtgctgctccgcaatg

SEQ ID NO: 1804808 - DNA, 25 bp, Homo sapien
aaataatacatgagcacttagcagt

SEQ ID NO: 1804809 - DNA, 25 bp, Homo sapien
ctctaatctgtccccaggaagcatc

SEQ ID NO: 1804810 - DNA, 25 bp, Homo sapien
aataatacatgagcacttagcagtg

SEQ ID NO: 1804811 - DNA, 25 bp, Homo sapien
taatacatgagcacttagcagtgtc

SEQ ID NO: 1804812 - DNA, 25 bp, Homo sapien
ctttgttgcctgaggatttgggtcg

SEQ ID NO: 1804813 - DNA, 25 bp, Homo sapien
ggtgctgctttgttgcctgaggatt

SEQ ID NO: 1804814 - DNA, 25 bp, Homo sapien
agggtgctgctttgttgcctgagga

SEQ ID NO: 1804815 - DNA, 25 bp, Homo sapien
ctgctttgttgcctgaggatttggg

SEQ ID NO: 1804816 - DNA, 25 bp, Homo sapien
gcggagaagggacccatagtaagaa

SEQ ID NO: 1804817 - DNA, 25 bp, Homo sapien
taacatgctgctgtacaattaccca

SEQ ID NO: 1804818 - DNA, 25 bp, Homo sapien
acaattacccaatttgttggcatca

SEQ ID NO: 1804819 - DNA, 25 bp, Homo sapien
gaagaaacataataacatgctgctg

SEQ ID NO: 1804820 - DNA, 25 bp, Homo sapien
gccaatcatgcccttctaatgtttc

SEQ ID NO: 1804821 - DNA, 25 bp, Homo sapien
aatcatgcccttctaatgtttccac

SEQ ID NO: 1804822 - DNA, 25 bp, Homo sapien
ctgccaatcatgcccttctaatgtt

SEQ ID NO: 1804823 - DNA, 25 bp, Homo sapien
atgcccttctaatgtttccacttca

SEQ ID NO: 1804824 - DNA, 25 bp, Homo sapien
caaaacgacatggaatctgtaatcc

SEQ ID NO: 1804825 - DNA, 25 bp, Homo sapien
tgttccctggctgcaaaacgacatg

SEQ ID NO: 1804826 - DNA, 25 bp, Homo sapien
gacttccgtcaaatctctagccaaa

SEQ ID NO: 1804827 - DNA, 25 bp, Homo sapien
ctgacttccgtcaaatctctagcca

SEQ ID NO: 1804828 - DNA, 25 bp, Homo sapien
ttgcacagtggctgcgtgtacagca

SEQ ID NO: 1804829 - DNA, 25 bp, Homo sapien
tacagcaggaataccctgtatagct

SEQ ID NO: 1804830 - DNA, 25 bp, Homo sapien
cagtgccaaggagagtagggtcatc

SEQ ID NO: 1804831 - DNA, 25 bp, Homo sapien
ggatgacttcggctcctcagtgcca

SEQ ID NO: 1804832 - DNA, 25 bp, Homo sapien
gggagccgatctgtaggctggccat

SEQ ID NO: 1804833 - DNA, 25 bp, Homo sapien
tcagggagccgatctgtaggctggc

SEQ ID NO: 1804834 - DNA, 25 bp, Homo sapien
catcagggagccgatctgtaggctg

SEQ ID NO: 1804835 - DNA, 25 bp, Homo sapien
tccatggccatggcatgacatcagg

SEQ ID NO: 1804836 - DNA, 25 bp, Homo sapien
tggttgaccaaggtagatggtctca

SEQ ID NO: 1804837 - DNA, 25 bp, Homo sapien
tgtcctcttactctcccgattagca

SEQ ID NO: 1804838 - DNA, 25 bp, Homo sapien
tgctaatctccgtgctgtcctctta

SEQ ID NO: 1804839 - DNA, 25 bp, Homo sapien
gctttgggttgctaatctccgtgct

SEQ ID NO: 1804840 - DNA, 25 bp, Homo sapien
tctcccttggattggaatgactggt

SEQ ID NO: 1804841 - DNA, 25 bp, Homo sapien
ggaattcaacctctctgccggcatg

SEQ ID NO: 1804842 - DNA, 25 bp, Homo sapien
tgactggttcacctcggaattcaac

SEQ ID NO: 1804843 - DNA, 25 bp, Homo sapien
taaagcttccaaacgctgtctccct

SEQ ID NO: 1804844 - DNA, 25 bp, Homo sapien
ttttccttatctggaccacggcggc

SEQ ID NO: 1804845 - DNA, 25 bp, Homo sapien
ggacacagtgggcttatccagaaat

SEQ ID NO: 1804846 - DNA, 25 bp, Homo sapien
ggatcctgctctaagtctggctgaa

SEQ ID NO: 1804847 - DNA, 25 bp, Homo sapien
ggaagaacggttcgcctgcggatcc

SEQ ID NO: 1804848 - DNA, 25 bp, Homo sapien
tactaaaagtatcacttagagagga

SEQ ID NO: 1804849 - DNA, 25 bp, Homo sapien
ccttggaggtagctgtaaattgctt

SEQ ID NO: 1804850 - DNA, 25 bp, Homo sapien
taatgagggtataagtgaatgtaat

SEQ ID NO: 1804851 - DNA, 25 bp, Homo sapien
taaggacagcttatacacaatagaa

SEQ ID NO: 1804852 - DNA, 25 bp, Homo sapien
tgagccaagacctgattcagacaag

SEQ ID NO: 1804853 - DNA, 25 bp, Homo sapien
agttacaacattccattgagccaag

SEQ ID NO: 1804854 - DNA, 25 bp, Homo sapien
atagaagttcaagccagttacaaca

SEQ ID NO: 1804855 - DNA, 25 bp, Homo sapien
tctccactgcatagacatgtaaggt

SEQ ID NO: 1804856 - DNA, 25 bp, Homo sapien
cacaccctcgcagatgattctagct

SEQ ID NO: 1804857 - DNA, 25 bp, Homo sapien
ttcatgagtgtgcaggaaccgtgca

SEQ ID NO: 1804858 - DNA, 25 bp, Homo sapien
gctgcagtggtctgctgacaggagc

SEQ ID NO: 1804859 - DNA, 25 bp, Homo sapien
tccatctgccctcctaatgggtgtt

SEQ ID NO: 1804860 - DNA, 25 bp, Homo sapien
cagccttttgttgaggaagagcaat

SEQ ID NO: 1804861 - DNA, 25 bp, Homo sapien
tgaggaagagcaatttttccctgtc

SEQ ID NO: 1804862 - DNA, 25 bp, Homo sapien
gaggaagagcaatttttccctgtcc

SEQ ID NO: 1804863 - DNA, 25 bp, Homo sapien
tgttgaggaagagcaatttttccct

SEQ ID NO: 1804864 - DNA, 25 bp, Homo sapien
aagatggcagcaggacaacctttta

SEQ ID NO: 1804865 - DNA, 25 bp, Homo sapien
catgggctgtctgtatccgaatctc

SEQ ID NO: 1804866 - DNA, 25 bp, Homo sapien
ccatgggctgtctgtatccgaatct

SEQ ID NO: 1804867 - DNA, 25 bp, Homo sapien
gccatgggctgtctgtatccgaatc

SEQ ID NO: 1804868 - DNA, 25 bp, Homo sapien
aaaacacatctggttggaagtcacc

SEQ ID NO: 1804869 - DNA, 25 bp, Homo sapien
caggaagaacttcttggatgaattg

SEQ ID NO: 1804870 - DNA, 25 bp, Homo sapien
aacttcttggatgaattgagttgag

SEQ ID NO: 1804871 - DNA, 25 bp, Homo sapien
tctggttggaagtcaccaggaagaa

SEQ ID NO: 1804872 - DNA, 25 bp, Homo sapien
gaatttctccaaggttcagtaacat

SEQ ID NO: 1804873 - DNA, 25 bp, Homo sapien
acgtaataagtgtgaacgatgctct

SEQ ID NO: 1804874 - DNA, 25 bp, Homo sapien
taggcccctgcaacgtaataagtgt

SEQ ID NO: 1804875 - DNA, 25 bp, Homo sapien
cattgtccctggaaataggcccctg

SEQ ID NO: 1804876 - DNA, 25 bp, Homo sapien
tgccaatctgacattcatgcctgag

SEQ ID NO: 1804877 - DNA, 25 bp, Homo sapien
gccaatctgacattcatgcctgaga

SEQ ID NO: 1804878 - DNA, 25 bp, Homo sapien
ctgccaatctgacattcatgcctga

SEQ ID NO: 1804879 - DNA, 25 bp, Homo sapien
tgtcaggttcaactccagccatggt

SEQ ID NO: 1804880 - DNA, 25 bp, Homo sapien
tcccagtggaggtcgattctgacac

SEQ ID NO: 1804881 - DNA, 25 bp, Homo sapien
gttccggctgaccagttgcgtgtga

SEQ ID NO: 1804882 - DNA, 25 bp, Homo sapien
tcttccagctcaaggaggtggttgc

SEQ ID NO: 1804883 - DNA, 25 bp, Homo sapien
gggtatcacgtttgctgatcttctc

SEQ ID NO: 1804884 - DNA, 25 bp, Homo sapien
agaccgagcttgcacatcattctga

SEQ ID NO: 1804885 - DNA, 25 bp, Homo sapien
gaaccaggcaagaccgagcttgcac

SEQ ID NO: 1804886 - DNA, 25 bp, Homo sapien
tctcttgttcatgaggttgaaccag

SEQ ID NO: 1804887 - DNA, 25 bp, Homo sapien
catgaatgatgacgatagaatcgta

SEQ ID NO: 1804888 - DNA, 25 bp, Homo sapien
gacgatagaatcgtaattattatta

SEQ ID NO: 1804889 - DNA, 25 bp, Homo sapien
cctccacatgaatgatgacgataga

SEQ ID NO: 1804890 - DNA, 25 bp, Homo sapien
gcatgcacctccacatgaatgatga

SEQ ID NO: 1804891 - DNA, 25 bp, Homo sapien
ggagaactctaggtgttcaggcttc

SEQ ID NO: 1804892 - DNA, 25 bp, Homo sapien
ttatgtacacgatgaggagaactct

SEQ ID NO: 1804893 - DNA, 25 bp, Homo sapien
tctaggtgttcaggcttcttgtggg

SEQ ID NO: 1804894 - DNA, 25 bp, Homo sapien
tgggtggttaacaattcgaaagcac

SEQ ID NO: 1804895 - DNA, 25 bp, Homo sapien
gactggcaaaatgaccctgtgtagc

SEQ ID NO: 1804896 - DNA, 25 bp, Homo sapien
gccaatggaaactcgtgcatcagtg

SEQ ID NO: 1804897 - DNA, 25 bp, Homo sapien
cagtgtgtaagtcccacgcgtggaa

SEQ ID NO: 1804898 - DNA, 25 bp, Homo sapien
tgtagcaactgcataactcgactct

SEQ ID NO: 1804899 - DNA, 25 bp, Homo sapien
taaaggatcctagtgttgccaaaca

SEQ ID NO: 1804900 - DNA, 25 bp, Homo sapien
gaggctgacaaacagtaaaggatcc

SEQ ID NO: 1804901 - DNA, 25 bp, Homo sapien
gaaaaacagttgcagaagccgggaa

SEQ ID NO: 1804902 - DNA, 25 bp, Homo sapien
gataaccatgttcgccctgtgctct

SEQ ID NO: 1804903 - DNA, 25 bp, Homo sapien
cactgtgatgcgcttaagggcatga

SEQ ID NO: 1804904 - DNA, 25 bp, Homo sapien
aaggcacctgtgatgtgctcttgcc

SEQ ID NO: 1804905 - DNA, 25 bp, Homo sapien
tctcctcggccccttaagtccactg

SEQ ID NO: 1804906 - DNA, 25 bp, Homo sapien
gctatttgctccttgaactttccta

SEQ ID NO: 1804907 - DNA, 25 bp, Homo sapien
tcttagcaaaccccattttccattc

SEQ ID NO: 1804908 - DNA, 25 bp, Homo sapien
ccattttccattctccagtgccaac

SEQ ID NO: 1804909 - DNA, 25 bp, Homo sapien
accccattttccattctccagtgcc

SEQ ID NO: 1804910 - DNA, 25 bp, Homo sapien
aaaccccattttccattctccagtg

SEQ ID NO: 1804911 - DNA, 25 bp, Homo sapien
tttctgggctgacctaaatcactgt

SEQ ID NO: 1804912 - DNA, 25 bp, Homo sapien
cctttctgggctgacctaaatcact

SEQ ID NO: 1804913 - DNA, 25 bp, Homo sapien
ctttctgggctgacctaaatcactg

SEQ ID NO: 1804914 - DNA, 25 bp, Homo sapien
gcagattccaagctgtaatgttaca

SEQ ID NO: 1804915 - DNA, 25 bp, Homo sapien
tagaggtgtcggtgttgggtgccga

SEQ ID NO: 1804916 - DNA, 25 bp, Homo sapien
ctatttagtgaacgtagaggtgtcg

SEQ ID NO: 1804917 - DNA, 25 bp, Homo sapien
ttgggtgccgactgttgttttggca

SEQ ID NO: 1804918 - DNA, 25 bp, Homo sapien
taactgctttggaccactctggttt

SEQ ID NO: 1804919 - DNA, 25 bp, Homo sapien
ttatctaactgctttggaccactct

SEQ ID NO: 1804920 - DNA, 25 bp, Homo sapien
tctaactgctttggaccactctggt

SEQ ID NO: 1804921 - DNA, 25 bp, Homo sapien
ctgctttggaccactctggttttgg

SEQ ID NO: 1804922 - DNA, 25 bp, Homo sapien
gtttatgtccagttaccttctccag

SEQ ID NO: 1804923 - DNA, 25 bp, Homo sapien
ctgtgcccagcgaggttaattttca

SEQ ID NO: 1804924 - DNA, 25 bp, Homo sapien
gaaaagctatcacttggcttcccgc

SEQ ID NO: 1804925 - DNA, 25 bp, Homo sapien
gaggacagttttactacctgatgcc

SEQ ID NO: 1804926 - DNA, 25 bp, Homo sapien
gtaagaaacaccctccactgctaag

SEQ ID NO: 1804927 - DNA, 25 bp, Homo sapien
gggtaagaaacaccctccactgcta

SEQ ID NO: 1804928 - DNA, 25 bp, Homo sapien
cctccactgctaagtttccgcagga

SEQ ID NO: 1804929 - DNA, 25 bp, Homo sapien
actgctaagtttccgcaggaacaag

SEQ ID NO: 1804930 - DNA, 25 bp, Homo sapien
gcattcgcgtctccagcgacagctg

SEQ ID NO: 1804931 - DNA, 25 bp, Homo sapien
taacaaaatgaagcattcgcgtctc

SEQ ID NO: 1804932 - DNA, 25 bp, Homo sapien
agcccttgctgtgttaacctccacg

SEQ ID NO: 1804933 - DNA, 25 bp, Homo sapien
tgctgtgttaacctccacgggagtc

SEQ ID NO: 1804934 - DNA, 25 bp, Homo sapien
cttgtcataaggtagaggtggtgcc

SEQ ID NO: 1804935 - DNA, 25 bp, Homo sapien
ttgtcataaggtagaggtggtgcct

SEQ ID NO: 1804936 - DNA, 25 bp, Homo sapien
acttgtcataaggtagaggtggtgc

SEQ ID NO: 1804937 - DNA, 25 bp, Homo sapien
tgtcataaggtagaggtggtgcctt

SEQ ID NO: 1804938 - DNA, 25 bp, Homo sapien
caaactggagccttattggagatgt

SEQ ID NO: 1804939 - DNA, 25 bp, Homo sapien
tggagccttattggagatgttcaca

SEQ ID NO: 1804940 - DNA, 25 bp, Homo sapien
cttccaaactggagccttattggag

SEQ ID NO: 1804941 - DNA, 25 bp, Homo sapien
cttctgtgctggcaacatcggggtt

SEQ ID NO: 1804942 - DNA, 25 bp, Homo sapien
gctgctgctgcccatagaggtggac

SEQ ID NO: 1804943 - DNA, 25 bp, Homo sapien
ctgctgctgcccatagaggtggaca

SEQ ID NO: 1804944 - DNA, 25 bp, Homo sapien
tgctgctgcccatagaggtggacac

SEQ ID NO: 1804945 - DNA, 25 bp, Homo sapien
ccacaacggcggtgatgcctcccat

SEQ ID NO: 1804946 - DNA, 25 bp, Homo sapien
ctggttgaccacaacggcggtgatg

SEQ ID NO: 1804947 - DNA, 25 bp, Homo sapien
ttgaccacaacggcggtgatgcctc

SEQ ID NO: 1804948 - DNA, 25 bp, Homo sapien
ggttgaccacaacggcggtgatgcc

SEQ ID NO: 1804949 - DNA, 25 bp, Homo sapien
cagagtgtccggctgccccctaggg

SEQ ID NO: 1804950 - DNA, 25 bp, Homo sapien
tccggctgccccctagggttgttga

SEQ ID NO: 1804951 - DNA, 25 bp, Homo sapien
ctcctggaccagagtgtccggctgc

SEQ ID NO: 1804952 - DNA, 25 bp, Homo sapien
cggctgccccctagggttgttgatg

SEQ ID NO: 1804953 - DNA, 25 bp, Homo sapien
tcgtcagccagcccttccagctgag

SEQ ID NO: 1804954 - DNA, 25 bp, Homo sapien
cgtcagccagcccttccagctgaga

SEQ ID NO: 1804955 - DNA, 25 bp, Homo sapien
agctccaaggtctcctcttcataca

SEQ ID NO: 1804956 - DNA, 25 bp, Homo sapien
tgggactgcagctccaaggtctcct

SEQ ID NO: 1804957 - DNA, 25 bp, Homo sapien
tgctgtccatgtccaggaagtggct

SEQ ID NO: 1804958 - DNA, 25 bp, Homo sapien
tacgccttgacctcagcaatgatgc

SEQ ID NO: 1804959 - DNA, 25 bp, Homo sapien
tgtccatgtccaggaagtggctgtt

SEQ ID NO: 1804960 - DNA, 25 bp, Homo sapien
gatgctgtccatgtccaggaagtgg

SEQ ID NO: 1804961 - DNA, 25 bp, Homo sapien
gatctcagtctttgcatctgcagct

SEQ ID NO: 1804962 - DNA, 25 bp, Homo sapien
agatctcagtctttgcatctgcagc

SEQ ID NO: 1804963 - DNA, 25 bp, Homo sapien
ctgaggttgggtgatctcctcatac

SEQ ID NO: 1804964 - DNA, 25 bp, Homo sapien
cctcagcccggctgaggttgggtga

SEQ ID NO: 1804965 - DNA, 25 bp, Homo sapien
ctctggcttttgaggccctcagtct

SEQ ID NO: 1804966 - DNA, 25 bp, Homo sapien
cttgacatctgcgatggtggcctcc

SEQ ID NO: 1804967 - DNA, 25 bp, Homo sapien
ctgcttgacatctgcgatggtggcc

SEQ ID NO: 1804968 - DNA, 25 bp, Homo sapien
ggcttttgaggccctcagtctcagc

SEQ ID NO: 1804969 - DNA, 25 bp, Homo sapien
tcatgttcttcagcttctggtactc

SEQ ID NO: 1804970 - DNA, 25 bp, Homo sapien
tcctgcatggcctgttgcagggcag

SEQ ID NO: 1804971 - DNA, 25 bp, Homo sapien
tgcatggcctgttgcagggcagcct

SEQ ID NO: 1804972 - DNA, 25 bp, Homo sapien
tcttcagcttctggtactcatgcag

SEQ ID NO: 1804973 - DNA, 25 bp, Homo sapien
aagctcagaccatctgcataggcgc

SEQ ID NO: 1804974 - DNA, 25 bp, Homo sapien
gagcccatgtcagagccaaagctgg

SEQ ID NO: 1804975 - DNA, 25 bp, Homo sapien
gccaagctcagaccatctgcatagg

SEQ ID NO: 1804976 - DNA, 25 bp, Homo sapien
tcccatcgcaggtcttgatcttctt

SEQ ID NO: 1804977 - DNA, 25 bp, Homo sapien
tgagtcagcagagggaactgcatgt

SEQ ID NO: 1804978 - DNA, 25 bp, Homo sapien
catttttgtgatgctctagccttcc

SEQ ID NO: 1804979 - DNA, 25 bp, Homo sapien
caatggtacataggtgagagagaac

SEQ ID NO: 1804980 - DNA, 25 bp, Homo sapien
tagacaggaaactggaaatcaggat

SEQ ID NO: 1804981 - DNA, 25 bp, Homo sapien
acattttagtggtttctcacagata

SEQ ID NO: 1804982 - DNA, 25 bp, Homo sapien
tataaagacatatttctgacaatca

SEQ ID NO: 1804983 - DNA, 25 bp, Homo sapien
cacagatagcattagcagagtacat

SEQ ID NO: 1804984 - DNA, 25 bp, Homo sapien
gacatatttctgacaatcatagcag

SEQ ID NO: 1804985 - DNA, 25 bp, Homo sapien
gacctcagctttcatccggtccaca

SEQ ID NO: 1804986 - DNA, 25 bp, Homo sapien
tcagctggagcataacagtacaaga

SEQ ID NO: 1804987 - DNA, 25 bp, Homo sapien
gtacaagattgatgagccatggtgc

SEQ ID NO: 1804988 - DNA, 25 bp, Homo sapien
cataacagtacaagattgatgagcc

SEQ ID NO: 1804989 - DNA, 25 bp, Homo sapien
cccttgcctctatccttaaatttgg

SEQ ID NO: 1804990 - DNA, 25 bp, Homo sapien
gcctctatccttaaatttggagcca

SEQ ID NO: 1804991 - DNA, 25 bp, Homo sapien
cttgcctctatccttaaatttggag

SEQ ID NO: 1804992 - DNA, 25 bp, Homo sapien
ctgtcccttgcctctatccttaaat

SEQ ID NO: 1804993 - DNA, 25 bp, Homo sapien
taattctgtttcgtatataattgct

SEQ ID NO: 1804994 - DNA, 25 bp, Homo sapien
ctgacatcgtatccagcagcacttg

SEQ ID NO: 1804995 - DNA, 25 bp, Homo sapien
gagttaatgctttagctgacatcgt

SEQ ID NO: 1804996 - DNA, 25 bp, Homo sapien
cttggtctggttgtcatcatttcgc

SEQ ID NO: 1804997 - DNA, 25 bp, Homo sapien
tgaaaagtgttcgtgagcctctgct

SEQ ID NO: 1804998 - DNA, 25 bp, Homo sapien
ggtatccatcctcgcagtgttaagg

SEQ ID NO: 1804999 - DNA, 25 bp, Homo sapien
taacagtttaatcagcttccgcagg

SEQ ID NO: 1805000 - DNA, 25 bp, Homo sapien
ggtctggcagatctcccttaaatgg

SEQ ID NO: 1805001 - DNA, 25 bp, Homo sapien
ggctgataaatagtggggtttcaaa

SEQ ID NO: 1805002 - DNA, 25 bp, Homo sapien
ctgataaatagtggggtttcaaatc

SEQ ID NO: 1805003 - DNA, 25 bp, Homo sapien
tttgtgacaatcttgtcctggggtt

SEQ ID NO: 1805004 - DNA, 25 bp, Homo sapien
cctggggttttactgtcagaggtga

SEQ ID NO: 1805005 - DNA, 25 bp, Homo sapien
cttaccctcaaccaactgtccttgt

SEQ ID NO: 1805006 - DNA, 25 bp, Homo sapien
aactgtccttgtttcctctgcgtct

SEQ ID NO: 1805007 - DNA, 25 bp, Homo sapien
gtccttgtttcctctgcgtcttcat

SEQ ID NO: 1805008 - DNA, 25 bp, Homo sapien
tcaactctaccttaccctcaaccaa

SEQ ID NO: 1805009 - DNA, 25 bp, Homo sapien
tcctaatgctgttggaacatatgat

SEQ ID NO: 1805010 - DNA, 25 bp, Homo sapien
catctggtacacattgaatgctcaa

SEQ ID NO: 1805011 - DNA, 25 bp, Homo sapien
gggatactgatacctacttattggt

SEQ ID NO: 1805012 - DNA, 25 bp, Homo sapien
cctgactatggattagggatactga

SEQ ID NO: 1805013 - DNA, 25 bp, Homo sapien
tcctggcccagtaggattttacact

SEQ ID NO: 1805014 - DNA, 25 bp, Homo sapien
tacttgtgcagaccatcgtgcacag

SEQ ID NO: 1805015 - DNA, 25 bp, Homo sapien
cagttgacgcatgtgatgaatcagt

SEQ ID NO: 1805016 - DNA, 25 bp, Homo sapien
cactgcagctaggtagtttatccaa

SEQ ID NO: 1805017 - DNA, 25 bp, Homo sapien
tctgttgctttgggtgttgtaaaac

SEQ ID NO: 1805018 - DNA, 25 bp, Homo sapien
tttctgttgctttgggtgttgtaaa

SEQ ID NO: 1805019 - DNA, 25 bp, Homo sapien
ggcctgtaccagcattatgaaccat

SEQ ID NO: 1805020 - DNA, 25 bp, Homo sapien
gcctggtgactttgctataagcttc

SEQ ID NO: 1805021 - DNA, 25 bp, Homo sapien
ggagttcagaacctgtggaaaggcc

SEQ ID NO: 1805022 - DNA, 25 bp, Homo sapien
taagcttcaggctagagtttatacc

SEQ ID NO: 1805023 - DNA, 25 bp, Homo sapien
tgtagtcagtggcagtgtcatttga

SEQ ID NO: 1805024 - DNA, 25 bp, Homo sapien
gtcagtggcagtgtcatttgagaga

SEQ ID NO: 1805025 - DNA, 25 bp, Homo sapien
tcgatgaagatgtacatcaaaatgt

SEQ ID NO: 1805026 - DNA, 25 bp, Homo sapien
catcaaaatgtagtcagtggcagtg

SEQ ID NO: 1805027 - DNA, 25 bp, Homo sapien
aggaaatgccatatggtattacagt

SEQ ID NO: 1805028 - DNA, 25 bp, Homo sapien
gtatatctatctcacagtgccaaag

SEQ ID NO: 1805029 - DNA, 25 bp, Homo sapien
cagttaatgatgacccaagtgtggc

SEQ ID NO: 1805030 - DNA, 25 bp, Homo sapien
tttgtaattattggtttgcagctca

SEQ ID NO: 1805031 - DNA, 25 bp, Homo sapien
caggttgccccgtttcaggtttcag

SEQ ID NO: 1805032 - DNA, 25 bp, Homo sapien
tggcattctcttctagccatagccc

SEQ ID NO: 1805033 - DNA, 25 bp, Homo sapien
ttttccccgtctctggcattctctt

SEQ ID NO: 1805034 - DNA, 25 bp, Homo sapien
cgtctctggcattctcttctagcca

SEQ ID NO: 1805035 - DNA, 25 bp, Homo sapien
cagtttttccccgtctctggcattc

SEQ ID NO: 1805036 - DNA, 25 bp, Homo sapien
tttgtgaccatgttctgcaggcaga

SEQ ID NO: 1805037 - DNA, 25 bp, Homo sapien
cagtagcgccagcatagataaagag

SEQ ID NO: 1805038 - DNA, 25 bp, Homo sapien
tgaagtatttgtcccctacgaaagc

SEQ ID NO: 1805039 - DNA, 25 bp, Homo sapien
cattccagtgaagggtctgaatgcc

SEQ ID NO: 1805040 - DNA, 25 bp, Homo sapien
tttctggctgaggtacaagagcttg

SEQ ID NO: 1805041 - DNA, 25 bp, Homo sapien
cagcattctttctggctgaggtaca

SEQ ID NO: 1805042 - DNA, 25 bp, Homo sapien
cattctttctggctgaggtacaaga

SEQ ID NO: 1805043 - DNA, 25 bp, Homo sapien
ttctttctggctgaggtacaagagc

SEQ ID NO: 1805044 - DNA, 25 bp, Homo sapien
gggaacattgagtacatctctattc

SEQ ID NO: 1805045 - DNA, 25 bp, Homo sapien
ttgagtacatctctattctatgcat

SEQ ID NO: 1805046 - DNA, 25 bp, Homo sapien
tacttcagggaacattgagtacatc

SEQ ID NO: 1805047 - DNA, 25 bp, Homo sapien
cttcagggaacattgagtacatctc

SEQ ID NO: 1805048 - DNA, 25 bp, Homo sapien
tattgaatgcacacgttaatgatgg

SEQ ID NO: 1805049 - DNA, 25 bp, Homo sapien
tgtttataatattgaatgcacacgt

SEQ ID NO: 1805050 - DNA, 25 bp, Homo sapien
cctctattgcatgcaaagcagaggt

SEQ ID NO: 1805051 - DNA, 25 bp, Homo sapien
taatgatgggcgaagagagacacac

SEQ ID NO: 1805052 - DNA, 25 bp, Homo sapien
tgatgccctctgagtaatgcccctg

SEQ ID NO: 1805053 - DNA, 25 bp, Homo sapien
cctatagtagttggagctctttaac

SEQ ID NO: 1805054 - DNA, 25 bp, Homo sapien
tgtttatctgcccatcgctgttaac

SEQ ID NO: 1805055 - DNA, 25 bp, Homo sapien
tcacaaattcataagaggcttcttc

SEQ ID NO: 1805056 - DNA, 25 bp, Homo sapien
cattaagacattaggatgcttcatg

SEQ ID NO: 1805057 - DNA, 25 bp, Homo sapien
cctggagacttgttttcaatcatta

SEQ ID NO: 1805058 - DNA, 25 bp, Homo sapien
tcacccagagggtctacgtgtattg

SEQ ID NO: 1805059 - DNA, 25 bp, Homo sapien
cgtgtattgaggaggaccataaagg

SEQ ID NO: 1805060 - DNA, 25 bp, Homo sapien
ctactcctcatatttagctctgctt

SEQ ID NO: 1805061 - DNA, 25 bp, Homo sapien
gcttctgaaggcctcgcattctgct

SEQ ID NO: 1805062 - DNA, 25 bp, Homo sapien
ctggattgccacagttatcactgct

SEQ ID NO: 1805063 - DNA, 25 bp, Homo sapien
ggcctcgcattctgctggattgcca

SEQ ID NO: 1805064 - DNA, 25 bp, Homo sapien
cctaagtgagctttgtgactgaagc

SEQ ID NO: 1805065 - DNA, 25 bp, Homo sapien
tgagttccatgcagtgcgcctgttg

SEQ ID NO: 1805066 - DNA, 25 bp, Homo sapien
tgacatataacaatttcctccagaa

SEQ ID NO: 1805067 - DNA, 25 bp, Homo sapien
gaggctaaaatagcagatgaagcta

SEQ ID NO: 1805068 - DNA, 25 bp, Homo sapien
ggttcaggacccatcgagacccact

SEQ ID NO: 1805069 - DNA, 25 bp, Homo sapien
taaactctaatggaaggcacctggt

SEQ ID NO: 1805070 - DNA, 25 bp, Homo sapien
gggctctttcaggaaaccgcagcaa

SEQ ID NO: 1805071 - DNA, 25 bp, Homo sapien
cactggccggttgtggtgcggttca

SEQ ID NO: 1805072 - DNA, 25 bp, Homo sapien
taagcctcccggttgctaagcgact

SEQ ID NO: 1805073 - DNA, 25 bp, Homo sapien
gtagaaattcaacccctcgtagtgc

SEQ ID NO: 1805074 - DNA, 25 bp, Homo sapien
ccggtgacgtaagattgctgggcct

SEQ ID NO: 1805075 - DNA, 25 bp, Homo sapien
gaggatttaacccaggagagccgct

SEQ ID NO: 1805076 - DNA, 25 bp, Homo sapien
atcagtgggctttacggatgtgagc

SEQ ID NO: 1805077 - DNA, 25 bp, Homo sapien
tcagtgggctttacggatgtgagca

SEQ ID NO: 1805078 - DNA, 25 bp, Homo sapien
agaatcagtgggctttacggatgtg

SEQ ID NO: 1805079 - DNA, 25 bp, Homo sapien
aaaagtgtagtaaaagaatcagtgg

SEQ ID NO: 1805080 - DNA, 25 bp, Homo sapien
atttgtttaagctcagggtctcttt

SEQ ID NO: 1805081 - DNA, 25 bp, Homo sapien
tttaagctcagggtctctttttctg

SEQ ID NO: 1805082 - DNA, 25 bp, Homo sapien
gtctgggcatttgtttaagctcagg

SEQ ID NO: 1805083 - DNA, 25 bp, Homo sapien
cttgtctgggcatttgtttaagctc

SEQ ID NO: 1805084 - DNA, 25 bp, Homo sapien
agtgaggctggtgcaccgggagcgg

SEQ ID NO: 1805085 - DNA, 25 bp, Homo sapien
gagcggctgttgtgccagcagcttg

SEQ ID NO: 1805086 - DNA, 25 bp, Homo sapien
catcatggctttgactgtgaaaccc

SEQ ID NO: 1805087 - DNA, 25 bp, Homo sapien
tttcatcatggctttgactgtgaaa

SEQ ID NO: 1805088 - DNA, 25 bp, Homo sapien
tcagagcgagtgcatttaattcagg

SEQ ID NO: 1805089 - DNA, 25 bp, Homo sapien
ctgattcagagcgagtgcatttaat

SEQ ID NO: 1805090 - DNA, 25 bp, Homo sapien
cccctgattcagagcgagtgcattt

SEQ ID NO: 1805091 - DNA, 25 bp, Homo sapien
gattcagagcgagtgcatttaattc

SEQ ID NO: 1805092 - DNA, 25 bp, Homo sapien
caggcaaggtccgggaagtcaaaag

SEQ ID NO: 1805093 - DNA, 25 bp, Homo sapien
gatacttctgatttgtgtgaggcaa

SEQ ID NO: 1805094 - DNA, 25 bp, Homo sapien
ggatacttctgatttgtgtgaggca

SEQ ID NO: 1805095 - DNA, 25 bp, Homo sapien
acttctgatttgtgtgaggcaagtc

SEQ ID NO: 1805096 - DNA, 25 bp, Homo sapien
ctggatacttctgatttgtgtgagg

SEQ ID NO: 1805097 - DNA, 25 bp, Homo sapien
aatgctggcagtctcaaatatatcc

SEQ ID NO: 1805098 - DNA, 25 bp, Homo sapien
atgctggcagtctcaaatatatcct

SEQ ID NO: 1805099 - DNA, 25 bp, Homo sapien
gcgattttgtttcctttcgaatcat

SEQ ID NO: 1805100 - DNA, 25 bp, Homo sapien
agtcacctcgctcatagaattttcg

SEQ ID NO: 1805101 - DNA, 25 bp, Homo sapien
gaattttcgaaatgctgtgggcttg

SEQ ID NO: 1805102 - DNA, 25 bp, Homo sapien
gaatcatgctcaagggcaattggga

SEQ ID NO: 1805103 - DNA, 25 bp, Homo sapien
tgcagctggccggcacagctgtgcc

SEQ ID NO: 1805104 - DNA, 25 bp, Homo sapien
ccggcacagctgtgccctgacttac

SEQ ID NO: 1805105 - DNA, 25 bp, Homo sapien
gcagctggccggcacagctgtgccc

SEQ ID NO: 1805106 - DNA, 25 bp, Homo sapien
tggccggcacagctgtgccctgact

SEQ ID NO: 1805107 - DNA, 25 bp, Homo sapien
agcagacaactctctaaggcaaagc

SEQ ID NO: 1805108 - DNA, 25 bp, Homo sapien
aaatagagatgaattgggcagcaga

SEQ ID NO: 1805109 - DNA, 25 bp, Homo sapien
aatagagatgaattgggcagcagac

SEQ ID NO: 1805110 - DNA, 25 bp, Homo sapien
ggttctcataaaaatagagatgaat

SEQ ID NO: 1805111 - DNA, 25 bp, Homo sapien
gctctccgtatccagccaccagttc

SEQ ID NO: 1805112 - DNA, 25 bp, Homo sapien
tctccgtatccagccaccagttcca

SEQ ID NO: 1805113 - DNA, 25 bp, Homo sapien
agataaatggctgttgctctccgta

SEQ ID NO: 1805114 - DNA, 25 bp, Homo sapien
gagataaatggctgttgctctccgt

SEQ ID NO: 1805115 - DNA, 25 bp, Homo sapien
gagcagcagtcgacctttcttttca

SEQ ID NO: 1805116 - DNA, 25 bp, Homo sapien
tgccaaacaaatcactgtcacagag

SEQ ID NO: 1805117 - DNA, 25 bp, Homo sapien
cccttgggtccctggtaatgtgaat

SEQ ID NO: 1805118 - DNA, 25 bp, Homo sapien
caagctcgatgagatggcgtatgcc

SEQ ID NO: 1805119 - DNA, 25 bp, Homo sapien
gccagggttcaggacaaattccaca

SEQ ID NO: 1805120 - DNA, 25 bp, Homo sapien
cagggttcaggacaaattccacagt

SEQ ID NO: 1805121 - DNA, 25 bp, Homo sapien
ctgccagggttcaggacaaattcca

SEQ ID NO: 1805122 - DNA, 25 bp, Homo sapien
gggttcaggacaaattccacagtcc

SEQ ID NO: 1805123 - DNA, 25 bp, Homo sapien
tatactgggtacacaaagctttggc

SEQ ID NO: 1805124 - DNA, 25 bp, Homo sapien
tacggtaagtcagtggttcaaccag

SEQ ID NO: 1805125 - DNA, 25 bp, Homo sapien
gttctgccgctttacaaaagaagga

SEQ ID NO: 1805126 - DNA, 25 bp, Homo sapien
gcatacaaaggctttccaaggagca

SEQ ID NO: 1805127 - DNA, 25 bp, Homo sapien
agcgtagaagcgatgctgctgcagc

SEQ ID NO: 1805128 - DNA, 25 bp, Homo sapien
cgctcgcagggcacagcgtagaagc

SEQ ID NO: 1805129 - DNA, 25 bp, Homo sapien
aagccaggcgcgctcgcagggcaca

SEQ ID NO: 1805130 - DNA, 25 bp, Homo sapien
agccacttcagcagcgaccaagcca

SEQ ID NO: 1805131 - DNA, 25 bp, Homo sapien
tggaaggctgcttgggcacccacag

SEQ ID NO: 1805132 - DNA, 25 bp, Homo sapien
gttccctgccctcttgaattcactg

SEQ ID NO: 1805133 - DNA, 25 bp, Homo sapien
cctgccctcttgaattcactggaca

SEQ ID NO: 1805134 - DNA, 25 bp, Homo sapien
gccctcttgaattcactggacagcc

SEQ ID NO: 1805135 - DNA, 25 bp, Homo sapien
tggcgcatgctttgctacacaaggt

SEQ ID NO: 1805136 - DNA, 25 bp, Homo sapien
taaatgtacagacagagcgtggctc

SEQ ID NO: 1805137 - DNA, 25 bp, Homo sapien
gcagccacagtcagatgaaagcgat

SEQ ID NO: 1805138 - DNA, 25 bp, Homo sapien
gcaatgtagccttgcccacgtgcag

SEQ ID NO: 1805139 - DNA, 25 bp, Homo sapien
gatgaatacttgatccaacccagtt

SEQ ID NO: 1805140 - DNA, 25 bp, Homo sapien
gaacggatatccctgagatctaggt

SEQ ID NO: 1805141 - DNA, 25 bp, Homo sapien
tgaccaccttgatgaataacagccc

SEQ ID NO: 1805142 - DNA, 25 bp, Homo sapien
tatacaagagaacaccatgccatgc

SEQ ID NO: 1805143 - DNA, 25 bp, Homo sapien
gagagactgtttgagagccatccat

SEQ ID NO: 1805144 - DNA, 25 bp, Homo sapien
gagcaactgggtgaagtccttctcg

SEQ ID NO: 1805145 - DNA, 25 bp, Homo sapien
caatggcagtccagctgtgttcaga

SEQ ID NO: 1805146 - DNA, 25 bp, Homo sapien
taatagtttgggtgagcggcaccaa

SEQ ID NO: 1805147 - DNA, 25 bp, Homo sapien
ctcctgatctgctggtaaaacgcac

SEQ ID NO: 1805148 - DNA, 25 bp, Homo sapien
aatgtagcctcctgatctgctggta

SEQ ID NO: 1805149 - DNA, 25 bp, Homo sapien
gaagtgcactttgacaatcactaca

SEQ ID NO: 1805150 - DNA, 25 bp, Homo sapien
cagtgtgaactgagaagtgcacttt

SEQ ID NO: 1805151 - DNA, 25 bp, Homo sapien
gaagtcagggacagattccatgcca

SEQ ID NO: 1805152 - DNA, 25 bp, Homo sapien
aaaggacaatggtgcgccgagcttg

SEQ ID NO: 1805153 - DNA, 25 bp, Homo sapien
acaactctcgctggtgagtggaggc

SEQ ID NO: 1805154 - DNA, 25 bp, Homo sapien
taagcacggcggctctgttttcgat

SEQ ID NO: 1805155 - DNA, 25 bp, Homo sapien
acccaactcgttgttacatttctga

SEQ ID NO: 1805156 - DNA, 25 bp, Homo sapien
attccttccacaagcgtgtttcaca

SEQ ID NO: 1805157 - DNA, 25 bp, Homo sapien
tgcacactatgcaaagctggcataa

SEQ ID NO: 1805158 - DNA, 25 bp, Homo sapien
tatatgccaacaagaatcatgacaa

SEQ ID NO: 1805159 - DNA, 25 bp, Homo sapien
cagcaacccactcagcagagaggag

SEQ ID NO: 1805160 - DNA, 25 bp, Homo sapien
actacagcaacccactcagcagaga

SEQ ID NO: 1805161 - DNA, 25 bp, Homo sapien
gattccgcttagcaccatctgtctt

SEQ ID NO: 1805162 - DNA, 25 bp, Homo sapien
cagcagagaggagattccgcttagc

SEQ ID NO: 1805163 - DNA, 25 bp, Homo sapien
caattttgacagctcctaggtggtg

SEQ ID NO: 1805164 - DNA, 25 bp, Homo sapien
gtgccgaagcggtagccacacagat

SEQ ID NO: 1805165 - DNA, 25 bp, Homo sapien
tccggcacgggcttggagatcttgc

SEQ ID NO: 1805166 - DNA, 25 bp, Homo sapien
ctaggtggtgccgaagcggtagcca

SEQ ID NO: 1805167 - DNA, 25 bp, Homo sapien
gtcctcagtgggggtgaataaaaca

SEQ ID NO: 1805168 - DNA, 25 bp, Homo sapien
ctacctgcacacagtcctcagtggg

SEQ ID NO: 1805169 - DNA, 25 bp, Homo sapien
cctcagtgggggtgaataaaacaca

SEQ ID NO: 1805170 - DNA, 25 bp, Homo sapien
acacagtcctcagtgggggtgaata

SEQ ID NO: 1805171 - DNA, 25 bp, Homo sapien
tccaatgtaggcaaggcttacaggg

SEQ ID NO: 1805172 - DNA, 25 bp, Homo sapien
tcctgcgtcaggcaacgaggccacc

SEQ ID NO: 1805173 - DNA, 25 bp, Homo sapien
caattcatgaattccccctgtctct

SEQ ID NO: 1805174 - DNA, 25 bp, Homo sapien
ccaccaccttgttgctccaatgtag

SEQ ID NO: 1805175 - DNA, 25 bp, Homo sapien
gcctgtagtattgatgtacaggtaa

SEQ ID NO: 1805176 - DNA, 25 bp, Homo sapien
gtaaacaccacggaagaaagagctg

SEQ ID NO: 1805177 - DNA, 25 bp, Homo sapien
tcaatacttgtaacgtcttttgaga

SEQ ID NO: 1805178 - DNA, 25 bp, Homo sapien
aacgtcttttgagatgcctgtagta

SEQ ID NO: 1805179 - DNA, 25 bp, Homo sapien
caatttgtctaatgctgagactggg

SEQ ID NO: 1805180 - DNA, 25 bp, Homo sapien
tatagctacttctgcccgtttttgg

SEQ ID NO: 1805181 - DNA, 25 bp, Homo sapien
agtgttctgttggtgggtgcacata

SEQ ID NO: 1805182 - DNA, 25 bp, Homo sapien
gtttaacatatgaactatcctggag

SEQ ID NO: 1805183 - DNA, 25 bp, Homo sapien
ctcacctggtcagcccgctctcccc

SEQ ID NO: 1805184 - DNA, 25 bp, Homo sapien
gcacttgatcttccaccttaacacg

SEQ ID NO: 1805185 - DNA, 25 bp, Homo sapien
ggagagtagactcagtgcaagcaac

SEQ ID NO: 1805186 - DNA, 25 bp, Homo sapien
caccttaacacgagtcatggttgct

SEQ ID NO: 1805187 - DNA, 25 bp, Homo sapien
aactggcaccgccttgcacttgatc

SEQ ID NO: 1805188 - DNA, 25 bp, Homo sapien
acagcataagcacttcaaaagtgtt

SEQ ID NO: 1805189 - DNA, 25 bp, Homo sapien
gaaaatcattgtgaaagtgttgaca

SEQ ID NO: 1805190 - DNA, 25 bp, Homo sapien
tgaaagtgttgacagcataagcact

SEQ ID NO: 1805191 - DNA, 25 bp, Homo sapien
cattgtgaaagtgttgacagcataa

SEQ ID NO: 1805192 - DNA, 25 bp, Homo sapien
gaagagactccttagctccacgtgg

SEQ ID NO: 1805193 - DNA, 25 bp, Homo sapien
tccccggcacgttcaatgcagtcag

SEQ ID NO: 1805194 - DNA, 25 bp, Homo sapien
gatagccgggattcttgccaaacga

SEQ ID NO: 1805195 - DNA, 25 bp, Homo sapien
gatgagctctccagtagaacctaag

SEQ ID NO: 1805196 - DNA, 25 bp, Homo sapien
ggcaactttaatttagctctctcaa

SEQ ID NO: 1805197 - DNA, 25 bp, Homo sapien
ctttgatttacagtgttgagagcaa

SEQ ID NO: 1805198 - DNA, 25 bp, Homo sapien
ttgagagcaaggattaatggtaggc

SEQ ID NO: 1805199 - DNA, 25 bp, Homo sapien
gagcaaggattaatggtaggcaact

SEQ ID NO: 1805200 - DNA, 25 bp, Homo sapien
aagtcctgcaagtttctcgctatat

SEQ ID NO: 1805201 - DNA, 25 bp, Homo sapien
tacgctatggatctttttattgtca

SEQ ID NO: 1805202 - DNA, 25 bp, Homo sapien
gagtctatccttcaactcatatcta

SEQ ID NO: 1805203 - DNA, 25 bp, Homo sapien
tgtcattataaaggagctatttgta

SEQ ID NO: 1805204 - DNA, 25 bp, Homo sapien
gattcgctgccgtctgtcagtagtt

SEQ ID NO: 1805205 - DNA, 25 bp, Homo sapien
catctgttacttaagggccaaggtg

SEQ ID NO: 1805206 - DNA, 25 bp, Homo sapien
cattattctgctattcattggaaga

SEQ ID NO: 1805207 - DNA, 25 bp, Homo sapien
tggaagacatgattcgctgccgtct

SEQ ID NO: 1805208 - DNA, 25 bp, Homo sapien
tctgcccagtcggtcagacagatga

SEQ ID NO: 1805209 - DNA, 25 bp, Homo sapien
gtaaataggttcacagcctggcaca

SEQ ID NO: 1805210 - DNA, 25 bp, Homo sapien
gctccagagggtgcatgaacattga

SEQ ID NO: 1805211 - DNA, 25 bp, Homo sapien
ttgaatgtagccactggagctgggc

SEQ ID NO: 1805212 - DNA, 25 bp, Homo sapien
tcaactttctgcaacaaccacctgg

SEQ ID NO: 1805213 - DNA, 25 bp, Homo sapien
gaaggctgcaaaagagattcgtaat

SEQ ID NO: 1805214 - DNA, 25 bp, Homo sapien
aaggacccagagtatgccttacaag

SEQ ID NO: 1805215 - DNA, 25 bp, Homo sapien
tgtaaaagggtacttcacgatgacc

SEQ ID NO: 1805216 - DNA, 25 bp, Homo sapien
gaagaccactggcagcttcggagac

SEQ ID NO: 1805217 - DNA, 25 bp, Homo sapien
ggtctgagtgcacttgccccactgt

SEQ ID NO: 1805218 - DNA, 25 bp, Homo sapien
gaccactggcagcttcggagactgc

SEQ ID NO: 1805219 - DNA, 25 bp, Homo sapien
ggccgaagaccactggcagcttcgg

SEQ ID NO: 1805220 - DNA, 25 bp, Homo sapien
tccggttgaatccttggactctcac

SEQ ID NO: 1805221 - DNA, 25 bp, Homo sapien
gatggatttcggtgtttcctgggac

SEQ ID NO: 1805222 - DNA, 25 bp, Homo sapien
cctgggacactcctgttagtgagaa

SEQ ID NO: 1805223 - DNA, 25 bp, Homo sapien
gaggtgactgcttttatctcggcag

SEQ ID NO: 1805224 - DNA, 25 bp, Homo sapien
agactcagactgcaggtataataca

SEQ ID NO: 1805225 - DNA, 25 bp, Homo sapien
ccacagactcagactgcaggtataa

SEQ ID NO: 1805226 - DNA, 25 bp, Homo sapien
aaatgagcccacagactcagactgc

SEQ ID NO: 1805227 - DNA, 25 bp, Homo sapien
aaggtgagagtgtacatggaaatga

SEQ ID NO: 1805228 - DNA, 25 bp, Homo sapien
tggtcttgcttgagccctccactgt

SEQ ID NO: 1805229 - DNA, 25 bp, Homo sapien
acctgtggcctgagctactgccagc

SEQ ID NO: 1805230 - DNA, 25 bp, Homo sapien
ctgtagaagatttggtcttgcttga

SEQ ID NO: 1805231 - DNA, 25 bp, Homo sapien
gaagatttggtcttgcttgagccct

SEQ ID NO: 1805232 - DNA, 25 bp, Homo sapien
gcagcaccagggaatgggaactaaa

SEQ ID NO: 1805233 - DNA, 25 bp, Homo sapien
tccagcagcaccagggaatgggaac

SEQ ID NO: 1805234 - DNA, 25 bp, Homo sapien
cttggcagtagcatccagcagcacc

SEQ ID NO: 1805235 - DNA, 25 bp, Homo sapien
ccagcagcaccagggaatgggaact

SEQ ID NO: 1805236 - DNA, 25 bp, Homo sapien
cagcatgtcgtggattccttgccga

SEQ ID NO: 1805237 - DNA, 25 bp, Homo sapien
cagaggcagataatgatggtaatcc

SEQ ID NO: 1805238 - DNA, 25 bp, Homo sapien
tccttgccgagcaaaaaactcatag

SEQ ID NO: 1805239 - DNA, 25 bp, Homo sapien
ggaaatgtcatttcacaaagcccat

SEQ ID NO: 1805240 - DNA, 25 bp, Homo sapien
tttatcgggataatgagctgtggaa

SEQ ID NO: 1805241 - DNA, 25 bp, Homo sapien
tcgggataatgagctgtggaaggac

SEQ ID NO: 1805242 - DNA, 25 bp, Homo sapien
ttatcgggataatgagctgtggaag

SEQ ID NO: 1805243 - DNA, 25 bp, Homo sapien
tttttatcgggataatgagctgtgg

SEQ ID NO: 1805244 - DNA, 25 bp, Homo sapien
gcagcagtagcaatgcaggacaggt

SEQ ID NO: 1805245 - DNA, 25 bp, Homo sapien
aaaaggtagggtctccctcatctgc

SEQ ID NO: 1805246 - DNA, 25 bp, Homo sapien
tcagaggaggcactgatcctctgct

SEQ ID NO: 1805247 - DNA, 25 bp, Homo sapien
tctgcttttaattagtagtagcagt

SEQ ID NO: 1805248 - DNA, 25 bp, Homo sapien
gcaagctgctatttaataagcccct

SEQ ID NO: 1805249 - DNA, 25 bp, Homo sapien
tggtcacttacagatctctacggag

SEQ ID NO: 1805250 - DNA, 25 bp, Homo sapien
tgttactcgcacatcaggtagcacc

SEQ ID NO: 1805251 - DNA, 25 bp, Homo sapien
tccctgacagcctttaaggagcctg

SEQ ID NO: 1805252 - DNA, 25 bp, Homo sapien
tagaactaagcgacagagtaggaaa

SEQ ID NO: 1805253 - DNA, 25 bp, Homo sapien
tctcaggaaatagaactaagcgaca

SEQ ID NO: 1805254 - DNA, 25 bp, Homo sapien
ttcggaagatagagtcaaggacatt

SEQ ID NO: 1805255 - DNA, 25 bp, Homo sapien
agaaaagcgctacaaatctataata

SEQ ID NO: 1805256 - DNA, 25 bp, Homo sapien
gttgatctataagcaggataaagaa

SEQ ID NO: 1805257 - DNA, 25 bp, Homo sapien
tgatctataagcaggataaagaaag

SEQ ID NO: 1805258 - DNA, 25 bp, Homo sapien
ctgttgatctataagcaggataaag

SEQ ID NO: 1805259 - DNA, 25 bp, Homo sapien
gatctataagcaggataaagaaagt

SEQ ID NO: 1805260 - DNA, 25 bp, Homo sapien
ggtcttgatgcttgacgtctgggca

SEQ ID NO: 1805261 - DNA, 25 bp, Homo sapien
aggtattgcggtcttcacagtctgg

SEQ ID NO: 1805262 - DNA, 25 bp, Homo sapien
tcaattggtgagtctgattccaggc

SEQ ID NO: 1805263 - DNA, 25 bp, Homo sapien
gattccaggctatgctcttagccag

SEQ ID NO: 1805264 - DNA, 25 bp, Homo sapien
tcatccaacatactccttttcagtc

SEQ ID NO: 1805265 - DNA, 25 bp, Homo sapien
gggcctgcacttgcttacacacgta

SEQ ID NO: 1805266 - DNA, 25 bp, Homo sapien
gaaactgagagtaaacccatcagca

SEQ ID NO: 1805267 - DNA, 25 bp, Homo sapien
tgagcacgtctcacagaaactgaga

SEQ ID NO: 1805268 - DNA, 25 bp, Homo sapien
ctgctccggtcccagtctccatcct

SEQ ID NO: 1805269 - DNA, 25 bp, Homo sapien
caacactcctctggtcctggtctcc

SEQ ID NO: 1805270 - DNA, 25 bp, Homo sapien
tcctctggtcctggtctccatcctc

SEQ ID NO: 1805271 - DNA, 25 bp, Homo sapien
acactcctctggtcctggtctccat

SEQ ID NO: 1805272 - DNA, 25 bp, Homo sapien
actcctctggtcctggtctccatcc

SEQ ID NO: 1805273 - DNA, 25 bp, Homo sapien
tcactccaggtcaaagcctgtttct

SEQ ID NO: 1805274 - DNA, 25 bp, Homo sapien
agtcactccaggtcaaagcctgttt

SEQ ID NO: 1805275 - DNA, 25 bp, Homo sapien
actccaggtcaaagcctgtttctcc

SEQ ID NO: 1805276 - DNA, 25 bp, Homo sapien
gtttctcctccttcgcattcctcat

SEQ ID NO: 1805277 - DNA, 25 bp, Homo sapien
cattttcccctcgtagaagaggccg

SEQ ID NO: 1805278 - DNA, 25 bp, Homo sapien
gctcattttcccctcgtagaagagg

SEQ ID NO: 1805279 - DNA, 25 bp, Homo sapien
cagccctaggaatgcagctcatttt

SEQ ID NO: 1805280 - DNA, 25 bp, Homo sapien
ctaggaatgcagctcattttcccct

SEQ ID NO: 1805281 - DNA, 25 bp, Homo sapien
tgtcggtttcggaggttcaaggcat

SEQ ID NO: 1805282 - DNA, 25 bp, Homo sapien
ctgtcggtttcggaggttcaaggca

SEQ ID NO: 1805283 - DNA, 25 bp, Homo sapien
tcaggacagggaggatttgacggta

SEQ ID NO: 1805284 - DNA, 25 bp, Homo sapien
ctcagctgacacaaccagatgctgg

SEQ ID NO: 1805285 - DNA, 25 bp, Homo sapien
acagggaggatttgacggtaataag

SEQ ID NO: 1805286 - DNA, 25 bp, Homo sapien
cagctgacacaaccagatgctggag

SEQ ID NO: 1805287 - DNA, 25 bp, Homo sapien
cattaatttggtagtttcatctctg

SEQ ID NO: 1805288 - DNA, 25 bp, Homo sapien
gtaaaagctttaatgccatttattg

SEQ ID NO: 1805289 - DNA, 25 bp, Homo sapien
gagcccatattccagctgtaaaagc

SEQ ID NO: 1805290 - DNA, 25 bp, Homo sapien
aatgccatttattggctcatgctcc

SEQ ID NO: 1805291 - DNA, 25 bp, Homo sapien
tctttagacatcgccctaccaggtt

SEQ ID NO: 1805292 - DNA, 25 bp, Homo sapien
tagacatcgccctaccaggttacag

SEQ ID NO: 1805293 - DNA, 25 bp, Homo sapien
ccctaccaggttacagacaactcag

SEQ ID NO: 1805294 - DNA, 25 bp, Homo sapien
tcagaataatccttccctccgggca

SEQ ID NO: 1805295 - DNA, 25 bp, Homo sapien
accctggggtgctgctatgggatcc

SEQ ID NO: 1805296 - DNA, 25 bp, Homo sapien
gtggccaggtccctcgagactgggc

SEQ ID NO: 1805297 - DNA, 25 bp, Homo sapien
gggtgctgctatgggatccccaggg

SEQ ID NO: 1805298 - DNA, 25 bp, Homo sapien
cgtggccaggtccctcgagactggg

SEQ ID NO: 1805299 - DNA, 25 bp, Homo sapien
ttctctgcaatgtccacaaagagac

SEQ ID NO: 1805300 - DNA, 25 bp, Homo sapien
tttctctgcaatgtccacaaagaga

SEQ ID NO: 1805301 - DNA, 25 bp, Homo sapien
ggtattcagcataacaattacactt

SEQ ID NO: 1805302 - DNA, 25 bp, Homo sapien
gtggtattcagcataacaattacac

SEQ ID NO: 1805303 - DNA, 25 bp, Homo sapien
tggcatgaatagtggtattcagcat

SEQ ID NO: 1805304 - DNA, 25 bp, Homo sapien
gaatagtggtattcagcataacaat

SEQ ID NO: 1805305 - DNA, 25 bp, Homo sapien
tgggttcgggccgagccgtagccgc

SEQ ID NO: 1805306 - DNA, 25 bp, Homo sapien
tggtgggttcgggccgagccgtagc

SEQ ID NO: 1805307 - DNA, 25 bp, Homo sapien
ggccgagccgtagccgcctccacct

SEQ ID NO: 1805308 - DNA, 25 bp, Homo sapien
gttcgggccgagccgtagccgcctc

SEQ ID NO: 1805309 - DNA, 25 bp, Homo sapien
gggcatttttgaccctgcgtgatgg

SEQ ID NO: 1805310 - DNA, 25 bp, Homo sapien
ggaatctagaagggcccagggatcc

SEQ ID NO: 1805311 - DNA, 25 bp, Homo sapien
tttgaccctgcgtgatgggaatcta

SEQ ID NO: 1805312 - DNA, 25 bp, Homo sapien
ccagggatcccagcacgagaggctg

SEQ ID NO: 1805313 - DNA, 25 bp, Homo sapien
ccctctcgagcagcctgaaggtgtc

SEQ ID NO: 1805314 - DNA, 25 bp, Homo sapien
agctggaaccctctcgagcagcctg

SEQ ID NO: 1805315 - DNA, 25 bp, Homo sapien
ctcgagcagcctgaaggtgtcccca

SEQ ID NO: 1805316 - DNA, 25 bp, Homo sapien
gaaccctctcgagcagcctgaaggt

SEQ ID NO: 1805317 - DNA, 25 bp, Homo sapien
ccttggtgtccttggagggcgcggt

SEQ ID NO: 1805318 - DNA, 25 bp, Homo sapien
acagcgggacgtgccttggtgtcct

SEQ ID NO: 1805319 - DNA, 25 bp, Homo sapien
gggaactggccacgcgctgggggga

SEQ ID NO: 1805320 - DNA, 25 bp, Homo sapien
gcagaactgcttaaagagtcgcggg

SEQ ID NO: 1805321 - DNA, 25 bp, Homo sapien
tgggcccaggcaggtgtgggggcca

SEQ ID NO: 1805322 - DNA, 25 bp, Homo sapien
ctgggtgagctgtgggcccaggcag

SEQ ID NO: 1805323 - DNA, 25 bp, Homo sapien
tgtgggcccaggcaggtgtgggggc

SEQ ID NO: 1805324 - DNA, 25 bp, Homo sapien
gagctgtgggcccaggcaggtgtgg

SEQ ID NO: 1805325 - DNA, 25 bp, Homo sapien
taaattgatcttcgagggctctgaa

SEQ ID NO: 1805326 - DNA, 25 bp, Homo sapien
tatgaactcctcaaaacccgatgta

SEQ ID NO: 1805327 - DNA, 25 bp, Homo sapien
taaatatccaactagcatgcaggtc

SEQ ID NO: 1805328 - DNA, 25 bp, Homo sapien
aatttcattgtatgaccgcctcaaa

SEQ ID NO: 1805329 - DNA, 25 bp, Homo sapien
caagatgtcagcatgcctactggag

SEQ ID NO: 1805330 - DNA, 25 bp, Homo sapien
gcctactggagggttgacacagtct

SEQ ID NO: 1805331 - DNA, 25 bp, Homo sapien
ggctataccctgtccaataaaatga

SEQ ID NO: 1805332 - DNA, 25 bp, Homo sapien
cagtcttctgccaaggtgatacttt

SEQ ID NO: 1805333 - DNA, 25 bp, Homo sapien
gctctgaactcactgttacagcata

SEQ ID NO: 1805334 - DNA, 25 bp, Homo sapien
caacgtgtgatagtgatgctctgaa

SEQ ID NO: 1805335 - DNA, 25 bp, Homo sapien
gaagaatttgctatcatagacaacg

SEQ ID NO: 1805336 - DNA, 25 bp, Homo sapien
ttcaaatcgagatgagacaacagat

SEQ ID NO: 1805337 - DNA, 25 bp, Homo sapien
gagcatcaaagtgctgccacggtga

SEQ ID NO: 1805338 - DNA, 25 bp, Homo sapien
gccaacacaacaggtctgaggggct

SEQ ID NO: 1805339 - DNA, 25 bp, Homo sapien
cctccctcaccatggtattttggct

SEQ ID NO: 1805340 - DNA, 25 bp, Homo sapien
tgcttcagttagctggtttcctgcc

SEQ ID NO: 1805341 - DNA, 25 bp, Homo sapien
tcctaaatgatccatgtcactggga

SEQ ID NO: 1805342 - DNA, 25 bp, Homo sapien
cagataaagcgagtcatcccctcta

SEQ ID NO: 1805343 - DNA, 25 bp, Homo sapien
gaatccagcccagtataataaggtc

SEQ ID NO: 1805344 - DNA, 25 bp, Homo sapien
cagactggtcccctagaaagccttc

SEQ ID NO: 1805345 - DNA, 25 bp, Homo sapien
gactgggagttccactgtgatgctc

SEQ ID NO: 1805346 - DNA, 25 bp, Homo sapien
gaccctgaagggtaacgctagacag

SEQ ID NO: 1805347 - DNA, 25 bp, Homo sapien
tccaacttgcttctgtgagtgctcg

SEQ ID NO: 1805348 - DNA, 25 bp, Homo sapien
cctagatggtttgcagggaccctga

SEQ ID NO: 1805349 - DNA, 25 bp, Homo sapien
atcctaaagctttatgtgttctgtt

SEQ ID NO: 1805350 - DNA, 25 bp, Homo sapien
agtctctatgcaagggtcacttccc

SEQ ID NO: 1805351 - DNA, 25 bp, Homo sapien
tttccgagtctctatgcaagggtca

SEQ ID NO: 1805352 - DNA, 25 bp, Homo sapien
agtttttccgagtctctatgcaagg

SEQ ID NO: 1805353 - DNA, 25 bp, Homo sapien
tcctttaagacttgtggtgtgacac

SEQ ID NO: 1805354 - DNA, 25 bp, Homo sapien
caacagcgcccctaaaggtgggcat

SEQ ID NO: 1805355 - DNA, 25 bp, Homo sapien
actgaggacagagtagctaagaaca

SEQ ID NO: 1805356 - DNA, 25 bp, Homo sapien
tgtgcagtggaaacaagggagatcc

SEQ ID NO: 1805357 - DNA, 25 bp, Homo sapien
cagctggtgttcttgtgtggaatcc

SEQ ID NO: 1805358 - DNA, 25 bp, Homo sapien
ttgactctacggcactgctccagct

SEQ ID NO: 1805359 - DNA, 25 bp, Homo sapien
gggcaatgcaaagtgcaccctccag

SEQ ID NO: 1805360 - DNA, 25 bp, Homo sapien
gctgtacggcctctcgaaggtgcca

SEQ ID NO: 1805361 - DNA, 25 bp, Homo sapien
agttagaaaaacgtccagatccaag

SEQ ID NO: 1805362 - DNA, 25 bp, Homo sapien
taagttagaaaaacgtccagatcca

SEQ ID NO: 1805363 - DNA, 25 bp, Homo sapien
gcccatttgtgaccgttgttctggt

SEQ ID NO: 1805364 - DNA, 25 bp, Homo sapien
aaacattcttcaggagcccatttgt

SEQ ID NO: 1805365 - DNA, 25 bp, Homo sapien
tcaggagcccatttgtgaccgttgt

SEQ ID NO: 1805366 - DNA, 25 bp, Homo sapien
tcttcaggagcccatttgtgaccgt

SEQ ID NO: 1805367 - DNA, 25 bp, Homo sapien
gttatcacactgacggattgtccat

SEQ ID NO: 1805368 - DNA, 25 bp, Homo sapien
tagaagatgggttatcacactgacg

SEQ ID NO: 1805369 - DNA, 25 bp, Homo sapien
cattctagaagatgggttatcacac

SEQ ID NO: 1805370 - DNA, 25 bp, Homo sapien
gcagaggtggcagatacgcccccat

SEQ ID NO: 1805371 - DNA, 25 bp, Homo sapien
gggactccttagcaaacgcatctag

SEQ ID NO: 1805372 - DNA, 25 bp, Homo sapien
actagatgatggacatagggatttc

SEQ ID NO: 1805373 - DNA, 25 bp, Homo sapien
ctttatgtcaactgtctcctctgag

SEQ ID NO: 1805374 - DNA, 25 bp, Homo sapien
ttttgccaagcattgcagtaagtgc

SEQ ID NO: 1805375 - DNA, 25 bp, Homo sapien
gcctgggctgggttgactggggaaa

SEQ ID NO: 1805376 - DNA, 25 bp, Homo sapien
ccagcctgggctgggttgactgggg

SEQ ID NO: 1805377 - DNA, 25 bp, Homo sapien
gaccagcctgggctgggttgactgg

SEQ ID NO: 1805378 - DNA, 25 bp, Homo sapien
agcctgggctgggttgactggggaa

SEQ ID NO: 1805379 - DNA, 25 bp, Homo sapien
catggtaagagcgaggcagcatcat

SEQ ID NO: 1805380 - DNA, 25 bp, Homo sapien
ttatccatcattgctgcgtgcttcg

SEQ ID NO: 1805381 - DNA, 25 bp, Homo sapien
cagcttggtctacgtgtatagagcc

SEQ ID NO: 1805382 - DNA, 25 bp, Homo sapien
gcgtgcttcgtacatagcatgtaaa

SEQ ID NO: 1805383 - DNA, 25 bp, Homo sapien
gcagctttcagctcattcgtctctc

SEQ ID NO: 1805384 - DNA, 25 bp, Homo sapien
cactgtgcttaggatacaatttaca

SEQ ID NO: 1805385 - DNA, 25 bp, Homo sapien
ctctttggtggcctaaatattttct

SEQ ID NO: 1805386 - DNA, 25 bp, Homo sapien
ggaaatacacttccaattcgaagag

SEQ ID NO: 1805387 - DNA, 25 bp, Homo sapien
taatgtactcacttcggctgtaatt

SEQ ID NO: 1805388 - DNA, 25 bp, Homo sapien
tttggctgacgactgaaaactcctc

SEQ ID NO: 1805389 - DNA, 25 bp, Homo sapien
gccattatttctggtatctcagtct

SEQ ID NO: 1805390 - DNA, 25 bp, Homo sapien
tcctatagttcataagtcttactga

SEQ ID NO: 1805391 - DNA, 25 bp, Homo sapien
cctctcccatctccggtaggcgtca

SEQ ID NO: 1805392 - DNA, 25 bp, Homo sapien
tcccatctccggtaggcgtcagtgc

SEQ ID NO: 1805393 - DNA, 25 bp, Homo sapien
tctcccatctccggtaggcgtcagt

SEQ ID NO: 1805394 - DNA, 25 bp, Homo sapien
tcctctcccatctccggtaggcgtc

SEQ ID NO: 1805395 - DNA, 25 bp, Homo sapien
gggtttgcttcatcacaaggccgtg

SEQ ID NO: 1805396 - DNA, 25 bp, Homo sapien
aatctaccgggtggagacttgagcg

SEQ ID NO: 1805397 - DNA, 25 bp, Homo sapien
tagaaaagcccatgcaaagcgagga

SEQ ID NO: 1805398 - DNA, 25 bp, Homo sapien
tcagctcgcggtggatagaaaagcc

SEQ ID NO: 1805399 - DNA, 25 bp, Homo sapien
tcctttccgtaagccaacgggagca

SEQ ID NO: 1805400 - DNA, 25 bp, Homo sapien
gaaatggaaatgagaccgagtttcc

SEQ ID NO: 1805401 - DNA, 25 bp, Homo sapien
ggaaggaggatctgcgctgctggca

SEQ ID NO: 1805402 - DNA, 25 bp, Homo sapien
tctggagctcacaggtgttgggttg

SEQ ID NO: 1805403 - DNA, 25 bp, Homo sapien
tcccaggcatctctgagtttcctac

SEQ ID NO: 1805404 - DNA, 25 bp, Homo sapien
cgggaggagtcccaggcatctctga

SEQ ID NO: 1805405 - DNA, 25 bp, Homo sapien
ccagggcgggaggagtcccaggcat

SEQ ID NO: 1805406 - DNA, 25 bp, Homo sapien
gagagtggggagtcccagggcggga

SEQ ID NO: 1805407 - DNA, 25 bp, Homo sapien
gtcaaagcagtcactaccaagcggg

SEQ ID NO: 1805408 - DNA, 25 bp, Homo sapien
caatggatcgttacaattgctgggc

SEQ ID NO: 1805409 - DNA, 25 bp, Homo sapien
tcaagactgttggatccagatttca

SEQ ID NO: 1805410 - DNA, 25 bp, Homo sapien
ggctgaaatcatgacccgggtacgg

SEQ ID NO: 1805411 - DNA, 25 bp, Homo sapien
cagctggcgggttactttcagtttt

SEQ ID NO: 1805412 - DNA, 25 bp, Homo sapien
ggcagctggcgggttactttcagtt

SEQ ID NO: 1805413 - DNA, 25 bp, Homo sapien
tggcagctggcgggttactttcagt

SEQ ID NO: 1805414 - DNA, 25 bp, Homo sapien
aagccccatacccaaggctgtggga

SEQ ID NO: 1805415 - DNA, 25 bp, Homo sapien
tctgcctgctcccaccgacgcctca

SEQ ID NO: 1805416 - DNA, 25 bp, Homo sapien
gctctgcctgctcccaccgacgcct

SEQ ID NO: 1805417 - DNA, 25 bp, Homo sapien
ctctgcctgctcccaccgacgcctc

SEQ ID NO: 1805418 - DNA, 25 bp, Homo sapien
gcacagcacgcagccgtgtgaagtg

SEQ ID NO: 1805419 - DNA, 25 bp, Homo sapien
tcgtcctgaaccaccagtggtatct

SEQ ID NO: 1805420 - DNA, 25 bp, Homo sapien
tccctggtcagtaccacacgtccag

SEQ ID NO: 1805421 - DNA, 25 bp, Homo sapien
ctttgttctttcgccccacagttga

SEQ ID NO: 1805422 - DNA, 25 bp, Homo sapien
gaagagaagcgttgacctgtggcca

SEQ ID NO: 1805423 - DNA, 25 bp, Homo sapien
tgtgcctgtggtgaacaaatggtcc

SEQ ID NO: 1805424 - DNA, 25 bp, Homo sapien
tctggaagcttggtagtgggaacac

SEQ ID NO: 1805425 - DNA, 25 bp, Homo sapien
caatgaccaggtttgagcctcttct

SEQ ID NO: 1805426 - DNA, 25 bp, Homo sapien
ctttctgtctcgcttgttggcagga

SEQ ID NO: 1805427 - DNA, 25 bp, Homo sapien
caggagaacctacggaggagcccag

SEQ ID NO: 1805428 - DNA, 25 bp, Homo sapien
ccaaatgagtaggttgaagccaggc

SEQ ID NO: 1805429 - DNA, 25 bp, Homo sapien
tgggaattctgtgcctcgtcttggg

SEQ ID NO: 1805430 - DNA, 25 bp, Homo sapien
gaacccacatgaggagatagtcttg

SEQ ID NO: 1805431 - DNA, 25 bp, Homo sapien
aatgtatgatgtaaggagaacccac

SEQ ID NO: 1805432 - DNA, 25 bp, Homo sapien
gaaaacactgggctctagggccatg

SEQ ID NO: 1805433 - DNA, 25 bp, Homo sapien
tgtcttcatgggtttcacggtcaaa

SEQ ID NO: 1805434 - DNA, 25 bp, Homo sapien
gggcccatgacttgttcctttctgc

SEQ ID NO: 1805435 - DNA, 25 bp, Homo sapien
catgtacctaattgcgcaggtgagg

SEQ ID NO: 1805436 - DNA, 25 bp, Homo sapien
aagcgcaggttcttacgctgcatcc

SEQ ID NO: 1805437 - DNA, 25 bp, Homo sapien
aagcacctcagtgaccaagcgcagg

SEQ ID NO: 1805438 - DNA, 25 bp, Homo sapien
gcatgacgggtgacaatggtcctca

SEQ ID NO: 1805439 - DNA, 25 bp, Homo sapien
taggccgtgactctcatgagcatga

SEQ ID NO: 1805440 - DNA, 25 bp, Homo sapien
ttaaaagtatgtggaagcgtaggcc

SEQ ID NO: 1805441 - DNA, 25 bp, Homo sapien
tatgtggaagcgtaggccgtgactc

SEQ ID NO: 1805442 - DNA, 25 bp, Homo sapien
gcctggaggagaattgctaactctg

SEQ ID NO: 1805443 - DNA, 25 bp, Homo sapien
gaagaatcactacatagcctggagg

SEQ ID NO: 1805444 - DNA, 25 bp, Homo sapien
tcaaatacggtaaaggtgcaagtcc

SEQ ID NO: 1805445 - DNA, 25 bp, Homo sapien
gtattgtcaaataaggctccagtga

SEQ ID NO: 1805446 - DNA, 25 bp, Homo sapien
tctggtcactctggtattctgatcc

SEQ ID NO: 1805447 - DNA, 25 bp, Homo sapien
gtgcttcccaaccacacagatgtct

SEQ ID NO: 1805448 - DNA, 25 bp, Homo sapien
caggtagacgctgactgcacgtgct

SEQ ID NO: 1805449 - DNA, 25 bp, Homo sapien
tcctcactcttcttaggccctgaca

SEQ ID NO: 1805450 - DNA, 25 bp, Homo sapien
tcttaattacttgggatggaggcag

SEQ ID NO: 1805451 - DNA, 25 bp, Homo sapien
ttaaaagtgttttccgtgcaatgct

SEQ ID NO: 1805452 - DNA, 25 bp, Homo sapien
tacggcattctgatattactacaac

SEQ ID NO: 1805453 - DNA, 25 bp, Homo sapien
ggcagattgggcaaatgcttcagct

SEQ ID NO: 1805454 - DNA, 25 bp, Homo sapien
gagtcgtctaacactctcattagaa

SEQ ID NO: 1805455 - DNA, 25 bp, Homo sapien
gaatgcaagcttctactacttccat

SEQ ID NO: 1805456 - DNA, 25 bp, Homo sapien
tcccattgtgtgtggagctcagtgg

SEQ ID NO: 1805457 - DNA, 25 bp, Homo sapien
tttcctgtgcattacagtcgagtcg

SEQ ID NO: 1805458 - DNA, 25 bp, Homo sapien
atgttaggatagttttcctatttct

SEQ ID NO: 1805459 - DNA, 25 bp, Homo sapien
catatacatgttaggatagttttcc

SEQ ID NO: 1805460 - DNA, 25 bp, Homo sapien
taacgtaccatcatcatttataagg

SEQ ID NO: 1805461 - DNA, 25 bp, Homo sapien
tttgctggacctgggtgttaaagct

SEQ ID NO: 1805462 - DNA, 25 bp, Homo sapien
tcttgcaaacgtgtatgagggtctg

SEQ ID NO: 1805463 - DNA, 25 bp, Homo sapien
tgttaaagctttgtagtccccatca

SEQ ID NO: 1805464 - DNA, 25 bp, Homo sapien
tcctgtaacgatgggtaggctgctg

SEQ ID NO: 1805465 - DNA, 25 bp, Homo sapien
agcaagtctggacctccccacttcg

SEQ ID NO: 1805466 - DNA, 25 bp, Homo sapien
ccacttcgctaacatggaggacaat

SEQ ID NO: 1805467 - DNA, 25 bp, Homo sapien
gacttttacatacaatgatggtaga

SEQ ID NO: 1805468 - DNA, 25 bp, Homo sapien
tcatattatttgttgcagagtttag

SEQ ID NO: 1805469 - DNA, 25 bp, Homo sapien
catgtggaggcacaatttgagcagc

SEQ ID NO: 1805470 - DNA, 25 bp, Homo sapien
tcaatcttggtgtgctggaagagca

SEQ ID NO: 1805471 - DNA, 25 bp, Homo sapien
gtaggtctggatcacttagaaagcc

SEQ ID NO: 1805472 - DNA, 25 bp, Homo sapien
tagagtgtgcctgagcctgtaggtc

SEQ ID NO: 1805473 - DNA, 25 bp, Homo sapien
tccaaaccaggaatgtaagcaggca

SEQ ID NO: 1805474 - DNA, 25 bp, Homo sapien
ggttgctaagtcttcgtggcctggc

SEQ ID NO: 1805475 - DNA, 25 bp, Homo sapien
ttcacagtcaacttctgctgccagg

SEQ ID NO: 1805476 - DNA, 25 bp, Homo sapien
ccacagaaacttcgctggttgctaa

SEQ ID NO: 1805477 - DNA, 25 bp, Homo sapien
tccagagagtttgccatggacattc

SEQ ID NO: 1805478 - DNA, 25 bp, Homo sapien
tcattccagagagtttgccatggac

SEQ ID NO: 1805479 - DNA, 25 bp, Homo sapien
ttccagagagtttgccatggacatt

SEQ ID NO: 1805480 - DNA, 25 bp, Homo sapien
cattccagagagtttgccatggaca

SEQ ID NO: 1805481 - DNA, 25 bp, Homo sapien
gaatggatgagtaacagggatcttc

SEQ ID NO: 1805482 - DNA, 25 bp, Homo sapien
gagctgccacttggatttcgtgccc

SEQ ID NO: 1805483 - DNA, 25 bp, Homo sapien
ccgagcagcgcaatacagaatggat

SEQ ID NO: 1805484 - DNA, 25 bp, Homo sapien
tttacattgcatgccaataatgagc

SEQ ID NO: 1805485 - DNA, 25 bp, Homo sapien
gagtctagtgccttatgtttgccca

SEQ ID NO: 1805486 - DNA, 25 bp, Homo sapien
agttgtggctcttgagctggcccca

SEQ ID NO: 1805487 - DNA, 25 bp, Homo sapien
agtagccttgctgccgtttcttgag

SEQ ID NO: 1805488 - DNA, 25 bp, Homo sapien
gtttgcccacttgtgcttgcactgg

SEQ ID NO: 1805489 - DNA, 25 bp, Homo sapien
catcacggacggtgcattcttttcc

SEQ ID NO: 1805490 - DNA, 25 bp, Homo sapien
tgggctgggccattttcctaattgc

SEQ ID NO: 1805491 - DNA, 25 bp, Homo sapien
gacagctctgctccttatgacacag

SEQ ID NO: 1805492 - DNA, 25 bp, Homo sapien
ggaatttatacagagccgcacatag

SEQ ID NO: 1805493 - DNA, 25 bp, Homo sapien
gaattcagcatggatatactgcctg

SEQ ID NO: 1805494 - DNA, 25 bp, Homo sapien
tactgcctgttctcaagatggtctt

SEQ ID NO: 1805495 - DNA, 25 bp, Homo sapien
cagcatggatatactgcctgttctc

SEQ ID NO: 1805496 - DNA, 25 bp, Homo sapien
tgttgaattcagcatggatatactg

SEQ ID NO: 1805497 - DNA, 25 bp, Homo sapien
gaacaccaaagcaaatgcgacccca

SEQ ID NO: 1805498 - DNA, 25 bp, Homo sapien
accaaagcaaatgcgaccccagcat

SEQ ID NO: 1805499 - DNA, 25 bp, Homo sapien
tgcgaccccagcatttgcctgccat

SEQ ID NO: 1805500 - DNA, 25 bp, Homo sapien
ctgcaaggaacaccaaagcaaatgc

SEQ ID NO: 1805501 - DNA, 25 bp, Homo sapien
tcccttctgtaagagcagtggggac

SEQ ID NO: 1805502 - DNA, 25 bp, Homo sapien
caggtttccaaaacgttgttcagat

SEQ ID NO: 1805503 - DNA, 25 bp, Homo sapien
cccttctgtaagagcagtggggacc

SEQ ID NO: 1805504 - DNA, 25 bp, Homo sapien
ttcccttctgtaagagcagtgggga

SEQ ID NO: 1805505 - DNA, 25 bp, Homo sapien
aggtgtgacccagatcctgcgggct

SEQ ID NO: 1805506 - DNA, 25 bp, Homo sapien
ggaggaggtgagcatggccgtgtgt

SEQ ID NO: 1805507 - DNA, 25 bp, Homo sapien
tgagcatggccgtgtgtgcggcctg

SEQ ID NO: 1805508 - DNA, 25 bp, Homo sapien
tgacccagatcctgcgggctgtgag

SEQ ID NO: 1805509 - DNA, 25 bp, Homo sapien
aatggcaactggctgaccttgagcc

SEQ ID NO: 1805510 - DNA, 25 bp, Homo sapien
caatggcaactggctgaccttgagc

SEQ ID NO: 1805511 - DNA, 25 bp, Homo sapien
tagatatcagtgcacggaattccaa

SEQ ID NO: 1805512 - DNA, 25 bp, Homo sapien
tcggtccacggccaaactcagtttc

SEQ ID NO: 1805513 - DNA, 25 bp, Homo sapien
cagcgagtcctgacacatgggaact

SEQ ID NO: 1805514 - DNA, 25 bp, Homo sapien
actggcgcagggttcagtcggtcca

SEQ ID NO: 1805515 - DNA, 25 bp, Homo sapien
cgcaggccagctctggcgggcagag

SEQ ID NO: 1805516 - DNA, 25 bp, Homo sapien
ggtcatcttgcagggtgacccgcag

SEQ ID NO: 1805517 - DNA, 25 bp, Homo sapien
ggacatcttgcagggtgacccgcag

SEQ ID NO: 1805518 - DNA, 25 bp, Homo sapien
cagagggtcatcttgcagggtgacc

SEQ ID NO: 1805519 - DNA, 25 bp, Homo sapien
gcagagggtcatcttgcagggtgac

SEQ ID NO: 1805520 - DNA, 25 bp, Homo sapien
ctggcgggcagagggtcatcttgca

SEQ ID NO: 1805521 - DNA, 25 bp, Homo sapien
agggtcatcttgcagggtgacccgc

SEQ ID NO: 1805522 - DNA, 25 bp, Homo sapien
ggtcatcttgcagggtgacccgcag

SEQ ID NO: 1805523 - DNA, 25 bp, Homo sapien
acggggcgggcccatagttgcatcc

SEQ ID NO: 1805524 - DNA, 25 bp, Homo sapien
gttgcatccgggtctctggccccgt

SEQ ID NO: 1805525 - DNA, 25 bp, Homo sapien
ccatagttgcatccgggtctctggc

SEQ ID NO: 1805526 - DNA, 25 bp, Homo sapien
gcgggcccatagttgcatccgggtc

SEQ ID NO: 1805527 - DNA, 25 bp, Homo sapien
ggtgcagcgctcaggtttacaaagt

SEQ ID NO: 1805528 - DNA, 25 bp, Homo sapien
caagaactcacacttctgggtgcag

SEQ ID NO: 1805529 - DNA, 25 bp, Homo sapien
tctaggaagcccaagctgaaggctg

SEQ ID NO: 1805530 - DNA, 25 bp, Homo sapien
taagagatagctcactaggtcctgg

SEQ ID NO: 1805531 - DNA, 25 bp, Homo sapien
ggctaatgttactccctctttgatt

SEQ ID NO: 1805532 - DNA, 25 bp, Homo sapien
agggctaatgttactccctctttga

SEQ ID NO: 1805533 - DNA, 25 bp, Homo sapien
ggttcagggctaatgttactccctc

SEQ ID NO: 1805534 - DNA, 25 bp, Homo sapien
tcagggctaatgttactccctcttt

SEQ ID NO: 1805535 - DNA, 25 bp, Homo sapien
cctgcagaacaatttatctcatcat

SEQ ID NO: 1805536 - DNA, 25 bp, Homo sapien
aggagcacaggcaccgagtgtgggc

SEQ ID NO: 1805537 - DNA, 25 bp, Homo sapien
caccgagtgtgggctcggaagatga

SEQ ID NO: 1805538 - DNA, 25 bp, Homo sapien
ggagcacaggcaccgagtgtgggct

SEQ ID NO: 1805539 - DNA, 25 bp, Homo sapien
caggcaccgagtgtgggctcggaag

SEQ ID NO: 1805540 - DNA, 25 bp, Homo sapien
aagagtaggagagtctctgggtttc

SEQ ID NO: 1805541 - DNA, 25 bp, Homo sapien
gaaggttcccattctctacgaagag

SEQ ID NO: 1805542 - DNA, 25 bp, Homo sapien
tcttgctggaattgaatgtggtgtg

SEQ ID NO: 1805543 - DNA, 25 bp, Homo sapien
gcagttctccaacagttcttgctgg

SEQ ID NO: 1805544 - DNA, 25 bp, Homo sapien
gatttcaaggacttttctctcagtg

SEQ ID NO: 1805545 - DNA, 25 bp, Homo sapien
cagtatgggcaaagtctaggatcaa

SEQ ID NO: 1805546 - DNA, 25 bp, Homo sapien
caggatgacaaaaatcaaggccgac

SEQ ID NO: 1805547 - DNA, 25 bp, Homo sapien
cactatctttacttcattacaggtc

SEQ ID NO: 1805548 - DNA, 25 bp, Homo sapien
cgccatcggtctagggctgtgctct

SEQ ID NO: 1805549 - DNA, 25 bp, Homo sapien
tctggccgttggcatgtggagcatt

SEQ ID NO: 1805550 - DNA, 25 bp, Homo sapien
ctgccaggcgtagccactttgcaca

SEQ ID NO: 1805551 - DNA, 25 bp, Homo sapien
gcatttgctgccaggcgtagccact

SEQ ID NO: 1805552 - DNA, 25 bp, Homo sapien
tgttgtagtcaagacactcggagat

SEQ ID NO: 1805553 - DNA, 25 bp, Homo sapien
cctgcgtcttgagaactctgaacgg

SEQ ID NO: 1805554 - DNA, 25 bp, Homo sapien
tccagagcctccacgcgctgtgtgt

SEQ ID NO: 1805555 - DNA, 25 bp, Homo sapien
gtggcgctttgcttgccaccgagcc

SEQ ID NO: 1805556 - DNA, 25 bp, Homo sapien
tccatggaagtatgtctgggcccac

SEQ ID NO: 1805557 - DNA, 25 bp, Homo sapien
tctctttccggataccattttgttc

SEQ ID NO: 1805558 - DNA, 25 bp, Homo sapien
tttgttcagaactaggacgcacgtg

SEQ ID NO: 1805559 - DNA, 25 bp, Homo sapien
tctatcccggtctctggtctcttgt

SEQ ID NO: 1805560 - DNA, 25 bp, Homo sapien
tccttaaactgtccccatgggatgc

SEQ ID NO: 1805561 - DNA, 25 bp, Homo sapien
ccaggtggtcgaggttgcaacgagc

SEQ ID NO: 1805562 - DNA, 25 bp, Homo sapien
agcccaggtggtcgaggttgcaacg

SEQ ID NO: 1805563 - DNA, 25 bp, Homo sapien
tgcaacgagccatgatcgcgccact

SEQ ID NO: 1805564 - DNA, 25 bp, Homo sapien
gcaacgagccatgatcgcgccactg

SEQ ID NO: 1805565 - DNA, 25 bp, Homo sapien
catgcaaacacacaaagaggccagt

SEQ ID NO: 1805566 - DNA, 25 bp, Homo sapien
tggtgcatgcaaacacacaaagagg

SEQ ID NO: 1805567 - DNA, 25 bp, Homo sapien
gcaaacacacaaagaggccagttac

SEQ ID NO: 1805568 - DNA, 25 bp, Homo sapien
gcatgcaaacacacaaagaggccag

SEQ ID NO: 1805569 - DNA, 25 bp, Homo sapien
ggcattttctcctccgtagcgctcg

SEQ ID NO: 1805570 - DNA, 25 bp, Homo sapien
gtagcgctcgaaggcctccagtgtc

SEQ ID NO: 1805571 - DNA, 25 bp, Homo sapien
cagtgtctcctggatcaagtcccca

SEQ ID NO: 1805572 - DNA, 25 bp, Homo sapien
gctgtagtcaatgccgtctccggag

SEQ ID NO: 1805573 - DNA, 25 bp, Homo sapien
tagcaagcaagactcgtaggttggg

SEQ ID NO: 1805574 - DNA, 25 bp, Homo sapien
caagcaagactcgtaggttgggacc

SEQ ID NO: 1805575 - DNA, 25 bp, Homo sapien
caagactcgtaggttgggaccacgt

SEQ ID NO: 1805576 - DNA, 25 bp, Homo sapien
gtttagcaagcaagactcgtaggtt

SEQ ID NO: 1805577 - DNA, 25 bp, Homo sapien
gacagatgatcccaacaccaacggg

SEQ ID NO: 1805578 - DNA, 25 bp, Homo sapien
gccttgctctcaatagggctaacag

SEQ ID NO: 1805579 - DNA, 25 bp, Homo sapien
tctgtcggagctgtataaagaagca

SEQ ID NO: 1805580 - DNA, 25 bp, Homo sapien
ggctaacagtccaatggcccataag

SEQ ID NO: 1805581 - DNA, 25 bp, Homo sapien
tagagaggcactgctgaacccatgc

SEQ ID NO: 1805582 - DNA, 25 bp, Homo sapien
tccatgacaaacacctagtaagcag

SEQ ID NO: 1805583 - DNA, 25 bp, Homo sapien
cattattccgcacagctgctagaga

SEQ ID NO: 1805584 - DNA, 25 bp, Homo sapien
tagtaagcagtcagcataaactctt

SEQ ID NO: 1805585 - DNA, 25 bp, Homo sapien
aaaatggccatcagacccactgcgt

SEQ ID NO: 1805586 - DNA, 25 bp, Homo sapien
tatgagaagtcatccaactagtggg

SEQ ID NO: 1805587 - DNA, 25 bp, Homo sapien
caccaggtcctgagatgcagtgtgc

SEQ ID NO: 1805588 - DNA, 25 bp, Homo sapien
cagtgtgccatacggtggagagaca

SEQ ID NO: 1805589 - DNA, 25 bp, Homo sapien
ccatcctcacgggtatcccgccatg

SEQ ID NO: 1805590 - DNA, 25 bp, Homo sapien
cgggtatcccgccatggacctcggg

SEQ ID NO: 1805591 - DNA, 25 bp, Homo sapien
atcctcacgggtatcccgccatgga

SEQ ID NO: 1805592 - DNA, 25 bp, Homo sapien
tctccaggtacttggttggctgctt

SEQ ID NO: 1805593 - DNA, 25 bp, Homo sapien
ctcctgggggaccacacgatgacgg

SEQ ID NO: 1805594 - DNA, 25 bp, Homo sapien
tcctgggggaccacacgatgacgga

SEQ ID NO: 1805595 - DNA, 25 bp, Homo sapien
tcagcagacattagatcccggctct

SEQ ID NO: 1805596 - DNA, 25 bp, Homo sapien
agcagacattagatcccggctctcc

SEQ ID NO: 1805597 - DNA, 25 bp, Homo sapien
acacgctccaaagcccagcgcccct

SEQ ID NO: 1805598 - DNA, 25 bp, Homo sapien
gggctgataattcttccctcaagac

SEQ ID NO: 1805599 - DNA, 25 bp, Homo sapien
agcagtacctttgacacaggacacg

SEQ ID NO: 1805600 - DNA, 25 bp, Homo sapien
ttccctcaagacagcagtacctttg

SEQ ID NO: 1805601 - DNA, 25 bp, Homo sapien
tcttgttctagactgaggacgatgt

SEQ ID NO: 1805602 - DNA, 25 bp, Homo sapien
cagtctggaaagcaggatcagtgga

SEQ ID NO: 1805603 - DNA, 25 bp, Homo sapien
taatttccccgaagagccctattgc

SEQ ID NO: 1805604 - DNA, 25 bp, Homo sapien
tagacgtcagcttccctgacgaggg

SEQ ID NO: 1805605 - DNA, 25 bp, Homo sapien
agacccagacacccaaccacaaaga

SEQ ID NO: 1805606 - DNA, 25 bp, Homo sapien
gacccagacacccaaccacaaagag

SEQ ID NO: 1805607 - DNA, 25 bp, Homo sapien
aagacccagacacccaaccacaaag

SEQ ID NO: 1805608 - DNA, 25 bp, Homo sapien
ggggttgggggtggtgctcatgcat

SEQ ID NO: 1805609 - DNA, 25 bp, Homo sapien
gtggggttgggggtggtgctcatgc

SEQ ID NO: 1805610 - DNA, 25 bp, Homo sapien
aagtggggttgggggtggtgctcat

SEQ ID NO: 1805611 - DNA, 25 bp, Homo sapien
taagtggggttgggggtggtgctca

SEQ ID NO: 1805612 - DNA, 25 bp, Homo sapien
gggacgctggtagcctcatcatgaa

SEQ ID NO: 1805613 - DNA, 25 bp, Homo sapien
tctgggacgctggtagcctcatcat

SEQ ID NO: 1805614 - DNA, 25 bp, Homo sapien
tctctgggacgctggtagcctcatc

SEQ ID NO: 1805615 - DNA, 25 bp, Homo sapien
acgctggtagcctcatcatgaagca

SEQ ID NO: 1805616 - DNA, 25 bp, Homo sapien
cgttcaaaccagtaaccagtccgtg

SEQ ID NO: 1805617 - DNA, 25 bp, Homo sapien
cgagttaaacgttgctggacagaaa

SEQ ID NO: 1805618 - DNA, 25 bp, Homo sapien
ccagtccgtggccatgcatgttaac

SEQ ID NO: 1805619 - DNA, 25 bp, Homo sapien
tagctaaaccgctgatggcctcgag

SEQ ID NO: 1805620 - DNA, 25 bp, Homo sapien
gaagaaggttctggtgacccgagct

SEQ ID NO: 1805621 - DNA, 25 bp, Homo sapien
agaaggttctggtgacccgagctgc

SEQ ID NO: 1805622 - DNA, 25 bp, Homo sapien
ggaagaaggttctggtgacccgagc

SEQ ID NO: 1805623 - DNA, 25 bp, Homo sapien
aagaaggttctggtgacccgagctg

SEQ ID NO: 1805624 - DNA, 25 bp, Homo sapien
gagcacccgtttggtgtccctgcca

SEQ ID NO: 1805625 - DNA, 25 bp, Homo sapien
gccccaggagcacccgtttggtgtc

SEQ ID NO: 1805626 - DNA, 25 bp, Homo sapien
caggagcacccgtttggtgtccctg

SEQ ID NO: 1805627 - DNA, 25 bp, Homo sapien
ccaggagcacccgtttggtgtccct

SEQ ID NO: 1805628 - DNA, 25 bp, Homo sapien
tcattttgataagcagggtccccgt

SEQ ID NO: 1805629 - DNA, 25 bp, Homo sapien
aaagcgccacacttcctccgattgt

SEQ ID NO: 1805630 - DNA, 25 bp, Homo sapien
gataagcagggtccccgtttcgctc

SEQ ID NO: 1805631 - DNA, 25 bp, Homo sapien
ttcgctccctgagcggagaaagcgc

SEQ ID NO: 1805632 - DNA, 25 bp, Homo sapien
ggtagtttgtagcaactgaataaat

SEQ ID NO: 1805633 - DNA, 25 bp, Homo sapien
aggaagtctttggtagtttgtagca

SEQ ID NO: 1805634 - DNA, 25 bp, Homo sapien
gaagtctttggtagtttgtagcaac

SEQ ID NO: 1805635 - DNA, 25 bp, Homo sapien
tctttggtagtttgtagcaactgaa

SEQ ID NO: 1805636 - DNA, 25 bp, Homo sapien
caatggaggtggccgaaggacatga

SEQ ID NO: 1805637 - DNA, 25 bp, Homo sapien
aatggaggtggccgaaggacatgac

SEQ ID NO: 1805638 - DNA, 25 bp, Homo sapien
tttgtcgtcagcctcaaaggcatgg

SEQ ID NO: 1805639 - DNA, 25 bp, Homo sapien
ccccaagagcgtggttttgtcgtca

SEQ ID NO: 1805640 - DNA, 25 bp, Homo sapien
gcgtggttttgtcgtcagcctcaaa

SEQ ID NO: 1805641 - DNA, 25 bp, Homo sapien
caagagcgtggttttgtcgtcagcc

SEQ ID NO: 1805642 - DNA, 25 bp, Homo sapien
tagaattgctcaaatgacaacagct

SEQ ID NO: 1805643 - DNA, 25 bp, Homo sapien
gcagcagcaagtttgaaaatccaac

SEQ ID NO: 1805644 - DNA, 25 bp, Homo sapien
ccagccctagggctacagaatgtat

SEQ ID NO: 1805645 - DNA, 25 bp, Homo sapien
ttggtcacctcggagacatggcagc

SEQ ID NO: 1805646 - DNA, 25 bp, Homo sapien
ggtcattttctgctcagatatctcc

SEQ ID NO: 1805647 - DNA, 25 bp, Homo sapien
gatatctcctctccctgacgatcga

SEQ ID NO: 1805648 - DNA, 25 bp, Homo sapien
cctgacgatcgattccccctggagg

SEQ ID NO: 1805649 - DNA, 25 bp, Homo sapien
gtcattttctgctcagatatctcct

SEQ ID NO: 1805650 - DNA, 25 bp, Homo sapien
tgcatcagtcacttcagccatggtg

SEQ ID NO: 1805651 - DNA, 25 bp, Homo sapien
cccaggccacccctgatggatgcat

SEQ ID NO: 1805652 - DNA, 25 bp, Homo sapien
aagcgcgggagcatcctctgtcgtc

SEQ ID NO: 1805653 - DNA, 25 bp, Homo sapien
gggaggatttcaaggctgtgcccag

SEQ ID NO: 1805654 - DNA, 25 bp, Homo sapien
attgtcttttgaccgcaggtgctac

SEQ ID NO: 1805655 - DNA, 25 bp, Homo sapien
tcattcccgcattgtcttttgaccg

SEQ ID NO: 1805656 - DNA, 25 bp, Homo sapien
cgcattgtcttttgaccgcaggtgc

SEQ ID NO: 1805657 - DNA, 25 bp, Homo sapien
ttcccgcattgtcttttgaccgcag

SEQ ID NO: 1805658 - DNA, 25 bp, Homo sapien
gcctgaattgcatggaggtggcccc

SEQ ID NO: 1805659 - DNA, 25 bp, Homo sapien
cctttctacggtctgggctgatgta

SEQ ID NO: 1805660 - DNA, 25 bp, Homo sapien
tttgcacactaagaaagattcccag

SEQ ID NO: 1805661 - DNA, 25 bp, Homo sapien
ggtggccccttttgcacactaagaa

SEQ ID NO: 1805662 - DNA, 25 bp, Homo sapien
gccaagaagccctcgagctgattca

SEQ ID NO: 1805663 - DNA, 25 bp, Homo sapien
cgtttgcctgtactctgttcctcgg

SEQ ID NO: 1805664 - DNA, 25 bp, Homo sapien
tcagacctgagggttcggcctgtgc

SEQ ID NO: 1805665 - DNA, 25 bp, Homo sapien
gtccgtgtcagggtttctctctgcc

SEQ ID NO: 1805666 - DNA, 25 bp, Homo sapien
ggagcgggaactggacggtgggcat

SEQ ID NO: 1805667 - DNA, 25 bp, Homo sapien
gggagcgggaactggacggtgggca

SEQ ID NO: 1805668 - DNA, 25 bp, Homo sapien
tgagggagcgggaactggacggtgg

SEQ ID NO: 1805669 - DNA, 25 bp, Homo sapien
ctgagggagcgggaactggacggtg

SEQ ID NO: 1805670 - DNA, 25 bp, Homo sapien
tctggaagacaatgacagagtgctt

SEQ ID NO: 1805671 - DNA, 25 bp, Homo sapien
gcttttgtgctcttttgcggggcat

SEQ ID NO: 1805672 - DNA, 25 bp, Homo sapien
agtcggaggagctccggttatgtcc

SEQ ID NO: 1805673 - DNA, 25 bp, Homo sapien
gagctccggttatgtccaagccgaa

SEQ ID NO: 1805674 - DNA, 25 bp, Homo sapien
tgccttaggagcttccagtgtgtta

SEQ ID NO: 1805675 - DNA, 25 bp, Homo sapien
caaatattccgagcgccggcgctgc

SEQ ID NO: 1805676 - DNA, 25 bp, Homo sapien
aaatccaaatattccgagcgccggc

SEQ ID NO: 1805677 - DNA, 25 bp, Homo sapien
tggctgccttaggagcttccagtgt

SEQ ID NO: 1805678 - DNA, 25 bp, Homo sapien
ccaggagggcctgaagctgagaagc

SEQ ID NO: 1805679 - DNA, 25 bp, Homo sapien
actccaggagggcctgaagctgaga

SEQ ID NO: 1805680 - DNA, 25 bp, Homo sapien
tatccacaaacacaaactccaggag

SEQ ID NO: 1805681 - DNA, 25 bp, Homo sapien
catatccacaaacacaaactccagg

SEQ ID NO: 1805682 - DNA, 25 bp, Homo sapien
gaaaagaatagcataggcttgcaga

SEQ ID NO: 1805683 - DNA, 25 bp, Homo sapien
tgaccccggagaacaggagaaaatc

SEQ ID NO: 1805684 - DNA, 25 bp, Homo sapien
ccctctgtctgtttggatttcatgt

SEQ ID NO: 1805685 - DNA, 25 bp, Homo sapien
cataggcttgcagagagaaacggaa

SEQ ID NO: 1805686 - DNA, 25 bp, Homo sapien
catatggtactggaccaatatttgt

SEQ ID NO: 1805687 - DNA, 25 bp, Homo sapien
ggtactggaccaatatttgtagact

SEQ ID NO: 1805688 - DNA, 25 bp, Homo sapien
atatttgtagactgatcgggaagag

SEQ ID NO: 1805689 - DNA, 25 bp, Homo sapien
tgatcgggaagaggggccttcctaa

SEQ ID NO: 1805690 - DNA, 25 bp, Homo sapien
tcttacagacacgtgcagccttgga

SEQ ID NO: 1805691 - DNA, 25 bp, Homo sapien
tcttgccgggtttccaactacagga

SEQ ID NO: 1805692 - DNA, 25 bp, Homo sapien
aattgcataagatgggcgaggcccg

SEQ ID NO: 1805693 - DNA, 25 bp, Homo sapien
gatttcggttcatttcttgccccag

SEQ ID NO: 1805694 - DNA, 25 bp, Homo sapien
tggctgaataagcctccccctgaga

SEQ ID NO: 1805695 - DNA, 25 bp, Homo sapien
tggctggctgaataagcctccccct

SEQ ID NO: 1805696 - DNA, 25 bp, Homo sapien
gctggctgaataagcctccccctga

SEQ ID NO: 1805697 - DNA, 25 bp, Homo sapien
ccagtggctggctgaataagcctcc

SEQ ID NO: 1805698 - DNA, 25 bp, Homo sapien
tttcttaagaatgacgaggccagct

SEQ ID NO: 1805699 - DNA, 25 bp, Homo sapien
accacggcctgtcggctggatcctg

SEQ ID NO: 1805700 - DNA, 25 bp, Homo sapien
tcactcggtctgactatcacctgag

SEQ ID NO: 1805701 - DNA, 25 bp, Homo sapien
tgcttagatccctcatcactcggtc

SEQ ID NO: 1805702 - DNA, 25 bp, Homo sapien
cttgttcctgtcacagtccagtctc

SEQ ID NO: 1805703 - DNA, 25 bp, Homo sapien
aaacttgttcctgtcacagtccagt

SEQ ID NO: 1805704 - DNA, 25 bp, Homo sapien
tccagtctctctgcacagaacttac

SEQ ID NO: 1805705 - DNA, 25 bp, Homo sapien
gtccagtctctctgcacagaactta

SEQ ID NO: 1805706 - DNA, 25 bp, Homo sapien
ctgagatgcacccaagccaacgtga

SEQ ID NO: 1805707 - DNA, 25 bp, Homo sapien
gatgcacccaagccaacgtgagcta

SEQ ID NO: 1805708 - DNA, 25 bp, Homo sapien
agatgcacccaagccaacgtgagct

SEQ ID NO: 1805709 - DNA, 25 bp, Homo sapien
tgagatgcacccaagccaacgtgag

SEQ ID NO: 1805710 - DNA, 25 bp, Homo sapien
gacaccaggactcacactgtctgcg

SEQ ID NO: 1805711 - DNA, 25 bp, Homo sapien
gtctgcgtgatcagcacccacgtgg

SEQ ID NO: 1805712 - DNA, 25 bp, Homo sapien
actgtctgcgtgatcagcacccacg

SEQ ID NO: 1805713 - DNA, 25 bp, Homo sapien
caccaggactcacactgtctgcgtg

SEQ ID NO: 1805714 - DNA, 25 bp, Homo sapien
cccattcgcacagcaggtgattcca

SEQ ID NO: 1805715 - DNA, 25 bp, Homo sapien
ccctcatcctgtgtccgcagaactt

SEQ ID NO: 1805716 - DNA, 25 bp, Homo sapien
cagaacttccgaaggtgacgccctc

SEQ ID NO: 1805717 - DNA, 25 bp, Homo sapien
tcctgtgtccgcagaacttccctgg

SEQ ID NO: 1805718 - DNA, 25 bp, Homo sapien
ccgccggtgaagcggcttcccgtca

SEQ ID NO: 1805719 - DNA, 25 bp, Homo sapien
cgccggtgaagcggcttcccgtcac

SEQ ID NO: 1805720 - DNA, 25 bp, Homo sapien
ggttccgtatttatcaacgattcca

SEQ ID NO: 1805721 - DNA, 25 bp, Homo sapien
ctagcgggttccgtatttatcaacg

SEQ ID NO: 1805722 - DNA, 25 bp, Homo sapien
caacgattccaactctcttggtgca

SEQ ID NO: 1805723 - DNA, 25 bp, Homo sapien
gtatttatcaacgattccaactctc

SEQ ID NO: 1805724 - DNA, 25 bp, Homo sapien
gagcagaagtggtgttagaggtcca

SEQ ID NO: 1805725 - DNA, 25 bp, Homo sapien
agaagtggtgttagaggtccaggca

SEQ ID NO: 1805726 - DNA, 25 bp, Homo sapien
ggaaagagcaagtatacttgacgtg

SEQ ID NO: 1805727 - DNA, 25 bp, Homo sapien
tatacttgacgtgctggctgatttt

SEQ ID NO: 1805728 - DNA, 25 bp, Homo sapien
atctagcatgaagccctcacccatg

SEQ ID NO: 1805729 - DNA, 25 bp, Homo sapien
atgaagccctcacccatgccgtgta

SEQ ID NO: 1805730 - DNA, 25 bp, Homo sapien
cattagatctagcatgaagccctca

SEQ ID NO: 1805731 - DNA, 25 bp, Homo sapien
tcacccatgccgtgtaactctacat

SEQ ID NO: 1805732 - DNA, 25 bp, Homo sapien
aaggagtgagtctaaccaaaaggtg

SEQ ID NO: 1805733 - DNA, 25 bp, Homo sapien
gcatcacctcgcaggctggaggcaa

SEQ ID NO: 1805734 - DNA, 25 bp, Homo sapien
tcgagtgttcgatgctagcttgtct

SEQ ID NO: 1805735 - DNA, 25 bp, Homo sapien
cactcggtgggcctgatgactcgaa

SEQ ID NO: 1805736 - DNA, 25 bp, Homo sapien
gtagagctgtgaccgtggatctcaa

SEQ ID NO: 1805737 - DNA, 25 bp, Homo sapien
tgggaacagctcaaaggtagagctg

SEQ ID NO: 1805738 - DNA, 25 bp, Homo sapien
caaccacgagtcagtcctttgggga

SEQ ID NO: 1805739 - DNA, 25 bp, Homo sapien
atctcaaaggcacccaaccacgagt

SEQ ID NO: 1805740 - DNA, 25 bp, Homo sapien
gaccacctaccagaaagacttagag

SEQ ID NO: 1805741 - DNA, 25 bp, Homo sapien
cagcagtgttctttctagtaacgca

SEQ ID NO: 1805742 - DNA, 25 bp, Homo sapien
ggtctttagagctcctggcatctca

SEQ ID NO: 1805743 - DNA, 25 bp, Homo sapien
gggccagccaggactcggttgactc

SEQ ID NO: 1805744 - DNA, 25 bp, Homo sapien
cagtcgggctcatccatccagggct

SEQ ID NO: 1805745 - DNA, 25 bp, Homo sapien
tgccagcagatccaattaaaggagc

SEQ ID NO: 1805746 - DNA, 25 bp, Homo sapien
gggtgtgtaggacaaacttgccagc

SEQ ID NO: 1805747 - DNA, 25 bp, Homo sapien
tccttccactaagagccagtcgggc

SEQ ID NO: 1805748 - DNA, 25 bp, Homo sapien
tcctctcccagtgggaatgtctcca

SEQ ID NO: 1805749 - DNA, 25 bp, Homo sapien
tgtctccaccgatttggaaatggaa

SEQ ID NO: 1805750 - DNA, 25 bp, Homo sapien
gctgattccctcctgcttacttgag

SEQ ID NO: 1805751 - DNA, 25 bp, Homo sapien
tggaaatggaatttccaggtgctga

SEQ ID NO: 1805752 - DNA, 25 bp, Homo sapien
ttctctcacttcattgggaacttgg

SEQ ID NO: 1805753 - DNA, 25 bp, Homo sapien
tctctcacttcattgggaacttggg

SEQ ID NO: 1805754 - DNA, 25 bp, Homo sapien
gcttctctcacttcattgggaactt

SEQ ID NO: 1805755 - DNA, 25 bp, Homo sapien
tctcacttcattgggaacttgggct

SEQ ID NO: 1805756 - DNA, 25 bp, Homo sapien
atcgtgttacctttatccaagtaga

SEQ ID NO: 1805757 - DNA, 25 bp, Homo sapien
tcgtgttacctttatccaagtagaa

SEQ ID NO: 1805758 - DNA, 25 bp, Homo sapien
aatcgtgttacctttatccaagtag

SEQ ID NO: 1805759 - DNA, 25 bp, Homo sapien
taatcgtgttacctttatccaagta

SEQ ID NO: 1805760 - DNA, 25 bp, Homo sapien
aatgggagatccagaggatacatgc

SEQ ID NO: 1805761 - DNA, 25 bp, Homo sapien
gactggaatccatttgctctggcct

SEQ ID NO: 1805762 - DNA, 25 bp, Homo sapien
ggccgtgaaaggatgagcgcctcct

SEQ ID NO: 1805763 - DNA, 25 bp, Homo sapien
aaggatgagcgcctcctgcccatgg

SEQ ID NO: 1805764 - DNA, 25 bp, Homo sapien
gtgggatgcgcagcagagacaccct

SEQ ID NO: 1805765 - DNA, 25 bp, Homo sapien
gcagagacacccttgcaacttcatc

SEQ ID NO: 1805766 - DNA, 25 bp, Homo sapien
ttgcaacttcatcccgctgctcact

SEQ ID NO: 1805767 - DNA, 25 bp, Homo sapien
tcatggtaaaagtgggatgcgcagc

SEQ ID NO: 1805768 - DNA, 25 bp, Homo sapien
gagttggccttttaaccgtgcacag

SEQ ID NO: 1805769 - DNA, 25 bp, Homo sapien
tcctcacagggtacaaaaagattgg

SEQ ID NO: 1805770 - DNA, 25 bp, Homo sapien
ctaaaaatatgttccgagccagtgg

SEQ ID NO: 1805771 - DNA, 25 bp, Homo sapien
caaacatgataggaactggcagacc

SEQ ID NO: 1805772 - DNA, 25 bp, Homo sapien
cgcagggtttgtgttcgagtttcca

SEQ ID NO: 1805773 - DNA, 25 bp, Homo sapien
agaccgcagggtttgtgttcgagtt

SEQ ID NO: 1805774 - DNA, 25 bp, Homo sapien
gcagggtttgtgttcgagtttccac

SEQ ID NO: 1805775 - DNA, 25 bp, Homo sapien
ggagaccgcagggtttgtgttcgag

SEQ ID NO: 1805776 - DNA, 25 bp, Homo sapien
tcgaccggggcaagatgaatgaccc

SEQ ID NO: 1805777 - DNA, 25 bp, Homo sapien
gaaaaggctctgttcgctcatgcgc

SEQ ID NO: 1805778 - DNA, 25 bp, Homo sapien
aagccaggccgcgaggatgtcgacc

SEQ ID NO: 1805779 - DNA, 25 bp, Homo sapien
tctgttcgctcatgcgcagaaggaa

SEQ ID NO: 1805780 - DNA, 25 bp, Homo sapien
cattcctatggatagcagcagctaa

SEQ ID NO: 1805781 - DNA, 25 bp, Homo sapien
tattccagtgaaaccacgctaagga

SEQ ID NO: 1805782 - DNA, 25 bp, Homo sapien
gactaactccgtgaagagtctctaa

SEQ ID NO: 1805783 - DNA, 25 bp, Homo sapien
cagctcctccgaaatcaaatgtcag

SEQ ID NO: 1805784 - DNA, 25 bp, Homo sapien
cagcctggccatttgacattgaggt

SEQ ID NO: 1805785 - DNA, 25 bp, Homo sapien
ccagcctggccatttgacattgagg

SEQ ID NO: 1805786 - DNA, 25 bp, Homo sapien
cctggccatttgacattgaggtttt

SEQ ID NO: 1805787 - DNA, 25 bp, Homo sapien
gcctggccatttgacattgaggttt

SEQ ID NO: 1805788 - DNA, 25 bp, Homo sapien
cttaactttgtcactctcctcgtct

SEQ ID NO: 1805789 - DNA, 25 bp, Homo sapien
tgcttaactttgtcactctcctcgt

SEQ ID NO: 1805790 - DNA, 25 bp, Homo sapien
taactttgtcactctcctcgtcttt

SEQ ID NO: 1805791 - DNA, 25 bp, Homo sapien
actttgtcactctcctcgtctttca

SEQ ID NO: 1805792 - DNA, 25 bp, Homo sapien
cctctaacacctgccttgagagctg

SEQ ID NO: 1805793 - DNA, 25 bp, Homo sapien
gataatctcatcttcacattacata

SEQ ID NO: 1805794 - DNA, 25 bp, Homo sapien
tttgcccattacctccagttccctg

SEQ ID NO: 1805795 - DNA, 25 bp, Homo sapien
gagagctgtctcgataatctcatct

SEQ ID NO: 1805796 - DNA, 25 bp, Homo sapien
ccaggactgctgacactaggacgta

SEQ ID NO: 1805797 - DNA, 25 bp, Homo sapien
caaacagcctgatgaaaaggagcct

SEQ ID NO: 1805798 - DNA, 25 bp, Homo sapien
caacaacacttgctctaaagctggc

SEQ ID NO: 1805799 - DNA, 25 bp, Homo sapien
ctgtgtcattgcaggaccaagtgga

SEQ ID NO: 1805800 - DNA, 25 bp, Homo sapien
ttcagcttttcagtcagtcccatgc

SEQ ID NO: 1805801 - DNA, 25 bp, Homo sapien
cagcttttcagtcagtcccatgcct

SEQ ID NO: 1805802 - DNA, 25 bp, Homo sapien
tttcagcttttcagtcagtcccatg

SEQ ID NO: 1805803 - DNA, 25 bp, Homo sapien
tcagcttttcagtcagtcccatgcc

SEQ ID NO: 1805804 - DNA, 25 bp, Homo sapien
ctgctctgtgccaggtccttgacct

SEQ ID NO: 1805805 - DNA, 25 bp, Homo sapien
aggcagcaggccctgctctgtgcca

SEQ ID NO: 1805806 - DNA, 25 bp, Homo sapien
cagaggcagcaggccctgctctgtg

SEQ ID NO: 1805807 - DNA, 25 bp, Homo sapien
ggcagcaggccctgctctgtgccag

SEQ ID NO: 1805808 - DNA, 25 bp, Homo sapien
ctcctccagttcctctctgggtgcc

SEQ ID NO: 1805809 - DNA, 25 bp, Homo sapien
tgccagcagcgagccgccttctcct

SEQ ID NO: 1805810 - DNA, 25 bp, Homo sapien
ctgccagcagcgagccgccttctcc

SEQ ID NO: 1805811 - DNA, 25 bp, Homo sapien
ctccagttcctctctgggtgcctgg

SEQ ID NO: 1805812 - DNA, 25 bp, Homo sapien
tcgacagagggacgtggccctgctc

SEQ ID NO: 1805813 - DNA, 25 bp, Homo sapien
gaaagctaaagctgtgatcgacaga

SEQ ID NO: 1805814 - DNA, 25 bp, Homo sapien
atcgacagagggacgtggccctgct

SEQ ID NO: 1805815 - DNA, 25 bp, Homo sapien
taaagctgtgatcgacagagggacg

SEQ ID NO: 1805816 - DNA, 25 bp, Homo sapien
ttaacaccctatgtaaaatggcgcc

SEQ ID NO: 1805817 - DNA, 25 bp, Homo sapien
tgcaagacgacaggtgtgcccctgg

SEQ ID NO: 1805818 - DNA, 25 bp, Homo sapien
aaagcttttccccatacatcggcga

SEQ ID NO: 1805819 - DNA, 25 bp, Homo sapien
tggtgtttgctctcctcggaaagct

SEQ ID NO: 1805820 - DNA, 25 bp, Homo sapien
catcgtgagagtaattcgcggctga

SEQ ID NO: 1805821 - DNA, 25 bp, Homo sapien
aatttcaaatgaacgctgagtagcc

SEQ ID NO: 1805822 - DNA, 25 bp, Homo sapien
tgatctatagaagtcggcagtccct

SEQ ID NO: 1805823 - DNA, 25 bp, Homo sapien
taatatccagttggccatcgtgaga

SEQ ID NO: 1805824 - DNA, 25 bp, Homo sapien
gaatacggaggcaagaggtctttct

SEQ ID NO: 1805825 - DNA, 25 bp, Homo sapien
agaatacggaggcaagaggtctttc

SEQ ID NO: 1805826 - DNA, 25 bp, Homo sapien
aaagaatacggaggcaagaggtctt

SEQ ID NO: 1805827 - DNA, 25 bp, Homo sapien
gaaagaatacggaggcaagaggtct

SEQ ID NO: 1805828 - DNA, 25 bp, Homo sapien
tctagggaagcgatcttgttgcacc

SEQ ID NO: 1805829 - DNA, 25 bp, Homo sapien
tgaaagcaaatcgtagccagacccg

SEQ ID NO: 1805830 - DNA, 25 bp, Homo sapien
taggaaataaagaggctgtgcgcgt

SEQ ID NO: 1805831 - DNA, 25 bp, Homo sapien
tcgaaatgcttccttcgcgatggcg

SEQ ID NO: 1805832 - DNA, 25 bp, Homo sapien
gagccttgcactcgccaggcgggaa

SEQ ID NO: 1805833 - DNA, 25 bp, Homo sapien
caggcgggaagcctgcgcggacacg

SEQ ID NO: 1805834 - DNA, 25 bp, Homo sapien
gaggagccttgcactcgccaggcgg

SEQ ID NO: 1805835 - DNA, 25 bp, Homo sapien
aagcctgcgcggacacgcgtgcgca

SEQ ID NO: 1805836 - DNA, 25 bp, Homo sapien
gggactctgcgccgggcgccctcgg

SEQ ID NO: 1805837 - DNA, 25 bp, Homo sapien
cgggactctgcgccgggcgccctcg

SEQ ID NO: 1805838 - DNA, 25 bp, Homo sapien
ggactctgcgccgggcgccctcggc

SEQ ID NO: 1805839 - DNA, 25 bp, Homo sapien
gtcgcccacggtgcggagggctggt

SEQ ID NO: 1805840 - DNA, 25 bp, Homo sapien
ggtggggcgggagagccgaggataa

SEQ ID NO: 1805841 - DNA, 25 bp, Homo sapien
agagccgaggataagagtttgaggc

SEQ ID NO: 1805842 - DNA, 25 bp, Homo sapien
ggtcttggcccgtcgcccacggtgc

SEQ ID NO: 1805843 - DNA, 25 bp, Homo sapien
ccgtcgggccccgcgagcgcgcggt

SEQ ID NO: 1805844 - DNA, 25 bp, Homo sapien
gtcgggccccgcgagcgcgcggtgg

SEQ ID NO: 1805845 - DNA, 25 bp, Homo sapien
ccccgtcgggccccgcgagcgcgcg

SEQ ID NO: 1805846 - DNA, 25 bp, Homo sapien
cgtcgggccccgcgagcgcgcggtg

SEQ ID NO: 1805847 - DNA, 25 bp, Homo sapien
taacgtcctgttgcttcacggggga

SEQ ID NO: 1805848 - DNA, 25 bp, Homo sapien
agaggaattccagcgggacgcgcca

SEQ ID NO: 1805849 - DNA, 25 bp, Homo sapien
gtgggcatcacgtggcccgacacgt

SEQ ID NO: 1805850 - DNA, 25 bp, Homo sapien
tatccaccccgcagaagagaaattt

SEQ ID NO: 1805851 - DNA, 25 bp, Homo sapien
cacttggcggcggagttcgcctcag

SEQ ID NO: 1805852 - DNA, 25 bp, Homo sapien
ctgctggcgccggacgaggaggagc

SEQ ID NO: 1805853 - DNA, 25 bp, Homo sapien
gctcgctcggctggtcgagcccgct

SEQ ID NO: 1805854 - DNA, 25 bp, Homo sapien
tcggctggccgagtgcgggcgcggg

SEQ ID NO: 1805855 - DNA, 25 bp, Homo sapien
tccagcagccgctcgaggtggttga

SEQ ID NO: 1805856 - DNA, 25 bp, Homo sapien
catcagctgcatcaggtaatctggg

SEQ ID NO: 1805857 - DNA, 25 bp, Homo sapien
tgggcaggctgctcatgagcttctt

SEQ ID NO: 1805858 - DNA, 25 bp, Homo sapien
gtggttgaagatcccgcagaagttg

SEQ ID NO: 1805859 - DNA, 25 bp, Homo sapien
cctctcggaaatgtgaccgccgaag

SEQ ID NO: 1805860 - DNA, 25 bp, Homo sapien
ctctcgggagggctcggcgaggacc

SEQ ID NO: 1805861 - DNA, 25 bp, Homo sapien
gtccgcgcagagcaggctcgggagg

SEQ ID NO: 1805862 - DNA, 25 bp, Homo sapien
gcggcgcggcgtgggcctgctctcg

SEQ ID NO: 1805863 - DNA, 25 bp, Homo sapien
tagtattgaacagctgcaccaactc

SEQ ID NO: 1805864 - DNA, 25 bp, Homo sapien
agctgcaccaactccccaaccacga

SEQ ID NO: 1805865 - DNA, 25 bp, Homo sapien
ttagtattgaacagctgcaccaact

SEQ ID NO: 1805866 - DNA, 25 bp, Homo sapien
tgcaccaactccccaaccacgaaac

SEQ ID NO: 1805867 - DNA, 25 bp, Homo sapien
cagtcgattttcgaaacagactttt

SEQ ID NO: 1805868 - DNA, 25 bp, Homo sapien
ttttttttctctaggcgtccacaga

SEQ ID NO: 1805869 - DNA, 25 bp, Homo sapien
actcctggccagtcgattttcgaaa

SEQ ID NO: 1805870 - DNA, 25 bp, Homo sapien
tggccagtcgattttcgaaacagac

SEQ ID NO: 1805871 - DNA, 25 bp, Homo sapien
tttacacagtcctccggtggtgcct

SEQ ID NO: 1805872 - DNA, 25 bp, Homo sapien
taaagggacagctcaggttttctct

SEQ ID NO: 1805873 - DNA, 25 bp, Homo sapien
gccccttagcgctcacatttggaaa

SEQ ID NO: 1805874 - DNA, 25 bp, Homo sapien
ctttcaagacaacagaactcctggg

SEQ ID NO: 1805875 - DNA, 25 bp, Homo sapien
tacggaagcaaaacgacgagaaagc

SEQ ID NO: 1805876 - DNA, 25 bp, Homo sapien
gaaacttgataacaaggaatcagct

SEQ ID NO: 1805877 - DNA, 25 bp, Homo sapien
aaaggattccttctaaacaactgca

SEQ ID NO: 1805878 - DNA, 25 bp, Homo sapien
ctaaagaacgcaaaagtatgcagct

SEQ ID NO: 1805879 - DNA, 25 bp, Homo sapien
taaccctaaatattgccaaggccta

SEQ ID NO: 1805880 - DNA, 25 bp, Homo sapien
gcaaacgagtactatttccaaccag

SEQ ID NO: 1805881 - DNA, 25 bp, Homo sapien
tgatgggcccaacctaaaatgtatt

SEQ ID NO: 1805882 - DNA, 25 bp, Homo sapien
gaagccgcttattccacactaagga

SEQ ID NO: 1805883 - DNA, 25 bp, Homo sapien
ggctaacaattacaggaagccgctt

SEQ ID NO: 1805884 - DNA, 25 bp, Homo sapien
aatctgtatagcaagagtcctctca

SEQ ID NO: 1805885 - DNA, 25 bp, Homo sapien
tccgtgactgccaatatatagctgc

SEQ ID NO: 1805886 - DNA, 25 bp, Homo sapien
tgctacaactaattcaaggactgtg

SEQ ID NO: 1805887 - DNA, 25 bp, Homo sapien
gacaacagtaattgcttcttcagac

SEQ ID NO: 1805888 - DNA, 25 bp, Homo sapien
aaggaatcacgttccacctacaggg

SEQ ID NO: 1805889 - DNA, 25 bp, Homo sapien
gacagcgacagtgactagtgaagca

SEQ ID NO: 1805890 - DNA, 25 bp, Homo sapien
ggccaggtcaaagcatgagggtttt

SEQ ID NO: 1805891 - DNA, 25 bp, Homo sapien
gaatctgaatcatgcttcggtgaag

SEQ ID NO: 1805892 - DNA, 25 bp, Homo sapien
tatgccaggctctaaggtaggcacc

SEQ ID NO: 1805893 - DNA, 25 bp, Homo sapien
taatctagctattgtgggcccaaaa

SEQ ID NO: 1805894 - DNA, 25 bp, Homo sapien
tctgtgtgacctcctaacataggcc

SEQ ID NO: 1805895 - DNA, 25 bp, Homo sapien
gaaggtagtacctaacacagactgg

SEQ ID NO: 1805896 - DNA, 25 bp, Homo sapien
ttctgcttataataaataatgtgat

SEQ ID NO: 1805897 - DNA, 25 bp, Homo sapien
ctgcttataataaataatgtgatat

SEQ ID NO: 1805898 - DNA, 25 bp, Homo sapien
acattctgcttataataaataatgt

SEQ ID NO: 1805899 - DNA, 25 bp, Homo sapien
cattctgcttataataaataatgtg

SEQ ID NO: 1805900 - DNA, 25 bp, Homo sapien
caagatccagtgctttggcaacaga

SEQ ID NO: 1805901 - DNA, 25 bp, Homo sapien
tatgagaggctcttctgaataccca

SEQ ID NO: 1805902 - DNA, 25 bp, Homo sapien
cagggtctcattagcatatgcacaa

SEQ ID NO: 1805903 - DNA, 25 bp, Homo sapien
taatggcatcactgcaaccacggtg

SEQ ID NO: 1805904 - DNA, 25 bp, Homo sapien
tctgacagctaaacaaatgagcccc

SEQ ID NO: 1805905 - DNA, 25 bp, Homo sapien
tcctaaagggttagccacgtatata

SEQ ID NO: 1805906 - DNA, 25 bp, Homo sapien
gaatacactaacctgtaggtaagga

SEQ ID NO: 1805907 - DNA, 25 bp, Homo sapien
tgagaaaatatcactactcaaaaaa

SEQ ID NO: 1805908 - DNA, 25 bp, Homo sapien
cgtacaaacaggatacctctcaata

SEQ ID NO: 1805909 - DNA, 25 bp, Homo sapien
tctgaatcacatctaagaaggaact

SEQ ID NO: 1805910 - DNA, 25 bp, Homo sapien
aaaagctaacagtatgtcgtaatgc

SEQ ID NO: 1805911 - DNA, 25 bp, Homo sapien
acaactgagttgtaaaggcagaaac

SEQ ID NO: 1805912 - DNA, 25 bp, Homo sapien
tcttgactgcaaatcctggagactt

SEQ ID NO: 1805913 - DNA, 25 bp, Homo sapien
tacctcaggagaccagtattccatg

SEQ ID NO: 1805914 - DNA, 25 bp, Homo sapien
cacaaaaggagtatgcagaacttcc

SEQ ID NO: 1805915 - DNA, 25 bp, Homo sapien
tcctttagagcttaggcccatcagc

SEQ ID NO: 1805916 - DNA, 25 bp, Homo sapien
gaaaatgctaatggacactacctag

SEQ ID NO: 1805917 - DNA, 25 bp, Homo sapien
ctagacctagattcaccctgctgga

SEQ ID NO: 1805918 - DNA, 25 bp, Homo sapien
aataccctgggtagatacttccagc

SEQ ID NO: 1805919 - DNA, 25 bp, Homo sapien
aaacccttaggcaaatattcagtga

SEQ ID NO: 1805920 - DNA, 25 bp, Homo sapien
caaagtaactgctttcaaactggca

SEQ ID NO: 1805921 - DNA, 25 bp, Homo sapien
gaaatatgtttgcttactctaacaa

SEQ ID NO: 1805922 - DNA, 25 bp, Homo sapien
cctagagtacagactattaagtgaa

SEQ ID NO: 1805923 - DNA, 25 bp, Homo sapien
ctgcgcctagcctagagtacagact

SEQ ID NO: 1805924 - DNA, 25 bp, Homo sapien
cacacatatgttaaatccaattaca

SEQ ID NO: 1805925 - DNA, 25 bp, Homo sapien
tatacacacatatgttaaatccaat

SEQ ID NO: 1805926 - DNA, 25 bp, Homo sapien
catatatatgaattattggatttaa

SEQ ID NO: 1805927 - DNA, 25 bp, Homo sapien
tatatgttatacacacatatgttaa

SEQ ID NO: 1805928 - DNA, 25 bp, Homo sapien
cccaactatggatttcactaaaagg

SEQ ID NO: 1805929 - DNA, 25 bp, Homo sapien
tccaaactaaggctcaactgtcagt

SEQ ID NO: 1805930 - DNA, 25 bp, Homo sapien
aacctgttactacttactgcctcgt

SEQ ID NO: 1805931 - DNA, 25 bp, Homo sapien
gtcagttaattctgctccgatgtca

SEQ ID NO: 1805932 - DNA, 25 bp, Homo sapien
aatatggacttgttagttcatctaa

SEQ ID NO: 1805933 - DNA, 25 bp, Homo sapien
tataatatggacttgttagttcatc

SEQ ID NO: 1805934 - DNA, 25 bp, Homo sapien
tttccaagtctaaacgaggccagtc

SEQ ID NO: 1805935 - DNA, 25 bp, Homo sapien
taaacgaggccagtcattccaaatc

SEQ ID NO: 1805936 - DNA, 25 bp, Homo sapien
aaaatattcttgctagtccagagga

SEQ ID NO: 1805937 - DNA, 25 bp, Homo sapien
ccatgtttaaacaagactatagcct

SEQ ID NO: 1805938 - DNA, 25 bp, Homo sapien
cattctctggattaagcccatgttt

SEQ ID NO: 1805939 - DNA, 25 bp, Homo sapien
taaattaacttcaaagcccgagctc

SEQ ID NO: 1805940 - DNA, 25 bp, Homo sapien
tgaacaataggtcccacagcatcag

SEQ ID NO: 1805941 - DNA, 25 bp, Homo sapien
ggtattcttttacaggcacataaag

SEQ ID NO: 1805942 - DNA, 25 bp, Homo sapien
gcaattctgcactccttttctctgt

SEQ ID NO: 1805943 - DNA, 25 bp, Homo sapien
gcacataaagtttctcttgtaactg

SEQ ID NO: 1805944 - DNA, 25 bp, Homo sapien
gaatacctccttccatacacagtca

SEQ ID NO: 1805945 - DNA, 25 bp, Homo sapien
tccattcccatcatattgtaacaga

SEQ ID NO: 1805946 - DNA, 25 bp, Homo sapien
gaaatgtccactccacaagaccagt

SEQ ID NO: 1805947 - DNA, 25 bp, Homo sapien
tacttgctgttcactctgcctagaa

SEQ ID NO: 1805948 - DNA, 25 bp, Homo sapien
ccaggctgggatcctacaggctgaa

SEQ ID NO: 1805949 - DNA, 25 bp, Homo sapien
tactaactatagcaaccaggctggg

SEQ ID NO: 1805950 - DNA, 25 bp, Homo sapien
gagcctaagctgatttgcaaaccca

SEQ ID NO: 1805951 - DNA, 25 bp, Homo sapien
gataacttactgaattggcccctct

SEQ ID NO: 1805952 - DNA, 25 bp, Homo sapien
gccctaaatatacccttacagagtg

SEQ ID NO: 1805953 - DNA, 25 bp, Homo sapien
gataaaccatagacaaacgtttctg

SEQ ID NO: 1805954 - DNA, 25 bp, Homo sapien
gaaatatttggtacacaacaggccc

SEQ ID NO: 1805955 - DNA, 25 bp, Homo sapien
tggagattgaacacctatgagtaga

SEQ ID NO: 1805956 - DNA, 25 bp, Homo sapien
tgagaagcagatttctcctcgattt

SEQ ID NO: 1805957 - DNA, 25 bp, Homo sapien
cctggaatatggatagcactgagaa

SEQ ID NO: 1805958 - DNA, 25 bp, Homo sapien
tttccatattacatactttggctat

SEQ ID NO: 1805959 - DNA, 25 bp, Homo sapien
gcagatttctcctcgatttccatat

SEQ ID NO: 1805960 - DNA, 25 bp, Homo sapien
tactcccggagacactgctctctca

SEQ ID NO: 1805961 - DNA, 25 bp, Homo sapien
ctctctcaaattgggctgaaagtag

SEQ ID NO: 1805962 - DNA, 25 bp, Homo sapien
tgctctctcaaattgggctgaaagt

SEQ ID NO: 1805963 - DNA, 25 bp, Homo sapien
actgctctctcaaattgggctgaaa

SEQ ID NO: 1805964 - DNA, 25 bp, Homo sapien
gctagtagctgaaaaactcaacctc

SEQ ID NO: 1805965 - DNA, 25 bp, Homo sapien
ttaggtcacctacttataaacagga

SEQ ID NO: 1805966 - DNA, 25 bp, Homo sapien
taaaggcacgtgatctcaaaaacta

SEQ ID NO: 1805967 - DNA, 25 bp, Homo sapien
tcaacatccctaaagtaaaggcacg

SEQ ID NO: 1805968 - DNA, 25 bp, Homo sapien
aggaatttgcccgtgaagctgtctg

SEQ ID NO: 1805969 - DNA, 25 bp, Homo sapien
tgatcatggtgtacgctccttttaa

SEQ ID NO: 1805970 - DNA, 25 bp, Homo sapien
ggttagtccaactaaaggtctgtca

SEQ ID NO: 1805971 - DNA, 25 bp, Homo sapien
tctgtttaagactctggcatccact

SEQ ID NO: 1805972 - DNA, 25 bp, Homo sapien
tgttatacttttcagcgagcaggca

SEQ ID NO: 1805973 - DNA, 25 bp, Homo sapien
tgtgtagtcatggtacccttgtcaa

SEQ ID NO: 1805974 - DNA, 25 bp, Homo sapien
tatgtacggtgtaagtaagggtcca

SEQ ID NO: 1805975 - DNA, 25 bp, Homo sapien
cgattaggtgctttctgtggttcca

SEQ ID NO: 1805976 - DNA, 25 bp, Homo sapien
ttttcctggaattgctcagctggcc

SEQ ID NO: 1805977 - DNA, 25 bp, Homo sapien
tactggcactttttgagcagttgct

SEQ ID NO: 1805978 - DNA, 25 bp, Homo sapien
gaaaatctatcaacatgcctggcct

SEQ ID NO: 1805979 - DNA, 25 bp, Homo sapien
tcagctggcctgcattatcttgtca

SEQ ID NO: 1805980 - DNA, 25 bp, Homo sapien
tctttctcataatacacgtctcagg

SEQ ID NO: 1805981 - DNA, 25 bp, Homo sapien
ccaataagatctgaaacgatgtctc

SEQ ID NO: 1805982 - DNA, 25 bp, Homo sapien
aagaacctgcttttgttgactgagg

SEQ ID NO: 1805983 - DNA, 25 bp, Homo sapien
tccactctccagataggcttgtata

SEQ ID NO: 1805984 - DNA, 25 bp, Homo sapien
agggctttttctgctaccgtatatc

SEQ ID NO: 1805985 - DNA, 25 bp, Homo sapien
ctgtttctggtatatgaacatataa

SEQ ID NO: 1805986 - DNA, 25 bp, Homo sapien
gttgttgttaagattcattcctaca

SEQ ID NO: 1805987 - DNA, 25 bp, Homo sapien
agagcttttttgattgtgcctttac

SEQ ID NO: 1805988 - DNA, 25 bp, Homo sapien
taggtccaaggattctcccaacaaa

SEQ ID NO: 1805989 - DNA, 25 bp, Homo sapien
ggaccatgattttacatccggtttc

SEQ ID NO: 1805990 - DNA, 25 bp, Homo sapien
ctcattgagcctttgcctcggacca

SEQ ID NO: 1805991 - DNA, 25 bp, Homo sapien
tggctgtaagtcctctaggtccaag

SEQ ID NO: 1805992 - DNA, 25 bp, Homo sapien
cttaaaagacatgaggcggagggct

SEQ ID NO: 1805993 - DNA, 25 bp, Homo sapien
tagatagccccttcaagtcaatgga

SEQ ID NO: 1805994 - DNA, 25 bp, Homo sapien
gattcagcgtactggtctaacacag

SEQ ID NO: 1805995 - DNA, 25 bp, Homo sapien
taagttccacaaagcgattcagcgt

SEQ ID NO: 1805996 - DNA, 25 bp, Homo sapien
ttactgagtaccaactacatggcag

SEQ ID NO: 1805997 - DNA, 25 bp, Homo sapien
ggccttaaagcacaacactaaagac

SEQ ID NO: 1805998 - DNA, 25 bp, Homo sapien
tccaatcttcccctagagaatgaat

SEQ ID NO: 1805999 - DNA, 25 bp, Homo sapien
tacatggcaggtatgtacaattcta

SEQ ID NO: 1806000 - DNA, 25 bp, Homo sapien
caaataagactactggaggacaaaa

SEQ ID NO: 1806001 - DNA, 25 bp, Homo sapien
tcccatgatagctagtaacaaaagt

SEQ ID NO: 1806002 - DNA, 25 bp, Homo sapien
caaaaacttcataaggccgcagtat

SEQ ID NO: 1806003 - DNA, 25 bp, Homo sapien
gacactagtgttttgtagaagtcac

SEQ ID NO: 1806004 - DNA, 25 bp, Homo sapien
ccaaccatttgactgagaaactatt

SEQ ID NO: 1806005 - DNA, 25 bp, Homo sapien
tttgagtggccaaagaacacgcctt

SEQ ID NO: 1806006 - DNA, 25 bp, Homo sapien
ccttaattcacattatccatctgag

SEQ ID NO: 1806007 - DNA, 25 bp, Homo sapien
tgagtatttcacagcttgccataaa

SEQ ID NO: 1806008 - DNA, 25 bp, Homo sapien
cttctcatagctccattaggccatg

SEQ ID NO: 1806009 - DNA, 25 bp, Homo sapien
tcatagctccattaggccatgaccc

SEQ ID NO: 1806010 - DNA, 25 bp, Homo sapien
catagctccattaggccatgaccca

SEQ ID NO: 1806011 - DNA, 25 bp, Homo sapien
acactgctacaaaggtaccacctga

SEQ ID NO: 1806012 - DNA, 25 bp, Homo sapien
cacactgctacaaaggtaccacctg

SEQ ID NO: 1806013 - DNA, 25 bp, Homo sapien
cactgctacaaaggtaccacctgag

SEQ ID NO: 1806014 - DNA, 25 bp, Homo sapien
ctgctacaaaggtaccacctgagac

SEQ ID NO: 1806015 - DNA, 25 bp, Homo sapien
cacactttgtttctcaggtgccaac

SEQ ID NO: 1806016 - DNA, 25 bp, Homo sapien
tcttgattcaattgagggctgcaca

SEQ ID NO: 1806017 - DNA, 25 bp, Homo sapien
ctgggttggaatgagtgccacctaa

SEQ ID NO: 1806018 - DNA, 25 bp, Homo sapien
tacatatgtcagaccacttcacagg

SEQ ID NO: 1806019 - DNA, 25 bp, Homo sapien
tacgtccacgtgtacacatacaaga

SEQ ID NO: 1806020 - DNA, 25 bp, Homo sapien
tgagctcagggcaattggcccatct

SEQ ID NO: 1806021 - DNA, 25 bp, Homo sapien
cctttgtaccttatggcccagcatg

SEQ ID NO: 1806022 - DNA, 25 bp, Homo sapien
tatgattgatatgtcctcctgatga

SEQ ID NO: 1806023 - DNA, 25 bp, Homo sapien
catctatatccatgaagaatactga

SEQ ID NO: 1806024 - DNA, 25 bp, Homo sapien
ccatatgatcgacagtgatgtctcc

SEQ ID NO: 1806025 - DNA, 25 bp, Homo sapien
tattagtgtggccatttaggcttca

SEQ ID NO: 1806026 - DNA, 25 bp, Homo sapien
tttagtatcacagtaacaatggtag

SEQ ID NO: 1806027 - DNA, 25 bp, Homo sapien
cagcacgtggtcaactggacaatat

SEQ ID NO: 1806028 - DNA, 25 bp, Homo sapien
taatttccagctcgattccactatg

SEQ ID NO: 1806029 - DNA, 25 bp, Homo sapien
gttacttgatacacagagacttagg

SEQ ID NO: 1806030 - DNA, 25 bp, Homo sapien
tgaagctttatggaccagcacgtgg

SEQ ID NO: 1806031 - DNA, 25 bp, Homo sapien
tgactacttttgtcgctatgctact

SEQ ID NO: 1806032 - DNA, 25 bp, Homo sapien
gaaagtccagtgactacttttgtcg

SEQ ID NO: 1806033 - DNA, 25 bp, Homo sapien
ttcacactgaacagaaagtccagtg

SEQ ID NO: 1806034 - DNA, 25 bp, Homo sapien
cttcacactgaacagaaagtccagt

SEQ ID NO: 1806035 - DNA, 25 bp, Homo sapien
catgggctgatattcggatgacata

SEQ ID NO: 1806036 - DNA, 25 bp, Homo sapien
ggtatctacaacacatcccagcgat

SEQ ID NO: 1806037 - DNA, 25 bp, Homo sapien
caaagcatggtgctccttgtgcaca

SEQ ID NO: 1806038 - DNA, 25 bp, Homo sapien
gcatacctctatactcatgggctga

SEQ ID NO: 1806039 - DNA, 25 bp, Homo sapien
aagtatgctctaattacaatatctg

SEQ ID NO: 1806040 - DNA, 25 bp, Homo sapien
tgaatcgctgccctatgaagtttaa

SEQ ID NO: 1806041 - DNA, 25 bp, Homo sapien
caatatctgtttgaacaacaaaggg

SEQ ID NO: 1806042 - DNA, 25 bp, Homo sapien
tttgaaaccactgtatacagtgatg

SEQ ID NO: 1806043 - DNA, 25 bp, Homo sapien
cttacataaaattcctctagtcttt

SEQ ID NO: 1806044 - DNA, 25 bp, Homo sapien
taaatgagagactcacctatcaaat

SEQ ID NO: 1806045 - DNA, 25 bp, Homo sapien
ttagatcttaatatacaatgcgtat

SEQ ID NO: 1806046 - DNA, 25 bp, Homo sapien
caaaaaggataaatctgtagctatt

SEQ ID NO: 1806047 - DNA, 25 bp, Homo sapien
caggcagtaagtgttgtaccaccaa

SEQ ID NO: 1806048 - DNA, 25 bp, Homo sapien
tatcaaacactgcttgccaaggaca

SEQ ID NO: 1806049 - DNA, 25 bp, Homo sapien
tataacagcaaagtgacagcacagg

SEQ ID NO: 1806050 - DNA, 25 bp, Homo sapien
tagggtgcaataacaacagaggttc

SEQ ID NO: 1806051 - DNA, 25 bp, Homo sapien
aagtttatggaagctatctatcgcc

SEQ ID NO: 1806052 - DNA, 25 bp, Homo sapien
tgctgtattactggccattccccaa

SEQ ID NO: 1806053 - DNA, 25 bp, Homo sapien
gggttcatacctccctgctgcaaat

SEQ ID NO: 1806054 - DNA, 25 bp, Homo sapien
tgttcattcacttcccacgataggc

SEQ ID NO: 1806055 - DNA, 25 bp, Homo sapien
tcagagagtcctgggagagctgcca

SEQ ID NO: 1806056 - DNA, 25 bp, Homo sapien
gaaccctgatcgttgcatacttgag

SEQ ID NO: 1806057 - DNA, 25 bp, Homo sapien
gttgggaacaactgaggtgagccta

SEQ ID NO: 1806058 - DNA, 25 bp, Homo sapien
ccatgaggagactaagcaagagtcc

SEQ ID NO: 1806059 - DNA, 25 bp, Homo sapien
tgggcttgcctctattttgctcctc

SEQ ID NO: 1806060 - DNA, 25 bp, Homo sapien
tgcaggtaccaataatttcttcact

SEQ ID NO: 1806061 - DNA, 25 bp, Homo sapien
caactgctctcttcaatttgatttc

SEQ ID NO: 1806062 - DNA, 25 bp, Homo sapien
agtgattagtacatgtaaatcttca

SEQ ID NO: 1806063 - DNA, 25 bp, Homo sapien
cagggaaaggtaacaatagactgca

SEQ ID NO: 1806064 - DNA, 25 bp, Homo sapien
tctcagagtaagaaggcaccactaa

SEQ ID NO: 1806065 - DNA, 25 bp, Homo sapien
gggcatctgctattcaaactgtcaa

SEQ ID NO: 1806066 - DNA, 25 bp, Homo sapien
gccccagaagaaggaataccagttg

SEQ ID NO: 1806067 - DNA, 25 bp, Homo sapien
caacattacggctggacagacggta

SEQ ID NO: 1806068 - DNA, 25 bp, Homo sapien
tctgtctgtatggaatgtcacccga

SEQ ID NO: 1806069 - DNA, 25 bp, Homo sapien
tttttatcaccaaggagcctgatca

SEQ ID NO: 1806070 - DNA, 25 bp, Homo sapien
tatgaccctgatatagaactggatt

SEQ ID NO: 1806071 - DNA, 25 bp, Homo sapien
tgctacttacccaccatcagaaggg

SEQ ID NO: 1806072 - DNA, 25 bp, Homo sapien
gttcaatgcaccctactataaagtg

SEQ ID NO: 1806073 - DNA, 25 bp, Homo sapien
tatgagttaaaacacaggcacatta

SEQ ID NO: 1806074 - DNA, 25 bp, Homo sapien
ctattattctatgcccagggtccct

SEQ ID NO: 1806075 - DNA, 25 bp, Homo sapien
ggaacagaaatcaaactaagacact

SEQ ID NO: 1806076 - DNA, 25 bp, Homo sapien
ccttaccatgtagtgcctgcgctgc

SEQ ID NO: 1806077 - DNA, 25 bp, Homo sapien
gactgcacggtcaaagcttcattta

SEQ ID NO: 1806078 - DNA, 25 bp, Homo sapien
caagtaaagaacaccatgtagtatg

SEQ ID NO: 1806079 - DNA, 25 bp, Homo sapien
atggattattacaggaagagaactg

SEQ ID NO: 1806080 - DNA, 25 bp, Homo sapien
gagttagaagtaattcaactctgga

SEQ ID NO: 1806081 - DNA, 25 bp, Homo sapien
aaaaaggcaactgctgtggtaccag

SEQ ID NO: 1806082 - DNA, 25 bp, Homo sapien
ggatttgccctgttagaactcagtt

SEQ ID NO: 1806083 - DNA, 25 bp, Homo sapien
tataataatagccacatagcttccc

SEQ ID NO: 1806084 - DNA, 25 bp, Homo sapien
tcaacaaggtataaacagatccact

SEQ ID NO: 1806085 - DNA, 25 bp, Homo sapien
gacaatatgttctgcctctcttcaa

SEQ ID NO: 1806086 - DNA, 25 bp, Homo sapien
taacaaagatttgtaccttaggaca

SEQ ID NO: 1806087 - DNA, 25 bp, Homo sapien
taaagcaaggtagagggaaagtgtc

SEQ ID NO: 1806088 - DNA, 25 bp, Homo sapien
ctctagaaccagtctcatcgtgcag

SEQ ID NO: 1806089 - DNA, 25 bp, Homo sapien
tctagaaccagtctcatcgtgcagc

SEQ ID NO: 1806090 - DNA, 25 bp, Homo sapien
aaccagtctcatcgtgcagcccctt

SEQ ID NO: 1806091 - DNA, 25 bp, Homo sapien
tagaaccagtctcatcgtgcagccc

SEQ ID NO: 1806092 - DNA, 25 bp, Homo sapien
catgatgatcagttggacacagagg

SEQ ID NO: 1806093 - DNA, 25 bp, Homo sapien
gcaataaagtagacggtggctccat

SEQ ID NO: 1806094 - DNA, 25 bp, Homo sapien
gctccgacagctttggcagacagaa

SEQ ID NO: 1806095 - DNA, 25 bp, Homo sapien
taagaactctcacgcatactggtct

SEQ ID NO: 1806096 - DNA, 25 bp, Homo sapien
gcccagccatcatcaactatgttta

SEQ ID NO: 1806097 - DNA, 25 bp, Homo sapien
tttacgcttcctaacaaatgtgtgg

SEQ ID NO: 1806098 - DNA, 25 bp, Homo sapien
ggatacaaacaggtcacgtttaatg

SEQ ID NO: 1806099 - DNA, 25 bp, Homo sapien
tagacactagatcttcattatccaa

SEQ ID NO: 1806100 - DNA, 25 bp, Homo sapien
gcctctggaaccatcgctccacact

SEQ ID NO: 1806101 - DNA, 25 bp, Homo sapien
tcgctccacactctatctccataag

SEQ ID NO: 1806102 - DNA, 25 bp, Homo sapien
ccataagttcaattgacttaatttt

SEQ ID NO: 1806103 - DNA, 25 bp, Homo sapien
tatattatcgtacccgtcaaccatt

SEQ ID NO: 1806104 - DNA, 25 bp, Homo sapien
gatgagggtccatctatcaaagtct

SEQ ID NO: 1806105 - DNA, 25 bp, Homo sapien
gtgtagagatagaactaactgcccc

SEQ ID NO: 1806106 - DNA, 25 bp, Homo sapien
tgagtatcaccactcccaaagtaag

SEQ ID NO: 1806107 - DNA, 25 bp, Homo sapien
ggtcctcaaataatgccactgcttt

SEQ ID NO: 1806108 - DNA, 25 bp, Homo sapien
taaaaaaccgtatattctgctctct

SEQ ID NO: 1806109 - DNA, 25 bp, Homo sapien
caccttgaattcctaggttcgagcc

SEQ ID NO: 1806110 - DNA, 25 bp, Homo sapien
tcctttcaatctaattagcaagtgc

SEQ ID NO: 1806111 - DNA, 25 bp, Homo sapien
cacccagccagcaactatcattttg

SEQ ID NO: 1806112 - DNA, 25 bp, Homo sapien
gcatctctgtaggtgccattcagaa

SEQ ID NO: 1806113 - DNA, 25 bp, Homo sapien
taggtgccattcagaatcgcaagct

SEQ ID NO: 1806114 - DNA, 25 bp, Homo sapien
cagaatcgcaagctccatcagctgc

SEQ ID NO: 1806115 - DNA, 25 bp, Homo sapien
cattcagaatcgcaagctccatcag

SEQ ID NO: 1806116 - DNA, 25 bp, Homo sapien
aatgatccttggagcagcctgggct

SEQ ID NO: 1806117 - DNA, 25 bp, Homo sapien
tatagattaaaccagcttcgggccc

SEQ ID NO: 1806118 - DNA, 25 bp, Homo sapien
gaggagttccgtttggcatgacagc

SEQ ID NO: 1806119 - DNA, 25 bp, Homo sapien
ttcgggccctggaggaactattgca

SEQ ID NO: 1806120 - DNA, 25 bp, Homo sapien
gagcaaaaatatttataaagagaat

SEQ ID NO: 1806121 - DNA, 25 bp, Homo sapien
aaaaatatttataaagagaatgttg

SEQ ID NO: 1806122 - DNA, 25 bp, Homo sapien
ctgagggagcaaaaatatttataaa

SEQ ID NO: 1806123 - DNA, 25 bp, Homo sapien
gcaaaaatatttataaagagaatgt

SEQ ID NO: 1806124 - DNA, 25 bp, Homo sapien
ggtgggacctaaaactcagaatgac

SEQ ID NO: 1806125 - DNA, 25 bp, Homo sapien
tgaacctcagttaccaaagtggatc

SEQ ID NO: 1806126 - DNA, 25 bp, Homo sapien
tacaccaaatgatgaaactgccaga

SEQ ID NO: 1806127 - DNA, 25 bp, Homo sapien
gaattttataaagcgctcagactac

SEQ ID NO: 1806128 - DNA, 25 bp, Homo sapien
aaatatcaggcatgactggcatttc

SEQ ID NO: 1806129 - DNA, 25 bp, Homo sapien
tcaatgggctgaaatatcaggcatg

SEQ ID NO: 1806130 - DNA, 25 bp, Homo sapien
tgggctgaaatatcaggcatgactg

SEQ ID NO: 1806131 - DNA, 25 bp, Homo sapien
gctgaaatatcaggcatgactggca

SEQ ID NO: 1806132 - DNA, 25 bp, Homo sapien
ccacgtggcaaaatcagggagatct

SEQ ID NO: 1806133 - DNA, 25 bp, Homo sapien
caaagggcacctgagtgcatgcaca

SEQ ID NO: 1806134 - DNA, 25 bp, Homo sapien
gatcttgcgctgaaagtgctggaac

SEQ ID NO: 1806135 - DNA, 25 bp, Homo sapien
taactcctcgggaacagatgctgtg

SEQ ID NO: 1806136 - DNA, 25 bp, Homo sapien
tagcctttcgttgggaaagccatac

SEQ ID NO: 1806137 - DNA, 25 bp, Homo sapien
ttagcctttcgttgggaaagccata

SEQ ID NO: 1806138 - DNA, 25 bp, Homo sapien
gatgagggttcagttaagaccgttc

SEQ ID NO: 1806139 - DNA, 25 bp, Homo sapien
tgcagcaggactacttaaataacgc

SEQ ID NO: 1806140 - DNA, 25 bp, Homo sapien
taagaaacacgttaaggcacagtag

SEQ ID NO: 1806141 - DNA, 25 bp, Homo sapien
gtcactgactgctaggctaagcttt

SEQ ID NO: 1806142 - DNA, 25 bp, Homo sapien
tggacacgcatatcgtgccttcgaa

SEQ ID NO: 1806143 - DNA, 25 bp, Homo sapien
tctgcggtcacaatcctttggtaag

SEQ ID NO: 1806144 - DNA, 25 bp, Homo sapien
cctttggtaaggatggacacgcata

SEQ ID NO: 1806145 - DNA, 25 bp, Homo sapien
ccttcgaactttagtagccaccgca

SEQ ID NO: 1806146 - DNA, 25 bp, Homo sapien
ttatggacacccaacgcatttctta

SEQ ID NO: 1806147 - DNA, 25 bp, Homo sapien
caaattttatggacacccaacgcat

SEQ ID NO: 1806148 - DNA, 25 bp, Homo sapien
ttgcaaattttatggacacccaacg

SEQ ID NO: 1806149 - DNA, 25 bp, Homo sapien
aggtgtggtgttgcaaattttatgg

SEQ ID NO: 1806150 - DNA, 25 bp, Homo sapien
caaagcccagaaggtgtaatgttca

SEQ ID NO: 1806151 - DNA, 25 bp, Homo sapien
ggtgtgtcaccatgcaagaccatac

SEQ ID NO: 1806152 - DNA, 25 bp, Homo sapien
catggttatatgtccaagggctgag

SEQ ID NO: 1806153 - DNA, 25 bp, Homo sapien
ggtaatcacataaagcaggtaggtc

SEQ ID NO: 1806154 - DNA, 25 bp, Homo sapien
tggcctcatgatacaaagcgatact

SEQ ID NO: 1806155 - DNA, 25 bp, Homo sapien
cagtgtaggcaacatcatgggaacc

SEQ ID NO: 1806156 - DNA, 25 bp, Homo sapien
taaactgtagtctagcagtgtaggc

SEQ ID NO: 1806157 - DNA, 25 bp, Homo sapien
tttgcactagccaacactttccagt

SEQ ID NO: 1806158 - DNA, 25 bp, Homo sapien
gacaaactgattgacaccatctaca

SEQ ID NO: 1806159 - DNA, 25 bp, Homo sapien
tagttagtagcagtcaatgaaggaa

SEQ ID NO: 1806160 - DNA, 25 bp, Homo sapien
gctagtgacggcttaatgacaacat

SEQ ID NO: 1806161 - DNA, 25 bp, Homo sapien
aacataaactctgggccaaacaagg

SEQ ID NO: 1806162 - DNA, 25 bp, Homo sapien
caccaatgatatccctgaccgaagg

SEQ ID NO: 1806163 - DNA, 25 bp, Homo sapien
taactgatcagcaggcaggcatggt

SEQ ID NO: 1806164 - DNA, 25 bp, Homo sapien
tatacagcaaataggcaagcatggc

SEQ ID NO: 1806165 - DNA, 25 bp, Homo sapien
tggtaagacgaacggacaagtgcct

SEQ ID NO: 1806166 - DNA, 25 bp, Homo sapien
tgtccaggtataacatagttgagat

SEQ ID NO: 1806167 - DNA, 25 bp, Homo sapien
aatgataatactgagaaccaaggca

SEQ ID NO: 1806168 - DNA, 25 bp, Homo sapien
tgtttttaacaactatcacctcaag

SEQ ID NO: 1806169 - DNA, 25 bp, Homo sapien
gatgaaactggatcaaatactggta

SEQ ID NO: 1806170 - DNA, 25 bp, Homo sapien
caataggttggttatggtacataca

SEQ ID NO: 1806171 - DNA, 25 bp, Homo sapien
gataacatacaagcgacactcccat

SEQ ID NO: 1806172 - DNA, 25 bp, Homo sapien
aatacatgtcagctgtacgataaca

SEQ ID NO: 1806173 - DNA, 25 bp, Homo sapien
catctacccacgctaaaaaattaca

SEQ ID NO: 1806174 - DNA, 25 bp, Homo sapien
catataaaggttaataaacagacaa

SEQ ID NO: 1806175 - DNA, 25 bp, Homo sapien
aggttaataaacagacaaagtccag

SEQ ID NO: 1806176 - DNA, 25 bp, Homo sapien
acatataaaggttaataaacagaca

SEQ ID NO: 1806177 - DNA, 25 bp, Homo sapien
taataaacagacaaagtccagagtt

SEQ ID NO: 1806178 - DNA, 25 bp, Homo sapien
gtcacgttcttcagggttagtccag

SEQ ID NO: 1806179 - DNA, 25 bp, Homo sapien
cactggtgcgtatgggagtaactac

SEQ ID NO: 1806180 - DNA, 25 bp, Homo sapien
catgaactgttatggcaacggaaac

SEQ ID NO: 1806181 - DNA, 25 bp, Homo sapien
agaaaccttaggctgtcacacgtga

SEQ ID NO: 1806182 - DNA, 25 bp, Homo sapien
ggaggataagcagcactttccagct

SEQ ID NO: 1806183 - DNA, 25 bp, Homo sapien
ctttattctcatattgatacatgca

SEQ ID NO: 1806184 - DNA, 25 bp, Homo sapien
gctgcagttggcttgagaggatgaa

SEQ ID NO: 1806185 - DNA, 25 bp, Homo sapien
taaaattgaaagtgtgcgttcttta

SEQ ID NO: 1806186 - DNA, 25 bp, Homo sapien
ttcaacaggttaatgacactagtcc

SEQ ID NO: 1806187 - DNA, 25 bp, Homo sapien
tggatgcacagtccaactatggaac

SEQ ID NO: 1806188 - DNA, 25 bp, Homo sapien
actaaggttccggtgagcaagagga

SEQ ID NO: 1806189 - DNA, 25 bp, Homo sapien
tcgtaaaggtttcacactactggaa

SEQ ID NO: 1806190 - DNA, 25 bp, Homo sapien
tctgcacgacggtgctatggatcct

SEQ ID NO: 1806191 - DNA, 25 bp, Homo sapien
caactgtgggctactttaacaaagc

SEQ ID NO: 1806192 - DNA, 25 bp, Homo sapien
ctttgggctgctagtctgcacgacg

SEQ ID NO: 1806193 - DNA, 25 bp, Homo sapien
ggtgctatggatcctgcaactgtgg

SEQ ID NO: 1806194 - DNA, 25 bp, Homo sapien
gcaaaacaccgtataagccaaacca

SEQ ID NO: 1806195 - DNA, 25 bp, Homo sapien
tcaccatcctggaccaggaaacaag

SEQ ID NO: 1806196 - DNA, 25 bp, Homo sapien
tttgggctttctagacactttgatc

SEQ ID NO: 1806197 - DNA, 25 bp, Homo sapien
ccaagtgtgacactagagacaggaa

SEQ ID NO: 1806198 - DNA, 25 bp, Homo sapien
tggaactgttgtgtagcatgtaaaa

SEQ ID NO: 1806199 - DNA, 25 bp, Homo sapien
taaaattcaggtttcaagcacagcc

SEQ ID NO: 1806200 - DNA, 25 bp, Homo sapien
gagggtatacagttcacaaaatagc

SEQ ID NO: 1806201 - DNA, 25 bp, Homo sapien
tgacagttctaaggtaaaggagtga

SEQ ID NO: 1806202 - DNA, 25 bp, Homo sapien
cacacggccgtctgggtatttatta

SEQ ID NO: 1806203 - DNA, 25 bp, Homo sapien
tcatttctctccataccgggttgct

SEQ ID NO: 1806204 - DNA, 25 bp, Homo sapien
acgtacattattggtgctgtccaca

SEQ ID NO: 1806205 - DNA, 25 bp, Homo sapien
gacttgcattgcgttccgctcatga

SEQ ID NO: 1806206 - DNA, 25 bp, Homo sapien
tggcttcgacaccaatatcagggct

SEQ ID NO: 1806207 - DNA, 25 bp, Homo sapien
gctggcacggccttgataacatgca

SEQ ID NO: 1806208 - DNA, 25 bp, Homo sapien
ataacatgcacgaaccaggctctgg

SEQ ID NO: 1806209 - DNA, 25 bp, Homo sapien
tgcactttagaacctgtgagcgact

SEQ ID NO: 1806210 - DNA, 25 bp, Homo sapien
taaaatatgagtaaggagtacagtt

SEQ ID NO: 1806211 - DNA, 25 bp, Homo sapien
aaatatgagtaaggagtacagtttc

SEQ ID NO: 1806212 - DNA, 25 bp, Homo sapien
atatgagtaaggagtacagtttcac

SEQ ID NO: 1806213 - DNA, 25 bp, Homo sapien
ttaaaatatgagtaaggagtacagt

SEQ ID NO: 1806214 - DNA, 25 bp, Homo sapien
cctggcctgaacgtcttattattta

SEQ ID NO: 1806215 - DNA, 25 bp, Homo sapien
tggcctgaacgtcttattatttaaa

SEQ ID NO: 1806216 - DNA, 25 bp, Homo sapien
tggtggtggggccttattcctaata

SEQ ID NO: 1806217 - DNA, 25 bp, Homo sapien
tgcctggcctgaacgtcttattatt

SEQ ID NO: 1806218 - DNA, 25 bp, Homo sapien
tgggcaccccaaagtacatgagttt

SEQ ID NO: 1806219 - DNA, 25 bp, Homo sapien
tatcttactcaccatgtaacatggg

SEQ ID NO: 1806220 - DNA, 25 bp, Homo sapien
catttgtggtaggagtttagctaga

SEQ ID NO: 1806221 - DNA, 25 bp, Homo sapien
tgactcacttcccaatgactccagg

SEQ ID NO: 1806222 - DNA, 25 bp, Homo sapien
cagggagtattattgttagtactac

SEQ ID NO: 1806223 - DNA, 25 bp, Homo sapien
ggcgctagactccttgcaaagcaaa

SEQ ID NO: 1806224 - DNA, 25 bp, Homo sapien
ctgttaaagaagcaggcccatgtgc

SEQ ID NO: 1806225 - DNA, 25 bp, Homo sapien
acattcttcagaggcgctagactcc

SEQ ID NO: 1806226 - DNA, 25 bp, Homo sapien
cttctgttcacccttactccttggc

SEQ ID NO: 1806227 - DNA, 25 bp, Homo sapien
ttctgttcacccttactccttggct

SEQ ID NO: 1806228 - DNA, 25 bp, Homo sapien
tctgttcacccttactccttggctc

SEQ ID NO: 1806229 - DNA, 25 bp, Homo sapien
cgttcatgccggcttcagactgaag

SEQ ID NO: 1806230 - DNA, 25 bp, Homo sapien
tcttttccagcctacgttcatgccg

SEQ ID NO: 1806231 - DNA, 25 bp, Homo sapien
tgaggtttcttcacgacaagcagtc

SEQ ID NO: 1806232 - DNA, 25 bp, Homo sapien
tgtgactgtagtgatctcttttcca

SEQ ID NO: 1806233 - DNA, 25 bp, Homo sapien
catcacataaaggcggggcgtttgg

SEQ ID NO: 1806234 - DNA, 25 bp, Homo sapien
gagtggctggagaagtcggaataga

SEQ ID NO: 1806235 - DNA, 25 bp, Homo sapien
gggatgggtggacaaggcgccgctg

SEQ ID NO: 1806236 - DNA, 25 bp, Homo sapien
gctgaagggcctttgtggaaaaaga

SEQ ID NO: 1806237 - DNA, 25 bp, Homo sapien
tcttgctaaaagcagccaagagtag

SEQ ID NO: 1806238 - DNA, 25 bp, Homo sapien
caagagtagaccacacacacccaaa

SEQ ID NO: 1806239 - DNA, 25 bp, Homo sapien
taggcctgtggtccaccttccaagt

SEQ ID NO: 1806240 - DNA, 25 bp, Homo sapien
gctgggtaggcctgtggtccacctt

SEQ ID NO: 1806241 - DNA, 25 bp, Homo sapien
cagagggtcacctaaagtgaggccc

SEQ ID NO: 1806242 - DNA, 25 bp, Homo sapien
gcaagcccactttctacattaggga

SEQ ID NO: 1806243 - DNA, 25 bp, Homo sapien
gggtcattggatccccattccatgg

SEQ ID NO: 1806244 - DNA, 25 bp, Homo sapien
tccaagcagagggtcacctaaagtg

SEQ ID NO: 1806245 - DNA, 25 bp, Homo sapien
tctttgtattcccactgggctggac

SEQ ID NO: 1806246 - DNA, 25 bp, Homo sapien
tttgtattcccactgggctggacat

SEQ ID NO: 1806247 - DNA, 25 bp, Homo sapien
tgtattcccactgggctggacattt

SEQ ID NO: 1806248 - DNA, 25 bp, Homo sapien
ctctttgtattcccactgggctgga

SEQ ID NO: 1806249 - DNA, 25 bp, Homo sapien
tgacccagtaattctcatatgcttt

SEQ ID NO: 1806250 - DNA, 25 bp, Homo sapien
ggcagtgacccagtaattctcatat

SEQ ID NO: 1806251 - DNA, 25 bp, Homo sapien
cagtgacccagtaattctcatatgc

SEQ ID NO: 1806252 - DNA, 25 bp, Homo sapien
aggcagtgacccagtaattctcata

SEQ ID NO: 1806253 - DNA, 25 bp, Homo sapien
ttcttcacataacggcagaaaggag

SEQ ID NO: 1806254 - DNA, 25 bp, Homo sapien
acataaccttcttcacataacggca

SEQ ID NO: 1806255 - DNA, 25 bp, Homo sapien
cttcttcacataacggcagaaagga

SEQ ID NO: 1806256 - DNA, 25 bp, Homo sapien
taaccttcttcacataacggcagaa

SEQ ID NO: 1806257 - DNA, 25 bp, Homo sapien
gatgaacaaatactcgagggctcgt

SEQ ID NO: 1806258 - DNA, 25 bp, Homo sapien
caccctgcggtgcaattctctctga

SEQ ID NO: 1806259 - DNA, 25 bp, Homo sapien
ttctgagcgggatccatcgtggtgc

SEQ ID NO: 1806260 - DNA, 25 bp, Homo sapien
gatgactggaccaaggatgggccct

SEQ ID NO: 1806261 - DNA, 25 bp, Homo sapien
tggagaaaggcagaacaccggaaag

SEQ ID NO: 1806262 - DNA, 25 bp, Homo sapien
caagagattgattggagacgtttcc

SEQ ID NO: 1806263 - DNA, 25 bp, Homo sapien
tgggtaccagaagagagccgtatgc

SEQ ID NO: 1806264 - DNA, 25 bp, Homo sapien
gataatgcgatacacaagagattga

SEQ ID NO: 1806265 - DNA, 25 bp, Homo sapien
gcttcctccttgtcgcactgaagag

SEQ ID NO: 1806266 - DNA, 25 bp, Homo sapien
actgaagagcgtcgcctgaggctgc

SEQ ID NO: 1806267 - DNA, 25 bp, Homo sapien
ggctgcagatcttcatccgaccgtg

SEQ ID NO: 1806268 - DNA, 25 bp, Homo sapien
agctcgcggcagctccaggttaaag

SEQ ID NO: 1806269 - DNA, 25 bp, Homo sapien
ccacagtgagaaccggaactgcatg

SEQ ID NO: 1806270 - DNA, 25 bp, Homo sapien
cagactcaggggtagcacaaactga

SEQ ID NO: 1806271 - DNA, 25 bp, Homo sapien
aggccacagtgagaaccggaactgc

SEQ ID NO: 1806272 - DNA, 25 bp, Homo sapien
agtgagaaccggaactgcatgggaa

SEQ ID NO: 1806273 - DNA, 25 bp, Homo sapien
cagctcaacaccttgtgtgtgtgaa

SEQ ID NO: 1806274 - DNA, 25 bp, Homo sapien
ttttgtgtcttagcttgctagtgaa

SEQ ID NO: 1806275 - DNA, 25 bp, Homo sapien
ttagcttgctagtgaagcagagggt

SEQ ID NO: 1806276 - DNA, 25 bp, Homo sapien
tgtgtcttagcttgctagtgaagca

SEQ ID NO: 1806277 - DNA, 25 bp, Homo sapien
cggttcccatccgtagaggtacagc

SEQ ID NO: 1806278 - DNA, 25 bp, Homo sapien
cgtagaggtacagcacatttgacat

SEQ ID NO: 1806279 - DNA, 25 bp, Homo sapien
tgtttatccagcaactcccggttcc

SEQ ID NO: 1806280 - DNA, 25 bp, Homo sapien
tggcattggccggtccatgtttatc

SEQ ID NO: 1806281 - DNA, 25 bp, Homo sapien
aatttcatcttttccgtgtgccgta

SEQ ID NO: 1806282 - DNA, 25 bp, Homo sapien
tactcggtggaaacatccaagtgaa

SEQ ID NO: 1806283 - DNA, 25 bp, Homo sapien
gaaacatccaagtgaattactttga

SEQ ID NO: 1806284 - DNA, 25 bp, Homo sapien
cgtgtgccgtatagacaccggcata

SEQ ID NO: 1806285 - DNA, 25 bp, Homo sapien
agcggtcccccgcatttctggcttt

SEQ ID NO: 1806286 - DNA, 25 bp, Homo sapien
cagcggagtttttcccgagcccact

SEQ ID NO: 1806287 - DNA, 25 bp, Homo sapien
gccaaaaacacgtactgagcggtcc

SEQ ID NO: 1806288 - DNA, 25 bp, Homo sapien
tggaaattgacagaccagcggagtt

SEQ ID NO: 1806289 - DNA, 25 bp, Homo sapien
cttgaaccatcaaagtggccagagt

SEQ ID NO: 1806290 - DNA, 25 bp, Homo sapien
catatgggagtgtaggtccttctga

SEQ ID NO: 1806291 - DNA, 25 bp, Homo sapien
aacatcagaggccactaggtcatat

SEQ ID NO: 1806292 - DNA, 25 bp, Homo sapien
catcaaagtggccagagtgaggaga

SEQ ID NO: 1806293 - DNA, 25 bp, Homo sapien
gaaatacagcagaggttgattttga

SEQ ID NO: 1806294 - DNA, 25 bp, Homo sapien
agaaatacagcagaggttgattttg

SEQ ID NO: 1806295 - DNA, 25 bp, Homo sapien
tccccactggactgccaaaatcggt

SEQ ID NO: 1806296 - DNA, 25 bp, Homo sapien
gatagtttcactggagggtgttcag

SEQ ID NO: 1806297 - DNA, 25 bp, Homo sapien
cctgagaatgtggtgcccactctcc

SEQ ID NO: 1806298 - DNA, 25 bp, Homo sapien
ggctgaccctattagaagacctgag

SEQ ID NO: 1806299 - DNA, 25 bp, Homo sapien
ctggctcccaattgaattgagcagc

SEQ ID NO: 1806300 - DNA, 25 bp, Homo sapien
ggctcccaattgaattgagcagctg

SEQ ID NO: 1806301 - DNA, 25 bp, Homo sapien
tcccaattgaattgagcagctgaat

SEQ ID NO: 1806302 - DNA, 25 bp, Homo sapien
gctcccaattgaattgagcagctga

SEQ ID NO: 1806303 - DNA, 25 bp, Homo sapien
tcaatgcaggctttttgtcaatttc

SEQ ID NO: 1806304 - DNA, 25 bp, Homo sapien
gcaggctttttgtcaatttcccttc

SEQ ID NO: 1806305 - DNA, 25 bp, Homo sapien
ttgtcaatttcccttcctattggat

SEQ ID NO: 1806306 - DNA, 25 bp, Homo sapien
atgcaggctttttgtcaatttccct

SEQ ID NO: 1806307 - DNA, 25 bp, Homo sapien
aagacctccttgatgccatataggt

SEQ ID NO: 1806308 - DNA, 25 bp, Homo sapien
cactggagctgggtccaatggccca

SEQ ID NO: 1806309 - DNA, 25 bp, Homo sapien
ccatataggtggttttgcatgtgcg

SEQ ID NO: 1806310 - DNA, 25 bp, Homo sapien
caatggcccaatttgcacactggct

SEQ ID NO: 1806311 - DNA, 25 bp, Homo sapien
tgccaaatggaagcaatggaactcg

SEQ ID NO: 1806312 - DNA, 25 bp, Homo sapien
catcaggcacttggtgccaaatgga

SEQ ID NO: 1806313 - DNA, 25 bp, Homo sapien
agctccatcaggcacttggtgccaa

SEQ ID NO: 1806314 - DNA, 25 bp, Homo sapien
caatggaactcggtgctggctctcc

SEQ ID NO: 1806315 - DNA, 25 bp, Homo sapien
tttgcaagcagccaaggtaattacc

SEQ ID NO: 1806316 - DNA, 25 bp, Homo sapien
tctttagttttaataccattgtggc

SEQ ID NO: 1806317 - DNA, 25 bp, Homo sapien
tccagcagggtccaattgttttcaa

SEQ ID NO: 1806318 - DNA, 25 bp, Homo sapien
tactgcagtctttagttttaatacc

SEQ ID NO: 1806319 - DNA, 25 bp, Homo sapien
tcgagtatcgccagtcccagaggca

SEQ ID NO: 1806320 - DNA, 25 bp, Homo sapien
ggaagaggcctaggcatccagaagt

SEQ ID NO: 1806321 - DNA, 25 bp, Homo sapien
tcccagaggcaaacggaagaggcct

SEQ ID NO: 1806322 - DNA, 25 bp, Homo sapien
atccagaagtgcgtccccaaagctc

SEQ ID NO: 1806323 - DNA, 25 bp, Homo sapien
ttagactttctatgtggtttagaag

SEQ ID NO: 1806324 - DNA, 25 bp, Homo sapien
cttttagactttctatgtggtttag

SEQ ID NO: 1806325 - DNA, 25 bp, Homo sapien
agactttctatgtggtttagaagtc

SEQ ID NO: 1806326 - DNA, 25 bp, Homo sapien
ttttagactttctatgtggtttaga

SEQ ID NO: 1806327 - DNA, 25 bp, Homo sapien
tgcatctcccaagtgtaagaacaca

SEQ ID NO: 1806328 - DNA, 25 bp, Homo sapien
ctcactaggctacagatgaagggtg

SEQ ID NO: 1806329 - DNA, 25 bp, Homo sapien
agaacacacttcaagagccctgcaa

SEQ ID NO: 1806330 - DNA, 25 bp, Homo sapien
cttctcaggcagcagtactctgcat

SEQ ID NO: 1806331 - DNA, 25 bp, Homo sapien
ggccagtatttggatcggaagacaa

SEQ ID NO: 1806332 - DNA, 25 bp, Homo sapien
cacatggccagtatttggatcggaa

SEQ ID NO: 1806333 - DNA, 25 bp, Homo sapien
cagtatttggatcggaagacaatga

SEQ ID NO: 1806334 - DNA, 25 bp, Homo sapien
ctttcacatggccagtatttggatc

SEQ ID NO: 1806335 - DNA, 25 bp, Homo sapien
ccacgtgtatgcagcttgattcggg

SEQ ID NO: 1806336 - DNA, 25 bp, Homo sapien
gattcggggcagtatcttcagatcc

SEQ ID NO: 1806337 - DNA, 25 bp, Homo sapien
cccagaaacggagcatccctttcag

SEQ ID NO: 1806338 - DNA, 25 bp, Homo sapien
ctgcactctgctgacccacgtgtat

SEQ ID NO: 1806339 - DNA, 25 bp, Homo sapien
ctgagtggttttatgctttcgtggg

SEQ ID NO: 1806340 - DNA, 25 bp, Homo sapien
ttttatgctttcgtggggacctcac

SEQ ID NO: 1806341 - DNA, 25 bp, Homo sapien
ttagctagcctgagtggttttatgc

SEQ ID NO: 1806342 - DNA, 25 bp, Homo sapien
agcctgagtggttttatgctttcgt

SEQ ID NO: 1806343 - DNA, 25 bp, Homo sapien
ccaggtgcttcaaagagctgtccat

SEQ ID NO: 1806344 - DNA, 25 bp, Homo sapien
ctgtctctctagcacgccacctcca

SEQ ID NO: 1806345 - DNA, 25 bp, Homo sapien
tgcttcaaagagctgtccatgtgct

SEQ ID NO: 1806346 - DNA, 25 bp, Homo sapien
ggtgcttcaaagagctgtccatgtg

SEQ ID NO: 1806347 - DNA, 25 bp, Homo sapien
caaaaatggcagcatgtggctcagg

SEQ ID NO: 1806348 - DNA, 25 bp, Homo sapien
ggtgcatgcaaattttagcctcgag

SEQ ID NO: 1806349 - DNA, 25 bp, Homo sapien
tagcctcgagttctagtctcagagc

SEQ ID NO: 1806350 - DNA, 25 bp, Homo sapien
tagtctcagagcacaaaatagtaac

SEQ ID NO: 1806351 - DNA, 25 bp, Homo sapien
ccacgcaaatccaaagtgtggtgca

SEQ ID NO: 1806352 - DNA, 25 bp, Homo sapien
gagaggaagcagattcgtgcccttt

SEQ ID NO: 1806353 - DNA, 25 bp, Homo sapien
ggctgaatgcacagacgtcccctgg

SEQ ID NO: 1806354 - DNA, 25 bp, Homo sapien
ctgaggataccatcacgggcaggca

SEQ ID NO: 1806355 - DNA, 25 bp, Homo sapien
ctgggacatcttgctggcgcagaga

SEQ ID NO: 1806356 - DNA, 25 bp, Homo sapien
ctcttaggtggtcctagagaacatt

SEQ ID NO: 1806357 - DNA, 25 bp, Homo sapien
cttaggtggtcctagagaacatttt

SEQ ID NO: 1806358 - DNA, 25 bp, Homo sapien
ttaggtggtcctagagaacatttta

SEQ ID NO: 1806359 - DNA, 25 bp, Homo sapien
tcttaggtggtcctagagaacattt

SEQ ID NO: 1806360 - DNA, 25 bp, Homo sapien
gtcctgggacctggcaaggagaacc

SEQ ID NO: 1806361 - DNA, 25 bp, Homo sapien
aatgggcagccctttaaagcctgtg

SEQ ID NO: 1806362 - DNA, 25 bp, Homo sapien
gccctggactctaggttctgccctg

SEQ ID NO: 1806363 - DNA, 25 bp, Homo sapien
gagctgcctaagtacacgctgctgc

SEQ ID NO: 1806364 - DNA, 25 bp, Homo sapien
gacagagggtgtgaccagaaccagg

SEQ ID NO: 1806365 - DNA, 25 bp, Homo sapien
tgacagagggtgtgaccagaaccag

SEQ ID NO: 1806366 - DNA, 25 bp, Homo sapien
cagagggtgtgaccagaaccaggac

SEQ ID NO: 1806367 - DNA, 25 bp, Homo sapien
acagagggtgtgaccagaaccagga

SEQ ID NO: 1806368 - DNA, 25 bp, Homo sapien
atccagcggctctcaagcatggcac

SEQ ID NO: 1806369 - DNA, 25 bp, Homo sapien
tttgggtcattcgactcaactgagc

SEQ ID NO: 1806370 - DNA, 25 bp, Homo sapien
aggaaacaagggcacaactcgaggc

SEQ ID NO: 1806371 - DNA, 25 bp, Homo sapien
cacatgtagccccagatttgggtca

SEQ ID NO: 1806372 - DNA, 25 bp, Homo sapien
caaaccagattccacttacgaacgc

SEQ ID NO: 1806373 - DNA, 25 bp, Homo sapien
tccacttacgaacgctgtgcttggc

SEQ ID NO: 1806374 - DNA, 25 bp, Homo sapien
cagattccacttacgaacgctgtgc

SEQ ID NO: 1806375 - DNA, 25 bp, Homo sapien
cacttacgaacgctgtgcttggctg

SEQ ID NO: 1806376 - DNA, 25 bp, Homo sapien
atcgtcgcagccaccgaacatctgg

SEQ ID NO: 1806377 - DNA, 25 bp, Homo sapien
cacagtcatcgtgggcttgtgaacg

SEQ ID NO: 1806378 - DNA, 25 bp, Homo sapien
tgtgaacgaacaagctcctgtcggg

SEQ ID NO: 1806379 - DNA, 25 bp, Homo sapien
tgctgccagggcccgatcgtcgcag

SEQ ID NO: 1806380 - DNA, 25 bp, Homo sapien
tgcctggagagcagcgttatagctt

SEQ ID NO: 1806381 - DNA, 25 bp, Homo sapien
gagcagcgttatagcttcctggctg

SEQ ID NO: 1806382 - DNA, 25 bp, Homo sapien
tagttgggccgtgtcagcaccattg

SEQ ID NO: 1806383 - DNA, 25 bp, Homo sapien
acagttcttgggtagttgggccgtg

SEQ ID NO: 1806384 - DNA, 25 bp, Homo sapien
tacagggcggtaggcgaaaatgccc

SEQ ID NO: 1806385 - DNA, 25 bp, Homo sapien
tgcccatgcttgtcactgcagagtg

SEQ ID NO: 1806386 - DNA, 25 bp, Homo sapien
ggtcgacaggaagcttgcccatgct

SEQ ID NO: 1806387 - DNA, 25 bp, Homo sapien
agcactcaggatctgtttagctcca

SEQ ID NO: 1806388 - DNA, 25 bp, Homo sapien
gccacacgggctgaatgtccgaggg

SEQ ID NO: 1806389 - DNA, 25 bp, Homo sapien
agccacacgggctgaatgtccgagg

SEQ ID NO: 1806390 - DNA, 25 bp, Homo sapien
ggctgtttctgttggcgaggcctca

SEQ ID NO: 1806391 - DNA, 25 bp, Homo sapien
caattcccaatgaagcgaggctgtt

SEQ ID NO: 1806392 - DNA, 25 bp, Homo sapien
cgaggctgtttctgttggcgaggcc

SEQ ID NO: 1806393 - DNA, 25 bp, Homo sapien
ccactctttgtaccaattcccaatg

SEQ ID NO: 1806394 - DNA, 25 bp, Homo sapien
agcagcaagagggggtgggtatcag

SEQ ID NO: 1806395 - DNA, 25 bp, Homo sapien
aacagcagcaagagggggtgggtat

SEQ ID NO: 1806396 - DNA, 25 bp, Homo sapien
gcaagagggggtgggtatcagcatc

SEQ ID NO: 1806397 - DNA, 25 bp, Homo sapien
cagcaagagggggtgggtatcagca

SEQ ID NO: 1806398 - DNA, 25 bp, Homo sapien
tcggagctctggccgtgctccagaa

SEQ ID NO: 1806399 - DNA, 25 bp, Homo sapien
ccttccaagacaaaggcctcggagc

SEQ ID NO: 1806400 - DNA, 25 bp, Homo sapien
tccaagacaaaggcctcggagctct

SEQ ID NO: 1806401 - DNA, 25 bp, Homo sapien
gaactgcaaggctggtaggagcctc

SEQ ID NO: 1806402 - DNA, 25 bp, Homo sapien
caagctttgggttccactgtgacaa

SEQ ID NO: 1806403 - DNA, 25 bp, Homo sapien
tccctttttgcagccatggcctgga

SEQ ID NO: 1806404 - DNA, 25 bp, Homo sapien
actgtgacaaactcgaatctttttt

SEQ ID NO: 1806405 - DNA, 25 bp, Homo sapien
accggctgctgtggcactcacagca

SEQ ID NO: 1806406 - DNA, 25 bp, Homo sapien
ttcctctagcttctgtgcaaaggga

SEQ ID NO: 1806407 - DNA, 25 bp, Homo sapien
gttgaaaagctcaggtccgcaacag

SEQ ID NO: 1806408 - DNA, 25 bp, Homo sapien
gcagcacgcggcttgactggcaaaa

SEQ ID NO: 1806409 - DNA, 25 bp, Homo sapien
gatcaagtagtctgagtgtgcaggc

SEQ ID NO: 1806410 - DNA, 25 bp, Homo sapien
tccaacttgaagcacttcccactag

SEQ ID NO: 1806411 - DNA, 25 bp, Homo sapien
atctccaacttgaagcacttcccac

SEQ ID NO: 1806412 - DNA, 25 bp, Homo sapien
cttgaagcacttcccactagcttca

SEQ ID NO: 1806413 - DNA, 25 bp, Homo sapien
caacttgaagcacttcccactagct

SEQ ID NO: 1806414 - DNA, 25 bp, Homo sapien
tagtcaactattggaaacaaccggc

SEQ ID NO: 1806415 - DNA, 25 bp, Homo sapien
tatttgcgggagtcactgaacctct

SEQ ID NO: 1806416 - DNA, 25 bp, Homo sapien
taaaacaagtaagggccctgcattc

SEQ ID NO: 1806417 - DNA, 25 bp, Homo sapien
cactgacccaaaggaaggatgacca

SEQ ID NO: 1806418 - DNA, 25 bp, Homo sapien
gtgctgcactgccaagtaccaggtg

SEQ ID NO: 1806419 - DNA, 25 bp, Homo sapien
ttcttgatctatggaaaaggcaaag

SEQ ID NO: 1806420 - DNA, 25 bp, Homo sapien
tgtgcagttttgaggcactggaaag

SEQ ID NO: 1806421 - DNA, 25 bp, Homo sapien
atggagacccatccccctgagcaaa

SEQ ID NO: 1806422 - DNA, 25 bp, Homo sapien
tttaatgtacatgagtacacatcac

SEQ ID NO: 1806423 - DNA, 25 bp, Homo sapien
tctgcatagtggtttgatgctgctg

SEQ ID NO: 1806424 - DNA, 25 bp, Homo sapien
ctaattctgcatagtggtttgatgc

SEQ ID NO: 1806425 - DNA, 25 bp, Homo sapien
tcataggcaatggagacaggagttt

SEQ ID NO: 1806426 - DNA, 25 bp, Homo sapien
gagcttgctttgtctagaacgccgc

SEQ ID NO: 1806427 - DNA, 25 bp, Homo sapien
tacttgagctttcctgagtggaggc

SEQ ID NO: 1806428 - DNA, 25 bp, Homo sapien
catgaaagcatgtctgggctggcct

SEQ ID NO: 1806429 - DNA, 25 bp, Homo sapien
tgaatcaggatgcaatgtgacccac

SEQ ID NO: 1806430 - DNA, 25 bp, Homo sapien
gcgcctggcttactgatattcctga

SEQ ID NO: 1806431 - DNA, 25 bp, Homo sapien
gcctggcttactgatattcctgagg

SEQ ID NO: 1806432 - DNA, 25 bp, Homo sapien
agcaatgcccactgtgcgaccatgc

SEQ ID NO: 1806433 - DNA, 25 bp, Homo sapien
tgtgcgaccatgcacctgcgcctgg

SEQ ID NO: 1806434 - DNA, 25 bp, Homo sapien
ttcttctcaggaccgcccctcaggg

SEQ ID NO: 1806435 - DNA, 25 bp, Homo sapien
aaggcctacttcctggtaagccgag

SEQ ID NO: 1806436 - DNA, 25 bp, Homo sapien
tgtctccaaggcctacttcctggta

SEQ ID NO: 1806437 - DNA, 25 bp, Homo sapien
ctggtaagccgaggcttgctctgcc

SEQ ID NO: 1806438 - DNA, 25 bp, Homo sapien
cagactttgtgcttgttctcagggc

SEQ ID NO: 1806439 - DNA, 25 bp, Homo sapien
ggttcaacacaagagcagccttccc

SEQ ID NO: 1806440 - DNA, 25 bp, Homo sapien
tctgtgactcgaaagccggtggtgt

SEQ ID NO: 1806441 - DNA, 25 bp, Homo sapien
caaaatgttggagaagaaccgaggg

SEQ ID NO: 1806442 - DNA, 25 bp, Homo sapien
ggaaacgtgtgtctccacaacacag

SEQ ID NO: 1806443 - DNA, 25 bp, Homo sapien
aacgtgtgtctccacaacacagctc

SEQ ID NO: 1806444 - DNA, 25 bp, Homo sapien
gaaacgtgtgtctccacaacacagc

SEQ ID NO: 1806445 - DNA, 25 bp, Homo sapien
aaggaaacgtgtgtctccacaacac

SEQ ID NO: 1806446 - DNA, 25 bp, Homo sapien
gacttgcacgtaagtttcctgcaga

SEQ ID NO: 1806447 - DNA, 25 bp, Homo sapien
gggagtgaggtttcctccggctgcc

SEQ ID NO: 1806448 - DNA, 25 bp, Homo sapien
acgtaagtttcctgcagagtctggg

SEQ ID NO: 1806449 - DNA, 25 bp, Homo sapien
aaaagacttgcacgtaagtttcctg

SEQ ID NO: 1806450 - DNA, 25 bp, Homo sapien
tgtccaaaaactgcatgagctgtcc

SEQ ID NO: 1806451 - DNA, 25 bp, Homo sapien
tgccatgacggaccatccctcaaat

SEQ ID NO: 1806452 - DNA, 25 bp, Homo sapien
gctctactggagactgcgctgcaga

SEQ ID NO: 1806453 - DNA, 25 bp, Homo sapien
gagcgagcctttgttgccatgacgg

SEQ ID NO: 1806454 - DNA, 25 bp, Homo sapien
gaaagcagactgttgagtagagcac

SEQ ID NO: 1806455 - DNA, 25 bp, Homo sapien
aggaaagcagactgttgagtagagc

SEQ ID NO: 1806456 - DNA, 25 bp, Homo sapien
cagactgttgagtagagcacggaca

SEQ ID NO: 1806457 - DNA, 25 bp, Homo sapien
ttgagtagagcacggacagcattgc

SEQ ID NO: 1806458 - DNA, 25 bp, Homo sapien
gatggcgttccgctttctacatgca

SEQ ID NO: 1806459 - DNA, 25 bp, Homo sapien
tatcattaccgctcttcctgggacc

SEQ ID NO: 1806460 - DNA, 25 bp, Homo sapien
cagaccgtgactatgcagaaaagca

SEQ ID NO: 1806461 - DNA, 25 bp, Homo sapien
gagtggccgccactcaagtggagca

SEQ ID NO: 1806462 - DNA, 25 bp, Homo sapien
cagggtcgcgctatgctacccagac

SEQ ID NO: 1806463 - DNA, 25 bp, Homo sapien
gggtcgcgctatgctacccagacta

SEQ ID NO: 1806464 - DNA, 25 bp, Homo sapien
cgcgctatgctacccagactagtct

SEQ ID NO: 1806465 - DNA, 25 bp, Homo sapien
gtcgcgctatgctacccagactagt

SEQ ID NO: 1806466 - DNA, 25 bp, Homo sapien
tgcgccaggagagcgacttgctcca

SEQ ID NO: 1806467 - DNA, 25 bp, Homo sapien
agagctgcgccaggagagcgacttg

SEQ ID NO: 1806468 - DNA, 25 bp, Homo sapien
agctgcgccaggagagcgacttgct

SEQ ID NO: 1806469 - DNA, 25 bp, Homo sapien
ggagagctgcgccaggagagcgact

SEQ ID NO: 1806470 - DNA, 25 bp, Homo sapien
aatcagcatagctcccagaactcct

SEQ ID NO: 1806471 - DNA, 25 bp, Homo sapien
gggctggctctcctccttcttaggc

SEQ ID NO: 1806472 - DNA, 25 bp, Homo sapien
cactcccgagaagtcactatattga

SEQ ID NO: 1806473 - DNA, 25 bp, Homo sapien
ggtcatgcaacattgcccaagctag

SEQ ID NO: 1806474 - DNA, 25 bp, Homo sapien
gccagagttatcataccagctagag

SEQ ID NO: 1806475 - DNA, 25 bp, Homo sapien
ctgccagagttatcataccagctag

SEQ ID NO: 1806476 - DNA, 25 bp, Homo sapien
cagagttatcataccagctagagtc

SEQ ID NO: 1806477 - DNA, 25 bp, Homo sapien
gagttatcataccagctagagtcat

SEQ ID NO: 1806478 - DNA, 25 bp, Homo sapien
tatcgctggggtcattacatcagcc

SEQ ID NO: 1806479 - DNA, 25 bp, Homo sapien
cattacaccagccagagttatcgct

SEQ ID NO: 1806480 - DNA, 25 bp, Homo sapien
taccagctggggtcattatgccagc

SEQ ID NO: 1806481 - DNA, 25 bp, Homo sapien
tcaccataccagctggggtcattat

SEQ ID NO: 1806482 - DNA, 25 bp, Homo sapien
tgccagaatcatcataccagctggg

SEQ ID NO: 1806483 - DNA, 25 bp, Homo sapien
ctgccagaatcatcataccagctgg

SEQ ID NO: 1806484 - DNA, 25 bp, Homo sapien
cagccagagtcatcacaccagctgg

SEQ ID NO: 1806485 - DNA, 25 bp, Homo sapien
agccagagtcatcacaccagctggg

SEQ ID NO: 1806486 - DNA, 25 bp, Homo sapien
gccggaatcatcacacttgccagaa

SEQ ID NO: 1806487 - DNA, 25 bp, Homo sapien
tcataaataacactagccagggtca

SEQ ID NO: 1806488 - DNA, 25 bp, Homo sapien
cagccagggttctcacaccagttgg

SEQ ID NO: 1806489 - DNA, 25 bp, Homo sapien
cagagtcatcaaacaggccggaatc

SEQ ID NO: 1806490 - DNA, 25 bp, Homo sapien
gagtctgatcaaacaggccagaatc

SEQ ID NO: 1806491 - DNA, 25 bp, Homo sapien
cagagtctgatcaaacaggccagaa

SEQ ID NO: 1806492 - DNA, 25 bp, Homo sapien
gtctgatcaaacaggccagaatcat

SEQ ID NO: 1806493 - DNA, 25 bp, Homo sapien
gccagagtctgatcaaacaggccag

SEQ ID NO: 1806494 - DNA, 25 bp, Homo sapien
catttgtgaagggagcacccgctgc

SEQ ID NO: 1806495 - DNA, 25 bp, Homo sapien
agggagcacccgctgcactgaacat

SEQ ID NO: 1806496 - DNA, 25 bp, Homo sapien
ggagcacccgctgcactgaacatga

SEQ ID NO: 1806497 - DNA, 25 bp, Homo sapien
gtgaagggagcacccgctgcactga

SEQ ID NO: 1806498 - DNA, 25 bp, Homo sapien
ctcctcatcatgttcagcagacctt

SEQ ID NO: 1806499 - DNA, 25 bp, Homo sapien
gctgatcagaggtcccagtaaaatg

SEQ ID NO: 1806500 - DNA, 25 bp, Homo sapien
ttaaggcccaagttaggcatattca

SEQ ID NO: 1806501 - DNA, 25 bp, Homo sapien
gcatattcagaacagtccattctag

SEQ ID NO: 1806502 - DNA, 25 bp, Homo sapien
tcagaacagtccattctagatcaga

SEQ ID NO: 1806503 - DNA, 25 bp, Homo sapien
cccctccatccagagtgtccactcc

SEQ ID NO: 1806504 - DNA, 25 bp, Homo sapien
ccctccatccagagtgtccactcca

SEQ ID NO: 1806505 - DNA, 25 bp, Homo sapien
cctccatccagagtgtccactccat

SEQ ID NO: 1806506 - DNA, 25 bp, Homo sapien
ctgagggccgaaggctccctctgct

SEQ ID NO: 1806507 - DNA, 25 bp, Homo sapien
cctaagcaccaggttcgtgcctggt

SEQ ID NO: 1806508 - DNA, 25 bp, Homo sapien
caccaggttcgtgcctggtttctgt

SEQ ID NO: 1806509 - DNA, 25 bp, Homo sapien
gggacatgcttcccggcaatgcctc

SEQ ID NO: 1806510 - DNA, 25 bp, Homo sapien
ggatttagatcacccagccatgtga

SEQ ID NO: 1806511 - DNA, 25 bp, Homo sapien
gagccacaaaactgctctgccattg

SEQ ID NO: 1806512 - DNA, 25 bp, Homo sapien
cagccatgtgactctcagggaaacc

SEQ ID NO: 1806513 - DNA, 25 bp, Homo sapien
ccaggaccaggaggatttagatcac

SEQ ID NO: 1806514 - DNA, 25 bp, Homo sapien
aaagcagccgctctgggccgtagga

SEQ ID NO: 1806515 - DNA, 25 bp, Homo sapien
ttgctggcacaacaaagcagccgct

SEQ ID NO: 1806516 - DNA, 25 bp, Homo sapien
ggccgtaggagtggccttctcccaa

SEQ ID NO: 1806517 - DNA, 25 bp, Homo sapien
cctggatgccggcactgtgactgca

SEQ ID NO: 1806518 - DNA, 25 bp, Homo sapien
ttcacaggtgagtaaggccattgtc

SEQ ID NO: 1806519 - DNA, 25 bp, Homo sapien
atgtctctcgttatattcctgttgg

SEQ ID NO: 1806520 - DNA, 25 bp, Homo sapien
tattcctgttggacaatgctggtcc

SEQ ID NO: 1806521 - DNA, 25 bp, Homo sapien
cacaggtgagtaaggccattgtccc

SEQ ID NO: 1806522 - DNA, 25 bp, Homo sapien
gctgtttgcttgagtcccggggaaa

SEQ ID NO: 1806523 - DNA, 25 bp, Homo sapien
gggctgtttgcttgagtcccgggga

SEQ ID NO: 1806524 - DNA, 25 bp, Homo sapien
ggctgtttgcttgagtcccggggaa

SEQ ID NO: 1806525 - DNA, 25 bp, Homo sapien
gattctctcaggtaataggcagtca

SEQ ID NO: 1806526 - DNA, 25 bp, Homo sapien
attctctcaggtaataggcagtcag

SEQ ID NO: 1806527 - DNA, 25 bp, Homo sapien
ggctgccacgcagggaatgtatgtc

SEQ ID NO: 1806528 - DNA, 25 bp, Homo sapien
catctccggtgcaccagaatttaag

SEQ ID NO: 1806529 - DNA, 25 bp, Homo sapien
gcctgttctctgctttgaggtctct

SEQ ID NO: 1806530 - DNA, 25 bp, Homo sapien
gaatgagcacagcatatcacagccg

SEQ ID NO: 1806531 - DNA, 25 bp, Homo sapien
tttgttgcctcagaccgtcctgctg

SEQ ID NO: 1806532 - DNA, 25 bp, Homo sapien
gttacagctcaaaggtgttggagcc

SEQ ID NO: 1806533 - DNA, 25 bp, Homo sapien
gctgatcccgtcaggagccctgtct

SEQ ID NO: 1806534 - DNA, 25 bp, Homo sapien
cgtaggtggcaggtagttacagctc

SEQ ID NO: 1806535 - DNA, 25 bp, Homo sapien
gaattcaccccaactactaatattg

SEQ ID NO: 1806536 - DNA, 25 bp, Homo sapien
gagaatatcaaggtgaattcacccc

SEQ ID NO: 1806537 - DNA, 25 bp, Homo sapien
gctcatgtaagcacccatacgctca

SEQ ID NO: 1806538 - DNA, 25 bp, Homo sapien
catacgctcaacttcatccgagaat

SEQ ID NO: 1806539 - DNA, 25 bp, Homo sapien
gggctgtgcatggtgaacattcatt

SEQ ID NO: 1806540 - DNA, 25 bp, Homo sapien
tgtgcatggtgaacattcattgcgg

SEQ ID NO: 1806541 - DNA, 25 bp, Homo sapien
catggtgaacattcattgcggaaac

SEQ ID NO: 1806542 - DNA, 25 bp, Homo sapien
tgaacattcattgcggaaacccaag

SEQ ID NO: 1806543 - DNA, 25 bp, Homo sapien
gggagctaggcacagcaagctgcac

SEQ ID NO: 1806544 - DNA, 25 bp, Homo sapien
gcactctggttgccataattataat

SEQ ID NO: 1806545 - DNA, 25 bp, Homo sapien
taattggagttgccgtgaattgtgc

SEQ ID NO: 1806546 - DNA, 25 bp, Homo sapien
agccgactttccctcgggagctagg

SEQ ID NO: 1806547 - DNA, 25 bp, Homo sapien
gctctttcagaaggcgcctctccaa

SEQ ID NO: 1806548 - DNA, 25 bp, Homo sapien
aaagaacgtgtttcaatgagtctgc

SEQ ID NO: 1806549 - DNA, 25 bp, Homo sapien
atgccgaggaggaccgacgctcttt

SEQ ID NO: 1806550 - DNA, 25 bp, Homo sapien
tagataaattacaagatgccgagga

SEQ ID NO: 1806551 - DNA, 25 bp, Homo sapien
gccaagtgggcaacatcgaaggcca

SEQ ID NO: 1806552 - DNA, 25 bp, Homo sapien
atatgttgtgggaaaaacgcttcct

SEQ ID NO: 1806553 - DNA, 25 bp, Homo sapien
gagtcaacaatggtggaaactgcca

SEQ ID NO: 1806554 - DNA, 25 bp, Homo sapien
gctgccatcagcctaagtgagtcaa

SEQ ID NO: 1806555 - DNA, 25 bp, Homo sapien
tcgaagtgccactgtagaagattct

SEQ ID NO: 1806556 - DNA, 25 bp, Homo sapien
gaggataaatgaggcaagtggtcac

SEQ ID NO: 1806557 - DNA, 25 bp, Homo sapien
actgccttggtatgcaaacaaatga

SEQ ID NO: 1806558 - DNA, 25 bp, Homo sapien
cactgtagaagattctgtactgcct

SEQ ID NO: 1806559 - DNA, 25 bp, Homo sapien
tcattaagtacttcaaaccagtgag

SEQ ID NO: 1806560 - DNA, 25 bp, Homo sapien
caaactttaatccgaacaacagaca

SEQ ID NO: 1806561 - DNA, 25 bp, Homo sapien
tttaatccgaacaacagacacagcc

SEQ ID NO: 1806562 - DNA, 25 bp, Homo sapien
tacttcatatcgtgaatatcattaa

SEQ ID NO: 1806563 - DNA, 25 bp, Homo sapien
agtcagaggctctgctatgcgggca

SEQ ID NO: 1806564 - DNA, 25 bp, Homo sapien
cagcatccgggatgcataggccacg

SEQ ID NO: 1806565 - DNA, 25 bp, Homo sapien
tttatgttatgagcactaagctggg

SEQ ID NO: 1806566 - DNA, 25 bp, Homo sapien
ctctctggggctattagtgccttta

SEQ ID NO: 1806567 - DNA, 25 bp, Homo sapien
ggagatgcacctgagaacccctttg

SEQ ID NO: 1806568 - DNA, 25 bp, Homo sapien
cagagttcatggtgacaagtccgtc

SEQ ID NO: 1806569 - DNA, 25 bp, Homo sapien
gagctttctgacaatacattccgga

SEQ ID NO: 1806570 - DNA, 25 bp, Homo sapien
gctatctaagacgatcacagaggcc

SEQ ID NO: 1806571 - DNA, 25 bp, Homo sapien
ttgctgccacaaccttaaaatcttc

SEQ ID NO: 1806572 - DNA, 25 bp, Homo sapien
taaatgtagcgaaacttagggatga

SEQ ID NO: 1806573 - DNA, 25 bp, Homo sapien
ccaagctcgttcctgtggatttggg

SEQ ID NO: 1806574 - DNA, 25 bp, Homo sapien
gggtgggccacaccacttctctata

SEQ ID NO: 1806575 - DNA, 25 bp, Homo sapien
gattccatgctagtgtgggaaggca

SEQ ID NO: 1806576 - DNA, 25 bp, Homo sapien
gcttgtccagtgagagccgcacctc

SEQ ID NO: 1806577 - DNA, 25 bp, Homo sapien
agggctgcacacacgatgattgttg

SEQ ID NO: 1806578 - DNA, 25 bp, Homo sapien
gaaggcaggttaagggagggctgca

SEQ ID NO: 1806579 - DNA, 25 bp, Homo sapien
gaggaaggttcctccggagcttcca

SEQ ID NO: 1806580 - DNA, 25 bp, Homo sapien
tgatgtcactggcatcacgccaccc

SEQ ID NO: 1806581 - DNA, 25 bp, Homo sapien
caaatcgcaagtgcaagcagcaggt

SEQ ID NO: 1806582 - DNA, 25 bp, Homo sapien
acgccacccaaatcgcaagtgcaag

SEQ ID NO: 1806583 - DNA, 25 bp, Homo sapien
tgtcagcaatgccacactggcgtaa

SEQ ID NO: 1806584 - DNA, 25 bp, Homo sapien
tgctatgatcgaaaggaactgctgc

SEQ ID NO: 1806585 - DNA, 25 bp, Homo sapien
cactggcgtaagagtgctatgatcg

SEQ ID NO: 1806586 - DNA, 25 bp, Homo sapien
caggtggtgaagttgtcagcaatgc

SEQ ID NO: 1806587 - DNA, 25 bp, Homo sapien
cctcaatccaccattccaggctcac

SEQ ID NO: 1806588 - DNA, 25 bp, Homo sapien
agctgcctcaatccaccattccagg

SEQ ID NO: 1806589 - DNA, 25 bp, Homo sapien
acttcccaggccctactgtgctcca

SEQ ID NO: 1806590 - DNA, 25 bp, Homo sapien
cattccaggctcaccacttcccagg

SEQ ID NO: 1806591 - DNA, 25 bp, Homo sapien
aggtaaacacgtgtgacctcagaat

SEQ ID NO: 1806592 - DNA, 25 bp, Homo sapien
aacacgtgtgacctcagaataatgc

SEQ ID NO: 1806593 - DNA, 25 bp, Homo sapien
cgtgtgacctcagaataatgcctac

SEQ ID NO: 1806594 - DNA, 25 bp, Homo sapien
tgacctcagaataatgcctacatag

SEQ ID NO: 1806595 - DNA, 25 bp, Homo sapien
tacagtcatggtgaccgccgtagag

SEQ ID NO: 1806596 - DNA, 25 bp, Homo sapien
gggtagtttctacagtcatggtgac

SEQ ID NO: 1806597 - DNA, 25 bp, Homo sapien
gccgtagagccctggtatgacttcg

SEQ ID NO: 1806598 - DNA, 25 bp, Homo sapien
gatgagagtgggttgtgccccaggt

SEQ ID NO: 1806599 - DNA, 25 bp, Homo sapien
gtctgtggaaaacaagctgcgggct

SEQ ID NO: 1806600 - DNA, 25 bp, Homo sapien
gaatatcactgaccacaggtctgtg

SEQ ID NO: 1806601 - DNA, 25 bp, Homo sapien
tgagataaacagatcttcaagggaa

SEQ ID NO: 1806602 - DNA, 25 bp, Homo sapien
cgggctggccgaagcggcttccttt

SEQ ID NO: 1806603 - DNA, 25 bp, Homo sapien
ggagtggaacgtagaagagagggag

SEQ ID NO: 1806604 - DNA, 25 bp, Homo sapien
gagagggaggacgaggaacgggcat

SEQ ID NO: 1806605 - DNA, 25 bp, Homo sapien
caagtgtgtaaggagtggaacgtag

SEQ ID NO: 1806606 - DNA, 25 bp, Homo sapien
aagagctaaattacacacaagtgtg

SEQ ID NO: 1806607 - DNA, 25 bp, Homo sapien
catcctttgggcaggttttgtagcc

SEQ ID NO: 1806608 - DNA, 25 bp, Homo sapien
ggcacatcctttgggcaggttttgt

SEQ ID NO: 1806609 - DNA, 25 bp, Homo sapien
acatcctttgggcaggttttgtagc

SEQ ID NO: 1806610 - DNA, 25 bp, Homo sapien
gcacatcctttgggcaggttttgta

SEQ ID NO: 1806611 - DNA, 25 bp, Homo sapien
ctagaggatcactttggccactggg

SEQ ID NO: 1806612 - DNA, 25 bp, Homo sapien
ggagtgacatggctgagatctgggg

SEQ ID NO: 1806613 - DNA, 25 bp, Homo sapien
cctgctcaccgccatgtgctcccct

SEQ ID NO: 1806614 - DNA, 25 bp, Homo sapien
cctctggtgttggctagaggatcac

SEQ ID NO: 1806615 - DNA, 25 bp, Homo sapien
cttatggagccaggattatgtttcc

SEQ ID NO: 1806616 - DNA, 25 bp, Homo sapien
tgctgctgcaaggtgtaggacttcc

SEQ ID NO: 1806617 - DNA, 25 bp, Homo sapien
tatgtttccagtcaggcgtgtaggg

SEQ ID NO: 1806618 - DNA, 25 bp, Homo sapien
gacaggtcccgctggaaactgagtt

SEQ ID NO: 1806619 - DNA, 25 bp, Homo sapien
cgcttgctttgttgaacggcccggg

SEQ ID NO: 1806620 - DNA, 25 bp, Homo sapien
acgtggctgcggtgcaagcatgcca

SEQ ID NO: 1806621 - DNA, 25 bp, Homo sapien
gtgcaagcatgccaggtccgctctc

SEQ ID NO: 1806622 - DNA, 25 bp, Homo sapien
ggtgatcagcctggaccccggtgca

SEQ ID NO: 1806623 - DNA, 25 bp, Homo sapien
tgtgagcggagctctccatcgggtc

SEQ ID NO: 1806624 - DNA, 25 bp, Homo sapien
ggtcttcctcagcacgccctcagat

SEQ ID NO: 1806625 - DNA, 25 bp, Homo sapien
tgagaacctaatggcatcgctgtga

SEQ ID NO: 1806626 - DNA, 25 bp, Homo sapien
gtgttccactgcgtctggtggcggc

SEQ ID NO: 1806627 - DNA, 25 bp, Homo sapien
taagtctcgtctcggtgagttcccg

SEQ ID NO: 1806628 - DNA, 25 bp, Homo sapien
gctccgatggcatcacgattgtgaa

SEQ ID NO: 1806629 - DNA, 25 bp, Homo sapien
tcgtggtctctgctcgggtcctgct

SEQ ID NO: 1806630 - DNA, 25 bp, Homo sapien
gtgctgtgctgccacgtgcggacaa

SEQ ID NO: 1806631 - DNA, 25 bp, Homo sapien
ccagggtctggtataaacgctacgc

SEQ ID NO: 1806632 - DNA, 25 bp, Homo sapien
ccagggaaagatccaccggtgcatt

SEQ ID NO: 1806633 - DNA, 25 bp, Homo sapien
gaatatatccaaaagcctctcacgg

SEQ ID NO: 1806634 - DNA, 25 bp, Homo sapien
tacgctatgctaaggagagcacctg

SEQ ID NO: 1806635 - DNA, 25 bp, Homo sapien
gaagaccggatcctactctgtgcct

SEQ ID NO: 1806636 - DNA, 25 bp, Homo sapien
tactgagctgtttgacacctacgtg

SEQ ID NO: 1806637 - DNA, 25 bp, Homo sapien
caagtcagtctcagagcatggacca

SEQ ID NO: 1806638 - DNA, 25 bp, Homo sapien
cacctacgtgttgcaccttggagaa

SEQ ID NO: 1806639 - DNA, 25 bp, Homo sapien
tctggttccatgggaatccatgcat

SEQ ID NO: 1806640 - DNA, 25 bp, Homo sapien
tgtctggttccatgggaatccatgc

SEQ ID NO: 1806641 - DNA, 25 bp, Homo sapien
gtctggttccatgggaatccatgca

SEQ ID NO: 1806642 - DNA, 25 bp, Homo sapien
agctgctctccgtgcctgccagggt

SEQ ID NO: 1806643 - DNA, 25 bp, Homo sapien
actctacgtgtaaaaggacggcgag

SEQ ID NO: 1806644 - DNA, 25 bp, Homo sapien
caggccctgactccataaactccag

SEQ ID NO: 1806645 - DNA, 25 bp, Homo sapien
ggcgagtgtgacacaggataacatc

SEQ ID NO: 1806646 - DNA, 25 bp, Homo sapien
ctcacaagtgcgtgttggggaccga

SEQ ID NO: 1806647 - DNA, 25 bp, Homo sapien
gccaggccgcaggtcactttcctca

SEQ ID NO: 1806648 - DNA, 25 bp, Homo sapien
ccccattcccaatgacagtaggaat

SEQ ID NO: 1806649 - DNA, 25 bp, Homo sapien
gaggaaatcccccattcccaatgac

SEQ ID NO: 1806650 - DNA, 25 bp, Homo sapien
ggtgatggggacacaggtatccacc

SEQ ID NO: 1806651 - DNA, 25 bp, Homo sapien
gatcaattaaccactgatccgctga

SEQ ID NO: 1806652 - DNA, 25 bp, Homo sapien
actgatccactgatcgacgatcaat

SEQ ID NO: 1806653 - DNA, 25 bp, Homo sapien
ccactgatccgctgatggcaattta

SEQ ID NO: 1806654 - DNA, 25 bp, Homo sapien
taaaccatccaccaagagaataaaa

SEQ ID NO: 1806655 - DNA, 25 bp, Homo sapien
catcggcattcctgaataagccaca

SEQ ID NO: 1806656 - DNA, 25 bp, Homo sapien
tcttatcttcccatcggcattcctg

SEQ ID NO: 1806657 - DNA, 25 bp, Homo sapien
gccacagtgctatacactgtagaaa

SEQ ID NO: 1806658 - DNA, 25 bp, Homo sapien
taagccacagtgctatacactgtag

SEQ ID NO: 1806659 - DNA, 25 bp, Homo sapien
gatgtgggtccaagattcggcaata

SEQ ID NO: 1806660 - DNA, 25 bp, Homo sapien
gccaacagaacacctcagtaggaga

SEQ ID NO: 1806661 - DNA, 25 bp, Homo sapien
agagcaggatgatgtgggtccaaga

SEQ ID NO: 1806662 - DNA, 25 bp, Homo sapien
gctggaggccaacagaacacctcag

SEQ ID NO: 1806663 - DNA, 25 bp, Homo sapien
tgaacctgctgatgaaagccagttg

SEQ ID NO: 1806664 - DNA, 25 bp, Homo sapien
gcactggctgttgggattcttgtgc

SEQ ID NO: 1806665 - DNA, 25 bp, Homo sapien
gattcttgtgccaaatgcacatttg

SEQ ID NO: 1806666 - DNA, 25 bp, Homo sapien
aaccacatgcagacggcaacgggaa

SEQ ID NO: 1806667 - DNA, 25 bp, Homo sapien
tgttccaagcacaagaggctcctgg

SEQ ID NO: 1806668 - DNA, 25 bp, Homo sapien
tgtataaaacgctctgggtgtgacg

SEQ ID NO: 1806669 - DNA, 25 bp, Homo sapien
tgtgacgtattcatcagcatcagcc

SEQ ID NO: 1806670 - DNA, 25 bp, Homo sapien
ttcagtgggtccaggcgaacaccta

SEQ ID NO: 1806671 - DNA, 25 bp, Homo sapien
tggcaaatttgtgctccggctccga

SEQ ID NO: 1806672 - DNA, 25 bp, Homo sapien
tggatcttggccatggtgcactgtg

SEQ ID NO: 1806673 - DNA, 25 bp, Homo sapien
caggcaaaatatgacctcatgcgga

SEQ ID NO: 1806674 - DNA, 25 bp, Homo sapien
tgcggattcccatgcaggctctgaa

SEQ ID NO: 1806675 - DNA, 25 bp, Homo sapien
ttttgacagctcaatgagcaattgc

SEQ ID NO: 1806676 - DNA, 25 bp, Homo sapien
cctttttgacagctcaatgagcaat

SEQ ID NO: 1806677 - DNA, 25 bp, Homo sapien
cctgattgacaggaaggcagactgc

SEQ ID NO: 1806678 - DNA, 25 bp, Homo sapien
aactgaacctgattgacaggaaggc

SEQ ID NO: 1806679 - DNA, 25 bp, Homo sapien
tcctgtccggtgtgtgagaagcaac

SEQ ID NO: 1806680 - DNA, 25 bp, Homo sapien
gaagcaacagctgaatttgacccaa

SEQ ID NO: 1806681 - DNA, 25 bp, Homo sapien
gagtcttgtctcacgctcagtggtc

SEQ ID NO: 1806682 - DNA, 25 bp, Homo sapien
gatcgggcctctgcttaactttgag

SEQ ID NO: 1806683 - DNA, 25 bp, Homo sapien
cagtctgcttccctcgagggctcag

SEQ ID NO: 1806684 - DNA, 25 bp, Homo sapien
cccacagtgagctctcatccatctc

SEQ ID NO: 1806685 - DNA, 25 bp, Homo sapien
tggtgctaataagcctgtctctgtg

SEQ ID NO: 1806686 - DNA, 25 bp, Homo sapien
tgccagcccataagcccacagtgag

SEQ ID NO: 1806687 - DNA, 25 bp, Homo sapien
taatataatcattaaggtaatagtc

SEQ ID NO: 1806688 - DNA, 25 bp, Homo sapien
tataatataatcattaaggtaatag

SEQ ID NO: 1806689 - DNA, 25 bp, Homo sapien
ctataatataatcattaaggtaata

SEQ ID NO: 1806690 - DNA, 25 bp, Homo sapien
atataatcattaaggtaatagtcag

SEQ ID NO: 1806691 - DNA, 25 bp, Homo sapien
tcttctgagctcatacttctttctc

SEQ ID NO: 1806692 - DNA, 25 bp, Homo sapien
ttcatcttttatgatgacagcccca

SEQ ID NO: 1806693 - DNA, 25 bp, Homo sapien
atcttttatgatgacagccccattg

SEQ ID NO: 1806694 - DNA, 25 bp, Homo sapien
tttatgatgacagccccattgccgc

SEQ ID NO: 1806695 - DNA, 25 bp, Homo sapien
tgtacgggtgcatgagacctttcct

SEQ ID NO: 1806696 - DNA, 25 bp, Homo sapien
tgcatgaggaagattgtgtgacacc

SEQ ID NO: 1806697 - DNA, 25 bp, Homo sapien
tctgctcagtcctagcctgctgctg

SEQ ID NO: 1806698 - DNA, 25 bp, Homo sapien
tctgtgattacaaaacttggcatct

SEQ ID NO: 1806699 - DNA, 25 bp, Homo sapien
acctcgacggagcagaaacccgtag

SEQ ID NO: 1806700 - DNA, 25 bp, Homo sapien
acggagcagaaacccgtaggcgcca

SEQ ID NO: 1806701 - DNA, 25 bp, Homo sapien
caggaacctcgacggagcagaaacc

SEQ ID NO: 1806702 - DNA, 25 bp, Homo sapien
gggacccaggaacctcgacggagca

SEQ ID NO: 1806703 - DNA, 25 bp, Homo sapien
acacaccggatgaagtcaccagaat

SEQ ID NO: 1806704 - DNA, 25 bp, Homo sapien
cacaccggatgaagtcaccagaatg

SEQ ID NO: 1806705 - DNA, 25 bp, Homo sapien
aatagcgagtccctctccatttgta

SEQ ID NO: 1806706 - DNA, 25 bp, Homo sapien
tcaatagcgagtccctctccatttg

SEQ ID NO: 1806707 - DNA, 25 bp, Homo sapien
cctctccatttgtatattgtaatgg

SEQ ID NO: 1806708 - DNA, 25 bp, Homo sapien
catttgtatattgtaatgggtacac

SEQ ID NO: 1806709 - DNA, 25 bp, Homo sapien
gcctttaagtaaacatggtctcaaa

SEQ ID NO: 1806710 - DNA, 25 bp, Homo sapien
tggcattttacaacctcatctgcaa

SEQ ID NO: 1806711 - DNA, 25 bp, Homo sapien
aggaaaatgacaatggacgtggcat

SEQ ID NO: 1806712 - DNA, 25 bp, Homo sapien
catctgcaacagttacaggtctaaa

SEQ ID NO: 1806713 - DNA, 25 bp, Homo sapien
aaacagaaaacatgtcgagctcata

SEQ ID NO: 1806714 - DNA, 25 bp, Homo sapien
tggcctccggttgtcaatagcagca

SEQ ID NO: 1806715 - DNA, 25 bp, Homo sapien
tcagtgctggcctccggttgtcaat

SEQ ID NO: 1806716 - DNA, 25 bp, Homo sapien
gagctcataggaacaccgctttctt

SEQ ID NO: 1806717 - DNA, 25 bp, Homo sapien
tgcaggcagatgagaatcaggcccg

SEQ ID NO: 1806718 - DNA, 25 bp, Homo sapien
tcaacaagaagccacggtcatgaga

SEQ ID NO: 1806719 - DNA, 25 bp, Homo sapien
tgtggctcacaggtggtttcactgg

SEQ ID NO: 1806720 - DNA, 25 bp, Homo sapien
gtttattttcgtgggaaggctgtgc

SEQ ID NO: 1806721 - DNA, 25 bp, Homo sapien
ttctccttcgtgacatgtccctggt

SEQ ID NO: 1806722 - DNA, 25 bp, Homo sapien
tgaggccagatggtctttgcctcat

SEQ ID NO: 1806723 - DNA, 25 bp, Homo sapien
tcatctctgtaggtccccctcggtt

SEQ ID NO: 1806724 - DNA, 25 bp, Homo sapien
ggctgttgctctgaactaccaaggc

SEQ ID NO: 1806725 - DNA, 25 bp, Homo sapien
gaggccatggccaagtgattcagtt

SEQ ID NO: 1806726 - DNA, 25 bp, Homo sapien
tgactaagatcagaccccaacaggt

SEQ ID NO: 1806727 - DNA, 25 bp, Homo sapien
cataaaaggcatggaattgatgtct

SEQ ID NO: 1806728 - DNA, 25 bp, Homo sapien
tcaatgcacaatgaggtcacacggt

SEQ ID NO: 1806729 - DNA, 25 bp, Homo sapien
ggaaaagtgccgactccacttctga

SEQ ID NO: 1806730 - DNA, 25 bp, Homo sapien
aaagtgccgactccacttctgaagg

SEQ ID NO: 1806731 - DNA, 25 bp, Homo sapien
agggaaaagtgccgactccacttct

SEQ ID NO: 1806732 - DNA, 25 bp, Homo sapien
gaaaagtgccgactccacttctgaa

SEQ ID NO: 1806733 - DNA, 25 bp, Homo sapien
atattctacctgaatgtctctagta

SEQ ID NO: 1806734 - DNA, 25 bp, Homo sapien
tactatggcccaatgtttgggacta

SEQ ID NO: 1806735 - DNA, 25 bp, Homo sapien
taagacaaagctactgtccatccac

SEQ ID NO: 1806736 - DNA, 25 bp, Homo sapien
tgggactataaaggatgttaagaca

SEQ ID NO: 1806737 - DNA, 25 bp, Homo sapien
ccgcctttttggcaggatgcgtgct

SEQ ID NO: 1806738 - DNA, 25 bp, Homo sapien
catatacgggtcagccccggataac

SEQ ID NO: 1806739 - DNA, 25 bp, Homo sapien
ccggataacagaccgcagccgagcg

SEQ ID NO: 1806740 - DNA, 25 bp, Homo sapien
cccagtccactccaaaaggcatata

SEQ ID NO: 1806741 - DNA, 25 bp, Homo sapien
tttggaacacctctaatctcttttc

SEQ ID NO: 1806742 - DNA, 25 bp, Homo sapien
ttggaacacctctaatctcttttct

SEQ ID NO: 1806743 - DNA, 25 bp, Homo sapien
tggaacacctctaatctcttttctc

SEQ ID NO: 1806744 - DNA, 25 bp, Homo sapien
ctttggaacacctctaatctctttt

SEQ ID NO: 1806745 - DNA, 25 bp, Homo sapien
gtgatcactgcttttgttcaagttg

SEQ ID NO: 1806746 - DNA, 25 bp, Homo sapien
tgcttttgttcaagttgtcccgcat

SEQ ID NO: 1806747 - DNA, 25 bp, Homo sapien
actgcttttgttcaagttgtcccgc

SEQ ID NO: 1806748 - DNA, 25 bp, Homo sapien
tcactgcttttgttcaagttgtccc

SEQ ID NO: 1806749 - DNA, 25 bp, Homo sapien
gcttcggatttgcaaagattcagaa

SEQ ID NO: 1806750 - DNA, 25 bp, Homo sapien
gggtcggcctcctcttttgaagaca

SEQ ID NO: 1806751 - DNA, 25 bp, Homo sapien
gacaggcgttgcttcggatttgcaa

SEQ ID NO: 1806752 - DNA, 25 bp, Homo sapien
tagttcagtccctgcttcgctgaaa

SEQ ID NO: 1806753 - DNA, 25 bp, Homo sapien
ctgcaggagcaggcaagccagtttt

SEQ ID NO: 1806754 - DNA, 25 bp, Homo sapien
gcaggagcaggcaagccagttttgt

SEQ ID NO: 1806755 - DNA, 25 bp, Homo sapien
caggagcaggcaagccagttttgta

SEQ ID NO: 1806756 - DNA, 25 bp, Homo sapien
tgcaggagcaggcaagccagttttg

SEQ ID NO: 1806757 - DNA, 25 bp, Homo sapien
catgcgcagaggaggtgaaggtgtt

SEQ ID NO: 1806758 - DNA, 25 bp, Homo sapien
caccaggactccacgtgagaaggca

SEQ ID NO: 1806759 - DNA, 25 bp, Homo sapien
cactgcatggtgagagcctcagcca

SEQ ID NO: 1806760 - DNA, 25 bp, Homo sapien
agaggagagggactcgggcaagggc

SEQ ID NO: 1806761 - DNA, 25 bp, Homo sapien
acacccccgtattctgcattggtca

SEQ ID NO: 1806762 - DNA, 25 bp, Homo sapien
gagaaacaaaggcacccagttgtcc

SEQ ID NO: 1806763 - DNA, 25 bp, Homo sapien
gttgtccagaaacaatgggctccac

SEQ ID NO: 1806764 - DNA, 25 bp, Homo sapien
cagagaagtgaacccatgagaaaca

SEQ ID NO: 1806765 - DNA, 25 bp, Homo sapien
tctgcaaagtcaacactggcacttt

SEQ ID NO: 1806766 - DNA, 25 bp, Homo sapien
ctgcaaagtcaacactggcactttc

SEQ ID NO: 1806767 - DNA, 25 bp, Homo sapien
ctctgcaaagtcaacactggcactt

SEQ ID NO: 1806768 - DNA, 25 bp, Homo sapien
taatagggcaggcaaacaccaaaga

SEQ ID NO: 1806769 - DNA, 25 bp, Homo sapien
tagggcaggcaaacaccaaagactg

SEQ ID NO: 1806770 - DNA, 25 bp, Homo sapien
aaataatagggcaggcaaacaccaa

SEQ ID NO: 1806771 - DNA, 25 bp, Homo sapien
tatttgaagggaaataatagggcag

SEQ ID NO: 1806772 - DNA, 25 bp, Homo sapien
tcctgtagcgttcccacctcttaca

SEQ ID NO: 1806773 - DNA, 25 bp, Homo sapien
agtgccagtcctcctccgccttttc

SEQ ID NO: 1806774 - DNA, 25 bp, Homo sapien
tcagcaacaggaccttcgtgcacaa

SEQ ID NO: 1806775 - DNA, 25 bp, Homo sapien
aggaccttcgtgcacaagtgccagt

SEQ ID NO: 1806776 - DNA, 25 bp, Homo sapien
ttcgtacgtttggatgtcagcatgg

SEQ ID NO: 1806777 - DNA, 25 bp, Homo sapien
ccgacctgccttcgtacgtttggat

SEQ ID NO: 1806778 - DNA, 25 bp, Homo sapien
tgccttcgtacgtttggatgtcagc

SEQ ID NO: 1806779 - DNA, 25 bp, Homo sapien
tacgtttggatgtcagcatgggtgt

SEQ ID NO: 1806780 - DNA, 25 bp, Homo sapien
ctttaacgggatgctgctagagcta

SEQ ID NO: 1806781 - DNA, 25 bp, Homo sapien
acgggatgctgctagagctaaccat

SEQ ID NO: 1806782 - DNA, 25 bp, Homo sapien
tctgttcctggctttaacgggatgc

SEQ ID NO: 1806783 - DNA, 25 bp, Homo sapien
tcctggctttaacgggatgctgcta

SEQ ID NO: 1806784 - DNA, 25 bp, Homo sapien
gaggcacggcgttcactgtgagctt

SEQ ID NO: 1806785 - DNA, 25 bp, Homo sapien
ttctgccttgcgaatgtcctgtcca

SEQ ID NO: 1806786 - DNA, 25 bp, Homo sapien
tggcaacagtttttaaccggacagc

SEQ ID NO: 1806787 - DNA, 25 bp, Homo sapien
ggacagttcttgtgagctcgagcta

SEQ ID NO: 1806788 - DNA, 25 bp, Homo sapien
gagttcattgtagagatacacaaag

SEQ ID NO: 1806789 - DNA, 25 bp, Homo sapien
ggattgacacatgtcagggtcttaa

SEQ ID NO: 1806790 - DNA, 25 bp, Homo sapien
tcatgaagactgtggattgacacat

SEQ ID NO: 1806791 - DNA, 25 bp, Homo sapien
gggtgaccataagattaggagttca

SEQ ID NO: 1806792 - DNA, 25 bp, Homo sapien
gggtaatatcactgattaaaatatg

SEQ ID NO: 1806793 - DNA, 25 bp, Homo sapien
gcttacgaaaatgtgccttactcat

SEQ ID NO: 1806794 - DNA, 25 bp, Homo sapien
gcagggagtctgcattctgagtctt

SEQ ID NO: 1806795 - DNA, 25 bp, Homo sapien
aatatgaaattcctgctgcagcggg

SEQ ID NO: 1806796 - DNA, 25 bp, Homo sapien
aagcacggcattggttttagtcccg

SEQ ID NO: 1806797 - DNA, 25 bp, Homo sapien
tagtcccgtttctttcgaggagatc

SEQ ID NO: 1806798 - DNA, 25 bp, Homo sapien
tgccctaacccaagcacggcattgg

SEQ ID NO: 1806799 - DNA, 25 bp, Homo sapien
cgtttctttcgaggagatcatgttc

SEQ ID NO: 1806800 - DNA, 25 bp, Homo sapien
ttcttgtaggcagtagccggccagc

SEQ ID NO: 1806801 - DNA, 25 bp, Homo sapien
aaggcaggcactctcggttagcgtc

SEQ ID NO: 1806802 - DNA, 25 bp, Homo sapien
gttgcatgaaccgaccacactatgg

SEQ ID NO: 1806803 - DNA, 25 bp, Homo sapien
tataaccttccttgtagtgggctcc

SEQ ID NO: 1806804 - DNA, 25 bp, Homo sapien
tgacatcaacaaccggtagccggtc

SEQ ID NO: 1806805 - DNA, 25 bp, Homo sapien
ctcagtgttgcaggaatgttgacat

SEQ ID NO: 1806806 - DNA, 25 bp, Homo sapien
catcaacaaccggtagccggtctgg

SEQ ID NO: 1806807 - DNA, 25 bp, Homo sapien
caacaaccggtagccggtctggtct

SEQ ID NO: 1806808 - DNA, 25 bp, Homo sapien
gctagtttctttccgaatgactgtg

SEQ ID NO: 1806809 - DNA, 25 bp, Homo sapien
cttgtggttgctagtttctttccga

SEQ ID NO: 1806810 - DNA, 25 bp, Homo sapien
ggttgctagtttctttccgaatgac

SEQ ID NO: 1806811 - DNA, 25 bp, Homo sapien
tctttccgaatgactgtggctccat

SEQ ID NO: 1806812 - DNA, 25 bp, Homo sapien
gccctgatgtaggtagcaggagcat

SEQ ID NO: 1806813 - DNA, 25 bp, Homo sapien
agtgtggctgcatccggcaacatga

SEQ ID NO: 1806814 - DNA, 25 bp, Homo sapien
ctgcatccggcaacatgagccctga

SEQ ID NO: 1806815 - DNA, 25 bp, Homo sapien
aacatgagccctgatgtaggtagca

SEQ ID NO: 1806816 - DNA, 25 bp, Homo sapien
gtagctgataggaaagcagtagcag

SEQ ID NO: 1806817 - DNA, 25 bp, Homo sapien
gcagcatgcttttgactcacttatc

SEQ ID NO: 1806818 - DNA, 25 bp, Homo sapien
tctctaattaggtgagtagctgata

SEQ ID NO: 1806819 - DNA, 25 bp, Homo sapien
gaaaaatggagtacttgtctctaat

SEQ ID NO: 1806820 - DNA, 25 bp, Homo sapien
atttggtgaaggacttactaactga

SEQ ID NO: 1806821 - DNA, 25 bp, Homo sapien
ggtacacggcaattctcagttaaac

SEQ ID NO: 1806822 - DNA, 25 bp, Homo sapien
cgggaagtttttacacaactctgtg

SEQ ID NO: 1806823 - DNA, 25 bp, Homo sapien
cacagaggacaactccgggaagttt

SEQ ID NO: 1806824 - DNA, 25 bp, Homo sapien
tgcatagatcaatgggcttgttgga

SEQ ID NO: 1806825 - DNA, 25 bp, Homo sapien
cagcaagttgagagaatgaattaca

SEQ ID NO: 1806826 - DNA, 25 bp, Homo sapien
gggaaggcacatccgctccacccct

SEQ ID NO: 1806827 - DNA, 25 bp, Homo sapien
tactgtcagaaacacttacacattg

SEQ ID NO: 1806828 - DNA, 25 bp, Homo sapien
actccagagcttattaagtcttggg

SEQ ID NO: 1806829 - DNA, 25 bp, Homo sapien
agagcttattaagtcttggggagaa

SEQ ID NO: 1806830 - DNA, 25 bp, Homo sapien
cgaactccagagcttattaagtctt

SEQ ID NO: 1806831 - DNA, 25 bp, Homo sapien
cagagcttattaagtcttggggaga

SEQ ID NO: 1806832 - DNA, 25 bp, Homo sapien
caatgttggaactgcgtatggccat

SEQ ID NO: 1806833 - DNA, 25 bp, Homo sapien
gggtctgaccagtaacagatcaatg

SEQ ID NO: 1806834 - DNA, 25 bp, Homo sapien
ggaactgcgtatggccattttttgt

SEQ ID NO: 1806835 - DNA, 25 bp, Homo sapien
taacagatcaatgttggaactgcgt

SEQ ID NO: 1806836 - DNA, 25 bp, Homo sapien
actgtttcgcctatgcagctctacc

SEQ ID NO: 1806837 - DNA, 25 bp, Homo sapien
tgccaccactgtttcgcctatgcag

SEQ ID NO: 1806838 - DNA, 25 bp, Homo sapien
tatgcagctctacccctaagactga

SEQ ID NO: 1806839 - DNA, 25 bp, Homo sapien
tggctgccaccactgtttcgcctat

SEQ ID NO: 1806840 - DNA, 25 bp, Homo sapien
gctaagagtgctatacaatcctgga

SEQ ID NO: 1806841 - DNA, 25 bp, Homo sapien
ctgagcagctggctaatcgagctaa

SEQ ID NO: 1806842 - DNA, 25 bp, Homo sapien
cacatctgattcatcattggatgac

SEQ ID NO: 1806843 - DNA, 25 bp, Homo sapien
tatacaatcctggagggttaatatc

SEQ ID NO: 1806844 - DNA, 25 bp, Homo sapien
ctaacgaccattctgttcccgatgt

SEQ ID NO: 1806845 - DNA, 25 bp, Homo sapien
caaggacgtgggctgagatattttc

SEQ ID NO: 1806846 - DNA, 25 bp, Homo sapien
ccggacctgtgacgcttcctgcagt

SEQ ID NO: 1806847 - DNA, 25 bp, Homo sapien
tgttcccgatgttcaggcccaagga

SEQ ID NO: 1806848 - DNA, 25 bp, Homo sapien
gggaatacctggacatctcaaggcc

SEQ ID NO: 1806849 - DNA, 25 bp, Homo sapien
acacacttgcatgactgtacctggg

SEQ ID NO: 1806850 - DNA, 25 bp, Homo sapien
cttttgtaatgacacccagtcctct

SEQ ID NO: 1806851 - DNA, 25 bp, Homo sapien
agtcctcttccgaaggctctcaggg

SEQ ID NO: 1806852 - DNA, 25 bp, Homo sapien
ctggcagcgagtagggtgctggcct

SEQ ID NO: 1806853 - DNA, 25 bp, Homo sapien
gcagcgagtagggtgctggcctctc

SEQ ID NO: 1806854 - DNA, 25 bp, Homo sapien
agcgagtagggtgctggcctctcgg

SEQ ID NO: 1806855 - DNA, 25 bp, Homo sapien
tggcagcgagtagggtgctggcctc

SEQ ID NO: 1806856 - DNA, 25 bp, Homo sapien
taataattctttgaagttttcagtg

SEQ ID NO: 1806857 - DNA, 25 bp, Homo sapien
attctttgaagttttcagtgctcct

SEQ ID NO: 1806858 - DNA, 25 bp, Homo sapien
taattctttgaagttttcagtgctc

SEQ ID NO: 1806859 - DNA, 25 bp, Homo sapien
aataattctttgaagttttcagtgc

SEQ ID NO: 1806860 - DNA, 25 bp, Homo sapien
ctccgctcctctgtttgaagattgg

SEQ ID NO: 1806861 - DNA, 25 bp, Homo sapien
tccgctcctctgtttgaagattgga

SEQ ID NO: 1806862 - DNA, 25 bp, Homo sapien
gcttgtgagagttcaagattaaaca

SEQ ID NO: 1806863 - DNA, 25 bp, Homo sapien
cattctaagggtccaggcgtttttg

SEQ ID NO: 1806864 - DNA, 25 bp, Homo sapien
tatacactctaaaccccagtttgga

SEQ ID NO: 1806865 - DNA, 25 bp, Homo sapien
agattgcttaggcttcctcatcgcc

SEQ ID NO: 1806866 - DNA, 25 bp, Homo sapien
ctgcgacctctcatgaaagggtgcg

SEQ ID NO: 1806867 - DNA, 25 bp, Homo sapien
tgaggtctctcgtaatggcggtatg

SEQ ID NO: 1806868 - DNA, 25 bp, Homo sapien
agcggctcgcggcttctcctgagtg

SEQ ID NO: 1806869 - DNA, 25 bp, Homo sapien
tgcggatggcctctggtgaactgga

SEQ ID NO: 1806870 - DNA, 25 bp, Homo sapien
tagaggttacttctcgaggacacgc

SEQ ID NO: 1806871 - DNA, 25 bp, Homo sapien
gaatgcagtttataacaatcactag

SEQ ID NO: 1806872 - DNA, 25 bp, Homo sapien
gttgtctacctgttgcagtgagtaa

SEQ ID NO: 1806873 - DNA, 25 bp, Homo sapien
ttatcggcatcttgtgtggctcttt

SEQ ID NO: 1806874 - DNA, 25 bp, Homo sapien
tcctcaatcacttctagcactctca

SEQ ID NO: 1806875 - DNA, 25 bp, Homo sapien
gcaagcccagcgctggcttcctcaa

SEQ ID NO: 1806876 - DNA, 25 bp, Homo sapien
cagcgctggcttcctcaatcacttc

SEQ ID NO: 1806877 - DNA, 25 bp, Homo sapien
tctagcactctcaggacgctgactg

SEQ ID NO: 1806878 - DNA, 25 bp, Homo sapien
caaaggctgtgtagccactatggga

SEQ ID NO: 1806879 - DNA, 25 bp, Homo sapien
accggcgctagagcaagaccagaca

SEQ ID NO: 1806880 - DNA, 25 bp, Homo sapien
cactatgggatggttttatgcaatc

SEQ ID NO: 1806881 - DNA, 25 bp, Homo sapien
gatgaggacatagcctgccagaagc

SEQ ID NO: 1806882 - DNA, 25 bp, Homo sapien
aagagaaatggcatggggtcctccg

SEQ ID NO: 1806883 - DNA, 25 bp, Homo sapien
cataccctgagaaacgggctcagca

SEQ ID NO: 1806884 - DNA, 25 bp, Homo sapien
atctgtggacgctgcataccctgag

SEQ ID NO: 1806885 - DNA, 25 bp, Homo sapien
aaatggcatggggtcctccggactg

SEQ ID NO: 1806886 - DNA, 25 bp, Homo sapien
gaaatgttaatggtggtctcctgaa

SEQ ID NO: 1806887 - DNA, 25 bp, Homo sapien
agtagaagtatttttgaacggcaag

SEQ ID NO: 1806888 - DNA, 25 bp, Homo sapien
cattcccatagaaagaagctatttg

SEQ ID NO: 1806889 - DNA, 25 bp, Homo sapien
gaacggcaagaatggattttttgaa

SEQ ID NO: 1806890 - DNA, 25 bp, Homo sapien
gaagcaaatgttaagtctctgaaag

SEQ ID NO: 1806891 - DNA, 25 bp, Homo sapien
ggagcccatgtctgacctggttggc

SEQ ID NO: 1806892 - DNA, 25 bp, Homo sapien
ctttctcaatgatgaaggagtgggt

SEQ ID NO: 1806893 - DNA, 25 bp, Homo sapien
tcataagatgggacagctgaatttc

SEQ ID NO: 1806894 - DNA, 25 bp, Homo sapien
taacttagttccagatcatacatcc

SEQ ID NO: 1806895 - DNA, 25 bp, Homo sapien
gcaggcagccaaggcaatatttcat

SEQ ID NO: 1806896 - DNA, 25 bp, Homo sapien
ggtgatgttaattatgcctttatgg

SEQ ID NO: 1806897 - DNA, 25 bp, Homo sapien
catacatccaaatgcccgcagggca

SEQ ID NO: 1806898 - DNA, 25 bp, Homo sapien
agaggtgttttcattcttggctgct

SEQ ID NO: 1806899 - DNA, 25 bp, Homo sapien
gggggtgaccaccaccagagatccc

SEQ ID NO: 1806900 - DNA, 25 bp, Homo sapien
gccaccaaggacaatagcgatctga

SEQ ID NO: 1806901 - DNA, 25 bp, Homo sapien
cttggctgctggaaaatagccagga

SEQ ID NO: 1806902 - DNA, 25 bp, Homo sapien
aaaccagtatggtattgggaagcat

SEQ ID NO: 1806903 - DNA, 25 bp, Homo sapien
gggatgcagggatcgaaaaccagta

SEQ ID NO: 1806904 - DNA, 25 bp, Homo sapien
aaatgccgatgatgacagtggtggg

SEQ ID NO: 1806905 - DNA, 25 bp, Homo sapien
tattggtaaaccagagagtctcaaa

SEQ ID NO: 1806906 - DNA, 25 bp, Homo sapien
acttggagcgcacttctgaagggtc

SEQ ID NO: 1806907 - DNA, 25 bp, Homo sapien
gccactctccccaaaggatgaattc

SEQ ID NO: 1806908 - DNA, 25 bp, Homo sapien
caaaggatgaattccagctgctgag

SEQ ID NO: 1806909 - DNA, 25 bp, Homo sapien
cttgcaatgttgctttggcacttgg

SEQ ID NO: 1806910 - DNA, 25 bp, Homo sapien
tagctcagaggatgcaccatccagg

SEQ ID NO: 1806911 - DNA, 25 bp, Homo sapien
tctcctgggcacctagctcagagga

SEQ ID NO: 1806912 - DNA, 25 bp, Homo sapien
tcctgggcacctagctcagaggatg

SEQ ID NO: 1806913 - DNA, 25 bp, Homo sapien
ggctctcctgggcacctagctcaga

SEQ ID NO: 1806914 - DNA, 25 bp, Homo sapien
taaatatgtcagacatatgctggtt

SEQ ID NO: 1806915 - DNA, 25 bp, Homo sapien
cagccaaaatatagtcagcactgct

SEQ ID NO: 1806916 - DNA, 25 bp, Homo sapien
gtcagcactgctaaatatgtcagac

SEQ ID NO: 1806917 - DNA, 25 bp, Homo sapien
atatagtgggtcccagccaaaatat

SEQ ID NO: 1806918 - DNA, 25 bp, Homo sapien
tgaacttggtgccttgaaacggcac

SEQ ID NO: 1806919 - DNA, 25 bp, Homo sapien
tttcctcacgagcttgcagcaggct

SEQ ID NO: 1806920 - DNA, 25 bp, Homo sapien
tctcatttcctcacgagcttgcagc

SEQ ID NO: 1806921 - DNA, 25 bp, Homo sapien
catgaacttggtgccttgaaacggc

SEQ ID NO: 1806922 - DNA, 25 bp, Homo sapien
tcggagatcctgactagagaagctt

SEQ ID NO: 1806923 - DNA, 25 bp, Homo sapien
gaagcttggagaaacctgaggccca

SEQ ID NO: 1806924 - DNA, 25 bp, Homo sapien
gacttgacttagatagcctgggcac

SEQ ID NO: 1806925 - DNA, 25 bp, Homo sapien
taaggtcatgaatgggcagggctac

SEQ ID NO: 1806926 - DNA, 25 bp, Homo sapien
cttgctccacgatgtggatgtgtga

SEQ ID NO: 1806927 - DNA, 25 bp, Homo sapien
atcacccccgtgactggccacggca

SEQ ID NO: 1806928 - DNA, 25 bp, Homo sapien
cctgcttgctccacgatgtggatgt

SEQ ID NO: 1806929 - DNA, 25 bp, Homo sapien
tccacgatgtggatgtgtgatggat

SEQ ID NO: 1806930 - DNA, 25 bp, Homo sapien
atcccgcttcttacattcacaagct

SEQ ID NO: 1806931 - DNA, 25 bp, Homo sapien
gagtcaaaagctactgtgtcacatg

SEQ ID NO: 1806932 - DNA, 25 bp, Homo sapien
cattcacaagctcccgagtcaaaag

SEQ ID NO: 1806933 - DNA, 25 bp, Homo sapien
gctcccgagtcaaaagctactgtgt

SEQ ID NO: 1806934 - DNA, 25 bp, Homo sapien
tgacatcttctaaatttctcatgtg

SEQ ID NO: 1806935 - DNA, 25 bp, Homo sapien
ttgtgaaactaaatagccctggttg

SEQ ID NO: 1806936 - DNA, 25 bp, Homo sapien
ctggttggttggccgttctttgaca

SEQ ID NO: 1806937 - DNA, 25 bp, Homo sapien
tgtgaaactaaatagccctggttgg

SEQ ID NO: 1806938 - DNA, 25 bp, Homo sapien
cttgcgggatggtgttgacagttca

SEQ ID NO: 1806939 - DNA, 25 bp, Homo sapien
taatttctccgcagtgtgaagtcct

SEQ ID NO: 1806940 - DNA, 25 bp, Homo sapien
cccttgcgggatggtgttgacagtt

SEQ ID NO: 1806941 - DNA, 25 bp, Homo sapien
caaccaattttaagtccactctcag

SEQ ID NO: 1806942 - DNA, 25 bp, Homo sapien
aaggtatttcaattcacttggtgtt

SEQ ID NO: 1806943 - DNA, 25 bp, Homo sapien
aggtatttcaattcacttggtgttt

SEQ ID NO: 1806944 - DNA, 25 bp, Homo sapien
ctctagaacctggaggtaaccacta

SEQ ID NO: 1806945 - DNA, 25 bp, Homo sapien
cctggaggtaaccactatttgtcat

SEQ ID NO: 1806946 - DNA, 25 bp, Homo sapien
agaacctggaggtaaccactatttg

SEQ ID NO: 1806947 - DNA, 25 bp, Homo sapien
acctggaggtaaccactatttgtca

SEQ ID NO: 1806948 - DNA, 25 bp, Homo sapien
tttacagataacatcagtgaaactg

SEQ ID NO: 1806949 - DNA, 25 bp, Homo sapien
gataacatcagtgaaactgtgccca

SEQ ID NO: 1806950 - DNA, 25 bp, Homo sapien
agatgcaatatatgcagcagggagc

SEQ ID NO: 1806951 - DNA, 25 bp, Homo sapien
tgtgcccaacggaagatgcaatata

SEQ ID NO: 1806952 - DNA, 25 bp, Homo sapien
tcactgcagcgtgcatagaagagct

SEQ ID NO: 1806953 - DNA, 25 bp, Homo sapien
cgtgcatagaagagctccccaagat

SEQ ID NO: 1806954 - DNA, 25 bp, Homo sapien
cacttggtgtacacatcactgcagc

SEQ ID NO: 1806955 - DNA, 25 bp, Homo sapien
ttccgtacgcttcccacttggtgta

SEQ ID NO: 1806956 - DNA, 25 bp, Homo sapien
tcttttgactcccttatgaaaggaa

SEQ ID NO: 1806957 - DNA, 25 bp, Homo sapien
gcggttcaggaattgcatccttgtg

SEQ ID NO: 1806958 - DNA, 25 bp, Homo sapien
ttcagctgcggttcaggaattgcat

SEQ ID NO: 1806959 - DNA, 25 bp, Homo sapien
gctgcggttcaggaattgcatcctt

SEQ ID NO: 1806960 - DNA, 25 bp, Homo sapien
tgtggcttcagctgcggttcaggaa

SEQ ID NO: 1806961 - DNA, 25 bp, Homo sapien
tattcaacgtgttcatccttcctgc

SEQ ID NO: 1806962 - DNA, 25 bp, Homo sapien
tcctgctggcataaggtcccacact

SEQ ID NO: 1806963 - DNA, 25 bp, Homo sapien
cctggtgcccatacaagttgtctga

SEQ ID NO: 1806964 - DNA, 25 bp, Homo sapien
cacactggccctaggaatcttgttg

SEQ ID NO: 1806965 - DNA, 25 bp, Homo sapien
tctgatctgagcgtagtgtgggcca

SEQ ID NO: 1806966 - DNA, 25 bp, Homo sapien
ccaagctttccaatactccctagta

SEQ ID NO: 1806967 - DNA, 25 bp, Homo sapien
ttgtgggagtattgaaggtcttgct

SEQ ID NO: 1806968 - DNA, 25 bp, Homo sapien
gagatattctgatctgagcgtagtg

SEQ ID NO: 1806969 - DNA, 25 bp, Homo sapien
gagaactgtcagaacacgttcttgc

SEQ ID NO: 1806970 - DNA, 25 bp, Homo sapien
tcggcagagtgaagatctagcacag

SEQ ID NO: 1806971 - DNA, 25 bp, Homo sapien
tgcagcttcttctgcggattctgct

SEQ ID NO: 1806972 - DNA, 25 bp, Homo sapien
agtttcctgtacctgaggcagcgct

SEQ ID NO: 1806973 - DNA, 25 bp, Homo sapien
attgttcttgcccatcgctgaccgt

SEQ ID NO: 1806974 - DNA, 25 bp, Homo sapien
gaaattgttcttgcccatcgctgac

SEQ ID NO: 1806975 - DNA, 25 bp, Homo sapien
ctgaaattgttcttgcccatcgctg

SEQ ID NO: 1806976 - DNA, 25 bp, Homo sapien
gagtctgaaattgttcttgcccatc

SEQ ID NO: 1806977 - DNA, 25 bp, Homo sapien
taaggccactaacacagagaagaag

SEQ ID NO: 1806978 - DNA, 25 bp, Homo sapien
tcagtgctgttaaggccactaacac

SEQ ID NO: 1806979 - DNA, 25 bp, Homo sapien
ctttcctcacattctcagtgctgtt

SEQ ID NO: 1806980 - DNA, 25 bp, Homo sapien
tggcattgaagacacgggttgtgct

SEQ ID NO: 1806981 - DNA, 25 bp, Homo sapien
cagcagaagctctaattcatttgtc

SEQ ID NO: 1806982 - DNA, 25 bp, Homo sapien
gtgtacagcagaagctctaattcat

SEQ ID NO: 1806983 - DNA, 25 bp, Homo sapien
gaagctctaattcatttgtctgcaa

SEQ ID NO: 1806984 - DNA, 25 bp, Homo sapien
tctgcaataacagggggtgagtgtg

SEQ ID NO: 1806985 - DNA, 25 bp, Homo sapien
cagagaccagagactaagttcttgc

SEQ ID NO: 1806986 - DNA, 25 bp, Homo sapien
tcaatggatgtcttatgggacagca

SEQ ID NO: 1806987 - DNA, 25 bp, Homo sapien
tgagagcggccacagtgttccaagc

SEQ ID NO: 1806988 - DNA, 25 bp, Homo sapien
tttgtcagggagtatgcaccagggt

SEQ ID NO: 1806989 - DNA, 25 bp, Homo sapien
ttgtttcgcacagggaactccaagc

SEQ ID NO: 1806990 - DNA, 25 bp, Homo sapien
ctaaaggactctgacagcctccgct

SEQ ID NO: 1806991 - DNA, 25 bp, Homo sapien
ccctgatgtagaagcagctaaagga

SEQ ID NO: 1806992 - DNA, 25 bp, Homo sapien
gcagctcactgaatactctggaagc

SEQ ID NO: 1806993 - DNA, 25 bp, Homo sapien
agtatgtttcctgtacctttctctg

SEQ ID NO: 1806994 - DNA, 25 bp, Homo sapien
agaggttcctgtgttcttagtatgt

SEQ ID NO: 1806995 - DNA, 25 bp, Homo sapien
tcttagtatgtttcctgtacctttc

SEQ ID NO: 1806996 - DNA, 25 bp, Homo sapien
gtgttcttagtatgtttcctgtacc

SEQ ID NO: 1806997 - DNA, 25 bp, Homo sapien
ctgtgaggatcagggagccttttga

SEQ ID NO: 1806998 - DNA, 25 bp, Homo sapien
gaccacctgtgaggatcagggagcc

SEQ ID NO: 1806999 - DNA, 25 bp, Homo sapien
tgtgaggatcagggagccttttgag

SEQ ID NO: 1807000 - DNA, 25 bp, Homo sapien
ctttttcaagccctcttctggacat

SEQ ID NO: 1807001 - DNA, 25 bp, Homo sapien
gacaacactgtatttggtcttcttt

SEQ ID NO: 1807002 - DNA, 25 bp, Homo sapien
tctttttcaagccctcttctggaca

SEQ ID NO: 1807003 - DNA, 25 bp, Homo sapien
tctgctactactctggccagttttt

SEQ ID NO: 1807004 - DNA, 25 bp, Homo sapien
tccttagatcttctgctactactct

SEQ ID NO: 1807005 - DNA, 25 bp, Homo sapien
tgctactactctggccagttttttc

SEQ ID NO: 1807006 - DNA, 25 bp, Homo sapien
gatcttctgctactactctggccag

SEQ ID NO: 1807007 - DNA, 25 bp, Homo sapien
ggtagatcttgaccaagccacattt

SEQ ID NO: 1807008 - DNA, 25 bp, Homo sapien
cattttcagccttcctgtggagttc

SEQ ID NO: 1807009 - DNA, 25 bp, Homo sapien
gacattgctcgagtgcttgctgata

SEQ ID NO: 1807010 - DNA, 25 bp, Homo sapien
tcacattgaaggataatgacacggc

SEQ ID NO: 1807011 - DNA, 25 bp, Homo sapien
aatgcctccgagtgatgcctgtgat

SEQ ID NO: 1807012 - DNA, 25 bp, Homo sapien
aagggaaaatgcctccgagtgatgc

SEQ ID NO: 1807013 - DNA, 25 bp, Homo sapien
gaaaatgcctccgagtgatgcctgt

SEQ ID NO: 1807014 - DNA, 25 bp, Homo sapien
gggaaaatgcctccgagtgatgcct

SEQ ID NO: 1807015 - DNA, 25 bp, Homo sapien
gaaattcactccttgcactacatcc

SEQ ID NO: 1807016 - DNA, 25 bp, Homo sapien
tcgcctccggtcaagaaattgacta

SEQ ID NO: 1807017 - DNA, 25 bp, Homo sapien
tcctctgaactaacatgtgctatca

SEQ ID NO: 1807018 - DNA, 25 bp, Homo sapien
gtgctatcagctcaaggtcgcctcc

SEQ ID NO: 1807019 - DNA, 25 bp, Homo sapien
ctctggatatgatattgttttccag

SEQ ID NO: 1807020 - DNA, 25 bp, Homo sapien
tactctctgctaggacctccaggga

SEQ ID NO: 1807021 - DNA, 25 bp, Homo sapien
gaatgaccgtaacacgtatctcgta

SEQ ID NO: 1807022 - DNA, 25 bp, Homo sapien
tccagtgtttctctaggaggatgaa

SEQ ID NO: 1807023 - DNA, 25 bp, Homo sapien
agtcttgcaggaaccctgcagccca

SEQ ID NO: 1807024 - DNA, 25 bp, Homo sapien
aggtgcctctgtctaggtttgacac

SEQ ID NO: 1807025 - DNA, 25 bp, Homo sapien
tgtgagtcttgcaggaaccctgcag

SEQ ID NO: 1807026 - DNA, 25 bp, Homo sapien
gtttgacacgtaatctactgactca

SEQ ID NO: 1807027 - DNA, 25 bp, Homo sapien
atccagtagctcccagttagcctgg

SEQ ID NO: 1807028 - DNA, 25 bp, Homo sapien
gtcaggggccaggtgatttcatttc

SEQ ID NO: 1807029 - DNA, 25 bp, Homo sapien
tgtatccagtagctcccagttagcc

SEQ ID NO: 1807030 - DNA, 25 bp, Homo sapien
ctgtatccagtagctcccagttagc

SEQ ID NO: 1807031 - DNA, 25 bp, Homo sapien
atccgaggctccacagctgctcagg

SEQ ID NO: 1807032 - DNA, 25 bp, Homo sapien
caggtgctccgcgttcttcttctct

SEQ ID NO: 1807033 - DNA, 25 bp, Homo sapien
cttccaagaatgtgccttccaacga

SEQ ID NO: 1807034 - DNA, 25 bp, Homo sapien
aatgtgccttccaacgaatccgagg

SEQ ID NO: 1807035 - DNA, 25 bp, Homo sapien
gattctgttaggacgacattcagtt

SEQ ID NO: 1807036 - DNA, 25 bp, Homo sapien
tctgttaggacgacattcagttgaa

SEQ ID NO: 1807037 - DNA, 25 bp, Homo sapien
ctgattctgttaggacgacattcag

SEQ ID NO: 1807038 - DNA, 25 bp, Homo sapien
tgttaggacgacattcagttgaagc

SEQ ID NO: 1807039 - DNA, 25 bp, Homo sapien
ctgaatcaagtttcagcattgtgag

SEQ ID NO: 1807040 - DNA, 25 bp, Homo sapien
ttgggcactcatggctacatttgac

SEQ ID NO: 1807041 - DNA, 25 bp, Homo sapien
tctatgtcaactgaatcaagtttca

SEQ ID NO: 1807042 - DNA, 25 bp, Homo sapien
tcagcattgtgagatgaaaacttgg

SEQ ID NO: 1807043 - DNA, 25 bp, Homo sapien
cggacagtaaaatagaagatggcct

SEQ ID NO: 1807044 - DNA, 25 bp, Homo sapien
tgttatgcggacagtaaaatagaag

SEQ ID NO: 1807045 - DNA, 25 bp, Homo sapien
tcctggattgtgttatgcggacagt

SEQ ID NO: 1807046 - DNA, 25 bp, Homo sapien
aggatctgtgaacatgctgagattt

SEQ ID NO: 1807047 - DNA, 25 bp, Homo sapien
tcctctgagaatgagagctgtcatg

SEQ ID NO: 1807048 - DNA, 25 bp, Homo sapien
taccacagatagcattagaaatata

SEQ ID NO: 1807049 - DNA, 25 bp, Homo sapien
gaaatatatcatgataccatcacag

SEQ ID NO: 1807050 - DNA, 25 bp, Homo sapien
gaaacatatcttcagtatgataaca

SEQ ID NO: 1807051 - DNA, 25 bp, Homo sapien
ggtccagaatcaaatacctaaattc

SEQ ID NO: 1807052 - DNA, 25 bp, Homo sapien
cttggacaactcactgttgttactt

SEQ ID NO: 1807053 - DNA, 25 bp, Homo sapien
cttttgttcacatcagctctggcta

SEQ ID NO: 1807054 - DNA, 25 bp, Homo sapien
ctaaagtcgctccacggtccagaat

SEQ ID NO: 1807055 - DNA, 25 bp, Homo sapien
catttgttctgatagcgcactggga

SEQ ID NO: 1807056 - DNA, 25 bp, Homo sapien
tgaattcagcaaaggatggcatggc

SEQ ID NO: 1807057 - DNA, 25 bp, Homo sapien
cactgttgaaggcaaccatctggta

SEQ ID NO: 1807058 - DNA, 25 bp, Homo sapien
tatgacaaccagtgggaagtttagc

SEQ ID NO: 1807059 - DNA, 25 bp, Homo sapien
aaccagccggagaaagcacagagct

SEQ ID NO: 1807060 - DNA, 25 bp, Homo sapien
gtcctgctcagtgtgaggtagacgc

SEQ ID NO: 1807061 - DNA, 25 bp, Homo sapien
tagacgctagccaggaaccagccgg

SEQ ID NO: 1807062 - DNA, 25 bp, Homo sapien
tcagtgtgaggtagacgctagccag

SEQ ID NO: 1807063 - DNA, 25 bp, Homo sapien
tgtgcttcctactggatcttggtgt

SEQ ID NO: 1807064 - DNA, 25 bp, Homo sapien
gacgaaaaacgcttgatcttttctc

SEQ ID NO: 1807065 - DNA, 25 bp, Homo sapien
tggatcttggtgtgcaagacgaaaa

SEQ ID NO: 1807066 - DNA, 25 bp, Homo sapien
tgtgcaagacgaaaaacgcttgatc

SEQ ID NO: 1807067 - DNA, 25 bp, Homo sapien
caagtgaaacatattggatgggcac

SEQ ID NO: 1807068 - DNA, 25 bp, Homo sapien
agcttgagccattgatacgtgagtc

SEQ ID NO: 1807069 - DNA, 25 bp, Homo sapien
ggacaaattcgctgagcttgagcca

SEQ ID NO: 1807070 - DNA, 25 bp, Homo sapien
caggagagaggacaaattcgctgag

SEQ ID NO: 1807071 - DNA, 25 bp, Homo sapien
catggccatctcactaccgcatgct

SEQ ID NO: 1807072 - DNA, 25 bp, Homo sapien
caactgattgatcaacataatatag

SEQ ID NO: 1807073 - DNA, 25 bp, Homo sapien
ttttgcaggattgtttcagaactct

SEQ ID NO: 1807074 - DNA, 25 bp, Homo sapien
tgcatctacaactgattgatcaaca

SEQ ID NO: 1807075 - DNA, 25 bp, Homo sapien
gacaggaggtgggggtggaaggcat

SEQ ID NO: 1807076 - DNA, 25 bp, Homo sapien
ctgacaggaggtgggggtggaaggc

SEQ ID NO: 1807077 - DNA, 25 bp, Homo sapien
tgacaggaggtgggggtggaaggca

SEQ ID NO: 1807078 - DNA, 25 bp, Homo sapien
gggtatggctgctggtgcagcacgt

SEQ ID NO: 1807079 - DNA, 25 bp, Homo sapien
ggtatggctgctggtgcagcacgtg

SEQ ID NO: 1807080 - DNA, 25 bp, Homo sapien
tggggtatggctgctggtgcagcac

SEQ ID NO: 1807081 - DNA, 25 bp, Homo sapien
tgtggggtatggctgctggtgcagc

SEQ ID NO: 1807082 - DNA, 25 bp, Homo sapien
aaaaacaatctccaccatgcagttg

SEQ ID NO: 1807083 - DNA, 25 bp, Homo sapien
atgcagttgcggaaaggccccagtg

SEQ ID NO: 1807084 - DNA, 25 bp, Homo sapien
gccccagtgcggtcagctgttccat

SEQ ID NO: 1807085 - DNA, 25 bp, Homo sapien
aaacaatctccaccatgcagttgcg

SEQ ID NO: 1807086 - DNA, 25 bp, Homo sapien
aattttgcctgctctaaggcttaca

SEQ ID NO: 1807087 - DNA, 25 bp, Homo sapien
actggggcttggaacagctggaaca

SEQ ID NO: 1807088 - DNA, 25 bp, Homo sapien
gagcagtctcatctacattgtcaat

SEQ ID NO: 1807089 - DNA, 25 bp, Homo sapien
ttgtcaatgtagatgcaatactggg

SEQ ID NO: 1807090 - DNA, 25 bp, Homo sapien
taggatggtgatgtccggtcctcca

SEQ ID NO: 1807091 - DNA, 25 bp, Homo sapien
cggtcctccagtcgcttgcactttg

SEQ ID NO: 1807092 - DNA, 25 bp, Homo sapien
ctagagacgaaagtgaaaaatggtc

SEQ ID NO: 1807093 - DNA, 25 bp, Homo sapien
tatttctagagtgcgtggagacgcc

SEQ ID NO: 1807094 - DNA, 25 bp, Homo sapien
tagggatcgagctttcacaacactg

SEQ ID NO: 1807095 - DNA, 25 bp, Homo sapien
cctgagtgcttgtgatccgacggag

SEQ ID NO: 1807096 - DNA, 25 bp, Homo sapien
ccacaagctgcactagggaatggct

SEQ ID NO: 1807097 - DNA, 25 bp, Homo sapien
cctggaatccgtggcttcataggga

SEQ ID NO: 1807098 - DNA, 25 bp, Homo sapien
tcatgtctgttgcacaccaggaaat

SEQ ID NO: 1807099 - DNA, 25 bp, Homo sapien
tcatagttaatattggtcagcccga

SEQ ID NO: 1807100 - DNA, 25 bp, Homo sapien
ttctagtcgctggtttttgtccctc

SEQ ID NO: 1807101 - DNA, 25 bp, Homo sapien
tacattcagtgtcaattttaagcac

SEQ ID NO: 1807102 - DNA, 25 bp, Homo sapien
tcatttgaaatgagctagagtacaa

SEQ ID NO: 1807103 - DNA, 25 bp, Homo sapien
tcagaaatttaagaacagcagttaa

SEQ ID NO: 1807104 - DNA, 25 bp, Homo sapien
tgaaatgagctagagtacaattgtt

SEQ ID NO: 1807105 - DNA, 25 bp, Homo sapien
tgagctagagtacaattgtttttca

SEQ ID NO: 1807106 - DNA, 25 bp, Homo sapien
catgatttgttgattgccagaaaac

SEQ ID NO: 1807107 - DNA, 25 bp, Homo sapien
gccatgatttgttgattgccagaaa

SEQ ID NO: 1807108 - DNA, 25 bp, Homo sapien
tgcgccatgatttgttgattgccag

SEQ ID NO: 1807109 - DNA, 25 bp, Homo sapien
gatttgttgattgccagaaaacatg

SEQ ID NO: 1807110 - DNA, 25 bp, Homo sapien
tggactcccccgtttcaggctcttc

SEQ ID NO: 1807111 - DNA, 25 bp, Homo sapien
ctcttagacatttccacagcagctc

SEQ ID NO: 1807112 - DNA, 25 bp, Homo sapien
ttgtagtcctcttagacatttccac

SEQ ID NO: 1807113 - DNA, 25 bp, Homo sapien
cattgctgttcagggacccccttca

SEQ ID NO: 1807114 - DNA, 25 bp, Homo sapien
gagaagtatagtgagctgccagcat

SEQ ID NO: 1807115 - DNA, 25 bp, Homo sapien
tcactactgtgggtatctgttgcag

SEQ ID NO: 1807116 - DNA, 25 bp, Homo sapien
actactgtgggtatctgttgcagca

SEQ ID NO: 1807117 - DNA, 25 bp, Homo sapien
gctgtcactactgtgggtatctgtt

SEQ ID NO: 1807118 - DNA, 25 bp, Homo sapien
ctgtgggaggaaatgttacttcttt

SEQ ID NO: 1807119 - DNA, 25 bp, Homo sapien
tgtgggaggaaatgttacttctttg

SEQ ID NO: 1807120 - DNA, 25 bp, Homo sapien
gggaggaaatgttacttctttgatg

SEQ ID NO: 1807121 - DNA, 25 bp, Homo sapien
gaggaaatgttacttctttgatgtc

SEQ ID NO: 1807122 - DNA, 25 bp, Homo sapien
gcttcattcatgtttggtgccacga

SEQ ID NO: 1807123 - DNA, 25 bp, Homo sapien
taggagctgcacatcgtgacaacat

SEQ ID NO: 1807124 - DNA, 25 bp, Homo sapien
gtgccacgactggttcctgatccca

SEQ ID NO: 1807125 - DNA, 25 bp, Homo sapien
gttgtctttgggtatctgctgggta

SEQ ID NO: 1807126 - DNA, 25 bp, Homo sapien
taggttggttagtgtagaggcctgc

SEQ ID NO: 1807127 - DNA, 25 bp, Homo sapien
gcatttaggttggttagtgtagagg

SEQ ID NO: 1807128 - DNA, 25 bp, Homo sapien
aggcccacaacgacttcagggacca

SEQ ID NO: 1807129 - DNA, 25 bp, Homo sapien
gcaggcccacaacgacttcagggac

SEQ ID NO: 1807130 - DNA, 25 bp, Homo sapien
ggaggcccaagtagaatgagtgtta

SEQ ID NO: 1807131 - DNA, 25 bp, Homo sapien
tgtaccaagtcaaaccaactggaga

SEQ ID NO: 1807132 - DNA, 25 bp, Homo sapien
cattttaacactgcccatatgccag

SEQ ID NO: 1807133 - DNA, 25 bp, Homo sapien
taattgatggagctctggtggtctg

SEQ ID NO: 1807134 - DNA, 25 bp, Homo sapien
ttagcatacgcaaccaaatactctt

SEQ ID NO: 1807135 - DNA, 25 bp, Homo sapien
gcagtaagagattcagacttagcat

SEQ ID NO: 1807136 - DNA, 25 bp, Homo sapien
gagattcagacttagcatacgcaac

SEQ ID NO: 1807137 - DNA, 25 bp, Homo sapien
caaatactcttgaggaaaagattta

SEQ ID NO: 1807138 - DNA, 25 bp, Homo sapien
aaaggcctgtgaggtttccttcatg

SEQ ID NO: 1807139 - DNA, 25 bp, Homo sapien
ctccaaggagttgcaaggttttcag

SEQ ID NO: 1807140 - DNA, 25 bp, Homo sapien
tcatggagacgctcctgtccctgat

SEQ ID NO: 1807141 - DNA, 25 bp, Homo sapien
gaaaggcctgtgaggtttccttcat

SEQ ID NO: 1807142 - DNA, 25 bp, Homo sapien
gtagcctgaggcctgccaagtggaa

SEQ ID NO: 1807143 - DNA, 25 bp, Homo sapien
tcagacagcagatgttcgaaactgg

SEQ ID NO: 1807144 - DNA, 25 bp, Homo sapien
taggtggccatgtagcctgaggcct

SEQ ID NO: 1807145 - DNA, 25 bp, Homo sapien
tgttgaaggggcacagacgtctctg

SEQ ID NO: 1807146 - DNA, 25 bp, Homo sapien
ttttgtttccgtcagcatcatatcc

SEQ ID NO: 1807147 - DNA, 25 bp, Homo sapien
atccaagttttattgagctgttaca

SEQ ID NO: 1807148 - DNA, 25 bp, Homo sapien
ttaaattttgtttccgtcagcatca

SEQ ID NO: 1807149 - DNA, 25 bp, Homo sapien
tccgtcagcatcatatccaagtttt

SEQ ID NO: 1807150 - DNA, 25 bp, Homo sapien
tgcagggcgtttggttttttcaggc

SEQ ID NO: 1807151 - DNA, 25 bp, Homo sapien
tagttgttggaaccatgcagctcca

SEQ ID NO: 1807152 - DNA, 25 bp, Homo sapien
ggcaacatcattttgggctttccat

SEQ ID NO: 1807153 - DNA, 25 bp, Homo sapien
caggacttccggcaacatcattttg

SEQ ID NO: 1807154 - DNA, 25 bp, Homo sapien
gtggacacctcccactgcgcctcat

SEQ ID NO: 1807155 - DNA, 25 bp, Homo sapien
tgggctttgtggacacctcccactg

SEQ ID NO: 1807156 - DNA, 25 bp, Homo sapien
cagtgggcaccatccgatgggcttt

SEQ ID NO: 1807157 - DNA, 25 bp, Homo sapien
gtgggcaccatccgatgggctttgt

SEQ ID NO: 1807158 - DNA, 25 bp, Homo sapien
agatgtccatggatttcccagcaaa

SEQ ID NO: 1807159 - DNA, 25 bp, Homo sapien
tatcctatagcatctacaatgtcag

SEQ ID NO: 1807160 - DNA, 25 bp, Homo sapien
tatagcatctacaatgtcagtgaaa

SEQ ID NO: 1807161 - DNA, 25 bp, Homo sapien
tgtccatggatttcccagcaaagaa

SEQ ID NO: 1807162 - DNA, 25 bp, Homo sapien
gcccattcatcaggccctcattcat

SEQ ID NO: 1807163 - DNA, 25 bp, Homo sapien
tatcttaactgtggttcatgataag

SEQ ID NO: 1807164 - DNA, 25 bp, Homo sapien
cagctaggaggttgagtaaacaata

SEQ ID NO: 1807165 - DNA, 25 bp, Homo sapien
tttccattacagctaggaggttgag

SEQ ID NO: 1807166 - DNA, 25 bp, Homo sapien
cctcctagagtattcaagtttggct

SEQ ID NO: 1807167 - DNA, 25 bp, Homo sapien
cagatctttaggcacccttagcaac

SEQ ID NO: 1807168 - DNA, 25 bp, Homo sapien
caagaatgagcagaccctattggct

SEQ ID NO: 1807169 - DNA, 25 bp, Homo sapien
gcagttgggtatgtaaccatgacca

SEQ ID NO: 1807170 - DNA, 25 bp, Homo sapien
tttaaaggagcaacaagaatgagca

SEQ ID NO: 1807171 - DNA, 25 bp, Homo sapien
tctgaatatgttggtctataatgat

SEQ ID NO: 1807172 - DNA, 25 bp, Homo sapien
gtttctctgaatatgttggtctata

SEQ ID NO: 1807173 - DNA, 25 bp, Homo sapien
tatgttggtctataatgatttttga

SEQ ID NO: 1807174 - DNA, 25 bp, Homo sapien
tctctgaatatgttggtctataatg

SEQ ID NO: 1807175 - DNA, 25 bp, Homo sapien
ataaacaggttgtcatgttctccct

SEQ ID NO: 1807176 - DNA, 25 bp, Homo sapien
aaacaggttgtcatgttctcccttt

SEQ ID NO: 1807177 - DNA, 25 bp, Homo sapien
taaacaggttgtcatgttctccctt

SEQ ID NO: 1807178 - DNA, 25 bp, Homo sapien
catgacggctttagtactgaattgt

SEQ ID NO: 1807179 - DNA, 25 bp, Homo sapien
gctctgccatacatgacggctttag

SEQ ID NO: 1807180 - DNA, 25 bp, Homo sapien
tggttcccagattccgcaccaagcc

SEQ ID NO: 1807181 - DNA, 25 bp, Homo sapien
tggtggatgcttcctatgggtctct

SEQ ID NO: 1807182 - DNA, 25 bp, Homo sapien
cttgcttgtactctgagccgcccac

SEQ ID NO: 1807183 - DNA, 25 bp, Homo sapien
accacaatgcttggacaccctctgc

SEQ ID NO: 1807184 - DNA, 25 bp, Homo sapien
caccacaatgcttggacaccctctg

SEQ ID NO: 1807185 - DNA, 25 bp, Homo sapien
cacaatgcttggacaccctctgcac

SEQ ID NO: 1807186 - DNA, 25 bp, Homo sapien
tcaccacaatgcttggacaccctct

SEQ ID NO: 1807187 - DNA, 25 bp, Homo sapien
tttaggggatgcagagtcaaattct

SEQ ID NO: 1807188 - DNA, 25 bp, Homo sapien
ctattttaggggatgcagagtcaaa

SEQ ID NO: 1807189 - DNA, 25 bp, Homo sapien
tattttaggggatgcagagtcaaat

SEQ ID NO: 1807190 - DNA, 25 bp, Homo sapien
ttttaggggatgcagagtcaaattc

SEQ ID NO: 1807191 - DNA, 25 bp, Homo sapien
ggagcccaaatcctttatattgctg

SEQ ID NO: 1807192 - DNA, 25 bp, Homo sapien
taagaaagacgtgtggaggtggact

SEQ ID NO: 1807193 - DNA, 25 bp, Homo sapien
tgaaccactgtatcagcctgcaccg

SEQ ID NO: 1807194 - DNA, 25 bp, Homo sapien
tagaactttgttgccaaaggaacca

SEQ ID NO: 1807195 - DNA, 25 bp, Homo sapien
gtggagggaagaacgttgacttcac

SEQ ID NO: 1807196 - DNA, 25 bp, Homo sapien
gaagaacgttgacttcacaggcaaa

SEQ ID NO: 1807197 - DNA, 25 bp, Homo sapien
tggacaataacaaggcataaagcag

SEQ ID NO: 1807198 - DNA, 25 bp, Homo sapien
tgtggacaataacaaggcataaagc

SEQ ID NO: 1807199 - DNA, 25 bp, Homo sapien
cattgttccttagagtgagtttcta

SEQ ID NO: 1807200 - DNA, 25 bp, Homo sapien
ctcgttttccgtagaaaatactgca

SEQ ID NO: 1807201 - DNA, 25 bp, Homo sapien
ttgttccttagagtgagtttctact

SEQ ID NO: 1807202 - DNA, 25 bp, Homo sapien
attgttccttagagtgagtttctac

SEQ ID NO: 1807203 - DNA, 25 bp, Homo sapien
catcaagtgtgagtaagtgaccaca

SEQ ID NO: 1807204 - DNA, 25 bp, Homo sapien
agtgtgagtaagtgaccacaagctt

SEQ ID NO: 1807205 - DNA, 25 bp, Homo sapien
cacacatcaagtgtgagtaagtgac

SEQ ID NO: 1807206 - DNA, 25 bp, Homo sapien
ggccacacatcaagtgtgagtaagt

SEQ ID NO: 1807207 - DNA, 25 bp, Homo sapien
cagctggttgacagacccaggttgc

SEQ ID NO: 1807208 - DNA, 25 bp, Homo sapien
ctaggagcgacatgcaacccatggt

SEQ ID NO: 1807209 - DNA, 25 bp, Homo sapien
tgcggcgaacatgacctcacttggt

SEQ ID NO: 1807210 - DNA, 25 bp, Homo sapien
cacttggttcacttcagatcggtca

SEQ ID NO: 1807211 - DNA, 25 bp, Homo sapien
catagaaggtgaagtcaagggttgt

SEQ ID NO: 1807212 - DNA, 25 bp, Homo sapien
tgaggaggttacagctgtataaaat

SEQ ID NO: 1807213 - DNA, 25 bp, Homo sapien
ggcactgttctaatgaggaggttac

SEQ ID NO: 1807214 - DNA, 25 bp, Homo sapien
taataaagaccactttgagtctttg

SEQ ID NO: 1807215 - DNA, 25 bp, Homo sapien
ggccactcttccatccctcttgtgg

SEQ ID NO: 1807216 - DNA, 25 bp, Homo sapien
gtccctgtggctttgaatcacctgc

SEQ ID NO: 1807217 - DNA, 25 bp, Homo sapien
aatcacctgctgccttgctctccct

SEQ ID NO: 1807218 - DNA, 25 bp, Homo sapien
ccctgtggctttgaatcacctgctg

SEQ ID NO: 1807219 - DNA, 25 bp, Homo sapien
tgaatccgctagcagcactgtctgg

SEQ ID NO: 1807220 - DNA, 25 bp, Homo sapien
tgtctggcatgcaaagcctcaaggg

SEQ ID NO: 1807221 - DNA, 25 bp, Homo sapien
gaaagtgacccatcttggactggcg

SEQ ID NO: 1807222 - DNA, 25 bp, Homo sapien
gccagaggacgttgtagaactagaa

SEQ ID NO: 1807223 - DNA, 25 bp, Homo sapien
tagtagggccttattcctcctgctg

SEQ ID NO: 1807224 - DNA, 25 bp, Homo sapien
ctctgttttggaatgcatcgatcgc

SEQ ID NO: 1807225 - DNA, 25 bp, Homo sapien
ggaggctgcattctcatggaaactc

SEQ ID NO: 1807226 - DNA, 25 bp, Homo sapien
cgatcgctggcttgctgttcccaaa

SEQ ID NO: 1807227 - DNA, 25 bp, Homo sapien
gagagcttctgtgagactccaattt

SEQ ID NO: 1807228 - DNA, 25 bp, Homo sapien
ctggccatgccttgttcattagaag

SEQ ID NO: 1807229 - DNA, 25 bp, Homo sapien
aattgtttgatgttgcgcctggcaa

SEQ ID NO: 1807230 - DNA, 25 bp, Homo sapien
tcattagaagatctgtgcacagaga

SEQ ID NO: 1807231 - DNA, 25 bp, Homo sapien
tgaaccagttgccatgttcctgctg

SEQ ID NO: 1807232 - DNA, 25 bp, Homo sapien
cgagaaactgtgtcaagcaatggtg

SEQ ID NO: 1807233 - DNA, 25 bp, Homo sapien
gaggcctaaaattgttccaaagcca

SEQ ID NO: 1807234 - DNA, 25 bp, Homo sapien
gaatccacataagtgagaaagccac

SEQ ID NO: 1807235 - DNA, 25 bp, Homo sapien
cacagataacagtgccgtaggaggc

SEQ ID NO: 1807236 - DNA, 25 bp, Homo sapien
agaacgcaggtggaccgagagcttc

SEQ ID NO: 1807237 - DNA, 25 bp, Homo sapien
gagagcttcgtgtttcctcctcctt

SEQ ID NO: 1807238 - DNA, 25 bp, Homo sapien
ggctccctcacagagaacgcaggtg

SEQ ID NO: 1807239 - DNA, 25 bp, Homo sapien
gaagagagaggacggagagatggtg

SEQ ID NO: 1807240 - DNA, 25 bp, Homo sapien
gctgcctgtgggaagtcgtataagc

SEQ ID NO: 1807241 - DNA, 25 bp, Homo sapien
ttcttgtctacacgggctgcctgtg

SEQ ID NO: 1807242 - DNA, 25 bp, Homo sapien
gaagtcgtataagcagctggtcaga

SEQ ID NO: 1807243 - DNA, 25 bp, Homo sapien
caccctgcgtttgcactcggtcaat

SEQ ID NO: 1807244 - DNA, 25 bp, Homo sapien
cttgcagaggtcaccctgcgtttgc

SEQ ID NO: 1807245 - DNA, 25 bp, Homo sapien
gtttgcactcggtcaattccactcc

SEQ ID NO: 1807246 - DNA, 25 bp, Homo sapien
cccgcgttggcgctgcgagcttgca

SEQ ID NO: 1807247 - DNA, 25 bp, Homo sapien
aaccaactcgtggttatgacgtggg

SEQ ID NO: 1807248 - DNA, 25 bp, Homo sapien
gagcaggtgcacagaataacgcaga

SEQ ID NO: 1807249 - DNA, 25 bp, Homo sapien
tgaccaagagcagaggtgaccaggt

SEQ ID NO: 1807250 - DNA, 25 bp, Homo sapien
acatcatgaacagtccaacatggca

SEQ ID NO: 1807251 - DNA, 25 bp, Homo sapien
gggatagaaaggcagggcagaaaac

SEQ ID NO: 1807252 - DNA, 25 bp, Homo sapien
tggggatagaaaggcagggcagaaa

SEQ ID NO: 1807253 - DNA, 25 bp, Homo sapien
ttggggatagaaaggcagggcagaa

SEQ ID NO: 1807254 - DNA, 25 bp, Homo sapien
cttggggatagaaaggcagggcaga

SEQ ID NO: 1807255 - DNA, 25 bp, Homo sapien
agactccatctgtaagctctatgat

SEQ ID NO: 1807256 - DNA, 25 bp, Homo sapien
cctgaaatgctccttgcttcagtac

SEQ ID NO: 1807257 - DNA, 25 bp, Homo sapien
tgagcccaccgaggctctgagactc

SEQ ID NO: 1807258 - DNA, 25 bp, Homo sapien
aagctctatgatgtcctgaaatgct

SEQ ID NO: 1807259 - DNA, 25 bp, Homo sapien
gccgtacagagcctacgtgctcttt

SEQ ID NO: 1807260 - DNA, 25 bp, Homo sapien
gaaacacatttaacatccgaagaag

SEQ ID NO: 1807261 - DNA, 25 bp, Homo sapien
gagcagggcttgcaaagccgtacag

SEQ ID NO: 1807262 - DNA, 25 bp, Homo sapien
catccgaagaagcaatgctgtcctc

SEQ ID NO: 1807263 - DNA, 25 bp, Homo sapien
tcaggaagtgacaggcccatcatat

SEQ ID NO: 1807264 - DNA, 25 bp, Homo sapien
tgtaattttactctgacctgccgca

SEQ ID NO: 1807265 - DNA, 25 bp, Homo sapien
cagaggcttctacaacatggtttat

SEQ ID NO: 1807266 - DNA, 25 bp, Homo sapien
tactgcacggtcgtatttcatgagc

SEQ ID NO: 1807267 - DNA, 25 bp, Homo sapien
tggagtgcaggcaggtatcctatct

SEQ ID NO: 1807268 - DNA, 25 bp, Homo sapien
gttgatcatcaacacaggatttaga

SEQ ID NO: 1807269 - DNA, 25 bp, Homo sapien
ccagttgacagatacagtgttccag

SEQ ID NO: 1807270 - DNA, 25 bp, Homo sapien
agtaaggtaaagtgaaattctgaca

SEQ ID NO: 1807271 - DNA, 25 bp, Homo sapien
tagtgagcgtcggtggcaccagttc

SEQ ID NO: 1807272 - DNA, 25 bp, Homo sapien
agtgtttctgtatgccaagtttcaa

SEQ ID NO: 1807273 - DNA, 25 bp, Homo sapien
ggttgaaacaaattgatgcgctgga

SEQ ID NO: 1807274 - DNA, 25 bp, Homo sapien
gcatcctcctgtttagtgtgttgga

SEQ ID NO: 1807275 - DNA, 25 bp, Homo sapien
aatgctgaaaagtgatgcttgagga

SEQ ID NO: 1807276 - DNA, 25 bp, Homo sapien
aaagtgatgcttgaggataagatgg

SEQ ID NO: 1807277 - DNA, 25 bp, Homo sapien
aaaatgctgaaaagtgatgcttgag

SEQ ID NO: 1807278 - DNA, 25 bp, Homo sapien
gctgaaaagtgatgcttgaggataa

SEQ ID NO: 1807279 - DNA, 25 bp, Homo sapien
gagttccttggtctggacgcttaaa

SEQ ID NO: 1807280 - DNA, 25 bp, Homo sapien
tctggacgcttaaaaggtaccagga

SEQ ID NO: 1807281 - DNA, 25 bp, Homo sapien
ttaaaaggtaccaggaagtgacaga

SEQ ID NO: 1807282 - DNA, 25 bp, Homo sapien
gaagagttccttggtctggacgctt

SEQ ID NO: 1807283 - DNA, 25 bp, Homo sapien
aatgctgttctggtacttcaccgct

SEQ ID NO: 1807284 - DNA, 25 bp, Homo sapien
tacaccatgtgttcttaacctgaaa

SEQ ID NO: 1807285 - DNA, 25 bp, Homo sapien
tgctgatctgagtgaaatgctgttc

SEQ ID NO: 1807286 - DNA, 25 bp, Homo sapien
gaacattctacaccatgtgttctta

SEQ ID NO: 1807287 - DNA, 25 bp, Homo sapien
acaggatcacgactccctgcagcct

SEQ ID NO: 1807288 - DNA, 25 bp, Homo sapien
cagtgacaggatcacgactccctgc

SEQ ID NO: 1807289 - DNA, 25 bp, Homo sapien
gtgacaggatcacgactccctgcag

SEQ ID NO: 1807290 - DNA, 25 bp, Homo sapien
acagtgacaggatcacgactccctg

SEQ ID NO: 1807291 - DNA, 25 bp, Homo sapien
taggatggtgttaacaagagccgca

SEQ ID NO: 1807292 - DNA, 25 bp, Homo sapien
caagggctctaagcatttgtctggc

SEQ ID NO: 1807293 - DNA, 25 bp, Homo sapien
gtattttgtagtgaggctgcattcc

SEQ ID NO: 1807294 - DNA, 25 bp, Homo sapien
taagtgtacttgaggcaggatcctg

SEQ ID NO: 1807295 - DNA, 25 bp, Homo sapien
tgttcatgccatgaaggggtggcct

SEQ ID NO: 1807296 - DNA, 25 bp, Homo sapien
tttttacctaggtgttcatgccatg

SEQ ID NO: 1807297 - DNA, 25 bp, Homo sapien
catctgggtgccgtaaagagcagta

SEQ ID NO: 1807298 - DNA, 25 bp, Homo sapien
ctcattatttgttggtcattatctc

SEQ ID NO: 1807299 - DNA, 25 bp, Homo sapien
agcccgctgcattcttccacgtgga

SEQ ID NO: 1807300 - DNA, 25 bp, Homo sapien
gctgcattcttccacgtggatgttg

SEQ ID NO: 1807301 - DNA, 25 bp, Homo sapien
ccgctgcattcttccacgtggatgt

SEQ ID NO: 1807302 - DNA, 25 bp, Homo sapien
gcattcttccacgtggatgttgata

SEQ ID NO: 1807303 - DNA, 25 bp, Homo sapien
attccctgtgcagattgctttggtt

SEQ ID NO: 1807304 - DNA, 25 bp, Homo sapien
ctgtgcagattgctttggtttgctt

SEQ ID NO: 1807305 - DNA, 25 bp, Homo sapien
cattccctgtgcagattgctttggt

SEQ ID NO: 1807306 - DNA, 25 bp, Homo sapien
cctgtgcagattgctttggtttgct

SEQ ID NO: 1807307 - DNA, 25 bp, Homo sapien
tcatagtagtgaagaaaaggagcct

SEQ ID NO: 1807308 - DNA, 25 bp, Homo sapien
tgaatctcgtgccacgtttccaagg

SEQ ID NO: 1807309 - DNA, 25 bp, Homo sapien
tgttatttcttgatgggcagagacc

SEQ ID NO: 1807310 - DNA, 25 bp, Homo sapien
ggcttttcaatgttgatcctctggg

SEQ ID NO: 1807311 - DNA, 25 bp, Homo sapien
gtagttggatactggggtgtctgtc

SEQ ID NO: 1807312 - DNA, 25 bp, Homo sapien
acttgggcttggtgtagttggatac

SEQ ID NO: 1807313 - DNA, 25 bp, Homo sapien
gtgtagttggatactggggtgtctg

SEQ ID NO: 1807314 - DNA, 25 bp, Homo sapien
gacttgggcttggtgtagttggata

SEQ ID NO: 1807315 - DNA, 25 bp, Homo sapien
gcttgaaagaaagctagggggtgag

SEQ ID NO: 1807316 - DNA, 25 bp, Homo sapien
agctagggggtgagtttgttctgtt

SEQ ID NO: 1807317 - DNA, 25 bp, Homo sapien
gaaatcactttcatagcttgaaaga

SEQ ID NO: 1807318 - DNA, 25 bp, Homo sapien
atcactttcatagcttgaaagaaag

SEQ ID NO: 1807319 - DNA, 25 bp, Homo sapien
ttctctgatgtaaagataagcggac

SEQ ID NO: 1807320 - DNA, 25 bp, Homo sapien
aagcggaagtgccatatttaaatct

SEQ ID NO: 1807321 - DNA, 25 bp, Homo sapien
aactttcaagaaagcggaagtgcca

SEQ ID NO: 1807322 - DNA, 25 bp, Homo sapien
aagataagcggacacaattcttctg

SEQ ID NO: 1807323 - DNA, 25 bp, Homo sapien
gtgaaggatgttttgttgttgttga

SEQ ID NO: 1807324 - DNA, 25 bp, Homo sapien
aggatgttttgttgttgttgatcat

SEQ ID NO: 1807325 - DNA, 25 bp, Homo sapien
gaaggatgttttgttgttgttgatc

SEQ ID NO: 1807326 - DNA, 25 bp, Homo sapien
caggtgtgaaggatgttttgttgtt

SEQ ID NO: 1807327 - DNA, 25 bp, Homo sapien
ttttgggcccaaggatcactccacg

SEQ ID NO: 1807328 - DNA, 25 bp, Homo sapien
cctgctgtgctgaagccctagaaga

SEQ ID NO: 1807329 - DNA, 25 bp, Homo sapien
aaggtcttggaatgccagccgggca

SEQ ID NO: 1807330 - DNA, 25 bp, Homo sapien
ttcagtagcttcgtggtcccagttt

SEQ ID NO: 1807331 - DNA, 25 bp, Homo sapien
cgggtaggagacttaccatcttctt

SEQ ID NO: 1807332 - DNA, 25 bp, Homo sapien
tcgggtaggagacttaccatcttct

SEQ ID NO: 1807333 - DNA, 25 bp, Homo sapien
catcgggtaggagacttaccatctt

SEQ ID NO: 1807334 - DNA, 25 bp, Homo sapien
ctcatcgggtaggagacttaccatc

SEQ ID NO: 1807335 - DNA, 25 bp, Homo sapien
tctctggtgacccattccatacagc

SEQ ID NO: 1807336 - DNA, 25 bp, Homo sapien
tgcttgtggaggttcaaatctctgg

SEQ ID NO: 1807337 - DNA, 25 bp, Homo sapien
gagtaatgcttgtggaggttcaaat

SEQ ID NO: 1807338 - DNA, 25 bp, Homo sapien
taggaggtgaacttgacattgcctt

SEQ ID NO: 1807339 - DNA, 25 bp, Homo sapien
tcttgtgtactatgcctgaacaagg

SEQ ID NO: 1807340 - DNA, 25 bp, Homo sapien
cagtcttcggaattttgactggatt

SEQ ID NO: 1807341 - DNA, 25 bp, Homo sapien
tcagtcttcggaattttgactggat

SEQ ID NO: 1807342 - DNA, 25 bp, Homo sapien
tttcagtcttcggaattttgactgg

SEQ ID NO: 1807343 - DNA, 25 bp, Homo sapien
cgtgccttacttgattgatttgtgg

SEQ ID NO: 1807344 - DNA, 25 bp, Homo sapien
gttgcagcgtgccttacttgattga

SEQ ID NO: 1807345 - DNA, 25 bp, Homo sapien
cagcgtgccttacttgattgatttg

SEQ ID NO: 1807346 - DNA, 25 bp, Homo sapien
aggttgcagcgtgccttacttgatt

SEQ ID NO: 1807347 - DNA, 25 bp, Homo sapien
tggattgtagcagatacacaggtga

SEQ ID NO: 1807348 - DNA, 25 bp, Homo sapien
tgatgctgttaaacacgtgctgcat

SEQ ID NO: 1807349 - DNA, 25 bp, Homo sapien
gctgtctaaagttgatgctgttaaa

SEQ ID NO: 1807350 - DNA, 25 bp, Homo sapien
cacaggtgatgtagagctgtctaaa

SEQ ID NO: 1807351 - DNA, 25 bp, Homo sapien
gaccggagacttgggtgtgataggg

SEQ ID NO: 1807352 - DNA, 25 bp, Homo sapien
tgtgatagggtgacattgacattgt

SEQ ID NO: 1807353 - DNA, 25 bp, Homo sapien
ctctgcaaactcagcggaggaccgg

SEQ ID NO: 1807354 - DNA, 25 bp, Homo sapien
catgtgggtcgttccccttctgttc

SEQ ID NO: 1807355 - DNA, 25 bp, Homo sapien
gagaagttcatgtgcccaaaggaac

SEQ ID NO: 1807356 - DNA, 25 bp, Homo sapien
aggaaatgtcctgtagctggtgttc

SEQ ID NO: 1807357 - DNA, 25 bp, Homo sapien
cattcccatacttgtgatgaaaggt

SEQ ID NO: 1807358 - DNA, 25 bp, Homo sapien
gaaaggtattggattcgactggtct

SEQ ID NO: 1807359 - DNA, 25 bp, Homo sapien
tagaactgggatcccatcttggcaa

SEQ ID NO: 1807360 - DNA, 25 bp, Homo sapien
cttgggtatacagctctaataggca

SEQ ID NO: 1807361 - DNA, 25 bp, Homo sapien
tatacagctctaataggcaaaatga

SEQ ID NO: 1807362 - DNA, 25 bp, Homo sapien
ggcaaatctgcgtaattcttgggta

SEQ ID NO: 1807363 - DNA, 25 bp, Homo sapien
cgtaattccaaatccgctgtgatgg

SEQ ID NO: 1807364 - DNA, 25 bp, Homo sapien
ggatagcgtaattccaaatccgctg

SEQ ID NO: 1807365 - DNA, 25 bp, Homo sapien
tccgctgtgatggtcgtgcacgcgt

SEQ ID NO: 1807366 - DNA, 25 bp, Homo sapien
ttgtttgcttggatagcgtaattcc

SEQ ID NO: 1807367 - DNA, 25 bp, Homo sapien
tcacaaatgtgttcgggcagatgca

SEQ ID NO: 1807368 - DNA, 25 bp, Homo sapien
caaatgtccttttgtgaaccgtaag

SEQ ID NO: 1807369 - DNA, 25 bp, Homo sapien
taatagcttgcgtggcaaatgtcct

SEQ ID NO: 1807370 - DNA, 25 bp, Homo sapien
ggcctcagcctgtggaacgtctgga

SEQ ID NO: 1807371 - DNA, 25 bp, Homo sapien
tccttggatgagaagaagcttgcac

SEQ ID NO: 1807372 - DNA, 25 bp, Homo sapien
gtaaagtcttgagtacaaatctggg

SEQ ID NO: 1807373 - DNA, 25 bp, Homo sapien
tcctgggtcgatgacccctgtcctt

SEQ ID NO: 1807374 - DNA, 25 bp, Homo sapien
tccacagagaattccgtgatagctc

SEQ ID NO: 1807375 - DNA, 25 bp, Homo sapien
gagactgacctcactaggcacaggc

SEQ ID NO: 1807376 - DNA, 25 bp, Homo sapien
taggatccaccacttcaggagagac

SEQ ID NO: 1807377 - DNA, 25 bp, Homo sapien
cagatgtgcgcctgaagtaggatcc

SEQ ID NO: 1807378 - DNA, 25 bp, Homo sapien
tgagaggatgtggtaccaagcgcca

SEQ ID NO: 1807379 - DNA, 25 bp, Homo sapien
agcgtttcgccttcactcggtcctg

SEQ ID NO: 1807380 - DNA, 25 bp, Homo sapien
ttcgccttcactcggtcctgtctaa

SEQ ID NO: 1807381 - DNA, 25 bp, Homo sapien
tctctgagcgtttcgccttcactcg

SEQ ID NO: 1807382 - DNA, 25 bp, Homo sapien
ctgtctctgagcgtttcgccttcac

SEQ ID NO: 1807383 - DNA, 25 bp, Homo sapien
tgagatctcttcaggtaacccgtgg

SEQ ID NO: 1807384 - DNA, 25 bp, Homo sapien
ggaaaaccctggtggcgattgctct

SEQ ID NO: 1807385 - DNA, 25 bp, Homo sapien
gctgcaagctcctcgtgagatctct

SEQ ID NO: 1807386 - DNA, 25 bp, Homo sapien
gtctctgaaaggtacgggcctgtca

SEQ ID NO: 1807387 - DNA, 25 bp, Homo sapien
agcttgatgaaataggaagtcgggt

SEQ ID NO: 1807388 - DNA, 25 bp, Homo sapien
tgaagaaaaggagcttgatgaaata

SEQ ID NO: 1807389 - DNA, 25 bp, Homo sapien
tgaaataggaagtcgggtggaaaca

SEQ ID NO: 1807390 - DNA, 25 bp, Homo sapien
gaaaaggagcttgatgaaataggaa

SEQ ID NO: 1807391 - DNA, 25 bp, Homo sapien
gggccttttgaatctcagctgtggg

SEQ ID NO: 1807392 - DNA, 25 bp, Homo sapien
ttctgcatggagaattgacttggga

SEQ ID NO: 1807393 - DNA, 25 bp, Homo sapien
tgtgggcaggtagatgctgcctttt

SEQ ID NO: 1807394 - DNA, 25 bp, Homo sapien
cagacggggccttttgaatctcagc

SEQ ID NO: 1807395 - DNA, 25 bp, Homo sapien
ttcacaggggcagtagaaatggcct

SEQ ID NO: 1807396 - DNA, 25 bp, Homo sapien
ccttgccttgttctgtgcaggtctc

SEQ ID NO: 1807397 - DNA, 25 bp, Homo sapien
gcaggtctctcttcacaggggcagt

SEQ ID NO: 1807398 - DNA, 25 bp, Homo sapien
tgacaaggtgtcatcggccatgcag

SEQ ID NO: 1807399 - DNA, 25 bp, Homo sapien
cgaaagcaaatcatgtgtagagggt

SEQ ID NO: 1807400 - DNA, 25 bp, Homo sapien
atcgaaagcaaatcatgtgtagagg

SEQ ID NO: 1807401 - DNA, 25 bp, Homo sapien
tgatatgccagctccgcttctgtcc

SEQ ID NO: 1807402 - DNA, 25 bp, Homo sapien
tgtgtagagggtatgatatgccagc

SEQ ID NO: 1807403 - DNA, 25 bp, Homo sapien
tctcgggattcgtagcaggctctcc

SEQ ID NO: 1807404 - DNA, 25 bp, Homo sapien
cacgggatcgtaggcttctggaaaa

SEQ ID NO: 1807405 - DNA, 25 bp, Homo sapien
aaagcccgcggtcctgaaatgatgg

SEQ ID NO: 1807406 - DNA, 25 bp, Homo sapien
gaagaacgctctatcttgcagtgac

SEQ ID NO: 1807407 - DNA, 25 bp, Homo sapien
ggggcgcgggcccaatgctcccgaa

SEQ ID NO: 1807408 - DNA, 25 bp, Homo sapien
gcgcgggcccaatgctcccgaagtc

SEQ ID NO: 1807409 - DNA, 25 bp, Homo sapien
gggcccaatgctcccgaagtcctct

SEQ ID NO: 1807410 - DNA, 25 bp, Homo sapien
ccaatgctcccgaagtcctctgacc

SEQ ID NO: 1807411 - DNA, 25 bp, Homo sapien
gccgcgtggtcagcggcctctcgta

SEQ ID NO: 1807412 - DNA, 25 bp, Homo sapien
ccccgggctggcgagcgtattcgcg

SEQ ID NO: 1807413 - DNA, 25 bp, Homo sapien
cgtattcgcgccgggatcggccgct

SEQ ID NO: 1807414 - DNA, 25 bp, Homo sapien
cggctagcgagtcgctgcttgcgct

SEQ ID NO: 1807415 - DNA, 25 bp, Homo sapien
actgcggctcattcccaggctttgg

SEQ ID NO: 1807416 - DNA, 25 bp, Homo sapien
ccaggattgctgtttcggtttcccg

SEQ ID NO: 1807417 - DNA, 25 bp, Homo sapien
tgggccgacgctcttccaggattgc

SEQ ID NO: 1807418 - DNA, 25 bp, Homo sapien
gagcctttgtctgcgcctcgctcag

SEQ ID NO: 1807419 - DNA, 25 bp, Homo sapien
tcctcctcgccacccgcgggcgcgg

SEQ ID NO: 1807420 - DNA, 25 bp, Homo sapien
cgccgcctccgactcgcaggatgcg

SEQ ID NO: 1807421 - DNA, 25 bp, Homo sapien
gcctccgactcgcaggatgcgcccc

SEQ ID NO: 1807422 - DNA, 25 bp, Homo sapien
cgggcccactgtggcgtggccactc

SEQ ID NO: 1807423 - DNA, 25 bp, Homo sapien
cgcgtcctgttggtcccgggcttct

SEQ ID NO: 1807424 - DNA, 25 bp, Homo sapien
gcgtcctgttggtcccgggcttctc

SEQ ID NO: 1807425 - DNA, 25 bp, Homo sapien
cgtcctgttggtcccgggcttctct

SEQ ID NO: 1807426 - DNA, 25 bp, Homo sapien
tggaaacggttgcacctccacccag

SEQ ID NO: 1807427 - DNA, 25 bp, Homo sapien
gtggaaacggttgcacctccaccca

SEQ ID NO: 1807428 - DNA, 25 bp, Homo sapien
gactggcggggtggaaacggttgca

SEQ ID NO: 1807429 - DNA, 25 bp, Homo sapien
cagagcatggactggcggggtggaa

SEQ ID NO: 1807430 - DNA, 25 bp, Homo sapien
gaccacttaggttcctccctcttga

SEQ ID NO: 1807431 - DNA, 25 bp, Homo sapien
cttgtccggcgcgtatttatactca

SEQ ID NO: 1807432 - DNA, 25 bp, Homo sapien
cacttggctggagcagatgcgcttc

SEQ ID NO: 1807433 - DNA, 25 bp, Homo sapien
tcgtgccgtttctggccacacttgt

SEQ ID NO: 1807434 - DNA, 25 bp, Homo sapien
ttctaataatgcgagctgcttccga

SEQ ID NO: 1807435 - DNA, 25 bp, Homo sapien
cttcctgagccccagtaagtggcct

SEQ ID NO: 1807436 - DNA, 25 bp, Homo sapien
tgagccccagtaagtggcctgctcc

SEQ ID NO: 1807437 - DNA, 25 bp, Homo sapien
aaggctgaccgagtgcttcctgagc

SEQ ID NO: 1807438 - DNA, 25 bp, Homo sapien
cgctgctttcgagaagccgccgagg

SEQ ID NO: 1807439 - DNA, 25 bp, Homo sapien
cggcgcttttctccgctgctttcga

SEQ ID NO: 1807440 - DNA, 25 bp, Homo sapien
ggcactgcggcgcttttctccgctg

SEQ ID NO: 1807441 - DNA, 25 bp, Homo sapien
tttctccgctgctttcgagaagccg

SEQ ID NO: 1807442 - DNA, 25 bp, Homo sapien
gctccgccagtgggcgtcttctgcc

SEQ ID NO: 1807443 - DNA, 25 bp, Homo sapien
caggaggattccctggctcgggcaa

SEQ ID NO: 1807444 - DNA, 25 bp, Homo sapien
tcccgggaactctgactgagcacag

SEQ ID NO: 1807445 - DNA, 25 bp, Homo sapien
caccggacccagatgtgacaaggca

SEQ ID NO: 1807446 - DNA, 25 bp, Homo sapien
cgttttgcccttcgtgaaagctgag

SEQ ID NO: 1807447 - DNA, 25 bp, Homo sapien
taaacatgtgaaactggatagaaag

SEQ ID NO: 1807448 - DNA, 25 bp, Homo sapien
tctggagcacgcttcaaaataaaca

SEQ ID NO: 1807449 - DNA, 25 bp, Homo sapien
gcaaatacaaaagtgttattttcca

SEQ ID NO: 1807450 - DNA, 25 bp, Homo sapien
gggaaagcatcgactagtgaggaat

SEQ ID NO: 1807451 - DNA, 25 bp, Homo sapien
ggcacctgtccggtttcccacatgg

SEQ ID NO: 1807452 - DNA, 25 bp, Homo sapien
ttcctctgcggcacctgtccggttt

SEQ ID NO: 1807453 - DNA, 25 bp, Homo sapien
tccggtttcccacatggccaggtta

SEQ ID NO: 1807454 - DNA, 25 bp, Homo sapien
tcccacatggccaggttaactgatg

SEQ ID NO: 1807455 - DNA, 25 bp, Homo sapien
tggcaggaagtttagaagaaggttc

SEQ ID NO: 1807456 - DNA, 25 bp, Homo sapien
tgagaacctactgcttttctgccag

SEQ ID NO: 1807457 - DNA, 25 bp, Homo sapien
gagaatccagatttcccctttccag

SEQ ID NO: 1807458 - DNA, 25 bp, Homo sapien
tcttggtatccactttgagaaccta

SEQ ID NO: 1807459 - DNA, 25 bp, Homo sapien
agagatcagcctttgacctgaaggg

SEQ ID NO: 1807460 - DNA, 25 bp, Homo sapien
gaaccgtttctgtaggtcgcaaaca

SEQ ID NO: 1807461 - DNA, 25 bp, Homo sapien
gcttcccggcgttcctgtgctgtga

SEQ ID NO: 1807462 - DNA, 25 bp, Homo sapien
cagcgatggatgaggcttgaaccgt

SEQ ID NO: 1807463 - DNA, 25 bp, Homo sapien
gaccataagataaagactattccag

SEQ ID NO: 1807464 - DNA, 25 bp, Homo sapien
acagtatccatggtgaccataagat

SEQ ID NO: 1807465 - DNA, 25 bp, Homo sapien
cagtatccatggtgaccataagata

SEQ ID NO: 1807466 - DNA, 25 bp, Homo sapien
catggtgaccataagataaagacta

SEQ ID NO: 1807467 - DNA, 25 bp, Homo sapien
caatgtccaccatgggagtcccaga

SEQ ID NO: 1807468 - DNA, 25 bp, Homo sapien
ccatgggagtcccagagtactcaac

SEQ ID NO: 1807469 - DNA, 25 bp, Homo sapien
cataggtaccccaaatactcaacaa

SEQ ID NO: 1807470 - DNA, 25 bp, Homo sapien
aaatactcaacaatgtccaccatgg

SEQ ID NO: 1807471 - DNA, 25 bp, Homo sapien
cctcataataaccagcagcacccac

SEQ ID NO: 1807472 - DNA, 25 bp, Homo sapien
catgggtgcctcataataaccagca

SEQ ID NO: 1807473 - DNA, 25 bp, Homo sapien
tgggtgcctcataataaccagcagc

SEQ ID NO: 1807474 - DNA, 25 bp, Homo sapien
ggtgcctcataataaccagcagcac

SEQ ID NO: 1807475 - DNA, 25 bp, Homo sapien
tagctggaagtttgccttctggcag

SEQ ID NO: 1807476 - DNA, 25 bp, Homo sapien
cctccgtggaggttgctacagctga

SEQ ID NO: 1807477 - DNA, 25 bp, Homo sapien
gaaagtacctccgattgtagctgga

SEQ ID NO: 1807478 - DNA, 25 bp, Homo sapien
ggtgatccttcttgcttttgtggca

SEQ ID NO: 1807479 - DNA, 25 bp, Homo sapien
tcacttattagaaggactaggagca

SEQ ID NO: 1807480 - DNA, 25 bp, Homo sapien
aaaccaacccattcagggtacagtg

SEQ ID NO: 1807481 - DNA, 25 bp, Homo sapien
tattagaaggactaggagcagtttg

SEQ ID NO: 1807482 - DNA, 25 bp, Homo sapien
ccaacccattcagggtacagtgcct

SEQ ID NO: 1807483 - DNA, 25 bp, Homo sapien
tcaggcattgtggatggtcctctgt

SEQ ID NO: 1807484 - DNA, 25 bp, Homo sapien
tttctcatagtgaggaagtgcacct

SEQ ID NO: 1807485 - DNA, 25 bp, Homo sapien
aacagtgtgtccgattttctcttgg

SEQ ID NO: 1807486 - DNA, 25 bp, Homo sapien
tttcaatcacagttaacagtgtgtc

SEQ ID NO: 1807487 - DNA, 25 bp, Homo sapien
ggatatgaaactcccagtgcctctg

SEQ ID NO: 1807488 - DNA, 25 bp, Homo sapien
acgtggctggcatgacgcaggcaga

SEQ ID NO: 1807489 - DNA, 25 bp, Homo sapien
ccgcgtgggcggatggaaacgaagg

SEQ ID NO: 1807490 - DNA, 25 bp, Homo sapien
gaaacgaaggcgagggagatgggaa

SEQ ID NO: 1807491 - DNA, 25 bp, Homo sapien
gcttggcacgttatacaaatgttag

SEQ ID NO: 1807492 - DNA, 25 bp, Homo sapien
aaaacagcgtagaacaggtaaggct

SEQ ID NO: 1807493 - DNA, 25 bp, Homo sapien
ttagttggtcttcgtattgtgtgct

SEQ ID NO: 1807494 - DNA, 25 bp, Homo sapien
tgagaggaagtgcataaaaacagcg

SEQ ID NO: 1807495 - DNA, 25 bp, Homo sapien
ggagcctctgcatctacggctgtgc

SEQ ID NO: 1807496 - DNA, 25 bp, Homo sapien
cctctgcatctacggctgtgcactg

SEQ ID NO: 1807497 - DNA, 25 bp, Homo sapien
gagcctctgcatctacggctgtgca

SEQ ID NO: 1807498 - DNA, 25 bp, Homo sapien
atctacggctgtgcactggggatgt

SEQ ID NO: 1807499 - DNA, 25 bp, Homo sapien
cctcgggtaggagttctgggcgtga

SEQ ID NO: 1807500 - DNA, 25 bp, Homo sapien
tgggcgtgagccgtggagtcacaca

SEQ ID NO: 1807501 - DNA, 25 bp, Homo sapien
agtcacacagttgagccgtcctcgt

SEQ ID NO: 1807502 - DNA, 25 bp, Homo sapien
tcaggtgagaaaacaccacgtggtc

SEQ ID NO: 1807503 - DNA, 25 bp, Homo sapien
taaaagggggcatcagatcactctc

SEQ ID NO: 1807504 - DNA, 25 bp, Homo sapien
tgtgttcttaaaagggggcatcaga

SEQ ID NO: 1807505 - DNA, 25 bp, Homo sapien
aagggggcatcagatcactctccat

SEQ ID NO: 1807506 - DNA, 25 bp, Homo sapien
cttaaaagggggcatcagatcactc

SEQ ID NO: 1807507 - DNA, 25 bp, Homo sapien
tgtcggccctggctgtcccatagct

SEQ ID NO: 1807508 - DNA, 25 bp, Homo sapien
ctcgcaaaggatttgagaacaaggg

SEQ ID NO: 1807509 - DNA, 25 bp, Homo sapien
tgtcccatagctgattactgggggg

SEQ ID NO: 1807510 - DNA, 25 bp, Homo sapien
ccccagtggagactcgcaaaggatt

SEQ ID NO: 1807511 - DNA, 25 bp, Homo sapien
ccttggtgaacgagtgtgaatatgt

SEQ ID NO: 1807512 - DNA, 25 bp, Homo sapien
gcacggctgcagttgagtttactcc

SEQ ID NO: 1807513 - DNA, 25 bp, Homo sapien
caacatactgttgtacgtggcacgg

SEQ ID NO: 1807514 - DNA, 25 bp, Homo sapien
gcagttgagtttactccctccttgg

SEQ ID NO: 1807515 - DNA, 25 bp, Homo sapien
tgagccagttcccaaacgtatacag

SEQ ID NO: 1807516 - DNA, 25 bp, Homo sapien
cagtgttgccggttgggtttgtaat

SEQ ID NO: 1807517 - DNA, 25 bp, Homo sapien
tattgttcaaggaccgcagccaaca

SEQ ID NO: 1807518 - DNA, 25 bp, Homo sapien
tttgtaatttgcatgggtgtcccac

SEQ ID NO: 1807519 - DNA, 25 bp, Homo sapien
tgtctttaccggacttcacaagtac

SEQ ID NO: 1807520 - DNA, 25 bp, Homo sapien
ttaccggacttcacaagtacagtag

SEQ ID NO: 1807521 - DNA, 25 bp, Homo sapien
gtacatgtctttaccggacttcaca

SEQ ID NO: 1807522 - DNA, 25 bp, Homo sapien
ccggacttcacaagtacagtagaca

SEQ ID NO: 1807523 - DNA, 25 bp, Homo sapien
tgagtcactaagcacgtgtggtcgc

SEQ ID NO: 1807524 - DNA, 25 bp, Homo sapien
ttttcctgtggtcggcaactgggct

SEQ ID NO: 1807525 - DNA, 25 bp, Homo sapien
caactgggctggttaagacgctgaa

SEQ ID NO: 1807526 - DNA, 25 bp, Homo sapien
aaaggaacagacaaggatgcgggcc

SEQ ID NO: 1807527 - DNA, 25 bp, Homo sapien
tccaggagccacaagacggtgcttc

SEQ ID NO: 1807528 - DNA, 25 bp, Homo sapien
agtgtgttttgactcatgagtttcc

SEQ ID NO: 1807529 - DNA, 25 bp, Homo sapien
agggagctccggcagttctgggatg

SEQ ID NO: 1807530 - DNA, 25 bp, Homo sapien
tttgcccatcatgttctctatcgag

SEQ ID NO: 1807531 - DNA, 25 bp, Homo sapien
gggcaggtggtagttattcatccag

SEQ ID NO: 1807532 - DNA, 25 bp, Homo sapien
ggcaactggcatcccagagaactgt

SEQ ID NO: 1807533 - DNA, 25 bp, Homo sapien
gctccgctggcaatgagaacctttg

SEQ ID NO: 1807534 - DNA, 25 bp, Homo sapien
tctggaagaatgcaggctccgctgg

SEQ ID NO: 1807535 - DNA, 25 bp, Homo sapien
tgagccagaaagctgttgggattca

SEQ ID NO: 1807536 - DNA, 25 bp, Homo sapien
cacagtgccgactggaaatgcattg

SEQ ID NO: 1807537 - DNA, 25 bp, Homo sapien
tgccgactggaaatgcattgggtat

SEQ ID NO: 1807538 - DNA, 25 bp, Homo sapien
tgttgggattcacagtgccgactgg

SEQ ID NO: 1807539 - DNA, 25 bp, Homo sapien
gaaattcattgcattcctggagtga

SEQ ID NO: 1807540 - DNA, 25 bp, Homo sapien
ccccaggaggagtatctttcttgac

SEQ ID NO: 1807541 - DNA, 25 bp, Homo sapien
ggaatgctcttgctgagtcccataa

SEQ ID NO: 1807542 - DNA, 25 bp, Homo sapien
cacgagggttcagtggcatgagcct

SEQ ID NO: 1807543 - DNA, 25 bp, Homo sapien
tctgcaggcgccagtgctttttctt

SEQ ID NO: 1807544 - DNA, 25 bp, Homo sapien
atctgcaggcgccagtgctttttct

SEQ ID NO: 1807545 - DNA, 25 bp, Homo sapien
attccttcataccagggaaatgatt

SEQ ID NO: 1807546 - DNA, 25 bp, Homo sapien
gtgctccagggtacaaatgggagca

SEQ ID NO: 1807547 - DNA, 25 bp, Homo sapien
tccagggtacaaatgggagcaagcc

SEQ ID NO: 1807548 - DNA, 25 bp, Homo sapien
tattagaagttctgctccacagtca

SEQ ID NO: 1807549 - DNA, 25 bp, Homo sapien
tcagatgctgttatgtcataatcta

SEQ ID NO: 1807550 - DNA, 25 bp, Homo sapien
ttcagatgctgttatgtcataatct

SEQ ID NO: 1807551 - DNA, 25 bp, Homo sapien
tttctcacaccgacagtcacttgac

SEQ ID NO: 1807552 - DNA, 25 bp, Homo sapien
cagtcacttgacacttgcccagagc

SEQ ID NO: 1807553 - DNA, 25 bp, Homo sapien
gacacttgcccagagcattctcatg

SEQ ID NO: 1807554 - DNA, 25 bp, Homo sapien
cacttgacacttgcccagagcattc

SEQ ID NO: 1807555 - DNA, 25 bp, Homo sapien
aataattgactttgcggcgctcgat

SEQ ID NO: 1807556 - DNA, 25 bp, Homo sapien
gtgtaaataattgactttgcggcgc

SEQ ID NO: 1807557 - DNA, 25 bp, Homo sapien
aagtgtaaataattgactttgcggc

SEQ ID NO: 1807558 - DNA, 25 bp, Homo sapien
taaataattgactttgcggcgctcg

SEQ ID NO: 1807559 - DNA, 25 bp, Homo sapien
ccacagcgcggaggccctaggacgc

SEQ ID NO: 1807560 - DNA, 25 bp, Homo sapien
agaaggccacagcgcggaggcccta

SEQ ID NO: 1807561 - DNA, 25 bp, Homo sapien
agagaaggccacagcgcggaggccc

SEQ ID NO: 1807562 - DNA, 25 bp, Homo sapien
gcgcggaggccctaggacgccgcat

SEQ ID NO: 1807563 - DNA, 25 bp, Homo sapien
tggccctggaagctgataatgaccc

SEQ ID NO: 1807564 - DNA, 25 bp, Homo sapien
atcgtgggaccatagagttcggaag

SEQ ID NO: 1807565 - DNA, 25 bp, Homo sapien
ataatgaccccatggcaacgcgggc

SEQ ID NO: 1807566 - DNA, 25 bp, Homo sapien
ccggaggtcacgcaggcctcatttt

SEQ ID NO: 1807567 - DNA, 25 bp, Homo sapien
taaaacatgggtcagtaacactacg

SEQ ID NO: 1807568 - DNA, 25 bp, Homo sapien
tctgaagagggccagtgatgagcac

SEQ ID NO: 1807569 - DNA, 25 bp, Homo sapien
gaaagatgccccgtgtcaagttgct

SEQ ID NO: 1807570 - DNA, 25 bp, Homo sapien
tcctgctgccaaaatagcggatgat

SEQ ID NO: 1807571 - DNA, 25 bp, Homo sapien
agcaaaggttgcttccctggcaaac

SEQ ID NO: 1807572 - DNA, 25 bp, Homo sapien
gatgctctccaaccattcgtggccc

SEQ ID NO: 1807573 - DNA, 25 bp, Homo sapien
ccagcagggctaggcactcaataga

SEQ ID NO: 1807574 - DNA, 25 bp, Homo sapien
cattcgtggcccagcggagtgaatt

SEQ ID NO: 1807575 - DNA, 25 bp, Homo sapien
agacgtagttcttgatgttctttgg

SEQ ID NO: 1807576 - DNA, 25 bp, Homo sapien
cttgtctgctggatgggtaagtacg

SEQ ID NO: 1807577 - DNA, 25 bp, Homo sapien
cctgggtacacgataagacgtagtt

SEQ ID NO: 1807578 - DNA, 25 bp, Homo sapien
taagtacgtccctgggtacacgata

SEQ ID NO: 1807579 - DNA, 25 bp, Homo sapien
actgaagaaccacaacgtcgggcag

SEQ ID NO: 1807580 - DNA, 25 bp, Homo sapien
catgactgagggtgcctccttccag

SEQ ID NO: 1807581 - DNA, 25 bp, Homo sapien
tgatgcaggaccagccgatcgattc

SEQ ID NO: 1807582 - DNA, 25 bp, Homo sapien
ggcgaacattgcaggcccgagaagc

SEQ ID NO: 1807583 - DNA, 25 bp, Homo sapien
ggtccacttggtaagaatgataata

SEQ ID NO: 1807584 - DNA, 25 bp, Homo sapien
gatggtccacttggtaagaatgata

SEQ ID NO: 1807585 - DNA, 25 bp, Homo sapien
gtccacttggtaagaatgataatat

SEQ ID NO: 1807586 - DNA, 25 bp, Homo sapien
tggtccacttggtaagaatgataat

SEQ ID NO: 1807587 - DNA, 25 bp, Homo sapien
caacttcgcgaggaagaaccgcgcg

SEQ ID NO: 1807588 - DNA, 25 bp, Homo sapien
gcctccagggtaggcttcgtccagg

SEQ ID NO: 1807589 - DNA, 25 bp, Homo sapien
ctgggagagaagtgacgccccggat

SEQ ID NO: 1807590 - DNA, 25 bp, Homo sapien
acagtgggtgccctgcgacccgagg

SEQ ID NO: 1807591 - DNA, 25 bp, Homo sapien
tggttttggtttttcatccttcgca

SEQ ID NO: 1807592 - DNA, 25 bp, Homo sapien
cagctttctggccccgaactcggta

SEQ ID NO: 1807593 - DNA, 25 bp, Homo sapien
gccccgaactcggtatgaatcatag

SEQ ID NO: 1807594 - DNA, 25 bp, Homo sapien
tctggccccgaactcggtatgaatc

SEQ ID NO: 1807595 - DNA, 25 bp, Homo sapien
cccgaactcggtatgaatcatagaa

SEQ ID NO: 1807596 - DNA, 25 bp, Homo sapien
taggtcacctccagacgacagtagc

SEQ ID NO: 1807597 - DNA, 25 bp, Homo sapien
tgaacagcgatgtcagaagtcggga

SEQ ID NO: 1807598 - DNA, 25 bp, Homo sapien
cgtttacagattgtcttcggatgca

SEQ ID NO: 1807599 - DNA, 25 bp, Homo sapien
gaccaaggtctagcatgactctaag

SEQ ID NO: 1807600 - DNA, 25 bp, Homo sapien
tggaggtttgcttatctcttatttc

SEQ ID NO: 1807601 - DNA, 25 bp, Homo sapien
aaatgtatgaatcgttttggaggtt

SEQ ID NO: 1807602 - DNA, 25 bp, Homo sapien
tacttgtatgtcaaggaattaggaa

SEQ ID NO: 1807603 - DNA, 25 bp, Homo sapien
tgaggaatgtgactatatgaagagg

SEQ ID NO: 1807604 - DNA, 25 bp, Homo sapien
gacatacgccgcagagtgacgtctc

SEQ ID NO: 1807605 - DNA, 25 bp, Homo sapien
gtgacgtctcgagaacccagggaat

SEQ ID NO: 1807606 - DNA, 25 bp, Homo sapien
gctttctctttgtggtaggctgggc

SEQ ID NO: 1807607 - DNA, 25 bp, Homo sapien
agaggaacggaactgacgcacagct

SEQ ID NO: 1807608 - DNA, 25 bp, Homo sapien
tcctgagcacggttgttggcttttt

SEQ ID NO: 1807609 - DNA, 25 bp, Homo sapien
cttcctgagcacggttgttggcttt

SEQ ID NO: 1807610 - DNA, 25 bp, Homo sapien
ctgagcacggttgttggctttttcc

SEQ ID NO: 1807611 - DNA, 25 bp, Homo sapien
cctgagcacggttgttggctttttc

SEQ ID NO: 1807612 - DNA, 25 bp, Homo sapien
ggcagcacgtgcagggtgcaagcgt

SEQ ID NO: 1807613 - DNA, 25 bp, Homo sapien
tctcggagagtggtgccagcggccg

SEQ ID NO: 1807614 - DNA, 25 bp, Homo sapien
aagcgtgtctcggagagtggtgcca

SEQ ID NO: 1807615 - DNA, 25 bp, Homo sapien
cacgtgcagggtgcaagcgtgtctc

SEQ ID NO: 1807616 - DNA, 25 bp, Homo sapien
aatgaccactcttcggaggtcggag

SEQ ID NO: 1807617 - DNA, 25 bp, Homo sapien
ctgaaggacaaatcaatgaccactc

SEQ ID NO: 1807618 - DNA, 25 bp, Homo sapien
ggacaaatcaatgaccactcttcgg

SEQ ID NO: 1807619 - DNA, 25 bp, Homo sapien
caaatcaatgaccactcttcggagg

SEQ ID NO: 1807620 - DNA, 25 bp, Homo sapien
cggctctgcctgactgtgtccggca

SEQ ID NO: 1807621 - DNA, 25 bp, Homo sapien
tgggggtcgcggcagtggatgaggc

SEQ ID NO: 1807622 - DNA, 25 bp, Homo sapien
gcctgactgtgtccggcaactcggg

SEQ ID NO: 1807623 - DNA, 25 bp, Homo sapien
ggggaggagcaaccggctctgcctg

SEQ ID NO: 1807624 - DNA, 25 bp, Homo sapien
cagtcagtgaaatccagcacactga

SEQ ID NO: 1807625 - DNA, 25 bp, Homo sapien
tgcacagtcagtgaaatccagcaca

SEQ ID NO: 1807626 - DNA, 25 bp, Homo sapien
gtggtgcacagtcagtgaaatccag

SEQ ID NO: 1807627 - DNA, 25 bp, Homo sapien
cacagtcagtgaaatccagcacact

SEQ ID NO: 1807628 - DNA, 25 bp, Homo sapien
ttgtcacgatcatgattttcagttt

SEQ ID NO: 1807629 - DNA, 25 bp, Homo sapien
ctgttgtcacgatcatgattttcag

SEQ ID NO: 1807630 - DNA, 25 bp, Homo sapien
tctgttgtcacgatcatgattttca

SEQ ID NO: 1807631 - DNA, 25 bp, Homo sapien
tgttgtcacgatcatgattttcagt

SEQ ID NO: 1807632 - DNA, 25 bp, Homo sapien
gggtctggagggacgtcagggctta

SEQ ID NO: 1807633 - DNA, 25 bp, Homo sapien
tgggtcagactgagcttggcctccg

SEQ ID NO: 1807634 - DNA, 25 bp, Homo sapien
gcgggcagccgcgaatgggcgtggg

SEQ ID NO: 1807635 - DNA, 25 bp, Homo sapien
acgtcagggcttagacccttccctg

SEQ ID NO: 1807636 - DNA, 25 bp, Homo sapien
gcactgggcatctgaaaatccagca

SEQ ID NO: 1807637 - DNA, 25 bp, Homo sapien
aagagttcggaaacttgagagtagg

SEQ ID NO: 1807638 - DNA, 25 bp, Homo sapien
agtaagagttcggaaacttgagagt

SEQ ID NO: 1807639 - DNA, 25 bp, Homo sapien
taagagttcggaaacttgagagtag

SEQ ID NO: 1807640 - DNA, 25 bp, Homo sapien
gagttcggaaacttgagagtaggat

SEQ ID NO: 1807641 - DNA, 25 bp, Homo sapien
tcaggtcagccagcagaggaagcat

SEQ ID NO: 1807642 - DNA, 25 bp, Homo sapien
gccagataccagcaggagagggctc

SEQ ID NO: 1807643 - DNA, 25 bp, Homo sapien
cagataccagcaggagagggctcag

SEQ ID NO: 1807644 - DNA, 25 bp, Homo sapien
gggctcaggtcagccagcagaggaa

SEQ ID NO: 1807645 - DNA, 25 bp, Homo sapien
cagccctggtgttaggggccgcaag

SEQ ID NO: 1807646 - DNA, 25 bp, Homo sapien
ccgtgtctgataagggacatctttc

SEQ ID NO: 1807647 - DNA, 25 bp, Homo sapien
tgttaggggccgcaaggctgctgct

SEQ ID NO: 1807648 - DNA, 25 bp, Homo sapien
ccagccgtgtctgataagggacatc

SEQ ID NO: 1807649 - DNA, 25 bp, Homo sapien
agctcccacgcaaaggaaagcggtg

SEQ ID NO: 1807650 - DNA, 25 bp, Homo sapien
aaagcggtgggtggtagctgagcga

SEQ ID NO: 1807651 - DNA, 25 bp, Homo sapien
ctgaggaggattgtcactgtttggc

SEQ ID NO: 1807652 - DNA, 25 bp, Homo sapien
cagtgtttaggtagcgcagctccca

SEQ ID NO: 1807653 - DNA, 25 bp, Homo sapien
tccacaccgaggaaacggctttgat

SEQ ID NO: 1807654 - DNA, 25 bp, Homo sapien
gatactgcgggttgtttagggccac

SEQ ID NO: 1807655 - DNA, 25 bp, Homo sapien
gagtgggtgggaacgctgatactgc

SEQ ID NO: 1807656 - DNA, 25 bp, Homo sapien
cagcggagctcgaagctgggttcct

SEQ ID NO: 1807657 - DNA, 25 bp, Homo sapien
gcaaaggccacagggccgatctcca

SEQ ID NO: 1807658 - DNA, 25 bp, Homo sapien
tgaccttgatgagaatgacttccaa

SEQ ID NO: 1807659 - DNA, 25 bp, Homo sapien
taatagtgaccttgatgagaatgac

SEQ ID NO: 1807660 - DNA, 25 bp, Homo sapien
gaatgacttccaactctacagccca

SEQ ID NO: 1807661 - DNA, 25 bp, Homo sapien
gatgagaatgacttccaactctaca

SEQ ID NO: 1807662 - DNA, 25 bp, Homo sapien
tttcaatattctgaggccctctgac

SEQ ID NO: 1807663 - DNA, 25 bp, Homo sapien
tttcctctgtcctcggttctgcttc

SEQ ID NO: 1807664 - DNA, 25 bp, Homo sapien
aacttgaatctggacacggaacagg

SEQ ID NO: 1807665 - DNA, 25 bp, Homo sapien
cggaacaggtcagctttcctctgtc

SEQ ID NO: 1807666 - DNA, 25 bp, Homo sapien
cttcacacagggtggtgcggtagcc

SEQ ID NO: 1807667 - DNA, 25 bp, Homo sapien
tcacacagggtggtgcggtagccca

SEQ ID NO: 1807668 - DNA, 25 bp, Homo sapien
ttcacacagggtggtgcggtagccc

SEQ ID NO: 1807669 - DNA, 25 bp, Homo sapien
cacacagggtggtgcggtagcccat

SEQ ID NO: 1807670 - DNA, 25 bp, Homo sapien
cttgtggactgatggtgcacactgt

SEQ ID NO: 1807671 - DNA, 25 bp, Homo sapien
ttttgaattgaaagtaggttcagca

SEQ ID NO: 1807672 - DNA, 25 bp, Homo sapien
tgaaagtaggttcagcaaaggcttg

SEQ ID NO: 1807673 - DNA, 25 bp, Homo sapien
tggactgatggtgcacactgtgatg

SEQ ID NO: 1807674 - DNA, 25 bp, Homo sapien
tcaattgctcatatttcctccttcc

SEQ ID NO: 1807675 - DNA, 25 bp, Homo sapien
catatttcctccttccacaaaccgc

SEQ ID NO: 1807676 - DNA, 25 bp, Homo sapien
attgctcatatttcctccttccaca

SEQ ID NO: 1807677 - DNA, 25 bp, Homo sapien
tcatatttcctccttccacaaaccg

SEQ ID NO: 1807678 - DNA, 25 bp, Homo sapien
gacccaaggcttttgttcacttgct

SEQ ID NO: 1807679 - DNA, 25 bp, Homo sapien
tacatccaggacatccctgacccaa

SEQ ID NO: 1807680 - DNA, 25 bp, Homo sapien
ttctgcctgttattatcacaaaatc

SEQ ID NO: 1807681 - DNA, 25 bp, Homo sapien
tttcaatatggactaccccactctc

SEQ ID NO: 1807682 - DNA, 25 bp, Homo sapien
accgttgctgcaactcagtgttgaa

SEQ ID NO: 1807683 - DNA, 25 bp, Homo sapien
ccagtgaccgttcacgtcaaggtga

SEQ ID NO: 1807684 - DNA, 25 bp, Homo sapien
cagtgttgaagtcacagttggttga

SEQ ID NO: 1807685 - DNA, 25 bp, Homo sapien
ttgaaggcatcaggtttaaactcat

SEQ ID NO: 1807686 - DNA, 25 bp, Homo sapien
ctttagactgttaaacgtggtcgag

SEQ ID NO: 1807687 - DNA, 25 bp, Homo sapien
catcatcaccctttagactgttaaa

SEQ ID NO: 1807688 - DNA, 25 bp, Homo sapien
gactgttaaacgtggtcgagttgac

SEQ ID NO: 1807689 - DNA, 25 bp, Homo sapien
taaacgtggtcgagttgaccagatg

SEQ ID NO: 1807690 - DNA, 25 bp, Homo sapien
tttttgccaacaatgacagacagtg

SEQ ID NO: 1807691 - DNA, 25 bp, Homo sapien
cctgatgttatcctcctggtaggaa

SEQ ID NO: 1807692 - DNA, 25 bp, Homo sapien
aggttttgatgttcatactgtggtc

SEQ ID NO: 1807693 - DNA, 25 bp, Homo sapien
cagacagtgtagcaacctctcctga

SEQ ID NO: 1807694 - DNA, 25 bp, Homo sapien
tttgacatctgtgctcgaggtggta

SEQ ID NO: 1807695 - DNA, 25 bp, Homo sapien
caggcacgcagatgccctgggtgct

SEQ ID NO: 1807696 - DNA, 25 bp, Homo sapien
ttgacatctgtgctcgaggtggtag

SEQ ID NO: 1807697 - DNA, 25 bp, Homo sapien
gatggcttcaggcacgcagatgccc

SEQ ID NO: 1807698 - DNA, 25 bp, Homo sapien
gcttttcttgccactgagggcactg

SEQ ID NO: 1807699 - DNA, 25 bp, Homo sapien
ggtggccaggctcggcattcccttg

SEQ ID NO: 1807700 - DNA, 25 bp, Homo sapien
actgagggcactgggcggagcagcc

SEQ ID NO: 1807701 - DNA, 25 bp, Homo sapien
aaggcgagtggattctctgtggcca

SEQ ID NO: 1807702 - DNA, 25 bp, Homo sapien
ccttctggtaaggacggacagtcac

SEQ ID NO: 1807703 - DNA, 25 bp, Homo sapien
ttctggtaaggacggacagtcacag

SEQ ID NO: 1807704 - DNA, 25 bp, Homo sapien
ccatgacaccttctggtaaggacgg

SEQ ID NO: 1807705 - DNA, 25 bp, Homo sapien
gacaccttctggtaaggacggacag

SEQ ID NO: 1807706 - DNA, 25 bp, Homo sapien
taaagaatcttcattgccaactttg

SEQ ID NO: 1807707 - DNA, 25 bp, Homo sapien
acagataaagaatcttcattgccaa

SEQ ID NO: 1807708 - DNA, 25 bp, Homo sapien
ccaagagagttccagccacagataa

SEQ ID NO: 1807709 - DNA, 25 bp, Homo sapien
ctgcaccaagagagttccagccaca

SEQ ID NO: 1807710 - DNA, 25 bp, Homo sapien
gaactggctttatcagtgaacatct

SEQ ID NO: 1807711 - DNA, 25 bp, Homo sapien
tggctttatcagtgaacatctcagg

SEQ ID NO: 1807712 - DNA, 25 bp, Homo sapien
tagaactggctttatcagtgaacat

SEQ ID NO: 1807713 - DNA, 25 bp, Homo sapien
actggctttatcagtgaacatctca

SEQ ID NO: 1807714 - DNA, 25 bp, Homo sapien
tgcactcgaggactcctgcgtgctt

SEQ ID NO: 1807715 - DNA, 25 bp, Homo sapien
cactcgaggactcctgcgtgcttta

SEQ ID NO: 1807716 - DNA, 25 bp, Homo sapien
gcactcgaggactcctgcgtgcttt

SEQ ID NO: 1807717 - DNA, 25 bp, Homo sapien
ctgcactcgaggactcctgcgtgct

SEQ ID NO: 1807718 - DNA, 25 bp, Homo sapien
gggtgtagcaggagggcgccacaca

SEQ ID NO: 1807719 - DNA, 25 bp, Homo sapien
gcaggagggcgccacacactggatc

SEQ ID NO: 1807720 - DNA, 25 bp, Homo sapien
agggcgccacacactggatcacagc

SEQ ID NO: 1807721 - DNA, 25 bp, Homo sapien
aggagggcgccacacactggatcac

SEQ ID NO: 1807722 - DNA, 25 bp, Homo sapien
gaccctcgtgaccatctgttctttc

SEQ ID NO: 1807723 - DNA, 25 bp, Homo sapien
acatgggtgtagcatttgaccctcg

SEQ ID NO: 1807724 - DNA, 25 bp, Homo sapien
tgccagatctggctaacacatgggt

SEQ ID NO: 1807725 - DNA, 25 bp, Homo sapien
aatatttcttggattccttgacaac

SEQ ID NO: 1807726 - DNA, 25 bp, Homo sapien
tctgtatgctagctaatgtcttctt

SEQ ID NO: 1807727 - DNA, 25 bp, Homo sapien
gaagctgaatagaagaagatagtta

SEQ ID NO: 1807728 - DNA, 25 bp, Homo sapien
ctctgagaattaatagaagctgaat

SEQ ID NO: 1807729 - DNA, 25 bp, Homo sapien
gaagatagttaaaatctgtatgcta

SEQ ID NO: 1807730 - DNA, 25 bp, Homo sapien
ttcacagttgtgcttcgagaatgcc

SEQ ID NO: 1807731 - DNA, 25 bp, Homo sapien
gctggggagagtaaaatgcaatata

SEQ ID NO: 1807732 - DNA, 25 bp, Homo sapien
ccaaagctcattgctctgtttgcaa

SEQ ID NO: 1807733 - DNA, 25 bp, Homo sapien
tgtgcttcgagaatgccaaagctca

SEQ ID NO: 1807734 - DNA, 25 bp, Homo sapien
cgtgctatagcctggaaatgtacta

SEQ ID NO: 1807735 - DNA, 25 bp, Homo sapien
catattgctgaaagaatagaatctt

SEQ ID NO: 1807736 - DNA, 25 bp, Homo sapien
aatgtactaaagacactacaacata

SEQ ID NO: 1807737 - DNA, 25 bp, Homo sapien
agatccagtttaatacagatttgag

SEQ ID NO: 1807738 - DNA, 25 bp, Homo sapien
tgatactactttatgctcggcctgg

SEQ ID NO: 1807739 - DNA, 25 bp, Homo sapien
cacgatgaaaaactgcgccagagca

SEQ ID NO: 1807740 - DNA, 25 bp, Homo sapien
ttccgagagggcgtgttgtttccag

SEQ ID NO: 1807741 - DNA, 25 bp, Homo sapien
tgtacgcgcccttgattagtttcca

SEQ ID NO: 1807742 - DNA, 25 bp, Homo sapien
agtgtgagcagaagcggagcccgca

SEQ ID NO: 1807743 - DNA, 25 bp, Homo sapien
gagcgccaggctgcgccgggagatg

SEQ ID NO: 1807744 - DNA, 25 bp, Homo sapien
gtgcaccaacgctgccagtgtgagc

SEQ ID NO: 1807745 - DNA, 25 bp, Homo sapien
cagaagcggagcccgcagagcgcca

SEQ ID NO: 1807746 - DNA, 25 bp, Homo sapien
cgctctatgggctccaggcagccga

SEQ ID NO: 1807747 - DNA, 25 bp, Homo sapien
ccccagaaaggagcgctctatgggc

SEQ ID NO: 1807748 - DNA, 25 bp, Homo sapien
cgaggaaacgcgaacgtgagccccg

SEQ ID NO: 1807749 - DNA, 25 bp, Homo sapien
aacgcgaacgtgagccccgtgactg

SEQ ID NO: 1807750 - DNA, 25 bp, Homo sapien
acagaacgctcccaggaacgaggaa

SEQ ID NO: 1807751 - DNA, 25 bp, Homo sapien
caggcgccctggagagaattcacag

SEQ ID NO: 1807752 - DNA, 25 bp, Homo sapien
aaaatggaactgtcggctgcggctg

SEQ ID NO: 1807753 - DNA, 25 bp, Homo sapien
aacgctcccaggaacgaggaagcac

SEQ ID NO: 1807754 - DNA, 25 bp, Homo sapien
tctcctttgaggtagaacatcacct

SEQ ID NO: 1807755 - DNA, 25 bp, Homo sapien
cgggagagcattctgcccgaaggcc

SEQ ID NO: 1807756 - DNA, 25 bp, Homo sapien
tccttagcaggagtattcgggaact

SEQ ID NO: 1807757 - DNA, 25 bp, Homo sapien
cttctgttgctggaaacacgggaga

SEQ ID NO: 1807758 - DNA, 25 bp, Homo sapien
tgtggcaagacagatgcgatggctt

SEQ ID NO: 1807759 - DNA, 25 bp, Homo sapien
cctgtggcaagacagatgcgatggc

SEQ ID NO: 1807760 - DNA, 25 bp, Homo sapien
gtggcaagacagatgcgatggcttc

SEQ ID NO: 1807761 - DNA, 25 bp, Homo sapien
ctgtggcaagacagatgcgatggct

SEQ ID NO: 1807762 - DNA, 25 bp, Homo sapien
gtctgcacaggtattgggagtctcc

SEQ ID NO: 1807763 - DNA, 25 bp, Homo sapien
tgggagtctcctgtgaacgcccact

SEQ ID NO: 1807764 - DNA, 25 bp, Homo sapien
ctggtctgcacaggtattgggagtc

SEQ ID NO: 1807765 - DNA, 25 bp, Homo sapien
tgaacgcccacttgcagaaagcact

SEQ ID NO: 1807766 - DNA, 25 bp, Homo sapien
ctcctgactagaaggccgccttctg

SEQ ID NO: 1807767 - DNA, 25 bp, Homo sapien
ctgtcctcctgactagaaggccgcc

SEQ ID NO: 1807768 - DNA, 25 bp, Homo sapien
aggccgccttctgcatccgagcaga

SEQ ID NO: 1807769 - DNA, 25 bp, Homo sapien
ctagaaggccgccttctgcatccga

SEQ ID NO: 1807770 - DNA, 25 bp, Homo sapien
caactgaggcgcagccaagatgaag

SEQ ID NO: 1807771 - DNA, 25 bp, Homo sapien
tgctgtgcccgccttgcaactgagg

SEQ ID NO: 1807772 - DNA, 25 bp, Homo sapien
gccttgcaactgaggcgcagccaag

SEQ ID NO: 1807773 - DNA, 25 bp, Homo sapien
tgcccgccttgcaactgaggcgcag

SEQ ID NO: 1807774 - DNA, 25 bp, Homo sapien
ctcaaagtccttaatggccaggtcc

SEQ ID NO: 1807775 - DNA, 25 bp, Homo sapien
gattgtagccccaaggtgagtgcga

SEQ ID NO: 1807776 - DNA, 25 bp, Homo sapien
agctgtcacggaaacggcgaccatt

SEQ ID NO: 1807777 - DNA, 25 bp, Homo sapien
tcttgggctcctttctacgcgtgtg

SEQ ID NO: 1807778 - DNA, 25 bp, Homo sapien
cagagggtgtggatggaacattatc

SEQ ID NO: 1807779 - DNA, 25 bp, Homo sapien
cgcagctttaactactcccttcccg

SEQ ID NO: 1807780 - DNA, 25 bp, Homo sapien
cagctttaactactcccttcccgct

SEQ ID NO: 1807781 - DNA, 25 bp, Homo sapien
agagggtgtggatggaacattatcc

SEQ ID NO: 1807782 - DNA, 25 bp, Homo sapien
tgccgtacagatctgcgctaactgc

SEQ ID NO: 1807783 - DNA, 25 bp, Homo sapien
cccttgccgtacagatctgcgctaa

SEQ ID NO: 1807784 - DNA, 25 bp, Homo sapien
gtcccttgccgtacagatctgcgct

SEQ ID NO: 1807785 - DNA, 25 bp, Homo sapien
tacagatctgcgctaactgctgaca

SEQ ID NO: 1807786 - DNA, 25 bp, Homo sapien
gaagcccgatgctaagctgcagctg

SEQ ID NO: 1807787 - DNA, 25 bp, Homo sapien
tgtaggaagcccgatgctaagctgc

SEQ ID NO: 1807788 - DNA, 25 bp, Homo sapien
ggcttgtaggaagcccgatgctaag

SEQ ID NO: 1807789 - DNA, 25 bp, Homo sapien
tctggcttgtaggaagcccgatgct

SEQ ID NO: 1807790 - DNA, 25 bp, Homo sapien
cctgctggtaccgcgagttctcact

SEQ ID NO: 1807791 - DNA, 25 bp, Homo sapien
gctggtaccgcgagttctcacttcc

SEQ ID NO: 1807792 - DNA, 25 bp, Homo sapien
accctgctggtaccgcgagttctca

SEQ ID NO: 1807793 - DNA, 25 bp, Homo sapien
ggccaccctgctggtaccgcgagtt

SEQ ID NO: 1807794 - DNA, 25 bp, Homo sapien
ccccttgtttgggatgggccagtct

SEQ ID NO: 1807795 - DNA, 25 bp, Homo sapien
gggcctcttcagcgatcacagccat

SEQ ID NO: 1807796 - DNA, 25 bp, Homo sapien
ctcaccccttgtttgggatgggcca

SEQ ID NO: 1807797 - DNA, 25 bp, Homo sapien
cccacgcggcggtgcttctcatctg

SEQ ID NO: 1807798 - DNA, 25 bp, Homo sapien
acattcttgcagtcgttggagtcac

SEQ ID NO: 1807799 - DNA, 25 bp, Homo sapien
tggagtcactatttgtgtagaaggc

SEQ ID NO: 1807800 - DNA, 25 bp, Homo sapien
tgtgtagaaggcccatgaccatttt

SEQ ID NO: 1807801 - DNA, 25 bp, Homo sapien
tgttccaatcatttttagatccctc

SEQ ID NO: 1807802 - DNA, 25 bp, Homo sapien
gacaatgcttcgatgtgtgctgaca

SEQ ID NO: 1807803 - DNA, 25 bp, Homo sapien
ccaaggcttccggtgcacagggttt

SEQ ID NO: 1807804 - DNA, 25 bp, Homo sapien
tgctgacagcagagggtgcgattcc

SEQ ID NO: 1807805 - DNA, 25 bp, Homo sapien
caagggaactatctgtttgggacaa

SEQ ID NO: 1807806 - DNA, 25 bp, Homo sapien
caaatggggtgatgtgctgtgattt

SEQ ID NO: 1807807 - DNA, 25 bp, Homo sapien
gggtgatgtgctgtgatttcaagga

SEQ ID NO: 1807808 - DNA, 25 bp, Homo sapien
tggtggtgaaagcaattgggtactt

SEQ ID NO: 1807809 - DNA, 25 bp, Homo sapien
tgatttcaaggagagacgtggtggt

SEQ ID NO: 1807810 - DNA, 25 bp, Homo sapien
cctctgcacaggcagggccctgtgc

SEQ ID NO: 1807811 - DNA, 25 bp, Homo sapien
cacaggcagggccctgtgcctcctc

SEQ ID NO: 1807812 - DNA, 25 bp, Homo sapien
tctgcacaggcagggccctgtgcct

SEQ ID NO: 1807813 - DNA, 25 bp, Homo sapien
tgcacaggcagggccctgtgcctcc

SEQ ID NO: 1807814 - DNA, 25 bp, Homo sapien
ggtgagatccccctcgggctccttg

SEQ ID NO: 1807815 - DNA, 25 bp, Homo sapien
ggagggacgtttacttcttccatgc

SEQ ID NO: 1807816 - DNA, 25 bp, Homo sapien
tccagtccagggatgcttagggctg

SEQ ID NO: 1807817 - DNA, 25 bp, Homo sapien
gggctgcgtcatgtgaaatcttcat

SEQ ID NO: 1807818 - DNA, 25 bp, Homo sapien
gagacccagatctgcgtggacttga

SEQ ID NO: 1807819 - DNA, 25 bp, Homo sapien
gtgagctgattagataatgctggag

SEQ ID NO: 1807820 - DNA, 25 bp, Homo sapien
gattagataatgctggagacccaga

SEQ ID NO: 1807821 - DNA, 25 bp, Homo sapien
taatgctggagacccagatctgcgt

SEQ ID NO: 1807822 - DNA, 25 bp, Homo sapien
gatggactggtcttcatgggcgccc

SEQ ID NO: 1807823 - DNA, 25 bp, Homo sapien
tctaaagagagaggtctgagtccga

SEQ ID NO: 1807824 - DNA, 25 bp, Homo sapien
ccaaatgtgaagtgcactcggacac

SEQ ID NO: 1807825 - DNA, 25 bp, Homo sapien
ccttttgcgagaagatcggcgcgca

SEQ ID NO: 1807826 - DNA, 25 bp, Homo sapien
catctccggcttaaagggaaactct

SEQ ID NO: 1807827 - DNA, 25 bp, Homo sapien
actctctaagttccgggcagccggg

SEQ ID NO: 1807828 - DNA, 25 bp, Homo sapien
cgagcagcatctccggcttaaaggg

SEQ ID NO: 1807829 - DNA, 25 bp, Homo sapien
ggaaactctctaagttccgggcagc

SEQ ID NO: 1807830 - DNA, 25 bp, Homo sapien
ggactgttctggcaacgaggctaca

SEQ ID NO: 1807831 - DNA, 25 bp, Homo sapien
gtggctttgatttcgtgaccacccc

SEQ ID NO: 1807832 - DNA, 25 bp, Homo sapien
tcaatgaacggcagcggtagcctgg

SEQ ID NO: 1807833 - DNA, 25 bp, Homo sapien
gccttgccaaaggtccggctgctga

SEQ ID NO: 1807834 - DNA, 25 bp, Homo sapien
ggctggagactgcactatttatata

SEQ ID NO: 1807835 - DNA, 25 bp, Homo sapien
gcgagcccgacacgtagtgacaagg

SEQ ID NO: 1807836 - DNA, 25 bp, Homo sapien
tatttatatactccggtgctccagg

SEQ ID NO: 1807837 - DNA, 25 bp, Homo sapien
caaagagggcagatccgagtcatcc

SEQ ID NO: 1807838 - DNA, 25 bp, Homo sapien
gcagttccctacgttttgcgtccca

SEQ ID NO: 1807839 - DNA, 25 bp, Homo sapien
gaggcgacaggcttggcttcagcca

SEQ ID NO: 1807840 - DNA, 25 bp, Homo sapien
ccatctcgactcttcgtggtgcgga

SEQ ID NO: 1807841 - DNA, 25 bp, Homo sapien
tctctgttgctaccgtccgtgctgg

SEQ ID NO: 1807842 - DNA, 25 bp, Homo sapien
gcagcagtcccctgcaagcaccctc

SEQ ID NO: 1807843 - DNA, 25 bp, Homo sapien
ggggaatccgcgcagcagtcccctg

SEQ ID NO: 1807844 - DNA, 25 bp, Homo sapien
gattccccgcgagccgggtgcggat

SEQ ID NO: 1807845 - DNA, 25 bp, Homo sapien
tctttctggcgagtgcaagcccacg

SEQ ID NO: 1807846 - DNA, 25 bp, Homo sapien
gacgtctgttgtcacctggcgcgaa

SEQ ID NO: 1807847 - DNA, 25 bp, Homo sapien
catttatgaagctgcgccctgtgcc

SEQ ID NO: 1807848 - DNA, 25 bp, Homo sapien
tgcaggcttccctctcatggcacaa

SEQ ID NO: 1807849 - DNA, 25 bp, Homo sapien
atctgtgccgtctgtccatggaagc

SEQ ID NO: 1807850 - DNA, 25 bp, Homo sapien
agatcccaggacttcattctggagc

SEQ ID NO: 1807851 - DNA, 25 bp, Homo sapien
gggagatcccaggacttcattctgg

SEQ ID NO: 1807852 - DNA, 25 bp, Homo sapien
gaggggagatcccaggacttcattc

SEQ ID NO: 1807853 - DNA, 25 bp, Homo sapien
cttgaggggagatcccaggacttca

SEQ ID NO: 1807854 - DNA, 25 bp, Homo sapien
tggctgccttcaccagtgcccttgt

SEQ ID NO: 1807855 - DNA, 25 bp, Homo sapien
agcgccctcgcacgctggctgcctt

SEQ ID NO: 1807856 - DNA, 25 bp, Homo sapien
tgcccttgtcgtgctggctgccttc

SEQ ID NO: 1807857 - DNA, 25 bp, Homo sapien
gccttgatagtgtgcctgtccctct

SEQ ID NO: 1807858 - DNA, 25 bp, Homo sapien
tttcataaagcccttcaggatgcag

SEQ ID NO: 1807859 - DNA, 25 bp, Homo sapien
cctgatccactcatcaacttttcga

SEQ ID NO: 1807860 - DNA, 25 bp, Homo sapien
tcagcgtaggctgaaggcccttcat

SEQ ID NO: 1807861 - DNA, 25 bp, Homo sapien
cgactcaaacatgtaggacaccatt

SEQ ID NO: 1807862 - DNA, 25 bp, Homo sapien
tcacccagggaacggtgacatggac

SEQ ID NO: 1807863 - DNA, 25 bp, Homo sapien
ctcgacggacttggccagcatagcc

SEQ ID NO: 1807864 - DNA, 25 bp, Homo sapien
cagagcttcgaagtccttgatagag

SEQ ID NO: 1807865 - DNA, 25 bp, Homo sapien
tttagaatcagagcttcgaagtcct

SEQ ID NO: 1807866 - DNA, 25 bp, Homo sapien
tggatgctgttaagctgctcatatt

SEQ ID NO: 1807867 - DNA, 25 bp, Homo sapien
ctggatgctgttaagctgctcatat

SEQ ID NO: 1807868 - DNA, 25 bp, Homo sapien
ctgtgtactgaggagagtttctgga

SEQ ID NO: 1807869 - DNA, 25 bp, Homo sapien
tgggctggggctgtgtactgaggag

SEQ ID NO: 1807870 - DNA, 25 bp, Homo sapien
ttcctgacgacatcaacaacgatgt

SEQ ID NO: 1807871 - DNA, 25 bp, Homo sapien
ctgtgacacagtcccggccgatgag

SEQ ID NO: 1807872 - DNA, 25 bp, Homo sapien
acaacgatgtcggttgatgtcaacc

SEQ ID NO: 1807873 - DNA, 25 bp, Homo sapien
tctgctggacgtttgtggaaaaggt

SEQ ID NO: 1807874 - DNA, 25 bp, Homo sapien
tccaccaggtggacgtctccgagtc

SEQ ID NO: 1807875 - DNA, 25 bp, Homo sapien
caggatccgccgctgcgctgatgac

SEQ ID NO: 1807876 - DNA, 25 bp, Homo sapien
gacgtctccgagtccggctcctggg

SEQ ID NO: 1807877 - DNA, 25 bp, Homo sapien
ggatccgccgctgcgctgatgactc

SEQ ID NO: 1807878 - DNA, 25 bp, Homo sapien
ctctccaggatcacatctgccttgg

SEQ ID NO: 1807879 - DNA, 25 bp, Homo sapien
tctccaggatcacatctgccttggt

SEQ ID NO: 1807880 - DNA, 25 bp, Homo sapien
tgtaccaagacaccggatggatccg

SEQ ID NO: 1807881 - DNA, 25 bp, Homo sapien
gagactctccgctgtccctgttgta

SEQ ID NO: 1807882 - DNA, 25 bp, Homo sapien
tggctggtgggaaacgcatgtacca

SEQ ID NO: 1807883 - DNA, 25 bp, Homo sapien
tgttgtactttgagttctgccgctg

SEQ ID NO: 1807884 - DNA, 25 bp, Homo sapien
atgtaatttttctttccataggagt

SEQ ID NO: 1807885 - DNA, 25 bp, Homo sapien
tcatgtaatttttctttccatagga

SEQ ID NO: 1807886 - DNA, 25 bp, Homo sapien
gtaatttttctttccataggagtgc

SEQ ID NO: 1807887 - DNA, 25 bp, Homo sapien
aatttttctttccataggagtgcat

SEQ ID NO: 1807888 - DNA, 25 bp, Homo sapien
ggatgtggctggcgatgtgagagaa

SEQ ID NO: 1807889 - DNA, 25 bp, Homo sapien
tgtggctggcgatgtgagagaagat

SEQ ID NO: 1807890 - DNA, 25 bp, Homo sapien
atgtggctggcgatgtgagagaaga

SEQ ID NO: 1807891 - DNA, 25 bp, Homo sapien
gtggctggcgatgtgagagaagatg

SEQ ID NO: 1807892 - DNA, 25 bp, Homo sapien
atacgaccaaatccactgaccctga

SEQ ID NO: 1807893 - DNA, 25 bp, Homo sapien
tacgaccaaatccactgaccctgac

SEQ ID NO: 1807894 - DNA, 25 bp, Homo sapien
taaaggtgccggtgggctccacgat

SEQ ID NO: 1807895 - DNA, 25 bp, Homo sapien
ttgttcacacccattatgaacacgg

SEQ ID NO: 1807896 - DNA, 25 bp, Homo sapien
cggtgggctccacgatgtactcagc

SEQ ID NO: 1807897 - DNA, 25 bp, Homo sapien
tatgaacacggaggcatcagcagag

SEQ ID NO: 1807898 - DNA, 25 bp, Homo sapien
gggagccctctgatgcctccttcac

SEQ ID NO: 1807899 - DNA, 25 bp, Homo sapien
tagagggagccctctgatgcctcct

SEQ ID NO: 1807900 - DNA, 25 bp, Homo sapien
gagggagccctctgatgcctccttc

SEQ ID NO: 1807901 - DNA, 25 bp, Homo sapien
ctagagggagccctctgatgcctcc

SEQ ID NO: 1807902 - DNA, 25 bp, Homo sapien
tggaggacttgtgggccatgacgtc

SEQ ID NO: 1807903 - DNA, 25 bp, Homo sapien
agccccaacatcaaaggtggaagaa

SEQ ID NO: 1807904 - DNA, 25 bp, Homo sapien
cctggtgctcggtgttgtagcccag

SEQ ID NO: 1807905 - DNA, 25 bp, Homo sapien
gaagaatggatgtcgctgttgaagt

SEQ ID NO: 1807906 - DNA, 25 bp, Homo sapien
gattctcattgtggcaggggactga

SEQ ID NO: 1807907 - DNA, 25 bp, Homo sapien
attctcattgtggcaggggactgag

SEQ ID NO: 1807908 - DNA, 25 bp, Homo sapien
tacatttgttggctatctgtatgtc

SEQ ID NO: 1807909 - DNA, 25 bp, Homo sapien
cagtctgttgattgcaggatacaaa

SEQ ID NO: 1807910 - DNA, 25 bp, Homo sapien
gctatacatgaacaataagctagct

SEQ ID NO: 1807911 - DNA, 25 bp, Homo sapien
ttaatgttgagatgcttgagctcct

SEQ ID NO: 1807912 - DNA, 25 bp, Homo sapien
ctggctcgaatccacagtaagttgg

SEQ ID NO: 1807913 - DNA, 25 bp, Homo sapien
gatgacctgttttgcgtgctccctg

SEQ ID NO: 1807914 - DNA, 25 bp, Homo sapien
gaacagtctggaaaccgccagcgag

SEQ ID NO: 1807915 - DNA, 25 bp, Homo sapien
ggaagcatatcttcgactggctcga

SEQ ID NO: 1807916 - DNA, 25 bp, Homo sapien
ctatttttcaattgtcgtaaaagtg

SEQ ID NO: 1807917 - DNA, 25 bp, Homo sapien
tgaattggaaacttctatttttcaa

SEQ ID NO: 1807918 - DNA, 25 bp, Homo sapien
gcaaaattgaattggaaacttctat

SEQ ID NO: 1807919 - DNA, 25 bp, Homo sapien
ttttagttgcaaaattgaattggaa

SEQ ID NO: 1807920 - DNA, 25 bp, Homo sapien
acagaatttattcaccagagcaagc

SEQ ID NO: 1807921 - DNA, 25 bp, Homo sapien
ttccaaagtttaacatgaaggcacc

SEQ ID NO: 1807922 - DNA, 25 bp, Homo sapien
ctggctttttccaaagtttaacatg

SEQ ID NO: 1807923 - DNA, 25 bp, Homo sapien
caaagtttaacatgaaggcaccaca

SEQ ID NO: 1807924 - DNA, 25 bp, Homo sapien
gaagtcttggtgtacgctgcgaaca

SEQ ID NO: 1807925 - DNA, 25 bp, Homo sapien
catctaaggcaggttcctgctggct

SEQ ID NO: 1807926 - DNA, 25 bp, Homo sapien
tgtagctcggaggtccgcacaatcc

SEQ ID NO: 1807927 - DNA, 25 bp, Homo sapien
tctgttggttggagacggtgtagct

SEQ ID NO: 1807928 - DNA, 25 bp, Homo sapien
gggagaagttgtgttgtctcattcc

SEQ ID NO: 1807929 - DNA, 25 bp, Homo sapien
tattccaacaggatgaggacgtctc

SEQ ID NO: 1807930 - DNA, 25 bp, Homo sapien
aggagttctgcaggccgccaggtca

SEQ ID NO: 1807931 - DNA, 25 bp, Homo sapien
ccaggtcacggatacccacacaggg

SEQ ID NO: 1807932 - DNA, 25 bp, Homo sapien
ctggatattccaacaggatgaggac

SEQ ID NO: 1807933 - DNA, 25 bp, Homo sapien
gaacatcgttctctccatggttggg

SEQ ID NO: 1807934 - DNA, 25 bp, Homo sapien
tgccatctatgatcctgggagtacg

SEQ ID NO: 1807935 - DNA, 25 bp, Homo sapien
tcagatgctgagaagtacgagacac

SEQ ID NO: 1807936 - DNA, 25 bp, Homo sapien
aactgacccattagcgaaggctgcg

SEQ ID NO: 1807937 - DNA, 25 bp, Homo sapien
tgatccttttagaacctttgcacct

SEQ ID NO: 1807938 - DNA, 25 bp, Homo sapien
ccatccctagagttttcagcagaac

SEQ ID NO: 1807939 - DNA, 25 bp, Homo sapien
cagaatccatctagttccccgtatt

SEQ ID NO: 1807940 - DNA, 25 bp, Homo sapien
tttgcacctcactttgggctcagtt

SEQ ID NO: 1807941 - DNA, 25 bp, Homo sapien
gctgatacatgccacgacatcattg

SEQ ID NO: 1807942 - DNA, 25 bp, Homo sapien
agctgatacatgccacgacatcatt

SEQ ID NO: 1807943 - DNA, 25 bp, Homo sapien
tgatacatgccacgacatcattgac

SEQ ID NO: 1807944 - DNA, 25 bp, Homo sapien
ctgatacatgccacgacatcattga

SEQ ID NO: 1807945 - DNA, 25 bp, Homo sapien
cccaggtcagtggtgacttatcaca

SEQ ID NO: 1807946 - DNA, 25 bp, Homo sapien
agtagaagtggtggccactcaagga

SEQ ID NO: 1807947 - DNA, 25 bp, Homo sapien
cactcaaggaactgatgaaggaact

SEQ ID NO: 1807948 - DNA, 25 bp, Homo sapien
tctgatggatgagcatagctgagcc

SEQ ID NO: 1807949 - DNA, 25 bp, Homo sapien
ccatccctgtataggctctggtgtt

SEQ ID NO: 1807950 - DNA, 25 bp, Homo sapien
tccctgtataggctctggtgtttcc

SEQ ID NO: 1807951 - DNA, 25 bp, Homo sapien
tcaaccatccctgtataggctctgg

SEQ ID NO: 1807952 - DNA, 25 bp, Homo sapien
tcacaatcaaccatccctgtatagg

SEQ ID NO: 1807953 - DNA, 25 bp, Homo sapien
cccttaaggtaagtggtctggctat

SEQ ID NO: 1807954 - DNA, 25 bp, Homo sapien
tgtaagctatgagtcacccgtgctg

SEQ ID NO: 1807955 - DNA, 25 bp, Homo sapien
aaatgttcacggtggtgtgcagagc

SEQ ID NO: 1807956 - DNA, 25 bp, Homo sapien
cagtatcagcatcgagaaccaggag

SEQ ID NO: 1807957 - DNA, 25 bp, Homo sapien
tctctgttctccttggtaaggtgac

SEQ ID NO: 1807958 - DNA, 25 bp, Homo sapien
gtgacattggcggtcccatctccaa

SEQ ID NO: 1807959 - DNA, 25 bp, Homo sapien
tggaggtatcgctgccatggaggca

SEQ ID NO: 1807960 - DNA, 25 bp, Homo sapien
gatgctcaggaagcgaagctccttc

SEQ ID NO: 1807961 - DNA, 25 bp, Homo sapien
gccccagtcactcctgctgccacag

SEQ ID NO: 1807962 - DNA, 25 bp, Homo sapien
tctccagccccagtcactcctgctg

SEQ ID NO: 1807963 - DNA, 25 bp, Homo sapien
tcatttctctccagccccagtcact

SEQ ID NO: 1807964 - DNA, 25 bp, Homo sapien
catttctctccagccccagtcactc

SEQ ID NO: 1807965 - DNA, 25 bp, Homo sapien
aatccaaagttgatgattttccatg

SEQ ID NO: 1807966 - DNA, 25 bp, Homo sapien
ctgaatccaaagttgatgattttcc

SEQ ID NO: 1807967 - DNA, 25 bp, Homo sapien
caaagttgatgattttccatgacat

SEQ ID NO: 1807968 - DNA, 25 bp, Homo sapien
tccaaagttgatgattttccatgac

SEQ ID NO: 1807969 - DNA, 25 bp, Homo sapien
caggacaacacagcgttcagacggc

SEQ ID NO: 1807970 - DNA, 25 bp, Homo sapien
gcgttcagacggcactgaggaaaat

SEQ ID NO: 1807971 - DNA, 25 bp, Homo sapien
ttcagacggcactgaggaaaattcc

SEQ ID NO: 1807972 - DNA, 25 bp, Homo sapien
tcagacggcactgaggaaaattcct

SEQ ID NO: 1807973 - DNA, 25 bp, Homo sapien
acccgttccctctgggcacacgtag

SEQ ID NO: 1807974 - DNA, 25 bp, Homo sapien
tgtgctctggaaggacgcatcaggc

SEQ ID NO: 1807975 - DNA, 25 bp, Homo sapien
gcaggatgggcggtgaggcgcgcgc

SEQ ID NO: 1807976 - DNA, 25 bp, Homo sapien
tggagggaacccttgtcgtcgtaga

SEQ ID NO: 1807977 - DNA, 25 bp, Homo sapien
caaacacgtggccagtttctcctgg

SEQ ID NO: 1807978 - DNA, 25 bp, Homo sapien
tgcagatgcaaacacgtggccagtt

SEQ ID NO: 1807979 - DNA, 25 bp, Homo sapien
cgtggccagtttctcctggcctcca

SEQ ID NO: 1807980 - DNA, 25 bp, Homo sapien
aacacgtggccagtttctcctggcc

SEQ ID NO: 1807981 - DNA, 25 bp, Homo sapien
tcatgtggcagatgcaaaatgctgt

SEQ ID NO: 1807982 - DNA, 25 bp, Homo sapien
tgtggcagatgcaaaatgctgtagg

SEQ ID NO: 1807983 - DNA, 25 bp, Homo sapien
catgtggcagatgcaaaatgctgta

SEQ ID NO: 1807984 - DNA, 25 bp, Homo sapien
gtggcagatgcaaaatgctgtaggt

SEQ ID NO: 1807985 - DNA, 25 bp, Homo sapien
cagtgactttttgtcgtggcagcca

SEQ ID NO: 1807986 - DNA, 25 bp, Homo sapien
cactgacggtgaaaaaatgtttgcc

SEQ ID NO: 1807987 - DNA, 25 bp, Homo sapien
ccaggtcccgaaagatgcagtgact

SEQ ID NO: 1807988 - DNA, 25 bp, Homo sapien
catagcctcatggacacctgtgtcg

SEQ ID NO: 1807989 - DNA, 25 bp, Homo sapien
ttacatgaaacaggcgtgcgggagc

SEQ ID NO: 1807990 - DNA, 25 bp, Homo sapien
cggggcttgccccgccgctttgatg

SEQ ID NO: 1807991 - DNA, 25 bp, Homo sapien
atgaaacaggcgtgcgggagcccat

SEQ ID NO: 1807992 - DNA, 25 bp, Homo sapien
gctggggccccggatttacatgaaa

SEQ ID NO: 1807993 - DNA, 25 bp, Homo sapien
ctggcacactcgatgcgcgcgctga

SEQ ID NO: 1807994 - DNA, 25 bp, Homo sapien
acagcagaaaccacgcacacgcctg

SEQ ID NO: 1807995 - DNA, 25 bp, Homo sapien
ttccgtgaaagcaatgacacagcag

SEQ ID NO: 1807996 - DNA, 25 bp, Homo sapien
gcgcgcgctgacctcggcaacaagt

SEQ ID NO: 1807997 - DNA, 25 bp, Homo sapien
cacaggttccatatccgtggttggt

SEQ ID NO: 1807998 - DNA, 25 bp, Homo sapien
tctgccatctttgtaggtcctggaa

SEQ ID NO: 1807999 - DNA, 25 bp, Homo sapien
caaataccatgccaagggactaggg

SEQ ID NO: 1808000 - DNA, 25 bp, Homo sapien
aagagtcacgcgaggctgtcctcca

SEQ ID NO: 1808001 - DNA, 25 bp, Homo sapien
tctggtacttgatctgtagggagta

SEQ ID NO: 1808002 - DNA, 25 bp, Homo sapien
ctatcagtctggtacttgatctgta

SEQ ID NO: 1808003 - DNA, 25 bp, Homo sapien
cagtctggtacttgatctgtaggga

SEQ ID NO: 1808004 - DNA, 25 bp, Homo sapien
ttttactatcagtctggtacttgat

SEQ ID NO: 1808005 - DNA, 25 bp, Homo sapien
ctcataaatacgcagcgcacagcag

SEQ ID NO: 1808006 - DNA, 25 bp, Homo sapien
aaaactgggttctggagcggcctgc

SEQ ID NO: 1808007 - DNA, 25 bp, Homo sapien
caggaaaactgggttctggagcggc

SEQ ID NO: 1808008 - DNA, 25 bp, Homo sapien
tacgcagcgcacagcaggtgacttt

SEQ ID NO: 1808009 - DNA, 25 bp, Homo sapien
gtagcactggacttcataacctgag

SEQ ID NO: 1808010 - DNA, 25 bp, Homo sapien
gagcagcacaagtgaggccttgtcc

SEQ ID NO: 1808011 - DNA, 25 bp, Homo sapien
gaattgtgagtgtctggcgtttccc

SEQ ID NO: 1808012 - DNA, 25 bp, Homo sapien
gtgtctggcgtttccccactaggta

SEQ ID NO: 1808013 - DNA, 25 bp, Homo sapien
ctgtggccctttgggcacctcgcag

SEQ ID NO: 1808014 - DNA, 25 bp, Homo sapien
gctctgtggccctttgggcacctcg

SEQ ID NO: 1808015 - DNA, 25 bp, Homo sapien
cctcctcagagtcccggatggctct

SEQ ID NO: 1808016 - DNA, 25 bp, Homo sapien
agagtcccggatggctctgatgtca

SEQ ID NO: 1808017 - DNA, 25 bp, Homo sapien
ctgtcttgcctccacatgaagggga

SEQ ID NO: 1808018 - DNA, 25 bp, Homo sapien
cctccacatgaaggggaatcagccc

SEQ ID NO: 1808019 - DNA, 25 bp, Homo sapien
cacatgaaggggaatcagccccgac

SEQ ID NO: 1808020 - DNA, 25 bp, Homo sapien
tcttgcctccacatgaaggggaatc

SEQ ID NO: 1808021 - DNA, 25 bp, Homo sapien
gacatcttgatctccagcggcagga

SEQ ID NO: 1808022 - DNA, 25 bp, Homo sapien
cagcggcaggagctttaccttcttg

SEQ ID NO: 1808023 - DNA, 25 bp, Homo sapien
gcggcaggagctttaccttcttgac

SEQ ID NO: 1808024 - DNA, 25 bp, Homo sapien
ctatccgacatcttgatctccagcg

SEQ ID NO: 1808025 - DNA, 25 bp, Homo sapien
caaaattacgatgtgaacctcaact

SEQ ID NO: 1808026 - DNA, 25 bp, Homo sapien
cctggaggtatcatgcattccaaga

SEQ ID NO: 1808027 - DNA, 25 bp, Homo sapien
tacgattgatacatctagctgaagg

SEQ ID NO: 1808028 - DNA, 25 bp, Homo sapien
tatatctgtaaatcaccctcaaatg

SEQ ID NO: 1808029 - DNA, 25 bp, Homo sapien
gtttcaattttagtctaaatgttgc

SEQ ID NO: 1808030 - DNA, 25 bp, Homo sapien
ggccatgttaattttctctgcatgg

SEQ ID NO: 1808031 - DNA, 25 bp, Homo sapien
tcaattttagtctaaatgttgccaa

SEQ ID NO: 1808032 - DNA, 25 bp, Homo sapien
ttaattttctctgcatggtttcaat

SEQ ID NO: 1808033 - DNA, 25 bp, Homo sapien
tcagaatcatgagcataagataaat

SEQ ID NO: 1808034 - DNA, 25 bp, Homo sapien
gcataagataaattaaggctgttta

SEQ ID NO: 1808035 - DNA, 25 bp, Homo sapien
tcatgagcataagataaattaaggc

SEQ ID NO: 1808036 - DNA, 25 bp, Homo sapien
gataaattaaggctgtttaaagaca

SEQ ID NO: 1808037 - DNA, 25 bp, Homo sapien
ctacgcatttcctccaggagtcttc

SEQ ID NO: 1808038 - DNA, 25 bp, Homo sapien
tccctgtggaatccccgcctacgca

SEQ ID NO: 1808039 - DNA, 25 bp, Homo sapien
tggaatccccgcctacgcatttcct

SEQ ID NO: 1808040 - DNA, 25 bp, Homo sapien
ccgcctacgcatttcctccaggagt

SEQ ID NO: 1808041 - DNA, 25 bp, Homo sapien
agggttattccgacgcagcctgaag

SEQ ID NO: 1808042 - DNA, 25 bp, Homo sapien
gaaaacggtttgacctgtccaggca

SEQ ID NO: 1808043 - DNA, 25 bp, Homo sapien
caggagcacctcttatggacccagt

SEQ ID NO: 1808044 - DNA, 25 bp, Homo sapien
gacaccttgaggaggacttccgtgg

SEQ ID NO: 1808045 - DNA, 25 bp, Homo sapien
gctgtaaagtgaagctttgcgcttt

SEQ ID NO: 1808046 - DNA, 25 bp, Homo sapien
tctgggaggagattgctggtatttt

SEQ ID NO: 1808047 - DNA, 25 bp, Homo sapien
tgctgtaaagtgaagctttgcgctt

SEQ ID NO: 1808048 - DNA, 25 bp, Homo sapien
gattgctggtatttttgctgtaaag

SEQ ID NO: 1808049 - DNA, 25 bp, Homo sapien
ccggcttggctttcgtggactgtga

SEQ ID NO: 1808050 - DNA, 25 bp, Homo sapien
tgcggaagccaatgcccttgagatg

SEQ ID NO: 1808051 - DNA, 25 bp, Homo sapien
gagagaatgcccttgagctgcggaa

SEQ ID NO: 1808052 - DNA, 25 bp, Homo sapien
gagtggccacgtttcaccttccaga

SEQ ID NO: 1808053 - DNA, 25 bp, Homo sapien
ccgcggctgcgtgtttacttgtcat

SEQ ID NO: 1808054 - DNA, 25 bp, Homo sapien
agtcgcagggaaaggcgccgctgct

SEQ ID NO: 1808055 - DNA, 25 bp, Homo sapien
cgggcgtggcggccccgctgcgcgc

SEQ ID NO: 1808056 - DNA, 25 bp, Homo sapien
cgtggcggccccgctgcgcgctcat

SEQ ID NO: 1808057 - DNA, 25 bp, Homo sapien
tcgcagggaaaggcgccgctgctcc

SEQ ID NO: 1808058 - DNA, 25 bp, Homo sapien
ttagcgttaaagtgatctgtagtcc

SEQ ID NO: 1808059 - DNA, 25 bp, Homo sapien
tgggaaaacatccatgcttcactac

SEQ ID NO: 1808060 - DNA, 25 bp, Homo sapien
catgcttcactacaattccctttag

SEQ ID NO: 1808061 - DNA, 25 bp, Homo sapien
caattccctttagcgttaaagtgat

SEQ ID NO: 1808062 - DNA, 25 bp, Homo sapien
gcagaaatattgaagtgtaaagtca

SEQ ID NO: 1808063 - DNA, 25 bp, Homo sapien
aaatattgaagtgtaaagtcatggg

SEQ ID NO: 1808064 - DNA, 25 bp, Homo sapien
gaaatattgaagtgtaaagtcatgg

SEQ ID NO: 1808065 - DNA, 25 bp, Homo sapien
atattgaagtgtaaagtcatgggtc

SEQ ID NO: 1808066 - DNA, 25 bp, Homo sapien
caatttagtagatgaaacttaacat

SEQ ID NO: 1808067 - DNA, 25 bp, Homo sapien
gagcccaggagcctaggggttcatg

SEQ ID NO: 1808068 - DNA, 25 bp, Homo sapien
catatattttagtcctcaagtttta

SEQ ID NO: 1808069 - DNA, 25 bp, Homo sapien
gttacaatttagtagatgaaactta

SEQ ID NO: 1808070 - DNA, 25 bp, Homo sapien
aacaccttatttaatgctggaggaa

SEQ ID NO: 1808071 - DNA, 25 bp, Homo sapien
ccttatttaatgctggaggaatgta

SEQ ID NO: 1808072 - DNA, 25 bp, Homo sapien
taaggagtattagaaggtaatggat

SEQ ID NO: 1808073 - DNA, 25 bp, Homo sapien
tgctggaggaatgtaaggagtatta

SEQ ID NO: 1808074 - DNA, 25 bp, Homo sapien
cttgccggattttcatgtcattttc

SEQ ID NO: 1808075 - DNA, 25 bp, Homo sapien
gttctcttacattaaccttcttgtg

SEQ ID NO: 1808076 - DNA, 25 bp, Homo sapien
tctcttacattaaccttcttgtggc

SEQ ID NO: 1808077 - DNA, 25 bp, Homo sapien
aggttctcttacattaaccttcttg

SEQ ID NO: 1808078 - DNA, 25 bp, Homo sapien
tcttacattaaccttcttgtggcat

SEQ ID NO: 1808079 - DNA, 25 bp, Homo sapien
agcccccatccccttcgcagctgcc

SEQ ID NO: 1808080 - DNA, 25 bp, Homo sapien
cccccatccccttcgcagctgcccc

SEQ ID NO: 1808081 - DNA, 25 bp, Homo sapien
gcccccatccccttcgcagctgccc

SEQ ID NO: 1808082 - DNA, 25 bp, Homo sapien
ctcagtctgggccgtccctcctcca

SEQ ID NO: 1808083 - DNA, 25 bp, Homo sapien
cagcacagcatcaggctcagtctgg

SEQ ID NO: 1808084 - DNA, 25 bp, Homo sapien
gcatcaggctcagtctgggccgtcc

SEQ ID NO: 1808085 - DNA, 25 bp, Homo sapien
tgtctcctctcagcacagcatcagg

SEQ ID NO: 1808086 - DNA, 25 bp, Homo sapien
aaagctgtagcatgtccaggttcac

SEQ ID NO: 1808087 - DNA, 25 bp, Homo sapien
gccgggtgaggagcacaccttctgc

SEQ ID NO: 1808088 - DNA, 25 bp, Homo sapien
ccaggttcacagagacgctgggccg

SEQ ID NO: 1808089 - DNA, 25 bp, Homo sapien
ccagcacaaagctgtagcatgtcca

SEQ ID NO: 1808090 - DNA, 25 bp, Homo sapien
catccagagagaagggactatggac

SEQ ID NO: 1808091 - DNA, 25 bp, Homo sapien
tccagagagaagggactatggactc

SEQ ID NO: 1808092 - DNA, 25 bp, Homo sapien
atccagagagaagggactatggact

SEQ ID NO: 1808093 - DNA, 25 bp, Homo sapien
tggatgcctcccgtgccacggtcac

SEQ ID NO: 1808094 - DNA, 25 bp, Homo sapien
ccacggtcacctactgctgcactga

SEQ ID NO: 1808095 - DNA, 25 bp, Homo sapien
agacacagttcaggggggcagacac

SEQ ID NO: 1808096 - DNA, 25 bp, Homo sapien
gagccaaggggtagacacagttcag

SEQ ID NO: 1808097 - DNA, 25 bp, Homo sapien
agggaatttacaagacggtggcatt

SEQ ID NO: 1808098 - DNA, 25 bp, Homo sapien
gaatttacaagacggtggcattcca

SEQ ID NO: 1808099 - DNA, 25 bp, Homo sapien
tgcgctgccgtggaaacctccaggg

SEQ ID NO: 1808100 - DNA, 25 bp, Homo sapien
tggagctctggccttgcgctgccgt

SEQ ID NO: 1808101 - DNA, 25 bp, Homo sapien
tgacgcccactggtgtcacctctgc

SEQ ID NO: 1808102 - DNA, 25 bp, Homo sapien
ctgacgcccactggtgtcacctctg

SEQ ID NO: 1808103 - DNA, 25 bp, Homo sapien
gctgacgcccactggtgtcacctct

SEQ ID NO: 1808104 - DNA, 25 bp, Homo sapien
tggccatcgtctgtcaccgtcacat

SEQ ID NO: 1808105 - DNA, 25 bp, Homo sapien
gtgcctggcactcggtaagatggcc

SEQ ID NO: 1808106 - DNA, 25 bp, Homo sapien
cgtcacatctcgtcccttggtgcag

SEQ ID NO: 1808107 - DNA, 25 bp, Homo sapien
ggcactcggtaagatggccttggcc

SEQ ID NO: 1808108 - DNA, 25 bp, Homo sapien
caatgcttatgcaagtgacggtgct

SEQ ID NO: 1808109 - DNA, 25 bp, Homo sapien
taattaagatgcctagacttctgcc

SEQ ID NO: 1808110 - DNA, 25 bp, Homo sapien
tagagggaccgactttctgcagcct

SEQ ID NO: 1808111 - DNA, 25 bp, Homo sapien
gcaggagtggctcaacttggtctcg

SEQ ID NO: 1808112 - DNA, 25 bp, Homo sapien
tttccaggcacagaactgtgggcct

SEQ ID NO: 1808113 - DNA, 25 bp, Homo sapien
tgtcaagccgattaacagcctgagc

SEQ ID NO: 1808114 - DNA, 25 bp, Homo sapien
tcttaggacctcacctgtcaagccg

SEQ ID NO: 1808115 - DNA, 25 bp, Homo sapien
ggtagagatgacagggcccaaacct

SEQ ID NO: 1808116 - DNA, 25 bp, Homo sapien
ggtacatacactctgactgggctga

SEQ ID NO: 1808117 - DNA, 25 bp, Homo sapien
gtacatacactctgactgggctgaa

SEQ ID NO: 1808118 - DNA, 25 bp, Homo sapien
tacatacactctgactgggctgaat

SEQ ID NO: 1808119 - DNA, 25 bp, Homo sapien
gtggacatcactgaaaaattcacag

SEQ ID NO: 1808120 - DNA, 25 bp, Homo sapien
gctgaccgagtgataaacttaatct

SEQ ID NO: 1808121 - DNA, 25 bp, Homo sapien
tagggtgtcttaagttttgctccag

SEQ ID NO: 1808122 - DNA, 25 bp, Homo sapien
gtgtctcaatgagggtctgcactgg

SEQ ID NO: 1808123 - DNA, 25 bp, Homo sapien
ttaggcatcgtgactccggtcggtc

SEQ ID NO: 1808124 - DNA, 25 bp, Homo sapien
acttgagatactgggaatagggacc

SEQ ID NO: 1808125 - DNA, 25 bp, Homo sapien
aaagggcaggcgcatgatctacaac

SEQ ID NO: 1808126 - DNA, 25 bp, Homo sapien
tatcattagctaggcgattgcaggc

SEQ ID NO: 1808127 - DNA, 25 bp, Homo sapien
gtatagaggacagcccacccagctg

SEQ ID NO: 1808128 - DNA, 25 bp, Homo sapien
gggcgtatagaggacagcccaccca

SEQ ID NO: 1808129 - DNA, 25 bp, Homo sapien
agggagggtgacaaggagcagaggg

SEQ ID NO: 1808130 - DNA, 25 bp, Homo sapien
ccgcagggggcgtatagaggacagc

SEQ ID NO: 1808131 - DNA, 25 bp, Homo sapien
tcaggtgtggctgaaatccaggagt

SEQ ID NO: 1808132 - DNA, 25 bp, Homo sapien
ggtgtggctgaaatccaggagtggg

SEQ ID NO: 1808133 - DNA, 25 bp, Homo sapien
caggtgtggctgaaatccaggagtg

SEQ ID NO: 1808134 - DNA, 25 bp, Homo sapien
aggtgtggctgaaatccaggagtgg

SEQ ID NO: 1808135 - DNA, 25 bp, Homo sapien
taaaacactccaggaacaactgacg

SEQ ID NO: 1808136 - DNA, 25 bp, Homo sapien
taaaggtagacctgtgctgcaagat

SEQ ID NO: 1808137 - DNA, 25 bp, Homo sapien
cagaaacttgtggaaaagagcactt

SEQ ID NO: 1808138 - DNA, 25 bp, Homo sapien
ctgacgtgacagttgaagaccgttt

SEQ ID NO: 1808139 - DNA, 25 bp, Homo sapien
gatgctcagatttggttgatactca

SEQ ID NO: 1808140 - DNA, 25 bp, Homo sapien
ccagtatccaacacatttctagttc

SEQ ID NO: 1808141 - DNA, 25 bp, Homo sapien
cttcttgaacgctgacatgatgctc

SEQ ID NO: 1808142 - DNA, 25 bp, Homo sapien
tctagttcctatcatttcagatcag

SEQ ID NO: 1808143 - DNA, 25 bp, Homo sapien
aatatcactcaaggagcaaatggga

SEQ ID NO: 1808144 - DNA, 25 bp, Homo sapien
acagatctcagtgggattttacatg

SEQ ID NO: 1808145 - DNA, 25 bp, Homo sapien
acttgcacctctctatagaaccttg

SEQ ID NO: 1808146 - DNA, 25 bp, Homo sapien
gttatatgagattgatttacgtgtc

SEQ ID NO: 1808147 - DNA, 25 bp, Homo sapien
gctgctgcaggggtgcgctgtgagt

SEQ ID NO: 1808148 - DNA, 25 bp, Homo sapien
tgacagtgcccggtgtggtgaaggg

SEQ ID NO: 1808149 - DNA, 25 bp, Homo sapien
aatctgacagtgcccggtgtggtga

SEQ ID NO: 1808150 - DNA, 25 bp, Homo sapien
tgcccggtgtggtgaagggccctgg

SEQ ID NO: 1808151 - DNA, 25 bp, Homo sapien
cagtgcccggtgtggtgaagggccc

SEQ ID NO: 1808152 - DNA, 25 bp, Homo sapien
agctggtggctaaatgtgccataga

SEQ ID NO: 1808153 - DNA, 25 bp, Homo sapien
aaaatgccatagattctactgtcta

SEQ ID NO: 1808154 - DNA, 25 bp, Homo sapien
tctacagcatagaggtagtcagtga

SEQ ID NO: 1808155 - DNA, 25 bp, Homo sapien
acccagctggtggctaaatgtgcca

SEQ ID NO: 1808156 - DNA, 25 bp, Homo sapien
ccttctctgtgtgccaacttgacaa

SEQ ID NO: 1808157 - DNA, 25 bp, Homo sapien
taacaatatggctcccgtaacagta

SEQ ID NO: 1808158 - DNA, 25 bp, Homo sapien
ccattacattgtgggttctgtccac

SEQ ID NO: 1808159 - DNA, 25 bp, Homo sapien
cagtatctttaaaggtgccttccat

SEQ ID NO: 1808160 - DNA, 25 bp, Homo sapien
catatcagtgtatatcggctgtccc

SEQ ID NO: 1808161 - DNA, 25 bp, Homo sapien
tgcagtttcagtgttttgcctggcc

SEQ ID NO: 1808162 - DNA, 25 bp, Homo sapien
tcatattacccttaacaaccgtgga

SEQ ID NO: 1808163 - DNA, 25 bp, Homo sapien
gcatcatctgctacccagaccatgg

SEQ ID NO: 1808164 - DNA, 25 bp, Homo sapien
cacagctgtttaggctctttgggag

SEQ ID NO: 1808165 - DNA, 25 bp, Homo sapien
cacagtcggccctccagtgaggagc

SEQ ID NO: 1808166 - DNA, 25 bp, Homo sapien
cgctcagattggcttctcaggttct

SEQ ID NO: 1808167 - DNA, 25 bp, Homo sapien
aagctcagccctccagtgccgagat

SEQ ID NO: 1808168 - DNA, 25 bp, Homo sapien
acagcggcatacaggacaaacccaa

SEQ ID NO: 1808169 - DNA, 25 bp, Homo sapien
ccttcacagcggcatacaggacaaa

SEQ ID NO: 1808170 - DNA, 25 bp, Homo sapien
tactgttcaagatctcttaggcgat

SEQ ID NO: 1808171 - DNA, 25 bp, Homo sapien
cacagttgggcacctcgtctttgag

SEQ ID NO: 1808172 - DNA, 25 bp, Homo sapien
gttgtcagaggcacgaaggcatagc

SEQ ID NO: 1808173 - DNA, 25 bp, Homo sapien
cttgtccacagcgtcgtggttgtca

SEQ ID NO: 1808174 - DNA, 25 bp, Homo sapien
gaggcacgaaggcatagcccctttt

SEQ ID NO: 1808175 - DNA, 25 bp, Homo sapien
tccacagcgtcgtggttgtcagagg

SEQ ID NO: 1808176 - DNA, 25 bp, Homo sapien
tctgccagtgccatggctactgttg

SEQ ID NO: 1808177 - DNA, 25 bp, Homo sapien
aatttggcaaagtattgttctccac

SEQ ID NO: 1808178 - DNA, 25 bp, Homo sapien
aaatcattggagcttctgccacctc

SEQ ID NO: 1808179 - DNA, 25 bp, Homo sapien
gccacctccagaattgattccatca

SEQ ID NO: 1808180 - DNA, 25 bp, Homo sapien
ttcagtggtcgtgccccagtcgggt

SEQ ID NO: 1808181 - DNA, 25 bp, Homo sapien
cctcgctttaatcctgaggcaggtg

SEQ ID NO: 1808182 - DNA, 25 bp, Homo sapien
acgccaagtgcagggttcagtggtc

SEQ ID NO: 1808183 - DNA, 25 bp, Homo sapien
cagtcgggtctacactcaatggctg

SEQ ID NO: 1808184 - DNA, 25 bp, Homo sapien
tcatcacaagaaggcgcgacttgct

SEQ ID NO: 1808185 - DNA, 25 bp, Homo sapien
taaggacataaggataagacttctc

SEQ ID NO: 1808186 - DNA, 25 bp, Homo sapien
gagcattggaccgtttcatcacaag

SEQ ID NO: 1808187 - DNA, 25 bp, Homo sapien
acttgctttcctagggttcctgtgg

SEQ ID NO: 1808188 - DNA, 25 bp, Homo sapien
gatctgggcatgagggtttcgacac

SEQ ID NO: 1808189 - DNA, 25 bp, Homo sapien
cataaattgacatggatggtccgcc

SEQ ID NO: 1808190 - DNA, 25 bp, Homo sapien
taatgggaccacttcggcctcttgg

SEQ ID NO: 1808191 - DNA, 25 bp, Homo sapien
tactgctcatcaacaaggcacctgg

SEQ ID NO: 1808192 - DNA, 25 bp, Homo sapien
cagctggccacgtacttaaaatttt

SEQ ID NO: 1808193 - DNA, 25 bp, Homo sapien
tcttgaagggacagcattgccagct

SEQ ID NO: 1808194 - DNA, 25 bp, Homo sapien
tgtaaccactagcacttaagtactc

SEQ ID NO: 1808195 - DNA, 25 bp, Homo sapien
tgaccacaagacaaccaacagctgg

SEQ ID NO: 1808196 - DNA, 25 bp, Homo sapien
caagataactaattagccagcccag

SEQ ID NO: 1808197 - DNA, 25 bp, Homo sapien
gattctttaaaccaactgtgcctaa

SEQ ID NO: 1808198 - DNA, 25 bp, Homo sapien
gagagccactagtcacctcgtctaa

SEQ ID NO: 1808199 - DNA, 25 bp, Homo sapien
aaagccttgctgtccaatttgagag

SEQ ID NO: 1808200 - DNA, 25 bp, Homo sapien
gctgctccctactcctgtttttaga

SEQ ID NO: 1808201 - DNA, 25 bp, Homo sapien
gggagcctagacacgagctctgtga

SEQ ID NO: 1808202 - DNA, 25 bp, Homo sapien
ggtaacaggcttagcatcctttgca

SEQ ID NO: 1808203 - DNA, 25 bp, Homo sapien
tatgagagcctttctagccgccatg

SEQ ID NO: 1808204 - DNA, 25 bp, Homo sapien
tctggagagccttaatacaggtaac

SEQ ID NO: 1808205 - DNA, 25 bp, Homo sapien
ctaatataattggagatttcacccc

SEQ ID NO: 1808206 - DNA, 25 bp, Homo sapien
ccatcataaatagacccggcaggta

SEQ ID NO: 1808207 - DNA, 25 bp, Homo sapien
cggcaggtagaaaatcagtacggac

SEQ ID NO: 1808208 - DNA, 25 bp, Homo sapien
taaataggtagagataggtgtacca

SEQ ID NO: 1808209 - DNA, 25 bp, Homo sapien
taatcaagaaaaggcgttggtagct

SEQ ID NO: 1808210 - DNA, 25 bp, Homo sapien
tatcagtagactaaaagtaccaatt

SEQ ID NO: 1808211 - DNA, 25 bp, Homo sapien
gatggagcatacttcagagcaagga

SEQ ID NO: 1808212 - DNA, 25 bp, Homo sapien
tgggcctggtgtgaaaaaacagctg

SEQ ID NO: 1808213 - DNA, 25 bp, Homo sapien
taatattgcatgtttaatccccagg

SEQ ID NO: 1808214 - DNA, 25 bp, Homo sapien
gcattactgggataacggaacactt

SEQ ID NO: 1808215 - DNA, 25 bp, Homo sapien
gaacttcctgggtctctattccaat

SEQ ID NO: 1808216 - DNA, 25 bp, Homo sapien
ctaaatgggtttccaagagccaggc

SEQ ID NO: 1808217 - DNA, 25 bp, Homo sapien
gaattcatgctaggtctgccaaaca

SEQ ID NO: 1808218 - DNA, 25 bp, Homo sapien
tcttggcagcagtgggaattcatgc

SEQ ID NO: 1808219 - DNA, 25 bp, Homo sapien
tgcattactcggaacagtgttgcct

SEQ ID NO: 1808220 - DNA, 25 bp, Homo sapien
gagggtatgctctcaatccttgctg

SEQ ID NO: 1808221 - DNA, 25 bp, Homo sapien
tacagctaaggataacattgtgtgg

SEQ ID NO: 1808222 - DNA, 25 bp, Homo sapien
aatgtgaacaaggtagcagtctgag

SEQ ID NO: 1808223 - DNA, 25 bp, Homo sapien
tactgagccttcctaataggtacag

SEQ ID NO: 1808224 - DNA, 25 bp, Homo sapien
ttttcaacacgtaagcagtcacgct

SEQ ID NO: 1808225 - DNA, 25 bp, Homo sapien
tatatactcctaggcgagggtcgcg

SEQ ID NO: 1808226 - DNA, 25 bp, Homo sapien
tcttttcaatatgcacccgcggtgg

SEQ ID NO: 1808227 - DNA, 25 bp, Homo sapien
tttgtgatccgaaagtcgtgctgcg

SEQ ID NO: 1808228 - DNA, 25 bp, Homo sapien
ccgcacccggctaccagaggaattt

SEQ ID NO: 1808229 - DNA, 25 bp, Homo sapien
tctggcccagggacgaaaactgaag

SEQ ID NO: 1808230 - DNA, 25 bp, Homo sapien
taatacgtttattatcccagggcac

SEQ ID NO: 1808231 - DNA, 25 bp, Homo sapien
tgcaaatggctctacagatcaggaa

SEQ ID NO: 1808232 - DNA, 25 bp, Homo sapien
taatcagtttagagacaatcagcag

SEQ ID NO: 1808233 - DNA, 25 bp, Homo sapien
gcatccttccatgcatgggtccata

SEQ ID NO: 1808234 - DNA, 25 bp, Homo sapien
gaaagcaggtccctgttaacagcca

SEQ ID NO: 1808235 - DNA, 25 bp, Homo sapien
tctatgctgtaggaaacacccctgc

SEQ ID NO: 1808236 - DNA, 25 bp, Homo sapien
gatcatacatgagcagaccacacaa

SEQ ID NO: 1808237 - DNA, 25 bp, Homo sapien
taatcctgaggtcacacaatctgtc

SEQ ID NO: 1808238 - DNA, 25 bp, Homo sapien
gaatacctgtttccatagtgcccac

SEQ ID NO: 1808239 - DNA, 25 bp, Homo sapien
ggctagaacgacttccaccatgatg

SEQ ID NO: 1808240 - DNA, 25 bp, Homo sapien
gaaagcatccgtgagaaagcggcca

SEQ ID NO: 1808241 - DNA, 25 bp, Homo sapien
cacggactcgcagtgaggattcaga

SEQ ID NO: 1808242 - DNA, 25 bp, Homo sapien
gattcagacaggaccgaaagcagca

SEQ ID NO: 1808243 - DNA, 25 bp, Homo sapien
agaaagctaggtgtagagaggccca

SEQ ID NO: 1808244 - DNA, 25 bp, Homo sapien
tcagggctgtaaacgtggcaggtca

SEQ ID NO: 1808245 - DNA, 25 bp, Homo sapien
gtctttaagcccgtcactagctggg

SEQ ID NO: 1808246 - DNA, 25 bp, Homo sapien
gatgagcccctagtgcagcgttaga

SEQ ID NO: 1808247 - DNA, 25 bp, Homo sapien
gcattaggcgattgaacacacagcg

SEQ ID NO: 1808248 - DNA, 25 bp, Homo sapien
gcacgcccatcctgcaagtgaggga

SEQ ID NO: 1808249 - DNA, 25 bp, Homo sapien
tcccatgggcgtcatctagaagagt

SEQ ID NO: 1808250 - DNA, 25 bp, Homo sapien
acagtgtgcgtaagggtgatgcccc

SEQ ID NO: 1808251 - DNA, 25 bp, Homo sapien
tcgggtccgagaggcagcatttcat

SEQ ID NO: 1808252 - DNA, 25 bp, Homo sapien
taacatgtcagcttcgccgcaatgg

SEQ ID NO: 1808253 - DNA, 25 bp, Homo sapien
tgggaagtgcatgttgccgtccata

SEQ ID NO: 1808254 - DNA, 25 bp, Homo sapien
catgttgccgtccatattgcaggcg

SEQ ID NO: 1808255 - DNA, 25 bp, Homo sapien
gtccatgttcgccatctgtaccctg

SEQ ID NO: 1808256 - DNA, 25 bp, Homo sapien
tattgcaggcgtccatgttcgccat

SEQ ID NO: 1808257 - DNA, 25 bp, Homo sapien
gaactgcactagaaaattccaaatg

SEQ ID NO: 1808258 - DNA, 25 bp, Homo sapien
gaactgcatcagttgcttcagtgat

SEQ ID NO: 1808259 - DNA, 25 bp, Homo sapien
agcaccaagaactgcactagaaaat

SEQ ID NO: 1808260 - DNA, 25 bp, Homo sapien
ctgcatcagttgcttcagtgatggc

SEQ ID NO: 1808261 - DNA, 25 bp, Homo sapien
gcctctagcgggcttctaaatctgc

SEQ ID NO: 1808262 - DNA, 25 bp, Homo sapien
cagcctctagcgggcttctaaatct

SEQ ID NO: 1808263 - DNA, 25 bp, Homo sapien
agcctctagcgggcttctaaatctg

SEQ ID NO: 1808264 - DNA, 25 bp, Homo sapien
gccacctgaccattgagtctgtggg

SEQ ID NO: 1808265 - DNA, 25 bp, Homo sapien
tatgtcgatttaggttttgggcgtc

SEQ ID NO: 1808266 - DNA, 25 bp, Homo sapien
taatttgggttgaggcacagctcag

SEQ ID NO: 1808267 - DNA, 25 bp, Homo sapien
ggcgtcttccctgcgggctgttctt

SEQ ID NO: 1808268 - DNA, 25 bp, Homo sapien
tttgcgctgttcctcggtctggctc

SEQ ID NO: 1808269 - DNA, 25 bp, Homo sapien
cttttgcgctgttcctcggtctggc

SEQ ID NO: 1808270 - DNA, 25 bp, Homo sapien
tgcgctgttcctcggtctggctcgg

SEQ ID NO: 1808271 - DNA, 25 bp, Homo sapien
tcggccgccttctcagtctgtcccg

SEQ ID NO: 1808272 - DNA, 25 bp, Homo sapien
tctccagaataaacttcgtccactc

SEQ ID NO: 1808273 - DNA, 25 bp, Homo sapien
agagacacagacgtggcggtgtctc

SEQ ID NO: 1808274 - DNA, 25 bp, Homo sapien
acagacgtggcggtgtctccactac

SEQ ID NO: 1808275 - DNA, 25 bp, Homo sapien
tggcggtgtctccactaccccggaa

SEQ ID NO: 1808276 - DNA, 25 bp, Homo sapien
ccgctggcggcgagcccaggagact

SEQ ID NO: 1808277 - DNA, 25 bp, Homo sapien
cgctggcggcgagcccaggagactg

SEQ ID NO: 1808278 - DNA, 25 bp, Homo sapien
cccaccgctggcggcgagcccagga

SEQ ID NO: 1808279 - DNA, 25 bp, Homo sapien
caccgctggcggcgagcccaggaga

SEQ ID NO: 1808280 - DNA, 25 bp, Homo sapien
aacggtaaggatttgacacatgcga

SEQ ID NO: 1808281 - DNA, 25 bp, Homo sapien
gggccgaggctgtaactgccaatta

SEQ ID NO: 1808282 - DNA, 25 bp, Homo sapien
tctgggcactcttgatcgaatgatg

SEQ ID NO: 1808283 - DNA, 25 bp, Homo sapien
ggtgacaagcttggagtgaagacac

SEQ ID NO: 1808284 - DNA, 25 bp, Homo sapien
tagctgatagctcggtcacactgtc

SEQ ID NO: 1808285 - DNA, 25 bp, Homo sapien
ggacctcggcaccactgaagagtgt

SEQ ID NO: 1808286 - DNA, 25 bp, Homo sapien
cagctgttccctagcgtggatggca

SEQ ID NO: 1808287 - DNA, 25 bp, Homo sapien
tgtggagtcccgagtgctagctgat

SEQ ID NO: 1808288 - DNA, 25 bp, Homo sapien
tcctaggcgtagtgtctcctgaaat

SEQ ID NO: 1808289 - DNA, 25 bp, Homo sapien
aatgtcctcctgtgatgtcgctgcc

SEQ ID NO: 1808290 - DNA, 25 bp, Homo sapien
ctgcagtagctcctaggcgtagtgt

SEQ ID NO: 1808291 - DNA, 25 bp, Homo sapien
cacatggcagttgtccacgaagatg

SEQ ID NO: 1808292 - DNA, 25 bp, Homo sapien
tgtaatgtagggtttatggaagtca

SEQ ID NO: 1808293 - DNA, 25 bp, Homo sapien
tcactgtgtccgagggaaaatccct

SEQ ID NO: 1808294 - DNA, 25 bp, Homo sapien
taatgtagggtttatggaagtcact

SEQ ID NO: 1808295 - DNA, 25 bp, Homo sapien
ttatggaagtcactgtgtccgaggg

SEQ ID NO: 1808296 - DNA, 25 bp, Homo sapien
gaaatgggagtaaacatcacttgga

SEQ ID NO: 1808297 - DNA, 25 bp, Homo sapien
catctgagatgctgcaagggagccg

SEQ ID NO: 1808298 - DNA, 25 bp, Homo sapien
gaacagcgctaacctcacgtgacgc

SEQ ID NO: 1808299 - DNA, 25 bp, Homo sapien
acatcacttggaaagcggccagggc

SEQ ID NO: 1808300 - DNA, 25 bp, Homo sapien
gttcttctacagaaagagacacata

SEQ ID NO: 1808301 - DNA, 25 bp, Homo sapien
cacccagaaggttcttctacagaaa

SEQ ID NO: 1808302 - DNA, 25 bp, Homo sapien
aaccacccagaaggttcttctacag

SEQ ID NO: 1808303 - DNA, 25 bp, Homo sapien
ttcttctacagaaagagacacatac

SEQ ID NO: 1808304 - DNA, 25 bp, Homo sapien
gaatcggcaccaagtcagtacaggg

SEQ ID NO: 1808305 - DNA, 25 bp, Homo sapien
aagacgctttgcaaggaatcggcac

SEQ ID NO: 1808306 - DNA, 25 bp, Homo sapien
tgtaagtttcagtgctggccagcag

SEQ ID NO: 1808307 - DNA, 25 bp, Homo sapien
gaatcttgtgatcctcagcgcaatg

SEQ ID NO: 1808308 - DNA, 25 bp, Homo sapien
ccatgtttctccataccggggtgct

SEQ ID NO: 1808309 - DNA, 25 bp, Homo sapien
tctctttgaggaggcggtgactgcc

SEQ ID NO: 1808310 - DNA, 25 bp, Homo sapien
ggagctatggcaggaagctcctggg

SEQ ID NO: 1808311 - DNA, 25 bp, Homo sapien
gagaccacgtagttgctgttacacc

SEQ ID NO: 1808312 - DNA, 25 bp, Homo sapien
ccagcgctgaaaatagttctccgta

SEQ ID NO: 1808313 - DNA, 25 bp, Homo sapien
tcttggcaaaaggtgccctctcgtg

SEQ ID NO: 1808314 - DNA, 25 bp, Homo sapien
ctcgatttggcaggtctggactcca

SEQ ID NO: 1808315 - DNA, 25 bp, Homo sapien
tagttctccgtacacttctgagcgc

SEQ ID NO: 1808316 - DNA, 25 bp, Homo sapien
aaatagatcttacttgcgaaatgcg

SEQ ID NO: 1808317 - DNA, 25 bp, Homo sapien
gacattatggttacaaccagcggcc

SEQ ID NO: 1808318 - DNA, 25 bp, Homo sapien
gcggcctccttacggttactactga

SEQ ID NO: 1808319 - DNA, 25 bp, Homo sapien
cgaaatgcgatggttgctgggaata

SEQ ID NO: 1808320 - DNA, 25 bp, Homo sapien
catgggctggttctcagcatctgtg

SEQ ID NO: 1808321 - DNA, 25 bp, Homo sapien
gaacaccatgggctggttctcagca

SEQ ID NO: 1808322 - DNA, 25 bp, Homo sapien
ttttcgtgggtgaacaccatgggct

SEQ ID NO: 1808323 - DNA, 25 bp, Homo sapien
ttggtctcgttttcgtgggtgaaca

SEQ ID NO: 1808324 - DNA, 25 bp, Homo sapien
cgtggactccggaaatctgtttcta

SEQ ID NO: 1808325 - DNA, 25 bp, Homo sapien
tcttctcgatgatgccgtcacccat

SEQ ID NO: 1808326 - DNA, 25 bp, Homo sapien
ctcttctcgatgatgccgtcaccca

SEQ ID NO: 1808327 - DNA, 25 bp, Homo sapien
cagcccgtggactccggaaatctgt

SEQ ID NO: 1808328 - DNA, 25 bp, Homo sapien
cagaaggtgactggtcggtagctgc

SEQ ID NO: 1808329 - DNA, 25 bp, Homo sapien
gaaggtgactggtcggtagctgccc

SEQ ID NO: 1808330 - DNA, 25 bp, Homo sapien
aaggtgactggtcggtagctgcccc

SEQ ID NO: 1808331 - DNA, 25 bp, Homo sapien
gtgactggtcggtagctgcccccat

SEQ ID NO: 1808332 - DNA, 25 bp, Homo sapien
tggaacgggagggcctgaggggcca

SEQ ID NO: 1808333 - DNA, 25 bp, Homo sapien
aagagtgccacgtggtcgcagtgaa

SEQ ID NO: 1808334 - DNA, 25 bp, Homo sapien
gggatattcccagtgaagagtgcca

SEQ ID NO: 1808335 - DNA, 25 bp, Homo sapien
tctaggagaggcaagagggatattc

SEQ ID NO: 1808336 - DNA, 25 bp, Homo sapien
tggttgcaggttgcatcatctcccg

SEQ ID NO: 1808337 - DNA, 25 bp, Homo sapien
ggagctgtccgcaactgtaccgtca

SEQ ID NO: 1808338 - DNA, 25 bp, Homo sapien
cggagctgtccgcaactgtaccgtc

SEQ ID NO: 1808339 - DNA, 25 bp, Homo sapien
gagctgtccgcaactgtaccgtcat

SEQ ID NO: 1808340 - DNA, 25 bp, Homo sapien
tggacccatgaaccttctgggctca

SEQ ID NO: 1808341 - DNA, 25 bp, Homo sapien
ctcttgggtgttaggggccttggcg

SEQ ID NO: 1808342 - DNA, 25 bp, Homo sapien
ctggacccatgaaccttctgggctc

SEQ ID NO: 1808343 - DNA, 25 bp, Homo sapien
ttgggtgttaggggccttggcgcac

SEQ ID NO: 1808344 - DNA, 25 bp, Homo sapien
aagccacgagagaaccacataacag

SEQ ID NO: 1808345 - DNA, 25 bp, Homo sapien
ccgtcgcgtaagtcaaattactcag

SEQ ID NO: 1808346 - DNA, 25 bp, Homo sapien
gtcattaaaaccgtcgcgtaagtca

SEQ ID NO: 1808347 - DNA, 25 bp, Homo sapien
taagtcaaattactcagaagccacg

SEQ ID NO: 1808348 - DNA, 25 bp, Homo sapien
aatctgatggcgtcaatcggagtcc

SEQ ID NO: 1808349 - DNA, 25 bp, Homo sapien
aatctgatggcatcgatgggagccc

SEQ ID NO: 1808350 - DNA, 25 bp, Homo sapien
cgcagcgtccagtgtgtctctcagg

SEQ ID NO: 1808351 - DNA, 25 bp, Homo sapien
tcagggttgtaagcgtctagacctc

SEQ ID NO: 1808352 - DNA, 25 bp, Homo sapien
gacatgggttctgtaaccattgaga

SEQ ID NO: 1808353 - DNA, 25 bp, Homo sapien
gctgccatgatattagacacagaca

SEQ ID NO: 1808354 - DNA, 25 bp, Homo sapien
ttttctttgtcccagctgccatgat

SEQ ID NO: 1808355 - DNA, 25 bp, Homo sapien
atgggttctgtaaccattgagagac

SEQ ID NO: 1808356 - DNA, 25 bp, Homo sapien
ctccgtagtaattgggcggtccgtg

SEQ ID NO: 1808357 - DNA, 25 bp, Homo sapien
aaacgttatcgctgggactccgtag

SEQ ID NO: 1808358 - DNA, 25 bp, Homo sapien
caaacggctccaaacgttatcgctg

SEQ ID NO: 1808359 - DNA, 25 bp, Homo sapien
cgctgggactccgtagtaattgggc

SEQ ID NO: 1808360 - DNA, 25 bp, Homo sapien
tgagcatgaagaagttcgccgtgcg

SEQ ID NO: 1808361 - DNA, 25 bp, Homo sapien
tcttctctgtgtacctgcgcaggaa

SEQ ID NO: 1808362 - DNA, 25 bp, Homo sapien
aggaagtcgcgctccaagagctcca

SEQ ID NO: 1808363 - DNA, 25 bp, Homo sapien
agcctgagccggctcgaggtaatgc

SEQ ID NO: 1808364 - DNA, 25 bp, Homo sapien
ctccctcgtactggctggacactgt

SEQ ID NO: 1808365 - DNA, 25 bp, Homo sapien
ctgatactccggaaaagcacgactt

SEQ ID NO: 1808366 - DNA, 25 bp, Homo sapien
gatgggcagagccttcgaatgctga

SEQ ID NO: 1808367 - DNA, 25 bp, Homo sapien
tcctgctttcgcagatggccagcac

SEQ ID NO: 1808368 - DNA, 25 bp, Homo sapien
cacagcttgaaacccaatgtggttt

SEQ ID NO: 1808369 - DNA, 25 bp, Homo sapien
ttccacagcttgaaacccaatgtgg

SEQ ID NO: 1808370 - DNA, 25 bp, Homo sapien
gggaggaagccaaccatgatggttt

SEQ ID NO: 1808371 - DNA, 25 bp, Homo sapien
tgcaggtgaagcccaccttctgtga

SEQ ID NO: 1808372 - DNA, 25 bp, Homo sapien
ctagcccgtgatgatcttgtgagag

SEQ ID NO: 1808373 - DNA, 25 bp, Homo sapien
agcccgtgatgatcttgtgagaggg

SEQ ID NO: 1808374 - DNA, 25 bp, Homo sapien
ccgtgatgatcttgtgagagggcac

SEQ ID NO: 1808375 - DNA, 25 bp, Homo sapien
cccgtgatgatcttgtgagagggca

SEQ ID NO: 1808376 - DNA, 25 bp, Homo sapien
gccactgcgtgaatgatgtcacgga

SEQ ID NO: 1808377 - DNA, 25 bp, Homo sapien
cagtgagcaaactagaggaacccag

SEQ ID NO: 1808378 - DNA, 25 bp, Homo sapien
tgtcacggagacaccacagttcatc

SEQ ID NO: 1808379 - DNA, 25 bp, Homo sapien
gagtgatctcggtgtggcttcctgg

SEQ ID NO: 1808380 - DNA, 25 bp, Homo sapien
tcccagccgccgcttctgttctgca

SEQ ID NO: 1808381 - DNA, 25 bp, Homo sapien
agccagggtgtcagaagctggtcca

SEQ ID NO: 1808382 - DNA, 25 bp, Homo sapien
cccagccgccgcttctgttctgcag

SEQ ID NO: 1808383 - DNA, 25 bp, Homo sapien
ctctcccagccgccgcttctgttct

SEQ ID NO: 1808384 - DNA, 25 bp, Homo sapien
tggctctgaactggggtaggaggtc

SEQ ID NO: 1808385 - DNA, 25 bp, Homo sapien
ctggaggacatccacggaggctttg

SEQ ID NO: 1808386 - DNA, 25 bp, Homo sapien
gcctggaggacatccacggaggctt

SEQ ID NO: 1808387 - DNA, 25 bp, Homo sapien
gacctgtggctctgaactggggtag

SEQ ID NO: 1808388 - DNA, 25 bp, Homo sapien
aatgctttggtaacatattgactag

SEQ ID NO: 1808389 - DNA, 25 bp, Homo sapien
cagtggagagggataatgctttggt

SEQ ID NO: 1808390 - DNA, 25 bp, Homo sapien
tgattgaagggcagagcagtggaga

SEQ ID NO: 1808391 - DNA, 25 bp, Homo sapien
acattttgtggtacagatgattgaa

SEQ ID NO: 1808392 - DNA, 25 bp, Homo sapien
tttggacttaaaagatggatagatg

SEQ ID NO: 1808393 - DNA, 25 bp, Homo sapien
agtttggacttaaaagatggataga

SEQ ID NO: 1808394 - DNA, 25 bp, Homo sapien
taagtttggacttaaaagatggata

SEQ ID NO: 1808395 - DNA, 25 bp, Homo sapien
tggacttaaaagatggatagatgat

SEQ ID NO: 1808396 - DNA, 25 bp, Homo sapien
aagaggacagtgaacacggacccct

SEQ ID NO: 1808397 - DNA, 25 bp, Homo sapien
gacccggaagtgatggccgtgaaaa

SEQ ID NO: 1808398 - DNA, 25 bp, Homo sapien
tgcaaaaatatggatgccgctggct

SEQ ID NO: 1808399 - DNA, 25 bp, Homo sapien
catcatcatttcctgacccggaagt

SEQ ID NO: 1808400 - DNA, 25 bp, Homo sapien
acagatggctccagaagtaaaaaat

SEQ ID NO: 1808401 - DNA, 25 bp, Homo sapien
tgttgtatacgtgcctgtgagccac

SEQ ID NO: 1808402 - DNA, 25 bp, Homo sapien
aatagcttacacgtggattcctcag

SEQ ID NO: 1808403 - DNA, 25 bp, Homo sapien
tcactgccaaaggatgtcactaaca

SEQ ID NO: 1808404 - DNA, 25 bp, Homo sapien
gatcgaagcatcctgtgtaagggct

SEQ ID NO: 1808405 - DNA, 25 bp, Homo sapien
catggttgcgccatcgagaagacaa

SEQ ID NO: 1808406 - DNA, 25 bp, Homo sapien
agttccccgaagagaataaggtgca

SEQ ID NO: 1808407 - DNA, 25 bp, Homo sapien
actcctcatgggaaacatcgcaagg

SEQ ID NO: 1808408 - DNA, 25 bp, Homo sapien
ccaaggacagttaatttaagattct

SEQ ID NO: 1808409 - DNA, 25 bp, Homo sapien
ccaatatgatggaagaatagttcac

SEQ ID NO: 1808410 - DNA, 25 bp, Homo sapien
gaatacagtgtgctatcacatctgg

SEQ ID NO: 1808411 - DNA, 25 bp, Homo sapien
gctgagaatctttcgccctgaagta

SEQ ID NO: 1808412 - DNA, 25 bp, Homo sapien
gagttctgctcagtatcacagtgag

SEQ ID NO: 1808413 - DNA, 25 bp, Homo sapien
ggttccgtgtcgttagtttcaggca

SEQ ID NO: 1808414 - DNA, 25 bp, Homo sapien
ggcaatgaggacgtattcctctttt

SEQ ID NO: 1808415 - DNA, 25 bp, Homo sapien
gtttcaggcaatgaggacgtattcc

SEQ ID NO: 1808416 - DNA, 25 bp, Homo sapien
tcgttagtttcaggcaatgaggacg

SEQ ID NO: 1808417 - DNA, 25 bp, Homo sapien
ctgggttgcgtgtcctgctgttgct

SEQ ID NO: 1808418 - DNA, 25 bp, Homo sapien
aaagatatcgacctcttgtccttgg

SEQ ID NO: 1808419 - DNA, 25 bp, Homo sapien
acggtttagcgtggtccccatcaga

SEQ ID NO: 1808420 - DNA, 25 bp, Homo sapien
aacggacaccacaggcctctaacat

SEQ ID NO: 1808421 - DNA, 25 bp, Homo sapien
ctttgcaggtacgactgtgccacga

SEQ ID NO: 1808422 - DNA, 25 bp, Homo sapien
agctgattaacagcgtggaaactgg

SEQ ID NO: 1808423 - DNA, 25 bp, Homo sapien
gcagctgattaacagcgtggaaact

SEQ ID NO: 1808424 - DNA, 25 bp, Homo sapien
caggtacgactgtgccacgaacatc

SEQ ID NO: 1808425 - DNA, 25 bp, Homo sapien
ttgagcgtgaatatgtagacgttgg

SEQ ID NO: 1808426 - DNA, 25 bp, Homo sapien
cagtgttcgcagcagagtgtggtaa

SEQ ID NO: 1808427 - DNA, 25 bp, Homo sapien
gaaggaagtttaaatctggttgagc

SEQ ID NO: 1808428 - DNA, 25 bp, Homo sapien
tagacgttgggagcagtgttcgcag

SEQ ID NO: 1808429 - DNA, 25 bp, Homo sapien
ggtgctgggaagtggccggaaataa

SEQ ID NO: 1808430 - DNA, 25 bp, Homo sapien
tggagtaagaatgggtgctgggaag

SEQ ID NO: 1808431 - DNA, 25 bp, Homo sapien
ctggagtaagaatgggtgctgggaa

SEQ ID NO: 1808432 - DNA, 25 bp, Homo sapien
ctgggaagtggccggaaataaggtg

SEQ ID NO: 1808433 - DNA, 25 bp, Homo sapien
gagatgttctgagccaggataagcg

SEQ ID NO: 1808434 - DNA, 25 bp, Homo sapien
caggataagcgtggaagagcctcgt

SEQ ID NO: 1808435 - DNA, 25 bp, Homo sapien
gaaggcaaccttctgcggtcagtgg

SEQ ID NO: 1808436 - DNA, 25 bp, Homo sapien
accttctgcggtcagtgggcttgca

SEQ ID NO: 1808437 - DNA, 25 bp, Homo sapien
tattttgcatggaagtaaaatacaa

SEQ ID NO: 1808438 - DNA, 25 bp, Homo sapien
attttgcatggaagtaaaatacaac

SEQ ID NO: 1808439 - DNA, 25 bp, Homo sapien
ctgtaactctgagggtgacgcagaa

SEQ ID NO: 1808440 - DNA, 25 bp, Homo sapien
actctgagggtgacgcagaacagca

SEQ ID NO: 1808441 - DNA, 25 bp, Homo sapien
gaactgtaagtagacgtaaacgatc

SEQ ID NO: 1808442 - DNA, 25 bp, Homo sapien
acagcaaacattgagaactgtaagt

SEQ ID NO: 1808443 - DNA, 25 bp, Homo sapien
tgtcgagactcacagaaggagccga

SEQ ID NO: 1808444 - DNA, 25 bp, Homo sapien
cgatcaagggatctcggcaggagct

SEQ ID NO: 1808445 - DNA, 25 bp, Homo sapien
cattccttgggtaaattgcctgtag

SEQ ID NO: 1808446 - DNA, 25 bp, Homo sapien
taagctgtctgtcatctctgcggga

SEQ ID NO: 1808447 - DNA, 25 bp, Homo sapien
gatagggtccaagatgaactcctgc

SEQ ID NO: 1808448 - DNA, 25 bp, Homo sapien
tacaagagcgtgtctgggatagggt

SEQ ID NO: 1808449 - DNA, 25 bp, Homo sapien
tgaactcctgcacggtagccccttg

SEQ ID NO: 1808450 - DNA, 25 bp, Homo sapien
tgggatagggtccaagatgaactcc

SEQ ID NO: 1808451 - DNA, 25 bp, Homo sapien
gaaagtagcctatatccctgatgaa

SEQ ID NO: 1808452 - DNA, 25 bp, Homo sapien
cagtaaggaccaagctagacaagcg

SEQ ID NO: 1808453 - DNA, 25 bp, Homo sapien
gaaggtgccaccattcggaacatca

SEQ ID NO: 1808454 - DNA, 25 bp, Homo sapien
tgaaggcacctctgcggcttgtaag

SEQ ID NO: 1808455 - DNA, 25 bp, Homo sapien
tatgttccagacatcgagggacaca

SEQ ID NO: 1808456 - DNA, 25 bp, Homo sapien
tgaccacgtggcaacatctagaagg

SEQ ID NO: 1808457 - DNA, 25 bp, Homo sapien
gagaggctcacactacttctgcagg

SEQ ID NO: 1808458 - DNA, 25 bp, Homo sapien
ttctaatgaggctgtcgggaaccca

SEQ ID NO: 1808459 - DNA, 25 bp, Homo sapien
agatccaagtggctgtgggtcaccc

SEQ ID NO: 1808460 - DNA, 25 bp, Homo sapien
gtgaaaacccggctatgggcctggc

SEQ ID NO: 1808461 - DNA, 25 bp, Homo sapien
tgggcctggcgccagtcttctgata

SEQ ID NO: 1808462 - DNA, 25 bp, Homo sapien
cagtcttctgatacccggagatcca

SEQ ID NO: 1808463 - DNA, 25 bp, Homo sapien
cccaccaactgttcacaacaatctg

SEQ ID NO: 1808464 - DNA, 25 bp, Homo sapien
tttcttctccctcacaattccttaa

SEQ ID NO: 1808465 - DNA, 25 bp, Homo sapien
ccaactgttcacaacaatctgctct

SEQ ID NO: 1808466 - DNA, 25 bp, Homo sapien
ttcttctccctcacaattccttaaa

SEQ ID NO: 1808467 - DNA, 25 bp, Homo sapien
agcacaggccggacgggaagggagg

SEQ ID NO: 1808468 - DNA, 25 bp, Homo sapien
gagcacaggccggacgggaagggag

SEQ ID NO: 1808469 - DNA, 25 bp, Homo sapien
agggagggtgcccagtacagcctga

SEQ ID NO: 1808470 - DNA, 25 bp, Homo sapien
ggtgcccagtacagcctgaggcctg

SEQ ID NO: 1808471 - DNA, 25 bp, Homo sapien
tccactctaagcgtcttcagcttct

SEQ ID NO: 1808472 - DNA, 25 bp, Homo sapien
aaacgcttttccactctaagcgtct

SEQ ID NO: 1808473 - DNA, 25 bp, Homo sapien
gtgggatctccagtctccaagctca

SEQ ID NO: 1808474 - DNA, 25 bp, Homo sapien
tgtgtgtgggatctccagtctccaa

SEQ ID NO: 1808475 - DNA, 25 bp, Homo sapien
ttgttgagtgtctgacccgccttac

SEQ ID NO: 1808476 - DNA, 25 bp, Homo sapien
gctttgttgagtgtctgacccgcct

SEQ ID NO: 1808477 - DNA, 25 bp, Homo sapien
ctgctttgttgagtgtctgacccgc

SEQ ID NO: 1808478 - DNA, 25 bp, Homo sapien
tttgttgagtgtctgacccgcctta

SEQ ID NO: 1808479 - DNA, 25 bp, Homo sapien
tgtgcaagcagaaactcggagcttc

SEQ ID NO: 1808480 - DNA, 25 bp, Homo sapien
caggtcgggaacgtccacgctggcc

SEQ ID NO: 1808481 - DNA, 25 bp, Homo sapien
gaacgtccacgctggcccgaggaag

SEQ ID NO: 1808482 - DNA, 25 bp, Homo sapien
ggagcttcactctcgtccccagcat

SEQ ID NO: 1808483 - DNA, 25 bp, Homo sapien
gctgacactgctttccctctgggcc

SEQ ID NO: 1808484 - DNA, 25 bp, Homo sapien
cagcagaatgattccatggcctgtt

SEQ ID NO: 1808485 - DNA, 25 bp, Homo sapien
gaacgacatgtgaggtgtgttttgt

SEQ ID NO: 1808486 - DNA, 25 bp, Homo sapien
cctgttgaacgacatgtgaggtgtg

SEQ ID NO: 1808487 - DNA, 25 bp, Homo sapien
gattccatggcctgttgaacgacat

SEQ ID NO: 1808488 - DNA, 25 bp, Homo sapien
ggcagtgtgcgttccctgcaccagg

SEQ ID NO: 1808489 - DNA, 25 bp, Homo sapien
gcctgaggcagtgtgcgttccctgc

SEQ ID NO: 1808490 - DNA, 25 bp, Homo sapien
catgaagggccctcgactgcttgct

SEQ ID NO: 1808491 - DNA, 25 bp, Homo sapien
ccatgaagggccctcgactgcttgc

SEQ ID NO: 1808492 - DNA, 25 bp, Homo sapien
cacatgagaccgtttagttgcggga

SEQ ID NO: 1808493 - DNA, 25 bp, Homo sapien
ctagtccgccatgagagtattgtca

SEQ ID NO: 1808494 - DNA, 25 bp, Homo sapien
ggactgctgccctaaatggagacta

SEQ ID NO: 1808495 - DNA, 25 bp, Homo sapien
tagtgttttcctaaatcaggagtcc

SEQ ID NO: 1808496 - DNA, 25 bp, Homo sapien
aggctgccgctggggtgaagggtca

SEQ ID NO: 1808497 - DNA, 25 bp, Homo sapien
caggctgccgctggggtgaagggtc

SEQ ID NO: 1808498 - DNA, 25 bp, Homo sapien
ggctgccgctggggtgaagggtcat

SEQ ID NO: 1808499 - DNA, 25 bp, Homo sapien
atctgggctgttgaacgttgctgca

SEQ ID NO: 1808500 - DNA, 25 bp, Homo sapien
tgtcgtgacatacgcgcatttccag

SEQ ID NO: 1808501 - DNA, 25 bp, Homo sapien
tgccaattaccctctgttgtgagtt

SEQ ID NO: 1808502 - DNA, 25 bp, Homo sapien
ggcatggagccgtgtcgtgacatac

SEQ ID NO: 1808503 - DNA, 25 bp, Homo sapien
cccctttggatgagcgcctgcatta

SEQ ID NO: 1808504 - DNA, 25 bp, Homo sapien
ttttgcttatctgtacccctttgga

SEQ ID NO: 1808505 - DNA, 25 bp, Homo sapien
gtacccctttggatgagcgcctgca

SEQ ID NO: 1808506 - DNA, 25 bp, Homo sapien
tatctgtacccctttggatgagcgc

SEQ ID NO: 1808507 - DNA, 25 bp, Homo sapien
tcttcggcctggttgctgggcgttc

SEQ ID NO: 1808508 - DNA, 25 bp, Homo sapien
tcattaaaagccgtgatgtggctaa

SEQ ID NO: 1808509 - DNA, 25 bp, Homo sapien
ggctaaagtcgctgaaattggaagt

SEQ ID NO: 1808510 - DNA, 25 bp, Homo sapien
gcatgttcacgagggcagtgttctc

SEQ ID NO: 1808511 - DNA, 25 bp, Homo sapien
cgagtgatgttctgtgtttcgttcc

SEQ ID NO: 1808512 - DNA, 25 bp, Homo sapien
tgtgagcgagtgatgttctgtgttt

SEQ ID NO: 1808513 - DNA, 25 bp, Homo sapien
gtgatgttctgtgtttcgttcctca

SEQ ID NO: 1808514 - DNA, 25 bp, Homo sapien
gctcagatgtgagcgagtgatgttc

SEQ ID NO: 1808515 - DNA, 25 bp, Homo sapien
tgggagtacagtcaggcagcttgga

SEQ ID NO: 1808516 - DNA, 25 bp, Homo sapien
ggagtacagtcaggcagcttggacc

SEQ ID NO: 1808517 - DNA, 25 bp, Homo sapien
atcctcagcatccacgcacacacca

SEQ ID NO: 1808518 - DNA, 25 bp, Homo sapien
gtacagtcaggcagcttggacctga

SEQ ID NO: 1808519 - DNA, 25 bp, Homo sapien
gctctgtgtccgtacacagccgctg

SEQ ID NO: 1808520 - DNA, 25 bp, Homo sapien
agctgcagaggtcgagaatctgctg

SEQ ID NO: 1808521 - DNA, 25 bp, Homo sapien
tgtgtctgctctgtgtccgtacaca

SEQ ID NO: 1808522 - DNA, 25 bp, Homo sapien
tctgctgtaagagcttcaggaggag

SEQ ID NO: 1808523 - DNA, 25 bp, Homo sapien
tggccagagggcgctggtcttgcct

SEQ ID NO: 1808524 - DNA, 25 bp, Homo sapien
ggccagagggcgctggtcttgcctc

SEQ ID NO: 1808525 - DNA, 25 bp, Homo sapien
ctggccagagggcgctggtcttgcc

SEQ ID NO: 1808526 - DNA, 25 bp, Homo sapien
tttgcatagaatccccaaatcggct

SEQ ID NO: 1808527 - DNA, 25 bp, Homo sapien
cgaatggtgcaaagtttgatccaac

SEQ ID NO: 1808528 - DNA, 25 bp, Homo sapien
gactattggacttcactaggatgcg

SEQ ID NO: 1808529 - DNA, 25 bp, Homo sapien
caaatcggctgactattggacttca

SEQ ID NO: 1808530 - DNA, 25 bp, Homo sapien
tcagtgtgtccgctcgctgttgaat

SEQ ID NO: 1808531 - DNA, 25 bp, Homo sapien
gcggtgactgtggacgcgcttcaca

SEQ ID NO: 1808532 - DNA, 25 bp, Homo sapien
ctgaggttggtaaaggatgtgtact

SEQ ID NO: 1808533 - DNA, 25 bp, Homo sapien
cgcttcacagccctacgtttcagag

SEQ ID NO: 1808534 - DNA, 25 bp, Homo sapien
gaggtgaaatgtggatgtggattca

SEQ ID NO: 1808535 - DNA, 25 bp, Homo sapien
aggtgaaatgtggatgtggattcat

SEQ ID NO: 1808536 - DNA, 25 bp, Homo sapien
cggctgtgtcttccgcaggagctga

SEQ ID NO: 1808537 - DNA, 25 bp, Homo sapien
acaatggtgggaacggcgctgcgtt

SEQ ID NO: 1808538 - DNA, 25 bp, Homo sapien
ctgcagccagcggtagacggtatga

SEQ ID NO: 1808539 - DNA, 25 bp, Homo sapien
tgaccgctgggcgaggatacggact

SEQ ID NO: 1808540 - DNA, 25 bp, Homo sapien
caattgctttgaacggtgctaaggt

SEQ ID NO: 1808541 - DNA, 25 bp, Homo sapien
gaacggtgctaaggttgagctgaca

SEQ ID NO: 1808542 - DNA, 25 bp, Homo sapien
agctgacatggctgagcggtaaaga

SEQ ID NO: 1808543 - DNA, 25 bp, Homo sapien
ctgacatggctgagcggtaaagaga

SEQ ID NO: 1808544 - DNA, 25 bp, Homo sapien
tgcccacaggcctcaaatctcgtgg

SEQ ID NO: 1808545 - DNA, 25 bp, Homo sapien
gctcagggtcatggcttgctccgct

SEQ ID NO: 1808546 - DNA, 25 bp, Homo sapien
cacaggcctcaaatctcgtggtgca

SEQ ID NO: 1808547 - DNA, 25 bp, Homo sapien
ggcctcaaatctcgtggtgcaaggc

SEQ ID NO: 1808548 - DNA, 25 bp, Homo sapien
tgataggcgacattaaaaactgggc

SEQ ID NO: 1808549 - DNA, 25 bp, Homo sapien
tcatcaaatcgttccgtgcctctgc

SEQ ID NO: 1808550 - DNA, 25 bp, Homo sapien
gagcacattgatccgcgcggccttt

SEQ ID NO: 1808551 - DNA, 25 bp, Homo sapien
tctgccttgcaagctgaagcgtgtg

SEQ ID NO: 1808552 - DNA, 25 bp, Homo sapien
taacacagcggtcagcgtctttcat

SEQ ID NO: 1808553 - DNA, 25 bp, Homo sapien
ggcactaacacagcggtcagcgtct

SEQ ID NO: 1808554 - DNA, 25 bp, Homo sapien
caggatggtcccagaagcgtgggtg

SEQ ID NO: 1808555 - DNA, 25 bp, Homo sapien
cagaagcgtgggtggcactaacaca

SEQ ID NO: 1808556 - DNA, 25 bp, Homo sapien
ctcacacagcgtcacccgggagcag

SEQ ID NO: 1808557 - DNA, 25 bp, Homo sapien
tcagatctcacacagcgtcacccgg

SEQ ID NO: 1808558 - DNA, 25 bp, Homo sapien
atctcacacagcgtcacccgggagc

SEQ ID NO: 1808559 - DNA, 25 bp, Homo sapien
agatctcacacagcgtcacccggga

SEQ ID NO: 1808560 - DNA, 25 bp, Homo sapien
taaccgtaagttgccatagttggaa

SEQ ID NO: 1808561 - DNA, 25 bp, Homo sapien
ctaaatcaacagccaggccggcaca

SEQ ID NO: 1808562 - DNA, 25 bp, Homo sapien
gtgttcccaggaaagcggctgtttc

SEQ ID NO: 1808563 - DNA, 25 bp, Homo sapien
ggccggcacaggcattaaccgtaag

SEQ ID NO: 1808564 - DNA, 25 bp, Homo sapien
cataatctcttgtcagtctgttcca

SEQ ID NO: 1808565 - DNA, 25 bp, Homo sapien
ctggagttggaggaacaccgtcttc

SEQ ID NO: 1808566 - DNA, 25 bp, Homo sapien
aatctcttgtcagtctgttccataa

SEQ ID NO: 1808567 - DNA, 25 bp, Homo sapien
tctcataatctcttgtcagtctgtt

SEQ ID NO: 1808568 - DNA, 25 bp, Homo sapien
ggaggagatgggatccgtaagggga

SEQ ID NO: 1808569 - DNA, 25 bp, Homo sapien
gatgggatccgtaaggggagtcctc

SEQ ID NO: 1808570 - DNA, 25 bp, Homo sapien
aggagatgggatccgtaaggggagt

SEQ ID NO: 1808571 - DNA, 25 bp, Homo sapien
gagatgggatccgtaaggggagtcc

SEQ ID NO: 1808572 - DNA, 25 bp, Homo sapien
catatgtggtgatgcgtaggtgtgc

SEQ ID NO: 1808573 - DNA, 25 bp, Homo sapien
acgtgtgcatatgtggtgatgcgta

SEQ ID NO: 1808574 - DNA, 25 bp, Homo sapien
catatgtggttatgcgtaggtgtgc

SEQ ID NO: 1808575 - DNA, 25 bp, Homo sapien
tgtgcatatgtggttatgcgtaggt

SEQ ID NO: 1808576 - DNA, 25 bp, Homo sapien
acgtgtgcatatgtggtatagatag

SEQ ID NO: 1808577 - DNA, 25 bp, Homo sapien
ctcccccatgtgtgatatggaggta

SEQ ID NO: 1808578 - DNA, 25 bp, Homo sapien
tccatgtggtatcctaatgagatca

SEQ ID NO: 1808579 - DNA, 25 bp, Homo sapien
aatgtatgcgtaccaacaatatggg

SEQ ID NO: 1808580 - DNA, 25 bp, Homo sapien
ggcataaaaccatacgtatctttga

SEQ ID NO: 1808581 - DNA, 25 bp, Homo sapien
tgaaacatactatcatccatgtggt

SEQ ID NO: 1808582 - DNA, 25 bp, Homo sapien
ctatccatcttcaaccggcaattct

SEQ ID NO: 1808583 - DNA, 25 bp, Homo sapien
ccattgccactgacatatatcaggg

SEQ ID NO: 1808584 - DNA, 25 bp, Homo sapien
tatatcagggccacattatttcctg

SEQ ID NO: 1808585 - DNA, 25 bp, Homo sapien
tcttcaaccggcaattcttttgaaa

SEQ ID NO: 1808586 - DNA, 25 bp, Homo sapien
tgtagcaaattctgtcaggtacctg

SEQ ID NO: 1808587 - DNA, 25 bp, Homo sapien
gtagcaaattctgtcaggtacctgc

SEQ ID NO: 1808588 - DNA, 25 bp, Homo sapien
gatgtagcaaattctgtcaggtacc

SEQ ID NO: 1808589 - DNA, 25 bp, Homo sapien
tagcaaattctgtcaggtacctgca

SEQ ID NO: 1808590 - DNA, 25 bp, Homo sapien
gggcaaattcaagttgaagtagaga

SEQ ID NO: 1808591 - DNA, 25 bp, Homo sapien
aggtgtcatgctggtgtagaaatac

SEQ ID NO: 1808592 - DNA, 25 bp, Homo sapien
aatacacagagtggttgaaggaagg

SEQ ID NO: 1808593 - DNA, 25 bp, Homo sapien
tgaagtagagaagctccatagtcat

SEQ ID NO: 1808594 - DNA, 25 bp, Homo sapien
ggtactggaaatcccgctgtgctgg

SEQ ID NO: 1808595 - DNA, 25 bp, Homo sapien
gggtactggaaatcccgctgtgctg

SEQ ID NO: 1808596 - DNA, 25 bp, Homo sapien
gcgggtactggaaatcccgctgtgc

SEQ ID NO: 1808597 - DNA, 25 bp, Homo sapien
cagcgggtactggaaatcccgctgt

SEQ ID NO: 1808598 - DNA, 25 bp, Homo sapien
gccagagcatgcttgagtgtggatg

SEQ ID NO: 1808599 - DNA, 25 bp, Homo sapien
actttgataaaacttcaggttctgg

SEQ ID NO: 1808600 - DNA, 25 bp, Homo sapien
ccaagactttgataaaacttcaggt

SEQ ID NO: 1808601 - DNA, 25 bp, Homo sapien
ccaccaagactttgataaaacttca

SEQ ID NO: 1808602 - DNA, 25 bp, Homo sapien
gacctgcgttgccacactgagaccc

SEQ ID NO: 1808603 - DNA, 25 bp, Homo sapien
tgcgttgccacactgagaccctttc

SEQ ID NO: 1808604 - DNA, 25 bp, Homo sapien
cctgcgttgccacactgagaccctt

SEQ ID NO: 1808605 - DNA, 25 bp, Homo sapien
gggacctgcgttgccacactgagac

SEQ ID NO: 1808606 - DNA, 25 bp, Homo sapien
tctgtgtctagtgtgcggagcagca

SEQ ID NO: 1808607 - DNA, 25 bp, Homo sapien
tgaggtcgttgctaaatcatgaagc

SEQ ID NO: 1808608 - DNA, 25 bp, Homo sapien
aggactggtggcgtggctctcctcc

SEQ ID NO: 1808609 - DNA, 25 bp, Homo sapien
ttggagaaggcgatgagatccagtt

SEQ ID NO: 1808610 - DNA, 25 bp, Homo sapien
ctctgaaagctggtgttacataagt

SEQ ID NO: 1808611 - DNA, 25 bp, Homo sapien
tgaatctgtctctgtggcgtctctg

SEQ ID NO: 1808612 - DNA, 25 bp, Homo sapien
tctgaaagctggtgttacataagtc

SEQ ID NO: 1808613 - DNA, 25 bp, Homo sapien
ctccaatgcccagctcccggagttg

SEQ ID NO: 1808614 - DNA, 25 bp, Homo sapien
ttgccgagccgttgctgcttggacc

SEQ ID NO: 1808615 - DNA, 25 bp, Homo sapien
ctgcttggacccctcgacgagtccc

SEQ ID NO: 1808616 - DNA, 25 bp, Homo sapien
cctgtgggcgctcagggatgagctc

SEQ ID NO: 1808617 - DNA, 25 bp, Homo sapien
tgtttttcatagcagaatagaaagt

SEQ ID NO: 1808618 - DNA, 25 bp, Homo sapien
gcagggcaggtgcatttcctgctgt

SEQ ID NO: 1808619 - DNA, 25 bp, Homo sapien
ggatcacagggtttcggctgccaga

SEQ ID NO: 1808620 - DNA, 25 bp, Homo sapien
gtcaccatcagttggcaggacacag

SEQ ID NO: 1808621 - DNA, 25 bp, Homo sapien
tcacagccacactcgtgagacttag

SEQ ID NO: 1808622 - DNA, 25 bp, Homo sapien
ggtgggataggacgtggcggcggct

SEQ ID NO: 1808623 - DNA, 25 bp, Homo sapien
gacttaggtggccacgatgctgagc

SEQ ID NO: 1808624 - DNA, 25 bp, Homo sapien
ctgagcatggatctttggtgggata

SEQ ID NO: 1808625 - DNA, 25 bp, Homo sapien
cttgaaggggctcagtatagcgaca

SEQ ID NO: 1808626 - DNA, 25 bp, Homo sapien
cagtatagcgacatcacagtcgtgg

SEQ ID NO: 1808627 - DNA, 25 bp, Homo sapien
gggctcagtatagcgacatcacagt

SEQ ID NO: 1808628 - DNA, 25 bp, Homo sapien
gacatcacagtcgtggaagaaaaat

SEQ ID NO: 1808629 - DNA, 25 bp, Homo sapien
catgatgatcaaaaggtaggcaggc

SEQ ID NO: 1808630 - DNA, 25 bp, Homo sapien
tcccctggaaaagtagatagcgctg

SEQ ID NO: 1808631 - DNA, 25 bp, Homo sapien
ttgaacactatgcttggcctggcct

SEQ ID NO: 1808632 - DNA, 25 bp, Homo sapien
agcgatccagctgcgttcttgaaca

SEQ ID NO: 1808633 - DNA, 25 bp, Homo sapien
cacatcagctccgttcgtattttag

SEQ ID NO: 1808634 - DNA, 25 bp, Homo sapien
ggttccgttctcatgggagtggtca

SEQ ID NO: 1808635 - DNA, 25 bp, Homo sapien
tagattgtaccgtaagtcacactcg

SEQ ID NO: 1808636 - DNA, 25 bp, Homo sapien
aagaatcaccttgtcgtcctttaga

SEQ ID NO: 1808637 - DNA, 25 bp, Homo sapien
ctggtgttcttccgtggagctctcc

SEQ ID NO: 1808638 - DNA, 25 bp, Homo sapien
ctgctgcatggcagccggtgctgat

SEQ ID NO: 1808639 - DNA, 25 bp, Homo sapien
ctagaaatagtaataatgacagcag

SEQ ID NO: 1808640 - DNA, 25 bp, Homo sapien
tagaaatagtaataatgacagcagt

SEQ ID NO: 1808641 - DNA, 25 bp, Homo sapien
tactctgccaaagtcgcagtacaga

SEQ ID NO: 1808642 - DNA, 25 bp, Homo sapien
ctctgggagccggatctgtcctctc

SEQ ID NO: 1808643 - DNA, 25 bp, Homo sapien
ggacggcgcccgagcagccatattg

SEQ ID NO: 1808644 - DNA, 25 bp, Homo sapien
tcaattcgaagctgcaagtgcagcg

SEQ ID NO: 1808645 - DNA, 25 bp, Homo sapien
ccctccagcccagctgcttcttggc

SEQ ID NO: 1808646 - DNA, 25 bp, Homo sapien
tccagcccagctgcttcttggccca

SEQ ID NO: 1808647 - DNA, 25 bp, Homo sapien
agctccctccagcccagctgcttct

SEQ ID NO: 1808648 - DNA, 25 bp, Homo sapien
cagctccctccagcccagctgcttc

SEQ ID NO: 1808649 - DNA, 25 bp, Homo sapien
tgccatctaaaaggctgcggtaatc

SEQ ID NO: 1808650 - DNA, 25 bp, Homo sapien
cagtgccatctaaaaggctgcggta

SEQ ID NO: 1808651 - DNA, 25 bp, Homo sapien
ccatctaaaaggctgcggtaatcag

SEQ ID NO: 1808652 - DNA, 25 bp, Homo sapien
agtgccatctaaaaggctgcggtaa

SEQ ID NO: 1808653 - DNA, 25 bp, Homo sapien
gagttctccccgctgagtacgttca

SEQ ID NO: 1808654 - DNA, 25 bp, Homo sapien
atccggtgttctcccctctgtgcgt

SEQ ID NO: 1808655 - DNA, 25 bp, Homo sapien
gggcgttctccccactgtgcgcgtt

SEQ ID NO: 1808656 - DNA, 25 bp, Homo sapien
tgtgcgttcactgggcgttctcccc

SEQ ID NO: 1808657 - DNA, 25 bp, Homo sapien
ccccatatgcgttcaagtggcgttc

SEQ ID NO: 1808658 - DNA, 25 bp, Homo sapien
tcccccatatgcgttcaagtggcgt

SEQ ID NO: 1808659 - DNA, 25 bp, Homo sapien
atgcgttcaagtggcgttctccaca

SEQ ID NO: 1808660 - DNA, 25 bp, Homo sapien
catatgcgttcaagtggcgttctcc

SEQ ID NO: 1808661 - DNA, 25 bp, Homo sapien
ttcttcccagggagcgttcacgtgg

SEQ ID NO: 1808662 - DNA, 25 bp, Homo sapien
ttcacgtggcgttctgcctcctgtg

SEQ ID NO: 1808663 - DNA, 25 bp, Homo sapien
tcccctgcgttcaccagaagttctt

SEQ ID NO: 1808664 - DNA, 25 bp, Homo sapien
ttttccaccctgtgcgttcacgagg

SEQ ID NO: 1808665 - DNA, 25 bp, Homo sapien
caaccccgtgcattcagcaggcgtt

SEQ ID NO: 1808666 - DNA, 25 bp, Homo sapien
ggagttctcccgcattgtgttcacg

SEQ ID NO: 1808667 - DNA, 25 bp, Homo sapien
aggcgttctcctctccgtgcgttga

SEQ ID NO: 1808668 - DNA, 25 bp, Homo sapien
tatttactctgtgcgttcccctggc

SEQ ID NO: 1808669 - DNA, 25 bp, Homo sapien
caccgtgtgttcaggttgcgttctc

SEQ ID NO: 1808670 - DNA, 25 bp, Homo sapien
ctgtgcggttgtgcggcgttctccc

SEQ ID NO: 1808671 - DNA, 25 bp, Homo sapien
tccctgtgtgatctcccgacgttct

SEQ ID NO: 1808672 - DNA, 25 bp, Homo sapien
tctcttgtgcgttcacctggcgttc

SEQ ID NO: 1808673 - DNA, 25 bp, Homo sapien
gttttccccgctgtgcgttcaccag

SEQ ID NO: 1808674 - DNA, 25 bp, Homo sapien
cccctcccgctgtacgttcaccagg

SEQ ID NO: 1808675 - DNA, 25 bp, Homo sapien
gtgcgttcacatggcgttttccccg

SEQ ID NO: 1808676 - DNA, 25 bp, Homo sapien
tctccttcctttgtgcgttcacatg

SEQ ID NO: 1808677 - DNA, 25 bp, Homo sapien
tcttcttgctgagcgttcgcgtgcc

SEQ ID NO: 1808678 - DNA, 25 bp, Homo sapien
cccgtgtgtgttggcgcagcattct

SEQ ID NO: 1808679 - DNA, 25 bp, Homo sapien
tcgtgcgttcacttggcgttctgct

SEQ ID NO: 1808680 - DNA, 25 bp, Homo sapien
gcgttctgctgcttgtgcgttcacc

SEQ ID NO: 1808681 - DNA, 25 bp, Homo sapien
cactggtattcacattcctgggatg

SEQ ID NO: 1808682 - DNA, 25 bp, Homo sapien
cgtcctatccggattccactggtat

SEQ ID NO: 1808683 - DNA, 25 bp, Homo sapien
tgggatccggctgcccatcgctgtg

SEQ ID NO: 1808684 - DNA, 25 bp, Homo sapien
gaagagagctgctgaacagcatgcg

SEQ ID NO: 1808685 - DNA, 25 bp, Homo sapien
gagccatttcacctgtgttgggagc

SEQ ID NO: 1808686 - DNA, 25 bp, Homo sapien
tgtgtttcctgatcgcgcagcagcc

SEQ ID NO: 1808687 - DNA, 25 bp, Homo sapien
cacaggaactggcagtgggaatcca

SEQ ID NO: 1808688 - DNA, 25 bp, Homo sapien
caaattacatcccagctgagaccgc

SEQ ID NO: 1808689 - DNA, 25 bp, Homo sapien
ttagctgggaattagttggcagcgg

SEQ ID NO: 1808690 - DNA, 25 bp, Homo sapien
tgggaattagttggcagcggccgca

SEQ ID NO: 1808691 - DNA, 25 bp, Homo sapien
aattagttggcagcggccgcatggc

SEQ ID NO: 1808692 - DNA, 25 bp, Homo sapien
agctgggaattagttggcagcggcc

SEQ ID NO: 1808693 - DNA, 25 bp, Homo sapien
atggcactcgaaggggatacacacg

SEQ ID NO: 1808694 - DNA, 25 bp, Homo sapien
gcactcgaaggggatacacacggtg

SEQ ID NO: 1808695 - DNA, 25 bp, Homo sapien
cccatggcactcgaaggggatacac

SEQ ID NO: 1808696 - DNA, 25 bp, Homo sapien
catggcactcgaaggggatacacac

SEQ ID NO: 1808697 - DNA, 25 bp, Homo sapien
ggtggcagtgcaacttgggaacagg

SEQ ID NO: 1808698 - DNA, 25 bp, Homo sapien
catgcgaaggtgcaggaagtggaga

SEQ ID NO: 1808699 - DNA, 25 bp, Homo sapien
gcaatgacatcagcaggtaatgaac

SEQ ID NO: 1808700 - DNA, 25 bp, Homo sapien
acaggagtgggcagcataggaaagg

SEQ ID NO: 1808701 - DNA, 25 bp, Homo sapien
tccttccctggcgtggtctcacgga

SEQ ID NO: 1808702 - DNA, 25 bp, Homo sapien
tgcccatggatgaggacggaatctt

SEQ ID NO: 1808703 - DNA, 25 bp, Homo sapien
tgcccaggtcccgataaagttctgt

SEQ ID NO: 1808704 - DNA, 25 bp, Homo sapien
gtctcacggagcaatctcctctcgg

SEQ ID NO: 1808705 - DNA, 25 bp, Homo sapien
gaaagaacaagtatgtacagacaca

SEQ ID NO: 1808706 - DNA, 25 bp, Homo sapien
ccttttggggcgaagatgaagaaat

SEQ ID NO: 1808707 - DNA, 25 bp, Homo sapien
aataacatacagtttcatgcagggc

SEQ ID NO: 1808708 - DNA, 25 bp, Homo sapien
tggatggcttccattcccaagaaag

SEQ ID NO: 1808709 - DNA, 25 bp, Homo sapien
tttgttatcaggcatcgaggcgtga

SEQ ID NO: 1808710 - DNA, 25 bp, Homo sapien
caagaggaggattacttcactgttt

SEQ ID NO: 1808711 - DNA, 25 bp, Homo sapien
tggctggtcaaatgcccttgcagaa

SEQ ID NO: 1808712 - DNA, 25 bp, Homo sapien
gaggcgtgagaacccactctttatg

SEQ ID NO: 1808713 - DNA, 25 bp, Homo sapien
tgtcaccatctgctcttctgtcttg

SEQ ID NO: 1808714 - DNA, 25 bp, Homo sapien
ccatctgctcttctgtcttgatgac

SEQ ID NO: 1808715 - DNA, 25 bp, Homo sapien
ctgtcaccatctgctcttctgtctt

SEQ ID NO: 1808716 - DNA, 25 bp, Homo sapien
tctgctcttctgtcttgatgaccat

SEQ ID NO: 1808717 - DNA, 25 bp, Homo sapien
gaggcacatcagctctaagccagtg

SEQ ID NO: 1808718 - DNA, 25 bp, Homo sapien
tcctcggaacctgaagaaagggaga

SEQ ID NO: 1808719 - DNA, 25 bp, Homo sapien
ggactttgtccaactcgcttctgtg

SEQ ID NO: 1808720 - DNA, 25 bp, Homo sapien
cgtcacactacaaaggcccggactt

SEQ ID NO: 1808721 - DNA, 25 bp, Homo sapien
tgttacatagaagatgccagctgga

SEQ ID NO: 1808722 - DNA, 25 bp, Homo sapien
ttaagagttcttttgcagtcctggg

SEQ ID NO: 1808723 - DNA, 25 bp, Homo sapien
tagatgcggacaatgtggcataggt

SEQ ID NO: 1808724 - DNA, 25 bp, Homo sapien
gccgtacagtgtagatgcggacaat

SEQ ID NO: 1808725 - DNA, 25 bp, Homo sapien
gcagggaccctgtcaagacgaagag

SEQ ID NO: 1808726 - DNA, 25 bp, Homo sapien
tgttgccttcttggcgcagggaccc

SEQ ID NO: 1808727 - DNA, 25 bp, Homo sapien
tctgttccatgtgaccagagcccca

SEQ ID NO: 1808728 - DNA, 25 bp, Homo sapien
cgaagagctccacgcatggcaggag

SEQ ID NO: 1808729 - DNA, 25 bp, Homo sapien
gggtcgctgtgggtcgcgaagcaga

SEQ ID NO: 1808730 - DNA, 25 bp, Homo sapien
acggcggctgcagcgtggaggagct

SEQ ID NO: 1808731 - DNA, 25 bp, Homo sapien
gtcgcgaagcagagcccgggacgtg

SEQ ID NO: 1808732 - DNA, 25 bp, Homo sapien
cgcgcttggtgcacgatcctgaagg

SEQ ID NO: 1808733 - DNA, 25 bp, Homo sapien
gctatctcacagctaaggttccaag

SEQ ID NO: 1808734 - DNA, 25 bp, Homo sapien
gaatctggagaggtttggtcttgaa

SEQ ID NO: 1808735 - DNA, 25 bp, Homo sapien
tatctattgagacaaagtaaatgcc

SEQ ID NO: 1808736 - DNA, 25 bp, Homo sapien
ggtcttgaaaaatcaagctccatgg

SEQ ID NO: 1808737 - DNA, 25 bp, Homo sapien
tcatagctcataggaggctctggag

SEQ ID NO: 1808738 - DNA, 25 bp, Homo sapien
actccctggtatcgcctgaaggcca

SEQ ID NO: 1808739 - DNA, 25 bp, Homo sapien
tccctacggtggtggtggtaactca

SEQ ID NO: 1808740 - DNA, 25 bp, Homo sapien
gaatgggaataattgccctacccag

SEQ ID NO: 1808741 - DNA, 25 bp, Homo sapien
cctaattataagctcagaaactcag

SEQ ID NO: 1808742 - DNA, 25 bp, Homo sapien
tatagaggttatcactaaacaggac

SEQ ID NO: 1808743 - DNA, 25 bp, Homo sapien
gaagccatagtcataatttagtgtg

SEQ ID NO: 1808744 - DNA, 25 bp, Homo sapien
tgtcggtattcacagtaggcagata

SEQ ID NO: 1808745 - DNA, 25 bp, Homo sapien
atttcctagcacatcaatggattca

SEQ ID NO: 1808746 - DNA, 25 bp, Homo sapien
gagaagctagtatgcaacagatcca

SEQ ID NO: 1808747 - DNA, 25 bp, Homo sapien
cactgggagagcgtatgaaaaatgt

SEQ ID NO: 1808748 - DNA, 25 bp, Homo sapien
tctgaagacatatgaggagggcact

SEQ ID NO: 1808749 - DNA, 25 bp, Homo sapien
tagaaagagcactccagaagcaagg

SEQ ID NO: 1808750 - DNA, 25 bp, Homo sapien
cacacacctgttatgagagtttcct

SEQ ID NO: 1808751 - DNA, 25 bp, Homo sapien
tcttgaaggtgtgaaatagcgtgct

SEQ ID NO: 1808752 - DNA, 25 bp, Homo sapien
tccaggcagaagtacccgaacatac

SEQ ID NO: 1808753 - DNA, 25 bp, Homo sapien
ctgtcacatgtgtacgcgcagacca

SEQ ID NO: 1808754 - DNA, 25 bp, Homo sapien
catgtgtacgcgcagaccacaggat

SEQ ID NO: 1808755 - DNA, 25 bp, Homo sapien
gtcacatgtgtacgcgcagaccaca

SEQ ID NO: 1808756 - DNA, 25 bp, Homo sapien
gtgtacgcgcagaccacaggatgtc

SEQ ID NO: 1808757 - DNA, 25 bp, Homo sapien
cactgagcgccgaaacttagggtcg

SEQ ID NO: 1808758 - DNA, 25 bp, Homo sapien
gcatagagacctcggggttgacgct

SEQ ID NO: 1808759 - DNA, 25 bp, Homo sapien
gagcgccggaccactgagcgccgaa

SEQ ID NO: 1808760 - DNA, 25 bp, Homo sapien
ttgacgctggacaccgagccttggg

SEQ ID NO: 1808761 - DNA, 25 bp, Homo sapien
cggccgcagcagggtacgctccgcg

SEQ ID NO: 1808762 - DNA, 25 bp, Homo sapien
ccgcagcagggtacgctccgcgcgc

SEQ ID NO: 1808763 - DNA, 25 bp, Homo sapien
cagcagggtacgctccgcgcgcggg

SEQ ID NO: 1808764 - DNA, 25 bp, Homo sapien
gcagcagggtacgctccgcgcgcgg

SEQ ID NO: 1808765 - DNA, 25 bp, Homo sapien
ctccaagacaaccgccgaagccgcg

SEQ ID NO: 1808766 - DNA, 25 bp, Homo sapien
gcttctccaagacaaccgccgaagc

SEQ ID NO: 1808767 - DNA, 25 bp, Homo sapien
cttctccaagacaaccgccgaagcc

SEQ ID NO: 1808768 - DNA, 25 bp, Homo sapien
ttctccaagacaaccgccgaagccg

SEQ ID NO: 1808769 - DNA, 25 bp, Homo sapien
ttgatgcggttcaggaccccgctgt

SEQ ID NO: 1808770 - DNA, 25 bp, Homo sapien
accccgctgttctccagcgtctgca

SEQ ID NO: 1808771 - DNA, 25 bp, Homo sapien
ttctccagcgtctgcaccagcaggt

SEQ ID NO: 1808772 - DNA, 25 bp, Homo sapien
tcctcggccaccactgcggccgccg

SEQ ID NO: 1808773 - DNA, 25 bp, Homo sapien
aaacacgagcaagccaacgagctgg

SEQ ID NO: 1808774 - DNA, 25 bp, Homo sapien
cggatcatgcccgagcctgaggaag

SEQ ID NO: 1808775 - DNA, 25 bp, Homo sapien
caggtgcaaaggtcagaaacgcctt

SEQ ID NO: 1808776 - DNA, 25 bp, Homo sapien
tccgaaacgttctcagtcacacaag

SEQ ID NO: 1808777 - DNA, 25 bp, Homo sapien
aaaacacagctgctcggagttcagc

SEQ ID NO: 1808778 - DNA, 25 bp, Homo sapien
ttcttgctcctctagtgctaaaaac

SEQ ID NO: 1808779 - DNA, 25 bp, Homo sapien
gctcctctagtgctaaaaacacagc

SEQ ID NO: 1808780 - DNA, 25 bp, Homo sapien
aaaaacacagctgctcggagttcag

SEQ ID NO: 1808781 - DNA, 25 bp, Homo sapien
gaaaagttgcatactatataccccg

SEQ ID NO: 1808782 - DNA, 25 bp, Homo sapien
tcaagaaactcctatgaccatttgt

SEQ ID NO: 1808783 - DNA, 25 bp, Homo sapien
gatctgagtgaacctgcacttaaca

SEQ ID NO: 1808784 - DNA, 25 bp, Homo sapien
tcagagttactgtggtaccttaaga

SEQ ID NO: 1808785 - DNA, 25 bp, Homo sapien
ttcaggctctcattaactaaaggag

SEQ ID NO: 1808786 - DNA, 25 bp, Homo sapien
tttttcaggctctcattaactaaag

SEQ ID NO: 1808787 - DNA, 25 bp, Homo sapien
caggctctcattaactaaaggagtt

SEQ ID NO: 1808788 - DNA, 25 bp, Homo sapien
gctctcattaactaaaggagttttg

SEQ ID NO: 1808789 - DNA, 25 bp, Homo sapien
taactgtaagacaatcatctcatag

SEQ ID NO: 1808790 - DNA, 25 bp, Homo sapien
ttttcactgggatcatcagtctgta

SEQ ID NO: 1808791 - DNA, 25 bp, Homo sapien
ggacctataacaattgaagacaaaa

SEQ ID NO: 1808792 - DNA, 25 bp, Homo sapien
tccaaaaatatgtaatagcaacacg

SEQ ID NO: 1808793 - DNA, 25 bp, Homo sapien
aaattctgcaacaagactagccact

SEQ ID NO: 1808794 - DNA, 25 bp, Homo sapien
tagtttcaggttgaaaaacagccaa

SEQ ID NO: 1808795 - DNA, 25 bp, Homo sapien
gcaacaagactagccactaaacgac

SEQ ID NO: 1808796 - DNA, 25 bp, Homo sapien
tgctagtttcaggttgaaaaacagc

SEQ ID NO: 1808797 - DNA, 25 bp, Homo sapien
aagtaacacaaagcagcaacactgg

SEQ ID NO: 1808798 - DNA, 25 bp, Homo sapien
acactggtgccagctatctgaaagc

SEQ ID NO: 1808799 - DNA, 25 bp, Homo sapien
caggtgcactctaacatcgtatcaa

SEQ ID NO: 1808800 - DNA, 25 bp, Homo sapien
caacgtttccattaacaggtgcact

SEQ ID NO: 1808801 - DNA, 25 bp, Homo sapien
tatacctaaatctcgggctaaattc

SEQ ID NO: 1808802 - DNA, 25 bp, Homo sapien
taataataagggtccacccacagta

SEQ ID NO: 1808803 - DNA, 25 bp, Homo sapien
tctctcgaccttcgagaccttgcag

SEQ ID NO: 1808804 - DNA, 25 bp, Homo sapien
tgatcacttctaataataagggtcc

SEQ ID NO: 1808805 - DNA, 25 bp, Homo sapien
gccctttttctttctgttgacagcg

SEQ ID NO: 1808806 - DNA, 25 bp, Homo sapien
ttggccctttttctttctgttgaca

SEQ ID NO: 1808807 - DNA, 25 bp, Homo sapien
cagtggttggccctttttctttctg

SEQ ID NO: 1808808 - DNA, 25 bp, Homo sapien
ccctttttctttctgttgacagcgc

SEQ ID NO: 1808809 - DNA, 25 bp, Homo sapien
gacagtttagctcatgacccaacac

SEQ ID NO: 1808810 - DNA, 25 bp, Homo sapien
taaaattttggcatgtgacaatcgc

SEQ ID NO: 1808811 - DNA, 25 bp, Homo sapien
tagagcccacttcatacacagtatg

SEQ ID NO: 1808812 - DNA, 25 bp, Homo sapien
gaagcctcagaacaccaaggtaggg

SEQ ID NO: 1808813 - DNA, 25 bp, Homo sapien
ggtacactcctatctagcagagaac

SEQ ID NO: 1808814 - DNA, 25 bp, Homo sapien
cattttcacatcacacccactacac

SEQ ID NO: 1808815 - DNA, 25 bp, Homo sapien
catgctactgggtctcattttgagg

SEQ ID NO: 1808816 - DNA, 25 bp, Homo sapien
ccactacacaggcatgctactgggt

SEQ ID NO: 1808817 - DNA, 25 bp, Homo sapien
tacagaattcctatcctggctctat

SEQ ID NO: 1808818 - DNA, 25 bp, Homo sapien
tgaggatacagaattcctatcctgg

SEQ ID NO: 1808819 - DNA, 25 bp, Homo sapien
tggttcagcaacttgggggagtaaa

SEQ ID NO: 1808820 - DNA, 25 bp, Homo sapien
ctggctctatttgacagaatcacag

SEQ ID NO: 1808821 - DNA, 25 bp, Homo sapien
gaagataaagcccttgtcctcagta

SEQ ID NO: 1808822 - DNA, 25 bp, Homo sapien
caagagttgcagctgaggagaaaac

SEQ ID NO: 1808823 - DNA, 25 bp, Homo sapien
gccttagactgtgtaagagatatga

SEQ ID NO: 1808824 - DNA, 25 bp, Homo sapien
tcactactacaactttgacagaagg

SEQ ID NO: 1808825 - DNA, 25 bp, Homo sapien
ccaagtcttgttgattctcaaaagg

SEQ ID NO: 1808826 - DNA, 25 bp, Homo sapien
tattagtttaccaagtcttgttgat

SEQ ID NO: 1808827 - DNA, 25 bp, Homo sapien
tgttgattctcaaaaggtcatcttt

SEQ ID NO: 1808828 - DNA, 25 bp, Homo sapien
gtttaccaagtcttgttgattctca

SEQ ID NO: 1808829 - DNA, 25 bp, Homo sapien
tgttctagcccaacttccacaggag

SEQ ID NO: 1808830 - DNA, 25 bp, Homo sapien
ctgttctagcccaacttccacagga

SEQ ID NO: 1808831 - DNA, 25 bp, Homo sapien
aaatagtagttcactctcccagttt

SEQ ID NO: 1808832 - DNA, 25 bp, Homo sapien
caaatagtagttcactctcccagtt

SEQ ID NO: 1808833 - DNA, 25 bp, Homo sapien
gaatgtacatcagatagatcaagtg

SEQ ID NO: 1808834 - DNA, 25 bp, Homo sapien
gagaatgtacatcagatagatcaag

SEQ ID NO: 1808835 - DNA, 25 bp, Homo sapien
aatgtacatcagatagatcaagtgc

SEQ ID NO: 1808836 - DNA, 25 bp, Homo sapien
ggagaatgtacatcagatagatcaa

SEQ ID NO: 1808837 - DNA, 25 bp, Homo sapien
ttacttggtgttgtctgtgcacttg

SEQ ID NO: 1808838 - DNA, 25 bp, Homo sapien
cttacttggtgttgtctgtgcactt

SEQ ID NO: 1808839 - DNA, 25 bp, Homo sapien
tacttggtgttgtctgtgcacttgt

SEQ ID NO: 1808840 - DNA, 25 bp, Homo sapien
cagacatgacttccgtgttccacag

SEQ ID NO: 1808841 - DNA, 25 bp, Homo sapien
gcagagcactctggagttaagtcca

SEQ ID NO: 1808842 - DNA, 25 bp, Homo sapien
tgtccgaagtaccaaataaatccaa

SEQ ID NO: 1808843 - DNA, 25 bp, Homo sapien
tcaagaaactaaagagcccatgtgt

SEQ ID NO: 1808844 - DNA, 25 bp, Homo sapien
gcccaatctatggtacttggcagcc

SEQ ID NO: 1808845 - DNA, 25 bp, Homo sapien
agaactgtgaggaaaaatgtgttgt

SEQ ID NO: 1808846 - DNA, 25 bp, Homo sapien
cagactaagacagaccccaacctat

SEQ ID NO: 1808847 - DNA, 25 bp, Homo sapien
aaatgtgttgtttgtaagctgccca

SEQ ID NO: 1808848 - DNA, 25 bp, Homo sapien
caactagaaatctcagaaggagcaa

SEQ ID NO: 1808849 - DNA, 25 bp, Homo sapien
tataatcactacgtcctggaagttc

SEQ ID NO: 1808850 - DNA, 25 bp, Homo sapien
ctcatgaccttactctatcactggg

SEQ ID NO: 1808851 - DNA, 25 bp, Homo sapien
gaaaggtatcgtgtagtataatcac

SEQ ID NO: 1808852 - DNA, 25 bp, Homo sapien
gtcaccagccttctgcccgcttgtc

SEQ ID NO: 1808853 - DNA, 25 bp, Homo sapien
ggactaatgaatctcacagaactga

SEQ ID NO: 1808854 - DNA, 25 bp, Homo sapien
tttaggagaggatgaaaaagcagcc

SEQ ID NO: 1808855 - DNA, 25 bp, Homo sapien
cttggtagtatgcagcactggcccc

SEQ ID NO: 1808856 - DNA, 25 bp, Homo sapien
taaagccatctaacacaacaggtgg

SEQ ID NO: 1808857 - DNA, 25 bp, Homo sapien
gcattcgaaagcaaccggacacatg

SEQ ID NO: 1808858 - DNA, 25 bp, Homo sapien
taggatgtttggtacaacgaaatgg

SEQ ID NO: 1808859 - DNA, 25 bp, Homo sapien
tgagtgagccactagtacttgtcgc

SEQ ID NO: 1808860 - DNA, 25 bp, Homo sapien
tacttgtcgcctcctgcattcgaaa

SEQ ID NO: 1808861 - DNA, 25 bp, Homo sapien
aaaagtgagggacctattgcacagc

SEQ ID NO: 1808862 - DNA, 25 bp, Homo sapien
tgtatcagactgacttaagaacctg

SEQ ID NO: 1808863 - DNA, 25 bp, Homo sapien
caaacagcatctgggtctagcagcc

SEQ ID NO: 1808864 - DNA, 25 bp, Homo sapien
cctgggtcctaacctaatgagtggt

SEQ ID NO: 1808865 - DNA, 25 bp, Homo sapien
tacgtatgtatacccgggaatctgc

SEQ ID NO: 1808866 - DNA, 25 bp, Homo sapien
aaatgctggctattcagtcccctgg

SEQ ID NO: 1808867 - DNA, 25 bp, Homo sapien
tggccccgagagagaatcgtaccac

SEQ ID NO: 1808868 - DNA, 25 bp, Homo sapien
tcagagtgcctcgtgaccatgtggc

SEQ ID NO: 1808869 - DNA, 25 bp, Homo sapien
cacttttcatatgggtacagacaga

SEQ ID NO: 1808870 - DNA, 25 bp, Homo sapien
tacaccaggtagaggtcttgactag

SEQ ID NO: 1808871 - DNA, 25 bp, Homo sapien
gacattaccgaacaagacgctcctg

SEQ ID NO: 1808872 - DNA, 25 bp, Homo sapien
agtaactactgaagcatggtgacca

SEQ ID NO: 1808873 - DNA, 25 bp, Homo sapien
aagtctccagagagttaagtggtca

SEQ ID NO: 1808874 - DNA, 25 bp, Homo sapien
caacaggcatcaaggtgaaaggcgc

SEQ ID NO: 1808875 - DNA, 25 bp, Homo sapien
tcagccttgcatactaaagagagca

SEQ ID NO: 1808876 - DNA, 25 bp, Homo sapien
agtggtcaggtcaatatcaaagtca

SEQ ID NO: 1808877 - DNA, 25 bp, Homo sapien
ttctgttgcttagaaaagatccaat

SEQ ID NO: 1808878 - DNA, 25 bp, Homo sapien
gacacttgtatcactctgattggcc

SEQ ID NO: 1808879 - DNA, 25 bp, Homo sapien
ctggcttaggaatgggatcatcaaa

SEQ ID NO: 1808880 - DNA, 25 bp, Homo sapien
gtctttgccatctaaagttctgttg

SEQ ID NO: 1808881 - DNA, 25 bp, Homo sapien
ttaaggggggtgcatccgagagcga

SEQ ID NO: 1808882 - DNA, 25 bp, Homo sapien
tcagagtcttttaaagaaggggctc

SEQ ID NO: 1808883 - DNA, 25 bp, Homo sapien
cgagagcgaggccagacttcctgct

SEQ ID NO: 1808884 - DNA, 25 bp, Homo sapien
tcctgcttgcttcctaggttccttc

SEQ ID NO: 1808885 - DNA, 25 bp, Homo sapien
caacatataaaataggaccacctta

SEQ ID NO: 1808886 - DNA, 25 bp, Homo sapien
caaaagtattccgatggtatatagg

SEQ ID NO: 1808887 - DNA, 25 bp, Homo sapien
tatataggtataggaagggccagaa

SEQ ID NO: 1808888 - DNA, 25 bp, Homo sapien
aaatatcccgagtattgaagtccac

SEQ ID NO: 1808889 - DNA, 25 bp, Homo sapien
ctaatccaagtgatccaattttatc

SEQ ID NO: 1808890 - DNA, 25 bp, Homo sapien
ccaagtgatccaattttatcactga

SEQ ID NO: 1808891 - DNA, 25 bp, Homo sapien
ttatcactgatcaatttcagatctt

SEQ ID NO: 1808892 - DNA, 25 bp, Homo sapien
ttttatcactgatcaatttcagatc

SEQ ID NO: 1808893 - DNA, 25 bp, Homo sapien
ccagggctcggtaatgttcacatcg

SEQ ID NO: 1808894 - DNA, 25 bp, Homo sapien
tgcctaaagtatgcctgtcacactg

SEQ ID NO: 1808895 - DNA, 25 bp, Homo sapien
tccatgtgagtgattacagaccagg

SEQ ID NO: 1808896 - DNA, 25 bp, Homo sapien
gagaacctggctgcaccgtttcctt

SEQ ID NO: 1808897 - DNA, 25 bp, Homo sapien
caaccaggacgcacaaagagcagat

SEQ ID NO: 1808898 - DNA, 25 bp, Homo sapien
cactgtgcggaacaagaatccgggc

SEQ ID NO: 1808899 - DNA, 25 bp, Homo sapien
ccgggcagctcagggaacatttatt

SEQ ID NO: 1808900 - DNA, 25 bp, Homo sapien
cagcaactcagttaccaggactcca

SEQ ID NO: 1808901 - DNA, 25 bp, Homo sapien
taaaatcatcaacatagtcatcatc

SEQ ID NO: 1808902 - DNA, 25 bp, Homo sapien
attaaaatcatcaacatagtcatca

SEQ ID NO: 1808903 - DNA, 25 bp, Homo sapien
aaatcatcaacatagtcatcatctt

SEQ ID NO: 1808904 - DNA, 25 bp, Homo sapien
ctattaaaatcatcaacatagtcat

SEQ ID NO: 1808905 - DNA, 25 bp, Homo sapien
caattcccgccacaaaaaggtatgg

SEQ ID NO: 1808906 - DNA, 25 bp, Homo sapien
gcaatcttattagggcagaccacat

SEQ ID NO: 1808907 - DNA, 25 bp, Homo sapien
cttatgacacggcaactgaactgct

SEQ ID NO: 1808908 - DNA, 25 bp, Homo sapien
tcctgaacataatgtgactgtctat

SEQ ID NO: 1808909 - DNA, 25 bp, Homo sapien
acttatctcacttttctctgagcga

SEQ ID NO: 1808910 - DNA, 25 bp, Homo sapien
ggtattgatgtcatctatttccaca

SEQ ID NO: 1808911 - DNA, 25 bp, Homo sapien
tgatgtcatctatttccacagaaag

SEQ ID NO: 1808912 - DNA, 25 bp, Homo sapien
cacagaaaggtcttcttctatctct

SEQ ID NO: 1808913 - DNA, 25 bp, Homo sapien
ttcaacccacgtcatttcacaaatc

SEQ ID NO: 1808914 - DNA, 25 bp, Homo sapien
tggcaaagggatgccacacctcctc

SEQ ID NO: 1808915 - DNA, 25 bp, Homo sapien
acacctcctcttcaacccacgtcat

SEQ ID NO: 1808916 - DNA, 25 bp, Homo sapien
caatggcaaagggatgccacacctc

SEQ ID NO: 1808917 - DNA, 25 bp, Homo sapien
gaatgcctgttctgctaagcactga

SEQ ID NO: 1808918 - DNA, 25 bp, Homo sapien
tcatggcccatgaatgactggcatt

SEQ ID NO: 1808919 - DNA, 25 bp, Homo sapien
gactggcattttatggcacctgtca

SEQ ID NO: 1808920 - DNA, 25 bp, Homo sapien
aaaatagatgtgagacccaaggccc

SEQ ID NO: 1808921 - DNA, 25 bp, Homo sapien
caaaggatccctgtgatagcaagct

SEQ ID NO: 1808922 - DNA, 25 bp, Homo sapien
tgtcccttaggaacgtgtggccctc

SEQ ID NO: 1808923 - DNA, 25 bp, Homo sapien
tgctatgcattaacagaaacctggg

SEQ ID NO: 1808924 - DNA, 25 bp, Homo sapien
gcttcatacaaatcgacgggaactt

SEQ ID NO: 1808925 - DNA, 25 bp, Homo sapien
cccgagatactgtgagatgctttta

SEQ ID NO: 1808926 - DNA, 25 bp, Homo sapien
caaggtggagtagttatggcctgca

SEQ ID NO: 1808927 - DNA, 25 bp, Homo sapien
tcttctccatgcaatggcaaggtgg

SEQ ID NO: 1808928 - DNA, 25 bp, Homo sapien
cctgggccaggtaataacgcacaag

SEQ ID NO: 1808929 - DNA, 25 bp, Homo sapien
aattgggcccggtgtgtactgctag

SEQ ID NO: 1808930 - DNA, 25 bp, Homo sapien
tcccattaataagcaggagctaagt

SEQ ID NO: 1808931 - DNA, 25 bp, Homo sapien
aaaggctcaaattgggcccggtgtg

SEQ ID NO: 1808932 - DNA, 25 bp, Homo sapien
ttagccagacaatatagcgggtgcc

SEQ ID NO: 1808933 - DNA, 25 bp, Homo sapien
cagataatccgcaacatcactgagc

SEQ ID NO: 1808934 - DNA, 25 bp, Homo sapien
gcaacatcttccagataatccgcaa

SEQ ID NO: 1808935 - DNA, 25 bp, Homo sapien
tcttccagataatccgcaacatcac

SEQ ID NO: 1808936 - DNA, 25 bp, Homo sapien
gctgggatacagtcagatcttgtgt

SEQ ID NO: 1808937 - DNA, 25 bp, Homo sapien
aatggaaccggtcagtcctctgtcc

SEQ ID NO: 1808938 - DNA, 25 bp, Homo sapien
cctctgtccttgttaattagaatac

SEQ ID NO: 1808939 - DNA, 25 bp, Homo sapien
aaaatggaaccggtcagtcctctgt

SEQ ID NO: 1808940 - DNA, 25 bp, Homo sapien
taattagaatacttccttcttcgtg

SEQ ID NO: 1808941 - DNA, 25 bp, Homo sapien
acggctttattgacacctttcatca

SEQ ID NO: 1808942 - DNA, 25 bp, Homo sapien
tgcaaggcaccaatagagagcagac

SEQ ID NO: 1808943 - DNA, 25 bp, Homo sapien
tccctgtaatgaaactgagtgtaga

SEQ ID NO: 1808944 - DNA, 25 bp, Homo sapien
gagagcagacattccagctgagtga

SEQ ID NO: 1808945 - DNA, 25 bp, Homo sapien
aaagatcacacgtaccagcagccac

SEQ ID NO: 1808946 - DNA, 25 bp, Homo sapien
tgccaactatgtgtagaaccaccta

SEQ ID NO: 1808947 - DNA, 25 bp, Homo sapien
caaaatatactatggtgggtaagct

SEQ ID NO: 1808948 - DNA, 25 bp, Homo sapien
gattccagagggctaaagccaaggt

SEQ ID NO: 1808949 - DNA, 25 bp, Homo sapien
aaaaggtctgattctctgcgtaaca

SEQ ID NO: 1808950 - DNA, 25 bp, Homo sapien
agatagcagctcacagacggagggc

SEQ ID NO: 1808951 - DNA, 25 bp, Homo sapien
caagattacatctgcacgtggtgct

SEQ ID NO: 1808952 - DNA, 25 bp, Homo sapien
gaagagaacctacgactaaagctgc

SEQ ID NO: 1808953 - DNA, 25 bp, Homo sapien
tcctcggggaaactttgtcagcctg

SEQ ID NO: 1808954 - DNA, 25 bp, Homo sapien
gaggacacttttccaatctgacttc

SEQ ID NO: 1808955 - DNA, 25 bp, Homo sapien
aggtttccttgaacctgaggacact

SEQ ID NO: 1808956 - DNA, 25 bp, Homo sapien
gcgcatcttgtcatcttggtcttct

SEQ ID NO: 1808957 - DNA, 25 bp, Homo sapien
tggggcaggagaggcgcatgggcag

SEQ ID NO: 1808958 - DNA, 25 bp, Homo sapien
gcaggagaggcgcatgggcagtagg

SEQ ID NO: 1808959 - DNA, 25 bp, Homo sapien
gggcaggagaggcgcatgggcagta

SEQ ID NO: 1808960 - DNA, 25 bp, Homo sapien
caggagaggcgcatgggcagtaggg

SEQ ID NO: 1808961 - DNA, 25 bp, Homo sapien
aatgcccgcagcagggatgaaccca

SEQ ID NO: 1808962 - DNA, 25 bp, Homo sapien
atgcccgcagcagggatgaacccat

SEQ ID NO: 1808963 - DNA, 25 bp, Homo sapien
caatgcccgcagcagggatgaaccc

SEQ ID NO: 1808964 - DNA, 25 bp, Homo sapien
ccttggtggagcaatgcccgcagca

SEQ ID NO: 1808965 - DNA, 25 bp, Homo sapien
taggtctctacagtggaggccatcc

SEQ ID NO: 1808966 - DNA, 25 bp, Homo sapien
ccccagagattgagtttcctgccag

SEQ ID NO: 1808967 - DNA, 25 bp, Homo sapien
tgccagaacttactacaaagaggtt

SEQ ID NO: 1808968 - DNA, 25 bp, Homo sapien
ttaccctgaggcagaatggtcgttg

SEQ ID NO: 1808969 - DNA, 25 bp, Homo sapien
gatgggactataggcgggcacgcac

SEQ ID NO: 1808970 - DNA, 25 bp, Homo sapien
actataggcgggcacgcactgccac

SEQ ID NO: 1808971 - DNA, 25 bp, Homo sapien
atgggactataggcgggcacgcact

SEQ ID NO: 1808972 - DNA, 25 bp, Homo sapien
gggactataggcgggcacgcactgc

SEQ ID NO: 1808973 - DNA, 25 bp, Homo sapien
tctacaggagacaaacttttgattc

SEQ ID NO: 1808974 - DNA, 25 bp, Homo sapien
aatccagccatatcaatagtaacac

SEQ ID NO: 1808975 - DNA, 25 bp, Homo sapien
tacaaattgccacagtaagagcaag

SEQ ID NO: 1808976 - DNA, 25 bp, Homo sapien
gccacaaaaacacgagacatataga

SEQ ID NO: 1808977 - DNA, 25 bp, Homo sapien
aggtggagccccctttcacacactt

SEQ ID NO: 1808978 - DNA, 25 bp, Homo sapien
ctgcacgccctatttccctcacttc

SEQ ID NO: 1808979 - DNA, 25 bp, Homo sapien
tccttccttcctgcacgccctattt

SEQ ID NO: 1808980 - DNA, 25 bp, Homo sapien
ggcccctggaaataagctcagggta

SEQ ID NO: 1808981 - DNA, 25 bp, Homo sapien
tcgagaagttctgccgccagtatag

SEQ ID NO: 1808982 - DNA, 25 bp, Homo sapien
gccgccagtatagggtcacttggtg

SEQ ID NO: 1808983 - DNA, 25 bp, Homo sapien
tttgaaatccgcaaaatcgagaagt

SEQ ID NO: 1808984 - DNA, 25 bp, Homo sapien
tccgcaaaatcgagaagttctgccg

SEQ ID NO: 1808985 - DNA, 25 bp, Homo sapien
gaagtctgtcatgaaaactatgagt

SEQ ID NO: 1808986 - DNA, 25 bp, Homo sapien
caaaacccagactgtaggcaactgc

SEQ ID NO: 1808987 - DNA, 25 bp, Homo sapien
caactgcagtaagtggaacagtatt

SEQ ID NO: 1808988 - DNA, 25 bp, Homo sapien
gaacagtatttgactatcgcaatga

SEQ ID NO: 1808989 - DNA, 25 bp, Homo sapien
tgccagaagtgttaggagtaaaaat

SEQ ID NO: 1808990 - DNA, 25 bp, Homo sapien
catccagcgagttggagaattggtt

SEQ ID NO: 1808991 - DNA, 25 bp, Homo sapien
tacgatgcatacattggaaacccca

SEQ ID NO: 1808992 - DNA, 25 bp, Homo sapien
ttgctggacacctagttggcatcca

SEQ ID NO: 1808993 - DNA, 25 bp, Homo sapien
ttgtggacatcctctatcaggttga

SEQ ID NO: 1808994 - DNA, 25 bp, Homo sapien
tacataaattggcatgataaggtgg

SEQ ID NO: 1808995 - DNA, 25 bp, Homo sapien
aatattgagccaccctagcactccc

SEQ ID NO: 1808996 - DNA, 25 bp, Homo sapien
tcctccaccatcatgttagctgtag

SEQ ID NO: 1808997 - DNA, 25 bp, Homo sapien
gcttccagccccctgttgaaagtgg

SEQ ID NO: 1808998 - DNA, 25 bp, Homo sapien
agtccagcccaacaatcttgctctg

SEQ ID NO: 1808999 - DNA, 25 bp, Homo sapien
ttcactggggtgcagatagcatctg

SEQ ID NO: 1809000 - DNA, 25 bp, Homo sapien
tcccataaggtacagttttcactgg

SEQ ID NO: 1809001 - DNA, 25 bp, Homo sapien
aacagctgcaccgtgaggaatgagg

SEQ ID NO: 1809002 - DNA, 25 bp, Homo sapien
aagggcaagccattctggaggtcac

SEQ ID NO: 1809003 - DNA, 25 bp, Homo sapien
cgagttataggactggattccagga

SEQ ID NO: 1809004 - DNA, 25 bp, Homo sapien
caagccattctggaggtcactggaa

SEQ ID NO: 1809005 - DNA, 25 bp, Homo sapien
ctttccccacatgacggtacgagtt

SEQ ID NO: 1809006 - DNA, 25 bp, Homo sapien
agatacaatctctgggtcaatgagt

SEQ ID NO: 1809007 - DNA, 25 bp, Homo sapien
tttgggtacaaggttttgagataca

SEQ ID NO: 1809008 - DNA, 25 bp, Homo sapien
tctgggtcaatgagtactttacata

SEQ ID NO: 1809009 - DNA, 25 bp, Homo sapien
tacaatctctgggtcaatgagtact

SEQ ID NO: 1809010 - DNA, 25 bp, Homo sapien
caggcattgtgcacagctagaggag

SEQ ID NO: 1809011 - DNA, 25 bp, Homo sapien
ttaggatggcctcaacggaagccca

SEQ ID NO: 1809012 - DNA, 25 bp, Homo sapien
tgtaagacctttcgaggctggctcg

SEQ ID NO: 1809013 - DNA, 25 bp, Homo sapien
tattgagaaccgctggcgcgaagcg

SEQ ID NO: 1809014 - DNA, 25 bp, Homo sapien
cacttcagactaacatgcttcaagc

SEQ ID NO: 1809015 - DNA, 25 bp, Homo sapien
tgatataagtccctgtcacagataa

SEQ ID NO: 1809016 - DNA, 25 bp, Homo sapien
tattgccaaaacaacactgcccgag

SEQ ID NO: 1809017 - DNA, 25 bp, Homo sapien
ttcaagcactctgtagtcacacatg

SEQ ID NO: 1809018 - DNA, 25 bp, Homo sapien
tccacacccagatcggtcctgggaa

SEQ ID NO: 1809019 - DNA, 25 bp, Homo sapien
tgaggagcagcgcagcaggagtaag

SEQ ID NO: 1809020 - DNA, 25 bp, Homo sapien
caggagtaaggtccagggtggagcg

SEQ ID NO: 1809021 - DNA, 25 bp, Homo sapien
aattgttagaataacgtgccccaca

SEQ ID NO: 1809022 - DNA, 25 bp, Homo sapien
taaatgtcagactttgaaaaggttg

SEQ ID NO: 1809023 - DNA, 25 bp, Homo sapien
acacgtgggccctctcttactgatg

SEQ ID NO: 1809024 - DNA, 25 bp, Homo sapien
tctgttcaccagcatatacacgtgg

SEQ ID NO: 1809025 - DNA, 25 bp, Homo sapien
tctcttactgatgaccacagagtcc

SEQ ID NO: 1809026 - DNA, 25 bp, Homo sapien
caacatctagagggcgctgggcgct

SEQ ID NO: 1809027 - DNA, 25 bp, Homo sapien
tctgcaacatctagagggcgctggg

SEQ ID NO: 1809028 - DNA, 25 bp, Homo sapien
ctgcaacatctagagggcgctgggc

SEQ ID NO: 1809029 - DNA, 25 bp, Homo sapien
cttctgcaacatctagagggcgctg

SEQ ID NO: 1809030 - DNA, 25 bp, Homo sapien
gggctggttgcctttacttcgagag

SEQ ID NO: 1809031 - DNA, 25 bp, Homo sapien
gctggttgcctttacttcgagagct

SEQ ID NO: 1809032 - DNA, 25 bp, Homo sapien
cctgggctggttgcctttacttcga

SEQ ID NO: 1809033 - DNA, 25 bp, Homo sapien
agcctgggctggttgcctttacttc

SEQ ID NO: 1809034 - DNA, 25 bp, Homo sapien
gggttgctgtgaaccacgtctcagg

SEQ ID NO: 1809035 - DNA, 25 bp, Homo sapien
tgggttgctgtgaaccacgtctcag

SEQ ID NO: 1809036 - DNA, 25 bp, Homo sapien
caagccgactgggaagatttgggaa

SEQ ID NO: 1809037 - DNA, 25 bp, Homo sapien
gatttgggaacgtttgcaagaggcc

SEQ ID NO: 1809038 - DNA, 25 bp, Homo sapien
tctgcaagccgactgggaagatttg

SEQ ID NO: 1809039 - DNA, 25 bp, Homo sapien
ccgtgtgagttaaagacatgggccg

SEQ ID NO: 1809040 - DNA, 25 bp, Homo sapien
gcggtgagctactagaattgcccaa

SEQ ID NO: 1809041 - DNA, 25 bp, Homo sapien
ggttaaccatgtatatcctgtaggg

SEQ ID NO: 1809042 - DNA, 25 bp, Homo sapien
tattgagtaatcgtaggatccctgg

SEQ ID NO: 1809043 - DNA, 25 bp, Homo sapien
gaggcattgaactccccagaggaag

SEQ ID NO: 1809044 - DNA, 25 bp, Homo sapien
ttcagcctcactccgggccccacaa

SEQ ID NO: 1809045 - DNA, 25 bp, Homo sapien
atgtgatgaccatctgtcaataaga

SEQ ID NO: 1809046 - DNA, 25 bp, Homo sapien
gaccatctgtcaataagatgcagct

SEQ ID NO: 1809047 - DNA, 25 bp, Homo sapien
cgggccccacaatctgatgactcca

SEQ ID NO: 1809048 - DNA, 25 bp, Homo sapien
ggatttaaggccgtgttcagttctc

SEQ ID NO: 1809049 - DNA, 25 bp, Homo sapien
taaggccgtgttcagttctccaaac

SEQ ID NO: 1809050 - DNA, 25 bp, Homo sapien
tttaaggccgtgttcagttctccaa

SEQ ID NO: 1809051 - DNA, 25 bp, Homo sapien
tataggatttaaggccgtgttcagt

SEQ ID NO: 1809052 - DNA, 25 bp, Homo sapien
atagagcgcggaggcaccggacaca

SEQ ID NO: 1809053 - DNA, 25 bp, Homo sapien
caccgtggtcactaaggctttccaa

SEQ ID NO: 1809054 - DNA, 25 bp, Homo sapien
ctctgggtactctccaccgtggtca

SEQ ID NO: 1809055 - DNA, 25 bp, Homo sapien
ggctttccaacccaataatagatag

SEQ ID NO: 1809056 - DNA, 25 bp, Homo sapien
cacgtgttaggtataaacaatgtac

SEQ ID NO: 1809057 - DNA, 25 bp, Homo sapien
tcaggattctccataaaaacggtgg

SEQ ID NO: 1809058 - DNA, 25 bp, Homo sapien
caggttcacctgtatgccagccaca

SEQ ID NO: 1809059 - DNA, 25 bp, Homo sapien
gtctcttaggatggtgttttgcacg

SEQ ID NO: 1809060 - DNA, 25 bp, Homo sapien
tataacggttccatgctagcagtca

SEQ ID NO: 1809061 - DNA, 25 bp, Homo sapien
ttgagcttcaaaaggctgccaggta

SEQ ID NO: 1809062 - DNA, 25 bp, Homo sapien
taactcttggtgaacagaaggccag

SEQ ID NO: 1809063 - DNA, 25 bp, Homo sapien
agtcatcacgagatgcaccccagaa

SEQ ID NO: 1809064 - DNA, 25 bp, Homo sapien
gacgtcccccagtaaaatccatggc

SEQ ID NO: 1809065 - DNA, 25 bp, Homo sapien
gatattgacgttggatgtgcttccc

SEQ ID NO: 1809066 - DNA, 25 bp, Homo sapien
catcctgtttattaacacgccctgg

SEQ ID NO: 1809067 - DNA, 25 bp, Homo sapien
ggcctgaaacgctctgatattgacg

SEQ ID NO: 1809068 - DNA, 25 bp, Homo sapien
aacccttcgctattctcaggctcac

SEQ ID NO: 1809069 - DNA, 25 bp, Homo sapien
aaaaacccttcgctattctcaggct

SEQ ID NO: 1809070 - DNA, 25 bp, Homo sapien
gaaaaacccttcgctattctcaggc

SEQ ID NO: 1809071 - DNA, 25 bp, Homo sapien
aaacccttcgctattctcaggctca

SEQ ID NO: 1809072 - DNA, 25 bp, Homo sapien
cagtggcggtgcatgggtccaggct

SEQ ID NO: 1809073 - DNA, 25 bp, Homo sapien
cctgaggacgaagggctttgaaatc

SEQ ID NO: 1809074 - DNA, 25 bp, Homo sapien
tccaggctgaagaagtttagcagga

SEQ ID NO: 1809075 - DNA, 25 bp, Homo sapien
gagcggttgtggagcgcctgaggac

SEQ ID NO: 1809076 - DNA, 25 bp, Homo sapien
cacaagcatgaatctgctgtggcag

SEQ ID NO: 1809077 - DNA, 25 bp, Homo sapien
gtagacattccaggtcacaagcatg

SEQ ID NO: 1809078 - DNA, 25 bp, Homo sapien
ggtcacaagcatgaatctgctgtgg

SEQ ID NO: 1809079 - DNA, 25 bp, Homo sapien
tgcttctccacagccgcagaccttt

SEQ ID NO: 1809080 - DNA, 25 bp, Homo sapien
ggagtgtatggttcagccccttcag

SEQ ID NO: 1809081 - DNA, 25 bp, Homo sapien
tagaaaaaggagtgtatggttcagc

SEQ ID NO: 1809082 - DNA, 25 bp, Homo sapien
aaaaggagtgtatggttcagcccct

SEQ ID NO: 1809083 - DNA, 25 bp, Homo sapien
aggcagcggtagcaggaaagtagag

SEQ ID NO: 1809084 - DNA, 25 bp, Homo sapien
cagaatcaactgagtaatatgaagt

SEQ ID NO: 1809085 - DNA, 25 bp, Homo sapien
tattgactgacacaaaataatcttc

SEQ ID NO: 1809086 - DNA, 25 bp, Homo sapien
tgcaaggagcacagtaacatctcag

SEQ ID NO: 1809087 - DNA, 25 bp, Homo sapien
tcttcactggagtcgaaaacatcgc

SEQ ID NO: 1809088 - DNA, 25 bp, Homo sapien
tcggagccggaatgacttagtcgcc

SEQ ID NO: 1809089 - DNA, 25 bp, Homo sapien
caattagcttttcgctctggcagga

SEQ ID NO: 1809090 - DNA, 25 bp, Homo sapien
tcaggagcagcatcccgcagttaaa

SEQ ID NO: 1809091 - DNA, 25 bp, Homo sapien
tagaattctgagcttgcaccaaggt

SEQ ID NO: 1809092 - DNA, 25 bp, Homo sapien
ggcggatatataccctagagctaca

SEQ ID NO: 1809093 - DNA, 25 bp, Homo sapien
cgttaagtcccgcaggagagaggct

SEQ ID NO: 1809094 - DNA, 25 bp, Homo sapien
tatgtttcacacatgccttagggag

SEQ ID NO: 1809095 - DNA, 25 bp, Homo sapien
cacagcccatgagcacgttaagtcc

SEQ ID NO: 1809096 - DNA, 25 bp, Homo sapien
tgtttgctggaactccgctaggcac

SEQ ID NO: 1809097 - DNA, 25 bp, Homo sapien
catagcactctcagcttaatggacg

SEQ ID NO: 1809098 - DNA, 25 bp, Homo sapien
taatggacgtttagacaagagacac

SEQ ID NO: 1809099 - DNA, 25 bp, Homo sapien
gacagtttcctaatggcccactaca

SEQ ID NO: 1809100 - DNA, 25 bp, Homo sapien
gatttctagagtcaaacgctaacag

SEQ ID NO: 1809101 - DNA, 25 bp, Homo sapien
tgagagtgtcaggttaccatggcac

SEQ ID NO: 1809102 - DNA, 25 bp, Homo sapien
gatcacaccaaaagaagtgtctggg

SEQ ID NO: 1809103 - DNA, 25 bp, Homo sapien
ggcacctgttttgatgcccaagaca

SEQ ID NO: 1809104 - DNA, 25 bp, Homo sapien
gaggagagcaaagcccactgcccgg

SEQ ID NO: 1809105 - DNA, 25 bp, Homo sapien
agaagggctcgtgctacctgcagga

SEQ ID NO: 1809106 - DNA, 25 bp, Homo sapien
gaggcagctgagaggcgtctgctgc

SEQ ID NO: 1809107 - DNA, 25 bp, Homo sapien
gggaggagagcaaagcccactgccc

SEQ ID NO: 1809108 - DNA, 25 bp, Homo sapien
tgagtgccaggtagaggcggctgtc

SEQ ID NO: 1809109 - DNA, 25 bp, Homo sapien
gagatgagtgccaggtagaggcggc

SEQ ID NO: 1809110 - DNA, 25 bp, Homo sapien
agtgccaggtagaggcggctgtccc

SEQ ID NO: 1809111 - DNA, 25 bp, Homo sapien
ccagagatgagtgccaggtagaggc

SEQ ID NO: 1809112 - DNA, 25 bp, Homo sapien
cgagacaagcctggaacagtgatgt

SEQ ID NO: 1809113 - DNA, 25 bp, Homo sapien
gacaagcctggaacagtgatgttca

SEQ ID NO: 1809114 - DNA, 25 bp, Homo sapien
agtgatgttcatgctgtagattgga

SEQ ID NO: 1809115 - DNA, 25 bp, Homo sapien
acagtgatgttcatgctgtagattg

SEQ ID NO: 1809116 - DNA, 25 bp, Homo sapien
caaacggtcacaaaatccaggcacc

SEQ ID NO: 1809117 - DNA, 25 bp, Homo sapien
ggccaccaaacggtcacaaaatcca

SEQ ID NO: 1809118 - DNA, 25 bp, Homo sapien
gctccacagcatgatcatgtagtaa

SEQ ID NO: 1809119 - DNA, 25 bp, Homo sapien
agtgaaatgctccacagcatgatca

SEQ ID NO: 1809120 - DNA, 25 bp, Homo sapien
ggtggaaactttcagaaacatctta

SEQ ID NO: 1809121 - DNA, 25 bp, Homo sapien
tggtggaaactttcagaaacatctt

SEQ ID NO: 1809122 - DNA, 25 bp, Homo sapien
ctggtggaaactttcagaaacatct

SEQ ID NO: 1809123 - DNA, 25 bp, Homo sapien
gtggaaactttcagaaacatcttac

SEQ ID NO: 1809124 - DNA, 25 bp, Homo sapien
ctttgtcactgaaatcgcaggttag

SEQ ID NO: 1809125 - DNA, 25 bp, Homo sapien
tgaaatcgcaggttagaggacaagt

SEQ ID NO: 1809126 - DNA, 25 bp, Homo sapien
cactgaaatcgcaggttagaggaca

SEQ ID NO: 1809127 - DNA, 25 bp, Homo sapien
tgtcactgaaatcgcaggttagagg

SEQ ID NO: 1809128 - DNA, 25 bp, Homo sapien
agtttcttttctcccgtgactcact

SEQ ID NO: 1809129 - DNA, 25 bp, Homo sapien
gctgccaatagcaagttccagtttc

SEQ ID NO: 1809130 - DNA, 25 bp, Homo sapien
tcaggaccacgactgttttgctgcc

SEQ ID NO: 1809131 - DNA, 25 bp, Homo sapien
cacgactgttttgctgccaatagca

SEQ ID NO: 1809132 - DNA, 25 bp, Homo sapien
gctggaagttgtgatgtcctcgagt

SEQ ID NO: 1809133 - DNA, 25 bp, Homo sapien
tcagtcatctctacaagttggggaa

SEQ ID NO: 1809134 - DNA, 25 bp, Homo sapien
tttctcagtcatctctacaagttgg

SEQ ID NO: 1809135 - DNA, 25 bp, Homo sapien
ctggaagttgtgatgtcctcgagtt

SEQ ID NO: 1809136 - DNA, 25 bp, Homo sapien
gagagcagccgacggttccaacgga

SEQ ID NO: 1809137 - DNA, 25 bp, Homo sapien
gaccagagagcagccgacggttcca

SEQ ID NO: 1809138 - DNA, 25 bp, Homo sapien
agcagccgacggttccaacggactt

SEQ ID NO: 1809139 - DNA, 25 bp, Homo sapien
ctggtccccgccagtcacttctgct

SEQ ID NO: 1809140 - DNA, 25 bp, Homo sapien
ccaaacttgtgaccccctcagtctg

SEQ ID NO: 1809141 - DNA, 25 bp, Homo sapien
agtgggcaagggtccgcggtcctca

SEQ ID NO: 1809142 - DNA, 25 bp, Homo sapien
tctttcccgctcctccgaggggata

SEQ ID NO: 1809143 - DNA, 25 bp, Homo sapien
ggcaagggtccgcggtcctcacagc

SEQ ID NO: 1809144 - DNA, 25 bp, Homo sapien
cagtaaccggatccctggctgttcc

SEQ ID NO: 1809145 - DNA, 25 bp, Homo sapien
cggcatctccccggcattgctgtcc

SEQ ID NO: 1809146 - DNA, 25 bp, Homo sapien
gcatctccccggcattgctgtcctc

SEQ ID NO: 1809147 - DNA, 25 bp, Homo sapien
atctccccggcattgctgtcctccc

SEQ ID NO: 1809148 - DNA, 25 bp, Homo sapien
tctccccggcattgctgtcctccct

SEQ ID NO: 1809149 - DNA, 25 bp, Homo sapien
tccatatgactctggagttttctgt

SEQ ID NO: 1809150 - DNA, 25 bp, Homo sapien
cacagcgactgctgtctcccgagct

SEQ ID NO: 1809151 - DNA, 25 bp, Homo sapien
ctgtgaatatcagcccacagcgact

SEQ ID NO: 1809152 - DNA, 25 bp, Homo sapien
gttttctgtgaatatcagcccacag

SEQ ID NO: 1809153 - DNA, 25 bp, Homo sapien
gaaatggagctgatggaaagatagc

SEQ ID NO: 1809154 - DNA, 25 bp, Homo sapien
tacacgacgcaaatgatacaaaaac

SEQ ID NO: 1809155 - DNA, 25 bp, Homo sapien
ccacctggaacgtgagagataccac

SEQ ID NO: 1809156 - DNA, 25 bp, Homo sapien
ggtgagatgcctgatgtatccagtt

SEQ ID NO: 1809157 - DNA, 25 bp, Homo sapien
ctgggagaaccgaccacagagcagg

SEQ ID NO: 1809158 - DNA, 25 bp, Homo sapien
tgggagaaccgaccacagagcaggc

SEQ ID NO: 1809159 - DNA, 25 bp, Homo sapien
cacagagcaggctcctctggaatgt

SEQ ID NO: 1809160 - DNA, 25 bp, Homo sapien
agagcaggctcctctggaatgtatt

SEQ ID NO: 1809161 - DNA, 25 bp, Homo sapien
ataaacccgctttctttctgaggca

SEQ ID NO: 1809162 - DNA, 25 bp, Homo sapien
tgagaggataaacccgctttctttc

SEQ ID NO: 1809163 - DNA, 25 bp, Homo sapien
gacggaggaacagcctgcccggctt

SEQ ID NO: 1809164 - DNA, 25 bp, Homo sapien
ctctgacggaggaacagcctgcccg

SEQ ID NO: 1809165 - DNA, 25 bp, Homo sapien
gtggttagatgaccatctttgtccc

SEQ ID NO: 1809166 - DNA, 25 bp, Homo sapien
agtggttagatgaccatctttgtcc

SEQ ID NO: 1809167 - DNA, 25 bp, Homo sapien
aggagctaagtggttagatgaccat

SEQ ID NO: 1809168 - DNA, 25 bp, Homo sapien
gctaagtggttagatgaccatcttt

SEQ ID NO: 1809169 - DNA, 25 bp, Homo sapien
gccatggcatgtggcgagagcgcca

SEQ ID NO: 1809170 - DNA, 25 bp, Homo sapien
tggaatctgccctacagcaggaagt

SEQ ID NO: 1809171 - DNA, 25 bp, Homo sapien
tttgaaaggcatgcacccatgtcct

SEQ ID NO: 1809172 - DNA, 25 bp, Homo sapien
ctgtggtttaggatcttgtttgaaa

SEQ ID NO: 1809173 - DNA, 25 bp, Homo sapien
cccgtctttctgcaccgggagtcgg

SEQ ID NO: 1809174 - DNA, 25 bp, Homo sapien
tttctgcaccgggagtcggccttcc

SEQ ID NO: 1809175 - DNA, 25 bp, Homo sapien
gggagtcggccttccagtgggtgct

SEQ ID NO: 1809176 - DNA, 25 bp, Homo sapien
tgtcttgacgtctcccgggaggact

SEQ ID NO: 1809177 - DNA, 25 bp, Homo sapien
tttaaagactctgcagaaatatacc

SEQ ID NO: 1809178 - DNA, 25 bp, Homo sapien
atcttcagccatccacaatttccag

SEQ ID NO: 1809179 - DNA, 25 bp, Homo sapien
ctgagctcagcactacaaggtagat

SEQ ID NO: 1809180 - DNA, 25 bp, Homo sapien
tagagtgacccaggtttccgaggtc

SEQ ID NO: 1809181 - DNA, 25 bp, Homo sapien
agacttcgggaagatggatgcataa

SEQ ID NO: 1809182 - DNA, 25 bp, Homo sapien
gtctgctcctgcagcgtggcggcct

SEQ ID NO: 1809183 - DNA, 25 bp, Homo sapien
cagcaactccggctgctgccgtctg

SEQ ID NO: 1809184 - DNA, 25 bp, Homo sapien
gtgattttctgccaccggagttttg

SEQ ID NO: 1809185 - DNA, 25 bp, Homo sapien
cattttctggcagtaacgtgaggaa

SEQ ID NO: 1809186 - DNA, 25 bp, Homo sapien
agacagtgtcgggtttggccctaca

SEQ ID NO: 1809187 - DNA, 25 bp, Homo sapien
tcctgcggggtttgtgaagctgcta

SEQ ID NO: 1809188 - DNA, 25 bp, Homo sapien
actctaccaggggtactgttggctc

SEQ ID NO: 1809189 - DNA, 25 bp, Homo sapien
ccccaccccgtagaggagcgcagag

SEQ ID NO: 1809190 - DNA, 25 bp, Homo sapien
ttccccaccccgtagaggagcgcag

SEQ ID NO: 1809191 - DNA, 25 bp, Homo sapien
cccaccccgtagaggagcgcagagg

SEQ ID NO: 1809192 - DNA, 25 bp, Homo sapien
tccccaccccgtagaggagcgcaga

SEQ ID NO: 1809193 - DNA, 25 bp, Homo sapien
aggttgtgcaagacaaggcctccag

SEQ ID NO: 1809194 - DNA, 25 bp, Homo sapien
gcaagtaactaaagtctggtctggg

SEQ ID NO: 1809195 - DNA, 25 bp, Homo sapien
cttatgggacctatgaagggacagg

SEQ ID NO: 1809196 - DNA, 25 bp, Homo sapien
aggcctccagttctgcccggcagca

SEQ ID NO: 1809197 - DNA, 25 bp, Homo sapien
cttgaacgcggctgagaaatccgcc

SEQ ID NO: 1809198 - DNA, 25 bp, Homo sapien
ccaggacgaaaaggtcaccttctca

SEQ ID NO: 1809199 - DNA, 25 bp, Homo sapien
gggaagatgcaaccatctcatgaca

SEQ ID NO: 1809200 - DNA, 25 bp, Homo sapien
tctgttcttgttgagaagatgggaa

SEQ ID NO: 1809201 - DNA, 25 bp, Homo sapien
tcatgacaccggctccgaatctcac

SEQ ID NO: 1809202 - DNA, 25 bp, Homo sapien
ggcccctagctagggcttagaagta

SEQ ID NO: 1809203 - DNA, 25 bp, Homo sapien
gctagggcttagaagtatgtttgct

SEQ ID NO: 1809204 - DNA, 25 bp, Homo sapien
ccttcgagtctattaatgtcaactg

SEQ ID NO: 1809205 - DNA, 25 bp, Homo sapien
gctattcttgccttcgagtctatta

SEQ ID NO: 1809206 - DNA, 25 bp, Homo sapien
gccacaatgacaactgccacattta

SEQ ID NO: 1809207 - DNA, 25 bp, Homo sapien
ggccacaatgacaactgccacattt

SEQ ID NO: 1809208 - DNA, 25 bp, Homo sapien
taatcctaatctcccatggtctcca

SEQ ID NO: 1809209 - DNA, 25 bp, Homo sapien
ctgcagaaagagcataatcctaatc

SEQ ID NO: 1809210 - DNA, 25 bp, Homo sapien
cactgcagtatgaggcgggagaaat

SEQ ID NO: 1809211 - DNA, 25 bp, Homo sapien
ctccatgaacactgcagtatgaggc

SEQ ID NO: 1809212 - DNA, 25 bp, Homo sapien
tttcatcttagtgtccatggcctgt

SEQ ID NO: 1809213 - DNA, 25 bp, Homo sapien
ttttcatcttagtgtccatggcctg

SEQ ID NO: 1809214 - DNA, 25 bp, Homo sapien
cctttttcatcttagtgtccatggc

SEQ ID NO: 1809215 - DNA, 25 bp, Homo sapien
tttttcatcttagtgtccatggcct

SEQ ID NO: 1809216 - DNA, 25 bp, Homo sapien
cccatgtcctgtctggagggagcgg

SEQ ID NO: 1809217 - DNA, 25 bp, Homo sapien
ccatgtcctgtctggagggagcggc

SEQ ID NO: 1809218 - DNA, 25 bp, Homo sapien
tgagtcaatgccgaccaccgccacc

SEQ ID NO: 1809219 - DNA, 25 bp, Homo sapien
accaccgccaccttgacgcgtcctt

SEQ ID NO: 1809220 - DNA, 25 bp, Homo sapien
accttgacgcgtccttccggaactg

SEQ ID NO: 1809221 - DNA, 25 bp, Homo sapien
tgacgcgtccttccggaactgagct

SEQ ID NO: 1809222 - DNA, 25 bp, Homo sapien
tcatcccaataatcatcaagtccaa

SEQ ID NO: 1809223 - DNA, 25 bp, Homo sapien
taatcatcaagtccaagctcaggct

SEQ ID NO: 1809224 - DNA, 25 bp, Homo sapien
tcccaataatcatcaagtccaagct

SEQ ID NO: 1809225 - DNA, 25 bp, Homo sapien
atcaagtccaagctcaggctcctcg

SEQ ID NO: 1809226 - DNA, 25 bp, Homo sapien
ctggatttaatctagtaaagtcctt

SEQ ID NO: 1809227 - DNA, 25 bp, Homo sapien
tggatttaatctagtaaagtccttc

SEQ ID NO: 1809228 - DNA, 25 bp, Homo sapien
gggttaggtcgtgcacactgtctga

SEQ ID NO: 1809229 - DNA, 25 bp, Homo sapien
agggttaggtcgtgcacactgtctg

SEQ ID NO: 1809230 - DNA, 25 bp, Homo sapien
ggttaggtcgtgcacactgtctgag

SEQ ID NO: 1809231 - DNA, 25 bp, Homo sapien
gttaggtcgtgcacactgtctgagc

SEQ ID NO: 1809232 - DNA, 25 bp, Homo sapien
gcagaatgcagtttttcagtgtatg

SEQ ID NO: 1809233 - DNA, 25 bp, Homo sapien
cagtttttcagtgtatgttacattg

SEQ ID NO: 1809234 - DNA, 25 bp, Homo sapien
ctgcagaatgcagtttttcagtgta

SEQ ID NO: 1809235 - DNA, 25 bp, Homo sapien
tgcagtttttcagtgtatgttacat

SEQ ID NO: 1809236 - DNA, 25 bp, Homo sapien
tcactgtcccattgggaaacacgat

SEQ ID NO: 1809237 - DNA, 25 bp, Homo sapien
actgtcccattgggaaacacgattt

SEQ ID NO: 1809238 - DNA, 25 bp, Homo sapien
ctgtcccattgggaaacacgatttc

SEQ ID NO: 1809239 - DNA, 25 bp, Homo sapien
cactgtcccattgggaaacacgatt

SEQ ID NO: 1809240 - DNA, 25 bp, Homo sapien
tcaggaaataaggtctcttcctgtc

SEQ ID NO: 1809241 - DNA, 25 bp, Homo sapien
catcaggaaataaggtctcttcctg

SEQ ID NO: 1809242 - DNA, 25 bp, Homo sapien
atcaggaaataaggtctcttcctgt

SEQ ID NO: 1809243 - DNA, 25 bp, Homo sapien
tgacagccgctgcaatacacagtct

SEQ ID NO: 1809244 - DNA, 25 bp, Homo sapien
ggtggctctccaagatcatttaggg

SEQ ID NO: 1809245 - DNA, 25 bp, Homo sapien
tcgtccaggacgacatttccagctt

SEQ ID NO: 1809246 - DNA, 25 bp, Homo sapien
cagtcttgacggtgccatccgggta

SEQ ID NO: 1809247 - DNA, 25 bp, Homo sapien
ctttggcctttggcaggtcagccct

SEQ ID NO: 1809248 - DNA, 25 bp, Homo sapien
tctttggcctttggcaggtcagccc

SEQ ID NO: 1809249 - DNA, 25 bp, Homo sapien
tttggcctttggcaggtcagccctg

SEQ ID NO: 1809250 - DNA, 25 bp, Homo sapien
ggctgagagaaagacccagaatccc

SEQ ID NO: 1809251 - DNA, 25 bp, Homo sapien
gggctgagagaaagacccagaatcc

SEQ ID NO: 1809252 - DNA, 25 bp, Homo sapien
gctgagagaaagacccagaatccca

SEQ ID NO: 1809253 - DNA, 25 bp, Homo sapien
ggcgttatctcgcttgaggacagag

SEQ ID NO: 1809254 - DNA, 25 bp, Homo sapien
gttatctcgcttgaggacagagttc

SEQ ID NO: 1809255 - DNA, 25 bp, Homo sapien
tggacataatttactatcactgtgt

SEQ ID NO: 1809256 - DNA, 25 bp, Homo sapien
tttggacataatttactatcactgt

SEQ ID NO: 1809257 - DNA, 25 bp, Homo sapien
gggaccactgaaaagaggcggtcat

SEQ ID NO: 1809258 - DNA, 25 bp, Homo sapien
ggcacagtggcttctcaagggacca

SEQ ID NO: 1809259 - DNA, 25 bp, Homo sapien
ggcttctcaagggaccactgaaaag

SEQ ID NO: 1809260 - DNA, 25 bp, Homo sapien
aagcggcacagtggcttctcaaggg

SEQ ID NO: 1809261 - DNA, 25 bp, Homo sapien
tcaggtggtgccttcaaatcctttg

SEQ ID NO: 1809262 - DNA, 25 bp, Homo sapien
aggtggtgccttcaaatcctttgta

SEQ ID NO: 1809263 - DNA, 25 bp, Homo sapien
ggtgccttcaaatcctttgtagagg

SEQ ID NO: 1809264 - DNA, 25 bp, Homo sapien
ggtggtgccttcaaatcctttgtag

SEQ ID NO: 1809265 - DNA, 25 bp, Homo sapien
ccagcgacaggatgctacttagaca

SEQ ID NO: 1809266 - DNA, 25 bp, Homo sapien
gttccagggctatctgacaagcaag

SEQ ID NO: 1809267 - DNA, 25 bp, Homo sapien
gagacctcgccttctcagggtggca

SEQ ID NO: 1809268 - DNA, 25 bp, Homo sapien
gtcaccctgagagttgtaatcccca

SEQ ID NO: 1809269 - DNA, 25 bp, Homo sapien
ttctttcttgcaggacgttgacaaa

SEQ ID NO: 1809270 - DNA, 25 bp, Homo sapien
ggagccatcgctgacgttcttgcct

SEQ ID NO: 1809271 - DNA, 25 bp, Homo sapien
tacgggagagctaccggcttctagg

SEQ ID NO: 1809272 - DNA, 25 bp, Homo sapien
tgcttcccagcgtcctacgggagag

SEQ ID NO: 1809273 - DNA, 25 bp, Homo sapien
gaaaaccaaaatgaggtgctcgtgt

SEQ ID NO: 1809274 - DNA, 25 bp, Homo sapien
gaggtgctcgtgttgctaagatgaa

SEQ ID NO: 1809275 - DNA, 25 bp, Homo sapien
cggctacccacattatttttcttca

SEQ ID NO: 1809276 - DNA, 25 bp, Homo sapien
ttgctaagatgaagcccggctaccc

SEQ ID NO: 1809277 - DNA, 25 bp, Homo sapien
cactgcacctccgtgaatcacttaa

SEQ ID NO: 1809278 - DNA, 25 bp, Homo sapien
gaaagcttgtcctggcattatgggt

SEQ ID NO: 1809279 - DNA, 25 bp, Homo sapien
aacctgtggctacatggaaccttcg

SEQ ID NO: 1809280 - DNA, 25 bp, Homo sapien
cattatgggttctagaaggcctgct

SEQ ID NO: 1809281 - DNA, 25 bp, Homo sapien
ccaaataggctaggctcttctgcca

SEQ ID NO: 1809282 - DNA, 25 bp, Homo sapien
tcattcacaccaaataggctaggct

SEQ ID NO: 1809283 - DNA, 25 bp, Homo sapien
agagatagaaggtatcacctgagtg

SEQ ID NO: 1809284 - DNA, 25 bp, Homo sapien
tcacctgagtgtctttcattcacac

SEQ ID NO: 1809285 - DNA, 25 bp, Homo sapien
tctgtcacacgtatgttattctggg

SEQ ID NO: 1809286 - DNA, 25 bp, Homo sapien
tctcaggatctctgggtcactagtg

SEQ ID NO: 1809287 - DNA, 25 bp, Homo sapien
aactcagtggtgtataggaccatgc

SEQ ID NO: 1809288 - DNA, 25 bp, Homo sapien
ggtgatccacgcaggttcatctggg

SEQ ID NO: 1809289 - DNA, 25 bp, Homo sapien
tctgtgctctgggtcggacacacgg

SEQ ID NO: 1809290 - DNA, 25 bp, Homo sapien
tgtgcatccggagacaaagctcgtg

SEQ ID NO: 1809291 - DNA, 25 bp, Homo sapien
gggacactcggttccactgaaaagc

SEQ ID NO: 1809292 - DNA, 25 bp, Homo sapien
gcttaatcggatccactgtgctgca

SEQ ID NO: 1809293 - DNA, 25 bp, Homo sapien
ggaaacttgattgtgggcaaagact

SEQ ID NO: 1809294 - DNA, 25 bp, Homo sapien
tggaaacttgattgtgggcaaagac

SEQ ID NO: 1809295 - DNA, 25 bp, Homo sapien
aatggaaacttgattgtgggcaaag

SEQ ID NO: 1809296 - DNA, 25 bp, Homo sapien
aaacttgattgtgggcaaagactta

SEQ ID NO: 1809297 - DNA, 25 bp, Homo sapien
agggtaagtcctgtattgcttctga

SEQ ID NO: 1809298 - DNA, 25 bp, Homo sapien
gactcagcagaggtgacattagggt

SEQ ID NO: 1809299 - DNA, 25 bp, Homo sapien
cagaggtgacattagggtaagtcct

SEQ ID NO: 1809300 - DNA, 25 bp, Homo sapien
attccccggcgtggactcagcagag

SEQ ID NO: 1809301 - DNA, 25 bp, Homo sapien
gagtgtcagcgtgcgttcctttgtc

SEQ ID NO: 1809302 - DNA, 25 bp, Homo sapien
tgggagtgtcagcgtgcgttccttt

SEQ ID NO: 1809303 - DNA, 25 bp, Homo sapien
tcatgtgggagtgtcagcgtgcgtt

SEQ ID NO: 1809304 - DNA, 25 bp, Homo sapien
gtgtcagcgtgcgttcctttgtcaa

SEQ ID NO: 1809305 - DNA, 25 bp, Homo sapien
cctgaatggctgatgcaagacggca

SEQ ID NO: 1809306 - DNA, 25 bp, Homo sapien
tatgccgcgccatgaaacctgaact

SEQ ID NO: 1809307 - DNA, 25 bp, Homo sapien
gaaaccaggcagtttcaggccacag

SEQ ID NO: 1809308 - DNA, 25 bp, Homo sapien
cagacaagtttatccagagctggac

SEQ ID NO: 1809309 - DNA, 25 bp, Homo sapien
ctggagatgatggcacggaagggca

SEQ ID NO: 1809310 - DNA, 25 bp, Homo sapien
cctttcattaatcctggagatgatg

SEQ ID NO: 1809311 - DNA, 25 bp, Homo sapien
gctctttcttaactctggccctcag

SEQ ID NO: 1809312 - DNA, 25 bp, Homo sapien
ttctcgctctttcttaactctggcc

SEQ ID NO: 1809313 - DNA, 25 bp, Homo sapien
gactggtgctgtgtgggccagcggc

SEQ ID NO: 1809314 - DNA, 25 bp, Homo sapien
ttgggactggtgctgtgtgggccag

SEQ ID NO: 1809315 - DNA, 25 bp, Homo sapien
tgttgggactggtgctgtgtgggcc

SEQ ID NO: 1809316 - DNA, 25 bp, Homo sapien
ctggtgctgtgtgggccagcggcca

SEQ ID NO: 1809317 - DNA, 25 bp, Homo sapien
tagaggtgtgttagtcattaagact

SEQ ID NO: 1809318 - DNA, 25 bp, Homo sapien
agaaaccaattgaggcatgggaaaa

SEQ ID NO: 1809319 - DNA, 25 bp, Homo sapien
gctagaggtgaaatgttagaggtgt

SEQ ID NO: 1809320 - DNA, 25 bp, Homo sapien
caattgaggcatgggaaaaacaatc

SEQ ID NO: 1809321 - DNA, 25 bp, Homo sapien
agtgaacacgtaaatttgtagctcc

SEQ ID NO: 1809322 - DNA, 25 bp, Homo sapien
gatcaatcaccagtgaacacgtaaa

SEQ ID NO: 1809323 - DNA, 25 bp, Homo sapien
atgaaaagatcaatcaccagtgaac

SEQ ID NO: 1809324 - DNA, 25 bp, Homo sapien
tcaccagtgaacacgtaaatttgta

SEQ ID NO: 1809325 - DNA, 25 bp, Homo sapien
ctgtaaagagaagcaggaacccaaa

SEQ ID NO: 1809326 - DNA, 25 bp, Homo sapien
caaggacgttccttagacttctgtc

SEQ ID NO: 1809327 - DNA, 25 bp, Homo sapien
ggacgttccttagacttctgtccat

SEQ ID NO: 1809328 - DNA, 25 bp, Homo sapien
ccacaaggacgttccttagacttct

SEQ ID NO: 1809329 - DNA, 25 bp, Homo sapien
ctgcaggctctgcagacctccatag

SEQ ID NO: 1809330 - DNA, 25 bp, Homo sapien
tgcaggctctgcagacctccatagg

SEQ ID NO: 1809331 - DNA, 25 bp, Homo sapien
ggctggaggccgccacagctcccag

SEQ ID NO: 1809332 - DNA, 25 bp, Homo sapien
aggctggaggccgccacagctccca

SEQ ID NO: 1809333 - DNA, 25 bp, Homo sapien
gctggaggccgccacagctcccagg

SEQ ID NO: 1809334 - DNA, 25 bp, Homo sapien
aggccacgtagccacacatggagag

SEQ ID NO: 1809335 - DNA, 25 bp, Homo sapien
cctccatagagggtgctgagcgctg

SEQ ID NO: 1809336 - DNA, 25 bp, Homo sapien
ttgcagcccagcctctcgatgagga

SEQ ID NO: 1809337 - DNA, 25 bp, Homo sapien
agttgcccacggagaaggccacgta

SEQ ID NO: 1809338 - DNA, 25 bp, Homo sapien
tggccatacccacctcctaatggtg

SEQ ID NO: 1809339 - DNA, 25 bp, Homo sapien
atctgcctaggtgcccacgagactc

SEQ ID NO: 1809340 - DNA, 25 bp, Homo sapien
gcgaggtgcagctttcggtccattg

SEQ ID NO: 1809341 - DNA, 25 bp, Homo sapien
acctcctaatggtgggcgaggtgca

SEQ ID NO: 1809342 - DNA, 25 bp, Homo sapien
gaaggacttgcagccatcatcagca

SEQ ID NO: 1809343 - DNA, 25 bp, Homo sapien
agaaggacttgcagccatcatcagc

SEQ ID NO: 1809344 - DNA, 25 bp, Homo sapien
tgtgggtaaaatgcagacccatagc

SEQ ID NO: 1809345 - DNA, 25 bp, Homo sapien
ctgtgggtaaaatgcagacccatag

SEQ ID NO: 1809346 - DNA, 25 bp, Homo sapien
ccgagtcccagcagtatggaggtgg

SEQ ID NO: 1809347 - DNA, 25 bp, Homo sapien
gtgcagaccacagcggggcggcccc

SEQ ID NO: 1809348 - DNA, 25 bp, Homo sapien
cgagtcccagcagtatggaggtggg

SEQ ID NO: 1809349 - DNA, 25 bp, Homo sapien
tttcccgtgatcgtgaggtatgtgc

SEQ ID NO: 1809350 - DNA, 25 bp, Homo sapien
ccatgtctttgccacgctttcccgc

SEQ ID NO: 1809351 - DNA, 25 bp, Homo sapien
gtgtttcccgtgatcgtgaggtatg

SEQ ID NO: 1809352 - DNA, 25 bp, Homo sapien
ttcccgtgatcgtgaggtatgtgca

SEQ ID NO: 1809353 - DNA, 25 bp, Homo sapien
agcgatgagatcaagttgccccaca

SEQ ID NO: 1809354 - DNA, 25 bp, Homo sapien
ggccaaataccagcgatgagatcaa

SEQ ID NO: 1809355 - DNA, 25 bp, Homo sapien
cgatgagatcaagttgccccacaca

SEQ ID NO: 1809356 - DNA, 25 bp, Homo sapien
aaataccagcgatgagatcaagttg

SEQ ID NO: 1809357 - DNA, 25 bp, Homo sapien
gaaaggtcttcgaaagaaatgcctg

SEQ ID NO: 1809358 - DNA, 25 bp, Homo sapien
acttcactggccgtgatatgcagac

SEQ ID NO: 1809359 - DNA, 25 bp, Homo sapien
gcagaaaggtcttcgaaagaaatgc

SEQ ID NO: 1809360 - DNA, 25 bp, Homo sapien
actggccgtgatatgcagactgagc

SEQ ID NO: 1809361 - DNA, 25 bp, Homo sapien
aaatcaaagtgacagtggaaaggac

SEQ ID NO: 1809362 - DNA, 25 bp, Homo sapien
gacggcaaatgtgacaagatgtagg

SEQ ID NO: 1809363 - DNA, 25 bp, Homo sapien
gacaggagacatgagatgacggcaa

SEQ ID NO: 1809364 - DNA, 25 bp, Homo sapien
gatgtaggttcttgagaaatcaaag

SEQ ID NO: 1809365 - DNA, 25 bp, Homo sapien
tggccccacaggacgtgagctgctc

SEQ ID NO: 1809366 - DNA, 25 bp, Homo sapien
gccccacaggacgtgagctgctctt

SEQ ID NO: 1809367 - DNA, 25 bp, Homo sapien
ggccccacaggacgtgagctgctct

SEQ ID NO: 1809368 - DNA, 25 bp, Homo sapien
ctgccctgggccgatggagctcgta

SEQ ID NO: 1809369 - DNA, 25 bp, Homo sapien
cctgccctgggccgatggagctcgt

SEQ ID NO: 1809370 - DNA, 25 bp, Homo sapien
tgccctgggccgatggagctcgtac

SEQ ID NO: 1809371 - DNA, 25 bp, Homo sapien
gcaattatggatgttcagggcccct

SEQ ID NO: 1809372 - DNA, 25 bp, Homo sapien
caagctgtctgtaatggtagccgcc

SEQ ID NO: 1809373 - DNA, 25 bp, Homo sapien
caattaacttcctttgggcagccct

SEQ ID NO: 1809374 - DNA, 25 bp, Homo sapien
gcttgcaacgtctccagctaaggtg

SEQ ID NO: 1809375 - DNA, 25 bp, Homo sapien
catgttggaagatgcctccacgtcc

SEQ ID NO: 1809376 - DNA, 25 bp, Homo sapien
gtccacacttgcattggcctctggc

SEQ ID NO: 1809377 - DNA, 25 bp, Homo sapien
atgttggaagatgcctccacgtcca

SEQ ID NO: 1809378 - DNA, 25 bp, Homo sapien
ccacgtccacacttgcattggcctc

SEQ ID NO: 1809379 - DNA, 25 bp, Homo sapien
tccgagaacttagacccctgctcct

SEQ ID NO: 1809380 - DNA, 25 bp, Homo sapien
ctccgagaacttagacccctgctcc

SEQ ID NO: 1809381 - DNA, 25 bp, Homo sapien
aatccactgtacagcggcagcagaa

SEQ ID NO: 1809382 - DNA, 25 bp, Homo sapien
tatgggttggaggaacgcagctatc

SEQ ID NO: 1809383 - DNA, 25 bp, Homo sapien
tattcgctggagaggaatccttgct

SEQ ID NO: 1809384 - DNA, 25 bp, Homo sapien
gcagcagaattaagaggcacagacg

SEQ ID NO: 1809385 - DNA, 25 bp, Homo sapien
actgagacgagaagaccagccacag

SEQ ID NO: 1809386 - DNA, 25 bp, Homo sapien
acctcaagggcgggcacgcagaaca

SEQ ID NO: 1809387 - DNA, 25 bp, Homo sapien
ccatcacgggcgacctcaagggcgg

SEQ ID NO: 1809388 - DNA, 25 bp, Homo sapien
gaacagggactgagacgagaagacc

SEQ ID NO: 1809389 - DNA, 25 bp, Homo sapien
tttccatacaacacggagcacagcg

SEQ ID NO: 1809390 - DNA, 25 bp, Homo sapien
agcacagcgcgtcagtggccgagaa

SEQ ID NO: 1809391 - DNA, 25 bp, Homo sapien
tggccgagaagcagatcatcacgta

SEQ ID NO: 1809392 - DNA, 25 bp, Homo sapien
ctgcccgtgtactgcgagacctttc

SEQ ID NO: 1809393 - DNA, 25 bp, Homo sapien
tacgaagaacactgccagatggtca

SEQ ID NO: 1809394 - DNA, 25 bp, Homo sapien
caatcatgcaggacacgtgggtcac

SEQ ID NO: 1809395 - DNA, 25 bp, Homo sapien
cccacaggccagagaatacgaagaa

SEQ ID NO: 1809396 - DNA, 25 bp, Homo sapien
ggtctccacagcagtagggcaatca

SEQ ID NO: 1809397 - DNA, 25 bp, Homo sapien
gaaaggacgtggctggagtgttctg

SEQ ID NO: 1809398 - DNA, 25 bp, Homo sapien
tgtccgcgatctgaggtcacatgtg

SEQ ID NO: 1809399 - DNA, 25 bp, Homo sapien
tggctggagtgttctgtccgcgatc

SEQ ID NO: 1809400 - DNA, 25 bp, Homo sapien
tgttctgtccgcgatctgaggtcac

SEQ ID NO: 1809401 - DNA, 25 bp, Homo sapien
aaggactgtgaaacacggctcctta

SEQ ID NO: 1809402 - DNA, 25 bp, Homo sapien
caacagtgtgggtttgttcaaaggt

SEQ ID NO: 1809403 - DNA, 25 bp, Homo sapien
gaaacacggctccttaaatccaaca

SEQ ID NO: 1809404 - DNA, 25 bp, Homo sapien
gcattactggggcagcagaaaggac

SEQ ID NO: 1809405 - DNA, 25 bp, Homo sapien
agtgtggcgctgggccaagtacaca

SEQ ID NO: 1809406 - DNA, 25 bp, Homo sapien
gagtgtggcgctgggccaagtacac

SEQ ID NO: 1809407 - DNA, 25 bp, Homo sapien
gtgtggcgctgggccaagtacacac

SEQ ID NO: 1809408 - DNA, 25 bp, Homo sapien
tctcccttcgtcaagttctggttgg

SEQ ID NO: 1809409 - DNA, 25 bp, Homo sapien
gtccaaggccaattcagcttcttca

SEQ ID NO: 1809410 - DNA, 25 bp, Homo sapien
acataaactttccgggccctcaatg

SEQ ID NO: 1809411 - DNA, 25 bp, Homo sapien
tcttcataagtagccatgttctcct

SEQ ID NO: 1809412 - DNA, 25 bp, Homo sapien
tgactgttagcatgggatccaaaac

SEQ ID NO: 1809413 - DNA, 25 bp, Homo sapien
gactgttagcatgggatccaaaacc

SEQ ID NO: 1809414 - DNA, 25 bp, Homo sapien
ctgttagcatgggatccaaaaccaa

SEQ ID NO: 1809415 - DNA, 25 bp, Homo sapien
gtgactgttagcatgggatccaaaa

SEQ ID NO: 1809416 - DNA, 25 bp, Homo sapien
ttctcaaacagaacgccgtagagag

SEQ ID NO: 1809417 - DNA, 25 bp, Homo sapien
tctgatcgggttcttggactccacg

SEQ ID NO: 1809418 - DNA, 25 bp, Homo sapien
cagaatgtagagcttgacgtgcacg

SEQ ID NO: 1809419 - DNA, 25 bp, Homo sapien
tgtacccgaaggcaatgacgaagcc

SEQ ID NO: 1809420 - DNA, 25 bp, Homo sapien
tttgtttgtatttcttcatcctctg

SEQ ID NO: 1809421 - DNA, 25 bp, Homo sapien
ttgtttgtatttcttcatcctctgc

SEQ ID NO: 1809422 - DNA, 25 bp, Homo sapien
tgtatttcttcatcctctgcctggt

SEQ ID NO: 1809423 - DNA, 25 bp, Homo sapien
atttcttcatcctctgcctggttga

SEQ ID NO: 1809424 - DNA, 25 bp, Homo sapien
aattggctgattgtacgttagacct

SEQ ID NO: 1809425 - DNA, 25 bp, Homo sapien
gaggagccgctctatgtcctgaggc

SEQ ID NO: 1809426 - DNA, 25 bp, Homo sapien
gcagaccccacacgtttcaggaatc

SEQ ID NO: 1809427 - DNA, 25 bp, Homo sapien
tacagcaataaaactagggtgagtc

SEQ ID NO: 1809428 - DNA, 25 bp, Homo sapien
ctctcaatagcccggatggaggata

SEQ ID NO: 1809429 - DNA, 25 bp, Homo sapien
gtgaagtgtcctgtgtttagtgaaa

SEQ ID NO: 1809430 - DNA, 25 bp, Homo sapien
caatagcccggatggaggataagag

SEQ ID NO: 1809431 - DNA, 25 bp, Homo sapien
tgtttagtgaaatccctctctcaat

SEQ ID NO: 1809432 - DNA, 25 bp, Homo sapien
gtcaggtgcatagcagtgggaaatg

SEQ ID NO: 1809433 - DNA, 25 bp, Homo sapien
aagccgctggtcaggtgcatagcag

SEQ ID NO: 1809434 - DNA, 25 bp, Homo sapien
caagccgctggtcaggtgcatagca

SEQ ID NO: 1809435 - DNA, 25 bp, Homo sapien
agacaagccgctggtcaggtgcata

SEQ ID NO: 1809436 - DNA, 25 bp, Homo sapien
gaaatcagaaaagtccccaatgcca

SEQ ID NO: 1809437 - DNA, 25 bp, Homo sapien
cagggcacttgggcgcagccacaaa

SEQ ID NO: 1809438 - DNA, 25 bp, Homo sapien
aatcagaaaagtccccaatgccacc

SEQ ID NO: 1809439 - DNA, 25 bp, Homo sapien
cttgggcgcagccacaaatgcttca

SEQ ID NO: 1809440 - DNA, 25 bp, Homo sapien
gctcagggctaatcttagaatgcaa

SEQ ID NO: 1809441 - DNA, 25 bp, Homo sapien
ctcagggctaatcttagaatgcaat

SEQ ID NO: 1809442 - DNA, 25 bp, Homo sapien
catcaaaactgactattttataatt

SEQ ID NO: 1809443 - DNA, 25 bp, Homo sapien
tcatcaaaactgactattttataat

SEQ ID NO: 1809444 - DNA, 25 bp, Homo sapien
agctatctcggcatcacggctttca

SEQ ID NO: 1809445 - DNA, 25 bp, Homo sapien
cagtgctttggagctctcctgcggg

SEQ ID NO: 1809446 - DNA, 25 bp, Homo sapien
gctctcctgcgggttagctatctcg

SEQ ID NO: 1809447 - DNA, 25 bp, Homo sapien
tgcgggttagctatctcggcatcac

SEQ ID NO: 1809448 - DNA, 25 bp, Homo sapien
tccaaagcggtctggtcgaacgcct

SEQ ID NO: 1809449 - DNA, 25 bp, Homo sapien
ttccaaagcggtctggtcgaacgcc

SEQ ID NO: 1809450 - DNA, 25 bp, Homo sapien
cttccaaagcggtctggtcgaacgc

SEQ ID NO: 1809451 - DNA, 25 bp, Homo sapien
cctctgtgggtctctgtgcagcagc

SEQ ID NO: 1809452 - DNA, 25 bp, Homo sapien
ctggttccgagggtggcctctgtgg

SEQ ID NO: 1809453 - DNA, 25 bp, Homo sapien
ggcgctggttccgagggtggcctct

SEQ ID NO: 1809454 - DNA, 25 bp, Homo sapien
tgggcgctggttccgagggtggcct

SEQ ID NO: 1809455 - DNA, 25 bp, Homo sapien
cagcgcctggctttgtgtggaggaa

SEQ ID NO: 1809456 - DNA, 25 bp, Homo sapien
gcctggctttgtgtggaggaacaca

SEQ ID NO: 1809457 - DNA, 25 bp, Homo sapien
tggaggaacacaggtcccgccctct

SEQ ID NO: 1809458 - DNA, 25 bp, Homo sapien
aggaacacaggtcccgccctctcat

SEQ ID NO: 1809459 - DNA, 25 bp, Homo sapien
tgcaggcttgcccagtcaggcgcta

SEQ ID NO: 1809460 - DNA, 25 bp, Homo sapien
gagcgactgggtccggctggacaag

SEQ ID NO: 1809461 - DNA, 25 bp, Homo sapien
cttgcccagtcaggcgctatcgagc

SEQ ID NO: 1809462 - DNA, 25 bp, Homo sapien
cccagtcaggcgctatcgagctcat

SEQ ID NO: 1809463 - DNA, 25 bp, Homo sapien
agcggttggtttgattgtgtgtgga

SEQ ID NO: 1809464 - DNA, 25 bp, Homo sapien
ttgaagttggctgggacacgtctgc

SEQ ID NO: 1809465 - DNA, 25 bp, Homo sapien
tggaaagcatgtgcggtttgttgaa

SEQ ID NO: 1809466 - DNA, 25 bp, Homo sapien
catgtgcggtttgttgaagttggct

SEQ ID NO: 1809467 - DNA, 25 bp, Homo sapien
ggtgttgggcggcctcgcctgggag

SEQ ID NO: 1809468 - DNA, 25 bp, Homo sapien
tcttctccagtgttggtgttgggcg

SEQ ID NO: 1809469 - DNA, 25 bp, Homo sapien
gttgggcggcctcgcctgggaggga

SEQ ID NO: 1809470 - DNA, 25 bp, Homo sapien
gcctcggatggaatgttaagggtaa

SEQ ID NO: 1809471 - DNA, 25 bp, Homo sapien
gaggatgtcctccagtacaggttcc

SEQ ID NO: 1809472 - DNA, 25 bp, Homo sapien
caatagctatgcttggtgcccagca

SEQ ID NO: 1809473 - DNA, 25 bp, Homo sapien
tcgtcaacgcgaaaaaccagcggct

SEQ ID NO: 1809474 - DNA, 25 bp, Homo sapien
tagctgctgccacggtttaacactg

SEQ ID NO: 1809475 - DNA, 25 bp, Homo sapien
gtcactgaaaattagtatccccctc

SEQ ID NO: 1809476 - DNA, 25 bp, Homo sapien
tcactgaaaattagtatccccctcc

SEQ ID NO: 1809477 - DNA, 25 bp, Homo sapien
agtcactgaaaattagtatccccct

SEQ ID NO: 1809478 - DNA, 25 bp, Homo sapien
aacataaatggtcaaaggcttaaag

SEQ ID NO: 1809479 - DNA, 25 bp, Homo sapien
gaggccccggatttattgatgctgc

SEQ ID NO: 1809480 - DNA, 25 bp, Homo sapien
gctgttggtcaaatgggcataattg

SEQ ID NO: 1809481 - DNA, 25 bp, Homo sapien
cacaaacatagatgcggagatcaca

SEQ ID NO: 1809482 - DNA, 25 bp, Homo sapien
gctgagcgtccatttacaaccatga

SEQ ID NO: 1809483 - DNA, 25 bp, Homo sapien
taaccatgcggtggattttcttcca

SEQ ID NO: 1809484 - DNA, 25 bp, Homo sapien
tttcttccacaaaagcagatcgtcc

SEQ ID NO: 1809485 - DNA, 25 bp, Homo sapien
gtccacatcccagctacgaaggtag

SEQ ID NO: 1809486 - DNA, 25 bp, Homo sapien
gtaaatcaggtcaataatatcatgg

SEQ ID NO: 1809487 - DNA, 25 bp, Homo sapien
aagccatggtttcaagttgtcatca

SEQ ID NO: 1809488 - DNA, 25 bp, Homo sapien
tgtagttgacctctaaaagccatgg

SEQ ID NO: 1809489 - DNA, 25 bp, Homo sapien
ttgaacaatccaaggtcaaggctgg

SEQ ID NO: 1809490 - DNA, 25 bp, Homo sapien
tgtgaacgaaagagaatcataagga

SEQ ID NO: 1809491 - DNA, 25 bp, Homo sapien
tgcagcgtcgatgttggaatttcca

SEQ ID NO: 1809492 - DNA, 25 bp, Homo sapien
catgtgtggcattactggcttctct

SEQ ID NO: 1809493 - DNA, 25 bp, Homo sapien
gaagacagtcaggagcatcaagccc

SEQ ID NO: 1809494 - DNA, 25 bp, Homo sapien
gaagagggacgcgtagggcatgagt

SEQ ID NO: 1809495 - DNA, 25 bp, Homo sapien
gcctgctccgtaacttgggcttgct

SEQ ID NO: 1809496 - DNA, 25 bp, Homo sapien
tgtggcatctcccttgttgacagat

SEQ ID NO: 1809497 - DNA, 25 bp, Homo sapien
cttgtgaggcgtgtgcctgctccgt

SEQ ID NO: 1809498 - DNA, 25 bp, Homo sapien
ggagctcttggattattcttttgac

SEQ ID NO: 1809499 - DNA, 25 bp, Homo sapien
gggatctggagctttgccacggtct

SEQ ID NO: 1809500 - DNA, 25 bp, Homo sapien
tgccacggtctgacaggacacacgg

SEQ ID NO: 1809501 - DNA, 25 bp, Homo sapien
ccgagagttgcttcattgaaaggaa

SEQ ID NO: 1809502 - DNA, 25 bp, Homo sapien
caggtagggacttgaactattgctt

SEQ ID NO: 1809503 - DNA, 25 bp, Homo sapien
catagttaacatgctggtggcacag

SEQ ID NO: 1809504 - DNA, 25 bp, Homo sapien
tattgctttctctaggacaggatcc

SEQ ID NO: 1809505 - DNA, 25 bp, Homo sapien
taatcaccacttgaacatattgtgc

SEQ ID NO: 1809506 - DNA, 25 bp, Homo sapien
tctttcaagacacctgagcaaataa

SEQ ID NO: 1809507 - DNA, 25 bp, Homo sapien
gggaggctgtgtggtatttgtagaa

SEQ ID NO: 1809508 - DNA, 25 bp, Homo sapien
gtatttgtagaattctttcaagaca

SEQ ID NO: 1809509 - DNA, 25 bp, Homo sapien
tgtagaattctttcaagacacctga

SEQ ID NO: 1809510 - DNA, 25 bp, Homo sapien
taaacaaatggtgacaaggccaagg

SEQ ID NO: 1809511 - DNA, 25 bp, Homo sapien
gaggccatgacctcacatgctgtga

SEQ ID NO: 1809512 - DNA, 25 bp, Homo sapien
caacagagtcattagggctttcagt

SEQ ID NO: 1809513 - DNA, 25 bp, Homo sapien
gatacttagtgaattccccgtgttg

SEQ ID NO: 1809514 - DNA, 25 bp, Homo sapien
caagcaaggtgagtctgtactctgc

SEQ ID NO: 1809515 - DNA, 25 bp, Homo sapien
tgggaagaactcagccaggattcca

SEQ ID NO: 1809516 - DNA, 25 bp, Homo sapien
ccaatcctttggttgttcgagcaca

SEQ ID NO: 1809517 - DNA, 25 bp, Homo sapien
tgtactctgcactccaatgaaggct

SEQ ID NO: 1809518 - DNA, 25 bp, Homo sapien
tcttccaggtacaaccagatctttg

SEQ ID NO: 1809519 - DNA, 25 bp, Homo sapien
gttgcagaaatgtcactaactgtgg

SEQ ID NO: 1809520 - DNA, 25 bp, Homo sapien
tgtcacactcagtatcaaagtgcct

SEQ ID NO: 1809521 - DNA, 25 bp, Homo sapien
tggttcatctgatcgctggatggat

SEQ ID NO: 1809522 - DNA, 25 bp, Homo sapien
ccagcctggcgacagagcaagactc

SEQ ID NO: 1809523 - DNA, 25 bp, Homo sapien
aatgacttgaacctatgaggcggaa

SEQ ID NO: 1809524 - DNA, 25 bp, Homo sapien
tgacttgaacctatgaggcggaagt

SEQ ID NO: 1809525 - DNA, 25 bp, Homo sapien
agaatgacttgaacctatgaggcgg

SEQ ID NO: 1809526 - DNA, 25 bp, Homo sapien
taaacaggtcatttcgcggcacaaa

SEQ ID NO: 1809527 - DNA, 25 bp, Homo sapien
tctgcgaggcacaatagagcaaggc

SEQ ID NO: 1809528 - DNA, 25 bp, Homo sapien
tctctgaagtaacgcggtcaacgcg

SEQ ID NO: 1809529 - DNA, 25 bp, Homo sapien
catcatgaaaaagcccgttccggcg

SEQ ID NO: 1809530 - DNA, 25 bp, Homo sapien
tcaggaacggcgacaaaaccattgt

SEQ ID NO: 1809531 - DNA, 25 bp, Homo sapien
tcaggaaaccaagtatgcctccggg

SEQ ID NO: 1809532 - DNA, 25 bp, Homo sapien
tgaagctggaaatgtcgtcctggac

SEQ ID NO: 1809533 - DNA, 25 bp, Homo sapien
tcaacacgcagcatcacatgggaaa

SEQ ID NO: 1809534 - DNA, 25 bp, Homo sapien
gcagaaaaattctaccccaatggct

SEQ ID NO: 1809535 - DNA, 25 bp, Homo sapien
tgtttctaaacagattcaatgtaac

SEQ ID NO: 1809536 - DNA, 25 bp, Homo sapien
acgggacggtggaacatctcaagga

SEQ ID NO: 1809537 - DNA, 25 bp, Homo sapien
gattatttgcatagaacatgtttct

SEQ ID NO: 1809538 - DNA, 25 bp, Homo sapien
tagtgatctcatgaacaagagggaa

SEQ ID NO: 1809539 - DNA, 25 bp, Homo sapien
cgcagtaggataatgatatttccac

SEQ ID NO: 1809540 - DNA, 25 bp, Homo sapien
tgttgaactgacctgacatgtgtat

SEQ ID NO: 1809541 - DNA, 25 bp, Homo sapien
ggaagctgtgcatccattcacttca

SEQ ID NO: 1809542 - DNA, 25 bp, Homo sapien
cagctgcaagtgttccgctggaatc

SEQ ID NO: 1809543 - DNA, 25 bp, Homo sapien
gaggcacagtgtgagcgcacgtcat

SEQ ID NO: 1809544 - DNA, 25 bp, Homo sapien
tcaatggcatctcactagttccccg

SEQ ID NO: 1809545 - DNA, 25 bp, Homo sapien
tatttggattcgatcacagggctca

SEQ ID NO: 1809546 - DNA, 25 bp, Homo sapien
ttcaataccccgctcgtagcttagc

SEQ ID NO: 1809547 - DNA, 25 bp, Homo sapien
taccccgctcgtagcttagctttga

SEQ ID NO: 1809548 - DNA, 25 bp, Homo sapien
gtagcttagctttgagcccacagtt

SEQ ID NO: 1809549 - DNA, 25 bp, Homo sapien
cgctcgtagcttagctttgagccca

SEQ ID NO: 1809550 - DNA, 25 bp, Homo sapien
cacccattgggaatatgcttgtatc

SEQ ID NO: 1809551 - DNA, 25 bp, Homo sapien
cagctccttggtgtagacgggatat

SEQ ID NO: 1809552 - DNA, 25 bp, Homo sapien
gatatggggtcgttttgtccaccca

SEQ ID NO: 1809553 - DNA, 25 bp, Homo sapien
tgcagctccttggtgtagacgggat

SEQ ID NO: 1809554 - DNA, 25 bp, Homo sapien
tgcgcagaatgtccgggccacaggc

SEQ ID NO: 1809555 - DNA, 25 bp, Homo sapien
cagaatgtccgggccacaggcttgg

SEQ ID NO: 1809556 - DNA, 25 bp, Homo sapien
ccgacaccccgtttcccatgggcat

SEQ ID NO: 1809557 - DNA, 25 bp, Homo sapien
cacaggcttgggctcccccgacacc

SEQ ID NO: 1809558 - DNA, 25 bp, Homo sapien
ctgcagagcccagatcattgcccac

SEQ ID NO: 1809559 - DNA, 25 bp, Homo sapien
gcccagatcattgcccacagagagc

SEQ ID NO: 1809560 - DNA, 25 bp, Homo sapien
cttctcattaagagctttcagttta

SEQ ID NO: 1809561 - DNA, 25 bp, Homo sapien
tcttgtccacgtttatttccctctg

SEQ ID NO: 1809562 - DNA, 25 bp, Homo sapien
acggactcagcaggcctctcacaag

SEQ ID NO: 1809563 - DNA, 25 bp, Homo sapien
tttctgcgcccacggactcagcagg

SEQ ID NO: 1809564 - DNA, 25 bp, Homo sapien
attcaccagggtgtcttgccacagt

SEQ ID NO: 1809565 - DNA, 25 bp, Homo sapien
gacattcaccagggtgtcttgccac

SEQ ID NO: 1809566 - DNA, 25 bp, Homo sapien
agctgagacggctgcttccctgctg

SEQ ID NO: 1809567 - DNA, 25 bp, Homo sapien
acggctgcttccctgctgcggccat

SEQ ID NO: 1809568 - DNA, 25 bp, Homo sapien
gagacggctgcttccctgctgcggc

SEQ ID NO: 1809569 - DNA, 25 bp, Homo sapien
ctgagacggctgcttccctgctgcg

SEQ ID NO: 1809570 - DNA, 25 bp, Homo sapien
agatgagagagtggaacaaagctgg

SEQ ID NO: 1809571 - DNA, 25 bp, Homo sapien
aagatgagagagtggaacaaagctg

SEQ ID NO: 1809572 - DNA, 25 bp, Homo sapien
gaagatgagagagtggaacaaagct

SEQ ID NO: 1809573 - DNA, 25 bp, Homo sapien
gatgagagagtggaacaaagctgga

SEQ ID NO: 1809574 - DNA, 25 bp, Homo sapien
gctgctgtgtgagggggagccaccg

SEQ ID NO: 1809575 - DNA, 25 bp, Homo sapien
ccgtgtcgggggagccgccgtgtag

SEQ ID NO: 1809576 - DNA, 25 bp, Homo sapien
gagccaccgtgtggggggaaccatg

SEQ ID NO: 1809577 - DNA, 25 bp, Homo sapien
agctgtcgtgtgcagggaagccaca

SEQ ID NO: 1809578 - DNA, 25 bp, Homo sapien
ttaggtgacgcgtaggtgaccaggg

SEQ ID NO: 1809579 - DNA, 25 bp, Homo sapien
aggtgacgcgtaggtgaccagggca

SEQ ID NO: 1809580 - DNA, 25 bp, Homo sapien
taggtgacgcgtaggtgaccagggc

SEQ ID NO: 1809581 - DNA, 25 bp, Homo sapien
tgaaggactcatccaatgtgcgtgg

SEQ ID NO: 1809582 - DNA, 25 bp, Homo sapien
tggaatacttctctgatcagcaagg

SEQ ID NO: 1809583 - DNA, 25 bp, Homo sapien
tcaacccagcacgttgaggtgtccc

SEQ ID NO: 1809584 - DNA, 25 bp, Homo sapien
cagaaccccagtgtacatggcaaag

SEQ ID NO: 1809585 - DNA, 25 bp, Homo sapien
tgtcccacagcctgttgcagcgaca

SEQ ID NO: 1809586 - DNA, 25 bp, Homo sapien
gatgcactgacttccaaagacgtag

SEQ ID NO: 1809587 - DNA, 25 bp, Homo sapien
gcgacagctccgtgatgcactgact

SEQ ID NO: 1809588 - DNA, 25 bp, Homo sapien
caaagacgtagccacactgggcaga

SEQ ID NO: 1809589 - DNA, 25 bp, Homo sapien
tccactgccaactgaagatgacctt

SEQ ID NO: 1809590 - DNA, 25 bp, Homo sapien
catggtctgtgttgcgttcctcgtc

SEQ ID NO: 1809591 - DNA, 25 bp, Homo sapien
tcatcttctgggaatttgtggtttg

SEQ ID NO: 1809592 - DNA, 25 bp, Homo sapien
gttcctcgtccactgccaactgaag

SEQ ID NO: 1809593 - DNA, 25 bp, Homo sapien
tccaattcggagagggttgatccct

SEQ ID NO: 1809594 - DNA, 25 bp, Homo sapien
gagtgcccgttgtcatccaattcgg

SEQ ID NO: 1809595 - DNA, 25 bp, Homo sapien
tgtgcttttcctggacgagtgcccg

SEQ ID NO: 1809596 - DNA, 25 bp, Homo sapien
gagagggttgatccctcgccttgca

SEQ ID NO: 1809597 - DNA, 25 bp, Homo sapien
gccctccacggcgtctgcttttcag

SEQ ID NO: 1809598 - DNA, 25 bp, Homo sapien
ttgaagagctccagggtcccgactg

SEQ ID NO: 1809599 - DNA, 25 bp, Homo sapien
aaggtccaggtttgccgtatgttag

SEQ ID NO: 1809600 - DNA, 25 bp, Homo sapien
caggccctgaacgtgctccagtgat

SEQ ID NO: 1809601 - DNA, 25 bp, Homo sapien
tccagtgatcgtgactgcgggaaag

SEQ ID NO: 1809602 - DNA, 25 bp, Homo sapien
cgcagagtcgcccagtggttctcca

SEQ ID NO: 1809603 - DNA, 25 bp, Homo sapien
cagctccagagagcgcaacggcaaa

SEQ ID NO: 1809604 - DNA, 25 bp, Homo sapien
tggagccttgaatctcaggtcgaga

SEQ ID NO: 1809605 - DNA, 25 bp, Homo sapien
gtgcaggagtcacgcagagtcgccc

SEQ ID NO: 1809606 - DNA, 25 bp, Homo sapien
acctgttccccagtttctatctggg

SEQ ID NO: 1809607 - DNA, 25 bp, Homo sapien
cttcgtaacacagactctagaatca

SEQ ID NO: 1809608 - DNA, 25 bp, Homo sapien
gggcttctcttcgtaacacagactc

SEQ ID NO: 1809609 - DNA, 25 bp, Homo sapien
tctcttcgtaacacagactctagaa

SEQ ID NO: 1809610 - DNA, 25 bp, Homo sapien
ggctgggcttgcagagactgagctg

SEQ ID NO: 1809611 - DNA, 25 bp, Homo sapien
gtggctcacggcagacctggagtga

SEQ ID NO: 1809612 - DNA, 25 bp, Homo sapien
gatgcacttcatggggagcaactgg

SEQ ID NO: 1809613 - DNA, 25 bp, Homo sapien
caatgccatagatgcacttcatggg

SEQ ID NO: 1809614 - DNA, 25 bp, Homo sapien
cacttcatggggagcaactggggct

SEQ ID NO: 1809615 - DNA, 25 bp, Homo sapien
gggccccaatgccatagatgcactt

SEQ ID NO: 1809616 - DNA, 25 bp, Homo sapien
tagattgtagtgtgactgtagtgcc

SEQ ID NO: 1809617 - DNA, 25 bp, Homo sapien
gatagtatgactgtagattgtagtg

SEQ ID NO: 1809618 - DNA, 25 bp, Homo sapien
gactgaagatgatagtatgactgta

SEQ ID NO: 1809619 - DNA, 25 bp, Homo sapien
tggtagtgtgactgaagatgatagt

SEQ ID NO: 1809620 - DNA, 25 bp, Homo sapien
ctgaagatggcagtgtagctgtaga

SEQ ID NO: 1809621 - DNA, 25 bp, Homo sapien
tgacttaggtggcagtgggtgtaaa

SEQ ID NO: 1809622 - DNA, 25 bp, Homo sapien
tgtagatggcagtgagactgaagat

SEQ ID NO: 1809623 - DNA, 25 bp, Homo sapien
ggtggcagtgggtgtaaatgacagt

SEQ ID NO: 1809624 - DNA, 25 bp, Homo sapien
gtaaatgacagtgtggccgtagatg

SEQ ID NO: 1809625 - DNA, 25 bp, Homo sapien
gtgtaaatgacagtgtggccgtaga

SEQ ID NO: 1809626 - DNA, 25 bp, Homo sapien
tgtaaatgacagtgtggccgtagat

SEQ ID NO: 1809627 - DNA, 25 bp, Homo sapien
tgaagatggcagtgtagctgtagat

SEQ ID NO: 1809628 - DNA, 25 bp, Homo sapien
ctgaagatggcagtgtagctgtaga

SEQ ID NO: 1809629 - DNA, 25 bp, Homo sapien
gctgcagatggcagttggctgtagg

SEQ ID NO: 1809630 - DNA, 25 bp, Homo sapien
ggctgcagatggcagttggctgtag

SEQ ID NO: 1809631 - DNA, 25 bp, Homo sapien
tggctgcagatggcagttggctgta

SEQ ID NO: 1809632 - DNA, 25 bp, Homo sapien
ctgcagatggcagttggctgtaggt

SEQ ID NO: 1809633 - DNA, 25 bp, Homo sapien
ttaggtggcagtgggtgtaaatgac

SEQ ID NO: 1809634 - DNA, 25 bp, Homo sapien
agtgtggctgtagatggcagtgaga

SEQ ID NO: 1809635 - DNA, 25 bp, Homo sapien
ggcagtgcgactgtagatggcagtg

SEQ ID NO: 1809636 - DNA, 25 bp, Homo sapien
tgtagatggcagtgagactgaagat

SEQ ID NO: 1809637 - DNA, 25 bp, Homo sapien
ggccgtagacggcagtgtggctgtg

SEQ ID NO: 1809638 - DNA, 25 bp, Homo sapien
tgttagcgccactgtagatggcagt

SEQ ID NO: 1809639 - DNA, 25 bp, Homo sapien
tgtgactgtagatggccgcgtgaat

SEQ ID NO: 1809640 - DNA, 25 bp, Homo sapien
ctgtagacagcagtgcggccgtaga

SEQ ID NO: 1809641 - DNA, 25 bp, Homo sapien
tgtagatggctgttcgactgtaggt

SEQ ID NO: 1809642 - DNA, 25 bp, Homo sapien
catgcaagaacgaggcatgtgaagg

SEQ ID NO: 1809643 - DNA, 25 bp, Homo sapien
tcttgaagtagagatgcagtgtgaa

SEQ ID NO: 1809644 - DNA, 25 bp, Homo sapien
cactgggtggccttgcagtccctcc

SEQ ID NO: 1809645 - DNA, 25 bp, Homo sapien
aaaacttcattcatgcaagaacgag

SEQ ID NO: 1809646 - DNA, 25 bp, Homo sapien
gacggtccttacatatgctctgaag

SEQ ID NO: 1809647 - DNA, 25 bp, Homo sapien
ttattgacggtccttacatatgctc

SEQ ID NO: 1809648 - DNA, 25 bp, Homo sapien
ttgacggtccttacatatgctctga

SEQ ID NO: 1809649 - DNA, 25 bp, Homo sapien
gtccttacatatgctctgaaggaag

SEQ ID NO: 1809650 - DNA, 25 bp, Homo sapien
gcaatttacaaatcctaagttccag

SEQ ID NO: 1809651 - DNA, 25 bp, Homo sapien
agttccaggtagaagagaacgtggt

SEQ ID NO: 1809652 - DNA, 25 bp, Homo sapien
aatgcaatttacaaatcctaagttc

SEQ ID NO: 1809653 - DNA, 25 bp, Homo sapien
gaacgtggtaggtccacgtcttcat

SEQ ID NO: 1809654 - DNA, 25 bp, Homo sapien
gaatgcgccgggtaaatgcgcagct

SEQ ID NO: 1809655 - DNA, 25 bp, Homo sapien
ggcgagcggcttccgaggaattcac

SEQ ID NO: 1809656 - DNA, 25 bp, Homo sapien
tggagcctccacgagaaagaaatgg

SEQ ID NO: 1809657 - DNA, 25 bp, Homo sapien
tgcttgtggtgcaagtcccgcttgg

SEQ ID NO: 1809658 - DNA, 25 bp, Homo sapien
caattcatatgctaaggagccctgg

SEQ ID NO: 1809659 - DNA, 25 bp, Homo sapien
tccgatgcgcctcaattcatatgct

SEQ ID NO: 1809660 - DNA, 25 bp, Homo sapien
gggctccgatgcgcctcaattcata

SEQ ID NO: 1809661 - DNA, 25 bp, Homo sapien
ttcatatgctaaggagccctggatt

SEQ ID NO: 1809662 - DNA, 25 bp, Homo sapien
actggtgtggatcccagacaatttc

SEQ ID NO: 1809663 - DNA, 25 bp, Homo sapien
ttttttcttccgactggtgtggatc

SEQ ID NO: 1809664 - DNA, 25 bp, Homo sapien
ggaggtgaatccctgcgttttctat

SEQ ID NO: 1809665 - DNA, 25 bp, Homo sapien
tcctgcagggtttgagaccctctgt

SEQ ID NO: 1809666 - DNA, 25 bp, Homo sapien
caacatcatcctgtttagtgttcgg

SEQ ID NO: 1809667 - DNA, 25 bp, Homo sapien
catcatcctgtttagtgttcggcat

SEQ ID NO: 1809668 - DNA, 25 bp, Homo sapien
ttcaacatcatcctgtttagtgttc

SEQ ID NO: 1809669 - DNA, 25 bp, Homo sapien
acatcatcctgtttagtgttcggca

SEQ ID NO: 1809670 - DNA, 25 bp, Homo sapien
gaaaccagtcattatcccgcaggca

SEQ ID NO: 1809671 - DNA, 25 bp, Homo sapien
tagactcccggccaagagttgcgaa

SEQ ID NO: 1809672 - DNA, 25 bp, Homo sapien
cacagagctgccctaacagatgagt

SEQ ID NO: 1809673 - DNA, 25 bp, Homo sapien
aaacccaaggcatggtgcattcaat

SEQ ID NO: 1809674 - DNA, 25 bp, Homo sapien
tgtgcatttcacttggtcagcccct

SEQ ID NO: 1809675 - DNA, 25 bp, Homo sapien
aactcccctgatgaagaaagtgcca

SEQ ID NO: 1809676 - DNA, 25 bp, Homo sapien
gacactgagctgagcgaacggtatg

SEQ ID NO: 1809677 - DNA, 25 bp, Homo sapien
gagtgcttgcatccgaaccttcagt

SEQ ID NO: 1809678 - DNA, 25 bp, Homo sapien
tctctttgatctgtggcactggctg

SEQ ID NO: 1809679 - DNA, 25 bp, Homo sapien
ggacctgatcccctatctttgcatg

SEQ ID NO: 1809680 - DNA, 25 bp, Homo sapien
tgggaagcacctggtaagaaagccc

SEQ ID NO: 1809681 - DNA, 25 bp, Homo sapien
tgtggctctgtgtatctcgcgctgt

SEQ ID NO: 1809682 - DNA, 25 bp, Homo sapien
agctggtgaaaaccacgtggaacgg

SEQ ID NO: 1809683 - DNA, 25 bp, Homo sapien
cctcagtgctggttttcctaagtcc

SEQ ID NO: 1809684 - DNA, 25 bp, Homo sapien
gaacgggatgctcatgggacctgcc

SEQ ID NO: 1809685 - DNA, 25 bp, Homo sapien
tgggacttaagctggtgaaaaccac

SEQ ID NO: 1809686 - DNA, 25 bp, Homo sapien
accacttatttatttgccagaccag

SEQ ID NO: 1809687 - DNA, 25 bp, Homo sapien
aagtgaagcgatgtgggaaagttcc

SEQ ID NO: 1809688 - DNA, 25 bp, Homo sapien
aggaaacagatgtgccgggcaccat

SEQ ID NO: 1809689 - DNA, 25 bp, Homo sapien
cacgtttagcagttctgtgcccagg

SEQ ID NO: 1809690 - DNA, 25 bp, Homo sapien
tgctcttgcctgacacgcaggccat

SEQ ID NO: 1809691 - DNA, 25 bp, Homo sapien
cctgctcttgcctgacacgcaggcc

SEQ ID NO: 1809692 - DNA, 25 bp, Homo sapien
tcttgcctgacacgcaggccatcat

SEQ ID NO: 1809693 - DNA, 25 bp, Homo sapien
gctcttgcctgacacgcaggccatc

SEQ ID NO: 1809694 - DNA, 25 bp, Homo sapien
gcagagcaggctccacgtcgtattg

SEQ ID NO: 1809695 - DNA, 25 bp, Homo sapien
gtgtcctagaccctagacctggttg

SEQ ID NO: 1809696 - DNA, 25 bp, Homo sapien
caggaagagttggttctgcagagca

SEQ ID NO: 1809697 - DNA, 25 bp, Homo sapien
gtcgtattgccctgcaggccgtcca

SEQ ID NO: 1809698 - DNA, 25 bp, Homo sapien
cttgtgcgtgttctctgcggctggc

SEQ ID NO: 1809699 - DNA, 25 bp, Homo sapien
cttctctccagggtcgtgtgatggc

SEQ ID NO: 1809700 - DNA, 25 bp, Homo sapien
cgttctttaaggaaatgcacgtggt

SEQ ID NO: 1809701 - DNA, 25 bp, Homo sapien
ggtgctgctccagccgtcaggcttg

SEQ ID NO: 1809702 - DNA, 25 bp, Homo sapien
caataatggatccagcaggaggacg

SEQ ID NO: 1809703 - DNA, 25 bp, Homo sapien
caggaggacgttaatttactgcagc

SEQ ID NO: 1809704 - DNA, 25 bp, Homo sapien
tatgttccctgagtccgtccaaaga

SEQ ID NO: 1809705 - DNA, 25 bp, Homo sapien
ggtaaataggcacaaatcgacactg

SEQ ID NO: 1809706 - DNA, 25 bp, Homo sapien
gctcccaggccccagtgagagaggt

SEQ ID NO: 1809707 - DNA, 25 bp, Homo sapien
cagtgagagaggtggagtgagaagc

SEQ ID NO: 1809708 - DNA, 25 bp, Homo sapien
gaggtggagtgagaagcagcaacag

SEQ ID NO: 1809709 - DNA, 25 bp, Homo sapien
aggccccagtgagagaggtggagtg

SEQ ID NO: 1809710 - DNA, 25 bp, Homo sapien
ctaccaggacgagtcccacccgctt

SEQ ID NO: 1809711 - DNA, 25 bp, Homo sapien
tggcattgcactgacggattccaac

SEQ ID NO: 1809712 - DNA, 25 bp, Homo sapien
tccttgtctgctgcgttaccttgaa

SEQ ID NO: 1809713 - DNA, 25 bp, Homo sapien
tctgctgcgttaccttgaactcgcc

SEQ ID NO: 1809714 - DNA, 25 bp, Homo sapien
atctctgggagcaaatgacagtctc

SEQ ID NO: 1809715 - DNA, 25 bp, Homo sapien
tgggagcaaatgacagtctctggac

SEQ ID NO: 1809716 - DNA, 25 bp, Homo sapien
gcaaatgacagtctctggactggcc

SEQ ID NO: 1809717 - DNA, 25 bp, Homo sapien
ggccatggacatcctcaggcctcct

SEQ ID NO: 1809718 - DNA, 25 bp, Homo sapien
gactgcctggggcttcgacgtccac

SEQ ID NO: 1809719 - DNA, 25 bp, Homo sapien
gcttcgacgtccacaggagccccgt

SEQ ID NO: 1809720 - DNA, 25 bp, Homo sapien
ctggggcttcgacgtccacaggagc

SEQ ID NO: 1809721 - DNA, 25 bp, Homo sapien
gcctggggcttcgacgtccacagga

SEQ ID NO: 1809722 - DNA, 25 bp, Homo sapien
gaccattgcgacaagtatagacaca

SEQ ID NO: 1809723 - DNA, 25 bp, Homo sapien
tgatactgaccattgcgacaagtat

SEQ ID NO: 1809724 - DNA, 25 bp, Homo sapien
actgaccattgcgacaagtatagac

SEQ ID NO: 1809725 - DNA, 25 bp, Homo sapien
caagtatagacacatgggctttctg

SEQ ID NO: 1809726 - DNA, 25 bp, Homo sapien
aacaatgcagtctggttactgggcc

SEQ ID NO: 1809727 - DNA, 25 bp, Homo sapien
caattgtaacacatgctcgctgtgg

SEQ ID NO: 1809728 - DNA, 25 bp, Homo sapien
tactgggccggaatggacatgacag

SEQ ID NO: 1809729 - DNA, 25 bp, Homo sapien
taaagtctatcaggacacagcaggg

SEQ ID NO: 1809730 - DNA, 25 bp, Homo sapien
cagcccgagtgcattcctgagcaga

SEQ ID NO: 1809731 - DNA, 25 bp, Homo sapien
agatgttgtctgcatgggcccattc

SEQ ID NO: 1809732 - DNA, 25 bp, Homo sapien
aaatagcccagcacaaagatgttgt

SEQ ID NO: 1809733 - DNA, 25 bp, Homo sapien
tgttgtctgcatgggcccattcgca

SEQ ID NO: 1809734 - DNA, 25 bp, Homo sapien
tcaggccaaatagcccagcacaaag

SEQ ID NO: 1809735 - DNA, 25 bp, Homo sapien
ttccacccatgtttcagagcatctg

SEQ ID NO: 1809736 - DNA, 25 bp, Homo sapien
tgtcagaccctcaccaaaaatgggc

SEQ ID NO: 1809737 - DNA, 25 bp, Homo sapien
cgcccggccgaagtgtttgaaatct

SEQ ID NO: 1809738 - DNA, 25 bp, Homo sapien
gcatgattgacatcgcttccaccca

SEQ ID NO: 1809739 - DNA, 25 bp, Homo sapien
tgccatgcagatgtggtcaacgggc

SEQ ID NO: 1809740 - DNA, 25 bp, Homo sapien
ttctccctgtgccatgcagatgtgg

SEQ ID NO: 1809741 - DNA, 25 bp, Homo sapien
ccatgcagatgtggtcaacgggctg

SEQ ID NO: 1809742 - DNA, 25 bp, Homo sapien
atgcagatgtggtcaacgggctgat

SEQ ID NO: 1809743 - DNA, 25 bp, Homo sapien
ttaaagggagagtaatcattgatgg

SEQ ID NO: 1809744 - DNA, 25 bp, Homo sapien
agggttaaagggagagtaatcattg

SEQ ID NO: 1809745 - DNA, 25 bp, Homo sapien
taaagggagagtaatcattgatggt

SEQ ID NO: 1809746 - DNA, 25 bp, Homo sapien
ggttaaagggagagtaatcattgat

SEQ ID NO: 1809747 - DNA, 25 bp, Homo sapien
gcttttgcaaaatctctatgacctg

SEQ ID NO: 1809748 - DNA, 25 bp, Homo sapien
caaaatctctatgacctggtgctaa

SEQ ID NO: 1809749 - DNA, 25 bp, Homo sapien
tgacctggtgctaagggaccttttg

SEQ ID NO: 1809750 - DNA, 25 bp, Homo sapien
cttttgggtttaaagcactgcttgt

SEQ ID NO: 1809751 - DNA, 25 bp, Homo sapien
caggcgtaggttatcaacgcccatg

SEQ ID NO: 1809752 - DNA, 25 bp, Homo sapien
gcgtaggttatcaacgcccatgccc

SEQ ID NO: 1809753 - DNA, 25 bp, Homo sapien
gtaggttatcaacgcccatgcccag

SEQ ID NO: 1809754 - DNA, 25 bp, Homo sapien
gttatcaacgcccatgcccagaggc

SEQ ID NO: 1809755 - DNA, 25 bp, Homo sapien
agtgttgtggagctgtcggctccct

SEQ ID NO: 1809756 - DNA, 25 bp, Homo sapien
ttgttcgggggtctgtccaagcctg

SEQ ID NO: 1809757 - DNA, 25 bp, Homo sapien
ctgagtgttgtggagctgtcggctc

SEQ ID NO: 1809758 - DNA, 25 bp, Homo sapien
ggctgagtgttgtggagctgtcggc

SEQ ID NO: 1809759 - DNA, 25 bp, Homo sapien
ggagattgtcagatctgcgtggaca

SEQ ID NO: 1809760 - DNA, 25 bp, Homo sapien
tcagtccccgttgaagacagcaggg

SEQ ID NO: 1809761 - DNA, 25 bp, Homo sapien
ggaaagccagctaaactgcaacctc

SEQ ID NO: 1809762 - DNA, 25 bp, Homo sapien
cagacgtctccggagttcgtgttgg

SEQ ID NO: 1809763 - DNA, 25 bp, Homo sapien
caacttcttggagctgaagtctgca

SEQ ID NO: 1809764 - DNA, 25 bp, Homo sapien
gccacggttcatgactctctcagga

SEQ ID NO: 1809765 - DNA, 25 bp, Homo sapien
ttgcaacttcttggagctgaagtct

SEQ ID NO: 1809766 - DNA, 25 bp, Homo sapien
tttcttcttttgacctcaaacaggc

SEQ ID NO: 1809767 - DNA, 25 bp, Homo sapien
cctgccctgttttgaattagcggta

SEQ ID NO: 1809768 - DNA, 25 bp, Homo sapien
ttccacaacgttctattcgcaaggg

SEQ ID NO: 1809769 - DNA, 25 bp, Homo sapien
gaggcctggcagtgcagtgcatcct

SEQ ID NO: 1809770 - DNA, 25 bp, Homo sapien
ttagcggtagcagaaagaaacggcg

SEQ ID NO: 1809771 - DNA, 25 bp, Homo sapien
tggtcgccgttgagtccgtccgtgc

SEQ ID NO: 1809772 - DNA, 25 bp, Homo sapien
gtggtcgccgttgagtccgtccgtg

SEQ ID NO: 1809773 - DNA, 25 bp, Homo sapien
gtcgccgttgagtccgtccgtgccg

SEQ ID NO: 1809774 - DNA, 25 bp, Homo sapien
gcggtggtcgccgttgagtccgtcc

SEQ ID NO: 1809775 - DNA, 25 bp, Homo sapien
accgtgcacgccgactgaaagcaaa

SEQ ID NO: 1809776 - DNA, 25 bp, Homo sapien
caccgacgtttgggaaccgtgcacg

SEQ ID NO: 1809777 - DNA, 25 bp, Homo sapien
gtgcacgccgactgaaagcaaagct

SEQ ID NO: 1809778 - DNA, 25 bp, Homo sapien
gtttgggaaccgtgcacgccgactg

SEQ ID NO: 1809779 - DNA, 25 bp, Homo sapien
tctcacctgcgtggtaacaacgatt

SEQ ID NO: 1809780 - DNA, 25 bp, Homo sapien
gcaggcaggacacgtggaaacgcaa

SEQ ID NO: 1809781 - DNA, 25 bp, Homo sapien
tttcttaagaggtgcacgtgattca

SEQ ID NO: 1809782 - DNA, 25 bp, Homo sapien
ccagggagccgtagaagctcagtcc

SEQ ID NO: 1809783 - DNA, 25 bp, Homo sapien
cgtccacctcctcgctgtagggtgg

SEQ ID NO: 1809784 - DNA, 25 bp, Homo sapien
ctagagcggaatgcacctatgaagg

SEQ ID NO: 1809785 - DNA, 25 bp, Homo sapien
aaggctgaggcctgcgcgagaacct

SEQ ID NO: 1809786 - DNA, 25 bp, Homo sapien
cggaatgcacctatgaaggctgagg

SEQ ID NO: 1809787 - DNA, 25 bp, Homo sapien
gagcggaatgcacctatgaaggctg

SEQ ID NO: 1809788 - DNA, 25 bp, Homo sapien
cattgagaagtgcacctaagcggcc

SEQ ID NO: 1809789 - DNA, 25 bp, Homo sapien
cgacgaccacgcatgaacaggaatg

SEQ ID NO: 1809790 - DNA, 25 bp, Homo sapien
ccagcgtccgtggtgagccagtttc

SEQ ID NO: 1809791 - DNA, 25 bp, Homo sapien
tggctggtctagacactcagggcct

SEQ ID NO: 1809792 - DNA, 25 bp, Homo sapien
ctagacatttgcccacatttgctga

SEQ ID NO: 1809793 - DNA, 25 bp, Homo sapien
tagacatttgcccacatttgctgac

SEQ ID NO: 1809794 - DNA, 25 bp, Homo sapien
ttcataccctcaggacattgttggg

SEQ ID NO: 1809795 - DNA, 25 bp, Homo sapien
cttctcgtgcgacacagaaccggga

SEQ ID NO: 1809796 - DNA, 25 bp, Homo sapien
ggaaacatgcactaacctggtaaat

SEQ ID NO: 1809797 - DNA, 25 bp, Homo sapien
tggtaaatacctgcttcatggagag

SEQ ID NO: 1809798 - DNA, 25 bp, Homo sapien
acccaggggcaaccgagaagccaga

SEQ ID NO: 1809799 - DNA, 25 bp, Homo sapien
gccagagtccggccacgccaggctc

SEQ ID NO: 1809800 - DNA, 25 bp, Homo sapien
caacccaggggcaaccgagaagcca

SEQ ID NO: 1809801 - DNA, 25 bp, Homo sapien
ccagagtccggccacgccaggctct

SEQ ID NO: 1809802 - DNA, 25 bp, Homo sapien
tctaaatgggcggtgctaggctcag

SEQ ID NO: 1809803 - DNA, 25 bp, Homo sapien
tgctgggtccgaacgggcgatgggt

SEQ ID NO: 1809804 - DNA, 25 bp, Homo sapien
ttcggttcggactggcggtgctggg

SEQ ID NO: 1809805 - DNA, 25 bp, Homo sapien
gttctgggtctggacgggcggtgca

SEQ ID NO: 1809806 - DNA, 25 bp, Homo sapien
tgctagggttccgtctggactggcg

SEQ ID NO: 1809807 - DNA, 25 bp, Homo sapien
tgctgtgttgggtccggacgcgcgg

SEQ ID NO: 1809808 - DNA, 25 bp, Homo sapien
ccttcccgaccagcggtgctaggtt

SEQ ID NO: 1809809 - DNA, 25 bp, Homo sapien
gcgcgctgctggatctaaatgggca

SEQ ID NO: 1809810 - DNA, 25 bp, Homo sapien
cgggccgaggacgacaggtccgcgg

SEQ ID NO: 1809811 - DNA, 25 bp, Homo sapien
gtcctccgacttggcctccgcctgg

SEQ ID NO: 1809812 - DNA, 25 bp, Homo sapien
gccggaggacgggccgaggacgaca

SEQ ID NO: 1809813 - DNA, 25 bp, Homo sapien
cgcgccgcgtcctccgacttggcct

SEQ ID NO: 1809814 - DNA, 25 bp, Homo sapien
ttccagtggtggatgatgtcggcca

SEQ ID NO: 1809815 - DNA, 25 bp, Homo sapien
aggtccagccggttggcgttccagt

SEQ ID NO: 1809816 - DNA, 25 bp, Homo sapien
tggctgatctcgaacaggtccagcc

SEQ ID NO: 1809817 - DNA, 25 bp, Homo sapien
tgatctcgaacaggtccagccggtt

SEQ ID NO: 1809818 - DNA, 25 bp, Homo sapien
gcacagcgcgcgtcacaggctccat

SEQ ID NO: 1809819 - DNA, 25 bp, Homo sapien
gtttatgaacccgaagcacagcgcg

SEQ ID NO: 1809820 - DNA, 25 bp, Homo sapien
tggcagcctgcaagtttatgaaccc

SEQ ID NO: 1809821 - DNA, 25 bp, Homo sapien
gcctgcaagtttatgaacccgaagc

SEQ ID NO: 1809822 - DNA, 25 bp, Homo sapien
tatgaaaggcttctaatacaattct

SEQ ID NO: 1809823 - DNA, 25 bp, Homo sapien
cattatgaaaggcttctaatacaat

SEQ ID NO: 1809824 - DNA, 25 bp, Homo sapien
tttcattatgaaaggcttctaatac

SEQ ID NO: 1809825 - DNA, 25 bp, Homo sapien
catttcattatgaaaggcttctaat

SEQ ID NO: 1809826 - DNA, 25 bp, Homo sapien
aaagaatcgttccatgggtggcagg

SEQ ID NO: 1809827 - DNA, 25 bp, Homo sapien
tattcaagatgtagtccagtgttcc

SEQ ID NO: 1809828 - DNA, 25 bp, Homo sapien
tgcgagcacttatgaggatacaaag

SEQ ID NO: 1809829 - DNA, 25 bp, Homo sapien
catggtgtgatgcaccgtgacttgt

SEQ ID NO: 1809830 - DNA, 25 bp, Homo sapien
aaacagattaacattctgctcaatt

SEQ ID NO: 1809831 - DNA, 25 bp, Homo sapien
gattaacattctgctcaattatttt

SEQ ID NO: 1809832 - DNA, 25 bp, Homo sapien
ttaacattctgctcaattattttgc

SEQ ID NO: 1809833 - DNA, 25 bp, Homo sapien
cagattaacattctgctcaattatt

SEQ ID NO: 1809834 - DNA, 25 bp, Homo sapien
gcgagcgtttcgattacatcttgag

SEQ ID NO: 1809835 - DNA, 25 bp, Homo sapien
tgagtggtggcagtactagagaccc

SEQ ID NO: 1809836 - DNA, 25 bp, Homo sapien
tcaggtcgaaatttctccgcgagcg

SEQ ID NO: 1809837 - DNA, 25 bp, Homo sapien
ggacagcattcgcatatcaggtcga

SEQ ID NO: 1809838 - DNA, 25 bp, Homo sapien
cactcgacagtattcaactaactga

SEQ ID NO: 1809839 - DNA, 25 bp, Homo sapien
gtattcaactaactgaacagcacag

SEQ ID NO: 1809840 - DNA, 25 bp, Homo sapien
tcacactcgacagtattcaactaac

SEQ ID NO: 1809841 - DNA, 25 bp, Homo sapien
gacagtattcaactaactgaacagc

SEQ ID NO: 1809842 - DNA, 25 bp, Homo sapien
actagaggtttctcatctatatcca

SEQ ID NO: 1809843 - DNA, 25 bp, Homo sapien
gtacaactagaggtttctcatctat

SEQ ID NO: 1809844 - DNA, 25 bp, Homo sapien
aattcagttgtacaactagaggttt

SEQ ID NO: 1809845 - DNA, 25 bp, Homo sapien
tcagttgtacaactagaggtttctc

SEQ ID NO: 1809846 - DNA, 25 bp, Homo sapien
ttaagaacaaatctgccttcccgat

SEQ ID NO: 1809847 - DNA, 25 bp, Homo sapien
aagaacaaatctgccttcccgatca

SEQ ID NO: 1809848 - DNA, 25 bp, Homo sapien
ggcgtcattctcattcttaagaaca

SEQ ID NO: 1809849 - DNA, 25 bp, Homo sapien
cttaggaggaatggcgtcattctca

SEQ ID NO: 1809850 - DNA, 25 bp, Homo sapien
tttcctgcttttcaggtccattact

SEQ ID NO: 1809851 - DNA, 25 bp, Homo sapien
tcttgaagttctggataaccccttc

SEQ ID NO: 1809852 - DNA, 25 bp, Homo sapien
gcttttcaggtccattactttgagc

SEQ ID NO: 1809853 - DNA, 25 bp, Homo sapien
cttgaagttctggataaccccttct

SEQ ID NO: 1809854 - DNA, 25 bp, Homo sapien
tcctccccttggaaaggtctatcat

SEQ ID NO: 1809855 - DNA, 25 bp, Homo sapien
catcctccccttggaaaggtctatc

SEQ ID NO: 1809856 - DNA, 25 bp, Homo sapien
acatcctccccttggaaaggtctat

SEQ ID NO: 1809857 - DNA, 25 bp, Homo sapien
tccccttggaaaggtctatcatctt

SEQ ID NO: 1809858 - DNA, 25 bp, Homo sapien
acaactgctgcctcatggccaaaac

SEQ ID NO: 1809859 - DNA, 25 bp, Homo sapien
atatgagacaactgctgcctcatgg

SEQ ID NO: 1809860 - DNA, 25 bp, Homo sapien
aactgctgcctcatggccaaaacca

SEQ ID NO: 1809861 - DNA, 25 bp, Homo sapien
gctgcctcatggccaaaaccacaga

SEQ ID NO: 1809862 - DNA, 25 bp, Homo sapien
agcctctgactaggcattaagtgta

SEQ ID NO: 1809863 - DNA, 25 bp, Homo sapien
tgtcagcctctgactaggcattaag

SEQ ID NO: 1809864 - DNA, 25 bp, Homo sapien
tcagcctctgactaggcattaagtg

SEQ ID NO: 1809865 - DNA, 25 bp, Homo sapien
gtcagcctctgactaggcattaagt

SEQ ID NO: 1809866 - DNA, 25 bp, Homo sapien
aacctcagcagccagtcgagaattt

SEQ ID NO: 1809867 - DNA, 25 bp, Homo sapien
acctcagcagccagtcgagaatttt

SEQ ID NO: 1809868 - DNA, 25 bp, Homo sapien
ctcagcagccagtcgagaattttca

SEQ ID NO: 1809869 - DNA, 25 bp, Homo sapien
cctcagcagccagtcgagaattttc

SEQ ID NO: 1809870 - DNA, 25 bp, Homo sapien
ttcgagtaaagctggtttccggcat

SEQ ID NO: 1809871 - DNA, 25 bp, Homo sapien
aggccgcccatctgagctccgaaat

SEQ ID NO: 1809872 - DNA, 25 bp, Homo sapien
gagctccgaaattcctgcattctct

SEQ ID NO: 1809873 - DNA, 25 bp, Homo sapien
tgctgcctccgtcgtttcataacca

SEQ ID NO: 1809874 - DNA, 25 bp, Homo sapien
gattgtcttgtagggaatatttggt

SEQ ID NO: 1809875 - DNA, 25 bp, Homo sapien
tagacagcaggattgtcttgtaggg

SEQ ID NO: 1809876 - DNA, 25 bp, Homo sapien
gtctgcaggatctgtagtagacagc

SEQ ID NO: 1809877 - DNA, 25 bp, Homo sapien
tctgtagtagacagcaggattgtct

SEQ ID NO: 1809878 - DNA, 25 bp, Homo sapien
gcgatgcagtaatccttagggtttt

SEQ ID NO: 1809879 - DNA, 25 bp, Homo sapien
gggcgatgcagtaatccttagggtt

SEQ ID NO: 1809880 - DNA, 25 bp, Homo sapien
gatgcagtaatccttagggttttct

SEQ ID NO: 1809881 - DNA, 25 bp, Homo sapien
cgggcgatgcagtaatccttagggt

SEQ ID NO: 1809882 - DNA, 25 bp, Homo sapien
atttgtaaaggacactcatcatcat

SEQ ID NO: 1809883 - DNA, 25 bp, Homo sapien
ctgaagatttgtaaaggacactcat

SEQ ID NO: 1809884 - DNA, 25 bp, Homo sapien
cttggccattccctgaagatttgta

SEQ ID NO: 1809885 - DNA, 25 bp, Homo sapien
acttggccattccctgaagatttgt

SEQ ID NO: 1809886 - DNA, 25 bp, Homo sapien
ctcctttcccttgggtgtcttgcct

SEQ ID NO: 1809887 - DNA, 25 bp, Homo sapien
aatagggcagcttctccggaggaag

SEQ ID NO: 1809888 - DNA, 25 bp, Homo sapien
ggagccatagccagacccgtcagct

SEQ ID NO: 1809889 - DNA, 25 bp, Homo sapien
tgtcttgccttccaagtgtttcttg

SEQ ID NO: 1809890 - DNA, 25 bp, Homo sapien
gagactgctggacaacaaatatcgt

SEQ ID NO: 1809891 - DNA, 25 bp, Homo sapien
taacctacggtaccatgagactgct

SEQ ID NO: 1809892 - DNA, 25 bp, Homo sapien
taaagccacactgccactaactgtg

SEQ ID NO: 1809893 - DNA, 25 bp, Homo sapien
cagagaactgaggttagcaacacca

SEQ ID NO: 1809894 - DNA, 25 bp, Homo sapien
gggttaagacacatgccaggaccca

SEQ ID NO: 1809895 - DNA, 25 bp, Homo sapien
ggttaagacacatgccaggacccag

SEQ ID NO: 1809896 - DNA, 25 bp, Homo sapien
gagagaccatgcagaacacgcggaa

SEQ ID NO: 1809897 - DNA, 25 bp, Homo sapien
acacgcggaatagggaaggaggaga

SEQ ID NO: 1809898 - DNA, 25 bp, Homo sapien
gtgtgatagttgtagtaggcaaagt

SEQ ID NO: 1809899 - DNA, 25 bp, Homo sapien
tgtgatagttgtagtaggcaaagtg

SEQ ID NO: 1809900 - DNA, 25 bp, Homo sapien
cttcgtaagtgtgatagttgtagta

SEQ ID NO: 1809901 - DNA, 25 bp, Homo sapien
agtgtgatagttgtagtaggcaaag

SEQ ID NO: 1809902 - DNA, 25 bp, Homo sapien
taaccccacaacagacagtaacggc

SEQ ID NO: 1809903 - DNA, 25 bp, Homo sapien
gtaacggcactgctaccagaaagtt

SEQ ID NO: 1809904 - DNA, 25 bp, Homo sapien
tagagagataaacatccttcccagg

SEQ ID NO: 1809905 - DNA, 25 bp, Homo sapien
gaagaacctaaatggtggccacagg

SEQ ID NO: 1809906 - DNA, 25 bp, Homo sapien
tgatgatgtaactgcagagcttagc

SEQ ID NO: 1809907 - DNA, 25 bp, Homo sapien
gcttagcacctgcaccatagccatg

SEQ ID NO: 1809908 - DNA, 25 bp, Homo sapien
cacctactgtatcccagatgaggac

SEQ ID NO: 1809909 - DNA, 25 bp, Homo sapien
catagccatggcagtcagtctagtg

SEQ ID NO: 1809910 - DNA, 25 bp, Homo sapien
acacttaactgaaggcggtaaagct

SEQ ID NO: 1809911 - DNA, 25 bp, Homo sapien
gctttggcttatctctagagtcaga

SEQ ID NO: 1809912 - DNA, 25 bp, Homo sapien
taactgaaggcggtaaagctttggc

SEQ ID NO: 1809913 - DNA, 25 bp, Homo sapien
gagttgtcatccaacttttctgtcc

SEQ ID NO: 1809914 - DNA, 25 bp, Homo sapien
tccatccatgttggtaaggtcacag

SEQ ID NO: 1809915 - DNA, 25 bp, Homo sapien
tttgcaagagcatgatcctgactgg

SEQ ID NO: 1809916 - DNA, 25 bp, Homo sapien
taaatacatgggacgccccaaactg

SEQ ID NO: 1809917 - DNA, 25 bp, Homo sapien
gcgtccatacttctgggcgtcacag

SEQ ID NO: 1809918 - DNA, 25 bp, Homo sapien
ataatcaaaacattttaaatcttag

SEQ ID NO: 1809919 - DNA, 25 bp, Homo sapien
gccggcggccctatttatggacaca

SEQ ID NO: 1809920 - DNA, 25 bp, Homo sapien
cattatgtaagtctatccaggcagc

SEQ ID NO: 1809921 - DNA, 25 bp, Homo sapien
gaaagtgacacatgaggaacagcgg

SEQ ID NO: 1809922 - DNA, 25 bp, Homo sapien
gaacagcggtgagcttctctcctat

SEQ ID NO: 1809923 - DNA, 25 bp, Homo sapien
caaatcaaaagttgtctcctgaaca

SEQ ID NO: 1809924 - DNA, 25 bp, Homo sapien
gctgtcccactatgaatatctcctc

SEQ ID NO: 1809925 - DNA, 25 bp, Homo sapien
tcccaaatcaaaagttgtctcctga

SEQ ID NO: 1809926 - DNA, 25 bp, Homo sapien
ttgcttgtcggtaatgctgtcccac

SEQ ID NO: 1809927 - DNA, 25 bp, Homo sapien
caatggatggcaatactatttacac

SEQ ID NO: 1809928 - DNA, 25 bp, Homo sapien
ccacatccggcccataagacagatt

SEQ ID NO: 1809929 - DNA, 25 bp, Homo sapien
agaaacacaattgctggtcaatgga

SEQ ID NO: 1809930 - DNA, 25 bp, Homo sapien
cataagacagatttatagaaacaca

SEQ ID NO: 1809931 - DNA, 25 bp, Homo sapien
tgctagaggcagacgacactctgtc

SEQ ID NO: 1809932 - DNA, 25 bp, Homo sapien
tgctttcttgcctgcgataatctgg

SEQ ID NO: 1809933 - DNA, 25 bp, Homo sapien
ttccccgctcggctgtgctagaggc

SEQ ID NO: 1809934 - DNA, 25 bp, Homo sapien
tgctgttctactctgatcatcggct

SEQ ID NO: 1809935 - DNA, 25 bp, Homo sapien
ctcataaagtgaacctgagtaaact

SEQ ID NO: 1809936 - DNA, 25 bp, Homo sapien
acatctcccttacattcccatattt

SEQ ID NO: 1809937 - DNA, 25 bp, Homo sapien
ccttctccatgcaccaaaaaatgaa

SEQ ID NO: 1809938 - DNA, 25 bp, Homo sapien
tgtagctaggcagttatatatctca

SEQ ID NO: 1809939 - DNA, 25 bp, Homo sapien
aaagctgacatcacttaaaataagg

SEQ ID NO: 1809940 - DNA, 25 bp, Homo sapien
taaaagaagaaagctgacatcactt

SEQ ID NO: 1809941 - DNA, 25 bp, Homo sapien
agctgacatcacttaaaataaggtc

SEQ ID NO: 1809942 - DNA, 25 bp, Homo sapien
aagaagaaagctgacatcacttaaa

SEQ ID NO: 1809943 - DNA, 25 bp, Homo sapien
ctgaattcaatgcttgcaggtagta

SEQ ID NO: 1809944 - DNA, 25 bp, Homo sapien
tcaatgcttgcaggtagtatcagct

SEQ ID NO: 1809945 - DNA, 25 bp, Homo sapien
gcaggtagtatcagctcaggcccag

SEQ ID NO: 1809946 - DNA, 25 bp, Homo sapien
ttccctgaattcaatgcttgcaggt

SEQ ID NO: 1809947 - DNA, 25 bp, Homo sapien
tataatacatatgtaggggacaact

SEQ ID NO: 1809948 - DNA, 25 bp, Homo sapien
gggacaacttaaagtggactgtaga

SEQ ID NO: 1809949 - DNA, 25 bp, Homo sapien
taatggcagacaaaaatgaatcttc

SEQ ID NO: 1809950 - DNA, 25 bp, Homo sapien
gtggactgtagagctattagtataa

SEQ ID NO: 1809951 - DNA, 25 bp, Homo sapien
gttggacaatacataccggcatgcc

SEQ ID NO: 1809952 - DNA, 25 bp, Homo sapien
ggttggacaatacataccggcatgc

SEQ ID NO: 1809953 - DNA, 25 bp, Homo sapien
tggacaatacataccggcatgccat

SEQ ID NO: 1809954 - DNA, 25 bp, Homo sapien
ctggttggacaatacataccggcat

SEQ ID NO: 1809955 - DNA, 25 bp, Homo sapien
gacgactgcaatgactttatgtgtg

SEQ ID NO: 1809956 - DNA, 25 bp, Homo sapien
caatgactttatgtgtgcgctctgt

SEQ ID NO: 1809957 - DNA, 25 bp, Homo sapien
tgctcaccatcttgttgacgactgc

SEQ ID NO: 1809958 - DNA, 25 bp, Homo sapien
tatgtgtgcgctctgtagggctgat

SEQ ID NO: 1809959 - DNA, 25 bp, Homo sapien
aggagcatggctggccggctggaac

SEQ ID NO: 1809960 - DNA, 25 bp, Homo sapien
tcactggaggagcatggctggccgg

SEQ ID NO: 1809961 - DNA, 25 bp, Homo sapien
actggaggagcatggctggccggct

SEQ ID NO: 1809962 - DNA, 25 bp, Homo sapien
ggaggagcatggctggccggctgga

SEQ ID NO: 1809963 - DNA, 25 bp, Homo sapien
tgtgaatgcaccaaatgcgactgaa

SEQ ID NO: 1809964 - DNA, 25 bp, Homo sapien
tacacatgtgctatcaaaaagccca

SEQ ID NO: 1809965 - DNA, 25 bp, Homo sapien
gatggagacgttttggaaccgacag

SEQ ID NO: 1809966 - DNA, 25 bp, Homo sapien
caattactaccaacgtctaggctca

SEQ ID NO: 1809967 - DNA, 25 bp, Homo sapien
taggtgtctcacaactcgaaacagg

SEQ ID NO: 1809968 - DNA, 25 bp, Homo sapien
catgaaagtaacaaaacggtatcca

SEQ ID NO: 1809969 - DNA, 25 bp, Homo sapien
caggcttagtaagtccaaacatgat

SEQ ID NO: 1809970 - DNA, 25 bp, Homo sapien
tcaataaggaaaaggctatcaaggg

SEQ ID NO: 1809971 - DNA, 25 bp, Homo sapien
tatgaaatgccgataaaggttgcac

SEQ ID NO: 1809972 - DNA, 25 bp, Homo sapien
cagaaattatgaaatgccgataaag

SEQ ID NO: 1809973 - DNA, 25 bp, Homo sapien
gaaatgccgataaaggttgcacagt

SEQ ID NO: 1809974 - DNA, 25 bp, Homo sapien
gataaaggttgcacagtcaaaaagg

SEQ ID NO: 1809975 - DNA, 25 bp, Homo sapien
gagatccaaagaataggaaccaagg

SEQ ID NO: 1809976 - DNA, 25 bp, Homo sapien
atcctctcccgaccacatgtgcagg

SEQ ID NO: 1809977 - DNA, 25 bp, Homo sapien
ggacaccatgcaactcagtatcaag

SEQ ID NO: 1809978 - DNA, 25 bp, Homo sapien
ggcaacctcagatgagatccaaaga

SEQ ID NO: 1809979 - DNA, 25 bp, Homo sapien
tcagcggagaaatggagatatcaaa

SEQ ID NO: 1809980 - DNA, 25 bp, Homo sapien
tataacaccaaattgtagaccgtgc

SEQ ID NO: 1809981 - DNA, 25 bp, Homo sapien
caatttatagatggaatcagcggag

SEQ ID NO: 1809982 - DNA, 25 bp, Homo sapien
gctgctgaagatagaccagtacctt

SEQ ID NO: 1809983 - DNA, 25 bp, Homo sapien
tcttgagcatccagtgtgatccgac

SEQ ID NO: 1809984 - DNA, 25 bp, Homo sapien
gaagttcagatgcatttgccatcca

SEQ ID NO: 1809985 - DNA, 25 bp, Homo sapien
cggtcttgcttaatgaagttgagaa

SEQ ID NO: 1809986 - DNA, 25 bp, Homo sapien
cgactaaggtctcggtcttgcttaa

SEQ ID NO: 1809987 - DNA, 25 bp, Homo sapien
ctatttttggtcgttgcagactgtt

SEQ ID NO: 1809988 - DNA, 25 bp, Homo sapien
catctagaaaggctggcatgtaatt

SEQ ID NO: 1809989 - DNA, 25 bp, Homo sapien
tttttggtcgttgcagactgttctc

SEQ ID NO: 1809990 - DNA, 25 bp, Homo sapien
gctggcatgtaattattaagttctg

SEQ ID NO: 1809991 - DNA, 25 bp, Homo sapien
gacggataatcgcaccccagtaatg

SEQ ID NO: 1809992 - DNA, 25 bp, Homo sapien
tgcagcgtcgtagcaaggacatggc

SEQ ID NO: 1809993 - DNA, 25 bp, Homo sapien
tgcacgatcctgctcagatgacagt

SEQ ID NO: 1809994 - DNA, 25 bp, Homo sapien
caatatggcccaactgctgacggat

SEQ ID NO: 1809995 - DNA, 25 bp, Homo sapien
tgatagttctgtaataaggcttgaa

SEQ ID NO: 1809996 - DNA, 25 bp, Homo sapien
cgttgggataaaaggctcatcaggt

SEQ ID NO: 1809997 - DNA, 25 bp, Homo sapien
tatccatggtaagcaaagtcgttgc

SEQ ID NO: 1809998 - DNA, 25 bp, Homo sapien
tgtcatcaggtgcatacttatccat

SEQ ID NO: 1809999 - DNA, 25 bp, Homo sapien
aaattcttgtaaaccatttggaatg

SEQ ID NO: 1810000 - DNA, 25 bp, Homo sapien
tctgacaacatcacaagaataacca

SEQ ID NO: 1810001 - DNA, 25 bp, Homo sapien
tcttctggcaaaagaaacggcagct

SEQ ID NO: 1810002 - DNA, 25 bp, Homo sapien
ccagctcatcggcagtgttttcagc

SEQ ID NO: 1810003 - DNA, 25 bp, Homo sapien
taacgctctaagtaacccgtgtgtg

SEQ ID NO: 1810004 - DNA, 25 bp, Homo sapien
ggtgcacctctaccaagactgaagg

SEQ ID NO: 1810005 - DNA, 25 bp, Homo sapien
tgaggagactgtccgaggactaacg

SEQ ID NO: 1810006 - DNA, 25 bp, Homo sapien
tttccagggaatggcagagcacgga

SEQ ID NO: 1810007 - DNA, 25 bp, Homo sapien
gcaggagtagagtaccgacaacggt

SEQ ID NO: 1810008 - DNA, 25 bp, Homo sapien
ccgacaacggtaacagcacagatat

SEQ ID NO: 1810009 - DNA, 25 bp, Homo sapien
tccacataaaaggacgcctgattag

SEQ ID NO: 1810010 - DNA, 25 bp, Homo sapien
catgttaagtaggaagacactgagg

SEQ ID NO: 1810011 - DNA, 25 bp, Homo sapien
gagtccaggctggtcgtacagtctt

SEQ ID NO: 1810012 - DNA, 25 bp, Homo sapien
gatgcctcggccacggaaatatcac

SEQ ID NO: 1810013 - DNA, 25 bp, Homo sapien
tattagcttacggaatgcatctcag

SEQ ID NO: 1810014 - DNA, 25 bp, Homo sapien
caagggccgcatttccataacaagc

SEQ ID NO: 1810015 - DNA, 25 bp, Homo sapien
tccaacacacggtattgattcttct

SEQ ID NO: 1810016 - DNA, 25 bp, Homo sapien
gcaagattaattaccaattgcttaa

SEQ ID NO: 1810017 - DNA, 25 bp, Homo sapien
gattcttcttactctacacctttaa

SEQ ID NO: 1810018 - DNA, 25 bp, Homo sapien
gtaagtgaaaaagcacatcttgtca

SEQ ID NO: 1810019 - DNA, 25 bp, Homo sapien
aaatatattgtccaagtacctggtg

SEQ ID NO: 1810020 - DNA, 25 bp, Homo sapien
gtgtgaggaattaacctgcaaaatc

SEQ ID NO: 1810021 - DNA, 25 bp, Homo sapien
gaaggtgactttcataatctgcacc

SEQ ID NO: 1810022 - DNA, 25 bp, Homo sapien
caagtacctggtgaacgtgtgtgag

SEQ ID NO: 1810023 - DNA, 25 bp, Homo sapien
tgccatcacaccaatcttcagtgta

SEQ ID NO: 1810024 - DNA, 25 bp, Homo sapien
taaggatccatttcacttcatggta

SEQ ID NO: 1810025 - DNA, 25 bp, Homo sapien
cactgcttacagacaaaactgtaat

SEQ ID NO: 1810026 - DNA, 25 bp, Homo sapien
aaactgtaatagacatggcttggga

SEQ ID NO: 1810027 - DNA, 25 bp, Homo sapien
tctggagatggccatgatatgatgc

SEQ ID NO: 1810028 - DNA, 25 bp, Homo sapien
ttaaaactgtctatatgaggcaaag

SEQ ID NO: 1810029 - DNA, 25 bp, Homo sapien
taagacaaggcagaactgactataa

SEQ ID NO: 1810030 - DNA, 25 bp, Homo sapien
aaacctaaggtatgccaggaagcca

SEQ ID NO: 1810031 - DNA, 25 bp, Homo sapien
tatgttcactttgtcagtagttcaa

SEQ ID NO: 1810032 - DNA, 25 bp, Homo sapien
gtattagggtatgttcactttgtca

SEQ ID NO: 1810033 - DNA, 25 bp, Homo sapien
gttgcaataagccaaatcgcgccac

SEQ ID NO: 1810034 - DNA, 25 bp, Homo sapien
aacagacagcagttagtaaagtcaa

SEQ ID NO: 1810035 - DNA, 25 bp, Homo sapien
gctaaggcccattccattctgcttt

SEQ ID NO: 1810036 - DNA, 25 bp, Homo sapien
tctgcttttttagggtcacagtgat

SEQ ID NO: 1810037 - DNA, 25 bp, Homo sapien
cattctgcttttttagggtcacagt

SEQ ID NO: 1810038 - DNA, 25 bp, Homo sapien
ctttgctgcaacaatgctaaggccc

SEQ ID NO: 1810039 - DNA, 25 bp, Homo sapien
gatagaaacaaaaatacaaattgta

SEQ ID NO: 1810040 - DNA, 25 bp, Homo sapien
ctagagatagaaacaaaaatacaaa

SEQ ID NO: 1810041 - DNA, 25 bp, Homo sapien
caaaaatacaaattgtagtggccaa

SEQ ID NO: 1810042 - DNA, 25 bp, Homo sapien
agaaacaaaaatacaaattgtagtg

SEQ ID NO: 1810043 - DNA, 25 bp, Homo sapien
gtaacagtttcaagcttttcatata

SEQ ID NO: 1810044 - DNA, 25 bp, Homo sapien
cagtttcaagcttttcatatattcc

SEQ ID NO: 1810045 - DNA, 25 bp, Homo sapien
tatgtaacagtttcaagcttttcat

SEQ ID NO: 1810046 - DNA, 25 bp, Homo sapien
ctatgtaacagtttcaagcttttca

SEQ ID NO: 1810047 - DNA, 25 bp, Homo sapien
ttcagaaggcacttctatcatattg

SEQ ID NO: 1810048 - DNA, 25 bp, Homo sapien
aatcacaggtctctagcaatgggaa

SEQ ID NO: 1810049 - DNA, 25 bp, Homo sapien
ttctcaaggcacattaactgtgtaa

SEQ ID NO: 1810050 - DNA, 25 bp, Homo sapien
ggacccttcacaaattagagcagct

SEQ ID NO: 1810051 - DNA, 25 bp, Homo sapien
aaatcacattagactcacggaagcc

SEQ ID NO: 1810052 - DNA, 25 bp, Homo sapien
tttcacacgataggcagtaatagtc

SEQ ID NO: 1810053 - DNA, 25 bp, Homo sapien
cgtaatagcaaagattccagagtca

SEQ ID NO: 1810054 - DNA, 25 bp, Homo sapien
cacggaagccagtaattgtactaca

SEQ ID NO: 1810055 - DNA, 25 bp, Homo sapien
agggaagacttgctgtgtgagtgac

SEQ ID NO: 1810056 - DNA, 25 bp, Homo sapien
cagggaagacttgctgtgtgagtga

SEQ ID NO: 1810057 - DNA, 25 bp, Homo sapien
aagttcagcactgacttccactctg

SEQ ID NO: 1810058 - DNA, 25 bp, Homo sapien
gcactgacttccactctggagcgca

SEQ ID NO: 1810059 - DNA, 25 bp, Homo sapien
ccttcaagttcagcactgacttcca

SEQ ID NO: 1810060 - DNA, 25 bp, Homo sapien
cttccactctggagcgcagtttaga

SEQ ID NO: 1810061 - DNA, 25 bp, Homo sapien
tgagggcaaccactaggctcttttc

SEQ ID NO: 1810062 - DNA, 25 bp, Homo sapien
tatacaagcagacagccaacgtgca

SEQ ID NO: 1810063 - DNA, 25 bp, Homo sapien
tgcaagctgaacatgtggactccac

SEQ ID NO: 1810064 - DNA, 25 bp, Homo sapien
taaacttcagttttgtggcacctgt

SEQ ID NO: 1810065 - DNA, 25 bp, Homo sapien
taagctccacgtacacatcaatgaa

SEQ ID NO: 1810066 - DNA, 25 bp, Homo sapien
gaacaaatatccatcgagcgcctgt

SEQ ID NO: 1810067 - DNA, 25 bp, Homo sapien
gcgcctgtattgtcctaagctccac

SEQ ID NO: 1810068 - DNA, 25 bp, Homo sapien
tgcatgcctattcccttccagctgg

SEQ ID NO: 1810069 - DNA, 25 bp, Homo sapien
ctcaatgcaagtctccagcccagtc

SEQ ID NO: 1810070 - DNA, 25 bp, Homo sapien
caagtctccagcccagtcccagatg

SEQ ID NO: 1810071 - DNA, 25 bp, Homo sapien
caatgcaagtctccagcccagtccc

SEQ ID NO: 1810072 - DNA, 25 bp, Homo sapien
agtctccagcccagtcccagatgcc

SEQ ID NO: 1810073 - DNA, 25 bp, Homo sapien
caatcactgcgaggcactgtacggt

SEQ ID NO: 1810074 - DNA, 25 bp, Homo sapien
ccttaggtcacaacgattgaagaca

SEQ ID NO: 1810075 - DNA, 25 bp, Homo sapien
ttttctgtaacaccctggagctatg

SEQ ID NO: 1810076 - DNA, 25 bp, Homo sapien
gaaagcagtcctacgcatgaaatct

SEQ ID NO: 1810077 - DNA, 25 bp, Homo sapien
cctttcacaaccgacttcacataga

SEQ ID NO: 1810078 - DNA, 25 bp, Homo sapien
ttcctagtttatcttgaccagcacc

SEQ ID NO: 1810079 - DNA, 25 bp, Homo sapien
caaccgacttcacatagattcctag

SEQ ID NO: 1810080 - DNA, 25 bp, Homo sapien
tagattcctagtttatcttgaccag

SEQ ID NO: 1810081 - DNA, 25 bp, Homo sapien
tgatcacctgcagctagacgtccat

SEQ ID NO: 1810082 - DNA, 25 bp, Homo sapien
ctgaggagctgatcacctgcagcta

SEQ ID NO: 1810083 - DNA, 25 bp, Homo sapien
gagagtccaaccagacttcgtccat

SEQ ID NO: 1810084 - DNA, 25 bp, Homo sapien
tcctgagagagtccaaccagacttc

SEQ ID NO: 1810085 - DNA, 25 bp, Homo sapien
agaagggtggccagaccgtggtaga

SEQ ID NO: 1810086 - DNA, 25 bp, Homo sapien
ggcaccctgctttgctacttccagt

SEQ ID NO: 1810087 - DNA, 25 bp, Homo sapien
gaccgtggtagatggcaccctgctt

SEQ ID NO: 1810088 - DNA, 25 bp, Homo sapien
tggccagaccgtggtagatggcacc

SEQ ID NO: 1810089 - DNA, 25 bp, Homo sapien
tcaacaccctgattatcattaaaat

SEQ ID NO: 1810090 - DNA, 25 bp, Homo sapien
gaattattatagagctcaaagcctt

SEQ ID NO: 1810091 - DNA, 25 bp, Homo sapien
tcaaagccttcactctttggtcggg

SEQ ID NO: 1810092 - DNA, 25 bp, Homo sapien
tggttcactatattctgcccaaggc

SEQ ID NO: 1810093 - DNA, 25 bp, Homo sapien
gaggactctcaggagacccattttg

SEQ ID NO: 1810094 - DNA, 25 bp, Homo sapien
tgtctcctgctgcatatccttctat

SEQ ID NO: 1810095 - DNA, 25 bp, Homo sapien
gcttatgggatcaactgaatctaaa

SEQ ID NO: 1810096 - DNA, 25 bp, Homo sapien
tagctctgtgtatcaggccagggac

SEQ ID NO: 1810097 - DNA, 25 bp, Homo sapien
catttttggtaataggccagaaagt

SEQ ID NO: 1810098 - DNA, 25 bp, Homo sapien
ctcagtgcagaggtttccagtagag

SEQ ID NO: 1810099 - DNA, 25 bp, Homo sapien
tccagaggcatatgcacttttccct

SEQ ID NO: 1810100 - DNA, 25 bp, Homo sapien
gtagagacagatgttatcttcgctg

SEQ ID NO: 1810101 - DNA, 25 bp, Homo sapien
tcttcgctgttgttccagaggcata

SEQ ID NO: 1810102 - DNA, 25 bp, Homo sapien
ggtaaaatactctctggtgtacgtc

SEQ ID NO: 1810103 - DNA, 25 bp, Homo sapien
actctctggtgtacgtctgagtggg

SEQ ID NO: 1810104 - DNA, 25 bp, Homo sapien
taaaatactctctggtgtacgtctg

SEQ ID NO: 1810105 - DNA, 25 bp, Homo sapien
aaatactctctggtgtacgtctgag

SEQ ID NO: 1810106 - DNA, 25 bp, Homo sapien
gattactatctgtgtgcatatgtgg

SEQ ID NO: 1810107 - DNA, 25 bp, Homo sapien
atctgtgtgcatatgtggcttttcc

SEQ ID NO: 1810108 - DNA, 25 bp, Homo sapien
ctgaggaggagccatccgatcctgg

SEQ ID NO: 1810109 - DNA, 25 bp, Homo sapien
tactggaatgattactatctgtgtg

SEQ ID NO: 1810110 - DNA, 25 bp, Homo sapien
tggacattccatcgaaatcaccggc

SEQ ID NO: 1810111 - DNA, 25 bp, Homo sapien
tattcgatgccgctcaagttggtaa

SEQ ID NO: 1810112 - DNA, 25 bp, Homo sapien
ttaaggactgagtgcgcatctggcc

SEQ ID NO: 1810113 - DNA, 25 bp, Homo sapien
caagtctctgcgctcgatcgtgcgg

SEQ ID NO: 1810114 - DNA, 25 bp, Homo sapien
gcatgtccacgatgtgcatctgctg

SEQ ID NO: 1810115 - DNA, 25 bp, Homo sapien
ggtccggtttgctctggagctcctg

SEQ ID NO: 1810116 - DNA, 25 bp, Homo sapien
catgagcttgcgcagccggtcgctc

SEQ ID NO: 1810117 - DNA, 25 bp, Homo sapien
gatctccttgctcagcatgtccacg

SEQ ID NO: 1810118 - DNA, 25 bp, Homo sapien
cgctgcatgatcagcatggtgtcca

SEQ ID NO: 1810119 - DNA, 25 bp, Homo sapien
tcgctcttcgttcagcctccaggcg

SEQ ID NO: 1810120 - DNA, 25 bp, Homo sapien
gcatggtgtccacatcatcgtcctc

SEQ ID NO: 1810121 - DNA, 25 bp, Homo sapien
agcctccaggcgctgcatgatcagc

SEQ ID NO: 1810122 - DNA, 25 bp, Homo sapien
aaatagggaccacagatgggcacag

SEQ ID NO: 1810123 - DNA, 25 bp, Homo sapien
ggaaacacgcagaagctaaaatagg

SEQ ID NO: 1810124 - DNA, 25 bp, Homo sapien
atgggaaacacgcagaagctaaaat

SEQ ID NO: 1810125 - DNA, 25 bp, Homo sapien
gctaaaatagggaccacagatgggc

SEQ ID NO: 1810126 - DNA, 25 bp, Homo sapien
aatccttatcacgatcaggggccta

SEQ ID NO: 1810127 - DNA, 25 bp, Homo sapien
gactcatttctctacgacatcagcc

SEQ ID NO: 1810128 - DNA, 25 bp, Homo sapien
gacatcagccaagagtaacacatac

SEQ ID NO: 1810129 - DNA, 25 bp, Homo sapien
tttctctacgacatcagccaagagt

SEQ ID NO: 1810130 - DNA, 25 bp, Homo sapien
aaattttgcctaccctggatcaaga

SEQ ID NO: 1810131 - DNA, 25 bp, Homo sapien
aatgcttgcttcatcaacagtacaa

SEQ ID NO: 1810132 - DNA, 25 bp, Homo sapien
gaacacaatatggtcaatagcattc

SEQ ID NO: 1810133 - DNA, 25 bp, Homo sapien
gcctaaagtatcaatctggccctgg

SEQ ID NO: 1810134 - DNA, 25 bp, Homo sapien
tgggtgacacaaggccatgaacgtc

SEQ ID NO: 1810135 - DNA, 25 bp, Homo sapien
gaatccatcttagtgcacccaggag

SEQ ID NO: 1810136 - DNA, 25 bp, Homo sapien
ggtttagacctgtaatctgccatcg

SEQ ID NO: 1810137 - DNA, 25 bp, Homo sapien
aaagaatcacactactgggctccaa

SEQ ID NO: 1810138 - DNA, 25 bp, Homo sapien
tagaacagagattgctggcatagca

SEQ ID NO: 1810139 - DNA, 25 bp, Homo sapien
tctaggaacattcaaaggcatgctt

SEQ ID NO: 1810140 - DNA, 25 bp, Homo sapien
cacccctaaggagaactggatctac

SEQ ID NO: 1810141 - DNA, 25 bp, Homo sapien
tctcctgatggaggacacccctaag

SEQ ID NO: 1810142 - DNA, 25 bp, Homo sapien
ttatgactgaaaccgagaaaaggtc

SEQ ID NO: 1810143 - DNA, 25 bp, Homo sapien
gataaagataccatacgcaagcata

SEQ ID NO: 1810144 - DNA, 25 bp, Homo sapien
cataatgggccctaaacgatgagcc

SEQ ID NO: 1810145 - DNA, 25 bp, Homo sapien
gaatttacaacagaccatgaacctc

SEQ ID NO: 1810146 - DNA, 25 bp, Homo sapien
tattaccgctgtgctaaactgaggg

SEQ ID NO: 1810147 - DNA, 25 bp, Homo sapien
tttataaataatgaggtgctgttaa

SEQ ID NO: 1810148 - DNA, 25 bp, Homo sapien
ttttataaataatgaggtgctgtta

SEQ ID NO: 1810149 - DNA, 25 bp, Homo sapien
tataaataatgaggtgctgttaata

SEQ ID NO: 1810150 - DNA, 25 bp, Homo sapien
attttataaataatgaggtgctgtt

SEQ ID NO: 1810151 - DNA, 25 bp, Homo sapien
actcgactgcctaccacactccaga

SEQ ID NO: 1810152 - DNA, 25 bp, Homo sapien
ttggcctggaatccgatcccactca

SEQ ID NO: 1810153 - DNA, 25 bp, Homo sapien
cttcgagagcttgggaccttggcct

SEQ ID NO: 1810154 - DNA, 25 bp, Homo sapien
acttggacaaaggtcactgttccca

SEQ ID NO: 1810155 - DNA, 25 bp, Homo sapien
aatttcgagaaaatggttcctgcca

SEQ ID NO: 1810156 - DNA, 25 bp, Homo sapien
ttgtcaaaccaagtaaatttcgaga

SEQ ID NO: 1810157 - DNA, 25 bp, Homo sapien
tgagcttagccactgagagatttgt

SEQ ID NO: 1810158 - DNA, 25 bp, Homo sapien
aacgtgttaacaagacaaacctgag

SEQ ID NO: 1810159 - DNA, 25 bp, Homo sapien
tcttcctcttgcctcgctcggtctt

SEQ ID NO: 1810160 - DNA, 25 bp, Homo sapien
ttccgcttcccgcttgcgcatctct

SEQ ID NO: 1810161 - DNA, 25 bp, Homo sapien
cgcttgcgcatctcttctaactgct

SEQ ID NO: 1810162 - DNA, 25 bp, Homo sapien
ttcagcgtctcgttttgttcgctcc

SEQ ID NO: 1810163 - DNA, 25 bp, Homo sapien
ggactgggcccagctatagcaatgg

SEQ ID NO: 1810164 - DNA, 25 bp, Homo sapien
gttgcaggtccaatcacaaagctgg

SEQ ID NO: 1810165 - DNA, 25 bp, Homo sapien
cagggagcgctttcatggaacagca

SEQ ID NO: 1810166 - DNA, 25 bp, Homo sapien
catgttcagtaaagatgagtgcccg

SEQ ID NO: 1810167 - DNA, 25 bp, Homo sapien
tataacaaagcaaacccatgagttt

SEQ ID NO: 1810168 - DNA, 25 bp, Homo sapien
ataacaaagcaaacccatgagtttt

SEQ ID NO: 1810169 - DNA, 25 bp, Homo sapien
ctataacaaagcaaacccatgagtt

SEQ ID NO: 1810170 - DNA, 25 bp, Homo sapien
caactttattctacccaacaaatga

SEQ ID NO: 1810171 - DNA, 25 bp, Homo sapien
tctacccaacaaatgaatggcacat

SEQ ID NO: 1810172 - DNA, 25 bp, Homo sapien
tttattctacccaacaaatgaatgg

SEQ ID NO: 1810173 - DNA, 25 bp, Homo sapien
ttacaagacaactttattctaccca

SEQ ID NO: 1810174 - DNA, 25 bp, Homo sapien
gagagccaggaactaacagcaacag

SEQ ID NO: 1810175 - DNA, 25 bp, Homo sapien
cacacacagagtgaatacgcaatgt

SEQ ID NO: 1810176 - DNA, 25 bp, Homo sapien
tagaaatcctgaaggaaagactctc

SEQ ID NO: 1810177 - DNA, 25 bp, Homo sapien
taaaccagaatgacttcttgtggct

SEQ ID NO: 1810178 - DNA, 25 bp, Homo sapien
ggccttcaaagggaacaatcctcat

SEQ ID NO: 1810179 - DNA, 25 bp, Homo sapien
caaagggaacaatcctcatcatcac

SEQ ID NO: 1810180 - DNA, 25 bp, Homo sapien
ggaacagccgacccactgggccttc

SEQ ID NO: 1810181 - DNA, 25 bp, Homo sapien
cgggaatagacaagagtgcaaaggt

SEQ ID NO: 1810182 - DNA, 25 bp, Homo sapien
tgtaatacccttcttcctgtcgcct

SEQ ID NO: 1810183 - DNA, 25 bp, Homo sapien
gcgccgcctcgtcgtgctgtctgcg

SEQ ID NO: 1810184 - DNA, 25 bp, Homo sapien
gcttccaggcggctgtaataccctt

SEQ ID NO: 1810185 - DNA, 25 bp, Homo sapien
gtcgtgctgtctgcgcctctcggct

SEQ ID NO: 1810186 - DNA, 25 bp, Homo sapien
gtaggaggcgtttcgctgaggcggg

SEQ ID NO: 1810187 - DNA, 25 bp, Homo sapien
gaggtaggaggcgtttcgctgaggc

SEQ ID NO: 1810188 - DNA, 25 bp, Homo sapien
cagtgaacagcgagtcgggggagag

SEQ ID NO: 1810189 - DNA, 25 bp, Homo sapien
ttgtatgcaacaaacttggcagtga

SEQ ID NO: 1810190 - DNA, 25 bp, Homo sapien
agagaaagacgccatcggaggccgg

SEQ ID NO: 1810191 - DNA, 25 bp, Homo sapien
agcagtactgttggctttggctgag

SEQ ID NO: 1810192 - DNA, 25 bp, Homo sapien
gctggccttttttgtgagcagtact

SEQ ID NO: 1810193 - DNA, 25 bp, Homo sapien
ctttgcagtggctgggatggtagga

SEQ ID NO: 1810194 - DNA, 25 bp, Homo sapien
aagacaaagagagctgatttgtcac

SEQ ID NO: 1810195 - DNA, 25 bp, Homo sapien
gacaaagagagctgatttgtcactc

SEQ ID NO: 1810196 - DNA, 25 bp, Homo sapien
ttaagacaaagagagctgatttgtc

SEQ ID NO: 1810197 - DNA, 25 bp, Homo sapien
caaagagagctgatttgtcactctt

SEQ ID NO: 1810198 - DNA, 25 bp, Homo sapien
cactacagcgtgtgaaaagcacttg

SEQ ID NO: 1810199 - DNA, 25 bp, Homo sapien
atgactactgaacccacgcctgtga

SEQ ID NO: 1810200 - DNA, 25 bp, Homo sapien
gagagcgcgtgatctattccacagg

SEQ ID NO: 1810201 - DNA, 25 bp, Homo sapien
tgcacggaggtcatgaagccaacag

SEQ ID NO: 1810202 - DNA, 25 bp, Homo sapien
cagacggctctgtacattacgaaga

SEQ ID NO: 1810203 - DNA, 25 bp, Homo sapien
tcagatgtcggctatgacctggtcc

SEQ ID NO: 1810204 - DNA, 25 bp, Homo sapien
tgtccagtggaagaagcccagtcca

SEQ ID NO: 1810205 - DNA, 25 bp, Homo sapien
gacacaaggtcggaatgcgctctgc

SEQ ID NO: 1810206 - DNA, 25 bp, Homo sapien
tacaggctgcagtaataaatgctca

SEQ ID NO: 1810207 - DNA, 25 bp, Homo sapien
aaatgttgacctgacgcccttcact

SEQ ID NO: 1810208 - DNA, 25 bp, Homo sapien
gcaactctgggtgagtgtaacatca

SEQ ID NO: 1810209 - DNA, 25 bp, Homo sapien
tcatccctgttggtggcctgagtaa

SEQ ID NO: 1810210 - DNA, 25 bp, Homo sapien
caagttaaagtacctgattatttct

SEQ ID NO: 1810211 - DNA, 25 bp, Homo sapien
gataaagatgcagtgctcagagaat

SEQ ID NO: 1810212 - DNA, 25 bp, Homo sapien
ttccatgaaagaaacagtacaagtt

SEQ ID NO: 1810213 - DNA, 25 bp, Homo sapien
taagctttactcatgataaagatgc

SEQ ID NO: 1810214 - DNA, 25 bp, Homo sapien
ttctcttttgcatcccgacaggcgt

SEQ ID NO: 1810215 - DNA, 25 bp, Homo sapien
cttttagagcgcttctcttttgcat

SEQ ID NO: 1810216 - DNA, 25 bp, Homo sapien
ccgacaggcgtcatgggctccaaca

SEQ ID NO: 1810217 - DNA, 25 bp, Homo sapien
tttgcatcccgacaggcgtcatggg

SEQ ID NO: 1810218 - DNA, 25 bp, Homo sapien
aatgtcaagttttcaggggccccag

SEQ ID NO: 1810219 - DNA, 25 bp, Homo sapien
cccagaacttccaggtgaatctgca

SEQ ID NO: 1810220 - DNA, 25 bp, Homo sapien
gggccccagaacttccaggtgaatc

SEQ ID NO: 1810221 - DNA, 25 bp, Homo sapien
gaatgtcaagttttcaggggcccca

SEQ ID NO: 1810222 - DNA, 25 bp, Homo sapien
taatttacgagaagctttcacttta

SEQ ID NO: 1810223 - DNA, 25 bp, Homo sapien
tattggatacatcttgaccttgtga

SEQ ID NO: 1810224 - DNA, 25 bp, Homo sapien
ggatacatcttgaccttgtgaaaaa

SEQ ID NO: 1810225 - DNA, 25 bp, Homo sapien
ttacgagaagctttcactttattgg

SEQ ID NO: 1810226 - DNA, 25 bp, Homo sapien
ttgtgttcagttcattctccagttc

SEQ ID NO: 1810227 - DNA, 25 bp, Homo sapien
gtgttcagttcattctccagttctg

SEQ ID NO: 1810228 - DNA, 25 bp, Homo sapien
tttgtgttcagttcattctccagtt

SEQ ID NO: 1810229 - DNA, 25 bp, Homo sapien
tgtgttcagttcattctccagttct

SEQ ID NO: 1810230 - DNA, 25 bp, Homo sapien
taagccacttcacgatgcagactag

SEQ ID NO: 1810231 - DNA, 25 bp, Homo sapien
gatggaacagtctcggacgtgcgtc

SEQ ID NO: 1810232 - DNA, 25 bp, Homo sapien
cgtcatatgttccttcccgggtaga

SEQ ID NO: 1810233 - DNA, 25 bp, Homo sapien
tgatttcgaaggcagtaaaaagccc

SEQ ID NO: 1810234 - DNA, 25 bp, Homo sapien
tggccaaatccacttgtgtatgggt

SEQ ID NO: 1810235 - DNA, 25 bp, Homo sapien
tctgctgcaagcaagcaaatccttc

SEQ ID NO: 1810236 - DNA, 25 bp, Homo sapien
taaagaaagtgtggatttagtcacc

SEQ ID NO: 1810237 - DNA, 25 bp, Homo sapien
caaacaaggaaatggtaagagcaca

SEQ ID NO: 1810238 - DNA, 25 bp, Homo sapien
cgaggaaggctgatgttacaaatat

SEQ ID NO: 1810239 - DNA, 25 bp, Homo sapien
tttgtcagcactttcaaaacaatag

SEQ ID NO: 1810240 - DNA, 25 bp, Homo sapien
gcgaggaaggctgatgttacaaata

SEQ ID NO: 1810241 - DNA, 25 bp, Homo sapien
acaaatataaactttgtcagcactt

SEQ ID NO: 1810242 - DNA, 25 bp, Homo sapien
aatgaagaagagacagatggaaaga

SEQ ID NO: 1810243 - DNA, 25 bp, Homo sapien
gtttaatgaagaagagacagatgga

SEQ ID NO: 1810244 - DNA, 25 bp, Homo sapien
taatgaagaagagacagatggaaag

SEQ ID NO: 1810245 - DNA, 25 bp, Homo sapien
tttaatgaagaagagacagatggaa

SEQ ID NO: 1810246 - DNA, 25 bp, Homo sapien
cctggaccggcccttcccagaggcg

SEQ ID NO: 1810247 - DNA, 25 bp, Homo sapien
ttcccagaggcgcagcgctgagtcc

SEQ ID NO: 1810248 - DNA, 25 bp, Homo sapien
ggttctcccgcaacttgcggagctc

SEQ ID NO: 1810249 - DNA, 25 bp, Homo sapien
gccaggttctcccgcaacttgcgga

SEQ ID NO: 1810250 - DNA, 25 bp, Homo sapien
cgatgctgggctcggatgacgccgc

SEQ ID NO: 1810251 - DNA, 25 bp, Homo sapien
ccgccgcaggacagggaggaaaggc

SEQ ID NO: 1810252 - DNA, 25 bp, Homo sapien
acgccgccgccgcaggacagggagg

SEQ ID NO: 1810253 - DNA, 25 bp, Homo sapien
ccgccgccgcaggacagggaggaaa

SEQ ID NO: 1810254 - DNA, 25 bp, Homo sapien
gagttctgttcatcggccatcactt

SEQ ID NO: 1810255 - DNA, 25 bp, Homo sapien
tctgttcatcggccatcactttcat

SEQ ID NO: 1810256 - DNA, 25 bp, Homo sapien
gttctgttcatcggccatcactttc

SEQ ID NO: 1810257 - DNA, 25 bp, Homo sapien
agagttctgttcatcggccatcact

SEQ ID NO: 1810258 - DNA, 25 bp, Homo sapien
agttctgctatcttgtcttctttgg

SEQ ID NO: 1810259 - DNA, 25 bp, Homo sapien
tgtgccaatttcagaagaaggacag

SEQ ID NO: 1810260 - DNA, 25 bp, Homo sapien
agcgttttccgtttccagttctgct

SEQ ID NO: 1810261 - DNA, 25 bp, Homo sapien
tcagaagaaggacagcgttttccgt

SEQ ID NO: 1810262 - DNA, 25 bp, Homo sapien
tctgggcctcggtgttgccgcctgt

SEQ ID NO: 1810263 - DNA, 25 bp, Homo sapien
ctccacagaaggacctgtgtccctg

SEQ ID NO: 1810264 - DNA, 25 bp, Homo sapien
gagtgtgattgtagagcagcgacac

SEQ ID NO: 1810265 - DNA, 25 bp, Homo sapien
gagaccttgttgaccaagagtcttg

SEQ ID NO: 1810266 - DNA, 25 bp, Homo sapien
cacctcaggttccttgagaccttgt

SEQ ID NO: 1810267 - DNA, 25 bp, Homo sapien
gtggaacatgctggcctccgggagg

SEQ ID NO: 1810268 - DNA, 25 bp, Homo sapien
agtgaccggaaccaccacgaggagc

SEQ ID NO: 1810269 - DNA, 25 bp, Homo sapien
gggccaccacgtggagatcggcctt

SEQ ID NO: 1810270 - DNA, 25 bp, Homo sapien
aaggccgcggtctgcgtggcagtgg

SEQ ID NO: 1810271 - DNA, 25 bp, Homo sapien
ggagttggatggaaataaagtcacc

SEQ ID NO: 1810272 - DNA, 25 bp, Homo sapien
gagttggatggaaataaagtcacca

SEQ ID NO: 1810273 - DNA, 25 bp, Homo sapien
agttggatggaaataaagtcaccac

SEQ ID NO: 1810274 - DNA, 25 bp, Homo sapien
tgggtacagggaggccggattgcgc

SEQ ID NO: 1810275 - DNA, 25 bp, Homo sapien
ttctaagaaaatccatggcgccagg

SEQ ID NO: 1810276 - DNA, 25 bp, Homo sapien
ggatttggccgtgggcaacagaaag

SEQ ID NO: 1810277 - DNA, 25 bp, Homo sapien
tcacccggcgtggaacggcagttct

SEQ ID NO: 1810278 - DNA, 25 bp, Homo sapien
gcaattccgagaaaatccacggttc

SEQ ID NO: 1810279 - DNA, 25 bp, Homo sapien
ggcgtggaacggcaattccgagaaa

SEQ ID NO: 1810280 - DNA, 25 bp, Homo sapien
cgagaaaatccacggttccagagcc

SEQ ID NO: 1810281 - DNA, 25 bp, Homo sapien
tggaacggcaattccgagaaaatcc

SEQ ID NO: 1810282 - DNA, 25 bp, Homo sapien
ggcgatgcccgcgtgtgagctcggg

SEQ ID NO: 1810283 - DNA, 25 bp, Homo sapien
tgcctccggggagctaagcccaggc

SEQ ID NO: 1810284 - DNA, 25 bp, Homo sapien
gtgtgactcggcgatgcccgcgtgt

SEQ ID NO: 1810285 - DNA, 25 bp, Homo sapien
tgagctcggggtcgcgcgctgcctg

SEQ ID NO: 1810286 - DNA, 25 bp, Homo sapien
ctccaggtgatccaggggcgcgcgg

SEQ ID NO: 1810287 - DNA, 25 bp, Homo sapien
cggggaggcagaacgtcctggaaga

SEQ ID NO: 1810288 - DNA, 25 bp, Homo sapien
gtcccggccaggtgcggggaggcag

SEQ ID NO: 1810289 - DNA, 25 bp, Homo sapien
actccaggtgatccaggggcgcgcg

SEQ ID NO: 1810290 - DNA, 25 bp, Homo sapien
tgagcgtgtgtttctctgcagacac

SEQ ID NO: 1810291 - DNA, 25 bp, Homo sapien
tgttgtacagggtggaaatccgcgt

SEQ ID NO: 1810292 - DNA, 25 bp, Homo sapien
tgaatgacatgacccagctggctca

SEQ ID NO: 1810293 - DNA, 25 bp, Homo sapien
ggcctcactgcgactcttttcaatc

SEQ ID NO: 1810294 - DNA, 25 bp, Homo sapien
gcggtcactatttcagaaacacggt

SEQ ID NO: 1810295 - DNA, 25 bp, Homo sapien
tgtgttctttgcaccgcggtcacta

SEQ ID NO: 1810296 - DNA, 25 bp, Homo sapien
tgataatctcttaagagcgcccgag

SEQ ID NO: 1810297 - DNA, 25 bp, Homo sapien
gaaacgcctgtatatcctggttaag

SEQ ID NO: 1810298 - DNA, 25 bp, Homo sapien
accaggctgttgtgcgggaccttcc

SEQ ID NO: 1810299 - DNA, 25 bp, Homo sapien
gctggtgacgcgcactgacgtcctg

SEQ ID NO: 1810300 - DNA, 25 bp, Homo sapien
tgcaaggcccgctccaggtgcgcca

SEQ ID NO: 1810301 - DNA, 25 bp, Homo sapien
caggtgcgccacctttgactggcat

SEQ ID NO: 1810302 - DNA, 25 bp, Homo sapien
cccaggtctcccctgacgcccacac

SEQ ID NO: 1810303 - DNA, 25 bp, Homo sapien
ggccgccccaggtctcccctgacgc

SEQ ID NO: 1810304 - DNA, 25 bp, Homo sapien
ttctgcgtgggcctctccccggggc

SEQ ID NO: 1810305 - DNA, 25 bp, Homo sapien
cgccccaggtctcccctgacgccca

SEQ ID NO: 1810306 - DNA, 25 bp, Homo sapien
tctgcaaaactggatcgtcggattc

SEQ ID NO: 1810307 - DNA, 25 bp, Homo sapien
aaggcaacaaaggacgaatccgaca

SEQ ID NO: 1810308 - DNA, 25 bp, Homo sapien
atccgacagtgaactctgatatttc

SEQ ID NO: 1810309 - DNA, 25 bp, Homo sapien
cgtcggattcactatcaaaaggcaa

SEQ ID NO: 1810310 - DNA, 25 bp, Homo sapien
ttcagcctctaaaacacccttgtgt

SEQ ID NO: 1810311 - DNA, 25 bp, Homo sapien
ttgtagactcaggtcatcaacagca

SEQ ID NO: 1810312 - DNA, 25 bp, Homo sapien
caatttgtgaggaaacttgtagact

SEQ ID NO: 1810313 - DNA, 25 bp, Homo sapien
tgctctccattgtagggatctgtgg

SEQ ID NO: 1810314 - DNA, 25 bp, Homo sapien
aagacaaaagctgtgagattcaaca

SEQ ID NO: 1810315 - DNA, 25 bp, Homo sapien
tctgtgaggtctccgatgtgaaatg

SEQ ID NO: 1810316 - DNA, 25 bp, Homo sapien
tactcgcttactgctggacgggcag

SEQ ID NO: 1810317 - DNA, 25 bp, Homo sapien
agctgccggactattgctgcctctg

SEQ ID NO: 1810318 - DNA, 25 bp, Homo sapien
aagagtaaaacgacgtcataagact

SEQ ID NO: 1810319 - DNA, 25 bp, Homo sapien
cgacgtcataagactttgtgtgctg

SEQ ID NO: 1810320 - DNA, 25 bp, Homo sapien
taaaacgacgtcataagactttgtg

SEQ ID NO: 1810321 - DNA, 25 bp, Homo sapien
gagaaaagagtaaaacgacgtcata

SEQ ID NO: 1810322 - DNA, 25 bp, Homo sapien
ggtggccaggacgatcacatttcac

SEQ ID NO: 1810323 - DNA, 25 bp, Homo sapien
tcttatcaatcagagggtggccagg

SEQ ID NO: 1810324 - DNA, 25 bp, Homo sapien
caggacgatcacatttcaccagaat

SEQ ID NO: 1810325 - DNA, 25 bp, Homo sapien
aatgatatgtcttatcaatcagagg

SEQ ID NO: 1810326 - DNA, 25 bp, Homo sapien
tttaactagactgggcggtggtgcc

SEQ ID NO: 1810327 - DNA, 25 bp, Homo sapien
taaaagccatcgtttaactagactg

SEQ ID NO: 1810328 - DNA, 25 bp, Homo sapien
gaccaacggcctgaaagtacttgga

SEQ ID NO: 1810329 - DNA, 25 bp, Homo sapien
tggtgtaacccaaagactgagacct

SEQ ID NO: 1810330 - DNA, 25 bp, Homo sapien
ctcctgtgcttggaccctgtcattc

SEQ ID NO: 1810331 - DNA, 25 bp, Homo sapien
gctcctgtgcttggaccctgtcatt

SEQ ID NO: 1810332 - DNA, 25 bp, Homo sapien
ctcccacagtcatgtccagccacac

SEQ ID NO: 1810333 - DNA, 25 bp, Homo sapien
agggaagccggccttgcccacgcgg

SEQ ID NO: 1810334 - DNA, 25 bp, Homo sapien
gagggaagccggccttgcccacgcg

SEQ ID NO: 1810335 - DNA, 25 bp, Homo sapien
acggaccggaacaacccatgcatct

SEQ ID NO: 1810336 - DNA, 25 bp, Homo sapien
ccacggaccggaacaacccatgcat

SEQ ID NO: 1810337 - DNA, 25 bp, Homo sapien
ggaccggaacaacccatgcatctga

SEQ ID NO: 1810338 - DNA, 25 bp, Homo sapien
gaccggaacaacccatgcatctgac

SEQ ID NO: 1810339 - DNA, 25 bp, Homo sapien
ctacgatcatgtaaacatgttcgtg

SEQ ID NO: 1810340 - DNA, 25 bp, Homo sapien
atgttcgtgtggctcaaagacacca

SEQ ID NO: 1810341 - DNA, 25 bp, Homo sapien
aacgacagactgagaaagtagcggc

SEQ ID NO: 1810342 - DNA, 25 bp, Homo sapien
gtagcggcggcttaaatatttctgt

SEQ ID NO: 1810343 - DNA, 25 bp, Homo sapien
gcagagtccacaggggggttcttct

SEQ ID NO: 1810344 - DNA, 25 bp, Homo sapien
ccggccatgcgtgtcccagcagagt

SEQ ID NO: 1810345 - DNA, 25 bp, Homo sapien
ggccatgcgtgtcccagcagagtcc

SEQ ID NO: 1810346 - DNA, 25 bp, Homo sapien
cagcagagtccacaggggggttctt

SEQ ID NO: 1810347 - DNA, 25 bp, Homo sapien
agcttggtcttgctgcgtgaattag

SEQ ID NO: 1810348 - DNA, 25 bp, Homo sapien
tgaattagtaagtaggccgaaggaa

SEQ ID NO: 1810349 - DNA, 25 bp, Homo sapien
acagatacaactccatgtggcaacg

SEQ ID NO: 1810350 - DNA, 25 bp, Homo sapien
taagtaggccgaaggaagacagata

SEQ ID NO: 1810351 - DNA, 25 bp, Homo sapien
ggaaggccaggacggctccagaccc

SEQ ID NO: 1810352 - DNA, 25 bp, Homo sapien
tgcttctcacgctgaagctgacctg

SEQ ID NO: 1810353 - DNA, 25 bp, Homo sapien
gggaaggccaggacggctccagacc

SEQ ID NO: 1810354 - DNA, 25 bp, Homo sapien
gggaaggccaggacggctccagacc

SEQ ID NO: 1810355 - DNA, 25 bp, Homo sapien
ggaaggccaggacggctccagaccc

SEQ ID NO: 1810356 - DNA, 25 bp, Homo sapien
tgcagactcagaaacctgggaacac

SEQ ID NO: 1810357 - DNA, 25 bp, Homo sapien
gatagtactttctgctatgaaaatg

SEQ ID NO: 1810358 - DNA, 25 bp, Homo sapien
cagaaagcggctctagcatgcagac

SEQ ID NO: 1810359 - DNA, 25 bp, Homo sapien
aaaatgctgtattaatagaagcagc

SEQ ID NO: 1810360 - DNA, 25 bp, Homo sapien
acatctccaaagaccgcgctctgag

SEQ ID NO: 1810361 - DNA, 25 bp, Homo sapien
ctctgagactctgctggaccataaa

SEQ ID NO: 1810362 - DNA, 25 bp, Homo sapien
ctgagactctgctggaccataaacc

SEQ ID NO: 1810363 - DNA, 25 bp, Homo sapien
atctccaaagaccgcgctctgagac

SEQ ID NO: 1810364 - DNA, 25 bp, Homo sapien
gttctgattgacatctaagtctccc

SEQ ID NO: 1810365 - DNA, 25 bp, Homo sapien
gcaagacagtgttctgattgacatc

SEQ ID NO: 1810366 - DNA, 25 bp, Homo sapien
atgattgcaagacagtgttctgatt

SEQ ID NO: 1810367 - DNA, 25 bp, Homo sapien
gacagtgttctgattgacatctaag

SEQ ID NO: 1810368 - DNA, 25 bp, Homo sapien
tggtatagctctttccgctgcccgt

SEQ ID NO: 1810369 - DNA, 25 bp, Homo sapien
taagtcactctgtgggtcaagcggc

SEQ ID NO: 1810370 - DNA, 25 bp, Homo sapien
gaatggcgtcccagcatggtatagc

SEQ ID NO: 1810371 - DNA, 25 bp, Homo sapien
tcaagcggcagaacagggccgtcgt

SEQ ID NO: 1810372 - DNA, 25 bp, Homo sapien
ggtcgggagcatcttcgcaggccat

SEQ ID NO: 1810373 - DNA, 25 bp, Homo sapien
gaaatcatgacacgggcagtgggtc

SEQ ID NO: 1810374 - DNA, 25 bp, Homo sapien
gggtctctttcgagaatgtgctaac

SEQ ID NO: 1810375 - DNA, 25 bp, Homo sapien
atgtgctaacgggtcgggagcatct

SEQ ID NO: 1810376 - DNA, 25 bp, Homo sapien
cgtttctgcaaacgacgaaggtgag

SEQ ID NO: 1810377 - DNA, 25 bp, Homo sapien
aaatggcttatctggtgacttcagc

SEQ ID NO: 1810378 - DNA, 25 bp, Homo sapien
tctgactgagggattccagtgccgc

SEQ ID NO: 1810379 - DNA, 25 bp, Homo sapien
tgcaacttgagtcacgaacacccaa

SEQ ID NO: 1810380 - DNA, 25 bp, Homo sapien
tggagacttcaacctttgggcttct

SEQ ID NO: 1810381 - DNA, 25 bp, Homo sapien
tccactatggagacttcaacctttg

SEQ ID NO: 1810382 - DNA, 25 bp, Homo sapien
gctgtcaccacctcacgcttgaccc

SEQ ID NO: 1810383 - DNA, 25 bp, Homo sapien
tcattattgtaaacttccactatgg

SEQ ID NO: 1810384 - DNA, 25 bp, Homo sapien
aattttgggcgactttgtgtgaccg

SEQ ID NO: 1810385 - DNA, 25 bp, Homo sapien
catcacagtctgtcagtcaaaggct

SEQ ID NO: 1810386 - DNA, 25 bp, Homo sapien
ttcagcatggctggtgggcccttcc

SEQ ID NO: 1810387 - DNA, 25 bp, Homo sapien
cagagctcttaatcagcaggagata

SEQ ID NO: 1810388 - DNA, 25 bp, Homo sapien
acctggaggaatccgcgtgcaccag

SEQ ID NO: 1810389 - DNA, 25 bp, Homo sapien
tgagacctggaggaatccgcgtgca

SEQ ID NO: 1810390 - DNA, 25 bp, Homo sapien
tgcagacctccatgaacgagctcca

SEQ ID NO: 1810391 - DNA, 25 bp, Homo sapien
catcagtttcgaggcgctgccgaca

SEQ ID NO: 1810392 - DNA, 25 bp, Homo sapien
gtcagagcaggaggctgtggttaga

SEQ ID NO: 1810393 - DNA, 25 bp, Homo sapien
cagtgctgtcagagcaggaggctgt

SEQ ID NO: 1810394 - DNA, 25 bp, Homo sapien
cagagcaggaggctgtggttagagt

SEQ ID NO: 1810395 - DNA, 25 bp, Homo sapien
agcaggaggctgtggttagagtcac

SEQ ID NO: 1810396 - DNA, 25 bp, Homo sapien
ccttgagaagctctgcggctccttc

SEQ ID NO: 1810397 - DNA, 25 bp, Homo sapien
cttgagaagctctgcggctccttcc

SEQ ID NO: 1810398 - DNA, 25 bp, Homo sapien
gagggtggcactgcaggcttggtct

SEQ ID NO: 1810399 - DNA, 25 bp, Homo sapien
ttgagaagctctgcggctccttcct

SEQ ID NO: 1810400 - DNA, 25 bp, Homo sapien
agctgtagtcgagcctgcacctgct

SEQ ID NO: 1810401 - DNA, 25 bp, Homo sapien
gccggccgagtccacgagctgtagt

SEQ ID NO: 1810402 - DNA, 25 bp, Homo sapien
caacgcactcgctgccggccgagtc

SEQ ID NO: 1810403 - DNA, 25 bp, Homo sapien
tccacgagctgtagtcgagcctgca

SEQ ID NO: 1810404 - DNA, 25 bp, Homo sapien
cccccagggaaatgcctgcccctgc

SEQ ID NO: 1810405 - DNA, 25 bp, Homo sapien
cagggaaatgcctgcccctgctcac

SEQ ID NO: 1810406 - DNA, 25 bp, Homo sapien
ccagggaaatgcctgcccctgctca

SEQ ID NO: 1810407 - DNA, 25 bp, Homo sapien
ccccagggaaatgcctgcccctgct

SEQ ID NO: 1810408 - DNA, 25 bp, Homo sapien
ggtaagagaaccaatccctgagaat

SEQ ID NO: 1810409 - DNA, 25 bp, Homo sapien
gaatgtaacgggatttggaactcac

SEQ ID NO: 1810410 - DNA, 25 bp, Homo sapien
gaggaacacgactctcgggttgccg

SEQ ID NO: 1810411 - DNA, 25 bp, Homo sapien
gcccgtgtgaggaacacgactctcg

SEQ ID NO: 1810412 - DNA, 25 bp, Homo sapien
accatcaccgtttgcaccaagaaag

SEQ ID NO: 1810413 - DNA, 25 bp, Homo sapien
ggaccgccacgcaccatcaccgttt

SEQ ID NO: 1810414 - DNA, 25 bp, Homo sapien
gacgggacaggcatgagagtgagtg

SEQ ID NO: 1810415 - DNA, 25 bp, Homo sapien
caccgtttgcaccaagaaaggaggc

SEQ ID NO: 1810416 - DNA, 25 bp, Homo sapien
atggccacggtgctccaacaaagcc

SEQ ID NO: 1810417 - DNA, 25 bp, Homo sapien
gctgatgcacgccatctccctcagg

SEQ ID NO: 1810418 - DNA, 25 bp, Homo sapien
ctgccagggccgcaaggctgcggct

SEQ ID NO: 1810419 - DNA, 25 bp, Homo sapien
ggtgagcctgctgttccggtacggg

SEQ ID NO: 1810420 - DNA, 25 bp, Homo sapien
agaatgaccaccgtgccgtgggagt

SEQ ID NO: 1810421 - DNA, 25 bp, Homo sapien
cctcgaggacgtgcaggccagaagt

SEQ ID NO: 1810422 - DNA, 25 bp, Homo sapien
tcaggccaaggtgagacggcgcagg

SEQ ID NO: 1810423 - DNA, 25 bp, Homo sapien
gagtgccagctagccacagcgagga

SEQ ID NO: 1810424 - DNA, 25 bp, Homo sapien
ttaaaatagaaaaacaacatgcaag

SEQ ID NO: 1810425 - DNA, 25 bp, Homo sapien
ctttaaaatagaaaaacaacatgca

SEQ ID NO: 1810426 - DNA, 25 bp, Homo sapien
tttaaaatagaaaaacaacatgcaa

SEQ ID NO: 1810427 - DNA, 25 bp, Homo sapien
gcagagaatcaccagtaacttcgca

SEQ ID NO: 1810428 - DNA, 25 bp, Homo sapien
tccgtttgggagctgggcggcttct

SEQ ID NO: 1810429 - DNA, 25 bp, Homo sapien
tgcaacgtctgtgccaggtgcctct

SEQ ID NO: 1810430 - DNA, 25 bp, Homo sapien
acttgccgagctcggatcccgaaac

SEQ ID NO: 1810431 - DNA, 25 bp, Homo sapien
atatgcattataaagcaaggacaag

SEQ ID NO: 1810432 - DNA, 25 bp, Homo sapien
tatgcattataaagcaaggacaaga

SEQ ID NO: 1810433 - DNA, 25 bp, Homo sapien
agctcccactgtggggcactcacgc

SEQ ID NO: 1810434 - DNA, 25 bp, Homo sapien
cttctgccggctcccgagtttcccg

SEQ ID NO: 1810435 - DNA, 25 bp, Homo sapien
acagctacttctgccggctcccgag

SEQ ID NO: 1810436 - DNA, 25 bp, Homo sapien
ctgcccacagctacttctgccggct

SEQ ID NO: 1810437 - DNA, 25 bp, Homo sapien
tcagcaagccggtgaggggcttcct

SEQ ID NO: 1810438 - DNA, 25 bp, Homo sapien
ctcagcaagccggtgaggggcttcc

SEQ ID NO: 1810439 - DNA, 25 bp, Homo sapien
tgggactgccctccaaaggtccacg

SEQ ID NO: 1810440 - DNA, 25 bp, Homo sapien
ttgaggaagccacgagtgtttctgg

SEQ ID NO: 1810441 - DNA, 25 bp, Homo sapien
gaagccacgagtgtttctggagatg

SEQ ID NO: 1810442 - DNA, 25 bp, Homo sapien
caattgtgccgtaggtcagcgctgg

SEQ ID NO: 1810443 - DNA, 25 bp, Homo sapien
gctctcgtgcatgaacaattgtgcc

SEQ ID NO: 1810444 - DNA, 25 bp, Homo sapien
ctgtcctccccatttgggctgtatt

SEQ ID NO: 1810445 - DNA, 25 bp, Homo sapien
ttgggctgtattccccgcacagtct

SEQ ID NO: 1810446 - DNA, 25 bp, Homo sapien
caaatctcttcaaaaccagcggcct

SEQ ID NO: 1810447 - DNA, 25 bp, Homo sapien
gcacagtctccacgtgccacctaaa

SEQ ID NO: 1810448 - DNA, 25 bp, Homo sapien
accactccccagggcctgttcctgg

SEQ ID NO: 1810449 - DNA, 25 bp, Homo sapien
cacggcctcccaccactccccaggg

SEQ ID NO: 1810450 - DNA, 25 bp, Homo sapien
tcccaccactccccagggcctgttc

SEQ ID NO: 1810451 - DNA, 25 bp, Homo sapien
gcacggcctcccaccactccccagg

SEQ ID NO: 1810452 - DNA, 25 bp, Homo sapien
gaagaagcatgtcctcagagccaga

SEQ ID NO: 1810453 - DNA, 25 bp, Homo sapien
ggaagaagcatgtcctcagagccag

SEQ ID NO: 1810454 - DNA, 25 bp, Homo sapien
aagaagcatgtcctcagagccagat

SEQ ID NO: 1810455 - DNA, 25 bp, Homo sapien
cagtgcacgcagcaggaactggacg

SEQ ID NO: 1810456 - DNA, 25 bp, Homo sapien
tgctgctgtcacaaaccagtgcacg

SEQ ID NO: 1810457 - DNA, 25 bp, Homo sapien
ccctctgttgtctgtccttggacat

SEQ ID NO: 1810458 - DNA, 25 bp, Homo sapien
caggggtgtggttctctccattcag

SEQ ID NO: 1810459 - DNA, 25 bp, Homo sapien
gggagggccgagtaacgacagcatg

SEQ ID NO: 1810460 - DNA, 25 bp, Homo sapien
gagggccgagtaacgacagcatggc

SEQ ID NO: 1810461 - DNA, 25 bp, Homo sapien
ccgagtaacgacagcatggcggtgc

SEQ ID NO: 1810462 - DNA, 25 bp, Homo sapien
atggcggtgcccccgagagggaggg

SEQ ID NO: 1810463 - DNA, 25 bp, Homo sapien
tgccaaagagctcgaaggcgttgct

SEQ ID NO: 1810464 - DNA, 25 bp, Homo sapien
taacactgtgccaaagagctcgaag

SEQ ID NO: 1810465 - DNA, 25 bp, Homo sapien
caaagagctcgaaggcgttgctcat

SEQ ID NO: 1810466 - DNA, 25 bp, Homo sapien
ctaacactgtgccaaagagctcgaa

SEQ ID NO: 1810467 - DNA, 25 bp, Homo sapien
gcgcccaaaggtctgggtggtccca

SEQ ID NO: 1810468 - DNA, 25 bp, Homo sapien
ctgcagcgcccaaaggtctgggtgg

SEQ ID NO: 1810469 - DNA, 25 bp, Homo sapien
cagcgcccaaaggtctgggtggtcc

SEQ ID NO: 1810470 - DNA, 25 bp, Homo sapien
cgcccaaaggtctgggtggtcccag

SEQ ID NO: 1810471 - DNA, 25 bp, Homo sapien
ctgtgacgtgcagaaagggatcagt

SEQ ID NO: 1810472 - DNA, 25 bp, Homo sapien
tgtgacgtgcagaaagggatcagtc

SEQ ID NO: 1810473 - DNA, 25 bp, Homo sapien
gacgtgcagaaagggatcagtcggt

SEQ ID NO: 1810474 - DNA, 25 bp, Homo sapien
tgcagaaagggatcagtcggtgttg

SEQ ID NO: 1810475 - DNA, 25 bp, Homo sapien
ttgcggccatcgcagccgagtcggt

SEQ ID NO: 1810476 - DNA, 25 bp, Homo sapien
tcgcagccgagtcggtaaagggcct

SEQ ID NO: 1810477 - DNA, 25 bp, Homo sapien
ccgagtcggtaaagggcctcgcctg

SEQ ID NO: 1810478 - DNA, 25 bp, Homo sapien
gtgttgcggccatcgcagccgagtc

SEQ ID NO: 1810479 - DNA, 25 bp, Homo sapien
cactgggaatgtgggcatccatgct

SEQ ID NO: 1810480 - DNA, 25 bp, Homo sapien
catgctgggacattggtggtatcca

SEQ ID NO: 1810481 - DNA, 25 bp, Homo sapien
cacatgggtgtccacacgggtgtcc

SEQ ID NO: 1810482 - DNA, 25 bp, Homo sapien
catgggcagtgtccacgctgtggat

SEQ ID NO: 1810483 - DNA, 25 bp, Homo sapien
cctcccgctatttcccccatctctc

SEQ ID NO: 1810484 - DNA, 25 bp, Homo sapien
ccacctcctccctacctcccgctat

SEQ ID NO: 1810485 - DNA, 25 bp, Homo sapien
cacctcctccctacctcccgctatt

SEQ ID NO: 1810486 - DNA, 25 bp, Homo sapien
ctacctcccgctatttcccccatct

SEQ ID NO: 1810487 - DNA, 25 bp, Homo sapien
gggagtggcgctaactgtcgagttt

SEQ ID NO: 1810488 - DNA, 25 bp, Homo sapien
ttgagccggacgacgagccggacct

SEQ ID NO: 1810489 - DNA, 25 bp, Homo sapien
gtttccaggactgaggcgggtctag

SEQ ID NO: 1810490 - DNA, 25 bp, Homo sapien
tgtcgagtttcaggggttgcacccc

SEQ ID NO: 1810491 - DNA, 25 bp, Homo sapien
ctcagggaacatctgaggggtagca

SEQ ID NO: 1810492 - DNA, 25 bp, Homo sapien
gccccctttgatggctcctcaggga

SEQ ID NO: 1810493 - DNA, 25 bp, Homo sapien
tgagagcctaagtcctctccttcca

SEQ ID NO: 1810494 - DNA, 25 bp, Homo sapien
gagagcctaagtcctctccttccag

SEQ ID NO: 1810495 - DNA, 25 bp, Homo sapien
tgtctgttgcatgacccccttctga

SEQ ID NO: 1810496 - DNA, 25 bp, Homo sapien
cacacagtggattcgttgacctcgg

SEQ ID NO: 1810497 - DNA, 25 bp, Homo sapien
ttctgaatgcttcgcccatcatgac

SEQ ID NO: 1810498 - DNA, 25 bp, Homo sapien
gttgacctcgggacctgcaccttct

SEQ ID NO: 1810499 - DNA, 25 bp, Homo sapien
ggttatcgggatcaggcactgccca

SEQ ID NO: 1810500 - DNA, 25 bp, Homo sapien
gtcgagtctcggcacagtgatgtgc

SEQ ID NO: 1810501 - DNA, 25 bp, Homo sapien
gcaggtgccctggttatcgggatca

SEQ ID NO: 1810502 - DNA, 25 bp, Homo sapien
gcactgcccaattttctgagtcgag

SEQ ID NO: 1810503 - DNA, 25 bp, Homo sapien
ggactctctcataccaagggcaatt

SEQ ID NO: 1810504 - DNA, 25 bp, Homo sapien
acatggactctctcataccaagggc

SEQ ID NO: 1810505 - DNA, 25 bp, Homo sapien
catggactctctcataccaagggca

SEQ ID NO: 1810506 - DNA, 25 bp, Homo sapien
tggactctctcataccaagggcaat

SEQ ID NO: 1810507 - DNA, 25 bp, Homo sapien
tgaagataggaccagtgtcaggacc

SEQ ID NO: 1810508 - DNA, 25 bp, Homo sapien
ttgaagataggaccagtgtcaggac

SEQ ID NO: 1810509 - DNA, 25 bp, Homo sapien
ggagcacagtgcttggggacaccac

SEQ ID NO: 1810510 - DNA, 25 bp, Homo sapien
gcacagtgcttggggacaccaccag

SEQ ID NO: 1810511 - DNA, 25 bp, Homo sapien
cagtgcttggggacaccaccagtat

SEQ ID NO: 1810512 - DNA, 25 bp, Homo sapien
cttgccagggagcacagtgcttggg

SEQ ID NO: 1810513 - DNA, 25 bp, Homo sapien
gacagagaccatgaacaacgccttg

SEQ ID NO: 1810514 - DNA, 25 bp, Homo sapien
aagacagtgccttcctcgagtggcc

SEQ ID NO: 1810515 - DNA, 25 bp, Homo sapien
gcccgcagtgggtgatgaacgtcca

SEQ ID NO: 1810516 - DNA, 25 bp, Homo sapien
ggtttctcctgggttgcccgcagtg

SEQ ID NO: 1810517 - DNA, 25 bp, Homo sapien
tcagacctccactggcactcacacc

SEQ ID NO: 1810518 - DNA, 25 bp, Homo sapien
tccactggcactcacacccgaagcg

SEQ ID NO: 1810519 - DNA, 25 bp, Homo sapien
cacccgaagcgagggagttagggag

SEQ ID NO: 1810520 - DNA, 25 bp, Homo sapien
cacacccgaagcgagggagttaggg

SEQ ID NO: 1810521 - DNA, 25 bp, Homo sapien
ttcccactgctgctcgtcaatatgc

SEQ ID NO: 1810522 - DNA, 25 bp, Homo sapien
agaccaccagcactcgcgctcagca

SEQ ID NO: 1810523 - DNA, 25 bp, Homo sapien
cactgctgctcgtcaatatgcaccg

SEQ ID NO: 1810524 - DNA, 25 bp, Homo sapien
gctgctcgtcaatatgcaccgtcct

SEQ ID NO: 1810525 - DNA, 25 bp, Homo sapien
tcaatgctgtcagggttgccaacca

SEQ ID NO: 1810526 - DNA, 25 bp, Homo sapien
cagtggtcttctcgtggccgaccgt

SEQ ID NO: 1810527 - DNA, 25 bp, Homo sapien
tcagggaaggctgatcgcagccacg

SEQ ID NO: 1810528 - DNA, 25 bp, Homo sapien
caggtgccggtggatggtttccttc

SEQ ID NO: 1810529 - DNA, 25 bp, Homo sapien
ggagcccagttaatcatggcccttg

SEQ ID NO: 1810530 - DNA, 25 bp, Homo sapien
gctgtggagcccagttaatcatggc

SEQ ID NO: 1810531 - DNA, 25 bp, Homo sapien
taattgcttcgggtctttgaagtct

SEQ ID NO: 1810532 - DNA, 25 bp, Homo sapien
taatcatggcccttgtcgctaactg

SEQ ID NO: 1810533 - DNA, 25 bp, Homo sapien
gaatctcaggcatcagacaatggtt

SEQ ID NO: 1810534 - DNA, 25 bp, Homo sapien
ttgattcgacgaacaggaccgggca

SEQ ID NO: 1810535 - DNA, 25 bp, Homo sapien
tgatgtgcgccgcattgctcctgcg

SEQ ID NO: 1810536 - DNA, 25 bp, Homo sapien
accagtcgtcttatcaccaggcggc

SEQ ID NO: 1810537 - DNA, 25 bp, Homo sapien
cagcgggctgcgctttcctgactca

SEQ ID NO: 1810538 - DNA, 25 bp, Homo sapien
ttcctagccagctccggacggtggt

SEQ ID NO: 1810539 - DNA, 25 bp, Homo sapien
tagttgcgtgtaggcatctgcaggc

SEQ ID NO: 1810540 - DNA, 25 bp, Homo sapien
atctgcaggcttatccagggggtca

SEQ ID NO: 1810541 - DNA, 25 bp, Homo sapien
gtttaggaacaaacacgatcgtgtg

SEQ ID NO: 1810542 - DNA, 25 bp, Homo sapien
ccaggctttgccagtgtttaggaac

SEQ ID NO: 1810543 - DNA, 25 bp, Homo sapien
tctgtaaaccaatttgggttctcgc

SEQ ID NO: 1810544 - DNA, 25 bp, Homo sapien
acagcaatcattagaaatgcacctg

SEQ ID NO: 1810545 - DNA, 25 bp, Homo sapien
cagtcccaatcgccaagctgtactc

SEQ ID NO: 1810546 - DNA, 25 bp, Homo sapien
agtcccaatcgccaagctgtactca

SEQ ID NO: 1810547 - DNA, 25 bp, Homo sapien
tcagtcccaatcgccaagctgtact

SEQ ID NO: 1810548 - DNA, 25 bp, Homo sapien
gctcctgccgctggcgcttctgcca

SEQ ID NO: 1810549 - DNA, 25 bp, Homo sapien
gagacacaaaacctccctcgacacg

SEQ ID NO: 1810550 - DNA, 25 bp, Homo sapien
aggcagcaggtcatgatcgtggagc

SEQ ID NO: 1810551 - DNA, 25 bp, Homo sapien
acggagcgggcctcggtaagcaggc

SEQ ID NO: 1810552 - DNA, 25 bp, Homo sapien
tgtgaattatcattgaattctgatg

SEQ ID NO: 1810553 - DNA, 25 bp, Homo sapien
gaattatcattgaattctgatgaca

SEQ ID NO: 1810554 - DNA, 25 bp, Homo sapien
cattgaattctgatgacataattat

SEQ ID NO: 1810555 - DNA, 25 bp, Homo sapien
tatcattgaattctgatgacataat

SEQ ID NO: 1810556 - DNA, 25 bp, Homo sapien
tttgaccaacacaatcagtgtcctg

SEQ ID NO: 1810557 - DNA, 25 bp, Homo sapien
cgtgcgcatgggctgtttgaccaac

SEQ ID NO: 1810558 - DNA, 25 bp, Homo sapien
gggctgtttgaccaacacaatcagt

SEQ ID NO: 1810559 - DNA, 25 bp, Homo sapien
gaccaacacaatcagtgtcctgttt

SEQ ID NO: 1810560 - DNA, 25 bp, Homo sapien
gagatgcagcaacacagcgtgtgca

SEQ ID NO: 1810561 - DNA, 25 bp, Homo sapien
ggagatgcagcaacacagcgtgtgc

SEQ ID NO: 1810562 - DNA, 25 bp, Homo sapien
atgcgagatgcagcaacacagggtg

SEQ ID NO: 1810563 - DNA, 25 bp, Homo sapien
caccagggggatgcgagatgcagca

SEQ ID NO: 1810564 - DNA, 25 bp, Homo sapien
ctacgaggcaagaactgcaacacag

SEQ ID NO: 1810565 - DNA, 25 bp, Homo sapien
aactgcaacacagcgtgtgcaccag

SEQ ID NO: 1810566 - DNA, 25 bp, Homo sapien
tggagtcttggctccgtgggaccct

SEQ ID NO: 1810567 - DNA, 25 bp, Homo sapien
catccctgtggtcacgtagcagtct

SEQ ID NO: 1810568 - DNA, 25 bp, Homo sapien
ccactgtgtttcacgggcttgcaaa

SEQ ID NO: 1810569 - DNA, 25 bp, Homo sapien
tgcttggcgacaccttcctgcttga

SEQ ID NO: 1810570 - DNA, 25 bp, Homo sapien
gtaggttgttagacattctcctccc

SEQ ID NO: 1810571 - DNA, 25 bp, Homo sapien
tcttcttgctccaaacaccagtagc

SEQ ID NO: 1810572 - DNA, 25 bp, Homo sapien
tttgcctctcccgtctttccaggag

SEQ ID NO: 1810573 - DNA, 25 bp, Homo sapien
tgagattctgctcgcctctcgacat

SEQ ID NO: 1810574 - DNA, 25 bp, Homo sapien
tgtgtagtcccattggcagtcctgg

SEQ ID NO: 1810575 - DNA, 25 bp, Homo sapien
gccttgtgtagtcccattggcagtc

SEQ ID NO: 1810576 - DNA, 25 bp, Homo sapien
ctggctgccttgtgtagtcccattg

SEQ ID NO: 1810577 - DNA, 25 bp, Homo sapien
gtcccattggcagtcctgggtctgt

SEQ ID NO: 1810578 - DNA, 25 bp, Homo sapien
attgcaagataccagtttgaatctg

SEQ ID NO: 1810579 - DNA, 25 bp, Homo sapien
gattgcaagataccagtttgaatct

SEQ ID NO: 1810580 - DNA, 25 bp, Homo sapien
ttgcaagataccagtttgaatctgc

SEQ ID NO: 1810581 - DNA, 25 bp, Homo sapien
tgccaggagacaggaggccgtgctc

SEQ ID NO: 1810582 - DNA, 25 bp, Homo sapien
agacaggaggccgtgctcccatgga

SEQ ID NO: 1810583 - DNA, 25 bp, Homo sapien
caggaggccgtgctcccatggatga

SEQ ID NO: 1810584 - DNA, 25 bp, Homo sapien
caggagacaggaggccgtgctccca

SEQ ID NO: 1810585 - DNA, 25 bp, Homo sapien
gaactgcacggccttgggaaaacga

SEQ ID NO: 1810586 - DNA, 25 bp, Homo sapien
tggcaggtcttcagcccgatacacg

SEQ ID NO: 1810587 - DNA, 25 bp, Homo sapien
catttgaacttgtgggaactgcacg

SEQ ID NO: 1810588 - DNA, 25 bp, Homo sapien
cagtgttttggagttgcccgacgca

SEQ ID NO: 1810589 - DNA, 25 bp, Homo sapien
tcaggattctactgcggccacacag

SEQ ID NO: 1810590 - DNA, 25 bp, Homo sapien
cgccctctagcctccaagaacacag

SEQ ID NO: 1810591 - DNA, 25 bp, Homo sapien
gatcaaggccgtcacacaagaggct

SEQ ID NO: 1810592 - DNA, 25 bp, Homo sapien
cacagcagacttggccaccaaggct

SEQ ID NO: 1810593 - DNA, 25 bp, Homo sapien
ccaggcgttgccgacgtgatagtgt

SEQ ID NO: 1810594 - DNA, 25 bp, Homo sapien
tggaggatgactagctccaggtctc

SEQ ID NO: 1810595 - DNA, 25 bp, Homo sapien
gatagtgttggaggatgactagctc

SEQ ID NO: 1810596 - DNA, 25 bp, Homo sapien
acgtgatagtgttggaggatgacta

SEQ ID NO: 1810597 - DNA, 25 bp, Homo sapien
tcagacgctgcccggcccgtgtgga

SEQ ID NO: 1810598 - DNA, 25 bp, Homo sapien
ggcagaggacccactcagacgctgc

SEQ ID NO: 1810599 - DNA, 25 bp, Homo sapien
ccactcagacgctgcccggcccgtg

SEQ ID NO: 1810600 - DNA, 25 bp, Homo sapien
cactcagacgctgcccggcccgtgt

SEQ ID NO: 1810601 - DNA, 25 bp, Homo sapien
gggtgaccggcagacgtgatcctgg

SEQ ID NO: 1810602 - DNA, 25 bp, Homo sapien
gtaaccggcagatgtgatctgggct

SEQ ID NO: 1810603 - DNA, 25 bp, Homo sapien
gccacaaacccgcagttcttatgtt

SEQ ID NO: 1810604 - DNA, 25 bp, Homo sapien
tcgcgggagccacaaacccgcagtt

SEQ ID NO: 1810605 - DNA, 25 bp, Homo sapien
gttcaggtagcacggggtcctctgg

SEQ ID NO: 1810606 - DNA, 25 bp, Homo sapien
agatgctcaccgtgttcagttccac

SEQ ID NO: 1810607 - DNA, 25 bp, Homo sapien
ggcagatgctcaccgtgttcagttc

SEQ ID NO: 1810608 - DNA, 25 bp, Homo sapien
tgttcaggtagcacggggtcctctg

SEQ ID NO: 1810609 - DNA, 25 bp, Homo sapien
tcacctgctcaggtagcatggggtc

SEQ ID NO: 1810610 - DNA, 25 bp, Homo sapien
acctgctcaggtagcatggggtcct

SEQ ID NO: 1810611 - DNA, 25 bp, Homo sapien
cacctgctcaggtagcatggggtcc

SEQ ID NO: 1810612 - DNA, 25 bp, Homo sapien
ccatgggcagtgtggacgagtggaa

SEQ ID NO: 1810613 - DNA, 25 bp, Homo sapien
gaagaattctaaactcccagaggat

SEQ ID NO: 1810614 - DNA, 25 bp, Homo sapien
gggttgcagagcagcaccgaggcct

SEQ ID NO: 1810615 - DNA, 25 bp, Homo sapien
cagtgtggacgagtggaagaattct

SEQ ID NO: 1810616 - DNA, 25 bp, Homo sapien
ccatactccccaaagtgattaaaga

SEQ ID NO: 1810617 - DNA, 25 bp, Homo sapien
aaaaagatgtaaagatattccatgt

SEQ ID NO: 1810618 - DNA, 25 bp, Homo sapien
gcaatccctaacaaaattccaataa

SEQ ID NO: 1810619 - DNA, 25 bp, Homo sapien
atccctaacaaaattccaataacat

SEQ ID NO: 1810620 - DNA, 25 bp, Homo sapien
ttaatcaataatcatccccaccagg

SEQ ID NO: 1810621 - DNA, 25 bp, Homo sapien
ggaggcacgatcttctgctgcagag

SEQ ID NO: 1810622 - DNA, 25 bp, Homo sapien
attcagatgctttaatcaataatca

SEQ ID NO: 1810623 - DNA, 25 bp, Homo sapien
gcacgatcttctgctgcagaggtgt

SEQ ID NO: 1810624 - DNA, 25 bp, Homo sapien
acagagcgttctcctgggagcggtc

SEQ ID NO: 1810625 - DNA, 25 bp, Homo sapien
aatgaacagagcgttctcctgggag

SEQ ID NO: 1810626 - DNA, 25 bp, Homo sapien
tgccgagcaatgaacagagcgttct

SEQ ID NO: 1810627 - DNA, 25 bp, Homo sapien
tcagtgccgagcaatgaacagagcg

SEQ ID NO: 1810628 - DNA, 25 bp, Homo sapien
ggggctgcaagtgcacacccagctg

SEQ ID NO: 1810629 - DNA, 25 bp, Homo sapien
caggacccagcaacgctggagggtg

SEQ ID NO: 1810630 - DNA, 25 bp, Homo sapien
ggcaggacccagcaacgctggaggg

SEQ ID NO: 1810631 - DNA, 25 bp, Homo sapien
tggagggtgggatccgcggggcatg

SEQ ID NO: 1810632 - DNA, 25 bp, Homo sapien
ggaacaacggggcaggctgtcaccg

SEQ ID NO: 1810633 - DNA, 25 bp, Homo sapien
aacaacggggcaggctgtcaccgca

SEQ ID NO: 1810634 - DNA, 25 bp, Homo sapien
accagggaacaacggggcaggctgt

SEQ ID NO: 1810635 - DNA, 25 bp, Homo sapien
ggcaccagggaacaacggggcaggc

SEQ ID NO: 1810636 - DNA, 25 bp, Homo sapien
gaactcggaatcttcttaggacgct

SEQ ID NO: 1810637 - DNA, 25 bp, Homo sapien
gacactgcggttgtccacagtagca

SEQ ID NO: 1810638 - DNA, 25 bp, Homo sapien
agcgggagctgcgtcatgaatgaca

SEQ ID NO: 1810639 - DNA, 25 bp, Homo sapien
taggacgctcatgtgttctgtgaaa

SEQ ID NO: 1810640 - DNA, 25 bp, Homo sapien
taagcggagacgcagacacactggg

SEQ ID NO: 1810641 - DNA, 25 bp, Homo sapien
ggagactaagcggagacgcagacac

SEQ ID NO: 1810642 - DNA, 25 bp, Homo sapien
actaagcggagacgcagacacactg

SEQ ID NO: 1810643 - DNA, 25 bp, Homo sapien
ttcggagactaagcggagacgcaga

SEQ ID NO: 1810644 - DNA, 25 bp, Homo sapien
atcacggccccaccaaaatgaacat

SEQ ID NO: 1810645 - DNA, 25 bp, Homo sapien
ccgttgtctttcaaagggcagttga

SEQ ID NO: 1810646 - DNA, 25 bp, Homo sapien
ttccttgtacatagactttctccct

SEQ ID NO: 1810647 - DNA, 25 bp, Homo sapien
gaacatttccggttccagaagcagg

SEQ ID NO: 1810648 - DNA, 25 bp, Homo sapien
gaaattaccggacagtagcaaccgc

SEQ ID NO: 1810649 - DNA, 25 bp, Homo sapien
ttgagaatcagtgcccgaggccagt

SEQ ID NO: 1810650 - DNA, 25 bp, Homo sapien
gactttgatccaggtgcccggaaca

SEQ ID NO: 1810651 - DNA, 25 bp, Homo sapien
gatcctgcccaagataggaccctag

SEQ ID NO: 1810652 - DNA, 25 bp, Homo sapien
gaaaaattgagtcatttaggaagat

SEQ ID NO: 1810653 - DNA, 25 bp, Homo sapien
aaattgagtcatttaggaagatttt

SEQ ID NO: 1810654 - DNA, 25 bp, Homo sapien
aaaaattgagtcatttaggaagatt

SEQ ID NO: 1810655 - DNA, 25 bp, Homo sapien
ttgagtcatttaggaagatttttag

SEQ ID NO: 1810656 - DNA, 25 bp, Homo sapien
gggtgtgtgtccagcagagactcaa

SEQ ID NO: 1810657 - DNA, 25 bp, Homo sapien
gagtagctggaatcggaacatccta

SEQ ID NO: 1810658 - DNA, 25 bp, Homo sapien
ggcgtcggtcaccactgcgagtgtt

SEQ ID NO: 1810659 - DNA, 25 bp, Homo sapien
gttcagcacaggctcaacggcaggg

SEQ ID NO: 1810660 - DNA, 25 bp, Homo sapien
cttgcgtgtcggaagggactgtcca

SEQ ID NO: 1810661 - DNA, 25 bp, Homo sapien
aatgatcttcatcccaccaaggctg

SEQ ID NO: 1810662 - DNA, 25 bp, Homo sapien
tcttttgtaatgatcttcatcccac

SEQ ID NO: 1810663 - DNA, 25 bp, Homo sapien
ctggcttgcgtgtcggaagggactg

SEQ ID NO: 1810664 - DNA, 25 bp, Homo sapien
ttgctttgtcaaaagagctcttctt

SEQ ID NO: 1810665 - DNA, 25 bp, Homo sapien
tgcttgaatgtgaccctgtgggaac

SEQ ID NO: 1810666 - DNA, 25 bp, Homo sapien
gctgggatctcatgattttactgta

SEQ ID NO: 1810667 - DNA, 25 bp, Homo sapien
tctaatgccaggaaacccccagacg

SEQ ID NO: 1810668 - DNA, 25 bp, Homo sapien
tgcttgccggtcacagagccacaca

SEQ ID NO: 1810669 - DNA, 25 bp, Homo sapien
ttcctggaagccgaggcctgcacag

SEQ ID NO: 1810670 - DNA, 25 bp, Homo sapien
gtgggacagccgtggcctcctgctt

SEQ ID NO: 1810671 - DNA, 25 bp, Homo sapien
cacacactccaaggcagggttcctg

SEQ ID NO: 1810672 - DNA, 25 bp, Homo sapien
ccttgtatggccgtcctgggtagca

SEQ ID NO: 1810673 - DNA, 25 bp, Homo sapien
tgtgcacaggactgacccaatggct

SEQ ID NO: 1810674 - DNA, 25 bp, Homo sapien
tgaaagacttgacttctcggccggg

SEQ ID NO: 1810675 - DNA, 25 bp, Homo sapien
aaaggcatccgcacgcatgagctgt

SEQ ID NO: 1810676 - DNA, 25 bp, Homo sapien
ctttcactggcgctgggatggcatt

SEQ ID NO: 1810677 - DNA, 25 bp, Homo sapien
tagggtggaaatgctcctgacaggc

SEQ ID NO: 1810678 - DNA, 25 bp, Homo sapien
cctgacaggcaagcttgatggactg

SEQ ID NO: 1810679 - DNA, 25 bp, Homo sapien
gtgagtatttcttccatgacgataa

SEQ ID NO: 1810680 - DNA, 25 bp, Homo sapien
aaggtcagcctgtgcaacgtcggcc

SEQ ID NO: 1810681 - DNA, 25 bp, Homo sapien
catcaggcccacaggagtaaaagga

SEQ ID NO: 1810682 - DNA, 25 bp, Homo sapien
gaagagcccatccatgcgggagata

SEQ ID NO: 1810683 - DNA, 25 bp, Homo sapien
cacatgctgtcctgagagttgagat

SEQ ID NO: 1810684 - DNA, 25 bp, Homo sapien
gacttctgaaggtcaaccagccgaa

SEQ ID NO: 1810685 - DNA, 25 bp, Homo sapien
tcaaaagtcaagatcccgagagcag

SEQ ID NO: 1810686 - DNA, 25 bp, Homo sapien
tcattgtccccgagggagagagccc

SEQ ID NO: 1810687 - DNA, 25 bp, Homo sapien
tttacattgactcacagcgcaggcc

SEQ ID NO: 1810688 - DNA, 25 bp, Homo sapien
gagaattggcattgtcaagtggtcg

SEQ ID NO: 1810689 - DNA, 25 bp, Homo sapien
tttggagggattccactgaatctga

SEQ ID NO: 1810690 - DNA, 25 bp, Homo sapien
tccatgtcaagtggttgagggtccc

SEQ ID NO: 1810691 - DNA, 25 bp, Homo sapien
tcaagtggtcgagggtccatgtcaa

SEQ ID NO: 1810692 - DNA, 25 bp, Homo sapien
gctgccatacggctggcgaggctcc

SEQ ID NO: 1810693 - DNA, 25 bp, Homo sapien
acgggtgtcagcatggacacggctc

SEQ ID NO: 1810694 - DNA, 25 bp, Homo sapien
tcccgcttctcaggaccgcagcctg

SEQ ID NO: 1810695 - DNA, 25 bp, Homo sapien
atacggctggcgaggctccctccag

SEQ ID NO: 1810696 - DNA, 25 bp, Homo sapien
tggccgcccaggcagatttcagcgg

SEQ ID NO: 1810697 - DNA, 25 bp, Homo sapien
gagggaggatccctcggcaagacac

SEQ ID NO: 1810698 - DNA, 25 bp, Homo sapien
ctcggcaagacaccgtcctctgggt

SEQ ID NO: 1810699 - DNA, 25 bp, Homo sapien
tcagcgggaacgaggattccagcat

SEQ ID NO: 1810700 - DNA, 25 bp, Homo sapien
tgtggagctgggtcgccaccgctgg

SEQ ID NO: 1810701 - DNA, 25 bp, Homo sapien
cctgtgccgcttccgtgttgctgct

SEQ ID NO: 1810702 - DNA, 25 bp, Homo sapien
ttgctgctgtgcgtgtctagacact

SEQ ID NO: 1810703 - DNA, 25 bp, Homo sapien
ctgtgagtgcgatttctcctgggcc

SEQ ID NO: 1810704 - DNA, 25 bp, Homo sapien
ctcaggcgtcttggtgaaaggagaa

SEQ ID NO: 1810705 - DNA, 25 bp, Homo sapien
ggagaaccggagcaaacaccttgca

SEQ ID NO: 1810706 - DNA, 25 bp, Homo sapien
caccacagtttatcacttacaggaa

SEQ ID NO: 1810707 - DNA, 25 bp, Homo sapien
gtgtaggactcattcacacagaggg

SEQ ID NO: 1810708 - DNA, 25 bp, Homo sapien
tcgcactgacttagggagagcaacc

SEQ ID NO: 1810709 - DNA, 25 bp, Homo sapien
tgtggacacatttataggagaagac

SEQ ID NO: 1810710 - DNA, 25 bp, Homo sapien
tgaggacggccacctcgtttccctg

SEQ ID NO: 1810711 - DNA, 25 bp, Homo sapien
tccatccagactgggacatgggaca

SEQ ID NO: 1810712 - DNA, 25 bp, Homo sapien
tggttgttgagacgtgtggggttag

SEQ ID NO: 1810713 - DNA, 25 bp, Homo sapien
ctggttgttgagacgtgtggggtta

SEQ ID NO: 1810714 - DNA, 25 bp, Homo sapien
ggttgttgagacgtgtggggttaga

SEQ ID NO: 1810715 - DNA, 25 bp, Homo sapien
agagctgtgcttgacgggccctcgc

SEQ ID NO: 1810716 - DNA, 25 bp, Homo sapien
gagacgatgagctcccctccagtgg

SEQ ID NO: 1810717 - DNA, 25 bp, Homo sapien
gtccgcggagcagggtctttgcttt

SEQ ID NO: 1810718 - DNA, 25 bp, Homo sapien
ttgctttgtggacgccgtacagcag

SEQ ID NO: 1810719 - DNA, 25 bp, Homo sapien
tagaggacgtgctccataaatggtc

SEQ ID NO: 1810720 - DNA, 25 bp, Homo sapien
cgataatgccgaggtgtctgcacta

SEQ ID NO: 1810721 - DNA, 25 bp, Homo sapien
cgttatgaacacgatcaggtgctgg

SEQ ID NO: 1810722 - DNA, 25 bp, Homo sapien
tctgcactagcagagttagaggacg

SEQ ID NO: 1810723 - DNA, 25 bp, Homo sapien
ggaaccaggtttggagcttctcgag

SEQ ID NO: 1810724 - DNA, 25 bp, Homo sapien
gggctgagtccgccttcagatgagc

SEQ ID NO: 1810725 - DNA, 25 bp, Homo sapien
ccacatgctccgtttgcaatgagaa

SEQ ID NO: 1810726 - DNA, 25 bp, Homo sapien
aatgagaaacgtctatccaccgagg

SEQ ID NO: 1810727 - DNA, 25 bp, Homo sapien
tctttccgtgattccgggtgtctgt

SEQ ID NO: 1810728 - DNA, 25 bp, Homo sapien
ctttccgtgattccgggtgtctgtc

SEQ ID NO: 1810729 - DNA, 25 bp, Homo sapien
tgtggatggatctgctctttccgtg

SEQ ID NO: 1810730 - DNA, 25 bp, Homo sapien
gatggatctgctctttccgtgattc

SEQ ID NO: 1810731 - DNA, 25 bp, Homo sapien
gatggatctgctctttccgtgattc

SEQ ID NO: 1810732 - DNA, 25 bp, Homo sapien
ctttccgtgattccgggtgtctgtc

SEQ ID NO: 1810733 - DNA, 25 bp, Homo sapien
tgtggatggatctgctctttccgtg

SEQ ID NO: 1810734 - DNA, 25 bp, Homo sapien
tctttccgtgattccgggtgtctgt

SEQ ID NO: 1810735 - DNA, 25 bp, Homo sapien
tgcccttgtgtaggaggagagctct

SEQ ID NO: 1810736 - DNA, 25 bp, Homo sapien
tacttgcccttgtgtaggaggagag

SEQ ID NO: 1810737 - DNA, 25 bp, Homo sapien
ttttgcctggaggtgcccgtgatac

SEQ ID NO: 1810738 - DNA, 25 bp, Homo sapien
ggtgcccgtgatacttgcccttgtg

SEQ ID NO: 1810739 - DNA, 25 bp, Homo sapien
aaatccgtgttttgcatgagcggcc

SEQ ID NO: 1810740 - DNA, 25 bp, Homo sapien
tgaaagcaaatccgtgttttgcatg

SEQ ID NO: 1810741 - DNA, 25 bp, Homo sapien
aagcaaatccgtgttttgcatgagc

SEQ ID NO: 1810742 - DNA, 25 bp, Homo sapien
atccgtgttttgcatgagcggcctg

SEQ ID NO: 1810743 - DNA, 25 bp, Homo sapien
caatgacgggtttgtgttgggtaca

SEQ ID NO: 1810744 - DNA, 25 bp, Homo sapien
tctagggacttcctgcaatgacggg

SEQ ID NO: 1810745 - DNA, 25 bp, Homo sapien
gaagctattgtagaaccgtccgacg

SEQ ID NO: 1810746 - DNA, 25 bp, Homo sapien
tccgacgatggagccttcagggacg

SEQ ID NO: 1810747 - DNA, 25 bp, Homo sapien
gcccggaagacactcttccagccca

SEQ ID NO: 1810748 - DNA, 25 bp, Homo sapien
gtctgcccggaagacactcttccag

SEQ ID NO: 1810749 - DNA, 25 bp, Homo sapien
ggaagacactcttccagcccaccgg

SEQ ID NO: 1810750 - DNA, 25 bp, Homo sapien
ccggaagacactcttccagcccacc

SEQ ID NO: 1810751 - DNA, 25 bp, Homo sapien
tcaattgagttaaatgctgctgcaa

SEQ ID NO: 1810752 - DNA, 25 bp, Homo sapien
gtctggaacaaagcgtaggtgaggg

SEQ ID NO: 1810753 - DNA, 25 bp, Homo sapien
acgtctggaacaaagcgtaggtgag

SEQ ID NO: 1810754 - DNA, 25 bp, Homo sapien
tcacgtctggaacaaagcgtaggtg

SEQ ID NO: 1810755 - DNA, 25 bp, Homo sapien
aacaaagcgtaggtgaggggaggct

SEQ ID NO: 1810756 - DNA, 25 bp, Homo sapien
ggtcgagtcgggagatgatgcagac

SEQ ID NO: 1810757 - DNA, 25 bp, Homo sapien
gatgcagacccaacgacttaacaaa

SEQ ID NO: 1810758 - DNA, 25 bp, Homo sapien
caagtgtgtccatcgaggtcgagtc

SEQ ID NO: 1810759 - DNA, 25 bp, Homo sapien
ctgccagtggacatgtcgtagcaag

SEQ ID NO: 1810760 - DNA, 25 bp, Homo sapien
gatttatcaccagccgcaaatggca

SEQ ID NO: 1810761 - DNA, 25 bp, Homo sapien
caccagccgcaaatggcaaaggcag

SEQ ID NO: 1810762 - DNA, 25 bp, Homo sapien
ggcaccagtgatttatcaccagccg

SEQ ID NO: 1810763 - DNA, 25 bp, Homo sapien
actgggcaccagtgatttatcacca

SEQ ID NO: 1810764 - DNA, 25 bp, Homo sapien
ctgcacgtagaccaaccatggagag

SEQ ID NO: 1810765 - DNA, 25 bp, Homo sapien
cgtagaccaaccatggagaggctgg

SEQ ID NO: 1810766 - DNA, 25 bp, Homo sapien
cacgtagaccaaccatggagaggct

SEQ ID NO: 1810767 - DNA, 25 bp, Homo sapien
tgcacgtagaccaaccatggagagg

SEQ ID NO: 1810768 - DNA, 25 bp, Homo sapien
ggttctccgggcaagcacattcggt

SEQ ID NO: 1810769 - DNA, 25 bp, Homo sapien
tataggatcaggtgtctggccttga

SEQ ID NO: 1810770 - DNA, 25 bp, Homo sapien
caagcacattcggtcacctgcagag

SEQ ID NO: 1810771 - DNA, 25 bp, Homo sapien
caggtctccaactgaggggctctgc

SEQ ID NO: 1810772 - DNA, 25 bp, Homo sapien
tgtgccccgggtttctggtgttcac

SEQ ID NO: 1810773 - DNA, 25 bp, Homo sapien
ctgtgccccgggtttctggtgttca

SEQ ID NO: 1810774 - DNA, 25 bp, Homo sapien
ggcgccaggagacacgtgtaagcat

SEQ ID NO: 1810775 - DNA, 25 bp, Homo sapien
tacagtgaacacgtggaccaactgc

SEQ ID NO: 1810776 - DNA, 25 bp, Homo sapien
cagctgtggcgggatcacggaatac

SEQ ID NO: 1810777 - DNA, 25 bp, Homo sapien
ttaaccagcgagtggaacgcgtgct

SEQ ID NO: 1810778 - DNA, 25 bp, Homo sapien
cccatcggttaggacgggcagcgtt

SEQ ID NO: 1810779 - DNA, 25 bp, Homo sapien
ggacgggcagcgttgccctctccat

SEQ ID NO: 1810780 - DNA, 25 bp, Homo sapien
cttgatgccctctggcgtttggaca

SEQ ID NO: 1810781 - DNA, 25 bp, Homo sapien
ttggacacccatgagcccatcggtt

SEQ ID NO: 1810782 - DNA, 25 bp, Homo sapien
ctctcggtggctgcaaggtgacagc

SEQ ID NO: 1810783 - DNA, 25 bp, Homo sapien
ctctgaggagcctctcggtggctgc

SEQ ID NO: 1810784 - DNA, 25 bp, Homo sapien
gtgacagccctcctagacgcagctg

SEQ ID NO: 1810785 - DNA, 25 bp, Homo sapien
cctagacgcagctgcttaatgactt

SEQ ID NO: 1810786 - DNA, 25 bp, Homo sapien
gtgtggagacgtgccccgtgctgcc

SEQ ID NO: 1810787 - DNA, 25 bp, Homo sapien
cccgtgctgccgtcagtcgtgctga

SEQ ID NO: 1810788 - DNA, 25 bp, Homo sapien
ggtcggtgtggagacgtgccccgtg

SEQ ID NO: 1810789 - DNA, 25 bp, Homo sapien
cgtgctgccgtcagtcgtgctgacc

SEQ ID NO: 1810790 - DNA, 25 bp, Homo sapien
tgactctcagtgtgacttacgccgg

SEQ ID NO: 1810791 - DNA, 25 bp, Homo sapien
tggatggaaacaccacagcttgacc

SEQ ID NO: 1810792 - DNA, 25 bp, Homo sapien
caaattctgcacactcattggtgga

SEQ ID NO: 1810793 - DNA, 25 bp, Homo sapien
ttacgccggccacagaagtgcagtt

SEQ ID NO: 1810794 - DNA, 25 bp, Homo sapien
gggctcgcggtttcttggcatcaga

SEQ ID NO: 1810795 - DNA, 25 bp, Homo sapien
ttcagcagctggctaggaggactca

SEQ ID NO: 1810796 - DNA, 25 bp, Homo sapien
caggcttgcagcgtccatagaggtg

SEQ ID NO: 1810797 - DNA, 25 bp, Homo sapien
cagccgtggagtggagttcacatgt

SEQ ID NO: 1810798 - DNA, 25 bp, Homo sapien
gatgttgaatgcacagcccgagtgt

SEQ ID NO: 1810799 - DNA, 25 bp, Homo sapien
cagctgtcacgagaacagagcgacg

SEQ ID NO: 1810800 - DNA, 25 bp, Homo sapien
cagagcgacgattgacgatgccgag

SEQ ID NO: 1810801 - DNA, 25 bp, Homo sapien
cgtatggacatcctgcctgcgaggc

SEQ ID NO: 1810802 - DNA, 25 bp, Homo sapien
ccactgcctggttctaacgcctttt

SEQ ID NO: 1810803 - DNA, 25 bp, Homo sapien
cactgcctggttctaacgccttttg

SEQ ID NO: 1810804 - DNA, 25 bp, Homo sapien
ctggttctaacgccttttgtttctg

SEQ ID NO: 1810805 - DNA, 25 bp, Homo sapien
actgcctggttctaacgccttttgt

SEQ ID NO: 1810806 - DNA, 25 bp, Homo sapien
gaaaacatcacgtatcggatacccc

SEQ ID NO: 1810807 - DNA, 25 bp, Homo sapien
caaagggtcatgcaacagaaagcaa

SEQ ID NO: 1810808 - DNA, 25 bp, Homo sapien
gctttagggtacagcagatccttca

SEQ ID NO: 1810809 - DNA, 25 bp, Homo sapien
cgaacacgggtgcagaaaaatctca

SEQ ID NO: 1810810 - DNA, 25 bp, Homo sapien
ctaggttcccatcactgatccccca

SEQ ID NO: 1810811 - DNA, 25 bp, Homo sapien
taggttcccatcactgatcccccac

SEQ ID NO: 1810812 - DNA, 25 bp, Homo sapien
tctgcaagaaacaccgagcaactgt

SEQ ID NO: 1810813 - DNA, 25 bp, Homo sapien
gccgagcgaggcatcttcatttagg

SEQ ID NO: 1810814 - DNA, 25 bp, Homo sapien
gcacacaagtaaacggcaggcgagc

SEQ ID NO: 1810815 - DNA, 25 bp, Homo sapien
ccaatgtggatactgatgaaaagcc

SEQ ID NO: 1810816 - DNA, 25 bp, Homo sapien
agagcagccagttccatccaacatg

SEQ ID NO: 1810817 - DNA, 25 bp, Homo sapien
caggacctttcctgcagagcagcca

SEQ ID NO: 1810818 - DNA, 25 bp, Homo sapien
ctttccactcaggacctttcctgca

SEQ ID NO: 1810819 - DNA, 25 bp, Homo sapien
gagcagccagttccatccaacatgc

SEQ ID NO: 1810820 - DNA, 25 bp, Homo sapien
ggtgcacgtaggatgtgcacggctg

SEQ ID NO: 1810821 - DNA, 25 bp, Homo sapien
cgtaggatgtgcacggctggggggt

SEQ ID NO: 1810822 - DNA, 25 bp, Homo sapien
acaggtaggtgcaggcgtgccaggc

SEQ ID NO: 1810823 - DNA, 25 bp, Homo sapien
caggtaggtgcaggcgtgccaggcc

SEQ ID NO: 1810824 - DNA, 25 bp, Homo sapien
tgccagatgcccacgatgtgtccac

SEQ ID NO: 1810825 - DNA, 25 bp, Homo sapien
gccagatgcccacgatgtgtccaca

SEQ ID NO: 1810826 - DNA, 25 bp, Homo sapien
atgccagatgcccacgatgtgtcca

SEQ ID NO: 1810827 - DNA, 25 bp, Homo sapien
ctatgccagatgcccacgatgtgtc

SEQ ID NO: 1810828 - DNA, 25 bp, Homo sapien
tttgcgtccgccctcgctcctgtca

SEQ ID NO: 1810829 - DNA, 25 bp, Homo sapien
gagatcggccgcgtcctgcgccctg

SEQ ID NO: 1810830 - DNA, 25 bp, Homo sapien
gaggtcctccgcgttctttgcgtcc

SEQ ID NO: 1810831 - DNA, 25 bp, Homo sapien
cactgcagccgggagagcccagtgg

SEQ ID NO: 1810832 - DNA, 25 bp, Homo sapien
agcgccgagaacttctgagcgggca

SEQ ID NO: 1810833 - DNA, 25 bp, Homo sapien
cgagaacttctgagcgggcaccggc

SEQ ID NO: 1810834 - DNA, 25 bp, Homo sapien
gccgagaacttctgagcgggcaccg

SEQ ID NO: 1810835 - DNA, 25 bp, Homo sapien
cgtgagcgccgagaacttctgagcg

SEQ ID NO: 1810836 - DNA, 25 bp, Homo sapien
cctcgccggcaggcgaaggctccac

SEQ ID NO: 1810837 - DNA, 25 bp, Homo sapien
ccggcaggcgaaggctccacggccc

SEQ ID NO: 1810838 - DNA, 25 bp, Homo sapien
gctccccgtgcccaggcgcctgggc

SEQ ID NO: 1810839 - DNA, 25 bp, Homo sapien
ctgctccccgtgcccaggcgcctgg

SEQ ID NO: 1810840 - DNA, 25 bp, Homo sapien
ccagcagtgagtgcgggacacccga

SEQ ID NO: 1810841 - DNA, 25 bp, Homo sapien
tggaacccgaggagcccgtcgcagc

SEQ ID NO: 1810842 - DNA, 25 bp, Homo sapien
aagcggtcgggagaacacgctccag

SEQ ID NO: 1810843 - DNA, 25 bp, Homo sapien
tctgtcttggccttgggacagtccg

SEQ ID NO: 1810844 - DNA, 25 bp, Homo sapien
cccagagccaagtggtgtgctctga

SEQ ID NO: 1810845 - DNA, 25 bp, Homo sapien
aggcagagaggcaagctttcctcct

SEQ ID NO: 1810846 - DNA, 25 bp, Homo sapien
agaaatgaatggagtagaaggaggc

SEQ ID NO: 1810847 - DNA, 25 bp, Homo sapien
cctgagaagccaggtatggcaaact

SEQ ID NO: 1810848 - DNA, 25 bp, Homo sapien
cataggtgagtaagacaaatgcgtg

SEQ ID NO: 1810849 - DNA, 25 bp, Homo sapien
caggtatggcaaactgaaagcccca

SEQ ID NO: 1810850 - DNA, 25 bp, Homo sapien
caaatgcgtggtcctgagaagccag

SEQ ID NO: 1810851 - DNA, 25 bp, Homo sapien
gaaacggcagtgtggaattgtaaag

SEQ ID NO: 1810852 - DNA, 25 bp, Homo sapien
tcaggtctgtggtcatgcattccac

SEQ ID NO: 1810853 - DNA, 25 bp, Homo sapien
gcattccacaagaccaataagaggc

SEQ ID NO: 1810854 - DNA, 25 bp, Homo sapien
ttacacatggctaaatattgttttc

SEQ ID NO: 1810855 - DNA, 25 bp, Homo sapien
tacgaggggctattttcagttctga

SEQ ID NO: 1810856 - DNA, 25 bp, Homo sapien
tgtgaagttacgaggggctattttc

SEQ ID NO: 1810857 - DNA, 25 bp, Homo sapien
tgggggcacgtgtcctgagagctct

SEQ ID NO: 1810858 - DNA, 25 bp, Homo sapien
agagctctgggtttcgtgctgtgaa

SEQ ID NO: 1810859 - DNA, 25 bp, Homo sapien
ttttattgaaagtgtctaaacacac

SEQ ID NO: 1810860 - DNA, 25 bp, Homo sapien
tctaaacacacgttcctcctggcag

SEQ ID NO: 1810861 - DNA, 25 bp, Homo sapien
tgaaagtgtctaaacacacgttcct

SEQ ID NO: 1810862 - DNA, 25 bp, Homo sapien
tggcagccctcgtggacggtccaga

SEQ ID NO: 1810863 - DNA, 25 bp, Homo sapien
ttggatgggtggcatccccgtggct

SEQ ID NO: 1810864 - DNA, 25 bp, Homo sapien
tggcatccccgtggctggcgtcacg

SEQ ID NO: 1810865 - DNA, 25 bp, Homo sapien
gatgggtggcatccccgtggctggc

SEQ ID NO: 1810866 - DNA, 25 bp, Homo sapien
gggttggatgggtggcatccccgtg

SEQ ID NO: 1810867 - DNA, 25 bp, Homo sapien
gaaacacaaggcgatgaagtcactg

SEQ ID NO: 1810868 - DNA, 25 bp, Homo sapien
tgggtgccgtttgtcgctgagtcca

SEQ ID NO: 1810869 - DNA, 25 bp, Homo sapien
tcgctgagtccatcgcagtcagcca

SEQ ID NO: 1810870 - DNA, 25 bp, Homo sapien
tactgggcacccgacgggaaacaca

SEQ ID NO: 1810871 - DNA, 25 bp, Homo sapien
tggagcctccggagcttctcagaca

SEQ ID NO: 1810872 - DNA, 25 bp, Homo sapien
gtttaattgttctatgacggcagaa

SEQ ID NO: 1810873 - DNA, 25 bp, Homo sapien
ctatgacggcagaatgaagttaact

SEQ ID NO: 1810874 - DNA, 25 bp, Homo sapien
gaagttaactagcacaatctggaga

SEQ ID NO: 1810875 - DNA, 25 bp, Homo sapien
ccaactctggccaagaaggtctgtg

SEQ ID NO: 1810876 - DNA, 25 bp, Homo sapien
gccaactctggccaagaaggtctgt

SEQ ID NO: 1810877 - DNA, 25 bp, Homo sapien
gggccaactctggccaagaaggtct

SEQ ID NO: 1810878 - DNA, 25 bp, Homo sapien
ggccaactctggccaagaaggtctg

SEQ ID NO: 1810879 - DNA, 25 bp, Homo sapien
tgaagagcccggaaattttggagga

SEQ ID NO: 1810880 - DNA, 25 bp, Homo sapien
gatggaggcctattccactgagtga

SEQ ID NO: 1810881 - DNA, 25 bp, Homo sapien
tcttgaccattcgagaaaaatctct

SEQ ID NO: 1810882 - DNA, 25 bp, Homo sapien
caacgttctatctataaccaagggt

SEQ ID NO: 1810883 - DNA, 25 bp, Homo sapien
aatcaagttgactaattcataagcc

SEQ ID NO: 1810884 - DNA, 25 bp, Homo sapien
cctgacgagtagtcaatcaagttga

SEQ ID NO: 1810885 - DNA, 25 bp, Homo sapien
aaatatgagtcgttcctgtccactg

SEQ ID NO: 1810886 - DNA, 25 bp, Homo sapien
tgtgagtttatttaagttggagctt

SEQ ID NO: 1810887 - DNA, 25 bp, Homo sapien
gagcccacatagggcgcaggagcat

SEQ ID NO: 1810888 - DNA, 25 bp, Homo sapien
aggagcccacatagggcgcaggagc

SEQ ID NO: 1810889 - DNA, 25 bp, Homo sapien
gtctgcaggagcccacatagggcgc

SEQ ID NO: 1810890 - DNA, 25 bp, Homo sapien
ctgcaggagcccacatagggcgcag

SEQ ID NO: 1810891 - DNA, 25 bp, Homo sapien
ttcccgggcattgcgaacttcaggg

SEQ ID NO: 1810892 - DNA, 25 bp, Homo sapien
tcaccaaacgcttcccgggcattgc

SEQ ID NO: 1810893 - DNA, 25 bp, Homo sapien
acgcttcccgggcattgcgaacttc

SEQ ID NO: 1810894 - DNA, 25 bp, Homo sapien
gtgtttgcgaagcgctgctccccag

SEQ ID NO: 1810895 - DNA, 25 bp, Homo sapien
gggccacagagccccctctagccct

SEQ ID NO: 1810896 - DNA, 25 bp, Homo sapien
ggccacagagccccctctagccctc

SEQ ID NO: 1810897 - DNA, 25 bp, Homo sapien
gccacagagccccctctagccctct

SEQ ID NO: 1810898 - DNA, 25 bp, Homo sapien
tgaggctcccagtgaccaccgggct

SEQ ID NO: 1810899 - DNA, 25 bp, Homo sapien
gctgaggctcccagtgaccaccggg

SEQ ID NO: 1810900 - DNA, 25 bp, Homo sapien
ggctcccagtgaccaccgggctcct

SEQ ID NO: 1810901 - DNA, 25 bp, Homo sapien
agctgaggctcccagtgaccaccgg

SEQ ID NO: 1810902 - DNA, 25 bp, Homo sapien
cacacttcatagctcatgtatagct

SEQ ID NO: 1810903 - DNA, 25 bp, Homo sapien
catgtatagctcatcggtctctggg

SEQ ID NO: 1810904 - DNA, 25 bp, Homo sapien
tcatagctcatgtatagctcatcgg

SEQ ID NO: 1810905 - DNA, 25 bp, Homo sapien
catctgccgcacacttcatagctca

SEQ ID NO: 1810906 - DNA, 25 bp, Homo sapien
ttcagagccacattcgcgtagccac

SEQ ID NO: 1810907 - DNA, 25 bp, Homo sapien
cctcggggggtagagaagcttgtgc

SEQ ID NO: 1810908 - DNA, 25 bp, Homo sapien
gtcttcagagccacattcgcgtagc

SEQ ID NO: 1810909 - DNA, 25 bp, Homo sapien
tgtgcacccacatggccttggagtc

SEQ ID NO: 1810910 - DNA, 25 bp, Homo sapien
tgggcatggactctaagcccagtgc

SEQ ID NO: 1810911 - DNA, 25 bp, Homo sapien
ccttgtagacacggaatgcatgggc

SEQ ID NO: 1810912 - DNA, 25 bp, Homo sapien
tgtagacacggaatgcatgggcatg

SEQ ID NO: 1810913 - DNA, 25 bp, Homo sapien
catgggcatggactctaagcccagt

SEQ ID NO: 1810914 - DNA, 25 bp, Homo sapien
gccccatagcgagggacagatgatg

SEQ ID NO: 1810915 - DNA, 25 bp, Homo sapien
cctggccccatagcgagggatggac

SEQ ID NO: 1810916 - DNA, 25 bp, Homo sapien
cgagggagggacgatgcaggttcct

SEQ ID NO: 1810917 - DNA, 25 bp, Homo sapien
gccccatagcgagggatggacaatg

SEQ ID NO: 1810918 - DNA, 25 bp, Homo sapien
ctggctggggcagcacagctttgca

SEQ ID NO: 1810919 - DNA, 25 bp, Homo sapien
aggtacttgaggatctcagcagcct

SEQ ID NO: 1810920 - DNA, 25 bp, Homo sapien
tctcagcagcctcgttctcgcagca

SEQ ID NO: 1810921 - DNA, 25 bp, Homo sapien
cctcgttctcgcagcacacagctgg

SEQ ID NO: 1810922 - DNA, 25 bp, Homo sapien
cagaaatccaggcggggtcctcaga

SEQ ID NO: 1810923 - DNA, 25 bp, Homo sapien
aggcggggtcctcagagctcctgac

SEQ ID NO: 1810924 - DNA, 25 bp, Homo sapien
aaatccaggcggggtcctcagagct

SEQ ID NO: 1810925 - DNA, 25 bp, Homo sapien
aatccaggcggggtcctcagagctc

SEQ ID NO: 1810926 - DNA, 25 bp, Homo sapien
gggatctttgcacttggcacgttga

SEQ ID NO: 1810927 - DNA, 25 bp, Homo sapien
ggcacgttgaaattcacaacgggaa

SEQ ID NO: 1810928 - DNA, 25 bp, Homo sapien
cttccgtcagatgcgcagagaggtt

SEQ ID NO: 1810929 - DNA, 25 bp, Homo sapien
agtttcctcgatatgcaatctctag

SEQ ID NO: 1810930 - DNA, 25 bp, Homo sapien
cactgcaatcgtgctggtgacgctg

SEQ ID NO: 1810931 - DNA, 25 bp, Homo sapien
cagcaagactcactgcaatcgtgct

SEQ ID NO: 1810932 - DNA, 25 bp, Homo sapien
ctttctaaagcacgccagggcttca

SEQ ID NO: 1810933 - DNA, 25 bp, Homo sapien
ccatttgtggtcctttctaaagcac

SEQ ID NO: 1810934 - DNA, 25 bp, Homo sapien
caaaggctacggctaaagcggaagc

SEQ ID NO: 1810935 - DNA, 25 bp, Homo sapien
tcaatggcacatccgactggagtta

SEQ ID NO: 1810936 - DNA, 25 bp, Homo sapien
tcttcgcggcctttcaatggcacat

SEQ ID NO: 1810937 - DNA, 25 bp, Homo sapien
taaagcggaagcttcttcgcggcct

SEQ ID NO: 1810938 - DNA, 25 bp, Homo sapien
ctttgtgcgactcctctctggcttt

SEQ ID NO: 1810939 - DNA, 25 bp, Homo sapien
cagggcctttgtgcgactcctctct

SEQ ID NO: 1810940 - DNA, 25 bp, Homo sapien
gggcctttgtgcgactcctctctgg

SEQ ID NO: 1810941 - DNA, 25 bp, Homo sapien
tccagggcctttgtgcgactcctct

SEQ ID NO: 1810942 - DNA, 25 bp, Homo sapien
caggagacgacgtcacgttggctgc

SEQ ID NO: 1810943 - DNA, 25 bp, Homo sapien
acaggagacgacgtcacgttggctg

SEQ ID NO: 1810944 - DNA, 25 bp, Homo sapien
cacaggagacgacgtcacgttggct

SEQ ID NO: 1810945 - DNA, 25 bp, Homo sapien
actgtaggtgccgtcgtcattgcac

SEQ ID NO: 1810946 - DNA, 25 bp, Homo sapien
gggtatacttcctttcggccacaca

SEQ ID NO: 1810947 - DNA, 25 bp, Homo sapien
gtcattgcactcaggaatgaacact

SEQ ID NO: 1810948 - DNA, 25 bp, Homo sapien
gaacacttgctgaaactccttccgg

SEQ ID NO: 1810949 - DNA, 25 bp, Homo sapien
agcagtatcccgtgtagctgtgaca

SEQ ID NO: 1810950 - DNA, 25 bp, Homo sapien
gtgacgcaccagcagtatcccgtgt

SEQ ID NO: 1810951 - DNA, 25 bp, Homo sapien
tcccgttgggcgtgacgcaccagca

SEQ ID NO: 1810952 - DNA, 25 bp, Homo sapien
tatcccgtgtagctgtgacactgga

SEQ ID NO: 1810953 - DNA, 25 bp, Homo sapien
cacagtgaagatggacgcatagtca

SEQ ID NO: 1810954 - DNA, 25 bp, Homo sapien
tgaagatggacgcatagtcatgttc

SEQ ID NO: 1810955 - DNA, 25 bp, Homo sapien
catccacagtgaagatggacgcata

SEQ ID NO: 1810956 - DNA, 25 bp, Homo sapien
aagatggacgcatagtcatgttcag

SEQ ID NO: 1810957 - DNA, 25 bp, Homo sapien
attccagcagcggtcaccccactcc

SEQ ID NO: 1810958 - DNA, 25 bp, Homo sapien
cccacattccagcagcggtcacccc

SEQ ID NO: 1810959 - DNA, 25 bp, Homo sapien
ccacattccagcagcggtcacccca

SEQ ID NO: 1810960 - DNA, 25 bp, Homo sapien
ttccagcagcggtcaccccactccc

SEQ ID NO: 1810961 - DNA, 25 bp, Homo sapien
tccagcaggggtcgctctgctcccc

SEQ ID NO: 1810962 - DNA, 25 bp, Homo sapien
tctcaggcagcagcctgctagagcc

SEQ ID NO: 1810963 - DNA, 25 bp, Homo sapien
ctgctagagccggtgtggaaggcct

SEQ ID NO: 1810964 - DNA, 25 bp, Homo sapien
cagcctgctagagccggtgtggaag

SEQ ID NO: 1810965 - DNA, 25 bp, Homo sapien
gttaggagcgttctgtccccactgg

SEQ ID NO: 1810966 - DNA, 25 bp, Homo sapien
caggacaacatgagggtgacaggaa

SEQ ID NO: 1810967 - DNA, 25 bp, Homo sapien
gatttacacgggaatgttctcagcg

SEQ ID NO: 1810968 - DNA, 25 bp, Homo sapien
tacaaagctaacctcactgtgtggc

SEQ ID NO: 1810969 - DNA, 25 bp, Homo sapien
cattggatggcagagaaaacggagt

SEQ ID NO: 1810970 - DNA, 25 bp, Homo sapien
aacggagtaacttcaaggcgccatc

SEQ ID NO: 1810971 - DNA, 25 bp, Homo sapien
ttcctgtgccttcgcgttggggtaa

SEQ ID NO: 1810972 - DNA, 25 bp, Homo sapien
tcctgtgccttcgcgttggggtaac

SEQ ID NO: 1810973 - DNA, 25 bp, Homo sapien
ctgtgccttcgcgttggggtaactt

SEQ ID NO: 1810974 - DNA, 25 bp, Homo sapien
cctgtgccttcgcgttggggtaact

SEQ ID NO: 1810975 - DNA, 25 bp, Homo sapien
cagaacggaaaagatttgcaaggag

SEQ ID NO: 1810976 - DNA, 25 bp, Homo sapien
ctgaattcagaacggaaaagatttg

SEQ ID NO: 1810977 - DNA, 25 bp, Homo sapien
attcagaacggaaaagatttgcaag

SEQ ID NO: 1810978 - DNA, 25 bp, Homo sapien
gaattcagaacggaaaagatttgca

SEQ ID NO: 1810979 - DNA, 25 bp, Homo sapien
cttgaggctgagtctccaacgctgg

SEQ ID NO: 1810980 - DNA, 25 bp, Homo sapien
tgaggctgagtctccaacgctggag

SEQ ID NO: 1810981 - DNA, 25 bp, Homo sapien
ggctgagtctccaacgctggagctg

SEQ ID NO: 1810982 - DNA, 25 bp, Homo sapien
tgagtctccaacgctggagctgcgg

SEQ ID NO: 1810983 - DNA, 25 bp, Homo sapien
ccaaagggtagggtaacgtgatgca

SEQ ID NO: 1810984 - DNA, 25 bp, Homo sapien
gccgacttttaacctgttcagtcca

SEQ ID NO: 1810985 - DNA, 25 bp, Homo sapien
agggtagggtaacgtgatgcaatat

SEQ ID NO: 1810986 - DNA, 25 bp, Homo sapien
tgttctgccgacttttaacctgttc

SEQ ID NO: 1810987 - DNA, 25 bp, Homo sapien
cacagcacacgcagttcaaaggtga

SEQ ID NO: 1810988 - DNA, 25 bp, Homo sapien
ccgtgcacatgcagttcaaacgcga

SEQ ID NO: 1810989 - DNA, 25 bp, Homo sapien
gactcgtcccatggaataatcttcc

SEQ ID NO: 1810990 - DNA, 25 bp, Homo sapien
accgactcgtcccatggaataatcc

SEQ ID NO: 1810991 - DNA, 25 bp, Homo sapien
ctgataaccccggatgcgtaaatca

SEQ ID NO: 1810992 - DNA, 25 bp, Homo sapien
cccggatgcgtaaatcagaaacgca

SEQ ID NO: 1810993 - DNA, 25 bp, Homo sapien
gatgcgtaaatcagaaacgcaccct

SEQ ID NO: 1810994 - DNA, 25 bp, Homo sapien
ataaccccggatgcgtaaatcagaa

SEQ ID NO: 1810995 - DNA, 25 bp, Homo sapien
atggcgttggtggtgccgtcaatag

SEQ ID NO: 1810996 - DNA, 25 bp, Homo sapien
ggcgttggtggtgccgtcaatagac

SEQ ID NO: 1810997 - DNA, 25 bp, Homo sapien
aaagaagggtgatggcgttggtggt

SEQ ID NO: 1810998 - DNA, 25 bp, Homo sapien
tggcgttggtggtgccgtcaataga

SEQ ID NO: 1810999 - DNA, 25 bp, Homo sapien
ctgaagagaagatgcactaaattct

SEQ ID NO: 1811000 - DNA, 25 bp, Homo sapien
taatatgagacaccgactcacacca

SEQ ID NO: 1811001 - DNA, 25 bp, Homo sapien
tctaatatgagacaccgactcacac

SEQ ID NO: 1811002 - DNA, 25 bp, Homo sapien
ctaatatgagacaccgactcacacc

SEQ ID NO: 1811003 - DNA, 25 bp, Homo sapien
ccggtcttcgcctgtagttgctcat

SEQ ID NO: 1811004 - DNA, 25 bp, Homo sapien
catccggtcttcgcctgtagttgct

SEQ ID NO: 1811005 - DNA, 25 bp, Homo sapien
atccggtcttcgcctgtagttgctc

SEQ ID NO: 1811006 - DNA, 25 bp, Homo sapien
tccggtcttcgcctgtagttgctca

SEQ ID NO: 1811007 - DNA, 25 bp, Homo sapien
tggagtaacatttgccgacggcaca

SEQ ID NO: 1811008 - DNA, 25 bp, Homo sapien
gaccacaccgaagaatcacccggat

SEQ ID NO: 1811009 - DNA, 25 bp, Homo sapien
gtggaaaagcgcctcacaaacgcga

SEQ ID NO: 1811010 - DNA, 25 bp, Homo sapien
cacccggattgctgagacacgttca

SEQ ID NO: 1811011 - DNA, 25 bp, Homo sapien
gggaaattcagactcattggagaaa

SEQ ID NO: 1811012 - DNA, 25 bp, Homo sapien
tgggaaattcagactcattggagaa

SEQ ID NO: 1811013 - DNA, 25 bp, Homo sapien
cagcgacgtcgtcccacatgcagag

SEQ ID NO: 1811014 - DNA, 25 bp, Homo sapien
ggtcctccttcaccccggagcagga

SEQ ID NO: 1811015 - DNA, 25 bp, Homo sapien
gtgagcaggatccagcgacgtcgtc

SEQ ID NO: 1811016 - DNA, 25 bp, Homo sapien
cagagaactgccaagaacgatgtgg

SEQ ID NO: 1811017 - DNA, 25 bp, Homo sapien
cactcagggatcaccacattgtcgt

SEQ ID NO: 1811018 - DNA, 25 bp, Homo sapien
acattgtcgttcttgggctgcttgg

SEQ ID NO: 1811019 - DNA, 25 bp, Homo sapien
ggcagactggtgctcttggtcacag

SEQ ID NO: 1811020 - DNA, 25 bp, Homo sapien
cactgcactggcttgtagaggccgc

SEQ ID NO: 1811021 - DNA, 25 bp, Homo sapien
gaaggaagctgccactggtatttga

SEQ ID NO: 1811022 - DNA, 25 bp, Homo sapien
catcttggacaatcggttctttcac

SEQ ID NO: 1811023 - DNA, 25 bp, Homo sapien
tatttgatgccgtccacgtttccac

SEQ ID NO: 1811024 - DNA, 25 bp, Homo sapien
ttatgaaatgctgagctccctttcc

SEQ ID NO: 1811025 - DNA, 25 bp, Homo sapien
gttgtcacatttcggctgctcgtac

SEQ ID NO: 1811026 - DNA, 25 bp, Homo sapien
ccgtgttgtcacatttcggctgctc

SEQ ID NO: 1811027 - DNA, 25 bp, Homo sapien
tgtagctggcggcccttgtacaggt

SEQ ID NO: 1811028 - DNA, 25 bp, Homo sapien
tggccgtgttgtcacatttcggctg

SEQ ID NO: 1811029 - DNA, 25 bp, Homo sapien
aatttgcaagaaactgcatggtggg

SEQ ID NO: 1811030 - DNA, 25 bp, Homo sapien
caaatttgcaagaaactgcatggtg

SEQ ID NO: 1811031 - DNA, 25 bp, Homo sapien
gtggattcgggccacactcgcgggt

SEQ ID NO: 1811032 - DNA, 25 bp, Homo sapien
tcgggccacactcgcgggtgctgct

SEQ ID NO: 1811033 - DNA, 25 bp, Homo sapien
ccgcatatcttggaccatctataga

SEQ ID NO: 1811034 - DNA, 25 bp, Homo sapien
tatcttggaccatctatagagctct

SEQ ID NO: 1811035 - DNA, 25 bp, Homo sapien
gggctcccctcccgcatatcttgga

SEQ ID NO: 1811036 - DNA, 25 bp, Homo sapien
cttggaccatctatagagctctggg

SEQ ID NO: 1811037 - DNA, 25 bp, Homo sapien
gctttgaccgctatcactttctgtc

SEQ ID NO: 1811038 - DNA, 25 bp, Homo sapien
gcagcagctttgaccgctatcactt

SEQ ID NO: 1811039 - DNA, 25 bp, Homo sapien
cagctttgaccgctatcactttctg

SEQ ID NO: 1811040 - DNA, 25 bp, Homo sapien
tgaccgctatcactttctgtccttc

SEQ ID NO: 1811041 - DNA, 25 bp, Homo sapien
tggagctctccccgctgccccacgg

SEQ ID NO: 1811042 - DNA, 25 bp, Homo sapien
gagctctccccgctgccccacggcc

SEQ ID NO: 1811043 - DNA, 25 bp, Homo sapien
ctggagctctccccgctgccccacg

SEQ ID NO: 1811044 - DNA, 25 bp, Homo sapien
gctctccccgctgccccacggccat

SEQ ID NO: 1811045 - DNA, 25 bp, Homo sapien
ctggtagaaaaagctcttttcatct

SEQ ID NO: 1811046 - DNA, 25 bp, Homo sapien
tgtcttctggtagaaaaagctcttt

SEQ ID NO: 1811047 - DNA, 25 bp, Homo sapien
ataaggggcatctgtcttctggtag

SEQ ID NO: 1811048 - DNA, 25 bp, Homo sapien
taaggggcatctgtcttctggtaga

SEQ ID NO: 1811049 - DNA, 25 bp, Homo sapien
gatgaaggttccattgtgtgcacac

SEQ ID NO: 1811050 - DNA, 25 bp, Homo sapien
acttgtgatgaaggttccattgtgt

SEQ ID NO: 1811051 - DNA, 25 bp, Homo sapien
gtgatgaaggttccattgtgtgcac

SEQ ID NO: 1811052 - DNA, 25 bp, Homo sapien
cctgaacatcactggtgacttgtga

SEQ ID NO: 1811053 - DNA, 25 bp, Homo sapien
attgacccaacatttgattggtcct

SEQ ID NO: 1811054 - DNA, 25 bp, Homo sapien
tctctttgtgcatagctgggtgcct

SEQ ID NO: 1811055 - DNA, 25 bp, Homo sapien
tgggtgcctggaaagagctctgggt

SEQ ID NO: 1811056 - DNA, 25 bp, Homo sapien
atttgattggtcctctctttgtgca

SEQ ID NO: 1811057 - DNA, 25 bp, Homo sapien
ccgaggagaggaactcaggtgaact

SEQ ID NO: 1811058 - DNA, 25 bp, Homo sapien
tgctctagttttgtgccatttcccc

SEQ ID NO: 1811059 - DNA, 25 bp, Homo sapien
taactgcagagttaaaaacggacag

SEQ ID NO: 1811060 - DNA, 25 bp, Homo sapien
gaactgaggagtctctgtcccgtgc

SEQ ID NO: 1811061 - DNA, 25 bp, Homo sapien
cacacactggcacaatcgtgggtct

SEQ ID NO: 1811062 - DNA, 25 bp, Homo sapien
caatcgtgggtctggattgtgccag

SEQ ID NO: 1811063 - DNA, 25 bp, Homo sapien
tctggattgtgccagtgaggcctgc

SEQ ID NO: 1811064 - DNA, 25 bp, Homo sapien
cactggcacaatcgtgggtctggat

SEQ ID NO: 1811065 - DNA, 25 bp, Homo sapien
aaaaacacgtgtatgttttcataat

SEQ ID NO: 1811066 - DNA, 25 bp, Homo sapien
gcgcgtccagaacgctggtcagaaa

SEQ ID NO: 1811067 - DNA, 25 bp, Homo sapien
cgtggaccatgtccgtggacagcgc

SEQ ID NO: 1811068 - DNA, 25 bp, Homo sapien
ctcatgctttttggcacccggacaa

SEQ ID NO: 1811069 - DNA, 25 bp, Homo sapien
cgctggtcagaaactcatgcttttt

SEQ ID NO: 1811070 - DNA, 25 bp, Homo sapien
cagcccatcagttcttgtacggaga

SEQ ID NO: 1811071 - DNA, 25 bp, Homo sapien
gattttttgcgaaggaacctcttga

SEQ ID NO: 1811072 - DNA, 25 bp, Homo sapien
tagtttgaagtaccagtgcaccacc

SEQ ID NO: 1811073 - DNA, 25 bp, Homo sapien
cacccgctcctctagggtatggctg

SEQ ID NO: 1811074 - DNA, 25 bp, Homo sapien
gtggcgtttcttggtgtccgctttg

SEQ ID NO: 1811075 - DNA, 25 bp, Homo sapien
tgtggcgtttcttggtgtccgcttt

SEQ ID NO: 1811076 - DNA, 25 bp, Homo sapien
tgtctctgagctgaaaagtcagacc

SEQ ID NO: 1811077 - DNA, 25 bp, Homo sapien
tgaaaagtcagacccggcttctcct

SEQ ID NO: 1811078 - DNA, 25 bp, Homo sapien
ggcttgcctcctaagaacatctggg

SEQ ID NO: 1811079 - DNA, 25 bp, Homo sapien
cctggcttgcctcctaagaacatct

SEQ ID NO: 1811080 - DNA, 25 bp, Homo sapien
ctattagacgtactttcagcatgac

SEQ ID NO: 1811081 - DNA, 25 bp, Homo sapien
ctgtctattagacgtactttcagca

SEQ ID NO: 1811082 - DNA, 25 bp, Homo sapien
gtctattagacgtactttcagcatg

SEQ ID NO: 1811083 - DNA, 25 bp, Homo sapien
attagacgtactttcagcatgacct

SEQ ID NO: 1811084 - DNA, 25 bp, Homo sapien
cttgacttgcgatgggttgtggctt

SEQ ID NO: 1811085 - DNA, 25 bp, Homo sapien
agtgttcttgacttgcgatgggttg

SEQ ID NO: 1811086 - DNA, 25 bp, Homo sapien
ggtctggaggacaccaccattgcat

SEQ ID NO: 1811087 - DNA, 25 bp, Homo sapien
ttcttgacttgcgatgggttgtggc

SEQ ID NO: 1811088 - DNA, 25 bp, Homo sapien
gaaatgtcgacctggcatcaaacag

SEQ ID NO: 1811089 - DNA, 25 bp, Homo sapien
taaatcacaaattgactcgcggcag

SEQ ID NO: 1811090 - DNA, 25 bp, Homo sapien
ttacatccaaggtgtgtgctggccg

SEQ ID NO: 1811091 - DNA, 25 bp, Homo sapien
gagtacagtgattgccattcgggaa

SEQ ID NO: 1811092 - DNA, 25 bp, Homo sapien
gagatcaggaaagagctcctctgga

SEQ ID NO: 1811093 - DNA, 25 bp, Homo sapien
caagagtgccaattccgacaaatgt

SEQ ID NO: 1811094 - DNA, 25 bp, Homo sapien
ggcttgcccgttaggatcatcccaa

SEQ ID NO: 1811095 - DNA, 25 bp, Homo sapien
tatcgtagtttgctgacatagccac

SEQ ID NO: 1811096 - DNA, 25 bp, Homo sapien
tacattttggaaggatgggcccctc

SEQ ID NO: 1811097 - DNA, 25 bp, Homo sapien
gggaactacctgcacttaactggat

SEQ ID NO: 1811098 - DNA, 25 bp, Homo sapien
tgttaactgcctgtagggtcggccg

SEQ ID NO: 1811099 - DNA, 25 bp, Homo sapien
gagaaagccatacgattgcagccgg

SEQ ID NO: 1811100 - DNA, 25 bp, Homo sapien
gggcaccacgtatccggctgtacct

SEQ ID NO: 1811101 - DNA, 25 bp, Homo sapien
cacgtatccggctgtaccttcagta

SEQ ID NO: 1811102 - DNA, 25 bp, Homo sapien
tggttcaggtgaagattttaccttc

SEQ ID NO: 1811103 - DNA, 25 bp, Homo sapien
tccggctgtaccttcagtaaggaga

SEQ ID NO: 1811104 - DNA, 25 bp, Homo sapien
cattcagaaaagcagaaaggaaccg

SEQ ID NO: 1811105 - DNA, 25 bp, Homo sapien
ttcagaaaagcagaaaggaaccgtg

SEQ ID NO: 1811106 - DNA, 25 bp, Homo sapien
atgcattcagaaaagcagaaaggaa

SEQ ID NO: 1811107 - DNA, 25 bp, Homo sapien
cagaaaagcagaaaggaaccgtggg

SEQ ID NO: 1811108 - DNA, 25 bp, Homo sapien
ctctgccagtgccactcggatgaat

SEQ ID NO: 1811109 - DNA, 25 bp, Homo sapien
tctgccagtgccactcggatgaatt

SEQ ID NO: 1811110 - DNA, 25 bp, Homo sapien
tctctgccagtgccactcggatgaa

SEQ ID NO: 1811111 - DNA, 25 bp, Homo sapien
tgccagtgccactcggatgaatttc

SEQ ID NO: 1811112 - DNA, 25 bp, Homo sapien
ggttatgcacgcagaccagttctgt

SEQ ID NO: 1811113 - DNA, 25 bp, Homo sapien
agtctgagccgagatagaatcacag

SEQ ID NO: 1811114 - DNA, 25 bp, Homo sapien
gcaagaagccttacgcgatgctcca

SEQ ID NO: 1811115 - DNA, 25 bp, Homo sapien
tggttccttaagacactgggtgccc

SEQ ID NO: 1811116 - DNA, 25 bp, Homo sapien
aaagacacctttcctctcaaccaca

SEQ ID NO: 1811117 - DNA, 25 bp, Homo sapien
ctagaagcaataaaaagacaccttt

SEQ ID NO: 1811118 - DNA, 25 bp, Homo sapien
acacctttcctctcaaccacagtag

SEQ ID NO: 1811119 - DNA, 25 bp, Homo sapien
agcaataaaaagacacctttcctct

SEQ ID NO: 1811120 - DNA, 25 bp, Homo sapien
tgtgtagcccagggtcggaatgtct

SEQ ID NO: 1811121 - DNA, 25 bp, Homo sapien
aggttggagtatcagaatcaacacg

SEQ ID NO: 1811122 - DNA, 25 bp, Homo sapien
gtcggaatgtctggaaggtctgaag

SEQ ID NO: 1811123 - DNA, 25 bp, Homo sapien
gaatcaacacgttctgcttttacat

SEQ ID NO: 1811124 - DNA, 25 bp, Homo sapien
caatggcaagagtcgtgggctccct

SEQ ID NO: 1811125 - DNA, 25 bp, Homo sapien
tggcaagagtcgtgggctccctctc

SEQ ID NO: 1811126 - DNA, 25 bp, Homo sapien
aacaatggcaagagtcgtgggctcc

SEQ ID NO: 1811127 - DNA, 25 bp, Homo sapien
ttaaacaatggcaagagtcgtgggc

SEQ ID NO: 1811128 - DNA, 25 bp, Homo sapien
aacatcttcgtagaatatacggagg

SEQ ID NO: 1811129 - DNA, 25 bp, Homo sapien
tgagggaagagacgaagtgacacac

SEQ ID NO: 1811130 - DNA, 25 bp, Homo sapien
gacacacattctcttataacgaaac

SEQ ID NO: 1811131 - DNA, 25 bp, Homo sapien
tagacacattttctaggcaaatagt

SEQ ID NO: 1811132 - DNA, 25 bp, Homo sapien
agaacctcggggtctgtcactgatc

SEQ ID NO: 1811133 - DNA, 25 bp, Homo sapien
cagaacctcggggtctgtcactgat

SEQ ID NO: 1811134 - DNA, 25 bp, Homo sapien
aacctcggggtctgtcactgatcct

SEQ ID NO: 1811135 - DNA, 25 bp, Homo sapien
gaacctcggggtctgtcactgatcc

SEQ ID NO: 1811136 - DNA, 25 bp, Homo sapien
ccgcacaacgcggcatttcatctac

SEQ ID NO: 1811137 - DNA, 25 bp, Homo sapien
ctcagggcggccaagggtcacaaag

SEQ ID NO: 1811138 - DNA, 25 bp, Homo sapien
tctcagggcggccaagggtcacaaa

SEQ ID NO: 1811139 - DNA, 25 bp, Homo sapien
cagaggagttcatctcagggcggcc

SEQ ID NO: 1811140 - DNA, 25 bp, Homo sapien
aggagttcatctcagggcggccaag

SEQ ID NO: 1811141 - DNA, 25 bp, Homo sapien
ggcggaagccccaagccgtccatgt

SEQ ID NO: 1811142 - DNA, 25 bp, Homo sapien
aagccccaagccgtccatgtgaggc

SEQ ID NO: 1811143 - DNA, 25 bp, Homo sapien
caagccgtccatgtgaggctgttgg

SEQ ID NO: 1811144 - DNA, 25 bp, Homo sapien
tgcaggaagccgaaagcaggagaga

SEQ ID NO: 1811145 - DNA, 25 bp, Homo sapien
ttcagctccagggagaccggccagc

SEQ ID NO: 1811146 - DNA, 25 bp, Homo sapien
accggccagcaaggtcgggtatttg

SEQ ID NO: 1811147 - DNA, 25 bp, Homo sapien
aggtcgggtatttggaaggagctca

SEQ ID NO: 1811148 - DNA, 25 bp, Homo sapien
ggtatttggaaggagctcaggaagc

SEQ ID NO: 1811149 - DNA, 25 bp, Homo sapien
cacggaagccatgccacatcggcta

SEQ ID NO: 1811150 - DNA, 25 bp, Homo sapien
gaacaccacggaagccatgccacat

SEQ ID NO: 1811151 - DNA, 25 bp, Homo sapien
cagcaggaacaccacggaagccatg

SEQ ID NO: 1811152 - DNA, 25 bp, Homo sapien
aggaacaccacggaagccatgccac

SEQ ID NO: 1811153 - DNA, 25 bp, Homo sapien
tcatcctcagggaactggtcagcag

SEQ ID NO: 1811154 - DNA, 25 bp, Homo sapien
tcttcatcctcagggaactggtcag

SEQ ID NO: 1811155 - DNA, 25 bp, Homo sapien
tcgtggggccatgcggcagcagcat

SEQ ID NO: 1811156 - DNA, 25 bp, Homo sapien
cagtcgtggggccatgcggcagcag

SEQ ID NO: 1811157 - DNA, 25 bp, Homo sapien
gctttcgaagcactcacattcgctg

SEQ ID NO: 1811158 - DNA, 25 bp, Homo sapien
gagtagctttcgaagcactcacatt

SEQ ID NO: 1811159 - DNA, 25 bp, Homo sapien
ttcgaagcactcacattcgctgtgt

SEQ ID NO: 1811160 - DNA, 25 bp, Homo sapien
gtagctttcgaagcactcacattcg

SEQ ID NO: 1811161 - DNA, 25 bp, Homo sapien
agaagaatccgcgttgcagacagga

SEQ ID NO: 1811162 - DNA, 25 bp, Homo sapien
agccctggaggagctaagaagggcg

SEQ ID NO: 1811163 - DNA, 25 bp, Homo sapien
caaagctgcaattcaacatctgacc

SEQ ID NO: 1811164 - DNA, 25 bp, Homo sapien
tggaaattggtcaaagctgcaattc

SEQ ID NO: 1811165 - DNA, 25 bp, Homo sapien
gtagcttcgtatctggtagaaatct

SEQ ID NO: 1811166 - DNA, 25 bp, Homo sapien
tagcttcgtatctggtagaaatctt

SEQ ID NO: 1811167 - DNA, 25 bp, Homo sapien
tgtagcttcgtatctggtagaaatc

SEQ ID NO: 1811168 - DNA, 25 bp, Homo sapien
cgggtgaagtgcagatggtgcctga

SEQ ID NO: 1811169 - DNA, 25 bp, Homo sapien
gcagcaccaatggtgtggacagcca

SEQ ID NO: 1811170 - DNA, 25 bp, Homo sapien
tctgtatctgacaggagacccccgg

SEQ ID NO: 1811171 - DNA, 25 bp, Homo sapien
ccccgggtgaagtgcagatggtgcc

SEQ ID NO: 1811172 - DNA, 25 bp, Homo sapien
gtgcgtgcaacctggccccaggaag

SEQ ID NO: 1811173 - DNA, 25 bp, Homo sapien
gctccgtgaggttggagtctccagc

SEQ ID NO: 1811174 - DNA, 25 bp, Homo sapien
tccagcttgtgcgtgcaacctggcc

SEQ ID NO: 1811175 - DNA, 25 bp, Homo sapien
ctccgtgaggttggagtctccagct

SEQ ID NO: 1811176 - DNA, 25 bp, Homo sapien
cacccctctgggcattgcacagaca

SEQ ID NO: 1811177 - DNA, 25 bp, Homo sapien
tgggcattgcacagacaccaggcat

SEQ ID NO: 1811178 - DNA, 25 bp, Homo sapien
ctctgggcattgcacagacaccagg

SEQ ID NO: 1811179 - DNA, 25 bp, Homo sapien
agggccacccctctgggcattgcac

SEQ ID NO: 1811180 - DNA, 25 bp, Homo sapien
ctctgggccttccaaaaatgaacgt

SEQ ID NO: 1811181 - DNA, 25 bp, Homo sapien
tgggtcgcatctgacagcgtgcgcc

SEQ ID NO: 1811182 - DNA, 25 bp, Homo sapien
ttttaacatcaacgtggccatggac

SEQ ID NO: 1811183 - DNA, 25 bp, Homo sapien
ggccatggacccacctgctgtacga

SEQ ID NO: 1811184 - DNA, 25 bp, Homo sapien
gtgaccgcccagatgaaagagctcc

SEQ ID NO: 1811185 - DNA, 25 bp, Homo sapien
gaaacggtccagtgcaactgtggct

SEQ ID NO: 1811186 - DNA, 25 bp, Homo sapien
gcgggaaacggtccagtgcaactgt

SEQ ID NO: 1811187 - DNA, 25 bp, Homo sapien
ccgaatccactcaacggacgacaaa

SEQ ID NO: 1811188 - DNA, 25 bp, Homo sapien
tgtgccatggcgttgtccttctgtg

SEQ ID NO: 1811189 - DNA, 25 bp, Homo sapien
cacctgtgccatggcgttgtccttc

SEQ ID NO: 1811190 - DNA, 25 bp, Homo sapien
ccatggcgttgtccttctgtgaaca

SEQ ID NO: 1811191 - DNA, 25 bp, Homo sapien
gcgttgtccttctgtgaacactggc

SEQ ID NO: 1811192 - DNA, 25 bp, Homo sapien
ttcatgtcaggtgctgtacattcca

SEQ ID NO: 1811193 - DNA, 25 bp, Homo sapien
agtcttcatgtcaggtgctgtacat

SEQ ID NO: 1811194 - DNA, 25 bp, Homo sapien
tgtcaggtgctgtacattccatccc

SEQ ID NO: 1811195 - DNA, 25 bp, Homo sapien
catgtcaggtgctgtacattccatc

SEQ ID NO: 1811196 - DNA, 25 bp, Homo sapien
caacagttgttcagtaaaggaggct

SEQ ID NO: 1811197 - DNA, 25 bp, Homo sapien
cagggagcatccaatcacaagagca

SEQ ID NO: 1811198 - DNA, 25 bp, Homo sapien
tatcctttccataggtcagctggca

SEQ ID NO: 1811199 - DNA, 25 bp, Homo sapien
caagcttattccaagggacccaggg

SEQ ID NO: 1811200 - DNA, 25 bp, Homo sapien
catttcttatttgggaaggcatccc

SEQ ID NO: 1811201 - DNA, 25 bp, Homo sapien
acaggcactgattctccccagggag

SEQ ID NO: 1811202 - DNA, 25 bp, Homo sapien
tcaggagctgctaaaagcgcagggt

SEQ ID NO: 1811203 - DNA, 25 bp, Homo sapien
tgctgacctgaatggctgcgtttgc

SEQ ID NO: 1811204 - DNA, 25 bp, Homo sapien
gatggcagctgcttcgtcctcctct

SEQ ID NO: 1811205 - DNA, 25 bp, Homo sapien
caggatggcagctgcttcgtcctcc

SEQ ID NO: 1811206 - DNA, 25 bp, Homo sapien
aatacaggatggcagctgcttcgtc

SEQ ID NO: 1811207 - DNA, 25 bp, Homo sapien
tacaggatggcagctgcttcgtcct

SEQ ID NO: 1811208 - DNA, 25 bp, Homo sapien
gcctctccaggcatccgaagacatt

SEQ ID NO: 1811209 - DNA, 25 bp, Homo sapien
gatgccttttgatctaagggcggca

SEQ ID NO: 1811210 - DNA, 25 bp, Homo sapien
gcagcgctgagatctctccatgtcc

SEQ ID NO: 1811211 - DNA, 25 bp, Homo sapien
ctccaggcatccgaagacatttggg

SEQ ID NO: 1811212 - DNA, 25 bp, Homo sapien
actcggagcctgtcatctttcagcg

SEQ ID NO: 1811213 - DNA, 25 bp, Homo sapien
tctttcagcggatggcagtggaacc

SEQ ID NO: 1811214 - DNA, 25 bp, Homo sapien
tagggaacaagtgccctggtccacg

SEQ ID NO: 1811215 - DNA, 25 bp, Homo sapien
tcatttctgtgtgtaactcggagcc

SEQ ID NO: 1811216 - DNA, 25 bp, Homo sapien
gttcgatagttccacgttgtcccga

SEQ ID NO: 1811217 - DNA, 25 bp, Homo sapien
gatagttccacgttgtcccgaataa

SEQ ID NO: 1811218 - DNA, 25 bp, Homo sapien
cacgttgtcccgaataacttgaata

SEQ ID NO: 1811219 - DNA, 25 bp, Homo sapien
ttaggttcgatagttccacgttgtc

SEQ ID NO: 1811220 - DNA, 25 bp, Homo sapien
cacaggcggcattgacaagttttag

SEQ ID NO: 1811221 - DNA, 25 bp, Homo sapien
taaaggcactgagattatctggagt

SEQ ID NO: 1811222 - DNA, 25 bp, Homo sapien
gttgtgttgctaccttttaaattga

SEQ ID NO: 1811223 - DNA, 25 bp, Homo sapien
ttaggagttgtgttgctacctttta

SEQ ID NO: 1811224 - DNA, 25 bp, Homo sapien
agctcacagcggcttcccacggatt

SEQ ID NO: 1811225 - DNA, 25 bp, Homo sapien
cccacggattttcactcagggcttg

SEQ ID NO: 1811226 - DNA, 25 bp, Homo sapien
tcagggcttgaagtgcctgtgtcat

SEQ ID NO: 1811227 - DNA, 25 bp, Homo sapien
cagcggcttcccacggattttcact

SEQ ID NO: 1811228 - DNA, 25 bp, Homo sapien
cagtttggtgcttttcaatgatgca

SEQ ID NO: 1811229 - DNA, 25 bp, Homo sapien
tgcattgggtcttctctgcacaggc

SEQ ID NO: 1811230 - DNA, 25 bp, Homo sapien
ggccatggtttacatctgactcagc

SEQ ID NO: 1811231 - DNA, 25 bp, Homo sapien
ctaggggttgtctaggacttggcca

SEQ ID NO: 1811232 - DNA, 25 bp, Homo sapien
cattccccaatagtatgaattccaa

SEQ ID NO: 1811233 - DNA, 25 bp, Homo sapien
ccaatagtatgaattccaagaatca

SEQ ID NO: 1811234 - DNA, 25 bp, Homo sapien
ttccccaatagtatgaattccaaga

SEQ ID NO: 1811235 - DNA, 25 bp, Homo sapien
tccccaatagtatgaattccaagaa

SEQ ID NO: 1811236 - DNA, 25 bp, Homo sapien
ggagcaacggtcacaggagcattcc

SEQ ID NO: 1811237 - DNA, 25 bp, Homo sapien
tctccttcggagcaacggtcacagg

SEQ ID NO: 1811238 - DNA, 25 bp, Homo sapien
ctcctgcgggtgctaacggcggctt

SEQ ID NO: 1811239 - DNA, 25 bp, Homo sapien
tgcgggtgctaacggcggcttcttc

SEQ ID NO: 1811240 - DNA, 25 bp, Homo sapien
tttatccggccatgtgcagctcagc

SEQ ID NO: 1811241 - DNA, 25 bp, Homo sapien
cctctgcgttggtgtctctgataga

SEQ ID NO: 1811242 - DNA, 25 bp, Homo sapien
tagacagaaacgatagtcagggcag

SEQ ID NO: 1811243 - DNA, 25 bp, Homo sapien
ggagaacgggcagcatcacgtctct

SEQ ID NO: 1811244 - DNA, 25 bp, Homo sapien
aacagccccgcatgcacttgtcaca

SEQ ID NO: 1811245 - DNA, 25 bp, Homo sapien
aggagtgtgcatccatctcccagcg

SEQ ID NO: 1811246 - DNA, 25 bp, Homo sapien
agctgaaacagccccgcatgcactt

SEQ ID NO: 1811247 - DNA, 25 bp, Homo sapien
agtgtgcatccatctcccagcgctg

SEQ ID NO: 1811248 - DNA, 25 bp, Homo sapien
tccttgataatttccgcttaaacat

SEQ ID NO: 1811249 - DNA, 25 bp, Homo sapien
gccccacgctgcctcgtcaccagtc

SEQ ID NO: 1811250 - DNA, 25 bp, Homo sapien
tgccagtgcccagtcctactgcttc

SEQ ID NO: 1811251 - DNA, 25 bp, Homo sapien
agtcctactgcttctctcccggaag

SEQ ID NO: 1811252 - DNA, 25 bp, Homo sapien
tgccttttgcacacagtgacaaata

SEQ ID NO: 1811253 - DNA, 25 bp, Homo sapien
gccttttgcacacagtgacaaataa

SEQ ID NO: 1811254 - DNA, 25 bp, Homo sapien
ctgccttttgcacacagtgacaaat

SEQ ID NO: 1811255 - DNA, 25 bp, Homo sapien
agggcttgaagggaactggccatgg

SEQ ID NO: 1811256 - DNA, 25 bp, Homo sapien
cgtttcctcccagcatggaatttgg

SEQ ID NO: 1811257 - DNA, 25 bp, Homo sapien
ggcttgaagggaactggccatggtg

SEQ ID NO: 1811258 - DNA, 25 bp, Homo sapien
tgtggaaagccccgggtgatgggtg

SEQ ID NO: 1811259 - DNA, 25 bp, Homo sapien
cccagcatggaattcagtgatgccc

SEQ ID NO: 1811260 - DNA, 25 bp, Homo sapien
ttcatggaaatgcagatgaagtccc

SEQ ID NO: 1811261 - DNA, 25 bp, Homo sapien
cttcatggaaatgcagatgaagtcc

SEQ ID NO: 1811262 - DNA, 25 bp, Homo sapien
tcatggaaatgcagatgaagtcccc

SEQ ID NO: 1811263 - DNA, 25 bp, Homo sapien
tttcatcttctgtgttggtcgttgt

SEQ ID NO: 1811264 - DNA, 25 bp, Homo sapien
atgaagcagacacccgtcttcccac

SEQ ID NO: 1811265 - DNA, 25 bp, Homo sapien
tcttatcccttggttatcagtttca

SEQ ID NO: 1811266 - DNA, 25 bp, Homo sapien
tcagtttcattactttgtacgtcct

SEQ ID NO: 1811267 - DNA, 25 bp, Homo sapien
ggctgtctagggaggtgtgggctgc

SEQ ID NO: 1811268 - DNA, 25 bp, Homo sapien
gctgcgggcaggaatgtgcttcaaa

SEQ ID NO: 1811269 - DNA, 25 bp, Homo sapien
tctagggaggtgtgggctgcgggca

SEQ ID NO: 1811270 - DNA, 25 bp, Homo sapien
tcacggcaaatcaaagggtgatttc

SEQ ID NO: 1811271 - DNA, 25 bp, Homo sapien
agacctttaagacctttgcaggatt

SEQ ID NO: 1811272 - DNA, 25 bp, Homo sapien
taagacctttaagacctttgcagga

SEQ ID NO: 1811273 - DNA, 25 bp, Homo sapien
aagacctttaagacctttgcaggat

SEQ ID NO: 1811274 - DNA, 25 bp, Homo sapien
tgcttggcgagtggcttccagcggg

SEQ ID NO: 1811275 - DNA, 25 bp, Homo sapien
aggctgcttggcgagtggcttccag

SEQ ID NO: 1811276 - DNA, 25 bp, Homo sapien
tccagcgggactcggggtgagggtg

SEQ ID NO: 1811277 - DNA, 25 bp, Homo sapien
ctgagaggctgcttggcgagtggct

SEQ ID NO: 1811278 - DNA, 25 bp, Homo sapien
ggtgccctgtttatcacagagggcg

SEQ ID NO: 1811279 - DNA, 25 bp, Homo sapien
ctttctctcgtggaggctcctggcc

SEQ ID NO: 1811280 - DNA, 25 bp, Homo sapien
gacatggtgccctgtttatcacaga

SEQ ID NO: 1811281 - DNA, 25 bp, Homo sapien
ccctgtttatcacagagggcggtac

SEQ ID NO: 1811282 - DNA, 25 bp, Homo sapien
gagagagactcggtgtagctgagga

SEQ ID NO: 1811283 - DNA, 25 bp, Homo sapien
gatgtgggcttttaaaatgcctccg

SEQ ID NO: 1811284 - DNA, 25 bp, Homo sapien
gtaatgcagatctgggaactcagcc

SEQ ID NO: 1811285 - DNA, 25 bp, Homo sapien
gccatcgtcctattgttaaaagtca

SEQ ID NO: 1811286 - DNA, 25 bp, Homo sapien
agggtgaagcagacacggttagcac

SEQ ID NO: 1811287 - DNA, 25 bp, Homo sapien
gagggtaggcgtgcgccccactcat

SEQ ID NO: 1811288 - DNA, 25 bp, Homo sapien
gaagcagacacggttagcactttcc

SEQ ID NO: 1811289 - DNA, 25 bp, Homo sapien
agagctgagggtaggcgtgcgcccc

SEQ ID NO: 1811290 - DNA, 25 bp, Homo sapien
ttgactatccaacggctcaccaggg

SEQ ID NO: 1811291 - DNA, 25 bp, Homo sapien
cagtggtcacgggtcacagtgtcac

SEQ ID NO: 1811292 - DNA, 25 bp, Homo sapien
tggtctggcctgagtgtagcaaact

SEQ ID NO: 1811293 - DNA, 25 bp, Homo sapien
acttctccaagcgaatgttgactat

SEQ ID NO: 1811294 - DNA, 25 bp, Homo sapien
agaaacagccggaccccggcaccat

SEQ ID NO: 1811295 - DNA, 25 bp, Homo sapien
ggaccccggcaccatcagtagacaa

SEQ ID NO: 1811296 - DNA, 25 bp, Homo sapien
gcaccatcagtagacaacagaaaca

SEQ ID NO: 1811297 - DNA, 25 bp, Homo sapien
agacaacagaaacagccggaccccg

SEQ ID NO: 1811298 - DNA, 25 bp, Homo sapien
tgtccgtactttggaaaatcggtga

SEQ ID NO: 1811299 - DNA, 25 bp, Homo sapien
aactacaccaggtgtccgtactttg

SEQ ID NO: 1811300 - DNA, 25 bp, Homo sapien
taaatttcagcatgtcagaggcagc

SEQ ID NO: 1811301 - DNA, 25 bp, Homo sapien
gtttctgaataggtctgaatacagc

SEQ ID NO: 1811302 - DNA, 25 bp, Homo sapien
ctgcgcgcgagagccgtgagcactt

SEQ ID NO: 1811303 - DNA, 25 bp, Homo sapien
ccatgtctgcgcgcgagagccgtga

SEQ ID NO: 1811304 - DNA, 25 bp, Homo sapien
gcccagcgccagtgtgcacagtggg

SEQ ID NO: 1811305 - DNA, 25 bp, Homo sapien
gtgagcacttcaggtgaggcttgcc

SEQ ID NO: 1811306 - DNA, 25 bp, Homo sapien
gcagggagcattcctcaaatgaacg

SEQ ID NO: 1811307 - DNA, 25 bp, Homo sapien
atgaacgcggttccaatcaaccggg

SEQ ID NO: 1811308 - DNA, 25 bp, Homo sapien
gagctctggtcgcagggagcattcc

SEQ ID NO: 1811309 - DNA, 25 bp, Homo sapien
ctccctgcaaacgtggccggcggag

SEQ ID NO: 1811310 - DNA, 25 bp, Homo sapien
ctggaagacgctccggaaatgaccg

SEQ ID NO: 1811311 - DNA, 25 bp, Homo sapien
aagcacacgtcgctgtcatggcggg

SEQ ID NO: 1811312 - DNA, 25 bp, Homo sapien
gagctcaaagcacacgtcgctgtca

SEQ ID NO: 1811313 - DNA, 25 bp, Homo sapien
cctttcttcggatgtggttgcggcg

SEQ ID NO: 1811314 - DNA, 25 bp, Homo sapien
gaatttatcagtccccgtacgccta

SEQ ID NO: 1811315 - DNA, 25 bp, Homo sapien
ttggaatttatcagtccccgtacgc

SEQ ID NO: 1811316 - DNA, 25 bp, Homo sapien
tatcagtccccgtacgcctagaata

SEQ ID NO: 1811317 - DNA, 25 bp, Homo sapien
taacaatcttttctaggcaacatat

SEQ ID NO: 1811318 - DNA, 25 bp, Homo sapien
gccagagggctatgacgcagagctc

SEQ ID NO: 1811319 - DNA, 25 bp, Homo sapien
agattaatagatccttctgccctcg

SEQ ID NO: 1811320 - DNA, 25 bp, Homo sapien
catctagctgctcttaccctgagaa

SEQ ID NO: 1811321 - DNA, 25 bp, Homo sapien
gggcttcagtcttgtgtgaccctca

SEQ ID NO: 1811322 - DNA, 25 bp, Homo sapien
tcaatccgtctaattttcctgccag

SEQ ID NO: 1811323 - DNA, 25 bp, Homo sapien
tctagtaggataaataacaatagac

SEQ ID NO: 1811324 - DNA, 25 bp, Homo sapien
taacaatagacagaacccacttcat

SEQ ID NO: 1811325 - DNA, 25 bp, Homo sapien
ataatgtattcctaactttgttcat

SEQ ID NO: 1811326 - DNA, 25 bp, Homo sapien
agaagcagcagtcaatggtgatgat

SEQ ID NO: 1811327 - DNA, 25 bp, Homo sapien
tgatgatgacattacaaaagttata

SEQ ID NO: 1811328 - DNA, 25 bp, Homo sapien
aagattagctgtttggtacacagac

SEQ ID NO: 1811329 - DNA, 25 bp, Homo sapien
tttggtacacagactgcctgataca

SEQ ID NO: 1811330 - DNA, 25 bp, Homo sapien
gcagaggagggcaaggcagcctgct

SEQ ID NO: 1811331 - DNA, 25 bp, Homo sapien
caaggcagcctgctggagggagcat

SEQ ID NO: 1811332 - DNA, 25 bp, Homo sapien
agaggagggcaaggcagcctgctgg

SEQ ID NO: 1811333 - DNA, 25 bp, Homo sapien
gagggcaaggcagcctgctggaggg

SEQ ID NO: 1811334 - DNA, 25 bp, Homo sapien
tgccaaaggacccagcccggctcat

SEQ ID NO: 1811335 - DNA, 25 bp, Homo sapien
caccttcttggcatcgtggatctct

SEQ ID NO: 1811336 - DNA, 25 bp, Homo sapien
ttcttggcatcgtggatctcttggg

SEQ ID NO: 1811337 - DNA, 25 bp, Homo sapien
atgaacgagcggaggcctgccaaag

SEQ ID NO: 1811338 - DNA, 25 bp, Homo sapien
gtggtgaccgtacaccgtgtttgct

SEQ ID NO: 1811339 - DNA, 25 bp, Homo sapien
ggaggagcggttggcgcgggtggct

SEQ ID NO: 1811340 - DNA, 25 bp, Homo sapien
aggtctgcatccaaagtggccgggc

SEQ ID NO: 1811341 - DNA, 25 bp, Homo sapien
gtacaccgtgtttgcttgactggat

SEQ ID NO: 1811342 - DNA, 25 bp, Homo sapien
cattacgtctgaatgggtcgcctgc

SEQ ID NO: 1811343 - DNA, 25 bp, Homo sapien
attacgtctgaatgggtcgcctgca

SEQ ID NO: 1811344 - DNA, 25 bp, Homo sapien
ttacgtctgaatgggtcgcctgcaa

SEQ ID NO: 1811345 - DNA, 25 bp, Homo sapien
acgtctgaatgggtcgcctgcaact

SEQ ID NO: 1811346 - DNA, 25 bp, Homo sapien
tacacacatgctcacggtagcagtt

SEQ ID NO: 1811347 - DNA, 25 bp, Homo sapien
tagcagttgagctactcggtctgtt

SEQ ID NO: 1811348 - DNA, 25 bp, Homo sapien
catgctcacggtagcagttgagcta

SEQ ID NO: 1811349 - DNA, 25 bp, Homo sapien
tgagctactcggtctgttgtctctg

SEQ ID NO: 1811350 - DNA, 25 bp, Homo sapien
actgacctggcctccacgacgctga

SEQ ID NO: 1811351 - DNA, 25 bp, Homo sapien
gacctggcctccacgacgctgacca

SEQ ID NO: 1811352 - DNA, 25 bp, Homo sapien
tgacctggcctccacgacgctgacc

SEQ ID NO: 1811353 - DNA, 25 bp, Homo sapien
ctgacctggcctccacgacgctgac

SEQ ID NO: 1811354 - DNA, 25 bp, Homo sapien
ctccaccacactgactaccgatgcc

SEQ ID NO: 1811355 - DNA, 25 bp, Homo sapien
gtggcctccacaacgctgattacca

SEQ ID NO: 1811356 - DNA, 25 bp, Homo sapien
acactgactaccgatgccacctcca

SEQ ID NO: 1811357 - DNA, 25 bp, Homo sapien
tggcctccacaacgctgattaccaa

SEQ ID NO: 1811358 - DNA, 25 bp, Homo sapien
gattaccgacactgcctccatgact

SEQ ID NO: 1811359 - DNA, 25 bp, Homo sapien
tgattaccgacactgcctccatgac

SEQ ID NO: 1811360 - DNA, 25 bp, Homo sapien
ctgattaccgacactgcctccatga

SEQ ID NO: 1811361 - DNA, 25 bp, Homo sapien
gatgctatcaacgtggcctccacga

SEQ ID NO: 1811362 - DNA, 25 bp, Homo sapien
tgcctccatgatgctatcaacgtgg

SEQ ID NO: 1811363 - DNA, 25 bp, Homo sapien
taccgacgctgcctccatgatgcta

SEQ ID NO: 1811364 - DNA, 25 bp, Homo sapien
aacgtggcctccacgacagtgacca

SEQ ID NO: 1811365 - DNA, 25 bp, Homo sapien
tccatgacgccaccaatgtggcctc

SEQ ID NO: 1811366 - DNA, 25 bp, Homo sapien
atgccgcctccatgacgccaccaat

SEQ ID NO: 1811367 - DNA, 25 bp, Homo sapien
ctgactaccaatgccgcctccatga

SEQ ID NO: 1811368 - DNA, 25 bp, Homo sapien
cgctgactaccaatgccgcctccat

SEQ ID NO: 1811369 - DNA, 25 bp, Homo sapien
aagcaaatgcttttgactcaggttt

SEQ ID NO: 1811370 - DNA, 25 bp, Homo sapien
ggatgctgacgtgatgcctgggggt

SEQ ID NO: 1811371 - DNA, 25 bp, Homo sapien
gctgggatgctgacgtgatgcctgg

SEQ ID NO: 1811372 - DNA, 25 bp, Homo sapien
ctgggatgctgacgtgatgcctggg

SEQ ID NO: 1811373 - DNA, 25 bp, Homo sapien
atcaccttccatcacaggagggctg

SEQ ID NO: 1811374 - DNA, 25 bp, Homo sapien
cgggcagccccgcagtggcatacat

SEQ ID NO: 1811375 - DNA, 25 bp, Homo sapien
ccgcagaccctgtgcaccgggcagc

SEQ ID NO: 1811376 - DNA, 25 bp, Homo sapien
aggagggctgactgcacaccgcaga

SEQ ID NO: 1811377 - DNA, 25 bp, Homo sapien
atttttaatcgttagcttctttgtg

SEQ ID NO: 1811378 - DNA, 25 bp, Homo sapien
atcgttagcttctttgtggttcgcc

SEQ ID NO: 1811379 - DNA, 25 bp, Homo sapien
aatcgttagcttctttgtggttcgc

SEQ ID NO: 1811380 - DNA, 25 bp, Homo sapien
ttaatcgttagcttctttgtggttc

SEQ ID NO: 1811381 - DNA, 25 bp, Homo sapien
gcttggagaccgttcagaggcagcc

SEQ ID NO: 1811382 - DNA, 25 bp, Homo sapien
cacacaggacagaaggcccacgcat

SEQ ID NO: 1811383 - DNA, 25 bp, Homo sapien
gccgtggaaaatcccggcttgagct

SEQ ID NO: 1811384 - DNA, 25 bp, Homo sapien
gactgggcagctggcgagtgccggg

SEQ ID NO: 1811385 - DNA, 25 bp, Homo sapien
gactcagatattctactcctagaat

SEQ ID NO: 1811386 - DNA, 25 bp, Homo sapien
tattctactcctagaattaatacat

SEQ ID NO: 1811387 - DNA, 25 bp, Homo sapien
tggatacaaatgctcatatcatttt

SEQ ID NO: 1811388 - DNA, 25 bp, Homo sapien
tttggatacaaatgctcatatcatt

SEQ ID NO: 1811389 - DNA, 25 bp, Homo sapien
tcatttctcatgtgggtaacttgtg

SEQ ID NO: 1811390 - DNA, 25 bp, Homo sapien
cctgttactgttcgtgagatttgta

SEQ ID NO: 1811391 - DNA, 25 bp, Homo sapien
cccactgaggaaggttagattattg

SEQ ID NO: 1811392 - DNA, 25 bp, Homo sapien
gagatttgtagtggactctactcct

SEQ ID NO: 1811393 - DNA, 25 bp, Homo sapien
gattcatcactgttgacgttcacct

SEQ ID NO: 1811394 - DNA, 25 bp, Homo sapien
cacattctttcgaaggaagtcacta

SEQ ID NO: 1811395 - DNA, 25 bp, Homo sapien
gctgggtgctttgtcgaatgcctct

SEQ ID NO: 1811396 - DNA, 25 bp, Homo sapien
tttctgatggttggacagggctttc

SEQ ID NO: 1811397 - DNA, 25 bp, Homo sapien
cacgagctttctaaatgggccattt

SEQ ID NO: 1811398 - DNA, 25 bp, Homo sapien
tctccacgagctttctaaatgggcc

SEQ ID NO: 1811399 - DNA, 25 bp, Homo sapien
ttctctccacgagctttctaaatgg

SEQ ID NO: 1811400 - DNA, 25 bp, Homo sapien
cgagctttctaaatgggccatttct

SEQ ID NO: 1811401 - DNA, 25 bp, Homo sapien
tggtgctattaccaaacacctgggt

SEQ ID NO: 1811402 - DNA, 25 bp, Homo sapien
catggtgctattaccaaacacctgg

SEQ ID NO: 1811403 - DNA, 25 bp, Homo sapien
gagccagcgctcatggtgctattac

SEQ ID NO: 1811404 - DNA, 25 bp, Homo sapien
gcgctcatggtgctattaccaaaca

SEQ ID NO: 1811405 - DNA, 25 bp, Homo sapien
cagccactggtaacacaaatttatg

SEQ ID NO: 1811406 - DNA, 25 bp, Homo sapien
agccactggtaacacaaatttatgc

SEQ ID NO: 1811407 - DNA, 25 bp, Homo sapien
gtagactttgctgtatgtttgctgt

SEQ ID NO: 1811408 - DNA, 25 bp, Homo sapien
ttgctgtatgtttgctgtatcccag

SEQ ID NO: 1811409 - DNA, 25 bp, Homo sapien
tgtagactttgctgtatgtttgctg

SEQ ID NO: 1811410 - DNA, 25 bp, Homo sapien
gttgatggcggcaggcctcagaggg

SEQ ID NO: 1811411 - DNA, 25 bp, Homo sapien
tgttgatggcggcaggcctcagagg

SEQ ID NO: 1811412 - DNA, 25 bp, Homo sapien
cgtccccagtgtggagcgactggct

SEQ ID NO: 1811413 - DNA, 25 bp, Homo sapien
aactcaggctggtgcgtggtagggt

SEQ ID NO: 1811414 - DNA, 25 bp, Homo sapien
aaaggcttgtctgtttgcgaactca

SEQ ID NO: 1811415 - DNA, 25 bp, Homo sapien
ccagtgtggagcgactggctccaaa

SEQ ID NO: 1811416 - DNA, 25 bp, Homo sapien
cctgtgtggagcacctgagtaacgg

SEQ ID NO: 1811417 - DNA, 25 bp, Homo sapien
tgtggagcacctgagtaacgggctc

SEQ ID NO: 1811418 - DNA, 25 bp, Homo sapien
ccctgtgtggagcacctgagtaacg

SEQ ID NO: 1811419 - DNA, 25 bp, Homo sapien
aacgcccctgtgtggagacctgagt

SEQ ID NO: 1811420 - DNA, 25 bp, Homo sapien
gggagccctctttctaagacagtga

SEQ ID NO: 1811421 - DNA, 25 bp, Homo sapien
taaactcctactgaggttgacgtgc

SEQ ID NO: 1811422 - DNA, 25 bp, Homo sapien
tctgcgtctgtgaatgggtcttgtc

SEQ ID NO: 1811423 - DNA, 25 bp, Homo sapien
tcttgtcttcaaaggtcaattcggg

SEQ ID NO: 1811424 - DNA, 25 bp, Homo sapien
ttcctccgcacgagggaccggtgta

SEQ ID NO: 1811425 - DNA, 25 bp, Homo sapien
tgacgtcagcgttcctgcaggcatt

SEQ ID NO: 1811426 - DNA, 25 bp, Homo sapien
cttccttagcatcttgacgtcagcg

SEQ ID NO: 1811427 - DNA, 25 bp, Homo sapien
gtgggaagcacccagctctggaaac

SEQ ID NO: 1811428 - DNA, 25 bp, Homo sapien
gctcccttcgccgtgtgaaatcgca

SEQ ID NO: 1811429 - DNA, 25 bp, Homo sapien
gacactctggcttccgctgcaggag

SEQ ID NO: 1811430 - DNA, 25 bp, Homo sapien
gctcctttctcgctgtgggtgaaga

SEQ ID NO: 1811431 - DNA, 25 bp, Homo sapien
gaagacggtgatggacactctggct

SEQ ID NO: 1811432 - DNA, 25 bp, Homo sapien
ccccagctcctccccgttgtccaca

SEQ ID NO: 1811433 - DNA, 25 bp, Homo sapien
cccagctcctccccgttgtccacat

SEQ ID NO: 1811434 - DNA, 25 bp, Homo sapien
ccagctcctccccgttgtccacatg

SEQ ID NO: 1811435 - DNA, 25 bp, Homo sapien
aggaccctggctcacaaagagctgc

SEQ ID NO: 1811436 - DNA, 25 bp, Homo sapien
agcaggcatccatttgacggcacag

SEQ ID NO: 1811437 - DNA, 25 bp, Homo sapien
cagaagacggatgtgacaggaccct

SEQ ID NO: 1811438 - DNA, 25 bp, Homo sapien
ccatttgacggcacagaagacggat

SEQ ID NO: 1811439 - DNA, 25 bp, Homo sapien
cctgagcgtattgacgcaggagaca

SEQ ID NO: 1811440 - DNA, 25 bp, Homo sapien
cgtattgacgcaggagacagcccgg

SEQ ID NO: 1811441 - DNA, 25 bp, Homo sapien
cacttttatcctgagcgtattgacg

SEQ ID NO: 1811442 - DNA, 25 bp, Homo sapien
cacaatcacttttatcctgagcgta

SEQ ID NO: 1811443 - DNA, 25 bp, Homo sapien
tgctccaccataggcaagttccaga

SEQ ID NO: 1811444 - DNA, 25 bp, Homo sapien
gcagagcctgtacaatggtcgggac

SEQ ID NO: 1811445 - DNA, 25 bp, Homo sapien
ggcagatgttgcaacagtgctccac

SEQ ID NO: 1811446 - DNA, 25 bp, Homo sapien
cccaccgtgaagctggaataagttc

SEQ ID NO: 1811447 - DNA, 25 bp, Homo sapien
tatgagaaacaagggcgagaagtaa

SEQ ID NO: 1811448 - DNA, 25 bp, Homo sapien
atgagaaacaagggcgagaagtaac

SEQ ID NO: 1811449 - DNA, 25 bp, Homo sapien
ctatgagaaacaagggcgagaagta

SEQ ID NO: 1811450 - DNA, 25 bp, Homo sapien
aaattctgtggtcaggaacacattg

SEQ ID NO: 1811451 - DNA, 25 bp, Homo sapien
aatgcaacttgttcgaattttaagg

SEQ ID NO: 1811452 - DNA, 25 bp, Homo sapien
gccaagaacgacaaattctgtggtc

SEQ ID NO: 1811453 - DNA, 25 bp, Homo sapien
tagaatagttttctaagcgtaggga

SEQ ID NO: 1811454 - DNA, 25 bp, Homo sapien
cagatggacggaggcctcgaaaaac

SEQ ID NO: 1811455 - DNA, 25 bp, Homo sapien
aaaacgcttgccaggtgcccgggca

SEQ ID NO: 1811456 - DNA, 25 bp, Homo sapien
ggtgtcctagaaacctccgggcatc

SEQ ID NO: 1811457 - DNA, 25 bp, Homo sapien
agcgcaccaggcacgggcggctcat

SEQ ID NO: 1811458 - DNA, 25 bp, Homo sapien
tgagggcgccttgtttcaccaaagg

SEQ ID NO: 1811459 - DNA, 25 bp, Homo sapien
caactcgagggcattcgatacccac

SEQ ID NO: 1811460 - DNA, 25 bp, Homo sapien
ctctgagggcgccttgtttcaccaa

SEQ ID NO: 1811461 - DNA, 25 bp, Homo sapien
cacgccggaccgtgaacaactcgag

SEQ ID NO: 1811462 - DNA, 25 bp, Homo sapien
tgggtgacaggacacgttctccacc

SEQ ID NO: 1811463 - DNA, 25 bp, Homo sapien
gggcagcgagagttctcgaaaccag

SEQ ID NO: 1811464 - DNA, 25 bp, Homo sapien
ccttcatatttaggaacctggatgg

SEQ ID NO: 1811465 - DNA, 25 bp, Homo sapien
gtccttgaccgccatttccttcata

SEQ ID NO: 1811466 - DNA, 25 bp, Homo sapien
tatgatgctagaacaccgagagcaa

SEQ ID NO: 1811467 - DNA, 25 bp, Homo sapien
caaggcacttttttacaaccacata

SEQ ID NO: 1811468 - DNA, 25 bp, Homo sapien
gaaaagtcacattatgatgctagaa

SEQ ID NO: 1811469 - DNA, 25 bp, Homo sapien
tagaagctctgtatcggaggtggaa

SEQ ID NO: 1811470 - DNA, 25 bp, Homo sapien
taaggatattcctcggagcaagcat

SEQ ID NO: 1811471 - DNA, 25 bp, Homo sapien
ctccgggttagtggaagccaaaatg

SEQ ID NO: 1811472 - DNA, 25 bp, Homo sapien
taatgccagcagtcaaatctgaagc

SEQ ID NO: 1811473 - DNA, 25 bp, Homo sapien
gagcttcattctaaacattgcccga

SEQ ID NO: 1811474 - DNA, 25 bp, Homo sapien
tgtgcagcttggtcgtgtcattccg

SEQ ID NO: 1811475 - DNA, 25 bp, Homo sapien
ttcccgctgtgcaagaatgcctcag

SEQ ID NO: 1811476 - DNA, 25 bp, Homo sapien
gaaaactaagcagtgtgtccatggc

SEQ ID NO: 1811477 - DNA, 25 bp, Homo sapien
taagaactaaagatcgtgtgcagct

SEQ ID NO: 1811478 - DNA, 25 bp, Homo sapien
cctgtggtggttcagacctcagtaa

SEQ ID NO: 1811479 - DNA, 25 bp, Homo sapien
cctcagtaagagacatggctaaact

SEQ ID NO: 1811480 - DNA, 25 bp, Homo sapien
taatgtgatgtaatatcctttctga

SEQ ID NO: 1811481 - DNA, 25 bp, Homo sapien
tcccctgcgttcatgtcctgtggtg

SEQ ID NO: 1811482 - DNA, 25 bp, Homo sapien
gatgcttggtgtgtagttctgtaaa

SEQ ID NO: 1811483 - DNA, 25 bp, Homo sapien
tgagacttgggccttagtaggtgcc

SEQ ID NO: 1811484 - DNA, 25 bp, Homo sapien
acgggactccatccgtccaagcggg

SEQ ID NO: 1811485 - DNA, 25 bp, Homo sapien
tctgtaaagacgttgggactcacgg

SEQ ID NO: 1811486 - DNA, 25 bp, Homo sapien
cagctcccatgctgatgccagtggt

SEQ ID NO: 1811487 - DNA, 25 bp, Homo sapien
atttgccttgtgcacctgcccagag

SEQ ID NO: 1811488 - DNA, 25 bp, Homo sapien
tgtgtggaatttgccttgtgcacct

SEQ ID NO: 1811489 - DNA, 25 bp, Homo sapien
tcccatgctgatgccagtggtgtgt

SEQ ID NO: 1811490 - DNA, 25 bp, Homo sapien
tgcttcccctaatgctaaaatcaca

SEQ ID NO: 1811491 - DNA, 25 bp, Homo sapien
cagaatctcatattgagggaagcta

SEQ ID NO: 1811492 - DNA, 25 bp, Homo sapien
gaagctatgcgtcatcagtctccag

SEQ ID NO: 1811493 - DNA, 25 bp, Homo sapien
caataactcagagacaagtactggc

SEQ ID NO: 1811494 - DNA, 25 bp, Homo sapien
agcttgtaaactgttgcaggaatct

SEQ ID NO: 1811495 - DNA, 25 bp, Homo sapien
tcagcttgtaaactgttgcaggaat

SEQ ID NO: 1811496 - DNA, 25 bp, Homo sapien
cagcttgtaaactgttgcaggaatc

SEQ ID NO: 1811497 - DNA, 25 bp, Homo sapien
gcttgtaaactgttgcaggaatctt

SEQ ID NO: 1811498 - DNA, 25 bp, Homo sapien
agtcagtaccctcacattgttccgg

SEQ ID NO: 1811499 - DNA, 25 bp, Homo sapien
gtggttgttattcgtgctctattag

SEQ ID NO: 1811500 - DNA, 25 bp, Homo sapien
tgctctattagttgagtcagtaccc

SEQ ID NO: 1811501 - DNA, 25 bp, Homo sapien
tccggattgtgaatgctgtaagaga

SEQ ID NO: 1811502 - DNA, 25 bp, Homo sapien
gcaaaccactcgtgtaagtctgagt

SEQ ID NO: 1811503 - DNA, 25 bp, Homo sapien
ggggcttaggaagaagtattgactc

SEQ ID NO: 1811504 - DNA, 25 bp, Homo sapien
gtctgagtcgaaaacctgaaggacc

SEQ ID NO: 1811505 - DNA, 25 bp, Homo sapien
cgtgtaagtctgagtcgaaaacctg

SEQ ID NO: 1811506 - DNA, 25 bp, Homo sapien
gagcctagttccccgaagaagccta

SEQ ID NO: 1811507 - DNA, 25 bp, Homo sapien
catggaggggcctagttccctgaag

SEQ ID NO: 1811508 - DNA, 25 bp, Homo sapien
taatgccatggacctaattccatgg

SEQ ID NO: 1811509 - DNA, 25 bp, Homo sapien
tccatagagggacctagttccatgg

SEQ ID NO: 1811510 - DNA, 25 bp, Homo sapien
gaccaggctgggcattccctcagga

SEQ ID NO: 1811511 - DNA, 25 bp, Homo sapien
tttaatagcgaggtgtgagttcttc

SEQ ID NO: 1811512 - DNA, 25 bp, Homo sapien
aatagcctcctctgagtttggatca

SEQ ID NO: 1811513 - DNA, 25 bp, Homo sapien
caatctacaaggtggaacaatttct

SEQ ID NO: 1811514 - DNA, 25 bp, Homo sapien
cagcacgcatgaggacagttctggt

SEQ ID NO: 1811515 - DNA, 25 bp, Homo sapien
tgcagcacgcatgaggacagttctg

SEQ ID NO: 1811516 - DNA, 25 bp, Homo sapien
tctgcaatgcagcacgcatgaggac

SEQ ID NO: 1811517 - DNA, 25 bp, Homo sapien
caatgcagcacgcatgaggacagtt

SEQ ID NO: 1811518 - DNA, 25 bp, Homo sapien
agcacttttggacactgacaggacc

SEQ ID NO: 1811519 - DNA, 25 bp, Homo sapien
gcctaaaagggcatacgttacagtg

SEQ ID NO: 1811520 - DNA, 25 bp, Homo sapien
tatgtacccacgaaccttgaagcct

SEQ ID NO: 1811521 - DNA, 25 bp, Homo sapien
caaatcgaatggtggtgaatgcaga

SEQ ID NO: 1811522 - DNA, 25 bp, Homo sapien
ccagccatgaagcacaggccgttgc

SEQ ID NO: 1811523 - DNA, 25 bp, Homo sapien
gacacttgctcccaccgcagggaat

SEQ ID NO: 1811524 - DNA, 25 bp, Homo sapien
ccatgaagcacaggccgttgctgga

SEQ ID NO: 1811525 - DNA, 25 bp, Homo sapien
gctcccaccgcagggaataatgcat

SEQ ID NO: 1811526 - DNA, 25 bp, Homo sapien
aggctttgccatggactttctggag

SEQ ID NO: 1811527 - DNA, 25 bp, Homo sapien
tcaggctttgccatggactttctgg

SEQ ID NO: 1811528 - DNA, 25 bp, Homo sapien
ggctttgccatggactttctggagg

SEQ ID NO: 1811529 - DNA, 25 bp, Homo sapien
caggctttgccatggactttctgga

SEQ ID NO: 1811530 - DNA, 25 bp, Homo sapien
cacaagtggttgtggaggtagtgaa

SEQ ID NO: 1811531 - DNA, 25 bp, Homo sapien
tgtatttgctaaggacatcgtgcat

SEQ ID NO: 1811532 - DNA, 25 bp, Homo sapien
aaggaagaggcgataccagcgggct

SEQ ID NO: 1811533 - DNA, 25 bp, Homo sapien
aaaagccgccttggccaagtgcaac

SEQ ID NO: 1811534 - DNA, 25 bp, Homo sapien
gactggctccgtcagaggatgggaa

SEQ ID NO: 1811535 - DNA, 25 bp, Homo sapien
caacacccacgtccacgtggtgggt

SEQ ID NO: 1811536 - DNA, 25 bp, Homo sapien
ttggtccacagacaacacccacgtc

SEQ ID NO: 1811537 - DNA, 25 bp, Homo sapien
aagatgagaagtgcttgtcgcaggc

SEQ ID NO: 1811538 - DNA, 25 bp, Homo sapien
acagtgtgtgcagaagatgtcctgg

SEQ ID NO: 1811539 - DNA, 25 bp, Homo sapien
gcagaagatgtcctggtggcaaagc

SEQ ID NO: 1811540 - DNA, 25 bp, Homo sapien
tgtgcagaagatgtcctggtggcaa

SEQ ID NO: 1811541 - DNA, 25 bp, Homo sapien
cactgctagagcacaacccacagcc

SEQ ID NO: 1811542 - DNA, 25 bp, Homo sapien
gtctggagtgcgcgcatctccccat

SEQ ID NO: 1811543 - DNA, 25 bp, Homo sapien
cagggcaccagaatctatagggaaa

SEQ ID NO: 1811544 - DNA, 25 bp, Homo sapien
tccggcccacggatgtgtacgtagt

SEQ ID NO: 1811545 - DNA, 25 bp, Homo sapien
tatagggaaagtgctttccggccca

SEQ ID NO: 1811546 - DNA, 25 bp, Homo sapien
ggccctgggtagaatatcctcctat

SEQ ID NO: 1811547 - DNA, 25 bp, Homo sapien
tggacctggcttgttccggccctgg

SEQ ID NO: 1811548 - DNA, 25 bp, Homo sapien
cccaggttctgtcccgggtgtggct

SEQ ID NO: 1811549 - DNA, 25 bp, Homo sapien
gactctgtcatggtgagcagagact

SEQ ID NO: 1811550 - DNA, 25 bp, Homo sapien
tcacctgcgtgaaaagtaaagaccc

SEQ ID NO: 1811551 - DNA, 25 bp, Homo sapien
gttccatcacctgcgtgaaaagtaa

SEQ ID NO: 1811552 - DNA, 25 bp, Homo sapien
cacatggaaggaccccgttcctgtt

SEQ ID NO: 1811553 - DNA, 25 bp, Homo sapien
aggcggttggcagcgcaggctcagc

SEQ ID NO: 1811554 - DNA, 25 bp, Homo sapien
gtcccagctgtccacaagatgtctc

SEQ ID NO: 1811555 - DNA, 25 bp, Homo sapien
tcccagctgtccacaagatgtctca

SEQ ID NO: 1811556 - DNA, 25 bp, Homo sapien
gaacaagtaaataacggaggcgcca

SEQ ID NO: 1811557 - DNA, 25 bp, Homo sapien
cagggtgctcagaggacatccttgc

SEQ ID NO: 1811558 - DNA, 25 bp, Homo sapien
ggaagccacaggatttgccgggaat

SEQ ID NO: 1811559 - DNA, 25 bp, Homo sapien
ccttctaacagggtgtgcgtgctgc

SEQ ID NO: 1811560 - DNA, 25 bp, Homo sapien
cccacagttgggtagagacgcttgg

SEQ ID NO: 1811561 - DNA, 25 bp, Homo sapien
ctccccatctggaggtgcggacaga

SEQ ID NO: 1811562 - DNA, 25 bp, Homo sapien
gtgacacggagacgtgggcctcccc

SEQ ID NO: 1811563 - DNA, 25 bp, Homo sapien
gaggtgcggacagatcccacagttg

SEQ ID NO: 1811564 - DNA, 25 bp, Homo sapien
cgctggcctctttgcagcgagctgc

SEQ ID NO: 1811565 - DNA, 25 bp, Homo sapien
ccgctggcctctttgcagcgagctg

SEQ ID NO: 1811566 - DNA, 25 bp, Homo sapien
ttgtaccccgctggcctctttgcag

SEQ ID NO: 1811567 - DNA, 25 bp, Homo sapien
acttctttgtaccccgctggcctct

SEQ ID NO: 1811568 - DNA, 25 bp, Homo sapien
agcttctgtccgtggaggtggttga

SEQ ID NO: 1811569 - DNA, 25 bp, Homo sapien
gagcttctgtccgtggaggtggttg

SEQ ID NO: 1811570 - DNA, 25 bp, Homo sapien
gcttctgtccgtggaggtggttgag

SEQ ID NO: 1811571 - DNA, 25 bp, Homo sapien
ctgagcttctgtccgtggaggtggt

SEQ ID NO: 1811572 - DNA, 25 bp, Homo sapien
caggatgcccacctcgtcaggctca

SEQ ID NO: 1811573 - DNA, 25 bp, Homo sapien
ggatgcccacctcgtcaggctcacc

SEQ ID NO: 1811574 - DNA, 25 bp, Homo sapien
atgcccacctcgtcaggctcacccc

SEQ ID NO: 1811575 - DNA, 25 bp, Homo sapien
gcccacctcgtcaggctcaccccca

SEQ ID NO: 1811576 - DNA, 25 bp, Homo sapien
ccacgtgctgtccatggctggtggc

SEQ ID NO: 1811577 - DNA, 25 bp, Homo sapien
agcaggcctcgttcatctccgtgag

SEQ ID NO: 1811578 - DNA, 25 bp, Homo sapien
tcctctgtgtggaggtcgggcagct

SEQ ID NO: 1811579 - DNA, 25 bp, Homo sapien
ggaggcaccagccacgtgctgtcca

SEQ ID NO: 1811580 - DNA, 25 bp, Homo sapien
cattgtgagtgtctctttgccctcg

SEQ ID NO: 1811581 - DNA, 25 bp, Homo sapien
gctacgctgaagtgcccagtaggat

SEQ ID NO: 1811582 - DNA, 25 bp, Homo sapien
gtgatgagtgcagcacctgcctttc

SEQ ID NO: 1811583 - DNA, 25 bp, Homo sapien
cctttctgtgtaagctacgctgaag

SEQ ID NO: 1811584 - DNA, 25 bp, Homo sapien
gagtgtctgtgataggcagactctc

SEQ ID NO: 1811585 - DNA, 25 bp, Homo sapien
acacagtccagggaactaagagtgt

SEQ ID NO: 1811586 - DNA, 25 bp, Homo sapien
ctaagagtgtctgtgataggcagac

SEQ ID NO: 1811587 - DNA, 25 bp, Homo sapien
ccagggaactaagagtgtctgtgat

SEQ ID NO: 1811588 - DNA, 25 bp, Homo sapien
aaacacagtgtttacttgaggtagg

SEQ ID NO: 1811589 - DNA, 25 bp, Homo sapien
gatgccgtcaagagtgataggaatg

SEQ ID NO: 1811590 - DNA, 25 bp, Homo sapien
gtttacttgaggtaggatgccgtca

SEQ ID NO: 1811591 - DNA, 25 bp, Homo sapien
tccacctgtaggtttagaaaatgtg

SEQ ID NO: 1811592 - DNA, 25 bp, Homo sapien
catgtgatttacctcagcatcaaca

SEQ ID NO: 1811593 - DNA, 25 bp, Homo sapien
caacatgtgatttacctcagcatca

SEQ ID NO: 1811594 - DNA, 25 bp, Homo sapien
aacatgtgatttacctcagcatcaa

SEQ ID NO: 1811595 - DNA, 25 bp, Homo sapien
gtgatttacctcagcatcaacaaag

SEQ ID NO: 1811596 - DNA, 25 bp, Homo sapien
gggtcagcacactcacagggaatgc

SEQ ID NO: 1811597 - DNA, 25 bp, Homo sapien
caagcttggcctcgtggctttgcaa

SEQ ID NO: 1811598 - DNA, 25 bp, Homo sapien
ctttgcaattgcatagggtcagcac

SEQ ID NO: 1811599 - DNA, 25 bp, Homo sapien
gggtaaactgtctccttgagacatg

SEQ ID NO: 1811600 - DNA, 25 bp, Homo sapien
tgagcaggtgaagatgcttccctca

SEQ ID NO: 1811601 - DNA, 25 bp, Homo sapien
gcttccctcaaaagatgtgatggcg

SEQ ID NO: 1811602 - DNA, 25 bp, Homo sapien
tggctgcactgaccgggctgtctat

SEQ ID NO: 1811603 - DNA, 25 bp, Homo sapien
aggcaggtctggtgcagcctgcacc

SEQ ID NO: 1811604 - DNA, 25 bp, Homo sapien
gaagctcagccggttcagccccggc

SEQ ID NO: 1811605 - DNA, 25 bp, Homo sapien
tgggaagctcagccggttcagcccc

SEQ ID NO: 1811606 - DNA, 25 bp, Homo sapien
cctgggaagctcagccggttcagcc

SEQ ID NO: 1811607 - DNA, 25 bp, Homo sapien
ggaagctcagccggttcagccccgg

SEQ ID NO: 1811608 - DNA, 25 bp, Homo sapien
tcccctgagtctgcgcttggcccct

SEQ ID NO: 1811609 - DNA, 25 bp, Homo sapien
agtagcaggacctactgccagcttc

SEQ ID NO: 1811610 - DNA, 25 bp, Homo sapien
tccccagcccttgctcagcggtccg

SEQ ID NO: 1811611 - DNA, 25 bp, Homo sapien
tcggctgtccctgcctcgtggccca

SEQ ID NO: 1811612 - DNA, 25 bp, Homo sapien
aggccttgaggaacgcaggtgtggg

SEQ ID NO: 1811613 - DNA, 25 bp, Homo sapien
gccttgaggaacgcaggtgtggggt

SEQ ID NO: 1811614 - DNA, 25 bp, Homo sapien
cttgaggaacgcaggtgtggggtga

SEQ ID NO: 1811615 - DNA, 25 bp, Homo sapien
ctaggccttgaggaacgcaggtgtg

SEQ ID NO: 1811616 - DNA, 25 bp, Homo sapien
gctcacagggaaaggttcggcccag

SEQ ID NO: 1811617 - DNA, 25 bp, Homo sapien
tctgtacaaggctcaaccaactcgc

SEQ ID NO: 1811618 - DNA, 25 bp, Homo sapien
tcgttctagacgctgatgctgctgc

SEQ ID NO: 1811619 - DNA, 25 bp, Homo sapien
cacaggccttggtcgtgtggaacga

SEQ ID NO: 1811620 - DNA, 25 bp, Homo sapien
tcatgttccctgtcgatggccttag

SEQ ID NO: 1811621 - DNA, 25 bp, Homo sapien
gaggtttcctgacaatcatgttccc

SEQ ID NO: 1811622 - DNA, 25 bp, Homo sapien
tggccttagccacatcagaatggtt

SEQ ID NO: 1811623 - DNA, 25 bp, Homo sapien
cagaatggttgtctcccaggattaa

SEQ ID NO: 1811624 - DNA, 25 bp, Homo sapien
tgtattcccgagaccaacgaagcgt

SEQ ID NO: 1811625 - DNA, 25 bp, Homo sapien
tctgtctgtctgatgatggataggg

SEQ ID NO: 1811626 - DNA, 25 bp, Homo sapien
ttctgcaggaaatagtcactcatcc

SEQ ID NO: 1811627 - DNA, 25 bp, Homo sapien
ttttgcgtgtggagctgtattcccg

SEQ ID NO: 1811628 - DNA, 25 bp, Homo sapien
tgtcccttgaccttaactctgatgg

SEQ ID NO: 1811629 - DNA, 25 bp, Homo sapien
caatgccctgtgcatgccatggtcc

SEQ ID NO: 1811630 - DNA, 25 bp, Homo sapien
tgaagggaatactgtgcataagcca

SEQ ID NO: 1811631 - DNA, 25 bp, Homo sapien
tagacacctcagttcattgtggtcc

SEQ ID NO: 1811632 - DNA, 25 bp, Homo sapien
ggtgcctgggctcttcaatccagga

SEQ ID NO: 1811633 - DNA, 25 bp, Homo sapien
tcttctggagatagggagtgagcat

SEQ ID NO: 1811634 - DNA, 25 bp, Homo sapien
gagaagatccagacatgaacccagg

SEQ ID NO: 1811635 - DNA, 25 bp, Homo sapien
catgggcttcaatccacagtagaga

SEQ ID NO: 1811636 - DNA, 25 bp, Homo sapien
gaagaaattcatgcgcttctggcct

SEQ ID NO: 1811637 - DNA, 25 bp, Homo sapien
tgtctccctcgtgagtagtggtgac

SEQ ID NO: 1811638 - DNA, 25 bp, Homo sapien
cctcactgggattctgggctccgaa

SEQ ID NO: 1811639 - DNA, 25 bp, Homo sapien
tttatgagctgaagtctgtgggaag

SEQ ID NO: 1811640 - DNA, 25 bp, Homo sapien
gccactggtcatccactgaggactg

SEQ ID NO: 1811641 - DNA, 25 bp, Homo sapien
ctgagcccagtggtcacgcaggtga

SEQ ID NO: 1811642 - DNA, 25 bp, Homo sapien
gcagcaagtgatcactgtacacaca

SEQ ID NO: 1811643 - DNA, 25 bp, Homo sapien
gagtcagagaacacacgtagatctg

SEQ ID NO: 1811644 - DNA, 25 bp, Homo sapien
taatcaggaaacacgcattctgtgg

SEQ ID NO: 1811645 - DNA, 25 bp, Homo sapien
tcaccgcatgctcctgaagtgctga

SEQ ID NO: 1811646 - DNA, 25 bp, Homo sapien
tgagtgtcacggtcttcaccgcatg

SEQ ID NO: 1811647 - DNA, 25 bp, Homo sapien
ctgctccccagtgagtgtcacggtc

SEQ ID NO: 1811648 - DNA, 25 bp, Homo sapien
cttggcatcctcactaagcctggac

SEQ ID NO: 1811649 - DNA, 25 bp, Homo sapien
cgtcagaggagcaggattggattcc

SEQ ID NO: 1811650 - DNA, 25 bp, Homo sapien
tttctcactcccttcgtcagaggag

SEQ ID NO: 1811651 - DNA, 25 bp, Homo sapien
caagattgtactgtggccccagtgt

SEQ ID NO: 1811652 - DNA, 25 bp, Homo sapien
tgagctggcctgcagaccccaagag

SEQ ID NO: 1811653 - DNA, 25 bp, Homo sapien
aagtaagagacagacctgaacacac

SEQ ID NO: 1811654 - DNA, 25 bp, Homo sapien
ggaatgaggaagtaagagacagacc

SEQ ID NO: 1811655 - DNA, 25 bp, Homo sapien
aggaagtaagagacagacctgaaca

SEQ ID NO: 1811656 - DNA, 25 bp, Homo sapien
gggaatgaggaagtaagagacagac

SEQ ID NO: 1811657 - DNA, 25 bp, Homo sapien
tatggctggttctcgctcattccct

SEQ ID NO: 1811658 - DNA, 25 bp, Homo sapien
attgccgcgcggctttggacacgtc

SEQ ID NO: 1811659 - DNA, 25 bp, Homo sapien
gcttggcccggagacttgcttggtc

SEQ ID NO: 1811660 - DNA, 25 bp, Homo sapien
ccttggtgacaagcctggtaggtgc

SEQ ID NO: 1811661 - DNA, 25 bp, Homo sapien
tcttaccatgtgtacgtattacaca

SEQ ID NO: 1811662 - DNA, 25 bp, Homo sapien
tttcttaccatgtgtacgtattaca

SEQ ID NO: 1811663 - DNA, 25 bp, Homo sapien
tttaatttcttaccatgtgtacgta

SEQ ID NO: 1811664 - DNA, 25 bp, Homo sapien
gcttttaatttcttaccatgtgtac

SEQ ID NO: 1811665 - DNA, 25 bp, Homo sapien
agacactggcagtagcggttgcttc

SEQ ID NO: 1811666 - DNA, 25 bp, Homo sapien
tctggagggagcacttgccccccat

SEQ ID NO: 1811667 - DNA, 25 bp, Homo sapien
tctggagggagcacttgtccccatg

SEQ ID NO: 1811668 - DNA, 25 bp, Homo sapien
tggagggagcacttgtccccatgga

SEQ ID NO: 1811669 - DNA, 25 bp, Homo sapien
ctctggagggagcacttgcccccca

SEQ ID NO: 1811670 - DNA, 25 bp, Homo sapien
ccgagggggtcaaggggcagctgct

SEQ ID NO: 1811671 - DNA, 25 bp, Homo sapien
gccgagggggtcaaggggcagctgc

SEQ ID NO: 1811672 - DNA, 25 bp, Homo sapien
tccctgtactcaaactggtgacaag

SEQ ID NO: 1811673 - DNA, 25 bp, Homo sapien
actggtgacaagctccgggtcccca

SEQ ID NO: 1811674 - DNA, 25 bp, Homo sapien
cgggtccccaattgcttggaagcag

SEQ ID NO: 1811675 - DNA, 25 bp, Homo sapien
gacaagctccgggtccccaattgct

SEQ ID NO: 1811676 - DNA, 25 bp, Homo sapien
gctctatgtgtaaggtggagaaatc

SEQ ID NO: 1811677 - DNA, 25 bp, Homo sapien
gacgccagggacactttcaataaca

SEQ ID NO: 1811678 - DNA, 25 bp, Homo sapien
tcacgtacatgctgatgacgccagg

SEQ ID NO: 1811679 - DNA, 25 bp, Homo sapien
aaccaatgcctagagtcccggatca

SEQ ID NO: 1811680 - DNA, 25 bp, Homo sapien
ttccctgcgacatgccgatagacaa

SEQ ID NO: 1811681 - DNA, 25 bp, Homo sapien
tttgtcatccaagtgttaagccgag

SEQ ID NO: 1811682 - DNA, 25 bp, Homo sapien
tctatcggtacacttgtgccatggg

SEQ ID NO: 1811683 - DNA, 25 bp, Homo sapien
ggatgaaaatcccacacgagctgtg

SEQ ID NO: 1811684 - DNA, 25 bp, Homo sapien
tgtttgagcacatacaatggccgtg

SEQ ID NO: 1811685 - DNA, 25 bp, Homo sapien
caatggacttgtatcctgagaggct

SEQ ID NO: 1811686 - DNA, 25 bp, Homo sapien
tggccgtgtgtaatatccggaagca

SEQ ID NO: 1811687 - DNA, 25 bp, Homo sapien
tccggaagcatcttatcagactttt

SEQ ID NO: 1811688 - DNA, 25 bp, Homo sapien
ttcaaatttcgaccaagacttcgaa

SEQ ID NO: 1811689 - DNA, 25 bp, Homo sapien
tcgaccaagacttcgaatactttat

SEQ ID NO: 1811690 - DNA, 25 bp, Homo sapien
aatttcgaccaagacttcgaatact

SEQ ID NO: 1811691 - DNA, 25 bp, Homo sapien
caaatttcgaccaagacttcgaata

SEQ ID NO: 1811692 - DNA, 25 bp, Homo sapien
gtgcccactctacagtccgtggtgc

SEQ ID NO: 1811693 - DNA, 25 bp, Homo sapien
acagtccgtggtgcccaccccacag

SEQ ID NO: 1811694 - DNA, 25 bp, Homo sapien
ggtgcccactctacagtccgtggtg

SEQ ID NO: 1811695 - DNA, 25 bp, Homo sapien
actctacagtccgtggtgcccaccc

SEQ ID NO: 1811696 - DNA, 25 bp, Homo sapien
ttccaggaggagcaataatatgtca

SEQ ID NO: 1811697 - DNA, 25 bp, Homo sapien
tcagagacgcgtcaactgcggacga

SEQ ID NO: 1811698 - DNA, 25 bp, Homo sapien
tggcggatcgctcatcaggcaatgc

SEQ ID NO: 1811699 - DNA, 25 bp, Homo sapien
aatgcccggatgagtagggacccgc

SEQ ID NO: 1811700 - DNA, 25 bp, Homo sapien
tcgctgttggctcggcccatggaca

SEQ ID NO: 1811701 - DNA, 25 bp, Homo sapien
cacgtgagcaattctcccctctgca

SEQ ID NO: 1811702 - DNA, 25 bp, Homo sapien
tcccctctgcacgaagctcgctgtt

SEQ ID NO: 1811703 - DNA, 25 bp, Homo sapien
gcccgggcgaggcatgcctgccggg

SEQ ID NO: 1811704 - DNA, 25 bp, Homo sapien
agctggttcaccaggaatccgggga

SEQ ID NO: 1811705 - DNA, 25 bp, Homo sapien
aaagctggttcaccaggaatccggg

SEQ ID NO: 1811706 - DNA, 25 bp, Homo sapien
gccccgcagaccctgcattggagag

SEQ ID NO: 1811707 - DNA, 25 bp, Homo sapien
gagccccgcagaccctgcattggag

SEQ ID NO: 1811708 - DNA, 25 bp, Homo sapien
ccagctgagcgaagaatgaagtcca

SEQ ID NO: 1811709 - DNA, 25 bp, Homo sapien
cctcccttggtgagatcgtgctgct

SEQ ID NO: 1811710 - DNA, 25 bp, Homo sapien
tctcgctgctactgcaaaggccgta

SEQ ID NO: 1811711 - DNA, 25 bp, Homo sapien
ctccttatgaacgtggaagattgaa

SEQ ID NO: 1811712 - DNA, 25 bp, Homo sapien
tgcacctttagctttccggaatggt

SEQ ID NO: 1811713 - DNA, 25 bp, Homo sapien
gaatggtccgttgggggtgcgagtc

SEQ ID NO: 1811714 - DNA, 25 bp, Homo sapien
gcttccatgcacctttagctttccg

SEQ ID NO: 1811715 - DNA, 25 bp, Homo sapien
gtggctcctcgtgcttccatgcacc

SEQ ID NO: 1811716 - DNA, 25 bp, Homo sapien
ggaatgttccacatggggtgtgagc

SEQ ID NO: 1811717 - DNA, 25 bp, Homo sapien
gaatgttccacatggggtgtgagcc

SEQ ID NO: 1811718 - DNA, 25 bp, Homo sapien
aatgttccacatggggtgtgagcca

SEQ ID NO: 1811719 - DNA, 25 bp, Homo sapien
atgttccacatggggtgtgagccat

SEQ ID NO: 1811720 - DNA, 25 bp, Homo sapien
gaagagacattctcagggcggatgt

SEQ ID NO: 1811721 - DNA, 25 bp, Homo sapien
ggcggatgttgccaggacaaagaaa

SEQ ID NO: 1811722 - DNA, 25 bp, Homo sapien
gagtggctcctcgtgcttttgagca

SEQ ID NO: 1811723 - DNA, 25 bp, Homo sapien
tgttgccaggacaaagaaacacaag

SEQ ID NO: 1811724 - DNA, 25 bp, Homo sapien
ggattggagacaacgcctctcccca

SEQ ID NO: 1811725 - DNA, 25 bp, Homo sapien
cctctgagcctggtatcggcgtcga

SEQ ID NO: 1811726 - DNA, 25 bp, Homo sapien
gctcctctggaatatggttctgtcc

SEQ ID NO: 1811727 - DNA, 25 bp, Homo sapien
tgctgtctacatgcgctgctggctg

SEQ ID NO: 1811728 - DNA, 25 bp, Homo sapien
gtggggcaggtacccaaggcagcac

SEQ ID NO: 1811729 - DNA, 25 bp, Homo sapien
taaaaccaggaggttgacagaaggc

SEQ ID NO: 1811730 - DNA, 25 bp, Homo sapien
agccacggggcttcatttctaccgc

SEQ ID NO: 1811731 - DNA, 25 bp, Homo sapien
cactgaagtcacataggagggtggc

SEQ ID NO: 1811732 - DNA, 25 bp, Homo sapien
gaaaccagggaatcagatgcaacgt

SEQ ID NO: 1811733 - DNA, 25 bp, Homo sapien
tcgtaagaagtgcagaaagacccgg

SEQ ID NO: 1811734 - DNA, 25 bp, Homo sapien
tggctttggccgtgtgtgagatccc

SEQ ID NO: 1811735 - DNA, 25 bp, Homo sapien
tcaagtcagtgagacctgcgtgaag

SEQ ID NO: 1811736 - DNA, 25 bp, Homo sapien
tctttccgaggtaactgcagcttga

SEQ ID NO: 1811737 - DNA, 25 bp, Homo sapien
ctccagaggatggactggcagccat

SEQ ID NO: 1811738 - DNA, 25 bp, Homo sapien
ctctcgggccatgccgtgacacagg

SEQ ID NO: 1811739 - DNA, 25 bp, Homo sapien
tgcccactgctgatccgaggctggt

SEQ ID NO: 1811740 - DNA, 25 bp, Homo sapien
tgtggtctccataggctgcccactg

SEQ ID NO: 1811741 - DNA, 25 bp, Homo sapien
acacgtgggtttctgaggaacacgc

SEQ ID NO: 1811742 - DNA, 25 bp, Homo sapien
caaataagtacaagaggacccagag

SEQ ID NO: 1811743 - DNA, 25 bp, Homo sapien
ctgacgctgaggacaatgtgagaaa

SEQ ID NO: 1811744 - DNA, 25 bp, Homo sapien
ccactgacgctgaggacaatgtgag

SEQ ID NO: 1811745 - DNA, 25 bp, Homo sapien
cttcccgcaaataagtacaagagga

SEQ ID NO: 1811746 - DNA, 25 bp, Homo sapien
tctgagacctcttgtcatcaaactt

SEQ ID NO: 1811747 - DNA, 25 bp, Homo sapien
ttttctgagacctcttgtcatcaaa

SEQ ID NO: 1811748 - DNA, 25 bp, Homo sapien
gagacctcttgtcatcaaacttttt

SEQ ID NO: 1811749 - DNA, 25 bp, Homo sapien
tgagacctcttgtcatcaaactttt

SEQ ID NO: 1811750 - DNA, 25 bp, Homo sapien
tgtggagtcttcactccctgtgact

SEQ ID NO: 1811751 - DNA, 25 bp, Homo sapien
ggagtcttcactccctgtgactttg

SEQ ID NO: 1811752 - DNA, 25 bp, Homo sapien
tctcctgtggagtcttcactccctg

SEQ ID NO: 1811753 - DNA, 25 bp, Homo sapien
cctgtggagtcttcactccctgtga

SEQ ID NO: 1811754 - DNA, 25 bp, Homo sapien
tccctggatacagaagcaggcgtgt

SEQ ID NO: 1811755 - DNA, 25 bp, Homo sapien
ggcgtgtcatctgaccccacgtgca

SEQ ID NO: 1811756 - DNA, 25 bp, Homo sapien
aggagcccaactttgattgcctgca

SEQ ID NO: 1811757 - DNA, 25 bp, Homo sapien
ggtttgcttagactctgggccaaga

SEQ ID NO: 1811758 - DNA, 25 bp, Homo sapien
cctcctgccggatttgaaaactggt

SEQ ID NO: 1811759 - DNA, 25 bp, Homo sapien
tcctgccggatttgaaaactggtcc

SEQ ID NO: 1811760 - DNA, 25 bp, Homo sapien
gccggatttgaaaactggtccgcat

SEQ ID NO: 1811761 - DNA, 25 bp, Homo sapien
ctcctcctgccggatttgaaaactg

SEQ ID NO: 1811762 - DNA, 25 bp, Homo sapien
tcttcacagggtgatcctcacagaa

SEQ ID NO: 1811763 - DNA, 25 bp, Homo sapien
tgggttccacgtgccgagcatggtc

SEQ ID NO: 1811764 - DNA, 25 bp, Homo sapien
tctgtgtggtaagcgtgacctctgc

SEQ ID NO: 1811765 - DNA, 25 bp, Homo sapien
tgagcgtggcctctgaccatgagtt

SEQ ID NO: 1811766 - DNA, 25 bp, Homo sapien
cctgtgggttctgtgtcgtgagcat

SEQ ID NO: 1811767 - DNA, 25 bp, Homo sapien
cttagtccatatagttagaggtttc

SEQ ID NO: 1811768 - DNA, 25 bp, Homo sapien
ttctgaagaattagtagtaatgtcc

SEQ ID NO: 1811769 - DNA, 25 bp, Homo sapien
gattcaatttcctcaccagttatag

SEQ ID NO: 1811770 - DNA, 25 bp, Homo sapien
tatctagggtatccaatatgttggc

SEQ ID NO: 1811771 - DNA, 25 bp, Homo sapien
ctctttgcaaacggccttctcccca

SEQ ID NO: 1811772 - DNA, 25 bp, Homo sapien
cctcctctttgcaaacggccttctc

SEQ ID NO: 1811773 - DNA, 25 bp, Homo sapien
tcctctttgcaaacggccttctccc

SEQ ID NO: 1811774 - DNA, 25 bp, Homo sapien
ctcctctttgcaaacggccttctcc

SEQ ID NO: 1811775 - DNA, 25 bp, Homo sapien
ccttgactgcccagtgcagaagtgt

SEQ ID NO: 1811776 - DNA, 25 bp, Homo sapien
tcacagcgggcgacggccttgactg

SEQ ID NO: 1811777 - DNA, 25 bp, Homo sapien
atctgtagatcacagcgggcgatgg

SEQ ID NO: 1811778 - DNA, 25 bp, Homo sapien
cgggcgacggccttgactgcccagt

SEQ ID NO: 1811779 - DNA, 25 bp, Homo sapien
gtaagtccacgtttttctgtgcagc

SEQ ID NO: 1811780 - DNA, 25 bp, Homo sapien
tttttgtggatgatgagtggtgtac

SEQ ID NO: 1811781 - DNA, 25 bp, Homo sapien
tggatgatgagtggtgtacggatgg

SEQ ID NO: 1811782 - DNA, 25 bp, Homo sapien
tacgtaagtccacgtttttctgtgc

SEQ ID NO: 1811783 - DNA, 25 bp, Homo sapien
tgcggctccgttcagggcattggat

SEQ ID NO: 1811784 - DNA, 25 bp, Homo sapien
cctaagcatgtagggaggtcttgct

SEQ ID NO: 1811785 - DNA, 25 bp, Homo sapien
ttgacgaagtcctgtgttagcacct

SEQ ID NO: 1811786 - DNA, 25 bp, Homo sapien
tagcacctcctcgaccagcttgagg

SEQ ID NO: 1811787 - DNA, 25 bp, Homo sapien
tgcttgtgagattgtcaccttcctt

SEQ ID NO: 1811788 - DNA, 25 bp, Homo sapien
cttcttgagaaccattaccagttgg

SEQ ID NO: 1811789 - DNA, 25 bp, Homo sapien
atcactgcagcagatgggatcacag

SEQ ID NO: 1811790 - DNA, 25 bp, Homo sapien
ccagttggtgatgcatggttgcttg

SEQ ID NO: 1811791 - DNA, 25 bp, Homo sapien
aatccttcatggtattcctgtgtgg

SEQ ID NO: 1811792 - DNA, 25 bp, Homo sapien
cctcgttgctgaatttgagtttgaa

SEQ ID NO: 1811793 - DNA, 25 bp, Homo sapien
gctccaataccttttgattgtcaga

SEQ ID NO: 1811794 - DNA, 25 bp, Homo sapien
ttttttcctcgttgctgaatttgag

SEQ ID NO: 1811795 - DNA, 25 bp, Homo sapien
gatgggtcccgtcttcctgcattca

SEQ ID NO: 1811796 - DNA, 25 bp, Homo sapien
tagagcgtggtaggcacttgtgccc

SEQ ID NO: 1811797 - DNA, 25 bp, Homo sapien
gatttgcttgcaaagcaccgacagg

SEQ ID NO: 1811798 - DNA, 25 bp, Homo sapien
caagcagggccatgaatcgtagcac

SEQ ID NO: 1811799 - DNA, 25 bp, Homo sapien
gtatttcgccagcaatgatttatat

SEQ ID NO: 1811800 - DNA, 25 bp, Homo sapien
atttcgccagcaatgatttatataa

SEQ ID NO: 1811801 - DNA, 25 bp, Homo sapien
ctaaaattgtatttcgccagcaatg

SEQ ID NO: 1811802 - DNA, 25 bp, Homo sapien
aattgtatttcgccagcaatgattt

SEQ ID NO: 1811803 - DNA, 25 bp, Homo sapien
ttagcccttcgtcctccttcaaatg

SEQ ID NO: 1811804 - DNA, 25 bp, Homo sapien
tggtgtctccatcgcaggctttaga

SEQ ID NO: 1811805 - DNA, 25 bp, Homo sapien
gaagttaacgtcagaccttggtgtc

SEQ ID NO: 1811806 - DNA, 25 bp, Homo sapien
ttagatgctgatgtgaagaggaccc

SEQ ID NO: 1811807 - DNA, 25 bp, Homo sapien
tataacccgttgctacatgacagta

SEQ ID NO: 1811808 - DNA, 25 bp, Homo sapien
gacaggtattgcagtatttccccta

SEQ ID NO: 1811809 - DNA, 25 bp, Homo sapien
gaaacctttgctaacccagagactg

SEQ ID NO: 1811810 - DNA, 25 bp, Homo sapien
cacagctcctgtgggtcacgagtca

SEQ ID NO: 1811811 - DNA, 25 bp, Homo sapien
cactctcagaattgacttgaggaat

SEQ ID NO: 1811812 - DNA, 25 bp, Homo sapien
gtctagccacaagctttcttccctg

SEQ ID NO: 1811813 - DNA, 25 bp, Homo sapien
catcccgtgacgtggtttgagagtc

SEQ ID NO: 1811814 - DNA, 25 bp, Homo sapien
tagtggtgctattgtttacgctaca

SEQ ID NO: 1811815 - DNA, 25 bp, Homo sapien
gactctggggcacgcagacatcgtt

SEQ ID NO: 1811816 - DNA, 25 bp, Homo sapien
cacgcagacatcgttgttggcctgc

SEQ ID NO: 1811817 - DNA, 25 bp, Homo sapien
ctggctcgggctgctgcctatcaga

SEQ ID NO: 1811818 - DNA, 25 bp, Homo sapien
gggctgctgcctatcagactctggg

SEQ ID NO: 1811819 - DNA, 25 bp, Homo sapien
gtcagactcaggcttccacggacct

SEQ ID NO: 1811820 - DNA, 25 bp, Homo sapien
gactcaggcttccacggacctgttt

SEQ ID NO: 1811821 - DNA, 25 bp, Homo sapien
cttccacggacctgtttgagaacca

SEQ ID NO: 1811822 - DNA, 25 bp, Homo sapien
caggcttccacggacctgtttgaga

SEQ ID NO: 1811823 - DNA, 25 bp, Homo sapien
cgaaggcggaggtctgcgtgcagag

SEQ ID NO: 1811824 - DNA, 25 bp, Homo sapien
ggtgcaccccgggaggctcgggctg

SEQ ID NO: 1811825 - DNA, 25 bp, Homo sapien
gagtttcagtgaaagacaagacaca

SEQ ID NO: 1811826 - DNA, 25 bp, Homo sapien
gaggctcgggctgcaacacaacctc

SEQ ID NO: 1811827 - DNA, 25 bp, Homo sapien
tccctgtgggcgaatctgtggccgc

SEQ ID NO: 1811828 - DNA, 25 bp, Homo sapien
cctgcccgctgtggttacacctggg

SEQ ID NO: 1811829 - DNA, 25 bp, Homo sapien
tacacctgggacatccagaaccatc

SEQ ID NO: 1811830 - DNA, 25 bp, Homo sapien
ggccgagttcgtctcccgttgctca

SEQ ID NO: 1811831 - DNA, 25 bp, Homo sapien
tggcgctctcagaaatcagcatcca

SEQ ID NO: 1811832 - DNA, 25 bp, Homo sapien
attggcgctctcagaaatcagcatc

SEQ ID NO: 1811833 - DNA, 25 bp, Homo sapien
ttggcgctctcagaaatcagcatcc

SEQ ID NO: 1811834 - DNA, 25 bp, Homo sapien
cattggcgctctcagaaatcagcat

SEQ ID NO: 1811835 - DNA, 25 bp, Homo sapien
agaagaagcgcatccctggtcgtct

SEQ ID NO: 1811836 - DNA, 25 bp, Homo sapien
ttgtgtccgccgcttcttagaaccg

SEQ ID NO: 1811837 - DNA, 25 bp, Homo sapien
tccagggccgacctctgagaagaag

SEQ ID NO: 1811838 - DNA, 25 bp, Homo sapien
gtttgaagatgcctcctgccctgac

SEQ ID NO: 1811839 - DNA, 25 bp, Homo sapien
agcagaaggtggcacttcgcaaccc

SEQ ID NO: 1811840 - DNA, 25 bp, Homo sapien
ccactggacgtgcagcaaacgctgt

SEQ ID NO: 1811841 - DNA, 25 bp, Homo sapien
ccctgacacttgagatgaaggacca

SEQ ID NO: 1811842 - DNA, 25 bp, Homo sapien
tgaaggaccaagctgacttgtcggg

SEQ ID NO: 1811843 - DNA, 25 bp, Homo sapien
tttagaatccttttcactctgtttc

SEQ ID NO: 1811844 - DNA, 25 bp, Homo sapien
tctcatcacactcaccacaggggaa

SEQ ID NO: 1811845 - DNA, 25 bp, Homo sapien
ctgaagcttctcatctcatcacact

SEQ ID NO: 1811846 - DNA, 25 bp, Homo sapien
tgtttctgaagcttctcatctcatc

SEQ ID NO: 1811847 - DNA, 25 bp, Homo sapien
gggaagtctaggtccagaggtctaa

SEQ ID NO: 1811848 - DNA, 25 bp, Homo sapien
tatgtccccacacccttgactgctt

SEQ ID NO: 1811849 - DNA, 25 bp, Homo sapien
tgcttatgtccccacacccttgact

SEQ ID NO: 1811850 - DNA, 25 bp, Homo sapien
taggtccagaggtctaaaaccctga

SEQ ID NO: 1811851 - DNA, 25 bp, Homo sapien
gctcttggttggctcgagctgcgcc

SEQ ID NO: 1811852 - DNA, 25 bp, Homo sapien
gagaaatctttgtccaagtatgaag

SEQ ID NO: 1811853 - DNA, 25 bp, Homo sapien
gaagatgcgcatctctcctggtccc

SEQ ID NO: 1811854 - DNA, 25 bp, Homo sapien
tcaggcatttcggaagattaaatct

SEQ ID NO: 1811855 - DNA, 25 bp, Homo sapien
aagacaggtacttgagtcccaggcc

SEQ ID NO: 1811856 - DNA, 25 bp, Homo sapien
taacgtttaatagtggcatcgctca

SEQ ID NO: 1811857 - DNA, 25 bp, Homo sapien
tgaaaaccactgagagcaaccgtat

SEQ ID NO: 1811858 - DNA, 25 bp, Homo sapien
tagattctcagcgatacgggatggc

SEQ ID NO: 1811859 - DNA, 25 bp, Homo sapien
gccgggctcggctcctgcatgagca

SEQ ID NO: 1811860 - DNA, 25 bp, Homo sapien
cgggctcggctcctgcatgagcaaa

SEQ ID NO: 1811861 - DNA, 25 bp, Homo sapien
ccaggtctagcaggcccccaagggc

SEQ ID NO: 1811862 - DNA, 25 bp, Homo sapien
tcggctcctgcatgagcaaagctgc

SEQ ID NO: 1811863 - DNA, 25 bp, Homo sapien
tagatctgagagcaacagtgttaaa

SEQ ID NO: 1811864 - DNA, 25 bp, Homo sapien
cattaggatcctgatatggcttgct

SEQ ID NO: 1811865 - DNA, 25 bp, Homo sapien
gaccatttcaactcataactgggac

SEQ ID NO: 1811866 - DNA, 25 bp, Homo sapien
tctaatcccataaaacctgccagct

SEQ ID NO: 1811867 - DNA, 25 bp, Homo sapien
gattaacacggtctggcacctgcag

SEQ ID NO: 1811868 - DNA, 25 bp, Homo sapien
gaaaggattaacacggtctggcacc

SEQ ID NO: 1811869 - DNA, 25 bp, Homo sapien
gaggatgtgagaaaggattaacacg

SEQ ID NO: 1811870 - DNA, 25 bp, Homo sapien
tgagaaaggattaacacggtctggc

SEQ ID NO: 1811871 - DNA, 25 bp, Homo sapien
tcctgttcacaaccttgaacagcag

SEQ ID NO: 1811872 - DNA, 25 bp, Homo sapien
cttgtttcaggggccattggcatcc

SEQ ID NO: 1811873 - DNA, 25 bp, Homo sapien
ttcacaaccttgaacagcagcctca

SEQ ID NO: 1811874 - DNA, 25 bp, Homo sapien
tttcctgttcacaaccttgaacagc

SEQ ID NO: 1811875 - DNA, 25 bp, Homo sapien
tagaaaatgccgtagccgatgctcc

SEQ ID NO: 1811876 - DNA, 25 bp, Homo sapien
tgggcatgtcctgcatacacctggg

SEQ ID NO: 1811877 - DNA, 25 bp, Homo sapien
agggcacctgtccacgggactggct

SEQ ID NO: 1811878 - DNA, 25 bp, Homo sapien
ggccgttgtagtgccaggtgctcat

SEQ ID NO: 1811879 - DNA, 25 bp, Homo sapien
cagacgatggcaagggtcttcccag

SEQ ID NO: 1811880 - DNA, 25 bp, Homo sapien
tgtgagcagtctttgcagcaccctg

SEQ ID NO: 1811881 - DNA, 25 bp, Homo sapien
taacagacgtttggcttgtcccagg

SEQ ID NO: 1811882 - DNA, 25 bp, Homo sapien
cacatggcaggtcgatggcagacga

SEQ ID NO: 1811883 - DNA, 25 bp, Homo sapien
acggaggcatttccgcagccgcctt

SEQ ID NO: 1811884 - DNA, 25 bp, Homo sapien
gaggcatttccgcagccgcctttca

SEQ ID NO: 1811885 - DNA, 25 bp, Homo sapien
aaaacggaggcatttccgcagccgc

SEQ ID NO: 1811886 - DNA, 25 bp, Homo sapien
ttgaaaaacggaggcatttccgcag

SEQ ID NO: 1811887 - DNA, 25 bp, Homo sapien
tgaggcatttccatcgtatcgtcgt

SEQ ID NO: 1811888 - DNA, 25 bp, Homo sapien
gctgcaggaatcagtcatttggaac

SEQ ID NO: 1811889 - DNA, 25 bp, Homo sapien
tcctacaaggataagaatacacttg

SEQ ID NO: 1811890 - DNA, 25 bp, Homo sapien
cattttcagatactgttatgtccac

SEQ ID NO: 1811891 - DNA, 25 bp, Homo sapien
tgacgcgtgatctgaatgctccgcg

SEQ ID NO: 1811892 - DNA, 25 bp, Homo sapien
cttgacgcgtgatctgaatgctccg

SEQ ID NO: 1811893 - DNA, 25 bp, Homo sapien
tgaatgctccgcggtgcacacgcat

SEQ ID NO: 1811894 - DNA, 25 bp, Homo sapien
ttccttgacgcgtgatctgaatgct

SEQ ID NO: 1811895 - DNA, 25 bp, Homo sapien
tgcagctgacgtttcatattacaga

SEQ ID NO: 1811896 - DNA, 25 bp, Homo sapien
ggtgtgtgcagctgacgtttcatat

SEQ ID NO: 1811897 - DNA, 25 bp, Homo sapien
gccacctctttcattggtgtgtgca

SEQ ID NO: 1811898 - DNA, 25 bp, Homo sapien
tgattttacttttcaatccaggggc

SEQ ID NO: 1811899 - DNA, 25 bp, Homo sapien
gctttttatctcctgtactgtcaca

SEQ ID NO: 1811900 - DNA, 25 bp, Homo sapien
gctctcctcaggtgcgctttttatc

SEQ ID NO: 1811901 - DNA, 25 bp, Homo sapien
cctgtactgtcacaaaggagctgac

SEQ ID NO: 1811902 - DNA, 25 bp, Homo sapien
agttgcttcctgttgacgacagctc

SEQ ID NO: 1811903 - DNA, 25 bp, Homo sapien
acccacccagcaaccttgtcctcac

SEQ ID NO: 1811904 - DNA, 25 bp, Homo sapien
tcctgcgcattgcagatgccacatg

SEQ ID NO: 1811905 - DNA, 25 bp, Homo sapien
tctcctgcgcattgcagatgccaca

SEQ ID NO: 1811906 - DNA, 25 bp, Homo sapien
gcgcattgcagatgccacatgcacc

SEQ ID NO: 1811907 - DNA, 25 bp, Homo sapien
tctcctgcgcatcacagatgccacc

SEQ ID NO: 1811908 - DNA, 25 bp, Homo sapien
ctcctgcgcatcacagatgccacct

SEQ ID NO: 1811909 - DNA, 25 bp, Homo sapien
ccgctcccacgggtgctgcccgcgc

SEQ ID NO: 1811910 - DNA, 25 bp, Homo sapien
cgccctggacggctcctgtgtggca

SEQ ID NO: 1811911 - DNA, 25 bp, Homo sapien
gtgaccctgaaaacctgctgagaag

SEQ ID NO: 1811912 - DNA, 25 bp, Homo sapien
gtggcatcccccgtgcttcttgtgc

SEQ ID NO: 1811913 - DNA, 25 bp, Homo sapien
ttccatgcggtaagtgacatgaaaa

SEQ ID NO: 1811914 - DNA, 25 bp, Homo sapien
aaggagagcgttcttccatgcggta

SEQ ID NO: 1811915 - DNA, 25 bp, Homo sapien
gcgttcttccatgcggtaagtgaca

SEQ ID NO: 1811916 - DNA, 25 bp, Homo sapien
ggagagcgttcttccatgcggtaag

SEQ ID NO: 1811917 - DNA, 25 bp, Homo sapien
tgcagctcgtgaatgccagggtcct

SEQ ID NO: 1811918 - DNA, 25 bp, Homo sapien
gcattgatggtgcaggcgtccgtcc

SEQ ID NO: 1811919 - DNA, 25 bp, Homo sapien
catcttagggcactggtttcctgca

SEQ ID NO: 1811920 - DNA, 25 bp, Homo sapien
cacggcataaggagcggtctgtgac

SEQ ID NO: 1811921 - DNA, 25 bp, Homo sapien
gagcgcccaggcacgaattcttctc

SEQ ID NO: 1811922 - DNA, 25 bp, Homo sapien
tgtggagggttcagtcggcacaaaa

SEQ ID NO: 1811923 - DNA, 25 bp, Homo sapien
ggcacgaattcttctccacggcatt

SEQ ID NO: 1811924 - DNA, 25 bp, Homo sapien
ggttcagtcggcacaaaatgaggct

SEQ ID NO: 1811925 - DNA, 25 bp, Homo sapien
tgggcttggattcctgacaggacgg

SEQ ID NO: 1811926 - DNA, 25 bp, Homo sapien
aaggcgcccgctatcctgatttcca

SEQ ID NO: 1811927 - DNA, 25 bp, Homo sapien
tgatttccacagaaacgccaagccc

SEQ ID NO: 1811928 - DNA, 25 bp, Homo sapien
acgccaagcccggatgttttgccgg

SEQ ID NO: 1811929 - DNA, 25 bp, Homo sapien
tctgtccctggcgagcaggcaccct

SEQ ID NO: 1811930 - DNA, 25 bp, Homo sapien
cacctgggcccggtgactgcggtgg

SEQ ID NO: 1811931 - DNA, 25 bp, Homo sapien
tgtccctggcgagcaggcaccctca

SEQ ID NO: 1811932 - DNA, 25 bp, Homo sapien
ggcccggtgactgcggtggagttct

SEQ ID NO: 1811933 - DNA, 25 bp, Homo sapien
cctgatgttaataaccgccacaaag

SEQ ID NO: 1811934 - DNA, 25 bp, Homo sapien
tgatgttaataaccgccacaaagtc

SEQ ID NO: 1811935 - DNA, 25 bp, Homo sapien
tgttaataaccgccacaaagtccca

SEQ ID NO: 1811936 - DNA, 25 bp, Homo sapien
gatgttaataaccgccacaaagtcc

SEQ ID NO: 1811937 - DNA, 25 bp, Homo sapien
ctattgccgcaccgtcttgtcttgt

SEQ ID NO: 1811938 - DNA, 25 bp, Homo sapien
ttgccgcaccgtcttgtcttgtagg

SEQ ID NO: 1811939 - DNA, 25 bp, Homo sapien
tgccgcaccgtcttgtcttgtagga

SEQ ID NO: 1811940 - DNA, 25 bp, Homo sapien
tattgccgcaccgtcttgtcttgta

SEQ ID NO: 1811941 - DNA, 25 bp, Homo sapien
tgatttccatataaacgggaagccc

SEQ ID NO: 1811942 - DNA, 25 bp, Homo sapien
tccagcttgtgacgctgacttctgg

SEQ ID NO: 1811943 - DNA, 25 bp, Homo sapien
agtcatgctgttcaagcctgatttc

SEQ ID NO: 1811944 - DNA, 25 bp, Homo sapien
tgtgtctccagcttgtgacgctgac

SEQ ID NO: 1811945 - DNA, 25 bp, Homo sapien
aaagggcttcacactatttctagtc

SEQ ID NO: 1811946 - DNA, 25 bp, Homo sapien
taataggcgttttgggagagaagac

SEQ ID NO: 1811947 - DNA, 25 bp, Homo sapien
tcacatcatgagttaagccacagag

SEQ ID NO: 1811948 - DNA, 25 bp, Homo sapien
tcatgggcctcatgtgtaataggcg

SEQ ID NO: 1811949 - DNA, 25 bp, Homo sapien
tgaaactcactctagggctggtccc

SEQ ID NO: 1811950 - DNA, 25 bp, Homo sapien
catgttgttgccgtgtgtgctggaa

SEQ ID NO: 1811951 - DNA, 25 bp, Homo sapien
gactgtcatgggctcgcttttggga

SEQ ID NO: 1811952 - DNA, 25 bp, Homo sapien
taaactggcactaatggtgaaactc

SEQ ID NO: 1811953 - DNA, 25 bp, Homo sapien
gaacctcctggctgcttgtgggtgt

SEQ ID NO: 1811954 - DNA, 25 bp, Homo sapien
ctgtgtggatttgcatgacgggctc

SEQ ID NO: 1811955 - DNA, 25 bp, Homo sapien
tgtggatttgcatgacgggctctgc

SEQ ID NO: 1811956 - DNA, 25 bp, Homo sapien
cacatgtccgggtcttgggaacctc

SEQ ID NO: 1811957 - DNA, 25 bp, Homo sapien
ccatgccttgttttcccagggacct

SEQ ID NO: 1811958 - DNA, 25 bp, Homo sapien
atgccttgttttcccagggacctca

SEQ ID NO: 1811959 - DNA, 25 bp, Homo sapien
tgccttgttttcccagggacctcat

SEQ ID NO: 1811960 - DNA, 25 bp, Homo sapien
catgccttgttttcccagggacctc

SEQ ID NO: 1811961 - DNA, 25 bp, Homo sapien
catcactgtctttcttagtccaggt

SEQ ID NO: 1811962 - DNA, 25 bp, Homo sapien
acactcgtctgctccatacttgtag

SEQ ID NO: 1811963 - DNA, 25 bp, Homo sapien
cattggtcacggaatcttcagtcac

SEQ ID NO: 1811964 - DNA, 25 bp, Homo sapien
tagtccaggtctttattggatttcc

SEQ ID NO: 1811965 - DNA, 25 bp, Homo sapien
tgggtgggcctttgaatacctacag

SEQ ID NO: 1811966 - DNA, 25 bp, Homo sapien
ggcctcatgggtgggcctttgaata

SEQ ID NO: 1811967 - DNA, 25 bp, Homo sapien
tctgaatccacgtgaccagtgtgag

SEQ ID NO: 1811968 - DNA, 25 bp, Homo sapien
tccacgtgaccagtgtgagggcctc

SEQ ID NO: 1811969 - DNA, 25 bp, Homo sapien
tgtgaatccacatgaccagcatgag

SEQ ID NO: 1811970 - DNA, 25 bp, Homo sapien
catgagggccgcatgggtggatcct

SEQ ID NO: 1811971 - DNA, 25 bp, Homo sapien
gcatgggtggatcctctgaatccac

SEQ ID NO: 1811972 - DNA, 25 bp, Homo sapien
tgaatccacatgaccagcatgagcg

SEQ ID NO: 1811973 - DNA, 25 bp, Homo sapien
ctgaatccatatgaccagcatgagg

SEQ ID NO: 1811974 - DNA, 25 bp, Homo sapien
cagcatgagggcctcatggttggat

SEQ ID NO: 1811975 - DNA, 25 bp, Homo sapien
gaccagcatgagggcctcatggttg

SEQ ID NO: 1811976 - DNA, 25 bp, Homo sapien
catgagggcctcatggttggatcct

SEQ ID NO: 1811977 - DNA, 25 bp, Homo sapien
gcatgagggcctcatggttggatcc

SEQ ID NO: 1811978 - DNA, 25 bp, Homo sapien
tcgaatccacgtgaccagtgtgatg

SEQ ID NO: 1811979 - DNA, 25 bp, Homo sapien
tgcatgggtgtatcctttgaatcca

SEQ ID NO: 1811980 - DNA, 25 bp, Homo sapien
ggtggatttttcgaatccacgtgac

SEQ ID NO: 1811981 - DNA, 25 bp, Homo sapien
tgtgatggctgcatgggtgtatcct

SEQ ID NO: 1811982 - DNA, 25 bp, Homo sapien
tatcagtctggccatggatccatgt

SEQ ID NO: 1811983 - DNA, 25 bp, Homo sapien
tcctgctgatgagtagcaccctaca

SEQ ID NO: 1811984 - DNA, 25 bp, Homo sapien
tccttcagacaaaggattccatcct

SEQ ID NO: 1811985 - DNA, 25 bp, Homo sapien
tgatcaagggtccttcagacaaagg

SEQ ID NO: 1811986 - DNA, 25 bp, Homo sapien
aagatgatctcgagtggtccattct

SEQ ID NO: 1811987 - DNA, 25 bp, Homo sapien
gcccgcagcacagaggtggtactga

SEQ ID NO: 1811988 - DNA, 25 bp, Homo sapien
tggtactgaacggtcacaccttgca

SEQ ID NO: 1811989 - DNA, 25 bp, Homo sapien
cctgcacacaggaaattgttactgc

SEQ ID NO: 1811990 - DNA, 25 bp, Homo sapien
gtggagttcggaggaaaagggctca

SEQ ID NO: 1811991 - DNA, 25 bp, Homo sapien
tggagttcggaggaaaagggctcag

SEQ ID NO: 1811992 - DNA, 25 bp, Homo sapien
cgccgtgctagtgcgagggtctcca

SEQ ID NO: 1811993 - DNA, 25 bp, Homo sapien
gcgatttgagggttccgccgtgacc

SEQ ID NO: 1811994 - DNA, 25 bp, Homo sapien
tgagatcggcgctttgagaactgag

SEQ ID NO: 1811995 - DNA, 25 bp, Homo sapien
gtgaccgcttccaacggcggacacg

SEQ ID NO: 1811996 - DNA, 25 bp, Homo sapien
gcgctttatacatccggacccgagg

SEQ ID NO: 1811997 - DNA, 25 bp, Homo sapien
tggtctgtcgctgggactgtccctt

SEQ ID NO: 1811998 - DNA, 25 bp, Homo sapien
gaggcgctcagcaccggagcctgtc

SEQ ID NO: 1811999 - DNA, 25 bp, Homo sapien
cgctaggtccgtaagtgagccggcc

SEQ ID NO: 1812000 - DNA, 25 bp, Homo sapien
tacagatccgcatctcccttgaggc

SEQ ID NO: 1812001 - DNA, 25 bp, Homo sapien
gctgctggcggagacgtacagatcc

SEQ ID NO: 1812002 - DNA, 25 bp, Homo sapien
gccgattgcagctcgtagtcgtcga

SEQ ID NO: 1812003 - DNA, 25 bp, Homo sapien
atctcgaactcgctctccaggtggg

SEQ ID NO: 1812004 - DNA, 25 bp, Homo sapien
taaaggtccgtatcaccgtatggca

SEQ ID NO: 1812005 - DNA, 25 bp, Homo sapien
tcataggtatgacaaatggcccact

SEQ ID NO: 1812006 - DNA, 25 bp, Homo sapien
tgctgtcagcagagtacaccaggac

SEQ ID NO: 1812007 - DNA, 25 bp, Homo sapien
tatatcccagagtgtggtcaacgac

SEQ ID NO: 1812008 - DNA, 25 bp, Homo sapien
gattaagacctacccatggcagtgt

SEQ ID NO: 1812009 - DNA, 25 bp, Homo sapien
tgtgaggcatagacacagcccatgt

SEQ ID NO: 1812010 - DNA, 25 bp, Homo sapien
catgcattatatgtggacaacccca

SEQ ID NO: 1812011 - DNA, 25 bp, Homo sapien
caggcagatttcaaccaaagagtca

SEQ ID NO: 1812012 - DNA, 25 bp, Homo sapien
gtctgaagggtaaggagtccaacaa

SEQ ID NO: 1812013 - DNA, 25 bp, Homo sapien
tacacgccaatgtatgcatgagaca

SEQ ID NO: 1812014 - DNA, 25 bp, Homo sapien
gctttcttcagtaggcagtcttaca

SEQ ID NO: 1812015 - DNA, 25 bp, Homo sapien
tacattgtaggcagactcctgtcaa

SEQ ID NO: 1812016 - DNA, 25 bp, Homo sapien
tcaagaccgtgacgttcggatgccc

SEQ ID NO: 1812017 - DNA, 25 bp, Homo sapien
catttggcagggtgggaataaagca

SEQ ID NO: 1812018 - DNA, 25 bp, Homo sapien
gagtgaacgtcattttgtaacagtc

SEQ ID NO: 1812019 - DNA, 25 bp, Homo sapien
gtctaacaggttatgaaggtggcag

SEQ ID NO: 1812020 - DNA, 25 bp, Homo sapien
tgtagcagtaacaacagagggtaac

SEQ ID NO: 1812021 - DNA, 25 bp, Homo sapien
taaatggtttgagcatgtgacacta

SEQ ID NO: 1812022 - DNA, 25 bp, Homo sapien
ttagtacaggtaccataaccaagag

SEQ ID NO: 1812023 - DNA, 25 bp, Homo sapien
gagggtaactacactgcaagactta

SEQ ID NO: 1812024 - DNA, 25 bp, Homo sapien
cagtgtcctgttaactcttgagtgc

SEQ ID NO: 1812025 - DNA, 25 bp, Homo sapien
gagtgtgttctactggtctgctaag

SEQ ID NO: 1812026 - DNA, 25 bp, Homo sapien
ttaataactgaaagcaagtgagctc

SEQ ID NO: 1812027 - DNA, 25 bp, Homo sapien
gaagtggccgctcaaagcacagtgt

SEQ ID NO: 1812028 - DNA, 25 bp, Homo sapien
ataaagagtattccgtaagtaattg

SEQ ID NO: 1812029 - DNA, 25 bp, Homo sapien
cgtaagtaattgaggtgactggcat

SEQ ID NO: 1812030 - DNA, 25 bp, Homo sapien
tagcaacttaaaccgggaacgcatg

SEQ ID NO: 1812031 - DNA, 25 bp, Homo sapien
aagaacgtcaacgaattacagacca

SEQ ID NO: 1812032 - DNA, 25 bp, Homo sapien
ttagtgcggtcctacaagtgccctg

SEQ ID NO: 1812033 - DNA, 25 bp, Homo sapien
tggtgcagcccgagatcagtaataa

SEQ ID NO: 1812034 - DNA, 25 bp, Homo sapien
agaacaagtcatctgcaggcgcagg

SEQ ID NO: 1812035 - DNA, 25 bp, Homo sapien
caatgtgacgcgctagaataatccc

SEQ ID NO: 1812036 - DNA, 25 bp, Homo sapien
tctagagacagaatcccggagggag

SEQ ID NO: 1812037 - DNA, 25 bp, Homo sapien
cagttgctgcgcaaatgtccttgaa

SEQ ID NO: 1812038 - DNA, 25 bp, Homo sapien
tcagacaagaagtgcggcggaagct

SEQ ID NO: 1812039 - DNA, 25 bp, Homo sapien
cgctaaactctaccctgatcagtga

SEQ ID NO: 1812040 - DNA, 25 bp, Homo sapien
ctcagggtgtaacttagtaaacagt

SEQ ID NO: 1812041 - DNA, 25 bp, Homo sapien
tatttccagggcctaactcagggtg

SEQ ID NO: 1812042 - DNA, 25 bp, Homo sapien
aactggaacgattgatgtacctgaa

SEQ ID NO: 1812043 - DNA, 25 bp, Homo sapien
taatttacctttgatcacacagcta

SEQ ID NO: 1812044 - DNA, 25 bp, Homo sapien
taagagattaaagtggctgtgacaa

SEQ ID NO: 1812045 - DNA, 25 bp, Homo sapien
ctagcattcgggtgaagtgttgaag

SEQ ID NO: 1812046 - DNA, 25 bp, Homo sapien
tcctgagaatagttcacaagattga

SEQ ID NO: 1812047 - DNA, 25 bp, Homo sapien
ccttattcagccagtaaattctggt

SEQ ID NO: 1812048 - DNA, 25 bp, Homo sapien
gactagaagcagcaccatgtaggag

SEQ ID NO: 1812049 - DNA, 25 bp, Homo sapien
ggagctgaaatatgattcctgcctg

SEQ ID NO: 1812050 - DNA, 25 bp, Homo sapien
aaagtttggccagaattattcttag

SEQ ID NO: 1812051 - DNA, 25 bp, Homo sapien
tgcgggagtgcatgaaagtttggcc

SEQ ID NO: 1812052 - DNA, 25 bp, Homo sapien
gaagctaaagtgttccctgtgtctt

SEQ ID NO: 1812053 - DNA, 25 bp, Homo sapien
tcacattgaagatgagaagctaaag

SEQ ID NO: 1812054 - DNA, 25 bp, Homo sapien
aaggatgagacccaaactaagctaa

SEQ ID NO: 1812055 - DNA, 25 bp, Homo sapien
ttttttctagtggtagcacctcagt

SEQ ID NO: 1812056 - DNA, 25 bp, Homo sapien
ttagtttgcccaaggatacaaagct

SEQ ID NO: 1812057 - DNA, 25 bp, Homo sapien
tttgataaaccaggcagaatagtgc

SEQ ID NO: 1812058 - DNA, 25 bp, Homo sapien
taagtcgattggaagggtggttaca

SEQ ID NO: 1812059 - DNA, 25 bp, Homo sapien
cagcttgcggatttcctgagagtac

SEQ ID NO: 1812060 - DNA, 25 bp, Homo sapien
aacttccggtgccccgctgcggcgc

SEQ ID NO: 1812061 - DNA, 25 bp, Homo sapien
catgctttctggatatcgtgagagc

SEQ ID NO: 1812062 - DNA, 25 bp, Homo sapien
tcaggtatagttgctgttaacatgc

SEQ ID NO: 1812063 - DNA, 25 bp, Homo sapien
catctcttaagaactgaatgcactc

SEQ ID NO: 1812064 - DNA, 25 bp, Homo sapien
gagtattatatatttcagacacatc

SEQ ID NO: 1812065 - DNA, 25 bp, Homo sapien
gagaaagacatgtggtaatagggtc

SEQ ID NO: 1812066 - DNA, 25 bp, Homo sapien
tgagggagaaagacatgtggtaata

SEQ ID NO: 1812067 - DNA, 25 bp, Homo sapien
gaaagacatgtggtaatagggtccc

SEQ ID NO: 1812068 - DNA, 25 bp, Homo sapien
agacatgtggtaatagggtccccta

SEQ ID NO: 1812069 - DNA, 25 bp, Homo sapien
gactctgtgtagctcacacagtctg

SEQ ID NO: 1812070 - DNA, 25 bp, Homo sapien
ccattctgagttacaatgctattga

SEQ ID NO: 1812071 - DNA, 25 bp, Homo sapien
gattgttttccagcatacttcacca

SEQ ID NO: 1812072 - DNA, 25 bp, Homo sapien
tgaaacccaagattacaaattatat

SEQ ID NO: 1812073 - DNA, 25 bp, Homo sapien
ctcacgcttccccagtaatccagac

SEQ ID NO: 1812074 - DNA, 25 bp, Homo sapien
gaaccacggtgcatatcgaatttca

SEQ ID NO: 1812075 - DNA, 25 bp, Homo sapien
ctggaaaacttgtccactggaacca

SEQ ID NO: 1812076 - DNA, 25 bp, Homo sapien
taagaaatgtgaatggacagcctca

SEQ ID NO: 1812077 - DNA, 25 bp, Homo sapien
tctagacacgatgtcagtttcatta

SEQ ID NO: 1812078 - DNA, 25 bp, Homo sapien
tagcaggagattgtagactttccaa

SEQ ID NO: 1812079 - DNA, 25 bp, Homo sapien
tcacccaaggctcgttctagacacg

SEQ ID NO: 1812080 - DNA, 25 bp, Homo sapien
tcattaagctaagagaaatagcagg

SEQ ID NO: 1812081 - DNA, 25 bp, Homo sapien
ggggcattccttcccaatcagtaaa

SEQ ID NO: 1812082 - DNA, 25 bp, Homo sapien
ttgagcaagctcctcagatgaaagc

SEQ ID NO: 1812083 - DNA, 25 bp, Homo sapien
aagacttgagcaagctcctcagatg

SEQ ID NO: 1812084 - DNA, 25 bp, Homo sapien
aaggggcattccttcccaatcagta

SEQ ID NO: 1812085 - DNA, 25 bp, Homo sapien
tacgcaggttgagaccacacggaga

SEQ ID NO: 1812086 - DNA, 25 bp, Homo sapien
ggaggaatttcttcaggtgacgcaa

SEQ ID NO: 1812087 - DNA, 25 bp, Homo sapien
catgccataagacgttacgcaggtt

SEQ ID NO: 1812088 - DNA, 25 bp, Homo sapien
cacacggagagccaacgaagacttt

SEQ ID NO: 1812089 - DNA, 25 bp, Homo sapien
gtgttttgaaggtaactcttcagta

SEQ ID NO: 1812090 - DNA, 25 bp, Homo sapien
taagagatatgaaagagcgatgtgc

SEQ ID NO: 1812091 - DNA, 25 bp, Homo sapien
caaatcctcgaggtttgtaagagat

SEQ ID NO: 1812092 - DNA, 25 bp, Homo sapien
ttcagtaactgacccaatcctgccg

SEQ ID NO: 1812093 - DNA, 25 bp, Homo sapien
tctaatactgaaagcacctcataag

SEQ ID NO: 1812094 - DNA, 25 bp, Homo sapien
actgaaagcacctcataagtaacat

SEQ ID NO: 1812095 - DNA, 25 bp, Homo sapien
aatactgaaagcacctcataagtaa

SEQ ID NO: 1812096 - DNA, 25 bp, Homo sapien
tcttctaatactgaaagcacctcat

SEQ ID NO: 1812097 - DNA, 25 bp, Homo sapien
tcagcaacaatatggcgcagtcagc

SEQ ID NO: 1812098 - DNA, 25 bp, Homo sapien
ttttggacatctgttaagtgtggca

SEQ ID NO: 1812099 - DNA, 25 bp, Homo sapien
tcctaagtccagtctccagttgtgt

SEQ ID NO: 1812100 - DNA, 25 bp, Homo sapien
cagcagtcaggagtctttttggaca

SEQ ID NO: 1812101 - DNA, 25 bp, Homo sapien
aagatatttagtgaacataagcagg

SEQ ID NO: 1812102 - DNA, 25 bp, Homo sapien
tatttagtgaacataagcaggtcta

SEQ ID NO: 1812103 - DNA, 25 bp, Homo sapien
gatatttagtgaacataagcaggtc

SEQ ID NO: 1812104 - DNA, 25 bp, Homo sapien
atttagtgaacataagcaggtctaa

SEQ ID NO: 1812105 - DNA, 25 bp, Homo sapien
ctggaaggtcgcttttgtggccaca

SEQ ID NO: 1812106 - DNA, 25 bp, Homo sapien
tctggaaggtcgcttttgtggccac

SEQ ID NO: 1812107 - DNA, 25 bp, Homo sapien
tgagcctctggaaggtcgcttttgt

SEQ ID NO: 1812108 - DNA, 25 bp, Homo sapien
agtagatgagcctctggaaggtcgc

SEQ ID NO: 1812109 - DNA, 25 bp, Homo sapien
caaaggtggtataaagagctgttga

SEQ ID NO: 1812110 - DNA, 25 bp, Homo sapien
ttgatcaaaggtggtataaagagct

SEQ ID NO: 1812111 - DNA, 25 bp, Homo sapien
gatcaaaggtggtataaagagctgt

SEQ ID NO: 1812112 - DNA, 25 bp, Homo sapien
tcaaaggtggtataaagagctgttg

SEQ ID NO: 1812113 - DNA, 25 bp, Homo sapien
ttaggtgcacatgaacgctacccgg

SEQ ID NO: 1812114 - DNA, 25 bp, Homo sapien
cgaatgtccggacctctacaggtga

SEQ ID NO: 1812115 - DNA, 25 bp, Homo sapien
cgctccgtggctgacaagaggcatt

SEQ ID NO: 1812116 - DNA, 25 bp, Homo sapien
tgttcacctaatggaagaagctctg

SEQ ID NO: 1812117 - DNA, 25 bp, Homo sapien
gattttaccatcattcaagtgtttt

SEQ ID NO: 1812118 - DNA, 25 bp, Homo sapien
tgattttaccatcattcaagtgttt

SEQ ID NO: 1812119 - DNA, 25 bp, Homo sapien
aaagaaatcacggctctttcttgtg

SEQ ID NO: 1812120 - DNA, 25 bp, Homo sapien
aagaaatcacggctctttcttgtgt

SEQ ID NO: 1812121 - DNA, 25 bp, Homo sapien
taaaagaaatcacggctctttcttg

SEQ ID NO: 1812122 - DNA, 25 bp, Homo sapien
aaaagaaatcacggctctttcttgt

SEQ ID NO: 1812123 - DNA, 25 bp, Homo sapien
agctcttctcctacacccacaggac

SEQ ID NO: 1812124 - DNA, 25 bp, Homo sapien
gcagagctgcccaggtggtactgga

SEQ ID NO: 1812125 - DNA, 25 bp, Homo sapien
acaggacagaccagggagccagaga

SEQ ID NO: 1812126 - DNA, 25 bp, Homo sapien
cctctgaagccctgggtgggactct

SEQ ID NO: 1812127 - DNA, 25 bp, Homo sapien
tcatgtaagttgatctccccgtggc

SEQ ID NO: 1812128 - DNA, 25 bp, Homo sapien
agtcatcaacgaatctgagtagcag

SEQ ID NO: 1812129 - DNA, 25 bp, Homo sapien
tggcttaaatgatctcttatgcggg

SEQ ID NO: 1812130 - DNA, 25 bp, Homo sapien
taaaaactgatagcagacagtcatc

SEQ ID NO: 1812131 - DNA, 25 bp, Homo sapien
taaaagatgattaacagttaattac

SEQ ID NO: 1812132 - DNA, 25 bp, Homo sapien
gctgaatgagttaatctaattaatg

SEQ ID NO: 1812133 - DNA, 25 bp, Homo sapien
ggaggatactgtaactcagatatat

SEQ ID NO: 1812134 - DNA, 25 bp, Homo sapien
tttttctgatggaggatactgtaac

SEQ ID NO: 1812135 - DNA, 25 bp, Homo sapien
cctaccccatcgatttagcaaatat

SEQ ID NO: 1812136 - DNA, 25 bp, Homo sapien
cttttcaatacttagctgctgttac

SEQ ID NO: 1812137 - DNA, 25 bp, Homo sapien
tttccttttcaatacttagctgctg

SEQ ID NO: 1812138 - DNA, 25 bp, Homo sapien
gatgatgcaaatatcctaccccatc

SEQ ID NO: 1812139 - DNA, 25 bp, Homo sapien
gaagagaggaatctaaggcttcccg

SEQ ID NO: 1812140 - DNA, 25 bp, Homo sapien
caagctattctcaggactacaggca

SEQ ID NO: 1812141 - DNA, 25 bp, Homo sapien
cagaatgactccaaatgtgaagcca

SEQ ID NO: 1812142 - DNA, 25 bp, Homo sapien
tacgtaagtgcccaaatgaacaaag

SEQ ID NO: 1812143 - DNA, 25 bp, Homo sapien
ccctctgtgcacaaaactggagatg

SEQ ID NO: 1812144 - DNA, 25 bp, Homo sapien
tctatgcagctagaaaagcaagtgc

SEQ ID NO: 1812145 - DNA, 25 bp, Homo sapien
aataggcttgacatggcaggcaaat

SEQ ID NO: 1812146 - DNA, 25 bp, Homo sapien
gaactgtaggccacttagagtcccc

SEQ ID NO: 1812147 - DNA, 25 bp, Homo sapien
gactaatcaacaattctacggctga

SEQ ID NO: 1812148 - DNA, 25 bp, Homo sapien
gcaagactaatcaacaattctacgg

SEQ ID NO: 1812149 - DNA, 25 bp, Homo sapien
ctgcaagactaatcaacaattctac

SEQ ID NO: 1812150 - DNA, 25 bp, Homo sapien
caagactaatcaacaattctacggc

SEQ ID NO: 1812151 - DNA, 25 bp, Homo sapien
tgaaaaaccggatgacagcgagaac

SEQ ID NO: 1812152 - DNA, 25 bp, Homo sapien
aaccggatgacagcgagaactatag

SEQ ID NO: 1812153 - DNA, 25 bp, Homo sapien
ttttaagctgaaaaaccggatgaca

SEQ ID NO: 1812154 - DNA, 25 bp, Homo sapien
ggatgacagcgagaactatagcctt

SEQ ID NO: 1812155 - DNA, 25 bp, Homo sapien
cgagtgagttcttcggggaaaggca

SEQ ID NO: 1812156 - DNA, 25 bp, Homo sapien
acggcttgccgagtgagttcttcgg

SEQ ID NO: 1812157 - DNA, 25 bp, Homo sapien
ctgacggcttgccgagtgagttctt

SEQ ID NO: 1812158 - DNA, 25 bp, Homo sapien
ttgccgagtgagttcttcggggaaa

SEQ ID NO: 1812159 - DNA, 25 bp, Homo sapien
gacaattaaagtgctcacatcagtg

SEQ ID NO: 1812160 - DNA, 25 bp, Homo sapien
gatacgtgacaattaaagtgctcac

SEQ ID NO: 1812161 - DNA, 25 bp, Homo sapien
taaagatacgtgacaattaaagtgc

SEQ ID NO: 1812162 - DNA, 25 bp, Homo sapien
aatatttaaagatacgtgacaatta

SEQ ID NO: 1812163 - DNA, 25 bp, Homo sapien
ttttgtaatcaaagagtggcaggca

SEQ ID NO: 1812164 - DNA, 25 bp, Homo sapien
tttgtaatcaaagagtggcaggcat

SEQ ID NO: 1812165 - DNA, 25 bp, Homo sapien
gtaatcaaagagtggcaggcatttg

SEQ ID NO: 1812166 - DNA, 25 bp, Homo sapien
aagagtggcaggcatttgtttcaga

SEQ ID NO: 1812167 - DNA, 25 bp, Homo sapien
cacacaacgattctcaggcatatgg

SEQ ID NO: 1812168 - DNA, 25 bp, Homo sapien
taggaagacgatccaagtcctttaa

SEQ ID NO: 1812169 - DNA, 25 bp, Homo sapien
cgattctcaggcatatggtgataca

SEQ ID NO: 1812170 - DNA, 25 bp, Homo sapien
caagtcctttaacacacaacgattc

SEQ ID NO: 1812171 - DNA, 25 bp, Homo sapien
agccagggctagcggcgtatcgctg

SEQ ID NO: 1812172 - DNA, 25 bp, Homo sapien
agggctagcggcgtatcgctggttg

SEQ ID NO: 1812173 - DNA, 25 bp, Homo sapien
ccagggctagcggcgtatcgctggt

SEQ ID NO: 1812174 - DNA, 25 bp, Homo sapien
ggctagcggcgtatcgctggttggt

SEQ ID NO: 1812175 - DNA, 25 bp, Homo sapien
cagagctcacggagaagctggggcc

SEQ ID NO: 1812176 - DNA, 25 bp, Homo sapien
ggtgggaacaggtgtgctgcagagc

SEQ ID NO: 1812177 - DNA, 25 bp, Homo sapien
tgtgctgcagagctcacggagaagc

SEQ ID NO: 1812178 - DNA, 25 bp, Homo sapien
aacaggtgtgctgcagagctcacgg

SEQ ID NO: 1812179 - DNA, 25 bp, Homo sapien
tacgcaggtagttctgccgctggcg

SEQ ID NO: 1812180 - DNA, 25 bp, Homo sapien
tggcgagaccgcagcgtcctttcca

SEQ ID NO: 1812181 - DNA, 25 bp, Homo sapien
tggctggacacacggcggcactgtt

SEQ ID NO: 1812182 - DNA, 25 bp, Homo sapien
ggcactgttcgctgatgcttcggag

SEQ ID NO: 1812183 - DNA, 25 bp, Homo sapien
gaatgttgaccaactccagcgcaat

SEQ ID NO: 1812184 - DNA, 25 bp, Homo sapien
tgagcacaggggacagtagtctgat

SEQ ID NO: 1812185 - DNA, 25 bp, Homo sapien
cagcgcaatgagtaacagtatcagg

SEQ ID NO: 1812186 - DNA, 25 bp, Homo sapien
caactccagcgcaatgagtaacagt

SEQ ID NO: 1812187 - DNA, 25 bp, Homo sapien
taggtactgctgatactcatgcgca

SEQ ID NO: 1812188 - DNA, 25 bp, Homo sapien
tttaggtactgctgatactcatgcg

SEQ ID NO: 1812189 - DNA, 25 bp, Homo sapien
ttaggtactgctgatactcatgcgc

SEQ ID NO: 1812190 - DNA, 25 bp, Homo sapien
ggtactgctgatactcatgcgcatt

SEQ ID NO: 1812191 - DNA, 25 bp, Homo sapien
tctttatccattccattataaaatg

SEQ ID NO: 1812192 - DNA, 25 bp, Homo sapien
ttctttatccattccattataaaat

SEQ ID NO: 1812193 - DNA, 25 bp, Homo sapien
tatccattccattataaaatgaaac

SEQ ID NO: 1812194 - DNA, 25 bp, Homo sapien
tttatccattccattataaaatgaa

SEQ ID NO: 1812195 - DNA, 25 bp, Homo sapien
gtactgcaagatcgactttacaaac

SEQ ID NO: 1812196 - DNA, 25 bp, Homo sapien
accaggttctccgtgtactgcaaga

SEQ ID NO: 1812197 - DNA, 25 bp, Homo sapien
ttcttttcgtaactggtgtaagcca

SEQ ID NO: 1812198 - DNA, 25 bp, Homo sapien
tgttcttttcgtaactggtgtaagc

SEQ ID NO: 1812199 - DNA, 25 bp, Homo sapien
ttgtggatttcttggctaaatgtat

SEQ ID NO: 1812200 - DNA, 25 bp, Homo sapien
tgtggatttcttggctaaatgtatt

SEQ ID NO: 1812201 - DNA, 25 bp, Homo sapien
taaaagcatcctgacttacaagttt

SEQ ID NO: 1812202 - DNA, 25 bp, Homo sapien
catgcattcagaaggcccacgcaca

SEQ ID NO: 1812203 - DNA, 25 bp, Homo sapien
tcctgtagctaaattccacgtccat

SEQ ID NO: 1812204 - DNA, 25 bp, Homo sapien
gaacacttgtgaatttggaccaaca

SEQ ID NO: 1812205 - DNA, 25 bp, Homo sapien
tttactctccaatatggcctgtcag

SEQ ID NO: 1812206 - DNA, 25 bp, Homo sapien
gtggccttggaacccgcttcagcgg

SEQ ID NO: 1812207 - DNA, 25 bp, Homo sapien
ctggatggatggtccccctcacggt

SEQ ID NO: 1812208 - DNA, 25 bp, Homo sapien
ccttggaacccgcttcagcgggaga

SEQ ID NO: 1812209 - DNA, 25 bp, Homo sapien
ctcacggtggccttggaacccgctt

SEQ ID NO: 1812210 - DNA, 25 bp, Homo sapien
tggctctcggaactcaaggtcctga

SEQ ID NO: 1812211 - DNA, 25 bp, Homo sapien
cagcaagcagctaattcatggtaac

SEQ ID NO: 1812212 - DNA, 25 bp, Homo sapien
tggcctcagtacgaatttgggaagc

SEQ ID NO: 1812213 - DNA, 25 bp, Homo sapien
tccactctgaaaggcgtggcctcag

SEQ ID NO: 1812214 - DNA, 25 bp, Homo sapien
cttgccccttactcctgagcctcct

SEQ ID NO: 1812215 - DNA, 25 bp, Homo sapien
ccgcccttgccccttactcctgagc

SEQ ID NO: 1812216 - DNA, 25 bp, Homo sapien
ccatccgcccttgccccttactcct

SEQ ID NO: 1812217 - DNA, 25 bp, Homo sapien
acctgccaccatccgcccttgcccc

SEQ ID NO: 1812218 - DNA, 25 bp, Homo sapien
ggcaacgtagctgcttctatttcct

SEQ ID NO: 1812219 - DNA, 25 bp, Homo sapien
ggtgagacagtgtagataaagcctg

SEQ ID NO: 1812220 - DNA, 25 bp, Homo sapien
tgagacagtgtagataaagcctggg

SEQ ID NO: 1812221 - DNA, 25 bp, Homo sapien
gacagtgtagataaagcctggggcc

SEQ ID NO: 1812222 - DNA, 25 bp, Homo sapien
ggaaattgtgtctcatccacctgct

SEQ ID NO: 1812223 - DNA, 25 bp, Homo sapien
cagcagagctgttttaacacagaca

SEQ ID NO: 1812224 - DNA, 25 bp, Homo sapien
ggaattaaccatcttcccgggagca

SEQ ID NO: 1812225 - DNA, 25 bp, Homo sapien
tgtcctgtcttagcccagcagagct

SEQ ID NO: 1812226 - DNA, 25 bp, Homo sapien
gcaccttgtccagaaccgcctcgtc

SEQ ID NO: 1812227 - DNA, 25 bp, Homo sapien
ttttctgctgtgccgcatttatccc

SEQ ID NO: 1812228 - DNA, 25 bp, Homo sapien
accttgtccagaaccgcctcgtctt

SEQ ID NO: 1812229 - DNA, 25 bp, Homo sapien
gctgtgccgcatttatcccatgcat

SEQ ID NO: 1812230 - DNA, 25 bp, Homo sapien
tcagtggaaggaggtccactctcct

SEQ ID NO: 1812231 - DNA, 25 bp, Homo sapien
cagtggaaggaggtccactctcctg

SEQ ID NO: 1812232 - DNA, 25 bp, Homo sapien
ccctctgatctttcagggagcccag

SEQ ID NO: 1812233 - DNA, 25 bp, Homo sapien
ctctgatctttcagggagcccaggt

SEQ ID NO: 1812234 - DNA, 25 bp, Homo sapien
cctctgatctttcagggagcccagg

SEQ ID NO: 1812235 - DNA, 25 bp, Homo sapien
tgggctatttgggagcgagtcatca

SEQ ID NO: 1812236 - DNA, 25 bp, Homo sapien
aagtttatctttcaagcaggcccac

SEQ ID NO: 1812237 - DNA, 25 bp, Homo sapien
aaagtttatctttcaagcaggccca

SEQ ID NO: 1812238 - DNA, 25 bp, Homo sapien
gtgtgcgatgactcaggtccctcac

SEQ ID NO: 1812239 - DNA, 25 bp, Homo sapien
tcttcctgctgccggccagaaggag

SEQ ID NO: 1812240 - DNA, 25 bp, Homo sapien
ggtccctcactggagacaccagctg

SEQ ID NO: 1812241 - DNA, 25 bp, Homo sapien
cactggagacaccagctgagaggag

SEQ ID NO: 1812242 - DNA, 25 bp, Homo sapien
tggcctttctgggccacaccaggac

SEQ ID NO: 1812243 - DNA, 25 bp, Homo sapien
acagtctggccctggcagttgagga

SEQ ID NO: 1812244 - DNA, 25 bp, Homo sapien
gaaaccaagggctcttatgaaatgg

SEQ ID NO: 1812245 - DNA, 25 bp, Homo sapien
agggaaaccccagcatcggcagagg

SEQ ID NO: 1812246 - DNA, 25 bp, Homo sapien
caacatgcatgtgaggtgcggccct

SEQ ID NO: 1812247 - DNA, 25 bp, Homo sapien
ttttccacgtgaagacagcaaagcg

SEQ ID NO: 1812248 - DNA, 25 bp, Homo sapien
tatccaagggcgagtagcaagaaca

SEQ ID NO: 1812249 - DNA, 25 bp, Homo sapien
caaactaccgaactactggagggag

SEQ ID NO: 1812250 - DNA, 25 bp, Homo sapien
ggcttagcagcccacaaatgtactt

SEQ ID NO: 1812251 - DNA, 25 bp, Homo sapien
aatatgtgggtattgggtccagctc

SEQ ID NO: 1812252 - DNA, 25 bp, Homo sapien
cctttcacagcaccagtgtttactc

SEQ ID NO: 1812253 - DNA, 25 bp, Homo sapien
ggtccagctcgtggccttctctagc

SEQ ID NO: 1812254 - DNA, 25 bp, Homo sapien
tctgtggtgtggagagcgctgtctg

SEQ ID NO: 1812255 - DNA, 25 bp, Homo sapien
tggacagctctgtggtttagagatc

SEQ ID NO: 1812256 - DNA, 25 bp, Homo sapien
tttagagatctctgtggtgtggcga

SEQ ID NO: 1812257 - DNA, 25 bp, Homo sapien
tctctgtatgtggagagttctgtga

SEQ ID NO: 1812258 - DNA, 25 bp, Homo sapien
tatcagtgctgggagtgtcagtgca

SEQ ID NO: 1812259 - DNA, 25 bp, Homo sapien
gtgttgggggtatcagtgctgggag

SEQ ID NO: 1812260 - DNA, 25 bp, Homo sapien
gggtatcagtgctgggagtgtcagt

SEQ ID NO: 1812261 - DNA, 25 bp, Homo sapien
tgggagtgtcagtgcagggctgtca

SEQ ID NO: 1812262 - DNA, 25 bp, Homo sapien
cacacaccgaactcagagcagagtc

SEQ ID NO: 1812263 - DNA, 25 bp, Homo sapien
aacctttgctccaacaacacaggct

SEQ ID NO: 1812264 - DNA, 25 bp, Homo sapien
tgtagcatgctgtctttccaaacgt

SEQ ID NO: 1812265 - DNA, 25 bp, Homo sapien
aaaaggatggaagcgtttcaatgta

SEQ ID NO: 1812266 - DNA, 25 bp, Homo sapien
aggaaaacaagacccacttggctgg

SEQ ID NO: 1812267 - DNA, 25 bp, Homo sapien
aaggttgagcgtggcaaaggcacac

SEQ ID NO: 1812268 - DNA, 25 bp, Homo sapien
gaaaaggtttgatttgcccatgaaa

SEQ ID NO: 1812269 - DNA, 25 bp, Homo sapien
acctgtggaggcgagagtttgaaaa

SEQ ID NO: 1812270 - DNA, 25 bp, Homo sapien
tgaacagccagcacgatgccgtcgg

SEQ ID NO: 1812271 - DNA, 25 bp, Homo sapien
aaaggtaggtgctgacatcgaggcc

SEQ ID NO: 1812272 - DNA, 25 bp, Homo sapien
ctagccttgtggtaatggcctgggc

SEQ ID NO: 1812273 - DNA, 25 bp, Homo sapien
caggtttgtccctggctccgtgggc

SEQ ID NO: 1812274 - DNA, 25 bp, Homo sapien
ctgcaggtgcgggaggacccctcct

SEQ ID NO: 1812275 - DNA, 25 bp, Homo sapien
tgcaggtgcgggaggacccctcctt

SEQ ID NO: 1812276 - DNA, 25 bp, Homo sapien
gcaggtgcgggaggacccctccttc

SEQ ID NO: 1812277 - DNA, 25 bp, Homo sapien
gtctgcaggtatgggagaacccctt

SEQ ID NO: 1812278 - DNA, 25 bp, Homo sapien
tgcaggtatgggagaaccccttcat

SEQ ID NO: 1812279 - DNA, 25 bp, Homo sapien
caggtatgggagaaccccttcatcc

SEQ ID NO: 1812280 - DNA, 25 bp, Homo sapien
ggtatgggagaaccccttcatccat

SEQ ID NO: 1812281 - DNA, 25 bp, Homo sapien
caattacacattgtccatttacaaa

SEQ ID NO: 1812282 - DNA, 25 bp, Homo sapien
tatagacaattacacattgtccatt

SEQ ID NO: 1812283 - DNA, 25 bp, Homo sapien
gacaattacacattgtccatttaca

SEQ ID NO: 1812284 - DNA, 25 bp, Homo sapien
taaatatagacaattacacattgtc

SEQ ID NO: 1812285 - DNA, 25 bp, Homo sapien
catctggtaatcaccaaacctgagg

SEQ ID NO: 1812286 - DNA, 25 bp, Homo sapien
tgaaggcagctcctcgagagggtcg

SEQ ID NO: 1812287 - DNA, 25 bp, Homo sapien
ttacatctggtaatcaccaaacctg

SEQ ID NO: 1812288 - DNA, 25 bp, Homo sapien
acatctggtaatcaccaaacctgag

SEQ ID NO: 1812289 - DNA, 25 bp, Homo sapien
catgagggacttgatgtagggaatc

SEQ ID NO: 1812290 - DNA, 25 bp, Homo sapien
acttgatgtagggaatccgtaggta

SEQ ID NO: 1812291 - DNA, 25 bp, Homo sapien
agggacttgatgtagggaatccgta

SEQ ID NO: 1812292 - DNA, 25 bp, Homo sapien
tgatgtagggaatccgtaggtagaa

SEQ ID NO: 1812293 - DNA, 25 bp, Homo sapien
tcatcggtgttgaagggttagagca

SEQ ID NO: 1812294 - DNA, 25 bp, Homo sapien
gggtgtgagaagacgcttcctcatc

SEQ ID NO: 1812295 - DNA, 25 bp, Homo sapien
agggttagagcaaaccagccgccct

SEQ ID NO: 1812296 - DNA, 25 bp, Homo sapien
tgtgagaagacgcttcctcatcctt

SEQ ID NO: 1812297 - DNA, 25 bp, Homo sapien
tagacttcttcgcaaccagtcggcg

SEQ ID NO: 1812298 - DNA, 25 bp, Homo sapien
gcggtggactctgctgatctcttca

SEQ ID NO: 1812299 - DNA, 25 bp, Homo sapien
gaaatgagtggctctacgacggccc

SEQ ID NO: 1812300 - DNA, 25 bp, Homo sapien
cgaatttccgaatccttgggtctgt

SEQ ID NO: 1812301 - DNA, 25 bp, Homo sapien
ggagagtcttcacccgtgttccatc

SEQ ID NO: 1812302 - DNA, 25 bp, Homo sapien
gtgttccatccacggccttctaacg

SEQ ID NO: 1812303 - DNA, 25 bp, Homo sapien
acggccttctaacggccggtgctgt

SEQ ID NO: 1812304 - DNA, 25 bp, Homo sapien
aggaggcaatggagagtcttcaccc

SEQ ID NO: 1812305 - DNA, 25 bp, Homo sapien
agtcacccgagagcggtcacagaca

SEQ ID NO: 1812306 - DNA, 25 bp, Homo sapien
tttaacgtgatgagcgtgacagtca

SEQ ID NO: 1812307 - DNA, 25 bp, Homo sapien
gacagtcacccgagagcggtcacag

SEQ ID NO: 1812308 - DNA, 25 bp, Homo sapien
agggagatggagatcgtttttaacg

SEQ ID NO: 1812309 - DNA, 25 bp, Homo sapien
gaggctgtgtcacggcgcgccctca

SEQ ID NO: 1812310 - DNA, 25 bp, Homo sapien
tctgatctacctataaccggaagcc

SEQ ID NO: 1812311 - DNA, 25 bp, Homo sapien
accatcaccagacgtcctgaggctg

SEQ ID NO: 1812312 - DNA, 25 bp, Homo sapien
cagactaaggcatacgtaactattc

SEQ ID NO: 1812313 - DNA, 25 bp, Homo sapien
cttgggtgcagcttagaccggatgt

SEQ ID NO: 1812314 - DNA, 25 bp, Homo sapien
cacacctctttgcttgggaaaggtg

SEQ ID NO: 1812315 - DNA, 25 bp, Homo sapien
aaggtgatgatgagactggtctgcc

SEQ ID NO: 1812316 - DNA, 25 bp, Homo sapien
accggatgtaggtgtgactgcagct

SEQ ID NO: 1812317 - DNA, 25 bp, Homo sapien
gagacccaggatccctgtcatttcc

SEQ ID NO: 1812318 - DNA, 25 bp, Homo sapien
cttagctggagaattctcattctcc

SEQ ID NO: 1812319 - DNA, 25 bp, Homo sapien
tggagaattctcattctccaggcag

SEQ ID NO: 1812320 - DNA, 25 bp, Homo sapien
tggggagacccaggatccctgtcat

SEQ ID NO: 1812321 - DNA, 25 bp, Homo sapien
tggcagctgaatgttgctctggatc

SEQ ID NO: 1812322 - DNA, 25 bp, Homo sapien
tgaatgttgctctggatcagtacag

SEQ ID NO: 1812323 - DNA, 25 bp, Homo sapien
tgctctggatcagtacagtcctgca

SEQ ID NO: 1812324 - DNA, 25 bp, Homo sapien
ctttttcacagccgtgggcatttct

SEQ ID NO: 1812325 - DNA, 25 bp, Homo sapien
catgctggtaccagctgaagagctc

SEQ ID NO: 1812326 - DNA, 25 bp, Homo sapien
ttccagggcgtacagttccagtgcc

SEQ ID NO: 1812327 - DNA, 25 bp, Homo sapien
agctccattccagggcgtacagttc

SEQ ID NO: 1812328 - DNA, 25 bp, Homo sapien
tgtgtccctgaagtaaccatgctgg

SEQ ID NO: 1812329 - DNA, 25 bp, Homo sapien
cacttgaagttggtctcatcgtcct

SEQ ID NO: 1812330 - DNA, 25 bp, Homo sapien
ctcatcgtccttgcatataaaatgg

SEQ ID NO: 1812331 - DNA, 25 bp, Homo sapien
ttgaagttggtctcatcgtccttgc

SEQ ID NO: 1812332 - DNA, 25 bp, Homo sapien
tcaccacttgaagttggtctcatcg

SEQ ID NO: 1812333 - DNA, 25 bp, Homo sapien
tggactgaatactccagttacaagg

SEQ ID NO: 1812334 - DNA, 25 bp, Homo sapien
atggactgaatactccagttacaag

SEQ ID NO: 1812335 - DNA, 25 bp, Homo sapien
ctgaatactccagttacaaggcaca

SEQ ID NO: 1812336 - DNA, 25 bp, Homo sapien
gactgaatactccagttacaaggca

SEQ ID NO: 1812337 - DNA, 25 bp, Homo sapien
ccattcagaactagatggagtgcaa

SEQ ID NO: 1812338 - DNA, 25 bp, Homo sapien
gcaaagttatccttcaggtacgaag

SEQ ID NO: 1812339 - DNA, 25 bp, Homo sapien
ggacaaagggaattctaataccagc

SEQ ID NO: 1812340 - DNA, 25 bp, Homo sapien
agaattcactagcaccaggccagac

SEQ ID NO: 1812341 - DNA, 25 bp, Homo sapien
tccatcagtgtaggtgacatcttca

SEQ ID NO: 1812342 - DNA, 25 bp, Homo sapien
catcagtgtaggtgacatcttcagg

SEQ ID NO: 1812343 - DNA, 25 bp, Homo sapien
agtgtaggtgacatcttcaggcctc

SEQ ID NO: 1812344 - DNA, 25 bp, Homo sapien
tcagtgtaggtgacatcttcaggcc

SEQ ID NO: 1812345 - DNA, 25 bp, Homo sapien
aacgcggcctgaggagagccggaga

SEQ ID NO: 1812346 - DNA, 25 bp, Homo sapien
agcattgcccggctggcgagacctc

SEQ ID NO: 1812347 - DNA, 25 bp, Homo sapien
tcagaagcccgtgggttcccagcgc

SEQ ID NO: 1812348 - DNA, 25 bp, Homo sapien
agacctcccgtgaggcgcgaacgcg

SEQ ID NO: 1812349 - DNA, 25 bp, Homo sapien
gtccccggcgtctgatgcctgcgcc

SEQ ID NO: 1812350 - DNA, 25 bp, Homo sapien
gacgtccccggcgtctgatgcctgc

SEQ ID NO: 1812351 - DNA, 25 bp, Homo sapien
acgtccccggcgtctgatgcctgcg

SEQ ID NO: 1812352 - DNA, 25 bp, Homo sapien
ccccggcgtctgatgcctgcgcctc

SEQ ID NO: 1812353 - DNA, 25 bp, Homo sapien
accaggttcgcggtggtctcctgca

SEQ ID NO: 1812354 - DNA, 25 bp, Homo sapien
tgtgacgtcaccagcctcgcgggtg

SEQ ID NO: 1812355 - DNA, 25 bp, Homo sapien
gggctcacgggtagtctcctccacc

SEQ ID NO: 1812356 - DNA, 25 bp, Homo sapien
tggtctccaccgtgacgtcaccggg

SEQ ID NO: 1812357 - DNA, 25 bp, Homo sapien
gacacagttgtttgcctttcgtggg

SEQ ID NO: 1812358 - DNA, 25 bp, Homo sapien
ctccgcttgggctgtctcctcccgg

SEQ ID NO: 1812359 - DNA, 25 bp, Homo sapien
tttgcctttcgtgggtggtgccagc

SEQ ID NO: 1812360 - DNA, 25 bp, Homo sapien
tctactgggacctcgtcctggttcc

SEQ ID NO: 1812361 - DNA, 25 bp, Homo sapien
cagctgggttagctccctgcactcc

SEQ ID NO: 1812362 - DNA, 25 bp, Homo sapien
agctggtcagctgggttagctccct

SEQ ID NO: 1812363 - DNA, 25 bp, Homo sapien
tggtcagctgggttagctccctgca

SEQ ID NO: 1812364 - DNA, 25 bp, Homo sapien
ggtcagctgggttagctccctgcac

SEQ ID NO: 1812365 - DNA, 25 bp, Homo sapien
ccctttgacatcgtcaggtgtgcca

SEQ ID NO: 1812366 - DNA, 25 bp, Homo sapien
ttgacatcgtcaggtgtgccaggcc

SEQ ID NO: 1812367 - DNA, 25 bp, Homo sapien
catggacacggaagtctccagctcc

SEQ ID NO: 1812368 - DNA, 25 bp, Homo sapien
gagcaccaccctgcttttgcccatg

SEQ ID NO: 1812369 - DNA, 25 bp, Homo sapien
cgggtgcaggcgtggactagcttgg

SEQ ID NO: 1812370 - DNA, 25 bp, Homo sapien
acctcgggtgcaggcgtggactagc

SEQ ID NO: 1812371 - DNA, 25 bp, Homo sapien
tggctgcaggacctcggttgcaggt

SEQ ID NO: 1812372 - DNA, 25 bp, Homo sapien
aggactgcaggacctcgggtgcaag

SEQ ID NO: 1812373 - DNA, 25 bp, Homo sapien
tgcaggtgtggaccagcttggtggc

SEQ ID NO: 1812374 - DNA, 25 bp, Homo sapien
ggtgcaggtgtggaccagcttggtg

SEQ ID NO: 1812375 - DNA, 25 bp, Homo sapien
tcaggtgcaggtgtggaccagcttg

SEQ ID NO: 1812376 - DNA, 25 bp, Homo sapien
caggtgtggaccagcttggtggctg

SEQ ID NO: 1812377 - DNA, 25 bp, Homo sapien
agcgtttttcaagcaagtgacaggg

SEQ ID NO: 1812378 - DNA, 25 bp, Homo sapien
caggacctcgggtgcaggtcttaaa

SEQ ID NO: 1812379 - DNA, 25 bp, Homo sapien
acctcgggtgcaggtcttaaagtgc

SEQ ID NO: 1812380 - DNA, 25 bp, Homo sapien
gccaggtgttgaagcgtttttcaag

SEQ ID NO: 1812381 - DNA, 25 bp, Homo sapien
aggcagtgcagagctgggagctgca

SEQ ID NO: 1812382 - DNA, 25 bp, Homo sapien
tcaggcagtgcagagctgggagctg

SEQ ID NO: 1812383 - DNA, 25 bp, Homo sapien
atttcaggcagtgcagagctgggag

SEQ ID NO: 1812384 - DNA, 25 bp, Homo sapien
tttcaggcagtgcagagctgggagc

SEQ ID NO: 1812385 - DNA, 25 bp, Homo sapien
agaggacaggcatggcactcgcacc

SEQ ID NO: 1812386 - DNA, 25 bp, Homo sapien
tgcatgatggcctgtgcccacgtgg

SEQ ID NO: 1812387 - DNA, 25 bp, Homo sapien
gaggagctcagaatgctgttcctga

SEQ ID NO: 1812388 - DNA, 25 bp, Homo sapien
ggcactcgcaccttgacacgtacgt

SEQ ID NO: 1812389 - DNA, 25 bp, Homo sapien
agctgtccctgttgggtgtagagga

SEQ ID NO: 1812390 - DNA, 25 bp, Homo sapien
ggctgctggttatgaggagctcata

SEQ ID NO: 1812391 - DNA, 25 bp, Homo sapien
tcctctctggtttcgggctgctggt

SEQ ID NO: 1812392 - DNA, 25 bp, Homo sapien
aggaggtgtagatgttagtcctctc

SEQ ID NO: 1812393 - DNA, 25 bp, Homo sapien
gctggatacttgagtagggtatgaa

SEQ ID NO: 1812394 - DNA, 25 bp, Homo sapien
ggatacttgagtagggtatgaaagc

SEQ ID NO: 1812395 - DNA, 25 bp, Homo sapien
ctgtgctggatacttgagtagggta

SEQ ID NO: 1812396 - DNA, 25 bp, Homo sapien
acttgagtagggtatgaaagctctg

SEQ ID NO: 1812397 - DNA, 25 bp, Homo sapien
agatctcgtggactgaatggcgccc

SEQ ID NO: 1812398 - DNA, 25 bp, Homo sapien
cctcgggcagggttgactacacatt

SEQ ID NO: 1812399 - DNA, 25 bp, Homo sapien
ccttcgggtgcaacaagagacctgt

SEQ ID NO: 1812400 - DNA, 25 bp, Homo sapien
tgtatttggactcagggccttcggg

SEQ ID NO: 1812401 - DNA, 25 bp, Homo sapien
atcagggtggtgtccgtgcacatcc

SEQ ID NO: 1812402 - DNA, 25 bp, Homo sapien
cttgggccgggctttcctggtcatc

SEQ ID NO: 1812403 - DNA, 25 bp, Homo sapien
agatctgagagctcgcactgtccac

SEQ ID NO: 1812404 - DNA, 25 bp, Homo sapien
ctggtcatcagggtggtgtccgtgc

SEQ ID NO: 1812405 - DNA, 25 bp, Homo sapien
cgaggaccagccctctgccacgcac

SEQ ID NO: 1812406 - DNA, 25 bp, Homo sapien
acgaggaccagccctctgccacgca

SEQ ID NO: 1812407 - DNA, 25 bp, Homo sapien
aggttggaggccacgaggaccagcc

SEQ ID NO: 1812408 - DNA, 25 bp, Homo sapien
ggaggccacgaggaccagccctctg

SEQ ID NO: 1812409 - DNA, 25 bp, Homo sapien
tacattggtgagtggcttggtccag

SEQ ID NO: 1812410 - DNA, 25 bp, Homo sapien
aaaggtggacaacgcaaagctggca

SEQ ID NO: 1812411 - DNA, 25 bp, Homo sapien
tgtccaaagacctgagatgcagcag

SEQ ID NO: 1812412 - DNA, 25 bp, Homo sapien
ggtacaatgagacgtgtgtgacccc

SEQ ID NO: 1812413 - DNA, 25 bp, Homo sapien
aggcagtgctgttagggccacacag

SEQ ID NO: 1812414 - DNA, 25 bp, Homo sapien
ctgtgtgaaagacggcccacctgcc

SEQ ID NO: 1812415 - DNA, 25 bp, Homo sapien
tcaaaactgactgttcagccactga

SEQ ID NO: 1812416 - DNA, 25 bp, Homo sapien
cagccactgacgcaggcagtgctgt

SEQ ID NO: 1812417 - DNA, 25 bp, Homo sapien
gtgtgcagatccgagctcagggacc

SEQ ID NO: 1812418 - DNA, 25 bp, Homo sapien
cccagtacagtctgggtgtgcacct

SEQ ID NO: 1812419 - DNA, 25 bp, Homo sapien
aagggctcctgcacaaagggctggt

SEQ ID NO: 1812420 - DNA, 25 bp, Homo sapien
ctcctgcacaaagggctggttagtg

SEQ ID NO: 1812421 - DNA, 25 bp, Homo sapien
gaacgtgggtctccaatttgccggc

SEQ ID NO: 1812422 - DNA, 25 bp, Homo sapien
aggctctgtggaacgtgggtctcca

SEQ ID NO: 1812423 - DNA, 25 bp, Homo sapien
gggtctccaatttgccggctccctg

SEQ ID NO: 1812424 - DNA, 25 bp, Homo sapien
tttgccggctccctggagcataggt

SEQ ID NO: 1812425 - DNA, 25 bp, Homo sapien
tccgtggacacagcttcgtggatgc

SEQ ID NO: 1812426 - DNA, 25 bp, Homo sapien
tgtgggcctcccatttgctggctcc

SEQ ID NO: 1812427 - DNA, 25 bp, Homo sapien
gcagacctgaaagaaacgcttcgag

SEQ ID NO: 1812428 - DNA, 25 bp, Homo sapien
agcttcatggatgcaggtgctgtga

SEQ ID NO: 1812429 - DNA, 25 bp, Homo sapien
agggatgacaaaggtcccactgaga

SEQ ID NO: 1812430 - DNA, 25 bp, Homo sapien
acagaggaccccgtagaactggatg

SEQ ID NO: 1812431 - DNA, 25 bp, Homo sapien
cgggtgctctgctcggacatccagg

SEQ ID NO: 1812432 - DNA, 25 bp, Homo sapien
tggaactgctggttcccgggcaccc

SEQ ID NO: 1812433 - DNA, 25 bp, Homo sapien
ggacatccaggaaaatgcaacgtgg

SEQ ID NO: 1812434 - DNA, 25 bp, Homo sapien
cctgtgttgggcctgaatttgaagt

SEQ ID NO: 1812435 - DNA, 25 bp, Homo sapien
cgtgtgttgctctgggagcgtggcc

SEQ ID NO: 1812436 - DNA, 25 bp, Homo sapien
tgggagcgtggccacagtcgcacca

SEQ ID NO: 1812437 - DNA, 25 bp, Homo sapien
gcaccatccatgcagttcagctgcg

SEQ ID NO: 1812438 - DNA, 25 bp, Homo sapien
tttgtggacggtggttggcacttac

SEQ ID NO: 1812439 - DNA, 25 bp, Homo sapien
tctgaaacattcacaggcatatctg

SEQ ID NO: 1812440 - DNA, 25 bp, Homo sapien
ggttctgaaacattcacaggcatat

SEQ ID NO: 1812441 - DNA, 25 bp, Homo sapien
ggtggttggcacttactgcattttg

SEQ ID NO: 1812442 - DNA, 25 bp, Homo sapien
cggacggagcagggactgttcacac

SEQ ID NO: 1812443 - DNA, 25 bp, Homo sapien
ggcactgcagacgggctgtcctggg

SEQ ID NO: 1812444 - DNA, 25 bp, Homo sapien
acggagcagggactgttcacaccct

SEQ ID NO: 1812445 - DNA, 25 bp, Homo sapien
ggagcagggactgttcacaccctgg

SEQ ID NO: 1812446 - DNA, 25 bp, Homo sapien
gctgcagagggttcccgctcagggc

SEQ ID NO: 1812447 - DNA, 25 bp, Homo sapien
gggctgcagagggttcccgctcagg

SEQ ID NO: 1812448 - DNA, 25 bp, Homo sapien
ctgcagagggttcccgctcagggcc

SEQ ID NO: 1812449 - DNA, 25 bp, Homo sapien
tgggctgcagagggttcccgctcag

SEQ ID NO: 1812450 - DNA, 25 bp, Homo sapien
agaggaggtgcagtaaatggagaaa

SEQ ID NO: 1812451 - DNA, 25 bp, Homo sapien
ggctcgggcaggttttcagggtgtc

SEQ ID NO: 1812452 - DNA, 25 bp, Homo sapien
ggagaggaggtgcagtaaatggaga

SEQ ID NO: 1812453 - DNA, 25 bp, Homo sapien
gctcctatggctccagcagaggggg

SEQ ID NO: 1812454 - DNA, 25 bp, Homo sapien
gtgaggaacacccagagcagagaaa

SEQ ID NO: 1812455 - DNA, 25 bp, Homo sapien
ctgtgtgaggaacacccagagcaga

SEQ ID NO: 1812456 - DNA, 25 bp, Homo sapien
gaggaacacccagagcagagaaact

SEQ ID NO: 1812457 - DNA, 25 bp, Homo sapien
gtgtgaggaacacccagagcagaga

SEQ ID NO: 1812458 - DNA, 25 bp, Homo sapien
tcaccagaaaagtgcggagggtgca

SEQ ID NO: 1812459 - DNA, 25 bp, Homo sapien
gtgcaggccccacggagtgcaagaa

SEQ ID NO: 1812460 - DNA, 25 bp, Homo sapien
aagaatctgctgtagcctggtagga

SEQ ID NO: 1812461 - DNA, 25 bp, Homo sapien
aagagaggtcaccagaaaagtgcgg

SEQ ID NO: 1812462 - DNA, 25 bp, Homo sapien
ccattcggaagtgccctgaagcagg

SEQ ID NO: 1812463 - DNA, 25 bp, Homo sapien
gatgctgacgctctgcagggtgtgg

SEQ ID NO: 1812464 - DNA, 25 bp, Homo sapien
gaggggctgccgcactaagaacact

SEQ ID NO: 1812465 - DNA, 25 bp, Homo sapien
tgggagtggatacagactagccccc

SEQ ID NO: 1812466 - DNA, 25 bp, Homo sapien
aatctcgtttgcatgcaaagcaggg

SEQ ID NO: 1812467 - DNA, 25 bp, Homo sapien
aagtcactcgtcaaagggcacatag

SEQ ID NO: 1812468 - DNA, 25 bp, Homo sapien
ggtttaagatcagatgagcctcgtc

SEQ ID NO: 1812469 - DNA, 25 bp, Homo sapien
gagcctcgtcgtacaatgtcccaaa

SEQ ID NO: 1812470 - DNA, 25 bp, Homo sapien
atgcaggcttcgtgggccgttgact

SEQ ID NO: 1812471 - DNA, 25 bp, Homo sapien
gactgtgggtggctccccgtgaggc

SEQ ID NO: 1812472 - DNA, 25 bp, Homo sapien
gccaaggaggctgcgcttctgacgg

SEQ ID NO: 1812473 - DNA, 25 bp, Homo sapien
ggctgcgcttctgacgggtggctct

SEQ ID NO: 1812474 - DNA, 25 bp, Homo sapien
tgctgtgggttgagcaactgtccgt

SEQ ID NO: 1812475 - DNA, 25 bp, Homo sapien
ttgagcaactgtccgtgtcccacac

SEQ ID NO: 1812476 - DNA, 25 bp, Homo sapien
ggttgagcaactgtccgtgtcccac

SEQ ID NO: 1812477 - DNA, 25 bp, Homo sapien
tgtgggttgagcaactgtccgtgtc

SEQ ID NO: 1812478 - DNA, 25 bp, Homo sapien
tgaaggacacggtgatgaaggacac

SEQ ID NO: 1812479 - DNA, 25 bp, Homo sapien
atgaaggacacggtgatgaaggaca

SEQ ID NO: 1812480 - DNA, 25 bp, Homo sapien
gaaggacacggtgatgaaggacacg

SEQ ID NO: 1812481 - DNA, 25 bp, Homo sapien
acacggtgatgaaggacacggtgat

SEQ ID NO: 1812482 - DNA, 25 bp, Homo sapien
tcattgaacactggtgatgaaggac

SEQ ID NO: 1812483 - DNA, 25 bp, Homo sapien
catggtgatgaagaatcatggtgat

SEQ ID NO: 1812484 - DNA, 25 bp, Homo sapien
aaagacctctgtgatgaaggacatg

SEQ ID NO: 1812485 - DNA, 25 bp, Homo sapien
gtggtaaagaaccatggtgatgaag

SEQ ID NO: 1812486 - DNA, 25 bp, Homo sapien
gtgggagcagcttcgtggagcctcc

SEQ ID NO: 1812487 - DNA, 25 bp, Homo sapien
gagcagcttcgtggagcctccggga

SEQ ID NO: 1812488 - DNA, 25 bp, Homo sapien
tgggagcagcttcgtggagcctccg

SEQ ID NO: 1812489 - DNA, 25 bp, Homo sapien
caggttatgtacacactttgtgaga

SEQ ID NO: 1812490 - DNA, 25 bp, Homo sapien
caaaggcttcgaatattccacaggt

SEQ ID NO: 1812491 - DNA, 25 bp, Homo sapien
catttgaagcaggtctgtaggtgtc

SEQ ID NO: 1812492 - DNA, 25 bp, Homo sapien
gctaatgtgctgtttgcaaatggcc

SEQ ID NO: 1812493 - DNA, 25 bp, Homo sapien
gaggagggcgggctgtgccggtctg

SEQ ID NO: 1812494 - DNA, 25 bp, Homo sapien
gggctgtgccggtctgagggtgtcg

SEQ ID NO: 1812495 - DNA, 25 bp, Homo sapien
cttgtcattagtgcgaggggacact

SEQ ID NO: 1812496 - DNA, 25 bp, Homo sapien
tcacgagggcggcttgtcattagtg

SEQ ID NO: 1812497 - DNA, 25 bp, Homo sapien
tcatcgacggagacgcaaggtgctc

SEQ ID NO: 1812498 - DNA, 25 bp, Homo sapien
ttctgaacggattagggcagagcct

SEQ ID NO: 1812499 - DNA, 25 bp, Homo sapien
aaacgaagctgtaggtgccgaggcc

SEQ ID NO: 1812500 - DNA, 25 bp, Homo sapien
cctgtaattacagtggcggccagcc

SEQ ID NO: 1812501 - DNA, 25 bp, Homo sapien
cttctgcggagctggcctagggcat

SEQ ID NO: 1812502 - DNA, 25 bp, Homo sapien
tttcttttactgacgacactgctgt

SEQ ID NO: 1812503 - DNA, 25 bp, Homo sapien
tcctgacagcagtgagttcttcctc

SEQ ID NO: 1812504 - DNA, 25 bp, Homo sapien
ccacgtttcctgtaaggatggtcag

SEQ ID NO: 1812505 - DNA, 25 bp, Homo sapien
gagcccacaggcaaagtactcggac

SEQ ID NO: 1812506 - DNA, 25 bp, Homo sapien
gagaggagctgatgccttcaaggga

SEQ ID NO: 1812507 - DNA, 25 bp, Homo sapien
ctgagagaggagctgatgccttcaa

SEQ ID NO: 1812508 - DNA, 25 bp, Homo sapien
gcccacaggcaaagtactcggacac

SEQ ID NO: 1812509 - DNA, 25 bp, Homo sapien
tctcgtggctgcagacgttgtctct

SEQ ID NO: 1812510 - DNA, 25 bp, Homo sapien
tcttcacaggtactgtggcctctgt

SEQ ID NO: 1812511 - DNA, 25 bp, Homo sapien
acacgcatccgcagctgtctcgtgg

SEQ ID NO: 1812512 - DNA, 25 bp, Homo sapien
tttctgaagctgatttaagttggct

SEQ ID NO: 1812513 - DNA, 25 bp, Homo sapien
ggcctcgtcctctcctattacggga

SEQ ID NO: 1812514 - DNA, 25 bp, Homo sapien
ggatgccactcagtgcttgaggagc

SEQ ID NO: 1812515 - DNA, 25 bp, Homo sapien
tacgggatgccactcagtgcttgag

SEQ ID NO: 1812516 - DNA, 25 bp, Homo sapien
ctcctattacgggatgccactcagt

SEQ ID NO: 1812517 - DNA, 25 bp, Homo sapien
ctgcaagccggtgtggacgggcgct

SEQ ID NO: 1812518 - DNA, 25 bp, Homo sapien
ccaggcaggcggacactgactggaa

SEQ ID NO: 1812519 - DNA, 25 bp, Homo sapien
tgcagacccgtcctgaagaggctgt

SEQ ID NO: 1812520 - DNA, 25 bp, Homo sapien
ctgtccctgtgtgccgcggggacca

SEQ ID NO: 1812521 - DNA, 25 bp, Homo sapien
tgcaaaagcgcgtggccgcccgaca

SEQ ID NO: 1812522 - DNA, 25 bp, Homo sapien
acaaggctgggatcggtgctctcct

SEQ ID NO: 1812523 - DNA, 25 bp, Homo sapien
tggtgaaggagctgagcgtcctctg

SEQ ID NO: 1812524 - DNA, 25 bp, Homo sapien
agctccatccacgtggtgaaggagc

SEQ ID NO: 1812525 - DNA, 25 bp, Homo sapien
tctgcaggtgagaacgaacacacac

SEQ ID NO: 1812526 - DNA, 25 bp, Homo sapien
ctgtggcctgaatcctgctggaggc

SEQ ID NO: 1812527 - DNA, 25 bp, Homo sapien
ggacatgagcgtccgtgcagtcccc

SEQ ID NO: 1812528 - DNA, 25 bp, Homo sapien
tgggagggacatgagcgtccgtgca

SEQ ID NO: 1812529 - DNA, 25 bp, Homo sapien
cagggtgggtccaagcaccacacac

SEQ ID NO: 1812530 - DNA, 25 bp, Homo sapien
cagcagggtgggtccaagcaccaca

SEQ ID NO: 1812531 - DNA, 25 bp, Homo sapien
agcagggtgggtccaagcaccacac

SEQ ID NO: 1812532 - DNA, 25 bp, Homo sapien
ggcagcagggtgggtccaagcacca

SEQ ID NO: 1812533 - DNA, 25 bp, Homo sapien
tgctggccttgggtgataagagcct

SEQ ID NO: 1812534 - DNA, 25 bp, Homo sapien
gataagagcctgtcaccacagctgt

SEQ ID NO: 1812535 - DNA, 25 bp, Homo sapien
gccttgggtgataagagcctgtcac

SEQ ID NO: 1812536 - DNA, 25 bp, Homo sapien
ggtgataagagcctgtcaccacagc

SEQ ID NO: 1812537 - DNA, 25 bp, Homo sapien
aatgcaggtgatacagccagtcgtt

SEQ ID NO: 1812538 - DNA, 25 bp, Homo sapien
ggccagcacaatagcgccattctct

SEQ ID NO: 1812539 - DNA, 25 bp, Homo sapien
taagcgtggttgtagtaatgcaggt

SEQ ID NO: 1812540 - DNA, 25 bp, Homo sapien
agtcgttcagctccacaggtgccat

SEQ ID NO: 1812541 - DNA, 25 bp, Homo sapien
aatttgcccctggaattagctggtc

SEQ ID NO: 1812542 - DNA, 25 bp, Homo sapien
gcccctggaattagctggtctacac

SEQ ID NO: 1812543 - DNA, 25 bp, Homo sapien
tttgcccctggaattagctggtcta

SEQ ID NO: 1812544 - DNA, 25 bp, Homo sapien
aggaatttgcccctggaattagctg

SEQ ID NO: 1812545 - DNA, 25 bp, Homo sapien
tgcggccgtccagcagaaagccaca

SEQ ID NO: 1812546 - DNA, 25 bp, Homo sapien
tgggtgcggccgtccagcagaaagc

SEQ ID NO: 1812547 - DNA, 25 bp, Homo sapien
gtgcggccgtccagcagaaagccac

SEQ ID NO: 1812548 - DNA, 25 bp, Homo sapien
ggtgcggccgtccagcagaaagcca

SEQ ID NO: 1812549 - DNA, 25 bp, Homo sapien
cagatgggctgatagtgcagaagct

SEQ ID NO: 1812550 - DNA, 25 bp, Homo sapien
ttaaaaaactcagatgggctgatag

SEQ ID NO: 1812551 - DNA, 25 bp, Homo sapien
ttatccaccagtgccaacttaaaaa

SEQ ID NO: 1812552 - DNA, 25 bp, Homo sapien
atcagcatcttgaggggagaggttc

SEQ ID NO: 1812553 - DNA, 25 bp, Homo sapien
gtattgttgttgcccggtggtggag

SEQ ID NO: 1812554 - DNA, 25 bp, Homo sapien
ggtggagcttctcaggaccttatac

SEQ ID NO: 1812555 - DNA, 25 bp, Homo sapien
tgttgttgcccggtggtggagcttc

SEQ ID NO: 1812556 - DNA, 25 bp, Homo sapien
ttgttgcccggtggtggagcttctc

SEQ ID NO: 1812557 - DNA, 25 bp, Homo sapien
acagctgtgtgctcctgctgtggga

SEQ ID NO: 1812558 - DNA, 25 bp, Homo sapien
gcttggccacagctgtgtgctcctg

SEQ ID NO: 1812559 - DNA, 25 bp, Homo sapien
agctgtgtgctcctgctgtgggatg

SEQ ID NO: 1812560 - DNA, 25 bp, Homo sapien
ctgtgtgctcctgctgtgggatgct

SEQ ID NO: 1812561 - DNA, 25 bp, Homo sapien
aaacagaagattttctcctccattt

SEQ ID NO: 1812562 - DNA, 25 bp, Homo sapien
tccatttcctgttcctgcagttcat

SEQ ID NO: 1812563 - DNA, 25 bp, Homo sapien
aaaacagaagattttctcctccatt

SEQ ID NO: 1812564 - DNA, 25 bp, Homo sapien
tcctccatttcctgttcctgcagtt

SEQ ID NO: 1812565 - DNA, 25 bp, Homo sapien
cgagccctgtcgtgcgttcagatgc

SEQ ID NO: 1812566 - DNA, 25 bp, Homo sapien
cccgagccctgtcgtgcgttcagat

SEQ ID NO: 1812567 - DNA, 25 bp, Homo sapien
ccgagccctgtcgtgcgttcagatg

SEQ ID NO: 1812568 - DNA, 25 bp, Homo sapien
tgaaggcgcctgtgtctagcagaag

SEQ ID NO: 1812569 - DNA, 25 bp, Homo sapien
tgcagccagccctgttgcctacaga

SEQ ID NO: 1812570 - DNA, 25 bp, Homo sapien
tttcttcacctcgtgcctctggagc

SEQ ID NO: 1812571 - DNA, 25 bp, Homo sapien
gggcctccttgttggcacatgcggg

SEQ ID NO: 1812572 - DNA, 25 bp, Homo sapien
ggctgtgtttcctctacccactgaa

SEQ ID NO: 1812573 - DNA, 25 bp, Homo sapien
agcatctgcccatctaggtagatga

SEQ ID NO: 1812574 - DNA, 25 bp, Homo sapien
actgaggcacctgcctgtctaggta

SEQ ID NO: 1812575 - DNA, 25 bp, Homo sapien
tacccactgaggcacctgcctgtct

SEQ ID NO: 1812576 - DNA, 25 bp, Homo sapien
acggcagctgtggtgcgcactgctt

SEQ ID NO: 1812577 - DNA, 25 bp, Homo sapien
ttagcctttgtttcgtgcacattcg

SEQ ID NO: 1812578 - DNA, 25 bp, Homo sapien
cacattcgtgcggaggaagacggca

SEQ ID NO: 1812579 - DNA, 25 bp, Homo sapien
cacggacatgtgagttttattagcc

SEQ ID NO: 1812580 - DNA, 25 bp, Homo sapien
ggctgttatccgctgtcttctgtcc

SEQ ID NO: 1812581 - DNA, 25 bp, Homo sapien
acatagcctgcccatgtagcctgcg

SEQ ID NO: 1812582 - DNA, 25 bp, Homo sapien
tgtcctcccgcagagtcaccattat

SEQ ID NO: 1812583 - DNA, 25 bp, Homo sapien
cttggcggtgtctgggcttcggcga

SEQ ID NO: 1812584 - DNA, 25 bp, Homo sapien
cgcgcacacgaagtaggggcccaag

SEQ ID NO: 1812585 - DNA, 25 bp, Homo sapien
caggcgaggtccccgctcttgggaa

SEQ ID NO: 1812586 - DNA, 25 bp, Homo sapien
cagctcctcccgcgcacacgaagta

SEQ ID NO: 1812587 - DNA, 25 bp, Homo sapien
aaggcctgccgcaggcgggccccgc

SEQ ID NO: 1812588 - DNA, 25 bp, Homo sapien
catgagaactcctatcaggaagacc

SEQ ID NO: 1812589 - DNA, 25 bp, Homo sapien
gaccaaccagcatgagggatctgcc

SEQ ID NO: 1812590 - DNA, 25 bp, Homo sapien
gaagcgggcaggtcatatggccaga

SEQ ID NO: 1812591 - DNA, 25 bp, Homo sapien
tatcaggaagaccaaccagcatgag

SEQ ID NO: 1812592 - DNA, 25 bp, Homo sapien
cgagctcctcggaggcgtggacaaa

SEQ ID NO: 1812593 - DNA, 25 bp, Homo sapien
tggagaagtcggtgctggctgcgcc

SEQ ID NO: 1812594 - DNA, 25 bp, Homo sapien
acaaaggaggccttggcgagaacag

SEQ ID NO: 1812595 - DNA, 25 bp, Homo sapien
ttggctgcacttgtgaccaccgggc

SEQ ID NO: 1812596 - DNA, 25 bp, Homo sapien
tgagcacctgcgactggttgcacgg

SEQ ID NO: 1812597 - DNA, 25 bp, Homo sapien
tttgatctggcagaggaacgtccct

SEQ ID NO: 1812598 - DNA, 25 bp, Homo sapien
tggtacggctcgtcctgagcacctg

SEQ ID NO: 1812599 - DNA, 25 bp, Homo sapien
ggttgcacggtgttgcttcagctca

SEQ ID NO: 1812600 - DNA, 25 bp, Homo sapien
aggagctaggcaggccatgctggaa

SEQ ID NO: 1812601 - DNA, 25 bp, Homo sapien
aggagggcgaggagctaggcaggcc

SEQ ID NO: 1812602 - DNA, 25 bp, Homo sapien
caccagggtcttcccggcagggctg

SEQ ID NO: 1812603 - DNA, 25 bp, Homo sapien
tgtgcaccagggtcttcccggcagg

SEQ ID NO: 1812604 - DNA, 25 bp, Homo sapien
acagcagaagagcacgaccatggag

SEQ ID NO: 1812605 - DNA, 25 bp, Homo sapien
ttctggccgatactgcgaggcctgg

SEQ ID NO: 1812606 - DNA, 25 bp, Homo sapien
ctgacagcagaagagcacgaccatg

SEQ ID NO: 1812607 - DNA, 25 bp, Homo sapien
gcatgggcttttctggccgatactg

SEQ ID NO: 1812608 - DNA, 25 bp, Homo sapien
gacaagcgctgggttccgtagaacg

SEQ ID NO: 1812609 - DNA, 25 bp, Homo sapien
cgtagaacggtcctgggtcctgtag

SEQ ID NO: 1812610 - DNA, 25 bp, Homo sapien
cacagcgaccctcaggaggcgcagg

SEQ ID NO: 1812611 - DNA, 25 bp, Homo sapien
ctcctgaagagaatcggggcgtccc

SEQ ID NO: 1812612 - DNA, 25 bp, Homo sapien
ttggagctgccgttgttactgatgg

SEQ ID NO: 1812613 - DNA, 25 bp, Homo sapien
tatggttgccgagcgctgagcttga

SEQ ID NO: 1812614 - DNA, 25 bp, Homo sapien
ccgttgttgggtgcctatggttgcc

SEQ ID NO: 1812615 - DNA, 25 bp, Homo sapien
agggccgcatcccagactgactaag

SEQ ID NO: 1812616 - DNA, 25 bp, Homo sapien
gtacaagcggaagtgactgaaagga

SEQ ID NO: 1812617 - DNA, 25 bp, Homo sapien
aaaatataatgaacggttgggccag

SEQ ID NO: 1812618 - DNA, 25 bp, Homo sapien
actgtgaatccttgagggagggtgt

SEQ ID NO: 1812619 - DNA, 25 bp, Homo sapien
ttgggccagaattagtacaagcgga

SEQ ID NO: 1812620 - DNA, 25 bp, Homo sapien
agagcggcgcttcctgtcccctggg

SEQ ID NO: 1812621 - DNA, 25 bp, Homo sapien
cacttgcccattaaagacgtcagca

SEQ ID NO: 1812622 - DNA, 25 bp, Homo sapien
gcttcccagcagacggcacggaatt

SEQ ID NO: 1812623 - DNA, 25 bp, Homo sapien
gatcatggccaggtcgtgaaatcca

SEQ ID NO: 1812624 - DNA, 25 bp, Homo sapien
aggggcagtgagtcagtgaggccat

SEQ ID NO: 1812625 - DNA, 25 bp, Homo sapien
ctgcgcagtagcgcctgcctcgcgg

SEQ ID NO: 1812626 - DNA, 25 bp, Homo sapien
cccacagatgttgttgaataaaggg

SEQ ID NO: 1812627 - DNA, 25 bp, Homo sapien
agtagcgcctgcctcgcgggaggcc

SEQ ID NO: 1812628 - DNA, 25 bp, Homo sapien
tctcctttcacagcgagccctgctg

SEQ ID NO: 1812629 - DNA, 25 bp, Homo sapien
gccttggtgccagccgctgaggtga

SEQ ID NO: 1812630 - DNA, 25 bp, Homo sapien
tgggatgctgttggcgccttggtgc

SEQ ID NO: 1812631 - DNA, 25 bp, Homo sapien
ggcatctggtgtccggcccaggact

SEQ ID NO: 1812632 - DNA, 25 bp, Homo sapien
gccgcggcgggagcaggaccccttc

SEQ ID NO: 1812633 - DNA, 25 bp, Homo sapien
tctagaagtagcgacaaacagcagc

SEQ ID NO: 1812634 - DNA, 25 bp, Homo sapien
gcaggaaaccttcaagaggaccatg

SEQ ID NO: 1812635 - DNA, 25 bp, Homo sapien
aaacagcagcgcagatctcacaagg

SEQ ID NO: 1812636 - DNA, 25 bp, Homo sapien
tctgtggtgcgcctgaaaggtcgct

SEQ ID NO: 1812637 - DNA, 25 bp, Homo sapien
cgtgtgaggtggcaatgcgtccagt

SEQ ID NO: 1812638 - DNA, 25 bp, Homo sapien
tggcaatgcgtccagtgagagaact

SEQ ID NO: 1812639 - DNA, 25 bp, Homo sapien
tggcagcagccgccgtgcaaaggcc

SEQ ID NO: 1812640 - DNA, 25 bp, Homo sapien
tccagtgagagaactcgaagaaagg

SEQ ID NO: 1812641 - DNA, 25 bp, Homo sapien
gcggtgttgaacaagtcgacagtca

SEQ ID NO: 1812642 - DNA, 25 bp, Homo sapien
ggtcgcctctggtcaggcactcact

SEQ ID NO: 1812643 - DNA, 25 bp, Homo sapien
tcgacagtcaacgaaagccacggct

SEQ ID NO: 1812644 - DNA, 25 bp, Homo sapien
ccacggctttgcgaagtacattcca

SEQ ID NO: 1812645 - DNA, 25 bp, Homo sapien
catagctgatatgtctgaggacgcc

SEQ ID NO: 1812646 - DNA, 25 bp, Homo sapien
taaacagacgggcatcacgtgtcag

SEQ ID NO: 1812647 - DNA, 25 bp, Homo sapien
taacatatataagtccccggaagga

SEQ ID NO: 1812648 - DNA, 25 bp, Homo sapien
gagtgtaccggcctaagcaaacctg

SEQ ID NO: 1812649 - DNA, 25 bp, Homo sapien
gcttgccagaagtcgagtaataata

SEQ ID NO: 1812650 - DNA, 25 bp, Homo sapien
tttccccttgcttgccagaagtcga

SEQ ID NO: 1812651 - DNA, 25 bp, Homo sapien
aaagcgttccctggggcgatgctca

SEQ ID NO: 1812652 - DNA, 25 bp, Homo sapien
ctggcaaagcgttccctggggcgat

SEQ ID NO: 1812653 - DNA, 25 bp, Homo sapien
aagcatgggcgataccgcagggact

SEQ ID NO: 1812654 - DNA, 25 bp, Homo sapien
gcctctaagcatgggcgataccgca

SEQ ID NO: 1812655 - DNA, 25 bp, Homo sapien
cactgggcggcctctaagcatgggc

SEQ ID NO: 1812656 - DNA, 25 bp, Homo sapien
gataccgcagggactgaagcctgag

SEQ ID NO: 1812657 - DNA, 25 bp, Homo sapien
cagaagctgatggaactgccgccat

SEQ ID NO: 1812658 - DNA, 25 bp, Homo sapien
ctgccgccatttcccaaagtaaagg

SEQ ID NO: 1812659 - DNA, 25 bp, Homo sapien
gaggtttcatcggtagcccggcctc

SEQ ID NO: 1812660 - DNA, 25 bp, Homo sapien
acgtccgacggtgagtgaagatgct

SEQ ID NO: 1812661 - DNA, 25 bp, Homo sapien
gagttctgcaccctcctccagaagg

SEQ ID NO: 1812662 - DNA, 25 bp, Homo sapien
aagcagtggccactgcccttgagtt

SEQ ID NO: 1812663 - DNA, 25 bp, Homo sapien
tcacacgaaggcagcaaagcagtgg

SEQ ID NO: 1812664 - DNA, 25 bp, Homo sapien
cacacgaaggcagcaaagcagtggc

SEQ ID NO: 1812665 - DNA, 25 bp, Homo sapien
tgatgatggagtcttgaagacagga

SEQ ID NO: 1812666 - DNA, 25 bp, Homo sapien
aagacaggaggccggcccgatgtgt

SEQ ID NO: 1812667 - DNA, 25 bp, Homo sapien
ccccggaggaggtgatgatggagtc

SEQ ID NO: 1812668 - DNA, 25 bp, Homo sapien
caggaggccggcccgatgtgtgcca

SEQ ID NO: 1812669 - DNA, 25 bp, Homo sapien
ttggggtcaaacttaggtgcatggt

SEQ ID NO: 1812670 - DNA, 25 bp, Homo sapien
gggtcaaacttaggtgcatggtggc

SEQ ID NO: 1812671 - DNA, 25 bp, Homo sapien
ggtcaaacttaggtgcatggtggcg

SEQ ID NO: 1812672 - DNA, 25 bp, Homo sapien
cttggggtcaaacttaggtgcatgg

SEQ ID NO: 1812673 - DNA, 25 bp, Homo sapien
cttcagcaccagtgaacttaggaat

SEQ ID NO: 1812674 - DNA, 25 bp, Homo sapien
aacttaggaattcgactttgatctc

SEQ ID NO: 1812675 - DNA, 25 bp, Homo sapien
gcaccagtgaacttaggaattcgac

SEQ ID NO: 1812676 - DNA, 25 bp, Homo sapien
ccagtgaacttaggaattcgacttt

SEQ ID NO: 1812677 - DNA, 25 bp, Homo sapien
gccttggtgatgtcatcagcaacct

SEQ ID NO: 1812678 - DNA, 25 bp, Homo sapien
cttggtgatgtcatcagcaaccttt

SEQ ID NO: 1812679 - DNA, 25 bp, Homo sapien
ctagtccctggttgccttggtgatg

SEQ ID NO: 1812680 - DNA, 25 bp, Homo sapien
ggtgatgtcatcagcaaccttttct

SEQ ID NO: 1812681 - DNA, 25 bp, Homo sapien
catgatgaggtggtgccatcgacac

SEQ ID NO: 1812682 - DNA, 25 bp, Homo sapien
tctgttctaatggtcggtttccctg

SEQ ID NO: 1812683 - DNA, 25 bp, Homo sapien
catcgacaccgtggcttgcagactg

SEQ ID NO: 1812684 - DNA, 25 bp, Homo sapien
tccctaggagctctagtggttccag

SEQ ID NO: 1812685 - DNA, 25 bp, Homo sapien
tggttgggctgcatggctattagca

SEQ ID NO: 1812686 - DNA, 25 bp, Homo sapien
gaagctgctgttcgccagctgtgca

SEQ ID NO: 1812687 - DNA, 25 bp, Homo sapien
gtggcggcaccaatgcagcttcctc

SEQ ID NO: 1812688 - DNA, 25 bp, Homo sapien
tgcagggccacgtggcggcaccaat

SEQ ID NO: 1812689 - DNA, 25 bp, Homo sapien
gtggtcagatgctcaggttcgggac

SEQ ID NO: 1812690 - DNA, 25 bp, Homo sapien
tcagatgctcaggtttgggtccccg

SEQ ID NO: 1812691 - DNA, 25 bp, Homo sapien
gggcagtggtcagatgctcaggttc

SEQ ID NO: 1812692 - DNA, 25 bp, Homo sapien
tccccgggggcagtggtcagatgct

SEQ ID NO: 1812693 - DNA, 25 bp, Homo sapien
tgaggcaattctcgaagcaagtacc

SEQ ID NO: 1812694 - DNA, 25 bp, Homo sapien
gagagttgaggcaattctcgaagca

SEQ ID NO: 1812695 - DNA, 25 bp, Homo sapien
aggcctgaaatgagagttgaggcaa

SEQ ID NO: 1812696 - DNA, 25 bp, Homo sapien
ttctcgaagcaagtaccctcaaggt

SEQ ID NO: 1812697 - DNA, 25 bp, Homo sapien
cgtggtgggaacagtgtgcggatct

SEQ ID NO: 1812698 - DNA, 25 bp, Homo sapien
aactcgagacggatggaggtcaggg

SEQ ID NO: 1812699 - DNA, 25 bp, Homo sapien
cagccgggtgtgcagggtctcgtgg

SEQ ID NO: 1812700 - DNA, 25 bp, Homo sapien
tctcgtggtgggaacagtgtgcgga

SEQ ID NO: 1812701 - DNA, 25 bp, Homo sapien
tgtgccgcgtggagggctgagagca

SEQ ID NO: 1812702 - DNA, 25 bp, Homo sapien
agggctgagagcagctgagccctca

SEQ ID NO: 1812703 - DNA, 25 bp, Homo sapien
tggagggctgagagcagctgagccc

SEQ ID NO: 1812704 - DNA, 25 bp, Homo sapien
ctgtgccgcgtggagggctgagagc

SEQ ID NO: 1812705 - DNA, 25 bp, Homo sapien
gacattggaattactcacgctcacg

SEQ ID NO: 1812706 - DNA, 25 bp, Homo sapien
cattggaattactcacgctcacggc

SEQ ID NO: 1812707 - DNA, 25 bp, Homo sapien
gctgacattggaattactcacgctc

SEQ ID NO: 1812708 - DNA, 25 bp, Homo sapien
gggctgacattggaattactcacgc

SEQ ID NO: 1812709 - DNA, 25 bp, Homo sapien
gagtgactcgtgcttcccggaatgg

SEQ ID NO: 1812710 - DNA, 25 bp, Homo sapien
gtccctttgcgtggctgattccgaa

SEQ ID NO: 1812711 - DNA, 25 bp, Homo sapien
gtaaagtcttcttttcggctgctgg

SEQ ID NO: 1812712 - DNA, 25 bp, Homo sapien
tgaacgtattgatcttggaggctgt

SEQ ID NO: 1812713 - DNA, 25 bp, Homo sapien
cttctccttctccaggctctggtac

SEQ ID NO: 1812714 - DNA, 25 bp, Homo sapien
tcttctccttctccaggctctggta

SEQ ID NO: 1812715 - DNA, 25 bp, Homo sapien
ctcttctccttctccaggctctggt

SEQ ID NO: 1812716 - DNA, 25 bp, Homo sapien
catgagctgggttttccggcaaaca

SEQ ID NO: 1812717 - DNA, 25 bp, Homo sapien
gagctgggttttccggcaaacaatg

SEQ ID NO: 1812718 - DNA, 25 bp, Homo sapien
catggatattatgctgcgctgtgga

SEQ ID NO: 1812719 - DNA, 25 bp, Homo sapien
cggttcacatggatattatgctgcg

SEQ ID NO: 1812720 - DNA, 25 bp, Homo sapien
ctccaagacagcgtgccagccagca

SEQ ID NO: 1812721 - DNA, 25 bp, Homo sapien
gggctggcgtctccttgcccctcca

SEQ ID NO: 1812722 - DNA, 25 bp, Homo sapien
ccacgcacgccaggcattgctgtgg

SEQ ID NO: 1812723 - DNA, 25 bp, Homo sapien
gccacgcacgccaggcattgctgtg

SEQ ID NO: 1812724 - DNA, 25 bp, Homo sapien
tggaatgagacggagaaagagccgc

SEQ ID NO: 1812725 - DNA, 25 bp, Homo sapien
agcagctcggccctaatgaccagat

SEQ ID NO: 1812726 - DNA, 25 bp, Homo sapien
gaatgagacggagaaagagccgctg

SEQ ID NO: 1812727 - DNA, 25 bp, Homo sapien
cggccctaatgaccagatggccaca

SEQ ID NO: 1812728 - DNA, 25 bp, Homo sapien
gatctctgtcgtgggctccaaagcc

SEQ ID NO: 1812729 - DNA, 25 bp, Homo sapien
tgcaagtcgttctctctgtccaaga

SEQ ID NO: 1812730 - DNA, 25 bp, Homo sapien
gacatgagaatgaactttagccagg

SEQ ID NO: 1812731 - DNA, 25 bp, Homo sapien
ggctctccccaggatctctgtcgtg

SEQ ID NO: 1812732 - DNA, 25 bp, Homo sapien
tcattcttactagctctgaagtgtg

SEQ ID NO: 1812733 - DNA, 25 bp, Homo sapien
gtcagcgtgctagaaattaacaaga

SEQ ID NO: 1812734 - DNA, 25 bp, Homo sapien
agtgtgtggcagcttttatcatgga

SEQ ID NO: 1812735 - DNA, 25 bp, Homo sapien
gaaaacgtgccaagaagtgtggttg

SEQ ID NO: 1812736 - DNA, 25 bp, Homo sapien
tttctgggtgagtgatcagataccg

SEQ ID NO: 1812737 - DNA, 25 bp, Homo sapien
agataccggcactgccgcgtggcct

SEQ ID NO: 1812738 - DNA, 25 bp, Homo sapien
tgcagcccgggtgtgccaagggcaa

SEQ ID NO: 1812739 - DNA, 25 bp, Homo sapien
tgccggccgtctgcagcccgggtgt

SEQ ID NO: 1812740 - DNA, 25 bp, Homo sapien
tggcggtgacaatacgccgagccct

SEQ ID NO: 1812741 - DNA, 25 bp, Homo sapien
cagcgtgtttatttctccgaagcag

SEQ ID NO: 1812742 - DNA, 25 bp, Homo sapien
ggtgccccgatgtctcagtgacaga

SEQ ID NO: 1812743 - DNA, 25 bp, Homo sapien
tccgaagcagaagacctatgtggcg

SEQ ID NO: 1812744 - DNA, 25 bp, Homo sapien
cggccttgtaactcactcctcgtgg

SEQ ID NO: 1812745 - DNA, 25 bp, Homo sapien
gactccctatggctgtgtgactgat

SEQ ID NO: 1812746 - DNA, 25 bp, Homo sapien
tatggctgtgtgactgactctccac

SEQ ID NO: 1812747 - DNA, 25 bp, Homo sapien
gaggccgtgtgactgactccctatg

SEQ ID NO: 1812748 - DNA, 25 bp, Homo sapien
tatgaatctcggcatcggagctgcc

SEQ ID NO: 1812749 - DNA, 25 bp, Homo sapien
gcctcgttttccaggatcgggccaa

SEQ ID NO: 1812750 - DNA, 25 bp, Homo sapien
ccacttggcacgtgcagggccctgt

SEQ ID NO: 1812751 - DNA, 25 bp, Homo sapien
ggccctgtctggcatcaagatatga

SEQ ID NO: 1812752 - DNA, 25 bp, Homo sapien
aaggcgacctggggccccgcactat

SEQ ID NO: 1812753 - DNA, 25 bp, Homo sapien
tggaaaggcgacctggggccccgca

SEQ ID NO: 1812754 - DNA, 25 bp, Homo sapien
tgcgcgtggtgtgatactgccagcc

SEQ ID NO: 1812755 - DNA, 25 bp, Homo sapien
tcaaaattcccatgcgcgtggtgtg

SEQ ID NO: 1812756 - DNA, 25 bp, Homo sapien
tggtgtgatactgccagccgcacac

SEQ ID NO: 1812757 - DNA, 25 bp, Homo sapien
tcccatgcgcgtggtgtgatactgc

SEQ ID NO: 1812758 - DNA, 25 bp, Homo sapien
ttgcagtcgacagacaaagcggcca

SEQ ID NO: 1812759 - DNA, 25 bp, Homo sapien
ctgaggtcatctggggcggccacaa

SEQ ID NO: 1812760 - DNA, 25 bp, Homo sapien
atctgcaaagtggtcgtgtggcctg

SEQ ID NO: 1812761 - DNA, 25 bp, Homo sapien
ggagaccttgcagtcgacagacaaa

SEQ ID NO: 1812762 - DNA, 25 bp, Homo sapien
tgcatataccggcatcttggttttc

SEQ ID NO: 1812763 - DNA, 25 bp, Homo sapien
ttttcttctcggtgtacaccgtcat

SEQ ID NO: 1812764 - DNA, 25 bp, Homo sapien
tttcttctctgcatataccggcatc

SEQ ID NO: 1812765 - DNA, 25 bp, Homo sapien
cggtgtacaccgtcatctcagtttt

SEQ ID NO: 1812766 - DNA, 25 bp, Homo sapien
catcttggtttccttctggtgtaca

SEQ ID NO: 1812767 - DNA, 25 bp, Homo sapien
atcttggtttccttctggtgtacac

SEQ ID NO: 1812768 - DNA, 25 bp, Homo sapien
tcatcttggtttccttctggtgtac

SEQ ID NO: 1812769 - DNA, 25 bp, Homo sapien
taactttgagccacagacgctggtg

SEQ ID NO: 1812770 - DNA, 25 bp, Homo sapien
tcagcattaggagaggcgacgctca

SEQ ID NO: 1812771 - DNA, 25 bp, Homo sapien
cacagccccgtgttgtaaagaccct

SEQ ID NO: 1812772 - DNA, 25 bp, Homo sapien
ttactgagtgagtgagacggctcca

SEQ ID NO: 1812773 - DNA, 25 bp, Homo sapien
ggaacaatccgttccaggtcacaag

SEQ ID NO: 1812774 - DNA, 25 bp, Homo sapien
cactggtcccttctgacacaggcgt

SEQ ID NO: 1812775 - DNA, 25 bp, Homo sapien
cctggagccccgtggacgttgggtg

SEQ ID NO: 1812776 - DNA, 25 bp, Homo sapien
ttctgcagatgctgagctcacgccc

SEQ ID NO: 1812777 - DNA, 25 bp, Homo sapien
gacacaggcgtcttctgcagatgct

SEQ ID NO: 1812778 - DNA, 25 bp, Homo sapien
gcaggaccaccgttgtggggcttcc

SEQ ID NO: 1812779 - DNA, 25 bp, Homo sapien
tctgttggcaggaccaccgttgtgg

SEQ ID NO: 1812780 - DNA, 25 bp, Homo sapien
aggaccaccgttgtggggcttcctg

SEQ ID NO: 1812781 - DNA, 25 bp, Homo sapien
ggtctgttggcaggaccaccgttgt

SEQ ID NO: 1812782 - DNA, 25 bp, Homo sapien
cagcctaccctggcttctggaagct

SEQ ID NO: 1812783 - DNA, 25 bp, Homo sapien
gtgcacgccgccgatgggtgctcac

SEQ ID NO: 1812784 - DNA, 25 bp, Homo sapien
cctggcatttcgtgggctttctggg

SEQ ID NO: 1812785 - DNA, 25 bp, Homo sapien
ctgcctggcatttcgtgggctttct

SEQ ID NO: 1812786 - DNA, 25 bp, Homo sapien
agggagtgggtcacggctggctgtt

SEQ ID NO: 1812787 - DNA, 25 bp, Homo sapien
tcacggctggctgttgtggtgcaca

SEQ ID NO: 1812788 - DNA, 25 bp, Homo sapien
tggctccatggtcgtggacgaggga

SEQ ID NO: 1812789 - DNA, 25 bp, Homo sapien
agggagtgggtcacggctggctcca

SEQ ID NO: 1812790 - DNA, 25 bp, Homo sapien
ggctcggttccatggtcgcggacga

SEQ ID NO: 1812791 - DNA, 25 bp, Homo sapien
acgagggagtgggtcacggctggct

SEQ ID NO: 1812792 - DNA, 25 bp, Homo sapien
tggtcgcggacgagggagtgggtca

SEQ ID NO: 1812793 - DNA, 25 bp, Homo sapien
tccatggtcgcggacgagggagtgg

SEQ ID NO: 1812794 - DNA, 25 bp, Homo sapien
taacatcacatcagtcttcagaata

SEQ ID NO: 1812795 - DNA, 25 bp, Homo sapien
gtgatagagtcaggtattacgcatg

SEQ ID NO: 1812796 - DNA, 25 bp, Homo sapien
tattacgcatgatcgttctactaag

SEQ ID NO: 1812797 - DNA, 25 bp, Homo sapien
caacacgtttaaagtatacgaaatg

SEQ ID NO: 1812798 - DNA, 25 bp, Homo sapien
acttttgcccgttgtggtcaaccag

SEQ ID NO: 1812799 - DNA, 25 bp, Homo sapien
caaccagatgtactggttggtgctg

SEQ ID NO: 1812800 - DNA, 25 bp, Homo sapien
ccagatgtactggttggtgctggct

SEQ ID NO: 1812801 - DNA, 25 bp, Homo sapien
gcccgttgtggtcaaccagatgtac

SEQ ID NO: 1812802 - DNA, 25 bp, Homo sapien
tggaatgggtaatgaactctgaccc

SEQ ID NO: 1812803 - DNA, 25 bp, Homo sapien
cacttaactgccaaagggagctgtt

SEQ ID NO: 1812804 - DNA, 25 bp, Homo sapien
ttggtcaaccagtgtgcaaatctga

SEQ ID NO: 1812805 - DNA, 25 bp, Homo sapien
gatgtcatgccagcccaaagtaaag

SEQ ID NO: 1812806 - DNA, 25 bp, Homo sapien
gggctgcggtggcctccgaacacct

SEQ ID NO: 1812807 - DNA, 25 bp, Homo sapien
tcaaccaggagcagtatctgctatc

SEQ ID NO: 1812808 - DNA, 25 bp, Homo sapien
cctttgctgtaaagcataatttttg

SEQ ID NO: 1812809 - DNA, 25 bp, Homo sapien
gcctccgaacacctccgggagtgaa

SEQ ID NO: 1812810 - DNA, 25 bp, Homo sapien
ctcactgacaaacgggattttaaat

SEQ ID NO: 1812811 - DNA, 25 bp, Homo sapien
tccctcactgacaaacgggatttta

SEQ ID NO: 1812812 - DNA, 25 bp, Homo sapien
accttccctcactgacaaacgggat

SEQ ID NO: 1812813 - DNA, 25 bp, Homo sapien
gaaaaatccattccacagtttccac

SEQ ID NO: 1812814 - DNA, 25 bp, Homo sapien
ccgtgtggcttgcaccatttgtcgt

SEQ ID NO: 1812815 - DNA, 25 bp, Homo sapien
cccgtgtggcttgcaccatttgtcg

SEQ ID NO: 1812816 - DNA, 25 bp, Homo sapien
cgtgtggcttgcaccatttgtcgtt

SEQ ID NO: 1812817 - DNA, 25 bp, Homo sapien
gtgtggcttgcaccatttgtcgttt

SEQ ID NO: 1812818 - DNA, 25 bp, Homo sapien
cagctgcctctagaaattaaccaca

SEQ ID NO: 1812819 - DNA, 25 bp, Homo sapien
tggagcccacacagccgtctcctct

SEQ ID NO: 1812820 - DNA, 25 bp, Homo sapien
cgtaggcaaacctgtcttctccaca

SEQ ID NO: 1812821 - DNA, 25 bp, Homo sapien
gtctcctctctacgctgcgtaggca

SEQ ID NO: 1812822 - DNA, 25 bp, Homo sapien
ggtcaccagctccaaacagttgcag

SEQ ID NO: 1812823 - DNA, 25 bp, Homo sapien
ttagcaggaagcgacggcgcccatg

SEQ ID NO: 1812824 - DNA, 25 bp, Homo sapien
gcagtaggtcccagtgatcatggaa

SEQ ID NO: 1812825 - DNA, 25 bp, Homo sapien
ctctgaggcggttcctgaggcagta

SEQ ID NO: 1812826 - DNA, 25 bp, Homo sapien
ggtccctgtcgctggccgggcacca

SEQ ID NO: 1812827 - DNA, 25 bp, Homo sapien
gcaccagagaggctttgtgatcgtc

SEQ ID NO: 1812828 - DNA, 25 bp, Homo sapien
cctgtcgctggccgggcaccagaga

SEQ ID NO: 1812829 - DNA, 25 bp, Homo sapien
tgatcgtccccagccagcgttccct

SEQ ID NO: 1812830 - DNA, 25 bp, Homo sapien
tccctgcgcacggaagacgagagga

SEQ ID NO: 1812831 - DNA, 25 bp, Homo sapien
tgagaaggcgccacatggctcccgt

SEQ ID NO: 1812832 - DNA, 25 bp, Homo sapien
cataccccagatagaagattccagg

SEQ ID NO: 1812833 - DNA, 25 bp, Homo sapien
tgcaggttgacagttgcccagagcc

SEQ ID NO: 1812834 - DNA, 25 bp, Homo sapien
ggcatttagcaatcagtcggaaact

SEQ ID NO: 1812835 - DNA, 25 bp, Homo sapien
gattcgccccgattagacggaccag

SEQ ID NO: 1812836 - DNA, 25 bp, Homo sapien
gcagagctgggcaatatccacgcag

SEQ ID NO: 1812837 - DNA, 25 bp, Homo sapien
caatacgatgcctcagaagactggt

SEQ ID NO: 1812838 - DNA, 25 bp, Homo sapien
tggaagctcagcatccacagggcac

SEQ ID NO: 1812839 - DNA, 25 bp, Homo sapien
gcccctccgtggaagctcagcatcc

SEQ ID NO: 1812840 - DNA, 25 bp, Homo sapien
cgtggaagctcagcatccacagggc

SEQ ID NO: 1812841 - DNA, 25 bp, Homo sapien
tccgtggaagctcagcatccacagg

SEQ ID NO: 1812842 - DNA, 25 bp, Homo sapien
ttccccactggtgaactcgagctga

SEQ ID NO: 1812843 - DNA, 25 bp, Homo sapien
ggagccaaaggaagcgcgttgggct

SEQ ID NO: 1812844 - DNA, 25 bp, Homo sapien
tcggtgccgttcactccttgcggtg

SEQ ID NO: 1812845 - DNA, 25 bp, Homo sapien
ggaacggagccctcgttccacaggc

SEQ ID NO: 1812846 - DNA, 25 bp, Homo sapien
aaaggccagtgagacagatgccagg

SEQ ID NO: 1812847 - DNA, 25 bp, Homo sapien
tgagaaaggccagtgagacagatgc

SEQ ID NO: 1812848 - DNA, 25 bp, Homo sapien
agggccctggcaaggcgggtgcgag

SEQ ID NO: 1812849 - DNA, 25 bp, Homo sapien
gaaaggccagtgagacagatgccag

SEQ ID NO: 1812850 - DNA, 25 bp, Homo sapien
ggagtaaaactgaagcaccctcctc

SEQ ID NO: 1812851 - DNA, 25 bp, Homo sapien
tgagaagatcttgcctctcaaaggg

SEQ ID NO: 1812852 - DNA, 25 bp, Homo sapien
cttcttgtgggttgagaagatcttg

SEQ ID NO: 1812853 - DNA, 25 bp, Homo sapien
gagtaaaactgaagcaccctcctca

SEQ ID NO: 1812854 - DNA, 25 bp, Homo sapien
agattcttgaacgtggaaggctgtg

SEQ ID NO: 1812855 - DNA, 25 bp, Homo sapien
gagatgaatgaagattcttgaacgt

SEQ ID NO: 1812856 - DNA, 25 bp, Homo sapien
ccagttggaccaggcttattcgaca

SEQ ID NO: 1812857 - DNA, 25 bp, Homo sapien
cttagggaacattcgctgaaagaga

SEQ ID NO: 1812858 - DNA, 25 bp, Homo sapien
ccaaagtggtagcatgcagctgggc

SEQ ID NO: 1812859 - DNA, 25 bp, Homo sapien
gaagatgcctttgtacttgtgcttg

SEQ ID NO: 1812860 - DNA, 25 bp, Homo sapien
cttggctccggaagatgcctttgta

SEQ ID NO: 1812861 - DNA, 25 bp, Homo sapien
gtgcttgcctcccacttgcacgagg

SEQ ID NO: 1812862 - DNA, 25 bp, Homo sapien
cagggcttactgctgcggtggcaaa

SEQ ID NO: 1812863 - DNA, 25 bp, Homo sapien
tatacaccggttcagaaagacgtct

SEQ ID NO: 1812864 - DNA, 25 bp, Homo sapien
tccttcagtacaagccacagcggtt

SEQ ID NO: 1812865 - DNA, 25 bp, Homo sapien
gaattatacaatcctggaccactgg

SEQ ID NO: 1812866 - DNA, 25 bp, Homo sapien
tggactcttcctcggcatgcttccg

SEQ ID NO: 1812867 - DNA, 25 bp, Homo sapien
cgttctttccccgcgtattgcttag

SEQ ID NO: 1812868 - DNA, 25 bp, Homo sapien
tctggaagttcccatgaatggactc

SEQ ID NO: 1812869 - DNA, 25 bp, Homo sapien
tgatcgtggatctggcctctgtgac

SEQ ID NO: 1812870 - DNA, 25 bp, Homo sapien
caaggttccggtcctgcggacaagc

SEQ ID NO: 1812871 - DNA, 25 bp, Homo sapien
cgcacgtgagctccccggagtgatg

SEQ ID NO: 1812872 - DNA, 25 bp, Homo sapien
aagatgctacagaggaccccgtccg

SEQ ID NO: 1812873 - DNA, 25 bp, Homo sapien
agaggaccccgtccgcacgtgagct

SEQ ID NO: 1812874 - DNA, 25 bp, Homo sapien
tgccttcccattgccgtgcgtggag

SEQ ID NO: 1812875 - DNA, 25 bp, Homo sapien
tttgtgacgggattcgtggtgtctc

SEQ ID NO: 1812876 - DNA, 25 bp, Homo sapien
tgacgggattcgtggtgtctccaac

SEQ ID NO: 1812877 - DNA, 25 bp, Homo sapien
gattcgtggtgtctccaactttctc

SEQ ID NO: 1812878 - DNA, 25 bp, Homo sapien
taagagtgtttgtgacgggattcgt

SEQ ID NO: 1812879 - DNA, 25 bp, Homo sapien
gaagcccaactgagctaaatcactt

SEQ ID NO: 1812880 - DNA, 25 bp, Homo sapien
aaacattcatggctccacgcctggc

SEQ ID NO: 1812881 - DNA, 25 bp, Homo sapien
ggcatttgctgaatccatcttctag

SEQ ID NO: 1812882 - DNA, 25 bp, Homo sapien
ccatcaaggtgtcgtctggctaaca

SEQ ID NO: 1812883 - DNA, 25 bp, Homo sapien
cagccctgtatatggtaagagtgcg

SEQ ID NO: 1812884 - DNA, 25 bp, Homo sapien
taagagtgcgtctacttggtatcca

SEQ ID NO: 1812885 - DNA, 25 bp, Homo sapien
ttttgcatgcaaggacacgcgccat

SEQ ID NO: 1812886 - DNA, 25 bp, Homo sapien
cgcaggaggcacacagtacgtctgt

SEQ ID NO: 1812887 - DNA, 25 bp, Homo sapien
ataagccctgcaagaatggagccac

SEQ ID NO: 1812888 - DNA, 25 bp, Homo sapien
agtgtgaccccagcccttgtaagaa

SEQ ID NO: 1812889 - DNA, 25 bp, Homo sapien
ttttctgcaaccagggtaagccttc

SEQ ID NO: 1812890 - DNA, 25 bp, Homo sapien
tcttgccggcctgggtacacaggtg

SEQ ID NO: 1812891 - DNA, 25 bp, Homo sapien
aaagccagcaacagtcaacgtccat

SEQ ID NO: 1812892 - DNA, 25 bp, Homo sapien
ttgcctcatcctagaatcactcagg

SEQ ID NO: 1812893 - DNA, 25 bp, Homo sapien
tggtgctgccctaacacccaagaag

SEQ ID NO: 1812894 - DNA, 25 bp, Homo sapien
aaccagaggctcactggtgctgcgg

SEQ ID NO: 1812895 - DNA, 25 bp, Homo sapien
gacattttaacatcccaggctgtgt

SEQ ID NO: 1812896 - DNA, 25 bp, Homo sapien
tgtgacgaacactactacggagagg

SEQ ID NO: 1812897 - DNA, 25 bp, Homo sapien
gctataagtcacagctcgtcagtgg

SEQ ID NO: 1812898 - DNA, 25 bp, Homo sapien
gaaagtgtgcaaccctggctggaaa

SEQ ID NO: 1812899 - DNA, 25 bp, Homo sapien
cgtccgccgctgttctaaggagaga

SEQ ID NO: 1812900 - DNA, 25 bp, Homo sapien
tctcggccttgctgtgtcaggtagg

SEQ ID NO: 1812901 - DNA, 25 bp, Homo sapien
tggagcgaagcagcatgggcagtcg

SEQ ID NO: 1812902 - DNA, 25 bp, Homo sapien
cgaggcaagggcgcttttctgccca

SEQ ID NO: 1812903 - DNA, 25 bp, Homo sapien
tctttgctgtgacaccggagatcgg

SEQ ID NO: 1812904 - DNA, 25 bp, Homo sapien
cggctttctaatcggctcgggagga

SEQ ID NO: 1812905 - DNA, 25 bp, Homo sapien
tggattcatcggaaagacgcggatc

SEQ ID NO: 1812906 - DNA, 25 bp, Homo sapien
atctcattagccatgcgggcggccg

SEQ ID NO: 1812907 - DNA, 25 bp, Homo sapien
tgcaggaatgtaaatgagtgcgttt

SEQ ID NO: 1812908 - DNA, 25 bp, Homo sapien
cagggggattcttgcggtgaacatt

SEQ ID NO: 1812909 - DNA, 25 bp, Homo sapien
tctgggcgtctgtggcccgggaggg

SEQ ID NO: 1812910 - DNA, 25 bp, Homo sapien
tcttgcggtgaacattttgcaggaa

SEQ ID NO: 1812911 - DNA, 25 bp, Homo sapien
ttaatgacagccacgcgaacgacac

SEQ ID NO: 1812912 - DNA, 25 bp, Homo sapien
cggaccacgagaggacaccgaaggc

SEQ ID NO: 1812913 - DNA, 25 bp, Homo sapien
gattcagcctcgcacaataacaggc

SEQ ID NO: 1812914 - DNA, 25 bp, Homo sapien
ctgagcgcacaaagagccactgatt

SEQ ID NO: 1812915 - DNA, 25 bp, Homo sapien
gagtagcaattccagctgcgtagca

SEQ ID NO: 1812916 - DNA, 25 bp, Homo sapien
aaaaggatcctgacactaggtggca

SEQ ID NO: 1812917 - DNA, 25 bp, Homo sapien
ggctttagaacatgcgccggacatt

SEQ ID NO: 1812918 - DNA, 25 bp, Homo sapien
tgaaagtctcgttctaccttgacgg

SEQ ID NO: 1812919 - DNA, 25 bp, Homo sapien
gaatagttggacctcgagtctctcc

SEQ ID NO: 1812920 - DNA, 25 bp, Homo sapien
aaaacgccatttggttcggagcaga

SEQ ID NO: 1812921 - DNA, 25 bp, Homo sapien
tactggtgcgcaggagttaaactac

SEQ ID NO: 1812922 - DNA, 25 bp, Homo sapien
gatggcgtctaaaggcgtgtcgtcc

SEQ ID NO: 1812923 - DNA, 25 bp, Homo sapien
gcagctctgatcattatacagcctg

SEQ ID NO: 1812924 - DNA, 25 bp, Homo sapien
tgtgtctgatgtattgggtgccttc

SEQ ID NO: 1812925 - DNA, 25 bp, Homo sapien
ggtgccttctaagccctaatgagcc

SEQ ID NO: 1812926 - DNA, 25 bp, Homo sapien
tacagcctgagcttaccctagacac

SEQ ID NO: 1812927 - DNA, 25 bp, Homo sapien
cgacacgaaccaggtggggttggag

SEQ ID NO: 1812928 - DNA, 25 bp, Homo sapien
cttcctgttctctgcacggccgcgg

SEQ ID NO: 1812929 - DNA, 25 bp, Homo sapien
ttggagcccgtcttcctgttctctg

SEQ ID NO: 1812930 - DNA, 25 bp, Homo sapien
cctgttctctgcacggccgcggatc

SEQ ID NO: 1812931 - DNA, 25 bp, Homo sapien
gggcttttcccctgcgtcactccac

SEQ ID NO: 1812932 - DNA, 25 bp, Homo sapien
ttcccctgcgtcactccacatttct

SEQ ID NO: 1812933 - DNA, 25 bp, Homo sapien
cttttcccctgcgtcactccacatt

SEQ ID NO: 1812934 - DNA, 25 bp, Homo sapien
ccctgcgtcactccacatttctcct

SEQ ID NO: 1812935 - DNA, 25 bp, Homo sapien
ggccgggtgttctgaccgtcaccat

SEQ ID NO: 1812936 - DNA, 25 bp, Homo sapien
tcgcctccgtatcgggacggcgcgg

SEQ ID NO: 1812937 - DNA, 25 bp, Homo sapien
agcgctgagcacttctcggccgggt

SEQ ID NO: 1812938 - DNA, 25 bp, Homo sapien
cggccccagtcagcgctgagcactt

SEQ ID NO: 1812939 - DNA, 25 bp, Homo sapien
ggagcggggacgtcctggcgttcga

SEQ ID NO: 1812940 - DNA, 25 bp, Homo sapien
gagcggggacgtcctggcgttcgac

SEQ ID NO: 1812941 - DNA, 25 bp, Homo sapien
gcactgaggactggcggctcccggg

SEQ ID NO: 1812942 - DNA, 25 bp, Homo sapien
cctcaggccgaagttgtgcgagcgc

SEQ ID NO: 1812943 - DNA, 25 bp, Homo sapien
tgtcctgccggaggcactgaggact

SEQ ID NO: 1812944 - DNA, 25 bp, Homo sapien
gccggtctttgtcctgccggaggca

SEQ ID NO: 1812945 - DNA, 25 bp, Homo sapien
tttgttcatacactgtcctgcggcc

SEQ ID NO: 1812946 - DNA, 25 bp, Homo sapien
cgggtgccgcccttgaacctctttg

SEQ ID NO: 1812947 - DNA, 25 bp, Homo sapien
cccggacggtgtcttgacgctgcat

SEQ ID NO: 1812948 - DNA, 25 bp, Homo sapien
agtcaggtagctgcccgctggcgtc

SEQ ID NO: 1812949 - DNA, 25 bp, Homo sapien
ggagcgcccgcgtcgtgggttgggc

SEQ ID NO: 1812950 - DNA, 25 bp, Homo sapien
gcaggcgcggacagcggacgcggcg

SEQ ID NO: 1812951 - DNA, 25 bp, Homo sapien
tctgcgtgaccgttgcgagagtgag

SEQ ID NO: 1812952 - DNA, 25 bp, Homo sapien
tgggacgccgcggcctgttgccaca

SEQ ID NO: 1812953 - DNA, 25 bp, Homo sapien
tagagatgcgccaacaccagccgca

SEQ ID NO: 1812954 - DNA, 25 bp, Homo sapien
accctaggcccagccgcctcagcca

SEQ ID NO: 1812955 - DNA, 25 bp, Homo sapien
agacgcgcccgctgcaccctaggcc

SEQ ID NO: 1812956 - DNA, 25 bp, Homo sapien
acagccgcctcgttcacttccgctt

SEQ ID NO: 1812957 - DNA, 25 bp, Homo sapien
ggacggtcacgcaggccgggagcgg

SEQ ID NO: 1812958 - DNA, 25 bp, Homo sapien
acgcgggtaacggacggtcacgcag

SEQ ID NO: 1812959 - DNA, 25 bp, Homo sapien
gcgcgcgagggtcggacgcgggtaa

SEQ ID NO: 1812960 - DNA, 25 bp, Homo sapien
ctgacgcgcgcgagggtcggacgcg

SEQ ID NO: 1812961 - DNA, 25 bp, Homo sapien
tcgcagccgcggtgacaaggacaga

SEQ ID NO: 1812962 - DNA, 25 bp, Homo sapien
ggacagggatgacgacgggctcggc

SEQ ID NO: 1812963 - DNA, 25 bp, Homo sapien
gagggttctgcgcagggacagggat

SEQ ID NO: 1812964 - DNA, 25 bp, Homo sapien
ggacgcgaggatcccatgatgtcgc

SEQ ID NO: 1812965 - DNA, 25 bp, Homo sapien
ggcaggcaaggcgacggtcgcgagg

SEQ ID NO: 1812966 - DNA, 25 bp, Homo sapien
tcggggagcacgcaatgacgcggac

SEQ ID NO: 1812967 - DNA, 25 bp, Homo sapien
cgaggtcggggagcacgcaatgacg

SEQ ID NO: 1812968 - DNA, 25 bp, Homo sapien
gcaaggcgacggtcgcgaggtcggg

SEQ ID NO: 1812969 - DNA, 25 bp, Homo sapien
ccaggttctctccactaccatttcg

SEQ ID NO: 1812970 - DNA, 25 bp, Homo sapien
caggttctctccactaccatttcgg

SEQ ID NO: 1812971 - DNA, 25 bp, Homo sapien
aggttctctccactaccatttcggg

SEQ ID NO: 1812972 - DNA, 25 bp, Homo sapien
ctccaggttctctccactaccattt

SEQ ID NO: 1812973 - DNA, 25 bp, Homo sapien
tatgaatgcacaaacaaccaggtga

SEQ ID NO: 1812974 - DNA, 25 bp, Homo sapien
tgagaacagggaccgaaaatcccaa

SEQ ID NO: 1812975 - DNA, 25 bp, Homo sapien
tgcaagaattcccaatcaccgataa

SEQ ID NO: 1812976 - DNA, 25 bp, Homo sapien
gaccacacttttgctagggccttga

SEQ ID NO: 1812977 - DNA, 25 bp, Homo sapien
acagggatgagggacttacagacag

SEQ ID NO: 1812978 - DNA, 25 bp, Homo sapien
tgagggacttacagacagcccaagg

SEQ ID NO: 1812979 - DNA, 25 bp, Homo sapien
gggatgagggacttacagacagccc

SEQ ID NO: 1812980 - DNA, 25 bp, Homo sapien
gggcaactccccacacggacagcag

SEQ ID NO: 1812981 - DNA, 25 bp, Homo sapien
aaaccttgaggttaagagcaatgcg

SEQ ID NO: 1812982 - DNA, 25 bp, Homo sapien
cacacagtgaggaagactcatctgg

SEQ ID NO: 1812983 - DNA, 25 bp, Homo sapien
tgcctgatgttgatggacgcacaca

SEQ ID NO: 1812984 - DNA, 25 bp, Homo sapien
gcaatgcgctcagcataaacaaagc

SEQ ID NO: 1812985 - DNA, 25 bp, Homo sapien
caagctctgtgctggctgctgcagg

SEQ ID NO: 1812986 - DNA, 25 bp, Homo sapien
ggctgctgcaggcccaggagagccc

SEQ ID NO: 1812987 - DNA, 25 bp, Homo sapien
tgctggctgctgcaggcccaggaga

SEQ ID NO: 1812988 - DNA, 25 bp, Homo sapien
ctggctgctgcaggcccaggagagc

SEQ ID NO: 1812989 - DNA, 25 bp, Homo sapien
tctctgcagagcatgacggtgtcca

SEQ ID NO: 1812990 - DNA, 25 bp, Homo sapien
gaaaagtattctcgccactggccac

SEQ ID NO: 1812991 - DNA, 25 bp, Homo sapien
caggatacttgcttcggtggtgctc

SEQ ID NO: 1812992 - DNA, 25 bp, Homo sapien
gtgtaaacacagctagccctgaggg

SEQ ID NO: 1812993 - DNA, 25 bp, Homo sapien
gtttggtcccagaggtaatatctct

SEQ ID NO: 1812994 - DNA, 25 bp, Homo sapien
ggtcccagaggtaatatctcttcta

SEQ ID NO: 1812995 - DNA, 25 bp, Homo sapien
cccagaggtaatatctcttctaatt

SEQ ID NO: 1812996 - DNA, 25 bp, Homo sapien
tggtcccagaggtaatatctcttct

SEQ ID NO: 1812997 - DNA, 25 bp, Homo sapien
gaacttcctgtttggattcatggcc

SEQ ID NO: 1812998 - DNA, 25 bp, Homo sapien
aatctgtatacacgggaacttctcg

SEQ ID NO: 1812999 - DNA, 25 bp, Homo sapien
tacttgttgctttacttcaggcccc

SEQ ID NO: 1813000 - DNA, 25 bp, Homo sapien
gattcggcgtctgaactcgtggata

SEQ ID NO: 1813001 - DNA, 25 bp, Homo sapien
gcttggacgtgatgtgttctagcaa

SEQ ID NO: 1813002 - DNA, 25 bp, Homo sapien
tgcttggacgtgatgtgttctagca

SEQ ID NO: 1813003 - DNA, 25 bp, Homo sapien
cttggacgtgatgtgttctagcaac

SEQ ID NO: 1813004 - DNA, 25 bp, Homo sapien
ctgcttggacgtgatgtgttctagc

SEQ ID NO: 1813005 - DNA, 25 bp, Homo sapien
tgagtagacccgctgtcgaatggga

SEQ ID NO: 1813006 - DNA, 25 bp, Homo sapien
tcatgatgttgtacaccaggtagct

SEQ ID NO: 1813007 - DNA, 25 bp, Homo sapien
ggcctggtcaagctcatcttctagg

SEQ ID NO: 1813008 - DNA, 25 bp, Homo sapien
catcttctagggtgttgctgcattc

SEQ ID NO: 1813009 - DNA, 25 bp, Homo sapien
gacgaggtccgggtgcctcagtggg

SEQ ID NO: 1813010 - DNA, 25 bp, Homo sapien
gcctcagtgggttcccaggatacac

SEQ ID NO: 1813011 - DNA, 25 bp, Homo sapien
ctggaatggtcatctgcagcggcct

SEQ ID NO: 1813012 - DNA, 25 bp, Homo sapien
ggatacacaaaccactccttgacag

SEQ ID NO: 1813013 - DNA, 25 bp, Homo sapien
ctgcggcagcaacatgcgctgacca

SEQ ID NO: 1813014 - DNA, 25 bp, Homo sapien
cggcagcaacatgcgctgaccacgg

SEQ ID NO: 1813015 - DNA, 25 bp, Homo sapien
agcaacatgcgctgaccacggccat

SEQ ID NO: 1813016 - DNA, 25 bp, Homo sapien
gctgaccacggccatccttctgtct

SEQ ID NO: 1813017 - DNA, 25 bp, Homo sapien
gctttaagatattgctcatgaaaat

SEQ ID NO: 1813018 - DNA, 25 bp, Homo sapien
ttacctctcattaagctttaagata

SEQ ID NO: 1813019 - DNA, 25 bp, Homo sapien
taagctttaagatattgctcatgaa

SEQ ID NO: 1813020 - DNA, 25 bp, Homo sapien
ctcattaagctttaagatattgctc

SEQ ID NO: 1813021 - DNA, 25 bp, Homo sapien
gcatcatgatgacacataacaatat

SEQ ID NO: 1813022 - DNA, 25 bp, Homo sapien
agcatcatgatgacacataacaata

SEQ ID NO: 1813023 - DNA, 25 bp, Homo sapien
catcatgatgacacataacaatatt

SEQ ID NO: 1813024 - DNA, 25 bp, Homo sapien
tctggctcttggttcagccataata

SEQ ID NO: 1813025 - DNA, 25 bp, Homo sapien
gattgaaacaggctaggagtgtgtc

SEQ ID NO: 1813026 - DNA, 25 bp, Homo sapien
tccaagcgccgaacctgtatttctg

SEQ ID NO: 1813027 - DNA, 25 bp, Homo sapien
ttgaaatgggctttcgacagcctgc

SEQ ID NO: 1813028 - DNA, 25 bp, Homo sapien
ggtagagccaatgtgctgcactgga

SEQ ID NO: 1813029 - DNA, 25 bp, Homo sapien
tggagacccctactgggaggactca

SEQ ID NO: 1813030 - DNA, 25 bp, Homo sapien
gttgactgaactgtggccgtccctc

SEQ ID NO: 1813031 - DNA, 25 bp, Homo sapien
gaagctctgtcctagtggttactga

SEQ ID NO: 1813032 - DNA, 25 bp, Homo sapien
cctgaatgatatcctaaagtatgtt

SEQ ID NO: 1813033 - DNA, 25 bp, Homo sapien
tagacctctgtcagatgaatacata

SEQ ID NO: 1813034 - DNA, 25 bp, Homo sapien
gacctctgtcagatgaatacatagt

SEQ ID NO: 1813035 - DNA, 25 bp, Homo sapien
cgcccggctatatgtcctcttttga

SEQ ID NO: 1813036 - DNA, 25 bp, Homo sapien
accgcgcccggctatatgtcctctt

SEQ ID NO: 1813037 - DNA, 25 bp, Homo sapien
gaggcacaaggcctgcgcaataaac

SEQ ID NO: 1813038 - DNA, 25 bp, Homo sapien
tacaagctgcgaggtggattttcct

SEQ ID NO: 1813039 - DNA, 25 bp, Homo sapien
aaatcctccaggcaaagcgtgtcca

SEQ ID NO: 1813040 - DNA, 25 bp, Homo sapien
caataaacgcatgcaaatcctccag

SEQ ID NO: 1813041 - DNA, 25 bp, Homo sapien
ctgtcttccgggcagtgacaactaa

SEQ ID NO: 1813042 - DNA, 25 bp, Homo sapien
cagctgtcttccgggcagtgacaac

SEQ ID NO: 1813043 - DNA, 25 bp, Homo sapien
gctgtcttccgggcagtgacaacta

SEQ ID NO: 1813044 - DNA, 25 bp, Homo sapien
cacagctgtcttccgggcagtgaca

SEQ ID NO: 1813045 - DNA, 25 bp, Homo sapien
caagggagggccaaaactgctaaca

SEQ ID NO: 1813046 - DNA, 25 bp, Homo sapien
ggtgtaccctctccctcatatgaag

SEQ ID NO: 1813047 - DNA, 25 bp, Homo sapien
tgtggaacttagctgtgattgggcc

SEQ ID NO: 1813048 - DNA, 25 bp, Homo sapien
ttcacaaaactggaactgaggcagc

SEQ ID NO: 1813049 - DNA, 25 bp, Homo sapien
taaggtaccagctcatggagttctc

SEQ ID NO: 1813050 - DNA, 25 bp, Homo sapien
tcagtgtgtaagagacggagccaga

SEQ ID NO: 1813051 - DNA, 25 bp, Homo sapien
tgtgacttgctgcactcgccatgca

SEQ ID NO: 1813052 - DNA, 25 bp, Homo sapien
ccctgacacggcaaagataaactga

SEQ ID NO: 1813053 - DNA, 25 bp, Homo sapien
tgttgtaaactccagagccctagct

SEQ ID NO: 1813054 - DNA, 25 bp, Homo sapien
gaatgcatgacatagaccacagctg

SEQ ID NO: 1813055 - DNA, 25 bp, Homo sapien
tccaagtgggctcaaagtctgacca

SEQ ID NO: 1813056 - DNA, 25 bp, Homo sapien
cacagctgtcatccctagtaaggcg

SEQ ID NO: 1813057 - DNA, 25 bp, Homo sapien
taaacacttgcaccaactggccagg

SEQ ID NO: 1813058 - DNA, 25 bp, Homo sapien
caccccacccgatggtgatggcagg

SEQ ID NO: 1813059 - DNA, 25 bp, Homo sapien
tctgatagtctcaaaaagggtgtgt

SEQ ID NO: 1813060 - DNA, 25 bp, Homo sapien
tgttccttccgtgattccagcagag

SEQ ID NO: 1813061 - DNA, 25 bp, Homo sapien
aaaggatcaaagcagtgtgggctca

SEQ ID NO: 1813062 - DNA, 25 bp, Homo sapien
gaggccataatcaacaggactaggg

SEQ ID NO: 1813063 - DNA, 25 bp, Homo sapien
aataacatgagcttatccgaggctg

SEQ ID NO: 1813064 - DNA, 25 bp, Homo sapien
tgtgtgtcctgacctgaggccataa

SEQ ID NO: 1813065 - DNA, 25 bp, Homo sapien
gaaaactgcgtgaaggtcctgagcc

SEQ ID NO: 1813066 - DNA, 25 bp, Homo sapien
tcctgtctcggaacgaatggcagac

SEQ ID NO: 1813067 - DNA, 25 bp, Homo sapien
ccaggcgctgctcttgggacttgca

SEQ ID NO: 1813068 - DNA, 25 bp, Homo sapien
tcaaggcctgactcctgaagactca

SEQ ID NO: 1813069 - DNA, 25 bp, Homo sapien
gagattcccatgctgtatctgacag

SEQ ID NO: 1813070 - DNA, 25 bp, Homo sapien
tacagaacgtaagcgagcgccagtg

SEQ ID NO: 1813071 - DNA, 25 bp, Homo sapien
gaagtcttccgattgtagttgggca

SEQ ID NO: 1813072 - DNA, 25 bp, Homo sapien
cctcccatgttggtaaagatgctcc

SEQ ID NO: 1813073 - DNA, 25 bp, Homo sapien
catgccagcgctctctgctctacca

SEQ ID NO: 1813074 - DNA, 25 bp, Homo sapien
taccgctctgctgcacgtggtcatc

SEQ ID NO: 1813075 - DNA, 25 bp, Homo sapien
tggtcatccccgcatgccagcgctc

SEQ ID NO: 1813076 - DNA, 25 bp, Homo sapien
cttttcttgcataccgctctgctgc

SEQ ID NO: 1813077 - DNA, 25 bp, Homo sapien
catccagaatgaatggtgctctccc

SEQ ID NO: 1813078 - DNA, 25 bp, Homo sapien
actgctctgttctaagggtttctct

SEQ ID NO: 1813079 - DNA, 25 bp, Homo sapien
tccagaatgaatggtgctctcccag

SEQ ID NO: 1813080 - DNA, 25 bp, Homo sapien
aactgctctgttctaagggtttctc

SEQ ID NO: 1813081 - DNA, 25 bp, Homo sapien
gaagaggactctgagttacacatcc

SEQ ID NO: 1813082 - DNA, 25 bp, Homo sapien
aggtgtccacaggtcaagcccaaat

SEQ ID NO: 1813083 - DNA, 25 bp, Homo sapien
cacatccttctagcgggtggcaggg

SEQ ID NO: 1813084 - DNA, 25 bp, Homo sapien
ctgtgggacatgaacggaaacaagt

SEQ ID NO: 1813085 - DNA, 25 bp, Homo sapien
catagaataggcgctcaacgtattt

SEQ ID NO: 1813086 - DNA, 25 bp, Homo sapien
agaataggcgctcaacgtatttttt

SEQ ID NO: 1813087 - DNA, 25 bp, Homo sapien
tggcatagaataggcgctcaacgta

SEQ ID NO: 1813088 - DNA, 25 bp, Homo sapien
aaacggaatgaactgacaagaaact

SEQ ID NO: 1813089 - DNA, 25 bp, Homo sapien
tggcactggccatctacttagcacg

SEQ ID NO: 1813090 - DNA, 25 bp, Homo sapien
taatgtggccaaataaaggtgcagc

SEQ ID NO: 1813091 - DNA, 25 bp, Homo sapien
catttcccctgctagaatgtggttc

SEQ ID NO: 1813092 - DNA, 25 bp, Homo sapien
tctaggctgcagatccgacaagggt

SEQ ID NO: 1813093 - DNA, 25 bp, Homo sapien
gacgctgaaacaaaatactcactgg

SEQ ID NO: 1813094 - DNA, 25 bp, Homo sapien
gcctgaggaagcctacgaacacttt

SEQ ID NO: 1813095 - DNA, 25 bp, Homo sapien
tacctaagacctagcaatgggtcta

SEQ ID NO: 1813096 - DNA, 25 bp, Homo sapien
tttttgaacactgacatgacgctga

SEQ ID NO: 1813097 - DNA, 25 bp, Homo sapien
aagtggttcctaatgccaagctgac

SEQ ID NO: 1813098 - DNA, 25 bp, Homo sapien
tgggactacctcacatagcaaagct

SEQ ID NO: 1813099 - DNA, 25 bp, Homo sapien
gcttttctgagatttggcccctaca

SEQ ID NO: 1813100 - DNA, 25 bp, Homo sapien
accgagtgacacctctgggctagag

SEQ ID NO: 1813101 - DNA, 25 bp, Homo sapien
tgagccttccagtacatgaacacgg

SEQ ID NO: 1813102 - DNA, 25 bp, Homo sapien
agtctggagggaacccacgtctctg

SEQ ID NO: 1813103 - DNA, 25 bp, Homo sapien
taggctgccttcctccaatgagttg

SEQ ID NO: 1813104 - DNA, 25 bp, Homo sapien
tgggtatccagtgctccagtcacat

SEQ ID NO: 1813105 - DNA, 25 bp, Homo sapien
taattttacaaaagtgtgaggccaa

SEQ ID NO: 1813106 - DNA, 25 bp, Homo sapien
tatctttggcctactttctaactgg

SEQ ID NO: 1813107 - DNA, 25 bp, Homo sapien
tataagatctctgtcagacaggagg

SEQ ID NO: 1813108 - DNA, 25 bp, Homo sapien
tgcctgaccctagataccaaagatc

SEQ ID NO: 1813109 - DNA, 25 bp, Homo sapien
tactacagggcaatatccaaaccag

SEQ ID NO: 1813110 - DNA, 25 bp, Homo sapien
tcaggtggttccaagcgtcagccac

SEQ ID NO: 1813111 - DNA, 25 bp, Homo sapien
gcttcatggcatggatgcaccagcc

SEQ ID NO: 1813112 - DNA, 25 bp, Homo sapien
gacaaagataggatagagggcccca

SEQ ID NO: 1813113 - DNA, 25 bp, Homo sapien
gccccatggaaagtgataccgatat

SEQ ID NO: 1813114 - DNA, 25 bp, Homo sapien
tatctagcgagtgtccacatgagtc

SEQ ID NO: 1813115 - DNA, 25 bp, Homo sapien
cctgcatttagcgaggatgctgcat

SEQ ID NO: 1813116 - DNA, 25 bp, Homo sapien
catgagatactctctacctcctggc

SEQ ID NO: 1813117 - DNA, 25 bp, Homo sapien
cagcataacccttttcagattgcaa

SEQ ID NO: 1813118 - DNA, 25 bp, Homo sapien
gccacatgcgctgttgactaaaacc

SEQ ID NO: 1813119 - DNA, 25 bp, Homo sapien
acttctgatgaaaaagcttcccgtc

SEQ ID NO: 1813120 - DNA, 25 bp, Homo sapien
gcttcccgtcaaatacattccaggg

SEQ ID NO: 1813121 - DNA, 25 bp, Homo sapien
tacttgcagtcctatgccactctgg

SEQ ID NO: 1813122 - DNA, 25 bp, Homo sapien
tatcgtgacagaccggtatgctctc

SEQ ID NO: 1813123 - DNA, 25 bp, Homo sapien
tcttccaggagtcatgtagcgattg

SEQ ID NO: 1813124 - DNA, 25 bp, Homo sapien
gtatgctctctcacggatcacaccg

SEQ ID NO: 1813125 - DNA, 25 bp, Homo sapien
ttgcagacgactgccttcaggttgt

SEQ ID NO: 1813126 - DNA, 25 bp, Homo sapien
cttcatgcaggccttgcagacgact

SEQ ID NO: 1813127 - DNA, 25 bp, Homo sapien
ggctcggccagtgatgcgtctgttc

SEQ ID NO: 1813128 - DNA, 25 bp, Homo sapien
cagtgatgcgtctgttctccttcat

SEQ ID NO: 1813129 - DNA, 25 bp, Homo sapien
aagcagttagggtctacgcttgtgg

SEQ ID NO: 1813130 - DNA, 25 bp, Homo sapien
aggaagcagttagggtctacgcttg

SEQ ID NO: 1813131 - DNA, 25 bp, Homo sapien
ggtctacgcttgtggggcttctaga

SEQ ID NO: 1813132 - DNA, 25 bp, Homo sapien
tggggcttctagaggcacctggccc

SEQ ID NO: 1813133 - DNA, 25 bp, Homo sapien
gcacccggccctatcatttaaattc

SEQ ID NO: 1813134 - DNA, 25 bp, Homo sapien
cacccggccctatcatttaaattct

SEQ ID NO: 1813135 - DNA, 25 bp, Homo sapien
tcatccaattatatcagcctcttct

SEQ ID NO: 1813136 - DNA, 25 bp, Homo sapien
ctagaaaggaggttacacatgcaga

SEQ ID NO: 1813137 - DNA, 25 bp, Homo sapien
ccactgggtagagattttaatactt

SEQ ID NO: 1813138 - DNA, 25 bp, Homo sapien
aggttacacatgcagagaaagagtt

SEQ ID NO: 1813139 - DNA, 25 bp, Homo sapien
tatttaattaatgagcgaatccttt

SEQ ID NO: 1813140 - DNA, 25 bp, Homo sapien
agcagctgttccactttggggaacc

SEQ ID NO: 1813141 - DNA, 25 bp, Homo sapien
aagcagctgttccactttggggaac

SEQ ID NO: 1813142 - DNA, 25 bp, Homo sapien
taagcagctgttccactttggggaa

SEQ ID NO: 1813143 - DNA, 25 bp, Homo sapien
ctaagcagctgttccactttgggga

SEQ ID NO: 1813144 - DNA, 25 bp, Homo sapien
aaactcttgtcaaataaacaaacat

SEQ ID NO: 1813145 - DNA, 25 bp, Homo sapien
taaactcttgtcaaataaacaaaca

SEQ ID NO: 1813146 - DNA, 25 bp, Homo sapien
ctcttgtcaaataaacaaacattac

SEQ ID NO: 1813147 - DNA, 25 bp, Homo sapien
actcttgtcaaataaacaaacatta

SEQ ID NO: 1813148 - DNA, 25 bp, Homo sapien
gcaaactgcatggagtgtactcaca

SEQ ID NO: 1813149 - DNA, 25 bp, Homo sapien
tttagaagtgtcaagggtaccctga

SEQ ID NO: 1813150 - DNA, 25 bp, Homo sapien
acgccctaagttaagtgctaagtgg

SEQ ID NO: 1813151 - DNA, 25 bp, Homo sapien
tagtagtggaagattctgtggccgt

SEQ ID NO: 1813152 - DNA, 25 bp, Homo sapien
ggcgcaaacttctgaggacctactg

SEQ ID NO: 1813153 - DNA, 25 bp, Homo sapien
atctgggtgcatctgaggcggctac

SEQ ID NO: 1813154 - DNA, 25 bp, Homo sapien
tgctacgcacgacacctggtgggat

SEQ ID NO: 1813155 - DNA, 25 bp, Homo sapien
gcaaggctgacaccaagtagttctc

SEQ ID NO: 1813156 - DNA, 25 bp, Homo sapien
tcatcttacacacgtggtctccagc

SEQ ID NO: 1813157 - DNA, 25 bp, Homo sapien
gaataacaggtgactccaagcttgg

SEQ ID NO: 1813158 - DNA, 25 bp, Homo sapien
ccaagcggtggaggcttcagtctaa

SEQ ID NO: 1813159 - DNA, 25 bp, Homo sapien
cagggtcagcccgtgtgtgctcatc

SEQ ID NO: 1813160 - DNA, 25 bp, Homo sapien
tgtggtctctaaggctgactcacct

SEQ ID NO: 1813161 - DNA, 25 bp, Homo sapien
agcctctgtggtctctaaggctgac

SEQ ID NO: 1813162 - DNA, 25 bp, Homo sapien
cctctgtggtctctaaggctgactc

SEQ ID NO: 1813163 - DNA, 25 bp, Homo sapien
tctgtggtctctaaggctgactcac

SEQ ID NO: 1813164 - DNA, 25 bp, Homo sapien
cggaggcgtggccttgtgctggcat

SEQ ID NO: 1813165 - DNA, 25 bp, Homo sapien
cctcgtgctggcatgctgcggtgtc

SEQ ID NO: 1813166 - DNA, 25 bp, Homo sapien
tcgtgctggcatgctgcggtgtcca

SEQ ID NO: 1813167 - DNA, 25 bp, Homo sapien
tgctggcatgctgcggtgtccacgg

SEQ ID NO: 1813168 - DNA, 25 bp, Homo sapien
ttagctatgagggaagagtggcctt

SEQ ID NO: 1813169 - DNA, 25 bp, Homo sapien
agtggccttgcagggtgtgcctcca

SEQ ID NO: 1813170 - DNA, 25 bp, Homo sapien
gaagagtggccttgcagggtgtgcc

SEQ ID NO: 1813171 - DNA, 25 bp, Homo sapien
aagagtggccttgcagggtgtgcct

SEQ ID NO: 1813172 - DNA, 25 bp, Homo sapien
gagggagggtcatgaaaaaacgcaa

SEQ ID NO: 1813173 - DNA, 25 bp, Homo sapien
caaatttaagggttgcatccccaga

SEQ ID NO: 1813174 - DNA, 25 bp, Homo sapien
catgtaaagggtggcaaggcagcac

SEQ ID NO: 1813175 - DNA, 25 bp, Homo sapien
cagtatccccgtacttaaatcagag

SEQ ID NO: 1813176 - DNA, 25 bp, Homo sapien
tggaacggctatacccagagcccgt

SEQ ID NO: 1813177 - DNA, 25 bp, Homo sapien
ccacggctgtccctgactggaacgg

SEQ ID NO: 1813178 - DNA, 25 bp, Homo sapien
tgtccctgactggaacggctatacc

SEQ ID NO: 1813179 - DNA, 25 bp, Homo sapien
cagagcccgtcctgtggtagctgga

SEQ ID NO: 1813180 - DNA, 25 bp, Homo sapien
caggtgggttctgctgaatcctcac

SEQ ID NO: 1813181 - DNA, 25 bp, Homo sapien
tcaggtgggttctgctgaatcctca

SEQ ID NO: 1813182 - DNA, 25 bp, Homo sapien
tgggtcaggtgggttctgctgaatc

SEQ ID NO: 1813183 - DNA, 25 bp, Homo sapien
ggtcaggtgggttctgctgaatcct

SEQ ID NO: 1813184 - DNA, 25 bp, Homo sapien
ctcactcctaagagttatgacatag

SEQ ID NO: 1813185 - DNA, 25 bp, Homo sapien
tcctaagagttatgacatagttcta

SEQ ID NO: 1813186 - DNA, 25 bp, Homo sapien
taagagttatgacatagttctacct

SEQ ID NO: 1813187 - DNA, 25 bp, Homo sapien
cactcactcctaagagttatgacat

SEQ ID NO: 1813188 - DNA, 25 bp, Homo sapien
ctgcaggctttggtgatgttcctgc

SEQ ID NO: 1813189 - DNA, 25 bp, Homo sapien
acagcaccctcagcagtgggaacac

SEQ ID NO: 1813190 - DNA, 25 bp, Homo sapien
taatatttaagagggcgcacaaaca

SEQ ID NO: 1813191 - DNA, 25 bp, Homo sapien
ggactgaagcgtgggacacgcaggg

SEQ ID NO: 1813192 - DNA, 25 bp, Homo sapien
aaacaggggccttcgtctgctgagc

SEQ ID NO: 1813193 - DNA, 25 bp, Homo sapien
ttgcggaccagctcagggattcggg

SEQ ID NO: 1813194 - DNA, 25 bp, Homo sapien
ccttgcggaccagctcagggattcg

SEQ ID NO: 1813195 - DNA, 25 bp, Homo sapien
cttgcggaccagctcagggattcgg

SEQ ID NO: 1813196 - DNA, 25 bp, Homo sapien
tggagttcacgccatgtagcccaac

SEQ ID NO: 1813197 - DNA, 25 bp, Homo sapien
tggtcacgcgtgcttcactcagcag

SEQ ID NO: 1813198 - DNA, 25 bp, Homo sapien
ttaggccttgcacccagactgacaa

SEQ ID NO: 1813199 - DNA, 25 bp, Homo sapien
aatagtgacttaggaacgaggcgac

SEQ ID NO: 1813200 - DNA, 25 bp, Homo sapien
aaacttgacaacttttggcagtgac

SEQ ID NO: 1813201 - DNA, 25 bp, Homo sapien
ctgtccacacactcaggctccagaa

SEQ ID NO: 1813202 - DNA, 25 bp, Homo sapien
tgtccacacactcaggctccagaaa

SEQ ID NO: 1813203 - DNA, 25 bp, Homo sapien
cttgacaacttttggcagtgactga

SEQ ID NO: 1813204 - DNA, 25 bp, Homo sapien
gctatggactgtggaatttaacacg

SEQ ID NO: 1813205 - DNA, 25 bp, Homo sapien
ggttaaagccttctcacttgagcag

SEQ ID NO: 1813206 - DNA, 25 bp, Homo sapien
gctctgaggcctttgaagtggacca

SEQ ID NO: 1813207 - DNA, 25 bp, Homo sapien
tgttaccacagatgatcacagcagt

SEQ ID NO: 1813208 - DNA, 25 bp, Homo sapien
cagaaaagcccacgtgcagctcttt

SEQ ID NO: 1813209 - DNA, 25 bp, Homo sapien
aaaagcccacgtgcagctctttctg

SEQ ID NO: 1813210 - DNA, 25 bp, Homo sapien
agaaaagcccacgtgcagctctttc

SEQ ID NO: 1813211 - DNA, 25 bp, Homo sapien
gaaaagcccacgtgcagctctttct

SEQ ID NO: 1813212 - DNA, 25 bp, Homo sapien
catgcagatggctcaccatggacgt

SEQ ID NO: 1813213 - DNA, 25 bp, Homo sapien
catccatctgcgtgatttctaggca

SEQ ID NO: 1813214 - DNA, 25 bp, Homo sapien
taggcatttactattgctgacgact

SEQ ID NO: 1813215 - DNA, 25 bp, Homo sapien
ggttcgtggaaggaaacaatgtcaa

SEQ ID NO: 1813216 - DNA, 25 bp, Homo sapien
gtggccacatgccattaaaactgtg

SEQ ID NO: 1813217 - DNA, 25 bp, Homo sapien
tctctctcaatacacaaacaagaat

SEQ ID NO: 1813218 - DNA, 25 bp, Homo sapien
actgtgttccataattattccatta

SEQ ID NO: 1813219 - DNA, 25 bp, Homo sapien
caaagtaagaattaaatctctctca

SEQ ID NO: 1813220 - DNA, 25 bp, Homo sapien
tggtcatgctcatactgtctgcttc

SEQ ID NO: 1813221 - DNA, 25 bp, Homo sapien
actggtcatgctcatactgtctgct

SEQ ID NO: 1813222 - DNA, 25 bp, Homo sapien
ccactggtcatgctcatactgtctg

SEQ ID NO: 1813223 - DNA, 25 bp, Homo sapien
ctccactggtcatgctcatactgtc

SEQ ID NO: 1813224 - DNA, 25 bp, Homo sapien
ccaggtcagcaggattcaatatctg

SEQ ID NO: 1813225 - DNA, 25 bp, Homo sapien
atgttattaagacagacatgtgact

SEQ ID NO: 1813226 - DNA, 25 bp, Homo sapien
atatctgagttctgtttactttggt

SEQ ID NO: 1813227 - DNA, 25 bp, Homo sapien
tgaaaccaagttaactcggcaccag

SEQ ID NO: 1813228 - DNA, 25 bp, Homo sapien
tcccacaggcatggtctccttgcag

SEQ ID NO: 1813229 - DNA, 25 bp, Homo sapien
ccacaggcatggtctccttgcagct

SEQ ID NO: 1813230 - DNA, 25 bp, Homo sapien
tggctcccacaggcatggtctcctt

SEQ ID NO: 1813231 - DNA, 25 bp, Homo sapien
ctgcaacagcagaggagggcgctgg

SEQ ID NO: 1813232 - DNA, 25 bp, Homo sapien
tcaggcacaagctcgggagagaagc

SEQ ID NO: 1813233 - DNA, 25 bp, Homo sapien
caaaagctcttctgcacaatgggag

SEQ ID NO: 1813234 - DNA, 25 bp, Homo sapien
aatgggagggagacaccattgaaaa

SEQ ID NO: 1813235 - DNA, 25 bp, Homo sapien
cattgaaaaaggcatcgttccttct

SEQ ID NO: 1813236 - DNA, 25 bp, Homo sapien
ctcataatctagtgttgctaataaa

SEQ ID NO: 1813237 - DNA, 25 bp, Homo sapien
aacccctcataatctagtgttgcta

SEQ ID NO: 1813238 - DNA, 25 bp, Homo sapien
acccctcataatctagtgttgctaa

SEQ ID NO: 1813239 - DNA, 25 bp, Homo sapien
ccctcataatctagtgttgctaata

SEQ ID NO: 1813240 - DNA, 25 bp, Homo sapien
aggtttctggaagacggctgcccac

SEQ ID NO: 1813241 - DNA, 25 bp, Homo sapien
caaggtaattcgtcaagtgcaggca

SEQ ID NO: 1813242 - DNA, 25 bp, Homo sapien
tgtgatgaaaccttgtgcctcccgc

SEQ ID NO: 1813243 - DNA, 25 bp, Homo sapien
caaagctaggaaaacatgtgggtcc

SEQ ID NO: 1813244 - DNA, 25 bp, Homo sapien
gaatctatgagcacgatcgaatggg

SEQ ID NO: 1813245 - DNA, 25 bp, Homo sapien
gaacgaagactcgtctgactccagg

SEQ ID NO: 1813246 - DNA, 25 bp, Homo sapien
catgagccagatacaggcgagaacg

SEQ ID NO: 1813247 - DNA, 25 bp, Homo sapien
gggaaacaccagctttctgtgagca

SEQ ID NO: 1813248 - DNA, 25 bp, Homo sapien
gaagctgtgccactgcgaatacggt

SEQ ID NO: 1813249 - DNA, 25 bp, Homo sapien
caagtcagaagcctagagatcgtcc

SEQ ID NO: 1813250 - DNA, 25 bp, Homo sapien
caagattcctgagtggtgccagtcc

SEQ ID NO: 1813251 - DNA, 25 bp, Homo sapien
tattccggcaagtaggtatcagctg

SEQ ID NO: 1813252 - DNA, 25 bp, Homo sapien
cacaggaagatggttcttcctttct

SEQ ID NO: 1813253 - DNA, 25 bp, Homo sapien
tgaccacaggaagatggttcttcct

SEQ ID NO: 1813254 - DNA, 25 bp, Homo sapien
tcttttctgaaaacacattcaccat

SEQ ID NO: 1813255 - DNA, 25 bp, Homo sapien
ctgctgaccacaggaagatggttct

SEQ ID NO: 1813256 - DNA, 25 bp, Homo sapien
tatctgaggcttacaaacggttgct

SEQ ID NO: 1813257 - DNA, 25 bp, Homo sapien
catcttctatgagccccgagtcagg

SEQ ID NO: 1813258 - DNA, 25 bp, Homo sapien
caaaaaccaagggtggccgagtgca

SEQ ID NO: 1813259 - DNA, 25 bp, Homo sapien
gacacgtatgtatcaagccagccag

SEQ ID NO: 1813260 - DNA, 25 bp, Homo sapien
aagagccgccgacttctgggaagat

SEQ ID NO: 1813261 - DNA, 25 bp, Homo sapien
tccggaggacacagaagtggccagt

SEQ ID NO: 1813262 - DNA, 25 bp, Homo sapien
aagttcaatgctccagaaccccaag

SEQ ID NO: 1813263 - DNA, 25 bp, Homo sapien
aagatgacccgcatgtgctgctgcc

SEQ ID NO: 1813264 - DNA, 25 bp, Homo sapien
gcacttggctcaacgtgagggaaaa

SEQ ID NO: 1813265 - DNA, 25 bp, Homo sapien
gcaatggcaggagcaaaatcagcca

SEQ ID NO: 1813266 - DNA, 25 bp, Homo sapien
tagttcagataacgtgccaggtaga

SEQ ID NO: 1813267 - DNA, 25 bp, Homo sapien
aatgctttactaagtccctctggga

SEQ ID NO: 1813268 - DNA, 25 bp, Homo sapien
gatttaaataagagctgcgttcagc

SEQ ID NO: 1813269 - DNA, 25 bp, Homo sapien
ggatctgaaaaccagagcgtccccg

SEQ ID NO: 1813270 - DNA, 25 bp, Homo sapien
caggttcccttggtagctgcggcct

SEQ ID NO: 1813271 - DNA, 25 bp, Homo sapien
gagcttgcgtttggcctcaggtccc

SEQ ID NO: 1813272 - DNA, 25 bp, Homo sapien
ctgtgtcctgtgcaggaggtaggct

SEQ ID NO: 1813273 - DNA, 25 bp, Homo sapien
gtgtcctgtgcaggaggtaggcttc

SEQ ID NO: 1813274 - DNA, 25 bp, Homo sapien
tgcaggaggtaggcttcttggattt

SEQ ID NO: 1813275 - DNA, 25 bp, Homo sapien
cctgtgcaggaggtaggcttcttgg

SEQ ID NO: 1813276 - DNA, 25 bp, Homo sapien
tggccatccaggagtgtaactgctt

SEQ ID NO: 1813277 - DNA, 25 bp, Homo sapien
caaaaggcgagttcaggaagatctc

SEQ ID NO: 1813278 - DNA, 25 bp, Homo sapien
ttttctataccacatcatcctgagg

SEQ ID NO: 1813279 - DNA, 25 bp, Homo sapien
cactgggcacagtaattgctccaaa

SEQ ID NO: 1813280 - DNA, 25 bp, Homo sapien
tgatgggcggactctaaccaagtga

SEQ ID NO: 1813281 - DNA, 25 bp, Homo sapien
attctgctgagctcgggaaggctgc

SEQ ID NO: 1813282 - DNA, 25 bp, Homo sapien
gctcctgacggaggacgggtcactt

SEQ ID NO: 1813283 - DNA, 25 bp, Homo sapien
caagtgatggcttctgtttgtccca

SEQ ID NO: 1813284 - DNA, 25 bp, Homo sapien
ttgaaagggtagaatcaaggccacg

SEQ ID NO: 1813285 - DNA, 25 bp, Homo sapien
cgtgccctggacagacctgtggtga

SEQ ID NO: 1813286 - DNA, 25 bp, Homo sapien
tgtggtgaccccgcagcgcgccttg

SEQ ID NO: 1813287 - DNA, 25 bp, Homo sapien
atcaaggccacgaggggtcgccagc

SEQ ID NO: 1813288 - DNA, 25 bp, Homo sapien
gagagtagcgtcctatagaacaagg

SEQ ID NO: 1813289 - DNA, 25 bp, Homo sapien
aaaactacaattcagtgagggacaa

SEQ ID NO: 1813290 - DNA, 25 bp, Homo sapien
cagacgtccctaaatccgtttcgtg

SEQ ID NO: 1813291 - DNA, 25 bp, Homo sapien
tggtaaaagcccagggcagacgtcc

SEQ ID NO: 1813292 - DNA, 25 bp, Homo sapien
cgcaggccggccctgaccacgagcg

SEQ ID NO: 1813293 - DNA, 25 bp, Homo sapien
tgaccacgagcgaccctgagcggag

SEQ ID NO: 1813294 - DNA, 25 bp, Homo sapien
ggccctgaccacgagcgaccctgag

SEQ ID NO: 1813295 - DNA, 25 bp, Homo sapien
acgagcgaccccgagccggtccgca

SEQ ID NO: 1813296 - DNA, 25 bp, Homo sapien
tgagaacgtgatattgatcctggct

SEQ ID NO: 1813297 - DNA, 25 bp, Homo sapien
taaattgccaagtggtgagaacgtg

SEQ ID NO: 1813298 - DNA, 25 bp, Homo sapien
gatcctggctgtgattgcaaagctg

SEQ ID NO: 1813299 - DNA, 25 bp, Homo sapien
gtgtcgaagacaatcacccgaggta

SEQ ID NO: 1813300 - DNA, 25 bp, Homo sapien
tgcttggccccggaatgcggcctga

SEQ ID NO: 1813301 - DNA, 25 bp, Homo sapien
actccatggccacaacgagcaggaa

SEQ ID NO: 1813302 - DNA, 25 bp, Homo sapien
aatgcggcctgagactccgaggcac

SEQ ID NO: 1813303 - DNA, 25 bp, Homo sapien
tgggctctgtttggactcgcacttc

SEQ ID NO: 1813304 - DNA, 25 bp, Homo sapien
cctaatgggagtccattcactgagt

SEQ ID NO: 1813305 - DNA, 25 bp, Homo sapien
cggtgccctaatgggagtccattca

SEQ ID NO: 1813306 - DNA, 25 bp, Homo sapien
gcagacatgcggtgccctaatggga

SEQ ID NO: 1813307 - DNA, 25 bp, Homo sapien
aaatgtgcccccgacatggagctgg

SEQ ID NO: 1813308 - DNA, 25 bp, Homo sapien
tgcgggatatgagctcctcttacgg

SEQ ID NO: 1813309 - DNA, 25 bp, Homo sapien
tatgagctcctcttacgggataggg

SEQ ID NO: 1813310 - DNA, 25 bp, Homo sapien
ctcctgcgggatatgagctcctctt

SEQ ID NO: 1813311 - DNA, 25 bp, Homo sapien
taggggctcctcctgcgggatatga

SEQ ID NO: 1813312 - DNA, 25 bp, Homo sapien
cacttgtttctgctgaaatggaaaa

SEQ ID NO: 1813313 - DNA, 25 bp, Homo sapien
tgagggcaaagtgaaaggttctttg

SEQ ID NO: 1813314 - DNA, 25 bp, Homo sapien
agcaataggagggtaccaatttggt

SEQ ID NO: 1813315 - DNA, 25 bp, Homo sapien
agctgtcttcagcaataggagggta

SEQ ID NO: 1813316 - DNA, 25 bp, Homo sapien
ctgtggaatcgtactgtgatttctc

SEQ ID NO: 1813317 - DNA, 25 bp, Homo sapien
tgtggaatcgtactgtgatttctca

SEQ ID NO: 1813318 - DNA, 25 bp, Homo sapien
tggaatcgtactgtgatttctcaga

SEQ ID NO: 1813319 - DNA, 25 bp, Homo sapien
ggaatcgtactgtgatttctcagaa

SEQ ID NO: 1813320 - DNA, 25 bp, Homo sapien
ggaccttcaaagcacgattcttcag

SEQ ID NO: 1813321 - DNA, 25 bp, Homo sapien
tcaaagcacgattcttcaggttctt

SEQ ID NO: 1813322 - DNA, 25 bp, Homo sapien
ccttcttggaccttcaaagcacgat

SEQ ID NO: 1813323 - DNA, 25 bp, Homo sapien
cacgattcttcaggttctttccagg

SEQ ID NO: 1813324 - DNA, 25 bp, Homo sapien
tgagctgcctctttctcgtgctcat

SEQ ID NO: 1813325 - DNA, 25 bp, Homo sapien
cctgagctgcctctttctcgtgctc

SEQ ID NO: 1813326 - DNA, 25 bp, Homo sapien
gagctgcctctttctcgtgctcatc

SEQ ID NO: 1813327 - DNA, 25 bp, Homo sapien
ctgcctctttctcgtgctcatcctg

SEQ ID NO: 1813328 - DNA, 25 bp, Homo sapien
ggcagccgtcgggtgaccagctttg

SEQ ID NO: 1813329 - DNA, 25 bp, Homo sapien
ctgtggccggaccacctgctggatg

SEQ ID NO: 1813330 - DNA, 25 bp, Homo sapien
gccttgaccgtcttcaggagtctcg

SEQ ID NO: 1813331 - DNA, 25 bp, Homo sapien
tggtttccattttgtctgcctggtc

SEQ ID NO: 1813332 - DNA, 25 bp, Homo sapien
gaggggtgcccggcgagctctgagc

SEQ ID NO: 1813333 - DNA, 25 bp, Homo sapien
cagagtgtgtgcgtggctaggtgct

SEQ ID NO: 1813334 - DNA, 25 bp, Homo sapien
tcgctgattggaggcctccgttcca

SEQ ID NO: 1813335 - DNA, 25 bp, Homo sapien
gatgtggaggtcaccgttccaaaca

SEQ ID NO: 1813336 - DNA, 25 bp, Homo sapien
ggtgctttgcaatgttcgctgattg

SEQ ID NO: 1813337 - DNA, 25 bp, Homo sapien
tgttccctggctcctttggagatga

SEQ ID NO: 1813338 - DNA, 25 bp, Homo sapien
actttatgcacccagatgatctcac

SEQ ID NO: 1813339 - DNA, 25 bp, Homo sapien
gctaacgtctgtgtggccatcacca

SEQ ID NO: 1813340 - DNA, 25 bp, Homo sapien
gagttgttggtgaacgttacagcta

SEQ ID NO: 1813341 - DNA, 25 bp, Homo sapien
ctttgcagatgatgccgcagccaac

SEQ ID NO: 1813342 - DNA, 25 bp, Homo sapien
cagatgatgccgcagccaacacagt

SEQ ID NO: 1813343 - DNA, 25 bp, Homo sapien
tgcagatgatgccgcagccaacaca

SEQ ID NO: 1813344 - DNA, 25 bp, Homo sapien
tttgcagatgatgccgcagccaaca

SEQ ID NO: 1813345 - DNA, 25 bp, Homo sapien
ggtctcagagcacacgggagattct

SEQ ID NO: 1813346 - DNA, 25 bp, Homo sapien
ccccctggctagaacactggaccag

SEQ ID NO: 1813347 - DNA, 25 bp, Homo sapien
tcagagcacacgggagattctgtgg

SEQ ID NO: 1813348 - DNA, 25 bp, Homo sapien
gagattctgtggccccctggctaga

SEQ ID NO: 1813349 - DNA, 25 bp, Homo sapien
cagagcacacgggagattccgtggc

SEQ ID NO: 1813350 - DNA, 25 bp, Homo sapien
agagcacacgggagattccgtggcc

SEQ ID NO: 1813351 - DNA, 25 bp, Homo sapien
gtggtctcagagcacacgggagatt

SEQ ID NO: 1813352 - DNA, 25 bp, Homo sapien
agtggtctcagagcacacgggagat

SEQ ID NO: 1813353 - DNA, 25 bp, Homo sapien
ggattgaggcagaaactccctggaa

SEQ ID NO: 1813354 - DNA, 25 bp, Homo sapien
tgagagagggattgaggcagaaact

SEQ ID NO: 1813355 - DNA, 25 bp, Homo sapien
catactgagagagggattgaggcag

SEQ ID NO: 1813356 - DNA, 25 bp, Homo sapien
gagagggattgaggcagaaactccc

SEQ ID NO: 1813357 - DNA, 25 bp, Homo sapien
cctggcggtggcagaacatgtcgct

SEQ ID NO: 1813358 - DNA, 25 bp, Homo sapien
tccttcccctgatggttgcgtgata

SEQ ID NO: 1813359 - DNA, 25 bp, Homo sapien
tgatggtggcagaacatgtccctct

SEQ ID NO: 1813360 - DNA, 25 bp, Homo sapien
ggtggccgcaggacagttcccttat

SEQ ID NO: 1813361 - DNA, 25 bp, Homo sapien
caggatgggcccatcgttcctttcc

SEQ ID NO: 1813362 - DNA, 25 bp, Homo sapien
ttcctgatgggtgcaagacataccg

SEQ ID NO: 1813363 - DNA, 25 bp, Homo sapien
tcctgatgggtgcaagacataccag

SEQ ID NO: 1813364 - DNA, 25 bp, Homo sapien
caggatgggcccatcgttccctttt

SEQ ID NO: 1813365 - DNA, 25 bp, Homo sapien
acggcgtgaacgcgcagcagagcag

SEQ ID NO: 1813366 - DNA, 25 bp, Homo sapien
ccacggcgtgaacgcgcagtgagtg

SEQ ID NO: 1813367 - DNA, 25 bp, Homo sapien
cgcagcggagcagagtgagcgcgtg

SEQ ID NO: 1813368 - DNA, 25 bp, Homo sapien
tcacacggcgtgaacgcgcagcgga

SEQ ID NO: 1813369 - DNA, 25 bp, Homo sapien
ttacaccaatctgtaactgggcact

SEQ ID NO: 1813370 - DNA, 25 bp, Homo sapien
taaatagtcaattttccgttgactg

SEQ ID NO: 1813371 - DNA, 25 bp, Homo sapien
tgggcacttgtgtataaatagtcaa

SEQ ID NO: 1813372 - DNA, 25 bp, Homo sapien
caatctgtaactgggcacttgtgta

SEQ ID NO: 1813373 - DNA, 25 bp, Homo sapien
tctgcctgatactaatggcagcagc

SEQ ID NO: 1813374 - DNA, 25 bp, Homo sapien
cccgcgtgtacagatggctctgcct

SEQ ID NO: 1813375 - DNA, 25 bp, Homo sapien
ttcagagtcaagctattcgtagtgg

SEQ ID NO: 1813376 - DNA, 25 bp, Homo sapien
ttgcaaagtgcccttcatgttcccg

SEQ ID NO: 1813377 - DNA, 25 bp, Homo sapien
tacgcagccagcttgcctgaaggga

SEQ ID NO: 1813378 - DNA, 25 bp, Homo sapien
tcacttctgggactgttaagccatc

SEQ ID NO: 1813379 - DNA, 25 bp, Homo sapien
gagggctctggtgtttacgcagcca

SEQ ID NO: 1813380 - DNA, 25 bp, Homo sapien
tgaagggacctttaaaccatccaga

SEQ ID NO: 1813381 - DNA, 25 bp, Homo sapien
catagtgaccaaagagggcatcagg

SEQ ID NO: 1813382 - DNA, 25 bp, Homo sapien
gacgcactccggatctgcatagtga

SEQ ID NO: 1813383 - DNA, 25 bp, Homo sapien
gagcatgttccgctgtccttggaca

SEQ ID NO: 1813384 - DNA, 25 bp, Homo sapien
tctgcggctgagagagatgtgtaca

SEQ ID NO: 1813385 - DNA, 25 bp, Homo sapien
gccatctcgccgtgagacagcaagt

SEQ ID NO: 1813386 - DNA, 25 bp, Homo sapien
agtggcgtaacgtccggtcaaggca

SEQ ID NO: 1813387 - DNA, 25 bp, Homo sapien
gacagcaagtgtcggatccgcaggc

SEQ ID NO: 1813388 - DNA, 25 bp, Homo sapien
tgcgatgttgtcctctacagccatg

SEQ ID NO: 1813389 - DNA, 25 bp, Homo sapien
ttcagcgagttgctcccactagggc

SEQ ID NO: 1813390 - DNA, 25 bp, Homo sapien
gaagcgaagttaaacagccggcggc

SEQ ID NO: 1813391 - DNA, 25 bp, Homo sapien
tcactgcaaagatcactatgggcca

SEQ ID NO: 1813392 - DNA, 25 bp, Homo sapien
ccctggcgcgcgttgataatgtcac

SEQ ID NO: 1813393 - DNA, 25 bp, Homo sapien
ttacaggccggaacggcggcagcac

SEQ ID NO: 1813394 - DNA, 25 bp, Homo sapien
gcggcagcacgaaagggaggaacgt

SEQ ID NO: 1813395 - DNA, 25 bp, Homo sapien
cgaaacacagcagagtagggcacca

SEQ ID NO: 1813396 - DNA, 25 bp, Homo sapien
tgcagtggtggccttcgcccgaacc

SEQ ID NO: 1813397 - DNA, 25 bp, Homo sapien
ccacaatcgtacgatgggaagctgc

SEQ ID NO: 1813398 - DNA, 25 bp, Homo sapien
tgagccccacaatcgtacgatggga

SEQ ID NO: 1813399 - DNA, 25 bp, Homo sapien
cctgagccccacaatcgtacgatgg

SEQ ID NO: 1813400 - DNA, 25 bp, Homo sapien
gccccacaatcgtacgatgggaagc

SEQ ID NO: 1813401 - DNA, 25 bp, Homo sapien
aaaacaggcgggcacagatctgggt

SEQ ID NO: 1813402 - DNA, 25 bp, Homo sapien
gatctgggtgaatctgcttctaaca

SEQ ID NO: 1813403 - DNA, 25 bp, Homo sapien
agtctcaatgttggcagcaaaacag

SEQ ID NO: 1813404 - DNA, 25 bp, Homo sapien
tcttcgatgcaagggactgtcctgt

SEQ ID NO: 1813405 - DNA, 25 bp, Homo sapien
cacaaagcagggaccatctaacttg

SEQ ID NO: 1813406 - DNA, 25 bp, Homo sapien
aaagcagggaccatctaacttgggt

SEQ ID NO: 1813407 - DNA, 25 bp, Homo sapien
tgttttcacaaagcagggaccatct

SEQ ID NO: 1813408 - DNA, 25 bp, Homo sapien
gagagcgcagtgttttcacaaagca

SEQ ID NO: 1813409 - DNA, 25 bp, Homo sapien
tcttggcaaaccagaaacccttgcg

SEQ ID NO: 1813410 - DNA, 25 bp, Homo sapien
caattccttgggttatcttcacacg

SEQ ID NO: 1813411 - DNA, 25 bp, Homo sapien
ttgcgctggaactcgtctcactatt

SEQ ID NO: 1813412 - DNA, 25 bp, Homo sapien
tcttcacacgccaagaaacagtgat

SEQ ID NO: 1813413 - DNA, 25 bp, Homo sapien
gaggccaagccctgagcgtaaggtg

SEQ ID NO: 1813414 - DNA, 25 bp, Homo sapien
ctgaggggaggccaagccctgagcg

SEQ ID NO: 1813415 - DNA, 25 bp, Homo sapien
gccaagccctgagcgtaaggtggca

SEQ ID NO: 1813416 - DNA, 25 bp, Homo sapien
gaggggaggccaagccctgagcgta

SEQ ID NO: 1813417 - DNA, 25 bp, Homo sapien
tagggattccgggagtcatggcacc

SEQ ID NO: 1813418 - DNA, 25 bp, Homo sapien
gccataaggcatcattggactaaag

SEQ ID NO: 1813419 - DNA, 25 bp, Homo sapien
cattggactaaagatagggattccg

SEQ ID NO: 1813420 - DNA, 25 bp, Homo sapien
tcagtccagtgccataaggcatcat

SEQ ID NO: 1813421 - DNA, 25 bp, Homo sapien
tgaacggctgcagctgccactgcct

SEQ ID NO: 1813422 - DNA, 25 bp, Homo sapien
gctgcctttgttgctcttccaaaat

SEQ ID NO: 1813423 - DNA, 25 bp, Homo sapien
gcctttgttgctcttccaaaataga

SEQ ID NO: 1813424 - DNA, 25 bp, Homo sapien
tttgttgctcttccaaaatagacag

SEQ ID NO: 1813425 - DNA, 25 bp, Homo sapien
gcctgaggttccctgtgttgcctgc

SEQ ID NO: 1813426 - DNA, 25 bp, Homo sapien
tgtgttgcctgctgggacgttgact

SEQ ID NO: 1813427 - DNA, 25 bp, Homo sapien
ggagggatacagtggagtggtgccc

SEQ ID NO: 1813428 - DNA, 25 bp, Homo sapien
caagggtgcagttgtgagagtctgt

SEQ ID NO: 1813429 - DNA, 25 bp, Homo sapien
ggtacaatcccagaactctccgaag

SEQ ID NO: 1813430 - DNA, 25 bp, Homo sapien
agaactctccgaagctggcgtggca

SEQ ID NO: 1813431 - DNA, 25 bp, Homo sapien
tgcagctgcggtacaatcccagaac

SEQ ID NO: 1813432 - DNA, 25 bp, Homo sapien
actctccgaagctggcgtggcagga

SEQ ID NO: 1813433 - DNA, 25 bp, Homo sapien
agagtgcaacttgctcaggacgcaa

SEQ ID NO: 1813434 - DNA, 25 bp, Homo sapien
tgtgagctctgaaaagctaccacca

SEQ ID NO: 1813435 - DNA, 25 bp, Homo sapien
tacatataacgcactgaggtagaag

SEQ ID NO: 1813436 - DNA, 25 bp, Homo sapien
gataaatggagccatctgggtccac

SEQ ID NO: 1813437 - DNA, 25 bp, Homo sapien
cttgggattatattcggcgtttcgg

SEQ ID NO: 1813438 - DNA, 25 bp, Homo sapien
tatattcggcgtttcgggcacgaag

SEQ ID NO: 1813439 - DNA, 25 bp, Homo sapien
caatggtctttaggtcaagtttaca

SEQ ID NO: 1813440 - DNA, 25 bp, Homo sapien
tttcgggcacgaagtgcaatggtct

SEQ ID NO: 1813441 - DNA, 25 bp, Homo sapien
aaatcagtgccgtggttcgtggctc

SEQ ID NO: 1813442 - DNA, 25 bp, Homo sapien
cgtggttcgtggctctcttatcctc

SEQ ID NO: 1813443 - DNA, 25 bp, Homo sapien
tgccgtggttcgtggctctcttatc

SEQ ID NO: 1813444 - DNA, 25 bp, Homo sapien
tcagtgccgtggttcgtggctctct

SEQ ID NO: 1813445 - DNA, 25 bp, Homo sapien
tttgcccgccttggtgagacaccac

SEQ ID NO: 1813446 - DNA, 25 bp, Homo sapien
gatatcaccttttcattcataaccc

SEQ ID NO: 1813447 - DNA, 25 bp, Homo sapien
ttcataacccatagaccagaagaat

SEQ ID NO: 1813448 - DNA, 25 bp, Homo sapien
tcactgctatctaacattaatagaa

SEQ ID NO: 1813449 - DNA, 25 bp, Homo sapien
gaaatagtcatccaactacatatac

SEQ ID NO: 1813450 - DNA, 25 bp, Homo sapien
tgtcctgcattctgaaaaacctcgg

SEQ ID NO: 1813451 - DNA, 25 bp, Homo sapien
aagcttgccttgataaaccaaaagt

SEQ ID NO: 1813452 - DNA, 25 bp, Homo sapien
agaggttactactgcatgttgtggc

SEQ ID NO: 1813453 - DNA, 25 bp, Homo sapien
aaactacgacttagcagttcagagc

SEQ ID NO: 1813454 - DNA, 25 bp, Homo sapien
tagcccatgcatttctactgagagg

SEQ ID NO: 1813455 - DNA, 25 bp, Homo sapien
actggtcagccttcttgcaatagga

SEQ ID NO: 1813456 - DNA, 25 bp, Homo sapien
tccttgacagaaaactgtaggcctg

SEQ ID NO: 1813457 - DNA, 25 bp, Homo sapien
tctgtacaactctagcatattttct

SEQ ID NO: 1813458 - DNA, 25 bp, Homo sapien
tataggaaacttcacatcacagctc

SEQ ID NO: 1813459 - DNA, 25 bp, Homo sapien
tctgaatcttgaagtccaagaactt

SEQ ID NO: 1813460 - DNA, 25 bp, Homo sapien
gctggaaaacccaacttctgtacaa

SEQ ID NO: 1813461 - DNA, 25 bp, Homo sapien
actaaattgttggtgggtgagcaca

SEQ ID NO: 1813462 - DNA, 25 bp, Homo sapien
ttggtgggtgagcacaaggccttct

SEQ ID NO: 1813463 - DNA, 25 bp, Homo sapien
gtgggtgagcacaaggccttctaac

SEQ ID NO: 1813464 - DNA, 25 bp, Homo sapien
ctactaaattgttggtgggtgagca

SEQ ID NO: 1813465 - DNA, 25 bp, Homo sapien
gcattccaagtgtattcagcaataa

SEQ ID NO: 1813466 - DNA, 25 bp, Homo sapien
taccgcaaagtgataagggaagcag

SEQ ID NO: 1813467 - DNA, 25 bp, Homo sapien
tacaaggttagggtcaattcatgca

SEQ ID NO: 1813468 - DNA, 25 bp, Homo sapien
gctggtgagggtgataaatatgact

SEQ ID NO: 1813469 - DNA, 25 bp, Homo sapien
ctgggtttgatcattctgtagatta

SEQ ID NO: 1813470 - DNA, 25 bp, Homo sapien
aattctgggtttgatcattctgtag

SEQ ID NO: 1813471 - DNA, 25 bp, Homo sapien
gaacaattctgggtttgatcattct

SEQ ID NO: 1813472 - DNA, 25 bp, Homo sapien
aaggagaacaattctgggtttgatc

SEQ ID NO: 1813473 - DNA, 25 bp, Homo sapien
tgaaaacattaatagtggaatccct

SEQ ID NO: 1813474 - DNA, 25 bp, Homo sapien
aaattcttaccttaaagctgcaagc

SEQ ID NO: 1813475 - DNA, 25 bp, Homo sapien
agatgagagactgaaatggcacttc

SEQ ID NO: 1813476 - DNA, 25 bp, Homo sapien
ccagtcagattaaggcacaggcatg

SEQ ID NO: 1813477 - DNA, 25 bp, Homo sapien
gcttcataaatttctgctctgactt

SEQ ID NO: 1813478 - DNA, 25 bp, Homo sapien
cttcataaatttctgctctgacttt

SEQ ID NO: 1813479 - DNA, 25 bp, Homo sapien
ttcataaatttctgctctgacttta

SEQ ID NO: 1813480 - DNA, 25 bp, Homo sapien
cacgctgcgcggtgttctcagtgca

SEQ ID NO: 1813481 - DNA, 25 bp, Homo sapien
cccagatagcagcacggtatgagca

SEQ ID NO: 1813482 - DNA, 25 bp, Homo sapien
tacagaagggcatcacctggtgcca

SEQ ID NO: 1813483 - DNA, 25 bp, Homo sapien
tcccgcggtgggcacttacagaagg

SEQ ID NO: 1813484 - DNA, 25 bp, Homo sapien
actcttacaaggtataacaacaatc

SEQ ID NO: 1813485 - DNA, 25 bp, Homo sapien
gactcttacaaggtataacaacaat

SEQ ID NO: 1813486 - DNA, 25 bp, Homo sapien
tctgcaaagatgtacacttagtgaa

SEQ ID NO: 1813487 - DNA, 25 bp, Homo sapien
tgaactggttaccaacgaatggtgg

SEQ ID NO: 1813488 - DNA, 25 bp, Homo sapien
aatggtctttttacttatatgtgca

SEQ ID NO: 1813489 - DNA, 25 bp, Homo sapien
cgaatggtgggactaactaaaatgg

SEQ ID NO: 1813490 - DNA, 25 bp, Homo sapien
tgataagagtacaatacaggtgcca

SEQ ID NO: 1813491 - DNA, 25 bp, Homo sapien
catctctagtagaatatgccctgag

SEQ ID NO: 1813492 - DNA, 25 bp, Homo sapien
tgaaagctggacttcaaatatgcct

SEQ ID NO: 1813493 - DNA, 25 bp, Homo sapien
tgacatcactgaagactgcctggaa

SEQ ID NO: 1813494 - DNA, 25 bp, Homo sapien
gaatcagtgtgtctccagcttaagt

SEQ ID NO: 1813495 - DNA, 25 bp, Homo sapien
gagaatcagtgtgtctccagcttaa

SEQ ID NO: 1813496 - DNA, 25 bp, Homo sapien
tcagtgtgtctccagcttaagtctg

SEQ ID NO: 1813497 - DNA, 25 bp, Homo sapien
agtgtgtctccagcttaagtctggt

SEQ ID NO: 1813498 - DNA, 25 bp, Homo sapien
taactgtgcccacgcgcattggtaa

SEQ ID NO: 1813499 - DNA, 25 bp, Homo sapien
gcggcgttaattccgggagcgacca

SEQ ID NO: 1813500 - DNA, 25 bp, Homo sapien
cagcttttaatcagtgggtaccagg

SEQ ID NO: 1813501 - DNA, 25 bp, Homo sapien
gatggatcccagtagctttttcgta

SEQ ID NO: 1813502 - DNA, 25 bp, Homo sapien
atggcaaatattcatttacaatcac

SEQ ID NO: 1813503 - DNA, 25 bp, Homo sapien
ggaaatggcaaatattcatttacaa

SEQ ID NO: 1813504 - DNA, 25 bp, Homo sapien
aatggcaaatattcatttacaatca

SEQ ID NO: 1813505 - DNA, 25 bp, Homo sapien
ttggaaatggcaaatattcatttac

SEQ ID NO: 1813506 - DNA, 25 bp, Homo sapien
cgcccgggatgcagacatggccttt

SEQ ID NO: 1813507 - DNA, 25 bp, Homo sapien
tgcagacatggcctttgcagcccac

SEQ ID NO: 1813508 - DNA, 25 bp, Homo sapien
atttggcctctgtcatgaaacttca

SEQ ID NO: 1813509 - DNA, 25 bp, Homo sapien
tttgcagcccacacgagagggtctg

SEQ ID NO: 1813510 - DNA, 25 bp, Homo sapien
atataacccccggaacacgcatgta

SEQ ID NO: 1813511 - DNA, 25 bp, Homo sapien
cgcatgtatctctcagagcgtacat

SEQ ID NO: 1813512 - DNA, 25 bp, Homo sapien
cccggaacacgcatgtatctctcag

SEQ ID NO: 1813513 - DNA, 25 bp, Homo sapien
gaacacgcatgtatctctcagagcg

SEQ ID NO: 1813514 - DNA, 25 bp, Homo sapien
cattcctattttcaacctgtcctgc

SEQ ID NO: 1813515 - DNA, 25 bp, Homo sapien
ctgtcctgctccgcacctgagatga

SEQ ID NO: 1813516 - DNA, 25 bp, Homo sapien
tgtcctgctccgcacctgagatgat

SEQ ID NO: 1813517 - DNA, 25 bp, Homo sapien
ttcctattttcaacctgtcctgctc

SEQ ID NO: 1813518 - DNA, 25 bp, Homo sapien
gggcggtgctgctcccgagtcggcg

SEQ ID NO: 1813519 - DNA, 25 bp, Homo sapien
gagtccgtaggtgctggcgggagcg

SEQ ID NO: 1813520 - DNA, 25 bp, Homo sapien
ggtaagaggcgcgtgaggctcctgt

SEQ ID NO: 1813521 - DNA, 25 bp, Homo sapien
aggcgcgtgaggctcctgtgccggg

SEQ ID NO: 1813522 - DNA, 25 bp, Homo sapien
cgtcgggttctgttggagtgcgttc

SEQ ID NO: 1813523 - DNA, 25 bp, Homo sapien
tccgccggttgaaagcgcgtgtctg

SEQ ID NO: 1813524 - DNA, 25 bp, Homo sapien
aaagcgcgtgtctgcgtcgggttct

SEQ ID NO: 1813525 - DNA, 25 bp, Homo sapien
ccagtgtctccgccggttgaaagcg

SEQ ID NO: 1813526 - DNA, 25 bp, Homo sapien
tcaggtacttaaagttagctccaaa

SEQ ID NO: 1813527 - DNA, 25 bp, Homo sapien
ttgttaatgtataagagatgtagat

SEQ ID NO: 1813528 - DNA, 25 bp, Homo sapien
attgttaatgtataagagatgtaga

SEQ ID NO: 1813529 - DNA, 25 bp, Homo sapien
tgttaatgtataagagatgtagatt

SEQ ID NO: 1813530 - DNA, 25 bp, Homo sapien
tcacctgtaaaattgtctgagcaac

SEQ ID NO: 1813531 - DNA, 25 bp, Homo sapien
gattcaaggtgtgaaggtaacatca

SEQ ID NO: 1813532 - DNA, 25 bp, Homo sapien
gcatgtttgctagaactcacctgta

SEQ ID NO: 1813533 - DNA, 25 bp, Homo sapien
ctgtaacagtgcaattaaacgttct

SEQ ID NO: 1813534 - DNA, 25 bp, Homo sapien
ctggatacaggtcttgataggtctc

SEQ ID NO: 1813535 - DNA, 25 bp, Homo sapien
ggtcttgataggtctcttgatgtca

SEQ ID NO: 1813536 - DNA, 25 bp, Homo sapien
tacaggtcttgataggtctcttgat

SEQ ID NO: 1813537 - DNA, 25 bp, Homo sapien
gatacaggtcttgataggtctcttg

SEQ ID NO: 1813538 - DNA, 25 bp, Homo sapien
gggcaagtctcttccacatataaac

SEQ ID NO: 1813539 - DNA, 25 bp, Homo sapien
cagggcaagtctcttccacatataa

SEQ ID NO: 1813540 - DNA, 25 bp, Homo sapien
tgagacagggcaagtctcttccaca

SEQ ID NO: 1813541 - DNA, 25 bp, Homo sapien
agacagggcaagtctcttccacata

SEQ ID NO: 1813542 - DNA, 25 bp, Homo sapien
tattttatgactaaaggtgaattcc

SEQ ID NO: 1813543 - DNA, 25 bp, Homo sapien
gcaaagaggtttaaagtaacatcaa

SEQ ID NO: 1813544 - DNA, 25 bp, Homo sapien
gaagcaggtgttgttagagccacat

SEQ ID NO: 1813545 - DNA, 25 bp, Homo sapien
ggtgaattccagagcaacattaaat

SEQ ID NO: 1813546 - DNA, 25 bp, Homo sapien
caactgcaaaaacaacctaaggtca

SEQ ID NO: 1813547 - DNA, 25 bp, Homo sapien
tgcaaagtgactgatcattactatc

SEQ ID NO: 1813548 - DNA, 25 bp, Homo sapien
tactatcagaatttgtacccattct

SEQ ID NO: 1813549 - DNA, 25 bp, Homo sapien
tgttggtcatataaccagttactac

SEQ ID NO: 1813550 - DNA, 25 bp, Homo sapien
gaaaatggggaggaaattgtgatta

SEQ ID NO: 1813551 - DNA, 25 bp, Homo sapien
agcaggctcctaagtcaatgaagga

SEQ ID NO: 1813552 - DNA, 25 bp, Homo sapien
cacagaggaaaacactaggaggagg

SEQ ID NO: 1813553 - DNA, 25 bp, Homo sapien
gtaatgcttgccacatagagcacag

SEQ ID NO: 1813554 - DNA, 25 bp, Homo sapien
taagtgagggtcagtggtcacagaa

SEQ ID NO: 1813555 - DNA, 25 bp, Homo sapien
gtcaaaggccatggctatgagcagc

SEQ ID NO: 1813556 - DNA, 25 bp, Homo sapien
caaaggccatggctatgagcagcac

SEQ ID NO: 1813557 - DNA, 25 bp, Homo sapien
ctgtcaaaggccatggctatgagca

SEQ ID NO: 1813558 - DNA, 25 bp, Homo sapien
tgtcaaaggccatggctatgagcag

SEQ ID NO: 1813559 - DNA, 25 bp, Homo sapien
aagctgtccaacacattagggccac

SEQ ID NO: 1813560 - DNA, 25 bp, Homo sapien
taggtgtcggtacaggctagtctga

SEQ ID NO: 1813561 - DNA, 25 bp, Homo sapien
tccatctgtgaattagggtgtggcc

SEQ ID NO: 1813562 - DNA, 25 bp, Homo sapien
aatgccagttggaacagggagtgac

SEQ ID NO: 1813563 - DNA, 25 bp, Homo sapien
agatcttcttgtaaatcactagctg

SEQ ID NO: 1813564 - DNA, 25 bp, Homo sapien
atgagatcttcttgtaaatcactag

SEQ ID NO: 1813565 - DNA, 25 bp, Homo sapien
ttatgagatcttcttgtaaatcact

SEQ ID NO: 1813566 - DNA, 25 bp, Homo sapien
tgagatcttcttgtaaatcactagc

SEQ ID NO: 1813567 - DNA, 25 bp, Homo sapien
aactgatggaactaataagttttgc

SEQ ID NO: 1813568 - DNA, 25 bp, Homo sapien
tacatatgcataaagtacctgttca

SEQ ID NO: 1813569 - DNA, 25 bp, Homo sapien
caggatataatgtcaaacaaagatc

SEQ ID NO: 1813570 - DNA, 25 bp, Homo sapien
caaagatctattatgtgcccataag

SEQ ID NO: 1813571 - DNA, 25 bp, Homo sapien
gtctgaacaggactatccaaaagtt

SEQ ID NO: 1813572 - DNA, 25 bp, Homo sapien
tggtccatgagtatacaacgagtga

SEQ ID NO: 1813573 - DNA, 25 bp, Homo sapien
caccaatgattgcagtaatacagat

SEQ ID NO: 1813574 - DNA, 25 bp, Homo sapien
caaatgatagttttagtctgaacag

SEQ ID NO: 1813575 - DNA, 25 bp, Homo sapien
catccgagttgctctgttggaggaa

SEQ ID NO: 1813576 - DNA, 25 bp, Homo sapien
cataagtgcgctccggtccatgcac

SEQ ID NO: 1813577 - DNA, 25 bp, Homo sapien
ggcagtcttctatggaaaggccact

SEQ ID NO: 1813578 - DNA, 25 bp, Homo sapien
tgtctgaaaggaggactaccggccc

SEQ ID NO: 1813579 - DNA, 25 bp, Homo sapien
cctggcttagcctggatcgtttgaa

SEQ ID NO: 1813580 - DNA, 25 bp, Homo sapien
gcctggatcgtttgaaatggtcatc

SEQ ID NO: 1813581 - DNA, 25 bp, Homo sapien
gaaatggtcatccatcctttggccc

SEQ ID NO: 1813582 - DNA, 25 bp, Homo sapien
ggtcatccatcctttggccccaata

SEQ ID NO: 1813583 - DNA, 25 bp, Homo sapien
tctgtccctcgatccttgcaacgta

SEQ ID NO: 1813584 - DNA, 25 bp, Homo sapien
ggcacagcagcttctaccttatgga

SEQ ID NO: 1813585 - DNA, 25 bp, Homo sapien
tattcattggccacttgctgcacgc

SEQ ID NO: 1813586 - DNA, 25 bp, Homo sapien
gctgcaaggatgctcagaaaaccag

SEQ ID NO: 1813587 - DNA, 25 bp, Homo sapien
catgtgtccctaagaatctgagagc

SEQ ID NO: 1813588 - DNA, 25 bp, Homo sapien
cgcttactacctggcacttattggg

SEQ ID NO: 1813589 - DNA, 25 bp, Homo sapien
gacggtgtcttactcatctgctctc

SEQ ID NO: 1813590 - DNA, 25 bp, Homo sapien
gaggtcatgaccagtagaaatctca

SEQ ID NO: 1813591 - DNA, 25 bp, Homo sapien
caatgcggtgagatgctgagccagg

SEQ ID NO: 1813592 - DNA, 25 bp, Homo sapien
gccaggccctggcttcttcttcctc

SEQ ID NO: 1813593 - DNA, 25 bp, Homo sapien
aatgcggtgagatgctgagccaggc

SEQ ID NO: 1813594 - DNA, 25 bp, Homo sapien
tgagccaggccctggcttcttcttc

SEQ ID NO: 1813595 - DNA, 25 bp, Homo sapien
tattggttctctggcaaaaggagca

SEQ ID NO: 1813596 - DNA, 25 bp, Homo sapien
catgagtaggaagcaaatctgggtc

SEQ ID NO: 1813597 - DNA, 25 bp, Homo sapien
tggtgccatcaaagtgccgctgctg

SEQ ID NO: 1813598 - DNA, 25 bp, Homo sapien
gatgcgggccaattgttcataacca

SEQ ID NO: 1813599 - DNA, 25 bp, Homo sapien
ccaccccaccacagcggcctctcct

SEQ ID NO: 1813600 - DNA, 25 bp, Homo sapien
cctgggcctgctccggggggatccg

SEQ ID NO: 1813601 - DNA, 25 bp, Homo sapien
cgctgccggagagctcaggagcagg

SEQ ID NO: 1813602 - DNA, 25 bp, Homo sapien
ggcggcgctgccggagagctcagga

SEQ ID NO: 1813603 - DNA, 25 bp, Homo sapien
ccggcgcacgcgggttctctgtggc

SEQ ID NO: 1813604 - DNA, 25 bp, Homo sapien
ggccggcgcacgcgggttctctgtg

SEQ ID NO: 1813605 - DNA, 25 bp, Homo sapien
gccggcgcacgcgggttctctgtgg

SEQ ID NO: 1813606 - DNA, 25 bp, Homo sapien
cggccggcgcacgcgggttctctgt

SEQ ID NO: 1813607 - DNA, 25 bp, Homo sapien
ggccggcgcacgcgggttctctgtg

SEQ ID NO: 1813608 - DNA, 25 bp, Homo sapien
ccggcgcacgcgggttctctgtggc

SEQ ID NO: 1813609 - DNA, 25 bp, Homo sapien
gccggcgcacgcgggttctctgtgg

SEQ ID NO: 1813610 - DNA, 25 bp, Homo sapien
cggccggcgcacgcgggttctctgt

SEQ ID NO: 1813611 - DNA, 25 bp, Homo sapien
cgtgtatggggcagggggcagcaga

SEQ ID NO: 1813612 - DNA, 25 bp, Homo sapien
gtgtatggggcagggggcagcagag

SEQ ID NO: 1813613 - DNA, 25 bp, Homo sapien
tcacgtgtatggggcagggggcagc

SEQ ID NO: 1813614 - DNA, 25 bp, Homo sapien
cacgtgtatggggcagggggcagca

SEQ ID NO: 1813615 - DNA, 25 bp, Homo sapien
ttcacacagcacgttttctgctcca

SEQ ID NO: 1813616 - DNA, 25 bp, Homo sapien
cagagagtatgcaagcacgaccacg

SEQ ID NO: 1813617 - DNA, 25 bp, Homo sapien
ggttcacacagcacgttttctgctc

SEQ ID NO: 1813618 - DNA, 25 bp, Homo sapien
atgcaagcacgaccacgtcaacagg

SEQ ID NO: 1813619 - DNA, 25 bp, Homo sapien
cagtgttgttgacagggtagggtgc

SEQ ID NO: 1813620 - DNA, 25 bp, Homo sapien
gtcggctcggcgaggagccggtctc

SEQ ID NO: 1813621 - DNA, 25 bp, Homo sapien
gcgcacgcgcggtcggctcggcgag

SEQ ID NO: 1813622 - DNA, 25 bp, Homo sapien
cgctcagcacggacgaggagggagc

SEQ ID NO: 1813623 - DNA, 25 bp, Homo sapien
tcagcacggacgaggagggagccgc

SEQ ID NO: 1813624 - DNA, 25 bp, Homo sapien
ggcgtgtcctgctgtggaacacact

SEQ ID NO: 1813625 - DNA, 25 bp, Homo sapien
tgtacccatcctgtacccgtcagga

SEQ ID NO: 1813626 - DNA, 25 bp, Homo sapien
tctttcagcgcaggcgtgtcctgct

SEQ ID NO: 1813627 - DNA, 25 bp, Homo sapien
ggtctgtacccatcctgtacccgtc

SEQ ID NO: 1813628 - DNA, 25 bp, Homo sapien
tgttataagtagcttgattgtcata

SEQ ID NO: 1813629 - DNA, 25 bp, Homo sapien
agcatccaacgacgcatatttcctt

SEQ ID NO: 1813630 - DNA, 25 bp, Homo sapien
gcttgattgtcatacagcatccaac

SEQ ID NO: 1813631 - DNA, 25 bp, Homo sapien
tcatacagcatccaacgacgcatat

SEQ ID NO: 1813632 - DNA, 25 bp, Homo sapien
gaggcccagctgagtttggatcata

SEQ ID NO: 1813633 - DNA, 25 bp, Homo sapien
taggctcaggtggaacagcctcaac

SEQ ID NO: 1813634 - DNA, 25 bp, Homo sapien
gagcatttccggttcccctgctgtg

SEQ ID NO: 1813635 - DNA, 25 bp, Homo sapien
gaatatccttaagataaggccccag

SEQ ID NO: 1813636 - DNA, 25 bp, Homo sapien
cagtacgtaggagttgtgcattggt

SEQ ID NO: 1813637 - DNA, 25 bp, Homo sapien
caccatcagtacgtaggagttgtgc

SEQ ID NO: 1813638 - DNA, 25 bp, Homo sapien
catcagtacgtaggagttgtgcatt

SEQ ID NO: 1813639 - DNA, 25 bp, Homo sapien
accaccatcagtacgtaggagttgt

SEQ ID NO: 1813640 - DNA, 25 bp, Homo sapien
tcatcaggaaaagctttggatcaca

SEQ ID NO: 1813641 - DNA, 25 bp, Homo sapien
tttggatcacaattcccagtgctga

SEQ ID NO: 1813642 - DNA, 25 bp, Homo sapien
agaggtcagcaaggcaaacccgagc

SEQ ID NO: 1813643 - DNA, 25 bp, Homo sapien
ggcagctacgtcctctcttgagcta

SEQ ID NO: 1813644 - DNA, 25 bp, Homo sapien
agggtgctcaatggcccgtcctggt

SEQ ID NO: 1813645 - DNA, 25 bp, Homo sapien
tactctgctctacactggttgtagg

SEQ ID NO: 1813646 - DNA, 25 bp, Homo sapien
aatggcccgtcctggtactctgctc

SEQ ID NO: 1813647 - DNA, 25 bp, Homo sapien
aacaccagggtgctcaatggcccgt

SEQ ID NO: 1813648 - DNA, 25 bp, Homo sapien
tggactaagacacaaatctaggtaa

SEQ ID NO: 1813649 - DNA, 25 bp, Homo sapien
atggactaagacacaaatctaggta

SEQ ID NO: 1813650 - DNA, 25 bp, Homo sapien
gactaagacacaaatctaggtaaaa

SEQ ID NO: 1813651 - DNA, 25 bp, Homo sapien
ggactaagacacaaatctaggtaaa

SEQ ID NO: 1813652 - DNA, 25 bp, Homo sapien
tgggccgcctgaaggtgggtgacat

SEQ ID NO: 1813653 - DNA, 25 bp, Homo sapien
ttgggccgcctgaaggtgggtgaca

SEQ ID NO: 1813654 - DNA, 25 bp, Homo sapien
ccgcctgaaggtgggtgacatgcgg

SEQ ID NO: 1813655 - DNA, 25 bp, Homo sapien
ggccgcctgaaggtgggtgacatgc

SEQ ID NO: 1813656 - DNA, 25 bp, Homo sapien
cttgttctctttatcaggacaaatc

SEQ ID NO: 1813657 - DNA, 25 bp, Homo sapien
gttctctttatcaggacaaatcagg

SEQ ID NO: 1813658 - DNA, 25 bp, Homo sapien
gccttgttctctttatcaggacaaa

SEQ ID NO: 1813659 - DNA, 25 bp, Homo sapien
atgccttgttctctttatcaggaca

SEQ ID NO: 1813660 - DNA, 25 bp, Homo sapien
gcctacgtacttatcaacttcctca

SEQ ID NO: 1813661 - DNA, 25 bp, Homo sapien
tgccaaaacaatctatcgttttgcc

SEQ ID NO: 1813662 - DNA, 25 bp, Homo sapien
tcgttttgcctacgtacttatcaac

SEQ ID NO: 1813663 - DNA, 25 bp, Homo sapien
acaatctatcgttttgcctacgtac

SEQ ID NO: 1813664 - DNA, 25 bp, Homo sapien
caggatataatgtcaaacaaagatc

SEQ ID NO: 1813665 - DNA, 25 bp, Homo sapien
aactgatggaactaataagttttgc

SEQ ID NO: 1813666 - DNA, 25 bp, Homo sapien
tacatatgcataaagtacctgttca

SEQ ID NO: 1813667 - DNA, 25 bp, Homo sapien
caaagatctattatgtgcccataag

SEQ ID NO: 1813668 - DNA, 25 bp, Homo sapien
agatcttcttgtaaatcactagctg

SEQ ID NO: 1813669 - DNA, 25 bp, Homo sapien
atgagatcttcttgtaaatcactag

SEQ ID NO: 1813670 - DNA, 25 bp, Homo sapien
ttatgagatcttcttgtaaatcact

SEQ ID NO: 1813671 - DNA, 25 bp, Homo sapien
tgagatcttcttgtaaatcactagc

SEQ ID NO: 1813672 - DNA, 25 bp, Homo sapien
aagctgtccaacacattagggccac

SEQ ID NO: 1813673 - DNA, 25 bp, Homo sapien
taggtgtcggtacaggctagtctga

SEQ ID NO: 1813674 - DNA, 25 bp, Homo sapien
aatgccagttggaacagggagtgac

SEQ ID NO: 1813675 - DNA, 25 bp, Homo sapien
tccatctgtgaattagggtgtggcc

SEQ ID NO: 1813676 - DNA, 25 bp, Homo sapien
caaaggccatggctatgagcagcac

SEQ ID NO: 1813677 - DNA, 25 bp, Homo sapien
gtcaaaggccatggctatgagcagc

SEQ ID NO: 1813678 - DNA, 25 bp, Homo sapien
ctgtcaaaggccatggctatgagca

SEQ ID NO: 1813679 - DNA, 25 bp, Homo sapien
tgtcaaaggccatggctatgagcag

SEQ ID NO: 1813680 - DNA, 25 bp, Homo sapien
agcaggctcctaagtcaatgaagga

SEQ ID NO: 1813681 - DNA, 25 bp, Homo sapien
cacagaggaaaacactaggaggagg

SEQ ID NO: 1813682 - DNA, 25 bp, Homo sapien
taagtgagggtcagtggtcacagaa

SEQ ID NO: 1813683 - DNA, 25 bp, Homo sapien
aatgcttgccacatagagcacagag

SEQ ID NO: 1813684 - DNA, 25 bp, Homo sapien
gccaactgggctgtggctaaaatta

SEQ ID NO: 1813685 - DNA, 25 bp, Homo sapien
gaaaatggggaggaaattgtgatta

SEQ ID NO: 1813686 - DNA, 25 bp, Homo sapien
ccagccaactgggctgtggctaaaa

SEQ ID NO: 1813687 - DNA, 25 bp, Homo sapien
cagccaactgggctgtggctaaaat

SEQ ID NO: 1813688 - DNA, 25 bp, Homo sapien
tgttggtcatataaccagttactac

SEQ ID NO: 1813689 - DNA, 25 bp, Homo sapien
tgcaaagtgactgatcattactatc

SEQ ID NO: 1813690 - DNA, 25 bp, Homo sapien
tactatcagaatttgtacccattct

SEQ ID NO: 1813691 - DNA, 25 bp, Homo sapien
caactgcaaaaacaacctaaggtca

SEQ ID NO: 1813692 - DNA, 25 bp, Homo sapien
caagataaagtgcatgcctctgaag

SEQ ID NO: 1813693 - DNA, 25 bp, Homo sapien
gagcttgagctagtcaagaagccca

SEQ ID NO: 1813694 - DNA, 25 bp, Homo sapien
cccagaaatccctaaaagaggtgtg

SEQ ID NO: 1813695 - DNA, 25 bp, Homo sapien
tgcagcatgtgaaccctccacagag

SEQ ID NO: 1813696 - DNA, 25 bp, Homo sapien
agacagggcaagtctcttccacata

SEQ ID NO: 1813697 - DNA, 25 bp, Homo sapien
cagggcaagtctcttccacatataa

SEQ ID NO: 1813698 - DNA, 25 bp, Homo sapien
gggcaagtctcttccacatataaac

SEQ ID NO: 1813699 - DNA, 25 bp, Homo sapien
tgagacagggcaagtctcttccaca

SEQ ID NO: 1813700 - DNA, 25 bp, Homo sapien
ggtcttgataggtctcttgatgtca

SEQ ID NO: 1813701 - DNA, 25 bp, Homo sapien
ctggatacaggtcttgataggtctc

SEQ ID NO: 1813702 - DNA, 25 bp, Homo sapien
tacaggtcttgataggtctcttgat

SEQ ID NO: 1813703 - DNA, 25 bp, Homo sapien
gatacaggtcttgataggtctcttg

SEQ ID NO: 1813704 - DNA, 25 bp, Homo sapien
tcagttgtttagttacaagatagaa

SEQ ID NO: 1813705 - DNA, 25 bp, Homo sapien
accatctacgctaagacataaaatt

SEQ ID NO: 1813706 - DNA, 25 bp, Homo sapien
tggccttgtaagaaagcaaattaac

SEQ ID NO: 1813707 - DNA, 25 bp, Homo sapien
aattaacttctaacatacaaagcct

SEQ ID NO: 1813708 - DNA, 25 bp, Homo sapien
aatggcttaagcgtgcaacatgttt

SEQ ID NO: 1813709 - DNA, 25 bp, Homo sapien
caaaaatggcttaagcgtgcaacat

SEQ ID NO: 1813710 - DNA, 25 bp, Homo sapien
aaaatggcttaagcgtgcaacatgt

SEQ ID NO: 1813711 - DNA, 25 bp, Homo sapien
ggcttaagcgtgcaacatgtttctg

SEQ ID NO: 1813712 - DNA, 25 bp, Homo sapien
tgttaatgtataagagatgtagatt

SEQ ID NO: 1813713 - DNA, 25 bp, Homo sapien
ttgttaatgtataagagatgtagat

SEQ ID NO: 1813714 - DNA, 25 bp, Homo sapien
tcaggtacttaaagttagctccaaa

SEQ ID NO: 1813715 - DNA, 25 bp, Homo sapien
attgttaatgtataagagatgtaga

SEQ ID NO: 1813716 - DNA, 25 bp, Homo sapien
tcattttaagatgctcgaatttgtc

SEQ ID NO: 1813717 - DNA, 25 bp, Homo sapien
tctttgtatcagtgctcagctgagt

SEQ ID NO: 1813718 - DNA, 25 bp, Homo sapien
ttgaatcattttaagatgctcgaat

SEQ ID NO: 1813719 - DNA, 25 bp, Homo sapien
aatcattttaagatgctcgaatttg

SEQ ID NO: 1813720 - DNA, 25 bp, Homo sapien
ctgccaagttgccagctgttgctca

SEQ ID NO: 1813721 - DNA, 25 bp, Homo sapien
tgccaagttgccagctgttgctcat

SEQ ID NO: 1813722 - DNA, 25 bp, Homo sapien
tggctttagcaccaccgacaccgat

SEQ ID NO: 1813723 - DNA, 25 bp, Homo sapien
cattgctgatgatggctttagcacc

SEQ ID NO: 1813724 - DNA, 25 bp, Homo sapien
cgacaccgatctcaagttcaaggag

SEQ ID NO: 1813725 - DNA, 25 bp, Homo sapien
tgatggctttagcaccaccgacacc

SEQ ID NO: 1813726 - DNA, 25 bp, Homo sapien
caaagcccaacacccccaagtgtgc

SEQ ID NO: 1813727 - DNA, 25 bp, Homo sapien
ccaaagcccaacacccccaagtgtg

SEQ ID NO: 1813728 - DNA, 25 bp, Homo sapien
gggactgatgactgcatgatcttct

SEQ ID NO: 1813729 - DNA, 25 bp, Homo sapien
tgggactgatgactgcatgatcttc

SEQ ID NO: 1813730 - DNA, 25 bp, Homo sapien
gggcctggaatggccgacgtgagga

SEQ ID NO: 1813731 - DNA, 25 bp, Homo sapien
acttctttttctgccttcttgggct

SEQ ID NO: 1813732 - DNA, 25 bp, Homo sapien
tacttctttttctgccttcttgggc

SEQ ID NO: 1813733 - DNA, 25 bp, Homo sapien
ctacttctttttctgccttcttggg

SEQ ID NO: 1813734 - DNA, 25 bp, Homo sapien
cttctttttctgccttcttgggctc

SEQ ID NO: 1813735 - DNA, 25 bp, Homo sapien
tttctgagtgccgagtgtctccagc

SEQ ID NO: 1813736 - DNA, 25 bp, Homo sapien
ttgtatccgctcagcacacactttc

SEQ ID NO: 1813737 - DNA, 25 bp, Homo sapien
cacattgtaagactgtgcaagcttg

SEQ ID NO: 1813738 - DNA, 25 bp, Homo sapien
gcttgccacacttgtatccgctcag

SEQ ID NO: 1813739 - DNA, 25 bp, Homo sapien
gtctggtgttttcctgtccagtggg

SEQ ID NO: 1813740 - DNA, 25 bp, Homo sapien
taaaactgtctggtgttttcctgtc

SEQ ID NO: 1813741 - DNA, 25 bp, Homo sapien
aaactgtctggtgttttcctgtcca

SEQ ID NO: 1813742 - DNA, 25 bp, Homo sapien
ctgtctggtgttttcctgtccagtg

SEQ ID NO: 1813743 - DNA, 25 bp, Homo sapien
gtccccatgggccttcagtaaatcc

SEQ ID NO: 1813744 - DNA, 25 bp, Homo sapien
ccaagagtgtgattgtgatgtctgc

SEQ ID NO: 1813745 - DNA, 25 bp, Homo sapien
taagctccagtaatcacagacatga

SEQ ID NO: 1813746 - DNA, 25 bp, Homo sapien
gatcataagctccagtaatcacaga

SEQ ID NO: 1813747 - DNA, 25 bp, Homo sapien
ggatccttatgggtgttttggaata

SEQ ID NO: 1813748 - DNA, 25 bp, Homo sapien
tctatgggcttgaagtagggatcct

SEQ ID NO: 1813749 - DNA, 25 bp, Homo sapien
gagtggtgggaacagatttcatttg

SEQ ID NO: 1813750 - DNA, 25 bp, Homo sapien
tgctgttattcgaagtctatgggct

SEQ ID NO: 1813751 - DNA, 25 bp, Homo sapien
tattcttctaattccgtagtaagct

SEQ ID NO: 1813752 - DNA, 25 bp, Homo sapien
ggagaattgacattccacgtctttc

SEQ ID NO: 1813753 - DNA, 25 bp, Homo sapien
agtaagctcttcataagcggttttc

SEQ ID NO: 1813754 - DNA, 25 bp, Homo sapien
gacattccacgtctttcagtcagag

SEQ ID NO: 1813755 - DNA, 25 bp, Homo sapien
ttaactgctgtgtttttcatattct

SEQ ID NO: 1813756 - DNA, 25 bp, Homo sapien
ctgctgtgtttttcatattctgctt

SEQ ID NO: 1813757 - DNA, 25 bp, Homo sapien
gctgtgtttttcatattctgcttgt

SEQ ID NO: 1813758 - DNA, 25 bp, Homo sapien
aactgctgtgtttttcatattctgc

SEQ ID NO: 1813759 - DNA, 25 bp, Homo sapien
cttctacgtcaccaaattctaccat

SEQ ID NO: 1813760 - DNA, 25 bp, Homo sapien
gcaatttacattcttctacgtcacc

SEQ ID NO: 1813761 - DNA, 25 bp, Homo sapien
tcttctacgtcaccaaattctacca

SEQ ID NO: 1813762 - DNA, 25 bp, Homo sapien
ctgcaatttacattcttctacgtca

SEQ ID NO: 1813763 - DNA, 25 bp, Homo sapien
tcttaagattcactacttcttgttc

SEQ ID NO: 1813764 - DNA, 25 bp, Homo sapien
gtcttaagattcactacttcttgtt

SEQ ID NO: 1813765 - DNA, 25 bp, Homo sapien
ttaagattcactacttcttgttcca

SEQ ID NO: 1813766 - DNA, 25 bp, Homo sapien
cttaagattcactacttcttgttcc

SEQ ID NO: 1813767 - DNA, 25 bp, Homo sapien
agataataactcctgttgaataact

SEQ ID NO: 1813768 - DNA, 25 bp, Homo sapien
taataactcctgttgaataacttga

SEQ ID NO: 1813769 - DNA, 25 bp, Homo sapien
ataactcctgttgaataacttgatt

SEQ ID NO: 1813770 - DNA, 25 bp, Homo sapien
gataataactcctgttgaataactt

SEQ ID NO: 1813771 - DNA, 25 bp, Homo sapien
ctttttagccaaatatagacatttt

SEQ ID NO: 1813772 - DNA, 25 bp, Homo sapien
agatttcggaggatgtataaaaatg

SEQ ID NO: 1813773 - DNA, 25 bp, Homo sapien
gaactgtgaggtttaagcccccaca

SEQ ID NO: 1813774 - DNA, 25 bp, Homo sapien
gatttcggaggatgtataaaaatgc

SEQ ID NO: 1813775 - DNA, 25 bp, Homo sapien
tgtgaggtttaagcccccacactga

SEQ ID NO: 1813776 - DNA, 25 bp, Homo sapien
tttcaggttgtttcatctaattgcc

SEQ ID NO: 1813777 - DNA, 25 bp, Homo sapien
aataactcccttgagtattctgata

SEQ ID NO: 1813778 - DNA, 25 bp, Homo sapien
cggtgagtgaaacagtaatctcagc

SEQ ID NO: 1813779 - DNA, 25 bp, Homo sapien
gagaaactattatagtcgtcctcaa

SEQ ID NO: 1813780 - DNA, 25 bp, Homo sapien
gggtctatacagtattccaaggctc

SEQ ID NO: 1813781 - DNA, 25 bp, Homo sapien
atgacccaggtcagtcgtggcaagg

SEQ ID NO: 1813782 - DNA, 25 bp, Homo sapien
tccaaggctcttcaataagcacatg

SEQ ID NO: 1813783 - DNA, 25 bp, Homo sapien
tgaacaactctgtacgggtctatac

SEQ ID NO: 1813784 - DNA, 25 bp, Homo sapien
ctccttattggccatcacaaagccc

SEQ ID NO: 1813785 - DNA, 25 bp, Homo sapien
cttattggccatcacaaagccccag

SEQ ID NO: 1813786 - DNA, 25 bp, Homo sapien
tccttattggccatcacaaagcccc

SEQ ID NO: 1813787 - DNA, 25 bp, Homo sapien
ccttattggccatcacaaagcccca

SEQ ID NO: 1813788 - DNA, 25 bp, Homo sapien
cttaggaattttgtgcccgatttct

SEQ ID NO: 1813789 - DNA, 25 bp, Homo sapien
ttggacactagagctccaccctgca

SEQ ID NO: 1813790 - DNA, 25 bp, Homo sapien
cagcttccaggtgggctcagtagat

SEQ ID NO: 1813791 - DNA, 25 bp, Homo sapien
gagatggacctggttggacactaga

SEQ ID NO: 1813792 - DNA, 25 bp, Homo sapien
agtggtctggtactgcctgcctgta

SEQ ID NO: 1813793 - DNA, 25 bp, Homo sapien
gcaagatcccaacctatgccaaggg

SEQ ID NO: 1813794 - DNA, 25 bp, Homo sapien
ccactgcgagaagccagcatggaca

SEQ ID NO: 1813795 - DNA, 25 bp, Homo sapien
agccttctcatgagggctgcaagca

SEQ ID NO: 1813796 - DNA, 25 bp, Homo sapien
aaaatcaaatcccagatgacagtct

SEQ ID NO: 1813797 - DNA, 25 bp, Homo sapien
gataaaatcaaatcccagatgacag

SEQ ID NO: 1813798 - DNA, 25 bp, Homo sapien
aatcaaatcccagatgacagtctta

SEQ ID NO: 1813799 - DNA, 25 bp, Homo sapien
atcaaatcccagatgacagtcttaa

SEQ ID NO: 1813800 - DNA, 25 bp, Homo sapien
taaatctgcccgtacggaagcctgg

SEQ ID NO: 1813801 - DNA, 25 bp, Homo sapien
gcgtggtgcagagcaagtttcctca

SEQ ID NO: 1813802 - DNA, 25 bp, Homo sapien
gatggccctttgtggatggactaca

SEQ ID NO: 1813803 - DNA, 25 bp, Homo sapien
cccaggactcactatgggacttgag

SEQ ID NO: 1813804 - DNA, 25 bp, Homo sapien
cgattttcggggcatcatatttcaa

SEQ ID NO: 1813805 - DNA, 25 bp, Homo sapien
tcttctggacgattttcggggcatc

SEQ ID NO: 1813806 - DNA, 25 bp, Homo sapien
tctggacgattttcggggcatcata

SEQ ID NO: 1813807 - DNA, 25 bp, Homo sapien
ctgtcttctggacgattttcggggc

SEQ ID NO: 1813808 - DNA, 25 bp, Homo sapien
gatcccaacgtggagcccacagtaa

SEQ ID NO: 1813809 - DNA, 25 bp, Homo sapien
cacagtaacagcaagcagcgactgt

SEQ ID NO: 1813810 - DNA, 25 bp, Homo sapien
cttgctgcaactgcaagccactgaa

SEQ ID NO: 1813811 - DNA, 25 bp, Homo sapien
gacaggtgtgtctgatcccaacgtg

SEQ ID NO: 1813812 - DNA, 25 bp, Homo sapien
tcttcactactgatcagggctgttt

SEQ ID NO: 1813813 - DNA, 25 bp, Homo sapien
gactagggaacttgacgtctccatt

SEQ ID NO: 1813814 - DNA, 25 bp, Homo sapien
gtttacgtgggtcccatcacagctg

SEQ ID NO: 1813815 - DNA, 25 bp, Homo sapien
tgctctgtgactagggaacttgacg

SEQ ID NO: 1813816 - DNA, 25 bp, Homo sapien
gtgagtttgtttcttacgcctagtg

SEQ ID NO: 1813817 - DNA, 25 bp, Homo sapien
ttacgcctagtgagggactgggcca

SEQ ID NO: 1813818 - DNA, 25 bp, Homo sapien
tgtttcttacgcctagtgagggact

SEQ ID NO: 1813819 - DNA, 25 bp, Homo sapien
gagtttgtttcttacgcctagtgag

SEQ ID NO: 1813820 - DNA, 25 bp, Homo sapien
cggttcccaggctgacagatctgtg

SEQ ID NO: 1813821 - DNA, 25 bp, Homo sapien
ggacccatcagaactgcctaggtct

SEQ ID NO: 1813822 - DNA, 25 bp, Homo sapien
ccggttcccaggctgacagatctgt

SEQ ID NO: 1813823 - DNA, 25 bp, Homo sapien
cttgcagatggacccatcagaactg

SEQ ID NO: 1813824 - DNA, 25 bp, Homo sapien
agtaagaacctgaatgtgtcacaga

SEQ ID NO: 1813825 - DNA, 25 bp, Homo sapien
aatgaagcaaatgtgaggtgtggtt

SEQ ID NO: 1813826 - DNA, 25 bp, Homo sapien
tgagtaagaacctgaatgtgtcaca

SEQ ID NO: 1813827 - DNA, 25 bp, Homo sapien
aaatgagtaagaacctgaatgtgtc

SEQ ID NO: 1813828 - DNA, 25 bp, Homo sapien
tgacggatggttcatacaagtattg

SEQ ID NO: 1813829 - DNA, 25 bp, Homo sapien
catcggccagctcaaagaccagcat

SEQ ID NO: 1813830 - DNA, 25 bp, Homo sapien
cagcatcggccagctcaaagaccag

SEQ ID NO: 1813831 - DNA, 25 bp, Homo sapien
cgagacctgtacttgtgtgacggat

SEQ ID NO: 1813832 - DNA, 25 bp, Homo sapien
ggaggaccagcctccagccagtcag

SEQ ID NO: 1813833 - DNA, 25 bp, Homo sapien
gggtggaggaccagcctccagccag

SEQ ID NO: 1813834 - DNA, 25 bp, Homo sapien
tggaggaccagcctccagccagtca

SEQ ID NO: 1813835 - DNA, 25 bp, Homo sapien
agccagtcagctccaggagacacgc

SEQ ID NO: 1813836 - DNA, 25 bp, Homo sapien
gaaggatcccgcattatcagccatg

SEQ ID NO: 1813837 - DNA, 25 bp, Homo sapien
tttccagcgtcgaaggatccggcac

SEQ ID NO: 1813838 - DNA, 25 bp, Homo sapien
tccaggtggagtacatccagcagcc

SEQ ID NO: 1813839 - DNA, 25 bp, Homo sapien
gagaacacaggcagaatacagtcag

SEQ ID NO: 1813840 - DNA, 25 bp, Homo sapien
ctcccttaggaccactgcctttgcc

SEQ ID NO: 1813841 - DNA, 25 bp, Homo sapien
gctgacggtgttccctgagctgctg

SEQ ID NO: 1813842 - DNA, 25 bp, Homo sapien
tggagactgactctcccttaggacc

SEQ ID NO: 1813843 - DNA, 25 bp, Homo sapien
atgcacacaggtggagactgactct

SEQ ID NO: 1813844 - DNA, 25 bp, Homo sapien
taggttctaaggtcattgcgggcag

SEQ ID NO: 1813845 - DNA, 25 bp, Homo sapien
tgtgttgaccagctctcttgcgtgc

SEQ ID NO: 1813846 - DNA, 25 bp, Homo sapien
tccctgcaggtgacaagtactaatg

SEQ ID NO: 1813847 - DNA, 25 bp, Homo sapien
tttacaactagggagggagtgccac

SEQ ID NO: 1813848 - DNA, 25 bp, Homo sapien
aatccgtggcacaggggctttatct

SEQ ID NO: 1813849 - DNA, 25 bp, Homo sapien
gcactgggcttcttgccccgtcccc

SEQ ID NO: 1813850 - DNA, 25 bp, Homo sapien
ccgtccccctagaatccgtggcaca

SEQ ID NO: 1813851 - DNA, 25 bp, Homo sapien
gcacaggggctttatctgtgtggag

SEQ ID NO: 1813852 - DNA, 25 bp, Homo sapien
aagactgatgctgagcgcccctcct

SEQ ID NO: 1813853 - DNA, 25 bp, Homo sapien
cactcacttgcaggcataggttgct

SEQ ID NO: 1813854 - DNA, 25 bp, Homo sapien
gcggagcacactgatgacttcacaa

SEQ ID NO: 1813855 - DNA, 25 bp, Homo sapien
aactgctgctacatggacagcggag

SEQ ID NO: 1813856 - DNA, 25 bp, Homo sapien
ggcggcgcgtgatggtgccctccga

SEQ ID NO: 1813857 - DNA, 25 bp, Homo sapien
tggtgccctccgagaagcactggga

SEQ ID NO: 1813858 - DNA, 25 bp, Homo sapien
cagggccgttccagagccctgcgtg

SEQ ID NO: 1813859 - DNA, 25 bp, Homo sapien
gacacgtgaatcagcgtttctcaga

SEQ ID NO: 1813860 - DNA, 25 bp, Homo sapien
ctcggaccccctgaatgtgtttgca

SEQ ID NO: 1813861 - DNA, 25 bp, Homo sapien
ctcgtcagtccctcggaccccctga

SEQ ID NO: 1813862 - DNA, 25 bp, Homo sapien
gaatgtgtttgcagacatttgccat

SEQ ID NO: 1813863 - DNA, 25 bp, Homo sapien
ctgaatgtgtttgcagacatttgcc

SEQ ID NO: 1813864 - DNA, 25 bp, Homo sapien
ctgaacgcccagcttcttatcagag

SEQ ID NO: 1813865 - DNA, 25 bp, Homo sapien
gccttcaccctgaacgcccagcttc

SEQ ID NO: 1813866 - DNA, 25 bp, Homo sapien
accctgaacgcccagcttcttatca

SEQ ID NO: 1813867 - DNA, 25 bp, Homo sapien
tcattccacgccttcaccctgaacg

SEQ ID NO: 1813868 - DNA, 25 bp, Homo sapien
tcgtgcacatttagaaggaacttca

SEQ ID NO: 1813869 - DNA, 25 bp, Homo sapien
tggagcctcgagctgacacgtcagt

SEQ ID NO: 1813870 - DNA, 25 bp, Homo sapien
cagtccttgtgcttcgtgcacattt

SEQ ID NO: 1813871 - DNA, 25 bp, Homo sapien
tctgtccccttggagcctcgagctg

SEQ ID NO: 1813872 - DNA, 25 bp, Homo sapien
tctgtgtggacaataactggaaccc

SEQ ID NO: 1813873 - DNA, 25 bp, Homo sapien
gctggagccatgctgggtacccaga

SEQ ID NO: 1813874 - DNA, 25 bp, Homo sapien
tgctgactcaaaggccggattgctc

SEQ ID NO: 1813875 - DNA, 25 bp, Homo sapien
cggttaccatcacgtaggagttttg

SEQ ID NO: 1813876 - DNA, 25 bp, Homo sapien
tgctagtgtatagaaccaaccgact

SEQ ID NO: 1813877 - DNA, 25 bp, Homo sapien
gatctgctacccagcaaccttaatg

SEQ ID NO: 1813878 - DNA, 25 bp, Homo sapien
tagattcccttgatcaggtggagga

SEQ ID NO: 1813879 - DNA, 25 bp, Homo sapien
taattgtcctggcttgatcctccat

SEQ ID NO: 1813880 - DNA, 25 bp, Homo sapien
ctcgcaggctggtaactgtgactct

SEQ ID NO: 1813881 - DNA, 25 bp, Homo sapien
gcaggctggtaactgtgactctaaa

SEQ ID NO: 1813882 - DNA, 25 bp, Homo sapien
gactcgcaggctggtaactgtgact

SEQ ID NO: 1813883 - DNA, 25 bp, Homo sapien
gctggtaactgtgactctaaatcct

SEQ ID NO: 1813884 - DNA, 25 bp, Homo sapien
aatctgccagtgaagctatctgagc

SEQ ID NO: 1813885 - DNA, 25 bp, Homo sapien
tagatgctcacttggaggaagttcc

SEQ ID NO: 1813886 - DNA, 25 bp, Homo sapien
ccatgacgggaattggcctgtagat

SEQ ID NO: 1813887 - DNA, 25 bp, Homo sapien
tttttgcacctatatccatgacggg

SEQ ID NO: 1813888 - DNA, 25 bp, Homo sapien
gaagccatggcaggttctgagttta

SEQ ID NO: 1813889 - DNA, 25 bp, Homo sapien
tctgggcatgtggaccttttaggcc

SEQ ID NO: 1813890 - DNA, 25 bp, Homo sapien
cattggttgctggatagaagcttca

SEQ ID NO: 1813891 - DNA, 25 bp, Homo sapien
catactgaatgctgattttgacggt

SEQ ID NO: 1813892 - DNA, 25 bp, Homo sapien
ccgactacgaatcccagggtgcggg

SEQ ID NO: 1813893 - DNA, 25 bp, Homo sapien
ggcaaggcgggaccatttcccggca

SEQ ID NO: 1813894 - DNA, 25 bp, Homo sapien
gacttgttgacactgcgagcactca

SEQ ID NO: 1813895 - DNA, 25 bp, Homo sapien
cgggaagttctaggccgccgcacag

SEQ ID NO: 1813896 - DNA, 25 bp, Homo sapien
taacagagtcctaagtcctgagctg

SEQ ID NO: 1813897 - DNA, 25 bp, Homo sapien
gctgcttgcgctgatgaggccttct

SEQ ID NO: 1813898 - DNA, 25 bp, Homo sapien
tgacttctgcaacaagggcaacctg

SEQ ID NO: 1813899 - DNA, 25 bp, Homo sapien
catcattagtaaacgggtgtcctct

SEQ ID NO: 1813900 - DNA, 25 bp, Homo sapien
agcttctatactaacagctgggctc

SEQ ID NO: 1813901 - DNA, 25 bp, Homo sapien
ttctatactaacagctgggctctgc

SEQ ID NO: 1813902 - DNA, 25 bp, Homo sapien
cattggcagcttctatactaacagc

SEQ ID NO: 1813903 - DNA, 25 bp, Homo sapien
ggcattggcagcttctatactaaca

SEQ ID NO: 1813904 - DNA, 25 bp, Homo sapien
tgtactggggaagcacctggccttt

SEQ ID NO: 1813905 - DNA, 25 bp, Homo sapien
gatgttgggtcacccgcgtgtctgt

SEQ ID NO: 1813906 - DNA, 25 bp, Homo sapien
gggccctaaacccagcgagtcgatg

SEQ ID NO: 1813907 - DNA, 25 bp, Homo sapien
gagtcgatgggcaccaacccacggc

SEQ ID NO: 1813908 - DNA, 25 bp, Homo sapien
catgggagcccgatcgatgccaggt

SEQ ID NO: 1813909 - DNA, 25 bp, Homo sapien
tacctggtgccctgataaataagca

SEQ ID NO: 1813910 - DNA, 25 bp, Homo sapien
cagacaatgggtgatgccctcggtg

SEQ ID NO: 1813911 - DNA, 25 bp, Homo sapien
gggctcagtgcccaatacctggtgc

SEQ ID NO: 1813912 - DNA, 25 bp, Homo sapien
gctcctcctcaacatttgcatgcac

SEQ ID NO: 1813913 - DNA, 25 bp, Homo sapien
aggcatcctgggacgctgtacgcaa

SEQ ID NO: 1813914 - DNA, 25 bp, Homo sapien
tgtacgcaattcagtggtctagtcc

SEQ ID NO: 1813915 - DNA, 25 bp, Homo sapien
tcaggccacgagagcatctacagtt

SEQ ID NO: 1813916 - DNA, 25 bp, Homo sapien
gactcagattccttaagcatgcaga

SEQ ID NO: 1813917 - DNA, 25 bp, Homo sapien
caaacccacagagtttaggctggtg

SEQ ID NO: 1813918 - DNA, 25 bp, Homo sapien
gaaatattgcaaacccacagagttt

SEQ ID NO: 1813919 - DNA, 25 bp, Homo sapien
attgcaaacccacagagtttaggct

SEQ ID NO: 1813920 - DNA, 25 bp, Homo sapien
tgcaaacccacagagtttaggctgg

SEQ ID NO: 1813921 - DNA, 25 bp, Homo sapien
tccgtggtggaattgaccgaaagct

SEQ ID NO: 1813922 - DNA, 25 bp, Homo sapien
tagttgtgtggcgtgaactctgccc

SEQ ID NO: 1813923 - DNA, 25 bp, Homo sapien
ggtttctgtacctcgcttggatgcc

SEQ ID NO: 1813924 - DNA, 25 bp, Homo sapien
ggcgctcgtgattgcttcctgtgaa

SEQ ID NO: 1813925 - DNA, 25 bp, Homo sapien
ctaaaggcaagtgaactcatgagct

SEQ ID NO: 1813926 - DNA, 25 bp, Homo sapien
ctgatgccttgaagctcccggcagc

SEQ ID NO: 1813927 - DNA, 25 bp, Homo sapien
gactttatgtagattctgatgcctt

SEQ ID NO: 1813928 - DNA, 25 bp, Homo sapien
gactgtaggtggcagactttatgta

SEQ ID NO: 1813929 - DNA, 25 bp, Homo sapien
cactctgaatgcctggtatggcaca

SEQ ID NO: 1813930 - DNA, 25 bp, Homo sapien
tgtcctcggtgcctctgagtgtttt

SEQ ID NO: 1813931 - DNA, 25 bp, Homo sapien
gagtgttttcatgggccagaccagc

SEQ ID NO: 1813932 - DNA, 25 bp, Homo sapien
ctctgcagcagtccgatgagcgtga

SEQ ID NO: 1813933 - DNA, 25 bp, Homo sapien
tctgactcctgagcttgtaaccttg

SEQ ID NO: 1813934 - DNA, 25 bp, Homo sapien
gactcctgagcttgtaaccttgtaa

SEQ ID NO: 1813935 - DNA, 25 bp, Homo sapien
taagtggtgcggctgcaattctgca

SEQ ID NO: 1813936 - DNA, 25 bp, Homo sapien
tgtaaccttgtaagtggtgcggctg

SEQ ID NO: 1813937 - DNA, 25 bp, Homo sapien
ggtgcagcagatgaggcacatgtga

SEQ ID NO: 1813938 - DNA, 25 bp, Homo sapien
aggcagacccctgctgcacacctgt

SEQ ID NO: 1813939 - DNA, 25 bp, Homo sapien
agcagatgaggcacatgtgagagca

SEQ ID NO: 1813940 - DNA, 25 bp, Homo sapien
tgccgtgtctccgggctggggtgct

SEQ ID NO: 1813941 - DNA, 25 bp, Homo sapien
tggccattcaggtagctcaagcagc

SEQ ID NO: 1813942 - DNA, 25 bp, Homo sapien
aaagcactccgaggaatggccaagc

SEQ ID NO: 1813943 - DNA, 25 bp, Homo sapien
tacatgtgcaacatctcggagagtg

SEQ ID NO: 1813944 - DNA, 25 bp, Homo sapien
tgttatttggacacaagacagccgt

SEQ ID NO: 1813945 - DNA, 25 bp, Homo sapien
cagagtagcacgtacctccagaaga

SEQ ID NO: 1813946 - DNA, 25 bp, Homo sapien
tgtgaccagagtagcacgtacctcc

SEQ ID NO: 1813947 - DNA, 25 bp, Homo sapien
tgaccagagtagcacgtacctccag

SEQ ID NO: 1813948 - DNA, 25 bp, Homo sapien
gtagcacgtacctccagaagaggct

SEQ ID NO: 1813949 - DNA, 25 bp, Homo sapien
tgtgggtatccctcccgctaagaga

SEQ ID NO: 1813950 - DNA, 25 bp, Homo sapien
ccgatagaggcggaagcttccctgt

SEQ ID NO: 1813951 - DNA, 25 bp, Homo sapien
tgacacctgacacacttgccaactg

SEQ ID NO: 1813952 - DNA, 25 bp, Homo sapien
aaagtctgcgtctcacaggaggccg

SEQ ID NO: 1813953 - DNA, 25 bp, Homo sapien
gaacttgggtgaccatgcatacaca

SEQ ID NO: 1813954 - DNA, 25 bp, Homo sapien
caaaaatattgtgggcttgccgtaa

SEQ ID NO: 1813955 - DNA, 25 bp, Homo sapien
cgtaacggtcatttggctagctaga

SEQ ID NO: 1813956 - DNA, 25 bp, Homo sapien
gctcattagacagcccattgggttg

SEQ ID NO: 1813957 - DNA, 25 bp, Homo sapien
tctggtcggcacttcatgggtttgg

SEQ ID NO: 1813958 - DNA, 25 bp, Homo sapien
cagggaataagtacatgcggagtca

SEQ ID NO: 1813959 - DNA, 25 bp, Homo sapien
ctagatgcaaacacgtacagacgga

SEQ ID NO: 1813960 - DNA, 25 bp, Homo sapien
gaacccaaggctgacacagtggcag

SEQ ID NO: 1813961 - DNA, 25 bp, Homo sapien
gaattgcggcgagacaagcatggaa

SEQ ID NO: 1813962 - DNA, 25 bp, Homo sapien
tagtgaaagcgtccaattgactgcc

SEQ ID NO: 1813963 - DNA, 25 bp, Homo sapien
gtgttctgtagactgccatcattga

SEQ ID NO: 1813964 - DNA, 25 bp, Homo sapien
tgcacccacccaagacaagtgattt

SEQ ID NO: 1813965 - DNA, 25 bp, Homo sapien
tggctctgcgttttgctgagatctg

SEQ ID NO: 1813966 - DNA, 25 bp, Homo sapien
gagacagatgggacttaacaggcaa

SEQ ID NO: 1813967 - DNA, 25 bp, Homo sapien
gaaagcttgaatttcccctactggc

SEQ ID NO: 1813968 - DNA, 25 bp, Homo sapien
tagataatgctatgctgtcgttggt

SEQ ID NO: 1813969 - DNA, 25 bp, Homo sapien
caggagcccgtgggtgcccgggaag

SEQ ID NO: 1813970 - DNA, 25 bp, Homo sapien
cgtggccgcggggcccgtgctggct

SEQ ID NO: 1813971 - DNA, 25 bp, Homo sapien
tcccagtgccgtgagacgcgtggcc

SEQ ID NO: 1813972 - DNA, 25 bp, Homo sapien
ccgtgggtgcccgggaagagggcag

SEQ ID NO: 1813973 - DNA, 25 bp, Homo sapien
tccattctttacaaagcggccttgc

SEQ ID NO: 1813974 - DNA, 25 bp, Homo sapien
cagcaggaatatgccgggcactgtg

SEQ ID NO: 1813975 - DNA, 25 bp, Homo sapien
cccctatgggcaagctgagcagtgg

SEQ ID NO: 1813976 - DNA, 25 bp, Homo sapien
ccgtgagggacggagcgctgtgact

SEQ ID NO: 1813977 - DNA, 25 bp, Homo sapien
tgcggttcacgggaccaatcttgtg

SEQ ID NO: 1813978 - DNA, 25 bp, Homo sapien
ttcacgggaccaatcttgtgatggc

SEQ ID NO: 1813979 - DNA, 25 bp, Homo sapien
tcacttgcggttcacgggaccaatc

SEQ ID NO: 1813980 - DNA, 25 bp, Homo sapien
caatcttgtgatggccaacattgtg

SEQ ID NO: 1813981 - DNA, 25 bp, Homo sapien
gaccataaccgagtcttctgcgctt

SEQ ID NO: 1813982 - DNA, 25 bp, Homo sapien
ttctgcgctttgtctgccctacagg

SEQ ID NO: 1813983 - DNA, 25 bp, Homo sapien
ttgcttggcgaccataaccgagtct

SEQ ID NO: 1813984 - DNA, 25 bp, Homo sapien
gagtcttctgcgctttgtctgccct

SEQ ID NO: 1813985 - DNA, 25 bp, Homo sapien
cctttcgtgcttttgtccactggac

SEQ ID NO: 1813986 - DNA, 25 bp, Homo sapien
cagcagatgagtcctgaggcctttc

SEQ ID NO: 1813987 - DNA, 25 bp, Homo sapien
ccgggagcaagcctggcaccgaggg

SEQ ID NO: 1813988 - DNA, 25 bp, Homo sapien
cctcagggaccaaggtgtggccccg

SEQ ID NO: 1813989 - DNA, 25 bp, Homo sapien
gcactcaggcccctggaaaaatggg

SEQ ID NO: 1813990 - DNA, 25 bp, Homo sapien
tcagaggttcgggtaggaaaaagca

SEQ ID NO: 1813991 - DNA, 25 bp, Homo sapien
gaaatatctttctcgaagtgcagcc

SEQ ID NO: 1813992 - DNA, 25 bp, Homo sapien
aagtgcagccctgttatagtcagag

SEQ ID NO: 1813993 - DNA, 25 bp, Homo sapien
gcccgcctggtggacctgtccctcc

SEQ ID NO: 1813994 - DNA, 25 bp, Homo sapien
tgcatgcccgcctggtggacctgtc

SEQ ID NO: 1813995 - DNA, 25 bp, Homo sapien
ctgcatgcccgcctggtggacctgt

SEQ ID NO: 1813996 - DNA, 25 bp, Homo sapien
atgcccgcctggtggacctgtccct

SEQ ID NO: 1813997 - DNA, 25 bp, Homo sapien
ctccagcaccccattttaaggatgg

SEQ ID NO: 1813998 - DNA, 25 bp, Homo sapien
tccagcaccccattttaaggatggg

SEQ ID NO: 1813999 - DNA, 25 bp, Homo sapien
tctagacgctgtgtgggtgcaaaca

SEQ ID NO: 1814000 - DNA, 25 bp, Homo sapien
tgggtggcaccgcatgtccaggcca

SEQ ID NO: 1814001 - DNA, 25 bp, Homo sapien
gcttccttttctagacgctgtgtgg

SEQ ID NO: 1814002 - DNA, 25 bp, Homo sapien
tggatggcacggatgacaaacagca

SEQ ID NO: 1814003 - DNA, 25 bp, Homo sapien
cgggccctgggcaccgcgatgggtg

SEQ ID NO: 1814004 - DNA, 25 bp, Homo sapien
tgtcctctcgggctgtttggctcag

SEQ ID NO: 1814005 - DNA, 25 bp, Homo sapien
cctgggcaccgcgatgggtgggggc

SEQ ID NO: 1814006 - DNA, 25 bp, Homo sapien
tcctctcgggctgtttggctcagga

SEQ ID NO: 1814007 - DNA, 25 bp, Homo sapien
acctacagctgctctcggcacgact

SEQ ID NO: 1814008 - DNA, 25 bp, Homo sapien
aacctacagctgctctcggcacgac

SEQ ID NO: 1814009 - DNA, 25 bp, Homo sapien
tacagctgctctcggcacgactcca

SEQ ID NO: 1814010 - DNA, 25 bp, Homo sapien
agctgctctcggcacgactccaggg

SEQ ID NO: 1814011 - DNA, 25 bp, Homo sapien
agggacgctgatgagtgcccgttct

SEQ ID NO: 1814012 - DNA, 25 bp, Homo sapien
gatgagtgcccgttcttgcttctca

SEQ ID NO: 1814013 - DNA, 25 bp, Homo sapien
gacgctgatgagtgcccgttcttgc

SEQ ID NO: 1814014 - DNA, 25 bp, Homo sapien
agcgctgcctccacgggccagtagg

SEQ ID NO: 1814015 - DNA, 25 bp, Homo sapien
catagggtatggtatccagtatcca

SEQ ID NO: 1814016 - DNA, 25 bp, Homo sapien
aaagctaaagcaggcaaggtggtcg

SEQ ID NO: 1814017 - DNA, 25 bp, Homo sapien
gtcgggaagcacatcctgcagggct

SEQ ID NO: 1814018 - DNA, 25 bp, Homo sapien
ggctgtctgctgtatcccgtatgca

SEQ ID NO: 1814019 - DNA, 25 bp, Homo sapien
ctgcgaggttgcatttgggtcggaa

SEQ ID NO: 1814020 - DNA, 25 bp, Homo sapien
cacactgtgctgcgaggttgcattt

SEQ ID NO: 1814021 - DNA, 25 bp, Homo sapien
cactgtgctgcgaggttgcatttgg

SEQ ID NO: 1814022 - DNA, 25 bp, Homo sapien
cgaggttgcatttgggtcggaaaag

SEQ ID NO: 1814023 - DNA, 25 bp, Homo sapien
gccagggcctgcattagccagggca

SEQ ID NO: 1814024 - DNA, 25 bp, Homo sapien
ggtggacagcagtgtatcccctgac

SEQ ID NO: 1814025 - DNA, 25 bp, Homo sapien
ggagaagaacacacgggaacggctg

SEQ ID NO: 1814026 - DNA, 25 bp, Homo sapien
gtagttgcccattggacagattcct

SEQ ID NO: 1814027 - DNA, 25 bp, Homo sapien
tacccataaactcggagaattcagc

SEQ ID NO: 1814028 - DNA, 25 bp, Homo sapien
cgatggtacccataaactcggagaa

SEQ ID NO: 1814029 - DNA, 25 bp, Homo sapien
ataaactcggagaattcagcaatgg

SEQ ID NO: 1814030 - DNA, 25 bp, Homo sapien
ggaatccatccgatggtacccataa

SEQ ID NO: 1814031 - DNA, 25 bp, Homo sapien
tgacaacgagttcaccaaggcacaa

SEQ ID NO: 1814032 - DNA, 25 bp, Homo sapien
aaggcacaaacggttctctgagtca

SEQ ID NO: 1814033 - DNA, 25 bp, Homo sapien
cttgcttcctgacaacgagttcacc

SEQ ID NO: 1814034 - DNA, 25 bp, Homo sapien
accaaggcacaaacggttctctgag

SEQ ID NO: 1814035 - DNA, 25 bp, Homo sapien
aatggcactcgagcctgcgccggca

SEQ ID NO: 1814036 - DNA, 25 bp, Homo sapien
ggacccgcgagacacggtgcggcca

SEQ ID NO: 1814037 - DNA, 25 bp, Homo sapien
tgggaaggaatcagaatggcactcg

SEQ ID NO: 1814038 - DNA, 25 bp, Homo sapien
atcagaatggcactcgagcctgcgc

SEQ ID NO: 1814039 - DNA, 25 bp, Homo sapien
tccttggggaccacggcgactttca

SEQ ID NO: 1814040 - DNA, 25 bp, Homo sapien
ccttggggaccacggcgactttcag

SEQ ID NO: 1814041 - DNA, 25 bp, Homo sapien
accacggcgactttcagccctgaag

SEQ ID NO: 1814042 - DNA, 25 bp, Homo sapien
gggaccacggcgactttcagccctg

SEQ ID NO: 1814043 - DNA, 25 bp, Homo sapien
tgctaggtggcatatgaagatacag

SEQ ID NO: 1814044 - DNA, 25 bp, Homo sapien
ccgtgaatgcagtatttctcccatc

SEQ ID NO: 1814045 - DNA, 25 bp, Homo sapien
tttctcccatcaatgctaggtggca

SEQ ID NO: 1814046 - DNA, 25 bp, Homo sapien
ctggtatctccgtgaatgcagtatt

SEQ ID NO: 1814047 - DNA, 25 bp, Homo sapien
tttgggtgttaacagtagaaatatg

SEQ ID NO: 1814048 - DNA, 25 bp, Homo sapien
ttgggtgttaacagtagaaatatga

SEQ ID NO: 1814049 - DNA, 25 bp, Homo sapien
gcagcattgttccagctactgagca

SEQ ID NO: 1814050 - DNA, 25 bp, Homo sapien
tctgagagaagtcccggtgacctga

SEQ ID NO: 1814051 - DNA, 25 bp, Homo sapien
catcacagataacacacagggcctc

SEQ ID NO: 1814052 - DNA, 25 bp, Homo sapien
gaaaattttcagatgcgacggtatg

SEQ ID NO: 1814053 - DNA, 25 bp, Homo sapien
tgaaatgagggttttaagcacagct

SEQ ID NO: 1814054 - DNA, 25 bp, Homo sapien
cagtttaggacagtaagagctccaa

SEQ ID NO: 1814055 - DNA, 25 bp, Homo sapien
cagtcagtctctccgtgtgtcgtgg

SEQ ID NO: 1814056 - DNA, 25 bp, Homo sapien
cgtgaacgggacactgagaaatgct

SEQ ID NO: 1814057 - DNA, 25 bp, Homo sapien
tctgatctagtaagaatggcaaaac

SEQ ID NO: 1814058 - DNA, 25 bp, Homo sapien
taccaacaattttcgaagtcagagg

SEQ ID NO: 1814059 - DNA, 25 bp, Homo sapien
tacttcctgggcatttcaaatgagg

SEQ ID NO: 1814060 - DNA, 25 bp, Homo sapien
aaatgtattttaaagtcatacagga

SEQ ID NO: 1814061 - DNA, 25 bp, Homo sapien
tacttagagagtgaacagtcttatt

SEQ ID NO: 1814062 - DNA, 25 bp, Homo sapien
ctttagggtacttagagagtgaaca

SEQ ID NO: 1814063 - DNA, 25 bp, Homo sapien
ggtacttagagagtgaacagtctta

SEQ ID NO: 1814064 - DNA, 25 bp, Homo sapien
tagggtacttagagagtgaacagtc

SEQ ID NO: 1814065 - DNA, 25 bp, Homo sapien
tattttcctggacttcttttatgtg

SEQ ID NO: 1814066 - DNA, 25 bp, Homo sapien
ttcctggacttcttttatgtggcag

SEQ ID NO: 1814067 - DNA, 25 bp, Homo sapien
ttttcctggacttcttttatgtggc

SEQ ID NO: 1814068 - DNA, 25 bp, Homo sapien
tggacttcttttatgtggcagatat

SEQ ID NO: 1814069 - DNA, 25 bp, Homo sapien
aagtgcatgctactcttgaacttgt

SEQ ID NO: 1814070 - DNA, 25 bp, Homo sapien
tgcaagtgcatgctactcttgaact

SEQ ID NO: 1814071 - DNA, 25 bp, Homo sapien
gtgcatgctactcttgaacttgttc

SEQ ID NO: 1814072 - DNA, 25 bp, Homo sapien
agctgcaagtgcatgctactcttga

SEQ ID NO: 1814073 - DNA, 25 bp, Homo sapien
tggttctatgaacgctggcaaagcc

SEQ ID NO: 1814074 - DNA, 25 bp, Homo sapien
tggcaaagccataccggagtgtaac

SEQ ID NO: 1814075 - DNA, 25 bp, Homo sapien
aatcgctttgctgcctgatatcgca

SEQ ID NO: 1814076 - DNA, 25 bp, Homo sapien
agcacgtggcatggctgcacccttt

SEQ ID NO: 1814077 - DNA, 25 bp, Homo sapien
ttatctgctccactggaaagctggg

SEQ ID NO: 1814078 - DNA, 25 bp, Homo sapien
cagggcttccaaagcctgcttaaaa

SEQ ID NO: 1814079 - DNA, 25 bp, Homo sapien
tggggcagggcttccaaagcctgct

SEQ ID NO: 1814080 - DNA, 25 bp, Homo sapien
ttccaaagcctgcttaaaacttgac

SEQ ID NO: 1814081 - DNA, 25 bp, Homo sapien
aatactgcaattcttgactttaggg

SEQ ID NO: 1814082 - DNA, 25 bp, Homo sapien
tgcacagggcctgatctacagccaa

SEQ ID NO: 1814083 - DNA, 25 bp, Homo sapien
tggttaaggtgaagaaatactgcaa

SEQ ID NO: 1814084 - DNA, 25 bp, Homo sapien
tgggatgtttagcttttacaaggag

SEQ ID NO: 1814085 - DNA, 25 bp, Homo sapien
ttcgggtgtcaggtaaacagccaca

SEQ ID NO: 1814086 - DNA, 25 bp, Homo sapien
ctttcgggtgtcaggtaaacagcca

SEQ ID NO: 1814087 - DNA, 25 bp, Homo sapien
ttgctttcgggtgtcaggtaaacag

SEQ ID NO: 1814088 - DNA, 25 bp, Homo sapien
cgggtgtcaggtaaacagccacagt

SEQ ID NO: 1814089 - DNA, 25 bp, Homo sapien
cgccagtcatgagtagagtttctaa

SEQ ID NO: 1814090 - DNA, 25 bp, Homo sapien
ctaaggttaagggtctccagcctgc

SEQ ID NO: 1814091 - DNA, 25 bp, Homo sapien
tccagcctgctcatcgtaggatggg

SEQ ID NO: 1814092 - DNA, 25 bp, Homo sapien
ggttggcgtaataccaccatggtga

SEQ ID NO: 1814093 - DNA, 25 bp, Homo sapien
tctatcaccttggatagtacccgag

SEQ ID NO: 1814094 - DNA, 25 bp, Homo sapien
tggatagtacccgagggaccagttc

SEQ ID NO: 1814095 - DNA, 25 bp, Homo sapien
gcatcagtcgactgagctcttcaga

SEQ ID NO: 1814096 - DNA, 25 bp, Homo sapien
gctccatttttgctgaaggatgaaa

SEQ ID NO: 1814097 - DNA, 25 bp, Homo sapien
tctgcccacctaccgaagaaatgct

SEQ ID NO: 1814098 - DNA, 25 bp, Homo sapien
cacctaaatttgcactttgggctca

SEQ ID NO: 1814099 - DNA, 25 bp, Homo sapien
ggctcaaattctataggatgctacc

SEQ ID NO: 1814100 - DNA, 25 bp, Homo sapien
tttcagtcattataagcccatggca

SEQ ID NO: 1814101 - DNA, 25 bp, Homo sapien
ccttcttggatgcttgtcgcccaag

SEQ ID NO: 1814102 - DNA, 25 bp, Homo sapien
cctcagatacttttggatgcagcag

SEQ ID NO: 1814103 - DNA, 25 bp, Homo sapien
tgcagcaggcggcataaacctaaaa

SEQ ID NO: 1814104 - DNA, 25 bp, Homo sapien
ttggatgcttgtcgcccaagaggca

SEQ ID NO: 1814105 - DNA, 25 bp, Homo sapien
ctgggcaacggtggaaacgactgaa

SEQ ID NO: 1814106 - DNA, 25 bp, Homo sapien
cgactgaatggtagcctctttgatc

SEQ ID NO: 1814107 - DNA, 25 bp, Homo sapien
caacggtggaaacgactgaatggta

SEQ ID NO: 1814108 - DNA, 25 bp, Homo sapien
tggaaacgactgaatggtagcctct

SEQ ID NO: 1814109 - DNA, 25 bp, Homo sapien
tgcacggcaattatattcaccagtg

SEQ ID NO: 1814110 - DNA, 25 bp, Homo sapien
ctgcatgcacggcaattatattcac

SEQ ID NO: 1814111 - DNA, 25 bp, Homo sapien
ctctgcatgcacggcaattatattc

SEQ ID NO: 1814112 - DNA, 25 bp, Homo sapien
gcatgcacggcaattatattcacca

SEQ ID NO: 1814113 - DNA, 25 bp, Homo sapien
tcaaatggtgaaaggagtatttcca

SEQ ID NO: 1814114 - DNA, 25 bp, Homo sapien
caggctgtaccccatgctttagagt

SEQ ID NO: 1814115 - DNA, 25 bp, Homo sapien
acaccaccactatttccttttgaga

SEQ ID NO: 1814116 - DNA, 25 bp, Homo sapien
gagaaacagaaagtaacaccaccac

SEQ ID NO: 1814117 - DNA, 25 bp, Homo sapien
ggtgaaagtcaagttattgagcaga

SEQ ID NO: 1814118 - DNA, 25 bp, Homo sapien
accaaaggtgaaagtcaagttattg

SEQ ID NO: 1814119 - DNA, 25 bp, Homo sapien
gaaagtcaagttattgagcagaagg

SEQ ID NO: 1814120 - DNA, 25 bp, Homo sapien
tcaagttattgagcagaaggaccat

SEQ ID NO: 1814121 - DNA, 25 bp, Homo sapien
tggaaacgtttgtccttgacagtac

SEQ ID NO: 1814122 - DNA, 25 bp, Homo sapien
tgctggtttcatacatagtccttgg

SEQ ID NO: 1814123 - DNA, 25 bp, Homo sapien
gttagaatttccgttcaactctcac

SEQ ID NO: 1814124 - DNA, 25 bp, Homo sapien
tgtgatgtgctagaactggaaacgt

SEQ ID NO: 1814125 - DNA, 25 bp, Homo sapien
catactttgcactggtgttgagaat

SEQ ID NO: 1814126 - DNA, 25 bp, Homo sapien
aatgtcaaatgccggtgatggctgg

SEQ ID NO: 1814127 - DNA, 25 bp, Homo sapien
atactttgcactggtgttgagaatg

SEQ ID NO: 1814128 - DNA, 25 bp, Homo sapien
gttgagaatggctcaatgtcaaatg

SEQ ID NO: 1814129 - DNA, 25 bp, Homo sapien
ttaggaataaccactattgacaggt

SEQ ID NO: 1814130 - DNA, 25 bp, Homo sapien
tttgttacagtcgaaagacctacac

SEQ ID NO: 1814131 - DNA, 25 bp, Homo sapien
agagatttcacatatgccgtcccgc

SEQ ID NO: 1814132 - DNA, 25 bp, Homo sapien
gacaggttagtgtatgttcttccag

SEQ ID NO: 1814133 - DNA, 25 bp, Homo sapien
tactcggcctaatgttgttttgacg

SEQ ID NO: 1814134 - DNA, 25 bp, Homo sapien
cacaggcggatttcaaggtactcgg

SEQ ID NO: 1814135 - DNA, 25 bp, Homo sapien
gttttgacgcataacactcttcaga

SEQ ID NO: 1814136 - DNA, 25 bp, Homo sapien
tgttgtaattggaaagacggctcct

SEQ ID NO: 1814137 - DNA, 25 bp, Homo sapien
aatgcgtttgttttgcactgtgagg

SEQ ID NO: 1814138 - DNA, 25 bp, Homo sapien
aaaaccaatgactgctatgagagaa

SEQ ID NO: 1814139 - DNA, 25 bp, Homo sapien
cctgggttaactgttgattttcaca

SEQ ID NO: 1814140 - DNA, 25 bp, Homo sapien
gttacttctggacatactacttcat

SEQ ID NO: 1814141 - DNA, 25 bp, Homo sapien
catctgttgcttcgtgcctggtaca

SEQ ID NO: 1814142 - DNA, 25 bp, Homo sapien
caaggatgtcaccaatgaggcccac

SEQ ID NO: 1814143 - DNA, 25 bp, Homo sapien
ggaacagtgcctcgtttcatagact

SEQ ID NO: 1814144 - DNA, 25 bp, Homo sapien
aaggccagcttagagtgcactccaa

SEQ ID NO: 1814145 - DNA, 25 bp, Homo sapien
cgagggctgtgaagacacagctgct

SEQ ID NO: 1814146 - DNA, 25 bp, Homo sapien
tgcagggcgagggctgtgaagacac

SEQ ID NO: 1814147 - DNA, 25 bp, Homo sapien
agggctgtgaagacacagctgctcc

SEQ ID NO: 1814148 - DNA, 25 bp, Homo sapien
ggctgtgaagacacagctgctccag

SEQ ID NO: 1814149 - DNA, 25 bp, Homo sapien
ccagggactgataccctgacgccct

SEQ ID NO: 1814150 - DNA, 25 bp, Homo sapien
gctagggtgacagggcacacggcag

SEQ ID NO: 1814151 - DNA, 25 bp, Homo sapien
gactgataccctgacgccctgagca

SEQ ID NO: 1814152 - DNA, 25 bp, Homo sapien
gggactgataccctgacgccctgag

SEQ ID NO: 1814153 - DNA, 25 bp, Homo sapien
gcagcgctcgttgtcagctttcaat

SEQ ID NO: 1814154 - DNA, 25 bp, Homo sapien
tcaatgttcccacgcacagagctag

SEQ ID NO: 1814155 - DNA, 25 bp, Homo sapien
tgaagatgatccaaactgcagcgct

SEQ ID NO: 1814156 - DNA, 25 bp, Homo sapien
cacagagctagctcgtctagctcca

SEQ ID NO: 1814157 - DNA, 25 bp, Homo sapien
cacggtagagggaacgcaggcagcc

SEQ ID NO: 1814158 - DNA, 25 bp, Homo sapien
cactgacggagagaccacggtagag

SEQ ID NO: 1814159 - DNA, 25 bp, Homo sapien
gaacgcaggcagcctttctcacctg

SEQ ID NO: 1814160 - DNA, 25 bp, Homo sapien
caatgacctgaatggaagtggtggt

SEQ ID NO: 1814161 - DNA, 25 bp, Homo sapien
actcggagacgagaaccaacaccca

SEQ ID NO: 1814162 - DNA, 25 bp, Homo sapien
tccacactcggagacgagaaccaac

SEQ ID NO: 1814163 - DNA, 25 bp, Homo sapien
gtccacactcggagacgagaaccaa

SEQ ID NO: 1814164 - DNA, 25 bp, Homo sapien
cacactcggagacgagaaccaacac

SEQ ID NO: 1814165 - DNA, 25 bp, Homo sapien
ccacactcggagacgagaaccacca

SEQ ID NO: 1814166 - DNA, 25 bp, Homo sapien
gtccacactcggagacgagaaccac

SEQ ID NO: 1814167 - DNA, 25 bp, Homo sapien
tcaccgtccacactcggagacgaga

SEQ ID NO: 1814168 - DNA, 25 bp, Homo sapien
accgagcgccgacactcaccgtcca

SEQ ID NO: 1814169 - DNA, 25 bp, Homo sapien
tactcaccgtccacactcggagatg

SEQ ID NO: 1814170 - DNA, 25 bp, Homo sapien
caccgtccacactcggagatgaaaa

SEQ ID NO: 1814171 - DNA, 25 bp, Homo sapien
gtccacactcggagatgaaaacaac

SEQ ID NO: 1814172 - DNA, 25 bp, Homo sapien
cacactcggagatgaaaaccaccac

SEQ ID NO: 1814173 - DNA, 25 bp, Homo sapien
tgagtgccgacagtcactgtccaca

SEQ ID NO: 1814174 - DNA, 25 bp, Homo sapien
accacgcactgagtgccgacagtca

SEQ ID NO: 1814175 - DNA, 25 bp, Homo sapien
tgaaaaccaccacgcactgagtgcc

SEQ ID NO: 1814176 - DNA, 25 bp, Homo sapien
gatgaaaaccaccacgcactgagtg

SEQ ID NO: 1814177 - DNA, 25 bp, Homo sapien
tacgtagaggtgtcatcttgtgaag

SEQ ID NO: 1814178 - DNA, 25 bp, Homo sapien
gaagaaccaccagactcggcaatga

SEQ ID NO: 1814179 - DNA, 25 bp, Homo sapien
tcttgtgaagaggtcagcatggctc

SEQ ID NO: 1814180 - DNA, 25 bp, Homo sapien
tcggcaatgactgtaattacgtaga

SEQ ID NO: 1814181 - DNA, 25 bp, Homo sapien
gtttcgctcactgatggactgtgca

SEQ ID NO: 1814182 - DNA, 25 bp, Homo sapien
gatgcaagagataacctaattgtgc

SEQ ID NO: 1814183 - DNA, 25 bp, Homo sapien
catctgcaagatacattccaaaagg

SEQ ID NO: 1814184 - DNA, 25 bp, Homo sapien
tgacgggcaggaggttaccctactc

SEQ ID NO: 1814185 - DNA, 25 bp, Homo sapien
caatcggagatttcagtgacgacag

SEQ ID NO: 1814186 - DNA, 25 bp, Homo sapien
gtgaaactcggtggcccattctaaa

SEQ ID NO: 1814187 - DNA, 25 bp, Homo sapien
gtcatcactgaagcgcaggaaactc

SEQ ID NO: 1814188 - DNA, 25 bp, Homo sapien
tcctctttctcggtaacaatcggag

SEQ ID NO: 1814189 - DNA, 25 bp, Homo sapien
tagttctttcaatgaggccatgcta

SEQ ID NO: 1814190 - DNA, 25 bp, Homo sapien
tctgctttcaactcgatgtaatttt

SEQ ID NO: 1814191 - DNA, 25 bp, Homo sapien
taaggagccaacgatgggatctgct

SEQ ID NO: 1814192 - DNA, 25 bp, Homo sapien
tcaaagagtctttgatctagttctt

SEQ ID NO: 1814193 - DNA, 25 bp, Homo sapien
aggcagagacccaagcatggaggat

SEQ ID NO: 1814194 - DNA, 25 bp, Homo sapien
gcagagacccaagcatggaggatat

SEQ ID NO: 1814195 - DNA, 25 bp, Homo sapien
agagacccaagcatggaggatatgg

SEQ ID NO: 1814196 - DNA, 25 bp, Homo sapien
agacccaagcatggaggatatggga

SEQ ID NO: 1814197 - DNA, 25 bp, Homo sapien
cttgagttgacgaccgacggagcgt

SEQ ID NO: 1814198 - DNA, 25 bp, Homo sapien
ttgagttgacgaccgacggagcgta

SEQ ID NO: 1814199 - DNA, 25 bp, Homo sapien
ccgacggagcgcacacacgagatga

SEQ ID NO: 1814200 - DNA, 25 bp, Homo sapien
acactcgagttgatggccgacggag

SEQ ID NO: 1814201 - DNA, 25 bp, Homo sapien
cactcgagttgatggccgacggagc

SEQ ID NO: 1814202 - DNA, 25 bp, Homo sapien
gagatgacggccgacggagcgtaca

SEQ ID NO: 1814203 - DNA, 25 bp, Homo sapien
acactcgagttgatggccgacggag

SEQ ID NO: 1814204 - DNA, 25 bp, Homo sapien
actcgagttgatggccgacggagcg

SEQ ID NO: 1814205 - DNA, 25 bp, Homo sapien
gagttgatggccgacggagcgtaca

SEQ ID NO: 1814206 - DNA, 25 bp, Homo sapien
tcgagttgatggccgacggagcgta

SEQ ID NO: 1814207 - DNA, 25 bp, Homo sapien
taaaaggcgtatgctggaggcagaa

SEQ ID NO: 1814208 - DNA, 25 bp, Homo sapien
agcgccctgccaccttagcagcaat

SEQ ID NO: 1814209 - DNA, 25 bp, Homo sapien
aatactcccaataagccagcgccct

SEQ ID NO: 1814210 - DNA, 25 bp, Homo sapien
tctggtgtaatggacaatactccca

SEQ ID NO: 1814211 - DNA, 25 bp, Homo sapien
cagccagtgctcccaatggacagtc

SEQ ID NO: 1814212 - DNA, 25 bp, Homo sapien
gcaccgagtccaccaaaggtttata

SEQ ID NO: 1814213 - DNA, 25 bp, Homo sapien
tgcacatggcaggacgctccctgtt

SEQ ID NO: 1814214 - DNA, 25 bp, Homo sapien
gctccctgttggcacatacttctgg

SEQ ID NO: 1814215 - DNA, 25 bp, Homo sapien
gaacaccacgggtctgaactatgtg

SEQ ID NO: 1814216 - DNA, 25 bp, Homo sapien
cagctgttctgagccagcggctgtg

SEQ ID NO: 1814217 - DNA, 25 bp, Homo sapien
gcgtgcatgcacaaagcagcaaagc

SEQ ID NO: 1814218 - DNA, 25 bp, Homo sapien
gcaaaagcatccttgaggtcataca

SEQ ID NO: 1814219 - DNA, 25 bp, Homo sapien
tgctggctgtatctaaagcgttcac

SEQ ID NO: 1814220 - DNA, 25 bp, Homo sapien
ttttgaacagctcaggtgaggagta

SEQ ID NO: 1814221 - DNA, 25 bp, Homo sapien
cagctgtaaccttgagggagctctg

SEQ ID NO: 1814222 - DNA, 25 bp, Homo sapien
ggtgaggagtaaaccagctgtaacc

SEQ ID NO: 1814223 - DNA, 25 bp, Homo sapien
gctgtaaccttgagggagctctgct

SEQ ID NO: 1814224 - DNA, 25 bp, Homo sapien
tagatagcagcaattacttaggact

SEQ ID NO: 1814225 - DNA, 25 bp, Homo sapien
aaggtgtgacgttctagatagcagc

SEQ ID NO: 1814226 - DNA, 25 bp, Homo sapien
tctgcgatatttaggaaggtgtgac

SEQ ID NO: 1814227 - DNA, 25 bp, Homo sapien
ttaggactatcaaaaggcgctgttc

SEQ ID NO: 1814228 - DNA, 25 bp, Homo sapien
tcatggatacttccaaacaagtcag

SEQ ID NO: 1814229 - DNA, 25 bp, Homo sapien
ttcatggatacttccaaacaagtca

SEQ ID NO: 1814230 - DNA, 25 bp, Homo sapien
atcaggcttggtgctcaactgttcc

SEQ ID NO: 1814231 - DNA, 25 bp, Homo sapien
ggtgctcaactgttccagacagtat

SEQ ID NO: 1814232 - DNA, 25 bp, Homo sapien
caactgttccagacagtatataaaa

SEQ ID NO: 1814233 - DNA, 25 bp, Homo sapien
gcttggtgctcaactgttccagaca

SEQ ID NO: 1814234 - DNA, 25 bp, Homo sapien
tgcattatattgatgcttagctggc

SEQ ID NO: 1814235 - DNA, 25 bp, Homo sapien
ctgcattatattgatgcttagctgg

SEQ ID NO: 1814236 - DNA, 25 bp, Homo sapien
gcctctcccggcttgcactccagaa

SEQ ID NO: 1814237 - DNA, 25 bp, Homo sapien
gactgcagagaacacacgatgcact

SEQ ID NO: 1814238 - DNA, 25 bp, Homo sapien
cagtgactgcagagaacacacgatg

SEQ ID NO: 1814239 - DNA, 25 bp, Homo sapien
gagaacacacgatgcactgttcaaa

SEQ ID NO: 1814240 - DNA, 25 bp, Homo sapien
ccaattagatggaggagagttgcaa

SEQ ID NO: 1814241 - DNA, 25 bp, Homo sapien
gagttgcaagttatggctcctggga

SEQ ID NO: 1814242 - DNA, 25 bp, Homo sapien
agccaggccacgagtgaccccgagg

SEQ ID NO: 1814243 - DNA, 25 bp, Homo sapien
cccgaggccagcctgagtagaaggc

SEQ ID NO: 1814244 - DNA, 25 bp, Homo sapien
tcattgtcaacaatccagtcttctt

SEQ ID NO: 1814245 - DNA, 25 bp, Homo sapien
agaagtcagtccttcattgtcaaca

SEQ ID NO: 1814246 - DNA, 25 bp, Homo sapien
cagtccttcattgtcaacaatccag

SEQ ID NO: 1814247 - DNA, 25 bp, Homo sapien
tagagaagtcagtccttcattgtca

SEQ ID NO: 1814248 - DNA, 25 bp, Homo sapien
tcattaggaatttcaagggcagtca

SEQ ID NO: 1814249 - DNA, 25 bp, Homo sapien
gtgtgctgcaacgtggccattacgc

SEQ ID NO: 1814250 - DNA, 25 bp, Homo sapien
tacgcaacgtactcggagatccaag

SEQ ID NO: 1814251 - DNA, 25 bp, Homo sapien
ggcagtcaacgattcatgagtaagt

SEQ ID NO: 1814252 - DNA, 25 bp, Homo sapien
cgggtaagcttcaccagggagtgca

SEQ ID NO: 1814253 - DNA, 25 bp, Homo sapien
ttggcttccccatcccggatgctga

SEQ ID NO: 1814254 - DNA, 25 bp, Homo sapien
tgagcgagccactgtccggagagct

SEQ ID NO: 1814255 - DNA, 25 bp, Homo sapien
cttacagtctggatggcgtgagcga

SEQ ID NO: 1814256 - DNA, 25 bp, Homo sapien
tctttgatctttcaatctggcctga

SEQ ID NO: 1814257 - DNA, 25 bp, Homo sapien
ctttgccttacattctttgatcttt

SEQ ID NO: 1814258 - DNA, 25 bp, Homo sapien
ttctttgatctttcaatctggcctg

SEQ ID NO: 1814259 - DNA, 25 bp, Homo sapien
tgtctttgccttacattctttgatc

SEQ ID NO: 1814260 - DNA, 25 bp, Homo sapien
cctttcatggcgcacttgaggtgag

SEQ ID NO: 1814261 - DNA, 25 bp, Homo sapien
gtggacgggctcataaaaacttctg

SEQ ID NO: 1814262 - DNA, 25 bp, Homo sapien
tcatttgttcacagtctaccgcaca

SEQ ID NO: 1814263 - DNA, 25 bp, Homo sapien
tatggatgactttgttccgggtgcc

SEQ ID NO: 1814264 - DNA, 25 bp, Homo sapien
ccattaacgtaggagatccagagtt

SEQ ID NO: 1814265 - DNA, 25 bp, Homo sapien
gctggctcaagacgagttttgtcaa

SEQ ID NO: 1814266 - DNA, 25 bp, Homo sapien
tcactgaagaggcttccattaacgt

SEQ ID NO: 1814267 - DNA, 25 bp, Homo sapien
ttccagaagttaggcagctggctca

SEQ ID NO: 1814268 - DNA, 25 bp, Homo sapien
tgtcgtctcgaccagactgaaagct

SEQ ID NO: 1814269 - DNA, 25 bp, Homo sapien
tcttcagggacgctgtctgactgag

SEQ ID NO: 1814270 - DNA, 25 bp, Homo sapien
cactgagggacgtgtatcattatca

SEQ ID NO: 1814271 - DNA, 25 bp, Homo sapien
tctgactgagatggcccaacactga

SEQ ID NO: 1814272 - DNA, 25 bp, Homo sapien
gctgccttatttgctatcctctcta

SEQ ID NO: 1814273 - DNA, 25 bp, Homo sapien
tctctactggaaaggcctcactcag

SEQ ID NO: 1814274 - DNA, 25 bp, Homo sapien
tatttgctatcctctctactggaaa

SEQ ID NO: 1814275 - DNA, 25 bp, Homo sapien
tggaaaggcctcactcagtttttct

SEQ ID NO: 1814276 - DNA, 25 bp, Homo sapien
gacccttcttaagggaagcctgcag

SEQ ID NO: 1814277 - DNA, 25 bp, Homo sapien
ttctcatccttcatgcctactacag

SEQ ID NO: 1814278 - DNA, 25 bp, Homo sapien
gagtaaggttactgtattttctcat

SEQ ID NO: 1814279 - DNA, 25 bp, Homo sapien
gagccaggtgagtaaggttactgta

SEQ ID NO: 1814280 - DNA, 25 bp, Homo sapien
catggcccttaaacacctttgaaca

SEQ ID NO: 1814281 - DNA, 25 bp, Homo sapien
attttcctgcgcacagcgggccgtt

SEQ ID NO: 1814282 - DNA, 25 bp, Homo sapien
tcagactctcagaagggtggccgac

SEQ ID NO: 1814283 - DNA, 25 bp, Homo sapien
gttgcttgctgaccaaacacgggcc

SEQ ID NO: 1814284 - DNA, 25 bp, Homo sapien
aggatgggattcctttcaagcgcac

SEQ ID NO: 1814285 - DNA, 25 bp, Homo sapien
caagaatttcaatgccaaagctggg

SEQ ID NO: 1814286 - DNA, 25 bp, Homo sapien
gcgcaccacacacaagaatttcaat

SEQ ID NO: 1814287 - DNA, 25 bp, Homo sapien
tcaagcgcaccacacacaagaattt

SEQ ID NO: 1814288 - DNA, 25 bp, Homo sapien
cagatgcacagtaagccagggcagt

SEQ ID NO: 1814289 - DNA, 25 bp, Homo sapien
gaaaagaaccagctgctacaatcac

SEQ ID NO: 1814290 - DNA, 25 bp, Homo sapien
tagacatgaaatgacttccggctgc

SEQ ID NO: 1814291 - DNA, 25 bp, Homo sapien
tgacaaggtccttttcacatagcct

SEQ ID NO: 1814292 - DNA, 25 bp, Homo sapien
gagagcagtgacatttgtcgagcac

SEQ ID NO: 1814293 - DNA, 25 bp, Homo sapien
ggagagcagtgacatttgtcgagca

SEQ ID NO: 1814294 - DNA, 25 bp, Homo sapien
atctgtatccagtgaatatggtgac

SEQ ID NO: 1814295 - DNA, 25 bp, Homo sapien
tgaatatggtgactgcattcatcac

SEQ ID NO: 1814296 - DNA, 25 bp, Homo sapien
gcacggtgtctggaacgcgtctcaa

SEQ ID NO: 1814297 - DNA, 25 bp, Homo sapien
cacggtgtctggaacgcgtctcaat

SEQ ID NO: 1814298 - DNA, 25 bp, Homo sapien
cagagaactgactgtcgagcacctg

SEQ ID NO: 1814299 - DNA, 25 bp, Homo sapien
ccagagaactgactgtcgagcacct

SEQ ID NO: 1814300 - DNA, 25 bp, Homo sapien
aacacattggaagagaaatccttgc

SEQ ID NO: 1814301 - DNA, 25 bp, Homo sapien
tcacgtagccctctttgcaactgtg

SEQ ID NO: 1814302 - DNA, 25 bp, Homo sapien
gtagccctctttgcaactgtgcatg

SEQ ID NO: 1814303 - DNA, 25 bp, Homo sapien
tgcaactgtgcatgagctgaaggat

SEQ ID NO: 1814304 - DNA, 25 bp, Homo sapien
acgtagccctctttgcaactgtgca

SEQ ID NO: 1814305 - DNA, 25 bp, Homo sapien
gggctccaatgcattgccaagcagg

SEQ ID NO: 1814306 - DNA, 25 bp, Homo sapien
acttgtgttgggctccaatgcattg

SEQ ID NO: 1814307 - DNA, 25 bp, Homo sapien
ttgccaagcagggtcaccagacgca

SEQ ID NO: 1814308 - DNA, 25 bp, Homo sapien
cagacgcatgaaggtcagacaggta

SEQ ID NO: 1814309 - DNA, 25 bp, Homo sapien
tgccaatgacgacggctcatactcc

SEQ ID NO: 1814310 - DNA, 25 bp, Homo sapien
gtgtgctgccaatgacgacggctca

SEQ ID NO: 1814311 - DNA, 25 bp, Homo sapien
tacgcctcatcactaggacacaggt

SEQ ID NO: 1814312 - DNA, 25 bp, Homo sapien
cacaggtccaggtgcggatcttttc

SEQ ID NO: 1814313 - DNA, 25 bp, Homo sapien
cttatgtaacgtttttggtcatgta

SEQ ID NO: 1814314 - DNA, 25 bp, Homo sapien
ctcttaaagcttcaatccttgtttc

SEQ ID NO: 1814315 - DNA, 25 bp, Homo sapien
ggtcatgtaaagttgatggtgtctc

SEQ ID NO: 1814316 - DNA, 25 bp, Homo sapien
tggtgtctcaagcaatttatccaga

SEQ ID NO: 1814317 - DNA, 25 bp, Homo sapien
ccaaaaagtgacttggccttttcat

SEQ ID NO: 1814318 - DNA, 25 bp, Homo sapien
caaaaagtgacttggccttttcata

SEQ ID NO: 1814319 - DNA, 25 bp, Homo sapien
tgacttggccttttcataatcatta

SEQ ID NO: 1814320 - DNA, 25 bp, Homo sapien
aagtgacttggccttttcataatca

SEQ ID NO: 1814321 - DNA, 25 bp, Homo sapien
gtctttccgacctaatacttcttga

SEQ ID NO: 1814322 - DNA, 25 bp, Homo sapien
tgaaacaatgtgtctgcagtattac

SEQ ID NO: 1814323 - DNA, 25 bp, Homo sapien
ctagtggaatctgccttgtctttcc

SEQ ID NO: 1814324 - DNA, 25 bp, Homo sapien
taaatcgctgaagcacattgagtgc

SEQ ID NO: 1814325 - DNA, 25 bp, Homo sapien
tagatagtttcgagcaacacctgcc

SEQ ID NO: 1814326 - DNA, 25 bp, Homo sapien
gaactgaaccgtgatgactgaaacc

SEQ ID NO: 1814327 - DNA, 25 bp, Homo sapien
agtaggccctccacaagcgtgagct

SEQ ID NO: 1814328 - DNA, 25 bp, Homo sapien
gtaactaccagccacacgggactat

SEQ ID NO: 1814329 - DNA, 25 bp, Homo sapien
aagtcagaaagattgcccaatttaa

SEQ ID NO: 1814330 - DNA, 25 bp, Homo sapien
tctaagtgaagtaaatgacactcat

SEQ ID NO: 1814331 - DNA, 25 bp, Homo sapien
caacagtatcctttagaaacttagc

SEQ ID NO: 1814332 - DNA, 25 bp, Homo sapien
actgataaactctgaataaatgacc

SEQ ID NO: 1814333 - DNA, 25 bp, Homo sapien
gatatcaggtccaagaactaatttt

SEQ ID NO: 1814334 - DNA, 25 bp, Homo sapien
tccataaatagttctgggtagtagg

SEQ ID NO: 1814335 - DNA, 25 bp, Homo sapien
gccttgtcccgcgatatcaggtcca

SEQ ID NO: 1814336 - DNA, 25 bp, Homo sapien
cataaatagttctgggtagtaggac

SEQ ID NO: 1814337 - DNA, 25 bp, Homo sapien
ttctccagtttctgcgtcatggatc

SEQ ID NO: 1814338 - DNA, 25 bp, Homo sapien
ccttctactttttccgttccatctg

SEQ ID NO: 1814339 - DNA, 25 bp, Homo sapien
gtcatggatccttctactttttccg

SEQ ID NO: 1814340 - DNA, 25 bp, Homo sapien
ttttccgttccatctgcttctagtt

SEQ ID NO: 1814341 - DNA, 25 bp, Homo sapien
taagatgggttaacaaaagcctcag

SEQ ID NO: 1814342 - DNA, 25 bp, Homo sapien
agctacctgcgtgcatacgtgggcg

SEQ ID NO: 1814343 - DNA, 25 bp, Homo sapien
gtttccatggcggaagctgccagca

SEQ ID NO: 1814344 - DNA, 25 bp, Homo sapien
taaaaacagaccgagtgtcacaccc

SEQ ID NO: 1814345 - DNA, 25 bp, Homo sapien
ttcgaagaatgtactgagaccgcct

SEQ ID NO: 1814346 - DNA, 25 bp, Homo sapien
agggcatcctgtgcttcgaagaatg

SEQ ID NO: 1814347 - DNA, 25 bp, Homo sapien
gccctcactcttcttgttagcctgt

SEQ ID NO: 1814348 - DNA, 25 bp, Homo sapien
gagaccgcctttcacataggccagg

SEQ ID NO: 1814349 - DNA, 25 bp, Homo sapien
ggtgtttgagtgattctctataaga

SEQ ID NO: 1814350 - DNA, 25 bp, Homo sapien
tgtttgagtgattctctataagata

SEQ ID NO: 1814351 - DNA, 25 bp, Homo sapien
gtttgagtgattctctataagatac

SEQ ID NO: 1814352 - DNA, 25 bp, Homo sapien
ctggtgtttgagtgattctctataa

SEQ ID NO: 1814353 - DNA, 25 bp, Homo sapien
gaagacggtcacatgctctgcatcc

SEQ ID NO: 1814354 - DNA, 25 bp, Homo sapien
agtgaagacggtcacatgctctgca

SEQ ID NO: 1814355 - DNA, 25 bp, Homo sapien
tcagtgaagacggtcacatgctctg

SEQ ID NO: 1814356 - DNA, 25 bp, Homo sapien
tgaagacggtcacatgctctgcatc

SEQ ID NO: 1814357 - DNA, 25 bp, Homo sapien
aagtccaagtaacctaaggacacag

SEQ ID NO: 1814358 - DNA, 25 bp, Homo sapien
caagtccaagtaacctaaggacaca

SEQ ID NO: 1814359 - DNA, 25 bp, Homo sapien
tcaagtccaagtaacctaaggacac

SEQ ID NO: 1814360 - DNA, 25 bp, Homo sapien
gatcaagtccaagtaacctaaggac

SEQ ID NO: 1814361 - DNA, 25 bp, Homo sapien
cagtttcaaccacaattgctaagga

SEQ ID NO: 1814362 - DNA, 25 bp, Homo sapien
aaggtctgttggagcacatctggga

SEQ ID NO: 1814363 - DNA, 25 bp, Homo sapien
aaggtctccatactttcaagaaggg

SEQ ID NO: 1814364 - DNA, 25 bp, Homo sapien
gggagagatcaaccaccataagcca

SEQ ID NO: 1814365 - DNA, 25 bp, Homo sapien
agtcccggctcagacacatcagaaa

SEQ ID NO: 1814366 - DNA, 25 bp, Homo sapien
gttcagaataactggatttcggatt

SEQ ID NO: 1814367 - DNA, 25 bp, Homo sapien
actggatttcggattctacatttcc

SEQ ID NO: 1814368 - DNA, 25 bp, Homo sapien
atttccaagtgaagtcccggctcag

SEQ ID NO: 1814369 - DNA, 25 bp, Homo sapien
tgcatcgcccataacacccatgtag

SEQ ID NO: 1814370 - DNA, 25 bp, Homo sapien
gacactagtggtgcaacaactgact

SEQ ID NO: 1814371 - DNA, 25 bp, Homo sapien
gaaggcgttctcattgcccatctat

SEQ ID NO: 1814372 - DNA, 25 bp, Homo sapien
gaagccaggccgattcgaagaaaat

SEQ ID NO: 1814373 - DNA, 25 bp, Homo sapien
tgccaagcgggttagcaggacgtaa

SEQ ID NO: 1814374 - DNA, 25 bp, Homo sapien
cctgtcagtgcgcatatcataataa

SEQ ID NO: 1814375 - DNA, 25 bp, Homo sapien
caggacgtaaggacaagggcggaat

SEQ ID NO: 1814376 - DNA, 25 bp, Homo sapien
tttcaatctcaatgccaagcgggtt

SEQ ID NO: 1814377 - DNA, 25 bp, Homo sapien
cttgaaagagactgttgaggttcct

SEQ ID NO: 1814378 - DNA, 25 bp, Homo sapien
gagactgttgaggttcctctgccac

SEQ ID NO: 1814379 - DNA, 25 bp, Homo sapien
gaaagagactgttgaggttcctctg

SEQ ID NO: 1814380 - DNA, 25 bp, Homo sapien
aagagactgttgaggttcctctgcc

SEQ ID NO: 1814381 - DNA, 25 bp, Homo sapien
tgcagacatccattctgccgtcagg

SEQ ID NO: 1814382 - DNA, 25 bp, Homo sapien
ttctgccgtcaggaggcaattatgt

SEQ ID NO: 1814383 - DNA, 25 bp, Homo sapien
tttggcttgtcccactcgacatact

SEQ ID NO: 1814384 - DNA, 25 bp, Homo sapien
ctgacttagtggtgacaataatgtc

SEQ ID NO: 1814385 - DNA, 25 bp, Homo sapien
ctatgaggtcggtggggccagtccc

SEQ ID NO: 1814386 - DNA, 25 bp, Homo sapien
cctgattgtgaccttcgtccatggt

SEQ ID NO: 1814387 - DNA, 25 bp, Homo sapien
gaccttcgtccatggtatcccttca

SEQ ID NO: 1814388 - DNA, 25 bp, Homo sapien
ggagagatgccggtcacaagggggg

SEQ ID NO: 1814389 - DNA, 25 bp, Homo sapien
cgtagatacaggcagaagcatgaat

SEQ ID NO: 1814390 - DNA, 25 bp, Homo sapien
gagaccaggtagacttgtgttcaag

SEQ ID NO: 1814391 - DNA, 25 bp, Homo sapien
taaagaacatacaggataatccttg

SEQ ID NO: 1814392 - DNA, 25 bp, Homo sapien
taatccttggaaagcccagtacctg

SEQ ID NO: 1814393 - DNA, 25 bp, Homo sapien
aaaatatacgccctgcataagtcag

SEQ ID NO: 1814394 - DNA, 25 bp, Homo sapien
gaggaagggctcaacaaaatatacg

SEQ ID NO: 1814395 - DNA, 25 bp, Homo sapien
cgccctgcataagtcagtgaaggtc

SEQ ID NO: 1814396 - DNA, 25 bp, Homo sapien
ggctcaacaaaatatacgccctgca

SEQ ID NO: 1814397 - DNA, 25 bp, Homo sapien
taggatgtatttgctgtccctccaa

SEQ ID NO: 1814398 - DNA, 25 bp, Homo sapien
ctgcagaagcttccgattgtccacc

SEQ ID NO: 1814399 - DNA, 25 bp, Homo sapien
caagctgaagaagagtattgtccca

SEQ ID NO: 1814400 - DNA, 25 bp, Homo sapien
tcccaaatattgcacagggccgtcg

SEQ ID NO: 1814401 - DNA, 25 bp, Homo sapien
gaggtttgcttccaccagcacgtga

SEQ ID NO: 1814402 - DNA, 25 bp, Homo sapien
aggtctctgttttcaggcacaccca

SEQ ID NO: 1814403 - DNA, 25 bp, Homo sapien
gggtcatcctgccactgaggtttgc

SEQ ID NO: 1814404 - DNA, 25 bp, Homo sapien
gacaccttccatgcgaaactgctgg

SEQ ID NO: 1814405 - DNA, 25 bp, Homo sapien
acagcctggcctcgtggaggccgcc

SEQ ID NO: 1814406 - DNA, 25 bp, Homo sapien
cacagcctggcctcgtggaggccgc

SEQ ID NO: 1814407 - DNA, 25 bp, Homo sapien
ctcgtggaggccgccggaacccgcg

SEQ ID NO: 1814408 - DNA, 25 bp, Homo sapien
agaccttcgctagcctcgcgacggt

SEQ ID NO: 1814409 - DNA, 25 bp, Homo sapien
gctctagacagcctttgccggtgat

SEQ ID NO: 1814410 - DNA, 25 bp, Homo sapien
cgacggtgccgctgacgtgaatgaa

SEQ ID NO: 1814411 - DNA, 25 bp, Homo sapien
tgccggtgatcttggcgcgaaactt

SEQ ID NO: 1814412 - DNA, 25 bp, Homo sapien
atgcttccgtttccactccggttat

SEQ ID NO: 1814413 - DNA, 25 bp, Homo sapien
ataagaagagtaggcattccactgc

SEQ ID NO: 1814414 - DNA, 25 bp, Homo sapien
gaagagtaggcattccactgctgaa

SEQ ID NO: 1814415 - DNA, 25 bp, Homo sapien
tgcttccgtttccactccggttata

SEQ ID NO: 1814416 - DNA, 25 bp, Homo sapien
taccctgctgccaaaggtgagctcg

SEQ ID NO: 1814417 - DNA, 25 bp, Homo sapien
ggcaacagttggtgggatcagctaa

SEQ ID NO: 1814418 - DNA, 25 bp, Homo sapien
cgtacgttgcctagaagagttccag

SEQ ID NO: 1814419 - DNA, 25 bp, Homo sapien
gaggtgtcctgtagcccatcaatga

SEQ ID NO: 1814420 - DNA, 25 bp, Homo sapien
gcaactcaatactggtttcccacag

SEQ ID NO: 1814421 - DNA, 25 bp, Homo sapien
tcctcagctatgtctggcctactga

SEQ ID NO: 1814422 - DNA, 25 bp, Homo sapien
tccattcctaggcttctgcactaag

SEQ ID NO: 1814423 - DNA, 25 bp, Homo sapien
aagaagttgggatgctctgtatctg

SEQ ID NO: 1814424 - DNA, 25 bp, Homo sapien
tatagggattttgaccccttcatta

SEQ ID NO: 1814425 - DNA, 25 bp, Homo sapien
gaaacaataccaattacattaggac

SEQ ID NO: 1814426 - DNA, 25 bp, Homo sapien
tgatgacttattttatccaggtact

SEQ ID NO: 1814427 - DNA, 25 bp, Homo sapien
taggacacaactagccatcaatcaa

SEQ ID NO: 1814428 - DNA, 25 bp, Homo sapien
caacacaagatatttaagatgatct

SEQ ID NO: 1814429 - DNA, 25 bp, Homo sapien
gtacacagctcccacggatcgctgg

SEQ ID NO: 1814430 - DNA, 25 bp, Homo sapien
catagttgtcggctgaatctgtaca

SEQ ID NO: 1814431 - DNA, 25 bp, Homo sapien
taagatgatctcgaaggctcatagt

SEQ ID NO: 1814432 - DNA, 25 bp, Homo sapien
gattacttaactataaccatcattt

SEQ ID NO: 1814433 - DNA, 25 bp, Homo sapien
tttcacttcctaggtaaaagtcata

SEQ ID NO: 1814434 - DNA, 25 bp, Homo sapien
cctaggtaaaagtcatacagtaatg

SEQ ID NO: 1814435 - DNA, 25 bp, Homo sapien
tccacacatgattacttaactataa

SEQ ID NO: 1814436 - DNA, 25 bp, Homo sapien
tatataccggattactcagctgttc

SEQ ID NO: 1814437 - DNA, 25 bp, Homo sapien
tcgccaggttggactgaacaggtaa

SEQ ID NO: 1814438 - DNA, 25 bp, Homo sapien
tacttagaggtctgctttattcccc

SEQ ID NO: 1814439 - DNA, 25 bp, Homo sapien
tagggaatgcctgacaacttagctc

SEQ ID NO: 1814440 - DNA, 25 bp, Homo sapien
tattgccagtagtacccaatgccct

SEQ ID NO: 1814441 - DNA, 25 bp, Homo sapien
gagtttcatacaagagcacagcatt

SEQ ID NO: 1814442 - DNA, 25 bp, Homo sapien
gatgccactggacattgatgacatg

SEQ ID NO: 1814443 - DNA, 25 bp, Homo sapien
taaaggtgactggacttccaaccga

SEQ ID NO: 1814444 - DNA, 25 bp, Homo sapien
gcttacaaatgaaacgaaggggcag

SEQ ID NO: 1814445 - DNA, 25 bp, Homo sapien
tacaaatgaaacgaaggggcagcct

SEQ ID NO: 1814446 - DNA, 25 bp, Homo sapien
ttacaaatgaaacgaaggggcagcc

SEQ ID NO: 1814447 - DNA, 25 bp, Homo sapien
acaaatgaaacgaaggggcagcctt

SEQ ID NO: 1814448 - DNA, 25 bp, Homo sapien
agtcctgtgtccagtgttcgttcca

SEQ ID NO: 1814449 - DNA, 25 bp, Homo sapien
cccaggctggattaagatgcgtaaa

SEQ ID NO: 1814450 - DNA, 25 bp, Homo sapien
cctactatgtggcagacgctggact

SEQ ID NO: 1814451 - DNA, 25 bp, Homo sapien
gattcttacataatgggctcccaag

SEQ ID NO: 1814452 - DNA, 25 bp, Homo sapien
gaaaagtaactgagaggacacctct

SEQ ID NO: 1814453 - DNA, 25 bp, Homo sapien
tgcagctgacgtccatgtcccgctg

SEQ ID NO: 1814454 - DNA, 25 bp, Homo sapien
aggcctggacggacgccgcaggcgg

SEQ ID NO: 1814455 - DNA, 25 bp, Homo sapien
tcccttcaccgctgaggcctggacg

SEQ ID NO: 1814456 - DNA, 25 bp, Homo sapien
accgacggcgccagtgggcgcggct

SEQ ID NO: 1814457 - DNA, 25 bp, Homo sapien
gcccggtaggtctcgccgaagactc

SEQ ID NO: 1814458 - DNA, 25 bp, Homo sapien
taggtctcgccgaagactccgcggc

SEQ ID NO: 1814459 - DNA, 25 bp, Homo sapien
gctcacggccggcacagacagggcc

SEQ ID NO: 1814460 - DNA, 25 bp, Homo sapien
acagacagggcccggtaggtctcgc

SEQ ID NO: 1814461 - DNA, 25 bp, Homo sapien
tccgcctggcagtcgagcgccgagt

SEQ ID NO: 1814462 - DNA, 25 bp, Homo sapien
gtagatccgcctggcagtcgagcgc

SEQ ID NO: 1814463 - DNA, 25 bp, Homo sapien
gagcgtgtagatccgcctggcagtc

SEQ ID NO: 1814464 - DNA, 25 bp, Homo sapien
gagcgccgagcgtgtagatccgcct

SEQ ID NO: 1814465 - DNA, 25 bp, Homo sapien
gcagaaattcccaaaggtaggagac

SEQ ID NO: 1814466 - DNA, 25 bp, Homo sapien
atgattcagctagggcaggtcaggc

SEQ ID NO: 1814467 - DNA, 25 bp, Homo sapien
ggcagtctctgcacaatgggcctgt

SEQ ID NO: 1814468 - DNA, 25 bp, Homo sapien
tatgtgaccaagagtatgtgcctgc

SEQ ID NO: 1814469 - DNA, 25 bp, Homo sapien
catatggccgtgctgccatccagca

SEQ ID NO: 1814470 - DNA, 25 bp, Homo sapien
actccaaccatatggccgtgctgcc

SEQ ID NO: 1814471 - DNA, 25 bp, Homo sapien
ctgccatccagcacaataatgcaga

SEQ ID NO: 1814472 - DNA, 25 bp, Homo sapien
catccagcacaataatgcagatgtg

SEQ ID NO: 1814473 - DNA, 25 bp, Homo sapien
agtgggctgtgtctgtaggtggtcc

SEQ ID NO: 1814474 - DNA, 25 bp, Homo sapien
tatatctgggcgtctctggcagtgg

SEQ ID NO: 1814475 - DNA, 25 bp, Homo sapien
ggcacacactgccagagatatgaga

SEQ ID NO: 1814476 - DNA, 25 bp, Homo sapien
tgccagagatatgagagcccagtac

SEQ ID NO: 1814477 - DNA, 25 bp, Homo sapien
ccacactccagtggaggtccctgga

SEQ ID NO: 1814478 - DNA, 25 bp, Homo sapien
acactccagtggaggtccctggatg

SEQ ID NO: 1814479 - DNA, 25 bp, Homo sapien
cacactccagtggaggtccctggat

SEQ ID NO: 1814480 - DNA, 25 bp, Homo sapien
gccacactccagtggaggtccctgg

SEQ ID NO: 1814481 - DNA, 25 bp, Homo sapien
taataaacaacgattctgcagcaag

SEQ ID NO: 1814482 - DNA, 25 bp, Homo sapien
cactttttaataaacaacgattctg

SEQ ID NO: 1814483 - DNA, 25 bp, Homo sapien
aataaacaacgattctgcagcaagt

SEQ ID NO: 1814484 - DNA, 25 bp, Homo sapien
ttttaataaacaacgattctgcagc

SEQ ID NO: 1814485 - DNA, 25 bp, Homo sapien
aacataatgcacagagatcctgatg

SEQ ID NO: 1814486 - DNA, 25 bp, Homo sapien
cacaaggttgaagcgagcacttcgg

SEQ ID NO: 1814487 - DNA, 25 bp, Homo sapien
cacgtccggaagcactgagtacatc

SEQ ID NO: 1814488 - DNA, 25 bp, Homo sapien
gccaccagaacattccacaaggttg

SEQ ID NO: 1814489 - DNA, 25 bp, Homo sapien
gaaagagccagaggttcactaccag

SEQ ID NO: 1814490 - DNA, 25 bp, Homo sapien
tggaattgctgtaagaaccctcctc

SEQ ID NO: 1814491 - DNA, 25 bp, Homo sapien
aatcagttgcccacatgagagatca

SEQ ID NO: 1814492 - DNA, 25 bp, Homo sapien
gcagggccatccaaggttaagtctc

SEQ ID NO: 1814493 - DNA, 25 bp, Homo sapien
gctgcactgctgagaaaataccacg

SEQ ID NO: 1814494 - DNA, 25 bp, Homo sapien
tcggttgtaaaaagcgtcaggcgct

SEQ ID NO: 1814495 - DNA, 25 bp, Homo sapien
taccacggaaatagaacccactgca

SEQ ID NO: 1814496 - DNA, 25 bp, Homo sapien
tgaaaagcgttaggcctgggaatcg

SEQ ID NO: 1814497 - DNA, 25 bp, Homo sapien
tgtttagaggttgtggcacatggcc

SEQ ID NO: 1814498 - DNA, 25 bp, Homo sapien
atggccatcttcaatatagcagtcc

SEQ ID NO: 1814499 - DNA, 25 bp, Homo sapien
ccaaaccatagcctgtttagaggtt

SEQ ID NO: 1814500 - DNA, 25 bp, Homo sapien
tagcagtccactctgaatttaaatt

SEQ ID NO: 1814501 - DNA, 25 bp, Homo sapien
tgattttaaatagggaattagaaga

SEQ ID NO: 1814502 - DNA, 25 bp, Homo sapien
gaccacctttgttgactattgccaa

SEQ ID NO: 1814503 - DNA, 25 bp, Homo sapien
actgggctctccagaccacctttgt

SEQ ID NO: 1814504 - DNA, 25 bp, Homo sapien
cttatggtcccaccaatgccactgg

SEQ ID NO: 1814505 - DNA, 25 bp, Homo sapien
tcagctcgactctgaaattctgtct

SEQ ID NO: 1814506 - DNA, 25 bp, Homo sapien
ggcatttcaattgacggaatttcat

SEQ ID NO: 1814507 - DNA, 25 bp, Homo sapien
ctcagctcgactctgaaattctgtc

SEQ ID NO: 1814508 - DNA, 25 bp, Homo sapien
tcttttgatggcatttcaattgacg

SEQ ID NO: 1814509 - DNA, 25 bp, Homo sapien
gaggagaattctggtaagttccagc

SEQ ID NO: 1814510 - DNA, 25 bp, Homo sapien
actgcatgcagactctttgaggagg

SEQ ID NO: 1814511 - DNA, 25 bp, Homo sapien
gactctttgaggaggagaattctgg

SEQ ID NO: 1814512 - DNA, 25 bp, Homo sapien
gagaattctggtaagttccagctgt

SEQ ID NO: 1814513 - DNA, 25 bp, Homo sapien
tcctgccatcatggtagatgtggct

SEQ ID NO: 1814514 - DNA, 25 bp, Homo sapien
ctgcagcttcgatgaaggcacagcc

SEQ ID NO: 1814515 - DNA, 25 bp, Homo sapien
tggagctgcagcttcgatgaaggca

SEQ ID NO: 1814516 - DNA, 25 bp, Homo sapien
tgagctctgcctgatgtatgggctg

SEQ ID NO: 1814517 - DNA, 25 bp, Homo sapien
aggttcttgtagatggatgctctcc

SEQ ID NO: 1814518 - DNA, 25 bp, Homo sapien
cattgaacggcatccactatcatga

SEQ ID NO: 1814519 - DNA, 25 bp, Homo sapien
agcaggttcttgtagatggatgctc

SEQ ID NO: 1814520 - DNA, 25 bp, Homo sapien
gaggaccgagggcataagggtgagc

SEQ ID NO: 1814521 - DNA, 25 bp, Homo sapien
cagggtaagcttggagccggaagga

SEQ ID NO: 1814522 - DNA, 25 bp, Homo sapien
ttcagggtaagcttggagccggaag

SEQ ID NO: 1814523 - DNA, 25 bp, Homo sapien
tcagggtaagcttggagccggaagg

SEQ ID NO: 1814524 - DNA, 25 bp, Homo sapien
tgtttgcgttatcatagacacctgc

SEQ ID NO: 1814525 - DNA, 25 bp, Homo sapien
tttgcgttatcatagacacctgcca

SEQ ID NO: 1814526 - DNA, 25 bp, Homo sapien
gcgttatcatagacacctgccaaca

SEQ ID NO: 1814527 - DNA, 25 bp, Homo sapien
ttgtttgcgttatcatagacacctg

SEQ ID NO: 1814528 - DNA, 25 bp, Homo sapien
ggacttctcagcaccctttaggtcg

SEQ ID NO: 1814529 - DNA, 25 bp, Homo sapien
cctccaggttaacagcagtggactt

SEQ ID NO: 1814530 - DNA, 25 bp, Homo sapien
cctttgtcaagtcaaacactttgag

SEQ ID NO: 1814531 - DNA, 25 bp, Homo sapien
tgaacatggattctgttgcctggca

SEQ ID NO: 1814532 - DNA, 25 bp, Homo sapien
caagcacacgaatgaggttgtgggc

SEQ ID NO: 1814533 - DNA, 25 bp, Homo sapien
attttcaggtgtccaagcacacgaa

SEQ ID NO: 1814534 - DNA, 25 bp, Homo sapien
ccaagcacacgaatgaggttgtggg

SEQ ID NO: 1814535 - DNA, 25 bp, Homo sapien
agcacacgaatgaggttgtgggcac

SEQ ID NO: 1814536 - DNA, 25 bp, Homo sapien
acattcctgggagcggcactcagtg

SEQ ID NO: 1814537 - DNA, 25 bp, Homo sapien
ggtgcgtctgaggttttggctctcc

SEQ ID NO: 1814538 - DNA, 25 bp, Homo sapien
agtgcgtctgaggttttggatcccc

SEQ ID NO: 1814539 - DNA, 25 bp, Homo sapien
tcagtggcagcagtaagatccaggc

SEQ ID NO: 1814540 - DNA, 25 bp, Homo sapien
gcgtcacaccctggtaggaattttc

SEQ ID NO: 1814541 - DNA, 25 bp, Homo sapien
aagggcgattgaaggcgtcacaccc

SEQ ID NO: 1814542 - DNA, 25 bp, Homo sapien
aaacgaagggcgattgaaggcgtca

SEQ ID NO: 1814543 - DNA, 25 bp, Homo sapien
tcacgggaaacgaagggcgattgaa

SEQ ID NO: 1814544 - DNA, 25 bp, Homo sapien
tgatttactgggaacaggtcaaagg

SEQ ID NO: 1814545 - DNA, 25 bp, Homo sapien
ttcctgttttgatttactgggaaca

SEQ ID NO: 1814546 - DNA, 25 bp, Homo sapien
gttttgatttactgggaacaggtca

SEQ ID NO: 1814547 - DNA, 25 bp, Homo sapien
tgttttgatttactgggaacaggtc

SEQ ID NO: 1814548 - DNA, 25 bp, Homo sapien
cgtttaaaatagatcttggaagaca

SEQ ID NO: 1814549 - DNA, 25 bp, Homo sapien
gtttaaaatagatcttggaagacat

SEQ ID NO: 1814550 - DNA, 25 bp, Homo sapien
cacttcccgtttaaaatagatcttg

SEQ ID NO: 1814551 - DNA, 25 bp, Homo sapien
ctgaaaagtacacaacacttcccgt

SEQ ID NO: 1814552 - DNA, 25 bp, Homo sapien
ccgcccccgtgggacttggacagag

SEQ ID NO: 1814553 - DNA, 25 bp, Homo sapien
gcccccgtgggacttggacagagca

SEQ ID NO: 1814554 - DNA, 25 bp, Homo sapien
cccccgtgggacttggacagagcat

SEQ ID NO: 1814555 - DNA, 25 bp, Homo sapien
cgcccccgtgggacttggacagagc

SEQ ID NO: 1814556 - DNA, 25 bp, Homo sapien
gcactcggtgtctgccacaggtgag

SEQ ID NO: 1814557 - DNA, 25 bp, Homo sapien
accattggccagaacgtgtcttgtg

SEQ ID NO: 1814558 - DNA, 25 bp, Homo sapien
gccgagagctttcagcagaacacga

SEQ ID NO: 1814559 - DNA, 25 bp, Homo sapien
gagctttcagcagaacacgaggtac

SEQ ID NO: 1814560 - DNA, 25 bp, Homo sapien
gcaccgacagcaagtacgcagagac

SEQ ID NO: 1814561 - DNA, 25 bp, Homo sapien
gggcaccgacagcaagtacgcagag

SEQ ID NO: 1814562 - DNA, 25 bp, Homo sapien
ggcaccgacagcaagtacgcagaga

SEQ ID NO: 1814563 - DNA, 25 bp, Homo sapien
agggcaccgacagcaagtacgcaga

SEQ ID NO: 1814564 - DNA, 25 bp, Homo sapien
tctgcttccgaaagcacaggtggat

SEQ ID NO: 1814565 - DNA, 25 bp, Homo sapien
tctgttctgcttccgaaagcacagg

SEQ ID NO: 1814566 - DNA, 25 bp, Homo sapien
ttcagggtcaccacccccattccca

SEQ ID NO: 1814567 - DNA, 25 bp, Homo sapien
caccacccccattcccacgtggctt

SEQ ID NO: 1814568 - DNA, 25 bp, Homo sapien
tggatggcctgcaaaatgctcttgg

SEQ ID NO: 1814569 - DNA, 25 bp, Homo sapien
gaaagtggctgaatgctcaatgcta

SEQ ID NO: 1814570 - DNA, 25 bp, Homo sapien
tcctcatgccggtcttctaagagaa

SEQ ID NO: 1814571 - DNA, 25 bp, Homo sapien
tagaatgtccctatgcccgtggaag

SEQ ID NO: 1814572 - DNA, 25 bp, Homo sapien
tcttcccgacccttgtcgtgctttg

SEQ ID NO: 1814573 - DNA, 25 bp, Homo sapien
cattctccggttcaggcgggtgcat

SEQ ID NO: 1814574 - DNA, 25 bp, Homo sapien
ctgcttttccttcgggttttgcact

SEQ ID NO: 1814575 - DNA, 25 bp, Homo sapien
tttccttgacaactacacgattgcc

SEQ ID NO: 1814576 - DNA, 25 bp, Homo sapien
gctgagaagccgtcggactcctcca

SEQ ID NO: 1814577 - DNA, 25 bp, Homo sapien
agctgagaagccgtcggactcctcc

SEQ ID NO: 1814578 - DNA, 25 bp, Homo sapien
agaagctgagaagccgtcggactcc

SEQ ID NO: 1814579 - DNA, 25 bp, Homo sapien
gaagctgagaagccgtcggactcct

SEQ ID NO: 1814580 - DNA, 25 bp, Homo sapien
tgggtcacactgggtgtaacctgaa

SEQ ID NO: 1814581 - DNA, 25 bp, Homo sapien
atattcatcacacactggaagggac

SEQ ID NO: 1814582 - DNA, 25 bp, Homo sapien
cgtgccaggcgttccggccggccat

SEQ ID NO: 1814583 - DNA, 25 bp, Homo sapien
tcatcacacactggaagggacgctg

SEQ ID NO: 1814584 - DNA, 25 bp, Homo sapien
acactggaagggacgctgcgtgcca

SEQ ID NO: 1814585 - DNA, 25 bp, Homo sapien
cagcgagacggttggttaggggcgc

SEQ ID NO: 1814586 - DNA, 25 bp, Homo sapien
ccagcgagacggttggttaggggcg

SEQ ID NO: 1814587 - DNA, 25 bp, Homo sapien
gagacggttggttaggggcgctcac

SEQ ID NO: 1814588 - DNA, 25 bp, Homo sapien
gcgagacggttggttaggggcgctc

SEQ ID NO: 1814589 - DNA, 25 bp, Homo sapien
cttttggtgcccagaaccagattca

SEQ ID NO: 1814590 - DNA, 25 bp, Homo sapien
tcgacctacagccacagacaagggt

SEQ ID NO: 1814591 - DNA, 25 bp, Homo sapien
gacaagggttgagcataactagggc

SEQ ID NO: 1814592 - DNA, 25 bp, Homo sapien
acatgtggtctctctgcccttttgg

SEQ ID NO: 1814593 - DNA, 25 bp, Homo sapien
ctgagttctgtagggtttataaagg

SEQ ID NO: 1814594 - DNA, 25 bp, Homo sapien
atttgagactgaaagagagatgaac

SEQ ID NO: 1814595 - DNA, 25 bp, Homo sapien
ttatttgagactgaaagagagatga

SEQ ID NO: 1814596 - DNA, 25 bp, Homo sapien
tatttgagactgaaagagagatgaa

SEQ ID NO: 1814597 - DNA, 25 bp, Homo sapien
ggcagccgcggccagaggttgagag

SEQ ID NO: 1814598 - DNA, 25 bp, Homo sapien
gttgagagactcgaagtatccagat

SEQ ID NO: 1814599 - DNA, 25 bp, Homo sapien
gccgcggccagaggttgagagactc

SEQ ID NO: 1814600 - DNA, 25 bp, Homo sapien
gccagaggttgagagactcgaagta

SEQ ID NO: 1814601 - DNA, 25 bp, Homo sapien
cacgttttatggactgatgccgcca

SEQ ID NO: 1814602 - DNA, 25 bp, Homo sapien
tattcctgttccctgagctttgctg

SEQ ID NO: 1814603 - DNA, 25 bp, Homo sapien
tgctgattacaaagagattcccttc

SEQ ID NO: 1814604 - DNA, 25 bp, Homo sapien
gattcccttctctatcaccacgttt

SEQ ID NO: 1814605 - DNA, 25 bp, Homo sapien
agagcatatcagattccatgcccat

SEQ ID NO: 1814606 - DNA, 25 bp, Homo sapien
aaagagcatatcagattccatgccc

SEQ ID NO: 1814607 - DNA, 25 bp, Homo sapien
gaaaagagcatatcagattccatgc

SEQ ID NO: 1814608 - DNA, 25 bp, Homo sapien
ggaaaagagcatatcagattccatg

SEQ ID NO: 1814609 - DNA, 25 bp, Homo sapien
gcttggattcttgcatcgcccgagc

SEQ ID NO: 1814610 - DNA, 25 bp, Homo sapien
gggaggacccatcgtctctgcctgg

SEQ ID NO: 1814611 - DNA, 25 bp, Homo sapien
tcgcccgagcatttgccttgagcat

SEQ ID NO: 1814612 - DNA, 25 bp, Homo sapien
ttgcatcgcccgagcatttgccttg

SEQ ID NO: 1814613 - DNA, 25 bp, Homo sapien
gggacacaccacaagtacgttgttg

SEQ ID NO: 1814614 - DNA, 25 bp, Homo sapien
cacaccacaagtacgttgttgggct

SEQ ID NO: 1814615 - DNA, 25 bp, Homo sapien
accacaagtacgttgttgggctctg

SEQ ID NO: 1814616 - DNA, 25 bp, Homo sapien
ctggacgtaggagctggaggatgat

SEQ ID NO: 1814617 - DNA, 25 bp, Homo sapien
agggctgtcacaacctcattagggc

SEQ ID NO: 1814618 - DNA, 25 bp, Homo sapien
tagtttagacactctaccgcagcca

SEQ ID NO: 1814619 - DNA, 25 bp, Homo sapien
cattgattatccaaggatgggcgca

SEQ ID NO: 1814620 - DNA, 25 bp, Homo sapien
gccactatgcagaatccccgaggtt

SEQ ID NO: 1814621 - DNA, 25 bp, Homo sapien
aggacgacagatagcaactccttca

SEQ ID NO: 1814622 - DNA, 25 bp, Homo sapien
ttaaggacgacagatagcaactcct

SEQ ID NO: 1814623 - DNA, 25 bp, Homo sapien
gacgacagatagcaactccttcaca

SEQ ID NO: 1814624 - DNA, 25 bp, Homo sapien
gacagatagcaactccttcacaaat

SEQ ID NO: 1814625 - DNA, 25 bp, Homo sapien
tattaaggcgattgtttatggaggg

SEQ ID NO: 1814626 - DNA, 25 bp, Homo sapien
gagtaattcactaagataggaggag

SEQ ID NO: 1814627 - DNA, 25 bp, Homo sapien
cccagagagtaattcactaagatag

SEQ ID NO: 1814628 - DNA, 25 bp, Homo sapien
taggaggagatgtattaaggcgatt

SEQ ID NO: 1814629 - DNA, 25 bp, Homo sapien
cataaacctggtagaacgacttctc

SEQ ID NO: 1814630 - DNA, 25 bp, Homo sapien
gaacgacttctccaaacaggcagaa

SEQ ID NO: 1814631 - DNA, 25 bp, Homo sapien
ggcagaaaacatccggctgcttaat

SEQ ID NO: 1814632 - DNA, 25 bp, Homo sapien
ctctcggtggtgttggtcataaacc

SEQ ID NO: 1814633 - DNA, 25 bp, Homo sapien
cagcactgacaacacagacagtagc

SEQ ID NO: 1814634 - DNA, 25 bp, Homo sapien
gcactgacaacacagacagtagcag

SEQ ID NO: 1814635 - DNA, 25 bp, Homo sapien
cccgccccactggcttgtgtcagca

SEQ ID NO: 1814636 - DNA, 25 bp, Homo sapien
cactggcttgtgtcagcactgacaa

SEQ ID NO: 1814637 - DNA, 25 bp, Homo sapien
gattcagctgttgcatccaacaagg

SEQ ID NO: 1814638 - DNA, 25 bp, Homo sapien
cagggacatcgtttgaagaacagac

SEQ ID NO: 1814639 - DNA, 25 bp, Homo sapien
caggcctgtgcatgctgcaaacaga

SEQ ID NO: 1814640 - DNA, 25 bp, Homo sapien
tcttcctgtgctagcgtgggttcca

SEQ ID NO: 1814641 - DNA, 25 bp, Homo sapien
gcaccgagtgggtggtctacacagc

SEQ ID NO: 1814642 - DNA, 25 bp, Homo sapien
aacatgcctgcctcaacggaagtgg

SEQ ID NO: 1814643 - DNA, 25 bp, Homo sapien
tgttctgaggactcgagttggctct

SEQ ID NO: 1814644 - DNA, 25 bp, Homo sapien
tggtgccctcacagtgtgttctgag

SEQ ID NO: 1814645 - DNA, 25 bp, Homo sapien
gcttggtgcgaaggtggcttgcagg

SEQ ID NO: 1814646 - DNA, 25 bp, Homo sapien
cgctgagtgcatttcagagcccgca

SEQ ID NO: 1814647 - DNA, 25 bp, Homo sapien
agcttggtgcgaaggtggcttgcag

SEQ ID NO: 1814648 - DNA, 25 bp, Homo sapien
gcagcaaatatttccggaaggccat

SEQ ID NO: 1814649 - DNA, 25 bp, Homo sapien
tacatttgtctagcagcaaatattt

SEQ ID NO: 1814650 - DNA, 25 bp, Homo sapien
ggacatgaggatgttgactgttctc

SEQ ID NO: 1814651 - DNA, 25 bp, Homo sapien
ccttggtataggcactttagggctt

SEQ ID NO: 1814652 - DNA, 25 bp, Homo sapien
gctgccttacctgcacttccatcac

SEQ ID NO: 1814653 - DNA, 25 bp, Homo sapien
cagccaattccctcctccactgcat

SEQ ID NO: 1814654 - DNA, 25 bp, Homo sapien
acagccaattccctcctccactgca

SEQ ID NO: 1814655 - DNA, 25 bp, Homo sapien
ggacagccaattccctcctccactg

SEQ ID NO: 1814656 - DNA, 25 bp, Homo sapien
ctggacagccaattccctcctccac

SEQ ID NO: 1814657 - DNA, 25 bp, Homo sapien
gctttcatctgcactcctagctgca

SEQ ID NO: 1814658 - DNA, 25 bp, Homo sapien
gggctttcatctgcactcctagctg

SEQ ID NO: 1814659 - DNA, 25 bp, Homo sapien
ttcatctgcactcctagctgcacca

SEQ ID NO: 1814660 - DNA, 25 bp, Homo sapien
cagctgagggctttcatctgcactc

SEQ ID NO: 1814661 - DNA, 25 bp, Homo sapien
tgaatgaggaatcctgctctctttt

SEQ ID NO: 1814662 - DNA, 25 bp, Homo sapien
aaactggatgaatgaggaatcctgc

SEQ ID NO: 1814663 - DNA, 25 bp, Homo sapien
actggatgaatgaggaatcctgctc

SEQ ID NO: 1814664 - DNA, 25 bp, Homo sapien
gaatgaggaatcctgctctcttttt

SEQ ID NO: 1814665 - DNA, 25 bp, Homo sapien
tggagaatgtccagaccaatgcccc

SEQ ID NO: 1814666 - DNA, 25 bp, Homo sapien
catccatagtccacagggtgtgagc

SEQ ID NO: 1814667 - DNA, 25 bp, Homo sapien
tcctggctcaaagaaagactatggc

SEQ ID NO: 1814668 - DNA, 25 bp, Homo sapien
ggcaggaaatgtagctgagcacaca

SEQ ID NO: 1814669 - DNA, 25 bp, Homo sapien
tcaattgttgaagccagccaagccc

SEQ ID NO: 1814670 - DNA, 25 bp, Homo sapien
gattaacgtgcagtaaacagctgga

SEQ ID NO: 1814671 - DNA, 25 bp, Homo sapien
tttcggacgggaacagaccaatggc

SEQ ID NO: 1814672 - DNA, 25 bp, Homo sapien
gataggtccttcagatctgcccgaa

SEQ ID NO: 1814673 - DNA, 25 bp, Homo sapien
ctgcagcccgcgtccacggtgacaa

SEQ ID NO: 1814674 - DNA, 25 bp, Homo sapien
ctttctttgaagaccatttatccat

SEQ ID NO: 1814675 - DNA, 25 bp, Homo sapien
ccagcttttttctattcattatatt

SEQ ID NO: 1814676 - DNA, 25 bp, Homo sapien
ttctccagcttttttctattcatta

SEQ ID NO: 1814677 - DNA, 25 bp, Homo sapien
ctccagcttttttctattcattata

SEQ ID NO: 1814678 - DNA, 25 bp, Homo sapien
tctccagcttttttctattcattat

SEQ ID NO: 1814679 - DNA, 25 bp, Homo sapien
catcatgggcatggcatatgggtcc

SEQ ID NO: 1814680 - DNA, 25 bp, Homo sapien
tgacgcctgaacaggatagaaaggg

SEQ ID NO: 1814681 - DNA, 25 bp, Homo sapien
cattggactcacaaaatgaagacgc

SEQ ID NO: 1814682 - DNA, 25 bp, Homo sapien
aatgaagacgccattgcccctgtcc

SEQ ID NO: 1814683 - DNA, 25 bp, Homo sapien
tgtcagtccactgccaaagccctgc

SEQ ID NO: 1814684 - DNA, 25 bp, Homo sapien
tctgtcagtccactgccaaagccct

SEQ ID NO: 1814685 - DNA, 25 bp, Homo sapien
ggtgtctgtcagtccactgccaaag

SEQ ID NO: 1814686 - DNA, 25 bp, Homo sapien
tgtctgtcagtccactgccaaagcc

SEQ ID NO: 1814687 - DNA, 25 bp, Homo sapien
atgcagattcactgatcagtttcct

SEQ ID NO: 1814688 - DNA, 25 bp, Homo sapien
tgcagattcactgatcagtttcctc

SEQ ID NO: 1814689 - DNA, 25 bp, Homo sapien
agacccaggtctctaatccaagttc

SEQ ID NO: 1814690 - DNA, 25 bp, Homo sapien
cccaggtctctaatccaagttccac

SEQ ID NO: 1814691 - DNA, 25 bp, Homo sapien
catgacttcaacgtgccgcacgata

SEQ ID NO: 1814692 - DNA, 25 bp, Homo sapien
caacctctgttcaatcatgacttca

SEQ ID NO: 1814693 - DNA, 25 bp, Homo sapien
cccacactcaggtcccattgagata

SEQ ID NO: 1814694 - DNA, 25 bp, Homo sapien
ctcaggtcccattgagatatcatct

SEQ ID NO: 1814695 - DNA, 25 bp, Homo sapien
tagaatccaaacccatggacccagg

SEQ ID NO: 1814696 - DNA, 25 bp, Homo sapien
gggccctctggacaaggtggttaca

SEQ ID NO: 1814697 - DNA, 25 bp, Homo sapien
acaaggtggttacactagtagtggc

SEQ ID NO: 1814698 - DNA, 25 bp, Homo sapien
gaaagtgcagctgggtacacccggg

SEQ ID NO: 1814699 - DNA, 25 bp, Homo sapien
tgaattcacaatggaaagtgcagct

SEQ ID NO: 1814700 - DNA, 25 bp, Homo sapien
gcctcttgccaatgagtcgttttgt

SEQ ID NO: 1814701 - DNA, 25 bp, Homo sapien
tctgagcccaaacccataatttctt

SEQ ID NO: 1814702 - DNA, 25 bp, Homo sapien
gaacctgagtcgttacagtgcctct

SEQ ID NO: 1814703 - DNA, 25 bp, Homo sapien
gaaagctcagggtcaggtcacactg

SEQ ID NO: 1814704 - DNA, 25 bp, Homo sapien
gcctggtgtcaagccctttggaagt

SEQ ID NO: 1814705 - DNA, 25 bp, Homo sapien
ggcctgtagccccacaagtttcgtg

SEQ ID NO: 1814706 - DNA, 25 bp, Homo sapien
gccaaagtggttgcctaagaggatg

SEQ ID NO: 1814707 - DNA, 25 bp, Homo sapien
cagtgttctaagaaggccattggcc

SEQ ID NO: 1814708 - DNA, 25 bp, Homo sapien
cgcgtagctaccgtattgggcaaat

SEQ ID NO: 1814709 - DNA, 25 bp, Homo sapien
ggcaaattagcaccagatcgaccat

SEQ ID NO: 1814710 - DNA, 25 bp, Homo sapien
catcaccgttgcagttatcgagtca

SEQ ID NO: 1814711 - DNA, 25 bp, Homo sapien
tggaatttcattgccgcgtagctac

SEQ ID NO: 1814712 - DNA, 25 bp, Homo sapien
tgtctctaacttgaaggcttggagt

SEQ ID NO: 1814713 - DNA, 25 bp, Homo sapien
caaaatctttggtctaagactcgag

SEQ ID NO: 1814714 - DNA, 25 bp, Homo sapien
tgcgactataacttgctgggtctcc

SEQ ID NO: 1814715 - DNA, 25 bp, Homo sapien
tcgtggagaccaagaaacgttcctg

SEQ ID NO: 1814716 - DNA, 25 bp, Homo sapien
gaatctggacagttacctggaggtc

SEQ ID NO: 1814717 - DNA, 25 bp, Homo sapien
cattctgtgccagttctggtgatca

SEQ ID NO: 1814718 - DNA, 25 bp, Homo sapien
caaaacatgtgtcaagagctttcca

SEQ ID NO: 1814719 - DNA, 25 bp, Homo sapien
tcagcgctggaatgagaagttacag

SEQ ID NO: 1814720 - DNA, 25 bp, Homo sapien
agacattcattatacaagacaagga

SEQ ID NO: 1814721 - DNA, 25 bp, Homo sapien
cagacattcattatacaagacaagg

SEQ ID NO: 1814722 - DNA, 25 bp, Homo sapien
gatggagaccatggtgacattgcac

SEQ ID NO: 1814723 - DNA, 25 bp, Homo sapien
gagccttgagccgtcacttagcaga

SEQ ID NO: 1814724 - DNA, 25 bp, Homo sapien
tctcatccgctgtgtggaagggcgt

SEQ ID NO: 1814725 - DNA, 25 bp, Homo sapien
tccaagcattagtgagggtatgcag

SEQ ID NO: 1814726 - DNA, 25 bp, Homo sapien
ctctcctttacacaggcagtgctgg

SEQ ID NO: 1814727 - DNA, 25 bp, Homo sapien
tgctttgtcataccgcctgctggaa

SEQ ID NO: 1814728 - DNA, 25 bp, Homo sapien
tcaattacctcaaagaaacgtaggc

SEQ ID NO: 1814729 - DNA, 25 bp, Homo sapien
tctggtggtgggtgcgcattccttt

SEQ ID NO: 1814730 - DNA, 25 bp, Homo sapien
gcaggagcttcatagttcctcagag

SEQ ID NO: 1814731 - DNA, 25 bp, Homo sapien
gccaagatgttttccgtactgatga

SEQ ID NO: 1814732 - DNA, 25 bp, Homo sapien
cccgcagactggtgagccttaaata

SEQ ID NO: 1814733 - DNA, 25 bp, Homo sapien
ctcactttcttaggatgccatggca

SEQ ID NO: 1814734 - DNA, 25 bp, Homo sapien
aatgattgtctctatgtccaggcag

SEQ ID NO: 1814735 - DNA, 25 bp, Homo sapien
atgtcagcatccacgaacgtcaggg

SEQ ID NO: 1814736 - DNA, 25 bp, Homo sapien
agcaaatgcttgtaaaaacgatgtc

SEQ ID NO: 1814737 - DNA, 25 bp, Homo sapien
tgtcaatgattgtctctatgtccag

SEQ ID NO: 1814738 - DNA, 25 bp, Homo sapien
gtggaagtcatgcagttcaacagat

SEQ ID NO: 1814739 - DNA, 25 bp, Homo sapien
cgccacctcgtctaggccacagcct

SEQ ID NO: 1814740 - DNA, 25 bp, Homo sapien
gcagggacctccttaggagcctttc

SEQ ID NO: 1814741 - DNA, 25 bp, Homo sapien
gagcctttccgggttcactcttgag

SEQ ID NO: 1814742 - DNA, 25 bp, Homo sapien
tggactgaggcagggacctccttag

SEQ ID NO: 1814743 - DNA, 25 bp, Homo sapien
ttgctttgtgctggccggaaagtcc

SEQ ID NO: 1814744 - DNA, 25 bp, Homo sapien
ctttgctttgtgctggccggaaagt

SEQ ID NO: 1814745 - DNA, 25 bp, Homo sapien
tgctggccggaaagtccagctcctc

SEQ ID NO: 1814746 - DNA, 25 bp, Homo sapien
ttgtgctggccggaaagtccagctc

SEQ ID NO: 1814747 - DNA, 25 bp, Homo sapien
agccttcccgaagaaaaacatgcag

SEQ ID NO: 1814748 - DNA, 25 bp, Homo sapien
gagatgcgtcatcctttgaacgtga

SEQ ID NO: 1814749 - DNA, 25 bp, Homo sapien
agaagggctaggttgatctgtctcc

SEQ ID NO: 1814750 - DNA, 25 bp, Homo sapien
tgtggttttcggagttcgtcctgga

SEQ ID NO: 1814751 - DNA, 25 bp, Homo sapien
gttctctgtctgcacaggcagctac

SEQ ID NO: 1814752 - DNA, 25 bp, Homo sapien
tgttctctgtctgcacaggcagcta

SEQ ID NO: 1814753 - DNA, 25 bp, Homo sapien
ctgttctctgtctgcacaggcagct

SEQ ID NO: 1814754 - DNA, 25 bp, Homo sapien
gcagagctccatgaaatccgtggct

SEQ ID NO: 1814755 - DNA, 25 bp, Homo sapien
gctccatgaaatccgtggctttggg

SEQ ID NO: 1814756 - DNA, 25 bp, Homo sapien
aacattcagacagggagtttgaagt

SEQ ID NO: 1814757 - DNA, 25 bp, Homo sapien
tttgcagcagagctccatgaaatcc

SEQ ID NO: 1814758 - DNA, 25 bp, Homo sapien
tgacccgaaggatcacacccttggt

SEQ ID NO: 1814759 - DNA, 25 bp, Homo sapien
catgacccgaaggatcacacccttg

SEQ ID NO: 1814760 - DNA, 25 bp, Homo sapien
tctgatggcatgacccgaaggatca

SEQ ID NO: 1814761 - DNA, 25 bp, Homo sapien
gtggcttgtctgatggcatgacccg

SEQ ID NO: 1814762 - DNA, 25 bp, Homo sapien
tctcatccaagcttgctgagagcac

SEQ ID NO: 1814763 - DNA, 25 bp, Homo sapien
ccaagcttgctgagagcacccattt

SEQ ID NO: 1814764 - DNA, 25 bp, Homo sapien
catccaagcttgctgagagcaccca

SEQ ID NO: 1814765 - DNA, 25 bp, Homo sapien
tccaagcttgctgagagcacccatt

SEQ ID NO: 1814766 - DNA, 25 bp, Homo sapien
ccctcttgtttctttcgttcagtct

SEQ ID NO: 1814767 - DNA, 25 bp, Homo sapien
tgtttctttcgttcagtctgcatga

SEQ ID NO: 1814768 - DNA, 25 bp, Homo sapien
tcgttcagtctgcatgaagtcattg

SEQ ID NO: 1814769 - DNA, 25 bp, Homo sapien
tctcagtgcatgagccccctcttgt

SEQ ID NO: 1814770 - DNA, 25 bp, Homo sapien
gcaatttgacttgggtctatttaag

SEQ ID NO: 1814771 - DNA, 25 bp, Homo sapien
tcagcaatttgacttgggtctattt

SEQ ID NO: 1814772 - DNA, 25 bp, Homo sapien
cagcaatttgacttgggtctattta

SEQ ID NO: 1814773 - DNA, 25 bp, Homo sapien
caatttgacttgggtctatttaagg

SEQ ID NO: 1814774 - DNA, 25 bp, Homo sapien
gatgataaaggggtcgatggctcct

SEQ ID NO: 1814775 - DNA, 25 bp, Homo sapien
gataaaggggtcgatggctccttat

SEQ ID NO: 1814776 - DNA, 25 bp, Homo sapien
tcataaacctccattgtgttggatg

SEQ ID NO: 1814777 - DNA, 25 bp, Homo sapien
tttctcataaacctccattgtgttg

SEQ ID NO: 1814778 - DNA, 25 bp, Homo sapien
gactaaaagcacgaaagccatcttc

SEQ ID NO: 1814779 - DNA, 25 bp, Homo sapien
catcttcaaagcacggatacggagt

SEQ ID NO: 1814780 - DNA, 25 bp, Homo sapien
gatacggagtcctgcggaatctccc

SEQ ID NO: 1814781 - DNA, 25 bp, Homo sapien
cctcaccatggttgtgggctggctc

SEQ ID NO: 1814782 - DNA, 25 bp, Homo sapien
cagcacgactctggcaaggtgatag

SEQ ID NO: 1814783 - DNA, 25 bp, Homo sapien
cgactctggcaaggtgatagcgttg

SEQ ID NO: 1814784 - DNA, 25 bp, Homo sapien
caaggtgatagcgttgggcaagccc

SEQ ID NO: 1814785 - DNA, 25 bp, Homo sapien
ctccataagatagaaacaccacagt

SEQ ID NO: 1814786 - DNA, 25 bp, Homo sapien
ggacgacttgagcttgacttctcca

SEQ ID NO: 1814787 - DNA, 25 bp, Homo sapien
caaggtgagctttagtgtcgttaca

SEQ ID NO: 1814788 - DNA, 25 bp, Homo sapien
gactggcccgtgtgaagtgaactca

SEQ ID NO: 1814789 - DNA, 25 bp, Homo sapien
gaattaagtggttgtgactggcccg

SEQ ID NO: 1814790 - DNA, 25 bp, Homo sapien
cttgagagtcttagcttttcctgga

SEQ ID NO: 1814791 - DNA, 25 bp, Homo sapien
ctggaggtgaagggccttgaggaat

SEQ ID NO: 1814792 - DNA, 25 bp, Homo sapien
ctcttgagagtcttagcttttcctg

SEQ ID NO: 1814793 - DNA, 25 bp, Homo sapien
tgagagtcttagcttttcctggagg

SEQ ID NO: 1814794 - DNA, 25 bp, Homo sapien
tctgcagggaaaagatacactattc

SEQ ID NO: 1814795 - DNA, 25 bp, Homo sapien
tagataacgtcaaggtatagagcca

SEQ ID NO: 1814796 - DNA, 25 bp, Homo sapien
tatagagccatatactccgaaaatg

SEQ ID NO: 1814797 - DNA, 25 bp, Homo sapien
gaaatagccaaagcaggaattcgtg

SEQ ID NO: 1814798 - DNA, 25 bp, Homo sapien
tgcctggatatcaacacgcttcccc

SEQ ID NO: 1814799 - DNA, 25 bp, Homo sapien
gcagatagatgtgcgcacaccggga

SEQ ID NO: 1814800 - DNA, 25 bp, Homo sapien
tgaggattgctccatcgctgggcga

SEQ ID NO: 1814801 - DNA, 25 bp, Homo sapien
tccactttgccgacttggagccagg

SEQ ID NO: 1814802 - DNA, 25 bp, Homo sapien
gctgggcgagccgaaagccattatc

SEQ ID NO: 1814803 - DNA, 25 bp, Homo sapien
tcagtccacatgatacacaactcca

SEQ ID NO: 1814804 - DNA, 25 bp, Homo sapien
tccacatgatacacaactccaggtt

SEQ ID NO: 1814805 - DNA, 25 bp, Homo sapien
atcgcatgacatcttcaaccccttg

SEQ ID NO: 1814806 - DNA, 25 bp, Homo sapien
ggttgacatcgcatgacatcttcaa

SEQ ID NO: 1814807 - DNA, 25 bp, Homo sapien
gaacgtccaatcctctgaagcctgt

SEQ ID NO: 1814808 - DNA, 25 bp, Homo sapien
tgagcctgaacgtccaatcctctga

SEQ ID NO: 1814809 - DNA, 25 bp, Homo sapien
agcctgaacgtccaatcctctgaag

SEQ ID NO: 1814810 - DNA, 25 bp, Homo sapien
ttgctgagcctgaacgtccaatcct

SEQ ID NO: 1814811 - DNA, 25 bp, Homo sapien
agacagtgtgctcccagtgctgtct

SEQ ID NO: 1814812 - DNA, 25 bp, Homo sapien
ggagacagtgtgctcccagtgctgt

SEQ ID NO: 1814813 - DNA, 25 bp, Homo sapien
cagtgtgctcccagtgctgtctgca

SEQ ID NO: 1814814 - DNA, 25 bp, Homo sapien
acagtgtgctcccagtgctgtctgc

SEQ ID NO: 1814815 - DNA, 25 bp, Homo sapien
caatgtaggtatcaacagcaacaca

SEQ ID NO: 1814816 - DNA, 25 bp, Homo sapien
catgaacataaacacaaccacggac

SEQ ID NO: 1814817 - DNA, 25 bp, Homo sapien
cagcaacacagaagtagacatagac

SEQ ID NO: 1814818 - DNA, 25 bp, Homo sapien
taggcataaccatagccatgaacat

SEQ ID NO: 1814819 - DNA, 25 bp, Homo sapien
tagaggcagacataaatatagacgt

SEQ ID NO: 1814820 - DNA, 25 bp, Homo sapien
tatagacgtaatcatagacacagca

SEQ ID NO: 1814821 - DNA, 25 bp, Homo sapien
gatatcgacgtagacaaaaccatag

SEQ ID NO: 1814822 - DNA, 25 bp, Homo sapien
taaaggtagccatagccatagaggc

SEQ ID NO: 1814823 - DNA, 25 bp, Homo sapien
ctcagccacatagtacagtgtgtgc

SEQ ID NO: 1814824 - DNA, 25 bp, Homo sapien
cttctcagccacatagtacagtgtg

SEQ ID NO: 1814825 - DNA, 25 bp, Homo sapien
cagccacatagtacagtgtgtgcac

SEQ ID NO: 1814826 - DNA, 25 bp, Homo sapien
agccacatagtacagtgtgtgcacc

SEQ ID NO: 1814827 - DNA, 25 bp, Homo sapien
gcaacccgtgttgaaaatctgctcc

SEQ ID NO: 1814828 - DNA, 25 bp, Homo sapien
cctgctaatgcccttttctggcaag

SEQ ID NO: 1814829 - DNA, 25 bp, Homo sapien
cgtcagccctcctgtgttacacgga

SEQ ID NO: 1814830 - DNA, 25 bp, Homo sapien
tctggcaagcgccagcctatctggg

SEQ ID NO: 1814831 - DNA, 25 bp, Homo sapien
gctgttgctatcttgcttccaccca

SEQ ID NO: 1814832 - DNA, 25 bp, Homo sapien
aatgctgtccctcagcgctcccctt

SEQ ID NO: 1814833 - DNA, 25 bp, Homo sapien
agtaaggaactactcgcagcgaccc

SEQ ID NO: 1814834 - DNA, 25 bp, Homo sapien
acatcccacccagtaaggaactact

SEQ ID NO: 1814835 - DNA, 25 bp, Homo sapien
taaaatgtaggttgccacccatctc

SEQ ID NO: 1814836 - DNA, 25 bp, Homo sapien
gatttctttctgcagtgcagaccta

SEQ ID NO: 1814837 - DNA, 25 bp, Homo sapien
gctcaagggtggagttagcaattta

SEQ ID NO: 1814838 - DNA, 25 bp, Homo sapien
gacctacttgttgtaggctcaaggg

SEQ ID NO: 1814839 - DNA, 25 bp, Homo sapien
ggtccacttatatgcgcattctctt

SEQ ID NO: 1814840 - DNA, 25 bp, Homo sapien
tcaacagtagctgttagagtcaagt

SEQ ID NO: 1814841 - DNA, 25 bp, Homo sapien
tacagcatacataacgtgttagtcg

SEQ ID NO: 1814842 - DNA, 25 bp, Homo sapien
cgatggtttacgctctcagtaaggc

SEQ ID NO: 1814843 - DNA, 25 bp, Homo sapien
tcttccgtcagggttcagtaagtgg

SEQ ID NO: 1814844 - DNA, 25 bp, Homo sapien
tcccagccgagtcttaagcggaggt

SEQ ID NO: 1814845 - DNA, 25 bp, Homo sapien
gccactgggtctgagcgagtcgaat

SEQ ID NO: 1814846 - DNA, 25 bp, Homo sapien
gaaaaatcgacactagccactgggt

SEQ ID NO: 1814847 - DNA, 25 bp, Homo sapien
tcccaagtggtgctgtgataacctg

SEQ ID NO: 1814848 - DNA, 25 bp, Homo sapien
ccattgcaggtaggcgaatctttct

SEQ ID NO: 1814849 - DNA, 25 bp, Homo sapien
taacaggtcatgaggctggaaccct

SEQ ID NO: 1814850 - DNA, 25 bp, Homo sapien
gacaaagtctgtccgcaggagacac

SEQ ID NO: 1814851 - DNA, 25 bp, Homo sapien
ccgagaccatgggacttttagtgct

SEQ ID NO: 1814852 - DNA, 25 bp, Homo sapien
gagactgagggaattccgagaccat

SEQ ID NO: 1814853 - DNA, 25 bp, Homo sapien
gacaaatggccaccctactgtaggg

SEQ ID NO: 1814854 - DNA, 25 bp, Homo sapien
aacagggcattcctagctctgaggc

SEQ ID NO: 1814855 - DNA, 25 bp, Homo sapien
cttgatgatacaaggtatggccccc

SEQ ID NO: 1814856 - DNA, 25 bp, Homo sapien
ttgatgatacaaggtatggccccca

SEQ ID NO: 1814857 - DNA, 25 bp, Homo sapien
tgatgatacaaggtatggcccccat

SEQ ID NO: 1814858 - DNA, 25 bp, Homo sapien
ctcgcagcctgaaccagcaactggg

SEQ ID NO: 1814859 - DNA, 25 bp, Homo sapien
gcagtcacgggcgatgagcagaaca

SEQ ID NO: 1814860 - DNA, 25 bp, Homo sapien
gagcagaacagaacgaaacacgagc

SEQ ID NO: 1814861 - DNA, 25 bp, Homo sapien
aaggcgcagcaggaaggacggagcg

SEQ ID NO: 1814862 - DNA, 25 bp, Homo sapien
cacaggaggacaggcctggaagcct

SEQ ID NO: 1814863 - DNA, 25 bp, Homo sapien
ctgcacacagcacagagcacaggag

SEQ ID NO: 1814864 - DNA, 25 bp, Homo sapien
acacagcacagagcacaggaggaca

SEQ ID NO: 1814865 - DNA, 25 bp, Homo sapien
gacaggcctggaagccttgagaaag

SEQ ID NO: 1814866 - DNA, 25 bp, Homo sapien
caggttggcgccaggcagcttgcag

SEQ ID NO: 1814867 - DNA, 25 bp, Homo sapien
tcggaccccgggcatcgcgaagtgt

SEQ ID NO: 1814868 - DNA, 25 bp, Homo sapien
tgcagaatgtgtgctcggaccccgg

SEQ ID NO: 1814869 - DNA, 25 bp, Homo sapien
atcgcgaagtgtgcgggccgtgggc

SEQ ID NO: 1814870 - DNA, 25 bp, Homo sapien
acacccccatgtcgtgcgctcagga

SEQ ID NO: 1814871 - DNA, 25 bp, Homo sapien
caacagtaagcacccggccgagaca

SEQ ID NO: 1814872 - DNA, 25 bp, Homo sapien
cggcaacagtaagcacccggccgag

SEQ ID NO: 1814873 - DNA, 25 bp, Homo sapien
ccatgtcgtgcgctcaggaccaggg

SEQ ID NO: 1814874 - DNA, 25 bp, Homo sapien
cagaaaggcccagtgttaccatagc

SEQ ID NO: 1814875 - DNA, 25 bp, Homo sapien
tgcagggccattgacgagaattccc

SEQ ID NO: 1814876 - DNA, 25 bp, Homo sapien
ttatgctgctcgctcactgagacag

SEQ ID NO: 1814877 - DNA, 25 bp, Homo sapien
gatgggaggcgtttcctttatgctg

SEQ ID NO: 1814878 - DNA, 25 bp, Homo sapien
gaccactcgattgccaggccgtcgg

SEQ ID NO: 1814879 - DNA, 25 bp, Homo sapien
tgaacacgaacaccactttccagta

SEQ ID NO: 1814880 - DNA, 25 bp, Homo sapien
ctgagtgtcctatctcctcgaagga

SEQ ID NO: 1814881 - DNA, 25 bp, Homo sapien
agacagggggaccactcgattgcca

SEQ ID NO: 1814882 - DNA, 25 bp, Homo sapien
gcctggcacccagggaacatgggtc

SEQ ID NO: 1814883 - DNA, 25 bp, Homo sapien
tgcctggcacccagggaacatgggt

SEQ ID NO: 1814884 - DNA, 25 bp, Homo sapien
cagcagagctgagaaggcatctgag

SEQ ID NO: 1814885 - DNA, 25 bp, Homo sapien
atgccagcagagctgagaaggcatc

SEQ ID NO: 1814886 - DNA, 25 bp, Homo sapien
ctcttggggaatgtttgcggctggt

SEQ ID NO: 1814887 - DNA, 25 bp, Homo sapien
tcctcttggggaatgtttgcggctg

SEQ ID NO: 1814888 - DNA, 25 bp, Homo sapien
tctcctcttggggaatgtttgcggc

SEQ ID NO: 1814889 - DNA, 25 bp, Homo sapien
gcagctctcctcttggggaatgttt

SEQ ID NO: 1814890 - DNA, 25 bp, Homo sapien
tcccacatatctgcactgcagttct

SEQ ID NO: 1814891 - DNA, 25 bp, Homo sapien
catatctgcactgcagttctgagct

SEQ ID NO: 1814892 - DNA, 25 bp, Homo sapien
cacatatctgcactgcagttctgag

SEQ ID NO: 1814893 - DNA, 25 bp, Homo sapien
atctgcactgcagttctgagcttct

SEQ ID NO: 1814894 - DNA, 25 bp, Homo sapien
gctgctgcgatgtgtttgtcaaaga

SEQ ID NO: 1814895 - DNA, 25 bp, Homo sapien
ctaagaacagaaccagccgggctat

SEQ ID NO: 1814896 - DNA, 25 bp, Homo sapien
aagagtttacttagagagctgcaga

SEQ ID NO: 1814897 - DNA, 25 bp, Homo sapien
gcagcgtctcagacatgtttccact

SEQ ID NO: 1814898 - DNA, 25 bp, Homo sapien
tgtgcacctcgaacctgcattgttc

SEQ ID NO: 1814899 - DNA, 25 bp, Homo sapien
cctgtgtgggactggcatcctctga

SEQ ID NO: 1814900 - DNA, 25 bp, Homo sapien
tgatggcatcttaaaggactcaatg

SEQ ID NO: 1814901 - DNA, 25 bp, Homo sapien
gcagcccatctgaaggtagcattag

SEQ ID NO: 1814902 - DNA, 25 bp, Homo sapien
ttaaagtccagcctcgagcctgcgg

SEQ ID NO: 1814903 - DNA, 25 bp, Homo sapien
gcactataattgcagtgctctgcct

SEQ ID NO: 1814904 - DNA, 25 bp, Homo sapien
ggaagccaaggccatagcactataa

SEQ ID NO: 1814905 - DNA, 25 bp, Homo sapien
gagcctgcggctcgattttccagta

SEQ ID NO: 1814906 - DNA, 25 bp, Homo sapien
tcttgaacggagcaaaagatggctc

SEQ ID NO: 1814907 - DNA, 25 bp, Homo sapien
tatgagcaccctaaagatggcactt

SEQ ID NO: 1814908 - DNA, 25 bp, Homo sapien
gattccagcacctctaatgttgtaa

SEQ ID NO: 1814909 - DNA, 25 bp, Homo sapien
ttgagaatgcccctaccatcttgaa

SEQ ID NO: 1814910 - DNA, 25 bp, Homo sapien
taagcgtctttcgagagaaggagca

SEQ ID NO: 1814911 - DNA, 25 bp, Homo sapien
cggtaagcgtctttcgagagaagga

SEQ ID NO: 1814912 - DNA, 25 bp, Homo sapien
cagccggtaagcgtctttcgagaga

SEQ ID NO: 1814913 - DNA, 25 bp, Homo sapien
cagcagccggtaagcgtctttcgag

SEQ ID NO: 1814914 - DNA, 25 bp, Homo sapien
gtgaccccggtgtctcaggctgaaa

SEQ ID NO: 1814915 - DNA, 25 bp, Homo sapien
tgcaggcgagttccaagcacagaga

SEQ ID NO: 1814916 - DNA, 25 bp, Homo sapien
taataaggagttcaaccagggccca

SEQ ID NO: 1814917 - DNA, 25 bp, Homo sapien
tactcagggaggacgcataaatgcc

SEQ ID NO: 1814918 - DNA, 25 bp, Homo sapien
gtgctgaaccttgctgactctgcca

SEQ ID NO: 1814919 - DNA, 25 bp, Homo sapien
tctgctcccagtatgtcccatgggc

SEQ ID NO: 1814920 - DNA, 25 bp, Homo sapien
tgactctgccacactcgcctgctaa

SEQ ID NO: 1814921 - DNA, 25 bp, Homo sapien
tctccacttgatgcaaggttcagtg

SEQ ID NO: 1814922 - DNA, 25 bp, Homo sapien
tgtgaactgacacggcgctttggtc

SEQ ID NO: 1814923 - DNA, 25 bp, Homo sapien
ctggagatgaccgtgttccatgtgt

SEQ ID NO: 1814924 - DNA, 25 bp, Homo sapien
tgaccgtgttccatgtgtgaactga

SEQ ID NO: 1814925 - DNA, 25 bp, Homo sapien
catgtgtgaactgacacggcgcttt

SEQ ID NO: 1814926 - DNA, 25 bp, Homo sapien
tgaacaccctggagatcaggcgtct

SEQ ID NO: 1814927 - DNA, 25 bp, Homo sapien
tggctggtgaacaccctggagatca

SEQ ID NO: 1814928 - DNA, 25 bp, Homo sapien
ccctggagatcaggcgtctggatct

SEQ ID NO: 1814929 - DNA, 25 bp, Homo sapien
caggcgtctggatctggctgagcaa

SEQ ID NO: 1814930 - DNA, 25 bp, Homo sapien
tgtgtgttaccatgaacagtatctc

SEQ ID NO: 1814931 - DNA, 25 bp, Homo sapien
gctgttactaaatcaatggtgtgtg

SEQ ID NO: 1814932 - DNA, 25 bp, Homo sapien
tacgcattatgcaagcaatgtgtct

SEQ ID NO: 1814933 - DNA, 25 bp, Homo sapien
taaatgccagcagtgtattcgctaa

SEQ ID NO: 1814934 - DNA, 25 bp, Homo sapien
tgatcttccaataaacagctctttg

SEQ ID NO: 1814935 - DNA, 25 bp, Homo sapien
aagtgactgtgaactgggtggtcca

SEQ ID NO: 1814936 - DNA, 25 bp, Homo sapien
atgatcttccaataaacagctcttt

SEQ ID NO: 1814937 - DNA, 25 bp, Homo sapien
gggtggtccaaccagagggctcctg

SEQ ID NO: 1814938 - DNA, 25 bp, Homo sapien
tgaaagccccgcagatgtgtgcaaa

SEQ ID NO: 1814939 - DNA, 25 bp, Homo sapien
tgctgcaggcaaagtctcttctttt

SEQ ID NO: 1814940 - DNA, 25 bp, Homo sapien
ccgattgagtacatcagaggaggag

SEQ ID NO: 1814941 - DNA, 25 bp, Homo sapien
gacttcaggggacagcggatccatg

SEQ ID NO: 1814942 - DNA, 25 bp, Homo sapien
gatcagaaaacagaacggcggtcct

SEQ ID NO: 1814943 - DNA, 25 bp, Homo sapien
cagcttttgttggtgaagttgcact

SEQ ID NO: 1814944 - DNA, 25 bp, Homo sapien
aaaggaaaggcggtgcagcttttgt

SEQ ID NO: 1814945 - DNA, 25 bp, Homo sapien
tcacggatgggaccacccgtttctc

SEQ ID NO: 1814946 - DNA, 25 bp, Homo sapien
gtgctggacgccaacctccataggg

SEQ ID NO: 1814947 - DNA, 25 bp, Homo sapien
tttgccttaatgagccgaagaggcc

SEQ ID NO: 1814948 - DNA, 25 bp, Homo sapien
gatgcagcacaacttccgcgtggca

SEQ ID NO: 1814949 - DNA, 25 bp, Homo sapien
gggccatctccgtcctcattcgaag

SEQ ID NO: 1814950 - DNA, 25 bp, Homo sapien
agcccgcaccaaaaagacatcttga

SEQ ID NO: 1814951 - DNA, 25 bp, Homo sapien
tcttgattagagatgttagcgttgg

SEQ ID NO: 1814952 - DNA, 25 bp, Homo sapien
aagaagccagtaaaggtgagatcgt

SEQ ID NO: 1814953 - DNA, 25 bp, Homo sapien
agatcgttgtaagcccgcaccaaaa

SEQ ID NO: 1814954 - DNA, 25 bp, Homo sapien
gccacatctgtgcttgctgtagact

SEQ ID NO: 1814955 - DNA, 25 bp, Homo sapien
tgccacatctgtgcttgctgtagac

SEQ ID NO: 1814956 - DNA, 25 bp, Homo sapien
gcagagaatcccaagaccgagccat

SEQ ID NO: 1814957 - DNA, 25 bp, Homo sapien
gagacagcagagaatcccaagaccg

SEQ ID NO: 1814958 - DNA, 25 bp, Homo sapien
gcagagacagcagagaatcccaaga

SEQ ID NO: 1814959 - DNA, 25 bp, Homo sapien
acagcagagaatcccaagaccgagc

SEQ ID NO: 1814960 - DNA, 25 bp, Homo sapien
ggatcatgccaccagcagtgacagc

SEQ ID NO: 1814961 - DNA, 25 bp, Homo sapien
tggatcatgccaccagcagtgacag

SEQ ID NO: 1814962 - DNA, 25 bp, Homo sapien
tcatgcagggacaacagtgccagcc

SEQ ID NO: 1814963 - DNA, 25 bp, Homo sapien
tgagaatctgggtctcatcagtgac

SEQ ID NO: 1814964 - DNA, 25 bp, Homo sapien
ctacgaagaatggaagacggccttg

SEQ ID NO: 1814965 - DNA, 25 bp, Homo sapien
ccttcctgcctgaaaatccactgtt

SEQ ID NO: 1814966 - DNA, 25 bp, Homo sapien
ggcacattgccaaggcctctcacgt

SEQ ID NO: 1814967 - DNA, 25 bp, Homo sapien
gaagacggccttgagtgctttccag

SEQ ID NO: 1814968 - DNA, 25 bp, Homo sapien
gaagactgctatatcactcccaaag

SEQ ID NO: 1814969 - DNA, 25 bp, Homo sapien
cagatggctccagttacatgtcaca

SEQ ID NO: 1814970 - DNA, 25 bp, Homo sapien
ccaatgtgaaactaccggtcgagaa

SEQ ID NO: 1814971 - DNA, 25 bp, Homo sapien
taccaccgcactgagaaacctgagt

SEQ ID NO: 1814972 - DNA, 25 bp, Homo sapien
catattgggttgtgatcatcttcaa

SEQ ID NO: 1814973 - DNA, 25 bp, Homo sapien
aagctagcatcccaaaagacagaca

SEQ ID NO: 1814974 - DNA, 25 bp, Homo sapien
ttgggttgtgatcatcttcaaagct

SEQ ID NO: 1814975 - DNA, 25 bp, Homo sapien
tcttcaaagctagcatcccaaaaga

SEQ ID NO: 1814976 - DNA, 25 bp, Homo sapien
tctttaaaaacaggcctgtcccagc

SEQ ID NO: 1814977 - DNA, 25 bp, Homo sapien
tgatgaccatgtgcataaacaagcc

SEQ ID NO: 1814978 - DNA, 25 bp, Homo sapien
gacagattgtgctgtactgatgacc

SEQ ID NO: 1814979 - DNA, 25 bp, Homo sapien
aattctaacccagggcgcatccaca

SEQ ID NO: 1814980 - DNA, 25 bp, Homo sapien
catgcctttgtggaatatgagtgtg

SEQ ID NO: 1814981 - DNA, 25 bp, Homo sapien
aagcgcgaggtgaaaggtgagggtg

SEQ ID NO: 1814982 - DNA, 25 bp, Homo sapien
tattttagtttacatgcctttgtgg

SEQ ID NO: 1814983 - DNA, 25 bp, Homo sapien
aagagatgcaagaagcatgggcctc

SEQ ID NO: 1814984 - DNA, 25 bp, Homo sapien
tcattttgggaggattgttactact

SEQ ID NO: 1814985 - DNA, 25 bp, Homo sapien
tccacctgagagttagccttatggg

SEQ ID NO: 1814986 - DNA, 25 bp, Homo sapien
gccttatgggttgcataaatttcgt

SEQ ID NO: 1814987 - DNA, 25 bp, Homo sapien
agaaccaggtatttacctcctcgag

SEQ ID NO: 1814988 - DNA, 25 bp, Homo sapien
cctagtgctccgctggaggacaggc

SEQ ID NO: 1814989 - DNA, 25 bp, Homo sapien
gagagcagagcgttctggttcccta

SEQ ID NO: 1814990 - DNA, 25 bp, Homo sapien
acagacagccggtagtaagcccctt

SEQ ID NO: 1814991 - DNA, 25 bp, Homo sapien
cacactcccccctgtgagtgggagt

SEQ ID NO: 1814992 - DNA, 25 bp, Homo sapien
tgtccagcaattgtacgacactggg

SEQ ID NO: 1814993 - DNA, 25 bp, Homo sapien
gacgcccaacacagtggagctctga

SEQ ID NO: 1814994 - DNA, 25 bp, Homo sapien
tacagtgactaccagcaattgctct

SEQ ID NO: 1814995 - DNA, 25 bp, Homo sapien
ggagctctgaatgccactgacataa

SEQ ID NO: 1814996 - DNA, 25 bp, Homo sapien
ggcgtgatccctttaaacatgggtc

SEQ ID NO: 1814997 - DNA, 25 bp, Homo sapien
aacatgggtcgccagaactcaaagc

SEQ ID NO: 1814998 - DNA, 25 bp, Homo sapien
tctccacggttaaccattgatgggc

SEQ ID NO: 1814999 - DNA, 25 bp, Homo sapien
cacaatcaagggtttatctaggaga

SEQ ID NO: 1815000 - DNA, 25 bp, Homo sapien
tcttcatgctcagatgacttcttca

SEQ ID NO: 1815001 - DNA, 25 bp, Homo sapien
aataccacaaaaggctgcttgtggc

SEQ ID NO: 1815002 - DNA, 25 bp, Homo sapien
ttttgactcaaaagattcttcatgc

SEQ ID NO: 1815003 - DNA, 25 bp, Homo sapien
gcttggatacattaggacagataca

SEQ ID NO: 1815004 - DNA, 25 bp, Homo sapien
atgtatggctgttatgaaccacact

SEQ ID NO: 1815005 - DNA, 25 bp, Homo sapien
taggctgcattcacagcgtccacct

SEQ ID NO: 1815006 - DNA, 25 bp, Homo sapien
tgaaccacactgtgtaactgctcaa

SEQ ID NO: 1815007 - DNA, 25 bp, Homo sapien
gtccacctaccctgagagagtccat

SEQ ID NO: 1815008 - DNA, 25 bp, Homo sapien
tggagtcaaaacctagaaagtgaac

SEQ ID NO: 1815009 - DNA, 25 bp, Homo sapien
gtcaaaacctagaaagtgaacagca

SEQ ID NO: 1815010 - DNA, 25 bp, Homo sapien
ccagcactgggtcaggcactatgga

SEQ ID NO: 1815011 - DNA, 25 bp, Homo sapien
cactgggtcaggcactatggagtca

SEQ ID NO: 1815012 - DNA, 25 bp, Homo sapien
tgctatagctactaagagccatctg

SEQ ID NO: 1815013 - DNA, 25 bp, Homo sapien
caaagtacacaaagtaaactgcagc

SEQ ID NO: 1815014 - DNA, 25 bp, Homo sapien
gacacgtaagagtggatctcaacca

SEQ ID NO: 1815015 - DNA, 25 bp, Homo sapien
cagtcaagtagtcacccaaaatgtt

SEQ ID NO: 1815016 - DNA, 25 bp, Homo sapien
tctctgcatagtcctgaggcccagc

SEQ ID NO: 1815017 - DNA, 25 bp, Homo sapien
tctttgagtccagccaagtcgatct

SEQ ID NO: 1815018 - DNA, 25 bp, Homo sapien
gaatacctggagctcttacttttgg

SEQ ID NO: 1815019 - DNA, 25 bp, Homo sapien
ggcctttaggtctgtgtccccatcg

SEQ ID NO: 1815020 - DNA, 25 bp, Homo sapien
cgtgcctccaaagcgcggactgcat

SEQ ID NO: 1815021 - DNA, 25 bp, Homo sapien
ggtgctgacaagtgactttctctgc

SEQ ID NO: 1815022 - DNA, 25 bp, Homo sapien
gcggactgcatcacattggaaagac

SEQ ID NO: 1815023 - DNA, 25 bp, Homo sapien
ttctctgcatcaaacgtgaatactg

SEQ ID NO: 1815024 - DNA, 25 bp, Homo sapien
ttctgaaactatgcttgggtctccc

SEQ ID NO: 1815025 - DNA, 25 bp, Homo sapien
cttctgaaactatgcttgggtctcc

SEQ ID NO: 1815026 - DNA, 25 bp, Homo sapien
tctgaaactatgcttgggtctccct

SEQ ID NO: 1815027 - DNA, 25 bp, Homo sapien
ggcagctgtcgagtgcatttgggaa

SEQ ID NO: 1815028 - DNA, 25 bp, Homo sapien
gcccactctgctctgatcaattgtt

SEQ ID NO: 1815029 - DNA, 25 bp, Homo sapien
cccactctgctctgatcaattgtta

SEQ ID NO: 1815030 - DNA, 25 bp, Homo sapien
ctgatggcagctgtcgagtgcattt

SEQ ID NO: 1815031 - DNA, 25 bp, Homo sapien
tcagtgctccacgacatgagcagca

SEQ ID NO: 1815032 - DNA, 25 bp, Homo sapien
tcaagaaggctacacataccgtcca

SEQ ID NO: 1815033 - DNA, 25 bp, Homo sapien
gggatcttgaaggaacactgtccac

SEQ ID NO: 1815034 - DNA, 25 bp, Homo sapien
gagacagtaataaacgagctttcgg

SEQ ID NO: 1815035 - DNA, 25 bp, Homo sapien
cgaacacggccaaccctttgaactg

SEQ ID NO: 1815036 - DNA, 25 bp, Homo sapien
ggatccagctgaatcgaacacggcc

SEQ ID NO: 1815037 - DNA, 25 bp, Homo sapien
gcaaataatatttgacgcttggaat

SEQ ID NO: 1815038 - DNA, 25 bp, Homo sapien
cttggaatgcagatagcactgtaca

SEQ ID NO: 1815039 - DNA, 25 bp, Homo sapien
tattgaccgatgcttcactgtgcca

SEQ ID NO: 1815040 - DNA, 25 bp, Homo sapien
tagtttctttgcgaagcctgctcct

SEQ ID NO: 1815041 - DNA, 25 bp, Homo sapien
gggaacctttccacactataaatga

SEQ ID NO: 1815042 - DNA, 25 bp, Homo sapien
tgttgcaggcaacgggctacagctt

SEQ ID NO: 1815043 - DNA, 25 bp, Homo sapien
caaatggccctaataagtatcttcc

SEQ ID NO: 1815044 - DNA, 25 bp, Homo sapien
caaggacctctttcaaattggcaag

SEQ ID NO: 1815045 - DNA, 25 bp, Homo sapien
tatcttccaagaggatcgtgatcaa

SEQ ID NO: 1815046 - DNA, 25 bp, Homo sapien
gcactgtatctgttcgacgttatta

SEQ ID NO: 1815047 - DNA, 25 bp, Homo sapien
agccagcatggtcggcccgctcttg

SEQ ID NO: 1815048 - DNA, 25 bp, Homo sapien
ccatgaagccttctcctcctactgg

SEQ ID NO: 1815049 - DNA, 25 bp, Homo sapien
agacacaaggcgaggaagccagcat

SEQ ID NO: 1815050 - DNA, 25 bp, Homo sapien
ctactggcccttttggcaacctctg

SEQ ID NO: 1815051 - DNA, 25 bp, Homo sapien
agcaggtacataggccgaggaagca

SEQ ID NO: 1815052 - DNA, 25 bp, Homo sapien
tcagcaggtacataggccgaggaag

SEQ ID NO: 1815053 - DNA, 25 bp, Homo sapien
cagcaggtacataggccgaggaagc

SEQ ID NO: 1815054 - DNA, 25 bp, Homo sapien
gcaggtacataggccgaggaagcaa

SEQ ID NO: 1815055 - DNA, 25 bp, Homo sapien
atacagccttcaaataagaaggagg

SEQ ID NO: 1815056 - DNA, 25 bp, Homo sapien
gatcaagtttattcattccagcctg

SEQ ID NO: 1815057 - DNA, 25 bp, Homo sapien
gcctggtttgtaagagcaaagatga

SEQ ID NO: 1815058 - DNA, 25 bp, Homo sapien
aaataaatgagggaaagcgaataca

SEQ ID NO: 1815059 - DNA, 25 bp, Homo sapien
tgctgaaggccccaccggcattctc

SEQ ID NO: 1815060 - DNA, 25 bp, Homo sapien
tgcaacactgttaggatgctgctgc

SEQ ID NO: 1815061 - DNA, 25 bp, Homo sapien
taagggtcggacatggaagagaaga

SEQ ID NO: 1815062 - DNA, 25 bp, Homo sapien
taaaacagaaattgcctccctgctt

SEQ ID NO: 1815063 - DNA, 25 bp, Homo sapien
catggaagagaagacgctaaaacag

SEQ ID NO: 1815064 - DNA, 25 bp, Homo sapien
gagaagacgctaaaacagaaattgc

SEQ ID NO: 1815065 - DNA, 25 bp, Homo sapien
cggtgccacccctcgcggaaggcgt

SEQ ID NO: 1815066 - DNA, 25 bp, Homo sapien
gcagcttctagacgccgccctcggt

SEQ ID NO: 1815067 - DNA, 25 bp, Homo sapien
gcgttctcccacaccggggtcgcca

SEQ ID NO: 1815068 - DNA, 25 bp, Homo sapien
cagctgcagaaagcactccgcaccc

SEQ ID NO: 1815069 - DNA, 25 bp, Homo sapien
tttctgaagagaagcgagcgcgccc

SEQ ID NO: 1815070 - DNA, 25 bp, Homo sapien
gcagcttggctcctaccggtttcca

SEQ ID NO: 1815071 - DNA, 25 bp, Homo sapien
gccaggaagttcatctatcgcccag

SEQ ID NO: 1815072 - DNA, 25 bp, Homo sapien
cctctggtctcggttggagggcatc

SEQ ID NO: 1815073 - DNA, 25 bp, Homo sapien
tacagaacactaactggggtgcggg

SEQ ID NO: 1815074 - DNA, 25 bp, Homo sapien
gaagaagtggaagcaaatgcaaccc

SEQ ID NO: 1815075 - DNA, 25 bp, Homo sapien
gaagcaaatgcaaccctaagtccca

SEQ ID NO: 1815076 - DNA, 25 bp, Homo sapien
caaatgcaaccctaagtcccatgag

SEQ ID NO: 1815077 - DNA, 25 bp, Homo sapien
ggcggcgggctagggcgctcgcagg

SEQ ID NO: 1815078 - DNA, 25 bp, Homo sapien
gatgaccaccgagggcgggccgccg

SEQ ID NO: 1815079 - DNA, 25 bp, Homo sapien
ctggcccggagtggccacggctgca

SEQ ID NO: 1815080 - DNA, 25 bp, Homo sapien
gctcgcagggcttctgggccgaccc

SEQ ID NO: 1815081 - DNA, 25 bp, Homo sapien
aggagccggccggatgcaccgggac

SEQ ID NO: 1815082 - DNA, 25 bp, Homo sapien
cagcggtggaggcttcggaggagcc

SEQ ID NO: 1815083 - DNA, 25 bp, Homo sapien
gggcctagttgggagcgcgccgccc

SEQ ID NO: 1815084 - DNA, 25 bp, Homo sapien
ctgttgccatctccctggagcgcca

SEQ ID NO: 1815085 - DNA, 25 bp, Homo sapien
tctcctcccgagcctgctattttgt

SEQ ID NO: 1815086 - DNA, 25 bp, Homo sapien
ggtgtgagcgctcgccctctctcct

SEQ ID NO: 1815087 - DNA, 25 bp, Homo sapien
ccgacggccgccttcgtgggcaggt

SEQ ID NO: 1815088 - DNA, 25 bp, Homo sapien
tcagcacatcaaagcgccgacggcc

SEQ ID NO: 1815089 - DNA, 25 bp, Homo sapien
tgcgttagcgcagcgccgggtgtgt

SEQ ID NO: 1815090 - DNA, 25 bp, Homo sapien
caaggaagtaggcagcggcccctga

SEQ ID NO: 1815091 - DNA, 25 bp, Homo sapien
agagcgccgcgcacacatcggggct

SEQ ID NO: 1815092 - DNA, 25 bp, Homo sapien
tgtgttcgggtaggtgttgcgggca

SEQ ID NO: 1815093 - DNA, 25 bp, Homo sapien
ggcaaggtagcgttccccaatctga

SEQ ID NO: 1815094 - DNA, 25 bp, Homo sapien
gaagaaggacaaccgctggcaaggt

SEQ ID NO: 1815095 - DNA, 25 bp, Homo sapien
gttatttgcctactgctggaagaag

SEQ ID NO: 1815096 - DNA, 25 bp, Homo sapien
cagaatgcccaggatcgcgttggtc

SEQ ID NO: 1815097 - DNA, 25 bp, Homo sapien
ggaagatgtgccatgcgtaaggcat

SEQ ID NO: 1815098 - DNA, 25 bp, Homo sapien
tgggaagatgtgccatgcgtaaggc

SEQ ID NO: 1815099 - DNA, 25 bp, Homo sapien
gagagggcagactcaggtgggaaga

SEQ ID NO: 1815100 - DNA, 25 bp, Homo sapien
gggagagggcagactcaggtgggaa

SEQ ID NO: 1815101 - DNA, 25 bp, Homo sapien
tttccccagacactacatttggata

SEQ ID NO: 1815102 - DNA, 25 bp, Homo sapien
caggtgccaaagaacattattaagg

SEQ ID NO: 1815103 - DNA, 25 bp, Homo sapien
ttcaaaaaggcagtgctaagcacaa

SEQ ID NO: 1815104 - DNA, 25 bp, Homo sapien
cagtgctaagcacaagatttcaaga

SEQ ID NO: 1815105 - DNA, 25 bp, Homo sapien
gcagcccttcaccatcacgagccat

SEQ ID NO: 1815106 - DNA, 25 bp, Homo sapien
agcagcccttcaccatcacgagcca

SEQ ID NO: 1815107 - DNA, 25 bp, Homo sapien
gtcccagcagcccttcaccatcacg

SEQ ID NO: 1815108 - DNA, 25 bp, Homo sapien
cccagcagcccttcaccatcacgag

SEQ ID NO: 1815109 - DNA, 25 bp, Homo sapien
taggtacttgcacacagcagccagt

SEQ ID NO: 1815110 - DNA, 25 bp, Homo sapien
tacttgcacacagcagccagtcaga

SEQ ID NO: 1815111 - DNA, 25 bp, Homo sapien
ctaggtacttgcacacagcagccag

SEQ ID NO: 1815112 - DNA, 25 bp, Homo sapien
ggtacttgcacacagcagccagtca

SEQ ID NO: 1815113 - DNA, 25 bp, Homo sapien
ccagaccctaacagcgagctttctg

SEQ ID NO: 1815114 - DNA, 25 bp, Homo sapien
gaccctaacagcgagctttctggat

SEQ ID NO: 1815115 - DNA, 25 bp, Homo sapien
taggtgacggctgctctagatccat

SEQ ID NO: 1815116 - DNA, 25 bp, Homo sapien
gggctccctaggtgacggctgctct

SEQ ID NO: 1815117 - DNA, 25 bp, Homo sapien
gggcagctgtcaatatgctccttgg

SEQ ID NO: 1815118 - DNA, 25 bp, Homo sapien
tcttccaagggcagctgtcaatatg

SEQ ID NO: 1815119 - DNA, 25 bp, Homo sapien
ccaagggcagctgtcaatatgctcc

SEQ ID NO: 1815120 - DNA, 25 bp, Homo sapien
cagctgtcaatatgctccttggcat

SEQ ID NO: 1815121 - DNA, 25 bp, Homo sapien
gaagaagggcttgtagagaaactga

SEQ ID NO: 1815122 - DNA, 25 bp, Homo sapien
tggaagaagggcttgtagagaaact

SEQ ID NO: 1815123 - DNA, 25 bp, Homo sapien
aagaagggcttgtagagaaactgag

SEQ ID NO: 1815124 - DNA, 25 bp, Homo sapien
gtggaagaagggcttgtagagaaac

SEQ ID NO: 1815125 - DNA, 25 bp, Homo sapien
tgctgtctctggcacggtgtcttgg

SEQ ID NO: 1815126 - DNA, 25 bp, Homo sapien
tctgaaggacttcattgtttctcgt

SEQ ID NO: 1815127 - DNA, 25 bp, Homo sapien
gtttctcgtgctgtctctggcacgg

SEQ ID NO: 1815128 - DNA, 25 bp, Homo sapien
cagttgggcagggagtttgtgcctc

SEQ ID NO: 1815129 - DNA, 25 bp, Homo sapien
tccttgatggtataacttttgcggg

SEQ ID NO: 1815130 - DNA, 25 bp, Homo sapien
ttaagagctctctggtcagaagtca

SEQ ID NO: 1815131 - DNA, 25 bp, Homo sapien
tgttctagagaggacttccaatgac

SEQ ID NO: 1815132 - DNA, 25 bp, Homo sapien
ctatgtatacataaaggcctgcctt

SEQ ID NO: 1815133 - DNA, 25 bp, Homo sapien
tttacctggttctattagcagacag

SEQ ID NO: 1815134 - DNA, 25 bp, Homo sapien
gaacattgtctacatggtactgaat

SEQ ID NO: 1815135 - DNA, 25 bp, Homo sapien
gagcctgtgacctgggctttgaacc

SEQ ID NO: 1815136 - DNA, 25 bp, Homo sapien
caaatgcttttcaggtcaatgggac

SEQ ID NO: 1815137 - DNA, 25 bp, Homo sapien
catggacagctatctgcaggagatg

SEQ ID NO: 1815138 - DNA, 25 bp, Homo sapien
tctggtctgtgaaactctagatgcc

SEQ ID NO: 1815139 - DNA, 25 bp, Homo sapien
ttaccaaggccctggcatggacagc

SEQ ID NO: 1815140 - DNA, 25 bp, Homo sapien
aactttgaataacaccactctggtc

SEQ ID NO: 1815141 - DNA, 25 bp, Homo sapien
tgcctttagaattcagtctccttca

SEQ ID NO: 1815142 - DNA, 25 bp, Homo sapien
tatgcctaaatctacggattgcctt

SEQ ID NO: 1815143 - DNA, 25 bp, Homo sapien
ttagcgcatcacgaagtcaatttag

SEQ ID NO: 1815144 - DNA, 25 bp, Homo sapien
caatcagagtggaaatatcagagtc

SEQ ID NO: 1815145 - DNA, 25 bp, Homo sapien
ttgatagccaagtgattgtacaagc

SEQ ID NO: 1815146 - DNA, 25 bp, Homo sapien
caagtgattgtacaagcctctgagc

SEQ ID NO: 1815147 - DNA, 25 bp, Homo sapien
tgaaagacttgatcataattcaagt

SEQ ID NO: 1815148 - DNA, 25 bp, Homo sapien
gatagccaagtgattgtacaagcct

SEQ ID NO: 1815149 - DNA, 25 bp, Homo sapien
tggaaaaaccagcagcatgttccgt

SEQ ID NO: 1815150 - DNA, 25 bp, Homo sapien
tgctacacccatgattgaaatagaa

SEQ ID NO: 1815151 - DNA, 25 bp, Homo sapien
atactcagcagaaggagaccgagac

SEQ ID NO: 1815152 - DNA, 25 bp, Homo sapien
tcagtatgttgaaatgggctgctac

SEQ ID NO: 1815153 - DNA, 25 bp, Homo sapien
aacagtccaacaaaatagaacagac

SEQ ID NO: 1815154 - DNA, 25 bp, Homo sapien
ttgaaacaacagtccaacaaaatag

SEQ ID NO: 1815155 - DNA, 25 bp, Homo sapien
aacaacagtccaacaaaatagaaca

SEQ ID NO: 1815156 - DNA, 25 bp, Homo sapien
aaatacactttgaaacaacagtcca

SEQ ID NO: 1815157 - DNA, 25 bp, Homo sapien
gaacactggtactttccgtcataaa

SEQ ID NO: 1815158 - DNA, 25 bp, Homo sapien
tgaacactggtactttccgtcataa

SEQ ID NO: 1815159 - DNA, 25 bp, Homo sapien
atctgaacactggtactttccgtca

SEQ ID NO: 1815160 - DNA, 25 bp, Homo sapien
tctgaacactggtactttccgtcat

SEQ ID NO: 1815161 - DNA, 25 bp, Homo sapien
gccagtttttcttctacgaactgca

SEQ ID NO: 1815162 - DNA, 25 bp, Homo sapien
ttcttctacgaactgcaaagtttcc

SEQ ID NO: 1815163 - DNA, 25 bp, Homo sapien
tgtatgactacaccgataactcgag

SEQ ID NO: 1815164 - DNA, 25 bp, Homo sapien
tgatttaacctccggcccctgtatg

SEQ ID NO: 1815165 - DNA, 25 bp, Homo sapien
ctgatagtctcattacggctgtacc

SEQ ID NO: 1815166 - DNA, 25 bp, Homo sapien
actgatagtctcattacggctgtac

SEQ ID NO: 1815167 - DNA, 25 bp, Homo sapien
agacaggggtaacggctctcacagc

SEQ ID NO: 1815168 - DNA, 25 bp, Homo sapien
tgggctattgagacaggggtaacgg

SEQ ID NO: 1815169 - DNA, 25 bp, Homo sapien
gactttgcagttgacactgagcgag

SEQ ID NO: 1815170 - DNA, 25 bp, Homo sapien
actttgcagttgacactgagcgagc

SEQ ID NO: 1815171 - DNA, 25 bp, Homo sapien
tttgcagttgacactgagcgagctg

SEQ ID NO: 1815172 - DNA, 25 bp, Homo sapien
ttgcagttgacactgagcgagctgt

SEQ ID NO: 1815173 - DNA, 25 bp, Homo sapien
aaataatttggggacactgcatggt

SEQ ID NO: 1815174 - DNA, 25 bp, Homo sapien
ctgggatggaaataatttggggaca

SEQ ID NO: 1815175 - DNA, 25 bp, Homo sapien
gatggaaataatttggggacactgc

SEQ ID NO: 1815176 - DNA, 25 bp, Homo sapien
tttggggacactgcatggtgatttt

SEQ ID NO: 1815177 - DNA, 25 bp, Homo sapien
ctgcactatttgactgaactgccac

SEQ ID NO: 1815178 - DNA, 25 bp, Homo sapien
gtgatactcacaaatctagccacac

SEQ ID NO: 1815179 - DNA, 25 bp, Homo sapien
aagtgatactcacaaatctagccac

SEQ ID NO: 1815180 - DNA, 25 bp, Homo sapien
gaagtgatactcacaaatctagcca

SEQ ID NO: 1815181 - DNA, 25 bp, Homo sapien
ggaagtgatactcacaaatctagcc

SEQ ID NO: 1815182 - DNA, 25 bp, Homo sapien
ctctgctctggagcagtttataggg

SEQ ID NO: 1815183 - DNA, 25 bp, Homo sapien
ctctggagcagtttataggggatga

SEQ ID NO: 1815184 - DNA, 25 bp, Homo sapien
ctgctctggagcagtttatagggga

SEQ ID NO: 1815185 - DNA, 25 bp, Homo sapien
ctggagcagtttataggggatgaat

SEQ ID NO: 1815186 - DNA, 25 bp, Homo sapien
ttttcatccatagctcctgctaagt

SEQ ID NO: 1815187 - DNA, 25 bp, Homo sapien
tccatagctcctgctaagtcttcat

SEQ ID NO: 1815188 - DNA, 25 bp, Homo sapien
aatttttcatccatagctcctgcta

SEQ ID NO: 1815189 - DNA, 25 bp, Homo sapien
agacagtgacattgttctaataatt

SEQ ID NO: 1815190 - DNA, 25 bp, Homo sapien
ttccttggttcacagctatctggtg

SEQ ID NO: 1815191 - DNA, 25 bp, Homo sapien
agttgacgcctccactgtagtttct

SEQ ID NO: 1815192 - DNA, 25 bp, Homo sapien
ttcagttgacgcctccactgtagtt

SEQ ID NO: 1815193 - DNA, 25 bp, Homo sapien
ttttttatcgtctatgaccactatg

SEQ ID NO: 1815194 - DNA, 25 bp, Homo sapien
agggacaaatacttccacaggactt

SEQ ID NO: 1815195 - DNA, 25 bp, Homo sapien
gagggacaaatacttccacaggact

SEQ ID NO: 1815196 - DNA, 25 bp, Homo sapien
ggagggacaaatacttccacaggac

SEQ ID NO: 1815197 - DNA, 25 bp, Homo sapien
gcttccacccccgagatgagcagat

SEQ ID NO: 1815198 - DNA, 25 bp, Homo sapien
gagcagatgcttccacccccgagat

SEQ ID NO: 1815199 - DNA, 25 bp, Homo sapien
catgcagagacgttgccacgttcat

SEQ ID NO: 1815200 - DNA, 25 bp, Homo sapien
ctcatgcagagacgttgccacgttc

SEQ ID NO: 1815201 - DNA, 25 bp, Homo sapien
cagggatccagcacttaagctcact

SEQ ID NO: 1815202 - DNA, 25 bp, Homo sapien
tgggcctactgccttccatgggact

SEQ ID NO: 1815203 - DNA, 25 bp, Homo sapien
tggagacctccctagctatgagaac

SEQ ID NO: 1815204 - DNA, 25 bp, Homo sapien
catcagaatggcctataggttaacc

SEQ ID NO: 1815205 - DNA, 25 bp, Homo sapien
gctgatgcctagtcaataccttggg

SEQ ID NO: 1815206 - DNA, 25 bp, Homo sapien
tgttgccctggtgaagacgctgatg

SEQ ID NO: 1815207 - DNA, 25 bp, Homo sapien
tgggatggctcttcttgaggcccgc

SEQ ID NO: 1815208 - DNA, 25 bp, Homo sapien
tgaggcccgccagcactgatgttgt

SEQ ID NO: 1815209 - DNA, 25 bp, Homo sapien
ttggttgggttggtcttctcagagc

SEQ ID NO: 1815210 - DNA, 25 bp, Homo sapien
ttagcagatgtgaatcgtggattca

SEQ ID NO: 1815211 - DNA, 25 bp, Homo sapien
atttcctaagatgagtttccctttg

SEQ ID NO: 1815212 - DNA, 25 bp, Homo sapien
cctttgttggtcaaacagttggttg

SEQ ID NO: 1815213 - DNA, 25 bp, Homo sapien
ggccagctttccaataaacttccat

SEQ ID NO: 1815214 - DNA, 25 bp, Homo sapien
aagtgaaacatgatctattacctga

SEQ ID NO: 1815215 - DNA, 25 bp, Homo sapien
agtttattgatacccctggctcagg

SEQ ID NO: 1815216 - DNA, 25 bp, Homo sapien
tattacctgataacaaatagcaaaa

SEQ ID NO: 1815217 - DNA, 25 bp, Homo sapien
agggcaagcagacacctcacatggc

SEQ ID NO: 1815218 - DNA, 25 bp, Homo sapien
aagggcaagcagacacctcacatgg

SEQ ID NO: 1815219 - DNA, 25 bp, Homo sapien
gcaaagggcaagcagacacctcaca

SEQ ID NO: 1815220 - DNA, 25 bp, Homo sapien
aaagggcaagcagacacctcacatg

SEQ ID NO: 1815221 - DNA, 25 bp, Homo sapien
tatgaaccctcgttttatctgttaa

SEQ ID NO: 1815222 - DNA, 25 bp, Homo sapien
tcatggaccctccaaggagtctagg

SEQ ID NO: 1815223 - DNA, 25 bp, Homo sapien
ttctggcaccatcctgggactgaca

SEQ ID NO: 1815224 - DNA, 25 bp, Homo sapien
gacaatttgtcacgcagacacaaag

SEQ ID NO: 1815225 - DNA, 25 bp, Homo sapien
ctccgaaaaatcctggcaccttctc

SEQ ID NO: 1815226 - DNA, 25 bp, Homo sapien
tccgaaaaatcctggcaccttctca

SEQ ID NO: 1815227 - DNA, 25 bp, Homo sapien
ccgaaaaatcctggcaccttctcac

SEQ ID NO: 1815228 - DNA, 25 bp, Homo sapien
actccgaaaaatcctggcaccttct

SEQ ID NO: 1815229 - DNA, 25 bp, Homo sapien
ttacacgtgactgggaatctaaacc

SEQ ID NO: 1815230 - DNA, 25 bp, Homo sapien
ccaagttgtactccactggcacgtg

SEQ ID NO: 1815231 - DNA, 25 bp, Homo sapien
gatggtgtgactgcctttacacgtg

SEQ ID NO: 1815232 - DNA, 25 bp, Homo sapien
tactccactggcacgtggatggtgt

SEQ ID NO: 1815233 - DNA, 25 bp, Homo sapien
tataaatgcttggagtgagcaactc

SEQ ID NO: 1815234 - DNA, 25 bp, Homo sapien
gtctcaaaggatagcatactgcatg

SEQ ID NO: 1815235 - DNA, 25 bp, Homo sapien
ttaatggtgacctagaactgggtgg

SEQ ID NO: 1815236 - DNA, 25 bp, Homo sapien
caaccattgtaatcatgacccagaa

SEQ ID NO: 1815237 - DNA, 25 bp, Homo sapien
tcttctcggccaaaccacaggcttt

SEQ ID NO: 1815238 - DNA, 25 bp, Homo sapien
accttagcagggcagacgaggcctt

SEQ ID NO: 1815239 - DNA, 25 bp, Homo sapien
tctgcaactgtgacccggacacttt

SEQ ID NO: 1815240 - DNA, 25 bp, Homo sapien
tttcaaatgaggtcgaacacgcttc

SEQ ID NO: 1815241 - DNA, 25 bp, Homo sapien
gaggctggaaagtcctaagtcatga

SEQ ID NO: 1815242 - DNA, 25 bp, Homo sapien
gtcatgaggcttgcttctggcaagg

SEQ ID NO: 1815243 - DNA, 25 bp, Homo sapien
ctaagtcatgaggcttgcttctggc

SEQ ID NO: 1815244 - DNA, 25 bp, Homo sapien
ggctggaaagtcctaagtcatgagg

SEQ ID NO: 1815245 - DNA, 25 bp, Homo sapien
attcatggtataatatgtacctttt

SEQ ID NO: 1815246 - DNA, 25 bp, Homo sapien
tgcttcaaacagtgctccaacggac

SEQ ID NO: 1815247 - DNA, 25 bp, Homo sapien
taatacttgtcagcgtttctctggg

SEQ ID NO: 1815248 - DNA, 25 bp, Homo sapien
tccaacggacaactgtgagcatcca

SEQ ID NO: 1815249 - DNA, 25 bp, Homo sapien
cctactcagggaaagttgaattggt

SEQ ID NO: 1815250 - DNA, 25 bp, Homo sapien
caggcccctcgattccgtacagatg

SEQ ID NO: 1815251 - DNA, 25 bp, Homo sapien
tggccaggcccctcgattccgtaca

SEQ ID NO: 1815252 - DNA, 25 bp, Homo sapien
gatgccagttcctacagttgtcgat

SEQ ID NO: 1815253 - DNA, 25 bp, Homo sapien
attccgtacagatgccagttcctac

SEQ ID NO: 1815254 - DNA, 25 bp, Homo sapien
gcgttgccttctatggttgtctctg

SEQ ID NO: 1815255 - DNA, 25 bp, Homo sapien
gccttctatggttgtctctgctgtt

SEQ ID NO: 1815256 - DNA, 25 bp, Homo sapien
gaagcgttgccttctatggttgtct

SEQ ID NO: 1815257 - DNA, 25 bp, Homo sapien
gttgccttctatggttgtctctgct

SEQ ID NO: 1815258 - DNA, 25 bp, Homo sapien
agcttccagggcccgtggttgctgg

SEQ ID NO: 1815259 - DNA, 25 bp, Homo sapien
ctgggcagctgtagaccacacccag

SEQ ID NO: 1815260 - DNA, 25 bp, Homo sapien
ttccagggcccgtggttgctggcct

SEQ ID NO: 1815261 - DNA, 25 bp, Homo sapien
cagctgtagaccacacccaggctca

SEQ ID NO: 1815262 - DNA, 25 bp, Homo sapien
tttctggtccactaacaggattgtt

SEQ ID NO: 1815263 - DNA, 25 bp, Homo sapien
agctttctggtccactaacaggatt

SEQ ID NO: 1815264 - DNA, 25 bp, Homo sapien
tctggtccactaacaggattgttac

SEQ ID NO: 1815265 - DNA, 25 bp, Homo sapien
tggtccactaacaggattgttactt

SEQ ID NO: 1815266 - DNA, 25 bp, Homo sapien
gcagggtggccggaaagcaccccat

SEQ ID NO: 1815267 - DNA, 25 bp, Homo sapien
ggtggccggaaagcaccccatgctt

SEQ ID NO: 1815268 - DNA, 25 bp, Homo sapien
tggccggaaagcaccccatgctttg

SEQ ID NO: 1815269 - DNA, 25 bp, Homo sapien
gcccagcttgcagggtggccggaaa

SEQ ID NO: 1815270 - DNA, 25 bp, Homo sapien
cacaacagcatcgaatgggagagct

SEQ ID NO: 1815271 - DNA, 25 bp, Homo sapien
tgcccagagttacccaagatgcctg

SEQ ID NO: 1815272 - DNA, 25 bp, Homo sapien
tcatggagtgagtcccaaagacccc

SEQ ID NO: 1815273 - DNA, 25 bp, Homo sapien
tactcccgggagtgtacatcgttgg

SEQ ID NO: 1815274 - DNA, 25 bp, Homo sapien
aaaggtaactctgccgacccggcag

SEQ ID NO: 1815275 - DNA, 25 bp, Homo sapien
gaaagggtctttcatggatgcagca

SEQ ID NO: 1815276 - DNA, 25 bp, Homo sapien
tgggttccccgactagctcaaggag

SEQ ID NO: 1815277 - DNA, 25 bp, Homo sapien
tgaattcccgatgaacacccggttg

SEQ ID NO: 1815278 - DNA, 25 bp, Homo sapien
ctgttaacaccaggcagcgccggtt

SEQ ID NO: 1815279 - DNA, 25 bp, Homo sapien
tctagtcttgactccggcacaattc

SEQ ID NO: 1815280 - DNA, 25 bp, Homo sapien
gcagcgccggttctagtcttgactc

SEQ ID NO: 1815281 - DNA, 25 bp, Homo sapien
caggcagcgccggttctagtcttga

SEQ ID NO: 1815282 - DNA, 25 bp, Homo sapien
ttcgatagtccaggagacaaatctg

SEQ ID NO: 1815283 - DNA, 25 bp, Homo sapien
gacacttcgatagtccaggagacaa

SEQ ID NO: 1815284 - DNA, 25 bp, Homo sapien
tagctttccgcttagcttgccaccg

SEQ ID NO: 1815285 - DNA, 25 bp, Homo sapien
cttgccaccgggacacttcgatagt

SEQ ID NO: 1815286 - DNA, 25 bp, Homo sapien
tcacggcgtttacggaatgtgggca

SEQ ID NO: 1815287 - DNA, 25 bp, Homo sapien
gagcccagctatttcgttccattga

SEQ ID NO: 1815288 - DNA, 25 bp, Homo sapien
tattcagggtgaacacgcacactcg

SEQ ID NO: 1815289 - DNA, 25 bp, Homo sapien
catagagctccgcacagagatggaa

SEQ ID NO: 1815290 - DNA, 25 bp, Homo sapien
ccttgctttttctgtaacgtgtacg

SEQ ID NO: 1815291 - DNA, 25 bp, Homo sapien
aatgcgtagcggtggctgaaagccc

SEQ ID NO: 1815292 - DNA, 25 bp, Homo sapien
taattcactggatggagcggccttg

SEQ ID NO: 1815293 - DNA, 25 bp, Homo sapien
caaaagcgtccgtggtctgtgcctg

SEQ ID NO: 1815294 - DNA, 25 bp, Homo sapien
caccgagccgggtgtcggccttgtc

SEQ ID NO: 1815295 - DNA, 25 bp, Homo sapien
gaggcgtcggccctcaggtcctcgg

SEQ ID NO: 1815296 - DNA, 25 bp, Homo sapien
caggcgccgacccactcgcgaggac

SEQ ID NO: 1815297 - DNA, 25 bp, Homo sapien
ctcgcgaggaccagcggttcccgga

SEQ ID NO: 1815298 - DNA, 25 bp, Homo sapien
ccctgcagtcctccgacggccggct

SEQ ID NO: 1815299 - DNA, 25 bp, Homo sapien
ccaggaaggcgctttcgccctgcag

SEQ ID NO: 1815300 - DNA, 25 bp, Homo sapien
ggaaggcgctttcgccctgcagtcc

SEQ ID NO: 1815301 - DNA, 25 bp, Homo sapien
cacagccaaggcgcgtccgtgcagg

SEQ ID NO: 1815302 - DNA, 25 bp, Homo sapien
actggggctcgttcgcgcacacatg

SEQ ID NO: 1815303 - DNA, 25 bp, Homo sapien
tcgttcgcgcacacatgcaccattt

SEQ ID NO: 1815304 - DNA, 25 bp, Homo sapien
ccatttgttctttccgatcatctat

SEQ ID NO: 1815305 - DNA, 25 bp, Homo sapien
gagaaactggggctcgttcgcgcac

SEQ ID NO: 1815306 - DNA, 25 bp, Homo sapien
gcaagacgacagtttgaatctccat

SEQ ID NO: 1815307 - DNA, 25 bp, Homo sapien
tccggattgttaatgcaagacgaca

SEQ ID NO: 1815308 - DNA, 25 bp, Homo sapien
gccgggcaccaaagttaaagattca

SEQ ID NO: 1815309 - DNA, 25 bp, Homo sapien
agaagccctgagtcttttgaagccg

SEQ ID NO: 1815310 - DNA, 25 bp, Homo sapien
gggctttcctgccaaggggcgatag

SEQ ID NO: 1815311 - DNA, 25 bp, Homo sapien
tgccaaggggcgataggtgggccat

SEQ ID NO: 1815312 - DNA, 25 bp, Homo sapien
ctgagcccccgaaacgcccttcgag

SEQ ID NO: 1815313 - DNA, 25 bp, Homo sapien
tagctcggctctgagcccccgaaac

SEQ ID NO: 1815314 - DNA, 25 bp, Homo sapien
cccaggagggcaactatcggattaa

SEQ ID NO: 1815315 - DNA, 25 bp, Homo sapien
gattaatccaaccatgtagacaggc

SEQ ID NO: 1815316 - DNA, 25 bp, Homo sapien
atcaggtaggtgttggctggctttc

SEQ ID NO: 1815317 - DNA, 25 bp, Homo sapien
tcacacaaacttcccgtggaggtct

SEQ ID NO: 1815318 - DNA, 25 bp, Homo sapien
gcacgtccggagctttcgtctacga

SEQ ID NO: 1815319 - DNA, 25 bp, Homo sapien
aatagtagctgtcaaatggccttcc

SEQ ID NO: 1815320 - DNA, 25 bp, Homo sapien
cagaacttccactcggtgcgggaga

SEQ ID NO: 1815321 - DNA, 25 bp, Homo sapien
gatgttcgagtcacagaggatcggc

SEQ ID NO: 1815322 - DNA, 25 bp, Homo sapien
tactccagataacacgtaagtttct

SEQ ID NO: 1815323 - DNA, 25 bp, Homo sapien
tattaaaggacagtgttactccaga

SEQ ID NO: 1815324 - DNA, 25 bp, Homo sapien
tattttatcctatgttgaagggagg

SEQ ID NO: 1815325 - DNA, 25 bp, Homo sapien
taatttgtagttggatgtcgtggac

SEQ ID NO: 1815326 - DNA, 25 bp, Homo sapien
ttttaagcccatgaatcagccgcgg

SEQ ID NO: 1815327 - DNA, 25 bp, Homo sapien
taccacggtgatgcctgtgtgccga

SEQ ID NO: 1815328 - DNA, 25 bp, Homo sapien
ttatacatccctgtgagccagatgc

SEQ ID NO: 1815329 - DNA, 25 bp, Homo sapien
cactaatgacagtccatgattcgga

SEQ ID NO: 1815330 - DNA, 25 bp, Homo sapien
ggcgatttgattacagacgttcggg

SEQ ID NO: 1815331 - DNA, 25 bp, Homo sapien
ttgttttggagataatacagtttcc

SEQ ID NO: 1815332 - DNA, 25 bp, Homo sapien
cagtaattgctgttgcttgttgtca

SEQ ID NO: 1815333 - DNA, 25 bp, Homo sapien
gctatctgccgctcctatctagagg

SEQ ID NO: 1815334 - DNA, 25 bp, Homo sapien
gcttgcaaaggaatagggctcgatt

SEQ ID NO: 1815335 - DNA, 25 bp, Homo sapien
gattgtactggtggcctgtaagctc

SEQ ID NO: 1815336 - DNA, 25 bp, Homo sapien
ttaataatcgatgcttgcaaaggaa

SEQ ID NO: 1815337 - DNA, 25 bp, Homo sapien
aatagggctcgattgtactggtggc

SEQ ID NO: 1815338 - DNA, 25 bp, Homo sapien
tgggaagcacgtttcagcggcgact

SEQ ID NO: 1815339 - DNA, 25 bp, Homo sapien
caagttggcaaaatcggcgtcccag

SEQ ID NO: 1815340 - DNA, 25 bp, Homo sapien
tatcactcgcaaaggacaaacgcgg

SEQ ID NO: 1815341 - DNA, 25 bp, Homo sapien
gggcttccttgcaattccaatgatt

SEQ ID NO: 1815342 - DNA, 25 bp, Homo sapien
ccagcggacacgctggctcccaaat

SEQ ID NO: 1815343 - DNA, 25 bp, Homo sapien
gtcgtcggctcccggcaaaggcgct

SEQ ID NO: 1815344 - DNA, 25 bp, Homo sapien
cgctgtgtgtgacccctgaccgtgg

SEQ ID NO: 1815345 - DNA, 25 bp, Homo sapien
aaattcagagatcagaggggcggct

SEQ ID NO: 1815346 - DNA, 25 bp, Homo sapien
cagcgcccgcggccaagcggacccg

SEQ ID NO: 1815347 - DNA, 25 bp, Homo sapien
agcgcccgcggccaagcggacccgg

SEQ ID NO: 1815348 - DNA, 25 bp, Homo sapien
agctttcacagcaactgggcagcca

SEQ ID NO: 1815349 - DNA, 25 bp, Homo sapien
cagttctgctccatcgagggcgagg

SEQ ID NO: 1815350 - DNA, 25 bp, Homo sapien
ccagtcgttggagactcggtcctcc

SEQ ID NO: 1815351 - DNA, 25 bp, Homo sapien
tctctcctgcgccagtcgttggaga

SEQ ID NO: 1815352 - DNA, 25 bp, Homo sapien
tttgaaggccccacaatttgttgtg

SEQ ID NO: 1815353 - DNA, 25 bp, Homo sapien
aaagccattcagaggaggcttcgac

SEQ ID NO: 1815354 - DNA, 25 bp, Homo sapien
cgcaaagcgacccaaaccctggagg

SEQ ID NO: 1815355 - DNA, 25 bp, Homo sapien
caagtaaagtgaatgtgattaaaac

SEQ ID NO: 1815356 - DNA, 25 bp, Homo sapien
cggccccgctcttgcggccgggaca

SEQ ID NO: 1815357 - DNA, 25 bp, Homo sapien
cgcagattggcacgccgctccccat

SEQ ID NO: 1815358 - DNA, 25 bp, Homo sapien
tccccgcagcgcgtctgcaccggag

SEQ ID NO: 1815359 - DNA, 25 bp, Homo sapien
caccggagactctgcggggattgta

SEQ ID NO: 1815360 - DNA, 25 bp, Homo sapien
ctccacgtcggcgtgcaccatctcc

SEQ ID NO: 1815361 - DNA, 25 bp, Homo sapien
ggtttgtcctcatgagctccacgtc

SEQ ID NO: 1815362 - DNA, 25 bp, Homo sapien
acgtcggcgtgcaccatctccctca

SEQ ID NO: 1815363 - DNA, 25 bp, Homo sapien
tggggtttgtcctcatgagctccac

SEQ ID NO: 1815364 - DNA, 25 bp, Homo sapien
ggcttccagttcagcttctgtttcg

SEQ ID NO: 1815365 - DNA, 25 bp, Homo sapien
cagcttctgtttcgctttggtgcag

SEQ ID NO: 1815366 - DNA, 25 bp, Homo sapien
gtttcgctttggtgcagtcgccctg

SEQ ID NO: 1815367 - DNA, 25 bp, Homo sapien
gctttggtgcagtcgccctgcagaa

SEQ ID NO: 1815368 - DNA, 25 bp, Homo sapien
tcggtccctgctgtgcgcgttcagt

SEQ ID NO: 1815369 - DNA, 25 bp, Homo sapien
tgtgcgcgttcagttgcggctctcg

SEQ ID NO: 1815370 - DNA, 25 bp, Homo sapien
agttgcggctctcggcgccgtaaat

SEQ ID NO: 1815371 - DNA, 25 bp, Homo sapien
gtttccctgctttcggtccctgctg

SEQ ID NO: 1815372 - DNA, 25 bp, Homo sapien
tataacatgaagttgtcagggacgc

SEQ ID NO: 1815373 - DNA, 25 bp, Homo sapien
ggaattgctgcacttctctggctag

SEQ ID NO: 1815374 - DNA, 25 bp, Homo sapien
tcagggacgctcctatgagaactgt

SEQ ID NO: 1815375 - DNA, 25 bp, Homo sapien
gaagtgagtaaatcaccaggcgccc

SEQ ID NO: 1815376 - DNA, 25 bp, Homo sapien
caattcttaggcttagcgtccagga

SEQ ID NO: 1815377 - DNA, 25 bp, Homo sapien
gaaaatgccgatctcgacccacttg

SEQ ID NO: 1815378 - DNA, 25 bp, Homo sapien
taacgcggccgtggatgtttcttcc

SEQ ID NO: 1815379 - DNA, 25 bp, Homo sapien
cacttgtacttccacgagcggagct

SEQ ID NO: 1815380 - DNA, 25 bp, Homo sapien
gctgagccttctagagcagaggctg

SEQ ID NO: 1815381 - DNA, 25 bp, Homo sapien
ctgtctggatcctgctgaatgtctg

SEQ ID NO: 1815382 - DNA, 25 bp, Homo sapien
gcagaggctgtctggatcctgctga

SEQ ID NO: 1815383 - DNA, 25 bp, Homo sapien
tgagccttctagagcagaggctgtc

SEQ ID NO: 1815384 - DNA, 25 bp, Homo sapien
tacacgcagcgactctcgctgtcgt

SEQ ID NO: 1815385 - DNA, 25 bp, Homo sapien
cagcgactctcgctgtcgttctcat

SEQ ID NO: 1815386 - DNA, 25 bp, Homo sapien
agcagtacacgcagcgactctcgct

SEQ ID NO: 1815387 - DNA, 25 bp, Homo sapien
acgcagcgactctcgctgtcgttct

SEQ ID NO: 1815388 - DNA, 25 bp, Homo sapien
aacaagttatttctgctggccctaa

SEQ ID NO: 1815389 - DNA, 25 bp, Homo sapien
gcatttcgcaatacactgaagtacc

SEQ ID NO: 1815390 - DNA, 25 bp, Homo sapien
aaagtccatatacagattcttcagg

SEQ ID NO: 1815391 - DNA, 25 bp, Homo sapien
tttttcaaacgctttgcatttcgca

SEQ ID NO: 1815392 - DNA, 25 bp, Homo sapien
gctgggagcctccttagatgactcc

SEQ ID NO: 1815393 - DNA, 25 bp, Homo sapien
gagcctccttagatgactccggacg

SEQ ID NO: 1815394 - DNA, 25 bp, Homo sapien
gactccggacgtgcggtccagtcct

SEQ ID NO: 1815395 - DNA, 25 bp, Homo sapien
tccttagatgactccggacgtgcgg

SEQ ID NO: 1815396 - DNA, 25 bp, Homo sapien
tgttgggtaagtgcccgacagacag

SEQ ID NO: 1815397 - DNA, 25 bp, Homo sapien
gatgcagttagaccccagaaggatg

SEQ ID NO: 1815398 - DNA, 25 bp, Homo sapien
cactgggcctaggttccatgatgta

SEQ ID NO: 1815399 - DNA, 25 bp, Homo sapien
tgcacagtcagtgacggctctactg

SEQ ID NO: 1815400 - DNA, 25 bp, Homo sapien
taagggcagctccataaagtatggc

SEQ ID NO: 1815401 - DNA, 25 bp, Homo sapien
gatgtagctgcccacttatttgaag

SEQ ID NO: 1815402 - DNA, 25 bp, Homo sapien
tattacggcgatcactggcctgctg

SEQ ID NO: 1815403 - DNA, 25 bp, Homo sapien
gaagctgcctatgatctgtactcag

SEQ ID NO: 1815404 - DNA, 25 bp, Homo sapien
tgttcaccagacagatttgccatca

SEQ ID NO: 1815405 - DNA, 25 bp, Homo sapien
cagatttgccatcacaaattcaggc

SEQ ID NO: 1815406 - DNA, 25 bp, Homo sapien
tttctttttcacgctgttcaccaga

SEQ ID NO: 1815407 - DNA, 25 bp, Homo sapien
tttcacgctgttcaccagacagatt

SEQ ID NO: 1815408 - DNA, 25 bp, Homo sapien
taagagtatcatcccaccgactgct

SEQ ID NO: 1815409 - DNA, 25 bp, Homo sapien
aaagctgaagctgcaatttgcgaag

SEQ ID NO: 1815410 - DNA, 25 bp, Homo sapien
gcgaagtcgcattttcccgaaggct

SEQ ID NO: 1815411 - DNA, 25 bp, Homo sapien
tactgaggacccttcaacttgttca

SEQ ID NO: 1815412 - DNA, 25 bp, Homo sapien
tacagcctgggtaccttgctttggg

SEQ ID NO: 1815413 - DNA, 25 bp, Homo sapien
cagagtttcaactaaagcaggtctc

SEQ ID NO: 1815414 - DNA, 25 bp, Homo sapien
tctacccagataggttcaggcaagg

SEQ ID NO: 1815415 - DNA, 25 bp, Homo sapien
caggtctcttgggactatggctgtc

SEQ ID NO: 1815416 - DNA, 25 bp, Homo sapien
gagcaagctctagcaaatccactgc

SEQ ID NO: 1815417 - DNA, 25 bp, Homo sapien
aagagttagtaagagtctgacagag

SEQ ID NO: 1815418 - DNA, 25 bp, Homo sapien
tggacagtcggatgtcattgttaag

SEQ ID NO: 1815419 - DNA, 25 bp, Homo sapien
tgcaggagatctgctgacaggctgt

SEQ ID NO: 1815420 - DNA, 25 bp, Homo sapien
atcacatgcggctgacatcccggga

SEQ ID NO: 1815421 - DNA, 25 bp, Homo sapien
tcaaatgtttgccttaaggtggcca

SEQ ID NO: 1815422 - DNA, 25 bp, Homo sapien
gaacatatttactgtcctggttaag

SEQ ID NO: 1815423 - DNA, 25 bp, Homo sapien
gactgggaccctctccgtattcaaa

SEQ ID NO: 1815424 - DNA, 25 bp, Homo sapien
gactcatgaacggtaactaatgctg

SEQ ID NO: 1815425 - DNA, 25 bp, Homo sapien
tagttccaaacgttgaagtcatctg

SEQ ID NO: 1815426 - DNA, 25 bp, Homo sapien
gcaggtcaaaccatggcctcgggta

SEQ ID NO: 1815427 - DNA, 25 bp, Homo sapien
tctacaccgggataagacagagaag

SEQ ID NO: 1815428 - DNA, 25 bp, Homo sapien
gcggatccagcaggcccaccagtgg

SEQ ID NO: 1815429 - DNA, 25 bp, Homo sapien
ggcagcggatccagcaggcccacca

SEQ ID NO: 1815430 - DNA, 25 bp, Homo sapien
tggcagcggatccagcaggcccacc

SEQ ID NO: 1815431 - DNA, 25 bp, Homo sapien
cagcggatccagcaggcccaccagt

SEQ ID NO: 1815432 - DNA, 25 bp, Homo sapien
tgagtctacagattttgacaaacgt

SEQ ID NO: 1815433 - DNA, 25 bp, Homo sapien
cattagggttcactccatggcatga

SEQ ID NO: 1815434 - DNA, 25 bp, Homo sapien
tccaccattactatatcatatagaa

SEQ ID NO: 1815435 - DNA, 25 bp, Homo sapien
tatctcagagtgttatatttgttat

SEQ ID NO: 1815436 - DNA, 25 bp, Homo sapien
gcatcacactacctgacttcaaact

SEQ ID NO: 1815437 - DNA, 25 bp, Homo sapien
aaaaagagcccgcattgctaagaca

SEQ ID NO: 1815438 - DNA, 25 bp, Homo sapien
atactgcaaggctacagtaaccaaa

SEQ ID NO: 1815439 - DNA, 25 bp, Homo sapien
ctaagcaaaaagaacaaagctggag

SEQ ID NO: 1815440 - DNA, 25 bp, Homo sapien
gaccagtcagctgtattgctaaaca

SEQ ID NO: 1815441 - DNA, 25 bp, Homo sapien
tatgattctgacagcaaagcaaact

SEQ ID NO: 1815442 - DNA, 25 bp, Homo sapien
taacacgtaaagcagggacagtggc

SEQ ID NO: 1815443 - DNA, 25 bp, Homo sapien
aagtacctgccatagcacattctga

SEQ ID NO: 1815444 - DNA, 25 bp, Homo sapien
caaacctgtgcaaatagccctgtga

SEQ ID NO: 1815445 - DNA, 25 bp, Homo sapien
gtggatgctctctactcacgcaggc

SEQ ID NO: 1815446 - DNA, 25 bp, Homo sapien
catgagtggcccgtgatgactgaac

SEQ ID NO: 1815447 - DNA, 25 bp, Homo sapien
tttaggtcagctgacgcaagcgctg

SEQ ID NO: 1815448 - DNA, 25 bp, Homo sapien
tgacttctcacacggaaagcagcgt

SEQ ID NO: 1815449 - DNA, 25 bp, Homo sapien
tgttagttctgatccggcaccgtga

SEQ ID NO: 1815450 - DNA, 25 bp, Homo sapien
taaaggcaaagtgtcatgaacggcg

SEQ ID NO: 1815451 - DNA, 25 bp, Homo sapien
aacggcgtatgttccaggtgcatca

SEQ ID NO: 1815452 - DNA, 25 bp, Homo sapien
tgatcatgccataaagcacaggccg

SEQ ID NO: 1815453 - DNA, 25 bp, Homo sapien
gaagaagcgaagtctgtagccctca

SEQ ID NO: 1815454 - DNA, 25 bp, Homo sapien
gacaagaagtcgctccacattgggc

SEQ ID NO: 1815455 - DNA, 25 bp, Homo sapien
tgaattcctgaatatcccctggtga

SEQ ID NO: 1815456 - DNA, 25 bp, Homo sapien
ataaaactgggtacccatctgtaat

SEQ ID NO: 1815457 - DNA, 25 bp, Homo sapien
caaataatttgagcatcatttgttt

SEQ ID NO: 1815458 - DNA, 25 bp, Homo sapien
tcctgagtccccatcagagtgaaca

SEQ ID NO: 1815459 - DNA, 25 bp, Homo sapien
agacgtgcagtcttattcctgagtc

SEQ ID NO: 1815460 - DNA, 25 bp, Homo sapien
agccagttctcccaatactttatga

SEQ ID NO: 1815461 - DNA, 25 bp, Homo sapien
tcagacggttgtagacgtgcagtct

SEQ ID NO: 1815462 - DNA, 25 bp, Homo sapien
gaagtatgtctgtcacaccgtagga

SEQ ID NO: 1815463 - DNA, 25 bp, Homo sapien
tgagcaaaatggctagggcctacgc

SEQ ID NO: 1815464 - DNA, 25 bp, Homo sapien
gagcaccaagttgaacccacgtgga

SEQ ID NO: 1815465 - DNA, 25 bp, Homo sapien
caaactctaagtgtcctgtggaacc

SEQ ID NO: 1815466 - DNA, 25 bp, Homo sapien
ggtgacatagccacgtattctagaa

SEQ ID NO: 1815467 - DNA, 25 bp, Homo sapien
tccatacgcagaggcagctggccta

SEQ ID NO: 1815468 - DNA, 25 bp, Homo sapien
ccacagagattaggatggcagcacg

SEQ ID NO: 1815469 - DNA, 25 bp, Homo sapien
tgtatgagctcccacaaaagttgga

SEQ ID NO: 1815470 - DNA, 25 bp, Homo sapien
gcagtccacctccaccaagaacagg

SEQ ID NO: 1815471 - DNA, 25 bp, Homo sapien
ccagggtgagcaaccagatggaggt

SEQ ID NO: 1815472 - DNA, 25 bp, Homo sapien
tccatggcgttgtccagggtgagca

SEQ ID NO: 1815473 - DNA, 25 bp, Homo sapien
agcaaccagatggaggtgggctccc

SEQ ID NO: 1815474 - DNA, 25 bp, Homo sapien
agccctctcctccatggcgttgtcc

SEQ ID NO: 1815475 - DNA, 25 bp, Homo sapien
gtctgatgtcccctgattgccgaga

SEQ ID NO: 1815476 - DNA, 25 bp, Homo sapien
gccgagaaccgtgtacactgactca

SEQ ID NO: 1815477 - DNA, 25 bp, Homo sapien
ccctgattgccgagaaccgtgtaca

SEQ ID NO: 1815478 - DNA, 25 bp, Homo sapien
gaaccgtgtacactgactcagctcc

SEQ ID NO: 1815479 - DNA, 25 bp, Homo sapien
aaagctcagaagttcagacagaagt

SEQ ID NO: 1815480 - DNA, 25 bp, Homo sapien
tgaccacaaagtatgagggtatcgg

SEQ ID NO: 1815481 - DNA, 25 bp, Homo sapien
caaagtatgagggtatcggaaagct

SEQ ID NO: 1815482 - DNA, 25 bp, Homo sapien
ctgatgctgaccacaaagtatgagg

SEQ ID NO: 1815483 - DNA, 25 bp, Homo sapien
aatgttgttctaaatgactatcatc

SEQ ID NO: 1815484 - DNA, 25 bp, Homo sapien
tacacaatcatatatttaagttctt

SEQ ID NO: 1815485 - DNA, 25 bp, Homo sapien
ttacacaatcatatatttaagttct

SEQ ID NO: 1815486 - DNA, 25 bp, Homo sapien
aaatgttgttctaaatgactatcat

SEQ ID NO: 1815487 - DNA, 25 bp, Homo sapien
gatcaccaattcagcatatccctac

SEQ ID NO: 1815488 - DNA, 25 bp, Homo sapien
gcagaatcagaagtcgatcaccaat

SEQ ID NO: 1815489 - DNA, 25 bp, Homo sapien
ggaacaagtaactttttctgcatga

SEQ ID NO: 1815490 - DNA, 25 bp, Homo sapien
cacagctggcagtactaaggaacaa

SEQ ID NO: 1815491 - DNA, 25 bp, Homo sapien
gacctaagctgatcggtgaaagcac

SEQ ID NO: 1815492 - DNA, 25 bp, Homo sapien
gaatgctagtgtcaacagagctgca

SEQ ID NO: 1815493 - DNA, 25 bp, Homo sapien
catgtgcaggatggactgagtccct

SEQ ID NO: 1815494 - DNA, 25 bp, Homo sapien
tctaagtaggaatgacagacaagcc

SEQ ID NO: 1815495 - DNA, 25 bp, Homo sapien
gtgttctgattttggaaatgcacgc

SEQ ID NO: 1815496 - DNA, 25 bp, Homo sapien
ccagccaaatgtggccacgcactgg

SEQ ID NO: 1815497 - DNA, 25 bp, Homo sapien
ttttggaaatgcacgctgaaggatg

SEQ ID NO: 1815498 - DNA, 25 bp, Homo sapien
ttccatgagcgcatttgcccagcca

SEQ ID NO: 1815499 - DNA, 25 bp, Homo sapien
cggtagtacttgagatccacagtca

SEQ ID NO: 1815500 - DNA, 25 bp, Homo sapien
ttgccggtctctttacatctgccca

SEQ ID NO: 1815501 - DNA, 25 bp, Homo sapien
tccacagtcacgtgaactttgccgg

SEQ ID NO: 1815502 - DNA, 25 bp, Homo sapien
ttcagttggccggtagtacttgaga

SEQ ID NO: 1815503 - DNA, 25 bp, Homo sapien
catccaaggttgacagcagtaagga

SEQ ID NO: 1815504 - DNA, 25 bp, Homo sapien
cagtaaggatcccaggagcgagtcc

SEQ ID NO: 1815505 - DNA, 25 bp, Homo sapien
caggatgagctcatatgcttcgaga

SEQ ID NO: 1815506 - DNA, 25 bp, Homo sapien
gagcgagtcctcaagtccacactat

SEQ ID NO: 1815507 - DNA, 25 bp, Homo sapien
ctgcctatgtaagccacaggcacca

SEQ ID NO: 1815508 - DNA, 25 bp, Homo sapien
tgactgatttttcgcctgtagctgg

SEQ ID NO: 1815509 - DNA, 25 bp, Homo sapien
taccaatggactcaaggcaagtatg

SEQ ID NO: 1815510 - DNA, 25 bp, Homo sapien
caaatgccacaaccatgagaactgg

SEQ ID NO: 1815511 - DNA, 25 bp, Homo sapien
tagctggccacgctgacttatgtgc

SEQ ID NO: 1815512 - DNA, 25 bp, Homo sapien
ggcctgcacggctagactgcttgaa

SEQ ID NO: 1815513 - DNA, 25 bp, Homo sapien
ggttaatggtatcgcctcaccctca

SEQ ID NO: 1815514 - DNA, 25 bp, Homo sapien
tgcttcggccgatcaggttaatggt

SEQ ID NO: 1815515 - DNA, 25 bp, Homo sapien
catttgggatttgtaacactagctg

SEQ ID NO: 1815516 - DNA, 25 bp, Homo sapien
ggcattgccctctacaattaatata

SEQ ID NO: 1815517 - DNA, 25 bp, Homo sapien
tttggcactcaacaggcaccagctc

SEQ ID NO: 1815518 - DNA, 25 bp, Homo sapien
caaaacagtctctaagggcatggca

SEQ ID NO: 1815519 - DNA, 25 bp, Homo sapien
actgtctgaacgctgtctgctgaac

SEQ ID NO: 1815520 - DNA, 25 bp, Homo sapien
acctctttcacctacacgactgtgt

SEQ ID NO: 1815521 - DNA, 25 bp, Homo sapien
gccaaaacgaccagtgcccaagtac

SEQ ID NO: 1815522 - DNA, 25 bp, Homo sapien
cacagtgagtaggtgtgccaaaacg

SEQ ID NO: 1815523 - DNA, 25 bp, Homo sapien
cacctacacgactgtgtctatccat

SEQ ID NO: 1815524 - DNA, 25 bp, Homo sapien
caaattcccggacactatggacctc

SEQ ID NO: 1815525 - DNA, 25 bp, Homo sapien
tccccagtagctataacgaagtcct

SEQ ID NO: 1815526 - DNA, 25 bp, Homo sapien
tataacgaagtcctccggctcatca

SEQ ID NO: 1815527 - DNA, 25 bp, Homo sapien
tccaatgtgcaagaatgatttctcg

SEQ ID NO: 1815528 - DNA, 25 bp, Homo sapien
cctgtgtgagaaggacgcagccatc

SEQ ID NO: 1815529 - DNA, 25 bp, Homo sapien
cacgttgatgtgctccattgattcc

SEQ ID NO: 1815530 - DNA, 25 bp, Homo sapien
gaggctgagtgcatcccgtcgtaat

SEQ ID NO: 1815531 - DNA, 25 bp, Homo sapien
gcctccttatacagctgcacacgtt

SEQ ID NO: 1815532 - DNA, 25 bp, Homo sapien
tcacatgctggaccacatgacccat

SEQ ID NO: 1815533 - DNA, 25 bp, Homo sapien
cttcctgttcacatgctggaccaca

SEQ ID NO: 1815534 - DNA, 25 bp, Homo sapien
ttcctgttcacatgctggaccacat

SEQ ID NO: 1815535 - DNA, 25 bp, Homo sapien
tgttcacatgctggaccacatgacc

SEQ ID NO: 1815536 - DNA, 25 bp, Homo sapien
cttcagtagtgatttcatcagcgat

SEQ ID NO: 1815537 - DNA, 25 bp, Homo sapien
tcagtagtgatttcatcagcgatga

SEQ ID NO: 1815538 - DNA, 25 bp, Homo sapien
ttcagtagtgatttcatcagcgatg

SEQ ID NO: 1815539 - DNA, 25 bp, Homo sapien
cagagactttgcaaggaggaataca

SEQ ID NO: 1815540 - DNA, 25 bp, Homo sapien
cgctccagttgggaaatctcgctca

SEQ ID NO: 1815541 - DNA, 25 bp, Homo sapien
taaaagcaacactggagacgaaaaa

SEQ ID NO: 1815542 - DNA, 25 bp, Homo sapien
tctcgctcacaatgaaaagcaagag

SEQ ID NO: 1815543 - DNA, 25 bp, Homo sapien
tgaagagtccataaccaggtatcgg

SEQ ID NO: 1815544 - DNA, 25 bp, Homo sapien
tgctcaattgcttataaccgtctgc

SEQ ID NO: 1815545 - DNA, 25 bp, Homo sapien
tctgcctccacaaagttgaagagtc

SEQ ID NO: 1815546 - DNA, 25 bp, Homo sapien
gaaaaagccgagaagcacagtctgt

SEQ ID NO: 1815547 - DNA, 25 bp, Homo sapien
ttgtggtcaggagtgagcagtccca

SEQ ID NO: 1815548 - DNA, 25 bp, Homo sapien
ccgggttgtggtcaggagtgagcag

SEQ ID NO: 1815549 - DNA, 25 bp, Homo sapien
gccagggcaggctggtaaaggccat

SEQ ID NO: 1815550 - DNA, 25 bp, Homo sapien
gggttgtggtcaggagtgagcagtc

SEQ ID NO: 1815551 - DNA, 25 bp, Homo sapien
ctgggtccttcgaaacatgcctggt

SEQ ID NO: 1815552 - DNA, 25 bp, Homo sapien
gaaatcagctgcaaacgtcctctct

SEQ ID NO: 1815553 - DNA, 25 bp, Homo sapien
tgcctggtgcctttattaactcctc

SEQ ID NO: 1815554 - DNA, 25 bp, Homo sapien
cagaaatcagctgcaaacgtcctct

SEQ ID NO: 1815555 - DNA, 25 bp, Homo sapien
cacgcgtaaggcactgtacgtaaag

SEQ ID NO: 1815556 - DNA, 25 bp, Homo sapien
tttgcatgtgtttactgaagaccac

SEQ ID NO: 1815557 - DNA, 25 bp, Homo sapien
tgaagaccacgcgtaaggcactgta

SEQ ID NO: 1815558 - DNA, 25 bp, Homo sapien
tgtttactgaagaccacgcgtaagg

SEQ ID NO: 1815559 - DNA, 25 bp, Homo sapien
tcgaatcttgttgtggcagcggaga

SEQ ID NO: 1815560 - DNA, 25 bp, Homo sapien
tatcgaatcttgttgtggcagcgga

SEQ ID NO: 1815561 - DNA, 25 bp, Homo sapien
ctatcgaatcttgttgtggcagcgg

SEQ ID NO: 1815562 - DNA, 25 bp, Homo sapien
gaatcttgttgtggcagcggagaat

SEQ ID NO: 1815563 - DNA, 25 bp, Homo sapien
cgcctctgggatggccgtttcctcc

SEQ ID NO: 1815564 - DNA, 25 bp, Homo sapien
acagacaccatcaacgcggctgctg

SEQ ID NO: 1815565 - DNA, 25 bp, Homo sapien
gggatggccgtttcctccttggtga

SEQ ID NO: 1815566 - DNA, 25 bp, Homo sapien
agccacagacaccatcaacgcggct

SEQ ID NO: 1815567 - DNA, 25 bp, Homo sapien
gacaatatctgatatgtccagccag

SEQ ID NO: 1815568 - DNA, 25 bp, Homo sapien
gagatgttcgctgatctgtcaaagt

SEQ ID NO: 1815569 - DNA, 25 bp, Homo sapien
tgtaacctgtgagatgttcgctgat

SEQ ID NO: 1815570 - DNA, 25 bp, Homo sapien
acaatatctgatatgtccagccaga

SEQ ID NO: 1815571 - DNA, 25 bp, Homo sapien
gctctatgaatactgtaaaaatcca

SEQ ID NO: 1815572 - DNA, 25 bp, Homo sapien
gttatcagcatctattggtacagta

SEQ ID NO: 1815573 - DNA, 25 bp, Homo sapien
gctatctgagaaacacgaacatata

SEQ ID NO: 1815574 - DNA, 25 bp, Homo sapien
gatgcttaagctcagctctatgaat

SEQ ID NO: 1815575 - DNA, 25 bp, Homo sapien
ttagaatgtttagcgctcagcaatg

SEQ ID NO: 1815576 - DNA, 25 bp, Homo sapien
acaaggttattaacgaaagctctga

SEQ ID NO: 1815577 - DNA, 25 bp, Homo sapien
tcagcaatgttgaagtgttaggcat

SEQ ID NO: 1815578 - DNA, 25 bp, Homo sapien
ggtgctaaatcgtttcacaaagtgg

SEQ ID NO: 1815579 - DNA, 25 bp, Homo sapien
tatatagagcgatttgcagctggcc

SEQ ID NO: 1815580 - DNA, 25 bp, Homo sapien
gcagtgttttgccagatagtttcca

SEQ ID NO: 1815581 - DNA, 25 bp, Homo sapien
gcttggacccactatactttgaacc

SEQ ID NO: 1815582 - DNA, 25 bp, Homo sapien
tggcttggagttcaaaacacggttc

SEQ ID NO: 1815583 - DNA, 25 bp, Homo sapien
tcagaccagatgtgatcaccaccgt

SEQ ID NO: 1815584 - DNA, 25 bp, Homo sapien
ccacatgcctctgggtacgaggaca

SEQ ID NO: 1815585 - DNA, 25 bp, Homo sapien
gactttctgtccaaggctccactta

SEQ ID NO: 1815586 - DNA, 25 bp, Homo sapien
tcatctcgcagtgctggcgtggcct

SEQ ID NO: 1815587 - DNA, 25 bp, Homo sapien
caatgccctatcaacacctagaggg

SEQ ID NO: 1815588 - DNA, 25 bp, Homo sapien
ccactgaggtggtacaaaacattta

SEQ ID NO: 1815589 - DNA, 25 bp, Homo sapien
cagggaaaggaaactacggcattat

SEQ ID NO: 1815590 - DNA, 25 bp, Homo sapien
tggtggtcgaaaccatggaatgttc

SEQ ID NO: 1815591 - DNA, 25 bp, Homo sapien
tctgggatctgtagtcattaaatct

SEQ ID NO: 1815592 - DNA, 25 bp, Homo sapien
gcctggtccatacttcaccagccag

SEQ ID NO: 1815593 - DNA, 25 bp, Homo sapien
tcaaacatagggtgttctgggcctg

SEQ ID NO: 1815594 - DNA, 25 bp, Homo sapien
gtcaaacatagggtgttctgggcct

SEQ ID NO: 1815595 - DNA, 25 bp, Homo sapien
tgtcaaacatagggtgttctgggcc

SEQ ID NO: 1815596 - DNA, 25 bp, Homo sapien
agatgcccatgtggcgcaccccggc

SEQ ID NO: 1815597 - DNA, 25 bp, Homo sapien
tgcccatgtggcgcaccccggccat

SEQ ID NO: 1815598 - DNA, 25 bp, Homo sapien
gatgcccatgtggcgcaccccggcc

SEQ ID NO: 1815599 - DNA, 25 bp, Homo sapien
atgcccatgtggcgcaccccggcca

SEQ ID NO: 1815600 - DNA, 25 bp, Homo sapien
tatacataagactgccaaggttctg

SEQ ID NO: 1815601 - DNA, 25 bp, Homo sapien
gaaaaacagactcgtcataagtgtg

SEQ ID NO: 1815602 - DNA, 25 bp, Homo sapien
tactccgagggtttgagtgaagtga

SEQ ID NO: 1815603 - DNA, 25 bp, Homo sapien
tataacatgggtcactgaaaacatt

SEQ ID NO: 1815604 - DNA, 25 bp, Homo sapien
gggacgccaattctgcatgcacatc

SEQ ID NO: 1815605 - DNA, 25 bp, Homo sapien
tcaactttcatgacagtggcgggct

SEQ ID NO: 1815606 - DNA, 25 bp, Homo sapien
gaaactctggtcaaaacataactgt

SEQ ID NO: 1815607 - DNA, 25 bp, Homo sapien
cccaattaggaaggaccacatttca

SEQ ID NO: 1815608 - DNA, 25 bp, Homo sapien
tttagcatttcctaaggttgtgacc

SEQ ID NO: 1815609 - DNA, 25 bp, Homo sapien
ttatatttaaatgccctctagagcc

SEQ ID NO: 1815610 - DNA, 25 bp, Homo sapien
caaacacagcatggtagttactact

SEQ ID NO: 1815611 - DNA, 25 bp, Homo sapien
tgggctcctaggacactacaaatgg

SEQ ID NO: 1815612 - DNA, 25 bp, Homo sapien
tcatatggaaagctcatctcggagg

SEQ ID NO: 1815613 - DNA, 25 bp, Homo sapien
tctcggaggtgtcaggataaaacat

SEQ ID NO: 1815614 - DNA, 25 bp, Homo sapien
gaattggccaaatgtcgtctcccgc

SEQ ID NO: 1815615 - DNA, 25 bp, Homo sapien
gaccctcaggcacattaatcagcag

SEQ ID NO: 1815616 - DNA, 25 bp, Homo sapien
cctagatagaagcaatgagaggcga

SEQ ID NO: 1815617 - DNA, 25 bp, Homo sapien
cagaatgttacgcacaaaaccagtg

SEQ ID NO: 1815618 - DNA, 25 bp, Homo sapien
gaaagggccctcattaggcaatacc

SEQ ID NO: 1815619 - DNA, 25 bp, Homo sapien
tctagttcaggagtggtaccacccc

SEQ ID NO: 1815620 - DNA, 25 bp, Homo sapien
agacaaggtctctttgctctgtgac

SEQ ID NO: 1815621 - DNA, 25 bp, Homo sapien
gacaaggtctctttgctctgtgacc

SEQ ID NO: 1815622 - DNA, 25 bp, Homo sapien
ggctataggtgtgtgccgccatgtc

SEQ ID NO: 1815623 - DNA, 25 bp, Homo sapien
tagtgggggctataggtgtgtgccg

SEQ ID NO: 1815624 - DNA, 25 bp, Homo sapien
tagaggcctattatacagattgacc

SEQ ID NO: 1815625 - DNA, 25 bp, Homo sapien
gacctatagattgtcttgcagacag

SEQ ID NO: 1815626 - DNA, 25 bp, Homo sapien
gaagacagactccaaaagttaccca

SEQ ID NO: 1815627 - DNA, 25 bp, Homo sapien
cactggccttctagacttcatattg

SEQ ID NO: 1815628 - DNA, 25 bp, Homo sapien
caggcacacactgatgggaaggaga

SEQ ID NO: 1815629 - DNA, 25 bp, Homo sapien
tgctgagttacatggcaggcacaca

SEQ ID NO: 1815630 - DNA, 25 bp, Homo sapien
tgaagaagagaacggctggtccaca

SEQ ID NO: 1815631 - DNA, 25 bp, Homo sapien
gagttaccgaaacaagatctgtctg

SEQ ID NO: 1815632 - DNA, 25 bp, Homo sapien
caatgctaggtgcagcttatcaagc

SEQ ID NO: 1815633 - DNA, 25 bp, Homo sapien
tatcaagctatcaaagagaatctgc

SEQ ID NO: 1815634 - DNA, 25 bp, Homo sapien
cacaacttgctggagcttgtactga

SEQ ID NO: 1815635 - DNA, 25 bp, Homo sapien
agacaaaggatcctgctggcacagc

SEQ ID NO: 1815636 - DNA, 25 bp, Homo sapien
tggtgaagagctctgggccacacta

SEQ ID NO: 1815637 - DNA, 25 bp, Homo sapien
taacaattaaacctgctgagaccaa

SEQ ID NO: 1815638 - DNA, 25 bp, Homo sapien
gcagcagccagttcaatgggccact

SEQ ID NO: 1815639 - DNA, 25 bp, Homo sapien
caagcgtacttagcgaagggtatac

SEQ ID NO: 1815640 - DNA, 25 bp, Homo sapien
tcaggtaacctggaacatattttcc

SEQ ID NO: 1815641 - DNA, 25 bp, Homo sapien
gtttacccactatgtttcttcacca

SEQ ID NO: 1815642 - DNA, 25 bp, Homo sapien
gaccgcagtgatcccggttgaatgc

SEQ ID NO: 1815643 - DNA, 25 bp, Homo sapien
cagtctattctaagtgtctaatcag

SEQ ID NO: 1815644 - DNA, 25 bp, Homo sapien
tgtgagcacctacagtcaacagatt

SEQ ID NO: 1815645 - DNA, 25 bp, Homo sapien
ggcagtagacaacaatgcccttggc

SEQ ID NO: 1815646 - DNA, 25 bp, Homo sapien
ctttctgtgagacgctgtgagcacc

SEQ ID NO: 1815647 - DNA, 25 bp, Homo sapien
ctaacttctggctagcaaagcatcc

SEQ ID NO: 1815648 - DNA, 25 bp, Homo sapien
tttacagaggatcggttccaggacc

SEQ ID NO: 1815649 - DNA, 25 bp, Homo sapien
ggatgctcaactcccttatgtgaaa

SEQ ID NO: 1815650 - DNA, 25 bp, Homo sapien
ctcactatcgaaagaacaccatggg

SEQ ID NO: 1815651 - DNA, 25 bp, Homo sapien
cactgctataattactaagactggg

SEQ ID NO: 1815652 - DNA, 25 bp, Homo sapien
atttccagagctaaatcgggaaagc

SEQ ID NO: 1815653 - DNA, 25 bp, Homo sapien
caaattggccagtgaaacgtttttg

SEQ ID NO: 1815654 - DNA, 25 bp, Homo sapien
gagctaaatcgggaaagctgaggca

SEQ ID NO: 1815655 - DNA, 25 bp, Homo sapien
tttgctgccgcaaccttctccatcc

SEQ ID NO: 1815656 - DNA, 25 bp, Homo sapien
tgtgactcagaacactagggtttct

SEQ ID NO: 1815657 - DNA, 25 bp, Homo sapien
gatgaaccgtttctccgctgcattt

SEQ ID NO: 1815658 - DNA, 25 bp, Homo sapien
gactaactttatccgatgggcaacg

SEQ ID NO: 1815659 - DNA, 25 bp, Homo sapien
tgatttttgatgactgcccagctaa

SEQ ID NO: 1815660 - DNA, 25 bp, Homo sapien
tggcaaagtggaataaaggtgaccc

SEQ ID NO: 1815661 - DNA, 25 bp, Homo sapien
gaaagcctggtgctatagctgcaat

SEQ ID NO: 1815662 - DNA, 25 bp, Homo sapien
gaagaccttcgtcaagaaagcctgg

SEQ ID NO: 1815663 - DNA, 25 bp, Homo sapien
tagactccgttcaagagagaagacc

SEQ ID NO: 1815664 - DNA, 25 bp, Homo sapien
tcagcaggaaccaggcataaatctc

SEQ ID NO: 1815665 - DNA, 25 bp, Homo sapien
caatcggaatttaattaggcaccct

SEQ ID NO: 1815666 - DNA, 25 bp, Homo sapien
tgtgtggaactaaaggaagacctgg

SEQ ID NO: 1815667 - DNA, 25 bp, Homo sapien
gcagtactttgcacatacggagaat

SEQ ID NO: 1815668 - DNA, 25 bp, Homo sapien
tactccttccacatgcagggacggc

SEQ ID NO: 1815669 - DNA, 25 bp, Homo sapien
taattcttagtctgaagccgaggca

SEQ ID NO: 1815670 - DNA, 25 bp, Homo sapien
ccccatgggtgagtcagtaggcaca

SEQ ID NO: 1815671 - DNA, 25 bp, Homo sapien
gattctccgggttgcaacaggatct

SEQ ID NO: 1815672 - DNA, 25 bp, Homo sapien
catttgagagcacaataccacgcgc

SEQ ID NO: 1815673 - DNA, 25 bp, Homo sapien
tggacttggtgacagaatgccccga

SEQ ID NO: 1815674 - DNA, 25 bp, Homo sapien
tgtaatttctttgagccccactgga

SEQ ID NO: 1815675 - DNA, 25 bp, Homo sapien
gttacaaggtagcacgcccacagtg

SEQ ID NO: 1815676 - DNA, 25 bp, Homo sapien
tactagaaatatgggtgatacaggt

SEQ ID NO: 1815677 - DNA, 25 bp, Homo sapien
gtttcataaccctcataatccacgt

SEQ ID NO: 1815678 - DNA, 25 bp, Homo sapien
tacccattagaacttaagcagcact

SEQ ID NO: 1815679 - DNA, 25 bp, Homo sapien
tgatctaagaatgcacccagtctca

SEQ ID NO: 1815680 - DNA, 25 bp, Homo sapien
acgaggagaaaatgctctctgctct

SEQ ID NO: 1815681 - DNA, 25 bp, Homo sapien
caagataaaacagcttgtctaagct

SEQ ID NO: 1815682 - DNA, 25 bp, Homo sapien
gaaacaatgtacttgcacagcaggg

SEQ ID NO: 1815683 - DNA, 25 bp, Homo sapien
aaaaagtgtcagtcacttcatctga

SEQ ID NO: 1815684 - DNA, 25 bp, Homo sapien
actttctatctgtctctccatggaa

SEQ ID NO: 1815685 - DNA, 25 bp, Homo sapien
aactttctatctgtctctccatgga

SEQ ID NO: 1815686 - DNA, 25 bp, Homo sapien
tgtttttactcagagggtagcgtgc

SEQ ID NO: 1815687 - DNA, 25 bp, Homo sapien
gggtagcgtgttgctgtgtttttac

SEQ ID NO: 1815688 - DNA, 25 bp, Homo sapien
tttactcagagggtagcgtgctgtg

SEQ ID NO: 1815689 - DNA, 25 bp, Homo sapien
tgctgtgtttttactcagagggtag

SEQ ID NO: 1815690 - DNA, 25 bp, Homo sapien
caaacgtgggcctgttgtgcccaga

SEQ ID NO: 1815691 - DNA, 25 bp, Homo sapien
gcccagatgtggactacactcgcag

SEQ ID NO: 1815692 - DNA, 25 bp, Homo sapien
tatgctaattcaaacgtgggcctgt

SEQ ID NO: 1815693 - DNA, 25 bp, Homo sapien
gcagcgctagcttggcatttgggaa

SEQ ID NO: 1815694 - DNA, 25 bp, Homo sapien
cattcaggacagaaataggctcatg

SEQ ID NO: 1815695 - DNA, 25 bp, Homo sapien
agctgggtccagtttcctagagaga

SEQ ID NO: 1815696 - DNA, 25 bp, Homo sapien
taataaccagactcttcagcagcag

SEQ ID NO: 1815697 - DNA, 25 bp, Homo sapien
tgaacaaggacaggctactccaggg

SEQ ID NO: 1815698 - DNA, 25 bp, Homo sapien
acactttttcactgtacgcttggca

SEQ ID NO: 1815699 - DNA, 25 bp, Homo sapien
aaacatacctgccttggcaaaggtt

SEQ ID NO: 1815700 - DNA, 25 bp, Homo sapien
caagaatgtaatgtgtcagttccta

SEQ ID NO: 1815701 - DNA, 25 bp, Homo sapien
cgcttggcatttagaatatcaatgg

SEQ ID NO: 1815702 - DNA, 25 bp, Homo sapien
ggtaaatcttagctactgaccggct

SEQ ID NO: 1815703 - DNA, 25 bp, Homo sapien
catagtccttggcatggccccaatc

SEQ ID NO: 1815704 - DNA, 25 bp, Homo sapien
gccccaatctcgtttggcatccaga

SEQ ID NO: 1815705 - DNA, 25 bp, Homo sapien
tgaaacattccagttgtccaaggta

SEQ ID NO: 1815706 - DNA, 25 bp, Homo sapien
gaaacatagcttagttcacagggta

SEQ ID NO: 1815707 - DNA, 25 bp, Homo sapien
caaacccgatttcggcctctgggca

SEQ ID NO: 1815708 - DNA, 25 bp, Homo sapien
tatttagaaacctgcacagccatcc

SEQ ID NO: 1815709 - DNA, 25 bp, Homo sapien
aatgatatgatatggcccctgggca

SEQ ID NO: 1815710 - DNA, 25 bp, Homo sapien
aaaacaaagtcatatgttcctttat

SEQ ID NO: 1815711 - DNA, 25 bp, Homo sapien
aacaaagtcatatgttcctttatgc

SEQ ID NO: 1815712 - DNA, 25 bp, Homo sapien
aaacaaagtcatatgttcctttatg

SEQ ID NO: 1815713 - DNA, 25 bp, Homo sapien
tatattagttcttcctattaccaac

SEQ ID NO: 1815714 - DNA, 25 bp, Homo sapien
tgagacattccgtttccaacttgtc

SEQ ID NO: 1815715 - DNA, 25 bp, Homo sapien
tgcctttaagcaaactaatggtctt

SEQ ID NO: 1815716 - DNA, 25 bp, Homo sapien
cttcttgataacaggcaagagaagt

SEQ ID NO: 1815717 - DNA, 25 bp, Homo sapien
tcatcgaaagacggaaatcttcaac

SEQ ID NO: 1815718 - DNA, 25 bp, Homo sapien
tcgaaagacggaaatcttcaactga

SEQ ID NO: 1815719 - DNA, 25 bp, Homo sapien
aagacggaaatcttcaactgatctc

SEQ ID NO: 1815720 - DNA, 25 bp, Homo sapien
gaaagacggaaatcttcaactgatc

SEQ ID NO: 1815721 - DNA, 25 bp, Homo sapien
gaagcaagtctatagcacaagtgcc

SEQ ID NO: 1815722 - DNA, 25 bp, Homo sapien
tgactgagggatgcaaagtcgcaga

SEQ ID NO: 1815723 - DNA, 25 bp, Homo sapien
gaaagcacctggttaatgtctgtga

SEQ ID NO: 1815724 - DNA, 25 bp, Homo sapien
tgctttcaccaacggagtgactgga

SEQ ID NO: 1815725 - DNA, 25 bp, Homo sapien
gaatgtttttccctatcctgacctg

SEQ ID NO: 1815726 - DNA, 25 bp, Homo sapien
caggcaaccacagctaggatcttcc

SEQ ID NO: 1815727 - DNA, 25 bp, Homo sapien
gcagggattaccacgactgagcaga

SEQ ID NO: 1815728 - DNA, 25 bp, Homo sapien
gtgggcgccctcataccacatgctg

SEQ ID NO: 1815729 - DNA, 25 bp, Homo sapien
atacaccaaatagacatgcaacttg

SEQ ID NO: 1815730 - DNA, 25 bp, Homo sapien
gttgttgttgttcaagtctgaaatt

SEQ ID NO: 1815731 - DNA, 25 bp, Homo sapien
tagtacatacaccaaatagacatgc

SEQ ID NO: 1815732 - DNA, 25 bp, Homo sapien
catcataattagatacagataggaa

SEQ ID NO: 1815733 - DNA, 25 bp, Homo sapien
tcacggaagttcaccacaatccaat

SEQ ID NO: 1815734 - DNA, 25 bp, Homo sapien
gttcactgcaaagagattatacgcc

SEQ ID NO: 1815735 - DNA, 25 bp, Homo sapien
caatccaataggcatagagttttgc

SEQ ID NO: 1815736 - DNA, 25 bp, Homo sapien
ctcatgattgaagagaatgccgttc

SEQ ID NO: 1815737 - DNA, 25 bp, Homo sapien
cacagataacgccacacatgtgctc

SEQ ID NO: 1815738 - DNA, 25 bp, Homo sapien
cacacatgtgctccggtgtgcacgc

SEQ ID NO: 1815739 - DNA, 25 bp, Homo sapien
acccacagataacgccacacatgtg

SEQ ID NO: 1815740 - DNA, 25 bp, Homo sapien
gctccggtgtgcacgcatgttctca

SEQ ID NO: 1815741 - DNA, 25 bp, Homo sapien
tccgcagtgtactcagcgaggtcaa

SEQ ID NO: 1815742 - DNA, 25 bp, Homo sapien
ttcacagagttgataaggccacaag

SEQ ID NO: 1815743 - DNA, 25 bp, Homo sapien
tagaagtcgtagagtgccaactccg

SEQ ID NO: 1815744 - DNA, 25 bp, Homo sapien
ttgaggcttggtagaacttcacaga

SEQ ID NO: 1815745 - DNA, 25 bp, Homo sapien
ctggaaaaagcaggcggagacaggg

SEQ ID NO: 1815746 - DNA, 25 bp, Homo sapien
cgtgagggtctcataaaagccagat

SEQ ID NO: 1815747 - DNA, 25 bp, Homo sapien
ccgtgagggtctcataaaagccaga

SEQ ID NO: 1815748 - DNA, 25 bp, Homo sapien
tccgtgagggtctcataaaagccag

SEQ ID NO: 1815749 - DNA, 25 bp, Homo sapien
cctccgtgagggtctcataaaagcc

SEQ ID NO: 1815750 - DNA, 25 bp, Homo sapien
actctgatgagaggcaaggctgcac

SEQ ID NO: 1815751 - DNA, 25 bp, Homo sapien
ctgctcccagtgactctgatgagag

SEQ ID NO: 1815752 - DNA, 25 bp, Homo sapien
cagtgactctgatgagaggcaaggc

SEQ ID NO: 1815753 - DNA, 25 bp, Homo sapien
ctcccagtgactctgatgagaggca

SEQ ID NO: 1815754 - DNA, 25 bp, Homo sapien
taaaatgttgagttctgcaccccgc

SEQ ID NO: 1815755 - DNA, 25 bp, Homo sapien
tactccaaaacgaagaacagctgcc

SEQ ID NO: 1815756 - DNA, 25 bp, Homo sapien
taactccgtggtcacaattctttgc

SEQ ID NO: 1815757 - DNA, 25 bp, Homo sapien
ctgagaacctctggtgccattcctg

SEQ ID NO: 1815758 - DNA, 25 bp, Homo sapien
ctggtgatctctctggccttcgctg

SEQ ID NO: 1815759 - DNA, 25 bp, Homo sapien
ctcactaacctggtgatctctctgg

SEQ ID NO: 1815760 - DNA, 25 bp, Homo sapien
gatctctctggccttcgctgttcat

SEQ ID NO: 1815761 - DNA, 25 bp, Homo sapien
tgtctaaaatctcctcactaacctg

SEQ ID NO: 1815762 - DNA, 25 bp, Homo sapien
tggctgtacaccacagccagggaga

SEQ ID NO: 1815763 - DNA, 25 bp, Homo sapien
cctgcaagccgtaagcagcaacctg

SEQ ID NO: 1815764 - DNA, 25 bp, Homo sapien
taagcagcaacctggctgtacacca

SEQ ID NO: 1815765 - DNA, 25 bp, Homo sapien
cctaaaaacctgcaagccgtaagca

SEQ ID NO: 1815766 - DNA, 25 bp, Homo sapien
tcactgggagtgcatcttctgggta

SEQ ID NO: 1815767 - DNA, 25 bp, Homo sapien
agccaacaacaccacagcttacagt

SEQ ID NO: 1815768 - DNA, 25 bp, Homo sapien
tctataactatggtaccaagggaca

SEQ ID NO: 1815769 - DNA, 25 bp, Homo sapien
aacaccacagcttacagtgtccagc

SEQ ID NO: 1815770 - DNA, 25 bp, Homo sapien
cattagactgacaatttgaaagtac

SEQ ID NO: 1815771 - DNA, 25 bp, Homo sapien
tggctctagggcaagcccttccatt

SEQ ID NO: 1815772 - DNA, 25 bp, Homo sapien
agtacttattggtcatacaacgcct

SEQ ID NO: 1815773 - DNA, 25 bp, Homo sapien
ttattggtcatacaacgcctacagc

SEQ ID NO: 1815774 - DNA, 25 bp, Homo sapien
cccaacgaaccctgagcaggataaa

SEQ ID NO: 1815775 - DNA, 25 bp, Homo sapien
gataaagactgtaatccttctgatc

SEQ ID NO: 1815776 - DNA, 25 bp, Homo sapien
aagactgtaatccttctgatccaag

SEQ ID NO: 1815777 - DNA, 25 bp, Homo sapien
tctgatccaagaaacccaacgaacc

SEQ ID NO: 1815778 - DNA, 25 bp, Homo sapien
ccagaggaaggagcgaacacatttt

SEQ ID NO: 1815779 - DNA, 25 bp, Homo sapien
tttggcaggagtgagaaacaacagc

SEQ ID NO: 1815780 - DNA, 25 bp, Homo sapien
gagaaattcttgcaagtccaggaga

SEQ ID NO: 1815781 - DNA, 25 bp, Homo sapien
ggcagccagatatagagagattcac

SEQ ID NO: 1815782 - DNA, 25 bp, Homo sapien
ggtttgtcaacctgccctgtctctg

SEQ ID NO: 1815783 - DNA, 25 bp, Homo sapien
gctatttcttaacacctcaactaag

SEQ ID NO: 1815784 - DNA, 25 bp, Homo sapien
tcaccacctatcagtaatccttggg

SEQ ID NO: 1815785 - DNA, 25 bp, Homo sapien
taattgtggacatcaccttttggct

SEQ ID NO: 1815786 - DNA, 25 bp, Homo sapien
cataagatcctagttgctttcctga

SEQ ID NO: 1815787 - DNA, 25 bp, Homo sapien
ctcataagatcctagttgctttcct

SEQ ID NO: 1815788 - DNA, 25 bp, Homo sapien
caccttcataagctggatggagcta

SEQ ID NO: 1815789 - DNA, 25 bp, Homo sapien
cagcagtctcaacaccttcataagc

SEQ ID NO: 1815790 - DNA, 25 bp, Homo sapien
tagatgtcttcttcacaagaaacat

SEQ ID NO: 1815791 - DNA, 25 bp, Homo sapien
gtaacctttatagatgtcttcttca

SEQ ID NO: 1815792 - DNA, 25 bp, Homo sapien
aatgtaacctttatagatgtcttct

SEQ ID NO: 1815793 - DNA, 25 bp, Homo sapien
cctttatagatgtcttcttcacaag

SEQ ID NO: 1815794 - DNA, 25 bp, Homo sapien
aaagaagcaagttgtgaaggcgtct

SEQ ID NO: 1815795 - DNA, 25 bp, Homo sapien
cagactgcatgtcaaacaaggtgag

SEQ ID NO: 1815796 - DNA, 25 bp, Homo sapien
caaggtgagggaacacgtcactgag

SEQ ID NO: 1815797 - DNA, 25 bp, Homo sapien
tatccattctaggaggtgctacaca

SEQ ID NO: 1815798 - DNA, 25 bp, Homo sapien
catttctgttccttctgcagttctt

SEQ ID NO: 1815799 - DNA, 25 bp, Homo sapien
tttccatttctgttccttctgcagt

SEQ ID NO: 1815800 - DNA, 25 bp, Homo sapien
tccatttctgttccttctgcagttc

SEQ ID NO: 1815801 - DNA, 25 bp, Homo sapien
ctgcaactcctacttttccatttct

SEQ ID NO: 1815802 - DNA, 25 bp, Homo sapien
caatgtcccttccctagaaatacca

SEQ ID NO: 1815803 - DNA, 25 bp, Homo sapien
tgtttaggttagacagtcagtgcac

SEQ ID NO: 1815804 - DNA, 25 bp, Homo sapien
tagaaataccaactaatggttctgt

SEQ ID NO: 1815805 - DNA, 25 bp, Homo sapien
cagtcagtgcacagggaaaattaac

SEQ ID NO: 1815806 - DNA, 25 bp, Homo sapien
tgccgaatgcaccagtgcgccttgg

SEQ ID NO: 1815807 - DNA, 25 bp, Homo sapien
accagtgcgccttggcaacagctct

SEQ ID NO: 1815808 - DNA, 25 bp, Homo sapien
cgctttgtgccgaatgcaccagtgc

SEQ ID NO: 1815809 - DNA, 25 bp, Homo sapien
ctctgggccccggagaggcaccttt

SEQ ID NO: 1815810 - DNA, 25 bp, Homo sapien
atattttcagagcacatgtgatatt

SEQ ID NO: 1815811 - DNA, 25 bp, Homo sapien
cacttaccagatgcataaaaaagga

SEQ ID NO: 1815812 - DNA, 25 bp, Homo sapien
ccacttaccagatgcataaaaaagg

SEQ ID NO: 1815813 - DNA, 25 bp, Homo sapien
catattttcagagcacatgtgatat

SEQ ID NO: 1815814 - DNA, 25 bp, Homo sapien
tttatacatatggtagaattcggcc

SEQ ID NO: 1815815 - DNA, 25 bp, Homo sapien
gaattcggccaagaatcaatctgct

SEQ ID NO: 1815816 - DNA, 25 bp, Homo sapien
tgatagtctctgatgaacctttgta

SEQ ID NO: 1815817 - DNA, 25 bp, Homo sapien
cagtctgttagtgtgtagctgttca

SEQ ID NO: 1815818 - DNA, 25 bp, Homo sapien
acagtatgggtttgatctggagccc

SEQ ID NO: 1815819 - DNA, 25 bp, Homo sapien
tggtgtaacaaacccaatgcccagc

SEQ ID NO: 1815820 - DNA, 25 bp, Homo sapien
tccaggagcgtgtaagcaagcagaa

SEQ ID NO: 1815821 - DNA, 25 bp, Homo sapien
caaaaagatatcaacgaaggtggcc

SEQ ID NO: 1815822 - DNA, 25 bp, Homo sapien
tagccacaataggaaataccctcat

SEQ ID NO: 1815823 - DNA, 25 bp, Homo sapien
cactgccaaaaagttcaggcgattt

SEQ ID NO: 1815824 - DNA, 25 bp, Homo sapien
gttcaggcgatttagccacaatagg

SEQ ID NO: 1815825 - DNA, 25 bp, Homo sapien
atttagccacaataggaaataccct

SEQ ID NO: 1815826 - DNA, 25 bp, Homo sapien
tcttacatgatggaacactatttct

SEQ ID NO: 1815827 - DNA, 25 bp, Homo sapien
cgttcatcccagctatacaaacaat

SEQ ID NO: 1815828 - DNA, 25 bp, Homo sapien
tatatgcatagtaataacattcaag

SEQ ID NO: 1815829 - DNA, 25 bp, Homo sapien
taaaagacacatgatacgtgttccc

SEQ ID NO: 1815830 - DNA, 25 bp, Homo sapien
ggcagtcgtctgttccagtagtgga

SEQ ID NO: 1815831 - DNA, 25 bp, Homo sapien
gatatgcacccctgatttgataacc

SEQ ID NO: 1815832 - DNA, 25 bp, Homo sapien
tgaagttttagagtgtgtcccagga

SEQ ID NO: 1815833 - DNA, 25 bp, Homo sapien
tgataaccttgcctggaccatagtt

SEQ ID NO: 1815834 - DNA, 25 bp, Homo sapien
tttattccaagaaccaatttcatct

SEQ ID NO: 1815835 - DNA, 25 bp, Homo sapien
tattccaagaaccaatttcatcttc

SEQ ID NO: 1815836 - DNA, 25 bp, Homo sapien
attccaagaaccaatttcatcttcg

SEQ ID NO: 1815837 - DNA, 25 bp, Homo sapien
ttccaagaaccaatttcatcttcgc

SEQ ID NO: 1815838 - DNA, 25 bp, Homo sapien
ctgctcagctcatctcgaatgctca

SEQ ID NO: 1815839 - DNA, 25 bp, Homo sapien
tctgctcagctcatctcgaatgctc

SEQ ID NO: 1815840 - DNA, 25 bp, Homo sapien
tgctcagctcatctcgaatgctcat

SEQ ID NO: 1815841 - DNA, 25 bp, Homo sapien
tgtcagtgagatcgccatagtgcaa

SEQ ID NO: 1815842 - DNA, 25 bp, Homo sapien
tgagatcgccatagtgcaacttcat

SEQ ID NO: 1815843 - DNA, 25 bp, Homo sapien
caaggcaggtactgtcagtgagatc

SEQ ID NO: 1815844 - DNA, 25 bp, Homo sapien
gcaggtactgtcagtgagatcgcca

SEQ ID NO: 1815845 - DNA, 25 bp, Homo sapien
agggctccaggtggttgtaagatgt

SEQ ID NO: 1815846 - DNA, 25 bp, Homo sapien
ggctccaggtggttgtaagatgtgt

SEQ ID NO: 1815847 - DNA, 25 bp, Homo sapien
ttagggctccaggtggttgtaagat

SEQ ID NO: 1815848 - DNA, 25 bp, Homo sapien
gctccaggtggttgtaagatgtgtt

SEQ ID NO: 1815849 - DNA, 25 bp, Homo sapien
tataaaaagcgggtcggtgcactgc

SEQ ID NO: 1815850 - DNA, 25 bp, Homo sapien
gtcggtgcactgccagtgtggaact

SEQ ID NO: 1815851 - DNA, 25 bp, Homo sapien
ctgaatataaaaagcgggtcggtgc

SEQ ID NO: 1815852 - DNA, 25 bp, Homo sapien
aaaagcgggtcggtgcactgccagt

SEQ ID NO: 1815853 - DNA, 25 bp, Homo sapien
tgatcaaaggcatgccctttcttgg

SEQ ID NO: 1815854 - DNA, 25 bp, Homo sapien
ctgcagagcggtgatcaaaggcatg

SEQ ID NO: 1815855 - DNA, 25 bp, Homo sapien
ccttctaacagccaaaccatcatga

SEQ ID NO: 1815856 - DNA, 25 bp, Homo sapien
gtctctccaagccatctacttcata

SEQ ID NO: 1815857 - DNA, 25 bp, Homo sapien
ttatacagatgctcaattcgacccg

SEQ ID NO: 1815858 - DNA, 25 bp, Homo sapien
tggaccgccgtacaattccatggac

SEQ ID NO: 1815859 - DNA, 25 bp, Homo sapien
tcgacccgtattaaatgaactggac

SEQ ID NO: 1815860 - DNA, 25 bp, Homo sapien
ccttcaatgtgagcctggggattct

SEQ ID NO: 1815861 - DNA, 25 bp, Homo sapien
tgcatgctcccctccaggtgactgt

SEQ ID NO: 1815862 - DNA, 25 bp, Homo sapien
gctcccctccaggtgactgtggcct

SEQ ID NO: 1815863 - DNA, 25 bp, Homo sapien
gtgactgtggcctctccacactgcc

SEQ ID NO: 1815864 - DNA, 25 bp, Homo sapien
ggccctgctctcctgcatgctcccc

SEQ ID NO: 1815865 - DNA, 25 bp, Homo sapien
ggagaaatggtgaagacaacgacaa

SEQ ID NO: 1815866 - DNA, 25 bp, Homo sapien
gttgtacatacttagcacatcaaaa

SEQ ID NO: 1815867 - DNA, 25 bp, Homo sapien
aagtttgccaacaatcagcttggtt

SEQ ID NO: 1815868 - DNA, 25 bp, Homo sapien
taagtgacttcatggtgagtaggac

SEQ ID NO: 1815869 - DNA, 25 bp, Homo sapien
atgtggccgctgcatgcgagcaacc

SEQ ID NO: 1815870 - DNA, 25 bp, Homo sapien
accccaccagcctgcgcccgcttcc

SEQ ID NO: 1815871 - DNA, 25 bp, Homo sapien
ccagcctgcgcccgcttcccattga

SEQ ID NO: 1815872 - DNA, 25 bp, Homo sapien
tgtggccgctgcatgcgagcaaccc

SEQ ID NO: 1815873 - DNA, 25 bp, Homo sapien
caggaactcagccaggtaggaacca

SEQ ID NO: 1815874 - DNA, 25 bp, Homo sapien
cagcaggaactcagccaggtaggaa

SEQ ID NO: 1815875 - DNA, 25 bp, Homo sapien
ctcatagcctttctccagcaggaac

SEQ ID NO: 1815876 - DNA, 25 bp, Homo sapien
ggaactcagccaggtaggaaccatc

SEQ ID NO: 1815877 - DNA, 25 bp, Homo sapien
ccaggactgaaccctgtcaataagg

SEQ ID NO: 1815878 - DNA, 25 bp, Homo sapien
aggactgaaccctgtcaataaggtc

SEQ ID NO: 1815879 - DNA, 25 bp, Homo sapien
accaggactgaaccctgtcaataag

SEQ ID NO: 1815880 - DNA, 25 bp, Homo sapien
caggactgaaccctgtcaataaggt

SEQ ID NO: 1815881 - DNA, 25 bp, Homo sapien
ttgccaggcctctcgagtgataggg

SEQ ID NO: 1815882 - DNA, 25 bp, Homo sapien
aaccagtagtggcaccggcttcctc

SEQ ID NO: 1815883 - DNA, 25 bp, Homo sapien
gaacattctgaaccagtagtggcac

SEQ ID NO: 1815884 - DNA, 25 bp, Homo sapien
tttccaaccacactggaacattctg

SEQ ID NO: 1815885 - DNA, 25 bp, Homo sapien
cttctatactggatggcacagtgcc

SEQ ID NO: 1815886 - DNA, 25 bp, Homo sapien
tcttctatactggatggcacagtgc

SEQ ID NO: 1815887 - DNA, 25 bp, Homo sapien
agaaagcataaatcccttgttcaag

SEQ ID NO: 1815888 - DNA, 25 bp, Homo sapien
tatcctcatttttccggatcagaaa

SEQ ID NO: 1815889 - DNA, 25 bp, Homo sapien
ccttacactatacagcaaagtattt

SEQ ID NO: 1815890 - DNA, 25 bp, Homo sapien
cctggtgaggtagctgatattatcc

SEQ ID NO: 1815891 - DNA, 25 bp, Homo sapien
taaaaccgtgaacgctgacggagag

SEQ ID NO: 1815892 - DNA, 25 bp, Homo sapien
ctcctgaatttcagccttcataaaa

SEQ ID NO: 1815893 - DNA, 25 bp, Homo sapien
gaacgctgacggagagttggaaaca

SEQ ID NO: 1815894 - DNA, 25 bp, Homo sapien
ttcagccttcataaaaccgtgaacg

SEQ ID NO: 1815895 - DNA, 25 bp, Homo sapien
gcaggtcccccattttgggaagcca

SEQ ID NO: 1815896 - DNA, 25 bp, Homo sapien
gggaagccacaggatgtcaaggaaa

SEQ ID NO: 1815897 - DNA, 25 bp, Homo sapien
atctctgaccacaaacggccggcag

SEQ ID NO: 1815898 - DNA, 25 bp, Homo sapien
gatgtcaaggaaaggtgaccaggta

SEQ ID NO: 1815899 - DNA, 25 bp, Homo sapien
cagattaacggtatttggaactgac

SEQ ID NO: 1815900 - DNA, 25 bp, Homo sapien
tgaaatcaccaacttctgatcaagg

SEQ ID NO: 1815901 - DNA, 25 bp, Homo sapien
tggaactgactagaatgacaatgaa

SEQ ID NO: 1815902 - DNA, 25 bp, Homo sapien
ggttcatgactctaatcctggcatt

SEQ ID NO: 1815903 - DNA, 25 bp, Homo sapien
accattctttcatgttcaactccca

SEQ ID NO: 1815904 - DNA, 25 bp, Homo sapien
ccattctttcatgttcaactcccac

SEQ ID NO: 1815905 - DNA, 25 bp, Homo sapien
tccttcctcatgaaagcaccattct

SEQ ID NO: 1815906 - DNA, 25 bp, Homo sapien
tgagatcatcatcctaaggactcag

SEQ ID NO: 1815907 - DNA, 25 bp, Homo sapien
tggcccattcggtctgctataacaa

SEQ ID NO: 1815908 - DNA, 25 bp, Homo sapien
tacccgaacagacaagcaaatggca

SEQ ID NO: 1815909 - DNA, 25 bp, Homo sapien
cctatgtatctctaggaagcagtca

SEQ ID NO: 1815910 - DNA, 25 bp, Homo sapien
ttgctgatacctagtttatccaaaa

SEQ ID NO: 1815911 - DNA, 25 bp, Homo sapien
tgctgatacctagtttatccaaaaa

SEQ ID NO: 1815912 - DNA, 25 bp, Homo sapien
gctgatacctagtttatccaaaaag

SEQ ID NO: 1815913 - DNA, 25 bp, Homo sapien
gaggcaatggtaacgctcccaacaa

SEQ ID NO: 1815914 - DNA, 25 bp, Homo sapien
cagaggcaatggtaacgctcccaac

SEQ ID NO: 1815915 - DNA, 25 bp, Homo sapien
caatggtaacgctcccaacaaactg

SEQ ID NO: 1815916 - DNA, 25 bp, Homo sapien
aaccagaggcaatggtaacgctccc

SEQ ID NO: 1815917 - DNA, 25 bp, Homo sapien
tggttaaagccaagttatcagtgga

SEQ ID NO: 1815918 - DNA, 25 bp, Homo sapien
tgtcgctggatattgtcctaaaccc

SEQ ID NO: 1815919 - DNA, 25 bp, Homo sapien
taagttcaatcctgtagcaaatccc

SEQ ID NO: 1815920 - DNA, 25 bp, Homo sapien
aaagctgaagcaatcaacccagagc

SEQ ID NO: 1815921 - DNA, 25 bp, Homo sapien
aatgcagcccttgcgatatgcagag

SEQ ID NO: 1815922 - DNA, 25 bp, Homo sapien
aaagaagttcttatgctggagccac

SEQ ID NO: 1815923 - DNA, 25 bp, Homo sapien
aatgcctacattcttacaagtcctg

SEQ ID NO: 1815924 - DNA, 25 bp, Homo sapien
tgcagagatgttaccaaagaagttc

SEQ ID NO: 1815925 - DNA, 25 bp, Homo sapien
ttccaggcatatgaaaaacccagtc

SEQ ID NO: 1815926 - DNA, 25 bp, Homo sapien
tgtaaggttaacatggccacaggca

SEQ ID NO: 1815927 - DNA, 25 bp, Homo sapien
gaatgaatactacccctaagagcaa

SEQ ID NO: 1815928 - DNA, 25 bp, Homo sapien
gactaactggttgtccatgccacaa

SEQ ID NO: 1815929 - DNA, 25 bp, Homo sapien
ctatgtttagcattatcaaacgtgc

SEQ ID NO: 1815930 - DNA, 25 bp, Homo sapien
tgtttagcattatcaaacgtgcatt

SEQ ID NO: 1815931 - DNA, 25 bp, Homo sapien
tagcattatcaaacgtgcatttata

SEQ ID NO: 1815932 - DNA, 25 bp, Homo sapien
tatcaaacgtgcatttataaaacct

SEQ ID NO: 1815933 - DNA, 25 bp, Homo sapien
acacgtacttgacgtctggggccat

SEQ ID NO: 1815934 - DNA, 25 bp, Homo sapien
cacgtacttgacgtctggggccatg

SEQ ID NO: 1815935 - DNA, 25 bp, Homo sapien
cgtacttgacgtctggggccatgtc

SEQ ID NO: 1815936 - DNA, 25 bp, Homo sapien
tacttgacgtctggggccatgtcta

SEQ ID NO: 1815937 - DNA, 25 bp, Homo sapien
tgtgcagctcgacatggattctgac

SEQ ID NO: 1815938 - DNA, 25 bp, Homo sapien
ccaaacccatgttttgcaagggaat

SEQ ID NO: 1815939 - DNA, 25 bp, Homo sapien
tactccctttctaggtggcttagga

SEQ ID NO: 1815940 - DNA, 25 bp, Homo sapien
taaaccataagagcgtgtgtcatcc

SEQ ID NO: 1815941 - DNA, 25 bp, Homo sapien
gaatacccatttgcatctttatatt

SEQ ID NO: 1815942 - DNA, 25 bp, Homo sapien
attttaaattagctgaatatattac

SEQ ID NO: 1815943 - DNA, 25 bp, Homo sapien
tacccatttgcatctttatatttta

SEQ ID NO: 1815944 - DNA, 25 bp, Homo sapien
ctgaatacccatttgcatctttata

SEQ ID NO: 1815945 - DNA, 25 bp, Homo sapien
tacacaggatcctctaaaccagtgc

SEQ ID NO: 1815946 - DNA, 25 bp, Homo sapien
gcaccgaccacaccagttaaaagac

SEQ ID NO: 1815947 - DNA, 25 bp, Homo sapien
atcatgaatattgctcctgagcagc

SEQ ID NO: 1815948 - DNA, 25 bp, Homo sapien
tcctgggcaccaacttaaaccagaa

SEQ ID NO: 1815949 - DNA, 25 bp, Homo sapien
tggtaagacacagcggtcggatccc

SEQ ID NO: 1815950 - DNA, 25 bp, Homo sapien
gatttcaagtatgagccgctgcctc

SEQ ID NO: 1815951 - DNA, 25 bp, Homo sapien
ggcaagcgactggaacatgatagac

SEQ ID NO: 1815952 - DNA, 25 bp, Homo sapien
tatgtgggcacgattacttcatgac

SEQ ID NO: 1815953 - DNA, 25 bp, Homo sapien
gttagcaggtaagcgccccttgagc

SEQ ID NO: 1815954 - DNA, 25 bp, Homo sapien
tcttgcttcccaaacgttagcaggt

SEQ ID NO: 1815955 - DNA, 25 bp, Homo sapien
gagccgagacacatcaagaagacct

SEQ ID NO: 1815956 - DNA, 25 bp, Homo sapien
tgataggggacgaaaccagcaaagc

SEQ ID NO: 1815957 - DNA, 25 bp, Homo sapien
actaggagctgcgaagcacgacatg

SEQ ID NO: 1815958 - DNA, 25 bp, Homo sapien
tccctttccggcactaggagctgcg

SEQ ID NO: 1815959 - DNA, 25 bp, Homo sapien
cgcaagttcattgatcaccggttct

SEQ ID NO: 1815960 - DNA, 25 bp, Homo sapien
cattgatcaccggttcttttccctt

SEQ ID NO: 1815961 - DNA, 25 bp, Homo sapien
cgcagcccacgagtagcggcgcgta

SEQ ID NO: 1815962 - DNA, 25 bp, Homo sapien
gctgttcctggagagaccgcagccc

SEQ ID NO: 1815963 - DNA, 25 bp, Homo sapien
cagagaaagaccagaggcgctcgat

SEQ ID NO: 1815964 - DNA, 25 bp, Homo sapien
tcctgcccgggtgtgagcgcgacat

SEQ ID NO: 1815965 - DNA, 25 bp, Homo sapien
gatgagcgccacgttcctgggcttg

SEQ ID NO: 1815966 - DNA, 25 bp, Homo sapien
tgataccggtgatgagcgccacgtt

SEQ ID NO: 1815967 - DNA, 25 bp, Homo sapien
ggcagcgtgccggtgcgtgtgccat

SEQ ID NO: 1815968 - DNA, 25 bp, Homo sapien
ctggcctgtgataccggtgatgagc

SEQ ID NO: 1815969 - DNA, 25 bp, Homo sapien
ggcgggcgtgcggtcggcggcaggg

SEQ ID NO: 1815970 - DNA, 25 bp, Homo sapien
gtgcagcacgaagcgcctctccagg

SEQ ID NO: 1815971 - DNA, 25 bp, Homo sapien
tgccggcaggaacgcgggggtgtgc

SEQ ID NO: 1815972 - DNA, 25 bp, Homo sapien
tgcggtcggcggcagggcggagcgc

SEQ ID NO: 1815973 - DNA, 25 bp, Homo sapien
ctgcgggcagggagggagagcgcac

SEQ ID NO: 1815974 - DNA, 25 bp, Homo sapien
tgcggcctgactggcgcagcgtcat

SEQ ID NO: 1815975 - DNA, 25 bp, Homo sapien
aaggcgggcccgacgggccaagcag

SEQ ID NO: 1815976 - DNA, 25 bp, Homo sapien
gggcgcacgggaggccgtgcaggga

SEQ ID NO: 1815977 - DNA, 25 bp, Homo sapien
gcgaccggccgccacagtctgacag

SEQ ID NO: 1815978 - DNA, 25 bp, Homo sapien
aaagagtggcaagagggatcaccct

SEQ ID NO: 1815979 - DNA, 25 bp, Homo sapien
gggataaacccctgttgatcatggt

SEQ ID NO: 1815980 - DNA, 25 bp, Homo sapien
tgagccagccttatgcatgtgggat

SEQ ID NO: 1815981 - DNA, 25 bp, Homo sapien
gctaatcttagccagaaagcttcta

SEQ ID NO: 1815982 - DNA, 25 bp, Homo sapien
cattcccacatgatttaacacatag

SEQ ID NO: 1815983 - DNA, 25 bp, Homo sapien
agaagtagtatagagccagatggag

SEQ ID NO: 1815984 - DNA, 25 bp, Homo sapien
tcagctgatacaaaggagacataga

SEQ ID NO: 1815985 - DNA, 25 bp, Homo sapien
gaagatagtaagcagtctcagctga

SEQ ID NO: 1815986 - DNA, 25 bp, Homo sapien
agttgtctggctcggtgggtcccac

SEQ ID NO: 1815987 - DNA, 25 bp, Homo sapien
ggaacaccaatgagacagaaccatt

SEQ ID NO: 1815988 - DNA, 25 bp, Homo sapien
ctgaggtcaacctgggatgcttgag

SEQ ID NO: 1815989 - DNA, 25 bp, Homo sapien
gtctgaggtcaacctgggatgcttg

SEQ ID NO: 1815990 - DNA, 25 bp, Homo sapien
agcaaggccactgtggccggactgc

SEQ ID NO: 1815991 - DNA, 25 bp, Homo sapien
cactgtggccggactgcctcactag

SEQ ID NO: 1815992 - DNA, 25 bp, Homo sapien
gccactgtggccggactgcctcact

SEQ ID NO: 1815993 - DNA, 25 bp, Homo sapien
aaggccactgtggccggactgcctc

SEQ ID NO: 1815994 - DNA, 25 bp, Homo sapien
gacttatttcaccaagcaaaggaga

SEQ ID NO: 1815995 - DNA, 25 bp, Homo sapien
atcatgtcctgtggctgatctttca

SEQ ID NO: 1815996 - DNA, 25 bp, Homo sapien
gaattcattaacgtaagacacaccc

SEQ ID NO: 1815997 - DNA, 25 bp, Homo sapien
ttctctcctcccaacgtggttctta

SEQ ID NO: 1815998 - DNA, 25 bp, Homo sapien
ttaaagataatcactactatgtttt

SEQ ID NO: 1815999 - DNA, 25 bp, Homo sapien
taaacaatttagaaacatgagtaga

SEQ ID NO: 1816000 - DNA, 25 bp, Homo sapien
gctgattataagtggaatgtattcc

SEQ ID NO: 1816001 - DNA, 25 bp, Homo sapien
gtgcatgctaccctaggaagcccac

SEQ ID NO: 1816002 - DNA, 25 bp, Homo sapien
tctattcgaatatttggccgccacc

SEQ ID NO: 1816003 - DNA, 25 bp, Homo sapien
tatggacgagttagaaagaggtagt

SEQ ID NO: 1816004 - DNA, 25 bp, Homo sapien
caaaatgaagatagtctattcgaat

SEQ ID NO: 1816005 - DNA, 25 bp, Homo sapien
tgtgatgattatggacgagttagaa

SEQ ID NO: 1816006 - DNA, 25 bp, Homo sapien
caacttctcgttgatttgtaggccg

SEQ ID NO: 1816007 - DNA, 25 bp, Homo sapien
ttgtaggccgtatgacgccccaggt

SEQ ID NO: 1816008 - DNA, 25 bp, Homo sapien
tgcagaaaaaccagttggcaacttc

SEQ ID NO: 1816009 - DNA, 25 bp, Homo sapien
ggagagtgtctcctgcatcgtggaa

SEQ ID NO: 1816010 - DNA, 25 bp, Homo sapien
gaaggcctgtcttcagcaccaacgt

SEQ ID NO: 1816011 - DNA, 25 bp, Homo sapien
taaacggttggcagaaatgccatgc

SEQ ID NO: 1816012 - DNA, 25 bp, Homo sapien
tctggccttgccaataaagaagtaa

SEQ ID NO: 1816013 - DNA, 25 bp, Homo sapien
ggctgcaggcttttgtttagaagtt

SEQ ID NO: 1816014 - DNA, 25 bp, Homo sapien
tgtacatctgtgagacttaacagct

SEQ ID NO: 1816015 - DNA, 25 bp, Homo sapien
tgtactcacattaaagattactgct

SEQ ID NO: 1816016 - DNA, 25 bp, Homo sapien
catttgctcaatgccagcactgtct

SEQ ID NO: 1816017 - DNA, 25 bp, Homo sapien
taaatagaacctaatgggtgcaagg

SEQ ID NO: 1816018 - DNA, 25 bp, Homo sapien
gctcataggtgtcaaggtcttcgtg

SEQ ID NO: 1816019 - DNA, 25 bp, Homo sapien
tgtcaaggtcttcgtgcacctgaac

SEQ ID NO: 1816020 - DNA, 25 bp, Homo sapien
ggtgtcaaggtcttcgtgcacctga

SEQ ID NO: 1816021 - DNA, 25 bp, Homo sapien
cataggtgtcaaggtcttcgtgcac

SEQ ID NO: 1816022 - DNA, 25 bp, Homo sapien
ggaacgaagtctgtttgtggaaaca

SEQ ID NO: 1816023 - DNA, 25 bp, Homo sapien
attctgctgcccttcgcaaggcttc

SEQ ID NO: 1816024 - DNA, 25 bp, Homo sapien
tcttgtttaccagatggaacgaagt

SEQ ID NO: 1816025 - DNA, 25 bp, Homo sapien
tgctgcccttcgcaaggcttcactt

SEQ ID NO: 1816026 - DNA, 25 bp, Homo sapien
tcacaggatgaagcttaccaaaagg

SEQ ID NO: 1816027 - DNA, 25 bp, Homo sapien
gaattagctcgacttgagtcacagg

SEQ ID NO: 1816028 - DNA, 25 bp, Homo sapien
agtcacaggatgaagcttaccaaaa

SEQ ID NO: 1816029 - DNA, 25 bp, Homo sapien
gtacaatatctgctccgttcagaat

SEQ ID NO: 1816030 - DNA, 25 bp, Homo sapien
taacaggttctcttaaaagactatc

SEQ ID NO: 1816031 - DNA, 25 bp, Homo sapien
tctggagacagctttttaagagcct

SEQ ID NO: 1816032 - DNA, 25 bp, Homo sapien
cactactcatattattgagggcttg

SEQ ID NO: 1816033 - DNA, 25 bp, Homo sapien
gggcttgacttctgctaacaggttc

SEQ ID NO: 1816034 - DNA, 25 bp, Homo sapien
catcctctgttttctgggcaactct

SEQ ID NO: 1816035 - DNA, 25 bp, Homo sapien
ttttctgggcaactcttcgcaccca

SEQ ID NO: 1816036 - DNA, 25 bp, Homo sapien
tgttttctgggcaactcttcgcacc

SEQ ID NO: 1816037 - DNA, 25 bp, Homo sapien
tctgttttctgggcaactcttcgca

SEQ ID NO: 1816038 - DNA, 25 bp, Homo sapien
tcattccacccttgggcaggagggc

SEQ ID NO: 1816039 - DNA, 25 bp, Homo sapien
cagaaatcctcctgcgctgtgcgtc

SEQ ID NO: 1816040 - DNA, 25 bp, Homo sapien
tgtttatagcttcggtgcctgcgca

SEQ ID NO: 1816041 - DNA, 25 bp, Homo sapien
tgcaaatgaattccaggcgggagca

SEQ ID NO: 1816042 - DNA, 25 bp, Homo sapien
ggtctcagtgtctcgtgacttctta

SEQ ID NO: 1816043 - DNA, 25 bp, Homo sapien
gtgacttcttattggacagctgaaa

SEQ ID NO: 1816044 - DNA, 25 bp, Homo sapien
cttattggacagctgaaatgcttca

SEQ ID NO: 1816045 - DNA, 25 bp, Homo sapien
ccaggtctcagtgtctcgtgacttc

SEQ ID NO: 1816046 - DNA, 25 bp, Homo sapien
ggtattaattccaattccaactgca

SEQ ID NO: 1816047 - DNA, 25 bp, Homo sapien
gtggtattaattccaattccaactg

SEQ ID NO: 1816048 - DNA, 25 bp, Homo sapien
gtattaattccaattccaactgcaa

SEQ ID NO: 1816049 - DNA, 25 bp, Homo sapien
tcagtggtattaattccaattccaa

SEQ ID NO: 1816050 - DNA, 25 bp, Homo sapien
gtgctggctggtctgtgtgaatcac

SEQ ID NO: 1816051 - DNA, 25 bp, Homo sapien
cagtgctggctggtctgtgtgaatc

SEQ ID NO: 1816052 - DNA, 25 bp, Homo sapien
agtgctggctggtctgtgtgaatca

SEQ ID NO: 1816053 - DNA, 25 bp, Homo sapien
gtgctgtgtcatgggaatgaggaag

SEQ ID NO: 1816054 - DNA, 25 bp, Homo sapien
taaagcctttttcaattttgccagc

SEQ ID NO: 1816055 - DNA, 25 bp, Homo sapien
aagcctttttcaattttgccagcat

SEQ ID NO: 1816056 - DNA, 25 bp, Homo sapien
tgtgttgacaattttcctaaagaaa

SEQ ID NO: 1816057 - DNA, 25 bp, Homo sapien
ctgtgttgacaattttcctaaagaa

SEQ ID NO: 1816058 - DNA, 25 bp, Homo sapien
ccactacatcatggctgtgaaaggg

SEQ ID NO: 1816059 - DNA, 25 bp, Homo sapien
tcagaaataaatggcgtgctagtgc

SEQ ID NO: 1816060 - DNA, 25 bp, Homo sapien
gtgaaccatgatcttgccaaagctg

SEQ ID NO: 1816061 - DNA, 25 bp, Homo sapien
gcaaagttgcttttcagtgaaccat

SEQ ID NO: 1816062 - DNA, 25 bp, Homo sapien
tataaacactggtcagtgtccactg

SEQ ID NO: 1816063 - DNA, 25 bp, Homo sapien
tcagttgtccagattcaccaagagg

SEQ ID NO: 1816064 - DNA, 25 bp, Homo sapien
agttgtccagattcaccaagagggt

SEQ ID NO: 1816065 - DNA, 25 bp, Homo sapien
gggttctataaacactggtcagtgt

SEQ ID NO: 1816066 - DNA, 25 bp, Homo sapien
tcctgggtacagtcctaagctctgc

SEQ ID NO: 1816067 - DNA, 25 bp, Homo sapien
tctagcatcccatgtgtcagaacgc

SEQ ID NO: 1816068 - DNA, 25 bp, Homo sapien
accgtgcaatcacagagcaaggctg

SEQ ID NO: 1816069 - DNA, 25 bp, Homo sapien
gggcagaaactccaccgtgcaatca

SEQ ID NO: 1816070 - DNA, 25 bp, Homo sapien
cttctgcccgcctgtgatgcgaagt

SEQ ID NO: 1816071 - DNA, 25 bp, Homo sapien
tcttctctgcgtccgccgccagtcg

SEQ ID NO: 1816072 - DNA, 25 bp, Homo sapien
cgcctgtgatgcgaagtcctcctct

SEQ ID NO: 1816073 - DNA, 25 bp, Homo sapien
gccagtcgccccttttcctcggcac

SEQ ID NO: 1816074 - DNA, 25 bp, Homo sapien
atgtcccctccttactggcctggaa

SEQ ID NO: 1816075 - DNA, 25 bp, Homo sapien
gaacctctcactcttcagggccaaa

SEQ ID NO: 1816076 - DNA, 25 bp, Homo sapien
ccaagcgagcaccatggtaaggcac

SEQ ID NO: 1816077 - DNA, 25 bp, Homo sapien
aaacaaaggtatgtaccaagcgagc

SEQ ID NO: 1816078 - DNA, 25 bp, Homo sapien
ccccgtaatgtttcagtggtccctg

SEQ ID NO: 1816079 - DNA, 25 bp, Homo sapien
tgtccagcccctttatacatttgtc

SEQ ID NO: 1816080 - DNA, 25 bp, Homo sapien
caagtgccccgtaatgtttcagtgg

SEQ ID NO: 1816081 - DNA, 25 bp, Homo sapien
tacatttgtcccaagtgccccgtaa

SEQ ID NO: 1816082 - DNA, 25 bp, Homo sapien
gacagccagaaactgttatctagtt

SEQ ID NO: 1816083 - DNA, 25 bp, Homo sapien
aactgttatctagttcataaaccac

SEQ ID NO: 1816084 - DNA, 25 bp, Homo sapien
gccagaaactgttatctagttcata

SEQ ID NO: 1816085 - DNA, 25 bp, Homo sapien
agtgtctttcatcacggacagccag

SEQ ID NO: 1816086 - DNA, 25 bp, Homo sapien
gagaagacaaggaacgttttggagc

SEQ ID NO: 1816087 - DNA, 25 bp, Homo sapien
caaggaacgttttggagcatgcttc

SEQ ID NO: 1816088 - DNA, 25 bp, Homo sapien
gaagacaaggaacgttttggagcat

SEQ ID NO: 1816089 - DNA, 25 bp, Homo sapien
gacaaggaacgttttggagcatgct

SEQ ID NO: 1816090 - DNA, 25 bp, Homo sapien
gcacagtagaagaggggcaccccca

SEQ ID NO: 1816091 - DNA, 25 bp, Homo sapien
acagtagaagaggggcacccccagc

SEQ ID NO: 1816092 - DNA, 25 bp, Homo sapien
cacagtagaagaggggcacccccag

SEQ ID NO: 1816093 - DNA, 25 bp, Homo sapien
gatcctaaggaatccaatggtcagg

SEQ ID NO: 1816094 - DNA, 25 bp, Homo sapien
tgaagtacagcccagcattgccgtc

SEQ ID NO: 1816095 - DNA, 25 bp, Homo sapien
ttgtaagcatgtgagttattcgtgc

SEQ ID NO: 1816096 - DNA, 25 bp, Homo sapien
gagttattcgtgctgtctgttgtga

SEQ ID NO: 1816097 - DNA, 25 bp, Homo sapien
atggccgttaagcagggcgttctct

SEQ ID NO: 1816098 - DNA, 25 bp, Homo sapien
gatggccgttaagcagggcgttctc

SEQ ID NO: 1816099 - DNA, 25 bp, Homo sapien
gctgttttgttcgtccctctgattt

SEQ ID NO: 1816100 - DNA, 25 bp, Homo sapien
gccctggaacgtggccaaattggcc

SEQ ID NO: 1816101 - DNA, 25 bp, Homo sapien
ctgccctgatagtcttgcccaaatg

SEQ ID NO: 1816102 - DNA, 25 bp, Homo sapien
ctgtctcggttgctctcttttggag

SEQ ID NO: 1816103 - DNA, 25 bp, Homo sapien
aactgaaatgactgtatgggcacca

SEQ ID NO: 1816104 - DNA, 25 bp, Homo sapien
gcaccaggttcaggtggagcaagct

SEQ ID NO: 1816105 - DNA, 25 bp, Homo sapien
tcttaactctctcgtgccaatggaa

SEQ ID NO: 1816106 - DNA, 25 bp, Homo sapien
taatctggttggctgaaaaacttgt

SEQ ID NO: 1816107 - DNA, 25 bp, Homo sapien
tcactggagaccaagattcctgttc

SEQ ID NO: 1816108 - DNA, 25 bp, Homo sapien
gctcaataatgtcactggagaccaa

SEQ ID NO: 1816109 - DNA, 25 bp, Homo sapien
caagattcctgttccatctttcctg

SEQ ID NO: 1816110 - DNA, 25 bp, Homo sapien
gaacagccgctcaataatgtcactg

SEQ ID NO: 1816111 - DNA, 25 bp, Homo sapien
ctttgtagaacttgtcagaagtgtt

SEQ ID NO: 1816112 - DNA, 25 bp, Homo sapien
gtagaacttgtcagaagtgttcagt

SEQ ID NO: 1816113 - DNA, 25 bp, Homo sapien
taattgacaaaagagccccttggct

SEQ ID NO: 1816114 - DNA, 25 bp, Homo sapien
tggcaattgcgggatgacatgtttt

SEQ ID NO: 1816115 - DNA, 25 bp, Homo sapien
agaatgagggccaatcattaatgac

SEQ ID NO: 1816116 - DNA, 25 bp, Homo sapien
tgagggccaatcattaatgacagaa

SEQ ID NO: 1816117 - DNA, 25 bp, Homo sapien
ttggccgtcctcgtttcctgcatct

SEQ ID NO: 1816118 - DNA, 25 bp, Homo sapien
tttcctgcatcttcgtgactcccgg

SEQ ID NO: 1816119 - DNA, 25 bp, Homo sapien
tcgtttcctgcatcttcgtgactcc

SEQ ID NO: 1816120 - DNA, 25 bp, Homo sapien
cgtcctcgtttcctgcatcttcgtg

SEQ ID NO: 1816121 - DNA, 25 bp, Homo sapien
aggagttctccctgacagagccgct

SEQ ID NO: 1816122 - DNA, 25 bp, Homo sapien
agagccgctccgaattcctccggca

SEQ ID NO: 1816123 - DNA, 25 bp, Homo sapien
catccttcgggattcaggttcccct

SEQ ID NO: 1816124 - DNA, 25 bp, Homo sapien
cagtcagtgtaacccgtgtgcttcc

SEQ ID NO: 1816125 - DNA, 25 bp, Homo sapien
gaggcctgaaattccacagtcacac

SEQ ID NO: 1816126 - DNA, 25 bp, Homo sapien
tgaggcctgaaattccacagtcaca

SEQ ID NO: 1816127 - DNA, 25 bp, Homo sapien
cagacaaggactttgtcctccacga

SEQ ID NO: 1816128 - DNA, 25 bp, Homo sapien
ggactttgtcctccacgagaatacc

SEQ ID NO: 1816129 - DNA, 25 bp, Homo sapien
tgtctgccagacaaggactttgtcc

SEQ ID NO: 1816130 - DNA, 25 bp, Homo sapien
gcctttgatgtctgccagacaagga

SEQ ID NO: 1816131 - DNA, 25 bp, Homo sapien
cctcagtacgtttatcagattcttc

SEQ ID NO: 1816132 - DNA, 25 bp, Homo sapien
ttgtttcctcagtacgtttatcaga

SEQ ID NO: 1816133 - DNA, 25 bp, Homo sapien
ctgcaacagggagagcacacgcgaa

SEQ ID NO: 1816134 - DNA, 25 bp, Homo sapien
agggagagcacacgcgaagcttctc

SEQ ID NO: 1816135 - DNA, 25 bp, Homo sapien
gcgatggaccctttctgcaaaggtg

SEQ ID NO: 1816136 - DNA, 25 bp, Homo sapien
gaaggcgatggaccctttctgcaaa

SEQ ID NO: 1816137 - DNA, 25 bp, Homo sapien
aggcgatggaccctttctgcaaagg

SEQ ID NO: 1816138 - DNA, 25 bp, Homo sapien
tgaaggcgatggaccctttctgcaa

SEQ ID NO: 1816139 - DNA, 25 bp, Homo sapien
gaagtcatctaatccaagtttgtct

SEQ ID NO: 1816140 - DNA, 25 bp, Homo sapien
agaagtcatctaatccaagtttgtc

SEQ ID NO: 1816141 - DNA, 25 bp, Homo sapien
aagggaactttgtgactggacatac

SEQ ID NO: 1816142 - DNA, 25 bp, Homo sapien
gcaaaaagaacattggtccgtgacc

SEQ ID NO: 1816143 - DNA, 25 bp, Homo sapien
tctatgtaacaatatttattgccct

SEQ ID NO: 1816144 - DNA, 25 bp, Homo sapien
ccattagcgtagcaggtcctgatga

SEQ ID NO: 1816145 - DNA, 25 bp, Homo sapien
caaacaattcctaatctttcagact

SEQ ID NO: 1816146 - DNA, 25 bp, Homo sapien
aaacaattcctaatctttcagactt

SEQ ID NO: 1816147 - DNA, 25 bp, Homo sapien
tatcaaggtggactacccgagctca

SEQ ID NO: 1816148 - DNA, 25 bp, Homo sapien
tccctctctgttctgtatcaaggtg

SEQ ID NO: 1816149 - DNA, 25 bp, Homo sapien
tctctgttctgtatcaaggtggact

SEQ ID NO: 1816150 - DNA, 25 bp, Homo sapien
cctctctgttctgtatcaaggtgga

SEQ ID NO: 1816151 - DNA, 25 bp, Homo sapien
aattttctacaccaagttcacatag

SEQ ID NO: 1816152 - DNA, 25 bp, Homo sapien
ttttctacaccaagttcacatagga

SEQ ID NO: 1816153 - DNA, 25 bp, Homo sapien
ctacaccaagttcacataggaattc

SEQ ID NO: 1816154 - DNA, 25 bp, Homo sapien
tttctacaccaagttcacataggaa

SEQ ID NO: 1816155 - DNA, 25 bp, Homo sapien
cgtgaattgattgcttcaagtcctc

SEQ ID NO: 1816156 - DNA, 25 bp, Homo sapien
tgctgggtcagtgaacacgtgaatt

SEQ ID NO: 1816157 - DNA, 25 bp, Homo sapien
cttgtggagtctcgttgtcacggct

SEQ ID NO: 1816158 - DNA, 25 bp, Homo sapien
caagtcctccacttgccttccttgt

SEQ ID NO: 1816159 - DNA, 25 bp, Homo sapien
gtttttctccagcttcatccgtcag

SEQ ID NO: 1816160 - DNA, 25 bp, Homo sapien
tttctccagcttcatccgtcagcat

SEQ ID NO: 1816161 - DNA, 25 bp, Homo sapien
ttttctccagcttcatccgtcagca

SEQ ID NO: 1816162 - DNA, 25 bp, Homo sapien
ctgtttttctccagcttcatccgtc

SEQ ID NO: 1816163 - DNA, 25 bp, Homo sapien
gcatgcatgccacaaacgtgcctag

SEQ ID NO: 1816164 - DNA, 25 bp, Homo sapien
taaaacagagctcaatgcatggact

SEQ ID NO: 1816165 - DNA, 25 bp, Homo sapien
tgtgaactacagcagaatccccttg

SEQ ID NO: 1816166 - DNA, 25 bp, Homo sapien
cctagtctggagtggatatagccca

SEQ ID NO: 1816167 - DNA, 25 bp, Homo sapien
ggagtgtagccttaccagaaacgaa

SEQ ID NO: 1816168 - DNA, 25 bp, Homo sapien
ggtggctcaagcattacaagataag

SEQ ID NO: 1816169 - DNA, 25 bp, Homo sapien
ttagggatgcacaccaatacggccc

SEQ ID NO: 1816170 - DNA, 25 bp, Homo sapien
tgttgacactttgaactacgagctg

SEQ ID NO: 1816171 - DNA, 25 bp, Homo sapien
agggcccacgtccagtcagtgcatt

SEQ ID NO: 1816172 - DNA, 25 bp, Homo sapien
tgcagccgcgttttccaagtgagtt

SEQ ID NO: 1816173 - DNA, 25 bp, Homo sapien
gccagtgtgcctgtgcgtgacacat

SEQ ID NO: 1816174 - DNA, 25 bp, Homo sapien
tcagtggtactgacaggatccacat

SEQ ID NO: 1816175 - DNA, 25 bp, Homo sapien
ttccagtccgcagccagccacacac

SEQ ID NO: 1816176 - DNA, 25 bp, Homo sapien
ccgcagccagccacacacacaatat

SEQ ID NO: 1816177 - DNA, 25 bp, Homo sapien
cagccagccacacacacaatattat

SEQ ID NO: 1816178 - DNA, 25 bp, Homo sapien
ccagtccgcagccagccacacacac

SEQ ID NO: 1816179 - DNA, 25 bp, Homo sapien
agcgccggtgcctcctgagccacgg

SEQ ID NO: 1816180 - DNA, 25 bp, Homo sapien
cattaatcttgtattgagaaagttg

SEQ ID NO: 1816181 - DNA, 25 bp, Homo sapien
cgtttcaatgtaggcgttcagggct

SEQ ID NO: 1816182 - DNA, 25 bp, Homo sapien
tgaaatgtgagctaccgatgctttc

SEQ ID NO: 1816183 - DNA, 25 bp, Homo sapien
gaatggttaaccctgctcgcttttg

SEQ ID NO: 1816184 - DNA, 25 bp, Homo sapien
tgtctaggtctgtcacaagactggg

SEQ ID NO: 1816185 - DNA, 25 bp, Homo sapien
ctttcagcaattcttatagcagtgg

SEQ ID NO: 1816186 - DNA, 25 bp, Homo sapien
tcttatagcagtggtttggtaatgg

SEQ ID NO: 1816187 - DNA, 25 bp, Homo sapien
tagacaacctgactacaatgtgcct

SEQ ID NO: 1816188 - DNA, 25 bp, Homo sapien
tgagactcctcgatgcaggtagaga

SEQ ID NO: 1816189 - DNA, 25 bp, Homo sapien
cctttctggtgtcgagctactggga

SEQ ID NO: 1816190 - DNA, 25 bp, Homo sapien
tactgggaacatcgctgttgaactg

SEQ ID NO: 1816191 - DNA, 25 bp, Homo sapien
catgtcatgtgggattctctgagac

SEQ ID NO: 1816192 - DNA, 25 bp, Homo sapien
tcagacagggacgacatcttcaggg

SEQ ID NO: 1816193 - DNA, 25 bp, Homo sapien
tgaattactaagtcggccgtgaccg

SEQ ID NO: 1816194 - DNA, 25 bp, Homo sapien
tagaaacagagtctggcggctgcgc

SEQ ID NO: 1816195 - DNA, 25 bp, Homo sapien
tctgataaagtaacagggtccgtcc

SEQ ID NO: 1816196 - DNA, 25 bp, Homo sapien
tccctctgacggaagatggtttctg

SEQ ID NO: 1816197 - DNA, 25 bp, Homo sapien
ggcagagtggctccatgccatcaaa

SEQ ID NO: 1816198 - DNA, 25 bp, Homo sapien
gcaatctgaggcatgctgtagcccc

SEQ ID NO: 1816199 - DNA, 25 bp, Homo sapien
cctgaagaggtcaagtggatagatc

SEQ ID NO: 1816200 - DNA, 25 bp, Homo sapien
cctcccgggagttgtaagccactgt

SEQ ID NO: 1816201 - DNA, 25 bp, Homo sapien
tctatgtccattatgaatgtgccag

SEQ ID NO: 1816202 - DNA, 25 bp, Homo sapien
tagcgctcagcttttagggcagaag

SEQ ID NO: 1816203 - DNA, 25 bp, Homo sapien
ggcatggctgaaaaccttgcatctg

SEQ ID NO: 1816204 - DNA, 25 bp, Homo sapien
cctgtgctgggtcattatagcactc

SEQ ID NO: 1816205 - DNA, 25 bp, Homo sapien
aacttttgcaaactcttgaaggagc

SEQ ID NO: 1816206 - DNA, 25 bp, Homo sapien
tatcagaccacaagatttgcagcca

SEQ ID NO: 1816207 - DNA, 25 bp, Homo sapien
tatagcactcacagggatgaatgaa

SEQ ID NO: 1816208 - DNA, 25 bp, Homo sapien
ggtatttctctcatgtggccacata

SEQ ID NO: 1816209 - DNA, 25 bp, Homo sapien
cttctctcaagaagcaacctggtgt

SEQ ID NO: 1816210 - DNA, 25 bp, Homo sapien
ctgtacagtggtgaagatgatcccc

SEQ ID NO: 1816211 - DNA, 25 bp, Homo sapien
gagagccgttgagtcttcatcccag

SEQ ID NO: 1816212 - DNA, 25 bp, Homo sapien
gaaggtttggatggctaacgcccag

SEQ ID NO: 1816213 - DNA, 25 bp, Homo sapien
aagtcccagcacaccgcgcttataa

SEQ ID NO: 1816214 - DNA, 25 bp, Homo sapien
tcagctgtccttaaaaaggttctat

SEQ ID NO: 1816215 - DNA, 25 bp, Homo sapien
tgcgccccacgggacagagccgttt

SEQ ID NO: 1816216 - DNA, 25 bp, Homo sapien
aggctggaaacggggtggcatccgc

SEQ ID NO: 1816217 - DNA, 25 bp, Homo sapien
ccggaggctggaaacggggtggcat

SEQ ID NO: 1816218 - DNA, 25 bp, Homo sapien
gctggaaacggggtggcatccgctc

SEQ ID NO: 1816219 - DNA, 25 bp, Homo sapien
ggtgagcaccggaggctggaaacgg

SEQ ID NO: 1816220 - DNA, 25 bp, Homo sapien
ggatgggcaaccacacgacggtctc

SEQ ID NO: 1816221 - DNA, 25 bp, Homo sapien
aaccacacgacggtctccctgggag

SEQ ID NO: 1816222 - DNA, 25 bp, Homo sapien
ggcaaccacacgacggtctccctgg

SEQ ID NO: 1816223 - DNA, 25 bp, Homo sapien
agccgtcctgcttgggtggggctct

SEQ ID NO: 1816224 - DNA, 25 bp, Homo sapien
cctctgattctcttggaccttggtg

SEQ ID NO: 1816225 - DNA, 25 bp, Homo sapien
tcttggaccttggtggtgtaggtct

SEQ ID NO: 1816226 - DNA, 25 bp, Homo sapien
cttggtggtgtaggtctcctcaacc

SEQ ID NO: 1816227 - DNA, 25 bp, Homo sapien
tctgattctcttggaccttggtggt

SEQ ID NO: 1816228 - DNA, 25 bp, Homo sapien
gtgccccacagtttcgatggcattc

SEQ ID NO: 1816229 - DNA, 25 bp, Homo sapien
tgtgccccacagtttcgatggcatt

SEQ ID NO: 1816230 - DNA, 25 bp, Homo sapien
cctgtgccccacagtttcgatggca

SEQ ID NO: 1816231 - DNA, 25 bp, Homo sapien
ctgtgccccacagtttcgatggcat

SEQ ID NO: 1816232 - DNA, 25 bp, Homo sapien
cagcgcccacaggctgcaggtatgc

SEQ ID NO: 1816233 - DNA, 25 bp, Homo sapien
gtcagcgcccacaggctgcaggtat

SEQ ID NO: 1816234 - DNA, 25 bp, Homo sapien
aggtcagcgcccacaggctgcaggt

SEQ ID NO: 1816235 - DNA, 25 bp, Homo sapien
caggtcagcgcccacaggctgcagg

SEQ ID NO: 1816236 - DNA, 25 bp, Homo sapien
aagagcttttttcaggaaggattgt

SEQ ID NO: 1816237 - DNA, 25 bp, Homo sapien
tttttcaggaaggattgtgcgaggt

SEQ ID NO: 1816238 - DNA, 25 bp, Homo sapien
attgtgcgaggtgctgtggcaaaca

SEQ ID NO: 1816239 - DNA, 25 bp, Homo sapien
gcttttttcaggaaggattgtgcga

SEQ ID NO: 1816240 - DNA, 25 bp, Homo sapien
ctgagtcgcaggctctgaaactcca

SEQ ID NO: 1816241 - DNA, 25 bp, Homo sapien
tctgagtcgcaggctctgaaactcc

SEQ ID NO: 1816242 - DNA, 25 bp, Homo sapien
ctctgagtcgcaggctctgaaactc

SEQ ID NO: 1816243 - DNA, 25 bp, Homo sapien
cagtgggaagtgctacatcggtgct

SEQ ID NO: 1816244 - DNA, 25 bp, Homo sapien
ttaggacagacggaaagttgcctcc

SEQ ID NO: 1816245 - DNA, 25 bp, Homo sapien
tatgaacgctcacacagcagatgct

SEQ ID NO: 1816246 - DNA, 25 bp, Homo sapien
tgcacgtcgtgcaaaagatctcctg

SEQ ID NO: 1816247 - DNA, 25 bp, Homo sapien
acacattcacggcatgctgtaagga

SEQ ID NO: 1816248 - DNA, 25 bp, Homo sapien
cacggcatgctgtaaggattcctta

SEQ ID NO: 1816249 - DNA, 25 bp, Homo sapien
tgttgcacacattcacggcatgctg

SEQ ID NO: 1816250 - DNA, 25 bp, Homo sapien
tgagaataaggatgttgcacacatt

SEQ ID NO: 1816251 - DNA, 25 bp, Homo sapien
cagcaggtgagcttgcagagttgcc

SEQ ID NO: 1816252 - DNA, 25 bp, Homo sapien
aagtgaaactgccatccctcatgag

SEQ ID NO: 1816253 - DNA, 25 bp, Homo sapien
caggctaggcataggaaccttccaa

SEQ ID NO: 1816254 - DNA, 25 bp, Homo sapien
gttccaacattctcacgtccagcag

SEQ ID NO: 1816255 - DNA, 25 bp, Homo sapien
gtccgattgagatttcttcaccacc

SEQ ID NO: 1816256 - DNA, 25 bp, Homo sapien
tggtgtccgattgagatttcttcac

SEQ ID NO: 1816257 - DNA, 25 bp, Homo sapien
gtgtccgattgagatttcttcacca

SEQ ID NO: 1816258 - DNA, 25 bp, Homo sapien
ctctggtgtccgattgagatttctt

SEQ ID NO: 1816259 - DNA, 25 bp, Homo sapien
caagttcacattcagggtcgagggc

SEQ ID NO: 1816260 - DNA, 25 bp, Homo sapien
gaaactaagtctccaagggtgcatg

SEQ ID NO: 1816261 - DNA, 25 bp, Homo sapien
cagtgctatcttgctccaggaggtg

SEQ ID NO: 1816262 - DNA, 25 bp, Homo sapien
tacatggaagaaaacgcacgctggg

SEQ ID NO: 1816263 - DNA, 25 bp, Homo sapien
cttccaaatggctgcctcctgtaga

SEQ ID NO: 1816264 - DNA, 25 bp, Homo sapien
tatttggtcacaaagtcctgggcat

SEQ ID NO: 1816265 - DNA, 25 bp, Homo sapien
caaccaggggtgcttgagagcttcg

SEQ ID NO: 1816266 - DNA, 25 bp, Homo sapien
cttgtggtctgacaaccaggggtgc

SEQ ID NO: 1816267 - DNA, 25 bp, Homo sapien
gagcttcgcttgcacttattcgcca

SEQ ID NO: 1816268 - DNA, 25 bp, Homo sapien
cattgagtctggagtggagcttgtg

SEQ ID NO: 1816269 - DNA, 25 bp, Homo sapien
tcattgtcacccaggaaaggcgaca

SEQ ID NO: 1816270 - DNA, 25 bp, Homo sapien
caggccaggatgttgttcagcgtct

SEQ ID NO: 1816271 - DNA, 25 bp, Homo sapien
caggaaaggcgacaaaccgctaagt

SEQ ID NO: 1816272 - DNA, 25 bp, Homo sapien
caggatgttgttcagcgtctcagca

SEQ ID NO: 1816273 - DNA, 25 bp, Homo sapien
gcatataggcgatgacccccacact

SEQ ID NO: 1816274 - DNA, 25 bp, Homo sapien
aacttcaggggcgagaaattctggg

SEQ ID NO: 1816275 - DNA, 25 bp, Homo sapien
catagttcacaacttcaggggcgag

SEQ ID NO: 1816276 - DNA, 25 bp, Homo sapien
agcatataggcgatgacccccacac

SEQ ID NO: 1816277 - DNA, 25 bp, Homo sapien
ggatggacgtgtcgatcaaaaatcg

SEQ ID NO: 1816278 - DNA, 25 bp, Homo sapien
caaagtggaaggatggacgtgtcga

SEQ ID NO: 1816279 - DNA, 25 bp, Homo sapien
tggaaggatggacgtgtcgatcaaa

SEQ ID NO: 1816280 - DNA, 25 bp, Homo sapien
tgtcgatcaaaaatcgtgaacactg

SEQ ID NO: 1816281 - DNA, 25 bp, Homo sapien
gcttagcatcccgattcacacacag

SEQ ID NO: 1816282 - DNA, 25 bp, Homo sapien
ttagcatcccgattcacacacagga

SEQ ID NO: 1816283 - DNA, 25 bp, Homo sapien
gcatcccgattcacacacaggatat

SEQ ID NO: 1816284 - DNA, 25 bp, Homo sapien
tttgcttagcatcccgattcacaca

SEQ ID NO: 1816285 - DNA, 25 bp, Homo sapien
gttcaccataatgcctgagttcagg

SEQ ID NO: 1816286 - DNA, 25 bp, Homo sapien
atgaggttgcgggtatcctgccaac

SEQ ID NO: 1816287 - DNA, 25 bp, Homo sapien
gctcaacgcctatgggaaagtcgca

SEQ ID NO: 1816288 - DNA, 25 bp, Homo sapien
aacatatcaggcctttcacttcggg

SEQ ID NO: 1816289 - DNA, 25 bp, Homo sapien
gatggtatcaagctccgtcaaattg

SEQ ID NO: 1816290 - DNA, 25 bp, Homo sapien
cgtcaaattgtagctctcatcgatg

SEQ ID NO: 1816291 - DNA, 25 bp, Homo sapien
gctctcatcgatgatgcggtcaaac

SEQ ID NO: 1816292 - DNA, 25 bp, Homo sapien
tcaggtccaagtggagaatgtacat

SEQ ID NO: 1816293 - DNA, 25 bp, Homo sapien
tactccatgaccaggacaatgtcgt

SEQ ID NO: 1816294 - DNA, 25 bp, Homo sapien
ccagctggttcatgacgctgatctc

SEQ ID NO: 1816295 - DNA, 25 bp, Homo sapien
ttcttagactcgaaggcatcgtaca

SEQ ID NO: 1816296 - DNA, 25 bp, Homo sapien
tcgtacagctggatgaggttcgcgt

SEQ ID NO: 1816297 - DNA, 25 bp, Homo sapien
agcttcagacctgtggccgtctcct

SEQ ID NO: 1816298 - DNA, 25 bp, Homo sapien
acacttgtgaacctggccgaaacgc

SEQ ID NO: 1816299 - DNA, 25 bp, Homo sapien
gcctctggtcttgatgattttggct

SEQ ID NO: 1816300 - DNA, 25 bp, Homo sapien
ctgccagcttcagacctgtggccgt

SEQ ID NO: 1816301 - DNA, 25 bp, Homo sapien
gcttggctgtcacaatacgatgatc

SEQ ID NO: 1816302 - DNA, 25 bp, Homo sapien
tgtcttgctcacagtatagaagctg

SEQ ID NO: 1816303 - DNA, 25 bp, Homo sapien
tgttgaccgctccttgcttggctgt

SEQ ID NO: 1816304 - DNA, 25 bp, Homo sapien
tgtcacaatacgatgatcaaatggg

SEQ ID NO: 1816305 - DNA, 25 bp, Homo sapien
gccgtcttgccctcgggaggtcttc

SEQ ID NO: 1816306 - DNA, 25 bp, Homo sapien
tcaggccgtcttgccctcgggaggt

SEQ ID NO: 1816307 - DNA, 25 bp, Homo sapien
cagtggggtcaggccgtcttgccct

SEQ ID NO: 1816308 - DNA, 25 bp, Homo sapien
gggtcaggccgtcttgccctcggga

SEQ ID NO: 1816309 - DNA, 25 bp, Homo sapien
ccctgagtcggccccgggagctcct

SEQ ID NO: 1816310 - DNA, 25 bp, Homo sapien
agactccctgagtcggccccgggag

SEQ ID NO: 1816311 - DNA, 25 bp, Homo sapien
cctgagtcggccccgggagctcctc

SEQ ID NO: 1816312 - DNA, 25 bp, Homo sapien
agcagactccctgagtcggccccgg

SEQ ID NO: 1816313 - DNA, 25 bp, Homo sapien
cccgggcactctgtctggtcagcat

SEQ ID NO: 1816314 - DNA, 25 bp, Homo sapien
gactatgtctactctgcgccttttg

SEQ ID NO: 1816315 - DNA, 25 bp, Homo sapien
tgttcttcccctgtgccgactatgt

SEQ ID NO: 1816316 - DNA, 25 bp, Homo sapien
gttgacgaggcgctcctctgccact

SEQ ID NO: 1816317 - DNA, 25 bp, Homo sapien
tctatgaactagagaggcattggtc

SEQ ID NO: 1816318 - DNA, 25 bp, Homo sapien
tcaggctctctgtgcatgaaatgtc

SEQ ID NO: 1816319 - DNA, 25 bp, Homo sapien
ctcagaggagagctgattcttctgg

SEQ ID NO: 1816320 - DNA, 25 bp, Homo sapien
agtgtcttgctgttcattcccagca

SEQ ID NO: 1816321 - DNA, 25 bp, Homo sapien
ctgcgagggctgatgtccttttgct

SEQ ID NO: 1816322 - DNA, 25 bp, Homo sapien
tttccgtcaggtcggcgtttgacca

SEQ ID NO: 1816323 - DNA, 25 bp, Homo sapien
ttttgcttttgacgggcatcctttc

SEQ ID NO: 1816324 - DNA, 25 bp, Homo sapien
aggtcggcgtttgaccacacctcct

SEQ ID NO: 1816325 - DNA, 25 bp, Homo sapien
aatatgtggctctcaaccatctggg

SEQ ID NO: 1816326 - DNA, 25 bp, Homo sapien
ttaatgcctgggtcctcccctgaag

SEQ ID NO: 1816327 - DNA, 25 bp, Homo sapien
cctgaagattctgataaactgggtc

SEQ ID NO: 1816328 - DNA, 25 bp, Homo sapien
gccacagtgagtagttcgataacac

SEQ ID NO: 1816329 - DNA, 25 bp, Homo sapien
atttccctttcataacgcaagtcca

SEQ ID NO: 1816330 - DNA, 25 bp, Homo sapien
gaatgttttcgcatgaagtttacag

SEQ ID NO: 1816331 - DNA, 25 bp, Homo sapien
cataacgcaagtccaaaccttggaa

SEQ ID NO: 1816332 - DNA, 25 bp, Homo sapien
tttcgcatgaagtttacagtgtttc

SEQ ID NO: 1816333 - DNA, 25 bp, Homo sapien
catccacaaggcgtctgaagagcta

SEQ ID NO: 1816334 - DNA, 25 bp, Homo sapien
tgtgtggaacatccgtgagctgctc

SEQ ID NO: 1816335 - DNA, 25 bp, Homo sapien
gagggagtcgagacagcattcactg

SEQ ID NO: 1816336 - DNA, 25 bp, Homo sapien
taatctcgtacttgggtaaactcag

SEQ ID NO: 1816337 - DNA, 25 bp, Homo sapien
caagagcagggagtagctctttcct

SEQ ID NO: 1816338 - DNA, 25 bp, Homo sapien
cagggagtagctctttcctttgaaa

SEQ ID NO: 1816339 - DNA, 25 bp, Homo sapien
tctttgcacatctcctagcccaaca

SEQ ID NO: 1816340 - DNA, 25 bp, Homo sapien
atcaagtgctaaataatgtctttgc

SEQ ID NO: 1816341 - DNA, 25 bp, Homo sapien
caacatggaaatcgttctactgagg

SEQ ID NO: 1816342 - DNA, 25 bp, Homo sapien
aatcgttctactgaggactttctca

SEQ ID NO: 1816343 - DNA, 25 bp, Homo sapien
catggaaatcgttctactgaggact

SEQ ID NO: 1816344 - DNA, 25 bp, Homo sapien
ctgtcaacatggaaatcgttctact

SEQ ID NO: 1816345 - DNA, 25 bp, Homo sapien
aataccaaagtgctgatctttgttc

SEQ ID NO: 1816346 - DNA, 25 bp, Homo sapien
atttttcagagaataccaaagtgct

SEQ ID NO: 1816347 - DNA, 25 bp, Homo sapien
tgatttttcagagaataccaaagtg

SEQ ID NO: 1816348 - DNA, 25 bp, Homo sapien
gatttttcagagaataccaaagtgc

SEQ ID NO: 1816349 - DNA, 25 bp, Homo sapien
atcttcacagatttgccatacaatg

SEQ ID NO: 1816350 - DNA, 25 bp, Homo sapien
tctgtgccttgcaccttcccactgg

SEQ ID NO: 1816351 - DNA, 25 bp, Homo sapien
aaagccagacacagacagatctgtg

SEQ ID NO: 1816352 - DNA, 25 bp, Homo sapien
ggtgtcccactcaaagccagacaca

SEQ ID NO: 1816353 - DNA, 25 bp, Homo sapien
cagacagatctgtgccttgcacctt

SEQ ID NO: 1816354 - DNA, 25 bp, Homo sapien
gagtgggagacacaggggaggaact

SEQ ID NO: 1816355 - DNA, 25 bp, Homo sapien
gacacaggggaggaactgtggccat

SEQ ID NO: 1816356 - DNA, 25 bp, Homo sapien
gagacacaggggaggaactgtggcc

SEQ ID NO: 1816357 - DNA, 25 bp, Homo sapien
ttgtctccaggagtgttttcctgag

SEQ ID NO: 1816358 - DNA, 25 bp, Homo sapien
gagagaggggcctatttgtagcata

SEQ ID NO: 1816359 - DNA, 25 bp, Homo sapien
gggtcaaaaccgctagcaaacatgc

SEQ ID NO: 1816360 - DNA, 25 bp, Homo sapien
ttgtctcaggttcatgaatgcagaa

SEQ ID NO: 1816361 - DNA, 25 bp, Homo sapien
tagcatatggaatatgaaagggttt

SEQ ID NO: 1816362 - DNA, 25 bp, Homo sapien
catatcagaattcacatcaacaagc

SEQ ID NO: 1816363 - DNA, 25 bp, Homo sapien
aacaaagtgaggctcaagtgtgtgc

SEQ ID NO: 1816364 - DNA, 25 bp, Homo sapien
cagaaaaattagtctgggctggatg

SEQ ID NO: 1816365 - DNA, 25 bp, Homo sapien
taatacacagacaagtttagggacc

SEQ ID NO: 1816366 - DNA, 25 bp, Homo sapien
ttcccaatacaaggacaaatagaag

SEQ ID NO: 1816367 - DNA, 25 bp, Homo sapien
cttgtttggacttctcaacagctgc

SEQ ID NO: 1816368 - DNA, 25 bp, Homo sapien
aatagaaggtttcccaagttgctag

SEQ ID NO: 1816369 - DNA, 25 bp, Homo sapien
aggattctgaacttgtttggacttc

SEQ ID NO: 1816370 - DNA, 25 bp, Homo sapien
cgtgctggggaagcgttccgcaggc

SEQ ID NO: 1816371 - DNA, 25 bp, Homo sapien
ctggggaagcgttccgcaggccatc

SEQ ID NO: 1816372 - DNA, 25 bp, Homo sapien
ggaagcgttccgcaggccatctgcc

SEQ ID NO: 1816373 - DNA, 25 bp, Homo sapien
agcgtgctggggaagcgttccgcag

SEQ ID NO: 1816374 - DNA, 25 bp, Homo sapien
catagcctctaagacgtatgctggc

SEQ ID NO: 1816375 - DNA, 25 bp, Homo sapien
tgccagcttccacgaaatgataagc

SEQ ID NO: 1816376 - DNA, 25 bp, Homo sapien
gattcacgtaatcagacatgccagc

SEQ ID NO: 1816377 - DNA, 25 bp, Homo sapien
taagacgtatgctggcctttggcca

SEQ ID NO: 1816378 - DNA, 25 bp, Homo sapien
caaggacagaccaaggaatttccat

SEQ ID NO: 1816379 - DNA, 25 bp, Homo sapien
gcggctttcgctaaaccatctgctg

SEQ ID NO: 1816380 - DNA, 25 bp, Homo sapien
ttgctgacaaggacagaccaaggaa

SEQ ID NO: 1816381 - DNA, 25 bp, Homo sapien
gcacatatgcggctttcgctaaacc

SEQ ID NO: 1816382 - DNA, 25 bp, Homo sapien
caggccatgcggaaaggctgactcc

SEQ ID NO: 1816383 - DNA, 25 bp, Homo sapien
taagacagatcagatgattgacaag

SEQ ID NO: 1816384 - DNA, 25 bp, Homo sapien
tgacaagccattccaagattgggca

SEQ ID NO: 1816385 - DNA, 25 bp, Homo sapien
aatatttgctgtggaaaggtccccg

SEQ ID NO: 1816386 - DNA, 25 bp, Homo sapien
attccatttactttggcaagcgtca

SEQ ID NO: 1816387 - DNA, 25 bp, Homo sapien
aagattcagccagggcatgcattcc

SEQ ID NO: 1816388 - DNA, 25 bp, Homo sapien
aactgcccctaagaccagggccctg

SEQ ID NO: 1816389 - DNA, 25 bp, Homo sapien
ttggcaagcgtcactcccaggttgg

SEQ ID NO: 1816390 - DNA, 25 bp, Homo sapien
cccgggtcatcacgaaccggatcaa

SEQ ID NO: 1816391 - DNA, 25 bp, Homo sapien
ctgaagacgagagaaggcacacgct

SEQ ID NO: 1816392 - DNA, 25 bp, Homo sapien
gaaccggatcaagcaccagagaact

SEQ ID NO: 1816393 - DNA, 25 bp, Homo sapien
cacgtcctcaagagcaggagtctgc

SEQ ID NO: 1816394 - DNA, 25 bp, Homo sapien
tgtggttttcgtctccctctgtctc

SEQ ID NO: 1816395 - DNA, 25 bp, Homo sapien
agctggttgctgttataacacgtgt

SEQ ID NO: 1816396 - DNA, 25 bp, Homo sapien
gtagtgagtccgattaagctacttt

SEQ ID NO: 1816397 - DNA, 25 bp, Homo sapien
ttttaacatcttagtagtgagtccg

SEQ ID NO: 1816398 - DNA, 25 bp, Homo sapien
aagacaagtgtccactacgagagga

SEQ ID NO: 1816399 - DNA, 25 bp, Homo sapien
tcacatcgaagagcttgagccactc

SEQ ID NO: 1816400 - DNA, 25 bp, Homo sapien
gactctcagtcgtataaatcttctg

SEQ ID NO: 1816401 - DNA, 25 bp, Homo sapien
caaactgactatgaaagtctctggt

SEQ ID NO: 1816402 - DNA, 25 bp, Homo sapien
ctgcccgactctcacagtagtgcat

SEQ ID NO: 1816403 - DNA, 25 bp, Homo sapien
ggaaccaggttatacctgagcatga

SEQ ID NO: 1816404 - DNA, 25 bp, Homo sapien
taaggttgtgtccaccagacttctc

SEQ ID NO: 1816405 - DNA, 25 bp, Homo sapien
aaaggtggcacatgatgtcggtttg

SEQ ID NO: 1816406 - DNA, 25 bp, Homo sapien
tgtgtcttcatgcttggaaccaggt

SEQ ID NO: 1816407 - DNA, 25 bp, Homo sapien
caggtctatttgagtcaccaccgaa

SEQ ID NO: 1816408 - DNA, 25 bp, Homo sapien
tttgagtcaccaccgaatctatcct

SEQ ID NO: 1816409 - DNA, 25 bp, Homo sapien
gactctacttgtcgttactgacagg

SEQ ID NO: 1816410 - DNA, 25 bp, Homo sapien
gtcgttactgacaggtctatttgag

SEQ ID NO: 1816411 - DNA, 25 bp, Homo sapien
taggacgtaattgcacacgggcgcc

SEQ ID NO: 1816412 - DNA, 25 bp, Homo sapien
ccatcatttggttgctaaggagaca

SEQ ID NO: 1816413 - DNA, 25 bp, Homo sapien
gatttgccactattacacagcggcc

SEQ ID NO: 1816414 - DNA, 25 bp, Homo sapien
tcgaagcgcgctgtaggtgaaccgc

SEQ ID NO: 1816415 - DNA, 25 bp, Homo sapien
ccgcgcgaggcgcctccgccgccgg

SEQ ID NO: 1816416 - DNA, 25 bp, Homo sapien
cgcgcgaggcgcctccgccgccggg

SEQ ID NO: 1816417 - DNA, 25 bp, Homo sapien
gccgcgcgaggcgcctccgccgccg

SEQ ID NO: 1816418 - DNA, 25 bp, Homo sapien
gaggcgcctccgccgccggggcaaa

SEQ ID NO: 1816419 - DNA, 25 bp, Homo sapien
acacttcccgacacgccgcgtgagg

SEQ ID NO: 1816420 - DNA, 25 bp, Homo sapien
gagcgtcctgctggttccccgagcg

SEQ ID NO: 1816421 - DNA, 25 bp, Homo sapien
cgtgaggcatgagcggcgccctcct

SEQ ID NO: 1816422 - DNA, 25 bp, Homo sapien
cgggagctgcggacgtgaggcatga

SEQ ID NO: 1816423 - DNA, 25 bp, Homo sapien
ctccgcgtgcgcacgggttgctgcg

SEQ ID NO: 1816424 - DNA, 25 bp, Homo sapien
ccgcgtgcgcacgggttgctgcggc

SEQ ID NO: 1816425 - DNA, 25 bp, Homo sapien
gcatcgaaggcctccgcgtgcgcac

SEQ ID NO: 1816426 - DNA, 25 bp, Homo sapien
gcgtgcgcacgggttgctgcggccg

SEQ ID NO: 1816427 - DNA, 25 bp, Homo sapien
caggtgcagtgccccgtgtgccagc

SEQ ID NO: 1816428 - DNA, 25 bp, Homo sapien
agcagatgatgcccgccgcgcacat

SEQ ID NO: 1816429 - DNA, 25 bp, Homo sapien
cagcagatgatgcccgccgcgcaca

SEQ ID NO: 1816430 - DNA, 25 bp, Homo sapien
tgccccgtgtgccagcagatgatgc

SEQ ID NO: 1816431 - DNA, 25 bp, Homo sapien
tgacacgctgcaggattacttcggg

SEQ ID NO: 1816432 - DNA, 25 bp, Homo sapien
ccgaggagatccgacagatgctaca

SEQ ID NO: 1816433 - DNA, 25 bp, Homo sapien
tggccgttgggcttccgtagttatc

SEQ ID NO: 1816434 - DNA, 25 bp, Homo sapien
gaaatcccctcgcttatcctgtggg

SEQ ID NO: 1816435 - DNA, 25 bp, Homo sapien
tgcgagatgtcataaaacaagctca

SEQ ID NO: 1816436 - DNA, 25 bp, Homo sapien
taaggtttgtgacattatctgcaac

SEQ ID NO: 1816437 - DNA, 25 bp, Homo sapien
tgccaagacaaatgatgtgcgagat

SEQ ID NO: 1816438 - DNA, 25 bp, Homo sapien
gcaacagcaagaaacatagcataag

SEQ ID NO: 1816439 - DNA, 25 bp, Homo sapien
attttagaaacatgccttgcccagg

SEQ ID NO: 1816440 - DNA, 25 bp, Homo sapien
tctgcccctggagatttgagctcag

SEQ ID NO: 1816441 - DNA, 25 bp, Homo sapien
caagtttacagaggatggacccact

SEQ ID NO: 1816442 - DNA, 25 bp, Homo sapien
gattctcctcgctgttgataccaaa

SEQ ID NO: 1816443 - DNA, 25 bp, Homo sapien
ggataaagcagtagacaccctggct

SEQ ID NO: 1816444 - DNA, 25 bp, Homo sapien
cccgagctgggttgaacggactgca

SEQ ID NO: 1816445 - DNA, 25 bp, Homo sapien
ttacctcagtgacggtgacgcccga

SEQ ID NO: 1816446 - DNA, 25 bp, Homo sapien
ttctgtaagaagagtgggcaatcct

SEQ ID NO: 1816447 - DNA, 25 bp, Homo sapien
tactaacatgagtggctattcagag

SEQ ID NO: 1816448 - DNA, 25 bp, Homo sapien
tctcagggctatgtgagactggcag

SEQ ID NO: 1816449 - DNA, 25 bp, Homo sapien
gaaatggaagactctagacactata

SEQ ID NO: 1816450 - DNA, 25 bp, Homo sapien
gataagactttatgcctgagctcag

SEQ ID NO: 1816451 - DNA, 25 bp, Homo sapien
gcagacccgtctgcgttaacacaag

SEQ ID NO: 1816452 - DNA, 25 bp, Homo sapien
tgtgtcatgactgaaactctccttt

SEQ ID NO: 1816453 - DNA, 25 bp, Homo sapien
aacacaagcggttgctgcctaccaa

SEQ ID NO: 1816454 - DNA, 25 bp, Homo sapien
tgtggtcgcctgcacataggccagg

SEQ ID NO: 1816455 - DNA, 25 bp, Homo sapien
taagagttccataggtggaggcgca

SEQ ID NO: 1816456 - DNA, 25 bp, Homo sapien
gaacagaccaacattttgtgccaga

SEQ ID NO: 1816457 - DNA, 25 bp, Homo sapien
tgcctggtggaagttagaacagacc

SEQ ID NO: 1816458 - DNA, 25 bp, Homo sapien
tggaggcgcagttctttcgaataaa

SEQ ID NO: 1816459 - DNA, 25 bp, Homo sapien
cacaggtggcatgtaccctctagta

SEQ ID NO: 1816460 - DNA, 25 bp, Homo sapien
acgtgtctgagggtttggctagtaa

SEQ ID NO: 1816461 - DNA, 25 bp, Homo sapien
aatgcttttattgtaccttcagacg

SEQ ID NO: 1816462 - DNA, 25 bp, Homo sapien
tctgcactgggtacttgttgggcct

SEQ ID NO: 1816463 - DNA, 25 bp, Homo sapien
tgcatgggtggggaacatggctgct

SEQ ID NO: 1816464 - DNA, 25 bp, Homo sapien
cacttgaaattgctgcatgggtggg

SEQ ID NO: 1816465 - DNA, 25 bp, Homo sapien
ctccaggtgtttgtcatccacactt

SEQ ID NO: 1816466 - DNA, 25 bp, Homo sapien
ggtgtttgtcatccacacttgaaat

SEQ ID NO: 1816467 - DNA, 25 bp, Homo sapien
aagaatactgctgaacccggtgatg

SEQ ID NO: 1816468 - DNA, 25 bp, Homo sapien
gagccctcaggacagttcataccag

SEQ ID NO: 1816469 - DNA, 25 bp, Homo sapien
gatggtgcggaaatcgtgaaatagc

SEQ ID NO: 1816470 - DNA, 25 bp, Homo sapien
cggaaatcgtgaaatagcagaggag

SEQ ID NO: 1816471 - DNA, 25 bp, Homo sapien
ctgtgggttgtcaccgtgacacaga

SEQ ID NO: 1816472 - DNA, 25 bp, Homo sapien
tgtgggttgtcaccgtgacacagaa

SEQ ID NO: 1816473 - DNA, 25 bp, Homo sapien
atcatcccacagttccagcgtttgc

SEQ ID NO: 1816474 - DNA, 25 bp, Homo sapien
cacagttccagcgtttgcagggcag

SEQ ID NO: 1816475 - DNA, 25 bp, Homo sapien
tcccacagttccagcgtttgcaggg

SEQ ID NO: 1816476 - DNA, 25 bp, Homo sapien
cagttccagcgtttgcagggcagca

SEQ ID NO: 1816477 - DNA, 25 bp, Homo sapien
ccctcgcgtagggaagagccgcgtg

SEQ ID NO: 1816478 - DNA, 25 bp, Homo sapien
tccttctggatttagggccctcgcg

SEQ ID NO: 1816479 - DNA, 25 bp, Homo sapien
acacatggtagagcccgcaagggca

SEQ ID NO: 1816480 - DNA, 25 bp, Homo sapien
agagccgcgtgggacagccacacat

SEQ ID NO: 1816481 - DNA, 25 bp, Homo sapien
aacactcgttctggggcattcactt

SEQ ID NO: 1816482 - DNA, 25 bp, Homo sapien
tgtcaaacactcgttctggggcatt

SEQ ID NO: 1816483 - DNA, 25 bp, Homo sapien
caaacactcgttctggggcattcac

SEQ ID NO: 1816484 - DNA, 25 bp, Homo sapien
tcgttctggggcattcacttctgga

SEQ ID NO: 1816485 - DNA, 25 bp, Homo sapien
gtgacggtctgcgttcgagccctaa

SEQ ID NO: 1816486 - DNA, 25 bp, Homo sapien
tgtgttgttagaacatacataagta

SEQ ID NO: 1816487 - DNA, 25 bp, Homo sapien
ctagaccacttgcagataatcaaca

SEQ ID NO: 1816488 - DNA, 25 bp, Homo sapien
gagccctaagactagaccacttgca

SEQ ID NO: 1816489 - DNA, 25 bp, Homo sapien
gaatgaccgggtcacatgtcaggta

SEQ ID NO: 1816490 - DNA, 25 bp, Homo sapien
tctggtaaacacctattaatagaag

SEQ ID NO: 1816491 - DNA, 25 bp, Homo sapien
ttaatttgtgcatacaagtctttgt

SEQ ID NO: 1816492 - DNA, 25 bp, Homo sapien
ttcattcgtctattggttgacattt

SEQ ID NO: 1816493 - DNA, 25 bp, Homo sapien
tagattttggtctgccacaggctgc

SEQ ID NO: 1816494 - DNA, 25 bp, Homo sapien
gcaaggactccactatacttattcc

SEQ ID NO: 1816495 - DNA, 25 bp, Homo sapien
gaaacattaatacgtggatctgagc

SEQ ID NO: 1816496 - DNA, 25 bp, Homo sapien
gaatctggtctttatgtcataccct

SEQ ID NO: 1816497 - DNA, 25 bp, Homo sapien
cttactcctatgttaatcttcagca

SEQ ID NO: 1816498 - DNA, 25 bp, Homo sapien
ttgtctccccagatagatggccacc

SEQ ID NO: 1816499 - DNA, 25 bp, Homo sapien
cagcttatggtatttgtctccccag

SEQ ID NO: 1816500 - DNA, 25 bp, Homo sapien
aagtaagtcacttcccactttgtgc

SEQ ID NO: 1816501 - DNA, 25 bp, Homo sapien
catcttggtcctggtaaggcagctt

SEQ ID NO: 1816502 - DNA, 25 bp, Homo sapien
atcttggtcctggtaaggcagcttc

SEQ ID NO: 1816503 - DNA, 25 bp, Homo sapien
aagttttatatcagtccaagagccc

SEQ ID NO: 1816504 - DNA, 25 bp, Homo sapien
tcatgatgcccactatccttgtggg

SEQ ID NO: 1816505 - DNA, 25 bp, Homo sapien
tgcagcgccacatgaactatatatt

SEQ ID NO: 1816506 - DNA, 25 bp, Homo sapien
gaatatgcggcgtttcaagctccat

SEQ ID NO: 1816507 - DNA, 25 bp, Homo sapien
gaagagtctaaaaactagaggtctg

SEQ ID NO: 1816508 - DNA, 25 bp, Homo sapien
aactagaggtctgtaacagaatact

SEQ ID NO: 1816509 - DNA, 25 bp, Homo sapien
aagagtctaaaaactagaggtctgt

SEQ ID NO: 1816510 - DNA, 25 bp, Homo sapien
attgaagagtctaaaaactagaggt

SEQ ID NO: 1816511 - DNA, 25 bp, Homo sapien
caggcgaggcaagcttgtcttcgta

SEQ ID NO: 1816512 - DNA, 25 bp, Homo sapien
gacagaaaagtcaggcgaggcaagc

SEQ ID NO: 1816513 - DNA, 25 bp, Homo sapien
aaacctcccttcaacagtcagggtg

SEQ ID NO: 1816514 - DNA, 25 bp, Homo sapien
tcccttcaacagtcagggtgtctgt

SEQ ID NO: 1816515 - DNA, 25 bp, Homo sapien
tattttgtggcttccaaaattctaa

SEQ ID NO: 1816516 - DNA, 25 bp, Homo sapien
ctattttgtggcttccaaaattcta

SEQ ID NO: 1816517 - DNA, 25 bp, Homo sapien
ggtcaagaatctacgcatcggatgt

SEQ ID NO: 1816518 - DNA, 25 bp, Homo sapien
tctttacttgatgcattcaaaagca

SEQ ID NO: 1816519 - DNA, 25 bp, Homo sapien
gttttcccatggctatcaggaggat

SEQ ID NO: 1816520 - DNA, 25 bp, Homo sapien
caaaattcatgggtgtaaacagcca

SEQ ID NO: 1816521 - DNA, 25 bp, Homo sapien
actcaggtaataaagcactaagctt

SEQ ID NO: 1816522 - DNA, 25 bp, Homo sapien
gatttttgtattgctacagtctctt

SEQ ID NO: 1816523 - DNA, 25 bp, Homo sapien
tgatttttgtattgctacagtctct

SEQ ID NO: 1816524 - DNA, 25 bp, Homo sapien
taaaaactcaggtaataaagcacta

SEQ ID NO: 1816525 - DNA, 25 bp, Homo sapien
aaatctccccaagaataggatgcta

SEQ ID NO: 1816526 - DNA, 25 bp, Homo sapien
aatctccccaagaataggatgctac

SEQ ID NO: 1816527 - DNA, 25 bp, Homo sapien
aagaaaatctccccaagaataggat

SEQ ID NO: 1816528 - DNA, 25 bp, Homo sapien
gaaaatctccccaagaataggatgc

SEQ ID NO: 1816529 - DNA, 25 bp, Homo sapien
aatggatggtcggcagtgaaatttt

SEQ ID NO: 1816530 - DNA, 25 bp, Homo sapien
ctgaggaattatgccgaataaagaa

SEQ ID NO: 1816531 - DNA, 25 bp, Homo sapien
aaaaggaatggatggtcggcagtga

SEQ ID NO: 1816532 - DNA, 25 bp, Homo sapien
gaattatgccgaataaagaaaagga

SEQ ID NO: 1816533 - DNA, 25 bp, Homo sapien
tgcagaaagttgcgatgcctgctgt

SEQ ID NO: 1816534 - DNA, 25 bp, Homo sapien
gcagaaagttgcgatgcctgctgtg

SEQ ID NO: 1816535 - DNA, 25 bp, Homo sapien
atgcagaaagttgcgatgcctgctg

SEQ ID NO: 1816536 - DNA, 25 bp, Homo sapien
catgcagaaagttgcgatgcctgct

SEQ ID NO: 1816537 - DNA, 25 bp, Homo sapien
tgaacctgggcaagctgacattaac

SEQ ID NO: 1816538 - DNA, 25 bp, Homo sapien
taaagagatcctgcacacctaggcg

SEQ ID NO: 1816539 - DNA, 25 bp, Homo sapien
gattctcaggtttagtccactcatg

SEQ ID NO: 1816540 - DNA, 25 bp, Homo sapien
gatcagccttgctactgttaaagag

SEQ ID NO: 1816541 - DNA, 25 bp, Homo sapien
gagcaggctagagtccctacatata

SEQ ID NO: 1816542 - DNA, 25 bp, Homo sapien
cccttcctgatagcaaggatgatga

SEQ ID NO: 1816543 - DNA, 25 bp, Homo sapien
caagtgtccactgaaagtagctggc

SEQ ID NO: 1816544 - DNA, 25 bp, Homo sapien
taaataggcctaacatgtcacatga

SEQ ID NO: 1816545 - DNA, 25 bp, Homo sapien
gccttggtaaggcagttccagcaca

SEQ ID NO: 1816546 - DNA, 25 bp, Homo sapien
gcacacggcacttaaggtcctcgat

SEQ ID NO: 1816547 - DNA, 25 bp, Homo sapien
ggtcctcgatgtagccatatgcaaa

SEQ ID NO: 1816548 - DNA, 25 bp, Homo sapien
tggactcgtcctcaatgtcatccgg

SEQ ID NO: 1816549 - DNA, 25 bp, Homo sapien
gagcaatgcatgactctgtacagtt

SEQ ID NO: 1816550 - DNA, 25 bp, Homo sapien
gactctgtacagttacctcacctca

SEQ ID NO: 1816551 - DNA, 25 bp, Homo sapien
gcatgactctgtacagttacctcac

SEQ ID NO: 1816552 - DNA, 25 bp, Homo sapien
caatgcatgactctgtacagttacc

SEQ ID NO: 1816553 - DNA, 25 bp, Homo sapien
ggtcatgttatcaaccatgcccgaa

SEQ ID NO: 1816554 - DNA, 25 bp, Homo sapien
tctgaatggtgcattcgtcgtggct

SEQ ID NO: 1816555 - DNA, 25 bp, Homo sapien
tactagcacaagtttggtcatgtta

SEQ ID NO: 1816556 - DNA, 25 bp, Homo sapien
aatagatggcatttactagcacaag

SEQ ID NO: 1816557 - DNA, 25 bp, Homo sapien
gaaaaaaggatttagctgcttgagt

SEQ ID NO: 1816558 - DNA, 25 bp, Homo sapien
cactctggtgaacttcgaacatgtg

SEQ ID NO: 1816559 - DNA, 25 bp, Homo sapien
acttcgaacatgtgagagctgtcca

SEQ ID NO: 1816560 - DNA, 25 bp, Homo sapien
caccgcgcctgccaatgttggtttt

SEQ ID NO: 1816561 - DNA, 25 bp, Homo sapien
gaaacgaatgacatgaccagcgcat

SEQ ID NO: 1816562 - DNA, 25 bp, Homo sapien
ataactgcaggtagggaaggcggac

SEQ ID NO: 1816563 - DNA, 25 bp, Homo sapien
tgactgtaaccacgatgtgcgccag

SEQ ID NO: 1816564 - DNA, 25 bp, Homo sapien
gtgcagtgcagacttcacgcaccgg

SEQ ID NO: 1816565 - DNA, 25 bp, Homo sapien
tttgacccactggtttatggtcttc

SEQ ID NO: 1816566 - DNA, 25 bp, Homo sapien
ccactggtttatggtcttccttgca

SEQ ID NO: 1816567 - DNA, 25 bp, Homo sapien
ggtttatggtcttccttgcatcttc

SEQ ID NO: 1816568 - DNA, 25 bp, Homo sapien
tgacccactggtttatggtcttcct

SEQ ID NO: 1816569 - DNA, 25 bp, Homo sapien
tttagaatgtgaagggcaaagtact

SEQ ID NO: 1816570 - DNA, 25 bp, Homo sapien
cattccagtagtggtaagcctaacc

SEQ ID NO: 1816571 - DNA, 25 bp, Homo sapien
caattaaagtttgcattctgtcgtg

SEQ ID NO: 1816572 - DNA, 25 bp, Homo sapien
ttaaaactgacctccatgacttgat

SEQ ID NO: 1816573 - DNA, 25 bp, Homo sapien
gtttcagaatataagacgctccacg

SEQ ID NO: 1816574 - DNA, 25 bp, Homo sapien
tataatctattagcaagtttcagaa

SEQ ID NO: 1816575 - DNA, 25 bp, Homo sapien
tcttcaaccgtgttgaaatggaaag

SEQ ID NO: 1816576 - DNA, 25 bp, Homo sapien
agacgctccacgtttgttgatatca

SEQ ID NO: 1816577 - DNA, 25 bp, Homo sapien
tggaagcctgcatacaagtgtgact

SEQ ID NO: 1816578 - DNA, 25 bp, Homo sapien
gagtaatagaagtttcgcagcccct

SEQ ID NO: 1816579 - DNA, 25 bp, Homo sapien
caaaattgcatagggtacgaagtcc

SEQ ID NO: 1816580 - DNA, 25 bp, Homo sapien
gagtgacctgtcacatcgccaaggg

SEQ ID NO: 1816581 - DNA, 25 bp, Homo sapien
cagactgtccattcgtagggagatg

SEQ ID NO: 1816582 - DNA, 25 bp, Homo sapien
gcagactgtccattcgtagggagat

SEQ ID NO: 1816583 - DNA, 25 bp, Homo sapien
tgcagactgtccattcgtagggaga

SEQ ID NO: 1816584 - DNA, 25 bp, Homo sapien
ttggacagctgtgctgccgtgttac

SEQ ID NO: 1816585 - DNA, 25 bp, Homo sapien
gacagctgtgctgccgtgttacctc

SEQ ID NO: 1816586 - DNA, 25 bp, Homo sapien
agctgtgctgccgtgttacctctgg

SEQ ID NO: 1816587 - DNA, 25 bp, Homo sapien
tgtgctgccgtgttacctctggtcc

SEQ ID NO: 1816588 - DNA, 25 bp, Homo sapien
gtccaaggcgaagcgggtgtttgct

SEQ ID NO: 1816589 - DNA, 25 bp, Homo sapien
gattgttctcactcaacgccaggaa

SEQ ID NO: 1816590 - DNA, 25 bp, Homo sapien
aacgccaggaacaggtccaaggcga

SEQ ID NO: 1816591 - DNA, 25 bp, Homo sapien
tccagccggattgttctcactcaac

SEQ ID NO: 1816592 - DNA, 25 bp, Homo sapien
aatttctgccaaccgccctgaggca

SEQ ID NO: 1816593 - DNA, 25 bp, Homo sapien
ggcatcctggatcttgtactttctc

SEQ ID NO: 1816594 - DNA, 25 bp, Homo sapien
ggcagcactatttctccagaagctt

SEQ ID NO: 1816595 - DNA, 25 bp, Homo sapien
tgcccacgccagcagattaggcagc

SEQ ID NO: 1816596 - DNA, 25 bp, Homo sapien
tctcagagccggtgtaggatgtgcc

SEQ ID NO: 1816597 - DNA, 25 bp, Homo sapien
taagagccttctatcagagactcag

SEQ ID NO: 1816598 - DNA, 25 bp, Homo sapien
ccaacctatgtgtgggagcgcacgt

SEQ ID NO: 1816599 - DNA, 25 bp, Homo sapien
ctaaagggctctgaccttgcagaca

SEQ ID NO: 1816600 - DNA, 25 bp, Homo sapien
caggcaaagaagaaccgtgctggct

SEQ ID NO: 1816601 - DNA, 25 bp, Homo sapien
gctcggcatgtaagcacaaagctga

SEQ ID NO: 1816602 - DNA, 25 bp, Homo sapien
tgcctggaaaccgtcacaaacagct

SEQ ID NO: 1816603 - DNA, 25 bp, Homo sapien
gaaatcgtctctagaatcgcacggg

SEQ ID NO: 1816604 - DNA, 25 bp, Homo sapien
ttccgcctgcatctgtcgtcctccc

SEQ ID NO: 1816605 - DNA, 25 bp, Homo sapien
cttccgcctgcatctgtcgtcctcc

SEQ ID NO: 1816606 - DNA, 25 bp, Homo sapien
ttcagtcttgccttccgcctgcatc

SEQ ID NO: 1816607 - DNA, 25 bp, Homo sapien
tccgcctgcatctgtcgtcctccct

SEQ ID NO: 1816608 - DNA, 25 bp, Homo sapien
gctgagcgagggagcctggcctctc

SEQ ID NO: 1816609 - DNA, 25 bp, Homo sapien
ggatgggggcgcgaagctggcgggg

SEQ ID NO: 1816610 - DNA, 25 bp, Homo sapien
tctgtctccgtcggggcgcccggaa

SEQ ID NO: 1816611 - DNA, 25 bp, Homo sapien
atcagaggtcgtctgtctccgtcgg

SEQ ID NO: 1816612 - DNA, 25 bp, Homo sapien
tgactgcgtaggagtccgagctccc

SEQ ID NO: 1816613 - DNA, 25 bp, Homo sapien
ttatagcaggcggaagcgtcacccg

SEQ ID NO: 1816614 - DNA, 25 bp, Homo sapien
agctcccgaggtcgcctaagtgcaa

SEQ ID NO: 1816615 - DNA, 25 bp, Homo sapien
accgagggccgctgctcttatagca

SEQ ID NO: 1816616 - DNA, 25 bp, Homo sapien
gacacctggtgaatagagacatgca

SEQ ID NO: 1816617 - DNA, 25 bp, Homo sapien
cagaccctctgtgtgaagtgtgttc

SEQ ID NO: 1816618 - DNA, 25 bp, Homo sapien
tgacggaatgtggtacagaccctct

SEQ ID NO: 1816619 - DNA, 25 bp, Homo sapien
tgacccgaccctctgtatgaagcat

SEQ ID NO: 1816620 - DNA, 25 bp, Homo sapien
atgatatcaccacaccgaagtccag

SEQ ID NO: 1816621 - DNA, 25 bp, Homo sapien
gacatttaagctcgtggtggcccta

SEQ ID NO: 1816622 - DNA, 25 bp, Homo sapien
tgtgaaaccagaaccgacagtcgaa

SEQ ID NO: 1816623 - DNA, 25 bp, Homo sapien
ggccctatgaggagtcattgctgac

SEQ ID NO: 1816624 - DNA, 25 bp, Homo sapien
tccatgaagggctagcgcacaaact

SEQ ID NO: 1816625 - DNA, 25 bp, Homo sapien
tgtaaacgtgggacatccagggcag

SEQ ID NO: 1816626 - DNA, 25 bp, Homo sapien
gacgaagcgatgtatggtttgaccc

SEQ ID NO: 1816627 - DNA, 25 bp, Homo sapien
gacagggacggctctatctcttggg

SEQ ID NO: 1816628 - DNA, 25 bp, Homo sapien
ctccatgctgcggttttcttgtaac

SEQ ID NO: 1816629 - DNA, 25 bp, Homo sapien
gcatcggtaattccccaacagctga

SEQ ID NO: 1816630 - DNA, 25 bp, Homo sapien
tgtaacttgaatcgaggagacttcc

SEQ ID NO: 1816631 - DNA, 25 bp, Homo sapien
tcaaaggcatcggtaattccccaac

SEQ ID NO: 1816632 - DNA, 25 bp, Homo sapien
gtccactcgctgacttcttcatata

SEQ ID NO: 1816633 - DNA, 25 bp, Homo sapien
tcgctgacttcttcatatataagct

SEQ ID NO: 1816634 - DNA, 25 bp, Homo sapien
tgcgcctggctttgtccactcgctg

SEQ ID NO: 1816635 - DNA, 25 bp, Homo sapien
tggctttgtccactcgctgacttct

SEQ ID NO: 1816636 - DNA, 25 bp, Homo sapien
cagaggctcttcatgggaaggccag

SEQ ID NO: 1816637 - DNA, 25 bp, Homo sapien
gaggctcttcatgggaaggccagac

SEQ ID NO: 1816638 - DNA, 25 bp, Homo sapien
agaggctcttcatgggaaggccaga

SEQ ID NO: 1816639 - DNA, 25 bp, Homo sapien
acagaggctcttcatgggaaggcca

SEQ ID NO: 1816640 - DNA, 25 bp, Homo sapien
atgtatccgaacaccgtctcctggc

SEQ ID NO: 1816641 - DNA, 25 bp, Homo sapien
ggggatgtatccgaacaccgtctcc

SEQ ID NO: 1816642 - DNA, 25 bp, Homo sapien
agcggggatgtatccgaacaccgtc

SEQ ID NO: 1816643 - DNA, 25 bp, Homo sapien
ggatgtatccgaacaccgtctcctg

SEQ ID NO: 1816644 - DNA, 25 bp, Homo sapien
ccgggtgcttggaggccggccagcg

SEQ ID NO: 1816645 - DNA, 25 bp, Homo sapien
ggagctgtacatgagcagaggcccg

SEQ ID NO: 1816646 - DNA, 25 bp, Homo sapien
ggccggccagcgttggtgggccttc

SEQ ID NO: 1816647 - DNA, 25 bp, Homo sapien
tacatgagcagaggcccgggtgctt

SEQ ID NO: 1816648 - DNA, 25 bp, Homo sapien
gataacaggccttaagaattgctat

SEQ ID NO: 1816649 - DNA, 25 bp, Homo sapien
tgaattaactctcgaagtgggagga

SEQ ID NO: 1816650 - DNA, 25 bp, Homo sapien
aaaagtctgcgttaggactcagctg

SEQ ID NO: 1816651 - DNA, 25 bp, Homo sapien
gataaagctgcaaaccgttttcctg

SEQ ID NO: 1816652 - DNA, 25 bp, Homo sapien
ctaagcacagtgaaaccatgaggcc

SEQ ID NO: 1816653 - DNA, 25 bp, Homo sapien
tataacacatcatgagggtctgcgg

SEQ ID NO: 1816654 - DNA, 25 bp, Homo sapien
ccatgaggccaccaggagtgaatta

SEQ ID NO: 1816655 - DNA, 25 bp, Homo sapien
cagtcacggtgaagatctgcaactt

SEQ ID NO: 1816656 - DNA, 25 bp, Homo sapien
acccaatgtgaaaggtgtcccctgg

SEQ ID NO: 1816657 - DNA, 25 bp, Homo sapien
atacccaatgtgaaaggtgtcccct

SEQ ID NO: 1816658 - DNA, 25 bp, Homo sapien
tacccaatgtgaaaggtgtcccctg

SEQ ID NO: 1816659 - DNA, 25 bp, Homo sapien
catacccaatgtgaaaggtgtcccc

SEQ ID NO: 1816660 - DNA, 25 bp, Homo sapien
gggtatctgggattacatgccgaca

SEQ ID NO: 1816661 - DNA, 25 bp, Homo sapien
gctgattttaagactccctacccca

SEQ ID NO: 1816662 - DNA, 25 bp, Homo sapien
tttgaaacactgatgcacagctgtg

SEQ ID NO: 1816663 - DNA, 25 bp, Homo sapien
aactgtgtagatcactttcctttga

SEQ ID NO: 1816664 - DNA, 25 bp, Homo sapien
tcttgggatgctccaactcaggaaa

SEQ ID NO: 1816665 - DNA, 25 bp, Homo sapien
tgggatgctccaactcaggaaaggg

SEQ ID NO: 1816666 - DNA, 25 bp, Homo sapien
tgtgtcttgggatgctccaactcag

SEQ ID NO: 1816667 - DNA, 25 bp, Homo sapien
tgtcttgggatgctccaactcagga

SEQ ID NO: 1816668 - DNA, 25 bp, Homo sapien
ctctgaatccgctcatctgaggagt

SEQ ID NO: 1816669 - DNA, 25 bp, Homo sapien
cttctctctgaatccgctcatctga

SEQ ID NO: 1816670 - DNA, 25 bp, Homo sapien
gccagcacgctctcaaaagcttctc

SEQ ID NO: 1816671 - DNA, 25 bp, Homo sapien
gtgaaaaatgtctccgccagcacgc

SEQ ID NO: 1816672 - DNA, 25 bp, Homo sapien
ctccctgtgaaggacgccgccccct

SEQ ID NO: 1816673 - DNA, 25 bp, Homo sapien
caccctccctgtgaaggacgccgcc

SEQ ID NO: 1816674 - DNA, 25 bp, Homo sapien
cttaatgtaacaaaagccatctatg

SEQ ID NO: 1816675 - DNA, 25 bp, Homo sapien
taatgtaacaaaagccatctatgac

SEQ ID NO: 1816676 - DNA, 25 bp, Homo sapien
gttgaaagcattccctctgagaatg

SEQ ID NO: 1816677 - DNA, 25 bp, Homo sapien
cattccctctgagaatgggaacaag

SEQ ID NO: 1816678 - DNA, 25 bp, Homo sapien
aaggtgaaggtgaactgccatgtgc

SEQ ID NO: 1816679 - DNA, 25 bp, Homo sapien
tgcagagatcacaaggcaatagatc

SEQ ID NO: 1816680 - DNA, 25 bp, Homo sapien
taaggatgcctgttttctcgtatgc

SEQ ID NO: 1816681 - DNA, 25 bp, Homo sapien
tctgcgggctgtacaaaaggcatgg

SEQ ID NO: 1816682 - DNA, 25 bp, Homo sapien
aagtggtgtcggaaatcacaaaggg

SEQ ID NO: 1816683 - DNA, 25 bp, Homo sapien
ctttatgaatggaaaagtacttcta

SEQ ID NO: 1816684 - DNA, 25 bp, Homo sapien
tggaaaagtacttctaagaatggaa

SEQ ID NO: 1816685 - DNA, 25 bp, Homo sapien
agtggtgtcggaaatcacaaaggga

SEQ ID NO: 1816686 - DNA, 25 bp, Homo sapien
agcattatctatcaaagggactgga

SEQ ID NO: 1816687 - DNA, 25 bp, Homo sapien
tgtggaatggttcaactgctgtgga

SEQ ID NO: 1816688 - DNA, 25 bp, Homo sapien
aagatactgaactagggctgggctc

SEQ ID NO: 1816689 - DNA, 25 bp, Homo sapien
tacccaagagaatgcaaaataggca

SEQ ID NO: 1816690 - DNA, 25 bp, Homo sapien
aagaagtgccctccaagtacaaaga

SEQ ID NO: 1816691 - DNA, 25 bp, Homo sapien
tgtcaaaggaggatggctctgtccc

SEQ ID NO: 1816692 - DNA, 25 bp, Homo sapien
caaaactatatacgttgggcacaga

SEQ ID NO: 1816693 - DNA, 25 bp, Homo sapien
gaaagatgtgatccctacaagagga

SEQ ID NO: 1816694 - DNA, 25 bp, Homo sapien
gagagccagactgcgtctcagaaaa

SEQ ID NO: 1816695 - DNA, 25 bp, Homo sapien
ccttttttataaggctaagcaccag

SEQ ID NO: 1816696 - DNA, 25 bp, Homo sapien
acagagagccagactgcgtctcaga

SEQ ID NO: 1816697 - DNA, 25 bp, Homo sapien
ggctaagcaccaggaaatctataaa

SEQ ID NO: 1816698 - DNA, 25 bp, Homo sapien
cagacaggtaaagaatctgccctca

SEQ ID NO: 1816699 - DNA, 25 bp, Homo sapien
tagcataagcgagtgtggagcatca

SEQ ID NO: 1816700 - DNA, 25 bp, Homo sapien
accatttattaccactgaggcagcg

SEQ ID NO: 1816701 - DNA, 25 bp, Homo sapien
cacagggtcgccagagtgaattgca

SEQ ID NO: 1816702 - DNA, 25 bp, Homo sapien
agggaaatggccgagtgcacggtaa

SEQ ID NO: 1816703 - DNA, 25 bp, Homo sapien
aaatggccgagtgcacggtaagtgc

SEQ ID NO: 1816704 - DNA, 25 bp, Homo sapien
gccgagtgcacggtaagtgcaccct

SEQ ID NO: 1816705 - DNA, 25 bp, Homo sapien
ctaggcccatcctcttggagctgta

SEQ ID NO: 1816706 - DNA, 25 bp, Homo sapien
ttatggcgatgagaacctgccacag

SEQ ID NO: 1816707 - DNA, 25 bp, Homo sapien
gccacagaacagaatgctgttggct

SEQ ID NO: 1816708 - DNA, 25 bp, Homo sapien
gaacagaatgctgttggctctgttg

SEQ ID NO: 1816709 - DNA, 25 bp, Homo sapien
gagaacctgccacagaacagaatgc

SEQ ID NO: 1816710 - DNA, 25 bp, Homo sapien
aaggaaagggtggtcagcacagaac

SEQ ID NO: 1816711 - DNA, 25 bp, Homo sapien
aaaaggaaagggtggtcagcacaga

SEQ ID NO: 1816712 - DNA, 25 bp, Homo sapien
agaaaaggaaagggtggtcagcaca

SEQ ID NO: 1816713 - DNA, 25 bp, Homo sapien
tgaagaaaaggaaagggtggtcagc

SEQ ID NO: 1816714 - DNA, 25 bp, Homo sapien
caactacaaagcagctcgacgctgc

SEQ ID NO: 1816715 - DNA, 25 bp, Homo sapien
cagattccatgcagcactctgcaac

SEQ ID NO: 1816716 - DNA, 25 bp, Homo sapien
ggccagattccatgcagcactctgc

SEQ ID NO: 1816717 - DNA, 25 bp, Homo sapien
tacaaagcagctcgacgctgccgct

SEQ ID NO: 1816718 - DNA, 25 bp, Homo sapien
gacattgccgacaagtcagccttgc

SEQ ID NO: 1816719 - DNA, 25 bp, Homo sapien
tggcttggtccaggctgtgagtttc

SEQ ID NO: 1816720 - DNA, 25 bp, Homo sapien
cctgttggaaggcatcaacaattcc

SEQ ID NO: 1816721 - DNA, 25 bp, Homo sapien
gaaggagaacttcaacctcagtact

SEQ ID NO: 1816722 - DNA, 25 bp, Homo sapien
tgtagtttggcagatcacgcagaca

SEQ ID NO: 1816723 - DNA, 25 bp, Homo sapien
aaagttcgatcccaacgccaagtgc

SEQ ID NO: 1816724 - DNA, 25 bp, Homo sapien
tccttctagcgatgaaaaaacagag

SEQ ID NO: 1816725 - DNA, 25 bp, Homo sapien
tgcacagtgtgcgtctgccgcatcg

SEQ ID NO: 1816726 - DNA, 25 bp, Homo sapien
tcagctccttcctggcgtagggcag

SEQ ID NO: 1816727 - DNA, 25 bp, Homo sapien
cgtgggcgagcttaaacgtggcctc

SEQ ID NO: 1816728 - DNA, 25 bp, Homo sapien
ctccacgccgtcgtcaggcagcagc

SEQ ID NO: 1816729 - DNA, 25 bp, Homo sapien
taaacgtggcctcctgatacatcat

SEQ ID NO: 1816730 - DNA, 25 bp, Homo sapien
gttttcagcacctgtgatggaaacc

SEQ ID NO: 1816731 - DNA, 25 bp, Homo sapien
cctgtgatggaaaccgccacattca

SEQ ID NO: 1816732 - DNA, 25 bp, Homo sapien
acattcatgccccagttaacactaa

SEQ ID NO: 1816733 - DNA, 25 bp, Homo sapien
gggaaggattattgaaagacgcaat

SEQ ID NO: 1816734 - DNA, 25 bp, Homo sapien
tatagttccacaacagcatgacagg

SEQ ID NO: 1816735 - DNA, 25 bp, Homo sapien
taagcacatagaagctcagcaaagt

SEQ ID NO: 1816736 - DNA, 25 bp, Homo sapien
taaatggatacactctctcagaaag

SEQ ID NO: 1816737 - DNA, 25 bp, Homo sapien
caaaaaatgcaggagggttacctgc

SEQ ID NO: 1816738 - DNA, 25 bp, Homo sapien
tggcttacgcttatgtcacttacac

SEQ ID NO: 1816739 - DNA, 25 bp, Homo sapien
caacttcttcatcaaactagcagga

SEQ ID NO: 1816740 - DNA, 25 bp, Homo sapien
tatgcagcaaatatcttttactcct

SEQ ID NO: 1816741 - DNA, 25 bp, Homo sapien
gaaattatcaaaggcagttaagagc

SEQ ID NO: 1816742 - DNA, 25 bp, Homo sapien
tcccttgtgtatgtttcgtcaaacg

SEQ ID NO: 1816743 - DNA, 25 bp, Homo sapien
tcgtcaaacggttcattccactttc

SEQ ID NO: 1816744 - DNA, 25 bp, Homo sapien
tctgcatcaattgagctacccggca

SEQ ID NO: 1816745 - DNA, 25 bp, Homo sapien
gaagtagatggcattgacaagaacc

SEQ ID NO: 1816746 - DNA, 25 bp, Homo sapien
gactggaacacgtcactttctgaaa

SEQ ID NO: 1816747 - DNA, 25 bp, Homo sapien
gagggtcggcagttaaccaatcaaa

SEQ ID NO: 1816748 - DNA, 25 bp, Homo sapien
tatacctcaggcaagatctgtccac

SEQ ID NO: 1816749 - DNA, 25 bp, Homo sapien
ttctcgcagagacaatggagtcacc

SEQ ID NO: 1816750 - DNA, 25 bp, Homo sapien
cttcagctcagcatggtagaattga

SEQ ID NO: 1816751 - DNA, 25 bp, Homo sapien
gtagaattgaagacaggattcctta

SEQ ID NO: 1816752 - DNA, 25 bp, Homo sapien
ttcagctcagcatggtagaattgaa

SEQ ID NO: 1816753 - DNA, 25 bp, Homo sapien
ggtagaattgaagacaggattcctt

SEQ ID NO: 1816754 - DNA, 25 bp, Homo sapien
tccaaagagcctgttggccgttctc

SEQ ID NO: 1816755 - DNA, 25 bp, Homo sapien
tggaaagcccgatgaatgtcttcct

SEQ ID NO: 1816756 - DNA, 25 bp, Homo sapien
cctgttggccgttctcagcaggtac

SEQ ID NO: 1816757 - DNA, 25 bp, Homo sapien
agtgagaagcgactggaaagcccga

SEQ ID NO: 1816758 - DNA, 25 bp, Homo sapien
caagatcccatctccacttagctgg

SEQ ID NO: 1816759 - DNA, 25 bp, Homo sapien
attgcaagatcccatctccacttag

SEQ ID NO: 1816760 - DNA, 25 bp, Homo sapien
gatcccatctccacttagctgggca

SEQ ID NO: 1816761 - DNA, 25 bp, Homo sapien
tatttaaaatattcttctaggctgg

SEQ ID NO: 1816762 - DNA, 25 bp, Homo sapien
taaaaacctacgctcttgcacaaag

SEQ ID NO: 1816763 - DNA, 25 bp, Homo sapien
tgtgcaaggacatctacccaggaac

SEQ ID NO: 1816764 - DNA, 25 bp, Homo sapien
taacacaactatcacaaaggactct

SEQ ID NO: 1816765 - DNA, 25 bp, Homo sapien
gagagggttctcacgcttgaatgcc

SEQ ID NO: 1816766 - DNA, 25 bp, Homo sapien
cagtgtgcagctgtaatgaagcact

SEQ ID NO: 1816767 - DNA, 25 bp, Homo sapien
gcagctgtaatgaagcacttgccct

SEQ ID NO: 1816768 - DNA, 25 bp, Homo sapien
ccctggaatccttcttgcaaatttc

SEQ ID NO: 1816769 - DNA, 25 bp, Homo sapien
ctgcacagtgtgcagctgtaatgaa

SEQ ID NO: 1816770 - DNA, 25 bp, Homo sapien
tctgcgctaggacaagacagcttgg

SEQ ID NO: 1816771 - DNA, 25 bp, Homo sapien
ctgaaacggccagtgcacactcggg

SEQ ID NO: 1816772 - DNA, 25 bp, Homo sapien
ccccaaataaatctcggtggagcag

SEQ ID NO: 1816773 - DNA, 25 bp, Homo sapien
tgaagctggtgacagaacacgcagc

SEQ ID NO: 1816774 - DNA, 25 bp, Homo sapien
ccatctgggttgcggtgtttccctt

SEQ ID NO: 1816775 - DNA, 25 bp, Homo sapien
gggttatcttgacacagtatcttta

SEQ ID NO: 1816776 - DNA, 25 bp, Homo sapien
taaaaggcgtatggcaaaagtacca

SEQ ID NO: 1816777 - DNA, 25 bp, Homo sapien
gaacagaacacgttgtgcgaagggt

SEQ ID NO: 1816778 - DNA, 25 bp, Homo sapien
gccggtggacctgaagctcgccact

SEQ ID NO: 1816779 - DNA, 25 bp, Homo sapien
gtcctccggtcccatcactcggtgg

SEQ ID NO: 1816780 - DNA, 25 bp, Homo sapien
ttggctgagcgacctctcctgtcct

SEQ ID NO: 1816781 - DNA, 25 bp, Homo sapien
gggctcttggctgagcgacctctcc

SEQ ID NO: 1816782 - DNA, 25 bp, Homo sapien
gcctctgcaggcaccgcttttatac

SEQ ID NO: 1816783 - DNA, 25 bp, Homo sapien
gcttttataccgcagggtcgggcgc

SEQ ID NO: 1816784 - DNA, 25 bp, Homo sapien
tcgccgcggactcccgctagggcct

SEQ ID NO: 1816785 - DNA, 25 bp, Homo sapien
cacgctttctgcgtttaggcggagc

SEQ ID NO: 1816786 - DNA, 25 bp, Homo sapien
gggcgccgcgcgtggtggccgaggt

SEQ ID NO: 1816787 - DNA, 25 bp, Homo sapien
ctggcgggaccagcgggggcgccgc

SEQ ID NO: 1816788 - DNA, 25 bp, Homo sapien
cgggggcgccgcgcgtggtggccga

SEQ ID NO: 1816789 - DNA, 25 bp, Homo sapien
ccgcgcgtggtggccgaggtcagag

SEQ ID NO: 1816790 - DNA, 25 bp, Homo sapien
gcccggggcgatgtccgccaatgct

SEQ ID NO: 1816791 - DNA, 25 bp, Homo sapien
tgaggccggccaggttcccaaggcg

SEQ ID NO: 1816792 - DNA, 25 bp, Homo sapien
tgtccgccaatgctcccgccagcct

SEQ ID NO: 1816793 - DNA, 25 bp, Homo sapien
ggagcagggtcaggtcagggtcccc

SEQ ID NO: 1816794 - DNA, 25 bp, Homo sapien
gagaagtaggttgggagcctgcggc

SEQ ID NO: 1816795 - DNA, 25 bp, Homo sapien
agcctgcggcgtccagggcctccgc

SEQ ID NO: 1816796 - DNA, 25 bp, Homo sapien
gcctccgcgcgaagaaacaaggcgt

SEQ ID NO: 1816797 - DNA, 25 bp, Homo sapien
gcctcttcaggaccgggttcagaac

SEQ ID NO: 1816798 - DNA, 25 bp, Homo sapien
gaagagacactgagtcacacgggct

SEQ ID NO: 1816799 - DNA, 25 bp, Homo sapien
gcagccccattttcccgcaaagtga

SEQ ID NO: 1816800 - DNA, 25 bp, Homo sapien
tgcggtgtggtgtaagcagccccat

SEQ ID NO: 1816801 - DNA, 25 bp, Homo sapien
acactccttgtgtcctctatcaggg

SEQ ID NO: 1816802 - DNA, 25 bp, Homo sapien
caccaatgacccagccgttgtgcgt

SEQ ID NO: 1816803 - DNA, 25 bp, Homo sapien
cagccgttgtgcgtctctagactct

SEQ ID NO: 1816804 - DNA, 25 bp, Homo sapien
gttgtgcgtctctagactcttctgc

SEQ ID NO: 1816805 - DNA, 25 bp, Homo sapien
gacccagccgttgtgcgtctctaga

SEQ ID NO: 1816806 - DNA, 25 bp, Homo sapien
cctgtgggcatttgacacacttcct

SEQ ID NO: 1816807 - DNA, 25 bp, Homo sapien
agctctacctgtgggcatttgacac

SEQ ID NO: 1816808 - DNA, 25 bp, Homo sapien
tctacctgtgggcatttgacacact

SEQ ID NO: 1816809 - DNA, 25 bp, Homo sapien
cagctctacctgtgggcatttgaca

SEQ ID NO: 1816810 - DNA, 25 bp, Homo sapien
agctataatgggcttggcactagcc

SEQ ID NO: 1816811 - DNA, 25 bp, Homo sapien
taatgggcttggcactagcctccca

SEQ ID NO: 1816812 - DNA, 25 bp, Homo sapien
ttcagctataatgggcttggcacta

SEQ ID NO: 1816813 - DNA, 25 bp, Homo sapien
tataatgggcttggcactagcctcc

SEQ ID NO: 1816814 - DNA, 25 bp, Homo sapien
tcaatcgagcaaacattcacaatac

SEQ ID NO: 1816815 - DNA, 25 bp, Homo sapien
gagtgatgggaatgacatgatacaa

SEQ ID NO: 1816816 - DNA, 25 bp, Homo sapien
taatgagcggaatggcaaacccagg

SEQ ID NO: 1816817 - DNA, 25 bp, Homo sapien
tgccagagactcacacatacccaat

SEQ ID NO: 1816818 - DNA, 25 bp, Homo sapien
agggcagccttggcatagacatcaa

SEQ ID NO: 1816819 - DNA, 25 bp, Homo sapien
cagccttggcatagacatcaaatat

SEQ ID NO: 1816820 - DNA, 25 bp, Homo sapien
gccttggcatagacatcaaatatga

SEQ ID NO: 1816821 - DNA, 25 bp, Homo sapien
ttggcatagacatcaaatatgaagc

SEQ ID NO: 1816822 - DNA, 25 bp, Homo sapien
ggcaggtccaggaggtatgcttcca

SEQ ID NO: 1816823 - DNA, 25 bp, Homo sapien
agtggctggatcacccatgtgcacc

SEQ ID NO: 1816824 - DNA, 25 bp, Homo sapien
caggaggtatgcttccatgtgagag

SEQ ID NO: 1816825 - DNA, 25 bp, Homo sapien
ttggggccagtcgacacatcacttg

SEQ ID NO: 1816826 - DNA, 25 bp, Homo sapien
aggaatttgctgttgcgggtcagcc

SEQ ID NO: 1816827 - DNA, 25 bp, Homo sapien
gaatttgctgttgcgggtcagccac

SEQ ID NO: 1816828 - DNA, 25 bp, Homo sapien
atttgctgttgcgggtcagccacat

SEQ ID NO: 1816829 - DNA, 25 bp, Homo sapien
aggggagggcacatacaggaatttg

SEQ ID NO: 1816830 - DNA, 25 bp, Homo sapien
cccgcatggcatgtctgagcaatga

SEQ ID NO: 1816831 - DNA, 25 bp, Homo sapien
cgcatggcatgtctgagcaatgacc

SEQ ID NO: 1816832 - DNA, 25 bp, Homo sapien
gggcccgcatggcatgtctgagcaa

SEQ ID NO: 1816833 - DNA, 25 bp, Homo sapien
ggcccgcatggcatgtctgagcaat

SEQ ID NO: 1816834 - DNA, 25 bp, Homo sapien
tgcagtgcgttgtgtccccggttaa

SEQ ID NO: 1816835 - DNA, 25 bp, Homo sapien
agagcagcattgttgccagcttatc

SEQ ID NO: 1816836 - DNA, 25 bp, Homo sapien
cattgttgccagcttatcttgcctc

SEQ ID NO: 1816837 - DNA, 25 bp, Homo sapien
taaattttgattcaatatagcacat

SEQ ID NO: 1816838 - DNA, 25 bp, Homo sapien
gcgtcatattaattagtttgtcgga

SEQ ID NO: 1816839 - DNA, 25 bp, Homo sapien
tgtttcggacatgatcccacctgga

SEQ ID NO: 1816840 - DNA, 25 bp, Homo sapien
tagtgccttgtcgaatgagaaaccc

SEQ ID NO: 1816841 - DNA, 25 bp, Homo sapien
tgccattagcgtctccttagtgcct

SEQ ID NO: 1816842 - DNA, 25 bp, Homo sapien
gaagaggatgcagctgtcacagaaa

SEQ ID NO: 1816843 - DNA, 25 bp, Homo sapien
aagcaaaaggccaggtagggacaca

SEQ ID NO: 1816844 - DNA, 25 bp, Homo sapien
gcctgaggttgcagctgttgcgact

SEQ ID NO: 1816845 - DNA, 25 bp, Homo sapien
tggcaggccagagccgtccgcagaa

SEQ ID NO: 1816846 - DNA, 25 bp, Homo sapien
taatttccctttgccgcccatcacc

SEQ ID NO: 1816847 - DNA, 25 bp, Homo sapien
gcccatcaccttttagcaaagccac

SEQ ID NO: 1816848 - DNA, 25 bp, Homo sapien
gcaaagccacatgagcgtgcatctg

SEQ ID NO: 1816849 - DNA, 25 bp, Homo sapien
tagcaaagccacatgagcgtgcatc

SEQ ID NO: 1816850 - DNA, 25 bp, Homo sapien
ggccctttatttctgaactgccacc

SEQ ID NO: 1816851 - DNA, 25 bp, Homo sapien
aactgccaccactgcacggataagg

SEQ ID NO: 1816852 - DNA, 25 bp, Homo sapien
ataaggccacttgggttgcaggcac

SEQ ID NO: 1816853 - DNA, 25 bp, Homo sapien
atgggccctttatttctgaactgcc

SEQ ID NO: 1816854 - DNA, 25 bp, Homo sapien
gcggccgcagaagagaatcccgttg

SEQ ID NO: 1816855 - DNA, 25 bp, Homo sapien
ggccgcagaagagaatcccgttggt

SEQ ID NO: 1816856 - DNA, 25 bp, Homo sapien
gaaaagcggccgcagaagagaatcc

SEQ ID NO: 1816857 - DNA, 25 bp, Homo sapien
aaagcggccgcagaagagaatcccg

SEQ ID NO: 1816858 - DNA, 25 bp, Homo sapien
aaggggtggtcggcgcagaagcggg

SEQ ID NO: 1816859 - DNA, 25 bp, Homo sapien
ggtcggcgcagaagcgggggacgaa

SEQ ID NO: 1816860 - DNA, 25 bp, Homo sapien
gcagaagcgggggacgaatctggca

SEQ ID NO: 1816861 - DNA, 25 bp, Homo sapien
gaagcgggggacgaatctggcacac

SEQ ID NO: 1816862 - DNA, 25 bp, Homo sapien
agctcgaaggcatcagtcatgccca

SEQ ID NO: 1816863 - DNA, 25 bp, Homo sapien
gacaggtctgtctgggacattccag

SEQ ID NO: 1816864 - DNA, 25 bp, Homo sapien
acaaaagacttgtgcacgaccttgg

SEQ ID NO: 1816865 - DNA, 25 bp, Homo sapien
gacactctccatgtcgtagctttcc

SEQ ID NO: 1816866 - DNA, 25 bp, Homo sapien
gaacttctcgtaagtgagttctttc

SEQ ID NO: 1816867 - DNA, 25 bp, Homo sapien
tcgtccattctacgaacttctcgta

SEQ ID NO: 1816868 - DNA, 25 bp, Homo sapien
atcatgtccagcctcgtccattcta

SEQ ID NO: 1816869 - DNA, 25 bp, Homo sapien
tgtccagcctcgtccattctacgaa

SEQ ID NO: 1816870 - DNA, 25 bp, Homo sapien
tcagcagcgctccagtgttaaacgg

SEQ ID NO: 1816871 - DNA, 25 bp, Homo sapien
cagttgaagactttaagacccaggg

SEQ ID NO: 1816872 - DNA, 25 bp, Homo sapien
accagtggcagcgtggctatggtca

SEQ ID NO: 1816873 - DNA, 25 bp, Homo sapien
tgttaaacggctgaccgcaaagtag

SEQ ID NO: 1816874 - DNA, 25 bp, Homo sapien
tcaagtcagtggtctcgtccggaag

SEQ ID NO: 1816875 - DNA, 25 bp, Homo sapien
gatcatattcagttccttgccaaca

SEQ ID NO: 1816876 - DNA, 25 bp, Homo sapien
tgccaacatatggaagcaccaagat

SEQ ID NO: 1816877 - DNA, 25 bp, Homo sapien
catcatttgcacaggtttctcctca

SEQ ID NO: 1816878 - DNA, 25 bp, Homo sapien
tcaaaaaccaccttggcagagaagc

SEQ ID NO: 1816879 - DNA, 25 bp, Homo sapien
gcttcaccagggcaagcatgctttg

SEQ ID NO: 1816880 - DNA, 25 bp, Homo sapien
gaattgtgataagagctcgtcccca

SEQ ID NO: 1816881 - DNA, 25 bp, Homo sapien
gacactcagtcaggttaggcatggt

SEQ ID NO: 1816882 - DNA, 25 bp, Homo sapien
ctgctcctgtgagttgagtaaatac

SEQ ID NO: 1816883 - DNA, 25 bp, Homo sapien
cggagctgctcctgtgagttgagta

SEQ ID NO: 1816884 - DNA, 25 bp, Homo sapien
gagctgctcctgtgagttgagtaaa

SEQ ID NO: 1816885 - DNA, 25 bp, Homo sapien
tcggagctgctcctgtgagttgagt

SEQ ID NO: 1816886 - DNA, 25 bp, Homo sapien
caataggcacagtcaaagacgccgt

SEQ ID NO: 1816887 - DNA, 25 bp, Homo sapien
agacgccgtatggtccccagtctct

SEQ ID NO: 1816888 - DNA, 25 bp, Homo sapien
cctgcaataggcacagtcaaagacg

SEQ ID NO: 1816889 - DNA, 25 bp, Homo sapien
cacagtcaaagacgccgtatggtcc

SEQ ID NO: 1816890 - DNA, 25 bp, Homo sapien
tctttctgaattgcgaggagaacag

SEQ ID NO: 1816891 - DNA, 25 bp, Homo sapien
ggagccgcctccctgggatcatcgc

SEQ ID NO: 1816892 - DNA, 25 bp, Homo sapien
tagtcaaagcccttgtacatcttgt

SEQ ID NO: 1816893 - DNA, 25 bp, Homo sapien
aagaaggcgacgtgctgagaatggt

SEQ ID NO: 1816894 - DNA, 25 bp, Homo sapien
gacgctcgtgtgaacacaggcgctg

SEQ ID NO: 1816895 - DNA, 25 bp, Homo sapien
ccccgagccggagacgctcgtgtga

SEQ ID NO: 1816896 - DNA, 25 bp, Homo sapien
gccggagacgctcgtgtgaacacag

SEQ ID NO: 1816897 - DNA, 25 bp, Homo sapien
ctcgtgtgaacacaggcgctgctcc

SEQ ID NO: 1816898 - DNA, 25 bp, Homo sapien
atggatccactgagcccggagagag

SEQ ID NO: 1816899 - DNA, 25 bp, Homo sapien
ggagagagcaactccgcaattttac

SEQ ID NO: 1816900 - DNA, 25 bp, Homo sapien
gaaccagccttgtcaatggatccac

SEQ ID NO: 1816901 - DNA, 25 bp, Homo sapien
ccagtttcctctgaaatagacagca

SEQ ID NO: 1816902 - DNA, 25 bp, Homo sapien
ttcagcagtcaagtgcacggataga

SEQ ID NO: 1816903 - DNA, 25 bp, Homo sapien
tgcggatccccgacacatcaggaat

SEQ ID NO: 1816904 - DNA, 25 bp, Homo sapien
cacggatagagagttccactgtccc

SEQ ID NO: 1816905 - DNA, 25 bp, Homo sapien
cggaagaattcaagaccgcattaga

SEQ ID NO: 1816906 - DNA, 25 bp, Homo sapien
atggattaagaggttattacaaaag

SEQ ID NO: 1816907 - DNA, 25 bp, Homo sapien
attacaaaagtagaataacaataca

SEQ ID NO: 1816908 - DNA, 25 bp, Homo sapien
taaaatggattaagaggttattaca

SEQ ID NO: 1816909 - DNA, 25 bp, Homo sapien
ttacaaaagtagaataacaatacat

SEQ ID NO: 1816910 - DNA, 25 bp, Homo sapien
tctctacggcgctgataaagtcaag

SEQ ID NO: 1816911 - DNA, 25 bp, Homo sapien
tcagctacccaggtgtttatgtgtt

SEQ ID NO: 1816912 - DNA, 25 bp, Homo sapien
gctgataaagtcaagctcctccatc

SEQ ID NO: 1816913 - DNA, 25 bp, Homo sapien
ttctggacttctctacggcgctgat

SEQ ID NO: 1816914 - DNA, 25 bp, Homo sapien
gacagagtgacataactgcctggct

SEQ ID NO: 1816915 - DNA, 25 bp, Homo sapien
ctaagtcaaggtcaggtactgtggc

SEQ ID NO: 1816916 - DNA, 25 bp, Homo sapien
ttcaaaagcgtgaagtagatccacc

SEQ ID NO: 1816917 - DNA, 25 bp, Homo sapien
tttagagccacacgcttcctgctgg

SEQ ID NO: 1816918 - DNA, 25 bp, Homo sapien
tgagaggaaatcacaagacttttcc

SEQ ID NO: 1816919 - DNA, 25 bp, Homo sapien
aatcacaagacttttccccaaagag

SEQ ID NO: 1816920 - DNA, 25 bp, Homo sapien
gaggaaatcacaagacttttcccca

SEQ ID NO: 1816921 - DNA, 25 bp, Homo sapien
atcacaagacttttccccaaagagc

SEQ ID NO: 1816922 - DNA, 25 bp, Homo sapien
catcctaagcaagtactgcgtgcca

SEQ ID NO: 1816923 - DNA, 25 bp, Homo sapien
tcttgttcacttcggtgagaagaga

SEQ ID NO: 1816924 - DNA, 25 bp, Homo sapien
agtactgcgtgccagtcttgttcac

SEQ ID NO: 1816925 - DNA, 25 bp, Homo sapien
tgttggccatcctaagcaagtactg

SEQ ID NO: 1816926 - DNA, 25 bp, Homo sapien
ctccaccaccgccacttttattgaa

SEQ ID NO: 1816927 - DNA, 25 bp, Homo sapien
ccaccaccgccacttttattgaaag

SEQ ID NO: 1816928 - DNA, 25 bp, Homo sapien
gtctccaccaccgccacttttattg

SEQ ID NO: 1816929 - DNA, 25 bp, Homo sapien
caccaccgccacttttattgaaaga

SEQ ID NO: 1816930 - DNA, 25 bp, Homo sapien
taaaagatctatccgaggctgggcg

SEQ ID NO: 1816931 - DNA, 25 bp, Homo sapien
catccagacccttattactgcttaa

SEQ ID NO: 1816932 - DNA, 25 bp, Homo sapien
aaactcagcctaacaaccatccaga

SEQ ID NO: 1816933 - DNA, 25 bp, Homo sapien
tcattcctgtatgctctgacttcag

SEQ ID NO: 1816934 - DNA, 25 bp, Homo sapien
gccagaagggtcttgaaagcccctc

SEQ ID NO: 1816935 - DNA, 25 bp, Homo sapien
cctgtctgtgctggcatgagctgca

SEQ ID NO: 1816936 - DNA, 25 bp, Homo sapien
cctccacaaacccaggctcctgatg

SEQ ID NO: 1816937 - DNA, 25 bp, Homo sapien
gtgctggcatgagctgcaacgccct

SEQ ID NO: 1816938 - DNA, 25 bp, Homo sapien
tctgtgctggcatgagctgcaacgc

SEQ ID NO: 1816939 - DNA, 25 bp, Homo sapien
ctggtggcaaacaagggtgccaacc

SEQ ID NO: 1816940 - DNA, 25 bp, Homo sapien
aacaagggtgccaaccagacctcct

SEQ ID NO: 1816941 - DNA, 25 bp, Homo sapien
caagggtgccaaccagacctcctgt

SEQ ID NO: 1816942 - DNA, 25 bp, Homo sapien
ggcaaacaagggtgccaaccagacc

SEQ ID NO: 1816943 - DNA, 25 bp, Homo sapien
tcactggctctgactaatgatacag

SEQ ID NO: 1816944 - DNA, 25 bp, Homo sapien
cctggccaccatgacagaaggaagt

SEQ ID NO: 1816945 - DNA, 25 bp, Homo sapien
gaagtccaggctatcctgccgaagg

SEQ ID NO: 1816946 - DNA, 25 bp, Homo sapien
tggctctggaatgcccgtgtcactg

SEQ ID NO: 1816947 - DNA, 25 bp, Homo sapien
cagtggaggctcatcaaggaacacc

SEQ ID NO: 1816948 - DNA, 25 bp, Homo sapien
gcagcaacggacaagggacaattct

SEQ ID NO: 1816949 - DNA, 25 bp, Homo sapien
ggtgaacaatacatgcctggctggg

SEQ ID NO: 1816950 - DNA, 25 bp, Homo sapien
gattctaaaagagatggcctcaggg

SEQ ID NO: 1816951 - DNA, 25 bp, Homo sapien
gacagttaatagcaccatggctgcc

SEQ ID NO: 1816952 - DNA, 25 bp, Homo sapien
ttgacagttaatagcaccatggctg

SEQ ID NO: 1816953 - DNA, 25 bp, Homo sapien
tgacagttaatagcaccatggctgc

SEQ ID NO: 1816954 - DNA, 25 bp, Homo sapien
gggccatctgtgcagcggtgtttcc

SEQ ID NO: 1816955 - DNA, 25 bp, Homo sapien
catctgtgcagcggtgtttcccttt

SEQ ID NO: 1816956 - DNA, 25 bp, Homo sapien
acatgctcatgggtgagaaaaacac

SEQ ID NO: 1816957 - DNA, 25 bp, Homo sapien
acacattcttcgagttgtctttacc

SEQ ID NO: 1816958 - DNA, 25 bp, Homo sapien
tgccatttgcttctgcgagaacatc

SEQ ID NO: 1816959 - DNA, 25 bp, Homo sapien
gccatttgcttctgcgagaacatcc

SEQ ID NO: 1816960 - DNA, 25 bp, Homo sapien
catttgcttctgcgagaacatccat

SEQ ID NO: 1816961 - DNA, 25 bp, Homo sapien
ccatttgcttctgcgagaacatcca

SEQ ID NO: 1816962 - DNA, 25 bp, Homo sapien
tcagtatcacttaagcacagcttcc

SEQ ID NO: 1816963 - DNA, 25 bp, Homo sapien
cacatacaaagatgcgtgaaagcct

SEQ ID NO: 1816964 - DNA, 25 bp, Homo sapien
taggaaatccctgcaggtggcaaag

SEQ ID NO: 1816965 - DNA, 25 bp, Homo sapien
gagttctatgtgaaacgccgccctg

SEQ ID NO: 1816966 - DNA, 25 bp, Homo sapien
acaccaccttgcctcatgggctgtg

SEQ ID NO: 1816967 - DNA, 25 bp, Homo sapien
ctccaccttcacagacaggctcagg

SEQ ID NO: 1816968 - DNA, 25 bp, Homo sapien
acaggctcaggggtagggtcaggct

SEQ ID NO: 1816969 - DNA, 25 bp, Homo sapien
tccaccttcacagacaggctcaggg

SEQ ID NO: 1816970 - DNA, 25 bp, Homo sapien
acagacaggctcaggggtagggtca

SEQ ID NO: 1816971 - DNA, 25 bp, Homo sapien
ctctctagccctgccgtgcagtggg

SEQ ID NO: 1816972 - DNA, 25 bp, Homo sapien
tgccgtgcagtgggtgtggcagccc

SEQ ID NO: 1816973 - DNA, 25 bp, Homo sapien
cagcagggtccagagcaggaatgca

SEQ ID NO: 1816974 - DNA, 25 bp, Homo sapien
tctagccctgccgtgcagtgggtgt

SEQ ID NO: 1816975 - DNA, 25 bp, Homo sapien
ggcaagtcggaatcacagaatcaca

SEQ ID NO: 1816976 - DNA, 25 bp, Homo sapien
atcttcaggcaagtcggaatcacag

SEQ ID NO: 1816977 - DNA, 25 bp, Homo sapien
catgttaaagtccaccaagccctta

SEQ ID NO: 1816978 - DNA, 25 bp, Homo sapien
tccaccaagcccttagagagaccta

SEQ ID NO: 1816979 - DNA, 25 bp, Homo sapien
agtgaagctaagaagtagctgggct

SEQ ID NO: 1816980 - DNA, 25 bp, Homo sapien
aacgcagggcggatgcgctttctga

SEQ ID NO: 1816981 - DNA, 25 bp, Homo sapien
cccactgcactacagggaaggtgaa

SEQ ID NO: 1816982 - DNA, 25 bp, Homo sapien
tgaagttgacggaagtgaagctaag

SEQ ID NO: 1816983 - DNA, 25 bp, Homo sapien
ttaagcggctctccactgtgcatgc

SEQ ID NO: 1816984 - DNA, 25 bp, Homo sapien
gatacctgggtcataatccctggga

SEQ ID NO: 1816985 - DNA, 25 bp, Homo sapien
gatctcacgggaaaaagcaatgcaa

SEQ ID NO: 1816986 - DNA, 25 bp, Homo sapien
taatcacaggtatccttctaagagg

SEQ ID NO: 1816987 - DNA, 25 bp, Homo sapien
agggcctcaagccaagaaacgcaag

SEQ ID NO: 1816988 - DNA, 25 bp, Homo sapien
tggccctgcggaacccatttccaac

SEQ ID NO: 1816989 - DNA, 25 bp, Homo sapien
cacagctgcagtagctggaaaggca

SEQ ID NO: 1816990 - DNA, 25 bp, Homo sapien
ctggaaaggcaaggaggatcctctg

SEQ ID NO: 1816991 - DNA, 25 bp, Homo sapien
catgtgcagtttagccacgaatcca

SEQ ID NO: 1816992 - DNA, 25 bp, Homo sapien
tacacctgataaagcttgtttgctg

SEQ ID NO: 1816993 - DNA, 25 bp, Homo sapien
aactcttctttattcattacacaga

SEQ ID NO: 1816994 - DNA, 25 bp, Homo sapien
cgggaaaccaagacaataactcata

SEQ ID NO: 1816995 - DNA, 25 bp, Homo sapien
caggtgagatggctcctccataaac

SEQ ID NO: 1816996 - DNA, 25 bp, Homo sapien
gaggttaagtaccatgtcagctggc

SEQ ID NO: 1816997 - DNA, 25 bp, Homo sapien
tagactattctaccgtcagcacacg

SEQ ID NO: 1816998 - DNA, 25 bp, Homo sapien
tgtctttgtccccaagagggctcag

SEQ ID NO: 1816999 - DNA, 25 bp, Homo sapien
ccaaagcaggatattcggaggagaa

SEQ ID NO: 1817000 - DNA, 25 bp, Homo sapien
tggaaatgtccacctaagaaaggct

SEQ ID NO: 1817001 - DNA, 25 bp, Homo sapien
ggtaatatcccggagaatctgtttc

SEQ ID NO: 1817002 - DNA, 25 bp, Homo sapien
tttgtctgaagacacgcccactggg

SEQ ID NO: 1817003 - DNA, 25 bp, Homo sapien
ccagcagatccgtctgtggtctgtt

SEQ ID NO: 1817004 - DNA, 25 bp, Homo sapien
tccccagcagatccgtctgtggtct

SEQ ID NO: 1817005 - DNA, 25 bp, Homo sapien
cagcagatccgtctgtggtctgtta

SEQ ID NO: 1817006 - DNA, 25 bp, Homo sapien
cccagcagatccgtctgtggtctgt

SEQ ID NO: 1817007 - DNA, 25 bp, Homo sapien
tgcacaacaacctgcgacatgagtt

SEQ ID NO: 1817008 - DNA, 25 bp, Homo sapien
gactagatatgataggtgcacacca

SEQ ID NO: 1817009 - DNA, 25 bp, Homo sapien
cccataaagatacacgcacgcgaat

SEQ ID NO: 1817010 - DNA, 25 bp, Homo sapien
gggatctgttaacctgcccagggca

SEQ ID NO: 1817011 - DNA, 25 bp, Homo sapien
gtccttttgttatggtggctggtgt

SEQ ID NO: 1817012 - DNA, 25 bp, Homo sapien
gataccacaattatagtttattgag

SEQ ID NO: 1817013 - DNA, 25 bp, Homo sapien
attgagtcttccgttccctgcgctg

SEQ ID NO: 1817014 - DNA, 25 bp, Homo sapien
tatactaattctttggataccacaa

SEQ ID NO: 1817015 - DNA, 25 bp, Homo sapien
gaactcttcggtgtggctatcggtg

SEQ ID NO: 1817016 - DNA, 25 bp, Homo sapien
tcagctgggagcttcactgcagtgt

SEQ ID NO: 1817017 - DNA, 25 bp, Homo sapien
tacatggacaggacatgtcagctgg

SEQ ID NO: 1817018 - DNA, 25 bp, Homo sapien
cagcagcttttttgtccgggaacca

SEQ ID NO: 1817019 - DNA, 25 bp, Homo sapien
tgtcattaggcacgagagcatccca

SEQ ID NO: 1817020 - DNA, 25 bp, Homo sapien
ttaatcccaagtgcagtaagcctgg

SEQ ID NO: 1817021 - DNA, 25 bp, Homo sapien
cctgggaccgtacaacatctgcttg

SEQ ID NO: 1817022 - DNA, 25 bp, Homo sapien
aacattattttcaggctaggcgcag

SEQ ID NO: 1817023 - DNA, 25 bp, Homo sapien
cctgaaagtgctgcggattggccaa

SEQ ID NO: 1817024 - DNA, 25 bp, Homo sapien
caaagcctgtaatagtttgcctgta

SEQ ID NO: 1817025 - DNA, 25 bp, Homo sapien
aaacacagagcggtaaggagatccg

SEQ ID NO: 1817026 - DNA, 25 bp, Homo sapien
acacgatcgtctccacaggtctggg

SEQ ID NO: 1817027 - DNA, 25 bp, Homo sapien
tcctcgggtccgcggcgtcaccggc

SEQ ID NO: 1817028 - DNA, 25 bp, Homo sapien
ggccgcctcttccgtgggcgctggg

SEQ ID NO: 1817029 - DNA, 25 bp, Homo sapien
gggctcgcggccacgcacgactcac

SEQ ID NO: 1817030 - DNA, 25 bp, Homo sapien
cgcctcttccgtgggcgctgggcct

SEQ ID NO: 1817031 - DNA, 25 bp, Homo sapien
cgcgcgccgtcgacccacgcgcgtt

SEQ ID NO: 1817032 - DNA, 25 bp, Homo sapien
gctttcccgactttggagcgacaaa

SEQ ID NO: 1817033 - DNA, 25 bp, Homo sapien
tgcgaggctccggaagggaacccaa

SEQ ID NO: 1817034 - DNA, 25 bp, Homo sapien
gtcgccgttctctgccgctgcgagg

SEQ ID NO: 1817035 - DNA, 25 bp, Homo sapien
ccaagccagcgtgtccgagcggctc

SEQ ID NO: 1817036 - DNA, 25 bp, Homo sapien
aagccagcgtgtccgagcggctccc

SEQ ID NO: 1817037 - DNA, 25 bp, Homo sapien
gtgtccgagcggctcccaagccaga

SEQ ID NO: 1817038 - DNA, 25 bp, Homo sapien
cagcgtgtccgagcggctcccaagc

SEQ ID NO: 1817039 - DNA, 25 bp, Homo sapien
gagcggggagcgagcgagcagaacg

SEQ ID NO: 1817040 - DNA, 25 bp, Homo sapien
gggagcgagcgagcagaacggcggg

SEQ ID NO: 1817041 - DNA, 25 bp, Homo sapien
gcagaggcgccggagccgccccgga

SEQ ID NO: 1817042 - DNA, 25 bp, Homo sapien
gagcgagcagaacggcgggcagagg

SEQ ID NO: 1817043 - DNA, 25 bp, Homo sapien
tgatgaaacagcttgcggcaaagaa

SEQ ID NO: 1817044 - DNA, 25 bp, Homo sapien
tggtgcctctgtggagactgaatgc

SEQ ID NO: 1817045 - DNA, 25 bp, Homo sapien
tgcccggaggccttgactttgacca

SEQ ID NO: 1817046 - DNA, 25 bp, Homo sapien
cagggccccaccagcgtgtttatgg

SEQ ID NO: 1817047 - DNA, 25 bp, Homo sapien
aaaccgaaagggagtgtgtcaagca

SEQ ID NO: 1817048 - DNA, 25 bp, Homo sapien
tgaggccaatgcacgaaaccgaaag

SEQ ID NO: 1817049 - DNA, 25 bp, Homo sapien
tatatggaaatgttaccgggagtcc

SEQ ID NO: 1817050 - DNA, 25 bp, Homo sapien
cactttaagtccaagctcagcgcag

SEQ ID NO: 1817051 - DNA, 25 bp, Homo sapien
gcttcagctggtttcgtcctaagaa

SEQ ID NO: 1817052 - DNA, 25 bp, Homo sapien
gaatattcgtgctttccttgggaaa

SEQ ID NO: 1817053 - DNA, 25 bp, Homo sapien
tctcttccagtcgttgtcatggcga

SEQ ID NO: 1817054 - DNA, 25 bp, Homo sapien
ggaacttcgaaacacaggcattctt

SEQ ID NO: 1817055 - DNA, 25 bp, Homo sapien
gaattcgcccggttaatagcaccca

SEQ ID NO: 1817056 - DNA, 25 bp, Homo sapien
gagcccctgcgtttgtgtccggttg

SEQ ID NO: 1817057 - DNA, 25 bp, Homo sapien
tgtccggttgataacgcccaaagcc

SEQ ID NO: 1817058 - DNA, 25 bp, Homo sapien
caagagaatttcgagcgctagctgt

SEQ ID NO: 1817059 - DNA, 25 bp, Homo sapien
aagcaatgacctcttcaggaggtgg

SEQ ID NO: 1817060 - DNA, 25 bp, Homo sapien
cagttttccaaaggaatagggatgc

SEQ ID NO: 1817061 - DNA, 25 bp, Homo sapien
cctcttcaggaggtggctcagctag

SEQ ID NO: 1817062 - DNA, 25 bp, Homo sapien
caaaggaatagggatgctggtagca

SEQ ID NO: 1817063 - DNA, 25 bp, Homo sapien
aatgccgactccgactcttgctttc

SEQ ID NO: 1817064 - DNA, 25 bp, Homo sapien
ctccgactcttgctttccactaagg

SEQ ID NO: 1817065 - DNA, 25 bp, Homo sapien
gactccgactcttgctttccactaa

SEQ ID NO: 1817066 - DNA, 25 bp, Homo sapien
gcccagaatgccgactccgactctt

SEQ ID NO: 1817067 - DNA, 25 bp, Homo sapien
tcattttagtagcatgacctcctcc

SEQ ID NO: 1817068 - DNA, 25 bp, Homo sapien
tctcattttagtagcatgacctcct

SEQ ID NO: 1817069 - DNA, 25 bp, Homo sapien
attttagtagcatgacctcctcctc

SEQ ID NO: 1817070 - DNA, 25 bp, Homo sapien
tttatctcattttagtagcatgacc

SEQ ID NO: 1817071 - DNA, 25 bp, Homo sapien
tctgaagacaaggagaacatcatca

SEQ ID NO: 1817072 - DNA, 25 bp, Homo sapien
cactgtgagttacagcaaaatgaac

SEQ ID NO: 1817073 - DNA, 25 bp, Homo sapien
agcacatagaccaatcccagcagtg

SEQ ID NO: 1817074 - DNA, 25 bp, Homo sapien
tcccagcagtgcaccttaggatggg

SEQ ID NO: 1817075 - DNA, 25 bp, Homo sapien
ccggtttcccccgatagtggcatct

SEQ ID NO: 1817076 - DNA, 25 bp, Homo sapien
tttctgtgaagccatccggtttccc

SEQ ID NO: 1817077 - DNA, 25 bp, Homo sapien
tttcccccgatagtggcatctcaca

SEQ ID NO: 1817078 - DNA, 25 bp, Homo sapien
ttctgtgaagccatccggtttcccc

SEQ ID NO: 1817079 - DNA, 25 bp, Homo sapien
tctcagggatttcagctggccggcc

SEQ ID NO: 1817080 - DNA, 25 bp, Homo sapien
tacataggatcgtgcttggctctca

SEQ ID NO: 1817081 - DNA, 25 bp, Homo sapien
cccggtgtcgaatcgtctggtggaa

SEQ ID NO: 1817082 - DNA, 25 bp, Homo sapien
cgggccagggaccattctgtacata

SEQ ID NO: 1817083 - DNA, 25 bp, Homo sapien
ccaggcctccctatgcattgtgata

SEQ ID NO: 1817084 - DNA, 25 bp, Homo sapien
gcctccctatgcattgtgatagcca

SEQ ID NO: 1817085 - DNA, 25 bp, Homo sapien
aggcctccctatgcattgtgatagc

SEQ ID NO: 1817086 - DNA, 25 bp, Homo sapien
cctccctatgcattgtgatagccaa

SEQ ID NO: 1817087 - DNA, 25 bp, Homo sapien
ttcagacagacagtgcatggccctc

SEQ ID NO: 1817088 - DNA, 25 bp, Homo sapien
caaggtacttggacacaaagcctgt

SEQ ID NO: 1817089 - DNA, 25 bp, Homo sapien
tgtgcctggagcactttcagacaga

SEQ ID NO: 1817090 - DNA, 25 bp, Homo sapien
cattctccggtgctgtgatgtacct

SEQ ID NO: 1817091 - DNA, 25 bp, Homo sapien
gcgcgatgcgtgtcttcacactaag

SEQ ID NO: 1817092 - DNA, 25 bp, Homo sapien
taaagacacactgataggttcacgt

SEQ ID NO: 1817093 - DNA, 25 bp, Homo sapien
gggataagcaccacttttgtgtgtc

SEQ ID NO: 1817094 - DNA, 25 bp, Homo sapien
ggttcacgttgtcgtttggacacaa

SEQ ID NO: 1817095 - DNA, 25 bp, Homo sapien
gaaattgcaccaagtctgtctgatg

SEQ ID NO: 1817096 - DNA, 25 bp, Homo sapien
ggagaactcacgtttttccagagcc

SEQ ID NO: 1817097 - DNA, 25 bp, Homo sapien
tgcagggcccacagctacaatgggc

SEQ ID NO: 1817098 - DNA, 25 bp, Homo sapien
tagagcctgggtctaagccaactcc

SEQ ID NO: 1817099 - DNA, 25 bp, Homo sapien
agctgggatcgttgctccagcctgg

SEQ ID NO: 1817100 - DNA, 25 bp, Homo sapien
tgagctgggatcgttgctccagcct

SEQ ID NO: 1817101 - DNA, 25 bp, Homo sapien
gagctgggatcgttgctccagcctg

SEQ ID NO: 1817102 - DNA, 25 bp, Homo sapien
gtgagctgggatcgttgctccagcc

SEQ ID NO: 1817103 - DNA, 25 bp, Homo sapien
ttggtgtctaaatccatagatgctc

SEQ ID NO: 1817104 - DNA, 25 bp, Homo sapien
ccttcccaggcggtaacactggatg

SEQ ID NO: 1817105 - DNA, 25 bp, Homo sapien
gatagggagatcttagcgctggtct

SEQ ID NO: 1817106 - DNA, 25 bp, Homo sapien
aatgttagggcatctatgggatagg

SEQ ID NO: 1817107 - DNA, 25 bp, Homo sapien
tggtgttacgcacagctcctcgtcc

SEQ ID NO: 1817108 - DNA, 25 bp, Homo sapien
ggcttgatcacagactgctgctcca

SEQ ID NO: 1817109 - DNA, 25 bp, Homo sapien
gttacgcacagctcctcgtcccctc

SEQ ID NO: 1817110 - DNA, 25 bp, Homo sapien
ggggcatgcttttccatactcttcc

SEQ ID NO: 1817111 - DNA, 25 bp, Homo sapien
ggcctgaaatgtggccgagtagtgg

SEQ ID NO: 1817112 - DNA, 25 bp, Homo sapien
cctgaaatgtggccgagtagtggcc

SEQ ID NO: 1817113 - DNA, 25 bp, Homo sapien
tgaaatgtggccgagtagtggccac

SEQ ID NO: 1817114 - DNA, 25 bp, Homo sapien
ctgggcctgaaatgtggccgagtag

SEQ ID NO: 1817115 - DNA, 25 bp, Homo sapien
tcttcacggctcttatgcaaggctg

SEQ ID NO: 1817116 - DNA, 25 bp, Homo sapien
tattccatggcgtccgtgtaccaca

SEQ ID NO: 1817117 - DNA, 25 bp, Homo sapien
tggcacttcgggcaataactctgtg

SEQ ID NO: 1817118 - DNA, 25 bp, Homo sapien
taactctgtggcacgtgggcatcac

SEQ ID NO: 1817119 - DNA, 25 bp, Homo sapien
ttttatgactcaacatgacagtttc

SEQ ID NO: 1817120 - DNA, 25 bp, Homo sapien
tctgagcatagagctggatttgcta

SEQ ID NO: 1817121 - DNA, 25 bp, Homo sapien
tttttattttatgactcaacatgac

SEQ ID NO: 1817122 - DNA, 25 bp, Homo sapien
gagcatagagctggatttgctagtt

SEQ ID NO: 1817123 - DNA, 25 bp, Homo sapien
gatcatacctcactaggctcaagtg

SEQ ID NO: 1817124 - DNA, 25 bp, Homo sapien
tgcatgtacgatggtggtcccctaa

SEQ ID NO: 1817125 - DNA, 25 bp, Homo sapien
gcattctatgatgtttgcgtgacaa

SEQ ID NO: 1817126 - DNA, 25 bp, Homo sapien
cacgaggtcatctcctacaggcagt

SEQ ID NO: 1817127 - DNA, 25 bp, Homo sapien
tgaggtggcggatcgagaccaccct

SEQ ID NO: 1817128 - DNA, 25 bp, Homo sapien
gctgaggtggcggatcgagaccacc

SEQ ID NO: 1817129 - DNA, 25 bp, Homo sapien
ctgaggtggcggatcgagaccaccc

SEQ ID NO: 1817130 - DNA, 25 bp, Homo sapien
aagcaagagggtcacgtgagtccag

SEQ ID NO: 1817131 - DNA, 25 bp, Homo sapien
tgaagcaagagggtcacgtgagtcc

SEQ ID NO: 1817132 - DNA, 25 bp, Homo sapien
aaaaatatacattagttaggcatgg

SEQ ID NO: 1817133 - DNA, 25 bp, Homo sapien
gctgaagcaagagggtcacgtgagt

SEQ ID NO: 1817134 - DNA, 25 bp, Homo sapien
catttttggaggctaagatgggcag

SEQ ID NO: 1817135 - DNA, 25 bp, Homo sapien
agcatttttggaggctaagatgggc

SEQ ID NO: 1817136 - DNA, 25 bp, Homo sapien
gccaggcgtgatggctctcacctgg

SEQ ID NO: 1817137 - DNA, 25 bp, Homo sapien
aggcgtgatggctctcacctggaat

SEQ ID NO: 1817138 - DNA, 25 bp, Homo sapien
gtgagagaatcgctcgagctgggag

SEQ ID NO: 1817139 - DNA, 25 bp, Homo sapien
ggtgagagaatcgctcgagctggga

SEQ ID NO: 1817140 - DNA, 25 bp, Homo sapien
ttgtcatcactactgaggacagcac

SEQ ID NO: 1817141 - DNA, 25 bp, Homo sapien
tctgtggaatcggagcactgagtgt

SEQ ID NO: 1817142 - DNA, 25 bp, Homo sapien
gatggcattgtaccactgtgccgtg

SEQ ID NO: 1817143 - DNA, 25 bp, Homo sapien
cagatggaggaacttccctaaaagc

SEQ ID NO: 1817144 - DNA, 25 bp, Homo sapien
tctgtcaaagacaatgagcctccga

SEQ ID NO: 1817145 - DNA, 25 bp, Homo sapien
tgtgttcgatgaggacaactcactc

SEQ ID NO: 1817146 - DNA, 25 bp, Homo sapien
cgtagagacggagccttcctgtggt

SEQ ID NO: 1817147 - DNA, 25 bp, Homo sapien
aactcactcgtgtcgcggcgtttgg

SEQ ID NO: 1817148 - DNA, 25 bp, Homo sapien
tcttccaatgatcgcacagcctgtc

SEQ ID NO: 1817149 - DNA, 25 bp, Homo sapien
tgatatgcagcggtgaagtcttcac

SEQ ID NO: 1817150 - DNA, 25 bp, Homo sapien
gcagccgtcgctggcctgatatgca

SEQ ID NO: 1817151 - DNA, 25 bp, Homo sapien
gacaggcgtgtgaatgcctccacgg

SEQ ID NO: 1817152 - DNA, 25 bp, Homo sapien
gaaagatttgagtcattcaccatgg

SEQ ID NO: 1817153 - DNA, 25 bp, Homo sapien
taagaagtactaatggaccgggcac

SEQ ID NO: 1817154 - DNA, 25 bp, Homo sapien
taagatgtgcaattgggacggagat

SEQ ID NO: 1817155 - DNA, 25 bp, Homo sapien
gaagcgatgacacactcattatggg

SEQ ID NO: 1817156 - DNA, 25 bp, Homo sapien
gaggtgcagtcgctcttcatgcgcc

SEQ ID NO: 1817157 - DNA, 25 bp, Homo sapien
gatgtcaactaggaagaatatgccc

SEQ ID NO: 1817158 - DNA, 25 bp, Homo sapien
gaagccaaggccgacttttctggga

SEQ ID NO: 1817159 - DNA, 25 bp, Homo sapien
tgatggatcttagtgagctcggagc

SEQ ID NO: 1817160 - DNA, 25 bp, Homo sapien
gtagccaaatgcagcatgagcacca

SEQ ID NO: 1817161 - DNA, 25 bp, Homo sapien
aatcttgtggggcaaaaatcaatgt

SEQ ID NO: 1817162 - DNA, 25 bp, Homo sapien
agcataacacagctgctgggaatgg

SEQ ID NO: 1817163 - DNA, 25 bp, Homo sapien
tggcctgagcataacacagctgctg

SEQ ID NO: 1817164 - DNA, 25 bp, Homo sapien
cctgatatgcccctgtatcctggga

SEQ ID NO: 1817165 - DNA, 25 bp, Homo sapien
cagagataggtgtagtttgggccaa

SEQ ID NO: 1817166 - DNA, 25 bp, Homo sapien
gaggctatgcgggttttggggcact

SEQ ID NO: 1817167 - DNA, 25 bp, Homo sapien
cgcctgcataccctggaacgacctg

SEQ ID NO: 1817168 - DNA, 25 bp, Homo sapien
gagcagggcctgactgagcatcttc

SEQ ID NO: 1817169 - DNA, 25 bp, Homo sapien
gcagggcctgactgagcatcttcca

SEQ ID NO: 1817170 - DNA, 25 bp, Homo sapien
cagggcctgactgagcatcttccag

SEQ ID NO: 1817171 - DNA, 25 bp, Homo sapien
tggagcagggcctgactgagcatct

SEQ ID NO: 1817172 - DNA, 25 bp, Homo sapien
gggtctgcagaatactgccagaagt

SEQ ID NO: 1817173 - DNA, 25 bp, Homo sapien
ttatctccagctgtgcaggagcaca

SEQ ID NO: 1817174 - DNA, 25 bp, Homo sapien
gctggggtctgcagaatactgccag

SEQ ID NO: 1817175 - DNA, 25 bp, Homo sapien
tctgcagaatactgccagaagtgag

SEQ ID NO: 1817176 - DNA, 25 bp, Homo sapien
gcaacacttacaagaatgaacctaa

SEQ ID NO: 1817177 - DNA, 25 bp, Homo sapien
ccttcaaagcgcagggaggttccta

SEQ ID NO: 1817178 - DNA, 25 bp, Homo sapien
ggagaggtcacattcatcccttcaa

SEQ ID NO: 1817179 - DNA, 25 bp, Homo sapien
gtttaaggtacatcacagcaccgga

SEQ ID NO: 1817180 - DNA, 25 bp, Homo sapien
gttccagctacagggccacgtcccg

SEQ ID NO: 1817181 - DNA, 25 bp, Homo sapien
agcgcctctgcgaggacagctctct

SEQ ID NO: 1817182 - DNA, 25 bp, Homo sapien
tcccgcagaccaggagcgctgcggc

SEQ ID NO: 1817183 - DNA, 25 bp, Homo sapien
gacagctctctgagttgcgccaggt

SEQ ID NO: 1817184 - DNA, 25 bp, Homo sapien
ctgggaccaggcccgcgggactgca

SEQ ID NO: 1817185 - DNA, 25 bp, Homo sapien
gggaccaggcccgcgggactgcagg

SEQ ID NO: 1817186 - DNA, 25 bp, Homo sapien
accaggtacccgcacaacccaagca

SEQ ID NO: 1817187 - DNA, 25 bp, Homo sapien
aggtacccgcacaacccaagcagcc

SEQ ID NO: 1817188 - DNA, 25 bp, Homo sapien
tcggagcgcgacacggagactaggt

SEQ ID NO: 1817189 - DNA, 25 bp, Homo sapien
caccggctgccaccgaaagatggga

SEQ ID NO: 1817190 - DNA, 25 bp, Homo sapien
tcgggagtcggcgtccaggctcgga

SEQ ID NO: 1817191 - DNA, 25 bp, Homo sapien
ggccgagtgggagtccgcggcgagc

SEQ ID NO: 1817192 - DNA, 25 bp, Homo sapien
cctccacgggcttcagagatagtac

SEQ ID NO: 1817193 - DNA, 25 bp, Homo sapien
tttggcctccacgggcttcagagat

SEQ ID NO: 1817194 - DNA, 25 bp, Homo sapien
gcctccacgggcttcagagatagta

SEQ ID NO: 1817195 - DNA, 25 bp, Homo sapien
tggcctccacgggcttcagagatag

SEQ ID NO: 1817196 - DNA, 25 bp, Homo sapien
gctctttgttctcgctggttttctt

SEQ ID NO: 1817197 - DNA, 25 bp, Homo sapien
tctttgttctcgctggttttctttc

SEQ ID NO: 1817198 - DNA, 25 bp, Homo sapien
gttctcgctggttttctttcctcac

SEQ ID NO: 1817199 - DNA, 25 bp, Homo sapien
cagctctttgttctcgctggttttc

SEQ ID NO: 1817200 - DNA, 25 bp, Homo sapien
tggtgttctgcaaggaccagttcct

SEQ ID NO: 1817201 - DNA, 25 bp, Homo sapien
tgtatgggagttccttgtgctccag

SEQ ID NO: 1817202 - DNA, 25 bp, Homo sapien
taacattaggcattcccactaggaa

SEQ ID NO: 1817203 - DNA, 25 bp, Homo sapien
tcttggatgccctcaagttttggca

SEQ ID NO: 1817204 - DNA, 25 bp, Homo sapien
tgtatgggcataagctttcaactcg

SEQ ID NO: 1817205 - DNA, 25 bp, Homo sapien
taacttgcctatgctaacccgcaga

SEQ ID NO: 1817206 - DNA, 25 bp, Homo sapien
tctagcccgcaagagagctccggga

SEQ ID NO: 1817207 - DNA, 25 bp, Homo sapien
ttgaaaacaaagtccgcgatcctct

SEQ ID NO: 1817208 - DNA, 25 bp, Homo sapien
tgaatagcatgcagttccaactttg

SEQ ID NO: 1817209 - DNA, 25 bp, Homo sapien
ggcgcgaggtcccacgagcggcggg

SEQ ID NO: 1817210 - DNA, 25 bp, Homo sapien
gggcgcgctcgacgcggacggcggg

SEQ ID NO: 1817211 - DNA, 25 bp, Homo sapien
ggccagctgccggagcgcggcgact

SEQ ID NO: 1817212 - DNA, 25 bp, Homo sapien
aggaggcagcgcgaacagtccacgc

SEQ ID NO: 1817213 - DNA, 25 bp, Homo sapien
taggtgtctctgcttatccggagtc

SEQ ID NO: 1817214 - DNA, 25 bp, Homo sapien
gagacctgcctttgggccgcggtta

SEQ ID NO: 1817215 - DNA, 25 bp, Homo sapien
gagaaggtgggctcctagtgcccta

SEQ ID NO: 1817216 - DNA, 25 bp, Homo sapien
tactgttgcgcttgaggccgcagca

SEQ ID NO: 1817217 - DNA, 25 bp, Homo sapien
tttgggcatattcaggatggcatgg

SEQ ID NO: 1817218 - DNA, 25 bp, Homo sapien
cagacaagtttgggcatattcagga

SEQ ID NO: 1817219 - DNA, 25 bp, Homo sapien
aagtttgggcatattcaggatggca

SEQ ID NO: 1817220 - DNA, 25 bp, Homo sapien
gacaagtttgggcatattcaggatg

SEQ ID NO: 1817221 - DNA, 25 bp, Homo sapien
cagtgtgctcaccagtcatagagtg

SEQ ID NO: 1817222 - DNA, 25 bp, Homo sapien
gattgtgtggcagtaccttcaagcc

SEQ ID NO: 1817223 - DNA, 25 bp, Homo sapien
gacatatgtgagagcaaagtccctg

SEQ ID NO: 1817224 - DNA, 25 bp, Homo sapien
cggagtgacttacagccagggtaca

SEQ ID NO: 1817225 - DNA, 25 bp, Homo sapien
gccaattccaagtcatatgcctagt

SEQ ID NO: 1817226 - DNA, 25 bp, Homo sapien
gctttggaacaagaccactggatcc

SEQ ID NO: 1817227 - DNA, 25 bp, Homo sapien
ctggagcacccacaagaagagaatg

SEQ ID NO: 1817228 - DNA, 25 bp, Homo sapien
gagtaaactccaagacgaagccaac

SEQ ID NO: 1817229 - DNA, 25 bp, Homo sapien
tgtagtatggactcacccgtgacgg

SEQ ID NO: 1817230 - DNA, 25 bp, Homo sapien
tcggtcagcctcagttcaaggagtc

SEQ ID NO: 1817231 - DNA, 25 bp, Homo sapien
ttcagtgtgcagaccagagagaccc

SEQ ID NO: 1817232 - DNA, 25 bp, Homo sapien
gacggagcacggactagaatcccaa

SEQ ID NO: 1817233 - DNA, 25 bp, Homo sapien
cttggagtgcattgttacaaaatgg

SEQ ID NO: 1817234 - DNA, 25 bp, Homo sapien
tccagttaaagtaagaattgacatc

SEQ ID NO: 1817235 - DNA, 25 bp, Homo sapien
tagctaagatctaatcttggagtgc

SEQ ID NO: 1817236 - DNA, 25 bp, Homo sapien
tgtgattgaaggaccaatttgatcc

SEQ ID NO: 1817237 - DNA, 25 bp, Homo sapien
ttgtgcaatatagggagactccggc

SEQ ID NO: 1817238 - DNA, 25 bp, Homo sapien
tacaatgagaatgcacactccagtc

SEQ ID NO: 1817239 - DNA, 25 bp, Homo sapien
gctgcctgttaacatgatgcctttg

SEQ ID NO: 1817240 - DNA, 25 bp, Homo sapien
gcctttgaaactctccgcctttgaa

SEQ ID NO: 1817241 - DNA, 25 bp, Homo sapien
tactttgggccagtaaaggtgaaca

SEQ ID NO: 1817242 - DNA, 25 bp, Homo sapien
gggcaggtttgctttaccccatatc

SEQ ID NO: 1817243 - DNA, 25 bp, Homo sapien
gatgtccagaacagcagcagatagg

SEQ ID NO: 1817244 - DNA, 25 bp, Homo sapien
catcactctgtactaaaaggacagg

SEQ ID NO: 1817245 - DNA, 25 bp, Homo sapien
tttttattagtatagataccttcac

SEQ ID NO: 1817246 - DNA, 25 bp, Homo sapien
tagataccttcacagacaatactgt

SEQ ID NO: 1817247 - DNA, 25 bp, Homo sapien
ttttattagtatagataccttcaca

SEQ ID NO: 1817248 - DNA, 25 bp, Homo sapien
ccttcacagacaatactgtaatttt

SEQ ID NO: 1817249 - DNA, 25 bp, Homo sapien
aagtagaaagaccatgcttgaggac

SEQ ID NO: 1817250 - DNA, 25 bp, Homo sapien
cagaagttcactaaggatgcacgat

SEQ ID NO: 1817251 - DNA, 25 bp, Homo sapien
aacagtgtgaatttctaacagaggc

SEQ ID NO: 1817252 - DNA, 25 bp, Homo sapien
tgagcaccatagtttacaagtagaa

SEQ ID NO: 1817253 - DNA, 25 bp, Homo sapien
ctcctcgaactccccttgttcgtcg

SEQ ID NO: 1817254 - DNA, 25 bp, Homo sapien
ctcctcctcgaactccccttgttcg

SEQ ID NO: 1817255 - DNA, 25 bp, Homo sapien
ctccccttgttcgtcggccgtggcg

SEQ ID NO: 1817256 - DNA, 25 bp, Homo sapien
catgcggccccggaagatggcagcc

SEQ ID NO: 1817257 - DNA, 25 bp, Homo sapien
gatgtcatacagggcctcgttatca

SEQ ID NO: 1817258 - DNA, 25 bp, Homo sapien
atgtcatacagggcctcgttatcaa

SEQ ID NO: 1817259 - DNA, 25 bp, Homo sapien
gtcatacagggcctcgttatcaatg

SEQ ID NO: 1817260 - DNA, 25 bp, Homo sapien
tgtcatacagggcctcgttatcaat

SEQ ID NO: 1817261 - DNA, 25 bp, Homo sapien
tctgtcattttgactatggaggaga

SEQ ID NO: 1817262 - DNA, 25 bp, Homo sapien
gagaaggtaggactggtcttagact

SEQ ID NO: 1817263 - DNA, 25 bp, Homo sapien
cattttgactatggaggagaaggta

SEQ ID NO: 1817264 - DNA, 25 bp, Homo sapien
tcttagactggcagattcttctctt

SEQ ID NO: 1817265 - DNA, 25 bp, Homo sapien
gactgcatggagctaggccaggact

SEQ ID NO: 1817266 - DNA, 25 bp, Homo sapien
tcataacctgtgcttttggcccctg

SEQ ID NO: 1817267 - DNA, 25 bp, Homo sapien
gatctgtgagccatgaccacccatg

SEQ ID NO: 1817268 - DNA, 25 bp, Homo sapien
aaggtgtgtcatttggccagttccc

SEQ ID NO: 1817269 - DNA, 25 bp, Homo sapien
gggtccagacctgacagagtccatg

SEQ ID NO: 1817270 - DNA, 25 bp, Homo sapien
gaagggtccagacctgacagagtcc

SEQ ID NO: 1817271 - DNA, 25 bp, Homo sapien
gtccagacctgacagagtccatggt

SEQ ID NO: 1817272 - DNA, 25 bp, Homo sapien
aagggtccagacctgacagagtcca

SEQ ID NO: 1817273 - DNA, 25 bp, Homo sapien
ctgcaggaaataagaactgactcag

SEQ ID NO: 1817274 - DNA, 25 bp, Homo sapien
caggaaataagaactgactcaggcc

SEQ ID NO: 1817275 - DNA, 25 bp, Homo sapien
gggagggactcacagcagcattcaa

SEQ ID NO: 1817276 - DNA, 25 bp, Homo sapien
gaaataagaactgactcaggcctgt

SEQ ID NO: 1817277 - DNA, 25 bp, Homo sapien
gcctgtggggtcgatcccatgctca

SEQ ID NO: 1817278 - DNA, 25 bp, Homo sapien
atgctcatcgctgatgacctcccaa

SEQ ID NO: 1817279 - DNA, 25 bp, Homo sapien
cacgttgattctctccagctgcaag

SEQ ID NO: 1817280 - DNA, 25 bp, Homo sapien
cagcagcctcattgtagtacacgtt

SEQ ID NO: 1817281 - DNA, 25 bp, Homo sapien
cctggatgtgcacgatctcgcgcat

SEQ ID NO: 1817282 - DNA, 25 bp, Homo sapien
cgcactggcccgcctggatgtgcac

SEQ ID NO: 1817283 - DNA, 25 bp, Homo sapien
tggttgccgcactggcccgcctgga

SEQ ID NO: 1817284 - DNA, 25 bp, Homo sapien
tgccgcactggcccgcctggatgtg

SEQ ID NO: 1817285 - DNA, 25 bp, Homo sapien
ggctgcggagcgggtggcgctggcc

SEQ ID NO: 1817286 - DNA, 25 bp, Homo sapien
ggtgccggctgcggagcgggtggcg

SEQ ID NO: 1817287 - DNA, 25 bp, Homo sapien
tgccggctgcggagcgggtggcgct

SEQ ID NO: 1817288 - DNA, 25 bp, Homo sapien
ccggctgcggagcgggtggcgctgg

SEQ ID NO: 1817289 - DNA, 25 bp, Homo sapien
cggagcggtgcgcggcgtggaccgg

SEQ ID NO: 1817290 - DNA, 25 bp, Homo sapien
tcggagcggtgcgcggcgtggaccg

SEQ ID NO: 1817291 - DNA, 25 bp, Homo sapien
tgcgcagagacctgccgccgccccc

SEQ ID NO: 1817292 - DNA, 25 bp, Homo sapien
ctcggagcggtgcgcggcgtggacc

SEQ ID NO: 1817293 - DNA, 25 bp, Homo sapien
gcggggagccgacgggcagctgcct

SEQ ID NO: 1817294 - DNA, 25 bp, Homo sapien
ctgaaaggaatgccaggatggcggg

SEQ ID NO: 1817295 - DNA, 25 bp, Homo sapien
ctctccagcgggtggcaaaggtttc

SEQ ID NO: 1817296 - DNA, 25 bp, Homo sapien
gaaattgaagacccatttgcagtgg

SEQ ID NO: 1817297 - DNA, 25 bp, Homo sapien
tttagacaggatgccactcgcagtg

SEQ ID NO: 1817298 - DNA, 25 bp, Homo sapien
ctttagacaggatgccactcgcagt

SEQ ID NO: 1817299 - DNA, 25 bp, Homo sapien
gccactcgcagtgtctgagccaccc

SEQ ID NO: 1817300 - DNA, 25 bp, Homo sapien
agtaataatagtacccgcttcctgg

SEQ ID NO: 1817301 - DNA, 25 bp, Homo sapien
taaggccgtttagaggactcagtgc

SEQ ID NO: 1817302 - DNA, 25 bp, Homo sapien
gcacagggcctagagttgatggact

SEQ ID NO: 1817303 - DNA, 25 bp, Homo sapien
tggactgggtgcaaatcctcactgt

SEQ ID NO: 1817304 - DNA, 25 bp, Homo sapien
agccaggcttcttcacccttcgcca

SEQ ID NO: 1817305 - DNA, 25 bp, Homo sapien
cgcgcgacccgctccgtttcacgct

SEQ ID NO: 1817306 - DNA, 25 bp, Homo sapien
ttcacccttcgccaggtctgggctg

SEQ ID NO: 1817307 - DNA, 25 bp, Homo sapien
cttctccttccgtccggagcgccgg

SEQ ID NO: 1817308 - DNA, 25 bp, Homo sapien
ttcaatatattgatgaccttcttct

SEQ ID NO: 1817309 - DNA, 25 bp, Homo sapien
attcaatatattgatgaccttcttc

SEQ ID NO: 1817310 - DNA, 25 bp, Homo sapien
tattcaatatattgatgaccttctt

SEQ ID NO: 1817311 - DNA, 25 bp, Homo sapien
cttgcgcaggtctacgttcagctgg

SEQ ID NO: 1817312 - DNA, 25 bp, Homo sapien
gctcgggcaccatgagcgcccggta

SEQ ID NO: 1817313 - DNA, 25 bp, Homo sapien
ggtgagctcgggcaccatgagcgcc

SEQ ID NO: 1817314 - DNA, 25 bp, Homo sapien
cagcttgcgcaggtctacgttcagc

SEQ ID NO: 1817315 - DNA, 25 bp, Homo sapien
caccagctggtggaccgagagggtg

SEQ ID NO: 1817316 - DNA, 25 bp, Homo sapien
ccaccagctggtggaccgagagggt

SEQ ID NO: 1817317 - DNA, 25 bp, Homo sapien
gtgccgccccccagagagtgggtca

SEQ ID NO: 1817318 - DNA, 25 bp, Homo sapien
cagggtgcccatcccggaccccgtg

SEQ ID NO: 1817319 - DNA, 25 bp, Homo sapien
ttcccggatcttgctgatgagcagg

SEQ ID NO: 1817320 - DNA, 25 bp, Homo sapien
ccctggagacagtcacagctctctg

SEQ ID NO: 1817321 - DNA, 25 bp, Homo sapien
caggaccgagtcgaccagctcggct

SEQ ID NO: 1817322 - DNA, 25 bp, Homo sapien
aggaccgagtcgaccagctcggctc

SEQ ID NO: 1817323 - DNA, 25 bp, Homo sapien
tccaggaccgagtcgaccagctcgg

SEQ ID NO: 1817324 - DNA, 25 bp, Homo sapien
ccaggaccgagtcgaccagctcggc

SEQ ID NO: 1817325 - DNA, 25 bp, Homo sapien
tggcccagttattcccggctccgct

SEQ ID NO: 1817326 - DNA, 25 bp, Homo sapien
gcccagttattcccggctccgctct

SEQ ID NO: 1817327 - DNA, 25 bp, Homo sapien
ccagttattcccggctccgctctgg

SEQ ID NO: 1817328 - DNA, 25 bp, Homo sapien
cagttattcccggctccgctctggc

SEQ ID NO: 1817329 - DNA, 25 bp, Homo sapien
tctggccgaagggtccagacctgat

SEQ ID NO: 1817330 - DNA, 25 bp, Homo sapien
cagatccaccaggatggcccaaggt

SEQ ID NO: 1817331 - DNA, 25 bp, Homo sapien
gaagggtccagacctgatggagtct

SEQ ID NO: 1817332 - DNA, 25 bp, Homo sapien
ggagtctgtagttccaggctccaga

SEQ ID NO: 1817333 - DNA, 25 bp, Homo sapien
cagcagcctcattgtagtacacgtt

SEQ ID NO: 1817334 - DNA, 25 bp, Homo sapien
acgttgattctctccagctgcaagt

SEQ ID NO: 1817335 - DNA, 25 bp, Homo sapien
acacgttgattctctccagctgcaa

SEQ ID NO: 1817336 - DNA, 25 bp, Homo sapien
tctctccagctgcaagtcactgtct

SEQ ID NO: 1817337 - DNA, 25 bp, Homo sapien
gatcccatgctcatcgctgatgacc

SEQ ID NO: 1817338 - DNA, 25 bp, Homo sapien
atgctcatcgctgatgacctcccaa

SEQ ID NO: 1817339 - DNA, 25 bp, Homo sapien
gtcgatcccatgctcatcgctgatg

SEQ ID NO: 1817340 - DNA, 25 bp, Homo sapien
ctgtggggtcgatcccatgctcatc

SEQ ID NO: 1817341 - DNA, 25 bp, Homo sapien
aaaaaagaaccacaccatggctctg

SEQ ID NO: 1817342 - DNA, 25 bp, Homo sapien
aaaaagaaccacaccatggctctgc

SEQ ID NO: 1817343 - DNA, 25 bp, Homo sapien
tgaaaaaagaaccacaccatggctc

SEQ ID NO: 1817344 - DNA, 25 bp, Homo sapien
gaaaaaagaaccacaccatggctct

SEQ ID NO: 1817345 - DNA, 25 bp, Homo sapien
aaatctgtccttcaatgctattagg

SEQ ID NO: 1817346 - DNA, 25 bp, Homo sapien
ctattagggatggaatagccgtcac

SEQ ID NO: 1817347 - DNA, 25 bp, Homo sapien
tattagggatggaatagccgtcact

SEQ ID NO: 1817348 - DNA, 25 bp, Homo sapien
tgctgctagggatggaatagccttc

SEQ ID NO: 1817349 - DNA, 25 bp, Homo sapien
cactgtattcaatgctgctagggat

SEQ ID NO: 1817350 - DNA, 25 bp, Homo sapien
aaaaattggattcatcacatgagtc

SEQ ID NO: 1817351 - DNA, 25 bp, Homo sapien
gaatcatctgaatcatctgagctat

SEQ ID NO: 1817352 - DNA, 25 bp, Homo sapien
tttagaaaaattggattcatcacat

SEQ ID NO: 1817353 - DNA, 25 bp, Homo sapien
catctgaatcatctgagctatttat

SEQ ID NO: 1817354 - DNA, 25 bp, Homo sapien
tatgccagccaattgttgtgggcca

SEQ ID NO: 1817355 - DNA, 25 bp, Homo sapien
gaatgctccgttttctaggctctga

SEQ ID NO: 1817356 - DNA, 25 bp, Homo sapien
ttgaaggaagctagcctaaaaggcc

SEQ ID NO: 1817357 - DNA, 25 bp, Homo sapien
aagtgctgccggcaagtgttctcag

SEQ ID NO: 1817358 - DNA, 25 bp, Homo sapien
ccagtgtccttcgaacctcttagcc

SEQ ID NO: 1817359 - DNA, 25 bp, Homo sapien
cagtgtccttcgaacctcttagcct

SEQ ID NO: 1817360 - DNA, 25 bp, Homo sapien
tcttgttctacggcttcttgggatc

SEQ ID NO: 1817361 - DNA, 25 bp, Homo sapien
ttagcctcttgttctacggcttctt

SEQ ID NO: 1817362 - DNA, 25 bp, Homo sapien
tgtagatcttttggattgtctagtg

SEQ ID NO: 1817363 - DNA, 25 bp, Homo sapien
ttgtagatcttttggattgtctagt

SEQ ID NO: 1817364 - DNA, 25 bp, Homo sapien
gtagatcttttggattgtctagtgc

SEQ ID NO: 1817365 - DNA, 25 bp, Homo sapien
tggtggcagaaaggtccccagctgc

SEQ ID NO: 1817366 - DNA, 25 bp, Homo sapien
catgtgtcttccatcgtccatcagg

SEQ ID NO: 1817367 - DNA, 25 bp, Homo sapien
gacattggcgtattctatgctggga

SEQ ID NO: 1817368 - DNA, 25 bp, Homo sapien
cattcgggccttcgtgttctaggag

SEQ ID NO: 1817369 - DNA, 25 bp, Homo sapien
ctgccaaagcaaatcatgtggtcaa

SEQ ID NO: 1817370 - DNA, 25 bp, Homo sapien
gccaaagcaaatcatgtggtcaaac

SEQ ID NO: 1817371 - DNA, 25 bp, Homo sapien
tgccaaagcaaatcatgtggtcaaa

SEQ ID NO: 1817372 - DNA, 25 bp, Homo sapien
cgtgccgtgcagcaaaagccggatc

SEQ ID NO: 1817373 - DNA, 25 bp, Homo sapien
ggctcccgtgccgtgcagcaaaagc

SEQ ID NO: 1817374 - DNA, 25 bp, Homo sapien
caaaagccggatccgggagctcagt

SEQ ID NO: 1817375 - DNA, 25 bp, Homo sapien
cagacagcgtgtgcttggggctccc

SEQ ID NO: 1817376 - DNA, 25 bp, Homo sapien
cagtggccacagtcacccagcactg

SEQ ID NO: 1817377 - DNA, 25 bp, Homo sapien
gaggccggcagtggccacagtcacc

SEQ ID NO: 1817378 - DNA, 25 bp, Homo sapien
gccggcagtggccacagtcacccag

SEQ ID NO: 1817379 - DNA, 25 bp, Homo sapien
ctgaggccggcagtggccacagtca

SEQ ID NO: 1817380 - DNA, 25 bp, Homo sapien
tgaagtctctccagttcgggggtag

SEQ ID NO: 1817381 - DNA, 25 bp, Homo sapien
gaaaggcctattgttgctgcccaac

SEQ ID NO: 1817382 - DNA, 25 bp, Homo sapien
tgctgcccaactcggtaacatggat

SEQ ID NO: 1817383 - DNA, 25 bp, Homo sapien
ggagggcgacactgaaaggcctatt

SEQ ID NO: 1817384 - DNA, 25 bp, Homo sapien
tattgtgctccgtcctgtgatggtc

SEQ ID NO: 1817385 - DNA, 25 bp, Homo sapien
gccacagagacgtaaagaacttgct

SEQ ID NO: 1817386 - DNA, 25 bp, Homo sapien
tctgggtcacaaggtctattcatct

SEQ ID NO: 1817387 - DNA, 25 bp, Homo sapien
ccagggccggcatgactctgggtca

SEQ ID NO: 1817388 - DNA, 25 bp, Homo sapien
ttaacaatttgatctccatccaacc

SEQ ID NO: 1817389 - DNA, 25 bp, Homo sapien
acaatttgatctccatccaaccgaa

SEQ ID NO: 1817390 - DNA, 25 bp, Homo sapien
aatttgatctccatccaaccgaagc

SEQ ID NO: 1817391 - DNA, 25 bp, Homo sapien
tttgatctccatccaaccgaagcat

SEQ ID NO: 1817392 - DNA, 25 bp, Homo sapien
aaagcaaaggggaaacaggcatgtt

SEQ ID NO: 1817393 - DNA, 25 bp, Homo sapien
agttccgaaggctgtacgggaagca

SEQ ID NO: 1817394 - DNA, 25 bp, Homo sapien
gaaagcaaaggggaaacaggcatgt

SEQ ID NO: 1817395 - DNA, 25 bp, Homo sapien
gcaaaggggaaacaggcatgtttca

SEQ ID NO: 1817396 - DNA, 25 bp, Homo sapien
ctggaaccaggtaccatgatcagag

SEQ ID NO: 1817397 - DNA, 25 bp, Homo sapien
ggaaccaggtaccatgatcagagct

SEQ ID NO: 1817398 - DNA, 25 bp, Homo sapien
tggaaccaggtaccatgatcagagc

SEQ ID NO: 1817399 - DNA, 25 bp, Homo sapien
actgccaggttatcgtcccgggaag

SEQ ID NO: 1817400 - DNA, 25 bp, Homo sapien
gaggacaccattccgacacaaacgt

SEQ ID NO: 1817401 - DNA, 25 bp, Homo sapien
ggttgatctctcatcttaactgtga

SEQ ID NO: 1817402 - DNA, 25 bp, Homo sapien
agacccagcgcacacctaaagtaga

SEQ ID NO: 1817403 - DNA, 25 bp, Homo sapien
catgcggccccggaagatggcagcc

SEQ ID NO: 1817404 - DNA, 25 bp, Homo sapien
aggaccgagtcgaccagctcggctc

SEQ ID NO: 1817405 - DNA, 25 bp, Homo sapien
tccaggaccgagtcgaccagctcgg

SEQ ID NO: 1817406 - DNA, 25 bp, Homo sapien
ctccccttgttcgtcggccgtggcg

SEQ ID NO: 1817407 - DNA, 25 bp, Homo sapien
ctttccctctggcaatcacacctct

SEQ ID NO: 1817408 - DNA, 25 bp, Homo sapien
tctggcaatcacacctcttcagcct

SEQ ID NO: 1817409 - DNA, 25 bp, Homo sapien
tccctctggcaatcacacctcttca

SEQ ID NO: 1817410 - DNA, 25 bp, Homo sapien
cctctggcaatcacacctcttcagc

SEQ ID NO: 1817411 - DNA, 25 bp, Homo sapien
cgaatccatcgtgcctggctccaga

SEQ ID NO: 1817412 - DNA, 25 bp, Homo sapien
gacctaaccgaatccatcgtgcctg

SEQ ID NO: 1817413 - DNA, 25 bp, Homo sapien
tggccgaatggtccagacctaaccg

SEQ ID NO: 1817414 - DNA, 25 bp, Homo sapien
ggtccagacctaaccgaatccatcg

SEQ ID NO: 1817415 - DNA, 25 bp, Homo sapien
cagtgacttagaccctcaggcaagg

SEQ ID NO: 1817416 - DNA, 25 bp, Homo sapien
tcaaagggctctgttggcataagga

SEQ ID NO: 1817417 - DNA, 25 bp, Homo sapien
aaagggagacccaccatcaggttct

SEQ ID NO: 1817418 - DNA, 25 bp, Homo sapien
gatgttgccccaaacaaagggagac

SEQ ID NO: 1817419 - DNA, 25 bp, Homo sapien
agtggggtcaatcccatgctcatca

SEQ ID NO: 1817420 - DNA, 25 bp, Homo sapien
ccgacaacccaacatttcaggagct

SEQ ID NO: 1817421 - DNA, 25 bp, Homo sapien
tgcatttagccatgaacgatgcccc

SEQ ID NO: 1817422 - DNA, 25 bp, Homo sapien
gaaatgtccccgactcagttccgac

SEQ ID NO: 1817423 - DNA, 25 bp, Homo sapien
caaggctcacaatgaaatgtccccg

SEQ ID NO: 1817424 - DNA, 25 bp, Homo sapien
gtaaggaccagccaaagccgggcag

SEQ ID NO: 1817425 - DNA, 25 bp, Homo sapien
gggcgtttcccaggcaaacagctgc

SEQ ID NO: 1817426 - DNA, 25 bp, Homo sapien
gggcttgtattttgcaggttcagaa

SEQ ID NO: 1817427 - DNA, 25 bp, Homo sapien
ttggcgcactggtcgcagccccagg

SEQ ID NO: 1817428 - DNA, 25 bp, Homo sapien
gaacgcaaaggagctaaaggaccgc

SEQ ID NO: 1817429 - DNA, 25 bp, Homo sapien
ggcagctcgactccggttcaagcga

SEQ ID NO: 1817430 - DNA, 25 bp, Homo sapien
tagattcaaagcacgtcctgagacc

SEQ ID NO: 1817431 - DNA, 25 bp, Homo sapien
aattaatcctcctggtgtcccagcc

SEQ ID NO: 1817432 - DNA, 25 bp, Homo sapien
cctcgtcttctccaggcacgcgtgc

SEQ ID NO: 1817433 - DNA, 25 bp, Homo sapien
actcggcggcacaaagcggccagga

SEQ ID NO: 1817434 - DNA, 25 bp, Homo sapien
gggactccaaatgagttacagcaga

SEQ ID NO: 1817435 - DNA, 25 bp, Homo sapien
aaggtctgcatttggcgatccccag

SEQ ID NO: 1817436 - DNA, 25 bp, Homo sapien
tccgtccgcgaaagtcacctcctag

SEQ ID NO: 1817437 - DNA, 25 bp, Homo sapien
ggttgccgcactggcccgcctggat

SEQ ID NO: 1817438 - DNA, 25 bp, Homo sapien
cgcactggcccgcctggatgtgcac

SEQ ID NO: 1817439 - DNA, 25 bp, Homo sapien
ctggttgccgcactggcccgcctgg

SEQ ID NO: 1817440 - DNA, 25 bp, Homo sapien
tgccgcactggcccgcctggatgtg

SEQ ID NO: 1817441 - DNA, 25 bp, Homo sapien
aaggcgctcgggaaccgacgggctg

SEQ ID NO: 1817442 - DNA, 25 bp, Homo sapien
tggtccggcggcgtctgggtctgtc

SEQ ID NO: 1817443 - DNA, 25 bp, Homo sapien
cccagtccccttcgcgctggcgctc

SEQ ID NO: 1817444 - DNA, 25 bp, Homo sapien
gctccggcttttatgcaaggagggt

SEQ ID NO: 1817445 - DNA, 25 bp, Homo sapien
gtatatcaggcacgaagatttcggg

SEQ ID NO: 1817446 - DNA, 25 bp, Homo sapien
gctcgcataaagagactggtacccg

SEQ ID NO: 1817447 - DNA, 25 bp, Homo sapien
tacgtaatctattgcgtgactgagg

SEQ ID NO: 1817448 - DNA, 25 bp, Homo sapien
tatgcaatgcgtctcaatctaggtc

SEQ ID NO: 1817449 - DNA, 25 bp, Homo sapien
ttataatggcctcggtcgggactga

SEQ ID NO: 1817450 - DNA, 25 bp, Homo sapien
catccccggaggttgtgaatttgag

SEQ ID NO: 1817451 - DNA, 25 bp, Homo sapien
cagtaaggccgggtgttttcgcatc

SEQ ID NO: 1817452 - DNA, 25 bp, Homo sapien
tttgtcctacaaatcggcggaggga

SEQ ID NO: 1817453 - DNA, 25 bp, Homo sapien
ggagcagagtgtcaacctggccatt

SEQ ID NO: 1817454 - DNA, 25 bp, Homo sapien
cctgaaatgggcttgacagagagct

SEQ ID NO: 1817455 - DNA, 25 bp, Homo sapien
tatgctcagcaaacccagctacagt

SEQ ID NO: 1817456 - DNA, 25 bp, Homo sapien
tattttggccaacatctaggcagac

SEQ ID NO: 1817457 - DNA, 25 bp, Homo sapien
tgtaggaccgagcagactacaccgg

SEQ ID NO: 1817458 - DNA, 25 bp, Homo sapien
gaagctactccttgcctcgtaatgc

SEQ ID NO: 1817459 - DNA, 25 bp, Homo sapien
ccccgtgattctgggtgtaggaccg

SEQ ID NO: 1817460 - DNA, 25 bp, Homo sapien
ggtacaggaacttttcagactcagc

SEQ ID NO: 1817461 - DNA, 25 bp, Homo sapien
tctcagctctgtctcagccatgaag

SEQ ID NO: 1817462 - DNA, 25 bp, Homo sapien
ttatgagtctgttttctctgctctc

SEQ ID NO: 1817463 - DNA, 25 bp, Homo sapien
ctcagctctgtctcagccatgaagt

SEQ ID NO: 1817464 - DNA, 25 bp, Homo sapien
gttttctctgctctcagctctgtct

SEQ ID NO: 1817465 - DNA, 25 bp, Homo sapien
tgtcctgattcctgtaccagcttcc

SEQ ID NO: 1817466 - DNA, 25 bp, Homo sapien
tgattcctgtaccagcttcctaacc

SEQ ID NO: 1817467 - DNA, 25 bp, Homo sapien
attcctgtaccagcttcctaacctg

SEQ ID NO: 1817468 - DNA, 25 bp, Homo sapien
cctgattcctgtaccagcttcctaa

SEQ ID NO: 1817469 - DNA, 25 bp, Homo sapien
acagctgctttcattgaccgcgtct

SEQ ID NO: 1817470 - DNA, 25 bp, Homo sapien
aaaaacaagcacagaagtcgcccct

SEQ ID NO: 1817471 - DNA, 25 bp, Homo sapien
ggtggatgtgcttgttttcagtgcc

SEQ ID NO: 1817472 - DNA, 25 bp, Homo sapien
attgaccgcgtctttatttgttggg

SEQ ID NO: 1817473 - DNA, 25 bp, Homo sapien
gcctggaagcctgcgtgttcactta

SEQ ID NO: 1817474 - DNA, 25 bp, Homo sapien
gagaggtggtggctacactcctcgc

SEQ ID NO: 1817475 - DNA, 25 bp, Homo sapien
cactggctttggtgacatggcccca

SEQ ID NO: 1817476 - DNA, 25 bp, Homo sapien
acggtgcctgaccttgcctggaagc

SEQ ID NO: 1817477 - DNA, 25 bp, Homo sapien
aaattcatgccagacaaaggctcac

SEQ ID NO: 1817478 - DNA, 25 bp, Homo sapien
tgaaattcatgccagacaaaggctc

SEQ ID NO: 1817479 - DNA, 25 bp, Homo sapien
cttaatgaaattcatgccagacaaa

SEQ ID NO: 1817480 - DNA, 25 bp, Homo sapien
catgccagacaaaggctcacaatct

SEQ ID NO: 1817481 - DNA, 25 bp, Homo sapien
tgctttttctcttcgaatcggcctc

SEQ ID NO: 1817482 - DNA, 25 bp, Homo sapien
ctgctgggcggttttacatttgtgg

SEQ ID NO: 1817483 - DNA, 25 bp, Homo sapien
catttgtgggctgtgaactacccgg

SEQ ID NO: 1817484 - DNA, 25 bp, Homo sapien
ttcgaatcggcctctttcgccttct

SEQ ID NO: 1817485 - DNA, 25 bp, Homo sapien
tgcaggagcaagaatccagtaactc

SEQ ID NO: 1817486 - DNA, 25 bp, Homo sapien
ctgcaggagcaagaatccagtaact

SEQ ID NO: 1817487 - DNA, 25 bp, Homo sapien
caggagcaagaatccagtaactccc

SEQ ID NO: 1817488 - DNA, 25 bp, Homo sapien
ggagcaagaatccagtaactcccat

SEQ ID NO: 1817489 - DNA, 25 bp, Homo sapien
ggtcattctctttgaggagcagggc

SEQ ID NO: 1817490 - DNA, 25 bp, Homo sapien
gatttagttgccttccgtaagtgca

SEQ ID NO: 1817491 - DNA, 25 bp, Homo sapien
taggtatgtacccacagctggcgct

SEQ ID NO: 1817492 - DNA, 25 bp, Homo sapien
ctcagtgtgataccgttcagggctc

SEQ ID NO: 1817493 - DNA, 25 bp, Homo sapien
gaagcacagacctttgcacgttggg

SEQ ID NO: 1817494 - DNA, 25 bp, Homo sapien
tgagtgactcgtctgcatttgcagc

SEQ ID NO: 1817495 - DNA, 25 bp, Homo sapien
tcgaacaagttccagggaggctgct

SEQ ID NO: 1817496 - DNA, 25 bp, Homo sapien
tttgcagcacctgtctgaagagagg

SEQ ID NO: 1817497 - DNA, 25 bp, Homo sapien
gatctgttccagcagacagctggcc

SEQ ID NO: 1817498 - DNA, 25 bp, Homo sapien
aatttcagtttgtcatcaggccgcg

SEQ ID NO: 1817499 - DNA, 25 bp, Homo sapien
cagtgtgtgggccaaaaggctcata

SEQ ID NO: 1817500 - DNA, 25 bp, Homo sapien
aaggctcatactgacccacctggtg

SEQ ID NO: 1817501 - DNA, 25 bp, Homo sapien
gacatgactgtgacgtgcatcctca

SEQ ID NO: 1817502 - DNA, 25 bp, Homo sapien
tcaggccacggatcagcagaacata

SEQ ID NO: 1817503 - DNA, 25 bp, Homo sapien
tttaagaccaggactcgaagcagag

SEQ ID NO: 1817504 - DNA, 25 bp, Homo sapien
tgaagacacagcttacagaggcgtt

SEQ ID NO: 1817505 - DNA, 25 bp, Homo sapien
gcagaacatacacgaacaagggaaa

SEQ ID NO: 1817506 - DNA, 25 bp, Homo sapien
acacggaggattttattactcacca

SEQ ID NO: 1817507 - DNA, 25 bp, Homo sapien
ggaggattttattactcaccattaa

SEQ ID NO: 1817508 - DNA, 25 bp, Homo sapien
ttcggtggataccatcaggtgaggt

SEQ ID NO: 1817509 - DNA, 25 bp, Homo sapien
tcaccattaatggtagtgaaatgcc

SEQ ID NO: 1817510 - DNA, 25 bp, Homo sapien
ccttctagacgagaggacagctgta

SEQ ID NO: 1817511 - DNA, 25 bp, Homo sapien
tattacaacctcaaggacagggagg

SEQ ID NO: 1817512 - DNA, 25 bp, Homo sapien
aacgagcaccgtcagagaattccca

SEQ ID NO: 1817513 - DNA, 25 bp, Homo sapien
tttccccaaaggtacaacagatgcg

SEQ ID NO: 1817514 - DNA, 25 bp, Homo sapien
tcaacagcttcaggtatccctaggc

SEQ ID NO: 1817515 - DNA, 25 bp, Homo sapien
tgctcacttggtaccggatttcccg

SEQ ID NO: 1817516 - DNA, 25 bp, Homo sapien
tcaagttgaaacagtgggtgcctgc

SEQ ID NO: 1817517 - DNA, 25 bp, Homo sapien
gaagggtctccctattagccaggaa

SEQ ID NO: 1817518 - DNA, 25 bp, Homo sapien
gtctaaaatgcagtcccggaaacgc

SEQ ID NO: 1817519 - DNA, 25 bp, Homo sapien
tctcaagatcccaggtgtcggcgtg

SEQ ID NO: 1817520 - DNA, 25 bp, Homo sapien
catgttttcaagtagtgccggcaca

SEQ ID NO: 1817521 - DNA, 25 bp, Homo sapien
gagatttcgggcagcactctacagc

SEQ ID NO: 1817522 - DNA, 25 bp, Homo sapien
tgagcgtgcagcaggcaaagatgat

SEQ ID NO: 1817523 - DNA, 25 bp, Homo sapien
cgcgtgtagtgctccccgttagaaa

SEQ ID NO: 1817524 - DNA, 25 bp, Homo sapien
gctcgatgatgggtgccgtcagcat

SEQ ID NO: 1817525 - DNA, 25 bp, Homo sapien
tacatggccttcatgccgttggccg

SEQ ID NO: 1817526 - DNA, 25 bp, Homo sapien
gtgtcacagggaaaggctagttctg

SEQ ID NO: 1817527 - DNA, 25 bp, Homo sapien
gctgccagaaggcttgtctgtaata

SEQ ID NO: 1817528 - DNA, 25 bp, Homo sapien
gcttgtctgtaatagtgtcacaggg

SEQ ID NO: 1817529 - DNA, 25 bp, Homo sapien
tagtgtcacagggaaaggctagttc

SEQ ID NO: 1817530 - DNA, 25 bp, Homo sapien
ctggagccagggactcgtctttgat

SEQ ID NO: 1817531 - DNA, 25 bp, Homo sapien
ccagggactcgtctttgatttccga

SEQ ID NO: 1817532 - DNA, 25 bp, Homo sapien
gactcgtctttgatttccgagaagc

SEQ ID NO: 1817533 - DNA, 25 bp, Homo sapien
ttgatttccgagaagccggcgtccc

SEQ ID NO: 1817534 - DNA, 25 bp, Homo sapien
caccgcatgggaggcaaacatgccc

SEQ ID NO: 1817535 - DNA, 25 bp, Homo sapien
gcacagaagaacacgctgaggctcc

SEQ ID NO: 1817536 - DNA, 25 bp, Homo sapien
gaaaatttgtccttgacgctgtcac

SEQ ID NO: 1817537 - DNA, 25 bp, Homo sapien
caaacatgcccacgatggaaaacgc

SEQ ID NO: 1817538 - DNA, 25 bp, Homo sapien
cagcttcgaggtgcagggcggcact

SEQ ID NO: 1817539 - DNA, 25 bp, Homo sapien
tccccaaggctgcatagagggcaag

SEQ ID NO: 1817540 - DNA, 25 bp, Homo sapien
cagtgcacgggcatgctgtcaggac

SEQ ID NO: 1817541 - DNA, 25 bp, Homo sapien
agagggcaagcactctccagggaca

SEQ ID NO: 1817542 - DNA, 25 bp, Homo sapien
ctgagtctgggtgctggctgtactt

SEQ ID NO: 1817543 - DNA, 25 bp, Homo sapien
gagtctgggtgctggctgtactttc

SEQ ID NO: 1817544 - DNA, 25 bp, Homo sapien
tctgggtgctggctgtactttccaa

SEQ ID NO: 1817545 - DNA, 25 bp, Homo sapien
gggtgctggctgtactttccaatca

SEQ ID NO: 1817546 - DNA, 25 bp, Homo sapien
acagccctggcgtctagttctgaga

SEQ ID NO: 1817547 - DNA, 25 bp, Homo sapien
ctgagagcccgggttcattttcctt

SEQ ID NO: 1817548 - DNA, 25 bp, Homo sapien
tctgtggggtcgatgttcccgcagt

SEQ ID NO: 1817549 - DNA, 25 bp, Homo sapien
taatctaggctgcacgacaaggccg

SEQ ID NO: 1817550 - DNA, 25 bp, Homo sapien
agaagctgatgaactcgggaacatc

SEQ ID NO: 1817551 - DNA, 25 bp, Homo sapien
taatgtcactcgaaagagacaatcc

SEQ ID NO: 1817552 - DNA, 25 bp, Homo sapien
actgagaaattctttggtccaaaga

SEQ ID NO: 1817553 - DNA, 25 bp, Homo sapien
aaaagcagggccctaatgcaagggt

SEQ ID NO: 1817554 - DNA, 25 bp, Homo sapien
gccagcggagtcttatgcagccctt

SEQ ID NO: 1817555 - DNA, 25 bp, Homo sapien
tccacagatgctctcaactgaagct

SEQ ID NO: 1817556 - DNA, 25 bp, Homo sapien
tgcagccctttcaaatgcccttggg

SEQ ID NO: 1817557 - DNA, 25 bp, Homo sapien
tgaagctctgttctccccaaagcag

SEQ ID NO: 1817558 - DNA, 25 bp, Homo sapien
tagtagtcagcatagaagttctcca

SEQ ID NO: 1817559 - DNA, 25 bp, Homo sapien
tcgtggcccatcatgctcctggcaa

SEQ ID NO: 1817560 - DNA, 25 bp, Homo sapien
gatgctggccgtggtatagtagtca

SEQ ID NO: 1817561 - DNA, 25 bp, Homo sapien
aagttctccaggagcggcaccttca

SEQ ID NO: 1817562 - DNA, 25 bp, Homo sapien
tgtttttgagtagagccgtgttctg

SEQ ID NO: 1817563 - DNA, 25 bp, Homo sapien
tagagccgtgttctgctacccaagc

SEQ ID NO: 1817564 - DNA, 25 bp, Homo sapien
gaagccaggccaatggaagacatat

SEQ ID NO: 1817565 - DNA, 25 bp, Homo sapien
gacatatagggtccacaggaaactg

SEQ ID NO: 1817566 - DNA, 25 bp, Homo sapien
tatgtctgctcttggcaaccatccc

SEQ ID NO: 1817567 - DNA, 25 bp, Homo sapien
tcgagggacccttcttatgtctgct

SEQ ID NO: 1817568 - DNA, 25 bp, Homo sapien
ggaaatctacgtccttctcatctaa

SEQ ID NO: 1817569 - DNA, 25 bp, Homo sapien
caaacaccctttcgtgcttcaggga

SEQ ID NO: 1817570 - DNA, 25 bp, Homo sapien
aatgagtcaaatcccttccctccgc

SEQ ID NO: 1817571 - DNA, 25 bp, Homo sapien
gtgacctctaacccaaatgagtcaa

SEQ ID NO: 1817572 - DNA, 25 bp, Homo sapien
tcacaaatgagtgcaacaccccagg

SEQ ID NO: 1817573 - DNA, 25 bp, Homo sapien
gcagctcgagacctttcacaaatga

SEQ ID NO: 1817574 - DNA, 25 bp, Homo sapien
tcacacacaggaccacaatgttctt

SEQ ID NO: 1817575 - DNA, 25 bp, Homo sapien
cacacaggaccacaatgttcttcca

SEQ ID NO: 1817576 - DNA, 25 bp, Homo sapien
aggaccacaatgttcttccacaggt

SEQ ID NO: 1817577 - DNA, 25 bp, Homo sapien
accttcacgatgcagaccttcttgg

SEQ ID NO: 1817578 - DNA, 25 bp, Homo sapien
ggtgcaccgtcagcagaagtttcca

SEQ ID NO: 1817579 - DNA, 25 bp, Homo sapien
ttttggaaccagtcagagtgcacac

SEQ ID NO: 1817580 - DNA, 25 bp, Homo sapien
tactgaggcactcattaggccctgg

SEQ ID NO: 1817581 - DNA, 25 bp, Homo sapien
gaaaggcactcataagaccccagct

SEQ ID NO: 1817582 - DNA, 25 bp, Homo sapien
catccagcggtaggagggtcacaaa

SEQ ID NO: 1817583 - DNA, 25 bp, Homo sapien
cattcgcaatctgggaagtcgagta

SEQ ID NO: 1817584 - DNA, 25 bp, Homo sapien
aaaatgggctactttgactacaggc

SEQ ID NO: 1817585 - DNA, 25 bp, Homo sapien
aaagcacgatgatgggaggcaccaa

SEQ ID NO: 1817586 - DNA, 25 bp, Homo sapien
gaattttgatgagccaggtatgtcc

SEQ ID NO: 1817587 - DNA, 25 bp, Homo sapien
cttggaaaagctacgctgtccttgc

SEQ ID NO: 1817588 - DNA, 25 bp, Homo sapien
caaagctacgctctccttggaaaag

SEQ ID NO: 1817589 - DNA, 25 bp, Homo sapien
attttcacggatccccgtgtggtcg

SEQ ID NO: 1817590 - DNA, 25 bp, Homo sapien
tattcatggcacacctgctacgcgt

SEQ ID NO: 1817591 - DNA, 25 bp, Homo sapien
taaggaaccctgcaattactcgtcg

SEQ ID NO: 1817592 - DNA, 25 bp, Homo sapien
tacttacccagtggcaatgcaaccg

SEQ ID NO: 1817593 - DNA, 25 bp, Homo sapien
tgtgtcctgggagccaaacgaaggc

SEQ ID NO: 1817594 - DNA, 25 bp, Homo sapien
tattctctcttggacgatggcctgg

SEQ ID NO: 1817595 - DNA, 25 bp, Homo sapien
tagctgtggtaacgctcctgacacg

SEQ ID NO: 1817596 - DNA, 25 bp, Homo sapien
taacaacctcctggtgatacgtgga

SEQ ID NO: 1817597 - DNA, 25 bp, Homo sapien
tattgggctcatggctcgcttctgc

SEQ ID NO: 1817598 - DNA, 25 bp, Homo sapien
acccttgatgtcgccctcagggttc

SEQ ID NO: 1817599 - DNA, 25 bp, Homo sapien
cacccttgatgtcgccctcagggtt

SEQ ID NO: 1817600 - DNA, 25 bp, Homo sapien
acacccttgatgtcgccctcagggt

SEQ ID NO: 1817601 - DNA, 25 bp, Homo sapien
tcacacccttgatgtcgccctcagg

SEQ ID NO: 1817602 - DNA, 25 bp, Homo sapien
cgtgtggaatggacagaaggtctct

SEQ ID NO: 1817603 - DNA, 25 bp, Homo sapien
cagcaggaacagactgtgagaagca

SEQ ID NO: 1817604 - DNA, 25 bp, Homo sapien
gaaggtctctggtcatctcacatgg

SEQ ID NO: 1817605 - DNA, 25 bp, Homo sapien
cactgaattcggtggtacctttggg

SEQ ID NO: 1817606 - DNA, 25 bp, Homo sapien
ttttgaataacataatccaaggaaa

SEQ ID NO: 1817607 - DNA, 25 bp, Homo sapien
cagatacatgacattaatattatat

SEQ ID NO: 1817608 - DNA, 25 bp, Homo sapien
taataaaacaacctaacacaaatgc

SEQ ID NO: 1817609 - DNA, 25 bp, Homo sapien
aatccaaggaaatagaaacagatac

SEQ ID NO: 1817610 - DNA, 25 bp, Homo sapien
gatgatgagcaagtccccttctaga

SEQ ID NO: 1817611 - DNA, 25 bp, Homo sapien
cactgagcgagttggatagaagccc

SEQ ID NO: 1817612 - DNA, 25 bp, Homo sapien
gagctgcaagctgataaacccgaat

SEQ ID NO: 1817613 - DNA, 25 bp, Homo sapien
gatttaagaagtgggtatgggcctc

SEQ ID NO: 1817614 - DNA, 25 bp, Homo sapien
gctgaggtcacccaggaccaggaag

SEQ ID NO: 1817615 - DNA, 25 bp, Homo sapien
tgttcaagctgaggtcacccaggac

SEQ ID NO: 1817616 - DNA, 25 bp, Homo sapien
ctgtgtgtgtctgcagtgccccagg

SEQ ID NO: 1817617 - DNA, 25 bp, Homo sapien
agagggaggcagatagctgccttcc

SEQ ID NO: 1817618 - DNA, 25 bp, Homo sapien
ccaacttggaggattttagagcaga

SEQ ID NO: 1817619 - DNA, 25 bp, Homo sapien
tctgcagcgcggtatggatacagca

SEQ ID NO: 1817620 - DNA, 25 bp, Homo sapien
tgaacatgctgagcagacggcatac

SEQ ID NO: 1817621 - DNA, 25 bp, Homo sapien
ctctagggtaagtaggatgcttgcc

SEQ ID NO: 1817622 - DNA, 25 bp, Homo sapien
ggcacaaaacctgcactctcagtgg

SEQ ID NO: 1817623 - DNA, 25 bp, Homo sapien
gaatgacagattggactcaagccct

SEQ ID NO: 1817624 - DNA, 25 bp, Homo sapien
cacatctagtggaggtctcgtctga

SEQ ID NO: 1817625 - DNA, 25 bp, Homo sapien
cttcaggatggttagaaggtccaca

SEQ ID NO: 1817626 - DNA, 25 bp, Homo sapien
aatatggacgtatctcggatcagcg

SEQ ID NO: 1817627 - DNA, 25 bp, Homo sapien
ggccctgctggcgtccaatatggac

SEQ ID NO: 1817628 - DNA, 25 bp, Homo sapien
gatagtcatatgctggacggcagac

SEQ ID NO: 1817629 - DNA, 25 bp, Homo sapien
acaccacggtaggtgcatgctgagc

SEQ ID NO: 1817630 - DNA, 25 bp, Homo sapien
ctgtcggtgagttacagtggaggat

SEQ ID NO: 1817631 - DNA, 25 bp, Homo sapien
cggtgactgtcggtgagttacagtg

SEQ ID NO: 1817632 - DNA, 25 bp, Homo sapien
cggtgagttacagtggaggattcca

SEQ ID NO: 1817633 - DNA, 25 bp, Homo sapien
agttacagtggaggattccagggtc

SEQ ID NO: 1817634 - DNA, 25 bp, Homo sapien
tatggaattaattaagcaaagcaca

SEQ ID NO: 1817635 - DNA, 25 bp, Homo sapien
atggaattaattaagcaaagcacag

SEQ ID NO: 1817636 - DNA, 25 bp, Homo sapien
ctatggaattaattaagcaaagcac

SEQ ID NO: 1817637 - DNA, 25 bp, Homo sapien
tgtccttccaaatcgtattcagggc

SEQ ID NO: 1817638 - DNA, 25 bp, Homo sapien
cctgggtgggcacatgtccttccaa

SEQ ID NO: 1817639 - DNA, 25 bp, Homo sapien
gggcacatgtccttccaaatcgtat

SEQ ID NO: 1817640 - DNA, 25 bp, Homo sapien
aaatcgtattcagggcgctgacacg

SEQ ID NO: 1817641 - DNA, 25 bp, Homo sapien
tgagtgaggctgtcccggtcgcact

SEQ ID NO: 1817642 - DNA, 25 bp, Homo sapien
tcctaatgaaacaagtcgcgacacc

SEQ ID NO: 1817643 - DNA, 25 bp, Homo sapien
tcaggactgccactctttagtactg

SEQ ID NO: 1817644 - DNA, 25 bp, Homo sapien
gtcgcgacaccttagccaattctga

SEQ ID NO: 1817645 - DNA, 25 bp, Homo sapien
tcctttgaggagagcattttcccgc

SEQ ID NO: 1817646 - DNA, 25 bp, Homo sapien
cttccgttttcctttgaggagagca

SEQ ID NO: 1817647 - DNA, 25 bp, Homo sapien
ccgttttcctttgaggagagcattt

SEQ ID NO: 1817648 - DNA, 25 bp, Homo sapien
tcttccgttttcctttgaggagagc

SEQ ID NO: 1817649 - DNA, 25 bp, Homo sapien
tcctctcatgtagggaacccacagc

SEQ ID NO: 1817650 - DNA, 25 bp, Homo sapien
ttttatctgtaatagagtctctttg

SEQ ID NO: 1817651 - DNA, 25 bp, Homo sapien
ttttaatagaggaagttgttgtgtc

SEQ ID NO: 1817652 - DNA, 25 bp, Homo sapien
tgatacctgctggattatgtatgta

SEQ ID NO: 1817653 - DNA, 25 bp, Homo sapien
tctggagtgtcttctccgggccagt

SEQ ID NO: 1817654 - DNA, 25 bp, Homo sapien
ttttctaagggtttctgcacggcca

SEQ ID NO: 1817655 - DNA, 25 bp, Homo sapien
atctcacgtcctccgcgctagggtt

SEQ ID NO: 1817656 - DNA, 25 bp, Homo sapien
gccagtgtcctttacggcagcacaa

SEQ ID NO: 1817657 - DNA, 25 bp, Homo sapien
tttgccagcaagatgccccatctgt

SEQ ID NO: 1817658 - DNA, 25 bp, Homo sapien
attgggtgtggaaagcactttgcca

SEQ ID NO: 1817659 - DNA, 25 bp, Homo sapien
gagggatggaattgggtgtggaaag

SEQ ID NO: 1817660 - DNA, 25 bp, Homo sapien
aaagcactttgccagcaagatgccc

SEQ ID NO: 1817661 - DNA, 25 bp, Homo sapien
ctctccacagcgggccacttcaaat

SEQ ID NO: 1817662 - DNA, 25 bp, Homo sapien
cagcgggccacttcaaatcctgtca

SEQ ID NO: 1817663 - DNA, 25 bp, Homo sapien
tccacagcgggccacttcaaatcct

SEQ ID NO: 1817664 - DNA, 25 bp, Homo sapien
cacagcgggccacttcaaatcctgt

SEQ ID NO: 1817665 - DNA, 25 bp, Homo sapien
cctatcactaaacctcaatatgttt

SEQ ID NO: 1817666 - DNA, 25 bp, Homo sapien
tgcctatcactaaacctcaatatgt

SEQ ID NO: 1817667 - DNA, 25 bp, Homo sapien
cttgcctatcactaaacctcaatat

SEQ ID NO: 1817668 - DNA, 25 bp, Homo sapien
gcctatcactaaacctcaatatgtt

SEQ ID NO: 1817669 - DNA, 25 bp, Homo sapien
cttggcgctttggagtactgtatct

SEQ ID NO: 1817670 - DNA, 25 bp, Homo sapien
ctacttggcgctttggagtactgta

SEQ ID NO: 1817671 - DNA, 25 bp, Homo sapien
acttggcgctttggagtactgtatc

SEQ ID NO: 1817672 - DNA, 25 bp, Homo sapien
tacttggcgctttggagtactgtat

SEQ ID NO: 1817673 - DNA, 25 bp, Homo sapien
cagtgagcaagaaccaggctctcgg

SEQ ID NO: 1817674 - DNA, 25 bp, Homo sapien
cctggaacacggttgtgctgcggga

SEQ ID NO: 1817675 - DNA, 25 bp, Homo sapien
tccaacttcgggacaagagctggag

SEQ ID NO: 1817676 - DNA, 25 bp, Homo sapien
tgccgaggtcctcataacacagtga

SEQ ID NO: 1817677 - DNA, 25 bp, Homo sapien
cacccctcgcctagaagagataggg

SEQ ID NO: 1817678 - DNA, 25 bp, Homo sapien
aattcatgtcagaataaccccgtgg

SEQ ID NO: 1817679 - DNA, 25 bp, Homo sapien
ggccttcaggaagcatgtgcagtcg

SEQ ID NO: 1817680 - DNA, 25 bp, Homo sapien
cacaagctgcaactagtgggaagtg

SEQ ID NO: 1817681 - DNA, 25 bp, Homo sapien
cccgccatggccacgaagctcgcca

SEQ ID NO: 1817682 - DNA, 25 bp, Homo sapien
cacagggcggctagcccaggcatga

SEQ ID NO: 1817683 - DNA, 25 bp, Homo sapien
cgaagctcgccaccatcgtaatcat

SEQ ID NO: 1817684 - DNA, 25 bp, Homo sapien
agcacctgccaatcccggcacaggg

SEQ ID NO: 1817685 - DNA, 25 bp, Homo sapien
cgttttccaggggggcacagctcta

SEQ ID NO: 1817686 - DNA, 25 bp, Homo sapien
gttttccaggggggcacagctctat

SEQ ID NO: 1817687 - DNA, 25 bp, Homo sapien
ccgttttccaggggggcacagctct

SEQ ID NO: 1817688 - DNA, 25 bp, Homo sapien
tgcccaccacaagtgccctatgtgg

SEQ ID NO: 1817689 - DNA, 25 bp, Homo sapien
tgccctatgtggtgtgccagtgttt

SEQ ID NO: 1817690 - DNA, 25 bp, Homo sapien
tatgtggtgtgccagtgttttacgg

SEQ ID NO: 1817691 - DNA, 25 bp, Homo sapien
cacaagtgccctatgtggtgtgcca

SEQ ID NO: 1817692 - DNA, 25 bp, Homo sapien
tccacagtgcccgtggaagaccttg

SEQ ID NO: 1817693 - DNA, 25 bp, Homo sapien
ctggcagctgtgtcccggtacttac

SEQ ID NO: 1817694 - DNA, 25 bp, Homo sapien
ttgccaatggaaccaaacccaaatc

SEQ ID NO: 1817695 - DNA, 25 bp, Homo sapien
tgccaatggaaccaaacccaaatcc

SEQ ID NO: 1817696 - DNA, 25 bp, Homo sapien
acagggcaaggacccgggcaagtct

SEQ ID NO: 1817697 - DNA, 25 bp, Homo sapien
aaaggaagagctagatttcaagccc

SEQ ID NO: 1817698 - DNA, 25 bp, Homo sapien
aattcattgactcccataaacgcag

SEQ ID NO: 1817699 - DNA, 25 bp, Homo sapien
tttcctgtgtaccatgtgctcgggc

SEQ ID NO: 1817700 - DNA, 25 bp, Homo sapien
catctgttgtgaccgaagcttccct

SEQ ID NO: 1817701 - DNA, 25 bp, Homo sapien
ctgattcacgctgggctgcctttga

SEQ ID NO: 1817702 - DNA, 25 bp, Homo sapien
tagtcactggttaatcactgctctg

SEQ ID NO: 1817703 - DNA, 25 bp, Homo sapien
cctagggcccaagtgattatctata

SEQ ID NO: 1817704 - DNA, 25 bp, Homo sapien
catgtgtataagagaacaggacgtt

SEQ ID NO: 1817705 - DNA, 25 bp, Homo sapien
atgtgtataagagaacaggacgttg

SEQ ID NO: 1817706 - DNA, 25 bp, Homo sapien
tattgcatgatccacttaaataggt

SEQ ID NO: 1817707 - DNA, 25 bp, Homo sapien
tgatccacttaaataggttcttagg

SEQ ID NO: 1817708 - DNA, 25 bp, Homo sapien
aatattgcatgatccacttaaatag

SEQ ID NO: 1817709 - DNA, 25 bp, Homo sapien
gcatgatccacttaaataggttctt

SEQ ID NO: 1817710 - DNA, 25 bp, Homo sapien
gaggcgctagcgaacatcagcagct

SEQ ID NO: 1817711 - DNA, 25 bp, Homo sapien
tatttaggagacaaagaggccctca

SEQ ID NO: 1817712 - DNA, 25 bp, Homo sapien
tccgagtcaacctcaacagtcttag

SEQ ID NO: 1817713 - DNA, 25 bp, Homo sapien
tctgatggagacctgcgttcggcca

SEQ ID NO: 1817714 - DNA, 25 bp, Homo sapien
ttcagctgctgggaaaggccacaaa

SEQ ID NO: 1817715 - DNA, 25 bp, Homo sapien
ttcccagctttacagaggacaaggg

SEQ ID NO: 1817716 - DNA, 25 bp, Homo sapien
gccaggttaggagcaggatgtcaca

SEQ ID NO: 1817717 - DNA, 25 bp, Homo sapien
gttgaattcagactcgaaagcccag

SEQ ID NO: 1817718 - DNA, 25 bp, Homo sapien
tagactacagtgaagctgctttgac

SEQ ID NO: 1817719 - DNA, 25 bp, Homo sapien
ttgtagatgcggttcaggcaggcac

SEQ ID NO: 1817720 - DNA, 25 bp, Homo sapien
tgctttgacacagaacagaatttcc

SEQ ID NO: 1817721 - DNA, 25 bp, Homo sapien
tgagtgagtgctaccatttaggtgc

SEQ ID NO: 1817722 - DNA, 25 bp, Homo sapien
gtctcagcctcattcagaaatgtcc

SEQ ID NO: 1817723 - DNA, 25 bp, Homo sapien
atctctctgcgtcttcaccagcgga

SEQ ID NO: 1817724 - DNA, 25 bp, Homo sapien
gcgtcttcaccagcggaccgagaga

SEQ ID NO: 1817725 - DNA, 25 bp, Homo sapien
gcacccatcactggacttgagcaag

SEQ ID NO: 1817726 - DNA, 25 bp, Homo sapien
gctccttggccatgtaattttcaac

SEQ ID NO: 1817727 - DNA, 25 bp, Homo sapien
tccttggtcctacatgacaaagggc

SEQ ID NO: 1817728 - DNA, 25 bp, Homo sapien
catgaatgtgttcagggatacggga

SEQ ID NO: 1817729 - DNA, 25 bp, Homo sapien
ggcctctgtaactttatgtgaaact

SEQ ID NO: 1817730 - DNA, 25 bp, Homo sapien
ccttaccagctctatgggtggaggg

SEQ ID NO: 1817731 - DNA, 25 bp, Homo sapien
cacagcatcgattgtaagatcctga

SEQ ID NO: 1817732 - DNA, 25 bp, Homo sapien
gaaaaagctgcgagttaacctctga

SEQ ID NO: 1817733 - DNA, 25 bp, Homo sapien
gggaattgcctgaacttcctgaacc

SEQ ID NO: 1817734 - DNA, 25 bp, Homo sapien
tgtcagctactgaccctcaggaagc

SEQ ID NO: 1817735 - DNA, 25 bp, Homo sapien
cactacagtgagctttattgccaga

SEQ ID NO: 1817736 - DNA, 25 bp, Homo sapien
tcaaatgacaacaagctacaggaag

SEQ ID NO: 1817737 - DNA, 25 bp, Homo sapien
tattcagcacagttatgcgtccaac

SEQ ID NO: 1817738 - DNA, 25 bp, Homo sapien
gcagagctctgtccattagcgggaa

SEQ ID NO: 1817739 - DNA, 25 bp, Homo sapien
caattgtgccagtaagagcatatca

SEQ ID NO: 1817740 - DNA, 25 bp, Homo sapien
ggaaaccaactctatatcacggagc

SEQ ID NO: 1817741 - DNA, 25 bp, Homo sapien
cagtaaataccaatgctggcttcag

SEQ ID NO: 1817742 - DNA, 25 bp, Homo sapien
tgtacacccctattacttgagaaga

SEQ ID NO: 1817743 - DNA, 25 bp, Homo sapien
ccggatgtccgcagtaatgatgtac

SEQ ID NO: 1817744 - DNA, 25 bp, Homo sapien
ccaggccaaaattgcatgaggtgct

SEQ ID NO: 1817745 - DNA, 25 bp, Homo sapien
tttcaaggaactgataccagctcag

SEQ ID NO: 1817746 - DNA, 25 bp, Homo sapien
tgagattcaaggaaagtccgtcgtt

SEQ ID NO: 1817747 - DNA, 25 bp, Homo sapien
ccgtagcgtggttatgtgagttcac

SEQ ID NO: 1817748 - DNA, 25 bp, Homo sapien
taactgtactgcttttgccactcct

SEQ ID NO: 1817749 - DNA, 25 bp, Homo sapien
gacaacgtccgtttctcagctctgg

SEQ ID NO: 1817750 - DNA, 25 bp, Homo sapien
tctagtggggtagaggtcttagctt

SEQ ID NO: 1817751 - DNA, 25 bp, Homo sapien
agcttcgcccaagagcatctcaccc

SEQ ID NO: 1817752 - DNA, 25 bp, Homo sapien
gagacccattttctggtctcggtgt

SEQ ID NO: 1817753 - DNA, 25 bp, Homo sapien
ctccttgacgttggtttctagtggg

SEQ ID NO: 1817754 - DNA, 25 bp, Homo sapien
caatcacgttcatctggtcagccac

SEQ ID NO: 1817755 - DNA, 25 bp, Homo sapien
tgactttgagtagtcagctaccttg

SEQ ID NO: 1817756 - DNA, 25 bp, Homo sapien
cactgcctttcagtatggacactgg

SEQ ID NO: 1817757 - DNA, 25 bp, Homo sapien
cacacgcacgtgtgtgcacttgggt

SEQ ID NO: 1817758 - DNA, 25 bp, Homo sapien
tttatagatcggcactggcgcagca

SEQ ID NO: 1817759 - DNA, 25 bp, Homo sapien
ggatggaagtccaacaacactaggt

SEQ ID NO: 1817760 - DNA, 25 bp, Homo sapien
cacacagcgaggaaggatggaagtc

SEQ ID NO: 1817761 - DNA, 25 bp, Homo sapien
actagtgtggacttgagactggcac

SEQ ID NO: 1817762 - DNA, 25 bp, Homo sapien
atagccttgtgagtggagttggtcc

SEQ ID NO: 1817763 - DNA, 25 bp, Homo sapien
ggccttcggtaaactctgactcatt

SEQ ID NO: 1817764 - DNA, 25 bp, Homo sapien
cttggtggaaatagccttgtgagtg

SEQ ID NO: 1817765 - DNA, 25 bp, Homo sapien
caaaggccttcggtaaactctgact

SEQ ID NO: 1817766 - DNA, 25 bp, Homo sapien
aacttgctgctactgggaaggccca

SEQ ID NO: 1817767 - DNA, 25 bp, Homo sapien
tgagaacttgctgctactgggaagg

SEQ ID NO: 1817768 - DNA, 25 bp, Homo sapien
agaacttgctgctactgggaaggcc

SEQ ID NO: 1817769 - DNA, 25 bp, Homo sapien
gaacttgctgctactgggaaggccc

SEQ ID NO: 1817770 - DNA, 25 bp, Homo sapien
gagtctattaccagttaagtcaaga

SEQ ID NO: 1817771 - DNA, 25 bp, Homo sapien
tcatgtgaaaaagggatcagcaccc

SEQ ID NO: 1817772 - DNA, 25 bp, Homo sapien
tatccaatcatttaggctgtttggg

SEQ ID NO: 1817773 - DNA, 25 bp, Homo sapien
gaaattcctggttgctccttgatct

SEQ ID NO: 1817774 - DNA, 25 bp, Homo sapien
ttcaaactgggaaagtgtagctggt

SEQ ID NO: 1817775 - DNA, 25 bp, Homo sapien
gctccatttgaagaaagacacatcc

SEQ ID NO: 1817776 - DNA, 25 bp, Homo sapien
aatcacgtccgcctatgctgagaag

SEQ ID NO: 1817777 - DNA, 25 bp, Homo sapien
ggaactaaggtttggtctgtcagca

SEQ ID NO: 1817778 - DNA, 25 bp, Homo sapien
ttgactcagctttattgactgggag

SEQ ID NO: 1817779 - DNA, 25 bp, Homo sapien
cagtgactccgctttttgactcagc

SEQ ID NO: 1817780 - DNA, 25 bp, Homo sapien
gaagtacttcaaccctgtgacctgg

SEQ ID NO: 1817781 - DNA, 25 bp, Homo sapien
cttctcctaagactgccatgtgtgc

SEQ ID NO: 1817782 - DNA, 25 bp, Homo sapien
ggatacccaattatgcaccagatag

SEQ ID NO: 1817783 - DNA, 25 bp, Homo sapien
taatctatacctgactcctgtgcgt

SEQ ID NO: 1817784 - DNA, 25 bp, Homo sapien
tcagcagagttaatacagccaacag

SEQ ID NO: 1817785 - DNA, 25 bp, Homo sapien
ccaatgcttaggtctcagttccaga

SEQ ID NO: 1817786 - DNA, 25 bp, Homo sapien
tgacagtgccacagtcagtccaaag

SEQ ID NO: 1817787 - DNA, 25 bp, Homo sapien
ttcactgacagtgccacagtcagtc

SEQ ID NO: 1817788 - DNA, 25 bp, Homo sapien
acaaggtgagaatgattccagccag

SEQ ID NO: 1817789 - DNA, 25 bp, Homo sapien
gagtgtgctgaacattgtcacattc

SEQ ID NO: 1817790 - DNA, 25 bp, Homo sapien
cccctgaggatctacagctggtgct

SEQ ID NO: 1817791 - DNA, 25 bp, Homo sapien
cctgaggatctacagctggtgctcc

SEQ ID NO: 1817792 - DNA, 25 bp, Homo sapien
ctggcgggcaaggggtcctctgtgg

SEQ ID NO: 1817793 - DNA, 25 bp, Homo sapien
tgaggatctacagctggtgctcccc

SEQ ID NO: 1817794 - DNA, 25 bp, Homo sapien
ttaggtagccaaagattaatccaac

SEQ ID NO: 1817795 - DNA, 25 bp, Homo sapien
caatgcatccagttattaggtagcc

SEQ ID NO: 1817796 - DNA, 25 bp, Homo sapien
taaggagaacttagcgatatggacc

SEQ ID NO: 1817797 - DNA, 25 bp, Homo sapien
gatatggaccttccaggcattatca

SEQ ID NO: 1817798 - DNA, 25 bp, Homo sapien
catatacaccagtcagagtctcttc

SEQ ID NO: 1817799 - DNA, 25 bp, Homo sapien
accatgccatatacaccagtcagag

SEQ ID NO: 1817800 - DNA, 25 bp, Homo sapien
tatacaccagtcagagtctcttcca

SEQ ID NO: 1817801 - DNA, 25 bp, Homo sapien
tgccatatacaccagtcagagtctc

SEQ ID NO: 1817802 - DNA, 25 bp, Homo sapien
tagagttggcattggtgcaagcttc

SEQ ID NO: 1817803 - DNA, 25 bp, Homo sapien
caacacaactgccaattagagttgg

SEQ ID NO: 1817804 - DNA, 25 bp, Homo sapien
gctcatcctccaattttaggaggtt

SEQ ID NO: 1817805 - DNA, 25 bp, Homo sapien
gaggtttgctgtcaacagtagccaa

SEQ ID NO: 1817806 - DNA, 25 bp, Homo sapien
cgcacccggccgaataattatctct

SEQ ID NO: 1817807 - DNA, 25 bp, Homo sapien
tcaccgcacccggccgaataattat

SEQ ID NO: 1817808 - DNA, 25 bp, Homo sapien
gcacccggccgaataattatctctt

SEQ ID NO: 1817809 - DNA, 25 bp, Homo sapien
accgcacccggccgaataattatct

SEQ ID NO: 1817810 - DNA, 25 bp, Homo sapien
tcctgtttcaacactggtgtaacca

SEQ ID NO: 1817811 - DNA, 25 bp, Homo sapien
cctgtttcaacactggtgtaaccat

SEQ ID NO: 1817812 - DNA, 25 bp, Homo sapien
ctcctgtttcaacactggtgtaacc

SEQ ID NO: 1817813 - DNA, 25 bp, Homo sapien
ctgagatggtaaaccagtttttctc

SEQ ID NO: 1817814 - DNA, 25 bp, Homo sapien
tggcttaccactgtctctgaggaag

SEQ ID NO: 1817815 - DNA, 25 bp, Homo sapien
aacaaggtacacaaagctggaggct

SEQ ID NO: 1817816 - DNA, 25 bp, Homo sapien
aactagaagccagtacaaccgtgga

SEQ ID NO: 1817817 - DNA, 25 bp, Homo sapien
catcgcatggtaagcgagagcctgg

SEQ ID NO: 1817818 - DNA, 25 bp, Homo sapien
tctgtcagttaagcaggtcctcggg

SEQ ID NO: 1817819 - DNA, 25 bp, Homo sapien
tcctgggaacagcaacagcttcgtt

SEQ ID NO: 1817820 - DNA, 25 bp, Homo sapien
ccagacgaggatggaagacgccctc

SEQ ID NO: 1817821 - DNA, 25 bp, Homo sapien
aatgcgcctggtgcagtaaccggca

SEQ ID NO: 1817822 - DNA, 25 bp, Homo sapien
gtcaagctggtgtctcattttcagg

SEQ ID NO: 1817823 - DNA, 25 bp, Homo sapien
ggctaattagcgataacattcagtg

SEQ ID NO: 1817824 - DNA, 25 bp, Homo sapien
ggcagcatgcctaaaagggtaacaa

SEQ ID NO: 1817825 - DNA, 25 bp, Homo sapien
taatgtgcatcatgagtcctgaaga

SEQ ID NO: 1817826 - DNA, 25 bp, Homo sapien
ggctttcggttgatgctactgttgt

SEQ ID NO: 1817827 - DNA, 25 bp, Homo sapien
ccttatttggggctttcggttgatg

SEQ ID NO: 1817828 - DNA, 25 bp, Homo sapien
atttggggctttcggttgatgctac

SEQ ID NO: 1817829 - DNA, 25 bp, Homo sapien
tggggctttcggttgatgctactgt

SEQ ID NO: 1817830 - DNA, 25 bp, Homo sapien
cctcagtgtagaggcggtagtgcta

SEQ ID NO: 1817831 - DNA, 25 bp, Homo sapien
tgagtaatccccaaggttcctcagt

SEQ ID NO: 1817832 - DNA, 25 bp, Homo sapien
tctgctgagtgaacgctggctcctt

SEQ ID NO: 1817833 - DNA, 25 bp, Homo sapien
agcctgcggcaggaaagctctgttc

SEQ ID NO: 1817834 - DNA, 25 bp, Homo sapien
tgttgcctgcttgaaagtagctctg

SEQ ID NO: 1817835 - DNA, 25 bp, Homo sapien
ttgaaagtagctctgagagtcagac

SEQ ID NO: 1817836 - DNA, 25 bp, Homo sapien
gggctccaatcgaacatctttgttg

SEQ ID NO: 1817837 - DNA, 25 bp, Homo sapien
gcatttcactccctctagccagatg

SEQ ID NO: 1817838 - DNA, 25 bp, Homo sapien
ggcccctggcgggaaccagcctgat

SEQ ID NO: 1817839 - DNA, 25 bp, Homo sapien
ggcaaagccacgaggtgcctgcctt

SEQ ID NO: 1817840 - DNA, 25 bp, Homo sapien
tgtttcactgggactagatgatcca

SEQ ID NO: 1817841 - DNA, 25 bp, Homo sapien
tattactcagcaaacgtaaacagtg

SEQ ID NO: 1817842 - DNA, 25 bp, Homo sapien
tgtctgtgtcccacgggagagctcc

SEQ ID NO: 1817843 - DNA, 25 bp, Homo sapien
gtctgtgtcccacgggagagctcca

SEQ ID NO: 1817844 - DNA, 25 bp, Homo sapien
ccagtttgaagtgggaaccgagctc

SEQ ID NO: 1817845 - DNA, 25 bp, Homo sapien
gaccagggatcacatgagcaaaagc

SEQ ID NO: 1817846 - DNA, 25 bp, Homo sapien
tgttggccgttgcttgaccagggat

SEQ ID NO: 1817847 - DNA, 25 bp, Homo sapien
gcaaaagcatcaggcgaagccagtt

SEQ ID NO: 1817848 - DNA, 25 bp, Homo sapien
ctggctccgaacatcatcggtttct

SEQ ID NO: 1817849 - DNA, 25 bp, Homo sapien
ggctccgaacatcatcggtttctgg

SEQ ID NO: 1817850 - DNA, 25 bp, Homo sapien
ctccgaacatcatcggtttctgggt

SEQ ID NO: 1817851 - DNA, 25 bp, Homo sapien
tggctccgaacatcatcggtttctg

SEQ ID NO: 1817852 - DNA, 25 bp, Homo sapien
tggcagcgcccaaggaataaatcgc

SEQ ID NO: 1817853 - DNA, 25 bp, Homo sapien
gaataaatcgcccttccaggtgtgg

SEQ ID NO: 1817854 - DNA, 25 bp, Homo sapien
ttctcagacgactcatcccggtcgt

SEQ ID NO: 1817855 - DNA, 25 bp, Homo sapien
agtgcttctcagacgactcatcccg

SEQ ID NO: 1817856 - DNA, 25 bp, Homo sapien
cagagtcaatagaagccaagctggc

SEQ ID NO: 1817857 - DNA, 25 bp, Homo sapien
catggtgaatttcaagctgccagca

SEQ ID NO: 1817858 - DNA, 25 bp, Homo sapien
accagtttgtggcaacctcaggaca

SEQ ID NO: 1817859 - DNA, 25 bp, Homo sapien
ttggatagacacgtgcagcaggctc

SEQ ID NO: 1817860 - DNA, 25 bp, Homo sapien
gaactgtgcctggtagctcttctgt

SEQ ID NO: 1817861 - DNA, 25 bp, Homo sapien
gtccagaactgtgcctggtagctct

SEQ ID NO: 1817862 - DNA, 25 bp, Homo sapien
cagaactgtgcctggtagctcttct

SEQ ID NO: 1817863 - DNA, 25 bp, Homo sapien
aggtccagaactgtgcctggtagct

SEQ ID NO: 1817864 - DNA, 25 bp, Homo sapien
ttctcccgctggctcgggcttggac

SEQ ID NO: 1817865 - DNA, 25 bp, Homo sapien
cgctggctcgggcttggacctcggt

SEQ ID NO: 1817866 - DNA, 25 bp, Homo sapien
tcggttctcccgctggctcgggctt

SEQ ID NO: 1817867 - DNA, 25 bp, Homo sapien
ggacttcggttctcccgctggctcg

SEQ ID NO: 1817868 - DNA, 25 bp, Homo sapien
cccatgcgcggcagtcacagttgga

SEQ ID NO: 1817869 - DNA, 25 bp, Homo sapien
cttgctgaccacgttctggacgagg

SEQ ID NO: 1817870 - DNA, 25 bp, Homo sapien
agtcacagttggaggcgttgtcccc

SEQ ID NO: 1817871 - DNA, 25 bp, Homo sapien
gccggcgcggatgccgtagtcccat

SEQ ID NO: 1817872 - DNA, 25 bp, Homo sapien
tggggaggctggtccagttgcccat

SEQ ID NO: 1817873 - DNA, 25 bp, Homo sapien
gtggggaggctggtccagttgccca

SEQ ID NO: 1817874 - DNA, 25 bp, Homo sapien
gtggtggggaggctggtccagttgc

SEQ ID NO: 1817875 - DNA, 25 bp, Homo sapien
cctcccagggggcagtggcgaaggg

SEQ ID NO: 1817876 - DNA, 25 bp, Homo sapien
ccccgcggcaccagaagttgggctg

SEQ ID NO: 1817877 - DNA, 25 bp, Homo sapien
gaagccgatgaacagcgccgggatc

SEQ ID NO: 1817878 - DNA, 25 bp, Homo sapien
ccaggtgagcagcacgagggtcttc

SEQ ID NO: 1817879 - DNA, 25 bp, Homo sapien
gaacgagtccgagaactggctgaag

SEQ ID NO: 1817880 - DNA, 25 bp, Homo sapien
gacccgtcatagtccagcaacaaga

SEQ ID NO: 1817881 - DNA, 25 bp, Homo sapien
aggaagggcagcaccgacccgtcat

SEQ ID NO: 1817882 - DNA, 25 bp, Homo sapien
agggcagcaccgacccgtcatagtc

SEQ ID NO: 1817883 - DNA, 25 bp, Homo sapien
cgacccgtcatagtccagcaacaag

SEQ ID NO: 1817884 - DNA, 25 bp, Homo sapien
ccgcggagcagcagctcgggtgcgg

SEQ ID NO: 1817885 - DNA, 25 bp, Homo sapien
ctcggggccgcagccgcggagcagc

SEQ ID NO: 1817886 - DNA, 25 bp, Homo sapien
ggagcagcagctcgggtgcgggccg

SEQ ID NO: 1817887 - DNA, 25 bp, Homo sapien
cagccgcggagcagcagctcgggtg

SEQ ID NO: 1817888 - DNA, 25 bp, Homo sapien
ctccaggatgcagtgggggcagcgg

SEQ ID NO: 1817889 - DNA, 25 bp, Homo sapien
ggcggcagggagccgttctcctcgg

SEQ ID NO: 1817890 - DNA, 25 bp, Homo sapien
ctgaaggctgccggggggcgggtct

SEQ ID NO: 1817891 - DNA, 25 bp, Homo sapien
tatttctgaaggctgccggggggcg

SEQ ID NO: 1817892 - DNA, 25 bp, Homo sapien
actatttctgaaggctgccgggggg

SEQ ID NO: 1817893 - DNA, 25 bp, Homo sapien
tctgaaggctgccggggggcgggtc

SEQ ID NO: 1817894 - DNA, 25 bp, Homo sapien
tatggccagccctcatttggtcttg

SEQ ID NO: 1817895 - DNA, 25 bp, Homo sapien
tagtgtatagcaatgtcctaatgcc

SEQ ID NO: 1817896 - DNA, 25 bp, Homo sapien
gaagttcaactcttccgtgcaacgc

SEQ ID NO: 1817897 - DNA, 25 bp, Homo sapien
tcaccagggtttggagaagttcaac

SEQ ID NO: 1817898 - DNA, 25 bp, Homo sapien
ttttcagacgaaccacctgtgtgga

SEQ ID NO: 1817899 - DNA, 25 bp, Homo sapien
tttgtttcccagcaggacgctggca

SEQ ID NO: 1817900 - DNA, 25 bp, Homo sapien
cgtggtgccatcagcgcagcattta

SEQ ID NO: 1817901 - DNA, 25 bp, Homo sapien
cagcgcagcatttatggccccacat

SEQ ID NO: 1817902 - DNA, 25 bp, Homo sapien
actggcaggagcctattgatgggct

SEQ ID NO: 1817903 - DNA, 25 bp, Homo sapien
tattgatgggctttgctagggtcag

SEQ ID NO: 1817904 - DNA, 25 bp, Homo sapien
cactgtcatccctgatctgcagagt

SEQ ID NO: 1817905 - DNA, 25 bp, Homo sapien
ccagaaggagcccatcggccactgt

SEQ ID NO: 1817906 - DNA, 25 bp, Homo sapien
gaggaaacctatgccaacacgccct

SEQ ID NO: 1817907 - DNA, 25 bp, Homo sapien
gccaacacgccctccaaactcctct

SEQ ID NO: 1817908 - DNA, 25 bp, Homo sapien
agaggaaacctatgccaacacgccc

SEQ ID NO: 1817909 - DNA, 25 bp, Homo sapien
acctatgccaacacgccctccaaac

SEQ ID NO: 1817910 - DNA, 25 bp, Homo sapien
ctctcgacacctcttctcacaaatt

SEQ ID NO: 1817911 - DNA, 25 bp, Homo sapien
tatcatcctctcgacacctcttctc

SEQ ID NO: 1817912 - DNA, 25 bp, Homo sapien
catcctctcgacacctcttctcaca

SEQ ID NO: 1817913 - DNA, 25 bp, Homo sapien
tttatcatcctctcgacacctcttc

SEQ ID NO: 1817914 - DNA, 25 bp, Homo sapien
agcttgctgctgatatacgggtttt

SEQ ID NO: 1817915 - DNA, 25 bp, Homo sapien
gcttgctgctgatatacgggttttc

SEQ ID NO: 1817916 - DNA, 25 bp, Homo sapien
caggcagccagttttactgggtgtc

SEQ ID NO: 1817917 - DNA, 25 bp, Homo sapien
ggtgtctgccatgtgctaagctctt

SEQ ID NO: 1817918 - DNA, 25 bp, Homo sapien
cacctgccttggtgtaatcctccat

SEQ ID NO: 1817919 - DNA, 25 bp, Homo sapien
agcacctgccttggtgtaatcctcc

SEQ ID NO: 1817920 - DNA, 25 bp, Homo sapien
gcacctgccttggtgtaatcctcca

SEQ ID NO: 1817921 - DNA, 25 bp, Homo sapien
gagcacctgccttggtgtaatcctc

SEQ ID NO: 1817922 - DNA, 25 bp, Homo sapien
gcagctccatggagcttggatcatc

SEQ ID NO: 1817923 - DNA, 25 bp, Homo sapien
catcatttcccgtgcacaacaggct

SEQ ID NO: 1817924 - DNA, 25 bp, Homo sapien
gggttattccagcattcatcatttc

SEQ ID NO: 1817925 - DNA, 25 bp, Homo sapien
ggatcatcgtcttccactgagcggg

SEQ ID NO: 1817926 - DNA, 25 bp, Homo sapien
taggcactcgacttatctgctcagt

SEQ ID NO: 1817927 - DNA, 25 bp, Homo sapien
ggcttgttcctaggactactcacac

SEQ ID NO: 1817928 - DNA, 25 bp, Homo sapien
ttaacttctaggcactcgacttatc

SEQ ID NO: 1817929 - DNA, 25 bp, Homo sapien
tcttcagaagcattccccagataac

SEQ ID NO: 1817930 - DNA, 25 bp, Homo sapien
gacccccagaagtagggctctgaca

SEQ ID NO: 1817931 - DNA, 25 bp, Homo sapien
tagtcttggttttgatcggtgtatc

SEQ ID NO: 1817932 - DNA, 25 bp, Homo sapien
cggtgtatcatagcagcaggacccc

SEQ ID NO: 1817933 - DNA, 25 bp, Homo sapien
gcaggacccccagaagtagggctct

SEQ ID NO: 1817934 - DNA, 25 bp, Homo sapien
tgggtgaagacagggcttccatgag

SEQ ID NO: 1817935 - DNA, 25 bp, Homo sapien
ctgggtgaagacagggcttccatga

SEQ ID NO: 1817936 - DNA, 25 bp, Homo sapien
ctgggtcataggcaggagcccctcc

SEQ ID NO: 1817937 - DNA, 25 bp, Homo sapien
gaggaggggttagcgagcccttcag

SEQ ID NO: 1817938 - DNA, 25 bp, Homo sapien
cccctgatatgaggaggggttagcg

SEQ ID NO: 1817939 - DNA, 25 bp, Homo sapien
cctctgggtcataggcaggagcccc

SEQ ID NO: 1817940 - DNA, 25 bp, Homo sapien
gctcgggctgtcttgtgctaattct

SEQ ID NO: 1817941 - DNA, 25 bp, Homo sapien
gctgtcttgtgctaattctggtgga

SEQ ID NO: 1817942 - DNA, 25 bp, Homo sapien
ctgggctcgggctgtcttgtgctaa

SEQ ID NO: 1817943 - DNA, 25 bp, Homo sapien
tgtcttgtgctaattctggtggaag

SEQ ID NO: 1817944 - DNA, 25 bp, Homo sapien
ttgctggaaatagaaccttctcctt

SEQ ID NO: 1817945 - DNA, 25 bp, Homo sapien
tgttcttgctggaaatagaaccttc

SEQ ID NO: 1817946 - DNA, 25 bp, Homo sapien
tcttgctggaaatagaaccttctcc

SEQ ID NO: 1817947 - DNA, 25 bp, Homo sapien
cttgttcttgctggaaatagaacct

SEQ ID NO: 1817948 - DNA, 25 bp, Homo sapien
tcccccggggcatgtctatagaaaa

SEQ ID NO: 1817949 - DNA, 25 bp, Homo sapien
ctcagtgcggtgtcccccggggcat

SEQ ID NO: 1817950 - DNA, 25 bp, Homo sapien
ttccattgctgtaagtgtcggggct

SEQ ID NO: 1817951 - DNA, 25 bp, Homo sapien
cacgaagcctggtacagagaacaga

SEQ ID NO: 1817952 - DNA, 25 bp, Homo sapien
gtcagggcgtttccacggccggctc

SEQ ID NO: 1817953 - DNA, 25 bp, Homo sapien
agctcttctggtcaatgaacgccaa

SEQ ID NO: 1817954 - DNA, 25 bp, Homo sapien
agtctgaaacacgggctcgggcttc

SEQ ID NO: 1817955 - DNA, 25 bp, Homo sapien
ggcttctgactccatgtcagggcgt

SEQ ID NO: 1817956 - DNA, 25 bp, Homo sapien
aggcagtccagtgtcgcttctttgg

SEQ ID NO: 1817957 - DNA, 25 bp, Homo sapien
tccatagtcttagatggttactcat

SEQ ID NO: 1817958 - DNA, 25 bp, Homo sapien
ggcagtccagtgtcgcttctttggc

SEQ ID NO: 1817959 - DNA, 25 bp, Homo sapien
gtagcggttggtattcttgtaacac

SEQ ID NO: 1817960 - DNA, 25 bp, Homo sapien
tagcggttggtattcttgtaacaca

SEQ ID NO: 1817961 - DNA, 25 bp, Homo sapien
agcggttggtattcttgtaacacat

SEQ ID NO: 1817962 - DNA, 25 bp, Homo sapien
ctgtagcggttggtattcttgtaac

SEQ ID NO: 1817963 - DNA, 25 bp, Homo sapien
caaaaactgtttaaacaagtcatgg

SEQ ID NO: 1817964 - DNA, 25 bp, Homo sapien
tagcaccagtgtcaagggtaaaaaa

SEQ ID NO: 1817965 - DNA, 25 bp, Homo sapien
ttaggctgattagcaataatttgca

SEQ ID NO: 1817966 - DNA, 25 bp, Homo sapien
gcaattaatattaaacactaatgtg

SEQ ID NO: 1817967 - DNA, 25 bp, Homo sapien
caggaaacccatagtgagatgtagc

SEQ ID NO: 1817968 - DNA, 25 bp, Homo sapien
gattgatccaatgctcagtcttggg

SEQ ID NO: 1817969 - DNA, 25 bp, Homo sapien
cagtcacagaggcatacttgctcaa

SEQ ID NO: 1817970 - DNA, 25 bp, Homo sapien
cagacattgcagaacacctgatgta

SEQ ID NO: 1817971 - DNA, 25 bp, Homo sapien
taactgtatattcgccaactatgaa

SEQ ID NO: 1817972 - DNA, 25 bp, Homo sapien
cttgctgttatgaatccataactgt

SEQ ID NO: 1817973 - DNA, 25 bp, Homo sapien
ctattggtgtggaaagatgtatatc

SEQ ID NO: 1817974 - DNA, 25 bp, Homo sapien
aatgctacatcggaaaacaaggtct

SEQ ID NO: 1817975 - DNA, 25 bp, Homo sapien
cattggtgctctggcgccaatgcag

SEQ ID NO: 1817976 - DNA, 25 bp, Homo sapien
tgctctggcgccaatgcagctgaac

SEQ ID NO: 1817977 - DNA, 25 bp, Homo sapien
ttctcttgccccattggtgctctgg

SEQ ID NO: 1817978 - DNA, 25 bp, Homo sapien
cagaaaacttctccagaggattctc

SEQ ID NO: 1817979 - DNA, 25 bp, Homo sapien
gctgacattcgagacacttgttttt

SEQ ID NO: 1817980 - DNA, 25 bp, Homo sapien
cgtcccgcagctgacattcgagaca

SEQ ID NO: 1817981 - DNA, 25 bp, Homo sapien
ccgcagctgacattcgagacacttg

SEQ ID NO: 1817982 - DNA, 25 bp, Homo sapien
gcagctgacattcgagacacttgtt

SEQ ID NO: 1817983 - DNA, 25 bp, Homo sapien
cagagcgatgagcagtaatggcaga

SEQ ID NO: 1817984 - DNA, 25 bp, Homo sapien
cagattttatgaagaggcagtttgg

SEQ ID NO: 1817985 - DNA, 25 bp, Homo sapien
gcgagtggcctgctggtaagtaaca

SEQ ID NO: 1817986 - DNA, 25 bp, Homo sapien
cagaaaatcggggaataaggatgtt

SEQ ID NO: 1817987 - DNA, 25 bp, Homo sapien
gtcgcacgtggaccgtggctgctac

SEQ ID NO: 1817988 - DNA, 25 bp, Homo sapien
taccacgctaccgttgccttcagtg

SEQ ID NO: 1817989 - DNA, 25 bp, Homo sapien
ccttcagtgctcttttgcaggagtg

SEQ ID NO: 1817990 - DNA, 25 bp, Homo sapien
gctcccgcagggctttgctgagaag

SEQ ID NO: 1817991 - DNA, 25 bp, Homo sapien
gacattccgttgcatggctagacca

SEQ ID NO: 1817992 - DNA, 25 bp, Homo sapien
tctctgaatttgacgactctgggtc

SEQ ID NO: 1817993 - DNA, 25 bp, Homo sapien
tgcggcgcgcgtcaagatttccttc

SEQ ID NO: 1817994 - DNA, 25 bp, Homo sapien
tatccatccgtacacacctgggttg

SEQ ID NO: 1817995 - DNA, 25 bp, Homo sapien
caggtcaagctttgctgaagacagc

SEQ ID NO: 1817996 - DNA, 25 bp, Homo sapien
ttcagttctgggatccaggtcaagc

SEQ ID NO: 1817997 - DNA, 25 bp, Homo sapien
ccaggttaaggaaggtgagagttct

SEQ ID NO: 1817998 - DNA, 25 bp, Homo sapien
tccgcttagttactaatgacttgca

SEQ ID NO: 1817999 - DNA, 25 bp, Homo sapien
aaccaaggatagtattgaaccttat

SEQ ID NO: 1818000 - DNA, 25 bp, Homo sapien
taatacaacgaaatataatacagtt

SEQ ID NO: 1818001 - DNA, 25 bp, Homo sapien
taggtgaatgcggtctctttttctc

SEQ ID NO: 1818002 - DNA, 25 bp, Homo sapien
cagtgcctggtgagtgtttaatgct

SEQ ID NO: 1818003 - DNA, 25 bp, Homo sapien
cagggctaataggaaccagagaata

SEQ ID NO: 1818004 - DNA, 25 bp, Homo sapien
gaaatccgctgcctttgagagcaga

SEQ ID NO: 1818005 - DNA, 25 bp, Homo sapien
gtgctgtaagaagcccagggctaat

SEQ ID NO: 1818006 - DNA, 25 bp, Homo sapien
tattgattgagggagggaattaccg

SEQ ID NO: 1818007 - DNA, 25 bp, Homo sapien
gcaaaacacgaatctgattgatctt

SEQ ID NO: 1818008 - DNA, 25 bp, Homo sapien
cagtcccgtacgtcttgccaagaag

SEQ ID NO: 1818009 - DNA, 25 bp, Homo sapien
tcaactgcggtcagtcccgtacgtc

SEQ ID NO: 1818010 - DNA, 25 bp, Homo sapien
tgccaagaagtagttgcaaaacacg

SEQ ID NO: 1818011 - DNA, 25 bp, Homo sapien
tcagtgcacatgcagggaggcgtct

SEQ ID NO: 1818012 - DNA, 25 bp, Homo sapien
tgcagatcttgcagaggtccaaaac

SEQ ID NO: 1818013 - DNA, 25 bp, Homo sapien
tttaatcagggcagaccaagagggc

SEQ ID NO: 1818014 - DNA, 25 bp, Homo sapien
taaacgtgtatgaaaagtgcagatc

SEQ ID NO: 1818015 - DNA, 25 bp, Homo sapien
ctttctacaaggaggcagtgactct

SEQ ID NO: 1818016 - DNA, 25 bp, Homo sapien
gaacaactaactgtgctcagagctg

SEQ ID NO: 1818017 - DNA, 25 bp, Homo sapien
tgaaggatgagcaggaattcactgc

SEQ ID NO: 1818018 - DNA, 25 bp, Homo sapien
gagcagtcaggagacgtgagcttca

SEQ ID NO: 1818019 - DNA, 25 bp, Homo sapien
ttcttcccccgtgccatcctcaccg

SEQ ID NO: 1818020 - DNA, 25 bp, Homo sapien
tcttcttcccccgtgccatcctcac

SEQ ID NO: 1818021 - DNA, 25 bp, Homo sapien
caaccacctgcagtggatcctttct

SEQ ID NO: 1818022 - DNA, 25 bp, Homo sapien
tgcagtggatcctttctggagatgg

SEQ ID NO: 1818023 - DNA, 25 bp, Homo sapien
gcaccctctccagggttcattcttt

SEQ ID NO: 1818024 - DNA, 25 bp, Homo sapien
ccctctccagggttcattctttgtg

SEQ ID NO: 1818025 - DNA, 25 bp, Homo sapien
tttgtgctgcttccttctccgtggc

SEQ ID NO: 1818026 - DNA, 25 bp, Homo sapien
ggcaccctctccagggttcattctt

SEQ ID NO: 1818027 - DNA, 25 bp, Homo sapien
ggaggaatccaggaacatgagttca

SEQ ID NO: 1818028 - DNA, 25 bp, Homo sapien
gttcagacttccaactcgggacagg

SEQ ID NO: 1818029 - DNA, 25 bp, Homo sapien
tggctgagttcaggccccacaccag

SEQ ID NO: 1818030 - DNA, 25 bp, Homo sapien
cacaccagcaccaagatgcatggga

SEQ ID NO: 1818031 - DNA, 25 bp, Homo sapien
gaaggtccactgttcttactcttgg

SEQ ID NO: 1818032 - DNA, 25 bp, Homo sapien
gagagttcagggatctaccttctaa

SEQ ID NO: 1818033 - DNA, 25 bp, Homo sapien
catctcactacagaggacaattgtg

SEQ ID NO: 1818034 - DNA, 25 bp, Homo sapien
tctaacccaagcagttttcaaggca

SEQ ID NO: 1818035 - DNA, 25 bp, Homo sapien
ggatttcgcaggcttctatgaaaac

SEQ ID NO: 1818036 - DNA, 25 bp, Homo sapien
gaaagtcaatctggctagtgagctc

SEQ ID NO: 1818037 - DNA, 25 bp, Homo sapien
aaactgcttgcgctgcctctgggct

SEQ ID NO: 1818038 - DNA, 25 bp, Homo sapien
tagtgagctctgtctggatttcgca

SEQ ID NO: 1818039 - DNA, 25 bp, Homo sapien
catggctccagctaaaaaactgctc

SEQ ID NO: 1818040 - DNA, 25 bp, Homo sapien
cctcaaaaagaggttatgcacagct

SEQ ID NO: 1818041 - DNA, 25 bp, Homo sapien
ctatttttgcaagtagacctggtca

SEQ ID NO: 1818042 - DNA, 25 bp, Homo sapien
tagtctggtattttgaggctcccaa

SEQ ID NO: 1818043 - DNA, 25 bp, Homo sapien
acagttctgccagccgtggtagggc

SEQ ID NO: 1818044 - DNA, 25 bp, Homo sapien
agttctgccagccgtggtagggctg

SEQ ID NO: 1818045 - DNA, 25 bp, Homo sapien
tcacagttctgccagccgtggtagg

SEQ ID NO: 1818046 - DNA, 25 bp, Homo sapien
cacagttctgccagccgtggtaggg

SEQ ID NO: 1818047 - DNA, 25 bp, Homo sapien
tatggggcatccaggactgtggggg

SEQ ID NO: 1818048 - DNA, 25 bp, Homo sapien
atggggcatccaggactgtgggggt

SEQ ID NO: 1818049 - DNA, 25 bp, Homo sapien
ctatggggcatccaggactgtgggg

SEQ ID NO: 1818050 - DNA, 25 bp, Homo sapien
aaggaatgatttgcagcagggccat

SEQ ID NO: 1818051 - DNA, 25 bp, Homo sapien
aatgatttgcagcagggccatgtag

SEQ ID NO: 1818052 - DNA, 25 bp, Homo sapien
gaatgatttgcagcagggccatgta

SEQ ID NO: 1818053 - DNA, 25 bp, Homo sapien
tgatttgcagcagggccatgtagat

SEQ ID NO: 1818054 - DNA, 25 bp, Homo sapien
catatccagcttctgcgcaaagccc

SEQ ID NO: 1818055 - DNA, 25 bp, Homo sapien
tccatatccagcttctgcgcaaagc

SEQ ID NO: 1818056 - DNA, 25 bp, Homo sapien
ctccatatccagcttctgcgcaaag

SEQ ID NO: 1818057 - DNA, 25 bp, Homo sapien
tatccagcttctgcgcaaagccctg

SEQ ID NO: 1818058 - DNA, 25 bp, Homo sapien
cccagggagcttccaccacagagcc

SEQ ID NO: 1818059 - DNA, 25 bp, Homo sapien
gctttcagtgctattgaaggcctgc

SEQ ID NO: 1818060 - DNA, 25 bp, Homo sapien
tccccgccagtaggggagagataga

SEQ ID NO: 1818061 - DNA, 25 bp, Homo sapien
gagatagacggtgagatggaagaga

SEQ ID NO: 1818062 - DNA, 25 bp, Homo sapien
tgcccgctgtcaagggctctccttg

SEQ ID NO: 1818063 - DNA, 25 bp, Homo sapien
tgatgtctattcaggactgagacag

SEQ ID NO: 1818064 - DNA, 25 bp, Homo sapien
tgtgggatttcttcatgctagctga

SEQ ID NO: 1818065 - DNA, 25 bp, Homo sapien
agacagcatcttatgtgtctctgta

SEQ ID NO: 1818066 - DNA, 25 bp, Homo sapien
agtgatcaagtccagtctcatggct

SEQ ID NO: 1818067 - DNA, 25 bp, Homo sapien
catctatttccgaagtgcttcaggt

SEQ ID NO: 1818068 - DNA, 25 bp, Homo sapien
ctaaattatataggctccagaggaa

SEQ ID NO: 1818069 - DNA, 25 bp, Homo sapien
caagacacgttattattgaccatga

SEQ ID NO: 1818070 - DNA, 25 bp, Homo sapien
aatatagatatagcttcaagacacg

SEQ ID NO: 1818071 - DNA, 25 bp, Homo sapien
tgactaagggtagtgtccaagcccc

SEQ ID NO: 1818072 - DNA, 25 bp, Homo sapien
tcaagtgaagttaacgacagcagcc

SEQ ID NO: 1818073 - DNA, 25 bp, Homo sapien
tgtggtctcgctaggctctgaagtg

SEQ ID NO: 1818074 - DNA, 25 bp, Homo sapien
caagggtgttagttgccagagcagc

SEQ ID NO: 1818075 - DNA, 25 bp, Homo sapien
tgagtgctcctgtttgccatagctg

SEQ ID NO: 1818076 - DNA, 25 bp, Homo sapien
tccaacagtgatgctgagtgccagt

SEQ ID NO: 1818077 - DNA, 25 bp, Homo sapien
catactgggcccatacttgcaggca

SEQ ID NO: 1818078 - DNA, 25 bp, Homo sapien
actaggagatctggccatactgggc

SEQ ID NO: 1818079 - DNA, 25 bp, Homo sapien
gctcagtccaagctcacacggttat

SEQ ID NO: 1818080 - DNA, 25 bp, Homo sapien
gctctgtcaatgagcaccccagggt

SEQ ID NO: 1818081 - DNA, 25 bp, Homo sapien
acacggttatctagtcggcaatgcc

SEQ ID NO: 1818082 - DNA, 25 bp, Homo sapien
taggccacttcaccaagagggatgc

SEQ ID NO: 1818083 - DNA, 25 bp, Homo sapien
atatgacaggttggtgacgtaggct

SEQ ID NO: 1818084 - DNA, 25 bp, Homo sapien
tcagtcccaaatgtctgtctcgaag

SEQ ID NO: 1818085 - DNA, 25 bp, Homo sapien
tctcgaaggggaccaggtggtaata

SEQ ID NO: 1818086 - DNA, 25 bp, Homo sapien
agtcccaaatgtctgtctcgaaggg

SEQ ID NO: 1818087 - DNA, 25 bp, Homo sapien
tacaaatgaactggtgagctggctc

SEQ ID NO: 1818088 - DNA, 25 bp, Homo sapien
gccgggaccatgagcatgactttca

SEQ ID NO: 1818089 - DNA, 25 bp, Homo sapien
tttcaatgcccgctagtaagtgtgc

SEQ ID NO: 1818090 - DNA, 25 bp, Homo sapien
tagacaacccttagcgaggccttca

SEQ ID NO: 1818091 - DNA, 25 bp, Homo sapien
cactggagctggaccatcgactcca

SEQ ID NO: 1818092 - DNA, 25 bp, Homo sapien
gcggcaggcgtttctttgttaggct

SEQ ID NO: 1818093 - DNA, 25 bp, Homo sapien
actgcactgcccgagattgaggagc

SEQ ID NO: 1818094 - DNA, 25 bp, Homo sapien
cagccggtgccgtgtagaaacagat

SEQ ID NO: 1818095 - DNA, 25 bp, Homo sapien
agttgaacctgcctcctaaatctgg

SEQ ID NO: 1818096 - DNA, 25 bp, Homo sapien
gactcagagcctgcacaactggtga

SEQ ID NO: 1818097 - DNA, 25 bp, Homo sapien
ggtggccgcctattcaagacctgtc

SEQ ID NO: 1818098 - DNA, 25 bp, Homo sapien
ccctctactgggaaggattctcgca

SEQ ID NO: 1818099 - DNA, 25 bp, Homo sapien
cccggatgtgggcctcggcacatgt

SEQ ID NO: 1818100 - DNA, 25 bp, Homo sapien
ggccggctctagtttcaatctgctg

SEQ ID NO: 1818101 - DNA, 25 bp, Homo sapien
gtctgttagcaggagccagtcccac

SEQ ID NO: 1818102 - DNA, 25 bp, Homo sapien
gagacacactggtaaagacggggtc

SEQ ID NO: 1818103 - DNA, 25 bp, Homo sapien
caagcgggatgttttacactcacca

SEQ ID NO: 1818104 - DNA, 25 bp, Homo sapien
ctgtggtcttcaacacaacccgtgg

SEQ ID NO: 1818105 - DNA, 25 bp, Homo sapien
cgggccatccccaggctatgtcatt

SEQ ID NO: 1818106 - DNA, 25 bp, Homo sapien
cctctgtgggactctcaagcgggat

SEQ ID NO: 1818107 - DNA, 25 bp, Homo sapien
aaatgctctgttgggtccacgccca

SEQ ID NO: 1818108 - DNA, 25 bp, Homo sapien
taactattgtttcggtatttgctaa

SEQ ID NO: 1818109 - DNA, 25 bp, Homo sapien
ctgtggtcaataactattgtttcgg

SEQ ID NO: 1818110 - DNA, 25 bp, Homo sapien
tgctaaacaaaatccattggacctc

SEQ ID NO: 1818111 - DNA, 25 bp, Homo sapien
cctctcttccacaccgtaagagaat

SEQ ID NO: 1818112 - DNA, 25 bp, Homo sapien
taagagaatgccgtgcacccgagac

SEQ ID NO: 1818113 - DNA, 25 bp, Homo sapien
tccacaccgtaagagaatgccgtgc

SEQ ID NO: 1818114 - DNA, 25 bp, Homo sapien
gtgcacccgagacccattcagagct

SEQ ID NO: 1818115 - DNA, 25 bp, Homo sapien
tgaacaggcggactgtgaaaactgc

SEQ ID NO: 1818116 - DNA, 25 bp, Homo sapien
gctgaacaggcggactgtgaaaact

SEQ ID NO: 1818117 - DNA, 25 bp, Homo sapien
tcgctgaacaggcggactgtgaaaa

SEQ ID NO: 1818118 - DNA, 25 bp, Homo sapien
aacaggcggactgtgaaaactgcca

SEQ ID NO: 1818119 - DNA, 25 bp, Homo sapien
tagcgtgggctaggctctgaatgcc

SEQ ID NO: 1818120 - DNA, 25 bp, Homo sapien
aagaacttgggcttgatggtgagag

SEQ ID NO: 1818121 - DNA, 25 bp, Homo sapien
tgaatgcccagaatgaccaagaact

SEQ ID NO: 1818122 - DNA, 25 bp, Homo sapien
gacaacatcaaaaggctagcgtggg

SEQ ID NO: 1818123 - DNA, 25 bp, Homo sapien
ggagccacagatccagaaacatgcc

SEQ ID NO: 1818124 - DNA, 25 bp, Homo sapien
gaccaagactgagaacatggtgtgc

SEQ ID NO: 1818125 - DNA, 25 bp, Homo sapien
ggacagtctcaggtgatgccaggac

SEQ ID NO: 1818126 - DNA, 25 bp, Homo sapien
gagaaagccgtgtggacagtctcag

SEQ ID NO: 1818127 - DNA, 25 bp, Homo sapien
aggagatctttcgaagaaggtgagc

SEQ ID NO: 1818128 - DNA, 25 bp, Homo sapien
aggtgagcacaacttccgatctaga

SEQ ID NO: 1818129 - DNA, 25 bp, Homo sapien
tgagcacaacttccgatctagaata

SEQ ID NO: 1818130 - DNA, 25 bp, Homo sapien
cattttttaacacctgatccagagg

SEQ ID NO: 1818131 - DNA, 25 bp, Homo sapien
taagcctggtctctatgtcgtgggc

SEQ ID NO: 1818132 - DNA, 25 bp, Homo sapien
gcttatgatcgtcttcagcagcttc

SEQ ID NO: 1818133 - DNA, 25 bp, Homo sapien
tgtcgtgggcttcctttatggcaac

SEQ ID NO: 1818134 - DNA, 25 bp, Homo sapien
tccacctcattaagcctggtctcta

SEQ ID NO: 1818135 - DNA, 25 bp, Homo sapien
gtggctgtcaggcagcataatattt

SEQ ID NO: 1818136 - DNA, 25 bp, Homo sapien
gagtggctgtcaggcagcataatat

SEQ ID NO: 1818137 - DNA, 25 bp, Homo sapien
agtggctgtcaggcagcataatatt

SEQ ID NO: 1818138 - DNA, 25 bp, Homo sapien
cgagtggctgtcaggcagcataata

SEQ ID NO: 1818139 - DNA, 25 bp, Homo sapien
aaggctcgggtgcttttctatctcc

SEQ ID NO: 1818140 - DNA, 25 bp, Homo sapien
ctatctccccatgagaagcgcagag

SEQ ID NO: 1818141 - DNA, 25 bp, Homo sapien
tcacaggttctatccgtcggctttg

SEQ ID NO: 1818142 - DNA, 25 bp, Homo sapien
gcagagcagaagtcttcccatcaca

SEQ ID NO: 1818143 - DNA, 25 bp, Homo sapien
gaagtaggtgcccaaggacactggc

SEQ ID NO: 1818144 - DNA, 25 bp, Homo sapien
agtaggtgcccaaggacactggcgt

SEQ ID NO: 1818145 - DNA, 25 bp, Homo sapien
gtgaccgaggctgatgcaaacgtgc

SEQ ID NO: 1818146 - DNA, 25 bp, Homo sapien
cccacacttgtgtgaccgaggctga

SEQ ID NO: 1818147 - DNA, 25 bp, Homo sapien
ttggtcacggagactaactttttca

SEQ ID NO: 1818148 - DNA, 25 bp, Homo sapien
gttttcaagcaattcgttgaatagg

SEQ ID NO: 1818149 - DNA, 25 bp, Homo sapien
tcacggagactaactttttcagaag

SEQ ID NO: 1818150 - DNA, 25 bp, Homo sapien
ctagtattattggtcacggagacta

SEQ ID NO: 1818151 - DNA, 25 bp, Homo sapien
gccaaacttggcaaataagacacgt

SEQ ID NO: 1818152 - DNA, 25 bp, Homo sapien
gcaatagcagggacagacttacact

SEQ ID NO: 1818153 - DNA, 25 bp, Homo sapien
tatattctgcggtacactgatctcc

SEQ ID NO: 1818154 - DNA, 25 bp, Homo sapien
tgggttgataacctccaagggtcac

SEQ ID NO: 1818155 - DNA, 25 bp, Homo sapien
catcttttcaggagtgaaaagctga

SEQ ID NO: 1818156 - DNA, 25 bp, Homo sapien
gcgcccagcggctggtccacagcca

SEQ ID NO: 1818157 - DNA, 25 bp, Homo sapien
acctccacgctgcaatgcatcaggg

SEQ ID NO: 1818158 - DNA, 25 bp, Homo sapien
cgagattgcggctgtgtggacacca

SEQ ID NO: 1818159 - DNA, 25 bp, Homo sapien
tgttcacgagcgacgtgccctcaaa

SEQ ID NO: 1818160 - DNA, 25 bp, Homo sapien
cagccgcgcacgaacatgttcacga

SEQ ID NO: 1818161 - DNA, 25 bp, Homo sapien
tgacgatgagcctgcggatgccgtt

SEQ ID NO: 1818162 - DNA, 25 bp, Homo sapien
tccgtgcggatctcgaagaactcct

SEQ ID NO: 1818163 - DNA, 25 bp, Homo sapien
tcgacgtcgaggttaggccgcgtcc

SEQ ID NO: 1818164 - DNA, 25 bp, Homo sapien
ccgcaggtcggtgactggaccagcc

SEQ ID NO: 1818165 - DNA, 25 bp, Homo sapien
tttataaggcgcttcccatcgcggg

SEQ ID NO: 1818166 - DNA, 25 bp, Homo sapien
actccaaggaggctgcgtatggccc

SEQ ID NO: 1818167 - DNA, 25 bp, Homo sapien
gaagaaacgtttcagagggacagga

SEQ ID NO: 1818168 - DNA, 25 bp, Homo sapien
gagaaatgcattgtgcccgggcctt

SEQ ID NO: 1818169 - DNA, 25 bp, Homo sapien
ttccttcctggagacacgctgccgg

SEQ ID NO: 1818170 - DNA, 25 bp, Homo sapien
catctaggagaaatgagtggaagga

SEQ ID NO: 1818171 - DNA, 25 bp, Homo sapien
tggcttgtggtaagacctggtctcc

SEQ ID NO: 1818172 - DNA, 25 bp, Homo sapien
aaagagagtgcataaccttcccagg

SEQ ID NO: 1818173 - DNA, 25 bp, Homo sapien
cacacacacgtgtaatatgctgtga

SEQ ID NO: 1818174 - DNA, 25 bp, Homo sapien
tagacgtctcctaatcatggccctt

SEQ ID NO: 1818175 - DNA, 25 bp, Homo sapien
tcacggggaactatgtaaacatcaa

SEQ ID NO: 1818176 - DNA, 25 bp, Homo sapien
tctacataccgacatttcacccttt

SEQ ID NO: 1818177 - DNA, 25 bp, Homo sapien
aaaacacattgtgcttctcggtgtt

SEQ ID NO: 1818178 - DNA, 25 bp, Homo sapien
ggcgacagagtctacataccgacat

SEQ ID NO: 1818179 - DNA, 25 bp, Homo sapien
taatcggcatttctgagtcactaga

SEQ ID NO: 1818180 - DNA, 25 bp, Homo sapien
tctgccacttgtaggataatccgtt

SEQ ID NO: 1818181 - DNA, 25 bp, Homo sapien
tctctgaacatgtgagggttcttcc

SEQ ID NO: 1818182 - DNA, 25 bp, Homo sapien
ccccagggaacacatatagaagtca

SEQ ID NO: 1818183 - DNA, 25 bp, Homo sapien
gtgcagtagcattttgtctaagaaa

SEQ ID NO: 1818184 - DNA, 25 bp, Homo sapien
gtgtgcagtagcattttgtctaaga

SEQ ID NO: 1818185 - DNA, 25 bp, Homo sapien
gcagtagcattttgtctaagaaaat

SEQ ID NO: 1818186 - DNA, 25 bp, Homo sapien
gaccaccacaaagacagtcacacaa

SEQ ID NO: 1818187 - DNA, 25 bp, Homo sapien
tggcagtttcttaaatcaatattga

SEQ ID NO: 1818188 - DNA, 25 bp, Homo sapien
tgtgaatgtccttcatggcacctac

SEQ ID NO: 1818189 - DNA, 25 bp, Homo sapien
aaactgtgaatgtccttcatggcac

SEQ ID NO: 1818190 - DNA, 25 bp, Homo sapien
tgtccttcatggcacctacagtggt

SEQ ID NO: 1818191 - DNA, 25 bp, Homo sapien
tgaatgtccttcatggcacctacag

SEQ ID NO: 1818192 - DNA, 25 bp, Homo sapien
tatttgcaggttgaacggcatgtag

SEQ ID NO: 1818193 - DNA, 25 bp, Homo sapien
gaggtaatctgtggatatttggcct

SEQ ID NO: 1818194 - DNA, 25 bp, Homo sapien
gatgtgcacgtgctcacaacagagg

SEQ ID NO: 1818195 - DNA, 25 bp, Homo sapien
gaaaggatcgtttcagccttgactg

SEQ ID NO: 1818196 - DNA, 25 bp, Homo sapien
cagtagctatcttgtgaccgtgaga

SEQ ID NO: 1818197 - DNA, 25 bp, Homo sapien
taacacactgtcctggctagtaagc

SEQ ID NO: 1818198 - DNA, 25 bp, Homo sapien
ggagggcttcggctacttaacacac

SEQ ID NO: 1818199 - DNA, 25 bp, Homo sapien
caatcttcaagagggtgacgccaca

SEQ ID NO: 1818200 - DNA, 25 bp, Homo sapien
caaaagtcaggagataaggctctcc

SEQ ID NO: 1818201 - DNA, 25 bp, Homo sapien
catgtgaaacttaggactcagatca

SEQ ID NO: 1818202 - DNA, 25 bp, Homo sapien
gagttttaagtgagacgtccacaca

SEQ ID NO: 1818203 - DNA, 25 bp, Homo sapien
ccctgtgcttacacgggagctgaag

SEQ ID NO: 1818204 - DNA, 25 bp, Homo sapien
gatctttgctaaaatggcaccactg

SEQ ID NO: 1818205 - DNA, 25 bp, Homo sapien
aaagcagacacattgccaccctagg

SEQ ID NO: 1818206 - DNA, 25 bp, Homo sapien
caccctagggtcttggcgttggtca

SEQ ID NO: 1818207 - DNA, 25 bp, Homo sapien
tctccccaggtagaaacacaagttc

SEQ ID NO: 1818208 - DNA, 25 bp, Homo sapien
tctacacaaccacacatcactttca

SEQ ID NO: 1818209 - DNA, 25 bp, Homo sapien
gtctacacaaccacacatcactttc

SEQ ID NO: 1818210 - DNA, 25 bp, Homo sapien
tgagatcatcatagatgatgtctac

SEQ ID NO: 1818211 - DNA, 25 bp, Homo sapien
ggatgagatcatcatagatgatgtc

SEQ ID NO: 1818212 - DNA, 25 bp, Homo sapien
ccttgacatgctttgtaggcgggaa

SEQ ID NO: 1818213 - DNA, 25 bp, Homo sapien
caccgtctgaggttagctgcgtcta

SEQ ID NO: 1818214 - DNA, 25 bp, Homo sapien
caggaagaattaggtcacaggaaca

SEQ ID NO: 1818215 - DNA, 25 bp, Homo sapien
agctggtcgctcctctctgatgaga

SEQ ID NO: 1818216 - DNA, 25 bp, Homo sapien
gctcttatctcagccgtttgctccg

SEQ ID NO: 1818217 - DNA, 25 bp, Homo sapien
ctgtcaccccgacatctgcagctgc

SEQ ID NO: 1818218 - DNA, 25 bp, Homo sapien
tcagccgtttgctccggctctgcgg

SEQ ID NO: 1818219 - DNA, 25 bp, Homo sapien
gctgtccgctcttatctcagccgtt

SEQ ID NO: 1818220 - DNA, 25 bp, Homo sapien
gtgagcatttgaaagacaagattcc

SEQ ID NO: 1818221 - DNA, 25 bp, Homo sapien
aggttcagggcactcgcaggggctg

SEQ ID NO: 1818222 - DNA, 25 bp, Homo sapien
tgcactgaccctggcgatggtcacc

SEQ ID NO: 1818223 - DNA, 25 bp, Homo sapien
cgcaggggctgtgaagtgaagtgag

SEQ ID NO: 1818224 - DNA, 25 bp, Homo sapien
tctccaagctgtggcgtgagctcac

SEQ ID NO: 1818225 - DNA, 25 bp, Homo sapien
taacatgactgtgctcgtgcctcct

SEQ ID NO: 1818226 - DNA, 25 bp, Homo sapien
tgagtagttgctgaggaccgagcac

SEQ ID NO: 1818227 - DNA, 25 bp, Homo sapien
tataggaggtcatatccggcacagg

SEQ ID NO: 1818228 - DNA, 25 bp, Homo sapien
gagcaggtagtacaaggccttagtt

SEQ ID NO: 1818229 - DNA, 25 bp, Homo sapien
tgagcaggtagtacaaggccttagt

SEQ ID NO: 1818230 - DNA, 25 bp, Homo sapien
tacaaggccttagttttctcctcca

SEQ ID NO: 1818231 - DNA, 25 bp, Homo sapien
agcaggtagtacaaggccttagttt

SEQ ID NO: 1818232 - DNA, 25 bp, Homo sapien
catagagtcagaagccctaggtccc

SEQ ID NO: 1818233 - DNA, 25 bp, Homo sapien
catttagagacgaccattgtgctga

SEQ ID NO: 1818234 - DNA, 25 bp, Homo sapien
catgtatacgggcttgtgtgcaaac

SEQ ID NO: 1818235 - DNA, 25 bp, Homo sapien
cacaatgtcgcaggatgagcagatc

SEQ ID NO: 1818236 - DNA, 25 bp, Homo sapien
tctgtgctttgaaacagtttgttaa

SEQ ID NO: 1818237 - DNA, 25 bp, Homo sapien
ctgtgctttgaaacagtttgttaag

SEQ ID NO: 1818238 - DNA, 25 bp, Homo sapien
tcaccagcagctggagcatccccgc

SEQ ID NO: 1818239 - DNA, 25 bp, Homo sapien
catccccgcccttggtatttctggt

SEQ ID NO: 1818240 - DNA, 25 bp, Homo sapien
accacagctggagctctaagtttat

SEQ ID NO: 1818241 - DNA, 25 bp, Homo sapien
tctggccagggaacctcgaatcttt

SEQ ID NO: 1818242 - DNA, 25 bp, Homo sapien
cacagctggagctctaagtttatag

SEQ ID NO: 1818243 - DNA, 25 bp, Homo sapien
gaacctcgaatctttagtctcttag

SEQ ID NO: 1818244 - DNA, 25 bp, Homo sapien
taagttattgagcttgtcccgaact

SEQ ID NO: 1818245 - DNA, 25 bp, Homo sapien
agactaagttattgagcttgtcccg

SEQ ID NO: 1818246 - DNA, 25 bp, Homo sapien
ttattgagcttgtcccgaactttgc

SEQ ID NO: 1818247 - DNA, 25 bp, Homo sapien
ctttgtcaaacaagactaagttatt

SEQ ID NO: 1818248 - DNA, 25 bp, Homo sapien
tcacttcttcattttggctttgccc

SEQ ID NO: 1818249 - DNA, 25 bp, Homo sapien
tcattttggctttgccccaggattt

SEQ ID NO: 1818250 - DNA, 25 bp, Homo sapien
tcttcattttggctttgccccagga

SEQ ID NO: 1818251 - DNA, 25 bp, Homo sapien
cttcttcattttggctttgccccag

SEQ ID NO: 1818252 - DNA, 25 bp, Homo sapien
gttgtccttgggtgcccttgtgaag

SEQ ID NO: 1818253 - DNA, 25 bp, Homo sapien
tgttgtccttgggtgcccttgtgaa

SEQ ID NO: 1818254 - DNA, 25 bp, Homo sapien
cctccacagcaaaggttggctggcg

SEQ ID NO: 1818255 - DNA, 25 bp, Homo sapien
gatttcaccatggttgccctccaca

SEQ ID NO: 1818256 - DNA, 25 bp, Homo sapien
atggcggtggatttcaccatggttg

SEQ ID NO: 1818257 - DNA, 25 bp, Homo sapien
gctggcgaaggtttatgcagccatg

SEQ ID NO: 1818258 - DNA, 25 bp, Homo sapien
tctctgttgctggtagtcaggtcca

SEQ ID NO: 1818259 - DNA, 25 bp, Homo sapien
tctgttgctggtagtcaggtccaca

SEQ ID NO: 1818260 - DNA, 25 bp, Homo sapien
ctcatctgcaagaagtaaacttctc

SEQ ID NO: 1818261 - DNA, 25 bp, Homo sapien
gttgctggtagtcaggtccacagga

SEQ ID NO: 1818262 - DNA, 25 bp, Homo sapien
ctctgagggcatcgggtcacccaga

SEQ ID NO: 1818263 - DNA, 25 bp, Homo sapien
gagatgccattcatgacgacggagc

SEQ ID NO: 1818264 - DNA, 25 bp, Homo sapien
tgacgacggagcaaaccctgctgct

SEQ ID NO: 1818265 - DNA, 25 bp, Homo sapien
ctgctctgagggcatcgggtcaccc

SEQ ID NO: 1818266 - DNA, 25 bp, Homo sapien
acaaaacggatttgagaagcaccga

SEQ ID NO: 1818267 - DNA, 25 bp, Homo sapien
gcagagctcccagcttgcatgggga

SEQ ID NO: 1818268 - DNA, 25 bp, Homo sapien
ctccggctcatgggctgtcagcagc

SEQ ID NO: 1818269 - DNA, 25 bp, Homo sapien
gccgtgaatctgtggaatagccaaa

SEQ ID NO: 1818270 - DNA, 25 bp, Homo sapien
cagccaagcccggaaaggctcgagt

SEQ ID NO: 1818271 - DNA, 25 bp, Homo sapien
caagcccggaaaggctcgagtccat

SEQ ID NO: 1818272 - DNA, 25 bp, Homo sapien
ggaaaggctcgagtccatcgttcat

SEQ ID NO: 1818273 - DNA, 25 bp, Homo sapien
tcttcctagaacgggacggagactc

SEQ ID NO: 1818274 - DNA, 25 bp, Homo sapien
tgtgcatgtttgttatgttaggtaa

SEQ ID NO: 1818275 - DNA, 25 bp, Homo sapien
tatgttaggtaaattcatgacatgg

SEQ ID NO: 1818276 - DNA, 25 bp, Homo sapien
acatggggtgttgtcgtgcagatta

SEQ ID NO: 1818277 - DNA, 25 bp, Homo sapien
gggtgttgtcgtgcagattattttg

SEQ ID NO: 1818278 - DNA, 25 bp, Homo sapien
aacgccatagtaagctgttgaagca

SEQ ID NO: 1818279 - DNA, 25 bp, Homo sapien
ggtagatttcttgggacaaacgcca

SEQ ID NO: 1818280 - DNA, 25 bp, Homo sapien
catatttcaacttacggtagatttc

SEQ ID NO: 1818281 - DNA, 25 bp, Homo sapien
gctgttgaagcatatgggctgacaa

SEQ ID NO: 1818282 - DNA, 25 bp, Homo sapien
tatgaaattggctctgttcccactt

SEQ ID NO: 1818283 - DNA, 25 bp, Homo sapien
gagttagctaaagaacaccctcaag

SEQ ID NO: 1818284 - DNA, 25 bp, Homo sapien
tctcagaaaattgaccgattagatg

SEQ ID NO: 1818285 - DNA, 25 bp, Homo sapien
cctcaagtttcatttgtgaagttgg

SEQ ID NO: 1818286 - DNA, 25 bp, Homo sapien
aattggccaacataccctcagctgt

SEQ ID NO: 1818287 - DNA, 25 bp, Homo sapien
gagatacacgcatctgaagaactag

SEQ ID NO: 1818288 - DNA, 25 bp, Homo sapien
ctttagatcaagaggttcgacaggg

SEQ ID NO: 1818289 - DNA, 25 bp, Homo sapien
tcagcgacatgcatctagtggctcc

SEQ ID NO: 1818290 - DNA, 25 bp, Homo sapien
gctactgtttatgagaagggtcaat

SEQ ID NO: 1818291 - DNA, 25 bp, Homo sapien
aacatggcaaatactcagcttgatc

SEQ ID NO: 1818292 - DNA, 25 bp, Homo sapien
tttatctgccacatacgagaatcta

SEQ ID NO: 1818293 - DNA, 25 bp, Homo sapien
taatccttagaatgatgacaatgct

SEQ ID NO: 1818294 - DNA, 25 bp, Homo sapien
taagcaagccctgcataaatgttct

SEQ ID NO: 1818295 - DNA, 25 bp, Homo sapien
gaaaattgccccaaagtggatgaag

SEQ ID NO: 1818296 - DNA, 25 bp, Homo sapien
ttctaacgtgaagccaaatgaggac

SEQ ID NO: 1818297 - DNA, 25 bp, Homo sapien
tcccgttgattttgtgtcagccctg

SEQ ID NO: 1818298 - DNA, 25 bp, Homo sapien
gaagctatatgcattaggcccactg

SEQ ID NO: 1818299 - DNA, 25 bp, Homo sapien
aaagctacacaaaggctgggcgcag

SEQ ID NO: 1818300 - DNA, 25 bp, Homo sapien
gcattaaaagaccaacaagccgcag

SEQ ID NO: 1818301 - DNA, 25 bp, Homo sapien
tcttcgctggaaattagtgccctcc

SEQ ID NO: 1818302 - DNA, 25 bp, Homo sapien
tgtcaccccaaatgcatggctccag

SEQ ID NO: 1818303 - DNA, 25 bp, Homo sapien
ttcctatgacagagaaggatgggcc

SEQ ID NO: 1818304 - DNA, 25 bp, Homo sapien
aatgacccctatcaccaaggcagtg

SEQ ID NO: 1818305 - DNA, 25 bp, Homo sapien
aaagcactccgctgaagatctgatg

SEQ ID NO: 1818306 - DNA, 25 bp, Homo sapien
tgaacagaagactgaaggccctcaa

SEQ ID NO: 1818307 - DNA, 25 bp, Homo sapien
tgcaaactataagggaatctgggcc

SEQ ID NO: 1818308 - DNA, 25 bp, Homo sapien
tcagctgccgcagtatgatgggaac

SEQ ID NO: 1818309 - DNA, 25 bp, Homo sapien
tgttcaccgtagcatccagtagact

SEQ ID NO: 1818310 - DNA, 25 bp, Homo sapien
tccataaccgtcaccaaacagaggg

SEQ ID NO: 1818311 - DNA, 25 bp, Homo sapien
tataagcacagcagtcataccggat

SEQ ID NO: 1818312 - DNA, 25 bp, Homo sapien
gctgcctgcgtagtccaattaacaa

SEQ ID NO: 1818313 - DNA, 25 bp, Homo sapien
aacagagggttagttgcttgctgcc

SEQ ID NO: 1818314 - DNA, 25 bp, Homo sapien
ccccaaatttgtagtcacctgggca

SEQ ID NO: 1818315 - DNA, 25 bp, Homo sapien
atgagaataatcagtgcttcagggc

SEQ ID NO: 1818316 - DNA, 25 bp, Homo sapien
tgggcaccccatttacagctgacat

SEQ ID NO: 1818317 - DNA, 25 bp, Homo sapien
gctgacatctgaagtagggaagtat

SEQ ID NO: 1818318 - DNA, 25 bp, Homo sapien
caactgctaggcaaacagctgccaa

SEQ ID NO: 1818319 - DNA, 25 bp, Homo sapien
gaagctggaatatggactgacaata

SEQ ID NO: 1818320 - DNA, 25 bp, Homo sapien
aaaaggaggtgtgcctgaaacttca

SEQ ID NO: 1818321 - DNA, 25 bp, Homo sapien
tatacgacctgagtcactaacaggc

SEQ ID NO: 1818322 - DNA, 25 bp, Homo sapien
tgctcaattatgctcaacgtgctgt

SEQ ID NO: 1818323 - DNA, 25 bp, Homo sapien
tgtgggcacatgtttctacaggact

SEQ ID NO: 1818324 - DNA, 25 bp, Homo sapien
gggaagatctctgagcccaacaggc

SEQ ID NO: 1818325 - DNA, 25 bp, Homo sapien
ttctcctttggaagcctgaagtggc

SEQ ID NO: 1818326 - DNA, 25 bp, Homo sapien
actgcaagctccgcccccccagggt

SEQ ID NO: 1818327 - DNA, 25 bp, Homo sapien
tagctgggaatacgggcgcccacca

SEQ ID NO: 1818328 - DNA, 25 bp, Homo sapien
agtagctgggaatacgggcgcccac

SEQ ID NO: 1818329 - DNA, 25 bp, Homo sapien
gctgggaatacgggcgcccaccacc

SEQ ID NO: 1818330 - DNA, 25 bp, Homo sapien
taaataggaaactacaacagaccca

SEQ ID NO: 1818331 - DNA, 25 bp, Homo sapien
ccacacatttatgggactttggcta

SEQ ID NO: 1818332 - DNA, 25 bp, Homo sapien
tctcttagtagaaagcacacatgaa

SEQ ID NO: 1818333 - DNA, 25 bp, Homo sapien
gaagctgccctatcagacataaaga

SEQ ID NO: 1818334 - DNA, 25 bp, Homo sapien
aatgtattttcaggccaggcgtgct

SEQ ID NO: 1818335 - DNA, 25 bp, Homo sapien
caaaatgtattttcaggccaggcgt

SEQ ID NO: 1818336 - DNA, 25 bp, Homo sapien
catcaaaatgtattttcaggccagg

SEQ ID NO: 1818337 - DNA, 25 bp, Homo sapien
gttcatcaaaatgtattttcaggcc

SEQ ID NO: 1818338 - DNA, 25 bp, Homo sapien
gctggaattgcaaaagggaagacct

SEQ ID NO: 1818339 - DNA, 25 bp, Homo sapien
taattgtacggtaagccctagagca

SEQ ID NO: 1818340 - DNA, 25 bp, Homo sapien
ggctagcactttctgggacccaaac

SEQ ID NO: 1818341 - DNA, 25 bp, Homo sapien
tacatgcggtggactttgagaaaca

SEQ ID NO: 1818342 - DNA, 25 bp, Homo sapien
tttacggtctcgtcagcaagcaggg

SEQ ID NO: 1818343 - DNA, 25 bp, Homo sapien
tggcgactctacatggaccaatggc

SEQ ID NO: 1818344 - DNA, 25 bp, Homo sapien
gctttatcggacaggaccaacgcag

SEQ ID NO: 1818345 - DNA, 25 bp, Homo sapien
ttgtagcctacggaagaatgagcct

SEQ ID NO: 1818346 - DNA, 25 bp, Homo sapien
tctgctcaaaaggcgcctgcccgag

SEQ ID NO: 1818347 - DNA, 25 bp, Homo sapien
cccgaggccgctttccgttgcaaag

SEQ ID NO: 1818348 - DNA, 25 bp, Homo sapien
tgcccgaggccgctttccgttgcaa

SEQ ID NO: 1818349 - DNA, 25 bp, Homo sapien
cgaggccgctttccgttgcaaaggt

SEQ ID NO: 1818350 - DNA, 25 bp, Homo sapien
tactgtgtctctaacaccgaccagg

SEQ ID NO: 1818351 - DNA, 25 bp, Homo sapien
gaaaaatcatcaattcgtttgcccg

SEQ ID NO: 1818352 - DNA, 25 bp, Homo sapien
gagctgtctagcgagatggttaagc

SEQ ID NO: 1818353 - DNA, 25 bp, Homo sapien
gtagtaacagttccacattaaaaga

SEQ ID NO: 1818354 - DNA, 25 bp, Homo sapien
tagcgggattcaataactaaacgtc

SEQ ID NO: 1818355 - DNA, 25 bp, Homo sapien
gacactcgacctcaatccttagcag

SEQ ID NO: 1818356 - DNA, 25 bp, Homo sapien
atcagttcttggaaccgcacacccg

SEQ ID NO: 1818357 - DNA, 25 bp, Homo sapien
tgttggctcccctcgttagcgggat

SEQ ID NO: 1818358 - DNA, 25 bp, Homo sapien
gagcaggcggccttcgagcttcctt

SEQ ID NO: 1818359 - DNA, 25 bp, Homo sapien
ctaacggcgagagtcaaactttgct

SEQ ID NO: 1818360 - DNA, 25 bp, Homo sapien
actttgctttttccggcgcgattcg

SEQ ID NO: 1818361 - DNA, 25 bp, Homo sapien
cggcagtgaggtcgcgctttcctat

SEQ ID NO: 1818362 - DNA, 25 bp, Homo sapien
ttggggacacgagggtcagtggcag

SEQ ID NO: 1818363 - DNA, 25 bp, Homo sapien
tgttggggacacgagggtcagtggc

SEQ ID NO: 1818364 - DNA, 25 bp, Homo sapien
gggacacgagggtcagtggcagcag

SEQ ID NO: 1818365 - DNA, 25 bp, Homo sapien
ctgtgttggggacacgagggtcagt

SEQ ID NO: 1818366 - DNA, 25 bp, Homo sapien
agtcgtccttttactggtgtcagtt

SEQ ID NO: 1818367 - DNA, 25 bp, Homo sapien
cagtcgtccttttactggtgtcagt

SEQ ID NO: 1818368 - DNA, 25 bp, Homo sapien
cccagtcgtccttttactggtgtca

SEQ ID NO: 1818369 - DNA, 25 bp, Homo sapien
tcgtccttttactggtgtcagttta

SEQ ID NO: 1818370 - DNA, 25 bp, Homo sapien
tttaccaacttgcaaacttgaggca

SEQ ID NO: 1818371 - DNA, 25 bp, Homo sapien
tagcgggatacttgatctcgtcacc

SEQ ID NO: 1818372 - DNA, 25 bp, Homo sapien
tctttagtccagcagtcacccagta

SEQ ID NO: 1818373 - DNA, 25 bp, Homo sapien
tgttttgagtgcctaccggcagctt

SEQ ID NO: 1818374 - DNA, 25 bp, Homo sapien
tgaagtttgctatatataactgcct

SEQ ID NO: 1818375 - DNA, 25 bp, Homo sapien
tcccttcttgttaattccttactca

SEQ ID NO: 1818376 - DNA, 25 bp, Homo sapien
tgtctttcacaacactgatcgactt

SEQ ID NO: 1818377 - DNA, 25 bp, Homo sapien
caacactgatcgacttgaagtttgc

SEQ ID NO: 1818378 - DNA, 25 bp, Homo sapien
agttcgagactagcttgaccgacat

SEQ ID NO: 1818379 - DNA, 25 bp, Homo sapien
cgagactagcttgaccgacatggag

SEQ ID NO: 1818380 - DNA, 25 bp, Homo sapien
ttcgagactagcttgaccgacatgg

SEQ ID NO: 1818381 - DNA, 25 bp, Homo sapien
actagcttgaccgacatggagaaat

SEQ ID NO: 1818382 - DNA, 25 bp, Homo sapien
aaaattaagctgtagaaaggcctgt

SEQ ID NO: 1818383 - DNA, 25 bp, Homo sapien
gattatggagacaaacctatttaca

SEQ ID NO: 1818384 - DNA, 25 bp, Homo sapien
taaaactcactgaaaggtacttgtg

SEQ ID NO: 1818385 - DNA, 25 bp, Homo sapien
gaccaaacctggaataacattaaga

SEQ ID NO: 1818386 - DNA, 25 bp, Homo sapien
cctctgcctcccaggcttacacaat

SEQ ID NO: 1818387 - DNA, 25 bp, Homo sapien
caacctctgcctcccaggcttacac

SEQ ID NO: 1818388 - DNA, 25 bp, Homo sapien
tctgcctcccaggcttacacaatcc

SEQ ID NO: 1818389 - DNA, 25 bp, Homo sapien
aacctctgcctcccaggcttacaca

SEQ ID NO: 1818390 - DNA, 25 bp, Homo sapien
taatttcagagtgctcgtcttcggg

SEQ ID NO: 1818391 - DNA, 25 bp, Homo sapien
taactggaccgatgcagaaggctat

SEQ ID NO: 1818392 - DNA, 25 bp, Homo sapien
gaaactttggatgccagtcatgcgg

SEQ ID NO: 1818393 - DNA, 25 bp, Homo sapien
cgtgtgtattctaaaagcagcccag

SEQ ID NO: 1818394 - DNA, 25 bp, Homo sapien
tgcaccaataacaacttaaactcct

SEQ ID NO: 1818395 - DNA, 25 bp, Homo sapien
gtatgcaccaataacaacttaaact

SEQ ID NO: 1818396 - DNA, 25 bp, Homo sapien
tatgcaccaataacaacttaaactc

SEQ ID NO: 1818397 - DNA, 25 bp, Homo sapien
tgtatgcaccaataacaacttaaac

SEQ ID NO: 1818398 - DNA, 25 bp, Homo sapien
tgccgtcctttgctttatctgaaga

SEQ ID NO: 1818399 - DNA, 25 bp, Homo sapien
tgttgattagctgtcactatggtga

SEQ ID NO: 1818400 - DNA, 25 bp, Homo sapien
ctctattgtctgtcttatgccgtcc

SEQ ID NO: 1818401 - DNA, 25 bp, Homo sapien
tctgaagacgagttgagaaatgaaa

SEQ ID NO: 1818402 - DNA, 25 bp, Homo sapien
taaacgaattagcatcaaccaggcc

SEQ ID NO: 1818403 - DNA, 25 bp, Homo sapien
tacagcacgccttcatccaggaaaa

SEQ ID NO: 1818404 - DNA, 25 bp, Homo sapien
gaccagattctgatgttggacccag

SEQ ID NO: 1818405 - DNA, 25 bp, Homo sapien
cagctaaaggacttgttggaccaga

SEQ ID NO: 1818406 - DNA, 25 bp, Homo sapien
ggcataaaccttccactcttgaaca

SEQ ID NO: 1818407 - DNA, 25 bp, Homo sapien
tcctagtgacatagaaacgatgcgt

SEQ ID NO: 1818408 - DNA, 25 bp, Homo sapien
tggatagagcgccttcagtgtactg

SEQ ID NO: 1818409 - DNA, 25 bp, Homo sapien
taaaattggaagagaacgcgcttga

SEQ ID NO: 1818410 - DNA, 25 bp, Homo sapien
gacactcacttattgtaaagtgaag

SEQ ID NO: 1818411 - DNA, 25 bp, Homo sapien
tgtgaagtggaccatgcagatttct

SEQ ID NO: 1818412 - DNA, 25 bp, Homo sapien
gaagattgttctactgcatgtgaag

SEQ ID NO: 1818413 - DNA, 25 bp, Homo sapien
tatgttctcagtatgcatcactaga

SEQ ID NO: 1818414 - DNA, 25 bp, Homo sapien
ttccttttgatggtgcggaaagaga

SEQ ID NO: 1818415 - DNA, 25 bp, Homo sapien
ccttttgatggtgcggaaagagaaa

SEQ ID NO: 1818416 - DNA, 25 bp, Homo sapien
ttgatggtgcggaaagagaaaaagg

SEQ ID NO: 1818417 - DNA, 25 bp, Homo sapien
ttttgatggtgcggaaagagaaaaa

SEQ ID NO: 1818418 - DNA, 25 bp, Homo sapien
tgtggagtgcgtctgtaaagtgctt

SEQ ID NO: 1818419 - DNA, 25 bp, Homo sapien
catgagctaaggtttctgtcctata

SEQ ID NO: 1818420 - DNA, 25 bp, Homo sapien
gctgagattccacataacacatggt

SEQ ID NO: 1818421 - DNA, 25 bp, Homo sapien
tgcttgttttatcatacttcctgcc

SEQ ID NO: 1818422 - DNA, 25 bp, Homo sapien
aagttctactccatatcacatcaag

SEQ ID NO: 1818423 - DNA, 25 bp, Homo sapien
gcttcttagagtagatgtgttcaca

SEQ ID NO: 1818424 - DNA, 25 bp, Homo sapien
tagaatagtctaccaagtgaaccat

SEQ ID NO: 1818425 - DNA, 25 bp, Homo sapien
tctcagcagtgcttttcacaagttc

SEQ ID NO: 1818426 - DNA, 25 bp, Homo sapien
gagacagtggtctagaattccatct

SEQ ID NO: 1818427 - DNA, 25 bp, Homo sapien
ccttagcaataagggaaggcgacaa

SEQ ID NO: 1818428 - DNA, 25 bp, Homo sapien
gagagttcttggcatggacttaaaa

SEQ ID NO: 1818429 - DNA, 25 bp, Homo sapien
tgaaactggcattggagacctccat

SEQ ID NO: 1818430 - DNA, 25 bp, Homo sapien
agagtcgcaaagttttggctgtctc

SEQ ID NO: 1818431 - DNA, 25 bp, Homo sapien
aagagtcgcaaagttttggctgtct

SEQ ID NO: 1818432 - DNA, 25 bp, Homo sapien
gaatagtcatatgttgtaatcgttc

SEQ ID NO: 1818433 - DNA, 25 bp, Homo sapien
cagaaagtcgtttgtagtcttggcc

SEQ ID NO: 1818434 - DNA, 25 bp, Homo sapien
ggaagagggtcgttcagtaactgct

SEQ ID NO: 1818435 - DNA, 25 bp, Homo sapien
tgtaatcgttctagttccagtaaac

SEQ ID NO: 1818436 - DNA, 25 bp, Homo sapien
tcctcggtgaaaggttcctcaacat

SEQ ID NO: 1818437 - DNA, 25 bp, Homo sapien
caagtctagagcactgaaaggagga

SEQ ID NO: 1818438 - DNA, 25 bp, Homo sapien
aatacttcatttggctcctcggtga

SEQ ID NO: 1818439 - DNA, 25 bp, Homo sapien
caacagaggtttctgcagggtccac

SEQ ID NO: 1818440 - DNA, 25 bp, Homo sapien
tcaaattccaatttggagcaggtaa

SEQ ID NO: 1818441 - DNA, 25 bp, Homo sapien
ttggagcaggtaatgtttcaccatc

SEQ ID NO: 1818442 - DNA, 25 bp, Homo sapien
tatagttgaacatgaactaacatga

SEQ ID NO: 1818443 - DNA, 25 bp, Homo sapien
tgaactaacatgaatctcatttctg

SEQ ID NO: 1818444 - DNA, 25 bp, Homo sapien
gggtaaggaccaacttgcttatcaa

SEQ ID NO: 1818445 - DNA, 25 bp, Homo sapien
gtaaggaccaacttgcttatcaact

SEQ ID NO: 1818446 - DNA, 25 bp, Homo sapien
ggtaaggaccaacttgcttatcaac

SEQ ID NO: 1818447 - DNA, 25 bp, Homo sapien
tataggatgattgattacattaaag

SEQ ID NO: 1818448 - DNA, 25 bp, Homo sapien
taggatgattgattacattaaagcc

SEQ ID NO: 1818449 - DNA, 25 bp, Homo sapien
cttataggatgattgattacattaa

SEQ ID NO: 1818450 - DNA, 25 bp, Homo sapien
ggatgattgattacattaaagccag

SEQ ID NO: 1818451 - DNA, 25 bp, Homo sapien
cattaagaggacaattccataattg

SEQ ID NO: 1818452 - DNA, 25 bp, Homo sapien
tccttcattaagaggacaattccat

SEQ ID NO: 1818453 - DNA, 25 bp, Homo sapien
ctcttctctatggtacttccttcat

SEQ ID NO: 1818454 - DNA, 25 bp, Homo sapien
tccataattgaaagatcccttgttt

SEQ ID NO: 1818455 - DNA, 25 bp, Homo sapien
attaggttctagcatcagttgctcc

SEQ ID NO: 1818456 - DNA, 25 bp, Homo sapien
tgtgtacttttttgactatgcaccg

SEQ ID NO: 1818457 - DNA, 25 bp, Homo sapien
tatgcaccgacaaattaggttctag

SEQ ID NO: 1818458 - DNA, 25 bp, Homo sapien
tgctccactggaatttccaaatagt

SEQ ID NO: 1818459 - DNA, 25 bp, Homo sapien
tctgaatccaaattccagtgagata

SEQ ID NO: 1818460 - DNA, 25 bp, Homo sapien
ctgagagatgtttgacacacgtagg

SEQ ID NO: 1818461 - DNA, 25 bp, Homo sapien
gatgtttgacacacgtaggctgtta

SEQ ID NO: 1818462 - DNA, 25 bp, Homo sapien
tttgacacacgtaggctgttagcac

SEQ ID NO: 1818463 - DNA, 25 bp, Homo sapien
gagatgtttgacacacgtaggctgt

SEQ ID NO: 1818464 - DNA, 25 bp, Homo sapien
ttgttgtagctgttgctctgtttcc

SEQ ID NO: 1818465 - DNA, 25 bp, Homo sapien
gctgttgctctgtttccttaaaatc

SEQ ID NO: 1818466 - DNA, 25 bp, Homo sapien
gtagctgttgctctgtttccttaaa

SEQ ID NO: 1818467 - DNA, 25 bp, Homo sapien
tttgttgtagctgttgctctgtttc

SEQ ID NO: 1818468 - DNA, 25 bp, Homo sapien
ccagagtgcttgaaggcgcgtgtct

SEQ ID NO: 1818469 - DNA, 25 bp, Homo sapien
ctcctgagctgtggccggactgggt

SEQ ID NO: 1818470 - DNA, 25 bp, Homo sapien
gtgtctcaagggagccgcaaggccc

SEQ ID NO: 1818471 - DNA, 25 bp, Homo sapien
ggagcccagttccaggggtagcagg

SEQ ID NO: 1818472 - DNA, 25 bp, Homo sapien
cccacgtgtcctccccggcgtgctc

SEQ ID NO: 1818473 - DNA, 25 bp, Homo sapien
gcccacgtgtcctccccggcgtgct

SEQ ID NO: 1818474 - DNA, 25 bp, Homo sapien
tctgccgcggccttcctgcagcggg

SEQ ID NO: 1818475 - DNA, 25 bp, Homo sapien
gcgcagcccggtcggcagtgcaggg

SEQ ID NO: 1818476 - DNA, 25 bp, Homo sapien
cgtggctgacggcttggagggcgcc

SEQ ID NO: 1818477 - DNA, 25 bp, Homo sapien
gagcgcctccgcgtgcgtggctgac

SEQ ID NO: 1818478 - DNA, 25 bp, Homo sapien
ctcccggcaactaccagagagcggg

SEQ ID NO: 1818479 - DNA, 25 bp, Homo sapien
gggtctcccggcaactaccagagag

SEQ ID NO: 1818480 - DNA, 25 bp, Homo sapien
gaggcccggcgttccacaaggtcca

SEQ ID NO: 1818481 - DNA, 25 bp, Homo sapien
caaggtccacgcgtattcgcgggcc

SEQ ID NO: 1818482 - DNA, 25 bp, Homo sapien
tgatattacccatgcatttgtcctc

SEQ ID NO: 1818483 - DNA, 25 bp, Homo sapien
tttgatattacccatgcatttgtcc

SEQ ID NO: 1818484 - DNA, 25 bp, Homo sapien
cttttgatattacccatgcatttgt

SEQ ID NO: 1818485 - DNA, 25 bp, Homo sapien
ttgatattacccatgcatttgtcct

SEQ ID NO: 1818486 - DNA, 25 bp, Homo sapien
aggtgtaacttgaagtccctttctg

SEQ ID NO: 1818487 - DNA, 25 bp, Homo sapien
tttctggtcgtcagacccctcccac

SEQ ID NO: 1818488 - DNA, 25 bp, Homo sapien
cttgaagtccctttctggtcgtcag

SEQ ID NO: 1818489 - DNA, 25 bp, Homo sapien
tgtaacttgaagtccctttctggtc

SEQ ID NO: 1818490 - DNA, 25 bp, Homo sapien
ggaagccagctgatcttgtcacacc

SEQ ID NO: 1818491 - DNA, 25 bp, Homo sapien
tctgtgaacattactgaacaccttg

SEQ ID NO: 1818492 - DNA, 25 bp, Homo sapien
catttgttgtgaacagaacactttc

SEQ ID NO: 1818493 - DNA, 25 bp, Homo sapien
cttgtcacacccaccatggcgaggg

SEQ ID NO: 1818494 - DNA, 25 bp, Homo sapien
gaacagaaaaaggaattgcatttac

SEQ ID NO: 1818495 - DNA, 25 bp, Homo sapien
ggaacagaaaaaggaattgcattta

SEQ ID NO: 1818496 - DNA, 25 bp, Homo sapien
taggaacagaaaaaggaattgcatt

SEQ ID NO: 1818497 - DNA, 25 bp, Homo sapien
cttaggaacagaaaaaggaattgca

SEQ ID NO: 1818498 - DNA, 25 bp, Homo sapien
ccactctctcttggggcctcgtagg

SEQ ID NO: 1818499 - DNA, 25 bp, Homo sapien
ttcctcagttttggacgatgaagct

SEQ ID NO: 1818500 - DNA, 25 bp, Homo sapien
tttggacgatgaagctctttcctca

SEQ ID NO: 1818501 - DNA, 25 bp, Homo sapien
tctcttggggcctcgtaggtctgtg

SEQ ID NO: 1818502 - DNA, 25 bp, Homo sapien
gaaaataccactggatacgcgcgcc

SEQ ID NO: 1818503 - DNA, 25 bp, Homo sapien
gaaatggtccatgtccagacgcaag

SEQ ID NO: 1818504 - DNA, 25 bp, Homo sapien
gacgcaagactggagtttctgccac

SEQ ID NO: 1818505 - DNA, 25 bp, Homo sapien
ttaggtacatactgggagcaaggct

SEQ ID NO: 1818506 - DNA, 25 bp, Homo sapien
ttctagcactacaaaaggcacaatg

SEQ ID NO: 1818507 - DNA, 25 bp, Homo sapien
ggcacaatgaagcttatttagttcc

SEQ ID NO: 1818508 - DNA, 25 bp, Homo sapien
tggaaatcagaggtaacagcacatc

SEQ ID NO: 1818509 - DNA, 25 bp, Homo sapien
acagcacatccttccttggacatgc

SEQ ID NO: 1818510 - DNA, 25 bp, Homo sapien
cattaacagcgtgtagtttttctct

SEQ ID NO: 1818511 - DNA, 25 bp, Homo sapien
attcatctgatagccatcttccctg

SEQ ID NO: 1818512 - DNA, 25 bp, Homo sapien
catttgtgcattcatctgatagcca

SEQ ID NO: 1818513 - DNA, 25 bp, Homo sapien
tcttccctgaaggacattgcattct

SEQ ID NO: 1818514 - DNA, 25 bp, Homo sapien
tttgcaaatgccttcagcctggtcc

SEQ ID NO: 1818515 - DNA, 25 bp, Homo sapien
tctgaaaagtgctatcagggaaaac

SEQ ID NO: 1818516 - DNA, 25 bp, Homo sapien
cagtaacaagtccttgagcacatgc

SEQ ID NO: 1818517 - DNA, 25 bp, Homo sapien
gagcacatgcctctcccgctgttaa

SEQ ID NO: 1818518 - DNA, 25 bp, Homo sapien
gagaagctgatgacctcaataggca

SEQ ID NO: 1818519 - DNA, 25 bp, Homo sapien
tatttctcagtaagggagaagctga

SEQ ID NO: 1818520 - DNA, 25 bp, Homo sapien
actgctttcaggaggcttagagaga

SEQ ID NO: 1818521 - DNA, 25 bp, Homo sapien
gcaagaagcaaggttaagatactaa

SEQ ID NO: 1818522 - DNA, 25 bp, Homo sapien
aaagtgtaagaggagcatccttccg

SEQ ID NO: 1818523 - DNA, 25 bp, Homo sapien
gactttggcctaggtgactaaatgg

SEQ ID NO: 1818524 - DNA, 25 bp, Homo sapien
gctgggctcattatcttcggaaaag

SEQ ID NO: 1818525 - DNA, 25 bp, Homo sapien
gactaaatggtgtatgaaatgttgc

SEQ ID NO: 1818526 - DNA, 25 bp, Homo sapien
atggttgtaccatttgacactgcca

SEQ ID NO: 1818527 - DNA, 25 bp, Homo sapien
gacactgccactagcaacgtatgaa

SEQ ID NO: 1818528 - DNA, 25 bp, Homo sapien
aatgccattggtgttgtttctagca

SEQ ID NO: 1818529 - DNA, 25 bp, Homo sapien
tctgacttctgagagtcaccatgct

SEQ ID NO: 1818530 - DNA, 25 bp, Homo sapien
gaacacttgtgtacaggtcactggg

SEQ ID NO: 1818531 - DNA, 25 bp, Homo sapien
tacctaagtggtatggctggtctgt

SEQ ID NO: 1818532 - DNA, 25 bp, Homo sapien
tcagataatgttaacaaaaaggcag

SEQ ID NO: 1818533 - DNA, 25 bp, Homo sapien
tatttagctcagaagctgctagact

SEQ ID NO: 1818534 - DNA, 25 bp, Homo sapien
tgagaaacctgccaacaacagctaa

SEQ ID NO: 1818535 - DNA, 25 bp, Homo sapien
ggtttaggctctggcgtcagactac

SEQ ID NO: 1818536 - DNA, 25 bp, Homo sapien
tcagactacttagggacgttgggaa

SEQ ID NO: 1818537 - DNA, 25 bp, Homo sapien
tacccagaagacacagcctaaggaa

SEQ ID NO: 1818538 - DNA, 25 bp, Homo sapien
ttttatcagaagacactatttgaca

SEQ ID NO: 1818539 - DNA, 25 bp, Homo sapien
tcttgaagccaataatggtaaatct

SEQ ID NO: 1818540 - DNA, 25 bp, Homo sapien
tcagaagacactatttgacaaataa

SEQ ID NO: 1818541 - DNA, 25 bp, Homo sapien
gaagccaataatggtaaatcttata

SEQ ID NO: 1818542 - DNA, 25 bp, Homo sapien
aaaaaccatatgctccctagaaggc

SEQ ID NO: 1818543 - DNA, 25 bp, Homo sapien
cctagaaggctgcaatcatcagcac

SEQ ID NO: 1818544 - DNA, 25 bp, Homo sapien
ttatatggtcctgtctatcagtggg

SEQ ID NO: 1818545 - DNA, 25 bp, Homo sapien
gaaatctcttcagtggtaaaaacca

SEQ ID NO: 1818546 - DNA, 25 bp, Homo sapien
cacagctggaccattgaccactgca

SEQ ID NO: 1818547 - DNA, 25 bp, Homo sapien
caaggagggtgacggagatgcccac

SEQ ID NO: 1818548 - DNA, 25 bp, Homo sapien
cctgtcagatgcatacacggcatcg

SEQ ID NO: 1818549 - DNA, 25 bp, Homo sapien
cggcatcgaatagcccaaggagggt

SEQ ID NO: 1818550 - DNA, 25 bp, Homo sapien
tccagggcatccgtctgaatggcag

SEQ ID NO: 1818551 - DNA, 25 bp, Homo sapien
tttgatgactaagaacgggccctct

SEQ ID NO: 1818552 - DNA, 25 bp, Homo sapien
cctgtgtttacaagactcctccgag

SEQ ID NO: 1818553 - DNA, 25 bp, Homo sapien
gagtctcctaccttcagcgttcatg

SEQ ID NO: 1818554 - DNA, 25 bp, Homo sapien
cattcccactactgtaatagtcacc

SEQ ID NO: 1818555 - DNA, 25 bp, Homo sapien
cagtgaagttagtcagatcattccc

SEQ ID NO: 1818556 - DNA, 25 bp, Homo sapien
caccagggggaatatcagtgaagtt

SEQ ID NO: 1818557 - DNA, 25 bp, Homo sapien
tcagtaaaacggcattatttttagc

SEQ ID NO: 1818558 - DNA, 25 bp, Homo sapien
tttcctatctattaagaggcccctc

SEQ ID NO: 1818559 - DNA, 25 bp, Homo sapien
cctatctattaagaggcccctcaaa

SEQ ID NO: 1818560 - DNA, 25 bp, Homo sapien
ggcctccaggtcttagagcttttta

SEQ ID NO: 1818561 - DNA, 25 bp, Homo sapien
cggcctccaggtcttagagcttttt

SEQ ID NO: 1818562 - DNA, 25 bp, Homo sapien
gtgcacgcataatttcatgatacat

SEQ ID NO: 1818563 - DNA, 25 bp, Homo sapien
ctgttaaaacagtgatgattgagtc

SEQ ID NO: 1818564 - DNA, 25 bp, Homo sapien
gctttaagtgcacgcataatttcat

SEQ ID NO: 1818565 - DNA, 25 bp, Homo sapien
gctggcagctttaagtgcacgcata

SEQ ID NO: 1818566 - DNA, 25 bp, Homo sapien
tagtcccagttgagcaccaagcatc

SEQ ID NO: 1818567 - DNA, 25 bp, Homo sapien
gacccaatggtcatagtcctctgaa

SEQ ID NO: 1818568 - DNA, 25 bp, Homo sapien
tgaagcagctactttaaagcggagc

SEQ ID NO: 1818569 - DNA, 25 bp, Homo sapien
gatacttctgggagcagtctacacc

SEQ ID NO: 1818570 - DNA, 25 bp, Homo sapien
caatgaatgctcaactctgttgtat

SEQ ID NO: 1818571 - DNA, 25 bp, Homo sapien
ctcaactctgttgtatgaagtagcc

SEQ ID NO: 1818572 - DNA, 25 bp, Homo sapien
gaatgctcaactctgttgtatgaag

SEQ ID NO: 1818573 - DNA, 25 bp, Homo sapien
tgctcaactctgttgtatgaagtag

SEQ ID NO: 1818574 - DNA, 25 bp, Homo sapien
agtgtttatggcatttttctttttg

SEQ ID NO: 1818575 - DNA, 25 bp, Homo sapien
tcagtgtttatggcatttttctttt

SEQ ID NO: 1818576 - DNA, 25 bp, Homo sapien
cagtgtttatggcatttttcttttt

SEQ ID NO: 1818577 - DNA, 25 bp, Homo sapien
ctcagtgtttatggcatttttcttt

SEQ ID NO: 1818578 - DNA, 25 bp, Homo sapien
cacctgactagaggattccaatgaa

SEQ ID NO: 1818579 - DNA, 25 bp, Homo sapien
aggctccacctgactagaggattcc

SEQ ID NO: 1818580 - DNA, 25 bp, Homo sapien
actggacaccaaatccacatagttc

SEQ ID NO: 1818581 - DNA, 25 bp, Homo sapien
tgaaggactcaaactggacaccaaa

SEQ ID NO: 1818582 - DNA, 25 bp, Homo sapien
ctgaacggacgatgacaaacaacct

SEQ ID NO: 1818583 - DNA, 25 bp, Homo sapien
tgaacggacgatgacaaacaacctc

SEQ ID NO: 1818584 - DNA, 25 bp, Homo sapien
ggccttgttgatcaagtcaaataca

SEQ ID NO: 1818585 - DNA, 25 bp, Homo sapien
tttgggcatgttacaaggtccttca

SEQ ID NO: 1818586 - DNA, 25 bp, Homo sapien
caagtcaaatacacctggtttgggc

SEQ ID NO: 1818587 - DNA, 25 bp, Homo sapien
aagggcattccatgcgtcccatttg

SEQ ID NO: 1818588 - DNA, 25 bp, Homo sapien
tagagttttagcttcacttcgtttc

SEQ ID NO: 1818589 - DNA, 25 bp, Homo sapien
ctgcttatatagcgcgtagagtttt

SEQ ID NO: 1818590 - DNA, 25 bp, Homo sapien
tagcgcgtagagttttagcttcact

SEQ ID NO: 1818591 - DNA, 25 bp, Homo sapien
gattcattgaattttcaaagtcctt

SEQ ID NO: 1818592 - DNA, 25 bp, Homo sapien
gtgcagctgaactaccgggaaacta

SEQ ID NO: 1818593 - DNA, 25 bp, Homo sapien
cagctgaactaccgggaaactagtg

SEQ ID NO: 1818594 - DNA, 25 bp, Homo sapien
tgcagctgaactaccgggaaactag

SEQ ID NO: 1818595 - DNA, 25 bp, Homo sapien
gctgaactaccgggaaactagtgac

SEQ ID NO: 1818596 - DNA, 25 bp, Homo sapien
tgcgcggaggcaggcggagaccttg

SEQ ID NO: 1818597 - DNA, 25 bp, Homo sapien
tcgcttttagcaagcgacgctttgc

SEQ ID NO: 1818598 - DNA, 25 bp, Homo sapien
tgctgacagggaaccatagccctga

SEQ ID NO: 1818599 - DNA, 25 bp, Homo sapien
ccccaggaggatgggagcgtgcgcg

SEQ ID NO: 1818600 - DNA, 25 bp, Homo sapien
cactccgggcccagcggtgcaggag

SEQ ID NO: 1818601 - DNA, 25 bp, Homo sapien
ggcgcgcgtgaggtcgtcacttttt

SEQ ID NO: 1818602 - DNA, 25 bp, Homo sapien
gcgtgaggtcgtcactttttagcac

SEQ ID NO: 1818603 - DNA, 25 bp, Homo sapien
cgcgcgtgaggtcgtcactttttag

SEQ ID NO: 1818604 - DNA, 25 bp, Homo sapien
gacaatagggaaggagggtcttcca

SEQ ID NO: 1818605 - DNA, 25 bp, Homo sapien
gcgaccttcgcctggacagcggtat

SEQ ID NO: 1818606 - DNA, 25 bp, Homo sapien
aaagcaaaatcctgttgccacctag

SEQ ID NO: 1818607 - DNA, 25 bp, Homo sapien
aacggcggcgaccttcgcctggaca

SEQ ID NO: 1818608 - DNA, 25 bp, Homo sapien
cgggcgaccatgggccgaacggccg

SEQ ID NO: 1818609 - DNA, 25 bp, Homo sapien
catgggccgaacggccgggactcca

SEQ ID NO: 1818610 - DNA, 25 bp, Homo sapien
gcgaccatgggccgaacggccggga

SEQ ID NO: 1818611 - DNA, 25 bp, Homo sapien
ctgcgggcgaccatgggccgaacgg

SEQ ID NO: 1818612 - DNA, 25 bp, Homo sapien
gaacgccgcgccagtctccaagcca

SEQ ID NO: 1818613 - DNA, 25 bp, Homo sapien
gcgccagtctccaagccaagtacgc

SEQ ID NO: 1818614 - DNA, 25 bp, Homo sapien
gccgcgccagtctccaagccaagta

SEQ ID NO: 1818615 - DNA, 25 bp, Homo sapien
ctcggacacgaacgccgcgccagtc

SEQ ID NO: 1818616 - DNA, 25 bp, Homo sapien
ctagggctgcgggggctcgggggtg

SEQ ID NO: 1818617 - DNA, 25 bp, Homo sapien
ctgccggagcactgagcgccctgcc

SEQ ID NO: 1818618 - DNA, 25 bp, Homo sapien
gagcactgagcgccctgcccggagt

SEQ ID NO: 1818619 - DNA, 25 bp, Homo sapien
aggggtcgctgcatcccgagggcca

SEQ ID NO: 1818620 - DNA, 25 bp, Homo sapien
ggggtcgctgcatcccgagggccag

SEQ ID NO: 1818621 - DNA, 25 bp, Homo sapien
tgaagatacaattggcatgcccagc

SEQ ID NO: 1818622 - DNA, 25 bp, Homo sapien
gcccagctatccagttctcagtgaa

SEQ ID NO: 1818623 - DNA, 25 bp, Homo sapien
tggactccagatatatcttcagggt

SEQ ID NO: 1818624 - DNA, 25 bp, Homo sapien
tttggattccgtgctgagagcaagc

SEQ ID NO: 1818625 - DNA, 25 bp, Homo sapien
cacttcatgatggtcgctgagtatg

SEQ ID NO: 1818626 - DNA, 25 bp, Homo sapien
tcacttcatgatggtcgctgagtat

SEQ ID NO: 1818627 - DNA, 25 bp, Homo sapien
tctctagagttctcaagctctcctg

SEQ ID NO: 1818628 - DNA, 25 bp, Homo sapien
gcttctctagagttctcaagctctc

SEQ ID NO: 1818629 - DNA, 25 bp, Homo sapien
agctctcctgtgagcaccaggttga

SEQ ID NO: 1818630 - DNA, 25 bp, Homo sapien
ctagagttctcaagctctcctgtga

SEQ ID NO: 1818631 - DNA, 25 bp, Homo sapien
tgtcattgaaatgggtgccgtcagg

SEQ ID NO: 1818632 - DNA, 25 bp, Homo sapien
tcttcacagctcacggatagaggaa

SEQ ID NO: 1818633 - DNA, 25 bp, Homo sapien
cacatttcccaggaggagtttggca

SEQ ID NO: 1818634 - DNA, 25 bp, Homo sapien
tgtgtgcctgtgaatatgaagtcca

SEQ ID NO: 1818635 - DNA, 25 bp, Homo sapien
gttccatcttgcctgagttcgtcag

SEQ ID NO: 1818636 - DNA, 25 bp, Homo sapien
gatcccttgatttgccgtgactcct

SEQ ID NO: 1818637 - DNA, 25 bp, Homo sapien
gattctttcaaatgtggttccatct

SEQ ID NO: 1818638 - DNA, 25 bp, Homo sapien
tgctagccagatcccttgatttgcc

SEQ ID NO: 1818639 - DNA, 25 bp, Homo sapien
gatttgatcgctggtgtctgagagc

SEQ ID NO: 1818640 - DNA, 25 bp, Homo sapien
tctcaaagtccctttgggtgcttct

SEQ ID NO: 1818641 - DNA, 25 bp, Homo sapien
tctgagagctgtgaacgtcttgatg

SEQ ID NO: 1818642 - DNA, 25 bp, Homo sapien
cactgacagcgtgattctgatttga

SEQ ID NO: 1818643 - DNA, 25 bp, Homo sapien
ttcacccagatggaagcatgtggcc

SEQ ID NO: 1818644 - DNA, 25 bp, Homo sapien
tatctgattccagtacacggccaag

SEQ ID NO: 1818645 - DNA, 25 bp, Homo sapien
caaagttcaacaaaggcagcggtcc

SEQ ID NO: 1818646 - DNA, 25 bp, Homo sapien
tctcgggctagagcgcaaatgcagg

SEQ ID NO: 1818647 - DNA, 25 bp, Homo sapien
ggaagtacaatggactgtttcaacc

SEQ ID NO: 1818648 - DNA, 25 bp, Homo sapien
tggaagtacaatggactgtttcaac

SEQ ID NO: 1818649 - DNA, 25 bp, Homo sapien
agtacaatggactgtttcaaccaaa

SEQ ID NO: 1818650 - DNA, 25 bp, Homo sapien
ccacttgctgttgcctattgggtgc

SEQ ID NO: 1818651 - DNA, 25 bp, Homo sapien
gtactcctgtttgatccacttgctg

SEQ ID NO: 1818652 - DNA, 25 bp, Homo sapien
tataatcatcccagtgaccagcttc

SEQ ID NO: 1818653 - DNA, 25 bp, Homo sapien
ccctaatgtgctcagttgcttggta

SEQ ID NO: 1818654 - DNA, 25 bp, Homo sapien
catgagtcaggagtctgagcacagc

SEQ ID NO: 1818655 - DNA, 25 bp, Homo sapien
tgagaggacttcagccgctgcaggt

SEQ ID NO: 1818656 - DNA, 25 bp, Homo sapien
gaattcagttccgtcatatcttagg

SEQ ID NO: 1818657 - DNA, 25 bp, Homo sapien
ccagtatgcattctcgtgtggcgca

SEQ ID NO: 1818658 - DNA, 25 bp, Homo sapien
gccttgtcggctgctgctaaggaca

SEQ ID NO: 1818659 - DNA, 25 bp, Homo sapien
tggagtagaggtagtcaggagcagc

SEQ ID NO: 1818660 - DNA, 25 bp, Homo sapien
cccctaagcctagcgtggagtagag

SEQ ID NO: 1818661 - DNA, 25 bp, Homo sapien
gctaaggacaacaattgccaatgct

SEQ ID NO: 1818662 - DNA, 25 bp, Homo sapien
tgcctgccagcaaatgattgaggga

SEQ ID NO: 1818663 - DNA, 25 bp, Homo sapien
gattgagggagttgctgagcgtcgc

SEQ ID NO: 1818664 - DNA, 25 bp, Homo sapien
agcccgcgaggcacatgcgcagtgc

SEQ ID NO: 1818665 - DNA, 25 bp, Homo sapien
gcgcagtgcaggaccccgccatttt

SEQ ID NO: 1818666 - DNA, 25 bp, Homo sapien
taggcagaccacgtatgagtagagg

SEQ ID NO: 1818667 - DNA, 25 bp, Homo sapien
aaaaccgggttgaatgtctctactg

SEQ ID NO: 1818668 - DNA, 25 bp, Homo sapien
tggattgggccttcgacctgaccaa

SEQ ID NO: 1818669 - DNA, 25 bp, Homo sapien
tcaggaaatctgatcaaaaccgggt

SEQ ID NO: 1818670 - DNA, 25 bp, Homo sapien
tggtgctgatagctctctgagggta

SEQ ID NO: 1818671 - DNA, 25 bp, Homo sapien
ttagtctccagggtagaataacatc

SEQ ID NO: 1818672 - DNA, 25 bp, Homo sapien
tcactcatctcttggtgctgatagc

SEQ ID NO: 1818673 - DNA, 25 bp, Homo sapien
tctccagggtagaataacatcaggg

SEQ ID NO: 1818674 - DNA, 25 bp, Homo sapien
taaacactcggtagtcgctcaggta

SEQ ID NO: 1818675 - DNA, 25 bp, Homo sapien
gataaacactcggtagtcgctcagg

SEQ ID NO: 1818676 - DNA, 25 bp, Homo sapien
acactcggtagtcgctcaggtaatt

SEQ ID NO: 1818677 - DNA, 25 bp, Homo sapien
tgggtgataaacactcggtagtcgc

SEQ ID NO: 1818678 - DNA, 25 bp, Homo sapien
gagcacctctgcaggccattgacag

SEQ ID NO: 1818679 - DNA, 25 bp, Homo sapien
acctctgcaggccattgacagatcc

SEQ ID NO: 1818680 - DNA, 25 bp, Homo sapien
gcacctctgcaggccattgacagat

SEQ ID NO: 1818681 - DNA, 25 bp, Homo sapien
ctgagcacctctgcaggccattgac

SEQ ID NO: 1818682 - DNA, 25 bp, Homo sapien
ggtgccacaagcagtatctctgcaa

SEQ ID NO: 1818683 - DNA, 25 bp, Homo sapien
gtgccacaagcagtatctctgcaac

SEQ ID NO: 1818684 - DNA, 25 bp, Homo sapien
tatggtcaaattctgtagatcctgt

SEQ ID NO: 1818685 - DNA, 25 bp, Homo sapien
gatttcttgggtccatcagatgcca

SEQ ID NO: 1818686 - DNA, 25 bp, Homo sapien
ttgggctgtgctaatcccttccagt

SEQ ID NO: 1818687 - DNA, 25 bp, Homo sapien
gttgcctgcggagcttttcaagtga

SEQ ID NO: 1818688 - DNA, 25 bp, Homo sapien
tgctcttctctaagttgcctgcgga

SEQ ID NO: 1818689 - DNA, 25 bp, Homo sapien
aggtaatgatgccacacagaacttg

SEQ ID NO: 1818690 - DNA, 25 bp, Homo sapien
tagctgcccgggtttgttatgcacc

SEQ ID NO: 1818691 - DNA, 25 bp, Homo sapien
tgatgccacacagaacttgtagctg

SEQ ID NO: 1818692 - DNA, 25 bp, Homo sapien
cacagaacttgtagctgcccgggtt

SEQ ID NO: 1818693 - DNA, 25 bp, Homo sapien
ctagatcttagccaaaaggctgaga

SEQ ID NO: 1818694 - DNA, 25 bp, Homo sapien
acaaatattaaactgataagaacag

SEQ ID NO: 1818695 - DNA, 25 bp, Homo sapien
ataagaacagatactacactagatc

SEQ ID NO: 1818696 - DNA, 25 bp, Homo sapien
acactagatcttagccaaaaggctg

SEQ ID NO: 1818697 - DNA, 25 bp, Homo sapien
cctgtactcctttaatgacattagt

SEQ ID NO: 1818698 - DNA, 25 bp, Homo sapien
cattagtaatagtgaaggcaaagag

SEQ ID NO: 1818699 - DNA, 25 bp, Homo sapien
ctgaccagtttaaggaaagttctga

SEQ ID NO: 1818700 - DNA, 25 bp, Homo sapien
gaatgttctgaactttgtactcctt

SEQ ID NO: 1818701 - DNA, 25 bp, Homo sapien
aaggcaaagcaagcaccttcctcac

SEQ ID NO: 1818702 - DNA, 25 bp, Homo sapien
agaaggcaaagcaagcaccttcctc

SEQ ID NO: 1818703 - DNA, 25 bp, Homo sapien
cggcagaaggcaaagcaagcacctt

SEQ ID NO: 1818704 - DNA, 25 bp, Homo sapien
gcaaagcaagcaccttcctcacaag

SEQ ID NO: 1818705 - DNA, 25 bp, Homo sapien
gctagcctctgagaactcagatgaa

SEQ ID NO: 1818706 - DNA, 25 bp, Homo sapien
tgagaactcagatgaatcaggtata

SEQ ID NO: 1818707 - DNA, 25 bp, Homo sapien
cagatgaatcaggtataaattcagc

SEQ ID NO: 1818708 - DNA, 25 bp, Homo sapien
tgaatcaggtataaattcagccttg

SEQ ID NO: 1818709 - DNA, 25 bp, Homo sapien
atgtccccagggcatcaacttgcac

SEQ ID NO: 1818710 - DNA, 25 bp, Homo sapien
tgtccccagggcatcaacttgcact

SEQ ID NO: 1818711 - DNA, 25 bp, Homo sapien
tccccagggcatcaacttgcactag

SEQ ID NO: 1818712 - DNA, 25 bp, Homo sapien
ccccagggcatcaacttgcactagc

SEQ ID NO: 1818713 - DNA, 25 bp, Homo sapien
tgctgtgcctccgggcgtcatgtgt

SEQ ID NO: 1818714 - DNA, 25 bp, Homo sapien
gtgtgcagtttagccaagaagaaag

SEQ ID NO: 1818715 - DNA, 25 bp, Homo sapien
cctccgggcgtcatgtgtgcagttt

SEQ ID NO: 1818716 - DNA, 25 bp, Homo sapien
catgtgtgcagtttagccaagaaga

SEQ ID NO: 1818717 - DNA, 25 bp, Homo sapien
tcataggctcaagtgggtgatgttt

SEQ ID NO: 1818718 - DNA, 25 bp, Homo sapien
ataggctcaagtgggtgatgtttgt

SEQ ID NO: 1818719 - DNA, 25 bp, Homo sapien
cataggctcaagtgggtgatgtttg

SEQ ID NO: 1818720 - DNA, 25 bp, Homo sapien
agccccacagggatcctgtctgtct

SEQ ID NO: 1818721 - DNA, 25 bp, Homo sapien
tgagccccacagggatcctgtctgt

SEQ ID NO: 1818722 - DNA, 25 bp, Homo sapien
ttccctcctgagcacgtgagcccca

SEQ ID NO: 1818723 - DNA, 25 bp, Homo sapien
gagccccacagggatcctgtctgtc

SEQ ID NO: 1818724 - DNA, 25 bp, Homo sapien
ttccaccccagcatgcgtctgaccc

SEQ ID NO: 1818725 - DNA, 25 bp, Homo sapien
ccaccccagcatgcgtctgacccat

SEQ ID NO: 1818726 - DNA, 25 bp, Homo sapien
tccaccccagcatgcgtctgaccca

SEQ ID NO: 1818727 - DNA, 25 bp, Homo sapien
cttccaccccagcatgcgtctgacc

SEQ ID NO: 1818728 - DNA, 25 bp, Homo sapien
gaacatcactgaagggggagactcc

SEQ ID NO: 1818729 - DNA, 25 bp, Homo sapien
ctattgaacatcactgaagggggag

SEQ ID NO: 1818730 - DNA, 25 bp, Homo sapien
ttgaacatcactgaagggggagact

SEQ ID NO: 1818731 - DNA, 25 bp, Homo sapien
tattgaacatcactgaagggggaga

SEQ ID NO: 1818732 - DNA, 25 bp, Homo sapien
tgctcctagtcaacgctaggtgagg

SEQ ID NO: 1818733 - DNA, 25 bp, Homo sapien
cagccagaaggaggcctgaatccac

SEQ ID NO: 1818734 - DNA, 25 bp, Homo sapien
aacgctaggtgaggctccccagcca

SEQ ID NO: 1818735 - DNA, 25 bp, Homo sapien
tccatggtatccttgctcctagtca

SEQ ID NO: 1818736 - DNA, 25 bp, Homo sapien
cagacacggctctgcgtaattgcgc

SEQ ID NO: 1818737 - DNA, 25 bp, Homo sapien
caggcagtctgacgaagctgttccc

SEQ ID NO: 1818738 - DNA, 25 bp, Homo sapien
caagcgcggtgatatggctcatcct

SEQ ID NO: 1818739 - DNA, 25 bp, Homo sapien
gtaattgcgctctgcggtccacctg

SEQ ID NO: 1818740 - DNA, 25 bp, Homo sapien
gctgctcagccagactcacatcact

SEQ ID NO: 1818741 - DNA, 25 bp, Homo sapien
gtgctgctcagccagactcacatca

SEQ ID NO: 1818742 - DNA, 25 bp, Homo sapien
ttaggatgtcaggggatgtggtctt

SEQ ID NO: 1818743 - DNA, 25 bp, Homo sapien
taggatgtcaggggatgtggtcttg

SEQ ID NO: 1818744 - DNA, 25 bp, Homo sapien
tgaatgatatagcctgctttggggg

SEQ ID NO: 1818745 - DNA, 25 bp, Homo sapien
ctgaatgatatagcctgctttgggg

SEQ ID NO: 1818746 - DNA, 25 bp, Homo sapien
gccttttgaagcttcggggcaccca

SEQ ID NO: 1818747 - DNA, 25 bp, Homo sapien
atcactgtagccttttgaagcttcg

SEQ ID NO: 1818748 - DNA, 25 bp, Homo sapien
gtagccttttgaagcttcggggcac

SEQ ID NO: 1818749 - DNA, 25 bp, Homo sapien
cactgtagccttttgaagcttcggg

SEQ ID NO: 1818750 - DNA, 25 bp, Homo sapien
tccgaagtgggctccctaactctag

SEQ ID NO: 1818751 - DNA, 25 bp, Homo sapien
actgtgccagtagcctccgaagtgg

SEQ ID NO: 1818752 - DNA, 25 bp, Homo sapien
tgggctccctaactctagtctcctg

SEQ ID NO: 1818753 - DNA, 25 bp, Homo sapien
gtagcctccgaagtgggctccctaa

SEQ ID NO: 1818754 - DNA, 25 bp, Homo sapien
caggagcgagatcccaacaagggtc

SEQ ID NO: 1818755 - DNA, 25 bp, Homo sapien
gatgactgagtcatggtcctgccct

SEQ ID NO: 1818756 - DNA, 25 bp, Homo sapien
gcgtatcaacgccaggtgtgcactt

SEQ ID NO: 1818757 - DNA, 25 bp, Homo sapien
cagtctcttcctacaggtgcatggg

SEQ ID NO: 1818758 - DNA, 25 bp, Homo sapien
ctgcttccgtgtcctcccaacatgg

SEQ ID NO: 1818759 - DNA, 25 bp, Homo sapien
agaactgcttccgtgtcctcccaac

SEQ ID NO: 1818760 - DNA, 25 bp, Homo sapien
tctccctagaactgcttccgtgtcc

SEQ ID NO: 1818761 - DNA, 25 bp, Homo sapien
ctcctctccctagaactgcttccgt

SEQ ID NO: 1818762 - DNA, 25 bp, Homo sapien
cactgataatgtcaaagctgcttcc

SEQ ID NO: 1818763 - DNA, 25 bp, Homo sapien
tattacataggcatcagatgatcct

SEQ ID NO: 1818764 - DNA, 25 bp, Homo sapien
ctgcactggtgggttccactgataa

SEQ ID NO: 1818765 - DNA, 25 bp, Homo sapien
ccttggtgaagcagtctgcactggt

SEQ ID NO: 1818766 - DNA, 25 bp, Homo sapien
tgttgcacctcagccatggaattcc

SEQ ID NO: 1818767 - DNA, 25 bp, Homo sapien
ctgttgcacctcagccatggaattc

SEQ ID NO: 1818768 - DNA, 25 bp, Homo sapien
gttgcacctcagccatggaattcca

SEQ ID NO: 1818769 - DNA, 25 bp, Homo sapien
ttgcacctcagccatggaattccag

SEQ ID NO: 1818770 - DNA, 25 bp, Homo sapien
ggcttcctcgaggttgcacatgagc

SEQ ID NO: 1818771 - DNA, 25 bp, Homo sapien
tcgaggttgcacatgagcatgggct

SEQ ID NO: 1818772 - DNA, 25 bp, Homo sapien
tcctcgaggttgcacatgagcatgg

SEQ ID NO: 1818773 - DNA, 25 bp, Homo sapien
cagagagcgacaaagagcacattcc

SEQ ID NO: 1818774 - DNA, 25 bp, Homo sapien
accataagcactggctctgattttc

SEQ ID NO: 1818775 - DNA, 25 bp, Homo sapien
aaccataagcactggctctgatttt

SEQ ID NO: 1818776 - DNA, 25 bp, Homo sapien
cgtgagtcactagccatgggaattt

SEQ ID NO: 1818777 - DNA, 25 bp, Homo sapien
aatttcaggcatctgcgtgtgtgcg

SEQ ID NO: 1818778 - DNA, 25 bp, Homo sapien
gttatatcgagaggcctggcagcgc

SEQ ID NO: 1818779 - DNA, 25 bp, Homo sapien
tagagctgaaatgtcgcagaggcac

SEQ ID NO: 1818780 - DNA, 25 bp, Homo sapien
tgttggtcctgggacagagcccaca

SEQ ID NO: 1818781 - DNA, 25 bp, Homo sapien
tcttggcacctgtcctgttggtcct

SEQ ID NO: 1818782 - DNA, 25 bp, Homo sapien
caagtgcagggcctggcgaaggcct

SEQ ID NO: 1818783 - DNA, 25 bp, Homo sapien
gggcctggcgaaggcctgccctctt

SEQ ID NO: 1818784 - DNA, 25 bp, Homo sapien
tccaatactccagccttgttgtaca

SEQ ID NO: 1818785 - DNA, 25 bp, Homo sapien
tcggggcttacaccatcgcagggca

SEQ ID NO: 1818786 - DNA, 25 bp, Homo sapien
ctccagccttgttgtacaagtcggg

SEQ ID NO: 1818787 - DNA, 25 bp, Homo sapien
tacaagtcggggcttacaccatcgc

SEQ ID NO: 1818788 - DNA, 25 bp, Homo sapien
cccaggcctgagttccaggggctgt

SEQ ID NO: 1818789 - DNA, 25 bp, Homo sapien
tcagaagtcgatcccaggcctgagt

SEQ ID NO: 1818790 - DNA, 25 bp, Homo sapien
gggctgtggtccacaaagggtcaag

SEQ ID NO: 1818791 - DNA, 25 bp, Homo sapien
ctgtggtccacaaagggtcaaggag

SEQ ID NO: 1818792 - DNA, 25 bp, Homo sapien
ctatttgtagctgctccgtttccaa

SEQ ID NO: 1818793 - DNA, 25 bp, Homo sapien
tctgtatgtcatatggtggctggga

SEQ ID NO: 1818794 - DNA, 25 bp, Homo sapien
tcctccgtcaaactcagaggctttg

SEQ ID NO: 1818795 - DNA, 25 bp, Homo sapien
gtttccaaccagagacgcctgccag

SEQ ID NO: 1818796 - DNA, 25 bp, Homo sapien
catgggtgtcacgtggagggagcaa

SEQ ID NO: 1818797 - DNA, 25 bp, Homo sapien
ctgcatgggtgtcacgtggagggag

SEQ ID NO: 1818798 - DNA, 25 bp, Homo sapien
aggactccacacgtcctgtaagcat

SEQ ID NO: 1818799 - DNA, 25 bp, Homo sapien
ccaaggactccacacgtcctgtaag

SEQ ID NO: 1818800 - DNA, 25 bp, Homo sapien
tctggctgtcatgtgctgcgctggg

SEQ ID NO: 1818801 - DNA, 25 bp, Homo sapien
cactcgggccctactgaccttctga

SEQ ID NO: 1818802 - DNA, 25 bp, Homo sapien
tgccttgagggatcccatactcttc

SEQ ID NO: 1818803 - DNA, 25 bp, Homo sapien
ttctgaggagccatgacaccttgct

SEQ ID NO: 1818804 - DNA, 25 bp, Homo sapien
caggaccttgacaggatgtgcatgt

SEQ ID NO: 1818805 - DNA, 25 bp, Homo sapien
gaatttctcaatgactctgggccat

SEQ ID NO: 1818806 - DNA, 25 bp, Homo sapien
agtgaatttctcaatgactctgggc

SEQ ID NO: 1818807 - DNA, 25 bp, Homo sapien
ccttgacaggatgtgcatgtccctg

SEQ ID NO: 1818808 - DNA, 25 bp, Homo sapien
ctttgtacttctggaactaaagcag

SEQ ID NO: 1818809 - DNA, 25 bp, Homo sapien
tgaaactttgtacttctggaactaa

SEQ ID NO: 1818810 - DNA, 25 bp, Homo sapien
ttctggaactaaagcagttaccacg

SEQ ID NO: 1818811 - DNA, 25 bp, Homo sapien
aagcagttaccacggtgctgggcat

SEQ ID NO: 1818812 - DNA, 25 bp, Homo sapien
caggaattttcctgacagattcttc

SEQ ID NO: 1818813 - DNA, 25 bp, Homo sapien
tcccaggaattttcctgacagattc

SEQ ID NO: 1818814 - DNA, 25 bp, Homo sapien
cctctcccaggaattttcctgacag

SEQ ID NO: 1818815 - DNA, 25 bp, Homo sapien
ttcctgacagattcttccctttgtc

SEQ ID NO: 1818816 - DNA, 25 bp, Homo sapien
gtccactggccgcttcttcagaggg

SEQ ID NO: 1818817 - DNA, 25 bp, Homo sapien
agcttgtccactggccgcttcttca

SEQ ID NO: 1818818 - DNA, 25 bp, Homo sapien
tgtcttcagcttgtccactggccgc

SEQ ID NO: 1818819 - DNA, 25 bp, Homo sapien
tggccgcttcttcagagggctccct

SEQ ID NO: 1818820 - DNA, 25 bp, Homo sapien
acaccaactctccaataattgcagt

SEQ ID NO: 1818821 - DNA, 25 bp, Homo sapien
gacaccaactctccaataattgcag

SEQ ID NO: 1818822 - DNA, 25 bp, Homo sapien
accaactctccaataattgcagtgt

SEQ ID NO: 1818823 - DNA, 25 bp, Homo sapien
caccaactctccaataattgcagtg

SEQ ID NO: 1818824 - DNA, 25 bp, Homo sapien
ctagtgtgcagttggccatcactcc

SEQ ID NO: 1818825 - DNA, 25 bp, Homo sapien
caaactctagtgtgcagttggccat

SEQ ID NO: 1818826 - DNA, 25 bp, Homo sapien
actctagtgtgcagttggccatcac

SEQ ID NO: 1818827 - DNA, 25 bp, Homo sapien
gccaaactctagtgtgcagttggcc

SEQ ID NO: 1818828 - DNA, 25 bp, Homo sapien
ctcggttacagggaacatctgggat

SEQ ID NO: 1818829 - DNA, 25 bp, Homo sapien
cctgtgtgcaaaaggccagcggctg

SEQ ID NO: 1818830 - DNA, 25 bp, Homo sapien
cagatcctgccccattagggaaggg

SEQ ID NO: 1818831 - DNA, 25 bp, Homo sapien
caaagtacagctccagtgaggccct

SEQ ID NO: 1818832 - DNA, 25 bp, Homo sapien
ggtgcaacatgcccagcaaactttt

SEQ ID NO: 1818833 - DNA, 25 bp, Homo sapien
caggtgcaacatgcccagcaaactt

SEQ ID NO: 1818834 - DNA, 25 bp, Homo sapien
gcaacatgcccagcaaacttttgta

SEQ ID NO: 1818835 - DNA, 25 bp, Homo sapien
gtgcaacatgcccagcaaacttttg

SEQ ID NO: 1818836 - DNA, 25 bp, Homo sapien
caggtttccataaaggtcccacgat

SEQ ID NO: 1818837 - DNA, 25 bp, Homo sapien
caaagagtagtggaaagcctgccct

SEQ ID NO: 1818838 - DNA, 25 bp, Homo sapien
caagggttccagttgagactcatcc

SEQ ID NO: 1818839 - DNA, 25 bp, Homo sapien
cctttagattggaacagtgagccca

SEQ ID NO: 1818840 - DNA, 25 bp, Homo sapien
tagttcagcatacgtccaggaagga

SEQ ID NO: 1818841 - DNA, 25 bp, Homo sapien
ccaaaggcagtttcataactaattt

SEQ ID NO: 1818842 - DNA, 25 bp, Homo sapien
gaaaccagtgaagccaggagtgctg

SEQ ID NO: 1818843 - DNA, 25 bp, Homo sapien
gtcagactcttgtagtctccagcta

SEQ ID NO: 1818844 - DNA, 25 bp, Homo sapien
ggataactcgtacagccctaggctg

SEQ ID NO: 1818845 - DNA, 25 bp, Homo sapien
agcctgaggataactcgtacagccc

SEQ ID NO: 1818846 - DNA, 25 bp, Homo sapien
taggctgtgtctaccactggcttgg

SEQ ID NO: 1818847 - DNA, 25 bp, Homo sapien
tgaggaccttgacagtcaagagagc

SEQ ID NO: 1818848 - DNA, 25 bp, Homo sapien
tctgcgtgtctatgcaagagtgagc

SEQ ID NO: 1818849 - DNA, 25 bp, Homo sapien
tgaatccagtcatgctctttgcctc

SEQ ID NO: 1818850 - DNA, 25 bp, Homo sapien
actgaatgcactacagcagtactgc

SEQ ID NO: 1818851 - DNA, 25 bp, Homo sapien
cctcctcaatggttttagccttgtg

SEQ ID NO: 1818852 - DNA, 25 bp, Homo sapien
gaggactgatcagttgatcgtctcc

SEQ ID NO: 1818853 - DNA, 25 bp, Homo sapien
gatcagttgatcgtctcccttgcat

SEQ ID NO: 1818854 - DNA, 25 bp, Homo sapien
gactgatcagttgatcgtctccctt

SEQ ID NO: 1818855 - DNA, 25 bp, Homo sapien
agtctgaggactgatcagttgatcg

SEQ ID NO: 1818856 - DNA, 25 bp, Homo sapien
ggcacctggcggtagtcagagcatt

SEQ ID NO: 1818857 - DNA, 25 bp, Homo sapien
aggagaagaccaggtaccaggcatc

SEQ ID NO: 1818858 - DNA, 25 bp, Homo sapien
agaccaggtaccaggcatccagatg

SEQ ID NO: 1818859 - DNA, 25 bp, Homo sapien
cctggcggtagtcagagcattgctg

SEQ ID NO: 1818860 - DNA, 25 bp, Homo sapien
ctaccattttgagggcggttgcggc

SEQ ID NO: 1818861 - DNA, 25 bp, Homo sapien
ttggacttcaatgcgacttagtgat

SEQ ID NO: 1818862 - DNA, 25 bp, Homo sapien
aagccccatgggctaccattttgag

SEQ ID NO: 1818863 - DNA, 25 bp, Homo sapien
tagtgattgacacaagccccatggg

SEQ ID NO: 1818864 - DNA, 25 bp, Homo sapien
ttttccgagtttctgttggatcctc

SEQ ID NO: 1818865 - DNA, 25 bp, Homo sapien
tggttttccgagtttctgttggatc

SEQ ID NO: 1818866 - DNA, 25 bp, Homo sapien
tttccgagtttctgttggatcctca

SEQ ID NO: 1818867 - DNA, 25 bp, Homo sapien
tttctgtgattagggtatggcagca

SEQ ID NO: 1818868 - DNA, 25 bp, Homo sapien
tccttcgcatgagtcctttctgtga

SEQ ID NO: 1818869 - DNA, 25 bp, Homo sapien
ggatgtcttctagagtctccattcc

SEQ ID NO: 1818870 - DNA, 25 bp, Homo sapien
gggtatggcagcaacaaccaagatg

SEQ ID NO: 1818871 - DNA, 25 bp, Homo sapien
cactgaagggacagccgaacagagg

SEQ ID NO: 1818872 - DNA, 25 bp, Homo sapien
aaatggaagtagagccgtggggact

SEQ ID NO: 1818873 - DNA, 25 bp, Homo sapien
aagggacagccgaacagagggaaat

SEQ ID NO: 1818874 - DNA, 25 bp, Homo sapien
ctccactgaagggacagccgaacag

SEQ ID NO: 1818875 - DNA, 25 bp, Homo sapien
cctggcacagcatagcctcggtaag

SEQ ID NO: 1818876 - DNA, 25 bp, Homo sapien
gaatatccagctcaatgtctagaca

SEQ ID NO: 1818877 - DNA, 25 bp, Homo sapien
cagagtttggcataggataagtcct

SEQ ID NO: 1818878 - DNA, 25 bp, Homo sapien
gaacctgttatgtgtgagggctctc

SEQ ID NO: 1818879 - DNA, 25 bp, Homo sapien
gctgcagggaagatctcgatatcat

SEQ ID NO: 1818880 - DNA, 25 bp, Homo sapien
tggcaccgtctctgagggcttgaac

SEQ ID NO: 1818881 - DNA, 25 bp, Homo sapien
ggaggtcagcctcataacctgtaga

SEQ ID NO: 1818882 - DNA, 25 bp, Homo sapien
cctgtagaccaaatccagagtgtgg

SEQ ID NO: 1818883 - DNA, 25 bp, Homo sapien
catatgccctatatcgcacaggagg

SEQ ID NO: 1818884 - DNA, 25 bp, Homo sapien
tatagtggtgttaatcatatgccct

SEQ ID NO: 1818885 - DNA, 25 bp, Homo sapien
cattatatgtgaagttggccctcca

SEQ ID NO: 1818886 - DNA, 25 bp, Homo sapien
tggccctccatgtccgtaggttcca

SEQ ID NO: 1818887 - DNA, 25 bp, Homo sapien
tgtgattcaatagcgactgcgggca

SEQ ID NO: 1818888 - DNA, 25 bp, Homo sapien
ggctgatgagcgcactgtgattcaa

SEQ ID NO: 1818889 - DNA, 25 bp, Homo sapien
ccagatcagtaaaagaggagaaggg

SEQ ID NO: 1818890 - DNA, 25 bp, Homo sapien
acaggccgtgagctgcatgcagcat

SEQ ID NO: 1818891 - DNA, 25 bp, Homo sapien
ctgagaccctgagcgtcagtgcagc

SEQ ID NO: 1818892 - DNA, 25 bp, Homo sapien
tccagagaaaggcatgggatccaat

SEQ ID NO: 1818893 - DNA, 25 bp, Homo sapien
tcagtgcagcagtatccgaagcacc

SEQ ID NO: 1818894 - DNA, 25 bp, Homo sapien
cacagctggattgcagaaggcagga

SEQ ID NO: 1818895 - DNA, 25 bp, Homo sapien
ggtccgtgaggtgtctgaggccacc

SEQ ID NO: 1818896 - DNA, 25 bp, Homo sapien
gtccgtgaggtgtctgaggccacct

SEQ ID NO: 1818897 - DNA, 25 bp, Homo sapien
ctgaggccacctcttctgatggcat

SEQ ID NO: 1818898 - DNA, 25 bp, Homo sapien
tgtctgaggccacctcttctgatgg

SEQ ID NO: 1818899 - DNA, 25 bp, Homo sapien
gagaggagggcggagcttccaggaa

SEQ ID NO: 1818900 - DNA, 25 bp, Homo sapien
cttccaggaaggagagcgcagtcac

SEQ ID NO: 1818901 - DNA, 25 bp, Homo sapien
agaggagggcggagcttccaggaag

SEQ ID NO: 1818902 - DNA, 25 bp, Homo sapien
gagcttccaggaaggagagcgcagt

SEQ ID NO: 1818903 - DNA, 25 bp, Homo sapien
ccccccagctgctccttggccagct

SEQ ID NO: 1818904 - DNA, 25 bp, Homo sapien
ccccagctgctccttggccagctgt

SEQ ID NO: 1818905 - DNA, 25 bp, Homo sapien
ccagctgctccttggccagctgttc

SEQ ID NO: 1818906 - DNA, 25 bp, Homo sapien
ctaaaaccaccccccagctgctcct

SEQ ID NO: 1818907 - DNA, 25 bp, Homo sapien
ttcaccaaaccaccaacagctgaag

SEQ ID NO: 1818908 - DNA, 25 bp, Homo sapien
gcccacaggtgcagactcggttcct

SEQ ID NO: 1818909 - DNA, 25 bp, Homo sapien
tctgggacgtcttccaaatcgaggg

SEQ ID NO: 1818910 - DNA, 25 bp, Homo sapien
aaccaccaacagctgaagagtctgg

SEQ ID NO: 1818911 - DNA, 25 bp, Homo sapien
aagcagcagcgaggagccctgacac

SEQ ID NO: 1818912 - DNA, 25 bp, Homo sapien
ctgctgctgagctccgaacgtcaat

SEQ ID NO: 1818913 - DNA, 25 bp, Homo sapien
tccgaacgtcaatgaatgacagtcc

SEQ ID NO: 1818914 - DNA, 25 bp, Homo sapien
catcccatgagcctgctgcggtgac

SEQ ID NO: 1818915 - DNA, 25 bp, Homo sapien
ccccagtgttcagagccttcagttt

SEQ ID NO: 1818916 - DNA, 25 bp, Homo sapien
ccagtgttcagagccttcagtttgg

SEQ ID NO: 1818917 - DNA, 25 bp, Homo sapien
tgttcagagccttcagtttggtcat

SEQ ID NO: 1818918 - DNA, 25 bp, Homo sapien
agtgttcagagccttcagtttggtc

SEQ ID NO: 1818919 - DNA, 25 bp, Homo sapien
tacatgctacaaatgagtaaatctt

SEQ ID NO: 1818920 - DNA, 25 bp, Homo sapien
aacaagaatccccatacatagctga

SEQ ID NO: 1818921 - DNA, 25 bp, Homo sapien
ggcgaaggattgagatctacatttc

SEQ ID NO: 1818922 - DNA, 25 bp, Homo sapien
atgggaatgtaacatggtggagcct

SEQ ID NO: 1818923 - DNA, 25 bp, Homo sapien
caaatttctttatctaggcagtgag

SEQ ID NO: 1818924 - DNA, 25 bp, Homo sapien
tatctaggcagtgagtgacgatggc

SEQ ID NO: 1818925 - DNA, 25 bp, Homo sapien
cagtgagtgacgatggctgcactag

SEQ ID NO: 1818926 - DNA, 25 bp, Homo sapien
gagtgacgatggctgcactagcatc

SEQ ID NO: 1818927 - DNA, 25 bp, Homo sapien
ggagcatgggatggcgcgatgtaga

SEQ ID NO: 1818928 - DNA, 25 bp, Homo sapien
tggcgcgatgtagaagtaaggcccc

SEQ ID NO: 1818929 - DNA, 25 bp, Homo sapien
gaaaatgagtaaaacggctgaactc

SEQ ID NO: 1818930 - DNA, 25 bp, Homo sapien
aaacggctgaactccctcatctggg

SEQ ID NO: 1818931 - DNA, 25 bp, Homo sapien
tcgtttgacttggatacatcgatcc

SEQ ID NO: 1818932 - DNA, 25 bp, Homo sapien
gatacatcgatcctttccatctgtc

SEQ ID NO: 1818933 - DNA, 25 bp, Homo sapien
cctggctggggtcaacgtctcttcg

SEQ ID NO: 1818934 - DNA, 25 bp, Homo sapien
tcaacgtctcttcgtttgacttgga

SEQ ID NO: 1818935 - DNA, 25 bp, Homo sapien
ataagagccataagagccatgggag

SEQ ID NO: 1818936 - DNA, 25 bp, Homo sapien
aataagagccataagagccatggga

SEQ ID NO: 1818937 - DNA, 25 bp, Homo sapien
gggagccttgggccagtgatgaagc

SEQ ID NO: 1818938 - DNA, 25 bp, Homo sapien
gaaataagagccataagagccatgg

SEQ ID NO: 1818939 - DNA, 25 bp, Homo sapien
gctgtttacaagttcggctctccga

SEQ ID NO: 1818940 - DNA, 25 bp, Homo sapien
tttgtcttcctagcccctagcacag

SEQ ID NO: 1818941 - DNA, 25 bp, Homo sapien
ccatgaatcatttcctgtgagcctc

SEQ ID NO: 1818942 - DNA, 25 bp, Homo sapien
tgtgagcctctagagagcatcagtg

SEQ ID NO: 1818943 - DNA, 25 bp, Homo sapien
ccagttgagggccatcctcagtttc

SEQ ID NO: 1818944 - DNA, 25 bp, Homo sapien
gcttgccagttgagggccatcctca

SEQ ID NO: 1818945 - DNA, 25 bp, Homo sapien
cttgccagttgagggccatcctcag

SEQ ID NO: 1818946 - DNA, 25 bp, Homo sapien
tgccagttgagggccatcctcagtt

SEQ ID NO: 1818947 - DNA, 25 bp, Homo sapien
cttgtaacactgaagacgagcaggt

SEQ ID NO: 1818948 - DNA, 25 bp, Homo sapien
tctgtctgcaaggttttctactaat

SEQ ID NO: 1818949 - DNA, 25 bp, Homo sapien
ctactaatcatgaccagaaacaaag

SEQ ID NO: 1818950 - DNA, 25 bp, Homo sapien
agacgagcaggtgtacaggcccatt

SEQ ID NO: 1818951 - DNA, 25 bp, Homo sapien
gtcttcccagagatggttcctgcat

SEQ ID NO: 1818952 - DNA, 25 bp, Homo sapien
ggagtgacttctcgagtcccttgga

SEQ ID NO: 1818953 - DNA, 25 bp, Homo sapien
tttcttttggatggagtgacttctc

SEQ ID NO: 1818954 - DNA, 25 bp, Homo sapien
gctaccttcaaatccacaatttctt

SEQ ID NO: 1818955 - DNA, 25 bp, Homo sapien
taaacatcctagtatttgcatttcg

SEQ ID NO: 1818956 - DNA, 25 bp, Homo sapien
ggctatatgccagcacaaattatga

SEQ ID NO: 1818957 - DNA, 25 bp, Homo sapien
cctagtatttgcatttcggtttgtt

SEQ ID NO: 1818958 - DNA, 25 bp, Homo sapien
tcatatcaaacaagagggctatatg

SEQ ID NO: 1818959 - DNA, 25 bp, Homo sapien
cagctgcagaacgagtgctgttggg

SEQ ID NO: 1818960 - DNA, 25 bp, Homo sapien
gctgcagaacgagtgctgttggggt

SEQ ID NO: 1818961 - DNA, 25 bp, Homo sapien
gttggggtgtgtatgctcctgcagg

SEQ ID NO: 1818962 - DNA, 25 bp, Homo sapien
agctgcagaacgagtgctgttgggg

SEQ ID NO: 1818963 - DNA, 25 bp, Homo sapien
atgcaggtgctgcccatgctcctcc

SEQ ID NO: 1818964 - DNA, 25 bp, Homo sapien
acccatgcaggtgctgcccatgctc

SEQ ID NO: 1818965 - DNA, 25 bp, Homo sapien
ccatgcaggtgctgcccatgctcct

SEQ ID NO: 1818966 - DNA, 25 bp, Homo sapien
cacccatgcaggtgctgcccatgct

SEQ ID NO: 1818967 - DNA, 25 bp, Homo sapien
gcaactgttagaagatgcgaaggag

SEQ ID NO: 1818968 - DNA, 25 bp, Homo sapien
ctgtgaatgcgcaaagcagaggagg

SEQ ID NO: 1818969 - DNA, 25 bp, Homo sapien
ggtgggggaagttacatctcctctc

SEQ ID NO: 1818970 - DNA, 25 bp, Homo sapien
aggaggctgcaactgttagaagatg

SEQ ID NO: 1818971 - DNA, 25 bp, Homo sapien
cttttccatcagcaaggcactggat

SEQ ID NO: 1818972 - DNA, 25 bp, Homo sapien
ttccatcagcaaggcactggatgct

SEQ ID NO: 1818973 - DNA, 25 bp, Homo sapien
tttccatcagcaaggcactggatgc

SEQ ID NO: 1818974 - DNA, 25 bp, Homo sapien
ctcagcagcggtggcttttccatca

SEQ ID NO: 1818975 - DNA, 25 bp, Homo sapien
gacctcagttcatttctgccactca

SEQ ID NO: 1818976 - DNA, 25 bp, Homo sapien
ctggcaccactagcgtcccagaacc

SEQ ID NO: 1818977 - DNA, 25 bp, Homo sapien
gaaccacagcatgccaggacagaca

SEQ ID NO: 1818978 - DNA, 25 bp, Homo sapien
cctagcttaaaaagcgtgttggcca

SEQ ID NO: 1818979 - DNA, 25 bp, Homo sapien
taaaattatgcatggagcccgctag

SEQ ID NO: 1818980 - DNA, 25 bp, Homo sapien
ggatgggtcactccgagacacttgc

SEQ ID NO: 1818981 - DNA, 25 bp, Homo sapien
gaggccaatacatgctccagcgaag

SEQ ID NO: 1818982 - DNA, 25 bp, Homo sapien
agcacgcgttgctgatgccacgcaa

SEQ ID NO: 1818983 - DNA, 25 bp, Homo sapien
gactccactccagatggtgggaagc

SEQ ID NO: 1818984 - DNA, 25 bp, Homo sapien
gaaaaggcacaaagcgccatcctca

SEQ ID NO: 1818985 - DNA, 25 bp, Homo sapien
ccgccgagtggtgagaacgaatgac

SEQ ID NO: 1818986 - DNA, 25 bp, Homo sapien
gcgagttaccagcttccgccgagtg

SEQ ID NO: 1818987 - DNA, 25 bp, Homo sapien
tcttctgcccaagcatcccatcctg

SEQ ID NO: 1818988 - DNA, 25 bp, Homo sapien
ttctgcccaagcatcccatcctgct

SEQ ID NO: 1818989 - DNA, 25 bp, Homo sapien
ctgcccaagcatcccatcctgctcc

SEQ ID NO: 1818990 - DNA, 25 bp, Homo sapien
gcccaagcatcccatcctgctcctt

SEQ ID NO: 1818991 - DNA, 25 bp, Homo sapien
ttgcaagaatttgggatggtgtcca

SEQ ID NO: 1818992 - DNA, 25 bp, Homo sapien
acacattgtttctccacgtgcttca

SEQ ID NO: 1818993 - DNA, 25 bp, Homo sapien
gtgtaatgagcaacacacatcatat

SEQ ID NO: 1818994 - DNA, 25 bp, Homo sapien
tgtaatgagcaacacacatcatatg

SEQ ID NO: 1818995 - DNA, 25 bp, Homo sapien
acacatcatatgtgagagctctgaa

SEQ ID NO: 1818996 - DNA, 25 bp, Homo sapien
agtaagctcacacttgccaccaggg

SEQ ID NO: 1818997 - DNA, 25 bp, Homo sapien
ataaaagccaaagggcatcccacgg

SEQ ID NO: 1818998 - DNA, 25 bp, Homo sapien
cagatgtcataaactgctgcccaga

SEQ ID NO: 1818999 - DNA, 25 bp, Homo sapien
cagggcggtagccagcttctgatca

SEQ ID NO: 1819000 - DNA, 25 bp, Homo sapien
actgcatgtagggaaatctagcctg

SEQ ID NO: 1819001 - DNA, 25 bp, Homo sapien
tctagcctgaggaatcacatggtca

SEQ ID NO: 1819002 - DNA, 25 bp, Homo sapien
tagggaaatctagcctgaggaatca

SEQ ID NO: 1819003 - DNA, 25 bp, Homo sapien
gaggaatcacatggtcattgaggtg

SEQ ID NO: 1819004 - DNA, 25 bp, Homo sapien
gctacccatgtgtaccctttggtca

SEQ ID NO: 1819005 - DNA, 25 bp, Homo sapien
aagggccctcctgaatagggctggc

SEQ ID NO: 1819006 - DNA, 25 bp, Homo sapien
ggtattccatcaccagtgctgcctg

SEQ ID NO: 1819007 - DNA, 25 bp, Homo sapien
tgtccccagggcattagaaatatcc

SEQ ID NO: 1819008 - DNA, 25 bp, Homo sapien
ctgcagcaccggcagtacagtaact

SEQ ID NO: 1819009 - DNA, 25 bp, Homo sapien
cagcaccggcagtacagtaactgag

SEQ ID NO: 1819010 - DNA, 25 bp, Homo sapien
gcaccggcagtacagtaactgaggg

SEQ ID NO: 1819011 - DNA, 25 bp, Homo sapien
tgcagcaccggcagtacagtaactg

SEQ ID NO: 1819012 - DNA, 25 bp, Homo sapien
cttcaagccattgccaacttctttc

SEQ ID NO: 1819013 - DNA, 25 bp, Homo sapien
gggcactcctcaggtaaagcagtca

SEQ ID NO: 1819014 - DNA, 25 bp, Homo sapien
gatgctctcgttgagcgccagctgc

SEQ ID NO: 1819015 - DNA, 25 bp, Homo sapien
aaccagtctcgaagggtaattctga

SEQ ID NO: 1819016 - DNA, 25 bp, Homo sapien
aacatgtcagggcttaccttgatgg

SEQ ID NO: 1819017 - DNA, 25 bp, Homo sapien
tgccgcagaccctcgctctgagtgt

SEQ ID NO: 1819018 - DNA, 25 bp, Homo sapien
tgtgccaaatgtctataccctgaag

SEQ ID NO: 1819019 - DNA, 25 bp, Homo sapien
acctgctcgcgtccggaatcggtgg

SEQ ID NO: 1819020 - DNA, 25 bp, Homo sapien
atgtgtactctagtaataatgcttc

SEQ ID NO: 1819021 - DNA, 25 bp, Homo sapien
gaaaatgtgtactctagtaataatg

SEQ ID NO: 1819022 - DNA, 25 bp, Homo sapien
acaaaaagctgtacctattcaggcc

SEQ ID NO: 1819023 - DNA, 25 bp, Homo sapien
tacaaaaagctgtacctattcaggc

SEQ ID NO: 1819024 - DNA, 25 bp, Homo sapien
attaaggtctccaataaatctctgc

SEQ ID NO: 1819025 - DNA, 25 bp, Homo sapien
gagccaccacgcccggcccactttc

SEQ ID NO: 1819026 - DNA, 25 bp, Homo sapien
ttttccccagactgagtcttgctct

SEQ ID NO: 1819027 - DNA, 25 bp, Homo sapien
ttccccagactgagtcttgctctgt

SEQ ID NO: 1819028 - DNA, 25 bp, Homo sapien
tgagccaccacgcccggcccacttt

SEQ ID NO: 1819029 - DNA, 25 bp, Homo sapien
ggtattgggctttctcgtggacact

SEQ ID NO: 1819030 - DNA, 25 bp, Homo sapien
aattggatgtgtaggtattgggctt

SEQ ID NO: 1819031 - DNA, 25 bp, Homo sapien
gctttaatttgcgattcttgtgcaa

SEQ ID NO: 1819032 - DNA, 25 bp, Homo sapien
caacaccttatttcctgtatagaga

SEQ ID NO: 1819033 - DNA, 25 bp, Homo sapien
aggggccagcgtcaaatttgaagat

SEQ ID NO: 1819034 - DNA, 25 bp, Homo sapien
ctaggggccagcgtcaaatttgaag

SEQ ID NO: 1819035 - DNA, 25 bp, Homo sapien
aaggtcatcgtttggagttggggtg

SEQ ID NO: 1819036 - DNA, 25 bp, Homo sapien
gggccagcgtcaaatttgaagatga

SEQ ID NO: 1819037 - DNA, 25 bp, Homo sapien
gagtgatcggagttggcggctgtct

SEQ ID NO: 1819038 - DNA, 25 bp, Homo sapien
tttcgccaccgatggggcacgtcca

SEQ ID NO: 1819039 - DNA, 25 bp, Homo sapien
caggaagccccttctttcgccaccg

SEQ ID NO: 1819040 - DNA, 25 bp, Homo sapien
gcaggtgtgccctggcagtagatct

SEQ ID NO: 1819041 - DNA, 25 bp, Homo sapien
tccctggaatccagactcggtccct

SEQ ID NO: 1819042 - DNA, 25 bp, Homo sapien
ggaggaggcggacgctccgagagga

SEQ ID NO: 1819043 - DNA, 25 bp, Homo sapien
ttcccagctgcgcttcggaggaggc

SEQ ID NO: 1819044 - DNA, 25 bp, Homo sapien
aggaggcggacgctccgagaggaac

SEQ ID NO: 1819045 - DNA, 25 bp, Homo sapien
gcaggttttttggtcgcaagtagga

SEQ ID NO: 1819046 - DNA, 25 bp, Homo sapien
ttttggtcgcaagtaggaagctttc

SEQ ID NO: 1819047 - DNA, 25 bp, Homo sapien
ggtgttgagggacttaaggaagcat

SEQ ID NO: 1819048 - DNA, 25 bp, Homo sapien
tgggtgttgagggacttaaggaagc

SEQ ID NO: 1819049 - DNA, 25 bp, Homo sapien
tttatgatgcgtttagggacctggg

SEQ ID NO: 1819050 - DNA, 25 bp, Homo sapien
ctttatgatgcgtttagggacctgg

SEQ ID NO: 1819051 - DNA, 25 bp, Homo sapien
gaacttgggtgagttacccaactgc

SEQ ID NO: 1819052 - DNA, 25 bp, Homo sapien
ggacaggtctgcagtaactgggaac

SEQ ID NO: 1819053 - DNA, 25 bp, Homo sapien
tgagttacccaactgctgagccttg

SEQ ID NO: 1819054 - DNA, 25 bp, Homo sapien
tacccaactgctgagccttggtttt

SEQ ID NO: 1819055 - DNA, 25 bp, Homo sapien
tcagtgctgagaccagacacattca

SEQ ID NO: 1819056 - DNA, 25 bp, Homo sapien
tgagaccagacacattcagcttgcc

SEQ ID NO: 1819057 - DNA, 25 bp, Homo sapien
agttcagtgctgagaccagacacat

SEQ ID NO: 1819058 - DNA, 25 bp, Homo sapien
cttggcagaagttcagtgctgagac

SEQ ID NO: 1819059 - DNA, 25 bp, Homo sapien
ttctgggatgaaggatgttgctgct

SEQ ID NO: 1819060 - DNA, 25 bp, Homo sapien
taggatccccgcaggctttgctctg

SEQ ID NO: 1819061 - DNA, 25 bp, Homo sapien
ctgttaggatccccgcaggctttgc

SEQ ID NO: 1819062 - DNA, 25 bp, Homo sapien
ccgcaggctttgctctgctgttctg

SEQ ID NO: 1819063 - DNA, 25 bp, Homo sapien
gtccttggcgatactttgtatggta

SEQ ID NO: 1819064 - DNA, 25 bp, Homo sapien
ccttggcgatactttgtatggtagg

SEQ ID NO: 1819065 - DNA, 25 bp, Homo sapien
tagtccttggcgatactttgtatgg

SEQ ID NO: 1819066 - DNA, 25 bp, Homo sapien
tatattagtccttggcgatactttg

SEQ ID NO: 1819067 - DNA, 25 bp, Homo sapien
tttttgcctttatgactcgcccttg

SEQ ID NO: 1819068 - DNA, 25 bp, Homo sapien
tgtgtgatgggttaccctttgcctt

SEQ ID NO: 1819069 - DNA, 25 bp, Homo sapien
tgcctacgggataatgacataatgc

SEQ ID NO: 1819070 - DNA, 25 bp, Homo sapien
cataatgcatagttgtctaagtgtg

SEQ ID NO: 1819071 - DNA, 25 bp, Homo sapien
cagaggtccatttactgggagctaa

SEQ ID NO: 1819072 - DNA, 25 bp, Homo sapien
tagccaggtctcttatcagggcacc

SEQ ID NO: 1819073 - DNA, 25 bp, Homo sapien
gtcagatcagccgtacagaggtcca

SEQ ID NO: 1819074 - DNA, 25 bp, Homo sapien
ggtaccctttaatgactccctgtga

SEQ ID NO: 1819075 - DNA, 25 bp, Homo sapien
gaaatgcagactctgaggcaccgcc

SEQ ID NO: 1819076 - DNA, 25 bp, Homo sapien
tgttggccatctcacttgactgttg

SEQ ID NO: 1819077 - DNA, 25 bp, Homo sapien
tgttggtctcccctggaaccttcca

SEQ ID NO: 1819078 - DNA, 25 bp, Homo sapien
cattataaagactcctgttggccat

SEQ ID NO: 1819079 - DNA, 25 bp, Homo sapien
tcatggagcatatgcagagtcaacc

SEQ ID NO: 1819080 - DNA, 25 bp, Homo sapien
tcactgtgaggacttaatattagaa

SEQ ID NO: 1819081 - DNA, 25 bp, Homo sapien
gaggaagttctgcttcagttcactg

SEQ ID NO: 1819082 - DNA, 25 bp, Homo sapien
tgcatctggataggtagcattccca

SEQ ID NO: 1819083 - DNA, 25 bp, Homo sapien
cttgaacacagttaacagtgtttgt

SEQ ID NO: 1819084 - DNA, 25 bp, Homo sapien
acacagttaacagtgtttgtgtcct

SEQ ID NO: 1819085 - DNA, 25 bp, Homo sapien
acagttaacagtgtttgtgtcctgc

SEQ ID NO: 1819086 - DNA, 25 bp, Homo sapien
cctgctttttataagtcatgagcat

SEQ ID NO: 1819087 - DNA, 25 bp, Homo sapien
gctctgacgtagacatggctgtgca

SEQ ID NO: 1819088 - DNA, 25 bp, Homo sapien
gttgttcagatgtgaccccacaggt

SEQ ID NO: 1819089 - DNA, 25 bp, Homo sapien
tcttgcatgtccagtaccaccttgt

SEQ ID NO: 1819090 - DNA, 25 bp, Homo sapien
tctacttctgtgctcacaagggaat

SEQ ID NO: 1819091 - DNA, 25 bp, Homo sapien
gctaaggagctgctgttgtacatct

SEQ ID NO: 1819092 - DNA, 25 bp, Homo sapien
ccatccgtccctgtctcatggtcca

SEQ ID NO: 1819093 - DNA, 25 bp, Homo sapien
tggtccacccagctgttgtaggtcc

SEQ ID NO: 1819094 - DNA, 25 bp, Homo sapien
tccccagtgtcctgtttagtggacc

SEQ ID NO: 1819095 - DNA, 25 bp, Homo sapien
gcttgatacagagtgacttcctgct

SEQ ID NO: 1819096 - DNA, 25 bp, Homo sapien
tgtcacatgatccagtttgttgcca

SEQ ID NO: 1819097 - DNA, 25 bp, Homo sapien
ttgccattgcgcagtactgtatctg

SEQ ID NO: 1819098 - DNA, 25 bp, Homo sapien
tatctgtctctttacatgtgcttga

SEQ ID NO: 1819099 - DNA, 25 bp, Homo sapien
taaaagcgaacacgttggcagagtt

SEQ ID NO: 1819100 - DNA, 25 bp, Homo sapien
agcgaacacgttggcagagtttttt

SEQ ID NO: 1819101 - DNA, 25 bp, Homo sapien
aaagcgaacacgttggcagagtttt

SEQ ID NO: 1819102 - DNA, 25 bp, Homo sapien
gtttaaaagcgaacacgttggcaga

SEQ ID NO: 1819103 - DNA, 25 bp, Homo sapien
ctcaggctcagcatcgaatgggaac

SEQ ID NO: 1819104 - DNA, 25 bp, Homo sapien
gaaacatgaattaccaggctgcatc

SEQ ID NO: 1819105 - DNA, 25 bp, Homo sapien
tgcatcccgggcctcagaaattctg

SEQ ID NO: 1819106 - DNA, 25 bp, Homo sapien
cgttgtagagtagtgcttctgagta

SEQ ID NO: 1819107 - DNA, 25 bp, Homo sapien
aaggcactcgtgattgggaaagacc

SEQ ID NO: 1819108 - DNA, 25 bp, Homo sapien
gcagaaggagagcacattgaccaga

SEQ ID NO: 1819109 - DNA, 25 bp, Homo sapien
gccggaagaacatggacctagcgaa

SEQ ID NO: 1819110 - DNA, 25 bp, Homo sapien
tcaagatcctcgtgcctaaaagccc

SEQ ID NO: 1819111 - DNA, 25 bp, Homo sapien
ctgcagctggagtctgctttacttg

SEQ ID NO: 1819112 - DNA, 25 bp, Homo sapien
tctgctttacttgattcatgttact

SEQ ID NO: 1819113 - DNA, 25 bp, Homo sapien
tctcccgctttgtgtgctcggcccc

SEQ ID NO: 1819114 - DNA, 25 bp, Homo sapien
ctcccgctttgtgtgctcggcccct

SEQ ID NO: 1819115 - DNA, 25 bp, Homo sapien
tttgagaattacaccagtgaagccg

SEQ ID NO: 1819116 - DNA, 25 bp, Homo sapien
gagaattacaccagtgaagccgttg

SEQ ID NO: 1819117 - DNA, 25 bp, Homo sapien
catgtttgagaattacaccagtgaa

SEQ ID NO: 1819118 - DNA, 25 bp, Homo sapien
ttacaccagtgaagccgttgactgc

SEQ ID NO: 1819119 - DNA, 25 bp, Homo sapien
tgcttcatgacagtacaagcgtgaa

SEQ ID NO: 1819120 - DNA, 25 bp, Homo sapien
gacagtacaagcgtgaaggccacag

SEQ ID NO: 1819121 - DNA, 25 bp, Homo sapien
tacaagcgtgaaggccacaggagaa

SEQ ID NO: 1819122 - DNA, 25 bp, Homo sapien
agcgtgaaggccacaggagaaaaag

SEQ ID NO: 1819123 - DNA, 25 bp, Homo sapien
tacagatacctcagattcgggaaac

SEQ ID NO: 1819124 - DNA, 25 bp, Homo sapien
aaaatccgctgaggagcatacccca

SEQ ID NO: 1819125 - DNA, 25 bp, Homo sapien
gctgagatatcaattggtttcccct

SEQ ID NO: 1819126 - DNA, 25 bp, Homo sapien
tgccccacgtagagacacagagtga

SEQ ID NO: 1819127 - DNA, 25 bp, Homo sapien
ccggccacgcggagagctgtacagt

SEQ ID NO: 1819128 - DNA, 25 bp, Homo sapien
actgagttcagtatggtgtccaaga

SEQ ID NO: 1819129 - DNA, 25 bp, Homo sapien
gagtgccctgtgtggatagacatgt

SEQ ID NO: 1819130 - DNA, 25 bp, Homo sapien
ccagactccagatgcctattattag

SEQ ID NO: 1819131 - DNA, 25 bp, Homo sapien
gattgatcagcagagagcccatgag

SEQ ID NO: 1819132 - DNA, 25 bp, Homo sapien
cctagtttgaggaaccatcgcaccc

SEQ ID NO: 1819133 - DNA, 25 bp, Homo sapien
catgagaggcagaatgaacgcacca

SEQ ID NO: 1819134 - DNA, 25 bp, Homo sapien
gccaccagcagcaacgattgatcag

SEQ ID NO: 1819135 - DNA, 25 bp, Homo sapien
aagcagttggcacacccagctgagg

SEQ ID NO: 1819136 - DNA, 25 bp, Homo sapien
ggcctgtggagctgtcttaagcgaa

SEQ ID NO: 1819137 - DNA, 25 bp, Homo sapien
aagatcttggattcgacttggcctg

SEQ ID NO: 1819138 - DNA, 25 bp, Homo sapien
cgaatgtctggcaagcagttggcac

SEQ ID NO: 1819139 - DNA, 25 bp, Homo sapien
ttgcaaactgcagccgattattcag

SEQ ID NO: 1819140 - DNA, 25 bp, Homo sapien
tgtcttgggctttggccggaccact

SEQ ID NO: 1819141 - DNA, 25 bp, Homo sapien
ttggccggaccactcgaaaatctgc

SEQ ID NO: 1819142 - DNA, 25 bp, Homo sapien
cagcagttgcaaaacggaatggctt

SEQ ID NO: 1819143 - DNA, 25 bp, Homo sapien
gtccgggacgagctgtgagctcctc

SEQ ID NO: 1819144 - DNA, 25 bp, Homo sapien
gagctgtgagctcctctctgtcccg

SEQ ID NO: 1819145 - DNA, 25 bp, Homo sapien
agagcccacaaagccctgtgcacaa

SEQ ID NO: 1819146 - DNA, 25 bp, Homo sapien
acaaagcccccctgcatcttggaag

SEQ ID NO: 1819147 - DNA, 25 bp, Homo sapien
ccagcacattttgtgagtattcagt

SEQ ID NO: 1819148 - DNA, 25 bp, Homo sapien
ttttgtgagtattcagtgggtgaca

SEQ ID NO: 1819149 - DNA, 25 bp, Homo sapien
gcacattttgtgagtattcagtggg

SEQ ID NO: 1819150 - DNA, 25 bp, Homo sapien
cattttgtgagtattcagtgggtga

SEQ ID NO: 1819151 - DNA, 25 bp, Homo sapien
caggaggatgtcgacgatggaaaat

SEQ ID NO: 1819152 - DNA, 25 bp, Homo sapien
gaggatgtcgacgatggaaaatata

SEQ ID NO: 1819153 - DNA, 25 bp, Homo sapien
acaggaggatgtcgacgatggaaaa

SEQ ID NO: 1819154 - DNA, 25 bp, Homo sapien
ggatgtcgacgatggaaaatatagc

SEQ ID NO: 1819155 - DNA, 25 bp, Homo sapien
ttttgtgtccaaggtcagcacacca

SEQ ID NO: 1819156 - DNA, 25 bp, Homo sapien
tgtgtccaaggtcagcacaccaaga

SEQ ID NO: 1819157 - DNA, 25 bp, Homo sapien
aataaaggaccgcaccaattctggg

SEQ ID NO: 1819158 - DNA, 25 bp, Homo sapien
agatttgggtcaataaaggaccgca

SEQ ID NO: 1819159 - DNA, 25 bp, Homo sapien
caagaagaaatacgtctgtaggcct

SEQ ID NO: 1819160 - DNA, 25 bp, Homo sapien
gaagaaatacgtctgtaggccttgt

SEQ ID NO: 1819161 - DNA, 25 bp, Homo sapien
ccaagaagaaatacgtctgtaggcc

SEQ ID NO: 1819162 - DNA, 25 bp, Homo sapien
accatcggtatgtccaagaagaaat

SEQ ID NO: 1819163 - DNA, 25 bp, Homo sapien
acagaggcggtaaaagcaggcatcc

SEQ ID NO: 1819164 - DNA, 25 bp, Homo sapien
tgatttgttcctgacgttgggaagg

SEQ ID NO: 1819165 - DNA, 25 bp, Homo sapien
tctgattgcacagtctaaagccttc

SEQ ID NO: 1819166 - DNA, 25 bp, Homo sapien
tagctcatttgtagagtccgctgaa

SEQ ID NO: 1819167 - DNA, 25 bp, Homo sapien
cattcctagtattggtaacttgtgt

SEQ ID NO: 1819168 - DNA, 25 bp, Homo sapien
tttttccctgatatatgtacctggc

SEQ ID NO: 1819169 - DNA, 25 bp, Homo sapien
cgcctagccctagattttcgttaca

SEQ ID NO: 1819170 - DNA, 25 bp, Homo sapien
tatctgtaggctcttcagtgatgcc

SEQ ID NO: 1819171 - DNA, 25 bp, Homo sapien
taatttaattccgttgtggccagac

SEQ ID NO: 1819172 - DNA, 25 bp, Homo sapien
tgctattgtaagatgcaatgtcctg

SEQ ID NO: 1819173 - DNA, 25 bp, Homo sapien
tccatgtgtacttgcgaaaaactct

SEQ ID NO: 1819174 - DNA, 25 bp, Homo sapien
caatgtcctgtaaatgtcaatcggg

SEQ ID NO: 1819175 - DNA, 25 bp, Homo sapien
caaatggtagcacgtcaccttgtgt

SEQ ID NO: 1819176 - DNA, 25 bp, Homo sapien
taaatgctacatttacccatgttgt

SEQ ID NO: 1819177 - DNA, 25 bp, Homo sapien
gcagctgctttagggtttacagcac

SEQ ID NO: 1819178 - DNA, 25 bp, Homo sapien
gaactttacaatagcatgattctcc

SEQ ID NO: 1819179 - DNA, 25 bp, Homo sapien
ctgtgggtgacagtctttcagcttt

SEQ ID NO: 1819180 - DNA, 25 bp, Homo sapien
tgggtgacagtctttcagcttttgc

SEQ ID NO: 1819181 - DNA, 25 bp, Homo sapien
agtctttcagcttttgcaaatttga

SEQ ID NO: 1819182 - DNA, 25 bp, Homo sapien
cagtctttcagcttttgcaaatttg

SEQ ID NO: 1819183 - DNA, 25 bp, Homo sapien
tgaaactctccgagttcctccaaag

SEQ ID NO: 1819184 - DNA, 25 bp, Homo sapien
cctccaaagacaatctgttttgctt

SEQ ID NO: 1819185 - DNA, 25 bp, Homo sapien
ccgagttcctccaaagacaatctgt

SEQ ID NO: 1819186 - DNA, 25 bp, Homo sapien
tctccgagttcctccaaagacaatc

SEQ ID NO: 1819187 - DNA, 25 bp, Homo sapien
cagtgatcatttgccccaacagcca

SEQ ID NO: 1819188 - DNA, 25 bp, Homo sapien
ccaacagccatctgaagccaatagt

SEQ ID NO: 1819189 - DNA, 25 bp, Homo sapien
gccaatagtcctgattattaaaaat

SEQ ID NO: 1819190 - DNA, 25 bp, Homo sapien
tatggtggacagtgatcatttgccc

SEQ ID NO: 1819191 - DNA, 25 bp, Homo sapien
ttgaacggacagtgtaacccatgga

SEQ ID NO: 1819192 - DNA, 25 bp, Homo sapien
taacttcggttcatcaaagtagtga

SEQ ID NO: 1819193 - DNA, 25 bp, Homo sapien
tggagctaacttcggttcatcaaag

SEQ ID NO: 1819194 - DNA, 25 bp, Homo sapien
ctgcaaagccttgaacggacagtgt

SEQ ID NO: 1819195 - DNA, 25 bp, Homo sapien
cattctgggaggtctttaagacaaa

SEQ ID NO: 1819196 - DNA, 25 bp, Homo sapien
caatgtacggtctttgcaataggcg

SEQ ID NO: 1819197 - DNA, 25 bp, Homo sapien
ctcagttaactgaaacgttgcagga

SEQ ID NO: 1819198 - DNA, 25 bp, Homo sapien
tatccagccttcctatcgaagaaag

SEQ ID NO: 1819199 - DNA, 25 bp, Homo sapien
tcaggacagcaataggttgatatga

SEQ ID NO: 1819200 - DNA, 25 bp, Homo sapien
aaataagcttttgccaccactgtgc

SEQ ID NO: 1819201 - DNA, 25 bp, Homo sapien
gtatgaagccagtgattgtacacaa

SEQ ID NO: 1819202 - DNA, 25 bp, Homo sapien
gatcttctctggaagtatgaagcca

SEQ ID NO: 1819203 - DNA, 25 bp, Homo sapien
ctggaagacacagggagttcagata

SEQ ID NO: 1819204 - DNA, 25 bp, Homo sapien
caggccagagccctggaagacacag

SEQ ID NO: 1819205 - DNA, 25 bp, Homo sapien
gccctggaagacacagggagttcag

SEQ ID NO: 1819206 - DNA, 25 bp, Homo sapien
agagccctggaagacacagggagtt

SEQ ID NO: 1819207 - DNA, 25 bp, Homo sapien
tcgacattactgaagacggcgccga

SEQ ID NO: 1819208 - DNA, 25 bp, Homo sapien
gccgagccagtcgaagagctccaga

SEQ ID NO: 1819209 - DNA, 25 bp, Homo sapien
gatctctcaacgtgctcagtgctac

SEQ ID NO: 1819210 - DNA, 25 bp, Homo sapien
tggctgatgctcctgaatttggtac

SEQ ID NO: 1819211 - DNA, 25 bp, Homo sapien
gaaagaccaagatattctttcatac

SEQ ID NO: 1819212 - DNA, 25 bp, Homo sapien
catacttcttagaatccaagtttaa

SEQ ID NO: 1819213 - DNA, 25 bp, Homo sapien
ttcatacttcttagaatccaagttt

SEQ ID NO: 1819214 - DNA, 25 bp, Homo sapien
ctgttttatgccaagccaaaagaaa

SEQ ID NO: 1819215 - DNA, 25 bp, Homo sapien
tcctctgtgaagctcgagtcagaag

SEQ ID NO: 1819216 - DNA, 25 bp, Homo sapien
tatatatttaattgaccagtccaag

SEQ ID NO: 1819217 - DNA, 25 bp, Homo sapien
taaaagcatcatcctatcctctgtg

SEQ ID NO: 1819218 - DNA, 25 bp, Homo sapien
attaaatgcatctacagctgaaaag

SEQ ID NO: 1819219 - DNA, 25 bp, Homo sapien
cttcataagtgtctttatccagtga

SEQ ID NO: 1819220 - DNA, 25 bp, Homo sapien
ttcataagtgtctttatccagtgac

SEQ ID NO: 1819221 - DNA, 25 bp, Homo sapien
cagggcaacagtattatcttcatca

SEQ ID NO: 1819222 - DNA, 25 bp, Homo sapien
tgtgtattgtatgttagtgcatagc

SEQ ID NO: 1819223 - DNA, 25 bp, Homo sapien
ttgtatgttagtgcatagcaagaac

SEQ ID NO: 1819224 - DNA, 25 bp, Homo sapien
gggcaacagtattatcttcatcaat

SEQ ID NO: 1819225 - DNA, 25 bp, Homo sapien
taaaacaagaaattacacctgcaag

SEQ ID NO: 1819226 - DNA, 25 bp, Homo sapien
ctggaagagaaagtacagaggaaaa

SEQ ID NO: 1819227 - DNA, 25 bp, Homo sapien
caagaaattacacctgcaagatgtt

SEQ ID NO: 1819228 - DNA, 25 bp, Homo sapien
aacaagaaattacacctgcaagatg

SEQ ID NO: 1819229 - DNA, 25 bp, Homo sapien
aattaattcatgaagaggtaaattc

SEQ ID NO: 1819230 - DNA, 25 bp, Homo sapien
cacaaagtaatagggtccagtgttc

SEQ ID NO: 1819231 - DNA, 25 bp, Homo sapien
tcttcacaaagtaatagggtccagt

SEQ ID NO: 1819232 - DNA, 25 bp, Homo sapien
cttcacaaagtaatagggtccagtg

SEQ ID NO: 1819233 - DNA, 25 bp, Homo sapien
agttcttccgatagtatcccacatt

SEQ ID NO: 1819234 - DNA, 25 bp, Homo sapien
cagttcttccgatagtatcccacat

SEQ ID NO: 1819235 - DNA, 25 bp, Homo sapien
tttcagttcttccgatagtatccca

SEQ ID NO: 1819236 - DNA, 25 bp, Homo sapien
gtttttcagttcttccgatagtatc

SEQ ID NO: 1819237 - DNA, 25 bp, Homo sapien
cctgtagttatagtagtgcgtctgc

SEQ ID NO: 1819238 - DNA, 25 bp, Homo sapien
gaagttggatttctcgcaaaccagt

SEQ ID NO: 1819239 - DNA, 25 bp, Homo sapien
cacaagatgccggtggcgcgacttg

SEQ ID NO: 1819240 - DNA, 25 bp, Homo sapien
cgacttgtggttgccgaagttggat

SEQ ID NO: 1819241 - DNA, 25 bp, Homo sapien
gctctcctgggttcctggtcctccc

SEQ ID NO: 1819242 - DNA, 25 bp, Homo sapien
ctctcctgggttcctggtcctcccg

SEQ ID NO: 1819243 - DNA, 25 bp, Homo sapien
ttctgaagaaacatccacacaatgc

SEQ ID NO: 1819244 - DNA, 25 bp, Homo sapien
tctgaagaaacatccacacaatgcc

SEQ ID NO: 1819245 - DNA, 25 bp, Homo sapien
tcttctgaagaaacatccacacaat

SEQ ID NO: 1819246 - DNA, 25 bp, Homo sapien
ttcttctgaagaaacatccacacaa

SEQ ID NO: 1819247 - DNA, 25 bp, Homo sapien
tattccacggctttgtttccactca

SEQ ID NO: 1819248 - DNA, 25 bp, Homo sapien
ttattccacggctttgtttccactc

SEQ ID NO: 1819249 - DNA, 25 bp, Homo sapien
tggatggcaatgtcacaccgaatgc

SEQ ID NO: 1819250 - DNA, 25 bp, Homo sapien
gacacttgggcctctttgttttgga

SEQ ID NO: 1819251 - DNA, 25 bp, Homo sapien
tgtgagttttctcagccgcagacac

SEQ ID NO: 1819252 - DNA, 25 bp, Homo sapien
tgaggattggcggtttcagaccccg

SEQ ID NO: 1819253 - DNA, 25 bp, Homo sapien
tagactagaagatctctcgggttcc

SEQ ID NO: 1819254 - DNA, 25 bp, Homo sapien
gatctcgctgtcttcatccggacgg

SEQ ID NO: 1819255 - DNA, 25 bp, Homo sapien
ggataagcggttccctcaaggctgt

SEQ ID NO: 1819256 - DNA, 25 bp, Homo sapien
gaggcgcagtttgactacacagtat

SEQ ID NO: 1819257 - DNA, 25 bp, Homo sapien
ctctgatcctggcactgcccactct

SEQ ID NO: 1819258 - DNA, 25 bp, Homo sapien
gatcctggcactgcccactcttcat

SEQ ID NO: 1819259 - DNA, 25 bp, Homo sapien
tgatcctggcactgcccactcttca

SEQ ID NO: 1819260 - DNA, 25 bp, Homo sapien
cccggccctctgatcctggcactgc

SEQ ID NO: 1819261 - DNA, 25 bp, Homo sapien
gaggagcatgtctaagccacacagc

SEQ ID NO: 1819262 - DNA, 25 bp, Homo sapien
gaaaaggtgctgttcctacaacaca

SEQ ID NO: 1819263 - DNA, 25 bp, Homo sapien
gatgtgcctgtggagacaatacctg

SEQ ID NO: 1819264 - DNA, 25 bp, Homo sapien
tacatcgaggccatggaagaggaaa

SEQ ID NO: 1819265 - DNA, 25 bp, Homo sapien
ctgcgggcacgggatacgctcaagt

SEQ ID NO: 1819266 - DNA, 25 bp, Homo sapien
ttctccttgggcccggacagtgaga

SEQ ID NO: 1819267 - DNA, 25 bp, Homo sapien
agaagacacagtccactttctcagg

SEQ ID NO: 1819268 - DNA, 25 bp, Homo sapien
tacgctcaagttataccactgggag

SEQ ID NO: 1819269 - DNA, 25 bp, Homo sapien
ctgagtcaacagaagcagaaactga

SEQ ID NO: 1819270 - DNA, 25 bp, Homo sapien
gagtcaacagaagcagaaactgatg

SEQ ID NO: 1819271 - DNA, 25 bp, Homo sapien
agtcaacagaagcagaaactgatgc

SEQ ID NO: 1819272 - DNA, 25 bp, Homo sapien
tgagtcaacagaagcagaaactgat

SEQ ID NO: 1819273 - DNA, 25 bp, Homo sapien
ggcacattcccctaggcacaggagt

SEQ ID NO: 1819274 - DNA, 25 bp, Homo sapien
tccagtgtaggttaggaaataggcc

SEQ ID NO: 1819275 - DNA, 25 bp, Homo sapien
gaagcgggaacgtctacctgcatga

SEQ ID NO: 1819276 - DNA, 25 bp, Homo sapien
gaacgtctacctgcatgagcacggg

SEQ ID NO: 1819277 - DNA, 25 bp, Homo sapien
tcttagcactgaaggtcctgcaccc

SEQ ID NO: 1819278 - DNA, 25 bp, Homo sapien
tgcataaggttgatcttccaaaaac

SEQ ID NO: 1819279 - DNA, 25 bp, Homo sapien
gataagacgatcaacatatttctga

SEQ ID NO: 1819280 - DNA, 25 bp, Homo sapien
tactttagatttccactatcagtgc

SEQ ID NO: 1819281 - DNA, 25 bp, Homo sapien
tccaggaactaacgccagatgcctc

SEQ ID NO: 1819282 - DNA, 25 bp, Homo sapien
gtcctcatggcagtcacctggccat

SEQ ID NO: 1819283 - DNA, 25 bp, Homo sapien
catccaggaactaacgccagatgcc

SEQ ID NO: 1819284 - DNA, 25 bp, Homo sapien
ctgtcctcatggcagtcacctggcc

SEQ ID NO: 1819285 - DNA, 25 bp, Homo sapien
caggagagagggaagccaaaattgc

SEQ ID NO: 1819286 - DNA, 25 bp, Homo sapien
gaaacagaggcttaaggacttggag

SEQ ID NO: 1819287 - DNA, 25 bp, Homo sapien
caactctgagaggtcggtgttagta

SEQ ID NO: 1819288 - DNA, 25 bp, Homo sapien
caaaattgcaactgtcctgctccag

SEQ ID NO: 1819289 - DNA, 25 bp, Homo sapien
gacaccaagggactctagctttgga

SEQ ID NO: 1819290 - DNA, 25 bp, Homo sapien
caaaagagaccaggacggaagacac

SEQ ID NO: 1819291 - DNA, 25 bp, Homo sapien
aaacttccctcattccggctgggcg

SEQ ID NO: 1819292 - DNA, 25 bp, Homo sapien
tccccaaaggctctaggagacctgg

SEQ ID NO: 1819293 - DNA, 25 bp, Homo sapien
agtggttccccgcttcagcctggat

SEQ ID NO: 1819294 - DNA, 25 bp, Homo sapien
acagggccacagagagttgacctgg

SEQ ID NO: 1819295 - DNA, 25 bp, Homo sapien
cagccatcgttctccaaaccacagc

SEQ ID NO: 1819296 - DNA, 25 bp, Homo sapien
ttctgcacccgccacacagtggttc

SEQ ID NO: 1819297 - DNA, 25 bp, Homo sapien
ggacatgcctgctctgcggccccat

SEQ ID NO: 1819298 - DNA, 25 bp, Homo sapien
ctggacatgcctgctctgcggcccc

SEQ ID NO: 1819299 - DNA, 25 bp, Homo sapien
tggacatgcctgctctgcggcccca

SEQ ID NO: 1819300 - DNA, 25 bp, Homo sapien
tgctaggactacaagggcgaaccat

SEQ ID NO: 1819301 - DNA, 25 bp, Homo sapien
aaatgacgaccaagcctccatgtgc

SEQ ID NO: 1819302 - DNA, 25 bp, Homo sapien
ccattgcaccaagtggagtcagtga

SEQ ID NO: 1819303 - DNA, 25 bp, Homo sapien
caaggcttagtctcggtgttgcaca

SEQ ID NO: 1819304 - DNA, 25 bp, Homo sapien
gggatctgccgttagtttctggaat

SEQ ID NO: 1819305 - DNA, 25 bp, Homo sapien
ttcggggatctgccgttagtttctg

SEQ ID NO: 1819306 - DNA, 25 bp, Homo sapien
tacaggaatacgtcatatgcaggtt

SEQ ID NO: 1819307 - DNA, 25 bp, Homo sapien
cggggatctgccgttagtttctgga

SEQ ID NO: 1819308 - DNA, 25 bp, Homo sapien
ctctacttgagaacattctagttac

SEQ ID NO: 1819309 - DNA, 25 bp, Homo sapien
gagttcctgaaatccggatccggcc

SEQ ID NO: 1819310 - DNA, 25 bp, Homo sapien
aaagagcccttgagaagccatagcg

SEQ ID NO: 1819311 - DNA, 25 bp, Homo sapien
ttccaggacctggactgcactgcag

SEQ ID NO: 1819312 - DNA, 25 bp, Homo sapien
ttttctccatacgatttgcgccagg

SEQ ID NO: 1819313 - DNA, 25 bp, Homo sapien
ggctaaatggcttcggttaaacaca

SEQ ID NO: 1819314 - DNA, 25 bp, Homo sapien
cccatagggctgtatgaggacgata

SEQ ID NO: 1819315 - DNA, 25 bp, Homo sapien
taagaaggtgggatggcccctttca

SEQ ID NO: 1819316 - DNA, 25 bp, Homo sapien
tacacggtgaccagtaggtgtcagc

SEQ ID NO: 1819317 - DNA, 25 bp, Homo sapien
tacacctttaccgagtggcgctcct

SEQ ID NO: 1819318 - DNA, 25 bp, Homo sapien
aagaaagagccaggcgccgagtgct

SEQ ID NO: 1819319 - DNA, 25 bp, Homo sapien
cgagtactgggacaacaacgcgggc

SEQ ID NO: 1819320 - DNA, 25 bp, Homo sapien
agcctggagagtttcgaagagccgt

SEQ ID NO: 1819321 - DNA, 25 bp, Homo sapien
agctgggcccttttagtcgctggac

SEQ ID NO: 1819322 - DNA, 25 bp, Homo sapien
gctgcgcagacgcagatggccacct

SEQ ID NO: 1819323 - DNA, 25 bp, Homo sapien
gggcccttttagtcgctggactgcc

SEQ ID NO: 1819324 - DNA, 25 bp, Homo sapien
aagaggaggcatgcccagcgagtca

SEQ ID NO: 1819325 - DNA, 25 bp, Homo sapien
tgaactttgggttggagatatccct

SEQ ID NO: 1819326 - DNA, 25 bp, Homo sapien
ctacaaagctgccagatatttctct

SEQ ID NO: 1819327 - DNA, 25 bp, Homo sapien
tagcacccgtttgaattggcttcaa

SEQ ID NO: 1819328 - DNA, 25 bp, Homo sapien
aaagtgcggttatcattgtgtcagg

SEQ ID NO: 1819329 - DNA, 25 bp, Homo sapien
tgatgcatcatcaggtaatcttggt

SEQ ID NO: 1819330 - DNA, 25 bp, Homo sapien
tggtcaatggtcatatcaatgaact

SEQ ID NO: 1819331 - DNA, 25 bp, Homo sapien
tataaaagctatgaagccttctgat

SEQ ID NO: 1819332 - DNA, 25 bp, Homo sapien
cagcaagccatcaggagttaacata

SEQ ID NO: 1819333 - DNA, 25 bp, Homo sapien
tgggaacagctgacaatccgggctc

SEQ ID NO: 1819334 - DNA, 25 bp, Homo sapien
aatatgctgtgacttgtggaaactc

SEQ ID NO: 1819335 - DNA, 25 bp, Homo sapien
tggaaactcaactggcaacacggat

SEQ ID NO: 1819336 - DNA, 25 bp, Homo sapien
ttgcagtccagcgtttgtccagcca

SEQ ID NO: 1819337 - DNA, 25 bp, Homo sapien
tttaagtaagtcatgagttcagagc

SEQ ID NO: 1819338 - DNA, 25 bp, Homo sapien
ttcagagcaagttcaaccagaaact

SEQ ID NO: 1819339 - DNA, 25 bp, Homo sapien
tgagatcaatggagtagtaaaaggc

SEQ ID NO: 1819340 - DNA, 25 bp, Homo sapien
aaactccacatttatacaaaccacg

SEQ ID NO: 1819341 - DNA, 25 bp, Homo sapien
taatcgttcgagatgatggatagcc

SEQ ID NO: 1819342 - DNA, 25 bp, Homo sapien
gcatctagtggtagagcccctgggt

SEQ ID NO: 1819343 - DNA, 25 bp, Homo sapien
gaggcttccggtgcaaccaagtggt

SEQ ID NO: 1819344 - DNA, 25 bp, Homo sapien
caaagaactattcatgagtcaggca

SEQ ID NO: 1819345 - DNA, 25 bp, Homo sapien
cataagcgcatctctcagaggttct

SEQ ID NO: 1819346 - DNA, 25 bp, Homo sapien
gggctacaatctgggcagtgcatct

SEQ ID NO: 1819347 - DNA, 25 bp, Homo sapien
ggtgggtcacggctttcttgtctct

SEQ ID NO: 1819348 - DNA, 25 bp, Homo sapien
cacactgactggtggcataagcgca

SEQ ID NO: 1819349 - DNA, 25 bp, Homo sapien
tgtcagaaaggttgagtcatgtgcc

SEQ ID NO: 1819350 - DNA, 25 bp, Homo sapien
cacagagaagacagcgtatctgcac

SEQ ID NO: 1819351 - DNA, 25 bp, Homo sapien
cgtatctgcacttgatccacaggaa

SEQ ID NO: 1819352 - DNA, 25 bp, Homo sapien
tgctctgaaccatctactcatcaaa

SEQ ID NO: 1819353 - DNA, 25 bp, Homo sapien
agatgactgctctggacctcccagg

SEQ ID NO: 1819354 - DNA, 25 bp, Homo sapien
tgctctctgaggttgcatacgtctc

SEQ ID NO: 1819355 - DNA, 25 bp, Homo sapien
agagaaagtacttcgcctacttggg

SEQ ID NO: 1819356 - DNA, 25 bp, Homo sapien
gacaggtgtcatcccagttccatca

SEQ ID NO: 1819357 - DNA, 25 bp, Homo sapien
tattcaagactgatgaagtcacatg

SEQ ID NO: 1819358 - DNA, 25 bp, Homo sapien
cactaggtaactgacaggaagttct

SEQ ID NO: 1819359 - DNA, 25 bp, Homo sapien
tgttattaaacggtctctgtattca

SEQ ID NO: 1819360 - DNA, 25 bp, Homo sapien
tcaacaatatttaactgacactccc

SEQ ID NO: 1819361 - DNA, 25 bp, Homo sapien
gaggtacagccagaatgcctcatga

SEQ ID NO: 1819362 - DNA, 25 bp, Homo sapien
caggtattttcttgcagaagcagcc

SEQ ID NO: 1819363 - DNA, 25 bp, Homo sapien
aagcggaccatttctaggcaggtat

SEQ ID NO: 1819364 - DNA, 25 bp, Homo sapien
tcaagacagcacgacactgacttcg

SEQ ID NO: 1819365 - DNA, 25 bp, Homo sapien
tggtgtcaacgatcccccaggtaaa

SEQ ID NO: 1819366 - DNA, 25 bp, Homo sapien
actgctgtggtgtcaacgatccccc

SEQ ID NO: 1819367 - DNA, 25 bp, Homo sapien
tcccccaggtaaagaatatagtcca

SEQ ID NO: 1819368 - DNA, 25 bp, Homo sapien
tcaacgatcccccaggtaaagaata

SEQ ID NO: 1819369 - DNA, 25 bp, Homo sapien
tcttcagggtctttgaagtcaaaac

SEQ ID NO: 1819370 - DNA, 25 bp, Homo sapien
aatggatatcaacacgagaagccat

SEQ ID NO: 1819371 - DNA, 25 bp, Homo sapien
ccccaaatggatatcaacacgagaa

SEQ ID NO: 1819372 - DNA, 25 bp, Homo sapien
caaatggatatcaacacgagaagcc

SEQ ID NO: 1819373 - DNA, 25 bp, Homo sapien
tggcactaattagagctgcagaaag

SEQ ID NO: 1819374 - DNA, 25 bp, Homo sapien
gaaagcctgctgaatcgtaagccat

SEQ ID NO: 1819375 - DNA, 25 bp, Homo sapien
gagccaccgtccacatagactttag

SEQ ID NO: 1819376 - DNA, 25 bp, Homo sapien
gaagatcgtattgttctcagaggtg

SEQ ID NO: 1819377 - DNA, 25 bp, Homo sapien
tacaggcgcccactgccacgcctgg

SEQ ID NO: 1819378 - DNA, 25 bp, Homo sapien
tgcaacctctgcctctggcttcaag

SEQ ID NO: 1819379 - DNA, 25 bp, Homo sapien
cctctgcctctggcttcaagcaatt

SEQ ID NO: 1819380 - DNA, 25 bp, Homo sapien
gttcagtggcgtgatcccggctcat

SEQ ID NO: 1819381 - DNA, 25 bp, Homo sapien
accacacctggaggagatattcttt

SEQ ID NO: 1819382 - DNA, 25 bp, Homo sapien
ccacacctggaggagatattcttta

SEQ ID NO: 1819383 - DNA, 25 bp, Homo sapien
tcatgaccaaagtagagaatctccc

SEQ ID NO: 1819384 - DNA, 25 bp, Homo sapien
agtcttagaaacaggcagccaatat

SEQ ID NO: 1819385 - DNA, 25 bp, Homo sapien
cagccaatatatagagcaaccttcc

SEQ ID NO: 1819386 - DNA, 25 bp, Homo sapien
tatttgctctacagagttacgggta

SEQ ID NO: 1819387 - DNA, 25 bp, Homo sapien
cctggatgatggtgggttgtatggt

SEQ ID NO: 1819388 - DNA, 25 bp, Homo sapien
acacctgaagatttgagggttggac

SEQ ID NO: 1819389 - DNA, 25 bp, Homo sapien
ttgtcatctttgtaggcttcaccct

SEQ ID NO: 1819390 - DNA, 25 bp, Homo sapien
atctttgtaggcttcaccctctgcc

SEQ ID NO: 1819391 - DNA, 25 bp, Homo sapien
gactgcctcattgcgtaaaacctgg

SEQ ID NO: 1819392 - DNA, 25 bp, Homo sapien
taagtataaatcagcagtgccgtgc

SEQ ID NO: 1819393 - DNA, 25 bp, Homo sapien
caatttgatgccttcagcacggagg

SEQ ID NO: 1819394 - DNA, 25 bp, Homo sapien
tgcactgatgcaaggtggaaaacct

SEQ ID NO: 1819395 - DNA, 25 bp, Homo sapien
gagaaaaatgactgtgcctcacccc

SEQ ID NO: 1819396 - DNA, 25 bp, Homo sapien
tcagggtatgggagtcgccctgggc

SEQ ID NO: 1819397 - DNA, 25 bp, Homo sapien
tgggcaccggtgctgcccagcatgc

SEQ ID NO: 1819398 - DNA, 25 bp, Homo sapien
gccagatttgggcaccggtgctgcc

SEQ ID NO: 1819399 - DNA, 25 bp, Homo sapien
gaagtgctgagagatgtctttttaa

SEQ ID NO: 1819400 - DNA, 25 bp, Homo sapien
ctcaggtataagttgcagggtgcac

SEQ ID NO: 1819401 - DNA, 25 bp, Homo sapien
tcaccaaggcagttctcgtctcaga

SEQ ID NO: 1819402 - DNA, 25 bp, Homo sapien
cgtcacctttgttgtactgggctca

SEQ ID NO: 1819403 - DNA, 25 bp, Homo sapien
gaggttgctgatctgcagtgctcca

SEQ ID NO: 1819404 - DNA, 25 bp, Homo sapien
caatggtcatgagctacaaggtagg

SEQ ID NO: 1819405 - DNA, 25 bp, Homo sapien
gacttggtttatcagctcccacagg

SEQ ID NO: 1819406 - DNA, 25 bp, Homo sapien
gacaggcagcgcaaaaggctattgt

SEQ ID NO: 1819407 - DNA, 25 bp, Homo sapien
cacttgaaccaaggaaagacagcag

SEQ ID NO: 1819408 - DNA, 25 bp, Homo sapien
gattctcaatgatcagcttgtcagt

SEQ ID NO: 1819409 - DNA, 25 bp, Homo sapien
ttgaatacagttggccaatgtggac

SEQ ID NO: 1819410 - DNA, 25 bp, Homo sapien
taggtcctgggcatgtctcgattct

SEQ ID NO: 1819411 - DNA, 25 bp, Homo sapien
gcttgtcagttgaatacagttggcc

SEQ ID NO: 1819412 - DNA, 25 bp, Homo sapien
ttcagtctgcccttgcacagaggta

SEQ ID NO: 1819413 - DNA, 25 bp, Homo sapien
ggccccggacagaaggcgatcatgt

SEQ ID NO: 1819414 - DNA, 25 bp, Homo sapien
tctatttcgaagtgaaggccccgga

SEQ ID NO: 1819415 - DNA, 25 bp, Homo sapien
taataactaagtgttgcggtgcaag

SEQ ID NO: 1819416 - DNA, 25 bp, Homo sapien
catgtctatttcacaaagtccacca

SEQ ID NO: 1819417 - DNA, 25 bp, Homo sapien
tcatgtctatttcacaaagtccacc

SEQ ID NO: 1819418 - DNA, 25 bp, Homo sapien
ccatcatgtctatttcacaaagtcc

SEQ ID NO: 1819419 - DNA, 25 bp, Homo sapien
catcatgtctatttcacaaagtcca

SEQ ID NO: 1819420 - DNA, 25 bp, Homo sapien
tttctcatcagggaggtagttgggg

SEQ ID NO: 1819421 - DNA, 25 bp, Homo sapien
gggggcacgcatgtcattgcttcct

SEQ ID NO: 1819422 - DNA, 25 bp, Homo sapien
ggggtgggggcacgcatgtcattgc

SEQ ID NO: 1819423 - DNA, 25 bp, Homo sapien
tccttgcttctgactagcgtccctg

SEQ ID NO: 1819424 - DNA, 25 bp, Homo sapien
ctcccatctggcctggtaggccact

SEQ ID NO: 1819425 - DNA, 25 bp, Homo sapien
cttttccctctcctggggtgccctg

SEQ ID NO: 1819426 - DNA, 25 bp, Homo sapien
tggctcccatctggcctggtaggcc

SEQ ID NO: 1819427 - DNA, 25 bp, Homo sapien
cccatctggcctggtaggccactga

SEQ ID NO: 1819428 - DNA, 25 bp, Homo sapien
gctctagcgcgaccagattccattc

SEQ ID NO: 1819429 - DNA, 25 bp, Homo sapien
ggcccacggcagttcagtattttga

SEQ ID NO: 1819430 - DNA, 25 bp, Homo sapien
atgctgctctagcgcgaccagattc

SEQ ID NO: 1819431 - DNA, 25 bp, Homo sapien
gcccatgccgatggcccacggcagt

SEQ ID NO: 1819432 - DNA, 25 bp, Homo sapien
cgaggacctcggagtaagagtttgg

SEQ ID NO: 1819433 - DNA, 25 bp, Homo sapien
acctcggagtaagagtttgggctgt

SEQ ID NO: 1819434 - DNA, 25 bp, Homo sapien
tagggcgaggacctcggagtaagag

SEQ ID NO: 1819435 - DNA, 25 bp, Homo sapien
ctgtagggcgaggacctcggagtaa

SEQ ID NO: 1819436 - DNA, 25 bp, Homo sapien
aggggagatgcacgcacagctgcac

SEQ ID NO: 1819437 - DNA, 25 bp, Homo sapien
gcaggggagatgcacgcacagctgc

SEQ ID NO: 1819438 - DNA, 25 bp, Homo sapien
ggagatgcacgcacagctgcacaga

SEQ ID NO: 1819439 - DNA, 25 bp, Homo sapien
ctgcaggggagatgcacgcacagct

SEQ ID NO: 1819440 - DNA, 25 bp, Homo sapien
catggggtatgaccaagctcatcaa

SEQ ID NO: 1819441 - DNA, 25 bp, Homo sapien
cacaggactctggatatgaactact

SEQ ID NO: 1819442 - DNA, 25 bp, Homo sapien
cctgcatgactaggtgatgccgcca

SEQ ID NO: 1819443 - DNA, 25 bp, Homo sapien
acacttcgatgttcccacaggactc

SEQ ID NO: 1819444 - DNA, 25 bp, Homo sapien
tcttgggcagccagtgcttgggcct

SEQ ID NO: 1819445 - DNA, 25 bp, Homo sapien
gggcctatgcccttcaaaggcttga

SEQ ID NO: 1819446 - DNA, 25 bp, Homo sapien
gcagatgctaccagcagagaagggc

SEQ ID NO: 1819447 - DNA, 25 bp, Homo sapien
gactttgcctctccagagcttctga

SEQ ID NO: 1819448 - DNA, 25 bp, Homo sapien
agggagccactcacgtttaccacct

SEQ ID NO: 1819449 - DNA, 25 bp, Homo sapien
cagggagccactcacgtttaccacc

SEQ ID NO: 1819450 - DNA, 25 bp, Homo sapien
ccactcacgtttaccacctgcagaa

SEQ ID NO: 1819451 - DNA, 25 bp, Homo sapien
agccactcacgtttaccacctgcag

SEQ ID NO: 1819452 - DNA, 25 bp, Homo sapien
tttactcagatttagccagaaaagg

SEQ ID NO: 1819453 - DNA, 25 bp, Homo sapien
tttgagtttactcagatttagccag

SEQ ID NO: 1819454 - DNA, 25 bp, Homo sapien
gagtttactcagatttagccagaaa

SEQ ID NO: 1819455 - DNA, 25 bp, Homo sapien
tcttttgagtttactcagatttagc

SEQ ID NO: 1819456 - DNA, 25 bp, Homo sapien
cccatctccgtttaacctatttgca

SEQ ID NO: 1819457 - DNA, 25 bp, Homo sapien
aaaagagaactagaactcccatctc

SEQ ID NO: 1819458 - DNA, 25 bp, Homo sapien
aacctatttgcaactctgccaaggc

SEQ ID NO: 1819459 - DNA, 25 bp, Homo sapien
gagaactagaactcccatctccgtt

SEQ ID NO: 1819460 - DNA, 25 bp, Homo sapien
gcaggtcaaaaaggattctataaag

SEQ ID NO: 1819461 - DNA, 25 bp, Homo sapien
atacaatggtgctgtctttcagcag

SEQ ID NO: 1819462 - DNA, 25 bp, Homo sapien
tataaagactaatggtagacaaggg

SEQ ID NO: 1819463 - DNA, 25 bp, Homo sapien
actgaggaggattcatgaaagtaaa

SEQ ID NO: 1819464 - DNA, 25 bp, Homo sapien
tgactccggagtcaacgctcttcat

SEQ ID NO: 1819465 - DNA, 25 bp, Homo sapien
gagtcaacgctcttcatcactatga

SEQ ID NO: 1819466 - DNA, 25 bp, Homo sapien
tcccttggtgactccggagtcaacg

SEQ ID NO: 1819467 - DNA, 25 bp, Homo sapien
ttcatcactatgacggcgagggcga

SEQ ID NO: 1819468 - DNA, 25 bp, Homo sapien
ttcacagttgttgcctccaggaaat

SEQ ID NO: 1819469 - DNA, 25 bp, Homo sapien
tggcccatctccctttcactgggtt

SEQ ID NO: 1819470 - DNA, 25 bp, Homo sapien
tgggtttgccccgactccttcacag

SEQ ID NO: 1819471 - DNA, 25 bp, Homo sapien
tctccccagtcacacgtgccaattc

SEQ ID NO: 1819472 - DNA, 25 bp, Homo sapien
gacggactatgatgcagtactctga

SEQ ID NO: 1819473 - DNA, 25 bp, Homo sapien
gaaaacacgaaagatggctcccagt

SEQ ID NO: 1819474 - DNA, 25 bp, Homo sapien
ggttattgccaggttcggattgtcg

SEQ ID NO: 1819475 - DNA, 25 bp, Homo sapien
gaaatgccacaagaggctgttccta

SEQ ID NO: 1819476 - DNA, 25 bp, Homo sapien
caacatgcctagcagtttgagaggg

SEQ ID NO: 1819477 - DNA, 25 bp, Homo sapien
actgaaatgtgggtgagaaggcaac

SEQ ID NO: 1819478 - DNA, 25 bp, Homo sapien
tgaggtcatgtctgtcaagcagaaa

SEQ ID NO: 1819479 - DNA, 25 bp, Homo sapien
ccatgcctggtcaagtctgcaggtc

SEQ ID NO: 1819480 - DNA, 25 bp, Homo sapien
ggcatctttggatgccaaagggttt

SEQ ID NO: 1819481 - DNA, 25 bp, Homo sapien
ctttggatgccaaagggttttggat

SEQ ID NO: 1819482 - DNA, 25 bp, Homo sapien
catctttggatgccaaagggttttg

SEQ ID NO: 1819483 - DNA, 25 bp, Homo sapien
ctggcatctttggatgccaaagggt

SEQ ID NO: 1819484 - DNA, 25 bp, Homo sapien
caaatactttcgagggagaggaagc

SEQ ID NO: 1819485 - DNA, 25 bp, Homo sapien
caagtgaggatttgctgcacaccgt

SEQ ID NO: 1819486 - DNA, 25 bp, Homo sapien
gatgaccacagtttcacgagcacct

SEQ ID NO: 1819487 - DNA, 25 bp, Homo sapien
tgctgggaaagcacgctgtaacacg

SEQ ID NO: 1819488 - DNA, 25 bp, Homo sapien
tgaacagttaatgagtaccccagtg

SEQ ID NO: 1819489 - DNA, 25 bp, Homo sapien
tatagccgtaacctgctttaaggca

SEQ ID NO: 1819490 - DNA, 25 bp, Homo sapien
tccattgctctgagtgtacggctca

SEQ ID NO: 1819491 - DNA, 25 bp, Homo sapien
tatgtcctgaattaatgcggtgggt

SEQ ID NO: 1819492 - DNA, 25 bp, Homo sapien
taagcgtgtgactgttatctcgtga

SEQ ID NO: 1819493 - DNA, 25 bp, Homo sapien
gcacaggtgtacaccgtggcaggat

SEQ ID NO: 1819494 - DNA, 25 bp, Homo sapien
gattgaacatcttcctaagcgtgtg

SEQ ID NO: 1819495 - DNA, 25 bp, Homo sapien
ggctaccatgtatggtggcacaggt

SEQ ID NO: 1819496 - DNA, 25 bp, Homo sapien
ctctaggtctggtgcccctgcctcc

SEQ ID NO: 1819497 - DNA, 25 bp, Homo sapien
gcgggcccatctgcccattccctag

SEQ ID NO: 1819498 - DNA, 25 bp, Homo sapien
ctcctctaggtctggtgcccctgcc

SEQ ID NO: 1819499 - DNA, 25 bp, Homo sapien
tccctagattttcaaatggtccctg

SEQ ID NO: 1819500 - DNA, 25 bp, Homo sapien
agattccattctttcccacgggcca

SEQ ID NO: 1819501 - DNA, 25 bp, Homo sapien
tccaggtcccctgtgagcagattcc

SEQ ID NO: 1819502 - DNA, 25 bp, Homo sapien
gattccattctttcccacgggccat

SEQ ID NO: 1819503 - DNA, 25 bp, Homo sapien
gtcccctgtgagcagattccattct

SEQ ID NO: 1819504 - DNA, 25 bp, Homo sapien
taccatgaatcccaatacctgggtg

SEQ ID NO: 1819505 - DNA, 25 bp, Homo sapien
tgaatcccaatacctgggtgaaagt

SEQ ID NO: 1819506 - DNA, 25 bp, Homo sapien
tcgagtcgccccttgttaccatgaa

SEQ ID NO: 1819507 - DNA, 25 bp, Homo sapien
ctagctcctcgagggtcgagtcgcc

SEQ ID NO: 1819508 - DNA, 25 bp, Homo sapien
attataattgtctgccgggcacagt

SEQ ID NO: 1819509 - DNA, 25 bp, Homo sapien
aaaaattataattgtctgccgggca

SEQ ID NO: 1819510 - DNA, 25 bp, Homo sapien
aaattataattgtctgccgggcaca

SEQ ID NO: 1819511 - DNA, 25 bp, Homo sapien
aaaattataattgtctgccgggcac

SEQ ID NO: 1819512 - DNA, 25 bp, Homo sapien
tgctagtcctggcagtgcaagtgca

SEQ ID NO: 1819513 - DNA, 25 bp, Homo sapien
gtgatcaggcaaaccttggcactgc

SEQ ID NO: 1819514 - DNA, 25 bp, Homo sapien
aaatgctcttccctgtctagccaag

SEQ ID NO: 1819515 - DNA, 25 bp, Homo sapien
tggcctggaaacataccaatgcatc

SEQ ID NO: 1819516 - DNA, 25 bp, Homo sapien
agctgcttggtaggcctcctaatgg

SEQ ID NO: 1819517 - DNA, 25 bp, Homo sapien
cctccccatcttctgaatttgagaa

SEQ ID NO: 1819518 - DNA, 25 bp, Homo sapien
ccatcttctgaatttgagaacacct

SEQ ID NO: 1819519 - DNA, 25 bp, Homo sapien
tgagaacacctttattcaaattaag

SEQ ID NO: 1819520 - DNA, 25 bp, Homo sapien
cagactgtttgagagctatttgccc

SEQ ID NO: 1819521 - DNA, 25 bp, Homo sapien
ggctccagctggtctggacataaaa

SEQ ID NO: 1819522 - DNA, 25 bp, Homo sapien
gaagccttgttaattgtctggggta

SEQ ID NO: 1819523 - DNA, 25 bp, Homo sapien
ctggtctggacataaaaggcctctc

SEQ ID NO: 1819524 - DNA, 25 bp, Homo sapien
taaaattcaactactggtgactgga

SEQ ID NO: 1819525 - DNA, 25 bp, Homo sapien
gatatagcgggagaaatgatggcac

SEQ ID NO: 1819526 - DNA, 25 bp, Homo sapien
gagtaccttactatcctcatggctt

SEQ ID NO: 1819527 - DNA, 25 bp, Homo sapien
gctccactgctaaaggacctcataa

SEQ ID NO: 1819528 - DNA, 25 bp, Homo sapien
tggacggtgactttaacctctgacg

SEQ ID NO: 1819529 - DNA, 25 bp, Homo sapien
tatcagaccacgcaggagatcatgc

SEQ ID NO: 1819530 - DNA, 25 bp, Homo sapien
tactcttgcggatgttatcagacca

SEQ ID NO: 1819531 - DNA, 25 bp, Homo sapien
gaagcacaagtcaaggtgatccttg

SEQ ID NO: 1819532 - DNA, 25 bp, Homo sapien
gggaatatgtcgaagtttaaagctc

SEQ ID NO: 1819533 - DNA, 25 bp, Homo sapien
tcaaggggaatatgtcgaagtttaa

SEQ ID NO: 1819534 - DNA, 25 bp, Homo sapien
atcaaggggaatatgtcgaagttta

SEQ ID NO: 1819535 - DNA, 25 bp, Homo sapien
gaatatgtcgaagtttaaagctctt

SEQ ID NO: 1819536 - DNA, 25 bp, Homo sapien
tctcttggctttattcactagggtt

SEQ ID NO: 1819537 - DNA, 25 bp, Homo sapien
catctcttatcctcctgacagcata

SEQ ID NO: 1819538 - DNA, 25 bp, Homo sapien
aatttctacaggatcctttacattt

SEQ ID NO: 1819539 - DNA, 25 bp, Homo sapien
tgtcgacgaattactccaaggtctc

SEQ ID NO: 1819540 - DNA, 25 bp, Homo sapien
gctcttcagtgcttgaggttctgct

SEQ ID NO: 1819541 - DNA, 25 bp, Homo sapien
tctgtcattagatctcaagtgccca

SEQ ID NO: 1819542 - DNA, 25 bp, Homo sapien
gcaggcagtaacgaaagctcttcag

SEQ ID NO: 1819543 - DNA, 25 bp, Homo sapien
agtgcccacaggttctttttaccat

SEQ ID NO: 1819544 - DNA, 25 bp, Homo sapien
ggttattgaaatttatgcctcctaa

SEQ ID NO: 1819545 - DNA, 25 bp, Homo sapien
tagatctacgcatataagcaggtga

SEQ ID NO: 1819546 - DNA, 25 bp, Homo sapien
ggctgaaattgtgtgagaagagaat

SEQ ID NO: 1819547 - DNA, 25 bp, Homo sapien
tattcgggatgatctcaattatgga

SEQ ID NO: 1819548 - DNA, 25 bp, Homo sapien
tggtgagctgaaacagcaccactgc

SEQ ID NO: 1819549 - DNA, 25 bp, Homo sapien
cctgggcgacagagtgagactccat

SEQ ID NO: 1819550 - DNA, 25 bp, Homo sapien
gttgtggtgagctgaaacagcacca

SEQ ID NO: 1819551 - DNA, 25 bp, Homo sapien
actccagcctgggcgacagagtgag

SEQ ID NO: 1819552 - DNA, 25 bp, Homo sapien
gaggattgtaaacccgcagcagtag

SEQ ID NO: 1819553 - DNA, 25 bp, Homo sapien
gagttccaaagacaagacatcctgg

SEQ ID NO: 1819554 - DNA, 25 bp, Homo sapien
cacaccaagggttttgccaagctgg

SEQ ID NO: 1819555 - DNA, 25 bp, Homo sapien
cagtagtatccaatgtaggtcccag

SEQ ID NO: 1819556 - DNA, 25 bp, Homo sapien
cgatggtcgttcgatctgaagcaaa

SEQ ID NO: 1819557 - DNA, 25 bp, Homo sapien
caaaattggtcaaaaagctgcagcg

SEQ ID NO: 1819558 - DNA, 25 bp, Homo sapien
gaagttgtcaccgaccaattgagag

SEQ ID NO: 1819559 - DNA, 25 bp, Homo sapien
gacaacttgcgacaactcatttggc

SEQ ID NO: 1819560 - DNA, 25 bp, Homo sapien
gagataacacttgtgcgcgactgga

SEQ ID NO: 1819561 - DNA, 25 bp, Homo sapien
cagcatcgcccggtacagagataac

SEQ ID NO: 1819562 - DNA, 25 bp, Homo sapien
taattgtaggcgctgaaacgcttgc

SEQ ID NO: 1819563 - DNA, 25 bp, Homo sapien
cttgtgcgcgactggaggctgccat

SEQ ID NO: 1819564 - DNA, 25 bp, Homo sapien
cattcgagggacgtgcagttgcatc

SEQ ID NO: 1819565 - DNA, 25 bp, Homo sapien
gcctgtgcggaaaccacgaacgaaa

SEQ ID NO: 1819566 - DNA, 25 bp, Homo sapien
aagctcctggcggacggatatcgga

SEQ ID NO: 1819567 - DNA, 25 bp, Homo sapien
cgaaataaaatgctgcggctcggct

SEQ ID NO: 1819568 - DNA, 25 bp, Homo sapien
actgtccatactgttcagaggtctt

SEQ ID NO: 1819569 - DNA, 25 bp, Homo sapien
cagatgctttgtgtaggtctttgaa

SEQ ID NO: 1819570 - DNA, 25 bp, Homo sapien
gagaacttgaactgaggatggtgtg

SEQ ID NO: 1819571 - DNA, 25 bp, Homo sapien
cagaggtcttggtgatgtgtcttgc

SEQ ID NO: 1819572 - DNA, 25 bp, Homo sapien
tggcactgagagtggccatttttcc

SEQ ID NO: 1819573 - DNA, 25 bp, Homo sapien
ccctggcctggtgcgagcccaatga

SEQ ID NO: 1819574 - DNA, 25 bp, Homo sapien
cttcccggccgcactgtttcctctt

SEQ ID NO: 1819575 - DNA, 25 bp, Homo sapien
ccaatgaggggacattcgggctgct

SEQ ID NO: 1819576 - DNA, 25 bp, Homo sapien
agcatatagtgtatataagaatcta

SEQ ID NO: 1819577 - DNA, 25 bp, Homo sapien
tatagtgtatataagaatctacctg

SEQ ID NO: 1819578 - DNA, 25 bp, Homo sapien
gaagcatatagtgtatataagaatc

SEQ ID NO: 1819579 - DNA, 25 bp, Homo sapien
catatagtgtatataagaatctacc

SEQ ID NO: 1819580 - DNA, 25 bp, Homo sapien
cattgggattttagtaggatgctga

SEQ ID NO: 1819581 - DNA, 25 bp, Homo sapien
tcgatcctctcatttatcattggga

SEQ ID NO: 1819582 - DNA, 25 bp, Homo sapien
catataagatctaaccacaagaagc

SEQ ID NO: 1819583 - DNA, 25 bp, Homo sapien
gaagctggtgcttaacctcgatcct

SEQ ID NO: 1819584 - DNA, 25 bp, Homo sapien
tctgaaagtgaaaagttgcttctgc

SEQ ID NO: 1819585 - DNA, 25 bp, Homo sapien
acaaatgtgtttgcggccacgctgg

SEQ ID NO: 1819586 - DNA, 25 bp, Homo sapien
cccacgactctgtttcttagacaaa

SEQ ID NO: 1819587 - DNA, 25 bp, Homo sapien
catccttgtgtcagctcgggagagc

SEQ ID NO: 1819588 - DNA, 25 bp, Homo sapien
ttactcttagctcctctgtcgtact

SEQ ID NO: 1819589 - DNA, 25 bp, Homo sapien
gactaccatcagctggttctagttt

SEQ ID NO: 1819590 - DNA, 25 bp, Homo sapien
tgagggctgtccatactcagactac

SEQ ID NO: 1819591 - DNA, 25 bp, Homo sapien
tctgatttactgctggctttatagt

SEQ ID NO: 1819592 - DNA, 25 bp, Homo sapien
tgccagtgtcatcagatggtcatca

SEQ ID NO: 1819593 - DNA, 25 bp, Homo sapien
ttaaagcttcgagttccaggagcag

SEQ ID NO: 1819594 - DNA, 25 bp, Homo sapien
ccatctgggtgacctgatgccctca

SEQ ID NO: 1819595 - DNA, 25 bp, Homo sapien
gcagggtttgctccgtcatcatgaa

SEQ ID NO: 1819596 - DNA, 25 bp, Homo sapien
tgacttccacttgatgggttccact

SEQ ID NO: 1819597 - DNA, 25 bp, Homo sapien
ctgtgttgacttccacttgatgggt

SEQ ID NO: 1819598 - DNA, 25 bp, Homo sapien
tgatgggttccactggacgttgata

SEQ ID NO: 1819599 - DNA, 25 bp, Homo sapien
tggacgttgatattgtcctgcacat

SEQ ID NO: 1819600 - DNA, 25 bp, Homo sapien
taacaaaggtttgatatgaagatgg

SEQ ID NO: 1819601 - DNA, 25 bp, Homo sapien
ctctagttcccctggtgctattatt

SEQ ID NO: 1819602 - DNA, 25 bp, Homo sapien
tcttgttcacatttgtctctagttc

SEQ ID NO: 1819603 - DNA, 25 bp, Homo sapien
gccaatagtgcaataacaaaggttt

SEQ ID NO: 1819604 - DNA, 25 bp, Homo sapien
tgctcccatctgattctttgtgatc

SEQ ID NO: 1819605 - DNA, 25 bp, Homo sapien
ttacaaagcccatatccgtttcaat

SEQ ID NO: 1819606 - DNA, 25 bp, Homo sapien
aagcccatatccgtttcaattctgc

SEQ ID NO: 1819607 - DNA, 25 bp, Homo sapien
tctgctcccatctgattctttgtga

SEQ ID NO: 1819608 - DNA, 25 bp, Homo sapien
ggaataaaggttcccaccatcacac

SEQ ID NO: 1819609 - DNA, 25 bp, Homo sapien
cataactttatattctgctgcaagc

SEQ ID NO: 1819610 - DNA, 25 bp, Homo sapien
gctgcaagctgcttttaattattca

SEQ ID NO: 1819611 - DNA, 25 bp, Homo sapien
gagtagctaggaataaaggttccca

SEQ ID NO: 1819612 - DNA, 25 bp, Homo sapien
caccgcaatggatgcttagattttg

SEQ ID NO: 1819613 - DNA, 25 bp, Homo sapien
cactgcattcgatgtggtgacctca

SEQ ID NO: 1819614 - DNA, 25 bp, Homo sapien
ggttcaccgaacgacacagaagtca

SEQ ID NO: 1819615 - DNA, 25 bp, Homo sapien
ccaggtccagtttatctaagtcaga

SEQ ID NO: 1819616 - DNA, 25 bp, Homo sapien
gagtatactgtacctccctaacctg

SEQ ID NO: 1819617 - DNA, 25 bp, Homo sapien
tgagtatactgtacctccctaacct

SEQ ID NO: 1819618 - DNA, 25 bp, Homo sapien
ctttctgtcaagatgctaatcatcc

SEQ ID NO: 1819619 - DNA, 25 bp, Homo sapien
tctgtcaagatgctaatcatcccct

SEQ ID NO: 1819620 - DNA, 25 bp, Homo sapien
aagatgctaatcatcccctttaccc

SEQ ID NO: 1819621 - DNA, 25 bp, Homo sapien
tgtcaagatgctaatcatccccttt

SEQ ID NO: 1819622 - DNA, 25 bp, Homo sapien
cagagaagatcaggctagagaatgc

SEQ ID NO: 1819623 - DNA, 25 bp, Homo sapien
gataggataaccaggatcaggagct

SEQ ID NO: 1819624 - DNA, 25 bp, Homo sapien
cagttgaaacttggcgagataggac

SEQ ID NO: 1819625 - DNA, 25 bp, Homo sapien
gaagccacagaaactaagcacagtt

SEQ ID NO: 1819626 - DNA, 25 bp, Homo sapien
ttctacaagcagtatgtgggccgct

SEQ ID NO: 1819627 - DNA, 25 bp, Homo sapien
tggtcacgacctggcagaactttga

SEQ ID NO: 1819628 - DNA, 25 bp, Homo sapien
tcacatgctgagagcgcacacgtct

SEQ ID NO: 1819629 - DNA, 25 bp, Homo sapien
tctacaggcgtgaccagatcgactc

SEQ ID NO: 1819630 - DNA, 25 bp, Homo sapien
tcaccagatgcacacttgtgtgtgg

SEQ ID NO: 1819631 - DNA, 25 bp, Homo sapien
ccagatgcacacttgtgtgtgggcc

SEQ ID NO: 1819632 - DNA, 25 bp, Homo sapien
tctccctggtggcaccttgtcgtgt

SEQ ID NO: 1819633 - DNA, 25 bp, Homo sapien
ccttgtcgtgtttcaccagatgcac

SEQ ID NO: 1819634 - DNA, 25 bp, Homo sapien
cgaggcttcgtcctaaaatctgctt

SEQ ID NO: 1819635 - DNA, 25 bp, Homo sapien
tgtaaaagactacactcttgctatt

SEQ ID NO: 1819636 - DNA, 25 bp, Homo sapien
tcattgtcttcgctccgaggcttcg

SEQ ID NO: 1819637 - DNA, 25 bp, Homo sapien
gaccaagaatgcaccctgtactggg

SEQ ID NO: 1819638 - DNA, 25 bp, Homo sapien
tgtcctaatagctgccccaggtatg

SEQ ID NO: 1819639 - DNA, 25 bp, Homo sapien
aagcccgggtgtcctaatagctgcc

SEQ ID NO: 1819640 - DNA, 25 bp, Homo sapien
tgtcaagcccgggtgtcctaatagc

SEQ ID NO: 1819641 - DNA, 25 bp, Homo sapien
tagctgccccaggtatggccccttt

SEQ ID NO: 1819642 - DNA, 25 bp, Homo sapien
ttgctatctgtagttttcactgtgg

SEQ ID NO: 1819643 - DNA, 25 bp, Homo sapien
acatcggctaacgtccctgcttttc

SEQ ID NO: 1819644 - DNA, 25 bp, Homo sapien
ggattctgaaaaacatcggctaacg

SEQ ID NO: 1819645 - DNA, 25 bp, Homo sapien
gagcagttacccacgttgttaccaa

SEQ ID NO: 1819646 - DNA, 25 bp, Homo sapien
tggagatccaccttgtcagcacttg

SEQ ID NO: 1819647 - DNA, 25 bp, Homo sapien
ttgcaaaggctctttgtctttggag

SEQ ID NO: 1819648 - DNA, 25 bp, Homo sapien
gatacgttgctttgtaattgcccca

SEQ ID NO: 1819649 - DNA, 25 bp, Homo sapien
gatttcgtatttgttgatacgttgc

SEQ ID NO: 1819650 - DNA, 25 bp, Homo sapien
gctggaagcttcgtgggcagtttta

SEQ ID NO: 1819651 - DNA, 25 bp, Homo sapien
gggctggaagcttcgtgggcagttt

SEQ ID NO: 1819652 - DNA, 25 bp, Homo sapien
ctggaagcttcgtgggcagttttaa

SEQ ID NO: 1819653 - DNA, 25 bp, Homo sapien
tggaagcttcgtgggcagttttaaa

SEQ ID NO: 1819654 - DNA, 25 bp, Homo sapien
ggatccttagactgagtgattgtga

SEQ ID NO: 1819655 - DNA, 25 bp, Homo sapien
tgagtggtgaccgttttcaggctga

SEQ ID NO: 1819656 - DNA, 25 bp, Homo sapien
gatttctggatccttagactgagtg

SEQ ID NO: 1819657 - DNA, 25 bp, Homo sapien
aagtcgtagtgtcttcaccgttgat

SEQ ID NO: 1819658 - DNA, 25 bp, Homo sapien
tcgtaatccgaaaactcgaaatcag

SEQ ID NO: 1819659 - DNA, 25 bp, Homo sapien
gtatacatgtgggattgattccagg

SEQ ID NO: 1819660 - DNA, 25 bp, Homo sapien
tacctggtagtacagattgcatatc

SEQ ID NO: 1819661 - DNA, 25 bp, Homo sapien
gagatactcaagctgtaccaattaa

SEQ ID NO: 1819662 - DNA, 25 bp, Homo sapien
tcacgtggtgaggtccacatggcct

SEQ ID NO: 1819663 - DNA, 25 bp, Homo sapien
gctccaaggaactgttgaatgtgcc

SEQ ID NO: 1819664 - DNA, 25 bp, Homo sapien
ttaacgaggtacagcaagagatgga

SEQ ID NO: 1819665 - DNA, 25 bp, Homo sapien
cactgttcactagctgtttgaggga

SEQ ID NO: 1819666 - DNA, 25 bp, Homo sapien
gaagatagattggatggagcagaga

SEQ ID NO: 1819667 - DNA, 25 bp, Homo sapien
aatgtttggatgggtgaatgcattt

SEQ ID NO: 1819668 - DNA, 25 bp, Homo sapien
gaatgtttggatgggtgaatgcatt

SEQ ID NO: 1819669 - DNA, 25 bp, Homo sapien
ggaagatagattggatggagcagag

SEQ ID NO: 1819670 - DNA, 25 bp, Homo sapien
catcgttctgtaaaggatatgagat

SEQ ID NO: 1819671 - DNA, 25 bp, Homo sapien
gatagtgacatctgtagatacagat

SEQ ID NO: 1819672 - DNA, 25 bp, Homo sapien
tctgtaaaggatatgagatagtgac

SEQ ID NO: 1819673 - DNA, 25 bp, Homo sapien
aatttaactgcaacatcgttctgta

SEQ ID NO: 1819674 - DNA, 25 bp, Homo sapien
ggtgaaaatggctccctcagggcat

SEQ ID NO: 1819675 - DNA, 25 bp, Homo sapien
ggctggtgaaaatggctccctcagg

SEQ ID NO: 1819676 - DNA, 25 bp, Homo sapien
aatggctccctcagggcattgctca

SEQ ID NO: 1819677 - DNA, 25 bp, Homo sapien
gaaaatggctccctcagggcattgc

SEQ ID NO: 1819678 - DNA, 25 bp, Homo sapien
gaaaggatattcctgtccctagccc

SEQ ID NO: 1819679 - DNA, 25 bp, Homo sapien
aaggatattcctgtccctagccctg

SEQ ID NO: 1819680 - DNA, 25 bp, Homo sapien
ggaaaggatattcctgtccctagcc

SEQ ID NO: 1819681 - DNA, 25 bp, Homo sapien
ggatattcctgtccctagccctgtc

SEQ ID NO: 1819682 - DNA, 25 bp, Homo sapien
ctcgccttggtaagggtctcccctg

SEQ ID NO: 1819683 - DNA, 25 bp, Homo sapien
ttggtaagggtctcccctgctgttg

SEQ ID NO: 1819684 - DNA, 25 bp, Homo sapien
gccttggtaagggtctcccctgctg

SEQ ID NO: 1819685 - DNA, 25 bp, Homo sapien
tggtaagggtctcccctgctgttgg

SEQ ID NO: 1819686 - DNA, 25 bp, Homo sapien
cagatccgtcgtacaaattatgctt

SEQ ID NO: 1819687 - DNA, 25 bp, Homo sapien
cctgaagctgaatgggtttactttg

SEQ ID NO: 1819688 - DNA, 25 bp, Homo sapien
gattgagggcggagatgagacattg

SEQ ID NO: 1819689 - DNA, 25 bp, Homo sapien
tggcatcagcggaggccatgattga

SEQ ID NO: 1819690 - DNA, 25 bp, Homo sapien
acttccaagcagaagcctgctaaat

SEQ ID NO: 1819691 - DNA, 25 bp, Homo sapien
tcagccctgagcagttatataatcc

SEQ ID NO: 1819692 - DNA, 25 bp, Homo sapien
acctcatacacgtggataatattga

SEQ ID NO: 1819693 - DNA, 25 bp, Homo sapien
cagaagcctgctaaataaggacatg

SEQ ID NO: 1819694 - DNA, 25 bp, Homo sapien
ttgcttcagactatatctccaatcg

SEQ ID NO: 1819695 - DNA, 25 bp, Homo sapien
catccccattaacactgatggacac

SEQ ID NO: 1819696 - DNA, 25 bp, Homo sapien
cagactatatctccaatcgattttc

SEQ ID NO: 1819697 - DNA, 25 bp, Homo sapien
acctctaattctcaacccagtgtta

SEQ ID NO: 1819698 - DNA, 25 bp, Homo sapien
gtaactttacacatgccactcctgg

SEQ ID NO: 1819699 - DNA, 25 bp, Homo sapien
tgtggcccttagcaggacagacctg

SEQ ID NO: 1819700 - DNA, 25 bp, Homo sapien
gatgggtaatgcgtagctctctgaa

SEQ ID NO: 1819701 - DNA, 25 bp, Homo sapien
tctgaaatgctctgtgtacctctct

SEQ ID NO: 1819702 - DNA, 25 bp, Homo sapien
caatcagctggatgattccccaagg

SEQ ID NO: 1819703 - DNA, 25 bp, Homo sapien
caccagggcgacttgagaattgagc

SEQ ID NO: 1819704 - DNA, 25 bp, Homo sapien
cagcagatgcgtactggtggttgcc

SEQ ID NO: 1819705 - DNA, 25 bp, Homo sapien
tggttgccatggagatcgctaatac

SEQ ID NO: 1819706 - DNA, 25 bp, Homo sapien
tgtatattaatgacgacgcatgact

SEQ ID NO: 1819707 - DNA, 25 bp, Homo sapien
ctggtgtagtggtgcttctggagcc

SEQ ID NO: 1819708 - DNA, 25 bp, Homo sapien
gacgacgcatgactaataggattgg

SEQ ID NO: 1819709 - DNA, 25 bp, Homo sapien
tatccctggaatagatgtatattaa

SEQ ID NO: 1819710 - DNA, 25 bp, Homo sapien
tgacccagctctggtttctgccaca

SEQ ID NO: 1819711 - DNA, 25 bp, Homo sapien
tgccacagctgcattggaaggaatt

SEQ ID NO: 1819712 - DNA, 25 bp, Homo sapien
ggcccacaaggagccatacgcacat

SEQ ID NO: 1819713 - DNA, 25 bp, Homo sapien
gaattgctggagctctgactgacca

SEQ ID NO: 1819714 - DNA, 25 bp, Homo sapien
tctgcactgacaggcttgtggaggc

SEQ ID NO: 1819715 - DNA, 25 bp, Homo sapien
ctgggtgccaacgttgtaggaagaa

SEQ ID NO: 1819716 - DNA, 25 bp, Homo sapien
ggcgagctaaactccataaccccat

SEQ ID NO: 1819717 - DNA, 25 bp, Homo sapien
acgttgtaggaagaagctgtctgca

SEQ ID NO: 1819718 - DNA, 25 bp, Homo sapien
tagcagcatttcgatcatacttagc

SEQ ID NO: 1819719 - DNA, 25 bp, Homo sapien
taagtcttgcggtaactttctagca

SEQ ID NO: 1819720 - DNA, 25 bp, Homo sapien
gatcatacttagctttaagttctcc

SEQ ID NO: 1819721 - DNA, 25 bp, Homo sapien
gtgcagaattaagtaagtcttgcgg

SEQ ID NO: 1819722 - DNA, 25 bp, Homo sapien
agaggctgatgtggagatgcaccac

SEQ ID NO: 1819723 - DNA, 25 bp, Homo sapien
ccaatgttataagcatgcccttgcg

SEQ ID NO: 1819724 - DNA, 25 bp, Homo sapien
tatatagccttacactctgcagacc

SEQ ID NO: 1819725 - DNA, 25 bp, Homo sapien
aagtatttatcgagcccctaccatg

SEQ ID NO: 1819726 - DNA, 25 bp, Homo sapien
tgtctcccaatttgcttcctttggc

SEQ ID NO: 1819727 - DNA, 25 bp, Homo sapien
gaacttcaggatcattgtctcccaa

SEQ ID NO: 1819728 - DNA, 25 bp, Homo sapien
tgtagtttgaacttcaggatcattg

SEQ ID NO: 1819729 - DNA, 25 bp, Homo sapien
cgtttgctgtagtttgaacttcagg

SEQ ID NO: 1819730 - DNA, 25 bp, Homo sapien
cagaaatagaaaactggtacaaagc

SEQ ID NO: 1819731 - DNA, 25 bp, Homo sapien
gaaatagaaaactggtacaaagcca

SEQ ID NO: 1819732 - DNA, 25 bp, Homo sapien
aaatagaaaactggtacaaagccat

SEQ ID NO: 1819733 - DNA, 25 bp, Homo sapien
ctgcagaaatagaaaactggtacaa

SEQ ID NO: 1819734 - DNA, 25 bp, Homo sapien
gcctgagagcattgaacaatcatgt

SEQ ID NO: 1819735 - DNA, 25 bp, Homo sapien
aatggctgaagctataggatgcgat

SEQ ID NO: 1819736 - DNA, 25 bp, Homo sapien
ctcaactttgcacttgaggagcaga

SEQ ID NO: 1819737 - DNA, 25 bp, Homo sapien
gtttctcaactttgcacttgaggag

SEQ ID NO: 1819738 - DNA, 25 bp, Homo sapien
tggcctcccggctagtgggtcagac

SEQ ID NO: 1819739 - DNA, 25 bp, Homo sapien
ctctcagtggcctcccggctagtgg

SEQ ID NO: 1819740 - DNA, 25 bp, Homo sapien
ctagtgggtcagactgcggacacgc

SEQ ID NO: 1819741 - DNA, 25 bp, Homo sapien
ctcccggctagtgggtcagactgcg

SEQ ID NO: 1819742 - DNA, 25 bp, Homo sapien
ggttcacgaaggaatccagaggtca

SEQ ID NO: 1819743 - DNA, 25 bp, Homo sapien
cacattaacttgagcagtgcctgac

SEQ ID NO: 1819744 - DNA, 25 bp, Homo sapien
gttcgagtctcaaatgccatccagg

SEQ ID NO: 1819745 - DNA, 25 bp, Homo sapien
cctaattcagaaggccatgggaggc

SEQ ID NO: 1819746 - DNA, 25 bp, Homo sapien
tatagaagtttcatgtgctcggacc

SEQ ID NO: 1819747 - DNA, 25 bp, Homo sapien
taccaatttggtttgccccattagc

SEQ ID NO: 1819748 - DNA, 25 bp, Homo sapien
ctcggaccagcggaagtatgttttt

SEQ ID NO: 1819749 - DNA, 25 bp, Homo sapien
ggacagcctgcatcattgttccaca

SEQ ID NO: 1819750 - DNA, 25 bp, Homo sapien
gttgaccctgccgtccaacggcata

SEQ ID NO: 1819751 - DNA, 25 bp, Homo sapien
ttttgtgagtggaatcacagcaata

SEQ ID NO: 1819752 - DNA, 25 bp, Homo sapien
tttgtcagagggactgcgttgaccc

SEQ ID NO: 1819753 - DNA, 25 bp, Homo sapien
ccaacggcatatctcctacagtcat

SEQ ID NO: 1819754 - DNA, 25 bp, Homo sapien
ttcctctcgagttggagatgcagac

SEQ ID NO: 1819755 - DNA, 25 bp, Homo sapien
tcctctcgagttggagatgcagaca

SEQ ID NO: 1819756 - DNA, 25 bp, Homo sapien
gcttcctctcgagttggagatgcag

SEQ ID NO: 1819757 - DNA, 25 bp, Homo sapien
agctgcgctcctgttggagatgtcc

SEQ ID NO: 1819758 - DNA, 25 bp, Homo sapien
cctgaacagttgtgcagttgtagag

SEQ ID NO: 1819759 - DNA, 25 bp, Homo sapien
ttgaccgattatgtagcacatggca

SEQ ID NO: 1819760 - DNA, 25 bp, Homo sapien
agttgtagaggtggcctccaaggtt

SEQ ID NO: 1819761 - DNA, 25 bp, Homo sapien
aaggttgcctctaagctccgatggg

SEQ ID NO: 1819762 - DNA, 25 bp, Homo sapien
ggtatttattcccttcaatgctgtt

SEQ ID NO: 1819763 - DNA, 25 bp, Homo sapien
tggtatttattcccttcaatgctgt

SEQ ID NO: 1819764 - DNA, 25 bp, Homo sapien
ttgatcctatgccatagaactctga

SEQ ID NO: 1819765 - DNA, 25 bp, Homo sapien
aatgaagctgcatatatgttagacc

SEQ ID NO: 1819766 - DNA, 25 bp, Homo sapien
ccaagtaaccattaagcccatccag

SEQ ID NO: 1819767 - DNA, 25 bp, Homo sapien
atctagtatcttttccaacaattct

SEQ ID NO: 1819768 - DNA, 25 bp, Homo sapien
ttccggcttttaaaggccatcctca

SEQ ID NO: 1819769 - DNA, 25 bp, Homo sapien
ctgtccttgtgaactgtcacctttt

SEQ ID NO: 1819770 - DNA, 25 bp, Homo sapien
tgtgaactgtcaccttttccggctt

SEQ ID NO: 1819771 - DNA, 25 bp, Homo sapien
tggatcacagccatgcatcatgttg

SEQ ID NO: 1819772 - DNA, 25 bp, Homo sapien
taaatatcatcagcccctaagtccc

SEQ ID NO: 1819773 - DNA, 25 bp, Homo sapien
aaaatacattcagcctatcccaagg

SEQ ID NO: 1819774 - DNA, 25 bp, Homo sapien
taaagctggtttatgtgacactctg

SEQ ID NO: 1819775 - DNA, 25 bp, Homo sapien
tttttcagtctaccagagtcttccc

SEQ ID NO: 1819776 - DNA, 25 bp, Homo sapien
tctccgcatcgcacacaggcagttt

SEQ ID NO: 1819777 - DNA, 25 bp, Homo sapien
gagggcagcagaactctccgcatcg

SEQ ID NO: 1819778 - DNA, 25 bp, Homo sapien
gaagaagctgaacatcgtcccagag

SEQ ID NO: 1819779 - DNA, 25 bp, Homo sapien
agttgctgggtatatgcttgtttgc

SEQ ID NO: 1819780 - DNA, 25 bp, Homo sapien
ggttaattcctgatgcgcttctata

SEQ ID NO: 1819781 - DNA, 25 bp, Homo sapien
aatggtcacagtaagatacttccgg

SEQ ID NO: 1819782 - DNA, 25 bp, Homo sapien
aatggtcacagtaacatacttccgg

SEQ ID NO: 1819783 - DNA, 25 bp, Homo sapien
tacttccggttaattcctgatgtgc

SEQ ID NO: 1819784 - DNA, 25 bp, Homo sapien
tacttccggttaattcctgatgcgc

SEQ ID NO: 1819785 - DNA, 25 bp, Homo sapien
aatggtcacagtaacatacttccgg

SEQ ID NO: 1819786 - DNA, 25 bp, Homo sapien
gatacttccggttaattcctgatgc

SEQ ID NO: 1819787 - DNA, 25 bp, Homo sapien
gatgcgcttctataaatggtcacag

SEQ ID NO: 1819788 - DNA, 25 bp, Homo sapien
cagtaacatacttccggtttagcaa

SEQ ID NO: 1819789 - DNA, 25 bp, Homo sapien
gtaacatacttccggtttagcaaca

SEQ ID NO: 1819790 - DNA, 25 bp, Homo sapien
taacatacttccggtttagcaacat

SEQ ID NO: 1819791 - DNA, 25 bp, Homo sapien
cacagtaacatacttccggtttagc

SEQ ID NO: 1819792 - DNA, 25 bp, Homo sapien
tgtagattcacttgcatagagtctc

SEQ ID NO: 1819793 - DNA, 25 bp, Homo sapien
cacagaggtgttcgttgtttgatga

SEQ ID NO: 1819794 - DNA, 25 bp, Homo sapien
tgatgcccagcactattcctggaga

SEQ ID NO: 1819795 - DNA, 25 bp, Homo sapien
ttgcatagagtctcaggcacccagc

SEQ ID NO: 1819796 - DNA, 25 bp, Homo sapien
acagctgtgaccactctgttggatt

SEQ ID NO: 1819797 - DNA, 25 bp, Homo sapien
gaaacacaagacgtgacttctgctc

SEQ ID NO: 1819798 - DNA, 25 bp, Homo sapien
agaaacacaagacgtgacttctgct

SEQ ID NO: 1819799 - DNA, 25 bp, Homo sapien
ggtgcctgctggcatgtccactcgg

SEQ ID NO: 1819800 - DNA, 25 bp, Homo sapien
gatatgggcgatccaggtgcctgct

SEQ ID NO: 1819801 - DNA, 25 bp, Homo sapien
ctggcctgaacgcctcctcgagata

SEQ ID NO: 1819802 - DNA, 25 bp, Homo sapien
cctgctggcatgtccactcggatga

SEQ ID NO: 1819803 - DNA, 25 bp, Homo sapien
ctgttgtgtttcacattcgacataa

SEQ ID NO: 1819804 - DNA, 25 bp, Homo sapien
ccagtaaacagttatcttcacagtg

SEQ ID NO: 1819805 - DNA, 25 bp, Homo sapien
aaacagttatcttcacagtgcaggg

SEQ ID NO: 1819806 - DNA, 25 bp, Homo sapien
cagttatcttcacagtgcaggggca

SEQ ID NO: 1819807 - DNA, 25 bp, Homo sapien
agtaaacagttatcttcacagtgca

SEQ ID NO: 1819808 - DNA, 25 bp, Homo sapien
tcacactttccgtgggaacaaaggc

SEQ ID NO: 1819809 - DNA, 25 bp, Homo sapien
tttccgtgggaacaaaggctgtctc

SEQ ID NO: 1819810 - DNA, 25 bp, Homo sapien
ctcctgtgtggtttgtcacattcag

SEQ ID NO: 1819811 - DNA, 25 bp, Homo sapien
gtggtttgtcacattcaggttcttc

SEQ ID NO: 1819812 - DNA, 25 bp, Homo sapien
gtcatagaccagatccttattccgg

SEQ ID NO: 1819813 - DNA, 25 bp, Homo sapien
tatcctcggggagacctttgtcctc

SEQ ID NO: 1819814 - DNA, 25 bp, Homo sapien
tccttattccggtcattgaatgact

SEQ ID NO: 1819815 - DNA, 25 bp, Homo sapien
ttttgagtctgggtcatagaccaga

SEQ ID NO: 1819816 - DNA, 25 bp, Homo sapien
gctactggaactgccctagccacct

SEQ ID NO: 1819817 - DNA, 25 bp, Homo sapien
tgctgctactggaactgccctagcc

SEQ ID NO: 1819818 - DNA, 25 bp, Homo sapien
actgctgctactggaactgccctag

SEQ ID NO: 1819819 - DNA, 25 bp, Homo sapien
tactggaactgccctagccaccttg

SEQ ID NO: 1819820 - DNA, 25 bp, Homo sapien
ccattatagccatccgccctgccac

SEQ ID NO: 1819821 - DNA, 25 bp, Homo sapien
ccatatccaccaccatcatggctgc

SEQ ID NO: 1819822 - DNA, 25 bp, Homo sapien
aaatccattatagccatccgccctg

SEQ ID NO: 1819823 - DNA, 25 bp, Homo sapien
caccacctccaaaatagcttccatc

SEQ ID NO: 1819824 - DNA, 25 bp, Homo sapien
ctctttggctgaaagaagcactcac

SEQ ID NO: 1819825 - DNA, 25 bp, Homo sapien
cttcacctctttggctgaaagaagc

SEQ ID NO: 1819826 - DNA, 25 bp, Homo sapien
tcacctctttggctgaaagaagcac

SEQ ID NO: 1819827 - DNA, 25 bp, Homo sapien
cctctttggctgaaagaagcactca

SEQ ID NO: 1819828 - DNA, 25 bp, Homo sapien
tctcttgctttgacagggctttcct

SEQ ID NO: 1819829 - DNA, 25 bp, Homo sapien
tttgacagggctttcctaacttcac

SEQ ID NO: 1819830 - DNA, 25 bp, Homo sapien
tcttgctttgacagggctttcctaa

SEQ ID NO: 1819831 - DNA, 25 bp, Homo sapien
catctcttgctttgacagggctttc

SEQ ID NO: 1819832 - DNA, 25 bp, Homo sapien
tgtggccattcacaggatggcattt

SEQ ID NO: 1819833 - DNA, 25 bp, Homo sapien
acaggatggcatttctgaatgacag

SEQ ID NO: 1819834 - DNA, 25 bp, Homo sapien
acggagtcatggtcgtcaaaagtta

SEQ ID NO: 1819835 - DNA, 25 bp, Homo sapien
cacggagtcatggtcgtcaaaagtt

SEQ ID NO: 1819836 - DNA, 25 bp, Homo sapien
cctccgcagtggcatagtgacaaac

SEQ ID NO: 1819837 - DNA, 25 bp, Homo sapien
cctcctccgcagtggcatagtgaca

SEQ ID NO: 1819838 - DNA, 25 bp, Homo sapien
cacctcctccgcagtggcatagtga

SEQ ID NO: 1819839 - DNA, 25 bp, Homo sapien
ctccgcagtggcatagtgacaaacc

SEQ ID NO: 1819840 - DNA, 25 bp, Homo sapien
catctcttcgattttcttgtatagg

SEQ ID NO: 1819841 - DNA, 25 bp, Homo sapien
gggctgggatagacattcaacctag

SEQ ID NO: 1819842 - DNA, 25 bp, Homo sapien
tgttttcatgctcttaaggctttat

SEQ ID NO: 1819843 - DNA, 25 bp, Homo sapien
ggaccagctatttgcacaagactag

SEQ ID NO: 1819844 - DNA, 25 bp, Homo sapien
gaatgaaggcataccctgcagtagg

SEQ ID NO: 1819845 - DNA, 25 bp, Homo sapien
ctgcagtaggttttggattctgtgt

SEQ ID NO: 1819846 - DNA, 25 bp, Homo sapien
ttgtgttatacttctcgggaatgaa

SEQ ID NO: 1819847 - DNA, 25 bp, Homo sapien
ttctgtgtttgacagatgtggctgc

SEQ ID NO: 1819848 - DNA, 25 bp, Homo sapien
ctgtgcggccaagagtttggtggtt

SEQ ID NO: 1819849 - DNA, 25 bp, Homo sapien
cagtgctttggtggagaagatgatt

SEQ ID NO: 1819850 - DNA, 25 bp, Homo sapien
ggcagcagtgctttggtggagaaga

SEQ ID NO: 1819851 - DNA, 25 bp, Homo sapien
tttggtggttggaatggagatgagg

SEQ ID NO: 1819852 - DNA, 25 bp, Homo sapien
ctcacttgaagggtgggataagatg

SEQ ID NO: 1819853 - DNA, 25 bp, Homo sapien
gcagggaagtttcacgttgctgtca

SEQ ID NO: 1819854 - DNA, 25 bp, Homo sapien
ttccttcctcgtatagctcacttga

SEQ ID NO: 1819855 - DNA, 25 bp, Homo sapien
tgcctcttcatacttatgtgtctgg

SEQ ID NO: 1819856 - DNA, 25 bp, Homo sapien
aagatggggtcagtgcctctgtgct

SEQ ID NO: 1819857 - DNA, 25 bp, Homo sapien
ggtccctgttgctgcctgtcacatc

SEQ ID NO: 1819858 - DNA, 25 bp, Homo sapien
catcctgggcattggctggaaccca

SEQ ID NO: 1819859 - DNA, 25 bp, Homo sapien
aacccagaggtctttgaagagtgac

SEQ ID NO: 1819860 - DNA, 25 bp, Homo sapien
aagacaggacctgtaagtaaactcg

SEQ ID NO: 1819861 - DNA, 25 bp, Homo sapien
catttgatgtcttcgaagagcccac

SEQ ID NO: 1819862 - DNA, 25 bp, Homo sapien
gaagagcccactggatcctgatacc

SEQ ID NO: 1819863 - DNA, 25 bp, Homo sapien
atcctgataccccagtcccctgcag

SEQ ID NO: 1819864 - DNA, 25 bp, Homo sapien
tgcagccttgaagcgtgttcacgct

SEQ ID NO: 1819865 - DNA, 25 bp, Homo sapien
tgcaggacatctggacgtgaacaca

SEQ ID NO: 1819866 - DNA, 25 bp, Homo sapien
ggacatctggacgtgaacacagcct

SEQ ID NO: 1819867 - DNA, 25 bp, Homo sapien
acatctggacgtgaacacagcctct

SEQ ID NO: 1819868 - DNA, 25 bp, Homo sapien
caggacatctggacgtgaacacagc

SEQ ID NO: 1819869 - DNA, 25 bp, Homo sapien
aaatgtattgtctggcacagccggc

SEQ ID NO: 1819870 - DNA, 25 bp, Homo sapien
tgctgcaaaaatgaagctggtgcat

SEQ ID NO: 1819871 - DNA, 25 bp, Homo sapien
cctctgtgtgcatgaactgctgcaa

SEQ ID NO: 1819872 - DNA, 25 bp, Homo sapien
gcttgggtccagtcgaatcctgctt

SEQ ID NO: 1819873 - DNA, 25 bp, Homo sapien
tgttgtgttcctcaccaacggtaaa

SEQ ID NO: 1819874 - DNA, 25 bp, Homo sapien
gagtctgattctaggcctatctgcc

SEQ ID NO: 1819875 - DNA, 25 bp, Homo sapien
gacaagctcctagttgaaggcatag

SEQ ID NO: 1819876 - DNA, 25 bp, Homo sapien
tatctagtaaggtgagatgaacccc

SEQ ID NO: 1819877 - DNA, 25 bp, Homo sapien
caagaatacagggtccccccagatc

SEQ ID NO: 1819878 - DNA, 25 bp, Homo sapien
agaatacagggtccccccagatctc

SEQ ID NO: 1819879 - DNA, 25 bp, Homo sapien
ggcaagaatacagggtccccccaga

SEQ ID NO: 1819880 - DNA, 25 bp, Homo sapien
tggcaagaatacagggtccccccag

SEQ ID NO: 1819881 - DNA, 25 bp, Homo sapien
acaaaatgtcttttcaaagtcacca

SEQ ID NO: 1819882 - DNA, 25 bp, Homo sapien
tttcaaagtcaccaaagctcaccat

SEQ ID NO: 1819883 - DNA, 25 bp, Homo sapien
tgtcttttcaaagtcaccaaagctc

SEQ ID NO: 1819884 - DNA, 25 bp, Homo sapien
aaatgtcttttcaaagtcaccaaag

SEQ ID NO: 1819885 - DNA, 25 bp, Homo sapien
agaatggcccgactgcccttcaggc

SEQ ID NO: 1819886 - DNA, 25 bp, Homo sapien
aggccttcatttctcgcttgccaac

SEQ ID NO: 1819887 - DNA, 25 bp, Homo sapien
gcttgttaccgtccgtggccttgtg

SEQ ID NO: 1819888 - DNA, 25 bp, Homo sapien
tgacagagacctttgatgagcgctt

SEQ ID NO: 1819889 - DNA, 25 bp, Homo sapien
tctccaagtacaatggaagacaagg

SEQ ID NO: 1819890 - DNA, 25 bp, Homo sapien
tagctggctccaatatgtcatctgc

SEQ ID NO: 1819891 - DNA, 25 bp, Homo sapien
aagaggacggtccctgtgttgttgc

SEQ ID NO: 1819892 - DNA, 25 bp, Homo sapien
agaattcctatctgtgccaacctgt

SEQ ID NO: 1819893 - DNA, 25 bp, Homo sapien
tactcagcactactgtgcgcacctg

SEQ ID NO: 1819894 - DNA, 25 bp, Homo sapien
gatgtactcagcactactgtgcgca

SEQ ID NO: 1819895 - DNA, 25 bp, Homo sapien
agggaagatgtactcagcactactg

SEQ ID NO: 1819896 - DNA, 25 bp, Homo sapien
tcagcactactgtgcgcacctgggc

SEQ ID NO: 1819897 - DNA, 25 bp, Homo sapien
acatgagaccattgtcctgaggaag

SEQ ID NO: 1819898 - DNA, 25 bp, Homo sapien
gctatttgtgaagggactaaatgtg

SEQ ID NO: 1819899 - DNA, 25 bp, Homo sapien
tttctaaggacaggctatttgtgaa

SEQ ID NO: 1819900 - DNA, 25 bp, Homo sapien
tatcaaaggttgatttcagctcctc

SEQ ID NO: 1819901 - DNA, 25 bp, Homo sapien
ccaaaaaccccgatggccaggatgt

SEQ ID NO: 1819902 - DNA, 25 bp, Homo sapien
caaaaaccccgatggccaggatgtt

SEQ ID NO: 1819903 - DNA, 25 bp, Homo sapien
cagcatggtccgctggcaggtgaat

SEQ ID NO: 1819904 - DNA, 25 bp, Homo sapien
agagttgacatctggagcctccgct

SEQ ID NO: 1819905 - DNA, 25 bp, Homo sapien
tggagcctccgctgacaagcagcat

SEQ ID NO: 1819906 - DNA, 25 bp, Homo sapien
atggtccgctggcaggtgaataggg

SEQ ID NO: 1819907 - DNA, 25 bp, Homo sapien
tggctgaggctggcactccacagtg

SEQ ID NO: 1819908 - DNA, 25 bp, Homo sapien
ggggtggctgaggctggcactccac

SEQ ID NO: 1819909 - DNA, 25 bp, Homo sapien
gtggctgaggctggcactccacagt

SEQ ID NO: 1819910 - DNA, 25 bp, Homo sapien
ggttctgcgggctctctccaggggt

SEQ ID NO: 1819911 - DNA, 25 bp, Homo sapien
aatgctggggtatgctgactaggca

SEQ ID NO: 1819912 - DNA, 25 bp, Homo sapien
tctcggagctgtagtctcacagact

SEQ ID NO: 1819913 - DNA, 25 bp, Homo sapien
aggtgtgcggaggtcacgatgcagc

SEQ ID NO: 1819914 - DNA, 25 bp, Homo sapien
ggaggtcacgatgcagctccatctt

SEQ ID NO: 1819915 - DNA, 25 bp, Homo sapien
agaagtctgtgtacaccgacaataa

SEQ ID NO: 1819916 - DNA, 25 bp, Homo sapien
gaggttctctttaccattcctctgc

SEQ ID NO: 1819917 - DNA, 25 bp, Homo sapien
tctgtgtacaccgacaataaatggt

SEQ ID NO: 1819918 - DNA, 25 bp, Homo sapien
gagaggttctctttaccattcctct

SEQ ID NO: 1819919 - DNA, 25 bp, Homo sapien
cctttagctgcttgcacagctcatg

SEQ ID NO: 1819920 - DNA, 25 bp, Homo sapien
tccctttagctgcttgcacagctca

SEQ ID NO: 1819921 - DNA, 25 bp, Homo sapien
tttagctgcttgcacagctcatgac

SEQ ID NO: 1819922 - DNA, 25 bp, Homo sapien
agatccctttagctgcttgcacagc

SEQ ID NO: 1819923 - DNA, 25 bp, Homo sapien
gtcccaccgtgacgcagcttacaag

SEQ ID NO: 1819924 - DNA, 25 bp, Homo sapien
acagttgcttccgttgggtccagac

SEQ ID NO: 1819925 - DNA, 25 bp, Homo sapien
atggtttgtgactttaacgggcaag

SEQ ID NO: 1819926 - DNA, 25 bp, Homo sapien
ttacaagctgcagaaccgtctgcct

SEQ ID NO: 1819927 - DNA, 25 bp, Homo sapien
cccacgttgattataatcatgtatg

SEQ ID NO: 1819928 - DNA, 25 bp, Homo sapien
gtttccacgtttgcgcctggagggc

SEQ ID NO: 1819929 - DNA, 25 bp, Homo sapien
ttgattataatcatgtatgtgtcag

SEQ ID NO: 1819930 - DNA, 25 bp, Homo sapien
gtgtcagtttccacgtttgcgcctg

SEQ ID NO: 1819931 - DNA, 25 bp, Homo sapien
tcctggagctgaagtgaatgggtcc

SEQ ID NO: 1819932 - DNA, 25 bp, Homo sapien
cacttctgccatcagaaagactcgt

SEQ ID NO: 1819933 - DNA, 25 bp, Homo sapien
cagaaagactcgttcgggaaaacat

SEQ ID NO: 1819934 - DNA, 25 bp, Homo sapien
ctcgttcgggaaaacattccttcat

SEQ ID NO: 1819935 - DNA, 25 bp, Homo sapien
tgagcaaagttgtacttcagtgaag

SEQ ID NO: 1819936 - DNA, 25 bp, Homo sapien
agctctgatgctgttagggtcttga

SEQ ID NO: 1819937 - DNA, 25 bp, Homo sapien
ttatgctcagagcacttgtgtgtgc

SEQ ID NO: 1819938 - DNA, 25 bp, Homo sapien
tgatgaaggcattagaaacaatgct

SEQ ID NO: 1819939 - DNA, 25 bp, Homo sapien
gcattcctgtgcatgagcagtcaca

SEQ ID NO: 1819940 - DNA, 25 bp, Homo sapien
gaccatccccgatgtgccagctgtg

SEQ ID NO: 1819941 - DNA, 25 bp, Homo sapien
tcacctggttctgccgcacgcccat

SEQ ID NO: 1819942 - DNA, 25 bp, Homo sapien
gctgtgttcataataaaccccactg

SEQ ID NO: 1819943 - DNA, 25 bp, Homo sapien
agccctggaagagttcgaggccgca

SEQ ID NO: 1819944 - DNA, 25 bp, Homo sapien
gctatgctcacactattgcactaca

SEQ ID NO: 1819945 - DNA, 25 bp, Homo sapien
gagctatgctcacactattgcacta

SEQ ID NO: 1819946 - DNA, 25 bp, Homo sapien
atgctcacactattgcactacagcc

SEQ ID NO: 1819947 - DNA, 25 bp, Homo sapien
ccacaaactgtgtatccacgtagcc

SEQ ID NO: 1819948 - DNA, 25 bp, Homo sapien
tgtatccacgtagccttcactgcca

SEQ ID NO: 1819949 - DNA, 25 bp, Homo sapien
gtcctgagccttttcaagaagcata

SEQ ID NO: 1819950 - DNA, 25 bp, Homo sapien
gccatttgtcctgagccttttcaag

SEQ ID NO: 1819951 - DNA, 25 bp, Homo sapien
tggtctgagaaatttcgagctttcc

SEQ ID NO: 1819952 - DNA, 25 bp, Homo sapien
gatgtggtctgagaaatttcgagct

SEQ ID NO: 1819953 - DNA, 25 bp, Homo sapien
ttcgagctttccatccgttgatggg

SEQ ID NO: 1819954 - DNA, 25 bp, Homo sapien
gagaaatttcgagctttccatccgt

SEQ ID NO: 1819955 - DNA, 25 bp, Homo sapien
gtgtccatccccggcgcacatctca

SEQ ID NO: 1819956 - DNA, 25 bp, Homo sapien
acgtgtccatccccggcgcacatct

SEQ ID NO: 1819957 - DNA, 25 bp, Homo sapien
acgtccttccgtccacgtgtccatc

SEQ ID NO: 1819958 - DNA, 25 bp, Homo sapien
cagtgtggagcagccacgtccttcc

SEQ ID NO: 1819959 - DNA, 25 bp, Homo sapien
tagaactttcactgtcaccgttgtg

SEQ ID NO: 1819960 - DNA, 25 bp, Homo sapien
caccgttgtgatccttccatctgat

SEQ ID NO: 1819961 - DNA, 25 bp, Homo sapien
cactgtcaccgttgtgatccttcca

SEQ ID NO: 1819962 - DNA, 25 bp, Homo sapien
ctgtagaactttcactgtcaccgtt

SEQ ID NO: 1819963 - DNA, 25 bp, Homo sapien
catctgaaagcttgtagttgatttt

SEQ ID NO: 1819964 - DNA, 25 bp, Homo sapien
tcatctgaaagcttgtagttgattt

SEQ ID NO: 1819965 - DNA, 25 bp, Homo sapien
gatggcgtgatgactttgaacatgg

SEQ ID NO: 1819966 - DNA, 25 bp, Homo sapien
gggatggcgtgatgactttgaacat

SEQ ID NO: 1819967 - DNA, 25 bp, Homo sapien
ttagtgatggccaaattcgtagcct

SEQ ID NO: 1819968 - DNA, 25 bp, Homo sapien
atggccaaattcgtagcctgttttg

SEQ ID NO: 1819969 - DNA, 25 bp, Homo sapien
aaggccctcatcaggggttacaata

SEQ ID NO: 1819970 - DNA, 25 bp, Homo sapien
ttgggattaatcacctccagaaggc

SEQ ID NO: 1819971 - DNA, 25 bp, Homo sapien
tgggattaatcacctccagaaggcc

SEQ ID NO: 1819972 - DNA, 25 bp, Homo sapien
tcatcaggggttacaatacacgtgt

SEQ ID NO: 1819973 - DNA, 25 bp, Homo sapien
gaggtgtccagttaggccctgtgac

SEQ ID NO: 1819974 - DNA, 25 bp, Homo sapien
ggtaaaggaaatgaatagctcgtgc

SEQ ID NO: 1819975 - DNA, 25 bp, Homo sapien
tgtccccagagcatcgtcagtctct

SEQ ID NO: 1819976 - DNA, 25 bp, Homo sapien
taatgaatgaggtgtccccagagca

SEQ ID NO: 1819977 - DNA, 25 bp, Homo sapien
ttcttaagcctgtggacgcacaacc

SEQ ID NO: 1819978 - DNA, 25 bp, Homo sapien
gaacctcattgtagagcagcctgcc

SEQ ID NO: 1819979 - DNA, 25 bp, Homo sapien
tcctagagtgggttagggcccttca

SEQ ID NO: 1819980 - DNA, 25 bp, Homo sapien
gtatctcctccaggcttatcatggg

SEQ ID NO: 1819981 - DNA, 25 bp, Homo sapien
tgttttccgattgctcaccgcttac

SEQ ID NO: 1819982 - DNA, 25 bp, Homo sapien
ttccagatgctatgttttccgattg

SEQ ID NO: 1819983 - DNA, 25 bp, Homo sapien
gatgctatgttttccgattgctcac

SEQ ID NO: 1819984 - DNA, 25 bp, Homo sapien
ttgtcgtggagccacaaaagccccc

SEQ ID NO: 1819985 - DNA, 25 bp, Homo sapien
gacattgaaggcagggaaacaactc

SEQ ID NO: 1819986 - DNA, 25 bp, Homo sapien
gggaatagccccactgctagagact

SEQ ID NO: 1819987 - DNA, 25 bp, Homo sapien
gagacttcagcactccaggatccgt

SEQ ID NO: 1819988 - DNA, 25 bp, Homo sapien
gagacctgccttttatccccagtaa

SEQ ID NO: 1819989 - DNA, 25 bp, Homo sapien
gacattaaatcgtctgtgccccagg

SEQ ID NO: 1819990 - DNA, 25 bp, Homo sapien
taagcaggaaagacattaaatcgtc

SEQ ID NO: 1819991 - DNA, 25 bp, Homo sapien
tttcttacccttgcagccatcccat

SEQ ID NO: 1819992 - DNA, 25 bp, Homo sapien
ccaccttttaatgcccctataagca

SEQ ID NO: 1819993 - DNA, 25 bp, Homo sapien
ggacgcacaagaccagccactgcta

SEQ ID NO: 1819994 - DNA, 25 bp, Homo sapien
ggagggcaggttctgatgtcaccac

SEQ ID NO: 1819995 - DNA, 25 bp, Homo sapien
tcttcctctctgtaggacgcacaag

SEQ ID NO: 1819996 - DNA, 25 bp, Homo sapien
atcacgtaccgccacatggaacgga

SEQ ID NO: 1819997 - DNA, 25 bp, Homo sapien
tgaggagtggccagtatcagctagc

SEQ ID NO: 1819998 - DNA, 25 bp, Homo sapien
cctggcatgatgctagaggctgatg

SEQ ID NO: 1819999 - DNA, 25 bp, Homo sapien
ttccatccctggcatgatgctagag

SEQ ID NO: 1820000 - DNA, 25 bp, Homo sapien
gctgatggagggctgcaagtgctgg

SEQ ID NO: 1820001 - DNA, 25 bp, Homo sapien
gtcccacacccaatcctagaaccaa

SEQ ID NO: 1820002 - DNA, 25 bp, Homo sapien
caatcctagaaccaaaccgctttct

SEQ ID NO: 1820003 - DNA, 25 bp, Homo sapien
cacgggtacaattccccaagtggat

SEQ ID NO: 1820004 - DNA, 25 bp, Homo sapien
ggtacaattccccaagtggatggat

SEQ ID NO: 1820005 - DNA, 25 bp, Homo sapien
catgatgacttgaggagcacttagc

SEQ ID NO: 1820006 - DNA, 25 bp, Homo sapien
tctttggttctcacgccaggagctc

SEQ ID NO: 1820007 - DNA, 25 bp, Homo sapien
tgtctgcgctcttccaatctgcagg

SEQ ID NO: 1820008 - DNA, 25 bp, Homo sapien
tccatgctacccactggccatgatg

SEQ ID NO: 1820009 - DNA, 25 bp, Homo sapien
tgctagctgcccgagagagggcctt

SEQ ID NO: 1820010 - DNA, 25 bp, Homo sapien
tgagactctgggcaaatgcctctga

SEQ ID NO: 1820011 - DNA, 25 bp, Homo sapien
ccaccagcgtgtgcagagttaacga

SEQ ID NO: 1820012 - DNA, 25 bp, Homo sapien
gctgagaaagcaagtccctggcatt

SEQ ID NO: 1820013 - DNA, 25 bp, Homo sapien
taagtcttttcatttttattactca

SEQ ID NO: 1820014 - DNA, 25 bp, Homo sapien
ctcgataaggaaagcgcccttgatc

SEQ ID NO: 1820015 - DNA, 25 bp, Homo sapien
tgtttccttgtgttggacaatctca

SEQ ID NO: 1820016 - DNA, 25 bp, Homo sapien
caggccctgcggacatgtttccttg

SEQ ID NO: 1820017 - DNA, 25 bp, Homo sapien
gaaagcgcccttgatcctgtcacag

SEQ ID NO: 1820018 - DNA, 25 bp, Homo sapien
ctgggcacacgccacatgcagattt

SEQ ID NO: 1820019 - DNA, 25 bp, Homo sapien
acacgccacatgcagattttggtgc

SEQ ID NO: 1820020 - DNA, 25 bp, Homo sapien
gggcacacgccacatgcagattttg

SEQ ID NO: 1820021 - DNA, 25 bp, Homo sapien
gcacacgccacatgcagattttggt

SEQ ID NO: 1820022 - DNA, 25 bp, Homo sapien
gcctacgacagtatgtcaaacgccg

SEQ ID NO: 1820023 - DNA, 25 bp, Homo sapien
gtatttcaggaaagcctacgacagt

SEQ ID NO: 1820024 - DNA, 25 bp, Homo sapien
cgacagtatgtcaaacgccggacca

SEQ ID NO: 1820025 - DNA, 25 bp, Homo sapien
ctgtatttcaggaaagcctacgaca

SEQ ID NO: 1820026 - DNA, 25 bp, Homo sapien
ttctttgatggaaatagagaaattc

SEQ ID NO: 1820027 - DNA, 25 bp, Homo sapien
tatcaaatttcccacatgtgcattt

SEQ ID NO: 1820028 - DNA, 25 bp, Homo sapien
gtatcaaatttcccacatgtgcatt

SEQ ID NO: 1820029 - DNA, 25 bp, Homo sapien
ctctcgtgctattggtggagctggt

SEQ ID NO: 1820030 - DNA, 25 bp, Homo sapien
tcttcctctcgtgctattggtggag

SEQ ID NO: 1820031 - DNA, 25 bp, Homo sapien
tcctctcgtgctattggtggagctg

SEQ ID NO: 1820032 - DNA, 25 bp, Homo sapien
ttcctctcgtgctattggtggagct

SEQ ID NO: 1820033 - DNA, 25 bp, Homo sapien
ggccatgtggaccataaggtccacc

SEQ ID NO: 1820034 - DNA, 25 bp, Homo sapien
ggaggccatgtggaccataaggtcc

SEQ ID NO: 1820035 - DNA, 25 bp, Homo sapien
atgtggaccataaggtccaccaccc

SEQ ID NO: 1820036 - DNA, 25 bp, Homo sapien
ccatgtggaccataaggtccaccac

SEQ ID NO: 1820037 - DNA, 25 bp, Homo sapien
tgacaaagtggccattgaaggtaat

SEQ ID NO: 1820038 - DNA, 25 bp, Homo sapien
tgaaggtagaagaccgcaggtgcca

SEQ ID NO: 1820039 - DNA, 25 bp, Homo sapien
tcctggcattgaaggtagaagaccg

SEQ ID NO: 1820040 - DNA, 25 bp, Homo sapien
gccattgaaggtaatgccagtcctg

SEQ ID NO: 1820041 - DNA, 25 bp, Homo sapien
taccatcacatttcgcagctttctg

SEQ ID NO: 1820042 - DNA, 25 bp, Homo sapien
aacatggctcttatgggtgggaaca

SEQ ID NO: 1820043 - DNA, 25 bp, Homo sapien
cagacgagagccatgaccaacatgg

SEQ ID NO: 1820044 - DNA, 25 bp, Homo sapien
catcttctcataccatcacatttcg

SEQ ID NO: 1820045 - DNA, 25 bp, Homo sapien
tagccttggccacaccagtagatgc

SEQ ID NO: 1820046 - DNA, 25 bp, Homo sapien
ctgtaagcctctcatctggctcagg

SEQ ID NO: 1820047 - DNA, 25 bp, Homo sapien
gaccttgcccatagccttggccaca

SEQ ID NO: 1820048 - DNA, 25 bp, Homo sapien
ccatagccttggccacaccagtaga

SEQ ID NO: 1820049 - DNA, 25 bp, Homo sapien
tggaatctgcacaacagcacaaggg

SEQ ID NO: 1820050 - DNA, 25 bp, Homo sapien
tcacaccatggaatctgcacaacag

SEQ ID NO: 1820051 - DNA, 25 bp, Homo sapien
accatggaatctgcacaacagcaca

SEQ ID NO: 1820052 - DNA, 25 bp, Homo sapien
ccatcacaccatggaatctgcacaa

SEQ ID NO: 1820053 - DNA, 25 bp, Homo sapien
tgtgaagtcagcacagttgacaccg

SEQ ID NO: 1820054 - DNA, 25 bp, Homo sapien
tgaggaaaaggacagtcactggaca

SEQ ID NO: 1820055 - DNA, 25 bp, Homo sapien
ccacttgggaaggttggctttgcta

SEQ ID NO: 1820056 - DNA, 25 bp, Homo sapien
tggacacgtagtccccaaggtctgg

SEQ ID NO: 1820057 - DNA, 25 bp, Homo sapien
tacctcacaagtccgcaagagtggg

SEQ ID NO: 1820058 - DNA, 25 bp, Homo sapien
caagtccgcaagagtgggcacatgc

SEQ ID NO: 1820059 - DNA, 25 bp, Homo sapien
agtactggtccatgtacccagccaa

SEQ ID NO: 1820060 - DNA, 25 bp, Homo sapien
gtacccagccaattacctcacaagt

SEQ ID NO: 1820061 - DNA, 25 bp, Homo sapien
tgctgatcagggcggcttctgggct

SEQ ID NO: 1820062 - DNA, 25 bp, Homo sapien
gcacagaaaagccagcaaagctcca

SEQ ID NO: 1820063 - DNA, 25 bp, Homo sapien
agatgctgatcagggcggcttctgg

SEQ ID NO: 1820064 - DNA, 25 bp, Homo sapien
tgatcagggcggcttctgggctcca

SEQ ID NO: 1820065 - DNA, 25 bp, Homo sapien
caagtgagtcctgatagattgtctc

SEQ ID NO: 1820066 - DNA, 25 bp, Homo sapien
gtgagtcctgatagattgtctcagg

SEQ ID NO: 1820067 - DNA, 25 bp, Homo sapien
agtgagtcctgatagattgtctcag

SEQ ID NO: 1820068 - DNA, 25 bp, Homo sapien
aagtgagtcctgatagattgtctca

SEQ ID NO: 1820069 - DNA, 25 bp, Homo sapien
agtgctggatgcagcttggctcttg

SEQ ID NO: 1820070 - DNA, 25 bp, Homo sapien
gctggatgcagcttggctcttgctt

SEQ ID NO: 1820071 - DNA, 25 bp, Homo sapien
gatgcagcttggctcttgctttcaa

SEQ ID NO: 1820072 - DNA, 25 bp, Homo sapien
tgctggatgcagcttggctcttgct

SEQ ID NO: 1820073 - DNA, 25 bp, Homo sapien
ccgagagcagggagctcattctcct

SEQ ID NO: 1820074 - DNA, 25 bp, Homo sapien
ttctcctctgaactcgcagcctgct

SEQ ID NO: 1820075 - DNA, 25 bp, Homo sapien
tgaactcgcagcctgctgccagcag

SEQ ID NO: 1820076 - DNA, 25 bp, Homo sapien
ttcccgagagcagggagctcattct

SEQ ID NO: 1820077 - DNA, 25 bp, Homo sapien
tgagaagttcatatgtagcccacac

SEQ ID NO: 1820078 - DNA, 25 bp, Homo sapien
taattccactaagagattaatacat

SEQ ID NO: 1820079 - DNA, 25 bp, Homo sapien
tagcccacacataagctgaagtatt

SEQ ID NO: 1820080 - DNA, 25 bp, Homo sapien
tacaaccaagaatcctgagaagttc

SEQ ID NO: 1820081 - DNA, 25 bp, Homo sapien
ttatcctgatcaatacatcttaggt

SEQ ID NO: 1820082 - DNA, 25 bp, Homo sapien
aaatagcctcttaattcagaaactg

SEQ ID NO: 1820083 - DNA, 25 bp, Homo sapien
catcttaggtacttgatcaaagaga

SEQ ID NO: 1820084 - DNA, 25 bp, Homo sapien
gggttgccataatgaaagtacttca

SEQ ID NO: 1820085 - DNA, 25 bp, Homo sapien
tattcgtctgtgtcaaagtggtgca

SEQ ID NO: 1820086 - DNA, 25 bp, Homo sapien
aaagcattaaggcaatattcgtctg

SEQ ID NO: 1820087 - DNA, 25 bp, Homo sapien
ttagagatgaccaagtggagacgct

SEQ ID NO: 1820088 - DNA, 25 bp, Homo sapien
tctgggatatcctagcaaagtggcg

SEQ ID NO: 1820089 - DNA, 25 bp, Homo sapien
catattaacaagtagtcgctttctt

SEQ ID NO: 1820090 - DNA, 25 bp, Homo sapien
tctgactttgggtggactcttgctt

SEQ ID NO: 1820091 - DNA, 25 bp, Homo sapien
ttaacaagtagtcgctttctttgca

SEQ ID NO: 1820092 - DNA, 25 bp, Homo sapien
aagtagtcgctttctttgcaggtgc

SEQ ID NO: 1820093 - DNA, 25 bp, Homo sapien
tgggtacaactcagcattggtggcc

SEQ ID NO: 1820094 - DNA, 25 bp, Homo sapien
tacaactcagcattggtggccaagt

SEQ ID NO: 1820095 - DNA, 25 bp, Homo sapien
tgcatccagaagcatgcagtaaagc

SEQ ID NO: 1820096 - DNA, 25 bp, Homo sapien
actcagcattggtggccaagtcctg

SEQ ID NO: 1820097 - DNA, 25 bp, Homo sapien
ggcactccttgggttatctcctgtt

SEQ ID NO: 1820098 - DNA, 25 bp, Homo sapien
ctccttgggttatctcctgttgctg

SEQ ID NO: 1820099 - DNA, 25 bp, Homo sapien
cactccttgggttatctcctgttgc

SEQ ID NO: 1820100 - DNA, 25 bp, Homo sapien
ccttgggttatctcctgttgctgct

SEQ ID NO: 1820101 - DNA, 25 bp, Homo sapien
tctttttagcaattgtgaataggag

SEQ ID NO: 1820102 - DNA, 25 bp, Homo sapien
ttttagcaattgtgaataggagttc

SEQ ID NO: 1820103 - DNA, 25 bp, Homo sapien
tctctttttagcaattgtgaatagg

SEQ ID NO: 1820104 - DNA, 25 bp, Homo sapien
ctttttagcaattgtgaataggagt

SEQ ID NO: 1820105 - DNA, 25 bp, Homo sapien
ggctggatgcctgcctattaagcag

SEQ ID NO: 1820106 - DNA, 25 bp, Homo sapien
ctggatgcctgcctattaagcaggg

SEQ ID NO: 1820107 - DNA, 25 bp, Homo sapien
ggctttgctcatgactgattctcaa

SEQ ID NO: 1820108 - DNA, 25 bp, Homo sapien
gactgattctcaacatcgtagacat

SEQ ID NO: 1820109 - DNA, 25 bp, Homo sapien
tcctgcctcatatttgggactacat

SEQ ID NO: 1820110 - DNA, 25 bp, Homo sapien
ctcctgcctcatatttgggactaca

SEQ ID NO: 1820111 - DNA, 25 bp, Homo sapien
ccatcagaagataacctaattgaaa

SEQ ID NO: 1820112 - DNA, 25 bp, Homo sapien
aatgccgttgaactatatgctttaa

SEQ ID NO: 1820113 - DNA, 25 bp, Homo sapien
tgaaaagatactccctggaactgga

SEQ ID NO: 1820114 - DNA, 25 bp, Homo sapien
tctggagatgggtgattgcacagca

SEQ ID NO: 1820115 - DNA, 25 bp, Homo sapien
aggtctccagacgaggcagcaaaga

SEQ ID NO: 1820116 - DNA, 25 bp, Homo sapien
tgggtcaggtctccagacgaggcag

SEQ ID NO: 1820117 - DNA, 25 bp, Homo sapien
cgaggcagcaaagacacctaattga

SEQ ID NO: 1820118 - DNA, 25 bp, Homo sapien
tcaggtctccagacgaggcagcaaa

SEQ ID NO: 1820119 - DNA, 25 bp, Homo sapien
cttctggcgttcctctgttcataga

SEQ ID NO: 1820120 - DNA, 25 bp, Homo sapien
ggcgttcctctgttcatagacacgt

SEQ ID NO: 1820121 - DNA, 25 bp, Homo sapien
gcagaaattcaaacctgtcagacat

SEQ ID NO: 1820122 - DNA, 25 bp, Homo sapien
tctgttcatagacacgtcccttgca

SEQ ID NO: 1820123 - DNA, 25 bp, Homo sapien
agagctcctcgagggccaccccagc

SEQ ID NO: 1820124 - DNA, 25 bp, Homo sapien
cccgggggactctcccagcctcttg

SEQ ID NO: 1820125 - DNA, 25 bp, Homo sapien
cagcctcttgtcagttctgaagaca

SEQ ID NO: 1820126 - DNA, 25 bp, Homo sapien
tcagagctcctcgagggccacccca

SEQ ID NO: 1820127 - DNA, 25 bp, Homo sapien
gccacctgcatcctttttaaatatg

SEQ ID NO: 1820128 - DNA, 25 bp, Homo sapien
taaacctccttctaaacagggatgc

SEQ ID NO: 1820129 - DNA, 25 bp, Homo sapien
ttctaaacagggatgccacgtgcca

SEQ ID NO: 1820130 - DNA, 25 bp, Homo sapien
aatatgtaccaaccttgattggaca

SEQ ID NO: 1820131 - DNA, 25 bp, Homo sapien
aagggtgagcagtgtccttcccaaa

SEQ ID NO: 1820132 - DNA, 25 bp, Homo sapien
gggtgagcagtgtccttcccaaagg

SEQ ID NO: 1820133 - DNA, 25 bp, Homo sapien
gtgagcagtgtccttcccaaaggcc

SEQ ID NO: 1820134 - DNA, 25 bp, Homo sapien
cagtgtccttcccaaaggccatcat

SEQ ID NO: 1820135 - DNA, 25 bp, Homo sapien
tctctgtacgtccagtcagaagact

SEQ ID NO: 1820136 - DNA, 25 bp, Homo sapien
cgtccagtcagaagacttagttgct

SEQ ID NO: 1820137 - DNA, 25 bp, Homo sapien
tgtacgtccagtcagaagacttagt

SEQ ID NO: 1820138 - DNA, 25 bp, Homo sapien
gggaaatctctgtacgtccagtcag

SEQ ID NO: 1820139 - DNA, 25 bp, Homo sapien
cctggataatccttccttgatggcc

SEQ ID NO: 1820140 - DNA, 25 bp, Homo sapien
ccttggcgcttatcacaatatctag

SEQ ID NO: 1820141 - DNA, 25 bp, Homo sapien
gaagatctaggtccctccttatcct

SEQ ID NO: 1820142 - DNA, 25 bp, Homo sapien
tatgtaccacaggacgttgcagctc

SEQ ID NO: 1820143 - DNA, 25 bp, Homo sapien
gacaccatgggtcagacagttcagg

SEQ ID NO: 1820144 - DNA, 25 bp, Homo sapien
cagtaggtttgccatctgtcagcat

SEQ ID NO: 1820145 - DNA, 25 bp, Homo sapien
gggacaccatgggtcagacagttca

SEQ ID NO: 1820146 - DNA, 25 bp, Homo sapien
gggtcagtaggtttgccatctgtca

SEQ ID NO: 1820147 - DNA, 25 bp, Homo sapien
tagccctgcatcagatacttcattt

SEQ ID NO: 1820148 - DNA, 25 bp, Homo sapien
ttagccctgcatcagatacttcatt

SEQ ID NO: 1820149 - DNA, 25 bp, Homo sapien
acttcattttcctcctcccgtcagc

SEQ ID NO: 1820150 - DNA, 25 bp, Homo sapien
tcattttcctcctcccgtcagcttc

SEQ ID NO: 1820151 - DNA, 25 bp, Homo sapien
gccacatgggatcctctggaggtgc

SEQ ID NO: 1820152 - DNA, 25 bp, Homo sapien
tctgctcttctggatgattgagggc

SEQ ID NO: 1820153 - DNA, 25 bp, Homo sapien
tctggatgattgagggcagccacat

SEQ ID NO: 1820154 - DNA, 25 bp, Homo sapien
ttggtcctatatcgaggcctgctta

SEQ ID NO: 1820155 - DNA, 25 bp, Homo sapien
ttctgaaaccgcttcctggttgaca

SEQ ID NO: 1820156 - DNA, 25 bp, Homo sapien
atctttgccgcccttgttctgtggt

SEQ ID NO: 1820157 - DNA, 25 bp, Homo sapien
ccgggggatcgcagcctcggtgcag

SEQ ID NO: 1820158 - DNA, 25 bp, Homo sapien
cagacaggccgggggatcgcagcct

SEQ ID NO: 1820159 - DNA, 25 bp, Homo sapien
gctcaggctgagtgtcccgaatgga

SEQ ID NO: 1820160 - DNA, 25 bp, Homo sapien
ccacttcgttttcacgtctgggagg

SEQ ID NO: 1820161 - DNA, 25 bp, Homo sapien
gacggccagcgtgaaagctagagct

SEQ ID NO: 1820162 - DNA, 25 bp, Homo sapien
cccctggtaggtgttctgagtggct

SEQ ID NO: 1820163 - DNA, 25 bp, Homo sapien
tagagctcgtgtattgtagggaaaa

SEQ ID NO: 1820164 - DNA, 25 bp, Homo sapien
cctgatatttgagggagaattcggc

SEQ ID NO: 1820165 - DNA, 25 bp, Homo sapien
gatatttgagggagaattcggcaag

SEQ ID NO: 1820166 - DNA, 25 bp, Homo sapien
ttcggcaagggggaaatctctggct

SEQ ID NO: 1820167 - DNA, 25 bp, Homo sapien
cttcctgatatttgagggagaattc

SEQ ID NO: 1820168 - DNA, 25 bp, Homo sapien
tggcgctcctgcctcggtccgtcca

SEQ ID NO: 1820169 - DNA, 25 bp, Homo sapien
ccgtccagcaccaagacgccaggtt

SEQ ID NO: 1820170 - DNA, 25 bp, Homo sapien
tgcctcggtccgtccagcaccaaga

SEQ ID NO: 1820171 - DNA, 25 bp, Homo sapien
ggtccgtccagcaccaagacgccag

SEQ ID NO: 1820172 - DNA, 25 bp, Homo sapien
ttgtgtcaaggttcttgtgcgcctt

SEQ ID NO: 1820173 - DNA, 25 bp, Homo sapien
tacagtggaaagatctctgcgtccg

SEQ ID NO: 1820174 - DNA, 25 bp, Homo sapien
tggaaagatctctgcgtccgcagaa

SEQ ID NO: 1820175 - DNA, 25 bp, Homo sapien
tcaaggttcttgtgcgccttttctt

SEQ ID NO: 1820176 - DNA, 25 bp, Homo sapien
tttccacgctcgagtcctttttctc

SEQ ID NO: 1820177 - DNA, 25 bp, Homo sapien
tcctttttctcgtgccagtttcctc

SEQ ID NO: 1820178 - DNA, 25 bp, Homo sapien
ccctggagttcctcgggcccaggca

SEQ ID NO: 1820179 - DNA, 25 bp, Homo sapien
ccacgctcgagtcctttttctcgtg

SEQ ID NO: 1820180 - DNA, 25 bp, Homo sapien
taggacagaggatgtgataaaggag

SEQ ID NO: 1820181 - DNA, 25 bp, Homo sapien
ggaggtccttctctaatcccaacag

SEQ ID NO: 1820182 - DNA, 25 bp, Homo sapien
tgtgataaaggaggtccttctctaa

SEQ ID NO: 1820183 - DNA, 25 bp, Homo sapien
gataaaggaggtccttctctaatcc

SEQ ID NO: 1820184 - DNA, 25 bp, Homo sapien
gaacttggacggatgcatcaacaac

SEQ ID NO: 1820185 - DNA, 25 bp, Homo sapien
gcagataaagctaacccctcagtga

SEQ ID NO: 1820186 - DNA, 25 bp, Homo sapien
gatactgtggaagaacgacgtgagc

SEQ ID NO: 1820187 - DNA, 25 bp, Homo sapien
taaagctgaggtccgattttggctg

SEQ ID NO: 1820188 - DNA, 25 bp, Homo sapien
gtcgctaaagctgccgagagagaca

SEQ ID NO: 1820189 - DNA, 25 bp, Homo sapien
caggtcgctaaagctgccgagagag

SEQ ID NO: 1820190 - DNA, 25 bp, Homo sapien
aaagccaggtcgctaaagctgccga

SEQ ID NO: 1820191 - DNA, 25 bp, Homo sapien
agaaggaaagccaggtcgctaaagc

SEQ ID NO: 1820192 - DNA, 25 bp, Homo sapien
gccgctgccgcagagttcgaataag

SEQ ID NO: 1820193 - DNA, 25 bp, Homo sapien
gaataagctgccttggatgttgagg

SEQ ID NO: 1820194 - DNA, 25 bp, Homo sapien
agtttatcccacatatctttcgccc

SEQ ID NO: 1820195 - DNA, 25 bp, Homo sapien
aatccgtaagggctgtgaccgtgca

SEQ ID NO: 1820196 - DNA, 25 bp, Homo sapien
cccagaagcggctgtctaaagcggg

SEQ ID NO: 1820197 - DNA, 25 bp, Homo sapien
gctgccgcccattaatgcctcttag

SEQ ID NO: 1820198 - DNA, 25 bp, Homo sapien
acagtgctaagcctcgcaagctgcc

SEQ ID NO: 1820199 - DNA, 25 bp, Homo sapien
caagatgggttactagctctgagca

SEQ ID NO: 1820200 - DNA, 25 bp, Homo sapien
gggccggcctcgtagccttcatctg

SEQ ID NO: 1820201 - DNA, 25 bp, Homo sapien
tctgctcttgcgaatccaagtgtcc

SEQ ID NO: 1820202 - DNA, 25 bp, Homo sapien
ggcctgcgcgttgggtccctcctgt

SEQ ID NO: 1820203 - DNA, 25 bp, Homo sapien
agctttcaggatgtagcgccagcct

SEQ ID NO: 1820204 - DNA, 25 bp, Homo sapien
tagagaaggatagactccacctggg

SEQ ID NO: 1820205 - DNA, 25 bp, Homo sapien
taaaagaatgggtgttgcagaggac

SEQ ID NO: 1820206 - DNA, 25 bp, Homo sapien
gaaaatggtcactctaacctcaggg

SEQ ID NO: 1820207 - DNA, 25 bp, Homo sapien
gaagtgggcttcagctccgtgttga

SEQ ID NO: 1820208 - DNA, 25 bp, Homo sapien
tggcaggtcactcgttcacgcaaga

SEQ ID NO: 1820209 - DNA, 25 bp, Homo sapien
aacacctggcaggtcactcgttcac

SEQ ID NO: 1820210 - DNA, 25 bp, Homo sapien
acctggcaggtcactcgttcacgca

SEQ ID NO: 1820211 - DNA, 25 bp, Homo sapien
gcaggtcactcgttcacgcaagagc

SEQ ID NO: 1820212 - DNA, 25 bp, Homo sapien
cttgggaagcgcaggttctaacccg

SEQ ID NO: 1820213 - DNA, 25 bp, Homo sapien
caagagtgagccgatgcggattcgc

SEQ ID NO: 1820214 - DNA, 25 bp, Homo sapien
tctgtgcaagcctgagaggccgcgt

SEQ ID NO: 1820215 - DNA, 25 bp, Homo sapien
tcgagcatgcgcacctctgtgcaag

SEQ ID NO: 1820216 - DNA, 25 bp, Homo sapien
cctgcgggtagttggccatgctgtc

SEQ ID NO: 1820217 - DNA, 25 bp, Homo sapien
ttgatgttcgtcttgtcgtccaggc

SEQ ID NO: 1820218 - DNA, 25 bp, Homo sapien
tgtcgcccagcttgagcaaacagtc

SEQ ID NO: 1820219 - DNA, 25 bp, Homo sapien
caaacagtccgaaaagcccttgaag

SEQ ID NO: 1820220 - DNA, 25 bp, Homo sapien
gtctcccaacacttccccagcaagc

SEQ ID NO: 1820221 - DNA, 25 bp, Homo sapien
aatgcgatcttccattttgaggtga

SEQ ID NO: 1820222 - DNA, 25 bp, Homo sapien
gatcttccattttgaggtgacagaa

SEQ ID NO: 1820223 - DNA, 25 bp, Homo sapien
cctgtcacagctctcgcaatgcgat

SEQ ID NO: 1820224 - DNA, 25 bp, Homo sapien
tttcattataaaaccgattgcctac

SEQ ID NO: 1820225 - DNA, 25 bp, Homo sapien
gtttcattataaaaccgattgccta

SEQ ID NO: 1820226 - DNA, 25 bp, Homo sapien
tctgtattccgagtgagaccctcgg

SEQ ID NO: 1820227 - DNA, 25 bp, Homo sapien
cgagtgagaccctcggatgcaccct

SEQ ID NO: 1820228 - DNA, 25 bp, Homo sapien
tattccgagtgagaccctcggatgc

SEQ ID NO: 1820229 - DNA, 25 bp, Homo sapien
cgtggactctgtattccgagtgaga

SEQ ID NO: 1820230 - DNA, 25 bp, Homo sapien
agacctggcgcggatgatgagtggt

SEQ ID NO: 1820231 - DNA, 25 bp, Homo sapien
ggacgtcctgagacctggcgcggat

SEQ ID NO: 1820232 - DNA, 25 bp, Homo sapien
cgtcctgagacctggcgcggatgat

SEQ ID NO: 1820233 - DNA, 25 bp, Homo sapien
cctggacgtcctgagacctggcgcg

SEQ ID NO: 1820234 - DNA, 25 bp, Homo sapien
cgggcggggtcacggatgagtctgc

SEQ ID NO: 1820235 - DNA, 25 bp, Homo sapien
atccacgaacctcgggcctctttct

SEQ ID NO: 1820236 - DNA, 25 bp, Homo sapien
gtcacggatgagtctgcctgggtca

SEQ ID NO: 1820237 - DNA, 25 bp, Homo sapien
ccctgtccgccactcggctccccag

SEQ ID NO: 1820238 - DNA, 25 bp, Homo sapien
ctgctgaaagtgagctcgccgcggc

SEQ ID NO: 1820239 - DNA, 25 bp, Homo sapien
tgctgaaagtgagctcgccgcggcc

SEQ ID NO: 1820240 - DNA, 25 bp, Homo sapien
ctgaaagtgagctcgccgcggcccg

SEQ ID NO: 1820241 - DNA, 25 bp, Homo sapien
gctgaaagtgagctcgccgcggccc

SEQ ID NO: 1820242 - DNA, 25 bp, Homo sapien
agagcaggcagggataaaagctgag

SEQ ID NO: 1820243 - DNA, 25 bp, Homo sapien
cagggataaaagctgagcggcggga

SEQ ID NO: 1820244 - DNA, 25 bp, Homo sapien
gaggaaacacaggccgcacgaaggt

SEQ ID NO: 1820245 - DNA, 25 bp, Homo sapien
ctctggacggccaaaccccgaggcg

SEQ ID NO: 1820246 - DNA, 25 bp, Homo sapien
gtcctcggcagctttctggcggctg

SEQ ID NO: 1820247 - DNA, 25 bp, Homo sapien
agggcgccagagaagcacagcgtta

SEQ ID NO: 1820248 - DNA, 25 bp, Homo sapien
tcagaatcgaaatccgcactggcgc

SEQ ID NO: 1820249 - DNA, 25 bp, Homo sapien
cgacgaacccggctggaagctgagt

SEQ ID NO: 1820250 - DNA, 25 bp, Homo sapien
accgaacccgtagcagcttccgaga

SEQ ID NO: 1820251 - DNA, 25 bp, Homo sapien
ccagacgccgaagaggaaggtgacc

SEQ ID NO: 1820252 - DNA, 25 bp, Homo sapien
gaaggtgaccgaacccgtagcagct

SEQ ID NO: 1820253 - DNA, 25 bp, Homo sapien
cccgtagcagcttccgagagcgtac

SEQ ID NO: 1820254 - DNA, 25 bp, Homo sapien
agcgaggcgggccttgcgcttttta

SEQ ID NO: 1820255 - DNA, 25 bp, Homo sapien
ttgctgcaggaagagcgaggcgggc

SEQ ID NO: 1820256 - DNA, 25 bp, Homo sapien
caggaagagcgaggcgggccttgcg

SEQ ID NO: 1820257 - DNA, 25 bp, Homo sapien
gaggcgggccttgcgctttttaatc

SEQ ID NO: 1820258 - DNA, 25 bp, Homo sapien
tgtcacgttatcttcccaggcgctg

SEQ ID NO: 1820259 - DNA, 25 bp, Homo sapien
gacggattttgcaggcgcacgcgtc

SEQ ID NO: 1820260 - DNA, 25 bp, Homo sapien
aactgtgactccttggactctagcc

SEQ ID NO: 1820261 - DNA, 25 bp, Homo sapien
ttaggcgagactctagcgggtgacc

SEQ ID NO: 1820262 - DNA, 25 bp, Homo sapien
taaaatatgtggtctgaagttccct

SEQ ID NO: 1820263 - DNA, 25 bp, Homo sapien
tcgatttgcccaccagccgggtctg

SEQ ID NO: 1820264 - DNA, 25 bp, Homo sapien
gaattcatcctcttcaatggtaagc

SEQ ID NO: 1820265 - DNA, 25 bp, Homo sapien
gaagttccctatcactctcgatttg

SEQ ID NO: 1820266 - DNA, 25 bp, Homo sapien
tatctgccgttcaacttaagtccca

SEQ ID NO: 1820267 - DNA, 25 bp, Homo sapien
gcaccgcgaggatcagtgaaatata

SEQ ID NO: 1820268 - DNA, 25 bp, Homo sapien
tgaaatatatctgccgttcaactta

SEQ ID NO: 1820269 - DNA, 25 bp, Homo sapien
tatttgcaccgcgaggatcagtgaa

SEQ ID NO: 1820270 - DNA, 25 bp, Homo sapien
tagtcaaaccatttgcgaccgcaga

SEQ ID NO: 1820271 - DNA, 25 bp, Homo sapien
taggcattgccaacaagttccggga

SEQ ID NO: 1820272 - DNA, 25 bp, Homo sapien
tccgggagcgacagagactttatgc

SEQ ID NO: 1820273 - DNA, 25 bp, Homo sapien
tagacaccttggtagagaatcgcca

SEQ ID NO: 1820274 - DNA, 25 bp, Homo sapien
cagcgggccaaaggccgcttcaagg

SEQ ID NO: 1820275 - DNA, 25 bp, Homo sapien
gccccagcgggccaaaggccgcttc

SEQ ID NO: 1820276 - DNA, 25 bp, Homo sapien
gggccaaaggccgcttcaagggaca

SEQ ID NO: 1820277 - DNA, 25 bp, Homo sapien
gccaaaggccgcttcaagggacaca

SEQ ID NO: 1820278 - DNA, 25 bp, Homo sapien
gcgagtagggcaccggggaaggagc

SEQ ID NO: 1820279 - DNA, 25 bp, Homo sapien
gagcctcagactcccatgcagcctt

SEQ ID NO: 1820280 - DNA, 25 bp, Homo sapien
gcgggagcctcagactcccatgcag

SEQ ID NO: 1820281 - DNA, 25 bp, Homo sapien
gtcccgcgggagcctcagactccca

SEQ ID NO: 1820282 - DNA, 25 bp, Homo sapien
cgcgggagcctcagactcccatgca

SEQ ID NO: 1820283 - DNA, 25 bp, Homo sapien
tcatatttcccatccttttgtttta

SEQ ID NO: 1820284 - DNA, 25 bp, Homo sapien
ctgtttcatatttcccatccttttg

SEQ ID NO: 1820285 - DNA, 25 bp, Homo sapien
cctctgtttcatatttcccatcctt

SEQ ID NO: 1820286 - DNA, 25 bp, Homo sapien
tgtttcatatttcccatccttttgt

SEQ ID NO: 1820287 - DNA, 25 bp, Homo sapien
ccaatacagtgttgctgttcagcag

SEQ ID NO: 1820288 - DNA, 25 bp, Homo sapien
ggagccaatacagtgttgctgttca

SEQ ID NO: 1820289 - DNA, 25 bp, Homo sapien
tggaccctcaggcttagcagctgga

SEQ ID NO: 1820290 - DNA, 25 bp, Homo sapien
ggcttagcagctggagccaatacag

SEQ ID NO: 1820291 - DNA, 25 bp, Homo sapien
ggccagtgtcacacgagggtagaca

SEQ ID NO: 1820292 - DNA, 25 bp, Homo sapien
catggaagagtttcaaaggaggcca

SEQ ID NO: 1820293 - DNA, 25 bp, Homo sapien
catggactgggtgggtcacagggca

SEQ ID NO: 1820294 - DNA, 25 bp, Homo sapien
catcgatgaatagctctggggagca

SEQ ID NO: 1820295 - DNA, 25 bp, Homo sapien
ccaaactgacaaacaaagttgttct

SEQ ID NO: 1820296 - DNA, 25 bp, Homo sapien
actctctttggaaggtggcgaaggt

SEQ ID NO: 1820297 - DNA, 25 bp, Homo sapien
tggcaaagactctctttggaaggtg

SEQ ID NO: 1820298 - DNA, 25 bp, Homo sapien
gacaaacaaagttgttctgagtggg

SEQ ID NO: 1820299 - DNA, 25 bp, Homo sapien
tattttcccaagcaataagccagaa

SEQ ID NO: 1820300 - DNA, 25 bp, Homo sapien
taagccagaaatattgccacgtatt

SEQ ID NO: 1820301 - DNA, 25 bp, Homo sapien
gccagaaatattgccacgtattgcc

SEQ ID NO: 1820302 - DNA, 25 bp, Homo sapien
attcaccaggtcgtattttcccaag

SEQ ID NO: 1820303 - DNA, 25 bp, Homo sapien
ctttgatcgtcacagtgataatatc

SEQ ID NO: 1820304 - DNA, 25 bp, Homo sapien
cactttgatcgtcacagtgataata

SEQ ID NO: 1820305 - DNA, 25 bp, Homo sapien
ttgatcgtcacagtgataatatccc

SEQ ID NO: 1820306 - DNA, 25 bp, Homo sapien
agacactttgatcgtcacagtgata

SEQ ID NO: 1820307 - DNA, 25 bp, Homo sapien
cttgcttcagcagataagacatatc

SEQ ID NO: 1820308 - DNA, 25 bp, Homo sapien
cagcagataagacatatcagattgg

SEQ ID NO: 1820309 - DNA, 25 bp, Homo sapien
agacatatcagattggcacatgacc

SEQ ID NO: 1820310 - DNA, 25 bp, Homo sapien
cagataagacatatcagattggcac

SEQ ID NO: 1820311 - DNA, 25 bp, Homo sapien
taggatcacttatggcaaccctggg

SEQ ID NO: 1820312 - DNA, 25 bp, Homo sapien
gcaaccctgggcttatacgagtcca

SEQ ID NO: 1820313 - DNA, 25 bp, Homo sapien
ttatacgagtccatacagccaacac

SEQ ID NO: 1820314 - DNA, 25 bp, Homo sapien
taggttttctaggatcacttatggc

SEQ ID NO: 1820315 - DNA, 25 bp, Homo sapien
ttgaggttcttgggaatgtcatctc

SEQ ID NO: 1820316 - DNA, 25 bp, Homo sapien
tgttcctgtttgaggttcttgggaa

SEQ ID NO: 1820317 - DNA, 25 bp, Homo sapien
cctgtttgaggttcttgggaatgtc

SEQ ID NO: 1820318 - DNA, 25 bp, Homo sapien
aggttcttgggaatgtcatctcctc

SEQ ID NO: 1820319 - DNA, 25 bp, Homo sapien
tcattactggtctttccaccggctg

SEQ ID NO: 1820320 - DNA, 25 bp, Homo sapien
caagtgtcgttaaagatggctctgc

SEQ ID NO: 1820321 - DNA, 25 bp, Homo sapien
tgaatcattaaaggccagtggagga

SEQ ID NO: 1820322 - DNA, 25 bp, Homo sapien
tttaaaccagagaacaagccaagtg

SEQ ID NO: 1820323 - DNA, 25 bp, Homo sapien
gccctctagaaagcctcctagtgcg

SEQ ID NO: 1820324 - DNA, 25 bp, Homo sapien
cacgaggtccgtggatttcaaaccg

SEQ ID NO: 1820325 - DNA, 25 bp, Homo sapien
cgatgttgctgtgggaaaacccctt

SEQ ID NO: 1820326 - DNA, 25 bp, Homo sapien
gtgtagtgcccggaaacctgctcct

SEQ ID NO: 1820327 - DNA, 25 bp, Homo sapien
tttggatttgaagtactggaaatat

SEQ ID NO: 1820328 - DNA, 25 bp, Homo sapien
gagtcgatggcaacatttggagcca

SEQ ID NO: 1820329 - DNA, 25 bp, Homo sapien
ggaaatatttggagagtcgatggca

SEQ ID NO: 1820330 - DNA, 25 bp, Homo sapien
gagccattttgtgagccaaagggct

SEQ ID NO: 1820331 - DNA, 25 bp, Homo sapien
gatttttgaactgctgtcagtgccc

SEQ ID NO: 1820332 - DNA, 25 bp, Homo sapien
tttttgaactgctgtcagtgcccat

SEQ ID NO: 1820333 - DNA, 25 bp, Homo sapien
gatagatttttgaactgctgtcagt

SEQ ID NO: 1820334 - DNA, 25 bp, Homo sapien
tagatttttgaactgctgtcagtgc

SEQ ID NO: 1820335 - DNA, 25 bp, Homo sapien
cagtcaccagtactggctcccactt

SEQ ID NO: 1820336 - DNA, 25 bp, Homo sapien
tcctagcttgggctctaatacccag

SEQ ID NO: 1820337 - DNA, 25 bp, Homo sapien
ttcccccactgcaaagacactttcc

SEQ ID NO: 1820338 - DNA, 25 bp, Homo sapien
tgggctctaatacccagtcctgggc

SEQ ID NO: 1820339 - DNA, 25 bp, Homo sapien
cttcctctgctgttgaggttctgac

SEQ ID NO: 1820340 - DNA, 25 bp, Homo sapien
ttcctctgctgttgaggttctgaca

SEQ ID NO: 1820341 - DNA, 25 bp, Homo sapien
caagactacaagaggccaaatgcca

SEQ ID NO: 1820342 - DNA, 25 bp, Homo sapien
tccttgccgaatagcctgggtttgg

SEQ ID NO: 1820343 - DNA, 25 bp, Homo sapien
taaagtaagggatattggctcctgc

SEQ ID NO: 1820344 - DNA, 25 bp, Homo sapien
ctcacatggagggtagaacctgacc

SEQ ID NO: 1820345 - DNA, 25 bp, Homo sapien
ggctatcagcttccgatgcccagag

SEQ ID NO: 1820346 - DNA, 25 bp, Homo sapien
tcgtctttgaatctgcacgtccagc

SEQ ID NO: 1820347 - DNA, 25 bp, Homo sapien
tcccactgcacggtggagttgggcc

SEQ ID NO: 1820348 - DNA, 25 bp, Homo sapien
agctcgccatacacatgtctcaggg

SEQ ID NO: 1820349 - DNA, 25 bp, Homo sapien
agaaccaactacctgagtgccacgg

SEQ ID NO: 1820350 - DNA, 25 bp, Homo sapien
tgtcacagtcatgtcagaaccaact

SEQ ID NO: 1820351 - DNA, 25 bp, Homo sapien
gattggtaaactcaactgtcacagt

SEQ ID NO: 1820352 - DNA, 25 bp, Homo sapien
aggtgtacccagacatttcgcaggg

SEQ ID NO: 1820353 - DNA, 25 bp, Homo sapien
cttggtgacgagagtgcgatggagc

SEQ ID NO: 1820354 - DNA, 25 bp, Homo sapien
gtgaatcttggtgacgagagtgcga

SEQ ID NO: 1820355 - DNA, 25 bp, Homo sapien
atcttggtgacgagagtgcgatgga

SEQ ID NO: 1820356 - DNA, 25 bp, Homo sapien
cccggcctccccatgaagggtgtgg

SEQ ID NO: 1820357 - DNA, 25 bp, Homo sapien
ggccgtcacttcataattaggtacg

SEQ ID NO: 1820358 - DNA, 25 bp, Homo sapien
cttcacagggacaggccgtcacttc

SEQ ID NO: 1820359 - DNA, 25 bp, Homo sapien
tcacttcataattaggtacgcacac

SEQ ID NO: 1820360 - DNA, 25 bp, Homo sapien
cagggacaggccgtcacttcataat

SEQ ID NO: 1820361 - DNA, 25 bp, Homo sapien
ggttcagggttgagctcataaatga

SEQ ID NO: 1820362 - DNA, 25 bp, Homo sapien
tgaaacctgcgcaatagcccagaag

SEQ ID NO: 1820363 - DNA, 25 bp, Homo sapien
gctcataaatgaaacctgcgcaata

SEQ ID NO: 1820364 - DNA, 25 bp, Homo sapien
cccacatgtctataggaagagccag

SEQ ID NO: 1820365 - DNA, 25 bp, Homo sapien
tgatctcagggatggttagcacggt

SEQ ID NO: 1820366 - DNA, 25 bp, Homo sapien
tgtactcgccggcttggatcagcac

SEQ ID NO: 1820367 - DNA, 25 bp, Homo sapien
tgtgacaaagaagtgcagggacgct

SEQ ID NO: 1820368 - DNA, 25 bp, Homo sapien
agggacgcttgttccagcagctgac

SEQ ID NO: 1820369 - DNA, 25 bp, Homo sapien
tgtgcacccactgctacctggttgg

SEQ ID NO: 1820370 - DNA, 25 bp, Homo sapien
gagccagatgcctgtatgtgccgac

SEQ ID NO: 1820371 - DNA, 25 bp, Homo sapien
actccgcaggtgaatgggtgactca

SEQ ID NO: 1820372 - DNA, 25 bp, Homo sapien
catgggccacactcagactaaattg

SEQ ID NO: 1820373 - DNA, 25 bp, Homo sapien
ttaagaagcggcctatgtcagcgcg

SEQ ID NO: 1820374 - DNA, 25 bp, Homo sapien
ttacaggagacagcgttttaagaag

SEQ ID NO: 1820375 - DNA, 25 bp, Homo sapien
cggcctatgtcagcgcgtgtatctt

SEQ ID NO: 1820376 - DNA, 25 bp, Homo sapien
cagcgcgtgtatctttttgaatggg

SEQ ID NO: 1820377 - DNA, 25 bp, Homo sapien
acttcaaagtccatgtcaacgttgg

SEQ ID NO: 1820378 - DNA, 25 bp, Homo sapien
cttgaattctgccttcgggaccccg

SEQ ID NO: 1820379 - DNA, 25 bp, Homo sapien
ggctttttagctccgtacatcaggg

SEQ ID NO: 1820380 - DNA, 25 bp, Homo sapien
tacatcagggcagtttctagggcca

SEQ ID NO: 1820381 - DNA, 25 bp, Homo sapien
gcagggctgtacatgtatccagctc

SEQ ID NO: 1820382 - DNA, 25 bp, Homo sapien
ctccccagctgcatgggaaggcagg

SEQ ID NO: 1820383 - DNA, 25 bp, Homo sapien
gggctgtacatgtatccagctctac

SEQ ID NO: 1820384 - DNA, 25 bp, Homo sapien
tctccccagctgcatgggaaggcag

SEQ ID NO: 1820385 - DNA, 25 bp, Homo sapien
tcttcagtcactgggcattctgagc

SEQ ID NO: 1820386 - DNA, 25 bp, Homo sapien
tggcctcgggcagctttgtcttcag

SEQ ID NO: 1820387 - DNA, 25 bp, Homo sapien
cagctttgtcttcagtcactgggca

SEQ ID NO: 1820388 - DNA, 25 bp, Homo sapien
ggtcctccagttctggccactgctg

SEQ ID NO: 1820389 - DNA, 25 bp, Homo sapien
caccacatgagtgccatctttctta

SEQ ID NO: 1820390 - DNA, 25 bp, Homo sapien
tctcctccaatttgtttggtcacaa

SEQ ID NO: 1820391 - DNA, 25 bp, Homo sapien
cttcttggaatttgtaagtatcagt

SEQ ID NO: 1820392 - DNA, 25 bp, Homo sapien
taatatccatcatgccatctcctcc

SEQ ID NO: 1820393 - DNA, 25 bp, Homo sapien
cttcccatcttgcttcatttctttc

SEQ ID NO: 1820394 - DNA, 25 bp, Homo sapien
tctttcatttcattttccatcgctg

SEQ ID NO: 1820395 - DNA, 25 bp, Homo sapien
tttctttcatttcattttccatcgc

SEQ ID NO: 1820396 - DNA, 25 bp, Homo sapien
aaacttcccatcttgcttcatttct

SEQ ID NO: 1820397 - DNA, 25 bp, Homo sapien
tggagataaccttgtctgcaggctc

SEQ ID NO: 1820398 - DNA, 25 bp, Homo sapien
cacacccttgcctcttaagtacagg

SEQ ID NO: 1820399 - DNA, 25 bp, Homo sapien
cacctgggcccatagaatgtgaaca

SEQ ID NO: 1820400 - DNA, 25 bp, Homo sapien
taccattggtcagggccctagcttc

SEQ ID NO: 1820401 - DNA, 25 bp, Homo sapien
cagacatggccgtgcttgatggctt

SEQ ID NO: 1820402 - DNA, 25 bp, Homo sapien
aggtgcatcaaattggaagcagaca

SEQ ID NO: 1820403 - DNA, 25 bp, Homo sapien
caaattggaagcagacatggccgtg

SEQ ID NO: 1820404 - DNA, 25 bp, Homo sapien
cgtgcttgatggcttgaaccgaggc

SEQ ID NO: 1820405 - DNA, 25 bp, Homo sapien
gcccaccatgcatttaggaagtcag

SEQ ID NO: 1820406 - DNA, 25 bp, Homo sapien
tagcatagttggcaagttagaagac

SEQ ID NO: 1820407 - DNA, 25 bp, Homo sapien
gagggcctatgttactcttctaaaa

SEQ ID NO: 1820408 - DNA, 25 bp, Homo sapien
gattagctgctattagtcacctgta

SEQ ID NO: 1820409 - DNA, 25 bp, Homo sapien
ggccttgtcatccatgcttcattcc

SEQ ID NO: 1820410 - DNA, 25 bp, Homo sapien
caggccttgtcatccatgcttcatt

SEQ ID NO: 1820411 - DNA, 25 bp, Homo sapien
aggccttgtcatccatgcttcattc

SEQ ID NO: 1820412 - DNA, 25 bp, Homo sapien
gtgctgtccacagcttgccagcctc

SEQ ID NO: 1820413 - DNA, 25 bp, Homo sapien
tacattcagtatagcctaggcggtg

SEQ ID NO: 1820414 - DNA, 25 bp, Homo sapien
tttcagaaagtagatgccaccccat

SEQ ID NO: 1820415 - DNA, 25 bp, Homo sapien
catcattagttagcagaaagccctt

SEQ ID NO: 1820416 - DNA, 25 bp, Homo sapien
gaattccaaccaatagacccagtag

SEQ ID NO: 1820417 - DNA, 25 bp, Homo sapien
actccccttggtttactctcaagtg

SEQ ID NO: 1820418 - DNA, 25 bp, Homo sapien
atttcccaagaagttattacaatga

SEQ ID NO: 1820419 - DNA, 25 bp, Homo sapien
tcaagtgagacttgagtggaatgag

SEQ ID NO: 1820420 - DNA, 25 bp, Homo sapien
ctttctgcctaatttcccaagaagt

SEQ ID NO: 1820421 - DNA, 25 bp, Homo sapien
tcaggcgctctttggagacattcca

SEQ ID NO: 1820422 - DNA, 25 bp, Homo sapien
tccagcagcaggaatggatgggtac

SEQ ID NO: 1820423 - DNA, 25 bp, Homo sapien
ctctttggagacattccagcagcag

SEQ ID NO: 1820424 - DNA, 25 bp, Homo sapien
ttggagacattccagcagcaggaat

SEQ ID NO: 1820425 - DNA, 25 bp, Homo sapien
accaggaagcagtctgtccttgatg

SEQ ID NO: 1820426 - DNA, 25 bp, Homo sapien
caggaagcagtctgtccttgatggt

SEQ ID NO: 1820427 - DNA, 25 bp, Homo sapien
ggtggcaaaccaggaagcagtctgt

SEQ ID NO: 1820428 - DNA, 25 bp, Homo sapien
gcaaaccaggaagcagtctgtcctt

SEQ ID NO: 1820429 - DNA, 25 bp, Homo sapien
gagtttggaattcacgttcccatct

SEQ ID NO: 1820430 - DNA, 25 bp, Homo sapien
cacactgaatccttggtgagtttgg

SEQ ID NO: 1820431 - DNA, 25 bp, Homo sapien
gcaaattggcatcattatcatgggc

SEQ ID NO: 1820432 - DNA, 25 bp, Homo sapien
tggtaacaattcttgctggtattcc

SEQ ID NO: 1820433 - DNA, 25 bp, Homo sapien
gccataccggactggattctcagag

SEQ ID NO: 1820434 - DNA, 25 bp, Homo sapien
gattctcagagctccggtattccaa

SEQ ID NO: 1820435 - DNA, 25 bp, Homo sapien
agcaaaaacccagcattggccatac

SEQ ID NO: 1820436 - DNA, 25 bp, Homo sapien
aatagaatgtcaacgcttccagtcc

SEQ ID NO: 1820437 - DNA, 25 bp, Homo sapien
tccaacgaggacaccttcgtcatct

SEQ ID NO: 1820438 - DNA, 25 bp, Homo sapien
ggatccaacgaggacaccttcgtca

SEQ ID NO: 1820439 - DNA, 25 bp, Homo sapien
caggatccaacgaggacaccttcgt

SEQ ID NO: 1820440 - DNA, 25 bp, Homo sapien
gtcccaggatccaacgaggacacct

SEQ ID NO: 1820441 - DNA, 25 bp, Homo sapien
tcataccttgcaccatatgtaaaaa

SEQ ID NO: 1820442 - DNA, 25 bp, Homo sapien
aattaagtagcatgacaccatttgg

SEQ ID NO: 1820443 - DNA, 25 bp, Homo sapien
caaaaaatgaggtggcatcaattgg

SEQ ID NO: 1820444 - DNA, 25 bp, Homo sapien
aatacgagctttgattcataccttg

SEQ ID NO: 1820445 - DNA, 25 bp, Homo sapien
gccagggtcacatacttggtcgaaa

SEQ ID NO: 1820446 - DNA, 25 bp, Homo sapien
cacatacttggtcgaaaggaaagga

SEQ ID NO: 1820447 - DNA, 25 bp, Homo sapien
aacagccagggtcacatacttggtc

SEQ ID NO: 1820448 - DNA, 25 bp, Homo sapien
cagggtcacatacttggtcgaaagg

SEQ ID NO: 1820449 - DNA, 25 bp, Homo sapien
tgtttcgacacagatcctccactgg

SEQ ID NO: 1820450 - DNA, 25 bp, Homo sapien
gatcctccactggtaatgccttgac

SEQ ID NO: 1820451 - DNA, 25 bp, Homo sapien
gacacagatcctccactggtaatgc

SEQ ID NO: 1820452 - DNA, 25 bp, Homo sapien
tcagcatgtgtttcgacacagatcc

SEQ ID NO: 1820453 - DNA, 25 bp, Homo sapien
tcacagtgaataacgagcctttatc

SEQ ID NO: 1820454 - DNA, 25 bp, Homo sapien
aattctctgcccatagttgctgcca

SEQ ID NO: 1820455 - DNA, 25 bp, Homo sapien
taacgagcctttatctgcagtagcg

SEQ ID NO: 1820456 - DNA, 25 bp, Homo sapien
agtagcggcagcctttgcagaagca

SEQ ID NO: 1820457 - DNA, 25 bp, Homo sapien
atcacatacaggcaagtgtccagga

SEQ ID NO: 1820458 - DNA, 25 bp, Homo sapien
cacggctgactttgatgggattccc

SEQ ID NO: 1820459 - DNA, 25 bp, Homo sapien
tcttccagagaggtccatttgtgct

SEQ ID NO: 1820460 - DNA, 25 bp, Homo sapien
attgcagaccccacacggctgactt

SEQ ID NO: 1820461 - DNA, 25 bp, Homo sapien
cttctggtcttgatgtcattgacct

SEQ ID NO: 1820462 - DNA, 25 bp, Homo sapien
ttaccccgatgtcattcaggacata

SEQ ID NO: 1820463 - DNA, 25 bp, Homo sapien
tcattgtccagatacacagcatcat

SEQ ID NO: 1820464 - DNA, 25 bp, Homo sapien
tccataaaaaattaccccgatgtca

SEQ ID NO: 1820465 - DNA, 25 bp, Homo sapien
ggccaggaactttctaagtgcttta

SEQ ID NO: 1820466 - DNA, 25 bp, Homo sapien
cccactgtatggacattgccgttta

SEQ ID NO: 1820467 - DNA, 25 bp, Homo sapien
tcccttagtgccctatggaggcggg

SEQ ID NO: 1820468 - DNA, 25 bp, Homo sapien
gattaacaagtccaacttttgtgca

SEQ ID NO: 1820469 - DNA, 25 bp, Homo sapien
tgaaggtgacggtcaagtttctcac

SEQ ID NO: 1820470 - DNA, 25 bp, Homo sapien
aacattgaaattgaaggtgacggtc

SEQ ID NO: 1820471 - DNA, 25 bp, Homo sapien
ctcacttgcagcagcacaagtgtga

SEQ ID NO: 1820472 - DNA, 25 bp, Homo sapien
gtgacggtcaagtttctcacttgca

SEQ ID NO: 1820473 - DNA, 25 bp, Homo sapien
caccaaggattgaagagaatgtacg

SEQ ID NO: 1820474 - DNA, 25 bp, Homo sapien
ggaagactggatggacagccgcaca

SEQ ID NO: 1820475 - DNA, 25 bp, Homo sapien
gaagtacgccatagggagtccagac

SEQ ID NO: 1820476 - DNA, 25 bp, Homo sapien
agcaacatacatgcggaatttcccc

SEQ ID NO: 1820477 - DNA, 25 bp, Homo sapien
tgcataagcatgtttgttccagagg

SEQ ID NO: 1820478 - DNA, 25 bp, Homo sapien
tgcatactcaatcttgggatgagct

SEQ ID NO: 1820479 - DNA, 25 bp, Homo sapien
gaggcacccatctcctgtttctgct

SEQ ID NO: 1820480 - DNA, 25 bp, Homo sapien
ccctcttcgtgcatactcaatcttg

SEQ ID NO: 1820481 - DNA, 25 bp, Homo sapien
ctgttgacgtgtagacatcaaaggc

SEQ ID NO: 1820482 - DNA, 25 bp, Homo sapien
gttgacgtgtagacatcaaaggcaa

SEQ ID NO: 1820483 - DNA, 25 bp, Homo sapien
tgttgacgtgtagacatcaaaggca

SEQ ID NO: 1820484 - DNA, 25 bp, Homo sapien
ttgacgtgtagacatcaaaggcaat

SEQ ID NO: 1820485 - DNA, 25 bp, Homo sapien
ttgccaggtaaatgggacccataat

SEQ ID NO: 1820486 - DNA, 25 bp, Homo sapien
tgccaggtaaatgggacccataatt

SEQ ID NO: 1820487 - DNA, 25 bp, Homo sapien
cttgccaggtaaatgggacccataa

SEQ ID NO: 1820488 - DNA, 25 bp, Homo sapien
ccaggtaaatgggacccataattca

SEQ ID NO: 1820489 - DNA, 25 bp, Homo sapien
ctacaaaatggagatcatggtggtc

SEQ ID NO: 1820490 - DNA, 25 bp, Homo sapien
taggatgggtttaccaattgccaac

SEQ ID NO: 1820491 - DNA, 25 bp, Homo sapien
gctctctggttctgaatctgaagaa

SEQ ID NO: 1820492 - DNA, 25 bp, Homo sapien
ctaacacttctgtgtgatctcgggc

SEQ ID NO: 1820493 - DNA, 25 bp, Homo sapien
catgctaagggataccctcctggtt

SEQ ID NO: 1820494 - DNA, 25 bp, Homo sapien
gattcttcaaagttacatgctaagg

SEQ ID NO: 1820495 - DNA, 25 bp, Homo sapien
ctggttgccctacccttggcaacat

SEQ ID NO: 1820496 - DNA, 25 bp, Homo sapien
tgaacgaactttgtgtggagcacca

SEQ ID NO: 1820497 - DNA, 25 bp, Homo sapien
tcggtcctccaatttatcttccaca

SEQ ID NO: 1820498 - DNA, 25 bp, Homo sapien
tctcggtcctccaatttatcttcca

SEQ ID NO: 1820499 - DNA, 25 bp, Homo sapien
acaaaatctcggtcctccaatttat

SEQ ID NO: 1820500 - DNA, 25 bp, Homo sapien
aatctcggtcctccaatttatcttc

SEQ ID NO: 1820501 - DNA, 25 bp, Homo sapien
tagttcacgttctatacttgtctct

SEQ ID NO: 1820502 - DNA, 25 bp, Homo sapien
aacgttagctaaaatggatcttctc

SEQ ID NO: 1820503 - DNA, 25 bp, Homo sapien
atcttctcttgaaatggtgttgcca

SEQ ID NO: 1820504 - DNA, 25 bp, Homo sapien
gtttctggaaattgaggtgcacctg

SEQ ID NO: 1820505 - DNA, 25 bp, Homo sapien
tatgagattttctccttgggtgggc

SEQ ID NO: 1820506 - DNA, 25 bp, Homo sapien
ccatggtgtcaagactggagcttgc

SEQ ID NO: 1820507 - DNA, 25 bp, Homo sapien
tacagaccagtcttagagcacaggg

SEQ ID NO: 1820508 - DNA, 25 bp, Homo sapien
tctctctacaatgcaacccatggtg

SEQ ID NO: 1820509 - DNA, 25 bp, Homo sapien
ctgaagagatcccttctggggtcat

SEQ ID NO: 1820510 - DNA, 25 bp, Homo sapien
tatggacgactgaagtcaatctgca

SEQ ID NO: 1820511 - DNA, 25 bp, Homo sapien
cttctggggtcatatggacgactga

SEQ ID NO: 1820512 - DNA, 25 bp, Homo sapien
caatgacgtattccaccctgaagag

SEQ ID NO: 1820513 - DNA, 25 bp, Homo sapien
cttgaacaggtgaacgctcgtgaca

SEQ ID NO: 1820514 - DNA, 25 bp, Homo sapien
gttagtgtcccatctctccttgaac

SEQ ID NO: 1820515 - DNA, 25 bp, Homo sapien
tcagtgtggtggtccaccttgttag

SEQ ID NO: 1820516 - DNA, 25 bp, Homo sapien
aatcagcttgttgttttcatacttg

SEQ ID NO: 1820517 - DNA, 25 bp, Homo sapien
atgagtctgaatgtccctgccatgg

SEQ ID NO: 1820518 - DNA, 25 bp, Homo sapien
tgccactcggggacatgagtctgaa

SEQ ID NO: 1820519 - DNA, 25 bp, Homo sapien
tctgaatgtccctgccatggcccag

SEQ ID NO: 1820520 - DNA, 25 bp, Homo sapien
gagtctgaatgtccctgccatggcc

SEQ ID NO: 1820521 - DNA, 25 bp, Homo sapien
ccggctgctgtacccggaacaggtt

SEQ ID NO: 1820522 - DNA, 25 bp, Homo sapien
cggctgctgtacccggaacaggttt

SEQ ID NO: 1820523 - DNA, 25 bp, Homo sapien
ctagggatcaggcagaggcaagagg

SEQ ID NO: 1820524 - DNA, 25 bp, Homo sapien
gaagcagcttgccttgccagctcac

SEQ ID NO: 1820525 - DNA, 25 bp, Homo sapien
agcttgccttgccagctcaccaggc

SEQ ID NO: 1820526 - DNA, 25 bp, Homo sapien
gggaagcagcttgccttgccagctc

SEQ ID NO: 1820527 - DNA, 25 bp, Homo sapien
agcagcttgccttgccagctcacca

SEQ ID NO: 1820528 - DNA, 25 bp, Homo sapien
ttctgcctccaaaggcggtcctgga

SEQ ID NO: 1820529 - DNA, 25 bp, Homo sapien
gttattgggtggaactgctcttctg

SEQ ID NO: 1820530 - DNA, 25 bp, Homo sapien
gtcatcttccgctgcattagagtta

SEQ ID NO: 1820531 - DNA, 25 bp, Homo sapien
cttgcaggttgacgccccggggcac

SEQ ID NO: 1820532 - DNA, 25 bp, Homo sapien
cccctccagaggtgccctcgcgtgg

SEQ ID NO: 1820533 - DNA, 25 bp, Homo sapien
tgctctgtgcgcctcggggacttcc

SEQ ID NO: 1820534 - DNA, 25 bp, Homo sapien
gtgccctcgcgtgggcttgctctgt

SEQ ID NO: 1820535 - DNA, 25 bp, Homo sapien
cgctcccctccagaggtgccctcgc

SEQ ID NO: 1820536 - DNA, 25 bp, Homo sapien
tcactaagcttctgccatttggctt

SEQ ID NO: 1820537 - DNA, 25 bp, Homo sapien
actaagcttctgccatttggcttcc

SEQ ID NO: 1820538 - DNA, 25 bp, Homo sapien
ttcatcactaagcttctgccatttg

SEQ ID NO: 1820539 - DNA, 25 bp, Homo sapien
catcactaagcttctgccatttggc

SEQ ID NO: 1820540 - DNA, 25 bp, Homo sapien
ccagttgtcttgcaaggagtttgcc

SEQ ID NO: 1820541 - DNA, 25 bp, Homo sapien
tccccagttgtcttgcaaggagttt

SEQ ID NO: 1820542 - DNA, 25 bp, Homo sapien
cccagttgtcttgcaaggagtttgc

SEQ ID NO: 1820543 - DNA, 25 bp, Homo sapien
cagttgtcttgcaaggagtttgcct

SEQ ID NO: 1820544 - DNA, 25 bp, Homo sapien
cattttctgtttccttggctgtacc

SEQ ID NO: 1820545 - DNA, 25 bp, Homo sapien
ttctgtttccttggctgtacctgca

SEQ ID NO: 1820546 - DNA, 25 bp, Homo sapien
atcattttctgtttccttggctgta

SEQ ID NO: 1820547 - DNA, 25 bp, Homo sapien
ttttctgtttccttggctgtacctg

SEQ ID NO: 1820548 - DNA, 25 bp, Homo sapien
tggagggccaatgcttcaaccttga

SEQ ID NO: 1820549 - DNA, 25 bp, Homo sapien
ggccctagggctcatggcaagatga

SEQ ID NO: 1820550 - DNA, 25 bp, Homo sapien
ctctccattcaagcaggccctaggg

SEQ ID NO: 1820551 - DNA, 25 bp, Homo sapien
gattcaacggcatgcaaacagctgt

SEQ ID NO: 1820552 - DNA, 25 bp, Homo sapien
ctggtgacactgctgctcgccacat

SEQ ID NO: 1820553 - DNA, 25 bp, Homo sapien
tgcgagggctgccttcaacaggagc

SEQ ID NO: 1820554 - DNA, 25 bp, Homo sapien
ttgcgcagttcctgacccagctcgg

SEQ ID NO: 1820555 - DNA, 25 bp, Homo sapien
ttcctgacccagctcggcatgtttc

SEQ ID NO: 1820556 - DNA, 25 bp, Homo sapien
tgcccattttaattacaagagttac

SEQ ID NO: 1820557 - DNA, 25 bp, Homo sapien
tctcaaaagacctcacacctcatgg

SEQ ID NO: 1820558 - DNA, 25 bp, Homo sapien
cttcttgatggactctgcccatttt

SEQ ID NO: 1820559 - DNA, 25 bp, Homo sapien
caggagctggattaatatgagttct

SEQ ID NO: 1820560 - DNA, 25 bp, Homo sapien
gacatatgactccaaatagtgttcc

SEQ ID NO: 1820561 - DNA, 25 bp, Homo sapien
tgctgacatatgactccaaatagtg

SEQ ID NO: 1820562 - DNA, 25 bp, Homo sapien
gctttgctgacatatgactccaaat

SEQ ID NO: 1820563 - DNA, 25 bp, Homo sapien
tgactccaaatagtgttcccagttt

SEQ ID NO: 1820564 - DNA, 25 bp, Homo sapien
ctccagaattttcagcatcgaaggg

SEQ ID NO: 1820565 - DNA, 25 bp, Homo sapien
gatgtgagcagatcccttggcagaa

SEQ ID NO: 1820566 - DNA, 25 bp, Homo sapien
ataagtgaccccgtgaattcatttc

SEQ ID NO: 1820567 - DNA, 25 bp, Homo sapien
ggagactgtgggagtctccagaatt

SEQ ID NO: 1820568 - DNA, 25 bp, Homo sapien
caccatgacttggataggccttcaa

SEQ ID NO: 1820569 - DNA, 25 bp, Homo sapien
tctagaacaatgacactccccttgg

SEQ ID NO: 1820570 - DNA, 25 bp, Homo sapien
tgatctaacatctggacggcaaccc

SEQ ID NO: 1820571 - DNA, 25 bp, Homo sapien
gaaatagcagcagaacttagcccag

SEQ ID NO: 1820572 - DNA, 25 bp, Homo sapien
tactaatctcccagacacacctagg

SEQ ID NO: 1820573 - DNA, 25 bp, Homo sapien
tctccctggtacactaagaaggctg

SEQ ID NO: 1820574 - DNA, 25 bp, Homo sapien
cacacctaggcgtgtctgagtgcag

SEQ ID NO: 1820575 - DNA, 25 bp, Homo sapien
tagtttaaactcaatctggtctccc

SEQ ID NO: 1820576 - DNA, 25 bp, Homo sapien
gaaacactgagggatcttccttaaa

SEQ ID NO: 1820577 - DNA, 25 bp, Homo sapien
caatcttcaagatgggcaatgacac

SEQ ID NO: 1820578 - DNA, 25 bp, Homo sapien
gcaatgacacaggtacttctttaga

SEQ ID NO: 1820579 - DNA, 25 bp, Homo sapien
tcattccagtagcaaaagccttgcc

SEQ ID NO: 1820580 - DNA, 25 bp, Homo sapien
ggccttgcccaagaatcaacaggta

SEQ ID NO: 1820581 - DNA, 25 bp, Homo sapien
tagaatggcccctactgtcagaaga

SEQ ID NO: 1820582 - DNA, 25 bp, Homo sapien
ccaaatctgaattgatcgtagacac

SEQ ID NO: 1820583 - DNA, 25 bp, Homo sapien
gtcagaagatccatgccctccaaat

SEQ ID NO: 1820584 - DNA, 25 bp, Homo sapien
ctcacttagatgaggacaggtttga

SEQ ID NO: 1820585 - DNA, 25 bp, Homo sapien
cacttagatgaggacaggtttgaga

SEQ ID NO: 1820586 - DNA, 25 bp, Homo sapien
tcacttagatgaggacaggtttgag

SEQ ID NO: 1820587 - DNA, 25 bp, Homo sapien
acttagatgaggacaggtttgagaa

SEQ ID NO: 1820588 - DNA, 25 bp, Homo sapien
tcttcacctctacaatgggagtttg

SEQ ID NO: 1820589 - DNA, 25 bp, Homo sapien
taggaagtactgctgtgaacatcga

SEQ ID NO: 1820590 - DNA, 25 bp, Homo sapien
gattaatgatctaccctgtcctcct

SEQ ID NO: 1820591 - DNA, 25 bp, Homo sapien
gaagtgcatcggtttcaggcccaac

SEQ ID NO: 1820592 - DNA, 25 bp, Homo sapien
tatgggttgatattttaagtccaat

SEQ ID NO: 1820593 - DNA, 25 bp, Homo sapien
gttgatatgggttgatattttaagt

SEQ ID NO: 1820594 - DNA, 25 bp, Homo sapien
tgatatgggttgatattttaagtcc

SEQ ID NO: 1820595 - DNA, 25 bp, Homo sapien
gatatgggttgatattttaagtcca

SEQ ID NO: 1820596 - DNA, 25 bp, Homo sapien
ctcccaagagggcagatgccactcc

SEQ ID NO: 1820597 - DNA, 25 bp, Homo sapien
agcttttgcagctcccaagagggca

SEQ ID NO: 1820598 - DNA, 25 bp, Homo sapien
ccaagagggcagatgccactccctg

SEQ ID NO: 1820599 - DNA, 25 bp, Homo sapien
aagagggcagatgccactccctgcc

SEQ ID NO: 1820600 - DNA, 25 bp, Homo sapien
ggcccctcccacacttggagagtga

SEQ ID NO: 1820601 - DNA, 25 bp, Homo sapien
ctccggggagggtggctctacttca

SEQ ID NO: 1820602 - DNA, 25 bp, Homo sapien
ccctcccacacttggagagtgaggg

SEQ ID NO: 1820603 - DNA, 25 bp, Homo sapien
ctcccacacttggagagtgagggct

SEQ ID NO: 1820604 - DNA, 25 bp, Homo sapien
tgactctgttcggttcaagaaaggg

SEQ ID NO: 1820605 - DNA, 25 bp, Homo sapien
tcactcctggatgtgtactcattcc

SEQ ID NO: 1820606 - DNA, 25 bp, Homo sapien
tcagagaatggcagttgagcttgtc

SEQ ID NO: 1820607 - DNA, 25 bp, Homo sapien
actcagtatgccttgaactgctcag

SEQ ID NO: 1820608 - DNA, 25 bp, Homo sapien
ttctctgaatttccacatgctttat

SEQ ID NO: 1820609 - DNA, 25 bp, Homo sapien
tacttctctgaatttccacatgctt

SEQ ID NO: 1820610 - DNA, 25 bp, Homo sapien
acttctctgaatttccacatgcttt

SEQ ID NO: 1820611 - DNA, 25 bp, Homo sapien
ctacttctctgaatttccacatgct

SEQ ID NO: 1820612 - DNA, 25 bp, Homo sapien
gaaaaatgcccgtcagacttgcgga

SEQ ID NO: 1820613 - DNA, 25 bp, Homo sapien
cccgtcagacttgcggatggagctg

SEQ ID NO: 1820614 - DNA, 25 bp, Homo sapien
gcggatggagctgagctccagcaac

SEQ ID NO: 1820615 - DNA, 25 bp, Homo sapien
ctctggagaaaaatgcccgtcagac

SEQ ID NO: 1820616 - DNA, 25 bp, Homo sapien
cttgtaagatgctggattcagctgc

SEQ ID NO: 1820617 - DNA, 25 bp, Homo sapien
gagaccttgtaagatgctggattca

SEQ ID NO: 1820618 - DNA, 25 bp, Homo sapien
tgccatctgcctatatgtttcagct

SEQ ID NO: 1820619 - DNA, 25 bp, Homo sapien
tcacatttgtacccggagaccttgt

SEQ ID NO: 1820620 - DNA, 25 bp, Homo sapien
cagggaaggggcacagtcctcggga

SEQ ID NO: 1820621 - DNA, 25 bp, Homo sapien
gggcagggaaggggcacagtcctcg

SEQ ID NO: 1820622 - DNA, 25 bp, Homo sapien
ggcagggaaggggcacagtcctcgg

SEQ ID NO: 1820623 - DNA, 25 bp, Homo sapien
gcagggaaggggcacagtcctcggg

SEQ ID NO: 1820624 - DNA, 25 bp, Homo sapien
catatgatgcttcgattggctccac

SEQ ID NO: 1820625 - DNA, 25 bp, Homo sapien
cacgttcagccggtcagtgtgcaga

SEQ ID NO: 1820626 - DNA, 25 bp, Homo sapien
gcacaacattgctgattcacgttca

SEQ ID NO: 1820627 - DNA, 25 bp, Homo sapien
tgtgcagatgccaaacagcatatga

SEQ ID NO: 1820628 - DNA, 25 bp, Homo sapien
actgcagagagtgaacttttgagag

SEQ ID NO: 1820629 - DNA, 25 bp, Homo sapien
tgcagagagtgaacttttgagagaa

SEQ ID NO: 1820630 - DNA, 25 bp, Homo sapien
tgactgcagagagtgaacttttgag

SEQ ID NO: 1820631 - DNA, 25 bp, Homo sapien
gactgcagagagtgaacttttgaga

SEQ ID NO: 1820632 - DNA, 25 bp, Homo sapien
tgaaacatgctaacttgaagtcatc

SEQ ID NO: 1820633 - DNA, 25 bp, Homo sapien
acaaaaccacttaaatgacaatagc

SEQ ID NO: 1820634 - DNA, 25 bp, Homo sapien
tacaaaaccacttaaatgacaatag

SEQ ID NO: 1820635 - DNA, 25 bp, Homo sapien
aaacatgctaacttgaagtcatctc

SEQ ID NO: 1820636 - DNA, 25 bp, Homo sapien
ctccttaacgatggacacagctaaa

SEQ ID NO: 1820637 - DNA, 25 bp, Homo sapien
ttaacgatggacacagctaaactag

SEQ ID NO: 1820638 - DNA, 25 bp, Homo sapien
tccttaacgatggacacagctaaac

SEQ ID NO: 1820639 - DNA, 25 bp, Homo sapien
ccttaacgatggacacagctaaact

SEQ ID NO: 1820640 - DNA, 25 bp, Homo sapien
tgtgtttgtatcatcatccagactg

SEQ ID NO: 1820641 - DNA, 25 bp, Homo sapien
catttcacgacgactaatgatggcc

SEQ ID NO: 1820642 - DNA, 25 bp, Homo sapien
gctacatccatttcacgacgactaa

SEQ ID NO: 1820643 - DNA, 25 bp, Homo sapien
acgacgactaatgatggccacagcc

SEQ ID NO: 1820644 - DNA, 25 bp, Homo sapien
aaatttccacatattgctatgatat

SEQ ID NO: 1820645 - DNA, 25 bp, Homo sapien
ctctgttttgctaaatttccacata

SEQ ID NO: 1820646 - DNA, 25 bp, Homo sapien
tccacatattgctatgatattccga

SEQ ID NO: 1820647 - DNA, 25 bp, Homo sapien
ctaaatttccacatattgctatgat

SEQ ID NO: 1820648 - DNA, 25 bp, Homo sapien
tgcccccactcctattgaggcagat

SEQ ID NO: 1820649 - DNA, 25 bp, Homo sapien
gcccccactcctattgaggcagatg

SEQ ID NO: 1820650 - DNA, 25 bp, Homo sapien
cactatttctttgtaaggtatccca

SEQ ID NO: 1820651 - DNA, 25 bp, Homo sapien
tatttcggaatttatgttccacttc

SEQ ID NO: 1820652 - DNA, 25 bp, Homo sapien
tatttctttgtaaggtatcccagtg

SEQ ID NO: 1820653 - DNA, 25 bp, Homo sapien
ctttgtaaggtatcccagtgggaag

SEQ ID NO: 1820654 - DNA, 25 bp, Homo sapien
gaaaccgtgggcacgctgcctggat

SEQ ID NO: 1820655 - DNA, 25 bp, Homo sapien
tcaggaaaccgtgggcacgctgcct

SEQ ID NO: 1820656 - DNA, 25 bp, Homo sapien
cctggatcgggcacagaatcagagc

SEQ ID NO: 1820657 - DNA, 25 bp, Homo sapien
acgctgcctggatcgggcacagaat

SEQ ID NO: 1820658 - DNA, 25 bp, Homo sapien
tgaaacctgcgcataccctcactgt

SEQ ID NO: 1820659 - DNA, 25 bp, Homo sapien
cctcactgtagccattgagaaatgc

SEQ ID NO: 1820660 - DNA, 25 bp, Homo sapien
agggtagacgcctccactgaaacct

SEQ ID NO: 1820661 - DNA, 25 bp, Homo sapien
tggtaaactgagtacagggtagacg

SEQ ID NO: 1820662 - DNA, 25 bp, Homo sapien
tagacaccttgtgggtacttcaaag

SEQ ID NO: 1820663 - DNA, 25 bp, Homo sapien
ctctcatagacaccttgtgggtact

SEQ ID NO: 1820664 - DNA, 25 bp, Homo sapien
tcatagacaccttgtgggtacttca

SEQ ID NO: 1820665 - DNA, 25 bp, Homo sapien
gacaccttgtgggtacttcaaagat

SEQ ID NO: 1820666 - DNA, 25 bp, Homo sapien
tgaactgacagttacgtccacccag

SEQ ID NO: 1820667 - DNA, 25 bp, Homo sapien
aactgacagttacgtccacccagca

SEQ ID NO: 1820668 - DNA, 25 bp, Homo sapien
tcctttgtgcctgaactgacagtta

SEQ ID NO: 1820669 - DNA, 25 bp, Homo sapien
agggcgcctgctcctttgtgcctga

SEQ ID NO: 1820670 - DNA, 25 bp, Homo sapien
gaagtgtagacagtgacatccatga

SEQ ID NO: 1820671 - DNA, 25 bp, Homo sapien
caagttttgggttggccaccatgga

SEQ ID NO: 1820672 - DNA, 25 bp, Homo sapien
taactggatacaggtctgagtcctg

SEQ ID NO: 1820673 - DNA, 25 bp, Homo sapien
cacagcagtgcaaggctgggttgca

SEQ ID NO: 1820674 - DNA, 25 bp, Homo sapien
gaagtaaggacctccttcacatggt

SEQ ID NO: 1820675 - DNA, 25 bp, Homo sapien
taattgacccacaggcttaacagaa

SEQ ID NO: 1820676 - DNA, 25 bp, Homo sapien
gcaaagggagacatgtcacacactt

SEQ ID NO: 1820677 - DNA, 25 bp, Homo sapien
acttaacattaaggcagaaggtgaa

SEQ ID NO: 1820678 - DNA, 25 bp, Homo sapien
tatgaatacatatgactatacactg

SEQ ID NO: 1820679 - DNA, 25 bp, Homo sapien
tgactatacactgttagaagcagcc

SEQ ID NO: 1820680 - DNA, 25 bp, Homo sapien
ggacttcactattcatcactatcag

SEQ ID NO: 1820681 - DNA, 25 bp, Homo sapien
tatctttataggaatgccccacctc

SEQ ID NO: 1820682 - DNA, 25 bp, Homo sapien
aagcacggctgggaggcgtcaggaa

SEQ ID NO: 1820683 - DNA, 25 bp, Homo sapien
ggaagcacggctgggaggcgtcagg

SEQ ID NO: 1820684 - DNA, 25 bp, Homo sapien
ttaacaggaagcacggctgggaggc

SEQ ID NO: 1820685 - DNA, 25 bp, Homo sapien
aacaggaagcacggctgggaggcgt

SEQ ID NO: 1820686 - DNA, 25 bp, Homo sapien
ctggttcctcttctttccacacgcc

SEQ ID NO: 1820687 - DNA, 25 bp, Homo sapien
aacattcttttctggttcctcttct

SEQ ID NO: 1820688 - DNA, 25 bp, Homo sapien
gttcctcttctttccacacgccaca

SEQ ID NO: 1820689 - DNA, 25 bp, Homo sapien
tcaagccagaacttcacaaacattc

SEQ ID NO: 1820690 - DNA, 25 bp, Homo sapien
gaagctaacgttgagtggaactcga

SEQ ID NO: 1820691 - DNA, 25 bp, Homo sapien
actcgaagaggtctaccagagagca

SEQ ID NO: 1820692 - DNA, 25 bp, Homo sapien
aagtttgcaggatggaagctaacgt

SEQ ID NO: 1820693 - DNA, 25 bp, Homo sapien
gagacagagtcaagaacagcttata

SEQ ID NO: 1820694 - DNA, 25 bp, Homo sapien
gtaattccttcatgtatatgccctc

SEQ ID NO: 1820695 - DNA, 25 bp, Homo sapien
aattccttcatgtatatgccctcca

SEQ ID NO: 1820696 - DNA, 25 bp, Homo sapien
attccttcatgtatatgccctccat

SEQ ID NO: 1820697 - DNA, 25 bp, Homo sapien
taattccttcatgtatatgccctcc

SEQ ID NO: 1820698 - DNA, 25 bp, Homo sapien
tcctcactcacatatgttcagagct

SEQ ID NO: 1820699 - DNA, 25 bp, Homo sapien
ggctaccacgcttccaccagggccg

SEQ ID NO: 1820700 - DNA, 25 bp, Homo sapien
catatcccaagggaaagcttctgtg

SEQ ID NO: 1820701 - DNA, 25 bp, Homo sapien
agctctctttacaactgctggagca

SEQ ID NO: 1820702 - DNA, 25 bp, Homo sapien
gactgggcacgtcagggaaagaaca

SEQ ID NO: 1820703 - DNA, 25 bp, Homo sapien
tccccatggagtcagtgaatgtctt

SEQ ID NO: 1820704 - DNA, 25 bp, Homo sapien
gagtgggacgatcagacaattaagc

SEQ ID NO: 1820705 - DNA, 25 bp, Homo sapien
gaatgtcttagccaagccactcaga

SEQ ID NO: 1820706 - DNA, 25 bp, Homo sapien
agtagtcagacgatggtgaggttgg

SEQ ID NO: 1820707 - DNA, 25 bp, Homo sapien
tcagacgatggtgaggttggtatct

SEQ ID NO: 1820708 - DNA, 25 bp, Homo sapien
gtcagacgatggtgaggttggtatc

SEQ ID NO: 1820709 - DNA, 25 bp, Homo sapien
tagtcagacgatggtgaggttggta

SEQ ID NO: 1820710 - DNA, 25 bp, Homo sapien
tgctagatgaaagtgaacgctgcca

SEQ ID NO: 1820711 - DNA, 25 bp, Homo sapien
cagaagggaagcaagccacgtaggt

SEQ ID NO: 1820712 - DNA, 25 bp, Homo sapien
caagagtctgtagttctgaagaggc

SEQ ID NO: 1820713 - DNA, 25 bp, Homo sapien
tccattggtgggaacgttttacagc

SEQ ID NO: 1820714 - DNA, 25 bp, Homo sapien
tatacgtatcgactacaattgtgtc

SEQ ID NO: 1820715 - DNA, 25 bp, Homo sapien
tatccaaacggttacagcaatggtg

SEQ ID NO: 1820716 - DNA, 25 bp, Homo sapien
caagagatagctagcatgcatcgcg

SEQ ID NO: 1820717 - DNA, 25 bp, Homo sapien
gcagcttaagcctgggcaaaagtat

SEQ ID NO: 1820718 - DNA, 25 bp, Homo sapien
gaaatgctggcataagagagtcaaa

SEQ ID NO: 1820719 - DNA, 25 bp, Homo sapien
aatgtgtgagtcaattcccgaggaa

SEQ ID NO: 1820720 - DNA, 25 bp, Homo sapien
gaacacaccgtttacatatctgaga

SEQ ID NO: 1820721 - DNA, 25 bp, Homo sapien
tatctgagatgaaaccggaagccag

SEQ ID NO: 1820722 - DNA, 25 bp, Homo sapien
cctcacttctggcagggttcacatg

SEQ ID NO: 1820723 - DNA, 25 bp, Homo sapien
caagggagtgccacatagaggccaa

SEQ ID NO: 1820724 - DNA, 25 bp, Homo sapien
tataatgctgtcctcccttgggtgg

SEQ ID NO: 1820725 - DNA, 25 bp, Homo sapien
ggaagccatagaagtcaacaggaca

SEQ ID NO: 1820726 - DNA, 25 bp, Homo sapien
atttccattgcagatatcatagaca

SEQ ID NO: 1820727 - DNA, 25 bp, Homo sapien
gacaatgatgcatcttccaggtcag

SEQ ID NO: 1820728 - DNA, 25 bp, Homo sapien
gatttgcaaggctgaaattgcctag

SEQ ID NO: 1820729 - DNA, 25 bp, Homo sapien
aactgtctggaacactacattggca

SEQ ID NO: 1820730 - DNA, 25 bp, Homo sapien
ttagatttctatggcctcctctatt

SEQ ID NO: 1820731 - DNA, 25 bp, Homo sapien
gatttctatggcctcctctatttct

SEQ ID NO: 1820732 - DNA, 25 bp, Homo sapien
tatggcctcctctatttctgtttca

SEQ ID NO: 1820733 - DNA, 25 bp, Homo sapien
ttctgtttcaatgtgctcctttcca

SEQ ID NO: 1820734 - DNA, 25 bp, Homo sapien
gggcatggtggtgtagtcctggcta

SEQ ID NO: 1820735 - DNA, 25 bp, Homo sapien
tgcagtggctatgcctctcatccca

SEQ ID NO: 1820736 - DNA, 25 bp, Homo sapien
tctcatcccagcagctacagaggct

SEQ ID NO: 1820737 - DNA, 25 bp, Homo sapien
ccgaggggcacagattgcttgagct

SEQ ID NO: 1820738 - DNA, 25 bp, Homo sapien
gtcctccattcaccagatgtcatca

SEQ ID NO: 1820739 - DNA, 25 bp, Homo sapien
ttcaccagatgtcatcacagactct

SEQ ID NO: 1820740 - DNA, 25 bp, Homo sapien
ctccattcaccagatgtcatcacag

SEQ ID NO: 1820741 - DNA, 25 bp, Homo sapien
tcaccagatgtcatcacagactctg

SEQ ID NO: 1820742 - DNA, 25 bp, Homo sapien
accctcctcccaactagaggctgac

SEQ ID NO: 1820743 - DNA, 25 bp, Homo sapien
aatttactaacaattgactttcact

SEQ ID NO: 1820744 - DNA, 25 bp, Homo sapien
tcagcaactgttataagatagaggg

SEQ ID NO: 1820745 - DNA, 25 bp, Homo sapien
ctagaggctgacttaaaatttacta

SEQ ID NO: 1820746 - DNA, 25 bp, Homo sapien
gaatagcaaatgattcctgcccctg

SEQ ID NO: 1820747 - DNA, 25 bp, Homo sapien
gagcaaacctctgaacgtacatggg

SEQ ID NO: 1820748 - DNA, 25 bp, Homo sapien
tccctggctagactctgtgtacgca

SEQ ID NO: 1820749 - DNA, 25 bp, Homo sapien
gacggtgttacgcacaagaatagca

SEQ ID NO: 1820750 - DNA, 25 bp, Homo sapien
tcctgcggacgcttcctggatctaa

SEQ ID NO: 1820751 - DNA, 25 bp, Homo sapien
aggtggcggtagtaaccaatggcaa

SEQ ID NO: 1820752 - DNA, 25 bp, Homo sapien
tatcagcttctcattgtcctgcgga

SEQ ID NO: 1820753 - DNA, 25 bp, Homo sapien
tgtagttcacaatttcagccaggag

SEQ ID NO: 1820754 - DNA, 25 bp, Homo sapien
caggcaaggtgctcggactgaaata

SEQ ID NO: 1820755 - DNA, 25 bp, Homo sapien
taaatcaagccatagggcaaaccga

SEQ ID NO: 1820756 - DNA, 25 bp, Homo sapien
tcagcactgcagcaaacaggcaagg

SEQ ID NO: 1820757 - DNA, 25 bp, Homo sapien
agatccctaatcatgagtcagtcag

SEQ ID NO: 1820758 - DNA, 25 bp, Homo sapien
tggttataacatcccacctgcctca

SEQ ID NO: 1820759 - DNA, 25 bp, Homo sapien
aatgagttaataagtcggccgccaa

SEQ ID NO: 1820760 - DNA, 25 bp, Homo sapien
gaagatcttgccagggttgtcccag

SEQ ID NO: 1820761 - DNA, 25 bp, Homo sapien
cctcaccagcaggtagcttattaga

SEQ ID NO: 1820762 - DNA, 25 bp, Homo sapien
cctccagtccgcctttccaggctga

SEQ ID NO: 1820763 - DNA, 25 bp, Homo sapien
ccagtccgcctttccaggctgagag

SEQ ID NO: 1820764 - DNA, 25 bp, Homo sapien
tccagtccgcctttccaggctgaga

SEQ ID NO: 1820765 - DNA, 25 bp, Homo sapien
cccctccagtccgcctttccaggct

SEQ ID NO: 1820766 - DNA, 25 bp, Homo sapien
tgatggaatgaacacccagcgatgg

SEQ ID NO: 1820767 - DNA, 25 bp, Homo sapien
gatggttccgtactgatgttcccag

SEQ ID NO: 1820768 - DNA, 25 bp, Homo sapien
tagacagacgcagggtgtcctgagc

SEQ ID NO: 1820769 - DNA, 25 bp, Homo sapien
tcaaaaaggtgaccactccacagga

SEQ ID NO: 1820770 - DNA, 25 bp, Homo sapien
ctcacagatcacagttccagaactg

SEQ ID NO: 1820771 - DNA, 25 bp, Homo sapien
cacagatcacagttccagaactgct

SEQ ID NO: 1820772 - DNA, 25 bp, Homo sapien
tcacagatcacagttccagaactgc

SEQ ID NO: 1820773 - DNA, 25 bp, Homo sapien
ggcattgaaaggcacacctctcggt

SEQ ID NO: 1820774 - DNA, 25 bp, Homo sapien
tgtgtagccacgtgggatgtaccca

SEQ ID NO: 1820775 - DNA, 25 bp, Homo sapien
acctctcggtggaagcagttggcca

SEQ ID NO: 1820776 - DNA, 25 bp, Homo sapien
tcagtctgctcttacaccggtgtgt

SEQ ID NO: 1820777 - DNA, 25 bp, Homo sapien
gaggccttagaggtcagctcaccaa

SEQ ID NO: 1820778 - DNA, 25 bp, Homo sapien
gaaggcaaagctatcgaggcagtaa

SEQ ID NO: 1820779 - DNA, 25 bp, Homo sapien
gagagaacatgcaccctcttatggg

SEQ ID NO: 1820780 - DNA, 25 bp, Homo sapien
caccagcgcgtgagaatgaggcata

SEQ ID NO: 1820781 - DNA, 25 bp, Homo sapien
catgtgcagcgtgttcacccttgga

SEQ ID NO: 1820782 - DNA, 25 bp, Homo sapien
ttggttgcactctctccgctgtcgg

SEQ ID NO: 1820783 - DNA, 25 bp, Homo sapien
tgaagtgagttaagtccctcggccc

SEQ ID NO: 1820784 - DNA, 25 bp, Homo sapien
gaggaatgttgtcccgagaggtcca

SEQ ID NO: 1820785 - DNA, 25 bp, Homo sapien
agcagcaagatgagcagaattttcc

SEQ ID NO: 1820786 - DNA, 25 bp, Homo sapien
cagaaccaccctgcagctgagcagc

SEQ ID NO: 1820787 - DNA, 25 bp, Homo sapien
ccatctccccgagggacagctgctc

SEQ ID NO: 1820788 - DNA, 25 bp, Homo sapien
gagggacagctgctcccagaaccac

SEQ ID NO: 1820789 - DNA, 25 bp, Homo sapien
aaggtaatccattcgcctgaagagg

SEQ ID NO: 1820790 - DNA, 25 bp, Homo sapien
tgggctaacgctttttcaggtcact

SEQ ID NO: 1820791 - DNA, 25 bp, Homo sapien
cctgaagaggcatgcagcatcttga

SEQ ID NO: 1820792 - DNA, 25 bp, Homo sapien
gaatggcattccctctggaatctga

SEQ ID NO: 1820793 - DNA, 25 bp, Homo sapien
gatgcttcactatggcttcaactct

SEQ ID NO: 1820794 - DNA, 25 bp, Homo sapien
gaatattatcttcctggcagccgtc

SEQ ID NO: 1820795 - DNA, 25 bp, Homo sapien
ggagctgtcccaagacctgagcctt

SEQ ID NO: 1820796 - DNA, 25 bp, Homo sapien
tgagccttcttagtttggtgatgct

SEQ ID NO: 1820797 - DNA, 25 bp, Homo sapien
ctttgaagagaacagatcttgaggg

SEQ ID NO: 1820798 - DNA, 25 bp, Homo sapien
gaagagaacagatcttgagggggat

SEQ ID NO: 1820799 - DNA, 25 bp, Homo sapien
tgaagagaacagatcttgaggggga

SEQ ID NO: 1820800 - DNA, 25 bp, Homo sapien
tttgaagagaacagatcttgagggg

SEQ ID NO: 1820801 - DNA, 25 bp, Homo sapien
accgatatatccagagcatgggacc

SEQ ID NO: 1820802 - DNA, 25 bp, Homo sapien
ggtgggatctctgatcagtcacaga

SEQ ID NO: 1820803 - DNA, 25 bp, Homo sapien
tgccagggaccgatatatccagagc

SEQ ID NO: 1820804 - DNA, 25 bp, Homo sapien
cagtcacagaaggagcttgacgagc

SEQ ID NO: 1820805 - DNA, 25 bp, Homo sapien
gatgcatcgtctcaccatgctggag

SEQ ID NO: 1820806 - DNA, 25 bp, Homo sapien
tatagggaggagtgaaccagttcca

SEQ ID NO: 1820807 - DNA, 25 bp, Homo sapien
tcaatcagctggacaaggagtatct

SEQ ID NO: 1820808 - DNA, 25 bp, Homo sapien
ttatattatagtcgggagagcaccc

SEQ ID NO: 1820809 - DNA, 25 bp, Homo sapien
tcttcccaccgcacatctcttccta

SEQ ID NO: 1820810 - DNA, 25 bp, Homo sapien
cccctggggcgttcaggattggcct

SEQ ID NO: 1820811 - DNA, 25 bp, Homo sapien
gcgttcaggattggcctctgcccct

SEQ ID NO: 1820812 - DNA, 25 bp, Homo sapien
tctcttcttcccaccgcacatctct

SEQ ID NO: 1820813 - DNA, 25 bp, Homo sapien
gccacaatgttaatcaaccccagag

SEQ ID NO: 1820814 - DNA, 25 bp, Homo sapien
gctgccattttctgcccatgaaggg

SEQ ID NO: 1820815 - DNA, 25 bp, Homo sapien
gaaatacccaaggtactctggcaga

SEQ ID NO: 1820816 - DNA, 25 bp, Homo sapien
ccttaattttggacatgggagcaca

SEQ ID NO: 1820817 - DNA, 25 bp, Homo sapien
gatagaattatccttagacatgcaa

SEQ ID NO: 1820818 - DNA, 25 bp, Homo sapien
gacatgcaaggacgaaaatttacct

SEQ ID NO: 1820819 - DNA, 25 bp, Homo sapien
gagctgacagctacactgtgcagtc

SEQ ID NO: 1820820 - DNA, 25 bp, Homo sapien
gaagggacctaggaaccagtgagtc

SEQ ID NO: 1820821 - DNA, 25 bp, Homo sapien
aaactctggaccacttgcgccaggg

SEQ ID NO: 1820822 - DNA, 25 bp, Homo sapien
gacaccaagtctgcatccttagcct

SEQ ID NO: 1820823 - DNA, 25 bp, Homo sapien
accacttgcgccagggacaccaagt

SEQ ID NO: 1820824 - DNA, 25 bp, Homo sapien
gggacaccaagtctgcatccttagc

SEQ ID NO: 1820825 - DNA, 25 bp, Homo sapien
tgactcatcactcttcctcctggaa

SEQ ID NO: 1820826 - DNA, 25 bp, Homo sapien
tattgtgtcttaataacctctgcgg

SEQ ID NO: 1820827 - DNA, 25 bp, Homo sapien
tacttactaacctcctgtaggctgg

SEQ ID NO: 1820828 - DNA, 25 bp, Homo sapien
gctcttatcacactggttactgctg

SEQ ID NO: 1820829 - DNA, 25 bp, Homo sapien
tactttgaggcaagggagtggcttt

SEQ ID NO: 1820830 - DNA, 25 bp, Homo sapien
taaacgccagcagttcataaccctc

SEQ ID NO: 1820831 - DNA, 25 bp, Homo sapien
aaagaagctgctggcttaaacgcca

SEQ ID NO: 1820832 - DNA, 25 bp, Homo sapien
cacataggtaatttactttgaggca

SEQ ID NO: 1820833 - DNA, 25 bp, Homo sapien
ccacagggaagctcaattatcctaa

SEQ ID NO: 1820834 - DNA, 25 bp, Homo sapien
tcctaataggaggatagctgccctt

SEQ ID NO: 1820835 - DNA, 25 bp, Homo sapien
aggtcaaagtattcaatccacaggg

SEQ ID NO: 1820836 - DNA, 25 bp, Homo sapien
gagttaaccgagttaggagccacag

SEQ ID NO: 1820837 - DNA, 25 bp, Homo sapien
actcaatagccaagccgcagacctt

SEQ ID NO: 1820838 - DNA, 25 bp, Homo sapien
aatgaatccataaacccttggggtg

SEQ ID NO: 1820839 - DNA, 25 bp, Homo sapien
caaacttcgttctttctgacgttca

SEQ ID NO: 1820840 - DNA, 25 bp, Homo sapien
taggttcacgctctcactgactcaa

SEQ ID NO: 1820841 - DNA, 25 bp, Homo sapien
tggttccaaaggcagtgcgtcctgc

SEQ ID NO: 1820842 - DNA, 25 bp, Homo sapien
gaaccagtaggactggcacggccat

SEQ ID NO: 1820843 - DNA, 25 bp, Homo sapien
caggtcgtttgagctctgctaggga

SEQ ID NO: 1820844 - DNA, 25 bp, Homo sapien
acgcggagcgtgaggtccctccaat

SEQ ID NO: 1820845 - DNA, 25 bp, Homo sapien
tagtccaggccgatggatccttgcc

SEQ ID NO: 1820846 - DNA, 25 bp, Homo sapien
tctcctcagaataagggagggctgt

SEQ ID NO: 1820847 - DNA, 25 bp, Homo sapien
tagaacagatcctcaagtgccctgg

SEQ ID NO: 1820848 - DNA, 25 bp, Homo sapien
gaaaccactgataaatagtccaggc

SEQ ID NO: 1820849 - DNA, 25 bp, Homo sapien
gagggccactctgtaggtctggcca

SEQ ID NO: 1820850 - DNA, 25 bp, Homo sapien
ctgagcggtcgctgctggtgacaca

SEQ ID NO: 1820851 - DNA, 25 bp, Homo sapien
attcagcgaccaaggctcccctgag

SEQ ID NO: 1820852 - DNA, 25 bp, Homo sapien
accacaccacccaaagagccattca

SEQ ID NO: 1820853 - DNA, 25 bp, Homo sapien
cgatgattcatgctggttgtttaca

SEQ ID NO: 1820854 - DNA, 25 bp, Homo sapien
cacgtcttggaattagctgagctgt

SEQ ID NO: 1820855 - DNA, 25 bp, Homo sapien
cagttccccagtctttgcaaacggg

SEQ ID NO: 1820856 - DNA, 25 bp, Homo sapien
gagatgactactgacttccgcgatg

SEQ ID NO: 1820857 - DNA, 25 bp, Homo sapien
gttccgttttgtctcctctgggcag

SEQ ID NO: 1820858 - DNA, 25 bp, Homo sapien
ctgggcagctgacaagatggagtcc

SEQ ID NO: 1820859 - DNA, 25 bp, Homo sapien
tagtggattaaactgcaatgcagac

SEQ ID NO: 1820860 - DNA, 25 bp, Homo sapien
caaggagctgacaactgtgcaaagc

SEQ ID NO: 1820861 - DNA, 25 bp, Homo sapien
ccccagtggagagtcagaagcctgg

SEQ ID NO: 1820862 - DNA, 25 bp, Homo sapien
gcagtcctcggcttcagcttgtcca

SEQ ID NO: 1820863 - DNA, 25 bp, Homo sapien
gatgggaagagttgctgcagtcctc

SEQ ID NO: 1820864 - DNA, 25 bp, Homo sapien
gcctgggaggatgctaagcattcca

SEQ ID NO: 1820865 - DNA, 25 bp, Homo sapien
ttgtgcatcatatagtttatattta

SEQ ID NO: 1820866 - DNA, 25 bp, Homo sapien
atatttaatatacagaaacttttct

SEQ ID NO: 1820867 - DNA, 25 bp, Homo sapien
tatacagaaacttttctttaaggca

SEQ ID NO: 1820868 - DNA, 25 bp, Homo sapien
tagtttatatttaatatacagaaac

SEQ ID NO: 1820869 - DNA, 25 bp, Homo sapien
tgaaatcttaggacttttggaaggc

SEQ ID NO: 1820870 - DNA, 25 bp, Homo sapien
cacctgaaatcttaggacttttgga

SEQ ID NO: 1820871 - DNA, 25 bp, Homo sapien
ctgcagcaggtgtggcggtgacgcg

SEQ ID NO: 1820872 - DNA, 25 bp, Homo sapien
gcaggtgtggcggtgacgcgggttg

SEQ ID NO: 1820873 - DNA, 25 bp, Homo sapien
gtgtggcggtgacgcgggttgtttg

SEQ ID NO: 1820874 - DNA, 25 bp, Homo sapien
tgcagcaggtgtggcggtgacgcgg

SEQ ID NO: 1820875 - DNA, 25 bp, Homo sapien
gagtggacgctttgccgagattcca

SEQ ID NO: 1820876 - DNA, 25 bp, Homo sapien
gctggtgggaacactagaggtgaga

SEQ ID NO: 1820877 - DNA, 25 bp, Homo sapien
ctcaagagccgctttccaggcacag

SEQ ID NO: 1820878 - DNA, 25 bp, Homo sapien
cctctctaaggagggctagcaacgc

SEQ ID NO: 1820879 - DNA, 25 bp, Homo sapien
acagcgtgaggtggtgcggccatcc

SEQ ID NO: 1820880 - DNA, 25 bp, Homo sapien
ttggacagcgtgaggtggtgcggcc

SEQ ID NO: 1820881 - DNA, 25 bp, Homo sapien
ctctcttggacagcgtgaggtggtg

SEQ ID NO: 1820882 - DNA, 25 bp, Homo sapien
agcgtgaggtggtgcggccatccag

SEQ ID NO: 1820883 - DNA, 25 bp, Homo sapien
agtaagtcctgacaacatccaggag

SEQ ID NO: 1820884 - DNA, 25 bp, Homo sapien
gcagaaagcccaggaagtaagtcct

SEQ ID NO: 1820885 - DNA, 25 bp, Homo sapien
gataactgctgatcctattctgcag

SEQ ID NO: 1820886 - DNA, 25 bp, Homo sapien
gaccctttgtgaatcgataactgct

SEQ ID NO: 1820887 - DNA, 25 bp, Homo sapien
ctctcagttccaaatcgttgcttct

SEQ ID NO: 1820888 - DNA, 25 bp, Homo sapien
tatccagcacactcaacaataggca

SEQ ID NO: 1820889 - DNA, 25 bp, Homo sapien
taggcattcatccagaactctcagt

SEQ ID NO: 1820890 - DNA, 25 bp, Homo sapien
tggacctctttgtacagggctcgtt

SEQ ID NO: 1820891 - DNA, 25 bp, Homo sapien
cacgcccagcccatacttcaagtct

SEQ ID NO: 1820892 - DNA, 25 bp, Homo sapien
ggcagaccctagaactaaaagtcag

SEQ ID NO: 1820893 - DNA, 25 bp, Homo sapien
acttcgaatgtgctatttaaaaggg

SEQ ID NO: 1820894 - DNA, 25 bp, Homo sapien
gatgtatctccttgagataatcaag

SEQ ID NO: 1820895 - DNA, 25 bp, Homo sapien
ttcttcctaacagacgggtacaaga

SEQ ID NO: 1820896 - DNA, 25 bp, Homo sapien
gcgtgctttgaaatggttgattttc

SEQ ID NO: 1820897 - DNA, 25 bp, Homo sapien
tcttcctaacagacgggtacaagaa

SEQ ID NO: 1820898 - DNA, 25 bp, Homo sapien
ggaaggcttcagatttgcagcgtgc

SEQ ID NO: 1820899 - DNA, 25 bp, Homo sapien
taacttagtgggactgtctgcacca

SEQ ID NO: 1820900 - DNA, 25 bp, Homo sapien
ttgcctcagtgtggcctgtaatggt

SEQ ID NO: 1820901 - DNA, 25 bp, Homo sapien
gctgctttgcctcagtgtggcctgt

SEQ ID NO: 1820902 - DNA, 25 bp, Homo sapien
cagtctccttaacttagtgggactg

SEQ ID NO: 1820903 - DNA, 25 bp, Homo sapien
aggagaactgaagattttatcatct

SEQ ID NO: 1820904 - DNA, 25 bp, Homo sapien
ttaaggagaactgaagattttatca

SEQ ID NO: 1820905 - DNA, 25 bp, Homo sapien
ctgctgtggctgtcccatgaaccac

SEQ ID NO: 1820906 - DNA, 25 bp, Homo sapien
tgaagattttatcatctgctgtggc

SEQ ID NO: 1820907 - DNA, 25 bp, Homo sapien
ttcccgccaatgtgcacttgtacct

SEQ ID NO: 1820908 - DNA, 25 bp, Homo sapien
tgcacttgtacctgtagtttggtga

SEQ ID NO: 1820909 - DNA, 25 bp, Homo sapien
tgtacctgtagtttggtgagttttc

SEQ ID NO: 1820910 - DNA, 25 bp, Homo sapien
cctttcccgccaatgtgcacttgta

SEQ ID NO: 1820911 - DNA, 25 bp, Homo sapien
ccacagtcttcacatttggtctcat

SEQ ID NO: 1820912 - DNA, 25 bp, Homo sapien
ctgcctgaaagtgtccacagtcttc

SEQ ID NO: 1820913 - DNA, 25 bp, Homo sapien
cctgaaagtgtccacagtcttcaca

SEQ ID NO: 1820914 - DNA, 25 bp, Homo sapien
tccacagtcttcacatttggtctca

SEQ ID NO: 1820915 - DNA, 25 bp, Homo sapien
tgcagtgacacctggacctcgaggt

SEQ ID NO: 1820916 - DNA, 25 bp, Homo sapien
tcggagacagtccttttcaggccat

SEQ ID NO: 1820917 - DNA, 25 bp, Homo sapien
ctcgaggtgagccacaagcacggtg

SEQ ID NO: 1820918 - DNA, 25 bp, Homo sapien
ggtgggatgcttcccgtccatggca

SEQ ID NO: 1820919 - DNA, 25 bp, Homo sapien
tgacgcgctgtcagtttctgttctg

SEQ ID NO: 1820920 - DNA, 25 bp, Homo sapien
gcaggtctctgacgcgctgtcagtt

SEQ ID NO: 1820921 - DNA, 25 bp, Homo sapien
tctctgacgcgctgtcagtttctgt

SEQ ID NO: 1820922 - DNA, 25 bp, Homo sapien
ctgtcatgcaggtctctgacgcgct

SEQ ID NO: 1820923 - DNA, 25 bp, Homo sapien
gactaagtcagaataagctcctcca

SEQ ID NO: 1820924 - DNA, 25 bp, Homo sapien
taagctcctccaactcgacttgatc

SEQ ID NO: 1820925 - DNA, 25 bp, Homo sapien
gtcagaataagctcctccaactcga

SEQ ID NO: 1820926 - DNA, 25 bp, Homo sapien
catagactaagtcagaataagctcc

SEQ ID NO: 1820927 - DNA, 25 bp, Homo sapien
aatgctgaggttgccgataatggtc

SEQ ID NO: 1820928 - DNA, 25 bp, Homo sapien
gataatggtcgcgtgtgtttccctc

SEQ ID NO: 1820929 - DNA, 25 bp, Homo sapien
tccaaatcatgagcggcaagaagct

SEQ ID NO: 1820930 - DNA, 25 bp, Homo sapien
gatttaggacaatgagtttctctcc

SEQ ID NO: 1820931 - DNA, 25 bp, Homo sapien
tttaaacgaacatctgtctggggca

SEQ ID NO: 1820932 - DNA, 25 bp, Homo sapien
cccttcctacgggacagtcctgcag

SEQ ID NO: 1820933 - DNA, 25 bp, Homo sapien
tgcaggtccatcagagtatttgatt

SEQ ID NO: 1820934 - DNA, 25 bp, Homo sapien
tgggaagtaagatcctcggcggccc

SEQ ID NO: 1820935 - DNA, 25 bp, Homo sapien
gctgcccgaggacttctgagtaggt

SEQ ID NO: 1820936 - DNA, 25 bp, Homo sapien
aatgctgcccgaggacttctgagta

SEQ ID NO: 1820937 - DNA, 25 bp, Homo sapien
taaatgctgcccgaggacttctgag

SEQ ID NO: 1820938 - DNA, 25 bp, Homo sapien
tgctgcccgaggacttctgagtagg

SEQ ID NO: 1820939 - DNA, 25 bp, Homo sapien
ttattatacacgcaggctcttggtg

SEQ ID NO: 1820940 - DNA, 25 bp, Homo sapien
tgaaactgatagattgtaattcacg

SEQ ID NO: 1820941 - DNA, 25 bp, Homo sapien
gatagattgtaattcacgttccagt

SEQ ID NO: 1820942 - DNA, 25 bp, Homo sapien
cttgtatgagtactccacgggttta

SEQ ID NO: 1820943 - DNA, 25 bp, Homo sapien
cagatccttttcagtctggagagct

SEQ ID NO: 1820944 - DNA, 25 bp, Homo sapien
cactgaaaccatccagatccttttc

SEQ ID NO: 1820945 - DNA, 25 bp, Homo sapien
ccagatccttttcagtctggagagc

SEQ ID NO: 1820946 - DNA, 25 bp, Homo sapien
tccagatccttttcagtctggagag

SEQ ID NO: 1820947 - DNA, 25 bp, Homo sapien
ctggctgactctgactcgtgtgttc

SEQ ID NO: 1820948 - DNA, 25 bp, Homo sapien
tggctgactctgactcgtgtgttcc

SEQ ID NO: 1820949 - DNA, 25 bp, Homo sapien
ggctgactctgactcgtgtgttcca

SEQ ID NO: 1820950 - DNA, 25 bp, Homo sapien
gctgactctgactcgtgtgttccag

SEQ ID NO: 1820951 - DNA, 25 bp, Homo sapien
tcaggtaacaagaagagaactgtac

SEQ ID NO: 1820952 - DNA, 25 bp, Homo sapien
ggtgttgactatagccgtgggcctc

SEQ ID NO: 1820953 - DNA, 25 bp, Homo sapien
tcctggtgttgactatagccgtggg

SEQ ID NO: 1820954 - DNA, 25 bp, Homo sapien
gactatagccgtgggcctctgagaa

SEQ ID NO: 1820955 - DNA, 25 bp, Homo sapien
ttgactatagccgtgggcctctgag

SEQ ID NO: 1820956 - DNA, 25 bp, Homo sapien
tcagggcaacgtccagcatcaagat

SEQ ID NO: 1820957 - DNA, 25 bp, Homo sapien
acgtccagcatcaagatgagctcct

SEQ ID NO: 1820958 - DNA, 25 bp, Homo sapien
caacgtccagcatcaagatgagctc

SEQ ID NO: 1820959 - DNA, 25 bp, Homo sapien
gggcaacgtccagcatcaagatgag

SEQ ID NO: 1820960 - DNA, 25 bp, Homo sapien
cccctatttgaatcagctgcgtggc

SEQ ID NO: 1820961 - DNA, 25 bp, Homo sapien
cacgtgcctgtcattcggtctctct

SEQ ID NO: 1820962 - DNA, 25 bp, Homo sapien
ccagcggccgcatgcaggaaagctg

SEQ ID NO: 1820963 - DNA, 25 bp, Homo sapien
tatttgaatcagctgcgtggccacg

SEQ ID NO: 1820964 - DNA, 25 bp, Homo sapien
ttaacaagtgtggaagtgtcccagc

SEQ ID NO: 1820965 - DNA, 25 bp, Homo sapien
gctgctgccgctaaacaacatgtaa

SEQ ID NO: 1820966 - DNA, 25 bp, Homo sapien
catatattaagccagcgtgcgtgtg

SEQ ID NO: 1820967 - DNA, 25 bp, Homo sapien
gggtcacggagatacaagccactct

SEQ ID NO: 1820968 - DNA, 25 bp, Homo sapien
gtgctgctggttgccacagcaacac

SEQ ID NO: 1820969 - DNA, 25 bp, Homo sapien
tatgtgctgctggttgccacagcaa

SEQ ID NO: 1820970 - DNA, 25 bp, Homo sapien
ctatgtgctgctggttgccacagca

SEQ ID NO: 1820971 - DNA, 25 bp, Homo sapien
tgtgctgctggttgccacagcaaca

SEQ ID NO: 1820972 - DNA, 25 bp, Homo sapien
ttatagatctgtggcattaagttca

SEQ ID NO: 1820973 - DNA, 25 bp, Homo sapien
tgtggcattaagttcataagattca

SEQ ID NO: 1820974 - DNA, 25 bp, Homo sapien
gatctgtggcattaagttcataaga

SEQ ID NO: 1820975 - DNA, 25 bp, Homo sapien
tagatctgtggcattaagttcataa

SEQ ID NO: 1820976 - DNA, 25 bp, Homo sapien
gagaggtatcctccactgcgctggt

SEQ ID NO: 1820977 - DNA, 25 bp, Homo sapien
tcatgtggggtagccgagatctcct

SEQ ID NO: 1820978 - DNA, 25 bp, Homo sapien
ggtgtggagagaggtatcctccact

SEQ ID NO: 1820979 - DNA, 25 bp, Homo sapien
gtatcctccactgcgctggtctttc

SEQ ID NO: 1820980 - DNA, 25 bp, Homo sapien
ggtttgcttagccaatgcagtgaag

SEQ ID NO: 1820981 - DNA, 25 bp, Homo sapien
tcagcaatctccgtagtggggaggg

SEQ ID NO: 1820982 - DNA, 25 bp, Homo sapien
aggggtggtttgcttagccaatgca

SEQ ID NO: 1820983 - DNA, 25 bp, Homo sapien
gtggtttgcttagccaatgcagtga

SEQ ID NO: 1820984 - DNA, 25 bp, Homo sapien
cgtccagtaccatcagcacagcttc

SEQ ID NO: 1820985 - DNA, 25 bp, Homo sapien
cttgggcacagagccatcgcttcct

SEQ ID NO: 1820986 - DNA, 25 bp, Homo sapien
cagcttcctgatcgccttccaaagg

SEQ ID NO: 1820987 - DNA, 25 bp, Homo sapien
agcagctgcccgtccagtaccatca

SEQ ID NO: 1820988 - DNA, 25 bp, Homo sapien
tcataaggaggtggggacgacacat

SEQ ID NO: 1820989 - DNA, 25 bp, Homo sapien
tactctccaactgttcatcagaaca

SEQ ID NO: 1820990 - DNA, 25 bp, Homo sapien
cagaacacttcaacagcgacatcag

SEQ ID NO: 1820991 - DNA, 25 bp, Homo sapien
gggacgacacattactctccaactg

SEQ ID NO: 1820992 - DNA, 25 bp, Homo sapien
ttcttcttgccacctggagcctgca

SEQ ID NO: 1820993 - DNA, 25 bp, Homo sapien
tcttcttgccacctggagcctgcat

SEQ ID NO: 1820994 - DNA, 25 bp, Homo sapien
cttcttcttgccacctggagcctgc

SEQ ID NO: 1820995 - DNA, 25 bp, Homo sapien
tctgacccgcttcatttccacctgg

SEQ ID NO: 1820996 - DNA, 25 bp, Homo sapien
gagttctgacccgcttcatttccac

SEQ ID NO: 1820997 - DNA, 25 bp, Homo sapien
atactgaatttagtgtacacacctg

SEQ ID NO: 1820998 - DNA, 25 bp, Homo sapien
ttctgacccgcttcatttccacctg

SEQ ID NO: 1820999 - DNA, 25 bp, Homo sapien
gagccccagtgtcgtgccggagcgg

SEQ ID NO: 1821000 - DNA, 25 bp, Homo sapien
ggagccccagtgtcgtgccggagcg

SEQ ID NO: 1821001 - DNA, 25 bp, Homo sapien
gccccagtgtcgtgccggagcggct

SEQ ID NO: 1821002 - DNA, 25 bp, Homo sapien
aggagccccagtgtcgtgccggagc

SEQ ID NO: 1821003 - DNA, 25 bp, Homo sapien
tacgtggcagccacatgtttccaca

SEQ ID NO: 1821004 - DNA, 25 bp, Homo sapien
gtggcagccacatgtttccacagct

SEQ ID NO: 1821005 - DNA, 25 bp, Homo sapien
agcagccagcaggcgcctcctatgt

SEQ ID NO: 1821006 - DNA, 25 bp, Homo sapien
agcctacgtggcagccacatgtttc

SEQ ID NO: 1821007 - DNA, 25 bp, Homo sapien
gcctgctttggctaccctcctatct

SEQ ID NO: 1821008 - DNA, 25 bp, Homo sapien
ctgtgcctgctttggctaccctcct

SEQ ID NO: 1821009 - DNA, 25 bp, Homo sapien
tgtgcctgctttggctaccctccta

SEQ ID NO: 1821010 - DNA, 25 bp, Homo sapien
gctttggctaccctcctatctccca

SEQ ID NO: 1821011 - DNA, 25 bp, Homo sapien
tccacttgagagtattggaatggac

SEQ ID NO: 1821012 - DNA, 25 bp, Homo sapien
cactcagttttgatccacttgagag

SEQ ID NO: 1821013 - DNA, 25 bp, Homo sapien
tattggaatggaccgtgctctctcc

SEQ ID NO: 1821014 - DNA, 25 bp, Homo sapien
gtacaccaagttccactcagttttg

SEQ ID NO: 1821015 - DNA, 25 bp, Homo sapien
tccagctgcccatggttcttactaa

SEQ ID NO: 1821016 - DNA, 25 bp, Homo sapien
ggacaggagatggtccctcacctcc

SEQ ID NO: 1821017 - DNA, 25 bp, Homo sapien
gcccttctgaagtatggggacagga

SEQ ID NO: 1821018 - DNA, 25 bp, Homo sapien
ctttcccaggcccttctgaagtatg

SEQ ID NO: 1821019 - DNA, 25 bp, Homo sapien
gtcccacgctcacaaatagcataag

SEQ ID NO: 1821020 - DNA, 25 bp, Homo sapien
tgccacgtcccacgctcacaaatag

SEQ ID NO: 1821021 - DNA, 25 bp, Homo sapien
tcacaaatagcataagaagcccttt

SEQ ID NO: 1821022 - DNA, 25 bp, Homo sapien
cacgctcacaaatagcataagaagc

SEQ ID NO: 1821023 - DNA, 25 bp, Homo sapien
tcaccaagttaaagaatggcagggc

SEQ ID NO: 1821024 - DNA, 25 bp, Homo sapien
tcagaaagtcagttgctatccaagt

SEQ ID NO: 1821025 - DNA, 25 bp, Homo sapien
tgcaacctcacatggagagtcccgg

SEQ ID NO: 1821026 - DNA, 25 bp, Homo sapien
tggacttccgatgctcagtgaggcg

SEQ ID NO: 1821027 - DNA, 25 bp, Homo sapien
cgatgaaggcactggtaattttacc

SEQ ID NO: 1821028 - DNA, 25 bp, Homo sapien
gatttatttacttcgatgaaggcac

SEQ ID NO: 1821029 - DNA, 25 bp, Homo sapien
tttacttcgatgaaggcactggtaa

SEQ ID NO: 1821030 - DNA, 25 bp, Homo sapien
cacagatttatttacttcgatgaag

SEQ ID NO: 1821031 - DNA, 25 bp, Homo sapien
caattccaaagctatgaagtggttc

SEQ ID NO: 1821032 - DNA, 25 bp, Homo sapien
ttccaaagctatgaagtggttcctt

SEQ ID NO: 1821033 - DNA, 25 bp, Homo sapien
gctatgaagtggttccttcttatgc

SEQ ID NO: 1821034 - DNA, 25 bp, Homo sapien
caaagctatgaagtggttccttctt

SEQ ID NO: 1821035 - DNA, 25 bp, Homo sapien
gaaagtttgtttggccatccatccc

SEQ ID NO: 1821036 - DNA, 25 bp, Homo sapien
ctagagctccagaatccgattgtgt

SEQ ID NO: 1821037 - DNA, 25 bp, Homo sapien
cagtgtgtgccgcaggcctcgatgt

SEQ ID NO: 1821038 - DNA, 25 bp, Homo sapien
gcaggcctcgatgtgtgctgtgcat

SEQ ID NO: 1821039 - DNA, 25 bp, Homo sapien
gaacttgtgatatgaaatattgctt

SEQ ID NO: 1821040 - DNA, 25 bp, Homo sapien
tcagagcaaactgtctgtcagcagc

SEQ ID NO: 1821041 - DNA, 25 bp, Homo sapien
cgtctggtgaagaacagtcagagca

SEQ ID NO: 1821042 - DNA, 25 bp, Homo sapien
cagcagctgaacttgtgatatgaaa

SEQ ID NO: 1821043 - DNA, 25 bp, Homo sapien
ctgggactagcgagaccggcagggc

SEQ ID NO: 1821044 - DNA, 25 bp, Homo sapien
cggcagggctttgcgcggtccttaa

SEQ ID NO: 1821045 - DNA, 25 bp, Homo sapien
actagcgagaccggcagggctttgc

SEQ ID NO: 1821046 - DNA, 25 bp, Homo sapien
tgcgcggtccttaagacccggaaca

SEQ ID NO: 1821047 - DNA, 25 bp, Homo sapien
cacacctcgtagcccccgccggcgg

SEQ ID NO: 1821048 - DNA, 25 bp, Homo sapien
cctgcctctccaggcggcgtccccc

SEQ ID NO: 1821049 - DNA, 25 bp, Homo sapien
tgaccccggggtcaccttcacactc

SEQ ID NO: 1821050 - DNA, 25 bp, Homo sapien
tctccaggcggcgtcccccgagggc

SEQ ID NO: 1821051 - DNA, 25 bp, Homo sapien
cctgcgcccgcgaggagcccaggtt

SEQ ID NO: 1821052 - DNA, 25 bp, Homo sapien
aggtttccagcggagttgggctggg

SEQ ID NO: 1821053 - DNA, 25 bp, Homo sapien
tgcgcccgcgaggagcccaggtttc

SEQ ID NO: 1821054 - DNA, 25 bp, Homo sapien
gcccaggtttccagcggagttgggc

SEQ ID NO: 1821055 - DNA, 25 bp, Homo sapien
cacttagttcatacaaaggtttgaa

SEQ ID NO: 1821056 - DNA, 25 bp, Homo sapien
catacaaaggtttgaagctgatatc

SEQ ID NO: 1821057 - DNA, 25 bp, Homo sapien
ttcatacaaaggtttgaagctgata

SEQ ID NO: 1821058 - DNA, 25 bp, Homo sapien
tagttcatacaaaggtttgaagctg

SEQ ID NO: 1821059 - DNA, 25 bp, Homo sapien
tttgcttttgtatatgatggacggt

SEQ ID NO: 1821060 - DNA, 25 bp, Homo sapien
gatagtggtgctcaaagttgttttt

SEQ ID NO: 1821061 - DNA, 25 bp, Homo sapien
tatgatggacggtcattgatagtgg

SEQ ID NO: 1821062 - DNA, 25 bp, Homo sapien
tcattgatagtggtgctcaaagttg

SEQ ID NO: 1821063 - DNA, 25 bp, Homo sapien
ggccatgtccatggcctataaccag

SEQ ID NO: 1821064 - DNA, 25 bp, Homo sapien
tataaccagattggcagatgtctgt

SEQ ID NO: 1821065 - DNA, 25 bp, Homo sapien
gaaatattagtatcaaggccatgtc

SEQ ID NO: 1821066 - DNA, 25 bp, Homo sapien
tcagaaatattagtatcaaggccat

SEQ ID NO: 1821067 - DNA, 25 bp, Homo sapien
tcaagcaacttgagatgccagaaca

SEQ ID NO: 1821068 - DNA, 25 bp, Homo sapien
caagcaacttgagatgccagaacac

SEQ ID NO: 1821069 - DNA, 25 bp, Homo sapien
gttccagggatctgtaccaatgcca

SEQ ID NO: 1821070 - DNA, 25 bp, Homo sapien
ttccagggatctgtaccaatgccat

SEQ ID NO: 1821071 - DNA, 25 bp, Homo sapien
gggttccagggatctgtaccaatgc

SEQ ID NO: 1821072 - DNA, 25 bp, Homo sapien
gcagggttccagggatctgtaccaa

SEQ ID NO: 1821073 - DNA, 25 bp, Homo sapien
cccgctggccggtatgcattttgaa

SEQ ID NO: 1821074 - DNA, 25 bp, Homo sapien
tgatgtccacaaccatgaccgaggt

SEQ ID NO: 1821075 - DNA, 25 bp, Homo sapien
gactcatttaataggtgggctctgg

SEQ ID NO: 1821076 - DNA, 25 bp, Homo sapien
tcaaggcagcaccacctttcagggt

SEQ ID NO: 1821077 - DNA, 25 bp, Homo sapien
cctgaacagctggtttgactgccaa

SEQ ID NO: 1821078 - DNA, 25 bp, Homo sapien
catttcgaggaactgccaagctatt

SEQ ID NO: 1821079 - DNA, 25 bp, Homo sapien
ccttgcctggtctacactgttgttg

SEQ ID NO: 1821080 - DNA, 25 bp, Homo sapien
tggtttagatagcatgactcctgaa

SEQ ID NO: 1821081 - DNA, 25 bp, Homo sapien
ggcagttccccgctgaagcatcctt

SEQ ID NO: 1821082 - DNA, 25 bp, Homo sapien
agttccccgctgaagcatcctttgt

SEQ ID NO: 1821083 - DNA, 25 bp, Homo sapien
tccccgctgaagcatcctttgtggg

SEQ ID NO: 1821084 - DNA, 25 bp, Homo sapien
gcggccacggcagttccccgctgaa

SEQ ID NO: 1821085 - DNA, 25 bp, Homo sapien
acactcagggcggcagcccgagtaa

SEQ ID NO: 1821086 - DNA, 25 bp, Homo sapien
ttgagtttgttagacggcgagcaca

SEQ ID NO: 1821087 - DNA, 25 bp, Homo sapien
cccgggagagaaacggctcgaagct

SEQ ID NO: 1821088 - DNA, 25 bp, Homo sapien
agcccgagtaagaaggatggccccg

SEQ ID NO: 1821089 - DNA, 25 bp, Homo sapien
tgaactttgcacatccagaaacgcc

SEQ ID NO: 1821090 - DNA, 25 bp, Homo sapien
gactcgcaggagcaacacgtgatgt

SEQ ID NO: 1821091 - DNA, 25 bp, Homo sapien
actgcggtcaccctgctaaagtcgg

SEQ ID NO: 1821092 - DNA, 25 bp, Homo sapien
tcgcaattccgaggcatcaccgtgt

SEQ ID NO: 1821093 - DNA, 25 bp, Homo sapien
ccagggagccaagcgtcctgcccgg

SEQ ID NO: 1821094 - DNA, 25 bp, Homo sapien
cggtccccaacgcatcatgccaggg

SEQ ID NO: 1821095 - DNA, 25 bp, Homo sapien
gtccccaacgcatcatgccagggag

SEQ ID NO: 1821096 - DNA, 25 bp, Homo sapien
gccaagcgtcctgcccggccgtaag

SEQ ID NO: 1821097 - DNA, 25 bp, Homo sapien
gtgccccggattccgactcgcggta

SEQ ID NO: 1821098 - DNA, 25 bp, Homo sapien
acgccggcggcagcgagaagtctgg

SEQ ID NO: 1821099 - DNA, 25 bp, Homo sapien
ggtacgccggcggcagcgagaagtc

SEQ ID NO: 1821100 - DNA, 25 bp, Homo sapien
cggattccgactcgcggtacgccgg

SEQ ID NO: 1821101 - DNA, 25 bp, Homo sapien
tgaagtctgcagagcgcgttgtact

SEQ ID NO: 1821102 - DNA, 25 bp, Homo sapien
tgtacttttgaaactcggtgtgtcc

SEQ ID NO: 1821103 - DNA, 25 bp, Homo sapien
gcagagcgcgttgtacttttgaaac
